United States Patent Application Publication US 2011/0183924 A1 - sequence listing, part 38

SEQ ID NO: 88325 - DNA, 406 bp, Homo sapiens
gtttttaatcttcatattattaagatgcataataatattttacagatgaagaattgagattcagagtggataagtgctttattagtaaatgacaaaggaaagatccaattctaggatctgaattctgaaccattatcttatactgagcaaaaacaaaaaacaaaaaacaaaaaacctgctgagaactaaggaggaattttccaaagtcacagaagccagtggtggctgagccaggacaagaggctacatgtcctacttcagtcgccagccccaagtcaagcagatttgaccatcttctcaccaccaccccaatctacccccaacagaaccttcagatgggttcagagagagaggaggcgttaatgtgtcaactctctatgtctgggccttgccttttgcccaggaa

SEQ ID NO: 88326 - DNA, 1757 bp, Homo sapiens
tctagagatcccccaggtcttttcccccaaacacacatacaaagctgagctatccaggaacacaagggaaacaaggagattgtccagggtgggagcggaggcagcgggggaagaagactggaagcagagacctccccccttgtggggggcagactggcacaacagctactttagtgcaattggagagggtgcccagagtgagaggtggagaagggagggaaggcggtccccaacttccctgggggcaaagtcaggcttccagattccccagggaaagggcctagcaggagtgggtgagggccaaggtggatcctctggttacccgccaccctctgccctcccaaatgcagtgacagtgtccccctcacacctaagtgggcaacagcagccttggagtcagtaccttcaagtaattcaaagagcagaccctccccaccccagcttcaccccatctctgggatttggtcgcttctctaggggttgggttgggaggagggagcccccaaggcagacccttccctctctacctcccgattcccagaccactgggcttggtcctcaaagattcctcacctccgcccttgcccaacctgggtcaaggctgcagaaggctggagccaccacaattagaggggaaggggctgctttgttccttatccctccttcttaaaaggtagggttcaaactaggcgggatgggggcccatactggtttgccccaggagtagggtttctgggctagggtctgtaaggctattttcctttgcggtgggaaggggaggtaggggatgaacactgggtatgggaagtgggtgagaaatggctgagagggaaggaggaaggggcctccccgctggagcagtcactggagtcatttagacaaaaacactcatgtgcataagatacacagtgcgcaaactcagccctgccagcccggccccaatcccacctctcaggactccttccaagaccctggaggaggttctggggatacagctgtagaaccgttcactctggccccatccaccccacctccagcctcttctccccttctaggtccagggagtaagaaggtgctcgggtgggcagacagtggtggaaacagtattgagttttcctttggttacatattgaaggcaaaggtgagctggacttacagtcaaaacggataggggtgaggaaggaagaggggccatggctggggttggagagggaggtaggccctcctcagcccctccaccccaagaaacacatctacgtggggtggcagtccctcagtcttttctctcccacgccccacagcaccaaacaaaaggagaagccccctcccccaggggctgctccccaccccaacctgggctgtacattcagtggttttcagcagtcctatggctcagggggccacggggcaggggaggtggcccgtcagtctcagtggacagtggcagtgacccgggtctgctggtccttcctgggacccacggtttgtgccattcgtttttctgaaggatagtatatgaccctaccagagccaccgcccaatcagaaatagctcccccaaaatcagaaactaaaaactggctctttccatctcaccctctgattcacacgtctgtttccctgtctcctatgtcgccctcgctctgtttcctttgctgggacctggggctgctcccagggtcctcgcttaaaataggccttttcacaaaagtgcttattacttgaagcaagtgtataggctagcgtgggtgagaggac

SEQ ID NO: 88327 - DNA, 477 bp, Homo sapiens
tttgaaggatggggtgtgatagggtacagaagtggggaaaaagctccaggccccagtgctaaatatcctcccccctcatcctctagctgcccctgaaggggggagggggacacccccagagtgctcacacagtaccagaaattaaggcttctcactgctgcggggatggagggaccggccgagcagggaggcagtgatgggtatggaagaagaggggatctgcctggcagtaggggcaggggagaagggggacacagagaggagtccccagggaagagtcgggggagctggcagcagaaagagggaaccaagagatggagtcaaagagtgggggagccaggcatttagcaatcattttgggacacttggcagaaggggtcgccctgggggtaccaagggcctggggtgctccctgtcagtcccagacccctgccaggccaagatggtgtggcaaaggggtgagcagctgctccccag

SEQ ID NO: 88328 - DNA, 3726 bp, Homo sapiens
agaggaccgtcgaccgcacgctagtcaccaggagggatgccctcctatttcagagatgctgcaggcgaaaacgaaggaatctcgaaacacgcaacttggatccggagaatggcagtgggatggcccttcagcccctacaggcagctccagagccaggggctcagggccagagggagaagaacagccagcacccaccagctctggcccctcctgggcaccaaggccacagtcatgggcaccagggtggcactgatatcacgtggatggtcctcctgggagatggtctacacaacctcactgatgggctggccataggtgctgccttctctgatggcttctccagcggcctcagtaccaccttagcggtcttctgccatgagctgccccacgaactgggtgactttgccatgctgctccagtcagggctgtcctttcggcggctgctgctgctgagcctcgtgtctggagccctgggattggggggtgcagtcctgggggtggggctcagcctgggccctgtccccctcactccctgggtgtttggggtcactgctggggtcttcctctatgtggcccttgtggacatggtgagagatgtcgggtagagcagagaaatcaagggcagtggggaggcgggagtggagagggaggtagcagtccctccgcctctaccattagctcctggaagggcgtcagaccataggcccgcaaaagtctgagaaacaagggactaaggtgtttgggtgggggctgctgatgctttctgacaccattcctctggagttgagaggtcaggggcaaggccagaatcctgacatcctctttttctttcagctaccagccctgcttcgtcctccggagcccctgcctacgccccatgtgctcctgcaggggctggggctgctgctggggggcggcctcatgcttgccataaccctgctggaggagcggctactgcccgtgaccactgagggctgatggggccagtggaaaggggtcgggttgcccttccttccccccaaccacaggaatggaggcgggacacagggccagtaggagcaataggattttaataaacagaacccatcccaaagccatgactacgacagttgtacttgcaccaaaacagcatagaaaaccagagtgtggtgggaggacccgaagccggttgggggaggatgtgagtaggggcctggagggtgcagggtcattaatctgcggggagaacattgtgctttagcccagggaggggaggggtggggcaaatgcaccgaggtccccactttttcctgctgccctcggcaccctggggatgcaggcatctgggcacatctgccccttattgctgcccaccagcgttaaacgcccccgatcccaacactagcaccacaggtggttccggggcagggagaggcaggaatgggaaaattgcttagagaaagattccactagaatccagtgaattgtgctcagttctctttacttcctacaaccgagtacatgggtcacagggtggagggtgcaacaggacatggaacatgcccctccgtgccccccaacacacacctgcacacaggatggtggtgtctgcagcatcacaggtcatgcagggcatggggaaggggaggttcacacacacatagatgcccacagcgggtaccagacggagaacacccctgaatatacatagctgtacatggggaacccccaggtccccaccccaaccctctcccctgtcttgctgtcccccgcaggggaactatattgctttgagagagccaccccaggggctgctctgccaggcaccctcccctcccacccacccccattttggcacatctgcaagacacacagcagcgagagtaggcaccctcccttcccaggcttctgtggcctggagctggagaagggggtaggagacttcatcctccatcctcccctaacccttcccaaacccctgccaaacccactcaagccagaacccacccccaccccccaaacacacatacaaagctgagctatccaggaacacaagggaaacaaggagattgtccagggtgggagcggaggcagcgggggaagaagactggaagcagagacctccccccttgtggggggcagactggcacaacagctactttagtgcaattggagagggtgcccagagtgagaggtggagaagggagggaaggcggtccccaacttccctgggggcaaagtcaggcttccagattccccagggaaagggcctagcaggagtgggtgagggccaaggtggatcctctggttacccgccaccctctgccctcccaaatgcagtgacagtgtccccctcacacctaagtgggcaacagcagccttggagtcagtaccttcaagtaattcaaagagcagaccctccccaccccagcttcaccccatctctgggatttggtcgcttctctaggggttgggttgggaggagggagcccccaaggcagacccttccctctctacctcccgattcccagaccactgggcttggtcctcaaagattcctcacctccgcccttgcccaacctgggtcaaggctgcagaaggctggagccaccacaattagaggggaaggggctgctttgttccttatccctccttcttaaaaggtagggttcaaactaggcgggatgggggcccatactggtttgccccaggagtagggtttctgggctagggtctgtaaggctattttcctttgcggtgggaaggggaggtaggggatgaacactgggtatgggaagtgggtgagaaatggctgagagggaaggaggaaggggcctccccgctggagcagtcactggagtcatttagacaaaaacactcatgtgcataagatacacagtgcgcaaactcagccctgccagcccggccccaatcccacctctcaggactccttccaagaccctggaggaggttctggggatacagctgtagaaccgttcactctggccccatccaccccacctccagcctcttctccccttctaggtccagggagtaagaaggtgctcgggtgggcagacagtggtggaaacagtattgagttttcctttggttacatattgaaggcaaaggtgagctggacttacagtcaaaacggataggggtgaggaaggaagaggggccatggctggggttggagagggaggtaggccctcctcagcccctccaccccaagaaacacatctacgtggggtggcagtccctcagtcttttctctcccacgccccacagcaccaaacaaaaggagaagccccctcccccaggggctgctccccaccccaacctgggctgtacattcagtggttttcagcagtcctatggctcagggggccacggggcaggggaggtggcccgtcagtctcagtggacagtggcagtgacccgggtctgctggtccttcctgggacccacggtttgtgccattcgtttttctgaaggatagtatatgaccctaccagagccaccgcccaatcagaaatagctcccccaaaatcagaaactaaaaactggctctttccatctcaccctctgattcacacgtctgtttccctgtctcctatgtcgccctcgctctgtttcctttgctgggacctggggctgctcccagggtcctcgcttaaaataggccttttcacaaaagtgcttattacttgaagcaagtgtataggctagcgtgggtgagaggac

SEQ ID NO: 88329 - DNA, 2290 bp, Homo sapiens
agaggaccgtcgaccgcacgctagtcaccaggagggatgccctcctatttcagagatgctgcaggcgaaaacgaaggaatctcgaaacacgcaacttggatccggagaatggcagtgggatggcccttcagcccctacaggcagctccagagccaggggctcagggccagagggagaagaacagccagcacccaccagctctggcccctcctgggcaccaaggccacagtcatgggcaccagggtggcactgatatcacgtggatggtcctcctgggagatggtctacacaacctcactgatgggctggccataggtgctgccttctctgatggcttctccagcggcctcagtaccaccttagcggtcttctgccatgagctgccccacgaactgggtgactttgccatgctgctccagtcagggctgtcctttcggcggctgctgctgctgagcctcgtgtctggagccctgggattggggggtgcagtcctgggggtggggctcagcctgggccctgtccccctcactccctgggtgtttggggtcactgctggggtcttcctctatgtggcccttgtggacatgctaccagccctgcttcgtcctccggagcccctgcctacgccccatgtgctcctgcaggggctggggctgctgctggggggcggcctcatgcttgccataaccctgctggaggagcggctactgcccgtgaccactgagggctgatggggccagtggaaaggggtcgggttgcccttccttccccccaaccacaggaatggaggcgggacacagggccagtaggagcaataggattttaataaacagaacccatcccaaagccatgactacgacagttgtacttgcaccaaaacagcatagaaaaccagagtgtggtgggaggacccgaagccggttgggggaggatgtgagtaggggcctggagggtgcagggtcattaatctgcggggagaacattgtgctttagcccagggaggggaggggtggggcaaatgcaccgaggtccccactttttcctgctgccctcggcaccctggggatgcaggcatctgggcacatctgccccttattgctgcccaccagcgttaaacgcccccgatcccaacactagcaccacaggtggttccggggcagggagaggcaggaatgggaaaattgcttagagaaagattccactagaatccagtgaattgtgctcagttctctttacttcctacaaccgagtacatgggtcacagggtggagggtgcaacaggacatggaacatgcccctccgtgccccccaacacacacctgcacacaggatggtggtgtctgcagcatcacaggtcatgcagggcatggggaaggggaggttcacacacacatagatgcccacagcgggtaccagacggagaacacccctgaatatacatagctgtacatggggaacccccaggtccccaccccaaccctctcccctgtcttgctgtcccccgcaggggaactatattgctttgagagagccaccccaggggctgctctgccaggcaccctcccctcccacccacccccattttggcacatctgcaagacacacagcagcgagagtaggcaccctcccttcccaggcttctgtggcctggagctggagaagggggtaggagacttcatcctccatcctcccctaacccttcccaaacccctgccaaacccactcaagccagaacccacccccaccccccaaacacacatacaaagctgagctatccaggaacacaagggaaacaaggagattgtccagggtgggagcggaggcagcgggggaagaagactggaagcagagacctccccccttgtggggggcagactggcacaacagctactttagtgcaattggagagggtgcccagagtgagaggtggagaagggagggaaggcggtccccaacttccctgggggcaaagtcaggcttccagattccccagggaaagggcctagcaggagtgggtgagggccaaggtggatcctctggttacccgccaccctctgccctcccaaatgcagtgacagtgtccccctcacacctaagtgggcaacagcagccttggagtcagtaccttcaagtaattcaaagagcagaccctccccaccccagcttcaccccatctctgggatttggtcgcttctcctgggaatgggctatcaattgatagccctatcccaggaaggaaaacgatacgaaccagacgatgaggaagtgttccttctcctgggataagcta

SEQ ID NO: 88330 - DNA, 3429 bp, Homo sapiens
agaggaccgtcgaccgcacgctagtcaccaggagggatgccctcctatttcagagatgctgcaggcgaaaacgaaggaatctcgaaacacgcaacttggatccggagaatggcagtgggatggcccttcagcccctacaggcagctccagagccaggggctcagggccagagggagaagaacagccagcacccaccagctctggcccctcctgggcaccaaggccacagtcatgggcaccagggtggcactgatatcacgtggatggtcctcctgggagatggtctacacaacctcactgatgggctggccataggtgctgccttctctgatggcttctccagcggcctcagtaccaccttagcggtcttctgccatgagctgccccacgaactgggtgactttgccatgctgctccagtcagggctgtcctttcggcggctgctgctgctgagcctcgtgtctggagccctgggattggggggtgcagtcctgggggtggggctcagcctgggccctgtccccctcactccctgggtgtttggggtcactgctggggtcttcctctatgtggcccttgtggacatgctaccagccctgcttcgtcctccggagcccctgcctacgccccatgtgctcctgcaggggctggggctgctgctggggggcggcctcatgcttgccataaccctgctggaggagcggctactgcccgtgaccactgagggctgatggggccagtggaaaggggtcgggttgcccttccttccccccaaccacaggaatggaggcgggacacagggccagtaggagcaataggattttaataaacagaacccatcccaaagccatgactacgacagttgtacttgcaccaaaacagcatagaaaaccagagtgtgggtgcagggtcattaatctgcggggagaacattgtgctttagcccagggaggggaggggtggggcaaatgcaccgaggtccccactttttcctgctgccctcggcaccctggggatgcaggcatctgggcacatctgccccttattgctgcccaccagcgttaaacgcccccgatcccaacactagcaccacaggtggttccggggcagggagaggcaggaatgggaaaattgcttagagaaagattccactagaatccagtgaattgtgctcagttctctttacttcctacaaccgagtacatgggtcacagggtggagggtgcaacaggacatggaacatgcccctccgtgccccccaacacacacctgcacacaggatggtggtgtctgcagcatcacaggtcatgcagggcatggggaaggggaggttcacacacacatagatgcccacagcgggtaccagacggagaacacccctgaatatacatagctgtacatggggaacccccaggtccccaccccaaccctctcccctgtcttgctgtcccccgcaggggaactatattgctttgagagagccaccccaggggctgctctgccaggcaccctcccctcccacccacccccattttggcacatctgcaagacacacagcagcgagagtaggcaccctcccttcccaggcttctgtggcctggagctggagaagggggtaggagacttcatcctccatcctcccctaacccttcccaaacccctgccaaacccactcaagccagaacccacccccaccccccaaacacacatacaaagctgagctatccaggaacacaagggaaacaaggagattgtccagggtgggagcggaggcagcgggggaagaagactggaagcagagacctccccccttgtggggggcagactggcacaacagctactttagtgcaattggagagggtgcccagagtgagaggtggagaagggagggaaggcggtccccaacttccctgggggcaaagtcaggcttccagattccccagggaaagggcctagcaggagtgggtgagggccaaggtggatcctctggttacccgccaccctctgccctcccaaatgcagtgacagtgtccccctcacacctaagtgggcaacagcagccttggagtcagtaccttcaagtaattcaaagagcagaccctccccaccccagcttcaccccatctctgggatttggtcgcttctctaggggttgggttgggaggagggagcccccaaggcagacccttccctctctacctcccgattcccagaccactgggcttggtcctcaaagattcctcacctccgcccttgcccaacctgggtcaaggctgcagaaggctggagccaccacaattagaggggaaggggctgctttgttccttatccctccttcttaaaaggtagggttcaaactaggcgggatgggggcccatactggtttgccccaggagtagggtttctgggctagggtctgtaaggctattttcctttgcggtgggaaggggaggtaggggatgaacactgggtatgggaagtgggtgagaaatggctgagagggaaggaggaaggggcctccccgctggagcagtcactggagtcatttagacaaaaacactcatgtgcataagatacacagtgcgcaaactcagccctgccagcccggccccaatcccacctctcaggactccttccaagaccctggaggaggttctggggatacagctgtagaaccgttcactctggccccatccaccccacctccagcctcttctccccttctaggtccagggagtaagaaggtgctcgggtgggcagacagtggtggaaacagtattgagttttcctttggttacatattgaaggcaaaggtgagctggacttacagtcaaaacggataggggtgaggaaggaagaggggccatggctggggttggagagggaggtaggccctcctcagcccctccaccccaagaaacacatctacgtggggtggcagtccctcagtcttttctctcccacgccccacagcaccaaacaaaaggagaagccccctcccccaggggctgctccccaccccaacctgggctgtacattcagtggttttcagcagtcctatggctcagggggccacggggcaggggaggtggcccgtcagtctcagtggacagtggcagtgacccgggtctgctggtccttcctgggacccacggtttgtgccattcgtttttctgaaggatagtatatgaccctaccagagccaccgcccaatcagaaatagctcccccaaaatcagaaactaaaaactggctctttccatctcaccctctgattcacacgtctgtttccctgtctcctatgtcgccctcgctctgtttcctttgctgggacctggggctgctcccagggtcctcgcttaaaataggccttttcacaaaagtgcttattacttgaagcaagtgtataggctagcgtgggtgagaggac

SEQ ID NO: 88331 - DNA, 1579 bp, Homo sapiens
agaggaccgtcgaccgcacgctagtcaccaggagggatgccctcctatttcagagatgctgcaggcgaaaacgaaggaatctcgaaacacgcaacttggatccggagaatggcagtgggatggcccttcagcccctacaggcagctccagagccaggggctcagggccagagggagaagaacagccagcacccaccagctctggcccctcctgggcaccaaggccacagtcatgggcaccagggtggcactgatatcacgtggatggtcctcctgggagatggtctacacaacctcactgatgggctggccataggtgctgccttctctgatggcttctccagcggcctcagtaccaccttagcggtcttctgccatgagctgccccacgaactgggtgactttgccatgctgctccagtcagggctgtcctttcggcggctgctgctgctgagcctcgtgtctggagccctgggattggggggtgcagtcctgggggtggggctcagcctgggccctgtccccctcactccctgggtgtttggggtcactgctggggtcttcctctatgtggcccttgtggacatgctaccagccctgcttcgtcctccggagcccctgcctacgccccatgtgctcctgcaggggctggggctgctgctggggggcggcctcatgcttgccataaccctgctggaggagcggctactgcccgtgaccactgagggctgatggggccagtggaaaggggtcgggttgcccttccttccccccaaccacaggaatggaggcgggacacagggccagtaggagcaataggattttaataaacagaacccatcccaaagccatgactacgacagttgtacttgcaccaaaacagcatagaaaaccagagtgtggtgggaggacccgaagccggttgggggaggatgtgagtaggggcctggagggtgcagggtcattaatctgcggggagaacattgtgctttagcccagggaggggaggggtggggcaaatgcaccgaggtccccactttttcctgctgccctcggcaccctggggatgcaggcatctgggcacatctgccccttattgctgcccaccagcgttaaacgcccccgatcccaacactagcaccacaggtggttccggggcagggagaggcaggaatgggaaaattgcttagagaaagattccactagaatccagtgaattgtgctcagttctctttacttcctacaaccgagtacatgggtcacagggtggagggtgcaacaggacatggaacatgcccctccgtgccccccaacacacacctgcacacaggatggtggtgtctgcagcatcacaggtcatgcagggcatggggaaggggaggttcacacacacatagatgcccacagcgggtaccagacggagtcaaagagtgggggagccaggcatttagcaatcattttgggacacttggcagaaggggtcgccctgggggtaccaagggcctggggtgctccctgtcagtcccagacccctgccaggccaagatggtgtggcaaaggggtgagcagctgctccccag

SEQ ID NO: 88332 - DNA, 844 bp, Homo sapiens
agaggaccgtcgaccgcacgctagtcaccaggagggatgccctcctatttcagagatgctgcaggcgaaaacgaaggaatctcgaaacacgcaacttggatccggagaatggcagtgggatggcccttcagcccctacaggcagctccagagccaggggctcagggccagagggagaagaacagccagcacccaccagctctggcccctcctgggcaccaaggccacagtcatgggcaccagggtggcactgatatcacgtggatggtcctcctgggagatggtctacacaacctcactgatgggctggccataggtgctgccttctctgatggcttctccagcggcctcagtaccaccttagcggtcttctgccatgagctgccccacgaactgggtgactttgccatgctgctccagtcagggctgtcctttcggcggctgctgctgctgagcctcgtgtctggagccctgggattggggggtgcagtcctgggggtggggctcagcctgggccctgtccccctcactccctgggtgtttggggtcactgctggggtcttcctctatgtggcccttgtggacatgctaccagccctgcttcgtcctccggagcccctgcctacgccccatgtgctcctgcaggggctggggctgctgctggggggcggcctcatgcttgccataaccctgctggaggagcggctactgcccgtgaccactgagggctgatggggccagtggaaaggggtcgggttgcccttccttccccccaaccacaggaatggaggcgggacacagggccagtaggagcaataggattttaataaacagaacccatccca

SEQ ID NO: 88333 - DNA, 3479 bp, Homo sapiens
agaggaccgtcgaccgcacgctagtcaccaggagggatgccctcctatttcagagatgctgcaggcgaaaacgaaggaatctcgaaacacgcaacttggatccggagaatggcagtgggatggcccttcagcccctacaggcagctccagagccaggggctcagggccagagggagaagaacagccagcacccaccagctctggcccctcctgggcaccaaggccacagtcatgggcaccagggtggcactgatatcacgtggatggtcctcctgggagatggtctacacaacctcactgatgggctggccataggtgctgccttctctgatggcttctccagcggcctcagtaccaccttagcggtcttctgccatgagctgccccacgaactgggtgactttgccatgctgctccagtcagggctgtcctttcggcggctgctgctgctgagcctcgtgtctggagccctgggattggggggtgcagtcctgggggtggggctcagcctgggccctgtccccctcactccctgggtgtttggggtcactgctggggtcttcctctatgtggcccttgtggacatgctaccagccctgcttcgtcctccggagcccctgcctacgccccatgtgctcctgcaggggctggggctgctgctggggggcggcctcatgcttgccataaccctgctggaggagcggctactgcccgtgaccactgagggctgatggggccagtggaaaggggtcgggttgcccttccttccccccaaccacaggaatggaggcgggacacagggccagtaggagcaataggattttaataaacagaacccatcccaaagccatgactacgacagttgtacttgcaccaaaacagcatagaaaaccagagtgtggtgggaggacccgaagccggttgggggaggatgtgagtaggggcctggagggtgcagggtcattaatctgcggggagaacattgtgctttagcccagggaggggaggggtggggcaaatgcaccgaggtccccactttttcctgctgccctcggcaccctggggatgcaggcatctgggcacatctgccccttattgctgcccaccagcgttaaacgcccccgatcccaacactagcaccacaggtggttccggggcagggagaggcaggaatgggaaaattgcttagagaaagattccactagaatccagtgaattgtgctcagttctctttacttcctacaaccgagtacatgggtcacagggtggagggtgcaacaggacatggaacatgcccctccgtgccccccaacacacacctgcacacaggatggtggtgtctgcagcatcacaggtcatgcagggcatggggaaggggaggttcacacacacatagatgcccacagcgggtaccagacggagaacacccctgaatatacatagctgtacatggggaacccccaggtccccaccccaaccctctcccctgtcttgctgtcccccgcaggggaactatattgctttgagagagccaccccaggggctgctctgccaggcaccctcccctcccacccacccccattttggcacatctgcaagacacacagcagcgagagtaggcaccctcccttcccaggcttctgtggcctggagctggagaagggggtaggagacttcatcctccatcctcccctaacccttcccaaacccctgccaaacccactcaagccagaacccacccccaccccccaaacacacatacaaagctgagctatccaggaacacaagggaaacaaggagattgtccagggtgggagcggaggcagcgggggaagaagactggaagcagagacctccccccttgtggggggcagactggcacaacagctactttagtgcaattggagagggtgcccagagtgagaggtggagaagggagggaaggcggtccccaacttccctgggggcaaagtcaggcttccagattccccagggaaagggcctagcaggagtgggtgagggccaaggtggatcctctggttacccgccaccctctgccctcccaaatgcagtgacagtgtccccctcacacctaagtgggcaacagcagccttggagtcagtaccttcaagtaattcaaagagcagaccctccccaccccagcttcaccccatctctgggatttggtcgcttctctaggggttgggttgggaggagggagcccccaaggcagacccttccctctctacctcccgattcccagaccactgggcttggtcctcaaagattcctcacctccgcccttgcccaacctgggtcaaggctgcagaaggctggagccaccacaattagaggggaaggggctgctttgttccttatccctccttcttaaaaggtagggttcaaactaggcgggatgggggcccatactggtttgccccaggagtagggtttctgggctagggtctgtaaggctattttcctttgcggtgggaaggggaggtaggggatgaacactgggtatgggaagtgggtgagaaatggctgagagggaaggaggaaggggcctccccgctggagcagtcactggagtcatttagacaaaaacactcatgtgcataagatacacagtgcgcaaactcagccctgccagcccggccccaatcccacctctcaggactccttccaagaccctggaggaggttctggggatacagctgtagaaccgttcactctggccccatccaccccacctccagcctcttctccccttctaggtccagggagtaagaaggtgctcgggtgggcagacagtggtggaaacagtattgagttttcctttggttacatattgaaggcaaaggtgagctggacttacagtcaaaacggataggggtgaggaaggaagaggggccatggctggggttggagagggaggtaggccctcctcagcccctccaccccaagaaacacatctacgtggggtggcagtccctcagtcttttctctcccacgccccacagcaccaaacaaaaggagaagccccctcccccaggggctgctccccaccccaacctgggctgtacattcagtggttttcagcagtcctatggctcagggggccacggggcaggggaggtggcccgtcagtctcagtggacagtggcagtgacccgggtctgctggtccttcctgggacccacggtttgtgccattcgtttttctgaaggatagtatatgaccctaccagagccaccgcccaatcagaaatagctcccccaaaatcagaaactaaaaactggctctttccatctcaccctctgattcacacgtctgtttccctgtctcctatgtcgccctcgctctgtttcctttgctgggacctggggctgctcccagggtcctcgcttaaaataggccttttcacaaaagtgcttattacttgaagcaagtgtataggctagcgtgggtgagaggac

SEQ ID NO: 88334 - DNA, 2770 bp, Homo sapiens
agaggaccgtcgaccgcacgctagtcaccaggagggatgccctcctatttcagagatgctgcaggcgaaaacgaaggaatctcgaaacacgcaacttggatccggagaatggcagtgggatggcccttcagcccctacaggcagctccagagccaggggctcagggccagagggagaagaacagccagcacccaccagctctggcccctcctgggcaccaaggccacagtcatgggcaccagggtggcactgatatcacgtggatggtcctcctgggagatggtctacacaacctcactgatgggctggccataggtgctgccttctctgatggcttctccagcggcctcagtaccaccttagcggtcttctgccatgagctgccccacgaactgggtgactttgccatgctgctccagtcagggctgtcctttcggcggctgctgctgctgagcctcgtgtctggagccctgggattggggggtgcagtcctgggggtggggctcagcctgggccctgtccccctcactccctgggtgtttggggtcactgctggggtcttcctctatgtggcccttgtggacatgctaccagccctgcttcgtcctccggagcccctgcctacgccccatgtgctcctgcaggggctggggctgctgctggggggcggcctcatgcttgccataaccctgctggaggagcggctactgcccgtgaccactgagggctgatggggccagtggaaaggggtcgggttgcccttccttccccccaaccacaggaatggaggcgggacacagggccagtaggagcaataggattttaataaacagaacccatcccaaagccatgactacgacagttgtacttgcaccaaaacagcatagaaaaccagagtgtggtgggaggacccgaagccggttgggggaggatgtgagtaggggcctggagggtgcagggtcattaatctgcggggagaacattgtgctttagcccagggaggggaggggtggggcaaatgcaccgaggtccccactttttcctgctgccctcggcaccctggggatgcaggcatctgggcacatctgccccttattgctgcccaccagcgttaaacgcccccgatcccaacactagcaccacaggtggttccggggcagggagaggcaggaatgggaaaattgcttagagaaagattccactagaatccagtgaattgtgctcagttctctttacttcctacaaccgagtacatgggtcacagggtggagggtgcaacaggacatggaacatgcccctccgtgccccccaacacacacctgcacacaggatggtggtgtctgcagcatcacaggtcatgcagtgacagtgtccccctcacacctaagtgggcaacagcagccttggagtcagtaccttcaagtaattcaaagagcagaccctccccaccccagcttcaccccatctctgggatttggtcgcttctctaggggttgggttgggaggagggagcccccaaggcagacccttccctctctacctcccgattcccagaccactgggcttggtcctcaaagattcctcacctccgcccttgcccaacctgggtcaaggctgcagaaggctggagccaccacaattagaggggaaggggctgctttgttccttatccctccttcttaaaaggtagggttcaaactaggcgggatgggggcccatactggtttgccccaggagtagggtttctgggctagggtctgtaaggctattttcctttgcggtgggaaggggaggtaggggatgaacactgggtatgggaagtgggtgagaaatggctgagagggaaggaggaaggggcctccccgctggagcagtcactggagtcatttagacaaaaacactcatgtgcataagatacacagtgcgcaaactcagccctgccagcccggccccaatcccacctctcaggactccttccaagaccctggaggaggttctggggatacagctgtagaaccgttcactctggccccatccaccccacctccagcctcttctccccttctaggtccagggagtaagaaggtgctcgggtgggcagacagtggtggaaacagtattgagttttcctttggttacatattgaaggcaaaggtgagctggacttacagtcaaaacggataggggtgaggaaggaagaggggccatggctggggttggagagggaggtaggccctcctcagcccctccaccccaagaaacacatctacgtggggtggcagtccctcagtcttttctctcccacgccccacagcaccaaacaaaaggagaagccccctcccccaggggctgctccccaccccaacctgggctgtacattcagtggttttcagcagtcctatggctcagggggccacggggcaggggaggtggcccgtcagtctcagtggacagtggcagtgacccgggtctgctggtccttcctgggacccacggtttgtgccattcgtttttctgaaggatagtatatgaccctaccagagccaccgcccaatcagaaatagctcccccaaaatcagaaactaaaaactggctctttccatctcaccctctgattcacacgtctgtttccctgtctcctatgtcgccctcgctctgtttcctttgctgggacctggggctgctcccagggtcctcgcttaaaataggccttttcacaaaagtgcttattacttgaagcaagtgtataggctagcgtgggtgagaggac

SEQ ID NO: 88335 - DNA, 2026 bp, Homo sapiens
agaggaccgtcgaccgcacgctagtcaccaggagggatgccctcctatttcagagatgctgcaggcgaaaacgaaggaatctcgaaacacgcaacttggatccggagaatggcagtgggatggcccttcagcccctacaggcagctccagagccaggggctcagggccagagggagaagaacagccagcacccaccagctctggcccctcctgggcaccaaggccacagtcatgggcaccagggtggcactgatatcacgtggatggtcctcctgggagatggtctacacaacctcactgatgggctggccataggtgctgccttctctgatggcttctccagcggcctcagtaccaccttagcggtcttctgccatgagctgccccacgaactgggtgactttgccatgctgctccagtcagggctgtcctttcggcggctgctgctgctgagcctcgtgtctggagccctgggattggggggtgcagtcctgggggtggggctcagcctgggccctgtccccctcactccctgggtgtttggggtcactgctggggtcttcctctatgtggcccttgtggacatgctaccagccctgcttcgtcctccggagcccctgcctacgccccatgtgctcctgcaggggctggggctgctgctggggggcggcctcatgcttgccataaccctgctggaggagcggctactgcccgtgaccactgagggctgatggggccagtggaaaggggtcgggttgcccttccttccccccaaccacaggaatggaggcgggacacagggccagtaggagcaataggattttaataaacagaacccatcccaaagccatgactacgacagttgtacttgcaccaaaacagcatagaaaaccagagtgtggggaaggggctgctttgttccttatccctccttcttaaaaggtagggttcaaactaggcgggatgggggcccatactggtttgccccaggagtagggtttctgggctagggtctgtaaggctattttcctttgcggtgggaaggggaggtaggggatgaacactgggtatgggaagtgggtgagaaatggctgagagggaaggaggaaggggcctccccgctggagcagtcactggagtcatttagacaaaaacactcatgtgcataagatacacagtgcgcaaactcagccctgccagcccggccccaatcccacctctcaggactccttccaagaccctggaggaggttctggggatacagctgtagaaccgttcactctggccccatccaccccacctccagcctcttctccccttctaggtccagggagtaagaaggtgctcgggtgggcagacagtggtggaaacagtattgagttttcctttggttacatattgaaggcaaaggtgagctggacttacagtcaaaacggataggggtgaggaaggaagaggggccatggctggggttggagagggaggtaggccctcctcagcccctccaccccaagaaacacatctacgtggggtggcagtccctcagtcttttctctcccacgccccacagcaccaaacaaaaggagaagccccctcccccaggggctgctccccaccccaacctgggctgtacattcagtggttttcagcagtcctatggctcagggggccacggggcaggggaggtggcccgtcagtctcagtggacagtggcagtgacccgggtctgctggtccttcctgggacccacggtttgtgccattcgtttttctgaaggatagtatatgaccctaccagagccaccgcccaatcagaaatagctcccccaaaatcagaaactaaaaactggctctttccatctcaccctctgattcacacgtctgtttccctgtctcctatgtcgccctcgctctgtttcctttgctgggacctggggctgctcccagggtcctcgcttaaaataggccttttcacaaaagtgcttattacttgaagcaagtgtataggctagcgtgggtgagaggac

SEQ ID NO: 88336 - DNA, 1091 bp, Homo sapiens
agaggaccgtcgaccgcacgctagtcaccaggagggatgccctcctatttcagagatgctgcaggcgaaaacgaaggaatctcgaaacacgcaacttggatccggagaatggcagtgggatggcccttcagcccctacaggcagctccagagccaggggctcagggccagagggagaagaacagccagcacccaccagctctggcccctcctgggcaccaaggccacagtcatgggcaccagggtggcactgatatcacgtggatggtcctcctgggagatggtctacacaacctcactgatgggctggccataggtgctgccttctctgatggcttctccagcggcctcagtaccaccttagcggtcttctgccatgagctgccccacgaactgggtgactttgccatgctgctccagtcagggctgtcctttcggcggctgctgctgctgagcctcgtgtctggagccctgggattggggggtgcagtcctgggggtggggctcagcctgggccctgtccccctcactccctgggtgtttggggtcactgctggggtcttcctctatgtggcccttgtggacatggtgagagatgtcgggtagagcagagaaatcaagggcagtggggaggcgggagtggagagggaggtagcagtccctccgcctctaccattagctcctggaagggcgtcagaccataggcccgcaaaagtctgagaaacaagggactaaggtgtttgggtgggggctgctgatgctttctgacaccattcctctggagttgagaggtcaggggcaaggccagaatcctgacatcctctttttctttcagctaccagccctgcttcgtcctccggagcccctgcctacgccccatgtgctcctgcaggggctggggctgctgctggggggcggcctcatgcttgccataaccctgctggaggagcggctactgcccgtgaccactgagggctgatggggccagtggaaaggggtcgggttgcccttccttccccccaaccacaggaatggaggcgggacacagggccagtaggagcaataggattttaataaacagaacccatccca

SEQ ID NO: 88337 - DNA, 653 bp, Homo sapiens
agaggaccgtcgaccgcacgctagtcaccaggagggatgccctcctatttcagagatgctgcaggcgaaaacgaaggaatctcgaaacacgcaacttggatccggagaatggcagtgggatggcccttcagcccctacaggcagctccagagccaggggctcagggccagagggagaagaacagccagcacccaccagctctggcccctcctgggcaccaaggccacagtcatgggcaccagggtggcactgatatcacgtggatggtcctcctgggagatggtctacacaacctcactgatgggctggccataggtgctgccttctctgatggcttctccagcggcctcagtaccaccttagcggtcttctgccatgagctgccccacgaactggctaccagccctgcttcgtcctccggagcccctgcctacgccccatgtgctcctgcaggggctggggctgctgctggggggcggcctcatgcttgccataaccctgctggaggagcggctactgcccgtgaccactgagggctgatggggccagtggaaaggggtcgggttgcccttccttccccccaaccacaggaatggaggcgggacacagggccagtaggagcaataggattttaataaacagaacccatccca

SEQ ID NO: 88338 - DNA, 889 bp, Homo sapiens
taacatgctctggaatactgtgttccagaatgtgtatataaatggaatatagcacatggccctataaaagaaagaaactattaagaaaatggtccctttagccaattagaggaaatataatttctgacacagggccgctatggccagctggatactgatgcataaagatacctaaccgtttgtagcagagcaggaggtgggacccagagtgtgagccctgagatgatctagaaattcctgtgcaaatggatccatcaacgaagggtgatttcatccattaaggaaaaccaagctgtttgtgaagaaaatttgacaactgttcgacggcgcttttccctcctttaggaagtagggaacactgagtaaatgggaatgtaggaaatactagcatgtgatatttatcagaataagaccagaaatgtctttgtaaacttcatgactctcagataccatgaagcataatgtgtaagtttcacttccagctgccagtaatgttatgtttagagacagcattttcttcaataagcaattcagcaaagttgaagatttaaataaaggaaaaaaataatgcagactacattataaagtaataatagcaggtaatagtcactgagtgcttcttctatgctaattactttacatttattatcccattcaagtttgcatgacaatcagacaagaagcagattagaaaagagaaagcattctgtagcaaaccattcattgtgagtaacaaagtgctatgtatggtgttagagagcctgggctttgaatttacaaagacctgctgaagtccagcaaacaccactactagctgtaatgtagggaagctaccttttctgctcaccacattgatcaactactatagtcaaagcactacactcagact

SEQ ID NO: 88339 - DNA, 322 bp, Homo sapiens
ctctacaaaaacaaagaaaataaagtcataaatacttaagtaaaggcaaatccttgcatactctacatactttttttagaaattagacgattttaactgatgcataggaaatatctaatctcatggcttcaaataatggaattaaatttctgtctcaagtgagagatattttccccataattacacaggtatagtacacactgaaatccagctgggccatccactacattctcaaactgttggacccattgaataatggcctgttgcaattggtactaaagacacacaaacacaaaaaaagagcatttacgtaaagcagatt

SEQ ID NO: 88340 - DNA, 207 bp, Homo sapiens
tccactattcaactcagtagagcattcataaatgccttgtggaaactctgaagccacccaacaacacactttgaggttatcttgattgctctaggggaagccagctggcatgggaagtagtgcagtggagaaatgcacatggccagagactaagaccaatcatttgaatgagtttggaagcatcctacccaccactgccaccagtca

SEQ ID NO: 88341 - DNA, 730 bp, Homo sapiens
cttagagtgatctgccactgactcattgaacaagtcttatgttgttacgccttttgtattttctcaagttgttccctcttgctgaaattcccttctctccatatttacttattgaggtcatattcatttctcaagacccattttatgtctcatctcttctgggaaatcttcctcagtactcagtcaaaatctgtctctcaaccctgtgtttccataagactttgcacgtacagcatttatcacagtataccttgtacttatacggagttattttacctactgtgtaagtgctaatctatcagctagagcaagaggttggcaaattatggtctgcaggcaaaacctggcccactgcctgttttgtaaatagtgtcttatgggaacacagccacgtctatttgatgacacattgtttaaggctgcctttgcgctgtaacagcagagttgagtagtgatgacagggacaaatggtcctcaaagcctaaaatatttaccatctggttctttagagtttgctagcctctgaactaaaatgtgtggtgtattgtgtcctaattatgtactagcacttaatagaatgttttgtagagagttggtactcttataagttatataaagtaattggtgaaaggatgaagaatgagttggaaatatatgtttattatgccaacagggtaaatataaactctttttctattcctgccttagttggtttttaagtccgtgtccc

SEQ ID NO: 88342 - DNA, 232 bp, Homo sapiens
tgactgaatttaatcctgataggcacagctttaattgattttaaatatatgctctggttccttttaaaatatataccaaattttcaatttttgcagaaacatcctttaatcagcctgggtggtggctaacgcctgtaatcccagcactttgggaggccaaggcagaattgcttctacgcaggtgttagagaccagcctaggcaacatagggagacctcgtctctacaaattt

SEQ ID NO: 88343 - DNA, 504 bp, Homo sapiens
ttcctgtgccctctgcttcggcaggtgcccttcctggctccctgcttcttcctctcctaacctcctggcactgtgctcctcactcaggaattgcacccagcatcacctctgcaggtgagtcccacaccttccccctgctctccaaactcagaccccaagtccagcagcatcttctctcaggcatctatagacctccacaacttaagacatccaaattctcattcccttgccttgccataatcttcccatctcagcagctccttccttccaggctctcaggctgaaggtggcctatcctttcttttctatcccacatggcagccaggaggcctgtgggcggtgccttcaggacatgcctcttgtgcccctgtcccctactctggcctgagtgttccttttaaaactaggtcagaactagattaaagcccgtgtccaagatgctgccacagtctcttgccaccatatgactgccatgtcctcactgtggcccaggaggtcccatgt

SEQ ID NO: 88344 - DNA, 183 bp, Homo sapiens
gagatggcagcagtacagtccagcttcggctcagcatgagagggagaccgtggaaagagagggagagggagaccgtggggagagagagggagagggagagggagagcgcttaaaacaatttttaagatgtatttcttttctcatagttccagaggccagaagtcccaagtcaagggttggaag

SEQ ID NO: 88345 - DNA, 864 bp, Homo sapiens
atctgtggtcccagctactcaggagcgtgaggcaggagaattgcttgagcccaggaggtcgaggctgcagtgagcctgatggtgccactgcactccatctggggcaacagagcgagaccctgtctcaacaaaaaagagactcataaagctgtagggggttgggggggggcattggcacaggtgtagaaaatgaagcctgagggtcccctgacttgtccgaggtcccccagcttgggatccttttcaggaggagcccagcagcccctctttccctggtcctcctccctggagccgaaggtcagaggatggtcctggggcccaggcagccctgtgtggcttcctgggggtgtgcatcagccctgtccctccccaagaaggcgggcatgtgctggagggcaggcatgtctgagggccctgtctccatagcacgaaggtggagcaggttcgggcccacctgggcactgcgtccctcctgggcctgggcgggagcccggtgaagatcgggctgcggcgggtagtgctgcaccccctctacaaccctggcatcctggacttcgacctggctgtcctggagctggccagccccctggccttcaacaaatacatccagcctgtctgcctgcccctggccatccagaagttccctgtgggccggaagtgcatgatctccggatggggaaatacgcaggaaggaaatgccaccaagcccgagctcctgcagaaggcgtccgtgggcatcatagaccagaaaacctgtagtgtgctctacaacttctccctcacagaccgcatgatctgcgcaggcttcctggaaggcaaagtcgactcctgccagggtgactctgggggccccctggctgcgag

SEQ ID NO: 88346 - DNA, 102 bp, Homo sapiens
gatctatgtctttcagctatgtgcttttaaaactttgtaatttagacattgatattgtcatcagattgcttatcagcattgccataaatataattattaatg

SEQ ID NO: 88347 - DNA, 460 bp, Homo sapiens
ctatcagatcagcgttcacctggtcccgaaccccgcctagcgaggggtcgtgagggagagcgagctgggggtacaggagtatcatttcctgcggagattcgtgttcttcaacattttttttttctgaacttggaaaacttttaaggacgaattagagaacttctttctctttcctatgagtaactcgaactttggtaatacagttgtggatcatagattacatggattaattccagggttatgaaattcaagggtggacactcatttgttcctattggacatgctacccaagttgcattttaaaaatgtattttaaaaacccaataaatatttaaagaagaaataatatcaattcttcacaaactcttccaaaaaatagaagagtaaggatgatctcccaactcatgctatgaggccagtatcaccctgataacaaaaccagataaagacatcacgagac

SEQ ID NO: 88348 - DNA, 749 bp, Homo sapiens
gaaaaacatataatgacatgtatccacacatagagtatcatatagaatagtttcacatactataatttctgcatttaggaaatttacccttactataatacaagtatccgctatgctgcccataattggattttacctgtggcttctataatgtcccagaatttgcattgcatttaatcatgtctctctagtctcctttaatctgaacggttcctcagccttttgtctctcctgacatccacatatttggatagtccaagtctgttttttcatagaatgcctcctcattcctccctcacacattcgttctttactttgctggggagcatgtttgaaagtacagttcacattctccaattttatgtctgcagaattccaccctcctcagaatcttgactaaaaggccaaatgttattgtcttagatttaaatcatggacttgggccgggcgtggtggctcacgcctgtaatctcagcactttgggaggctgaggcgggcagatcacaaggtcaggagtttgagaccagcctgaccaacatggcgaaaccccatctctactaaaaatacaaaaaaaaattagccaggcgtggtagcatgcacctgtaatcccagctactcaggaggctgaggcaggagaattgcttgaacccaggaggcagaggttttagtgagccgagattgtaccattgcactccagtgtgggcaacagagcaagactctgtctcaaaaatttaaaaaaaaaaaataaa

SEQ ID NO: 88349 - DNA, 575 bp, Homo sapiens
  misc_feature (556)..(556): n is a, c, g, or t
cagtgttactgctctacctacatgtgcacacaaactctgtttgtgttgaggttgagtactgttctttaaaatcattgttgaatgacaattagcaaaaacaagagccctcacatgtcctcgtggtggtatgctggcaccacgatttctccaagcccccggcttgctcatttcatccaggtgaggagtctggagtagagcagggcttctgaaatggtgacatgcacatcactctcctgggcatctggttaacatgcaggctccagttccccaggtctgggcggggctcaagatcgcatttctcataagctcccaggggatgctgctgctggtggtctctggaccacactctgaggagcgagggttggatgcgttatttcatcctcctgaccaccctgtgaagtaagtattctcagcctcattttatagatgaggaaacgcacccagctcaacctaacacaggtggcagggttggaacccaacgttggttctaaccggcctctataaaaactttatactgcctcccattttcttctggggcttggaaggtagcccttanacgcgggatcctctagatc

SEQ ID NO: 88350 - DNA, 278 bp, Homo sapiens
  misc_feature (3)..(3): n is a, c, g, or t
  misc_feature (128)..(128): n is a, c, g, or t
  misc_feature (270)..(270): n is a, c, g, or t
  misc_feature (273)..(273): n is a, c, g, or t
  misc_feature (275)..(275): n is a, c, g, or t
  misc_feature (277)..(277): n is a, c, g, or t
agngaaggacacaaggaaacttcttctagggcccctgtgctcactcagaggtctttctgggatggggccctgggctcccagtggcataggagatcccactctctgctggacgctccattttagaaagncacacccaggcaaggaggcaggcctagggccacagaggggacacccctggaggccagcctcagggcaccagaagacagagcagaagagaacagggaagcagaggctccgccctagggggaggtcatgcggacaccaggcttntangngnt

SEQ ID NO: 88351 - DNA, 397 bp, Homo sapiens
taaaaacaaatgcagtaatacgtattaatataaaattttaaatacagttgttacagaaacagtgttagtaggaatcgctacaggtttatactggttaagggaaaagtaaagattgttagaaaatcgatacagaaacagcaaatgaagtgtgggaaaattaaaggagaaataagttaataaaagataaaataatttaaaaagctaaaaagatatatttggatcatgtgaagaattctaggtgaagatgctattctgtggtaaaattattttggtaaggcgtgttaagtttttgagatattaggtatttacacaataaaattattatttaaaatagagtttggagctaggcctggcggcacacgcctgtgctcctagctacttggtagattgaggtggg

SEQ ID NO: 88352 - DNA, 351 bp, Homo sapiens
tccatccttcctgtcctccctaccacttcccatgtggctcattcctggaagataccatctctctaaacccctgtctccctgtatccctgtgggttgtttctggaagataccatccttccacaccatctgcccttcttgtctccccagccaccgcacctgtggccctctccaaagccaatccaccctgtctcccccttctcctgtaggtcattcctagaagacaccatcccctaacaccacccacctttcctgcctcccccagtcaccatgacaacccatctccctggaccagggttcaggatgcgtctccaaggggctgtgcacgggaaaggtgcctcttgggggtggatg

SEQ ID NO: 88353 - DNA, 201 bp, Homo sapiens
ccacctgcctcggcctcccaaagtgttgggattgcaggcgtgagccaccgctcctggctcctgctgtatactttaaattttctttagattgcttatacctaatactatgtgaatgttgtgtaaatagttgttgtactatattgtttagtacagatgcaaccatccatttattcccgtctaatatttttcttcctcggttga

SEQ ID NO: 88354 - DNA, 429 bp, Homo sapiens
ctttctgaggaccctgaccactctgttctgttcactgcctgacaaactataggcacttggatattttgtaaataaatagtgagtaaataaattcctcaagacagagttgttttgtcctccttaaaaattatacctttagaaagctaaaccagttattatactttaaactggcattaagttaaggccttctgctcaggaagttcaaggccattatatgttattctatatttctagtttctacttctaggttgaaaaaaatgagccacatatggttagctaaactcatttctaaaaacttggcatgttctcaaaccatattcaaagcttatgtcagttttgaagacacaaataaaatatattttccagaacttctcctcctctggttgaatttttggaaaagatctcccacgatgtgaacttctgtaaact

SEQ ID NO: 88355 - DNA, 708 bp, Homo sapiens
gcccctaggcggctgctggccggctctgaatcttgaatcacatggttaagtgattattggtggggaaagcttaaagacctgtagaagaggaggaggggggcatgtccaaggtctcgaagtcagtttgggcagagcttggactcaaacctggggttctgactccaagcccagctttccttctgtcagtgggcctaaaaatagaagactgaccttttcttggtatttttgtgcttcacaaatgccagagcgttattcattagttcatcttcccaaaataactggcagaacacggccagagggcaacaggaagactctgggctgcgccccccgaccgtgaaactgggggctcctgggaagtgggggatgtgtctcaccatgggcatagtttccccccactgttggagtggcctgcctggccctgctcttggtgagtccaggggagagagcttcagagggcagaacagatctcaggaggatgttaggatcgggagcttgagtctatccagttcccaggcagtttgtgttccctccatcatcctcccttttttttctctttttggtttaaaataaggtttacaataggagtcttggaaaattcagacaagcacaaaaaataacaaaactcactgcagtacaactacctgcttctctcactgtgtcagcttcaaatctccagctgccttctctgctctggacaagggggaaaga

SEQ ID NO: 88356 - DNA, 281 bp, Homo sapiens
gggttatgcatgagacacttggcttccacccacctatggaatttaatttatgcctggttggtttgattttttttttccctcaatcaccctcctttaacaaaggccagtcaatgagctgagttttgctgtcttctgctattaggaccattttcttaaggtagcaatccatagaccatcacaatgaagtgtgtttgtgtctatgagtgtgtacctgtgtgtgacattctttcttttctttacagtattttatgtttagcttgatctgtaataaattaaagtgg

SEQ ID NO: 88357 - DNA, 144 bp, Homo sapiens
tgattctataacattatcctggatgcactgtagcttttcatagcctgctgcaatgaatcatgtattatactattcacttattgtttggcaaggagtgagtatgggagaatggtgtgttttatagataatagtggcgtttgtttt

SEQ ID NO: 88358 - DNA, 542 bp, Homo sapiens
  misc_feature (435)..(435): n is a, c, g, or t
tttaattgtggggacatacaaatttaggtgataaggattttagaggagacagaaatcagagcccaagctgttgggggaggggatggtagtggagatgggagattggttacatacaggggattgataaatatattggtagtaatgggagccatgcttcttactgggagccatgcttcttactgttaggaagagggagctgaaggaaaagatgattacctttatacatgtttgaatgatactgtttttacttgttacaaagagcatatattctgttgtaatttgaaaaatgatcatatggaaaaatattttcagaaaaatggcaatttcaatggaaaaatatgaaaaaaaaagttttgatgaaatattgaagttcagaaatgacagaacagcatagtggtctggggaaagaatgtcaaagttcagggctgaatgtgngtgtcacgcctgtaatcccagtactttgggaggtgaaggtgagaggattgcttgaggccaggagttccaaaccagcctgggcaacatggcaatacttcatctctgca

SEQ ID NO: 88359 - DNA, 298 bp, Homo sapiens
cattatgctgttgttctggatggcaggagcatcacagagaaagacaaaaggtgactaattaagttggactccagaacagtaaagggtcttgtttcttttaaaagaaatatcaatactgattaaaagttaagatgagatctcaaggatgacaattagttgctaatccttcaagatctaacaaagtatctagatggaaaaatgaaatgtttaacaatgaccagaataataaaaatagaaatgggaaaataatgaatagcagtgagagaaagaaacacatggtaaataatgacaaagaaca

SEQ ID NO: 88360 - DNA, 237 bp, Homo sapiens
gttaaatgacttgcccagtattactcattagtaggtgttacacccaggactcaaagccagattttgtgtggttatcactgatactacttcagggtactcagaaacagaactggacacacagagtgaagcctttcactctgccctgatccttgggctctggatccctataccccaaaccccagccctctggtctgtggtgttactgtgatgtgaaagaggattgccttgggactgcct

SEQ ID NO: 88361 - DNA, 250 bp, Homo sapiens
acatgtgtttctatttttttactgtagtctaaaacaaaacaccacattactgacatccttgatcaacaaaatattagaataatagagatttttcaattcatcattcatgcaccaaacctgccctgctttctgtgtgtcaagccttgaacaagaaaccacggcacagaaatgaatgttcacataaggcacgtccctgcccttcagcactgccagaatattgagccccatatttctatgaagcaaccaagga

SEQ ID NO: 88362 - DNA, 396 bp, Homo sapiens
ttacagacgtgagccaccgcgcctggcctggtctcaatctcttgacctcgtgatccacctgccttgcccccgcaaagtgctgcaatgacaagtgtgagcgaccgtgcccagccgtattaagtgacctttaacatcctttccaaacttgggcttctgttttatgcgttaataaattctgttgtgcttttctagagaaagcgattttggtattttcttctatagtaataattggggaatttttccttatgtatagccacataagaagtagagaatactattcaattcattgaatatgactaaattacctgttaatctttccttattttgattccatagcttttgaaaagctcagagatcaagattggactacttgtgaatattttttatttcataatc

SEQ ID NO: 88363 - DNA, 502 bp, Homo sapiens
acttgtattatttacttctctgtccccaggcaggaccttgatccaaaaatgctttgctgttgtttttggccttaatctgccagaaactagagggagcagatggccacagcaatgtgggttatgaggatgtgatatcaggcagggttgaaggatgaattgagagccctgcacccaactacttctgtgtctgtgcctaggcccttgtcagggtagtctctatctgagagtgtagctggtcagcctggtcccatttctcatttccagtcacctccccctcttgccatcccatataatggggttagtctcctggacagatctcatacagaggctgctgggatctgctgtccaaatgaccctttggacctatttcccagccatgttccaagatgatggtgaggagtctagccccacagccagtatgctatctctattcagataactcccagctcacaggcctcccaccaggctctcacccactctgatgttttcactcctgactcct

SEQ ID NO: 88364 - DNA, 367 bp, Homo sapiens
gcaaataaacacacttaatctgcccctttgagataatagggtaagttcttaacagtgattcaaaaagtaactacctttcagaacaacaacaaaaaatttaatgctgtagggaaaggatattgaaaatggatatttagaatttttcctgttatggaatttaattgttgaaaattatatgtgttaactttaagagctttttttatatgtatacttgaacttggaaacagaattttctaacctgtataaaaatcttttaaaagagctgtttagtgattttgagcccatctgctgaaaacacaaaaaggcaataccatctgattagtttataagaacaactgattgccatcagaaggtatggaaatgcact

SEQ ID NO: 88365 - DNA, 321 bp, Homo sapiens
atgtggctgctacgtgtcagatccattgaccctaaaccagagtctgaatcaaagaccagggctctcacaatcttccatgctgcattacctttctagggcttctgtttgctacaattttatggcccattaataagcagaaatttatattcagcaatggatatacaattaattgagtaacatagtataaatattgcccagggaagtatttataggacaatattttagaagctttcatatctatagttatctaactctgccagggcaaagccgatcgttctgacagacctggcttggcttacctagaactgtgaaaatggaaag

SEQ ID NO: 88366 - DNA, 400 bp, Homo sapiens
ggggaaaccttgaaaactttacaaatacatagaaattaaacaacatgctcctaaacaatgagttaatgaataaatttaaagagaaatttaaaaatatcctgagacaaatgaaaacggaaacataacataccaaatcctatgggatagagcaaaaacaattctaagagggaagtttatagcaataaatgccaactctcaaaaataacccaaagcccaaactttgagaatgatctattaaatgcaaataccctgagaaaggatatcccttttattaaacattaattaatattttatgagaaacttgttttgttgttgttttgttttgaacagatggctcttcctctgttgcccagactggtgtgcagtggcacaatcatagctcactacagcctcaaactcg

SEQ ID NO: 88367 - DNA, 535 bp, Homo sapiens
cctttgattatctttcttagagaatcttatccagcccctatgacacaattgcctgctgtatgcatgtggggagatgaatcacatggtcatctcaactcattgcagttggtagtggttatttttggtagggattggaggccgacatgtcatcttcccagttctttttcacttttatctttcccagaaagtgtgcccttatgctttgagtggcaaaattatataccacacattctgatagatctggttctgggtaggaaattaatttgatctctgttgaaattgattttactgtcagagtctgctattgaagagggggattatatatagttagtgcttcataggaagacctgtactcataatactgctgaaagatctgtgatacttacaggtttcttaaaatcagaacagttgtctcaaaaataagaaaataggtaattttcacttgacttttatgacaaagtaattgtatagttatttaaaaacgactttagatttttctgagccagcagtccgaatttcagataatgtattcaag

SEQ ID NO: 88368 - DNA, 270 bp, Homo sapiens
aaaagccagagggatgagaatgagaaagttaaaagggaggtcaggaaagccatcttttaggagaaatataaattgacaatgctttaaaaaaggagctgccatcatattataccctgacccagctggatacgaacaaattcagccttggcaatgcaagtcttacatctattttatatagaatgtataaaagagaactggaagcattttcaagaggggtatgtatgtgtttgtgtgtgtctggtaattaatgaaagagaggctattgaattt

SEQ ID NO: 88369 - DNA, 452 bp, Homo sapiens
aggacttagtcaaaatacttaatgtcttagagtttttcatttatctatgaaataagacagttacactagatacaaggtttttctaacttgattattctctaattctatggatatgacagggtcttagccatcaagtttacactaagaaggggaaataggacatgcattaaacaatgacacaaattactgagaaatatactcagaaattcagagctacaaataaagtactactgccatgcaagttcaaaggaataaaagcttattttggttggaacaatcagggagcccttcataaagacagtggcatttgaattaggacttgaagcatggacgaggacagagaccagttcagacaaaagagagagaagcataaaagcagacaaagcagagtagacaaaggcttaggaagggaagcgtaagacaggtcctaggagcaataagtcacccagaat

SEQ ID NO: 88370 - DNA, 270 bp, Homo sapiens
gagagagaaactttcaagatttggactcttaagaaatttactgctccttaacaacaataaagtgagaaaagagaagctgtctctttcctctggggctggagatgattatgaaagacatgcatggtctttcctgctgattgttacagagtgccagccccccaccccacaccagaactcgaggtctgcctgctcaacaacaacgaacatgccatgcagacagatacgtgagcaaaaggaacaataattaaagaacagtaacaaaaacctcct

SEQ ID NO: 88371 - DNA, 386 bp, Homo sapiens
gactatgtctccttcaaagtagtgtgatgagctctgttagcatttgaacctgtcttcacattttcttctgatttgtggacacttacgaccttgctatcctgtgttctcaagtttgggtatattctgacctcaggctcgttttcacctgtgtatagagcatctagtagttctcaagggattgtattgcccctctcctgcccttggggcagttggggtgtggggtcttttattgacaagcaagggcattcctgacatttagtgggtatggctggggttaccaaagtcctgtgaaagacagggcagcctttcttaccacgttgttaaccttacccctgatatcaaggaaccctgatagagcaagtctgatttgttgggtcattttacaa

SEQ ID NO: 88372 - DNA, 579 bp, Homo sapiens
caacgatggtcctcagctcattcaggggcccccgggcttcttgaatgagctgagaaatagtgtggttagatagagaaaggtgggctttctgaccagaaacactcatgttgccttttcttcaatagacttctgtcttctagtgcaggtgacatgcgctgtactagacacttcagcagggctccagggtgtaggaggtcaactattttgacaaccacagtctagtagaggagataagtaaatatggaacattagtacggtgtgggtttggtacaacaagcggcattgtggaacactgtggcaaggacaatgaattcttctaggagagttggggtaggagtaatccaaagatttttctagaataaagaaaacttcaacctgggcaacataacaagaccccacctctacagaagatttaaaaattagccaggtgcagtgtggttcgcctgtagtccaagctatttgggaagctgaggcaggagaattacttgagcccaggggtttgaggctgcagtgagctctgatcacaccactgcactccagcctggaagacagagtgagactgtctcaagaaaaaaaaaa

SEQ ID NO: 88373 - DNA, 2851 bp, Homo sapiens
tgacgcgataggacagaggccaagctcaagtgactgttattgtgcaacctgaaaacaataagcctcctcaggcagatgcaggcccagataaagagctgacccttcctgtggatagcacaaccctggatggcagcaagagctcagatgatcagaaaattatctcatatctctgggaaaaaacacagggacctgatggggtgcagctcgagaatgctaacagcagtgttgctactgtgactgggctgcaagtggggacctatgtgttcaccttgactgtcaaagatgagaggaacctgcaaagccagagctctgtgaatgtcattgtcaaagaagaaataaacaaaccacctatagccaagataactgggaatgtggtgattaccctacccacgagcacagcagagctggatggctctaagtcctcagatgacaagggaatagtcagctacctctggactcgagatgaggggagcccagcagcaggggaggtgttaaatcactctgaccatcaccctatcctttttctttcaaacctggttgagggaacctacacttttcacctgaaagtgaccgatgcaaagggtgagagtgacacagaccggaccactgtggaggtgaaacctgatcccaggaaaaacaacctggtggagatcatcttggatatcaacgtcagtcagctaactgagaggctgaaggggatgttcatccgccagattggggtcctcctgggggtgctggattccgacatcattgtgcaaaagattcagccgtacacggagcagagcaccaaaatggtattttttgttcaaaacgagcctccccaccagatcttcaaaggccatgaggtggcagcgatgctcaagagtgagctgcggaagcaaaaggcagactttttgatattcagagccttggaagtcaacactgtcacatgtcagctgaactgttccgaccatggccactgtgactcgttcaccaaacgctgtatctgtgaccctttttggatggagaatttcatcaaggtgcagctgagggatggagacagcaactgtgagtggagcgtgttatatgttatcattgctacctttgtcattgttgttgccttgggaatcctgtcttggactgtgatctgttgttgtaagaggcaaaaaggaaaacccaagaggaaaagcaagtacaagatcctggatgccacggatcaggaaagcctggagctgaagccaacctcccgagcaggcatcaaacagaaaggccttttgctaagtagcagcctgatgcactccgagtcagagctggacagcgatgatgccatctttacatggccagaccgagagaagggcaaactcctgcatggtcagaatggctctgtacccaacgggcagacccctctgaaggccaggagcccgcgggaggagatcctgtagccacctggtctgtctcctcagggcagggcccagcacactgcccggccagtcctcctacctcccgagtctgcgggcagctgctgtcccagcatctgctggtcatttcgccctgacagtcccaaccagaacccctgggacttgaatccagagacgtcctccaggaacccctcaacgaagctgtgaatgaagaggtttcctctttaaacctgtctggtgggcccccagatatcctcacctcagggcctcctttttttgcaaactcctcccctcccccgagggcagacccagccagctgctaagctctgcagctccccagtggacagtgtcattgtgcccagagtgctgcaaggtgaggcctgctgtgctgcccgcacacctgagtgcaaaaccaagcactgtgggcatggtgtttccctctctggggtagagtacgccctctcgctgggcaaagaggaagtggcacccctcccctcaccacagatgctgagatggtagcatagaaatgatggccgggcgcggtggctcacgcctgtaatcccagcactttgggaggccgaggcgggcggatcatgaggtcaggagatcaagaccaccctggctaacacggtgaaaccccatctctactaaaaataaaaaaaaaaattagccgggtttggtggcgtatgcctgtaatcccagctactcgggaggctgaggcaggagaattgcttaaacctgggaggtggaggctgcagtgagccaagatcgtgccactgcactccagcctgagtgacagagcaagactccgtcaaaaaaaaaaaaaaaaaaagaaatgatatctggcccccccttaacactggagccccactcccttctcccatccggcccgagattagggaggattgactgtgtcagggatggcgggtggcctctctcgctgccagggcccttgtcagagcagccaggctggacagacggcctccctcctctccatctgaccggcacctgctgcttcggggcttaggccaccgctccctgtccccagaggagatagccccagatggactggaatgttgtggcatgagagcgcatgtgtgcgatggccccgctgtggtcccctctctgtccctccatctgtatgtgttctgtgtcccttgcatgtgtgcgtgttagagtgagcgcgtatgcatcaactcattgggctcttggctgctcacaaggcaaatttgacttggaaagactttcatctccttggaaccaagacttcctgagtccccctcaccctggccctgttccaccatggttatctgggtattggggaatggaaactttgggggagtgactttttaaagagacacttataatttctactactgcactactgtccattgtgggatgattaaacatggtatttaactgtgaaaaaaaaaaaaaaaagttttgccctatag

SEQ ID NO: 88374 - DNA, 2151 bp, Homo sapiens
acaacaagtgaagacaggctggaagtgtctttctagtggcctcctgactgctccagttttgtccagtcgagatgagaaaggcaggcaccatgcccaaggtgggtctcgaggacatttcaccacatagcattaatctggggtgctttggtgccctcatgggctctaggtgctgcttgtcacccctggctgagtcttgttgactttcttccctttgctgccactctcagcatgtcagctgaactgttccgaccatggccactgtgactcgttcaccaaacgctgtatctgtgaccctttttggatggagaatttcatcaaggtgcagctgagggatggagacagcaactgtgagtggagcgtgttatatgttatcattgctacctttgtcattgttgttgccttgggaatcctgtcttggactgtgatctgttgttgtaagaggcaaaaaggaaaacccaagaggaaaagcaagtacaagatcctggatgccacggatcaggaaagcctggagctgaagccaacctcccgagcaggcatcaaacagaaaggccttttgctaagtagcagcctgatgcactccgagtcagagctggacagcgatgatgccatctttacatggccagaccgagagaagggcaaactcctgcatggtcagaatggctctgtacccaacgggcagacccctctgaaggccaggagcccgcgggaggagatcctgtagccacctggtctgtctcctcagggcagggcccagcacactgcccggccagtcctcctacctcccgagtctgcgggcagctgctgtcccagcatctgctggtcatttcgccctgacagtcccaaccagaacccctgggacttgaatccagagacgtcctccaggaacccctcaacgaagctgtgaatgaagaggtttcctctttaaacctgtctggtgggcccccagatatcctcacctcagggcctcctttttttgcaaactcctcccctcccccgagggcagacccagccagctgctaagctctgcagctccccagtggacagtgtcattgtgcccagagtgctgcaaggtgaggcctgctgtgctgcccgcacacctgagtgcaaaaccaagcactgtgggcatggtgtttccctctctggggtagagtacgccctctcgctgggcaaagaggaagtggcacccctcccctcaccacagatgctgagatggtagcatagaaatgatggccgggcgcggtggctcacgcctgtaatcccagcactttgggaggccgaggcgggcggatcatgaggtcaggagatcaagaccaccctggctaacacggtgaaaccccatctctactaaaaataaaaaaaaaaattagccgggtttggtggcgtatgcctgtaatcccagctactcgggaggctgaggcaggagaattgcttaaacctgggaggtggaggctgcagtgagccaagatcgtgccactgcactccagcctgagtgacagagcaagactccgtcaaaaaaaaaaaaaaaaaaagaaatgatatctggcccccccttaacactggagccccactcccttctcccatccggcccgagattagggaggattgactgtgtcagggatggcgggtggcctctctcgctgccagggcccttgtcagagcagccaggctggacagacggcctccctcctctccatctgaccggcacctgctgcttcggggcttaggccaccgctccctgtccccagaggagatagccccagatggactggaatgttgtggcatgagagcgcatgtgtgcgatggccccgctgtggtcccctctctgtccctccatctgtatgtgttctgtgtcccttgcatgtgtgcgtgttagagtgagcgcgtatgcatcaactcattgggctcttggctgctcacaaggcaaatttgacttggaaagactttcatctccttggaaccaagacttcctgagtccccctcaccctggccctgttccaccatggttatctgggtattggggaatggaaactttgggggagtgactttttaaagagacacttataatttctactactgcactactgtccattgtgggatgattaaacatggtatttaactgtgaaaaaaaaaaaaaaaagttttgccctatag

SEQ ID NO: 88375 - DNA, 1908 bp, Homo sapiens
atgtcactgagtggcctgaaccaaagctcatggatactggagatgaagaaccagcaggagaccccaggtgtgctctcatccgtactctgtgacaccccttagtggactgttccaaccagttgggcccgggagaaggactagggaagcttccttcccatctgcacctcccagcctggagaggagcctgtgacttgccctgttccttggctcctcaggctggggtaaggtgtgggggtggctccagccttgaggccagtctcctgatgctggattccttgttttccctgcaggcatcaaacagaaaggccttttgctaagtagcagcctgatgcactccgagtcagagctggacagcgatgatgccatctttacatggccagaccgagagaagggcaaactcctgcatggtcagaatggctctgtacccaacgggcagacccctctgaaggccaggagcccgcgggaggagatcctgtagccacctggtctgtctcctcagggcagggcccagcacactgcccggccagtcctcctacctcccgagtctgcgggcagctgctgtcccagcatctgctggtcatttcgccctgacagtcccaaccagaacccctgggacttgaatccagagacgtcctccaggaacccctcaacgaagctgtgaatgaagaggtttcctctttaaacctgtctggtgggcccccagatatcctcacctcagggcctcctttttttgcaaactcctcccctcccccgagggcagacccagccagctgctaagctctgcagctccccagtggacagtgtcattgtgcccagagtgctgcaaggtgaggcctgctgtgctgcccgcacacctgagtgcaaaaccaagcactgtgggcatggtgtttccctctctggggtagagtacgccctctcgctgggcaaagaggaagtggcacccctcccctcaccacagatgctgagatggtagcatagaaatgatggccgggcgcggtggctcacgcctgtaatcccagcactttgggaggccgaggcgggcggatcatgaggtcaggagatcaagaccaccctggctaacacggtgaaaccccatctctactaaaaataaaaaaaaaaattagccgggtttggtggcgtatgcctgtaatcccagctactcgggaggctgaggcaggagaattgcttaaacctgggaggtggaggctgcagtgagccaagatcgtgccactgcactccagcctgagtgacagagcaagactccgtcaaaaaaaaaaaaaaaaaaagaaatgatatctggcccccccttaacactggagccccactcccttctcccatccggcccgagattagggaggattgactgtgtcagggatggcgggtggcctctctcgctgccagggcccttgtcagagcagccaggctggacagacggcctccctcctctccatctgaccggcacctgctgcttcggggcttaggccaccgctccctgtccccagaggagatagccccagatggactggaatgttgtggcatgagagcgcatgtgtgcgatggccccgctgtggtcccctctctgtccctccatctgtatgtgttctgtgtcccttgcatgtgtgcgtgttagagtgagcgcgtatgcatcaactcattgggctcttggctgctcacaaggcaaatttgacttggaaagactttcatctccttggaaccaagacttcctgagtccccctcaccctggccctgttccaccatggttatctgggtattggggaatggaaactttgggggagtgactttttaaagagacacttataatttctactactgcactactgtccattgtgggatgattaaacatggtatttaactgtgaaaaaaaaaaaaaaaagttttgccctatag

SEQ ID NO: 88376 - DNA, 778 bp, Homo sapiens
tactactactaaattcgcgggtggtggacctcgggaggctgaggcaggagaattgcttaaacctgggaggtggaggctgcagtgagccaagatcgtgccactgcactccagcctgagtgacagagcaagactccgtcaaaaaaaaaaaaaaaaaaagaaatgatatctggcccccccttaacactggagccccactcccttctcccatccggcccgagattagggaggattgactgtgtcagggatggcgggtggcctctctcgctgccagggcccttgtcagagcagccaggctggacagacggcctccctcctctccatctgaccggcacctgctgcttcggggcttaggccaccgctccctgtccccagaggagatagccccagatggactggaatgttgtggcatgagagcgcatgtgtgcgatggccccgctgtggtcccctctctgtccctccatctgtatgtgttctgtgtcccttgcatgtgtgcgtgttagagtgagcgcgtatgcatcaactcattgggctcttggctgctcacaaggcaaatttgacttggaaagactttcatctccttggaaccaagacttcctgagtccccctcaccctggccctgttccaccatggttatctgggtattggggaatggaaactttgggggagtgactttttaaagagacacttataatttctactactgcactactgtccattgtgggatgattaaacatggtatttaactgtgaaaaaaaaaaaaaaaagttttgccctatag

SEQ ID NO: 88377 - DNA, 1316 bp, Homo sapiens
tgacgcgataggacagaggccaagctcaagtgactgttattgtgcaacctgaaaacaataagcctcctcaggcagatgcaggcccagataaagagctgacccttcctgtggatagcacaaccctggatggcagcaagagctcagatgatcagaaaattatctcatatctctgggaaaaaacacagggacctgatggggtgcagctcgagaatgctaacagcagtgttgctactgtgactgggctgcaagtggggacctatgtgttcaccttgactgtcaaagatgagaggaacctgcaaagccagagctctgtgaatgtcattgtcaaagaagaaataaacaaaccacctatagccaagataactgggaatgtggtgattaccctacccacgagcacagcagagctggatggctctaagtcctcagatgacaagggaatagtcagctacctctggactcgagatgaggggagcccagcagcaggggaggtgttaaatcactctgaccatcaccctatcctttttctttcaaacctggttgagggaacctacacttttcacctgaaagtgaccgatgcaaagggtgagagtgacacagaccggaccactgtggaggtgaaacctgatcccaggaaaaacaacctggtggagatcatcttggatatcaacgtcagtcagctaactgagaggctgaaggggatgttcatccgccagattggggtcctcctgggggtgctggattccgacatcattgtgcaaaagattcagccgtacacggagcagagcaccaaaatggtattttttgttcaaaacgagcctccccaccagatcttcaaaggccatgaggtggcagcgatgctcaagagtgagctgcggaagcaaaaggcagactttttgatattcagagccttggaagtcaacactgtcacatgtcagctgaactgttccgaccgtgagccactgtgcccaccctggtatgttttttttaaattggcacttaagagttgtccttcagaaagtggagcagcagtgtgattagtaaaaacgatgggctttctgagctctggttatggtcttggtgttccagttaacagctgttactttcatgctgtatacgggggtggggcgagaaacgagaaagatatgttagggtaaattggggctcaattgttataagttttcctgaagagtacccagctgtcggccatgttttaagggtagcattggagtgcatttggtatggggggccacgggggggatggttgaaagggctgtccagggttacccttggagaggaaagggggttctctgaagggg

SEQ ID NO: 88378 - DNA, 902 bp, Homo sapiens
tgacgcgataggacagaggccaagctcaagtgactgttattgtgcaacctgaaaacaataagcctcctcaggcagatgcaggcccagataaagagctgacccttcctgtggatagcacaaccctggatggcagcaagagctcagatgatcagaaaattatctcatatctctgggaaaaaacacagggacctgatggggtgcagctcgagaatgctaacagcagtgttgctactgtgactgggctgcaagtggggacctatgtgttcaccttgactgtcaaagatgagaggaacctgcaaagccagagctctgtgaatgtcattgtcaaagaagaaataaacaaaccacctatagccaagataactgggaatgtggtgattaccctacccacgagcacagcagagctggatggctctaagtcctcagatgacaagggaatagtcagctacctctggactcgagatgaggggagcccagcagcaggggaggtgttaaatcactctgaccatcaccctatcctttttctttcaaacctggttgagggaacctacacttttcacctgaaagtgaccgatgcaaagggtgagagtgacacagaccggaccactgtggaggtgaaacctgatcccaggaaaaacaacctggtggagatcatcttggatatcaacgtcagtcagctaactgagaggctgaaggggatgttcatccgccagattggggtcctcctgggggtgctggattccgacatccatggttatctgggtattggggaatggaaactttgggggagtgactttttaaagagacacttataatttctactactgcactactgtccattgtgggatgattaaacatggtatttaactgtgaaaaaaaaaaaaaaaagttttgccctatag

SEQ ID NO: 88379 - DNA, 407 bp, Homo sapiens
ccatggcttccagaacatgtgtcccaattggttcctctcctttcccacctggactggctgcttttgacctctaactctttgtcttccagaaaacaataagcctcctcaggcagatgcaggcccagataaagagctgacccttcctgtggatagcacaaccctggatggcagcaagagctcagatgatcagaaaattatctcatatctctgggaaaaaacacagtgagtattgacacaaaatccttatttttgcaaagcctccagaccttggaagagcaaggttttatttgctattatgagttgagttgctcttattggcttatccagtggggtgactgaggaagaaatgtttgcaattccaaacttcaactccaagaaaatgatattataatcataatttttgtaag

SEQ ID NO: 88380 - DNA, 458 bp, Homo sapiens
tgactgatccacatgctttccagatcccaggaaaaacaacctggtggagatcatcttggatatcaacgtcagtcagctaactgagaggctgaaggggatgttcatccgccagattggggtcctcctgggggtgctggattccgacatcattgtgcaaaagattcagccgtacacggagcagaggtagctgggcaatgaatggggggagcaaaggaaagaccaggggcccccgggcttcttgaatgagctgagaaatagtgtggttagatagagaaaggtgggctttctgaccagaaacactcatgttgccttttcttcaatagacttctgtcttctagtgcaggtgacatgcgctgtactagacacttcagcagggctccagggtgtaggaggtcaactattttgacaaccacagtctagtagaggagataagtaaatatggaacattagtacggtgt

SEQ ID NO: 88381 - DNA, 2374 bp, Homo sapiens
  misc_feature (2363)..(2363): n is a, c, g, or t
tgacgcgataggacagaggccaagctcaagtgactgttattgtgcaacctgaaaacaataagcctcctcaggcagatgcaggcccagataaagagctgacccttcctgtggatagcacaaccctggatggcagcaagagctcagatgatcagaaaattatctcatatctctgggaaaaaacacagggacctgatggggtgcagctcgagaatgctaacagcagtgttgctactgtgactgggctgcaagtggggacctatgtgttcaccttgactgtcaaagatgagaggaacctgcaaagccagagctctgtgaatgtcattgtcaaagaagaaataaacaaaccacctatagccaagataactgggaatgtggtgattaccctacccacgagcacagcagagctggatggctctaagtcctcagatgacaagggaatagtcagctacctctggactcgagatgaggggagcccagcagcaggggaggtgttaaatcactctgaccatcaccctatcctttttctttcaaacctggttgagggaacctacacttttcacctgaaagtgaccgatgcaaagggtgagagtgacacagaccggaccactgtggaggtgaaacctgatcccaggaaaaacaacctggtggagatcatcttggatatcaacgtcagtcagctaactgagaggctgaaggggatgttcatccgccagattggggtcctcctgggggtgctggattccgacatcattgtgcaaaagattcagccgtacacggagcagagcaccaaaatggtattttttgttcaaaacgagcctccccaccagatcttcaaaggccatgaggtggcagcgatgctcaagagtgagctgcggaagcaaaaggcagactttttgatattcagagccttggaagtcaacactgtcacatgtcagctgaactgttccgaccatggccactgtgactcgttcaccaaacgctgtatctgtgaccctttttggatggagaatttcatcaaggtgcagctgagggatggagacagcaactgtgagtggagcgtgttatatgttatcattgctacctttgtcattgttgttgccttgggaatcctgtcttggactgtgatctgttgttgtaagaggcaaaaaggaaaacccaagaggaaaagcaagtacaagatcctggatgccacggatcaggaaagcctggagctgaagccaacctcccgagcaggcatcaaacagaaaggccttttgctaagtagcagcctgatgcactccgagtcagagctggacagcgatgatgccatctttacatggccagaccgagagaagggcaaactcctgcatggtcagaatggctctgtacccaacgggcagacccctctgaaggccaggagcccgcgggaggagatcctgtagccacctggtctgtctcctcagggcagggcccagcacactgcccggccagtcctcctacctcccgagtctgcgggcagctgctgtcccagcatctgctggtcatttcgccctgacagtcccaaccagaacccctgggacttgaatccagagacgtcctccaggaacccctcaacgaagctgtgaatgaagaggtttcctctttaaacctgtctggtgggcccccagatatcctcacctcagggcctcctttttttgcaaactcctcccctcccccgagggcagacccagccagctgctaagctctgcagctccccagtggacagtgtcattgtgcccagagtgctgcaaggtgaggcctgctgtgctgcccgcacacctgagtgcaaaaccaagcactgtgggcatggtgtttccctctctggggtagagtacgccctctcgctgggcaaagaggaagtggcacccctcccctcaccacagatgctgagatggtagcatagaaatgatggccgggcgcggtggctcacgcctgtaatcccagcactttgggaggccgaggcgggcggatcatgaggtcaggagatcaagaccaccctggctaacacggtgaaaccccatctctactaaaaataaaaaaaaaaattagccgggtttggtggcgtatgcctgtaatcccagctactcgggaggctgaggcaggagaattgcttaaacctgggaggtggaggctgcagtgagccaagatcgtgccactgcactccagcctgagtgacagagcaagactccgtcaaaaaaaaaaaaaaaaaaagaaatgatatctggcccccccttaacactggagccccactcccttctcccatccggcccgagattagggaggattgactgtgtcagggatggcgggtggcctctctcgcagggagcactaaaagaggtgggagntctaaagtcaa

SEQ ID NO: 88382 - DNA, 1719 bp, Homo sapiens
  misc_feature (6)..(6): n is a, c, g, or t
ggagangacaggaggaggagagggacagaggaaaagcaagtacaagatcctggatgccacggatcaggaaagcctggagctgaagccaacctcccgagcaggcatcaaacagaaaggccttttgctaagtagcagcctgatgcactccgagtcagagctggacagcgatgatgccatctttacatggccagaccgagagaagggcaaactcctgcatggtcagaatggctctgtacccaacgggcagacccctctgaaggccaggagcccgcgggaggagatcctgtagccacctggtctgtctcctcagggcagggcccagcacactgcccggccagtcctcctacctcccgagtctgcgggcagctgctgtcccagcatctgctggtcatttcgccctgacagtcccaaccagaacccctgggacttgaatccagagacgtcctccaggaacccctcaacgaagctgtgaatgaagaggtttcctctttaaacctgtctggtgggcccccagatatcctcacctcagggcctcctttttttgcaaactcctcccctcccccgagggcagacccagccagctgctaagctctgcagctccccagtggacagtgtcattgtgcccagagtgctgcaaggtgaggcctgctgtgctgcccgcacacctgagtgcaaaaccaagcactgtgggcatggtgtttccctctctggggtagagtacgccctctcgctgggcaaagaggaagtggcacccctcccctcaccacagatgctgagatggtagcatagaaatgatggccgggcgcggtggctcacgcctgtaatcccagcactttgggaggccgaggcgggcggatcatgaggtcaggagatcaagaccaccctggctaacacggtgaaaccccatctctactaaaaataaaaaaaaaaattagccgggtttggtggcgtatgcctgtaatcccagctactcgggaggctgaggcaggagaattgcttaaacctgggaggtggaggctgcagtgagccaagatcgtgccactgcactccagcctgagtgacagagcaagactccgtcaaaaaaaaaaaaaaaaaaagaaatgatatctggcccccccttaacactggagccccactcccttctcccatccggcccgagattagggaggattgactgtgtcagggatggcgggtggcctctctcgctgccagggcccttgtcagagcagccaggctggacagacggcctccctcctctccatctgaccggcacctgctgcttcggggcttaggccaccgctccctgtccccagaggagatagccccagatggactggaatgttgtggcatgagagcgcatgtgtgcgatggccccgctgtggtcccctctctgtccctccatctgtatgtgttctgtgtcccttgcatgtgtgcgtgttagagtgagcgcgtatgcatcaactcattgggctcttggctgctcacaaggcaaatttgacttggaaagactttcatctccttggaaccaagacttcctgagtccccctcaccctggccctgttccaccatggttatctgggtattggggaatggaaactttgggggagtgactttttaaagagacacttataatttctactactgcactactgtccattgtgggatgattaaacatggtatttaactgtgaaaaaaaaaaaaaaaagttttgccctatag

SEQ ID NO: 88383 - DNA, 453 bp, Homo sapiens
cggcccctactactactaaattcgcggcccgtcgatcttactgctatccttagccttggaaactgcaggagaagaagcccagggtgacaagattattgatggcgccccatgtgcaagaggctcccacccatggcaggtggccctgctcagtggcaatcagctccactgcggaggcgtcctggtcaatgagcgctgggtgctcactgccgcccactgcaagatgaatgagtacaccgtgcacctgggcagtgatacgctggggtcagcaagaaaagatgaaggtatattcctggaatgcatagaccttttagtgggagcgccacacagataaggtcaaatgctttccgttagctctctcattcttcatgattaaatgctcataaaaatgcttaattgagaaaacagaaagaaaaatgtaaaaaataattggcttgcaagccgggctctcccata

SEQ ID NO: 88384 - DNA, 1824 bp, Homo sapiens
cggcccctactactactaaattcgcggcccgtcgatcttactgctatccttagccttggaaactgcaggagaagaagcccagggtgacaagattattgatggcgccccatgtgcaagaggctcccacccatggcaggtggccctgctcagtggcaatcagctccactgcggaggcgtcctggtcaatgagcgctgggtgctcactgccgcccactgcaagatgaatgagtacaccgtgcacctgggcagtgatacgctgggcgacaggagagctcagaggatcaaggcctcgaagtcattccgccaccccggctactccacacagacccatgttaatgacctcatgctcgtgaagctcaatagccaggccaggctgtcatccatggtgaagaaagtcaggctgccctcccgctgcgaaccccctggaaccacctgtactgtctccggctggggcactaccacgagcccagatgtgacctttccctctgacctcatgtgcgtggatgtcaagctcatctccccccaggactgcacgaaggtttacaaggacttactggaaaattccatgctgtgcgctggcatccccgactccaagaaaaacgcctgcaatggtgactcagggggaccgttggtgtgcagaggtaccctgcaaggtctggtgtcctggggaactttcccttgcggccaacccaatgacccaggagtctacactcaagtgtgcaagttcaccaagtggataaatgacaccatgaaaaagcatcgctaacgccacactgagttaattaactgtgtgcttccaacagaaaatgcacaggagtgaggacgccgatgacctatgaagtcaaatttgactttacctttcctcaaagatatatttaaaccaacctcatgccctgttgataaaccaatcaaattggtaaagacctaaaaccaaaacaaataaagaaacacaaaaccctcagtgctggagaagagtcagtgagaccagcactctcaaacactggaactggacgttcgtacagtctttacggaagacacttggtcaacgtacaccgagacccttattcaccacctttgacccagtaactctaatcttaggaagaacctactgaaacaaaaaaaatccaaaatgtagaacaagacttgaatttaccatgatattatttatcacagaaatgaagtgaaaccatcaaacatgttccaaaagtaccagatggcttaaataatagtctggcttggcacaacgatgttttttttctttgagacagagtctctgttgcttgggctgcaatgcagtgatgcaatcttggctcactgcaacctccgcctcctgggttcaagtgattctcgtgcttcagcctcccaagtacctgggactacaggtgtgcaccaccacaccaggctaattttttgtgtatttttactagagacagggtttcaccatgttggccagcatggtcttgaacgcctgacctcagatgatccacccaccttggcctcccaaagtgctgggattacaggcatgagccaccacggccagcccacaatgatattacaaacctattaaaaatgatacttagacagaattgtcagtattattcaagaacatttaggctataggatgttaaatgacaaaaggaaggacaaaaatatatatgtatgtgaccctacccataaaaaatgaaatattcacagaatcagatctgaaaacacatgtcccagactgcatactggggtcgtcatgaggtgtctccttccttctgtgtacttttccttgaatgtgcacttttataacatgaaaaataaaggtggggaaaaaagtct

SEQ ID NO: 88385 - DNA, 388 bp, Homo sapiens
ctctctgggtctctgtctcccctcctctctctgtgtctctgtcccccctcctctctctgggtctctgtccccaccccgtcccccaggtctttgcacaccctctctgtcacagtgtctcttctgaatctgtgaatgtcactcctcgcagtgagtacaccgtgcacctgggcagtgatacgctgggcgacaggagagctcagaggatcaaggcctcgaagtcattccgccaccccggctactccacacagacccatgttaatgacctcatgctcgtgaagctcaatagccaggccaggctgtcatccatggtgaagaaagtcaggctgccctcccgctgcgaaccccctggaaccacctgtactgtctccggctggggcactaccacgag

SEQ ID NO: 88386 - DNA, 774 bp, Homo sapiens
agctatttaacctgaaagcgtaggagtctttccattatagaagcccctccgttccaaggaactagcgatggggctaggtcaatcagcagagttgacaacagggcttctttttgtgcaccagcattccccttcagagagcataagatcctgccagtgtgccaagtttgcagctgaccaaacttctaggttgtactggaattattctatgcaacactgatccttatatgaatgcgtttcttctgaatgatgttgactacccttcttacaacaaaactgtttcttttttattgcaaatagggctcttggtgttttttacttttttgtacatatcacagtacatggtttttcactctttagtttatttcattttattggaattaacttttttttattctaatactgacagagtttgtaatctctatataatacgtaattactccaattacagcacttttaccttgaagagcatctcagtttttcccacaatttcattgagtcatcagagactgatgttgcttcttggtttcaaatttggtcctaaagaaactttcggctgtagaaacaaaagcacagagtgaattttttacaaaagacagggaatatagaatagtcattacagacacaaataaccctagtagcacgaagttggtgttttctctgtttttacttaagattaagaagatttttggtgactctgaactctttatttatatttcagtttaaaatatcaagactaaggggcatcagttatctttactctttaatattgcccat

SEQ ID NO: 88387 - DNA, 303 bp, Homo sapiens
attttctcataattttctcgtagttatggaggctggaaagtcttacatcaacatctggcagtgttcagtttcaggtggggctttcttcctggcttgcagacagttgcctgctctctgtgtcttaacctggccagagagagatctctggagtctcttcctcattttctagagggagcagttctattgaatcgggactctacccttccagcctcatttactcttaattacctccctaaaggcccttatctccaacacagtcatgttggggggttatggcttcaacatgtgattttggggaggaca

SEQ ID NO: 88388 - DNA, 353 bp, Homo sapiens
ccaaggggtctcaaggaagctggtggaaatggtaagacggcagctccctttcccgtttcccaaaggtcagggagaaggaacgcacgacagcacatacaccaccatacttttcaccaatgtctacactgccgaccctctgatctgcccttccttagtcttcaagttctcctttataccttgaagatgggggatgagctaagattaggcaaaagtagtttcacaaaatcttagcacttcctgcataggtagtcttgaacctcgctttggactttacagtccctgggcctttggtgcctgttttactgttcttgcttttgattttttttttttttttgcagaagccactaaacaat

SEQ ID NO: 88389 - DNA, 387 bp, Homo sapiens
agttcctggaaattgtagctatcatcatgatgatgatggtgattatgattgttaaagactgggttaggaaatgattttgtaaatacaatgagaagaagagctttaaaatttgcctaaatttccccacttaatattaaaaaggaggtgtgctattaaattttaggtttttctcaaactctcacagctatttttgtgggtttttagtgtatttcgagcccccttttccctcatctctattactttatgataatgtgaaggctcattgttatgtgaacgcactgttatgaaacaatactctcagacataagcagctttccttaaaccaaatcaaaaatactatttctattgcccatgattttcagaggacttcagaggaccctgaagcat

SEQ ID NO: 88390 - DNA, 546 bp, Homo sapiens
  misc_feature (38)..(40): n is a, c, g, or t
  misc_feature (46)..(46): n is a, c, g, or t
  misc_feature (56)..(56): n is a, c, g, or t
ttcgcggagcctggggaagcttttccagtagtactttnnngcgtgntgaccctatntcccgtgctgcaccgcagcccctttctcttccggttctaggcgcttcgggagccgcggcttatggtgcagacatggccaagtccaagaaccacaccacacacaaccagtcccgaaaatggcacagaaatggtatcaagaaaccccgatcacaaagatacgaatctcttaagggggtggaccccaagttcctgaggaacatgcgctttgccaagaagcacaacaaaaagggcctaaagaagatgcaggccaacaatgccaaggccatgagtgcacgtgccgaggctatcaaggccctcgtaaagcccaaggaggttaagcccaagatcccaaagggtgtcagccgcaagctcgatcgacttgcctacattgcccaccccaagcttgggaagcgtgctcgtgcccgtattgccaaggggctcaggctgtgccggccaaaggcaaggccaaggccaaggccaaggatcaaaccaaggcccaggctgcagctcc

SEQ ID NO: 88391 - DNA, 493 bp, Homo sapiens
  misc_feature (29)..(29): n is a, c, g, or t
tcaagagtaaagaataaaaacatttattnttaaaaatacccatttagcatcaatgtgccccaagtttgggcaggcatggccaagtccaagaaccacaccacacacaaccagtcccgaaaatggcacagaaatggtatcaagaaaccccgatcacaaagatacgaatctcttaagggggtggaccccaagttcctgaggaacatgcgctttgccaagaagcacaacaaaaagggcctaaagaagatgcaggccaacaatgccaaggccatgagtgcacgtgccgaggctatcaaggccctcgtaaagcccaaggaggttaagcccaagatcccaaagggtgtcagccgcaagctcgatcgacttgcctacattgcccaccccaagcttgggaagcgtgctcgtgcccgtattgccaaggggctcaggctgtgccggccaaaggcaaggccaaggccaaggccaaggatcaaaccaaggcccaggctgcagctcc

SEQ ID NO: 88392 - DNA, 724 bp, Homo sapiens
aattagcatcttgaactattattattagatagcaataacaaaggtaagtcatttgaaagacacatggagtaaagagataaaaatgggttttaaagaccagaagggaacaatgataaatgagaaataagatagccacaggatgtggccacattcactggaataaaatatgtacgatacaggatcaaaaggcaacaaagaaaataagtagagagaactgatagggcctctattttcattaagttaagaagaaaatattttactaaatcagaagcttaaacttgtagggcaaaagtattttagtatttttactaaaaaggaaaaggagcctgggatactgaattggtcttgattttagaaacagcaagagcacaatgaccaaaaagaaaatgaatagaaagaaaagtatgaagagacgtatttttaaaatgataggttaggctgggtgcggtggctcatgcttataatccaagcactttggaaggccgaggcaggaggatcgcttgatctcaggagttcgagaccaacctgggcaacatagggaaacccccatctctataaaaagtacaaaaattagccaggtgtggtggtatgcagctgtagtcccagctacctgtggggctgaggaaggaggatcgcttgaacctggaaggctgaggctgcagtgagcagagatcgcaccactgcaacaatccagcctgcatgacaaaagtgagaccctgtctca

SEQ ID NO: 88393 - DNA, 1228 bp, Homo sapiens
gctctcccgcgggaaatctcgtccgcacccccaacgcgttcccggagatccggtgggcccccacaatcactgggcgctcacaaggtgccgcaacccgctgccaaaccaaagatgtggggattttaccgcagccacagggaggttaccgccgcgagttctggcgcccccctccccagattcaggtcgcggcaccgcgccaaaaaagccttttctttaaaccgggagccctccaagccaggaaaatggccgatgaggcacatattgtggcctcgccaaaacgggggcttaaaaactttgaggaaaataatgggaaaaattgtggcccccctcgggcgcaaatgggcgagcaccaccccttcaaaatggccaatgcccctctccccggaaaacctggggggaataaacgcccccttcccgggaaaaaggagacacatgtgggcccccttgagaagcctttgggtatatctcgaaaaattcacgccaccttgggaatttgtaaaggaaacctcttggtttggctgagatgtcttgagactcttgttaattgaaaggtttaaactcgtgttccccccctgggtaaatttggttttaaataaacccctggtaacacaaaatactttggagagttgcaaccctccttaaagtgaacgctctgtttggctcttgggtacaacctcttcgtgggctcaaaggtgaaaagaaacctggcctcttgtgggaaaaacacacacgttccttgtgggctctcggtgtgaagtctctcgctgtggggccacaccaagcctctcttgaattctgtgcacagggtgaattaaacctggtacacggggtcgagatgtgtttctcgggaatttttctctctaagagaggctcgggcaaagagaaccacagcttgttttttgttcttgcgggttctgtcacacgggttggagaaagtccacaagccgctaggagacccacgtttcctctttttaagctcgaagttctcttggccagaacaccgtgggctgttacttgccttgagttgagaagcggtttgcatttaacgcctgtaaatgtattcattttttaatttatgtaaggttttttttgtacgcaattctcgattctttgaagagatgacaacaaattttggttttctactgttatgtgagaacattaggccccagcaacacgtcattgtgtaaggaaaaataaaagtgctgccgtataattggaaaaaaagaaa

SEQ ID NO: 88394 - DNA, 722 bp, Homo sapiens
catcccaaaagatgtgttgggcacctcattacaacctcaagagcatggaagtccaggctcctcacttggcctttgatgatgtgggtgtagtcaggctactgacttttctatgttcggatgcaacagaacagttattgtctaaaagtcttctgtcttgctaggttacctctttcttggtcctttgcctggaaaaagtagggttttgttagagtctttttttttttttttggtctgcacccattggtgtttctgagttgccagctttttcagcttcaactccgggatatgtgaaaccaaaaacaatttcccacaactcactgctatattgttcttcaagtcctgaggtctctagccagtccttttctcaatgtcttcttatatttgtttacatacaatgtccagggttttagttgtacttagtgggaagaagagggaaaaatatatctgcttcatcatcccagaagcagaagtcttagttttcattattttaaaatagacaaattagaatgcctttgttaacccaaatccccaaccaatttcttaaaatgtaattaaaacacagtaaaattgctatatataactgacaaattcttatttaagatatgaaatacctaaagcatcaccacaatatcaatcccattgttagtgaacagttgtttggattcagtgactgcctgaggctgggagtggaagatgaaatgaattgcaaagggtcacaagga

SEQ ID NO: 88395 - DNA, 823 bp, Homo sapiens
cttcccaagtagctgagattacagggttgcgccaccacgcctggctaattttgtatttttagtagagacagggtttctccatgttggtcaggctggtctcaaactcccgacctcaggtgacctgcccaccccggcctcccaaagtattgggattacaggcatgagccactgtgcctggccaatagtaattttaaacaacagccaaggaagctagagctacaaactctttcgttccctatagaaactaaaggtaacatcttcacatatgtctttgagttgttttttataaacctggacccccagcaaatggaaaatgccatctgccggcctgtagacctcagataagggggaacaaggactgaactctgcctgccacttattctaaatttcttcctgaggtgcccagaggaagtcatgcccacaggccagagctcaacattccttttgactgaccccaagtttttaaacaaagcttaatcaatcacaagtcaggaaatctttgaattcacctatgacctttagtcctcccaaccccgtttcaggatgtcctgccttttttaggccaagccaatgtatagcttcattttgttgattgatgactttgcctgtaacctctgccttcctgtctatattaggcagttcttgcattgctataaagtaatacctgtgactggtaatttataaagaaaagaggtttaattggttcacagttctgcaggctgtgcaggaagcatgatgctggcatctgcttggcttctcaggtggcctcaggaagcttacagtcatggtggaatgtgaaaggggggcaggtacctcacatggc

SEQ ID NO: 88396 - DNA, 478 bp, Homo sapiens
tcttttttttttttttcctgagacgagtcttgctcgctctgtcacccagactggagtgcagtggcgtgatcttggctcactgcacctctgcctcctgggttcaagcgattctcctgccttagattccagagtagttgggattacaggcacgtgcatgaccacacccagctaatttttatatttttagtagagatggggttcgtcatctggccaggctggtctcaaactcctgaccccaggtgatccacccgtctcagcctcccaaagtgctgtgattataggcgtgagcactgcacccggcccactggtttttctgtttgtttgacaaaaggaatgccagaccaactcagtctccaaacaagcgcccagatccagttatggctttaactgagattaaatggagaatctggtttcagggaccagttcttccatttttggtagcttggttcgttatggagactaaagttcttaccatgat

SEQ ID NO: 88397 - DNA, 298 bp, Homo sapiens
taatagaatgccatttatatattttgtttcaggtatattgttaatagagcttggcaaattataaataaatatatgtatatggttagatagaagtgactataatgcacacatatgtaatatatatagacacacagagcccttcagttcaggtacaatttgcgctatgaatgctgcaaacatttttgtttaaatatttgcatttatactttctaagtcagcatttatttttgtggctgtttacccacaatgaaagagttctaataaagatgtgctgaagttgcaatataaaaaaaaaaaa

SEQ ID NO: 88398 - DNA, 233 bp, Homo sapiens
gccagaatactgctttaggaaaatcaattacatacaacagggcaatagttgctaaccagtgggtaaaaaaaagattcacatggcttttaaaatatatatttatacaagtgttggtggccctacctgggacctctaaatctgaatctctcggaacaggttatgagcttatacaggaagaaaaaaaattgctcaggtatttctttcttttctttttttttttttttttgagacgg

SEQ ID NO: 88399 - DNA, 319 bp, Homo sapiens
ttccatccacgcacctgggctccatgcacgcacctgagtttccacgcacacacctgggctcccatgcacacacctgggtttccatgcacacacccgggtttccatgcacacacctgggctcccatgcacacacctgggtttccatgcacacacctgggctcccatgcacacacctgggctcccatgcacacacctgggctcccatgcacacacctgggtttccatgcacacacctgggctcccatgcacacacctgggctcccatgcacacacctgggtttccatgcacacacctgggctcccatgcacacacctgggc

SEQ ID NO: 88400 - DNA, 432 bp, Homo sapiens
aaagatacaaccctcctagcttaaatcaggaagaattagatactctgaacagaccaataacaagcaacaagattgaaatggtaatgtaaacattaccaacaaaaaaagtccaggaccggatggattcacagcagaatgtaaccaggcattcaaagaattggtaccaatcctattgacactatttcataggattgagaaagagggaaccctccctaaatcattctatgaagccagcatcaccctaataccaaaaccagaaaaggacataaccaaaaaagaaaactgcagaccaatatccttgatgaacatcgatactaaaatccttaacaaaatactagctaaccgaatccaacaacatatcaaaaatataatccaccgtgatcaagtgggtttcataccagggatgcagggaggtttaacatacgcaagtca

SEQ ID NO: 88401 - DNA, 473 bp, Homo sapiens
tagtagagatgggtctcactatgttgcccaggctagtctcaaacacctgggatcaagtgattctcctgccttgccctcccaaagtgctgagattacaggcgtgagctatcgcgcccggccccttatatttctttgggatagcacgggtctagaaaatgtggagaggcctgttgagcaaatgtcctcacctttttctcctgcagtgaccgggggcaccgggggtcccagcagcaatgattcccacccatttcttcagggttggcagggggacaagtctatatgagggacacccccattctctacccacagggtcaccaaatgaatctaatctccttccaggggtgaattcacttaattgtggctgaaattccatggtcacccttcacaagggttggtgaggggcaacctctagctttcctgacagtcatcaggtactagtgctccttcatcttgggttgggacaaagggcagga

SEQ ID NO: 88402 - DNA, 363 bp, Homo sapiens
gctacttgagaggctgtggcatgagaatctcttgaaccggggaggcagaggccgcagtgaactgagatcatgccactgcactccagcctggacaacagagtaagactctgtctcaaaaaaagtataatgtttttacttgtttatgggtataagtttctaaaaattgagagagccattgatagtgaaaaactgtgctctagtaatcagcaagcttctcactcctcacctcacaaatgggattgacttccttcagaataggagaaggtgaatgtttgtctccaggggcatgtctttcagtcttccagcttcttcacaagaaccccacatctcttagctgcagtccatatcatgactgcagtagat

SEQ ID NO: 88403 - DNA, 669 bp, Homo sapiens
gttacaaaggtctctcttctgcttaaaccaaatctcttacaatgaaattaaatctcatttctccatttttgatgtctggtggatttgttgtattttatttattaaagatttcttttccaaaattaaaaaaaatatggtaattaagcaatctttaggaaagcaatcactttacgctacatttctatatagcttcatcttcttcacagggcaagtcgccaaactgaattcctgagattgaagcttttccatcaggagctttggttggattggcatcacagtggtttgggtaaatccccgtgatgttactgaaacaacgaggatcatctgctgtgtgccaacactctcaccctggtggggagctgggtttattggttaaatttaattaagcataggtttagatttctgtgaccaatctgtttatattcaagtataatcagccttcttgatgtgctatttatttaatcaataaagaattcagaattgtagagttatgaaattttaaaaatatatttttaagcagttttcctttcagaacactcaatcacaaaatatatctaatagatgccattaatctcattgtaactaaaataaatttctacaatgcagtttccttctattcaaatatttgcatgatctggaagctaaaataaatatttagtgggaagccag

SEQ ID NO: 88404 - DNA, 300 bp, Homo sapiens
ctattcctaggtatttatttactcaagagatacaggacaactggagagtgaaatgagattagaatctaaaaaagcaaagttcacatttttttactttttatctttatagatctctcattgttggatttttttttaagtaagaaggtattgatgaattagtagtgtaaatttttaaaacatactatgggaatgcacatgccagatcagttatttattgggtacaggggcggatataggagagttgagggcagaaggtttatagagtacaacagatgtctgacctgagcttgaaaaccaact

SEQ ID NO: 88405 - DNA, 274 bp, Homo sapiens
aatggaaggcagccttgacagaagcgtgaccgaaggcagagaacaggagggtagagcgtgttcagaggcttagaggagacagtcagacttggccgatgtgatggcccagcagtgatgaaagcatcttccctctacggtggcagcactgtccacccactgcagcagcagttcctggctttacagttctacagcagcccctggcaaggaacctggcaccaccctcccatccctggggaaccacccaagagctgagttctccctactcccttccaac

SEQ ID NO: 88406 - DNA, 493 bp, Homo sapiens
gctttattcctgactttagagaaggcagtcagttttacttaatatgtcattttatgtcttatttgttatgttttgtttttgaggagtcatactggtagtttaaaaatactgagttttatcatcaaatgcagctacaatgtttaagcagatgacttaatctccgtgaggcatgaggtgattaaaaaatgtatgtatatgctttttcaaatacagagtaaattgcctggcagacaagaagagcttcataaatattatttagtgctttttattctagatttttgaaataaattggactcgacttgatgcaaaggatttgtactataagtttattataaaattattaaccgctagcttttgtaaatagtaaaattgatttgcccattatacatttctttttgttatgcataaaatattttaatttttaagtaccaacataggatggatttttaaatgcttcctcatgttaattttttaataaacatagaatgaatac

SEQ ID NO: 88407 - DNA, 209 bp, Homo sapiens
gatctacccacctcagcctcccaaagtgctgggattacaggcatgagtcaccacgcccggccctgattatcaatcttcaatattttgtattttgagcactttgttggatttgttatttagcacatgtatacattgttttattataatattgtgtgtaatttatttctgattaattttatatccttccttcacatttcaaatacttctaa

SEQ ID NO: 88408 - DNA, 319 bp, Homo sapiens
gagatcacaccactgcactccagcctgggcgacaggagtaaaaccttgtctcaaacaaaacaaaaactaagtgaggcacagacttgcctaggacaaaaagcatgcgaggcaaccatattgttaccggtgaaaggttttgactatgagttgacaggttcttggcgttttgaacaaataattggacaaaatgcacaaagcaaaaaaatgaagcaatgaaagcacacatttattgaaacaaaaagtacactccacagagtgtaagcaggctcaagcaaggggctcaagagtgctggttacaggattttctggggtttaaata

SEQ ID NO: 88409 - DNA, 418 bp, Homo sapiens
tttcagagagaaaggcctagacagccagatcaagtcttccaacaggtaagaagatgcgatggcccatagccatcgtatctcaattttgtaaaaccatctaaaaaaaaaaaatccattgtgggtcatatgatgaaaacttaaatggttctgcttattataattggggcttagtgtttgtggcaagaaggacaaaaacatcagcattatatatatattataaatgaagccacctacagtggaaaaggactgtgaaataacacaacagagagatgggtcatcaaaccagaactaaccttttcttttcttttcttttctgagactgagtctcactctgtcacccaggctggaaggttgcagtgagccgagatcacgccattgcactccagcctgtgcaaaagagcaagactctgtctcaaaa

SEQ ID NO: 88410 - DNA, 728 bp, Homo sapiens
tggaagtccaaggtcaaggtgtcctcaggattggtttctggtgagggctttctttctggcctgcagacagccacctttttgtgtcctcacatggtctttcccctgtgtgcatgtagaaagagctctctggtgtctcttcctgttcttataaagacaccagtaccagcagatagcttaaggccccaacttcatgactctttttaaacttaataaccttctcaaaggctccacctccattaccaatgggggttagggcttcagcgtatgaattttggagtgtgtgtagggggacacaatatatcccataacactcaccaaagtcttgcatgttttggaagtcagcagaggtctccagcccctgtgcttggatgacttcctctttaagtgagggataacaagtcaaacaacgatgtgactttggtgggaacataaagaagaaacgggggccaggcacggtggctcacgcctgtaatcgcagcactttgggaggcctaggtgggcagatccctgaggtcgggagttcgagaccagcctgaccaacatggagaatccctgtctctactaaaaaaatacaaaattagccgagcatggtggtgcatgcctgtaatcctcgttacttgggaggctgaggcaggaggatcgcttgaacccgggaggcgggggttgcagcgagccgagatggcgccattgcactccagcctgggcaacaagagtgaaaactccgtcta

SEQ ID NO: 88411 - DNA, 293 bp, Homo sapiens
taggagttcaagactagcttgagcaacagggggagaccccatctctactaaaacaaacaaacaaacaaacaaaaaaggaaaattctgcctctgccacttactagctgtgtgagctcagtagcagacaccaaccaggtacttaccagctctgtgcttcagtttcctcccctatcaacagagatgataatagtagcgcctatctctacagggttgttatgagacttaaatgagataatccaaataaagcagctggcccagtgcccagcacagaagtattagatttgatgatgagg

SEQ ID NO: 88412 - DNA, 1269 bp, Homo sapiens
tgcaaagagtacagagactacatttattgagcacctactaaagggcaggcctggtgcaaggcttttttacatctgtaatcacatataatccttagcacaaaactgagatatgttactatcttcctaatttcacattcaaaaaactgagatcagaggttaagtatatcttatcacataagcttggaaatggcagggcaggaatttgaacttaggtgcttctgactcaaatccatactcttacagtagactatctctctgttgcacatggtgaggatctttatgttcattgtggagggaaaagggagcccaagtctagagattgagtataaagtttgggccaaaagcaggagtagagtctgctggaagactcgctagcagccttagcattggcaccacctccttactaaaaccacatcttgcttcctggcagagcctagtactgttatagttggcagagcattacagggagcttggaagaacttccccggtaccttccaattttccctatttggtcagttcagacttgcgttagtgcaataacctcctaaccaatctcttggcccctatgcttgctttacctccagtctgttcttcgcgttgcacttagaacaacctttccgaagaacagaccagatcttgtcattcctgtgctttagctctttcaagggtttcctgttataattaggataaagtagaaattctttagcatggttggtttgctccttctatccctagccttacttctctccactgtgaacaccatgtttcagcccagcaggaccactattcctccaaatgtaccatgtgctctctcccctctgccgtgggcatattctgctgttcctttaacattgatccattcttcctccttttccttcttactcctacttgtcttctgtgatcactgcttaaaagtcatttttttcagaaagcttttctgaacctcttctccaacactacccccacacatgtagactagcacgctctaatatggccatcatcttattgtattataattaccttgtcttattgatataatttacataacataaaagtcactcttttaaattgtacaattcagtggtttttaatatatttacaaggttatgcaatcactatataatttgagaacattttcatcactcctaaaagaacccacatacacacccattgacagccactccgtgtttccccttcccccaatcccctgacaattattaatctactttttatctctatttatttccctagtctggacattttatgtga

SEQ ID NO: 88413 - DNA, 560 bp, Homo sapiens
taaactctactgcaacactttctaagggctctgtgtgccaaaatttcttacctttcctattcaaaactgtttatgagagtaatgaatatctggaatgagaagaaatctgattgaaggaattcattcaaacatacagcttaaccccaacccaaattaatattgaattgtttgaattctacacagaaaaatgaagttgaaaaaaatgcagatagtagggcacggattgcttttattggaaagctgacatggatcaaatccttaaggatttattgttcttcatcccttcattccttcttgtttttgagttcacagttctattaaagttccaggttgttcccttgtttattccaacctggaatgttcttcccccttccctttcaactaattatattggtcactaaccaccacttcccctacaccaattaaatcctgtttccttggatgtgatgggatattcctgtgtgctttaatgtcttttttttttttaaacttttcttttggcacttatagtcagtatcagagtatcctccagaatattttctatgtattaatcttgcctt

SEQ ID NO: 88414 - DNA, 230 bp, Homo sapiens
gagggtggggtgagatgggcactggtggagcacgcacaggtggtaacaataccaggatgcagtcatgggctgggacattcgctccccacagggcccgggaagaattgcctagaatcgctgcagtggccagtggccgggctggctctaactctcccctttgtttggcctcacaggctgtgtgggctgtgcaactgaggagaggctcttccacaaactgttttctcattaca

SEQ ID NO: 88415 - DNA, 2167 bp, Homo sapiens
cgggttttgatttctgagaagacacacacggattgcagtgggcttctgatgatgtcaaggttggatgcatgtggctgactgatagctctttgttttccacaatcctttgcctaggaaaaaggaatccaagtgtgttttaaccatgctgaccagcaaggggcagggattccttcatgggggcttgtgtctctggctgtgtgtgttcacacctttctttaaaggctgtgtgggctgtgcaactgaggagaggctcttccacaaactgttttctcattacaaccagttcatcaggcctgtggaaaacgtttccgaccctgtcacggtacactttgaagtggccatcacccagctggccaacgtggatgaagtaaaccagatcatggaaaccaatttgtggctgcgtcacatctggaatgattataaattgcgctgggatccaatggaatatgatggcattgagactcttcgcgttcctgcagataagatttggaagcccgacattgttctctataacaatgctgttggtgacttccaagtagaaggcaaaacaaaagctcttcttaaatacaatggcatgataacctggactccaccagctatttttaagagttcctgccctatggatatcacctttttcccttttgatcatcaaaactgttccctaaaatttggttcctggacgtatgacaaagctgaaattgatcttctaatcattggatcaaaagtggatatgaatgatttttgggaaaacagtgaatgggaaatcattgatgcctctggctacaaacatgacatcaaatacaactgttgtgaagagatatacacagatataacctattctttctacattagaagattgccgatgttttacacgattaatctgatcatcccttgtctctttatttcatttctaaccgtgttggtcttttaccttccttcggactgtggtgaaaaagtgacgctttgtatttcagtcctgctttctctgactgtgtttttgctggtcatcacagaaaccatcccatccacatctctggtggtcccactggtgggtgagtacctgctgttcaccatgatctttgtcacactgtccatcgtggtgactgtgtttgtgttgaacatacactaccgcaccccaaccacgcacacaatgcccaggtgggtgaagacagttttcctgaagctgctgccccaggtcctgctgatgaggtggcctctggacaagacaaggggcacaggctctgatgcagtgcccagaggccttgccaggaggcctgccaaaggcaagcttgcaagccatggggaacccagacatcttaaagaatgcttccattgtcacaaatcaaatgagcttgccacaagcaagagaagattaagtcatcagccattacagtgggtggtggaaaattcggagcactcgcctgaagttgaagatgtgattaacagtgttcagttcatagcagaaaacatgaagagccacaatgaaaccaaggaggtagaagatgactggaaatacgtggccatggtggtggacagagtatttctttgggtatttataattgtctgtgtatttggaactgcagggctatttctacagccactacttgggaacacaggaaaatcttaaaatgtattttcttttatgttcagaaatttacagacaccatatttgttctgcattccctgccacaaggaaaggaaagcaaaggcttcccacccaagtcccccatctgctaaaactgatggctacatggaaaaagaggactttcttgcacattaggaagcagaatatcctccagtgtagcacagggggagaagtgagaagtgttatgacattagtgccctgattgggcagcacccacggctacagtatcaggtcaggtttctcgtgtctgtgtgtttggcttctaaagacaagaatgacttacaatacagcctaattatgtaattaacatcaagccacactaaaaagttctgctgtacctccagtggatgctgtttctcagtattatgacatgtgacaggtgaactctgggaattggaccatgcaacatttgtgaactgtttgcaacactttgtgaactattgcatccttgatttcttgtgcatgtctctgtaatgtaactcaccctcctcagcattatttgatacactgattgttagtttt

SEQ ID NO: 88416 - DNA, 174 bp, Homo sapiens
gtcaatgttgccttgcctgggaaggaccacccgggcaatcttatatatctactgttctctaaaaatgccacttagaagagaattgaaacttccaaacacatgaaaggatccaaggaaagtgtcttcaaacaattacatatgagctttaagtggaataaaaacagagttaccatg

SEQ ID NO: 88417 - DNA, 334 bp, Homo sapiens
agctgtcttgagaaatatgggaggattactgggtaacattattttaccagaaggcagaataaaggacagtagggcaagataattaaatatattggcaagagagtggttcacttgacccttgggatcttatttggatagagatgaaaatgaagacaggataagactgataagtaaaaataatagtggtgaagacactgcgaggttgtgaaaaatataaggaagtgagatttttggaaggctatgtggttgtggttagaaagtaggtcttttggaggaggacagtttcaagtgtggctgtgaaaggagtagctaaagtcttggaggtgtagaccac

SEQ ID NO: 88418 - DNA, 671 bp, Homo sapiens
ccagctataactgaggtcccaagccaaactgcacggcaagtctggggcagagatgggtcccgacgtccctgggctgggcccagggttcccggctctgtggctcacgtgccgcttgtgtgatgtagagactggcttcgggtgccgtgaataaaccatggctgctttctcaaggtttgctttggttcctttctgttgtggtctgtgtagtgagaatggtgggagtcttgcacgtgagcagttaaggagtgtgttcagagctggaagtcttggttctgagagcaggctagcctggtcatagttctcatcgtttccgcaccgtctctaaaaaggtgtcgctttgcaaataacatttaactcgtgttctccccagggtgagattctgccaggagcacctgccacagaggccagcattggagcctcaggggctacgtgcagggccaaggctggccttctccctctgggggacgccagtggaggtgacctccacagcacgccggccagctggcaccaagctcctggatgttgtggctgtgtagaaccagattctgtcttgtggtactttgtccacgatctcaggagagaagcgctagtctgcccgcccgcgtgcctgccatgaaacgggtcccagggcctgtgtgcgtcttacttttgtttgggttggaaagggtgac

SEQ ID NO: 88419 - DNA, 1666 bp, Homo sapiens
tgagtgatagaattttgttgtttttcatggctaaatagtactctgatgtgtatatttgccccattttctttattcattcatccagtggacacttaggttgattacataccttggcctatttcttggctatcgtgaatggtgctgcaataaacatgggggggtggagataacactttaacatactgatttccttttctttggatatgtaccaagtatcatataatagtatgacatgactcaaaattaaggaataagattgtggaaattggttttcaaaaaaaaattctctagtttgaatatagagaaaaattggtgagtgtcttcagctgtcctcatacataatgcatgtgagctcgctttaagcataagtgaaggagtggaaaaatcctggagatagaaatcaaggggtatacatgtggatgtaaaaaatcaacaaagattcttttaagaaaaggtgtgtatgggtagggaacaatagcatgacagcagtgcggcctctaacagtctggaaccagttaggacaaagagcaggattgagcgccattccattcatagacaccgtggtgatattttgagtacattaggttaaaaggctttcttcagcaaaatctatctctagagatagatttgatttttataatcaaatctactagagatagatttgatttttataatcaaatctaccagagatagatttgatttttataatcaaatctactagagatagatttgatttttataatcaaatctactagagatagatttgatttttatacttaatgttctagactgtatcttttcaggatgctaggtactttatgaagatccatgctgtctcaatttgcatagtgggttggaggtccctaagacaatctctccagattctatgatttgctaagaggactcagaatatagttgtactcatgactatattatagtgacaggatacaaataatcagcaaagggaaaaggttcttgtataatatctggagggaatcagatgtaaatttgtaaagatcctttgtgcatggagtaacaggtctcaattcctccagtattgaattgtgactgtacttgtgaaatgtctacaatggaaattaattatcaacccgtaccaaaggttcttattggaactaatcatgtaggtaccatccctctggtacatatcaagattctagactccaagaaggggagcaagtgttcagaataacttgaaccatgcctaccagttatggaatggtggcaaccctctcaaactccgtgtttcctaacaccagctaaaggccagtcttataagcagtcctttctaagatttgcagtctcaggcctgttatattaactttttgtgcacatagtactagaaaactgttggctcagtcttctttttgttttgtgtgttttggtttttaactgtcaccgataccagaatagctcatctccaaggtaactgtaacagaacactcagcagattaaacagaaaatacttgcttattataattattaaaagtttggtagggtctatgtctgctctctggtgtgtcctggatcatcaacttggttacaacatggtgttaacatgtgggactgattgtgtttcttgttaatatttctgtttctcccaaccacgctgaatattaaatacctagttctatatctagtaccctga

SEQ ID NO: 88420 - DNA, 782 bp, Homo sapiens
cccggctgggaatcaagattgtgtggctgggaagacaccagtctctgtgctcgggttcagcccagtcgggcaagaaagtctgggcagctggagaaggtcgtcacagtctcccgtggaatcttgttgcctgagagccccataacggaaagggctaagacgactcttccacacacaggtcgcagcccctgccgcggaggatccccaggaagatgctggggacgctctgagcatcggcctttctttacccccgactccctggagcttggtctcgggatgccaacttggggcacggaggcgacgggctgctccgaagctggagggtttctgcttgggtcagagggatcacgacctcagcagagccaggagaggttgggtgacacccactgcgtattgcacttgactcaaaactgccctcggcctgcggaagaggcgagggcaagaagcctggtggcgggtcaaaccttcaccctattattttctatcattttttatgcccatatatttgttaaatgtatggctgctatacaccaacagcttattctacaagaagtgcccccgaggaggattgggttaagctttgcaaatttggcttcccaggtaatgcgcttcattattctgctcccgacttacccaccacaccagtgggtacccggagcagcacccacttggcagaactgatgactgcttgggcccagcggagtgcgcattgcgctaacacgcgcacgggaattgcacccttgccggagcctccgcaccgtgcgcccttcaaagagctggcgacc

SEQ ID NO: 88421 - DNA, 393 bp, Homo sapiens
ttgcttggagcccaggaccctcttaactggtttcggcacttatcaccatgggaattggtccttgtattgttgttgagttggtatacctgtggagggtctggggattcctataacagcatcttgctgatgtcactacctctgttatctttttaagctatatatgcttttacaaattattttattgatttcctcttttgttgattataacacacatccttgacttattacctcaattaaatcaataattttaataattccaggcaacgctaagaccttgaatcattataccatttacttgtaccctactttttgttactgatatgcctttcaattatttatatgttctagacacacagtacattattatcattgttttgttaacacctatatatg

SEQ ID NO: 88422 - DNA, 417 bp, Homo sapiens
ctgatctagaggatcccgaagttaagggctacctaccttaagcatgctcagaatacttacattagtctacacttgagcaaaagtatctaacacaaagtttattttataatgaagtgttgaatatatcatgtaatttattgaatactatattgaaagtaaaaaacagaacagttgtatgggtactcaaagtaaggtttctactaaatacatattgctttctcaccatcctaaagtcaaagaatcttaagttgaactattataaattgggaaaagtctgtatatgaaaccatcaatattagcagaaatttaaaggttaaaaagtaataatgcaaaaactggttttggatttagtttttgtcaaaagcgaaaaataaatattttcctgctgtttgcttacatttatatttaatctcctgt

SEQ ID NO: 88423 - DNA, 355 bp, Homo sapiens
gtttatgggctacctccagtatatctattattatgcctattatgcaaatgagaaaacagaggctcagaaaagttaagcaacttacacaagatcttgaagtcagcaaataatgtagcagcttctcaaattcaaaacatctgactccatgttaggtgatataccctaacaccattatatctttcctagtataaggatggactcaatctctgagacctcttttaagtctcagattctgtaggtctttatttatgagtatgaagttattcaagtaatctcatctatctggaatacaggcaaaaaccaggaaataatttaaaaaaccagtgaaaaaggtggtgggggcatgtgtattgat

SEQ ID NO: 88424 - DNA, 462 bp, Homo sapiens
ggataatagtggtaacagctagtgtttattatcaagtactaggtaaagttccaagttctttgtatgtattcatttactaaatcaccaaaacaacccgttacttactatcctctttttttttaaagaaatggaaactgaggcacagagaagctaggtaacttgctcaaggtcacacacctggtaaacaaggatcagggatttgaacctagacagtctgactccagagtctgtttccttaattacttcatacagtgcttccctggtctaacctggtattatgaggattaaatgcaaaacaaaacatcacacacacacacacacacacacacatacacacacccctcttttagcaccagacttaatttatagaaataatacaaattaataatctttttagaagacatatcactgtatgttatttcatcctctcatgaggatcacaaaatggtattatattactct

SEQ ID NO: 88425 - DNA, 335 bp, Homo sapiens
ttctaacaaaataccatcaactgggtgacacagacaaaaggaatttatttctcacagttctggaggctggaagttcaagatcaaggggccggcagatgtggttcctggtgagggctttcctcctggcctgctgtgcccttacaaggcagggagagacggagcacttgggtctcccttcttcttataaggacacaaatcccaatatgggggccctacctacatgacctcatgaaaacctcattgcctcccaaaagttccacatccaaataccatcgcattgggagtcaggccttcaatatagggattttgggggaagacaaaaacattcagtccat

SEQ ID NO: 88426 - DNA, 367 bp, Homo sapiens
gcactgatcttcatcacgctatctcttttaaattcaatctgtaaccaatagctacttacagtgtgtatataagcactcaattccatacttataataattgtacattgagcacttttcaataagcatttgtctaattatttatgagaatcatataatctttattacaatctattttacacataaataaactgaaaaaaatgtttttgtaaattgctcaaggtcttatcaaaagctaagatttgaggcaaatattctatcttaaaaagtggcattcttaactatatcccaaggtagtggctaagacttaatgacataaatatataaattaggagttactttctattgggtaattcaatttgcctctttg

SEQ ID NO: 88427 - DNA, 284 bp, Homo sapiens
gagacagggtctcactctgtcacccaagctggagtgcagtggtgtgatcacagctgactgcagcctcaacttcctgggcgcaggaaatcctcctgccttagccccccaagtagctgggaccacaggtgcatgccaccatgcccagctaatttttattatctgtagagacggggtctcactatgttatgttgccaaggctggttctcttcccattttaaacctgtttctgattccaggaaaactctaaaataggataatgatttaagttatcatttattattaat

SEQ ID NO: 88428 - DNA, 746 bp, Homo sapiens
gagattgagtgatggtgagcgggaggaacaatggtcaagggaggttttcatttttaatataattcttgtgcaatattccatgcatcagagtattataaggtctgtgtatggttagaagaagaataaaatgaacatgatttacccatcaccagagagaaacaaggactttgggggccctcccgttccccttccatgcacatctccttcctgcttcccagaggtaaccactttgttgagtcaagtgtttattatttgagaaaggttttttttttaaagcccttgattgggtgtaaagctatcatttaactaatttcctgacattctcctagttttgttttgttctgacacatttttaaagttaagttttatgtcatttataatgatgctaaaagcattttggcaggagctaggttaattctctgtagccttttctcttggcacatgtgaaagagaactgctggttggcgggtggctcacccctgtaatcccagcactttgggaggctaaggcaggaggatcagtagagtccaggagtttgagaccagcctgggcaacatagtgagacccctatctctacaaaaaataaaaaaaaaattagccaggcatgatggtgcttgtctatagtcctaactacttgggaagctaagctgggaggatgcttgagcccaggggtttgagactgcagtgagttataatcatgccactgcattggctctttggaaaaaaaaaaaaaagagagagagaga

SEQ ID NO: 88429 - DNA, 267 bp, Homo sapiens
gccctgatagattaagtaactcaccccaagttgcagagctagcaaatggcggcggtatcctgcctccttataaggttgttgttgggcatagacgtgaagccccaagcatacagcatacaataggtgctcatgaaatgatggacattattaggaagaaaataaggagtctcctaaatgagcagacagtgatgatggcattgccaggatgcacctgagacctccatgctgcacacaagccttgcgcattttctgggatctgtgcctggc

SEQ ID NO: 88430 - DNA, 447 bp, Homo sapiens
ggatctagaggaccccatgggtgctccatcccccccaaacacatcttttgctttctaatttgttaagcttaactgtaatctttaactttccaaagtgaaggcaaagaaattttcttaatgtatttctttgtgatagggaaaaagtgatacttttcttctacttcgtcttcaaatttcttctggaattttttttcagtgaccttatctctactttttcattttccctattataaagaaaatagtcatctcttctttcatacatttatcttttccatatttgatgagcacgcctccccgcacttaagaaaacattgtaggaaaaaaatattaatctaaaattgtacattgtactctaatatctgtttttcatttgtctcccccattagactctaggcttcttgaaagatttcttctttgttttctacacccagttcctgcctgtcatat

SEQ ID NO: 88431 - DNA, 352 bp, Homo sapiens
ccttggttgtcttataaacattttgttttgttttacagtatgtttatttggatgagatttaagacaaagacaatacactacaaatagatgtcttttgagtctgcttccccctattttctaattattttactaatacagtgtttgctttatatacgttcttcttattcaaatacataacattatcaccttgataatgcaaataacacaatatggaggaagattgagaacataggctcccagtacttagtcactgggattatagagattttccttttagtattttctatcaaaatttaaagatgtcctgccatggctgtgcaagaatagaactgtctggaatgggagtgcaatg

SEQ ID NO: 88432 - DNA, 492 bp, Homo sapiens
atgcagtcaagacatttgttgaaaatactatacccaggttcagattaatagaaaatgttgattcagataataggactcatttcactacaaatgtcattaagaaactagcccaagtactggatataacatgggactaccatatcccctggcacccaccttcatcaggaagagaagaatgaactagactctgaagaaacacctaaccaaattagtcctagagattcaattaccgtggattaaatgcctttccattgtcttgttgagaatctgaactgcccctccaaaagatgttggcttaccccttatgaaatgctgtttgggttgctttgtttacactccactgctgacattcctacatttgaaacaaaagatctattccccaaaaactatatacttggtccatcctccactttctcttcccttagaaccaaaggcctcctagcacagaggccacccctcgaatttccagttcaccaccaccagcctggagac

SEQ ID NO: 88433 - DNA, 340 bp, Homo sapiens
cagaaaattaatttttaaagggcaaatgtacttactatacaaagatggaaatcttgcaagttatttttattgcatgctttcgtaacaaaaattgggaaaatgatcacccacaaggccaccacctttattaaagggattgcttgtctttgttctcttctagtcttagtccatacacataaatcttttatctgtcttgtaaccacaatatcaattctattctgggttcagggattttctttttcaaacatcaaatgtaattcatgtgtctacaccagtatatgggagagttcgttcccctcaaccttacaaacagtgggtgttacagctaatctcacaggtt

SEQ ID NO: 88434 - DNA, 561 bp, Homo sapiens
aatacaaccatgtcttgttctctagtgtcatgaaaggccctccctgcatctgcattaacaaaacagcttagcaaggtagagaccttcataaaaatatccagagctgaccatttctcattacctccactaccgtcactgtgagctaagccaccgtcacctctctcccaggatactgcaatagcctcctaactggtttccctgtatccaccctcactccccaccatctactcttgacagtaacctaaatgagcctgttaaaatgctagtcagactgtgtcactcccctgctcaaaactctctgatcatggatcagtctaagtcctggcaggaaacagatggcacaaagtgggtgatttgaggagagtttataaaggaactatttacaaagatgtgggcaggtgtagggaaaccacaagagaaaatgcagtatctggagctggtaaatcaggggtacctgaactcctcatagacctgaaggtgtgaaggatggagagggagggagacaaagagctccgcagagaaggcacatgacaggaaatgtgaccttaagtctaaggaaac

SEQ ID NO: 88435 - DNA, 405 bp, Homo sapiens
ccattgactgaataatgcataagccagaatacatacatataatggaatactaaccatagcagatgtgaatgaactagaaccaccagaaccaatccaaataaatgtcatcaacagaacactgaagaggagagcaagttgacagtgtggcatcctttaaaaaaattttttaaatgcgaaatgatactatatatcacttttgatacacatgagtggtaaaaaaaaaactgctcctgcacacatgggaatggaaacacaaaactcagaatgggtggagggagcagctgagttcaggcaaagaccccacagcggcatcaactgcgtgtgtgcgctgtcctctttcccatgctggatggagatacggtgtgttctgtattacatcagcctgtgtgccccttctgaatgtct

SEQ ID NO: 88436 - DNA, 378 bp, Homo sapiens
ccggccaggccccaccctttgggagagccctgctctgactgctagaagccaagcccctctccggggaaagcagaggagggcggtggtctctgtgggtacctgcggctaacagcctggccaggacagggacctggccccctcttgcccctgtacacaagggcggccagtcctcatgtgagactcgtggccccagagcaggctggagcatcctagggacatggacaccctgggtttgcctcttactgttgggtccagccatgacaagggtgtgctctagttcatgttaatataaggtgacccccagcccctaacacccctcctcccccagcacaacaccaaaacccagggcacccacctggcagccaccacccctctccc

SEQ ID NO: 88437 - DNA, 489 bp, Homo sapiens
tctgcttggagagttgaggtctggttgtcagtatctgggaactcaggaaaagagggttgggtaaggagccaaagaacatttagtatattgggctcacacaatctgtctctgttaggatgcctatgtcttccaccttgtatggtttaccctcttgagaagagaaatctgtcacctgccacattgagggtggggccactcagcagcttggaagaaatctgggattctaactgttcagcattcacttgctcctttcttttagtcccccttccactctttgttctggcagttcctgagccttttgaggaatctatggcataaaccggtttgttcttagttgtcagcattgctggcttagaatttggccatctttggcggggtgcagtggctcacccctgtaatcccagccctttgggaggctgaggcaggcagatcatgaggtcaagagatcgagaccatcctggccaacatggtgaaaccccgtctctacta

SEQ ID NO: 88438 - DNA, 891 bp, Homo sapiens
attaccaatactgagttaaatattttaggactacttcattatctaggaaatttgagaagcaaattaactctttgctcagagtattgtgataccatatcttttcttgtaaaataagatattgtttaattataaaatattgtcaaatttctgaaaaagtgtttatataagtgttaggaatatgttagccctgggagccatgtgttacttatcattgtacagatcttcttgctgacacaactgggtatggtagacggcctgatatgattaactgcaagtaaagcagaaattattaaaaacaatattgaggccaggcaaggtggctcatgcctgtagttccagcactttgggaggtcgaggcaggtggatcacgaggtcaggcattcaagactagcctgaccaagacggtgaaaccccgtctttactaaaaatacaaaattaggtgggcatggtggtgggttcctgtaatcccaggctgaggaagataattgcttgaacccagaaggtggaggtggaggttgcagtgagtcgagatcacaccaccgcactctagcctgggtgacagagtaagacaacgtctcaaaaacaaaaacaaaaacaaaacaaacaaacaaactaaattaactggatgttaaatgtggtttctttacatttaccagaatttctgccaaggtcctaatggccccaaataataggtgctacattatcaagcagatatatcaagagattgtgataatgttaatgaaacccctttgctcatcactcatttccaaaatttatattttcaaagggaattttgtacagagttcctaaaaaaagggatcatgatgccagtgtattgcactcactgattgctaaatgaagaggactatactgaagcattcaaagaacgtg

SEQ ID NO: 88439 - DNA, 168 bp, Homo sapiens
atccacctgctagaaatgaacttgggtaaccccccaggggtgcacaaagacagggaagacagtaacatactccatactctttcccaccccccgttgtactgcttccattctttctgctctcatacacaaatgcccacagcttctcacgccgcccctcttaccccccaa

SEQ ID NO: 88440 - DNA, 122 bp, Homo sapiens
acataaagagctttattttttttctagctatgtattatatctttgtagggatgaattttaatttatataaccagtctcctattgatagatatttaggtttattcccctcactcaccctttgc

SEQ ID NO: 88441 - DNA, 346 bp, Homo sapiens
cagtggtgactcattacgtcctcattttttgggacctttgctcttgcaagtagttttatttgctaacttcccaccagttcacatgatagcatcctgggctaagcatcaccatctcttgcctggcttgttatacaagtgtcctaatagtttccctgcttccaaccttgccctctacactccatggcagccagaacaatccccttaaaacttaaggcagatcatgtccattctctccttaaaacttagaagatgtttcccacttgcctcagagtaaaagcctaagtctccgtagtggctgactcagcctgcatggtccagtcccctttacctcactgacctcttctcc

SEQ ID NO: 88442 - DNA, 245 bp, Homo sapiens
aaggtcagcaccactacactccagcctgggtaacaagagcaaaactccaactcaaaaaaaaatgaagcataatatgaagatcaagaatgaaacaaggactacaaagacatttataatatagtggtgttcaaagccatcaagagaaaatcagaaggttgtcagaaaactggggaaagaaaataatcaagaatggaattggaggccaggcacagtggctcacatctataatcctagtactttgggag

SEQ ID NO: 88443 - DNA, 747 bp, Homo sapiens
  misc_feature (741)..(741): n is a, c, g, or t
ccccaatcctaacttttcttctgctaaaggcatacttcactggttcccacaaatagcatccttctgtagcctgctcaaatgcacatcttcctttaagcctcctgtgttgctccttccccttgttagaaacccgttatctgtactcttatggaacttagtgtaatagcaaacccccacccctgctccaagggctattcacagactgtcagagttagggaggagaaatgacttagaggaatggggtaaggggttttgatagttcccggtctgctcctaatagtgagacccgggcagtcagtcatggctcatctttgtggttcagtttttctcagctgaggaatgagtggtttggattttatttcacatggccaaatgatgtgttggtagtggttccttgaggtgctgtgctgagaaggactctgaggctgcatcctgactcagctaatgatcacttaggaatatcgccatgggagtggagagtgaaagcatacgagaggtatctgagctgcttttggactaggtgatttaaatgtctctttttgttctaccttctggatgctttgatttactgacttgtgaagtgtcttgcccaagatcacgtagcccattaagttttcgaagctgattctctgacacagagatggttaaaagctacacatttgactctcacattcatacacgtaggctggctgtgggagatgaaaagctagaataagaagttctagaagatccatgaccaancccaaa

SEQ ID NO: 88444 - DNA, 524 bp, Homo sapiens
ctctagaggaccccttataagacgacagaagggcgagaggtatctgagctgcttttggactaggtgatttaaatgtctctttttgttctaccttctggatgctttgatttactgacttgtgaagtgtcttgcccaagatcacgtagcccattaagttttcgaagctgattctctgacacagagatggttaaaagctacacatttgactctcacattcatacacgtaggctggctgtgagttacctaatacgagccttttaaaagaagttctagaagatccatgacttattgaaaacacaagactactcaaactctgtatgtctttgaggttgagtgaggtcacttttcacctctttgtcttctttgcttcctaggagttatgatgtccccactattcaaatttatgtcaaagatggcagttcaaggtcaaggtcagaaaggcaggtgatcctgccagggtcttaattggatcagccttaccccatgaatccattagatctcctgttccccttctgtcgtcttct

SEQ ID NO: 88445 - DNA, 385 bp, Homo sapiens
aataaatataaatattaatttttgtaggcataataaacaactattttctttgtaaaaacattctttttatattaaaaaaactaggaaactaataaaaaatggaaacccgctgccatgctacagaaggaacttctgtttagctggttgatctagtttctagtccttccaaaaagcatttttacacacacatgtccataatgattttcttttgtttttatgaaaatgagattgtacattatgtattattctgtaagttgccttttttcactgagtgtatcttggtaatttttccatattagtatatatgtacacctacctctttttaactgctacatattattccataatatgaacataatagttttattgaaccatttcctaatta

SEQ ID NO: 88446 - DNA, 197 bp, Homo sapiens
tgggcaactgtaatcccagctactcaggaggcggagacggaagaattccttgaaccgggaggcggaggttgtagtgagctgagatcgcgccactgctccccagcctgggccggagccagactgtgtctcaaaaacaaacaacaaaataaaacaagaaaagatttaatggaagacctcaataagccattgtaggctgt

SEQ ID NO: 88447 - DNA, 364 bp, Homo sapiens
atgattaatgtttagcacattgcctggtaaatagtaagagctcaattaaacattaccctctcatcttcattatcactggagatccacgtagtacttagaaaatttgtggattactgaatagcattgagctacttctgaagagaaggggcaaatttgtttcatttgggatgcattactggcagttttttataggtctttttggatttatttatttatttgagatggagtcttgctctgttgcccaggctggagtgcagcggcactatctcggctcactgcaacctttgcttcctgggttcaagcaattcttttgccttagcctcctgagtagctgggattacaggtgcctgccaccacgcctggc

SEQ ID NO: 88448 - DNA, 456 bp, Homo sapiens
gtaatacggagtgctggatgaggaaagtgagtgaagattgacctttatcctgtctcagaatgggaaagttctttttaaaacatgaaagaaaaagattaaggtgtcttatactataccaagttttttgaaccacctgattttattaaaatgtaactgaccaacagaaggatgttttaaacaaatatggcagacaaaaggtggatgtatttaatatataaagagctttaatgaatcaataaaaaaatcacttaatacctaaatagaaaaattaataaaaggcatgaccagactgtttctacaggaaaaaacaaaaaacaaaaatcagtgtatatttaataccttctgtcttatttttacaaaatgttctgaggctcatcaaactgcacccttgaaatgagtgcatttcattgtatgtaaattagacctcaataaagttgatgcacaatcttctgatga

SEQ ID NO: 88449 - DNA, 1609 bp, Homo sapiens
tgaaaattatagaatattaaaagaagtaaattcataaaattataaattactaatctttaaaatattcttaaattttgtaaaagtggagataaaaactgctaaatattaagaagtatagcatttcctagatctaccagcttataagaagccagataaaatctcagatggaaagaaaccagtttcttctggtatgtagcacacagtagccattcaaaataaaatacatggatgagctttagagtaaaacaaaaaattataatgctcttcctaagcatctctcacagtaaaaactcactgtccaataaagagccaaagaaaggaaaagaagaaaaatgttaaagttaatgaagcatagtacttgtcccaagtaatattatttaataagcttaattttatgagttatcattatcaataatttctatttctaccaagcttaattatggtaaaggttaattttaaacatgttcacacattcttttttaaaaaaatgccctaattgaggtatatttctgaatagtttcagcaggttattttttaattttaaaaaagcaaattcacaaacctagacccatttattttatactcagcagaagacagggaaatttaaattagacaaagttgaaaaagaatcagaatttatattttacaaagcttctaccactctgaatcaacaaaatcaggaatggaaaaaaaaatttctgtatctgctgaattattaatgccactatagtattatatgctaaatatgaaagcagtgctgccatcagtttcacttctgccttggaatcttgctcctaagttagctctgtggcataacaaaattccagttaataaaattttcatttaaatgtcttttgtatggctaaatgaatatacagattcttaaacatctaatttttatatggatttctcaaagaatgccttacagaagagcattctctgattaaatgcaattacagttggagtctttgattcttcacagaattctgtagttgaagccagaaaacactgtcatttaggaaagtgttcctaaaggtttgaatgctttaacatgctcaactcttacttcttgaagtgtttgattgtcagtaaattttcgaagaacattaaagttctaccaatgtagaagcatgaggaataaaagatggtctggatcaagaatgcaggaatatgatacttgtactttgtttttgataattttcattgcttataacaatgaaaaactttaatatttgcaggagactaatatgaaatgctacatttcataacttttattctgcgtggcaactttgatttgtggtggctgcctagaatgctttattgagaaggattctgaggttacatccaggatccagggggaaaaagttttctggatccactggcattgacccttatatagaggggaaggagggtcttaagggaaaattagccatctcagatatttgccatccttggataagagcgcagaaaatcattcatgttttagaaactggtatcgccatttgttgaggggaacaaaatgtagtttcctgactataattaataatactatgatatagtccaatttagctatgatataattaataataaactactttccagtcttaca

SEQ ID NO: 88450 - DNA, 264 bp, Homo sapiens
actgaatgagtcaaatatgatatttatagggccttaataaaagcttttatctagctaggttgtattattaaatgtcaaacaaactaaatgaaaagctttcaacgtgaaggctatccaaaaagagcagaatgagcagagcattaaaaatgttgaggtaccaaggcatcatgcattgagtgggggctttgaggtcccacagtcctaaatgtgaaactcagttctgccactgaccagttctgtgaccttgagcaaattatttaatgt

SEQ ID NO: 88451 - DNA, 435 bp, Homo sapiens
gtggaagagttcccggccgcagaatttttgtatttttagtagagacggcgtttcaccatgttggccaggctggtctcgaactcctgacctcaggcaatccgcccgcctcggcctcccaaagtctgggattacagatgtgaaccaccgcacccagtctctatttagtttttgggatcttccccccatcatttgcagctgaactgatcttaactctctggcctgcccaactgaattgttaatgctgctgcagctctgaatgggtgctagtttgggcatgccagtttgggcatgtggtgtacaggtgggggcaagtatatgtcagaatcctgagatggagtccctcaaatacacagcagaccactatcactggcaacccagcacttacacaagtgataaatccaaaaaacactagccaataaagaagactcagggatt

SEQ ID NO: 88452 - DNA, 312 bp, Homo sapiens
gcaagttttaattaatatggcccaaaaatttgaccttgaaggatatttgtaaaccagagagtatttaattaactaaatttactgtttctgaaaagcaatattttcaaataactgccaaccaaagtgacactatagggatgtcatttgtacatgacaatttttaacaatgtaattcttaccactctcgacagacctgaatatgtttactaataactttgccaaatttttcaacttctagaataacaagagtgagtcttttgaacttcatcattttgcaattgaaataaatcttgtcctttcacctatatcttc

SEQ ID NO: 88453 - DNA, 1013 bp, Homo sapiens
tttttgaccattctcttttagtctatgggaattacagggttgccgctaaaatattcacttgttcatatcgtgtcagagatttcctcttctctggagcttaggtggctcttcacaatccataggcttgaatctgcaacctagtgtaaactgccttgctttccccggttctttcccctgctagcacctgctttctcatccctatctccagtcaaagatgggattgcttaatccaactctggagagggaccaagtcttttctgcccacatctcacacaattgaggtgtctgaacaagcttggggagggtctataaggggtaggctcaaaaaaaaaaaaacccatttgcagaggcagttttgccaacacaagggctctttcaagccgactttcacaaagagagccggacttgttagttggcttctgtctctttagagccaagaaaatagtaattaagtggcctagatataggaagggcagaataagcacttactccccctgccttccaagatgaagaggagaagcaggccaaccctcaataattgcaagcctgaagagaagtgatcttagagaaagcagagaacagaatggactggatagacatcttgactctattcagcccgtagtctgtgatctggagagtccagttaaggtaacccagatttttgacaaccgccttcctgctgagccaaagttttctcattacccctccactggggaagcagctgaggcccagggccttgctccctgggaaattctcttctctccatctttcggtgcattggccatgttactgtgccaaagtgtcttaattcttgtcccatctattctcagctggccttggaacccacataggagttggtgggggagggatggaatgggtattattcattgtagttgatcctggtgtgtgtattatataaagagacccctccccttattttgtgttttccatccctctcccttaacaggattgaaataaaacatgcttctgtttttgtaaaaataaaaaaaatc

SEQ ID NO: 88454 - DNA, 831 bp, Homo sapiens
tttttgaccattctcttttagtctatgggaattacagggttgccgctaaaatattcacttgttcatatcgtgtcagagatttcctcttctctggagcttaggtggctcttcacaatccataggcttgaatctgcaacctagtgtaaactgccttgctttccccggttctttcccctgctagcacctgctttctcatccctatctccagtcaaagatgggattgcttaatccaactctggagagggaccaagtcttttctgcccacatctcacacaattgaggtgtctgaacaagcttggggagggtctataaggggtaggctcaaaaaaaaaaaaacccatttgcagaggcagttttgccaacacaagggctctttcaagccgactttcacaaagagagccggacttgttagttggcttctgtctctttagagccaagaaaatagtaattaagtggcctagatataggaagggcagaataagcacttactcttcctgctgagccaaagttttctcattacccctccactggggaagcagctgaggcccagggccttgctccctgggaaattctcttctctccatctttcggtgcattggccatgttactgtgccaaagtgtcttaattcttgtcccatctattctcagctggccttggaacccacataggagttggtgggggagggatggaatgggtattattcattgtagttgatcctggtgtgtgtattatataaagagacccctccccttattttgtgttttccatccctctcccttaacaggattgaaataaaacatgcttctgtttttgtaaaaataaaaaaaatc

SEQ ID NO: 88455 - DNA, 945 bp, Homo sapiens
  misc_feature (880)..(880): n is a, c, g, or t
tttttgaccattctcttttagtctatgggaattacagggttgccgctaaaatattcacttgttcatatcgtgtcagagatttcctcttctctggagcttaggtggctcttcacaatccataggcttgaatctgcaacctagtgtaaactgccttgctttccccggttctttcccctgctagcacctgctttctcatccctatctccagtcaaagatgggattgcttaatccaactctggagagggaccaagtcttttctgcccacatctcacacaattgaggtgtctgaacaagcttggggagggtctataaggggtaggctcaaaaaaaaaaaaacccatttgcagaggcagttttgccaacacaagggctctttcaagccgactttcacaaagagagccggacttgttagttggcttctgtctctttagagccaagaaaatagtaattaagtggcctagatataggaagggcagaataagcacttactccccctgccttccaagatgaagaggagaagcaggccaaccctcaataattgcaagcctgaagagaagtgatcttagagaaagcagagaacagaatggactggatagacatcttgactctattcagcccgtagtctgtgatctggagagtccagttaaggtaacccagatttttgacaaccgccttcctgctgagccaaagttttctcattacccctccactggggaagcagctgaggcccagggccttgctccctgggaaattctcttctctccatctttcggtgcattggccatgttactgtgccaaagtgtcttaattcttgtcccatctattctcagctggccttggaacccacataggaacgtgtgatttaaggagaacttttccnttaacttggggttttcaacccttttcccttacaaggttggaaataatccatgctctggcttttgc

SEQ ID NO: 88456 - DNA, 961 bp, Homo sapiens
tttttgaccattctcttttagtctatgggaattacagggttgccgctaaaatattcacttgttcatatcgtgtcagagatttcctcttctctggagcttaggtggctcttcacaatccataggcttgaatctgcaacctagtgtaaactgccttgctttccccggttctttcccctgctagcacctgctttctcatccctatctccagtcaaagatgggattgcttaatccaactctggagagggaccaagtcttttctgcccacatctcacacaattgaggtgtctgaacaagcttggggagggtctataaggggtaggctcaaaaaaaaaaaaacccatttgcagaggcagttttgccaacacaagggctctttcaagccgactttcacaaagagagccggacttgttagttggcttctgtctctttagagccaagccccctgccttccaagatgaagaggagaagcaggccaaccctcaataattgcaagcctgaagagaagtgatcttagagaaagcagagaacagaatggactggatagacatcttgactctattcagcccgtagtctgtgatctggagagtccagttaaggtaacccagatttttgacaaccgccttcctgctgagccaaagttttctcattacccctccactggggaagcagctgaggcccagggccttgctccctgggaaattctcttctctccatctttcggtgcattggccatgttactgtgccaaagtgtcttaattcttgtcccatctattctcagctggccttggaacccacataggagttggtgggggagggatggaatgggtattattcattgtagttgatcctggtgtgtgtattatataaagagacccctccccttattttgtgttttccatccctctcccttaacaggattgaaataaaacatgcttctgtttttgtaaaaataaaaaaaatc

SEQ ID NO: 88457 - DNA, 588 bp, Homo sapiens
gggagacaaggggcggtggtggacctcaccttcaatccaagttttcaaagatattttctcaataaccccctgccttccaagatgaagaggagaagcaggccaaccctcaataattgcaagcctgaagagaagtgatcttagagaaagcagagaacagaatggactggatagacatcttgactctattcagcccgtagtctgtgatctggagagtccagttaaggtaacccagatttttgacaaccgccttcctgctgagccaaagttttctcattacccctccactggggaagcagctgaggcccagggccttgctccctgggaaattctcttctctccatctttcggtgcattggccatgttactgtgccaaagtgtcttaattcttgtcccatctattctcagctggccttggaacccacataggagttggtgggggagggatggaatgggtattattcattgtagttgatcctggtgtgtgtattatataaagagacccctccccttattttgtgttttccatccctctcccttaacaggattgaaataaaacatgcttctgtttttgtaaaaataaaaaaaatc

SEQ ID NO: 88458 - DNA, 394 bp, Homo sapiens
gaaaagtggcaataaagggggaggcatattataaaatgctataatataaaaatgtagcaaaaacttgacagactagaaaaaaaaagatctgtgttattctagggaactaatgtaccccaaagccaaaactaattcctgtgaagtttacagttacatcatccatttaccctagaattatttttttagcaacttttagaaataaagaatacaactgtgacattaggatcagagattttagacttccttgtacaaattctcacttctccacctgctcaccaatgaaattaatcataagaaaagcatatattccaagaaatttgttctgcctgtgtcctggaggcctatacctctgttattttctgatacaaaataaaacttaaaaaaaagaaaacaa

SEQ ID NO: 88459 - DNA, 347 bp, Homo sapiens
gggaaaataaacatattttgaactaaatggaaatgtaacctattatagtttgttggatgaagctaaagcaatgctcagatggaaatgtatagcattaaacgtttatacaggttgagcattcctaatcccaaaatctgaaatctaaaatgtttcaaactcgtaaatattttgagtgtcatcatgacagctcaaagaaaatgcttaggggtgctaaaccagtaaatataatgcaaataatccaaaatccataaaaatctgaactctgaaacacatctggtcccaagcattttgaataaggaatattcaacctgtattagaaaaaaagtaaagcagccagactccatctt

SEQ ID NO: 88460 - DNA, 262 bp, Homo sapiens
ctaaatatcacacttccttccacccgctggcctctgtgtctttgaagtttacccaggaggtggtgcaactttgtgttgctgacatagcttggaaggctttttctgaggatgtgaacctgattgtcaactctattcaaagtcctgtttcggaaatcctccctgttccggtttggaggcgtcctctatcagaaactacacaccagcagagatgcctgcccagtttatatttttctctgacattgattaaaacaaagaaaacagc

SEQ ID NO: 88461 - DNA, 621 bp, Homo sapiens
caaactggaaatagaaggaaaatggtgggcaaggggtccagaggaaacagatgaaatcaatcggcaacccaaggtggaccccttagctgaagacctctcttccctcagcaagagccagctctggctggttgagaccaggtagtgggatgcgtgatggcactgtcctcaaaatctgatgcgggctgcccctggcacctctcccctgccccaaagcagcagggtccctgcgctgccccagacctgcctgcaggatgggccccagccctaaggtgggaagggggcagatctagggtccacctagggcagccctgggagcttctccatggcctggtgctaccccgcactgctggccttccttcctcgtgactgtctcctcagcctaagactacaaatctctttctctccaaaccattccccgggtgggttttatgagaaaatctctggcatagtaacaaggcaccacagcctttaaatctctgctctccccagagtggggcaggtgccatcggaaatgcagctaaacgggagaataactcatcttgagcgggcagagctggagggcctggtcgtggagaggggagactggctgggtggcctccatcagggtgcacctgtctcacc

SEQ ID NO: 88462 - DNA, 171 bp, Homo sapiens
gccaagattttttcttacttgcctcctcagtgtcttctgcagttacattgccttcactggtcatgagaggaggggctgtggtagggccttgaaggacgcctgtggagccagaggccattggattgcaggcagccaagagctacctcgcccctgctatctgctgtggccctc

SEQ ID NO: 88463 - DNA, 261 bp, Homo sapiens
ttaggagctctgcatcaagaactggggtcaaagacgaaatattagaacataagattttcctagcactccttttgcttaggaaatgacaagttttagaagctctgtgccaggaaccagggacaaagaccaaagtctatagttcttattataaatcacaatatcacagctggacagagaggccagagtgttactgtagggcagtcctccacatgaaatcacaactattcaaactcagggaggtcttttatacatatccgcgtg

SEQ ID NO: 88464 - DNA, 212 bp, Homo sapiens
ctgacttgtttgggtgaccttggataagttatttaacttctatttgcacctctttaaaaagggaatgttacagtgcacgttgtaattaataatataataatcataatgaactttaaggccctgaaacactcagtagatgtaaaatatagttaaatactgactgtcaaataagaagctgctgtcttgacattgataatcagagtgaaaggacc

SEQ ID NO: 88465 - DNA, 406 bp, Homo sapiens
gcccaatcacgacactgtgtgcaacctccccaaatcacccccactctctgcaacctccccaagtctcccacactctgtgcaacctcctcaaatccccccactgtttgcaacctcccaaaatctccctatgcgcaacctcgcaaaatctcccccactatgtgcaacctcctcaaatccccccactgtgtccaacctccccaaatccctcccactgtgtgcaacctcctctagtcccccactgtgtgcaccccccaaaaatccccccactgtgtgcaacctcctcaaatccccctactgcgagcaacctcctcaaatctctccactgtgtgcaacctccccaaatcccccactgtgtgcaacgtccccaaatccccccactgtgagcaaccttcccaaatccccccac

SEQ ID NO: 88466 - DNA, 376 bp, Homo sapiens
gtaaagcaatttcaaagaaaaattattcattgttttggataaataagagcatatcattgaattagaaaaagagacactggaggaagactttgaagatacttaagttggatgtaatgactaactgaccaagggctgaggaagagggaattaaagctataggggaatggattgctttttaaaggaagagatgttatgggtgttgtgaatgtgtgtaagttttagttttggggacaggaatttaggaaagattattcttcactaatacaatcttcataactaactcgttttctgtgaatagaagtggaaaatgcaaatggaaagaattcacagagagatctgaggctccagcttaaagaggagacaataattttgcaat

SEQ ID NO: 88467 - DNA, 118 bp, Homo sapiens
taatgaaacataagagtatataataatgtataaattatgagtgggccaagcagtttctgttacaagaaagaggaaattcatgcaggtgaccatacttggccaagccctcatgcagaag

SEQ ID NO: 88468 - DNA, 285 bp, Homo sapiens
tgtatttcatttggatatatgtgtctgcactacagaaattaacacttttcatataattggaatcatagaaaatgtaaaccttttctgtgctgctactagcttttaaaattgtaattttaaataattgaagatgatttctcttggttaaagcataaagacattgcatttatattacatggccatttcccgataaaacactagaattcaggtggttttaatatttttggtattatgcttcagatttcaaagacaccttggagcatttaaatttgtccctcttctgga

SEQ ID NO: 88469 - DNA, 321 bp, Homo sapiens
ttcatcttcatggctgctatttattcatagaaaaataattctcagtatctgtagcattattgttaatgtcaatcctatagaggctggaacaggctcagagaggctaagtaacttgcctaactaagtctcctggttgacaataggtcttaatgcagtgttttccgaatccctcgttcttacatcaaaacagaactgtggctgggtgtggtggctcatgcctgtaatcccagcaatttaggaggccaaggtgggaagatcacttgagcccaggaatttgagaccagcctgggcaacatagtgagtgagacctcaatctctgcc

SEQ ID NO: 88470 - DNA, 387 bp, Homo sapiens
gtagagatggggtctctctgtatggcccaggctgctctcaaattcctgggttcaagcaatcctcctaccttggcctctcaaagtgctgcgattataggggtgagccatcacacccatccttaccatttattaattgtactttgtgcctaataaaaaacaaacaaattgtaaaggtatatcagacctgggcaagattactgcatgctcagtgtgtagcaaactctctgatttaggtcaggtacaagtttatggtggaaatagtaaaaactaattcatttatctgaggttcaaggagcaatattgtcttataaagggtaatgagacaggcacttgaaccaagacctgcctgtgtaactatatctcctaagcttaaactgtaattatctg

SEQ ID NO: 88471 - DNA, 336 bp, Homo sapiens
gtacattttaaatgtaatattggcctattttgaaatataatgtaggtaaccacactctatttattgtagcatttagtttaatctgtaatctgtactgcttgaaggtaacaaaactgaatttttacttcagtgttctgtatgattaagacgtttccagtaagccacacaggcctacctgttctatgttattccgaattagtgaggttttactgtcctagtgtcgtaaagagtttcagtcttcttgaaattataggcatttagttacggaaaggaaagtaataatgtaggtagattttgtctcacctggatgttactaaaggttaggtaaaaaaagaa

SEQ ID NO: 88472 - DNA, 414 bp, Homo sapiens
gtaaatgtgagtattgctataaagttagtaatgtttaaaaaatagcaccacaatcatcataactattaatacatttagtttttatccatgatttgccaaaataaaaattggcacatccttgaaagggagatttctaaaggaacttaagaacttctaaaagtgtctctggtgattcatttaaatgatacttacttttcctgaccttaaaactctgatttgaacttgcactccattttgtagtgatgctacctatacatattacacatgtgtgaagcctttactacagaaccaccaaaaccaggccttgaggactgtggagacacgggagctgcatctgaaggcagtcctgcatgggaattagtacctacgcctgagaaacccctctctacccagattgctctcagaattgccttt

SEQ ID NO: 88473 - DNA, 674 bp, Homo sapiens
ctctggccatgcacctgctacctacaccctggtccctgcagagggaacgactcagagtgccccttacgtgttgatttaggtgcttgccaaaatcagagattgtctgaggagtaacttaatttgagttccttcaaaataatcagtgagatggaaacttgagaacagcctcggtccgctttgggaagtagagaccgcctttcattgctcagtgggcagctgccatctgtgctgctggtgttggccatatttaccggtaggagagagggtgagagaccacagaaagtctaacgcctggaaggctccagtcgtcctgctggtaaacacagagaccccattttccagagacccactgagaggtggtgcaaagagccgaaaacacatatgcttctctgtggcttccattcttgagtgcgtaatgagtgttgtaataaagaaaagtgaaaatgaagattcagttattaataaatgttggggggaaaagacagaacctggtatttgtcctggcaggtcagcctcctagctgtgtgatgctggacggtgatttcgcttcttgaaatttcagtttccatttctgtaaaatgggaaggttgtactagaagatctccagggtctattttgaaatgaactctcccaacgttgcaatgataagcgctctcagttcatgtgcagcgttg

SEQ ID NO: 88474 - DNA, 1097 bp, Homo sapiens
gactggctgtgtgaactgataagcattctcagggtcgccccgagcggcagagtagcatctgagactcgggcagtgtggttgaggtcaccagccaagcactgggtcttgagtgcgaggaggcctgaggcttgttgtctgtcccagtcaattgccactatgtgagacctactgcatcttaaataaacgtctggagaaacccttttcctcgctgaacatgctcgtggattagcagcagcctacatctgcggcgtgtgctggtggccaggttccccgggtggtggggccttgccccaggaacttccaggagcgtgtggctaatagcaggaccccaaagaacttccaggagtgcgtggctaatgcaggacccggagaaattccaggaaagcgtggctaatagcaggaccccgagaacttccaggagagcgtggctaatgcagggacccactcgagtgggtcccctgcagagggaacgactcagagtgccccttacgtgttgatttaggtgcttgccaaaatcagagattgtctgaggagtaacttaatttgagttccttcaaaataatcagtgagatggaaacttgagaacagcctcggtccgctttgggaagtagagaccgcctttcattgctcagtgggcagctgccatctgtgctgctggtgttggccatatttaccggtaggagagagggtgagagaccacagaaagtctaacgcctggaaggctccagtcgtcctgctggtaaacacagagaccccattttccagagacccactgagaggtggtgcaaagagccgaaaacacatatgcttctctgtggcttccattcttgagtgcgtaatgagtgttgtaataaagaaaagtgaaaatgaagattcagttattaataaatgttggggggaaaagacagaacctggtatttgtcctggcaggtcagcctcctagctgtgtgatgctggacggtgatttcgcttcttgaaatttcagtttccatttctgtaaaatgggaaggttgtactagaagatctccagggtctattttgaaatgaactctcccaacgttgcaatgataagcgctctcagttcatgtgcagcgttg

SEQ ID NO: 88475 - DNA, 1891 bp, Homo sapiens
ttgcttcctttaagtgaaaatgtaaaagttcttgacaataattattttaattgtatgctgaggttgctaagatctaaaatatggcttagatctaaggtatgaacaaatcttccatccgtgaaattgtgaagaaggaaagataaattcgtgttagttttgctgtgcaccttaaacttcggaagttaccccagagtgcaggtaggcacttagttaaggtgtaaagagcattaaacttgtggatggcagacgtgaatggaaacgtgttccaactgacagccactgggtttggtactattcatggtttcaggtatccactgggggtcttggaatatactccctgcagataaggaggactactgtacccagagccaaaatactggcatatcctcaacatagcacagcccactactctcatcacaggctatgataacagatacggcatccataaaaagaggctctcaaatacaaaaatgagcaactaaataacttaaaattataactgtgaatcactaaaatatttgaagaaagtcagtaacacgaaaggccctgaacaaaccgttttaaaaagtcaaaataacagcatattaaagaagacatcaaataagtgtatttaacatcccaagagtatagagtatggtatcatagccataaaataagtataggttattataaaagaaccaatccaatcttagatattgcaattatggttgttaaagttgttttaaaagctaaatagagggatacagctgaagagtaaagctgtcagaataatcacaaggtgtctctcattcaaccaaaaagtactaacagagaaagtatcaaggaaagctcaatgatacagggatatgtcccaaaattccagtatctaaataggagataaaagatgggacatagggagaaaaatatagactagaatagctttctttggtttgaaaaggcacaagtttaggactataaaacgatctttcccttttaaataagaatcattgaccaaaagtgtcagaatatctcaacaggagtgattgtaggtgtatttttaccatagtgcactaaaatgtacatttttaaatgcaaggcttgccgaaaagaaagttttcaaatccccttctaaataactcagggcaaaaggaaatttaaaaattaaataatttagtaattaatacagaattagggctccgtggagaaattactaatatctggtcttggcaagaaataaaaggaagagtttggagcatcttgtcatactggaaagctaggaagctatcaaagattcctgagggccaaacacagtggctcatgtctaatccctgtgctttgggaggccaaggcaggaggactgcttgagctcaggagtttgaaaccaacctgagcaatatattaggttggtgcaaaagtaactgtggaaactgcaacctaaaagcaagacccctgtctatacaaaaaatcaaaaaaacaaaaacaaaaaacacaaaaaaccagcaggtgcagtagcatgtatccgtagtcctagctactcatgaggccgcggtaggaggatcacttgagccaaggagtttgaaaccagcctaagcaacataccaagaccccatctcttaaaaaaaaaaaaaaaaatcctgaggtaatatcggtaggacttagaagttaattgcaagaggctcccactggccgaagatgagacaacttgagtattaaaaaaaaaaaagaccaggcggccatggtggctcacacctgtaatctcagcactttgggaggctgaggcggggtttcaccgtgttagccaggatggtctcaatctcctgatctcgtgacccacccgcctcggcctcccaaactgctgggattacaggcatgagccaccgcacccggcctccacaaagtattcttaccaaaa

SEQ ID NO: 88476 - DNA, 286 bp, Homo sapiens
gggattacaggcatgagccactgcgcccggctgaacacatttttatgtaaacaagcagtgtgtacacttaagagtcttatgcacaggataatgtctggaaaaatgcttactgcatgtccccagctccaggaaagaggagagcttgtggggcccttccccaaacaggctgtgtcctggtcctcagtgtggctggctggaagccagggggactcagcctttgactaagaatgctccatccacccctgggaccgagaaaatctcctttcacacaattcattactcctta

SEQ ID NO: 88477 - DNA, 535 bp, Homo sapiens
aaaaactgtatggtgagagcaaataataggagggggtcttggttatgccctaatattaaacagttacacgacaacgactcatacccaaggtgttaaaaatcaatgctaatgatggaacacttcatgcggtcgttattttagaaaacccctaatcaaaacaaatgcaaggggtgaagtgtgctcagtgccagagttttgtgtgctccttagaaagacgatctattccctggagagaaaggaaaggatcagaaatgataaccacttttaaaatacatcagcttgctcatgtgtcggtgtattttttctttatcagcttttcagccaaagcttcatttgatttgtgcagggaggtgtataataggaagaggccagtgagctgatttttatagagtctgtttgtagcttaaacaaagatgggggatttggaggataaaagcggcctgaaatatagcagattatgcagctttatttttcaaagatttgttaattcccctcctccctctcctgctctctggctgagccggtgtgttttgta

SEQ ID NO: 88478 - DNA, 355 bp, Homo sapiens
cgatgagtaaatcttggccgatgagtaaatcttggtcgatgagtagatcttggccgatgagtaaatcttggtcgatgactagatcttggccatgaattaatattattttattaatccatggccaggatgattcttaagattatttcttaattctctgaacagcttaaaagagagaaactccttcttttttatttacttgctttgaggttgatactcttaggtttttaacataactctctagctttgacaactcctcttataatttaaaatccttatagcttccatttacaagtaaggattatatctattttagtctcctcaatcagctacctaggagaagacttgccacttggaa

SEQ ID NO: 88479 - DNA, 458 bp, Homo sapiens
ttaaaattaatgtttgctaccaaaagggggtagcagtgcctagtcatgtaggcatatgtcccactctgtcggtacagagggtaagcagcctcttcctttttaaaaaatttattacgatgatttacaaaaattgaagcttacaggataaacactcaacaaaaaagtagccagtctcaagaaaccaatttttatgtatgaattaatattattttattaatccatggccaggatgattcttaagattatttcttaattctctgaacagcttaaaagagagaaactccttcttttttatttacttgctttgaggttgatactcttaggtttttaacataactctctagctttgacaactcctcttataatttaaaatccttatagcttccatttacaagtaaggattatatctattttagtctcctcaatcagctacctaggagaagacttgccacttggaa

SEQ ID NO: 88480 - DNA, 1039 bp, Homo sapiens
caggcatgagccaccgcccctggcctccatctagactttgaaatgattgccttctaattacagtagcattctcttatttaaaatatttgttttatttaagtcagtgtttaagcaatagctcagcatatcccagtggtccagtgaccacacagctgagaacccttgttaagtggtacagtaaagcattctgtcaaaactttgacatttatgacatgttacctaggaaataggacttagaaaatgagtttgacctgggctttaaaaaagtatactgatgaaggtgccagaattgatgtccattagactgtaagctccatgggggcaggaactttgctaccgaatctatacaaccttaacattgactagtgcttgtaggtgtgctcaatacttgtttgttaactgaatcaaaaggagtaaatgcacaatatttgaacattgtatccaaaggaagaaacctgcgaaataaaattatttgcagaaatgaacatttgttgaaatgcagaaaaccactggatactgcagcctacaatattaatatgatattactcttttacagttgacacctgtcctctctgtagtctcttctctcaaatttggttcttattgagagcctgtctagtttcccaaaggttttataaaacataagttgaagtacctttatttttaattttatttttgagacaggacctcgctctgtcaccgaggctggagtgcagtggcataatcatggctcactgcagcctcgtcctcccaggctccatccatctgcccatctctccctctgagtagctgggaccacgggcacgtgccaccacacccagctaatttttgtatgtttggtagagaaagggtttcaccacattgcccaggctggtcttgaacacctgagctcaagcaatccaacctccttggcctcccagtgttaaattacaggcgtaagccaccacacccggccaagttgaagtatattttgtgatttttctgacagtgcagactgaaaaaaatttaattaacctgacaagagtttactgaatatcac

SEQ ID NO: 88481 - DNA, 496 bp, Homo sapiens
ccactaaaaactttacaagcccacactacttttgaaatgatactgtgaatacttttggtggtccaaaaaaaaaaattcatattatcaagtcagcatgacagataaattcatgtttacagctcaatagtttgagaagctcttggcagaagagctcttgctataatagttcatgtttgtttagcatgaatagtcatctagggaagactttttacattaagcaaatcttactaaaagacaaaatcagtaagctggcacatagggaaatattcataataaggtgataatgcatgtaataaaatgtgatgagtagtttcaaataaatggcagggaccttggtttgcaggcttacttagaggtctttcttgagttgtgctgatttcaccctaagccctggtgactccagctctctcttcctgtaagtcatgatgagtggacagagccttttgttcatgtgggggctaagggaggtatgtccttcatgacacctcttgcatgg

SEQ ID NO: 88482 - DNA, 324 bp, Homo sapiens
caaaaatacacacagaaatttgttgtcttgtttgttatataggtaggtatgtaatcgccccaattttgcctcttgatctacaaagcctactctctcactgttaccaggaaaaaaaaaattgtcaacccctaatctagatcaatctcagcaataccaggctctgctcagtattctagaacaagtaaaaccctggatctagaaacagacattaaaccaaactgtcaggtctcctctgggcttcaatacagcacggatcagatggttcagaaggtgttaatcagaaagcatcagaacacgaagcaaacttgaggagcatctagaaca

SEQ ID NO: 88483 - DNA, 411 bp, Homo sapiens
gaacatcacaaggagaaatgcagttgatgcaatgggagaaaacaggaagaaactcaacaattcataagagaacaagaactaaacctatgccctttgatcagaccaagtattaagattctatttcagccactaactgaaacatgagttcattcaatcttccataaatttatactgaatacagaccagaaaaatgctaaatgctattcttaataacaactaatatttattgagcactttctatgaactgggtgctgttctaagtactatatgtatgtctatacgtttatatacatatatacactaatttaatcctcacaacaatgctataaaatactaccattaggcaaaggaagttaaataactttccccttatgatacacaactaatcaatagcagagctgggattcaaac

SEQ ID NO: 88484 - DNA, 272 bp, Homo sapiens
gccaattatctatatgcaggatctatttagaatttctgacagttttactttaaataataattaaaaaaattaatttaacaatgttaacagatggtattttaatacattttaaaacatagtactatgctctttaaaatcccagccagctattagtggcaaattcaatggcaaacttagataacttcaattaaactttagtaacttttctaacaactactgattctgttccctgcataataatggacttagcaaccataaggtaatacagtgat

SEQ ID NO: 88485 - DNA, 352 bp, Homo sapiens
ccaattccggacaccctttgatttccagtctgttctttgcctgccatttgggttcactgattctgggttgtagagctccccagtatctactttgcgttgtctcatcaatcagaattcaatctctgcttgtctctgtacttcctcctagcttccggagctaggtttattcttctgttacctttacccattcaacaaagaggaggcggaattgttgaaactatctttaggtcctgattcctccaggccagccttgtaccactgtagccaggtagaacatacgggttatctctgcggtagctccaatcttttcacatacctgtctttcctccttatcacttttctaaatttaaat

SEQ ID NO: 88486 - DNA, 776 bp, Homo sapiens
tattttatcataactatattacccgccaatgcttcaccagttacagtaatttttttggagacagagtttcgctcttgtcgcctaggctggagtgcaatggtgtgatcttggctcactgcaacctccaactcctggtttcaagcgattctcctgcctcagcctcctgagtagctgggattacaggcatgtgccaccatgcccagctaattttgtatttttaggagagatggggtttcatcatgttggtcaggctggtcttgaactcctgacctcaggtgttctgcccgcgttggcctcccaaagtgttgggattacaggcgtgagccatcacgcccggctaattttgtatttttaggagagatggggtttcaccatgttggtcaggccggtctcgaactgctaacctcagatgatctgcccgcctcagcctcccaaagtgttgggattacaggcgtgagccaccacgcccagccgggttacagtaatctgagagcaataaaagtcaaagcaggctggatgtcactctgttatccaagataggaaagagaatcgatatgccttggtcccaattccagttttgttggttctttcgttattctgggctttgctgctacagccattatcaaatggagacacctcgtgtccttgtctacctcccagtgttcttgggtagatgaacaggatgtcaaaacattcatcttgagactgtagaagcctgtactattgcattggggctaatctcatgttccacctttgactggcttggtttttcttgg

SEQ ID NO: 88487 - DNA, 1325 bp, Homo sapiens
atatgaggccacacagcacaaccatactaacatttaggatgtcatagagaagtcacgaaattaccaagaactatggtgaactaattactccaaaccctagggctgtgactacctcttgggagaggacagcacggcgccacggttagcagtgtcaggttttgtgacctgggggtgctgtgactcaggattctccctgctggttatgtggctgtcctgtgtgtcagacaccgtgtgcatgtctcacgtagtctgcagtcgacaaaacaggcctgatgcagaggccactgtgtctcgggtgcaggtggtgtggggagggacaaagccaggtcacactgggcctgggaccttagagagcagcgtgagctctgtgcccatgctgcaagaacctgtggaagctgtgcagtggtttggattggatttcttccttgaatggcttggagcaggaatgtggttgatgttcttgagcattctattccagctgctgtgtccagaaggggctgggggacagggtcacacatgcactaatggaaacaggattagtgattgtcagagttaggaggggacagcagaggcagaaggtaacatcacaaactcagggcttgaccagctagggacagggaaagagaatttggattctgggagatgacacagtcagcccttccagtttaggggagtgaggggatcagtctcatagaggctgcaaggcaagaacgctgttgggcattcacgaatgtttgtggttgaataaacaagccacagtttaagcaaccataattaaacctaatggatgggtgacagtaataaccattttcaggtttcattcaagtttagagacaaataagtaagtaagtaagagacagggttttgccacattgcccaggctggtctggaactctggagctcagaggattctcaaaccttccagagtgctgggattgcaggaatgagccaccacacctggtccagtgtttcaattttgcttacaaaagtatactttaggccgggcgcagtggctcgcacctgtaatcccagcactttgggaggccaaggcaggaggatcacgaggtcaggagatcgagaccatcctggctaacacggtgaaaccccacctctactaaaaatacaaaaaaattagccgggtgtggtggcaggtgcctgtagtcccagctagtcaggaggctgaggcaggagaatggcgtgaatccaggaggcggaagttgcagtgagccaacatcacgccactgcactccagcctgggcaacagagcgagactctgtctcaaaccaaaaaacagtatcctttaggccaggcacggtggctcatgc

SEQ ID NO: 88488 - DNA, 6243 bp, Homo sapiens
  misc_feature (576)..(576): n is a, c, g, or t
  misc_feature (5848)..(5850): n is a, c, g, or t
  misc_feature (5910)..(5910): n is a, c, g, or t
  misc_feature (5928)..(5928): n is a, c, g, or t
  misc_feature (6243)..(6243): n is a, c, g, or t
tttgaatttgcatctcttcaagacacaagattaaaacaaaatttacgctaaattggattttaaattatcttccgttcatttatccttcgtctttcttatgtggatatgcaagcgagaagaagggactggacattcccaacatgctcactcccttaatctgtccgtctagaggtttggcttctacaaaccaagggagtcgacgagttgaagatgaagcccagagcggagtgctgttctcccaagttctggttggtgttggccgtcctggccgtgtcaggcagcagagctcgttctcagaagagcccccccagcattggcattgctgtcatcctcgtgggcacttccgacgaggtggccatcaaggatgcccacgagaaagatgatttccaccatctctccgtggtaccccgggtggaactggtagccatgaatgagaccgacccaaagagcatcatcacccgcatctgtgatctcatgtctgaccggaagatccagggggtggtgtttgctgatgacacagaccaggaagccatcgcccagatcctcgatttcatttcagcacagactctcaccccnatcctgggcatccacgggggctcctctatgataatggcagataaggatgaatcctccatgttcttccagtttggcccatcaattgaacagcaagcttccgtaatgctcaacatcatggaagaatatgactggtacatcttttctatcgtcaccacctatttccctggctaccaggactttgtaaacaagatccgcagcaccattgagaatagctttgtgggctgggagctagaggaggtcctcctactggacatgtccctggacgatggagattctaagatccagaatcagctcaagaaacttcaaagccccatcattcttctttactgtaccaaggaagaagccacctacatctttgaagtggccaactcagtagggctgactggctatggctacacgtggatcgtgcccagtctggtggcaggggatacagacacagtgcctgcggagttccccactgggctcatctctgtatcatatgatgaatgggactatggcctccccgccagagtgagagatggaattgccataatcaccactgctgcttctgacatgctgtctgagcacagcttcatccctgagcccaaaagcagttgttacaacacccacgagaagagaatctaccagtccaatatgctaaataggtatctgatcaatgtcacttttgaggggaggaatttgtccttcagtgaagatggctaccagatgcacccgaaactggtgataattcttctgaacaaggagaggaagtgggaaagggtggggaagtggaaagacaagtccctgcagatgaagtactatgtgtggccccgaatgtgtccagagactgaagagcaggaggatgaccatctgagcattgtgaccctggaggaggcaccatttgtcattgtggaaagtgtggaccctctgagtggaacctgcatgaggaacacagtcccctgccaaaaacgcatagtcactgagaataaaacagacgaggagccgggttacatcaaaaaatgctgcaaggggttctgtattgacatccttaagaaaatttctaaatctgtgaagttcacctatgacctttacctggttaccaatggcaagcatgggaagaaaatcaatggaacctggaatggtatgattggagaggtggtcatgaagagggcctacatggcagtgggctcactcaccatcaatgaggaacgatcggaggtggtcgacttctctgtgcccttcatagagacaggcatcagtgtcatggtgtcacgcagcaatgggactgtctcaccttctgccttcttagagccattcagcgctgacgtatgggtgatgatgtttgtgatgctgctcatcgtctcagccgtggctgtctttgtctttgagtacttcagccctgtgggttataacaggtgcctcgctgatggcagagagcctggtggaccctctttcaccatcggcaaagctatttggttgctctggggtctggtgtttaacaactccgtacctgtgcagaacccaaaggggaccacctccaagatcatggtgtcagtgtgggccttctttgctgtcatcttcctggccagctacactgccaacttagctgccttcatgatccaagaggaatatgtggaccaggtttctggcctgagcgacaaaaagttccagagacctaatgacttctcaccccctttccgctttgggaccgtgcccaacggcagcacagagagaaatattcgcaataactatgcagaaatgcatgcctacatgggaaagttcaaccagaggggtgtagatgatgcattgctctccctgaaaacagggaaactggatgccttcatctatgatgcagcagtgctgaactatatggcaggcagagatgaaggctgcaagctggtgaccattggcagtgggaaggtctttgcttccactggctatggcattgccatccaaaaagattctgggtggaagcgccaggtggaccttgctatcctgcagctctttggagatggggagatggaagaactggaagctctctggctcactggcatttgtcacaatgagaagaatgaggtcatgagcagccagctggacattgacaacatggcaggggtcttctacatgttgggggcggccatggctctcagcctcatcaccttcatctgcgaacaccttttctattggcagttccgacattgctttatgggtgtctgttctggcaagcctggcatggtcttctccatcagcagaggtatctacagctgcatccatggggtggcgatcgaggagcgccagtctgtaatgaactcccccaccgcaaccatgaacaacacacactccaacatcctgcgcctgctgcgcacggccaagaacatggctaacctgtctggtgtgaatggctcaccgcagagcgccctggacttcatccgacgggagtcatccgtctatgacatctcagagcaccgccgcagcttcacgcattctgactgcaaatcctacaacaacccgccctgtgaggagaacctcttcagtgactacatcagtgaggtagagagaacgttcgggaacctgcagctgaaggacagcaacgtgtaccaagatcactaccaccatcaccaccggccccatagtattggcagtgccagctccatcgatgggctctacgactgtgacaacccacccttcaccacccagtccaggtccatcagcaagaagcccctggacatcggcctcccctcctccaagcacagccagctcagtgacctgtacggcaaattctccttcaagagcgaccgctacagtggccacgacgacttgatccgctccgatgtctctgacatctcaacccacaccgtcacctatgggaacatcgagggcaatgccgccaagaggcgtaagcagcaatataaggacagcctgaagaagcggcctgcctcggccaagtcccgcagggagtttgacgagatcgagctggcctaccgtcgccgaccgccccgctcccctgaccacaagcgctacttcagggacaaggaagggctacgggacttctacctggaccagttccgaacaaaggagaactcaccccactgggagcacgtagacctgaccgacatctacaaggagcggagtgatgactttaagcgcgactccgtcagcggaggagggccctgtaccaacaggtctcacatcaagcacgggacgggcgacaaacacggcgtggtcagcggggtacctgcaccttgggagaagaacctgaccaacgtggagtgggaggaccggtccgggggcaacttctgccgcagctgtccctccaagctgcacaactactccacgacggtgacgggtcagaactcgggcaggcaggcgtgcatccggtgtgaggcttgcaagaaagcaggcaacctgtatgacatcagtgaggacaactccctgcaggaactggaccagccggctgccccagtggcggtgacgtcaaacgcctccaccactaagtaccctcagagcccgactaattccaaggcccagaagaagaaccggaacaaactgcgccggcagcactcctacgacaccttcgtggacctgcagaaggaagaagccgccctggccccgcgcagcgtaagcctgaaagacaagggccgattcatggatgggagcccctacgcccacatgtttgagatgtcagctggcgagagcacctttgccaacaacaagtcctcagtgcccactgccggacatcaccaccacaacaaccccggcggcgggtacatgctcagcaagtcgctctaccctgaccgggtcacgcaaaaccctttcatccccacttttggggacgaccagtgcttgctccatggcagcaaatcctacttcttcaggcagcccacggtggcgggggcgtcgaaagccaggccggacttccgggcccttgtcaccaacaagccggtggtctcggcccttcatggggccgtgccagcccgtttccagaaggacatctgtatagggaaccagtccaacccctgtgtgcctaacaacaaaaaccccagggctttcaatggctccagcaatgggcatgtttatgagaaactttctagtattgagtctgatgtctgagtgagggaacagagaggttaaggtgggtacgggagggtaaggctgtgggtcgcgtgatgcgcatgtcacggagggtgacgggggtgaacttggttcccatttgctcctttcttgttttaatttatttatgggatcctggagttctggttcctactgggggcaaccctggtgaccagcaccatctctcctccttttcacagttctctccttcttccccccgctgtcagccattcctgttcccatgagatgatgccatgggccctctcagcaggggagggtagagcggagaaaggaagggctgcatgcgggcttcctcctggtgtggaagagctccttgatatcctctttgagtgaagctgggagaaccaaaaagaggctatgtgagcacaaaggtagcttttcccaaactgatcttttcatttaggtgaggaagcaaaagcatctatgtgagaccatttagcacactgcttgtgaaaggaaagaggctctggctaaattcatgctgcttagatgacatctgtctaggaatcatgtgccaagcagaggttgggaggccatttgtgtttatatataagccaaaaaatgcttgcttcaaccccatgagactcgatagtggtggtgaacagaacaaaaggtcattggtggcagagtggattcttgaacaaactggaaagtacgttatgatagtgtcccacggtgccttggggacaagagcaggtggattgtgcgtgcatgtgtgttcatgcacacttgcacccatgtgtagtcaggtgcctcaagagaaggcaaccttgactctttctattgtttctttcaatatccccaagcagtgtgattgtttggcttatatacagacagagatggccatgtattacctgaattttggctgtgtctcccttcatccttctggaataaggagaatgaaaattcttgataaagaagattctgtggtctaaacaaaaaaaggcggtgagcaatcctgcaagagcaaggtacataaacaagtcctcagtggttggcaactgtttcaacctgtttgaaccaagaaccttccaggaaggctaaagggaaaccgaatttcacagccatgattcttttgcccacacttgggagcgaaaagattctacaaagctcttttgagcatttagactctcgactggccaaggtttggggaagaacgaannnacctttgaagaagtaaggagtcgtgtatggtagggtaagtgagagagggggatgtttccnatgctttgatcccttctnacttaacctgaagctagacgagcaggcttcttccccccaaaactgattacaactgctacagagcagacagttaagagaaatgagcttgacatttaagagaaatgagctgcactccatgagtgcagctctggaggtacgaaaagaggggaagagacttggaaatgggagacgggggcagagagggaccctccaccacctctttgggcctggctgggtgggaatgtgacttgagcccagagtgaacactcttggtagaagcccttctaccttcctgcaacacctgttccctctcagattgtaccattgagccggaan

SEQ ID NO: 88489 - DNA, 360 bp, Homo sapiens
tccaatgattagaagggacagtaaccttctccattctgttcctttcccttcaactgtcactacagtgtcacctaggagcactctgtcactctggtttgatgttacaatacagcatagtatgtacagtttggtctcagtcatactgaagtttggctagttttctagaattatctttacaaataatagcctgtgcttatgtttccaagttaatagtctggcttttactgcctaattaaatgaaaagggcttaaaattcacaagactcacctcttcaattacttttctatttgtagtgtgatcattttagcagaaattaaattagttagaaacctaactaaaataaatgcaagcttcacacag

SEQ ID NO: 88490 - DNA, 157 bp, Homo sapiens
cacacaaatagcagtcaataaatgttgtctatttttaattttttattccatacacctatctagcttagaaacaatcattagccattatgcctaacatgacataaataataactaacatatattaatacttgatcctcccatgaccaaacatttttgg

SEQ ID NO: 88491 - DNA, 303 bp, Homo sapiens
tatgctagtctcaaaatggcataatgctttaaagagagtagtttaatccattagatggtaaatttagttaatcttcttcgaaacagctaggttttcaatggtttgctcctcccgttaagactaatttttgctttagttttattcttcagagctcgaattattatttgtgcaagatttttaatgtaacttgagtactaaggacagcagttaattatctgaaactaatttgtaacagttttgtaagctactgtgaccgaatgttatttcagttacagtaataaattaacaacttgttggataaag

SEQ ID NO: 88492 - DNA, 921 bp, Homo sapiens
gggagaagtggccctggacgggcagaagccgcagcctgaaaagacccaggaagaggaaaagaggagtaccgcgccggagccttccgcagctgccgcttcagtccgaaggaggaagggaaccaacccactttctcggcgccgcggctcttctctaaaagtgattacttccttaggatagattgccagaagtggagttactgggtcagaggaatgtgaaaacctttgcatcttctgatagtctagccaaggtccaagaagtagcaagctggcttttggaaatgaatcaggaactgctctctgtgggcagcaaaagacgacgaactggaggctctctgagaggtaacccttcctcaagccaggtagatgaagaacagatgaatcgtgtggtagaggaggaacagcaacagcaactcagacaacaagaggaggagcacactgcaaggaatggtgaagttgttggagtagaacctagacctggaggccaaaatgattcccagcaaggacagttggaagaaaacaataatagatttatttcggtagatgaggactcctcaggaaaccaagaagaacaagaggaagatgaagaacatgctggtgaacaagatgaggaggatgaggaggaggaggagatggaccaggagagtgacgattttgatcagtctgatgatagtagcagagaagatgaacatacacatactaacagtgtcacgaactccagtagtattgtggacctgcccgttcaccaactctcctccccattctatacaaaaacaacaaaagtgagtatattcaatatattgttaacctgagaaactttacatatctattttaattgtaatgaaactttcctcacagtctttgtattactaaaaattaatcttaagatgtgtaataataaaatgaactagttttttgtcttac

SEQ ID NO: 88493 - DNA, 605 bp, Homo sapiens
ctcagcccggggctgcactgcaccctgggcaattcgccaaggccacctttgatgccatttctaagacctacagctacctgacccccgacctctggaaggagactgtattcaccaagtctccctatcaggagttcactgaccacctcgtcaagacccacaccagagtctccgtgcagcggactcaggctccagctgtggctacaacatagggtttttatacaagaaaaataaagtgaattaagcgtgttaaaaaaaaaaaaaaaaaaaaaaaaaaagggcggccgctcccaccaaaatgaatgaaacagtcaaatggtttgcctcattctccaagagccacaactcaagctgaactgtgaaagtggtttaacactgtatcctaggcgatcttttttcctccttctgtttatttttttgtttgttttatttatagtctgatttaaaacaatcagattcaagttggttaattttagttatgtaacaacctgacatgatggaggaaaacaacctttaaagggattgtgtctatggtttgattcacttagaaattttattttcttataacttaagtgcaataaaatgtgttttttcatgttaaaaagcct

SEQ ID NO: 88494 - DNA, 2079 bp, Homo sapiens
agtcaaggctttgacagggcatagtctcctccaataatcttctccgttctctctcattattccctcgagttcttctcagtcaagctgcatgtatgtatgtgtgtcccgagaagcggtttgatactgagctgcatttgcctttactgtggagttttgttgccggttctgctccctaatcttccttttctgacgtgcctgagcatgtccacattagaatctgtgacatacctacctgaaaaaggtttatattgtcagagactgccaagcagccggacacacgggggcacagaatcactgaaggggaaaaatacagaaaatatgggtttctacggcacattaaaaatgattttttacaaaatgaaaagaaagttggaccatggttctgaggtccgctctttttctttgggaaagaaaccatgcaaagtctcagaatatacaagtaccactgggcttgtaccatgttcagcaacaccaacaacttttggggacctcagagcagccaatggccaagggcaacaacgacgccgaattacatctgtccagccacctacaggcctccaggaatggctaaaaatgtttcagagctggagtggaccagagaaattgcttgctttagatgaactcattgatagttgtgaaccaacacaagtaaaacatatgatgcaagtgatagaaccccagtttcaacgagacttcatttcattgctccctaaagagttggcactctatgtgctttcattcctggaacccaaagacctgctacaagcagctcagacatgtcgctactggagaattttggctgaagacaaccttctctggagagagaaatgcaaagaagaggggattgatgaaccattgcacatcaagagaagaaaagtaataaaaccaggtttcatacacagtccatggaaaagtgcatacatcagacagcacagaattgatactaactggaggcgaggagaactcaaatctcctaaggtgctgaaaggacatgatgatcatgtgatcacatgcttacagttttgtggtaaccgaatagttagtggttctgatgacaacactttaaaagtttggtcagcagtcacaggcaaatgtctgagaacattagtgggacatacaggtggagtatggtcatcacaaatgagagacaacatcatcattagtggatctacagatcggacactcaaagtgtggaatgcagagactggagaatgtatacacaccttatatgggcatacttccactgtgcgttgtatgcatcttcatgaaaaaagagttgttagcggttctcgagatgccactcttagggtttgggatattgagacaggccagtgtttacatgttttgatgggtcatgttgcagcagtccgctgtgttcaatatgatggcaggagggttgttagtggagcatatgattttatggtaaaggtgtgggatccagagactgaaacctgtctacacacgttgcaggggcatactaatagagtctattcattacagtttgatggtatccatgtggtgagtggatctcttgatacatcaatccgtgtttgggatgtggagacagggaattgcattcacacgttaacagggcaccagtcgttaacaagtggaatggaactcaaagacaatattcttgtctctgggaatgcagattctacagttaaaatctgggatatcaaaacaggacagtgtttacaaacattgcaaggtcccaacaagcatcagagtgctgtgacctgtttacagttcaacaagaactttgtaattaccagctcagatgatggaactgtaaaactatgggacttgaaaacgggtgaatttattcgaaacctagtcacattggagagtggggggagtgggggagttgtgtggcggatcagagcctcaaacacaaagctggtgtgtgcagttgggagtcggaatgggactgaagaaaccaagctgctggtgctggactttgatgtggacatgaagtgaagagcagaaaagatgaatttgtccaattgtgtagacgatatactccctgcccttccccctgcaaaaagaaaaaaaaaagtcgacgcggccgcgaattta

SEQ ID NO: 88495 - DNA, 3992 bp, Homo sapiens
tcccctcccctggcagcgcggaagagacccgggttgccgcctggtttagcgacacgagcaccgcttcttcctcagtaccgcgccggagccttccgcagctgccgcttcagtccgaaggaggaagggaaccaacccactttctcggcgccgcggctcttctctaaaagtaatgtgaaaacctttgcatcttctgatagtctagccaaggtccaagaagtagcaagctggcttttggaaatgaatcaggaactgctctctgtgggcagcaaaagacgacgaactggaggctctctgagaggtaacccttcctcaagccaggtagatgaagaacagatgaatcgtgtggtagaggaggaacagcaacagcaactcagacaacaagaggaggagcacactgcaaggaatggtgaagttgttggagtagaacctagacctggaggccaaaatgattcccagcaaggacagttggaagaaaacaataatagatttatttcggtagatgaggactcctcaggaaaccaagaagaacaagaggaagatgaagaacatgctggtgaacaagatgaggaggatgaggaggaggaggagatggaccaggagagtgacgattttgatcagtctgatgatagtagcagagaagatgaacatacacatactaacagtgtcacgaactccagtagtattgtggacctgcccgttcaccaactctcctccccattctatacaaaaacaacaaaaatgaaaagaaagttggaccatggttctgaggtccgctctttttctttgggaaagaaaccatgcaaagtctcagaatatacaagtaccactgggcttgtaccatgttcagcaacaccaacaacttttggggacctcagagcagccaatggccaagggcaacaacgacgccgaattacatctgtccagccacctacaggcctccaggaatggctaaaaatgtttcagagctggagtggaccagagaaattgcttgctttagatgaactcattgatagttgtgaaccaacacaagtaaaacatatgatgcaagtgatagaaccccagtttcaacgagacttcatttcattgctccctaaagagttggcactctatgtgctttcattcctggaacccaaagacctgctacaagcagctcagacatgtcgctactggagaattttggctgaagacaaccttctctggagagagaaatgcaaagaagaggggattgatgaaccattgcacatcaagagaagaaaagtaataaaaccaggtttcatacacagtccatggaaaagtgcatacatcagacagcacagaattgatactaactggaggcgaggagaactcaaatctcctaaggtgctgaaaggacatgatgatcatgtgatcacatgcttacagttttgtggtaaccgaatagttagtggttctgatgacaacactttaaaagtttggtcagcagtcacaggcaaatgtctgagaacattagtgggacatacaggtggagtatggtcatcacaaatgagagacaacatcatcattagtggatctacagatcggacactcaaagtgtggaatgcagagactggagaatgtatacacaccttatatgggcatacttccactgtgcgttgtatgcatcttcatgaaaaaagagttgttagcggttctcgagatgccactcttagggtttgggatattgagacaggccagtgtttacatgttttgatgggtcatgttgcagcagtccgctgtgttcaatatgatggcaggagggttgttagtggagcatatgattttatggtaaaggtgtgggatccagagactgaaacctgtctacacacgttgcaggggcatactaatagagtctattcattacagtttgatggtatccatgtggtgagtggatctcttgatacatcaatccgtgtttgggatgtggagacagggaattgcattcacacgttaacagggcaccagtcgttaacaagtggaatggaactcaaagacaatattcttgtctctgggaatgcagattctacagttaaaatctgggatatcaaaacaggacagtgtttacaaacattgcaaggtcccaacaagcatcagagtgctgtgacctgtttacagttcaacaagaactttgtaattaccagctcagatgatggaactgtaaaactatgggacttgaaaacgggtgaatttattcgaaacctagtcacattggagagtggggggagtgggggagttgtgtggcggatcagagcctcaaacacaaagctggtgtgtgcagttgggagtcggaatgggactgaagaaaccaagctgctggtgctggactttgatgtggacatgaagtgaagagcagaaaagatgaatttgtccaattgtgtagacgatatactccctgcccttccccctgcaaaaagaaaaaaagaaaagaaaaagaaaaaaatcccttgttctcagtggtgcaggatgttggcttggggcaacagattgaaaagacctacagactaagaaggaaaagaagaagagatgacaaaccataactgacaagagaggcgtctgctgtctcatcacataaaaggcttcacttttgactgagggcagctttgcaaaatgagactttctaaatcaaaccaggtgcaattatttctttattttcttctccagtggtcattgggcagtgttaatgctgaaacatcattacagattctgctagcctgttcttttaccactgacagctagacacctagaaaggaactgcaataatatcaaaacaagtactggttgactttctaattagagagcatctgcaacaaaaagtcatttttctggagtggaaaagcttaaaaaaattactgtgaattgtttttgtacagttatcatgaaaagcttttttttttttttttttgccaaccattgccaatgtcaatcaatcacagtattagcctctgttaatctatttactgttgcttccatatacattcttcaatgcatatgttgctcaaaggtggcaagttgtcctgggttctgtgagtcctgagatggatttaattcttgatgctggtgctagaagtaggtcttcaaatatgggattgttgtcccaaccctgtactgtactcccagtggccaaacttatttatgctgctaaatgaaagaaagaaaaaagcaaattatttttttttattttttttctgctgtgacgttttagtcccagactgaattccaaatttgctctagtttggttatggaaaaaagactttttgccactgaaacttgagccatctgtgcctctaagaggctgagaatggaagagtttcagataataaagagtgaagtttgcctgcaagtaaagaattgagagtgtgtgcaaagcttattttcttttatctgggcaaaaattaaaacacattccttggaacagagctattacttgcctgttctgtggagaaacttttctttttgagggctgtggtgaatggatgaacgtacatcgtaaaactgacaaaatattttaaaaatatataaaacacaaaattaaaataaagttgctggtcagtcttagtgttttacagtatttgggaaaacaactgttacagttttattgctctgagtaactgacaaagcagaaactattcagtttttgtagtaaaggcgtcacatgcaaacaaacaaaatgaatgaaacagtcaaatggtttgcctcattctccaagagccacaactcaagctgaactgtgaaagtggtttaacactgtatcctaggcgatcttttttcctccttctgtttatttttttgtttgttttatttatagtctgatttaaaacaatcagattcaagttggttaattttagttatgtaacaacctgacatgatggaggaaaacaacctttaaagggattgtgtctatggtttgattcacttagaaattttattttcttataacttaagtgcaataaaatgtgttttttcatgttaaaaagcct

SEQ ID NO: 88496 - DNA, 4033 bp, Homo sapiens
gggagaagtggccctggacgggcagaagccgcagcctgaaaagacccaggaagaggaaaagaggagtaccgcgccggagccttccgcagctgccgcttcagtccgaaggaggaagggaaccaacccactttctcggcgccgcggctcttctctaaaagtgattacttccttaggatagattgccagaagtggagttactgggtcagaggaatgtgaaaacctttgcatcttctgatagtctagccaaggtccaagaagtagcaagctggcttttggaaatgaatcaggaactgctctctgtgggcagcaaaagacgacgaactggaggctctctgagaggtaacccttcctcaagccaggtagatgaagaacagatgaatcgtgtggtagaggaggaacagcaacagcaactcagacaacaagaggaggagcacactgcaaggaatggtgaagttgttggagtagaacctagacctggaggccaaaatgattcccagcaaggacagttggaagaaaacaataatagatttatttcggtagatgaggactcctcaggaaaccaagaagaacaagaggaagatgaagaacatgctggtgaacaagatgaggaggatgaggaggaggaggagatggaccaggagagtgacgattttgatcagtctgatgatagtagcagagaagatgaacatacacatactaacagtgtcacgaactccagtagtattgtggacctgcccgttcaccaactctcctccccattctatacaaaaacaacaaaaatgaaaagaaagttggaccatggttctgaggtccgctctttttctttgggaaagaaaccatgcaaagtctcagaatatacaagtaccactgggcttgtaccatgttcagcaacaccaacaacttttggggacctcagagcagccaatggccaagggcaacaacgacgccgaattacatctgtccagccacctacaggcctccaggaatggctaaaaatgtttcagagctggagtggaccagagaaattgcttgctttagatgaactcattgatagttgtgaaccaacacaagtaaaacatatgatgcaagtgatagaaccccagtttcaacgagacttcatttcattgctccctaaagagttggcactctatgtgctttcattcctggaacccaaagacctgctacaagcagctcagacatgtcgctactggagaattttggctgaagacaaccttctctggagagagaaatgcaaagaagaggggattgatgaaccattgcacatcaagagaagaaaagtaataaaaccaggtttcatacacagtccatggaaaagtgcatacatcagacagcacagaattgatactaactggaggcgaggagaactcaaatctcctaaggtgctgaaaggacatgatgatcatgtgatcacatgcttacagttttgtggtaaccgaatagttagtggttctgatgacaacactttaaaagtttggtcagcagtcacaggcaaatgtctgagaacattagtgggacatacaggtggagtatggtcatcacaaatgagagacaacatcatcattagtggatctacagatcggacactcaaagtgtggaatgcagagactggagaatgtatacacaccttatatgggcatacttccactgtgcgttgtatgcatcttcatgaaaaaagagttgttagcggttctcgagatgccactcttagggtttgggatattgagacaggccagtgtttacatgttttgatgggtcatgttgcagcagtccgctgtgttcaatatgatggcaggagggttgttagtggagcatatgattttatggtaaaggtgtgggatccagagactgaaacctgtctacacacgttgcaggggcatactaatagagtctattcattacagtttgatggtatccatgtggtgagtggatctcttgatacatcaatccgtgtttgggatgtggagacagggaattgcattcacacgttaacagggcaccagtcgttaacaagtggaatggaactcaaagacaatattcttgtctctgggaatgcagattctacagttaaaatctgggatatcaaaacaggacagtgtttacaaacattgcaaggtcccaacaagcatcagagtgctgtgacctgtttacagttcaacaagaactttgtaattaccagctcagatgatggaactgtaaaactatgggacttgaaaacgggtgaatttattcgaaacctagtcacattggagagtggggggagtgggggagttgtgtggcggatcagagcctcaaacacaaagctggtgtgtgcagttgggagtcggaatgggactgaagaaaccaagctgctggtgctggactttgatgtggacatgaagtgaagagcagaaaagatgaatttgtccaattgtgtagacgatatactccctgcccttccccctgcaaaaagaaaaaaagaaaagaaaaagaaaaaaatcccttgttctcagtggtgcaggatgttggcttggggcaacagattgaaaagacctacagactaagaaggaaaagaagaagagatgacaaaccataactgacaagagaggcgtctgctgtctcatcacataaaaggcttcacttttgactgagggcagctttgcaaaatgagactttctaaatcaaaccaggtgcaattatttctttattttcttctccagtggtcattgggcagtgttaatgctgaaacatcattacagattctgctagcctgttcttttaccactgacagctagacacctagaaaggaactgcaataatatcaaaacaagtactggttgactttctaattagagagcatctgcaacaaaaagtcatttttctggagtggaaaagcttaaaaaaattactgtgaattgtttttgtacagttatcatgaaaagcttttttttttttttttttgccaaccattgccaatgtcaatcaatcacagtattagcctctgttaatctatttactgttgcttccatatacattcttcaatgcatatgttgctcaaaggtggcaagttgtcctgggttctgtgagtcctgagatggatttaattcttgatgctggtgctagaagtaggtcttcaaatatgggattgttgtcccaaccctgtactgtactcccagtggccaaacttatttatgctgctaaatgaaagaaagaaaaaagcaaattatttttttttattttttttctgctgtgacgttttagtcccagactgaattccaaatttgctctagtttggttatggaaaaaagactttttgccactgaaacttgagccatctgtgcctctaagaggctgagaatggaagagtttcagataataaagagtgaagtttgcctgcaagtaaagaattgagagtgtgtgcaaagcttattttcttttatctgggcaaaaattaaaacacattccttggaacagagctattacttgcctgttctgtggagaaacttttctttttgagggctgtggtgaatggatgaacgtacatcgtaaaactgacaaaatattttaaaaatatataaaacacaaaattaaaataaagttgctggtcagtcttagtgttttacagtatttgggaaaacaactgttacagttttattgctctgagtaactgacaaagcagaaactattcagtttttgtagtaaaggcgtcacatgcaaacaaacaaaatgaatgaaacagtcaaatggtttgcctcattctccaagagccacaactcaagctgaactgtgaaagtggtttaacactgtatcctaggcgatcttttttcctccttctgtttatttttttgtttgttttatttatagtctgatttaaaacaatcagattcaagttggttaattttagttatgtaacaacctgacatgatggaggaaaacaacctttaaagggattgtgtctatggtttgattcacttagaaattttattttcttataacttaagtgcaataaaatgtgttttttcatgttaaaaagcct

SEQ ID NO: 88497 - DNA, 3146 bp, Homo sapiens
attttcatgaattaagtaattgccacctaaaaaataacagaagagagtatgaaaacatataaatattccaagtcagatgttaaaattttttaaagcagctttatatttccatagtgtaatattagtttgggatttattacagggctttaatgtctgtctttacttgtctagaagtagcttcactggctcctaactactgccctggggcagattcagatgaaatgtggtatgtagccacacccaatactgttggcatactttcattgaatctattcccatggaagaaacccagttgcaatttcagtattatttcatcaaagaggccaggccagagctatcataactgctttcatgtcgtgtttcctttttattatatcatgttttatatcatatgtttgctttctacatactacatacacaattgcttgtgcttatataaatttataatgcttttgaataaacaaaacaataaatagtgatgggatcattttatacggatgtaatattttctgaagagccaaacaaattaaataagtaactttactccaaattttaatgagctattaaattttatttaaatcacttttcctttctacccaaaagtaatcatcttaagtgtttttccagtgtctgagaacattagtgggacatacaggtggagtatggtcatcacaaatgagagacaacatcatcattagtggatctacagatcggacactcaaagtgtggaatgcagagactggagaatgtatacacaccttatatgggcatacttccactgtgcgttgtatgcatcttcatgaaaaaagagttgttagcggttctcgagatgccactcttagggtttgggatattgagacaggccagtgtttacatgttttgatgggtcatgttgcagcagtccgctgtgttcaatatgatggcaggagggttgttagtggagcatatgattttatggtaaaggtgtgggatccagagactgaaacctgtctacacacgttgcaggggcatactaatagagtctattcattacagtttgatggtatccatgtggtgagtggatctcttgatacatcaatccgtgtttgggatgtggagacagggaattgcattcacacgttaacagggcaccagtcgttaacaagtggaatggaactcaaagacaatattcttgtctctgggaatgcagattctacagttaaaatctgggatatcaaaacaggacagtgtttacaaacattgcaaggtcccaacaagcatcagagtgctgtgacctgtttacagttcaacaagaactttgtaattaccagctcagatgatggaactgtaaaactatgggacttgaaaacgggtgaatttattcgaaacctagtcacattggagagtggggggagtgggggagttgtgtggcggatcagagcctcaaacacaaagctggtgtgtgcagttgggagtcggaatgggactgaagaaaccaagctgctggtgctggactttgatgtggacatgaagtgaagagcagaaaagatgaatttgtccaattgtgtagacgatatactccctgcccttccccctgcaaaaagaaaaaaagaaaagaaaaagaaaaaaatcccttgttctcagtggtgcaggatgttggcttggggcaacagattgaaaagacctacagactaagaaggaaaagaagaagagatgacaaaccataactgacaagagaggcgtctgctgtctcatcacataaaaggcttcacttttgactgagggcagctttgcaaaatgagactttctaaatcaaaccaggtgcaattatttctttattttcttctccagtggtcattgggcagtgttaatgctgaaacatcattacagattctgctagcctgttcttttaccactgacagctagacacctagaaaggaactgcaataatatcaaaacaagtactggttgactttctaattagagagcatctgcaacaaaaagtcatttttctggagtggaaaagcttaaaaaaattactgtgaattgtttttgtacagttatcatgaaaagcttttttttttttttttttgccaaccattgccaatgtcaatcaatcacagtattagcctctgttaatctatttactgttgcttccatatacattcttcaatgcatatgttgctcaaaggtggcaagttgtcctgggttctgtgagtcctgagatggatttaattcttgatgctggtgctagaagtaggtcttcaaatatgggattgttgtcccaaccctgtactgtactcccagtggccaaacttatttatgctgctaaatgaaagaaagaaaaaagcaaattatttttttttattttttttctgctgtgacgttttagtcccagactgaattccaaatttgctctagtttggttatggaaaaaagactttttgccactgaaacttgagccatctgtgcctctaagaggctgagaatggaagagtttcagataataaagagtgaagtttgcctgcaagtaaagaattgagagtgtgtgcaaagcttattttcttttatctgggcaaaaattaaaacacattccttggaacagagctattacttgcctgttctgtggagaaacttttctttttgagggctgtggtgaatggatgaacgtacatcgtaaaactgacaaaatattttaaaaatatataaaacacaaaattaaaataaagttgctggtcagtcttagtgttttacagtatttgggaaaacaactgttacagttttattgctctgagtaactgacaaagcagaaactattcagtttttgtagtaaaggcgtcacatgcaaacaaacaaaatgaatgaaacagtcaaatggtttgcctcattctccaagagccacaactcaagctgaactgtgaaagtggtttaacactgtatcctaggcgatcttttttcctccttctgtttatttttttgtttgttttatttatagtctgatttaaaacaatcagattcaagttggttaattttagttatgtaacaacctgacatgatggaggaaaacaacctttaaagggattgtgtctatggtttgattcacttagaaattttattttcttataacttaagtgcaataaaatgtgttttttcatgttaaaaagcct

SEQ ID NO: 88498 - DNA, 2227 bp, Homo sapiens
gcagaaggtatgaagttgcactatctacatcctcaccaaggaatgctgtcgttcacacagccagaaaataagatgtttgtctggtagctaaccaagcttcttggaagacagacctcttgaaagttaatgtttcagttacaaatcactaccagattttcttacatccatgctgatcctaaaatactgaggacatgggtttctaaatatgtatcatttcaaatgttgcatttattgtatgttctaaagtagaagtctacaaattataatgtaactaactcatagccattatttctaaccagtaattaaattcttttggtttttgtctaggtcccaacaagcatcagagtgctgtgacctgtttacagttcaacaagaactttgtaattaccagctcagatgatggaactgtaaaactatgggacttgaaaacgggtgaatttattcgaaacctagtcacattggagagtggggggagtgggggagttgtgtggcggatcagagcctcaaacacaaagctggtgtgtgcagttgggagtcggaatgggactgaagaaaccaagctgctggtgctggactttgatgtggacatgaagtgaagagcagaaaagatgaatttgtccaattgtgtagacgatatactccctgcccttccccctgcaaaaagaaaaaaagaaaagaaaaagaaaaaaatcccttgttctcagtggtgcaggatgttggcttggggcaacagattgaaaagacctacagactaagaaggaaaagaagaagagatgacaaaccataactgacaagagaggcgtctgctgtctcatcacataaaaggcttcacttttgactgagggcagctttgcaaaatgagactttctaaatcaaaccaggtgcaattatttctttattttcttctccagtggtcattgggcagtgttaatgctgaaacatcattacagattctgctagcctgttcttttaccactgacagctagacacctagaaaggaactgcaataatatcaaaacaagtactggttgactttctaattagagagcatctgcaacaaaaagtcatttttctggagtggaaaagcttaaaaaaattactgtgaattgtttttgtacagttatcatgaaaagcttttttttttttttttttgccaaccattgccaatgtcaatcaatcacagtattagcctctgttaatctatttactgttgcttccatatacattcttcaatgcatatgttgctcaaaggtggcaagttgtcctgggttctgtgagtcctgagatggatttaattcttgatgctggtgctagaagtaggtcttcaaatatgggattgttgtcccaaccctgtactgtactcccagtggccaaacttatttatgctgctaaatgaaagaaagaaaaaagcaaattatttttttttattttttttctgctgtgacgttttagtcccagactgaattccaaatttgctctagtttggttatggaaaaaagactttttgccactgaaacttgagccatctgtgcctctaagaggctgagaatggaagagtttcagataataaagagtgaagtttgcctgcaagtaaagaattgagagtgtgtgcaaagcttattttcttttatctgggcaaaaattaaaacacattccttggaacagagctattacttgcctgttctgtggagaaacttttctttttgagggctgtggtgaatggatgaacgtacatcgtaaaactgacaaaatattttaaaaatatataaaacacaaaattaaaataaagttgctggtcagtcttagtgttttacagtatttgggaaaacaactgttacagttttattgctctgagtaactgacaaagcagaaactattcagtttttgtagtaaaggcgtcacatgcaaacaaacaaaatgaatgaaacagtcaaatggtttgcctcattctccaagagccacaactcaagctgaactgtgaaagtggtttaacactgtatcctaggcgatcttttttcctccttctgtttatttttttgtttgttttatttatagtctgatttaaaacaatcagattcaagttggttaattttagttatgtaacaacctgacatgatggaggaaaacaacctttaaagggattgtgtctatggtttgattcacttagaaattttattttcttataacttaagtgcaataaaatgtgttttttcatgttaaaaagcct

SEQ ID NO: 88499 - DNA, 3580 bp, Homo sapiens
  misc_feature (266)..(266): n is a, c, g, or t
ctcagcaggtcaggacatttggtaggggaaggttgaaagacaaaagcagcaggccttgggttctcagccttttaaaaactattattaaatatatatttttaaaatttagtggttagagcttttagtaatgtgcctgtattacatgtagagagtattcgtcaaccaagaggagttttaaaatgtcaaaaccgggaaaacctactctaaaccatggcttggttcctgttgatcttaaaagtgcaaaagagcctctaccacatcaaacngtgatgaagatatttagcattagcatcattgcccaaggcctccctttttgtcgaagacggatgaaaagaaagttggaccatggttctgaggtccgctctttttctttgggaaagaaaccatgcaaagtctcagaatatacaagtaccactgggcttgtaccatgttcagcaacaccaacaacttttggggacctcagagcagccaatggccaagggcaacaacgacgccgaattacatctgtccagccacctacaggcctccaggaatggctaaaaatgtttcagagctggagtggaccagagaaattgcttgctttagatgaactcattgatagttgtgaaccaacacaagtaaaacatatgatgcaagtgatagaaccccagtttcaacgagacttcatttcattgctccctaaagagttggcactctatgtgctttcattcctggaacccaaagacctgctacaagcagctcagacatgtcgctactggagaattttggctgaagacaaccttctctggagagagaaatgcaaagaagaggggattgatgaaccattgcacatcaagagaagaaaagtaataaaaccaggtttcatacacagtccatggaaaagtgcatacatcagacagcacagaattgatactaactggaggcgaggagaactcaaatctcctaaggtgctgaaaggacatgatgatcatgtgatcacatgcttacagttttgtggtaaccgaatagttagtggttctgatgacaacactttaaaagtttggtcagcagtcacaggcaaatgtctgagaacattagtgggacatacaggtggagtatggtcatcacaaatgagagacaacatcatcattagtggatctacagatcggacactcaaagtgtggaatgcagagactggagaatgtatacacaccttatatgggcatacttccactgtgcgttgtatgcatcttcatgaaaaaagagttgttagcggttctcgagatgccactcttagggtttgggatattgagacaggccagtgtttacatgttttgatgggtcatgttgcagcagtccgctgtgttcaatatgatggcaggagggttgttagtggagcatatgattttatggtaaaggtgtgggatccagagactgaaacctgtctacacacgttgcaggggcatactaatagagtctattcattacagtttgatggtatccatgtggtgagtggatctcttgatacatcaatccgtgtttgggatgtggagacagggaattgcattcacacgttaacagggcaccagtcgttaacaagtggaatggaactcaaagacaatattcttgtctctgggaatgcagattctacagttaaaatctgggatatcaaaacaggacagtgtttacaaacattgcaaggtcccaacaagcatcagagtgctgtgacctgtttacagttcaacaagaactttgtaattaccagctcagatgatggaactgtaaaactatgggacttgaaaacgggtgaatttattcgaaacctagtcacattggagagtggggggagtgggggagttgtgtggcggatcagagcctcaaacacaaagctggtgtgtgcagttgggagtcggaatgggactgaagaaaccaagctgctggtgctggactttgatgtggacatgaagtgaagagcagaaaagatgaatttgtccaattgtgtagacgatatactccctgcccttccccctgcaaaaagaaaaaaagaaaagaaaaagaaaaaaatcccttgttctcagtggtgcaggatgttggcttggggcaacagattgaaaagacctacagactaagaaggaaaagaagaagagatgacaaaccataactgacaagagaggcgtctgctgtctcatcacataaaaggcttcacttttgactgagggcagctttgcaaaatgagactttctaaatcaaaccaggtgcaattatttctttattttcttctccagtggtcattgggcagtgttaatgctgaaacatcattacagattctgctagcctgttcttttaccactgacagctagacacctagaaaggaactgcaataatatcaaaacaagtactggttgactttctaattagagagcatctgcaacaaaaagtcatttttctggagtggaaaagcttaaaaaaattactgtgaattgtttttgtacagttatcatgaaaagcttttttttttttttttttgccaaccattgccaatgtcaatcaatcacagtattagcctctgttaatctatttactgttgcttccatatacattcttcaatgcatatgttgctcaaaggtggcaagttgtcctgggttctgtgagtcctgagatggatttaattcttgatgctggtgctagaagtaggtcttcaaatatgggattgttgtcccaaccctgtactgtactcccagtggccaaacttatttatgctgctaaatgaaagaaagaaaaaagcaaattatttttttttattttttttctgctgtgacgttttagtcccagactgaattccaaatttgctctagtttggttatggaaaaaagactttttgccactgaaacttgagccatctgtgcctctaagaggctgagaatggaagagtttcagataataaagagtgaagtttgcctgcaagtaaagaattgagagtgtgtgcaaagcttattttcttttatctgggcaaaaattaaaacacattccttggaacagagctattacttgcctgttctgtggagaaacttttctttttgagggctgtggtgaatggatgaacgtacatcgtaaaactgacaaaatattttaaaaatatataaaacacaaaattaaaataaagttgctggtcagtcttagtgttttacagtatttgggaaaacaactgttacagttttattgctctgagtaactgacaaagcagaaactattcagtttttgtagtaaaggcgtcacatgcaaacaaacaaaatgaatgaaacagtcaaatggtttgcctcattctccaagagccacaactcaagctgaactgtgaaagtggtttaacactgtatcctaggcgatcttttttcctccttctgtttatttttttgtttgttttatttatagtctgatttaaaacaatcagattcaagttggttaattttagttatgtaacaacctgacatgatggaggaaaacaacctttaaagggattgtgtctatggtttgattcacttagaaattttattttcttataacttaagtgcaataaaatgtgttttttcatgttaaaaagcct

SEQ ID NO: 88500 - DNA, 3611 bp, Homo sapiens
agtcaaggctttgacagggcatagtctcctccaataatcttctccgttctctctcattattccctcgagttcttctcagtcaagctgcatgtatgtatgtgtgtcccgagaagcggtttgatactgagctgcatttgcctttactgtggagttttgttgccggttctgctccctaatcttccttttctgacgtgcctgagcatgtccacattagaatctgtgacatacctacctgaaaaaggtttatattgtcagagactgccaagcagccggacacacgggggcacagaatcactgaaggggaaaaatacagaaaatatgggtttctacggcacattaaaaatgattttttacaaaatgaaaagaaagttggaccatggttctgaggtccgctctttttctttgggaaagaaaccatgcaaagtctcagaatatacaagtaccactgggcttgtaccatgttcagcaacaccaacaacttttggggacctcagagcagccaatggccaagggcaacaacgacgccgaattacatctgtccagccacctacaggcctccaggaatggctaaaaatgtttcagagctggagtggaccagagaaattgcttgctttagatgaactcattgatagttgtgaaccaacacaagtaaaacatatgatgcaagtgatagaaccccagtttcaacgagacttcatttcattgctccctaaagagttggcactctatgtgctttcattcctggaacccaaagacctgctacaagcagctcagacatgtcgctactggagaattttggctgaagacaaccttctctggagagagaaatgcaaagaagaggggattgatgaaccattgcacatcaagagaagaaaagtaataaaaccaggtttcatacacagtccatggaaaagtgcatacatcagacagcacagaattgatactaactggaggcgaggagaactcaaatctcctaaggtgctgaaaggacatgatgatcatgtgatcacatgcttacagttttgtggtaaccgaatagttagtggttctgatgacaacactttaaaagtttggtcagcagtcacaggcaaatgtctgagaacattagtgggacatacaggtggagtatggtcatcacaaatgagagacaacatcatcattagtggatctacagatcggacactcaaagtgtggaatgcagagactggagaatgtatacacaccttatatgggcatacttccactgtgcgttgtatgcatcttcatgaaaaaagagttgttagcggttctcgagatgccactcttagggtttgggatattgagacaggccagtgtttacatgttttgatgggtcatgttgcagcagtccgctgtgttcaatatgatggcaggagggttgttagtggagcatatgattttatggtaaaggtgtgggatccagagactgaaacctgtctacacacgttgcaggggcatactaatagagtctattcattacagtttgatggtatccatgtggtgagtggatctcttgatacatcaatccgtgtttgggatgtggagacagggaattgcattcacacgttaacagggcaccagtcgttaacaagtggaatggaactcaaagacaatattcttgtctctgggaatgcagattctacagttaaaatctgggatatcaaaacaggacagtgtttacaaacattgcaaggtcccaacaagcatcagagtgctgtgacctgtttacagttcaacaagaactttgtaattaccagctcagatgatggaactgtaaaactatgggacttgaaaacgggtgaatttattcgaaacctagtcacattggagagtggggggagtgggggagttgtgtggcggatcagagcctcaaacacaaagctggtgtgtgcagttgggagtcggaatgggactgaagaaaccaagctgctggtgctggactttgatgtggacatgaagtgaagagcagaaaagatgaatttgtccaattgtgtagacgatatactccctgcccttccccctgcaaaaagaaaaaaagaaaagaaaaagaaaaaaatcccttgttctcagtggtgcaggatgttggcttggggcaacagattgaaaagacctacagactaagaaggaaaagaagaagagatgacaaaccataactgacaagagaggcgtctgctgtctcatcacataaaaggcttcacttttgactgagggcagctttgcaaaatgagactttctaaatcaaaccaggtgcaattatttctttattttcttctccagtggtcattgggcagtgttaatgctgaaacatcattacagattctgctagcctgttcttttaccactgacagctagacacctagaaaggaactgcaataatatcaaaacaagtactggttgactttctaattagagagcatctgcaacaaaaagtcatttttctggagtggaaaagcttaaaaaaattactgtgaattgtttttgtacagttatcatgaaaagcttttttttttttttttttgccaaccattgccaatgtcaatcaatcacagtattagcctctgttaatctatttactgttgcttccatatacattcttcaatgcatatgttgctcaaaggtggcaagttgtcctgggttctgtgagtcctgagatggatttaattcttgatgctggtgctagaagtaggtcttcaaatatgggattgttgtcccaaccctgtactgtactcccagtggccaaacttatttatgctgctaaatgaaagaaagaaaaaagcaaattatttttttttattttttttctgctgtgacgttttagtcccagactgaattccaaatttgctctagtttggttatggaaaaaagactttttgccactgaaacttgagccatctgtgcctctaagaggctgagaatggaagagtttcagataataaagagtgaagtttgcctgcaagtaaagaattgagagtgtgtgcaaagcttattttcttttatctgggcaaaaattaaaacacattccttggaacagagctattacttgcctgttctgtggagaaacttttctttttgagggctgtggtgaatggatgaacgtacatcgtaaaactgacaaaatattttaaaaatatataaaacacaaaattaaaataaagttgctggtcagtcttagtgttttacagtatttgggaaaacaactgttacagttttattgctctgagtaactgacaaagcagaaactattcagtttttgtagtaaaggcgtcacatgcaaacaaacaaaatgaatgaaacagtcaaatggtttgcctcattctccaagagccacaactcaagctgaactgtgaaagtggtttaacactgtatcctaggcgatcttttttcctccttctgtttatttttttgtttgttttatttatagtctgatttaaaacaatcagattcaagttggttaattttagttatgtaacaacctgacatgatggaggaaaacaacctttaaagggattgtgtctatggtttgattcacttagaaattttattttcttataacttaagtgcaataaaatgtgttttttcatgttaaaaagcct

SEQ ID NO: 88501 - DNA, 3961 bp, Homo sapiens
tcccatttcacctgcccattctatacaaaaacaacaaaaggaatctcaaccaccagcaggattttaaaaaggctatctaaatatttggattacttccttaggatagattgccagaagtggagttactgggtcagaggaatgtgaaaacctttgcatcttctgatagtctagccaaggtccaagaagtagcaagctggcttttggaaatgaatcaggaactgctctctgtgggcagcaaaagacgacgaactggaggctctctgagaggtaacccttcctcaagccaggtagatgaagaacagatgaatcgtgtggtagaggaggaacagcaacagcaactcagacaacaagaggaggagcacactgcaaggaatggtgaagttgttggagtagaacctagacctggaggccaaaatgattcccagcaaggacagttggaagaaaacaataatagatttatttcggtagatgaggactcctcaggaaaccaagaagaacaagaggaagatgaagaacatgctggtgaacaagatgaggaggatgaggaggaggaggagatggaccaggagagtgacgattttgatcagtctgatgatagtagcagagaagatgaacatacacatactaacagtgtcacgaactccagtagtattgtggacctgcccgttcaccaactctcctccccattctatacaaaaacaacaaaaatgaaaagaaagttggaccatggttctgaggtccgctctttttctttgggaaagaaaccatgcaaagtctcagaatatacaagtaccactgggcttgtaccatgttcagcaacaccaacaacttttggggacctcagagcagccaatggccaagggcaacaacgacgccgaattacatctgtccagccacctacaggcctccaggaatggctaaaaatgtttcagagctggagtggaccagagaaattgcttgctttagatgaactcattgatagttgtgaaccaacacaagtaaaacatatgatgcaagtgatagaaccccagtttcaacgagacttcatttcattgctccctaaagagttggcactctatgtgctttcattcctggaacccaaagacctgctacaagcagctcagacatgtcgctactggagaattttggctgaagacaaccttctctggagagagaaatgcaaagaagaggggattgatgaaccattgcacatcaagagaagaaaagtaataaaaccaggtttcatacacagtccatggaaaagtgcatacatcagacagcacagaattgatactaactggaggcgaggagaactcaaatctcctaaggtgctgaaaggacatgatgatcatgtgatcacatgcttacagttttgtggtaaccgaatagttagtggttctgatgacaacactttaaaagtttggtcagcagtcacaggcaaatgtctgagaacattagtgggacatacaggtggagtatggtcatcacaaatgagagacaacatcatcattagtggatctacagatcggacactcaaagtgtggaatgcagagactggagaatgtatacacaccttatatgggcatacttccactgtgcgttgtatgcatcttcatgaaaaaagagttgttagcggttctcgagatgccactcttagggtttgggatattgagacaggccagtgtttacatgttttgatgggtcatgttgcagcagtccgctgtgttcaatatgatggcaggagggttgttagtggagcatatgattttatggtaaaggtgtgggatccagagactgaaacctgtctacacacgttgcaggggcatactaatagagtctattcattacagtttgatggtatccatgtggtgagtggatctcttgatacatcaatccgtgtttgggatgtggagacagggaattgcattcacacgttaacagggcaccagtcgttaacaagtggaatggaactcaaagacaatattcttgtctctgggaatgcagattctacagttaaaatctgggatatcaaaacaggacagtgtttacaaacattgcaaggtcccaacaagcatcagagtgctgtgacctgtttacagttcaacaagaactttgtaattaccagctcagatgatggaactgtaaaactatgggacttgaaaacgggtgaatttattcgaaacctagtcacattggagagtggggggagtgggggagttgtgtggcggatcagagcctcaaacacaaagctggtgtgtgcagttgggagtcggaatgggactgaagaaaccaagctgctggtgctggactttgatgtggacatgaagtgaagagcagaaaagatgaatttgtccaattgtgtagacgatatactccctgcccttccccctgcaaaaagaaaaaaagaaaagaaaaagaaaaaaatcccttgttctcagtggtgcaggatgttggcttggggcaacagattgaaaagacctacagactaagaaggaaaagaagaagagatgacaaaccataactgacaagagaggcgtctgctgtctcatcacataaaaggcttcacttttgactgagggcagctttgcaaaatgagactttctaaatcaaaccaggtgcaattatttctttattttcttctccagtggtcattgggcagtgttaatgctgaaacatcattacagattctgctagcctgttcttttaccactgacagctagacacctagaaaggaactgcaataatatcaaaacaagtactggttgactttctaattagagagcatctgcaacaaaaagtcatttttctggagtggaaaagcttaaaaaaattactgtgaattgtttttgtacagttatcatgaaaagcttttttttttttttttttgccaaccattgccaatgtcaatcaatcacagtattagcctctgttaatctatttactgttgcttccatatacattcttcaatgcatatgttgctcaaaggtggcaagttgtcctgggttctgtgagtcctgagatggatttaattcttgatgctggtgctagaagtaggtcttcaaatatgggattgttgtcccaaccctgtactgtactcccagtggccaaacttatttatgctgctaaatgaaagaaagaaaaaagcaaattatttttttttattttttttctgctgtgacgttttagtcccagactgaattccaaatttgctctagtttggttatggaaaaaagactttttgccactgaaacttgagccatctgtgcctctaagaggctgagaatggaagagtttcagataataaagagtgaagtttgcctgcaagtaaagaattgagagtgtgtgcaaagcttattttcttttatctgggcaaaaattaaaacacattccttggaacagagctattacttgcctgttctgtggagaaacttttctttttgagggctgtggtgaatggatgaacgtacatcgtaaaactgacaaaatattttaaaaatatataaaacacaaaattaaaataaagttgctggtcagtcttagtgttttacagtatttgggaaaacaactgttacagttttattgctctgagtaactgacaaagcagaaactattcagtttttgtagtaaaggcgtcacatgcaaacaaacaaaatgaatgaaacagtcaaatggtttgcctcattctccaagagccacaactcaagctgaactgtgaaagtggtttaacactgtatcctaggcgatcttttttcctccttctgtttatttttttgtttgttttatttatagtctgatttaaaacaatcagattcaagttggttaattttagttatgtaacaacctgacatgatggaggaaaacaacctttaaagggattgtgtctatggtttgattcacttagaaattttattttcttataacttaagtgcaataaaatgtgttttttcatgttaaaaagcct

SEQ ID NO: 88502 - DNA, 2383 bp, Homo sapiens
ggcaggtacagcctgggtgtgaatcggcgaggattcatgaaaaaagagttgttagcggttctcgagatgccactcttagggtttgggatattgagacaggccagtgtttacatgttttgatgggtcatgttgcagcagtccgctgtgttcaatatgatggcaggagggttgttagtggagcatatgattttatggtaaaggtgtgggatccagagactgaaacctgtctacacacgttgcaggggcatactaatagagtctattcattacagtttgatggtatccatgtggtgagtggatctcttgatacatcaatccgtgtttgggatgtggagacagggaattgcattcacacgttaacagggcaccagtcgttaacaagtggaatggaactcaaagacaatattcttgtctctgggaatgcagattctacagttaaaatctgggatatcaaaacaggacagtgtttacaaacattgcaaggtcccaacaagcatcagagtgctgtgacctgtttacagttcaacaagaactttgtaattaccagctcagatgatggaactgtaaaactatgggacttgaaaacgggtgaatttattcgaaacctagtcacattggagagtggggggagtgggggagttgtgtggcggatcagagcctcaaacacaaagctggtgtgtgcagttgggagtcggaatgggactgaagaaaccaagctgctggtgctggactttgatgtggacatgaagtgaagagcagaaaagatgaatttgtccaattgtgtagacgatatactccctgcccttccccctgcaaaaagaaaaaaagaaaagaaaaagaaaaaaatcccttgttctcagtggtgcaggatgttggcttggggcaacagattgaaaagacctacagactaagaaggaaaagaagaagagatgacaaaccataactgacaagagaggcgtctgctgtctcatcacataaaaggcttcacttttgactgagggcagctttgcaaaatgagactttctaaatcaaaccaggtgcaattatttctttattttcttctccagtggtcattgggcagtgttaatgctgaaacatcattacagattctgctagcctgttcttttaccactgacagctagacacctagaaaggaactgcaataatatcaaaacaagtactggttgactttctaattagagagcatctgcaacaaaaagtcatttttctggagtggaaaagcttaaaaaaattactgtgaattgtttttgtacagttatcatgaaaagcttttttttttttttttttgccaaccattgccaatgtcaatcaatcacagtattagcctctgttaatctatttactgttgcttccatatacattcttcaatgcatatgttgctcaaaggtggcaagttgtcctgggttctgtgagtcctgagatggatttaattcttgatgctggtgctagaagtaggtcttcaaatatgggattgttgtcccaaccctgtactgtactcccagtggccaaacttatttatgctgctaaatgaaagaaagaaaaaagcaaattatttttttttattttttttctgctgtgacgttttagtcccagactgaattccaaatttgctctagtttggttatggaaaaaagactttttgccactgaaacttgagccatctgtgcctctaagaggctgagaatggaagagtttcagataataaagagtgaagtttgcctgcaagtaaagaattgagagtgtgtgcaaagcttattttcttttatctgggcaaaaattaaaacacattccttggaacagagctattacttgcctgttctgtggagaaacttttctttttgagggctgtggtgaatggatgaacgtacatcgtaaaactgacaaaatattttaaaaatatataaaacacaaaattaaaataaagttgctggtcagtcttagtgttttacagtatttgggaaaacaactgttacagttttattgctctgagtaactgacaaagcagaaactattcagtttttgtagtaaaggcgtcacatgcaaacaaacaaaatgaatgaaacagtcaaatggtttgcctcattctccaagagccacaactcaagctgaactgtgaaagtggtttaacactgtatcctaggcgatcttttttcctccttctgtttatttttttgtttgttttatttatagtctgatttaaaacaatcagattcaagttggttaattttagttatgtaacaacctgacatgatggaggaaaacaacctttaaagggattgtgtctatggtttgattcacttagaaattttattttcttataacttaagtgcaataaaatgtgttttttcatgttaaaaagcct

SEQ ID NO: 88503 - DNA, 1267 bp, Homo sapiens
agtcaaggctttgacagggcatagtctcctccaataatcttctccgttctctctcattattccctcgagttcttctcagtcaagctgcatgtatgtatgtgtgtcccgagaagcggtttgatactgagctgcatttgcctttactgtggagttttgttgccggttctgctccctaatcttccttttctgacgtgcctgagcatgtccacattagaatctgtgacatacctacctgaaaaaggtttatattgtcagagactgccaagcagccggacacacgggggcacagaatcactgaaggggaaaaatacagaaaatatgggtttctacggcacattaaaaatgattttttacaaaatgaaaagaaagttggaccatggttctgaggtccgctctttttctttgggaaagaaaccatgcaaagtctcagaatatacaagtaccactgggcttgtaccatgttcagcaacaccaacaacttttggggacctcagagcagccaatggccaagggcaacaacgacgccgaattacatctgtccagccacctacaggcctccaggaatggctaaaaatgtttcagagctggagtggaccagagaaattgcttgctttagatgaactcattgatagttgtgaaccaacacaagtaaaacatatgatgcaagtgatagaaccccagtttcaacgagacttcatttcattgctccctaaagagttggcactctatgtgctttcattcctggaacccaaagacctgctacaagcagctcagacatgtcgctactggagaattttggctgaagacaaccttctctggagagagaaatgcaaagaagaggggattgatgaaccattgcacatcaagagaagaaaagtaataaaaccaggtttcatacacagtccatggaaaagtgcatacatcagacagcacagaattgatactaactggaggcgaggagaactcaaatctcctaaggtgctgaaaggacatgatgatcatgtgatcacatgcttacagttttgtggtaaccgaatagttagtggttctgatgacaacactttaaaagtttggtcagcagtcacaggcaaatccgctgagcggacatttgcgttcaggagttcgagaccagcctggccaaacatggtgaaacactgtctctactaaaaatacaaattttagccaggcaaaaattagtggtggacatgcctgtagtcccaactatttgggggctcaggcaggagaccgcttgacctccgcctcctgg

SEQ ID NO: 88504 - DNA, 2304 bp, Homo sapiens
  misc_feature (25)..(25): n is a, c, g, or t
  misc_feature (93)..(93): n is a, c, g, or t
  misc_feature (124)..(124): n is a, c, g, or t
  misc_feature (687)..(687): n is a, c, g, or t
gatgtttaactccaatcaccatgcntattttccagggctctgtttggactaaggtttaccgtatatgcaaaagagaaaaaaaatgctctctgnactccaactgccttctgcagaggatgagtcntgttagactacagagtttctcaaagaataagctgaagatccctctaacagaatcaaatcatgactattaaaaatacatattcctcagccaaccccaaacctgataaaccagcatctgaaattttaacaagatttgcagatggttctcatggacccttatgataaccatgggctgaaagggagcagtctcaggtggtcctttggtttatgaggggtaccttgattggtttcagatgtgcaatgataggtctgaagaagggcttgggagtaaggctggaaagagcagatatgctctatatgatcgaggaagaagaaaataaaattctggggacatacggtaaaaagaaatttgaaaggaaagatggaagagaaggaaaaaagagccatcttgatggccagaggttgaatactggtagaacacgctttaagaaatcttgaaggggagggtggttgagagggcttttcaagaatagggccctctgctgttaaatcaaagttgtttgtgctgaatgaatatctacttctggaattctttttgtctctccagacatccagtagaatccnctacacatacagaggcttttatgattgggttgagtttttatttgcagaaatcaaggcaagaaggtgaacttcatttctgaacccacacacagtacagaatagagacaatatcagggaaaaaaaatcataaacgaccaaaaaaggaaaaacaaacaaacaaaacattcacaggagcagaaacttaagcacaaggacccatgtccctgaaaagttataaaaatctttggattgagcctgagactatgtatggaatggaagcttgaccaatctacttaaattttaagagcaaagtgctcccagatgccatgtgggttatatgaagtcatatgatcttttccttctactactcaacaaaacaaacaaaaaacaaataaaatgaccttctacatattcaaactcttgtgcttaggagaaatttggctttgtatttgtttttaaaatttgctttattagaatcttttttccaaggcagtgattatttctaacatctctctttagaggtgtagtacttacagttagacacctttttaagctgaggaccacataaaataatagggtgacatctttttcagggactaaattgagccctgacaacctacaaaaggggacccacttcccacaaatgagtaaagtattttacccatgacagatgcaggcccccagctgctccacaagcatatttaggccaagtctactgtttccattcactgcccctttaattagaggtttcttaattgatttttaaataagaatttggttattatctgtgtgggaaaaatgatgcactttattgttcaactactaagatacatagtagtaatgctgcttttggttacaattttttttaacatgagaatggaataaacttcagagaatatttggtaaaggagaacttaaagctaagaagttgcaatttttcacccagtttcaaatttgttctcttaacttttaacagattgttttccatacgcctcagtttcctcattgtgaaatgggagttgtaacaaatctgtctgtgaggatggtgaccatttggtagacccttacctttcaaaaggaatatttcctgagacatattcctcaaaaaggaatgtttaggatcctggttttctcctggatcacatctctgaggagaatcacatttcctgtgtgtttccttcagctagagctataataccttgaactaaaatctcctcttttgcacctaatggctattttcatcaaagaaagactttttctctcttaaggatggactgcaaaataaaaccagttgaggtcttgatgctgtgcactaggctaaggctcacctgtgagtaagtgtctcaccaagtctgactgacgtgtattttttaattcacacaccagccctgcccaccaatatctggtgcacagcagagggcatgtgggtatttaataaacacaggttgatgcatggattgctggcctctggacccacaggaaggtgtgggtatcattttcttctcacttttcatgcatacaaaaatgacccagaggttcttaaactaggtttctgtgatgatctcatgaaggatgatgctatagaacattacgggaatcagaagaccctccatgtcaactgtctttgtaggtctacag

SEQ ID NO: 88505 - DNA, 766 bp, Homo sapiens
catatatctgataagggattaatattcagaatatatagagaactcctaagactaaacaacaaagaaacaatccaattcgaagaatggacaaaaaatcaaatagaaatgtctcaagagaagatacacaaacatccaatatatacatgaaaagatgctcaataacattaataattagggaaatgcaaatcaaaactgtgaggctcaagtcatcccacagggcttctaaaggaaaagagggtccaaaaatccagatggctagagcttctctgggcttgcatgaggagcaacctcacattgattaagatgtgagcttttatgctgtcctgtgatcaaataacccacctcaccatgctatcttacttctgcgtttccaatttaccataatactcccaaaataaccccttttataaggggtcattttaattgtctgagttccctcttaataacagggaagaaacaaaattttaaccacttcttaccaatgcatgaatgactaatattgtctcaaatgtgttatctctttagttcacccaattcaaagccatgtttggagatttctgtatccagaagcagagtctgaaagaaataagtctcccataatggaaactgaagaacaaggacaaatttttgagagtgataatttggaaaaagaatgtattttagcactccacacaatataacacaggcatgcttgtcagcatgcttcatttttaaactaactctgatagaagatgttttctgattgtgactcattatttgttggatg

SEQ ID NO: 88506 - DNA, 573 bp, Homo sapiens
ccatactatgcggccctccacccaagagcattgtttgtgcaggtaggatctgcagtgtggatggagggtaatggaaaattgtggccactgttagctggtcagactgatatttactgtatgtcaggtactgtgctgagtccttcatgggtatcatttcgtttggtccttgcaataaccctatagggcaggtcctattattagatgcattttttagctggaggtgatcacactgctgaaaagtgacaaccagattcaaatgcagagtttctgactactgtgatatagggtcccggatggcacgtgcttaccagcagccaaagagagtccatttggccttggaatttctaactcagagactgaaacacagagggacttgtaggtggaaccaaggtttaaatgacttaattggatgggcttacctttggaggaacaccatagaagcaaatgtgtttttcaaagatcttccactagatgtcaccaaaaggactgagaactagagaaaagggctgcgatttctgctctccttgtaagattgcacaaaagaataaattgcatttatcgctgtttgcaaaa

SEQ ID NO: 88507 - DNA, 252 bp, Homo sapiens
gaatgggattcttcctttcccatcctctcccccacaggccattccttttggttcccccacacatccttgggtttcctagagatgatcgaggtcagagtgtgtgcggaggctatgggaatgggaaggaaaatttcagatcctctgtcagttagaggtaaagaaaggagagaaaaggattgaaaacagcttccaaagcagtgactggaacagggaagaaagtgggagctggagtgagattggtgaggaagatga

SEQ ID NO: 88508 - DNA, 327 bp, Homo sapiens
gacttttggggtgtggagggcaaggggagggaacttagaggacaggtcaataggtgcagcaaaccatcatggcacatgtatacctatgtaacaaatctgcatgttctgttcatgtatcccattttttaatgaagatgtaaagaaaaacaaaaattaaaaaaagaaatttgtcataaggaaaaaaatgaagaaattagcagtacaaatcacaaaagcaaaaatggactgtgcagttggtattttctaagtgctctgtatgttaatgttttctaagtacttggtattgttaaccctataatgaaagtacctttttaatacttttaattc

SEQ ID NO: 88509 - DNA, 172 bp, Homo sapiens
actctgtctcataaataaataaatattaaaaaaaaagatttggaaagagaatcagctgacctgtaattgagcattcccttttggttttcttctgttgcttagaagaaaaaagttttaaaggctttacaaaattataaatctgtacaaaaactggaaaacatgattcccacgt

SEQ ID NO: 88510 - DNA, 491 bp, Homo sapiens
tacaaaatgatgagcatttttctatgatgaggttttaaccattattcagggtggtcttttgtttttaaatctttttttaactaataagatttacggtgtgtattttatacagaaatgcattataaatgtttttaattgtgttctgttttttgcagtctttaagtgccatgccaattgttcttatattctatagaagttcgctcaaaatactcaacaggggaataggcagcggacagtcagaatggttggaattttggctttctaagaaaaactttattttgcataagcatgtggtcagatcattttgtgcatatgcagcctggattggatgttaagtaaatgcttgttcagtgccggtacatttacttaaatctgtttttatttttgtcatgtagaatactactgtggtcatcataatgtaatctatttctgtaccttttttttttttttttactttgaagtctttaaataaaatgtataatacccaaaaa

SEQ ID NO: 88511 - DNA, 370 bp, Homo sapiens
agaaaaaactaagatacagaagaatgtgtatagtataatgtgatttaggtatgttttaaaaagaaatatatttatgttggtatatgcattactttttttcctgaaaggatatacaaaaaactgttgatagtggttacctttgggtggatggaggacatttggaactttttgttttagacatttctccagtgttttaatttttctgtgttcatgtgttactttttgttgtttgtttgagacagggtcttgctctgttgcccaggctagagtgcagtggcaccatcatagctcactgaagcctcaaccttccaggctcaagcgatcctctcatctcagcctcttgaatagctgggaccacaggcatgcacca

SEQ ID NO: 88512 - DNA, 522 bp, Homo sapiens
ggctctgtccactctgccacttttttcctctgctcctcacaggatcatttccattgtaagtgtctccagcttgctgattctttattctgcctgctcagatctgccggtgaacccctctagtgaatttgtaagtgtcagttattattttcagctcttctagttccatttgatcaccttcataattcctatctgttgatatcctcattgtgttcctctgtgattttcctgacttcctgtagttctgtgtccatggcttccttcagttcttcgagcacatttaagacagtcggtttaaagcctttgtttactaagtccaatgtctaggcttccttgggcatgtttttgtcagttaaatattttcctttgaatgagtcataccttcctgttttatttgctttagattttaggtcactaaatttttctttgtgtctaaactgctgttaaacctatccattcagtttttaatttgggttattgtgtttttcagttgaatttttttttaaccgtatctcctgtatcttt

SEQ ID NO: 88513 - DNA, 391 bp, Homo sapiens
aataaaaaagttcttaaaaaatccccccaaaatctcataatgttttaagaaagtttacaaatttgtgttgggccgcattcagagctgtcctgggctgtgggttagacaagcttgctttatagcctaggagcaacaggcccatgtagcccaggtgtgtagtgggctatgccatctaggtttgtgtaagtacactgtgatgttcatacaacaacgaaattgcgtaatgacacatttctcagaatgtatccctactgttaatcaactcatgactggattgttctctattctgttccatgacatgatttctataaaataaaaactctttgagaaattagaatattattattaagctgtaaggaaccatttgaaaaataaattgctgatttttgct

SEQ ID NO: 88514 - DNA, 302 bp, Homo sapiens
tccaaacactcatcaagctcaagtctctcccaaccaaaaacctggccttcctcatgagccgtcttccttccctccccagcttggcttctccagggtgtctcccattctcttgcgtcctctccttcctcacttccaccatcaccaccatcacgcctcctatgaaccatgagattggtattatcaagaccccacagatacagagaggctgagcgtcttacggaggagaggtacctcagagctggtacagacagaagcccaggaggtctaagtccaatgtgcccactccttaccacctttttacc

SEQ ID NO: 88515 - DNA, 601 bp, Homo sapiens
tttgtctggcttctaatacacaaacagttgtccttatgatgtaaatgtggagaaaaccaacagatgacagcaaaatttacctgaaaatgaagcaaagaaatgaggagtttaaaagacagagaagaactgcctttaatcaaatgcttggagattttgaacttcttatattttgattaccaatgtactttttttttcaaatgtataaaggtactggattttcctagccctttctgtttatttcatgttcctatccataaaaaataaaaagtggtttgactattttcaaggcataaaagaaaaacaactattacctttaagcatatactgtagcattaaacacatattgtctcttttcaattctaggcctaagttaggagttctttcttgttacttctatgagatctgatgcatttatatttcatgatacttatgaaaaaatattttcaatgcctatttacttatctttctccttcaagagttatttgagggcatgagctatatcttttcaacatcatatccctaatgtctttctcaatagttggtacatggtaggcactcaacagatatgttttagaattaactaattaattgtggaattata

SEQ ID NO: 88516 - DNA, 949 bp, Homo sapiens
ccggaggacgcgctgctgcgagaccagccgcggcgtctttggcagtagtgggcgtgcttgcgggtccaggagggcccctctcccgcgaccgccgaccacgatgagagcgtgaagaccctctcgaaaggaagggctctgctctacacactggtgtctcctgcggaagggcagctgggcacgccttccagaccgagcaaaagtgaaaaatcagtaacccaagatgactaaccaaatcaatatgctgggcaggatgagacatcagtgtctgcctcagacagaagagcacacacaaaacatgacctctcactccaagcccagttacagcagaaagttttcatggagaaatggaatcacacttcaaatgatttcattttgtcgggtctgcttcccccaaatcaaactggaatatttctcttgtgccttatcatcctcatattctttctggcctcggtgggtaactcggccatgattcacctcatccacgtggatcctcgtctccacacaccgatgtactttcttctcagccagctctcccttatggacctgatgtacatctccaccaccgtccccaagatggcgtacaacttcctgtccggccagaaaggcatctccttcctgggatgtggtgtgcaaagcttcttcttcctgaccatggcgtgttctgaaggcttactcctgacctccatgggctacgaccgttatttggccatctggccactctctctattatcctatccgcatgagtaaaactgatgtgtgtgacgcatgcatgcgacggctcttggcacaatgggggtccatctaatcccttggcacacaccaagtcttgtcccttccgtgtacccctaatggcaggtctacgggctataggaaccacttattcttgcgaatgtcccagccatagttgactcattgcctggtaccaacttctgaggtcacgacactacca

SEQ ID NO: 88517 - DNA, 366 bp, Homo sapiens
cctgccccagactcccaaagtactgcgattacaggtgtgagccaccacacctggccaataatgaatattttctaacttaattcatgctgcttttcaacttatgatactaccagaagtgtatgcttgtatcagttgcatacaattgcccctgaggcattttaaaaatttaattcttctgcatgtgtgacggtggtgtgcagtgctggtatcttttaatttgcgctcttggccttgtatactctttatttctgtctagcatttaaaaaaaaatcagcttttgtattaccaactttttgttctttttgtcatgcgagtcaaaacatatttgactttctctgagtattaaaagaaacaacccaacaacaa

SEQ ID NO: 88518 - DNA, 314 bp, Homo sapiens
gatcattgcagtctctggctttttgactccaggcgggctccgtgccctccggggcctcttcttccttgtcaggccagtgggagccacagaggcctcattggcttcctatgaatattaaatgggattctctgtgggggaagcttccataaggcaggaaggggtccccggttgttggctattagtgttattttcttttaaatcatctgtgctccttcaaagacgacgtaagaagcttgtgccctggcgttgcagaaatctctggctgtagggattaaacctacatgtcttcctgatggggtggtgaggacgtaaac

SEQ ID NO: 88519 - DNA, 345 bp, Homo sapiens
aaatatatgtggccaggtgtggtagctcatgcctataataccagcactgtgagaggctgaggtgggagaattgcttgaggccagcaatcagaaccagcctgggcaacctatagcaagaccctatcttcatttaaattaataataataataataaacaaaacaattgtcaaagatacgtgcctttgattattctagtctctatttgcaacaatagtctttcactagagcaaacaactctttttcttttttttctttttttttaagacaggttctccctctgtcacccaggctggagtgcagtggctcgacgtcactgtaacctccacctcgcgggttaaagtgatt

SEQ ID NO: 88520 - DNA, 567 bp, Homo sapiens
gaagaccttgagctgtgtggaaggattgccctctggtgttcaagtgattgcactaccgcactgcaccttatgtgcctctgtctcaggcaaggtgcattaagacactatgtaaagttacaagaaaaagcaccttgtttagctgcctatcaggttaacattggtgttgaaatcatcgttcctaacagtgttatgttaagttacagggacgtttcgaggtattgatatatgtgccaaactcttttctttttgttaacattgatcatgtgacaatttgcaagtgtagatgtagctgagtgctgtgaacatatttgacatgaattcaggtaatgtactaagatttttgttcggtaacactaaatcccgtatgagtgctaaatactgaattgtttaatatgagagaaattatttggtttttaatgttgcgcgtttctgggatttagggcttcaatatgtttaggtattattgttatttaattgatgtggaagataagtcttcttaactgaagactagctcaactgttttaagaactcagagtagctctatagggtgcatacttttcaccaact

SEQ ID NO: 88521 - DNA, 403 bp, Homo sapiens
aaatgtttgtgtggcatgtgaagggcagggagagggcagggagagaaagcaaatacagcaaatgtctacagtgaaaccaggtgaaaagtatatgagcgttcactgtattatttcagcttttctataattcccaagacatttctaaaataaaaatttgcgaggaaaagtaaccagtgttagtaagggtatatacactaacgatggatgtgtaagttgctcttacaatttgcttaaaggacaattgggagattttctcaagggttttgaaatactgcctgtagtttgataatattcaaatcctaagagtttattcaaaggaaataataaggccgggtgtggtgactcacacctgtaatcccagcactttgggaggctcaggcaggcagatcacaaggccaagaga

SEQ ID NO: 88522 - DNA, 109 bp, Homo sapiens
taaatgaatgaattaatgaattaattaaataactgctacatagtcctctgtctcaccttttccctagacataggtctacttcctaaagcaactacttttacccattgct

SEQ ID NO: 88523 - DNA, 236 bp, Homo sapiens
atttggtaatcaataccctcagaaggaacagtactctcacgacaggcatgattatcttactgttctgtcactagtaaatgtttccaaatagctgcaattttagacaatctcttttttttttttccccatatagagggggtttggacttgtggcccaggctgatctaaaacccctgtgtcaaggcaatcaacccgcttaagcctcaaacaggactggaagggttcccgacctcaaat

SEQ ID NO: 88524 - DNA, 897 bp, Homo sapiens
tggctctttcaactgatgcattaaacagataaagatatttcttggagagttcagtcagttggctatgccgccagttataacagaaaccaattttcaagccgtgagttcttgttttttgttttttaccaaaggtactgtttccgtacactggtattaaaaaaatggattattctttttgatataactaagatgaaacattttttcattttttcctgtgattttcagtttgtcatttattattatatttaccagttttcgtttctatgtgccttacacacaactctcacaaactttgtttctccatttgctttactctttttttaatcaatctgtctagtttgtcctgatgaaaccaagtaccatagacagggtggcttataaacaacataaagttatttctcacagttctggaatcagggaagtgcaagatcagggtaccagcatggttggattctggtgagggtcctcttccaggttgcagactgccatctgctcattgtatctcacatggcagaaagaggactggagggctctctggggtatctttcataagagcactaatcccactgacgagagctccactttcatgatctaattaccccccaaaggccccacctcctcatatcatcacattggaggttaggatttcaacatatacatttctgggcaatgtatacaattccattggacagtcttacaatcttttcagtgtttacatgcataatttactgcaagacttggaatgaaacttcttagctttgcttggtctatataatatgcttcatcttaagcaagctctacattactagtgatgttaaatttcagtaaatggaaaaattccttgagaatactatattctctttcattatccaaatacctctaattttacaatttgat

SEQ ID NO: 88525 - DNA, 276 bp, Homo sapiens
gatttattgcttcaaggcatttcaggaaatctctgtccaatcattagctggccagtaagctaaccaaccagagacttcagtggctgaatgctacaaagaatacagactttacagaattggcacagggtggccactaaacaaacatatcacagaaacaacagcaacaacaaacactgggaattggtggaggtagaatctgatgctcagatttttcacattacataatttaaaatgttgtttttaactaaaatgtacaaggcatgcaaacaaaaagga

SEQ ID NO: 88526 - DNA, 157 bp, Homo sapiens
acaccagaggggagaatccagagaggactcagaggtgaaactatgccttttgacagtgacattccttccttcaaaacacttttcctaagaaaattaagaaggcaaggacaagggacccagaatcctccctaaagccagacaataattaaatgagagc

SEQ ID NO: 88527 - DNA, 497 bp, Homo sapiens
ttcctcccatgacatgtgggaattgtgggcgtaacaattgaagatgagatttgggtggggacacagccaaaccatatcaatacctcaacataataaaggccacatatgacaaactcacagctaacattgtattgagtggggaaaagctgaaagccttttctctaagagctggaacaagacaagaatgcccactttcaccattcctattcaacatagtactggaagtcctagccagagtaatcaggcaagagaaagaaataaaaggcatctgaataagaaaagagaatgtcaaacggtccctcttttcagatgatgtgatcttatagctagaaaaatttgaagactccacgagaaaactcttagatctgataaaacaaattcagtaaagttagtcacaggttacaaaatcagcatacagaaaataagtgctgtttctatacaaaaataatgaactagctgagaaagaacacaagaagacaaccaaatttacaatagtt

SEQ ID NO: 88528 - DNA, 337 bp, Homo sapiens
ctttaagcgagaagtagatgtggggaggggttgttgcatttttaaagattcctgtattaggccgggtgcggtggctcacgcctgtaatcccaacactttgggaggccaaggcaggcagatcacctgaggtcgggagttcaagaccagcctgaccaacatggagaaaccccatctctactaaaaatacaaaattagccgggcgtggtggcgcatgcctgtaatcccagtcactagagaggctgaggcaggagaattgcttgaacctgggagccagagattgtggtgagccaagatcgcagcattgcactccagcctgggcaacaagagtgaaactcca

SEQ ID NO: 88529 - DNA, 210 bp, Homo sapiens
ggaaagccggtgcgccctggcttcccgcctctagggcaggtccagcagggagtgctcggcgtagagcttctgggagacgttgtagacacgctggatgaaggggagggcctcgcctagcatctgcacggcctgctccgggggccccacgttcatggcctccaggaagacctcgcgtgtgggcagcgtgcagaaggccacggtgacggcacg

SEQ ID NO: 88530 - DNA, 611 bp, Homo sapiens
tctcagctgatgctggtgccaatggttcaaggaccacatagacttcgagggctgctgccttaaaggaagtctttgtaaattatgatagttaatcgtttgttagttgttccaggtatttctcttctagaccattccttgccatgtaatgttgcttatggtttgaagcatcaagctcgcatttttgtgtagtcgaacatgtcagtcttttctttgggcttctgggcatggcttccttccagcaaggggcagataccaagaataacttggagtaggtgaggcaggttttgatgttagcaaaactcaaaccatgacactcccccaaatgggagtctgccctcattgggcctaattgtgccctctgctgcagatgctgggatggccttctgatgggatggccgggctgtgttgtcagcacccgcccacatgagacgagtttgtagctgtgcctggtgccaagagctctgaggtgctactatgccccctggaacctttgggcaaagcatagctagtcatcaggcttgcctttcacaggcaaaccaaatccatcctttcttcatccccctgccctgccaaaatcaaccagtctcaaatcaattcacgaaagggggcca

SEQ ID NO: 88531 - DNA, 428 bp, Homo sapiens
tttaaattctatctttcctcttttgcatgttgagcagaaataacttttacttggctgctgtccaaaaatagtgatgggggttaaattggtgaaaatcagagctataatttccactggcctccagtcaagccatccaccattgagctctggacaggccttctgtaatttttttatacaagcaacatttgtcacattagaatatccagagttccagtctgggcaacatcatgaaaccccatctctacaaaaaatacaaaaaaaaaaaaaaaataggtgggtgtggtggcatgtgcctgtagtcccagctactcaggaggctgaggtgggaggatcacttgagcctgggaagcagaggctgcagtgagctatcacaccattgcattctagcttaggtgacagagtgagaccctgtctcaaaaaaaaaaaaa

SEQ ID NO: 88532 - DNA, 241 bp, Homo sapiens
aaagcatggcctggtttagcagaaatgactgctgccctggtggtactggacaggttgcctgaagagcattgtatcctccccttaccgtgctgtcaaataagttagaccgctacccatacttaattcattctagaagtccacaactgcatttatatcatcagttttattaaatacaagataaacttattttagagtttttgtttcaaagtcttttctcaaaatttactaggaaagtttgggc

SEQ ID NO: 88533 - DNA, 415 bp, Homo sapiens
tccccagggcacatgtcctctcccgcggctcagcccagatccatgcctggtgggcgggtggtggaaagctcggtgctggttttttcctgcccccttctggagcactgtctccagctggcatggaactgggtgcctgtcgtttcttctcagtaccggaacctgctctcagcaccgggacctgcccagccctgtcttctggcttctgccccagctcacgaggctggtatctgtccgagtgccaggactcagggcgcagtgtccagcagccctttcctcgtgcctgtgcatcggccacactgtgtccagggtttccagggagcaggggatccggtccctacccaccttgtccccagaatcggaagcacggtgctctcacagtgctcttaacaaagcaccttttgtcactgtgttgccc

SEQ ID NO: 88534 - DNA, 402 bp, Homo sapiens
aaacattaaaaaaagagaacaactaatactctttttacactaattagaacaatgtaagcctttttgttttattaccaaataatttgtatttcctatgtaattgctgcagttttattttgcatatagattttttttccgtaacatctttgtctgttagtggttttatttatgtatttttttaatatccttagattcatcccacttctgaggtcagacatcacatcttttcactacatgcctctctttgggaggtttctttcttgctaatccaaacaagaacatctgcacaattgtcaacctggaatttactttattaatctcctggtttggaaacactttttcttggatgttatatttactttggtttactattttgttggcttgcactaattttatatgatt

SEQ ID NO: 88535 - DNA, 514 bp, Homo sapiens
gtaaacaaatcattctggtaaagtgtttttttttttttaaagactcaaaaagttaccagtttcttaagacccaaagcagaatcccttatatgaagctttataaagatttcgtaatggagaaagcctacatttagcttttgatgtcttttataacaggctgttatctagcataatttatattgttaatatatcttacaaaatgcagataattactaatactggtataggaattcttaaattttggagaagggggtttaattttaaaagagcataatattggaatcagcaatgtaaaattatcaaagacaactagaatctgtattttttaaattggcaaagatatcagagtaaatagtattttcctgtgagtttcaagttaaagttttacttaatttcaaagtttgtggactttagagcaagtaaagatgatgagtaaatcacatagtttgggttttattcaagttctaaaactcaagttaaagaaaatccttgaggccgggcacggtggctcatg

SEQ ID NO: 88536 - DNA, 1129 bp, Homo sapiens
tgcctggtgattttaattatttaaatatttctctgagtcagttctgaaaaatgtagtgtgacaaatgcaataaactttaagtgttcggttttatttaactttttcaaagtaaatatatggagttgtgggtaacttttcaaaattattttttgctaacacatatgtctcacattctacaaacagtgctgtgtaattgtaagtgaagtagactatgatgaaagtgcacgtttatgtaggtttacaaggtaaattgccatataatgtagatcatttagattaggttagtattatttagatacagtttaagaaaagtagcttactttcttaaatttatttttaagtatttactcatttatttatttattgagacagggagtctctctgtctcccaggctggagtgctgtgtcatgatcatggctcactgcaacctctaaatgctgggttcaggtgatcttcccgccttggctttctaaagtgctgggattacaggcgtgagcgactgtgcctggccaaggaaggtaactttcaaaatacttggtgatctatttactcttcacctaggtattgaatgaagagtcaataaacttaaagatatatttgttttctagtcttctttaatggttttggctatgatatcctttttaaaattgtcaaatgacaatgaacttacataaatttttagtttaacatttcaccagcacttaagggactttatcacacaatatctttcctacatttttatgctataatggttactatttcaggattaatggaagtgttcactcctgagttcatttcacaaatttaaatactaaaacattttgttctttgaaaagtaattctggccaggcgcagtgtctcacgcctataatcccagcacttggggaggctgaggtgggcagatcacttgaggtcaggagttcaagaccagcctggccaatgtgatgaaacctcgtctctactaaaaatacaaaaattagctgggcatggtggtgcacacctgtaatctcagctacttgaagggtgtgtcaggagaatcacttgaacctgggaagtggaggttgcagtgagtcgatatcatgccattgcactctagcctgggcgacagactgagtgagactctgtctc

SEQ ID NO: 88537 - DNA, 398 bp, Homo sapiens
ccccgtgcactgaagaattaagaaaatatccacattgaagtgagtaggaaaagcagagaaagactcatgcacaaactccaccctgagcacaccactttaggattcccatctcctaggtttttcctgaggagtgaagggttcctacaacacatatggtaccccagcttttatgatccctgccagcaggtttggctcttaaatcaccttgcatggagagcagcagggatttggcattggataatttctttgaagcacaaagatcacagaagtggttttgaatcatgcaaacactctcagcagctgtagctcctgggttcagtccagcttctggcttctttctggaaggagtttgcacacttcccaagcaccaccctgaggtctggtttctgactagcctg

SEQ ID NO: 88538 - DNA, 604 bp, Homo sapiens
cctcccatcctctgtctggggacagcttgtctccttgccatctctctgttttacccatattccccctcctctggagttcagactcctgctgtcctcctcccggggacccatcacagtagtatctcaggttgtcctgagctgctgcttttggggcaaggctgggaagttgggaaagggagtgatggggatgtgggcagcacctctggtttcttgactgtccctgcaactcttctgggctggatcaactttgtgggacccactaagacacttgggagcatgttggcattagcagcagatatggatgttgtcagtggaaacagatagaagcctgtcactggggagagatgtttagctggctttggatgctgtgagttctcccccgaccccctgcaccctggcacttgggattcacgcattgaatgagaaaggagtggaccagattccctgtccctctcctctctctttttccaccctgccaccccatttccctcaaacttccctgggccagggaaggggcctgatgatctctgagcctgctggaggatacctggatagcgcatggcaaagtcctgcagtgaggcacctggggcttatgttggggggc

SEQ ID NO: 88539 - DNA, 504 bp, Homo sapiens
cctcccatcctctgtctggggacagcttgtctccttgccatctctctgttttacccatattccccctcctctggagttcagactcctgctgtcctcctcccggggacccatcacagtagtatctcaggttgtcctgagctgctgcttttggggcaaggctgggaagttgggaaagggagtgatggggatgtgggcagcacctctggtttcttgactgtccctgcaactcttctgggctggatcaactttgtgggacccactaagacacttgggagcatgttggcattagcagcagatatggatgttgtcagtggaaagcaaacctccagttccaaagcactcctgactccctctcctctctctttttccaccctgccaccccatttccctcaaacttccctgggccagggaaggggcctgatgatctctgagcctgctggaggatacctggatagcgcatggcaaagtcctgcagtgaggcacctggggcttatgttggggggc

SEQ ID NO: 88540 - DNA, 287 bp, Homo sapiens
ctaacccctctggtccggggctgaaggctcagtgccatggtctcagggcagcagatgaagcctccctcccctcagcccccagtttcctgtcgaggtagtcctttatctggtgagtgtcccacggttctagttgggcgaagtgcgtgcaggcaaacctttatcaggcgactatagcgtggatcagattgctaaaaggtgtacacccggccacctgttgtgtatcaggtgaataccccacaggtctggctggggggaggtgtatgcaaagccacccggtgtttttgatg

SEQ ID NO: 88541 - DNA, 222 bp, Homo sapiens
aattggccttgtgacattccttctcctgggcaacgagtctcatgatctccccaccctgcaccttgtgagccccgtccctgcccacaagagataaccacctttaactgtaattttccactacctacccaaatcatataaaactgtcccacccctatctccctttgctgacttctttttcagactcagtctgcctgcacccaggtgattaaaaagttttattgc

SEQ ID NO: 88542 - DNA, 576 bp, Homo sapiens
agttaatgcatggtgtgtatctctctgttgtttatttaccataagttactaattcccatttctcagctgagagctattataggccttcctcctcatcagggatagttggagccagataggatagagattgggtaactgttggaatgtggaccaccaatttcttttattggcttccatagctagttagatggagactcctgacctgagtgaggagtattatctgtcctgtgagcctccagttagcctgggtaaaaacaatacattaagaatcactacctcttcttagccaagcatggtggctcaggcctgtaatcccagcactttgggaggctgaggcgggtggatcacaaggttaggagtttgagaccaacctggccaatatggtgaaaccccatctctactaaaaatataaaaattagctgggcatggtggcgggcgcctgtagtcccagctactcgagaggctgaggcaggagaatcgcttgaacccaggaggcagaggttgcagtgagcccagatcgcaccactgcactccagcgtgggtgacagagcgagactccgtctcaaaaaaaaaaaa

SEQ ID NO: 88543 - DNA, 177 bp, Homo sapiens
gatctgaaactcttttatgcaaagaatagattactaaaaagttctacataaaagagaaataaaacctttagggtatattatgaattatgtcttaaagttatcctcaacaagaaagaccatatttccatagttctctaacatcacattcgtatacaacttccgctgtacagtgtccag

SEQ ID NO: 88544 - DNA, 366 bp, Homo sapiens
accattctactttctgtctctatgaatttagctattctttctataagcttttaatcaggcagcaagacagaccgttaatatatggaactgggaagtctgtgccccactctgatgtgctgtgagatgtttcgttcagtcccatggatggagggattgatacctctgtaccctactgctgccaccccccactgcccgggctaagtgtgtgagcaggacatagacacttcaaatggtaatgaaagctggtgtctcctgctgatctggagggcttccctaaagatgaaggaccaaagtccctggagagttgtcatcgccttgaaaacacaagggcttagaccactgctgtgacccttcaccagcctgttt

SEQ ID NO: 88545 - DNA, 286 bp, Homo sapiens
caaaacagtgctctaatgggcagccctaagtacacacaggggtaagactgcctagaggatgacaagtgccatgacggaaagcagttcgttcctttttggtctagagccaggatcctagcctcaagtcaaggctttcaagaactcatttgtagaagtgaaactcagagaccatatagagaacttcatttctcctggggggcccatgaaatttatcttgcactaagtttcttctgtttaaaacgcgagtttgcatggccgggtgcaagtggctcacgcctgtaatacc

SEQ ID NO: 88546 - DNA, 659 bp, Homo sapiens
gcacagcacgaggcagaggaacggagacaggtcctcggaagcctctttccagaaaatctaatttcatcattgagaaatcttctgtcttaaacagcctccaccaccgccataaatttacatattctatatgccgccggaacggagtgggccctatttgcataatgctgctggaggggctcacgctcctcttgaacctgaatgtagcaggagcgaggaagcaattattaagctgtagacgttggcagggagagagccctcagatggatttcgactccaaacctcattcgccagggctgctcattaccgaaggcctggatcccaggctgaaggtggatcccagggctgggaaaaatcagtgtgaattgctttctccaggttatgtctgcagccaggccgaggccagatatggggggtctttgagcatcctggatgattcattgccttgctcagcaatttattcaacaatcacaggacactggacacagagatgaacaaaacaaatggacttcctgccctcacaaggattacggctctagagcaggaagacaaaccttcatcaaacaacatgtaaatacagtcatgcgtcatttaacaacagggatacgttttgagaaatgtgtcattaggcgatttcatcatcgtgcgaacatcatggggta

SEQ ID NO: 88547 - DNA, 821 bp, Homo sapiens
tggttctgtgttcttgacgtaattaggaggccacgcagctctccaacactccgttaaacaaatatctctttcttaggaagcggagagaggggcagaaaacgtgcacctcgccacccaccggacaagccgagaggaccttgtctttgcttgaaaagttttctagataaatcgctcgggtggttctaagctatgacgaactagaggctgggcccggttcttctccagaacagcgtgtggatgtaaaggagatgaaatcgtcctcccccactgctttctttttcttccccatataaatcagtcatataattcattcgcattgtttaaggtacattgatcaatctaatggcttgtaatagtctcctaattgccacttgcagactcctgcaggctcagatttgaagagggaaggttccagccaagtccaccttaagcctgagtttgggcgactacagaatccaggaagaaaatctagatggcatggtcgctccggtctcagttctacaggggagggaagaaagggggtgttagtggggatatttgctgttcatttttcccgcaatctcccttccaaatcagtcactgattaatgagcaaagcccatgccacaagttatagattactgtggactgaggatcattttgttaatatcaggcaagaaacttgccttacttgcatccctgtgtctgtatttacagtaacaacttccttagtcacaaactgatatgcttttagccataccttttcttcttacttacttatttttagcatcatcaggagttgggataggacataacatgggggaggggtgtgttaaagggaag

SEQ ID NO: 88548 - DNA, 313 bp, Homo sapiens
ttaggacggagtggtgagaacagcccccttccttttcctcagcttgacggtcccagcctttcccattgcggacctagagcccagactcccagggcagaaagcgccccacagactgataaaggtgaacaatccaggctttgtttccaagggctttatccctgactttccaactggcttttatctgtgtcttcacgtctctgacctcttgagcctcacaggagctagactagaaggttcaagttcttgaggagaaggcaggggcgggagagccccacttgcgggaatctcgtgcggaccgagtcggggcgggaga

SEQ ID NO: 88549 - DNA, 465 bp, Homo sapiens
gaattcaatcaaattcctatagtaaggtacaacttcagggaatagaataaatcatttttaatatgagctaagagatgtcaaatcctgcagaacagatttatcagtggtatgtattagacctcccaacactttgagacacattgattttctttctgtgagattcagaaaaaccatggaaagtctgcctacttgggtatgagggttataattcatattaatgcctctggtttgagattatttcttgtccctgttagctggtaaagtagattgccaatttgttctaatctgctcatggaactacattcacaattttaaaatgtgttttcgtgaatctttaaacaaaactgttttcaatctaacctttatgtcctaagagttccacaaacattcaaatggctgttttagtaggttacaaagcatagtaaaatgtcatatttaacttaggatagatgagaaccaatgtgt

SEQ ID NO: 88550 - DNA, 369 bp, Homo sapiens
agggaagggtcacactggcatctacagtaaagggagggacctcactggcatctacagtgatgagagggacctcgctgacatctacagtaaagggaggggccacactggcagctacagtaaagggaggggccacactggcatctacagtgaagggaagaaccaccctggcatcaacagtgatggcggatgggcgaccagtgtagcggtgtctggagctgtggttggacccattagttggggctgctaatcagttcaccatgcaggctgtgggccaagccactgaagggatgcacctggactaggagtgactgggctgggtaagcagtggagctggccagagtacccaggcagggaggaggagccctgggg

SEQ ID NO: 88551 - DNA, 400 bp, Homo sapiens
catctagaggatcccatccccggttctgggttcaagggattctcctgcctcagcctcccaagtagctggcattacaggcgcccaccaccacacctggctaatttttgtatttttagttgagatggggtttcaccatgttggccaggctggtctcgaactcctgacctcaagtgatccacctgccttggcctcccaaagtgctggggttacaggcgtgaaccaccgtgcccggccttactaacatttattgagtgcttcctatatgcaaagtggtgatgcagtgatgcttaacaccctgtctctagagacccatatgcccaacaactaaagcagtagtttaaatttcctcttaactcttgcaattagagatagattatgtaaacctgaattatttttaata

SEQ ID NO: 88552 - DNA, 460 bp, Homo sapiens
cagcttataatactacccagtggcatagaaaattactatgaagtttttccttaagtcccaaccaaaagctcatagttaaaaatataattaaggacacttaacattctatttaaaaaattacagtttaagcagaatacatatcatgtaatgtatctgaacccatttagcaatcagagaataaaaagaaaacacaacaaaaaatattatataaaaagaaccaaaaaatatatattactttctttttccccattaggttaaagggtactttaagatcagttaaaaatatgtttctgaatgttaagaaatgtatgtgatagaaaacaggaccaaagaaaattaatgctaaattaactttatacatgaattgattttttttcttttttaaagaaatgaggtcttactttgtcacgcaggctggagagcggtggtgcaatgacagcccactgtaaccttgaactcc

SEQ ID NO: 88553 - DNA, 856 bp, Homo sapiens
cagagggttgctggcaaagcacaggaccacaatacccagggatccttgctgctagtgtcccggatgctgagggcctgcgacggcttctgggaattgcagtccggtcgcatttctccttcttaccagcgcgttttcagtttcatagggaagcctttccatgaaactggagcgcctggaggagaaggggcccagagctagggaggccctagcgatttctgcgaaagagttccaagtataatttcactgccaacagtgtcataactactttgcctttatacttagtacagctaggttcggttctaatgccagctcagagcagtgctccaagcagggcttaagaatctgtgttgtcggttcttagttctgggccctgtgctgcaggcacctgcaatccgccagcaaccccttcatccctgcggcgggtctaacctaagaggcattgagaaagctttgctaaggaggaggtacaccgcacgctacagttcccgcgcctttgccgaggcgcttcatttacctttgccaaactcgacacctggaactccacgacttgtgtgctttctcagcctgacacctggcctgaccaacttgtttccagtacattaagggccaaggacgaatttaatctccgcctagaatagtctctgaggtacactgacaagttgccagtgttgagaagcatcacagggtccagaggaaaggcctgggtttgagtagggcgtgcccgtatttatccactctagttttcttgtctggacgtcagcctttttacttgggacattatctttcccctctctgcttcccaccagtcaagcaaagttcttcactttataaaataagccagatgccccagacctag

SEQ ID NO: 88554 - DNA, 490 bp, Homo sapiens
cctcctcaagtgggtccctgacccctgacccccgagcagcctaactgggaggcaccccccagcaggggcacactgacacctcacacagcagggtattccaacagacctgcagctgagggtcctgtctgttagaaggaaaactaacaaccagaaaggacatctacaccgaaaacccatctgtacatcaccatcatcaaagaccaaaagtagataaaaccacaaagatggggaaaaaacagaacagaaaaactggaaactctaaaacgcagagcgcctctcctcctccaaaggaacgcagttcctcaccagcaacagaacaaagctggatggagaatgattttgacgagctgagagaagaaggcttcagacgatcaaattactctgagctacgggaggacattcaaaccaaaggcaaagaagttgaaaactttgaaaaaaatttagaagaatgtataactagaataaccaatacagagaagtgcttaaagga

SEQ ID NO: 88555 - DNA, 845 bp, Homo sapiens
aaaaacaaagaaaaattcctcagagctcatacaaggctgggtagaatatgtgtttcaacaatagtggatcttttaatatagtacatggatcattgagtagagtcttcagcaaaatattggcaaagtagggttagggttaggttagggagatgggaatagactgaagactactctggacttgccctaacagagtttaagagcaacatttgaaaggatcaaactgatttcaagtaacttgagtgcatccaagggagaaaacccatcaaaataaaaataaaaactacaataaaatccagcaccaaaagtgtaacattcacaatgattagcatctaataaaaagttaccaggcatgaaaaaaaaaaggaaaaggcaatccacagtcaagagaatctttagtcaatggtaatagactgagaatgacagatgatggcattagtaaatgatatggtttggctctgtgtcccaacgcaaatctcatgttgaattgtaacccccagtgttgggggagggacctgataggaggtgactggattatggtgaacacctatatggatatgaatatggagtattctccatggatatggagaacaccccttggtgttctcataatagtgaatgagttctcatgagatctggttgtttaaaagcgtgtagcacttccttcttttccctctgtgtctcctgctccaccatggtaagatgtgcttgcttccctttgccttctgccattgtaagtttcctgaggcctcctagccatgcttcctgttaagcctgtggaactgcatcatttaaacctcctttcttcctaaattacacagtctcaggtagttctttatagcagtgtg

SEQ ID NO: 88556 - DNA, 224 bp, Homo sapiens
aaattggaaacaatcagaatccaacactgtcagtgtggttaagataatgatgctacactgataccatgaaactttattgcagccattaacagcaatgtttacaaagagttcatggaatgagacatcagataaatgtcgaaaaatcaggataaagttctatatatagtgtaggattttcatatcactatatacaatatgcatagaagactaaaagaagatatgcc

SEQ ID NO: 88557 - DNA, 413 bp, Homo sapiens
acaaaatcccatgcatgctatcttatttttggtgacaattacatggtcctggtttccgctcccctgccatcagtggtctccttcctcagtcataaatggcttcctgctctgcttgccatctacacgctggagggtcttgcctcagaacttagtcactagtcttctccatcaatgtccactccctaggtaacaacccttccctcctcacctagtcacataatttaaatgccacctacatgccaatggctcccaaattccaatcctctgccacaggactgtccacaaaagcgcagtcttttgcttagaaactgactgctccccttggatgtctatcaggcaactcaaagcattttaaacaaatattaatttcccctttccccatttctataaacagtaccagttgctgaagccaa

SEQ ID NO: 88558 - DNA, 276 bp, Homo sapiens
atataaccaactttatgtttcataatctctaaaaggaattccttaggaaatatttctgttatgaaaatacaagattcatctggtcattcactttcctttctatttaacttttctttaaattgtactaaagttaattgttttataaagaatttctatactatgattctgttattaggatgcatttcttctatcagtatatatacttaatgggtgtctgcaatcttatttatttagaagactgagtattgaggcaagggaagtacttttctatgttac

SEQ ID NO: 88559 - DNA, 505 bp, Homo sapiens
gaattgtgttggcccaatataatcacaaggattcttaaaagtagaagagagaagcagaagaggaggtcagcgtaataggatgtgagaagaaccactgttgctggcttaacttggaggaggaaggccatgaagcaaggaatatgaggtggctactagaagttggaaagggcaaggaatcagattctttttagaaaaaggaatgcaggctgggggtggtggcttacgactgtaatcccagcactttgggaggccgaggtgggcggatcagaaggtcaggagattgagaccatactggccaagatgatgaaaccccgtatctactaaaaatacagcaattagctgggcatgataaagttccatggtggcgcgtgcctgtaatcccagctactcaagaggctgaggcaggagaatcgcttgaaccagggagtcggaggttgcagtgagccaagatggtgccactgcactccagcctggcaacagagtgagactccgtctcaaaaaaaaa

SEQ ID NO: 88560 - DNA, 290 bp, Homo sapiens
gctctcaaggttttgttctagaaggtgattttacaaaatagcttaagcagtccttcaaatatgaatttaaaggtcattttgatatttctaatatgaactgaaaattcattgtagttgaagttaaactagtctctagtaaggtttattttaaataaatacgttgtactattttagtgaagaaagtccaagttatgctgaagaaaaatcctagatttttaaaaaatgcatttggtatctcatcacagtagtgacaatcagtattacaattatgacttgttcatatataccta

SEQ ID NO: 88561 - DNA, 305 bp, Homo sapiens
ccctgctcaaagcttcctgattcctgttaagttcaatgttttctgacagacacaagccaattagctgtctgctgctggcggctggtttattcaacatggtttgctgttttgatttgaaaacctaatatttttcagggatttgatttggttccactggggagcagagataagctgttcagcctcagccgctgagctggctctaatggccctcattcactgcatacccagtatccagtgagttctcaggctgtctccagcttggatgtaagaagaggcctcctccgggcatctgtagtcccagctac

SEQ ID NO: 88562 - DNA, 580 bp, Homo sapiens
tcctatggtgtgccttttgaactgtaagtggagcaggaaaaagtttcatttaaaatgtattttgctaaatttaacaagaaatcaaaggtgtttcctgcttatatttttttcttactgcagaggttttagtatataccaaactcctgtgcatcaaaatggcaaaaatctaatctgaggcttataataatcttttgataccctaataaaggtaagcaaaaccatttaagaaaattgatgttaaaataacccaaataagcctgtgtcttaagatagacaaaagaaacaatatattgcttttgtatttaaagtagtttatttttactagagtttactaatttgtcgtattgtacatcctttgtatatgtggaaggtattcattattctaatgtaaccataaagcagaaaatctgtaaaagagtaatatggaaagctctttcctcattatgtttgtaaataggggaccctaaagtaagaataacaatgaaaataagactcctaatctgaacgtaaattaagaaatgatactggcttccttcctaaccttaatttcttaaatttgaaggcttatacttttctccct

SEQ ID NO: 88563 - DNA, 452 bp, Homo sapiens
ttctcagcattgggagtggaggaggatatattttgtaacaatattcaagggaattctgatagggacccattcatcccttaggccttttcactgataaagatttcaaaaaataaaagatgtgaaagagactgattcagctagaagagataggggagggctcttcatgtgaagggattgtgaaagagaggagactggggtccctggagcagagggtgcatcagaggaagtggtaggaaatagggtggggtattaagatggggaagtcaagaagaaattggaatgctaggtcagagagtttaatccagatgttgtttgaaataagaaattattcatgcattcatttgttcaataaatatttatgagcacctactctgtgccaggcactgtgtcatgtgctggggagaaagtggagaatgaaataaagctctttccctcataaaacttatattctg

SEQ ID NO: 88564 - DNA, 190 bp, Homo sapiens
catgtctggatggatggatggatggatggatggaaggagggttggacggatggatggacagatgaacagatggacttgagcatttattcggggtcctccacagaattgagtgatttccaaaggtgtctcatcacctgcaggtgggtgggcaaaagggcttgcctctgtaatactcatgattacgggtagt

SEQ ID NO: 88565 - DNA, 211 bp, Homo sapiens
cctgattcctctggctaggacttccagtactgtgttgaatagaagtggtgaaagtggtcatccttgacctatttcagttctcagggagaatacttgcagctttgtgccattcatgatgcaactgtcatgatgttggatgtgggtttgccacagatggcttttattttgaggtaagtcccatctatgcctagtttgttgagggtttttataa

SEQ ID NO: 88566 - DNA, 468 bp, Homo sapiens
ttagtagagatgaggtttcaccatgtttgccaggctggtcttgaactcctgacctcagatgatccgcccacctcagccccccaaagtgctgggattacaggcatgagtgcccagctaaatgtttattcttaaccaggattgttaataacttaatttactgtcatagagttaaaagtttggaacagtagagagccttatatatacttcatggtgttctttctactgtcagaaggccccagactggaatttttggtgtgtgtgtgtgtgtacgtgtgcgtgcatgttttaaagatataaaacaaggttatggctgattgtcgcttcatcagacagttttaaaattttgtttacttttgttccttattatcaaagtaatatatgttcattggagaaagttcatcctcccctcccacattggagaggcaaccgctcttaacattttggaatatttcttttttccttttttct

SEQ ID NO: 88567 - DNA, 1688 bp, Homo sapiens
gtgtgtgtgtagacagggtcccactgtgttgctcaggctggtgccaaactcctggcctcaagggatcctcctgcctcagcctctcaaagtgctgggattacaggcataaaccacaactcaataaaaaagtttttaaaaatttacaaagctcatatttgatccagctaggattttaccctgtacatttgtatttcttgtaggctggcgcacagatatcttaaatggctactaattgctgctgtgtatgaaaacaaatggctatcaaggccgggtgcagtggcttacagatctggtctgaatctcaagtccagaccagtccagagttcaagaccagcctgggcaacatggtgaaaccccatctatacaaaaactcggcaaggcatggtggcatgcacctgttgtcccagctactcaggggctgaggcaggaggatggcatgagcccaggagcttgaggctgcagtgagctgtgattgtgccactgcactccagcctgagtgacagagtgagacccccatctccaaaagaaaaggctatcaatacaaaagtttatctaaattactgtacagctatacaatggaatactctacaaaatggagagatccataagataaagcaaatgaataaagcaaaatgcatgtgttgacagctgttgtgatacctcagttcttgtcttcttggtttaaaagaatttaaatgagacagcaaaggagatgcagcataatttattgcaaaagaaaaggagtattttgaaagttaggtgcagaacagacagtacacctgagagagagaattcagggccggctgctcgtaagggtgagacagcattgattattgctggagaaactccctttatgggagttttgcattattattcataaggaggtgaggtgttgcagtaatcatgtcctgggtggtcctctgcacaggtgcagtagctgttaatgcttgttcatacaccacatgtctcagtagcatcttaaatttccacctagaggtgtgttttttattattatcatgtgcaaaggatcagtttgaggacaggtaaaatcaaaatgtgtatgctctctagaagggaaagtccctactgaagatagctttgcttaaatgagctcaattacaatgtgaatgctgaggtttattgtgttggctgtatggtcatgagaaaatggtcatttccttgactacctgatacggtttggctgtgtccccacccaagtcttattttgaattgtaatccccataattcccacatgttgaaggagggacttggtggtaggtgactggatcatgggggtggtatcccccatgctgttctcatgattgtgagttctcacgagatccaatggttttatacatggtagtctctcctgctgccatgtaaaacatgcctgcttccccttctgccaggattgtaagtttcccgaggcctgcccagccatgtggagctatgagtcaattaaacctctttcctttataaattactgagtcttgggtagtattctttatagcagtttgagaacggaataatacactcctatcctgcctcacgtgttagacacattttgagtgtcctcagatccctttggcgctattatctcctggactcttagctgcttggctgcttctcccttggcagctccctgtgcagaggaccacccaggacatgattactgcaacacctcacct

SEQ ID NO: 88568 - DNA, 1634 bp, Homo sapiens
gtgtgtgtgtagacagggtcccactgtgttgctcaggctggtgccaaactcctggcctcaagggatcctcctgcctcagcctctcaaagtgctgggattacaggcataaaccacaactcaataaaaaagtttttaaaaatttacaaagctcatatttgatccagctaggattttaccctgtacatttgtatttcttgtaggctggcgcacagatatcttaaatggctactaattgctgctgtgtatgaaaacaaatggctatcaaggccgggtgcagtggcttacagatctggtctgaatctcaagtccagaccagtccagagttcaagaccagcctgggcaacatggtgaaaccccatctatacaaaaactcggcaaggcatggtggcatgcacctgttgtcccagctactcaggggctgaggcaggaggatggcatgagcccaggagcttgaggctgcagtgagctgtgattgtgccactgcactccagcctgagtgacagagtgagacccccatctccaaaagaaaaggctatcaatacaaaagtttatctaaattactgtacagctatacaatggaatactctacaaaatggagagatccataagataaagcaaatgaataaagcaaaatgcatgtgttgacagctgttgtgatacctcagttcttgtcttcttggtttaaaagaatttaaatgagacagcaaaggagatgcagcataatttattgcaaaagaattcagggccggctgctcgtaagggtgagacagcattgattattgctggagaaactccctttatgggagttttgcattattattcataaggaggtgaggtgttgcagtaatcatgtcctgggtggtcctctgcacaggtgcagtagctgttaatgcttgttcatacaccacatgtctcagtagcatcttaaatttccacctagaggtgtgttttttattattatcatgtgcaaaggatcagtttgaggacaggtaaaatcaaaatgtgtatgctctctagaagggaaagtccctactgaagatagctttgcttaaatgagctcaattacaatgtgaatgctgaggtttattgtgttggctgtatggtcatgagaaaatggtcatttccttgactacctgatacggtttggctgtgtccccacccaagtcttattttgaattgtaatccccataattcccacatgttgaaggagggacttggtggtaggtgactggatcatgggggtggtatcccccatgctgttctcatgattgtgagttctcacgagatccaatggttttatacatggtagtctctcctgctgccatgtaaaacatgcctgcttccccttctgccaggattgtaagtttcccgaggcctgcccagccatgtggagctatgagtcaattaaacctctttcctttataaattactgagtcttgggtagtattctttatagcagtttgagaacggaataatacactcctatcctgcctcacgtgttagacacattttgagtgtcctcagatccctttggcgctattatctcctggactcttagctgcttggctgcttctcccttggcagctccctgtgcagaggaccacccaggacatgattactgcaacacctcacct

SEQ ID NO: 88569 - DNA, 2252 bp, Homo sapiens
ccctgagaagaaggtaatgctattctcattttagagatgaggaaatcaagctgagaaaagtcacccgaggtcatacagttagtaagtggctgaatgaggattcaagtccaggtctttgcggttcggaagcagagtttgcatggctcagaggccccctgtggcctgcagacatgttttgttaggttggcttagtgtagtcaaacaataagactagtggctgacatttagaattggaagatgtcatgacagatctgcatttctggctgctcttgaagactgtgatgatccagtgacatggactgtgttcttgtgtggcctgtgtgtcagctggcacagaggggtggctgtgccgcatggcagggcggcactcttgctgcctctcacctgcattgctcctggctctgaaggctgtgctctgctcactacattccactgtgtgctcctggattcacttgtcctagagatcaagttacctcttttgctggaagtatatcagtgaggatattttaatgtctcagctggattctcatgttcaattttaggatttccatcaccaaggagtaagaagaccttcgggcagagactgttgggtatgctcccttcagaaaacagttctaagaggatggaagaccaggacagtcctcaagaggtccttaagatgctcatagatttgcttaatgataaagaagaagctttggctcatcaaagaaaagttagctacatgcttgctcgggcattggaagacaaagacactgcttcaaacgagaataaagaaaaaaatcctataaaagagaatttccctttcaacaacccctggcgctggcgcacagatatcttaaatggctactaattgctgctgtgtatgaaaacaaatggctatcaaggccgggtgcagtggcttacagatctggtctgaatctcaagtccagaccagtccagagttcaagaccagcctgggcaacatggtgaaaccccatctatacaaaaactcggcaaggcatggtggcatgcacctgttgtcccagctactcaggggctgaggcaggaggatggcatgagcccaggagcttgaggctgcagtgagctgtgattgtgccactgcactccagcctgagtgacagagtgagacccccatctccaaaagaaaaggctatcaatacaaaagtttatctaaattactgtacagctatacaatggaatactctacaaaatggagagatccataagataaagcaaatgaataaagcaaaatgcatgtgttgacagctgttgtgatacctcagttcttgtcttcttggtttaaaagaatttaaatgagacagcaaaggagatgcagcataatttattgcaaaagaattcagggccggctgctcgtaagggtgagacagcattgattattgctggagaaactccctttatgggagttttgcattattattcataaggaggtgaggtgttgcagtaatcatgtcctgggtggtcctctgcacaggtgcagtagctgttaatgcttgttcatacaccacatgtctcagtagcatcttaaatttccacctagaggtgtgttttttattattatcatgtgcaaaggatcagtttgaggacaggtaaaatcaaaatgtgtatgctctctagaagggaaagtccctactgaagatagctttgcttaaatgagctcaattacaatgtgaatgctgaggtttattgtgttggctgtatggtcatgagaaaatggtcatttccttgactacctgatacggtttggctgtgtccccacccaagtcttattttgaattgtaatccccataattcccacatgttgaaggagggacttggtggtaggtgactggatcatgggggtggtatcccccatgctgttctcatgattgtgagttctcacgagatccaatggttttatacatggtagtctctcctgctgccatgtaaaacatgcctgcttccccttctgccaggattgtaagtttcccgaggcctgcccagccatgtggagctatgagtcaattaaacctctttcctttataaattactgagtcttgggtagtattctttatagcagtttgagaacggaataatacactcctatcctgcctcacgtgttagacacattttgagtgtcctcagatccctttggcgctattatctcctggactcttagctgcttggctgcttctcccttggcagctccctgtgcagaggaccacccaggacatgattactgcaacacctcacct

SEQ ID NO: 88570 - DNA, 2021 bp, Homo sapiens
  misc_feature (3)..(3): n is a, c, g, or t
  misc_feature (9)..(9): n is a, c, g, or t
  misc_feature (20)..(20): n is a, c, g, or t
  misc_feature (30)..(30): n is a, c, g, or t
  misc_feature (32)..(32): n is a, c, g, or t
  misc_feature (43)..(43): n is a, c, g, or t
gangacagnattggccacangcttgccaangntgcagtctgancttgcggtcctcggagcctgcctttgtcatgggcccggagggaacccctgttcttgtgccagaatggcagcatccactcggaaactgcttcttcagctcaaacaagagaagagtaaagaagaagcttacgtgatggcagatgctttcagaattgcatttgagcaacaattaatgagaaaaaatgaccaggcactacaattgacacaaatggataaaatgcataaaaaagcaacaaaatggatgaattggaagcaccttaaagaggatggatttccatcaccaaggagtaagaagaccttcgggcagagactgttgggtatgctcccttcagaaaacagttctaagaggatggaagaccaggacagtcctcaagaggtccttaagatgctcatagatttgcttaatgataaagaagaagctttggctcatcaaagaaaagttagctacatgcttgctcgggcattggaagacaaagacactgcttcaaacgagaataaagaaaaaaatcctataaaagagaatttccctttcaacaacccctggcgctggcgcacagatatcttaaatggctactaattgctgctgtgtatgaaaacaaatggctatcaaggccgggtgcagtggcttacagatctggtctgaatctcaagtccagaccagtccagagttcaagaccagcctgggcaacatggtgaaaccccatctatacaaaaactcggcaaggcatggtggcatgcacctgttgtcccagctactcaggggctgaggcaggaggatggcatgagcccaggagcttgaggctgcagtgagctgtgattgtgccactgcactccagcctgagtgacagagtgagacccccatctccaaaagaaaaggctatcaatacaaaagtttatctaaattactgtacagctatacaatggaatactctacaaaatggagagatccataagataaagcaaatgaataaagcaaaatgcatgtgttgacagctgttgtgatacctcagttcttgtcttcttggtttaaaagaatttaaatgagacagcaaaggagatgcagcataatttattgcaaaagaattcagggccggctgctcgtaagggtgagacagcattgattattgctggagaaactccctttatgggagttttgcattattattcataaggaggtgaggtgttgcagtaatcatgtcctgggtggtcctctgcacaggtgcagtagctgttaatgcttgttcatacaccacatgtctcagtagcatcttaaatttccacctagaggtgtgttttttattattatcatgtgcaaaggatcagtttgaggacaggtaaaatcaaaatgtgtatgctctctagaagggaaagtccctactgaagatagctttgcttaaatgagctcaattacaatgtgaatgctgaggtttattgtgttggctgtatggtcatgagaaaatggtcatttccttgactacctgatacggtttggctgtgtccccacccaagtcttattttgaattgtaatccccataattcccacatgttgaaggagggacttggtggtaggtgactggatcatgggggtggtatcccccatgctgttctcatgattgtgagttctcacgagatccaatggttttatacatggtagtctctcctgctgccatgtaaaacatgcctgcttccccttctgccaggattgtaagtttcccgaggcctgcccagccatgtggagctatgagtcaattaaacctctttcctttataaattactgagtcttgggtagtattctttatagcagtttgagaacggaataatacactcctatcctgcctcacgtgttagacacattttgagtgtcctcagatccctttggcgctattatctcctggactcttagctgcttggctgcttctcccttggcagctccctgtgcagaggaccacccaggacatgattactgcaacacctcacct

SEQ ID NO: 88571 - DNA, 2429 bp, Homo sapiens
cagagcaagactctgtctcttacacaaagaaaaggaaggaaaaaaagaagaaaagaaaggaaaaaagaagaaaaggacaaaaaaagctctaaattaggccctggggctgagagcggcactttatgctgtgtcttagctgagttgtataaacgcctccagctgagatctgcacacacagctggagcttctcagcaccagggactccagctgataaagatgtctcctgtgtgagataagttcaggacagaagctgctcatgatcataagtcctccccttctgtcctaccactctaccctgcagtgacagggaaaagatactgttttctgctctccagtagacagcaggacccctctctaaatgtttggtttgagatcttcttgtgaaaactcctaatacaaaaacctgatagagcttggatagctggtatgtttgatatggatacaatatatgagatctcaccatccagttttctcactaaccataaagtctctgaataatttgcttttacatattcccttttggaaaaatcctacaaattttccaagaggaaacaggaatccgacttcagttgcaaagttaagatgcttttccattaaaaatgacaccatctcatctagtattacatatatatgatcttacgtgatactcactattctatcagataggttttctgaatggagcccgatcttgtgggtagtgtattgcttgtacgaaatgaatatgtcatgttggggtaactagattggatgagggtggagttaggcttcataatgaatactttctcatatggcccttcctagttttgaatcaacggtaatttggaggctcctcgccatgcttgatatcaaacagcagaagatggctcaggaaaacatgtgctgtgataaaagtggctttgcagaggcttcaggtcttgagcttgcggtcctcggagcctgcctttgtcatgggcccggagggaacccctgttcttgtgccagaatggcagcatccactcggaaactgcttcttcagctcaaacaagagaagagtaaagaagaagcttacgtgatggcagatgctttcagaattgcatttgagcaacaattaatgagaaaaaatgaccaggcactacaattgacacaaatggataaaatgcataaaaaagcaacaaaatggatgaattggaagcaccttaaagaggatggatttccatcaccaaggagtaagaagaccttcgggcagagactgttgggtatgctcccttcagaaaacagttctaagaggatggaagaccaggacagtcctcaagaggtccttaagatgctcatagatttgcttaatgataaagaagaagctttggctcatcaaagaaaagttagctacatgcttgctcgggcattggaagacaaagacactgcttcaaacgagaataaagaaaaaaatcctataaaagagaatttccctttcaacaacccctggcgctggcgcacagatatcttaaatggctactaattgctgctgtgtatgaaaacaaatggctatcaaggccgggtgcagtggcttacagatctggtctgaatctcaagtccagaccagtccagagttcaagaccagcctgggcaacatggtgaaaccccatctatacaaaaactcggcaaggcatggtggcatgcacctgttgtcccagcctctcaaagtgctgggaattacaggcataaaccacatctgcaaaaaaaacaaaaaaaaaaataaaaaacaaccgtgtgttgggccgcccccgccgccccctgagaaaagccttcccaacaccctctcgccgtttggcaccgggggccacaaacagggtaagctgcacaccgggcccatcaccagctccccccaagacacacccccgggccagcgagaacaagggccgtggaacatccccaccactaaaaaacccgccgggggaacacacggagcggtttctagacaacacccaggagcggccactagcgagcaacacggggaattcataaaccggggacccaaggcgacctcgaactaaaaatcgccccgccaggagacagcgatcgccctgaagataccaacacaagcccgacccgccacacaacactactagacgtgataagccacacccgacgcgcacaccgtcaaccacacaccaggcaatgggcccaggcgcgggggggacacaaggagaggggccacagcggcgcacacgcgacgcggggggcggcgaccgacaccggcggggaaggaggggcggaacagggcgggcgggacacgaggagatcgcgactgtgcgcagctgcaccgagccccaggacatgagagacgacggcggcggacggcgcggtggggggcaaccgggccacgggggacggccgagtgtgtccagcacaacacgcgcgcggaggccgttgcagcaggccagggcggacca

SEQ ID NO: 88572 - DNA, 1332 bp, Homo sapiens
gtgtgtgtgtagacagggtcccactgtgttgctcaggctggtgccaaactcctggcctcaagggatcctcctgcctcagcctctcaaagtgctgggattacaggcataaaccacaactcaataaaaaagtttttaaaaatttacaaagctcatatttgatccagctaggattttacccttgcactccagcctgagtgacagagtgagacccccatctccaaaagaaaaggctatcaatacaaaagtttatctaaattactgtacagctatacaatggaatactctacaaaatggagagatccataagataaagcaaatgaataaagcaaaatgcatgtgttgacagctgttgtgatacctcagttcttgtcttcttggtttaaaagaatttaaatgagacagcaaaggagatgcagcataatttattgcaaaagaattcagggccggctgctcgtaagggtgagacagcattgattattgctggagaaactccctttatgggagttttgcattattattcataaggaggtgaggtgttgcagtaatcatgtcctgggtggtcctctgcacaggtgcagtagctgttaatgcttgttcatacaccacatgtctcagtagcatcttaaatttccacctagaggtgtgttttttattattatcatgtgcaaaggatcagtttgaggacaggtaaaatcaaaatgtgtatgctctctagaagggaaagtccctactgaagatagctttgcttaaatgagctcaattacaatgtgaatgctgaggtttattgtgttggctgtatggtcatgagaaaatggtcatttccttgactacctgatacggtttggctgtgtccccacccaagtcttattttgaattgtaatccccataattcccacatgttgaaggagggacttggtggtaggtgactggatcatgggggtggtatcccccatgctgttctcatgattgtgagttctcacgagatccaatggttttatacatggtagtctctcctgctgccatgtaaaacatgcctgcttccccttctgccaggattgtaagtttcccgaggcctgcccagccatgtggagctatgagtcaattaaacctctttcctttataaattactgagtcttgggtagtattctttatagcagtttgagaacggaataatacactcctatcctgcctcacgtgttagacacattttgagtgtcctcagatccctttggcgctattatctcctggactcttagctgcttggctgcttctcccttggcagctccctgtgcagaggaccacccaggacatgattactgcaacacctcacct

SEQ ID NO: 88573 - DNA, 2897 bp, Homo sapiens
cagagcaagactctgtctcttacacaaagaaaaggaaggaaaaaaagaagaaaagaaaggaaaaaagaagaaaaggacaaaaaaagctctaaattaggccctggggctgagagcggcactttatgctgtgtcttagctgagttgtataaacgcctccagctgagatctgcacacacagctggagcttctcagcaccagggactccagctgataaagatgtctcctgtgtgagataagttcaggacagaagctgctcatgatcataagtcctccccttctgtcctaccactctaccctgcagtgacagggaaaagatactgttttctgctctccagtagacagcaggacccctctctaaatgtttggtttgagatcttcttgtgaaaactcctaatacaaaaacctgatagagcttggatagctggtatgtttgatatggatacaatatatgagatctcaccatccagttttctcactaaccataaagtctctgaataatttgcttttacatattcccttttggaaaaatcctacaaattttccaagaggaaacaggaatccgacttcagttgcaaagttaagatgcttttccattaaaaatgacaccatctcatctagtattacatatatatgatcttacgtgatactcactattctatcagataggttttctgaatggagcccgatcttgtgggtagtgtattgcttgtacgaaatgaatatgtcatgttggggtaactagattggatgagggtggagttaggcttcataatgaatactttctcatatggcccttcctagttttgaatcaacggtaatttggaggctcctcgccatgcttgatatcaaacagcagaagatggctcaggaaaacatgtgctgtgataaaagtggctttgcagaggcttcaggtcttgagcttgcggtcctcggagcctgcctttgtcatgggcccggagggaacccctgttcttgtgccagaatggcagcatccactcggaaactgcttcttcagctcaaacaagagaagagtaaagaagaagcttacgtgatggcagatgctttcagaattgcatttgagcaacaattaatgagaaaaaatgaccaggcactacaattgacacaaatggataaaatgcataaaaaagcaacaaaatggatgaattggaagcaccttaaagaggatggatttccatcaccaaggagtaagaagaccttcgggcagagactgttgggtatgctcccttcagaaaacagttctaagaggatggaagaccaggacagtcctcaagaggtccttaagatgctcatagatttgcttaatgataaagaagaagctttggctcatcaaagaaaagttagctacatgcttgctcgggcattggaagacaaagacactgcttcaaacgagaataaagaaaaaaatcctataaaagagaatttccctttcaacaacccctggcgctggcgcacagatatcttaaatggctactaattgctgctgtgtatgaaaacaaatggctatcaaggccgggtgcagtggcttacagatctggtctgaatctcaagtccagaccagtccagagttcaagaccagcctgggcaacatggtgaaaccccatctatacaaaaactcggcaaggcatggtggcatgcacctgttgtcccagctactcaggggctgaggcaggaggatggcatgagcccaggagcttgaggctgcagtgagctgtgattgtgccactgcactccagcctgagtgacagagtgagacccccatctccaaaagaaaaggctatcaatacaaaagtttatctaaattactgtacagctatacaatggaatactctacaaaatggagagatccataagataaagcaaatgaataaagcaaaatgcatgtgttgacagctgttgtgatacctcagttcttgtcttcttggtttaaaagaatttaaatgagacagcaaaggagatgcagcataatttattgcaaaagaattcagggccggctgctcgtaagggtgagacagcattgattattgctggagaaactccctttatgggagttttgcattattattcataaggaggtgaggtgttgcagtaatcatgtcctgggtggtcctctgcacaggtgcagtagctgttaatgcttgttcatacaccacatgtctcagtagcatcttaaatttccacctagaggtgtgttttttattattatcatgtgcaaaggatcagtttgaggacaggtaaaatcaaaatgtgtatgctctctagaagggaaagtccctactgaagatagctttgcttaaatgagctcaattacaatgtgaatgctgaggtttattgtgttggctgtatggtcatgagaaaatggtcatttccttgactacctgatacggtttggctgtgtccccacccaagtcttattttgaattgtaatccccataattcccacatgttgaaggagggacttggtggtaggtgactggatcatgggggtggtatcccccatgctgttctcatgattgtgagttctcacgagatccaatggttttatacatggtagtctctcctgctgccatgtaaaacatgcctgcttccccttctgccaggattgtaagtttcccgaggcctgcccagccatgtggagctatgagtcaattaaacctctttcctttataaattactgagtcttgggtagtattctttatagcagtttgagaacggaataatacactcctatcctgcctcacgtgttagacacattttgagtgtcctcagatccctttggcgctattatctcctggactcttagctgcttggctgcttctcccttggcagctccctgtgcagaggaccacccaggacatgattactgcaacacctcacct

SEQ ID NO: 88574 - DNA, 895 bp, Homo sapiens
tgccttgtagcattcaggtcaagcagcattgtacagggctatgaaagaaccaagaatgggctgcccttgggaaaagaggatctaggatccagttggtgcagcttatggcttgtccctgtgtgtatagttgttaaattattcttttatttttatttttaagaagttattctttagataataataggcatgtagcttaaaaggaaacctcaaaagacacaaaggatttgtctcattttaaattaaaaaaatactgtatcagcatcaagtaattaaacatttgttggaatatcataacttcttttttctttattgtatgttccctttcctgtgcttacgtattttcagaaattttagttggtgtgcataccacaatttgtattttatacttaaatatacatttcatggttgtatatttatttgatcaagttcttttatatcaaataacagagcttggcatttggttgcttgctcataactcggcagtaagcatttttaagcatgaagttattctttggttgaattttattcttgatatggggcttaggagtgagatttctggtctacagaaatgatcatgctcatgaattttgacatttatcgtcatgatgctttgcacaagggctgcaccaatttagatcatctttagcggtgaatgagtggattaattttactacaactactgatggtggtggtggaatttcagttgcttttttttgcgaggttaataggtctaaaattttacttttgtttgatgactagtggtttgaatttttcgctgcctgttatattgcttgtatactttgcctgtttgtgtcactgtccttttggattggagtcatactgtttttttttgtttattttaacttatctgtataaaacattgtattcaaaacta

SEQ ID NO: 88575 - DNA, 478 bp, Homo sapiens
tgccttgtagcattcaggtcaagcagcattgtacagggctatgaaagaaccaagaatgggctgcccttgggaaaagaggatctaggatccagttggtgcagcttatggcttgtccctgtgtgtatagttgttaaattattcttttatttttatttttaagaagttattctttagataataataggcatgtagcttaaaaggaaacctcaaaagacacaaaggatttgtctcattttaaattaaaaaaatactgtatcagcatcaagtaattaaacatttgttggaatatcaaaaaaaaaaaaaaaaaaaaaaaaaaaaaaaaaaaaacttaacaaacactataaccaaatcgacctttataatccaacaaattttatgattcgagccaatatttgagttcacttggcactattagccctataggcattctgacctcttgtgtccctttgtttttcacccgccttgcttggtctttggc

SEQ ID NO: 88576 - DNA, 1120 bp, Homo sapiens
tgccttgtagcattcaggtcaagcagcattgtacagggctatgaaagaaccaagaatgggctgcccttgggaaaagaggatctaggatccagttggtgcagcttatggcttgtccctgtgtgtatagttgttaaattattcttttatttttatttttaagaagttattctttagataataataggcatgtagcttaaaaggaaacctcaaaagacacaaaggatttgtctcattttaaattaaaaaaatactgtatcagcatcaagtaattaaacatttgttggaatatcataacttcttttttctttattgtatgttccctttcctgtgcttacgtattttcagaaattttagttggtgtgcataccacaatttgtattttatacttaaatatacatttcatggttgtatatttatttgatcaagttcttttatatcaaataacagagcttggcatttggttgcttgctcataactcggcagtaagcatttttaagcatgaagttattctttggttgaattttattcttgatatggggcttaggagtgagatttctggtctacagaaatgatcatgctcatgaattttgacatttatcgtcatgatgctttgcacaagggctgcaccaatttagatcatctttagcggtgaatgagtggattaattttactacaactactgatggtggtggtggaatttcagttgcttttttttgcgaggttaataggtctaaaattttacttttgtttgatgactagtggtttgaatttttcgctgcctgttatattgcttgtatactttgcctgtttgtgtcactgtccttttggattggagtcatactgtttttttttgtttattttaacttatctgtataaaacattgtattcaaaactagttattgttggtcagatttaatacaaatgtttttcctaatctgttttcttctcctgtgacattatctagcatgctttgcagtgggtccagagttgtctggggatcaagtttaagtagccctggaccaactggactaaatttgatcagcagtcaaattgttgctaagagctatgcacatggtgctgtatttggggtagcttttatgagaaaatagaaattaagatg

SEQ ID NO: 88577 - DNA, 436 bp, Homo sapiens
tgcttaccacagattggggaagaggaaatggggagatgcaggccaaggatacaaaatagcagataaaatgaacaagtctagagatagggctaaagttaatacaattgtattagggatttttgttaaataagtagattttagctgctattatcacaaaaaaactgagatgataatgttaatctgcttcactatagcagccattttattatctatatgtatcccataacatcatgttgtaaatcttaaatatacctaataaaataaaattgtcaccaaaatgcaagaattagagttaactttacctgtgaagccaagtaatgctcagagggctgcttagagatcacaaaatctgaacataggacgtagaggcatcaaatattcaaaatcaccaggcttagagagtctgaagtgagtcctgtgttaggaatattcttgc

SEQ ID NO: 88578 - DNA, 380 bp, Homo sapiens
atagttgtatcacaccgcaatctcaggaacagctctcttagatagtgatttaaagctgtggagcatgccctagcagctaacattcatcataaggaacattctgccatcagcagtgtgcaatctcttttttaccaccactaccgaaaaaggtggactggctcattcaggcagtattttaacagtgaacacacgtgttaaaatatcggtttcatgatattcaggcttgcatactgggtcatgaacatttactaaatgcacatataagtaaacctgagttgactatgtttgcaaattgatattattttcacagatgagtctcttcatttttcctttgtatttttgcagccattgaattaataaacgttagattgcggtgttag

SEQ ID NO: 88579 - DNA, 351 bp, Homo sapiens
gggcagtagcatctcacacctgagcacagggggaccctagtctgcactctgtgtcttagaaaacctcccatatcagaagcaccaaatgcaatggtaatggatagtgaatgagaactccagtagagctgaactgggtccctgtggccagaggctgcagagctggaagagctgatcctgtatgtcagggaaggagaaaagcacagtgtgtgccctggaaaccagaggaagtgtgatgtttcgccccccaagtgggcatcaaggtcgctcgtcatccttctgtcgtctgtcctgcatgaagttaggagcctccgattggtgcccttgcgcctggtcatgccctcttcctcccag

SEQ ID NO: 88580 - DNA, 184 bp, Homo sapiens
ctaccgtccagggtctctgttggagagctacatctacatttatggacctagacagtagccagccatgatgaactaaacttctgagaccatggagtaagggaatgactaccatgtggatgagacagaaggcatactgaaggtgaggctgtggctaaggtgaaaaagaagattatttggcagtgga

SEQ ID NO: 88581 - DNA, 318 bp, Homo sapiens
tgaacatatgcatatcccgtggcccagaaattctactccttggtatctactctagactataacaggagacaaccaggaagcaatctaaatgcccatctacagaaaatggataaataccatgtagtatattcaacttaatgagcatttaattgtgcagcaaggaaactgaataaacacaacatgaatgaatcttagaaatataatgttgaataaaaagccccaagtttgtcaagtctgcatacaatacgccatagtcccccccttatttgcagcttcattttccacggtttcagttatccacagtctattatggtccaa

SEQ ID NO: 88582 - DNA, 428 bp, Homo sapiens
tttttaaataaaatctaatttctagtcaccatccttcaaggaaattattctcccgatttacgagaaaactgaggcacagggaagttgcatgacttgcccatggtaataaaaccaataagaagtagaactaatatttaaacccaggcctgaccataaagcccatgattttcccactatatcatgtaaactttgccgaggtgtttaattgtgcataaagggttggcttaacccatagttaaaatgaaaatatgcataccaaaattgacttttgatttcaacagaattttaaatatttttagcaatcagggaaagaaaaatcattttaaactgcctgtaagaaaaatttgatgacacaaagagtattcttttggctgaaaagatgatggaaattaggacgagggatcaggaattatttaaatattttgagt

SEQ ID NO: 88583 - DNA, 1884 bp, Homo sapiens
actccgaatgcgaagttctgtcttgtcatagccaagcacgctgcttcttggattgacctggcaggatggcgccaccaccagctagagtacatctaggtgcgttcctggcagtgactccgaatcccgggagcgcagcgagtgggacagaggcagccgcggccacacccagcaaagtgtggggctcttccgcggggaggattgaaccacgaggcgggggccgaggagcgctccctacctccatgggacagcacggacccagtgcccgggcccgggcagggcgcgccccaggacccaggccggcgcgggaagccagccctcggctccgggtccacaagaccttcaagtttgtcgtcgtcggggtcctgctgcaggtcgtacctagctcagctgcaaccatcaaacttcatgatcaatcaattggcacacagcaatgggaacatagccctttgggagagttgtgtccaccaggatctcatagatcagaacgtcctggagcctgtaaccggtgcacagagggtgtgggttacaccaatgcttccaacaatttgtttgcttgcctcccatgtacagcttgtaaatcagatgaagaagagagaagtccctgcaccacgaccaggaacacagcatgtcagtgcaaaccaggaactttccggaatgacaattctgctgagatgtgccggaagtgcagcacagggtgccccagagggatggtcaaggtcaaggattgtacgccctggagtgacatcgagtgtgtccacaaagaatcaggcaatggacataatatatgggtgattttggttgtgactttggttgttccgttgctgttggtggctgtgctgattgtctgttgttgcatcggctcaggttgtggaggggaccccaagtgcatggacagggtgtgtttctggcgcttgggtctcctacgagggcctggggctgaggacaatgctcacaacgagattctgagcaacgcagactcgctgtccactttcgtctctgagcagcaaatggaaagccaggagccggcagatttgacaggtgtcactgtacagtccccaggggaggcacagtgtctgctgggaccggcagaagctgaagggtctcagaggaggaggctgctggttccagcaaatggtgctgaccccactgagactctgatgctgttctttgacaagtttgcaaacatcgtgccctttgactcctgggaccagctcatgaggcagctggacctcacgaaaaatgagatcgatgtggtcagagctggtacagcaggcccaggggatgccttgtatgcaatgctgatgaaatgggtcaacaaaactggacggaacgcctcgatccacaccctgctggatgccttggagaggatggaagagagacatgcaaaagagaagattcaggacctcttggtggactctggaaagttcatctacttagaagatggcacaggctctgccgtgtccttggagtgaaagactctttttaccagaggtttcctcttaggtgttaggagttaatacatattaggtttttttttttttaacatgtatacaaagtaaattcttagccaggtgtagtggctcatgcctgtaatcccagcactttgggaggctgaggcgggtggatcacttgaggtcagaagttcaagaccagcctgaccaacatcgtgaaatgccgtctttacaaaaaaataccacacatcacgcgggattgtgcgggggggggcataaaatactcgggcaacacgggagggctgagcgcagggaaaatcctggaaacccacgaaggatgtgactgtaattggccatgcgcacaacctggaacaagacaagcctgtccaagaaaaatactggaaagtatgccgtaggctcttccacggacttg

SEQ ID NO: 88584 - DNA, 1267 bp, Homo sapiens
gtttattgtgtactttatttctattcttatcacattataatatataatgaaataattatacaacttatcataatgtagagtcagtgggagccctgagcttgttttcctgcaacgagatggtcctatctgagggtgatgggagacggtgacagataatcaggcataagattctcataaggagtatgcaacccagatccctgacgtgcacagttcacaatagggtttgcactcctataagaatctaatgttgccactgatctgaccgggtggagctgaggtggtaatgccagcaatggggagtggctgtgagctatgtgggaccagaggtttttcaccatctccatggtgacccaagggggaaagtgatgtgctgcaggtttccgggctggctgatggtcagggtcagtactagactgcaggacccctgactcagaccaaggcattccccactgtgtgttacagggaccggcagaagctgaagggtctcagaggaggaggctgctggttccagcaaatggtgctgaccccactgagactctgatgctgttctttgacaagtttgcaaacatcgtgccctttgactcctgggaccagctcatgaggcagctggacctcacgaaaaatgagatcgatgtggtcagagctggtacagcaggcccaggggatgccttgtatgcaatgctgatgaaatgggtcaacaaaactggacggaacgcctcgatccacaccctgctggatgccttggagaggatggaagagagacatgcaaaagagaagattcaggacctcttggtggactctggaaagttcatctacttagaagatggcacaggctctgccgtgtccttggagtgaaagactctttttaccagaggtttcctcttaggtgttaggagttaatacatattaggtttttttttttttaacatgtatacaaagtaaattcttagccaggtgtagtggctcatgcctgtaatcccagcactttgggaggctgaggcgggtggatcacttgaggtcagaagttcaagaccagcctgaccaacatcgtgaaatgccgtctttacaaaaaaataccacacatcacgcgggattgtgcgggggggggcataaaatactcgggcaacacgggagggctgagcgcagggaaaatcctggaaacccacgaaggatgtgactgtaattggccatgcgcacaacctggaacaagacaagcctgtccaagaaaaatactggaaagtatgccgtaggctcttccacggacttg

SEQ ID NO: 88585 - DNA, 1126 bp, Homo sapiens
gtcctggatgtgctgagcatggacttcctggagtgacctcactgggagggggtggtggcagcaggtccagccgtgccctacggaccccgtggggagccctgggtgtgggcttctgagttggctctttgccttcctaaggtgtgtttctggcgcttgggtctcctacgagggcctggggctgaggacaatgctcacaacgagattctgagcaacgcagactcgctgtccactttcgtctctgagcagcaaatggaaagccaggagccggcagatttgacaggtgtcactgtacagtccccaggggaggcacagtgtctgctgggaccggcagaagctgaagggtctcagaggaggaggctgctggttccagcaaatggtgctgaccccactgagactctgatgctgttctttgacaagtttgcaaacatcgtgccctttgactcctgggaccagctcatgaggcagctggacctcacgaaaaatgagatcgatgtggtcagagctggtacagcaggcccaggggatgccttgtatgcaatgctgatgaaatgggtcaacaaaactggacggaacgcctcgatccacaccctgctggatgccttggagaggatggaagagagacatgcaaaagagaagattcaggacctcttggtggactctggaaagttcatctacttagaagatggcacaggctctgccgtgtccttggagtgaaagactctttttaccagaggtttcctcttaggtgttaggagttaatacatattaggtttttttttttttaacatgtatacaaagtaaattcttagccaggtgtagtggctcatgcctgtaatcccagcactttgggaggctgaggcgggtggatcacttgaggtcagaagttcaagaccagcctgaccaacatcgtgaaatgccgtctttacaaaaaaataccacacatcacgcgggattgtgcgggggggggcataaaatactcgggcaacacgggagggctgagcgcagggaaaatcctggaaacccacgaaggatgtgactgtaattggccatgcgcacaacctggaacaagacaagcctgtccaagaaaaatactggaaagtatgccgtaggctcttccacggacttg

SEQ ID NO: 88586 - DNA, 232 bp, Homo sapiens
aacatagccctttgggagagttgtgtccaccaggtacattctaagactgatctctaatcctttacacctctcttttccttaccctatactatatacaaaaattatctcaaaattcatcaataacattccttttccatgttcttcaagttttctgtttcctacagtttctggttcttctattcaacagatacttattgatcctttgccaaatccaaggttatgaagctttatc

SEQ ID NO: 88587 - DNA, 824 bp, Homo sapiens
cggggtccccggggccaggcaggagcgacccgggcctggaggcagcagagccccctcccgcaggaggctgggcccggggactccaccccgttggctgctgcctggcgcgtctccctcctgcccacacctcacgatgtatcgggaagtttcggaatcgatagagctcaagtcgtacctagctcagctgcaaccatcaaacttcatgatcaatcaattggcacacagcaatgggaacatagccctttgggagagttgtgtccaccaggatctcatagatcagaacgtcctggagcctgtaaccggtgcacagagggtgtgggttacaccaatgcttccaacaatttgtttgcttgcctcccatgtacagcttgtaaatcagatgaagaagagagaagtccctgcaccacgaccaggaacacagcatgtcagtgcaaaccaggaactttccggaatgacaattctgctgagatgtgccggaagtgcagcacagggtgccccagagggatggtcaaggtcaaggattgtacgccctggagtgacatcgagtgtgtccacaaagaatcaggcaatggacataatatatgggtgattttggttgtgactttggttgttccgttgctgttggtggctgtgctgattgtctgttgttgcatcggctcaggttgtggcggggaccccaagtgcatggccagggtggtgttctggcgcctggggtctcctacgagggcctggggttggtggacatgctccacagagatctgggccagcagactcgtggtcacttcggctctggcgccatgggagcccgagcggagcttgccgcg

SEQ ID NO: 88588 - DNA, 1870 bp, Homo sapiens
agctgtacgctcggattacgggatcgctgcttcttggattgacctggcaggatggcgccaccaccagctagagtacatctaggtgcgttcctggcagtgactccgaatcccgggagcgcagcgagtgggacagaggcagccgcggccacacccagcaaagtgtggggctcttccgcggggaggattgaaccacgaggcgggggccgaggagcgctccctacctccatgggacagcacggacccagtgcccgggcccgggcagggcgcgccccaggacccaggccggcgcgggaagccagccctcggctccgggtccacaagaccttcaagtttgtcgtcgtcggggtcctgctgcaggtcgtacctagctcagctgcaaccatcaaacttcatgatcaatcaattggcacacagcaatgggaacatagccctttgggagagttgtgtccaccaggatctcatagatcagaacgtcctggagcctgtaaccggtgcacagagggtgtgggttacaccaatgcttccaacaatttgtttgcttgcctcccatgtacagcttgtaaatcagatgaagaagagagaagtccctgcaccacgaccaggaacacagcatgtcagtgcaaaccaggaactttccggaatgacaattctgctgagatgtgccggaagtgcagcacagggtgccccagagggatggtcaaggtcaaggattgtacgccctggagtgacatcgagtgtgtccacaaagaatcaggcaatggacataatatatgggtgattttggttgtgactttggttgttccgttgctgttggtggctgtgctgattgtctgttgttgcatcggctcaggttgtggaggggaccccaagtgcatggacagggtgtgtttctggcgcttgggtctcctacgagggcctggggctgaggacaatgctcacaacgagattctgagcaacgcagactcgctgtccactttcgtctctgagcagcaaatggaaagccaggagccggcagatttgacaggtgtcactgtacagtccccaggggaggcacagtgtctgctgggaccggcagaagctgaagggtctcagaggaggaggctgctggttccagcaaatggtgctgaccccactgagactctgatgctgttctttgacaagtttgcaaacatcgtgccctttgactcctgggaccagctcatgaggcagctggacctcacgaaaaatgagatcgatgtggtcagagctggtacagcaggcccaggggatgccttgtatgcaatgctgatgaaatgggtcaacaaaactggacggaacgcctcgatccacaccctgctggatgccttggagaggatggaagagagacatgcaaaagagaagattcaggacctcttggtggactctggaaagttcatctacttagaagatggcacaggctctgccgtgtccttggagtgaaagactctttttaccagaggtttcctcttaggtgttaggagttaatacatattaggtttttttttttttaacatgtatacaaagtaaattcttagccaggtgtagtggctcatgcctgtaatcccagcactttgggaggctgaggcgggtggatcacttgaggtcagaagttcaagaccagcctgaccaacatcgtgaaatgccgtctttacaaaaaaataccacacatcacgcgggattgtgcgggggggggcataaaatactcgggcaacacgggagggctgagcgcagggaaaatcctggaaacccacgaaggatgtgactgtaattggccatgcgcacaacctggaacaagacaagcctgtccaagaaaaatactggaaagtatgccgtaggctcttccacggacttg

SEQ ID NO: 88589 - DNA, 1123 bp, Homo sapiens
acaatctggccaactcatttcacagtataaatcactcctgcagggaggggttcccctcggcaggcagggcacgtgctggctcaccccacgtccccctgtaccccctttgcagagatctaccgcatcgtgtcacagaaacagatcgcagaccgcgctgcccacgacgagtccccggggaacaacgtggtggacatcagcgtgccgcccaccacggacggacagaagcccaacaagctgcagtgctgccagaacctgtgacccctgcgcctccacccagcgtgcgtgcacgtcctccgcccgcccccgccacggtatcctctggcccctccctgctgtccctctgtggccggctcgttccagccctcccagtgagctctgcacggccgggccggggcccaggaaggacaggagccagtgctaccccgtcctgcccggggaaaagctagaagccccggtttgctgcacccatgaaactcgggtccccacagcgtcttggcggggtggggagggcggcaggatggacggggctggccagaggcgaggaggacgggcggacggcgccgccttctccccttttccttggccgactctagggagcgattgcctccctccctctgtgaccgggtggcccagccagcccgtcgtccccacccagaaccgtgctctgggccaaagcccgaagaaccaggcagcgggggccggggcaggcggaccccccgggctctcagcgcccacccgctcctccgcacacagcagctcgcacaggcctcccacctctgcctgttgattgatgcagggagaagcccgtccccccctctcccctctcccctcccctctcctgcacgcaacgcgccctctcggccctccctgtccccctcctctgtctcgtctccccatctggtctggaacctgtttgcaagtgaagcaatatctccgtgttttgtatatacaaccgctcttgtagcctttggtttttgttaatgtagagaaacacagattctttatacactttgtaagatttacgccaaaccccagctctcgatctcttcttctccctgtggcccctgcgctgttgccccgtccccgtcaccccgcccgttactgaaatgtataatctgacttc

SEQ ID NO: 88590 - DNA, 2473 bp, Homo sapiens
  misc_feature (20)..(20): n is a, c, g, or t
agcgggccgctctgcgcggngcggtccgcccccgtcgggtgtttgtggtggggctgcggagtcgccgatcccgccggaagcgccaggacaatggggacccgggacgacgagtacgactacctattcaaagtggtgctcatcggggactcaggcgtgggcaagagcaacctgctgtcgcgcttcacccgcaacgagttcaacctggagagcaagagcaccatcggcgtggagttcgccacccgcagcatccaggtggacggcaagaccatcaaggcgcagatctgggacaccgctggccaggagcgctaccgcgccatcacctccgcgtactaccgtggtgcagtgggcgccctgctggtgtacgacatcgccaagcacctgacctatgagaacgtggagcgctggctgaaggagctgcgggaccacgcagacagcaacatcgtcatcatgctggtgggcaacaagagtgacctgcgccacctgcgggctgtgcccactgacgaggcccgcgccttcgcagaaaagaacaacttgtccttcatcgagacctcagccttggattccactaacgtagaggaagcattcaagaacatcctcacaggtggccggggaccagatgggtgtgggtagggcaccagccaggcagggtggaacacggcctctgaaccttcgcttgttttgttcgtttgcttgtttttttctttttgtttttttcttttttttgtcggggcaggatggagttttgctctttgcccaggctggagtgtggtggctcgatctcagcttactgcaacctccgccttccaggttcaggcaattctcctgcctcagcctcccgagtagctgggattacaggtgcctgccaccacacccgctaatttttgtaatttttagtagagacaggatttcacaatgttgtccaggttgatctcggactcctgggctcaagtgatcctcctgcctcagcctcccaaagtgctgggattacaggcgtgagccactgcacctggcctgtttgatttttttccaccaccacccctaacctttgctttttaaacctgccggtccacctggacacttcacagggtcagaccaggtctagcccttgctggcactggggacacagagaccccctggccccagttcctggggatgggccctgccttaactcttggcgctgcggggaggcgggtagcctcagggacctggagccttttggcttctgggagtttacctctgagggaggagggcgcttctgatcttagggagcgagaggccggggctggctgtgaccagatgtgggtcctggctgggtgcgcagcccctgtccttgttacccctgatgtgatgggggcgctgtgggggtctggagagggcctctggagtcctgcagggaggggttcccctcggcaggcagggcacgtgctggctcaccccacgtccccctgtaccccctttgcagagatctaccgcatcgtgtcacagaaacagatcgcagaccgcgctgcccacgacgagtccccggggaacaacgtggtggacatcagcgtgccgcccaccacggacggacagaagcccaacaagctgcagtgctgccagaacctgtgacccctgcgcctccacccagcgtgcgtgcacgtcctccgcccgcccccgccacggtatcctctggcccctccctgctgtccctctgtggccggctcgttccagccctcccagtgagctctgcacggccgggccggggcccaggaaggacaggagccagtgctaccccgtcctgcccggggaaaagctagaagccccggtttgctgcacccatgaaactcgggtccccacagcgtcttggcggggtggggagggcggcaggatggacggggctggccagaggcgaggaggacgggcggacggcgccgccttctccccttttccttggccgactctagggagcgattgcctccctccctctgtgaccgggtggcccagccagcccgtcgtccccacccagaaccgtgctctgggccaaagcccgaagaaccaggcagcgggggccggggcaggcggaccccccgggctctcagcgcccacccgctcctccgcacacagcagctcgcacaggcctcccacctctgcctgttgattgatgcagggagaagcccgtccccccctctcccctctcccctcccctctcctgcacgcaacgcgccctctcggccctccctgtccccctcctctgtctcgtctccccatctggtctggaacctgtttgcaagtgaagcaatatctccgtgttttgtatatacaaccgctcttgtagcctttggtttttgttaatgtagagaaacacagattctttatacactttgtaagatttacgccaaaccccagctctcgatctcttcttctccctgtggcccctgcgctgttgccccgtccccgtcaccccgcccgttactgaaatgtataatctgacttc

SEQ ID NO: 88591 - DNA, 2277 bp, Homo sapiens
  misc_feature (20)..(20): n is a, c, g, or t
agcgggccgctctgcgcggngcggtccgcccccgtcgggtgtttgtggtggggctgcggagtcgccgatcccgccggaagcgccaggacaatggggacccgggacgacgagtacgactacctattcaaaggtactaccgtggtgcagtgggcgccctgctggtgtacgacatcgccaagcacctgacctatgagaacgtggagcgctggctgaaggagctgcgggaccacgcagacagcaacatcgtcatcatgctggtgggcaacaagagtgacctgcgccacctgcgggctgtgcccactgacgaggcccgcgccttcgcagaaaagaacaacttgtccttcatcgagacctcagccttggattccactaacgtagaggaagcattcaagaacatcctcacaggtggccggggaccagatgggtgtgggtagggcaccagccaggcagggtggaacacggcctctgaaccttcgcttgttttgttcgtttgcttgtttttttctttttgtttttttcttttttttgtcggggcaggatggagttttgctctttgcccaggctggagtgtggtggctcgatctcagcttactgcaacctccgccttccaggttcaggcaattctcctgcctcagcctcccgagtagctgggattacaggtgcctgccaccacacccgctaatttttgtaatttttagtagagacaggatttcacaatgttgtccaggttgatctcggactcctgggctcaagtgatcctcctgcctcagcctcccaaagtgctgggattacaggcgtgagccactgcacctggcctgtttgatttttttccaccaccacccctaacctttgctttttaaacctgccggtccacctggacacttcacagggtcagaccaggtctagcccttgctggcactggggacacagagaccccctggccccagttcctggggatgggccctgccttaactcttggcgctgcggggaggcgggtagcctcagggacctggagccttttggcttctgggagtttacctctgagggaggagggcgcttctgatcttagggagcgagaggccggggctggctgtgaccagatgtgggtcctggctgggtgcgcagcccctgtccttgttacccctgatgtgatgggggcgctgtgggggtctggagagggcctctggagtcctgcagggaggggttcccctcggcaggcagggcacgtgctggctcaccccacgtccccctgtaccccctttgcagagatctaccgcatcgtgtcacagaaacagatcgcagaccgcgctgcccacgacgagtccccggggaacaacgtggtggacatcagcgtgccgcccaccacggacggacagaagcccaacaagctgcagtgctgccagaacctgtgacccctgcgcctccacccagcgtgcgtgcacgtcctccgcccgcccccgccacggtatcctctggcccctccctgctgtccctctgtggccggctcgttccagccctcccagtgagctctgcacggccgggccggggcccaggaaggacaggagccagtgctaccccgtcctgcccggggaaaagctagaagccccggtttgctgcacccatgaaactcgggtccccacagcgtcttggcggggtggggagggcggcaggatggacggggctggccagaggcgaggaggacgggcggacggcgccgccttctccccttttccttggccgactctagggagcgattgcctccctccctctgtgaccgggtggcccagccagcccgtcgtccccacccagaaccgtgctctgggccaaagcccgaagaaccaggcagcgggggccggggcaggcggaccccccgggctctcagcgcccacccgctcctccgcacacagcagctcgcacaggcctcccacctctgcctgttgattgatgcagggagaagcccgtccccccctctcccctctcccctcccctctcctgcacgcaacgcgccctctcggccctccctgtccccctcctctgtctcgtctccccatctggtctggaacctgtttgcaagtgaagcaatatctccgtgttttgtatatacaaccgctcttgtagcctttggtttttgttaatgtagagaaacacagattctttatacactttgtaagatttacgccaaaccccagctctcgatctcttcttctccctgtggcccctgcgctgttgccccgtccccgtcaccccgcccgttactgaaatgtataatctgacttc

SEQ ID NO: 88592 - DNA, 1612 bp, Homo sapiens
  misc_feature (20)..(20): n is a, c, g, or t
agcgggccgctctgcgcggngcggtccgcccccgtcgggtgtttgtggtggggctgcggagtcgccgatcccgccggaagcgccaggacaatggggacccgggacgacgagtacgactacctattcaaagtggtgctcatcggggactcaggcgtgggcaagagcaacctgctgtcgcgcttcacccgcaacgagttcaacctggagagcaagagcaccatcggcgtggagttcgccacccgcagcatccaggtggacggcaagaccatcaaggcgcagatctgggacaccgctggccaggagcgctaccgcgccatcacctccgcgtactaccgtggtgcagtgggcgccctgctggtgtacgacatcgccaagcacctgacctatgagaacgtggagcgctggctgaaggagctgcgggaccacgcagacagcaacatcgtcatcatgctggtgggcaacaagagtgacctgcgccacctgcgggctgtgcccactgacgaggcccgcgccttcgcagaaaagaacaacttgtccttcatcgagacctcagccttggattccactaacgtagaggaagcattcaagaacatcctcacagagatctaccgcatcgtgtcacagaaacagatcgcagaccgcgctgcccacgacgagtccccggggaacaacgtggtggacatcagcgtgccgcccaccacggacggacagaagcccaacaagctgcagtgctgccagaacctgtgacccctgcgcctccacccagcgtgcgtgcacgtcctccgcccgcccccgccacggtatcctctggcccctccctgctgtccctctgtggccggctcgttccagccctcccagtgagctctgcacggccgggccggggcccaggaaggacaggagccagtgctaccccgtcctgcccggggaaaagctagaagccccggtttgctgcacccatgaaactcgggtccccacagcgtcttggcggggtggggagggcggcaggatggacggggctggccagaggcgaggaggacgggcggacggcgccgccttctccccttttccttggccgactctagggagcgattgcctccctccctctgtgaccgggtggcccagccagcccgtcgtccccacccagaaccgtgctctgggccaaagcccgaagaaccaggcagcgggggccggggcaggcggaccccccgggctctcagcgcccacccgctcctccgcacacagcagctcgcacaggcctcccacctctgcctgttgattgatgcagggagaagcccgtccccccctctcccctctcccctcccctctcctgcacgcaacgcgccctctcggccctccctgtccccctcctctgtctcgtctccccatctggtctggaacctgtttgcaagtgaagcaatatctccgtgttttgtatatacaaccgctcttgtagcctttggtttttgttaatgtagagaaacacagattctttatacactttgtaagatttacgccaaaccccagctctcgatctcttcttctccctgtggcccctgcgctgttgccccgtccccgtcaccccgcccgttactgaaatgtataatctgacttc

SEQ ID NO: 88593 - DNA, 2458 bp, Homo sapiens
  misc_feature (20)..(20): n is a, c, g, or t
agcgggccgctctgcgcggngcggtccgcccccgtcgggtgtttgtggtggggctgcggagtcgccgatcccgccggaagcgccaggacaatggggacccgggacgacgagtacgactacctattcaaagtggtgctcatcggggactcaggcgtgggcaagagcaacctgctgtcgcgcttcacccgcaacgagttcaacctggagagcaagagcaccatcggcgtggagttcgccacccgcagcatccaggtggacggcaagaccatcaaggcgcagatctgggacaccgctggccaggagcgctaccgcgccatcacctccgcgtactaccgtggtgcagtgggcgccctgctggtgtacgacatcgccaagcacctgacctatgagaacgtggagcgctggctgaaggagctgcgggaccacgcagacagcaacatcgtcatcatgctggtgggcaacaagagtgacctgcgccacctgcgggctgtgcccactgacgaggcccgcgccttcgcagaaaagaacaacttgtccttcatcgagacctcagccttggattccactaacgtagaggaagcattcaagaacatcctcacaggtggccggggaccagatgggtgtgggtagggcaccagccaggcagggtggaacacggcctctgaaccttcgcttgttttgttcgtttgcttgtttttttctttttttgtcggggcaggatggagttttgctctttgcccaggctggagtgtggtggctcgatctcagcttactgcaacctccgccttccaggttcaggcaattctcctgcctcagcctcccgagtagctgggattacaggtgcctgccaccacacccgctaatttttgtaatttttagtagagacaggatttcacaatgttgtccaggttgatctcggactcctgggctcaagtgatcctcctgcctcagcctcccaaagtgctgggattacaggcgtgagccactgcacctggcctgtttgatttttttccaccaccacccctaacctttgctttttaaacctgccggtccacctggacacttcacagggtcagaccaggtctagcccttgctggcactggggacacagagaccccctggccccagttcctggggatgggccctgccttaactcttggcgctgcggggaggcgggtagcctcagggacctggagccttttggcttctgggagtttacctctgagggaggagggcgcttctgatcttagggagcgagaggccggggctggctgtgaccagatgtgggtcctggctgggtgcgcagcccctgtccttgttacccctgatgtgatgggggcgctgtgggggtctggagagggcctctggagtcctgcagggaggggttcccctcggcaggcagggcacgtgctggctcaccccacgtccccctgtaccccctttgcagagatctaccgcatcgtgtcacagaaacagatcgcagaccgcgctgcccacgacgagtccccggggaacaacgtggtggacatcagcgtgccgcccaccacggacggacagaagcccaacaagctgcagtgctgccagaacctgtgacccctgcgcctccacccagcgtgcgtgcacgtcctccgcccgcccccgccacggtatcctctggcccctccctgctgtccctctgtggccggctcgttccagccctcccagtgagctctgcacggccgggccggggcccaggaaggacaggagccagtgctaccccgtcctgcccggggaaaagctagaagccccggtttgctgcacccatgaaactcgggtccccacagcgtcttggcggggtggggagggcggcaggatggacggggctggccagaggcgaggaggacgggcggacggcgccgccttctccccttttccttggccgactctagggagcgattgcctccctccctctgtgaccgggtggcccagccagcccgtcgtccccacccagaaccgtgctctgggccaaagcccgaagaaccaggcagcgggggccggggcaggcggaccccccgggctctcagcgcccacccgctcctccgcacacagcagctcgcacaggcctcccacctctgcctgttgattgatgcagggagaagcccgtccccccctctcccctctcccctcccctctcctgcacgcaacgcgccctctcggccctccctgtccccctcctctgtctcgtctccccatctggtctggaacctgtttgcaagtgaagcaatatctccgtgttttgtatatacaaccgctcttgtagcctttggtttttgttaatgtagagaaacacagattctttatacactttgtaagatttacgccaaaccccagctctcgatctcttcttctccctgtggcccctgcgctgttgccccgtccccgtcaccccgcccgttactgaaatgtataatctgacttc

SEQ ID NO: 88594 - DNA, 2175 bp, Homo sapiens
ctgccgcgcgcctactaccggtggacccgcgcccacgacctgcgcggcttcctcaacttcacgctggcgcgagccccgtcctccttcgccgccgcgcacaaccgcacgtgcaggtatcgggctttccgggatgacgatggacattattcccagacctactggaatcttcttgccatccgcctggccttcgtcattgtgtttgaggtagccgaggcacctgctggttctcccatccatggcatgaggccccgaccctgtgctttgcctaattcgagcacgtggtgaggggtcggtgccgtcacttcctgctgtgtcatcttggtcaaatcagagctcttctctgcacctgcgttttccctgcctggcctcatccctgggttgtggtgtggacattgtgggtgtctccacaggagccccagggccacgaaagctggggtggcctctgccccttctggggttccttttcctgcacagctgctttctgactccacccacagctgggagcaggtgccggagccccggcctgcctggccctgtgaaggccactctgggcgtttgggtgggcgtgagtgccttcctctgctcccagcatgtggttttctccgttggccgcctcctggacctcctggtgcctgacatcccagagtctgtggagatcaaagtgaagcgggagtactacctggctaagcaggcactggctgagaatgaggtgaactgtacagcccagtctcggccctccccccagccctctccctatccttgccagtggctgctctacctccggacactgagtcacatccctcttcctcttgctgcccttttttggggacaggttctttttggaacgaacggaacaaaggatgagcagcccgagggctcagaggcaagtctgggagcagccaggcccctgccccgtgcactccctgaggtcacagggccctgcccagccgcccactgtgcctcgtggccatggcctgctcctggccctagtctgacttgtccctgcccccaaccctctccccagctcagctcccactggacacccttcacggttcccaaggccagccagctgcagcagtgacgcctggaaggacatctggtggtccttaggggagtggcccctcctgagccctgcgagcagcgtccttttcctcttccctcaggcagcggctgtgtgaaccgctggctgctgttgtgcctcatctctgggcacattgcctgcttccccccagcgccggcttctctcctcagagcgcctgtcactccatccccggcagggagggaccgtcagctcacaaggccctctttgtttcctgctcccagacataagcccaaggggcccctgcacccaagggaccctgtccctcggtggcctccccaggcccctggacacgacagttctcctcaggcaggtgggctttgtggtcctcgccgcccctggccacatcgccctctcctcttacacctggtgaccttcgaatgtttcagagcgcagggccgttctccctcgtgtcctctggacccacccgccccttcctgccctgtttgcgcagggacatcacccacatgccccagctctcggaccctgcagctctgtgtcccaggccacagcaaaggtctgttgaacccctccctccattcccagttatctgggtcctctggattcttctgtttcttgaatcaggctctgctttccccctagccactacaggcagcctctgacagtgccgctttacttgcattctgcagcaattacatgtgtccttttgatccttgcccaacttccctccctctcccagctcctggcccctggcccagggcccctcttgctgtttttacctctgttccttggggcctagtacccagcaagcacccaaatgggggaggttttgggatgagaggaggaaacgtgtatacctgtaacatctggtggctcttcccccagaagtttgtgttcatacataattgttttccacgctggatcataatgtgacgtgcagttctgccctgtgctggggagccacatgaagcttcccctggctaacttgctaccccgcagcaatcccagtgtggccgtctgcttgctaaaaaatggatctgtgctcatctgtattgatgtccttggagttctacaagtggaacttaagtgtcaaaaagaatatgtggtttttagct

SEQ ID NO: 88595 - DNA, 2352 bp, Homo sapiens
ttcatggagtgcaacatgtaactttatattagaaaatggaatgtcacatctttaccatgggacagagacacaggaagatgtcaaagtctgaaatagcaagtgaagctgaatgtagcttatgatagggagggagggctctgctggacagggacagtctctgagcaggtgaactgctgatctcacagaggtcagcaatcggcggattttcaccgtgtaagtagactgaagtcatccgtagaagcacagacgtactggactgtcacatctactagaaaataaagcatctgccacctggggggtggggagggtccagtttagcccaatgggggacaacccagcacatccacctttggaacccaccagttaaaggtattgtcagagtatcctgtttgggaagaattcccatttcaggcaccctcgatgaagagccaggccaggaacatgggatgagagagcgaaatggtggaaaaaggggagataggctaattccagaggcacctgcccagccaacactcagccctggctgcgcgcactgagtcctgtgtctgctgcaggtatcgggctttccgggatgacgatggacattattcccagacctactggaatcttcttgccatccgcctggccttcgtcattgtgtttgaggtagccgaggcacctgctggttctcccatccatggcatgaggccccgaccctgtgctttgcctaattcgagcacgtggtgaggggtcggtgccgtcacttcctgctgtgtcatcttggtcaaatcagagctcttctctgcacctgcgttttccctgcctggcctcatccctgggttgtggtgtggacattgtgggtgtctccacaggagccccagggccacgaaagctggggtggcctctgccccttctggggttccttttcctgcacagctgctttctgactccacccacagctgggagcaggtgccggagccccggcctgcctggccctgtgaaggccactctgggcgtttgggtgggcgtgagtgccttcctctgctcccagcatgtggttttctccgttggccgcctcctggacctcctggtgcctgacatcccagagtctgtggagatcaaagtgaagcgggagtactacctggctaagcaggcactggctgagaatgaggttctttttggaacgaacggaacaaaggatgagcagcccgagggctcagagctcagctcccactggacacccttcacggttcccaaggccagccagctgcagcagtgacgcctggaaggacatctggtggtccttaggggagtggcccctcctgagccctgcgagcagcgtccttttcctcttccctcaggcagcggctgtgtgaaccgctggctgctgttgtgcctcatctctgggcacattgcctgcttccccccagcgccggcttctctcctcagagcgcctgtcactccatccccggcagggagggaccgtcagctcacaaggccctctttgtttcctgctcccagacataagcccaaggggcccctgcacccaagggaccctgtccctcggtggcctccccaggcccctggacacgacagttctcctcaggcaggtgggctttgtggtcctcgccgcccctggccacatcgccctctcctcttacacctggtgaccttcgaatgtttcagagcgcagggccgttctccctcgtgtcctctggacccacccgccccttcctgccctgtttgcgcagggacatcacccacatgccccagctctcggaccctgcagctctgtgtcccaggccacagcaaaggtctgttgaacccctccctccattcccagttatctgggtcctctggattcttctgtttcttgaatcaggctctgctttccccctagccactacaggcagcctctgacagtgccgctttacttgcattctgcagcaattacatgtgtccttttgatccttgcccaacttccctccctctcccagctcctggcccctggcccagggcccctcttgctgtttttacctctgttccttggggcctagtacccagcaagcacccaaatgggggaggttttgggatgagaggaggaaacgtgtatacctgtaacatctggtggctcttcccccagaagtttgtgttcatacataattgttttccacgctggatcataatgtgacgtgcagttctgccctgtgctggggagccacatgaagcttcccctggctaacttgctaccccgcagcaatcccagtgtggccgtctgcttgctaaaaaatggatctgtgctcatctgtattgatgtccttggagttctacaagtggaacttaagtgtcaaaaagaatatgtggtttttagct

SEQ ID NO: 88596 - DNA, 1564 bp, Homo sapiens
cggccgcgtagcccgcgcgcggagcgtaccctgctgcggccgttggccgttagcgcggcttcggcggttgtcttggagaagcaagatggcggcgacggcggccgcagtggtggccgaggaggacacggagctgcgggacctgctggtgcagacgctggagaacagcggggtcctgaaccgcatcaaggctgaactccgagcagctgtgtttttagcactagaggagcaagaaaaagtagagaacaaaactcctttagttaatgagagcctgaaaaagtttttaaataccaaagacggtcgtttagtggctagtcttgttgcagaatttcttcagttttttaaccttgactttactttggctgtttttcaacctgaaactagcacactgcaaggtctcgaaggtcgagagaatttagcccgagatttaggtataattgaagcagaaggtactgtgggtggacccttattattagaagtgatcaggcgctgtcaacagaaagaaaaagggccaaccactggggaaggtgcacttgatctatctgatgtacattctccaccaaagtcaccagagggaaaaacaagtgcacagacaacaccaagtaagaaggccaatgatgaggccaatcagagtgatacaagtgtctccttgtcagaacccaagagcaaaagcagccttcacttactgtcccatgaaacaaaaattggatcttttctaagcaacagaactttagatggcaaagacaaagctggcctttgtccagatgaagatgatatggaaggagattctttctttgatgatcccattcctaagccagagaaaacttacggtttgaggaaggaacctaggaagcaagcaggaagtctggcctcgctctcggatgcaccccccttaaaaagtggactcagctccctggcgggagccccttctttaaaagactctgagagtaaaaggggaaatacagttttgaaagatctgaaattgatcagtgataaaattggatcacttggattaggaactggagaagatgatgactatgttgatgattttaatagtaccagccatcgctcagagaaaagtgagataagtattggtgaagagatagaagaagacctttctgtggaaatagatgacatcaataccagtgataagcttgatgacctcacacaagatctgactgtatcccagctcagtgatgttgcggattatctggaagatgttgcatagacacgaagaaggaagtattctaattaacaaggacagaggactgaccggttccatttttttttttttccagacaatcactcagctggaatgtctgctctctattggtgccttgcatttcaaaaacactgcagatattttttaaaagtaattttcattttactaaacaaaatacttcctatttgagcccatgtgtggaagatttaatattcttaatttaactgtacatttctttatggaaattgattatctacactcagtttcattacagggaaggaacccatgaaaacatcagtgttaagagcatgatgaaaggtgtcaataaagccgtaggatcgcgca

SEQ ID NO: 88597 - DNA, 3672 bp, Homo sapiens
cggccgcgtagcccgcgcgcggagcgtaccctgctgcggccgttggccgttagcgcggcttcggcggttgtcttggagaagcaagatggcggcgacggcggccgcagtggtggccgaggaggacacggagctgcgggacctgctggtgcagacgctggagaacagcggggtcctgaaccgcatcaaggctgaactccgagcagctgtgtttttagcactagaggagcaagaaaaagtagagaacaaaactcctttagttaatgagagcctgaaaaagtttttaaataccaaagacggtcgtttagtggctagtcttgttgcagaatttcttcagttttttaaccttgactttactttggctgtttttcaacctgaaactagcacactgcaaggtctcgaaggtcgagagaatttagcccgagatttaggtataattgaagcagaaggtactgtgggtggacccttattattagaagtgatcaggcgctgtcaacagaaagaaaaagggccaaccactggggaaggtgcacttgatctatctgatgtacattctccaccaaagtcaccagagggaaaaacaagtgcacagacaacaccaagtaagaaggccaatgatgaggccaatcagagtgatacaagtgtctccttgtcagaacccaagagcaaaagcagccttcacttactgtcccatgaaacaaaaattggatcttttctaagcaacagaactttagatggcaaagacaaagctggcctttgtccagatgaagatgatatggaaggagattctttctttgatgatcccattcctaagccagagaaaacttacggtttgaggaaggaacctaggaagcaagcaggaagtctggcctcgctctcggatgcaccccccttaaaaagtggactcagctccctggcgggagccccttctttaaaagactctgagagtaaaaggggaaatacagttttgaaagatctgaaattgatcagtgataaaattggatcacttggattaggaactggagaagatgatgactatgttgatgattttaatagtaccagccatcgctcagagaaaagtgagataagtattggtgaagagatagaagaagacctttctgtggaaatagatgacatcaataccagtgataagcttgatgacctcacacaagatctgactgtatcccagctcagtgatgttgcggattatctggaagatgttgcatagacacgaagaaggaagtattctaattaacaaggacagaggactgaccggttccatttttttttttttccagacaatcactcagctggaatgtctgctctctattggtgccttgcatttcaaaaacactgcagatattttttaaaagtaattttcattttactaaacaaaatacttcctatttgagcccatgtgtggaagatttaatattcttaatttaactgtacatttctttatggaaattgattatctacactcagtttcattacagggaaggaacccatgaaaacatcagtgttaagagcatgatgaaaggtgtcaataaagccgtaggatcgcgcaaccctttgtgtgtgtggctgctggtacgtgtgatctttgaaaaccttggctttagccctctggaatcagagcttacccaccatagtatattttgatattaggtggttctacacatagttggcaaaatgacttggtaaatttgtaatgctgaagtatattagtataagttaaatttgatgtgtcaactttattttgtatttccttccatttggaaggtttgttagaccattaaggttatattaaagtactcttgtgtgtgctatttagttttgcttgttttaaagaaatctagaagtggttatgagttttaattcatagaattgtcaataacataacatttgcaatcgtcattcctcctgttatccatgtaagcagctttagtcgtaggttctcttcattataatttattatctgtaaagattccttgaaacttaaatgcatctgaaaccattaagcagtgcttttatttcagatctgtaagttaattgtattaaaatccaaattggaatgaaatagtagtaatggcctaagaccatgttcagtttgacaagctttatatactgtacataatttcattgtaacccttaaaaatagagccaataatagaatttccacagtctcatttatacggttaaagcattattgctattatgtaggtcacggatgtttataatactaaagtattttaaaatgtgcaagtagaaaaaacagtagaaagtgatgcatgcatatttatatataagtaaagcaggattgtgctgtttttgcactttataatttcaattaagttgcggctttttactacaagttaactttattagtaaaaggagcaaattagacctaattcattgatctcggttaagtgagcagactgcatgacttgtgtaatgccagtttctcatttcatattagcctaaatattacagaaattactccttgggctctaaaatgtagaggaaatgaaaatgtaaggattaaggctgtgtaacagaatctggctttttaaaatttaagtgaaactaagctgtaaacatcaagaggaagtaggacataaactgggccggtacagcctgggagccctgtgtatttctgccctccgtctgtgagctgctatctcagtctccttcagctcttcatgtcttagtaaacagcaccacgtgcagatgtaatcttgttgcagtcccccagtgtggttgttataaaatgcatttctttgtaagtcatctctgtaaacagtcactttctaaaagcactatagttctggtcccctggaatctggatcacatgtatgatttatttttaatatttgataggaactaggtttcagtgaaatgatttgaaagcatagcaggatgtggctttttaaatttatgaaactttcgaacagtagcaactgaaatttgtcacttttctgttacgcagagaatcagaccttttgataatatttgggagggtaaaagaaatatgccaaatatgaaacttttttgtcagcactacatacatcttttttttgcggggggcgggggggacagagtctcactgtgtcactcagactggagtacagtgatgcgatctcggctcactgcaacctccgcctcctgggttcaagcgattctcctgcttcagcctcctgagtagctgggattacaggtgcacaccaccacgcccggctaatttttgtatttttagtagagatggggtttcaccatgttggtcaggctggtcttgaactcctgacctcgttcctgccttagcctcctaaagtgccgggattacaggcgtgaaccaccgcacctggccagtactacatccattttattgaatgattttgaatgacttaaagttcaactatgaaaaagctttcttttcacatgtactttttgattaggtattatcaacttatgaaacttgaagatgtgaagtgacaggttttgcatgtgatgagtgttttctgttaaaaaataaatattgaaatattaacccattaaatacatttttatggtaacctatgttttacagtggagttttaaaaatgctaggtctttctttcattttattgataactacaaatgaataaaaagcatttattctctttgttgatattcggt

SEQ ID NO: 88598 - DNA, 3732 bp, Homo sapiens
cggccgcgtagcccgcgcgcggagcgtaccctgctgcggccgttggccgttagcgcggcttcggcggttgtcttggagaagcaagatggcggcgacggcggccgcagtggtggccgaggaggacacggagctgcgggacctgctggtgcagacgctggagaacagcggggtcctgaaccgcatcaaggctgaactccgagcagctgtgtttttagcactagaggagcaagaaaaagtagagaacaaaactcctttagttaatgagagcctgaaaaagtttttaaataccaaagacggtcgtttagtggctagtcttgttgcagaatttcttcagttttttaaccttgactttactttggctgtttttcaacctgaaactagcacactgcaaggtctcgaaggtcgagagaatttagcccgagatttaggtataattgaagcagaaggtactgtgggtggacccttattattagaagtgatcaggcgctgtcaacagaaagaaaaagggccaaccactggggaaggtgcacttgatctatctgatgtacattctccaccaaagtcaccagagggaaaaacaagtgcacagacaacaccaagtaagaaggccaatgatgaggccaatcagagtgatacaagtgtctccttgtcagaacccaagagcaaaagcagccttcacttactgtcccatgaaacaaaaattggatcttttctaagcaacagaactttagatggcaaagacaaagctggcctttgtccagatgaagatgatatggaaggagattctttctttgatgatcccattcctaagccagagaaaacttacggtttgaggaaggaacctaggaagcaagcaggaagtctggcctcgctctcggatgcaccccccttaaaaagtggactcagctccctggcgggagccccttctttaaaagactctgagagtaaaaggggaaatacagttttgaaagatctgaaattgatcagtgataaaattggatcacttggattaggaactggagaagatgatgactatgttgatgattttaatagtaccagccatcgctcagagaaaagtgagataagtattggtgaagagatagaagaagacctttctgtggaaatagatgacatcaataccagtgataagcttgatgacctcacacaagatctgactgtatcccagctcagtgatgttgcggattatctggaagatgttgcatagacacgaagaaggaagtattctaattaacaaggacagaggactgaccggttccatttttttttttttccagacaatcactcagctggaatgtctgctctctattggtgccttgcatttcaaaaacactgcagatattttttaaaagtaattttcattttactaaacaaaatacttcctatttgagcccatgtgtggaagatttaatattcttaatttaactgtacatttctttatggaaattgattatctacactcagtttcattacagggaaggaacccatgaaaacatcagtgttaagagcatgatgaaaggtgtcaataaagccgtaggatcgcgcaaccctttgtgtgtgtggctgctggtacgtgtgatctttgaaaaccttggctttagccctctggaatcagagcttacccaccatagtatattttgatattaggtggttctacacatagttttttttaaaaaaaaaaaccccaaaaaacccccaaaattttgaaggttttttgggggggccggcaaaatgacttggtaaatttgtaatgctgaagtatattagtataagttaaatttgatgtgtcaactttattttgtatttccttccatttggaaggtttgttagaccattaaggttatattaaagtactcttgtgtgtgctatttagttttgcttgttttaaagaaatctagaagtggttatgagttttaattcatagaattgtcaataacataacatttgcaatcgtcattcctcctgttatccatgtaagcagctttagtcgtaggttctcttcattataatttattatctgtaaagattccttgaaacttaaatgcatctgaaaccattaagcagtgcttttatttcagatctgtaagttaattgtattaaaatccaaattggaatgaaatagtagtaatggcctaagaccatgttcagtttgacaagctttatatactgtacataatttcattgtaacccttaaaaatagagccaataatagaatttccacagtctcatttatacggttaaagcattattgctattatgtaggtcacggatgtttataatactaaagtattttaaaatgtgcaagtagaaaaaacagtagaaagtgatgcatgcatatttatatataagtaaagcaggattgtgctgtttttgcactttataatttcaattaagttgcggctttttactacaagttaactttattagtaaaaggagcaaattagacctaattcattgatctcggttaagtgagcagactgcatgacttgtgtaatgccagtttctcatttcatattagcctaaatattacagaaattactccttgggctctaaaatgtagaggaaatgaaaatgtaaggattaaggctgtgtaacagaatctggctttttaaaatttaagtgaaactaagctgtaaacatcaagaggaagtaggacataaactgggccggtacagcctgggagccctgtgtatttctgccctccgtctgtgagctgctatctcagtctccttcagctcttcatgtcttagtaaacagcaccacgtgcagatgtaatcttgttgcagtcccccagtgtggttgttataaaatgcatttctttgtaagtcatctctgtaaacagtcactttctaaaagcactatagttctggtcccctggaatctggatcacatgtatgatttatttttaatatttgataggaactaggtttcagtgaaatgatttgaaagcatagcaggatgtggctttttaaatttatgaaactttcgaacagtagcaactgaaatttgtcacttttctgttacgcagagaatcagaccttttgataatatttgggagggtaaaagaaatatgccaaatatgaaacttttttgtcagcactacatacatcttttttttgcggggggcgggggggacagagtctcactgtgtcactcagactggagtacagtgatgcgatctcggctcactgcaacctccgcctcctgggttcaagcgattctcctgcttcagcctcctgagtagctgggattacaggtgcacaccaccacgcccggctaatttttgtatttttagtagagatggggtttcaccatgttggtcaggctggtcttgaactcctgacctcgttcctgccttagcctcctaaagtgccgggattacaggcgtgaaccaccgcacctggccagtactacatccattttattgaatgattttgaatgacttaaagttcaactatgaaaaagctttcttttcacatgtactttttgattaggtattatcaacttatgaaacttgaagatgtgaagtgacaggttttgcatgtgatgagtgttttctgttaaaaaataaatattgaaatattaacccattaaatacatttttatggtaacctatgttttacagtggagttttaaaaatgctaggtctttctttcattttattgataactacaaatgaataaaaagcatttattctctttgttgatattcggt

SEQ ID NO: 88599 - DNA, 3692 bp, Homo sapiens
cggccgcgtagcccgcgcgcggagcgtaccctgctgcggccgttggccgttagcgcggcttcggcggttgtcttggagaagcaagatggcggcgacggcggccgcagtggtggccgaggaggacacggagctgcgggacctgctggtgcagacgctggagaacagcggggtcctgaaccgcatcaaggctgaactccgagcagctgtgtttttagcactagaggagcaagaaaaagtagagaacaaaactcctttagttaatgagagcctgaaaaagtttttaaataccaaagacggtcgtttagtggctagtcttgttgcagaatttcttcagttttttaaccttgactttactttggctgtttttcaacctgaaactagcacatattttaacttcttttctagctgcaaggtctcgaaggtcgagagaatttagcccgagatttaggtataattgaagcagaaggtactgtgggtggacccttattattagaagtgatcaggcgctgtcaacagaaagaaaaagggccaaccactggggaaggtgcacttgatctatctgatgtacattctccaccaaagtcaccagagggaaaaacaagtgcacagacaacaccaagtaagaaggccaatgatgaggccaatcagagtgatacaagtgtctccttgtcagaacccaagagcaaaagcagccttcacttactgtcccatgaaacaaaaattggatcttttctaagcaacagaactttagatggcaaagacaaagctggcctttgtccagatgaagatgatatggaaggagattctttctttgatgatcccattcctaagccagagaaaacttacggtttgaggaaggaacctaggaagcaagcaggaagtctggcctcgctctcggatgcaccccccttaaaaagtggactcagctccctggcgggagccccttctttaaaagactctgagagtaaaaggggaaatacagttttgaaagatctgaaattgatcagtgataaaattggatcacttggattaggaactggagaagatgatgactatgttgatgattttaatagtaccagccatcgctcagagaaaagtgagataagtattggtgaagagatagaagaagacctttctgtggaaatagatgacatcaataccagtgataagcttgatgacctcacacaagatctgactgtatcccagctcagtgatgttgcggattatctggaagatgttgcatagacacgaagaaggaagtattctaattaacaaggacagaggactgaccggttccatttttttttttttccagacaatcactcagctggaatgtctgctctctattggtgccttgcatttcaaaaacactgcagatattttttaaaagtaattttcattttactaaacaaaatacttcctatttgagcccatgtgtggaagatttaatattcttaatttaactgtacatttctttatggaaattgattatctacactcagtttcattacagggaaggaacccatgaaaacatcagtgttaagagcatgatgaaaggtgtcaataaagccgtaggatcgcgcaaccctttgtgtgtgtggctgctggtacgtgtgatctttgaaaaccttggctttagccctctggaatcagagcttacccaccatagtatattttgatattaggtggttctacacatagttggcaaaatgacttggtaaatttgtaatgctgaagtatattagtataagttaaatttgatgtgtcaactttattttgtatttccttccatttggaaggtttgttagaccattaaggttatattaaagtactcttgtgtgtgctatttagttttgcttgttttaaagaaatctagaagtggttatgagttttaattcatagaattgtcaataacataacatttgcaatcgtcattcctcctgttatccatgtaagcagctttagtcgtaggttctcttcattataatttattatctgtaaagattccttgaaacttaaatgcatctgaaaccattaagcagtgcttttatttcagatctgtaagttaattgtattaaaatccaaattggaatgaaatagtagtaatggcctaagaccatgttcagtttgacaagctttatatactgtacataatttcattgtaacccttaaaaatagagccaataatagaatttccacagtctcatttatacggttaaagcattattgctattatgtaggtcacggatgtttataatactaaagtattttaaaatgtgcaagtagaaaaaacagtagaaagtgatgcatgcatatttatatataagtaaagcaggattgtgctgtttttgcactttataatttcaattaagttgcggctttttactacaagttaactttattagtaaaaggagcaaattagacctaattcattgatctcggttaagtgagcagactgcatgacttgtgtaatgccagtttctcatttcatattagcctaaatattacagaaattactccttgggctctaaaatgtagaggaaatgaaaatgtaaggattaaggctgtgtaacagaatctggctttttaaaatttaagtgaaactaagctgtaaacatcaagaggaagtaggacataaactgggccggtacagcctgggagccctgtgtatttctgccctccgtctgtgagctgctatctcagtctccttcagctcttcatgtcttagtaaacagcaccacgtgcagatgtaatcttgttgcagtcccccagtgtggttgttataaaatgcatttctttgtaagtcatctctgtaaacagtcactttctaaaagcactatagttctggtcccctggaatctggatcacatgtatgatttatttttaatatttgataggaactaggtttcagtgaaatgatttgaaagcatagcaggatgtggctttttaaatttatgaaactttcgaacagtagcaactgaaatttgtcacttttctgttacgcagagaatcagaccttttgataatatttgggagggtaaaagaaatatgccaaatatgaaacttttttgtcagcactacatacatcttttttttgcggggggcgggggggacagagtctcactgtgtcactcagactggagtacagtgatgcgatctcggctcactgcaacctccgcctcctgggttcaagcgattctcctgcttcagcctcctgagtagctgggattacaggtgcacaccaccacgcccggctaatttttgtatttttagtagagatggggtttcaccatgttggtcaggctggtcttgaactcctgacctcgttcctgccttagcctcctaaagtgccgggattacaggcgtgaaccaccgcacctggccagtactacatccattttattgaatgattttgaatgacttaaagttcaactatgaaaaagctttcttttcacatgtactttttgattaggtattatcaacttatgaaacttgaagatgtgaagtgacaggttttgcatgtgatgagtgttttctgttaaaaaataaatattgaaatattaacccattaaatacatttttatggtaacctatgttttacagtggagttttaaaaatgctaggtctttctttcattttattgataactacaaatgaataaaaagcatttattctctttgttgatattcggt

SEQ ID NO: 88600 - DNA, 1624 bp, Homo sapiens
cggccgcgtagcccgcgcgcggagcgtaccctgctgcggccgttggccgttagcgcggcttcggcggttgtcttggagaagcaagatggcggcgacggcggccgcagtggtggccgaggaggacacggagctgcgggacctgctggtgcagacgctggagaacagcggggtcctgaaccgcatcaaggctgaactccgagcagctgtgtttttagcactagaggagcaagaaaaagtagagaacaaaactcctttagttaatgagagcctgaaaaagtttttaaataccaaagacggtcgtttagtggctagtcttgttgcagaatttcttcagttttttaaccttgactttactttggctgtttttcaacctgaaactagcacactgcaaggtctcgaaggtcgagagaatttagcccgagatttaggtataattgaagcagaaggtactgtgggtggacccttattattagaagtgatcaggcgctgtcaacagaaagaaaaagggccaaccactggggaaggtgcacttgatctatctgatgtacattctccaccaaagtcaccagagggaaaaacaagtgcacagacaacaccaagtaagataccaaggtataaaggacaaggtaagaagaagacaagcgggcagaaggctggtgacaagaaggccaatgatgaggccaatcagagtgatacaagtgtctccttgtcagaacccaagagcaaaagcagccttcacttactgtcccatgaaacaaaaattggatcttttctaagcaacagaactttagatggcaaagacaaagctggcctttgtccagatgaagatgatatggaaggagattctttctttgatgatcccattcctaagccagagaaaacttacggtttgaggaaggaacctaggaagcaagcaggaagtctggcctcgctctcggatgcaccccccttaaaaagtggactcagctccctggcgggagccccttctttaaaagactctgagagtaaaaggggaaatacagttttgaaagatctgaaattgatcagtgataaaattggatcacttggattaggaactggagaagatgatgactatgttgatgattttaatagtaccagccatcgctcagagaaaagtgagataagtattggtgaagagatagaagaagacctttctgtggaaatagatgacatcaataccagtgataagcttgatgacctcacacaagatctgactgtatcccagctcagtgatgttgcggattatctggaagatgttgcatagacacgaagaaggaagtattctaattaacaaggacagaggactgaccggttccatttttttttttttccagacaatcactcagctggaatgtctgctctctattggtgccttgcatttcaaaaacactgcagatattttttaaaagtaattttcattttactaaacaaaatacttcctatttgagcccatgtgtggaagatttaatattcttaatttaactgtacatttctttatggaaattgattatctacactcagtttcattacagggaaggaacccatgaaaacatcagtgttaagagcatgatgaaaggtgtcaataaagccgtaggatcgcgca

SEQ ID NO: 88601 - DNA, 589 bp, Homo sapiens
cggccgcgtagcccgcgcgcggagcgtaccctgctgcggccgttggccgttagcgcggcttcggcggttgtcttggagaagcaagatggcggcgacggcggccgcagtggtggccgaggaggacacggagctgcgggacctgctggtgcagacgctggagaacagcggggtcctgaaccgcatcaaggctgaactccgagcagctgtgtttttagcactagaggagcaagaaaaagtagagaacaaaactcctttagttaatgagagcctgaaaaagtttttaaataccaaagacggtcgtttagtggctagtcttgttgcagaatttcttcagttttttaaccttgactttactttggctgtttttcaacctgaaactagcacactgcaaggtctcgaaggtcgagagaatttagcccgagatttaggtataattgaagcagaaggtactgtgggtggacccttattattagaagtgatcaggcggtcttaccaaaggataggttggggtctgtcttagtctgttcaggctgccaagtaccatagattgggcagcttacaaacaacacatttttcctcacagttctgg

SEQ ID NO: 88602 - DNA, 3795 bp, Homo sapiens
cggccgcgtagcccgcgcgcggagcgtaccctgctgcggccgttggccgttagcgcggcttcggcggttgtcttggagaagcaagatggcggcgacggcggccgcagtggtggccgaggaggacacggagctgcgggacctgctggtgcagacgctggagaacagcggggtcctgaaccgcatcaaggctgaactccgagcagctgtgtttttagcactagaggagcaagaaaaagtagagaacaaaactcctttagttaatgagagcctgaaaaagtttttaaataccaaagacggtcgtttagtggctagtcttgttgcagaatttcttcagttttttaaccttgactttactttggctgtttttcaacctgaaactagcacactgcaaggtctcgaaggtcgagagaatttagcccgagatttaggtataattgaagcagaaggtactgtgggtggacccttattattagaagtgatcaggcgctgtcaacagaaagaaaaagggccaaccactggggaaggtgcacttgatctatctgatgtacattctccaccaaagtcaccagagggaaaaacaagtgcacagacaacaccaagtaagaaggccaatgatgaggccaatcagagtgatacaagtgtctccttgtcagaacccaagagcaaaagcagccttcacttactgtcccatgaaacaaaaattggatcttttctaagcaacagaactttagatggcaaagacaaagctggcctttgtccagatgaagatgatatggaaggagattctttctttgatgatcccattcctaagccagagaaaacttacggtttgaggaaggaacctaggaagcaagcaggaagtctggcctcgctctcggatgcaccccccttaaaaagtggactcagctccctggcgggagccccttctttaaaagactctgagagtaaaaggggaaatacagttttgaaagatctgaaattgatcagtgataaaattggatcacttggattagaagaataaatgttccctgagctgcccggattcttgttccgcacagtgccctggagtcctggtaactgagttgctggttgtgctgccatctgctctttgtgcgtcctggttgctggctggccaggaactggagaagatgatgactatgttgatgattttaatagtaccagccatcgctcagagaaaagtgagataagtattggtgaagagatagaagaagacctttctgtggaaatagatgacatcaataccagtgataagcttgatgacctcacacaagatctgactgtatcccagctcagtgatgttgcggattatctggaagatgttgcatagacacgaagaaggaagtattctaattaacaaggacagaggactgaccggttccatttttttttttttccagacaatcactcagctggaatgtctgctctctattggtgccttgcatttcaaaaacactgcagatattttttaaaagtaattttcattttactaaacaaaatacttcctatttgagcccatgtgtggaagatttaatattcttaatttaactgtacatttctttatggaaattgattatctacactcagtttcattacagggaaggaacccatgaaaacatcagtgttaagagcatgatgaaaggtgtcaataaagccgtaggatcgcgcaaccctttgtgtgtgtggctgctggtacgtgtgatctttgaaaaccttggctttagccctctggaatcagagcttacccaccatagtatattttgatattaggtggttctacacatagttggcaaaatgacttggtaaatttgtaatgctgaagtatattagtataagttaaatttgatgtgtcaactttattttgtatttccttccatttggaaggtttgttagaccattaaggttatattaaagtactcttgtgtgtgctatttagttttgcttgttttaaagaaatctagaagtggttatgagttttaattcatagaattgtcaataacataacatttgcaatcgtcattcctcctgttatccatgtaagcagctttagtcgtaggttctcttcattataatttattatctgtaaagattccttgaaacttaaatgcatctgaaaccattaagcagtgcttttatttcagatctgtaagttaattgtattaaaatccaaattggaatgaaatagtagtaatggcctaagaccatgttcagtttgacaagctttatatactgtacataatttcattgtaacccttaaaaatagagccaataatagaatttccacagtctcatttatacggttaaagcattattgctattatgtaggtcacggatgtttataatactaaagtattttaaaatgtgcaagtagaaaaaacagtagaaagtgatgcatgcatatttatatataagtaaagcaggattgtgctgtttttgcactttataatttcaattaagttgcggctttttactacaagttaactttattagtaaaaggagcaaattagacctaattcattgatctcggttaagtgagcagactgcatgacttgtgtaatgccagtttctcatttcatattagcctaaatattacagaaattactccttgggctctaaaatgtagaggaaatgaaaatgtaaggattaaggctgtgtaacagaatctggctttttaaaatttaagtgaaactaagctgtaaacatcaagaggaagtaggacataaactgggccggtacagcctgggagccctgtgtatttctgccctccgtctgtgagctgctatctcagtctccttcagctcttcatgtcttagtaaacagcaccacgtgcagatgtaatcttgttgcagtcccccagtgtggttgttataaaatgcatttctttgtaagtcatctctgtaaacagtcactttctaaaagcactatagttctggtcccctggaatctggatcacatgtatgatttatttttaatatttgataggaactaggtttcagtgaaatgatttgaaagcatagcaggatgtggctttttaaatttatgaaactttcgaacagtagcaactgaaatttgtcacttttctgttacgcagagaatcagaccttttgataatatttgggagggtaaaagaaatatgccaaatatgaaacttttttgtcagcactacatacatcttttttttgcggggggcgggggggacagagtctcactgtgtcactcagactggagtacagtgatgcgatctcggctcactgcaacctccgcctcctgggttcaagcgattctcctgcttcagcctcctgagtagctgggattacaggtgcacaccaccacgcccggctaatttttgtatttttagtagagatggggtttcaccatgttggtcaggctggtcttgaactcctgacctcgttcctgccttagcctcctaaagtgccgggattacaggcgtgaaccaccgcacctggccagtactacatccattttattgaatgattttgaatgacttaaagttcaactatgaaaaagctttcttttcacatgtactttttgattaggtattatcaacttatgaaacttgaagatgtgaagtgacaggttttgcatgtgatgagtgttttctgttaaaaaataaatattgaaatattaacccattaaatacatttttatggtaacctatgttttacagtggagttttaaaaatgctaggtctttctttcattttattgataactacaaatgaataaaaagcatttattctctttgttgatattcggt

SEQ ID NO: 88603 - DNA, 4217 bp, Homo sapiens
cggccgcgtagcccgcgcgcggagcgtaccctgctgcggccgttggccgttagcgcggcttcggcggttgtcttggagaagcaagatggcggcgacggcggccgcagtggtggccgaggaggacacggagctgcgggacctgctggtgcagacgctggagaacagcggggtcctgaaccgcatcaaggtgaggccggaggctggggccgggcctggcggatccgcagggcttgcgtggacagcgggcgtcacaacggtcgcggcgaggaggccgcctccctggcgagggaccggggccggcgggcactgggggcgcgccccggcatggcctccgtcctgcccgccccacagagggggtcggctcgttcgttcgtgtggtcccggagggcaccgcggactgggggtgcctggcccatcccctgcctcattccgtgggggcgggaccgcggggcttgggggccacacgggcggcccgcagctgggccctggagtgcggccccagcgtctcttcctcaggctcgggcatgatccgcggcgggaaagcagcgcgtccagccgaagcctgggggtcggagagcttgtgtgactgagaacgtttcggaaggcgtttctgacctttgcacctgccctcccagctcgttggcttgctcgtgtttgttgctggataaatgtgagcttgttgtgaaaattgtcttgaaattataatttcctgtttcttaacttttttttaaggctgaactccgagcagctgtgtttttagcactagaggagcaagaaaaagtagagaacaaaactcctttagttaatgagagcctgaaaaagtttttaaataccaaagacggtcgtttagtggctagtcttgttgcagaatttcttcagttttttaaccttgactttactttggctgtttttcaacctgaaactagcacactgcaaggtctcgaaggtcgagagaatttagcccgagatttaggtataattgaagcagaaggtactgtgggtggacccttattattagaagtgatcaggcgctgtcaacagaaagaaaaagggccaaccactggggaaggtgcacttgatctatctgatgtacattctccaccaaagtcaccagagggaaaaacaagtgcacagacaacaccaagtaagaaggccaatgatgaggccaatcagagtgatacaagtgtctccttgtcagaacccaagagcaaaagcagccttcacttactgtcccatgaaacaaaaattggatcttttctaagcaacagaactttagatggcaaagacaaagctggcctttgtccagatgaagatgatatggaaggagattctttctttgatgatcccattcctaagccagagaaaacttacggtttgaggaaggaacctaggaagcaagcaggaagtctggcctcgctctcggatgcaccccccttaaaaagtggactcagctccctggcgggagccccttctttaaaagactctgagagtaaaaggggaaatacagttttgaaagatctgaaattgatcagtgataaaattggatcacttggattaggaactggagaagatgatgactatgttgatgattttaatagtaccagccatcgctcagagaaaagtgagataagtattggtgaagagatagaagaagacctttctgtggaaatagatgacatcaataccagtgataagcttgatgacctcacacaagatctgactgtatcccagctcagtgatgttgcggattatctggaagatgttgcatagacacgaagaaggaagtattctaattaacaaggacagaggactgaccggttccatttttttttttttccagacaatcactcagctggaatgtctgctctctattggtgccttgcatttcaaaaacactgcagatattttttaaaagtaattttcattttactaaacaaaatacttcctatttgagcccatgtgtggaagatttaatattcttaatttaactgtacatttctttatggaaattgattatctacactcagtttcattacagggaaggaacccatgaaaacatcagtgttaagagcatgatgaaaggtgtcaataaagccgtaggatcgcgcaaccctttgtgtgtgtggctgctggtacgtgtgatctttgaaaaccttggctttagccctctggaatcagagcttacccaccatagtatattttgatattaggtggttctacacatagttggcaaaatgacttggtaaatttgtaatgctgaagtatattagtataagttaaatttgatgtgtcaactttattttgtatttccttccatttggaaggtttgttagaccattaaggttatattaaagtactcttgtgtgtgctatttagttttgcttgttttaaagaaatctagaagtggttatgagttttaattcatagaattgtcaataacataacatttgcaatcgtcattcctcctgttatccatgtaagcagctttagtcgtaggttctcttcattataatttattatctgtaaagattccttgaaacttaaatgcatctgaaaccattaagcagtgcttttatttcagatctgtaagttaattgtattaaaatccaaattggaatgaaatagtagtaatggcctaagaccatgttcagtttgacaagctttatatactgtacataatttcattgtaacccttaaaaatagagccaataatagaatttccacagtctcatttatacggttaaagcattattgctattatgtaggtcacggatgtttataatactaaagtattttaaaatgtgcaagtagaaaaaacagtagaaagtgatgcatgcatatttatatataagtaaagcaggattgtgctgtttttgcactttataatttcaattaagttgcggctttttactacaagttaactttattagtaaaaggagcaaattagacctaattcattgatctcggttaagtgagcagactgcatgacttgtgtaatgccagtttctcatttcatattagcctaaatattacagaaattactccttgggctctaaaatgtagaggaaatgaaaatgtaaggattaaggctgtgtaacagaatctggctttttaaaatttaagtgaaactaagctgtaaacatcaagaggaagtaggacataaactgggccggtacagcctgggagccctgtgtatttctgccctccgtctgtgagctgctatctcagtctccttcagctcttcatgtcttagtaaacagcaccacgtgcagatgtaatcttgttgcagtcccccagtgtggttgttataaaatgcatttctttgtaagtcatctctgtaaacagtcactttctaaaagcactatagttctggtcccctggaatctggatcacatgtatgatttatttttaatatttgataggaactaggtttcagtgaaatgatttgaaagcatagcaggatgtggctttttaaatttatgaaactttcgaacagtagcaactgaaatttgtcacttttctgttacgcagagaatcagaccttttgataatatttgggagggtaaaagaaatatgccaaatatgaaacttttttgtcagcactacatacatcttttttttgcggggggcgggggggacagagtctcactgtgtcactcagactggagtacagtgatgcgatctcggctcactgcaacctccgcctcctgggttcaagcgattctcctgcttcagcctcctgagtagctgggattacaggtgcacaccaccacgcccggctaatttttgtatttttagtagagatggggtttcaccatgttggtcaggctggtcttgaactcctgacctcgttcctgccttagcctcctaaagtgccgggattacaggcgtgaaccaccgcacctggccagtactacatccattttattgaatgattttgaatgacttaaagttcaactatgaaaaagctttcttttcacatgtactttttgattaggtattatcaacttatgaaacttgaagatgtgaagtgacaggttttgcatgtgatgagtgttttctgttaaaaaataaatattgaaatattaacccattaaatacatttttatggtaacctatgttttacagtggagttttaaaaatgctaggtctttctttcattttattgataactacaaatgaataaaaagcatttattctctttgttgatattcggt

SEQ ID NO: 88604 - DNA, 1264 bp, Homo sapiens
cggccgcgtagcccgcgcgcggagcgtaccctgctgcggccgttggccgttagcgcggcttcggcggttgtcttggagaagcaagatggcggcgacggcggccgcagtggtggccgaggaggacacggagctgcgggacctgctggtgcagacgctggagaacagcggggtcctgaaccgcatcaaggctgaactccgagcagctgtgtttttagcactagaggagcaagaaaaagtagagaacaaaactcctttagttaatgagagcctgaaaaagtttttaaataccaaagacggtcgtttagtggctagtcttgttgcagaatttcttcagttttttaaccttgactttactttggctgtttttcaacctgaaactagcacactgcaaggtctcgaaggtcgagagaatttagcccgagatttaggtataattgaagcagaaggtactgtgggtggacccttattattagaagtgatcaggcgctgtcaacagaaagaaaaagggccaaccactggggaaggtgcacttgatctatctgatgtacattctccaccaaagtcaccagagggaaaaacaagtgcacagacaacaccaagtaagaaggccaatgatgaggccaatcagagtgatacaagtgtctccttgtcagaacccaagagcaaaagcagccttcacttactgtcccatgaaacaaaaattggatcttttctaagcaacagaactttagatggcaaagacaaagctggcctttgtccagatgaagatgatatggaaggagattctttctttgatgatcccattcctaagccagagaaaacttacggtttgaggaaggaacctaggaagcaagcaggaagtctggcctcgctctcggatgcaccccccttaaaaagtggactcagctccctggcgggagccccttctttaaaagactctgagagtaagtgcccaaagatgtggacttcaatactcgggatattttttctctaattaaatactatgtgattattgttgattttttttcccaggaaaatcactaaaataacctatcattttatcactcagagatatttcctgttaatattttgttgtgttttgttacttctaaggtggtcctattttatatgttgttttgtattctggcccttcctatacctatataccatcggaatacttttgggaagttgactttttagctgatttttattatctatagaaataaaatttttaaatcatctctccttttttggacatttacaa

SEQ ID NO: 88605 - DNA, 288 bp, Homo sapiens
ccactccctggctaatttttaaaaattttttgtagacaagggtttcactttgttgcccaggctggtctctagctcctggcctcaggtggtcctcccgcctcggcctcccagagagctgggattgcaggcatgagccacagtgcccaggtgatacccctatcatttcatctcaaccatttagctgcacccatcctctagctccacgcctaccagattgtccataaaaaccctaacctgcaagcctctggggagactgatttgagtaggaactccatctcccacggggct

SEQ ID NO: 88606 - DNA, 702 bp, Homo sapiens
tcttcagtgtagcatccaactcttaagaatttcaagcctaaataagaattagagccacttggaggtagcgacagatggggtgaggcaccaaattaatgtgattcatggagaatttaatctaaaagagaactggatgatgagcagagccagtactcatccagtgccacccatccatcacaccatctttgcaccatagcacctgtgcatcacatgattcctatgccacgccacctgtgtgccataccacccacacaccacaccacccatgcatcacaccacctgtacatcacgccgcctgtgcaccacactgatcgcaaatcacaccacccgtgcatcacaccacctgtacatcacgccgcctgtgcaccacactgctcacaaatcacatcacactgcctgtgcaccacactgatcgcaaatcacaccacccctgcatcacagcacccatgcatcacaccacctatgcatcacactgcctgtgcaccacatagtttatgcaccacatcacccgtgcatcacaccaccagctctcctgccctcagctcagtgctggggccacattgttacggggttttgaatatgaatctttaaattactcaagtttgtgctgctgttgagaaaaggcagaatgcacccttgggcagttctcccattcccgaacccacccacatgtctgcctctcaacacttgctcagctgacta

SEQ ID NO: 88607 - DNA, 395 bp, Homo sapiens
ctttaggttgcctgacatttgtagctgagtgaaaccatggtgagcattgatttattttactataaaattatcagttttactcactcaaacaatccttttatattaaaaatattttaaaaataaaagcagggtattgttttgctttactaaatggagtcacctctttttctcttacttttgacaatttggttgtcaaattgtgtgaattgtgaaaaaatagccctgagtacagagaatttttacctcagggatatcaaaaaagtcatgttagtaataaaataagccattgattgtgttaaaactcaaggtgggtcatttaattgcagttattaaaaagttctttcattatttacctctgggagagactgtaggtaggactgtaagattattaatga

SEQ ID NO: 88608 - DNA, 437 bp, Homo sapiens
gcagatctgtgtagctgagtccggatccctaaagcattactgtaggttgagtatattgggggcaaactgaaaatatatacagtcagcttacagtcatttctgctgacttttctaagtgctcccttacatcatttagcatttgggatgtttgcattagaattgaaatagagaattgtctagtccattctcctttgcttttggagactttaggggagattgcacttgcacaactggtattttggcgggggtggggggtgtattttgaaatcattgttctataaccagtgtgtcattgttactcagcctgtctaaagaatcacttctggctgagatttatatccattttattttctctctggcaaaaattcaagtggctcttcttccagcttttttttctccccttctctagcttaatttgtcagttccattcttaaaca

SEQ ID NO: 88609 - DNA, 350 bp, Homo sapiens
catgcagaaaaatatgagggtcaaaaagttaggaagttacccctggaccacgaacatctgcccattatgtttgaaagttaaagggggtgtttaccatctatattgtacagtctttgaaagtttagattcagttcttatttttttctttcatatcctaccagaataccttaaatatagaaggcaccccaaaagtatttcataatttaatccacagcaagaataaaatatccatcttctatagtgtgtaattgctagaccctaaaatagtacaataatattggccctagagctgttcttaatttcatgtaattatagcttgtttcaaaataaagtttgtaaagtcttagaat

SEQ ID NO: 88610 - DNA, 229 bp, Homo sapiens
gatcctcctgcctcagcctcccaaggtggtgggattacaggcataagtcaccctgcccagtcctgtttttaaatttaattttaacattttgtttattatttttgagacagggtgttgtcgtgtcccccaggctggagtgcagtggcacaatcatggcttactgcagcctctacctcctgggctcaagttagcctctcaccttggctgctgagtagctgggactataagc

SEQ ID NO: 88611 - DNA, 449 bp, Homo sapiens
acccatttcagttatatcacccttgatccacactgcttcagtttgaggcccttgaagattgatggctgatgaagcacctcttggcaaatttacattctttgtgttccctgaagagatggcagagaggatccctagcatgatcccagatttctcactttctctggagccttcacaagttatgccttgtgtttctcttatttttactgcacataagcccttccttgcaggatgaggctcatataagcccacctccaaaaaacacttcttaggaatcttaagaaaaaattagtataaggtggctttgaagtattttcattcatcttcttcacttttcccagattccaaaggtacatattattccacattagatattgccatcatctctaattgctccactccccaaatccctcactcaaacagcccaatcccaattcacatcttcctcttct

SEQ ID NO: 88612 - DNA, 262 bp, Homo sapiens
taagtcactatttttcattggaaggtctttcagtataactgtatttcttttattttttaaataatatcaagaataattatttaaaaatatcagattgttttatttttctaaactttttttttgggagggtgctgttttaaccatttgttgtgtctactgatactcccttttggtaagtgaaaagtcctcaggtgatttgtaaactttgtgagttaattttcagcagaagtctgtttttctgtaacagccatatgtgttgtag

SEQ ID NO: 88613 - DNA, 918 bp, Homo sapiens
ctgtctgtgacccagatgccactctgtcctctccagcttagaggcaccctcctcagtgctttgtttttgagaggaggcctcgctctgtcgcccaggctggagtgcagtggtgccattatggctcattgcagcctcaacctcctgggcttaagcaatcctcctgccttagcctctcaagtaggtggggccacaggacacaccatcatgcctgggtaattttttcattattttgtagaggcagggtcttgctgtattgcccaggctggtcttgaactcctgggctcaagtgaccttggtgctttaagtcagaggtagccaggtagcctggggcagtgaagagaactctgatctgtatctcaggaaaccgaggttctaggctctgcgtgaccttgacacctcccctccatgggccttggtctctccccaacagtaaaaggaggcagctaaatatgattaactctgaactctcccacctgggatattcagggaagccaagaagaggttccaatctggagcaacagttatccccaagagggcactttccacagaagacagggatctgctgacatctttagttgggcagaggaccctgcccaaggaaagaaaatatttccccaaattaccctcgtgtagtgaagggagggtatagctttgaatcagactgcaggcctgccaacttgttaactgtgagcttgggcagtaacaataacattaaaaataataatgtaacaattatggcagcggatagtgggagaatagtggcataatagaactagctttgggctgggtgcgttggctcatgcctgtaatcccattgcttttggaggctgaggcaggaggattgcttgagctcgggagttcgagaccggcctgggtagcacagtgagccctcatctcttaaaaaagaaaagaataaaa

SEQ ID NO: 88614 - DNA, 418 bp, Homo sapiens
tcagaatacctgttcatttacaacccaactccgcgctacagaagtgactgctccccagtctttcactctgaaactcccatgataacgatccagtggtcctgtctctgtggctctgtgcctttgcctgtaccacatctggaatgccttcctgggtcaaaataattgtcgcgatttgagtataagcacattatctaaggcttctaggggaagcaatacaattaaaagcttgatcagtttgtggggcggtggggggagagattatataagagctctgctgttagtgacttacacacacacacacacacatacacacacacacacagagtgtgctttcatatctatttttctcctatcctaagcttttcttcttattctttggtgagctccctgaaagcagaaatattttattctttttcaa

SEQ ID NO: 88615 - DNA, 1572 bp, Homo sapiens
  misc_feature (1)..(1): n is a, c, g, or t
  misc_feature (6)..(8): n is a, c, g, or t
  misc_feature (12)..(13): n is a, c, g, or t
  misc_feature (20)..(20): n is a, c, g, or t
  misc_feature (25)..(25): n is a, c, g, or t
  misc_feature (94)..(94): n is a, c, g, or t
  misc_feature (100)..(100): n is a, c, g, or t
  misc_feature (190)..(191): n is a, c, g, or t
  misc_feature (203)..(203): n is a, c, g, or t
  misc_feature (276)..(276): n is a, c, g, or t
  misc_feature (278)..(278): n is a, c, g, or t
  misc_feature (286)..(286): n is a, c, g, or t
  misc_feature (338)..(338): n is a, c, g, or t
  misc_feature (344)..(344): n is a, c, g, or t
  misc_feature (353)..(353): n is a, c, g, or t
  misc_feature (368)..(368): n is a, c, g, or t
  misc_feature (374)..(374): n is a, c, g, or t
  misc_feature (393)..(393): n is a, c, g, or t
  misc_feature (397)..(397): n is a, c, g, or t
  misc_feature (401)..(401): n is a, c, g, or t
  misc_feature (419)..(419): n is a, c, g, or t
  misc_feature (425)..(425): n is a, c, g, or t
  misc_feature (431)..(431): n is a, c, g, or t
  misc_feature (437)..(438): n is a, c, g, or t
  misc_feature (455)..(455): n is a, c, g, or t
  misc_feature (603)..(603): n is a, c, g, or t
  misc_feature (617)..(617): n is a, c, g, or t
  misc_feature (632)..(632): n is a, c, g, or t
  misc_feature (656)..(656): n is a, c, g, or t
  misc_feature (698)..(698): n is a, c, g, or t
  misc_feature (718)..(718): n is a, c, g, or t
  misc_feature (735)..(735): n is a, c, g, or t
  misc_feature (796)..(797): n is a, c, g, or t
  misc_feature (809)..(809): n is a, c, g, or t
  misc_feature (877)..(877): n is a, c, g, or t
  misc_feature (901)..(901): n is a, c, g, or t
  misc_feature (1000)..(1000): n is a, c, g, or t
  misc_feature (1017)..(1017): n is a, c, g, or t
  misc_feature (1031)..(1031): n is a, c, g, or t
  misc_feature (1041)..(1042): n is a, c, g, or t
  misc_feature (1051)..(1051): n is a, c, g, or t
  misc_feature (1063)..(1063): n is a, c, g, or t
  misc_feature (1114)..(1114): n is a, c, g, or t
  misc_feature (1244)..(1244): n is a, c, g, or t
  misc_feature (1297)..(1297): n is a, c, g, or t
  misc_feature (1335)..(1335): n is a, c, g, or t
  misc_feature (1346)..(1346): n is a, c, g, or t
  misc_feature (1355)..(1355): n is a, c, g, or t
  misc_feature (1378)..(1379): n is a, c, g, or t
  misc_feature (1392)..(1392): n is a, c, g, or t
  misc_feature (1430)..(1430): n is a, c, g, or t
  misc_feature (1441)..(1441): n is a, c, g, or t
  misc_feature (1485)..(1485): n is a, c, g, or t
  misc_feature (1487)..(1487): n is a, c, g, or t
  misc_feature (1561)..(1561): n is a, c, g, or t
  misc_feature (1572)..(1572): n is a, c, g, or t
naaaannnaaannaaaaaanaaaanaaaaggaaaaaatgaaaaagaagccattgaataccctattgaccataagaaaaaggcagggaaagttgntcaacngcaacccaggcactgaaggaaaaagaacatggagaatgacaaaagcccagagggaggagtaaaaggacacaaacaccattctcagggacnnggactgggcgcngttctcagggaccaggactgggcactaatcacagaactgtaacaggcgccccatgggaatgaccaactgttananggggcctncagggcagcacctccctcctgcctcccaccaacagcttctaaagggaaatgncgactnttttcacancagtcccctcactgnggctgngtgtgtgggcgcagatganaggncacnacaacctgattcagtccncactgnggctgngtgtgnngggtcagatgacaggcnaccacaacctgattcagtccccactgtggctgtgtgtgggggtgcagatgacaggccaccacaacctgattcaggattcagttggctaccagccagtgccataaggaaaaccattctggggctcttgagaggggcaaagcataatttncatgtgggagaaangttaatagtttgtgnccagaggacaagctgtggtttatnaaagactgctgcaggttcctactatgcttctcatcaagaggnggaatctaatcaccttcccnccttgaatcatggctgntctcagtgatgagtacgactggacagtgtggcaggagagatgctctgggacttctgagggnngatcatgagagnccttacagcttctgcctgggcctcttggacacacaccctgggagaagccagacaaacctgactacctnactgccagactgggaggaagtccntgctggccacaaagagagggctgggtgcctgctccatgtccccagccactagagtccttctgggtgcctgcttcacgtccccagccactagagtccttncagatgagaccaggganatcatgaagcaacnaacccacacnnccctgtccngtgtcttgaccnagaaaattgtgacatgtaaaaagaataaattcctggtttaagccagtaagnttactggtacattgttacatctcagataattaaaaccttgaaaaactcatgagagatcacaagtagaaccttgatctgaaacatggcatgtggcgatttatattgagtattaggttaaaaatgcaagaanggagcatagttaatattttacgttaaagctaaaactataattgcctacttaanattttcagtaattaggttgtcactttttgttcttaacnaagaaatcaantagttttantccataaacagttagaactgatnnacacatccgtttntccttactcattttaaacagctatctgaaataggaagngtaatataatntttaaagaatctgaaaacatgacagaaatgtttaaactataaananatattgtatatgttagcatattgtatacattgcatattaacataagctagaatcattgacataaatttatatanacaaaaggtan

SEQ ID NO: 88616 - DNA, 419 bp, Homo sapiens
caaaccatatcactcttcatctgctacgggtgccattccctgtttctacagtgtcctgtttgctaccttctttgtagatttctattcattcatcatgtcccagtttacctgttacctcttcaacagattattcttcagtctgtccctcccaaactccaccaatgaacattctttgttcagcccattattgttaatatgcacttcactgaaaacactgttttatgcttgtttacatcccatctctgcagggctctgagcctatagtcagcagttgggaacttactaggcatagcgcccagtaaaggatagctctttatatatatatatatattttttttttttctaaaataataagccccaagaaaaacattacctgtgaaaaacaaatgatatttttataccattttcaaaacctaata

SEQ ID NO: 88617 - DNA, 352 bp, Homo sapiens
aaggtttcatgatgttgttgcccttccctaactcaccctcttgctcaaaattgggcttataatagaatgtatggaatgatccagaaatgctttgagtactacatgatttctaaaagaacagaggccagatgaagatggagagtttatgaaaggagactcattatcctgctctgtgctttccctatctttcacacagtaacacacagaacagggggaaatatgtatttgtattttatctaattagaccttctgattctgtttcttgagagagaatgaatgcaccaaacatccatcgacaacagaaaaactccaacttcctttatttttatccagccatgcctccttttatgaa

SEQ ID NO: 88618 - DNA, 354 bp, Homo sapiens
ttgaatcttcctagtttcagatcttcattaattcttttaagtgatagttttcatttttttcactataaatttcctattgggtgattaatagtaaagtaagtaaagataaaagattatttttattggcatttatcttatgcctacataaaatttgctttatcatattatcacaggtctacaaagtttttttctagtcgtttctaacttaagttcactagctgcacatgggcatatgtgcctgtacccagctactcagaatgctgaggtggagggattgcttaagtccaggaggttgagcctgcagtaaaccatgattaggccactgcactgagctggggtgaaagaatgagacct

SEQ ID NO: 88619 - DNA, 564 bp, Homo sapiens
ctccatcttaaaaaaaaaaaaaaaaaaaaaagaacagttgttacctttgggtaaccactagaagaggacgctggaggaagggtttgggggtgaagacactgttctctttctttctttgggtgctggtcacaaaggtcggttcagtttgtgaaaattcatcaagccattcatttctaatacatgcgcttttctctatgcgtgttatccccacagataagctggtaaatgtttaacttgcaaaaaaaaaaatttgttttaattaaaaagcccttaattgtagcatttgtcaattcctgtggtgtaaatatttctaccatggttgattacatgctacgaatgtggtgtcaattctgagttgggcaaagagacatatgattggttcttgcaagctcagttgagccagctccaggagaccattggttatacttcaacaaagagatcttttgaaaagtaaagtcttctaaaatgagaggtgaaactgaatgctggacggggtaagttccttcttgcttggtatcctgctagcacacccatcacctacttccccacctctctttactcttc

SEQ ID NO: 88620 - DNA, 206 bp, Homo sapiens
gaagaaagtgagatggacaaggggtgctttaggtaggtcaggaaacagacatttcctgagaaacatgacatttacactgagacctgaaggatgagatggagctaaatgtgaagcatgggggaagggctttccagctgaaggaacatgtgcaaaggccctggggcaggggcggatggagcatcctggttcgtctgagaaactgagat

SEQ ID NO: 88621 - DNA, 310 bp, Homo sapiens
gcatcaccagaagccaaacagatgctggtgctatgcttgtgcagcctgcagaaccgtgagccaaaaaacctattttctttataaattacccagcctcaggtattcctttatagcagtgcagatggaataacacacttgtacagccacaaatctgctccccctcttcctacttattcctatcttttttgcatcttccatcctccccatctccaaaacatttagggagaaacaaggctggcgtctgctgggtagcagtctgactgattatcaggcttagcctgatcaggagctgttggcattacacaccaca

SEQ ID NO: 88622 - DNA, 290 bp, Homo sapiens
gtagaatctttccttcaatcttcaaatgcatttacgtcttctctgttacaaagcaaatatttaaatgttaaataaaacaatacacactgcaacttactttgatctattttttaaaatcaacattctaaaagtattatttatggataatataatgcacttattttaagcacagcttagtttttgtgacaaacatatatgtttatataaccactaacacaatcagtatttaattaccacagaaagttctttaatgccaatctgtagtcaatccccatctgaaaccctgccag

SEQ ID NO: 88623 - DNA, 418 bp, Homo sapiens
taggcatttaattggaaatctatttatgttttcctaattattttgcaatttttttgtatttttgtaaggtgttatattttctcacttgtcaagcagtagccattatattctatgccctgttcaaacaagcattacaaatacaaaaatcgatacttcttaaagttcacttaaacttctgtgctcataacttactatttcatttttgtcaattaattacccatttcttaccttagccagactgtagagcttttaaaatggcagaggttttgttcttgttatttttcttttagataatttaaaagtttattgatattttagacatattttatatttttaatcacataaaataggtacaatcattgcatataattatatcagaacaacgataagtcagctttctttgaaaatccatagacta

SEQ ID NO: 88624 - DNA, 294 bp, Homo sapiens
  misc_feature (1)..(1): n is a, c, g, or t
  misc_feature (219)..(219): n is a, c, g, or t
  misc_feature (283)..(283): n is a, c, g, or t
  misc_feature (285)..(287): n is a, c, g, or t
  misc_feature (290)..(291): n is a, c, g, or t
  misc_feature (293)..(294): n is a, c, g, or t
naccaagaactcaaatccctattgggactcaggtggtcttgtagctgccctttgcccccaggatctgaaaaaaacagccctgcagactgaagccggaaaacttgatataaacttgaaagaactcagaaccacaacagattctccaggggcagcctttgtgcctggagctgctgctacacaggccgcccaggaagacccccctccagctcctgcatgccncatgctctctccagaaagtaaccacaactgggataccaatgcctatgccatcatcacagacttnannncanncnn

SEQ ID NO: 88625 - DNA, 3513 bp, Homo sapiens
tgcacacctgtaatcccagctattcggctgaggcacgagaatcatttgaacccaggacacggagattgcagtgagccaagatcacaccactgcactccagcctgggcaacagaacgagattctgtcttaaatgaatgagtgaatgaatgaagtgaattacaaaaaattttaaaatacaaaccaaatgttttgttaaattcaacagacataattatgtgtcagctgcatgcagtggctcatgcctgtaatcccaacactttgggaggaattacagggaccaggagtttgagactagcttggccaacatagtgaaaccccatctctaccaaaaaatataaaaattagccaagtatggtggcatatgcctatattctagctactcaggaggctgagatgggagagtcgcttaaacccaggaggtggaggttgaaatgagctgagatcatgccactgcactccagcccaggtgacagagggagactctctcaaagaaaaaggaaaaaaaattactgtgtctaatttctataaaatttttttttttacttattctcaatttctgtacttgtggatcagtagcaaacttcatggactggcatcagtatgaatgacatttgagtagcactgtttggtgtgcagcatactagagtagtgagagaaggaaacatctgtggacattgtatcaactgggaggccaccgaacattttgtcatgtttgttgaataacttatgcagcctaaggcagcctgtcagggcagtggtgtggcaaagccataatatttgtatggggctcattctactgagaggcatatctgctgttctgatagtgtagtctcctccatttttcctccagcactctgctctttgggaggcactgcagggtggctgtgactttggtcaggtgtagcttatgtttggccatctcttggttgatccagtttatttgtcttagtttcagtgatggccagagggttacaaaggatttggaatggagcatgtctcagggtgatgtgaactctgttgttgcctggatttccagatcatgtgacagagaatcagctggatcatttcagctgtccaggttatcagttagaataaagtttttaaaaactaaaatcttgggagcaaggaggcctctctgatgtaaagaaagatgagtagactggtttatcccttctatgcagttagtacatgagagtaccctggtcctttaagagccagagttctttggggtttttgtttgttttcccccattaaaaagcactagcatttattaggggaaaatgaggttctcctcaactcatgttttccctctctgtattgtggaaaatctgaacctcactctgaaagtgaatacatccatttgaaagggatggcaggttaccaagagtgtcatttaatgaaacccctctttttcttgaccaaaagagaccttgttttctttgagaagcaggagttcactttaatttttatgaacatctcacaccacttccacctaaccctacctactgtaatatgggctggcctgtcaagtcttgggcaagaatagtgataagatgctatcaggtcagaacccatattgttagagtagctgaaagattcaggagttcttattttgaactcttgcatgtagaatcattacaagatgtctcttaaatgcagttagagtgagaggaaagctggagctgtgggtggggaacatgtcagaggtggggctcagcaggaagtgggaccagtgcctgctggatgtggtagataagtaccggttttggattagggattgttttctcacttaccttctttaaaaaaagaatgtggccattagcctttggttctggcatggcattaggaatggcttattccagcagtcagcatgatttccaggttccatgtcttctacatggaaaacatgtcaaaggacaggagcagtgaccacctgacaacatcgcagtgggaggaaaagagaaatcatgtttattcctcaggaatgctgaagtaccctggagtaagctgtcattcttattataacaatgttattagtaatgctttaaactccagcacacttgttatgtatttgaaaccaagtctgtttcttgttttgtattttctctctggaaattgtaaggcggtggtcttaaatacattaaacaaaaataggaaaaaaagcagttaaaatttgatggcatatcagccagctgacccaattcttggcacagtcaacaagtatctttgatttgttttcagcagggctaagtcatcagatatgtcagaaggggtaaaaaaaaaaaacacctgtcttttagtcatttctttgctgtcccaaaaatctaagtattatagtgagtaacattagcttgcagtttttaatagttcatcaataagtctgaatccttgtcagttgccacactggctacccagaaaatttcaggcagttatatgcctcaggcagttatatgaaggtttatttccttcttatacattaaaaatagtgtgaaacatgattgaaaatacactgttttagtctcttgattttgtatccactttcaacattttaatatggaaccttgacagagactttgctgtaattttggtcttgaggggcggggggactcatccaactcacagtacccagcagtctgagttcttcagataggcataaagaaacgagaagttacataatttttgttgaatgggtatggtgatgttggcaaatgattaagcctaagaaaaactgtttgtgtaccagcacctgtaatcccagctactcgggagggtgaggcaggagaatcacttcaacccaggaggcagaggctacagtgagctgagatcgtaccacagcactgcatcctgggcgacagagtgagtgagactctgtctcaaaaaaaaaaaaaaaaaaaacagaaaagctacaaaacattcacacattttgttgttttctatgtctctgtataaatgatgagctttaaagttaatcctcaattttaaatatacaaaatttttaatttgtacttttgataccatgcacttttggaaattttttattttttgagagcatgatacttatttcttacgctcatgtttgaaaaggtttagaaatgtggttgctaaattagttttaaaacaacaactgtgactgttttacctgtgtccaacatgttgagaactcaaaaagtagtaaatcgggctgtcttaatagtgcgcctgttactaatggaatttacttaaaaagtaagtttgccatatgaaagggtattaatatccttttcaagcataacatacaaatgaattttcatcttaaatatattaacttctgataagaaaacagatgctaggcctaaagatatttgctacataggaaaaatgatttttaaaaaatttgtctggggtgcctgtagtcccagctactcgggaggctgaggcaggggaatggcgtgaatccgggaggcgggtcttgcagtgagcagagatcgcgccaccgcactccagcctcgccgacaaagcgagactctgtgtcaa

SEQ ID NO: 88626 - DNA, 397 bp, Homo sapiens
cactttcaacattttaatatggaaccttgacagagactttgctgtaattttggtcttgaggggcggggggactcatccaactcacagtacccagcagtctgagttcttcagataggcataaagaaacgagaagttacataatttttgttgaatgggtatggtgatgttggcaaatgattaagcctaagaaaaactgtttgtgtaccagtttaaaccatgaatgtactgtaaataggttttgttgttgttgttgtttttatttttataccgctgagagtcaacacttaattcttggacatgtgcaacataatgatacacaaatagatagaggcatgagaactgaatcaaagaagtcagaactgaaggacagccagaaaatgggtgtgagctatctctt

SEQ ID NO: 88627 - DNA, 497 bp, Homo sapiens
ctcctgggctcgaggaatcctcccacttcagcctcttagttgagaccacagatatgtgccaccctgcccagctaatttttaaaaattatttggcagattcccctcaacttggggctgtctgcttttcctcatggttagattcagagtgtgcattcttggcaggaacacccaggagtgactttgtgtccttctcagtgcagcatatctgggagctcatgactcagcttgtttattattgatgacattaactttcatcacttagggtgctgtgtgtcaggtttttccactgcaaaattactgtttccccttgtcaatgaaaaggtattataatttacggggaggtactttgagactgtgtaaatgtctattcctcatcacaccttcacctgctagtttctgcatccggtgattttactctgatgcctatagatttttatttttgaattccatccttccttctgcatttattaattggcatagtactgcaaagaagggct

SEQ ID NO: 88628 - DNA, 870 bp, Homo sapiens
ttgattgtttcctcatgattagatgcaggctaaacactcttggcaggaacattatatgaaacattgtagtcaggtgctactaccaagaatatgacttattgttgaaattagagacacacttcaaaatagatcttttaaatacttgcaacttctcagtgataacaaaagaaaaagtagtaccaaaaaaggggcaaataacctaatttgggtttggattttctttttatttgtttcagggaagcagctggactaaagagcattagatttgaactcagaaggcccaggttcatgtcctaactctgctgccagccaactgtgatcatgggcttcaacttcatgtgtcacagcaattgagccacttaactaactatatgattttaagaatgtctatacataaaagtaatgttaaaattcagacatattaaaaatacaaaatgatattaaaattttatatatcaccgataaagggttggaaaggctatctgcattatctggcagttcaatgaaaggaaatcaatcataatagttatagattacagtaatacacaagcaatccattttatgtaacctcacttttaaacggaagataaaacatacaagcctaaattaacattttataacaaactcctatactgaaagtcagtctttgatgttatctggtggcaattaatataattgcaattatgttttattatccatactaacaggcatcccttgtaccatttaatgatttttattgacctaacatgtgactaatcctacagaagcaaataagtagcttattaaaacttttttaaacatcatttataaaatcatagcaaagtcttaataattcagaaaattttgcatttgtgcctggctcaaaatgcc

SEQ ID NO: 88629 - DNA, 226 bp, Homo sapiens
agagccaaacagaggagcggtaatctaattagcctgttgccatctgaggccgttggctaagatgggggctaactgggtgtggagcagttttgctgggtgaggtttagtttccaacgctgtaggaatctgctgcttccaaaaagtctcctttagaactatcccctagcagagaatgtccatcagcctgtagattgtctcatcaacacatcaaacatgctctacccaa

SEQ ID NO: 88630 - DNA, 451 bp, Homo sapiens
agaatggtgtaagaacacgtaagtaaatacaagttccatttttcagtaaggtggtcgtttctggaatattcattgtatgttttacagcatgaatatgttttacatagttatatacctaatatttaactatgttatataattatatatttacttggcacggtgactcattctgataatcctaacactttgggagactgaggcaggaggatcactttagcccaggagttcaagaccagcctggacaacatggcaaaatcacatctctacaaaaaatttaaaaattagccaagcatggtggtgcatgcctgtagtcccagctactcaggaggctgaggtaggaggctgagacaggaggatcacttgagcccaggagttcaaggctacagtgagctatgatcacaccactgcactccagcctgggagacagagcaagagctgcctcagaaaaaag

SEQ ID NO: 88631 - DNA, 288 bp, Homo sapiens
cggagtcgatgacagccacttcacaggctcacgcgctcctagtgtgggcttgaaggggacggggaccgattaccaaaggagagcgctgagtacggaagacacagggcagcctttgtcttgggtttagcgctgatgcgctcaaccctgagtcgggttcactgcaactgttgtgtccgatttcggttccctgcaaccgccctcctgggcgagagatgtcattgtgttcctgcggccagcgggactgagagctgggacttaagacgccaggagggtcctgcgctcacgggt

SEQ ID NO: 88632 - DNA, 320 bp, Homo sapiens
gtgcaattagtattactggtatttatgaactgctgctataattaatttagcacttatttgcctccaaagaaattattacctatttcacggataataaagatttataccacagctaagaacccatgtagttgtattaaaggttattcagcaaaagactttggtactactcataaatacaagtctaagaaaatctgacaatcgttggctgccaagtagaatttctataatttgctgaagaaggagtacgttgggaggtatcatcttggtaacttttttttttgagacggagtttcgctcttgttgcccatggcactatcttg

SEQ ID NO: 88633 - DNA, 450 bp, Homo sapiens
ggtggatttcagaacataaaaggaagagagagaactggagagggggaagatgttagcgaacacagccaagctaggaaacgggaaggcttgcctcccgcaggtattggccattgctgatcttggttttagtcacactaactggctgcctcataaaagcagcaaccaccttagtgctgggaaaaggtaagaggccacgaagaccactaaactcagagcagcgtccacccctgcaggccccctgtggcctacctggagggtctcctgaaaattaaactctgcattcacaccaacctgcccgctgcatctgggtgaaaagtgtgtcggaacatgcagcctcaagtctgctcttcttaataaactgtcaccatgagtaataattattccttgagaaatagcagagtgactcaaaaagctatcccctccccctctgccgcccccttgcacagctcg

SEQ ID NO: 88634 - DNA, 848 bp, Homo sapiens
accattatggtattatacagaggagtttcacttagaaaatgataaaattcggtttatatctcacactgtacacaagaataaactccaagtggatcagaaaaatgtaaagaaatgaaactacacaagttgtgagtacactcggcaatacaaaacaaaatgaagctacacaagtgctagtagaaaatatgggtaaattcccctataatctaggtctatggaaggcatttctagctatgactcaaaattcaggtgtaatattagattaaaatttgactgcatgaaacatttgtatgccagaaacactgtaagcaaatttgaaagacaaatacaaagtgggagaaaatatttgcaacatttatctcatataaaggacagtaaaagcccttgtatggaaagaactttcaaaagggggtaaaaggctgaaaatctggtagaaaaatgagcaaacgattgaggggggaaaaaacattaaaatggcctttaaactaggaagtttaagtttactcataagagaaataaagctacactgagatacaacttcttatatatcatattggcaaaaatttaaaaagctctggtaatactctcttggtgatgccctgaagaaactggcatactcaaattttataccaaatggtacaactctgttggcatatctaactatgttcactttatgacccagtaattcctcatttaggaatttattctggagatatacctccaaaaatgtgtaaatatttatgtagtgttactgtacttgcaaattattggaaataacctaaatgcttatgcaggcgagaataattgaataaattatggcccatttacactgaggtatactaagatgt

SEQ ID NO: 88635 - DNA, 594 bp, Homo sapiens
accattatggtattatacagaggagtttcacttagaaaatgataaaattcggtttatatctcacactgtacacaagaataaactccaagtggatcagaaaaatgtaaagaaatgaaactacacaagttgtgagtacactcggcaatacaaaacaaaatgaagctacacaagtgctagtagaaaatatgggtaaattcccctataatctaggtctatggaaggcatttctagctatgactcaaaattcaggtgtaatattagattaaaatttgactgcatgaaacatttgtatgccagaaacactgtaagcaaatttgaaagacaaatacaaagtgggagaaaatatttgcaacatttatctcatataaaggacagtaaaagcccttgtatggaaagaactttcaaaagggggtaaaaggctgaaaatctggtagaaaaatgagcaaacgattgaggggggaaaaaacattaaaatggcctttaaactaggaagtttaagtttactcataagagaaataaagctacactgagatgcaacatcttatattgcatatgtttgcaaattctttgggtcaaggccagggggatcctcta

SEQ ID NO: 88636 - DNA, 356 bp, Homo sapiens
ttgttagtgtccttatgatagttgcaaaccagaaaggagtcaggttttcttgagtgtggaaactcctagagggaaaactgaacgaagagtcgatgacaagccaatacacccatttttaatgctcaagaagtaaactagccaggcacaatggcatgtgcctataatcccagctacttggcaggctgagggaggaggttcccttgggtccaggtgtcccagccctggtcagaagccattcctcctctaaggtattcctgggtatctagagatactttaatatgaaatccaaaattgtattttagcataatgccgtttatccatcagttgccagcctggaacggggatggagcacccat

SEQ ID NO: 88637 - DNA, 1415 bp, Homo sapiens
ctgggaggtgagggacccagagaagatgtcctgtcctgcacttaaacctgcccttgaaaactgagtccagaaaagtagcaatggaaactttgtagtactttgctaacctaagtttctgtattttcttcgtatattttgtcatatagtattagtagatttcttttcggaagcattagtgcctcttttattgtgcagaagagaataaggagtggagactgtctctgtgttggaggttcagtgtcagtaggggagtcacttctgtgtctggggtgaggtaaggtagtagcagtaagcatcccatgagaggacctggaaggtgaggaaaaacttgggaagggcactagagcctgatttttttttttttttttttaaagcagtctcttctactaggactttcacctccttttacgagtagaatttgtattttgttatgctctgtgtattagtccattctcacactgctaataaatacatacctgagactgggtagtgtataaagaaaaagaggtttaatgggctcacagttacacatggctggggaggcctcacgatcatggtggacggtgaattaagagcaaagtcatgtcttaacatggcaccaggcaagaagagaatgagtgccagcaggggaaataccagacacttacgaaaccatcagatctcatgagaactcactcactatcacgaggacagtgtggggaaaaccgccctcatgattcagtcacctcccgccaggtccctcccacagcacatggggattattacatttcaagatgagatttgggtggggacacagagccaacgcttatcattctgtttcaaacatatgtcagctgaagaatacaaaattaaacaaatacagtatagacaagagtcaagcacagaagtaagtgctccagtggatgagaaaatgtgagagaacattagtggaaatttcatgtccagatgaggtgaggggtaacaagtaccatcaacttgatcatttctgatttttccaggaatgccaacttttgactaaatatttttttccttccacttcccatttacttatcttaattagagtggcagggacacaagaaagtagggatgagggactgaactgttggatattatttaacattatctgtgtggattattcttttccctcctcttcagatttctaagtattgtttctccatggtgtggtgacagcatatgtactgcctgaaatcgatttggcataagaagttgagtagaaaaccttactgttacattatttcagaatatagctcaatggttaaattaagagttagtatcagccaggttcagtggcttatgcctgtaatcccagcactttgggaggccaaagcgggaggattgcttaaggccaggagttccagaccaatgtgggcaatataatgagacccccatcttta

SEQ ID NO: 88638 - DNA, 383 bp, Homo sapiens
ctttggttcttttgaggtgcttttctctttagatagcacagatgttcagctactgttgaggtacctggcacccttccttccttgtaaggcaaggtgggcctcatcctacaggctttcacaagtgggttggagcaaactgaatcccaggaccaaagggtcccatccctgcagcagcacttactcctgccatgctaccagccaggtcccccactgcatctcacttcccttcctgcacttggctgggaaaagacccaggagcctgggctgactggccaggtaaaaaccaggtagaaagcaggggctcctgcctgtaatctcagcactgtgggaggccgaggctggaggattgctcggacccaggagttcgagaccagcctgggcaa

SEQ ID NO: 88639 - DNA, 204 bp, Homo sapiens
tgatttgttgcttcctaatctactccttcctcagtatggtattatctagaaacaacagcaccagcatcaggtttcgtcagaggtcatcactttgtaatggatgatttctatattttaggagggaaaaataagatactctgaaaaagagcctatcccaaagcaaagaccaaaactggtttgtgttggacgttgtgatactcaaac

SEQ ID NO: 88640 - DNA, 431 bp, Homo sapiens
gtagattcaaagagtgaatgaaatttgtttcctctgaaccatagtcctcagcaggtggaatggcagtggatggtgtgaggttcccacaatgcccaggtgtatcaccatctagccggggagctgcctttccttattctgcagctgctaggccatcagcactttgtggggactgcccaagccctaaggggaaatgtggtagtttcagcaggtggagttgattctccttttccaggtataatggatcggtggagatttagataagaaaaagtagcattcagcagtagaaaatgtactactcctggctctgctattgagtcatttagtcaaatcacttcatctctttgggtatcagttttctcatctgtaaaatgggcagttcaaccagattagtagtttttttttttttttaatattgaaagcatttattaagc

SEQ ID NO: 88641 - DNA, 573 bp, Homo sapiens
tgatctagaggatccctaacacgcaatctgaggatgtgcttaacaattactgtcagttaatttaattgcgttgtgggaaaggctgtgaaagagaaatttgggctgctttgaaagtatatcacacagggtgagagaagcggtgctaagagagaaattatctttgtataaacatctcggtagcctaggtggagtagccaaggtaaaaggacgtgttttaggcagaggcggcagcatgtgtgaaggcactgaggtgctaaacggtggacatgtcccggaagctgaaatagaccaattgtgcctggaatactgaggtgttacagtagattgactcaagataaggctgggcctagatcaaatcctgcattgtgtttctggccacctgaaggatttagtccttcctaagagcaatgggaagcctttgaagtgtttttagggaggacccgtaagatgatttatattttaaaaagaatgacttacctgctttgtggacagtgggtttgtaaagtatgaaattttctattgctctatagtttcagcagtcttattctcagttttataggtagaggtgcttaa

SEQ ID NO: 88642 - DNA, 435 bp, Homo sapiens
aagagcccatcaactcagaatatagaagcaggctgtgtgtgccagtattagcagttataatcaaatgagcacagggccaacagagcagtttcaatacagctggttcttagccctctaggtggactttgggagttgacaaggactccatgagaaccaccttgatgcaaggaaaacattttaaaactgattgattttgatctaaagatggtgctctgttatatctctggctgccttgttcccccaggaaagaacacattgagacaaccctcgcttgataaaaaatgactccacttgattgatcatcttcaaacaaaaaatgggccctttccacttaagatgcaatgaagccactaactggtttctgctaattaaaaatacagcatgtctagcacctaaacatttagcaaaaagttgaaatcttgattaggaaaagga

SEQ ID NO: 88643 - DNA, 1939 bp, Homo sapiens
tgtttgctgtctggacctggctgctgatcctgagcctgctgggagatcttaacgatccccaggagcaacatggggcccaccctagcggttcccaccccctatggctgtattggctgtaagctaccccagccagaatacccaccggctctaatcatctttatgttctgcgcgatggttatcaccatcgttgtagacctaatcggcaactccatggtcattttggctgtgacgaagaacaagaagctccggaattctggcaacatcttcgtggtcagtctctctgtggccgatatgctggtggccatctacccataccctttgatgctgcatgccatgtccattgggggctgggatctgagccagttacagtgccagatggtcgggttcatcacagggctgagtgtggtcggctccatcttcaacatcgtggcaatcgctatcaaccgttactgctacatctgccacagcctccagtacgaacggatcttcagtgtgcgcaatacctgcatctacctggtcatcacctggatcatgaccgtcctggctgtcctgcccaacatgtacattggcaccatcgagtacgatcctcgcacctacacctgcatcttcaactatctgaacaaccctgtcttcactgttaccatcgtctgcatccacttcgtcctccctctcctcatcgtgggtttctgctacgtgaggatctggaccaaagtgctggcggcccgtgaccctgcagggcagaatcctgacaaccaacttgctgaggttcgcaattttctaaccatgtttgtgatcttcctcctctttgcagtgtgctggtgccctatcaacgtgctcactgtcttggtggctgtcagtccgaaggagatggcaggcaagatccccaactggctttatcttgcagcctacttcatagcctacttcaacagctgcctcaacgctgtgatctacgggctcctcaatgagaatttccgaagagaatactggaccatcttccatgctatgcggcaccctatcatattcttccctggcctcatcagtgatattcgtgagatgcaggaggcccgtaccctggcccgcgcccgtgcccatgctcgcgaccaagctcgtgaacaagaccgtgcccatgcctgtcctgctgtggaggaaaccccgatgaatgtccggaatgttccattacctggtgatgctgcagctggccaccccgaccgtgcctctggccaccctaagccccattccagatcctcctctgcctatcgcaaatctgcctctacccaccacaagtctgtctttagccactccaaggctgcctctggtcacctcaagcctgtctctggccactccaagcctgcctctggtcaccccaagtctgccactgtctaccctaagcctgcctctgtccatttcaagggtgactctgtccatttcaagggtgactctgtccatttcaagcctgactctgttcatttcaagcctgcttccagcaaccccaagcccatcactggccaccatgtctctgctggcagccactccaagtctgccttcagtgctgccaccagccaccctaaacccatcaagccagctaccagccatgctgagcccaccactgctgactatcccaagcctgccactaccagccaccctaagcccgctgctgctgacaaccctgagctctctgcctcccattgccccgagatccctgccattgcccaccctgtgtctgacgacagtgacctccctgagtcggcctctagccctgccgctgggcccaccaagcctgctgccagccagctggagtctgacaccatcgctgaccttcctgaccctactgtagtcactaccagtaccaatgattaccatgatgtcgtggttgttgatgttgaagatgatcctgatgaaatggctgtgtgaaaaatgctctcgtaggtggccaggcagt

SEQ ID NO: 88644 - DNA, 770 bp, Homo sapiens
gagatttaaattagttataaagcatgtgtacatatgtgcctatttacacatgcgtgagaaaaaaccagcaggaaatatactgaaatatgactagtggttgggtggtaagcttcttaatttttttttaatactttcctattatcttcttactgtagcatggattacttcccaaatcaagggggaaggtagatgctatctttaagacagtcattccctgtcttttcagtcctctgctgccaccatacctaactccccccaactccccttcacttggtaccatgttgagctgagctctaggtatcttccaggcatgggcctttaaaaagatccttttccttgtacctcttgtactttcatggtaatcggggccatctgtgaccttgaaaggacaggtttctcccctggttattatgaaattcaggaagggtaattgatgccagggactacccacctgccctgggcccccctcggcctgactgctgactccacgctcagttccatccctagaggctgcccagcaagccccttcccaggattgagagaaaggacaccgaaactcacagaaattaccttaccctgtatgacctggttaaaaagaggtttcctactggctggcataaatgttccagctctgcaaactgataggttttatggtgatagaaaaggagccttttaaaataattaaaaataaaagtctcattcggttttgttactctacaatttttaggccaaaggaaaaacacaaaaaggagaaaaaagaaaaatcaacc

SEQ ID NO: 88645 - DNA, 335 bp, Homo sapiens
ctactgtgtcaccagacagtccttgactatgttccagtaaaaagagaagatgatacctaaagcgttctgatgggtataagtgacaagtgtgattggaggcaggaggaagatttgtcattctaaccctctatgatttaagctcacattggatgaaatttttatttcctggttccatcccacgtaggaagttgtgggcggcagtgaggattaacccaaatggagaagacatttgagttctccatgaataattcatgcaggacataatctgaacacagataccagagccctggctgcagcatagctttaacttttgtacatttgctctccctaagggg

SEQ ID NO: 88646 - DNA, 338 bp, Homo sapiens
agaacttagttaagcacccaaggtaatttatgtatttcttctgtttacagtaactttaacttagatttctggtaaacatggcaattgtcataaggaaatatatgttatttgctatgttcaaatttaaactctcagaaactgttcttgaagaatctttggtttagtatttcatttccattcatagtccaaacatttgttgtatgtttctgtgtggtttatatattttttctcgtcattgccacaagacctttatttagaattttaagctaaatatttttttctttgaataattcatcttttaaagtcccttcctttcttttgtagagtctctatgatca

SEQ ID NO: 88647 - DNA, 2838 bp, Homo sapiens
aagccccaccaaaacccatttaagtatttaatgtacatactattcatattattatggcctgtaaacactaatatctgagcaatcaaactgttttatctaccatttttgatgaaatttgaataaagtttaaaaacgtgtaagcctttgaacaaatgtatgaaagctttaaaagatcattagcacttttattttgtttacaaataagctgccatttaaaaaaataaaacctcactacttgaacataaagctcccaaacaatattgtattaaaatgtactatattgacctaggaggatatagaaattatattcacctgattaactggagcagtttcacatagtagaaatactttttgctaatttgattataagtgctcaaatttattgaaattagattctcatgcctataaaagtatactttaaaaatattttgcaacaactgtcaaattatttgggttcctttaaatagcaaacaattgggaaattttccataaaaatgaataggttttattaatacctgttcatgtagtatgtggactaaaacaattgatatatatctgtatgtaaaaatgaatgatcttatcttgccccaaatttttcttacctgattctgagccagcctttttgttttgatggcaccctgtgagtatgttccattttctgtgaactttgtcaaattcatactatatgaggaaatgatctaatattgtgggctccaggcaggtcatcttaattgcatgtctgtctcttctgtaaaatgatgaggtggaacctagagctggacaaaaaattagagatcacttaacattctgtgattcaaggaattcttaggacatttttactctatagaatctcagaatgattattctcagatctactgtccttggtggaaactctcacagtgccttgcatgcagtaaaagtttgatttgccgactggctgacgtgttaattatcacacagactccaagaacctgatgcttgctagaccttagttccttggtgatgctaagagtaaatgtagttttcctaggaactgagcactgaggtctgtgtcctttgcctgtgtagaatctgtctatgcagttggtattcaggcaagaattttagctgtaacaacaatggaaatattggaggacccactttggcatttatgtaaagatttcatatcctatccaacatttactttagtgtctaatcaaattccataccctcaaaaagatctgttggaacaaattgataaaattaggtggaaaggaaagtggtatgggactcaaatacaagtcacttctggtttaattattggctctgctgcttaattcctctgtacctcacgtcctcattgtcgaagtggggacaataatctggacctacctcacaggggaattgaggatattttcatatattagtgtgctttgaagttgactgaaagatatactggatatcataattatataatttctaaatagatttctttaaatccatgctatgttttctttttcagtcaggtcctacagaatgactattgcacttggtctattgttttaatagtaaattttgttattaatctcctatgtgttaaacgtgggtaattgtattatgttaatacatacttagggaggaaaagcaggtggatgtaaatcagtgattcccaacttcagcagatgatagcagtggagggtatccttgagctttttgtaatatttcaaaaagtatattagaaattatacatttacccataatattcctgcttcacaagtcaattaagacattgaatttccattcattttgcctatattctctcaaaagctgtgaatggcagtatgtttttgattaataataaaataagaaatcctattatgtgcaacttattaaatacttgggaacatgggaaaagaataatgaagggattcttatggtgaaaatgttgggaaccacttttataaaggaactaagattatttgaccccctccacagattgcttacctagtctctaaataatgaaatgtgtgtgtttgtgtgttttggctatattaggctatataacttcaggttagaatttgccttcagttttttttctgttttagaatatcactggcctaatttatttaggtgtgtacatgttgctcatacatacacacacatataggattacaaatgtggaaaatgttataatgtcatattctagcattggactaaatatcaatttctgactcttaaagtagttctgtgtataaattcaacatgatgaatcaaggcaataatttctcaaatgttcttttatttctttgtttttatctcgactttttattttccattttttctagtacgcaaatagtgtaaaattgttttaatgcctggactttgaaacaagtaacaagtgtttgaaagtatataatctacgagcgaatttgccctccttggactaaccacatacaaatatgaatctggctgcaagaacaggatatccaggtaactagagagtgggcattgataaaaatatctggtggagaagcctaggatttcaactttttgtcagaggattcctgttgggacagctttaccagaaaagaataatagcggatatgttcatccaaactaagaactttcatgcatcttgcattgttacatagcctgtggaatgaattcattttttctcccttgagtccaggaatgacttccctggaaaaactcaatctatatacagctgtgccaaaatgaaggatacctgcctctccgaaactttcactgctgcttctgtcattgttcacttgtcagataaaattttattatctcaggatgcaaatttaaaataaagtgtaaatctatgttaatgaattg

SEQ ID NO: 88648 - DNA, 603 bp, Homo sapiens
ccgtgctctgcttcttgtcttggattaccatggatcctgtgggccatggttgtacacatttccatacacacccacactcaagaagggcacattcttttcctgcccctcttcagggcttgtcctttgtaggtgtatgaataatggcccctcatagagtggtgagggggaccctccgttgagaagcttaagcttctcaacgccattacactcttctggcccctaaaaatactcattttaattaataattgccagaggaaagaagaaatatttgagtaagacatgtagtttccctttagagtcattttttaatccagcaaattgcaaagccaggccaggcacggtggctgacacctgtaatccccgcacgttgagaagcttaagcttctcaacggctaacagctgttttcatcttttaactaatcaactgtcctgtgtgtagtgcccagttacctattggcttcctgacctttctttccccttgtttattgcatagataataaccatttggttgtggataaatattcatcaccaatttaagttactgagaaaaggggctgcacagtggctcacgcctgtaatcccacacgttgagaagcttaggga

SEQ ID NO: 88649 - DNA, 732 bp, Homo sapiens
tgtgccccaggagcgtcatcctgcacagacacctggggttcatattaaaatggaacaatgaggaatggtcaggcttttaagcaacctcatctttctgctcgtttcagtctgggagtggggggacctttcatacaagttgtcccataatcgtgataaaaatgtgtgtgagatatccactttgaagacaggggcgagggaagttcactttcctgaacatacaaataatttggcccatccacaccaaccgtctagtggatatcttctcaacgccattacactcttctggcccctaaaaatactcattttaattaataattgccagaggaaagaagaaatatttgagtaagacatgtagtttccctttagagtcattttttaatccagcaaattgcaaagccaggccaggcacggtggctgacacctgtaatccccgcacgttgagaagcttgcttctcaacgtcttgtagcaaggttagcaatcaccatgtgtaggggaagagccatagtgttcctagggtgggtagagatgccacaagagggcgttctgagtgttcatcttctctaccttgaaaaatgttccatttgttctctggctgcattccaaagcgatacgaagacttaaggtttttagttgacctaatctgattgaatacatcttttaattatgaattcatgtgtgttgactagtttatcagtcatgtggatgcaagaccgcgcacctggtctgcaggc

SEQ ID NO: 88650 - DNA, 673 bp, Homo sapiens
tgtgccccaggagcgtcatcctgcacagacacctggggttcatattaaaatggaacaatgaggaatggtcaggcttttaagcaacctcatctttctgctcgtttcagtctgggagtggggggacctttcatacaagttgtcccataatcgtgataaaaatgtgtgtgagatatccactttgaagacaggggcgagggaagttcactttcctgaacatacaaataatttggcccatccacaccaaccgtctagtggatatcttctcaacgccattacactcttctggcccctaaaaatactcattttaattaataattgccagaggaaagaagaaatatttgagtaagacatgtagtttccctttagagtcattttttaatccagcaaattgcaaagccaggccaggcacggtggctgacacctgtaatccccgcacgttgagaagcttaagcttctcaacggctaacagctgttttcatcttttaactaatcaactgtcctgtgtgtagtgcccagttacctattggcttcctgacctttctttccccttgtttattgcatagataataaccatttggttgtggataaatattcatcaccaatttaagttactgagaaaaggggctgcacagtggctcacgcctgtaatcccacacgttgagaagcttaggga

SEQ ID NO: 88651 - DNA, 549 bp, Homo sapiens
catcccagacctgggctgattacctccagtctttttatttgtttgaaagagaaataaatgatagtatttaatcagtttattttcagttactccatctagacccatttttagggtctagggttactctgacagatacataaaagtgtttttctttttgatcacttgtaaaacaattttctgtgtaaataaattcctcaggataataaagtttgacggtatgttctcaggtccacaacagcattgaaagactgttttccagtaagatttcatgtgttggacttcagtgattagagaatttggttgggtaagaacgggtgaatgagcctggctcctgaaaaaagagaaaacccatgctggattcatcaagaccttacattcagcaactattgtctgtcacctcaacagatgaaacaaccaacaggtatagtgggagccaagagagaatacatacgttttgacattaaaatgttttgatattaaacatgaggctaaattttgcaaaaggtacaggttagagcataaaagagagaagcatggtagtggtgatgt

SEQ ID NO: 88652 - DNA, 421 bp, Homo sapiens
tgtgtttgtgttctccaggcgcctccttctccactctttctccagtgctggagacctaggggtgtgcatcctggaggattgtgaggaacctcagctgctcccctcgtcctctgaccaggcggtgggctcagggagctttggagtctcatgcggtcagcagcgcttagcatgttcagttggctttttccatatcaccagtgacatctttcttcttcctaatcatcgactcatggaatattagaattaccaagcctcttgcagttcctgtggtctaattccttcattttagagatgaggacccctaaggcctggggaggggagatgataggtgtagggaaaaaaaaaagaaactttttcctctaaataagattagcaaaacgataaattaacaggagaaaaatagagagtttattaacacgtg

SEQ ID NO: 88653 - DNA, 696 bp, Homo sapiens
tgatgggtagaaacgaagtaagtttcctttatttctgggattacaaaaattactttcctacgacagtaactacttttagtcactggaaagcttctttctctgaagattatcataagtctctcaggaataaacacatattgtccagagcttggagaggatccttaaaaacattttttatttcattttttagagacaggatctctttctgtcacccaggctggagtgtggtggcatgattaggattcactgcatgctccaccttctgggctcaagcaatcctcccatctcagcctcccaagtagctgggactataggcttgtaccgtcactctgggctaatttttttttttttttttttttttggtagagatgaggtctcaaaatatggccccatctcaaactctgggctcaagcagtcctccagcctcagcctcccaaaatggtgagatttaaagacctattgaatttaatttaacaaagaaagtttgcttctatccatatctagatatataatgcaaaatttatctgcaacctttcaatctgataaagaaatgacactttatgaaagaacatttagcattgtttagatcaaagtcagtgaataagtctttttcctgacacaaaagaggctttggttctttataaatttacaatgactcattaaacatcaatttgacattaaaacaaagtaagtaaa

SEQ ID NO: 88654 - DNA, 179 bp, Homo sapiens
caggatggtgggtttgaccctgtaggaacagggtccttcactcaggggccacactctgcagtccaacgaatctgtacccttggtcccaagctccagcaaagggtgagcaactcagctcaagccaccagctgggacaaatggctctggtctgtggctctgactgggggccgctggcattc

SEQ ID NO: 88655 - DNA, 639 bp, Homo sapiens
cagctgatgaatactgagtgggattcaaatccaccattccggctccaggtgctcattcaccacactgttctgggtgctataacacccattctggctttactccagcaatttgctgagggtctgcctgaggtagcaacggaagagatggaaaagagaggtcgaactgaaagcccactggtgagacttggcaattgattcaatgagagaaggtggactgcagaccaatggcccgctttctggtttaggtggcagagtggctgatgatgccacatttgaaggtaggatacaggagaaagactggggccttgggggtgcacgagggtaagttcagtttggacctgttgagtttgtggggcgggatgccaccgaggtgcatatacaatggaagaagcttgctgcaaatcaagatttagaaggtattcctacaacctccaaactgaacgaagacagttctgtctttggatttcaagtgaataaggatcagtgaatcgggctatcctactgcataaatgagtctactctgtaagtgagtctattctcagaacagtttccgtaactctagggccctctccttcatgcttaaaagcactaatctttcagaaatgctgtagtggtgttctgtgcctggacgtaactgac

SEQ ID NO: 88656 - DNA, 417 bp, Homo sapiens
ataacaactggtcactggagagaaacagagacttgggggcttttccagacacacagctagtaagtaatagatccacatttaaattcagttttctcttactcgaaaatccatgttcttcccacttaatcagatagggaatgattgccacgtgttcctcttgccacagaatgacaccaggaggttccatctctaacccatgtttcttttcccaagcatccctcagatctatgacccaggccaaacccaagccaaaaatgatcacccctgattctaggccaaaaaataagaatcgtgtgaaatctaagcagaatgaggctgtgtcaccactagccaaacctcttgttcatactgcgcaggttttaggaaaacaacagcctttaatgcatgctcgaaattccttccatggtaagccactgt

SEQ ID NO: 88657 - DNA, 423 bp, Homo sapiens
tttgacttgaatatagagtgtctgataagcctgtaagtagtatcacaagcagtatttctaggctttcattgtaaagtttagggttgaaatctgggtgttgaaatttcaaagttccaccctttgatgatatagactaattattctttattatatttacagtatgcaggcatgacacaggtttcaaaagcactttcccattcttctttaataatcacaattatgatcataacagttaacatgcactgagatcctacgatgtgccagtccgtattctaagtaccttgcatagatcatctcatttaatcctcacaacccacctatgaggtaaatgctataattatccccactctactgaggaggaattaaagtacagacaggttaatgtgctccgagtcacacagctattggaagagataggattta

SEQ ID NO: 88658 - DNA, 689 bp, Homo sapiens
gtcggccggggccgccgggcaggagggaaaggttatgggtcggcccggcggtctctcccagcacccgcgactctcaccttgctcagctgctggtggatgagctgcttcagctcggaggctttctccggaggcagcgacatgctggcagccggcgtctccccgccgcttctccccgcctcagatgccctaactgcgcggccccggccgggccaggagcgttaggagcgactggagcacaaagcgccgcagccgttcgcctagcgcagctcccgggggacgcaacgccgcgtcaggccgggggctgacctggaaatgaggccccggcggcggcggcgccaactgttttcaaacagtggcggacaaacagggcttggggctggcccgcacgctgcctgatcgtttccgcccgccgctccacctccccgcgggccccgcaccccgagacctcagcggcaccccatcgccttgcttgccagggtctccgaaagcgctgctggcccctcttcgcggccacccggcggcctctttccgccctctgaaccggcagcttagctggacgggcctcaagggcccggcgcccagggactcaaaggaccctcccgcgccccgcgaggctccggggtctcgggcttccgccttcttgctgccctcgttcttgccagggccgcggttagtccctgctggccacc

SEQ ID NO: 88659 - DNA, 327 bp, Homo sapiens
tccaaaggagagaatcaattttaagaaataatttaaagacagaaagaaggtcgggcgcgggggctcacacctgtaatcccagcactttgggaggccaaggcgagtggatcaccagaggtcaggagttcgagaccagcctggccaacacggtgaaaccccatctctattaaaactacaaaaattagccaggcgtggtggcaggtacctgtaatccaagctacgtgggaagctgaggcaggagaattgtttgaatccgggaggcagaggttgcggtgagctgagatcacgtcactgcactccagcctgggcgacagagcgagattccat

SEQ ID NO: 88660 - DNA, 391 bp, Homo sapiens
attcctgctctaccagcccagaatcttaccaaagtcatcattccaaaccattcctgtatttctctaaaacattcttggaatatttcatcttgtctgctttccctctgtcagtcctaaaaagtacagatgtccttcaagtgtagctttacttgagattctaccaagttgaggttatttccattaacttggtcttccatatacctgatcctgtgtgcctaaccacttgagggaggttgcacactgagatatgtgccacccaaacgggctggtagggggaagtaagttaggggaacattgaaacagaacgggtcaagcggagaatgcagccacaatctaagaaacccacagtatattatcaataagtatttgttggctggctggcagaagctaa

SEQ ID NO: 88661 - DNA, 222 bp, Homo sapiens
ggtcattgtccctgctcttaccctatgtaccctgtccctttctcctccttcaggtctaggctcagagctctctcccatgccctcccacccctggtctcaagctcctgagctcaagtgatctacccacctcggcctcctagagtgctgggatgacaggcatgagccactgcaaccagcctctgcatggggtttcctcaactttaggtctgtgccctgaagggg

SEQ ID NO: 88662 - DNA, 492 bp, Homo sapiens
cccatgagatgatagctgtggaaggtaggtatggttatacaaaatttcattacacttttcccctctacttttcctaatatattctgaattttcataaccaaaaagttaaatacacttaaaagtagacaaatactaatttgaggtggtggttaaggactcagaagttacagtccatgtgtctgaatgaaagtactttctcaaacatgcagatatcagagatttgtaggattccttcaatggagacccatgttttctccacacagaacactggtttctgagcaaaagtaggccctctttctgaaaacagatctgacaatatgaaagtggttggctacttaactgaagataccaaaaggaaaaaaaaaaggacaccaaaaaactgggtctacaaatgtggttgttggttctccttgttttttttttcaaataaggctcggtttaggagcagtctaatagagcatgtgactgctatacttccaacagtatctttgc

SEQ ID NO: 88663 - DNA, 260 bp, Homo sapiens
caccatagaatactactacacatagagcaaaatagcaaaaatgaaaaagatacacaatatcaagtgatagcaaggatgtggagtaactcagactttcataccctaagggtaaatagggtaaattggaaagctggctgcatctacaagagctgatttgccagcaattacatttctaagaatatgcccagcaggtaatcatatatatgttcaccaaaagatgtttatgagaatgtttatagcagtgttgttcacagaagcta

SEQ ID NO: 88664 - DNA, 100 bp, Homo sapiens
tcacgtggaggaggtgggctcagaagaatcgatggccacggagaccatgttcatgcgtgggccaggaggaatctggagaggctggagccttagactcact

SEQ ID NO: 88665 - DNA, 215 bp, Homo sapiens
gaagatgtgataagtgtgctgagaccacacaaagaaactgactccatcagcagagggtgatggggtgagcagaggctttccaggcagagggaattgcatgcggtgtgcatatctcttctctgaaccttcatttcctggcctctacatggagaaaacaaggcacacctctctgggtgcccagaagcacttacatatattgtctggtagtcatgggc

SEQ ID NO: 88666 - DNA, 545 bp, Homo sapiens
cacccagtctatggtattttgttatggtagctcaaggagactaagacaaacatgaatgcaaatatcctcaacaaattattaccaatgttaaatccaacaatgtataaaaagaattgtacagtaccctaagaaggggagagtgtaacttttcagtgtttaagtgtaggcttcacatagtgatttccttccaaagagtacagtatgaaaaggaggaagaaatgggttatctttaaaatggagaaaactcacaaaccctactttagccaggtggtcaaggtcaacatcaaaaatcataaaatcatgttcatagtatgtactcttgatacagtgtgatagaaatcgcacttcatctgtgatcttctttccctaaacccataccccaagtctgattatgagaaaaacaagagacaaattctaaatgaggagcatcctataatacatttgagcagtgcttctcacaactggcaatgtcattaaaaacgcggaaagtatgagaaaatgtcacagccaagagtaccctaaggagatatgacaactaaatgtaa

SEQ ID NO: 88667 - DNA, 417 bp, Homo sapiens
ctccccccacctttcctgtttccctcatggttagctaatacctgatgttccttcttagcctttggtaaaattgtgaatttgacaaaggtagagttagtctccttttccagcacatctcaaccctcgcctagctctgccccaatagctctcatccagcacccccagctggtcatggccagcttccaccacatcgcctccagaggtgtagcagatattgatttaagtggctccattagggctgttcagagtaggcgaaatgaacagggctaggcctcctgagatcttggttcttaaccagtttgttgattgcctgtctttgactgagttaatgcactgctcttggactccaaatccagtatctgtggggtgtttttgtgtagatcagattataatgtaagtacagacacttttgggaaa

SEQ ID NO: 88668 - DNA, 614 bp, Homo sapiens
acacacacagatgaacgaacacccacccacacagacacacacacacagatgaacaccgacccacacaaacacacacacgcacgtggacacacacatatgcagacgtgcactcacatccatacacagacacatgcacacacgtcacaaagacacgtctgcacacgtgcgttttatatgtatgtaaatcagaacaagaccatggagacagagaaagagaaaagcgctgaagactgtatggggctttgacaccatactgacagcgttttctaacagagacacggcatgtcaggctcagccacgctaataaaacccttctcctcacgtggctctgggaaccgatgtgggctgtgggctgctgccctggacgcccgtcactccaccacggcaggtgaagctgccattttaaaacgatgacaagaaaacctgcgctgctcagcatcccattttgggtcacaggaatgaccccaatctggcctagaccaaaggagaaggaaccgcttgatgacaaaagcaaacactgcgtctttaaacggcgcgccctgcggctaaatgctgaagggtcacagccacacgaaggaaatgggagggagggcgacaactgcctttgattttta

SEQ ID NO: 88669 - DNA, 923 bp, Homo sapiens
gcctttatcttttagtttttaagatcatttctctccctcctttccccccagttttctcaacatttatgagttagttctgctgagaacaacatacttcagaacatgtcaggatagggcagttttttcttgtttttcttttttctttttttgagacagtcttgctctgttgcccaggctgaggcaggagaatcgcttgaacctgggaggcagaggttgcagtgagccgagatcgcaccactgaattccagcctgggcgacagagtgagtctgttttttttttgtttttttttaaagtcaacacaaatattgaaaataagcaacttcagtgcacaaataagctcaaaatcactagtgagtgatctattttttgccaataagaagtaccatttgtacatgacttaaagtgccttccaccaagaaaattattgaaaactgttgggtcacataacattcctacactttggatacagagtatttagttttatacaaaattaagacaacaagaaacctaggatgtccaaacattcatttcatttattttactgcatttatttatgcagtgaaaattgaaagatacaccaaattaaagataaaaccctgtgacagataacagtatatgtaataacatgaatatttatttacacttggtagagaaagcaaagctagctagctctaaactagaatgaaagtcgttttgaaatgggtacgggggtatataaggggaatgattgagtcacatgtaaaagcctttgtatgcccagtgctagtgttttcctgaaatctagtgagaatcacaaggtaccagaaataatcaaataataaatattaatacactgctgggatagaagtatctcagtgtaccagcattcactaagctataaaatctgtgacagcaggaatattaaattatgaacaacctggtt

SEQ ID NO: 88670 - DNA, 328 bp, Homo sapiens
aaaaaggagcaagtcggacacagaaaggtacggagggaaggccacgagaaacccagggttaccacaagccaaggggctacccgaacctgggagaggagcgaggcctggaacagatccttccctggcgcctgcagagggagcatggccctgccggcaccttgctctcagacttctgacctctggcaccgagacaataaacttctgttgttgaaagttagtggcactttgttacgacagccctagggagctactaccggcggtcagggcacggtgccagcttcttcaaaggccttcatgcaatgtggtctcccagctctgacaccaccct

SEQ ID NO: 88671 - DNA, 469 bp, Homo sapiens
aaatcatttttgagtcttccttcttatttaccctccaaggttaattcagcaacctgacaccatctgttaaacactactgttgatcccattctccaagatctatctttaatttgttcacttctctccaactccactgccatcaccctatcctaactatcctcatctcatgcctgacatcacctccctaacaaggcaacccaattctcttttcacttcactccaaacagcaaccagacgtgctcttttaaaaacataaatccaatcatttgaccttgctttaaagcttcaaagatttcctcttgtacttggaccaagttcaaaatccttaccaggagctaatgtccagcaagatcagattctctttccttcctccaaactcatcttaagacatactcctccatcacctaccaagcatcagtcattctaggcttcctcaaagtaagccttttcttgcctcaagccttttttt

SEQ ID NO: 88672 - DNA, 560 bp, Homo sapiens
agccatattcttgctcacttcttccacgatcccttcctgcttccctcgcacttctcttgagaacccttcctcaacagatcacactctccaattcccatctcagactctgcctctagggaatgtaacctaaggctcagggtcaacattcactggggatacccaactggccttgcagaaatggaagatggaagattgcttaatggcgttatatgagttatggaagggatgtctgacctgctttctctttaaccatcgtgaggaaggaagacgatgaggctctcatgcttctgtcttagggctttttgggtttgtagcttggtctgacatcttggttgtgtgtctctgggcaaggacaatttttgtccctcagtttccctgtctataaatggagataataatcatgctttatttataggactgttaagaggattaactgagataattaatatcaagaacttagaaggatatatggtacttggtgagtactatattacattgctgttattattactgatattattactattagtatcattgtcatgttaaaatgcagctacaga

SEQ ID NO: 88673 - DNA, 466 bp, Homo sapiens
gaaggacaaatcacacaccgggctctgaagtcaggaatgtttgttcgcttattccaagagcaaagtgctttatttagatttaagtagaagaaatgttttcttcacagaaaggaaaagtcatattggcattgcatgtttgctttaaaagatttttattaatttgttcattcaacaaatatttattgggaactaactgtgagctctgagcccagaatctcacacttacagaagtgaggaaatgatttgtctgatataagcctcaagcctaagaaatttctagaattatcaaatcccggtttaggtggcacctattgattaagtgtgatttttcagcccagttccaatcgatatttagaaacacaagcagagtgaggagggtagtagagttgtagattataaatcatagaattaaagaaccttagaaataaagtagctcatttcctgtactttaaaagcaagagagtca

SEQ ID NO: 88674 - DNA, 396 bp, Homo sapiens
accagagaaccggacatctaaagatctagggaaacacattccataagagggaggagtaagtgccaaggtcctgagtcaagctgagcttggcaagttcaaaaaccagaaataaagctggtgtggctggaatgcagaagggaaagagggaggcggcaggtctgatcccacagggcctggagggcatgaccaggaacttcagtgccatcccaactgcaatgggaaggtggaagcagggaggtggcaatgtcaggttcttgcctttaaaaagttcctcttagctgggcttggtggttcatgcctgtaattccagcacttgtgaggctgaggcaggagaatcacttgaggccaggagttcaagaccagcctgggcaacaaagcaagatgcccatcttaaaa

SEQ ID NO: 88675 - DNA, 514 bp, Homo sapiens
ggctgaagtgggaggatcgcttgagcctgggaggtcaaggctgcagtgggcagtgatcacaccactgcaattcagcctgggtgacagagtgagaccctgtctcaaaaaaacaaacaaacaaaaaaggatattgggattttattaatatcatcttaatgtgtttgttattttagtgtaccacaaaactatttgtgaaatttgtagtaaagtacatcttcccttagaaatgaaattttacttcaaggaggaatacttggctttcagtagggaacatattttattttaaagtaggtttatatatatatatatattatatatatctatgtagttatatatagtttatatatagttatatatagctagtattttgttcatacattaagctattgaaggtaactttatgtataagtatagctttgttacaagtttactttaatttcctgtctcatgatctaggtttttaaattttattttttttaactataacaagattacaataaaaagatcaactttc

SEQ ID NO: 88676 - DNA, 512 bp, Homo sapiens
cagaatgatgtcattttggaatgttcagtaacatatttctttttctacttgaaagtgaaacctgggaaatctgtaatttacaatctaagtttcccttattacgattcaatttcattccatttttctgcataaactaaggactctacaggcagcttttgatggctcagggttgtacatagtttttatcagtaggaaagtactatttatagataaaaattatcatagatcagaaataggtagtacatgctatgaaaacataaattggttcatcctggatgtcatattaccaaagttgaatatggctcatcatcatgaatattctatttcttgtgccttgcttacattcctatctatatgtctctggtttagtgactgtgacgattggggcttttggtttggtaagttttcccaaaagcattggtattcctaataccttttttaaaaagtctgtctctttttaaaatttgcttttctaagtttactacaaaggtttactttgctccttgaggaaa

SEQ ID NO: 88677 - DNA, 1312 bp, Homo sapiens
agcatagttactgttttctgtacggctaagtactgcctaatggatgaaagaagtttggtgcttcaattatttatgagctcagaactcaattcattaaagttattttgccaagtcatgccaagatatattgaaatttccactcatattggtttttaaaattttttttagtcctaaaattaataagtatggaaaatcactaaaagcagtgtaggataaggtgtgtttaactggccgggcacggtggctcatgcctgtaatcctagcactttgggaggccgaggcgggcggatcacttaaggccaggtgttcgagaccatcctggccaacatggtgaaaccccgtctctagtaaaaatacaaaaaatagctgggcatgatggtgggtgcctgtaatcccaggtactcgggaggctgaggcaggagaatcgcttgaacccgggaggtggaggttgcagtggccgagatcgcaccactgcactccagcctgggtgacagagcgagactccatcaaaaaaaaaaaaaaaaaaaaaaaagatgtgtttaactgggaagggtgataataatagaataataggtacaggaggaccaaactttagattataaaccagaaagttttgttattttatataagtgtatcagtattactatttatcatttatatagcattttatatttgcaaagtgtttaataatttttgttattctttacatatatatgaaataggacagttatcccacatgaacggtaaataaattgaggcacagaacagtaaaaaaacctcagggtcaggcgtggtggctcacacctgtaatcccagcactttgggaggccaaggcgggtggatcactttaggtcaagagttggagaccagcctggggcaatatagtgaaaccccttctctactaaaaatacaaaaattagccaggcatggtggtgggcacctgtaatcccagctactctgggggctgagacaggagaattgcttgaactcaggaggcggaggttgcagtgagccaagatcacgctactgcactccaggctgggtgacagagcgagactccacctcaaaaaaaaaaaaaaaaaaaaaaaaaagaacctaagacaacccagtgaaatggtagcaaaaaataggaaatataatgatcacattttctgaatcctagaccatcagcctaattcactgaggtgtgttgtgtatcactctattttatagatgattttatataagtaacagtggattgttttaaagctgacgtcattgtatgtggatacattctatatggaataaatgttatgtaaaggatgtgacttta

SEQ ID NO: 88678 - DNA, 491 bp, Homo sapiens
tgtttcatggtacttaattgagactttttcaagattcccctgatggcacatttgcagttgcttcaagactggatgatgtgcattgagttctctgttctcccaacatggctgttcctaaatcaggattctggtttttttgagatggactctcgctctgttgtccaagctggagtgcagtggcgtgatctcgctcaccacaacctctgcctcccgggttcaagcgattctcctgcctcagcctcctgagtagccgggactacaggcatgtgccaccatgcctggctaatttttgtatttttagtagagacagggtttcgctatgttggccaggctggtctcgaactcctgacctcgtgatctgcccgcctcagcctcccaaagtgctgggattacaggcgtgagccagcacgcccggcctaaatcaggattcttaacaattaaagtgtatctgaatgaggaaggaaacgcttgtcattctctagtcttaccca

SEQ ID NO: 88679 - DNA, 442 bp, Homo sapiens
tgtttcatggtacttaattgagactttttcaagattcccctgatggcacatttgcagttgcttcaagactggatgatgtgcattgagttctctgttctcccaacatggctgttcctaaatcaggattctggtttttttgagatggactctcggctactgcactccaggctgggtgacagagcgagactccacctcaaaaaaaaaaaaaaaaaaaaaaaaaagaacctaagacaacccagtgaaatggtagcaaaaaataggaaatataatgatcacattttctgaatcctagaccatcagcctaattcactgaggtgtgttgtgtatcactctattttatagatgattttatataagtaacagtggattgttttaaagctgacgtcattgtatgtggatacattctatatggaataaatgttatgtaaaggatgtgacttta

SEQ ID NO: 88680 - DNA, 343 bp, Homo sapiens
gaatggtttataaacaaggcagtgccttgatctgatttgtgttataaaaatttcagtctggctgcaatgtggataatagtttggaatggggaagagaagatgttgggaagctaactctcctagcaagaatgatagaatagcttacagtagggtagtggcagtagtggaggagatggaataatggagattcaggggcttgaatttgttaaccatttagttcaacaatatttattgattggcttctctgttgtgagcatatctgggagaggaagaaaaacaagccaggataatccccaggtttctggtgtataaatgttggtactactctgcgatggaatggaaa

SEQ ID NO: 88681 - DNA, 410 bp, Homo sapiens
agttgagaacatggctctgtctcagataactgcctagatagggctcaccactttggatatttctttatctattaatataaaaggccagagttaacttaggtgatctcaatggatttttttaaaagaagaatgattctgttatctacgtcagaaggatagacaggaattttagcatactgttcaaaatttttctcacgaaggtttaaatacttgttagaaagttataaagaaggctgggtgcagtggctcacgcctgtaatcccaatcccagccctttgggaggctgaggcgggtggatcacctgaggtcaggagttcaagaccagcctggccaacatggtctctactaaaaatacaaaaattagccgggtgtggtggtgggcacctgtaatcccagctactgaggcagga

SEQ ID NO: 88682 - DNA, 251 bp, Homo sapiens
caacatgtacacacagacattaaaaactcatttattttcccactcaagggcacttaatagctaaggttccaggagcacatgccccaaagggctggaccatgaagttagggctatgctaagctccaggtatgctctaaaacatattgggaattgtgcctggcctcccctgccttctcacggttctgacacagcatctcacctgcccagaacttgtgacagtcacttggcttcattttggacgaggctctttt

SEQ ID NO: 88683 - DNA, 594 bp, Homo sapiens
tcataccagtctggttctaccatattcacatttacccaattaattttatttgaaacatctatttatatatgtacaccaaagaaattaaaccctgccattttccctttgtgcttaagaaaccagagccactgttagggtactcacatgtcaaagatattcttaataggcttcaaagttgggtgtatataaatgtgacagaactgaaggggttactttaagagaggtattaaaactacttgaaattaattcaaagggatctttttatttctgtatttaaaaattagatgagagcaagattaccacttcaaaaaaaataacgtaactctcagtcttaattttgtgaaaaacttactttgctatcttgatgagtagaagatggataagtttttctgaactttatcaatttacaaacttacattttaggatattctgaagaaattaactttattacctaattttcaagtctaaagtttatcatataatagctgtccttcttatcattatttttgtttggtcatttcttatcttacctagcttcttggttagtaacttaaaggaaaaaatttttacattggcaaatcatattttttgccc

SEQ ID NO: 88684 - DNA, 106 bp, Homo sapiens
aggagaaccgacattgggtgggaaaccagcagtttctgctctgatgtctttcagaatgaatactttgatcaatatggtaggaagttagatttggggatggtttttg

SEQ ID NO: 88685 - DNA, 304 bp, Homo sapiens
actgcactccagcctgggcgacagagcgaaactccatctaaaaaaaaaaaaagatgtaaaaaccactcttacctggcagggcacacaggccacgaacagtagtttgctgactcctgcactgggggaaagtcaatccaaagctggggattggattgctagaagctttgtgcctaaacatgcccagaagtgacacatcagaagcaggtccttaaccatcatctaggtagagagagaaccgacgacagtcaataaacactgagtctggccaagttctgccatgtgccaatgtgcgtaaagagggaat

SEQ ID NO: 88686 - DNA, 215 bp, Homo sapiens
gcctgggtgacagagtgaccctgtctcaaaaaaacagtgattgtttgtaaggaaattattaaaaccttggttcaatatccaatatcttaactttaaattttcaaatacttcaaaactagtaagtattactatgcctaaagcacagtgcagtccaacggaatatgtgagccacatatataattttaactaggccagtagtcacattaataagaaaa

SEQ ID NO: 88687 - DNA, 325 bp, Homo sapiens
tgagccgagatcgcgccactgcactccagcctaggcaacagagcaagactccgtccccaaaaaaagaagaaaaagaagaaaagaaatgatgtaaatcagctgcccttcactctgtgttgaggtgggggatgtccctaattgcagtaggagagagcctctcttttatctgggactaaaagcccttgccctacatacctcataattattttagggttaactgattcaattgtcagaaaagaacaagctgtatcttgtttctgtacatattctactttgtgagtatttttatttcattgctatgtgattggaatcaactcaggaaaga

SEQ ID NO: 88688 - DNA, 483 bp, Homo sapiens
tgatctagaggatcccatccccgggtctgggtatctgggactacaggcgcctgccaccatgcccggctaattttttgtatttttagtagagacggggtttcactgtgttagccaggatggcctcgatctcctgacctctcgtaatccgcccgcctctgcctctcaaagtgctgggattacaggcgtgagccaccgcgcccggccagatctttacaatcagagatgcaaaactgattcattaatcatcaatgttgctgccagttgaaaatatctaagtttttatcacatccctaccctatcttgaccagtcaaacttgtctaaggcttccccttatgtctgaatatgtccatttgtttaatctaaataatgtcaggttgtgttcatttgtttctcttcccttctaaaacttgtctccatatgcctacttactgaaaataccattcctatacttaagagactaattaagtcaatctttttatggc

SEQ ID NO: 88689 - DNA, 393 bp, Homo sapiens
gctgtgtttgcatagtaaatgcagtctatatatattatatatttatttgaggcaattttgcagagaggctcgtgtggaatataggagagtggctaaacacctcctctgagctgctgttggtactaccaagggaacagtaaagacaactctaagtagaaggtggaaagttctgaaggagaggtcggaaaaaagtggccatggtgtttcgaaggactggaagatgccgtctgagagactgggagaagggtttcagtgaagaaactgcatttgagatgggcttttgaggccaagatttccacagggagagatcaggggagaaacggtctggaaggagggtgccgcctaagcaaagacacagggggacaaagcagaggactgatcaggtatccagag

SEQ ID NO: 88690 - DNA, 301 bp, Homo sapiens
aagatgatacactagaatcagagagagtaacaaagagacagacccggtggaactgattctaaggtgtttagagtaggcctgggagtttgacggtgcagtcagggaaaggacaaaccaggctgggaggatgaatagggtacaaatagcaagtgctgggaggcctgtcaggcaacaaggagccaaaggagcagaagcacctggaggcctggggcaggggtaagagaggaagtggagaattgagggtggagggagagggtaagaatggaagtagagaattgagggcgggaaggttatggccacc

SEQ ID NO: 88691 - DNA, 499 bp, Homo sapiens
caattttttccatgcacggttggttgaatctgaatggggaacctctgggtatggagggcagctgtgtatgacttttctcatagttttatgatttcctcatggatgctcagagtggattcaccaggtcaggtgtgaatacttctgtggctcctgatacccggcgtctgcctcactgctctctaaaagcgttgttttggttgacagaacccttcactgctcacggggttcacggctcctcatgagcagttggagtccctctccccaccatttttcttaggtttggggagctaatttagtagctaaagatgttactacctcacaattattttcattatttaacaactgccattgttgagcttttttgttgtatgtttgtttactggcaacgtttcctctttgttaggtctgtttaagacctgttctctttaactgttggaatcacttagccttttcttattgaattacatgggttctttaataaagagataaatcctttgtc

SEQ ID NO: 88692 - DNA, 370 bp, Homo sapiens
gaatgcgcgtgtgcagaagcacctgaaggccctcacttcggagctggccaatgccagagatgagtccaagaagactgccaatgacatgatccatgctgagaacatgcgactgggccgagacaaatacaagaccctgcgccagatccggctgggcaacaccaagcagcgcattgacgaatgtgagtctatgtaatgggcacccagcctctagggacccctcctccctttttcctgtccccagcctgtcttgcctaattatccaccatttctgaactgcctgggctcctcttcccttccacgcctttgctcaggctgccacctctgcctggatttcctcccaggtctgcccgcccagtgcccagcctaaaga

SEQ ID NO: 88693 - DNA, 275 bp, Homo sapiens
gcccacacctcaaggtccatcagagagagggggcgtcctatgtcatgaccctgctgagagctcacactgcccgctgggcccaggccctaggttctaccccgtgtggtgcccctccccttcccaaccactcgcacacctgtccccagcctgtcttgcctaattatccaccatttctgaactgcctgggctcctcttcccttccacgcctttgctcaggctgccacctctgcctggatttcctcccaggtctgcccgcccagtgcccagcctaaaga

SEQ ID NO: 88694 - DNA, 678 bp, Homo sapiens
aggacagttaggccacccagaaattagaaagagcaagaaaccactcccactaaggccagagggaggagatgttacaggcaccaagatttagagaatcttaccaataaagggttttccaaggccaggactagggtgaggggagtgaaggccaatgaggcaaaatttaaggaagctgtgcagggccctcacagaaccctcagagcgaatgcctcctcaaattgtgtcccagtgatacttcactcacccaactgtagtcccagccctggctgaaactgtctctttcacatgcagaactccttaaattccatgaaaaacagtactatagccagactccatttatgtgatttatagatactaccttatttatctctctcaacaactttatgagataggtaatattattatccttatttacagttgagaaaactgaggcacagaggcattaacttgcccaagatcatacaactggtatgtggtggcactgggacatgaatttagttcaagaagctgtgctcctaatcactgcactcttttgccactaccatatatctcaaattcaatgtctaaagcaaaatttcatatctttctgcacaaactgtctcacccttcacagttcttatttctgtcagtgtttccacttcttttacagttatccactctctcggcgagaccttgaac

SEQ ID NO: 88695 - DNA, 2140 bp, Homo sapiens
tagaggggaagtcctatactgtgtgcttcatagtggtatttctaatgataacttttgtgggaaagcagcctcgttatagctggatcctagattagtccagtgaattttaataagaaattacactgttgtaaactcacctcttatgcattggtcagtgatgagatatatatataaatagatagatagataaaatttgctcttatatagccatttattcatcattggccctgtttggcccatcctcagtgtggctgtgagattattgataactggtcactgtcagataaatcacattctattaggaaacacctatataggttatgcagaaacatgcagaaatgccacctgtccatacttacgtggctttacataaacaaaagactgtcttgtctttgtggtgactgaatttacaacgtcctcccctggaaatggaaaagtacctatcaggagatgtatgacaaaagaaattatcaagcctgacttcatatatattatgaacagtctagaggaagcatctttcttagaactaaggaggtctgctgaacattggccacattctggactttcatgaaaatcatggacccagagttggggttaagccacttagaaaaagctgttgaaaacatctcaaaggccactgaacaatttttaaattacacttaacatgccaggtatctaggtatctagtgcttttagcaatattatcaatattatcaaggtcccagcttctttgtgtccttcccccttgcgatcctcttttttttttttttttttttgctttttaaaaaatagtgacagaagtctcactctgtcgcccaggctggagtgcagtggcagtcttggttcactgcaacctctgccttccgggttcaagcaattctcctgcctcagcctcccgagtagctgggactacaggtgtgcgccaccacacttggctaatttttgtatttttagtagagatggggtttcaccattgttggccaggatggtcttgatctcttgatctcatgatccacccgccttggcctcccaaagtgctgggattacaggcatgagccactgtgcccagcccttttttttttttttttttgacggagtctcgctctcttgcccaggatggagtgtagtggcacgatctcggcttactgtaacctccacctcctaggttcaagcaattctcctgcctcagcctcctgagtagtggggattacaggtgcccgccaccatgtctggctaatttttgtgtttttagtagagacggggtttcaccatgttggccaggctggtcttgaactcctgacctcagatgatccacctgccctgacctccgacagtgctgggattacaggcatagccaccgtgcctgaccagggctcttttagcaaggaaaacgtgaggaatgaatggctgttggtgtgcaacaaatcatacttgctacatgttgtgaaacctgaagttatttgttagtctgtatgaagaatgtaccccagagatgcaccctgtatctgccttatgtctcttacaatggaggttctctcctgttatattgctgaataaactatgtgaactgctaaattgactgaagactagttagtttatcactaactctttaatgaagaatttcactatcctacaactcctcctaaaaagtgaaaatttactttggagagagtgctttcgagaatagtattatgatcagtattattgcccctaaattttttaattattagagaatgcttatgttacaaggacatatactaagaaacattctacaaatgtgaaaatttaaatatcagcaaaatagagaaaaggtttttgtttttgttttagtcaatatctccattaaatagtaagatcagattaaaaggatttatatcattgatttctcaaatcaatacctaagcagtacctgtgagagcttgtttaaaaatggagatttcttggtctgctttagaaattttgattcctcaggttgcttgtagggcccaggaatctgcatattataaataacacctcatgccgggtgccatggcatgtacctgttaccacagctacttcagaggttgaggcagcaggatcacttgagcccaggagttcaagaccagcctgggcaagatagtcagaccactgtctctttcaa

SEQ ID NO: 88696 - DNA, 940 bp, Homo sapiens
aactcagaacgtggccgggcgtggtggctcacgcctgtaatcccagcactttgggaggctgaggcaggcagatcacctgaggctggtcttgaactcctgacctcagatgatccacctgccctgacctccgacagtgctgggattacaggcatagccaccgtgcctgaccagggctcttttagcaaggaaaacgtgaggaatgaatggctgttggtgtgcaacaaatcatacttgctacatgttgtgaaacctgaagttatttgttagtctgtatgaagaatgtaccccagagatgcaccctgtatctgccttatgtctcttacaatggaggttctctcctgttatattgctgaataaactatgtgaactgctaaattgactgaagactagttagtttatcactaactctttaatgaagaatttcactatcctacaactcctcctaaaaagtgaaaatttactttggagagagtgctttcgagaatagtattatgatcagtattattgcccctaaattttttaattattagagaatgcttatgttacaaggacatatactaagaaacattctacaaatgtgaaaatttaaatatcagcaaaatagagaaaaggtttttgtttttgttttagtcaatatctccattaaatagtaagatcagattaaaaggatttatatcattgatttctcaaatcaatacctaagcagtacctgtgagagcttgtttaaaaatggagatttcttggtctgctttagaaattttgattcctcaggttgcttgtagggcccaggaatctgcatattataaataacacctcatgccgggtgccatggcatgtacctgttaccacagctacttcagaggttgaggcagcaggatcacttgagcccaggagttcaagaccagcctgggcaagatagtcagaccactgtctctttcaa

SEQ ID NO: 88697 - DNA, 901 bp, Homo sapiens
tagaggggaagtcctatactgtgtgcttcatagtggtatttctaatgataacttttgtgggaaagcagcctcgttatagctggatcctagattagtccagtgaattttaataagaaattacactgttgtaaactcacctcttatgcattggtcagtgatgagatatatatataaatagatagatagataaaatttgctcttatatagccatttattcatcattggccctgtttggcccatcctcagtgtggctgtgagattattgataactggtcactgtcagataaatcacattctattaggaaacacctatataggttatgcagaaacatgcagaaatgccacctgtccatacttacgtggctttacataaacaaaagactgtcttgtctttgtggtgactgaatttacaacgtcctcccctggaaatggaaaagtacctatcaggagatgtatgacaaaagaaattatcaagcctgacttcatatatattatgaacagtctagaggaagcatctttcttagaactaaggaggtctgctgaacattggccacattctggactttcatgaaaatcatggacccagagttggggttaagccacttagaaaaagctgttgaaaacatctcaaaggccactgaacaatttttaaattacacttaacatgccaggtatctaggtatctagtgcttttagcaatattatcaatattatcaaggtcccagcttctttgtgtccttcccccttgcgatcctccctgcctcagccttccgagtagctgggattataggcatgagccaccatacctgactacagtatattttgaagtactgtataaaggtactttataactattttttcttttctttttctttccagaccagcctgggcaacatagcaa

SEQ ID NO: 88698 - DNA, 683 bp, Homo sapiens
  misc_feature (648)..(648): n is a, c, g, or t
  misc_feature (656)..(656): n is a, c, g, or t
  misc_feature (658)..(658): n is a, c, g, or t
  misc_feature (663)..(663): n is a, c, g, or t
  misc_feature (671)..(671): n is a, c, g, or t
tagaggggaagtcctatactgtgtgcttcatagtggtatttctaatgataacttttgtgggaaagcagcctcgttatagctggatcctagattagtccagtgaattttaataagaaattacactgttgtaaactcacctcttatgcattggtcagtgatgagatatatatataaatagatagatagataaaatttgctcttatatagccatttattcatcattggccctgtttggcccatcctcagtgtggctgtgagattattgataactggtcactgtcagataaatcacattctattaggaaacacctatataggttatgcagaaacatgcagaaatgccacctgtccatacttacgtggctttacataaacaaaagactgtcttgtctttgtggtgactgaatttacaacgtcctcccctggaaatggaaaagtacctatcaggagatgtatgacaaaagaaattatcaagcctgacttcatatatattatgaacagtctagaggaagcatctttcttagaactaaggaggtctgctgaacattggccacattctggactttcatgaaaatcatggacccagagttggggttaagccacttagaaaaagctgttgaaaacatctcaaaggccactgcactccancctgggcnanagagngagactcngtcaaaaaaaaa

SEQ ID NO: 88699 - DNA, 2579 bp, Homo sapiens
tagaggggaagtcctatactgtgtgcttcatagtggtatttctaatgataacttttgtgggaaagcagcctcgttatagctggatcctagattagtccagtgaattttaataagaaattacactgttgtaaactcacctcttatgcattggtcagtgatgagatatatatataaatagatagatagataaaatttgctcttatatagccatttattcatcattggccctgtttggcccatcctcagtgtggctgtgagattattgataactggtcactgtcagataaatcacattctattaggaaacacctatataggttatgcagaaacatgcagaaatgccacctgtccatacttacgtggctttacataaacaaaagactgtcttgtctttgtggtgactgaatttacaacgtcctcccctggaaatggaaaagtacctatcaggagatgtatgacaaaagaaattatcaagcctgacttcatatatattatgaacagtctagaggaagcatctttcttagaactaaggaggtctgctgaacattggccacattctggactttcatgaaaatcatggacccagagttggggttaagccacttagaaaaagctgttgaaaacatctcaaaggccactgaacaatttttaaattacacttaacatgccaggtatctaggtatctagtgcttttagcaatattatcaatattatcaaggtcccagcttctttgtgtccttcccccttgcgatcctcttttttttttttttttttttgctttttaaaaaatagtgacagagtcttgctgtatgacccaggctggtctccaactcctaggctcaagccatcctcccacctcggtctcccaaggtgctgggattacaggcgtgagccaccctacccggcctaggatccatgtttgctttttatcgttaggtttttttttctcaatgagtacaatatgacttcttgttgtaacagacattttaatccctaggaaaggctggaagtagagagcaaaaggctttctttcaagtcagtgttttatttgggaatcaagtctttcccaaaaatccctagcaaatttcttcttacatctcattagaaagtaccagtttacaagggagcctgggaaaccttggcaaaggggaatagggttagcattgcctgggtaggccacattgcctccattgaagaaatcagggcttttttttttttttttttttttttggaaaaagagtctcactctgtcgcccaggctggagtgcagtggcagtcttggttcactgcaacctctgccttccgggttcaagcaattctcctgcctcagcctcccgagtagctgggactacaggtgtgcgccaccacacttggctaatttttgtatttttagtagagatggggtttcaccattgttggccaggatggtcttgatctcttgatctcatgatccacccgccttggcctcccaaagtgctgggattacaggcatgagccactgtgcccagcccttttttttttttttttttgacggagtctcgctctcttgcccaggatggagtgtagtggcacgatctcggcttactgtaacctccacctcctaggttcaagcaattctcctgcctcagcctcctgagtagtggggattacaggtgcccgccaccatgtctggctaatttttgtgtttttagtagagacggggtttcaccatgttggccaggctggtcttgaactcctgacctcagatgatccacctgccctgacctccgacagtgctgggattacaggcatagccaccgtgcctgaccagggctcttttagcaaggaaaacgtgaggaatgaatggctgttggtgtgcaacaaatcatacttgctacatgttgtgaaacctgaagttatttgttagtctgtatgaagaatgtaccccagagatgcaccctgtatctgccttatgtctcttacaatggaggttctctcctgttatattgctgaataaactatgtgaactgctaaattgactgaagactagttagtttatcactaactctttaatgaagaatttcactatcctacaactcctcctaaaaagtgaaaatttactttggagagagtgctttcgagaatagtattatgatcagtattattgcccctaaattttttaattattagagaatgcttatgttacaaggacatatactaagaaacattctacaaatgtgaaaatttaaatatcagcaaaatagagaaaaggtttttgtttttgttttagtcaatatctccattaaatagtaagatcagattaaaaggatttatatcattgatttctcaaatcaatacctaagcagtacctgtgagagcttgtttaaaaatggagatttcttggtctgctttagaaattttgattcctcaggttgcttgtagggcccaggaatctgcatattataaataacacctcatgccgggtgccatggcatgtacctgttaccacagctacttcagaggttgaggcagcaggatcacttgagcccaggagttcaagaccagcctgggcaagatagtcagaccactgtctctttcaa

SEQ ID NO: 88700 - DNA, 1129 bp, Homo sapiens
  misc_feature (1094)..(1094): n is a, c, g, or t
  misc_feature (1102)..(1102): n is a, c, g, or t
  misc_feature (1104)..(1104): n is a, c, g, or t
  misc_feature (1109)..(1109): n is a, c, g, or t
  misc_feature (1117)..(1117): n is a, c, g, or t
tagaggggaagtcctatactgtgtgcttcatagtggtatttctaatgataacttttgtgggaaagcagcctcgttatagctggatcctagattagtccagtgaattttaataagaaattacactgttgtaaactcacctcttatgcattggtcagtgatgagatatatatataaatagatagatagataaaatttgctcttatatagccatttattcatcattggccctgtttggcccatcctcagtgtggctgtgagattattgataactggtcactgtcagataaatcacattctattaggaaacacctatataggttatgcagaaacatgcagaaatgccacctgtccatacttacgtggctttacataaacaaaagactgtcttgtctttgtggtgactgaatttacaacgtcctcccctggaaatggaaaagtacctatcaggagatgtatgacaaaagaaattatcaagcctgacttcatatatattatgaacagtctagaggaagcatctttcttagaactaaggaggtctgctgaacattggccacattctggactttcatgaaaatcatggacccagagttggggttaagccacttagaaaaagctgttgaaaacatctcaaaggccactgaacaatttttaaattacacttaacatgccaggtatctaggtatctagtgcttttagcaatattatcaatattatcaaggtcccagcttctttgtgtccttcccccttgcgatcctcttttttttttttttttttttgctttttaaaaaatagtgacagagtcttgctgtatgacccaggctggtctccaactcctaggctcaagccatcctcccacctcggtctcccaaggtgctgggattacaggcgtgagccaccctacccggcctaggatccatgtttgctttttatcgttaggtttttttttctcaatgagtacaatatgacttcttgttgtaacagacatggtggcgggcacctgtaatccccactactcaggaggctgaggcaggagaattgcttgaacctaggaggtggaggttacagtaagccgagatcgtgccactacactccancctgggcnanagagngagactcngtcaaaaaaaaa

SEQ ID NO: 88701 - DNA, 7679 bp, Homo sapiens
gcgggccgctgctgcctctccttgtggtggccgcgtgcgtcctgcccggagccggcgggacatgcccggagcgcgcgctggagcggcgcgaggaggaggcgaacgtggtgctcaccgggacggtggaggagatcctcaacgtggacccggtgcagcacacgtactcctgcaaggttcgggtctggcggtacttgaagggcaaagacctggtggcccgggagagcctgctggacggcggcaacaaggtggtgatcagcggctttggagaccccctcatctgtgacaaccaggtgtccactggggacaccaggatcttctttgtgaaccctgcacccccatacctgtggccagcccacaagaacgagctgatgctcaactccagcctcatgcggatcaccctgcggaacctggaggaggtggagttctgtgtggaagataaacccgggacccacttcactccagtgcctccgacgcctcctgatgcgtgccggggaatgctgtgcggcttcggcgccgtgtgcgagcccaacgcggaggggccgggccgggcgtcctgcgtctgcaagaagagcccgtgccccagcgtggtggcgcctgtgtgtgggtcggacgcctccacctacagcaacgaatgcgagctgcagcgggcgcagtgcagccagcagcgccgcatccgcctgctcagccgcgggccgtgcggctcgcgggacccctgctccaacgtgacctgcagcttcggcagcacctgtgcgcgctcggccgacgggctgacggcctcgtgcctgtgccccgcgacctgccgtggcgcccccgaggggaccgtctgcggcagcgacggcgccgactaccccggcgagtgccagctcctgcgccgcgcctgcgcccgccaggagaatgtcttcaagaagttcgacggcccttgtgacccctgtcagggcgccctccctgacccgagccgcagctgccgtgtgaacccgcgcacgcggcgccctgagatgctcctacggcccgagagctgccctgcccggcaggcgccagtgtgtggggacgacggagtcacctacgaaaacgactgtgtcatgggccgatcgggggccgcccggggtctcctcctgcagaaagtgcgctccggccagtgccagggtcgagaccagtgcccggagccctgccggttcaatgccgtgtgcctgtcccgccgtggccgtccccgctgctcctgcgaccgcgtcacctgtgacggggcctacaggcccgtgtgtgcccaggacgggcgcacgtatgacagtgattgctggcggcagcaggctgagtgccggcagcagcgtgccatccccagcaagcaccagggcccgtgtgaccaggccccgtccccatgcctcggggtgcagtgtgcatttggggcgacgtgtgctgtgaagaacgggcaggcagcgtgtgaatgcctgcaggcgtgctcgagcctctacgatcctgtgtgcggcagcgacggcgtcacatacggcagcgcgtgcgagctggaggccacggcctgtaccctcgggcgggagatccaggtggcgcgcaaaggaccctgtgaccgctgcgggcagtgccgctttggagccctgtgcgaggccgagaccgggcgctgcgtgtgcccctctgaatgcgtggctttggcccagcccgtgtgtggctccgacgggcacacgtaccccagcgagtgcatgctgcacgtgcacgcctgcacacaccagatcagcctgcacgtggcctcagctggaccctgtgagacctgtggagatgccgtgtgtgcttttggggctgtgtgctccgcagggcagtgtgtgtgtccccggtgtgagcaccccccgcccggccccgtgtgtggcagcgacggtgtcacctacggcagtgcctgcgagctacgggaagccgcctgcctccagcagacacagatcgaggaggcccgggcagggccgtgcgagcaggccgagtgcggttccggaggctctggctctggggaggacggtgactgtgagcaggagctgtgccggcagcgcggtggcatctgggacgaggactcggaggacgggccgtgtgtctgtgacttcagctgccagagtgtcccaggcagcccggtgtgcggctcagatggggtcacctacagcaccgagtgtgagctgaagaaggccaggtgtgagtcacagcgagggctctacgtagcggcccagggagcctgccgaggccccaccttcgccccgctgccgcctgtggcccccttacactgtgcccagacgccctacggctgctgccaggacaatatcaccgcagcccggggcgtgggcctggctggctgccccagtgcctgccagtgcaacccccatggctcttacggcggcacctgtgacccagccacaggccagtgctcctgccgcccaggtgtggggggcctcaggtgtgaccgctgtgagcctggcttctggaactttcgaggcatcgtcaccgatggccggagtggctgtacaccctgcagctgtgatccccaaggcgccgtgcgggatgactgtgagcagatgacggggctgtgctcgtgtaagcccggggtggctggacccaagtgtgggcagtgtccagacggccgtgccctgggccccgcgggctgtgaagctgacgcttctgcgcctgcgacctgtgcggagatgcgctgtgagttcggtgcgcggtgcgtggaggagtctggctcagcccactgtgtctgcccgatgctcacctgtccagaggccaacgctaccaaggtctgtgggtcagatggagtcacatacggcaacgagtgtcagctgaagaccatcgcctgccgccagggcctgcaaatctctatccagagcctgggcccgtgccaggaggctgttgctcccagcactcacccgacatctgcctccgtgactgtgaccaccccagggctcctcctgagccaggcactgccggccccccccggcgccctccccctggctcccagcagtaccgcacacagccagaccacccctccgccctcatcgcgacctcggaccactgccagcgtccccaggaccaccgtgtggcccgtgctgacggtgccccccacggcaccctcccctgcacccagcctggtggcgtccgcctttggtgaatctggcagcactgatggaagcagcgatgaggaactgagcggggaccaggaggccagtgggggtggctctggggggctcgagcccttggagggcagcagcgtggccacccctgggccacctgtcgagagggcttcctgctacaactccgcgttgggctgctgctctgatgggaagacgccctcgctggacgcagagggctccaactgccccgccaccaaggtgttccagggcgtcctggagctggagggcgtcgagggccaggagctgttctacacgcccgagatggctgaccccaagtcagaactgttcggggagacagccaggagcattgagagcaccctggacgacctcttccggaattcagacgtcaagaaggatttccggagtgtccgcttgcgggacctggggcccggcaaatccgtccgcgccattgtggatgtgcactttgaccccaccacagccttcagggcacccgacgtggcccgggccctgctccggcagatccaggtgtccaggcgccggtccttgggggtgaggcggccgctgcaggagcacgtgcgatttatggactttgactggtttcctgcgtttatcacgggggccacgtcaggagccattgctgcgggagccacggccagagccaccactgcatcgcgcctgccgtcctctgctgtgacccctcgggccccgcaccccagtcacacaagccagcccgttgccaagaccacggcagcccccaccacacgtcggccccccaccactgcccccagccgtgtgcccggacgtcggcccccggccccccagcagcctccaaagccctgtgactcacagccctgcttccacggggggacctgccaggactgggcattgggcgggggcttcacctgcagctgcccggcaggcaggggaggcgccgtctgtgagaaggtgcttggcgcccctgtgccggccttcgagggccgctccttcctggccttccccaccctccgcgcctaccacacgctgcgcctggcactggaattccgggcgctggagcctcaggggctgctgctgtacaatggcaacgcccggggcaaggacttcctggcattggcgctgctagatggccgcgtgcagctcaggtttgacacaggttcggggccggcggtgctgaccagtgccgtgccggtagagccgggccagtggcaccgcctggagctgtcccggcactggcgccggggcaccctctcggtggatggtgagacccctgttctgggcgagagtcccagtggcaccgacggcctcaacctggacacagacctctttgtgggcggcgtacccgaggaccaggctgccgtggcgctggagcggaccttcgtgggcgccggcctgagggggtgcatccgtttgctggacgtcaacaaccagcgcctggagcttggcattgggccgggggctgccacccgaggctctggcgtgggcgagtgcggggaccacccctgcctgcccaacccctgccatggcggggccccatgccagaacctggaggctggaaggttccattgccagtgcccgcccggccgcgtcggaccaacctgtgccgatgagaagagcccctgccagcccaacccctgccatggggcggcgccctgccgtgtgctgcccgagggtggtgctcagtgcgagtgccccctggggcgtgagggcaccttctgccagacagcctcggggcaggacggctctgggcccttcctggctgacttcaacggcttctcccacctggagctgagaggcctgcacacctttgcacgggacctgggggagaagatggcgctggaggtcgtgttcctggcacgaggccccagcggcctcctgctctacaacgggcagaagacggacggcaagggggacttcgtgtcgctggcactgcgggaccgccgcctggagttccgctacgacctgggcaagggggcagcggtcatcaggagcagggagccagtcaccctgggagcctggaccagggtctcactggagcgaaacggccgcaagggtgccctgcgtgtgggcgacggcccccgtgtgttgggggagtccccggttccgcacaccgtcctcaacctgaaggagccgctctacgtagggggcgctcccgacttcagcaagctggcccgtgctgctgccgtgtcctctggcttcgacggtgccatccagctggtctccctcggaggccgccagctgctgaccccggagcacgtgctgcggcaggtggacgtcacgtcctttgcaggtcacccctgcacccgggcctcaggccacccctgcctcaatggggcctcctgcgtcccgagggaggctgcctatgtgtgcctgtgtcccgggggattctcaggaccgcactgcgagaaggggctggtggagaagtcagcgggggacgtggataccttggcctttgacgggcggacctttgtcgagtacctcaacgctgtgaccgagagcgagaaggcactgcagagcaaccactttgaactgagcctgcgcactgaggccacgcaggggctggtgctctggagtggcaaggccacggagcgggcagactatgtggcactggccattgtggacgggcacctgcaactgagctacaacctgggctcccagcccgtggtgctgcgttccaccgtgcccgtcaacaccaaccgctggttgcgggtcgtggcacatagggagcagagggaaggttccctgcaggtgggcaatgaggcccctgtgaccggctcctccccgctgggcgccacgcagctggacactgatggagccctgtggcttgggggcctgccggagctgcccgtgggcccagcactgcccaaggcctacggcacaggctttgtgggctgcttgcgggatgtggtggtgggccggcacccgctgcacctgctggaggacgccgtcaccaagccagagctgcggccctgccccaccccatgagctggcaccagagccccgcgcccgctgtaattattttctatttttgtaaacttgttgctttttgatatgattttcttgcctgagtgttggccggagggactgctggcccggcctcccttccgtccaggcagccgtgctgcagacagacctagtgctgagggatggacaggcgaggtggcagcgtggagggctcggcgtggatggcagcctcaggacacacacccctgcctcaaggtgctgagcccccgccttgcactgcgcctgccccacggtgtccccgccgggaagcagccccggctcctgaatcaccctcgctccgtcaggcgggactcgtgtcccagagaggaaggggctgctgaggtctgatggggcccttcctccgggtgaccccacagggcctttccaagcccctatttgagctgctccttcctgtgtgtgctctggaccctgcctcggcctcctgcgccaatactgtgacttccaaacaatgttactgctgggcacagctctgcgttgctcccgtgctgcctgcgccagccccaggctgctgaggagcagaggccagaccagggccgatctgggtgtcctgaccctcagctggccctgcccagccaccctggacatgaccgtatccctctgccacaccccaggccctgcgaggggctatcgagaggagctcactgtgggatggggttgacctctgccgcctgcctgggtatctgggcctggccatggctgtgttcttcatgtgttgattttatttgacccctggagtggtgggtctcatctttcccatctcgcctgagagcggctgagggctgcctcactgcaaatcctccccacagcgtcagtgaaagtcgtccttgtctcagaatgaccaggggccagccagtgtctgaccaaggtcaaggggcaggtgcagaggtggcagggatggctccgaagccagaaatgccttaaactgcaacgtcccgtcccttccccacccccatcccatccccacccccagccccagcccagtcctcctaggagcaggacccgatgaagcgggcggcggtggggctgggtgccgtgttactaactctagtatgtttctgtgtcaatcgctgtgaaataaagtctgaaaactttaaaagcaaaaaaaaaaaaaaaaaaaaaaaaaaaaaaaaaaaaaaaaaaaaagaaaaaaaaaaaaaacaaaaaaccaaaaaaaaaaaaaaaaaaaaaaaaaaaaaaaaaaaaaaaaaaaaaaaaaaaaaggggggggggggggggggggggggaggagcaaggcgcaccggggggggggggggggcatcgtaaaagatattaaaaaatttactgaactatccatatgctcacccacagaaatccggaaaggctccttttctaagaataaaaacgggggggaagacagagcgagagtgaagtaccacggggggaggcgggcggacggagagggtgggggcggagaagctcacgcgaggcaggagcggcggacggcaggcgcttaattgtacactacacgacgggcggcgggggggagggtggagctggtgacgggagagg

SEQ ID NO: 88702 - DNA, 3858 bp, Homo sapiens
ccacctacccactggccttcctccccagatacccagagcagcaccagggcagcccggcttgggcggccccccaagtccttgcctaccccctgccacagctggacgacctcttccggaattcagacgtcaagaaggatttccggagtgtccgcttgcgggacctggggcccggcaaatccgtccgcgccattgtggatgtgcactttgaccccaccacagccttcagggcacccgacgtggcccgggccctgctccggcagatccaggtgtccaggcgccggtccttgggggtgaggcggccgctgcaggagcacgtgcgatttatggactttgactggtttcctgcgtttatcacgggggccacgtcaggagccattgctgcgggagccacggccagagccaccactgcatcgcgcctgccgtcctctgctgtgacccctcgggccccgcaccccagtcacacaagccagcccgttgccaagaccacggcagcccccaccacacgtcggccccccaccactgcccccagccgtgtgcccggacgtcggcccccggccccccagcagcctccaaagccctgtgactcacagccctgcttccacggggggacctgccaggactgggcattgggcgggggcttcacctgcagctgcccggcaggcaggggaggcgccgtctgtgagaaggtgcttggcgcccctgtgccggccttcgagggccgctccttcctggccttccccaccctccgcgcctaccacacgctgcgcctggcactggaattccgggcgctggagcctcaggggctgctgctgtacaatggcaacgcccggggcaaggacttcctggcattggcgctgctagatggccgcgtgcagctcaggtttgacacaggttcggggccggcggtgctgaccagtgccgtgccggtagagccgggccagtggcaccgcctggagctgtcccggcactggcgccggggcaccctctcggtggatggtgagacccctgttctgggcgagagtcccagtggcaccgacggcctcaacctggacacagacctctttgtgggcggcgtacccgaggaccaggctgccgtggcgctggagcggaccttcgtgggcgccggcctgagggggtgcatccgtttgctggacgtcaacaaccagcgcctggagcttggcattgggccgggggctgccacccgaggctctggcgtgggcgagtgcggggaccacccctgcctgcccaacccctgccatggcggggccccatgccagaacctggaggctggaaggttccattgccagtgcccgcccggccgcgtcggaccaacctgtgccgatgagaagagcccctgccagcccaacccctgccatggggcggcgccctgccgtgtgctgcccgagggtggtgctcagtgcgagtgccccctggggcgtgagggcaccttctgccagacagcctcggggcaggacggctctgggcccttcctggctgacttcaacggcttctcccacctggagctgagaggcctgcacacctttgcacgggacctgggggagaagatggcgctggaggtcgtgttcctggcacgaggccccagcggcctcctgctctacaacgggcagaagacggacggcaagggggacttcgtgtcgctggcactgcgggaccgccgcctggagttccgctacgacctgggcaagggggcagcggtcatcaggagcagggagccagtcaccctgggagcctggaccagggtctcactggagcgaaacggccgcaagggtgccctgcgtgtgggcgacggcccccgtgtgttgggggagtccccggttccgcacaccgtcctcaacctgaaggagccgctctacgtagggggcgctcccgacttcagcaagctggcccgtgctgctgccgtgtcctctggcttcgacggtgccatccagctggtctccctcggaggccgccagctgctgaccccggagcacgtgctgcggcaggtggacgtcacgtcctttgcaggtcacccctgcacccgggcctcaggccacccctgcctcaatggggcctcctgcgtcccgagggaggctgcctatgtgtgcctgtgtcccgggggattctcaggaccgcactgcgagaaggggctggtggagaagtcagcgggggacgtggataccttggcctttgacgggcggacctttgtcgagtacctcaacgctgtgaccgagagcgagaaggcactgcagagcaaccactttgaactgagcctgcgcactgaggccacgcaggggctggtgctctggagtggcaaggccacggagcgggcagactatgtggcactggccattgtggacgggcacctgcaactgagctacaacctgggctcccagcccgtggtgctgcgttccaccgtgcccgtcaacaccaaccgctggttgcgggtcgtggcacatagggagcagagggaaggttccctgcaggtgggcaatgaggcccctgtgaccggctcctccccgctgggcgccacgcagctggacactgatggagccctgtggcttgggggcctgccggagctgcccgtgggcccagcactgcccaaggcctacggcacaggctttgtgggctgcttgcgggatgtggtggtgggccggcacccgctgcacctgctggaggacgccgtcaccaagccagagctgcggccctgccccaccccatgagctggcaccagagccccgcgcccgctgtaattattttctatttttgtaaacttgttgctttttgatatgattttcttgcctgagtgttggccggagggactgctggcccggcctcccttccgtccaggcagccgtgctgcagacagacctagtgctgagggatggacaggcgaggtggcagcgtggagggctcggcgtggatggcagcctcaggacacacacccctgcctcaaggtgctgagcccccgccttgcactgcgcctgccccacggtgtccccgccgggaagcagccccggctcctgaatcaccctcgctccgtcaggcgggactcgtgtcccagagaggaaggggctgctgaggtctgatggggcccttcctccgggtgaccccacagggcctttccaagcccctatttgagctgctccttcctgtgtgtgctctggaccctgcctcggcctcctgcgccaatactgtgacttccaaacaatgttactgctgggcacagctctgcgttgctcccgtgctgcctgcgccagccccaggctgctgaggagcagaggccagaccagggccgatctgggtgtcctgaccctcagctggccctgcccagccaccctggacatgaccgtatccctctgccacaccccaggccctgcgaggggctatcgagaggagctcactgtgggatggggttgacctctgccgcctgcctgggtatctgggcctggccatggctgtgttcttcatgtgttgattttatttgacccctggagtggtgggtctcatctttcccatctcgcctgagagcggctgagggctgcctcactgcaaatcctccccacagcgtcagtgaaagtcgtccttgtctcagaatgaccaggggccagccagtgtctgaccaaggtcaaggggcaggtgcagaggtggcagggatggctccgaagccagaaatgccttaaactgcaacgtcccgtcccttccccacccccatcccatccccacccccagccccagcccagtcctcctaggagcaggacccgatgaagcgggcggcggtggggctgggtgccgtgttactaactctagtatgtttctgtgtcaatcgctgtgaaataaagtctgaaaactttaaaagca

SEQ ID NO: 88703 - DNA, 3509 bp, Homo sapiens
gggaggccgaggcaggcggatcacctgaggtcgggagttcgagaccagcctgaccaacatggagacactctgtctctactaaaaatacaaaattagccgggcgtggtggtgggcgcctgtaatcccacctcgtgaggctgaggcaggagaatcgcttgaacctggcaggcggaggttgcggtgagccaggatcgcgccactgcactccagccggggcaaaaagagcaaaactccgtctcaaaaaaaaaaaaaaaaaaaaaagcagggggcggtttcagggataaaagtggggaatcctcggagcttttccagccggccctcccggtcgccctttgcagtgcttggcgcccctgtgccggccttcgagggccgctccttcctggccttccccaccctccgcgcctaccacacgctgcgcctggcactggaattccgggcgctggagcctcaggggctgctgctgtacaatggcaacgcccggggcaaggacttcctggcattggcgctgctagatggccgcgtgcagctcaggtttgacacaggttcggggccggcggtgctgaccagtgccgtgccggtagagccgggccagtggcaccgcctggagctgtcccggcactggcgccggggcaccctctcggtggatggtgagacccctgttctgggcgagagtcccagtggcaccgacggcctcaacctggacacagacctctttgtgggcggcgtacccgaggaccaggctgccgtggcgctggagcggaccttcgtgggcgccggcctgagggggtgcatccgtttgctggacgtcaacaaccagcgcctggagcttggcattgggccgggggctgccacccgaggctctggcgtgggcgagtgcggggaccacccctgcctgcccaacccctgccatggcggggccccatgccagaacctggaggctggaaggttccattgccagtgcccgcccggccgcgtcggaccaacctgtgccgatgagaagagcccctgccagcccaacccctgccatggggcggcgccctgccgtgtgctgcccgagggtggtgctcagtgcgagtgccccctggggcgtgagggcaccttctgccagacagcctcggggcaggacggctctgggcccttcctggctgacttcaacggcttctcccacctggagctgagaggcctgcacacctttgcacgggacctgggggagaagatggcgctggaggtcgtgttcctggcacgaggccccagcggcctcctgctctacaacgggcagaagacggacggcaagggggacttcgtgtcgctggcactgcgggaccgccgcctggagttccgctacgacctgggcaagggggcagcggtcatcaggagcagggagccagtcaccctgggagcctggaccagggtctcactggagcgaaacggccgcaagggtgccctgcgtgtgggcgacggcccccgtgtgttgggggagtccccggttccgcacaccgtcctcaacctgaaggagccgctctacgtagggggcgctcccgacttcagcaagctggcccgtgctgctgccgtgtcctctggcttcgacggtgccatccagctggtctccctcggaggccgccagctgctgaccccggagcacgtgctgcggcaggtggacgtcacgtcctttgcaggtcacccctgcacccgggcctcaggccacccctgcctcaatggggcctcctgcgtcccgagggaggctgcctatgtgtgcctgtgtcccgggggattctcaggaccgcactgcgagaaggggctggtggagaagtcagcgggggacgtggataccttggcctttgacgggcggacctttgtcgagtacctcaacgctgtgaccgagagcgagaaggcactgcagagcaaccactttgaactgagcctgcgcactgaggccacgcaggggctggtgctctggagtggcaaggccacggagcgggcagactatgtggcactggccattgtggacgggcacctgcaactgagctacaacctgggctcccagcccgtggtgctgcgttccaccgtgcccgtcaacaccaaccgctggttgcgggtcgtggcacatagggagcagagggaaggttccctgcaggtgggcaatgaggcccctgtgaccggctcctccccgctgggcgccacgcagctggacactgatggagccctgtggcttgggggcctgccggagctgcccgtgggcccagcactgcccaaggcctacggcacaggctttgtgggctgcttgcgggatgtggtggtgggccggcacccgctgcacctgctggaggacgccgtcaccaagccagagctgcggccctgccccaccccatgagctggcaccagagccccgcgcccgctgtaattattttctatttttgtaaacttgttgctttttgatatgattttcttgcctgagtgttggccggagggactgctggcccggcctcccttccgtccaggcagccgtgctgcagacagacctagtgctgagggatggacaggcgaggtggcagcgtggagggctcggcgtggatggcagcctcaggacacacacccctgcctcaaggtgctgagcccccgccttgcactgcgcctgccccacggtgtccccgccgggaagcagccccggctcctgaatcaccctcgctccgtcaggcgggactcgtgtcccagagaggaaggggctgctgaggtctgatggggcccttcctccgggtgaccccacagggcctttccaagcccctatttgagctgctccttcctgtgtgtgctctggaccctgcctcggcctcctgcgccaatactgtgacttccaaacaatgttactgctgggcacagctctgcgttgctcccgtgctgcctgcgccagccccaggctgctgaggagcagaggccagaccagggccgatctgggtgtcctgaccctcagctggccctgcccagccaccctggacatgaccgtatccctctgccacaccccaggccctgcgaggggctatcgagaggagctcactgtgggatggggttgacctctgccgcctgcctgggtatctgggcctggccatggctgtgttcttcatgtgttgattttatttgacccctggagtggtgggtctcatctttcccatctcgcctgagagcggctgagggctgcctcactgcaaatcctccccacagcgtcagtgaaagtcgtccttgtctcagaatgaccaggggccagccagtgtctgaccaaggtcaaggggcaggtgcagaggtggcagggatggctccgaagccagaaatgccttaaactgcaacgtcccgtcccttccccacccccatcccatccccacccccagccccagcccagtcctcctaggagcaggacccgatgaagcgggcggcggtggggctgggtgccgtgttactaactctagtatgtttctgtgtcaatcgctgtgaaataaagtctgaaaactttaaaagca

SEQ ID NO: 88704 - DNA, 7305 bp, Homo sapiens
gcgggccgctgctgcctctccttgtggtggccgcgtgcgtcctgcccggagccggcgggacatgcccggagcgcgcgctggagcggcgcgaggaggaggcgaacgtggtgctcaccgggacggtggaggagatcctcaacgtggacccggtgcagcacacgtactcctgcaaggttcgggtctggcggtacttgaagggcaaagacctggtggcccgggagagcctgctggacggcggcaacaaggtggtgatcagcggctttggagaccccctcatctgtgacaaccaggtgtccactggggacaccaggatcttctttgtgaaccctgcacccccatacctgtggccagcccacaagaacgagctgatgctcaactccagcctcatgcggatcaccctgcggaacctggaggaggtggagttctgtgtggaagataaacccgggacccacttcactccagtgcctccgacgcctcctgatgcgtgccggggaatgctgtgcggcttcggcgccgtgtgcgagcccaacgcggaggggccgggccgggcgtcctgcgtctgcaagaagagcccgtgccccagcgtggtggcgcctgtgtgtgggtcggacgcctccacctacagcaacgaatgcgagctgcagcgggcgcagtgcagccagcagcgccgcatccgcctgctcagccgcgggccgtgcggctcgcgggacccctgctccaacgtgacctgcagcttcggcagcacctgtgcgcgctcggccgacgggctgacggcctcgtgcctgtgccccgcgacctgccgtggcgcccccgaggggaccgtctgcggcagcgacggcgccgactaccccggcgagtgccagctcctgcgccgcgcctgcgcccgccaggagaatgtcttcaagaagttcgacggcccttgtgacccctgtcagggcgccctccctgacccgagccgcagctgccgtgtgaacccgcgcacgcggcgccctgagatgctcctacggcccgagagctgccctgcccggcaggcgccagtgtgtggggacgacggagtcacctacgaaaacgactgtgtcatgggccgatcgggggccgcccggggtctcctcctgcagaaagtgcgctccggccagtgccagggtcgagaccagtgcccggagccctgccggttcaatgccgtgtgcctgtcccgccgtggccgtccccgctgctcctgcgaccgcgtcacctgtgacggggcctacaggcccgtgtgtgcccaggacgggcgcacgtatgacagtgattgctggcggcagcaggctgagtgccggcagcagcgtgccatccccagcaagcaccagggcccgtgtgaccaggccccgtccccatgcctcggggtgcagtgtgcatttggggcgacgtgtgctgtgaagaacgggcaggcagcgtgtgaatgcctgcaggcgtgctcgagcctctacgatcctgtgtgcggcagcgacggcgtcacatacggcagcgcgtgcgagctggaggccacggcctgtaccctcgggcgggagatccaggtggcgcgcaaaggaccctgtgaccgctgcgggcagtgccgctttggagccctgtgcgaggccgagaccgggcgctgcgtgtgcccctctgaatgcgtggctttggcccagcccgtgtgtggctccgacgggcacacgtaccccagcgagtgcatgctgcacgtgcacgcctgcacacaccagatcagcctgcacgtggcctcagctggaccctgtgagacctgtggagatgccgtgtgtgcttttggggctgtgtgctccgcagggcagtgtgtgtgtccccggtgtgagcaccccccgcccggccccgtgtgtggcagcgacggtgtcacctacggcagtgcctgcgagctacgggaagccgcctgcctccagcagacacagatcgaggaggcccgggcagggccgtgcgagcaggccgagtgcggttccggaggctctggctctggggaggacggtgactgtgagcaggagctgtgccggcagcgcggtggcatctgggacgaggactcggaggacgggccgtgtgtctgtgacttcagctgccagagtgtcccaggcagcccggtgtgcggctcagatggggtcacctacagcaccgagtgtgagctgaagaaggccaggtgtgagtcacagcgagggctctacgtagcggcccagggagcctgccgaggccccaccttcgccccgctgccgcctgtggcccccttacactgtgcccagacgccctacggctgctgccaggacaatatcaccgcagcccggggcgtgggcctggctggctgccccagtgcctgccagtgcaacccccatggctcttacggcggcacctgtgacccagccacaggccagtgctcctgccgcccaggtgtggggggcctcaggtgtgaccgctgtgagcctggcttctggaactttcgaggcatcgtcaccgatggccggagtggctgtacaccctgcagctgtgatccccaaggcgccgtgcgggatgactgtgagcagatgacggggctgtgctcgtgtaagcccggggtggctggacccaagtgtgggcagtgtccagacggccgtgccctgggccccgcgggctgtgaagctgacgcttctgcgcctgcgacctgtgcggagatgcgctgtgagttcggtgcgcggtgcgtggaggagtctggctcagcccactgtgtctgcccgatgctcacctgtccagaggccaacgctaccaaggtctgtgggtcagatggagtcacatacggcaacgagtgtcagctgaagaccatcgcctgccgccagggcctgcaaatctctatccagagcctgggcccgtgccaggaggctgttgctcccagcactcacccgacatctgcctccgtgactgtgaccaccccagggctcctcctgagccaggcactgccggccccccccggcgccctccccctggctcccagcagtaccgcacacagccagaccacccctccgccctcatcgcgacctcggaccactgccagcgtccccaggaccaccgtgtggcccgtgctgacggtgccccccacggcaccctcccctgcacccagcctggtggcgtccgcctttggtgaatctggcagcactgatggaagcagcgatgaggaactgagcggggaccaggaggccagtgggggtggctctggggggctcgagcccttggagggcagcagcgtggccacccctgggccacctgtcgagagggcttcctgctacaactccgcgttgggctgctgctctgatgggaagacgccctcgctggacgcagagggctccaactgccccgccaccaaggtgttccagggcgtcctggagctggagggcgtcgagggccaggagctgttctacacgcccgagatggctgaccccaagtcagaactgttcggggagacagccaggagcattgagagcaccctggacgacctcttccggaattcagacgtcaagaaggatttccggagtgtccgcttgcgggacctggggcccggcaaatccgtccgcgccattgtggatgtgcactttgaccccaccacagccttcagggcacccgacgtggcccgggccctgctccggcagatccaggtgtccaggcgccggtccttgggggtgaggcggccgctgcaggagcacgtgcgatttatggactttgactggtttcctgcgtttatcacgggggccacgtcaggagccattgctgcgggagccacggccagagccaccactgcatcgcgcctgccgtcctctgctgtgacccctcgggccccgcaccccagtcacacaagccagcccgttgccaagaccacggcagcccccaccacacgtcggccccccaccactgcccccagccgtgtgcccggacgtcggcccccggccccccagcagcctccaaagccctgtgactcacagccctgcttccacggggggacctgccaggactgggcattgggcgggggcttcacctgcagctgcccggcaggcaggggaggcgccgtctgtgagaaggtgcttggcgcccctgtgccggccttcgagggccgctccttcctggccttccccaccctccgcgcctaccacacgctgcgcctggcactggaattccgggcgctggagcctcaggggctgctgctgtacaatggcaacgcccggggcaaggacttcctggcattggcgctgctagatggccgcgtgcagctcaggtttgacacaggttcggggccggcggtgctgaccagtgccgtgccggtagagccgggccagtggcaccgcctggagctgtcccggcactggcgccggggcaccctctcggtggatggtgagacccctgttctgggcgagagtcccagtggcaccgacggcctcaacctggacacagacctctttgtgggcggcgtacccgaggaccaggctgccgtggcgctggagcggaccttcgtgggcgccggcctgagggggtgcatccgtttgctggacgtcaacaaccagcgcctggagcttggcattgggccgggggctgccacccgaggctctggcgtgggcgagtgcggggaccacccctgcctgcccaacccctgccatggcggggccccatgccagaacctggaggctggaaggttccattgccagtgcccgcccggccgcgtcggaccaacctgtgccgatgagaagagcccctgccagcccaacccctgccatggggcggcgccctgccgtgtgctgcccgagggtggtgctcagtgcgagtgccccctggggcgtgagggcaccttctgccagacagcctcggggcaggacggctctgggcccttcctggctgacttcaacggcttctcccacctggagctgagaggcctgcacacctttgcacgggacctgggggagaagatggcgctggaggtcgtgttcctggcacgaggccccagcggcctcctgctctacaacgggcagaagacggacggcaagggggacttcgtgtcgctggcactgcgggaccgccgcctggagttccgctacgacctgggcaagggggcagcggtcatcaggagcagggagccagtcaccctgggagcctggaccagggtctcactggagcgaaacggccgcaagggtgccctgcgtgtgggcgacggcccccgtgtgttgggggagtccccggttccgcacaccgtcctcaacctgaaggagccgctctacgtagggggcgctcccgacttcagcaagctggcccgtgctgctgccgtgtcctctggcttcgacggtgccatccagctggtctccctcggaggccgccagctgctgaccccggagcacgtgctgcggcaggtggacgtcacgtcctttgcaggtcacccctgcacccgggcctcaggccacccctgcctcaatggggcctcctgcgtcccgagggaggctgcctatgtgtgcctgtgtcccgggggattctcaggaccgcactgcgagaaggggctggtggagaagtcagcgggggacgtggataccttggcctttgacgggcggacctttgtcgagtacctcaacgctgtgaccgagacgaactggccaatgagatccccgtccccgaaactctggattccggggcccttcacaggcgagaaggcactgcagagcaaccactttgaactgagcctgcgcactgaggccacgcaggggctggtgctctggagtggcaaggccacggagcgggcagactatgtggcactggccattgtggacgggcacctgcaactgagctacaacctgggctcccagcccgtggtgctgcgttccaccgtgcccgtcaacaccaaccgctggttgcgggtcgtggcacatagggagcagagggaaggttccctgcaggtgggcaatgaggcccctgtgaccggctcctccccgctgggcgccacgcagctggacactgatggagccctgtggcttgggggcctgccggagctgcccgtgggcccagcactgcccaaggcctacggcacaggctttgtgggctgcttgcgggatgtggtggtgggccggcacccgctgcacctgctggaggacgccgtcaccaagccagagctgcggccctgccccaccccatgagctggcaccagagccccgcgcccgctgtaattattttctatttttgtaaacttgttgctttttgatatgattttcttgcctgagtgttggccggagggactgctggcccggcctcccttccgtccaggcagccgtgctgcagacagacctagtgctgagggatggacaggcgaggtggcagcgtggagggctcggcgtggatggcagcctcaggacacacacccctgcctcaaggtgctgagcccccgccttgcactgcgcctgccccacggtgtccccgccgggaagcagccccggctcctgaatcaccctcgctccgtcaggcgggactcgtgtcccagagaggaaggggctgctgaggtctgatggggcccttcctccgggtgaccccacagggcctttccaagcccctatttgagctgctccttcctgtgtgtgctctggaccctgcctcggcctcctgcgccaatactgtgacttccaaacaatgttactgctgggcacagctctgcgttgctcccgtgctgcctgcgccagccccaggctgctgaggagcagaggccagaccagggccgatctgggtgtcctgaccctcagctggccctgcccagccaccctggacatgaccgtatccctctgccacaccccaggccctgcgaggggctatcgagaggagctcactgtgggatggggttgacctctgccgcctgcctgggtatctgggcctggccatggctgtgttcttcatgtgttgattttatttgacccctggagtggtgggtctcatctttcccatctcgcctgagagcggctgagggctgcctcactgcaaatcctccccacagcgtcagtgaaagtcgtccttgtctcagaatgaccaggggccagccagtgtctgaccaaggtcaaggggcaggtgcagaggtggcagggatggctccgaagccagaaatgccttaaactgcaacgtcccgtcccttccccacccccatcccatccccacccccagccccagcccagtcctcctaggagcaggacccgatgaagcgggcggcggtggggctgggtgccgtgttactaactctagtatgtttctgtgtcaatcgctgtgaaataaagtctgaaaactttaaaagca

SEQ ID NO: 88705 - DNA, 7142 bp, Homo sapiens
gcgggccgctgctgcctctccttgtggtggccgcgtgcgtcctgcccggagccggcgggacatgcccggagcgcgcgctggagcggcgcgaggaggaggcgaacgtggtgctcaccgggacggtggaggagatcctcaacgtggacccggtgcagcacacgtactcctgcaaggttcgggtctggcggtacttgaagggcaaagacctggtggcccgggagagcctgctggacggcggcaacaaggtggtgatcagcggctttggagaccccctcatctgtgacaaccaggtgtccactggggacaccaggatcttctttgtgaaccctgcacccccatacctgtggccagcccacaagaacgagctgatgctcaactccagcctcatgcggatcaccctgcggaacctggaggaggtggagttctgtgtggaagataaacccgggacccacttcactccagtgcctccgacgcctcctgatgcgtgccggggaatgctgtgcggcttcggcgccgtgtgcgagcccaacgcggaggggccgggccgggcgtcctgcgtctgcaagaagagcccgtgccccagcgtggtggcgcctgtgtgtgggtcggacgcctccacctacagcaacgaatgcgagctgcagcgggcgcagtgcagccagcagcgccgcatccgcctgctcagccgcgggccgtgcggctcgcgggacccctgctccaacgtgacctgcagcttcggcagcacctgtgcgcgctcggccgacgggctgacggcctcgtgcctgtgccccgcgacctgccgtggcgcccccgaggggaccgtctgcggcagcgacggcgccgactaccccggcgagtgccagctcctgcgccgcgcctgcgcccgccaggagaatgtcttcaagaagttcgacggcccttgtgacccctgtcagggcgccctccctgacccgagccgcagctgccgtgtgaacccgcgcacgcggcgccctgagatgctcctacggcccgagagctgccctgcccggcaggcgccagtgtgtggggacgacggagtcacctacgaaaacgactgtgtcatgggccgatcgggggccgcccggggtctcctcctgcagaaagtgcgctccggccagtgccagggtcgagaccagtgcccggagccctgccggttcaatgccgtgtgcctgtcccgccgtggccgtccccgctgctcctgcgaccgcgtcacctgtgacggggcctacaggcccgtgtgtgcccaggacgggcgcacgtatgacagtgattgctggcggcagcaggctgagtgccggcagcagcgtgccatccccagcaagcaccagggcccgtgtgaccaggccccgtccccatgcctcggggtgcagtgtgcatttggggcgacgtgtgctgtgaagaacgggcaggcagcgtgtgaatgcctgcaggcgtgctcgagcctctacgatcctgtgtgcggcagcgacggcgtcacatacggcagcgcgtgcgagctggaggccacggcctgtaccctcgggcgggagatccaggtggcgcgcaaaggaccctgtgaccgctgcgggcagtgccgctttggagccctgtgcgaggccgagaccgggcgctgcgtgtgcccctctgaatgcgtggctttggcccagcccgtgtgtggctccgacgggcacacgtaccccagcgagtgcatgctgcacgtgcacgcctgcacacaccagatcagcctgcacgtggcctcagctggaccctgtgagacctgtggagatgccgtgtgtgcttttggggctgtgtgctccgcagggcagtgtgtgtgtccccggtgtgagcaccccccgcccggccccgtgtgtggcagcgacggtgtcacctacggcagtgcctgcgagctacgggaagccgcctgcctccagcagacacagatcgaggaggcccgggcagggccgtgcgagcaggccgagtgcggttccggaggctctggctctggggaggacggtgactgtgagcaggagctgtgccggcagcgcggtggcatctgggacgaggactcggaggacgggccgtgtgtctgtgacttcagctgccagagtgtcccaggcagcccggtgtgcggctcagatggggtcacctacagcaccgagtgtgagctgaagaaggccaggtgtgagtcacagcgagggctctacgtagcggcccagggagcctgccgaggccccaccttcgccccgctgccgcctgtggcccccttacactgtgcccagacgccctacggctgctgccaggacaatatcaccgcagcccggggcgtgggcctggctggctgccccagtgcctgccagtgcaacccccatggctcttacggcggcacctgtgacccagccacaggccagtgctcctgccgcccaggtgtggggggcctcaggtgtgaccgctgtgagcctggcttctggaactttcgaggcatcgtcaccgatggccggagtggctgtacaccctgcagctgtgatccccaaggcgccgtgcgggatgactgtgagcagatgacggggctgtgctcgtgtaagcccggggtggctggacccaagtgtgggcagtgtccagacggccgtgccctgggccccgcgggctgtgaagctgacgcttctgcgcctgcgacctgtgcggagatgcgctgtgagttcggtgcgcggtgcgtggaggagtctggctcagcccactgtgtctgcccgatgctcacctgtccagaggccaacgctaccaaggtctgtgggtcagatggagtcacatacggcaacgagtgtcagctgaagaccatcgcctgccgccagggcctgcaaatctctatccagagcctgggcccgtgccaggaggctgttgctcccagcactcacccgacatctgcctccgtgactgtgaccaccccagggctcctcctgagccaggcactgccggccccccccggcgccctccccctggctcccagcagtaccgcacacagccagaccacccctccgccctcatcgcgacctcggaccactgccagcgtccccaggaccaccgtgtggcccgtgctgacggtgccccccacggcaccctcccctgcacccagcctggtggcgtccgcctttggtgaatctggcagcactgatggaagcagcgatgaggaactgagcggggaccaggaggccagtgggggtggctctggggggctcgagcccttggagggcagcagcgtggccacccctgggccacctgtcgagagggcttcctgctacaactccgcgttgggctgctgctctgatgggaagacgccctcgctggacgcagagggctccaactgccccgccaccaaggtgttccagggcgtcctggagctggagggcgtcgagggccaggagctgttctacacgcccgagatggctgaccccaagtcagaactgttcggggagacagccaggagcattgagagcaccctggacgacctcttccggaattcagacgtcaagaaggatttccggagtgtccgcttgcgggacctggggcccggcaaatccgtccgcgccattgtggatgtgcactttgaccccaccacagccttcagggcacccgacgtggcccgggccctgctccggcagatccaggtgtccaggcgccggtccttgggggtgaggcggccgctgcaggagcacgtgcgatttatggactttgactggtttcctgcgtttatcacgggggccacgtcaggagccattgctgcgggagccacggccagagccaccactgcatcgcgcctgccgtcctctgctgtgacccctcgggccccgcaccccagtcacacaagccagcccgttgccaagaccacggcagcccccaccacacgtcggccccccaccactgcccccagccgtgtgcccggacgtcggcccccggccccccagcagcctccaaagccctgtgactcacagccctgcttccacggggggacctgccaggactgggcattgggcgggggcttcacctgcagctgcccggcaggcaggggaggcgccgtctgtgagaaggtgcttggcgcccctgtgccggccttcgagggccgctccttcctggccttccccaccctccgcgcctaccacacgctgcgcctggcactggaattccgggcgctggagcctcaggggctgctgctgtacaatggcaacgcccggggcaaggacttcctggcattggcgctgctagatggccgcgtgcagctcaggtttgacacaggttcggggccggcggtgctgaccagtgccgtgccggtagagccgggccagtggcaccgcctggagctgtcccggcactggcgccggggcaccctctcggtggatggtgagacccctgttctgggcgagagtcccagtggcaccgacggcctcaacctggacacagacctctttgtgggcggcgtacccgaggaccaggctgccgtggcgctggagcggaccttcgtgggcgccggcctgagggggtgcatccgtttgctggacgtcaacaaccagcgcctggagcttggcattgggccgggggctgccacccgaggctctggcgtgggcgagtgcggggaccacccctgcctgcccaacccctgccatggcggggccccatgccagaacctggaggctggaaggttccattgccagtgcccgcccggccgcgtcggaccaacctgtgccgatgagaagagcccctgccagcccaacccctgccatggggcggcgccctgccgtgtgctgcccgagggtggtgctcagtgcgagtgccccctggggcgtgagggcaccttctgccagacagcctcggggcaggacggctctgggcccttcctggctgacttcaacggcttctcccacctggagctgagaggcctgcacacctttgcacgggacctgggggagaagatggcgctggaggtcgtgttcctggcacgaggccccagcggcctcctgctctacaacgggcagaagacggacggcaagggggacttcgtgtcgctggcactgcgggaccgccgcctggagttccgctacgacctgggcaagggggcagcggtcatcaggagcagggagccagtcaccctgggagcctggaccagggtctcactggagcgaaacggccgcaagggtgccctgcgtgtgggcgacggcccccgtgtgttgggggagtccccggttccgcacaccgtcctcaacctgaaggagccgctctacgtagggggcgctcccgacttcagcaagctggcccgtgctgctgccgtgtcctctggcttcgacggtgccatccagctggtctccctcggaggccgccagctgctgaccccggagcacgtgctgcggcaggtggacgtcacgtcctttgcaggtcacccctgcacccgggcctcaggccacccctgcctcaatggggcctcctgcgtcccgagggaggctgcctatgtgtgcctgtgtcccgggggattctcaggaccgcactgcgagaaggggctggtggagaagtcagcgggggacgtggataccttggcctttgacgggcggacctttgtcgagtacctcaacgctgtgaccgagagcgagaaggcactgcagagcaaccactttgaactgagcctgcgcactgaggccacgcaggggctggtgctctggagtggcaaggccacggagcgggcagactatgtggcactggccattgtggacgggcacctgcaactgagctacaacctgggctcccagcccgtggtgctgcgttccaccgtgcccgtcaacaccaaccgctggttgcgggtcgtggcacatagggagcagagggaaggttccctgcaggtgggcaatgaggcccctgtgaccggctcctccccgctgggcgccacgcagctggacactgatggagccctgtggcttgggggcctgccggagctgcccgtgggcccagcactgcccaaggcctacggcacaggctttgtgggctgcttgcgggatgtggtggtgggccggcacccgctgcacctgctggaggacgccgtcaccaagccagagctgcggccctgccccaccccatgagctggcaccagagccccgcgcccgctgtaattattttctatttttgtaaacttgttgctttttgatatgattttcttgcctgagtgttggccggagggactgctggcccggcctcccttccgtccaggcagccgtgctgcagacagacctagtgctgagggatggacaggcgaggtggcagcgtggagggctcggcgtggatggcagcctcaggacacacacccctgcctcaaggtgctgagcccccgccttgcactgcgcctgccccacggtgtccccgccgggaagcagccccggctcctgaatcaccctcgctccgtcaggcgggactcgtgtcccagagaggaaggggctgctgaggtctgatggggcccttcctccgggtgaccccacagggcctttccaagcccctatttgagctgctccttcctgtgtgtgctctggaccctgcctcggcctcctgcgccaatactgtgacttccaaacaatgttactgctgggcacagctctgcgttgctcccgtgctgcctgcgccagccccaggctgctgaggagcagaggccagaccagggccgatctgggtgtcctgaccctcagctggccctgcccagccaccctggacatgaccgtatccctctgccacaccccaggccctgcgaggggctatcgagaggagctcactgtgggatggggttgacctctgccgcctgcctgggtatctgggcctggccatggctgtgttcttcatgtgttgattttatttgacccctggagtggtgggtctcatctttcccatctcgcctgagagcggctgagggctgcctcactgcaaatcctccccacagcgtcagtgaaagtcgtccttgtctcagaatgaccaggggccagccagtgtctgaccaagccagggcacgtcaaagttgcggatcgtcccaacaaatgtaagaaaacagacactaagccaaaaaacaaaaacaggcaagaagagaaaacagaacgaaagaaacaaagaacacgacacaaacaacaaac

SEQ ID NO: 88706 - DNA, 6959 bp, Homo sapiens
gcgggccgctgctgcctctccttgtggtggccgcgtgcgtcctgcccggagccggcgggacatgcccggagcgcgcgctggagcggcgcgaggaggaggcgaacgtggtgctcaccgggacggtggaggagatcctcaacgtggacccggtgcagcacacgtactcctgcaaggttcgggtctggcggtacttgaagggcaaagacctggtggcccgggagagcctgctggacggcggcaacaaggtggtgatcagcggctttggagaccccctcatctgtgacaaccaggtgtccactggggacaccaggatcttctttgtgaaccctgcacccccatacctgtggccagcccacaagaacgagctgatgctcaactccagcctcatgcggatcaccctgcggaacctggaggaggtggagttctgtgtggaagataaacccgggacccacttcactccagtgcctccgacgcctcctgatgcgtgccggggaatgctgtgcggcttcggcgccgtgtgcgagcccaacgcggaggggccgggccgggcgtcctgcgtctgcaagaagagcccgtgccccagcgtggtggcgcctgtgtgtgggtcggacgcctccacctacagcaacgaatgcgagctgcagcgggcgcagtgcagccagcagcgccgcatccgcctgctcagccgcgggccgtgcggctcgcgggacccctgctccaacgtgacctgcagcttcggcagcacctgtgcgcgctcggccgacgggctgacggcctcgtgcctgtgccccgcgacctgccgtggcgcccccgaggggaccgtctgcggcagcgacggcgccgactaccccggcgagtgccagctcctgcgccgcgcctgcgcccgccaggagaatgtcttcaagaagttcgacggcccttgtgacccctgtcagggcgccctccctgacccgagccgcagctgccgtgtgaacccgcgcacgcggcgccctgagatgctcctacggcccgagagctgccctgcccggcaggcgccagtgtgtggggacgacggagtcacctacgaaaacgactgtgtcatgggccgatcgggggccgcccggggtctcctcctgcagaaagtgcgctccggccagtgccagggtcgagaccagtgcccggagccctgccggttcaatgccgtgtgcctgtcccgccgtggccgtccccgctgctcctgcgaccgcgtcacctgtgacggggcctacaggcccgtgtgtgcccaggacgggcgcacgtatgacagtgattgctggcggcagcaggctgagtgccggcagcagcgtgccatccccagcaagcaccagggcccgtgtgaccaggccccgtccccatgcctcggggtgcagtgtgcatttggggcgacgtgtgctgtgaagaacgggcaggcagcgtgtgaatgcctgcaggcgtgctcgagcctctacgatcctgtgtgcggcagcgacggcgtcacatacggcagcgcgtgcgagctggaggccacggcctgtaccctcgggcgggagatccaggtggcgcgcaaaggaccctgtgaccgctgcgggcagtgccgctttggagccctgtgcgaggccgagaccgggcgctgcgtgtgcccctctgaatgcgtggctttggcccagcccgtgtgtggctccgacgggcacacgtaccccagcgagtgcatgctgcacgtgcacgcctgcacacaccagatcagcctgcacgtggcctcagctggaccctgtgagacctgtggagatgccgtgtgtgcttttggggctgtgtgctccgcagggcagtgtgtgtgtccccggtgtgagcaccccccgcccggccccgtgtgtggcagcgacggtgtcacctacggcagtgcctgcgagctacgggaagccgcctgcctccagcagacacagatcgaggaggcccgggcagggccgtgcgagcaggccgagtgcggttccggaggctctggctctggggaggacggtgactgtgagcaggagctgtgccggcagcgcggtggcatctgggacgaggactcggaggacgggccgtgtgtctgtgacttcagctgccagagtgtcccaggcagcccggtgtgcggctcagatggggtcacctacagcaccgagtgtgagctgaagaaggccaggtgtgagtcacagcgagggctctacgtagcggcccagggagcctgccgaggccccaccttcgccccgctgccgcctgtggcccccttacactgtgcccagacgccctacggctgctgccaggacaatatcaccgcagcccggggcgtgggcctggctggctgccccagtgcctgccagtgcaacccccatggctcttacggcggcacctgtgacccagccacaggccagtgctcctgccgcccaggtgtggggggcctcaggtgtgaccgctgtgagcctggcttctggaactttcgaggcatcgtcaccgatggccggagtggctgtacaccctgcagctgtgatccccaaggcgccgtgcgggatgactgtgagcagatgacggggctgtgctcgtgtaagcccggggtggctggacccaagtgtgggcagtgtccagacggccgtgccctgggccccgcgggctgtgaagctgacgcttctgcgcctgcgacctgtgcggagatgcgctgtgagttcggtgcgcggtgcgtggaggagtctggctcagcccactgtgtctgcccgatgctcacctgtccagaggccaacgctaccaaggtctgtgggtcagatggagtcacatacggcaacgagtgtcagctgaagaccatcgcctgccgccagggcctgcaaatctctatccagagcctgggcccgtgccaggaggctgttgctcccagcactcacccgacatctgcctccgtgactgtgaccaccccagggctcctcctgagccaggcactgccggccccccccggcgccctccccctggctcccagcagtaccgcacacagccagaccacccctccgccctcatcgcgacctcggaccactgccagcgtccccaggaccaccgtgtggcccgtgctgacggtgccccccacggcaccctcccctgcacccagcctggtggcgtccgcctttggtgaatctggcagcactgatggaagcagcgatgaggaactgagcggggaccaggaggccagtgggggtggctctggggggctcgagcccttggagggcagcagcgtggccacccctgggccacctgtcgagagggcttcctgctacaactccgcgttgggctgctgctctgatgggaagacgccctcgctggacgcagagggctccaactgccccgccaccaaggtgttccagggcgtcctggagctggagggcgtcgagggccaggagctgttctacacgcccgagatggctgaccccaagtcagaactgttcggggagacagccaggagcattgagagcaccctggacgacctcttccggaattcagacgtcaagaaggatttccggagtgtccgcttgcgggacctggggcccggcaaatccgtccgcgccattgtggatgtgcactttgaccccaccacagccttcagggcacccgacgtggcccgggccctgctccggcagatccaggtgtccaggcgccggtccttgggggtgaggcggccgctgcaggagcacgtgcgatttatggactttgactggtttcctgcgtttatcacgggggccacgtcaggagccattgctgcgggagccacggccagagccaccactgcatcgcgcctgccgtcctctgctgtgacccctcgggccccgcaccccagtcacacaagccagcccgttgccaagaccacggcagcccccaccacacgtcggccccccaccactgcccccagccgtgtgcccggacgtcggcccccggccccccagcagcctccaaagccctgtgactcacagccctgcttccacggggggacctgccaggactgggcattgggcgggggcttcacctgcagctgcccggcaggcaggggaggcgccgtctgtgagaaggtgcttggcgcccctgtgccggccttcgagggccgctccttcctggccttccccaccctccgcgcctaccacacgctgcgcctggcactggaattccgggcgctggagcctcaggggctgctgctgtacaatggcaacgcccggggcaaggacttcctggcattggcgctgctagatggccgcgtgcagctcaggtttgacacaggttcggggccggcggtgctgaccagtgccgtgccggtagagccgggccagtggcaccgcctggagctgtcccggcactggcgccggggcaccctctcggtggatggtgagacccctgttctgggcgagagtcccagtggcaccgacggcctcaacctggacacagacctctttgtgggcggcgtacccgaggaccaggctgccgtggcgctggagcggaccttcgtgggcgccggcctgagggggtgcatccgtttgctggacgtcaacaaccagcgcctggagcttggcattgggccgggggctgccacccgaggctctggcgtgggcgagtgcggggaccacccctgcctgcccaacccctgccatggcggggccccatgccagaacctggaggctggaaggttccattgccagtgcccgcccggccgcgtcggaccaacctgtgccgatgagaagagcccctgccagcccaacccctgccatggggcggcgccctgccgtgtgctgcccgagggtggtgctcagtgcgagtgccccctggggcgtgagggcaccttctgccagacagcctcggggcaggacggctctgggcccttcctggctgacttcaacggcttctcccacctggagctgagaggcctgcacacctttgcacgggacctgggggagaagatggcgctggaggtcgtgttcctggcacgaggccccagcggcctcctgctctacaacgggcagaagacggacggcaagggggacttcgtgtcgctggcactgcgggaccgccgcctggagttccgctacgacctgggcaagggggcagcggtcatcaggagcagggagccagtcaccctgggagcctggaccagggtctcactggagcgaaacggccgcaagggtgccctgcgtgtgggcgacggcccccgtgtgttgggggagtccccggttccgcacaccgtcctcaacctgaaggagccgctctacgtagggggcgctcccgacttcagcaagctggcccgtgctgctgccgtgtcctctggcttcgacggtgccatccagctggtctccctcggaggccgccagctgctgaccccggagcacgtgctgcggcaggtggacgtcacgtcctttgcaggtcacccctgcacccgggcctcaggccacccctgcctcaatggggcctcctgcgtcccgagggaggctgcctatgtgtgcctgtgtcccgggggattctcaggaccgcactgcgagaaggggctggtggagaagtcagcgggggacgtggataccttggcctttgacgggcggacctttgtcgagtacctcaacgctgtgaccgagagcgagaaggcactgcagagcaaccactttgaactgagcctgcgcactgaggccacgcaggggctggtgctctggagtggcaaggccacggagcgggcagactatgtggcactggccattgtggacgggcacctgcaactgagctacaacctgggctcccagcccgtggtgctgcgttccaccgtgcccgtcaacaccaaccgctggttgcgggtcgtggcacatagggagcagagggaaggttccctgcaggtgggcaatgaggcccctgtgaccggctcctccccgctgggcgccacgcagctggacactgatggagccctgtggcttgggggcctgccggagctgcccgtgggcccagcactgcccaaggcctacggcacaggctttgtgggctgcttgcgggatgtggtggtgggccggcacccgctgcacctgctggaggacgccgtcaccaagccagagctgcggccctgccccaccccatgagctggcaccagagccccgcgcccgctgtaattattttctatttttgtaaacttgttgctttttgatatgattttcttgcctgagtgttggccggagggactgctggcccggcctcccttccgtccaggcagccgtgctgcagacagacctagtgctgagggatggacaggcgaggtggcagcgtggagggctcggcgtggatggcagcctcaggacacacacccctgcctcaaggtgctgagcccccgccttgcactgcgcctgccccacggtgtccccgccgggaagcagccccggctcctgaatcaccctcgctccgtcaggcgggactcgtgtcccagagaggaaggggctgctgaggtctgatggggcccttcctccgggtgaccccacagggcctttccaagcccctatttgagctgctccttcctgtgtgtgctctggaccctgcctcggcctcctgcgccaatactgtgacttccaaacaatgttactgctgggcacagctctgcgttgctcccgtgctgcctgcgccagccccaggctgctgaggagcagaggccagaccagggccgatctgggtgtcctgaccctcagctggccctgcccagccaccctggacatgaccgtatccctctgccacaccccaggccctgcgaggggctatcgagaggagctcactgtgggatggggttgacctctgccgcctgcctgggtatctgggcctggccatggctgtgttcttcatgtgttgattttatttgacccctggagtggtgggtctcatctttcccatctcgcctgacggccactgacaagcgcgtcagcgcgcagcttgactatagaggc

SEQ ID NO: 88707 - DNA, 1367 bp, Homo sapiens
accccggcaacacgcctggctaatttttgtagggacggggtttcgccatgttggccaggctggtttcgaactcctgacctcaagtgatccacccacctcggcctcccaaaatgttgggattacaggctttgtgggctgcttgcgggatgtggtggtgggccggcacccgctgcacctgctggaggacgccgtcaccaagccagagctgcggccctgccccaccccatgagctggcaccagagccccgcgcccgctgtaattattttctatttttgtaaacttgttgctttttgatatgattttcttgcctgagtgttggccggagggactgctggcccggcctcccttccgtccaggcagccgtgctgcagacagacctagtgctgagggatggacaggcgaggtggcagcgtggagggctcggcgtggatggcagcctcaggacacacacccctgcctcaaggtgctgagcccccgccttgcactgcgcctgccccacggtgtccccgccgggaagcagccccggctcctgaatcaccctcgctccgtcaggcgggactcgtgtcccagagaggaaggggctgctgaggtctgatggggcccttcctccgggtgaccccacagggcctttccaagcccctatttgagctgctccttcctgtgtgtgctctggaccctgcctcggcctcctgcgccaatactgtgacttccaaacaatgttactgctgggcacagctctgcgttgctcccgtgctgcctgcgccagccccaggctgctgaggagcagaggccagaccagggccgatctgggtgtcctgaccctcagctggccctgcccagccaccctggacatgaccgtatccctctgccacaccccaggccctgcgaggggctatcgagaggagctcactgtgggatggggttgacctctgccgcctgcctgggtatctgggcctggccatggctgtgttcttcatgtgttgattttatttgacccctggagtggtgggtctcatctttcccatctcgcctgagagcggctgagggctgcctcactgcaaatcctccccacagcgtcagtgaaagtcgtccttgtctcagaatgaccaggggccagccagtgtctgaccaaggtcaaggggcaggtgcagaggtggcagggatggctccgaagccagaaatgccttaaactgcaacgtcccgtcccttccccacccccatcccatccccacccccagccccagcccagtcctcctaggagcaggacccgatgaagcgggcggcggtggggctgggtgccgtgttactaactctagtatgtttctgtgtcaatcgctgtgaaataaagtctgaaaactttaaaagca

SEQ ID NO: 88708 - DNA, 1166 bp, Homo sapiens
cagctggtccggtctggggtgtagggatgctggcaccagagccccgcgcccgctgtaattattttctatttttgtaaacttgttgctttttgatatgattttcttgcctgagtgttggccggagggactgctggcccggcctcccttccgtccaggcagccgtgctgcagacagacctagtgctgagggatggacaggcgaggtggcagcgtggagggctcggcgtggatggcagcctcaggacacacacccctgcctcaaggtgctgagcccccgccttgcactgcgcctgccccacggtgtccccgccgggaagcagccccggctcctgaatcaccctcgctccgtcaggcgggactcgtgtcccagagaggaaggggctgctgaggtctgatggggcccttcctccgggtgaccccacagggcctttccaagcccctatttgagctgctccttcctgtgtgtgctctggaccctgcctcggcctcctgcgccaatactgtgacttccaaacaatgttactgctgggcacagctctgcgttgctcccgtgctgcctgcgccagccccaggctgctgaggagcagaggccagaccagggccgatctgggtgtcctgaccctcagctggccctgcccagccaccctggacatgaccgtatccctctgccacaccccaggccctgcgaggggctatcgagaggagctcactgtgggatggggttgacctctgccgcctgcctgggtatctgggcctggccatggctgtgttcttcatgtgttgattttatttgacccctggagtggtgggtctcatctttcccatctcgcctgagagcggctgagggctgcctcactgcaaatcctccccacagcgtcagtgaaagtcgtccttgtctcagaatgaccaggggccagccagtgtctgaccaaggtcaaggggcaggtgcagaggtggcagggatggctccgaagccagaaatgccttaaactgcaacgtcccgtcccttccccacccccatcccatccccacccccagccccagcccagtcctcctaggagcaggacccgatgaagcgggcggcggtggggctgggtgccgtgttactaactctagtatgtttctgtgtcaatcgctgtgaaataaagtctgaaaactttaaaagca

SEQ ID NO: 88709 - DNA, 3332 bp, Homo sapiens
gcgggccgctgctgcctctccttgtggtggccgcgtgcgtcctgcccggagccggcgggacatgcccggagcgcgcgctggagcggcgcgaggaggaggcgaacgtggtgctcaccgggacggtggaggagatcctcaacgtggacccggtgcagcacacgtactcctgcaaggttcgggtctggcggtacttgaagggcaaagacctggtggcccgggagagcctgctggacggcggcaacaaggtggtgatcagcggctttggagaccccctcatctgtgacaaccaggtgtccactggggacaccaggatcttctttgtgaaccctgcacccccatacctgtggccagcccacaagaacgagctgatgctcaactccagcctcatgcggatcaccctgcggaacctggaggaggtggagttctgtgtggaagataaacccgggacccacttcactccagtgcctccgacgcctcctgatgcgtgccggggaatgctgtgcggcttcggcgccgtgtgcgagcccaacgcggaggggccgggccgggcgtcctgcgtctgcaagaagagcccgtgccccagcgtggtggcgcctgtgtgtgggtcggacgcctccacctacagcaacgaatgcgagctgcagcgggcgcagtgcagccagcagcgccgcatccgcctgctcagccgcgggccgtgcggctcgcgggacccctgctccaacgtgacctgcagcttcggcagcacctgtgcgcgctcggccgacgggctgacggcctcgtgcctgtgccccgcgacctgccgtggcgcccccgaggggaccgtctgcggcagcgacggcgccgactaccccggcgagtgccagctcctgcgccgcgcctgcgcccgccaggagaatgtcttcaagaagttcgacggcccttgtgacccctgtcagggcgccctccctgacccgagccgcagctgccgtgtgaacccgcgcacgcggcgccctgagatgctcctacggcccgagagctgccctgcccggcaggcgccagtgtgtggggacgacggagtcacctacgaaaacgactgtgtcatgggccgatcgggggccgcccggggtctcctcctgcagaaagtgcgctccggccagtgccagggtcgagaccagtgcccggagccctgccggttcaatgccgtgtgcctgtcccgccgtggccgtccccgctgctcctgcgaccgcgtcacctgtgacggggcctacaggcccgtgtgtgcccaggacgggcgcacgtatgacagtgattgctggcggcagcaggctgagtgccggcagcagcgtgccatccccagcaagcaccagggcccgtgtgaccaggccccgtccccatgcctcggggtgcagtgtgcatttggggcgacgtgtgctgtgaagaacgggcaggcagcgtgtgaatgcctgcaggcgtgctcgagcctctacgatcctgtgtgcggcagcgacggcgtcacatacggcagcgcgtgcgagctggaggccacggcctgtaccctcgggcgggagatccaggtggcgcgcaaaggaccctgtgaccgctgcgggcagtgccgctttggagccctgtgcgaggccgagaccgggcgctgcgtgtgcccctctgaatgcgtggctttggcccagcccgtgtgtggctccgacgggcacacgtaccccagcgagtgcatgctgcacgtgcacgcctgcacacaccagatcagcctgcacgtggcctcagctggaccctgtgagacctgtggagatgccgtgtgtgcttttggggctgtgtgctccgcagggcagtgtgtgtgtccccggtgtgagcaccccccgcccggccccgtgtgtggcagcgacggtgtcacctacggcagtgcctgcgagctacgggaagccgcctgcctccagcagacacagatcgaggaggcccgggcagggccgtgcgagcaggccgagtgcggttccggaggctctggctctggggaggacggtgactgtgagcaggagctgtgccggcagcgcggtggcatctgggacgaggactcggaggacgggccgtgtgtctgtgacttcagctgccagagtgtcccaggcagcccggtgtgcggctcagatggggtcacctacagcaccgagtgtgagctgaagaaggccaggtgtgagtcacagcgagggctctacgtagcggcccagggagcctgccgaggccccaccttcgccccgctgccgcctgtggcccccttacactgtgcccagacgccctacggctgctgccaggacaatatcaccgcagcccggggcgtgggcctggctggctgccccagtgcctgccagtgcaacccccatggctcttacggcggcacctgtgacccagccacaggccagtgctcctgccgcccaggtgtggggggcctcaggtgtgaccgctgtgagcctggcttctggaactttcgaggcatcgtcaccgatggccggagtggctgtacaccctgcagctgtgatccccaaggcgccgtgcgggatgactgtgagcagatgacggggctgtgctcgtgtaagcccggggtggctggacccaagtgtgggcagtgtccagacggccgtgccctgggccccgcgggctgtgaagctgacgcttctgcgcctgcgacctgtgcggagatgcgctgtgagttcggtgcgcggtgcgtggaggagtctggctcagcccactgtgtctgcccgatgctcacctgtccagaggccaacgctaccaaggtctgtgggtcagatggagtcacatacggcaacgagtgtcagctgaagaccatcgcctgccgccagggccctgcgaggggctatcgagaggagctcactgtgggatggggttgacctctgccgcctgcctgggtatctgggcctggccatggctgtgttcttcatgtgttgattttatttgacccctggagtggtgggtctcatctttcccatctcgcctgagagcggctgagggctgcctcactgcaaatcctccccacagcgtcagtgaaagtcgtccttgtctcagaatgaccaggggccagccagtgtctgaccaaggtcaaggggcaggtgcagaggtggcagggatggctccgaagccagaaatgccttaaactgcaacgtcccgtcccttccccacccccatcccatccccacccccagccccagcccagtcctcctaggagcaggacccgatgaagcgggcggcggtggggctgggtgccgtgttactaactctagtatgtttctgtgtcaatcgctgtgaaataaagtctgaaaactttaaaagca

SEQ ID NO: 88710 - DNA, 2941 bp, Homo sapiens
gcgggccgctgctgcctctccttgtggtggccgcgtgcgtcctgcccggagccggcgggacatgcccggagcgcgcgctggagcggcgcgaggaggaggcgaacgtggtgctcaccgggacggtggaggagatcctcaacgtggacccggtgcagcacacgtactcctgcaaggttcgggtctggcggtacttgaagggcaaagacctggtggcccgggagagcctgctggacggcggcaacaaggtggtgatcagcggctttggagaccccctcatctgtgacaaccaggtgtccactggggacaccaggatcttctttgtgaaccctgcacccccatacctgtggccagcccacaagaacgagctgatgctcaactccagcctcatgcggatcaccctgcggaacctggaggaggtggagttctgtgtggaagataaacccgggacccacttcactccagtgcctccgacgcctcctgatgcgtgccggggaatgctgtgcggcttcggcgccgtgtgcgagcccaacgcggaggggccgggccgggcgtcctgcgtctgcaagaagagcccgtgccccagcgtggtggcgcctgtgtgtgggtcggacgcctccacctacagcaacgaatgcgagctgcagcgggcgcagtgcagccagcagcgccgcatccgcctgctcagccgcgggccgtgcggctcgcgggacccctgctccaacgtgacctgcagcttcggcagcacctgtgcgcgctcggccgacgggctgacggcctcgtgcctgtgccccgcgacctgccgtggcgcccccgaggggaccgtctgcggcagcgacggcgccgactaccccggcgagtgccagctcctgcgccgcgcctgcgcccgccaggagaatgtcttcaagaagttcgacggcccttgtgacccctgtcagggcgccctccctgacccgagccgcagctgccgtgtgaacccgcgcacgcggcgccctgagatgctcctacggcccgagagctgccctgcccggcaggcgccagtgtgtggggacgacggagtcacctacgaaaacgactgtgtcatgggccgatcgggggccgcccggggtctcctcctgcagaaagtgcgctccggccagtgccagggtcgagaccagtgcccggagccctgccggttcaatgccgtgtgcctgtcccgccgtggccgtccccgctgctcctgcgaccgcgtcacctgtgacggggcctacaggcccgtgtgtgcccaggacgggcgcacgtatgacagtgattgctggcggcagcaggctgagtgccggcagcagcgtgccatccccagcaagcaccagggcccgtgtgaccaggccccgtccccatgcctcggggtgcagtgtgcatttggggcgacgtgtgctgtgaagaacgggcaggcagcgtgtgaatgcctgcaggcgtgctcgagcctctacgatcctgtgtgcggcagcgacggcgtcacatacggcagcgcgtgcgagctggaggccacggcctgtaccctcgggcgggagatccaggtggcgcgcaaaggaccctgtgaccgctgcgggcagtgccgctttggagccctgtgcgaggccgagaccgggcgctgcgtgtgcccctctgaatgcgtggctttggcccagcccgtgtgtggctccgacgggcacacgtaccccagcgagtgcatgctgcacgtgcacgcctgcacacaccagatcagcctgcacgtggcctcagctggaccctgtgagacctgtggagatgccgtgtgtgcttttggggctgtgtgctccgcagggcagtgtgtgtgtccccggtgtgagcaccccccgcccggccccgtgtgtggcagcgacggtgtcacctacggcagtgcctgcgagctacgggaagccgcctgcctccagcagacacagatcgaggaggcccgggcagggccgtgcgagcaggccgagtgcggttccggaggctctggctctggggaggacggtgactgtgagcaggagctgtgccggcagcgcggtggcatctgggacgaggactcggaggacgggccgtgtgtctgtgacttcagctgccagagtgtcccaggcagcccggtgtgcggctcagatggggtcacctacagcaccgagtgtgagctgaagaaggccaggtgtgagtcacagcgagggctctacgtagcggcccagggagcctgccgaggccccaccttcgccccgctgccgcctgtggcccccttacactgtgcccagacgccctacggctgctgccaggacaatatcaccgcagcccggggcgtgggcctggctggctgccccagtgcctgccagtgcaacccccatggctcttacggcggcacctgtgacccagccacaggccagtgctcctgccgcccaggtgtggggggcctcaggtgtgaccgctgtgagcctggcttctggaactttcgaggcatcgtcaccgatggccggagtggctgtacaccctgcagctgtgatccccaaggcgccgtgcgggatgactgtgagcagatgacggggctgtgctcgtgtaagcccggggtggctggacccaagtgtgggcagtgtccagacggccgtgccctgggccccgcgggctgtgaagctgacgcttctgcgcctgcgacctgtgcggagatgcgctgtgagttcggtgcgcggtgcgtggaggagtctggctcagcccactgtgtctgcccgatgctcacctgtccagaggccaacgctaccaaggtctgtgggtcagatggagtcacatacggcaacgagtgtcagctgaagaccatcgcctgccgccagggcctgcaaatctctatccagagcctgggcccgtgccagggtgaggcctgacggccactgccccagaactgaccaggaaggcctgacgctgccctaaa

SEQ ID NO: 88711 - DNA, 233 bp, Homo sapiens
gtgaggggtgtgggatgtgaaggggagtggggaggaggcctcgccttgaacatccttgttctctgccccaggtctgtgggtcagatggagtcacatacggcaacgagtgtcagctgaagaccatcgcctgccgccagggcctgcaaatctctatccagagcctgggcccgtgccagggtgaggcctgacggccactgccccagaactgaccaggaaggcctgacgctgcccta

SEQ ID NO: 88712 - DNA, 7248 bp, Homo sapiens
gcgggccgctgctgcctctccttgtggtggccgcgtgcgtcctgcccggagccggcgggacatgcccggagcgcgcgctggagcggcgcgaggaggaggcgaacgtggtgctcaccgggacggtggaggagatcctcaacgtggacccggtgcagcacacgtactcctgcaaggttcgggtctggcggtacttgaagggcaaagacctggtggcccgggagagcctgctggacggcggcaacaaggtggtgatcagcggctttggagaccccctcatctgtgacaaccaggtgtccactggggacaccaggatcttctttgtgaaccctgcacccccatacctgtggccagcccacaagaacgagctgatgctcaactccagcctcatgcggatcaccctgcggaacctggaggaggtggagttctgtgtggaagataaacccgggacccacttcactccagtgcctccgacgcctcctgatgcgtgccggggaatgctgtgcggcttcggcgccgtgtgcgagcccaacgcggaggggccgggccgggcgtcctgcgtctgcaagaagagcccgtgccccagcgtggtggcgcctgtgtgtgggtcggacgcctccacctacagcaacgaatgcgagctgcagcgggcgcagtgcagccagcagcgccgcatccgcctgctcagccgcgggccgtgcggctcgcgggacccctgctccaacgtgacctgcagcttcggcagcacctgtgcgcgctcggccgacgggctgacggcctcgtgcctgtgccccgcgacctgccgtggcgcccccgaggggaccgtctgcggcagcgacggcgccgactaccccggcgagtgccagctcctgcgccgcgcctgcgcccgccaggagaatgtcttcaagaagttcgacggcccttgtgacccctgtcagggcgccctccctgacccgagccgcagctgccgtgtgaacccgcgcacgcggcgccctgagatgctcctacggcccgagagctgccctgcccggcaggcgccagtgtgtggggacgacggagtcacctacgaaaacgactgtgtcatgggccgatcgggggccgcccggggtctcctcctgcagaaagtgcgctccggccagtgccagggtcgagaccagtgcccggagccctgccggttcaatgccgtgtgcctgtcccgccgtggccgtccccgctgctcctgcgaccgcgtcacctgtgacggggcctacaggcccgtgtgtgcccaggacgggcgcacgtatgacagtgattgctggcggcagcaggctgagtgccggcagcagcgtgccatccccagcaagcaccagggcccgtgtgaccaggccccgtccccatgcctcggggtgcagtgtgcatttggggcgacgtgtgctgtgaagaacgggcaggcagcgtgtgaatgcctgcaggcgtgctcgagcctctacgatcctgtgtgcggcagcgacggcgtcacatacggcagcgcgtgcgagctggaggccacggcctgtaccctcgggcgggagatccaggtggcgcgcaaaggaccctgtgaccgctgcgggcagtgccgctttggagccctgtgcgaggccgagaccgggcgctgcgtgtgcccctctgaatgcgtggctttggcccagcccgtgtgtggctccgacgggcacacgtaccccagcgagtgcatgctgcacgtgcacgcctgcacacaccagatcagcctgcacgtggcctcagctggaccctgtgagacctgtggagatgccgtgtgtgcttttggggctgtgtgctccgcagggcagtgtgtgtgtccccggtgtgagcaccccccgcccggccccgtgtgtggcagcgacggtgtcacctacggcagtgcctgcgagctacgggaagccgcctgcctccagcagacacagatcgaggaggcccgggcagggccgtgcgagcaggccgagtgcggttccggaggctctggctctggggaggacggtgactgtgagcaggagctgtgccggcagcgcggtggcatctgggacgaggactcggaggacgggccgtgtgtctgtgacttcagctgccagagtgtcccaggcagcccggtgtgcggctcagatggggtcacctacagcaccgagtgtgagctgaagaaggccaggtgtgagtcacagcgagggctctacgtagcggcccagggagcctgccgaggccccaccttcgccccgctgccgcctgtggcccccttacactgtgcccagacgccctacggctgctgccaggacaatatcaccgcagcccggggcgtgggcctggctggctgccccagtgcctgccagtgcaacccccatggctcttacggcggcacctgtgacccagccacaggccagtgctcctgccgcccaggtgtggggggcctcaggtgtgaccgctgtgagcctggcttctggaactttcgaggcatcgtcaccgatggccggagtggctgtacaccctgcagctgtgatccccaaggcgccgtgcgggatgactgtgagcagatgacggggctgtgctcgtgtaagcccggggtggctggacccaagtgtgggcagtgtccagacggccgtgccctgggccccgcgggctgtgaagctgacgcttctgcgcctgcgacctgtgcggagatgcgctgtgagttcggtgcgcggtgcgtggaggagtctggctcagcccactgtgtctgcccgatgctcacctgtccagaggccaacgctaccaaggtctgtgggtcagatggagtcacatacggcaacgagtgtcagctgaagaccatcgcctgccgccagggcctgcaaatctctatccagagcctgggcccgtgccaggaggctgttgctcccagcactcacccgacatctgcctccgtgactgtgaccaccccagggctcctcctgagccaggcactgccggccccccccggcgccctccccctggctcccagcagtaccgcacacagccagaccacccctccgccctcatcgcgacctcggaccactgccagcgtccccaggaccaccgtgtggcccgtgctgacggtgccccccacggcaccctcccctgcacccagcctggtggcgtccgcctttggtgaatctggcagcactgatggaagcagcgatgaggaactgagcggggaccaggaggccagtgggggtggctctggggggctcgagcccttggagggcagcagcgtggccacccctgggccacctgtcgagagggcttcctgctacaactccgcgttgggctgctgctctgatgggaagacgccctcgctggacgcagagggctccaactgccccgccaccaaggtgttccagggcgtcctggagctggagggcgtcgagggccaggagctgttctacacgcccgagatggctgaccccaagtcagaactgttcggggagacagccaggagcattgagagcaccctggacgacctcttccggaattcagacgtcaagaaggatttccggagtgtccgcttgcgggacctggggcccggcaaatccgtccgcgccattgtggatgtgcactttgaccccaccacagccttcagggcacccgacgtggcccgggccctgctccggcagatccaggtgtccaggcgccggtccttgggggtgaggcggccgctgcaggagcacgtgcgatttatggactttgactggtttcctgcgtttatcacgggggccacgtcaggagccattgctgcgggagccacggccagagccaccactgcatcgcgcctgccgtcctctgctgtgacccctcgggccccgcaccccagtcacacaagccagcccgttgccaagaccacggcagcccccaccacacgtcggccccccaccactgcccccagccgtgtgcccggacgtcggcccccggccccccagcagcctccaaagccctgtgactcacagccctgcttccacggggggacctgccaggactgggcattgggcgggggcttcacctgcagctgcccggcaggcaggggaggcgccgtctgtgagaaggtgcttggcgcccctgtgccggccttcgagggccgctccttcctggccttccccaccctccgcgcctaccacacgctgcgcctggcactggaattccgggcgctggagcctcaggggctgctgctgtacaatggcaacgcccggggcaaggacttcctggcattggcgctgctagatggccgcgtgcagctcaggtttgacacaggttcggggccggcggtgctgaccagtgccgtgccggtagagccgggccagtggcaccgcctggagctgtcccggcactggcgccggggcaccctctcggtggatggtgagacccctgttctgggcgagagtcccagtggcaccgacggcctcaacctggacacagacctctttgtgggcggcgtacccgaggaccaggctgccgtggcgctggagcggaccttcgtgggcgccggcctgagggggtgcatccgtttgctggacgtcaacaaccagcgcctggagcttggcattgggccgggggctgccacccgaggctctggcgtgggcgagtgcggggaccacccctgcctgcccaacccctgccatggcggggccccatgccagaacctggaggctggaaggttccattgccagtgcccgcccggccgcgtcggaccaacctgtgccgatgagaagagcccctgccagcccaacccctgccatggggcggcgccctgccgtgtgctgcccgagggtggtgctcagtgcgagtgccccctggggcgtgagggcaccttctgccagacagcctcggggcaggacggctctgggcccttcctggctgacttcaacggcttctcccacctggagctgagaggcctgcacacctttgcacgggacctgggggagaagatggcgctggaggtcgtgttcctggcacgaggccccagcggcctcctgctctacaacgggcagaagacggacggcaagggggacttcgtgtcgctggcactgcgggaccgccgcctggagttccgctacgacctgggcaagggggcagcggtcatcaggagcagggagccagtcaccctgggagcctggaccagggtctcactggagcgaaacggccgcaagggtgccctgcgtgtgggcgacggcccccgtgtgttgggggagtccccggttccgcacaccgtcctcaacctgaaggagccgctctacgtagggggcgctcccgacttcagcaagctggcccgtgctgctgccgtgtcctctggcttcgacggtgccatccagctggtctccctcggaggccgccagctgctgaccccggagcacgtgctgcggcaggtggacgtcacgtcctttgcaggtcacccctgcacccgggcctcaggccacccctgcctcaatggggcctcctgcgtcccgagggaggctgcctatgtgtgcctgtgtcccgggggattctcaggaccgcactgcgagaaggggctggtggagaagtcagcgggggacgtggataccttggcctttgacgggcggacctttgtcgagtacctcaacgctgtgaccgagagcgagaaggcactgcagagcaaccactttgaactgagcctgcgcactgaggccacgcaggggctggtgctctggagtggcaaggccacggagcgggcagactatgtggcactggccattgtggacgggcacctgcaactgagctacaacctgggctcccagcccgtggtgctgcgttccaccgtgcccgtcaacaccaaccgctggttgcgggtcgtggcacatagggagcagagggaaggttccctgcaggtgggcaatgaggcccctgtgaccggctcctccccgctgggcgccacgcagctggacactgatggagccctgtggcttgggggcctgccggagctgcccgtgggcccagcactgcccaaggcctacggcacaggctttgtgggctgcttgcgggatgtggtggtgggccggcacccgctgcacctgctggaggacgccgtcaccaagccagagctgcggccctgccccaccccatgagctggcaccagagccccgcgcccgctgtaattattttctatttttgtaaacttgttgctttttgatatgattttcttgcctgagtgttggccggagggactgctggcccggcctcccttccgtccaggcagccgtgctgcagacagacctagtgctgagggatggacaggcgaggtggcagcgtggagggctcggcgtggatggcagcctcaggacacacacccctgcctcaaggtgctgagcccccgccttgcactgcgcctgccccacggtgtccccgccgggaagcagccccggctcctgaatcaccctcgctccgtcaggcgggactcgtgtcccagagaggaaggggctgctgaggtctgatggggcccttcctccgggtgaccccacagggcctttccaagcccctatttgagctgctccttcctgtgtgtgctctggaccctgcctcggcctcctgcgccaatactgtgacttccaaacaatgttactgctgggcacagctctgcgttgctcccgtgctgcctgcgccagccccaggctgctgaggagcagaggccagaccagggccgatctgggtgtcctgaccctcagctggccctgcccagccaccctggacatgaccgtatccctctgccacaccccaggccctgcgaggggctatcgagaggagctcactgtgggatggggttgacctctgccgcctgcctgggtatctgggcctggccatggctgtgttcttcatgtgttgattttatttgacccctggagtggtgggtctcatctttcccatctcgcctgagagcggctgagggctgcctcactgcaaatcctccccacagcgtcagtgaaagtcgtccttgtctcagaatgaccaggggccagccagtgtctgaccaaggtcaaggggcaggtgcagaggtggcagggatggctccgaagccagaaatgccttaaactgcaacgtcccgtcccttccccacccccatcccatccccacccccagccccagcccagtcctcctaggagcaggacccgatgaagcgggcggcggtggggctgggtgccgtgttactaactctagtatgtttctgtgtcaatcgctgtgaaataaagtctgaaaactttaaaagca

SEQ ID NO: 88713 - DNA, 7411 bp, Homo sapiens
tgcccgctcctatcgccgcttccgcctctgccggggacggggacagcagaccctcggcgcccggcccccgcgcacctgccgcgcgcaccgcctctccggcctgcgcggctccgggggctccgggaagaccgagcgctggcggccagcccggggaggctgtgggcagcaggggtagctgcgggctcccagtccctcctccgcctacctcggagcccacatttgggatttctactccgggagaattctgccctcctcccacgatgagcctggaggactggagccgggacctggcacccccagggctgtgactgggtgaactctgagggcacagctgctgtccgccgccccaggggtcccaggatggggcgagcagccctgaagaggcccaagggcaccccgtgaggagcccccacgctctgagagtggggcgcagagccggagccccgggccatgcctccgctgccgctggcgcgggacacccggcagccgcctggcgcctccctgctggtgcgaggcttcatggtgccctgcaacgcctgcctgatcctgctggccaccgccacgctcggcttcgcggtgctgctgttcctcaacaactataaacccgggacccacttcactccagtgcctccgacgcctcctgatgcgtgccggggaatgctgtgcggcttcggcgccgtgtgcgagcccaacgcggaggggccgggccgggcgtcctgcgtctgcaagaagagcccgtgccccagcgtggtggcgcctgtgtgtgggtcggacgcctccacctacagcaacgaatgcgagctgcagcgggcgcagtgcagccagcagcgccgcatccgcctgctcagccgcgggccgtgcggctcgcgggacccctgctccaacgtgacctgcagcttcggcagcacctgtgcgcgctcggccgacgggctgacggcctcgtgcctgtgccccgcgacctgccgtggcgcccccgaggggaccgtctgcggcagcgacggcgccgactaccccggcgagtgccagctcctgcgccgcgcctgcgcccgccaggagaatgtcttcaagaagttcgacggcccttgtgacccctgtcagggcgccctccctgacccgagccgcagctgccgtgtgaacccgcgcacgcggcgccctgagatgctcctacggcccgagagctgccctgcccggcaggcgccagtgtgtggggacgacggagtcacctacgaaaacgactgtgtcatgggccgatcgggggccgcccggggtctcctcctgcagaaagtgcgctccggccagtgccagggtcgagaccagtgcccggagccctgccggttcaatgccgtgtgcctgtcccgccgtggccgtccccgctgctcctgcgaccgcgtcacctgtgacggggcctacaggcccgtgtgtgcccaggacgggcgcacgtatgacagtgattgctggcggcagcaggctgagtgccggcagcagcgtgccatccccagcaagcaccagggcccgtgtgaccaggccccgtccccatgcctcggggtgcagtgtgcatttggggcgacgtgtgctgtgaagaacgggcaggcagcgtgtgaatgcctgcaggcgtgctcgagcctctacgatcctgtgtgcggcagcgacggcgtcacatacggcagcgcgtgcgagctggaggccacggcctgtaccctcgggcgggagatccaggtggcgcgcaaaggaccctgtgaccgctgcgggcagtgccgctttggagccctgtgcgaggccgagaccgggcgctgcgtgtgcccctctgaatgcgtggctttggcccagcccgtgtgtggctccgacgggcacacgtaccccagcgagtgcatgctgcacgtgcacgcctgcacacaccagatcagcctgcacgtggcctcagctggaccctgtgagacctgtggagatgccgtgtgtgcttttggggctgtgtgctccgcagggcagtgtgtgtgtccccggtgtgagcaccccccgcccggccccgtgtgtggcagcgacggtgtcacctacggcagtgcctgcgagctacgggaagccgcctgcctccagcagacacagatcgaggaggcccgggcagggccgtgcgagcaggccgagtgcggttccggaggctctggctctggggaggacggtgactgtgagcaggagctgtgccggcagcgcggtggcatctgggacgaggactcggaggacgggccgtgtgtctgtgacttcagctgccagagtgtcccaggcagcccggtgtgcggctcagatggggtcacctacagcaccgagtgtgagctgaagaaggccaggtgtgagtcacagcgagggctctacgtagcggcccagggagcctgccgaggccccaccttcgccccgctgccgcctgtggcccccttacactgtgcccagacgccctacggctgctgccaggacaatatcaccgcagcccggggcgtgggcctggctggctgccccagtgcctgccagtgcaacccccatggctcttacggcggcacctgtgacccagccacaggccagtgctcctgccgcccaggtgtggggggcctcaggtgtgaccgctgtgagcctggcttctggaactttcgaggcatcgtcaccgatggccggagtggctgtacaccctgcagctgtgatccccaaggcgccgtgcgggatgactgtgagcagatgacggggctgtgctcgtgtaagcccggggtggctggacccaagtgtgggcagtgtccagacggccgtgccctgggccccgcgggctgtgaagctgacgcttctgcgcctgcgacctgtgcggagatgcgctgtgagttcggtgcgcggtgcgtggaggagtctggctcagcccactgtgtctgcccgatgctcacctgtccagaggccaacgctaccaaggtctgtgggtcagatggagtcacatacggcaacgagtgtcagctgaagaccatcgcctgccgccagggcctgcaaatctctatccagagcctgggcccgtgccaggaggctgttgctcccagcactcacccgacatctgcctccgtgactgtgaccaccccagggctcctcctgagccaggcactgccggccccccccggcgccctccccctggctcccagcagtaccgcacacagccagaccacccctccgccctcatcgcgacctcggaccactgccagcgtccccaggaccaccgtgtggcccgtgctgacggtgccccccacggcaccctcccctgcacccagcctggtggcgtccgcctttggtgaatctggcagcactgatggaagcagcgatgaggaactgagcggggaccaggaggccagtgggggtggctctggggggctcgagcccttggagggcagcagcgtggccacccctgggccacctgtcgagagggcttcctgctacaactccgcgttgggctgctgctctgatgggaagacgccctcgctggacgcagagggctccaactgccccgccaccaaggtgttccagggcgtcctggagctggagggcgtcgagggccaggagctgttctacacgcccgagatggctgaccccaagtcagaactgttcggggagacagccaggagcattgagagcaccctggacgacctcttccggaattcagacgtcaagaaggatttccggagtgtccgcttgcgggacctggggcccggcaaatccgtccgcgccattgtggatgtgcactttgaccccaccacagccttcagggcacccgacgtggcccgggccctgctccggcagatccaggtgtccaggcgccggtccttgggggtgaggcggccgctgcaggagcacgtgcgatttatggactttgactggtttcctgcgtttatcacgggggccacgtcaggagccattgctgcgggagccacggccagagccaccactgcatcgcgcctgccgtcctctgctgtgacccctcgggccccgcaccccagtcacacaagccagcccgttgccaagaccacggcagcccccaccacacgtcggccccccaccactgcccccagccgtgtgcccggacgtcggcccccggccccccagcagcctccaaagccctgtgactcacagccctgcttccacggggggacctgccaggactgggcattgggcgggggcttcacctgcagctgcccggcaggcaggggaggcgccgtctgtgagaaggtgcttggcgcccctgtgccggccttcgagggccgctccttcctggccttccccaccctccgcgcctaccacacgctgcgcctggcactggaattccgggcgctggagcctcaggggctgctgctgtacaatggcaacgcccggggcaaggacttcctggcattggcgctgctagatggccgcgtgcagctcaggtttgacacaggttcggggccggcggtgctgaccagtgccgtgccggtagagccgggccagtggcaccgcctggagctgtcccggcactggcgccggggcaccctctcggtggatggtgagacccctgttctgggcgagagtcccagtggcaccgacggcctcaacctggacacagacctctttgtgggcggcgtacccgaggaccaggctgccgtggcgctggagcggaccttcgtgggcgccggcctgagggggtgcatccgtttgctggacgtcaacaaccagcgcctggagcttggcattgggccgggggctgccacccgaggctctggcgtgggcgagtgcggggaccacccctgcctgcccaacccctgccatggcggggccccatgccagaacctggaggctggaaggttccattgccagtgcccgcccggccgcgtcggaccaacctgtgccgatgagaagagcccctgccagcccaacccctgccatggggcggcgccctgccgtgtgctgcccgagggtggtgctcagtgcgagtgccccctggggcgtgagggcaccttctgccagacagcctcggggcaggacggctctgggcccttcctggctgacttcaacggcttctcccacctggagctgagaggcctgcacacctttgcacgggacctgggggagaagatggcgctggaggtcgtgttcctggcacgaggccccagcggcctcctgctctacaacgggcagaagacggacggcaagggggacttcgtgtcgctggcactgcgggaccgccgcctggagttccgctacgacctgggcaagggggcagcggtcatcaggagcagggagccagtcaccctgggagcctggaccagggtctcactggagcgaaacggccgcaagggtgccctgcgtgtgggcgacggcccccgtgtgttgggggagtccccggttccgcacaccgtcctcaacctgaaggagccgctctacgtagggggcgctcccgacttcagcaagctggcccgtgctgctgccgtgtcctctggcttcgacggtgccatccagctggtctccctcggaggccgccagctgctgaccccggagcacgtgctgcggcaggtggacgtcacgtcctttgcaggtcacccctgcacccgggcctcaggccacccctgcctcaatggggcctcctgcgtcccgagggaggctgcctatgtgtgcctgtgtcccgggggattctcaggaccgcactgcgagaaggggctggtggagaagtcagcgggggacgtggataccttggcctttgacgggcggacctttgtcgagtacctcaacgctgtgaccgagagcgagaaggcactgcagagcaaccactttgaactgagcctgcgcactgaggccacgcaggggctggtgctctggagtggcaaggccacggagcgggcagactatgtggcactggccattgtggacgggcacctgcaactgagctacaacctgggctcccagcccgtggtgctgcgttccaccgtgcccgtcaacaccaaccgctggttgcgggtcgtggcacatagggagcagagggaaggttccctgcaggtgggcaatgaggcccctgtgaccggctcctccccgctgggcgccacgcagctggacactgatggagccctgtggcttgggggcctgccggagctgcccgtgggcccagcactgcccaaggcctacggcacaggctttgtgggctgcttgcgggatgtggtggtgggccggcacccgctgcacctgctggaggacgccgtcaccaagccagagctgcggccctgccccaccccatgagctggcaccagagccccgcgcccgctgtaattattttctatttttgtaaacttgttgctttttgatatgattttcttgcctgagtgttggccggagggactgctggcccggcctcccttccgtccaggcagccgtgctgcagacagacctagtgctgagggatggacaggcgaggtggcagcgtggagggctcggcgtggatggcagcctcaggacacacacccctgcctcaaggtgctgagcccccgccttgcactgcgcctgccccacggtgtccccgccgggaagcagccccggctcctgaatcaccctcgctccgtcaggcgggactcgtgtcccagagaggaaggggctgctgaggtctgatggggcccttcctccgggtgaccccacagggcctttccaagcccctatttgagctgctccttcctgtgtgtgctctggaccctgcctcggcctcctgcgccaatactgtgacttccaaacaatgttactgctgggcacagctctgcgttgctcccgtgctgcctgcgccagccccaggctgctgaggagcagaggccagaccagggccgatctgggtgtcctgaccctcagctggccctgcccagccaccctggacatgaccgtatccctctgccacaccccaggccctgcgaggggctatcgagaggagctcactgtgggatggggttgacctctgccgcctgcctgggtatctgggcctggccatggctgtgttcttcatgtgttgattttatttgacccctggagtggtgggtctcatctttcccatctcgcctgagagcggctgagggctgcctcactgcaaatcctccccacagcgtcagtgaaagtcgtccttgtctcagaatgaccaggggccagccagtgtctgaccaaggtcaaggggcaggtgcagaggtggcagggatggctccgaagccagaaatgccttaaactgcaacgtcccgtcccttccccacccccatcccatccccacccccagccccagcccagtcctcctaggagcaggacccgatgaagcgggcggcggtggggctgggtgccgtgttactaactctagtatgtttctgtgtcaatcgctgtgaaataaagtctgaaaactttaaaagca

SEQ ID NO: 88714 - DNA, 7701 bp, Homo sapiens
gcgggccgctgctgcctctccttgtggtggccgcgtgcgtcctgcccggagccggcgggacatgcccggagcgcgcgctggagcggcgcgaggaggaggcgaacgtggtgctcaccgggacggtggaggagatcctcaacgtggacccggtgcagcacacgtactcctgcaaggttcgggtctggcggtacttgaagggcaaagacctggtggcccgggagagcctgctggacggcggcaacaaggtggtgatcagcggctttggagaccccctcatctgtgacaaccaggtgtccactggggacaccaggatcttctttgtgaaccctgcacccccatacctgtggccagcccacaagaacgagctgatgctcaactccagcctcatgcggatcaccctgcggaacctggaggaggtggagttctgtgtggaagataaacccgggacccacttcactccagtgcctccgacgcctcctgatgcgtgccggggaatgctgtgcggcttcggcgccgtgtgcgagcccaacgcggaggggccgggccgggcgtcctgcgtctgcaagaagagcccgtgccccagcgtggtggcgcctgtgtgtgggtcggacgcctccacctacagcaacgaatgcgagctgcagcgggcgcagtgcagccagcagcgccgcatccgcctgctcagccgcgggccgtgcggctcgcgggacccctgctccaacgtgacctgcagcttcggcagcacctgtgcgcgctcggccgacgggctgacggcctcgtgcctgtgccccgcgacctgccgtggcgcccccgaggggaccgtctgcggcagcgacggcgccgactaccccggcgagtgccagctcctgcgccgcgcctgcgcccgccaggagaatgtcttcaagaagttcgacggcccttgtgacccctgtcagggcgccctccctgacccgagccgcagctgccgtgtgaacccgcgcacgcggcgccctgagatgctcctacggcccgagagctgccctgcccggcaggcgccagtgtgtggggacgacggagtcacctacgaaaacgactgtgtcatgggccgatcgggggccgcccggggtctcctcctgcagaaagtgcgctccggccagtgccagggtcgagaccagtgcccggagccctgccggttcaatgccgtgtgcctgtcccgccgtggccgtccccgctgctcctgcgaccgcgtcacctgtgacggggcctacaggcccgtgtgtgcccaggacgggcgcacgtatgacagtgattgctggcggcagcaggctgagtgccggcagcagcgtgccatccccagcaagcaccagggcccgtgtgaccaggccccgtccccatgcctcggggtgcagtgtgcatttggggcgacgtgtgctgtgaagaacgggcaggcagcgtgtgaatgcctgcaggcgtgctcgagcctctacgatcctgtgtgcggcagcgacggcgtcacatacggcagcgcgtgcgagctggaggccacggcctgtaccctcgggcgggagatccaggtggcgcgcaaaggaccctgtgaccgctgcgggcagtgccgctttggagccctgtgcgaggccgagaccgggcgctgcgtgtgcccctctgaatgcgtggctttggcccagcccgtgtgtggctccgacgggcacacgtaccccagcgagtgcatgctgcacgtgcacgcctgcacacaccagatcagcctgcacgtggcctcagctggaccctgtgagacctgtggagatgccgtgtgtgcttttggggctgtgtgctccgcagggcagtgtgtgtgtccccggtgtgagcaccccccgcccggccccgtgtgtggcagcgacggtgtcacctacggcagtgcctgcgagctacgggaagccgcctgcctccagcagacacagatcgaggaggcccgggcagggccgtgcgagcaggccgagtgcggttccggaggctctggctctggggaggacggtgactgtgagcaggagctgtgccggcagcgcggtggcatctgggacgaggactcggaggacgggccgtgtgtctgtgacttcagctgccagagtgtcccaggcagcccggtgtgcggctcagatggggtcacctacagcaccgagtgtgagctgaagaaggccaggtgtgagtcacagcgagggctctacgtagcggcccagggagcctgccgaggccccaccttcgccccgctgccgcctgtggcccccttacactgtgcccagacgccctacggctgctgccaggacaatatcaccgcagcccggggcgtgggcctggctggctgccccagtgcctgccagtgcaacccccatggctcttacggcggcacctgtgacccagccacaggccagtgctcctgccgcccaggtgtggggggcctcaggtgtgaccgctgtgagcctggcttctggaactttcgaggcatcgtcaccgatggccggagtggctgtacaccctgcagctgtgatccccaaggcgccgtgcgggatgactgtgagcagatgacggggctgtgctcgtgtaagcccggggtggctggacccaagtgtgggcagtgtccagacggccgtgccctgggccccgcgggctgtgaagctgacgcttctgcgcctgcgacctgtgcggagatgcgctgtgagttcggtgcgcggtgcgtggaggagtctggctcagcccactgtgtctgcccgatgctcacctgtccagaggccaacgctaccaaggtctgtgggtcagatggagtcacatacggcaacgagtgtcagctgaagaccatcgcctgccgccagggcctgcaaatctctatccagagcctgggcccgtgccaggaggctgttgctcccagcactcacccgacatctgcctccgtgactgtgaccaccccagggctcctcctgagccaggcactgccggccccccccggcgccctccccctggctcccagcagtaccgcacacagccagaccacccctccgccctcatcgcgacctcggaccactgccagcgtccccaggaccaccgtgtggcccgtgctgacggtgccccccacggcaccctcccctgcacccagcctggtggcgtccgcctttggtgaatctggcagcactgatggaagcagcgatgaggaactgagcggggaccaggaggccagtgggggtggctctgggggtgagcagggatcaaggacttggggtgggtgggcaggcgccgagaggctccaccagagcctgggctcagagcgcgtctccccagggctcgagcccttggagggcagcagcgtggccacccctgggccacctgtcgagagggcttcctgctacaactccgcgttgggctgctgctctgatgggaagacgccctcgctggacgcagagggctccaactgccccggtgagtggacggctgggcgaggggagtgtgaggatagcctgggctcggccgaggtgctgccccctcgcctgggcagcaggtcagtgccgggggttatggtcttggggctcggccccctcaaacacgtgcgtgccggggaccccacgcctaacccgtctctctcgttgcaagccggcgtggcacactgctctgaggagtcctcctggtaaccgacaccagccccaccctggggtccccactaacctcatgaccatctgactaacatccaccttcccttgcacccttgtggcttgctgctggggcctgtgcctgggccagcctggatgccaggcagatgccaggcagggcctcactgtacctcccccacagccaccaaggtgttccagggcgtcctggagctggagggcgtcgagggccaggagctgttctacacgcccgagatggctgaccccaagtcagaactgttcggggagacagccaggagcattgagagcaccctggacgacctcttccggaattcagacgtcaagaaggatttccggagtgtccgcttgcgggacctggggcccggcaaatccgtccgcgccattgtggatgtgcactttgaccccaccacagccttcagggcacccgacgtggcccgggccctgctccggcagatccaggtgtccaggcgccggtccttgggggtgaggcggccgctgcaggagcacgtgcgatttatggactttgactggtttcctgcgtttatcacgggggccacgtcaggagccattgctgcgggagccacggccagagccaccactgcatcgcgcctgccgtcctctgctgtgacccctcgggccccgcaccccagtcacacaagccagcccgttgccaagaccacggcagcccccaccacacgtcggccccccaccactgcccccagccgtgtgcccggacgtcggcccccggccccccagcagcctccaaagccctgtgactcacagccctgcttccacggggggacctgccaggactgggcattgggcgggggcttcacctgcagctgcccggcaggcaggggaggcgccgtctgtgagaaggtgcttggcgcccctgtgccggccttcgagggccgctccttcctggccttccccaccctccgcgcctaccacacgctgcgcctggcactggaattccgggcgctggagcctcaggggctgctgctgtacaatggcaacgcccggggcaaggacttcctggcattggcgctgctagatggccgcgtgcagctcaggtttgacacaggttcggggccggcggtgctgaccagtgccgtgccggtagagccgggccagtggcaccgcctggagctgtcccggcactggcgccggggcaccctctcggtggatggtgagacccctgttctgggcgagagtcccagtggcaccgacggcctcaacctggacacagacctctttgtgggcggcgtacccgaggaccaggctgccgtggcgctggagcggaccttcgtgggcgccggcctgagggggtgcatccgtttgctggacgtcaacaaccagcgcctggagcttggcattgggccgggggctgccacccgaggctctggcgtgggcgagtgcggggaccacccctgcctgcccaacccctgccatggcggggccccatgccagaacctggaggctggaaggttccattgccagtgcccgcccggccgcgtcggaccaacctgtgccgatgagaagagcccctgccagcccaacccctgccatggggcggcgccctgccgtgtgctgcccgagggtggtgctcagtgcgagtgccccctggggcgtgagggcaccttctgccagacagcctcggggcaggacggctctgggcccttcctggctgacttcaacggcttctcccacctggagctgagaggcctgcacacctttgcacgggacctgggggagaagatggcgctggaggtcgtgttcctggcacgaggccccagcggcctcctgctctacaacgggcagaagacggacggcaagggggacttcgtgtcgctggcactgcgggaccgccgcctggagttccgctacgacctgggcaagggggcagcggtcatcaggagcagggagccagtcaccctgggagcctggaccagggtctcactggagcgaaacggccgcaagggtgccctgcgtgtgggcgacggcccccgtgtgttgggggagtccccggttccgcacaccgtcctcaacctgaaggagccgctctacgtagggggcgctcccgacttcagcaagctggcccgtgctgctgccgtgtcctctggcttcgacggtgccatccagctggtctccctcggaggccgccagctgctgaccccggagcacgtgctgcggcaggtggacgtcacgtcctttgcaggtcacccctgcacccgggcctcaggccacccctgcctcaatggggcctcctgcgtcccgagggaggctgcctatgtgtgcctgtgtcccgggggattctcaggaccgcactgcgagaaggggctggtggagaagtcagcgggggacgtggataccttggcctttgacgggcggacctttgtcgagtacctcaacgctgtgaccgagagcgagaaggcactgcagagcaaccactttgaactgagcctgcgcactgaggccacgcaggggctggtgctctggagtggcaaggccacggagcgggcagactatgtggcactggccattgtggacgggcacctgcaactgagctacaacctgggctcccagcccgtggtgctgcgttccaccgtgcccgtcaacaccaaccgctggttgcgggtcgtggcacatagggagcagagggaaggttccctgcaggtgggcaatgaggcccctgtgaccggctcctccccgctgggcgccacgcagctggacactgatggagccctgtggcttgggggcctgccggagctgcccgtgggcccagcactgcccaaggcctacggcacaggctttgtgggctgcttgcgggatgtggtggtgggccggcacccgctgcacctgctggaggacgccgtcaccaagccagagctgcggccctgccccaccccatgagctggcaccagagccccgcgcccgctgtaattattttctatttttgtaaacttgttgctttttgatatgattttcttgcctgagtgttggccggagggactgctggcccggcctcccttccgtccaggcagccgtgctgcagacagacctagtgctgagggatggacaggcgaggtggcagcgtggagggctcggcgtggatggcagcctcaggacacacacccctgcctcaaggtgctgagcccccgccttgcactgcgcctgccccacggtgtccccgccgggaagcagccccggctcctgaatcaccctcgctccgtcaggcgggactcgtgtcccagagaggaaggggctgctgaggtctgatggggcccttcctccgggtgaccccacagggcctttccaagcccctatttgagctgctccttcctgtgtgtgctctggaccctgcctcggcctcctgcgccaatactgtgacttccaaacaatgttactgctgggcacagctctgcgttgctcccgtgctgcctgcgccagccccaggctgctgaggagcagaggccagaccagggccgatctgggtgtcctgaccctcagctggccctgcccagccaccctggacatgaccgtatccctctgccacaccccaggccctgcgaggggctatcgagaggagctcactgtgggatggggttgacctctgccgcctgcctgggtatctgggcctggccatggctgtgttcttcatgtgttgattttatttgacccctggagtggtgggtctcatctttcccatctcgcctgagagcggctgagggctgcctcactgcaaatcctccccacagcgtcagtgaaagtcgtccttgtctcagaatgaccaggggccagccagtgtctgaccaaggtcaaggggcaggtgcagaggtggcagggatggctccgaagccagaaatgccttaaactgcaacgtcccgtcccttccccacccccatcccatccccacccccagccccagcccagtcctcctaggagcaggacccgatgaagcgggcggcggtggggctgggtgccgtgttactaactctagtatgtttctgtgtcaatcgctgtgaaataaagtctgaaaactttaaaagca

SEQ ID NO: 88715 - DNA, 5733 bp, Homo sapiens
gcgggccgctgctgcctctccttgtggtggccgcgtgcgtcctgcccggagccggcgggacatgcccggagcgcgcgctggagcggcgcgaggaggaggcgaacgtggtgctcaccgggacggtggaggagatcctcaacgtggacccggtgcagcacacgtactcctgcaaggttcgggtctggcggtacttgaagggcaaagacctggtggcccgggagagcctgctggacggcggcaacaaggtggtgatcagcggctttggagaccccctcatctgtgacaaccaggtgtccactggggacaccaggatcttctttgtgaaccctgcacccccatacctgtggccagcccacaagaacgagctgatgctcaactccagcctcatgcggatcaccctgcggaacctggaggaggtggagttctgtgtggaagataaacccgggacccacttcactccagtgcctccgacgcctcctgatgcgtgccggggaatgctgtgcggcttcggcgccgtgtgcgagcccaacgcggaggggccgggccgggcgtcctgcgtctgcaagaagagcccgtgccccagcgtggtggcgcctgtgtgtgggtcggacgcctccacctacagcaacgaatgcgagctgcagcgggcgcagtgcagccagcagcgccgcatccgcctgctcagccgcgggccgtgcggctcgcgggacccctgctccaacgtgacctgcagcttcggcagcacctgtgcgcgctcggccgacgggctgacggcctcgtgcctgtgccccgcgacctgccgtggcgcccccgaggggaccgtctgcggcagcgacggcgccgactaccccggcgagtgccagctcctgcgccgcgcctgcgcccgccaggagaatgtcttcaagaagttcgacggcccttgtgacccctgtcagggcgccctccctgacccgagccgcagctgccgtgtgaacccgcgcacgcggcgccctgagatgctcctacggcccgagagctgccctgcccggcaggcgccagtgtgtggggacgacggagtcacctacgaaaacgactgtgtcatgggccgatcgggggccgcccggggtctcctcctgcagaaagtgcgctccggccagtgccagggtcgagaccagtgcccggagccctgccggttcaatgccgtgtgcctgtcccgccgtggccgtccccgctgctcctgcgaccgcgtcacctgtgacggggcctacaggcccgtgtgtgcccaggacgggcgcacgtatgacagtgattgctggcggcagcaggctgagtgccggcagcagcgtgccatccccagcaagcaccagggcccgtgtgaccaggccccgtccccatgcctcggggtgcagtgtgcatttggggcgacgtgtgctgtgaagaacgggcaggcagcgtgtgaatgcctgcaggcgtgctcgagcctctacgatcctgtgtgcggcagcgacggcgtcacatacggcagcgcgtgcgagctggaggccacggcctgtaccctcgggcgggagatccaggtggcgcgcaaaggaccctgtgaccgctgcgggcagtgccgctttggagccctgtgcgaggccgagaccgggcgctgcgtgtgcccctctgaatgcgtggctttggcccagcccgtgtgtggctccgacgggcacacgtaccccagcgagtgcatgctgcacgtgcacgcctgcacacaccagatcagcctgcacgtggcctcagctggaccctgtgagacctgtggagatgccgtgtgtgcttttggggctgtgtgctccgcagggcagtgtgtgtgtccccggtgtgagcaccccccgcccggccccgtgtgtggcagcgacggtgtcacctacggcagtgcctgcgagctacgggaagccgcctgcctccagcagacacagatcgaggaggcccgggcagggccgtgcgagcaggccgagtgcggttccggaggctctggctctggggaggacggtgactgtgagcaggagctgtgccggcagcgcggtggcatctgggacgaggactcggaggacgggccgtgtgtctgtgacttcagctgccagagtgtcccaggcagcccggtgtgcggctcagatggggtcacctacagcaccgagtgtgagctgaagaaggccaggtgtgagtcacagcgagggctctacgtagcggcccagggagcctgccgaggccccaccttcgccccgctgccgcctgtggcccccttacactgtgcccagacgccctacggctgctgccaggacaatatcaccgcagcccggggcgtgggcctggctggctgccccagtgcctgccagtgcaacccccatggctcttacggcggcacctgtgacccagccacaggccagtgctcctgccgcccaggtgtggggggcctcaggtgtgaccgctgtgagcctggcttctggaactttcgaggcatcgtcaccgatggccggagtggctgtacaccctgcagctgtgatccccaaggcgccgtgcgggatgactgtgagcagatgacggggctgtgctcgtgtaagcccggggtggctggacccaagtgtgggcagtgtccagacggccgtgccctgggccccgcgggctgtgaagctgacgcttctgcgcctgcgacctgtgcggagatgcgctgtgagttcggtgcgcggtgcgtggaggagtctggctcagcccactgtgtctgcccgatgctcacctgtccagaggccaacgctaccaaggtctgtgggtcagatggagtcacatacggcaacgagtgtcagctgaagaccatcgcctgccgccagggcctgcaaatctctatccagagcctgggcccgtgccaggaggctgttgctcccagcactcacccgacatctgcctccgtgactgtgaccaccccagggctcctcctgagccaggcactgccggccccccccggcgccctccccctggctcccagcagtaccgcacacagccagaccacccctccgccctcatcgcgacctcggaccactgccagcgtccccaggaccaccgtgtggcccgtgctgacggtgccccccacggcaccctcccctgcacccagcctggtggcgtccgcctttggtgaatctggcagcactgatggaagcagcgatgaggaactgagcggggaccaggaggccagtgggggtggctctggggggctcgagcccttggagggcagcagcgtggccacccctgggccacctgtcgagagggcttcctgctacaactccgcgttgggctgctgctctgatgggaagacgccctcgctggacgcagagggctccaactgccccgccaccaaggtgttccagggcgtcctggagctggagggcgtcgagggccaggagctgttctacacgcccgagatggctgaccccaagtcagaactgttcggggagacagccaggagcattgagagcaccctggacgacctcttccggaattcagacgtcaagaaggatttccggagtgtccgcttgcgggacctggggcccggcaaatccgtccgcgccattgtggatgtgcactttgaccccaccacagccttcagggcacccgacgtggcccgggccctgctccggcagatccaggtgtccaggcgccggtccttgggggtgaggcggccgctgcaggagcacgtgcgatttatggactttgactggtttcctgcgtttatcacgggggccacgtcaggagccattgctgcgggagccacggccagagccaccactgcatcgcgcctgccgtcctctgctgtgacccctcgggccccgcaccccagtcacacaagccagcccgttgccaagaccacggcagcccccaccacacgtcggccccccaccactgcccccagccgtgtgcccggacgtcggcccccggcctcctgcgtcccgagggaggctgcctatgtgtgcctgtgtcccgggggattctcaggaccgcactgcgagaaggggctggtggagaagtcagcgggggacgtggataccttggcctttgacgggcggacctttgtcgagtacctcaacgctgtgaccgagagcgagaaggcactgcagagcaaccactttgaactgagcctgcgcactgaggccacgcaggggctggtgctctggagtggcaaggccacggagcgggcagactatgtggcactggccattgtggacgggcacctgcaactgagctacaacctgggctcccagcccgtggtgctgcgttccaccgtgcccgtcaacaccaaccgctggttgcgggtcgtggcacatagggagcagagggaaggttccctgcaggtgggcaatgaggcccctgtgaccggctcctccccgctgggcgccacgcagctggacactgatggagccctgtggcttgggggcctgccggagctgcccgtgggcccagcactgcccaaggcctacggcacaggctttgtgggctgcttgcgggatgtggtggtgggccggcacccgctgcacctgctggaggacgccgtcaccaagccagagctgcggccctgccccaccccatgagctggcaccagagccccgcgcccgctgtaattattttctatttttgtaaacttgttgctttttgatatgattttcttgcctgagtgttggccggagggactgctggcccggcctcccttccgtccaggcagccgtgctgcagacagacctagtgctgagggatggacaggcgaggtggcagcgtggagggctcggcgtggatggcagcctcaggacacacacccctgcctcaaggtgctgagcccccgccttgcactgcgcctgccccacggtgtccccgccgggaagcagccccggctcctgaatcaccctcgctccgtcaggcgggactcgtgtcccagagaggaaggggctgctgaggtctgatggggcccttcctccgggtgaccccacagggcctttccaagcccctatttgagctgctccttcctgtgtgtgctctggaccctgcctcggcctcctgcgccaatactgtgacttccaaacaatgttactgctgggcacagctctgcgttgctcccgtgctgcctgcgccagccccaggctgctgaggagcagaggccagaccagggccgatctgggtgtcctgaccctcagctggccctgcccagccaccctggacatgaccgtatccctctgccacaccccaggccctgcgaggggctatcgagaggagctcactgtgggatggggttgacctctgccgcctgcctgggtatctgggcctggccatggctgtgttcttcatgtgttgattttatttgacccctggagtggtgggtctcatctttcccatctcgcctgagagcggctgagggctgcctcactgcaaatcctccccacagcgtcagtgaaagtcgtccttgtctcagaatgaccaggggccagccagtgtctgaccaaggtcaaggggcaggtgcagaggtggcagggatggctccgaagccagaaatgccttaaactgcaacgtcccgtcccttccccacccccatcccatccccacccccagccccagcccagtcctcctaggagcaggacccgatgaagcgggcggcggtggggctgggtgccgtgttactaactctagtatgtttctgtgtcaatcgctgtgaaataaagtctgaaaactttaaaagca

SEQ ID NO: 88716 - DNA, 1818 bp, Homo sapiens
aagcctaggctaggtacgaggctgggtttatatcggccgcagggagggccgctgcctatgtgtgcctgtgtcccgggggattctcaggaccgcactgcgagaaggggctggtggagaagtcagcgggggacgtggataccttggcctttgacgggcggacctttgtcgagtacctcaacgctgtgaccgagagcgagaaggcactgcagagcaaccactttgaactgagcctgcgcactgaggccacgcaggggctggtgctctggagtggcaaggccacggagcgggcagactatgtggcactggccattgtggacgggcacctgcaactgagctacaacctgggctcccagcccgtggtgctgcgttccaccgtgcccgtcaacaccaaccgctggttgcgggtcgtggcacatagggagcagagggaaggttccctgcaggtgggcaatgaggcccctgtgaccggctcctccccgctgggcgccacgcagctggacactgatggagccctgtggcttgggggcctgccggagctgcccgtgggcccagcactgcccaaggcctacggcacaggctttgtgggctgcttgcgggatgtggtggtgggccggcacccgctgcacctgctggaggacgccgtcaccaagccagagctgcggccctgccccaccccatgagctggcaccagagccccgcgcccgctgtaattattttctatttttgtaaacttgttgctttttgatatgattttcttgcctgagtgttggccggagggactgctggcccggcctcccttccgtccaggcagccgtgctgcagacagacctagtgctgagggatggacaggcgaggtggcagcgtggagggctcggcgtggatggcagcctcaggacacacacccctgcctcaaggtgctgagcccccgccttgcactgcgcctgccccacggtgtccccgccgggaagcagccccggctcctgaatcaccctcgctccgtcaggcgggactcgtgtcccagagaggaaggggctgctgaggtctgatggggcccttcctccgggtgaccccacagggcctttccaagcccctatttgagctgctccttcctgtgtgtgctctggaccctgcctcggcctcctgcgccaatactgtgacttccaaacaatgttactgctgggcacagctctgcgttgctcccgtgctgcctgcgccagccccaggctgctgaggagcagaggccagaccagggccgatctgggtgtcctgaccctcagctggccctgcccagccaccctggacatgaccgtatccctctgccacaccccaggccctgcgaggggctatcgagaggagctcactgtgggatggggttgacctctgccgcctgcctgggtatctgggcctggccatggctgtgttcttcatgtgttgattttatttgacccctggagtggtgggtctcatctttcccatctcgcctgagagcggctgagggctgcctcactgcaaatcctccccacagcgtcagtgaaagtcgtccttgtctcagaatgaccaggggccagccagtgtctgaccaaggtcaaggggcaggtgcagaggtggcagggatggctccgaagccagaaatgccttaaactgcaacgtcccgtcccttccccacccccatcccatccccacccccagccccagcccagtcctcctaggagcaggacccgatgaagcgggcggcggtggggctgggtgccgtgttactaactctagtatgtttctgtgtcaatcgctgtgaaataaagtctgaaaactttaaaagca

SEQ ID NO: 88717 - DNA, 6475 bp, Homo sapiens
gcgggccgctgctgcctctccttgtggtggccgcgtgcgtcctgcccggagccggcgggacatgcccggagcgcgcgctggagcggcgcgaggaggaggcgaacgtggtgctcaccgggacggtggaggagatcctcaacgtggacccggtgcagcacacgtactcctgcaaggttcgggtctggcggtacttgaagggcaaagacctggtggcccgggagagcctgctggacggcggcaacaaggtggtgatcagcggctttggagaccccctcatctgtgacaaccaggtgtccactggggacaccaggatcttctttgtgaaccctgcacccccatacctgtggccagcccacaagaacgagctgatgctcaactccagcctcatgcggatcaccctgcggaacctggaggaggtggagttctgtgtggaagataaacccgggacccacttcactccagtgcctccgacgcctcctgatgcgtgccggggaatgctgtgcggcttcggcgccgtgtgcgagcccaacgcggaggggccgggccgggcgtcctgcgtctgcaagaagagcccgtgccccagcgtggtggcgcctgtgtgtgggtcggacgcctccacctacagcaacgaatgcgagctgcagcgggcgcagtgcagccagcagcgccgcatccgcctgctcagccgcgggccgtgcggctcgcgggacccctgctccaacgtgacctgcagcttcggcagcacctgtgcgcgctcggccgacgggctgacggcctcgtgcctgtgccccgcgacctgccgtggcgcccccgaggggaccgtctgcggcagcgacggcgccgactaccccggcgagtgccagctcctgcgccgcgcctgcgcccgccaggagaatgtcttcaagaagttcgacggcccttgtgacccctgtcagggcgccctccctgacccgagccgcagctgccgtgtgaacccgcgcacgcggcgccctgagatgctcctacggcccgagagctgccctgcccggcaggcgccagtgtgtggggacgacggagtcacctacgaaaacgactgtgtcatgggccgatcgggggccgcccggggtctcctcctgcagaaagtgcgctccggccagtgccagggtcgagaccagtgcccggagccctgccggttcaatgccgtgtgcctgtcccgccgtggccgtccccgctgctcctgcgaccgcgtcacctgtgacggggcctacaggcccgtgtgtgcccaggacgggcgcacgtatgacagtgattgctggcggcagcaggctgagtgccggcagcagcgtgccatccccagcaagcaccagggcccgtgtgaccaggccccgtccccatgcctcggggtgcagtgtgcatttggggcgacgtgtgctgtgaagaacgggcaggcagcgtgtgaatgcctgcaggcgtgctcgagcctctacgatcctgtgtgcggcagcgacggcgtcacatacggcagcgcgtgcgagctggaggccacggcctgtaccctcgggcgggagatccaggtggcgcgcaaaggaccctgtgaccgctgcgggcagtgccgctttggagccctgtgcgaggccgagaccgggcgctgcgtgtgcccctctgaatgcgtggctttggcccagcccgtgtgtggctccgacgggcacacgtaccccagcgagtgcatgctgcacgtgcacgcctgcacacaccagatcagcctgcacgtggcctcagctggaccctgtgagacctgtggagatgccgtgtgtgcttttggggctgtgtgctccgcagggcagtgtgtgtgtccccggtgtgagcaccccccgcccggccccgtgtgtggcagcgacggtgtcacctacggcagtgcctgcgagctacgggaagccgcctgcctccagcagacacagatcgaggaggcccgggcagggccgtgcgagcaggccgagtgcggttccggaggctctggctctggggaggacggtgactgtgagcaggagctgtgccggcagcgcggtggcatctgggacgaggactcggaggacgggccgtgtgtctgtgacttcagctgccagagtgtcccaggcagcccggtgtgcggctcagatggggtcacctacagcaccgagtgtgagctgaagaaggccaggtgtgagtcacagcgagggctctacgtagcggcccagggagcctgccgaggccccaccttcgccccgctgccgcctgtggcccccttacactgtgcccagacgccctacggctgctgccaggacaatatcaccgcagcccggggcgtgggcctggctggctgccccagtgcctgccagtgcaacccccatggctcttacggcggcacctgtgacccagccacaggccagtgctcctgccgcccaggtgtggggggcctcaggtgtgaccgctgtgagcctggcttctggaactttcgaggcatcgtcaccgatggccggagtggctgtacaccctgcagctgtgatccccaaggcgccgtgcgggatgactgtgagcagatgacggggctgtgctcgtgtaagcccggggtggctggacccaagtgtgggcagtgtccagacggccgtgccctgggccccgcgggctgtgaagctgacgcttctgcgcctgcgacctgtgcggagatgcgctgtgagttcggtgcgcggtgcgtggaggagtctggctcagcccactgtgtctgcccgatgctcacctgtccagaggccaacgctaccaaggtctgtgggtcagatggagtcacatacggcaacgagtgtcagctgaagaccatcgcctgccgccagggcctgcaaatctctatccagagcctgggcccgtgccaggaggctgttgctcccagcactcacccgacatctgcctccgtgactgtgaccaccccagggctcctcctgagccaggcactgccggccccccccggcgccctccccctggctcccagcagtaccgcacacagccagaccacccctccgccctcatcgcgacctcggaccactgccagcgtccccaggaccaccgtgtggcccgtgctgacggtgccccccacggcaccctcccctgcacccagcctggtggcgtccgcctttggtgaatctggcagcactgatggaagcagcgatgaggaactgagcggggaccaggaggccagtgggggtggctctggggggctcgagcccttggagggcagcagcgtggccacccctgggccacctgtcgagagggcttcctgctacaactccgcgttgggctgctgctctgatgggaagacgccctcgctggacgcagagggctccaactgccccgccaccaaggtgttccagggcgtcctggagctggagggcgtcgagggccaggagctgttctacacgcccgagatggctgaccccaagtcagaactgttcggggagacagccaggagcattgagagcaccctggacgacctcttccggaattcagacgtcaagaaggatttccggagtgtccgcttgcgggacctggggcccggcaaatccgtccgcgccattgtggatgtgcactttgaccccaccacagccttcagggcacccgacgtggcccgggccctgctccggcagatccaggtgtccaggcgccggtccttgggggtgaggcggccgctgcaggagcacgtgcgatttatggactttgactggtttcctgcgtttatcacgggggccacgtcaggagccattgctgcgggagccacggccagagccaccactgcatcgcgcctgccgtcctctgctgtgacccctcgggccccgcaccccagtcacacaagccagcccgttgccaagaccacggcagcccccaccacacgtcggccccccaccactgcccccagccgtgtgcccggacgtcggcccccggccccccagcagcctccaaagccctgtgactcacagccctgcttccacggggggacctgccaggactgggcattgggcgggggcttcacctgcagctgcccggcaggcaggggaggcgccgtctgtgagaaggtgcttggcgcccctgtgccggccttcgagggccgctccttcctggccttccccaccctccgcgcctaccacacgctgcgcctggcactggaattccgggcgctggagcctcaggggctgctgctgtacaatggcaacgcccggggcaaggacttcctggcattggcgctgctagatggccgcgtgcagctcaggtttgacacaggttcggggccggcggtgctgaccagtgccgtgccggtagagccgggccagtggcaccgcctggagctgtcccggcactggcgccggggcaccctctcggtggatggtgagacccctgttctgggcgagagtcccagtggcaccgacggcctcaacctggacacagacctctttgtgggcggcgtacccgaggaccaggctgccgtggcgctggagcggaccttcgtgggcgccggcctgagggggtgcatccgtttgctggacgtcaacaaccagcgcctggagcttggcattgggccgggggctgccacccgaggctctggcgtgggcgagtgcggggaccacccctgcctgcccaacccctgccatggcggggccccatgccagaacctggaggctggaaggttccattgccagtgcccgcccggccgcgtcggaccaacctgtgccgatgagaagagcccctgccagcccaacccctgccatggggcggcgccctgccgtgtgctgcccgagggtggtgctcagtgcgagtgccccctggggcgtgagggcaccttctgccagacagcctcggggcaggacggctctgggcccttcctggctgacttcaacggcttctcccacctggagctgagaggcctgcacacctttgcacgggacctgggggagaagatggcgctggaggtcgtgttcctggcacgaggccccagcggcctcctgctctacaacgggcagaagacggacggcaagggggacttcgtgtcgctggcactgcgggaccgccgcctggagttccgctacgacctgggcaagggggcagcggtcatcaggagcagggagccagtcaccctgggagcctggaccagggtctcactggagcgaaacggccgcaagggtgccctgcgtgtgggcgacggcccccgtgtgttgggggagtccccggttccgcacaccgtcctcaacctgaaggagccgctctacgtagggggcgctcccgacttcagcaagctggcccgtgctgctgccgtgtcctctggcttcgacggtgccatccagctggtctccctcggaggccgccagctgctgaccccggagcacgtgctgcggcaggtggacgtcacgtcctttgcaggtcacccctgcacccgggcctcaggccacccctgcctcaatggggcctcctgcgtcccgagggaggctgcctatgtgtgcctgtgtcccgggggattctcaggaccgcactgcgagaaggggctggtggagaagtcagcgggggacgtggataccttggcctttgacgggcggacctttgtcgagtacctcaacgctgtgaccgagagcgagaaggcactgcagagcaaccactttgaactgagcctgcgcactgaggccacgcaggggctggtgctctggagtggcaaggccacggagcgggcagactatgtggcactggccattgtggacgggcacctgcaactgagctacaacctgggctcccagcccgtggtgctgcgttccaccgtgcccgtcaacaccaaccgctggttgcgggtcgtggcacatagggagcagagggaaggttccctgcaggtgggcaatgaggcccctgtgaccggctcctccccgctgggcgccacgcagctggacactgatggagccctgtggcttgggggcctgccggagctgcccgtgggcccagcactgcccaaggcctacggcacaggctttgtgggctgcttgcgggatgtggtggtgggccggcacccgctgcacctgctggaggacgccgtcaccaagccagagctgcggccctgccccaccccatgagctggcaccagagccccgcgcccgctgtaattattttctatttttgtaaacttgttgctttttgatatgattttcttgcctgagtgttggccggagggactgctggcccggcctcccttccgtccaggcagccgtgctgcagacagacctagtgctgagggatggacaggcgaggtggcagcgtggagggctcggcgtggatggcagcctcaggacacacacccctgcctcaaggtgctgagcccccgccttgcactgcgcctgccccacggtgtccgcgggaaaagccgggtctgattaacctcgtccgagggggatcggtccaaagagagggtgtgaggctgaggggcctctccggggaaccc

SEQ ID NO: 88718 - DNA, 3938 bp, Homo sapiens
gcgggccgctgctgcctctccttgtggtggccgcgtgcgtcctgcccggagccggcgggacatgcccggagcgcgcgctggagcggcgcgaggaggaggcgaacgtggtgctcaccgggacggtggaggagatcctcaacgtggacccggtgcagcacacgtactcctgcaaggttcgggtctggcggtacttgaagggcaaagacctggtggcccgggagagcctgctggacggcggcaacaaggtggtgatcagcggctttggagaccccctcatctgtgacaaccaggtgtccactggggacaccaggatcttctttgtgaaccctgcacccccatacctgtggccagcccacaagaacgagctgatgctcaactccagcctcatgcggatcaccctgcggaacctggaggaggtggagttctgtgtggaagataaacccgggacccacttcactccagtgcctccgacgcctcctgatgcgtgccggggaatgctgtgcggcttcggcgccgtgtgcgagcccaacgcggaggggccgggccgggcgtcctgcgtctgcaagaagagcccgtgccccagcgtggtggcgcctgtgtgtgggtcggacgcctccacctacagcaacgaatgcgagctgcagcgggcgcagtgcagccagcagcgccgcatccgcctgctcagccgcgggccgtgcggctcgcgggacccctgctccaacgtgacctgcagcttcggcagcacctgtgcgcgctcggccgacgggctgacggcctcgtgcctgtgccccgcgacctgccgtggcgcccccgaggggaccgtctgcggcagcgacggcgccgactaccccggcgagtgccagctcctgcgccgcgcctgcgcccgccaggagaatgtcttcaagaagttcgacggcccttgtgacccctgtcagggcgccctccctgacccgagccgcagctgccgtgtgaacccgcgcacgcggcgccctgagatgctcctacggcccgagagctgccctgcccggcaggcgccagtgtgtggggacgacggagtcacctacgaaaacgactgtgtcatgggccgatcgggggccgcccggggtctcctcctgcagaaagtgcgctccggccagtgccagggtcgagaccagtgcccggagccctgccggttcaatgccgtgtgcctgtcccgccgtggccgtccccgctgctcctgcgaccgcgtcacctgtgacggggcctacaggcccgtgtgtgcccaggacgggcgcacgtatgacagtgattgctggcggcagcaggctgagtgccggcagcagcgtgccatccccagcaagcaccagggcccgtgtgaccaggccccgtccccatgcctcggggtgcagtgtgcatttggggcgacgtgtgctgtgaagaacgggcaggcagcgtgtgaatgcctgcaggcgtgctcgagcctctacgatcctgtgtgcggcagcgacggcgtcacatacggcagcgcgtgcgagctggaggccacggcctgtaccctcgggcgggagatccaggtggcgcgcaaaggaccctgtgaccgctgcgggcagtgccgctttggagccctgtgcgaggccgagaccgggcgctgcgtgtgcccctctgaatgcgtggctttggcccagcccgtgtgtggctccgacgggcacacgtaccccagcgagtgcatgctgcacgtgcacgcctgcacacaccagatcagcctgcacgtggcctcagctggaccctgtgagacctgtggagatgccgtgtgtgcttttggggctgtgtgctccgcagggcagtgtgtgtgtccccggtgtgagcaccccccgcccggccccgtgtgtggcagcgacggtgtcacctacggcagtgcctgcgagctacgggaagccgcctgcctccagcagacacagatcgaggaggcccgggcagggccgtgcgagcaggccgagtgcggttccggaggctctggctctggggaggacggtgactgtgagcaggagctgtgccggcagcgcggtggcatctgggacgaggactcggaggacgggccgtgtgtctgtgacttcagctgccagagtgtcccaggcagcccggtgtgcggctcagatggggtcacctacagcaccgagtgtgagctgaagaaggccaggtgtgagtcacagcgagggctctacgtagcggcccagggagcctgccgaggccccaccttcgccccgctgccgcctgtggcccccttacactgtgcccagacgccctacggctgctgccaggacaatatcaccgcagcccggggcgtgggcctggctggctgccccagtgcctgccagtgcaacccccatggctcttacggcggcacctgtgacccagccacaggccagtgctcctgccgcccaggtgtggggggcctcaggtgtgaccgctgtgagcctggcttctggaactttcgaggcatcgtcaccgatggccggagtggctgtacaccctgcagctgtgatccccaaggcgccgtgcgggatgactgtgagcagatgacggggctgtgctcgtgtaagcccggggtggctggacccaagtgtgggcagtgtccagacggccgtgccctgggccccgcgggctgtgaagctgacgcttctgcgcctgcgacctgtgcggagatgcgctgtgagttcggtgcgcggtgcgtggaggagtctggctcagcccactgtgtctgcccgatgctcacctgtccagaggccaacgctaccaaggtctgtgggtcagatggagtcacatacggcaacgagtgtcagctgaagaccatcgcctgccgccagggcctgcaaatctctatccagagcctgggcccgtgccaggaggctgttgctcccagcactcacccgacatctgcctccgtgactgtgaccaccccagggctcctcctgagccaggcactgccggccccccccggcgccctccccctggctcccagcagtaccgcacacagccagaccacccctccgccctcatcgcgacctcggaccactgccagcgtccccaggaccaccgtgtggcccgtgctgacggtgccccccacggcaccctcccctgcacccagcctggtggcgtccgcctttggtgaatctggcagcactgatggaagcagcgatgaggaactgagcggggaccaggaggccagtgggggtggctctgggggtgagcagggatcaaggacttggggtgggtgggcaggcgccgagaggctccaccagagcctgggctcagagcgcgtctccccagggctcgagcccttggagggcagcagcgtggccacccctgggccacctgtcgagagggcttcctgctacaactccgcgttgggctgctgctctgatgggaagacgccctcgctggacatgaccgtatccctctgccacaccccaggccctgcgaggggctatcgagaggagctcactgtgggatggggttgacctctgccgcctgcctgggtatctgggcctggccatggctgtgttcttcatgtgttgattttatttgacccctggagtggtgggtctcatctttcccatctcgcctgagagcggctgagggctgcctcactgcaaatcctccccacagcgtcagtgaaagtcgtccttgtctcagaatgaccaggggccagccagtgtctgaccaaggtcaaggggcaggtgcagaggtggcagggatggctccgaagccagaaatgccttaaactgcaacgtcccgtcccttccccacccccatcccatccccacccccagccccagcccagtcctcctaggagcaggacccgatgaagcgggcggcggtggggctgggtgccgtgttactaactctagtatgtttctgtgtcaatcgctgtgaaataaagtctgaaaactttaaaagca

SEQ ID NO: 88719 - DNA, 414 bp, Homo sapiens
tcaaaaccactaactagcggccgggcacggtggctcacacctgtaatcccagcactttgggaggctgaagtgggtggaccacttgaggtcagcagtttcaagaccagcctggccaacatggtgaaactccatggtgaaaaatcagccggaccgcggtgggcacacccgtaatcccagctactcgggaagctgaggcaggagaatcacttgaacccggcgggcagaggttgcagtgagccgagaaagcgccacagcactccagcctgggcgacagagcgagactccatttcaaaacaaaaccaaacaaaaaacacgaactggctcttatcttgaatgagttattttttctgagcctttatttcttcgtttgttcaaatagcgaccattaaactttgtgtttagtatctgacaaac

SEQ ID NO: 88720 - DNA, 255 bp, Homo sapiens
gatcagaaacatttacaatctattctctctgaagcctggcacctggaggcgtcatctgcatgagaattttggactccacaaccttttatcataacccagacattcctttctattgataataactcaaccaattgccaatcagaaaaattaaaaatctacttataacccagaagcactaccccgcaacccttgcttgcttcaaattgttccaactttctggaccgaaccaatgtatagcttaaatgtatttgattg

SEQ ID NO: 88721 - DNA, 624 bp, Homo sapiens
tatcattgttcacatgtcagttggaacaaagctgggaaactaacctttttgagcattgacagtatagtcagacacatccacgaatctcatcaaatcatacaagcctgaaggggaggtattcctctaactggttttatagatgagacagtcgttgtgcagagagattgaggggcttgctcaggatcttgggactagaaaatggtggagcttgtaggctatgacccaaccaacacctatgctctttcctccaagaattaagattgcaatttgaattttcactattagtttcaataatgagcatatgaagaaagcaagcaagtcagaaaatttaaaaatgaaattatcacaccttgtaaagtgttcagatttgacttgaagtttaaagtcttttgtccatttcagtatttcctgtttctttgtaaatccgtagaggatagacgtgaactccaaacctttacactggaagagagaggcatgaactttactgaatacttaatatgtggcaggcagtgagctaggggcttttcatacgttattaactcacttggatttcacaacaacactatgaaggtggaggttgaagttcattctgtttttctcagaacttggtcagcaatgtctata

SEQ ID NO: 88722 - DNA, 726 bp, Homo sapiens
ctcactgctccccttccccatcccgtcctcctccacggctccccttgcttcacctcacaggggctggaggggggcagtgggtgatgggagggaccagggtcctgcagaaggagctggaccctccctccctgttgctactcccgtcccccgaactcactccccacctgtgccgagctccagaagggcgtgcttctgtgctgccctgcacgtgacagtctcagcagacacccactgggattgtcagggcggtgtctctagggggccctgtctgtgcccagtgctgttccagtgcgggggccagccctgaataaaagaccagctgtctttaggaggctcgcacaccaatgggaggagacaggcaagccagacaagcaaggtggcaggcacagctctgggtgcagcggtgtggggttacagcctcacagggggccaggctggcagcctggtgtgggagctgagactgcctgttcgatgagaggcgttccagcaaagacacaaggagagtgagccctgggcacctgtggaggaggctcaggagggagctgtgagcgtagaggcccagaggccagggtttgtttaaggagtgagtgagcggagtgagaagaaagggccaggtggtggctcacacctgtaatcccaacactttgggcggcccaggcaggaagatcacctgaggccaggagttcaagaccagcctgagcaacgtagcaagacaccatttctacc

SEQ ID NO: 88723 - DNA, 478 bp, Homo sapiens
caggggacatgcctggctccgtctgggtgccaggcccagagccgggcattttcccatagtcatcggccccctgcccgcccccagcatgtcgaggaagggaggagtatttttagttccatcttgaagacgggcacaggaacggagaataactgcctgaaagcactgtccctggtctgagcggcccttggaaaggctcagcctgggcccaggccttgctgcttcccataacagttacaagcactggctctgcattcggagatgaaagggtacacgtggggttctccgaccttccagccgtgtgacctcggactagacctctgtttgcttagctccctccacttgccttcctcgaatgtggggaaccccggaatctgtcttgggaaaagacctggcctctccttctctgggttgggtccatccatgggctcccgcagaggcctgtggttgcagagaccggaagctgcagcttcaggagggt

SEQ ID NO: 88724 - DNA, 613 bp, Homo sapiens
cccgaatctgaccttccacatccccggcaccttcctggaagacccacgtgggaagagcatggaggggagaccccagcatcgttccagagccaggtctggaggagccacctgagctgctgtcattccaccccctggcggtttatactgccttcttgatactgccacctccagtcactggtgttgggcttctgaggtgaccactctgccttcctgggggtacaggaagaccaaggtctacagaagcaccttccaggcttgagctcgttcacagcctgcctggccctgggctggggaacaggcagggagcagcctctggctccagagcagggtgggtctcaatgcatcacatccgtccttccggttcccagcagagcctttgaatgctctgcctcagatctgcagccagaggaaaagggggagtgggcagggcagactcagtctagggacgagctatgcagcacagccagtgccagctccccacgtgcctccccaaccagggtgataaaggctgacacctgggtgtgtagctgggtctggcccccagggcatcacagtgaccggggcaaaagggtcccacaagcgcacaggggtggaggctgatggcagagggaag

SEQ ID NO: 88725 - DNA, 318 bp, Homo sapiens
cacgccattctcctgcttcagcctcctgagtcgctgggactacaggcacccaccaccacgaccggttaatttttttgtatttttagtagagacagggtttcaccatgttagccaggatggtctcgatctcctgatctcacaatccacccaccttggcctcccaaagtgttgggattacaggcgtgagccactgcgctcggcctctagccacaatgtggttataattgtgaatgggatattcacaattataaagatgtagcaacctgaaaatgtctaaaaacagaactgtttgttgactgtctacctccaccccctcac

SEQ ID NO: 88726 - DNA, 603 bp, Homo sapiens
aataatttctctcatactgcttttaactcatttaatttttcaactttttaagaataacaaaagtgatattaattgtaaaaatgctgaagtgacatatgaatttatgaagtgcatatgtattttttagtttaccaatgagatgggagaaatgctgtcttatattttaacatacattttggccattacacagatgaagcaacttttcatttgttaatacataatgcatactttttcttctgtgcaattcctctttgtattctttgctcattttcccactgggatttgcaagttctttattatttgataatctctatacattctgaatatcaattttttgttatatataccatgtaaatattttcttctaatttgttatttgtcttttaatggtatttatcaattgtttgctaaaaatgagtttgtttagttagtaaaatttgtctatctttaacttcatgatatttgtatatcatgtcatgaggaaaaggcatgaatattttaaaaacttccttgtagtgttaattttattttttatttcattctttaagttatttgaaatttattgtttatttcttcaaattccaaataataaccaactttctc

SEQ ID NO: 88727 - DNA, 700 bp, Homo sapiens
  misc_feature (294)..(294): n is a, c, g, or t
  misc_feature (537)..(537): n is a, c, g, or t
  misc_feature (539)..(539): n is a, c, g, or t
  misc_feature (552)..(552): n is a, c, g, or t
  misc_feature (680)..(680): n is a, c, g, or t
tggatatgcaggatatctgggtaaaaaaaaatatgtatacattatttgaggcatctcttaaatgtatacaaagacaaatactctaaggctgccattgtttagaagtctcaatcatattaaggaaaacactagaataaaaattaataaatgtagtgacactggagtctgataaacctgtatttgaatgaccctgagcaaccttatttttgttctttttcattgactctaaaatgtagatggtaatgcttaccttataaggttactgtgaggacttagtgaaataatacatggaangtgcctaacctaggatcagaatcaaggtcagtcctccttccctcaaatgttagcttccttttctacctttttttctcttcacttcccttagtatctataaaaagtaggaaagaagaggatacttttttttttcatattcctacaaggctgttttaagtaatgttcttttagttgaatgacagtcacatcatttgagaggttagtctaataatagcactggagacttgaggatgacaagtgcgnantttcagttgggtntggactccaatttatttatttatttgtttataatcaacatggatttatttgcacctgaccacttttgacagaattaaaaggagaaattgtagacttctacaattacattcacagatttgtgcactacngtctcagaaacttaggaagc

SEQ ID NO: 88728 - DNA, 1650 bp, Homo sapiens
caccagccagcctctgggtctgtagcaaccgcccagcgttgaggcgcggctcatgcccccagtatcccggtccagctattccgaggacatcgtgggctctcggagaaggcgacgcagctcctcggggagcccaccatccccgcagagcagatgttcctcttgggatggctgttcccgctctcactcccgcggccgtgagggcctcaggcctccttggagtgagttggacgtgggcgctctttacccctttagtcgctctgggtcgcgagggcggctcccaagattccgcaactacgccttcgcgtcctcctggtcgacctcgtatagtggatatcgctgccatcgtcactgctatgcagaagaacggcagtcagcggaagactacgagaaggaagagagccatcggcagaggaggctgaaggagagagagaggattggggaattgggagcgcctgaagtgtgggggccgtctccaaagttccctcagctagattctgacgaacataccccagttgaggatgaagaagaggtaacgcatcagaaaagcagcagttcagattccaactcggaagaacataggaaaaagaagaccagtcgttcaagaaacaagaaaaaaagaaagaataagtcgtctaaaagaaagcataggaaatattctgatagtgacagtaactcagagtctgacacaaattctgactctgatgatgataaaaagagagttaaagccaagaagaaaaagaagaaaaagaaacacaaaacaaagaaaaagaagaataagaaaaccaaaaaagaatccagtgactcaagctgtaaagactcagaagaggacttgtcagaagctacctgggatggagcagccaaatgtggcagatactatggatttaatagggccagaagcacctataatacatacctctcaagatgaaaaacctttgaagtatggccatgctttgcttcccggtggaaggtgcagctatggctgagtatgtaaaagctggaaagcgaatcccacgaagaggtgaaattgggttgacaagtgaagagatcggttcttttgaatgctcaggttatgtcatgagtggtagcaggcatcgcagaatggaggctgtacgactgcgtaaggagaaccagatctacagtgctgatgagaagagagctcttgcatcctttaaccaagaagagagacgaaagagagaaagtaagattttagccagtttccgagagatggtgcacaaaaagacaaaagggaaagatgacaagtaaggacttacttgttgcacagcaggaattttaacaacaaaaattttatgtgaccaaaagtgttaaaaggctttacagtgctactgtacttaccatattagtaagtccctcaggaaaaagcttcttttgagatatctttagcagcttattttttgttattttaactttaaaaagtaatatgtgcacatggttttaaaaatattcaaccattataggaggagagttagtaaaaagtgaatctttcactttagcccctgacacctttcccccaaaaatatatattttggtgtcttatatacagaatatacattctgtgcatatacaagagtatatgttgcagcataaagattaaaagctattaaagttttttttcgctcgttaaaaatttgc

SEQ ID NO: 88729 - DNA, 465 bp, Homo sapiens
aagacaggttaggccagattccattatgcttagaaagccagatttgggaagcataacccactatgggagtgtcctgggaaacctcaattactgtgatctccacagctttaccgtaatccagccttggaaattcaggaatgagagagatgttctcccccttttataaccctgttgagtgccatccctaagctaactaaaattagacatgactatgaattccaataatttgctggtaggagaataaataaagactttgcaagtttatgcaggttatgagagcaaaggttagctgacagaacagcagcaacatctttattgagcataaacaaatcatttatccctccttctgctcccctgttacatgtttaaactcagggaaaccacgataaaaccctgcagatagagctaggattattcaccccagcgatcctaaatcacacaaggcttgtatctcacagcttatag

SEQ ID NO: 88730 - DNA, 388 bp, Homo sapiens
ggtgtcgatctaaggatccctgcagcttgccggccgaggaggattctgtgttagaaaaactaggggaaaggaaaccatgcaacagtcaaccttctgagctttcttcagagacctcaggaatagccaggccagaagaaggaaggcctgtggtgagtgggacaggaaatgacatcaccaccccaccgaacaaggagctcccaccaagcccagagaagaaaacaaaggcagggaagggaggaaagaaaaaacagaacaagcaagacaaacagagtccaaacaaaagagaagccagaaattcaaatatacccaatcttatatacagacaagtggacacgtgtttcaggtaagagtcagagatggaaagcctgacctcacaacagcacccgac

SEQ ID NO: 88731 - DNA, 144 bp, Homo sapiens
acagcacagaggaggagacaagcatctaatgatgacattctggtctcgtcttccgtctcccccgtgttcccctcttgtctcccctgttcccctctcccttccctcctcccatgtcactgtgctgtgggatcctctagaacagcc

SEQ ID NO: 88732 - DNA, 262 bp, Homo sapiens
cttagtctctccagtcaggacataaggctatctgcttcccctctccagtcaaggcatgagactaaggctatctgcttcccttatgccctgactggagaggggagggaggagaggcaaggcccacagagggcatcccagctaggccttgggatggctgcagtgaggagaaatcccgggaactgtattgacacaaagattcttattgcacttgtattttttgtattaaagtttgcatggtttctaataaaggattcaaacataa

SEQ ID NO: 88733 - DNA, 690 bp, Homo sapiens
gtgaagagcagggccagggtgggtcgagggctcttttaagtacttagggagatgaccttgtctttgaccagactgagatagcagcttacagagggagcgagaaaccctgaacatggagaagatttaaaaggtagcatggggttggctctgacagtataccttctctctgaatgagtcttttgtgtccttctcttcaggttcagattcagaacaagaaagtggacatctctaaggtctcctccaagtgtgggtctaaggctaacatcaagcacaagcctggtgagtggtgcctcccttgcccactgggtctccagggtatgtcgtcctgccatgggtcagctgggcagccagctggctggcaagggtttcatctctgtgcctttagcatcccatgaagactacccaggacaccacagtcctcattctgtcagggagcaggagttcgggtgctaacctctaagtggaggaggagcagtttcttacagcagccatctgcacaggcattctcttgagtacctactgtgtgtgtggaactattgagctaggcctggggaagtggtgcactctgagctgagaacctggattggctctaaacgaggattacagaagctactgctgaaggagctgtatagcagggcagtgttcaggtcccacctatcagatgcaggagcaaagggtgctcccaaccag

SEQ ID NO: 88734 - DNA, 1026 bp, Homo sapiens
tgagacacgaggaacatggaataccatactgaacaccagctccgtctcggcggcggcggagtctatgctacttctcgccagtgctggagtgcaatggcgcgatctcgtgctcactgcgatctaccgacctcctgggttcaagtgattctacacttcctcagcctcctgacttgctgagactacagattagagaactcagccctgaaaggtgactcattcaaggccacagcagttgcagtggtgcagaatggctgacctcagtcttgcagatgcattaacagaaccatctccagacattgagggagagataaagcgggacttcattgccacactagaggcagaggcctttgatgatgttgtgggagaaactgttggaaaaacagactatattcctctcctggatgttgatgagaaaaccgggaactcagagtcaaagaagaaaccgtgctcagaaactagccagattgaagatactccatcttctaaaccaacactcctagccaatggtggtcatggagtagaagggagcgatactacagggtctccaactgaattccttgaagagaaaatggcctaccaggaatacccaaatagccagaactggccagaagataccaacttttgtttccaacctgagcaagtggtcgatcctatccagactgaatcactttaagatgtaacatgatgatgcacctggcagattatggtctatcactccaagtgctgacacgctgaatacttcaattattggcgggacaaaatatccactgacaaacagatacggatggtctccctgaaacaagctgagtacctaagatgtggcactgaggaaagccattcaactccccaacacctagagaaccataggaccccagcaggcgagtgagacaacacccacaagcaaggaagaaccgaacgagatagcaaggagaaaacaaggcacacaaaaaaaggaacacgccacacgagtgcacaagtaggacaggaacacaagacaggggcccgccaagaaacaacacggcaaca

SEQ ID NO: 88735 - DNA, 770 bp, Homo sapiens
gtgtgttcttcctggagaaatagattgaaattcatttggacagaaatgttgaaggcaggtgcctgatccaaaatgcatttagtcaggactgaacacaagctgcctggatagttcctgcagttgcagtggtgcagaatggctgacctcagtcttgcagatgcattaacagaaccatctccagacattgagggagagataaagcgggacttcattgccacactagaggcagaggcctttgatgatgttgtgggagaaactgttggaaaaacagactatattcctctcctggatgttgatgagaaaaccgggaactcagagtcaaagaagaaaccgtgctcagaaactagccagattgaagacctcccactacccccacaccctgccagcctttcttttcatcttcctcttgatactccatcttctaaaccaacactcctagccaatggtggtcatggagtagaagggagcgatactacagggtctccaactgaattccttgaagagaaaatggcctaccaggaatacccaaatagccagaactggccagaagataccaacttttgtttccaacctgagcaagtggtcgatcctatccagactgatccctttaagatgtaccatgatgatgacctggcagatttggtctttccctccagtgcgacagctgatacttcaatatttgcaggacaaaatgatcccttgaaagacagttacgacaggtgttgtactcagggtggtctggggaagcttaaatttcaaactcagagtct

SEQ ID NO: 88736 - DNA, 402 bp, Homo sapiens
  misc_feature (7)..(7): n is a, c, g, or t
  misc_feature (69)..(69): n is a, c, g, or t
  misc_feature (153)..(153): n is a, c, g, or t
  misc_feature (161)..(161): n is a, c, g, or t
  misc_feature (194)..(194): n is a, c, g, or t
  misc_feature (209)..(209): n is a, c, g, or t
  misc_feature (245)..(245): n is a, c, g, or t
ccttgcnaatgagtagaatttccccttctctccccttgtcaacaggtttaaaaacctcacagcttgtanaatgtaacccatttggggcccgcttttaacttggactagtgtaactccttcatgcaataaactgaaaagagccatgctgtctantcttgaantccctcatttaaacagaggtcaagcaataggcncctggcagtgtcaancctgaaaccaagcaataccgtcatgtttcagccaanccagaggccctgtgtgatgtgtactccgcagctgtttggggtgggacatttctgtacttctcgatttgcttatggctcagccattacctgtgtcagtccatgattctgttgtaacagttttaagagtaaataaataaagctgcctgatgtcccatca

SEQ ID NO: 88737 - DNA, 1644 bp, Homo sapiens
tgggctcaagggaagcaactccgggagagatggagaatagcatcacccctggctgcccagtgattggggtggtaaatgataactctgagcagctgaagtgtgagtccccactcctggtgtctctagcccacccagcccccattattgagcattcacccaccaccattccgccaatcactatggtgttcacccaggaacatttgaatgcaagctgtcacatcagagaccatgataaggagttggagaaattgagttctaccgaggaggctgtgctcaaccaagccccccagcagaaaaaggcagtgcgcagggccctgtctgaatgttctcacctctcagttcccccagctgtcaaccttgcagataagtaccctgaactccctgcccgagaagagccttcttctggcctgctgcctccccctagtagcccaatgcctagtcctacacctgggaaactgggagctcctgctatgaagcgctccatgactgtgggtgaggaacagacagctagctacaaattgagccctgggaaactgcccatcttgtctactaaagagatacctcctttcatctgtgaggaaccagtggccaagaagagagaagaattggctcacttcagcaacagcagcagcaactctgggaagaaggaactcggcactgctggattatatctccatagtaagctggagcagattcctgaaggaagcagcaaggaaaaagggcaggaagattttagtgaaactagaattgattcatgctcgcaggtttgccagcgaggagagaaacagccaggacagacggctctggcagggaagaaagaaattgaggtcactgcaacccagagcactccatcgttcctgtttgaaaagcccccacgtgatggtatgtttctaaattttgcctccattgggaacaagcagacagcaaggaaggaaccaaagtgacagattaccggcagagcactaagcagctttttacagctgggttctgtgactgcctggggaaagcttaattcccttgtgttggaagcttgctgggagtgaggcaaggaagagaacaaagtgaatcttgcagggtcaagctgaatgtcttgctagcatgacagataatgtgaattgagtatgcaagtttggggtggaatggggtcagagaatggtgggtataaaaactagaccccctttcttgacctcatgtcaccctgtccaacccatcccccatccacccagccctcagctccctgttggtttgaaccagatgattcctgagctctaaatccttcaatcccaactgattgatttccttgcttgaaaatctgtcactttatatagattcacaatgggtttatcagcactaacctcctctcattaagttgcacaatctgggtggaagctctgttttctgtttttgcttttgagaacgttttacttttgttcaaactgaaaaagagccctttaaagctagctatttaatattctttctgtgttcttcatgtttgacccaatcttgcttctagttttctctttttgtatgtgttttgagaggatttgtggggagaaaaagaagaaagagaaagcagggagagaaggagagacttgcaacctaataaacagctaaattttgcggtctttgtgacagccttttgtg

SEQ ID NO: 88738 - DNA, 6270 bp, Homo sapiens
agcggggtctgggctcccagactctgagagagagcgacggccatcatagaacagcgagggcagtcgatcggcctgcggtccgcttcggcattcgcaggccgcaggcgggaggctagagcccccaggcgcactcgccccaaccgcccgcggctcgggcagctctgcagagacgtcgtggcggcagggccagcacccattggtccgccacagccctccgccctccccctcgccacgcttattggccggagcggcggcgctcgccgggtaggcggtggcggcgtccctcccttgcgccggccctcaagaggcgacgaggatgcgaccgcctccctgcgccccgcccctccggctagctcgctggctcccggctcctcccgacgtctcctacctcctcacggctcttcccggcgctctcctggctcccttctgccccagctccgtctcggcggcggcgggcagttgcagtggtgcagaatggctgacctcagtcttgcagatgcattaacagaaccatctccagacattgagggagagataaagcgggacttcattgccacactagaggcagaggcctttgatgatgttgtgggagaaactgttggaaaaacagactatattcctctcctggatgttgatgagaaaaccgggaactcagagtcaaagaagaaaccgtgctcagaaactagccagattgaagatactccatcttctaaaccaacactcctagccaatggtggtcatggagtagaagggagcgatactacagggtctccaactgaattccttgaagagaaaatggcctaccaggaatacccaaatagccagaactggccagaagataccaacttttgtttccaacctgagcaagtggtcgatcctatccagactgatccctttaagatgtaccatgatgatgacctggcagatttggtctttccctccagtgcgacagctgatacttcaatatttgcaggacaaaatgatcccttgaaagacagttacggtatgtctccctgcaacacagctgttgtacctcaggggtggtctgtggaagccttaaactctccacactcagagtcctttgtttccccagaggctgttgcagaacctcctcagccaacggcagttcccttagagctagccaaggagatagaaatggcatcagaagagaggccaccagcacaagcattggaaataatgatgggactgaagactactgacatggcaccatctaaagaaacagagatggccctcgccaaggacatggcactagctacaaaaaccgaggtggcattggctaaagatatggaatcacccaccaaattagatgtgacactggccaaggacatgcagccatccatggaatcagatatggccctagtcaaggacatggaactacccacagaaaaagaagtggccctggttaaggatgtcagatggcccacagaaacagatgtatcttcagccaagaatgtggtactgcccacagaaacagaggtagccccagccaaggatgtgacactgttgaaagaaacagagagggcatctcctataaaaatggacttagccccttccaaggacatgggaccacccaaagaaaacaagaaagaaacagagagggcatctcctataaaaatggacttggctccttccaaggacatgggaccacccaaagaaaacaagatagtcccagccaaggatttggtattactctcagaaatagaggtggcacaggctaatgacattatatcatccacagaaatatcctctgctgagaaggtggctttgtcctcagaaacagaggtagccctggccagggacatgacactgcccccggaaaccaacgtgatcttgaccaaggataaagcactacctttagaagcagaggtggccccagtcaaggacatggctcaactcccagaaacagaaatagccccggccaaggatgtggctccgtccacagtaaaagaagtgggcttgttgaaggacatgtctccactatcagaaacagaaatggctctgggcaaggatgtgactccacctccagaaacagaagtagttctcatcaagaacgtatgtctgcctccagaaatggaggtggccctgactgaggatcaggtcccagccctcaaaacagaagcacccctggctaaggatggggttctgaccctggccaacaatgtgactccagccaaagatgttccaccactctcagaaacagaggcaacaccagttccaattaaagacatggaaattgcacaaacacaaaaaggaataagtgaggattcccatttagaatctctgcaggatgtggggcagtcagctgcacctactttcatgatttcaccagaaaccgtcacaggaacggggaaaaagtgcagcttgccggccgaggaggattctgtgttagaaaaactaggggaaaggaaaccatgcaacagtcaaccttctgagctttcttcagagacctcaggaatagccaggccagaagaaggaaggcctgtggtgagtgggacaggaaatgacatcaccaccccaccgaacaaggagctcccaccaagcccagagaagaaaacaaagcctttggccaccactcaacctgcaaagacttcaacatcgaaagccaaaacacagcccacttctctccctaagcagccagctcccaccaccattggtgggttgaataaaaaacccatgagccttgcttcaggcttagtgccagctgccccacccaaacgccctgccgtcgcctctgccaggccttccatcttaccttcaaaagacgtgaagccaaagcccattgcagatgcaaaggctcctgagaagcgggcctcaccatccaagccagcttctgccccagcctccagatctgggtccaagagcactcagactgttgcaaaaaccacaacagctgctgctgttgcctcaactggcccaagcagtaggagcccctccacgctcctgcccaagaagcccactgccattaagactgagggaaaacctgcagaagtcaagaagatgactgcaaagtctgtaccagctgacttgagtcgcccaaagagcacctccaccagttccatgaagaaaaccaccactctcagtgggacagcccccgctgcaggggtggttcccagccgagtcaaggccacacccatgccctcccggccctccacaactcctttcatagacaagaagcccacctcggccaaacccagctccaccaccccccggctcagccgcctggccaccaatacttctgctcctgatctgaagaatgtccgctccaaggttggctccacggaaaacatcaagcatcagcctggaggaggccgggccaaagtagagaaaaaaacagaggcagctgctacaacccgaaagcctgaatctaatgcagtcactaaaacagccggcccaattgcaagtgcacagaaacaacctgcggggaaagtccagatagtctccaaaaaagtgagctacagccatattcagtccaagtgtggttccaaggacaatattaagcatgtccctggaggtggtaatgttcagattcagaacaagaaagtggacatctctaaggtctcctccaagtgtgggtctaaggctaacatcaagcacaagcctggtggaggagatgtcaagattgaaagtcagaagttgaacttcaaggagaaggcccaggccaaggtgggatccctcgataatgtgggccacctacctgcaggaggtgctgtgaagactgagggcggtggcagcgaggctcctctgtgtccgggtccccctgctggggaggagccggccatctctgaggcagcgcctgaagctggcgcccccacttcagccagtggcctcaatggccaccccaccctgtcagggggtggtgaccaaagggaggcccagaccttggacagccagatccaggagacaagcatctaatgatgacattctggtctcgtcttccgtctcccccgtgttcccctcttgtctcccctgttcccctctcccttccctcctcccatgtcactgcagattgagacctacaggctgacgttccgggcaaatgccagggcccgcaccgaccacggggccgacattgtctcccgccccccacacttccctggcggccccaactcgggctcccgggtccttggccccctttcccgggctgtccactagaccagtgagcgcttgggcgccgtgctgggcagcccgctaggctcgccttccctcctgctttgcgtgcccggggcagcagcagccctgccccacacctcctctcactccccagcctgggcccatctccctgctttggtcttgccccatcactgcgccactgctccgtggaggaggttgggagggggttggggtggttgaggctaagttgggatctaggagaggagaaccagattctatcctcatctttttttggttctttggtccaaacccaaaagaaactgacatgccctcccttctccctggatctacctggagggaagagtggaggtggattccgagtggtgacaggacgctgaccgtggagcttaagccactgcctctccctctggtcccacaaatgggcgcccccccctccccatgcaggtggtgtcgggcccttcttgctgccctgccccaagttgggggtcagtgctgcctgtccccatgcttaacatacccgcctagctgctgtcacatttttcttgttttgtccttttatttttttctaataacctaaaaactggcaaaatagttctgcaggttgaagccatgtctacatgaaagtcctcagtaagtgttagagggaacagggcggagatatccttatgccacccccgctggaggatgtgggcagcttagggccctggaggcggtgcggcagggaagaggggtgcagaggctgtggctggtgagccggtcaggcacacaaggggcccttggagcgtggactggttggttttgccattttgttgtgtgtatgctgcttttcttttctaaccaagaggctggttttggcatctctgtcccattccctgggatctggtggtcagccctaggataaaaagccagggctggagaacaagaaagggccaggagatggaattccttcaggccggcacccacaccctaggacatgtaagccctcatgtccaagggagcctcatgcagatagtaggaaatcaggtctggaaatttaaaaataaaaggcatgagactaaggctatctgcttcccttatgccctgactggagaggggagggaggagaggcaaggcccacagagggcatcccagctaggccttgggatggctgcagtgaggagaaatcccgggaactgtattgacacaaagattcttattgcacttgtattttttgtattaaagtttgcatggtttctaataaaggattcaaacataagtttgtagtgaaatggcctgggagattccaagggcttctctggagggggattggctgcagtgtagatttgcctctgaggaggctgccccagacttggcctcctcatgccccctcctgacctctgcccttctctggtcctggcatccctggagaaggtaggggtcttgacctaagtttagatttgatctccatgtgcagggaggctgtcctgggcctgacaggtcctccccctttctgaggtagcagtgccttgtggaggtttgacaccatgtccctagctccccaagcacacaccaggaaactgcaggggctcacggaggaagtgctgcctgggccagggggaccagctttcctccgtagagaccatgtgcagaacacttctgctgtgccaagaacatgagggagccagtgttttgtcagcaggaagaaagggcctgctgggatgaaagtgggaaggaaacagggttgcgtagtcaggagacacctcaggggcaacagcacaggcccagagtacctgctgcctccactgcgtctgtcctggggtcatgaggatgctgaggttgacgacaggttccaggtcctttcactcctttggccaaaggttgggggtaggtggcccaagtggcgtgctctctaggtagacaacaggagtggtcagagttccctcaaaggatcctccactccagagcacctgagaaggccgggaccagaggccctgtgtgatgtgtactccgcagctgtttggggtgggacatttctgtacttctcgatttgcttatggctcagccattacctgtgtcagtccatgattctgttgtaacagttttaagagtaaataaataaagctgcctgatgtcccatca

SEQ ID NO: 88739 - DNA, 5407 bp, Homo sapiens
agcggggtctgggctcccagactctgagagagagcgacggccatcatagaacagcgagggcagtcgatcggcctgcggtccgcttcggcattcgcaggccgcaggcgggaggctagagcccccaggcgcactcgccccaaccgcccgcggctcgggcagctctgcagagacgtcgtggcggcagggccagcacccattggtccgccacagccctccgccctccccctcgccacgcttattggccggagcggcggcgctcgccgggtaggcggtggcggcgtccctcccttgcgccggccctcaagaggcgacgaggatgcgaccgcctccctgcgccccgcccctccggctagctcgctggctcccggctcctcccgacgtctcctacctcctcacggctcttcccggcgctctcctggctcccttctgccccagctccgtctcggcggcggcgggcagttgcagtggtgcagaatggctgacctcagtcttgcagatgcattaacagaaccatctccagacattgagggagagataaagcgggacttcattgccacactagaggcagaggcctttgatgatgttgtgggagaaactgttggaaaaacagactatattcctctcctggatgttgatgagaaaaccgggaactcagagtcaaagaagaaaccgtgctcagaaactagccagattgaagatactccatcttctaaaccaacactcctagccaatggtggtcatggagtagaagggagcgatactacagggtctccaactgaattccttgaagagaaaatggcctaccaggaatacccaaatagccagaactggccagaagataccaacttttgtttccaacctgagcaagtggtcgatcctatccagactgatccctttaagatgtaccatgatgatgacctggcagatttggtctttccctccagtgcgacagctgatacttcaatatttgcaggacaaaatgatcccttgaaagacagttacggtatgtctccctgcaacacagctgttgtacctcaggggtggtctgtggaagccttaaactctccacactcagagtcctttgtttccccagaggctgttgcagaacctcctcagccaacggcagttcccttagagctagccaaggagatagaaatggcatcagaagagaggccaccagcacaagcattggaaataatgatgggactgaagactactgacatggcaccatctaaagaaacagagatggccctcgccaaggacatggcactagctacaaaaaccgaggtggcattggctaaagatatggaatcacccaccaaattagatgtgacactggccaaggacatgcagccatccatggaatcagatatggccctagtcaaggacatggaactacccacagaaaaagaagtggccctggttaaggatgtcagatggcccacagaaacagatgtatcttcagccaagaatgtggtactgcccacagaaacagaggtagccccagccaaggatgtgacactgttgaaagaaacagagagggcatctcctataaaaatggacttagccccttccaaggacatgggaccacccaaagaaaacaagaaagaaacagagagggcatctcctataaaaatggacttggctccttccaaggacatgggaccacccaaagaaaacaagatagtcccagccaaggatttggtattactctcagaaatagaggtggcacaggctaatgacattatatcatccacagaaatatcctctgctgagaaggtggctttgtcctcagaaacagaggtagccctggccagggacatgacactgcccccggaaaccaacgtgatcttgaccaaggataaagcactacctttagaagcagaggtggccccagtcaaggacatggctcaactcccagaaacagaaatagccccggccaaggatgtggctccgtccacagtaaaagaagtgggcttgttgaaggacatgtctccactatcagaaacagaaatggctctgggcaaggatgtgactccacctccagaaacagaagtagttctcatcaagaacgtatgtctgcctccagaaatggaggtggccctgactgaggatcaggtcccagccctcaaaacagaagcacccctggctaaggatggggttctgaccctggccaacaatgtgactccagccaaagatgttccaccactctcagaaacagaggcaacaccagttccaattaaagacatggaaattgcacaaacacaaaaaggaataagtgaggattcccatttagaatctctgcaggatgtggggcagtcagctgcacctactttcatgatttcaccagaaaccgtcacaggaacggggaaaaagtgcagcttgccggccgaggaggattctgtgttagaaaaactaggggaaaggaaaccatgcaacagtcaaccttctgagctttcttcagagacctcaggaatagccaggccagaagaaggaaggcctgtggtgagtgggacaggaaatgacatcaccaccccaccgaacaaggagctcccaccaagcccagagaagaaaacaaagcctttggccaccactcaacctgcaaagacttcaacatcgaaagccaaaacacagcccacttctctccctaagcagccagctcccaccaccattggtgggttgaataaaaaacccatgagccttgcttcaggcttagtgccagctgccccacccaaacgccctgccgtcgcctctgccaggccttccatcttaccttcaaaagacgtgaagccaaagcccattgcagatgcaaaggctcctgagaagcgggcctcaccatccaagccagcttctgccccagcctccagatctgggtccaagagcactcagactgttgcaaaaaccacaacagctgctgctgttgcctcaactggcccaagcagtaggagcccctccacgctcctgcccaagaagcccactgccattaagactgagggaaaacctgcagaagtcaagaagatgactgcaaagtctgtaccagctgacttgagtcgcccaaagagcacctccaccagttccatgaagaaaaccaccactctcagtgggacagcccccgctgcaggggtggttcccagccgagtcaaggccacacccatgccctcccggccctccacaactcctttcatagacaagaagcccacctcggccaaacccagctccaccaccccccggctcagccgcctggccaccaatacttctgctcctgatctgaagaatgtccgctccaaggttggctccacggaaaacatcaagcatcagcctggaggaggccgggccaaagtagagaaaaaaacagaggcagctgctacaacccgaaagcctgaatctaatgcagtcactaaaacagccggcccaattgcaagtgcacagaaacaacctgcggggaaagtccagatagtctccaaaaaagtgagctacagccatattcagtccaagtgtggttccaaggacaatattaagcatgtccctggaggtggtaatgttcagattcagaacaagaaagtggacatctctaaggtctcctccaagtgtgggtctaaggctaacatcaagcacaagcctggtggaggagatgtcaagattgaaagtcagaagttgaacttcaaggagaaggcccaggccaaggtgggatccctcgataatgtgggccacctacctgcaggaggtgctgtgaagactgagggcggtggcagcgaggctcctctgtgtccgggtccccctgctggggaggagccggccatctctgaggcagcgcctgaagctggcgcccccacttcagccagtggcctcaatggccaccccaccctgtcagggggtggtgaccaaagggaggcccagaccttggacagccagatccaggagacaagcatctaatgatgacattctggtctcgtcttccgtctcccccgtgttcccctcttgtctcccctgttcccctctcccttccctcctcccatgtcactgcagattgagacctacaggctgacgttccgggcaaatgccagggcccgcaccgaccacggggccgacattgtctcccgccccccacacttccctggcggccccaactcgggctcccgggtccttggccccctttcccgggctgtccactagaccagtgagcgcttgggcgccgtgctgggcagcccgctaggctcgccttccctcctgctttgcgtgcccggggcagcagcagccctgccccacacctcctctcactccccagcctgggcccatctccctgctttggtcttgccccatcactgcgccactgctccgtggaggaggttgggagggggttggggtggttgaggctaagttgggatctaggagaggagaaccagattctatcctcatctttttttggttctttggtccaaacccaaaagaaactgacatgccctcccttctccctggatctacctggagggaagagtggaggtggattccgagtggtgacaggacgctgaccgtggagcttaagccactgcctctccctctggtcccacaaatgggcgcccccccctccccatgcaggtggtgtcgggcccttcttgctgccctgccccaagttgggggtcagtgctgcctgtccccatgcttaacatacccgcctagctgctgtcacatttttcttgttttgtccttttatttttttctaataacctaaaaactggcaaaatagttctgcaggttgaagccatgtctacatgaaagtcctcagtaagtgttagagggaacagggcggagatatccttatgccacccccgctggaggatgtgggcagcttagggccctggaggcggtgcggcagggaagaggggtgcagaggctgtggctggtgagccggtcaggcacacaaggggcccttggagcgtggactggttggttttgccattttgttgtgtgtatgctgcttttcttttctaaccaagaggctggttttggcatctctgtcccattccctgggatctggtggtcagccctaggataaaaagccagggctggagaacaagaaagggccaggagatggaattccttcaggccggcacccacaccctaggacatgtaagccctcatgtccaagggagcctcatgcagatagtaggaaatcaggtctggaaatttaaaaataaaaggcatgagactaaggctatctgcttcccttatgccctgactggagaggggagggaggagaggcaaggcccacagagggcatcccagctaggccttgggatggctgcagtgaggagaaatcccgggaactgtattgacacaaagattcttattgcacttgtattttttgtattaaagtttgcatggtttctaataaaggattcaaacataa

SEQ ID NO: 88740 - DNA, 6408 bp, Homo sapiens
agcggggtctgggctcccagactctgagagagagcgacggccatcatagaacagcgagggcagtcgatcggcctgcggtccgcttcggcattcgcaggccgcaggcgggaggctagagcccccaggcgcactcgccccaaccgcccgcggctcgggcagctctgcagagacgtcgtggcggcagggccagcacccattggtccgccacagccctccgccctccccctcgccacgcttattggccggagcggcggcgctcgccgggtaggcggtggcggcgtccctcccttgcgccggccctcaagaggcgacgaggatgcgaccgcctccctgcgccccgcccctccggctagctcgctggctcccggctcctcccgacgtctcctacctcctcacggctcttcccggcgctctcctggctcccttctgccccagctccgtctcggcggcggcgggcagttgcagtggtgcagaatggctgacctcagtcttgcagatgcattaacagaaccatctccagacattgagggagagataaagcgggacttcattgccacactagaggcagaggcctttgatgatgttgtgggagaaactgttggaaaaacagactatattcctctcctggatgttgatgagaaaaccgggaactcagagtcaaagaagaaaccgtgctcagaaactagccagattgaagatactccatcttctaaaccaacactcctagccaatggtggtcatggagtagaagggagcgatactacagggtctccaactgaattccttgaagagaaaatggcctaccaggaatacccaaatagccagaactggccagaagataccaacttttgtttccaacctgagcaagtggtcgatcctatccagactgatccctttaagatgtaccatgatgatgacctggcagatttggtctttccctccagtgcgacagctgatacttcaatatttgcaggacaaaatgatcccttgaaagacagttacggtatgtctccctgcaacacagctgttgtacctcaggggtggtctgtggaagccttaaactctccacactcagagtcctttgtttccccagaggctgttgcagaacctcctcagccaacggcagttcccttagagctagccaaggagatagaaatggcatcagaagagaggccaccagcacaagcattggaaataatgatgggactgaagactactgacatggcaccatctaaagaaacagagatggccctcgccaaggacatggcactagctacaaaaaccgaggtggcattggctaaagatatggaatcacccaccaaattagatgtgacactggccaaggacatgcagccatccatggaatcagatatggccctagtcaaggacatggaactacccacagaaaaagaagtggccctggttaaggatgtcagatggcccacagaaacagatgtatcttcagccaagaatgtggtactgcccacagaaacagaggtagccccagccaaggatgtgacactgttgaaagaaacagagagggcatctcctataaaaatggacttagccccttccaaggacatgggaccacccaaagaaaacaagaaagaaacagagagggcatctcctataaaaatggacttggctccttccaaggacatgggaccacccaaagaaaacaagatagtcccagccaaggatttggtattactctcagaaatagaggtggcacaggctaatgacattatatcatccacagaaatatcctctgctgagaaggtggctttgtcctcagaaacagaggtagccctggccagggacatgacactgcccccggaaaccaacgtgatcttgaccaaggataaagcactacctttagaagcagaggtggccccagtcaaggacatggctcaactcccagaaacagaaatagccccggccaaggatgtggctccgtccacagtaaaagaagtgggcttgttgaaggacatgtctccactatcagaaacagaaatggctctgggcaaggatgtgactccacctccagaaacagaagtagttctcatcaagaacgtatgtctgcctccagaaatggaggtggccctgactgaggatcaggtcccagccctcaaaacagaagcacccctggctaaggatggggttctgaccctggccaacaatgtgactccagccaaagatgttccaccactctcagaaacagaggcaacaccagttccaattaaagacatggaaattgcacaaacacaaaaaggaataagtgaggattcccatttagaatctctgcaggatgtggggcagtcagctgcacctactttcatgatttcaccagaaaccgtcacaggaacggggaaaaagtgcagcttgccggccgaggaggattctgtgttagaaaaactaggggaaaggaaaccatgcaacagtcaaccttctgagctttcttcagagacctcaggaatagccaggccagaagaaggaaggcctgtggtgagtgggacaggaaatgacatcaccaccccaccgaacaaggagctcccaccaagcccagagaagaaaacaaagcctttggccaccactcaacctgcaaagacttcaacatcgaaagccaaaacacagcccacttctctccctaagcagccagctcccaccaccattggtgggttgaataaaaaacccatgagccttgcttcaggcttagtgccagctgccccacccaaacgccctgccgtcgcctctgccaggccttccatcttaccttcaaaagacgtgaagccaaagcccattgcagatgcaaaggctcctgagaagcgggcctcaccatccaagccagcttctgccccagcctccagatctgggtccaagagcactcagactgttgcaaaaaccacaacagctgctgctgttgcctcaactggcccaagcagtaggagcccctccacgctcctgcccaagaagcccactgccattaagactgagggaaaacctgcagaagtcaagaagatgactgcaaagtctgtaccagctgacttgagtcgcccaaagagcacctccaccagttccatgaagaaaaccaccactctcagtgggacagcccccgctgcaggggtggttcccagccgagtcaaggccacacccatgccctcccggccctccacaactcctttcatagacaagaagcccacctcggccaaacccagctccaccaccccccggctcagccgcctggccaccaatacttctgctcctgatctgaagaatgtccgctccaaggttggctccacggaaaacatcaagcatcagcctggaggaggccgggccaaagtagagaaaaaaacagaggcagctgctacaacccgaaagcctgaatctaatgcagtcactaaaacagccggcccaattgcaagtgcacagaaacaacctgcggggaaagtccagatagtctccaaaaaagtgagctacagccatattcagtccaagtgtggttccaaggacaatattaagcatgtccctggaggtggtaatgttcagattcagaacaagaaagtggacatctctaaggtctcctccaagtgtgggtctaaggctaacatcaagcacaagcctggtggaggagatgtcaagattgaaagtcagaagttgaacttcaaggagaaggcccaggccaaggtgggatccctcgataatgtgggccacctacctgcaggaggtgctgtgaagactgagggcggtggcagcgaggctcctctgtgtccgggtccccctgctggggaggagccggccatctctgaggcagcgcctgaagctggcgcccccacttcagccagtggcctcaatggccaccccaccctgtcagggggtggtgaccaaagggaggcccagaccttggacagccagatccaggagacaagcatctaatgatgacattctggtctcgtcttccgtctcccccgtgttcccctcttgtctcccctgttcccctctcccttccctcctcccatgtcactgcagattgagacctacaggctgacgttccgggcaaatgccagggcccgcaccgaccacggggccgacattgtctcccgccccccacacttccctggcggccccaactcgggctcccgggtccttggccccctttcccgggctgtccactagaccagtgagcgcttgggcgccgtgctgggcagcccgctaggctcgccttccctcctgctttgcgtgcccggggcagcagcagccctgccccacacctcctctcactccccagcctgggcccatctccctgctttggtcttgccccatcactgcgccactgctccgtggaggaggttgggagggggttggggtggttgaggctaagttgggatctaggagaggagaaccagattctatcctcatctttttttggttctttggtccaaacccaaaagaaactgacatgccctcccttctccctggatctacctggagggaagagtggaggtggattccgagtggtgacaggacgctgaccgtggagcttaagccactgcctctccctctggtcccacaaatgggcgcccccccctccccatgcaggtggtgtcgggcccttcttgctgccctgccccaagttgggggtcagtgctgcctgtccccatgcttaacatacccgcctagctgctgtcacatttttcttgttttgtccttttatttttttctaataacctaaaaactggcaaaatagttctgcaggttgaagccatgtctacatgaaagtcctcagtaagtgttagagggaacagggcggagatatccttatgccacccccgctggaggatgtgggcagcttagggccctggaggcggtgcggcagggaagaggggtgcagaggctgtggctggtgagccggtcaggcacacaaggggcccttggagcgtggactggttggttttgccattttgttgtgtgtatgctgcttttcttttctaaccaagaggctggttttggcatctctgtcccattccctgggatctggtggtcagccctaggataaaaagccagggctggagaacaagaaagggccaggagatggaattccttcaggccggcacccacaccctaggacatgtaagccctcatgtccaagggagcctcatgcagatagtaggaaatcaggtctggaaatttaaaaataaaaggcatgagactaaggctatctgcttcccttatgccctgactggagaggggagggaggagaggcaaggcccacagagggcatcccagctaggccttgggatggctgcagtgaggagaaatcccgggaactgtattgacacaaagattcttattgcacttgtattttttgtattaaagtttgcatggtttctaataaaggattcaaacataagtttgtagtgaaatggcctgggagattccaagggcttctctggagggggattggctgcagtgtagatttgcctctgaggaggctgccccagacttggcctcctcatgccccctcctgacctctgcccttctctggtcctggcatccctggagaaggtaggggtcttgacctaagtttagatttgatctccatgtgcagggaggctgtcctgggcctgacaggtcctccccctttctgaggtagcagtgccttgtggaggtttgacaccatgtccctagctccccaagcacacaccaggaaactgcaggggctcacggaggaagtgctgcctgggccagggggaccagctttcctccgtagagaccatgtgcagaacacttctgctgtgccaagaacatgagggagccagtgttttgtcagcaggaagaaagggcctgctgggatgaaagtgggaaggaaacagggttgcgtagtcaggagacacctcaggggcaacagcacaggcccagagtacctgctgcctccactgcgtctgtcctggggtcatgaggatgctgaggttgacgacaggttccaggtcctttcactcctttggccaaaggttgggggtaggtggcccaagtggcgtgctctctaggtagacaacaggagtggtcagagttccctcaaaggatcctccactccagagcacctgagaaggccgggaccagaggccctgtgtgatgtgtactccgcagctgtttggggtgggacatttctgtacttctcgatttgcttatggctcagccattacctgtgtcagtccatgattctgttgtaacagttttaagagtaaataaataaagctgcctgatgtcccatcaaaaaaaaaaagcacaacaacaaaacacaagccaagacaaacagcaacacaacacacaacaaaacgacgggagggcaccagaaaagaaacaaccgaggggaacacacaagaagcgaagagacaaccagacaaagacaag

SEQ ID NO: 88741 - DNA, 6223 bp, Homo sapiens
agcggggtctgggctcccagactctgagagagagcgacggccatcatagaacagcgagggcagtcgatcggcctgcggtccgcttcggcattcgcaggccgcaggcgggaggctagagcccccaggcgcactcgccccaaccgcccgcggctcgggcagctctgcagagacgtcgtggcggcagggccagcacccattggtccgccacagccctccgccctccccctcgccacgcttattggccggagcggcggcgctcgccgggtaggcggtggcggcgtccctcccttgcgccggccctcaagaggcgacgaggatgcgaccgcctccctgcgccccgcccctccggctagctcgctggctcccggctcctcccgacgtctcctacctcctcacggctcttcccggcgctctcctggctcccttctgccccagctccgtctcggcggcggcgggcagttgcagtggtgcagaatggctgacctcagtcttgcagatgcattaacagaaccatctccagacattgagggagagataaagcgggacttcattgccacactagaggcagaggcctttgatgatgttgtgggagaaactgttggaaaaacagactatattcctctcctggatgttgatgagaaaaccgggaactcagagtcaaagaagaaaccgtgctcagaaactagccagattgaagatactccatcttctaaaccaacactcctagccaatggtggtcatggagtagaagggagcgatactacagggtctccaactgaattccttgaagagaaaatggcctaccaggaatacccaaatagccagaactggccagaagataccaacttttgtttccaacctgagcaagtggtcgatcctatccagactgatccctttaagatgtaccatgatgatgacctggcagatttggtctttccctccagtgcgacagctgatacttcaatatttgcaggacaaaatgatcccttgaaagacagttacggtatgtctccctgcaacacagctgttgtacctcaggggtggtctgtggaagccttaaactctccacactcagagtcctttgtttccccagaggctgttgcagaacctcctcagccaacggcagttcccttagagctagccaaggagatagaaatggcatcagaagagaggccaccagcacaagcattggaaataatgatgggactgaagactactgacatggcaccatctaaagaaacagagatggccctcgccaaggacatggcactagctacaaaaaccgaggtggcattggctaaagatatggaatcacccaccaaattagatgtgacactggccaaggacatgcagccatccatggaatcagatatggccctagtcaaggacatggaactacccacagaaaaagaagtggccctggttaaggatgtcagatggcccacagaaacagatgtatcttcagccaagaatgtggtactgcccacagaaacagaggtagccccagccaaggatgtgacactgttgaaagaaacagagagggcatctcctataaaaatggacttagccccttccaaggacatgggaccacccaaagaaaacaagaaagaaacagagagggcatctcctataaaaatggacttggctccttccaaggacatgggaccacccaaagaaaacaagatagtcccagccaaggatttggtattactctcagaaatagaggtggcacaggctaatgacattatatcatccacagaaatatcctctgctgagaaggtggctttgtcctcagaaacagaggtagccctggccagggacatgacactgcccccggaaaccaacgtgatcttgaccaaggataaagcactacctttagaagcagaggtggccccagtcaaggacatggctcaactcccagaaacagaaatagccccggccaaggatgtggctccgtccacagtaaaagaagtgggcttgttgaaggacatgtctccactatcagaaacagaaatggctctgggcaaggatgtgactccacctccagaaacagaagtagttctcatcaagaacgtatgtctgcctccagaaatggaggtggccctgactgaggatcaggtcccagccctcaaaacagaagcacccctggctaaggatggggttctgaccctggccaacaatgtgactccagccaaagatgttccaccactctcagaaacagaggcaacaccagttccaattaaagacatggaaattgcacaaacacaaaaaggaataagtgaggattcccatttagaatctctgcaggatgtggggcagtcagctgcacctactttcatgatttcaccagaaaccgtcacaggaacggggaaaaagtgcagcttgccggccgaggaggattctgtgttagaaaaactaggggaaaggaaaccatgcaacagtcaaccttctgagctttcttcagagacctcaggaatagccaggccagaagaaggaaggcctgtggtgagtgggacaggaaatgacatcaccaccccaccgaacaaggagctcccaccaagcccagagaagaaaacaaagcctttggccaccactcaacctgcaaagacttcaacatcgaaagccaaaacacagcccacttctctccctaagcagccagctcccaccaccattggtgggttgaataaaaaacccatgagccttgcttcaggcttagtgccagctgccccacccaaacgccctgccgtcgcctctgccaggccttccatcttaccttcaaaagacgtgaagccaaagcccattgcagatgcaaaggctcctgagaagcgggcctcaccatccaagccagcttctgccccagcctccagatctgggtccaagagcactcagactgttgcaaaaaccacaacagctgctgctgttgcctcaactggcccaagcagtaggagcccctccacgctcctgcccaagaagcccactgccattaagactgagggaaaacctgcagaagtcaagaagatgactgcaaagtctgtaccagctgacttgagtcgcccaaagagcacctccaccagttccatgaagaaaaccaccactctcagtgggacagcccccgctgcaggggtggttcccagccgagtcaaggccacacccatgccctcccggccctccacaactcctttcatagacaagaagcccacctcggccaaacccagctccaccaccccccggctcagccgcctggccaccaatacttctgctcctgatctgaagaatgtccgctccaaggttggctccacggaaaacatcaagcatcagcctggaggaggccgggccaaagtagagaaaaaaacagaggcagctgctacaacccgaaagcctgaatctaatgcagtcactaaaacagccggcccaattgcaagtgcacagaaacaacctgcggggaaagtccagatagtctccaaaaaagtgagctacagccatattcagtccaagtgtggttccaaggacaatattaagcatgtccctggaggtggtaatgttcagattcagaacaagaaagtggacatctctaaggtctcctccaagtgtgggtctaaggctaacatcaagcacaagcctggtggaggagatgtcaagattgaaagtcagaagttgaacttcaaggagaaggcccaggccaaggtgggatccctcgataatgtgggccacctacctgcaggaggtgctgtgaagactgagggcggtggcagcgaggctcctctgtgtccgggtccccctgctggggaggagccggccatctctgaggcagcgcctgaagctggcgcccccacttcagccagtggcctcaatggccaccccaccctgtcagggggtggtgaccaaagggaggcccagaccttggacagccagatccaggagacaagcatctaatgatgacattctggtctcgtcttccgtctcccccgtgttcccctcttgtctcccctgttcccctctcccttccctcctcccatgtcactgcagattgagacctacaggctgacgttccgggcaaatgccagggcccgcaccgaccacggggccgacattgtctcccgccccccacacttccctggcggccccaactcgggctcccgggtccttggccccctttcccgggctgtccactagaccagtgagcgcttgggcgccgtgctgggcagcccgctaggctcgccttccctcctgctttgcgtgcccggggcagcagcagccctgccccacacctcctctcactccccagcctgggcccatctccctgctttggtcttgccccatcactgcgccactgctccgtggaggaggttgggagggggttggggtggttgaggctaagttgggatctaggagaggagaaccagattctatcctcatctttttttggttctttggtccaaacccaaaagaaactgacatgccctcccttctccctggatctacctggagggaagagtggaggtggattccgagtggtgacaggacgctgaccgtggagcttaagccactgcctctccctctggtcccacaaatgggcgcccccccctccccatgcaggtggtgtcgggcccttcttgctgccctgccccaagttgggggtcagtgctgcctgtccccatgcttaacatacccgcctagctgctgtcacatttttcttgttttgtccttttatttttttctaataacctaaaaactggcaaaatagttctgcaggttgaagccatgtctacatgaaagtcctcagtaagtgttagagggaacagggcggagatatccttatgccacccccgctggaggatgtgggcagcttagggccctggaggcggtgcggcagggaagaggggtgcagaggctgtggctggtgagccggtcaggcacacaaggggcccttggagcgtggactggttggttttgccattttgttgtgtgtatgctgcttttcttttctaaccaagaggctggttttggcatctctgtcccattccctgggatctggtggtcagccctaggataaaaagccagggctggagaacaagaaagggccaggagatggaattccttcaggccggcacccacaccctaggacatgtaagccctcatgtccaagggagcctcatgcagatagtaggaaatcaggtctggaaatttaaaaataaaaggcatgagactaaggctatctgcttcccttatgccctgactggagaggggagggaggagaggcaaggcccacagagggcatcccagctaggccttgggatggctgcagtgaggagaaatcccgggaactgtattgacacaaagattcttattgcacttgtattttttgtattaaagtttgcatggtttctaataaaggattcaaacataagtttgtagtgaaatggcctgggagattccaagggcttctctggagggggattggctgcagtgtagatttgcctctgaggaggctgccccagacttggcctcctcatgccccctcctgacctctgcccttctctggtcctggcatccctggagaaggtaggggtcttgacctaagtttagatttgatctccatgtgcagggaggctgtcctgggcctgacaggtcctccccctttctgaggtagcagtgccttgtggaggtttgacaccatgtccctagctccccaagcacacaccaggaaactgcaggggctcacggaggaagtgctgcctgggccagggggaccagctttcctccgtagagaccatgtgcagaacacttctgctgtgccaagaacatgagggagccagtgttttgtcagcaggaagaaagggcctgctgggatgaaagtgggaaggaaacagggttgcgtagtcaggagacacctcaggggcaacagcacaggcccagagtacctgctgcctccactgcgtctgtcctggggtcatgaggatgctgaggttgacgacaggttccaggtcctttcactcctttggccaaaggttgggggtaggtggcccaagtggcgtgctctctaggtagacaacaggagtggtcagagttccctcaaaggatcctccactccagagcacctgagaaggccgggaccagaggccctgtgtgatgtgtactccgcagctgtttggggtgggacatttctgtacttctcgatttgcttatggctcagccattacacgatcataggtcgggatcctgc

SEQ ID NO: 88742 - DNA, 6156 bp, Homo sapiens
agcggggtctgggctcccagactctgagagagagcgacggccatcatagaacagcgagggcagtcgatcggcctgcggtccgcttcggcattcgcaggccgcaggcgggaggctagagcccccaggcgcactcgccccaaccgcccgcggctcgggcagctctgcagagacgtcgtggcggcagggccagcacccattggtccgccacagccctccgccctccccctcgccacgcttattggccggagcggcggcgctcgccgggtaggcggtggcggcgtccctcccttgcgccggccctcaagaggcgacgaggatgcgaccgcctccctgcgccccgcccctccggctagctcgctggctcccggctcctcccgacgtctcctacctcctcacggctcttcccggcgctctcctggctcccttctgccccagctccgtctcggcggcggcgggcagttgcagtggtgcagaatggctgacctcagtcttgcagatgcattaacagaaccatctccagacattgagggagagataaagcgggacttcattgccacactagaggcagaggcctttgatgatgttgtgggagaaactgttggaaaaacagactatattcctctcctggatgttgatgagaaaaccgggaactcagagtcaaagaagaaaccgtgctcagaaactagccagattgaagatactccatcttctaaaccaacactcctagccaatggtggtcatggagtagaagggagcgatactacagggtctccaactgaattccttgaagagaaaatggcctaccaggaatacccaaatagccagaactggccagaagataccaacttttgtttccaacctgagcaagtggtcgatcctatccagactgatccctttaagatgtaccatgatgatgacctggcagatttggtctttccctccagtgcgacagctgatacttcaatatttgcaggacaaaatgatcccttgaaagacagttacggtatgtctccctgcaacacagctgttgtacctcaggggtggtctgtggaagccttaaactctccacactcagagtcctttgtttccccagaggctgttgcagaacctcctcagccaacggcagttcccttagagctagccaaggagatagaaatggcatcagaagagaggccaccagcacaagcattggaaataatgatgggactgaagactactgacatggcaccatctaaagaaacagagatggccctcgccaaggacatggcactagctacaaaaaccgaggtggcattggctaaagatatggaatcacccaccaaattagatgtgacactggccaaggacatgcagccatccatggaatcagatatggccctagtcaaggacatggaactacccacagaaaaagaagtggccctggttaaggatgtcagatggcccacagaaacagatgtatcttcagccaagaatgtggtactgcccacagaaacagaggtagccccagccaaggatgtgacactgttgaaagaaacagagagggcatctcctataaaaatggacttagccccttccaaggacatgggaccacccaaagaaaacaagaaagaaacagagagggcatctcctataaaaatggacttggctccttccaaggacatgggaccacccaaagaaaacaagatagtcccagccaaggatttggtattactctcagaaatagaggtggcacaggctaatgacattatatcatccacagaaatatcctctgctgagaaggtggctttgtcctcagaaacagaggtagccctggccagggacatgacactgcccccggaaaccaacgtgatcttgaccaaggataaagcactacctttagaagcagaggtggccccagtcaaggacatggctcaactcccagaaacagaaatagccccggccaaggatgtggctccgtccacagtaaaagaagtgggcttgttgaaggacatgtctccactatcagaaacagaaatggctctgggcaaggatgtgactccacctccagaaacagaagtagttctcatcaagaacgtatgtctgcctccagaaatggaggtggccctgactgaggatcaggtcccagccctcaaaacagaagcacccctggctaaggatggggttctgaccctggccaacaatgtgactccagccaaagatgttccaccactctcagaaacagaggcaacaccagttccaattaaagacatggaaattgcacaaacacaaaaaggaataagtgaggattcccatttagaatctctgcaggatgtggggcagtcagctgcacctactttcatgatttcaccagaaaccgtcacaggaacggggaaaaagtgcagcttgccggccgaggaggattctgtgttagaaaaactaggggaaaggaaaccatgcaacagtcaaccttctgagctttcttcagagacctcaggaatagccaggccagaagaaggaaggcctgtggtgagtgggacaggaaatgacatcaccaccccaccgaacaaggagctcccaccaagcccagagaagaaaacaaagcctttggccaccactcaacctgcaaagacttcaacatcgaaagccaaaacacagcccacttctctccctaagcagccagctcccaccaccattggtgggttgaataaaaaacccatgagccttgcttcaggcttagtgccagctgccccacccaaacgccctgccgtcgcctctgccaggccttccatcttaccttcaaaagacgtgaagccaaagcccattgcagatgcaaaggctcctgagaagcgggcctcaccatccaagccagcttctgccccagcctccagatctgggtccaagagcactcagactgttgcaaaaaccacaacagctgctgctgttgcctcaactggcccaagcagtaggagcccctccacgctcctgcccaagaagcccactgccattaagactgagggaaaacctgcagaagtcaagaagatgactgcaaagtctgtaccagctgacttgagtcgcccaaagagcacctccaccagttccatgaagaaaaccaccactctcagtgggacagcccccgctgcaggggtggttcccagccgagtcaaggccacacccatgccctcccggccctccacaactcctttcatagacaagaagcccacctcggccaaacccagctccaccaccccccggctcagccgcctggccaccaatacttctgctcctgatctgaagaatgtccgctccaaggttggctccacggaaaacatcaagcatcagcctggaggaggccgggtccagatagtctccaaaaaagtgagctacagccatattcagtccaagtgtggttccaaggacaatattaagcatgtccctggaggtggtaatgttcagattcagaacaagaaagtggacatctctaaggtctcctccaagtgtgggtctaaggctaacatcaagcacaagcctggtggaggagatgtcaagattgaaagtcagaagttgaacttcaaggagaaggcccaggccaaggtgggatccctcgataatgtgggccacctacctgcaggaggtgctgtgaagactgagggcggtggcagcgaggctcctctgtgtccgggtccccctgctggggaggagccggccatctctgaggcagcgcctgaagctggcgcccccacttcagccagtggcctcaatggccaccccaccctgtcagggggtggtgaccaaagggaggcccagaccttggacagccagatccaggagacaagcatctaatgatgacattctggtctcgtcttccgtctcccccgtgttcccctcttgtctcccctgttcccctctcccttccctcctcccatgtcactgcagattgagacctacaggctgacgttccgggcaaatgccagggcccgcaccgaccacggggccgacattgtctcccgccccccacacttccctggcggccccaactcgggctcccgggtccttggccccctttcccgggctgtccactagaccagtgagcgcttgggcgccgtgctgggcagcccgctaggctcgccttccctcctgctttgcgtgcccggggcagcagcagccctgccccacacctcctctcactccccagcctgggcccatctccctgctttggtcttgccccatcactgcgccactgctccgtggaggaggttgggagggggttggggtggttgaggctaagttgggatctaggagaggagaaccagattctatcctcatctttttttggttctttggtccaaacccaaaagaaactgacatgccctcccttctccctggatctacctggagggaagagtggaggtggattccgagtggtgacaggacgctgaccgtggagcttaagccactgcctctccctctggtcccacaaatgggcgcccccccctccccatgcaggtggtgtcgggcccttcttgctgccctgccccaagttgggggtcagtgctgcctgtccccatgcttaacatacccgcctagctgctgtcacatttttcttgttttgtccttttatttttttctaataacctaaaaactggcaaaatagttctgcaggttgaagccatgtctacatgaaagtcctcagtaagtgttagagggaacagggcggagatatccttatgccacccccgctggaggatgtgggcagcttagggccctggaggcggtgcggcagggaagaggggtgcagaggctgtggctggtgagccggtcaggcacacaaggggcccttggagcgtggactggttggttttgccattttgttgtgtgtatgctgcttttcttttctaaccaagaggctggttttggcatctctgtcccattccctgggatctggtggtcagccctaggataaaaagccagggctggagaacaagaaagggccaggagatggaattccttcaggccggcacccacaccctaggacatgtaagccctcatgtccaagggagcctcatgcagatagtaggaaatcaggtctggaaatttaaaaataaaaggcatgagactaaggctatctgcttcccttatgccctgactggagaggggagggaggagaggcaaggcccacagagggcatcccagctaggccttgggatggctgcagtgaggagaaatcccgggaactgtattgacacaaagattcttattgcacttgtattttttgtattaaagtttgcatggtttctaataaaggattcaaacataagtttgtagtgaaatggcctgggagattccaagggcttctctggagggggattggctgcagtgtagatttgcctctgaggaggctgccccagacttggcctcctcatgccccctcctgacctctgcccttctctggtcctggcatccctggagaaggtaggggtcttgacctaagtttagatttgatctccatgtgcagggaggctgtcctgggcctgacaggtcctccccctttctgaggtagcagtgccttgtggaggtttgacaccatgtccctagctccccaagcacacaccaggaaactgcaggggctcacggaggaagtgctgcctgggccagggggaccagctttcctccgtagagaccatgtgcagaacacttctgctgtgccaagaacatgagggagccagtgttttgtcagcaggaagaaagggcctgctgggatgaaagtgggaaggaaacagggttgcgtagtcaggagacacctcaggggcaacagcacaggcccagagtacctgctgcctccactgcgtctgtcctggggtcatgaggatgctgaggttgacgacaggttccaggtcctttcactcctttggccaaaggttgggggtaggtggcccaagtggcgtgctctctaggtagacaacaggagtggtcagagttccctcaaaggatcctccactccagagcacctgagaaggccgggaccagaggccctgtgtgatgtgtactccgcagctgtttggggtgggacatttctgtacttctcgatttgcttatggctcagccattacctgtgtcagtccatgattctgttgtaacagttttaagagtaaataaataaagctgcctgatgtcccatca

SEQ ID NO: 88743 - DNA, 6174 bp, Homo sapiens
agcggggtctgggctcccagactctgagagagagcgacggccatcatagaacagcgagggcagtcgatcggcctgcggtccgcttcggcattcgcaggccgcaggcgggaggctagagcccccaggcgcactcgccccaaccgcccgcggctcgggcagctctgcagagacgtcgtggcggcagggccagcacccattggtccgccacagccctccgccctccccctcgccacgcttattggccggagcggcggcgctcgccgggtaggcggtggcggcgtccctcccttgcgccggccctcaagaggcgacgaggatgcgaccgcctccctgcgccccgcccctccggctagctcgctggctcccggctcctcccgacgtctcctacctcctcacggctcttcccggcgctctcctggctcccttctgccccagctccgtctcggcggcggcgggcagttgcagtggtgcagaatggctgacctcagtcttgcagatgcattaacagaaccatctccagacattgagggagagataaagcgggacttcattgccacactagaggcagaggcctttgatgatgttgtgggagaaactgttggaaaaacagactatattcctctcctggatgttgatgagaaaaccgggaactcagagtcaaagaagaaaccgtgctcagaaactagccagattgaagatactccatcttctaaaccaacactcctagccaatggtggtcatggagtagaagggagcgatactacagggtctccaactgaattccttgaagagaaaatggcctaccaggaatacccaaatagccagaactggccagaagataccaacttttgtttccaacctgagcaagtggtcgatcctatccagactgatccctttaagatgtaccatgatgatgacctggcagatttggtctttccctccagtgcgacagctgatacttcaatatttgcaggacaaaatgatcccttgaaagacagttacggtatgtctccctgcaacacagctgttgtacctcaggggtggtctgtggaagccttaaactctccacactcagagtcctttgtttccccagaggctgttgcagaacctcctcagccaacggcagttcccttagagctagccaaggagatagaaatggcatcagaagagaggccaccagcacaagcattggaaataatgatgggactgaagactactgacatggcaccatctaaagaaacagagatggccctcgccaaggacatggcactagctacaaaaaccgaggtggcattggctaaagatatggaatcacccaccaaattagatgtgacactggccaaggacatgcagccatccatggaatcagatatggccctagtcaaggacatggaactacccacagaaaaagaagtggccctggttaaggatgtcagatggcccacagaaacagatgtatcttcagccaagaatgtggtactgcccacagaaacagaggtagccccagccaaggatgtgacactgttgaaagaaacagagagggcatctcctataaaaatggacttagccccttccaaggacatgggaccacccaaagaaaacaagaaagaaacagagagggcatctcctataaaaatggacttggctccttccaaggacatgggaccacccaaagaaaacaagatagtcccagccaaggatttggtattactctcagaaatagaggtggcacaggctaatgacattatatcatccacagaaatatcctctgctgagaaggtggctttgtcctcagaaacagaggtagccctggccagggacatgacactgcccccggaaaccaacgtgatcttgaccaaggataaagcactacctttagaagcagaggtggccccagtcaaggacatggctcaactcccagaaacagaaatagccccggccaaggatgtggctccgtccacagtaaaagaagtgggcttgttgaaggacatgtctccactatcagaaacagaaatggctctgggcaaggatgtgactccacctccagaaacagaagtagttctcatcaagaacgtatgtctgcctccagaaatggaggtggccctgactgaggatcaggtcccagccctcaaaacagaagcacccctggctaaggatggggttctgaccctggccaacaatgtgactccagccaaagatgttccaccactctcagaaacagaggcaacaccagttccaattaaagacatggaaattgcacaaacacaaaaaggaataagtgaggattcccatttagaatctctgcaggatgtggggcagtcagctgcacctactttcatgatttcaccagaaaccgtcacaggaacggggaaaaagtgcagcttgccggccgaggaggattctgtgttagaaaaactaggggaaaggaaaccatgcaacagtcaaccttctgagctttcttcagagacctcaggaatagccaggccagaagaaggaaggcctgtggtgagtgggacaggaaatgacatcaccaccccaccgaacaaggagctcccaccaagcccagagaagaaaacaaagcctttggccaccactcaacctgcaaagacttcaacatcgaaagccaaaacacagcccacttctctccctaagcagccagctcccaccaccattggtgggttgaataaaaaacccatgagccttgcttcaggcttagtgccagctgccccacccaaacgccctgccgtcgcctctgccaggccttccatcttaccttcaaaagacgtgaagccaaagcccattgcagatgcaaaggctcctgagaagcgggcctcaccatccaagccagcttctgccccagcctccagatctgggtccaagagcactcagactgttgcaaaaaccacaacagctgctgctgttgcctcaactggcccaagcagtaggagcccctccacgctcctgcccaagaagcccactgccattaagactgagggaaaacctgcagaagtcaagaagatgactgcaaagtctgtaccagctgacttgagtcgcccaaagagcacctccaccagttccatgaagaaaaccaccactctcagtgggacagcccccgctgcaggggtggttcccagccgagtcaaggccacacccatgccctcccggccctccacaactcctttcatagacaagaagcccacctcggccaaacccagctccaccaccccccggctcagccgcctggccaccaatacttctgctcctgatctgaagaatgtccgctccaaggttggctccacggaaaacatcaagcatcagcctggaggaggccgggccaaagtagagaaaaaaacagaggcagctgctacaacccgaaagcctgaatctaatgcagtcactaaaacagccggcccaattgcaagtgcacagaaacaacctgcggggaaagtccagatagtctccaaaaaagtgagctacagccatattcagtccaagtgtggttccaaggacaatattaagcatgtccctggaggtggtaatgttcagattcagaacaagaaagtggacatctctaaggtctcctccaagtgtgggtctaaggctaacatcaagcacaagcctggtggaggagatgtcaagattgaaagtcagaagttgaacttcaaggagaaggcccaggccaaggtgggatccctcgataatgtgggccacctacctgcaggaggtgctgtgaagactgagggcggtggcagcgaggctcctctgtgtccgggtccccctgctggggaggagccggccatctctgaggcagcgcctgaagctggcgcccccacttcagccagtggcctcaatggccaccccaccctgtcagggggtggtgaccaaagggaggcccagaccttggacagccagatccaggagacaatgcagattgagacctacaggctgacgttccgggcaaatgccagggcccgcaccgaccacggggccgacattgtctcccgccccccacacttccctggcggccccaactcgggctcccgggtccttggccccctttcccgggctgtccactagaccagtgagcgcttgggcgccgtgctgggcagcccgctaggctcgccttccctcctgctttgcgtgcccggggcagcagcagccctgccccacacctcctctcactccccagcctgggcccatctccctgctttggtcttgccccatcactgcgccactgctccgtggaggaggttgggagggggttggggtggttgaggctaagttgggatctaggagaggagaaccagattctatcctcatctttttttggttctttggtccaaacccaaaagaaactgacatgccctcccttctccctggatctacctggagggaagagtggaggtggattccgagtggtgacaggacgctgaccgtggagcttaagccactgcctctccctctggtcccacaaatgggcgcccccccctccccatgcaggtggtgtcgggcccttcttgctgccctgccccaagttgggggtcagtgctgcctgtccccatgcttaacatacccgcctagctgctgtcacatttttcttgttttgtccttttatttttttctaataacctaaaaactggcaaaatagttctgcaggttgaagccatgtctacatgaaagtcctcagtaagtgttagagggaacagggcggagatatccttatgccacccccgctggaggatgtgggcagcttagggccctggaggcggtgcggcagggaagaggggtgcagaggctgtggctggtgagccggtcaggcacacaaggggcccttggagcgtggactggttggttttgccattttgttgtgtgtatgctgcttttcttttctaaccaagaggctggttttggcatctctgtcccattccctgggatctggtggtcagccctaggataaaaagccagggctggagaacaagaaagggccaggagatggaattccttcaggccggcacccacaccctaggacatgtaagccctcatgtccaagggagcctcatgcagatagtaggaaatcaggtctggaaatttaaaaataaaaggcatgagactaaggctatctgcttcccttatgccctgactggagaggggagggaggagaggcaaggcccacagagggcatcccagctaggccttgggatggctgcagtgaggagaaatcccgggaactgtattgacacaaagattcttattgcacttgtattttttgtattaaagtttgcatggtttctaataaaggattcaaacataagtttgtagtgaaatggcctgggagattccaagggcttctctggagggggattggctgcagtgtagatttgcctctgaggaggctgccccagacttggcctcctcatgccccctcctgacctctgcccttctctggtcctggcatccctggagaaggtaggggtcttgacctaagtttagatttgatctccatgtgcagggaggctgtcctgggcctgacaggtcctccccctttctgaggtagcagtgccttgtggaggtttgacaccatgtccctagctccccaagcacacaccaggaaactgcaggggctcacggaggaagtgctgcctgggccagggggaccagctttcctccgtagagaccatgtgcagaacacttctgctgtgccaagaacatgagggagccagtgttttgtcagcaggaagaaagggcctgctgggatgaaagtgggaaggaaacagggttgcgtagtcaggagacacctcaggggcaacagcacaggcccagagtacctgctgcctccactgcgtctgtcctggggtcatgaggatgctgaggttgacgacaggttccaggtcctttcactcctttggccaaaggttgggggtaggtggcccaagtggcgtgctctctaggtagacaacaggagtggtcagagttccctcaaaggatcctccactccagagcacctgagaaggccgggaccagaggccctgtgtgatgtgtactccgcagctgtttggggtgggacatttctgtacttctcgatttgcttatggctcagccattacctgtgtcagtccatgattctgttgtaacagttttaagagtaaataaataaagctgcctgatgtcccatca

SEQ ID NO: 88744 - DNA, 6095 bp, Homo sapiens
agcggggtctgggctcccagactctgagagagagcgacggccatcatagaacagcgagggcagtcgatcggcctgcggtccgcttcggcattcgcaggccgcaggcgggaggctagagcccccaggcgcactcgccccaaccgcccgcggctcgggcagctctgcagagacgtcgtggcggcagggccagcacccattggtccgccacagccctccgccctccccctcgccacgcttattggccggagcggcggcgctcgccgggtaggcggtggcggcgtccctcccttgcgccggccctcaagaggcgacgaggatgcgaccgcctccctgcgccccgcccctccggctagctcgctggctcccggctcctcccgacgtctcctacctcctcacggctcttcccggcgctctcctggctcccttctgccccagctccgtctcggcggcggcgggcagttgcagtggtgcagaatggctgacctcagtcttgcagatgcattaacagaaccatctccagacattgagggagagataaagcgggacttcattgccacactagaggcagaggcctttgatgatgttgtgggagaaactgttggaaaaacagactatattcctctcctggatgttgatgagaaaaccgggaactcagagtcaaagaagaaaccgtgctcagaaactagccagattgaagatactccatcttctaaaccaacactcctagccaatggtggtcatggagtagaagggagcgatactacagggtctccaactgaattccttgaagagaaaatggcctaccaggaatacccaaatagccagaactggccagaagataccaacttttgtttccaacctgagcaagtggtcgatcctatccagactgatccctttaagatgtaccatgatgatgacctggcagatttggtctttccctccagtgcgacagctgatacttcaatatttgcaggacaaaatgatcccttgaaagacagttacggtatgtctccctgcaacacagctgttgtacctcaggggtggtctgtggaagccttaaactctccacactcagagtcctttgtttccccagaggctgttgcagaacctcctcagccaacggcagttcccttagagctagccaaggagatagaaatggcatcagaagagaggccaccagcacaagcattggaaataatgatgggactgaagactactgacatggcaccatctaaagaaacagagatggccctcgccaaggacatggcactagctacaaaaaccgaggtggcattggctaaagatatggaatcacccaccaaattagatgtgacactggccaaggacatgcagccatccatggaatcagatatggccctagtcaaggacatggaactacccacagaaaaagaagtggccctggttaaggatgtcagatggcccacagaaacagatgtatcttcagccaagaatgtggtactgcccacagaaacagaggtagccccagccaaggatgtgacactgttgaaagaaacagagagggcatctcctataaaaatggacttagccccttccaaggacatgggaccacccaaagaaaacaagaaagaaacagagagggcatctcctataaaaatggacttggctccttccaaggacatgggaccacccaaagaaaacaagatagtcccagccaaggatttggtattactctcagaaatagaggtggcacaggctaatgacattatatcatccacagaaatatcctctgctgagaaggtggctttgtcctcagaaacagaggtagccctggccagggacatgacactgcccccggaaaccaacgtgatcttgaccaaggataaagcactacctttagaagcagaggtggccccagtcaaggacatggctcaactcccagaaacagaaatagccccggccaaggatgtggctccgtccacagtaaaagaagtgggcttgttgaaggacatgtctccactatcagaaacagaaatggctctgggcaaggatgtgactccacctccagaaacagaagtagttctcatcaagaacgtatgtctgcctccagaaatggaggtggccctgactgaggatcaggtcccagccctcaaaacagaagcacccctggctaaggatggggttctgaccctggccaacaatgtgactccagccaaagatgttccaccactctcagaaacagaggcaacaccagttccaattaaagacatggaaattgcacaaacacaaaaaggaataagtgaggattcccatttagaatctctgcaggatgtggggcagtcagctgcacctactttcatgatttcaccagaaaccgtcacaggaacggggaaaaagtgcagcttgccggccgaggaggattctgtgttagaaaaactaggggaaaggaaaccatgcaacagtcaaccttctgagctttcttcagagacctcaggaatagccaggccagaagaaggaaggcctgtggtgagtgggacaggaaatgacatcaccaccccaccgaacaaggagctcccaccaagcccagagaagaaaacaaagcctttggccaccactcaacctgcaaagacttcaacatcgaaagccaaaacacagcccacttctctccctaagcagccagctcccaccaccattggtgggttgaataaaaaacccatgagccttgcttcaggcttagtgccagctgccccacccaaacgccctgccgtcgcctctgccaggccttccatcttaccttcaaaagacgtgaagccaaagcccattgcagatgcaaaggctcctgagaagcgggcctcaccatccaagccagcttctgccccagcctccagatctgggtccaagagcactcagactgttgcaaaaaccacaacagctgctgctgttgcctcaactggcccaagcagtaggagcccctccacgctcctgcccaagaagcccactgccattaagactgagggaaaacctgcagaagtcaagaagatgactgcaaagtctgtaccagctgacttgagtcgcccaaagagcacctccaccagttccatgaagaaaaccaccactctcagtgggacagcccccgctgcaggggtggttcccagccgagtcaaggccacacccatgccctcccggccctccacaactcctttcatagacaagaagcccacctcggccaaacccagctccaccaccccccggctcagccgcctggccaccaatacttctgctcctgatctgaagaatgtccgctccaaggttggctccacggaaaacatcaagcatcagcctggaggaggccgggccaaagtagagaaaaaaacagaggcagctgctacaacccgaaagcctgaatctaatgcagtcactaaaacagccggcccaattgcaagtgcacagaaacaacctgcggggaaagtccagatagtctccaaaaaagtgagctacagccatattcagtccaagtgtggttccaaggacaatattaagcatgtccctggaggtggtaatgttcagattcagaacaagaaagtggacatctctaaggtctcctccaagtgtgggtctaaggctaacatcaagcacaagcctggtggaggagatgtcaagattgaaagtcagaagttgaacttcaaggagaaggcccaggccaaggtgggatccctcgataatgtgggccacctacctgcaggaggtgctgtgaagactgagggcggtggcagcgaggctcctctgtgtccgggtccccctgctggggaggagccggccatctctgaggcagcgcctgaagctggcgcccccacttcagccagtggcctcaatggccaccccaccctgtcagggggtggtgaccaaagggaggcccagaccttggacagccagatccaggagacaagcatctaatgatgacattctggtctcgtcttccgtctcccccgtgttcccctcttgtctcccctgttcccctctcccttccctcctcccatgtcactgcagattgagacctacaggctgacgttccgggcaaatgccagggcccgcaccgaccacggggccgacattgtctcccgccccccacacttccctggcggccccaactcgggctcccgggtccttggccccctttcccgggctgtccactagaccagtgagcgcttgggcgccgtgctgggcagcccgctaggctcgccttccctcctgctttgcgtgcccggggcagcagcagccctgccccacacctcctctcactccccagcctgggcccatctccctgctttggtcttgccccatcactgcgccactgctccgtggaggaggttgggagggggttggggtggttgaggctaagttgggatctaggagaggagaaccagattctatcctcatctttttttggttctttggtccaaacccaaaagaaactgacatgccctcccttctccctggatctacctggagggaagagtggaggtggattccgagtggtgacaggacgctgaccgtggagcttaagccactgcctctccctctggtcccacaaatgggcgcccccccctccccatgcaggtggtgtcgggcccttcttgctgccctgccccaagttgggggtcagtgctgcctgtccccatgcttaacatacccgcctagctgctgtcacatttttcttgttttgtccttttatttttttctaataacctaaaaactggcaaaatagttctgcaggttgaagccatgtctacatgaaagtcctcagtaagtgttagagggaacagggcggagatatccttatgccacccccgctggaggatgtgggcagcttagggccctggaggcggtgcggcagggaagaggggtgcagaggctgtggctggtgagccggtcaggcacacaaggggcccttggagcgtggactggttggttttgccattttgttgtgtgtatgctgcttttcttttctaaccaagaggctggttttggcatctctgtcccattccctgggatctggtggtcagccctaggataaaaagccagggctggagaacaagaaagggccaggagatggaattccttcaggccggcacccacaccctaggacatgtaagccctcatgtccaagggagcctcatgcagatagtaggaaatcaggtctggaaatttaaaaataaaaggcatgagactaaggctatctgcttcccttatgccctgactggagaggggagggaggagaggcaaggcccacagagggcatcccagctaggccttgggatggctgcagtgaggagaaatcccgggaactgtattgacacaaagattcttattgcacttgtattttttgtattaaagtttgcatggtttctaataaaggattcaaacataagtttgtagtgaaatggcctgggagattccaagggcttctctggagggggattggctgcagtgtagatttgcctctgaggaggctgccccagacttggcctcctcatgccccctcctgacctctgcccttctctggtcctggcatccctggagaaggtaggggtcttgacctaagtttagatttgatctccatgtgcagggaggctgtcctgggcctgacaggtcctccccctttctgaggtagcagtgccttgtggaggtttgacaccatgtccctagctccccaagcacacaccaggaaactgcaggggctcacggaggaagtgctgcctgggccagggggaccagctttcctccgtagagaccatgtgcagaacacttctgctgtgccaagaacatgagggagccagtgttttgtcagcaggaagaaagggcctgctgggatgaaagtgggaaggaaacagggttgcgtagtcaggagacaccaatcccgggaactgtattgacacaaagattcttattgcacttgtattttttgtattaaagtttgcatggtttctaataaaggattcaaacataagtttgtagtgaaatggcctgggagattccaagggcttctctggagggggattggctgcagtgtagatttgcctctgaggagctgccccagacttggcctcctcatgccc

SEQ ID NO: 88745 - DNA, 5984 bp, Homo sapiens
agcggggtctgggctcccagactctgagagagagcgacggccatcatagaacagcgagggcagtcgatcggcctgcggtccgcttcggcattcgcaggccgcaggcgggaggctagagcccccaggcgcactcgccccaaccgcccgcggctcgggcagctctgcagagacgtcgtggcggcagggccagcacccattggtccgccacagccctccgccctccccctcgccacgcttattggccggagcggcggcgctcgccgggtaggcggtggcggcgtccctcccttgcgccggccctcaagaggcgacgaggatgcgaccgcctccctgcgccccgcccctccggctagctcgctggctcccggctcctcccgacgtctcctacctcctcacggctcttcccggcgctctcctggctcccttctgccccagctccgtctcggcggcggcgggcagttgcagtggtgcagaatggctgacctcagtcttgcagatgcattaacagaaccatctccagacattgagggagagataaagcgggacttcattgccacactagaggcagaggcctttgatgatgttgtgggagaaactgttggaaaaacagactatattcctctcctggatgttgatgagaaaaccgggaactcagagtcaaagaagaaaccgtgctcagaaactagccagattgaagatactccatcttctaaaccaacactcctagccaatggtggtcatggagtagaagggagcgatactacagggtctccaactgaattccttgaagagaaaatggcctaccaggaatacccaaatagccagaactggccagaagataccaacttttgtttccaacctgagcaagtggtcgatcctatccagactgatccctttaagatgtaccatgatgatgacctggcagatttggtctttccctccagtgcgacagctgatacttcaatatttgcaggacaaaatgatcccttgaaagacagttacggtatgtctccctgcaacacagctgttgtacctcaggggtggtctgtggaagccttaaactctccacactcagagtcctttgtttccccagaggctgttgcagaacctcctcagccaacggcagttcccttagagctagccaaggagatagaaatggcatcagaagagaggccaccagcacaagcattggaaataatgatgggactgaagactactgacatggcaccatctaaagaaacagagatggccctcgccaaggacatggcactagctacaaaaaccgaggtggcattggctaaagatatggaatcacccaccaaattagatgtgacactggccaaggacatgcagccatccatggaatcagatatggccctagtcaaggacatggaactacccacagaaaaagaagtggccctggttaaggatgtcagatggcccacagaaacagatgtatcttcagccaagaatgtggtactgcccacagaaacagaggtagccccagccaaggatgtgacactgttgaaagaaacagagagggcatctcctataaaaatggacttagccccttccaaggacatgggaccacccaaagaaaacaagaaagaaacagagagggcatctcctataaaaatggacttggctccttccaaggacatgggaccacccaaagaaaacaagatagtcccagccaaggatttggtattactctcagaaatagaggtggcacaggctaatgacattatatcatccacagaaatatcctctgctgagaaggtggctttgtcctcagaaacagaggtagccctggccagggacatgacactgcccccggaaaccaacgtgatcttgaccaaggataaagcactacctttagaagcagaggtggccccagtcaaggacatggctcaactcccagaaacagaaatagccccggccaaggatgtggctccgtccacagtaaaagaagtgggcttgttgaaggacatgtctccactatcagaaacagaaatggctctgggcaaggatgtgactccacctccagaaacagaagtagttctcatcaagaacgtatgtctgcctccagaaatggaggtggccctgactgaggatcaggtcccagccctcaaaacagaagcacccctggctaaggatggggttctgaccctggccaacaatgtgactccagccaaagatgttccaccactctcagaaacagaggcaacaccagttccaattaaagacatggaaattgcacaaacacaaaaaggaataagtgaggattcccatttagaatctctgcaggatgtggggcagtcagctgcacctactttcatgatttcaccagaaaccgtcacaggaacggggaaaaagtgcagcttgccggccgaggaggattctgtgttagaaaaactaggggaaaggaaaccatgcaacagtcaaccttctgagctttcttcagagacctcaggaatagccaggccagaagaaggaaggcctgtggtgagtgggacaggaaatgacatcaccaccccaccgaacaaggagctcccaccaagcccagagaagaaaacaaagcctttggccaccactcaacctgcaaagacttcaacatcgaaagccaaaacacagcccacttctctccctaagcagccagctcccaccaccattggtgggttgaataaaaaacccatgagccttgcttcaggcttagtgccagctgccccacccaaacgccctgccgtcgcctctgccaggccttccatcttaccttcaaaagacgtgaagccaaagcccattgcagatgcaaaggctcctgagaagcgggcctcaccatccaagccagcttctgccccagcctccagatctgggtccaagagcactcagactgttgcaaaaaccacaacagctgctgctgttgcctcaactggcccaagcagtaggagcccctccacgctcctgcccaagaagcccactgccattaagactgagggaaaacctgcagaagtcaagaagatgactgcaaagtctgtaccagctgacttgagtcgcccaaagagcacctccaccagttccatgaagaaaaccaccactctcagtgggacagcccccgctgcaggggtggttcccagccgagtcaaggccacacccatgccctcccggccctccacaactcctttcatagacaagaagcccacctcggccaaacccagctccaccaccccccggctcagccgcctggccaccaatacttctgctcctgatctgaagaatgtccgctccaaggttggctccacggaaaacatcaagcatcagcctggaggaggccgggccaaagtagagaaaaaaacagaggcagctgctacaacccgaaagcctgaatctaatgcagtcactaaaacagccggcccaattgcaagtgcacagaaacaacctgcggggaaagtccagatagtctccaaaaaagtgagctacagccatattcagtccaagtgtggttccaaggacaatattaagcatgtccctggaggtggtaatgttcagattcagaacaagaaagtggacatctctaaggtctcctccaagtgtgggtctaaggctaacatcaagcacaagcctggtggaggagatgtcaagattgaaagtcagaagttgaacttcaaggagaaggcccaggccaaggtgggatccctcgataatgtgggccacctacctgcaggaggtgctgtgaagtgcagattgagacctacaggctgacgttccgggcaaatgccagggcccgcaccgaccacggggccgacattgtctcccgccccccacacttccctggcggccccaactcgggctcccgggtccttggccccctttcccgggctgtccactagaccagtgagcgcttgggcgccgtgctgggcagcccgctaggctcgccttccctcctgctttgcgtgcccggggcagcagcagccctgccccacacctcctctcactccccagcctgggcccatctccctgctttggtcttgccccatcactgcgccactgctccgtggaggaggttgggagggggttggggtggttgaggctaagttgggatctaggagaggagaaccagattctatcctcatctttttttggttctttggtccaaacccaaaagaaactgacatgccctcccttctccctggatctacctggagggaagagtggaggtggattccgagtggtgacaggacgctgaccgtggagcttaagccactgcctctccctctggtcccacaaatgggcgcccccccctccccatgcaggtggtgtcgggcccttcttgctgccctgccccaagttgggggtcagtgctgcctgtccccatgcttaacatacccgcctagctgctgtcacatttttcttgttttgtccttttatttttttctaataacctaaaaactggcaaaatagttctgcaggttgaagccatgtctacatgaaagtcctcagtaagtgttagagggaacagggcggagatatccttatgccacccccgctggaggatgtgggcagcttagggccctggaggcggtgcggcagggaagaggggtgcagaggctgtggctggtgagccggtcaggcacacaaggggcccttggagcgtggactggttggttttgccattttgttgtgtgtatgctgcttttcttttctaaccaagaggctggttttggcatctctgtcccattccctgggatctggtggtcagccctaggataaaaagccagggctggagaacaagaaagggccaggagatggaattccttcaggccggcacccacaccctaggacatgtaagccctcatgtccaagggagcctcatgcagatagtaggaaatcaggtctggaaatttaaaaataaaaggcatgagactaaggctatctgcttcccttatgccctgactggagaggggagggaggagaggcaaggcccacagagggcatcccagctaggccttgggatggctgcagtgaggagaaatcccgggaactgtattgacacaaagattcttattgcacttgtattttttgtattaaagtttgcatggtttctaataaaggattcaaacataagtttgtagtgaaatggcctgggagattccaagggcttctctggagggggattggctgcagtgtagatttgcctctgaggaggctgccccagacttggcctcctcatgccccctcctgacctctgcccttctctggtcctggcatccctggagaaggtaggggtcttgacctaagtttagatttgatctccatgtgcagggaggctgtcctgggcctgacaggtcctccccctttctgaggtagcagtgccttgtggaggtttgacaccatgtccctagctccccaagcacacaccaggaaactgcaggggctcacggaggaagtgctgcctgggccagggggaccagctttcctccgtagagaccatgtgcagaacacttctgctgtgccaagaacatgagggagccagtgttttgtcagcaggaagaaagggcctgctgggatgaaagtgggaaggaaacagggttgcgtagtcaggagacacctcaggggcaacagcacaggcccagagtacctgctgcctccactgcgtctgtcctggggtcatgaggatgctgaggttgacgacaggttccaggtcctttcactcctttggccaaaggttgggggtaggtggcccaagtggcgtgctctctaggtagacaacaggagtggtcagagttccctcaaaggatcctccactccagagcacctgagaaggccgggaccagaggccctgtgtgatgtgtactccgcagctgtttggggtgggacatttctgtacttctcgatttgcttatggctcagccattacctgtgtcagtccatgattctgttgtaacagttttaagagtaaataaataaagctgcctgatgtcccatca

SEQ ID NO: 88746 - DNA, 6225 bp, Homo sapiens
agcggggtctgggctcccagactctgagagagagcgacggccatcatagaacagcgagggcagtcgatcggcctgcggtccgcttcggcattcgcaggccgcaggcgggaggctagagcccccaggcgcactcgccccaaccgcccgcggctcgggcagctctgcagagacgtcgtggcggcagggccagcacccattggtccgccacagccctccgccctccccctcgccacgcttattggccggagcggcggcgctcgccgggtaggcggtggcggcgtccctcccttgcgccggccctcaagaggcgacgaggatgcgaccgcctccctgcgccccgcccctccggctagctcgctggctcccggctcctcccgacgtctcctacctcctcacggctcttcccggcgctctcctggctcccttctgccccagctccgtctcggcggcggcgggcagttgcagtggtgcagaatggctgacctcagtcttgcagatgcattaacagaaccatctccagacattgagggagagataaagcgggacttcattgccacactagaggcagaggcctttgatgatgttgtgggagaaactgttggaaaaacagactatattcctctcctggatgttgatgagaaaaccgggaactcagagtcaaagaagaaaccgtgctcagaaactagccagattgaagatactccatcttctaaaccaacactcctagccaatggtggtcatggagtagaagggagcgatactacagggtctccaactgaattccttgaagagaaaatggcctaccaggaatacccaaatagccagaactggccagaagataccaacttttgtttccaacctgagcaagtggtcgatcctatccagactgatccctttaagatgtaccatgatgatgacctggcagatttggtctttccctccagtgcgacagctgatacttcaatatttgcaggacaaaatgatcccttgaaagacagttacggtatgtctccctgcaacacagctgttgtacctcaggggtggtctgtggaagccttaaactctccacactcagagtcctttgtttccccagaggctgttgcagaacctcctcagccaacggcagttcccttagagctagccaaggagatagaaatggcatcagaagagaggccaccagcacaagcattggaaataatgatgggactgaagactactgacatggcaccatctaaagaaacagagatggccctcgccaaggacatggcactagctacaaaaaccgaggtggcattggctaaagatatggaatcacccaccaaattagatgtgacactggccaaggacatgcagccatccatggaatcagatatggccctagtcaaggacatggaactacccacagaaaaagaagtggccctggttaaggatgtcagatggcccacagaaacagatgtatcttcagccaagaatgtggtactgcccacagaaacagaggtagccccagccaaggatgtgacactgttgaaagaaacagagagggcatctcctataaaaatggacttagccccttccaaggacatgggaccacccaaagaaaacaagaaagaaacagagagggcatctcctataaaaatggacttggctccttccaaggacatgggaccacccaaagaaaacaagatagtcccagccaaggatttggtattactctcagaaatagaggtggcacaggctaatgacattatatcatccacagaaatatcctctgctgagaaggtggctttgtcctcagaaacagaggtagccctggccagggacatgacactgcccccggaaaccaacgtgatcttgaccaaggataaagcactacctttagaagcagaggtggccccagtcaaggacatggctcaactcccagaaacagaaatagccccggccaaggatgtggctccgtccacagtaaaagaagtgggcttgttgaaggacatgtctccactatcagaaacagaaatggctctgggcaaggatgtgactccacctccagaaacagaagtagttctcatcaagaacgtatgtctgcctccagaaatggaggtggccctgactgaggatcaggtcccagccctcaaaacagaagcacccctggctaaggatggggttctgaccctggccaacaatgtgactccagccaaagatgttccaccactctcagaaacagaggcaacaccagttccaattaaagacatggaaattgcacaaacacaaaaaggaataagtgaggattcccatttagaatctctgcaggatgtggggcagtcagctgcacctactttcatgatttcaccagaaaccgtcacaggaacggggaaaaagtgcagcttgccggccgaggaggattctgtgttagaaaaactaggggaaaggaaaccatgcaacagtcaaccttctgagctttcttcagagacctcaggaatagccaggccagaagaaggaaggcctgtggtgagtgggacaggaaatgacatcaccaccccaccgaacaaggagctcccaccaagcccagagaagaaaacaaagcctttggccaccactcaacctgcaaagacttcaacatcgaaagccaaaacacagcccacttctctccctaagcagccagctcccaccaccattggtgggttgaataaaaaacccatgagccttgcttcaggcttagtgccagctgccccacccaaacgccctgccgtcgcctctgccaggccttccatcttaccttcaaaagacgtgaagccaaagcccattgcagatgcaaaggctcctgagaagcgggcctcaccatccaagccagcttctgccccagcctccagatctgggtccaagagcactcagactgttgcaaaaaccacaacagctgctgctgttgcctcaactggcccaagcagtaggagcccctccacgctcctgcccaagaagcccactgccattaagactgagggaaaacctgcagaagtcaagaagatgactgcaaagtctgtaccagctgacttgagtcgcccaaagagcacctccaccagttccatgaagaaaaccaccactctcagtgggacagcccccgctgcaggggtggttcccagccgagtcaaggccacacccatgccctcccggccctccacaactcctttcatagacaagaagcccacctcggccaaacccagctccaccaccccccggctcagccgcctggccaccaatacttctgctcctgatctgaagaatgtccgctccaaggccaaagtagagaaaaaaacagaggcagctgctacaacccgaaagcctgaatctaatgcagtcactaaaacagccggcccaattgcaagtgcacagaaacaacctgcggggaaagtccagatagtctccaaaaaagtgagctacagccatattcagtccaagtgtggttccaaggacaatattaagcatgtccctggaggtggtaatgttcagattcagaacaagaaagtggacatctctaaggtctcctccaagtgtgggtctaaggctaacatcaagcacaagcctggtggaggagatgtcaagattgaaagtcagaagttgaacttcaaggagaaggcccaggccaaggtgggatccctcgataatgtgggccacctacctgcaggaggtgctgtgaagactgagggcggtggcagcgaggctcctctgtgtccgggtccccctgctggggaggagccggccatctctgaggcagcgcctgaagctggcgcccccacttcagccagtggcctcaatggccaccccaccctgtcagggggtggtgaccaaagggaggcccagaccttggacagccagatccaggagacaagcatctaatgatgacattctggtctcgtcttccgtctcccccgtgttcccctcttgtctcccctgttcccctctcccttccctcctcccatgtcactgcagattgagacctacaggctgacgttccgggcaaatgccagggcccgcaccgaccacggggccgacattgtctcccgccccccacacttccctggcggccccaactcgggctcccgggtccttggccccctttcccgggctgtccactagaccagtgagcgcttgggcgccgtgctgggcagcccgctaggctcgccttccctcctgctttgcgtgcccggggcagcagcagccctgccccacacctcctctcactccccagcctgggcccatctccctgctttggtcttgccccatcactgcgccactgctccgtggaggaggttgggagggggttggggtggttgaggctaagttgggatctaggagaggagaaccagattctatcctcatctttttttggttctttggtccaaacccaaaagaaactgacatgccctcccttctccctggatctacctggagggaagagtggaggtggattccgagtggtgacaggacgctgaccgtggagcttaagccactgcctctccctctggtcccacaaatgggcgcccccccctccccatgcaggtggtgtcgggcccttcttgctgccctgccccaagttgggggtcagtgctgcctgtccccatgcttaacatacccgcctagctgctgtcacatttttcttgttttgtccttttatttttttctaataacctaaaaactggcaaaatagttctgcaggttgaagccatgtctacatgaaagtcctcagtaagtgttagagggaacagggcggagatatccttatgccacccccgctggaggatgtgggcagcttagggccctggaggcggtgcggcagggaagaggggtgcagaggctgtggctggtgagccggtcaggcacacaaggggcccttggagcgtggactggttggttttgccattttgttgtgtgtatgctgcttttcttttctaaccaagaggctggttttggcatctctgtcccattccctgggatctggtggtcagccctaggataaaaagccagggctggagaacaagaaagggccaggagatggaattccttcaggccggcacccacaccctaggacatgtaagccctcatgtccaagggagcctcatgcagatagtaggaaatcaggtctggaaatttaaaaataaaaggcatgagactaaggctatctgcttcccttatgccctgactggagaggggagggaggagaggcaaggcccacagagggcatcccagctaggccttgggatggctgcagtgaggagaaatcccgggaactgtattgacacaaagattcttattgcacttgtattttttgtattaaagtttgcatggtttctaataaaggattcaaacataagtttgtagtgaaatggcctgggagattccaagggcttctctggagggggattggctgcagtgtagatttgcctctgaggaggctgccccagacttggcctcctcatgccccctcctgacctctgcccttctctggtcctggcatccctggagaaggtaggggtcttgacctaagtttagatttgatctccatgtgcagggaggctgtcctgggcctgacaggtcctccccctttctgaggtagcagtgccttgtggaggtttgacaccatgtccctagctccccaagcacacaccaggaaactgcaggggctcacggaggaagtgctgcctgggccagggggaccagctttcctccgtagagaccatgtgcagaacacttctgctgtgccaagaacatgagggagccagtgttttgtcagcaggaagaaagggcctgctgggatgaaagtgggaaggaaacagggttgcgtagtcaggagacacctcaggggcaacagcacaggcccagagtacctgctgcctccactgcgtctgtcctggggtcatgaggatgctgaggttgacgacaggttccaggtcctttcactcctttggccaaaggttgggggtaggtggcccaagtggcgtgctctctaggtagacaacaggagtggtcagagttccctcaaaggatcctccactccagagcacctgagaaggccgggaccagaggccctgtgtgatgtgtactccgcagctgtttggggtgggacatttctgtacttctcgatttgcttatggctcagccattacctgtgtcagtccatgattctgttgtaacagttttaagagtaaataaataaagctgcctgatgtcccatca

SEQ ID NO: 88747 - DNA, 5960 bp, Homo sapiens
agcggggtctgggctcccagactctgagagagagcgacggccatcatagaacagcgagggcagtcgatcggcctgcggtccgcttcggcattcgcaggccgcaggcgggaggctagagcccccaggcgcactcgccccaaccgcccgcggctcgggcagctctgcagagacgtcgtggcggcagggccagcacccattggtccgccacagccctccgccctccccctcgccacgcttattggccggagcggcggcgctcgccgggtaggcggtggcggcgtccctcccttgcgccggccctcaagaggcgacgaggatgcgaccgcctccctgcgccccgcccctccggctagctcgctggctcccggctcctcccgacgtctcctacctcctcacggctcttcccggcgctctcctggctcccttctgccccagctccgtctcggcggcggcgggcagttgcagtggtgcagaatggctgacctcagtcttgcagatgcattaacagaaccatctccagacattgagggagagataaagcgggacttcattgccacactagaggcagaggcctttgatgatgttgtgggagaaactgttggaaaaacagactatattcctctcctggatgttgatgagaaaaccgggaactcagagtcaaagaagaaaccgtgctcagaaactagccagattgaagatactccatcttctaaaccaacactcctagccaatggtggtcatggagtagaagggagcgatactacagggtctccaactgaattccttgaagagaaaatggcctaccaggaatacccaaatagccagaactggccagaagataccaacttttgtttccaacctgagcaagtggtcgatcctatccagactgatccctttaagatgtaccatgatgatgacctggcagatttggtctttccctccagtgcgacagctgatacttcaatatttgcaggacaaaatgatcccttgaaagacagttacggtatgtctccctgcaacacagctgttgtacctcaggggtggtctgtggaagccttaaactctccacactcagagtcctttgtttccccagaggctgttgcagaacctcctcagccaacggcagttcccttagagctagccaaggagatagaaatggcatcagaagagaggccaccagcacaagcattggaaataatgatgggactgaagactactgacatggcaccatctaaagaaacagagatggccctcgccaaggacatggcactagctacaaaaaccgaggtggcattggctaaagatatggaatcacccaccaaattagatgtgacactggccaaggacatgcagccatccatggaatcagatatggccctagtcaaggacatggaactacccacagaaaaagaagtggccctggttaaggatgtcagatggcccacagaaacagatgtatcttcagccaagaatgtggtactgcccacagaaacagaggtagccccagccaaggatgtgacactgttgaaagaaacagagagggcatctcctataaaaatggacttagccccttccaaggacatgggaccacccaaagaaaacaagaaagaaacagagagggcatctcctataaaaatggacttggctccttccaaggacatgggaccacccaaagaaaacaagatagtcccagccaaggatttggtattactctcagaaatagaggtggcacaggctaatgacattatatcatccacagaaatatcctctgctgagaaggtggctttgtcctcagaaacagaggtagccctggccagggacatgacactgcccccggaaaccaacgtgatcttgaccaaggataaagcactacctttagaagcagaggtggccccagtcaaggacatggctcaactcccagaaacagaaatagccccggccaaggatgtggctccgtccacagtaaaagaagtgggcttgttgaaggacatgtctccactatcagaaacagaaatggctctgggcaaggatgtgactccacctccagaaacagaagtagttctcatcaagaacgtatgtctgcctccagaaatggaggtggccctgactgaggatcaggtcccagccctcaaaacagaagcacccctggctaaggatggggttctgaccctggccaacaatgtgactccagccaaagatgttccaccactctcagaaacagaggcaacaccagttccaattaaagacatggaaattgcacaaacacaaaaaggaataagtgaggattcccatttagaatctctgcaggatgtggggcagtcagctgcacctactttcatgatttcaccagaaaccgtcacaggaacggggaaaaagtgcagcttgccggccgaggaggattctgtgttagaaaaactaggggaaaggaaaccatgcaacagtcaaccttctgagctttcttcagagacctcaggaatagccaggccagaagaaggaaggcctgtggtgagtgggacaggaaatgacatcaccaccccaccgaacaaggagctcccaccaagcccagagaagaaaacaaagcctttggccaccactcaacctgcaaagacttcaacatcgaaagccaaaacacagcccacttctctccctaagcagccagctcccaccaccattggtgggttgaataaaaaacccatgagccttgcttcaggcttagtgccagctgccccacccaaacgccctgccgtcgcctctgccaggccttccatcttaccttcaaaagacgtgaagccaaagcccattgcagatgcaaaggctcctgagaagcgggcctcaccatccaagccagcttctgccccagcctccagatctgggtccaagagcactcagactgttgcaaaaaccacaacagctgctgctgttgcctcaactggcccaagcagtaggagcccctccacgctcctgcccaagaagcccactgccattaagactgagggaaaacctgcagaagtcaagaagatgactgcaaagtctgtaccagctgacttgagtcgcccaaagagcacctccaccagttccatgaagaaaaccaccactctcagtgggacagcccccgctgcaggggtggttcccagccgagtcaaggccacacccatgccctcccggccctccacaactcctttcatagacaagaagcccacctcggccaaacccagctccaccaccccccggctcagccgcctggccaccaatacttctgctcctgatctgaagaatgtccgctccaaggttggctccacggaaaacatcaagcatcagcctggaggaggccgggccaaagtagagaaaaaaacagaggcagctgctacaacccgaaagcctgaatctaatgcagtcactaaaacagccggcccaattgcaagtgcacagaaacaacctgcggggaaagtccagatagtctccaaaaaagtgagctacagccatattcagtccaagtgtggttccaaggacaatattaagcatgtccctggaggtggtaatgttcagattcagaacaagaaagtggacatctctaaggtctcctccaagtgtgggtctaaggctaacatcaagcacaagcctggtggaggagatgtcaagattgaaagtcagaagttgaacttcaaggagaaggcccaggccaaggtgggatccctcgataatgtgggccacctacctgcaggaggtgctgtgaagactgagggcggtggcagcgaggctcctctgtgtccgggtccccctgctggggaggagccggccatctctgaggcagcgcctgaagctggcgcccccacttcagccagtggcctcaatggccaccccaccctgtcagggggtggtgaccaaagggaggcccagaccttggacagccagatccaggagacaagcatctaatgatgacattctggtctcgtcttccgtctcccccgtgttcccctcttgtctcccctgttcccctctcccttccctcctcccatgtcactgcagattgagacctacaggctgacgttccgggcaaatgccagggcccgcaccgaccacggggccgacattgtctcccgccccccacacttccctggcggccccaactcgggctcccgggtccttggccccctttcccgggctgtccactagaccagtgagcgcttgggcgccgtgctgggcagcccgctaggctcgccttccctcctgctttgcgtgcccggggcagcagcagccctgccccacacctcctctcactccccagcctgggcccatctccctgctttggtcttgccccatcactgcgccactgctccgtggaggaggttgggagggggttggggtggttgaggctaagttgggatctaggagaggagaaccagattctatcctcatctttttttggttctttggtccaaacccaaaagaaactgacatgccctcccttctccctggatctacctggagggaagagtggaggtggattccgagtggtgacaggacgctgaccgtggagcttaagccactgcctctccctctggtcccacaaatgggcgcccccccctccccatgcaggtggtgtcgggcccttcttgctgccctgccccaagttgggggtcagtgctgcctgtccccatgcttaacatacccgcctagctgctgtcacatttttcttgttttgtccttttatttttttctaataacctaaaaactggcaaaatagttctgcaggttgaagccatgtctacatgaaagtcctcagtaagtgttagagggaacagggcggagatatccttatgccacccccgctggaggatgtgggcagcttagggccctggaggcggtgcggcagggaagaggggtgcagaggctgtggctggtgagccggtcaggcacacaaggggcccttggagcgtggactggttggttttgccattttgttgtgtgtatgctgcttttcttttctaaccaagaggctggttttggcatctctgtcccattccctgggatctggtggtcagccctaggataaaaagccagggctggagaacaagaaagggccaggagatggaattccttcaggccggcacccacaccctaggacatgtaagccctcatgtccaagggagcctcatgcagatagtaggaaatcaggtctggaaatttaaaaataaaaggcatgagactaaggctatctgcttcccttatgccctgactggagaggggagggaggagaggcaaggcccacagagggcatcccagctaggccttgggatggctgcagtgaggagaaatcccgggaactgtattgacacaaagattcttattgcacttgtattttttgtattaaagtttgcatggtttctaataaaggattcaaacataagtttgtagtgaaatggcctgggagattccaagggcttctctggagggggattggctgcagtgtagatttgcctctgaggaggctgccccagacttggcctcctcatgccccctcctgacctctgcccttctctggtcctggcatccctggagaaggtaggggtcttgacctaagtttagatttgatctccatgtgcaagagtacctgctgcctccactgcgtctgtcctggggtcatgaggatgctgaggttgacgacaggttccaggtcctttcactcctttggccaaaggttgggggtaggtggcccaagtggcgtgctctctaggtagacaacaggagtggtcagagttccctcaaaggatcctccactccagagcacctgagaaggccgggaccagaggccctgtgtgatgtgtactccgcagctgtttggggtgggacatttctgtacttctcgatttgcttatggctcagccattacctgtgtcagtccatgattctgttgtaacagttttaagagtaaataaataaagctgcctgatgtcccatca

SEQ ID NO: 88748 - DNA, 6129 bp, Homo sapiens
agcggggtctgggctcccagactctgagagagagcgacggccatcatagaacagcgagggcagtcgatcggcctgcggtccgcttcggcattcgcaggccgcaggcgggaggctagagcccccaggcgcactcgccccaaccgcccgcggctcgggcagctctgcagagacgtcgtggcggcagggccagcacccattggtccgccacagccctccgccctccccctcgccacgcttattggccggagcggcggcgctcgccgggtaggcggtggcggcgtccctcccttgcgccggccctcaagaggcgacgaggatgcgaccgcctccctgcgccccgcccctccggctagctcgctggctcccggctcctcccgacgtctcctacctcctcacggctcttcccggcgctctcctggctcccttctgccccagctccgtctcggcggcggcgggcagttgcagtggtgcagaatggctgacctcagtcttgcagatgcattaacagaaccatctccagacattgagggagagataaagcgggacttcattgccacactagaggcagaggcctttgatgatgttgtgggagaaactgttggaaaaacagactatattcctctcctggatgttgatgagaaaaccgggaactcagagtcaaagaagaaaccgtgctcagaaactagccagattgaagatactccatcttctaaaccaacactcctagccaatggtggtcatggagtagaagggagcgatactacagggtctccaactgaattccttgaagagaaaatggcctaccaggaatacccaaatagccagaactggccagaagataccaacttttgtttccaacctgagcaagtggtcgatcctatccagactgatccctttaagatgtaccatgatgatgacctggcagatttggtctttccctccagtgcgacagctgatacttcaatatttgcaggacaaaatgatcccttgaaagacagttacggtatgtctccctgcaacacagctgttgtacctcaggggtggtctgtggaagccttaaactctccacactcagagtcctttgtttccccagaggctgttgcagaacctcctcagccaacggcagttcccttagagctagccaaggagatagaaatggcatcagaagagaggccaccagcacaagcattggaaataatgatgggactgaagactactgacatggcaccatctaaagaaacagagatggccctcgccaaggacatggcactagctacaaaaaccgaggtggcattggctaaagatatggaatcacccaccaaattagatgtgacactggccaaggacatgcagccatccatggaatcagatatggccctagtcaaggacatggaactacccacagaaaaagaagtggccctggttaaggatgtcagatggcccacagaaacagatgtatcttcagccaagaatgtggtactgcccacagaaacagaggtagccccagccaaggatgtgacactgttgaaagaaacagagagggcatctcctataaaaatggacttagccccttccaaggacatgggaccacccaaagaaaacaagaaagaaacagagagggcatctcctataaaaatggacttggctccttccaaggacatgggaccacccaaagaaaacaagatagtcccagccaaggatttggtattactctcagaaatagaggtggcacaggctaatgacattatatcatccacagaaatatcctctgctgagaaggtggctttgtcctcagaaacagaggtagccctggccagggacatgacactgcccccggaaaccaacgtgatcttgaccaaggataaagcactacctttagaagcagaggtggccccagtcaaggacatggctcaactcccagaaacagaaatagccccggccaaggatgtggctccgtccacagtaaaagaagtgggcttgttgaaggacatgtctccactatcagaaacagaaatggctctgggcaaggatgtgactccacctccagaaacagaagtagttctcatcaagaacgtatgtctgcctccagaaatggaggtggccctgactgaggatcaggtcccagccctcaaaacagaagcacccctggctaaggatggggttctgaccctggccaacaatgtgactccagccaaagatgttccaccactctcagaaacagaggcaacaccagttccaattaaagacatggaaattgcacaaacacaaaaaggaataagtgaggattcccatttagaatctctgcaggatgtggggcagtcagctgcacctactttcatgatttcaccagaaaccgtcacaggaacggggaaaaagtgcagcttgccggccgaggaggattctgtgttagaaaaactaggggaaaggaaaccatgcaacagtcaaccttctgagctttcttcagagacctcaggaatagccaggccagaagaaggaaggcctgtggtgagtgggacaggaaatgacatcaccaccccaccgaacaaggagctcccaccaagcccagagaagaaaacaaagcctttggccaccactcaacctgcaaagacttcaacatcgaaagccaaaacacagcccacttctctccctaagcagccagctcccaccaccattggtgggttgaataaaaaacccatgagccttgcttcaggcttagtgccagctgccccacccaaacgccctgccgtcgcctctgccaggccttccatcttaccttcaaaagacgtgaagccaaagcccattgcagatgcaaaggctcctgagaagcgggcctcaccatccaagccagcttctgccccagcctccagatctgggtccaagagcactcagactgttgcaaaaaccacaacagctgctgctgttgcctcaactggcccaagcagtaggagcccctccacgctcctgcccaagaagcccactgccattaagactgagggaaaacctgcagaagtcaagaagatgactgcaaagtctgtaccagctgacttgagtcgcccaaagagcacctccaccagttccatgaagaaaaccaccactctcagtgggacagcccccgctgcaggggtggttcccagccgagtcaaggccacacccatgccctcccggccctccacaactcctttcatagacaagaagcccacctcggccaaacccagctccaccaccccccggctcagccgcctggccaccaatacttctgctcctgatctgaagaatgtccgctccaaggccaaagtagagaaaaaaacagaggcagctgctacaacccgaaagcctgaatctaatgcagtcactaaaacagccggcccaattgcaagtgcacagaaacaacctgcggggaaagtccagatagtctccaaaaaagtgagctacagccatattcagtccaagtgtggttccaaggacaatattaagcatgtccctggaggtggtaatgttcagattcagaacaagaaagtggacatctctaaggtctcctccaagtgtgggtctaaggctaacatcaagcacaagcctggtggaggagatgtcaagattgaaagtcagaagttgaacttcaaggagaaggcccaggccaaggtgggatccctcgataatgtgggccacctacctgcaggaggtgctgtgaagactgagggcggtggcagcgaggctcctctgtgtccgggtccccctgctggggaggagccggccatctctgaggcagcgcctgaagctggcgcccccacttcagccagtggcctcaatggccaccccaccctgtcagggggtggtgaccaaagggaggcccagaccttggacagccagatccaggagacaatgcagattgagacctacaggctgacgttccgggcaaatgccagggcccgcaccgaccacggggccgacattgtctcccgccccccacacttccctggcggccccaactcgggctcccgggtccttggccccctttcccgggctgtccactagaccagtgagcgcttgggcgccgtgctgggcagcccgctaggctcgccttccctcctgctttgcgtgcccggggcagcagcagccctgccccacacctcctctcactccccagcctgggcccatctccctgctttggtcttgccccatcactgcgccactgctccgtggaggaggttgggagggggttggggtggttgaggctaagttgggatctaggagaggagaaccagattctatcctcatctttttttggttctttggtccaaacccaaaagaaactgacatgccctcccttctccctggatctacctggagggaagagtggaggtggattccgagtggtgacaggacgctgaccgtggagcttaagccactgcctctccctctggtcccacaaatgggcgcccccccctccccatgcaggtggtgtcgggcccttcttgctgccctgccccaagttgggggtcagtgctgcctgtccccatgcttaacatacccgcctagctgctgtcacatttttcttgttttgtccttttatttttttctaataacctaaaaactggcaaaatagttctgcaggttgaagccatgtctacatgaaagtcctcagtaagtgttagagggaacagggcggagatatccttatgccacccccgctggaggatgtgggcagcttagggccctggaggcggtgcggcagggaagaggggtgcagaggctgtggctggtgagccggtcaggcacacaaggggcccttggagcgtggactggttggttttgccattttgttgtgtgtatgctgcttttcttttctaaccaagaggctggttttggcatctctgtcccattccctgggatctggtggtcagccctaggataaaaagccagggctggagaacaagaaagggccaggagatggaattccttcaggccggcacccacaccctaggacatgtaagccctcatgtccaagggagcctcatgcagatagtaggaaatcaggtctggaaatttaaaaataaaaggcatgagactaaggctatctgcttcccttatgccctgactggagaggggagggaggagaggcaaggcccacagagggcatcccagctaggccttgggatggctgcagtgaggagaaatcccgggaactgtattgacacaaagattcttattgcacttgtattttttgtattaaagtttgcatggtttctaataaaggattcaaacataagtttgtagtgaaatggcctgggagattccaagggcttctctggagggggattggctgcagtgtagatttgcctctgaggaggctgccccagacttggcctcctcatgccccctcctgacctctgcccttctctggtcctggcatccctggagaaggtaggggtcttgacctaagtttagatttgatctccatgtgcagggaggctgtcctgggcctgacaggtcctccccctttctgaggtagcagtgccttgtggaggtttgacaccatgtccctagctccccaagcacacaccaggaaactgcaggggctcacggaggaagtgctgcctgggccagggggaccagctttcctccgtagagaccatgtgcagaacacttctgctgtgccaagaacatgagggagccagtgttttgtcagcaggaagaaagggcctgctgggatgaaagtgggaaggaaacagggttgcgtagtcaggagacacctcaggggcaacagcacaggcccagagtacctgctgcctccactgcgtctgtcctggggtcatgaggatgctgaggttgacgacaggttccaggtcctttcactcctttggccaaaggttgggggtaggtggcccaagtggcgtgctctctaggtagacaacaggagtggtcagagttccctcaaaggatcctccactccagagcacctgagaaggccgggaccagaggccctgtgtgatgtgtactccgcagctgtttggggtgggacatttctgtacttctcgatttgcttatggctcagccattacctgtgtcagtccatgattctgttgtaacagttttaagagtaaataaataaagctgcctgatgtcccatca

SEQ ID NO: 88749 - DNA, 5491 bp, Homo sapiens
agcggggtctgggctcccagactctgagagagagcgacggccatcatagaacagcgagggcagtcgatcggcctgcggtccgcttcggcattcgcaggccgcaggcgggaggctagagcccccaggcgcactcgccccaaccgcccgcggctcgggcagctctgcagagacgtcgtggcggcagggccagcacccattggtccgccacagccctccgccctccccctcgccacgcttattggccggagcggcggcgctcgccgggtaggcggtggcggcgtccctcccttgcgccggccctcaagaggcgacgaggatgcgaccgcctccctgcgccccgcccctccggctagctcgctggctcccggctcctcccgacgtctcctacctcctcacggctcttcccggcgctctcctggctcccttctgccccagctccgtctcggcggcggcgggcagttgcagtggtgcagaatggctgacctcagtcttgcagatgcattaacagaaccatctccagacattgagggagagataaagcgggacttcattgccacactagaggcagaggcctttgatgatgttgtgggagaaactgttggaaaaacagactatattcctctcctggatgttgatgagaaaaccgggaactcagagtcaaagaagaaaccgtgctcagaaactagccagattgaagatactccatcttctaaaccaacactcctagccaatggtggtcatggagtagaagggagcgatactacagggtctccaactgaattccttgaagagaaaatggcctaccaggaatacccaaatagccagaactggccagaagataccaacttttgtttccaacctgagcaagtggtcgatcctatccagactgatccctttaagatgtaccatgatgatgacctggcagatttggtctttccctccagtgcgacagctgatacttcaatatttgcaggacaaaatgatcccttgaaagacagttacggtatgtctccctgcaacacagctgttgtacctcaggggtggtctgtggaagccttaaactctccacactcagagtcctttgtttccccagaggctgttgcagaacctcctcagccaacggcagttcccttagagctagccaaggagatagaaatggcatcagaagagaggccaccagcacaagcattggaaataatgatgggactgaagactactgacatggcaccatctaaagaaacagagatggccctcgccaaggacatggcactagctacaaaaaccgaggtggcattggctaaagatatggaatcacccaccaaattagatgtgacactggccaaggacatgcagccatccatggaatcagatatggccctagtcaaggacatggaactacccacagaaaaagaagtggccctggttaaggatgtcagatggcccacagaaacagatgtatcttcagccaagaatgtggtactgcccacagaaacagaggtagccccagccaaggatgtgacactgttgaaagaaacagagagggcatctcctataaaaatggacttagccccttccaaggacatgggaccacccaaagaaaacaagaaagaaacagagagggcatctcctataaaaatggacttggctccttccaaggacatgggaccacccaaagaaaacaagatagtcccagccaaggatttggtattactctcagaaatagaggtggcacaggctaatgacattatatcatccacagaaatatcctctgctgagaaggtggctttgtcctcagaaacagaggtagccctggccagggacatgacactgcccccggaaaccaacgtgatcttgaccaaggataaagcactacctttagaagcagaggtggccccagtcaaggacatggctcaactcccagaaacagaaatagccccggccaaggatgtggctccgtccacagtaaaagaagtgggcttgttgaaggacatgtctccactatcagaaacagaaatggctctgggcaaggatgtgactccacctccagaaacagaagtagttctcatcaagaacgtatgtctgcctccagaaatggaggtggccctgactgaggatcaggtcccagccctcaaaacagaagcacccctggctaaggatggggttctgaccctggccaacaatgtgactccagccaaagatgttccaccactctcagaaacagaggcaacaccagttccaattaaagacatggaaattgcacaaacacaaaaaggaataagtgaggattcccatttagaatctctgcaggatgtggggcagtcagctgcacctactttcatgatttcaccagaaaccgtcacaggaacggggaaaaagtgcagcttgccggccgaggaggattctgtgttagaaaaactaggggaaaggaaaccatgcaacagtcaaccttctgagctttcttcagagacctcaggaatagccaggccagaagaaggaaggcctgtggtgagtgggacaggaaatgacatcaccaccccaccgaacaaggagctcccaccaagcccagagaagaaaacaaagcctttggccaccactcaacctgcaaagacttcaacatcgaaagccaaaacacagcccacttctctccctaagcagccagctcccaccaccattggtgggttgaataaaaaacccatgagccttgcttcaggcttagtgccagctgccccacccaaacgccctgccgtcgcctctgccaggccttccatcttaccttcaaaagacgtgaagccaaagcccattgcagatgcaaaggctcctgagaagcgggcctcaccatccaagccagcttctgccccagcctccagatctgggtccaagagcactcagactgttgcaaaaaccacaacagctgctgctgttgcctcaactggcccaagcagtaggagcccctccacgctcctgcccaagaagcccactgccattaagactgagggaaaacctgcagaagtcaagaagatgactgcaaagtctgtaccagctgacttgagtcgcccaaagagcacctccaccagttccatgaagaaaaccaccactctcagtgggacagcccccgctgcaggggtggttcccagccgagtcaaggccacacccatgccctcccggccctccacaactcctttcatagacaagaagcccacctcggccaaacccagctccaccaccccccggctcagccgcctggccaccaatacttctgctcctgatctgaagaatgtccgctccaaggttggctccacggaaaacatcaagcatcagcctggaggaggccgggccaaagtagagaaaaaaacagaggcagctgctacaacccgaaagcctgaatctaatgcagtcactaaaacagccggcccaattgcaagtgcacagaaacaacctgcggggaaagtccagatagtctccaaaaaagtgagctacagccatattcagtccaagtgtggttccaaggacaatattaagcatgtccctggaggtggtaatgttcagattcagaacaagaaagtggacatctctaaggtctcctccaagtgtgggtctaaggctaacatcaagcacaagcctggtggaggagatgtcaagattgaaagtcagaagttgaacttcaaggagaaggcccaggccaaggtgggatccctcgataatgtgggccacctacctgcaggaggtgctgtgaagactgagggcggtggcagcgaggctcctctgtgtccgggtccccctgctggggaggagccggccatctctgaggcagcgcctgaagctggcgcccccacttcagccagtggcctcaatggccaccccaccctgtcagggggtggtgaccaaagggaggcccagaccttggacagccagatccaggagacaagcatctaatgatgacattctggtctcgtcttccgtctcccccgtgttcccctcttgtctcccctgttcccctctcccttccctcctcccatgtcactgcagattgagacctacaggctgacgttccgggcaaatgccagggcccgcaccgaccacggggccgacattgtctcccgccccccacacttccctggcggccccaactcgggctcccgggtccttggccccctttcccgggctgtccactagaccagtgagcgcttgggcgccgtgctgggcagcccgctaggctcgccttccctcctgctttgcgtgcccggggcagcagcagccctgccccacacctcctctcactccccagcctgggcccatctccctgctttggtcttgccccatcactgcgccactgctccgtggaggaggttgggagggggttggggtggttgaggctaagttgggatctaggagaggagaaccagattctatcctcatctttttttggttctttggtccaaacccaaaagaaactgacatgccctcccttctccctggatctacctggagggaagagtggaggtggattccgagtggtgacaggacgctgaccgtggagcttaagccactgcctctccctctggtcccacaaatgggcgcccccccctccccatgcaggtggtgtcgggcccttcttgctgccctgccccaagttgggggtcagtgctgcctgtccccatgcttaacatacccgcctagctgctgtcacatttttcttgttttgtccttttatttttttctaataacctaaaaactggcaaaatagttctgcaggttgaagccatgtctacatgaaagtcctcagtaagtgttagagggaacagggcggagatatccttatgccacccccgctggaggatgtgggcagcttagggccctggaggcggtgcggcagggaagaggggtgcagaggctgtggctggtgagccggtcaggcacacaaggggcccttggagcgtggactggttggttttgccattttgttgtgtgtatgctgcttttcttttctaaccaagaggctggttttggcatctctgtcccattccctgggatctggtggtcagccctaggataaaaagccagggctggagaacaagaaagggccaggagatggaattccttcaggccggcacccacaccctaggacatgtaagccctcatgtccaagggagcctcatgcagatagtaggaaatcaggtctggaaatttaaaaataaaaggcatgagactaaggctatctgcttcccttatgccctgactggagaggggagggaggagaggcaaggcccacagagggcatcccagctaggccttgggatggctgcagtgaggagaaatcccgggaactgtattgacacaaagattcttattgcacttgtattttttgtattaaagtttgcatggtttctaataaaggattcaaacataagtttgtagtgaaatggcctgggagattccaagggcttctctggagggtaaggctcccaagggatcctcagagtcaccctcagca

SEQ ID NO: 88750 - DNA, 5496 bp, Homo sapiens
  misc_feature (5446)..(5446): n is a, c, g, or t
agcggggtctgggctcccagactctgagagagagcgacggccatcatagaacagcgagggcagtcgatcggcctgcggtccgcttcggcattcgcaggccgcaggcgggaggctagagcccccaggcgcactcgccccaaccgcccgcggctcgggcagctctgcagagacgtcgtggcggcagggccagcacccattggtccgccacagccctccgccctccccctcgccacgcttattggccggagcggcggcgctcgccgggtaggcggtggcggcgtccctcccttgcgccggccctcaagaggcgacgaggatgcgaccgcctccctgcgccccgcccctccggctagctcgctggctcccggctcctcccgacgtctcctacctcctcacggctcttcccggcgctctcctggctcccttctgccccagctccgtctcggcggcggcgggcagttgcagtggtgcagaatggctgacctcagtcttgcagatgcattaacagaaccatctccagacattgagggagagataaagcgggacttcattgccacactagaggcagaggcctttgatgatgttgtgggagaaactgttggaaaaacagactatattcctctcctggatgttgatgagaaaaccgggaactcagagtcaaagaagaaaccgtgctcagaaactagccagattgaagatactccatcttctaaaccaacactcctagccaatggtggtcatggagtagaagggagcgatactacagggtctccaactgaattccttgaagagaaaatggcctaccaggaatacccaaatagccagaactggccagaagataccaacttttgtttccaacctgagcaagtggtcgatcctatccagactgatccctttaagatgtaccatgatgatgacctggcagatttggtctttccctccagtgcgacagctgatacttcaatatttgcaggacaaaatgatcccttgaaagacagttacggtatgtctccctgcaacacagctgttgtacctcaggggtggtctgtggaagccttaaactctccacactcagagtcctttgtttccccagaggctgttgcagaacctcctcagccaacggcagttcccttagagctagccaaggagatagaaatggcatcagaagagaggccaccagcacaagcattggaaataatgatgggactgaagactactgacatggcaccatctaaagaaacagagatggccctcgccaaggacatggcactagctacaaaaaccgaggtggcattggctaaagatatggaatcacccaccaaattagatgtgacactggccaaggacatgcagccatccatggaatcagatatggccctagtcaaggacatggaactacccacagaaaaagaagtggccctggttaaggatgtcagatggcccacagaaacagatgtatcttcagccaagaatgtggtactgcccacagaaacagaggtagccccagccaaggatgtgacactgttgaaagaaacagagagggcatctcctataaaaatggacttagccccttccaaggacatgggaccacccaaagaaaacaagaaagaaacagagagggcatctcctataaaaatggacttggctccttccaaggacatgggaccacccaaagaaaacaagatagtcccagccaaggatttggtattactctcagaaatagaggtggcacaggctaatgacattatatcatccacagaaatatcctctgctgagaaggtggctttgtcctcagaaacagaggtagccctggccagggacatgacactgcccccggaaaccaacgtgatcttgaccaaggataaagcactacctttagaagcagaggtggccccagtcaaggacatggctcaactcccagaaacagaaatagccccggccaaggatgtggctccgtccacagtaaaagaagtgggcttgttgaaggacatgtctccactatcagaaacagaaatggctctgggcaaggatgtgactccacctccagaaacagaagtagttctcatcaagaacgtatgtctgcctccagaaatggaggtggccctgactgaggatcaggtcccagccctcaaaacagaagcacccctggctaaggatggggttctgaccctggccaacaatgtgactccagccaaagatgttccaccactctcagaaacagaggcaacaccagttccaattaaagacatggaaattgcacaaacacaaaaaggaataagtgaggattcccatttagaatctctgcaggatgtggggcagtcagctgcacctactttcatgatttcaccagaaaccgtcacaggaacggggaaaaagtgcagcttgccggccgaggaggattctgtgttagaaaaactaggggaaaggaaaccatgcaacagtcaaccttctgagctttcttcagagacctcaggaatagccaggccagaagaaggaaggcctgtggtgagtgggacaggaaatgacatcaccaccccaccgaacaaggagctcccaccaagcccagagaagaaaacaaagcctttggccaccactcaacctgcaaagacttcaacatcgaaagccaaaacacagcccacttctctccctaagcagccagctcccaccaccattggtgggttgaataaaaaacccatgagccttgcttcaggcttagtgccagctgccccacccaaacgccctgccgtcgcctctgccaggccttccatcttaccttcaaaagacgtgaagccaaagcccattgcagatgcaaaggctcctgagaagcgggcctcaccatccaagccagcttctgccccagcctccagatctgggtccaagagcactcagactgttgcaaaaaccacaacagctgctgctgttgcctcaactggcccaagcagtaggagcccctccacgctcctgcccaagaagcccactgccattaagactgagggaaaacctgcagaagtcaagaagatgactgcaaagtctgtaccagctgacttgagtcgcccaaagagcacctccaccagttccatgaagaaaaccaccactctcagtgggacagcccccgctgcaggggtggttcccagccgagtcaaggccacacccatgccctcccggccctccacaactcctttcatagacaagaagcccacctcggccaaacccagctccaccaccccccggctcagccgcctggccaccaatacttctgctcctgatctgaagaatgtccgctccaaggttggctccacggaaaacatcaagcatcagcctggaggaggccgggccaaagtagagaaaaaaacagaggcagctgctacaacccgaaagcctgaatctaatgcagtcactaaaacagccggcccaattgcaagtgcacagaaacaacctgcggggaaagtccagatagtctccaaaaaagtgagctacagccatattcagtccaagtgtggttccaaggacaatattaagcatgtccctggaggtggtaatgttcagattcagaacaagaaagtggacatctctaaggtctcctccaagtgtgggtctaaggctaacatcaagcacaagcctggtggaggagatgtcaagattgaaagtcagaagttgaacttcaaggagaaggcccaggccaaggtgggatccctcgataatgtgggccacctacctgcaggaggtgctgtgaagactgagggcggtggcagcgaggctcctctgtgtccgggtccccctgctggggaggagccggccatctctgaggcagcgcctgaagctggcgcccccacttcagccagtggcctcaatggccaccccaccctgtcagggggtggtgaccaaagggaggcccagaccttggacagccagatccaggagacaagcatctaatgatgacattctggtctcgtcttccgtctcccccgtgttcccctcttgtctcccctgttcccctctcccttccctcctcccatgtcactgcagattgagacctacaggctgacgttccgggcaaatgccagggcccgcaccgaccacggggccgacattgtctcccgccccccacacttccctggcggccccaactcgggctcccgggtccttggccccctttcccgggctgtccactagaccagtgagcgcttgggcgccgtgctgggcagcccgctaggctcgccttccctcctgctttgcgtgcccggggcagcagcagccctgccccacacctcctctcactccccagcctgggcccatctccctgctttggtcttgccccatcactgcgccactgctccgtggaggaggttgggagggggttggggtggttgaggctaagttgggatctaggagaggagaaccagattctatcctcatctttttttggttctttggtccaaacccaaaagaaactgacatgccctcccttctccctggatctacctggagggaagagtggaggtggattccgagtggtgacaggacgctgaccgtggagcttaagccactgcctctccctctggtcccacaaatgggcgcccccccctccccatgcaggtggtgtcgggcccttcttgctgccctgccccaagttgggggtcagtgctgcctgtccccatgcttaacatacccgcctagctgctgtcacatttttcttgttttgtccttttatttttttctaataacctaaaaactggcaaaatagttctgcaggttgaagccatgtctacatgaaagtcctcagtaagtgttagagggaacagggcggagatatccttatgccacccccgctggaggatgtgggcagcttagggccctggaggcggtgcggcagggaagaggggtgcagaggctgtggctggtgagccggtcaggcacacaaggggcccttggagcgtggactggttggttttgccattttgttgtgtgtatgctgcttttcttttctaaccaagaggctggttttggcatctctgtcccattccctgggatctggtggtcagccctaggataaaaagccagggctggagaacaagaaagggccaggagatggaattccttcaggccggcacccacaccctaggacatgtaagccctcatgtccaagggagcctcatgcagatagtaggaaatcaggtctggaaatttaaaaataaaaggcatgagactaaggctatctgcttcccttatgccctgactggagaggggagggaggagaggcaaggcccacagagggcatcccagctaggccttgggatggctgcagtgaggagaaatcccgggaactgtattgacacaaagattcttattgcacttgtattttttgtattaaagtttgcatgtttgtgtttgaagctaagtgttattacaagagtcaaaaaatgttttaaaaactaaaaagtttatnaagtaaaagagttacagtaagctcaggctaatttattattgaaaaaataa

SEQ ID NO: 88751 - DNA, 5635 bp, Homo sapiens
agcggggtctgggctcccagactctgagagagagcgacggccatcatagaacagcgagggcagtcgatcggcctgcggtccgcttcggcattcgcaggccgcaggcgggaggctagagcccccaggcgcactcgccccaaccgcccgcggctcgggcagctctgcagagacgtcgtggcggcagggccagcacccattggtccgccacagccctccgccctccccctcgccacgcttattggccggagcggcggcgctcgccgggtaggcggtggcggcgtccctcccttgcgccggccctcaagaggcgacgaggatgcgaccgcctccctgcgccccgcccctccggctagctcgctggctcccggctcctcccgacgtctcctacctcctcacggctcttcccggcgctctcctggctcccttctgccccagctccgtctcggcggcggcgggcagttgcagtggtgcagaatggctgacctcagtcttgcagatgcattaacagaaccatctccagacattgagggagagataaagcgggacttcattgccacactagaggcagaggcctttgatgatgttgtgggagaaactgttggaaaaacagactatattcctctcctggatgttgatgagaaaaccgggaactcagagtcaaagaagaaaccgtgctcagaaactagccagattgaagatactccatcttctaaaccaacactcctagccaatggtggtcatggagtagaagggagcgatactacagggtctccaactgaattccttgaagagaaaatggcctaccaggaatacccaaatagccagaactggccagaagataccaacttttgtttccaacctgagcaagtggtcgatcctatccagactgatccctttaagatgtaccatgatgatgacctggcagatttggtctttccctccagtgcgacagctgatacttcaatatttgcaggacaaaatgatcccttgaaagacagttacggtatgtctccctgcaacacagctgttgtacctcaggggtggtctgtggaagccttaaactctccacactcagagtcctttgtttccccagaggctgttgcagaacctcctcagccaacggcagttcccttagagctagccaaggagatagaaatggcatcagaagagaggccaccagcacaagcattggaaataatgatgggactgaagactactgacatggcaccatctaaagaaacagagatggccctcgccaaggacatggcactagctacaaaaaccgaggtggcattggctaaagatatggaatcacccaccaaattagatgtgacactggccaaggacatgcagccatccatggaatcagatatggccctagtcaaggacatggaactacccacagaaaaagaagtggccctggttaaggatgtcagatggcccacagaaacagatgtatcttcagccaagaatgtggtactgcccacagaaacagaggtagccccagccaaggatgtgacactgttgaaagaaacagagagggcatctcctataaaaatggacttagccccttccaaggacatgggaccacccaaagaaaacaagaaagaaacagagagggcatctcctataaaaatggacttggctccttccaaggacatgggaccacccaaagaaaacaagatagtcccagccaaggatttggtattactctcagaaatagaggtggcacaggctaatgacattatatcatccacagaaatatcctctgctgagaaggtggctttgtcctcagaaacagaggtagccctggccagggacatgacactgcccccggaaaccaacgtgatcttgaccaaggataaagcactacctttagaagcagaggtggccccagtcaaggacatggctcaactcccagaaacagaaatagccccggccaaggatgtggctccgtccacagtaaaagaagtgggcttgttgaaggacatgtctccactatcagaaacagaaatggctctgggcaaggatgtgactccacctccagaaacagaagtagttctcatcaagaacgtatgtctgcctccagaaatggaggtggccctgactgaggatcaggtcccagccctcaaaacagaagcacccctggctaaggatggggttctgaccctggccaacaatgtgactccagccaaagatgttccaccactctcagaaacagaggcaacaccagttccaattaaagacatggaaattgcacaaacacaaaaaggaataagtgaggattcccatttagaatctctgcaggatgtggggcagtcagctgcacctactttcatgatttcaccagaaaccgtcacaggaacggggaaaaagtgcagcttgccggccgaggaggattctgtgttagaaaaactaggggaaaggaaaccatgcaacagtcaaccttctgagctttcttcagagacctcaggaatagccaggccagaagaaggaaggcctgtggtgagtgggacaggaaatgacatcaccaccccaccgaacaaggagctcccaccaagcccagagaagaaaacaaagcctttggccaccactcaacctgcaaagacttcaacatcgaaagccaaaacacagcccacttctctccctaagcagccagctcccaccaccattggtgggttgaataaaaaacccatgagccttgcttcaggcttagtgccagctgccccacccaaacgccctgccgtcgcctctgccaggccttccatcttaccttcaaaagacgtgaagccaaagcccattgcagatgcaaaggctcctgagaagcgggcctcaccatccaagccagcttctgccccagcctccagatctgggtccaagagcactcagactgttgcaaaaaccacaacagctgctgctgttgcctcaactggcccaagcagtaggagcccctccacgctcctgcccaagaagcccactgccattaagactgagggaaaacctgcagaagtcaagaagatgactgcaaagtctgtaccagctgacttgagtcgcccaaagagcacctccaccagttccatgaagaaaaccaccactctcagtgggacagcccccgctgcaggggtggttcccagccgagtcaaggccacacccatgccctcccggccctccacaactcctttcatagacaagaagcccacctcggccaaacccagctccaccaccccccggctcagccgcctggccaccaatacttctgctcctgatctgaagaatgtccgctccaaggttggctccacggaaaacatcaagcatcagcctggaggaggccgggccaaagtagagaaaaaaacagaggcagctgctacaacccgaaagcctgaatctaatgcagtcactaaaacagccggcccaattgcaagtgcacagaaacaacctgcggggaaagtccagatagtctccaaaaaagtgagctacagccatattcagtccaagtgtggttccaaggacaatattaagcatgtccctggaggtggtaatgttcagattcagaacaagaaagtggacatctctaaggtctcctccaagtgtgggtctaaggctaacatcaagcacaagcctggtggaggagatgtcaagattgaaagtcagaagttgaacttcaaggagaaggcccaggccaaggtgggatccctcgataatgtgggccacctacctgcaggaggtgctgtgaagactgagggcggtggcagcgaggctcctctgtgtccgggtccccctgctggggaggagccggccatctctgaggcagcgcctgaagctggcgcccccacttcagccagtggcctcaatggccaccccaccctgtcagggggtggtgaccaaagggaggcccagaccttggacagccagatccaggagacaagcatctaatgatgacattctggtctcgtcttccgtctcccccgtgttcccctcttgtctcccctgttcccctctcccttccctcctcccatgtcactgcagattgagacctacaggctgacgttccgggcaaatgccagggcccgcaccgaccacggggccgacattgtctcccgccccccacacttccctggcggccccaactcgggctcccgggtccttggccccctttcccgggctgtccactagaccagtgagcgcttgggcgccgtgctgggcagcccgctaggctcgccttccctcctgctttgcgtgcccggggcagcagcagccctgccccacacctcctctcactccccagccgggcccttggagcgtggactggttggttttgccattttgttgtgtgtatgctgcttttcttttctaaccaagaggctggttttggcatctctgtcccattccctgggatctggtggtcagccctaggataaaaagccagggctggagaacaagaaagggccaggagatggaattccttcaggccggcacccacaccctaggacatgtaagccctcatgtccaagggagcctcatgcagatagtaggaaatcaggtctggaaatttaaaaataaaaggcatgagactaaggctatctgcttcccttatgccctgactggagaggggagggaggagaggcaaggcccacagagggcatcccagctaggccttgggatggctgcagtgaggagaaatcccgggaactgtattgacacaaagattcttattgcacttgtattttttgtattaaagtttgcatggtttctaataaaggattcaaacataagtttgtagtgaaatggcctgggagattccaagggcttctctggagggggattggctgcagtgtagatttgcctctgaggaggctgccccagacttggcctcctcatgccccctcctgacctctgcccttctctggtcctggcatccctggagaaggtaggggtcttgacctaagtttagatttgatctccatgtgcagggaggctgtcctgggcctgacaggtcctccccctttctgaggtagcagtgccttgtggaggtttgacaccatgtccctagctccccaagcacacaccaggaaactgcaggggctcacggaggaagtgctgcctgggccagggggaccagctttcctccgtagagaccatgtgcagaacacttctgctgtgccaagaacatgagggagccagtgttttgtcagcaggaagaaagggcctgctgggatgaaagtgggaaggaaacagggttgcgtagtcaggagacacctcaggggcaacagcacaggcccagagtacctgctgcctccactgcgtctgtcctggggtcatgaggatgctgaggttgacgacaggttccaggtcctttcactcctttggccaaaggttgggggtaggtggcccaagtggcgtgctctctaggtagacaacaggagtggtcagagttccctcaaaggatcctccactccagagcacctgagaaggccgggaccagaggccctgtgtgatgtgtactccgcagctgtttggggtgggacatttctgtacttctcgatttgcttatggctcagccattacctgtgtcagtccatgattctgttgtaacagttttaagagtaaataaataaagctgcctgatgtcccatca

SEQ ID NO: 88752 - DNA, 5878 bp, Homo sapiens
agcggggtctgggctcccagactctgagagagagcgacggccatcatagaacagcgagggcagtcgatcggcctgcggtccgcttcggcattcgcaggccgcaggcgggaggctagagcccccaggcgcactcgccccaaccgcccgcggctcgggcagctctgcagagacgtcgtggcggcagggccagcacccattggtccgccacagccctccgccctccccctcgccacgcttattggccggagcggcggcgctcgccgggtaggcggtggcggcgtccctcccttgcgccggccctcaagaggcgacgaggatgcgaccgcctccctgcgccccgcccctccggctagctcgctggctcccggctcctcccgacgtctcctacctcctcacggctcttcccggcgctctcctggctcccttctgccccagctccgtctcggcggcggcgggcagttgcagtggtgcagaatggctgacctcagtcttgcagatgcattaacagaaccatctccagacattgagggagagataaagcgggacttcattgccacactagaggcagaggcctttgatgatgttgtgggagaaactgttggaaaaacagactatattcctctcctggatgttgatgagaaaaccgggaactcagagtcaaagaagaaaccgtgctcagaaactagccagattgaagatactccatcttctaaaccaacactcctagccaatggtggtcatggagtagaagggagcgatactacagggtctccaactgaattccttgaagagaaaatggcctaccaggaatacccaaatagccagaactggccagaagataccaacttttgtttccaacctgagcaagtggtcgatcctatccagactgatccctttaagatgtaccatgatgatgacctggcagatttggtctttccctccagtgcgacagctgatacttcaatatttgcaggacaaaatgatcccttgaaagacagttacggtatgtctccctgcaacacagctgttgtacctcaggggtggtctgtggaagccttaaactctccacactcagagtcctttgtttccccagaggctgttgcagaacctcctcagccaacggcagttcccttagagctagccaaggagatagaaatggcatcagaagagaggccaccagcacaagcattggaaataatgatgggactgaagactactgacatggcaccatctaaagaaacagagatggccctcgccaaggacatggcactagctacaaaaaccgaggtggcattggctaaagatatggaatcacccaccaaattagatgtgacactggccaaggacatgcagccatccatggaatcagatatggccctagtcaaggacatggaactacccacagaaaaagaagtggccctggttaaggatgtcagatggcccacagaaacagatgtatcttcagccaagaatgtggtactgcccacagaaacagaggtagccccagccaaggatgtgacactgttgaaagaaacagagagggcatctcctataaaaatggacttagccccttccaaggacatgggaccacccaaagaaaacaagaaagaaacagagagggcatctcctataaaaatggacttggctccttccaaggacatgggaccacccaaagaaaacaagatagtcccagccaaggatttggtattactctcagaaatagaggtggcacaggctaatgacattatatcatccacagaaatatcctctgctgagaaggtggctttgtcctcagaaacagaggtagccctggccagggacatgacactgcccccggaaaccaacgtgatcttgaccaaggataaagcactacctttagaagcagaggtggccccagtcaaggacatggctcaactcccagaaacagaaatagccccggccaaggatgtggctccgtccacagtaaaagaagtgggcttgttgaaggacatgtctccactatcagaaacagaaatggctctgggcaaggatgtgactccacctccagaaacagaagtagttctcatcaagaacgtatgtctgcctccagaaatggaggtggccctgactgaggatcaggtcccagccctcaaaacagaagcacccctggctaaggatggggttctgaccctggccaacaatgtgactccagccaaagatgttccaccactctcagaaacagaggcaacaccagttccaattaaagacatggaaattgcacaaacacaaaaaggaataagtgaggattcccatttagaatctctgcaggatgtggggcagtcagctgcacctactttcatgatttcaccagaaaccgtcacaggaacggggaaaaagtgcagcttgccggccgaggaggattctgtgttagaaaaactaggggaaaggaaaccatgcaacagtcaaccttctgagctttcttcagagacctcaggaatagccaggccagaagaaggaaggcctgtggtgagtgggacaggaaatgacatcaccaccccaccgaacaaggagctcccaccaagcccagagaagaaaacaaagcctttggccaccactcaacctgcaaagacttcaacatcgaaagccaaaacacagcccacttctctccctaagcagccagctcccaccaccattggtgggttgaataaaaaacccatgagccttgcttcaggcttagtgccagctgccccacccaaacgccctgccgtcgcctctgccaggccttccatcttaccttcaaaagacgtgaagccaaagcccattgcagatgcaaaggctcctgagaagcgggcctcaccatccaagccagcttctgccccagcctccagatctgggtccaagagcactcagactgttgcaaaaaccacaacagctgctgctgttgcctcaactggcccaagcagtaggagcccctccacgctcctgcccaagaagcccactgccattaagactgagggaaaacctgcagaagtcaagaagatgactgcaaagtctgtaccagctgacttgagtcgcccaaagagcacctccaccagttccatgaagaaaaccaccactctcagtgggacagcccccgctgcaggggtggttcccagccgagtcaaggccacacccatgccctcccggccctccacaactcctttcatagacaagaagcccacctcggccaaacccagctccaccaccccccggctcagccgcctggccaccaatacttctgctcctgatctgaagaatgtccgctccaaggttggctccacggaaaacatcaagcatcagcctggaggaggccgggccaaagtagagaaaaaaacagaggcagctgctacaacccgaaagcctgaatctaatgcagtcactaaaacagccggcccaattgcaagtgcacagaaacaacctgcggggaaagtccagatagtctccaaaaaagtgagctacagccatattcagtccaagtgtggttccaaggacaatattaagcatgtccctggaggtggtaatgttcagattcagaacaagaaagtggacatctctaaggtctcctccaagtgtgggtctaaggctaacatcaagcacaagcctggtggaggagatgtcaagattgaaagtcagaagttgaacttcaaggagaaggcccaggccaaggtgggatccctcgataatgtgggccacctacctgcaggaggtgctgtgaagactgagggcggtggcagcgaggctcctctgtgtccgggtccccctgctggggaggagccggccatctctgaggcagcgcctgaagctggcgcccccacttcagccagtggcctcaatggccaccccaccctgtcagggggtggtgaccaaagggaggcccagaccttggacagccagatccaggagacaagcatctaatgatgacattctggtctcgtcttccgtctcccccgtgttcccctcttgtctcccctgttcccctctcccttccctcctcccatgtcactgcagattgagacctacaggctgacgttccgggcaaatgccagggcccgcaccgaccacggggccgacattgtctcccgccccccacacttccctggcggccccaactcgggctcccgggtccttggccccctttcccgggctgtccactagaccagtgagcgcttgggcgccgtgctgggcagcccgctaggctcgccttccctcctgctttgcgtgccccatcactgcgccactgctccgtggaggaggttgggagggggttggggtggttgaggctaagttgggatctaggagaggagaaccagattctatcctcatctttttttggttctttggtccaaacccaaaagaaactgacatgccctcccttctccctggatctacctggagggaagagtggaggtggattccgagtggtgacaggacgctgaccgtggagcttaagccactgcctctccctctggtcccacaaatgggcgcccccccctccccatgcaggtggtgtcgggcccttcttgctgccctgccccaagttgggggtcagtgctgcctgtccccagcttttcttttctaaccaagaggctggttttggcatctctgtcccattccctgggatctggtggtcagccctaggataaaaagccagggctggagaacaagaaagggccaggagatggaattccttcaggccggcacccacaccctaggacatgtaagccctcatgtccaagggagcctcatgcagatagtaggaaatcaggtctggaaatttaaaaataaaaggcatgagactaaggctatctgcttcccttatgccctgactggagaggggagggaggagaggcaaggcccacagagggcatcccagctaggccttgggatggctgcagtgaggagaaatcccgggaactgtattgacacaaagattcttattgcacttgtattttttgtattaaagtttgcatggtttctaataaaggattcaaacataagtttgtagtgaaatggcctgggagattccaagggcttctctggagggggattggctgcagtgtagatttgcctctgaggaggctgccccagacttggcctcctcatgccccctcctgacctctgcccttctctggtcctggcatccctggagaaggtaggggtcttgacctaagtttagatttgatctccatgtgcagggaggctgtcctgggcctgacaggtcctccccctttctgaggtagcagtgccttgtggaggtttgacaccatgtccctagctccccaagcacacaccaggaaactgcaggggctcacggaggaagtgctgcctgggccagggggaccagctttcctccgtagagaccatgtgcagaacacttctgctgtgccaagaacatgagggagccagtgttttgtcagcaggaagaaagggcctgctgggatgaaagtgggaaggaaacagggttgcgtagtcaggagacacctcaggggcaacagcacaggcccagagtacctgctgcctccactgcgtctgtcctggggtcatgaggatgctgaggttgacgacaggttccaggtcctttcactcctttggccaaaggttgggggtaggtggcccaagtggcgtgctctctaggtagacaacaggagtggtcagagttccctcaaaggatcctccactccagagcacctgagaaggccgggaccagaggccctgtgtgatgtgtactccgcagctgtttggggtgggacatttctgtacttctcgatttgcttatggctcagccattacctgtgtcagtccatgattctgttgtaacagttttaagagtaaataaataaagctgcctgatgtcccatca

SEQ ID NO: 88753 - DNA, 5090 bp, Homo sapiens
agcggggtctgggctcccagactctgagagagagcgacggccatcatagaacagcgagggcagtcgatcggcctgcggtccgcttcggcattcgcaggccgcaggcgggaggctagagcccccaggcgcactcgccccaaccgcccgcggctcgggcagctctgcagagacgtcgtggcggcagggccagcacccattggtccgccacagccctccgccctccccctcgccacgcttattggccggagcggcggcgctcgccgggtaggcggtggcggcgtccctcccttgcgccggccctcaagaggcgacgaggatgcgaccgcctccctgcgccccgcccctccggctagctcgctggctcccggctcctcccgacgtctcctacctcctcacggctcttcccggcgctctcctggctcccttctgccccagctccgtctcggcggcggcgggcagttgcagtggtgcagaatggctgacctcagtcttgcagatgcattaacagaaccatctccagacattgagggagagataaagcgggacttcattgccacactagaggcagaggcctttgatgatgttgtgggagaaactgttggaaaaacagactatattcctctcctggatgttgatgagaaaaccgggaactcagagtcaaagaagaaaccgtgctcagaaactagccagattgaagatactccatcttctaaaccaacactcctagccaatggtggtcatggagtagaagggagcgatactacagggtctccaactgaattccttgaagagaaaatggcctaccaggaatacccaaatagccagaactggccagaagataccaacttttgtttccaacctgagcaagtggtcgatcctatccagactgatccctttaagatgtaccatgatgatgacctggcagatttggtctttccctccagtgcgacagctgatacttcaatatttgcaggacaaaatgatcccttgaaagacagttacggtatgtctccctgcaacacagctgttgtacctcaggggtggtctgtggaagccttaaactctccacactcagagtcctttgtttccccagaggctgttgcagaacctcctcagccaacggcagttcccttagagctagccaaggagatagaaatggcatcagaagagaggccaccagcacaagcattggaaataatgatgggactgaagactactgacatggcaccatctaaagaaacagagatggccctcgccaaggacatggcactagctacaaaaaccgaggtggcattggctaaagatatggaatcacccaccaaattagatgtgacactggccaaggacatgcagccatccatggaatcagatatggccctagtcaaggacatggaactacccacagaaaaagaagtggccctggttaaggatgtcagatggcccacagaaacagatgtatcttcagccaagaatgtggtactgcccacagaaacagaggtagccccagccaaggatgtgacactgttgaaagaaacagagagggcatctcctataaaaatggacttagccccttccaaggacatgggaccacccaaagaaaacaagaaagaaacagagagggcatctcctataaaaatggacttggctccttccaaggacatgggaccacccaaagaaaacaagatagtcccagccaaggatttggtattactctcagaaatagaggtggcacaggctaatgacattatatcatccacagaaatatcctctgctgagaaggtggctttgtcctcagaaacagaggtagccctggccagggacatgacactgcccccggaaaccaacgtgatcttgaccaaggataaagcactacctttagaagcagaggtggccccagtcaaggacatggctcaactcccagaaacagaaatagccccggccaaggatgtggctccgtccacagtaaaagaagtgggcttgttgaaggacatgtctccactatcagaaacagaaatggctctgggcaaggatgtgactccacctccagaaacagaagtagttctcatcaagaacgtatgtctgcctccagaaatggaggtggccctgactgaggatcaggtcccagccctcaaaacagaagcacccctggctaaggatggggttctgaccctggccaacaatgtgactccagccaaagatgttccaccactctcagaaacagaggcaacaccagttccaattaaagacatggaaattgcacaaacacaaaaaggaataagtgaggattcccatttagaatctctgcaggatgtggggcagtcagctgcacctactttcatgatttcaccagaaaccgtcacaggaacggggaaaaagtgcagcttgccggccgaggaggattctgtgttagaaaaactaggggaaaggaaaccatgcaacagtcaaccttctgagctttcttcagagacctcaggaatagccaggccagaagaaggaaggcctgtggtgagtgggacaggaaatgacatcaccaccccaccgaacaaggagctcccaccaagcccagagaagaaaacaaagcctttggccaccactcaacctgcaaagacttcaacatcgaaagccaaaacacagcccacttctctccctaagcagccagctcccaccaccattggtgggttgaataaaaaacccatgagccttgcttcaggcttagtgccagctgccccacccaaacgccctgccgtcgcctctgccaggccttccatcttaccttcaaaagacgtgaagccaaagcccattgcagatgcaaaggctcctgagaagcgggcctcaccatccaagccagcttctgccccagcctccagatctgggtccaagagcactcagactgttgcaaaaaccacaacagctgctgctgttgcctcaactggcccaagcagtaggagcccctccacgctcctgcccaagaagcccactgccattaagactgagggaaaacctgcagaagtcaagaagatgactgcaaagtctgtaccagctgacttgagtcgcccaaagagcacctccaccagttccatgaagaaaaccaccactctcagtgggacagcccccgctgcaggggtggttcccagccgagtcaaggccacacccatgccctcccggccctccacaactcctttcatagacaagaagcccacctcggccaaacccagctccaccaccccccggctcagccgcctggccaccaatacttctgctcctgatctgaagaatgtccgctccaaggttggctccacggaaaacatcaagcatcagcctggaggaggccgggccaaagtagagaaaaaaacagaggcagctgctacaacccgaaagcctgaatctaatgcagtcactaaaacagccggcccaattgcaagtgcacagaaacaacctgcggggaaagtccagatagtctccaaaaaagtgagctacagccatattcagtccaagtgtggttccaaggacaatattaagcatgtccctggaggtggtaatgttcagattcagaacaagaaagtggacatctctaaggtctcctccaagtgtgggtctaaggctaacatcaagcacaagcctggtggaggagatgtcaagattgaaagtcagaagttgaacttcaaggagaaggcccaggccaaggtgggatccctcgataatgtgggccacctacctgcaggaggtgctgtgaagactgagggcggtggcagcgaggctcctctgtgtccgggtccccctgctggggaggagccggccatctctgaggcagcgcctgaagctggcgcccccacttcagccagtggcctcaatggccaccccaccctgtcagggggtggtgaccaaagggaggcccagaccttggacagccagatccaggagacaagcatctaatgatgacattctggtctcgtcttccgtctcccccgtgttcccctcttgtctcccctgttcccctctcccttccctcctcccatgtcactgcagattgagacctacaggctgacgttccgggcaaatgccagggcccgcaccgaccacggggccgacattgtctcccgccccccacacttccctggcggccccaactcgggctcccgggtccttggccccctttcccgggctgtccactagaccagtgagcgcttgggcgccgtgctgggcagcccgctaggctcgccttccctcctgctttgcgtgcccggggcagcagcagccctgccccacacctcctctcactccccagcctgggcccatctccctgctttggtcttgccccatcactgcgccactgctccgtggaggaggttgggagggggttggggtggttgaggctaagttgggatctaggagaggagaaccagattctatcctcatctttttttggttctttggtccaaacccaaaagaaactgacatgccctcccttctccctggatctacctggagggaagagtggaggtggattccgagtggtgacaggacgctgaccgtggagcttaagccactgcctctccctctggtcccacaaatgggcgcccccccctccccatgcaggtggtgtcgggcccttcttgctgccctgccccaagttgggggtcagtgctgcctgtccccagcttttcttttctaaccaagaggctggttttggcatctctgtcccattccctgggatctggtggtcagccctaggataaaaagccagggctggagaacaagaaagggccaggagatggaattccttcaggccggcacccacaccctaggacatgtaagccctcatgtccaagggagcctcatgcagatagtaggaaatcaggtctggaaatttaaaaataaaaggcatgagactaaggctatctgcttcccttatgccctgactggagaggggagggaggagaggcaaggcccacagagggcatcccagctaggccttgggatggctgcagtgaggagaaatcccgggaactgtattgacacaaagattcttattgcacttgtattttttgtattaaagtttgcatggtttctaataaaggattcaaacataa

SEQ ID NO: 88754 - DNA, 4035 bp, Homo sapiens
agcggggtctgggctcccagactctgagagagagcgacggccatcatagaacagcgagggcagtcgatcggcctgcggtccgcttcggcattcgcaggccgcaggcgggaggctagagcccccaggcgcactcgccccaaccgcccgcggctcgggcagctctgcagagacgtcgtggcggcagggccagcacccattggtccgccacagccctccgccctccccctcgccacgcttattggccggagcggcggcgctcgccgggtaggcggtggcggcgtccctcccttgcgccggccctcaagaggcgacgaggatgcgaccgcctccctgcgccccgcccctccggctagctcgctggctcccggctcctcccgacgtctcctacctcctcacggctcttcccggcgctctcctggctcccttctgccccagctccgtctcggcggcggcgggcagttgcagtggtgcagaatggctgacctcagtcttgcagatgcattaacagaaccatctccagacattgagggagagataaagcgggacttcattgccacactagaggcagaggcctttgatgatgttgtgggagaaactgttggaaaaacagactatattcctctcctggatgttgatgagaaaaccgggaactcagagtcaaagaagaaaccgtgctcagaaactagccagattgaagatactccatcttctaaaccaacactcctagccaatggtggtcatggagtagaagggagcgatactacagggtctccaactgaattccttgaagagaaaatggcctaccaggaatacccaaatagccagaactggccagaagataccaacttttgtttccaacctgagcaagtggtcgatcctatccagactgatccctttaagatgtaccatgatgatgacctggcagatttggtctttccctccagtgcgacagctgatacttcaatatttgcaggacaaaatgatcccttgaaagacagttacggtatgtctccctgcaacacagctgttgtacctcaggggtggtctgtggaagccttaaactctccacactcagagtcctttgtttccccagaggctgttgcagaacctcctcagccaacggcagttcccttagagctagccaaggagatagaaatggcatcagaagagaggccaccagcacaagcattggaaataatgatgggactgaagactactgacatggcaccatctaaagaaacagagatggccctcgccaaggacatggcactagctacaaaaaccgaggtggcattggctaaagatatggaatcacccaccaaattagatgtgacactggccaaggacatgcagccatccatggaatcagatatggccctagtcaaggacatggaactacccacagaaaaagaagtggccctggttaaggatgtcagatggcccacagaaacagatgtatcttcagccaagaatgtggtactgcccacagaaacagaggtagccccagccaaggatgtgacactgttgaaagaaacagagagggcatctcctataaaaatggacttagccccttccaaggacatgggaccacccaaagaaaacaagaaagaaacagagagggcatctcctataaaaatggacttggctccttccaaggacatgggaccacccaaagaaaacaagatagtcccagccaaggatttggtattactctcagaaatagaggtggcacaggctaatgacattatatcatccacagaaatatcctctgctgagaaggtggctttgtcctcagaaacagaggtagccctggccagggacatgacactgcccccggaaaccaacgtgatcttgaccaaggataaagcactacctttagaagcagaggtggccccagtcaaggacatggctcaactcccagaaacagaaatagccccggccaaggatgtggctccgtccacagtaaaagaagtgggcttgttgaaggacatgtctccactatcagaaacagaaatggctctgggcaaggatgtgactccacctccagaaacagaagtagttctcatcaagaacgtatgtctgcctccagaaatggaggtggccctgactgaggatcaggtcccagccctcaaaacagaagcacccctggctaaggatggggttctgaccctggccaacaatgtgactccagccaaagatgttccaccactctcagaaacagaggcaacaccagttccaattaaagacatggaaattgcacaaacacaaaaaggaataagtgaggattcccatttagaatctctgcaggatgtggggcagtcagctgcacctactttcatgatttcaccagaaaccgtcacaggaacggggaaaaagtgcagcttgccggccgaggaggattctgtgttagaaaaactaggggaaaggaaaccatgcaacagtcaaccttctgagctttcttcagagacctcaggaatagccaggccagaagaaggaaggcctgtggtgagtgggacaggaaatgacatcaccaccccaccgaacaaggagctcccaccaagcccagagaagaaaacaaagcctttggccaccactcaacctgcaaagacttcaacatcgaaagccaaaacacagcccacttctctccctaagcagccagctcccaccaccattggtgggttgaataaaaaacccatgagccttgcttcaggcttagtgccagctgccccacccaaacgccctgccgtcgcctctgccaggccttccatcttaccttcaaaagacgtgaagccaaagcccattgcagatgcaaaggctcctgagaagcgggcctcaccatccaagccagcttctgccccagcctccagatctgggtccaagagcactcagactgttgcaaaaaccacaacagctgctgctgttgcctcaactggcccaagcagtaggagcccctccacgctcctgcccaagaagcccactgccattaagactgagggaaaacctgcagaagtcaagaagatgactgcaaagtctgtaccagctgacttgagtcgcccaaagagcacctccaccagttccatgaagaaaaccaccactctcagtgggacagcccccgctgcaggggtggttcccagccgagtcaaggccacacccatgccctcccggccctccacaactcctttcatagacaagaagcccacctcggccaaacccagctccaccaccccccggctcagccgcctggccaccaatacttctgctcctgatctgaagaatgtccgctccaaggttggctccacggaaaacatcaagcatcagcctggaggaggccgggccaaagtagagaaaaaaacagaggcagctgctacaacccgaaagcctgaatctaatgcagtcactaaaacagccggcccaattgcaagtgcacagaaacaacctgcggggaaagtccagatagtctccaaaaaagtgagctacagccatattcagtccaagtgtggttccaaggacaatattaagcatgtccctggaggtggtaatgttcagattcagaacaagaaagtggacatctctaaggtctcctccaagtgtgggtctaaggctaacatcaagcacaagcctggtggaggagatgtcaagattgaaagtcagaagttgaacttcaaggagaaggcccaggccaaggtgggatccctcgataatgtgggccacctacctgcaggaggtgctgtgaagactgagggcggtggcagcgaggctcctctgtgtccgggtccccctgctggggaggagccggccatctctgaggcagcgcctgaagctggcgcccccacttcagccagtggcctcaatggccaccccaccctgtcagggggtggtgaccaaagggaggcccagaccttggacagccagatccaggagacaatgcagattgagacctacaggctgacgttccgggcaaatgccagggcccgcaccgaccacggggccgacattgtctcccgcccccgagagagcggggaccgagctgagtat

SEQ ID NO: 88755 - DNA, 3885 bp, Homo sapiens
agcggggtctgggctcccagactctgagagagagcgacggccatcatagaacagcgagggcagtcgatcggcctgcggtccgcttcggcattcgcaggccgcaggcgggaggctagagcccccaggcgcactcgccccaaccgcccgcggctcgggcagctctgcagagacgtcgtggcggcagggccagcacccattggtccgccacagccctccgccctccccctcgccacgcttattggccggagcggcggcgctcgccgggtaggcggtggcggcgtccctcccttgcgccggccctcaagaggcgacgaggatgcgaccgcctccctgcgccccgcccctccggctagctcgctggctcccggctcctcccgacgtctcctacctcctcacggctcttcccggcgctctcctggctcccttctgccccagctccgtctcggcggcggcgggcagttgcagtggtgcagaatggctgacctcagtcttgcagatgcattaacagaaccatctccagacattgagggagagataaagcgggacttcattgccacactagaggcagaggcctttgatgatgttgtgggagaaactgttggaaaaacagactatattcctctcctggatgttgatgagaaaaccgggaactcagagtcaaagaagaaaccgtgctcagaaactagccagattgaagatactccatcttctaaaccaacactcctagccaatggtggtcatggagtagaagggagcgatactacagggtctccaactgaattccttgaagagaaaatggcctaccaggaatacccaaatagccagaactggccagaagataccaacttttgtttccaacctgagcaagtggtcgatcctatccagactgatccctttaagatgtaccatgatgatgacctggcagatttggtctttccctccagtgcgacagctgatacttcaatatttgcaggacaaaatgatcccttgaaagacagttacggtatgtctccctgcaacacagctgttgtacctcaggggtggtctgtggaagccttaaactctccacactcagagtcctttgtttccccagaggctgttgcagaacctcctcagccaacggcagttcccttagagctagccaaggagatagaaatggcatcagaagagaggccaccagcacaagcattggaaataatgatgggactgaagactactgacatggcaccatctaaagaaacagagatggccctcgccaaggacatggcactagctacaaaaaccgaggtggcattggctaaagatatggaatcacccaccaaattagatgtgacactggccaaggacatgcagccatccatggaatcagatatggccctagtcaaggacatggaactacccacagaaaaagaagtggccctggttaaggatgtcagatggcccacagaaacagatgtatcttcagccaagaatgtggtactgcccacagaaacagaggtagccccagccaaggatgtgacactgttgaaagaaacagagagggcatctcctataaaaatggacttagccccttccaaggacatgggaccacccaaagaaaacaagaaagaaacagagagggcatctcctataaaaatggacttggctccttccaaggacatgggaccacccaaagaaaacaagatagtcccagccaaggatttggtattactctcagaaatagaggtggcacaggctaatgacattatatcatccacagaaatatcctctgctgagaaggtggctttgtcctcagaaacagaggtagccctggccagggacatgacactgcccccggaaaccaacgtgatcttgaccaaggataaagcactacctttagaagcagaggtggccccagtcaaggacatggctcaactcccagaaacagaaatagccccggccaaggatgtggctccgtccacagtaaaagaagtgggcttgttgaaggacatgtctccactatcagaaacagaaatggctctgggcaaggatgtgactccacctccagaaacagaagtagttctcatcaagaacgtatgtctgcctccagaaatggaggtggccctgactgaggatcaggtcccagccctcaaaacagaagcacccctggctaaggatggggttctgaccctggccaacaatgtgactccagccaaagatgttccaccactctcagaaacagaggcaacaccagttccaattaaagacatggaaattgcacaaacacaaaaaggaataagtgaggattcccatttagaatctctgcaggatgtggggcagtcagctgcacctactttcatgatttcaccagaaaccgtcacaggaacggggaaaaagtgcagcttgccggccgaggaggattctgtgttagaaaaactaggggaaaggaaaccatgcaacagtcaaccttctgagctttcttcagagacctcaggaatagccaggccagaagaaggaaggcctgtggtgagtgggacaggaaatgacatcaccaccccaccgaacaaggagctcccaccaagcccagagaagaaaacaaagcctttggccaccactcaacctgcaaagacttcaacatcgaaagccaaaacacagcccacttctctccctaagcagccagctcccaccaccattggtgggttgaataaaaaacccatgagccttgcttcaggcttagtgccagctgccccacccaaacgccctgccgtcgcctctgccaggccttccatcttaccttcaaaagacgtgaagccaaagcccattgcagatgcaaaggctcctgagaagcgggcctcaccatccaagccagcttctgccccagcctccagatctgggtccaagagcactcagactgttgcaaaaaccacaacagctgctgctgttgcctcaactggcccaagcagtaggagcccctccacgctcctgcccaagaagcccactgccattaagactgagggaaaacctgcagaagtcaagaagatgactgcaaagtctgtaccagctgacttgagtcgcccaaagagcacctccaccagttccatgaagaaaaccaccactctcagtgggacagcccccgctgcaggggtggttcccagccgagtcaaggccacacccatgccctcccggccctccacaactcctttcatagacaagaagcccacctcggccaaacccagctccaccaccccccggctcagccgcctggccaccaatacttctgctcctgatctgaagaatgtccgctccaaggttggctccacggaaaacatcaagcatcagcctggaggaggccgggccaaagtagagaaaaaaacagaggcagctgctacaacccgaaagcctgaatctaatgcagtcactaaaacagccggcccaattgcaagtgcacagaaacaacctgcggggaaagtccagatagtctccaaaaaagtgagctacagccatattcagtccaagtgtggttccaaggacaatattaagcatgtccctggaggtggtaatgttcagattcagaacaagaaagtggacatctctaaggtctcctccaagtgtgggtctaaggctaacatcaagcacaagcctggtggaggagatgtcaagattgaaagtcagaagttgaacttcaaggagaaggcccaggccaaggtgggatccctcgataatgtgggccacctacctgcaggaggtgctgtgaagtgcagattgagacctacaggctgacgttccgggcaaatgccagggcccgcaccgaccacggggccgacattgtctcccgcccccgctcctgagctgcagctcgctcctagagttagcagctcgctcctgagttagcagcttgcacctgcg

SEQ ID NO: 88756 - DNA, 3788 bp, Homo sapiens
agcggggtctgggctcccagactctgagagagagcgacggccatcatagaacagcgagggcagtcgatcggcctgcggtccgcttcggcattcgcaggccgcaggcgggaggctagagcccccaggcgcactcgccccaaccgcccgcggctcgggcagctctgcagagacgtcgtggcggcagggccagcacccattggtccgccacagccctccgccctccccctcgccacgcttattggccggagcggcggcgctcgccgggtaggcggtggcggcgtccctcccttgcgccggccctcaagaggcgacgaggatgcgaccgcctccctgcgccccgcccctccggctagctcgctggctcccggctcctcccgacgtctcctacctcctcacggctcttcccggcgctctcctggctcccttctgccccagctccgtctcggcggcggcgggcagttgcagtggtgcagaatggctgacctcagtcttgcagatgcattaacagaaccatctccagacattgagggagagataaagcgggacttcattgccacactagaggcagaggcctttgatgatgttgtgggagaaactgttggaaaaacagactatattcctctcctggatgttgatgagaaaaccgggaactcagagtcaaagaagaaaccgtgctcagaaactagccagattgaagatactccatcttctaaaccaacactcctagccaatggtggtcatggagtagaagggagcgatactacagggtctccaactgaattccttgaagagaaaatggcctaccaggaatacccaaatagccagaactggccagaagataccaacttttgtttccaacctgagcaagtggtcgatcctatccagactgatccctttaagatgtaccatgatgatgacctggcagatttggtctttccctccagtgcgacagctgatacttcaatatttgcaggacaaaatgatcccttgaaagacagttacggtatgtctccctgcaacacagctgttgtacctcaggggtggtctgtggaagccttaaactctccacactcagagtcctttgtttccccagaggctgttgcagaacctcctcagccaacggcagttcccttagagctagccaaggagatagaaatggcatcagaagagaggccaccagcacaagcattggaaataatgatgggactgaagactactgacatggcaccatctaaagaaacagagatggccctcgccaaggacatggcactagctacaaaaaccgaggtggcattggctaaagatatggaatcacccaccaaattagatgtgacactggccaaggacatgcagccatccatggaatcagatatggccctagtcaaggacatggaactacccacagaaaaagaagtggccctggttaaggatgtcagatggcccacagaaacagatgtatcttcagccaagaatgtggtactgcccacagaaacagaggtagccccagccaaggatgtgacactgttgaaagaaacagagagggcatctcctataaaaatggacttagccccttccaaggacatgggaccacccaaagaaaacaagaaagaaacagagagggcatctcctataaaaatggacttggctccttccaaggacatgggaccacccaaagaaaacaagatagtcccagccaaggatttggtattactctcagaaatagaggtggcacaggctaatgacattatatcatccacagaaatatcctctgctgagaaggtggctttgtcctcagaaacagaggtagccctggccagggacatgacactgcccccggaaaccaacgtgatcttgaccaaggataaagcactacctttagaagcagaggtggccccagtcaaggacatggctcaactcccagaaacagaaatagccccggccaaggatgtggctccgtccacagtaaaagaagtgggcttgttgaaggacatgtctccactatcagaaacagaaatggctctgggcaaggatgtgactccacctccagaaacagaagtagttctcatcaagaacgtatgtctgcctccagaaatggaggtggccctgactgaggatcaggtcccagccctcaaaacagaagcacccctggctaaggatggggttctgaccctggccaacaatgtgactccagccaaagatgttccaccactctcagaaacagaggcaacaccagttccaattaaagacatggaaattgcacaaacacaaaaaggaataagtgaggattcccatttagaatctctgcaggatgtggggcagtcagctgcacctactttcatgatttcaccagaaaccgtcacaggaacggggaaaaagtgcagcttgccggccgaggaggattctgtgttagaaaaactaggggaaaggaaaccatgcaacagtcaaccttctgagctttcttcagagacctcaggaatagccaggccagaagaaggaaggcctgtggtgagtgggacaggaaatgacatcaccaccccaccgaacaaggagctcccaccaagcccagagaagaaaacaaagcctttggccaccactcaacctgcaaagacttcaacatcgaaagccaaaacacagcccacttctctccctaagcagccagctcccaccaccattggtgggttgaataaaaaacccatgagccttgcttcaggcttagtgccagctgccccacccaaacgccctgccgtcgcctctgccaggccttccatcttaccttcaaaagacgtgaagccaaagcccattgcagatgcaaaggctcctgagaagcgggcctcaccatccaagccagcttctgccccagcctccagatctgggtccaagagcactcagactgttgcaaaaaccacaacagctgctgctgttgcctcaactggcccaagcagtaggagcccctccacgctcctgcccaagaagcccactgccattaagactgagggaaaacctgcagaagtcaagaagatgactgcaaagtctgtaccagctgacttgagtcgcccaaagagcacctccaccagttccatgaagaaaaccaccactctcagtgggacagcccccgctgcaggggtggttcccagccgagtcaaggccacacccatgccctcccggccctccacaactcctttcatagacaagaagcccacctcggccaaacccagctccaccaccccccggctcagccgcctggccaccaatacttctgctcctgatctgaagaatgtccgctccaaggttggctccacggaaaacatcaagcatcagcctggaggaggccgggccaaagtagagaaaaaaacagaggcagctgctacaacccgaaagcctgaatctaatgcagtcactaaaacagccggcccaattgcaagtgcacagaaacaacctgcggggaaagtccagatagtctccaaaaaagtgagctacagccatattcagtccaagtgtggttccaaggacaatattaagcatgtccctggaggtggtaatgttcagattcagaacaagaaagtggacatctctaaggtctcctccaagtgtgggtctaaggctaacatcaagcacaagcctggtggaggagatgtcaagattgaaagtcagaagggcatcccagctaggccttgggatggctgcagtgaggagaaatcccgggaactgtattgacacaaagattcttattgcacttgtattttttgtattaaagtttgcatggtttctaataaaggattcaaacataa

SEQ ID NO: 88757 - DNA, 3697 bp, Homo sapiens
agcggggtctgggctcccagactctgagagagagcgacggccatcatagaacagcgagggcagtcgatcggcctgcggtccgcttcggcattcgcaggccgcaggcgggaggctagagcccccaggcgcactcgccccaaccgcccgcggctcgggcagctctgcagagacgtcgtggcggcagggccagcacccattggtccgccacagccctccgccctccccctcgccacgcttattggccggagcggcggcgctcgccgggtaggcggtggcggcgtccctcccttgcgccggccctcaagaggcgacgaggatgcgaccgcctccctgcgccccgcccctccggctagctcgctggctcccggctcctcccgacgtctcctacctcctcacggctcttcccggcgctctcctggctcccttctgccccagctccgtctcggcggcggcgggcagttgcagtggtgcagaatggctgacctcagtcttgcagatgcattaacagaaccatctccagacattgagggagagataaagcgggacttcattgccacactagaggcagaggcctttgatgatgttgtgggagaaactgttggaaaaacagactatattcctctcctggatgttgatgagaaaaccgggaactcagagtcaaagaagaaaccgtgctcagaaactagccagattgaagatactccatcttctaaaccaacactcctagccaatggtggtcatggagtagaagggagcgatactacagggtctccaactgaattccttgaagagaaaatggcctaccaggaatacccaaatagccagaactggccagaagataccaacttttgtttccaacctgagcaagtggtcgatcctatccagactgatccctttaagatgtaccatgatgatgacctggcagatttggtctttccctccagtgcgacagctgatacttcaatatttgcaggacaaaatgatcccttgaaagacagttacggtatgtctccctgcaacacagctgttgtacctcaggggtggtctgtggaagccttaaactctccacactcagagtcctttgtttccccagaggctgttgcagaacctcctcagccaacggcagttcccttagagctagccaaggagatagaaatggcatcagaagagaggccaccagcacaagcattggaaataatgatgggactgaagactactgacatggcaccatctaaagaaacagagatggccctcgccaaggacatggcactagctacaaaaaccgaggtggcattggctaaagatatggaatcacccaccaaattagatgtgacactggccaaggacatgcagccatccatggaatcagatatggccctagtcaaggacatggaactacccacagaaaaagaagtggccctggttaaggatgtcagatggcccacagaaacagatgtatcttcagccaagaatgtggtactgcccacagaaacagaggtagccccagccaaggatgtgacactgttgaaagaaacagagagggcatctcctataaaaatggacttagccccttccaaggacatgggaccacccaaagaaaacaagaaagaaacagagagggcatctcctataaaaatggacttggctccttccaaggacatgggaccacccaaagaaaacaagatagtcccagccaaggatttggtattactctcagaaatagaggtggcacaggctaatgacattatatcatccacagaaatatcctctgctgagaaggtggctttgtcctcagaaacagaggtagccctggccagggacatgacactgcccccggaaaccaacgtgatcttgaccaaggataaagcactacctttagaagcagaggtggccccagtcaaggacatggctcaactcccagaaacagaaatagccccggccaaggatgtggctccgtccacagtaaaagaagtgggcttgttgaaggacatgtctccactatcagaaacagaaatggctctgggcaaggatgtgactccacctccagaaacagaagtagttctcatcaagaacgtatgtctgcctccagaaatggaggtggccctgactgaggatcaggtcccagccctcaaaacagaagcacccctggctaaggatggggttctgaccctggccaacaatgtgactccagccaaagatgttccaccactctcagaaacagaggcaacaccagttccaattaaagacatggaaattgcacaaacacaaaaaggaataagtgaggattcccatttagaatctctgcaggatgtggggcagtcagctgcacctactttcatgatttcaccagaaaccgtcacaggaacggggaaaaagtgcagcttgccggccgaggaggattctgtgttagaaaaactaggggaaaggaaaccatgcaacagtcaaccttctgagctttcttcagagacctcaggaatagccaggccagaagaaggaaggcctgtggtgagtgggacaggaaatgacatcaccaccccaccgaacaaggagctcccaccaagcccagagaagaaaacaaagcctttggccaccactcaacctgcaaagacttcaacatcgaaagccaaaacacagcccacttctctccctaagcagccagctcccaccaccattggtgggttgaataaaaaacccatgagccttgcttcaggcttagtgccagctgccccacccaaacgccctgccgtcgcctctgccaggccttccatcttaccttcaaaagacgtgaagccaaagcccattgcagatgcaaaggctcctgagaagcgggcctcaccatccaagccagcttctgccccagcctccagatctgggtccaagagcactcagactgttgcaaaaaccacaacagctgctgctgttgcctcaactggcccaagcagtaggagcccctccacgctcctgcccaagaagcccactgccattaagactgagggaaaacctgcagaagtcaagaagatgactgcaaagtctgtaccagctgacttgagtcgcccaaagagcacctccaccagttccatgaagaaaaccaccactctcagtgggacagcccccgctgcaggggtggttcccagccgagtcaaggccacacccatgccctcccggccctccacaactcctttcatagacaagaagcccacctcggccaaacccagctccaccaccccccggctcagccgcctggccaccaatacttctgctcctgatctgaagaatgtccgctccaaggttggctccacggaaaacatcaagcatcagcctggaggaggccgggccaaagtagagaaaaaaacagaggcagctgctacaacccgaaagcctgaatctaatgcagtcactaaaacagccggcccaattgcaagtgcacagaaacaacctgcggggaaaccttgtacgcgtacaaggccccgctccacctggtccctctgatcgagcggctggggacccctcagcaaatcgccattgctcgcgagggtgacctcctgaccaaggagcggctgtgctgtggcctgtccatgttcgaggtcatcctgacccgcattcggagctacctgcaggaccccatctggctgggcccaccgcccaccaatggcgtcggcacgtcgatgagtgtgtggagtccaccggctgtggagcg

SEQ ID NO: 88758 - DNA, 3191 bp, Homo sapiens
agcggggtctgggctcccagactctgagagagagcgacggccatcatagaacagcgagggcagtcgatcggcctgcggtccgcttcggcattcgcaggccgcaggcgggaggctagagcccccaggcgcactcgccccaaccgcccgcggctcgggcagctctgcagagacgtcgtggcggcagggccagcacccattggtccgccacagccctccgccctccccctcgccacgcttattggccggagcggcggcgctcgccgggtaggcggtggcggcgtccctcccttgcgccggccctcaagaggcgacgaggatgcgaccgcctccctgcgccccgcccctccggctagctcgctggctcccggctcctcccgacgtctcctacctcctcacggctcttcccggcgctctcctggctcccttctgccccagctccgtctcggcggcggcgggcagttgcagtggtgcagaatggctgacctcagtcttgcagatgcattaacagaaccatctccagacattgagggagagataaagcgggacttcattgccacactagaggcagaggcctttgatgatgttgtgggagaaactgttggaaaaacagactatattcctctcctggatgttgatgagaaaaccgggaactcagagtcaaagaagaaaccgtgctcagaaactagccagattgaagatactccatcttctaaaccaacactcctagccaatggtggtcatggagtagaagggagcgatactacagggtctccaactgaattccttgaagagaaaatggcctaccaggaatacccaaatagccagaactggccagaagataccaacttttgtttccaacctgagcaagtggtcgatcctatccagactgatccctttaagatgtaccatgatgatgacctggcagatttggtctttccctccagtgcgacagctgatacttcaatatttgcaggacaaaatgatcccttgaaagacagttacggtatgtctccctgcaacacagctgttgtacctcaggggtggtctgtggaagccttaaactctccacactcagagtcctttgtttccccagaggctgttgcagaacctcctcagccaacggcagttcccttagagctagccaaggagatagaaatggcatcagaagagaggccaccagcacaagcattggaaataatgatgggactgaagactactgacatggcaccatctaaagaaacagagatggccctcgccaaggacatggcactagctacaaaaaccgaggtggcattggctaaagatatggaatcacccaccaaattagatgtgacactggccaaggacatgcagccatccatggaatcagatatggccctagtcaaggacatggaactacccacagaaaaagaagtggccctggttaaggatgtcagatggcccacagaaacagatgtatcttcagccaagaatgtggtactgcccacagaaacagaggtagccccagccaaggatgtgacactgttgaaagaaacagagagggcatctcctataaaaatggacttagccccttccaaggacatgggaccacccaaagaaaacaagaaagaaacagagagggcatctcctataaaaatggacttggctccttccaaggacatgggaccacccaaagaaaacaagatagtcccagccaaggatttggtattactctcagaaatagaggtggcacaggctaatgacattatatcatccacagaaatatcctctgctgagaaggtggctttgtcctcagaaacagaggtagccctggccagggacatgacactgcccccggaaaccaacgtgatcttgaccaaggataaagcactacctttagaagcagaggtggccccagtcaaggacatggctcaactcccagaaacagaaatagccccggccaaggatgtggctccgtccacagtaaaagaagtgggcttgttgaaggacatgtctccactatcagaaacagaaatggctctgggcaaggatgtgactccacctccagaaacagaagtagttctcatcaagaacgtatgtctgcctccagaaatggaggtggccctgactgaggatcaggtcccagccctcaaaacagaagcacccctggctaaggatggggttctgaccctggccaacaatgtgactccagccaaagatgttccaccactctcagaaacagaggcaacaccagttccaattaaagacatggaaattgcacaaacacaaaaaggaataagtgaggattcccatttagaatctctgcaggatgtggggcagtcagctgcacctactttcatgatttcaccagaaaccgtcacaggaacggggaaaaagtgcagcttgccggccgaggaggattctgtgttagaaaaactaggggaaaggaaaccatgcaacagtcaaccttctgagctttcttcagagacctcaggaatagccaggccagaagaaggaaggcctgtggtgagtgggacaggaaatgacatcaccaccccaccgaacaaggagctcccaccaagcccagagaagaaaacaaagcctttggccaccactcaacctgcaaagacttcaacatcgaaagccaaaacacagcccacttctctccctaagcagccagctcccaccaccattggtgggttgaataaaaaacccatgagccttgcttcaggcttagtgccagctgccccacccaaacgccctgccgtcgcctctgccaggccttccatcttaccttcaaaagacgtgaagccaaagcccattgcagatgcaaaggctcctgagaagcgggcctcaccatccaagccagcttctgccccagcctccagatctgggtccaagagcactcagactgttgcaaaaaccacaacagctgctgctgttgcctcaactggcccaagcagtaggagcccctccacgctcctgcccaagaagcccactgccattaagactgagggaaaacctgcagaagtcaagaagatgactgcaaagtctgtaccagctgacttgagtcgcccaaagagcacctccaccagttccatgaagaaaaccaccactctcagtgggacagcccccgctgcaggggtggttcccagccgagtcagccacccgccccctccccccaacataacaaaaaaaacagaacataaaaa

SEQ ID NO: 88759 - DNA, 3466 bp, Homo sapiens
agcggggtctgggctcccagactctgagagagagcgacggccatcatagaacagcgagggcagtcgatcggcctgcggtccgcttcggcattcgcaggccgcaggcgggaggctagagcccccaggcgcactcgccccaaccgcccgcggctcgggcagctctgcagagacgtcgtggcggcagggccagcacccattggtccgccacagccctccgccctccccctcgccacgcttattggccggagcggcggcgctcgccgggtaggcggtggcggcgtccctcccttgcgccggccctcaagaggcgacgaggatgcgaccgcctccctgcgccccgcccctccggctagctcgctggctcccggctcctcccgacgtctcctacctcctcacggctcttcccggcgctctcctggctcccttctgccccagctccgtctcggcggcggcgggcagttgcagtggtgcagaatggctgacctcagtcttgcagatgcattaacagaaccatctccagacattgagggagagataaagcgggacttcattgccacactagaggcagaggcctttgatgatgttgtgggagaaactgttggaaaaacagactatattcctctcctggatgttgatgagaaaaccgggaactcagagtcaaagaagaaaccgtgctcagaaactagccagattgaagatactccatcttctaaaccaacactcctagccaatggtggtcatggagtagaagggagcgatactacagggtctccaactgaattccttgaagagaaaatggcctaccaggaatacccaaatagccagaactggccagaagataccaacttttgtttccaacctgagcaagtggtcgatcctatccagactgatccctttaagatgtaccatgatgatgacctggcagatttggtctttccctccagtgcgacagctgatacttcaatatttgcaggacaaaatgatcccttgaaagacagttacggtatgtctccctgcaacacagctgttgtacctcaggggtggtctgtggaagccttaaactctccacactcagagtcctttgtttccccagaggctgttgcagaacctcctcagccaacggcagttcccttagagctagccaaggagatagaaatggcatcagaagagaggccaccagcacaagcattggaaataatgatgggactgaagactactgacatggcaccatctaaagaaacagagatggccctcgccaaggacatggcactagctacaaaaaccgaggtggcattggctaaagatatggaatcacccaccaaattagatgtgacactggccaaggacatgcagccatccatggaatcagatatggccctagtcaaggacatggaactacccacagaaaaagaagtggccctggttaaggatgtcagatggcccacagaaacagatgtatcttcagccaagaatgtggtactgcccacagaaacagaggtagccccagccaaggatgtgacactgttgaaagaaacagagagggcatctcctataaaaatggacttagccccttccaaggacatgggaccacccaaagaaaacaagaaagaaacagagagggcatctcctataaaaatggacttggctccttccaaggacatgggaccacccaaagaaaacaagatagtcccagccaaggatttggtattactctcagaaatagaggtggcacaggctaatgacattatatcatccacagaaatatcctctgctgagaaggtggctttgtcctcagaaacagaggtagccctggccagggacatgacactgcccccggaaaccaacgtgatcttgaccaaggataaagcactacctttagaagcagaggtggccccagtcaaggacatggctcaactcccagaaacagaaatagccccggccaaggatgtggctccgtccacagtaaaagaagtgggcttgttgaaggacatgtctccactatcagaaacagaaatggctctgggcaaggatgtgactccacctccagaaacagaagtagttctcatcaagaacgtatgtctgcctccagaaatggaggtggccctgactgaggatcaggtcccagccctcaaaacagaagcacccctggctaaggatggggttctgaccctggccaacaatgtgactccagccaaagatgttccaccactctcagaaacagaggcaacaccagttccaattaaagacatggaaattgcacaaacacaaaaaggaataagtgaggattcccatttagaatctctgcaggatgtggggcagtcagctgcacctactttcatgatttcaccagaaaccgtcacaggaacggggaaaaagtgcagcttgccggccgaggaggattctgtgttagaaaaactaggggaaaggaaaccatgcaacagtcaaccttctgagctttcttcagagacctcaggaatagccaggccagaagaaggaaggcctgtggtgagtgggacaggaaatgacatcaccaccccaccgaacaaggagctcccaccaagcccagagaagaaaacaaagcctttggccaccactcaacctgcaaagacttcaacatcgaaagccaaaacacagcccacttctctccctaagcagccagctcccaccaccattggtgggttgaataaaaaacccatgagccttgcttcaggcttagtgccagctgccccacccaaacgccctgccgtcgcctctgccaggccttccatcttaccttcaaaagacgtgaagccaaagcccattgcagatgcaaaggctcctgagaagcgggcctcaccatccaagccagcttctgccccagcctccagatctgggtccaagagcactcagactgttgcaaaaaccacaacagctgctgctgttgcctcaactggcccaagcagtaggagcccctccacgctcctgcccaagaagcccactgccattaagactgagggaaaacctgcagaagtcaagaagatgactgcaaagtctgtaccagctgacttgagtcgcccaaagagcaagcttacagtgcttgaatgaaacactcacatcatgcaccaaagaagtaggaaaggctgctttggaaaaacagatagaagaaataaatgagcaaatcagaaaagagaaagaggaagctgaggctcgtatgcgacaagcatctaagaacacagagaaatcaactggtggaggtggaaatggaagtaaaaattggtcagaagatgatctacaattactaattaaagctgtgaatctgttccctgctggaacaaattcaagatgggaagttattgctaattacatgaacatacattcttcctctggagtcaaaagaactgcccaagatgttattggcaagcaaagagtctccaaaacttgaccctcatcaaaagatgacatatataaaaaggcatttgataagttt

SEQ ID NO: 88760 - DNA, 2827 bp, Homo sapiens
agcggggtctgggctcccagactctgagagagagcgacggccatcatagaacagcgagggcagtcgatcggcctgcggtccgcttcggcattcgcaggccgcaggcgggaggctagagcccccaggcgcactcgccccaaccgcccgcggctcgggcagctctgcagagacgtcgtggcggcagggccagcacccattggtccgccacagccctccgccctccccctcgccacgcttattggccggagcggcggcgctcgccgggtaggcggtggcggcgtccctcccttgcgccggccctcaagaggcgacgaggatgcgaccgcctccctgcgccccgcccctccggctagctcgctggctcccggctcctcccgacgtctcctacctcctcacggctcttcccggcgctctcctggctcccttctgccccagctccgtctcggcggcggcgggcagttgcagtggtgcagaatggctgacctcagtcttgcagatgcattaacagaaccatctccagacattgagggagagataaagcgggacttcattgccacactagaggcagaggcctttgatgatgttgtgggagaaactgttggaaaaacagactatattcctctcctggatgttgatgagaaaaccgggaactcagagtcaaagaagaaaccgtgctcagaaactagccagattgaagatactccatcttctaaaccaacactcctagccaatggtggtcatggagtagaagggagcgatactacagggtctccaactgaattccttgaagagaaaatggcctaccaggaatacccaaatagccagaactggccagaagataccaacttttgtttccaacctgagcaagtggtcgatcctatccagactgatccctttaagatgtaccatgatgatgacctggcagatttggtctttccctccagtgcgacagctgatacttcaatatttgcaggacaaaatgatcccttgaaagacagttacggtatgtctccctgcaacacagctgttgtacctcaggggtggtctgtggaagccttaaactctccacactcagagtcctttgtttccccagaggctgttgcagaacctcctcagccaacggcagttcccttagagctagccaaggagatagaaatggcatcagaagagaggccaccagcacaagcattggaaataatgatgggactgaagactactgacatggcaccatctaaagaaacagagatggccctcgccaaggacatggcactagctacaaaaaccgaggtggcattggctaaagatatggaatcacccaccaaattagatgtgacactggccaaggacatgcagccatccatggaatcagatatggccctagtcaaggacatggaactacccacagaaaaagaagtggccctggttaaggatgtcagatggcccacagaaacagatgtatcttcagccaagaatgtggtactgcccacagaaacagaggtagccccagccaaggatgtgacactgttgaaagaaacagagagggcatctcctataaaaatggacttagccccttccaaggacatgggaccacccaaagaaaacaagaaagaaacagagagggcatctcctataaaaatggacttggctccttccaaggacatgggaccacccaaagaaaacaagatagtcccagccaaggatttggtattactctcagaaatagaggtggcacaggctaatgacattatatcatccacagaaatatcctctgctgagaaggtggctttgtcctcagaaacagaggtagccctggccagggacatgacactgcccccggaaaccaacgtgatcttgaccaaggataaagcactacctttagaagcagaggtggccccagtcaaggacatggctcaactcccagaaacagaaatagccccggccaaggatgtggctccgtccacagtaaaagaagtgggcttgttgaaggacatgtctccactatcagaaacagaaatggctctgggcaaggatgtgactccacctccagaaacagaagtagttctcatcaagaacgtatgtctgcctccagaaatggaggtggccctgactgaggatcaggtcccagccctcaaaacagaagcacccctggctaaggatggggttctgaccctggccaacaatgtgactccagccaaagatgttccaccactctcagaaacagaggcaacaccagttccaattaaagacatggaaattgcacaaacacaaaaaggaataagtgaggattcccatttagaatctctgcaggatgtggggcagtcagctgcacctactttcatgatttcaccagaaaccgtcacaggaacggggaaaaagtgcagcttgccggccgaggaggattctgtgttagaaaaactaggggaaaggaaaccatgcaacagtcaaccttctgagctttcttcagagacctcaggaatagccaggccagaagaaggaaggcctgtggtgagtgggacaggaaatgacatcaccaccccaccgaacaaggagctcccaccaagcccagagaagaaaacaaagcctttggccaccactcaacctgcaaagacttcaacatcgaaagccaaaacacagcccacttctctccctaagcagccagctcccaccaccattggtgggttgaataaaaaacgggcatcccagctaggccttgggatggctgcagtgaggagaaatcccgggaactgtattgacacaaagattcttattgcacttgtattttttgtattaaagtttgcatggtttctaataaaggattcaaacataa

SEQ ID NO: 88761 - DNA, 2851 bp, Homo sapiens
agcggggtctgggctcccagactctgagagagagcgacggccatcatagaacagcgagggcagtcgatcggcctgcggtccgcttcggcattcgcaggccgcaggcgggaggctagagcccccaggcgcactcgccccaaccgcccgcggctcgggcagctctgcagagacgtcgtggcggcagggccagcacccattggtccgccacagccctccgccctccccctcgccacgcttattggccggagcggcggcgctcgccgggtaggcggtggcggcgtccctcccttgcgccggccctcaagaggcgacgaggatgcgaccgcctccctgcgccccgcccctccggctagctcgctggctcccggctcctcccgacgtctcctacctcctcacggctcttcccggcgctctcctggctcccttctgccccagctccgtctcggcggcggcgggcagttgcagtggtgcagaatggctgacctcagtcttgcagatgcattaacagaaccatctccagacattgagggagagataaagcgggacttcattgccacactagaggcagaggcctttgatgatgttgtgggagaaactgttggaaaaacagactatattcctctcctggatgttgatgagaaaaccgggaactcagagtcaaagaagaaaccgtgctcagaaactagccagattgaagatactccatcttctaaaccaacactcctagccaatggtggtcatggagtagaagggagcgatactacagggtctccaactgaattccttgaagagaaaatggcctaccaggaatacccaaatagccagaactggccagaagataccaacttttgtttccaacctgagcaagtggtcgatcctatccagactgatccctttaagatgtaccatgatgatgacctggcagatttggtctttccctccagtgcgacagctgatacttcaatatttgcaggacaaaatgatcccttgaaagacagttacggtatgtctccctgcaacacagctgttgtacctcaggggtggtctgtggaagccttaaactctccacactcagagtcctttgtttccccagaggctgttgcagaacctcctcagccaacggcagttcccttagagctagccaaggagatagaaatggcatcagaagagaggccaccagcacaagcattggaaataatgatgggactgaagactactgacatggcaccatctaaagaaacagagatggccctcgccaaggacatggcactagctacaaaaaccgaggtggcattggctaaagatatggaatcacccaccaaattagatgtgacactggccaaggacatgcagccatccatggaatcagatatggccctagtcaaggacatggaactacccacagaaaaagaagtggccctggttaaggatgtcagatggcccacagaaacagatgtatcttcagccaagaatgtggtactgcccacagaaacagaggtagccccagccaaggatgtgacactgttgaaagaaacagagagggcatctcctataaaaatggacttagccccttccaaggacatgggaccacccaaagaaaacaagaaagaaacagagagggcatctcctataaaaatggacttggctccttccaaggacatgggaccacccaaagaaaacaagatagtcccagccaaggatttggtattactctcagaaatagaggtggcacaggctaatgacattatatcatccacagaaatatcctctgctgagaaggtggctttgtcctcagaaacagaggtagccctggccagggacatgacactgcccccggaaaccaacgtgatcttgaccaaggataaagcactacctttagaagcagaggtggccccagtcaaggacatggctcaactcccagaaacagaaatagccccggccaaggatgtggctccgtccacagtaaaagaagtgggcttgttgaaggacatgtctccactatcagaaacagaaatggctctgggcaaggatgtgactccacctccagaaacagaagtagttctcatcaagaacgtatgtctgcctccagaaatggaggtggccctgactgaggatcaggtcccagccctcaaaacagaagcacccctggctaaggatggggttctgaccctggccaacaatgtgactccagccaaagatgttccaccactctcagaaacagaggcaacaccagttccaattaaagacatggaaattgcacaaacacaaaaaggaataagtgaggattcccatttagaatctctgcaggatgtggggcagtcagctgcacctactttcatgatttcaccaggtacgtgcttgtgcttattctcagtatttctctctaccaggttgtagtctcgagaagactaaggacaaacatcatgccaggtaaagtacagacagtcacactgtactttgcaagtttattcatactcctgctctcctagacaactctttcccgcctttaccctcctcccacctccaacaccttttctatgttcattctctgctgattgtcctgtttttcttgcagataagtcaagcaataaaatagaacatcgacaaacttctattccattatctacccaactacttgtatctgtatccatggtctctgcttatgaagttcccgtttttataagtaactgttccgctcctaattaagaccaacctctcctcattttgccctagattccatctcctctcttcctactcgatatattgccccatgtattcttcccttttttgcccctcataccaatttaaatctttctcattggatcattcccacccactaacaaacgtttca

SEQ ID NO: 88762 - DNA, 486 bp, Homo sapiens
aacctgggaggcagagcttgcagtgagccgagatcgccactgcactccagcctgggcgacagagagagactccatctcaaaaaaaaaaaaagaaaaagaaaaagaaactattccccattttctttctctatcctggtttcattccattatttattgagctcagaagaaagaaatgctaattttaagttgcatctatcctcattgcttataattttactttgaattgtgcaatttatactttttttaatttgtttttattcttgtctgtttgatgttgccctttaaaaaataaaaataaaaaataaacaacaatcaacctaaagcctttggccaccactcaacctgcaaagacttcaacatcgaaagccaaaacacagcccacttctctccctaagcagccagctcccaccaccattggtgggttgaataaaaaacccatgagccttgcttcaggcttagtgccagctgccccacccaaacgccctg

SEQ ID NO: 88763 - DNA, 352 bp, Homo sapiens
gggtgggacatttctgtacttctcgatttgcttatggctcagccattacctgtgtcagtccatgattctgttgtaacagttttaagagtaaataaataaagctgcctgatgtcccatcagcaggcttcgtgcttctgtgtctcgttttgcatctaccacctccctggatcttcctgccctcagctcagcccctcagctgtgaacttgtggatgtggacacgggaaggaccactgtgccacatagccctgcgccttggctacctgtggaactctcccctagtctgcctgataaagggctacttgacacttacttgcttacttactgtccaaaactacaaggacagtgacagtt

SEQ ID NO: 88764 - DNA, 508 bp, Homo sapiens
gctgggcatggtggctcacccctgtaatcccagcactttgggaggcagaggcaggtggatcatgaggtcaagagatcgagaccatcctggccaacgtgatgaaaccctgtctctacaaaaaaatacaaaaattagccaggcatggtggcgggcatctgtaatcccagctacccgggaggctgaggcaggagaattgcttgaacctgggaggtagaggttgcagtgaaccaagatggcaccactgcactccagccttggcaacagagcaagactccacctcaaaaaaaaaaaagaaagaaagaaagaaatattaatctttctagttgcattcaccaggaatgagttttggatttcttctatattccagatccctttaagatgtaccatgatgatgacctggcagatttggtctttccctccagtgcgacagctgatacttcaatatttgcaggacaaaatgatcccttgaaagacagttacgatggcttcttcaaatggatttattctg

SEQ ID NO: 88765 - DNA, 4230 bp, Homo sapiens
  misc_feature (27)..(27): n is a, c, g, or t
aaacttaggctagtacgaggctggggngtgaatcggccgaggctacctacctcctcacggctcttcccggcgctctcctggctcccttctgccccagctccgtctcggcggcggcgggcagttgcagtggtgcagaatggctgacctcagtcttgcagatgcattaacagaaccatctccagacattgagggagagataaagcgggacttcattgccacactagaggcagaggcctttgatgatgttgtgggagaaactgttggaaaaacagactatattcctctcctggatgttgatgagaaaaccgggaactcagagtcaaagaagaaaccgtgctcagaaactagccagattgaagatactccatcttctaaaccaacactcctagccaatggtggtcatggagtagaagggagcgatactacagggtctccaactgaattccttgaagagaaaatggcctaccaggaatacccaaatagccagaactggccagaagataccaacttttgtttccaacctgagcaagtggtcgatcctatccagactgatccctttaagatgtaccatgatgatgacctggcagatttggtctttccctccagtgcgacagctgatacttcaatatttgcaggacaaaatgatcccttgaaagacagttacggtatgtctccctgcaacacagctgttgtacctcaggggtggtctgtggaagccttaaactctccacactcagagtcctttgtttccccagaggctgttgcagaacctcctcagccaacggcagttcccttagagctagccaaggagatagaaatggcatcagaagagaggccaccagcacaagcattggaaataatgatgggactgaagactactgacatggcaccatctaaagaaacagagatggccctcgccaaggacatggcactagctacaaaaaccgaggtggcattggctaaagatatggaatcacccaccaaattagatgtgacactggccaaggacatgcagccatccatggaatcagatatggccctagtcaaggacatggaactacccacagaaaaagaagtggccctggttaaggatgtcagatggcccacagaaacagatgtatcttcagccaagaatgtggtactgcccacagaaacagaggtagccccagccaaggatgtgacactgttgaaagaaacagagagggcatctcctataaaaatggacttagccccttccaaggacatgggaccacccaaagaaaacaagaaagaaacagagagggcatctcctataaaaatggacttggctccttccaaggacatgggaccacccaaagaaaacaagatagtcccagccaaggatttggtattactctcagaaatagaggtggcacaggctaatgacattatatcatccacagaaatatcctctgctgagaaggtggctttgtcctcagaaacagaggtagccctggccagggacatgacactgcccccggaaaccaacgtgatcttgaccaaggataaagcactacctttagaagcagaggtggccccagtcaaggacatggctcaactcccagaaacagaaatagccccggccaaggatgtggctccgtccacagtaaaagaagtgggcttgttgaaggacatgtctccactatcagaaacagaaatggctctgggcaaggatgtgactccacctccagaaacagaagtagttctcatcaagaacgtatgtctgcctccagaaatggaggtggccctgactgaggatcaggtcccagccctcaaaacagaagccaccaccattggtgggttgaataaaaaacccatgagccttgcttcaggcttagtgccagctgccccacccaaacgccctgccgtcgcctctgccaggccttccatcttaccttcaaaagacgtgaagccaaagcccattgcagatgcaaaggctcctgagaagcgggcctcaccatccaagccagcttctgccccagcctccagatctgggtccaagagcactcagactgttgcaaaaaccacaacagctgctgctgttgcctcaactggcccaagcagtaggagcccctccacgctcctgcccaagaagcccactgccattaagactgagggaaaacctgcagaagtcaagaagatgactgcaaagtctgtaccagctgacttgagtcgcccaaagagcacctccaccagttccatgaagaaaaccaccactctcagtgggacagcccccgctgcaggggtggttcccagccgagtcaaggccacacccatgccctcccggccctccacaactcctttcatagacaagaagcccacctcggccaaacccagctccaccaccccccggctcagccgcctggccaccaatacttctgctcctgatctgaagaatgtccgctccaaggttggctccacggaaaacatcaagcatcagcctggaggaggccgggccaaagtagagaaaaaaacagaggcagctgctacaacccgaaagcctgaatctaatgcagtcactaaaacagccggcccaattgcaagtgcacagaaacaacctgcggggaaagtccagatagtctccaaaaaagtgagctacagccatattcagtccaagtgtggttccaaggacaatattaagcatgtccctggaggtggtaatgttcagattcagaacaagaaagtggacatctctaaggtctcctccaagtgtgggtctaaggctaacatcaagcacaagcctggtggaggagatgtcaagattgaaagtcagaagttgaacttcaaggagaaggcccaggccaaggtgggatccctcgataatgtgggccacctacctgcaggaggtgctgtgaagactgagggcggtggcagcgaggctcctctgtgtccgggtccccctgctggggaggagccggccatctctgaggcagcgcctgaagctggcgcccccacttcagccagtggcctcaatggccaccccaccctgtcagggggtggtgaccaaagggaggcccagaccttggacagccagatccaggagacaagcatctaatgatgacattctggtctcgtcttccgtctcccccgtgttcccctcttgtctcccctgttcccctctcccttccctcctcccatgtcactgcagattgagacctacaggctgacgttccgggcaaatgccagggcccgcaccgaccacggggccgacattgtctcccgccccccacacttccctggcggccccaactcgggctcccgggtccttggccccctttcccgggctgtccactagaccagtgagcgcttgggcgccgtgctgggcagcccgctaggctcgccttccctcctgctttgcgtgcccggggcagcagcagccctgccccacacctcctctcactccccagcctgggcccatctccctgctttggtcttgccccatcactgcgccactgctccgtggaggaggttgggagggggttggggtggttgaggctaagttgggatctaggagaggagaaccagattctatcctcatctttttttggttctttggtccaaacccaaaagaaactgacatgccctcccttctccctggatctacctggagggaagagtggaggtggattccgagtggtgacaggacgctgaccgtggagcttaagccactgcctctccctctggtcccacaaatgggcgcccccccctccccatgcaggtggtgtcgggcccttcttgctgccctgccccaagttgggggtcagtgctgcctgtccccagcttttcttttctaaccaagaggctggttttggcatctctgtcccattccctgggatctggtggtcagccctaggataaaaagccagggctggagaacaagaaagggccaggagatggaattccttcaggccggcacccacaccctaggacatgtaagccctcatgtccaagggagcctcatgcagatagtaggaaatcaggtctggaaatttaaaaataaaaggcatgagactaaggctatctgcttcccttatgccctgactggagaggggagggaggagaggcaaggcccacagagggcatcccagctaggccttgggatggctgcagtgaggagaaatcccgggaactgtattgacacaaagattcttattgcacttgtattttttgtattaaagtttgcatggtttctaataaaggattcaaacataa

SEQ ID NO: 88766 - DNA, 1336 bp, Homo sapiens
agcggggtctgggctcccagactctgagagagagcgacggccatcatagaacagcgagggcagtcgatcggcctgcggtccgcttcggcattcgcaggccgcaggcgggaggctagagcccccaggcgcactcgccccaaccgcccgcggctcgggcagctctgcagagacgtcgtggcggcagggccagcacccattggtccgccacagccctccgccctccccctcgccacgcttattggccggagcggcggcgctcgccgggtaggcggtggcggcgtccctcccttgcgccggccctcaagaggcgacgaggatgcgaccgcctccctgcgccccgcccctccggctagctcgctggctcccggctcctcccgacgtctcctacctcctcacggctcttcccggcgctctcctggctcccttctgccccagctccgtctcggcggcggcgggcagttgcagtggtgcagaatggctgacctcagtcttgcagatgcattaacagaaccatctccagacattgagggagagataaagcgggacttcattgccacactagaggcagaggcctttgatgatgttgtgggagaaactgttggaaaaacagactatattcctctcctggatgttgatgagaaaaccgggaactcagagtcaaagaagaaaccgtgctcagaaactagccagattgaagatactccatcttctaaaccaacactcctagccaatggtggtcatggagtagaagggagcgatactacaggaagcctagcgtgtctctcaacactggggctgctgcaacaccagaccagtgatctttcctaagcatcgttatacttctaaaaccttcagcattttgcagagctttgcttttcattcctggacatgatgtagaagaaactgagggtagttcttcggggcctatttctgctgatgcctgagcaaacaacctgcttcctcttgtgctctgcagggtttgatggagcctcatttccctttgtgaacacaaagtgcaaaatgaattctttttaattttagtaatttttacaaaggttatctaatgtcttttatttcttgttttctttatgattttatcatttgattcattctcacatttttttcctttaaatatttttagttgacctttttcctttggttttcaaatgttcaacatgaatcagaatagtgtaacaccaaatgagaacatgtgttttcataaaggggttgaggccaccagtactgcagcgaatttccttttcttctccctcctccttccttctctgagcttgcttttagggaaggttaatcttacaggctacctatgtttctctcc

SEQ ID NO: 88767 - DNA, 1387 bp, Homo sapiens
agcggggtctgggctcccagactctgagagagagcgacggccatcatagaacagcgagggcagtcgatcggcctgcggtccgcttcggcattcgcaggccgcaggcgggaggctagagcccccaggcgcactcgccccaaccgcccgcggctcgggcagctctgcagagacgtcgtggcggcagggccagcacccattggtccgccacagccctccgccctccccctcgccacgcttattggccggagcggcggcgctcgccgggtaggcggtggcggcgtccctcccttgcgccggccctcaagaggcgacgaggatgcgaccgcctccctgcgccccgcccctccggctagctcgctggctcccggctcctcccgacgtctcctacctcctcacggctcttcccggcgctctcctggctcccttctgccccagctccgtctcggcggcggcgggcagttgcagtggtgcagaatggctgacctcagtcttgcagatgcattaacagaaccatctccagacattgagggagagataaagcgggacttcattgccacactagaggcagaggcctttgatgatgttgtgggagaaactgttggaaaaacagactatattcctctcctggatgttgatgagaaaaccgggaactcagagtcaaagaagaaaccgtgctcagaaactagccagattgaagacctcccactacccccacaccctgccagcctttcttttcatcttcctcttgatactccatcttctaaaccaacactcctagccaatggtggtcatggagtagaagggagcgatactacaggaagcctagcgtgtctctcaacactggggctgctgcaacaccagaccagtgatctttcctaagcatcgttatacttctaaaaccttcagcattttgcagagctttgcttttcattcctggacatgatgtagaagaaactgagggtagttcttcggggcctatttctgctgatgcctgagcaaacaacctgcttcctcttgtgctctgcagggtttgatggagcctcatttccctttgtgaacacaaagtgcaaaatgaattctttttaattttagtaatttttacaaaggttatctaatgtcttttatttcttgttttctttatgattttatcatttgattcattctcacatttttttcctttaaatatttttagttgacctttttcctttggttttcaaatgttcaacatgaatcagaatagtgtaacaccaaatgagaacatgtgttttcataaaggggttgaggccaccagtactgcagcgaatttccttttcttctccctcctccttccttctctgagcttgcttttagggaaggttaatcttacaggctacctatgtttctctcc

SEQ ID NO: 88768 - DNA, 345 bp, Homo sapiens
tgatttatcccctacacccaccagcacaaagagtacaaccgtgacacccatcaccaccaccactaccgtgttgggttttccccgtatgtctccctgcaacacagctgttgtacctcaggggtggtctgtggaagccttaaactctccacactcagagtcctttgtttccccagaggctgttgcagaacctcctcagccaacggcagaggtaaactattagagactccctttatcagttaatggttgcagtattggtaatcaatataaatcatcaggtgtattttttagcagcttacagcaggtataaaaatttcagaacaatcacaaatgttttgcttatattag

SEQ ID NO: 88769 - DNA, 1048 bp, Homo sapiens
gtgtgttcttcctggagaaatagattgaaattcatttggacagaaatgttgaaggcaggtgcctgatccaaaatgcatttagtcaggactgaacacaagctgcctggatagttcctgcagttgcagtggtgcagaatggctgacctcagtcttgcagatgcattaacagaaccatctccagacattgagggagagataaagcgggacttcattgccacactagaggcagaggcctttgatgatgttgtgggagaaactgttggaaaaacagactatattcctctcctggatgttgatgagaaaaccgggaactcagagtcaaagaagaaaccgtgctcagaaactagccagattgaagacctcccactacccccacaccctgccagcctttcttttcatcttcctcttgatactccatcttctaaaccaacactcctagccaatggtggtcatggagtagaagggagcgatactacaggaagcctagcgtgtctctcaacactggggctgctgcaacaccagaccagtgatctttcctaagcatcgttatacttctaaaaccttcagcattttgcagagctttgcttttcattcctggacatgatgtagaagaaactgagggtagttcttcggggcctatttctgctgatgcctgagcaaacaacctgcttcctcttgtgctctgcagggtttgatggagcctcatttccctttgtgaacacaaagtgcaaaatgaattctttttaattttagtaatttttacaaaggttatctaatgtcttttatttcttgttttctttatgattttatcatttgattcattctcacatttttttcctttaaatatttttagttgacctttttcctttggttttcaaatgttcaacatgaatcagaatagtgtaacaccaaatgagaacatgtgttttcataaaggggttgaggccaccagtactgcagcgaatttccttttcttctccctcctccttccttctctgagcttgcttttagggaaggttaatcttacaggctacctatgtttctctcc

SEQ ID NO: 88770 - DNA, 6299 bp, Homo sapiens
agcggggtctgggctcccagactctgagagagagcgacggccatcatagaacagcgagggcagtcgatcggcctgcggtccgcttcggcattcgcaggccgcaggcgggaggctagagcccccaggcgcactcgccccaaccgcccgcggctcgggcagctctgcagagacgtcgtggcggcagggccagcacccattggtccgccacagccctccgccctccccctcgccacgcttattggccggagcggcggcgctcgccgggtaggcggtggcggcgtccctcccttgcgccggccctcaagaggcgacgaggatgcgaccgcctccctgcgccccgcccctccggctagctcgctggctcccggctcctcccgacgtctcctacctcctcacggctcttcccggcgctctcctggctcccttctgccccagctccgtctcggcggcggcgggcagttgcagtggtgcagaatggctgacctcagtcttgcagatgcattaacagaaccatctccagacattgagggagagataaagcgggacttcattgccacactagaggcagaggcctttgatgatgttgtgggagaaactgttggaaaaacagactatattcctctcctggatgttgatgagaaaaccgggaactcagagtcaaagaagaaaccgtgctcagaaactagccagattgaagatactccatcttctaaaccaacactcctagccaatggtggtcatggagtagaagggagcgatactacagggtctccaactgaattccttgaagagaaaatggcctaccaggaatacccaaatagccagaactggccagaagataccaacttttgtttccaacctgagcaagtggtcgatcctatccagactgatccctttaagatgtaccatgatgatgacctggcagatttggtctttccctccagtgcgacagctgatacttcaatatttgcaggacaaaatgatcccttgaaagacagttacggtatgtctccctgcaacacagctgttgtacctcaggggtggtctgtggaagccttaaactctccacactcagagtcctttgtttccccagaggctgttgcagaacctcctcagccaacggcagttcccttagagctagccaaggagatagaaatggcatcagaagagaggccaccagcacaagcattggaaataatgatgggactgaagactactgacatggcaccatctaaagaaacagagatggccctcgccaaggacatggcactagctacaaaaaccgaggtggcattggctaaagatatggaatcacccaccaaattagatgtgacactggccaaggacatgcagccatccatggaatcagatatggccctagtcaaggacatggaactacccacagaaaaagaagtggccctggttaaggatgtcagatggcccacagaaacagatgtatcttcagccaagaatgtggtactgcccacagaaacagaggtagccccagccaaggatgtgacactgttgaaagaaacagagagggcatctcctataaaaatggacttagccccttccaaggacatgggaccacccaaagaaaacaagaaagaaacagagagggcatctcctataaaaatggacttggctccttccaaggacatgggaccacccaaagaaaacaagatagtcccagccaaggatttggtattactctcagaaatagaggtggcacaggctaatgacattatatcatccacagaaatatcctctgctgagaaggtggctttgtcctcagaaacagaggtagccctggccagggacatgacactgcccccggaaaccaacgtgatcttgaccaaggataaagcactacctttagaagcagaggtggccccagtcaaggacatggctcaactcccagaaacagaaatagccccggccaaggatgtggctccgtccacagtaaaagaagtgggcttgttgaaggacatgtctccactatcagaaacagaaatggctctgggcaaggatgtgactccacctccagaaacagaagtagttctcatcaagaacgtatgtctgcctccagaaatggaggtggccctgactgaggatcaggtcccagccctcaaaacagaagcacccctggctaaggatggggttctgaccctggccaacaatgtgactccagccaaagatgttccaccactctcagaaacagaggcaacaccagttccaattaaagacatggaaattgcacaaacacaaaaaggaataagtgaggattcccatttagaatctctgcaggatgtggggcagtcagctgcacctactttcatgatttcaccagaaaccgtcacaggaacggggaaaaagtgcagcttgccggccgaggaggattctgtgttagaaaaactaggggaaaggaaaccatgcaacagtcaaccttctgagctttcttcagagacctcaggaatagccaggccagaagaaggaaggcctgtggtgagtgggacaggaaatgacatcaccaccccaccgaacaaggagctcccaccaagcccagagaagaaaacaaagcctttggccaccactcaacctgcaaagacttcaacatcgaaagccaaaacacagcccacttctctccctaagcagccagctcccaccaccattggtgggttgaataaaaaacccatgagccttgcttcaggcttagtgccagctgccccacccaaacgccctgccgtcgcctctgccaggccttccatcttaccttcaaaagacgtgaagccaaagcccattgcagatgcaaaggctcctgagaagcgggcctcaccatccaagccagcttctgccccagcctccagatctgggtccaagagcactcagactgttgcaaaaaccacaacagctgctgctgttgcctcaactggcccaagcagtaggagcccctccacgctcctgcccaagaagcccactgccattaagactgagggaaaacctgcagaagtcaagaagatgactgcaaagtctgtaccagctgacttgagtcgcccaaagagcacctccaccagttccatgaagaaaaccaccactctcagtgggacagcccccgctgcaggggtggttcccagccgagtcaaggccacacccatgccctcccggccctccacaactcctttcatagacaagaagcccacctcggccaaacccagctccaccaccccccggctcagccgcctggccaccaatacttctgctcctgatctgaagaatgtccgctccaaggttggctccacggaaaacatcaagcatcagcctggaggaggccgggccaaagtagagaaaaaaacagaggcagctgctacaacccgaaagcctgaatctaatgcagtcactaaaacagccggcccaattgcaagtgcacagaaacaacctgcggggaaagtccagatagtctccaaaaaagtgagctacagccatattcagtccaagtgtggttccaaggacaatattaagcatgtccctggaggtggtaatgttcagattcagaacaagaaagtggacatctctaaggtctcctccaagtgtgggtctaaggctaacatcaagcacaagcctggtggaggagatgtcaagattgaaagtcagaagttgaacttcaaggagaaggcccaggccaaggtgggatccctcgataatgtgggccacctacctgcaggaggtgctgtgaagactgagggcggtggcagcgaggctcctctgtgtccgggtccccctgctggggaggagccggccatctctgaggcagcgcctgaagctggcgcccccacttcagccagtggcctcaatggccaccccaccctgtcagggggtggtgaccaaagggaggcccagaccttggacagccagatccaggagacaagcatctaatgatgacattctggtctcgtcttccgtctcccccgtgttcccctcttgtctcccctgttcccctctcccttccctcctcccatgtcactgcagattgagacctacaggctgacgttccgggcaaatgccagggcccgcaccgaccacggggccgacattgtctcccgccccccacacttccctggcggccccaactcgggctcccgggtccttggccccctttcccgggctgtccactagaccagtgagcgcttgggcgccgtgctgggcagcccgctaggctcgccttccctcctgctttgcgtgcccggggcagcagcagccctgccccacacctcctctcactccccagcctgggcccatctccctgctttggtcttgccccatcactgcgccactgctccgtggaggaggttgggagggggttggggtggttgaggctaagttgggatctaggagaggagaaccagattctatcctcatctttttttggttctttggtccaaacccaaaagaaactgacatgccctcccttctccctggatctacctggagggaagagtggaggtggattccgagtggtgacaggacgctgaccgtggagcttaagccactgcctctccctctggtcccacaaatgggcgcccccccctccccatgcaggtggtgtcgggcccttcttgctgccctgccccaagttgggggtcagtgctgcctgtccccatgcttaacatacccgcctagctgctgtcacatttttcttgttttgtccttttatttttttctaataacctaaaaactggcaaaatagttctgcaggttgaagccatgtctacatgaaagtcctcagtaagtgttagagggaacagggcggagatatccttatgccacccccgctggaggatgtgggcagcttagggccctggaggcggtgcggcagggaagaggggtgcagaggctgtggctggtgagccggtcaggcacacaaggggcccttggagcgtggactggttggttttgccattttgttgtgtgtatgctgcttttcttttctaaccaagaggctggttttggcatctctgtcccattccctgggatctggtggtcagccctaggataaaaagccagggctggagaacaagaaagggccaggagatggaattccttcaggccggcacccacaccctaggacatgtaagccctcatgtccaagggagcctcatgcagatagtaggaaatcaggtctggaaatttaaaaataaaaggcatgagactaaggctatctgcttcccttatgccctgactggagaggggagggaggagaggcaaggcccacagagggcatcccagctaggccttgggatggctgcagtgaggagaaatcccgggaactgtattgacacaaagattcttattgcacttgtattttttgtattaaagtttgcatggtttctaataaaggattcaaacataagtttgtagtgaaatggcctgggagattccaagggcttctctggagggggattggctgcagtgtagatttgcctctgaggaggctgccccagacttggcctcctcatgccccctcctgacctctgcccttctctggtcctggcatccctggagaaggtaggggtcttgacctaagtttagatttgatctccatgtgcagggaggctgtcctgggcctgacaggtcctccccctttctgaggtagcagtgccttgtggaggtttgacaccatgtccctagctccccaagcacacaccaggaaactgcaggggctcacggaggaagtgctgcctgggccagggggaccagctttcctccgtagagaccatgtgcagaacacttctgctgtgccaagaacatgagggagccagtgttttgtcagcaggaagaaagggcctgctgggatgaaagtgggaaggaaacagggttgcgtagtcaggagacacctcaggggcaacagcacaggcccagagtacctgctgcctccactgcgtctgtcctggggtcatgaggatgctgaggttgacgacaggttccaggtcctttcactcctttggccaaaggttgggggtaggtggcccaagtggcgtgctctctaggtagacaacaggagtggtcagagttccctcaaaggatcctccactccagagcacctgagaaggccgggaccagaggccctgtgtgatgtgtactccgcagctgtttggggtgggacatttctgtacttctcgatttgcttatggctcagccattacctgtgtcagtccatgattctgttgtaacagttttaagagtaaataaataaagctgcctgatgtcccatcaaaaaaaaaaaattctaacaaacaaaaggg

SEQ ID NO: 88771 - DNA, 6328 bp, Homo sapiens
agcggggtctgggctcccagactctgagagagagcgacggccatcatagaacagcgagggcagtcgatcggcctgcggtccgcttcggcattcgcaggccgcaggcgggaggctagagcccccaggcgcactcgccccaaccgcccgcggctcgggcagctctgcagagacgtcgtggcggcagggccagcacccattggtccgccacagccctccgccctccccctcgccacgcttattggccggagcggcggcgctcgccgggtaggcggtggcggcgtccctcccttgcgccggccctcaagaggcgacgaggatgcgaccgcctccctgcgccccgcccctccggctagctcgctggctcccggctcctcccgacgtctcctacctcctcacggctcttcccggcgctctcctggctcccttctgccccagctccgtctcggcggcggcgggcagttgcagtggtgcagaatggctgacctcagtcttgcagatgcattaacagaaccatctccagacattgagggagagataaagcgggacttcattgccacactagaggcagaggcctttgatgatgttgtgggagaaactgttggaaaaacagactatattcctctcctggatgttgatgagaaaaccgggaactcagagtcaaagaagaaaccgtgctcagaaactagccagattgaagatactccatcttctaaaccaacactcctagccaatggtggtcatggagtagaagggagcgatactacagggtctccaactgaattccttgaagagaaaatggcctaccaggaatacccaaatagccagaactggccagaagataccaacttttgtttccaacctgagcaagtggtcgatcctatccagactgatccctttaagatgtaccatgatgatgacctggcagatttggtctttccctccagtgcgacagctgatacttcaatatttgcaggacaaaatgatcccttgaaagacagttacggtatgtctccctgcaacacagctgttgtacctcaggggtggtctgtggaagccttaaactctccacactcagagtcctttgtttccccagaggctgttgcagaacctcctcagccaacggcagttcccttagagctagccaaggagatagaaatggcatcagaagagaggccaccagcacaagcattggaaataatgatgggactgaagactactgacatggcaccatctaaagaaacagagatggccctcgccaaggacatggcactagctacaaaaaccgaggtggcattggctaaagatatggaatcacccaccaaattagatgtgacactggccaaggacatgcagccatccatggaatcagatatggccctagtcaaggacatggaactacccacagaaaaagaagtggccctggttaaggatgtcagatggcccacagaaacagatgtatcttcagccaagaatgtggtactgcccacagaaacagaggtagccccagccaaggatgtgacactgttgaaagaaacagagagggcatctcctataaaaatggacttagccccttccaaggacatgggaccacccaaagaaaacaagaaagaaacagagagggcatctcctataaaaatggacttggctccttccaaggacatgggaccacccaaagaaaacaagatagtcccagccaaggatttggtattactctcagaaatagaggtggcacaggctaatgacattatatcatccacagaaatatcctctgctgagaaggtggctttgtcctcagaaacagaggtagccctggccagggacatgacactgcccccggaaaccaacgtgatcttgaccaaggataaagcactacctttagaagcagaggtggccccagtcaaggacatggctcaactcccagaaacagaaatagccccggccaaggatgtggctccgtccacagtaaaagaagtgggcttgttgaaggacatgtctccactatcagaaacagaaatggctctgggcaaggatgtgactccacctccagaaacagaagtagttctcatcaagaacgtatgtctgcctccagaaatggaggtggccctgactgaggatcaggtcccagccctcaaaacagaagcacccctggctaaggatggggttctgaccctggccaacaatgtgactccagccaaagatgttccaccactctcagaaacagaggcaacaccagttccaattaaagacatggaaattgcacaaacacaaaaaggaataagtgaggattcccatttagaatctctgcaggatgtggggcagtcagctgcacctactttcatgatttcaccagaaaccgtcacaggaacggggaaaaagtgcagcttgccggccgaggaggattctgtgttagaaaaactaggggaaaggaaaccatgcaacagtcaaccttctgagctttcttcagagacctcaggaatagccaggccagaagaaggaaggcctgtggtgagtgggacaggaaatgacatcaccaccccaccgaacaaggagctcccaccaagcccagagaagaaaacaaagcctttggccaccactcaacctgcaaagacttcaacatcgaaagccaaaacacagcccacttctctccctaagcagccagctcccaccaccattggtgggttgaataaaaaacccatgagccttgcttcaggcttagtgccagctgccccacccaaacgccctgccgtcgcctctgccaggccttccatcttaccttcaaaagacgtgaagccaaagcccattgcagatgcaaaggctcctgagaagcgggcctcaccatccaagccagcttctgccccagcctccagatctgggtccaagagcactcagactgttgcaaaaaccacaacagctgctgctgttgcctcaactggcccaagcagtaggagcccctccacgctcctgcccaagaagcccactgccattaagactgagggaaaacctgcagaagtcaagaagatgactgcaaagtctgtaccagctgacttgagtcgcccaaagagcacctccaccagttccatgaagaaaaccaccactctcagtgggacagcccccgctgcaggggtggttcccagccgagtcaaggccacacccatgccctcccggccctccacaactcctttcatagacaagaagcccacctcggccaaacccagctccaccaccccccggctcagccgcctggccaccaatacttctgctcctgatctgaagaatgtccgctccaaggttggctccacggaaaacatcaagcatcagcctggaggaggccgggccaaagtagagaaaaaaacagaggcagctgctacaacccgaaagcctgaatctaatgcagtcactaaaacagccggcccaattgcaagtgcacagaaacaacctgcggggaaagtccagatagtctccaaaaaagtgagctacagccatattcagtccaagtgtggttccaaggacaatattaagcatgtccctggaggtggtaatgttcagattcagaacaagaaagtggacatctctaaggtctcctccaagtgtgggtctaaggctaacatcaagcacaagcctggtggaggagatgtcaagattgaaagtcagaagttgaacttcaaggagaaggcccaggccaaggtgggatccctcgataatgtgggccacctacctgcaggaggtgctgtgaagactgagggcggtggcagcgaggctcctctgtgtccgggtccccctgctggggaggagccggccatctctgaggcagcgcctgaagctggcgcccccacttcagccagtggcctcaatggccaccccaccctgtcagggggtggtgaccaaagggaggcccagaccttggacagccagatccaggagacaagcatctaatgatgacattctggtctcgtcttccgtctcccccgtgttcccctcttgtctcccctgttcccctctcccttccctcctcccatgtcactgcagattgagacctacaggctgacgttccgggcaaatgccagggcccgcaccgaccacggggccgacattgtctcccgccccccacacttccctggcggccccaactcgggctcccgggtccttggccccctttcccgggctgtccactagaccagtgagcgcttgggcgccgtgctgggcagcccgctaggctcgccttccctcctgctttgcgtgcccggggcagcagcagccctgccccacacctcctctcactccccagcctgggcccatctccctgctttggtcttgccccatcactgcgccactgctccgtggaggaggttgggagggggttggggtggttgaggctaagttgggatctaggagaggagaaccagattctatcctcatctttttttggttctttggtccaaacccaaaagaaactgacatgccctcccttctccctggatctacctggagggaagagtggaggtggattccgagtggtgacaggacgctgaccgtggagcttaagccactgcctctccctctggtcccacaaatgggcgcccccccctccccatgcaggtggtgtcgggcccttcttgctgccctgccccaagttgggggtcagtgctgcctgtccccatgcttaacatacccgcctagctgctgtcacatttttcttgttttgtccttttatttttttctaataacctaaaaactggcaaaatagttctgcaggttgaagccatgtctacatgaaagtcctcagtaagtgttagagggaacagggcggagatatccttatgccacccccgctggaggatgtgggcagcttagggccctggaggcggtgcggcagggaagaggggtgcagaggctgtggctggtgagccggtcaggcacacaaggggcccttggagcgtggactggttggttttgccattttgttgtgtgtatgctgcttttcttttctaaccaagaggctggttttggcatctctgtcccattccctgggatctggtggtcagccctaggataaaaagccagggctggagaacaagaaagggccaggagatggaattccttcaggccggcacccacaccctaggacatgtaagccctcatgtccaagggagcctcatgcagatagtaggaaatcaggtctggaaatttaaaaataaaaggcatgagactaaggctatctgcttcccttatgccctgactggagaggggagggaggagaggcaaggcccacagagggcatcccagctaggccttgggatggctgcagtgaggagaaatcccgggaactgtattgacacaaagattcttattgcacttgtattttttgtattaaagtttgcatggtttctaataaaggattcaaacataagtttgtagtgaaatggcctgggagattccaagggcttctctggagggggattggctgcagtgtagatttgcctctgaggaggctgccccagacttggcctcctcatgccccctcctgacctctgcccttctctggtcctggcatccctggagaaggtaggggtcttgacctaagtttagatttgatctccatgtgcagggaggctgtcctgggcctgacaggtcctccccctttctgaggtagcagtgccttgtggaggtttgacaccatgtccctagctccccaagcacacaccaggaaactgcaggggctcacggaggaagtgctgcctgggccagggggaccagctttcctccgtagagaccatgtgcagaacacttctgctgtgccaagaacatgagggagccagtgttttgtcagcaggaagaaagggcctgctgggatgaaagtgggaaggaaacagggttgcgtagtcaggagacacctcaggggcaacagcacaggcccagagtacctgctgcctccactgcgtctgtcctggggtcatgaggatgctgaggttgacgacaggttccaggtcctttcactcctttggccaaaggttgggggtaggtggcccaagtggcgtgctctctaggtagacaacaggagtggtcagagttccctcaaaggatcctccactccagagcacctgagaaggccgggaccagaggccctgtgtgatgtgtactccgcagctgtttggggtgggacatttctgtacttctcgatttgcttatggctcagccattacctgtgtcagtccatgattctgttgtaacagttttaagagtaaataaataaagctgcctgatgtcccatcaataaaaaataatacatggtttgacactttggcctattcttctagtaaaattattcttt

SEQ ID NO: 88772 - DNA, 5967 bp, Homo sapiens
agcggggtctgggctcccagactctgagagagagcgacggccatcatagaacagcgagggcagtcgatcggcctgcggtccgcttcggcattcgcaggccgcaggcgggaggctagagcccccaggcgcactcgccccaaccgcccgcggctcgggcagctctgcagagacgtcgtggcggcagggccagcacccattggtccgccacagccctccgccctccccctcgccacgcttattggccggagcggcggcgctcgccgggtaggcggtggcggcgtccctcccttgcgccggccctcaagaggcgacgaggatgcgaccgcctccctgcgccccgcccctccggctagctcgctggctcccggctcctcccgacgtctcctacctcctcacggctcttcccggcgctctcctggctcccttctgccccagctccgtctcggcggcggcgggcagttgcagtggtgcagaatggctgacctcagtcttgcagatgcattaacagaaccatctccagacattgagggagagataaagcgggacttcattgccacactagaggcagaggcctttgatgatgttgtgggagaaactgttggaaaaacagactatattcctctcctggatgttgatgagaaaaccgggaactcagagtcaaagaagaaaccgtgctcagaaactagccagattgaagatactccatcttctaaaccaacactcctagccaatggtggtcatggagtagaagggagcgatactacagggtctccaactgaattccttgaagagaaaatggcctaccaggaatacccaaatagccagaactggccagaagataccaacttttgtttccaacctgagcaagtggtcgatcctatccagactgatccctttaagatgtaccatgatgatgacctggcagatttggtctttccctccagtgcgacagctgatacttcaatatttgcaggacaaaatgatcccttgaaagacagttacggtatgtctccctgcaacacagctgttgtacctcaggggtggtctgtggaagccttaaactctccacactcagagtcctttgtttccccagaggctgttgcagaacctcctcagccaacggcagttcccttagagctagccaaggagatagaaatggcatcagaagagaggccaccagcacaagcattggaaataatgatgggactgaagactactgacatggcaccatctaaagaaacagagatggccctcgccaaggacatggcactagctacaaaaaccgaggtggcattggctaaagatatggaatcacccaccaaattagatgtgacactggccaaggacatgcagccatccatggaatcagatatggccctagtcaaggacatggaactacccacagaaaaagaagtggccctggttaaggatgtcagatggcccacagaaacagatgtatcttcagccaagaatgtggtactgcccacagaaacagaggtagccccagccaaggatgtgacactgttgaaagaaacagagagggcatctcctataaaaatggacttagccccttccaaggacatgggaccacccaaagaaaacaagaaagaaacagagagggcatctcctataaaaatggacttggctccttccaaggacatgggaccacccaaagaaaacaagatagtcccagccaaggatttggtattactctcagaaatagaggtggcacaggctaatgacattatatcatccacagaaatatcctctgctgagaaggtggctttgtcctcagaaacagaggtagccctggccagggacatgacactgcccccggaaaccaacgtgatcttgaccaaggataaagcactacctttagaagcagaggtggccccagtcaaggacatggctcaactcccagaaacagaaatagccccggccaaggatgtggctccgtccacagtaaaagaagtgggcttgttgaaggacatgtctccactatcagaaacagaaatggctctgggcaaggatgtgactccacctccagaaacagaagtagttctcatcaagaacgtatgtctgcctccagaaatggaggtggccctgactgaggatcaggtcccagccctcaaaacagaagcacccctggctaaggatggggttctgaccctggccaacaatgtgactccagccaaagatgttccaccactctcagaaacagaggcaacaccagttccaattaaagacatggaaattgcacaaacacaaaaaggaataagtgaggattcccatttagaatctctgcaggatgtggggcagtcagctgcacctactttcatgatttcaccagaaaccgtcacaggaacggggaaaaagtgcagcttgccggccgaggaggattctgtgttagaaaaactaggggaaaggaaaccatgcaacagtcaaccttctgagctttcttcagagacctcaggaatagccaggccagaagaaggaaggcctgtggtgagtgggacaggaaatgacatcaccaccccaccgaacaaggagctcccaccaagcccagagaagaaaacaaagcctttggccaccactcaacctgcaaagacttcaacatcgaaagccaaaacacagcccacttctctccctaagcagccagctcccaccaccattggtgggttgaataaaaaacccatgagccttgcttcaggcttagtgccagctgccccacccaaacgccctgccgtcgcctctgccaggccttccatcttaccttcaaaagacgtgaagccaaagcccattgcagatgcaaaggctcctgagaagcgggcctcaccatccaagccagcttctgccccagcctccagatctgggtccaagagcactcagactgttgcaaaaaccacaacagctgctgctgttgcctcaactggcccaagcagtaggagcccctccacgctcctgcccaagaagcccactgccattaagactgagggaaaacctgcagaagtcaagaagatgactgcaaagtctgtaccagctgacttgagtcgcccaaagagcacctccaccagttccatgaagaaaaccaccactctcagtgggacagcccccgctgcaggggtggttcccagccgagtcaaggccacacccatgccctcccggccctccacaactcctttcatagacaagaagcccacctcggccaaacccagctccaccaccccccggctcagccgcctggccaccaatacttctgctcctgatctgaagaatgtccgctccaaggttggctccacggaaaacatcaagcatcagcctggaggaggccgggttcagattcagaacaagaaagtggacatctctaaggtctcctccaagtgtgggtctaaggctaacatcaagcacaagcctggtggaggagatgtcaagattgaaagtcagaagttgaacttcaaggagaaggcccaggccaaggtgggatccctcgataatgtgggccacctacctgcaggaggtgctgtgaagactgagggcggtggcagcgaggctcctctgtgtccgggtccccctgctggggaggagccggccatctctgaggcagcgcctgaagctggcgcccccacttcagccagtggcctcaatggccaccccaccctgtcagggggtggtgaccaaagggaggcccagaccttggacagccagatccaggagacaatgcagattgagacctacaggctgacgttccgggcaaatgccagggcccgcaccgaccacggggccgacattgtctcccgccccccacacttccctggcggccccaactcgggctcccgggtccttggccccctttcccgggctgtccactagaccagtgagcgcttgggcgccgtgctgggcagcccgctaggctcgccttccctcctgctttgcgtgcccggggcagcagcagccctgccccacacctcctctcactccccagcctgggcccatctccctgctttggtcttgccccatcactgcgccactgctccgtggaggaggttgggagggggttggggtggttgaggctaagttgggatctaggagaggagaaccagattctatcctcatctttttttggttctttggtccaaacccaaaagaaactgacatgccctcccttctccctggatctacctggagggaagagtggaggtggattccgagtggtgacaggacgctgaccgtggagcttaagccactgcctctccctctggtcccacaaatgggcgcccccccctccccatgcaggtggtgtcgggcccttcttgctgccctgccccaagttgggggtcagtgctgcctgtccccatgcttaacatacccgcctagctgctgtcacatttttcttgttttgtccttttatttttttctaataacctaaaaactggcaaaatagttctgcaggttgaagccatgtctacatgaaagtcctcagtaagtgttagagggaacagggcggagatatccttatgccacccccgctggaggatgtgggcagcttagggccctggaggcggtgcggcagggaagaggggtgcagaggctgtggctggtgagccggtcaggcacacaaggggcccttggagcgtggactggttggttttgccattttgttgtgtgtatgctgcttttcttttctaaccaagaggctggttttggcatctctgtcccattccctgggatctggtggtcagccctaggataaaaagccagggctggagaacaagaaagggccaggagatggaattccttcaggccggcacccacaccctaggacatgtaagccctcatgtccaagggagcctcatgcagatagtaggaaatcaggtctggaaatttaaaaataaaaggcatgagactaaggctatctgcttcccttatgccctgactggagaggggagggaggagaggcaaggcccacagagggcatcccagctaggccttgggatggctgcagtgaggagaaatcccgggaactgtattgacacaaagattcttattgcacttgtattttttgtattaaagtttgcatggtttctaataaaggattcaaacataagtttgtagtgaaatggcctgggagattccaagggcttctctggagggggattggctgcagtgtagatttgcctctgaggaggctgccccagacttggcctcctcatgccccctcctgacctctgcccttctctggtcctggcatccctggagaaggtaggggtcttgacctaagtttagatttgatctccatgtgcagggaggctgtcctgggcctgacaggtcctccccctttctgaggtagcagtgccttgtggaggtttgacaccatgtccctagctccccaagcacacaccaggaaactgcaggggctcacggaggaagtgctgcctgggccagggggaccagctttcctccgtagagaccatgtgcagaacacttctgctgtgccaagaacatgagggagccagtgttttgtcagcaggaagaaagggcctgctgggatgaaagtgggaaggaaacagggttgcgtagtcaggagacacctcaggggcaacagcacaggcccagagtacctgctgcctccactgcgtctgtcctggggtcatgaggatgctgaggttgacgacaggttccaggtcctttcactcctttggccaaaggttgggggtaggtggcccaagtggcgtgctctctaggtagacaacaggagtggtcagagttccctcaaaggatcctccactccagagcacctgagaaggccgggaccagaggccctgtgtgatgtgtactccgcagctgtttggggtgggacatttctgtacttctcgatttgcttatggctcagccattacctgtgtcagtccatgattctgttgtaacagttttaagagtaaataaataaagctgcctgatgtcccatca

SEQ ID NO: 88773 - DNA, 6177 bp, Homo sapiens
agcggggtctgggctcccagactctgagagagagcgacggccatcatagaacagcgagggcagtcgatcggcctgcggtccgcttcggcattcgcaggccgcaggcgggaggctagagcccccaggcgcactcgccccaaccgcccgcggctcgggcagctctgcagagacgtcgtggcggcagggccagcacccattggtccgccacagccctccgccctccccctcgccacgcttattggccggagcggcggcgctcgccgggtaggcggtggcggcgtccctcccttgcgccggccctcaagaggcgacgaggatgcgaccgcctccctgcgccccgcccctccggctagctcgctggctcccggctcctcccgacgtctcctacctcctcacggctcttcccggcgctctcctggctcccttctgccccagctccgtctcggcggcggcgggcagttgcagtggtgcagaatggctgacctcagtcttgcagatgcattaacagaaccatctccagacattgagggagagataaagcgggacttcattgccacactagaggcagaggcctttgatgatgttgtgggagaaactgttggaaaaacagactatattcctctcctggatgttgatgagaaaaccgggaactcagagtcaaagaagaaaccgtgctcagaaactagccagattgaagatactccatcttctaaaccaacactcctagccaatggtggtcatggagtagaagggagcgatactacagggtctccaactgaattccttgaagagaaaatggcctaccaggaatacccaaatagccagaactggccagaagataccaacttttgtttccaacctgagcaagtggtcgatcctatccagactgatccctttaagatgtaccatgatgatgacctggcagatttggtctttccctccagtgcgacagctgatacttcaatatttgcaggacaaaatgatcccttgaaagacagttacggtatgtctccctgcaacacagctgttgtacctcaggggtggtctgtggaagccttaaactctccacactcagagtcctttgtttccccagaggctgttgcagaacctcctcagccaacggcagttcccttagagctagccaaggagatagaaatggcatcagaagagaggccaccagcacaagcattggaaataatgatgggactgaagactactgacatggcaccatctaaagaaacagagatggccctcgccaaggacatggcactagctacaaaaaccgaggtggcattggctaaagatatggaatcacccaccaaattagatgtgacactggccaaggacatgcagccatccatggaatcagatatggccctagtcaaggacatggaactacccacagaaaaagaagtggccctggttaaggatgtcagatggcccacagaaacagatgtatcttcagccaagaatgtggtactgcccacagaaacagaggtagccccagccaaggatgtgacactgttgaaagaaacagagagggcatctcctataaaaatggacttagccccttccaaggacatgggaccacccaaagaaaacaagaaagaaacagagagggcatctcctataaaaatggacttggctccttccaaggacatgggaccacccaaagaaaacaagatagtcccagccaaggatttggtattactctcagaaatagaggtggcacaggctaatgacattatatcatccacagaaatatcctctgctgagaaggtggctttgtcctcagaaacagaggtagccctggccagggacatgacactgcccccggaaaccaacgtgatcttgaccaaggataaagcactacctttagaagcagaggtggccccagtcaaggacatggctcaactcccagaaacagaaatagccccggccaaggatgtggctccgtccacagtaaaagaagtgggcttgttgaaggacatgtctccactatcagaaacagaaatggctctgggcaaggatgtgactccacctccagaaacagaagtagttctcatcaagaacgtatgtctgcctccagaaatggaggtggccctgactgaggatcaggtcccagccctcaaaacagaagcacccctggctaaggatggggttctgaccctggccaacaatgtgactccagccaaagatgttccaccactctcagaaacagaggcaacaccagttccaattaaagacatggaaattgcacaaacacaaaaaggaataagtgaggattcccatttagaatctctgcaggatgtggggcagtcagctgcacctactttcatgatttcaccagaaaccgtcacaggaacggggaaaaagtgcagcttgccggccgaggaggattctgtgttagaaaaactaggggaaaggaaaccatgcaacagtcaaccttctgagctttcttcagagacctcaggaatagccaggccagaagaaggaaggcctgtggtgagtgggacaggaaatgacatcaccaccccaccgaacaaggagctcccaccaagcccagagaagaaaacaaagcctttggccaccactcaacctgcaaagacttcaacatcgaaagccaaaacacagcccacttctctccctaagcagccagctcccaccaccattggtgggttgaataaaaaacccatgagccttgcttcaggcttagtgccagctgccccacccaaacgccctgccgtcgcctctgccaggccttccatcttaccttcaaaagacgtgaagccaaagcccattgcagatgcaaaggctcctgagaagcgggcctcaccatccaagccagcttctgccccagcctccagatctgggtccaagagcactcagactgttgcaaaaaccacaacagctgctgctgttgcctcaactggcccaagcagtaggagcccctccacgctcctgcccaagaagcccactgccattaagactgagggaaaacctgcagaagtcaagaagatgactgcaaagtctgtaccagctgacttgagtcgcccaaagagcacctccaccagttccatgaagaaaaccaccactctcagtgggacagcccccgctgcaggggtggttcccagccgagtcaaggccacacccatgccctcccggccctccacaactcctttcatagacaagaagcccacctcggccaaacccagctccaccaccccccggctcagccgcctggccaccaatacttctgctcctgatctgaagaatgtccgctccaaggttggctccacggaaaacatcaagcatcagcctggaggaggccgggccaaagtagagaaaaaaacagaggcagctgctacaacccgaaagcctgaatctaatgcagtcactaaaacagccggcccaattgcaagtgcacagaaacaacctgcggggaaagttcagattcagaacaagaaagtggacatctctaaggtctcctccaagtgtgggtctaaggctaacatcaagcacaagcctggtggaggagatgtcaagattgaaagtcagaagttgaacttcaaggagaaggcccaggccaaggtgggatccctcgataatgtgggccacctacctgcaggaggtgctgtgaagactgagggcggtggcagcgaggctcctctgtgtccgggtccccctgctggggaggagccggccatctctgaggcagcgcctgaagctggcgcccccacttcagccagtggcctcaatggccaccccaccctgtcagggggtggtgaccaaagggaggcccagaccttggacagccagatccaggagacaagcatctaatgatgacattctggtctcgtcttccgtctcccccgtgttcccctcttgtctcccctgttcccctctcccttccctcctcccatgtcactgcagattgagacctacaggctgacgttccgggcaaatgccagggcccgcaccgaccacggggccgacattgtctcccgccccccacacttccctggcggccccaactcgggctcccgggtccttggccccctttcccgggctgtccactagaccagtgagcgcttgggcgccgtgctgggcagcccgctaggctcgccttccctcctgctttgcgtgcccggggcagcagcagccctgccccacacctcctctcactccccagcctgggcccatctccctgctttggtcttgccccatcactgcgccactgctccgtggaggaggttgggagggggttggggtggttgaggctaagttgggatctaggagaggagaaccagattctatcctcatctttttttggttctttggtccaaacccaaaagaaactgacatgccctcccttctccctggatctacctggagggaagagtggaggtggattccgagtggtgacaggacgctgaccgtggagcttaagccactgcctctccctctggtcccacaaatgggcgcccccccctccccatgcaggtggtgtcgggcccttcttgctgccctgccccaagttgggggtcagtgctgcctgtccccatgcttaacatacccgcctagctgctgtcacatttttcttgttttgtccttttatttttttctaataacctaaaaactggcaaaatagttctgcaggttgaagccatgtctacatgaaagtcctcagtaagtgttagagggaacagggcggagatatccttatgccacccccgctggaggatgtgggcagcttagggccctggaggcggtgcggcagggaagaggggtgcagaggctgtggctggtgagccggtcaggcacacaaggggcccttggagcgtggactggttggttttgccattttgttgtgtgtatgctgcttttcttttctaaccaagaggctggttttggcatctctgtcccattccctgggatctggtggtcagccctaggataaaaagccagggctggagaacaagaaagggccaggagatggaattccttcaggccggcacccacaccctaggacatgtaagccctcatgtccaagggagcctcatgcagatagtaggaaatcaggtctggaaatttaaaaataaaaggcatgagactaaggctatctgcttcccttatgccctgactggagaggggagggaggagaggcaaggcccacagagggcatcccagctaggccttgggatggctgcagtgaggagaaatcccgggaactgtattgacacaaagattcttattgcacttgtattttttgtattaaagtttgcatggtttctaataaaggattcaaacataagtttgtagtgaaatggcctgggagattccaagggcttctctggagggggattggctgcagtgtagatttgcctctgaggaggctgccccagacttggcctcctcatgccccctcctgacctctgcccttctctggtcctggcatccctggagaaggtaggggtcttgacctaagtttagatttgatctccatgtgcagggaggctgtcctgggcctgacaggtcctccccctttctgaggtagcagtgccttgtggaggtttgacaccatgtccctagctccccaagcacacaccaggaaactgcaggggctcacggaggaagtgctgcctgggccagggggaccagctttcctccgtagagaccatgtgcagaacacttctgctgtgccaagaacatgagggagccagtgttttgtcagcaggaagaaagggcctgctgggatgaaagtgggaaggaaacagggttgcgtagtcaggagacacctcaggggcaacagcacaggcccagagtacctgctgcctccactgcgtctgtcctggggtcatgaggatgctgaggttgacgacaggttccaggtcctttcactcctttggccaaaggttgggggtaggtggcccaagtggcgtgctctctaggtagacaacaggagtggtcagagttccctcaaaggatcctccactccagagcacctgagaaggccgggaccagaggccctgtgtgatgtgtactccgcagctgtttggggtgggacatttctgtacttctcgatttgcttatggctcagccattacctgtgtcagtccatgattctgttgtaacagttttaagagtaaataaataaagctgcctgatgtcccatca

SEQ ID NO: 88774 - DNA, 5684 bp, Homo sapiens
  misc_feature (5506)..(5506): n is a, c, g, or t
  misc_feature (5590)..(5590): n is a, c, g, or t
agcggggtctgggctcccagactctgagagagagcgacggccatcatagaacagcgagggcagtcgatcggcctgcggtccgcttcggcattcgcaggccgcaggcgggaggctagagcccccaggcgcactcgccccaaccgcccgcggctcgggcagctctgcagagacgtcgtggcggcagggccagcacccattggtccgccacagccctccgccctccccctcgccacgcttattggccggagcggcggcgctcgccgggtaggcggtggcggcgtccctcccttgcgccggccctcaagaggcgacgaggatgcgaccgcctccctgcgccccgcccctccggctagctcgctggctcccggctcctcccgacgtctcctacctcctcacggctcttcccggcgctctcctggctcccttctgccccagctccgtctcggcggcggcgggcagttgcagtggtgcagaatggctgacctcagtcttgcagatgcattaacagaaccatctccagacattgagggagagataaagcgggacttcattgccacactagaggcagaggcctttgatgatgttgtgggagaaactgttggaaaaacagactatattcctctcctggatgttgatgagaaaaccgggaactcagagtcaaagaagaaaccgtgctcagaaactagccagattgaagatactccatcttctaaaccaacactcctagccaatggtggtcatggagtagaagggagcgatactacagggtctccaactgaattccttgaagagaaaatggcctaccaggaatacccaaatagccagaactggccagaagataccaacttttgtttccaacctgagcaagtggtcgatcctatccagactgatccctttaagatgtaccatgatgatgacctggcagatttggtctttccctccagtgcgacagctgatacttcaatatttgcaggacaaaatgatcccttgaaagacagttacggtatgtctccctgcaacacagctgttgtacctcaggggtggtctgtggaagccttaaactctccacactcagagtcctttgtttccccagaggctgttgcagaacctcctcagccaacggcagttcccttagagctagccaaggagatagaaatggcatcagaagagaggccaccagcacaagcattggaaataatgatgggactgaagactactgacatggcaccatctaaagaaacagagatggccctcgccaaggacatggcactagctacaaaaaccgaggtggcattggctaaagatatggaatcacccaccaaattagatgtgacactggccaaggacatgcagccatccatggaatcagatatggccctagtcaaggacatggaactacccacagaaaaagaagtggccctggttaaggatgtcagatggcccacagaaacagatgtatcttcagccaagaatgtggtactgcccacagaaacagaggtagccccagccaaggatgtgacactgttgaaagaaacagagagggcatctcctataaaaatggacttagccccttccaaggacatgggaccacccaaagaaaacaagaaagaaacagagagggcatctcctataaaaatggacttggctccttccaaggacatgggaccacccaaagaaaacaagatagtcccagccaaggatttggtattactctcagaaatagaggtggcacaggctaatgacattatatcatccacagaaatatcctctgctgagaaggtggctttgtcctcagaaacagaggtagccctggccagggacatgacactgcccccggaaaccaacgtgatcttgaccaaggataaagcactacctttagaagcagaggtggccccagtcaaggacatggctcaactcccagaaacagaaatagccccggccaaggatgtggctccgtccacagtaaaagaagtgggcttgttgaaggacatgtctccactatcagaaacagaaatggctctgggcaaggatgtgactccacctccagaaacagaagtagttctcatcaagaacgtatgtctgcctccagaaatggaggtggccctgactgaggatcaggtcccagccctcaaaacagaagcacccctggctaaggatggggttctgaccctggccaacaatgtgactccagccaaagatgttccaccactctcagaaacagaggcaacaccagttccaattaaagacatggaaattgcacaaacacaaaaaggaataagtgaggattcccatttagaatctctgcaggatgtggggcagtcagctgcacctactttcatgatttcaccagaaaccgtcacaggaacggggaaaaagtgcagcttgccggccgaggaggattctgtgttagaaaaactaggggaaaggaaaccatgcaacagtcaaccttctgagctttcttcagagacctcaggaatagccaggccagaagaaggaaggcctgtggtgagtgggacaggaaatgacatcaccaccccaccgaacaaggagctcccaccaagcccagagaagaaaacaaagcctttggccaccactcaacctgcaaagacttcaacatcgaaagccaaaacacagcccacttctctccctaagcagccagctcccaccaccattggtgggttgaataaaaaacccatgagccttgcttcaggcttagtgccagctgccccacccaaacgccctgccgtcgcctctgccaggccttccatcttaccttcaaaagacgtgaagccaaagcccattgcagatgcaaaggctcctgagaagcgggcctcaccatccaagccagcttctgccccagcctccagatctgggtccaagagcactcagactgttgcaaaaaccacaacagctgctgctgttgcctcaactggcccaagcagtaggagcccctccacgctcctgcccaagaagcccactgccattaagactgagggaaaacctgcagaagtcaagaagatgactgcaaagtctgtaccagctgacttgagtcgcccaaagagcacctccaccagttccatgaagaaaaccaccactctcagtgggacagcccccgctgcaggggtggttcccagccgagtcaaggccacacccatgccctcccggccctccacaactcctttcatagacaagaagcccacctcggccaaacccagctccaccaccccccggctcagccgcctggccaccaatacttctgctcctgatctgaagaatgtccgctccaaggttggctccacggaaaacatcaagcatcagcctggaggaggccgggccaaagtagagaaaaaaacagaggcagctgctacaacccgaaagcctgaatctaatgcagtcactaaaacagccggcccaattgcaagtgcacagaaacaacctgcggggaaagtccagatagtctccaaaaaagtgagctacagccatattcagtccaagtgtggttccaaggacaatattaagcatgtccctggaggtggtaatgttcagattcagaacaagaaagtggacatctctaaggtctcctccaagtgtgggtctaaggctaacatcaagcacaagcctggtggaggagatgtcaagattgaaagtcagaagttgaacttcaaggagaaggcccaggccaaggtgggatccctcgataatgtgggccacctacctgcaggaggtgctgtgaagactgagggcggtggcagcgaggctcctctgtgtccgggtccccctgctggggaggagccggccatctctgaggcagcgcctgaagctggcgcccccacttcagccagtggcctcaatggccaccccaccctgtcagggggtggtgaccaaagggaggcccagaccttggacagccagatccaggagacaagcatctaatgatgacattctggtctcgtcttccgtctcccccgtgttcccctcttgtctcccctgttcccctctcccttccctcctcccatgtcactgcagattgagacctacaggctgacgttccgggcaaatgccagggcccgcaccgaccacggggccgacattgtctcccgccccccacacttccctggcggccccaactcgggctcccgggtccttggccccctttcccgggctgtccactagaccagtgagcgcttgggcgccgtgctgggcagcccgctaggctcgccttccctcctgctttgcgtgcccggggcagcagcagccctgccccacacctcctctcactccccagcctgggcccatctccctgctttggtcttgccccatcactgcgccactgctccgtggaggaggttgggagggggttggggtggttgaggctaagttgggatctaggagaggagaaccagattctatcctcatctttttttggttctttggtccaaacccaaaagaaactgacatgccctcccttctccctggatctacctggagggaagagtggaggtggattccgagtggtgacaggacgctgaccgtggagcttaagccactgcctctccctctggtcccacaaatgggcgcccccccctccccatgcaggtggtgtcgggcccttcttgctgccctgccccaagttgggggtcagtgctgcctgtccccatgcttaacatacccgcctagctgctgtcacatttttcttgttttgtccttttatttttttctaataacctaaaaactggcaaaatagttctgcaggttgaagccatgtctacatgaaagtcctcagtaagtgttagagggaacagggcggagatatccttatgccacccccgctggaggatgtgggcagcttagggccctggaggcggtgcggcagggaagaggggtgcagaggctgtggctggtgagccggtcaggcacacaaggggcccttggagcgtggactggttggttttgccattttgttgtgtgtatgctgcttttcttttctaaccaagaggctggttttggcatctctgtcccattccctgggatctggtggtcagccctaggataaaaagccagggctggagaacaagaaagggccaggagatggaattccttcaggccggcacccacaccctaggacatgtaagccctcatgtccaagggagcctcatgcagatagtaggaaatcaggtctggaaatttaaaaataaaaggcatgagactaaggctatctgcttcccttatgccctgactggagaggggagggaggagaggcaaggcccacagagggcatcccagctaggccttgggatggctgcagtgaggagaaatcccgggaactgtattgacacaaagattcttattgcacttgtattttttgtattaaagtttgcatggtttctaataaaggattcaaacataagtttgtagtgaaatggcctgggagattccaagggcttctctggagggggattggctgcagtgtagatttgcctctgaggaggtggccaatgggctcttnggccctctgacttggcctttttgtcggtctgggaggggggtgcctagttattggcccggggcggggggcggaggccccttgggnaggctgggggggcccctccccccagaggggtggggggggcggcgcctccggctctctgcgtttgcgtggttctcccttctgcgtgtgtctttcc

SEQ ID NO: 88775 - DNA, 6234 bp, Homo sapiens
agcggggtctgggctcccagactctgagagagagcgacggccatcatagaacagcgagggcagtcgatcggcctgcggtccgcttcggcattcgcaggccgcaggcgggaggctagagcccccaggcgcactcgccccaaccgcccgcggctcgggcagctctgcagagacgtcgtggcggcagggccagcacccattggtccgccacagccctccgccctccccctcgccacgcttattggccggagcggcggcgctcgccgggtaggcggtggcggcgtccctcccttgcgccggccctcaagaggcgacgaggatgcgaccgcctccctgcgccccgcccctccggctagctcgctggctcccggctcctcccgacgtctcctacctcctcacggctcttcccggcgctctcctggctcccttctgccccagctccgtctcggcggcggcgggcagttgcagtggtgcagaatggctgacctcagtcttgcagatgcattaacagaaccatctccagacattgagggagagataaagcgggacttcattgccacactagaggcagaggcctttgatgatgttgtgggagaaactgttggaaaaacagactatattcctctcctggatgttgatgagaaaaccgggaactcagagtcaaagaagaaaccgtgctcagaaactagccagattgaagatactccatcttctaaaccaacactcctagccaatggtggtcatggagtagaagggagcgatactacagggtctccaactgaattccttgaagagaaaatggcctaccaggaatacccaaatagccagaactggccagaagataccaacttttgtttccaacctgagcaagtggtcgatcctatccagactgatccctttaagatgtaccatgatgatgacctggcagatttggtctttccctccagtgcgacagctgatacttcaatatttgcaggacaaaatgatcccttgaaagacagttacggtatgtctccctgcaacacagctgttgtacctcaggggtggtctgtggaagccttaaactctccacactcagagtcctttgtttccccagaggctgttgcagaacctcctcagccaacggcagttcccttagagctagccaaggagatagaaatggcatcagaagagaggccaccagcacaagcattggaaataatgatgggactgaagactactgacatggcaccatctaaagaaacagagatggccctcgccaaggacatggcactagctacaaaaaccgaggtggcattggctaaagatatggaatcacccaccaaattagatgtgacactggccaaggacatgcagccatccatggaatcagatatggccctagtcaaggacatggaactacccacagaaaaagaagtggccctggttaaggatgtcagatggcccacagaaacagatgtatcttcagccaagaatgtggtactgcccacagaaacagaggtagccccagccaaggatgtgacactgttgaaagaaacagagagggcatctcctataaaaatggacttagccccttccaaggacatgggaccacccaaagaaaacaagaaagaaacagagagggcatctcctataaaaatggacttggctccttccaaggacatgggaccacccaaagaaaacaagatagtcccagccaaggatttggtattactctcagaaatagaggtggcacaggctaatgacattatatcatccacagaaatatcctctgctgagaaggtggctttgtcctcagaaacagaggtagccctggccagggacatgacactgcccccggaaaccaacgtgatcttgaccaaggataaagcactacctttagaagcagaggtggccccagtcaaggacatggctcaactcccagaaacagaaatagccccggccaaggatgtggctccgtccacagtaaaagaagtgggcttgttgaaggacatgtctccactatcagaaacagaaatggctctgggcaaggatgtgactccacctccagaaacagaagtagttctcatcaagaacgtatgtctgcctccagaaatggaggtggccctgactgaggatcaggtcccagccctcaaaacagaagcacccctggctaaggatggggttctgaccctggccaacaatgtgactccagccaaagatgttccaccactctcagaaacagaggcaacaccagttccaattaaagacatggaaattgcacaaacacaaaaaggaataagtgaggattcccatttagaatctctgcaggatgtggggcagtcagctgcacctactttcatgatttcaccagaaaccgtcacaggaacggggaaaaagtgcagcttgccggccgaggaggattctgtgttagaaaaactaggggaaaggaaaccatgcaacagtcaaccttctgagctttcttcagagacctcaggaatagccaggccagaagaaggaaggcctgtggtgagtgggacaggaaatgacatcaccaccccaccgaacaaggagctcccaccaagcccagagaagaaaacaaagcctttggccaccactcaacctgcaaagacttcaacatcgaaagccaaaacacagcccacttctctccctaagcagccagctcccaccaccattggtgggttgaataaaaaacccatgagccttgcttcaggcttagtgccagctgccccacccaaacgccctgccgtcgcctctgccaggccttccatcttaccttcaaaagacgtgaagccaaagcccattgcagatgcaaaggctcctgagaagcgggcctcaccatccaagccagcttctgccccagcctccagatctgggtccaagagcactcagactgttgcaaaaaccacaacagctgctgctgttgcctcaactggcccaagcagtaggagcccctccacgctcctgcccaagaagcccactgccattaagactgagggaaaacctgcagaagtcaagaagatgactgcaaagtctgtaccagctgacttgagtcgcccaaagagcacctccaccagttccatgaagaaaaccaccactctcagtgggacagcccccgctgcaggggtggttcccagccgagtcaaggccacacccatgccctcccggccctccacaactcctttcatagacaagaagcccacctcggccaaacccagctccaccaccccccggctcagccgcctggccaccaatacttctgctcctgatctgaagaatgtccgctccaaggttggctccacggaaaacatcaagcatcagcctggaggaggccgggccaaagtagagaaaaaaacagaggcagctgctacaacccgaaagcctgaatctaatgcagtcactaaaacagccggcccaattgcaagtgcacagaaacaacctgcggggaaagtccagatagtctccaaaaaagtgagctacagccatattcagtccaagtgtggttccaaggacaatattaagcatgtccctggaggtggtaatgttcagattcagaacaagaaagtggacatctctaaggtctcctccaagtgtgggtctaaggctaacatcaagcacaagcctggtggaggagatgtcaagattgaaagtcagaagttgaacttcaaggagaaggcccaggccaaggtgggatccctcgataatgtgggccacctacctgcaggaggtgctgtgaagactgagggcggtggcagcgaggctcctctgtgtccgggtccccctgctggggaggagccggccatctctgaggcagcgcctgaagctggcgcccccacttcagccagtggcctcaatggccaccccaccctgtcagggggtggtgaccaaagggaggcccagaccttggacagccagatccaggagacaagcatctaatgatgacattctggtctcgtcttccgtctcccccgtgttcccctcttgtctcccctgttcccctctcccttccctcctcccatgtcactgcagattgagacctacaggctgacgttccgggcaaatgccagggcccgcaccgaccacggggccgacattgtctcccgccccccacacttccctggcggccccaactcgggctcccgggtccttggccccctttcccgggctgtccactagaccagtgagcgcttgggcgccgtgctgggcagcccgctaggctcgccttccctcctgctttgcgtgcccggggcagcagcagccctgccccacacctcctctcactccccagcctgggcccatctccctgctttggtcttgccccatcactgcgccactgctccgtggaggaggttgggagggggttggggtggttgaggctaagttgggatctaggagaggagaaccagattctatcctcatctttttttggttctttggtccaaacccaaaagaaactgacatgccctcccttctccctggatctacctggagggaagagtggaggtggattccgagtggtgacaggacgctgaccgtggagcttaagccactgcctctccctctggtcccacaaatgggcgcccccccctccccatgcaggtggtgtcgggcccttcttgctgcctgcttaacatacccgcctagctgctgtcacatttttcttgttttgtccttttatttttttctaataacctaaaaactggcaaaatagttctgcaggttgaagccatgtctacatgaaagtcctcagtaagtgttagagggaacagggcggagatatccttatgccacccccgctggaggatgtgggcagcttagggccctggaggcggtgcggcagggaagaggggtgcagaggctgtggctggtgagccggtcaggcacacaaggggcccttggagcgtggactggttggttttgccattttgttgtgtgtatgctgcttttcttttctaaccaagaggctggttttggcatctctgtcccattccctgggatctggtggtcagccctaggataaaaagccagggctggagaacaagaaagggccaggagatggaattccttcaggccggcacccacaccctaggacatgtaagccctcatgtccaagggagcctcatgcagatagtaggaaatcaggtctggaaatttaaaaataaaaggcatgagactaaggctatctgcttcccttatgccctgactggagaggggagggaggagaggcaaggcccacagagggcatcccagctaggccttgggatggctgcagtgaggagaaatcccgggaactgtattgacacaaagattcttattgcacttgtattttttgtattaaagtttgcatggtttctaataaaggattcaaacataagtttgtagtgaaatggcctgggagattccaagggcttctctggagggggattggctgcagtgtagatttgcctctgaggaggctgccccagacttggcctcctcatgccccctcctgacctctgcccttctctggtcctggcatccctggagaaggtaggggtcttgacctaagtttagatttgatctccatgtgcagggaggctgtcctgggcctgacaggtcctccccctttctgaggtagcagtgccttgtggaggtttgacaccatgtccctagctccccaagcacacaccaggaaactgcaggggctcacggaggaagtgctgcctgggccagggggaccagctttcctccgtagagaccatgtgcagaacacttctgctgtgccaagaacatgagggagccagtgttttgtcagcaggaagaaagggcctgctgggatgaaagtgggaaggaaacagggttgcgtagtcaggagacacctcaggggcaacagcacaggcccagagtacctgctgcctccactgcgtctgtcctggggtcatgaggatgctgaggttgacgacaggttccaggtcctttcactcctttggccaaaggttgggggtaggtggcccaagtggcgtgctctctaggtagacaacaggagtggtcagagttccctcaaaggatcctccactccagagcacctgagaaggccgggaccagaggccctgtgtgatgtgtactccgcagctgtttggggtgggacatttctgtacttctcgatttgcttatggctcagccattacctgtgtcagtccatgattctgttgtaacagttttaagagtaaataaataaagctgcctgatgtcccatca

SEQ ID NO: 88776 - DNA, 5436 bp, Homo sapiens
agcggggtctgggctcccagactctgagagagagcgacggccatcatagaacagcgagggcagtcgatcggcctgcggtccgcttcggcattcgcaggccgcaggcgggaggctagagcccccaggcgcactcgccccaaccgcccgcggctcgggcagctctgcagagacgtcgtggcggcagggccagcacccattggtccgccacagccctccgccctccccctcgccacgcttattggccggagcggcggcgctcgccgggtaggcggtggcggcgtccctcccttgcgccggccctcaagaggcgacgaggatgcgaccgcctccctgcgccccgcccctccggctagctcgctggctcccggctcctcccgacgtctcctacctcctcacggctcttcccggcgctctcctggctcccttctgccccagctccgtctcggcggcggcgggcagttgcagtggtgcagaatggctgacctcagtcttgcagatgcattaacagaaccatctccagacattgagggagagataaagcgggacttcattgccacactagaggcagaggcctttgatgatgttgtgggagaaactgttggaaaaacagactatattcctctcctggatgttgatgagaaaaccgggaactcagagtcaaagaagaaaccgtgctcagaaactagccagattgaagatactccatcttctaaaccaacactcctagccaatggtggtcatggagtagaagggagcgatactacagggtctccaactgaattccttgaagagaaaatggcctaccaggaatacccaaatagccagaactggccagaagataccaacttttgtttccaacctgagcaagtggtcgatcctatccagactgatccctttaagatgtaccatgatgatgacctggcagatttggtctttccctccagtgcgacagctgatacttcaatatttgcaggacaaaatgatcccttgaaagacagttacggtatgtctccctgcaacacagctgttgtacctcaggggtggtctgtggaagccttaaactctccacactcagagtcctttgtttccccagaggctgttgcagaacctcctcagccaacggcagttcccttagagctagccaaggagatagaaatggcatcagaagagaggccaccagcacaagcattggaaataatgatgggactgaagactactgacatggcaccatctaaagaaacagagatggccctcgccaaggacatggcactagctacaaaaaccgaggtggcattggctaaagatatggaatcacccaccaaattagatgtgacactggccaaggacatgcagccatccatggaatcagatatggccctagtcaaggacatggaactacccacagaaaaagaagtggccctggttaaggatgtcagatggcccacagaaacagatgtatcttcagccaagaatgtggtactgcccacagaaacagaggtagccccagccaaggatgtgacactgttgaaagaaacagagagggcatctcctataaaaatggacttagccccttccaaggacatgggaccacccaaagaaaacaagaaagaaacagagagggcatctcctataaaaatggacttggctccttccaaggacatgggaccacccaaagaaaacaagatagtcccagccaaggatttggtattactctcagaaatagaggtggcacaggctaatgacattatatcatccacagaaatatcctctgctgagaaggtggctttgtcctcagaaacagaggtagccctggccagggacatgacactgcccccggaaaccaacgtgatcttgaccaaggataaagcactacctttagaagcagaggtggccccagtcaaggacatggctcaactcccagaaacagaaatagccccggccaaggatgtggctccgtccacagtaaaagaagtgggcttgttgaaggacatgtctccactatcagaaacagaaatggctctgggcaaggatgtgactccacctccagaaacagaagtagttctcatcaagaacgtatgtctgcctccagaaatggaggtggccctgactgaggatcaggtcccagccctcaaaacagaagcacccctggctaaggatggggttctgaccctggccaacaatgtgactccagccaaagatgttccaccactctcagaaacagaggcaacaccagttccaattaaagacatggaaattgcacaaacacaaaaaggaataagtgaggattcccatttagaatctctgcaggatgtggggcagtcagctgcacctactttcatgatttcaccagaaaccgtcacaggaacggggaaaaagtgcagcttgccggccgaggaggattctgtgttagaaaaactaggggaaaggaaaccatgcaacagtcaaccttctgagctttcttcagagacctcaggaatagccaggccagaagaaggaaggcctgtggtgagtgggacaggaaatgacatcaccaccccaccgaacaaggagctcccaccaagcccagagaagaaaacaaagcctttggccaccactcaacctgcaaagacttcaacatcgaaagccaaaacacagcccacttctctccctaagcagccagctcccaccaccattggtgggttgaataaaaaacccatgagccttgcttcaggcttagtgccagctgccccacccaaacgccctgccgtcgcctctgccaggccttccatcttaccttcaaaagacgtgaagccaaagcccattgcagatgcaaaggctcctgagaagcgggcctcaccatccaagccagcttctgccccagcctccagatctgggtccaagagcactcagactgttgcaaaaaccacaacagctgctgctgttgcctcaactggcccaagcagtaggagcccctccacgctcctgcccaagaagcccactgccattaagactgagggaaaacctgcagaagtcaagaagatgactgcaaagtctgtaccagctgacttgagtcgcccaaagagcacctccaccagttccatgaagaaaaccaccactctcagtgggacagcccccgctgcaggggtggttcccagccgagtcaaggccacacccatgccctcccggccctccacaactcctttcatagacaagaagcccacctcggccaaacccagctccaccaccccccggctcagccgcctggccaccaatacttctgctcctgatctgaagaatgtccgctccaaggttggctccacggaaaacatcaagcatcagcctggaggaggccgggccaaagtagagaaaaaaacagaggcagctgctacaacccgaaagcctgaatctaatgcagtcactaaaacagccggcccaattgcaagtgcacagaaacaacctgcggggaaagtccagatagtctccaaaaaagtgagctacagccatattcagtccaagtgtggttccaaggacaatattaagcatgtccctggaggtggtaatgttcagattcagaacaagaaagtggacatctctaaggtctcctccaagtgtgggtctaaggctaacatcaagcacaagcctggtggaggagatgtcaagattgaaagtcagaagttgaacttcaaggagaaggcccaggccaaggtgggatccctcgataatgtgggccacctacctgcaggaggtgctgtgaagactgagggcggtggcagcgaggctcctctgtgtccgggtccccctgctggggaggagccggccatctctgaggcagcgcctgaagctggcgcccccacttcagccagtggcctcaatggccaccccaccctgtcagggggtggtgaccaaagggaggcccagaccttggacagccagatccaggagacaagcatctaatgatgacattctggtctcgtcttccgtctcccccgtgttcccctcttgtctcccctgttcccctctcccttccctcctcccatgtcactgcagattgagacctacaggctgacgttccgggcaaatgccagggcccgcaccgaccacggggccgacattgtctcccgccccccacacttccctggcggccccaactcgggctcccgggtccttggccccctttcccgggctgtccactagaccagtgagcgcttgggcgccgtgctgggcagcccgctaggctcgccttccctcctgctttgcgtgcccggggcagcagcagccctgccccacacctcctctcactccccagcctgggcccatctccctgctttggtcttgccccatcactgcgccactgctccgtggaggaggttgggagggggttggggtggttgaggctaagttgggatctaggagaggagaaccagattctatcctcatctttttttggttctttggtccaaacccaaaagaaactgacatgccctcccttctccctggatctacctggagggaagagtggaggtggattccgagtggtgacaggacgctgaccgtggagcttaagccactgcctctccctctggtcccacaaatgggcgcccccccctccccatgcaggtggtgtcgggcccttcttgctgccctgccccaagttgggggtcagtgctgcctgtccccatgcttaacatacccgcctagctgctgtcacatttttcttgttttgtccttttatttttttctaataacctaaaaactggcaaaatagttctgcaggttgaagccatgtctacatgaaagtcctcagtaagtgttagagggaacagggcggagatatccttatgccacccccgctggaggatgtgggcagcttagggccctggaggcggtgcggcagggaagaggggtgcagaggctgtggctggtgagccggtcaggcacacaaggggcccttggagcgtggactggttggttttgccattttgttgtgtgtatgctgcttttcttttctaaccaagaggctggttttggcatctctgtcccattccctgggatctggtggtcagccctaggataaaaagccagggctggagaacaagaaagggccaggagatggaattccttcaggccggcacccacaccctaggacatgtaagccctcatgtccaagggagcctcatgcagatagtaggaaatcaggtctggaaatttaaaaataaaaggcatgagactaaggctatctgcttcccttatgccctgactggagaggggagggaggagaggcaaggcccacagagggcatcccagctaggccttgggatggctgcagtgaggagaaatcccgggaactgtattgacacaaagattcttattgcacttgtattttttgtattaaagtttgcatggtttctaataaaggattcaaacataaaaaaaaaaatcacacaaggctacaaaaca

SEQ ID NO: 88777 - DNA, 5616 bp, Homo sapiens
agcggggtctgggctcccagactctgagagagagcgacggccatcatagaacagcgagggcagtcgatcggcctgcggtccgcttcggcattcgcaggccgcaggcgggaggctagagcccccaggcgcactcgccccaaccgcccgcggctcgggcagctctgcagagacgtcgtggcggcagggccagcacccattggtccgccacagccctccgccctccccctcgccacgcttattggccggagcggcggcgctcgccgggtaggcggtggcggcgtccctcccttgcgccggccctcaagaggcgacgaggatgcgaccgcctccctgcgccccgcccctccggctagctcgctggctcccggctcctcccgacgtctcctacctcctcacggctcttcccggcgctctcctggctcccttctgccccagctccgtctcggcggcggcgggcagttgcagtggtgcagaatggctgacctcagtcttgcagatgcattaacagaaccatctccagacattgagggagagataaagcgggacttcattgccacactagaggcagaggcctttgatgatgttgtgggagaaactgttggaaaaacagactatattcctctcctggatgttgatgagaaaaccgggaactcagagtcaaagaagaaaccgtgctcagaaactagccagattgaagatactccatcttctaaaccaacactcctagccaatggtggtcatggagtagaagggagcgatactacagggtctccaactgaattccttgaagagaaaatggcctaccaggaatacccaaatagccagaactggccagaagataccaacttttgtttccaacctgagcaagtggtcgatcctatccagactgatccctttaagatgtaccatgatgatgacctggcagatttggtctttccctccagtgcgacagctgatacttcaatatttgcaggacaaaatgatcccttgaaagacagttacggtatgtctccctgcaacacagctgttgtacctcaggggtggtctgtggaagccttaaactctccacactcagagtcctttgtttccccagaggctgttgcagaacctcctcagccaacggcagttcccttagagctagccaaggagatagaaatggcatcagaagagaggccaccagcacaagcattggaaataatgatgggactgaagactactgacatggcaccatctaaagaaacagagatggccctcgccaaggacatggcactagctacaaaaaccgaggtggcattggctaaagatatggaatcacccaccaaattagatgtgacactggccaaggacatgcagccatccatggaatcagatatggccctagtcaaggacatggaactacccacagaaaaagaagtggccctggttaaggatgtcagatggcccacagaaacagatgtatcttcagccaagaatgtggtactgcccacagaaacagaggtagccccagccaaggatgtgacactgttgaaagaaacagagagggcatctcctataaaaatggacttagccccttccaaggacatgggaccacccaaagaaaacaagaaagaaacagagagggcatctcctataaaaatggacttggctccttccaaggacatgggaccacccaaagaaaacaagatagtcccagccaaggatttggtattactctcagaaatagaggtggcacaggctaatgacattatatcatccacagaaatatcctctgctgagaaggtggctttgtcctcagaaacagaggtagccctggccagggacatgacactgcccccggaaaccaacgtgatcttgaccaaggataaagcactacctttagaagcagaggtggccccagtcaaggacatggctcaactcccagaaacagaaatagccccggccaaggatgtggctccgtccacagtaaaagaagtgggcttgttgaaggacatgtctccactatcagaaacagaaatggctctgggcaaggatgtgactccacctccagaaacagaagtagttctcatcaagaacgtatgtctgcctccagaaatggaggtggccctgactgaggatcaggtcccagccctcaaaacagaagcacccctggctaaggatggggttctgaccctggccaacaatgtgactccagccaaagatgttccaccactctcagaaacagaggcaacaccagttccaattaaagacatggaaattgcacaaacacaaaaaggaataagtgaggattcccatttagaatctctgcaggatgtggggcagtcagctgcacctactttcatgatttcaccagaaaccgtcacaggaacggggaaaaagtgcagcttgccggccgaggaggattctgtgttagaaaaactaggggaaaggaaaccatgcaacagtcaaccttctgagctttcttcagagacctcaggaatagccaggccagaagaaggaaggcctgtggtgagtgggacaggaaatgacatcaccaccccaccgaacaaggagctcccaccaagcccagagaagaaaacaaagcctttggccaccactcaacctgcaaagacttcaacatcgaaagccaaaacacagcccacttctctccctaagcagccagctcccaccaccattggtgggttgaataaaaaacccatgagccttgcttcaggcttagtgccagctgccccacccaaacgccctgccgtcgcctctgccaggccttccatcttaccttcaaaagacgtgaagccaaagcccattgcagatgcaaaggctcctgagaagcgggcctcaccatccaagccagcttctgccccagcctccagatctgggtccaagagcactcagactgttgcaaaaaccacaacagctgctgctgttgcctcaactggcccaagcagtaggagcccctccacgctcctgcccaagaagcccactgccattaagactgagggaaaacctgcagaagtcaagaagatgactgcaaagtctgtaccagctgacttgagtcgcccaaagagcacctccaccagttccatgaagaaaaccaccactctcagtgggacagcccccgctgcaggggtggttcccagccgagtcaaggccacacccatgccctcccggccctccacaactcctttcatagacaagaagcccacctcggccaaacccagctccaccaccccccggctcagccgcctggccaccaatacttctgctcctgatctgaagaatgtccgctccaaggttggctccacggaaaacatcaagcatcagcctggaggaggccgggccaaagtagagaaaaaaacagaggcagctgctacaacccgaaagcctgaatctaatgcagtcactaaaacagccggcccaattgcaagtgcacagaaacaacctgcggggaaagtccagatagtctccaaaaaagtgagctacagccatattcagtccaagtgtggttccaaggacaatattaagcatgtccctggaggtggtaatgttcagattcagaacaagaaagtggacatctctaaggtctcctccaagtgtgggtctaaggctaacatcaagcacaagcctggtggaggagatgtcaagattgaaagtcagaagttgaacttcaaggagaaggcccaggccaaggtgggatccctcgataatgtgggccacctacctgcaggaggtgctgtgaagactgagggcggtggcagcgaggctcctctgtgtccgggtccccctgctggggaggagccggccatctctgaggcagcgcctgaagctggcgcccccacttcagccagtggcctcaatggccaccccaccctgtcagggggtggtgaccaaagggaggcccagaccttggacagccagatccaggagacaagcatctaatgatgacattctggtctcgtcttccgtctcccccgtgttcccctcttgtctcccctgttcccctctcccttccctcctcccatgtcactgcagattgagacctacaggctgacgttccgggcaaatgccagggcccgcaccgaccacggggccgacattgtctcccgccccccacacttccctggcggccccaactcgggctcccgggtccttggccccctttcccgggctgtccactagaccagtgagcgcttgggcgccgtgctgggcagcccgctaggctcgccttccctcctgctttgcgtgcccggggcagcagcagccctgccccacacctcctctcactccccagcctggttggttttgccattttgttgtgtgtatgctgcttttcttttctaaccaagaggctggttttggcatctctgtcccattccctgggatctggtggtcagccctaggataaaaagccagggctggagaacaagaaagggccaggagatggaattccttcaggccggcacccacaccctaggacatgtaagccctcatgtccaagggagcctcatgcagatagtaggaaatcaggtctggaaatttaaaaataaaaggcatgagactaaggctatctgcttcccttatgccctgactggagaggggagggaggagaggcaaggcccacagagggcatcccagctaggccttgggatggctgcagtgaggagaaatcccgggaactgtattgacacaaagattcttattgcacttgtattttttgtattaaagtttgcatggtttctaataaaggattcaaacataagtttgtagtgaaatggcctgggagattccaagggcttctctggagggggattggctgcagtgtagatttgcctctgaggaggctgccccagacttggcctcctcatgccccctcctgacctctgcccttctctggtcctggcatccctggagaaggtaggggtcttgacctaagtttagatttgatctccatgtgcagggaggctgtcctgggcctgacaggtcctccccctttctgaggtagcagtgccttgtggaggtttgacaccatgtccctagctccccaagcacacaccaggaaactgcaggggctcacggaggaagtgctgcctgggccagggggaccagctttcctccgtagagaccatgtgcagaacacttctgctgtgccaagaacatgagggagccagtgttttgtcagcaggaagaaagggcctgctgggatgaaagtgggaaggaaacagggttgcgtagtcaggagacacctcaggggcaacagcacaggcccagagtacctgctgcctccactgcgtctgtcctggggtcatgaggatgctgaggttgacgacaggttccaggtcctttcactcctttggccaaaggttgggggtaggtggcccaagtggcgtgctctctaggtagacaacaggagtggtcagagttccctcaaaggatcctccactccagagcacctgagaaggccgggaccagaggccctgtgtgatgtgtactccgcagctgtttggggtgggacatttctgtacttctcgatttgcttatggctcagccattacctgtgtcagtccatgattctgttgtaacagttttaagagtaaataaataaagctgcctgatgtcccatca

SEQ ID NO: 88778 - DNA, 5470 bp, Homo sapiens
agcggggtctgggctcccagactctgagagagagcgacggccatcatagaacagcgagggcagtcgatcggcctgcggtccgcttcggcattcgcaggccgcaggcgggaggctagagcccccaggcgcactcgccccaaccgcccgcggctcgggcagctctgcagagacgtcgtggcggcagggccagcacccattggtccgccacagccctccgccctccccctcgccacgcttattggccggagcggcggcgctcgccgggtaggcggtggcggcgtccctcccttgcgccggccctcaagaggcgacgaggatgcgaccgcctccctgcgccccgcccctccggctagctcgctggctcccggctcctcccgacgtctcctacctcctcacggctcttcccggcgctctcctggctcccttctgccccagctccgtctcggcggcggcgggcagttgcagtggtgcagaatggctgacctcagtcttgcagatgcattaacagaaccatctccagacattgagggagagataaagcgggacttcattgccacactagaggcagaggcctttgatgatgttgtgggagaaactgttggaaaaacagactatattcctctcctggatgttgatgagaaaaccgggaactcagagtcaaagaagaaaccgtgctcagaaactagccagattgaagatactccatcttctaaaccaacactcctagccaatggtggtcatggagtagaagggagcgatactacagggtctccaactgaattccttgaagagaaaatggcctaccaggaatacccaaatagccagaactggccagaagataccaacttttgtttccaacctgagcaagtggtcgatcctatccagactgatccctttaagatgtaccatgatgatgacctggcagatttggtctttccctccagtgcgacagctgatacttcaatatttgcaggacaaaatgatcccttgaaagacagttacggtatgtctccctgcaacacagctgttgtacctcaggggtggtctgtggaagccttaaactctccacactcagagtcctttgtttccccagaggctgttgcagaacctcctcagccaacggcagttcccttagagctagccaaggagatagaaatggcatcagaagagaggccaccagcacaagcattggaaataatgatgggactgaagactactgacatggcaccatctaaagaaacagagatggccctcgccaaggacatggcactagctacaaaaaccgaggtggcattggctaaagatatggaatcacccaccaaattagatgtgacactggccaaggacatgcagccatccatggaatcagatatggccctagtcaaggacatggaactacccacagaaaaagaagtggccctggttaaggatgtcagatggcccacagaaacagatgtatcttcagccaagaatgtggtactgcccacagaaacagaggtagccccagccaaggatgtgacactgttgaaagaaacagagagggcatctcctataaaaatggacttagccccttccaaggacatgggaccacccaaagaaaacaagaaagaaacagagagggcatctcctataaaaatggacttggctccttccaaggacatgggaccacccaaagaaaacaagatagtcccagccaaggatttggtattactctcagaaatagaggtggcacaggctaatgacattatatcatccacagaaatatcctctgctgagaaggtggctttgtcctcagaaacagaggtagccctggccagggacatgacactgcccccggaaaccaacgtgatcttgaccaaggataaagcactacctttagaagcagaggtggccccagtcaaggacatggctcaactcccagaaacagaaatagccccggccaaggatgtggctccgtccacagtaaaagaagtgggcttgttgaaggacatgtctccactatcagaaacagaaatggctctgggcaaggatgtgactccacctccagaaacagaagtagttctcatcaagaacgtatgtctgcctccagaaatggaggtggccctgactgaggatcaggtcccagccctcaaaacagaagcacccctggctaaggatggggttctgaccctggccaacaatgtgactccagccaaagatgttccaccactctcagaaacagaggcaacaccagttccaattaaagacatggaaattgcacaaacacaaaaaggaataagtgaggattcccatttagaatctctgcaggatgtggggcagtcagctgcacctactttcatgatttcaccagaaaccgtcacaggaacggggaaaaagtgcagcttgccggccgaggaggattctgtgttagaaaaactaggggaaaggaaaccatgcaacagtcaaccttctgagctttcttcagagacctcaggaatagccaggccagaagaaggaaggcctgtggtgagtgggacaggaaatgacatcaccaccccaccgaacaaggagctcccaccaagcccagagaagaaaacaaagcctttggccaccactcaacctgcaaagacttcaacatcgaaagccaaaacacagcccacttctctccctaagcagccagctcccaccaccattggtgggttgaataaaaaacccatgagccttgcttcaggcttagtgccagctgccccacccaaacgccctgccgtcgcctctgccaggccttccatcttaccttcaaaagacgtgaagccaaagcccattgcagatgcaaaggctcctgagaagcgggcctcaccatccaagccagcttctgccccagcctccagatctgggtccaagagcactcagactgttgcaaaaaccacaacagctgctgctgttgcctcaactggcccaagcagtaggagcccctccacgctcctgcccaagaagcccactgccattaagactgagggaaaacctgcagaagtcaagaagatgactgcaaagtctgtaccagctgacttgagtcgcccaaagagcacctccaccagttccatgaagaaaaccaccactctcagtgggacagcccccgctgcaggggtggttcccagccgagtcaaggccacacccatgccctcccggccctccacaactcctttcatagacaagaagcccacctcggccaaacccagctccaccaccccccggctcagccgcctggccaccaatacttctgctcctgatctgaagaatgtccgctccaaggttggctccacggaaaacatcaagcatcagcctggaggaggccgggccaaagtagagaaaaaaacagaggcagctgctacaacccgaaagcctgaatctaatgcagtcactaaaacagccggcccaattgcaagtgcacagaaacaacctgcggggaaagtccagatagtctccaaaaaagtgagctacagccatattcagtccaagtgtggttccaaggacaatattaagcatgtccctggaggtggtaatgttcagattcagaacaagaaagtggacatctctaaggtctcctccaagtgtgggtctaaggctaacatcaagcacaagcctggtggaggagatgtcaagattgaaagtcagaagttgaacttcaaggagaaggcccaggccaaggtgggatccctcgataatgtgggccacctacctgcaggaggtgctgtgaagactgagggcggtggcagcgaggctcctctgtgtccgggtccccctgctggggaggagccggccatctctgaggcagcgcctgaagctggcgcccccacttcagccagtggcctcaatggccaccccaccctgtcagggggtggtgaccaaagggaggcccagaccttggacagccagatccaggagacaagcatctaatgatgacattctggtctcgtcttccgtctcccccgtgttcccctcttgtctcccctgttcccctctcccttccctcctcccatgtcactgcagattgagacctacaggctgacgttccgggcaaatgccagggcccgcaccgaccacggggccgacattgtctcccgccccccacacttccctggcggccccaactcgggctcccgggtccttggccccctttcccgggctgtccactagaccagtgagcgcttgggcgccgtgctgggcagcccgctaggctcgccttccctcctgctttgcgtgcccggggcagcagcagccctgccccacacctcctctcactccccagcctgggcccatctccctgctttggtcttgccccatcactgcgccactgctccgtggaggaggttgggagggggttggggtggttgaggctaagttgggatctaggagaggagaaccagattctatcctcatctttttttggttctttggtccaaacccaaaagaaactgacatgccctcccttctccgggcatcccagctaggccttgggatggctgcagtgaggagaaatcccgggaactgtattgacacaaagattcttattgcacttgtattttttgtattaaagtttgcatggtttctaataaaggattcaaacataagtttgtagtgaaatggcctgggagattccaagggcttctctggagggggattggctgcagtgtagatttgcctctgaggaggctgccccagacttggcctcctcatgccccctcctgacctctgcccttctctggtcctggcatccctggagaaggtaggggtcttgacctaagtttagatttgatctccatgtgcagggaggctgtcctgggcctgacaggtcctccccctttctgaggtagcagtgccttgtggaggtttgacaccatgtccctagctccccaagcacacaccaggaaactgcaggggctcacggaggaagtgctgcctgggccagggggaccagctttcctccgtagagaccatgtgcagaacacttctgctgtgccaagaacatgagggagccagtgttttgtcagcaggaagaaagggcctgctgggatgaaagtgggaaggaaacagggttgcgtagtcaggagacacctcaggggcaacagcacaggcccagagtacctgctgcctccactgcgtctgtcctggggtcatgaggatgctgaggttgacgacaggttccaggtcctttcactcctttggccaaaggttgggggtaggtggcccaagtggcgtgctctctaggtagacaacaggagtggtcagagttccctcaaaggatcctccactccagagcacctgagaaggccgggaccagaggccctgtgtgatgtgtactccgcagctgtttggggtgggacatttctgtacttctcgatttgcttatggctcagccattacctgtgtcagtccatgattctgttgtaacagttttaagagtaaataaataaagctgcctgatgtcccatca

SEQ ID NO: 88779 - DNA, 4607 bp, Homo sapiens
agcggggtctgggctcccagactctgagagagagcgacggccatcatagaacagcgagggcagtcgatcggcctgcggtccgcttcggcattcgcaggccgcaggcgggaggctagagcccccaggcgcactcgccccaaccgcccgcggctcgggcagctctgcagagacgtcgtggcggcagggccagcacccattggtccgccacagccctccgccctccccctcgccacgcttattggccggagcggcggcgctcgccgggtaggcggtggcggcgtccctcccttgcgccggccctcaagaggcgacgaggatgcgaccgcctccctgcgccccgcccctccggctagctcgctggctcccggctcctcccgacgtctcctacctcctcacggctcttcccggcgctctcctggctcccttctgccccagctccgtctcggcggcggcgggcagttgcagtggtgcagaatggctgacctcagtcttgcagatgcattaacagaaccatctccagacattgagggagagataaagcgggacttcattgccacactagaggcagaggcctttgatgatgttgtgggagaaactgttggaaaaacagactatattcctctcctggatgttgatgagaaaaccgggaactcagagtcaaagaagaaaccgtgctcagaaactagccagattgaagatactccatcttctaaaccaacactcctagccaatggtggtcatggagtagaagggagcgatactacagggtctccaactgaattccttgaagagaaaatggcctaccaggaatacccaaatagccagaactggccagaagataccaacttttgtttccaacctgagcaagtggtcgatcctatccagactgatccctttaagatgtaccatgatgatgacctggcagatttggtctttccctccagtgcgacagctgatacttcaatatttgcaggacaaaatgatcccttgaaagacagttacggtatgtctccctgcaacacagctgttgtacctcaggggtggtctgtggaagccttaaactctccacactcagagtcctttgtttccccagaggctgttgcagaacctcctcagccaacggcagttcccttagagctagccaaggagatagaaatggcatcagaagagaggccaccagcacaagcattggaaataatgatgggactgaagactactgacatggcaccatctaaagaaacagagatggccctcgccaaggacatggcactagctacaaaaaccgaggtggcattggctaaagatatggaatcacccaccaaattagatgtgacactggccaaggacatgcagccatccatggaatcagatatggccctagtcaaggacatggaactacccacagaaaaagaagtggccctggttaaggatgtcagatggcccacagaaacagatgtatcttcagccaagaatgtggtactgcccacagaaacagaggtagccccagccaaggatgtgacactgttgaaagaaacagagagggcatctcctataaaaatggacttagccccttccaaggacatgggaccacccaaagaaaacaagaaagaaacagagagggcatctcctataaaaatggacttggctccttccaaggacatgggaccacccaaagaaaacaagatagtcccagccaaggatttggtattactctcagaaatagaggtggcacaggctaatgacattatatcatccacagaaatatcctctgctgagaaggtggctttgtcctcagaaacagaggtagccctggccagggacatgacactgcccccggaaaccaacgtgatcttgaccaaggataaagcactacctttagaagcagaggtggccccagtcaaggacatggctcaactcccagaaacagaaatagccccggccaaggatgtggctccgtccacagtaaaagaagtgggcttgttgaaggacatgtctccactatcagaaacagaaatggctctgggcaaggatgtgactccacctccagaaacagaagtagttctcatcaagaacgtatgtctgcctccagaaatggaggtggccctgactgaggatcaggtcccagccctcaaaacagaagcacccctggctaaggatggggttctgaccctggccaacaatgtgactccagccaaagatgttccaccactctcagaaacagaggcaacaccagttccaattaaagacatggaaattgcacaaacacaaaaaggaataagtgaggattcccatttagaatctctgcaggatgtggggcagtcagctgcacctactttcatgatttcaccagaaaccgtcacaggaacggggaaaaagtgcagcttgccggccgaggaggattctgtgttagaaaaactaggggaaaggaaaccatgcaacagtcaaccttctgagctttcttcagagacctcaggaatagccaggccagaagaaggaaggcctgtggtgagtgggacaggaaatgacatcaccaccccaccgaacaaggagctcccaccaagcccagagaagaaaacaaagcctttggccaccactcaacctgcaaagacttcaacatcgaaagccaaaacacagcccacttctctccctaagcagccagctcccaccaccattggtgggttgaataaaaaacccatgagccttgcttcaggcttagtgccagctgccccacccaaacgccctgccgtcgcctctgccaggccttccatcttaccttcaaaagacgtgaagccaaagcccattgcagatgcaaaggctcctgagaagcgggcctcaccatccaagccagcttctgccccagcctccagatctgggtccaagagcactcagactgttgcaaaaaccacaacagctgctgctgttgcctcaactggcccaagcagtaggagcccctccacgctcctgcccaagaagcccactgccattaagactgagggaaaacctgcagaagtcaagaagatgactgcaaagtctgtaccagctgacttgagtcgcccaaagagcacctccaccagttccatgaagaaaaccaccactctcagtgggacagcccccgctgcaggggtggttcccagccgagtcaaggccacacccatgccctcccggccctccacaactcctttcatagacaagaagcccacctcggccaaacccagctccaccaccccccggctcagccgcctggccaccaatacttctgctcctgatctgaagaatgtccgctccaaggttggctccacggaaaacatcaagcatcagcctggaggaggccgggccaaagtagagaaaaaaacagaggcagctgctacaacccgaaagcctgaatctaatgcagtcactaaaacagccggcccaattgcaagtgcacagaaacaacctgcggggaaagtccagatagtctccaaaaaagtgagctacagccatattcagtccaagtgtggttccaaggacaatattaagcatgtccctggaggtggtaatgttcagattcagaacaagaaagtggacatctctaaggtctcctccaagtgtgggtctaaggctaacatcaagcacaagcctggtggaggagatgtcaagattgaaagtcagaagttgaacttcaaggagaaggcccaggccaaggtgggatccctcgataatgtgggccacctacctgcaggaggtgctgtgaagactgagggcggtggcagcgaggctcctctgtgtccgggtccccctgctggggaggagccggccatctctgaggcagcgcctgaagctggcgcccccacttcagccagtggcctcaatggccaccccaccctgtcagggggtggtgaccaaagggaggcccagaccttggacagccagatccaggagacaagcatctaatgatgacattctggtctcgtcttccgtctcccccgtgttcccctcttgtctcccctgttcccctctcccttccctcctcccatgtcactgcagattgagacctacaggctgacgttccgggcaaatgccagggcccgcaccgaccacggggccgacattgtctcccgccccccacacttccctggcggccccaactcgggctcccgggtccttggccccctttcccgggctgtccactagaccagtgagcgcttgggcgccgtgctgggcagcccgctaggctcgccttccctcctgctttgcgtgcccggggcagcagcagccctgccccacacctcctctcactccccagcctgggcccatctccctgctttggtcttgccccatcactgcgccactgctccgtggaggaggttgggagggggttggggtggttgaggctaagttgggatctaggagaggagaaccagattctatcctcatctttttttggttctttggtccaaacccaaaagaaactgacatgccctcccttctccgggcatcccagctaggccttgggatggctgcagtgaggagaaatcccgggaactgtattgacacaaagattcttattgcacttgtattttttgtattaaagtttgcatggtttctaataaaggattcaaacataa

SEQ ID NO: 88780 - DNA, 3858 bp, Homo sapiens
agcggggtctgggctcccagactctgagagagagcgacggccatcatagaacagcgagggcagtcgatcggcctgcggtccgcttcggcattcgcaggccgcaggcgggaggctagagcccccaggcgcactcgccccaaccgcccgcggctcgggcagctctgcagagacgtcgtggcggcagggccagcacccattggtccgccacagccctccgccctccccctcgccacgcttattggccggagcggcggcgctcgccgggtaggcggtggcggcgtccctcccttgcgccggccctcaagaggcgacgaggatgcgaccgcctccctgcgccccgcccctccggctagctcgctggctcccggctcctcccgacgtctcctacctcctcacggctcttcccggcgctctcctggctcccttctgccccagctccgtctcggcggcggcgggcagttgcagtggtgcagaatggctgacctcagtcttgcagatgcattaacagaaccatctccagacattgagggagagataaagcgggacttcattgccacactagaggcagaggcctttgatgatgttgtgggagaaactgttggaaaaacagactatattcctctcctggatgttgatgagaaaaccgggaactcagagtcaaagaagaaaccgtgctcagaaactagccagattgaagatactccatcttctaaaccaacactcctagccaatggtggtcatggagtagaagggagcgatactacagggtctccaactgaattccttgaagagaaaatggcctaccaggaatacccaaatagccagaactggccagaagataccaacttttgtttccaacctgagcaagtggtcgatcctatccagactgatccctttaagatgtaccatgatgatgacctggcagatttggtctttccctccagtgcgacagctgatacttcaatatttgcaggacaaaatgatcccttgaaagacagttacggtatgtctccctgcaacacagctgttgtacctcaggggtggtctgtggaagccttaaactctccacactcagagtcctttgtttccccagaggctgttgcagaacctcctcagccaacggcagttcccttagagctagccaaggagatagaaatggcatcagaagagaggccaccagcacaagcattggaaataatgatgggactgaagactactgacatggcaccatctaaagaaacagagatggccctcgccaaggacatggcactagctacaaaaaccgaggtggcattggctaaagatatggaatcacccaccaaattagatgtgacactggccaaggacatgcagccatccatggaatcagatatggccctagtcaaggacatggaactacccacagaaaaagaagtggccctggttaaggatgtcagatggcccacagaaacagatgtatcttcagccaagaatgtggtactgcccacagaaacagaggtagccccagccaaggatgtgacactgttgaaagaaacagagagggcatctcctataaaaatggacttagccccttccaaggacatgggaccacccaaagaaaacaagaaagaaacagagagggcatctcctataaaaatggacttggctccttccaaggacatgggaccacccaaagaaaacaagatagtcccagccaaggatttggtattactctcagaaatagaggtggcacaggctaatgacattatatcatccacagaaatatcctctgctgagaaggtggctttgtcctcagaaacagaggtagccctggccagggacatgacactgcccccggaaaccaacgtgatcttgaccaaggataaagcactacctttagaagcagaggtggccccagtcaaggacatggctcaactcccagaaacagaaatagccccggccaaggatgtggctccgtccacagtaaaagaagtgggcttgttgaaggacatgtctccactatcagaaacagaaatggctctgggcaaggatgtgactccacctccagaaacagaagtagttctcatcaagaacgtatgtctgcctccagaaatggaggtggccctgactgaggatcaggtcccagccctcaaaacagaagcacccctggctaaggatggggttctgaccctggccaacaatgtgactccagccaaagatgttccaccactctcagaaacagaggcaacaccagttccaattaaagacatggaaattgcacaaacacaaaaaggaataagtgaggattcccatttagaatctctgcaggatgtggggcagtcagctgcacctactttcatgatttcaccagaaaccgtcacaggaacggggaaaaagtgcagcttgccggccgaggaggattctgtgttagaaaaactaggggaaaggaaaccatgcaacagtcaaccttctgagctttcttcagagacctcaggaatagccaggccagaagaaggaaggcctgtggtgagtgggacaggaaatgacatcaccaccccaccgaacaaggagctcccaccaagcccagagaagaaaacaaagcctttggccaccactcaacctgcaaagacttcaacatcgaaagccaaaacacagcccacttctctccctaagcagccagctcccaccaccattggtgggttgaataaaaaacccatgagccttgcttcaggcttagtgccagctgccccacccaaacgccctgccgtcgcctctgccaggccttccatcttaccttcaaaagacgtgaagccaaagcccattgcagatgcaaaggctcctgagaagcgggcctcaccatccaagccagcttctgccccagcctccagatctgggtccaagagcactcagactgttgcaaaaaccacaacagctgctgctgttgcctcaactggcccaagcagtaggagcccctccacgctcctgcccaagaagcccactgccattaagactgagggaaaacctgcagaagtcaagaagatgactgcaaagtctgtaccagctgacttgagtcgcccaaagagcacctccaccagttccatgaagaaaaccaccactctcagtgggacagcccccgctgcaggggtggttcccagccgagtcaaggccacacccatgccctcccggccctccacaactcctttcatagacaagaagcccacctcggccaaacccagctccaccaccccccggctcagccgcctggccaccaatacttctgctcctgatctgaagaatgtccgctccaaggttggctccacggaaaacatcaagcatcagcctggaggaggccgggccaaagtagagaaaaaaacagaggcagctgctacaacccgaaagcctgaatctaatgcagtcactaaaacagccggcccaattgcaagtgcacagaaacaacctgcggggaaagtccagatagtctccaaaaaagtgagctacagccatattcagtccaagtgtggttccaaggacaatattaagcatgtccctggaggtggtaatgttcagattcagaacaagaaagtggacatctctaaggtctcctccaagtgtgggtctaaggctaacatcaagcacaagcctggtggaggagatgtcaagattgaaagtcagaagttgaacttcaaggagaaggcccaggccaaggtgggatccctcgataatgtgggccacctacctgcaggaggtgctgtgaaggtagcgagtgggtcactggggagacacagctggggaggggtgggaactatgcagttagggtcagggtcctcacaggtaggcacctgtcaccgcccctcagtctcttcaggagtcatgtcttca

SEQ ID NO: 88781 - DNA, 4033 bp, Homo sapiens
agcggggtctgggctcccagactctgagagagagcgacggccatcatagaacagcgagggcagtcgatcggcctgcggtccgcttcggcattcgcaggccgcaggcgggaggctagagcccccaggcgcactcgccccaaccgcccgcggctcgggcagctctgcagagacgtcgtggcggcagggccagcacccattggtccgccacagccctccgccctccccctcgccacgcttattggccggagcggcggcgctcgccgggtaggcggtggcggcgtccctcccttgcgccggccctcaagaggcgacgaggatgcgaccgcctccctgcgccccgcccctccggctagctcgctggctcccggctcctcccgacgtctcctacctcctcacggctcttcccggcgctctcctggctcccttctgccccagctccgtctcggcggcggcgggcagttgcagtggtgcagaatggctgacctcagtcttgcagatgcattaacagaaccatctccagacattgagggagagataaagcgggacttcattgccacactagaggcagaggcctttgatgatgttgtgggagaaactgttggaaaaacagactatattcctctcctggatgttgatgagaaaaccgggaactcagagtcaaagaagaaaccgtgctcagaaactagccagattgaagatactccatcttctaaaccaacactcctagccaatggtggtcatggagtagaagggagcgatactacagggtctccaactgaattccttgaagagaaaatggcctaccaggaatacccaaatagccagaactggccagaagataccaacttttgtttccaacctgagcaagtggtcgatcctatccagactgatccctttaagatgtaccatgatgatgacctggcagatttggtctttccctccagtgcgacagctgatacttcaatatttgcaggacaaaatgatcccttgaaagacagttacggtatgtctccctgcaacacagctgttgtacctcaggggtggtctgtggaagccttaaactctccacactcagagtcctttgtttccccagaggctgttgcagaacctcctcagccaacggcagttcccttagagctagccaaggagatagaaatggcatcagaagagaggccaccagcacaagcattggaaataatgatgggactgaagactactgacatggcaccatctaaagaaacagagatggccctcgccaaggacatggcactagctacaaaaaccgaggtggcattggctaaagatatggaatcacccaccaaattagatgtgacactggccaaggacatgcagccatccatggaatcagatatggccctagtcaaggacatggaactacccacagaaaaagaagtggccctggttaaggatgtcagatggcccacagaaacagatgtatcttcagccaagaatgtggtactgcccacagaaacagaggtagccccagccaaggatgtgacactgttgaaagaaacagagagggcatctcctataaaaatggacttagccccttccaaggacatgggaccacccaaagaaaacaagaaagaaacagagagggcatctcctataaaaatggacttggctccttccaaggacatgggaccacccaaagaaaacaagatagtcccagccaaggatttggtattactctcagaaatagaggtggcacaggctaatgacattatatcatccacagaaatatcctctgctgagaaggtggctttgtcctcagaaacagaggtagccctggccagggacatgacactgcccccggaaaccaacgtgatcttgaccaaggataaagcactacctttagaagcagaggtggccccagtcaaggacatggctcaactcccagaaacagaaatagccccggccaaggatgtggctccgtccacagtaaaagaagtgggcttgttgaaggacatgtctccactatcagaaacagaaatggctctgggcaaggatgtgactccacctccagaaacagaagtagttctcatcaagaacgtatgtctgcctccagaaatggaggtggccctgactgaggatcaggtcccagccctcaaaacagaagcacccctggctaaggatggggttctgaccctggccaacaatgtgactccagccaaagatgttccaccactctcagaaacagaggcaacaccagttccaattaaagacatggaaattgcacaaacacaaaaaggaataagtgaggattcccatttagaatctctgcaggatgtggggcagtcagctgcacctactttcatgatttcaccagaaaccgtcacaggaacggggaaaaagtgcagcttgccggccgaggaggattctgtgttagaaaaactaggggaaaggaaaccatgcaacagtcaaccttctgagctttcttcagagacctcaggaatagccaggccagaagaaggaaggcctgtggtgagtgggacaggaaatgacatcaccaccccaccgaacaaggagctcccaccaagcccagagaagaaaacaaagcctttggccaccactcaacctgcaaagacttcaacatcgaaagccaaaacacagcccacttctctccctaagcagccagctcccaccaccattggtgggttgaataaaaaacccatgagccttgcttcaggcttagtgccagctgccccacccaaacgccctgccgtcgcctctgccaggccttccatcttaccttcaaaagacgtgaagccaaagcccattgcagatgcaaaggctcctgagaagcgggcctcaccatccaagccagcttctgccccagcctccagatctgggtccaagagcactcagactgttgcaaaaaccacaacagctgctgctgttgcctcaactggcccaagcagtaggagcccctccacgctcctgcccaagaagcccactgccattaagactgagggaaaacctgcagaagtcaagaagatgactgcaaagtctgtaccagctgacttgagtcgcccaaagagcacctccaccagttccatgaagaaaaccaccactctcagtgggacagcccccgctgcaggggtggttcccagccgagtcaaggccacacccatgccctcccggccctccacaactcctttcatagacaagaagcccacctcggccaaacccagctccaccaccccccggctcagccgcctggccaccaatacttctgctcctgatctgaagaatgtccgctccaaggttggctccacggaaaacatcaagcatcagcctggaggaggccgggccaaagtagagaaaaaaacagaggcagctgctacaacccgaaagcctgaatctaatgcagtcactaaaacagccggcccaattgcaagtgcacagaaacaacctgcggggaaagtccagatagtctccaaaaaagtgagctacagccatattcagtccaagtgtggttccaaggacaatattaagcatgtccctggaggtggtaatgttcagattcagaacaagaaagtggacatctctaaggtctcctccaagtgtgggtctaaggctaacatcaagcacaagcctggtgagtggtgcctcccttgcccactgggtctccagggtatgtcgtcctgccatgggtcagctgggcagccagctggctggcaagggtttcatctctgtgcctttagcatcccatgaagactacccaggacaccacagtcctcattctgtcagggagcaggagttcgggtgctaacctctaagtggaggaggagcagtttcttacagcagccatctgcacaggcattctcttgagtacctactgtgtgtgtggaactattgagctaggcctggggaagtggtgcactctgagctgagaacctggattggctctaaacgaggattacagaagctactgctgaaggagctgtatagcagggcagtgttcaggtcccacctatcagatgcaggagcaaagggtgctcccaaccag

SEQ ID NO: 88782 - DNA, 3527 bp, Homo sapiens
agcggggtctgggctcccagactctgagagagagcgacggccatcatagaacagcgagggcagtcgatcggcctgcggtccgcttcggcattcgcaggccgcaggcgggaggctagagcccccaggcgcactcgccccaaccgcccgcggctcgggcagctctgcagagacgtcgtggcggcagggccagcacccattggtccgccacagccctccgccctccccctcgccacgcttattggccggagcggcggcgctcgccgggtaggcggtggcggcgtccctcccttgcgccggccctcaagaggcgacgaggatgcgaccgcctccctgcgccccgcccctccggctagctcgctggctcccggctcctcccgacgtctcctacctcctcacggctcttcccggcgctctcctggctcccttctgccccagctccgtctcggcggcggcgggcagttgcagtggtgcagaatggctgacctcagtcttgcagatgcattaacagaaccatctccagacattgagggagagataaagcgggacttcattgccacactagaggcagaggcctttgatgatgttgtgggagaaactgttggaaaaacagactatattcctctcctggatgttgatgagaaaaccgggaactcagagtcaaagaagaaaccgtgctcagaaactagccagattgaagatactccatcttctaaaccaacactcctagccaatggtggtcatggagtagaagggagcgatactacagggtctccaactgaattccttgaagagaaaatggcctaccaggaatacccaaatagccagaactggccagaagataccaacttttgtttccaacctgagcaagtggtcgatcctatccagactgatccctttaagatgtaccatgatgatgacctggcagatttggtctttccctccagtgcgacagctgatacttcaatatttgcaggacaaaatgatcccttgaaagacagttacggtatgtctccctgcaacacagctgttgtacctcaggggtggtctgtggaagccttaaactctccacactcagagtcctttgtttccccagaggctgttgcagaacctcctcagccaacggcagttcccttagagctagccaaggagatagaaatggcatcagaagagaggccaccagcacaagcattggaaataatgatgggactgaagactactgacatggcaccatctaaagaaacagagatggccctcgccaaggacatggcactagctacaaaaaccgaggtggcattggctaaagatatggaatcacccaccaaattagatgtgacactggccaaggacatgcagccatccatggaatcagatatggccctagtcaaggacatggaactacccacagaaaaagaagtggccctggttaaggatgtcagatggcccacagaaacagatgtatcttcagccaagaatgtggtactgcccacagaaacagaggtagccccagccaaggatgtgacactgttgaaagaaacagagagggcatctcctataaaaatggacttagccccttccaaggacatgggaccacccaaagaaaacaagaaagaaacagagagggcatctcctataaaaatggacttggctccttccaaggacatgggaccacccaaagaaaacaagatagtcccagccaaggatttggtattactctcagaaatagaggtggcacaggctaatgacattatatcatccacagaaatatcctctgctgagaaggtggctttgtcctcagaaacagaggtagccctggccagggacatgacactgcccccggaaaccaacgtgatcttgaccaaggataaagcactacctttagaagcagaggtggccccagtcaaggacatggctcaactcccagaaacagaaatagccccggccaaggatgtggctccgtccacagtaaaagaagtgggcttgttgaaggacatgtctccactatcagaaacagaaatggctctgggcaaggatgtgactccacctccagaaacagaagtagttctcatcaagaacgtatgtctgcctccagaaatggaggtggccctgactgaggatcaggtcccagccctcaaaacagaagcacccctggctaaggatggggttctgaccctggccaacaatgtgactccagccaaagatgttccaccactctcagaaacagaggcaacaccagttccaattaaagacatggaaattgcacaaacacaaaaaggaataagtgaggattcccatttagaatctctgcaggatgtggggcagtcagctgcacctactttcatgatttcaccagaaaccgtcacaggaacggggaaaaagtgcagcttgccggccgaggaggattctgtgttagaaaaactaggggaaaggaaaccatgcaacagtcaaccttctgagctttcttcagagacctcaggaatagccaggccagaagaaggaaggcctgtggtgagtgggacaggaaatgacatcaccaccccaccgaacaaggagctcccaccaagcccagagaagaaaacaaagcctttggccaccactcaacctgcaaagacttcaacatcgaaagccaaaacacagcccacttctctccctaagcagccagctcccaccaccattggtgggttgaataaaaaacccatgagccttgcttcaggcttagtgccagctgccccacccaaacgccctgccgtcgcctctgccaggccttccatcttaccttcaaaagacgtgaagccaaagcccattgcagatgcaaaggctcctgagaagcgggcctcaccatccaagccagcttctgccccagcctccagatctgggtccaagagcactcagactgttgcaaaaaccacaacagctgctgctgttgcctcaactggcccaagcagtaggagcccctccacgctcctgcccaagaagcccactgccattaagactgagggaaaacctgcagaagtcaagaagatgactgcaaagtctgtaccagctgacttgagtcgcccaaagagcacctccaccagttccatgaagaaaaccaccactctcagtgggacagcccccgctgcaggggtggttcccagccgagtcaaggccacacccatgccctcccggccctccacaactcctttcatagacaagaagcccacctcggccaaacccagctccaccaccccccggctcagccgcctggccaccaatacttctgctcctgatctgaagaatgtccgctccaaggccaaagtagagaaaaaaacagaggcagctgctacaacccgaaagcctgaatctaatgcagtcactaaaacagccggcccaattgcaagtgcacagaaacaacctgcggggaaagtccagatagtctccaaaaaagtgagctacagccatattcagtccaagtgtggttccaaggacaatattaagcatgtccctggaggtggtaattgtaagtataagctctggttagctggcatctg

SEQ ID NO: 88783 - DNA, 3005 bp, Homo sapiens
agcggggtctgggctcccagactctgagagagagcgacggccatcatagaacagcgagggcagtcgatcggcctgcggtccgcttcggcattcgcaggccgcaggcgggaggctagagcccccaggcgcactcgccccaaccgcccgcggctcgggcagctctgcagagacgtcgtggcggcagggccagcacccattggtccgccacagccctccgccctccccctcgccacgcttattggccggagcggcggcgctcgccgggtaggcggtggcggcgtccctcccttgcgccggccctcaagaggcgacgaggatgcgaccgcctccctgcgccccgcccctccggctagctcgctggctcccggctcctcccgacgtctcctacctcctcacggctcttcccggcgctctcctggctcccttctgccccagctccgtctcggcggcggcgggcagttgcagtggtgcagaatggctgacctcagtcttgcagatgcattaacagaaccatctccagacattgagggagagataaagcgggacttcattgccacactagaggcagaggcctttgatgatgttgtgggagaaactgttggaaaaacagactatattcctctcctggatgttgatgagaaaaccgggaactcagagtcaaagaagaaaccgtgctcagaaactagccagattgaagatactccatcttctaaaccaacactcctagccaatggtggtcatggagtagaagggagcgatactacagggtctccaactgaattccttgaagagaaaatggcctaccaggaatacccaaatagccagaactggccagaagataccaacttttgtttccaacctgagcaagtggtcgatcctatccagactgatccctttaagatgtaccatgatgatgacctggcagatttggtctttccctccagtgcgacagctgatacttcaatatttgcaggacaaaatgatcccttgaaagacagttacggtatgtctccctgcaacacagctgttgtacctcaggggtggtctgtggaagccttaaactctccacactcagagtcctttgtttccccagaggctgttgcagaacctcctcagccaacggcagttcccttagagctagccaaggagatagaaatggcatcagaagagaggccaccagcacaagcattggaaataatgatgggactgaagactactgacatggcaccatctaaagaaacagagatggccctcgccaaggacatggcactagctacaaaaaccgaggtggcattggctaaagatatggaatcacccaccaaattagatgtgacactggccaaggacatgcagccatccatggaatcagatatggccctagtcaaggacatggaactacccacagaaaaagaagtggccctggttaaggatgtcagatggcccacagaaacagatgtatcttcagccaagaatgtggtactgcccacagaaacagaggtagccccagccaaggatgtgacactgttgaaagaaacagagagggcatctcctataaaaatggacttagccccttccaaggacatgggaccacccaaagaaaacaagaaagaaacagagagggcatctcctataaaaatggacttggctccttccaaggacatgggaccacccaaagaaaacaagatagtcccagccaaggatttggtattactctcagaaatagaggtggcacaggctaatgacattatatcatccacagaaatatcctctgctgagaaggtggctttgtcctcagaaacagaggtagccctggccagggacatgacactgcccccggaaaccaacgtgatcttgaccaaggataaagcactacctttagaagcagaggtggccccagtcaaggacatggctcaactcccagaaacagaaatagccccggccaaggatgtggctccgtccacagtaaaagaagtgggcttgttgaaggacatgtctccactatcagaaacagaaatggctctgggcaaggatgtgactccacctccagaaacagaagtagttctcatcaagaacgtatgtctgcctccagaaatggaggtggccctgactgaggatcaggtcccagccctcaaaacagaagcacccctggctaaggatggggttctgaccctggccaacaatgtgactccagccaaagatgttccaccactctcagaaacagaggcaacaccagttccaattaaagacatggaaattgcacaaacacaaaaaggaataagtgaggattcccatttagaatctctgcaggatgtggggcagtcagctgcacctactttcatgatttcaccagaaaccgtcacaggaacggggaaaaagtgcagcttgccggccgaggaggattctgtgttagaaaaactaggggaaaggaaaccatgcaacagtcaaccttctgagctttcttcagagacctcaggaatagccaggccagaagaaggaaggcctgtggtgagtgggacaggaaatgacatcaccaccccaccgaacaaggagctcccaccaagcccagagaagaaaacaaagcctttggccaccactcaacctgcaaagacttcaacatcgaaagccaaaacacagcccacttctctccctaagcagccagctcccaccaccattggtgggttgaataaaaaacccatgagccttgcttcaggcttagtgccagctgccccacccaaacgccctgccgtcgcctctgccaggccttccatcttaccttcaaaagacgtgaagccaaaggtaagtggtcacctaactactgtgccgaggaaaattgttcccctctgagtgtcagatagacagatccttgttgctaacagacaacagaatcaggctggtggaattgggaaaaggcaagggaaatgggggagagggtgatttgaaaattggcatggctactctggacgcgctgcctatgggttagccctgctccacgaggagcagccaaa

SEQ ID NO: 88784 - DNA, 423 bp, Homo sapiens
ggtgtcgatctaaggatccctgcagcttgccggccgaggaggattctgtgttagaaaaactaggggaaaggaaaccatgcaacagtcaaccttctgagctttcttcagagacctcagccaacttcatgtattgcggtacccctcccacacaagccaaacaagtttgcagacccagtgaccgcaggtcaaccccggcccaagcctgccagggtccctcctgagctgctgggaggctctcctccatggaagactcttgatcacaggctgggccactgctctttgtctgagtcaggttgggtctctggttcatcctcctgtggtgggcctgggaaccaaagaaaaagtattcatgttgactcacttgaaccccagagggatcttggcagggaggcctgggatatagaaagcacaccaataatgatg

SEQ ID NO: 88785 - DNA, 398 bp, Homo sapiens
cgagatcgcaccattgtgatccagcctgggcaacaagagcaaaactccatctcaaaaaaaaaaaaaaaaaaaaaaaagataaataaaagcttcaaatgaaaggccaattcagcacacccagcagcttgaggaataacattcccaggaagacgacagggaccattgctcacaatggctgctgctgagccaactgctgcttaacattaataaagcaattgcccccaccgttcacgagttaacatgttcacacacaccagaatctggctatgctctctcaacacctcaccctcttcccctcaggggaagaagaagggtattcacaaaatgaaatggaagagtctgccttgaatgtcccctgccctagagttctgtagcaataacatggtggatacagtggg

SEQ ID NO: 88786 - DNA, 312 bp, Homo sapiens
agaacccagagtaggcctggcacctcttgtgatgactgggtaagaatgagaagctaattcctgccagattggctctcaaaatgctaggctatgtgaggagtgtcatcctttgggaggctgacagcaaagtctggcttcactcactcagcccaagaatgatctgctgtcccaaaccttcaagaaacgacagggtctcagttgtgtctgagggaatgtctggccagcaggctttttcttttagatttattgtccactagccttgggtgaggccttctaggatagttgagagagcgagagagagagagagtgtga

SEQ ID NO: 88787 - DNA, 241 bp, Homo sapiens
ctgcaacctccatctcctgggctcaagcgattctcctgcttcagcctcccaagtagctggaattacaagtgtgctccaccacacccagctaatttttgtatttttagtagagatggggtttcaccatgttggccaggatggtctcaatctcttgacctcatgatccaccctccctggcctcccaaagggaaatcatattttaatcaaacatcccagataaatattacagttaggttaattt

SEQ ID NO: 88788 - DNA, 236 bp, Homo sapiens
aatagaggcagggtcccactatgttgcccaggctggtctgtaactactgggctcaagtgatcttcctccctcagcctcccaaaatgctgggattacaggcgtgagccacagcgctggccgacttcagattttcttaaggcattgtttggaaagcaagattcaaggaaactcctccttaggttgcagtgagctgagattgcaccactgcaccagcctgggccacagagcaagactcc

SEQ ID NO: 88789 - DNA, 799 bp, Homo sapiens
caacctggtgagaccctgagcagaggccccagccaacccgtacctgcagttctgacccatggaaaccgagatgatgaatttgggttgttttgacccacagaaaccaaggtgatgaatttgtggtgtttttaaacctccacaaagtagtgtgagaaaatacacagtagttgttttataccactacatttttaggtggtttgttatcacactggataattaaaacaccaatttaaatcttttctcagctaattttgtaccattagtgaagcataaacactccaaactatactactgtagtaaagaaaaccacctgcttctatgtgtgagaacacttgggtgaacatatcaataaaaagggtgaagaagggactctagctgtattgcattttgcatcatttatattcacttctatgactattttttgtaatactgtccaatgactgtgtcgtctctttttgcatgctttctattaaaaaataatagtgaaaattaaaaaaccccagtctgggcgcggtggctcatgcctgtaattccagcactttgggaggccgaggagggtggatcacctgaggtcaggagttcaagaccagcctggccaatgtggcaaaaccccgtctgtactaaaaatacaaaaattagccgagtgtgatggtgtgcgcctgtaatcccagctactccggaagctgagacaggagaattgcttgaatccaggaggtggagtttgcagtgagctgagatggcgccattgcactccagcctgggtgacagagcaagactcagtctaaataaataaataaat

SEQ ID NO: 88790 - DNA, 374 bp, Homo sapiens
gtcgaagaacgtacaggggtttccctaggtctcaaaatcagctgactgacgaagggcagtaaaaaatgtagagtgtcacatgtttttgagagccataaaattcaaagatcacagaacttttatcacatttatgcccacataagactgagtaatacatacaccaagattttccctgtgacaagctgggtgtgatgaacaaatctaggtccttcccaggctttatgttgggagtttgagaaaagcttaagcactgttttgcaaccaaaagcatgcaggtgttaaagttttaaatgtctctattgcttcttgccaaattttgcctggcatgaagggttggggatggagaggggacgaagaatagagggagggacagg

SEQ ID NO: 88791 - DNA, 485 bp, Homo sapiens
tttttcatggcaaaaagacagaaaagttcccttctgcagtctccagtgtcttctgacctcacagaaatgttttcatgcttttacctagcaggaccaccagaggctctgtcacacttgcagtccctggcccaacaccgaaatccttctggaatctgtgctctgggggctgtgccgggtagagagggcagtgggaggtaagagctcttcacccttcaccaccttctccacccagcatggccggcacactttggtctacggcacatctccaagtatagagtgggttttgaatgctgttatgtctcaccgtggggatgggaaggaatactctgttttggactatttggaggtacatgtgagtggattttattaccagagtaggaactgtttcaagttaatgtgtcttttatgttgcttttaagacaacttttgtgccgcttttatccattcttccttttatccacagaaatacaaatttctaattatag

SEQ ID NO: 88792 - DNA, 362 bp, Homo sapiens
gtaaagagggatggctgtacttgttattttaacttagtggaatttttagtgaagcttttgaatactacaggagttagattgttatatttggacttgtgtagcttcagaattttgacaatagctcattggccagaaaaggataactactgacatatagagggaacggatctgaactgattggttaaatgctgtacttctcatgatgactcttagcataaaggaaagaaattcatatttagcttaggaagatagataagaacaaagataaaagcaaatgtcaacttttacatttcttaagcaaaattagtagaggataaaaaataagcccttgtagtcatacacgttacttatcaaatagaggg

SEQ ID NO: 88793 - DNA, 428 bp, Homo sapiens
aatttgaaatattttctctttttttttcctttcaattatactctgtatgaaatggtttaatatatgtttccttggtttcaaccattggcattttttaaaagagaaaaaataccatggagtatttttaaaatgaactaacacatgtaatgaattacatggactttgcagacagataaaagggcaaaaaaatatgtccaatttcagggttttcagccctttcaacattgctttaatcatcctggtttgtcttttttcacaagggaatgctgtgttaatgactcagttttctatcttactctgttacactagaaatgaatcagaatgcctcattaggccagggtaaaccacaacatcagaatgtttatataacaatttattaaagcggaaatgcttgattgtggtttttaataaactgttgagtgtttaag

SEQ ID NO: 88794 - DNA, 421 bp, Homo sapiens
gcctactactactaaattaaaaaccgcgtcgacctctgtatgaaatggtttaatatatgtttccttggtttcaaccattggcattttttaaaagagaaaaaataccatggagtatttttaaaatgaactaacacatgtaatgaattacatggactttgcagacagataaaagggcaaaaaaatatgtccaatttcagggttttcagccctttcaacattgctttaatcatcctggtttgtcttttttcacaagggaatgctgtgttaatgactcagttttctatcttactctgttacactagaaatgaatcagaatgcctcattaggccagggtaaaccacaacatcagaatgtttatataacaatttattaaagcggaaatgcttgattgtggtttttaataaactgttgagtgtttaag

SEQ ID NO: 88795 - DNA, 1570 bp, Homo sapiens
aacctccacctcctgggttcaagtgattttcctgcctcagcctcccaagtagctggggttagaggcacatgccaccatgcctggctaatttttgtagttttagtagagatggggtttcaccatgttggccaggctggtctcaaactcctgacctcaagtgatccacccacctcggcctcccaaagtgctgggattacaggcgtgagccactgcgcctggctgagtacaatattaatgtagacaaaccatgaagtttattatttcatataagaacattacaggtttgttttttcttgcatgtctgtccacctaatgtttaagtagttctggtagctcttcctattctttattctatttgattccatttctgtgattcttttattaccactgatgttttgtgatagttaactatgataaatttaactgatcatgatttatcttctagagtatttaaataatgtatgagtgaccacccaattccaacattaaaagtgtaatctgggcccataatttatagtgaaattgtatcaaaacatagggaaactgtattactgtccattttgaaaatatgaaacttgagtattgaaaatattcaaacatggaatggcagtattctaatttcagttagttggttcatgttaatttcttacctgttagatgtttaaactgcagtgacctttacttgtatctactctgtggtggaaatgttaaaccatgatagcttttgctaccaactcaaccacttaacttttagagcagttttggggagagtttatgcttcatctgagtttagaagtaatgtcagaaaatgttaagcatgtctgtattaagaaaatataaggtttctaattgtcttattaatatggtaattcaagtgaattagaaatatttaactgcaatcttgaattataaagttgagatatatatatatatgtatcaagatctcaacttgatgtaaagtaaatgagcagttacctggcggatttttttttttaaataactgatttaatccataatcccataacaaacatagcttcacctcagtattttctttctttctttgttcaacagtgctccgataagggaatgctagaaaatagatgagaagtactgaaagacctttttttttaattgattagaaaagtaagtctctagggtctttgaatgctggaatttttttttttttttttgtctttcccatctgtggcagctaaaacaaaaatcactcaaaatattcaggtttacatgttagctctctctcatagggagctgccatacctcacagttcaaagtgtattctatagatcagtaacattatactgacatgtaattgcaatttactatgcagcaaaaatgattcaagaagaaaaataacctacagtgtctgtatacctttgtatacacaattgcttaagttactctgcttttaacatttgtacttggataaaatgcttatgtctgtataggaatgtcacagtgcaagatgctgctagcccaggcacaaagtattaaaattattttgtgaagattggtggttgtattaaaactgctgtgccattatacctccaaa

SEQ ID NO: 88796 - DNA, 1548 bp, Homo sapiens
  misc_feature (1464)..(1464): n is a, c, g, or t
  misc_feature (1486)..(1486): n is a, c, g, or t
aacctccacctcctgggttcaagtgattttcctgcctcagcctcccaagtagctggggttagaggcacatgccaccatgcctggctaatttttgtagttttagtagagatggggtttcaccatgttggccaggctggtctcaaactcctgacctcaagtgatccacccacctcggcctcccaaagtgctgggattacaggcgtgagccactgcgcctggctgagtacaatattaatgtagacaaaccatgaagtttattatttcatataagaacattacaggtttgttttttcttgcatgtctgtccacctaatgtttaagtagttctggtagctcttcctattctttattctatttgattccatttctgtgattcttttattaccactgatgttttgtgatagttaactatgataaatttaactgatcatgatttatcttctagagtatttaaataatgtatgagtgaccacccaattccaacattaaaagtgtaatctgggcccataatttatagtgaaattgtatcaaaacatagggaaactgtattactgtccattttgaaaatatgaaacttgagtattgaaaatattcaaacatggaatggcagtattctaatttcagttagttggttcatgttaatttcttacctgttagatgtttaaactgcagtgacctttacttgtatctactctgtggtggaaatgttaaaccatgatagcttttgctaccaactcaaccacttaacttttagagcagttttggggagagtttatgcttcatctgagtttagaagtaatgtcagaaaatgttaagcatgtctgtattaagaaaatataaggtttctaattgtcttattaatatggtaattcaagtgaattagaaatatttaactgcaatcttgaattataaagttgagatatatatatatatgtatcaagatctcaacttgatgtaaagtaaatgagcagttacctggcggatttttttttttaaataactgatttaatccataatcccataacaaacatagcttcacctcagtattttctttctttctttgttcaacagtgctccgataagggaatgctagaaaatagatgagaagtactgaaagacctttttttttaattgattagaaaagtaagtctctagggtctttgaatgctggaatttttttttttttttttgtctttcccatctgtggcagctaaaacaaaaatcactcaaaatattcaggtttacatgttagctctctctcatagggagctgccatacctcacagttcaaagtgtattctatagatcagtaacattatactgacatgtaattgcaatttactatgcagcaaaaatgattcaagaagaaaaataacctacagtgtctgtatacctttgtatacacaattgcttaagttactctgctttcaccaggggccgggaaaaaaacccggagcggggaganaaccccccaccaaagacccccncccccccgcccccaaagtattaaaattattttgtgaagatggggggggggattaaaaaaaaa

SEQ ID NO: 88797 - DNA, 787 bp, Homo sapiens
tgtgtttccgagacccagctaaggtgggcctttggtgggtgacctgtctctgacccgaggcagcagagttttgggggagggagaaacaagcaaggagcagggaggacaaggacacaagatccctttgctggtggtgacttactcacttcccccaccagagggcctgggactcccgaaactcccgtaactggaaagctccctggctcagctccactggggggtgaggagggcggctccctcagccccagcctagcggcctccaaccctgtgcctgagaacatgagcagcggtctaaagcatcccctagtcccatttcacttcacagaccgatttggttgcacagccctagaattcaacagacaacaaaaatgctgaaattccttagaatacgcagagggaggaggtgactcaccaaggtgctaaaacattttattaaaaatatatattgttaaattaagtctgctgtctggacaatgactgtttgttttgttttcttgtagtggagtttaaaagagactattattttactctgatatattattattaaaaaggcattttaactttgtacttgaaaactaaatgagcgatttcatgtgttttagctgaggcattgaagtagcgggtgcttacttatttgtgggaaatcatgtattcatactgaagaataaactccgtagctgatttggtaataacttttactgttacagacgatttcgctttgaccccggtggcagagcacttttactccacattccacgcagctaaatgcaggacttcccagactctt

SEQ ID NO: 88798 - DNA, 632 bp, Homo sapiens
  misc_feature (632)..(632): n is a, c, g, or t
gaatgtcagtgactgttgggtagtgaatatattttctgcttggatcccccaaatacccaacttttgctgtttctggtcactgtagggttagctcttggctggtcttttgggaggttttcccagtctgaagggcagtggaaacctctgctgattccctatgcagtggatgaatttttggctaaagttgtcttagttcctgccttatttactggtatagcaagttggtgtatgtggcataggtacaccttgctttatgtgaaagtcacaccagaagggcagtaaaggggaaacagtgctaactctagagttagcagacccaggctctggttctcacatggcctttgctccctcaggcttcctagtgttcccatgatcttttgctgaattccttcaaaatctagggatttgaaacaaacatgtcataagcacatgtattgtgtgggtcaggaatttggagaggccacagtggagtggcttgtctctggtccacaagcttggacctgggctggaaggactcaaagactgaagatgagttgatgctaagggctgggattatctgaaatgtctctccatgggcttggcttcatggccacctcagcacggtaggactttttaaaacattaaaaaaaaan

SEQ ID NO: 88799 - DNA, 586 bp, Homo sapiens
atatgatctcagatttttgcccacgaagtaaccataaaattaaaaacatttctactctcaattttggaaatttccaaacacacacaaaggttgagagaagaaaatgctgaacctctgtgtacccatcaaaccagctttaacaatgatcgactcaaggccaaccttgtttcatctgtacccccacacactcttatccccagtatcatcaaattattttaaagcacgtctcagacatcatattccattcataaatacttgagtatgtatctctaaaagataggaaccctttttttcttctaacaaaaccacagttccattaccatacctttaaaatgaatggtaattccctagtaagccatgaaatcattaaaaagaaataggatggcagtcagccttttatgctatgaatgtaatttatccctaaacaacaacaaaaacaaaaaaagtcaacacattcactttctaaaccaatatctcttttaataagacaactaataatgaatcaaatctaattttaaattaatttccctattcgatcattataatttcaatgaactgtagcatgacttcagcatttttgcttatg

SEQ ID NO: 88800 - DNA, 231 bp, Homo sapiens
agcaaagttgtccgagctgcgccgccactttgcctcctcttcccggctccgatcccgcctgtgccccagcccggcacggggacagtgcatttccgctcggagattcgcgtgacagaggcatctgcaacgacagcccgtttttatcccagaacttcgtgagaccccttttccctcccaccgcccgcgggcagtgtttcctcccgcagttgcagtgcaggggctggagaggta

SEQ ID NO: 88801 - DNA, 379 bp, Homo sapiens
gacatttaacttgttctcacagcttggctattgcaaataatgctgcaatgaatatctcataagtctcgtatatgtccatagaagatcatgaaaatggacatgtctctgggtattttgaattggtgggacaattttgcttaagggtaggcatagtgggtggctctacatttgagagttctaattcccattcctatatatatttcttttctttttatttatttatttttttgagatggggctctctgtcactcaggctggagtgcagtggcacaaacatggcttactgcagcctcaacctcctgggctcaagtgatcctcccatctcagcctcccaagaagctgggaccacaggcatgtgtcaccatgcctgactaatttt

SEQ ID NO: 88802 - DNA, 289 bp, Homo sapiens
ggaaccagcatttattgagagcctaccaaacagcagacacagttgaggcacttttcaatataccatcttaattaatcttcaaaggaaggaaacaaatgcaggagggtcatttttttccctatcaagttaagtagaacaagtaggtactgaatctgtatctgataaaaggtccatgttttttggctaaaacaatggtcaccacatcctttagtgagaatatttaattcaagcacgatatacttaatataaggttccactaattcctagttaatcattttactcatctttc

SEQ ID NO: 88803 - DNA, 539 bp, Homo sapiens
ttactcagtgctggaatctcttttttcatactatgtcacaagaaactgtccagcctctcctttttggcatcagggctccatttcttccccttcttggtgactataatggatatacccaagatagaatctgattgggtgtgagctgtggttgaccaggatcctgagagttgttcatcaaacatcccaaacatactttcatctcagggtctttgcgtttgctgttagctcagtctggaatgcctgttctgcaaaaacttgaatgtctccctttcccaccaccacatctgctcaagtgtcatcagacaggccttccctcataactgtctaaaacactcagcccattaatctttaactctttactctgatttgcatttctgcattagtactgataaatgccttattattcatatgtctgtttacttgtttatttgtgaccggcctccttctactatgtaagcatcataagatgagggactctgtatattttgtccattgttatacctccaagacctagaagagtacctgtcacactctataaa

SEQ ID NO: 88804 - DNA, 488 bp, Homo sapiens
gtctgtttttggactctatgttctattaaaattttaattaatttctgaatttgagaaaaatcagagccagtagtgtccgaattatgaatttacccctggttgtttttttactcttctcttgatgtacttctcacacactgcattctgttgcataaaaagaataacatggtgttgaatgacagatctaaagatggacatttgtctatgtggtaaatacgtggtagattctgggtgatttttcatatgcttcatataaaaaatgatcgtacataaaataacttttttggaaggaacataatctgagccattcagatacaacgaaatccagctcctctctatagcatcgctgtgggtgtagctaaaatatgagattttaagtttaaaaacaacttctgcatgttatttggaaatattttttactaatttcttacgcagcccaaaacttaatgggcaatttaaaatacgcatttagtgtcttagtattttac

SEQ ID NO: 88805 - DNA, 483 bp, Homo sapiens
aagtgcccagtcattagcaaaatggaaaaaaaggatcaccacaattcggaaggaaaggaaaagaaaaaaaaaagagtggaatgccatgtttcagtagaaaacacctttaaactgtttcataatatggaatagctaataagaatatgaattcagcaaaacataggttagaaaataaacagtagagtgaatgaaaagacacctgagctaagaaaacaaattgaagatcaaaagaaatcacaaggaacagaatggacaccccttaaaaacaagttattgccataggaaaaaagcttgaagtaatcacagtttatggaggtacctgaaaaagacaaaaattaaagcaataagtaaaatcttaaagacaggaagacaggactcatccattatgagaacagtagacattagtgtctgcatacaaatcctgtgtaattgaacgtttattttgagatgtatgtaagaacacgttttgaaatggaaataatg

SEQ ID NO: 88806 - DNA, 446 bp, Homo sapiens
gaaagtactttgtaacttataaagcattatgcagatgtagactccttttataatagttgtgtaagtatataagacaacctacattcttcatgagctagccataagttttagcaacttgcctttgaacccacggtagatttacaattttctgtagtattgagttgtgttcatttagaattttgtaatatttatattgaaaatcaaatttttgtacctacaaaaactacaaaaaatccccctagtttttatagtttctattaaaattatagctggtacatagggatgccagaaggactgtttaagaagctgaaaatagagaaatgaatttatcttctcatagttaggcagggcacagtagaaggatgcttaacattgcaagctgatgggaacagcaggttgatatagcttgtgataacacttctaaagaaaaagcaatgagccataga

SEQ ID NO: 88807 - DNA, 1134 bp, Homo sapiens
  misc_feature (17)..(17): n is a, c, g, or t
  misc_feature (68)..(68): n is a, c, g, or t
  misc_feature (74)..(74): n is a, c, g, or t
  misc_feature (83)..(83): n is a, c, g, or t
  misc_feature (116)..(116): n is a, c, g, or t
  misc_feature (120)..(120): n is a, c, g, or t
  misc_feature (129)..(129): n is a, c, g, or t
  misc_feature (136)..(136): n is a, c, g, or t
  misc_feature (140)..(140): n is a, c, g, or t
  misc_feature (146)..(146): n is a, c, g, or t
  misc_feature (162)..(162): n is a, c, g, or t
  misc_feature (171)..(171): n is a, c, g, or t
  misc_feature (200)..(200): n is a, c, g, or t
  misc_feature (210)..(210): n is a, c, g, or t
  misc_feature (236)..(236): n is a, c, g, or t
  misc_feature (249)..(249): n is a, c, g, or t
  misc_feature (254)..(254): n is a, c, g, or t
  misc_feature (262)..(262): n is a, c, g, or t
  misc_feature (267)..(267): n is a, c, g, or t
  misc_feature (280)..(280): n is a, c, g, or t
  misc_feature (284)..(284): n is a, c, g, or t
tgcgcttcactcggagncgagagcgtggagcctgtctacgacctttatctccaagttgctttcagccntgaggngtgacccanaggtatgcagcatccagagaaagcctttttagnaagntgaggagcngctgtgngcanagtggntcgaccagccagcccnccttgaagncttcccaggcccgctgaaaagacaccctnatgccttctncctggcccctaccgcgaaagcccggnaggccaactggcngctcntgaagcantattncctgctgaggacnatanagtgcagccgctgcccaaaggggaccaagtgctgaacttctctgatgcagaggacctgattgatgacagtaagctcaaggacatgcgagatgaggtcctggaacatgagctgatggtggctgaccggcgccagaagcgagagattcggcagctggaacaggaactgcataagtggcaggtgctagtggacagcatcacaggcatgagctctccggacttcgacaaccagacactggcagtgctgcggggccgcatggtgcggtacctgatgcgctcgcgtgagatcaccctgggcagagcaaccaaggataaccagattgatgtggacctgtctctggagggtccggcctggaagatatcccggaaacaaggtgtcatcaagctgaagaacaacggtgatttcttcattgccaatgagggtcgacggcccatctacatcgatggacggccggtgctctgtggctccaaatggcgcctcagcaacaactctgtggtggagatcgccagcctgcgattcgtcttccttatcaaccaggacctcattgccctcatcagggctgaggctgccaagatcacaccacagtgaggagtggtggcaggactcgtgggccctctccggcctgtttcccctgccactccagcccccttgagctgggaactcaggctcctggaaaaacctgggcagtgggaggctcagctgcgggccattgatttgagcctttgagggaggatagggctggcctttgtgaagccagcagaggctgagaacctcaggcttccctagatccagagcccctccccatcttcctctctctaaaaacaaccctaccccccattgccaccttcactc

SEQ ID NO: 88808 - DNA, 1021 bp, Homo sapiens
tttaaacgtgcttcccacatgtcgtaatccttgtgaatcactattctttgctattgatttagaagttcttggttttgagtgaacattttttgttgccattgtacgtgattttttaggaaaaggttgttttgttaagatctgtacaaatcctccacgagcagccagattctgacgacggagatgtgttttgccaagataatgtgcacctcaacaagttttcttctgaacactgaaaaccacaaagatacccaaaaatgtggaagcgactctgaaacatgagctgatggtggctgaccggcgccagaagcgagagattcggcagctggaacaggaactgcataagtggcaggtgctagtggacagcatcacaggcatgagctctccggacttcgacaaccagacactggcagtgctgcggggccgcatggtgcggtacctgatgcgctcgcgtgagatcaccctgggcagagcaaccaaggataaccagattgatgtggacctgtctctggagggtccggcctggaagatatcccggaaacaaggtgtcatcaagctgaagaacaacggtgatttcttcattgccaatgagggtcgacggcccatctacatcgatggacggccggtgctctgtggctccaaatggcgcctcagcaacaactctgtggtggagatcgccagcctgcgattcgtcttccttatcaaccaggacctcattgccctcatcagggctgaggctgccaagatcacaccacagtgaggagtggtggcaggactcgtgggccctctccggcctgtttcccctgccactccagcccccttgagctgggaactcaggctcctggaaaaacctgggcagtgggaggctcagctgcgggccattgatttgagcctttgagggaggatagggctggcctttgtgaagccagcagaggctgagaacctcaggcttccctagatccagagcccctccccatcttcctctctctaaaaacaaccctaccccccattgccaccttcactc

SEQ ID NO: 88809 - DNA, 421 bp, Homo sapiens
tgccctcaagatgcttacctactagctggtaagacaaggcacacaaatgaacactaaaataaacactaagagagaattcctcctgtctgactgctaacagggacatcagcttttcttgccttcaaactgaaacactggttctttgtgggtctcaagcctttggattaaaactacatcaatggctctctgagttctcaggccttcagattcagactggatctacaccatgggctctcctgggtctccagcttgccaactcatcctacagatcttgaaacttaagtctccataacggcctgagccaattccttataataaatacatatctttatatccatttctccctctctctctctacacacacacacacacacacacacacacacacacacacacacacacacacacaccctttattgat

SEQ ID NO: 88810 - DNA, 118 bp, Homo sapiens
aatatatagagccgcacaccaaaaatagaagggtcaatttgattggatgataattgtgaagatcatattttaaaagaagtcaactaattaataaagttaacattgcacttataatttt

SEQ ID NO: 88811 - DNA, 439 bp, Homo sapiens
ataacttctctgggtctcaatttcttttgtggtaaattgtgatgttaatgtgattggtgtgatattaatgtgatttcttcagtggtaaaattgtgatattaatgtctacctgcttcatagacttaccatgttgattaaatgagataaagtatataaagtgcttagcatagtgcttgcccataatgagcactcagtaaacgatagctgttcatattatcgtcatcatccctgtccctgaaacttcagtacaagtgatgtggtaaaaactagaatagtcaaccaagaggctgattgctggtaaagtaaacctaaccataggttctgtagctaccacgtacaagctatctaactttacctactgtcttcacccatttctattaaatcacctcaacttccctggccactgtacaaaggcccctttcctcatttgatatctacc

SEQ ID NO: 88812 - DNA, 339 bp, Homo sapiens
ggctgtcactgtttaaaaaattataatgtttctcaaagaaattccaaagaacatggaacaggaagaatccagaactgctgcccatcataaaatttttccatctgcaatttgtgtctacagtgtgccagttattgatgaggagacaaggtttcgccatgttgcccaggctgctctcgaactcctggactcaagtgatccttctgcctcggcctccccaagacctgggattgcaggctgaatcctattccaccgtgtggatgggccccagcttcttacccaccacccatcagcggacactcgggttgctcccaccgttgggccatcgtgaacagcgctgca

SEQ ID NO: 88813 - DNA, 412 bp, Homo sapiens
tctattttcttacattaattaatttaaattatttagaaaatgggcccaacattagctttctctgtggttctgggtaacaatttctcacaggccctagttgttaccttctccaaactgttgatttgtaatttgcttattttgagaaagccagttgtgtattctgagcagcctcttcctggctgaattgaaggtaatgagagagactggatgtctgcctacccagttcctccccgcgtgctttgcttctgcattcactgctgccactggagaatatttaataccaaagtcaaaataagtgtttaggaggctttcagtggtggtttaaaataattaccatgggggctttggtaaaagcctttatccagaaaactctttaaattatataattatatcccttatcccactcttcctt

SEQ ID NO: 88814 - DNA, 396 bp, Homo sapiens
ttatatgtttagggtattaagcccttatcagatatatgttttgcaaatatattctcccatttcgtagattatctctgcactctgttgtttctcagtatgattctttttttctttgagacagggtctcactctgtcacccagccgctggagtacagttatatgatcactgctcgctacagccttgacatcctgggctcaagtgatcttcccacttcagcctcccaagtagctgggactacaggcgcatgccaccacacttggctaaggttttctttcttttgttttctgtagagatggggtctccctatgtggcccaggctgttcttaaactcctgggttcaagcagtcctcgcaatgtattgggattacaggcaagagccactgcacccagcctct

SEQ ID NO: 88815 - DNA, 316 bp, Homo sapiens
aaattacaggccaatatccctgatgaacatagatgcagaaacccccaacaaaataccagcaaactgaattcaacaacaaatttaaaagatcattttcccatgatcacatggggagataaccttttgcatttaaggatggttaaacatacataaatcaataaatttgatagatcacattaaagtgaacatcaaaaactacatgtctcaatacttccagaaaaagaattgacaatatttaacaaccttttttttttttttttttttcggagacagagtcttgctctgtcacccaggttggagtgtggtggcactatct

SEQ ID NO: 88816 - DNA, 421 bp, Homo sapiens
gtaattttgtgagcctgaacttgatttaaaaaactaattgactttgaaggctagtttaatttagctaagttttaagatctgagagtaattcctaaaaatgacaagatattaatagtttaaagttaagtattttagaattatttcagaatgaactatagatagtaaattaagattaagaaagcagtttcttaatatcctaatgttatgttctgatttttggattcttaattattttctgccttattgtgaattgctttagaaaaggttagtagaattaacatgaccatttaagcagtttcagcttatttccttttttaaagaaatgtagtagtctttttaaaactaaggctgagttgtttttctaaatagactaaaaattttatagaaggccaaataaaaatatattaaacatttcaaagaa

SEQ ID NO: 88817 - DNA, 561 bp, Homo sapiens
ggggagggtggtaggtagttcctatttgttttaaaaagtaatgaagataaactgctgagcatcaaattaacgaaagactgaaaaaaagcaaattgcaaactattgagaagcagagggtggctcaacgtttttgaaaaaactgattctgacaatcagtgaaataattatggacatcttcgcaaaagatgtttccaaattttttggccagtgactttttacatgtctctgaaaccaaacattaaaaacaaacaaacaaaaaatcccttcgagatgggtaaaatatgagagaatcaagttgaacagaggctaatcctacgttgcttgaaagataaaaactgcagctgatacacagacttgtaaaacctagcatgtctcaatagaaaggctgcaaggacgttctgctatactaaagacaatgcacttccaacactttttaaaggcaaagatccagtaagtgacaggacatgagacagagccatctccaccacttgtacactagtgcaaaccactgtcacctctgactactgcaattgcctcctaacccatttccctgcttctact

SEQ ID NO: 88818 - DNA, 302 bp, Homo sapiens
aagtccttatcatgtaactttaagtaaattacatgcctttcaaaatatggttaggcatgggacgcttttcatggcttaaaaagatggaacatgaccaggtgcagtggctcatgcctgtaatcccaacactttgggaggccgaggcaggtggatcacctgaggtcaggagtttgagaccagcctggccaacatggtgaaaccccgtctctactaaaaatacaaaaatagccgggcacggtggcgggcatctgtagtcccagctactcaggaggctgaggcaggagaatcgcttcaacccggga

SEQ ID NO: 88819 - DNA, 504 bp, Homo sapiens
  misc_feature (395)..(395): n is a, c, g, or t
  misc_feature (462)..(462): n is a, c, g, or t
catgatcccacgaagtattagctccattttacagatatgtaaacttttctaatttaggtttagataaatgaagtgatttttatccaatgttgcatggcatagtcaagattcaattagatctaactccgatctattctcttcccctatttgaatgcgcttctcagttgagatagaaaaaaatgctaaggaaataaacctactattttggatggactaataaagaagagaagaatttatggcatgaataatgaaaagaagttatgcttgaagaattcagctattcattatattaccatttgaacttaaacccaagtatttacctataaaatgtgaataatgggaataatgtatgaacccttacaggagtgtcaacatggctgagtagtaacacttancaaccacagtgtttattattacaaaacaatatggtaacattacatgttacaaaacagaagataaagncactcaatcccacaatcttaatacaattactttccaggtctg

SEQ ID NO: 88820 - DNA, 238 bp, Homo sapiens
caggagctctatgctgctgctagaagctttgattgtgacttgggtaccaaaggcaggccaagttaaagcaattgaaaaaaaatcaaaagacagtgaatgattttgggggtcagaagaagggagtcagggagggacacattcactgatagaaggtctctatcacaattcttcaactctgcagttgtaacacaaacacagtcatagctaatgtgtatatgattgggcgtggctgtgttcc

SEQ ID NO: 88821 - DNA, 285 bp, Homo sapiens
agtcacacctgctgacaacagcctcagctcttaaacactgaaaaatggcaaatacaaacagctaaaacgtttttgaaagaagggaggtctgctcagtttttgcttctgggagaatgaaggctgagggtaagccaatagagcatttctattcaagatctctctgctgaacacagttctcagtgcaccggaagggtcatgctcagtgctcaggaccatgttctttttttttcttttcgagatagtctcactctgttgcccaggctggagtgcagtggcatgatctca

SEQ ID NO: 88822 - DNA, 238 bp, Homo sapiens
atcctgaaaggccttgtatgttacaaagaaaagtttggactttctcctgggattttagaaagatatagaagggttttaaggatacaatttcatttggaattggaatctcgtcttggctgcccagtggagatgggaagaataagatgcagggtgagaaggttgttggtggagagcatgctacatgctagagagatagtatcttgtcaggaattttttagttgctagtgacagaaactta

SEQ ID NO: 88823 - DNA, 880 bp, Homo sapiens
cccggctcgccgccgtgccgcagtcacgaggctctccgaacgcctttcactgtgtttctgtttacattcgcgtctgcaagacccggcggcgcgaccgaggcccgaacagatggggtcttgctgtgttgcccaggctgggcttgaactcctggactcagacgatcctcccgcctcggcctcccaaagtgctggaattacagatggagatgggctgccatgttgtgagctgccccatggggaagaggctcacatgtgaggaactgagggaggcctccagaaaacagccagtgaagaactgagaccctcagtccaatagcctatgaggaactgaatcctgctgacaaccatatgaatgagcttggaagcagatccttccccagtgaagccttcatgtgagactgcagcccacttgacactttgatttgtagcttgtgacagaccccaagccagaagagtcaggtaagcagtgcctgcactcctgacccatggcaactggcatgataaatgttttttcccatgaagctatgttttagagtaatttgttttgcagcaatagataactaattcactaggtaaaggttatatccattgtaatctttcaacttttctgtagatttgcagttttatgtgctgacaggtgaacacactgctgttggcaccatggccactgcatactacgtgctgtcatgctaacatttgatgctgcagcagtaagttatttctcaattgattctgagtctctggttcactagcaggatcatgtgcccaagctccagcttccaaggtgtgaggccagaaagtacctgaccctctcagcttccacagtgggaattgtggccctgtctctcaaatagggaggtattcagacactgagtagatg

SEQ ID NO: 88824 - DNA, 789 bp, Homo sapiens
cccggctcgccgccgtgccgcagtcacgaggctctccgaacgcctttcactgtgtttctgtttacattcgcgtctgcaagacccggcggcgcgaccgaggcccgaacagatggagatgggctgccatgttgtgagctgccccatggggaagaggctcacatgtgaggaactgagggaggcctccagaaaacagccagtgaagaactgagaccctcagtccaatagcctatgaggaactgaatcctgctgacaaccatatgaatgagcttggaagcagatccttccccagtgaagccttcatgtgagactgcagcccacttgacactttgatttgtagcttgtgacagaccccaagccagaagagtcaggtaagcagtgcctgcactcctgacccatggcaactggcatgataaatgttttttcccatgaagctatgttttagagtaatttgttttgcagcaatagataactaattcactaggtaaaggttatatccattgtaatctttcaacttttctgtagatttgcagttttatgtgctgacaggtgaacacactgctgttggcaccatggccactgcatactacgtgctgtcatgctaacatttgatgctgcagcagtaagttatttctcaattgattctgagtctctggttcactagcaggatcatgtgcccaagctccagcttccaaggtgtgaggccagaaagtacctgaccctctcagcttccacagtgggaattgtggccctgtctctcaaatagggaggtattcagacactgagtagatg

SEQ ID NO: 88825 - DNA, 719 bp, Homo sapiens
aagtggaaacaacccaaatacccatcaactgatgaatggatggagatgggctgccatgttgtgagctgccccatggggaagaggctcacatgtgaggaactgagggaggcctccagaaaacagccagtgaagaactgagaccctcagtccaatagcctatgaggaactgaatcctgctgacaaccatatgaatgagcttggaagcagatccttccccagtgaagccttcatgtgagactgcagcccacttgacactttgatttgtagcttgtgacagaccccaagccagaagagtcaggtaagcagtgcctgcactcctgacccatggcaactggcatgataaatgttttttcccatgaagctatgttttagagtaatttgttttgcagcaatagataactaattcactaggtaaaggttatatccattgtaatctttcaacttttctgtagatttgcagttttatgtgctgacaggtgaacacactgctgttggcaccatggccactgcatactacgtgctgtcatgctaacatttgatgctgcagcagtaagttatttctcaattgattctgagtctctggttcactagcaggatcatgtgcccaagctccagcttccaaggtgtgaggccagaaagtacctgaccctctcagcttccacagtgggaattgtggccctgtctctcaaatagggaggtattcagacactgagtagatg

SEQ ID NO: 88826 - DNA, 467 bp, Homo sapiens
cccggctcgccgccgtgccgcagtcacgaggctctccgaacgcctttcactgtgtttctgtttacattcgcgtctgcaagacccggcggcgcgaccgaggcccgaacagatggagatgggctgccatgttgtgagctgccccatggggaagaggctcacatgtgaggaactgagggaggcctccagaaaacagccagtgaagaactgagaccctcagtccaatagcctatgaggaactgaatcctgctgacaaccatatgaatgagcttggaagcagatccttccccagtgaagccttcatgtgagactgcagcccacttgacactttgatttgtagcttgtgacagaccccaagccagaagagtcagccagcaggttctcttcaacaccccagccctggagagccgcagattggacaacgggcagactttgttgaacagatgaacaactgtggctaaatctgtttt

SEQ ID NO: 88827 - DNA, 392 bp, Homo sapiens
ggaattaggggatgggtagggtggggtgagactaggagcacagagcacaagccagaacatcccacagtcctgctctaggaggatggaaagagcaggactttggaggcagaaagacacgtgtttgatttccagctccacaatcacaagctatgtatgacccttgtgcaaatcatctaagctctctgagacctgatttttgcatctgtaaactgggttataatgagacctacctcactgggatagctggaaagattagaggagatggtgtgtgtgaaatttcaaacagtgtctggcacattgtagggatgcccctttcacagcaacagggataaggagaggaaggagggtgaaggggagagttggctctgtcactcattcggtgactttgggtc

SEQ ID NO: 88828 - DNA, 479 bp, Homo sapiens
ctgggagcaggggactggtggtaagtggcagcttttagagatgccatgcattaagtacacaaggctttaaatgggccacccgcagagaaggtgtattaggcagtgagggggaggaggcctgcaagctatcccgctgtgccacgtgaaaggctggtagttcctaattactttctgagagttttcatgaacacctcacatatgccattttgcttcaggaacacaaagcaattagaaataaggtttcagactttatgactctaactagctgcagcggagagcatttgcctgcacacacacatttggctcaaatgtgaatgtaaaaggcgattaaggaaatgtgcagttcggtgctgcaagcctctcaggggacaaggaaaatgacaaacgctcatttcagggctctgggtggcaatcactacccacttccacagtgtcattcagatatcaccatgacaaccaccaaaaggcttccttcctct

SEQ ID NO: 88829 - DNA, 218 bp, Homo sapiens
tgcacactacagagcatggtgtcaggggccaaatggagggaaggaccacttctggctgcagcatccaggaggcactctgcagtccttccttctaggttctcggcatatgctccatgcctgtgtgactgctcagcctgccctgttccggacacttgctcatcttccttatctttctctgtagcatgagaaatgtaagtttgaaaggacaaaattctgcc

SEQ ID NO: 88830 - DNA, 989 bp, Homo sapiens
agcggtatgtgacatatgaattaagtggtcaaatgtaaaactaatggggacaccaagcctcaggaagaacatcccatgtttctgtttaattctcttatgtgttatactaccttccctttctctttcttatacacatagattttccttaattgcagcccaagaggacactgccccattttgttttgttcttttgtcattgggacttaaagtgggtgcctcaagtctttggtaacagttttaacagaacactgacaatgactggatatcagtcagtgttgatctccttcccaagctactgtctgaacactaagatcctttttttttcttttaatgaaaggtaaaatacaattctgctctgtgatttatacttctaccagatttgttttattgacttttcattagtctctcaaagatgatacactgtttttctttgttaaatgtttgggccagtcacggtggctcacgcctgcaatcccagcgctttgggaggccaaggccagcggatggcttgaggtcatgagttcgagaccagcctcatagcggaactctgtgtctactaaaaatacaaaaattagctgggcctcatagtgcagacctgtaatcccagctactcgggaggctgaagcaggaggatcacttgaacctgggagatggaggtctcagtgagctgagattgcgtcactgcactccagcctgggcaacaaaatgagactccatcactgtcaaaaaaaaaaaaaaaagtttgtaggaggaatgattgtttcctattgttggaaaaaaagccaaacggagtgagaatttagagcatgaactttgaatgagtcctatattgtagtttcagccttaccccttacctgtatggccttaggcaagtcactctacctgtccaaatctgtttcatcatctgtaaagtaggggtggtagtaatagttaactctctctcaaatgtgataaaaatattaagtgcttagagcagggttcaccctact

SEQ ID NO: 88831 - DNA, 254 bp, Homo sapiens
gatctgaaatgagaggttttggtttaccctatctatggtatgtcttaaaaatcaacgaagatgtccttgtcttttttgaatttgccgagtgtgttgcagttccacagctcactgttaggtggcacataccccaaactgaaaacctgacctcgtagggcatgagtcaaaagacaggtaggcacaggacagggcagtggtgacactacagctttcagggttcccagcctgtcaagaatgagcatgtcttagcaggg

SEQ ID NO: 88832 - DNA, 450 bp, Homo sapiens
tattttctttattgctagttccttgcaggatgtctcacagtattaccctgggtaccaacaataacagtgtaggttgaactattggtgtctaataattataagtttcaaaatggcacattggaggtttcgatcagcctcgtcagactatagagtcttgcagacacaaaaggttgtggaaatgattgtggatggtactgcagctgcagaaaactgcaccctaattctgggactctttgtagatactcagtaaccctcttgtttagtaaatagctgctcctagacatagggagcaggaaggagggagagtgggaaggaaagaaggtgggcccttaatgatttgggaaggagattcatagggaattgtagtggaaatatgggcctttgcaaaaataagtctaatgttgttcggggatggctttttagaggaggtgagtgtaaagcaagttttaa

SEQ ID NO: 88833 - DNA, 405 bp, Homo sapiens
cagatcgtgtccttaacgccaggtgtgtggtcgaattgcctcaggagtctggatgtccacagggtcctttcaacaccatcccaaactgacctcaggctctgtctgacttctgccctctcaacagcggcactcctcagtcctccccctcacaccctgtgctttaataacagtgagttatactttatttattatgtgttcagagcagcagtgggtaagagcacgatctctcaagtctggtccaaaactcccctctgcccatgtactaggcaataactaggcaggttatttatgcccataaactaggcaagttatttgcccataactaggcaagttatttatgttgtgtctcattttctccttctgtaaaacggggcttattatagtgcctgcttcgtagattgtttt

SEQ ID NO: 88834 - DNA, 666 bp, Homo sapiens
gtcacacacttaataacacgtgaaactatttatgtgaagtccttgttttattttaaaattctctttgtgtatttggaatcaaagccagcacattgtaacctgtgcttgtacgcaaaagaattagatttctttgtttttgttttattttttaaattgttgtaaaaattattataggccagctacatctagtagtaggtttggggtacagattgggggttgtgccatactgtttttaaagttcatgatcatctggaatgatacttagtgtatatatattttgtaaagttttaattcagcaaattttttgaaattgctgctgttttaaattataaaacctttatatttctgctttgtagaaattatatgttttgtagtattcattgattttctttcactgtacttaaatttagtgttagtactttaaaatttttaatttaccagtctttaaagcaacatccagaaaaaaaaaagtcttttcccatttaaaataggctcagccagttcaatgtcgccttgttatcagagaaatattagttcaatactgaaagaaaaatattatacctcttggtatctagaaaagcttgttcatccattataaatatatctttagccacagcaaaccacacttaacctatctataataaaaatgtgctttaaataaaaatg

SEQ ID NO: 88835 - DNA, 1009 bp, Homo sapiens
tatatcgagtctactgtatcattccacggcctgtgcttcttcttaattctggtactcacttaggggtaaggaggggcgatgcctggttgtggcgtcaggccccatggggccccttgcacagctggattcttgagttctgtttgccaagtgggcacaagctgcccctggatgcctggggttgaggcatcatctcatccatgttagccgggaaagaaatcaaatccccagcctcagcctgttaagctcaggcctttcaagcagggccactgagtggtagcttcgaaatgagtcactgtggtgggtggtcatcgtgcccctcacagggacttgaccgtcatcctgcagcagaggccagttcagggagccccacacctcaccaagacactagccattgcctgcgtgtcctggaaggtgagatgtagtcctcaggtgaggtgacccaaagcagatggggtgaggggccgatgagcagccgggcccagcggggcttcctggatatcctgctcccaaggccaagcagcagagagaggttcaagtgaggccactttgctttgggtccagctacacccagagcctcagcctagaaagctgtcctccagcaggctgggggtgttctaatatgtgtccgtttgcatttccggtgtgtgtgtgtgtgtgtgtgtgtgtgtgtgtgtgtgtgtgtgtgtgtactgtatcttcttagggacttgagtgtagtcacgtgactttgcgccttgcagcgcctccgccgtactcgtgtgtgtatgtgtctgtgtgtttccgtgctacccaagcgtctgtttctctccgtgtgcctgggagatcaggtctcaggcatggagctgcatgcctttgcatctgctgctccccagagtctctgcttgcatgtgagggctggtggtatgaggcagacagcagagattgtgtgtgattgtgttgaaccgccaagagaaggcacctctgaactctgtccccacacccatgggtgaaaaccagacacctctgagac

SEQ ID NO: 88836 - DNA, 650 bp, Homo sapiens
agagagagagagagagagagagagagagagagagagagagagagagagagaggtgagatgtagtcctcaggtgaggtgacccaaagcagatggggtgaggggccgatgagcagccgggcccagcggggcttcctggatatcctgctcccaaggccaagcagcagagagaggttcaagtgaggccactttgctttgggtccagctacacccagagcctcagcctagaaagctgtcctccagcaggctgggggtgttctaatatgtgtccgtttgcatttccggtgtgtgtgtgtgtgtgtgtgtgtgtgtgtgtgtgtgtgtgtgtgtgtactgtatcttcttagggacttgagtgtagtcacgtgactttgcgccttgcagcgcctccgccgtactcgtgtgtgtatgtgtctgtgtgtttccgtgctacccaagcgtctgtttctctccgtgtgcctgggagatcaggtctcaggcatggagctgcatgcctttgcatctgctgctccccagagtctctgcttgcatgtgagggctggtggtatgaggcagacagcagagattgtgtgtgattgtgttgaaccgccaagagaaggcacctctgaactctgtccccacacccatgggtgaaaaccagacacctctgagac

SEQ ID NO: 88837 - DNA, 696 bp, Homo sapiens
caaaaaacaaccattgaatgttgttgataacattcaaaaggccaaatgaaaactcaaatggccaaatattgataattattgaagtgggtgaatatgtacacagttatcttaaactgatctacttttttgtatgcttaaacatttccataataaaatgataaatttaaaaatttaatacataaaacacagaatccaaaagaaacaatttcaaagaatctcacagagcagcagaaagctttggggccagcaaacagaaagatggttctccttcaggtaatcagtatccagaactgggatactgatggcagatgggagtgttattatttaacacatggactttgaacaactgctgacctaggggtttcaatcactaaaagggctcctctttcagaaaatgccagaaattgcccagcatgaaacagaacagacagtacaaacattctgcaacacacagaagaggaccagcagaatctggacttttgaaaaagaaaaaatctaactgaataacaacatcaaagtctcctgggcaaaggggttaaagatttacaacatttctttagaggaaaaaaataactggttgaatttacagagcatctgctatgtgccaaacatttaatgagcactttaaaagcatgataaaaattaaaaaaaaaacttgttaagcatgaaataaattacctataatgcaaaatcaat

SEQ ID NO: 88838 - DNA, 1673 bp, Homo sapiens
  misc_feature (1)..(1): n is a, c, g, or t
  misc_feature (5)..(5): n is a, c, g, or t
  misc_feature (8)..(10): n is a, c, g, or t
  misc_feature (13)..(16): n is a, c, g, or t
  misc_feature (18)..(20): n is a, c, g, or t
  misc_feature (23)..(25): n is a, c, g, or t
  misc_feature (27)..(27): n is a, c, g, or t
  misc_feature (31)..(31): n is a, c, g, or t
nctcntgnnnatnnnngnnntcnnnanatcnaaggcatcatctttggtgctgttggctatggtggcatactgacaatggctcccagtggatacctggctggaagagtaggaacaaagcgagtggttggcatttctttgtttgcaacttcatttctcactctatgcatccctctggccactgactttggaatagtcttgctcattgtaactcgaatagtccagggcctaagccagtcctcaatacttgggggtcagtttgcaatttgggaaaagtggggccctccacaagaacgaagcagactctgcagcattgctttatcaggaatgttactgggatgctttactgccatcctcataggtggcttcattagtgaaacccttgggtggccctttgtcttctatatctttggaggtgttggctgtgtctgctgccttctctggtttgttgtgatttatgatgaccccgtttcctatccatggataagcacctcagaaaaagaatacatcatatcctccttgaaacaacaggtcgggtcttctaagcagcctcttcccatcaaagctatgctcagatctctacccatttggtccatatgtttaggctgtttcagccatcaatggttagttagcacaatggttgtatacataccaacttacatcagctctgtgtaccatgttaacatcagagacgtgagtatgtttccttcccttcctttctcctgcttgcatggctgaccaattactctgccctcactaatcattccatctgagaaatgtatttcttattaccaaaaataatctaatatttaatactcatgccagtagcttttctggggtatgatttaagaggttactgattttcctaagaaagtatgatttcagaatgtcattattattagtagtaatttatcaacaaaagttgtggtctcactgcctttattatggtaatttactcaatcttttctctttagaatggacttctatctgcccttccttttattgttgcctgggtcataggcatggtgggaggctatctggcagatttccttctaaccaaaaagtttagactcatcactgtgaggaaaattgccacaattttaggaagtctcccctcttcagcactcattgtgtctctgccttacctcaattccggctatatcacagcaactgccttgctgacgctctcttgcggattaagcacattgtgtcagtcagggatttatatcaatgtcttagatattgctccaaggtattccagttttctcatgggagcatcaagaggattttcgagcatagcacctgtcattgtacccactgtcagcggatttcttcttagtcaggaccctgagtttgggtggaggaatgtcttcttcttgctgtttgccgttaacctgttaggactactcttctacctcatatttggagaagcagatgtccaagaatgggctaaagagagaaaactcactcgtttatgaagttatcccaccttggatggaaaagtcattaggcaccgtattgcataaaatagaaggcttccgtgatgaaaataccagtgaaaagatttttttttcctgtggctcttttcaattatgagatcagttcattattttattcagacttttttttgagagaaatgtaagatgaataaaaattcaaataaaatgataactaag

SEQ ID NO: 88839 - DNA, 1174 bp, Homo sapiens
accgttatgaccagtaaatttgttttcaggtcgggtcttctaagcagcctcttcccatcaaagctatgctcagatctctacccatttggtccatatgtttaggctgtttcagccatcaatggttagttagcacaatggttgtatacataccaacttacatcagctctgtgtaccatgttaacatcagagacgtgagtatgtttccttcccttcctttctcctgcttgcatggctgaccaattactctgccctcactaatcattccatctgagaaatgtatttcttattaccaaaaataatctaatatttaatactcatgccagtagcttttctggggtatgatttaagaggttactgattttcctaagaaagtatgatttcagaatgtcattattattagtagtaatttatcaacaaaagttgtggtctcactgcctttattatggtaatttactcaatcttttctctttagaatggacttctatctgcccttccttttattgttgcctgggtcataggcatggtgggaggctatctggcagatttccttctaaccaaaaagtttagactcatcactgtgaggaaaattgccacaattttaggaagtctcccctcttcagcactcattgtgtctctgccttacctcaattccggctatatcacagcaactgccttgctgacgctctcttgcggattaagcacattgtgtcagtcagggatttatatcaatgtcttagatattgctccaaggtattccagttttctcatgggagcatcaagaggattttcgagcatagcacctgtcattgtacccactgtcagcggatttcttcttagtcaggaccctgagtttgggtggaggaatgtcttcttcttgctgtttgccgttaacctgttaggactactcttctacctcatatttggagaagcagatgtccaagaatgggctaaagagagaaaactcactcgtttatgaagttatcccaccttggatggaaaagtcattaggcaccgtattgcataaaatagaaggcttccgtgatgaaaataccagtgaaaagatttttttttcctgtggctcttttcaattatgagatcagttcattattttattcagacttttttttgagagaaatgtaagatgaataaaaattcaaataaaatgataactaag

SEQ ID NO: 88840 - DNA, 2166 bp, Homo sapiens
aattactaaaatgtaattcttgacactctttctataattagcgttcttcacccccacccccacccccaccccccttattttccttttgtctcctggtgattaggccaaagtctgggagtaaggagaggattaggtacttaggagcaaagaaagaagtagcttggaacttttgagatgatccctaacatactgtactacttgcttttacaatgtgttagcagaaaccagtgggttataatgtagaatgatgtgctttctgcccaagtggtaattcatcttggtttgctatgttaaaactgtaaatacaacagaacattaataaatatctcttgtgtaaaaaaaaaaaaaaaaaaaaaaaactcactagttctctcctcgtgccgaattcggcacgagaggaaacgctgggttcaacttgaagcccttccacagacattaagtcggtgtgaaaaccattcactaggagaggagaaacacaatggccaccaagacagagttgagtcccacagcaagggagagcaagaacgcacaagatatgcaagtggatgagacactgatccccaggaaagttccaagtttatgttctgctcgctatggaatagccctcgtcttacatttctgcaatttcacaacgatagcacaatcccagctcaatgattcctctgaggtgctgcctgttgactcatttggtggcctaagtaaagccccaaagagtcttcctgcaaagtcctcaatacttgggggtcagtttgcaatttgggaaaagtggggccctccacaagaacgaagcagactctgcagcattgctttatcaggaatgttactgggatgctttactgccatcctcataggtggcttcattagtgaaacccttgggtggccctttgtcttctatatctttggaggtgttggctgtgtctgctgccttctctggtttgttgtgatttatgatgaccccgtttcctatccatggataagcacctcagaaaaagaatacatcatatcctccttgaaacaacaggtcgggtcttctaagcagcctcttcccatcaaagctatgctcagatctctacccatttggtccatatgtttaggctgtttcagccatcaatggttagttagcacaatggttgtatacataccaacttacatcagctctgtgtaccatgttaacatcagagacgtgagtatgtttccttcccttcctttctcctgcttgcatggctgaccaattactctgccctcactaatcattccatctgagaaatgtatttcttattaccaaaaataatctaatatttaatactcatgccagtagcttttctggggtatgatttaagaggttactgattttcctaagaaagtatgatttcagaatgtcattattattagtagtaatttatcaacaaaagttgtggtctcactgcctttattatggtaatttactcaatcttttctctttagaatggacttctatctgcccttccttttattgttgcctgggtcataggcatggtgggaggctatctggcagatttccttctaaccaaaaagtttagactcatcactgtgaggaaaattgccacaattttaggaagtctcccctcttcagcactcattgtgtctctgccttacctcaattccggctatatcacagcaactgccttgctgacgctctcttgcggattaagcacattgtgtcagtcagggatttatatcaatgtcttagatattgctccaaggtattccagttttctcatgggagcatcaagaggattttcgagcatagcacctgtcattgtacccactgtcagcggatttcttcttagtcaggaccctgagtttgggtggaggaatgtcttcttcttgctgtttgccgttaacctgttaggactactcttctacctcatatttggagaagcagatgtccaagaatgggctaaagagagaaaactcactcgtttatgaagttatcccaccttggatggaaaagtcattaggcaccgtattgcataaaatagaaggcttccgtgatgaaaataccagtgaaaagatttttttttcctgtggctcttttcaattatgagatcagttcattattttattcagacttttttttgagagaaatgtaagatgaataaaaattcaaataaaatgataactaag

SEQ ID NO: 88841 - DNA, 1747 bp, Homo sapiens
gtcggggccagagcgcaggtgtacctggcggccgtgctggagcacctgaccgccgagatcctggagctggctggcaacccggcccgcgacaagaagacccgcatcatcctgcgccacctgtagctggccattcgcaacggcgaggagcttaacaagctgctgggcgaagtcaccatcgcgcagggcggtgtcctgcccaacattcagggcgtgcttctgccccagaagaccaagagccaccacaaggccaagggtgaaaaccattcactaggagaggagaaacacaatggccaccaagacagagttgagtcccacagcaagggagagcaagaacgcacaagatatgcaagtggatgagacactgatccccaggaaagttccaagtttatgttctgctcgctatggaatagccctcgtcttacatttctgcaatttcacaacgatagcacaaaatgtcatcatgaacatcaccatggtagccatggtcaacagcacaagccctcaatcccagctcaatgattcctctgaggtgctgcctgttgactcatttggtggcctaagtaaagccccaaagagtcttcctgcaaagtcctcaatacttgggggtcagtttgcaatttgggaaaagtggggccctccacaagaacgaagcagactctgcagcattgctttatcaggaatgttactgggatgctttactgccatcctcataggtggcttcattagtgaaacccttgggtggccctttgtcttctatatctttggaggtgttggctgtgtctgctgccttctctggtttgttgtgatttatgatgaccccgtttcctatccatggataagcacctcagaaaaagaatacatcatatcctccttgaaacaacaggtcgggtcttctaagcagcctcttcccatcaaagctatgctcagatctctacccatttggtccatatgtttaggctgtttcagccatcaatggttagttagcacaatggttgtatacataccaacttacatcagctctgtgtaccatgttaacatcagagacaatggacttctatctgcccttccttttattgttgcctgggtcataggcatggtgggaggctatctggcagatttccttctaaccaaaaagtttagactcatcactgtgaggaaaattgccacaattttaggaagtctcccctcttcagcactcattgtgtctctgccttacctcaattccggctatatcacagcaactgccttgctgacgctctcttgcggattaagcacattgtgtcagtcagggatttatatcaatgtcttagatattgctccaaggtattccagttttctcatgggagcatcaagaggattttcgagcatagcacctgtcattgtacccactgtcagcggatttcttcttagtcaggaccctgagtttgggtggaggaatgtcttcttcttgctgtttgccgttaacctgttaggactactcttctacctcatatttggagaagcagatgtccaagaatgggctaaagagagaaaactcactcgtttatgaagttatcccaccttggatggaaaagtcattaggcaccgtattgcataaaatagaaggcttccgtgatgaaaataccagtgaaaagatttttttttcctgtggctcttttcaattatgagatcagttcattattttattcagacttttttttgagagaaatgtaagatgaataaaaattcaaataaaatgataactaag

SEQ ID NO: 88842 - DNA, 1782 bp, Homo sapiens
  misc_feature (1)..(1): n is a, c, g, or t
  misc_feature (5)..(5): n is a, c, g, or t
  misc_feature (8)..(10): n is a, c, g, or t
  misc_feature (13)..(16): n is a, c, g, or t
  misc_feature (18)..(20): n is a, c, g, or t
  misc_feature (23)..(25): n is a, c, g, or t
  misc_feature (27)..(27): n is a, c, g, or t
  misc_feature (31)..(31): n is a, c, g, or t
nctcntgnnnatnnnngnnntcnnnanatcnaaggcatcatctttggtgctgttggctatggtggcatactgacaatggctcccagtggatacctggctggaagagtaggaacaaagcgagtggttggcatttctttgtttgcaacttcatttctcactctatgcatccctctggccactgactttggaatagtcttgctcattgtaactcgaatagtccagggcctaagccagtcctcaatacttgggggtcagtttgcaatttgggaaaagtggggccctccacaagaacgaagcagactctgcagcattgctttatcaggaatgttactgggatgctttactgccatcctcataggtggcttcattagtgaaacccttgggtggccctttgtcttctatatctttggaggtgttggctgtgtctgctgccttctctggtttgttgtgatttatgatgaccccgtttcctatccatggataagcacctcagaaaaagaatacatcatatcctccttgaaacaacaggtcgggtcttctaagcagcctcttcccatcaaagctatgctcagatctctacccatttggtccatatgtttaggctgtttcagccatcaatggttagttagcacaatggttgtatacataccaacttacatcagctctgtgtaccatgttaacatcagagacgtgagtatgtttccttcccttcctttctcctgcttgcatggctgaccaattactctgccctcactaatcattccatctgagaaatgtatttcttattaccaaaaataatctaatatttaatactcatgccagtagcttttctggggtatgatttaagaggttactgattttcctaagaaagtatgatttcagaatgtcattattattagtagtaatttatcaacaaaagttgtggtctcactgcctttattatggtaatttactcaatcttttctctttagaatggacttctatctgcccttccttttattgttgcctgggtcataggcatggtgggaggctatctggcagatttccttctaaccaaaaagtttagactcatcactgtgaggaaaattgccacaattttaggaagtctcccctcttcagcactcattgtgtctctgccttacctcaattccggctatatcacagcaactgccttgctgacgctctcttgcggattaagcacattgtgtcagtcagggatttatatcaatgtcttagatattgctccaaggtattccagttttctcatgggagcatcaagaggattttcgagcatagcacctgtcattgtacccactgtcagcggatttcttcttagtcaggaccctgagtttgggtggaggaatgtcttcttcttgctgtttgccgttaacctgttaggactactcttctacctcatatttggagaagcagatgtccaagaatgggctaaagagagaaaactcactcgtttatgaagaaaatgccagaaattgcccagcatgaaacagaacagacagtacaaacattctgcaacacacagaagaggaccagcagaatctggacttttgaaaaagaaaaaatctaactgaataacaacatcaaagtctcctgggcaaaggggttaaagatttacaacatttctttagaggaaaaaaataactggttgaatttacagagcatctgctatgtgccaaacatttaatgagcactttaaaagcatgataaaaattaaaaaaaaaacttgttaagcatgaaataaattacctataatgcaaaatcaat

SEQ ID NO: 88843 - DNA, 2220 bp, Homo sapiens
aattactaaaatgtaattcttgacactctttctataattagcgttcttcacccccacccccacccccaccccccttattttccttttgtctcctggtgattaggccaaagtctgggagtaaggagaggattaggtacttaggagcaaagaaagaagtagcttggaacttttgagatgatccctaacatactgtactacttgcttttacaatgtgttagcagaaaccagtgggttataatgtagaatgatgtgctttctgcccaagtggtaattcatcttggtttgctatgttaaaactgtaaatacaacagaacattaataaatatctcttgtgtaaaaaaaaaaaaaaaaaaaaaaaactcactagttctctcctcgtgccgaattcggcacgagaggaaacgctgggttcaacttgaagcccttccacagacattaagtcggtgtgaaaaccattcactaggagaggagaaacacaatggccaccaagacagagttgagtcccacagcaagggagagcaagaacgcacaagatatgcaagtggatgagacactgatccccaggaaagttccaagtttatgttctgctcgctatggaatagccctcgtcttacatttctgcaatttcacaacgatagcacaaaatgtcatcatgaacatcaccatggtagccatggtcaacagcacaagccctcaatcccagctcaatgattcctctgaggtgctgcctgttgactcatttggtggcctaagtaaagccccaaagagtcttcctgcaaagtcctcaatacttgggggtcagtttgcaatttgggaaaagtggggccctccacaagaacgaagcagactctgcagcattgctttatcaggaatgttactgggatgctttactgccatcctcataggtggcttcattagtgaaacccttgggtggccctttgtcttctatatctttggaggtgttggctgtgtctgctgccttctctggtttgttgtgatttatgatgaccccgtttcctatccatggataagcacctcagaaaaagaatacatcatatcctccttgaaacaacaggtcgggtcttctaagcagcctcttcccatcaaagctatgctcagatctctacccatttggtccatatgtttaggctgtttcagccatcaatggttagttagcacaatggttgtatacataccaacttacatcagctctgtgtaccatgttaacatcagagacgtgagtatgtttccttcccttcctttctcctgcttgcatggctgaccaattactctgccctcactaatcattccatctgagaaatgtatttcttattaccaaaaataatctaatatttaatactcatgccagtagcttttctggggtatgatttaagaggttactgattttcctaagaaagtatgatttcagaatgtcattattattagtagtaatttatcaacaaaagttgtggtctcactgcctttattatggtaatttactcaatcttttctctttagaatggacttctatctgcccttccttttattgttgcctgggtcataggcatggtgggaggctatctggcagatttccttctaaccaaaaagtttagactcatcactgtgaggaaaattgccacaattttaggaagtctcccctcttcagcactcattgtgtctctgccttacctcaattccggctatatcacagcaactgccttgctgacgctctcttgcggattaagcacattgtgtcagtcagggatttatatcaatgtcttagatattgctccaaggtattccagttttctcatgggagcatcaagaggattttcgagcatagcacctgtcattgtacccactgtcagcggatttcttcttagtcaggaccctgagtttgggtggaggaatgtcttcttcttgctgtttgccgttaacctgttaggactactcttctacctcatatttggagaagcagatgtccaagaatgggctaaagagagaaaactcactcgtttatgaagttatcccaccttggatggaaaagtcattaggcaccgtattgcataaaatagaaggcttccgtgatgaaaataccagtgaaaagatttttttttcctgtggctcttttcaattatgagatcagttcattattttattcagacttttttttgagagaaatgtaagatgaataaaaattcaaataaaatgataactaag

SEQ ID NO: 88844 - DNA, 299 bp, Homo sapiens
gttttatgggctgggcttggaaatggcctatgtcacctcaccttcattcagtcttctggtcattcctagctgcaaaggagactggggaatttaacccacctctatgcctggaaggaagaagtaacagatttggtgagcatttggccagtccaccagagtgagtcacttggtttggctaaaatgagctctttctctgtggaaatgtattgtctttccaaaaactcatagggattttccagactaataccccatttctctagctgtccagggaaagacaagaaagactttgaaatctaaca

SEQ ID NO: 88845 - DNA, 737 bp, Homo sapiens
aagcagggtatcaacgcagagtgcccattacggccgggggacctctctgtcagtcgcgagcgaacgaccaagagggtgttcgactgctagagccgagcgaagcgatgcctaaatcaaaggaacttgtttcttcaagctcttctggcagtgattctgacagtgaggttgacaaaaagttaaagaggaaaaagcaagttgctccagaaaaacctgtaaagaaacaaaagacaggtgagacttcgagagccctgtcatcttctaaacagagcagcagcagcagagatgataacatgtttcagattgggaaaatgaggtacgttagtgttcgcgattttaaaggcaaagtgctaattgatattagagaatattggatggatcctgaaggtgaaatgaaaccaggaagaaaaggtatttctttaaatccagaacaatggagccagctgaaggaacagatttctgacattgatgatgcagtaagaaaactgtaaaattcgagccatataaataaaacctgtactgttctagttgttttaatctgtctttttacattggcttttgttttctaaatgttctccaagctattgtatgtttggattgcagaagaatttgtaagatgaatacttttttttaatgtgcattattaaaaatattgagtgaagctaattgtcaactttattaaggattactttgtctgcccaccacctagtgtaaaataaaatcaagtaatacaatcttaa

SEQ ID NO: 88846 - DNA, 845 bp, Homo sapiens
  misc_feature (3)..(3): n is a, c, g, or t
tgnattcggccattatggccgggggagctctctgtcagtcgcgagcgaacgaccaagagggtgttcgactgctagagccgagcgaagcgatgcctaaatcaaaggaacttgtttcttcaagctcttctggcagtgattctgacagtgaggttgacaaaaagttaaagaggaaaaagcaagttgctccagaaaaacctgtaaagaaacaaaagacaggtgagacttcgagagccctgtcatcttctaaacagagcagcagcagcagagatgataacatgtttcagattgggaaaatgaggtacgttagtgttcgcgattttaaaggcaaagtgctaattgatattagagaatattggatggatcctgaaggtgaaatgaaaccaggaagaaaaggtatttctttaaatccagaacaatggagccagctgaaggaacagatttctgacattgatgatgcagtaagaaaactgtaaaattcgagccatataaataaaacctgtactgttctagttgttttaatctgtctttttacattggcttttgttttctaaatgttctccaagctattgtatgtttggattgcagaagaatttgtaagatgaatacttttttttaatgtgcattattaaaaatattgagtgaagctaattgtcaactttattaaggattactttgtctgcccaccacctagtgtaaaataaatcagtatacatctcaaaaaaaaaaaaaaaaaaaaaaaaatgttggccgcttggcccaataatttaaattgacaagttttgatggcggcgaattaggctaattggcatttgcctaaggggggcgatattgggcccggttagggg

SEQ ID NO: 88847 - DNA, 774 bp, Homo sapiens
  misc_feature (757)..(757): n is a, c, g, or t
  misc_feature (766)..(766): n is a, c, g, or t
gcgaattgggtaacgggccccccctcagtgtcgcgggtatctataagcttgaaatcgaattccgctctctgtcagtcgcgagcgaacgaccaagagggtgttcgactgctagagccgagcgaagcgatgcctaaatcaaaggaacttgtttcttcaagctcttctggcagtgattctgacagtgaggttgacaaaaagttaaagaggaaaaagcaagttgctccagaaaaacctgtaaagaaacaaaagacaggtgagacttcgagagccctgtcatcttctaaacagagcagcagcagcagagatgataacatgtttcagattgggaaaatgaggtacgttagtgttcgcgattttaaaggcaaagtgctaattgatattagagaatattggatggatcctgaaggtgaaatgaaaccaggaagaaaaggtatttctttaaatccagaacaatggagccagctgaaggaacagatttctgacattgatgatgcagtaagaaaactgtaaaattcgagccatataaataaaacctgtactgttctagttgttttaatctgtctttttacattggcttttgttttctaaatgttctccaagctattgtatgtttggattgcagaagaatttgtaagatgaatacttttttttaatgtgcattattaaaaatattgagtgaagctaattgtcaactttattaaggattactttgtctgcccaccacctagtgtaaaataaaacaagtaacctttcgtgnataaaagtnggttaaaa

SEQ ID NO: 88848 - DNA, 662 bp, Homo sapiens
aagcagggtatcaacgcagagtgcccattacggccgggggacctctctgtcagtcgcgagcgaacgaccaagagggtgttcgactgctagagccgagcgaagcgatgcctaaatcaaaggaacttgtttcttcaagctcttctggcagtgattctgacagtgaggttgacaaaaagttaaagaggaaaaagcaagttgctccagaaaaacctgtaaagaaacaaaagacaggtgagacttcgagagccctgtcatcttctaaacagagcagcagcagcagagatgataacatgtttcagattgggaaaatgaggtacgttagtgttcgcgattttaaaggcaaagtgctaattgatattagagaatattggatggatcctgaaggtgaaatgaaaccaggaagaaaaggtatttctttaaatccagaacaatggagccagctgaaggaacagatttctgacattgatgatgcagtaagaaaactgtaaaattcgagccatataaataaaacctgtactgttctagttgttttaatctgtctttttacattggcttttgttttctaaatgttctccaagctattgtatgtttggattgcagaagaatttgtaagatgaatacttttttttaatgtgcattattaaaaatattgagtgaagcta

SEQ ID NO: 88849 - DNA, 492 bp, Homo sapiens
  misc_feature (45)..(45): n is a, c, g, or t
atgaggtatattggtattttgatttagcccgtcctttttgttccntcacctactattgggaaaatgaggtacgttagtgttcgcgattttaaaggcaaagtgctaattgatattagagaatattggatggatcctgaaggtgaaatgaaaccaggaagaaaaggtatttctttaaatccagaacaatggagccagctgaaggaacagatttctgacattgatgatgcagtaagaaaactgtaaaattcgagccatataaataaaacctgtactgttctagttgttttaatctgtctttttacattggcttttgttttctaaatgttctccaagctattgtatgtttggattgcagaagaatttgtaagatgaatacttttttttaatgtgcattattaaaaatattgagtgaagctaattgtcaactttattaaggattactttgtctgcccaccacctagtgtaaaataaaatcaagtaatacaatcttaa

SEQ ID NO: 88850 - DNA, 495 bp, Homo sapiens
  misc_feature (43)..(43): n is a, c, g, or t
ttttttatttctataatattgataattaatatctccctctccncctttgaacacctaattgggaaaatgaggtacgttagtgttcgcgattttaaaggcaaagtgctaattgatattagagaatattggatggatcctgaaggtgaaatgaaaccaggaagaaaaggtatttctttaaatccagaacaatggagccagctgaaggaacagatttctgacattgatgatgcagtaagaaaactgtaaaattcgagccatataaataaaacctgtactgttctagttgttttaatctgtctttttacattggcttttgttttctaaatgttctccaagctattgtatgtttggattgcagaagaatttgtaagatgaatacttttttttaatgtgcattattaaaaatattgagtgaagctaattgtcaactttattaaggattactttgtctgcccaccacctagtgtaaaataaaatcaagtaatacaatcttaa

SEQ ID NO: 88851 - DNA, 1386 bp, Homo sapiens
agcggatcacgtgaccgcagccccagcgcggcggggccggcgtctcctggctgccgtcacttccggttctctctgtcagtcgcgagcgaacgaccaagagggtgttcgactgctagagccgagcgaagcgatgcctaaatcaaaggaacttgtttcttcaagctcttctggcagtgattctgacagtgaggttgacaaaaagttaaagaggaaaaagcaagttgctccagaaaaacctgtaaagaaacaaaagacaggtgagacttcgagagccctgtcatcttctaaacagagcagcagcagcagagatgataacatgtttcagattgggaaaatgaggtacgttagtgttcgcgattttaaaggcaaagtgctaattgatattagagaatattggatggatcctgaaggtgaaatgaaaccaggaagaaaaggtatttctttaaatccagaacaatggagccagctgaaggaacagatttctgacattgatgatgcagtaagaaaactgtaaaattcgagccatataaataaaacctgtactgttctagttgttttaatctgtctttttacattggcttttgttttctaaatgttctccaagctattgtatgtttggattgcagaagaatttgtaagatgaatacttttttttaatgtgcattattaaaaatattgagtgaagctaattgtcaactttattaaggattactttgtctgcccaccacctagtgtaaaataaaatcaagtaatacaatcttaactgttgtggccttttttgatcataagagttggtactgtttaaggccaaaagtaacagtttttatagatcttttagtttcaactcagcttttacaataaaaaggatttgtattgcattgagtttataaacttttggtttgtgaacttcatatttgatcttttctcttccaatcaaatgtctaggcttgtttgacttccacccccaatggtttttcactctttttatttacttcattttcctttaataacttaatctcttcatgttcagtttttacttcactctttattcttttctttgattatggtatgcttatttggaaagtcagtgaaactgtcaaaatgttatctcaataagatacttatatgagaactacaatcaccgaatctactgtattcaatattagcagatctaatttgataaacaacatggcttgtgtgaaaactgagcaggtgtttgtttacccatagtgttctgtgtagttattgcttagtctgcagaaaataatgacttagatgagatgtctgacttgctttcacttattaaacatgttcaccatgggatgatgtctgtaacatcagatattgttcaactagactaggatttaataaaaattgtgaaagctt

SEQ ID NO: 88852 - DNA, 1070 bp, Homo sapiens
  misc_feature (791)..(791): n is a, c, g, or t
  misc_feature (798)..(798): n is a, c, g, or t
  misc_feature (811)..(811): n is a, c, g, or t
  misc_feature (823)..(823): n is a, c, g, or t
  misc_feature (833)..(833): n is a, c, g, or t
  misc_feature (841)..(842): n is a, c, g, or t
  misc_feature (876)..(876): n is a, c, g, or t
  misc_feature (882)..(883): n is a, c, g, or t
  misc_feature (886)..(886): n is a, c, g, or t
  misc_feature (903)..(903): n is a, c, g, or t
  misc_feature (928)..(928): n is a, c, g, or t
  misc_feature (945)..(945): n is a, c, g, or t
  misc_feature (950)..(950): n is a, c, g, or t
  misc_feature (958)..(958): n is a, c, g, or t
  misc_feature (961)..(961): n is a, c, g, or t
  misc_feature (987)..(987): n is a, c, g, or t
  misc_feature (1010)..(1010): n is a, c, g, or t
  misc_feature (1017)..(1017): n is a, c, g, or t
  misc_feature (1026)..(1026): n is a, c, g, or t
  misc_feature (1033)..(1033): n is a, c, g, or t
  misc_feature (1037)..(1037): n is a, c, g, or t
  misc_feature (1042)..(1043): n is a, c, g, or t
  misc_feature (1047)..(1047): n is a, c, g, or t
  misc_feature (1049)..(1049): n is a, c, g, or t
  misc_feature (1052)..(1053): n is a, c, g, or t
  misc_feature (1058)..(1058): n is a, c, g, or t
  misc_feature (1064)..(1064): n is a, c, g, or t
agcggatcacgtgaccgcagccccagcgcggcggggccggcgtctcctggctgccgtcacttccggttctctctgtcagtcgcgagcgaacgaccaagagggtgttcgactgctagagccgagcgaagcgatgcctaaatcaaaggaacttgtttcttcaagctcttctggcagtgattctgacagtgaggttgacaaaaagttaaagaggaaaaagcaagttgctccagaaaaacctgtaaagaaacaaaagacaggtgagacttcgagagccctgtcatcttctaaacagagcagcagcagcagagatgataacatgtttcagattgggaaaatgaggtacgttagtgttcgcgattttaaaggcaaagtgctaattgatattagagaatattggatggatcctgaaggtgaaatgaaaccaggaagaaaaggtatttctttaaatccagaacaatggagccagctgaaggaacagatttctgacattgatgatgcagtaagaaaactgtaaaattcgagccatataaataaaacctgtactgttctagttgttttaatctgtctttttacattggcttttgttttctaaatgttctccaagctattgtatgtttggattgcagaagaatttgtaagatgaatacttttttttaatgtgcattattaaaaatattgagtgaagctaattgtcaactttattaaggattactttgtctgcccaccacctagtgtaaaataaaatcaagtaatacaatcttaaaaaaaaaaaaaaaaaaaaaaaaaactcnagggggncccgtaccaattngcctatatgagncgatacaatnactggcgnngtttacacgtctgactggaaaaccctgcgtaccnactaanngcntgagaatccctttgcangtgcgtatacaaaagcccgaccgangcctttcaacagtgcanctgantgcaatgnaantgaacgtaatattgtaaatccgtaantttgtaatactatttttaccatngcgaatngaaaacctntaataangatnccgtnnggtngngtnncattngaaaancccttt

SEQ ID NO: 88853 - DNA, 1331 bp, Homo sapiens
agcggatcacgtgaccgcagccccagcgcggcggggccggcgtctcctggctgccgtcacttccggttctctctgtcagtcgcgagcgaacgaccaagagggtgttcgactgctagagccgagcgaagcgatgcctaaatcaaaggaacttgtttcttcaagctcttctggcagtgattctgacagtgaggttgacaaaaagttaaagaggaaaaagcaagttgctccagaaaaacctgtaaagaaacaaaagacaggtgagacttcgagagccctgtcatcttctaaacagagcagcagcagcagagatgataacatgtttcagattgggaaaatgaggtacgttagtgttcgcgattttaaaggcaaagtgctaattgatattagagaatattggatggatcctgaaggtgaaatgaaaccaggaagaaaaggtatttctttaaatccagaacaatggagccagctgaaggaacagatttctgacattgatgatgcagtaagaaaactgtaaaattcgagccatataaataaaacctgtactgttctagttgttttaatctgtctttttacattggcttttgttttctaaatgttctccaagctattgtatgtttggattgcagaagaatttgtaagatgaatacttttttttaatgtgcattattaaaaatattgagtgaagctaattgtcaactttattaaggattactttgtctgcccaccacctagtgtattggtactgtttaaggccaaaagtaacagtttttatagatcttttagtttcaactcagcttttacaataaaaaggatttgtattgcattgagtttataaacttttggtttgtgaacttcatatttgatcttttctcttccaatcaaatgtctaggcttgtttgacttccacccccaatggtttttcactctttttatttacttcattttcctttaataacttaatctcttcatgttcagtttttacttcactctttattcttttctttgattatggtatgcttatttggaaagtcagtgaaactgtcaaaatgttatctcaataagatacttatatgagaactacaatcaccgaatctactgtattcaatattagcagatctaatttgataaacaacatggcttgtgtgaaaactgagcaggtgtttgtttacccatagtgttctgtgtagttattgcttagtctgcagaaaataatgacttagatgagatgtctgacttgctttcacttattaaacatgttcaccatgggatgatgtctgtaacatcagatattgttcaactagactaggatttaataaaaattgtgaaagctt

SEQ ID NO: 88854 - DNA, 792 bp, Homo sapiens
agcggatcacgtgaccgcagccccagcgcggcggggccggcgtctcctggctgccgtcacttccggttctctctgtcagtcgcgagcgaacgaccaagagggtgttcgactgctagagccgagcgaagcgatgcctaaatcaaaggaacttgtttcttcaagctcttctggcagtgattctgacagtgaggttgacaaaaagttaaagaggaaaaagcaagttgctccagaaaaacctgtaaagaaacaaaagacaggtgagacttcgagagccctgtcatcttctaaacagagcagcagcagcagagatgataacatgtttcagattgggaaaatgaggtacgttagtgttcgcgattttaaaggcaaagtgctaattgatattagagaatattggatggatcctgaaggtgaaatgaaaccaggaagaaaaggtatttctttaaatccagaacaatggagccagctgaaggaacagatttctgacattgatgatgcagtaagaaaactgtaaaattcgagccatataaataaaacctgtactgttctagttgttttaatctgtctttttacattggcttttgttttctaaatgttctccaagctattgtatgtttggattgcagaagaatttgtaagatgaatacttttttttaatgtgcattattaaaaatattgagtgaagctaattgtcaactttattaaggattactttgtctgcccaccacctagtgtaaaataaaatcaaagtaaaaataactatcacctaatgttctgtcggccgcctcgccc

SEQ ID NO: 88855 - DNA, 1064 bp, Homo sapiens
  misc_feature (785)..(785): n is a, c, g, or t
  misc_feature (792)..(792): n is a, c, g, or t
  misc_feature (805)..(805): n is a, c, g, or t
  misc_feature (817)..(817): n is a, c, g, or t
  misc_feature (827)..(827): n is a, c, g, or t
  misc_feature (835)..(836): n is a, c, g, or t
  misc_feature (870)..(870): n is a, c, g, or t
  misc_feature (876)..(877): n is a, c, g, or t
  misc_feature (880)..(880): n is a, c, g, or t
  misc_feature (897)..(897): n is a, c, g, or t
  misc_feature (922)..(922): n is a, c, g, or t
  misc_feature (939)..(939): n is a, c, g, or t
  misc_feature (944)..(944): n is a, c, g, or t
  misc_feature (952)..(952): n is a, c, g, or t
  misc_feature (955)..(955): n is a, c, g, or t
  misc_feature (981)..(981): n is a, c, g, or t
  misc_feature (1004)..(1004): n is a, c, g, or t
  misc_feature (1011)..(1011): n is a, c, g, or t
  misc_feature (1020)..(1020): n is a, c, g, or t
  misc_feature (1027)..(1027): n is a, c, g, or t
  misc_feature (1031)..(1031): n is a, c, g, or t
  misc_feature (1036)..(1037): n is a, c, g, or t
  misc_feature (1041)..(1041): n is a, c, g, or t
  misc_feature (1043)..(1043): n is a, c, g, or t
  misc_feature (1046)..(1047): n is a, c, g, or t
  misc_feature (1052)..(1052): n is a, c, g, or t
  misc_feature (1058)..(1058): n is a, c, g, or t
agcggatcacgtgaccgcagccccagcgcggcggggccggcgtctcctggctgccgtcacttccggttctctctgtcagtcgcgagcgaacgaccaagagggtgttcgactgctagagccgagcgaagcgatgcctaaatcaaaggaacttgtttcttcaagctcttctggcagtgattctgacagtgaggttgacaaaaagttaaagaggaaaaagcaagttgctccagaaaaacctgtaaagaaacaaaagacaggtgagacttcgagagccctgtcatcttctaaacagagcagcagcagcagagatgataacatgtttcagattgggaaaatgaggtacgttagtgttcgcgattttaaaggcaaagtgctaattgatattagagaatattggatggatcctgaaggtgaaatgaaaccaggaagaaaaggtatttctttaaatccagaacaatggagccagctgaaggaacagatttctgacattgatgatgcagtaagaaaactgtaaaattcgagccatataaataaaacctgtactgttctagttgttttaatctgtctttttacattggcttttgttttctaaatgttctccaagctattgtatgtttggattgcagaagaatttgtaagatgaatacttttttttaatgtgcattattaaaaatattgagtgaagctaattgtcaactttattaaggattactttgtctgcccaccacctagtgtaaaataaatcagtatacatctcaaaaaaaaaaaaaaaaaaaaaaaactcnagggggncccgtaccaattngcctatatgagncgatacaatnactggcgnngtttacacgtctgactggaaaaccctgcgtaccnactaanngcntgagaatccctttgcangtgcgtatacaaaagcccgaccgangcctttcaacagtgcanctgantgcaatgnaantgaacgtaatattgtaaatccgtaantttgtaatactatttttaccatngcgaatngaaaacctntaataangatnccgtnnggtngngtnncattngaaaancccttt

SEQ ID NO: 88856 - DNA, 737 bp, Homo sapiens
ctctgcagagcttccgctgcttcaaaacggcgtgcaggagtcagagacattacatcaggaagatactgcagagatattctactccatctcattcattgtacaggatgcctaaatcaaaggaacttgtttcttcaagctcttctggcagtgattctgacagtgaggttgacaaaaagttaaagaggaaaaagcaagttgctccagaaaaacctgtaaagaaacaaaagacaggtgagacttcgagagccctgtcatcttctaaacagagcagcagcagcagagatgataacatgtttcagattgggaaaatgaggtacgttagtgttcgcgattttaaaggcaaagtgctaattgatattagagaatattggatggatcctgaaggtgaaatgaaaccaggaagaaaaggtatttctttaaatccagaacaatggagccagctgaaggaacagatttctgacattgatgatgcagtaagaaaactgtaaaattcgagccatataaataaaacctgtactgttctagttgttttaatctgtctttttacattggcttttgttttctaaatgttctccaagctattgtatgtttggattgcagaagaatttgtaagatgaatacttttttttaatgtgcattattaaaaatattgagtgaagctaattgtcaactttattaaggattactttgtctgcccaccacctagtgtaaaataaaatcaagtaatacaatcttaa

SEQ ID NO: 88857 - DNA, 821 bp, Homo sapiens
ctctgcagagcttccgctgcttcaaaacggcgtgcaggagtcagagacattacatcaggaagatactgcagagatattctactccatctcattcattgtacagattctaaactccctgaaggagacaaattaccagtggacaagaacacagcctctggagtccaataggcctggtgcattcattagggatgcctaaatcaaaggaacttgtttcttcaagctcttctggcagtgattctgacagtgaggttgacaaaaagttaaagaggaaaaagcaagttgctccagaaaaacctgtaaagaaacaaaagacaggtgagacttcgagagccctgtcatcttctaaacagagcagcagcagcagagatgataacatgtttcagattgggaaaatgaggtacgttagtgttcgcgattttaaaggcaaagtgctaattgatattagagaatattggatggatcctgaaggtgaaatgaaaccaggaagaaaaggtatttctttaaatccagaacaatggagccagctgaaggaacagatttctgacattgatgatgcagtaagaaaactgtaaaattcgagccatataaataaaacctgtactgttctagttgttttaatctgtctttttacattggcttttgttttctaaatgttctccaagctattgtatgtttggattgcagaagaatttgtaagatgaatacttttttttaatgtgcattattaaaaatattgagtgaagctaattgtcaactttattaaggattactttgtctgcccaccacctagtgtaaaataaaatcaagtaatacaatcttaa

SEQ ID NO: 88858 - DNA, 854 bp, Homo sapiens
agcggatcacgtgaccgcagccccagcgcggcggggccggcgtctcctggctgccgtcacttccggttctctctgtcagtcgcgagcgaacgaccaagagggtgttcgactgctagagccgagcgaagcgatgcctaaatcaaaggaacttgtttcttcaagctcttctggcagtgattctgacagtgaggttgacaaaaagttaaagaggaaaaagcaagttgctccagaaaaacctgtaaagaaacaaaagacaggtgagacttcgagagccctgtcatcttctaaacagagcagcagcagcagagatgataacatgtttcagattgggaaaatgaggtacgttagtgttcgcgattttaaaggcaaagtgctaattgatattagagaatattggatggatcctgaaggtgaaatgaaaccaggaagaaaaggtatttctttaaatccagaacaatggagccagctgaaggaacagatttctgacattgatgatgcagtaagaaaactgtaaaattcgagccatataaataaaacctgtactgttctagttgttttaatctgtctttttacattggcttttgttttctaaatgttctccaagctattgtatgtttggattgcagaagaatttgtaagatgaatacttttttttaatgtgcattattaaaatattgagcaaaaaaaaggaaaaaaaaaaaaatttgtggcgcttggccgaagaaagtttaaaccatcgtggtggggggggccaggggagggaattggctaggggccaaggaactggcgtggggggttcacaaaaaagccgggccgggtttgacacgagggtgggtgggctaaggggcaggcac

SEQ ID NO: 88859 - DNA, 1006 bp, Homo sapiens
  misc_feature (727)..(727): n is a, c, g, or t
  misc_feature (734)..(734): n is a, c, g, or t
  misc_feature (747)..(747): n is a, c, g, or t
  misc_feature (759)..(759): n is a, c, g, or t
  misc_feature (769)..(769): n is a, c, g, or t
  misc_feature (777)..(778): n is a, c, g, or t
  misc_feature (812)..(812): n is a, c, g, or t
  misc_feature (818)..(819): n is a, c, g, or t
  misc_feature (822)..(822): n is a, c, g, or t
  misc_feature (839)..(839): n is a, c, g, or t
  misc_feature (864)..(864): n is a, c, g, or t
  misc_feature (881)..(881): n is a, c, g, or t
  misc_feature (886)..(886): n is a, c, g, or t
  misc_feature (894)..(894): n is a, c, g, or t
  misc_feature (897)..(897): n is a, c, g, or t
  misc_feature (923)..(923): n is a, c, g, or t
  misc_feature (946)..(946): n is a, c, g, or t
  misc_feature (953)..(953): n is a, c, g, or t
  misc_feature (962)..(962): n is a, c, g, or t
  misc_feature (969)..(969): n is a, c, g, or t
  misc_feature (973)..(973): n is a, c, g, or t
  misc_feature (978)..(979): n is a, c, g, or t
  misc_feature (983)..(983): n is a, c, g, or t
  misc_feature (985)..(985): n is a, c, g, or t
  misc_feature (988)..(989): n is a, c, g, or t
  misc_feature (994)..(994): n is a, c, g, or t
  misc_feature (1000)..(1000): n is a, c, g, or t
agcggatcacgtgaccgcagccccagcgcggcggggccggcgtctcctggctgccgtcacttccggttctctctgtcagtcgcgagcgaacgaccaagagggtgttcgactgctagagccgagcgaagcgatgcctaaatcaaaggaacttgtttcttcaagctcttctggcagtgattctgacagtgaggttgacaaaaagttaaagaggaaaaagcaagttgctccagaaaaacctgtaaagaaacaaaagacaggtgagacttcgagagccctgtcatcttctaaacagagcagcagcagcagagatgataacatgtttcagattgggaaaatgaggtacgttagtgttcgcgattttaaaggcaaagtgctaattgatattagagaatattggatggatcctgaaggtgaaatgaaaccaggaagaaaaggtatttctttaaatccagaacaatggagccagctgaaggaacagatttctgacattgatgatgcagtaagaaaactgtaaaattcgagccatataaattctccaagctattgtatgtttggattgcagaagaatttgtaagatgaatacttttttttaatgtgcattattaaaaatattgagtgaagctaattgtcaactttattaaggattactttgtctgcccaccacctagtgtaaaataaaatcaagtaatacaatcttaaaaaaaaaaaaaaaaaaaaaaaaaactcnagggggncccgtaccaattngcctatatgagncgatacaatnactggcgnngtttacacgtctgactggaaaaccctgcgtaccnactaanngcntgagaatccctttgcangtgcgtatacaaaagcccgaccgangcctttcaacagtgcanctgantgcaatgnaantgaacgtaatattgtaaatccgtaantttgtaatactatttttaccatngcgaatngaaaacctntaataangatnccgtnnggtngngtnncattngaaaancccttt

SEQ ID NO: 88860 - DNA, 746 bp, Homo sapiens
ctctgcagagcttccgctgcttcaaaacggcgtgcaggagtcagagacattacatcaggaagatactgcagagatattctactccatctcattcattgtacagattctaaactccctgaaggagacaaattaccagtggacaagaacacagcctctggagtccaataggcctggtgcattcattagggatgcctaaatcaaaggaacttgtttcttcaagctcttctggcagtgattctgacagtgaggttgacaaaaagttaaagaggaaaaagcaagttgctccagaaaaacctgtaaagaaacaaaagacaggtgagacttcgagagccctgtcatcttctaaacagagcagcagcagcagagatgataacatgtttcagattgggaaaatgaggtacgttagtgttcgcgattttaaaggcaaagtgctaattgatattagagaatattggatggatcctgaaggtgaaatgaaaccaggaagaaaaggtatttctttaaatccagaacaatggagccagctgaaggaacagatttctgacattgatgatgcagtaagaaaactgtaaaattcgagccatataaataaaacctgtactgttctagttgttttaatctgtctttttacattggcttttgttttctaaatgttctccaagctattgtatgtttggattgcagaagaatttgtaagatgaatacttttttttaatgtgcattattaaaaatattgagtgaagcta

SEQ ID NO: 88861 - DNA, 505 bp, Homo sapiens
gcccgcacattactcctcctcctctcgtcgcctgtggtgatgaaagcccttgttatgaacaaaagagattgggaaaatgaggtacgttagtgttcgcgattttaaaggcaaagtgctaattgatattagagaatattggatggatcctgaaggtgaaatgaaaccaggaagaaaaggtatttctttaaatccagaacaatggagccagctgaaggaacagatttctgacattgatgatgcagtaagaaaactgtaaaattcgagccatataaataaaacctgtactgttctagttgttttaatctgtctttttacattggcttttgttttctaaatgttctccaagctattgtatgtttggattgcagaagaatttgtaagatgaatacttttttttaatgtgcattattaaaaatattgagtgaagctaattgtcaactttattaaggattactttgtctgcccaccacctagtgtaaaataaaatcaagtaatacaatcttaa

SEQ ID NO: 88862 - DNA, 497 bp, Homo sapiens
  misc_feature (1)..(1): n is a, c, g, or t
  misc_feature (25)..(25): n is a, c, g, or t
  misc_feature (43)..(43): n is a, c, g, or t
naaaaaaaaaaaaaaaaaacaaaanaaaaagtgtatggaaagnatttgggtcttcagctattgggaaaatgaggtacgttagtgttcgcgattttaaaggcaaagtgctaattgatattagagaatattggatggatcctgaaggtgaaatgaaaccaggaagaaaaggtatttctttaaatccagaacaatggagccagctgaaggaacagatttctgacattgatgatgcagtaagaaaactgtaaaattcgagccatataaataaaacctgtactgttctagttgttttaatctgtctttttacattggcttttgttttctaaatgttctccaagctattgtatgtttggattgcagaagaatttgtaagatgaatacttttttttaatgtgcattattaaaaatattgagtgaagctaattgtcaactttattaaggattactttgtctgcccaccacctagtgtaaaataaaatcaagtaatacaatcttaa

SEQ ID NO: 88863 - DNA, 670 bp, Homo sapiens
gagttttttcaaattgtcaagtctgcaaaaatttttccagtatatttattgaaaaaaatatgcatataagtgggacctgcacagttcagagccatgttgttcaagggtcagcagtagtcattttcatgattagatgtagagtgagcatgcagcaagttgtgaatatgaatacaattgaaacagataccactcttgaaaggagcacctctttttatgtttgtttcttttgcagattgggaaaatgaggtacgttagtgttcgcgattttaaaggcaaagtgctaattgatattagagaatattggatggatcctgaaggtgaaatgaaaccaggaagaaaaggtatttctttaaatccagaacaatggagccagctgaaggaacagatttctgacattgatgatgcagtaagaaaactgtaaaattcgagccatataaataaaacctgtactgttctagttgttttaatctgtctttttacattggcttttgttttctaaatgttctccaagctattgtatgtttggattgcagaagaatttgtaagatgaatacttttttttaatgtgcattattaaaaatattgagtgaagctaattgtcaactttattaaggattactttgtctgcccaccacctagtgtaaaataaaatcaagtaatacaatcttaa

SEQ ID NO: 88864 - DNA, 501 bp, Homo sapiens
aaaaagattttatatttaagttttaaatatatgacattattaatcccatattaatatgttagtattgggaaaatgaggtacgttagtgttcgcgattttaaaggcaaagtgctaattgatattagagaatattggatggatcctgaaggtgaaatgaaaccaggaagaaaaggtatttctttaaatccagaacaatggagccagctgaaggaacagatttctgacattgatgatgcagtaagaaaactgtaaaattcgagccatataaataaaacctgtactgttctagttgttttaatctgtctttttacattggcttttgttttctaaatgttctccaagctattgtatgtttggattgcagaagaatttgtaagatgaatacttttttttaatgtgcattattaaaaatattgagtgaagctaattgtcaactttattaaggattactttgtctgcccaccacctagtgtaaaataaaatcaagtaatacaatcttaa

SEQ ID NO: 88865 - DNA, 1237 bp, Homo sapiens
aagcagggtatcaacgcagagtgcccattacggccgggggacctctctgtcagtcgcgagcgaacgaccaagagggtgttcgactgctagagccgagcgaagcgatgcctaaatcaaaggaacttgtttcttcaagctcttctggcagtgattctgacagtgaggttgacaaaaagattgggaaaatgaggtacgttagtgttcgcgattttaaaggcaaagtgctaattgatattagagaatattggatggatcctgaaggtgaaatgaaaccaggaagaaaaggtatttctttaaatccagaacaatggagccagctgaaggaacagatttctgacattgatgatgcagtaagaaaactgtaaaattcgagccatataaataaaacctgtactgttctagttgttttaatctgtctttttacattggcttttgttttctaaatgttctccaagctattgtatgtttggattgcagaagaatttgtaagatgaatacttttttttaatgtgcattattaaaaatattgagtgaagctaattgtcaactttattaaggattactttgtctgcccaccacctagtgtaaaataaaatcaagtaatacaatcttaactgttgtggccttttttgatcataagagttggtactgtttaaggccaaaagtaacagtttttatagatcttttagtttcaactcagcttttacaataaaaaggatttgtattgcattgagtttataaacttttggtttgtgaacttcatatttgatcttttctcttccaatcaaatgtctaggcttgtttgacttccacccccaatggtttttcactctttttatttacttcattttcctttaataacttaatctcttcatgttcagtttttacttcactctttattcttttctttgattatggtatgcttatttggaaagtcagtgaaactgtcaaaatgttatctcaataagatacttatatgagaactacaatcaccgaatctactgtattcaatattagcagatctaatttgataaacaacatggcttgtgtgaaaactgagcaggtgtttgtttacccatagtgttctgtgtagttattgcttagtctgcagaaaataatgacttagatgagatgtctgacttgctttcacttattaaacatgttcaccatgggatgatgtctgtaacatcagatattgttcaactagactaggatttaataaaaattgtgaaagctt

SEQ ID NO: 88866 - DNA, 946 bp, Homo sapiens
agcggatcacgtgaccgcagccccagcgcggcggggccggcgtctcctggctgccgtcacttccggttctctctgtcagtcgcgagcgaacgaccaagagggtgttcgactgctagagccgagcgaagcgatgcctaaatcaaaggaacttgtttcttcaagctcttctggcagtgattctgacagtgaggttgacaaaaagttaaagaggaaaaagcaagttgctccagaaaaacctgtaaagaaacaaaagacaggtgagacttcgagagccctgtcatcttctaaacagagcagcagcagcagagatgataacatgtttcaggaattattcataacctttatcacaggggtccctcctgcacaggaggtgagcggtgtgtgagtgaacattgcagcctgagctctgcctcctgtcagatcagcagcggcattagattctcataggagcgcgaaccctattgtgaactgcgcatgcaagggatctaggttgtgcgttccttattccttatgagaatctaatgcctgatggtgggataatttttatcctgaaacgatcacctttccccttccctacctgctgtggaaaaattgtcttccatgagactggtccctggtgccaaaaaggttaggaaccactgctttatcagatcttcagaggggacagggaatcaaattcgtataagaatcacagttctttatgatgtatatgctattttttgctgctaatctccagattttgtggatataaaatatattgtcatctgattttatttttttccaataaaatgtgatttcagtgatctttattttttctatctttaagtaatatatccctatactactatctcatcacttgtttaatttttgctaataagaatttgtcagttttactctttttttcccccaagggagaggcagctgttgggcagattccttttttttt

SEQ ID NO: 88867 - DNA, 432 bp, Homo sapiens
  misc_feature (254)..(254): n is a, c, g, or t
  misc_feature (274)..(274): n is a, c, g, or t
  misc_feature (349)..(349): n is a, c, g, or t
  misc_feature (394)..(394): n is a, c, g, or t
aagcagggtatcaacgcagagtgcccattacggccgggggacctctctgtcagtcgcgagcgaacgaccaagagggtgttcgactgctagagccgagcgaagcgatgcctaaatcaaaggaacttgtttcttcaagctcttctggcagtgattctgacagtgaggttgacaaaaagttaaagaggaaaaagcaagttgctccggtatctcctgtggcaatgcacaaagtgatgcagctcacaatgctttgcagnatttaaagataatagcaganagaaagtaaatctggagcaacttaaaaaatctttcagtagcacataaaaagttcccctctggccccttcccaagnaaaacttttaccgtagtgtttatggtcttgtttctaaatctcttnataggattccattcaacactgccaggttttaattgatc

SEQ ID NO: 88868 - DNA, 364 bp, Homo sapiens
ctagagatgcttacttcctggttccttcagctctgattttgaagaactttcttccatagggatgtagtctacctgaggtgacatctgtgatagtacagagactggagaattatctcataattatctagtacctgtgtcttgaaaggtcagcatagttgaggcaggaactttaatcatacttcatatttttcttcagagttaggcacaaagggtcagtaatactgctttagtttatttgatgatttaaggatacttgatacttttaaattatttaatttaaaatgattataactggtcattttaatctggggcaggagtccatagaattgttttttaatttgagttttcttttttgtgtttgaag

SEQ ID NO: 88869 - DNA, 763 bp, Homo sapiens
agcggatcacgtgaccgcagccccagcgcggcggggccggcgtctcctggctgccgtcacttccggttctctctgtcagtcgcgagcgaacgaccaagagggtgttcgactgctagagccgagcgaagcgatgcctaaatcaaaggaacttgtttcttcaagctcttctggcagtgattctgacagtgaggttgacaaaaagttaaagaggaaaaagcaagttgctccagaaaaacctgtaaagaaacaaaagacaggtgagacttcgagagccctgtcatcttctaaacagagcagcagcagcagagatgataacatgtttcagattgggaaaatgaggtacgttagtgttcgcgattttaaaggcaaagtgctaattgatattagagaatattggatggatcctgaaggtgaaatgaaaccaggaagaaaaggtatttctttaaatccagaacaatggagccagctgaaggaacagatttctgacattgatgatgcagtaagaaaactgtaaaattcgagccatataaataaaacctgtactgttctagttgttttaatctgtctttttacattggcttttgttttctaaatgttctccaagctattgtatgtttggattgcagaagaatttgtaagatgaatacttttttttaatgtgcattattaaaaatattgagtgaagctaattgtcaactttattaaggattactttgtctgcccaccacctagtgtaaaataaaatcaagtaatacaatcttaa

SEQ ID NO: 88870 - DNA, 688 bp, Homo sapiens
agcggatcacgtgaccgcagccccagcgcggcggggccggcgtctcctggctgccgtcacttccggttctctctgtcagtcgcgagcgaacgaccaagagggtgttcgactgctagagccgagcgaagcgatgcctaaatcaaaggaacttgtttcttcaagctcttctggcagtgattctgacagtgaggttgacaaaaagttaaagaggaaaaagcaagttgctccagaaaaacctgtaaagaaacaaaagacaggtgagacttcgagagccctgtcatcttctaaacagagcagcagcagcagagatgataacatgtttcagattgggaaaatgaggtacgttagtgttcgcgattttaaaggcaaagtgctaattgatattagagaatattggatggatcctgaaggtgaaatgaaaccaggaagaaaaggtatttctttaaatccagaacaatggagccagctgaaggaacagatttctgacattgatgatgcagtaagaaaactgtaaaattcgagccatataaataaaacctgtactgttctagttgttttaatctgtctttttacattggcttttgttttctaaatgttctccaagctattgtatgtttggattgcagaagaatttgtaagatgaatacttttttttaatgtgcattattaaaaatattgagtgaagcta

SEQ ID NO: 88871 - DNA, 495 bp, Homo sapiens
  misc_feature (58)..(58): n is a, c, g, or t
cggacaaacataactattgttgtatcataattattaaatgcgagaacaaaccctttantattgggaaaatgaggtacgttagtgttcgcgattttaaaggcaaagtgctaattgatattagagaatattggatggatcctgaaggtgaaatgaaaccaggaagaaaaggtatttctttaaatccagaacaatggagccagctgaaggaacagatttctgacattgatgatgcagtaagaaaactgtaaaattcgagccatataaataaaacctgtactgttctagttgttttaatctgtctttttacattggcttttgttttctaaatgttctccaagctattgtatgtttggattgcagaagaatttgtaagatgaatacttttttttaatgtgcattattaaaaatattgagtgaagctaattgtcaactttattaaggattactttgtctgcccaccacctagtgtaaaataaaatcaagtaatacaacaat

SEQ ID NO: 88872 - DNA, 819 bp, Homo sapiens
gaatgtatgaaactaataataggggcgacaccttgggagttttaaccccggcccggggcgcgctactcgtattcataaatatacaagtatgatcagcaatcgcgactcgaatctcgagagcggactctctgtcagtcgcgagcgaacgaccaagagggtgttcgactgctagagccgagcgaagcgatgcctaaatcaaaggaacttgtttcttcaagctcttctggcagtgattctgacagtgaggttgacaaaaagttaaagaggaaaaagcaagttgctccagaaaaacctgtaaagaaacaaaagacaggtgagacttcgagagccctgtcatcttctaaacagagcagcagcagcagagatgataacatgtttcagattgggaaaatgaggtacgttagtgttcgcgattttaaaggcaaagtgctaattgatattagagaatattggatggatcctgaaggtgaaatgaaaccaggaagaaaaggtatttctttaaatccagaacaatggagccagctgaaggaacagatttctgacattgatgatgcagtaagaaaactgtaaaattcgagccatataaataaaacctgtactgttctagttgttttaatctgtctttttacattggcttttgttttctaaatgttctccaagctattgtatgtttggattgcagaagaatttgtaagatgaatacttttttttaatgtgcattattaaaaatattgagtgaagctaattgtcaactttattaaggattactttgtctgcccaccacctagtgtaaaataaaatcaagtaatacaatcttaa

SEQ ID NO: 88873 - DNA, 1106 bp, Homo sapiens
  misc_feature (750)..(751): n is a, c, g, or t
  misc_feature (931)..(931): n is a, c, g, or t
  misc_feature (939)..(939): n is a, c, g, or t
  misc_feature (986)..(986): n is a, c, g, or t
aagcagggtatcaacgcagagtgcccattacggccgggggacctctctgtcagtcgcgagcgaacgaccaagagggtgttcgactgctagagccgagcgaagcgatgcctaaatcaaaggaacttgtttcttcaagctcttctggcagtgattctgacagtgaggttgacaaaaagttaaagaggaaaaagcaagttgctccagaaaaacctgtaaagaaacaaaagacaggtgagacttcgagagccctgtcatcttctaaacagagcagcagcagcagagatgataacatgtttcagattgggaaaatgaggtacgttagtgttcgcgattttaaaggcaaagtgctaattgatattagagaatattggatggatcctgaaggtgaaatgaaaccaggaagaaaaggtatttctttaaatccagaacaatggagccagctgaaggaacagatttctgacattgatgatgcagtaagaaaactgtaaaattcgagccatataaataaaacctgtactgttctagttgttttaatctgtctttttacattggcttttgttttctaaatgttctccaagctattgtatgtttggattgcagaagaatttgtaagatgaatacttttttttaatgtgcattattaaaaatattgagtgaagctaattgtcaactttattaaggattactttgtctgcccaccacctagtgtaaaataaaatcaagtaatacaatcttaataaataaaaaatnnaatatataataaaaacttcggggagtggcgctcggatcccaactttcgcctatattgaggtcgtattacaatttcactagcccgtcgtcttaacaacgttcgtgacttgtgaaaacccctgccgttatcccaaccttaatctgctttgcattgacaattcccctcttctgcacagttgcngtaattanccaaaaaaggcccgacctgatctgccctttccaaacagttgtgcatncttgtattgcaaatatgcaacattgtaacgcctaaaatatttcgttatgccgaaatctgtgagatatctccttataaattcaacagaaattaaccggcggatagggtagtagtgctgtct

SEQ ID NO: 88874 - DNA, 836 bp, Homo sapiens
agcggatcacgtgaccgcagccccagcgcggcggggccggcgtctcctggctgccgtcacttccggttctctctgtcagtcgcgagcgaacgaccaagagggtgttcgactgctagagccgagcgaagcgatgcctaaatcaaaggaacttgtttcttcaagctcttctggcagtgattctgacagtgaggttgacaaaaagttaaagaggaaaaagcaagttgctccagaaaaacctgtaaagaaacaaaagacaggtgagacttcgagagccctgtcatcttctaaacagagcagcagcagcagagatgataacatgtttcagattgggaaaatgaggtacgttagtgttcgcgattttaaaggcaaagtgctaattgatattagagaatattggatggatcctgaaggtgaaatgaaaccaggaagaaaaggtatttctttaaatccagaacaatggagccagctgaaggaacagatttctgacattgatgatgcagtaagaaaactgtaaaattcgagccatataaataaaacctgtactgttctagttgttttaatctgtctttttacattggcttttgttttctaaatgttctccaagctattgtatgtttggattgcagaagaatttgtaagatgaatacttttttttaatgtgcattattaaaaatattgagtgaagctaattgtcaactttattaaggattactttgtctgcccaccacctagtgtaaaaataaaattaagttatttctaatctttaaattcaacttggcctgctggtttacacaactgtgttgaattgtggactcttggcgttacccctttttgcg

SEQ ID NO: 88875 - DNA, 761 bp, Homo sapiens
agcggatcacgtgaccgcagccccagcgcggcggggccggcgtctcctggctgccgtcacttccggttctctctgtcagtcgcgagcgaacgaccaagagggtgttcgactgctagagccgagcgaagcgatgcctaaatcaaaggaacttgtttcttcaagctcttctggcagtgattctgacagtgaggttgacaaaaagttaaagaggaaaaagcaagttgctccagaaaaacctgtaaagaaacaaaagacaggtgagacttcgagagccctgtcatcttctaaacagagcagcagcagcagagatgataacatgtttcagattgggaaaatgaggtacgttagtgttcgcgattttaaaggcaaagtgctaattgatattagagaatattggatggatcctgaaggtgaaatgaaaccaggaagaaaaggtatttctttaaatccagaacaatggagccagctgaaggaacagatttctgacattgatgatgcagtaagaaaactgtaaaattcgagccatataaataaaacctgtactgttctagttgttttaatctgtctttttacattggcttttgttttctaaatgttctccaagctattgtatgtttggattgcagaagaatttgtaagatgaatacttttttttaatgtgcattattaaaaatattgagtgaagctaattgtcaactttattaaggattactttgtctgcccaccacctagtgtaaaataaaatcaagtaatacaacaat

SEQ ID NO: 88876 - DNA, 870 bp, Homo sapiens
aagcagggtatcaacgcagagtgcccattacggccgggggacctctctgtcagtcgcgagcgaacgaccaagagggtgttcgactgctagagccgagcgaagccaaaggctgaagatttcgtttctctttttaaagttgcgttttgtataaattctacaatagtggtttcagtatcagttacttgaattacaagctgcttctccccccacccccacattggaacaggctcattaaggatgcctaaatcaaaggaacttgtttcttcaagctcttctggcagtgattctgacagtgaggttgacaaaaagttaaagaggaaaaagcaagttgctccagaaaaacctgtaaagaaacaaaagacaggtgagacttcgagagccctgtcatcttctaaacagagcagcagcagcagagatgataacatgtttcagattgggaaaatgaggtacgttagtgttcgcgattttaaaggcaaagtgctaattgatattagagaatattggatggatcctgaaggtgaaatgaaaccaggaagaaaaggtatttctttaaatccagaacaatggagccagctgaaggaacagatttctgacattgatgatgcagtaagaaaactgtaaaattcgagccatataaataaaacctgtactgttctagttgttttaatctgtctttttacattggcttttgttttctaaatgttctccaagctattgtatgtttggattgcagaagaatttgtaagatgaatacttttttttaatgtgcattattaaaaatattgagtgaagctaattgtcaactttattaaggattactttgtctgcccaccacctagtgtaaaataaaatcaagtaatacaatcttaa

SEQ ID NO: 88877 - DNA, 804 bp, Homo sapiens
  misc_feature (725)..(725): n is a, c, g, or t
  misc_feature (759)..(759): n is a, c, g, or t
  misc_feature (784)..(784): n is a, c, g, or t
  misc_feature (801)..(801): n is a, c, g, or t
  misc_feature (804)..(804): n is a, c, g, or t
agcggatcacgtgaccgcagccccagcgcggcggggccggcgtctcctggctgccgtcacttccggttctctctgtcagtcgcgagcgaacgaccaagagggtgttcgactgctagagccgagcgaagcgatgcctaaatcaaaggaacttgtttcttcaagctcttctggcagtgattctgacagtgaggttgacaaaaagttaaagaggaaaaagcaagttgctccagaaaaacctgtaaagaaacaaaagacaggtgagacttcgagagccctgtcatcttctaaacagagcagcagcagcagagatgataacatgtttcagattgggaaaatgaggtacgttagtgttcgcgattttaaaggcaaagtgctaattgatattagagaatattggatggatcctgaaggtgaaatgaaaccaggaagaaaaggtatttctttaaatccagaacaatggagccagctgaaggaacagatttctgacattgatgatgcagtaagaaaactgtaaaattcgagccatataaataaaacctgtactgttctagttgttttaatctgtctttttacattggcttttgttttctaaatgttctccaagctattgtatgtttggattgcagaagaatttgtaagatgaatacttttttttaatgtgcattattaaaaatattgagtgaagctactcctccttgcttctgggggtcgtggccttgctcccnctgtgcggggaaaaaatccaggcccttccccccnccttttggttccggggcccccaaanttgctcctggttccccnctn

SEQ ID NO: 88878 - DNA, 1012 bp, Homo sapiens
  misc_feature (733)..(733): n is a, c, g, or t
  misc_feature (740)..(740): n is a, c, g, or t
  misc_feature (753)..(753): n is a, c, g, or t
  misc_feature (765)..(765): n is a, c, g, or t
  misc_feature (775)..(775): n is a, c, g, or t
  misc_feature (783)..(784): n is a, c, g, or t
  misc_feature (818)..(818): n is a, c, g, or t
  misc_feature (824)..(825): n is a, c, g, or t
  misc_feature (828)..(828): n is a, c, g, or t
  misc_feature (845)..(845): n is a, c, g, or t
  misc_feature (870)..(870): n is a, c, g, or t
  misc_feature (887)..(887): n is a, c, g, or t
  misc_feature (892)..(892): n is a, c, g, or t
  misc_feature (900)..(900): n is a, c, g, or t
  misc_feature (903)..(903): n is a, c, g, or t
  misc_feature (929)..(929): n is a, c, g, or t
  misc_feature (952)..(952): n is a, c, g, or t
  misc_feature (959)..(959): n is a, c, g, or t
  misc_feature (968)..(968): n is a, c, g, or t
  misc_feature (975)..(975): n is a, c, g, or t
  misc_feature (979)..(979): n is a, c, g, or t
  misc_feature (984)..(985): n is a, c, g, or t
  misc_feature (989)..(989): n is a, c, g, or t
  misc_feature (991)..(991): n is a, c, g, or t
  misc_feature (994)..(995): n is a, c, g, or t
  misc_feature (1000)..(1000): n is a, c, g, or t
  misc_feature (1006)..(1006): n is a, c, g, or t
agcggatcacgtgaccgcagccccagcgcggcggggccggcgtctcctggctgccgtcacttccggttctctctgtcagtcgcgagcgaacgaccaagagggtgttcgactgctagagccgagcgaagcgatgcctaaatcaaaggaacttgtttcttcaagctcttctggcagtgattctgacagtgaggttgacaaaaagttaaagaggaaaaagcaagttgctccagaaaaacctgtaaagaaacaaaagacaggtgagacttcgagagccctgtcatcttctaaacagagcagcagcagcagagatgataacatgtttcagattgggaaaatgaggtacgttagtgttcgcgattttaaaggcaaagtgctaattgatattagagaatattggatggatcctgaaggtgaaatgaaaccaggaagaaaaggtatttctttaaatccagaacaatggagccagctgaaggaacagatttctgacattgatgatgcagtaagaaaactgtaaaattcgagccatataaataaaacctgtactgttctagttgttttaatctgtctttttacattggcttttgttttctaaatgttaatgtgcattattaaaaatattgagtgaagctaattgtcaactttattaaggattactttgtctgcccaccacctagtgtaaaataaaatcaagtaatacaatcttaaaaaaaaaaaaaaaaaaaaaaaaaactcnagggggncccgtaccaattngcctatatgagncgatacaatnactggcgnngtttacacgtctgactggaaaaccctgcgtaccnactaanngcntgagaatccctttgcangtgcgtatacaaaagcccgaccgangcctttcaacagtgcanctgantgcaatgnaantgaacgtaatattgtaaatccgtaantttgtaatactatttttaccatngcgaatngaaaacctntaataangatnccgtnnggtngngtnncattngaaaancccttt

SEQ ID NO: 88879 - DNA, 1065 bp, Homo sapiens
agcggatcacgtgaccgcagccccagcgcggcggggccggcgtctcctggctgccgtcacttccggttctctctgtcagtcgcgagcgaacgaccaagagggtgttcgactgctagagccgagcgaagcgatgcctaaatcaaaggaacttgtttcttcaagctcttctggcagtgattctgacagtgaggttgacaaaaagttaaagaggaaaaagcaagttgctccagaaaaacctgtaaagaaacaaaagacaggtgagacttcgagagccctgtcatcttctaaacagagcagcagcagcagagatgataacatgtttcaggaattattcataacctttatcacaggggtccctcctgcacaggaggtgagcggtgtgtgagtgaacattgcagcctgagctctgcctcctgtcagatcagcagcggcattagattctcataggagcgcgaaccctattgtgaactgcgcatgcaagggatctaggttgtgcgttccttattccttatgagaatctaatgcctgatggtgggataatttttatcctgaaacgatcacctttccccttccctacctgctgtggaaaaattgtcttccatgagactggtccctggtgccaaaaagattgggaaaatgaggtacgttagtgttcgcgattttaaaggcaaagtgctaattgatattagagaatattggatggatcctgaaggtgaaatgaaaccaggaagaaaaggtatttctttaaatccagaacaatggagccagctgaaggaacagatttctgacattgatgatgcagtaagaaaactgtaaaattcgagccatataaataaaacctgtactgttctagttgttttaatctgtctttttacattggcttttgttttctaaatgttctccaagctattgtatgtttggattgcagaagaatttgtaagatgaatacttttttttaatgtgcattattaaaaatattgagtgaagctaattgtcaactttattaaggattactttgtctgcccaccacctagtgtaaaataaaatcaagtaatacaatcttaa

SEQ ID NO: 88880 - DNA, 564 bp, Homo sapiens
  misc_feature (456)..(456): n is a, c, g, or t
agcggatcacgtgaccgcagccccagcgcggcggggccggcgtctcctggctgccgtcacttccggttctctctgtcagtcgcgagcgaacgaccaagagggtgttcgactgctagagccgagcgaagcgatgcctaaatcaaaggaacttgtttcttcaagctcttctggcagtgattctgacagtgaggttgacaaaaagttaaagaggaaaaagcaagttgctccagaaaaacctgtaaagaaacaaaagacaggtgagacttcgagagccctgtcatcttctaaacagagcagcagcagcagagatgataacatgtttcagattgggaaaatgaggtacgttagtgttcgcgattttaaaggcaaagtgctaattgatattagagaatattggatggatccagacacggcattcccccccgtaaagcccgtgtccttccattcccccctttnccaacgacgcagcctactgcaccagctccccgcccaatcgccgctcttctcccgctccaacccactcctgcccaaactatctctccaaacctcactcactcctctccg

SEQ ID NO: 88881 - DNA, 693 bp, Homo sapiens
agcggatcacgtgaccgcagccccagcgcggcggggccggcgtctcctggctgccgtcacttccggttctctctgtcagtcgcgagcgaacgaccaagagggtgttcgactgctagagccgagcgaagcgatgcctaaatcaaaggaacttgtttcttcaagctcttctggcagtgattctgacagtgaggttgacaaaaagttaaagaggaaaaagcaagttgctccagaaaaacctgtaaagaaacaaaagacagattgggaaaatgaggtacgttagtgttcgcgattttaaaggcaaagtgctaattgatattagagaatattggatggatcctgaaggtgaaatgaaaccaggaagaaaaggtatttctttaaatccagaacaatggagccagctgaaggaacagatttctgacattgatgatgcagtaagaaaactgtaaaattcgagccatataaataaaacctgtactgttctagttgttttaatctgtctttttacattggcttttgttttctaaatgttctccaagctattgtatgtttggattgcagaagaatttgtaagatgaatacttttttttaatgtgcattattaaaaatattgagtgaagctaattgtcaactttattaaggattactttgtctgcccaccacctagtgtaaaataaaatcaagtaatacaacaat

SEQ ID NO: 88882 - DNA, 1079 bp, Homo sapiens
cataaaatgtactagtgttatagatacacaaaggaggaagataaagaaaacttatctccacagaaaatcacaaaatcacagtgataaacattgagaggaaaaaacaaaggatatacaaagcaatcagaaaacaactcacaaaatgacaagagcaagtcttcacctgtcaataacagccttgaatgtaaacggattaaattccccacctaaaagttatagaaagactgaatggattaaaataaacaaaaaaacaaaaaaccccattacccaactgtatgctgcctgcaaaaaactcacttcacccgtaaacacacatatggactgaaagtgtaggtatggaaaaagatactccacacaaagcaaaaccaaaaccaggcaagaatagctatgcttagataaaatagactatatccaactgtaaaaagagacaaagaaaatcattatataatgataaagagatcaattcaaaaggctaaaacaactgtaaatatatatgcaccgaacaccagagcaccaaaataaataaagccaatattcttatatttcaaggggctctcacacctgtaatcccagtactttgggaggccaaagtgggaggaatgcttgagcccaggagtttgagaccagcctgcgcaacatagtgagaccttgtctctagaaataatttaaaaattaggctaggtacagtggctcatgcctgtaatttcagcactttgggaggtcaaggtgggaagatcaccttgagtgcagttcaagacctgcctgggaaacatactgaggccccacctctattaaagaaataacaaattagccatggtgacacacacctgtagttccaactactcaaaaggctgaagcaagagaatcacttgagctcaggaggtcaaaactacagtgagccgtaattgtgccactgcactccagcctgggtaacagagtgagactctgtctcaaaaaactaaaaaaataaatgggcacatagactccaactacaatagtagttggggacttcagtcatccagtctcagcactggacagatcatctagacagaaaatcaacaaagaaacattagatttag

SEQ ID NO: 88883 - DNA, 600 bp, Homo sapiens
ttattattatgccttatacatgcataattgatgttctttatattttaaaaagtacttagtggccaggcaaggtggctcacacctgtaatcctagcacttcgggaggttgaggcaggaggattgcttgaggccaggagttcgagaccagcctgagcaacatagtgaggccccatctctacagaagttttttataaattagctggccatggtgatatgtacctatagtcccagctagtaggaaagctgaagtgagtggatcacttgagtgcagttcaagacctgcctgggaaacatactgaggccccacctctattaaagaaataacaaattagccatggtgacacacacctgtagttccaactactcaaaaggctgaagcaagagaatcacttgagctcaggaggtcaaaactacagtgagccgtaattgtgccactgcactccagcctgggtaacagagtgagactctgtctcaaaaaactaaaaaaataaatgggcacatagactccaactacaatagtagttggggacttcagtcatccagtctcagcactggacagatcatctagacagaaaatcaacaaagaaacattagatttag

SEQ ID NO: 88884 - DNA, 351 bp, Homo sapiens
ttattattatgccttatacatgcataattgatgttctttatattttaaaaagtacttagtggccaggcaaggtggctcacacctgtaatcctagcacttcgggaggttgaggcaggaggattgcttgaggccaggagttcgagaccagcctgagcaacatagtgaggccccatctctacagaagttttttataaattagctggccatggtgatatgtacctatagtcccagctagtaggaaagctgaagtgagtggatcacttgagcccaggagttcagggctgcagtgaactatgatcacaccatggcattccagcctgggcaacagagagagaccctgtgtctaaaaaa

SEQ ID NO: 88885 - DNA, 545 bp, Homo sapiens
tgctttaaaaaaataccccctaagcacagtaatgcattttgttattaaggaatagaaatgcaaattttgagtgtgaaaatttgatctagtaaacaaaaatcaacctctaagacccttttaacctaaaattgttttcagagtcttcatgtcttttcatatgttcatccctttcttttttttttttgtttttttttttgtgtgtgtgtgttttttgtttttttttgttttgtttgagacatagtctcactctgtcacccaggctggaatgcaatggcacaatctcagctcactgcaacctccacctcccaggaggattgcttgaggccaggagttcgagaccagcctgagcaacatagtgaggccccatctctacagaagttttttataaattagctggccatggtgatatgtacctatagtcccagctagtaggaaagctgaagtgagtggatcacttgagcccaggagttcagggctgcagtgaactatgatcacaccatggcattccagcctgggcaacagagagagaccctgtgtctaaaaaa

SEQ ID NO: 88886 - DNA, 127 bp, Homo sapiens
gtccaagatgacagtttgtaattggaggagaagagcccctatcagcatcgctgtccagaagaaacataagacaaaccacacaggtcattctaaattttctagaaggcacatttctttgacacttatt

SEQ ID NO: 88887 - DNA, 151 bp, Homo sapiens
gttccatttcatttaagttgtcaaatttatttgtgtagaattactcctaatatttcaaattattctttggatgtctgcatggtctttagtgctatcccatgtttcattcctgatgttactaatttatgtcttctctcttttctgtcagttt

SEQ ID NO: 88888 - DNA, 3741 bp, Homo sapiens
taaatgttagacacacaagatgagcatcaatatacaacacctatctttataaattgttatattcaagagttattattgcagattggaaggtactttgttcctttgcgtaaaagtctttttttttttttgtagaaacagagtcttactctgtcacccaggctaaagtgcagtggcatgatctcagatcgctgcaacctccgcttcccgggttcaagcgattgtcttgcctcagcctccagagtagctgggattacaggtgcccgccaccactcctggctaatttttgtatttttggtagagacagggtttcaccatgatagccaggctggtcttgaattcctggcctcaagtaatccacccacctcggcctcccaaagtgctaggattacaggcatgagaaaccacatccagctgaaaggcatttaatttatagtttcctccctcagctctccccaaatacaggggtcatgagaggtatagagaagacagaatagatattcaattagaactctgctcaaccttatcttataactgttacctttcagtattgatcagttatttctattttgagatttaaataggcatagattttctttggttttctttttcttctaaatttttttcttgccacacccaggggcagctcgaattatttgtttttaagttcaccttttagactgatttgcctacctactccctccttctttccctttctccctccctccttccctttttcccttttcttttttttaagatggagtctcatgcttgttgcccaggatggagtgcggtggcacaatctcggctcactgcaacctccgcctcccaggttcaagcgattctcctgtgtcagcctcccgagtagctgggactacaggcacgcaccaccactcccagctaatttttgtatttttaatagagacaaggtttcaccaagttagccaggctggtctcaaacttctgaccttgtgatccacccacctcggcctacctaagtactgggattacaggcgtgagccagtgcactggcctattatctctttttaacaaagaattaagaaatctaatattctttcccaagatcgtacaaagaattgtggcaaattaggaattagatttttgtcttaattcaaaacctggtatttaccccagtgtgccaaacagctttataatgaagacaacattaatcaagcatcacatttttaaaggcatatatctatttttttggctatgcaaaaaaccttgtctctattaaaaatacaaaaattggctaggcatttcaaatgtgatacaataaaatattaacacaaaagtaatttctatttataaaatttaaaatggcaggttttctgtgtgacgtttgagtttgagatgatttgactggcatgaggcccatcattgggaggtaaaaattacagcacaaagaaaactaagcaggtgcatatgaggtattgtctctttatgctcatcaaaaaataatctccaaaagaaaagttaaaaaaattattgttataaattgcatgaaatacatagtgggctcgattcatagcccccgtccgtatctatatctctatatctatagagacataacttctttcttcgtaagttatatatgtctacttctacctgtgttatcataataaaggtgtcatgatgatacaggtggaggtagaaatatataacttatctcttcataagggctaaaatgagaactaaaagtaatgagaattcagttgaatatgattaattatcaggatatgttaattagttctcttgatgcttactgtgatgcaaagtatgtgacgtattttaaacattttataataattgttcgtatgttaaccattaggcaagatttgtatttctaatgcttttaatgttcttttaaaataatgtttggaaaataaaaatactgaaaatcctaacatttctgaacaccagtttgcaatataatgaatttcctgtctgatcattttaaaactatcagagcatggcaatgatcatttttgcccaatggataacaatgtgttgaaccacagacagagagctctttgccttaagagatgaaataacttgtttgactatatataaatttttttttttttttgtagagacggggtctccctatgttgcccaggttggtctccaactcatgggctcaagcgatcctcccgcctcagccttccaaagtgctgggaatagaggcgttacattttgtatcatatatgctcagactaatcaaggatagttaatgccaaagactatttacaaaactaagtttcttactcagtgaaaagaggctaaatgaacatttgagcaactcatttaaatgaaatttagctggaaaaagaaaaattttgaatttttggtttatcgatcagggtctggatttaagaatcaaaaaacattaacataagcaggaaagcatttaatataggaaactagatgtctacagaatggttagatagggctctatgatgagtctccaggaaagattgcaccataaacatgaccagccggaccagccataaatgctactacttctgctccaaccaagaagagaggaagtcaggaagcctaccttggacttttgacttcaagaacacactgttaaagttgttgtccaccagtgaggaagttgctgccactactatttccacaaaaaactctcttgacacctacaaagcaagtggctgaacaacaagacactgctatagaaaaaatctggcaccatgcagttagatggggaaactaagtttgcatctagaaccctagcttcagggaaatctggaaagtgtactaacacaaaagtatactcaaaggagatgcagagttctaatctgttctgtccacagaggttcaccttggtagtcaacatttgtttttttttttgagatgggttctcactctgttgcccaagctggagtgtagtggtgcaatctcggctcactgcaacctccacctcctgggttcaagcgattttcctgcctcagcctcctgagtagctgggattacaggcatgcgccaacacgcccagctaatttttgtagcagagacggggtttcaccatgttggccaggctggtcttgaactcctgacctcaggtgatccacccacctcaccctcccaaagtgctgtgattataggcgtgagccactgcatccggccagtagtcaacattttttatacatacctctagccatactcccaaacaacagcagtagctataccaccattctccctcttgaaataatgcagcttctctcatttaaacaaaaatatgtactttgctaggcgctgcatagcaatctcagcactttgggaggctgaagtgggaggatcgcttgagcccaggagtttgagacccacctgggcaacgtgacaaaaccccgtttctacagaaaagttacttgggcatggtggcaggtacctgtagtcccagctactggggaggctgaggtgggaagatcgcctgagtgagtccaggaggcctaggctgcagtgagccaagatcacaccagtgcaatccagcctgcagtgagatcctgtcacaaaacaaaacaaaataaaaaatgcatactctcctccagagggaagatgctaagtctgatcaatctctgggtttctcagtgatgttcattattcttctagttcagtcaaaaatctcaacgtgatattctgtaacctaaggaccaaattataaaatttaccaccaacaaacaaatttaatcatcaagagta

SEQ ID NO: 88889 - DNA, 1924 bp, Homo sapiens
taaatgttagacacacaagatgagcatcaatatacaacacctatctttataaattgttatattcaagagttattattgcagattggaaggtactttgttcctttgcgtaaaagtctttttttttttttgtagaaacagagtcttactctgtcacccaggctaaagtgcagtggcatgatctcagatcgctgcaacctccgcttcccgggttcaagcgattgtcttgcctcagcctccagagtagctgggattacaggtgcccgccaccactcctggctaatttttgtatttttggtagagacagggtttcaccatgatagccaggctggtcttgaattcctggcctcaagtaatccacccacctcggcctcccaaagtgctaggattacaggcatgagaaaccacatccagctgaaaggcatttaatttatagtttcctccctcagctctccccaaatacaggggtcatgagaggtatagagaagacagaatagatattcaattagaactctgctcaaccttatcttataactgttacctttcagtattgatcagttatttctattttgagatttaaataggcatagattttctttggttttctttttcttctaaatttttttcttgccacacccaggggcagctcgaattatttgtttttaagttcaccttttagactgatttgcctacctactccctccttctttccctttctccctccctccttccctttttcccttttcttttttttaagatggagtctcatgcttgttgcccaggatggagtgcggtggcacaatctcggctcactgcaacctccgcctcccaggttcaagcgattctcctgtgtcagcctcccgagtagctgggactacaggcacgcaccaccactcccagctaatttttgtatttttaatagagacaaggtttcaccaagttagccaggctggtctcaaacttctgaccttgtgatccacccacctcggcctacctaagtactgggattacaggcgtgagccagtgcactggcctattatctctttttaacaaagaattaagaaatctaatattctttcccaagatcgtacaaagaattgtggcaaattaggaattagatttttgtcttaattcaaaacctggtatttaccccagtgtgccaaacagctttataatgaagacaacattaatcaagcatcacatttttaaaggcatatatctatttttttggctatgcaaaaaaccttgtctctattaaaaatacaaaaattggctaggcatttcaaatgtgatacaataaaatattaacacaaaagtaatttctatttataaaatttaaaatggcaggttttctgtgtgacgtttgagtttgagatgatttgactggcatgaggcccatcattgggaggtaaaaattacagcacaaagaaaactaagcaggtgcatatgaggtattgtctctttatgctcatcaaaaaataatctccaaaagaaaagttaaaaaaattattgttataaattgcatgaaatacatagtgggctcgattcatagcccccgtccgtatctatatctctatatctatagagacataacttctttcttcgtaagttatatatgtctacttctacctgtgttatcataataaaggtgtcatgatgatacaggtggaggtagaaatatataacttatctcttcataagggctaaaatgagaactaaaagtaatgagaattcagttgaatatgattaattatcaggatatgttaattagttctcttgatgcttactgtgatgcaaagtatgtgacgtattttaaacattttataataattgttcgtatgttaaccattaggcaagatttgtatttctaatgcttttaatgttcttttaaaataatgtttggaaaataaaaatactgaaaatccta

SEQ ID NO: 88890 - DNA, 418 bp, Homo sapiens
gtatatttctttgaacctgattcttcattaataaattgacctttcttctttgaactcgtgtcccttgttcatatttcatgatacctataacatttcattgcagttactttacatgtctatcagtgtaagctcatcaagataaaaaaaattgttctttggatcccttaacacacatacagtatatagcaaggggttagattaattgaattaatgtttatttattttacagaagggtaggaattagatgagctgtgttagtgtcaggcctgttttttatgtgcctgacatccagaatgggcatagtgaaaggctcatatatagctgtatatacaaagcctttctaatagaggggagtcagtgttggtaaaaacccagttcatgtaagttgtaaaacatgtcttcggattggttctttgca

SEQ ID NO: 88891 - DNA, 466 bp, Homo sapiens
gaacgggaagatctatccttgtacttggtgtaggactacagctgaaaaaatgttaagaaatgaagaaatttcttaaaagaaatgtgcagtttccttgcaggagaaaagaagcagcaatatgtatccttcaaattagaggactcataaattattattggaaggaaggatgcagagatggatggaaggaaggatgtcaccacaagaagaagaaggggggacggcaagatgtagaagagagatgggacaagcaaatgtctcttcacagacaaggacaccaagaataaaggctcagacagaacatgttctttgtcactggaaagagatacaacttttattcctccaattccccagttaaaaggaataaatggcaaagacagatgtcttcccaaagagtcaacagatcttctgtcaagcagctgcaagagaatgtgaagtcccctggcacgttcaatctcattgctaccat

SEQ ID NO: 88892 - DNA, 218 bp, Homo sapiens
cttaagatttggaatccatgttttatttcttatcaatgggcaactggggaatttttaaaacttctctgaactttagttttcttgtatgtaaaatggagctaatacaatcagcttccaacttgtaatatgtttactgaggttaacacataaaatctcggccaggcacggtggctcacccctgtaatcccagcagtttgggaggctgaggtaggcagatc

SEQ ID NO: 88893 - DNA, 412 bp, Homo sapiens
tgctttcctgaagctggaggaggtggggaacgtacttcctaatttttaggatgtctctggctttttacatccatgactcccctaaactctagaagcatgcattagctatctcttgatgtgcaacaaattatccctaaactttgtggcttggagcaacaacagtttgtgtctgtcagtaaatccaaagacagttcaactgggtcctctactttgtactttggggtctcttacaggctgaaatcaaggtactggctggggctacagtcatggcttctgaggtacagggtcccagagggagattataagtggatgcatctaaaccctgtcaaagtttaatgggaaaaattcacttcccagctcacttgcatggttgttggcatgaatcagttccttgcaggctgttgcactaagg

SEQ ID NO: 88894 - DNA, 209 bp, Homo sapiens
tcctcacagcccctcactcagcaatccagtgtccagtctacctgggacagatttggcacatgccagtgactgtccaagtctctaggagggaaggcacacagcccatccaggtgcacttagcaggggtgtgaggggctagcttgaagacccctgacaggtgccacactggccccccttgactcagacccctaagcgggcttcaggctctc

SEQ ID NO: 88895 - DNA, 190 bp, Homo sapiens
gatcttcgctccagctttctgcatctgagctggaaaaagagcaaaaacgggtaaaaattgaatccaaatattgtcggatgtatgcctaatttagaatgaaatcttggggtggcagactctggagttctctgtgaggtgtggcattcttttctctaaatcacttatttgccaatgtatgtgtcactttgtt

SEQ ID NO: 88896 - DNA, 183 bp, Homo sapiens
aatgaaataaagcctgatggttatttccttgaatgtattccatcctgtagccaatactggtttatacccctcgtttgtttaaaaagtaaatggatgacttagatgatttagatttagatttcacacatttttctcctagcttttaaaaagtactttctattaaagctgtcataacaaatgacc

SEQ ID NO: 88897 - DNA, 537 bp, Homo sapiens
cctgagacacccggggaggagggtatatgagtgggaggctgtataatacacttggttgcaatcccagatccacctctttctatttatgcagctccaagcaaattacctcatctctctttgccttggtttcctcatctattaaatggggattagaagagactgacttcatagagtcgttgtgcgaaaatgagccagtgtattgtaatgagtctagaattgtgcctctaccacaaaataagtcctcaataactattagcttactactcccagcgtcaccaccaccactaccgctacctctactattattaaatgagagggaaagaacaacgaaaatactgtttaattagcaaaactaagaggtaatgagggcctgaattaggtgccagaacaaatggacagattgcagaggtaacagagataatgagcctatagaatttagcatctaatcccccaaggatatgatttaattggtctggggtgcggctggtatcttagtttttaagctccccaggagattccaaggggcagccagagtcg

SEQ ID NO: 88898 - DNA, 1411 bp, Homo sapiens
gaagtatgtccgacaagcctggcagaaggcagacatcaatacaaaatgggcagccacacgatgggccaagaagattgaatgattggagaaagtttaaattagagagtcaagacagtgattcaattccacctagcaagaaggagattctcaggcaaatgtcttctcctcagagtaggaatggcaaagattcagaagcagtagacagggattctcacccactcaacaaggacaccaggcacagagatccaaactattatatcaaatccagtccctaaaatggaagaagccaaaagccaaagtttggaggaagactttgaaggacaggccacacatacaggacccaaaggagtaataaatgattggagaaagtttaaattagagagtcaagacagtgattcaattccacctagcaagaaggagattctcaggcaaatgtcttctcctcagagtaggaatggcaaagattcaaaggaacgagtcagcagaaagatgagcattcaagaatatgaactaatccataaagagaaagaggatgaaaactgccttcgtaaataccgtagacagtgtatgcaggatatgcaccagaagctgagttttgggcctagatatgggtttgtgtatgagctggaaactggaaagcaattcctagaaacaattgaaaaggaactgaagatcaccacaattgttgttcacatttatgaagatggtattaagggttgtgatgctctaaacagtagtttaacatgccttgcagcagaataccctatagttaagttttgtaaaataaaagcttcgaatacaggtgctggggaccgcttttccttagatgtacttcctacactgctcatctataaaggtggggaactcataagcaattttattagtgttgctgaacagtttgctgaagaattttttgctggggatgtggagtctttcctaaatgaatatgggttactacctgaaagagaggtacatgtcctagagcataccaaaatagaagaagaagatgttgaatgaagattcactatgtcaatatctcatgtttatcctttaggtattggatgatggttttggtagtatctatattgctttagtgaacacagagtatgggcacggctatgctaacttgacaaaaatgactgatgcaacaatcgagttattagcatttcttagtattagttactcaaattgatacaatgcttgactacaaaacagagctgtcttcagcaacattattagtagacaaagaggatgtggataatattatgacatttttcaaaaatccctttcaagttatgttttgtcttttttactccattttccctcatcactgttattatttggacttttcaaattacattattcattataattttctttgtgtaataaaaatgaaatctcatgaggaaat

SEQ ID NO: 88899 - DNA, 1172 bp, Homo sapiens
caaatgtgtggagatttattttataatagcaatgtgaggaataccttcctaattatgacaaaaacaaaaacaacaacaaaaagaccattgaagaaaaggacccaaaggagtaataaatgattggagaaagtttaaattagagagtcaagacagtgattcaattccacctagcaagaaggagattctcaggcaaatgtcttctcctcagagtaggaatggcaaagattcaaaggaacgagtcagcagaaagatgagcattcaagaatatgaactaatccataaagagaaagaggatgaaaactgccttcgtaaataccgtagacagtgtatgcaggatatgcaccagaagctgagttttgggcctagatatgggtttgtgtatgagctggaaactggaaagcaattcctagaaacaattgaaaaggaactgaagatcaccacaattgttgttcacatttatgaagatggtattaagggttgtgatgctctaaacagtagtttaacatgccttgcagcagaataccctatagttaagttttgtaaaataaaagcttcgaatacaggtgctggggaccgcttttccttagatgtacttcctacactgctcatctataaaggtggggaactcataagcaattttattagtgttgctgaacagtttgctgaagaattttttgctggggatgtggagtctttcctaaatgaatatgggttactacctgaaagagaggtacatgtcctagagcataccaaaatagaagaagaagatgttgaatgaagattcactatgtcaatatctcatgtttatcctttaggtattggatgatggttttggtagtatctatattgctttagtgaacacagagtatgggcacggctatgctaacttgacaaaaatgactgatgcaacaatcgagttattagcatttcttagtattagttactcaaattgatacaatgcttgactacaaaacagagctgtcttcagcaacattattagtagacaaagaggatgtggataatattatgacatttttcaaaaatccctttcaagttatgttttgtcttttttactccattttccctcatcactgttattatttggacttttcaaattacattattcattataattttctttgtgtaataaaaatgaaatctcatgaggaaat

SEQ ID NO: 88900 - DNA, 1322 bp, Homo sapiens
caaagaaggcaaataactctcaggagccttctccgcagttggcttcctcggtagcttccacacggagcatgcccgagagcctggacagcccaacctctggcagacccagtagacagggattctcacccactcaacaaggacaccaggcacagagatccaaactattatatcaaatccagtccctaaaatggaagaagccaaaagccaaagtttggaggaagactttgaaggacaggccacacatacaggacccaaaggagtaataaatgattggagaaagtttaaattagagagtcaagacagtgattcaattccacctagcaagaaggagattctcaggcaaatgtcttctcctcagagtaggaatggcaaagattcaaaggaacgagtcagcagaaagatgagcattcaagaatatgaactaatccataaagagaaagaggatgaaaactgccttcgtaaataccgtagacagtgtatgcaggatatgcaccagaagctgagttttgggcctagatatgggtttgtgtatgagctggaaactggaaagcaattcctagaaacaattgaaaaggaactgaagatcaccacaattgttgttcacatttatgaagatggtattaagggttgtgatgctctaaacagtagtttaacatgccttgcagcagaataccctatagttaagttttgtaaaataaaagcttcgaatacaggtgctggggaccgcttttccttagatgtacttcctacactgctcatctataaaggtggggaactcataagcaattttattagtgttgctgaacagtttgctgaagaattttttgctggggatgtggagtctttcctaaatgaatatgggttactacctgaaagagaggtacatgtcctagagcataccaaaatagaagaagaagatgttgaatgaagattcactatgtcaatatctcatgtttatcctttaggtattggatgatggttttggtagtatctatattgctttagtgaacacagagtatgggcacggctatgctaacttgacaaaaatgactgatgcaacaatcgagttattagcatttcttagtattagttactcaaattgatacaatgcttgactacaaaacagagctgtcttcagcaacattattagtagacaaagaggatgtggataatattatgacatttttcaaaaatccctttcaagttatgttttgtcttttttactccattttccctcatcactgttattatttggacttttcaaattacattattcattataattttctttgtgtaataaaaatgaaatctcatgaggaaat

SEQ ID NO: 88901 - DNA, 515 bp, Homo sapiens
taagcaaatttattattctgacttttgttttacagctgtctataatgtttctaaatctcttaatatggtggtttctcctttaatctatattatcttctgatggttttagagcaatgtaatgaatgtctgctatttatgcctgcctagcatccattcccccttcttctgttaacatcaccttaattctcctttgagaaacccccactttcagtccatgtggttctaggaaaattgccccattccctgggtacaggtctgaggtgacctgatataggcctggccaaatagaacatctggtacccctcagccacatgattggaacatggatgagtaaggcccagtatttttggctggaatgactgggaaagagatattacaaagacatcagttctctccaaattaatttatggatttaatataattttaatcaaaatcccagaggatttaagaatgataaaatcattccaaaatttatctggggaaataagtaactatactataccagccggcaattg

SEQ ID NO: 88902 - DNA, 492 bp, Homo sapiens
tcagagacctttggagccagaggtgacatatcgatctacatttaaccctctgggaaccaaggaatgaaggattagaggaaacggggccagaagtggagagaaggggagtgtgcatcgaacagacagggagtgtattaaataaatgaatgagtgaatgaatgatccatccatatggacactagcctgtcagtaaagaagagtctagggtcagggagagctcagccctcctcaggccgcccccatgatgacatagccttgggctaggggaaatctgaggtcaggccagctgcctggcaggagttgagaccccagaaggaaggtggagggcaggaacattccccagccccagggtgggatctcagcccaaggagatggggttcccaggccagggtctgccttgggcaggcagatgggtgccaggtgggccctgggtcaccactgggggccagccccagcccagcgtctgcctcccccactgcccagcctctgttc

SEQ ID NO: 88903 - DNA, 354 bp, Homo sapiens
aggagaaagcttttgagctggaagggtatgttaacgggcataaaagagttgatgggcagtttaggcagcgtgtacagcagaaaacaatgtaagtagtccgcaactctgtggcctctatgcagaattcaggctactataactgacatttactaaggctcagctaaccctctccctcagctactctcctatgtccaaaccaaatgagaccctacggcatccagccttcaccgtagtctgacttacattccaacctgccaagctaattcacagagagaggctgctccccgcccacggtatcagaaatgctctcgctgtaaatgagcaccactgcctcgttcttacctaagtcccaca

SEQ ID NO: 88904 - DNA, 453 bp, Homo sapiens
tatgtaggaagattgagaagagtaaatagctccaaaagaaaaaacaaagtaaaacagaacaccaagtaggagaatatcaactgtaagtatacgccaaagtgaattaaaatccaccatggagaagaacacgcatgctgagaggggctctctccttggctctgccgtcctgaaggcagtgtggggagagaaggagctggcttttgatagcaatacggacactctgggagctgtgctgaatgtttcatactttccttaatgtaatttccacagcatcaccacaatcattactgtctctgctgtacatggggaaaagcttgagttaacagaagttaaacaattcaccagtgatcacacttacatgaaaaagccaggtattctatctgtctgataacttgagcctggccattacattcagttctgctgtctttaaaataaaaaccctggattaagtca

SEQ ID NO: 88905 - DNA, 220 bp, Homo sapiens
tgccatttgaattagaagaaaataatttatatgcatgcacaggaagatattggtggccggtggttttgtgctttaaaaatgcaatatctgaccaagattcgccaatctcatacaagccatttactttgcaagtgagatagcttccccaccagctttattttttaacatgaaagctgatgccaaggccaaaagaagtttaaagcatctgtaaatttggact

SEQ ID NO: 88906 - DNA, 455 bp, Homo sapiens
tctccaagttttgccttctccagaatgtcatagagttggggtcatgcaatatgtagccttttcagattggcttctttcacttagtaatatgcatgtaagattccaccatgtattttcatggcttgacagctctgtttttagcactgaataatattcagttgtctctatttaccacaacttatccactcacctacagaaggtcatctagattgcttccaagttttggcaattatgaataaagatgctatagcaatttcatcttttaaggacctcctaaatatttcagaccctgtcactatatttattatgtatcaattgaacccctggatttctcctcatatggtccagctttttcctacaaatctagctgcagatttcttctcttgtctgagaaacaaccaatgaaactttcacttttgtcgttttatgtattccttttactattaaaaaattaa

SEQ ID NO: 88907 - DNA, 609 bp, Homo sapiens
ttccaaaatcagagacagagtgctcccggtgccatgaacggagacgacgcctttgtacggagacctagggttggttctcaaataccacagaagatgcaaaaggccttcgatgatattgccaaatacttctctgagaaagagtgggaaaagatgaaagcctcggagaaaatcatctatgtgtatatgaagagaaagtatgaggccatgactaaactaggtttcaaggccaccctcccacctttcatgcgtaataaacgggtcgcagacttccaggggaatgattttgataatgaccctaaccgtgggaatcaggttgaacatcctcagatgactttcggcaggctccagggaatcttcccgaagatcacgcccgagaagccagcagaggaaggaaatgattcaaagggagtgccagaagcatctggcccacagaacaatgggaaacagctgcgcccctcaggaaaactaaatacctctgagaaggttaacaagacatctggacccaaaagggggaaacatgcctggacccacagagtgcgtgagagaaagcaactggtgatttatgaagagatcagcgaccctccggaagatgacgagtaactcccctca

SEQ ID NO: 88908 - DNA, 732 bp, Homo sapiens
ttccaaaatcagagacagagtgctcccggtgccatgaacggagacgacgcctttgtacggagacctagggttggttctcaaataccacagaagatgcaaaagcatccctggagacaagtctgtgaccgtggaatacatttggtgaatctcagtccgttctggaaggtgggaagagagccagccagcagcattaaagctctactgtgtggcaggggagaagctagggccttcgatgatattgccaaatacttctctgagaaagagtgggaaaagatgaaagcctcggagaaaatcatctatgtgtatatgaagagaaagtatgaggccatgactaaactaggtttcaaggccaccctcccacctttcatgcgtaataaacgggtcgcagacttccaggggaatgattttgataatgaccctaaccgtgggaatcaggttgaacatcctcagatgactttcggcaggctccagggaatcttcccgaagatcacgcccgagaagccagcagaggaaggaaatgattcaaagggagtgccagaagcatctggcccacagaacaatgggaaacagctgcgcccctcaggaaaactaaatacctctgagaaggttaacaagacatctggacccaaaagggggaaacatgcctggacccacagagtgcgtgagagaaagcaactggtgatttatgaagagatcagcgaccctccggaagatgacgagtaactcccctca

SEQ ID NO: 88909 - DNA, 1023 bp, Homo sapiens
cacaccacctgagtcaggaaatggattctcccttagaacctatagaaaggaatgcagccggccaggcacagtagctcatgcctgtaatcccagaactttggagactgaggcaggtggatcacccgaggttaggagtccgagatggcgccattgcactccagtctgggcaacacagcaagactctgtctcaaaaaaaaaaaaaaaaaaaacatgaaagaaagtaaagaaaaacaggaatgagaaactgagaaacagaagggacagaaaaaaaataaatggcaaacataagccctaacacatcaataattattatgaattttaatgatctgaatacactaattgtaatacaaattggaagagtagatacagaatgtaatccaactatgtgctatgtacagtaagctgacttcaaaacatggttgacataggtaagttgaaagtaaaaggatagaaaaagatgtgtcatagaagtattaatatactaatgaaataatcaggagtgtattaatatcagatgcagtagacttcaaagcaaagaaaattactagggataaagaggggcattatttattgatgaaaggatcaatctaaagaagacataatgatccttacttttgtatgcaccaaacaacaaagcttaagctacataaataaaaactgatagaattaagaagaaatttaaaaatccataattgtagatgggatttcagtatccacacccagtattgacagactactgtaaatataatcagcgaagatatagaagaactgaagaatgtcatcaactaagaggatccaattgacatttatagaacactttacccaacaacagaatacacgttactttcaagtgtccataaactattcaccaagatagaaccatatcctgggtcataaaactcaattaaagaaaaattcaactcagagcaatctctttccgaacacgagcaccacaggcgcccgaaggccggaacaggcgtttagagaaaatggcagacgatattgatatttgagcaatgcttg

SEQ ID NO: 88910 - DNA, 566 bp, Homo sapiens
gagattcagttgaacctgggaggtggaggttgcagtgagccgagatggcgccattgcactccagtctgggcaacacagcaagactctgtctcaaaaaaaaaaaaaaaaaaaacatgaaagaaagtaaagaaaaacaggaatgagaaactgagaaacagaagggacagaaaaaaaataaatggcaaacataagccctaacacatcaataattattatgaattttaatgatctgaatacactaattgtaatacaaattggaagagtagatacagaatgtaatccaactatgtgctatgtacagtaagctgacttcaaaacatggttgacataggtaagttgaaagtaaaaggatagaaaaagatgtgtcatagaagtattaatatactaatgaaataatcaggagtgtattaatatcagatgcagtagacttcaaagcaaagaaaattactagggataaagaggggcattatttattgatgaaaggatcaatctaaagaagacataatgatccttacttttgtatgcaccaaacaacaaagcttaagctacataaataaaaactgata

SEQ ID NO: 88911 - DNA, 837 bp, Homo sapiens
aaacagtcatgtacgtgattttgtctaaacataagtttccatttcatttgtgtaaatacctaggaatgagattgctggttgtataatggtatgtttaagaaacaactttccacagtggcgatgccattttgcgttcacaccagcaatatgtaaaattgttccacattgttgtcagaacttacgatttgtcactttttggattttagccattctaacaggcatgtaatgggtgaagtgtgttcaaatcttttgcccacttttacatttggtggttttcctactgaattttgagaattctttagatactgtagatatacaaatgcttcatcagatatggaacgtgtacagattttctaatagtctatggctggttttttaattctcttaacagtgtctcaaatagcagaaattattcattttgataaaatccattttaacagtattttacggattgtgcttttgatgttgtatataaaattttcccataaaacatgttcactaagattttctgttgtcttctagaggttttgtagtttgagattttacatttatgtctgtggttcatttttagtttttgtatatagtgcagggtatgggaacaagtttactattattttgttatatgcacatccaattgttccagcaccatctgttgaaaaggctatcctttctctaccaaattgcctttgcacctttgttgaaaatcagtttaccatacatgtgttgtctatttcaggactctgttctgttctattgatctctgtgtctatacttccaccaacactactgtcttgattactgtggtgttataatacagatattttgtgtaccttcata

SEQ ID NO: 88912 - DNA, 348 bp, Homo sapiens
agtgttgggatgactggagagagccactgtgctgggccttgtttcttaattgttcatttaacaggcctggttggggtgtgaaatggagtccatgtgtgtattttgcatcctctgtaaatatggccgtagagtacattctaaacacagcctttctgatccactggcttttgtgcataccagggtatgacatcgtgttaaaaagaccgttagtgtagtgtattgtttttgtaaatgcagtttattctaagcacactatatgctggaattatttctagagttcatagtggtattatcattaaggtgtatggaaagtatactaattcctattctataggcaaaaacaactgg

SEQ ID NO: 88913 - DNA, 289 bp, Homo sapiens
ctaatttgagttgatgaaactgtgctttcctatctggattacaggtaagctcttttctacctgattggatcctgcatcctgcctatattgctttttaatctggctcatccagctaccattgtgtaatcattctgtgactaagataaacatggttccttagtcaaactgttttaaaaagctatttcagattaaatgattagtcatcgaatgcttattatagtcttttagataactaaggtaagatgcattctatttgaaactccagattttattttatttcttttcattt

SEQ ID NO: 88914 - DNA, 234 bp, Homo sapiens
gatctgcctgcctcagcctcccaaagtgctggtattacaggcgtgagccactgtccaaggccatcaatgtggaattttatacctagtgaaaatatctttcaaaaataaagatgaaataaaaacttgtttagatgaagtaaagatgaaaaaattagtcactggcagacctgtactgaaagatatgctaaaaaaagttcttcagacagaagaaaaatgttatcagttagaaacctg

SEQ ID NO: 88915 - DNA, 466 bp, Homo sapiens
aacatcttcctttctcaaataagctatatacaattcgagttggttctgtttaatttttaaaagtttgcttcccttcccaccaccactcccccaaaaccagcactatcatcaaacagcctgacaagaatctgcctaggctgggcttaataaaccctatattccaaagtgcttctcccctcccaactttccctccaaatcctgggctctttctcagtaaaggaaatcgtgttttctaatactagattaaagcgacatcttgttatatccaccaacacctttctctttacagttaaaaaaaaattcagacacacacacacccatatatatataaaatcattatgcaatcagttggagggagagcatgtatgccaacattgtagagactaagtgcccatttatccataattaagataagcagacttttccccactgtactataaagttagagtatcggcgttggctggaa

SEQ ID NO: 88916 - DNA, 505 bp, Homo sapiens
ttttttttttcttatttggcgaggcagtctcactgtgtcgcccaggctgaggtgcagtaatgcgatcttggctcactgcaccttctccctcccggttcaagcgattctcctgcatcagcttcctgagtagctggaattacaggtgtgcgccaccatgcccagctaatttttttatatttttagtagagacggggttttaccatgttggccaggctggtcttgaactcctggcctcaagtgctctcgaacgacctggcctcccatagtgctaggatacaggcatgaaccaccccacctgtctttacatgtatcataagcatttcaaattaattttcgtttacattgtgaaagagtggttcttccagtgtgaaagagtggttcttccactacataattggttgttccagcaccacttgtttgagactatcatgtcttcattgaatttttttttttggtgccttagttgaaaatcatttgaccacatgtatttgattctatttctgta

SEQ ID NO: 88917 - DNA, 437 bp, Homo sapiens
aagacagaggaggcagtgaaggttcctgaacacactgggatactggggttcacttgtttagcagtattatctgaatctttgttgaatatccactctgataagagctggggctgcatgggagaggagcaaagaccaggtccctgccctcacagagcctgcagccctggggaaggagtgcaaaaaagggacggagagacaagtagagtcaacaccttgcgtgtagtagtgctgtgtggcttggagaatccaagaggcttcctggaggaggttatgactgaactgagagctaaacaatgagaatttagccagactgggctagggtgcaggcacatccagcagggaagggagagcatgcgtgttagactagtcaaaacttgagaggggcaatggagagggggaaggagggcagtgacagctgattatagtcagtgcttatg

SEQ ID NO: 88918 - DNA, 393 bp, Homo sapiens
ctctatgaatggctggttgctcaatgctcacatacagttgtgtgtcagtatatgtgaactgctgatactaatatgagcttactgtaaaaagtgtaacttccatgtgttagatagaagatttgagaaatgtatacaggagtaagccaacattctataacatcttagttctgagagaagataaagagaatatcaatgtggtacttagggttggccaactatacccctatttagcctatgcctggttttgtaaataaagttttactggaacgcaggcacaagcattcatttaccacacgttgcacacggctgtttctcagaattgcatagctgtcacagcgagcacaaggttcacagggccaaaaatatttataaactggccttttaccaaaaaaa

SEQ ID NO: 88919 - DNA, 603 bp, Homo sapiens
gttttataaaaaaaaatcttagatggaatattttactcagccatttctgtagttaacatttgatagccacctgttgaagcagatagcttatactgactgcaccaccgctggtgctcagaattgagggtttttttgcaaatgatatctgacaaggtaaaactttctatttccgtacatggaggcaaaaaccccactttgcaaccattatcagaggtaagattgataataattcatttttttgtagtggcaaatataaatatgaatcatcaaagcaagtttcatatccattcatcagtattacttaacccagaagttaaggtggcttacggaattattagcaatggtaatttttttatcagtattgtgtaacatatcagatttattttatttaaagaattatttataccattaacagattcttatatatattaatgtggcaaaaatgtgcaggttaaatctattaaccaaattatttatattatattaagtaagaaaaaatgtgaaacaaatgtagagagaaaatactacattacaagtatacaaacctaaaactgtgagccattgtaaagtacaaggtaattaataagaaatgtagcacaacat

SEQ ID NO: 88920 - DNA, 368 bp, Homo sapiens
caaaatcctgtctcagaaaaaagagtcattggagggttttgaaccaagaaatgacagtccgacatacatttttaaaggatcaccaggctgggcacgatggttcacgcctgtcatcccagcactttgggaggccgaggcaggcagatcacttgaggtcagaagtttaagactagcctggccaacatggtgaaaccccatctctactaaaaatacaaaaattagccaggcatgatggcgtgtgcctatcatcccagttactcaggaggctgaggcaggaaaactgcttgagcccgggaggtggagattgcagtgagctgagattgtgccactgcactccagcctgggcaacaaagcgagactccgtctca

SEQ ID NO: 88921 - DNA, 420 bp, Homo sapiens
taactgtgcaaataatccatgaatatattgtttttatacagcattacagataaggcttgcagctctatagatcaccctcatccactccttcactccattgctacacttaaaagcctcacatgctctcctgtcctctccaaaggcagctgctagcatcagcgcccacagtagccttcttttgtttcctgtttataaaccatacattttctatggctacacatacgtgtattgtttgatgctttctaataaaattgtatcatagtgtacacatctttcacactttccttattacagtcaacatttggagaatacagaatgcagcagatcaagaactttctcagtctttctaacatgccccaaaatacagcctcactatggttcatttagcgtctcattgttttcactctcacaaacgatgcc

SEQ ID NO: 88922 - DNA, 317 bp, Homo sapiens
ctgtagtctcagctaatgaggaggctgaggcaggagaattgcttgagcctgggagatcaaggccgcagtgagctctgattatgccattgcactgcagctgagggcacagagctgaggccctgtctcaaaagaaaaaaattgtgtaaaagagcaaaataatttcattttcaaatatgtttttttgcatttttattttactggctgctttgttcctaatgatactcctctggaagcaatggcttagagcagtgaatcgcaactccagtcacctggggacttatttaaaaaataaacaaatactataaataaaactgcta

SEQ ID NO: 88923 - DNA, 581 bp, Homo sapiens
tttagtacagggtctctagaccctttcctgtcctcattcaactctcagcttgttgtggcttgtcagtgccctgaaatatgttatggccaaaatttaaaagtatacttcatagatcatataatttacaagtagagtacagcaggatttttaatggccttggtactaaagttatattgccaatagtgacccatggattagctgagttttgtttcgttctagtttttgaatggggaatgtacttttacataatacagttggctcaggttgaccttttagtcaggtgaaacttccaggttcttatctgtactaaatgcaggtaagcaaagtctccctcaatttccacatgcacagtttgcttttttaaacagatgtgcaggaattcacttgtatttgtataacttttagaaattgtctcattttaccttattcttcctgcctgctatcattcttacatatttatttttgtttgtttgtgtgagacagagtctcgctctgttgcccaggctgaagtgcagtgagccgagattgcaccactgcactccagtctggacaacagagtgaaactcagtctcaaaaaaaaa

SEQ ID NO: 88924 - DNA, 250 bp, Homo sapiens
  misc_feature (205)..(205): n is a, c, g, or t
atgggtgctccatcccccttgaaaatatctgtaccttcttttacaagagattctgagtctttccttctagagagtttaaagcacctgatctttgggaactgataagaactatctactgtggctggctgcaaataattccttgcatttatttttagtgttaatttcttttattctaatatacgtcatatgctttccattgtctctnggtttaaaatcacaaatgactactcctattatacaaggaattatt

SEQ ID NO: 88925 - DNA, 114 bp, Homo sapiens
tttctgaggtcagtttcttcctgagttgtcaaaagaaaaagaaaaacagcaaattctacacattttacaaaaataagaagactaaaatatgaaacaagctacatttctgggatc

SEQ ID NO: 88926 - DNA, 300 bp, Homo sapiens
ttgtgtgtatcttgtgagaaacactttagtcaaactaagccattgttaaaggaaaagaagtgaaggcatttggttgccttcctaataactaaatattgagttgtggagaacactgtcttatcagtgagtttgttcccatattcctttctgaattaataggaagaacctccctcatctctaattctactaggctactactctatctccctcctgcttttcatcgccaaacttttgagtccttcacctaatcagactatgatatctctaggtagtcgtcaccctccaaattacgtttctgct

SEQ ID NO: 88927 - DNA, 397 bp, Homo sapiens
cccctgaccatagttttctatgtgaccttaagttagcaacttaacctctctgtggctgtttcctcatctataaaatggaaccataacacctaccttgtgggactggactgagtattggatggaagccaaactctttgcatgtcataaggctcttccatggtagctgtcctgcccctcctttgagctcctgtgtatttgagcagagccctgtccctgtctgcacctccatttctgggtctgtgaaaaggagaaggtgggacaagctgattccaacagcccctccagcctgaccagccatgatagatgacttcaggccaggccagtcctcctctggagccacaggaatgtgaacaaggggccacttgggggcaaaagagtttcctgcagcagcgtgttt

SEQ ID NO: 88928 - DNA, 387 bp, Homo sapiens
gagatataaaattaccgagatttaactgaaggcagctgtcaaactctgtaaaagaactgatattcttcagaggagtgcaaattctatgtcaaagacacaaaacagattcttattgcttaataatctcccacagttcaatagtgacagaaattggtttcctttttgccccctacccctactgtcttatttctacaattttctctacagttaccagttttgggatgactgattctggtgtttactatatgatcacttgatcaatggagacctgcccatcctgcttctgactatcgtgatgtcatagtagagctgctttagatgaatccgaagtactcactcctttctccaatttcttcttatctggtttaagaaaacagtaacttattt

SEQ ID NO: 88929 - DNA, 109 bp, Homo sapiens
cctgcccccaacccctatccatttgggtagacacaagctcaggctgctaaattcagggacatgctcgactttgggggagctctgagggcatggctaaggccttacaggg

SEQ ID NO: 88930 - DNA, 5456 bp, Homo sapiens
  misc_feature (597)..(597): n is a, c, g, or t
  misc_feature (687)..(687): n is a, c, g, or t
  misc_feature (698)..(698): n is a, c, g, or t
  misc_feature (717)..(717): n is a, c, g, or t
  misc_feature (847)..(847): n is a, c, g, or t
ctttcctcttggaagtggcgactgctgcggggctgagcggtgctcgcacgcgtctcgggagccaggttggcggcgcgatgaggcgcagcaaggccgatgtggagcggtacgtcgcctcggtgctgggtctcaccccgtcgcctcgacagaagtcaatgaaaggattctattttgcaaagctgtattatgaagctaaagaatatgatcttgctaaaaaatacatatgtacttacattaatgtgcaagagagggatcccaaagctcacagatttctgggtcttctttatgaattggaagaaaacacagagaaagccgttgaatgctacaggcgttcagtggaattaaacccaacacaaaaagatcttgtgttgaagattgcagaattgctttgtaaaaatgatgttactgatggaagagcaaaatactgggtcgaaagagcagcaaaacttttcccaggaagtcctgcaatttataaactaaaggaacagcttctagattgtgaaggtgaagatggatggaataaactttttgacttgattcagtcagaactttatgtaagacctgatgacgtccatgtgaacatccggctagtggagntgtatcgctcaactaaaagattgaaggatgctgtggcccactgccatgaggcagagaggaacatagctttgcgttcaagtttagagtggnattcgtgtgtngtacagacccttaaggaanatctggagtctttacagtgtttggagtctgataaaagtgactggcgagcaaccaatacagacttactgctggcctatgctaatcttatgcttcttacgctttccactagagatgtgcaggaaaatagagnattactggaaagttttgatagtgctcttcagtctgcggaatcttctttgggtggaaatgatgaactgtcagctactttcttagaaatgaaaggacatttctatatgtatgctggttctctgctcttgaagatgggtcagcatggtaataatgttcaatggcgagctctttctgagctggctgcattgtgctatctcatagcatttcaggttccaagaccaaagattaaattaagagaaggtaaagctggacaaaatctgctggaaatgatggcctgtgaccgactgagccaatcagggcacatgttgctaagcttaagtcgtggcaagcaagatttcttaaaagaggttgttgaaacttttgccaacaaaattgggcagtctgcgttatatgatgctctgttttctagtcagtcacctaaggatacatcttttcttggtagcgatgatattggaaaaattgatgtacaagaaccagagcttgaagatttggctagatacgatgttggtgctattcgagcacataatggtagtcttcagcatcttacttggcttggcttacagtggaattcattgcctgcttcacctggaatccgaaaatggctaaaacagcttttccatcgtttgccccatgaaacctcaaggcttgaaacaaatgcgcctgaatcgatatgtattttagatcttgaagtatttctccttggagtagtatataccagccacttacaattaaaggagaaatgtaattctcaccatagctcctatcagccgttatgcctgccctttcctgtgtgtaaacagctttgtacagaaagacaaaaatcttggtgggatgcggtttgtactctgattcacagaaaagcagtacctggaaacttggcaaaattgagacttctagttcagcatgaaataaacactctaagagcccaggaaaaacatggccttcaacctgctctgcttgtacattgggcaaaataccttcagaaaacgggcagcggtcttaattctttttatggtcaactagaatacatagggaggagtgttcattattggaagaaagttttgccattgttgaagataataaagaagaacagtattcctgaacctattgatcctctgtttaaacattttcatagtgtagacattcaggcatcagaaattgttgaatatgaagaggacgcacacataacttttgctatgttggatgcagtaaatggaaatatagaagatgctgtgactgcttttgaatctataaaaagtgttgtttcttattggaatcttgcactgatttttcacaggaaggcagaagacattgaaaatgatgccctttctcctgaagaacaagaagaatgcagaaattatctgacaaagaccagggactacctaataaagattatagatgacggtgattcaaatctttcagtggtcaagaaattgtctgtgcccctggagtctgtaaaacagatgcttaattcagtcatgcaggaactcgaagactatagtgaaggaggtcctctctataaaaatggttctttgcgaaatgcagattcagaaataaaacattctacaccgtctcctaccagatattcactatcaccaagtaaaagttacaagtattctcccgaaacaccacctcgatggacagaagatcggaattctttactgaatatgatttgccaacaagtagaggccattaagaaagaaatgcaggagttgaaactaaatagcagtaagtcagcatcccgtcatcgttggcccacagagaattatggaccagactcggtgcctgatggatatcaggggtcacagacatttcatggggctccactaacagttgcaactactggcccttcagtatattatagtcagtcaccagcatataattcccagtatcttctcagaccagcaggtaatgttactcccacaaagggttcttctaatacagattttaagtccaccaaagaaggattttccatccctgtgtctgctgatggatttaaatttggcatttcggaaccaggaaatcaagaaaagaaaagggaaaagcctcttgaaaatgatactggcttacaggctcaggatattagtggccggaagaagggccgtggtgtgatttttggccaaacaagtagcacttttacatttgcagatgttgcaaaatcaacttcaggagaaggatttcagtttggcaaaaaagacctcaatttcaagggattctcaggtgctggagaaaaattattctcatcacgatacggtaaaatggccaataaagcaaacacttccggtgactttgagaaagatgatgatgcctataagactgaggacagcgatgacatccattttgaaccagtagttcaaatgcctgaaaaagtagaacttgtaacaggagaagaaggtgaaaaagttctgtattcacagggggtaaaactatttagatttgatgctgaggtaagtcagtggaaagaaaggggcttggggaacttaaaaattctcaaaaacgaggtcaatggcaaactaagaatgctgatgcgaagagaacaagtactaaaagtgtgtgctaatcattggataacgactacaatgaacctgaagcccctctctggatcagatagagcatggatgtggtcagccagtcatttctctgatggtgatgccaaactagagcggttggcagcaaaatttaaaacaccagagctggctgaagaattcaagcagaaatttgaggaatgccagcggcttctgttagacataccacttcaaactccccataaacttgtagatactggcagagctgccaagttaatacagagagctgaagaaatgaagagtggactgaaagatttcaaaacatttttgacaaatgatcaaacaaaagtcactgaggaagaaaataagggttcaggtacaggtgcggccggtgcctcagacacaacaataaaacccaatgctgaaaacactgggcccacattagaatgggataactatgacttaagggaagatgctttggatgatagtgtcagtagtagctcagtacatgcttctccattggcaagtagccctgtgagaaaaaatcttttccgctttgatgagtcaacaacaggatctaacttcagttttaaatctgctttgagtctatctaagtctcctgccaagttgaatcagagtgggacttcagttggcactgatgaagaatctgttgttactcaagaagaagagagagatggacagtactttgaacctgttgttcctttacctgatctagttgaagtatccagtggtgaggaaaatgaacaagttgtttttagtcacagggcagaaatctacagatatgataaagatgttggtcaatggaaagaaaggggcattggtgatataaagattttacagaattatgataataagcaagttcgtatagtgatgagaagggaccaagtattaaaactttgtgccaatcacagaataactccagacatgagtttgcaaaatatgaaagggacagaaagagtatgggtgtggactgcatgtgattttgcagatggagaaagaaaagtagagcatttagctgttcgttttaaactacaggatgttgcagactcgtttaagaaaatttttgatgaagcaaaaacagcccaggaaaaagattctttgataacacctcatgtttctcggtcaagcactcccagagagtcaccatgtggcaaaattgctgtagctatattagaagaaaccacaagagagaggacagatgttattcagggtgatgatgtagcagatgcagcttcagaagttgaagtgtctagcacatctgaaacaacaacaaaagcagtggtttctcctccaaagtttgtatttgtttcagagtctgttaaaagaatttttagtagtgaaaaatcaaaaccatttgtatttggcaacagttctgccactgggtctttgtttggatttagttttaatgcacctttgaaaagtaacaatagtgaaactagttcagtagcccagagtggatctgaaagcaaagtggaacctaaaaaatgtgaactgtcaaagaactctgatatcgaacagccttcagatagcaaagtcaaaaatctctctgcttcctttccaacggaagaatcttcaatcaactacacatttaaaacaccagaaaaggagcctccattatggcatgctgaatttaccaaagaagaattggttcagaagctccgttccaccacaaaaagtgcagatcacttaaacggcctgcttcgggaaatagaggcaaccaatgcagtccctatggagcaaattaagcttctcaaaagtgaaataagaagattggaaaggaatcaagagcgagagaagtctgcagctaacctggaatacttgaagaacgtcttgctgcagttcattttcttgaagccaggtagtgaaagagagagacttcttcctgttataaatacgatgttgcagctcagccctgaagaaaagggaaaacttgctgcggttgctcaagatgaggaagaaaatgcttcccgttcttctggatgagcatcctatcttcgtagttggtttggacttcgataggttgatggaaggaatacttctattaactaaatagaatctgtttac

SEQ ID NO: 88931 - DNA, 780 bp, Homo sapiens
attgggaacagagaagggaagcataatgaccagtttatggtcaaggcacagaccagattgaacgggggcacagcatttgggatgagtttttatggatcagaaattagccaaagaaagaggtaagaatggctgctggcgaagggtattctggtcctgctacagtgatgaatcacagatttttttctaggggactctagctcgttattcatactatttggatcataatgctgagagacaccatcccaaatgctataatcctgaatgttgaaatctcaaaagatcaaaatccctgaaggtcaaaatctctaaagtctaaaataacgaacctctcaaatactgaaaatcacagtcactctgttaggtggaactgttaccttgtcattgtctttatttggaaattaaggtggcttaaggacatgcttgtggatgccaagttgacaaggggtagacttgtggatttaatcttaggtgccagcttgactggatgaaggaatgcccagagccctggtaaagcattatttggggtgtgtctgtggggtgtgttccaggggagatgagtgtgagtctgagtggactaggtggggaagatctgtcctcagtgttggtctatgttatccaatcagctgggggcccagagagaacaaatacagaaggcaaattggtctctttctgggagttgagacagattttcatctgctgcctttgacatcagaactccacgttctccagccttgggactccatgacgtaacaccagcagacccctgggtaagttataccg

SEQ ID NO: 88932 - DNA, 333 bp, Homo sapiens
catgatgttttgatacaaatatacatagtgaaatgattactacaggcaagcaaattaaaatatccattaccacgatagtactttgtgtatgtgtgtctggtgagcacctaaaatctacactttcagcaaatttttagtgtacaatataattatagtcaccatgctgtacatgaaatctctagacctgttcatcttgtataattgcaagtttgtgtatcctttgacctacctctccccatttcctgatccttcccactctggaaaccaccattcttctctgtttctatgtatttgacatgttttagattgcacaaataaataagatcatgcagt

SEQ ID NO: 88933 - DNA, 448 bp, Homo sapiens
caaaaggttagggggtgggaggaatggagagttactgtttaatgggtatagaatttcagttttaacaaaataaaaagagttcgccaggggtgcaaggcagacctgagagtgaccaggccagacggcatagagatggggctcaagggacaggtgttgggtgtttgtatcttgtatcttggttttttgccaggctaggggacaaccactcattgcgggatgtcttaatcatcttaaaaaagaacgcagtagctcgtgcccgtaatccccgcactttgggaggccgagatggcagacggagttgcgttcactcagtgctcaatggtgcccaggctggagtgcagtggcgtgatctcggctcgctacaacccccacctcccagctgcctgccttggccccccaaagtgccgagattgcagcctctgcccggccgccaccccgtcgggtgaag

SEQ ID NO: 88934 - DNA, 239 bp, Homo sapiens
tcagactaagagaatcaacccactgaccaggcctctgctaagcacctatgaagatgttgccatacaacccaactaaatggtcatggggaaatcagacaataaaaagacatggatgcttgtcagcacaggaaaaggaaacagcagagtgaaaagacaactcacagaatgggagaaaatgtctgcaaactgcccatctgacaagggactaagaaccagaatatacaaggagctcaaataac

SEQ ID NO: 88935 - DNA, 249 bp, Homo sapiens
acagatctggtggcatttcttgtctggtggcattggtaactaagatacagaggaatttcttgccaggtgatataacacagatgatctgtaaactcaaaattggcagttggcgcttcttttacaatacagctgcaaaaatggaaatgcattcagaggtcattgtttctatcaaatttccaaatgggttttaggaatgtgaacctcacctatatatctctctgccttcatttttcagattatgtttcagtg

SEQ ID NO: 88936 - DNA, 243 bp, Homo sapiens
caataatgagtaatgagatggaatcggtaatgagtctcctatcaaagagaagcccagggcccgatgttgtcactgccgaattctaccacaacttcaaggaagaactaataccaattcttcccaaattattccacaaaatcgaaggagagagaattcctccaaactcattctacaaggccaacattatcatgataccaaactacacgggaggctgaggcaggagaatcgcttgaacctgggagg

SEQ ID NO: 88937 - DNA, 643 bp, Homo sapiens
aattccctcattaaaaaattttcccatctgccccttccttgcttacaccttggtttaaacagtgatgtgtataggctcaacaaaggtttactcatggtatgaatagtgggtttatttttaaaatttcatattcctttatctcaaaatggaaccaagaaaaagaaaatattcacaaaagatttgcctgggagcttttaacagatcattccctaagccattgcaaatttgcagcaagaaaccagaaagctatttaatgtgactggcaaaacaatttagttgcaaggagaaaggaggcaacccagagcaggggctcaaagcctacctctactctgtgaacttcctgcctcttcggtcttcctctgccctgcccaggagcttttgtgagttccacccaagagggagttgttggacagtgtgtggagagcaagtgtctttcacaaagcctggacctcataaaactcatcctaccagtgatatccatgatgtcttttttcacctcactacttatagggcttttagttgaagggtgatggtgaatcataaaaagaaaatttgtctcgaaataggtgtagaattacatgtctgccgataaaatcttaacgtgggtttaaaaaaatttttttgacactaatgaagtaaaacc

SEQ ID NO: 88938 - DNA, 379 bp, Homo sapiens
ctctctctctctctctctctctctctctctctctctctctctctcctcgaaaggtatgatggttttattcgtatgttctatttaccgaggcaaggaattatacctggcctactttagattggctgcaggaagagatgaagccaatagcactttgccctgtttcttggcttggacttgtagtaagagacctcggctgggtgtggtggctcatgcctgtaatgccaccagcactttgggaggccaagatgggtggatcacctgaggtcaggagtctgagaccagcctggccgatatggtaaaaccccatctctactaaaaatacaaaaagtagctgggtgtggtggcgggcgcctgtaatcccagctacttgggaggctga

SEQ ID NO: 88939 - DNA, 231 bp, Homo sapiens
cgaggatgaaaaacaaaggccttctaagacctacaggaaactaaggacctggagcgtttcaaaacccaatccacccccacccttaatgaattactccttgttagcgaaaaagctgttcgccagctgcaagaacacaccgaaagggtcaaaatacttaagtgtgcggcacctgcgaactaagcggcttccgaaaggtcctccgcccggggcgcttcccggagaccccgcccc

SEQ ID NO: 88940 - DNA, 270 bp, Homo sapiens
gaagaatctcaacatacagtcctcagcagctttagcatgggcaacaaattaagtctctgtaaaaggcccaaaggacagggtttggtgagattctggagagctggaaacatggaggttgacaggaatgtaaagaagaactcatttacatgccaggagggtggaacaccccaattccatgaggataactgctcctgtactccagacctcaccccatgtgtctcttcatctggctggttatttgtcctttaagatctccttactcaaccagta

SEQ ID NO: 88941 - DNA, 883 bp, Homo sapiens
tgcgggtgaaacaacaggaatacatggaatagaggaatctgagcaaagactaactcaaagatggtggtgtataacttatagaactcccattctgtgttgggcgcataaatgatctttgtagataccatttcatttactcaaataaccctgcgagccaggcactgttatccctgtgatgaaactgaggctcagagaggttaagacacttgccaaggattacagagctagtaagtggcagaactgggctttaaacccaggaagctagattccaaagtcttgtgttcttaactactaagctacactgttgatcacccttggagtcgtgggttaggagaaaaggaagggaaacaataaggtgggagaagatgaaggacttagggctcaaagctgatgcttcagtgaggtgggaaaacctgtgctgtggggttttcctcagattacacacacgtgcacacgtgtttatatcaggtgctgaaaaaaagataattaatttagatatttaccaggaattctttcagaagcatttttaatgagtcatatttgcactgcacaattctttttgcttcatttttatatagttgaaggcagtaaggaattcttgtacaagtaaacatcttttccttttgtacccctcatcactgcgaatttgatagaacccttagtaaatgaccaggttgttttttacacttttttttctctcccacaacgtaacatgggtttggcaagctttaaaaaatgttagtatgtttgtatccactagtatacctctgaccatttaataggagatccctgccaattagagctagtgatgttttgttctaatttggagagacagggtgtgtctgtctttaaattctctgtcagttttcctttttgtaaaaaa

SEQ ID NO: 88942 - DNA, 553 bp, Homo sapiens
  misc_feature (310)..(310): n is a, c, g, or t
ttttccacagggggcacgggttgccgctggactcgttaaacgggttgttgtgcgtgccactccgtcagcacccctcctctgctcagcctgcagaaagacttcacgctctggacatctttactctggccagtaaggtctagcagtgcttggccttagactcctgtcccaccacatcacatatgaccctctccctggtagataatcccaaggtttctgagtcagtagttctggggtcaggtataaaaatctgccctcctatcacattcccgggtgatgtgatgctactgttctggggaacacactttgaganaccactggcatagccatagcttgacgtaacttgatgttttttctgttacgactctttactcacttttcgcttccaggacatgcctggacatgggctgcctaacccaattttgcaaaagctggggttatctccattttatagaaacaattaatgatcccacttactcttttaaaattaatattgaactctccatgaagcccataaacaccaaataagatgaacccgaaaagatcacaccaaagc

SEQ ID NO: 88943 - DNA, 202 bp, Homo sapiens
cctagctgtgcgaccttgagggactcatttaaacctctccagaccttcattttctcatctgtaaagtgacaatgatggtacctaatgcacacaggtatagggcaaagtgaagaaattgacatatgctaggtgcccaggccagtttcagcatacagcaggtgctcagtaaacgctatcaggctggagtcatgatgtctaaagg

SEQ ID NO: 88944 - DNA, 373 bp, Homo sapiens
gcgaggaggcagctccgaatttatagtgaggggcattaaattattgcatgtacctaaaaagtgtacatctattgtgtatcaataaaaataaatttaaagaagtaaaaaatggacaaagcctacatgattgtctaaaaaaatttttaaaaactattggacaaaattcaacactttttcatgctaacactcaacaaactaggaataggaacttcctcaaactgtgaagtttatttatgaaaaacttaactaatatcacacataataacggaagacaacgtttttatgtctaagatcaggaacaagacaaaatgtctagtcttcccatttctatttaactttgtactaaaggttctagtgagggcaattggacaag

SEQ ID NO: 88945 - DNA, 289 bp, Homo sapiens
cgtaaggggagttgagtcgtcatttaccatttctggaagcagctcatctcacacagctcacagcagaatctggagctactgcttcatgttccagttcctggccttgacctgtcacctcttctcccgagagcagggggccttacaggtgtcagtgttctgtgtggagcctgggcttggtgccgcatcacctatgcctgtctgtcttctgagcactcattctgggtcagacactgagctcgaggcagggtgcgcaggtgagccaggcggggagtgcagatgcagggaatgg

SEQ ID NO: 88946 - DNA, 233 bp, Homo sapiens
tgtgagcgtgaccgtgtgtgtgtaggtccatgagtgtgagactgtgagtgtatgggactgtgagtgtaagagtgtgggagtgtgtgggtgggtgtgtgaatgtgagtgttgtgagtgtgaaagtgaggtgtgtgggtgagagtttgggtataggtatgtcagtgtgtgaggatgagtgtgagtgtgagagtatgtgggtacgtgaacgatttttttttttttctgagactaag

SEQ ID NO: 88947 - DNA, 500 bp, Homo sapiens
aaactggctgaacctggaaattctgcatttattcaataaatattaagtgaacgtctacaatatactagtcagtactctaggcactaggaaagggccataagcaaaaagcacaaaaatcttgttttcttggagacaacatctacctcctgtaacttctccgactggcccgcctggcttctttggacctccgtctggcttttatataacacctcctccacggaatattgtcctttgagattctgcagatcgctgtggtgtacctcccctctccacgcccctttcctccatcctaaacaagcagccttaattatttcaaggagtaagcaaggatgcggaaacaggagcgaaaactggactgggtggggtgaaggcgggtgctaagacgccagggctgaaaaagaaatcaacagaaccgctccgactccgggccaacgtcaagacgggcgggtccgaatcaggtgtgtcacctgacacctctcccgggaagggccatcgtcccc

SEQ ID NO: 88948 - DNA, 630 bp, Homo sapiens
aatggagagaccagcagttatggggcagttaaacatgtactaaatggtagtcgctgtgctcagcacaacatgagttccagggactcagcactgggcctcctctcgtcctcagtttcttattctatgccctctgaagcaggttcagaatcttctagacagacagaattaatgaataaaacaatgaattgtcacacatagaacttttaatgtgcaggacctggacaacataaggggttaaaaatcaagcccattgtaataacagctccttgctgttgaatatttacttcttctatttgatccctaaacagtatgctgtgagtatcatagaatatcgcattcccttcctcagtgaatttttttaaatgtctgcttcttaaggatgaaatatttgtaaagttggaggaactactcaaagccctattatttcgcatgtccccaagctccacctctgataaattttttgtaccggtaaagacagcatgtgatttgtaaaatttgtacccatagtaattaaaaatatgacctttatccagatcctgttgcagaggcacttatgaattcctctaaagtacactctcccgctgttattgttgttagaaacatgtttccactggttgacttttcaaagat

SEQ ID NO: 88949 - DNA, 243 bp, Homo sapiens
ttcgctccccccggtctgtctctgtctctcctcctccctcctcctgctccgggcggagcccggcatgggggggccggcgcccggcaggccagtggatccgggacccagggagggccgccccccgggcctggtggcactgagcagggccccccagcccccacctcctgccccacgagatgaacctcctctaccgaaaaaccaagctggagtggaggcagcacaaggaagaggaggccaagagga

SEQ ID NO: 88950 - DNA, 496 bp, Homo sapiens
ctgacatgctgtgaccacaactctcacagcaattttgtaaagcagagttttcttaagctgtgttgtgaaacagacacctttcataatctgaggaaagccttggaacactgttgtggtagagactgctaattgctcttcaatttccattctgtgcatttttagctggccatgacatatccagattaaacctgtatcacccaacctccactgcaggtatgtttggtcatgcaaactcaggggtctagtaggcctggatttatgcaaaagtggcaagagcaacttctaggaagtatccttaaactaaaaggatgtcttaaaagactgtctctttctctctctctccttatttcctgcagaatgtttggaatactatgtgatgactggagatggataagccatttccaaacacaaggtggacgatacatactgaagatggcagagtgacaagataaaaggatcatgggtcccagatgatcacagagctagctgccatatc

SEQ ID NO: 88951 - DNA, 400 bp, Homo sapiens
tagcattagccattatccttcaaatgggttgcctcctcaaagtggcccttttgcagaaggattgcatcaacatttatatttttttccctaaagtactttgttacgcaggtgagcttgggtgatgtaagttacaattaactccttcatctcctatcctggttgctgccattcttctctatttttggccagggtgtggatattggtggaggagactagacttctcttagcccgtgtgagaggtagacattgagatccttctgaaatgcatccagccattcttgctttcttcactgtcaagataactttcagcacattattattccatttaagcgaggataccatattcctaaagggtgtttcagaacccacacactggaagcaataagaaaccctgctgcaa

SEQ ID NO: 88952 - DNA, 770 bp, Homo sapiens
tgcaagtcagcccaacacagcacgtcgggtgtgcatggcctgcgcccggattgggcagcgggctgggggctgtgaacacagcgctgcgttcatctattatggtctgtccttctaagaagtccctaatttggctgcgaggattaggacatagttcccaagcagggcccacgctggcagggggcccaggagctgcggaggaaatgggtctaagcgaagagaccatctgttcgctccaggtaaagctgtgattggcaggcgactgagccagaactgcccgctggtggggccctccctccgtggcctctaacagatatacaagtaaacaatccgccagccacttatgaccaccgcgggtggcagtcccgggagaggaggcaagctaatcaaacattcaaggggggaacacaacagaatctctggcgcttgggcaaaacaatgttttgctgaagtacagccaggaagggggaaggtttgaatggaagctgatgagccagttcctcaacctctccttttctctctggaaacgtgttaacattttaatcatgttgctgagtatctgctgctggatctattaactggcccctgcactggttttaatctatctgttttttggcccagggttcctgtggagctccttgaagtctctaaatgatttgcagcggtctgtgtctcttcactacacagatcctggtctaaacatgctattccgcagtaaggtattagcaaacaaacgacttcaaccattgcttccctttttttttggtctccaa

SEQ ID NO: 88953 - DNA, 192 bp, Homo sapiens
caccatttacttttgaatactattccccaccaaaagaaaccaagcctccttagagaaatggctgattccaggtctgggactagcaaagtacaaggtaagttgaaacatctgtgccagaaagtaagaaagtgatcaaaaagacatgtcaaaggggctcaggcactgatttgaaatagacaccactggcctaaa

SEQ ID NO: 88954 - DNA, 5723 bp, Homo sapiens
  misc_feature (1294)..(1294): n is a, c, g, or t
  misc_feature (2926)..(2926): n is a, c, g, or t
  misc_feature (2928)..(2928): n is a, c, g, or t
  misc_feature (4292)..(4292): n is a, c, g, or t
cgggtggacaagtcacctgtctaactgtggtgagagcaacaggcctccaaaggaaagaagttgtttccgagtttgtgactggcacagtgacctctttcagtgggaggtttctgactggcaccactgtgtgcttgttccttacgctcgcggtgaagtcaagcctcggactgcagagtgtgtgacggctcagcatggactgcagcaccggatggtgcgctgcattcagaagctgaaccgaactgtggttgcaaatgaaatatgcgaacactttgcccttcagcctcctacagaacaggcttgcctcattccttgtccccgggattgtgtagtatctgagttcttaccatggtccaactgtagcaagggatgtgggaagaaattgcagcatagaactcgcgcggtcatagctccccctctctttggtggtttgcaatgtccaaatctgactgagtcaagagcctgtgatgctcccatttcctgtcctcttggggaagaggaatatacatttagccttaaggttggaccatggagtaaatgcagactgcctcatcttaaagaaattaatccaagcggaagaactgttctggattttaactctgattcaaatgagcgagtcacctttaaacatcaaagttacaaagcacatcatcattcgaagtcttgggcaatagagataggttatcaaacccggcaggtttcgtgtacaagaagtgatggacaaaatgctatgttaagcctttgccttcaagattccttcccattgactgttcagtcctgcatcatgcccaaagactgtgaaacctcccagtggtcctcctggagcccctgctccaagacatgccgttcagggagtctcttgccaggatttaggagcaggagccggaacgtgaagcacatggctattggaggtggaaaggagtgtcctgaacttcttgagaaagaggcctgcattgttgaaggagaacttctgcagcaatgtcccaggtattcctggagaacttctgaatggaaagaatgccaagtctctctcctcctcgagcagcaggatccccactggcatgtgacgggacccgtgtgtggcggtgggatccagacccgggaggtgtactgtgcccagagcgtaccagcagctgccgcactgagggccaaggaagtctctagacctgtggaaaaggcattatgtgtgggacccgccccgttgccctctcagctctgcaatatcccttgctctacggactgcatagtatcttcctggtcagcctggggcctgtgcatccatgaaaactgtcatgancctcaggggaaaaaaggatttagaacgaggcagcgccatgtcctcatggaatctacagggcctgcagggcattgccctcatttggtggagtctgttccttgtgaggatccaatgtgctaccgatggctggcatcagaagggatctgtttccctgatcatggaaaatgtggcctgggacatcgtattctgaaggccgtctgccagaatgaccgcggagaagatgtatcagggagtctttgcccagttccccctcctcctgagaggaagtcttgtgaaattccctgccgaatggactgtgtgctgagcgagtggacggagtggtcatcctgttcccagtcctgttcaaataaaaactcagatgggaaacagaccaggtcaagaactatcctggcactggctggggaaggtggaaagccatgtccccctagtcaggctctccaagagcatcgtttgtgtaatgaccattcctgtatgcagcttcactgggagacatcgccttggggcccttgttctgaggacacattggtaactgcccttaatgcaaccattggctggaatggagaagccacgtgtggtgtaggcattcagactcggagagtcttctgtgtcaagagtcacgtgggacaagtaatgaccaaaagatgtccagattctactcgacctgaaactgtgcgcccctgttttctcccatgcaaaaaagactgtattgtgactgctttcagtgagtggacaccctgcccaaggatgtgccaagcaggaaatgccacagtaaaacagtctcgatacagaatcatcatccaagaagcagccaatggaggccaggaatgcccagataccttatatgaggagagagagtgtgaagatgtttccttgtgtcctgtatatcggtggaagccacagaaatggagcccttgcatcttagtgccagagtctgtctggcagggaataacgggcagcagtgaagcctgtggaaaggggttacaaacaagagctgtctcatgcatctctgatgacaaccggtcagcagaaatgatggaatgcctcaagcagacaaacggcatgcctctccttgtgcaagaatgcacagtcccatgtcgagaagactgcaccttcactgcttggtccaagtttacgccctgctccacgaactgtgaagccacaaaaagtaggcggcgacagctcacagggaaaagcagaaagaaggagaaatgccaggattctgacctttaccctctagtggagacagaactatgtccttgtgatgaatttatatcccaaccttatggaaactggtcagattgcattcttccagaaggcagaagggagcctcaccgaggactgcgggtacaagcagacagcaaagaatgtggagaaggcctgcgctttcgagcagtagcctgttctgataaaaatggaagacctgttgacccctccttctgcagcagctctggttacattcaagaaaaatgtgtcattccctgcccatttgattgcaagttaagcgattggtctagttgggggtcttgcagttcatcttgtggaattggagtgagaattcgatccaaatggctaaaagaaaaaccttacaatggaggacgaccatgtcccaaactggatctcaagaatcaggtnangtacatgaggcagtcccatgttacagtgagtgcaatcagtattcctgggttgtagaacactggtcttcatgcaaaatcaacaatgagctgaggtccctgcgctgtggaggaggaacacaatctaggaaaatcagatgtgtgaatactgcggatggtgaaggtggagcagtggatagcaacctgtgcaaccaggatgaaattcccccagaaacccagtcctgttctcttatgtgtcccaatgagtgtgtcatgtctgagtggggactttggagcaaatgcccacagtcatgcgatccccacacaatgcagagaagaactcgccacctgctaagaccatcactgaactcaaggacttgtgctgaagactcacaggtgcagccttgcctcctgaatgaaaattgcttccagttccagtacaatctaacagagtggagcacatgccagctgagtgaaaacgcaccctgtggtcaaggcgtcaggacccgcctgctaagctgtgtgtgcagtgatggcaagccagtcagcatggaccaatgtgagcagcataatttggagaagccccagagaatgagcattccctgcttggtggaatgcgtggtcaactgtcagctctcagggtggacggcttggacagagtgttcacagacctgtggccatggaggtcgaatgagccggactcgatttatcattatgccaacccaaggagaaggacggccatgccccacagagcttacccaggagaaaacctgcccagtgaccccctgctacagctgggtccttggcaactggtctgcatgtaaattggagggtggagactgtggggaaggagttcagatccgcagcctttcctgcatggtccacagtggttcaatatctcatgcagctggacgtgtcgaggatgcactgtgtggagaaatgccctttcaggacagcatcctgaagcagctgtgttctgtgccttgcccaggagactgccatttaacagaatggtcagagtggagcacatgtgaattaacctgcattgatggaagaagctttgagactgtgggccgccagtctagatcaaggacttttataattcagtcttttgagaaccaagacagctgcccccaacaggttctagaaacacgcccttgtacaggaggcaaatgttatcactacacatggaaagcaagtctttggaacaataacgaacgaactgtatggtgccagcgttcagatggcgttaatgtcacaggaggctgctcccctcaggcccgtcctgctgccattcggcagtgcattccagcctgcagaaaacctttctcctactgtacacagggtggagtctgtggttgtgagaagggctatacagagataatganatcaaatggtttcctggattactgcatgaaagtaccaggctcagaggataaaaaagctgatgtgaaaaacctttctgggaaaaacagacctgtgaattcaaaaatacatgatatttttaaaggatggtctcttcaaccacttgatccagatggccgagtaaaaatttgggtttatggcgtttcaggtggcgcttttctcatcatgattttcctaatatttacttcctaccttgtttgcaagaagccaaaaccacatcaaagcacacctccccaacagaagcctctgaccttagcctacgatggagacttagacatgtaatctgaaaaagaaatccaaatgtagacatcaactgccttaaccgctttctcttttgtagctctcagacttctcagttttttgaggaatctcaagatgtgatatattgggcagaatacaaatattgcaaaagtaatattgcctcaacttcatttggacatggagtcaaggattattaggtctgccattttgttttcaagttgtttgtgggtgtgttttatttttttggttttcccaagggacctgaaaacccttctcttcctgtttggaactgggaggaagaaaacatgatggaattcccacagacttgagtaaacttgatcttcagcagcataatgacaatccagaggaaaatacagtcaaggcatttactctaaatgacgagtctgacactgcattgttacgcactatattagtgcaaagtctttattcttcccatacttcaacactgagttttctagagtttactttggtttaaagactttcaaattggattgcctatttttcatgaacacagagagaatggattaccatttcagaaattctctgagtttttaacctttaaatattgtattttgttttgtagccaggggatgatggcgcttcatgggttgcagctactgaaaatagcagcgtgtgtgtaattgctggactagatgaaagctaggtcatttctgaagggaatgtgtactgaatgttagagtgtacaaatgaaatatgtggttaaattggagaatgaggtagattatttgattactaaaactgtattttaacaaaaacttatccatgtagatatagcattaaccacacacagttgtaattcagtttaatgatgacaaactctgcttttgtaatttcaattttcttatctgaatatttataaattcttctttcaaatttaattatctgacctcatttaatatacatcaaacaccgatcctgtttgtacaaagtcttgcttttataaggtttcaataatatctaaaacaacacattaaaaagctgagaccattttatgaagataattgtttgtaatcataggtgttgaaagtaaaaaggtgccatcttgtggtattgacttgtatttataacaaataaactgctcaagagactgc

SEQ ID NO: 88955 - DNA, 2495 bp, Homo sapiens
  misc_feature (2034)..(2034): n is a, c, g, or t
  misc_feature (2495)..(2495): n is a, c, g, or t
agcattttccacgtgattatcaactttacagccatcatttcaatgtctgtactattccacatggtggatgaactagagtctactcatcttttattgttgggacatttaggctttttgcaaataaaaatatttatcatagcagttccttccctcccctgatggcctcataagcctgtggtcctaggacttgactctttcccaaattagggtgcccacgcttccttattccctgaccacattcttccagcaaaccctcctggagctgagtgataggcactcatggtgggaggccccatttaacaccatccatgcagcactgatttgttataggctgctgtggggggagggggtctccaaggaaacagttgaggaaacagagagtgaggtgagcaggcagctaaatacagaaactgttaagggcatcagaaacacccatgggcatgtggacagctgtagaaatagggctgcaagacacctcagctagaatctaatgacctgagagcaccaggaaaagagaagggagttgacagtgtatgcagctaggaacacatccccgtcgggggtctgctctgaggaccctctataaccctaaagcagacagtacctctcccagctcagtatgatgtgctctatgattaatctaacatgaggcgactgtgttctccatcaaaggagagactgttcctgtgtgtgtgtgttgaggggtgaggggaggggggaacaccagggagacctttaaggatggggtggcatttgagcaggacctcgaaagatgaggaggcttttgacaaagggagtccagaggcagaggacagaacatagaactagatgaagagcccttgagggcagggacggtggacctccccctccctcccagatgctggctcaggcctggtggacactggcaaatgtcgttttgaatgagtgcccccggggggagaggtggcagcatgtgggcggtggggcatttgttggggggggcggtgagtcttcaccactgctgctcttgcccctcaggtgcagtgctttgaccccaaggaggaccggtggagcctgcggtcaccagcacccttctcacagcggtgtctcgaggctgtctcccttgaggacaccatctatgtcatggggggtctcatgagcaaaatcttcacctatgatccaggcacagatgtgtggggggaggcagctgtcctccccagccctgtggtaagtggaggcttcaaggcaggagagcggaacccgcttctaaggctctggatcttggagcttgtgaatcttgtgactccatcctaggtggttttattatacatcactctctagctcatcctcacagtgatagtgaaccatgcatttcacagatgaggagactggccttagagaggttcagcacctggcccaggccaacaactaggccctgttaaggcagagcctagaaccctgcagtcccaagtgctatagctttgagtggggatttggtccaaatgaccctgtggtctctcctgccccgaaggccactgctagtaaccaatcatgaggtaagatgtggggaagggagttgctaaggtctgctctagtgatatcagagcagggaggcccaagtcctggaagctctggcccctgcaattccctgcctcccctaccttcttctccatcccctgaaactccagagactacacagatatggttggactggaggtctctgccagttctgacctttggtgaccttagaggtgagatttctggcttgagtctgagattctaagatggcggcagtcgagattattgttattggtgtgcttaccacattccaggctctatgtaaaatgctttatatgcttaacttccattaactgttaagggaaccctgtgaagaaggcactttagttcttctccctttgccgatgaggaaactgaggtccagagaggttaagtgacttgcctaacgccattcactgaataagggtcaagctagagctggaactcaggtccatccagtttcctgcctctctacagtccagattgcctgttcacagnctgtgggtcaaggttctattatctggcctggccaggcagggacagaggaagccccaggctggacctgatagttgtctttctgtttgtccacccaggaaagctgtggagtcactgtgtgtgacgggaaggtccacatccttggcgggcgggatgatcgcggagaaagcaccgataaggtcttcacctttgaccccagcagtgggcaggtggaggtccagccatccctgcagcgctgcaccagctcccacggctgtgtcaccatcatccagagcttgggcaggtgattcagatttggacagcctgagccaggaggcggagaggcaggcggagctcagatgcacactctgctccctcatggcacctccacgcaaacagcccttaacttaatggtcccttttcttgtataaataaaatcttgttgggtctgtgttccagctgcagtctgccctgcctggagatgn

SEQ ID NO: 88956 - DNA, 1280 bp, Homo sapiens
gggcaacagagcgagactttgtctcaaaaaaaaaaaaaaaagtcaattatctttgtaagctacatcccgaattcagaaacaaagatgcttcttagaatcaattaagtggggtggtaaagtctcaatactagctattattattaagcatcagcttggtgccaggtattttacagctgtaaccatgcaggttaaggtctcatccccgctaaatgagaggaaaccggctcagggaggtacagcaactgggtggaggctgcccaggtggtggcagcactgggctcgggggtcagtttggtcctgaaactgggttggggacagggatagtttccagctcaaagactgtaaggactgaagcgatgaggccgagggccctaaggccctggcacccggctccccggcccatgtcctcacttgcagctgttcgcggtgggtggcttcgacggcctgaggcgcctgcacagcgtggagcgctacgaccccttctccaacacctgggcggccgccgcgcccctcccggaggccgtgagctcggcggcggtggcgtcctgcgcgggcaagctcttcgtgattgggggcgccaggcagggcggcgtcaacacggacaaggtgcagtgctttgaccccaaggaggaccggtggagcctgcggtcaccagcacccttctcacagcggtgtctcgaggctgtctcccttgaggacaccatctatgtcatggggggtctcatgagcaaaatcttcacctatgatccaggcacagatgtgtggggggaggcagctgtcctccccagccctgtggaaagctgtggagtcactgtgtgtgacgggaaggtccacatccttggcgggcgggatgatcgcggagaaagcaccgataaggtcttcacctttgaccccagcagtgggcaggtggaggtccagccatccctgcagcgctgcaccagctcccacggctgtgtcaccatcatccagagcttgggcaggtgattcagatttggacagcctgagccaggaggcggagaggcaggcggagctcagatgcacactctgctccctcatggcacctccacgcaaacagcccttaacttaatggtcccttttcttgtataaataaaatcttgttgggtctgtgttccaaatagaaaaattttgttatttatatgttgaaaaaaaatggtttcaatttttttatttattttaatggttcttaccttttaggagagggaccgtgtccttatttctcctttaaaaaaatccttgtgggggtcccagtgtactatttt

SEQ ID NO: 88957 - DNA, 1209 bp, Homo sapiens
ttctcgagggccgcctgcgcgccgccaacagcctagcgctgcgccgcgtggccgccgccttctcgctggccccgctggccgagcgctgcggccgcgtcctgcgtcaggccttcgccgaggtggcgcgccacgccgacttcctggagctggcgcctgacgaggtggtggcgctgctggcggaccccgcgctgggcgtggcgcgcgaggaggccgtgtttgaagcggccatgcgctgggtgcgccacgacgcgccggcccgccgcggccagctgcgacgcctgctggagcacgtgcgcctgccgctactggcgcccgcttacttcctggagaaggtggaggcggacgagctgctgcaggcctgcggcgagtgccgcccgctgctgctcgaggctcgcgcctgcttcatcctgggccgcgaggccggtgcgctgcggacccggccgcggagattcatggacctagctgaagtgatcgtggtcatcggcggttgcgaccgcaaaggtctcctgaagctgcccttcgccgatgcctaccatccagagagccagcggtggaccccactgcccagcctgcccggctacactcgctcagaattcgccgcctgtgctctccgcaatgacgtctacgtctccggaggccacatcaacagtcatgatgtgtggatgtttagctcccatctgcacacctggatcaaggtagcctctctgcacaagggcaggtggaggcacaagatggcagttgtgcaggggcagctgttcgcggtgggtggcttcgacggcctgaggcgcctgcacagcgtggagcgctacgaccccttctccaacacctgggcggccgccgcgcccctcccggaggccgtgagctcggcggcggtggcgtcctgcgcgggcaagctcttcgtgattgggggcgccaggcagggcggcgtcaacacggacaaggtgggcgtgggcctcaggcgcgagagggcgttgaaggctggggtgcccactgtgtgccaggcgcagaattgggcgtttccatgcccttgtccatttattcacttaatcccatcaaacagcccagaccagtcacctccatgtttcagggaaggaaatgagcagaaaaatgaccccaaggtcacacagtgggtcagcagcacactgggactcaaatgtttgggctggtgccatgtaagtttcatacattttaaaaattgagggcaagata

SEQ ID NO: 88958 - DNA, 902 bp, Homo sapiens
ttctcgagggccgcctgcgcgccgccaacagcctagcgctgcgccgcgtggccgccgccttctcgctggccccgctggccgagcgctgcggccgcgtcctgcgtcaggccttcgccgaggtggcgcgccacgccgacttcctggagctggcgcctgacgaggtggtggcgctgctggcggaccccgcgctgggcgtggcgcgcgaggaggccgtgtttgaagcggccatgcgctgggtgcgccacgacgcgccggcccgccgcggccagctgcgacgcctgctggagcacgtgcgcctgccgctactggcgcccgcttacttcctggagaaggtggaggcggacgagctgctgcaggcctgcggcgagtgccgcccgctgctgctcgaggctcgcgcctgcttcatcctgggccgcgaggccggtgcgctgcggacccggccgcggagattcatggacctagctgaagtgatcgtggtcatcggcggttgcgaccgcaaaggtctcctgaagctgcccttcgccgatgcctaccatccagagagccagcggtggaccccactgcccagcctgcccggctacactcgctcagaattcgccgcctgtgctctccgcaatgacgtctacgtctccggtgagggcggagccgcaacgggagctcacacgggattgactagtagcctccgcactccaccccctttgcttttccctccaatcgggagagaggggcgggatgttttctgataacctacagttattggctgaagtgagcagggctaactacgcgtgtgacccgccctttattcaggaatgttaacttcaatacatatgattactttttgttctgaaccggcttcctaaggaagtcaattcgtattagtattaataatcacttcaactagc

SEQ ID NO: 88959 - DNA, 1615 bp, Homo sapiens
ttctcgagggccgcctgcgcgccgccaacagcctagcgctgcgccgcgtggccgccgccttctcgctggccccgctggccgagcgctgcggccgcgtcctgcgtcaggccttcgccgaggtggcgcgccacgccgacttcctggagctggcgcctgacgaggtggtggcgctgctggcggaccccgcgctgggcgtggcgcgcgaggaggccgtgtttgaagcggccatgcgctgggtgcgccacgacgcgccggcccgccgcggccagctgcgacgcctgctggagcacgtgcgcctgccgctactggcgcccgcttacttcctggagaaggtggaggcggacgagctgctgcaggcctgcggcgagtgccgcccgctgctgctcgaggctcgcgcctgcttcatcctgggccgcgaggccggtgcgctgcggacccggccgcggagattcatggacctagctgaagtgatcgtggtcatcggcggttgcgaccgcaaaggtctcctgaagctgcccttcgccgatgcctaccatccagagagccagcggtggaccccactgcccagcctgcccggctacactcgctcagaattcgccgcctgtgctctccgcaatgacgtctacgtctccggaggccacatcaacagtcatgatgtgtggatgtttagctcccatctgcacacctggatcaaggtagcctctctgcacaagggcaggtggaggcacaagatggcagttgtgcaggggcagctgttcgcggtgggtggcttcgacggcctgaggcgcctgcacagcgtggagcgctacgaccccttctccaacacctgggcggccgccgcgcccctcccggaggccgtgagctcggcggcggtggcgtcctgcgcgggcaagctcttcgtgattgggggcgccaggcagggcggcgtcaacacggacaaggtgcagtgctttgaccccaaggaggaccggtggagcctgcggtcaccagcacccttctcacagcggtgtctcgaggctgtctcccttgaggacaccatctatgtcatggggggtctcatgagcaaaatcttcacctatgatccaggcacagatgtgtggggggaggcagctgtcctccccagccctgtggaaagctgtggagtcactgtgtgtgacgggaaggtccacatccttggcgggcgggatgatcgcggagaaagcaccgataaggtcttcacctttgaccccagcagtgggcaggtggaggtccagccatccctgcagcgctgcaccagctcccacggctgtgtcaccatcatccagagcttgggcaggtgattcagatttggacagcctgagccaggaggcggagaggcaggcggagctcagatgcacactctgctccctcatggcacctccacgcaaacagcccttaacttaatggtcccttttcttgtataaataaaatcttgttgggtctgtgttccaaatagaaaaattttgttatttatatgttgaaaaaaaatggtttcaatttttttatttattttaatggttcttaccttttaggagagggaccgtgtccttatttctcctttaaaaaaatccttgtgggggtcccagtgtactatttt

SEQ ID NO: 88960 - DNA, 1220 bp, Homo sapiens
gagggtcgtaactcagacattcccaccacttattcaaagcacactgggtcacaggtccagagtcttacaccagctcaagaagtcctcctgctgccttcccttaacccttcctttggatctgggggccctagtttctagctctttgggggtgcttgggatagcaagagagccgatgggcaacagctgcttctctctccctaggaggccacatcaacagtcatgatgtgtggatgtttagctcccatctgcacacctggatcaaggtagcctctctgcacaagggcaggtggaggcacaagatggcagttgtgcaggggcaggtaggcacgagctgcagcggctgccctgggacacaagctgttcgcggtgggtggcttcgacggcctgaggcgcctgcacagcgtggagcgctacgaccccttctccaacacctgggcggccgccgcgcccctcccggaggccgtgagctcggcggcggtggcgtcctgcgcgggcaagctcttcgtgattgggggcgccaggcagggcggcgtcaacacggacaaggtgcagtgctttgaccccaaggaggaccggtggagcctgcggtcaccagcacccttctcacagcggtgtctcgaggctgtctcccttgaggacaccatctatgtcatggggggtctcatgagcaaaatcttcacctatgatccaggcacagatgtgtggggggaggcagctgtcctccccagccctgtggaaagctgtggagtcactgtgtgtgacgggaaggtccacatccttggcgggcgggatgatcgcggagaaagcaccgataaggtcttcacctttgaccccagcagtgggcaggtggaggtccagccatccctgcagcgctgcaccagctcccacggctgtgtcaccatcatccagagcttgggcaggtgattcagatttggacagcctgagccaggaggcggagaggcaggcggagctcagatgcacactctgctccctcatggcacctccacgcaaacagcccttaacttaatggtcccttttcttgtataaataaaatcttgttgggtctgtgttccaaatagaaaaattttgttatttatatgttgaaaaaaaatggtttcaatttttttatttattttaatggttcttaccttttaggagagggaccgtgtccttatttctcctttaaaaaaatccttgtgggggtcccagtgtactatttt

SEQ ID NO: 88961 - DNA, 575 bp, Homo sapiens
gaataccctttagaatgatccaatttttcattcaggcacttgaagttcattaaatgaatgctggagaaactgttttctcattgacgtacttgctttaatgaaatgagaaagtaagaagtgcctgaatattggtggtggttctcaaacccaaggaaatctaggggtttgtggagatccagaatctcctctctcctcaccacttttatggcctttatctaattttacttttcagccacgtttgatgtagctgacttccatctcgaaacactctcttctgattttccctttgattgcactatccactcctttttccatgtcctcgaccggttctgtcttcccgcgtgacctctcagcattgaagtcttatctgcctgccctcttctggatgcattgtattcctggatgagcttctcaatgccctagtctcatatactggccatatgatgaggattcctggttttacatgtcaagccttgtctccgtaagtgaactgcaaactcagttttcaaagtgcccatctgaccactccactctgatgtctaacatgtgctcgcttacatgtggccagaagagag

SEQ ID NO: 88962 - DNA, 351 bp, Homo sapiens
gaggttcctctccaacacccttttcccttcattattctgaaggcccttctatttgttgtctcttccttgtttgctgaatactcctggtataagaaacctctatttgggcagatgataaagaagataatacccaaataaatatcaagaactaattctggatagtaatcatgacacttgaaaaataatcacttgaagatattcagctacaaattatattaaaataagtgtaactttctatatctgcagtacttttctctacccttgaccagagagatctttcttaaaaagaaggcttgccacatgacctctgctttacatcctttggtgatgccttttgtgttcatggcccac

SEQ ID NO: 88963 - DNA, 460 bp, Homo sapiens
gatctagagagaatcctgtatctaacaattttaatttttttccctttatgctgttattccttacctagagaaacaatttccctccaaagttcctttgaggggtctgtttaggccaggccaacacaagtgacctatgtggattttagcatcctttttttgaaatttgaggttttatgaagcttgagtttttctggatatttttagtaatttgctggtgtgtacttagctcagatacttgattgcaactgtgttgggtcaactatttctaatgggacttttccatttgcatgtacagtcactggaaactgctgggcagagaaactctaaaaggtagttggggcacactttttccacctgtcagattggtgaagaattggtgaggctgtggggaaaatggcattctcccacttttgatggatatgtatccaaataaaagtcattcccatgctttctttcatcc

SEQ ID NO: 88964 - DNA, 301 bp, Homo sapiens
taagcatggggtcttgctatgttgcctaggctggtctcaaactcctgggctcaagtgatcctcatgcctcagcctcccaaagtgctgggattacatgtgtaggccaccacacccagccttatatatatatttctaattttgccttagccatgcccttaaaaactaattctactttcaactagttttttttttttccaccttcagtctgtagtattgttcacattttgaaaacaatacctacagtaacctgtgaggtaggacatgatagtgttttattggaccccttttactttatgaattg

SEQ ID NO: 88965 - DNA, 369 bp, Homo sapiens
aacaattctggcttgactcaagactgaaatataacagccaaacaggcacttcgtaaatgaagaaacatgtatgaccaataaacataagatgcgtaagcttattaataaccaagaaaattaaaattaaaatgagattatttcacacctactaaattggcaaaaatgttaaagtctgacaatattaaatatcagtgagaatatgaaacaacagagacacttaatgttggtgagggtgttaactggtacagccacttttgcaaacagaaggcattaagatgctggagagcagtgagcttgcctcaagatctgttgtggccagcagagaggaccccatttaaagaccaccaagtggctaagactcaggtttgg

SEQ ID NO: 88966 - DNA, 439 bp, Homo sapiens
ctggtcttgatctcctgggattacaggtgtgagccaccgcacccggctatcatctcctgttttcgcaagcaagaactgaaaatacatttacacatttattatctattgtaccacgtggacctttcttttgctgccatatctatgggatttggtattgttacaaacttctttcaccattttcagcctcaccctaacttgttcttcctcctcttcatttctactccaaaagcttgcattcatcttcctttgatcagatatcttctgatgattctccattgtctaaaaaatgaaatttcttttaatctgactccagccttttcgtttgttgccatcctctattcagtatgcccccagctgaatttcactatttgccattcccagcttcccagtcccaacccggcctagacttctcacactcactcttcccagcttgctcaga

SEQ ID NO: 88967 - DNA, 430 bp, Homo sapiens
cctcttttctggaaagtgcattctctcacacataccaaaacggaaggtcacttatctctatgtcatcatatggagatttaacagaaaaaacttaaaaggacatgcacacaagaatcctatattagaaaaaccaggaataggacatgcagtagccaaaggcctatcttggtttggcggtgtccccttcttaagaaaatcagtgcttaatatttctatcaaaattattggggaaaccagccccacactacccggtgggtaccccgagtccagcagaaacaaaggagttagaaagagacagagtaagagtttaaaaggcgcgtccagagctctttagctccacctaatttattggtttacaagctctttgttcttagggcagatgggagggggaggaagggatgaggaaaaggattaatcagtgaaggagaac

SEQ ID NO: 88968 - DNA, 369 bp, Homo sapiens
tcaaagctcaactcactatagcgtgatttacttttcttactgcaaggaaacaagcatttcagtcttaaagagacagcatgccagtggtcctgttctgtgggttccacccgggaaggcattaccaagggcagtcagagcccaggcaaaaatgctgagaaggcgtgaatggtgcaacagactctggccatagacatgtacattaaagatggctttccagatggatctcctcctcgccatccttataggaccctgatagggttagaaatggagatgtaccccagagctcaccattatcagggcagcagttaagatgctatttatttgaagccagctaacctctcctaagtgctacagatagcggccatttat

SEQ ID NO: 88969 - DNA, 445 bp, Homo sapiens
gacagagagtcggaaaaggttttcattgctttctctctgtactgttcacgtggtagctactctgaggttaagtcgtaggtcgaagttcaggttgcctgggagtgaacctagtcaaacaaccccaaggtgatcagggtttgcttaaacctgtagactccaaagctcaaagttgtatttggccattttgtaactatgctcttttagaaagaagatcggacattttatttctgtccctcctttctatgttaacttaggagagcctgcgttgatttctagctgtcttctggaagtacctctgtctgcttatggataagtgtagttctgtgaaataagacatcagcacagaggacacactgtgaatggggcttggtatgactgggtgatgttggaggcaatggaacacattggtcaagacatgtacagtggagtgagggaagtgggttca

SEQ ID NO: 88970 - DNA, 293 bp, Homo sapiens
gtgaaatctgtgaatatactaaaaaccattgaattgtaggctttaaatgagtgaattgtgtaatatgtgaattgtatcttaataaaactaagtgaagcctgaacgcccacttttgaggacagcggacgaaacacagggtatgacaggagtaacagagctaaagccctgcctcgtgggctgcacttgacagtaaggaaatgaagcgccatagccggagatcctatgttagtttcccataagccaccctctttggagggtcaagtcacagcatataggatcaggaaagggtcttt

SEQ ID NO: 88971 - DNA, 362 bp, Homo sapiens
aaagaaaaaaaaaagtgatgaaaacattagtcttgttattctgagggctggtgtgtgtgtatgagagagagatgtggaatgaagtaaatgaataacgatgtgatattctaattttaccacctgtgatatcctggagaagcagaattctcctggaataaagaagacatagatataagatagaagaaggtcagagacatatatttttgaattagaagtgccagtgtgaactcaaaaggtattttatatttaaatacatgtaggtatatgtaagtgcatgtgcatatgtacatgtacacacacgtgcacatcaacactaggcttcctacgtctgtttgctgaaaagatctagaaataataaccaa

SEQ ID NO: 88972 - DNA, 137 bp, Homo sapiens
cacaggtggagatctgcccaaagcctttggagtccagccctcacactcctgtgccatggatgtgggacaaggattccaaaaggatgattttggagctgtaggattgaatgactggcctactgcgttttggacattca

SEQ ID NO: 88973 - DNA, 813 bp, Homo sapiens
ctcaaatcctccaccctcataccacagcctaactcttcaagggcttgcagtgaaatctgtttctgaacatttcacatgagaggaaagcagagaataaccactagacatttgcctgaaaaatcctttctgcctctcctccttttatctttcctagacacagacaccttatcaggatgtctttgggatgaggttcctttatggaaactttgcagggtgatatgtcttcagtacaccctcctatcttttccagattttgagttttagaactgcctgtagctgacccaagacccccacaattgccatgtctcttggagggtctagtgggtatctgtgcctaggggagtggggcctcccaagggagcagctgaatgactagtggtggaggagatgcctggtatacttttcatctagatacccagttcgtgggtgctcaccttctctctcctaacttcagtttcccattaattggagacacatggccaatcagctaattggatgttgcctattgaggaaaaacagaaatgattcctgtcctttggattgtctcaactgtgaagagagaaatatcccaaaagacaaggaaaggccaccccaacaaggttgtatttagctgtcctacagggaggtggtcaccagaatgcagttgtggaacaaatatatgtgagttgaccacatggaggaactgggaggaggtgtagaactggaaactctgttgagtttgagtaaagtttacttctgttatgagaatgttaaatctataatcaaaatgcatgctaaggtaacatatcaatataagaactcactataaccggc

SEQ ID NO: 88974 - DNA, 838 bp, Homo sapiens
ctcaaatcctccaccctcataccacagcctaactcttcaagggcttgcagtgaaatctgtttctgaacatttcacatgagaggaaagcagagaataaccactagacatttgcctgaaaaatcctttctgcctctcctccttttatctttcctagacacagacaccttatcaggatgtctttgggatgaggttcctttatggaaactttgcagggtgatatgtcttcagtacaccctcctatcttttccagattttgagttttagaactgcctgtagctgacccaagacccccacaattgccatgtctcttggagggtctagtgggtatctgtgcctaggggagtggggcctcccaagggagcagctgaatgactagtggtggaggagatgcctggtatacttttcatctagatacccagttcgtgggtgctcaccttctctctcctaacttcagtttcccattaattggagacacatggccaatcagctaattggatgttgcctattgaggaaaaacagaaatgattcctgtcctttggattgtctcaactgtgaagagagaaatatcccaaaagacaaggaaaggccaccccaacaaggttgtatttagctgtcctacagggaggtggtcaccagaatgcagttgtggaacaaatatatgtgagttgaccacatggaggaactgggaggaggtgtagaactggaaactctgttgagtttgagtaaagtttacttctgttatgagaatgttaaatctataatcctagaattaattaaattattgtatatggagatgacaggtagtggattgattattctcctgtagataaccatttgt

SEQ ID NO: 88975 - DNA, 403 bp, Homo sapiens
ttatggacccatggtgagatctcaagctagtcctccatttctctgagcctcagcttccccatttgtcaaatggggcctacctcgtaggatgctgtgaggatgttgtgggtgatgcacgtagcccagccctggtgtgtggtgtccattgtcctcagtatgtcagtgacagggaagggagtgctggggctcaggcccctggcctaggccagcttagcaggaagctcaggcaaccagcatgggctgctggcccctgggcttccgccaggcagaactcacagccccctacccacccagccttccctccttgagggccaggacccagacggagcctccccaaggtgcctgcccagtggaactgaggctgttcctcgagaacgagggttgtgtgtcttcttattagcat

SEQ ID NO: 88976 - DNA, 300 bp, Homo sapiens
tctaaattgatacatacagaaattcagtgcaatcgcaataaatatctcaatagggctgttgctgctgccactgctgcttttttttcttttggataggctagttctcaaatttacatggaaaggcacagggccaagaatggcaaaggcaatcttgagaaaaagttggaagacttaacactaacatatatcaacacttattataaagctacagtgattaaattagtgggcgcaaagccagattgaccagtggcacaggatagagtccaaaagttgacctacacatacaaggtcagttgattt

SEQ ID NO: 88977 - DNA, 263 bp, Homo sapiens
gtccaggagtttgaggctagcctgagttggtctgcaaaccagctcaccagatattgggtttcaccatgtctccaaaaatattttgtgaaatttgtgaaactccatctctacaaaaacatacaaaaattaggctgggcgcggtggtgggcacctgtaatcccagctactgaggcgggagaatcgcttgaacctgggaggcggattgcactgagccaagattgcaccaagattgcaccactgcactcaagcctgggtgacagacc

SEQ ID NO: 88978 - DNA, 317 bp, Homo sapiens
cagcaactgagactcccccaactcctcaacagggaggatgggggctggatggatgccttctacctgcccagttgaaggcagtgagagtatcctagtgcctgggggaatgtgacattaaatagaaggtcacacacacacacgcacacacacacacacacaccactatgaaagatccagagagagaacacgaagaaaggaaaaagctttttttcctgccttttgaacgagtgaccccgggttttaagtagccagccctgtttgtgctaagtgctgccccaggctctgtgaagaatgcaaagatacaactgtcttctccc

SEQ ID NO: 88979 - DNA, 2048 bp, Homo sapiens
  misc_feature (38)..(38): n is a, c, g, or t
  misc_feature (59)..(59): n is a, c, g, or t
  misc_feature (80)..(80): n is a, c, g, or t
  misc_feature (103)..(103): n is a, c, g, or t
  misc_feature (119)..(119): n is a, c, g, or t
  misc_feature (163)..(163): n is a, c, g, or t
ccgcggagaccccaagacccacgcgcagaccgagcggnagccggggaggggagcgcggnccggccggccgagttcgcggncagggggcgccgggactcccctntccgcgcccgggacgncgcccgccggatcgcgccttgggatgtagcgcccgctcgccgcntcccggactctcgtcggaccctccgcccagcggccctgcgtcttcccaggtgaccacgccggcttcaggacatgcacggacacagccgcaacggccaggcccacgtgccccggcggaagcgccgcaaccgcttcgtcaagaagaacggccaatgcaacgtgtacttcgccaacctgagcaacaagtcgcagcgctacatggcggacatcttcaccacctgcgtggacacgcgctggcgctacatgctcatgatcttctccgcggccttccttgtctcctggctctttttcggcctcctcttctggtgtatcgccttcttccacggtgacctggaggccagcccaggggtgcctgcggcggggggcccggcggcgggtggtggcggagcagccccggtggcccccaagccctgcatcatgcacgtgaacggcttcctgggtgccttcctgttctcggtggagacgcagacgaccatcggctatgggttccggtgcgtgacagaggagtgcccgctggcagtcatcgctgtggtggtccagtccatcgtgggctgcgtcatcgactccttcatgattggcaccatcatggccaagatggcgcggcccaagaagcgggcgcagacgttgctgttcagccaccacgcggtcatttcggtgcgcgacggcaagctctgcctcatgtggcgcgtgggcaacctgcgcaagagccacattgtggaggcccacgtgcgggcccagctcatcaagccctacatgacccaggagggcgagtacctgcccctggaccagcgggacctcaacgtgggctatgacatcggcctggaccgcatcttcctggtgtcgcccatcatcattgtccacgagatcgacgaggacagcccgctttatggcatgggcaaggaggagctggagtcggaggactttgagatcgtggtcatcctggagggcatggtggaggccacggccatgaccacccaggcccgcagctcctacctggccagcgagatcctgtggggccaccgctttgagcctgtggtcttcgaggagaagagccactacaaggtggactactcacgttttcacaagacctacgaggtggccggcacgccctgctgctcggcccgggagctgcaggagagtaagatcaccgtgctgcccgccccaccgccccctcccagtgccttctgctacgagaacgagctggcccttatgagccaggaggaagaggagatggaggaggaggcagctgcggcggccgcggtggccgcaggcctgggcctggaggcgggttccaaggaggaggcgggcatcatccggatgctggagttcggcagccacctggacctggagcgcatgcaggcttccctcccgctggacaacatctcctaccgcagggagtctgccatctgacctccaggcccggccctcaccactgcccacaagagcctctgccgggggtgggatgccaggacaccccctcccacactcaggacagagccaaccctggctccgtggaccttctggaggaaggtgggggtttcaaagactgggggaccccttcctcctgactccagcacccaggcctgggaagagctcggccccgatcagcctgagttccgccagcgcctacttctggtggctctaggtccccggatccaccacccttcccccactgactcttcaaggacgtgccctctttgctctcagaaccttggggaaggtggctggactgctgggcgggggacatctcggggtttcagggtgggcagggggttagtttggggaggggggggtgcgtttcttttgcatgactgtggcctgttgctcatgactttcttttgtaaatatctataaatggagacagatggagacaccaaattcacttt

SEQ ID NO: 88980 - DNA, 1912 bp, Homo sapiens
  misc_feature (1)..(1): n is a, c, g, or t
ngagaatttcaaccagaaagaacagccagtgcaaaggcccagagacaggaataaacttggccctgcgtcttcccaggtgaccacgccggcttcaggacatgcacggacacagccgcaacggccaggcccacgtgccccggcggaagcgccgcaaccgcttcgtcaagaagaacggccaatgcaacgtgtacttcgccaacctgagcaacaagtcgcagcgctacatggcggacatcttcaccacctgcgtggacacgcgctggcgctacatgctcatgatcttctccgcggccttccttgtctcctggctctttttcggcctcctcttctggtgtatcgccttcttccacggtgacctggaggccagcccaggggtgcctgcggcggggggcccggcggcgggtggtggcggagcagccccggtggcccccaagccctgcatcatgcacgtgaacggcttcctgggtgccttcctgttctcggtggagacgcagacgaccatcggctatgggttccggtgcgtgacagaggagtgcccgctggcagtcatcgctgtggtggtccagtccatcgtgggctgcgtcatcgactccttcatgattggcaccatcatggccaagatggcgcggcccaagaagcgggcgcagacgttgctgttcagccaccacgcggtcatttcggtgcgcgacggcaagctctgcctcatgtggcgcgtgggcaacctgcgcaagagccacattgtggaggcccacgtgcgggcccagctcatcaagccctacatgacccaggagggcgagtacctgcccctggaccagcgggacctcaacgtgggctatgacatcggcctggaccgcatcttcctggtgtcgcccatcatcattgtccacgagatcgacgaggacagcccgctttatggcatgggcaaggaggagctggagtcggaggactttgagatcgtggtcatcctggagggcatggtggaggccacggccatgaccacccaggcccgcagctcctacctggccagcgagatcctgtggggccaccgctttgagcctgtggtcttcgaggagaagagccactacaaggtggactactcacgttttcacaagacctacgaggtggccggcacgccctgctgctcggcccgggagctgcaggagagtaagatcaccgtgctgcccgccccaccgccccctcccagtgccttctgctacgagaacgagctggcccttatgagccaggaggaagaggagatggaggaggaggcagctgcggcggccgcggtggccgcaggcctgggcctggaggcgggttccaaggaggaggcgggcatcatccggatgctggagttcggcagccacctggacctggagcgcatgcaggcttccctcccgctggacaacatctcctaccgcagggagtctgccatctgacctccaggcccggccctcaccactgcccacaagagcctctgccgggggtgggatgccaggacaccccctcccacactcaggacagagccaaccctggctccgtggaccttctggaggaaggtgggggtttcaaagactgggggaccccttcctcctgactccagcacccaggcctgggaagagctcggccccgatcagcctgagttccgccagcgcctacttctggtggctctaggtccccggatccaccacccttcccccactgactcttcaaggacgtgccctctttgctctcagaaccttggggaaggtggctggactgctgggcgggggacatctcggggtttcagggtgggcagggggttagtttggggaggggggggtgcgtttcttttgcatgactgtggcctgttgctcatgactttcttttgtaaatatctataaatggagacagatggagacaccaaattcacttt

SEQ ID NO: 88981 - DNA, 1949 bp, Homo sapiens
  misc_feature (38)..(38): n is a, c, g, or t
  misc_feature (59)..(59): n is a, c, g, or t
  misc_feature (80)..(80): n is a, c, g, or t
  misc_feature (103)..(103): n is a, c, g, or t
  misc_feature (119)..(119): n is a, c, g, or t
  misc_feature (163)..(163): n is a, c, g, or t
ccgcggagaccccaagacccacgcgcagaccgagcggnagccggggaggggagcgcggnccggccggccgagttcgcggncagggggcgccgggactcccctntccgcgcccgggacgncgcccgccggatcgcgccttgggatgtagcgcccgctcgccgcntcccggactctcgtcggaccctccgcccagcggccctgcgtcttcccaggtgaccacgccggcttcaggacatgcacggacacagccgcaacggccaggcccacgtgccccggcggaagcgccgcaaccgcttcgtcaagaagaacggccaatgcaacgtgtacttcgccaacctgagcaacaagtcgcagcgctacatggcggacatcttcaccacctgcgtggacacgcgctggcgctacatgctcatgatcttctccgcggccttccttgtctcctggctctttttcggcctcctcttctggtgtatcgccttcttccacggtgacctggaggccagcccaggggtgcctgcggcggggggcccggcggcgggtggtggcggagcagccccggtggcccccaagccctgcatcatgcacgtgaacggcttcctgggtgccttcctgttctcggtggagacgcagacgaccatcggctatgggttccggtgcgtgacagaggagtgcccgctggcagtcatcgctgtggtggtccagtccatcgtgggctgcgtcatcgactccttcatgattggcaccatcatggccaagatggcgcggcccaagaagcgggcgcagacgttgctgttcagccaccacgcggtcatttcggtgcgcgacggcaagctctgcctcatgtggcgcgtgggcaacctgcgcaagagccacattgtggaggcccacgtgcgggcccagctcatcaagccctacatgacccaggagggcgagtacctgcccctggaccagcgggacctcaacgtgggctatgacatcggcctggaccgcatcttcctggtgtcgcccatcatcattgtccacgagatcgacgaggacagcccgctttatggcatgggcaaggaggagctggagtcggaggactttgagatcgtggtcatcctggagggcatggtggaggccacggccatgaccacccaggcccgcagctcctacctggccagcgagatcctgtggggccaccgctttgagcctgtggtcttcgaggagaagagccactacaaggtggactactcacgttttcacaagacctacgaggtggccggcacgccctgctgctcggcccgggagctgcaggagagtaagatcaccgtgctgcccgccccaccgccccctcccagtgccttctgctacgagaacgagctggcccttatgagccaggaggaagaggagatggaggaggaggcagctgcggcggccgcggtggccgcaggcctgggcctggaggcgggttccaaggaggaggcgggcatcatccggatgctggagttcggcagccacctggacctggagcgcatgcaggcttccctcccgctggacaacatctcctaccgcagggagtctgccatctgacctccaggcccggccctcaccactgcccacaagagcctctgccgggggtgggatgccaggacaccccctcccacactcaggacagagccaaccctggctccgtggaccttctggaggaaggtgggggtttcaaagactgggggaccccttcctcctgactccagcacccaggcctgggaagagctcggccccgatcagcctgagttccgccagcgcctacttctggtggctctaggtccccggatccaccacccttcccccactgactcttcaaggacgtgccctctttgctctcagaaccttggggaaggtggctgtcgggctagtcgggggggctagtcgggggataacacgttggcgagctgtcgggctcgggg

SEQ ID NO: 88982 - DNA, 250 bp, Homo sapiens
tgagcatataatgggttttcaatacattttgttgattaaatgaatatatacatgtatatgcggttatacaagtgtttgtatacacacatgcctgatatattagggtgatgcttataagtaacccccaaattttcgtgactttacctaatagaagttcatttttattcatttaacactctgaagcagatgttcatagttggtaggcagttctctgtgaaataattcagagatctgtttctcttctgtttgg

SEQ ID NO: 88983 - DNA, 393 bp, Homo sapiens
tggcttggccaaggtcacacagggtgaagagcagagccagggtttggacacagatggtctggttccagcacctccagcctcaactcccacactaccaccttccaaaaggagaggagcaaggtctgtgggtgacacaagggcttcctgaaccagcagggcccaggtggcaaccaggcttggcttggtggatgccagcagaggggggcatgcccctcagcagggtatgagtgagtcagccactcagcgcatggtggttctggccctccactggggacactccccacacagcccctggagaagggtgtggccatggagtcagcctgtccattccatgagggcagggactctgttctgctcacacccaacacccgacaccatgctctgtgccgtgtt

SEQ ID NO: 88984 - DNA, 444 bp, Homo sapiens
attctcctgcctcagcctcccgagtagctgggactacaggcggccgccaccacgcctggctaatttttttgtattttatagagacagggtttcaccatgttcgtcaggctggtctcgatctcttcacctcgtgagccgcctgcctcagcctcccaaaattctgggattacaggcatgagctaccacacccagccttgtagttttactttcttatgtcattgcaatatcttgtattggtgtcatagaataaactgggaaatatgtcttcctcttttttattggcagagtttgcaggtgaaacaatggtgttaattctttaaaagtttggtaatatttccagtgaggatatctgggcctgatattttctttgtgggaagttttttggttactaatttaatgtcattacttgctgtagatctatttacatattctatttcttcttga

SEQ ID NO: 88985 - DNA, 513 bp, Homo sapiens
tcagaattacaatgcatatgaagcagaaccatggcctgcagcctgcatatatacaaagagccactgagatgtgggattgcatgcaaaaaattagtaccagaagtgggatatgccataacagataaaatacaaggcataagctttggagctgggcagtgaaaggtatggaaactgtcactacaggatagagaaatagtgacccgtgatccagcagtaacacatttagtaaaactgcccctgtgatcacttcgaaggcaggagttgcaatgaacgaatgtgtagctttaggtgacaaggtcgcaaaacagaacattgctagggggatttggttactattaggtccatttgacgaagtactacaataaagagacgagctcagaaaagagttagctggttttccaataggattgaggcgggaaaaaaagaaaattaggaaatttgggacttaacaattgcaagatacaatgatttctcatctcctataaataaagaaaaaaaatgggccagacgcag

SEQ ID NO: 88986 - DNA, 430 bp, Homo sapiens
acttttcttattgcagaccagtttgagttataatgccacatttttcatgtattaaaacagcaaatgctgggattacaggcatgagccaccgcacccggccctgctattatattctttacggttctctcttagtcaattcctcatcattctagtccccttttatgcttttataggtattccttttttctttctttcttattttgagatggagtcttgctctgttgcccaggcaggagtgcagtggtatgatcttggctcaccacaacctctctctttgggttcaagtgattctcctgcctcagcctcccaagtagctgagattacggctgcctaccaacacgcccggctaatttttgtatttttggtagagacagggttttgccatgttggccaggctgttctcaaactcctgacctcagttgatcagccc

SEQ ID NO: 88987 - DNA, 180 bp, Homo sapiens
aagaaaaagagtgggtttccagaccaagggcattgttgccagttgaaacagaggtgcagggctgccctcattccttccagcctttcatttaatacgtattctatttaatacatagggcacacatatttagaatctgacttgccttaactgccttctcaaggcgcagattggggtgtacta

SEQ ID NO: 88988 - DNA, 580 bp, Homo sapiens
ttaggagttaaagatggcaggttacaggtgaaacgccctcatggatcacactgaggctaacaatgtagactctttccaaatagaccatatccctgggaatatatgtcttgtgatgagaggatgactaaaaatacctgggaaggcccggagcagggcccagggatgcaggattttctgaaggatcccatgggattggaagaaaatgctggggccgcccatacgctgctaatgccctggaggcagaatctagtgggagggagcgaccttgctcaattaagctgctgtccctcacactggctgcgatgtgagcccagggtcaagccggactgtgctttcagagcaggcccctcaaggcccagagttatgggccgtggtaagtgtgtgtgtgctggctttgatctggttgtacctgttggccatctctatgggtctaagcatatctgggaaacagggctttcgactgtgggttgtaagttataattagactaaccaaaaggtcttggttggagactaggccctccgagtgacaccagcagtaactttggaaggaatgtcatttgcctgggtgccacagttcctc

SEQ ID NO: 88989 - DNA, 315 bp, Homo sapiens
cacactgcacttcccaaatgctcccggcactggcacagatgcacaccctcttggccatccccacctgtgctccgccactcttagtcagccattcctctcggcttccgggagtcccctccttctctaaggatctcacccccatccgtgtctctgctgtctcctaactaccgatagcaagggcactagtgcccctgtttgccggggacaggccctgtctggggccctggtgtggcatcattgttaacagagcttcttttcactctgaagtgttcagttaggacagtcacttgcacagtcccctcactggtgacacag

SEQ ID NO: 88990 - DNA, 302 bp, Homo sapiens
  misc_feature (24)..(24): n is a, c, g, or t
gcacgagggaacgccggcccgctntgtgccaccctctccccaagcccccgggaggaggcctcgccaccatgcccagagcagcacagtgagtcagagatgaagctcttgtcccacctgccccaaccctcgagccctgcttcccaggtccgcgttcccaggcagcctgccacagccagtgccagcgagagagtggatcaggcttcaggatagcccagcactgaggacatctaaaacagtcttcatttatttatttattgttcatagtgtccaaaagttggaattaaagtgaatggctgaatcaa

SEQ ID NO: 88991 - DNA, 240 bp, Homo sapiens
tcttaacatatttgctaatttcagagcaaaaatatatgtgtattaataaatcaactgtaaattgtcagtaagaaccttaatggctttaaaagttaaaatttcaggtcaagcattgtggtgtgctcctgtagtcccagctacttgggaggctgaggtgggaggatcacttggcttgaacccccaggtagagggtagaggccagtctgggtaacacagcgagaacccatctcttaaaaaaaa

SEQ ID NO: 88992 - DNA, 208 bp, Homo sapiens
gatcagagtaaaacctggagctagattgattacagagtgcaaggactaggcaccccgggattggagagcatccttgaaagcaagggttcttcatttatttataaaaatttgattgcctactagaagcccagctaagagtatgaagcaattaagacaacaatctttgctcaagaatctcctagacaatcctgattcaagcaccagaaac

SEQ ID NO: 88993 - DNA, 605 bp, Homo sapiens
  misc_feature (474)..(474): n is a, c, g, or t
  misc_feature (605)..(605): n is a, c, g, or t
acagaggaaactgatatcgggactgtctgtgcagcaagagcaacacaaatactatgacatttgaatctcaccacacccttacaagggagaggtgttctctccatttcacagatgagaaaactgagttcagacaaatcagtcacagagcttgagagcacagcccaggcccataccaaaggccacattctatctgcacagcatgctgcctacacactgcgttcagttttgttctcagttgctggaaaaatttccagcaggagtcatcaggcctgatgttggccaggcccgtggcagtgcccagccggctccccactgcctgtctctagtccccttgctttgcatctgatgctgacacacacatacgaggagcccagaggcagaaacgggactcagagcctgacgctgaggctggtgtgtggggctgcctctcccagtgctgaggctggcgtgtgggggcttcctctcccgacactnaggctggcgtgtgggggtgcttctcccgacgctgagaaaggcgcctggggcttcctctcccgacgctgaggctggcatgtggggcttcctctcccgacgctgaggctggtgcaggcatagtcgggtatccn

SEQ ID NO: 88994 - DNA, 453 bp, Homo sapiens
cgtcttgtgtcataatggaaaaaatggaaaagaataacgtctgtgttggcctcagtgagggttgggttccgcttctcaagacggttagggactgtttctctctgtttctgggctctgccatccatattgttagcattatcctaattctggctctgcattatggtgggctgttcactgtccacagcagggaatgtttggaagaactttctcagaaggcccagagggccggatgccaggagtttgagacccgcctggccaacatggtgaaactccggctctactaaaaatacacacacacaaaattagctggccgtggtggcgtgcgcctgtagtcccagctactcaggaggctgaggcgggagaatcgcttgaacccgggatgtggaggttgcggtgagctgagattgcaccattgcactccagcctggccaacagagcaagactccatctcaa

SEQ ID NO: 88995 - DNA, 354 bp, Homo sapiens
aagctttgcagtgctctctggtgaagcccctgccctggcaccgcctgccgtagcttccctctgggaagtgacttcctggtaaggtaaaaagtgtgtcaccagctgcttctgcaaaacagatgcactggcagcccaggggagtgcttgtgaggtgggaaatggcttctgactgcttaatttagcttcaaaagcacacatattttcatgattaccccccagtggtctatgcacacagacgccctcaggtgctctccaggtacagaccactggggagggtggtgtgcgcacacgcatatgtgtgtgtgtaatttttttttttttttttgagacagtcttgctctgtcacccaggctg

SEQ ID NO: 88996 - DNA, 563 bp, Homo sapiens
ttagaattaggtagagagaaaggaaatgaacaaccatgcaagaaaataaactctttgaaaagtagaaaatagaatggtggaacagaaagtgatgagtgtggggagaatagcaaagccaccttagatggggagtcagggaagacatcacaaaggaaacaacatttgaagcaggacttgaaagatcagaacaggccaaccatactcaattgggcgaaggggtttcctgccgaggaaatagcacaggtgaaggccctgaggagggatggagtttagctggtgcccctatacttcctaatgggaagtgcccagtaaagacacagctttgcacttccagcccaggcaaagcaatcagcctgcatcttcaagggttggctgcacttaagatccggggtgctgccaggatgttctttttgcagttaatttgctgcaactggcagaggttaatcatgtccacattcctcaaggcccctgccaaagctggcccttctcacagatgctggtttaaattagaggggttcttagcagcagactagatttagcagtgattaaccccaaactggtcc

SEQ ID NO: 88997 - DNA, 804 bp, Homo sapiens
agagttatgagtagtttgtatttccttttttgttaatctgtatttcattttttaggcaatgcaaatatattatttagacaacaaaatacttattagaaagaaaagacatggtgggttttttcccctttattctttgcttttctaagaggaaactttgactgcaattgcttgtgagtgatacctgtgttctggtagcttaggaagacacaatgtggttagggaaggataagaacagatggctttaataaatgtactcaaggctaatgtacccttcatagtctcaggcttcagatcagatctcttatctatgctggcaccaggatgtggttttgagttctctgctttttctacagctttagggaaatctgcatgcaggcacatctaattgtccaaaccaaaaatcacatccaggatgtgaggcagcctgggagaggtcattttgagttctgtagtctccgaagtataaaaacacataaacatgtatacatacacacattaacacccacacacttttgaaggaagatggaatggaagacaagcaccacagtgaaactttagaagaatttcccttacattcaggaaaaaaagatagagggtccattttcatcactcttattgccattgtctagaagataagccgtaataagataaaataaaaagtgtatagaacacttggaaaaaaatataaaagattggtcccattctccgatggcatgatattcaaatgaagaaccaactataaacaggttgttatgagctgaatgttaatgtgaccccaaaattcatatgctgaaatcttaaccc

SEQ ID NO: 88998 - DNA, 188 bp, Homo sapiens
agcccatgggtaggtgaggggattgcagtctctcttcagtgtgggattctgaaaagaggcaaactgatagaggctccaaccaaataactgtacccacacattgagggactgaaggtaaactcccagagaagagacaaagacaggaggtggagagcagaatagtcaggaaacaagttagtcacagactt

SEQ ID NO: 88999 - DNA, 563 bp, Homo sapiens
aaaatgttttccatcataaagttgagagacattgccctatgtcaatctttctcaagtcaatctcatggtttcaaaattagattgcaaaagaattaataatattaccataaacagaaagagggcaagttggcagctgtctcctggacaaggtgctagctggtgacatatgagaaaggctgattcagctggacagtgagacatagcttagtaagtagagctagaatccattcaggatactataagaagaaaagctagacctgagaacgagctgaaggatcagtgatacctaggagttttgccttgctgaataatctgtcctaaaacttgttctttctgtaattttaaaaattcttatttctcttataaacatttcttttaagaacttcaattatctctttatgtctaagagaaaatctttctcttgggttaatagagaaaggggttggaaaaagaaggcctactccagaatgagaggaaggtagtgaccttccagtttgagatcgggagcattggtgacacagaaatggagccctagacatgcaaccacccttacctctgttcta

SEQ ID NO: 89000 - DNA, 561 bp, Homo sapiens
agaaatttgacccctcgccatatggcagctgcagcatactggaggtgccagtgaagtgaacaggtcctttgtttctttcccagcttgaggacaggaagggcggtactgctgtagctgcaatggtagaggggctgtgggttgactctgggattttctcctcaaagaaacagacagccaccaccaacaagtgttcaggcaggggcagggcagctttactgggggcccaggtcaagacaccctgaccagtgaggaatggcaggggcagggactcatatggaaagcagcctggttacctttccataaggcaattgtgctgtgctggaggcccatgatcattcttaagctctttacttcctgttatgcctgagggcagtaggggtaagagctgcaaagcagcaaaaatggcaggcctgtcctttacctctaggagctcaatcccagggaaatgctgggatagagttcaggtggggccagggtggctgtgctggggtcccagattgggagatcctgaccagtgacaagtagcagaggcaggggcccatgtggaaaaccatatggctt

SEQ ID NO: 89001 - DNA, 372 bp, Homo sapiens
aactcagaaagggtaagtaacatggcagggtcacacggcaagtcagtggcctcatctggacccaaatctcggccatctggctcaagagcctgtgctcctgtccctcagacatgactgcctctcaaagaagaattttaaagaagtaatccctggctttatcaatcacagaaattattgatagatatcttgatgatgcatttcagtttgaagacagtgctatttgtggaagttatgaaagttcctctatataaatactaccgaaaagtccagtttctggaaaatgattgctgaaaatgatttgtatggtctctattttttttgagacttttaagtttttctgcacccaaaattcatttctaaagagaaactgta

SEQ ID NO: 89002 - DNA, 123 bp, Homo sapiens
ctgttttgctgttgataatgacttcatttgaatggaagatgatccctatagatcaaatagtagtttttaaaataatttagtaatttaatatcctttaaggtaaactgctttccctaccactct

SEQ ID NO: 89003 - DNA, 696 bp, Homo sapiens
ctagaagcaatatccgttttaagtagaggccaaacttggactgataacctcatgctctcttaccaatattgtaggcagtgagtgaggagttaacaataacaacaaaaggcctaggaaaagcaaggagaatgtgtcctatatagtcagggacagactttggagtcacactagacccaccatagttgtgtgtaaaataaagcagatttgaatcatctagtcacacaaaaaagaaacgagaagttactgcagtgagagagcaaagcagttccagatggtggaatgcttttactgtgtgtgttggtctctgaggtgctcgtgacataccattatcatactgttcctcataatgaccctcagccactaagaaatggttgagttatgcgggataatttgctaagactgtagaactaatacactatataaagactttcattactttgtttttaatctttgcaacttaaaggagtatttttcagttaccagtaacattaatttgttttactcggtgctagataaaaatgactaaatttgaatgtgcacattatttcatttgattcttaaaactaagtaggtcatagaaaggttaatggccaatggtaaaataaaggctatgagttcagactttcatgcatgtatttgattctgggtctctttctcattgttaacccaaagcttatttataaaggtcagggcctg

SEQ ID NO: 89004 - DNA, 792 bp, Homo sapiens
taaaatatgtcagaaatgaattcttattacatcatgtcaacattcttctcaagctgcagaacaatttccttaagggcaggatcctctgcccaattgactttactccccaaaataaggttctggaacacatgttgaataccagtagtaatttttatctccatctgtaggttaggtcgtatgatcttaatcctctctgagtttcccatacggtccaaatcaatcttcgtgttggtcctttccagtcgtgtattttctaaaagcttactttctgaagctggtttcaatggcaatctcttctttctaatatcaagcagtttttcctctaaatcccaagattccgtgctgtgattccattattaatttatttagccttctaatagggtggttccagtgttactccagtgagccacacttagaacgtgtcgtgctaatttttcctccaggtttttttttaagtgcagttgaaagtctcatccgtgtctaatgcaagcttttttatctcaaaagcaacttttacctcttcaatttcattttccaggtcttcaatgtttagctctcgattggcttctcctggcataattggtccgggagttatctcttcactgtgcatcaaccatggattcatattctaagagtggtggtcggcatgggctctcagcctgaggagcagggtcatgcggtcctcgctgcacgccgcctgggcgccggcgacctgcggtggcccgcctgcccggccttcccctccggagtccgcgggctcgtcggcgtcttgcatctggggctgctcctcca

SEQ ID NO: 89005 - DNA, 336 bp, Homo sapiens
ttggctgaaaatgagcagattgagaggcaaggtgagagaggaaggcttaaccttgccgccaagagtctcatcctcaaatcctgatgcccggtggacatcaggccaccctcctgctgcagtgtggcctgtgtggccttgggctcccctctgctctgaggccaggggaatggctccactggactgtgagtctgggattccctgcaaaacacttgtgactccttctccaggaggaaaaggcagtaagggcctgctgagtacgggcaggtaattctgcataaatgcaaatgttccctgggagggatcaggacagcacagggaggaagcctgccctgtcaa

SEQ ID NO: 89006 - DNA, 1335 bp, Homo sapiens
aaaatacaaaaattagccaggcgtggtggtgcacgcctgtagtcccagccaatcagtaggctgaggcacgagaatcgcttgaacccaggaggccaaggctgcagtgagccacgattgcaccactgcactctaacctgagcaacacagactccatctcaaaaaaaaaaaattaagtcatataagaatgactgtgtatgaccaaaggcaaatatatgtggaagaaactcaccaggaattcttttgtgggtttttattcaatacatgtcagtaggggagttataccccctttttaataagtttgtgttaacctacagtctaaccaaggcatcttatcccagtgaatgccaccaccattcaccctggttcccaaactggtaacatagaaataatcttgacatatcttcctatcactttgtcatcaagtcctgtcatttttaccttgtaaacatctcttaaatgtgtctacttctcaccacaccctaatctaagctaccatcagcaccttttgcctgcatgactgcagttgtctcctaactgttcttcctgcagcgactctggccctccctgtattcactcgactgcaagcagaattctcctttttgttcgaagttcaattttaatcaagacaacccacctacctgcacttgcacccctagcttaaaatgctcgaatggctttttattgtccttaatgatgaaaaggaaatattttatgtgaccaaatatatttgacctatgaggtcagatatattagggccactatctaaagcatagttccaagcattaaaatagttactgtctcagattaaaacagtggctggcacatcacctcaatagaggttacctattcttgttgccacttagcctcatatgtaccatgttttacttaataccttcattgtcctttaagtattcggaatgagaattacagtgcttcattcagcataagacttttgttcatgctgtttctttggcctgaaatatctatcccttcccaattgcctaattaattcctatttgtctttcagatcttagctagttcatcacttcctcagggaaacattccctaatttctgtcacagagtaagacccgttgttatacgtctcacctgaccatgtacctctacttagcatttaacacgtgtaattttgtatgtattggtttgattaatgtcagaaccactagattgtaaactccatgaggaccggaattttgtttctgtcattgtcattgttcaactttgtattttttatgcctcatacagtgcctggcacatagtaggtgctcaattaactttattgaaagaataaaatgaatggatgaggtaaaaaaaaa

SEQ ID NO: 89007 - DNA, 138 bp, Homo sapiens
ccatctcataaccacaagtgctcatcctccatatggtacgaaactcagcacctcataaagtatagagtgaatctggaatcgtgcagttaaatgccttctgtaacactcttacatttgatctaacaaacattaactatt

SEQ ID NO: 89008 - DNA, 385 bp, Homo sapiens
ggagaggaggggagctgagagcacaggtacttggtgtcaggttttggggagtctgggaagaatttttggccagggagtgactgaatccgatttgcatgatacacatttgcctctgccaggagcctggagaaggattagcgcaggcggggccagggtgcagctgggagagcaggctagcatggaggaaggccgaggacctgcatggaagtttctggaaagcagacccactcctcatctcggaagctaccttctcagcaactgtggcttttcgctgcctcccttcatcatcggcactccccacacacatttcttacacctcacttctccctgaagccacagtagagacaaccaccctacctgccacagtcagtgaccgtttctcagt

SEQ ID NO: 89009 - DNA, 207 bp, Homo sapiens
gggattacaggcgtgagccaccatgcctggcccctgccatctgttcttacacagcggccagcactgcctcgttcacatatgtcatatcacgttcatctttccggctctaaatgactaaaaagcacccacagagcctgcaccgtgctcctggatggtctcctctgaccgtatgtcctccccttctctctctgtgatctgctgccccta

SEQ ID NO: 89010 - DNA, 564 bp, Homo sapiens
tgtcacatgactccaaagcatgcttgtgcccattcagataaacactggaatttttcctgtaatatgttgagggatttgggacacaggtcacaagcttaaatgtgctgtatttttttcattttttaatctatctatctaatctctccaatttcttgtctatgtttcactatctgtttgggcaaataaaattgatagtggtaccttgatttgctgtcacttggggccaggtgaaacagtgtaagacacatcgcccaagctgaatcaagggagcacttcttcggcccatgccttatcagtaatctttgacttccaccagctgaaactgctagagtactttactctttttccttcctcctcaaaattcaggagtaatgagaattccctgccgttaccgcctactagccctgtactgagattacatcagttcatttagctggagcttttcaggcactccttggcaggaattgatttccttatttcagtccttttgcctttggattctgcccaaaagacgattcaagaaaggaattctgctcttacaaggtctgtttcagataattacct

SEQ ID NO: 89011 - DNA, 325 bp, Homo sapiens
cggacaccgtggtacgcatgtgtgagttattagcattattattacgtatcccaattccaccacttactagctttgtgctgttggtaagtgtattagtccattctcacactgctgtaaagaactacctgagactgagtaatttataaaaaggacggttaattgactcacagctctgcaagctatacaggaggcatgtctgggaaggcctcaggaaacctacaatcatggcagaaggcgaagtggaagccagcaagtcttatgtggtaggagcaggaggaagagagagcaaagggggaagtgctacgcactttcaaacaaccagatc

SEQ ID NO: 89012 - DNA, 254 bp, Homo sapiens
acacccaatgtgaataagtctttaccaagagtcaggaggtttgaggtttggggccaatgtgattggactcaaggtaagtgttctagaatattaatacctagaggggaatgttgcatatgttattcttctgaataaaaaacaatgtcaaataatataattgatgtattgtgcaattcactaaaatgggttgggaaaaatgaatcagcttcaagcgatcttcattcctcagggatagaatctcagagttgagagac

SEQ ID NO: 89013 - DNA, 296 bp, Homo sapiens
tatatatatatacacacacatatattacatgtgaaatattgcaaacattttatatgtccaagtaggaaaatgcttagataggtatatatgtagatatttaaaatctttttaaagaattgaatgatataggtacatactgaaatataatgttaaatgaaataagatacaaagttggggctctcatatgatcccagttatgtaaaaataatgtgtgtgcaatagcaaagacatggaatcaacctaaatgcctgtcagtggcagattggataaagaaaatgaggtacatatacaccaca

SEQ ID NO: 89014 - DNA, 208 bp, Homo sapiens
aaaaagaaaaatatatatgaattttagatacatccaattaaaattaaaaagtatagtgcccttttaccttttatgctgaaaatcttggctcctcattacatgtttatttccttaattcatatatatttctcacccttgacactattgacattttgggccagataattctttgctctgggggactgccttgtgtgttgggggacgttta

SEQ ID NO: 89015 - DNA, 858 bp, Homo sapiens
gccgcgctttggcttcagcgactgtgcatttttcccctcctcttcctccctgccgccttgcagagaggactggtggagaatgcttgcatctgtaatgagccactgtatgcggtgaatgccagggcctgatccgaaccggcccagttaatggtagatgaggtccgagccacctcccaggagaacagggcactcctaagatgaggcgggcatttggagaggatggggcccacaagggaaaggaggaagcagtcatgggacttctttcacgagatcctgacccagagaagcccagcagcaaggcttccggttcattctgggcctcctctcacctctgctacagacaggcgtggcagcctgtccagctgagcaaatgctcagtccctaatatgtgcctctgctactgcccctccccagtgtcctgggtttgcataagagcccttgtgttgggaagagggggaataggtggagtggggagctgattggtcactgagggggtggggggccgggcagccgctagaaactggacttgtttttaattgtggggcctgggggaagggcctgagaagaaactctctttcatgccgtaattgggaaattccactttgctggcctcgtgcattctgccctgtggacagggcccttggctggggccaaatcaccaaggtgtccaaggccaccggccgtctgcaccactggcgcccctcccaagcccagctcccacatcaggctctgtcatcccctgcagctgccgaatctcgagtccatttggcatcgggaccccctcctcactctgtgagtctttgtgcggtgccccctcacctgcctggaggcattggccgggcccccagaagcccattg

SEQ ID NO: 89016 - DNA, 406 bp, Homo sapiens
tgggctaccctgtcactcttatcattgtcactttattgtctttgctcacttatctacttaccaccatctgaaattattttttgctttatttaactgtttatctgtctctattacattatcagccttggcaaacgcaaggatcttgctacacccccagctcagcatgtggttgtacagtatttttcatataagacgttcaatacatatttgttaaatcaatgaatgaattctacctgaaaccttcatggacctttgctcagtgagaaactttgctcatccatatccagtaaataagcgggagccagaaagtaaagaccaggcatctttccatagagaataaagttgagctcttgtggcccccggttcagccttaagaggggaaaagagaatgacttttcaaagctta

SEQ ID NO: 89017 - DNA, 1337 bp, Homo sapiens
attgaggttcgaaattaataaagaaaataaaagaaatgtatcttcattcattctgtatgttagtgttttaattacccttagaatatatggataaaaaatactattctttgtcttggagaaggtaagagtctagttagatgaataagggttatctatgtagaacaactagagaatgagaagagagcttatgagattgagtactacgttatgcagtagagtagcacgtcatctgctactgagtatggtgtgataacattgtgtaacaggaaagtatgatcaatatctacttaaaattaaggacaatattagcactacattgctttattttaaagtaaaaattagagaactaaacacaagcattgtaagtacaataaaagctgatctttctagttaagcagaataatacatgttcaagcatctgctaaatcattaaatataagaatataggggttttctataatcttatttttctttggaagagtacctcattttcaagaggagaagtttctaattgaccacttctttaaaaataaaacagggtttttaatgtatcccagcaaaaaaaattaatatctcttcaaaaagttctcttgtgattaagtttgaattccctttgtcatactgcttctaatattgtacactgacctccttagttatttttcagtgtttataatcttttcttaggttatcttttttcaagatttggattactttgttcttttctgtgtttttcagcctttctaagcttttattgatactcctgtaagtgtttgtggcaaatgtctgggtttaagaaaaaccatgaaataaatattataataaaagaggttatgccttttccaacaatgttttctaatcattttattctgttagttattgtgagattctgtaatctgtttctgaaagcccatttagttgattgtttgccagatagtttttatattttagaatagattgcatgcacacttttcctcatagagtcttatatttctgaagtattttggtgctttcaaataaccttatagtaataaatgtaaattacattgctatgattttccatatttattaatgataattagtattgttgcgttcatggtaacttgaaaattgccttagttcttctatttagttttcaaactgatggcagtttgcatgaacacaatttttcctaatgtctgtatttcagaagaatgcatgagtgtttgttttataaccagatttgtttctgttttttcagaagtcatattttaattcctgcaatttatttaatggaattatcaatatcttttgcatgtaagcctataggtttcattaaattcaaaaagcaaaaatgagat

SEQ ID NO: 89018 - DNA, 935 bp, Homo sapiens
cttggctatgctataatgcggctttgaggatcaaataaggagcttgagagcattgaaagtaccaccaagttgagagggggaagacctcatatgcaggagaggattaactttgcccatacaggggtctggcctttgccctcagctcctggaagataatctctaaaccactggaatatcctgcttgataagaatgtttacctgaggactttggaacaagctccataacctatgctaacaatgtaatcgataatgcaggctttgggccacacagctccagctcagcctccggaagggctggaaactgaccatgtcgatgtgacagaaccccagtaaaaactgtggacattgaggctcaggtgagcttctctgggtggcaattcatgcatatcctcacacatcactgctgagttagttctccactgggaaagaacaactggaagctttgcacgtggagctctcctggactcttccccatatgcctcttccctcagtttatttatttatttagagacagagtttcactcttgtcgcccaggctggagtgcagtggcgcaatctcagctcactgtaacctctgcctcccaggttcaagcaattctcctgcctcagcctcccaagtagctagaattacaagcatgtgccaccaccagcacacctggctaatttttttgtgtttttgtagagatgaagtttcaccattttggccaggctggtctcgaactcctgacctcaggtgatctgcctgccttggcctcccaaagtgctgggattacaggtgtgagccaccacgccccgccccctcagctgatttaaatttgcattctttcactgtgataagccacaactgtgagtataacagctttcagtgagttctgtgagtccttccaacagattgtcaaatctgtgggtggtcttgaggatccctgaacttgcag

SEQ ID NO: 89019 - DNA, 295 bp, Homo sapiens
gggagggagagcctcaggtagaatagctaatggaggctgggcctaacacctaggtgttgggttgatctatgcagcaaaccaccgtggcacacgcttacctacgtaacaaacctgcacatcctgcacatgtaccccagaacttaaaagttgaaggaaaaaaagagttctgtttagaaaagttaatgttctgttaggaagatatacttgctaactttaagaacacattgattaaacggacattgttgctttcctgctggaaactgagtcttgacgctctggatgaccattctccacc

SEQ ID NO: 89020 - DNA, 1871 bp, Homo sapiens
agttgtggccaccttccccaggccatggatctctccaacaacaccatgtcactctcagtgcgcacccccggactgtcccggcggctctcctcgcagagtgtgataggcagacccaggggcatgtctgcttccagtgttggaagtggttatgggggaagtgcctttggctttggagccagctgtgggggaggcttttctgctgcttccatgtttggttctagttccggctttgggggtggctccggaagttccatggcaggaggactgggtgctggttatgggagagccctgggtggaggtagctttggagggctggggatgggatttgggggcagcccaggaggtggctctctaggtattctctcgggcaatgatggaggccttctttctggatcagaaaaagaaactatgcaaaatcttaatgatagattagcttcctacctggataaggtgcgagctctagaagaggctaatactgagctagaaaataaaattcgagaatggtatgaaacacgaggaactgggactgcagatgcttcacagagcgattacagcaaatattatccactgattgaagacctcaggaataagatcatttcagccagcattggaaatgcccagctcctcttgcagattgacaatgcgagactagctgctgaggacttcaggatgaagtatgagaatgaactggccctgcgccagggcgtagaggccgacatcaatggcctgcgccgggtgctggacgagctgaccctgaccaggaccgacctggagatgcagatcgagagcctgaacgaggagctggcctacatgaagaagaaccacgaggatgagctccaaagcttccgggtgggcggcccaggcgaggtcagcgtagaaatggacgctgcccccggagtggacctcaccaggctcctcaatgatatgcgggcgcagtatgaaaccatcgctgagcagaatcggaaggacgctgaagcctggttcattgaaaagagcggggagctccgtaaggagattagcaccaacaccgagcagcttcagtccagcaagagcgaggtcaccgacctgcgtcgcgcctttcagaacctggagatcgagctacagtcccagctcgccatgaagaaatccctggaggactccttggccgaagccgagggcgattactgcgcgcagctgtcccaggtgcagcagctcatcagcaacctggaggcacagctgctccaggtgcgcgcggacgcagagcgccagaacgtggaccaccagcggctgctgaatgtcaaggcccgcctggagctggagattgagacctaccgccgcctgctggacggggaggcccaaggtgatggtttggaggaaagtttatttgtgacagactccaaatcacaagcacagtcaactgattcctctaaagacccaaccaaaacccgaaaaatcaagacagttgtgcaggagatggtgaatggtgaggtggtctcatctcaagttcaggaaattgaagaactaatgtaaaatttcacaagatctgccccatgattggttccttaggaacaagaaatttacaagtagaaattattcctttcagagtaacatgctgtattacttcaatccctatttttgtctgttccattttctttggattccctattcacattgaatcctttttgcccttctgaaacaatattcagtcacaagtcattttggtcatgttggtctttgtaacaaatcaaaattaccttatatccttctggacaactggagtagtcttttaacgaactttcttctggtaacccggaatattttcttaatcatagagctttactcaagtagtattgttttaatagagttaattgtaataaaagatgaatggtaaa

SEQ ID NO: 89021 - DNA, 173 bp, Homo sapiens
ttgaggtgccatccatacccctaccagcaaatatagaatgcagagcacaggcttccacactcgcatcgcaacccttcctcccctaccagagtgctgtcagagagggcccacaggaagccagccctcctctcccaccacagtgtcagtggacaccacacagggagcctagacgt

SEQ ID NO: 89022 - DNA, 571 bp, Homo sapiens
gggaaaactacaaaactctgatgacagaaatcaaagatgaatttttaaaaaatgatatcccatgttcatggataggaagactcaatattgtcaagatgccagttctccccaatctgatctacagatttaatgcaaatcccaatctaaatcccaacaagttattttgtgtatttcaaaaaactgattctgaagtttatatggagaggcaaaagacccaaaatagccaacacaatattgaagaacaaagttggaggtgtgacaatacccaacttgaagactattaaggctgggcgtggtgactcacgcctgtaatcccagcactttgggagactgaggtgggtggatcacgaggtcaggagttcaagactggcctggccaagatggtgaaaccccatctctactaaaaatacaaaaattaaaaattagctgggcatggtggcaggtgcctgcaatcccagctactcaggaggtgaggcagagaattgcttaaacccaggaggcggagggtgcagtgagccaagattgcaccactgcactccagcctgggcaacagagcaagactctgtctcaa

SEQ ID NO: 89023 - DNA, 383 bp, Homo sapiens
acaacagctagttaattgtaagttttgaatttctgtatttatagaaacattacaacactttatttggaacagcattcaatgaatgcattgccttctaaagggatttgctgaatcacttgatctagtttgtgatccattcaacactttcatagaacttaaacattatgtgtgtgaagcatcagcacagctgtaattgtgtcccataagcacattttttactcctacattcaaatcttgattcctactcatgagctctttcagcattttatacctgtttactcaaaacaacttgcctaagtcagagctttacaataatcaggtgatttttttgtcctcaccctttatttttctcccaagagttagtgtttgattgcagctttaca

SEQ ID NO: 89024 - DNA, 357 bp, Homo sapiens
cctcaaataattcagcacaattaaattcagcaaatatttattgaacacttggagatgatgatggaaaattatgttcacatggtgccatttggtacaacggaaatggcatgagatttggaccaaaccagaattgtcttaaatcctggctttgttagttttaggtatgtcatcttgagcagttcacttcactttttgagccacaatttctcttccttacataaagatatttataaataccccacaggttgttataataaaggttgaagatgcttggcacataagcaaaaattatgaataaatatgtattaaaatataaaataactacaaaataaaataaaaatattgtttttctcacca

SEQ ID NO: 89025 - DNA, 404 bp, Homo sapiens
ccaggtgcaatggctcatgtctgtaatccaagcactatgggaggctgaggcaggaggattgcttgagcccaggagttcaagaccagcctgggcaacatggcaagaccccgtctctataaaaaaaaatacaaaaaattagccaggcatagtggcgcatgcctgtagtaccagctactcaggaggttgaggtggggggattgcttgagccagggaggtcaaggtggcagtgagctatgatcatgccactgcactccagcatgggtgaaagaactagaccctgtctcaaaaataagtaaacaaaataaaagtcgaaatgattcttttaaaaaagtgacagagccaggattgtatctgaagtctttttgacattaaaagccatactttccatactaccttatgctgct

SEQ ID NO: 89026 - DNA, 467 bp, Homo sapiens
cttaactccaactccaaaattacatcaccccctccctcaaccaacacccttcagcggcctccccctgcacatcaggtaactcccaagctctggctgggcttctgatgcctcttcttatttattttattagtttattttatttattttattttttgagatggagtcttaccctgtcacccaggctctcaaaaaaaaaaaaaaaaaaagctctgatgtccatccacctctggcttcctgttgcctttggaataaaatagaaattcctcccactgtggaccctccctatctcaccttcctctccttccccggcacacaccagggtatgtcttcaccggccttaagttcctccatgttccaagcttgttcgtgcctcagggcctttgcacttgctgaccttcttgctgaatctcagtgcaaatgtcccttcttctcatagtccttcctatccccccaaaccagttacccca

SEQ ID NO: 89027 - DNA, 391 bp, Homo sapiens
caaattctttcagaagtgaatagatcaactgttaaaaagtagaaaaacaattggcttactctgcatggaatcatgaaagtgtgaagatggaaaagaacagaggcatagttcaaaatcctgataaatcacttaatagaaaggacaattttgtaaatgtttttattttaaactttcacttcctcacatgtaaaatgaagttgatagtactaacctcatatgttggattaaatggtataatgtaaatagatgtactttgcaatatgtaagttattgcataaatataaggcatcatcatctatttcttataagtctaggctaatttctacttatcttagaaaacgaatattaccctggggattcttcgaagaagtaactaaacatcattttagaa

SEQ ID NO: 89028 - DNA, 378 bp, Homo sapiens
acgaaggtttgtattgaagagttggcttcattgctgtcatagcctgcttctttctagtacaggtttggaaactccattgttatcttatgggttcaacagaattttgtaaggtaagctagtattttttttctataccagtagtgcagaaattcagtaggcttacagtctgtttgcttcaaatcagtttcaagtgtgagtctcttcagccaaacgcctcattagacacaggctttcagcctaaagattctggtattttagtttctagcctctgtgccctactcacttcctttgctttcaacttaatggcagccaccttgatatcatctgaaaaaaaggatttgggtgggaaggccaccccttagttcaatttggccaata

SEQ ID NO: 89029 - DNA, 391 bp, Homo sapiens
cacccctcggatgcctcctccttcccttcaaacatctcccatagaagttccccacaagttgccggccatgtcctcaaagaccttttctccactttggttaggctgactctcgatcccttcactctcctaaacattgcttctctgcacatggaaagacagctgctttccctgccttcaggccactgtggcttggcccagtagctttttgtcccgttttataacatttattgccttttcctctggttacagaagcaatacgtgcttctgagattttctgatttctcaaagaggagattctatattcttccttggttcaaccctattgagggagaactgaacctgtttggatatttctatgatacgcttgagagaatgtggggctgctactctg

SEQ ID NO: 89030 - DNA, 192 bp, Homo sapiens
tgggaggttgagaatggctgaagaccagatggggactggaagttgagggtaggtactaagcttgagagaagatagacatgggtaaggaacagagtgtgcggggcggcagcccacagagctataacagcaagcagttctcagcccaagccagccttctgcctctctttcaattcacctcatttgctacctctg

SEQ ID NO: 89031 - DNA, 170 bp, Homo sapiens
atgaaatgttcatgacacacaaagcaactttataggtactcctgacaaactcagtaccatattggttatggactctggttctgcaagctgacgttctgggctcgagtctcctttctgctgtttaccatctgtgaaaacttggtcaagtcttttgcttcttctcttagcct

SEQ ID NO: 89032 - DNA, 189 bp, Homo sapiens
cacaggaggcatcagaggcagggctggatggctgctctgcagggtgagggctgttgctaagggagcttcagtggtggtgatggacatgaggccggggaacctgtacctagtggaaggaccattgctttctaaacttaaacagcccctttcctggggaacaagctctaactcatgctgtgaaaccacgac

SEQ ID NO: 89033 - DNA, 474 bp, Homo sapiens
taatttttccacataagccttcttcataaatgttttttattgtgtagagtttctgatttactaattttcttattgtgagcactatatttatcatctttgtaaatgatgatttcttttctgataggctgtggaacctaacatttacatctgattatctgccttccctattgactcagactgtgtattttttgtcttgatttttatattgtaaatatgtatattgcaggaaaagattgtatagccaaactttgaagtgtccaattactaaaagttgaggttttagtgggagaaatattgtaaaagattctggtattcctgtttgcaaatatagctttggtgaacagttttctcatgtgaaggaaaaattgcagaccacaaatttgtggcttctgtttccttatttctcaataacaagcttttacatctgcccctcccttaaaatgacatgaaattaaataaaactaccatttatga

SEQ ID NO: 89034 - DNA, 609 bp, Homo sapiens
cattagtttttaggtgtttttgttttaaaatgcagggcagcttgggttaaggggttatctaatgcaatatattttgccaaactgaggtgctgaacaatgaaacatttcagtttaaacttgcatcaagtcagaaaaccctcaagtatggtatcaagacttttctgacaatgaaaatccaatactgaatgatcaacttttaaaatgttacagattctggcagtttctctcttgctatctttgtagtctttctaagtcatctaaactattggttagttatgttagcttcttgtgttgcaaagaaaaagagcatttttagaaatctgacaagaaattttgtcaaattgctacacataatttgtatataagtacataaaagcacaatactagctagcattgaaaaatttgaataaagatcagagatttctcacttttttcccacccctgtccaatatactgtggtattaaatatttaatatatgttcattttttctcttcctttccccaacccccacaaagctgttatcaatctggacagatgaataaattttggcaaaataagatttgtttagaatggtaagaattcttcctaataaagtttttaagcaagtc

SEQ ID NO: 89035 - DNA, 387 bp, Homo sapiens
cagctggtcacctggaatgcctgcgctgcagtcaggcagtgaaagggagggggggcaagaggtgcactcgctggaaataggccccaaatgagcctgtcccttgtctcacttgctaaaagggctgcccttggtcaggctcccgagaccaagggagagtctggcagagatggtgaggccctggtgcagcatcaactcctgggatagcgaggaattacattcttcctccttggatagcaaggaattacattcttcctcctgggataccgaggaattacattcttaagtgactacagaatttagctagtccaggaggctggatccacacttgtctaagaggattcctttcctttccaagcctcagctccactgatcctcctgtttaaggct

SEQ ID NO: 89036 - DNA, 420 bp, Homo sapiens
tggaggcatctttgccttggcctgcttggaaatgagcaggcatcagaggcagatccaggacctgacaggaccagggaaggagtggagaagtcaatcttagccgcctttaccattagtcatggacgggccttttagatttgctcttatcagtgtctgggaaattggataaaatttttaatgccactcccgactttcctttctccctgtaactactcctctactgaatgtgtactctaaccacagaatgctgtggtaggtcaaatggagactgaaaaataagaaaatgaaaaatggaccaaagatgcttataaacaaagcatgacaagacattccagttttcgatggcagggtcatagaacttacacattgattgtacctgccaaatgagttagttggaaagggaacacaatttctcttcca

SEQ ID NO: 89037 - DNA, 179 bp, Homo sapiens
ggggggtgtgcgttttccaggtgagagtccacgggggacagaaggtggaagaacgaccctgcgcgcccaggaagccttggagggtcagctagggacttctgactctgagagtggctctgctgttcggggttgggggaaggaggtgtcatcgcaggagtcgtggtgtcagggcttaagga

SEQ ID NO: 89038 - DNA, 366 bp, Homo sapiens
ccatgtgtaagcttctctaaataggaaaccacaatttgtcaaatatgtttgccataatttgtcaataaagctgaaaacttttgtaaaaattaaatttggaattacttgttttctagctttaaatgcctgctttatttcttcttcaagagatgcctaaaatgttttctatttaaaaattacaaaaatgaacccaagtctgttttaagatatttgtgtaatacttaaaaatgtattaataacttatggttgttaaataatttaaaagttaacaaactaaactgttacatgaatcatggttagtaaacactaatgtataacatgttaatggaaaaaaatggatttagaataataaatggattttaaact

SEQ ID NO: 89039 - DNA, 619 bp, Homo sapiens
  misc_feature (30)..(30): n is a, c, g, or t
  misc_feature (35)..(35): n is a, c, g, or t
  misc_feature (42)..(42): n is a, c, g, or t
  misc_feature (75)..(75): n is a, c, g, or t
  misc_feature (82)..(82): n is a, c, g, or t
  misc_feature (88)..(88): n is a, c, g, or t
  misc_feature (447)..(447): n is a, c, g, or t
cggggtattacaaccccctgtgacgccatnaaatnttcaccnaagacccctaaacccccacatctccatcacctntacatcncgcccngaccttagctcccaccatcgctcttctactatgtacccccctccccatacccaaccccctaggttcaacctcaacctaggcctcctatttattctagccacctctagcctagccgtttactcaatcctctgatcagggtgagcatcaaactcaaactacgccctgatcggcgcactgcgagcagtagcccaaacaatctcatatgaagtcaccctagccatcattctactatcaacattactaataagtggctcctttaacctctccacccttatcacaacacaagaacacctctgattactcctgccatcatgacccttggccataatatgatttatctccaaactagcagagaccanccgaacccccttcgaccttgccgaaggggagtccgaactagtctcaggcttcaacatcgaatacgccgcaggccccttcgccctattcttcatagccgaatacacaaacattattataataaacaccctcaccactacaatcttcctaggaacaacatatgacgcattctcc

SEQ ID NO: 89040 - DNA, 489 bp, Homo sapiens
  misc_feature (317)..(317): n is a, c, g, or t
gcctcagtgttatgctgatgactttcctaggaattatagttttagctgctgacccagagaagcctttttcaaatccttgaaagagaaagacggctatctccacacatcaagcaatcttgcgctatccgtcacacatgctgaccaaatcagtttcatctgatacaggtagcatttcgtagataccaagagccagtgttggcaattctagggatgtggcttttctccacccttatcacaacacaagaacacctctgattactcctgccatcatgacccttggccataatatgatttatctccaaactagcagagaccanccgaacccccttcgaccttgccgaaggggagtccgaactagtctcaggcttcaacatcgaatacgccgcaggccccttcgccctattcttcatagccgaatacacaaacattattataataaacaccctcaccactacaatcttcctaggaacaacatatgacgcattctcc

SEQ ID NO: 89041 - DNA, 641 bp, Homo sapiens
  misc_feature (30)..(30): n is a, c, g, or t
  misc_feature (35)..(35): n is a, c, g, or t
  misc_feature (42)..(42): n is a, c, g, or t
  misc_feature (75)..(75): n is a, c, g, or t
  misc_feature (82)..(82): n is a, c, g, or t
  misc_feature (88)..(88): n is a, c, g, or t
cggggtattacaaccccctgtgacgccatnaaatnttcaccnaagacccctaaacccccacatctccatcacctntacatcncgcccngaccttagctcccaccatcgctcttctactatgtacccccctccccatacccaaccccctaggttcaacctcaacctaggcctcctatttattctagccacctctagcctagccgtttactcaatcctctgatcagggtgagcatcaaactcaaactacgccctgatcggcgcactgcgagcagtagcccaaacaatctcatatgaagtcaccctagccatcattctactatcaacattactaataagtggctcctttaacctctccacccttatcacaacacaagaacacctctgattactcctgccatcatgacccttggccataatatgatttatctccaaactagcacctctagcctagccgtttactcaatcctctgatcagggtgagcatcaaactcaaactacgccctgatcggcgcactgcgagcagtagcccaaacaatctcatatgaagtcaccctagccatcattctactatcaacattactaataagtggctcctttaacctctccacccttatcacaacacaagaaggtaccgagctcga

SEQ ID NO: 89042 - DNA, 511 bp, Homo sapiens
atcttcctaggaacaacatatgacgcactctcccctgaactctacacaacatattttgtcaccaagaccctacttctaacctccctgttcttatgaattcgaacagcatacccccgattccgctacgaccaactcatacacctcctatgaaaaaacttcctaccagtcaccctagccatcattctactatcaacattactaataagtggctcctttaacctctccacccttatcacaacacaagaacacctctgattactcctgccatcatgacccttggccataatatgatttatctccaaactagcacctctagcctagccgtttactcaatcctctgatcagggtgagcatcaaactcaaactacgccctgatcggcgcactgcgagcagtagcccaaacaatctcatatgaagtcaccctagccatcattctactatcaacattactaataagtggctcctttaacctctccacccttatcacaacacaagaaggtaccgagctcga

SEQ ID NO: 89043 - DNA, 397 bp, Homo sapiens
  misc_feature (225)..(225): n is a, c, g, or t
tgtcctgattgggcctacaatggagtgtattaaacaaaccctggtctgcaaaacccagggtcagttaaagctatacatcaatgtgcactacatgtcaggattctattcacgtacaaggctcctttaactctccacccttatcacaacacaagaacacctctgattactcctgccatcatgacccttggccataatatgatttatctccaaactagcagagaccanccgaacccccttcgaccttgccgaaggggagtccgaactagtctcaggcttcaacatcgaatacgccgcaggccccttcgccctattcttcatagccgaatacacaaacattattataataaacaccctcaccactacaatcttcctaggaacaacatatgacgcattctcc

SEQ ID NO: 89044 - DNA, 315 bp, Homo sapiens
aaagtgtcaggactacaggtgtgagccgccgcacctgacagtcgttgactatttgaacagtactgtcatcacgcttgtacctgtctttgtaaacacaggtaagcgtttctgtggagtgtgcgtctaagaatatgacttctgggtcataactcgtgcatgttcagctttaggagacactatgatactatcaacagtttaccaatgaagatgcaccaatctgcacccctaacactgttacgagtttcagttgttccacatctttgccagcattaaatattttgtctttttcatttttttaacctgtatttccatgat

SEQ ID NO: 89045 - DNA, 516 bp, Homo sapiens
ggtccgtcggacgtgtatctcaatcatttcttacatagctttatgattgaggataacattagtatgcacatacaacataacacacaaaagcaaagcttagaataacattttaattatgttttagtgtatgtgaaataatttgtttttctcaattatattcctgggtcaaggcctaaaacatttatttgaaccagctatatatcttattttcataagggtctcaggaggcagtagtcatatgttgttacttcagccctccacaaaggcaatacagtacagatctctgtactgtaaacgacaacaaggaccagtcacaatttcagttcttgttacattgataagactccttcaggtaagagattaaaacatgcctttattattataaggttagtgaccattttaatggaataaaaagattattcctgttgcattggagataggaaatttgggatgtgaatgtatgaggtaggtgtcttttctctcttgtgcctgtattgttcaaaagctctttgacat

SEQ ID NO: 89046 - DNA, 264 bp, Homo sapiens
tacccatttcctgctcagccttggcacagcaaacatgtctctggagcagctacctcagggtaatttgagaagtagctctaggccatcacatgtggaaaaggaatcaggggaagacacatgtggaataagaatctccttgagaaagatgctgggcttttgtaaatggctttaataatatagaaataccagcagcagatgtttccagaatgccagcataatttactctaaggtgaccttagaattatgattctatcctcccagttt

SEQ ID NO: 89047 - DNA, 363 bp, Homo sapiens
gcaaatgtgaaggcgggaattgcaacggggctatttccaaaaacttccagaagggaagtgtaatcccttggactagcatggtggtgatggaaataggggataaactggttagggaggcaaatctagaacttagttttgaacatgctggtttgagatgtgtgtgagacacccaactagatgtgttcagcagccagtcatacaagctggagtgaaagatgaggtgtcggctagagatgtagtagaatctcatctgacttcagtgttaatttgtaaagtcagcatgtaaggccaaagaataaacaattaaaaatcatccttcaaaaacccttagagctgtggacctgagtctttggaaactcaaaa

SEQ ID NO: 89048 - DNA, 436 bp, Homo sapiens
tgagacagagtcttgctctgtcgcccacgctggagtgcagtagccaatctcagctcactgcaagctccgcctcccgggtttacaccattctcctgcctcagccttgggaggttgagactgcaatgagctgtgattgggccactgcactctagtatgggcggcagagtgagtccctatctcaaaaaataagtaaataataaagttttccaggtgattctaaatgggcagccatatttgaaaattcccattctagactgctaagttgaactgcctaaacaaaagatctaaagggagaaaaaggccaggcatggtagctcacgcctgtaatcctagcactttaggaggctgaggcacacagatcacttgaagtcaggagttcgaaaccagcctggctgacatggtgaaaccccatctctactaaaaatacaaaataatt

SEQ ID NO: 89049 - DNA, 287 bp, Homo sapiens
tttcctcctttgggtgtgttttagcttccagctgggatttttgccatagtaattataacaaccacactctgcatagagactctaaaagctatataggcaaacacataaatagaaaggaattcctaaggcaagccaagtagttatcagaatctccacccctaccagagtcggaagctctgtacttgcctcctggtaactgcttagtgagaattatttagccagcttggattctttctacaaccacattgaaatcagatatcctgagggaaggggaaggtttatcccac

SEQ ID NO: 89050 - DNA, 372 bp, Homo sapiens
ctgtgacctctcccccaaggaggaggtgctcgcatgcgtccagtgccctgcccattagattagggagggttcccttttttgctctcttgcactcatttgtccgccttttagctttccttttctgccctgactctcacagggtcgtgcggatgtgcgatgtaggaggaggagagaggtaaagtggaggaataggagctggaggggaggaggagagaagaaaagaggagaaggagggggaagagagggagcgggttcaaggagggaaggaggaggagaaggagaggaggaggagatgagaccaaggagaagaggtgaaggaggagaggaggacacagaaaagagaagaaagaggagaggagacggagaagagga

SEQ ID NO: 89051 - DNA, 460 bp, Homo sapiens
ttttttaatatagagatggggtctcactaggttgcccaggttggtcttgaactcctgggctctagtgatcttcctgcctcagcctcccaaagtgctgggattacaggcatgagcactgcttctggcccctctgctcttattataagctcctgaaggactattccgttaataaattcaggactctgcaattgtgaaggggtgactcttgagctagtagacagtcagctactgaaattttatttccatatgcaaccagctccatgagaaaacagtggtattctgatttgtccagtaatcccttgtgaggatggtattcatgcattcatttgattggcataaatccatctccaaaacaaatcatccctgagaagtcagtaaaattttatttcctggacatgtgttactagaaactggaaaatttaagaggctgcacctaaattgtgccccaggagaagtcttg

SEQ ID NO: 89052 - DNA, 430 bp, Homo sapiens
acgaagtccaacacaaaggtataatacagcctggtgtctaaagccaaggagtcataaaaacctggactctatggggtggtgcagaggggtgcagggaaagcaccttcatatggtcactacagaagaaaagctgtagttgaaaaagaagacgttagcggcaaacgtgaccttgtacatgcaaaaagaaacaccaagcttttctaaagcatcccaagaggtatactgttaggagcaaagtgaagccctgtaatctagtgatttagtcatttagtagtgttctgggacatggatccaggggcagagtggctccccaattgtaaaacctgctttgtcatccggaccaatggctttcactagagaacgtcttaaaggagccatatgactctgcaacaagaacccagaataaagtggtatcaaaaataccaaaagg

SEQ ID NO: 89053 - DNA, 356 bp, Homo sapiens
aacccgtaagtaatctcaaggcagcacaaaatcataaaaacctggactctatggggtggtgcagaggggtgcagggaaagcaccttcatatggtcactacagaagaaaagctgtagttgaaaaagactaaagcatcccaagaggtatactgttaggagcaaagtgaagccctgtaatctagtgatttagtcatttagtagtgttctgggacatggatccaggggcagagtggctccccaattgtaaaacctgctttgtcatccggaccaatggctttcactagagaacgtcttaaaggagccatatgactctgcaacaagaacccagaataaagtggtatcaaaaataccaaaagg

SEQ ID NO: 89054 - DNA, 859 bp, Homo sapiens
tttttttttttgagacggagtctcgctctgtcgcccaggccagactgcggactgcagtggcgcaatctcggctcactgcaagctccgcttcccgggttcacgccattctcctgcctcagcctcccgagtagctgggactacaggcgcccgccaccgcgcccggctaattttttgtatttttagtagagacggggtttcaccttgttagccaggatggtctcgatctcctgacctcatgatccacccgcctcggcctcccaaagtgctgggattacaggcgtgagccaccgcgcccggcctcctccactgatttttaaaaatccagtcaacagtaggattttcttgttgaactgtgaaggcctgtgctcggtagggactttgtgaatcatccctgtttgggtcccagagccactggagggcccatcactggagtggctggtgagacactccagggcatgagagttgctatgggcctctgtgtggcttctagaggcttcccaggggcacaaagactatgtgacccaggtggaagctcgggaggctcacgctggacacatgctgcacactctggctcccctgtggctgcagctgcacccacctacccagcattctccccacgacctgtccagcccaagcccacggcactcccaggggagcccaggacaccctcaactttttagtggattactagagtatcagaccacccatttatctctcagttcctcactcccacccctgcacccagcaagtcaccaagtcccccaggtgagtaaactggagctaacagcagttggtacttacggcatatactggatttggctcactcacacgtggtattcctatcttcatctactgtatc

SEQ ID NO: 89055 - DNA, 536 bp, Homo sapiens
  misc_feature (500)..(500): n is a, c, g, or t
ttttgagacatggtcttgctctgttgcccaggctagaatatggtgacacaaccatggctactgcagcctcgacctcccaggcttaagtgatctttccacctcagcctcccaagtagctgagattacagatatgcaccaccatgcatggctaatatttaaatgtttgtagagagatggggtctcactgtgttgccaggactggtcttgaactcctgggctcaagtgatcctcctgcctcggcttcccaaagtgctgaggttacaggcatgacccattgcgcctggccctttcttcagtctttaataatcgaacaaaaggtttttgtttttagacagtgtcttgctctgttacccaggacagacctctcgtgtcagcctcttaggtagctaggatttacaggtaagcaccggcgtgccctgctttatttttttgtgggggaagggggaagggagttgaacctgtatatggcttaaaagccttttgaaacccagccccttttnggctgtcacaaaaaactgacatgacacggactgaat

SEQ ID NO: 89056 - DNA, 360 bp, Homo sapiens
aatcagtctggacatacctaattattctagaaacccataaaaatattttaatatgtgtattttagtcttgtgctctttcctaatcagtcatgagaagtaatttttcttttcaatgaaactgagaccaaaaagttgagacttgctgatttctgtatggtaataagttagtaagagaccaacatcaaatttaaaatttgatgccttaaaaattaggttatctcatgccattatttaatttcttttttcaacacctgtactactatataatgattaatctcattttatttcactgagaaacactttgttctgattaccttgtttctaaaaatattaaatataaggtgtatctgtctaaggatc

SEQ ID NO: 89057 - DNA, 434 bp, Homo sapiens
ctgggctgtttccagtttcatctgttttaaacagtgctgttttgaaccttctgttaacctggtgcatatgttcaagaatttctacctaggaatagaagtgctagttgttcacccacagggtactgccaaactactatacttggttccattggtctgtttgtctatctgtgttcctattctcttgcctctgcctcctaagtagtgggattacaggcgcgtaccaccatgcctggctaatttttatatttccagtagagacgggattttaccattttggtcaggctggtctcgaactcctgacctcctcatctgccctcctcggtctcccaaagtgctgggattacagttctgagtactgtagccttatagactgttttgatctccctttctcctatctccccaatttctttcctctttcagggtctcttggcttt

SEQ ID NO: 89058 - DNA, 822 bp, Homo sapiens
gactgtgcatacattctgtgatagacttgttgctaaaatatggtatgggaataagtagccgtttttgagaagttactaaatcttaggcatggtgctaagaatgttatataaattactttttgcagtctgtactacaaccatatgagacaggcgtttgtttattatttccattttacaggagaggaaattcagggacaacaaggttaaaaaatttgcctgggtcacataactgatacattatgaggccagaattaaaatgcttgtggtttgacttcagaagcaactctcttaatcctaatgctgtgatggctcccacataactgaataacagagccaccgtggatagtgtctatgagagagagaaacaagcagatctgtctttactgtgaagtgaattttgtggcagtagtaagtaagagatgccatggggacatattagtgggggcagctaaatcagctttgggaggtaaggacatgaggaaatggtaaggggagagaccttgttaatcttttcactgtcgtattcccccacctggccatggcagtacttggcaagagaatgtgctaaacaggtactgttaaactggtaaattaatcaggtgtgacatctaagcaaaatcttaaaatttcaatgtatgaaatcccaagagatctctttgagaaattcgtatgattataatgtagatgagtctcagactacttgttctatgcattgttatattcttactgtatagtatctaaaacaccacctcagtgttactgaccaagaagactaagtgtcactccaatttattatagtaaggctacattggaaaaataacg

SEQ ID NO: 89059 - DNA, 341 bp, Homo sapiens
cacacattcccgcaagccatccttccgtgctgaatatgtatcaacaggaaggaaagaaaccctttctctgagctaactggggagcgctgggggcttgtctatctctgtgctgctgctctgcagctggaaaaagccacagccacgagtagacatccctcggaaacagtcgcctgcaactgtttctgaagcaaccaggacttgctgctgacgtcaatactccctggaaaattcctcctgcaggcttcagaagagaccagaggaaccagggcctgattggagttgcgagagtctttggcacaagcctgaaatgaagggaggtgaagaccccagtgggcagggcg

SEQ ID NO: 89060 - DNA, 316 bp, Homo sapiens
ccatatagcctaggtgcgtgtagtaggctataccctaggtttgtgtaagtacactctttgatgtttgcgtaatgatgaagctgcctaacaatacatttctcagaacatatccctgtcatgaagcaacgcatgactgtaaatgtaatcatacaatatgtgactttttatgtcttgtttcattcacttagcataatgtttttgaggttcattcatataatttttattatgtacaatgaaatgtaaaatcttgtgtacatttgcctatttttgaaaaattcatatgtgtgtaacccaaacctttatcatcatatcgaat

SEQ ID NO: 89061 - DNA, 313 bp, Homo sapiens
tttctgagtatgctgcactggattattagcatgttaaatagtcaaagggactggaataaacatcaggaagatttcataaagtggtgtaagtagaaaaaaaaggttaaacaatgagctgcatgttgataagtataagacactgatccaagtggtggcttctgaaccatgatattacttaaactagagtgttaaggtcagcttaagtcaaaataaaacaaagcttccaaaccctcattttaaacacagtagataatagatgaatcttgtatcttgggagatagtacaagccaaagttacagctgtgttaaaacct

SEQ ID NO: 89062 - DNA, 403 bp, Homo sapiens
aaatctgttggctaattttttatttgtaaatccatggcctgcttcttgtgtggggaggcttgagtaacctctgaatgtattttgcaaactccccaaccccagtcataattcctctaacctcaatactgttagttgaggctaggagaacagtgatgtttattgacagcatctgtttgttgggtgacatgtttttggaaagcgttctggtaaagaaccaggtaagaaaagaggtcaagggtagtagcagctacttcagccaaagaaacaccactgtaacttacaaagtctcaggaagtaggtcgaaggtgtgtgtggtaccttattatattttggaggactgttttactgtccttctgctgtattcagtgtacgtgtttgctaactcactgagtttttgccaaaa

SEQ ID NO: 89063 - DNA, 618 bp, Homo sapiens
tccatgaacatgaatgtctttctgtaggtgggttattaaaaaaaaaaaactacctatgtgaaaatgatacttgtatattaataaaaagtcaaataatatagcaatgtacaaaggaagaaagaacacattactccagatctcactactcattgataaccactgttaagtttctggtgaacatctttctgagcacctctcttacaattttacataaataggatccatttgtctcccatttaatatgtaatagttgttttctgatgtcaatgactagatttaaattatgtttgtctcatcatttacttaagcaaacttaccctgatagacatttaatttgttgtctgtgtactgtgagtaatttttattaatatcatagtattaatggccatccatagctattgtggactagtttcttctctgtcctagtagacctttaaaaagtttagggaaaactgtataattttgaatgcttaatgttgttgcttttgaataaagaaaagtacaaagtttttcatctaatcagttcctgcatatctgatgtactgtaatgcataaataatagatctttggtgtgataatttgtgaagcaataaagggcagagaaccagaaaaaattta

SEQ ID NO: 89064 - DNA, 790 bp, Homo sapiens
  misc_feature (779)..(779): n is a, c, g, or t
atagtaacaactatcagtaaagtagatggtgatcttggtattgcacatttgaaaaggttacaatcaaataccttacaaatttgataggacacttttattttctatcacaagaaaattcataggtaagaaattcatagatgaggaatcaatttttaaaacgagaagtcactttcgatttaactgtaaatttgctggataaattattggaaatggataccagtcagtgaaggattgaaaacaaattttgaaaagcaaattttctacatttttgacaaaagtttttaaaaatgaatgtccgagcttgttgaaattgcattaaaatcactgctatttctgtcctttgagactgttttctctgattgctattaaaacaaaacacagaaatagtttagatatacattatcccttgttgagtagcattgtcctcggtccaacctagattaacaaatgtagtaactggctttcaagatagcccccagtgaaccctacctcctgatgtttgcactgtgtataatcctctcacacaacataccaagttgatatgtgtgaacaatagaataaggtcagtgtgatagtatgtcacttttgaggttgcgttatgaccgacactgcagcttctgtctcagttgctctgtcagtttgtctctggaagccagctgccatgtggtgaacaggccagtggagaggccaacatagtgaggaactgaggctgttgtcatcagtcatgtgagtgagcctagaagcagattctccagcctgggcaacaggagcgaaactcngtctccaaaaa

SEQ ID NO: 89065 - DNA, 1009 bp, Homo sapiens
atagtaacaactatcagtaaagtagatggtgatcttggtattgcacatttgaaaaggttacaatcaaataccttacaaatttgataggacacttttattttctatcacaagaaaattcataggtaagaaattcatagatgaggaatcaatttttaaaacgagaagtcactttcgatttaactgtaaatttgctggataaattattggaaatggataccagtcagtgaaggattgaaaacaaattttgaaaagcaaattttctacatttttgacaaaagtttttaaaaatgaatgtccgagcttgttgaaattgcattaaaatcactgctatttctgtcctttgagactgttttctctgattgctattaaaacaaaacacagaaatagtttagatatacattatcccttgttgagtagcattgtcctcggtccaacctagattaacaaatgtagtaactggctttcaagatagcccccagtgaaccctacctcctgatgtttgcactgtgtataatcctctcacacaacataccaagttgatatgtgtgaacaatagaataaggtcagtgtgatagtatgtcacttttgaggttgcgttatgaccgacactgcagcttctgtctcagttgctctgtcagtttgtctctggaagccagctgccatgtggtgaacaggccagtggagaggccaacatagtgaggaactgaggctgttgtcatcagtcatgtgagtgagcctagaagcagattctccagcccagttaagccttcagatgactgaagccccaaccaacatcttgattaaaaactcatgagaagccccgaatcataatcacccacctaagctgcttctaaattcctgaccaacggaaactttgagataagaattgtgtgtaagtttgggggtaatttttaatagaataatacaggaaacaagaagcaaactcatttgttacattaaaaactttaaatactgacatatgtgctgttcagagggtatgaactggtgt

SEQ ID NO: 89066 - DNA, 1330 bp, Homo sapiens
ctagaattcagcggccgctgaattctagctagaattcagcggccgctgaattctagaacccgtgcaactgacatgggtgaaccccagggatccatgcggattctagtgacagggggctctgggctggtaggcaaagccatccagaaggtggtagcagatggagctggacttcctggagaggactgggtgtttgtctcctctaaagacgccgatctcacggatacagcacagacccgcgccctgtttgagaaggtccaacccacacacgtcatccatcttgctgcaatggtggggggcctgttccggaatatcaaatacaatttggacttctggaggaaaaacgtgcacatgaacgacaacgtcctgcactcggccttcgaggtgggcgcccgcaaggtggtgtcctgcctgtccacctgtatcttccctgacaagacgacctacccgatagatgagaccatgatccacaatgggcctccccacaacagcaattttgggtactcgtatgccaagaggatgatcgacgtgcagaacagggcctacttccagcagtacggctgcaccttcaccgctgtcatccccaccaacgtcttcgggccccacgacaacttcaacatcgaggatggccacgtgctgcctggcctcatccacaaggtgcacctggccaagagcagcggctcggccctgacggtgtggggtacagggaatccgcggaggcagttcatatactcgctggacctggcccagctctttatctgggtcctgcgggagtacaatgaagtggagcccatcatcctctccgtgggcgaggaagatgaggtctccatcaaggaggcagccgaggcggtggtggaggccatggacttccatggggaagtcacctttgatacaaccaagtcggatgggcagtttaagaagacagccagtaacagcaagctgaggacctacctgcccgacttccggttcacacccttcaagcaggcggtgaaggagacctgtgcttggttcactgacaactacgagcaggcccggaagtgaagctggaagacaggatcaggtgccagcggaccatcggctggcagagcccagcggccaccacccgtcaaccctgccaggagctgagggcaccacccagcaacctgggcctgcattccatccgctctgcagccccaagcatctttccagtggggcccccattcacgttggtcctcagggaaaccagggtccggggcaggcccggcgctttgctccccacaccagccccctgcgcgtgtccactctgatcctgcatcccactccctgggagccaataaagtgcattttcacaggc

SEQ ID NO: 89067 - DNA, 1028 bp, Homo sapiens
tctcttagcagaatagatttattatttgtattgcttgcagaataaagcctatccttgaaagctctgcatcatgggcagtgagctcagtggggctggacgcgtgcaactgacatgggtgaaccccagggatccatgcggattctagtgacagggggctctgggctggtaggcaaagccatccagaaggtggtagcagatggagctggacttcctggagaggactgggtgtttgtctcctctaaagacgccgatctcacggatacagcacagacccgcgccctgtttgagaaggtccaacccacacacgtcatccatcttgctgcaatggtggggggcctgttccggaatatcaaatacaatttggacttctggaggaaaaacgtgcacatgaacgacaacgtcctgcactcggccttcgaggtgggcgcccgcaaggtggtgtcctgcctgtccacctgtatcttccctgacaagacgacctacccgatagatgagaccatgatccacaatgggcctccccacaacagcaattttgggtactcgtatgccaagaggatgatcgacgtgcagaacagggcctacttccagcagtacggctgcaccttcaccgctgtcatccccaccaacgtcttcgggccccacgacaacttcaacatcgaggatggccacgtgctgcctggcctcatccacaaggtgcacctggccaagagcagcggctcggccctgacggtgtggggtacagggaatccgcggaggcagttcatatactcgctggacttggccagtcttatctgagtctggggagtacatgaagtgggcccaatatcctcaccgggcgaggacgatgaggcccatccagggaggaagccgaggggagatgaaggcagggagctccagggggagcaccatggatcaccacggggagagagagaacaagaagcagaaacaagccctacgaccacggcccagacacggcacccgtacagagaggaaagacaggatggccgcacgcacgagccgagacagag

SEQ ID NO: 89068 - DNA, 1363 bp, Homo sapiens
ctcccggccccgccccccacctggctccgcgggcagccggagcgcacccggccggaagccgctgtcggggagccggcggtggggctggacgcaggtgcaactgacatgggtgaaccccagggatccatgcggattctagtgacagggggctctgggctggtaggcaaagccatccagaaggtggtagcagatggagctggacttcctggagaggactgggtgtttgtctcctctaaagacgccgatctcacggatacagcacagacccgcgccctgtttgagaaggtccaacccacacacgtcatccatcttgctgcaatggtggggggcctgttccggaatatcaaatacaatttggacttctggaggaaaaacgtgcacatgaacgacaacgtcctgcactcggccttcgaggtgggcgcccgcaaggtggtgtcctgcctgtccacctgtatcttccctgacaagacgacctacccgatagatgagaccatgatccacaatgggcctccccacaacagcaattttgggtactcgtatgccaagaggatgatcgacgtgcagaacagggcctacttccagcagtacggctgcaccttcaccgctgtcatccccaccaacgtcttcgggccccacgacaacttcaacatcgaggatggccacgtgctgcctggcctcatccacaaggtgcacctggccaagagcagcggctcggccctgacggtgtggggtacagggaatccgcggaggcagttcatatactcgctggacctggcccagctctttatctgggtcctgcgggagtacaatgaagtggagcccatcatcctctccgtgggcgaggaagatgaggtctccatcaaggaggcagccgaggcggtggtggaggccatggacttccatggggaagtcacctttgatacaaccaagtcggatgggcagtttaagaagacagccagtaacagcaagctgaggacctacctgcccgacttccggttcacacccttcaagcaggcggtgaaggagacctgtgcttggttcactgacaactacgagcaggcccggaagtgaagctggaagacaggatcaggtgccagcggaccatcggctggcagagcccagcggccaccacccgtcaaccctgccaggagctgagggcaccacccagcaacctgggcctgcattccatccgctctgcagccccaagcatctttccagtggggcccccattcacgttggtcctcagggaaaccagggtccggggcaggcccggcgctttgctccccacaccagccccctgcgcgtgtccactctgatcctgcatcccactccctgggagccaataaagtgcattttcacaggc

SEQ ID NO: 89069 - DNA, 1683 bp, Homo sapiens
ctcccggccccgccccccacctggctccgcgggcagccggagcgcacccggccggaagccgctgtcggggagccggcggtggggctggacgcaggtgcaactgacatgggtgaaccccagggatccatgcggattctagtgacagggggctctgggctggtaggcaaagccatccagaaggtggtagcagatggagctggacttcctggagaggactgggtgtttgtctcctctaaagacgccgatctcacggatacagcacagacccgcgccctgtttgagaaggtccaacccacacacgtcatccatcttgctgcaatggtggggggcctgttccggaatatcaaatacaatttggacttctggaggaaaaacgtgcacatgaacgacaacgtcctgcactcggccttcgaggtgggcgcccgcaaggtggtgtcctgcctgtccacctgtatcttccctgacaagacgacctacccgatagatgagaccatgatccacaatgggcctccccacaacagcaattttgggtactcgtatgccaagaggatgatcgacgtgcagaacagggcctacttccagcagtacggctgcaccttcaccgctgtcatccccaccaacgtcttcgggccccacgacaacttcaacatcgaggatggccacgtgctgcctggcctcatccacaaggtgcacctggccaagagcagcggctcggccctgacggtgtggggtacagggaatccgcggaggcagttcatatactcgctggacctggcccagctctttatctgggtcctgcgggagtacaatgaagtggagcccatcatcctctccgtgggcgaggaagatgaggtctccatcaaggaggcagccgaggcggtggtggaggccatggacttccatggggaagtcacctttgatacaaccaagtcggatgggcagtttaagaagacagccagtaacagcaagctgaggacctacctgcccgacttccggttcacacccttcaagcaggcggtgaaggagacctgtgcttggttcactgacaactacgagcaggcccggaagtgaagctggaagacaggatcaggtgccagcggaccatcggctggcagagcccagcggccaccacccgtcaaccctgccaggagctgagggcaccacccagcaacctgggcctgcattccatccgctctgcagccccaagcatctttccagtggggcccccattcacgttggtcctcagggaaaccagggtccggggcaggcccggcgctttgctccccacaccagccccctgcgcgtgtccactctgatcctgcatcccactccctgggagccaataaagtgcattttcacaggcaaaaaaaaaaaaaaaaaaaaaaaaaaaaaaaaaaaaaaaaaaaaaaaaagggggggggcgccaaaagattccccctcggggggggccgccacaatattatgccgcagcagcccacggtgtttctgtgtgtgaaaaagaagggggggccccaataaaggggggcgcgtaatatatgaaccccgcacgagatgggcgcccggctttaaaaaaacgcggcggtggagtgggcgaaaaaacgcgtgataccggggcaaacctggggagaagagacacccccaaacacggagggggggagaccaatcgggggcaacacactacct

SEQ ID NO: 89070 - DNA, 1409 bp, Homo sapiens
ctcccggccccgccccccacctggctccgcgggcagccggagcgcacccggccggaagccgctgtcggggagccggcggtggggctggacgcaggtgaggtggcaccggactcagccgcgccctgggccctggatgttccgtgcaactgacatgggtgaaccccagggatccatgcggattctagtgacagggggctctgggctggtaggcaaagccatccagaaggtggtagcagatggagctggacttcctggagaggactgggtgtttgtctcctctaaagacgccgatctcacggatacagcacagacccgcgccctgtttgagaaggtccaacccacacacgtcatccatcttgctgcaatggtggggggcctgttccggaatatcaaatacaatttggacttctggaggaaaaacgtgcacatgaacgacaacgtcctgcactcggccttcgaggtgggcgcccgcaaggtggtgtcctgcctgtccacctgtatcttccctgacaagacgacctacccgatagatgagaccatgatccacaatgggcctccccacaacagcaattttgggtactcgtatgccaagaggatgatcgacgtgcagaacagggcctacttccagcagtacggctgcaccttcaccgctgtcatccccaccaacgtcttcgggccccacgacaacttcaacatcgaggatggccacgtgctgcctggcctcatccacaaggtgcacctggccaagagcagcggctcggccctgacggtgtggggtacagggaatccgcggaggcagttcatatactcgctggacctggcccagctctttatctgggtcctgcgggagtacaatgaagtggagcccatcatcctctccgtgggcgaggaagatgaggtctccatcaaggaggcagccgaggcggtggtggaggccatggacttccatggggaagtcacctttgatacaaccaagtcggatgggcagtttaagaagacagccagtaacagcaagctgaggacctacctgcccgacttccggttcacacccttcaagcaggcggtgaaggagacctgtgcttggttcactgacaactacgagcaggcccggaagtgaagctggaagacaggatcaggtgccagcggaccatcggctggcagagcccagcggccaccacccgtcaaccctgccaggagctgagggcaccacccagcaacctgggcctgcattccatccgctctgcagccccaagcatctttccagtggggcccccattcacgttggtcctcagggaaaccagggtccggggcaggcccggcgctttgctccccacaccagccccctgcgcgtgtccactctgatcctgcatcccactccctgggagccaataaagtgcattttcacaggc

SEQ ID NO: 89071 - DNA, 1311 bp, Homo sapiens
acgcgtccgcccacgcgtccggccggcggtggggctggacgcgtgcaactgacatgggtgaaccccagggatccatgcggattctagtgacagggggctctgggctggtaggcaaagccatccagaaggtggtagcagatggagctggacttcctggagaggactgggtgtttgtctcctctaaagacgccgatctcacggatacagcacagacccgcgccctgtttgagaaggtccaacccacacacgtcatccatcttgctgcaatggtggggggcctgttccggaatatcaaatacaatttggacttctggaggaaaaacgtgcacatgaacgacaacgtcctgcactcggccttcgaggtgggcgcccgcaaggtggtgtcctgcctgtccacctgtatcttccctgacaagacgacctacccgatagatgagaccatgatccacaatgggcctccccacaacagcaattttgggtactcgtatgccaagaggatgatcgacgtgcagaacagggcctacttccagcagtacggctgcaccttcaccgctgtcatccccaccaacgtcttcgggccccacgacaacttcaacatcgaggatggccacgtgctgcctggcctcatccacaaggtgcacctggccaagagcagcggctcggccctgacggtgtggggtacagggaatccgcggaggcagttcatatactcgctggacctggcccagctctttatctgggtcctgcgggagtacaatgaagtggagcccatcatcctctccgtgggcgaggaagatgaggtctccatcaaggaggcagccgaggcggtggtggaggccatggacttccatggggaagtcacctttgatacaaccaagtcggatgggcagtttaagaagacagccagtaacagcaagctgaggacctacctgcccgacttccggttcacacccttcaagcaggcggtgaaggagacctgtgcttggttcactgacaactacgagcaggcccggaagtgaagctggaagacaggatcaggtgccagcggaccatcggctggcagagcccagcggccaccacccgtcaaccctgccaggagctgagggcaccacccagcaacctgggcctgcattccatccgctctgcagccccaagcatctttccagtggggcccccattcacgttggtcctcagggaaaccagggtccggggcaggcccggcgctttgctccccacaccagccccctgcgcgtgtccactctgatcctgcatcccactccctgggagccaataaagtgcattttcacaggc

SEQ ID NO: 89072 - DNA, 1498 bp, Homo sapiens
tgactgccagggttgggcatcagccagcaagtgcccaggttctctgggtatcagccaaagtggggcaaacaagcaaacacagaccagccttagtcttctagaagtcagaagccgcagccctagcaggcgaggggaagagcacaaaacaggggactataagacatccttctcttattctccatactgtcttctacacctttaaagcctgcgaacctattcataggttcgcgtgcaactgacatgggtgaaccccagggatccatgcggattctagtgacagggggctctgggctggtaggcaaagccatccagaaggtggtagcagatggagctggacttcctggagaggactgggtgtttgtctcctctaaagacgccgatctcacggatacagcacagacccgcgccctgtttgagaaggtccaacccacacacgtcatccatcttgctgcaatggtggggggcctgttccggaatatcaaatacaatttggacttctggaggaaaaacgtgcacatgaacgacaacgtcctgcactcggccttcgaggtgggcgcccgcaaggtggtgtcctgcctgtccacctgtatcttccctgacaagacgacctacccgatagatgagaccatgatccacaatgggcctccccacaacagcaattttgggtactcgtatgccaagaggatgatcgacgtgcagaacagggcctacttccagcagtacggctgcaccttcaccgctgtcatccccaccaacgtcttcgggccccacgacaacttcaacatcgaggatggccacgtgctgcctggcctcatccacaaggtgcacctggccaagagcagcggctcggccctgacggtgtggggtacagggaatccgcggaggcagttcatatactcgctggacctggcccagctctttatctgggtcctgcgggagtacaatgaagtggagcccatcatcctctccgtgggcgaggaagatgaggtctccatcaaggaggcagccgaggcggtggtggaggccatggacttccatggggaagtcacctttgatacaaccaagtcggatgggcagtttaagaagacagccagtaacagcaagctgaggacctacctgcccgacttccggttcacacccttcaagcaggcggtgaaggagacctgtgcttggttcactgacaactacgagcaggcccggaagtgaagctggaagacaggatcaggtgccagcggaccatcggctggcagagcccagcggccaccacccgtcaaccctgccaggagctgagggcaccacccagcaacctgggcctgcattccatccgctctgcagccccaagcatctttccagtggggcccccattcacgttggtcctcagggaaaccagggtccggggcaggcccggcgctttgctccccacaccagccccctgcgcgtgtccactctgatcctgcatcccactccctgggagccaataaagtgcattttcacaggc

SEQ ID NO: 89073 - DNA, 1026 bp, Homo sapiens
acgctctctctgtggggctggccagggataggaaaaacgtgcacatgaacgacaacgtcctgcactcggccttcgaggtgggcgcccgcaaggtggtgtcctgcctgtccacctgtatcttccctgacaagacgacctacccgatagatgagaccatgatccacaatgggcctccccacaacagcaattttgggtactcgtatgccaagaggatgatcgacgtgcagaacagggcctacttccagcagtacggctgcaccttcaccgctgtcatccccaccaacgtcttcgggccccacgacaacttcaacatcgaggatggccacgtgctgcctggcctcatccacaaggtgcacctggccaagagcagcggctcggccctgacggtgtggggtacagggaatccgcggaggcagttcatatactcgctggacctggcccagctctttatctgggtcctgcgggagtacaatgaagtggagcccatcatcctctccgtgggcgaggaagatgaggtctccatcaaggaggcagccgaggcggtggtggaggccatggacttccatggggaagtcacctttgatacaaccaagtcggatgggcagtttaagaagacagccagtaacagcaagctgaggacctacctgcccgacttccggttcacacccttcaagcaggcggtgaaggagacctgtgcttggttcactgacaactacgagcaggcccggaagtgaagctggaagacaggatcaggtgccagcggaccatcggctggcagagcccagcggccaccacccgtcaaccctgccaggagctgagggcaccacccagcaacctgggcctgcattccatccgctctgcagccccaagcatctttccagtggggcccccattcacgttggtcctcagggaaaccagggtccggggcaggcccggcgctttgctccccacaccagccccctgcgcgtgtccactctgatcctgcatcccactccctgggagccaataaagtgcattttcacaggc

SEQ ID NO: 89074 - DNA, 1593 bp, Homo sapiens
ctcccggccccgccccccacctggctccgcgggcagccggagcgcacccggccggaagccgctgtcggggagccggcggtggggctggacgcaggtgcaactgacatgggtgaaccccagggatccatgcggattctagtgacagggggctctgggctggtaggcaaagccatccagaaggtggtagcagatggagctggacttcctggagaggactgggtgtttgtctcctctaaagacgccgatctcacggatacagcacagacccgcgccctgtttgagaaggtccaacccacacacgtcatccatcttgctgcaatggtggggggcctgttccggaatatcaaatacaatttggacttctggaggaaaaacgtgcacatgaacgacaacgtcctgcactcggccttcgaggtgggcgcccgcaaggtggtgtcctgcctgtccacctgtatcttccctgacaagacgacctacccgatagatgagaccatgatccacaatgggcctccccacaacagcaattttgggtactcgtatgccaagaggatgatcgacgtgcagaacagggcctacttccagcagtacggctgcaccttcaccgctgtcatccccaccaacgtcttcgggccccacgacaacttcaacatcgaggatggccacgtgctgcctggcctcatccacaaggtgcacctggccaagagcagcggctcggccctgacggtgtggggtacagggaatccgcggaggcagttcatatactcgctggacctggcccagctctttatctgggtcctgcgggagtacaatgaagtggagcccatcatcctctccgtgggcgaggaagatgaggtctccatcaaggaggcagccgaggcggtggtggaggccatggacttccatggggaagtcacctttgatacaaccaagtcggatgggcagtttaagaagacagccagtaacagcaagctgaggacctacctgcccgacttccggttcacacccttcaagcagggtgagccctgaccccacagccctccacttggtggaggcctgccccagcccctccctcatgctcgctaccagggcagaggtgaggtgccccctcagagcctgtactgccctggaggtgggacaccaaagctctgaggggtgacttccctgtccctgggcctcctccccccacttcctcccatgcggccccgaccctccctgtccatggccctcacctgcctgcctctgcagcggtgaaggagacctgtgcttggttcactgacaactacgagcaggcccggaagtgaagctggaagacaggatcaggtgccagcggaccatcggctggcagagcccagcggccaccacccgtcaaccctgccaggagctgagggcaccacccagcaacctgggcctgcattccatccgctctgcagccccaagcatctttccagtggggcccccattcacgttggtcctcagggaaaccagggtccggggcaggcccggcgctttgctccccacaccagccccctgcgcgtgtccactctgatcctgcatcccactccctgggagccaataaagtgcattttcacaggc

SEQ ID NO: 89075 - DNA, 1588 bp, Homo sapiens
ctcccggccccgccccccacctggctccgcgggcagccggagcgcacccggccggaagccgctgtcggggagccggcggtggggctggacgcaggtgcaactgacatgggtgaaccccagggatccatgcggattctagtgacagggggctctgggctggtaggcaaagccatccagaaggtggtagcagatggagctggacttcctggagaggactgggtgtttgtctcctctaaagacgccgatctcacgtggctggcctggcctgggtgtgcttggctgtgttcctggaaaaacaaacaccctcccatctcttcctggaagcctgcaccctcatatcagccaggccctggggccaccctcccttttgactgtccctcctgccatagtcccacccagttcctgcacttggcacccaaccctggggtgctggttccctccagagcctcctgacagcctggcttcctacagggatacagcacagacccgcgccctgtttgagaaggtccaacccacacacgtcatccatcttgctgcaatggtggggggcctgttccggaatatcaaatacaatttggacttctggaggaaaaacgtgcacatgaacgacaacgtcctgcactcggccttcgaggtgggcgcccgcaaggtggtgtcctgcctgtccacctgtatcttccctgacaagacgacctacccgatagatgagaccatgatccaccatgggctaccccaaaacagccaatattggggtaactcgtatgcccagaggatgactcgacgttgcagaacagggcctacttccagcagtacggctgcaccttcaccgctgtcatccccaccaacgtcttcgggccccacgacaacttcaacatcgaggatggccacgtgctgcctggcctcatccacaaggtgcacctggccaagagcagcggctcggccctgacggtgtggggtacagggaatccgcggaggcagttcatatactcgctggacctggcccagctctttatctgggtcctgcgggagtacaatgaagtggagcccatcatcctctccgtgggcgaggaagatgaggtctccatcaaggaggcagccgaggcggtggtggaggccatggacttccatggggaagtcacctttgatacaaccaagtcggatgggcagtttaagaagacagccagtaacagcaagctgaggacctacctgcccgacttccggttcacacccttcaagcaggcggtgaaggagacctgtgcttggttcactgacaactacgagcaggcccggaagtgaagctggaagacaggatcaggtgccagcggaccatcggctggcagagcccagcggccaccacccgtcaaccctgccaggagctgagggcaccacccagcaacctgggcctgcattccatccgctctgcagccccaagcatctttccagtggggcccccattcacgttggtcctcagggaaaccagggtccggggcaggcccggcgctttgctccccacaccagccccctgcgcgtgtccactctgatcctgcatcccactccctgggagccaataaagtgcattttcacaggc

SEQ ID NO: 89076 - DNA, 887 bp, Homo sapiens
ctcccggccccgccccccacctggctccgcgggcagccggagcgcacccggccggaagccgctgtcggggagccggcggtggggctggacgcaggtgaggtggcaccggactcagccgcgccctgggccctggatgttccgtgcaactgacatgggtgaaccccagggatccatgcggattctagtgacagggggctctgggctggtaggcaaagccatccagaaggtggtagcagatggagctggacttcctggagaggactgggtgtttgtctcctctaaagacgccgatctcacggatacagcacagacccgcgccctgtttgagaaggtccaacccacacacgtcatccatcttgtgggcgaggaagatgaggtctccatcaaggaggcagccgaggcggtggtggaggccatggacttccatggggaagtcacctttgatacaaccaagtcggatgggcagtttaagaagacagccagtaacagcaagctgaggacctacctgcccgacttccggttcacacccttcaagcaggcggtgaaggagacctgtgcttggttcactgacaactacgagcaggcccggaagtgaagctggaagacaggatcaggtgccagcggaccatcggctggcagagcccagcggccaccacccgtcaaccctgccaggagctgagggcaccacccagcaacctgggcctgcattccatccgctctgcagccccaagcatctttccagtggggcccccattcacgttggtcctcagggaaaccagggtccggggcaggcccggcgctttgctccccacaccagccccctgcgcgtgtccactctgatcctgcatcccactccctgggagccaataaagtgcattttcacaggc

SEQ ID NO: 89077 - DNA, 861 bp, Homo sapiens
ctcccggccccgccccccacctggctccgcgggcagccggagcgcacccggccggaagccgctgtcggggagccggcggtggggctggacgcaggtgcaactgacatgggtgaaccccagggatccatgcggattctagtgacagggggctctgggctggtaggcaaagccatccagaaggtggtagcagatggagctggacttcctggagaggactgggtgtttgtctcctctaaagacgccgatctcacggatacagcacagacccgcgccctgtttgagaaggtccaacccacacacgtcatccatcttgctgcaatggtggggggcctgttccggaatatcaaatacaatttggacttctggaggaaaaacgtgcacatgaacgacaacgtcctgcactcggccttcgaggtgggcgcccgcaaggtggtgtcctgcctgtccacctgtatcttccctgacaagacgacctacccgatagatgagaccatgatccacaatgggcctccccacaacagcaattttgggtactcgtatgccaagaggatgatcgacgtgcagaacagggcctacttccagcagtacggctgcaccttcaccgctgtcatccccaccaacgtcttcgggccccacgacaacttcaacatcgaggatggccacgtgctgcctggcctcatccacaaggtgcacctggccaagagcagcggctcggccctgacggtgtggggtacagggaatccgcggaggcagttcatatactcgctggacctggcccagctctttatctgggtcctgcgcgtgtccactctgatcctgcatcccactccctgggagccaataaagtgcattttcacaggc

SEQ ID NO: 89078 - DNA, 1301 bp, Homo sapiens
ggcctggtggcgaattcggcacgaggggacgcgtgcaactgacatgggtgaaccccagggatccatgcggattctagtgacagggggctctgggctggtaggcaaagccatccagaaggtggtagcagatggagctggacttcctggagaggactgggtgtttgtctcctctaaagacgccgatctcacggatacagcacagacccgcgccctgtttgagaaggtccaacccacacacgtcatccatcttgctgcaatggtggggggcctgttccggaatatcaaatacaatttggacttctggaggaaaaacgtgcacatgaacgacaacgtcctgcactcggccttcgaggtgggcgcccgcaaggtggtgtcctgcctgtccacctgtatcttccctgacaagacgacctacccgatagatgagaccatgatccacaatgggcctccccacaacagcaattttgggtactcgtatgccaagaggatgatcgacgtgcagaacagggcctacttccagcagtacggctgcaccttcaccgctgtcatccccaccaacgtcttcgggccccacgacaacttcaacatcgaggatggccacgtgctgcctggcctcatccacaaggtgcacctggccaagagcagcggctcggccctgacggtgtggggtacagggaatccgcggaggcagttcatatactcgctggacctggcccagctctttatctgggtcctgcgggagtacaatgaagtggagcccatcatcctctccgtgggcgaggaagatgaggtctccatcaaggaggcagccgaggcggtggtggaggccatggacttccatggggaagtcacctttgatacaaccaagtcggatgggcagtttaagaagacagccagtaacagcaagctgaggacctacctgcccgacttccggttcacacccttcaagcaggcggtgaaggagacctgtgcttggttcactgacaactacgagcaggcccggaagtgaagctggaagacaggatcaggtgccagcggaccatcggctggcagagcccagcggccaccacccgtcaaccctgccaggagctgagggcaccacccagcaacctgggcctgcattccatccgctctgcagccccaagcatctttccagtggggcccccattcacgttggtcctcagggaaaccagggtccggggcaggcccggcgctttgctccccacaccagccccctgcgcgtgtccactctgatcctgcatcccactccctgggagccaataaagtgcattttcacaggc

SEQ ID NO: 89079 - DNA, 1369 bp, Homo sapiens
tctcttagcagaatagatttattatttgtattgcttgcagaataaagcctatccttgaaagctctgcatcatgggcagtgagctcagtggggctggacgcgtgcaactgacatgggtgaaccccagggatccatgcggattctagtgacagggggctctgggctggtaggcaaagccatccagaaggtggtagcagatggagctggacttcctggagaggactgggtgtttgtctcctctaaagacgccgatctcacggatacagcacagacccgcgccctgtttgagaaggtccaacccacacacgtcatccatcttgctgcaatggtggggggcctgttccggaatatcaaatacaatttggacttctggaggaaaaacgtgcacatgaacgacaacgtcctgcactcggccttcgaggtgggcgcccgcaaggtggtgtcctgcctgtccacctgtatcttccctgacaagacgacctacccgatagatgagaccatgatccacaatgggcctccccacaacagcaattttgggtactcgtatgccaagaggatgatcgacgtgcagaacagggcctacttccagcagtacggctgcaccttcaccgctgtcatccccaccaacgtcttcgggccccacgacaacttcaacatcgaggatggccacgtgctgcctggcctcatccacaaggtgcacctggccaagagcagcggctcggccctgacggtgtggggtacagggaatccgcggaggcagttcatatactcgctggacctggcccagctctttatctgggtcctgcgggagtacaatgaagtggagcccatcatcctctccgtgggcgaggaagatgaggtctccatcaaggaggcagccgaggcggtggtggaggccatggacttccatggggaagtcacctttgatacaaccaagtcggatgggcagtttaagaagacagccagtaacagcaagctgaggacctacctgcccgacttccggttcacacccttcaagcaggcggtgaaggagacctgtgcttggttcactgacaactacgagcaggcccggaagtgaagctggaagacaggatcaggtgccagcggaccatcggctggcagagcccagcggccaccacccgtcaaccctgccaggagctgagggcaccacccagcaacctgggcctgcattccatccgctctgcagccccaagcatctttccagtggggcccccattcacgttggtcctcagggaaaccagggtccggggcaggcccggcgctttgctccccacaccagccccctgcgcgtgtccactctgatcctgcatcccactccctgggagccaataaagtgcattttcacaggc

SEQ ID NO: 89080 - DNA, 1429 bp, Homo sapiens
ctcccggccccgccccccacctggctccgcgggcagccggagcgcacccggccggaagccgctgtcggggagccggcggtggggctggacgcaggtgcaactgacatgggtgaaccccagggatccatgcggattctagtgacagggggctctgggctggtaggcaaagccatccagaaggtggtagcagatggagctggacttcctggagaggactgggtgtttgtctcctctaaagacgccgatctcacggatacagcacagacccgcgccctgtttgagaaggtccaacccacacacgtcatccatcttgctgcaatggtggggggcctgttccggaatatcaaatacaatttggacttctggaggaaaaacgtgcacatgaacgacaacgtcctgcactcggccttcgaggtgggcgcccgcaaggtggtgtcctgcctgtccacctgtatcttccctgacaagacgacctacccgatagatgagaccatgatccacaatgggcctccccacaacagcaattttgggtactcgtatgccaagaggatgatcgacgtgcagaacagggcctacttccagcagtacggctgcaccttcaccgctgtcatccccaccaacgtcttcgggccccacgacaacttcaacatcgaggatggccacgtgctgcctggcctcatccacaaggtgcacctggccaagagcagcggctcggccctgacggtgtggggtacagggaatccgcggaggcagttcatatactcgctggacctggcccagctctttatctgggtcctgcgggagtacaatgaagtggagcccatcatcctctccgtgggcgaggaagatgaggtctccatcaaggaggcagccgaggcggtggtggaggccatggacttccatggggaagtcacctttgatacaaccaagtcggatgggcagtttaagaagacagccagtaacagcaagctgaggacctacctgcccgacttccggttcacacccttcaagcaggcggtgaaggagacctgtgcttggttcactgacaactacgagcaggcccggaagtgaagctggaagacaggatcaggtgccagcggaccatcggctggcagagcccagcggccaccacccgtcaaccctgccaggagctgagggcaccacccagcaacctgggcctgcattccatccgctctgcagccccaagcatctttccagtggggcccccattcacgttggtcctcagggaaaccagggtccggggcaggcccggcgctttgctccccacaccagccccctgcgcgtgtccactctgatcctgcatcccactccctgggagccaataaagtgcattttcacaggcaaaaaacaacaaccagcaaaaaacaactcacataaagacaaaaagacaactcacgaaaacaaaggg

SEQ ID NO: 89081 - DNA, 1531 bp, Homo sapiens
ctcccggccccgccccccacctggctccgcgggcagccggagcgcacccggccggaagccgctgtcggggagccggcggtggggctggacgcaggtgcaactgacatgggtgaaccccagggatccatgcggattctagtgacagggggctctgggctggtaggcaaagccatccagaaggtggtagcagatggagctggacttcctggagaggactgggtgtttgtctcctctaaagacgccgatctcacggatacagcacagacccgcgccctgtttgagaaggtccaacccacacacgtcatccatcttgctgcaatggtggggggcctgttccggaatatcaaatacaatttggacttctggaggaaaaacgtgcacatgaacgacaacgtcctgcactcggccttcgaggtgggcgcccgcaaggtggtgtcctgcctgtccacctgtatcttccctgacaagacgacctacccgatagatgagaccatgatccacaatgggcctccccacaacagcaattttgggtactcgtatgccaagaggatgatcgacgtgcagaacaggtcctcgcgcccatcctgctgaggcccagccaggagtcggggagagggcccccaggggcgggtggggccggctggtcgggtcttcgtgccagcctcagtaagaggccagcggcagcctggggtgggatcgcgggcccaggacgagggcaggagacgctgtgcctccgcggcctacttccagcagtacggctgcaccttcaccgctgtcatccccaccaacgtcttcgggccccacgacaacttcaacatcgaggatggccacgtgctgcctggcctcatccacaaggtgcacctggccaagagcagcggctcggccctgacggtgtggggtacagggaatccgcggaggcagttcatatactcgctggacctggcccagctctttatctgggtcctgcgggagtacaatgaagtggagcccatcatcctctccgtgggcgaggaagatgaggtctccatcaaggaggcagccgaggcggtggtggaggccatggacttccatggggaagtcacctttgatacaaccaagtcggatgggcagtttaagaagacagccagtaacagcaagctgaggacctacctgcccgacttccggttcacacccttcaagcaggcggtgaaggagacctgtgcttggttcactgacaactacgagcaggcccggaagtgaagctggaagacaggatcaggtgccagcggaccatcggctggcagagcccagcggccaccacccgtcaaccctgccaggagctgagggcaccacccagcaacctgggcctgcattccatccgctctgcagccccaagcatctttccagtggggcccccattcacgttggtcctcagggaaaccagggtccggggcaggcccggcgctttgctccccacaccagccccctgcgcgtgtccactctgatcctgcatcccactccctgggagccaataaagtgcattttcacaggc

SEQ ID NO: 89082 - DNA, 1351 bp, Homo sapiens
ctcccggccccgccccccacctggctccgcgggcagccggagcgcacccggccggaagccgctgtcggggagccggcggtggggctggacgcaggtgaggtggcaccggactcagccgcgccctgggccctggatgttccgtgcaactgacatgggtgaaccccagggatccatgcggattctagtgacagggggctctgggctggtaggcaaagccatccagaaggtggtagcagatggagctggacttcctggagaggactgggtgtttgtctcctctaaagacgccgatctcacggatacagcacagacccgcgccctgtttgagaaggtccaacccacacacgtcatccatcttgctgcaatggtggggggcctgttccggaatatcaaatacaatttggacttctgggcaaggtggtgtcctgcctgtccacctgtatcttccctgacaagacgacctacccgatagatgagaccatgatccacaatgggcctccccacaacagcaattttgggtactcgtatgccaagaggatgatcgacgtgcagaacagggcctacttccagcagtacggctgcaccttcaccgctgtcatccccaccaacgtcttcgggccccacgacaacttcaacatcgaggatggccacgtgctgcctggcctcatccacaaggtgcacctggccaagagcagcggctcggccctgacggtgtggggtacagggaatccgcggaggcagttcatatactcgctggacctggcccagctctttatctgggtcctgcgggagtacaatgaagtggagcccatcatcctctccgtgggcgaggaagatgaggtctccatcaaggaggcagccgaggcggtggtggaggccatggacttccatggggaagtcacctttgatacaaccaagtcggatgggcagtttaagaagacagccagtaacagcaagctgaggacctacctgcccgacttccggttcacacccttcaagcaggcggtgaaggagacctgtgcttggttcactgacaactacgagcaggcccggaagtgaagctggaagacaggatcaggtgccagcggaccatcggctggcagagcccagcggccaccacccgtcaaccctgccaggagctgagggcaccacccagcaacctgggcctgcattccatccgctctgcagccccaagcatctttccagtggggcccccattcacgttggtcctcagggaaaccagggtccggggcaggcccggcgctttgctccccacaccagccccctgcgcgtgtccactctgatcctgcatcccactccctgggagccaataaagtgcattttcacaggc

SEQ ID NO: 89083 - DNA, 1424 bp, Homo sapiens
tgactgccagggttgggcatcagccagcaagtgcccaggttctctgggtatcagccaaagtggggcaaacaagcaaacacagaccagccttagtcttctagaagtcagaagccgcagccctagcaggcgaggggaagagcacaaaacaggggactataagacatccttctcttattctccatactgtcttctacacctttaaagcctgcgaacctattcataggttcgcgtgcaactgacatgggtgaaccccagggatccatgcggattctagtgacagggggctctgggctggtaggcaaagccatccagaaggtggtagcagatggagctggacttcctggagaggactgggtgtttgtctcctctaaagacgccgatctcacggatacagcacagacccgcgccctgtttgagaaggtccaacccacacacgtcatccatcttgctgcaatggtggggggcctgttccggaatatcaaatacaatttggacttctggaggaaaaacgtgcacatgaacgacaacgtcctgcactcggccttcgaggtgggcgcccgcaaggtggtgtcctgcctgtccacctgtatcttccctgacaagacgacctacccgatagatgagaccatgggcctacttccagcagtacggctgcaccttcaccgctgtcatccccaccaacgtcttcgggccccacgacaacttcaacatcgaggatggccacgtgctgcctggcctcatccacaaggtgcacctggccaagagcagcggctcggccctgacggtgtggggtacagggaatccgcggaggcagttcatatactcgctggacctggcccagctctttatctgggtcctgcgggagtacaatgaagtggagcccatcatcctctccgtgggcgaggaagatgaggtctccatcaaggaggcagccgaggcggtggtggaggccatggacttccatggggaagtcacctttgatacaaccaagtcggatgggcagtttaagaagacagccagtaacagcaagctgaggacctacctgcccgacttccggttcacacccttcaagcaggcggtgaaggagacctgtgcttggttcactgacaactacgagcaggcccggaagtgaagctggaagacaggatcaggtgccagcggaccatcggctggcagagcccagcggccaccacccgtcaaccctgccaggagctgagggcaccacccagcaacctgggcctgcattccatccgctctgcagccccaagcatctttccagtggggcccccattcacgttggtcctcagggaaaccagggtccggggcaggcccggcgctttgctccccacaccagccccctgcgcgtgtccactctgatcctgcatcccactccctgggagccaataaagtgcattttcacaggc

SEQ ID NO: 89084 - DNA, 1331 bp, Homo sapiens
ctcccggccccgccccccacctggctccgcgggcagccggagcgcacccggccggaagccgctgtcggggagccggcggtggggctggacgcaggtgcaactgacatgggtgaaccccagggatccatgcggattctagtgacagggggctctgggctggtaggcaaagccatccagaaggtggtagcagatggagctggacttcctggagaggactgggtgtttgtctcctctaaagacgccgatctcacggatacagcacagacccgcgccctgtttgagaaggtccaacccacacacgtcatccatcttgctgcaatggtggggggcctgttccggaatatcaaatacaatttggacttctggaggaaaaacgtgcacatgaacgacaacgtcctgcactcggccttcgaggtgggcgcccgcaaggtggtgtcctgcctgtccacctgtatcttccctgacaagacgacctacccgatagatgagaccatgatccacaatgggcctccccacaacagcaattttgggtactcgtatgccaagaggatgatcgacgtgcagaacagggcctacttccagcagtacggctgcaccttcaccgctgtcatccccaccaacgtcttcgggccccacgacaacttcaacatcgaggatggccacgtgctgcctggcctcatccacaaggtgcacctggccaagagcagcggctcggccctgacggtgtggggtacagggaatccgcggaggcagttcatatactcgctggacctggcccagctctttatctgggtcctgcgggagtacaatgaagtggagcccatcatcctctccgtgggcgaggaagatgaggtctccatcaaggaggcagccgaggcggtggtggaggccatggacttccatggggaagtcacctttgatacaaccaagtcggatgggcagtttaagaagacagccagtaacagcaagctgaggacctacctgcccgacttccggttcacacccttcaagcaggcggtgaaggagacctgtgcttggttcactgacaactacgagcaggcccggaagtgaagctggaagacaggatcaggtgccagcggaccatcggctggcagagcccagcggccaccacccagcaacctgggcctgcattccatccgctctgcagccccaagcatctttccagtggggcccccattcacgttggtcctcagggaaaccagggtccggggcaggcccggcgctttgctccccacaccagccccctgcgcgtgtccactctgatcctgcatcccactccctgggagccaataaagtgcattttcacaggc

SEQ ID NO: 89085 - DNA, 462 bp, Homo sapiens
attaacctttctctgaaccagatcatttctgcaaggaaattctccattctggatcagcgatgccctggcgttacatgggcggtatcttagtgtgagaggtgagactgagtattcttgggggtccctccagcaggactgggcattcagtgtctgaaaccaggcctactcatggctgtgacgagtagtactgcctgttgatgccaatacgtgctgtccaaaacatgtaggcaatgttagcacatctgtactctgtttctattatggaatggatctagaggactaacaacgctgttgatcagtttgctgtggacagtgactttattgttaaaaatttaagattatctataatgaaagtctatatttttataatgagaaaaaaaggaaaacagtaacaggttattctattttaaatacctatgtgtatgcctcttcatttggaaataataaagattattctttctc

SEQ ID NO: 89086 - DNA, 615 bp, Homo sapiens
ggccccttccgagcccaccctgtggatacgtgggaacatgtcacaggcaacgctggccctggcaacagccttagcaagagagaattcagcaggaagcaagccctaaagcactttggactgtttcaaaaccctgtatctctgactgttctcactgtctccctcttgtcctacttcagctgactctgggggacccccaaggcattctcagatgaggccacaaaactggatgaattaaagcacctccgtgttttgtgcctgtggttcccttccacccccatgtgataacagtattcagtcccatgtccacctaaagcttaaaactgcctgttttggccgggtgcggtggctcacacctgtaatcccagcactttgggaggccaaagcgggcggatcacctgaggtcaggagtttgagaccagcctggacaacatgatgaaatcctgtctctactaaaaatacaagaaaattagccaggcgtggtggcgggtgcctgtaatcccagctacttgggaggctgaggcaggagaatcgcttgaacccgggaggcagacattgcagtgagctgagattgcgccattgcactccagcctgggcaacaggagtgagactccatgt

SEQ ID NO: 89087 - DNA, 203 bp, Homo sapiens
tttcagcaaagccagccaggaaaagcctcgttgagaaggtggcgtttgagcacagcctgaacctagtgaaggagagaaccatgtacgcaactgggaagagggttccaggccgaacggtcaacaactgtgaaaatcctagagcagtgaagtgtgtgagaaaatgaggcagccagagtgagcgaggtggagagcggtggagatgg

SEQ ID NO: 89088 - DNA, 293 bp, Homo sapiens
ggaacattattcaagaacatctgtgcaaattcggtaagaaacaaagtctggtcagcaaggtggaaattcccgtccaggctactgcagccaagaacgcagggcttccttctgtcaaaagacaaaattgcaagtttagtttgatgatcccagttggctttatttgcgattctagaatcggacaacatttcatttcatagaataagtgttccagtaagttgagcagaagagtttggcttatggacagaagggcttaagaagtctgaacagtgtattggttacttttaaacagaaca

SEQ ID NO: 89089 - DNA, 394 bp, Homo sapiens
tctaagctcctactgagcaactctatggttccttgtaagcactaaacccagcttggtgtgtgtatgtttctggtggtcactggctgagcaacgttatcagtgatgtgaatgtttttgtggtttttaataagcatttaacattgctgatcaaagaagctaatcaattttgattgctttcaaatattttacacaacctaaccagcaacttaagtgttagggtctttttcaattaagttgatcgtgtaaactgaatcttgtttcaatgtgtatgttttattggtttgtaagctaatcattttcccaggtatttgatatttctcctctactggtatttctttttatctgtcacgagtttgatattcaatgatgaaaaaataatttttgtctcctactg

SEQ ID NO: 89090 - DNA, 560 bp, Homo sapiens
cagaagccccctagaccatcacggatgccgagcttcgggtaactctcacagtggaaggttcccacgccgcccctaatcccgcttgaagcagccctgagaaacatcgcccattctctctccataccacccccccaaaattttcgccaccccaacacttcaacactattttgttttatttttcttattaatataagaaggcaggaatgtcaggcctctgagcccaagccaagccatcacatcccctgtgacttgcacatatatgcccagatggcctgaagtaactgaagaatcacaaaagaagtgaatatgccctgccccaccttaactgatgacattccaccacaaaacaagtgtaaatggccggtccttgccttaactgatgacattaccttgtgaaagtccttttcctggctcatcctggctcaaaagcacccccactgagcaccttgcgacccccactcctgcccgccagagaacaaaccccctttgactgtaattttcctttacctacccaaatcctataaaacggccccacccttaactcccttcactgactctct

SEQ ID NO: 89091 - DNA, 456 bp, Homo sapiens
tagtactactctatacatgtttgctgctgctgctgcttttcttttttaacctgagtaaccacaaaaggaatagaaataaaatagatgtcttccagaccagcagaactaaaggaatgaaaataagagaatgaagaaggctaaacccttggtataccatcagggtcagttggaataattttcatttttgattttcattttagagcagtgccaactatttagaagggtagatattatgacttgtattcttagagatctaccaaagaacaaagagaaaatttattttaaaaaattattctatcttacagttaccatatgagtccattagacccttttttataaacctaacatccattatgagatcttaataatcttggcttttcctatatattgaaatattttactactctaggaattttatcattacttatcaattatttatactgtgctaaaaaaaaa

SEQ ID NO: 89092 - DNA, 336 bp, Homo sapiens
ctctattacttatgattacaccatggcaatattcctttttcaccaggagctttggacctgcgcaggttgtggcatgtaatcacccggagcatgtagtcgtctgtagaaatcacaggcacactcatgtttgctctggaaggaatctgttttccacaatgactccccccagctaatgtacacactggcattttgcatgccttcctcacacatggggcaccagccttgctcagaaccacccaaactccacagaggcccttaatatggctagggacagatttcttaagaaagagtaagaagcagctacaaaggacaagcaaatccacaagtcaggcagca

SEQ ID NO: 89093 - DNA, 849 bp, Homo sapiens
ctacacccccaagacgctcaagttactccacagccagggactgcatctgagcatcgtcttcctactgtcaagcacagtgcctcccagaaaatgcactaggggttgaaaaaaataaatttctatcacaaggggccgggcgcggtggctcacgccggtaatcctagtactttgggaggccgaggcaggcggatcacctgaggtcgggagttcgagactggcctgaccaatgtggagaaacccggtctctactaaaaatacaaaattagccgggcgtggtgacgcatgcctgtaatcccagctactcgggaggctgaggcaggagaattccttgaagccgggaggcggaggttgcggtgagctgagatcgcgccattgcactgtagcctgggcaacaagagcgaaactccatctcaagaaaaaaaaaaattacatcacaaggctttggtaaatacagtcctctagaagtatgagcagccatagcatccctcctttttaattaacaaaaataacaggggcaaaaataacagcagcgctcgctgaccaagcgccagcatctatctgccaggcacatgctaaatgctgcactcttctatcgccgtccctgttaacagagttcaggaaacgaaggctcagcaagaactttagtccaacagctcttagctgccacagccaagacttgattcccatccgattcagaggcagagctccgaaccagtgctctcgcatgcaccgaaatgcaaacgctagcattagagtctcgctatacaaaatgctgggattacaggcatgagccaccacgcccggcctaatttttgtagtttttgtagagatgggatttcatcatgttgc

SEQ ID NO: 89094 - DNA, 585 bp, Homo sapiens
ccaaagtgttgggattacaggcatgagccaccatgcctggcctttctttcttttttttttttttccttttcaggagaagcgttctaaagtgccttctacagtttgtttgtttgtttgttttgagacggagtttttctctgtcacccaggctggagtacaatggtgcgatcttggccccactgcaacctccacctccagatttaagcaattctcctgccccagcctcccaacctctggagtagctgggattattggggcgtgccaatacgcccggctaatttttgtatttttagtagagatgaggtttcactatgttggccaggctggttttgaatgcctgacctcaggtgatctgcctgcctccgcctccaaaagtgttgggattacaggcgtgagttacccagcccggccccttctatagttcttttacagactttatttgcagcttactcatcactccctttcggcttgatccttaacgtgtggcactaagaagtcaatctagtactgggaacacatagttgggggccatctctttgactcggcgcgcttagtctaccaggcctttgtttgtaaggaatcaag

SEQ ID NO: 89095 - DNA, 354 bp, Homo sapiens
aagcaagggaatttcaggttggaaggactatgcagggaaaagggaaaataaaagagtctgttgagagccaatgtatgagagtctgactggatgaattcactggagaaattgaatactctgtacaacaacctctcaccacctccagcctccaagtgccatgccagctccatccatggttgtttatgagtctctagacagggatgaccattccatggttgaagccggtagatcagagaaggcacacgtaatgtttacctgcaaagaatatggcagaacctctcatgaagttttaagatcaaatggagaaaagttgcctgcagaaaagcatgattaaataaatttatagctggttta

SEQ ID NO: 89096 - DNA, 273 bp, Homo sapiens
gtagccaaacctcttcttagccacctcactgtctcaaacatgacctggggcagtgtgtccatctcgtgggaagctcaggagtctgcctttgatagctttcttatagaagttagtaattccgatcacccccatgagaccatggtgctgtctgtgcctggggtgtctcgcagctctgtcatcaccaacctcaaagcttcttctaattacactgcccaccttcatgggctgattggcgggcagcgtgctcagaccctgatggtccaagcaaccaca

SEQ ID NO: 89097 - DNA, 223 bp, Homo sapiens
tctctctgctctgggaatatctcagtccagttaaacagctgtgtctcatttcaggaggtggtggtgcaggtgggggtggggcacccccaaaggtgggtctttatgtgtgcaagcaatcaggcattgaatgagggcatttctatggatacaaaagaaatacaaagattaaccatcggtgctgactatagatcctgtttctaagttcagaggtccaatcttccgg

SEQ ID NO: 89098 - DNA, 710 bp, Homo sapiens
aagaaactttgaattccttacaaatgggactaatctagaaaatcagtcatttttttcctttttactagaaaatgactagtttttatttcagaatgagcttcaaggcagcgttttaaatttctccagatccagcctgccaacatttttgtgtaagatcaacaagcatttttaatgcacgtgcctattttgttgacccatccgttacccaaccacattaaaggattgattttagaggccaataatgtgaagtaaattaaaaggataacatggccttaattgctactggtttcaccgggcttctaggcaccggaatttcttgtggagaaacactttaagtgtcacagcagtttttgatcatgtggtctggctcacccagaggcttcaattatctcccagcccttctccacctcccctcagatatctctgagaagcaaagaaaatgtgcatttgtaaattcagtattatggacccctgattatttggcagggtaagaaaataggttctgttcattttacagtattcgcataggctagatgtttaaacaacaacaaaagacatggaatggaggagaacagtgggagtaagatcaaagcttttttcattaaaaagaattttgttgaattgagttcattctctcaaatgataacaagattgtgattactcttgggtgtcgggttagacacaacattgcacacgtagcttaagaaaag

SEQ ID NO: 89099 - DNA, 378 bp, Homo sapiens
ggaaataaagtaggaatcaggaggcattcaggatactggagctaatcagaagtcagcatggtggattagcttccaagatagagccccttttgtctccacactccacccctctaatccggctcttacaacctcaagcgcccacctcttccatgatgggtcctgagccagggggctgctgcagtcattttggggatgtgggtgacacattgcatcagtttcttttctacttgtaagcagaggctgcagcaacaatacaaacaacaggcaatgatacctgtgtcaagtatgagacacagaattaatcatgcctttgccaccatattttccagaatccaaaccaagaggcattttgcagggcagagcagcagcaggaacaga

SEQ ID NO: 89100 - DNA, 482 bp, Homo sapiens
tttacaattatcaatattgtaaaatatttttacattttctaaaagcaaaattctggaagtatgtgctgtgcactaaactgtgtctacctcaaaattctgatgttgacgccctagtccccagtgttgactgtattgcagatgggacctataaggcaataattaaggttaaatgaggctataagtgtggggtcctaatctgatagggttggtaccatataggaagatgaagaaacaccagagctcactctctctcactctccaagaaatcgacaaaatgggaacagagtattcaccaggaggcaaactggggggcaatcaaccaatccttgatcttggatttcccagcctcgagaactgtgagaaaatagattcctgttgtttaagccgcacggtttagggtattttgttatggcagcctgaggtgactaaaatagtatgtttatgcatttttcaaaagcaaataaataattctaatgtaaact

SEQ ID NO: 89101 - DNA, 311 bp, Homo sapiens
agagatttaagatccgagcaattgtacaaatagatggaactttgaaacaacttagtctctccagggaaaagagattagagaggagagcaagaggatttagaacagggccttggggaaatctttaatgttagggtgtgggaggaggaagagaaaccctgaagtagaagtataaactagcatgcttggctgtggaagtcaccaagtgccactccctccatcagctgttaattctgagccagatcacctcagttatgtagatggagagtggagaatctaggaactgaagatccttgtgactttctgccttgctt

SEQ ID NO: 89102 - DNA, 607 bp, Homo sapiens
gtaaatttatttgttaactaaaagccttatcatgaaagttttatttattccttcaagagtttttgtatttcttcaaaagggatttgatttctcctttgccgttgagagctaggagaccctaggaataggcaggacacattgcttagctgtcaagtcagcggaagatgagattcgtggaacttcaggcagctctggtggggagggacttgatggagtgactgccctgcttccccccatatggtctcacctcagtgggaggaagaggagcatctatggcccctccacactccccctcacttcctcagttgacaattgcatggccactagctgctatagagcacaccctacagtcttgggaacggctggcctaaaagcagaggttttcagatttggggggcctttatccctttaaatttttgttaagagacagggtctttccctgttgcccagctgaacttgaattctcagctcaagagatcctcttgcctcaggtccgagtagctaggtctgtgggcacacaccactggttcccgacttcctttcacattgtggccagaaaaaaaaacagactttcatgaaactgtatttatcctgagcatatctgatg

SEQ ID NO: 89103 - DNA, 437 bp, Homo sapiens
gtgcctcttacgatgtgggagcttagtaaataactgtcttttaaataaatgtccctttggtcattgtaaatactttaagaatagccatatattatctctacaatttaaaaaagcttttacattatctgatgggatcataatgactttcccatgtagggcagagaagtcagttactgtgtccaacttgtagatgagaaaattgtggctcagagggctcagacagcttgcctaaggatgcccaaatgttaaactcaggaagagaattttgttctcctgactttgctctgagggatttttacttagaagaaaccaaaggggaaaaacggtgtatttttttttttttttttgagatgatatattgaggaggagcatccagggttgaagtcaacttatacacgtggcaggcagactttggtttggctatggtctgcctttga

SEQ ID NO: 89104 - DNA, 222 bp, Homo sapiens
tgacagatttaaggcagagctccaaggataatagcagggctcagaaaatgctgactcaaggcatttcgaactcaataagactaagaggacttcagaaacaagaaagtcactctgatctttccctgcctttctgtgtgaagcatggtcataaaggaattctctgacctaccttgtctaaaagtctaagaccctcattccagggtggaatggtcctgtctcata

SEQ ID NO: 89105 - DNA, 628 bp, Homo sapiens
tcaagaccagcctgggcaatgtaagagaaccccaactctacaaaaaataaaaaaataaaaattagccaggcatggcggtgtgtgctactccaggaactgaggtggcaggatcactcgagcctgggaggtcgaagccacagctgcagtgagccgtcatcacaccactgcactccagctggggtaacagagcaagaccctgtctcagaaaacaaacaaacaaacaaaaccactctgcagtactggttctcagaagtggaggcacagtggaatcacctgggaattgttagaatctaccaatgcttatatcccacccagagattctgatttaatagacatgatatatagccaggttatcgagattttttaaagctctccatgtgattctaaaatgcagtttgaaaagctctggtgtaaaggacaaagttaaaacaaacaaatacacaaaaacgtcagatttgtcacttccaaaccagtcagtaaaacttggcagattcccagctactagctaatgctccttggagaagcttggcttggctgagtgtacatttgataatagccccataattgcttttcccatttgtttgattaatgtacctatagacaaggattctaggctaaatctccattc

SEQ ID NO: 89106 - DNA, 450 bp, Homo sapiens
ggccaatttgaattatataatttaatcctttgaagaatattgcaatttaagccagaaatttaataattatccgtttcttattttaaaacctttctggtttggtatatctcttgcttggcaatatttttactcatagttttgtagtaaagatacctatttaacattgtataactctgcatttcccaaaccctgttttccttgtcctggcaaaatactgttctagaaaagtagtcctagtgactcagtagatataggaagttggctgttggtatcagatactgttaaggaagaatctctatattcttcatttcttaaactttgttttttaaatcagtaatagatgtcgaattttatcaactgatgtttttcatgtaatgaaattctattttttattttgaattattcatgtggtaatttaggtgaataaatttcctgtaattaaccaaaaat

SEQ ID NO: 89107 - DNA, 151 bp, Homo sapiens
accatggaaactttgacaatgccgagaaacaatctggcaaatcatgtcaatttagatgagtaactgaggtccagagaggagaagtgatgtgcctaagaatgagcccctcctctgcactggggcctgtgcccccccagtggaatcagtgctg

SEQ ID NO: 89108 - DNA, 224 bp, Homo sapiens
ccacgtacacaaagacacacgctcactgaagccacatacaaacatctacggcaaccctaactgggacctcgcctatactagtaaatggaatggagctgctgctctcaagtttacaacgtagcttcgagtgcagttgggaagacgacacatacccaagacacaatataaggatccagcagagcaacttcaatcattcattcatccaaaacatttgggcgtacggg

SEQ ID NO: 89109 - DNA, 116 bp, Homo sapiens
cacaccatttgaaatcacgtttaaaaacttagtagtttttcaataaaatcatcacacagctgtagacacgatcttatttctctctgcctgtgcagaagtcttatgaaaattcaaac

SEQ ID NO: 89110 - DNA, 183 bp, Homo sapiens
agatagatcagtgctttataatgcaaggcctgattcgtttagctctgtgccaagtaccgagagcataaaaatgatgaacccttagtcactgacagctcacagtctcgagaaggcagtcccctagtcagacaatatcagagtatgtaaaatagccccaagtggtttatccttataactttattt

SEQ ID NO: 89111 - DNA, 480 bp, Homo sapiens
ggtttgaaggacaaaggagagggaagagtcagataggattagcacagcacatgactgcctaagagatgctcacaaaaataaatggctgaatgagtgaatgaacccagcggttttaaatctggaggcttaagacagtttttggtagctgagggagaacagaaatagctatgttcactgttaatatagaatatgtgttattctttgcgttcacctttcccacctatattgtagacgtcactgatagcttgtaatacttttctacctgaggtttaagtatgtaaatatgaggaattaataacaagttaaactcttgttttgaaaatctaatttgccaaatataattgaggaaatactataagaactaaatctctactgatcctctcttaggagcaatttgagataatttttctaagtttaaagacagactttaaagcaactttccagtcacaacttcaaaataaagtacaagttaattgcaaa

SEQ ID NO: 89112 - DNA, 167 bp, Homo sapiens
ataatccaagacatgcccagcctttgaggacttagatcctaaactaccttgtcttccccaatcctgtacactacaccacactctcagtctcctcctctgcttaactaagctccatctccactgacatctctgcctagtctcttaatccaatgcatagcctgcttatc

SEQ ID NO: 89113 - DNA, 707 bp, Homo sapiens
gccacttgctggctttgcagatcataagggatttagtagataaaggtggtgatatatttttggatcagctagccagacttggtgtaattagcaaagtgtcaacgtttggcaggtccttcctctgatgatgagaatgaagaggaatcaaaaccagaaaaagaagatgaaccacaggaagatgctaaagaattgcaacaaggtaaaccatatcattggagagactggtcaatcattaggggaagggactgcttatatatttggagtgatgcagcagccttggaattatctaatggcagtaatggatggttcagatttatcttggatggaaaacttgccaccatgtattcaagtggtagtccggaaggtggatctgacagttcagaaagccgaagtgaattcttagagaagttacaaagagctcgaggccaagtaaagccatctacttcaagtcaacctatactgtcagcaccaggacccactaaacttactgtaggaaattggtcactgacatgtttgaaagaaggagaaattgctattcataattcagatggtcagcaagctacaatattgaaagaagatttacctggttttgtatttgaatctaatagaggaaccaaacattcatttactgcagaaacttccctgggttcagaatttgtgactggctggactggcaaaagaggcagaaaactgaaatctaagttaga

SEQ ID NO: 89114 - DNA, 333 bp, Homo sapiens
gtgacggtaccaacacacctcatggtaacataattgctcctaagaaagaacaaaataaccttgataactgatactgtgtcagtatggtgtgtgtgtgtgtgtgtgtgtgtgtgtgtatttcattttcaaccaccagcagtgggttgggatggtctaagtacagaaatgtgtatgatgataaacatgttgatgaaaagacaaaaagcttttggtcttgggtggggaggagtgtgagtttggaccctgcttggtcattctgctctgatggaggttcccatctccttggtgatctgcagcagaaggaagtacatgctgaatgttgggtaaggggag

SEQ ID NO: 89115 - DNA, 208 bp, Homo sapiens
ctaattctgattcctcattaacttttctagattattggagagaaacatacactttccgtttcattctgtgatgttagcattatcctgatatcaaaactagaataagattttatgagatacctcagtctccatgaagtgcttatttcacattgcatgcctgtatcaaaacatatcatgtaccccataaatatatacacctaccattacc

SEQ ID NO: 89116 - DNA, 125 bp, Homo sapiens
  misc_feature (52)..(52): n is a, c, g, or t
gtgttgtatgaaaggagagaaggttagcactccccttgacaaggatggaagnggccctcgggcctgacaacacgcatacggttaaggcattgccacctacttcgtggcatctaaccatcgttttt

SEQ ID NO: 89117 - DNA, 346 bp, Homo sapiens
atgcaagtgtttccaaccttgcccattctggctggggctaagaaatggattcatcacctgaaatgccgtccagtctccttgctgtggacaacagggtcctttcaaggtctggctccttcccagagctccagcctcccacctaccattcccactcagcacagacaccccagccttgttcttggtcttgccaagcctatgtctgcctcaggggcttgacacttgctggaacacttgaccctggggcctttaccaggctcactcattcacttcttcgatgcttctgttcagagggtcatcttctgaccagcctgtctccaagacttgtccctccaccaccactgtactc

SEQ ID NO: 89118 - DNA, 429 bp, Homo sapiens
tatctaagcttcctgactcaggtgatctgcccaccacggctcccaaggtgctgagattacgggcgtaagccactgctctgggcctctgatttttatacctctgtaatgccctcttgaatcccttcttctctttctattttcgttgtgactagtcctctggccgctcacctggaaaggcagaggagagggttgtaactctgggagttgaattataactaatcttctaatgatggtgtttaacaaaagccatgttaaaggcaaagtgcttctgtttcgaaaaatactctcaaacccagttttctcttggccctcacaccacctcagcagcaatcaacaacaaagaagaagacttctttgcctaaatatgcggggaatttcccgactcacatagcagcagacaccagctggatgtcctccaattcagttccg

SEQ ID NO: 89119 - DNA, 513 bp, Homo sapiens
caggagtaattttttggtagccttgatgaggcctgagggggtggcaactgcccctcagtacaggaaggaatgccttgtgaaactggtcagctgtcatggtgaaactgcaaaaaagaggggagctggtcccaatgtcaggcagttggctgaagtcagcagaggagcaagtcttccaatctttgtttttccagggctggtttctgttcaacttgtaggaaaaaagtctggtattggttagtaaggaaggagaccaggaccaacccctcatcttgtcatgtttgggaatcttagtttttcatgtttttctggggtctacttggtcgaggggggttctgttcagccagtttagggggcttagaattttatttttatttcacaggcacaaccagcacagctgctttggtaagtcagtgacattaaaaaaagaaatgtgtggcagggcgcgatggctcacgcctataatcccagcactttgggaggctgaggcaggaggatcacgaggtcaggagatcg

SEQ ID NO: 89120 - DNA, 780 bp, Homo sapiens
ggatcaatgccgtgagcaagaacctggtttgtcctcagcccctcctaggggtccttacctaagccctacagggccctgaggcatgggcccagaagcattcctgtccccttttgctaagtgaagaaggtgatgcttatctagaactcgccacaggtggagtggagaagaaggatttccactatatgtgggctttctccctgggtggggcaccacactgagggctttatgtgaccacctcctttaatctgtgtgtgctccctgggacagaaccgttttactagaaatgaacaaaacacatattcacttgtgtgcacgtgtgtgtgcaaggcagagctgcaagagcacagggactgaggtggggtagagtgggctctgtactatggacacgtgtgactgaagtgggatagagtgggctctgtattatggatacgtgtcactgaggtggggtagagtgggctctgtactacggatacgtttgataagctttttctttttctttaagagctttatacggttcaccctttaaagtttacatttcagtggtctttaggatattcacagagttgtgtggccatcaccaaaatctaattttggaacattcattaataaataaaaagaggtgcagcttccctgtgttgcccaggctggtttcaaacttttggccctacgccatcctcttgcctaggcctcccaaagtgctggggtcacaggtgcgagccaccaagcctggcctaattttagaacttttttttttgagacagggtctcactctgtacccag

SEQ ID NO: 89121 - DNA, 474 bp, Homo sapiens
gatggtcctaaagtaatcggctcagctaaaaacacacttataacagttgggcatgtcagctgaggagagacccttatagcctgtgtttcctacaaaaacaaaaacacagttcttttatgaaagtagacaagttgatggtatatttgggctaaataaaatacaatgttgacatatgttgaaatattctatagttgttacacatgttggctgaggtggttgtactgatccagacacatggctgatactttgagtgggaacatagccagtgtggttttaaaatattatgtccctctgaggagggattacagatgattttttgctttctacttacacctttttataggtttcttacaaaaatattgcgcatgcagtcttcttacaattagggaaaaaacccaagacatgctctaaggtgagatgagtggggggaagaaatctgtatacagtcagccctctgtatccaaggcttctgaa

SEQ ID NO: 89122 - DNA, 424 bp, Homo sapiens
aatatgctcagtgtttcttctagctccttggccatatggaatatagttatgaaaactgttttaatatccctgtctactaattatatcatctgtgtcatttcctgggttggtttcaattgactgatttttttctccctcattatgggttgtatttccctatttttttgcaacttggttatttttggttgggtgccagacattgtgaaatttattttgttggatgctagatagttttgtatcactataaatattcttgaactttcttcttgaatgtagttaagttactgaaaacagtttgattctttcaggtgtcacttttaagctttattaggcaggactggaatagcatttagtctaaggccaatttttttcactattaaagcgagacctttctgagttctttactgatgccctatgaattttg

SEQ ID NO: 89123 - DNA, 573 bp, Homo sapiens
catggcagcgcttgtttgttttgatgttactatgtgttaaatcttaaacaaatttcttgcagccttacgccaggtttttgttgaagcctactgttaacccagacaatgactccctcctgcaaagagcgtgcggtggcagctttaaaatattaatggaggcatagcgtgcacaggcgggaccggaccacgggcggtgggagtggggcccggtagagccatggacagcgaatctcccagcgcctcctcgagcctggggaggggcccatgccatgggtgcctcaggacccctggggtcaggctcagctgctgcctccccaactgcaccaaacaccaccagcctctgggcgagggtctgccagccttgctcactggccccctatgggtccatctagctcaggtgggggcacccagccgatgaggcagaggaaggagggctgggctgcggtctcagctggctgggagccctggcctcccccaggacccacgcttgtgtgctgggtgtggtgtattttcccaagtaaatgcactgacgtttcctatagacacctgggtggatactgggtggtggcttgg

SEQ ID NO: 89124 - DNA, 871 bp, Homo sapiens
actccattgcgaggcgtttcgggccacgaagcaggaccgggggccgcactccgggtccccgccctgccctcgccgacctcccgcgcgtggaagggggacggcggcggcggagctccccgccacggagaaccccgaaatggtcatttcgaacgagaggagtgtggcctggggtgtctggtttaacagccccccgcgccgaaaggctgttcgccgaggaggggccgccggggagggagcccgagcgcggcggggcgagaccggtccccgcccggcgttgcccggcccgagggacggcggcgcccccaggaccctccccagcgcggccccagctcgctccgggaccgcggggccaggccgggcgggagcgcggggacgtacacggcggccccgcccgcgcgctcctcctccctcccggcccgccctgcgccggcggcggcggccccagtctccgcgctgctgaggcgcgcccggccgctcccacggcctcccctccgccctgcggtcccgccgcctccggggcctcctgggaccctggccctcgccgggcaggacgccgccagcgctgaaggcgcagcccggaggccgcgcggatgcagatctgtggatccagcgtagcatctgtagcagctgggacatcattccaggttttgggcccggtgtgttggcaacaactggatctgaagatggcagtcagggtgctttggggtggtctcagcctgctccgagtgctgtggtgtctccttccgcagacgggctatgtgcacccagatgagttcttccagtcccctgaggtgatggcaggtaaaactccgcatgtgtggctgagacaagctgcagcagagtctgcttgagaagctgacgggagactttg

SEQ ID NO: 89125 - DNA, 361 bp, Homo sapiens
aatgacagatccattttcagtttgttcagacagttgaatatattataatttacatcgtgataaccaacaactgttatcctcaacagatgcagatctgtggatccagcgtagcatctgtagcagctgggacatcattccaggttttgggcccggtgtgttggcaacaactggatctgaagatggcagtcagggtgctttggggtggtctcagcctgctccgagtgctgtggtgtctccttccgcagacgggctatgtgcacccagatgagttcttccagtcccctgaggtgatggcaggtaaaactccgcatgtgtggctgagacaagctgcagcagagtctgcttgagaagctgacgggag

SEQ ID NO: 89126 - DNA, 3135 bp, Homo sapiens
actccattgcgaggcgtttcgggccacgaagcaggaccgggggccgcactccgggtccccgccctgccctcgccgacctcccgcgcgtggaagggggacggcggcggcggagctccccgccacggagaaccccgaaatggtcatttcgaacgagaggagtgtggcctggggtgtctggtttaacagccccccgcgccgaaaggctgttcgccgaggaggggccgccggggagggagcccgagcgcggcggggcgagaccggtccccgcccggcgttgcccggcccgagggacggcggcgcccccaggaccctccccagcgcggccccagctcgctccgggaccgcggggccaggccgggcgggagcgcggggacgtacacggcggccccgcccgcgcgctcctcctccctcccggcccgccctgcgccggcggcggcggccccagtctccgcgctgctgaggcgcgcccggccgctcccacggcctcccctccgccctgcggtcccgccgcctccggggcctcctgggaccctggccctcgccgggcaggacgccgccagcgctgaaggcgcagcccggaggccgcgcggatgcagatctgtggatccagcgtagcatctgtagcagctgggacatcattccaggttttgggcccggtgtgttggcaacaactggatctgaagatggcagtcagggtgctttggggtggtctcagcctgctccgagtgctgtggtgtctccttccgcagacgggctatgtgcacccagatgagttcttccagtcccctgaggtgatggcagaggacatcctgggcgttcaggccgcgcggccctgggagttttaccccagcagctcctgccgctcggtgctcttccccctgctgatctctggttccaccttctggctgctcaggctctgggaggagctggggccgtggcctggcctggtgagcggctatgcgctgctggtggggcctcgactcctcctcactgccctttcctttgctctggacggggccgtgtaccacctggccccgccgatgggggcggatcgctggaacgccctggccctgctgtctggttcctacgtcaccctggtcttctacacaaggaccttctccaacaccattgagggactcctcttcacgtggctgctggtgctggtatcctcccatgtaacgtggggccctacacgcaaggagccggcgccgggtccacggtggcgcagctggcttcttggaggcattgtggctgctggcttcttcaaccggcccacctttctggcctttgctgtggtccccctctacctctggggcactcgtggagccacaaaccctggtttgaagtctctgacccgggaggccctggtgctgctccctggggcgaccctcacagcagcggtgtttgtggccacggacagctggtatttctccagccccgcgacatccaggaaccttgtcctgacacctgtcaacttcctgcactacaacctgaatccccaaaacctggcgagacatggcacgcacgcgcggctcactcacctggcagtcaacggcttcctgctcttcggggtgctgcatgcccaggccctgcaggctgcgtggcaacagctgcaagtcggcctccaggcctctgcacaaatgggcctcctgagggcactgggtgcccggagcctgctgtccagccccaggtcctatctccttctcctctacttcatgcctctggccctgctatctgcctttagccaccaggaggctcggttcctgattcccctcctggtccccctggtcctgctttgtagtccacagacgcagcctgtgccttggaagggcactgtggtcctcttcaacgccctcggtgccctcctcttcggctgcctgcatcaggggggcctggtgcctggcctggagtacctggagcaggtggtccatgcccctgtgctcccaagcacacccacccactacacactcctcttcactcacacctacatgcccccccggcacctcctacacctcccaggcctgggggcaccagtggaggtggtggacatgggggggactgaggactgggccctgtgccaaaccctgaaaagcttcaccagacaaccagcctgccaagtggctggtgggccatggctctgccgcctctttgtggtaacccctggcaccaccaggcgtgccgtggagaagtgcagcttccccttcaagaatgaaacacttttatttccccatctgaccctggaggatccaccagccctgtcctccttgctgagtggggcttggagggaccacctcagtcttcacattgtggagctgggggaagaaacctgacaatatgacagagcacccactgcccaagactcagccatagaagatgccgccccaccttctacttgggtagctgggctgggacgctgggacaggaccccgtcctccttcatgactcccactgctgcctctcctgggcatggctgttagctgttctgccttctgggtgagctggcactcttctccctgagaccaaagatttgacctgtcggtcttgatgtcaaggtccccaaagaccaggttaagtgacgacacctgtctgttcctgccctgttgcttccagccactgtgatgtttgaaatatgtgatagtacctggttgtgaaaaaagacaatgaactgctagtgacattcctcaatgacctctcccaaacctcccatgatgccttacccttgctgtcatgacaaccctctggcttcctaagacccatctgcctatcgaaatatgtgcaagtcagtgagacgaagtatagagaacaggtggcccagatccaggggacccaacttctggccccttggtctgtcacctcctcgctgtgtgatcttgagaaagctccttccactcacccaccccacttcccagtctgttgggatcagaggaactttgaggtgtctgccggctaacattgtgtcattcctggagtccacagtacacgtcccctgcctcaacaggcacagctctcacaaagctcttcaagcatggaagtgggagttgtgttgtacttcatggcactctgatgcctgctgtctcagtgtttggttattatgcaaacaagtaatgtttgaaatatataatagcactggaaatt

SEQ ID NO: 89127 - DNA, 597 bp, Homo sapiens
gcggccgccggtcaggattcgcgacccgacatggagcgtccccgcagtccccaatgctcggccccggcctctgcctcagcttcggttaccctggcgcagctcctgcagctggtccagcagggccaggaactcccgggcctggagaaacgccacatcgcggcgatccacggcgaacccacagcgtcccggctgccgcggaggcccaagccctgggaggccgcggctttggctgagtcccttccccctccgaccctcaggataggaacggccccggcggagcctggcttggttgaggcagcgactgcgccttcttcatggcatacagtgggcccctgaggttccaggtcctttgcggcggcgatctggagggcgtggctacaggacccgggatgccattcagttactcatcttttatgctttcgtcctgacctgtctcaactagacttgctcctgcaaccaccatgggggttttgcatttacatttgtggaccatgttacagttaagaaaaatcctgtttcagtccttatatgtaataaaatgttttatgatgtaacttggccccagaatgattttgaagatacattaaaggaaagccc

SEQ ID NO: 89128 - DNA, 911 bp, Homo sapiens
gcggccgccggtcaggattcgcgacccgacatggagcgtccccgcagtccccaatgctcggccccggcctctgcctcagcttcggttaccctggcgcagctcctgcagctggtccagcagggccaggaactcccgggcctggagaaacgccacatcgcggcgatccacggcgaacccacagcgtcccggctgccgcggaggcccaagccctgggaggccgcggctttggctgagtcccttccccctccgaccctcaggataggaacggccccggcggagcctggcttggttgaggcagcgactgcgccttcttcatggcatacagtgggcccctgaggttccaggtcctttgcggcggcgatctggagggcgtggctacaggacccgggatgccattcagttactcatcttttatgctttcgtcctgacctgtctcaactagacttgctcctgcaaccaccatgggggttttgcatttacatttgtggaccatgttacagttaagaaaaatcctgtttcagtccttatatgtaataaaatgttttatgatgtaaaaaaaaaaaaaaaaaaaaaaaaaaaaaaaaaaaaaaaaaaaaaaaaaaaaaaaaaaaaaaaaaaaaaaaaaaaaaaaaaaaaaaaaaaaaaaaaaaaaaaaaaaaaaaaaaaaaaaaaaaaaaaaaataaaaaaacaaaaaaaaaactcaaaaaacaacacaacacacatgaaccccccttccccccgcaaccaatgcctttcccacactttaatactcccccccacatccacccccacttccctcatcacccccttcatccactcttaaaccaaacacctaccacgtttccaccaaacatcgaccctccctaggacacccccaccatatacacccttcccccccctttttcccgct

SEQ ID NO: 89129 - DNA, 1372 bp, Homo sapiens
agcggagctacctgctgagacagacaaggagagggtttcctgtgatgggatcagtcagatgcctgcctggccactccccctgaggggacctgggctcctcttaccattggcaggccggtataaacttgcggctcagatcaagctatgcctgatgctgccttaagccttatgaggtcgccaaggaaccgcaggtgaggattcaggagataattctgcaaacagaacttcctgagaactgagatgggggaaatcgctggtattagaagagtgaaaagaaactcctggagggcagaggcatgcctgccatcttcatcaatgcattaccaccacccaacactatcgggggacctgccctgataatcagtctacaggtgtatccagcagctccagagagacagcgaccagcgagaaggggccatgatgatggaggtggttttgtcaaaacgaaaatggggatatgtagggaaaagaaagagagatcagactgttactgtgtctacatagaaagggaagacataagagactccattttgaaaaagacctgtactttaaacaattgctttgctgagatgttgttaatctgtagctttgccccagccactttgccccaaccactttgacccaatctggagctcataaaaacatgtgttgtatgaaatcaaggtttaaggcatgtagggctgtgcaggacgtgccttgttaaccaaatgtttgcaagcagtatacttggtaaaagtcatcaccattctctcgtctcaataaaccaggggcacaatgcactgtggaaagccgcagggacctctgcccttgaaagctgggtattgtccaaagtttctccccatgtgatagtctgaaatatggcctcgtgggatgagaaagacctgacggtcccccagcgcgacacccataaaagatctgtgctgaggtggattagtcaaagaggaaagacttgcagttgagatagaggaaggccactgtctcctgactgcccctgggaactgaatgtctcggtataaaacacgattgtacatttgttcagttctgagatgggagaaaaaccgccctatggtgggaggcgagacatgtttacagcaatgctgccttgttatcctttactccactgagatgtctgggtggagagaaacataaatctggcttacatgcacgtccagtcatagtaccttcccttgaacttcattatgacatagattctattgctcacgtttgttgctgaccttctccttattatcaccctgccctcctactacattcctttttgctgaaataatgaagataataatcaataaaaactgagggaattcagagaacggtgccagtgcaggtccttagcatgctaagcgcaggtcccctg

SEQ ID NO: 89130 - DNA, 427 bp, Homo sapiens
gcccccactctggaccctgcttgggttcacagcattggtggaggtaagtagtattctcaatgtattgttagttgactttcattttgcttaggaaatgaggtttctgtatttttctgatccagtactagatttttttttttttttgagagtcctgatgatatttaactgggctaacgaacagttagtaagttcttagcatgtaatacaaaaaagtgtttgtaattttggcatttgttcttaaattacttgatacttaatatgttttctttcctataggtggggttgtcattgtgaaatttaagatcttcaaagaagagaatgtaatttataccatgaatatgttattttttcatgttggagcactgtaatactttcagtttgttttcttattgtttaaataaaatttttaattcttatattaagtgat

SEQ ID NO: 89131 - DNA, 294 bp, Homo sapiens
cttgaacccgggaggtggaggttgcagtgagccaagattgcaccactgcactccagcctgggtggcagagcaagactccgtctcaaaaaaaaaaaggaacaatgtctattcttcccaatttattatgagtaatcccaaggaggggggaggggtttaaaagtagaccaactgattttgaagttgatttgtaaaaataagtatctaagaatacccaagaaaacttgaaaaaagaatcatagtgtgaagcgaaatatgtcctatttgttgttaatgtactataaggcacgataatca

SEQ ID NO: 89132 - DNA, 525 bp, Homo sapiens
gttgtcagtgttgtgcagtcaaaagactaagaagtatctatagcacagtaaatgtatttgcatatagtaattattgctctgtgaaattgctgcttttgtataagatacaaacaggatataaagcaaagaggcaacatacagccttgagtccttagagaccttaaattggtgagtttgtcttctcatgcatatgccaatttgtgttgtaagcaatagggactgtctaacaaattgagaaaatacactgtgtgtgagttgttttggaatgtgttcttatatttgtcttttgtatgtattttctgaaatgtatacagttcacattacttaaagcaatgaaattatacctgtaagactagattcaagaggagctgaaaattgttccaactttcccatcttgagtgctaatagtttcttattgacaaaatttgcttaggggaatttaggacagtaaaaaactttgatcacattctcttcttaaacctatatctaaagaagactatcatatttaccagctgaagtttgaaa

SEQ ID NO: 89133 - DNA, 338 bp, Homo sapiens
ctaattgagtctcccgatctcttctcacccacactggctcatgctttcaggctggatttctgcctcagtcactcctttagtcattgaatacttaattgcctagcatccgagacctacaaccactgctctctttgcccctaaatcacagactaaagggtagatcctccttcttgcagctagaacttcctaaagaggatctgacacttgccttgctggatgtgtgaataccatgcactctcggctcctaaaagaaggctcagccctcctgggatcccctatatcatctcaggccccagacacccaccattcgcctgaagctgggctgtggaggtctttct

SEQ ID NO: 89134 - DNA, 538 bp, Homo sapiens
tatgtggagagggcacgcaggcagttggagacacgagttcagggagcgttctaggctgtggacgtagatttgggagttggtggtatgtaaatagaatttataaacatgagactgagtgaaagcatcatagcagagggaatgtttaaagaagagaggaggcctggggatgtttaacgcttagaggcacaggtatgaggagcctgtgaagcagaatgagaagtgtcaccaattgaggcagaaggagaatagtgaggaagtggaagctacagaagaaagtgtttcaggaaggaaggagttaccagctgtgacacatgtggtttaggacaagtgagttgagccttgaaaattggccattggcttcagaaaagtgtagtagttggtgaagttgaagaaagctgcttttagtgtggtgttgggaacaatgcctggcagaattgggctcaagaaacaatagaacaaggcaaggtggagacagcaaatacaggcaaatgtgttgggcagatattcaggtggttaccaagtaggcaggtagaaaaac

SEQ ID NO: 89135 - DNA, 321 bp, Homo sapiens
gtctgctctgtcttgagctatatcgcatccttggtcacttagtagcccaaggcctaatctgccatccttggtcacttagtagcccaagggctgatgaggccttggcgtatctggtctacttcctgtgggagtcagggccatgcaaattagccaggtccctgctatgtcgtggggctgtaagcgggtacgtgggtgttccaggagctacctcagtgtttatcttgaactcatgcatagcatggcactccatccgtcgaaggcctctcctccaggggcagctctgtctcaccacccccagctcctttttaaaattttttttta

SEQ ID NO: 89136 - DNA, 167 bp, Homo sapiens
tctacttgcagtgcttgagcatgtcacgtaataaactaccttgaattaattgaagatactttccattaatctttaatagtcaggctgttatgataatgtggtaaatcataatttggagatctgtctcagaaaaaatattatttgaatctttactcaccttacacaca

SEQ ID NO: 89137 - DNA, 249 bp, Homo sapiens
cacgtgggaggggtggcagtcacaggagcctgaggggggaaccacatcccaggaggaaccggagtctcatggacatgctgagacctcagatcctatcccaagagcagtgggaagcatggggatgcttcaggacccactctgtagccttccaagaatgaaggcttctagaacatttttttttctttttcttttttctgagatagagtttcgctctcattgcccaggctggagtgcagtggcgccatctcg

SEQ ID NO: 89138 - DNA, 543 bp, Homo sapiens
ggataagcaaagctcaatggagagaagggataactaacaaagtttgatttttgtaaattaagcttcattatcttctgtatcccacattccaaatctcacttaaaattcaggccatatttttcacattcgcccacatatcttcagatttgatacttacctgcttacagagtcacagaagccagtgagcctgtccagggagtgtgtgcagactgataacacaagagagtgaggcccaggttcaaatagcaattaaaggggtgtcttcaaaagagttaccaatgcagacagtgggaaaaggtggtaaatgaggagccaggagtcaataatctccatgtatgttttagaagaaaatcgttacaaatatggagtatcctcttgttaaatgcgtttgtgaagtcaaggaaacttgactaggaccgaaactaattttggaattgatctttggaattgacagttatgaattcactgtgaaatgggaggcagtggttattttagagtaaaaagaaaaaaagggtagacaattaattcaagaaatttggtaac

SEQ ID NO: 89139 - DNA, 459 bp, Homo sapiens
gagtggagacatttaaagaattgaacttgattccaaattgagattagtttggggccagtatcaacttgtattgatagatttttttttttgagaaggagtctcgctgtcgcccatgctggctccgcctcccaggttcatgccattttcctgcctcagcctcccgagtagctgggactacaggcgcccgccaccacgcctggctaatttttgtatttttagtagagacagggtttcactgtgttagccaggatggtctccatctcctgacctcgtgatctgcccgcctcacctcccaaagtgctgggattacaggcatgagccaccgtgcccggctgtgttgatagattttaaaccacaaaactggttgtattttaaaaatgttaatttgtaaatatagcatctagtattctctcctaaaacgatatattttgttctgtcttctgtaagggatttgagatt

SEQ ID NO: 89140 - DNA, 447 bp, Homo sapiens
gtggtgccagccccctcttccctggcaacatcctgtctcaggaggatcctcttgggccctcccttcccttggcggggcaagggggtgatgggggggcacccactcaccaacacagtggccaccctcactcccatctctcttgaccattccaatcttatacagacagggaggagtggggagtagggggaaggggagctcacagcagcaggaccaattcttccgcctctactagggccatggggaagggggctggccctaagcttccatgatctctttaggaggtggtttatttagcatctttgtccacagctgtggccctggtaaccaattctggggcaaccggaaatgtccccgctgcatccccttggttatggtgagccttcccttttggaacatgtgacacgaaaccagcagcctggcgttgctagtgcctaggaaaatgcccgg

SEQ ID NO: 89141 - DNA, 297 bp, Homo sapiens
acgtgcttgtgctgagaaaagatgtcaaagaatcaaatcaacagtcctccctttcccgtgacaaaagggctaacagaggccctgaacaggttttcctttggccagttgccaagggactcacccaaccatccacctacaaatgtgccgcggagccttctcactgggagggctccagcgagggtcacagccactcttcagacaaaaagctctgttcccaaagaggctcctgccagaccgaagctctgctgttgagacacacgcttcatggctctgaaatccccgcagagaataccctcc

SEQ ID NO: 89142 - DNA, 553 bp, Homo sapiens
cctttcccttttggaaaatttttttgtaccttcatatcacagctgaatagttatcaatgccatttccatttggaagtatctaaataaccacaatgtgatcacagcttctccacgagccttcctgaagtaaagctggtatgcttgctataatacttggaacctgttgctttctcttcctcactctttaaatgtcataaggtcacacagttcttggaatcagaactattcagttatttcttcatgattctgcctggctttctgagtcttctcattcggcatgttatgtaaaagtctgaacaacaatgatgacgcagacgagagcaacatacgtttttattttttgataggtttttatttttttgataccagagggaattaactatgatcacatcgtgctctctctgttcagcatcacacgcccacatactgcagtgtgggagtagattggtacttactgagcacttagaaacatcacgcatcaggaaccgggtcagggtgacagcatcctacggtcatatcatgaaggaagcctcccttacaaacctaaaaaaaa

SEQ ID NO: 89143 - DNA, 338 bp, Homo sapiens
caatctgaataaccctgtaggtatttaagaaattgagttcataactggaaatctcgtaaaataaatcgtcaggccaagatggcatcattggagaattctgtgaaacacttgaagaaaaattaacctcaattttatataatgtatcccagaaaacagaagaggaaatacttctcaacttattttctgaggttaatattaccctgataccaaactagataaagataatacaaaaaaagacaactgcacatcaatgtcttgaatccaggaggcagaggttgcagtgagccgagatcgcaccactgcactccagcctggatgacagaacgagactccgtctc

SEQ ID NO: 89144 - DNA, 310 bp, Homo sapiens
ttaaaacagtcatggcttagtctagctaatttgaattcattatggagaggttgcatctaatttttgtaaaactatgacatgtataactcctgaaaagaggcttaactttctagcaagggcaaaatgggattacaggtgtgagctaccacgcctggccctctgccaccagattatatgcatctcctgttttgaccaagtttaagttggaaccatgaagagaaggggattctgtcaagcatagttcctagcttaaccaaatggactcagtacaaacccctacagtccaccctttgtcaacctgacatctgtc

SEQ ID NO: 89145 - DNA, 465 bp, Homo sapiens
agtttgttggaatcagtattcaaataatgtgcatacattatcactatctgacagatctcttaagcctcttttaatctacagcacaggttggcaaactactgcccataggcaggctggctggctgcctgttttataaataaaagttttgttagaacacagctgcctatagattgctttaggcaggaaggaccttaaaggcagggcctactcttctttcttcctggctctcccacacgcagcccagaggccctcaatgcctgcttggagattggaaacatgaaggtttggcttaagtgggagttcttaatatgtagcagcctcctctttcctgcctagtcaaagaaaatagtttaaattgatttcagtttgcacagctaattttttattttaaaaagtgtttaacgacatgactctgaatctgagggcttctggttgttttttgctccttccctcttcagcttggtt

SEQ ID NO: 89146 - DNA, 733 bp, Homo sapiens
gacttacttttccacagggacttacttttccacagggacttacttttccacagggacttacttttccacaggggatccctctcactgtggtttgccatatgctccacactgcgtcttatcccaccaatgacaccaccaacacaataggtctatagaataatatggcccaagagtcagagctccttgcactgcatctgaaacctgatccagaactcttttctgttttacataactctcaaatctggcagacttccatgttacctggcatataggctggacgagcatcgtaagtgtagaatgtgttccctccgaaattcaaacaaccttttgttcaggtatcgtgcttttttcttaatggtagtgagtataagatgcagcaaactaattattacttggaggggatatctcagtgtaccccctgactactgggctcctaaaaatgttgctgaagagacaggtccttgaattgttgtagggtttatttctctctttgtggagtgcatgattcctactaatgcaaacagcacattagccaactgtgacttttgcttctctatcagcatgatttgatggatataatggatcgttgtgatgttctgctagatgtccacacactctagaagttttggactatgttaaaatagtgcataggaaaacgaatatggagttgggtgtaaaactgtaaaaaatataattccctgttgcatgtgaatacatgctcttccttatcctt

SEQ ID NO: 89147 - DNA, 326 bp, Homo sapiens
cgattctgcttaaggaatatttacaaccttagattcataaaaatatcctgtactgtaagcattgaactttttatatatttgtgaataaacaatttaccagccccatttactgggcagcctatctttttcctattggtctgcaatgccaattacatcacatatcaagttttcagatgtatgtgggtctgtttttgggctcttccttctgtagcatctgaatccttaatgagatttaatattccatttgtgaggaactacacctttattattttaagcatactgctgtactatcagtatcactgaatcagtctatcttttagtcaatc

SEQ ID NO: 89148 - DNA, 501 bp, Homo sapiens
cactaagaaacatgagtttaggaatcatcatagatgattgtttttaaaaactcaattatcattgatgaaaacaggacttcaatttgctattggttcatttaccatcgatattctctataaagattttttttttcagcagccatgtcccaggctcagatcctaataatgtcagcactggatcttgtgtgtgtgttaccttaacacacacacaagatgtgttatcttaagccagtgtgttatcttaagccagtacgaggcaatacacacagaaaaaaataattttgagaatagatctgtttgacaacacctgacgtctttccagtgggggttgcggggacgtagggaatagcagtgcaaggtctttaagatagtgtctaaaaatctaagctgggctgggcatgctggctcatgcctgtaatctcaacattttgttaagccaaggcaggtggatcacaaggtcaggagttcgagaccagcctggccaacatggtgaaaccccat

SEQ ID NO: 89149 - DNA, 365 bp, Homo sapiens
ggagaatgatgcctggagcagcagctgaaataagacacacctatcacttgtctttgtgtgttcactttccctttaggtctttaataccttgttactcagagtgcgctccaagaagaagctgcaccagcatcacctgggaacttgttagaaatgcagactctcaggctcctcctcagacctcctgaatcaatctgcttgttattcagatcctcaggcaattcctattcacttcaaagtttgagaaccaccattctaaagaattgatagaggacttgcagtgttctttaatgactgagccctctagctttgccatttcactgtctctaggacagcaagatttttggaagtggggtgggtatcatgct

SEQ ID NO: 89150 - DNA, 301 bp, Homo sapiens
tgcctgattgctcagtgatcaatcattttgacctcctgattaagtgaaatttgcatcggatctatcccacttcctactgtagagtataattaatcttgaagactgtgagccagagggcctggaggctcctctgtctattatctgagtgtccttgggcagttatttaatacatttctgctcccccagttttcactctgtacagtggagataaggttgttgtgtgaggactaatgagtcctaaaatattgccttacgattaaaattactttcacagactatttgcagcattaaatataatagg

SEQ ID NO: 89151 - DNA, 428 bp, Homo sapiens
actgtcaccactgtggaataagaattccgggaagaagagacttagatacagggtctacagctgtctgttcccatgccacggaaggttcttccagccaccttgttatggcgatcctcctggcagggaatgagagccatctccactgcctccctttgagtggttatctggcttgtgttgcttgtcttgtcgggagaccaagggccttgcaaagtaggtgcctgtgaagagtgtcagctgaggccctgcagggagctggaagcttggaaggcctgggagaaaatgcctggctaatgtatgaggcctggaagactcttctttgttaagaagattcatgggtctctgaggagtggagtaatcaggactaggagaagatgttgggccaagccttcgtatcctatatccatctgcttgaacattttttttttttt

SEQ ID NO: 89152 - DNA, 598 bp, Homo sapiens
acatgaatctatgaatggtctgcaaaccacttatactccaggtttcaattctgctgccagtaataatagtaataataccatcattctattctagtagcacagtgcaaatttaagataattagaagatgatgatagaaatttgaaagcaatggattacaaaacaagactgcatcaaagcataacacgcaacacaacactttttcaattatgtacataacctggaaaaactagttggcaatgaaaaaaatgtgttgagaagtaccttattaattcattaaatatttctgtaatcctatgtttctttaaaaagaaaaaaagattactagtctaagtgagcttttatctttgttaagcagcatccttttaacctccatcatctctaataactaaaaaaaaaaaaaaaaaaaaaaaaaaaaacaagagaagttaaagaagcaaaccagcaagagaaactgtagttgctgtatcaatgacaattattccagtgataatgacctgactttttgggttggtcttctagctagtccacagggatccactgttcaggacggtgttaggggaggtgggctttgtcattttgcacaaggtttgacaggtt

SEQ ID NO: 89153 - DNA, 4695 bp, Homo sapiens
  misc_feature (320)..(320): n is a, c, g, or t
  misc_feature (374)..(374): n is a, c, g, or t
  misc_feature (4445)..(4445): n is a, c, g, or t
  misc_feature (4479)..(4479): n is a, c, g, or t
ggcacgaggccgcgcaggggacgggagtgagagcgggagtgagagcaggaacgacgcagagcggccgtcgccgtgcccgggtctcagggcgcctggctgaagtgagcatggcttcagtggcctgggccgtcctcaaggtgctgctgcttctccccactcagacttggagacccgtaggagcaggaaatccacctgactgtgattccccactggcctctgccttgcctaggtcatccttcagcagctcctcagagctgtccagcagccacggcccggggttttcaaggcttaatcgaagagatggagctggtggctggacnccacttgtgtcaaataaataccaatggctgcaaattgaccttggagagagaatngaggtcactgctgtcgccacccaaggaggatatgggagctctgactgggtgaccagctacctcctgatgttcagtgatggtgggagaaactggaagcagtatcgccgagaagaaagcatctggggttttccaggaaacacaaacgcagacagtgtggtgcactacagactccagcctccctttgaagccaggttcctgcgctttctccctttagcctggaaccctaggggcaggattgggatgcggatcgaagtgtacggatgtgcatataaatctgaggtggtttattttgatggacaaagtgctctgctgtatagacttgataaaaaacctttaaaaccaataagagacgttatttctttgaaatttaaagccatgcagagcaatggaattctacttcacagagaaggacaacatggaaatcacattactctggaattaattaaaggaaagcttgtcttttttcttaattcaggcaatgctaagctgccttccactattgctcctgtgaccctcaccctgggcagcctgctggacgaccagcactggcattccgtcctcatcgagctcctcgacacgcaggtcaacttcaccgtggacaaacacactcatcatttccaagcaaagggagattccagttacttggatcttaattttgagatcagctttgggggaattccgacacccggaagatcgcgggcattcagacgtaaaagctttcatgggtgtttagaaaatctttattataatggagtggatgttaccgaattagccaagaaacacaaaccacagatcctcatgatgggaaatgtgtccttctcatgtccacagccacagactgtccctgtgacttttctgagctccaggagttatctggctctgccaggcaactctggggaggacaaagtgtctgtcacttttcaatttcgaacgtggaacagagcaggacatttgcttttcggcgaacttcgacgtggttcagggagtttcgtcctctttcttaaggatggcaagctcaaactgagtctcttccagccgggacagtcaccaaggaatgtcacagcaggtgctggattaaacgatgggcagtggcactctgtgtccttctctgccaagtggagccatatgaatgtggtggtggacgatgacacagctgttcagcccctggtggctgtgctcattgattcaggtgacacctattattttggagagacgccgcgtggacggtggtgcagcacggtggccccgacgcggtgaccctccgaggtgcccccagcgggcacccgcgctcggctgtgtccttcgcgtacgcagcgggcgcggggcagctgcggtccgcggtgaacctggcggagcgctgcgagcagcggctggctctgcgctgcgggacggcgcggcgcccggactcacgagatggaaccccactgagctggtgggttggaagaaccaatgaaacacacacttactggggaggttctctgcctgatgctcaaaagtgtacttgtggattagaggggaactgcattgattctcagtattactgcaactgtgatgctggccggaatgaatggactagtgacacaatagtcctttcccaaaaggagcacctgccagtcactcagattgtgatgacagacgcaggccgaccacattccgaagcagcttatacactggggccactgctctgccgcggagatcagtcattctggaattcagcttccttcaacactgagacttcataccttcatttccctgctttccacggagaactcactgctgacgtgtgcttcttttttaagaccacagtttcctccggggtgtttatggagaacctggggatcacagatttcatcaggattgagctgcgtgctcccacagaagtgaccttttccttcgatgtggggaatggaccttgtgaggtcacggtgcagtcacccactccctttaatgacaatcagtggcaccacgtgagggcagagagaaatgttaaaggagcgtctcttcaagttgatcagcttcctcagaagatgcagcctgcccctgctgatgggcacgttcgtttacagctcaacagccagctcttcattggtggaacggccaccagacagagaggctttctaggatgcattcggtctctgcagttgaacggggtggccctggatctggaagaaagagccacagtgacgccaggagtggagccagggtgtgcaggacactgcagcacctatggacacttgtgtcgcaatggagggagatgcagagagaaacgcaggggggtcacctgtgactgtgccttctcagcctatgatgggccgttctgctccaatgagatttccgcatattttgcaactggctcctcaatgacataccattttcaagaacattacactttaagtgaaaactccagctctctcgtttcttcattacacagagatgtaacattgaccagagaaatgatcacactgagcttccgaaccacacgaactccgagcttattgctgtatgtgagctctttctatgaggaatacctttcagttatcctcgccaacaatggaagtttgcagattaggtacaagctagatagacatcaaaatcctgatgcatttacctttgattttaaaaacatggctgatgggcaacttcaccaagtgaagattaacagagaagaagctgtggtcatggtagaggttaaccagagcacaaagaaacaagtcatcttgtcctcagggacagaattcaacgccgtcaaatctctcatattgggaaaggttttagaggctgccggcgcggacccggacacaaggcgggcggcgactagtggcttcactggctgcctctcggcggtgcgcttcggccgcgctgctcccctgaaggcggcgctgcgccccagcggcccctcccgggtcaccgtccgcggccacgtggcccctatggcccgctgcgcagcgggggcggcgtccggctccccggcgcgggaactggctccccgactcgcggggggcgcaggtcgttctggaccagcggatgagggagagcccttggttaatgcagacagaagagactctgctgtcatcggaggtgtgatagcagtggtgatatttattttgctttgcatcactgccatagccatacgcatctatcaacagagaaagttacgcaaagaaaatgagtcaaaagtctcaaaaaaagaagagtgctaggacagctctaaacagtgagctcgatgtgcaaaacgcagtccatgaaaaccagaaagagcgagtcttctgattggcagctgtggctgtctctatcatcgtgactgtggacttccctgctgttgccatcagggtgcacacaagcaggtgcagtgctgtcacctggctgaagacctgcagcctcggagcctctgggaggtccctttctccctcggtgaaacacagtcctccacatcaatttccaaacaatgaattaggtatggccattcatcactgttcagtagtttccccgtccaaaggctctcttccaaaactgcagtttgatctgtgttaataattgtggggttttagatgagaaaatggctataaagctgtggccctactttattttttaaaaatgacagaacttttgttcagatgtaaaagacaaaattgcactttaatgttttttgttacttgaaaacatatctgggatccctttttttggtcctctgctgatatttataaaacaagaaatgcttcttggactaccttcactggcatttccatagtcctggaatccagagccaagtggcctatctaaaattcacagcccttttattctcctgtgtgatggttaatacaacacagttgaagcctggaaacactaccattatttttggtgtattgctttttctaattgactgtttttaatgattttgatacattttaatgttgaaattaatattgaatgttagctatgaaattttagtattgaattttataatggaacagaacattggtaggtaacaagatgcaagaggatgtcaatacaagattgtctgcctgtttttctttgtaatttgtaattacagtttttgtaacttgtgattangtttttaactaaatttaccaccagatacaaacantacttcttacacagagttatcctttatttatatcattaagacgtgaatgaaacatcatcctaacttacttccccaagatattgagaggtcatatctgtttttctttatcattcatttctttttctaaaagttgttactgatatgcttttgatttcctatgactctattatgttgtacagaacatcttttcaatttattaaaaaaatagcttaactg

SEQ ID NO: 89154 - DNA, 5215 bp, Homo sapiens
  misc_feature (320)..(320): n is a, c, g, or t
  misc_feature (374)..(374): n is a, c, g, or t
  misc_feature (4612)..(4612): n is a, c, g, or t
  misc_feature (4716)..(4716): n is a, c, g, or t
ggcacgaggccgcgcaggggacgggagtgagagcgggagtgagagcaggaacgacgcagagcggccgtcgccgtgcccgggtctcagggcgcctggctgaagtgagcatggcttcagtggcctgggccgtcctcaaggtgctgctgcttctccccactcagacttggagacccgtaggagcaggaaatccacctgactgtgattccccactggcctctgccttgcctaggtcatccttcagcagctcctcagagctgtccagcagccacggcccggggttttcaaggcttaatcgaagagatggagctggtggctggacnccacttgtgtcaaataaataccaatggctgcaaattgaccttggagagagaatngaggtcactgctgtcgccacccaaggaggatatgggagctctgactgggtgaccagctacctcctgatgttcagtgatggtgggagaaactggaagcagtatcgccgagaagaaagcatctggggttttccaggaaacacaaacgcagacagtgtggtgcactacagactccagcctccctttgaagccaggttcctgcgctttctccctttagcctggaaccctaggggcaggattgggatgcggatcgaagtgtacggatgtgcatataaatctgaggtggtttattttgatggacaaagtgctctgctgtatagacttgataaaaaacctttaaaaccaataagagacgttatttctttgaaatttaaagccatgcagagcaatggaattctacttcacagagaaggacaacatggaaatcacattactctggaattaattaaaggaaagcttgtcttttttcttaattcaggcaatgctaagctgccttccactattgctcctgtgaccctcaccctgggcagcctgctggacgaccagcactggcattccgtcctcatcgagctcctcgacacgcaggtcaacttcaccgtggacaaacacactcatcatttccaagcaaagggagattccagttacttggatcttaattttgagatcagctttgggggaattccgacacccggaagatcgcgggcattcagacgtaaaagctttcatgggtgtttagaaaatctttattataatggagtggatgttaccgaattagccaagaaacacaaaccacagatcctcatgatgggaaatgtgtccttctcatgtccacagccacagactgtccctgtgacttttctgagctccaggagttatctggctctgccaggcaactctggggaggacaaagtgtctgtcacttttcaatttcgaacgtggaacagagcaggacatttgcttttcggcgaacttcgacgtggttcagggagtttcgtcctctttcttaaggatggcaagctcaaactgagtctcttccagccgggacagtcaccaaggaatgtcacagcaggtgctggattaaacgatgggcagtggcactctgtgtccttctctgccaagtggagccatatgaatgtggtggtggacgatgacacagctgttcagcccctggtggctgtgctcattgattcaggtgacacctattattttggaggctgcctggacaacagctctggctctggatgtaaaagccccctgggagggtttcagggctgcctaaggctcatcaccattggtgacaaagcggtggatcccatcttagtacagcagggggcgctggggagtttcagggacctccagatagactcctgcggcatcacagacaggtgcttgcccagctactgtgagcatgggggcgagtgttcccagtcgtgggacaccttctcctgtgactgtctaggcacaggctatacgggcgagacctgccattcctctctctacgagcagtcttgtgaagcccacaagcaccgagggaacccgtctgggctttactatattgatgcagatggaagtggccccctgggaccatttcttgtgtactgcaatatgacagagacgccgcgtggacggtggtgcagcacggtggccccgacgcggtgaccctccgaggtgcccccagcgggcacccgcgctcggctgtgtccttcgcgtacgcagcgggcgcggggcagctgcggtccgcggtgaacctggcggagcgctgcgagcagcggctggctctgcgctgcgggacggcgcggcgcccggactcacgagatggaaccccactgagctggtgggttggaagaaccaatgaaacacacacttactggggaggttctctgcctgatgctcaaaagtgtacttgtggattagaggggaactgcattgattctcagtattactgcaactgtgatgctggccggaatgaatggactagtgacacaatagtcctttcccaaaaggagcacctgccagtcactcagattgtgatgacagacgcaggccgaccacattccgaagcagcttatacactggggccactgctctgccgcggagatcagtcattctggaattcagcttccttcaacactgagacttcataccttcatttccctgctttccacggagaactcactgctgacgtgtgcttcttttttaagaccacagtttcctccggggtgtttatggagaacctggggatcacagatttcatcaggattgagctgcgtgctcccacagaagtgaccttttccttcgatgtggggaatggaccttgtgaggtcacggtgcagtcacccactccctttaatgacaatcagtggcaccacgtgagggcagagagaaatgttaaaggagcgtctcttcaagttgatcagcttcctcagaagatgcagcctgcccctgctgatgggcacgttcgtttacagctcaacagccagctcttcattggtggaacggccaccagacagagaggctttctaggatgcattcggtctctgcagttgaacggggtggccctggatctggaagaaagagccacagtgacgccaggagtggagccagggtgtgcaggacactgcagcacctatggacacttgtgtcgcaatggagggagatgcagagagaaacgcaggggggtcacctgtgactgtgccttctcagcctatgatgggccgttctgctccaatgagatttccgcatattttgcaactggctcctcaatgacataccattttcaagaacattacactttaagtgaaaactccagctctctcgtttcttcattacacagagatgtaacattgaccagagaaatgatcacactgagcttccgaaccacacgaactccgagcttattgctgtatgtgagctctttctatgaggaatacctttcagttatcctcgccaacaatggaagtttgcagattaggtacaagctagatagacatcaaaatcctgatgcatttacctttgattttaaaaacatggctgatgggcaacttcaccaagtgaagattaacagagaagaagctgtggtcatggtagaggtaatcccacaaatgcagaagtcaaactaactaatattattattttaagaacaaataatctaatgaaaaaatttgataataaatattaatagaagagcaacccattcagtgctgctcttccataagtcaagaagaagccaaatatggccaggatctgggagagaggaggtggttgtttattctgtattgctttgttttgtttgtttagcaatgcaattctgtcaaaggtattattaatattttactatttaaaatatcaaaatatctttatttgttttactttactcaataggggaatgttctctagtttatcatagtgactgctggtggaatctattcattgatattgcagtgggaacttgtcttattctgattataaaagaacaaatactttagcaacttaaaaacacggtttaaaagcacacaacatagttattaaaatgggaataagtaagaaaatagacctgagtcaccacagaggaagtaaattacacattgtcatcggcattggaaggaaaatatactgtatagagaacaacaatgcttggttttatgtttcagattttctccacagaatgagtacatatttaagtttaaaacaaccaattccatctttttcatggattctgccaattatagatccttccattatgaagaagagtaaagccagcaagtgggtacatcgtggatagagtggtagctgatggcatcataggaattgcttataaaatagcttctctttctaaatgattaattatttgaaggtggcttcttgagcttttgtaatggtacttaaaagtgatttattttcatctttcctttcctcatcttcctttgcttccttatcattaaaattgtactttctgttgatgtttgcttctcatgggacatctaataggttaaccagagcacaaagaaacaagtcatcttgtcctcagggacagaattcaacgccgtcaaatctctcatattgggaaaggttttaggtaagtaggagaaagagctttttcccaaataagtgtcatgtcacaaactctggaagcattcatcatgctgaaagaagctccttgtcttacttgaataataatttcacagtgagtgacaatcaaggtgcaaactgtactcttgcctgagtgtacatataatcatgantaagtgctacctgtgagatgtgcaagggcgttcctggaaaaatacctccacacttaacctctcacttggcaatcatgcataatgaatcacggtatttttctaanccttcttgaaaagtgaaatgttgtcaaagctgacacgaagttcacagattatgtatgtattaatcaacatcaactccggagaccatcattcaatgataaaactacgtttgagttgaacacaagagaaaaaactggtaatcttattacagcagatgaatacagttttatttttctctcaagccctgctttgcctgttgtttccatcctttttgactttagtatctaacaggaatggggaggcatattcataaatatctgttacgcaaggtagaaagttacagtaattgtctatcatattgtctatcataatctgttgtaaaagcacagttagctttacatttaataaaggaactgaggaaagtaatctttttttaaaaaaacccatcttatgtaactcaattaagaaaatgaactatactttaatattaggatcaaaaagttgaataatatttattatatacatctttgtttccttccaaataaaggagacatggaattg

SEQ ID NO: 89155 - DNA, 5843 bp, Homo sapiens
  misc_feature (320)..(320): n is a, c, g, or t
  misc_feature (374)..(374): n is a, c, g, or t
  misc_feature (5593)..(5593): n is a, c, g, or t
  misc_feature (5627)..(5627): n is a, c, g, or t
ggcacgaggccgcgcaggggacgggagtgagagcgggagtgagagcaggaacgacgcagagcggccgtcgccgtgcccgggtctcagggcgcctggctgaagtgagcatggcttcagtggcctgggccgtcctcaaggtgctgctgcttctccccactcagacttggagacccgtaggagcaggaaatccacctgactgtgattccccactggcctctgccttgcctaggtcatccttcagcagctcctcagagctgtccagcagccacggcccggggttttcaaggcttaatcgaagagatggagctggtggctggacnccacttgtgtcaaataaataccaatggctgcaaattgaccttggagagagaatngaggtcactgctgtcgccacccaaggaggatatgggagctctgactgggtgaccagctacctcctgatgttcagtgatggtgggagaaactggaagcagtatcgccgagaagaaagcatctggggttttccaggaaacacaaacgcagacagtgtggtgcactacagactccagcctccctttgaagccaggttcctgcgctttctccctttagcctggaaccctaggggcaggattgggatgcggatcgaagtgtacggatgtgcatataaatctgaggtggtttattttgatggacaaagtgctctgctgtatagacttgataaaaaacctttaaaaccaataagagacgttatttctttgaaatttaaagccatgcagagcaatggaattctacttcacagagaaggacaacatggaaatcacattactctggaattaattaaaggaaagcttgtcttttttcttaattcaggcaatgctaagctgccttccactattgctcctgtgaccctcaccctgggcagcctgctggacgaccagcactggcattccgtcctcatcgagctcctcgacacgcaggtcaacttcaccgtggacaaacacactcatcatttccaagcaaagggagattccagttacttggatcttaattttgagatcagctttgggggaattccgacacccggaagatcgcgggcattcagacgtaaaagctttcatgggtgtttagaaaatctttattataatggagtggatgttaccgaattagccaagaaacacaaaccacagatcctcatgatgggaaatgtgtccttctcatgtccacagccacagactgtccctgtgacttttctgagctccaggagttatctggctctgccaggcaactctggggaggacaaagtgtctgtcacttttcaatttcgaacgtggaacagagcaggacatttgcttttcggcgaacttcgacgtggttcagggagtttcgtcctctttcttaaggatggcaagctcaaactgagtctcttccagccgggacagtcaccaaggaatgtcacagcaggtgctggattaaacgatgggcagtggcactctgtgtccttctctgccaagtggagccatatgaatgtggtggtggacgatgacacagctgttcagcccctggtggctgtgctcattgattcaggtgacacctattattttggaggctgcctggacaacagctctggctctggatgtaaaagccccctgggagggtttcagggctgcctaaggctcatcaccattggtgacaaagcggtggatcccatcttagtacagcagggggcgctggggagtttcagggacctccagatagactcctgcggcatcacagacaggtgcttgcccagctactgtgagcatgggggcgagtgttcccagtcgtgggacaccttctcctgtgactgtctaggcacaggctatacgggcgagacctgccattcctctctctacgagcagtcttgtgaagcccacaagcaccgagggaacccgtctgggctttactatattgatgcagatggaagtggccccctgggaccatttcttgtgtactgcaatatgacagagacgccgcgtggacggtggtgcagcacggtggccccgacgcggtgaccctccgaggtgcccccagcgggcacccgcgctcggctgtgtccttcgcgtacgcagcgggcgcggggcagctgcggtccgcggtgaacctggcggagcgctgcgagcagcggctggctctgcgctgcgggacggcgcggcgcccggactcacgagatggaaccccactgagctggtgggttggaagaaccaatgaaacacacacttactggggaggttctctgcctgatgctcaaaagtgtacttgtggattagaggggaactgcattgattctcagtattactgcaactgtgatgctggccggaatgaatggactagtgacacaatagtcctttcccaaaaggagcacctgccagtcactcagattgtgatgacagacgcaggccgaccacattccgaagcagcttatacactggggccactgctctgccgcggagatcagtcattctggaattcagcttccttcaacactgagacttcataccttcatttccctgctttccacggagaactcactgctgacgtgtgcttcttttttaagaccacagtttcctccggggtgtttatggagaacctggggatcacagatttcatcaggattgagctgcgtgctcccacagaagtgaccttttccttcgatgtggggaatggaccttgtgaggtcacggtgcagtcacccactccctttaatgacaatcagtggcaccacgtgagggcagagagaaatgttaaaggagcgtctcttcaagttgatcagcttcctcagaagatgcagcctgcccctgctgatgggcacgttcgtttacagctcaacagccagctcttcattggtggaacggccaccagacagagaggctttctaggatgcattcggtctctgcagttgaacggggtggccctggatctggaagaaagagccacagtgacgccaggagtggagccagggtgtgcaggacactgcagcacctatggacacttgtgtcgcaatggagggagatgcagagagaaacgcaggggggtcacctgtgactgtgccttctcagcctatgatgggccgttctgctccaatgagatttccgcatattttgcaactggctcctcaatgacataccattttcaagaacattacactttaagtgaaaactccagctctctcgtttcttcattacacagagatgtaacattgaccagagaaatgatcacactgagcttccgaaccacacgaactccgagcttattgctgtatgtgagctctttctatgaggaatacctttcagttatcctcgccaacaatggaagtttgcagattaggtacaagctagatagacatcaaaatcctgatgcatttacctttgattttaaaaacatggctgatgggcaacttcaccaagtgaagattaacagagaagaagctgtggtcatggtagaggtaatcccacaaatgcagaagtcaaactaactaatattattattttaagaacaaataatctaatgaaaaaatttgataataaatattaatagaagagcaacccattcagtgctgctcttccataagtcaagaagaagccaaatatggccaggatctgggagagaggaggtggttgtttattctgtattgctttgttttgtttgtttagcaatgcaattctgtcaaaggtattattaatattttactatttaaaatatcaaaatatctttatttgttttactttactcaataggggaatgttctctagtttatcatagtgactgctggtggaatctattcattgatattgcagtgggaacttgtcttattctgattataaaagaacaaatactttagcaacttaaaaacacggtttaaaagcacacaacatagttattaaaatgggaataagtaagaaaatagacctgagtcaccacagaggaagtaaattacacattgtcatcggcattggaaggaaaatatactgtatagagaacaacaatgcttggttttatgtttcagattttctccacagaatgagtacatatttaagtttaaaacaaccaattccatctttttcatggattctgccaattatagatccttccattatgaagaagagtaaagccagcaagtgggtacatcgtggatagagtggtagctgatggcatcataggaattgcttataaaatagcttctctttctaaatgattaattatttgaaggtggcttcttgagcttttgtaatggtacttaaaagtgatttattttcatctttcctttcctcatcttcctttgcttccttatcattaaaattgtactttctgttgatgtttgcttctcatgggacatctaataggttaaccagagcacaaagaaacaagtcatcttgtcctcagggacagaattcaacgccgtcaaatctctcatattgggaaaggttttaggtcgttctggaccagcggatgagggagagcccttggttaatgcagacagaagagactctgctgtcatcggaggtaacaaggccctgaatgacctggtgcttgtcattatcgctttagataatgataccattacttagcacaatgggaaatatatgtgtgatagcagtggtgatatttattttgctttgcatcactgccatagccatacgcatctatcaacagagaaagttacgcaaagaaaatgagtcaaaagtctcaaaaaaagaagagtgctaggacagctctaaacagtgagctcgatgtgcaaaacgcagtccatgaaaaccagaaagagcgagtcttctgattggcagctgtggctgtctctatcatcgtgactgtggacttccctgctgttgccatcagggtgcacacaagcaggtgcagtgctgtcacctggctgaagacctgcagcctcggagcctctgggaggtccctttctccctcggtgaaacacagtcctccacatcaatttccaaacaatgaattaggtatggccattcatcactgttcagtagtttccccgtccaaaggctctcttccaaaactgcagtttgatctgtgttaataattgtggggttttagatgagaaaatggctataaagctgtggccctactttattttttaaaaatgacagaacttttgttcagatgtaaaagacaaaattgcactttaatgttttttgttacttgaaaacatatctgggatccctttttttggtcctctgctgatatttataaaacaagaaatgcttcttggactaccttcactggcatttccatagtcctggaatccagagccaagtggcctatctaaaattcacagcccttttattctcctgtgtgatggttaatacaacacagttgaagcctggaaacactaccattatttttggtgtattgctttttctaattgactgtttttaatgattttgatacattttaatgttgaaattaatattgaatgttagctatgaaattttagtattgaattttataatggaacagaacattggtaggtaacaagatgcaagaggatgtcaatacaagattgtctgcctgtttttctttgtaatttgtaattacagtttttgtaacttgtgattangtttttaactaaatttaccaccagatacaaacantacttcttacacagagttatcctttatttatatcattaagacgtgaatgaaacatcatcctaacttacttccccaagatattgagaggtcatatctgtttttctttatcattcatttctttttctaaaagttgttactgatatgcttttgatttcctatgactctattatgttgtacagaacatcttttcaatttattaaaaaaatagcttaactg

SEQ ID NO: 89156 - DNA, 95 bp, Homo sapiens
gatcacagatttcatcaggattgagctgcgtggtaagctcgccactctggacaagtcacagggtacccattatttagcaataaaagctttaactc

SEQ ID NO: 89157 - DNA, 358 bp, Homo sapiens
gttttatgtatgtaattggttttgctagccacatgtcaagttattgtgtcacttgggacaaagaaaaaaagaaatgtgttgaaaattcagctgtctcagaaacctaataatcagctgcatgctaatggatatatttatctaaagtttgtcaatataattagagaaccttgatggcagacccagtaatcacgtcatgtggggttatcttgcatatgctgctctttcacattaacctgtttttggttaacctgtttttggtaagacacttattttttgatgattgaaaaagggaaacagcagttgtatctgttttcttttaggtgcttgcccagctactgtgagcatgggggcgagtgtt

SEQ ID NO: 89158 - DNA, 5161 bp, Homo sapiens
  misc_feature (320)..(320): n is a, c, g, or t
  misc_feature (374)..(374): n is a, c, g, or t
  misc_feature (4612)..(4612): n is a, c, g, or t
  misc_feature (4716)..(4716): n is a, c, g, or t
ggcacgaggccgcgcaggggacgggagtgagagcgggagtgagagcaggaacgacgcagagcggccgtcgccgtgcccgggtctcagggcgcctggctgaagtgagcatggcttcagtggcctgggccgtcctcaaggtgctgctgcttctccccactcagacttggagacccgtaggagcaggaaatccacctgactgtgattccccactggcctctgccttgcctaggtcatccttcagcagctcctcagagctgtccagcagccacggcccggggttttcaaggcttaatcgaagagatggagctggtggctggacnccacttgtgtcaaataaataccaatggctgcaaattgaccttggagagagaatngaggtcactgctgtcgccacccaaggaggatatgggagctctgactgggtgaccagctacctcctgatgttcagtgatggtgggagaaactggaagcagtatcgccgagaagaaagcatctggggttttccaggaaacacaaacgcagacagtgtggtgcactacagactccagcctccctttgaagccaggttcctgcgctttctccctttagcctggaaccctaggggcaggattgggatgcggatcgaagtgtacggatgtgcatataaatctgaggtggtttattttgatggacaaagtgctctgctgtatagacttgataaaaaacctttaaaaccaataagagacgttatttctttgaaatttaaagccatgcagagcaatggaattctacttcacagagaaggacaacatggaaatcacattactctggaattaattaaaggaaagcttgtcttttttcttaattcaggcaatgctaagctgccttccactattgctcctgtgaccctcaccctgggcagcctgctggacgaccagcactggcattccgtcctcatcgagctcctcgacacgcaggtcaacttcaccgtggacaaacacactcatcatttccaagcaaagggagattccagttacttggatcttaattttgagatcagctttgggggaattccgacacccggaagatcgcgggcattcagacgtaaaagctttcatgggtgtttagaaaatctttattataatggagtggatgttaccgaattagccaagaaacacaaaccacagatcctcatgatgggaaatgtgtccttctcatgtccacagccacagactgtccctgtgacttttctgagctccaggagttatctggctctgccaggcaactctggggaggacaaagtgtctgtcacttttcaatttcgaacgtggaacagagcaggacatttgcttttcggcgaacttcgacgtggttcagggagtttcgtcctctttcttaaggatggcaagctcaaactgagtctcttccagccgggacagtcaccaaggaatgtcacagcaggtgctggattaaacgatgggcagtggcactctgtgtccttctctgccaagtggagccatatgaatgtggtggtggacgatgacacagctgttcagcccctggtggctgtgctcattgattcaggtgacacctattattttggaggctgcctggacaacagctctggctctggatgtaaaagccccctgggagggtttcagggctgcctaaggctcatcaccattggtgacaaagcggtggatcccatcttagtacagcagggggcgctggggagtttcagggacctccagatagactcctgcggcatcacagacaggtgcttgcccagctactgtgagcatgggggcgagtgttcccagtcgtgggacaccttctcctgtgactgtctaggcacaggctatacgggcgagacctgccattcctctctctacgagcagtcttgtgaagcccacaagcaccgagggaacccgtctgggctttactatattgatgcagatggaagtggccccctgggaccatttcttgtgtactgcaatatgacagagacgccgcgtggacggtggtgcagcacggtggccccgacgcggtgaccctccgaggtgcccccagcgggcacccgcgctcggctgtgtccttcgcgtacgcagcgggcgcggggcagctgcggtccgcggtgaacctggcggagcgctgcgagcagcggctggctctgcgctgcgggacggcgcggcgcccggactcacgagatggaaccccactgagctggtgggttggaagaaccaatgaaacacacacttactggggaggttctctgcctgatgctcaaaagtgtacttgtggattagaggggaactgcattgattctcagtattactgcaactgtgatgctggccggaatgaatggactagtgacacaatagtcctttcccaaaaggagcacctgccagtcactcagattgtgatgacagacgcaggccgaccacattccgaagcagcttatacactggggccactgctctgccgcggagatcagtcattctggaattcagcttccttcaacactgagacttcataccttcatttccctgctttccacggagaactcactgctgacgtgtgcttcttttttaagaccacagtttcctccggggtgtttatggagaacctggggatcacagatttcatcaggattgagctgcgtgctcccacagaagtgaccttttccttcgatgtggggaatggaccttgtgaggtcacggtgcagtcacccactccctttaatgacaatcagtggcaccacgtgagggcagagagaaatgttaaaggagcgtctcttcaagttgatcagcttcctcagaagatgcagcctgcccctgctgatgggcacgttcgtttacagctcaacagccagctcttcattggtggaacggccaccagacagagaggctttctaggatgcattcggtctctgcagttgaacggggtggccctggatctggaagaaagagccacagtgacgccaggagtggagccagggtgtgcaggacactgcagcacctatggacacttgtgtcgcaatggagggagatgcagagagaaacgcaggggggtcacctgtgactgtgccttctcagcctatgatgggccgttctgctccaatgagatttccgcatattttgcaactggctcctcaatgacataccattttcaagaacattacactttaagtgaaaactccagctctctcgtttcttcattacacagagatgtaacattgaccagagaaatgatcacactgagcttccgaaccacacgaactccgagcttattgctgtatgtgagctctttctatgaggaatacctttcagttatcctcgccaacaatggaagtttgcagattaggtacaagctagatagacatcaaaatcctgatgcatttacctttgattttaaaaacatggctgatgggcaacttcaccaagtgaagattaacagagaagaagctgtggtcatggtagaggtaatcccacaaatgcagaagtcaaactaactaatattattattttaagaacaaataatctaatgaaaaaatttgataataaatattaatagaagagcaacccattcagtgctgctcttccataagtcaagaagaagccaaatatggccaggatctgggagagaggaggtggttgtttattctgtattgctttgttttgtttgtttagcaatgcaattctgtcaaaggtattattaatattttactatttaaaatatcaaaatatctttatttgttttactttactcaataggggaatgttctctagtttatcatagtgactgctggtggaatctattcattgatattgcagtgggaacttgtcttattctgattataaaagaacaaatactttagcaacttaaaaacacggtttaaaagcacacaacatagttattaaaatgggaataagtaagaaaatagacctgagtcaccacagaggaagtaaattacacattgtcatcggcattggaaggaaaatatactgtatagagaacaacaatgcttggttttatgtttcagattttctccacagaatgagtacatatttaagtttaaaacaaccaattccatctttttcatggattctgccaattatagatccttccattatgaagaagagtaaagccagcaagtgggtacatcgtggatagagtggtagctgatggcatcataggaattgcttataaaatagcttctctttctaaatgattaattatttgaaggtggcttcttgagcttttgtaatggtacttaaaagtgatttattttcatctttcctttcctcatcttcctttgcttccttatcattaaaattgtactttctgttgatgtttgcttctcatgggacatctaataggttaaccagagcacaaagaaacaagtcatcttgtcctcagggacagaattcaacgccgtcaaatctctcatattgggaaaggttttaggtaagtaggagaaagagctttttcccaaataagtgtcatgtcacaaactctggaagcattcatcatgctgaaagaagctccttgtcttacttgaataataatttcacagtgagtgacaatcaaggtgcaaactgtactcttgcctgagtgtacatataatcatgantaagtgctacctgtgagatgtgcaagggcgttcctggaaaaatacctccacacttaacctctcacttggcaatcatgcataatgaatcacggtatttttctaanccttcttgaaaagtgaaatgttgtcaaagctgacacgaagttcacagattatgtatgtattaatcaacatcaactccggagaccatcattcaatgataaaactacgtttgatatttttctctcaagccctgctttgcctgttgtttccatcctttttgactttagtatctaacaggaatggggaggcatattcataaatatctgttacgcaaggtagaaagttacagtaattgtctatcatattgtctatcataatctgttgtaaaagcacagttagctttacatttaataaaggaactgaggaaagtaatctttttttaaaaaaacccatcttatgtaactcaattaagaaaatgaactatactttaatattaggatcaaaaagttgaataatatttattatatacatctttgtttccttccaaataaaggagacatggaattg

SEQ ID NO: 89159 - DNA, 2519 bp, Homo sapiens
  misc_feature (320)..(320): n is a, c, g, or t
  misc_feature (374)..(374): n is a, c, g, or t
ggcacgaggccgcgcaggggacgggagtgagagcgggagtgagagcaggaacgacgcagagcggccgtcgccgtgcccgggtctcagggcgcctggctgaagtgagcatggcttcagtggcctgggccgtcctcaaggtgctgctgcttctccccactcagacttggagacccgtaggagcaggaaatccacctgactgtgattccccactggcctctgccttgcctaggtcatccttcagcagctcctcagagctgtccagcagccacggcccggggttttcaaggcttaatcgaagagatggagctggtggctggacnccacttgtgtcaaataaataccaatggctgcaaattgaccttggagagagaatngaggtcactgctgtcgccacccaaggaggatatgggagctctgactgggtgaccagctacctcctgatgttcagtgatggtgggagaaactggaagcagtatcgccgagaagaaagcatctggggttttccaggaaacacaaacgcagacagtgtggtgcactacagactccagcctccctttgaagccaggttcctgcgctttctccctttagcctggaaccctaggggcaggattgggatgcggatcgaagtgtacggatgtgcatataaatctgaggtggtttattttgatggacaaagtgctctgctgtatagacttgataaaaaacctttaaaaccaataagagacgttatttctttgaaatttaaagccatgcagagcaatggaattctacttcacagagaaggacaacatggaaatcacattactctggaattaattaaaggaaagcttgtcttttttcttaattcaggcaatgctaagctgccttccactattgctcctgtgaccctcaccctgggcagcctgctggacgaccagcactggcattccgtcctcatcgagctcctcgacacgcaggtcaacttcaccgtggacaaacacactcatcatttccaagcaaagggagattccagttacttggatcttaattttgagatcagctttgggggaattccgacacccggaagatcgcgggcattcagacgtaaaagctttcatgggtgtttagaaaatctttattataatggagtggatgttaccgaattagccaagaaacacaaaccacagatcctcatgatgggaaatgtgtccttctcatgtccacagccacagactgtccctgtgacttttctgagctccaggagttatctggctctgccaggcaactctggggaggacaaagtgtctgtcacttttcaatttcgaacgtggaacagagcaggacatttgcttttcggcgaacttcgacgtggttcagggagtttcgtcctctttcttaaggatggcaagctcaaactgagtctcttccagccgggacagtcaccaaggaatgtcacagcaggtgctggattaaacgatgggcagtggcactctgtgtccttctctgccaagtggagccatatgaatgtggtggtggacgatgacacagctgttcagcccctggtggctgtgctcattgattcaggtgacacctattattttggaggctgcctggacaacagctctggctctggatgtaaaagccccctgggagggtttcagggctgcctaaggctcatcaccattggtgacaaagcggtggatcccatcttagtacagcagggggcgctggggagtttcagggacctccagatagactcctgcggcatcacagacaggtgcttgcccagctactgtgagcatgggggcgagtgttcccagtcgtgggacaccttctcctgtgactgtctaggcacaggctatacgggcgagacctgccattcctctctctacgagcagtcttgtgaagcccacaagcaccgagggaacccgtctgggctttactatattgatgcagatggaagtggccccctgggaccatttcttgtgtactgcaatatgacagagacgccgcgtggacggtggtgcagcacggtggccccgacgcggtgaccctccgaggtgcccccagcgggcacccgcgctcggctgtgtccttcgcgtacgcagcgggcgcggggcagctgcggtccgcggtgaacctggcggagcgctgcgagcagcggctggctctgcgctgcgggacggcgcggcgcccggactcacgagatggaaccccactgagctggtgggttggaagaaccaatgaaacacacacttactggggaggttctctgcctgatgctcaaaagtgtacttgtggattagaggggaactgcattgattctcagtattactgcaactgtgatgctggccggaatgaatggtgatttccacatgatttccctgcacaaaaatgtggtttttattctttaattatgcatagttaattaaatgtcagacaagctggtacaataaggtaactaaagtatgttcaagcaagctgaaatacaagttttgatgaaatatgatcagttaatctaaggattaaattttatgacc

SEQ ID NO: 89160 - DNA, 407 bp, Homo sapiens
gagagacagagagagagaactagaaatcagacaggaaaagaaagggaattcatccactggaaatatctgtgatcccacaaaagaaacaaatgaaaacatggttaacctcaggggaatgcaaattaaaacaagaagctatgtttcacccataacactggcatcattttgtaaagatgatataataaagataataataggtggagctggcagaatgtggaggaacagagctctttctgacgttgctgatgtgaatgggagtggtggcagcttttctgtgagtgccttcacagggggctgccccttgattcagcaattccacatgtaggacttgctcatttattctagttttgttgttgttgttgttgtttgtttgtttgttgttttgagacaaggtcttgccgtattgc

SEQ ID NO: 89161 - DNA, 747 bp, Homo sapiens
gggcggaggtctcgccattgcactccagcctggacaacaagagcgaaactccgcctcaaaaaaaaaaaaaaaaaagacattggtctcattgctttttcttcaacttctgctactgtggaggataattctctcccaagactgccccccttcccactttaaatcagactcccatttccacctgatgcactataagtatttccatggatagccactggaatctttcttcaaaagaattccgcaggttttacagtgttttgttgcattttttcttccaatttactataggcaagagcggacgttcggagattcgttttaaggtctaacagtcttagtcaaaacttgttacttgactctgatgatagctgtgcaaaacaaaagctaaaaaaaatggcttacaatctaaatattgcccgagggcatattttcttggtctggacagtatttttttgcaaattgaactgtcatttaaggatgagatttttattttctggctcttgttagcatttgagtttgcctctccaatataaaacttagtttctaactattcctaccttgtgcttgtcattatttgttgaggataatatgatgaaagcagcttaactgttttgtatcctcagcctttgttaatctacagaagaaagattgttgaaacagaccaaggttttggcactggaggtatgttaggtttcctggggagtaagtgtttccctagttgattctaatgtgtatccgggttcagaactacaa

SEQ ID NO: 89162 - DNA, 175 bp, Homo sapiens
atgattctcgcctaaaataattattacagtgacagttgccataaaataatttctacattttatcattctttccatttcttacttggccttctgctgttgggcagagctttcttttcttccttattaatttatgtactcaaatcagtacagactcatgcattccctttttatttaa

SEQ ID NO: 89163 - DNA, 233 bp, Homo sapiens
agactgccttattggtatcttatttaaatgagaaccattttcccaatgctttctgatgtgtgggagatttaccttgacaaacttacagtcatatgggcaaagtttgaaaggcatagcattcaggaattgtgtacttaaattctctcaagatccctttaattcaaagagaattaaagaccaattttggcatttgtaatttgaaagggtcaaatttttcttctgtcattttcaaa

SEQ ID NO: 89164 - DNA, 359 bp, Homo sapiens
caggatcaatactttgtatccttcaatccaatcaagttgacactattaaccatcacaggacctgtccccgtctccactgcaggaagttaggacccatccctgtctccacccaggaagttaggacctgtctctgtttctatcacaggaagttgggatctggccctgtggacccagatgggttactgagcttggaacacgagggcttagtgacaaggaactgggaactgacctcaatggctgagtagcgatatggctccctcactcactctgtgaccttgggaagtgggaggccacattctctctgagcctcagtgtcctcatgtgaaaaatatcaccgaagccactgtcatggggtggtg

SEQ ID NO: 89165 - DNA, 332 bp, Homo sapiens
ttatatggctcctaagtccatgttctatcctgtgatgccccctccattatagaacaacacagaaaaacaaattcatagcactaagtacaccagattttctatagcctaaactagtctcataagtctttttttctattaatcagacctttgtagaggagacagtgatgtttaacatacacacacacacacatacaggccagaaagttggctaataagttgttaccctttttgccggcataccaggtttccaggttccctttctctgcagcttccagaagaacggagcggcctttgataactgttcactatgctatagctgtgggggccaagcc

SEQ ID NO: 89166 - DNA, 364 bp, Homo sapiens
accaagctaatttttgtaactttagtaaagacagggttttaccatgttggccaggatggtcttgatctcttgaccctgtgatctgcccgtctaggcctcccaaagtgctgggattacaggggtgaaccactgcgcctggctctcttcccataaatattctatagttcaatctctcttttattcaaatctgtgtccccaaaatcacttccagagatgacttaaaccactgtgtgtcctgaccactgtgacttaaacatcacacccaggatttctccagttctctctgctttatttctccttataattctaatcctttattgacattattttagagattttagagatatatgtatttgtttgcatg

SEQ ID NO: 89167 - DNA, 396 bp, Homo sapiens
gtcctcttcccacaccctgaagcttggttatcacgacagagtcccatggccggtcgctcagggcaaccgacacacaccccaggaagggacaggaagggacactggctgaaatcagacactttacgtacgcgtcttggatcctcaggctgacagggctttctccaggggaaacaactggagagagattaaataacatttcctaaggtcaggccaactggtaacagcaagaagcaaagtaagacttgcatccatgtctttctggcttcaaagcctgcaccctctcccctctaggtgccaccggagctgcccgagaggactgaacctttccactcagctgccagttgctagctggcctgtgctctgaggatattttccgaatcagcttgtcagctcatg

SEQ ID NO: 89168 - DNA, 159 bp, Homo sapiens
aattgaaggaaataacctcaatataataaaaactatgaaaagcccatagctaacctcacactcgatgacacactgaaagcttttcctctaagatcaggaagaagacaaagctgcatgcttttactgcttctattcaacacagtacttaagttccagcca

SEQ ID NO: 89169 - DNA, 737 bp, Homo sapiens
tagccctccagacgtttctgtctaaaaactacagtatttttctactaactccaaaaggcctgaaggtatttttattaccatgagagtttcagctgtgaccagagttcatttgcgcaatctttacattccagtgcactaagtgctttctcacgcagggacaaaagaagtctttgtcccatgcttgtgaaaagcaccatctttgctagatgagttaactgctaaacttagggctgctgcaatgacatgctgggaaaccacatgaatctaggcacatccaaatagtgaaataggatgggttttaggaaagcaaaccacatggatgtgtatgtgcatgtgtgtgtgcatgtgcttgtacgtgtgtgtgttttaaggtaacatattttgagtaccatctatatgccaggcatcgtgctaaatgcttcatactttacaacaatcccgtgaggtgggaactttgattagcacccctttataggcaaggaaactcagtcttagcaaagttccgtgttttccccaagtcgggtggctaatgagtgagttgtggagccagcatttgaacctgggctcacatacgctctcatccactatgctccactgactggaactggctgtagtgaaataagccctgcagattttagtttaattttctgagtagtaacttttggcaagaatggtcatttaaatgcaccaaaaaaaaaaaaaaaagaaaaaagattgggctgggtgcgacggctcat

SEQ ID NO: 89170 - DNA, 631 bp, Homo sapiens
ttggcaatagtactaacatagggttttatcttgggatacatatgtattggtctgtttgttgaccttgacatctgatcactgatgtcaatgacctactggcctcattcaggacacctgcagagagtatgcaaagtccgagagaggaaaacagaaatctgtatgtgagatggtcattgtacagaaagaagtggcccctctgcaacatgtcctcacagaaacgaaatggtgtgtagcaatcaacactagaaagtagaccttttgcaaattaatatgtccttgaccttttttgcccttttgtgggggtgaggtggggataaaaagactgtcatatcaagaactgtgacttttctttccctcaaacaataaaactcctttattatcttaatgctcccatgttaacatgtttgctgctaaattacaatgtagaattgataatggtttatagtgaactgtgctcttccctcattaaaatcccagggtgccctgtaaagatgcagatgtttcttcctgaaaacttctttttttacaaagaaaattagatgtacatgtataattcagtgtgctttgtctttctccagattaatatcggttacactgctgatgtttgtaaattaaacagatatttacttca

SEQ ID NO: 89171 - DNA, 838 bp, Homo sapiens
  misc_feature (695)..(696): n is a, c, g, or t
ttggcaatagtactaacatagggttttatcttgggatacatatgtattggtctgtttgttgaccttgacatctgatcactgatgtcaatgacctactggcctcattcaggacacctgcagagagtatgcaaagtccgagagaggaaaacagaaatctgtatgtgagatggtcattgtacagaaagaagtggcccctctgcaacatgtcctcacagaaacgaaatggtgtgtagcaatcaacactagaaagtagaccttttgcaaattaatatgtccttgaccttttttgcccttttgtgggggtgaggtggggataaaaagactgtcatatcaagaactgtgacttttctttccctcaaacaataaaactcctttattatcttaatgctcccatgttaacatgtttgctgctaaattacaatgtagaattgataatggtttatagtgaactgtgctcttccctcattaaaatcccagggtgccctgtaaagatgcagatgtttcttcctgaaaacttctttttttacaaagaaaattagatgtacatgtataattcagtgtgctttgtctttctccagattaatatcggttacactgctgatgtttgtaaattaaacagatatttacttcaaaaaaaaaaaaaatggcctcttagactaaaatggccaccaggccctttttttttttttttaatnntttttttttttttttttttttttccgaataaacaatttttaattcactttttccatttctttataaagagcttttactagcgctttctccctaaaataggaaagggggtgaagaagttgccccctcaaggaaaaaaggtaac

SEQ ID NO: 89172 - DNA, 5302 bp, Homo sapiens
  misc_feature (34)..(34): n is a, c, g, or t
  misc_feature (142)..(142): n is a, c, g, or t
  misc_feature (358)..(358): n is a, c, g, or t
tgccccgcgcgctctgctacgggcccgctgggcntccgcgccttctagcttccggagcccactttgatcggggccataatacctattgagatcccctcttctgtcttgtaccttcgccactggcatcggatttgcagaagcntgcgtgggatcagaggaccgccctccccacaacaaccggcccctgcatcttagcagccgttggaagccccagctcttttaccgccaagttcatccttgggagacagaagacgcgtgatctcctctccgctgctcttggggtctccttgcagccctggccaggcggattcatcctcaggacctaaagttgcccaaggagctcctgctctgccagagnagggtggagagggcggtgggaggcgtgtgcctgagtgggctctactgccttgttccatattattttgtgcacattttccctggcactctgggttgctagccccgccgggcactgggcctcagacactgcgcggttccctcggagcagcaagctaaagaaagcccccagtgccggcgaggaaggaggcggcggggaaagatgcgcggcgttggctggcagatgctgtccctgtcgctggggttagtgctggcgatcctgaacaaggtggcaccgcaggcgtgcccggcgcagtgctcttgctcgggcagcacagtggactgtcacgggctggcgctgcgcagcgtgcccaggaatatcccccgcaacaccgagagactggatttaaatggaaataacatcacaagaattacgaagacagattttgctggtcttagacatctaagagttcttcagcttatggagaataagattagcaccattgaaagaggagcattccaggatcttaaagaactagagagactgcgtttaaacagaaatcaccttcagctgtttcctgagttgctgtttcttgggactgcgaagctatacaggcttgatctcagtgaaaaccaaattcaggcaatcccaaggaaagctttccgtggggcagttgacataaaaaatttgcaactggattacaaccagatcagctgtattgaagatggggcattcagggctctccgggacctggaagtgctcactctcaacaataacaacattactagactttctgtggcaagtttcaaccatatgcctaaacttaggacttttcgactgcattcaaacaacctgtattgtgactgccacctggcctggctctccgactggcttcgccaaaggcctcgggttggtctgtacactcagtgtatgggcccctcccacctgagaggccataatgtagccgaggttcaaaaacgagaatttgtctgcagtggtcaccagtcatttatggctccttcttgtagtgttttgcactgccctgccgcctgtacctgtagcaacaatatcgtagactgtcgtgggaaaggtctcactgagatccccacaaatcttccagagaccatcacagaaatacgtttggaacagaacacaatcaaagtcatccctcctggagctttctcaccatataaaaagcttagacgaattgacctgagcaataatcagatctctgaacttgcaccagatgctttccaaggactacgctctctgaattcacttgtcctctatggaaataaaatcacagaactccccaaaagtttatttgaaggactgttttccttacagctcctattattgaatgccaacaagataaactgccttcgggtagatgcttttcaggatctccacaacttgaaccttctctccctatatgacaacaagcttcagaccatcgccaaggggaccttttcacctcttcgggccattcaaactatgcatttggcccagaacccctttatttgtgactgccatctcaagtggctagcggattatctccataccaacccgattgagaccagtggtgcccgttgcaccagcccccgccgcctggcaaacaaaagaattggacagatcaaaagcaagaaattccgttgttcagctaaagaacagtatttcattccaggtacagaagattatcgatcaaaattaagtggagactgctttgcggatctggcttgccctgaaaagtgtcgctgtgaaggaaccacagtagattgctctaatcaaaagctcaacaaaatcccggagcacattccccagtacactgcagagttgcgtctcaataataatgaatttaccgtgttggaagccacaggaatctttaagaaacttcctcaattacgtaaaataaactttagcaacaataagatcacagatattgaggagggagcatttgaaggagcatctggtgtaaatgaaatacttcttacgagtaatcgtttggaaaatgtgcagcataagatgttcaagggattggaaagcctcaaaactttgatgttgagaagcaatcgaataacctgtgtggggaatgacagtttcataggactcagttctgtgcgtttgctttctttgtatgataatcaaattactacagttgcaccaggggcatttgatactctccattctttatctactctaaacctcttggccaatccttttaactgtaactgctacctggcttggttgggagagtggctgagaaagaagagaattgtcacgggaaatcctagatgtcaaaaaccatacttcctgaaagaaatacccatccaggatgtggccattcaggacttcacttgtgatgacggaaatgatgacaatagttgctccccactttctcgctgtcctactgaatgtacttgcttggatacagtcgtccgatgtagcaacaagggtttgaaggtcttgccgaaaggtattccaagagatgtcacagagttgtatctggatggaaaccaatttacactggttcccaaggaactctccaactacaaacatttaacacttatagacttaagtaacaacagaataagcacgctttctaatcagagcttcagcaacatgacccagctcctcaccttaattcttagttacaaccgtctgagatgtattcctcctcgcacctttgatggattaaagtctcttcgattactttctctacatggaaatgacatttctgttgtgcctgaaggtgctttcaatgatctttctgcattatcacatctagcaattggagccaaccctctttactgtgattgtaacatgcagtggttatccgactgggtgaagtcggaatataaggagcctggaattgctcgttgtgctggtcctggagaaatggcagataaacttttactcacaactccctccaaaaaatttacctgtcaaggtcctgtggatgtcaatattctagctaagtgtaacccctgcctatcaaatccgtgtaaaaatgatggcacatgtaatagtgatccagttgacttttaccgatgcacctgtccatatggtttcaaggggcaggactgtgatgtcccaattcatgcctgcatcagtaacccatgtaaacatggaggaacttgccacttaaaggaaggagaagaagatggattctggtgtatttgtgctgatggatttgaaggagaaaattgtgaagtcaacgttgatgattgtgaagataatgactgtgaaaataattctacatgtgtcgatggcattaataactacacatgcctttgcccacctgagtatacaggtgagttgtgtgaggagaagctggacttctgtgcccaggacctgaacccctgccagcacgattcaaagtgcatcctaactccaaagggattcaaatgtgactgcacaccagggtacgtaggtgaacactgcgacatcgattttgacgactgccaagacaacaagtgtaaaaacggagcccactgcacagatgcagtgaacggctatacgtgcatatgccccgaaggttacagtggcttgttctgtgagttttctccacccatggtcctccctcgtaccagcccctgtgataattttgattgtcagaatggagctcagtgtatcgtcagaataaatgagccaatatgtcagtgtttgcctggctatcagggagaaaagtgtgaaaaattggttagtgtgaattttataaacaaagagtcttatcttcagattccttcagccaaggttcggcctcagacgaacataacacttcagattgccacagatgaagacagcggaatcctcctgtataagggtgacaaagaccatatcgcggtagaactctatcgggggcgtgttcgtgccagctatgacaccggctctcatccagcttctgccatttacagtgtggagacaatcaatgatggaaacttccacattgtggaactacttgccttggatcagagtctctctttgtccgtggatggtgggaaccccaaaatcatcactaacttgtcaaagcagtccactctgaattttgactctccactctatgtaggaggcatgccagggaagagtaacgtggcatctctgcgccaggcccctgggcagaacggaaccagcttccacggctgcatccggaacctttacatcaacagtgagctgcaggacttccagaaggtgccgatgcaaacaggcattttgcctggctgtgagccatgccacaagaaggtgtgtgcccatggcacatgccagcccagcagccaggcaggcttcacctgcgagtgccaggaaggatggatggggcccctctgtgaccaacggaccaatgacccttgccttggaaataaatgcgtacatggcacctgcttgcccatcaatgcgttctcctacagctgtaagtgcttggagggccatggaggtgtcctctgtgatgaagaggaggatctgtttaacccatgccaggcgatcaagtgcaagcatgggaagtgcaggctttcaggtctggggcagccctactgtgaatgcagcagtggatacacgggggacagctgtgatcgagaaatctcttgtcgaggggaaaggataagagattattaccaaaagcagcagggctatgctgcttgccaaacaaccaagaaggtgtcccgattagagtgcagaggtgggtgtgcaggagggcagtgctgtggaccgctgaggagcaagcggcggaaatactctttcgaatgcactgacggctcctcctttgtggacgaggttgagaaagtggtgaagtgcggctgtacgaggtgtgtgtcctaaacacactcccggcagctctgtctttggaaaaggttgtatacttcttgaccatgtgggactaatgaatgcttcatagtggaaatatttgaaatatattgtaaaatacagaacagacttatttttattatgagaataaagactttttttctgcatttg

SEQ ID NO: 89173 - DNA, 1020 bp, Homo sapiens
cggacgcgctgggtcgacccacgcgtccggcagcagtggatacacgggggacagctgtgatcgagaaatctcttgtcgaggggaaaggataagagattattaccaaaagcagcagggctatgctgcttgccaaacaaccaagaaggtgtcccgattagagtgcagaggtgggtgtgcaggagggcagtgctgtggaccgctgaggagcaagcggcggaaatactctttcgaatgcactgacggctcctcctttgtggacgaggttgagaaagtggtgaagtgcggctgtacgaggtgtgtgtcctaaacacactcccggcagctctgtctttggaaaaggttgtatacttcttgaccatgtgggactaatgaatgcttcatagtggaaatatttgaaatatattgtaaaatacagaacagacttatttttattatgagaataaagactttttttctgcatttggaaaaaaaaaaaaagaaatgcttgaactaaagcttcccctatgctggagaagtatgaagaaagatatacctggagacattagaacagcgatgggaaccattgcaactcgggtccatctttgtaacatgctgaagacaagcagaagcacatgcacgagggacagaggagctactgtgcactgctgtgaaattgcccagagcataaaacctgtgtaccctccttcacatcaaccaagttcactaggacataccaagcacatgcgtgtgaatgaggatgcaaggcaagagaatggaactccagaattcacagaatagaacaaatggatgagaaatatttcatgcaaaatataaagtgtcctgaggatctgggttccatttacgagaggaaatgaaagtgctaaaataaattttatcttccttttaaatgtcagcatgtcagcagaagcagcacacaaaagtctttaccattttccagtattaatttttttgtaatataaatgataaaggagatgataaagaaccaatagattattgataaataaattagtaataatatga

SEQ ID NO: 89174 - DNA, 435 bp, Homo sapiens
gttcttaaaatgcttgtgctttttgttcttttctagaaatctcttgtcgaggggaaaggataagagattattaccaaaagcagcagggctatgctgcttgccaaacaaccaagaaggtgtcccgattagagtgcagaggtgggtgtgcaggagggcagtgctgtggaccgctgaggagcaagcggcggaaatactctttcgaatgcactgacggctcctcctttgtggacgaggttgagaaagtggtgaagtgcggctgtacgaggtgtgtgtcctaaacacactcccggcagctctgtctttggaaaaggttgtatacttcttgaccatgtgggactaatgaatgcttcatagtggaaatatttgaaatatattgtaaaatacagaacagacttatttttattatgagaataaagactttttttctgcatttgg

SEQ ID NO: 89175 - DNA, 5278 bp, Homo sapiens
  misc_feature (34)..(34): n is a, c, g, or t
  misc_feature (142)..(142): n is a, c, g, or t
  misc_feature (358)..(358): n is a, c, g, or t
tgccccgcgcgctctgctacgggcccgctgggcntccgcgccttctagcttccggagcccactttgatcggggccataatacctattgagatcccctcttctgtcttgtaccttcgccactggcatcggatttgcagaagcntgcgtgggatcagaggaccgccctccccacaacaaccggcccctgcatcttagcagccgttggaagccccagctcttttaccgccaagttcatccttgggagacagaagacgcgtgatctcctctccgctgctcttggggtctccttgcagccctggccaggcggattcatcctcaggacctaaagttgcccaaggagctcctgctctgccagagnagggtggagagggcggtgggaggcgtgtgcctgagtgggctctactgccttgttccatattattttgtgcacattttccctggcactctgggttgctagccccgccgggcactgggcctcagacactgcgcggttccctcggagcagcaagctaaagaaagcccccagtgccggcgaggaaggaggcggcggggaaagatgcgcggcgttggctggcagatgctgtccctgtcgctggggttagtgctggcgatcctgaacaaggtggcaccgcaggcgtgcccggcgcagtgctcttgctcgggcagcacagtggactgtcacgggctggcgctgcgcagcgtgcccaggaatatcccccgcaacaccgagagactggatttaaatggaaataacatcacaagaattacgaagacagattttgctggtcttagacatctaagagttcttcagcttatggagaataagattagcaccattgaaagaggagcattccaggatcttaaagaactagagagactgcgtttaaacagaaatcaccttcagctgtttcctgagttgctgtttcttgggactgcgaagctatacaggcttgatctcagtgaaaaccaaattcaggcaatcccaaggaaagctttccgtggggcagttgacataaaaaatttgcaactggattacaaccagatcagctgtattgaagatggggcattcagggctctccgggacctggaagtgctcactctcaacaataacaacattactagactttctgtggcaagtttcaaccatatgcctaaacttaggacttttcgactgcattcaaacaacctgtattgtgactgccacctggcctggctctccgactggcttcgccaaaggcctcgggttggtctgtacactcagtgtatgggcccctcccacctgagaggccataatgtagccgaggttcaaaaacgagaatttgtctgcagtggtcaccagtcatttatggctccttcttgtagtgttttgcactgccctgccgcctgtacctgtagcaacaatatcgtagactgtcgtgggaaaggtctcactgagatccccacaaatcttccagagaccatcacagaaatacgtttggaacagaacacaatcaaagtcatccctcctggagctttctcaccatataaaaagcttagacgaattgacctgagcaataatcagatctctgaacttgcaccagatgctttccaaggactacgctctctgaattcacttgtcctctatggaaataaaatcacagaactccccaaaagtttatttgaaggactgttttccttacagctcctattattgaatgccaacaagataaactgccttcgggtagatgcttttcaggatctccacaacttgaaccttctctccctatatgacaacaagcttcagaccatcgccaaggggaccttttcacctcttcgggccattcaaactatgcatttggcccagaacccctttatttgtgactgccatctcaagtggctagcggattatctccataccaacccgattgagaccagtggtgcccgttgcaccagcccccgccgcctggcaaacaaaagaattggacagatcaaaagcaagaaattccgttgttcaggtacagaagattatcgatcaaaattaagtggagactgctttgcggatctggcttgccctgaaaagtgtcgctgtgaaggaaccacagtagattgctctaatcaaaagctcaacaaaatcccggagcacattccccagtacactgcagagttgcgtctcaataataatgaatttaccgtgttggaagccacaggaatctttaagaaacttcctcaattacgtaaaataaactttagcaacaataagatcacagatattgaggagggagcatttgaaggagcatctggtgtaaatgaaatacttcttacgagtaatcgtttggaaaatgtgcagcataagatgttcaagggattggaaagcctcaaaactttgatgttgagaagcaatcgaataacctgtgtggggaatgacagtttcataggactcagttctgtgcgtttgctttctttgtatgataatcaaattactacagttgcaccaggggcatttgatactctccattctttatctactctaaacctcttggccaatccttttaactgtaactgctacctggcttggttgggagagtggctgagaaagaagagaattgtcacgggaaatcctagatgtcaaaaaccatacttcctgaaagaaatacccatccaggatgtggccattcaggacttcacttgtgatgacggaaatgatgacaatagttgctccccactttctcgctgtcctactgaatgtacttgcttggatacagtcgtccgatgtagcaacaagggtttgaaggtcttgccgaaaggtattccaagagatgtcacagagttgtatctggatggaaaccaatttacactggttcccaaggaactctccaactacaaacatttaacacttatagacttaagtaacaacagaataagcacgctttctaatcagagcttcagcaacatgacccagctcctcaccttaattcttagttacaaccgtctgagatgtattcctcctcgcacctttgatggattaaagtctcttcgattactttctctacatggaaatgacatttctgttgtgcctgaaggtgctttcaatgatctttctgcattatcacatctagcaattggagccaaccctctttactgtgattgtaacatgcagtggttatccgactgggtgaagtcggaatataaggagcctggaattgctcgttgtgctggtcctggagaaatggcagataaacttttactcacaactccctccaaaaaatttacctgtcaaggtcctgtggatgtcaatattctagctaagtgtaacccctgcctatcaaatccgtgtaaaaatgatggcacatgtaatagtgatccagttgacttttaccgatgcacctgtccatatggtttcaaggggcaggactgtgatgtcccaattcatgcctgcatcagtaacccatgtaaacatggaggaacttgccacttaaaggaaggagaagaagatggattctggtgtatttgtgctgatggatttgaaggagaaaattgtgaagtcaacgttgatgattgtgaagataatgactgtgaaaataattctacatgtgtcgatggcattaataactacacatgcctttgcccacctgagtatacaggtgagttgtgtgaggagaagctggacttctgtgcccaggacctgaacccctgccagcacgattcaaagtgcatcctaactccaaagggattcaaatgtgactgcacaccagggtacgtaggtgaacactgcgacatcgattttgacgactgccaagacaacaagtgtaaaaacggagcccactgcacagatgcagtgaacggctatacgtgcatatgccccgaaggttacagtggcttgttctgtgagttttctccacccatggtcctccctcgtaccagcccctgtgataattttgattgtcagaatggagctcagtgtatcgtcagaataaatgagccaatatgtcagtgtttgcctggctatcagggagaaaagtgtgaaaaattggttagtgtgaattttataaacaaagagtcttatcttcagattccttcagccaaggttcggcctcagacgaacataacacttcagattgccacagatgaagacagcggaatcctcctgtataagggtgacaaagaccatatcgcggtagaactctatcgggggcgtgttcgtgccagctatgacaccggctctcatccagcttctgccatttacagtgtggagacaatcaatgatggaaacttccacattgtggaactacttgccttggatcagagtctctctttgtccgtggatggtgggaaccccaaaatcatcactaacttgtcaaagcagtccactctgaattttgactctccactctatgtaggaggcatgccagggaagagtaacgtggcatctctgcgccaggcccctgggcagaacggaaccagcttccacggctgcatccggaacctttacatcaacagtgagctgcaggacttccagaaggtgccgatgcaaacaggcattttgcctggctgtgagccatgccacaagaaggtgtgtgcccatggcacatgccagcccagcagccaggcaggcttcacctgcgagtgccaggaaggatggatggggcccctctgtgaccaacggaccaatgacccttgccttggaaataaatgcgtacatggcacctgcttgcccatcaatgcgttctcctacagctgtaagtgcttggagggccatggaggtgtcctctgtgatgaagaggaggatctgtttaacccatgccaggcgatcaagtgcaagcatgggaagtgcaggctttcaggtctggggcagccctactgtgaatgcagcagtggatacacgggggacagctgtgatcgagaaatctcttgtcgaggggaaaggataagagattattaccaaaagcagcagggctatgctgcttgccaaacaaccaagaaggtgtcccgattagagtgcagaggtgggtgtgcaggagggcagtgctgtggaccgctgaggagcaagcggcggaaatactctttcgaatgcactgacggctcctcctttgtggacgaggttgagaaagtggtgaagtgcggctgtacgaggtgtgtgtcctaaacacactcccggcagctctgtctttggaaaaggttgtatacttcttgaccatgtgggactaatgaatgcttcatagtggaaatatttgaaatatattgtaaaatacagaacagacttatttttattatgagaataaagactttttttctgcatttg

SEQ ID NO: 89176 - DNA, 5835 bp, Homo sapiens
  misc_feature (34)..(34): n is a, c, g, or t
  misc_feature (142)..(142): n is a, c, g, or t
  misc_feature (358)..(358): n is a, c, g, or t
tgccccgcgcgctctgctacgggcccgctgggcntccgcgccttctagcttccggagcccactttgatcggggccataatacctattgagatcccctcttctgtcttgtaccttcgccactggcatcggatttgcagaagcntgcgtgggatcagaggaccgccctccccacaacaaccggcccctgcatcttagcagccgttggaagccccagctcttttaccgccaagttcatccttgggagacagaagacgcgtgatctcctctccgctgctcttggggtctccttgcagccctggccaggcggattcatcctcaggacctaaagttgcccaaggagctcctgctctgccagagnagggtggagagggcggtgggaggcgtgtgcctgagtgggctctactgccttgttccatattattttgtgcacattttccctggcactctgggttgctagccccgccgggcactgggcctcagacactgcgcggttccctcggagcagcaagctaaagaaagcccccagtgccggcgaggaaggaggcggcggggaaagatgcgcggcgttggctggcagatgctgtccctgtcgctggggttagtgctggcgatcctgaacaaggtggcaccgcaggcgtgcccggcgcagtgctcttgctcgggcagcacagtggactgtcacgggctggcgctgcgcagcgtgcccaggaatatcccccgcaacaccgagagactggatttaaatggaaataacatcacaagaattacgaagacagattttgctggtcttagacatctaagagttcttcagcttatggagaataagattagcaccattgaaagaggagcattccaggatcttaaagaactagagagactgcgtttaaacagaaatcaccttcagctgtttcctgagttgctgtttcttgggactgcgaagctatacaggcttgatctcagtgaaaaccaaattcaggcaatcccaaggaaagctttccgtggggcagttgacataaaaaatttgcaactggattacaaccagatcagctgtattgaagatggggcattcagggctctccgggacctggaagtgctcactctcaacaataacaacattactagactttctgtggcaagtttcaaccatatgcctaaacttaggacttttcgactgcattcaaacaacctgtattgtgactgccacctggcctggctctccgactggcttcgccaaaggcctcgggttggtctgtacactcagtgtatgggcccctcccacctgagaggccataatgtagccgaggttcaaaaacgagaatttgtctgcagtggtcaccagtcatttatggctccttcttgtagtgttttgcactgccctgccgcctgtacctgtagcaacaatatcgtagactgtcgtgggaaaggtctcactgagatccccacaaatcttccagagaccatcacagaaatacgtttggaacagaacacaatcaaagtcatccctcctggagctttctcaccatataaaaagcttagacgaattgacctgagcaataatcagatctctgaacttgcaccagatgctttccaaggactacgctctctgaattcacttgtcctctatggaaataaaatcacagaactccccaaaagtttatttgaaggactgttttccttacagctcctattattgaatgccaacaagataaactgccttcgggtagatgcttttcaggatctccacaacttgaaccttctctccctatatgacaacaagcttcagaccatcgccaaggggaccttttcacctcttcgggccattcaaactatgcatttggcccagaacccctttatttgtgactgccatctcaagtggctagcggattatctccataccaacccgattgagaccagtggtgcccgttgcaccagcccccgccgcctggcaaacaaaagaattggacagatcaaaagcaagaaattccgttgttcaggtacagaagattatcgatcaaaattaagtggagactgctttgcggatctggcttgccctgaaaagtgtcgctgtgaaggaaccacagtagattgctctaatcaaaagctcaacaaaatcccggagcacattccccagtacactgcagagttgcgtctcaataataatgaatttaccgtgttggaagccacaggaatctttaagaaacttcctcaattacgtaaaataaactttagcaacaataagatcacagatattgaggagggagcatttgaaggagcatctggtgtaaatgaaatacttcttacgagtaatcgtttggaaaatgtgcagcataagatgttcaagggattggaaagcctcaaaactttgatgttgagaagcaatcgaataacctgtgtggggaatgacagtttcataggactcagttctgtgcgtttgctttctttgtatgataatcaaattactacagttgcaccaggggcatttgatactctccattctttatctactctaaacctcttggccaatccttttaactgtaactgctacctggcttggttgggagagtggctgagaaagaagagaattgtcacgggaaatcctagatgtcaaaaaccatacttcctgaaagaaatacccatccaggatgtggccattcaggacttcacttgtgatgacggaaatgatgacaatagttgctccccactttctcgctgtcctactgaatgtacttgcttggatacagtcgtccgatgtagcaacaagggtttgaaggtcttgccgaaaggtattccaagagatgtcacagagttgtatctggatggaaaccaatttacactggttcccaaggaactctccaactacaaacatttaacacttatagacttaagtaacaacagaataagcacgctttctaatcagagcttcagcaacatgacccagctcctcaccttaattcttagttacaaccgtctgagatgtattcctcctcgcacctttgatggattaaagtctcttcgattactttctctacatggaaatgacatttctgttgtgcctgaaggtgctttcaatgatctttctgcattatcacatctagcaattggagccaaccctctttactgtgattgtaacatgcagtggttatccgactgggtgaagtcggaatataaggagcctggaattgctcgttgtgctggtcctggagaaatggcagataaacttttactcacaactccctccaaaaaatttacctgtcaaggtcctgtggatgtcaatattctagctaagtgtaacccctgcctatcaaatccgtgtaaaaatgatggcacatgtaatagtgatccagttgacttttaccgatgcacctgtccatatggtttcaaggggcaggactgtgatgtcccaattcatgcctgcatcagtaacccatgtaaacatggaggaacttgccacttaaaggaaggagaagaagatggattctggtgtatttgtgctgatggatttgaaggagaaaattgtgaagtcaacgttgatgattgtgaagataatgactgtgaaaataattctacatgtgtcgatggcattaataactacacatgcctttgcccacctgagtatacaggtgagttgtgtgaggagaagctggacttctgtgcccaggacctgaacccctgccagcacgattcaaagtgcatcctaactccaaagggattcaaatgtgactgcacaccagggtacgtaggtgaacactgcgacatcgattttgacgactgccaagacaacaagtgtaaaaacggagcccactgcacagatgcagtgaacggctatacgtgcatatgccccgaaggttacagtggcttgttctgtgagttttctccacccatggtcctccctcgtaccagcccctgtgataattttgattgtcagaatggagctcagtgtatcgtcagaataaatgagccaatatgtcagtgtttgcctggctatcagggagaaaagtgtgaaaaattggttagtgtgaattttataaacaaagagtcttatcttcagattccttcagccaaggttcggcctcagacgaacataacacttcagattgccacagatgaagacagcggaatcctcctgtataagggtgacaaagaccatatcgcggtagaactctatcgggggcgtgttcgtgccagctatgacaccggctctcatccagcttctgccatttacagtgtggagacaatcaatgatggaaacttccacattgtggaactacttgccttggatcagagtctctctttgtccgtggatggtgggaaccccaaaatcatcactaacttgtcaaagcagtccactctgaattttgactctccactctatgtaggaggcatgccagggaagagtaacgtggcatctctgcgccaggcccctgggcagaacggaaccagcttccacggctgcatccggaacctttacatcaacagtgagctgcaggacttccagaaggtgccgatgcaaacaggcattttgcctggctgtgagccatgccacaagaaggtgtgtgcccatggcacatgccagcccagcagccaggcaggcttcacctgcgagtgccaggaaggatggatggggcccctctgtgaccaacggaccaatgacccttgccttggaaataaatgcgtacatggcacctgcttgcccatcaatgcgttctcctacagctgtaagtgcttggagggccatggaggtgtcctctgtgatgaagaggaggatctgtttaacccatgccaggcgatcaagtgcaagcatgggaagtgcaggctttcaggtctggggcagccctactgtgaatgcagcagtggatacacgggggacagctgtgatcgagaaatctcttgtcgaggggaaaggataagagattattaccaaaagcagcagggctatgctgcttgccaaacaaccaagaaggtgtcccgattagagtgcagaggtgggtgtgcaggagggcagtgctgtggaccgctgaggagcaagcggcggaaatactctttcgaatgcactgacggctcctcctttgtggacgaggttgagaaagtggtgaagtgcggctgtacgaggtgtgtgtcctaaacacactcccggcagctctgtctttggaaaaggttgtatacttcttgaccatgtgggactaatgaatgcttcatagtggaaatatttgaaatatattgtaaaatacagaacagacttatttttattatgagaataaagactttttttctgcatttggaaaaaaaaaaaaagaaatgcttgaactaaagcttcccctatgctggagaagtatgaagaaagatatacctggagacattagaacagcgatgggaaccattgcaactcgggtccatctttgtaacatgctgaagacaagcagaagcacatgcacgagggacagaggagctactgtgcactgctgtgaaattgcccagagcataaaacctgtgtaccctccttcacatcaaccaagttcactaggacataccaagcacatgcgtgtgaatgaggatgcaaggcaagagaatggaactccagaattcacagaatagaacaaatggatgagaaatatttcatgcaaaatataaagtgtcctgaggatctgggttccatttacgagaggaaatgaaagtgctaaaataaattttatcttccttttaaatgtcagcatgtcagcagaagcagcacacaaaagtctttaccattttccagtattaatttttttgtaatataaatgataaaggagatgataaagaaccaatagattattgataaataaattagtaataatatga

SEQ ID NO: 89177 - DNA, 262 bp, Homo sapiens
caacactatctcttgttagataaggacagtatttatggtcaaacatttttcataccagattatattaatacatgctgatctctcgacttgctggtctcttagagaagctccgtctgtactatttagaagttaggatttcaaataagaatgtgcattgcagtctttctatgagggtctgtgaaactttggtgatatttgctactgacgtctgtttctttctctctactgtcttcaatgttagcttcttgaggaaagaacctta

SEQ ID NO: 89178 - DNA, 344 bp, Homo sapiens
acatgaatactacctccatgtcagcatagggtttacattttaaatggctgcatagaattctcttacatgttaacgaaaaggaaaactgagagatggcttggctatatttttattttaaattgcatttttttctttctcagacctcttagggatgaattgccatattctctatcctttttcctctcagataaagttgtaagtaaaatcttgctgtaaatgtagacgagataaatctgttcttctttccactcttcctcattgtcactctagcctccaaattctgcagtcacttctggttgttaggtaattcatacaatgctgccattattttttattttttattt

SEQ ID NO: 89179 - DNA, 219 bp, Homo sapiens
aagcggagaagataacacctgcaaaagtatgccacagttatgttgggaatttcaatatgatggagctctgagtgtacatgtatgtgaggaaaaggaggtaaacaaggagttagaaagatgtgatgagaccaggtggtgatggactgaatataaagcaaagacatctggatttttaattctgtagggaatagctgaccaaggtatatgattacatgtctg

SEQ ID NO: 89180 - DNA, 369 bp, Homo sapiens
  misc_feature (242)..(242): n is a, c, g, or t
  misc_feature (347)..(347): n is a, c, g, or t
  misc_feature (358)..(358): n is a, c, g, or t
tttatttcacttgaatccctagggacttacatttccacattaataagaatacactgattcttacacacaagggtaaatatagtaactgagactcatgctgaaggtcatgtttggaatctcatatttcctttgcatcttagtttcatacattctttctggattctttctagcatttccaaatcctattcatcctcaggctggtcttgaactcccgacctcaggtgatccactggcctcggctncccaaagtgctgggattacaggtgtgagccactgtttctcttctttaatgaaagtgtttcccagttctaatttctgtgttcttagtgactggctgtcttgcaatngatacaagtcntttttgaaaag

SEQ ID NO: 89181 - DNA, 690 bp, Homo sapiens
aaaggaacccatacatctatagtcagttgattttccacaaaggtgccacaaacacccaatgagaaaaggacaagtctcttcagtaaagggtgttgggaaaagtggatatctacatgcagaagaataaagttagacccttatctcacgccacatgcaaaaatcaattcagaatggattaaagacttttaaacatacctactgaatttgaaaaactactgtaaggaaacatagggggagagcttcttgttattggtctgggggatgattttttgaatttgaccccaaaacaggcaacaaaagcaaaaacagacaaatgggattacatcaaactgaaaacttttgcatgacaaaggaaacaagcaacagagtaaagagacaaactacagattgggagaaaatatttgcaagccatacatctaataagaggttactatccagtctgtataagaaacttaagcacctgaatatcaagagaacagataactgaatttaaaaaagcatgaaggacttgaataaacattttcaaaagaagatatacagatggttaacaggcatatgaaaaaatgctcatcactgatcaccagggaaatataaattaaaaccgcaatgaggtgtcacctcacacctatcagaatggctgttatcaaaaagatgaaagatacgtgttggtgaagatgtggagcagaggga

SEQ ID NO: 89182 - DNA, 430 bp, Homo sapiens
ctttttgttagaaaacctaaaacactgcaatcagcacactggagcacaaactataccaattataatactatcaaagctaaatattaacttaggtttacagtggtgtcttaaaagtggactcaaatttaattaatgcactacattcccaactaggaaaaaaataacctcaaccttttcttaaaaccgcaaaatttttcctctgaattgttgttttcaaagaatctaggaactaaacaactataagcagactacattatcttaaaacctacatttgactaaacaccaaaaacagaagaaaaaaagctattatttcatgttatcaacttcagtggtaacttaaaaatatttagagtttcaatgaattgaccttgtcaaatagtaaaaggcctagagccttacatgtcattataaaatttccttaaaaggctgg

SEQ ID NO: 89183 - DNA, 328 bp, Homo sapiens
gtctaaagacacacataaccaaagcatatgatgaggtgtaatattcaggtgctatgccagacacctgaggcctcagcaacatttccagaactgagagttttctgcttctgggtccctgaaagcccctttgcaggctgtgtgaagaaataccaagtttcctcatgttcctctgccaaatgtttcactggatgaagatgtggtcatacagcagagaaaaggcaagcctacatagcaatctttgggctcaattacctggaaggcttaagaagtgagatattctggtttactaaatctctttatggattcagtattaaccagaaatttcttt

SEQ ID NO: 89184 - DNA, 616 bp, Homo sapiens
tgaaagtactaaaatcttttatatgcattgcattataacgtcattgcattgaatactgctggcaataagctagaagttagaaaaactttgctttatggtaaaattaagtacaatgagatttgattccttacattcaagccccactgatttgtctcttgaaatttagatgaggagaaaacacaaattaatttatattttcagctaacaagatggctacatgacagctatggccacaagaaaaatttagacagactaatgtttgagtaaccatggcttcaaagccccttgccagtattctaaattactttttcttcttctccaaattacttgtgatttctcagattttttatttaattattgagtgtacagtacatatgctctttttgtaaggaatctcaactccttgtattagaaatgggaaataacagatgaatctaaatgtcttgtttcttccatgagactgcgccttctttcctttccaattcatgtgctcaacacagcaccaaccaatgactcagaacctcctaaactctgtacaccacatggtcaagcattttctttccaggtagccaagtctgcagtgccccttcctccataaagcctccagaaataatga

SEQ ID NO: 89185 - DNA, 510 bp, Homo sapiens
taagtgggagctaaataatgagaacacatggacacgtagagtggaacaacacacactggggtctattggagggtggagggtaggaggagggagaggatcaggacaaaaaagcagtgggtactaggcttaataactggctgatgaagtaatctgtacaacaaccccccatgacacaagtttacctatgttaacaaacctgcacatgtaaccctgaacttaaaactaaagttttttttaaaaaaaagaaaaacaatttggtgtccaagatggtgtaaataaaaaaagatacctcagtatttaaaaacaaacaaacaaacaaagtttaaacttttttgactaatataataattgctgctcagagcaatgaactcaatgctataaaaatgcatctgaagcttataaacatcactcctgtacagatagaattttctttctttcttttttttttttttttttcttgagaggaagtcttgctctgttgctcaggctggagtgcagtggtgtgatctt

SEQ ID NO: 89186 - DNA, 233 bp, Homo sapiens
gaaggttatggcaggtataaaaaccccataaaaccaaagcaaaacctccagtgaggaattgtcttttataccaactcccaaaacaaaggccaaattccaaaacgaagtctgtttgcttcttactttcctaatataaagggaatgggtgattttttcccccaaatgcagtttcatgttggtgaaatcagaatacaacagtagggtctctagcggcagaattgggcgtacgggga

SEQ ID NO: 89187 - DNA, 983 bp, Homo sapiens
tgggggacctcccttgggagatcaatcccctgtcctcctgctctttgctctgtgagaacgatccacctatgacctcaggtcctcagactgaccagcccaagaaacatctcacgaatttcaaatctgatctgctcagcttagcgactgaagattaatgctgcctgatcacctcagaagccccctggaccatcacagatgcccaacttcaggtgactctcaagtggaggatccccagccacatgaagacaccctagctggacgatcagttcttgttaagaatctgaaccctcaaactctacaacctcgatggaccagaccctacttagtcatctgtagtaccctgactgctgtctgcctgcaggatcttccacactgggttcaccattccagaataaagctgtgtccatcaggcagccagcctaatccctctcttcctcctggaagtcacaagtactctcccctacttcccttaaactcactcatatttctgaagaacagtaataacccttatgagcctaatacatccctttattctattaggtctctccatccttaccctactttttgcagcacagctttatgaaatcacccccaccaattgggctgagccccaaaaagaaactattcatccctactgtcttctatctagtcatactccattctcaactacctataaatgccctactcttatttacactgatggtttacactgtttcttcaagccatcacagctgatatctcttcgtgctatccccacaccaccactcttaagtctctcttagagtggatagatgatctttactggcagggcatcctcctatacttccatcctgatgaagttctattctttacttttatactcactcttattctcgttcccaatcttatgccaccctctacctctccccagctatctccaccacactatcaaccttacacattctctcctagccacttctaatccctccttagtgaacaactgc

SEQ ID NO: 89188 - DNA, 386 bp, Homo sapiens
tgggggacctcccttgggagatcaatcccctgtcctcctgctctttgctctgtgagaacgatccacctatgacctcaggtcctcagactgaccagcccaagaaacatctcacgaatttcaaatctgatctgctcagcttagcgactgaagattaatgctgcctgatcacctcagaagccccctggaccatcacagatgcccaacttcaggtgactctcaagtggagggcctctgagcccaagccgagccatcgcatcccctgtgatttgaaggtatatgcccaggtggcctgaagtaaccgaagaatcgcaaaagaagtgaaaatgcgctgccccgccttaactgatgacattccaccacaaaataagtgcaaatgccagtccttg

SEQ ID NO: 89189 - DNA, 458 bp, Homo sapiens
tgggggacctcccttgggagatcaatcccctgtcctcctgctctttgctctgtgagaacgatccacctatgacctcaggtcctcagactgaccagcccaagaaacatctcacgaatttcaaatctgatctgctcagcttagcgactgaagattaatgctgcctgatcacctcagaagccccctggaccatcacagatgcccaacttcaggtgactctcaagtggaggatcctataagatggccccacgcttatctccctttgctgactctcttttcggacttggcccacttgcaccaaggcctctgagcccaagccgagccatcgcatcccctgtgatttgaaggtatatgcccaggtggcctgaagtaaccgaagaatcgcaaaagaagtgaaaatgcgctgccccgccttaactgatgacattccaccacaaaataagtgcaaatgccagtccttg

SEQ ID NO: 89190 - DNA, 183 bp, Homo sapiens
tgctgcatggatgctgctgctttaaaccttggatgaacttcactgacaccattcttccctagacattcaccaaaaaatgtgtatattttgttcatatacatttccatgttataattatggaagatgtgtaatccacttgcatgttaattaaaggaaacaaacaactgaagttttgaagggtca

SEQ ID NO: 89191 - DNA, 567 bp, Homo sapiens
gggacggctggctggctgcagaagatgggtccttctagcagctcccagtgaatatgactaatcagttcaacatcacagaaagagcccaggcctgagagggagaagattaacagcgaggtgactgtgagcaagttactgccctctaggctggagctgcctcactggcatatctgagaggcagtgttgggtagtgattaagagcaaaatctacaaccagtattgctagattggactcctggctttaccactaacaagagcagggctctcagcctctataagccaaatgccctcatttgtaaaatttccttatttcaaatcctgtcggtgcaagattaagagttaatatatacaaataaagtacttggaacagtagatggcacagaaaacattatgtgtgtttactagtattacggccactagtattaatgcctttactgccatatcgaggatgttggattagtgagcctttgaaggtctcttaaaaagtctgcagttctatttccctgcactatgagccccgtttagatttcagacttaatctagcatttgctgagtgcttactatata

SEQ ID NO: 89192 - DNA, 284 bp, Homo sapiens
cttttctctggaatctcttgtcaggttactctttgtttccttaggcttgttgtgcataagagacttctataataattcctctgttcatttttctagaaacaccaagcaaatgttcaaggagatcaaattaagttcactataagatcataaggaggccactagcagaatcagcagaattaggctcttataaattattattagttttacttcatgacccaaactcaataacagtcaagaattcactattttcctcttggttgtatagctgttctcataactcatat

SEQ ID NO: 89193 - DNA, 192 bp, Homo sapiens
ccaacatatataaggagttcaacttcaactacctgagccgtatagacatagagagagatgctctaggaatatcagattatttgttactcttgtgcgaaaggcataataatggctccccaaagctgtccatgacctgattcctagagccggtgaatatgttacattacatggcaaagggaaattagggttgga

SEQ ID NO: 89194 - DNA, 448 bp, Homo sapiens
aacaatttagtagattatacttttgtaaacagaaattaagcgtttatctttttttcttgcctgatttttccagaattttgaaatccttactgaatactcttatttccacgatgatatagttgttagcaaaagtccaataagaatctattcaccttataacaggacataattggaaattttggttatattatcaaggtttttactggaatatcatatttaggaagtgtacctaagatcagttatgaccagcaattttaaggaagtaaggttgacttttatggagacaatgcttacaaagcactgtggaaaactttgaggaaagttcttcctcaaagattataaagtcacaactacccactatttttatatgtgtgtgtgtgtgtgtgtgtgtgtgtgtgtgtgtgtgtgttccaaatcacttgtcctagcttgctccagcatgcctgga

SEQ ID NO: 89195 - DNA, 574 bp, Homo sapiens
taacttcctcatcaacctatgggctccctgaggtcagaaaactccatgttatttgtctttgtatccccagtgcctagtgtggaaactgacacataacaagtgtttaatacgtgttctttgaatcagtggatggaagaaaattgagtctctccaaagtggtagatgagtttactactttaacactctggataggaatttaggaaatgctaatgtgatcagcatgcctatgtcaatggtcaacaaagggaacgacttgcactaaagagtcctggtagtatagttctcatataaacctatttcaaagaaacccacagacagacacatttatctgtgacggtagaagtcagagagaagagttagaaaaggcccccagggctgctgacagggcaaatacagtctcacatgcactacaaagacccgactctgacacctttctccagctttctcctgtgtgcattcagctcacatgaccagtgcagccaggccgcaccagagggaagatgaaggccattgtatctattgtcctttcatccacccctttttctaaattctatgggattaccctgaaaaggac

SEQ ID NO: 89196 - DNA, 507 bp, Homo sapiens
tagcatttccggcccccaagaatccctcttcctgtcctcttccagtaactgctcccttcctctctcaggggtaatcactatcccaacttgtaccatcacagattacttacaatttttttcttcttagatgtttttctactttttaattgaagtatgacttagtttactgcaaacatttcaagtgtgtactttggtagattaaaaaaaatagacttcatggccgggcacggtggctcacacctgtcatcccagtactttgggaggccgaggcaggcagatcacttgaggtcaggagttagagactagcctggccaacatagtgaaacctcgtctctactaaaaaatacaaaaattagctgggcgtggtggcgagcgtctgtagtcccagctacccgggaggctgaggcaggagaatcacttgaacctgggaggtggaggctgcagtgagccaagattgcgccactgcacttccagcctgggcgacagagtgacactgtctcaaaaaaa

SEQ ID NO: 89197 - DNA, 334 bp, Homo sapiens
taaataattgtttattaataattgtaaatttatttgttggagtcagaatggcttacactgccttatcatctagcctctggactctctagtagtgcttttatctgacactggtggggcatggaatgttctacacatcgctggtttccagctaacaagcatattcctttttaagtttcagttttatggtttttttgtttgtttgtttttaagagatgggctcttactgtgttggtcagggtagtgttggactcttggcctcaagaaatcctcccaccttggcctcccaaagtgctgggattacaggcatgagctaccacacctggccaagtttttt

SEQ ID NO: 89198 - DNA, 230 bp, Homo sapiens
acagggtgggtggcgtggccaggcctcagtgatggtgctgtgcagggctggggcgagctgatgtacgtgactgttggctacagggaaacctgtctggattctgtaggttgttttatcaaggcagaccttcaaccactggtcttgcagcctctgctcccactcctctagtgacaggaaactcagtcctttcccaggcaaccctgaaaatgagaaccttcttcccctccaag

SEQ ID NO: 89199 - DNA, 389 bp, Homo sapiens
gccttccctgagatcccatgtgaaatatagtcagggattacttccctgggcttgcgctggagactgggagtacctacgaggctgttcctgctgttgcttctacttttacattttacgtggccccctaaatccattccacctctaggtaaggttaaatcctccaactgtgatctggattctcagattcactcagggggtatgtgttcgaaggcaggtcttcccccctcacactttgggaattcacagtttttcacctaactcacagagtttgcagtgatcctttcaaaagatctgtgaattcgtttggttttcctggtactttcctgtggtggtttttggaatgatagttcacattgtgaatctccacacactgttctgtccatccacgt

SEQ ID NO: 89200 - DNA, 496 bp, Homo sapiens
ctaagtagctggtactataggtgtgcaccatcatgcctggctaatttttttgattttttttaaaaaattgattctcttatatacacctttatttgtactaaaaattgtaaaaagagcacaaagtttcctcttattgcaacccaaatttttcttattattacgctgtagccaaactacccaatgctttctttacccacaagtgactttgcttcaaattctcggtgttgggtttcatctcactggctttgggcttctaaaacacatggggatgcttatgtcctcttggcttcgagtcaaattaagcagtagagctgaagtatactgaagttattcagatacgttcaaactacacagaccccttatacatcactagtatcatggtagaaaggaaaagatacaagaaaaatacatcctagaactcattatcaaaatttttgatatatagtctattgtagcataaggtagctttctcaacctgctacataaaattaccagc

SEQ ID NO: 89201 - DNA, 403 bp, Homo sapiens
atagaagcaagagtcctttgactccatctcatcatactctagcttcagcaaactcattaagattggggccaaaattctggtcgctgctagtactccgcagaaatagttggccctgtatttgctacccgagagcagatggagaaaaaattctcttttggccagcgaacttccttcttgcttgttgaagatcagtgtttcaatttcccacttatcccaatgaagttctgagaaggaagcacatctgcatccttttctctgttttgcatctgttttaagaaagaccaggccactagactgtgggaactatcttcttcctaatgggagtactgggagcttttcttaatacctgtgtacagctgggcatatccatgatacctgtttgtagccattctcctgtttcagt

SEQ ID NO: 89202 - DNA, 413 bp, Homo sapiens
ggagccagtggcattgtaaatgcatggccctttccttccctgtctgctataagcattagcagtctgcactgagatgaagagaggtgtagtgactagggaacaattgtcacgtgctttgtgcctattcccgtgcagggaggataaacccagggtccatgaatcaggaagtgtctccaaacatgcttttcaaagagcattagaggtttagatctagaagggcttggaggtcttccagtctgaggaagaaactgagacccagggggtgaagagtcttcaaggtaatgcagcaagtgtctaatgaggactgagctgggaccagaatcaggagtttttttcattgcaatatatattttcgttgatcctttttttttcttcccttctagcctcttttcctttacaaatagcagcataca

SEQ ID NO: 89203 - DNA, 442 bp, Homo sapiens
tggcccaggaccaatcaggggctgaagtgatgattcatagaggctcggctcacagtccaaagcatgtccagaaaaggaaagtggtcaccagagcctgttagtccaagctgcaccgatttgtaagcccccaccatttcacagactctggtcagagggaaacagtccactggggtttgggctgcgagaaacatcctccccaaccgcctgacttccttatcacatcctgctggggaaaggcccaagaaacatccttatcaacattctcccaggcaacaagctatactgcccagatccctcctgcccaggcctataattactccagcctgtaagcggcagtgggctctggcatttagttggtcccctccatagagccgccaactctctctctttctttaaccttcaccttcccttcaaaatctaacagagcccaccatatacatgc

SEQ ID NO: 89204 - DNA, 381 bp, Homo sapiens
tcaaaaaataatttttaaaaacactattatctgcacatacctttaaatctgctataaagactagtgttattacataacaatttacatagtacatttctctcagagttttacgttaggaaaacgtttgctttttccaaggaagagagatagttccttttaacagacaataagctgtgtaactcaggggttttcctattgcctccctgcctttctgcctacggatgagttgtgtgctcacctgaagtagctttcttcctttaaactgaagtttctgatacaatcatcacgttccacagccagctcccactccattacccatttaatctggctcttatctttttactcttgttttaatttttaccgtattacaattggtccttg

SEQ ID NO: 89205 - DNA, 480 bp, Homo sapiens
gtttgagacggagtcttgctctgtcacttaagctgaagtgcagtggtgagattatagctcactctagcctcaaactcctgggctcaagccatcctcccacttcagcctccgcagtagcttggactacaggcacgcaccaccatgcccagataattttttattatttttgtagagacagggtcttgctatgttgcctaggcttaaagtttttttaaaattaattccatgtcatctcaaagaatattagaggttttgctactgtcatcaaaatgcatgtcatgcagccagctcacacagaagttgtgtttattgtttctcaattcctggaatagattcttaaaacttctggtttttattacccaccttaatagttgaaatagaaatatctgtaggttagcaacctacttcaacaccaagcagataaagtttcttgatgggtaggacttctaagaacattttcattaactccagaccttttcg

SEQ ID NO: 89206 - DNA, 459 bp, Homo sapiens
cggctgccctagaggaccccaacgttggccccattctcagggatataactgctattccagtttaataactagcttcaaaacaaaatgaatttttatattttctagatgaataatgtacaaccaccatcttcgtctgagcttgttattactttcaaacacaaagcttcattttaagcttggttaaaaaaaaaaaaaaaaaaaaaacggggatggggccgacctttgtggcccatccaagtggaatgtatgtctggtccaatgggcctggtgatgtgatcaaccgggattttaagggatatgcaatctcaacaagaccacagggagggttatctcgatggtgcaccagtttcagtacctaggaggggcttctcatcgagaggtgcctggatccaaaaggtcatccttgaaactgatactccagggggaaaagtggcaggagaaatgcgagaaatgggccca

SEQ ID NO: 89207 - DNA, 924 bp, Homo sapiens
cctataaatgtttaatggcttctacatccattcttttttaaagctgcatcttaaaatagaccaatttaatcattgtgcatgtaacaagcagattaatgagttctgaagttagctttaaagttaaatagacttaagataacactgtttttaaaattttggccaattcatcaaacttgaatgacgtccagtaacattcactaacatttcacaaaaggtaccattttattgtcaatcacaaaaataaccacttaaaattgaaatcttaatttctagtaccttggcttagagttcaggccatattatgaaccaattcaaatagacaagaacaaaaaatatctaaaaatcaggttttttttttaaaaaaaactttattttaaaattttggttacagtttcattcttaacaagtctactactgtttaatctctcaggattaaaaaaacatttattaagattctaaagaattaaacaacaaaggaatgtcaagagaagggccccattctcagggatataactgctattccagtttaataactagcttcaaaacaaaatgaatttttatattttctagatgaataatgtacaaccaccatcttcgtctgagcttgttattactttcaaacacaaagcttcattttaagcttggttaaaaaaaaaaaaaaaaaaaaaacggggatggggccgacctttgtggcccatccaagtggaatgtatgtctggtccaatgggcctggtgatgtgatcaaccgggattttaagggatatgcaatctcaacaagaccacagggagggttatctcgatggtgcaccagtttcagtacctaggaggggcttctcatcgagaggtgcctggatccaaaaggtcatccttgaaactgatactccagggggaaaagtggcaggagaaatgcgagaaatgggccca

SEQ ID NO: 89208 - DNA, 1350 bp, Homo sapiens
ttcagccctagagtcattgtgaaaagatctatcttcagatataaggaaaaaacaatcttttatttcttaggataaatctgtagaaggacctccagacagtgaaggccactgactactttatactctgtaagccatccctccctggtaggaaggactatttccaatcttacagagtacctctcagcaaatagacgttttcacatatactgtgattcatacatccctatggctggtgacctctttaaaaaggaaaggaaaaagcctaatcaaacaaaaagatgctgctagtaattcttaccctattgtgaatcctatataagcaaatttgtatctttgttttttcctacattagcagatctatttgatgtatatctctgagtgcagaaaatattttatggaaaaatcaatatatggaatttcaaattcagaattgctgatacacactatttggtttcacaattttatcctaggaaatagtattagagatttcaatttctggcttaaatggtagaattaattactcttaactcttaattttacttctgagttgaggtcaaggaacaggcagacacctgcagttaacgtctatacctctccatggccaagagttttaattttctcgtcttcaattttgtagatgttcatcattactaaatggattgattagtattttatctcctctccttgtccttactttccctctggtaaatatgttataaacagtgtaaggctcctaagatagagtagctggtaggacttagaagagaaacaaagggcactgataactcacataaatggaaaattggctctggaataactgacaacatattcaagtattttagtgcagtgtcactctcattaagaagaagagaatcagtaaatctatgtgactctaaacattctaatgaaaaaaggaatattctgccaattatctcacatttctaaatatctggatattggccattgtaaagacaaaacatacagatgatggacttgtctttccacctctcatttgcatggtttggagcattgtacctccagccatagactctaaggcaatttatatttgcttcctcttccctcttgagagaaaacgaaaatcttatttttccaagcaattaaaactcttctgcttcagctaggatgaaagaattaggagttctgtctccttgtatctaattgcatgtttcatctttcttgttttaatgattgacagaaaactaataaactgagacatctttgaatccaggttgaatgtactctcttggtggccccattgctaatttgtttgactattttgcaggatttcttactctgtaatggaaaggtttattaaatatgaggggtgca

SEQ ID NO: 89209 - DNA, 669 bp, Homo sapiens
attaagttgctccccttaaaagtatcaatgaagaaacacaaacccatgagatctctggtctcgcctggcttcagaggcacccccaaccacccagagagcaaaagcctttgtcaagcaaggtggaaatgcctgccctgctttcacagctctggcactaacccaaggctggaatgttgagggcctgcattccaggctaaagcaaggagcgggtgaggccacccctgggctccagaggatgtccaggatctcctgaagtcctggcaaggaaaagatcttgattaacgagggagaggcaatgcctgctgcaagggaaccacacttgcacatttcaagagcctgaaaagcatccatctatgctcccagcacaaactcacagttgaatcatgcctctactatgttcacagaccaaacatacacactgagctggatgtcactgtagacgggctagctcacatctttccaaaaattctaaatttagccccatcctgacgggatccaggggtaaacctacaggcaattctagacactagaaagaaagtgcagaagaagacaaaactctgccctcaagaagcttagacacttcaccttcatactgggttaagcaccatcgccatcatcatcatcatcgatctttattgtcactatcatcactgttaccaaggcactaac

SEQ ID NO: 89210 - DNA, 367 bp, Homo sapiens
acaaacaaacatcctattccaaaaacacataggctttatatagggaatatgtgttattttctaaattcatagcttctttcctatatgttttcccaaatgcttgtttcacttttataaaaatcctccttaggctgggcacagtggctcatgcctataatcccagcactttgggaggccgaggcaggcagatcacctgaggtcaggagttcgagaccagcctggccaacatggtaaaaccctgtctctactaaaaataacaaaaattagccaggcatggtggtgcatgcctgcaatcccagctatttgggaagccgaggcacaagaattgcttaaacccaggaggcagaggttgcagtgagccaagacg

SEQ ID NO: 89211 - DNA, 235 bp, Homo sapiens
gggagagggagacaggagtgggtgtgggaaaagtgtttcagacagagggaacatgtagaaaggtcaaaaggagagagcatatcatattcagataactaacatgtagtttgtatggcttaatgtagagttcaagaggtgaacgcaccaggtggatatgggggtttggctttgtgagagtagtgagagctgagactagagaggtaagcagaagccatctcttggagagctttgtaag

SEQ ID NO: 89212 - DNA, 818 bp, Homo sapiens
tgatctagaggatccgagttagggctacctgcctgcaatgtaaagtcatagaggtgactatctgatttaaatcaagtcagtaactatctgatttatgcatgtttttaaatgttactccagctgctaagcaaagaatggacaaggagaagcacagagtagccgcactgggtggaagacgacacctgctaggtgaccgaatagagaaaagtgggttgactggagattcaacttagagggagaactaattggatttccttgctgatgaatgagacacagggaggtgagtaaaacaagaatcaagtacagactccgaatttctgcttgagcaaccagatgaatggtaacttctaaatttgagatgtccatcaagcatccaagtacattagttggatatgtaagtttatagctaagggaggccacagtttaagaaagtagcatggtacagtggggtctgagaacgccaaggttccaagatcctttctgccacttacctgtataactgggatcaaataaatgatttcattctcagttacacagaatagtggctacttagaaaaaagttttacaccactccaatgaagtcatcgtacaatgcctggcatatagaaagtactgttgttccttttaacattcaagagaatggcgctgtcaaggagagaaatgactgatacatatgttttgctctctgcctgctgggaagatggctacgaagcttatattcagaaaagtcctctgcaatatctttcattagaacaagatccataagagaaagccttctttagtatggttctctgatggggtagcccttaacctaagtt

SEQ ID NO: 89213 - DNA, 393 bp, Homo sapiens
ttctctcctttgtatggcatttgtttgtcttagaccgtgacgtcctgagagaaaactaggccccatttgtggttaggttggtttccaatctcaggggcagagagctgctttacataattgatgaaaactttgtttctgtttcctaactctcgattcagtgcttttttcacatactcccaagcttacatgtccttgctaccttcagaaacaaaacatggtattaaaagttgctgctggatattgggcagctgatatctgacctcatgaagcagaaggggagggtgaggaattgccacttgcaatagggatcccctgagcttccctgatactaacatggtgggggggggggcttgataaaaaacaaagggcaggctcaagagctcagggctgctg

SEQ ID NO: 89214 - DNA, 281 bp, Homo sapiens
tagcttgccaatttctgcaaaaaaaaatccagttggaatttttaagagaattgtattaaatatgtagatcaacttggggagcgttgccatcttaacaatagtaagtcttccaattcatgaacacataatatctttcattttatctttttcttgagacagagtcttgctctgtcacccaggctggagtgcagtggcacaatctcggctcactgcagcctctgcctccccgtttaagtgattgccttgccccagcctcccaattagctgggactacaggcatc

SEQ ID NO: 89215 - DNA, 443 bp, Homo sapiens
actggagtactcctagataaaggaactgcacagtgaatattcttttaggaatgacaacagtaataacaacagtaacagctaatgcttaccaggggctgacaaagtacttggtccagcattggcagtttaggggcctctcatgtccttctcatcacaatcccaggaggtagttattaccaaatgtgggcttgacctctgaatttaaaattgcaatttacccctggccctcctgctctccccttaacctactctacctttttttctttccataccacttattgcctcctaatacactacattattttcttatttattatgtttattgtctgtcttcatcccctcctgaaactgtaaatggtaaggtctccctatgaaagggttttgtctttttctccccaccgatgtattccaagtacttaggacagtccctggtacaaaggatg

SEQ ID NO: 89216 - DNA, 226 bp, Homo sapiens
accatcagttctacaatttaaaatttttttaaattttttcttttttacctccagaggaagttcccttgaatcctcttagccaaaaacaaaatatgactatcaaacaaaagacataaacacttttagatatgattaattgccaacgtaatatccaacacagcatatcacaccactttttaaaaaccagttctgccaggcacagtggctcacacttgtaatctcagca

SEQ ID NO: 89217 - DNA, 322 bp, Homo sapiens
gggcctttctagacaatcatgagccatgtttctgccaacccttgctgtatttgatgtgctttgatgtacttctactttgtgctttgatgcacctctacatcaaccttcgctgagcacaaggcaattccccctcctttgagtccttagattcccacccagtctgggaattcacgatagaaacacgacgggacacagaactaatataaccaagatgccaccacaaaattcagttaaatgtgctgaaacatgaggcggtaaactgtgtccccgactgtttcgggtttctgaaccagcagctttgtctacgaaacacacattcagg

SEQ ID NO: 89218 - DNA, 2010 bp, Homo sapiens
  misc_feature (871)..(871): n is a, c, g, or t
  misc_feature (882)..(882): n is a, c, g, or t
  misc_feature (1318)..(1318): n is a, c, g, or t
  misc_feature (1799)..(1799): n is a, c, g, or t
gtttgtaaaatgaatgggagtggttgcctttagaatattcaggtaggatgtttagtggatgttgtaaaagagcatctagagcttagaaaacaggaggaaaggttgagatttagaagtcatgagttttctaaaagctaaagccctgagtgtcaggagatgtgggttttaatgtagagtctgtcattatattgtcctggggtagtagtcacttctctggcattggcagtccttgtttgtaaaataaaactctagacttgatctcacaggcctctcccaactctgaaactttgttctaaagaagaaaatatattctcttaaaatttcgtgggctagtctataagggaaaaaagatgctttagcaatggtttggggtatatgatgtcatgaaagtaatattctttttactgtccaagtcagtaatttactgtgtagagaattggaaatggaccagaggcagtttcccagaataggtcattatttggtgttagtaattggtcattcacgcatctgcataccctttgtttccttaagtaactctcctttctggtaaccaccttaggtttgtcaaggtggaagtcatgtggtcaaatcaaatggaaacacaagtgtgttaggtattagattcattttcctgtccccaaagtacccgtttggtaatgctggcagaagacatacatgcggccaacaatcataggaaaaaaagctccacatcactgatcattagagaaatgcaaatcaaaaccacaatgagatcgtatcccatactaggcagaatggctattaaaaagtcaaaaaataacagatgctggcaagtttgtggagaaaaaggaacacttatacactgtcggtgggagtgtaaattagttcagcnattgtggaagntagtgtggtgattcctcaaagacctaaagacagaaataccatttgacccagcagtcctattactgggtatatattcaaaggaatataaattattctgttataaagacacatgcacatgtatgttcattgcagcactattcacagtagcaaagacatggaatcaacctgaatgcccatcagtgataaactggataaagaaaatgtagtacatatgcagccataaaaaagaatgagatcacgtcctttgcagggacatggatggagctggaggccattatcattagcaaactaacacagaaacagaaaaccaaatactgcatgttctcatttataagtgggagctaaatgatgagaatacatcgacgcaaagaggggcacaacagacactggggcctaccagagggtggagggtgtgaggaaggagaggatcaggaanaataactaatggagaatgggcttattacctgggtgatgaaataatctgcacaacaaacccccatgacacacgtttgcctgtggaacaaacctgaacatgtatccctgaacttaaaaaaaaaatcaaattgatagtctataaacaagctgccagaggctccagtgaaacctgggagctgtgggcagagcaagtaggctgtctctgttacactctgccacctcctagcggtagcagcttttagttcctgtgtcacagaattgaacattttcctgctttgcaaggaactttcaaaggctaattcgcctttactctcacctgcttccgtggaggaggtgaataaagcctgtatttcagtgatgtagtagtttcttaggctgctgtaacaaagtaccccaaatttggtgacataaaacgagaaatttattctgcacagttcaggaggccagaagtctgaaattgagatggcagtaggggtagtgcnaccttgggaggctgtaggggagagtctgttctttttctcttcctaccgctccagtttctgcttctgtggtcacactgccttttcttctctgtctctcctttgtacatctttcattatgaggacactgtcattggatttagagcccacctggatagaccagatgatttaatcttaagatccttactaacatagcgagaccccatctctacca

SEQ ID NO: 89219 - DNA, 356 bp, Homo sapiens
caaattaaatataaattacattttcaagacagctagcaatctattattttatctgggaaaatatcttctgaattctaatcaataaactttaaaaataaacctttaggatacccacatgttagagaatgttattgatgtattcaaaaaatatttcttgatcatcttctatgagtctaacactcttcccagaacaggacacggtgcaataaacaaaacagaccaagtctctaccttcacggaggttatcttatggaacaaatgtatttttacattgcttgttgttatccagcaatattttaccagggtcaatccctaactgacaaaacacgtcacagaaattgtctttccattaaacc

SEQ ID NO: 89220 - DNA, 3405 bp, Homo sapiens
agcgggcgcggtgcctgcgggcaggcgcggaggttgcgcggcgtcctgcgctagcagttcccggacactgcgctcgcgtcgcatcctcaggtggttgcagaagtttcgtggtgtcgggcgcgcgtctgcactgcagacgcagagggtttgggagcgagcagtttcctgcccagggatgggggtcctggctgcacttcacgggggcggccctttcgtttcgctctgcgtgacaggtctcgcttgattgggtttctcatgggtctctggcgtttctacggcgcggctctcacggactcaggccaggccactcgcaggattaattggaattcttcaaaatgtcaggtgtggtacccacagcccctgaacagcctgcaggtgaaatggaaaatcaaacaaaaccaccagatccaaggcctgatgctcctcctgaatacaattctcattttttaccaggaccccctggaacagctgtccctccacctactggctacccaggaggcttgcctatgggatactacagtccacagcaacccagtaccttccctttgtaccagccagttggtggtatccatcctgtccggtatcagcctggcaaatatcctatgccaaatcagtctgttccaataacatggatgccagggccaactcctatggcaaactgccctcctggtctggaatacttagttcagttggacaacatacatgttcttcagcattttgagcctctggaaatgatgacatgttttgaaactaataatagatatgatattaaaaacaactcagaccagatggtttacgttgtaaccgaagacacagatgactttaccaggaatgcctatcggacactaaggcccttcgtcctccgggtcactgattgtatgggccgagaaatcatgacaatgcagagacccttcagatgcacctgctgttgcttctgttgcccctctgccagacaagagctggaggtgcagtgtcctcctggtgtcaccattggctttgttgcggaacattggaacctgtgcagggcggtgtacagcatccaaaatgagaagaaagaaaatgtgatgagagttcgtgggccatgctcaacctatggctgtggttcagattctgtttttgaggtcaaatcccttgatggcatatccaacatcggcagtattatccggaagtggaatggtttgttatcagcaatggcagatgctgaccattttgacattcacttcccactagacctggatgtgaagatgaaagccatgatttttggagcttgcttcctcattgacttcatgtattttgaaagatctccaccacaacgttcaagatagagagacacagcaagccatcaactatggttaattttgaaaaatggaaaagttggattgggcttacagtcagcactcagttatttgcaagtgtatttctttgctttgtagagtatttttattgggtgttaactttgacagctgagagtgggcttgcaagaacacaatctaaaagtgtgtttcaattgagtatctctctagtagaataggagttcatcctgaaaagctgtgactcattaacccagtaaacatatacaaagtaagcttaaaacactataaacatgagataagggaaaatgaatccagagttctcatattaataggtagtgaaacaataaggctttttagagcagactttgttggcataaaataacctggcttctatccctaaccctttcctacctttcctctccgtcaacatgtcctcatactgaagacaaacttgtttcaatgatagtcttcatttttaaaaacaaaaaggcaggcagacagaaataatgatgttttcttgcactaagaaggtactacttgtacacatatatcaaaacctcattctgcaaagtttttgaaggtttcaatgggaaatttgattttattacaaaataaaacattttttaatgttaaagtttatatattccatgcttgttttctcattcactggcatggatgatcaggagctgcctatatatgaaggcagaatcagactatcaggaaaggagctggccagggccacagccagtcaagatctctgagcaacttagagacattggtgtcattatatgaagcttgcatttaatacatttatacataatacatttgtacatttaattcataacgtctcttggtcacagatgccttatatataaaataagttgccagatctctaagattgcctagtacacctttgtatctcatttgatgtgatacccagaagagatcattgttttttgtttttgtttttgtttttttcaagaagatccttcgtgatcaccatgctgttctcatggtaagaactggagttatgtttttaaatttggaaatatgacattttatgtagcactttataaaaagtgaaagcgacaaattccaccgctgcttaatactgctttgcttctttttattgacatgatagataaatatgtatctacacagagtaataataataaaacacagtaaacattctatttctctatggtctacagcatgccagtaaataatatgtaggaccaataataaattatcaattacacatttttgtgttaactaattaaaagcatagtgtataagtgagtacactctaattaacttgcttctgttgcactttagttttctacctgcatatggactgcatttttttttttaacacagtcagtatgtagaatgggatgtattcttctgctgctgcttattaaataaagaaagcctgagtgttcttagatggggttattctgagatgagggtcttagcctacagttctttttgaaatgaaaggtgctttgttttttaattatattcatcttttcagggtaaatttgtttttctgagtttctcgtaatgctcatttttacatgctgctactagcttttttttttaaaaaaagtaaaagttgctgctttctaaaatattaattgccttatatttgaaagtgccattgcaatcgtaagtagactatgtatttcctataatgatgtctgatatttaaataggaaatcagacaaacaatattcagaaagtttaagcatataaactttttatttttaacttgcctaaatccctgtattccaaaacctgctgcatcataataaatatatctatatatatttagcataagacgtgatatttttaatttcttttttaaaaaattatatttgtctcttagagttaaaattttctttatataatattgtcatatgtcatagttttaatacaattcacatgatttctatgtttcttaatgatattttgttgtgtaaaattgatcggattgattaaaaaacaaattctctggaatttgtgcgttcatgctttttcgtattctttatggcttttaaataaatatacaatggttaatagtaaaaaaaaa

SEQ ID NO: 89221 - DNA, 3365 bp, Homo sapiens
cggggtccgagacggggaagccgcgcgcggggaaggagggtccaggcgtgccggacccgcccccagaacccgcgcctagccctcccttccgcgcgcttactttgtttataacttgaaaaatcctctccgtctcccttccctgcctcctttcctttccctttcctctgccagtacaactagacccggcgtctggcgtccccggtgcccagcattctgcggggcaggcggcttggagacacatagggcaccgtacaacaaacttccagctccagaggattaattggaattcttcaaaatgtcaggtgtggtacccacagcccctgaacagcctgcaggtgaaatggaaaatcaaacaaaaccaccagatccaaggcctgatgctcctcctgaatacaattctcattttttaccaggaccccctggaacagctgtccctccacctactggctacccaggaggcttgcctatgggatactacagtccacagcaacccagtaccttccctttgtaccagccagttggtggtatccatcctgtccggtatcagcctggcaaatatcctatgccaaatcagtctgttccaataacatggatgccagggccaactcctatggcaaactgccctcctggtctggaatacttagttcagttggacaacatacatgttcttcagcattttgagcctctggaaatgatgacatgttttgaaactaataatagatatgatattaaaaacaactcagaccagatggtttacgttgtaaccgaagacacagatgactttaccaggaatgcctatcggacactaaggcccttcgtcctccgggtcactgattgtatgggccgagaaatcatgacaatgcagagacccttcagatgcacctgctgttgcttctgttgcccctctgccagacaagagctggaggtgcagtgtcctcctggtgtcaccattggctttgttgcggaacattggaacctgtgcagggcggtgtacagcatccaaaatgagaagaaagaaaatgtgatgagagttcgtgggccatgctcaacctatggctgtggttcagattctgtttttgaggtcaaatcccttgatggcatatccaacatcggcagtattatccggaagtggaatggtttgttatcagcaatggcagatgctgaccattttgacattcacttcccactagacctggatgtgaagatgaaagccatgatttttggagcttgcttcctcattgacttcatgtattttgaaagatctccaccacaacgttcaagatagagagacacagcaagccatcaactatggttaattttgaaaaatggaaaagttggattgggcttacagtcagcactcagttatttgcaagtgtatttctttgctttgtagagtatttttattgggtgttaactttgacagctgagagtgggcttgcaagaacacaatctaaaagtgtgtttcaattgagtatctctctagtagaataggagttcatcctgaaaagctgtgactcattaacccagtaaacatatacaaagtaagcttaaaacactataaacatgagataagggaaaatgaatccagagttctcatattaataggtagtgaaacaataaggctttttagagcagactttgttggcataaaataacctggcttctatccctaaccctttcctacctttcctctccgtcaacatgtcctcatactgaagacaaacttgtttcaatgatagtcttcatttttaaaaacaaaaaggcaggcagacagaaataatgatgttttcttgcactaagaaggtactacttgtacacatatatcaaaacctcattctgcaaagtttttgaaggtttcaatgggaaatttgattttattacaaaataaaacattttttaatgttaaagtttatatattccatgcttgttttctcattcactggcatggatgatcaggagctgcctatatatgaaggcagaatcagactatcaggaaaggagctggccagggccacagccagtcaagatctctgagcaacttagagacattggtgtcattatatgaagcttgcatttaatacatttatacataatacatttgtacatttaattcataacgtctcttggtcacagatgccttatatataaaataagttgccagatctctaagattgcctagtacacctttgtatctcatttgatgtgatacccagaagagatcattgttttttgtttttgtttttgtttttttcaagaagatccttcgtgatcaccatgctgttctcatggtaagaactggagttatgtttttaaatttggaaatatgacattttatgtagcactttataaaaagtgaaagcgacaaattccaccgctgcttaatactgctttgcttctttttattgacatgatagataaatatgtatctacacagagtaataataataaaacacagtaaacattctatttctctatggtctacagcatgccagtaaataatatgtaggaccaataataaattatcaattacacatttttgtgttaactaattaaaagcatagtgtataagtgagtacactctaattaacttgcttctgttgcactttagttttctacctgcatatggactgcatttttttttttaacacagtcagtatgtagaatgggatgtattcttctgctgctgcttattaaataaagaaagcctgagtgttcttagatggggttattctgagatgagggtcttagcctacagttctttttgaaatgaaaggtgctttgttttttaattatattcatcttttcagggtaaatttgtttttctgagtttctcgtaatgctcatttttacatgctgctactagcttttttttttaaaaaaagtaaaagttgctgctttctaaaatattaattgccttatatttgaaagtgccattgcaatcgtaagtagactatgtatttcctataatgatgtctgatatttaaataggaaatcagacaaacaatattcagaaagtttaagcatataaactttttatttttaacttgcctaaatccctgtattccaaaacctgctgcatcataataaatatatctatatatatttagcataagacgtgatatttttaatttcttttttaaaaaattatatttgtctcttagagttaaaattttctttatataatattgtcatatgtcatagttttaatacaattcacatgatttctatgtttcttaatgatattttgttgtgtaaaattgatcggattgattaaaaaacaaattctctggaatttgtgcgttcatgctttttcgtattctttatggcttttaaataaatatacaatggttaatagtaaaaaaaaa

SEQ ID NO: 89222 - DNA, 1123 bp, Homo sapiens
agcgggcgcggtgcctgcgggcaggcgcggaggttgcgcggcgtcctgcgctagcagttcccggacactgcgctcgcgtcgcatcctcaggtggttgcagaagtttcgtggtgtcgggcgcgcgtctgcactgcagacgcagagggtttgggagcgagcagtttcctgcccagggatgggggtcctggctgcacttcacgggggcggccctttcgtttcgctctgcgtgacaggtctcgcttgattgggtttctcatgggtctctggcgtttctacggcgcggctctcacggactcaggccaggccactcgcaggattaattggaattcttcaaaatgtcaggtgtggtacccacagcccctgaacagcctgcaggtgaaatggaaaatcaaacaaaaccaccagatccaaggcctgatgctcctcctgaatacaattctcattttttaccaggaccccctggaacagctgtccctccacctactggctacccaggaggcttgcctatgggatactacagtccacagcaacccagtaccttccctttgtaccagccagttggtggtatccatcctgtccggtatcagcctggcaaatatcctatgccaaatcagtctgttccaataacatggatgccagggccaactcctatggcaaactgccctcctggtctggaatacttagttcagttggacaacatacatgttcttcagcattttgagcctctggaaactggaggtgcagtgtcctcctggtgtcaccattggctttgttgcggaacattggaacctgtgcagggcggtgtacagcatccaaaatgagaagaaagaaaatgtgatgagagttcgtgggccatgctcaacctatggctgtggttcagattctgtttttgaggtgaaactatgtaaaaatagtgtttctgatatttttcctactcatattaacagaccatggaaagatctggttgtagacatttttttttaatgtgaatgaataacatagtgttaggaaagagttaattaaccagttgacatcaaaagattttaaagttattgtgagtagattgaggttttccaaaatgaaagctttttttatgacttcagtacttgataaaaataaaaag

SEQ ID NO: 89223 - DNA, 3318 bp, Homo sapiens
cggggtccgagacggggaagccgcgcgcggggaaggagggtccaggcgtgccggacccgcccccagaacccgcgcctagccctcccttccgcgcgcttactttgtttataacttgaaaaatcctctccgtctcccttccctgcctcctttcctttccctttcctctgccagtacaactagacccggcgtctggcgtccccggtgcccagcattctgcggggcaggcggattaattggaattcttcaaaatgtcaggtgtggtacccacagcccctgaacagcctgcaggtgaaatggaaaatcaaacaaaaccaccagatccaaggcctgatgctcctcctgaatacaattctcattttttaccaggaccccctggaacagctgtccctccacctactggctacccaggaggcttgcctatgggatactacagtccacagcaacccagtaccttccctttgtaccagccagttggtggtatccatcctgtccggtatcagcctggcaaatatcctatgccaaatcagtctgttccaataacatggatgccagggccaactcctatggcaaactgccctcctggtctggaatacttagttcagttggacaacatacatgttcttcagcattttgagcctctggaaatgatgacatgttttgaaactaataatagatatgatattaaaaacaactcagaccagatggtttacgttgtaaccgaagacacagatgactttaccaggaatgcctatcggacactaaggcccttcgtcctccgggtcactgattgtatgggccgagaaatcatgacaatgcagagacccttcagatgcacctgctgttgcttctgttgcccctctgccagacaagagctggaggtgcagtgtcctcctggtgtcaccattggctttgttgcggaacattggaacctgtgcagggcggtgtacagcatccaaaatgagaagaaagaaaatgtgatgagagttcgtgggccatgctcaacctatggctgtggttcagattctgtttttgaggtcaaatcccttgatggcatatccaacatcggcagtattatccggaagtggaatggtttgttatcagcaatggcagatgctgaccattttgacattcacttcccactagacctggatgtgaagatgaaagccatgatttttggagcttgcttcctcattgacttcatgtattttgaaagatctccaccacaacgttcaagatagagagacacagcaagccatcaactatggttaattttgaaaaatggaaaagttggattgggcttacagtcagcactcagttatttgcaagtgtatttctttgctttgtagagtatttttattgggtgttaactttgacagctgagagtgggcttgcaagaacacaatctaaaagtgtgtttcaattgagtatctctctagtagaataggagttcatcctgaaaagctgtgactcattaacccagtaaacatatacaaagtaagcttaaaacactataaacatgagataagggaaaatgaatccagagttctcatattaataggtagtgaaacaataaggctttttagagcagactttgttggcataaaataacctggcttctatccctaaccctttcctacctttcctctccgtcaacatgtcctcatactgaagacaaacttgtttcaatgatagtcttcatttttaaaaacaaaaaggcaggcagacagaaataatgatgttttcttgcactaagaaggtactacttgtacacatatatcaaaacctcattctgcaaagtttttgaaggtttcaatgggaaatttgattttattacaaaataaaacattttttaatgttaaagtttatatattccatgcttgttttctcattcactggcatggatgatcaggagctgcctatatatgaaggcagaatcagactatcaggaaaggagctggccagggccacagccagtcaagatctctgagcaacttagagacattggtgtcattatatgaagcttgcatttaatacatttatacataatacatttgtacatttaattcataacgtctcttggtcacagatgccttatatataaaataagttgccagatctctaagattgcctagtacacctttgtatctcatttgatgtgatacccagaagagatcattgttttttgtttttgtttttgtttttttcaagaagatccttcgtgatcaccatgctgttctcatggtaagaactggagttatgtttttaaatttggaaatatgacattttatgtagcactttataaaaagtgaaagcgacaaattccaccgctgcttaatactgctttgcttctttttattgacatgatagataaatatgtatctacacagagtaataataataaaacacagtaaacattctatttctctatggtctacagcatgccagtaaataatatgtaggaccaataataaattatcaattacacatttttgtgttaactaattaaaagcatagtgtataagtgagtacactctaattaacttgcttctgttgcactttagttttctacctgcatatggactgcatttttttttttaacacagtcagtatgtagaatgggatgtattcttctgctgctgcttattaaataaagaaagcctgagtgttcttagatggggttattctgagatgagggtcttagcctacagttctttttgaaatgaaaggtgctttgttttttaattatattcatcttttcagggtaaatttgtttttctgagtttctcgtaatgctcatttttacatgctgctactagcttttttttttaaaaaaagtaaaagttgctgctttctaaaatattaattgccttatatttgaaagtgccattgcaatcgtaagtagactatgtatttcctataatgatgtctgatatttaaataggaaatcagacaaacaatattcagaaagtttaagcatataaactttttatttttaacttgcctaaatccctgtattccaaaacctgctgcatcataataaatatatctatatatatttagcataagacgtgatatttttaatttcttttttaaaaaattatatttgtctcttagagttaaaattttctttatataatattgtcatatgtcatagttttaatacaattcacatgatttctatgtttcttaatgatattttgttgtgtaaaattgatcggattgattaaaaaacaaattctctggaatttgtgcgttcatgctttttcgtattctttatggcttttaaataaatatacaatggttaatagtaaaaaaaaa

SEQ ID NO: 89224 - DNA, 3244 bp, Homo sapiens
cggggtccgagacggggaagccgcgcgcggggaaggagggtccaggcgtgccggacccgcccccagaacccgcgcctagccctcccttccgcgcgcttactttgtttataacttgaaaaatcctctccgtctcccttccctgcctcctttcctttccctttcctctgccagtacaactagacccggcgtctggcgtccccggtgcccagcattctgcggggcaggcggattaattggaattcttcaaaatgtcaggtgtggtacccacagcccctgaacagcctgcaggtgaaatggaaaatcaaacaaaaccaccagatccaaggcctgatgctcctcctgaatacaattctcattttttaccaggaccccctggaacagctgtccctccacctactggctacccaggaggcttgcctatgggatactacagtccacagcaacccagtaccttccctttgtaccagccagttggtggtatccatcctgtccggtatcagcctggcaaatatcctatgccaaatcagtctgttccaataacatggatgccagggccaactcctatggcaaactgccctcctggtctggaatacttagttcagttggacaacatacatgttcttcagcattttgagcctctggaaatgatgacatgttttgaaactaataatagatatgatattaaaaacaactcagaccagatggtttacgttgtaaccgaagacacagatgactttaccaggaatgcctatcggacactaaggcccttcgtcctccgggtcactgattgtatgggccgagaaatcatgacaatgcagagacccttcagatgcacctgctgttgcttctgttgcccctctgccagacaagagctggaggtgcagtgtcctcctggtgtcaccattggctttgttgcggaacattggaacctgtgcagggcggtgtacagcatccaaaatgagaagaaagaaaatgtgatgagagttcgtgggccatgctcaacctatggctgtggttcagattctgtttttgaggtcaaatcccttgatggcatatccaacatcggcagtattatccggaagtggaatggtttgttatcagcaatggcagatgctgaccattttgacattcacttcccactagacctggatgtgaagatgaaagccatgatttttggagcttgcttcctcattgacttcatgtattttgaaagatctccaccacaacgttcaagatagagagacacagcaagccatcaactatggttaattttgaaaaatggaaaagttggattgggcttacagtcagcactcagttatttgcaagtgtatttctttgctttgtagagtatttttattgggtgttaactttgacagctgagagtgggcttgcaagaacacaatctaaaagtgtgtttcaattgagtatctctctagtagaataggagttcatcctgaaaagctgtgactcattaacccagtaaacatatacaaagtaagcttaaaacactataaacatgagataagggaaaatgaatccagagttctcatattaataggtagtgaaacaataaggctttttagagcagactttgttggcataaaataacctggcttctatccctaaccctttcctacctttcctctccgtcaacatgtcctcatactgaagacaaacttgtttcaatgatagtcttcatttttaaaaacaaaaaggcaggcagacagaaataatgatgttttcttgcactaagaaggtactacttgtacacatatatcaaaacctcattctgcaaagtttttgaaggtttcaatgggaaatttgattttattacaaaataaaacattttttaatgttaaagtttatatattccatgcttgttttctcattcactggcatggatgatcaggagctgcctatatatgaaggcagaatcagactatcaggaaaggagctggccagggccacagccagtcaagatctctgagcaacttagagacattggtgtcattatatgaagcttgcatttaatacatttatacataatacatttgtacatttaattcataacgtctcttggtcacagatgccttatatataaaataagttgccagatctctaagattgcctagtacacctttgtatctcatttgatgtgatacccagaagagatcattgttttttgtttttgtttttgtttttttcaagaagatccttcgtgatcaccatgctgttctcatggtaagaactggagttatgtttttaaatttggaaatatgacattttatgtagcactttataaaaagtgaaagcgacaaattccaccgctgcttaatactgctttgcttctttttattgacatgatagataaatatgtatctacacagagtaataataataaaacacagtaaacattctatttctctatggtctacagcatgccagtaaataatatgtaggaccaataataaattatcaattacacatttttgtgttaactaattaaaagcatagtgtataagtgagtacactctaattaacttgcttctgttgcactttagttttctacctgcatatggactgcatttttttttttaacacagtcagtatgtagaatgggatgtattcttctgctgctgcttattaaataaagaaagcctgagtgttcttagatggggttattctgagatgagggtcttagcctacagttctttttgaaatgaaaggtgctttgttttttaattatattcatcttttcagggtaaatttgtttttctgagtttctcgtaatgctcatttttacatgctgctactagcttttttttttaaaaaaagtaaaagttgctgctttctaaaatattaattgccttatatttgaaagtgccattgcaatcgtaagtagactatgtatttcctataatgatgtctgatatttaaataggaaatcagacaaacaatattcagaaagtttaagcatataaactttttatttttaacttgcctaaatccctgtattccaaaacctgctgcatcataataaatatatctatatatatttagcataagacgtgatatttttaatttcttttttaaaaaattatatttgtctcttagagttaaaattttctttatataatattgtcatatgtcatagttttaatacaattcacatgatttctatgtttcttaatgatattttgttgtgtaaaattgatcggattgattaaaaaacaaattctctgga

SEQ ID NO: 89225 - DNA, 3400 bp, Homo sapiens
cggggtccgagacggggaagccgcgcgcggggaaggagggtccaggcgtgccggacccgcccccagaacccgcgcctagccctcccttccgcgcgcttactttgtttataacttgaaaaatcctctccgtctcccttccctgcctcctttcctttccctttcctctgccagtacaactagacccggcgtctggcgtccccggtgcccagcattctgcggggcaggcgggtctcgcttgattgggtttctcatgggtctctggcgtttctacggcgcggctctcacggactcaggccaggccactcgcaggattaattggaattcttcaaaatgtcaggtgtggtacccacagcccctgaacagcctgcaggtgaaatggaaaatcaaacaaaaccaccagatccaaggcctgatgctcctcctgaatacaattctcattttttaccaggaccccctggaacagctgtccctccacctactggctacccaggaggcttgcctatgggatactacagtccacagcaacccagtaccttccctttgtaccagccagttggtggtatccatcctgtccggtatcagcctggcaaatatcctatgccaaatcagtctgttccaataacatggatgccagggccaactcctatggcaaactgccctcctggtctggaatacttagttcagttggacaacatacatgttcttcagcattttgagcctctggaaatgatgacatgttttgaaactaataatagatatgatattaaaaacaactcagaccagatggtttacgttgtaaccgaagacacagatgactttaccaggaatgcctatcggacactaaggcccttcgtcctccgggtcactgattgtatgggccgagaaatcatgacaatgcagagacccttcagatgcacctgctgttgcttctgttgcccctctgccagacaagagctggaggtgcagtgtcctcctggtgtcaccattggctttgttgcggaacattggaacctgtgcagggcggtgtacagcatccaaaatgagaagaaagaaaatgtgatgagagttcgtgggccatgctcaacctatggctgtggttcagattctgtttttgaggtcaaatcccttgatggcatatccaacatcggcagtattatccggaagtggaatggtttgttatcagcaatggcagatgctgaccattttgacattcacttcccactagacctggatgtgaagatgaaagccatgatttttggagcttgcttcctcattgacttcatgtattttgaaagatctccaccacaacgttcaagatagagagacacagcaagccatcaactatggttaattttgaaaaatggaaaagttggattgggcttacagtcagcactcagttatttgcaagtgtatttctttgctttgtagagtatttttattgggtgttaactttgacagctgagagtgggcttgcaagaacacaatctaaaagtgtgtttcaattgagtatctctctagtagaataggagttcatcctgaaaagctgtgactcattaacccagtaaacatatacaaagtaagcttaaaacactataaacatgagataagggaaaatgaatccagagttctcatattaataggtagtgaaacaataaggctttttagagcagactttgttggcataaaataacctggcttctatccctaaccctttcctacctttcctctccgtcaacatgtcctcatactgaagacaaacttgtttcaatgatagtcttcatttttaaaaacaaaaaggcaggcagacagaaataatgatgttttcttgcactaagaaggtactacttgtacacatatatcaaaacctcattctgcaaagtttttgaaggtttcaatgggaaatttgattttattacaaaataaaacattttttaatgttaaagtttatatattccatgcttgttttctcattcactggcatggatgatcaggagctgcctatatatgaaggcagaatcagactatcaggaaaggagctggccagggccacagccagtcaagatctctgagcaacttagagacattggtgtcattatatgaagcttgcatttaatacatttatacataatacatttgtacatttaattcataacgtctcttggtcacagatgccttatatataaaataagttgccagatctctaagattgcctagtacacctttgtatctcatttgatgtgatacccagaagagatcattgttttttgtttttgtttttgtttttttcaagaagatccttcgtgatcaccatgctgttctcatggtaagaactggagttatgtttttaaatttggaaatatgacattttatgtagcactttataaaaagtgaaagcgacaaattccaccgctgcttaatactgctttgcttctttttattgacatgatagataaatatgtatctacacagagtaataataataaaacacagtaaacattctatttctctatggtctacagcatgccagtaaataatatgtaggaccaataataaattatcaattacacatttttgtgttaactaattaaaagcatagtgtataagtgagtacactctaattaacttgcttctgttgcactttagttttctacctgcatatggactgcatttttttttttaacacagtcagtatgtagaatgggatgtattcttctgctgctgcttattaaataaagaaagcctgagtgttcttagatggggttattctgagatgagggtcttagcctacagttctttttgaaatgaaaggtgctttgttttttaattatattcatcttttcagggtaaatttgtttttctgagtttctcgtaatgctcatttttacatgctgctactagcttttttttttaaaaaaagtaaaagttgctgctttctaaaatattaattgccttatatttgaaagtgccattgcaatcgtaagtagactatgtatttcctataatgatgtctgatatttaaataggaaatcagacaaacaatattcagaaagtttaagcatataaactttttatttttaacttgcctaaatccctgtattccaaaacctgctgcatcataataaatatatctatatatatttagcataagacgtgatatttttaatttcttttttaaaaaattatatttgtctcttagagttaaaattttctttatataatattgtcatatgtcatagttttaatacaattcacatgatttctatgtttcttaatgatattttgttgtgtaaaattgatcggattgattaaaaaacaaattctctggaatttgtgcgttcatgctttttcgtattctttatggcttttaaataaatatacaatggttaatagtaaaaaaaaa

SEQ ID NO: 89226 - DNA, 868 bp, Homo sapiens
tgcgcagccgcggtgggaggaggcaccggccgcgcggcgggaggaggtgccggccgagcaccgcagacagcgccgggaagatgagcacggaaggtggtggccgtcgctgccaggcacaagtgtcccgccgcatctccttcagcgcgagccaccgattgtacagtaaatttctaagtgatgaagaaaacttgaaactgtttgggaaatgcaacaatccaaatggccatgggcacaattataaagattgaccctgctacgggaatggttatgaatctggctgatctcaaaaaatatatggaggaggcgattatgcagccccttgatcataagaatctggatatggatgtgccatactttgcagatgtggtgagcacgactgaaaatgtagctgtttatatctgggacaacctccagaaagttcttcctgtaggagttctttataaagtaaaagtatacgaaactgacaataatattgtggtttataaaggagaatagctattggggttagcattgcacaaagcccagtttctttctgtgtttgaaaaagattttgatccccttggaatattaagaggtcaacacgtgattgttgtacgtacacattgtgctctggagtgcctatttattgaaatcattgtaagacctgttataaatttaagtctatttaaaactaaacttgtaatatacatcctgaaaatcatttagagagtcttttatttataaattaaaaatcacttcattttcaagcgagcaacgcttcaacaaaaacattttgggggcgcgcgggctaaaaagttttgaaccactcgttgggccgcgcggccctggtatcggacttgggctagggtcccaggagacccgggcagca

SEQ ID NO: 89227 - DNA, 943 bp, Homo sapiens
tgcgcagccgcggtgggaggaggcaccggccgcgcggcgggaggaggtgccggccgagcaccgcagacagcgccgggaagatgagcacggaaggtggtggccgtcgctgccaggcacaagtgtcccgccgcatctccttcagcgcgagccaccgattgtacagtaaatttctaagtgatgaagaaaacttgaaactgtttgggaaatgcaacaatccaaatggccatgggcacaattataaagttgtggtgacagtacatggagagattgaccctgctacgggaatggttatgaatctggctgatctcaaaaaatatatggaggaggcgattatgcagccccttgatcataagaatctggatatggatgtgccatactttgcagatgtggtgagcacgactgaaaatgtagctgtttatatctgggacaacctccagaaagttcttcctgtaggagttctttataaagtaaaagtatacgaaactgacaataatattgtggtttataaaggagaatagctattggggttagcattgcacaaagcccagtttctttctgtgtttgaaaaagattttgatccccttggaatattaagaggtcaacacgtgattgttgtacgtacacattgtgctctggagtgcctatttattgaaatcattgtaagacctgttataaatttaagtctatttaaaactaaacttgtaatatacatcctgaaaatcatttagagagtcttttatttataaattaaaaatcacttcattttcacaaaatgttttggtgtgggattatttgaaagcaaaagaaatctaattttgttttctccattacctcattttagtattaatttttacttggtataatatacatggttaaaatgcttatgtgacttcgagtaggtgaatcttaaagaaataaaattcaagtgaccacaaagtctgga

SEQ ID NO: 89228 - DNA, 769 bp, Homo sapiens
tgcgcagccgcggtgggaggaggcaccggccgcgcggcgggaggaggtgccggccgagcaccgcagacagcgccgggaagatgagcacggaaggtggtggccgtcgctgccaggcacaagtgtcccgccgcatctccttcagcgcgagccaccgattgtacagtaaatttctaagtgatgaagaaaacttgaaactgtttgggaaatgcaacaatccaaatggccatgggcacaattataaaggtgagagaaaaactgatgacatttcagcccttcaataaggatgaaagagtattcagcaaatgtagacataaagaatgggaaaacttacggacacagtgtgaatgctttgagccttgaatgagaaattaaatgggagttcagaatgaaaggatctgttgtcttggttgggtgtgtgttaagttttaccttgcaatgtcaactcttacaaacagtccaaaacaatgaatggtttaaagcatttttctttgtcctagagtacacaacaagtttctttctgattaggtatggccaaggctaatgttaaaattagattttattctttgagtaaataatgactgacaaaaggggaatgttgcctaggaatgtaatgtatggcagaaaaataggtttggtctaaagctttgccagcagtgttcgaagaaagtaggtaatttgttcaaggataagagacttgattctttgaggtacagcctggccttaaaaaacaggtacataagtcgtagagtataaaacagtatgtggtgtg

SEQ ID NO: 89229 - DNA, 574 bp, Homo sapiens
tgcgcagccgcggtgggaggaggcaccggccgcgcggcgggaggaggtgccggccgagcaccgcagacagcgccgggaagatgagcacggaaggtggtggccgtcgctgccaggcacaagtgtcccgccgcatctccttcagcgcgagccaccgattgtacagtaaatttctaagtgatgaagaaaacttgaaactgtttgggaaatgcaacaatccaaatggccatgggcacaattataaagttgtacgtacacattgtgctctggagtgcctatttattgaaatcattgtaagacctgttataaatttaagtctatttaaaactaaacttgtaatatacatcctgaaaatcatttagagagtcttttatttataaattaaaaatcacttcattttcacaaaatgttttggtgtgggattatttgaaagcaaaagaaatctaattttgttttctccattacctcattttagtattaatttttacttggtataatatacatggttaaaatgcttatgtgacttcgagtaggtgaatcttaaagaaataaaattcaagtgaccacaaagtctgga

SEQ ID NO: 89230 - DNA, 430 bp, Homo sapiens
acagatctaataatttatgttgccaacttgtgcttgtatgttgctaacttgtgcttggatgttgatctgttgaaagtcatgctgttttttttgtattttgttttctttccatagttgtggtgacagtacatggagagattgaccctgctacgggaatggttatgaatctggctgatctcaaaaaatatatggaggaggcgattatgcagccccttgatcataagaatctggatatggatgtgccatactttgcagatgtggtgaggtgggtggcactgtatcttgccttatgtggattgtaaaacaagaattgatttgaatactttgattgttgtgtgatttctgaagttttaatttaatgaaatctttcgaaactagaatttctattttctgtaaatattaaacatgaaattttattgtttgcattttg

SEQ ID NO: 89231 - DNA, 513 bp, Homo sapiens
agctgccgccattccaggcctctcctctaccaaagtgttgtctttaatatgctgtatgtggacaggtagaagggctatacaatgaaaaggatgcttgaagtacatggtgcttccatgctgaggtcaatgattatctctgggatgaaggcaaatgtgcaaatgtgggcacagtctctgcacattgtactgcctttaataatttgccagccgtttaatatggagagcctatcacagtaatattcacctttgtttattctttagattgaccctgctacgggaatggttatgaatctggctgatctcaaaaaatatatggagggatgtgccatactttgcagatgtggtgaggtgggtggcactgtatcttgccttatgtggattgtaaaacaagaattgatttgaatactttgattgttgtgtgatttctgaagttttaatttaatgaaatctttcgaaactagaatttctattttctgtaaatattaaacatgaaattttattgtttgcattttg

SEQ ID NO: 89232 - DNA, 763 bp, Homo sapiens
agctgccgccattccaggcctctcctctaccaaagtgttgtctttaatatgctgtatgtggacaggtagaagggctatacaatgaaaaggatgcttgaagtacatggtgcttccatgctgaggtcaatgattatctctgggatgaaggcaaatgtgcaaatgtgggcacagtctctgcacattgtactgcctttaataatttgccagccgtttaatatggagagcctatcacagtaatattcacctttgtttattctttagattgaccctgctacgggaatggttatgaatctggctgatctcaaaaaatatatggaggaggcgattatgcagccccttgatcataagaatctggatatggatgtgccatactttgcagatgtggtgagcacgactgaaaatgtagctgtttatatctgggacaacctccagaaagttcttcctgtaggagttctttataaagtaaaagtatacgaaactgacaataatattgtggtttataaaggagaatagctattggggttagcattgcacaaagcccagtttctttctgtgtttgaaaaagattttgatccccttggaatattaagaggtcaacacgtgattgttgtacgtacacattgtgctctggagtgcctatttattgaaatcattgtaagacctgttataaatttaagtctatttaaaactaaacttgtaatatacatcctgaaaatcatttagagagtcttttatttataaattaaaaatcacttcattttca

SEQ ID NO: 89233 - DNA, 891 bp, Homo sapiens
tgcgcagccgcggtgggaggaggcaccggccgcgcggcgggaggaggtgccggccgagcaccgcagacagcgccgggaagatgagcacggaaggtggtggccgtcgctgccaggcacaagtgtcccgccgcatctccttcagcgcgagccaccgattgtacagtaaatttctaagtgatgaagaaaacttgaaactgtttgggaaatgcaacaatccaaatggccatgggcacaattataaagttgtggtgacagtacatggagagattgaccctgctacgggaatggttatgaatctggctgatctcaaaaaatatatggaggaggcgattatgcagccccttgatcataagaatctggatatggatgtgccatactttgcagatgtggtgagcacgactgaaaatgtagctgtttatatctgggacaacctccagaaagttcttcctgtaggagttctttataaagtaaaagtatacgaaactgacaataatattgtggtttataaaggagaatagctattggggttagcattgcacaaagcccagtttctttctgtgtttgaaaaagattttgatccccttggaatattaagaggtcaacacgtgattgttgtacgtacacattgtgctctggagtgcctatttattgaaatcattgtaagacctgttataaatttaagtctatttaaaactaaacttgtaatatacatcctgaaaatcatttagagagtcttttatttataaattaaaaatcacttcattttcaagcgagcaacgcttcaacaaaaacattttgggggcgcgcgggctaaaaagttttgaaccactcgttgggccgcgcggccctggtatcggacttgggctagggtcccaggagacccgggcagca

SEQ ID NO: 89234 - DNA, 768 bp, Homo sapiens
tgcgcagccgcggtgggaggaggcaccggccgcgcggcgggaggaggtgccggccgagcaccgcagacagcgccgggaagatgagcacggaaggtggtggccgtcgctgccaggcacaagtgtcccgccgcatctccttcagcgcgagccaccgattgtacagtaaatttctaagtgatgaagaaaacttgaaactgtttgggaaatgcaacaatccaaatggccatgggcacaattataaagttgtggtgacagtacatggagagattgaccctgctacgggaatggttatgaatctggctgatctcaaaaaatatatggaggaggcgattatgcagccccttgatcataagaatctggatatggatgtgccatactttgcagatgtggtgagcacgactgaaaatgtagctgtttatatctgggacaacctccagaaagttcttcctgtaggagttctttataaagtaaaagtatacgaaactgacaataatattgtggtttataaaggagaatagctattggggttagcattgcacaaagcccagtttctttctgtgtttgaaaaagattttgatccccttggaatattaagaggtcaacacgtgattgttgtacgtacacattgtgctctggagtgcctatttattgaaatcattgtaagacctgttataaatttaagtctatttaaaactaaacttgtaatatacatcctgaaaatcatttagagagtcttttatttataaattaaaaatcacttcattttca

SEQ ID NO: 89235 - DNA, 688 bp, Homo sapiens
tgcgcagccgcggtgggaggaggcaccggccgcgcggcgggaggaggtgccggccgagcaccgcagacagcgccgggaagatgagcacggaaggtggtggccgtcgctgccaggcacaagtgtcccgccgcatctccttcagcgcgagccaccgattgtacagtaaatttctaagtgatgaagaaaacttgaaactgtttgggaaatgcaacaatccaaatggccatgggcacaattataaaggaggcgattatgcagccccttgatcataagaatctggatatggatgtgccatactttgcagatgtggtgagcacgactgaaaatgtagctgtttatatctgggacaacctccagaaagttcttcctgtaggagttctttataaagtaaaagtatacgaaactgacaataatattgtggtttataaaggagaatagctattggggttagcattgcacaaagcccagtttctttctgtgtttgaaaaagattttgatccccttggaatattaagaggtcaacacgtgattgttgtacgtacacattgtgctctggagtgcctatttattgaaatcattgtaagacctgttataaatttaagtctatttaaaactaaacttgtaatatacatcctgaaaatcatttagagagtcttttatttataaattaaaaatcacttcattttca

SEQ ID NO: 89236 - DNA, 745 bp, Homo sapiens
tgcgcagccgcggtgggaggaggcaccggccgcgcggcgggaggaggtgccggccgagcaccgcagacagcgccgggaagatgagcacggaaggtggtggccgtcgctgccaggcacaagtgtcccgccgcatctccttcagcgcgagccaccgattgtacagtaaatttctaagtgatgaagaaaacttgaaactgtttgggaaatgcaacaatccaaatggccatgggcacaattataaagattgaccctgctacgggaatggttatgaatctggctgatctcaaaaaatatatggaggaggcgattatgcagccccttgatcataagaatctggatatggatgtgccatactttgcagatgtggtgagcacgactgaaaatgtagctgtttatatctgggacaacctccagaaagttcttcctgtaggagttctttataaagtaaaagtatacgaaactgacaataatattgtggtttataaaggagaatagctattggggttagcattgcacaaagcccagtttctttctgtgtttgaaaaagattttgatccccttggaatattaagaggtcaacacgtgattgttgtacgtacacattgtgctctggagtgcctatttattgaaatcattgtaagacctgttataaatttaagtctatttaaaactaaacttgtaatatacatcctgaaaatcatttagagagtcttttatttataaattaaaaatcacttcattttca

SEQ ID NO: 89237 - DNA, 689 bp, Homo sapiens
  misc_feature (683)..(683): n is a, c, g, or t
tgcgcagccgcggtgggaggaggcaccggccgcgcggcgggaggaggtgccggccgagcaccgcagacagcgccgggaagatgagcacggaaggtggtggccgtcgctgccaggcacaagtgtcccgccgcatctccttcagcgcgagccaccgattgtacagtaaatttctaagtgatgaagaaaacttgaaactgtttgggaaatgcaacaatccaaatggccatgggcacaattataaagttgtggtgacagtacatggagagattgaccctgctacgggaatggttatgaatctggctgatctcaaaaaatatatggaggaggcgattatgcagccccttgatcataagaatctggatatggatgtgccatactttgcagatgtggtgagcacgactgaaaatgtagctgtttatatctgggacaacctccagaaagttcttcctgtaggagttctttataaagtaaaagtatacgaaactgacaataatattgtggtttataaaggagaatagctattggggttagcattgcacaaagcccagtttctttctgtgtttgaaaaagattttgatccccttggaatattaagaggtcaacacgtgattgcctcggccgcacccgctagccgattctgcaattctccctgggcggcgtcactgctctaagggcatccttanggagtc

SEQ ID NO: 89238 - DNA, 237 bp, Homo sapiens
attatggaaatcccactccccactcatccttcaaaaggctcgggacaaaaggcacattctccctgaagtcggctaccctcccgactctgtaaatttggaataaatcacatctttcagcttctatagcactcaccctgcatctccaccacagcccttatgacatagctgttgagaaaggtctgtcttccttggtagatgatgaggtcattgtggaaggttcgagtcgtgggcaagaaa

SEQ ID NO: 89239 - DNA, 335 bp, Homo sapiens
tgctgcagggcctgaagccagctaatggtggggcctgatttagtgagaaccggtgtccttgcaaatattctgaaaatatccaacccttaagagtgaagtgaaattcttccaaataatgactggatgcttttaaaacttaaaagttttaagttagaaacataataggtagcacagttaagggctcagaatttggcaccttttttttctctctctctccaaaaagctaatggcaggagctgacttcattttctttaaatagtcttgaactgagttggatcagatccatttttgcctaagggtatttatgctgcaggcccattgtcctggtagtattg

SEQ ID NO: 89240 - DNA, 749 bp, Homo sapiens
agaggttgcagtgagctgagattgtgccactgcatttcagcctgggcaacagagcaagactctgtctcaaaaaaaaataaaaaattgcattgcatacagttttcactgtaaccctaatctttcctcatgtgtagattagaataaattttttagacaaaacctttcatcagtattaaacattctacagattttatgatatcattagcatttatctttatgcatgtgttatataaaaatatttaaagtaaatgtattttttaaatgttatttccattattaatggattgatactccttaagtagagcattcacaaccttttagtaatatttgggaaatatgtttggtctcattattagatggtattacatctcaaatgatgttcctgttgcagaagtctgcgaaacaatatctaaacttggctgcagttgagagctaaacagtgtattgaaccagttaggagtttagttctctgtagaaaaccagaggcagtccagggctgatgtaggttttgttccacattctttaggatcctaggctccctccatccctggtatgtggtcctcattttcatatagaccaagagctagagctccagttaccatttcttaaagtatattttaatgccaaatagtgaataaaggtggccagaaaattcatgcacagaatccttctttttctcattttgtgctgattggtataaattttattgtatttgtagtctctggaaatcttctaactttgagaggaca

SEQ ID NO: 89241 - DNA, 489 bp, Homo sapiens
gcagccagcccacaagggtgctgctccggccaggcagactgtgtccacgcgcccgcctgccaggggatagggaactgggataaggcctgcctccctccgtttaatctgggaagttaaagaggatgagggccaagagcatctgtacctggagccatcatcattggtgcccaggcctggcactcaccaacgctgacagcaacatcaccgtggagcaccccgatgtggctgctgtgcccagatgcaggagggtgattctccaggtgcctcgcctcaccccatgctgtgcaggcccaggaatgacatggccccagatggctgccctagccccatccaagacgggtctttccaggtgggctggccgctggctgccccctcccatgacctgagctttaccaggccccacccatcatgatctgggctggccgggcactgggaaaccatgaagaaactcaggaggcctcgggaaagatgtagtgcttcaggggcacg

SEQ ID NO: 89242 - DNA, 354 bp, Homo sapiens
tgactaaacacaaatattcgctccacaaaatgcctatcctgtcccaacaatgatgtaagcatttccttcatcataaatataaaatgccccgaatttagtcgtagacttgacatatctcgctcttttccaaataattgtaaattctgtacaaaacacacgcaccaaaaaaatgtcaccaagatgcaagaggacgtaagagggagtcaaccttggaactgggccaaccgccgcctgcattactgggaagccactgctgccaagcaaaggtcaggcattcattcaggcaacattttttccaacaagtgcttcacactcgcacgcacacacacgctcctttaaaagtcaacaacaatt

SEQ ID NO: 89243 - DNA, 637 bp, Homo sapiens
  misc_feature (591)..(591): n is a, c, g, or t
agccggtgcccctcccccagcctcgctgccgccttgcagtttgatctcagactgctgtgttagcaatcagcgagactccatgggcataggaccctctgagccaggtgccggatataatctcctggtgtgccgtttcctaagcccgtcagaaaagcgcagtgttagggtgggagtggcctgattttccaggtgccgtctgtcacccctttccttgaccaggaaagggaactaactccctgaccccttgcacttcccaagtgaggcaatgcctcaccctgcttcagctagtgcacagtgcacttcacccactgtcctgcgcccactgtctggcactccctagtgagatgaacccagtacctcaaatggaaatgcagaaatcacccgtcttctgcgtcgctcatgctgggagctgtagactcgagctgttcctattcggccagcttggctccttctcccattattttttaatattttctgaaaatcttctttaaagagagaaagccaaatgtcacccactttttcataaaaccttataggcaaatctattattcttttcttttcttgaggtggattttccctcttatgggccgngccgaatggggatctctagagtgactgaggatgcagctggacggcg

SEQ ID NO: 89244 - DNA, 518 bp, Homo sapiens
actttacaaatgaggaaagagattgaggggccctagagatgtgctcagagtcacctgtctggacagctggtgtcaggccctacagcccatgtttttaccactgtataactaacaccatgcgccgacacgttgctggagcaaacgggcaaaagttaccttaggtaggtcccctgccccttcccgctttgtccctaagatgctcccaattcaccttttaaccaaaaccagttcccaggtcagctcttccactacattttaccttttggtcttctagagaaaatagttacagagttccccacgcaacagcccgctcaggtgcctgttccttagtcaacctccaagaacttttggccaacaaaccagttcccttcccagaaccacccctggttgggcagaggcaggaccattgcagcaaagaagtcctacagagcaatgacatggcccagcgctgctccctatgtgctagtgctgggactggcgtgccctccatgtggcacaacactcctgacactcatgct

SEQ ID NO: 89245 - DNA, 1755 bp, Homo sapiens
tttatttttcagtctggaggctaggaagtgcaagataaaggtgccagcagatatagtttctggttagggcccacttcctggtttgcagatggtcctcttcttgctgtatcctcacatagcaagagcagagaaaaaaagcgagcgctcatgtgtctttttataaggacactaatcctgttcatgagggcactacccttatgacctgattacctcccaaaggccccacctcctaatgtatcatattgcaggttaggatgtcaacacatgactctggggtgatacaaataggccattgcagcatatacaattaaaatgtaaatatgaagaaaaaaggaagtttttgtttttttgtgggggagatgggggttaaggaagaagatagtaatttcaggactaggcatggtagctcatgcctataattcctgcactttgggaggccaaggcaggaggatcacttgcggccaggagttcaggaccagcatggttaacagaggctaaggcaggaggattacttgagcccaagagtttgaggctgcagtgagctgtaatcatgccactgcactccagggtgacagagcaagaccctgtacctaaataataataataatttccacttcatttttcaatattcaaatatttttatataattctgcattgttctgtatgtagatcctaattttaaaattttacaccatcataaatgaacaaaggtaggaaggagtttggcttcaatagcttacagtaaaaggagtaaaggagttcagcctcaaaacgatattgttgacctgttatgttatgaaaaataatccagtgtttatacttaacggatgccatcccttattatttactattttcttagtctaactaaacaatctttattaaaataagcaatgatatttgacatgggcctaagaaatatatagttagctaacaatattgtcagttagagggatttcttttctaaattaagtacagatttcttcaccaaactccaggataacagaaaagaggacataaaatttggacatagtttctggataaataaatgtaaatttaaatataaattatgtaacaggaaacaaacgaaattaaagaaaataaatttttcaagaaaagtaaatttatggatgttaattctgtaacattgtcagggcaaagttttttgtttttattttaatttaagggttttatgtttgttttttacttgttgcaacctcaaatgaccaaatggtatgatgcacactgagatactcaataaatgtgcagtgattcttagccttttttcctagaactttaatattaacatggaaaattctgaaatggacaacaaaaagataacactttgtgtatggggaagaatatcatgcagttgatgacggtacattaaaattcacacaaaaggacattttgactagcattcagaaagagtccattgattataagattatctatgaggttttggaccgggcactacactaccgaattatggctaactttggtttgtgatctagaccaagtcacccaatctatcttggattttagttttctggtttatgaaattaaggagttaagctaaatgacttgggtttcttttcgtgtatcataatcaaaatgctgtaacttctctagtgaattcatagaacactgactcttacaagtatgtcatgaaatactttatgctgtgagcaggtatacatgtataatatatgtatagctatgaacaaataaattttaaataaatgcacaacgaattct

SEQ ID NO: 89246 - DNA, 781 bp, Homo sapiens
acagcctctcccagccccagcaagcgacctgtcaggcggccgtggactcagactccggagatgaagcccctgctcctggccgtcagccttggcctcattgctgccctgcaggcccaccacctcctggcctcagacgaggagattcaggatgtgtcagggacgtggtatctgaaggccatgacggtggacagggagttccctgagatgaatctggaatcggtgacacccatgaccctcacgaccctggaagggggcaacctggaagccaaggtcaccatgctgataagtggccggtgccaggaggtgaaggccgtcctggagaaaactgacgagccgggaaaatacacggccgacgggggcaagcacgtggcatacatcatcaggtcgcacgtgaaggaccactacatcttttactgtgagggcgagctgcacgggaagccggtccgaggggtgaagctcgtgggcagagaccccaagaacaacctggaagccttggaggactttgagaaagccgcaggagcccgcggactcagcacggagagcatcctcatccccaggcagagcgaaacctgctctccagggagcgattaggggcaggggacaccttggctcctcagcagcccaaggacggcaccatccagcacctccgtcattcacagggacatggaaaaagctccccacccctgcagaacgcggctggctgcaccccttcctaccaccccccgccttccccctgccctgcgccccctctcctggttctccataaagagcttcagcagtt

SEQ ID NO: 89247 - DNA, 146 bp, Homo sapiens
cctgcgccccctctcctggttctccataaagagcttcagcagttcccagtgactccgcctgtctgtggggtccctcggggtgagaggtgctggctgggtgctcttttgggtgcagggactgggtgggaagcaggaggaaggacagg

SEQ ID NO: 89248 - DNA, 255 bp, Homo sapiens
taactgtgctgcgtctaattctggctttgtccttcctggggtggtggagctggtggctgatgaggggccccggtcctgactgcattcctggggtctcctaacgcctgtgcttccttttcctgcagaaacctgctctccagggagcgattagggtgagtgaacagctttagaggacatttgagaaaatccagttctggggctcagtggtgcttccagaggccatggggtctctcccacccatcccactcctacctg

SEQ ID NO: 89249 - DNA, 641 bp, Homo sapiens
ccagcctcccatgctctatgcatccattgctccagaagatagactcttaggataaagagttgacaccatctccaagcatcccaaacagcattgtgtacttatatacatgattagccactttggaatgtctttagtgttaaggcaagaaatgtccttagagtcccagagagggaaaaaatgtgggttatgttatgtccaaatccataaccaccacttcagggagttgtgcagtgaattgctttattgaataagtgtgagaaaggaaagatattagttgtccaagaatgctattgccaaactttgtggaaacagagtattttctgtggaaacagcatacattttattctgtgccatggaatttcccctcatttgacccaaggggtaaagaaaaactcttatgcaaccatcccattttaaaagttattcttttatatgtaggctggttaataaccaacaacagacaattttatctaagatgactaagatcttgcatttcgcttttagtgagagctgatttacatatctaattcatgttctattagcagagttatgggaatataaggaaatgcaagaaaaacccaggacttggatcagattttaaagtcctacagttatatacagttgtgaagatgtccttcaaa

SEQ ID NO: 89250 - DNA, 402 bp, Homo sapiens
cctacctccaaaggatgtaggagcagtgaactagagtgtgagagagcagaaggttgatgtttgccttctgaacaagctgaatgacatatctagtctagctgcatgacatgttttcaaaatgttttactatgattataaatagtactatgtagaatcagataaagaatgtctaccacttagacacttgattacttttttaaaattgtggtaacaaatacataacataaaatttaccatgttaatcatttttaagtgtacagctcagtggttttgaatgcattcatattttgtacagtcaatgtccagaactttttgtatcttacaaaactgaaactctgtactcattaagcaattccccattaccctgtctccccaacccctggcaaccatcaatctgctttc

SEQ ID NO: 89251 - DNA, 345 bp, Homo sapiens
ctagagggagttacagtcaagttttgcaaggggagtgagctgttcatgggcccagggtgggcagaggacacacatgcaaaggcacattgtcccggtatggtgaagtgtggcactcacagctgtctgagggacagcaggtcgtccagttgactccaagcttgataacgcgtgtaggggccgtgaggccggcgcaggaggcctgggtcttttcatgtgggttagtcccttagaagtaaacaggctgcctcagttggcttctcccctctggtcagttgtagcactctgaggcactcagtctggcaggaagagggcagcccccaggtgccagtctcaggacattgcttt

SEQ ID NO: 89252 - DNA, 271 bp, Homo sapiens
gtatatgtgagtatgtgtttttatgtgctcatgtgtggtttccttactgatggaaagacagagaccccttcatgtttattctcacagtagcccacactgtgcctggtgcacctggtcaatacaccatgaatggcagcaaaaggattattcttggctgggcacagtggtcgtgcctgtaattccagcactttgggaggccgaggtgagtggatgagcccaggagttcagtcaataccagcctgggcaacatggccaaaccctgtctctacca

SEQ ID NO: 89253 - DNA, 128 bp, Homo sapiens
gagctaaaagcccatcctgttaacatgaaatgtgttcatatcacttgaggagcctcctggtatctatgattactttcagaactcacatgtccttcccaaatggaacttaataggagaaaggagagatg

SEQ ID NO: 89254 - DNA, 956 bp, Homo sapiens
gtctatcatttctttgtcttaggaatgtcaccaaatacaaaatgctcaactttcaggtaaccataggtaggatgagaaaaagctgtgatactattggcctcaggataaattattagaattaaatatatagaccataatagacctaagaatataaaagaattgggtatattataaaaatgacatttcagatctatcagaaaagtttggattattaatttatattgggatagctggttagctatttcttgagagaaatattagacctatacctcataatttttatcagaataaattccagatgaaataaagatttacatattcaagcacataaataaacatacaacaagactagcaggcaatgtgaatggatatttatataattttagtgtgaaagaagcctttctttgagtgacaccaaaggaaaaaaacagaaagaaaggatggatggaatttgactgattaaaaatgctaaactcctatatagtaaaaaataacaaaccaaattgagaaaacaatatatgctacaaaaagtatagatctcaaatacatattaagagcttaaacatcactacttttgggacatttccatgatctacaatccccttctcaaccaagtgtttccatttcattctttccttattgaacgttttcattattgcttgtttaattgcctgtttatccctattaaattggaagtataagaaggcagcaaccatgtctattttgcttattgttgtatccataacacctaacacagtgctacacaaagcaaatgctgaaaacatacttattgaatgagtgaataatgaatgaataaatgacattttataattcaaggagaatcaaactttccaacagaaaattggaccaagaacacaaactggcaatgcacaataaactaaaataacctactaataataaatatgaaaaagtgttttaatatactagtaataaaa

SEQ ID NO: 89255 - DNA, 732 bp, Homo sapiens
ggcaggctggtacggcctgggatttagggatatgagatctaaaaaaaaaaagaaacctgtgtattggctcagcattacccttattcctctcagccaagtgcaagggatcacttactcaaatctttattcatcccactagagtttaatgacttccttgaatggctgttcaatgttcagtgacaggtctggcttttgttgtgaggccatctatggagtctctgggacccttccagtccctggaatcagtttggtctgagaggtcaggacttggaaacatactggaggcagggcaagggcaccctgctcttgttttggcatctacctcttttccgctggtccttcttatccatccaactagtccttttccctgagccaggtccatactttcccaccccaaacccttcctcttgtttcctggctctctgtttctggctacattcatttcctacactcctgtatcaaaagtaccacaattgcttctcgttcccacagtgcagtgcggctgagcgcctcagagcccgcggggacgctgcggggggattgcggggagggggcgttgggaggtgccgatgttgggctgggcggatgagcgcatctgcgtggtgagccttccaacgtgcgcgagaaggacgtggaagaccttttctacaagtacggccggatccgcaagatcaagcttaagaatgggcactgccttgtgcccttcgccttggtgcgctttgaggacccccg

SEQ ID NO: 89256 - DNA, 636 bp, Homo sapiens
taacatcttacaagagatgagccagaaatccagttttaaaaaactaaacaagagaataaattattgtatgcaccacaggctgcacttcctaaaatgaacagagtgcagaaattagaactgattcatgttcagaggcatatactgggttatttaaaatatgattagtttaaaaaccttgtctgctaaggaaaaaaatcagtgtggaggctttaaaataatctattaatcccaagaccctttacaataaatttgccaagcaaatttatgatatttcagtcacaagtttaaaaacaagttcctgataaaaggaaaattctacttccttcaaaaaaaaaacaaaaaacaaaaaaatcaagaaaaatgcaaaaaataatcccctgaatcatttagtcaaattccatgagagaatatattctctaacaataaataaaccatactacaaattcagtcatcacacaccagatgagaaatcacaaacataatcaagaggaagatttaaattagccaagtgcccccaaaccattaacagctgccaagtatagttaataatgaaaattagcatatccagcaaaattagttttcaaaattttaatacaacacatttacatctcctaggtagaatattctcttagttca

SEQ ID NO: 89257 - DNA, 521 bp, Homo sapiens
tctctcttggctgtggccctcgtaaatctcaccacagcctttcttggacctgttaatcacttgagaaaaacaggactacttctgctttgcagggctgccttgtgcttggcacagttttctagcttgtacctcttccacggatgagaaaggagactagagttcctagtaacagcgcttgttccgcactttcaaaaagaagcattcaggggctgctcttgtgttttgtctctacagcaaccctgttgggaggcactattattattttgcccatttttatggatggcacagttggggctcagaaagtgtaagcaacctgttctcaggtcaccacctaaaaggaagcagcggtgaaggcttcagcttcccagatcttcacactgtcactctgctgagatgccttttcacgtggatgctcctacttaatatatcttggtgggttttcatagtcccaggttggcgtggcaggtgaggcacagccaatagaggtggaaatggtagaggcatttctggttaagtaccca

SEQ ID NO: 89258 - DNA, 288 bp, Homo sapiens
ggatggagggaaaagacagatgattagaaccgcctgatatagcagaagtgcttccacactgccttgatattccttcttcaatgcactccacttagagcaggcacccagcaagtattagttaaagggatgatggagccactgggaagaccacaggaactcacgagggcagtgtcagtgggagaagcaggaggaaagagtgtggcaaggtgtgatctagtctcttaaaggaatatgggaagaaatagagctgttttgcccctggctgtgatggaagtgataaaaactaat

SEQ ID NO: 89259 - DNA, 434 bp, Homo sapiens
ctgaaatctaaggcagggctgaaggaccatgattctgactcatctgagattttccttcttacaactcagtaatcatggcgtggagggtgcagcagtgtttaggtcaaggtttctcaacagcagcacattggaaattggagatggataattcttgatgtggcggaaggggactgtcctatgccttgtaggatgtttggcagcttccctggcttccacctgtgtgatgccagtagcaccttcatttgtgacagcccaaaatgcctccagacattaccaaagttcccccaagggcaaaattactcctggctgagaactactggttcaggttaacactgctgctgctacatcttctccttgggccctcatgtggcctttggtcccctgagactcggtctcatcctagccaagtgaagtgtaaccatgtctggactaag

SEQ ID NO: 89260 - DNA, 262 bp, Homo sapiens
tttgtatttttagtagagacggggttttgctatgtttgtcaagctggtctcgaactcctgacttcaggtgatccgcccccctcaggctcccagagtgctgggattacaggtgtgagccactgcgcccagactgagagtgttttatctaccctgtggattgtgttgctaaatattgtagctgactaaatgagagccagtattacaagaaaaggaacccaccgctttttttgcaatggtttatttataaatatgtaactttctc

SEQ ID NO: 89261 - DNA, 378 bp, Homo sapiens
cagttggaattttgttctaaggatgatggaagccattggaaggttttctttgccaaagtgatgtgatctgatagaaggttttatgaagcccacgttgtctactgtgcagagaatggagtaacaggccaagaggaaccgtagggagaccagttaagaggcagagacagtgaagaggcaaatataatttctgacctacgtaatgatgtatgcacaagaagcctctcttgaatgtattaattcagtaaacagttatggagtccttacaatgtgctagtgggactttgaagatgaatccaaatttggatcctggcctggaaaggctcaaagcccaatatgggagggtctcactcttatcttcgttcttctccccgcactccc

SEQ ID NO: 89262 - DNA, 756 bp, Homo sapiens
ttccaggccaggcccctggtccccaggagtgcggggatgcctgaggtctactgctgccttatccagagctgccatccccggcgatgactcagagttcctgtggccccagcatcatccctccatccctggctgtgaggcaggagcagagttgcagacctgagaggccttgaatttgtttgatataggactttgccaccagacaaagtgctttgcctgtgaggtctggcttggcctggcctctgagaaagaacaaacacagacctcactggaaggaacctggagaacgggagaggagaggctgctgctgtctgccctcccagcagcagatataaagacaatgggcttctaagtcccctagagtcccagctgtgtaatttaaggcaaatataatttctgacctacgtaatgatgtatgcacaagaagcctctcttgaatgtattaattcagtaaacagttatggagtccttacaatgtgctagtgggactttgaagatgaatccaaatttggatcctggcctggaaaggctcaaagcccaatatgggagcctggatacaaatgtgaaacttatcttcttttattaaccaatcaatcacctcctgccaaaacaacatcagcaaaaacaacagaaaaaaacaaaaacaaaaacaaaaacaaatctgtgtacacaagacctttgtttccacagcagacttggctaaaggtttgggcatgcatatgcatacccccaaaattaaaaatggaaaattgaacactt

SEQ ID NO: 89263 - DNA, 1067 bp, Homo sapiens
ttccaggccaggcccctggtccccaggagtgcggggatgcctgaggtctactgctgccttatccagagctgccatccccggcgatgactcagagttcctgtggccccagcatcatccctccatccctggctgtgaggcaggagcagagttgcagacctgagaggccttgaatttgtttgatataggactttgccaccagacaaagtgctttgcctgtgaggtctggcttggcctggcctctgagaaagaacaaacacagacctcactggaaggaacctggagaacgggagaggagaggctgctgctgtctgccctcccagcagcagatataaagacaatgggcttctaagtcccctagagtcccagctgtgtaatttaagatagatccccagctgggttgaaaggaacgtcaagacccttcctttcttatgacctatgtatcaactcccttctaccttgcctccctccacttggagcgagttctagttggtgaaatgtagccagaggttcctggaaaggctttccttctcaagtaaagcctggctcagagaaaaccactggtctctttccttttcttcctcctgacatgaacatggggcaggaaggagcatggagaagacaagaacaaggctctcagaaggaaatggtgtggctggagccatgagaactggttgtggagggggtgaggaaggcaaatataatttctgacctacgtaatgatgtatgcacaagaagcctctcttgaatgtattaattcagtaaacagttatggagtccttacaatgtgctagtgggactttgaagatgaatccaaatttggatcctggcctggaaaggctcaaagcccaatatgggagcctggatacaaatgtgaaacttatcttcttttattaaccaatcaatcacctcctgccaaaacaacatcagcaaaaacaacagaaaaaaacaaaaacaaaaacaaaaacaaatctgtgtacacaagacctttgtttccacagcagacttggctaaaggtttgggcatgcatatgcatacccccaaaattaaaaatggaaaattgaacactt

SEQ ID NO: 89264 - DNA, 379 bp, Homo sapiens
ggcaacacagcaacaccgcaatctctacaacaaataaagaataaaatgagaaggccaaaaacaatcaatagtcatgagtttagttttttaatttattcaaaaaagttattaatagtgtctcattgaacccagcatgatataaagtgttcagagaaatgtgtcatgagtttatactccgtttttttaagggaaaaatgtatgtatgacacaccaaaagagctagtcgacaaaaactatgaaaagagagagactcagcctggaacaatcactaaagacaaaccagaagaggaaactaaagcaagaatgggattgaggtgagcacagagaaggcagctttccagaagacagacagaataaaagtaatgaaaccgcaacttca

SEQ ID NO: 89265 - DNA, 430 bp, Homo sapiens
gtttctacggagtgtttagatgtgttttagattgagagtttttcagatgaggaagatgactaagtaaaataaatgaaagagaaaattttgctatttcatagtgaaatagaaaagggcttttttcccccttttgctagtagtttaaaagtgacgagaataagtcacatgaatacaaatcttaaaactgaatagaattttgtttctcataggtcatatcatgcctgggaaatctccaagttctttatggcaatatatcagggaatgcagtgacattttcagcatatactgttgccattatttgtgtgtgcatatgtgtagctttggtgattagaaagtcttttattaaaagatgaagtgtggggtatggcacaaaggatttactttgcctcataaaaaggctactggaattttgacttacattttactgtgt

SEQ ID NO: 89266 - DNA, 382 bp, Homo sapiens
agcaaatgggacatgtgccaagtgggcaaatgagggtctaagtcaacatattttactccagaattttctcctcaccacatttcttctcattctggtcattggcagtctgtgacaacaatacttcctgaaaatgtgttgcagctgtagagtaattccatagcagatttattttcctttggcactttttgtaattggcattgaggaaacatacaagaattattccttatcttttttacgttggcaagttttatattgtttaaacgatttctttagttgtgtaaaatatcatttggtagaatattagaagaagtttgggctttcaagtttgttgatttgagtgagaggtatattgaccagttttagcacaaggtagaatttaatt

SEQ ID NO: 89267 - DNA, 145 bp, Homo sapiens
tttataatagatacactagttatactgggagagcatatgccaagggaatgtaatcttttttgttttaaatagagacacagtctcactctgttacccatgctggagtacagtgatgcaatcatagctcactgcagcctcgaattcc

SEQ ID NO: 89268 - DNA, 664 bp, Homo sapiens
ccccttcctgtgtccatgtgatctcattgttcatttcccacctgtgagtgagaatatgcggtgtttggttttttgttcttgcgatagtttactgagaatgatgatttccagtttcatccatgtccctacaaaggacatgaactcatcattttttatggttgcatagtattccatggtatattagtatgctacatgtgttacattaacacacaaatattggtacaggattattaaccgaagaccctagctcattcagatttccttagttttgcctggtgtcttgttctagggtcccttccaggaccccacatgctgtttagtggtcctgtttccttaggctccccttgactgcagtagtttctcattttccttgcttttgatgagcttgacagttttcaggagtactggtcaggtatatggcaggacgcccttctggtggaaatgtctggtgtttttctcatgattagactgggtatatggctatttgggaagaggctcacagagcaaggtacttttcatcccatcatatgaagggcacatactagcaacaggatttaccactgttgatgttgaccttggtcacctggctgaagtcacctggtggcaggtttctccactgtgaagctgctctgtctcacccctgccttttccatgccctttggaa

SEQ ID NO: 89269 - DNA, 257 bp, Homo sapiens
cctagatgtttacacaattctagaattttaacagaactgttgaaaaacccaaggcttaagtcagttagggagagaattatatctcacagccaagagtgttaaatactgagccctaaactggggtattaatgtaaccttagttcctgatagatgtaattaatataatcccaattccaggatgaaatcctttatattctagaatatagttgttcaggtgtgaaattgatgaatgtttttgctgagagttgggccgtctg

SEQ ID NO: 89270 - DNA, 1713 bp, Homo sapiens
ctgtgcgtaggtttagcacacccatgttagcttgtccacattaggccttcttttgaaggtactgtatctaaagataagggcataagtgatcatttaattctcagccacttcactgatactacaaggtgttacacagtaattatagtggtttgatacagacatttgtttacaagaaactgaattggcattattaacttatttcacacaaaaaaagttagctttacccatgaactgtaattcagattgataaggtgacctacccatgaaaaagacacctgagacctgtttacttttttaaactatgaagtgaaatcctcagttcaataagtgtcccaaggagaatttcctctgttaaattttccctgttaacttagtataattggttttcttgaatagaagaataatgatttctgtaagatattttaatgtgaatatttttgctgtcttcatctttaaaaattaaatacagtactatatatagatattaaaattttaaagtgggactaggtgtttttatgtatacaattacagtttgtctcctctctttgcaaatttactggctattatcagaataaaggttggactcattttgcttatcccagtcattaaaatgttgtgatctgtttctaacatatttagcatttcatttttaaaatgagatgtgccattatcataacaaaggcaactattaatgttcctagaaaaaatgatgtaaaggacttactcctagtcaatattaacacttaatcccactttcttttttccaccaaatggcctcagtacattgccaagagagtgaaatttggattcctcacagtactcagaacacaatatgatatttgtcagctaactttccatcatgtcttggtaaaattgctcagttaaatataattggccatctacttattaaaaaacaattcaaataatctgtacagttaccataatttgacaacaaattactttaaatttagcaccatcttagaaatcttcttaatataaactactgattgaaatgtgtttatactttctatcatatttcaaactgttttactttccttgcattaagacaattaaaacacaaactacatgttagaatgaataatttaaaggacatgctgctgtttcagcataaaaaatggtaaagtctttataaatagaatacttatgatagccattaacgtattgaattgtttaattaacctagttgtgattttccgaatttaagacgttttcttactacatgtgttaaattgttacctataatatcttcctggaaaaatagaagtatttgtaaggtttttataaatgcacaatttatgtataaatataattggaatctgggatgactcttagtaatctactattcttaattcaacgatggccaccagctacctgacacattttgtaaatttagcatctgtgtatgtgtgttcgtgtatgtgtgtgtgcgtgcatgtgcacattactgcatttattctcaaatggatttataatttagtgtttttgtacaagtacttgagctattcatgtaatgggataagttgccataaagatgtacataaatgacccttaatttggcacgttttcacatttaattttttaaaatacagcttttcatatacagttcctaccctttcatttctagcctgtacttcattacttgttgaaaaagtcaagtttgtatgaagccagcataaacatcaaaatataact

SEQ ID NO: 89271 - DNA, 1801 bp, Homo sapiens
  misc_feature (1706)..(1706): n is a, c, g, or t
  misc_feature (1719)..(1719): n is a, c, g, or t
ctgtgcgtaggtttagcacacccatgttagcttgtccacattaggccttcttttgaaggtactgtatctaaagataagggcataagtgatcatttaattctcagccacttcactgatactacaaggtgttacacagtaattatagtggtttgatacagacatttgtttacaagaaactgaattggcattattaacttatttcacacaaaaaaagttagctttacccatgaactgtaattcagattgataaggtgacctacccatgaaaaagacacctgagacctgtttacttttttaaactatgaagtgaaatcctcagttcaataagtgtcccaaggagaatttcctctgttaaattttccctgttaacttagtataattggttttcttgaatagaagaataatgatttctgtaagatattttaatgtgaatatttttgctgtcttcatctttaaaaattaaatacagtactatatatagatattaaaattttaaagtgggactaggtgtttttatgtatacaattacagtttgtctcctctctttgcaaatttactggctattatcagaataaaggttggactcattttgcttatcccagtcattaaaatgttgtgatctgtttctaacatatttagcatttcatttttaaaatgagatgtgccattatcataacaaaggcaactattaatgttcctagaaaaaatgatgtaaaggacttactcctagtcaatattaacacttaatcccactttcttttttccaccaaatggcctcagtacattgccaagagagtgaaatttggattcctcacagtactcagaacacaatatgatatttgtcagctaactttccatcatgtcttggtaaaattgctcagttaaatataattggccatctacttattaaaaaacaattcaaataatctgtacagttaccataatttgacaacaaattactttaaatttagcaccatcttagaaatcttcttaatataaactactgattgaaatgtgtttatactttctatcatatttcaaactgttttactttccttgcattaagacaattaaaacacaaactacatgttagaatgaataatttaaaggacatgctgctgtttcagcataaaaaatggtaaagtctttataaatagaatacttatgatagccattaacgtattgaattgtttaattaacctagttgtgattttccgaatttaagacgttttcttactacatgtgttaaattgttacctataatatcttcctggaaaaatagaagtatttgtaaggtttttataaatgcacaatttatgtataaatataattggaatctgggatgactcttagtaatctactattcttaattcaacgatggccaccagctacctgacacattttgtaaatttagcatctgtgtatgtgtgttcgtgtatgtgtgtgtgcgtgcatgtgcacattactgcatttattctcaaatggatttataatttagtgtttttgtacaagtacttgagctattcatgtaatgggataagttgccataaagatgtacataaatgacccttaatttggcacgttttcacatttaattttttaaaatacagcttttcatatacagttcctaaaaaaaaaaaaaaaaaaaactcgagactagttctctccatttaatgactttccctgctgttacctaattacaaatntggatggaactgngttttttttctgcttttgttttttcaggtttgctgttttctgtagcccataattggatttcttgtgtcaaaataaagtccct

SEQ ID NO: 89272 - DNA, 217 bp, Homo sapiens
gttcttctgaaccaaagaaaacaggcaactgaaattctgtccataggccagaagtgcagaaggaaactaggcatttatgagaagggtcctggagtccaggttaatgacttaaggcagggcagcctgtggcctgctctgttagctctggcaaaggtcattattgaaaagtggttttgtttcttctgagtaaacgtaaaaacagagaggaagggcgtct

SEQ ID NO: 89273 - DNA, 1642 bp, Homo sapiens
ggagatcagcaccaaatccacagaggcatctgagaagtcagctggggagactctgtgaaagtaatgaaggtcatcaatgcggagagaccttgagccagactgcgaaccttcttgtgcacaagagttaccctaccgaagctaaaccctctgagtgcactaagtgtggcaaagccttcgagaatcggcagagatctcacactggacagagaccgtgtaaggaatgtgggcaagcctgcagctgcctctcctgccaaagccctcctatgaaaacgcagactgtagagaaaccctgtaattgccaggactcaaggacagcatctgtgacatacgtgaaaagtctcagcagtaaaaagtcttatgaatgtcagaaatgtggaaaagctttcatttgtccctcatctttcaggggacatgtgaatagtcatcatgggcagaaaacccatgcatgtaaagtatgtgggaagacctttatgtattactcctaccttacacggcacgtaagaactcacacaggagagaaaccctatgagtgtaaggagtgtgggaaagccttcagctgtccctcgtactttcgagaacatgtcagaacacacactggagagaaaccgtatgaatgtaagcattgtggaaaatcattcagctgttactcctcctttagagatcacgtgaggacgcacactggagagaaaccctgtcagtgtaaacattgcggaaaagcgttcacttgttactcgtctcttcgagaacatgggagaacgcacagtggagagaaaccctatgaatgtaaggaatgcggcaaagccttcaggtacccctcctctctgcgagcacacatgagaatgcacaccggagagaagccctatgtgtgcaagcagtgtgggaaggccttcggatgtcccacttactttagaagacatgtgaaaacacacagcggggtgaagccctatcaatgtaaagagtgtgggaaagcctacagtttttcctcctcccttcgaatccacgtgaggacgcatactggagagaagccctttgagtgtaagcattgtgggaaagccttcagctgtcactcctcccttcgagagcatgtgcgaacccacagcggagagaaaccgtacgaatgtaatcaatgtgggaaagccttcagccacgctcagtactttcaaaagcatgtgagatcacacagtggggtcaaaccctacgaatgtactgaatgtgggaaagcctacagttgttcctcgtcccttcgtgtgcacgtgagaacgcacactggagagagaccgtatgaatgcaagcagtgtgggaaaaccttcaggtatctcgcatcgcttcaagcacatgtgagaacacatgctggagcgtgaatctacaaatacagtggacctgggagagtgttcaaccgtaaaaccttgttgtaaatgtgagaaacgttatttatgtagagcatgtaggaaaacctggtatagcacttattttgtacctaaaaattcagagtaggagagaaatctcttaattatgattaatatggtattgcctttacatgcctcagccttaatagtgattccttttgtattaatttctagtgtatgtttgtgatataaacatttaataaatatcctgttttgtacgctttcaaaaaaaaata

SEQ ID NO: 89274 - DNA, 1587 bp, Homo sapiens
ggagatcagcaccaaatccacagaggcatctgagaagtcagctggggagactctgtgaaagtaatgaaggtcatcaatgcggagagaccttgagccagactgcgaaccttcttgtgcacaagagttaccctaccgaagctaaaccctctgagtgcactaagtgtggcaaagccttcgagaatcggcagagatctcacactggacagagaccgtgtaaggaatgtgggcaagcctgcagctgcctctcctgccaaagccctcctatgaaaacgcagactgtagagaaaccctgtaattgccaggactcaaggacagcatctgtgacatacgtgaaaagtctcagcagtaaaaagtcttatgaatgtcagaaatgtggaaaagctttcatttgtccctcatctttcaggggacatgtgaatagtcatcatgggcagaaaacccatgcatgtaaagtatgtgggaagacctttatgtattactcctaccttacacggcacgtaagaactcacacaggagagaaaccctatgagtgtaaggagtgtgggaaagccttcagctgtccctcgtactttcgagaacatgtcagaacacacactggagagaaaccgtatgaatgtaagcattgtggaaaatcattcagctgttactcctcctttagagatcacgtgaggacgcacactggagagaaaccctgtcagtgtaaacattgcggaaaagcgttcacttgttactcgtctcttcgagaacatgggagaacgcacagtggagagaaaccctatgaatgtaaggaatgcggcaaagccttcaggtacccctcctctctgcgagcacacatgagaatgcacaccggagagaagccctatgtgtgcaagcagtgtgggaaggccttcggatgtcccacttactttagaagacatgtgatttttcctcctcccttcgaatccacgtgaggacgcatactggagagaagccctttgagtgtaagcattgtgggaaagccttcagctgtcactcctcccttcgagagcatgtgcgaacccacagcggagagaaaccgtacgaatgtaatcaatgtgggaaagccttcagccacgctcagtactttcaaaagcatgtgagatcacacagtggggtcaaaccctacgaatgtactgaatgtgggaaagcctacagttgttcctcgtcccttcgtgtgcacgtgagaacgcacactggagagagaccgtatgaatgcaagcagtgtgggaaaaccttcaggtatctcgcatcgcttcaagcacatgtgagaacacatgctggagcgtgaatctacaaatacagtggacctgggagagtgttcaaccgtaaaaccttgttgtaaatgtgagaaacgttatttatgtagagcatgtaggaaaacctggtatagcacttattttgtacctaaaaattcagagtaggagagaaatctcttaattatgattaatatggtattgcctttacatgcctcagccttaatagtgattccttttgtattaatttctagtgtatgtttgtgatataaacatttaataaatatcctgttttgtacgctttcaaaaaaaaata

SEQ ID NO: 89275 - DNA, 689 bp, Homo sapiens
agccgggatacgggtggggaaggggggctcgcgccctacaggccgagccctgcggccgcggcggggtaagggtaggatggccgatcgcgcccagaccccagggagtctccctctcggcttttctgccggcgtctccagcagcatgatctggcatttattattcggaataatgtgccaggcaggaggaggccctgggttaaacacgcggccctgcagctcccaggtgaaacgactcatcgtttcctgccggcgcatcttactgaaggggacccaggccccacgaagggaaggaaccgtcctcaaggtcacgtcgtagtcaaaggccgagcccagaccgaagccagccagtcagcctggaaatctgcctgtagtcagctgatgcagagtcaccctgcagttcctactttgaggggttgcagaagcacatatttcactatggagggccgcctgcaggcctcgcgctgacaggatcttttgtgacgctgcaaatgtcctggtcagtgtccttctttctacaagaggcgttggagccgggctctgcatagggcgtatatatccctggccgccaaggaagctgacccttgaaatttttgaagctttcatattcactcaatacacatttacagagcctctacttcctgtcaggcgtcacacaataaatattcggaggagcaagaagagagtgattc

SEQ ID NO: 89276 - DNA, 470 bp, Homo sapiens
ggctcgccaagcatgtcacggttctcaatcttgtcaccttgccaaggtccaccccctacacccgctaccaccccatggactactactggtggctgcgaatgcagatcatgacccacttgcctggagccatctccgacatgatctacatccgctgaagagtctcgctgtggcctctgtcagggatccctggtggaaggggaggggagggaggaacccatatagtcaactcttgattatccacgtgtggattatccaccatgccaggaagacccataactggttttaacactaactagagggaatgacttctttgcatagtgagtgacttgggccttcacaaacagggtgtggagtggcaggcagaggcctctaaatctcagggcaaacatggtgaatctatctctccggagataatgtcttctaacatttataatataatatggaaccttccctccaaattcttcaataaa

SEQ ID NO: 89277 - DNA, 1663 bp, Homo sapiens
ggaggaggcggctcggcggccccccgacagccacgccgccgtgagccccgcccagcgtagccccagcgcgcgcttcgcgtgtagaagcgtccgggtggcggaggccgcaggccgcaggagtgctggtggaggggcttccagaaagaccctgcggcagcgccccccctcggctctccccgcaggagagcgggcacctgcgcggcgccgggtgaaggcgagagcctcggcgagccctctgcagcggagccccctgcccatttggttttggaaccaccgggaggaactgggccattctaacacccgttgctaccatgctggccacccgcctctccagacccctgtcacggctcccaggaaaaaccctaagtgcctgtgatagagaaaatggagcaagacgcccactattgcttggttctacttcctttatcccgattggccgtcggacttatgccagtgcggcggagccggttggcagcaaagctgtcctggtcacaggctgtgactctggatttgggttctcattggccaagcatctgcattcaaaaggcttccttgtgtttgctggctgcttgatgaaggacaaaggccatgatggggtcaaggagctggacagcctaaacagtgaccgattgagaaccgtccagctcaatgtctgcagcagcgaagaggtggagaaagtggtggagattgtccgctcgagcctgaaggaccctgagaaaggcatgtggggcctcgttaacaatgccggcatctcaacgttcggggaggtggagttcaccagcctggagacctacaagcaggtggcagaagtgaacctttggggcacagtgcggatgacgaaatcctttctccccctcatccgaagggccaaaggccgcgtcgtcaatatcagcagcatgctgggccgcatggccaacccggcccgctccccgtactgcatcaccaagttcggggtagaggctttctcggactgcctgcgctatgagatgtaccccctgggcgtgaaggtcagcgtggtggagcccggcaacttcatcgctgccaccagcctttacagccctgagagcattcaggccatcgccaagaagatgtgggaggagctgcctgaggtcgtgcgcaaggactacggcaagaagtactttgatgaaaagatcgccaagatggagacctactgcagcagtggctccacagacacgtcccctgtcatcgatgctgtcacacacgccctgaccgccaccaccccctacacccgctaccaccccatggactactactggtggctgcgaatgcagatcatgacccacttgcctggagccatctccgacatgatctacatccgctgaagagtctcgctgtggcctctgtcagggatccctggtggaaggggaggggagggaggaacccatatagtcaactcttgattatccacgtgtggattatccaccatgccaggaagacccataactggttttaacactaactagagggaatgacttctttgcatagtgagtgacttgggccttcacaaacagggtgtggagtggcaggcagaggcctctaaatctcagggcaaacatggtgaatctatctctccggagataatttcatacagagattttaagaaaacatctttatattaaaaacagatctcatttgatcctta

SEQ ID NO: 89278 - DNA, 1948 bp, Homo sapiens
ggctggtacggtcggagattttggatcgcgcttcgcgtgtagaagcgtccgggtggcggaggccgcaggccgcaggagtgctggtggaggggcttccagaaagaccctgcggcagcgccccccctcggctctccccgcaggagagcgggcacctgcgcggcgccgggtgaaggcgagagcctcggcgagccctctgcagcggagccccctgcccatttggttttggaaccaccgggaggaactgggccattctaacacccgttgctaccatgctggccacccgcctctccagacccctgtcacggctcccaggaaaaaccctaagtgcctgtgatagagaaaatggagcaagacgcccactattgcttggttctacttcctttatcccgattggccgtcggacttatgccagtgcggcggagccggttggcagcaaagctgtcctggtcacaggctgtgactctggatttgggttctcattggccaagcatctgcattcaaaaggcttccttgtgtttgctggctgcttgatgaaggacaaaggccatgatggggtcaaggagctggacagcctaaacagtgaccgattgagaaccgtccagctcaatgtctgcagcagcgaagaggtggagaaagtggtggagattgtccgctcgagcctgaaggaccctgagaaaggcatgtggggcctcgttaacaatgccggcatctcaacgttcggggaggtggagttcaccagcctggagacctacaagcaggtggcagaagtgaacctttggggcacagtgcggatgacgaaatcctttctccccctcatccgaagggccaaaggccgcgtcgtcaatatcagcagcatgctgggccgcatggccaacccggcccgctccccgtactgcatcaccaagttcggggtagaggctttctcggactgcctgcgctatgagatgtaccccctgggcgtgaaggtcagcgtggtggagcccggcaacttcatcgctgccaccagcctttacagccctgagagcattcaggccatcgccaagaagatgtgggaggagctgcctgaggtcgtgcgcaaggactacggcaagaagtactttgatgaaaagatcgccaagatggagacctactgcagcagtggctccacagacacgtcccctgtcatcgatgctgtcacacacgccctgaccgccaccaccccctacacccgctaccaccccatggactactactggtggctgcgaatgcagatcatgacccacttgcctggagccatctccgacatgatctacatccgctgaagagtctcgctgtggcctctgtcagggatccctggtggaaggggaggggagggaggaacccatatagtcaactcttgattatccacgtgtggattatccaccatgccaggaagacccataactggttttaacactaactagagggaatgacttctttgcatagtgagtgacttgggccttcacaaacagggtgtggagtggcaggcagaggcctctaaatctcagggcaaacatggtgaatctatctctccggagataatttcatacagagattttaagaaaacatctttatattaaaaacagatctcatttgatccttaagccagtctcatgaatgaaaaggacaggtttttttcttttgtaaatgaagcatttgcagcttaaagaggatgcatgaaataacccttttatcgcttataaatagtgccagttatgtgttcctgccacggctgtggaaatacttcacatttgcattccaggactgatattggatccatttgcccgagaatcttctgactaactctgtgtcctcatctgggcagcacacaccaagtgcccactggtacctctgcatgtccatggtgctgtgtgactggccagccagcagccagtgactcagagctggctgtatggagggggtgggaatg

SEQ ID NO: 89279 - DNA, 2401 bp, Homo sapiens
tcaagaaatagccaaaaaaaaaaaaaaaaaaaaaaggcacccaccacccctcagggctgttctgcctatggggtacccattttaaaaaatcatttactttcctgagtctccagcctcttcttggaaatggccctatctaaaaaccacttggccattttgaaatctttctcaggtcctgattctgggttatgctcagggcagtctctgaagatttctcatcctgttcaggccggttccttgctaatttatgcccacacatacctggcagggagagctaaagatggagttggtgggagctgccctttggcatcattgatttttaatgtattcctaagcagcagcatctgtccttgatcctctgcttgtcagaaggccaaactcacagacattttaagcttaaaacaaacagttacaaagctgttgaactttgcctgtgcaaggacaaacacaaaaacatcccaaggcccaccccccgccgacccccactgtacttgtcacacatatgtgagaatttccattctcagctaaaggcaagcattgaaagaatacacagaaagcctggaaaaggtttccaggggtgtcaatacgccctgtcaactgagaattaagaggatccggctggtcacttgcctggagaggatcctgcatgctgatagtgctgaggcacctgccagctaagaaccaccgggaggaactgggccattctaacacccgttgctaccatgctggccacccgcctctccagacccctgtcacggctcccaggaaaaaccctaagtgcctgtgatagagaaaatggagcaagacgcccactattgcttggttctacttcctttatcccgattggccgtcggacttatgccagtgcggcggagccggttggcagcaaagctgtcctggtcacaggctgtgactctggatttgggttctcattggccaagcatctgcattcaaaaggcttccttgtgtttgctggctgcttgatgaaggacaaaggccatgatggggtcaaggagctggacagcctaaacagtgaccgattgagaaccgtccagctcaatgtctgcagcagcgaagaggtggagaaagtggtggagattgtccgctcgagcctgaaggaccctgagaaaggcatgtggggcctcgttaacaatgccggcatctcaacgttcggggaggtggagttcaccagcctggagacctacaagcaggtggcagaagtgaacctttggggcacagtgcggatgacgaaatcctttctccccctcatccgaagggccaaaggccgcgtcgtcaatatcagcagcatgctgggccgcatggccaacccggcccgctccccgtactgcatcaccaagttcggggtagaggctttctcggactgcctgcgctatgagatgtaccccctgggcgtgaaggtcagcgtggtggagcccggcaacttcatcgctgccaccagcctttacagccctgagagcattcaggccatcgccaagaagatgtgggaggagctgcctgaggtcgtgcgcaaggactacggcaagaagtactttgatgaaaagatcgccaagatggagacctactgcagcagtggctccacagacacgtcccctgtcatcgatgctgtcacacacgccctgaccgccaccaccccctacacccgctaccaccccatggactactactggtggctgcgaatgcagatcatgacccacttgcctggagccatctccgacatgatctacatccgctgaagagtctcgctgtggcctctgtcagggatccctggtggaaggggaggggagggaggaacccatatagtcaactcttgattatccacgtgtggattatccaccatgccaggaagacccataactggttttaacactaactagagggaatgacttctttgcatagtgagtgacttgggccttcacaaacagggtgtggagtggcaggcagaggcctctaaatctcagggcaaacatggtgaatctatctctccggagataatttcatacagagattttaagaaaacatctttatattaaaaacagatctcatttgatccttaagccagtctcatgaatgaaaaggacaggtttttttcttttgtaaatgaagcatttgcagcttaaagaggatgcatgaaataacccttttatcgcttataaatagtgccagttatgtgttcctgccacggctgtggaaatacttcacatttgcattccaggactgatattggatccatttgcccgagaatcttctgactaactctgtgtcctcatctgggcagcacacaccaagtgcccactggtacctctgcatgtccatggtgctgtgtgactggccagccagcagccagtgactcagagctggctgtatggagggggtgggaatg

SEQ ID NO: 89280 - DNA, 2034 bp, Homo sapiens
tcaagaaatagccaaaaaaaaaaaaaaaaaaaaaaggcacccaccacccctcagggctgttctgcctatggggtacccattttaaaaaatcatttactttcctgagtctccagcctcttcttggaaatggccctatctaaaaaccacttggccattttgaaatctttctcaggtcctgattctgggttatgctcagggcagtctctgaagatttctcatcctgttcaggccggttccttgctaatttatgcccacacatacctggcagggagagctaaagatggagttggtgggagctgccctttggcatcattgatttttaatgtattcctaagcagcagcatctgtccttgatcctctgcttgtcagaaggccaaactcacagacattttaagcttaaaacaaacagttacaaagctgttgaactttgcctgtgcaaggacaaacacaaaaacatcccaaggcccaccccccgccgacccccactgtacttgtcacacatatgtgagaatttccattctcagctaaaggcaagcattgaaagaatacacagaaagcctggaaaaggtttccaggggtgtcaatacgccctgtcaactgagaattaagaggatccggctggtcacttgcctggagaggatcctgcatgctgatagtgctgaggcacctgccagctaagaaccaccgggaggaactgggccattctaacacccgttgctaccatgctggccacccgcctctccagacccctgtcacggctcccaggaaaaaccctaagtgcctgtgatagagaaaatggagcaagggccgtcggacttatgccagtgcggcggagccggttggcagcaaagctgtcctggtcacaggctgtgactctggatttgggttctcattggccaagcatctgcattcaaaaggcttccttgtgtttgctggctgcttgatgaaggacaaaggccatgatggggtcaaggagctggacagcctaaacagtgaccgattgagaaccgtccagctcaatgtctgcagcagcgaagaggtggagaaagtggtggagattgtccgctcgagcctgaaggaccctgagaaaggcatgtggggcctcgttaacaatgccggcatctcaacgttcggggaggtggagttcaccagcctggagacctacaagcaggtggcagaagtgaacctttggggcacagtgcggatgacgaaatcctttctccccctcatccgaagggccaaaggccgcgtcgtcaatatcagcagcatgctgggccgcatggccaacccggcccgctccccgtactgcatcaccaagttcggggtagaggctttctcggactgcctgcgctatgagatgtaccccctgggcgtgaaggtcagcgtggtggagcccggcaacttcatcgctgccaccagcctttacagccctgagagcattcaggccatcgccaagaagatgtgggaggagctgcctgaggtcgtgcgcaaggactacggcaagaagtactttgatgaaaagatcgccaagatggagacctactgcagcagtggctccacagacacgtcccctgtcatcgatgctgtcacacacgccctgaccgccaccaccccctacacccgctaccaccccatggactactactggtggctgcgaatgcagatcatgacccacttgcctggagccatctccgacatgatctacatccgctgaagagtctcgctgtggcctctgtcagggatccctggtggaaggggaggggagggaggaacccatatagtcaactcttgattatccacgtgtggattatccaccatgccaggaagacccataactggttttaacactaactagagggaatgacttctttgcatagtgagtgacttgggccttcacaaacagggtgtggagtggcaggcagaggcctctaaatctcagggcaaacatggtgaatctatctctccggagataatttcatacagagattttaagaaaacatctttatattaaaaacagatctcatttgatcctta

SEQ ID NO: 89281 - DNA, 1732 bp, Homo sapiens
ggctggtacggtcggagattttggatcgcgcttcgcgtgtagaagcgtccgggtggcggaggccgcaggccgcaggagtgctggtggaggggcttccagaaagaccctgcggcagcgccccccctcggctctccccgcaggagagcgggcacctgcgcggcgccgggtgaaggcgagagcctcggcgagccctctgcagcggagccccctgcccatttggttttggaaccaccgggaggaactgggccattctaacacccgttgctaccatgctggccacccgcctctccagacccctgtcacggctcccaggaaaaaccctaagtgcctgtgatagagaaaatggagcaagacgcccactattgcttggttctacttcctttatcccgattggccgtcggacttatgccagtgcggcggagccggttggcagcaaagctgtcctggtcacaggctgtgactctggatttgggttctcattggccaagcatctgcattcaaaaggcttccttgtgtttgctggctgcttgatgaaggacaaaggccatgatggggtcaaggagctggacagcctaaacagtgaccgattgagaaccgtccagctcaatgtctgcagcagcgaagaggtggagaaagtggtggagattgtccgctcgagcctgaaggaccctgagaaaggcatgtggggcctcgttaacaatgccggcatctcaacgttcggggaggtggagttcaccagcctggagacctacaagcaggtggcagaagtgaacctttggggcacagtgcggatgacgaaatcctttctccccctcatccgaagggccaaaggtgagtgggaaagggagctccctcctgcccctgaacctgccccacgtgttcatctttgctcagaatggaaatacctgtcccagcagctccaatgtccacaactcagcagaggccgcgtcgtcaatatcagcagcatgctgggccgcatggccaacccggcccgctccccgtactgcatcaccaagttcggggtagaggctttctcggactgcctgcgctatgagatgtaccccctgggcgtgaaggtcagcgtggtggagcccggcaacttcatcgctgccaccagcctttacagccctgagagcattcaggccatcgccaagaagatgtgggaggagctgcctgaggtcgtgcgcaaggactacggcaagaagtactttgatgaaaagatcgccaagatggagacctactgcagcagtggctccacagacacgtcccctgtcatcgatgctgtcacacacgccctgaccgccaccaccccctacacccgctaccaccccatggactactactggtggctgcgaatgcagatcatgacccacttgcctggagccatctccgacatgatctacatccgctgaagagtctcgctgtggcctctgtcagggatccctggtggaaggggaggggagggaggaacccatatagtcaactcttgattatccacgtgtggattatccaccatgccaggaagacccataactggttttaacactaactagagggaatgacttctttgcatagtgagtgacttgggccttcacaaacagggtgtggagtggcaggcagaggcctctaaatctcagggcaaacatggtgaatctatctctccggagataatttcatacagagattttaagaaaacatctttatattaaaaacagatctcatttgatcctta

SEQ ID NO: 89282 - DNA, 1875 bp, Homo sapiens
ggctggtacggtcggagattttggatcgcgcttcgcgtgtagaagcgtccgggtggcggaggccgcaggccgcaggagtgctggtggaggggcttccagaaagaccctgcggcagcgccccccctcggctctccccgcaggagagcgggcacctgcgcggcgccgggtgaaggcgagagcctcggcgagccctctgcagcggagccccctgcccatttggttttggaaccaccgggaggaactgggccattctaacacccgttgctaccatgctggccacccgcctctccagacccctgtcacggctcccaggaaaaaccctaagtgcctgtgatagagaaaatggagcaagacgcccactattgcttggttctacttcctttatcccgattggccgtcggacttatgccagtgcggcggagccggttggcagcaaagctgtcctggtcacaggctgtgactctggatttgggttctcattggccaagcatctgcattcaaaaggcttccttgtgtttgctggctgcttgatgaaggacaaaggccatgatggggtcaaggagctggacagcctaaacagtgaccgattgagaaccgtccagctcaatgtctgcagcagcgaagaggtggagaaagtggtggagattgtccgctcgagcctgaaggaccctgagaaaggcatgtggggcctcgttaacaatgccggcatctcaacgttcggggaggtggagttcaccagcctggagacctacaagcaggtggcagaagtgaacctttggggcacagtgcggatgacgaaatcctttctccccctcatccgaagggccaaaggccgcgtcgtcaatatcagcagcatgctgggccgcatggccaacccggcccgctccccgtactgcatcaccaagttcggggtagaggctttctcggactgcctgcgctatgagatgtaccccctgggcgtgaaggtcagcgtggtggagcccggcaacttcatcgctgccaccagcctttacagccctgagagcattcaggccatcgccaagaagatgtgggaggagctgcctgaggtcgtgcgcaaggactacggcaagaagtactttgatgaaaagatcgccaagatggagacctactgcagcagtggctccacagacacgtcccctgtcatcgatgctgtcacacacgccctgaccgccaccaccccctacacccgctaccaccccatggactactactggtggctgcgaatgcagatcatgacccacttgcctggagccatctccgacatgatctacatccgctgaagagtctcgctgtggcctctgtcagggatccctggtggaaggggaggggagggaggaacccatatagtcaactcttgattatccacgtgtggattatccaccatgccaggaagacccataactggttttaacaagaggcctctaaatctcagggcaaacatggtgaatctatctctccggagataatttcatacagagattttaagaaaacatctttatattaaaaacagatctcatttgatccttaagccagtctcatgaatgaaaaggacaggtttttttcttttgtaaatgaagcatttgcagcttaaagaggatgcatgaaataacccttttatcgcttataaatagtgccagttatgtgttcctgccacggctgtggaaatacttcacatttgcattccaggactgatattggatccatttgcccgagaatcttctgactaactctgtgtcctcatctgggcagcacacaccaagtgcccactggtacctctgcatgtccatggtgctgtgtgactggccagccagcagccagtgactcagagctggctgtatggagggggtgggaatg

SEQ ID NO: 89283 - DNA, 1090 bp, Homo sapiens
  misc_feature (55)..(55): n is a, c, g, or t
  misc_feature (68)..(69): n is a, c, g, or t
gcgagggttgagaagtgtctggtcacaggtgtatctggattgggtctcatggcangattgattcaaanngttcttgtgtctgcagcagcgaagaggtggagaaagtggtggagattgtccgctcgagcctgaaggaccctgagaaaggcatgtggggcctcgttaacaatgccggcatctcaacgttcggggaggtggagttcaccagcctggagacctacaagcaggtggcagaagtgaacctttggggcacagtgcggatgacgaaatcctttctccccctcatccgaagggccaaaggccgcgtcgtcaatatcagcagcatgctgggccgcatggccaacccggcccgctccccgtactgcatcaccaagttcggggtagaggctttctcggactgcctgcgctatgagatgtaccccctgggcgtgaaggtcagcgtggtggagcccggcaacttcatcgctgccaccagcctttacagccctgagagcattcaggccatcgccaagaagatgtgggaggagctgcctgaggtcgtgcgcaaggactacggcaagaagtactttgatgaaaagatcgccaagatggagacctactgcagcagtggctccacagacacgtcccctgtcatcgatgctgtcacacacgccctgaccgccaccaccccctacacccgctaccaccccatggactactactggtggctgcgaatgcagatcatgacccacttgcctggagccatctccgacatgatctacatccgctgaagagtctcgctgtggcctctgtcagggatccctggtggaaggggaggggagggaggaacccatatagtcaactcttgattatccacgtgtggattatccaccatgccaggaagacccataactggttttaacactaactagagggaatgacttctttgcatagtgagtgacttgggccttcacaaacagggtgtggagtggcaggcagaggcctctaaatctcagggcaaacatggtgaatctatctctccggagataatttcatacagagattttaagaaaacatctttatattaaaaacagatctcatttgatcctta

SEQ ID NO: 89284 - DNA, 1111 bp, Homo sapiens
ggctggtacggtcggagattttggatcgcgcttcgcgtgtagaagcgtccgggtggcggaggccgcaggccgcaggagtgctggtggaggggcttccagaaagaccctgcggcagcgccccccctcggctctccccgcaggagagcgggcacctgcgcggcgccgggtgaaggcgagagcctcggcgagccctctgcagcggagccccctgcccatttggttttggaaccaccgggaggaactgggccattctaacacccgttgctaccatgctggccacccgcctctccagacccctgtcacggctcccaggaaaaaccctaagtgcctgtgatagagaaaatggagcaagacgcccactattgcttggttctacttcctttatcccgattggccgtcggacttatgccagtgcggcggagccggttggcagcaaagctgtcctggtcacaggctgtgactctggatttgggttctcattggccaagcatctgcattcaaaaggcttccttgtgtttgctggctgcttgatgaaggacaaaggccatgatggggtcaaggagctggacagcctaaacagtgaccgattgagaaccgtccagctcaatgtctgcagcagcgaagaggtggagaaagtggtggagattgtccgctcgagcctgaaggaccctgagaaaggcatgtggggcctcgttaacaatgccggcatctctccggagataatttcatacagagattttaagaaaacatctttatattaaaaacagatctcatttgatccttaagccagtctcatgaatgaaaaggacaggtttttttcttttgtaaatgaagcatttgcagcttaaagaggatgcatgaaataacccttttatcgcttataaatagtgccagttatgtgttcctgccacggctgtggaaatacttcacatttgcattccaggactgatattggatccatttgcccgagaatcttctgactaactctgtgtcctcatctgggcagcacacaccaagtgcccactggtacctctgcatgtccatggtgctgtgtgactggccagccagcagccagtgactcagagctggctgtatggagggggtgggaatg

SEQ ID NO: 89285 - DNA, 784 bp, Homo sapiens
ggctggtacggtcggagattttggatcgcgcttcgcgtgtagaagcgtccgggtggcggaggccgcaggccgcaggagtgctggtggaggggcttccagaaagaccctgcggcagcgccccccctcggctctccccgcaggagagcgggcacctgcgcggcgccgggtgaaggcgagagcctcggcgagccctctgcagcggagccccctgcccatttggttttggaaccaccgggaggaactgggccattctaacacccgttgctaccatgctggccacccgcctctccagacccctgtcacggctcccaggaaaaaccctaagtgcctgtgatagagaaaatggagcaagacgcccactattgcttggttctacttcctttatcccgattggccgtcggacttatgccagtgcggcggagccggttggcagcaaagctgtcctggtcacaggctgtgactctggatttgggttctcattggccaagcatctgcattcaaaaggcttccttgtgtttgctggctgcttgatgaaggacaaaggccatgatggggtcaaggagctggacagcctaaacagtgaccgattgagaaccgtccagctcaatgtctgcagcagcgaagaggtggagaaagtggtggagattgtccgctcgagcctgaaggaccctgagaaaggcatgtggggcctcgttaacaatgccggcatctctccggagataatttcatacagagattttaagaaaacatctttatattaaaaacagatctcatttgatcctta

SEQ ID NO: 89286 - DNA, 802 bp, Homo sapiens
ggctggtacggtcggagattttggatcgcgcttcgcgtgtagaagcgtccgggtggcggaggccgcaggccgcaggagtgctggtggaggggcttccagaaagaccctgcggcagcgccccccctcggctctccccgcaggagagcgggcacctgcgcggcgccgggtgaaggcgagagcctcggcgagccctctgcagcggagccccctgcccatttggttttggccagtcagcctggaaatctgcctgtagtcagctgatgcagagtcaccctgcagttcctactttgaggggttgcagaagcacatatttcactatggagggccgcctgcaggcctcgcgctgacaggatcttttgtgacgctgcaaatgtcctgaaccaccgggaggaactgggccattctaacacccgttgctaccatgctggccacccgcctctccagacccctgtcacggctcccaggaaaaaccctaagtgcctgtgatagagaaaatggagcaagacgcccactattgcttggttctacttcctttatcccgattggccgtcggacttatgccagtgcggcggagccggttggcagcaaagctgtcctggtcacaggctgtgactctggatttgggttctcattggccaagcatctgcattcaaaaggcttccttgtgtttgctggctgcttgatgaagctttgaagcacccactgagtgggcggatcataatttacttcatcaaaatctcctgtaaatgagcatttaggtgttttcaatattttgcaattacaaataatgccacaatgaata

SEQ ID NO: 89287 - DNA, 1427 bp, Homo sapiens
tcaagaaatagccaaaaaaaaaaaaaaaaaaaaaaggcacccaccacccctcagggctgttctgcctatggggtacccattttaaaaaatcatttactttcctgagtctccagcctcttcttggaaatggccctatctaaaaaccacttggccattttgaaatctttctcaggtcctgattctgggttatgctcagggcagtctctgaagatttctcatcctgttcaggccggttccttgctaatttatgcccacacatacctggcagggagagctaaagatggagttggtgggagctgccctttggcatcattgatttttaatgtattcctaagcagcagcatctgtccttgatcctctgcttgtcagaaggccaaactcacagacattttaagcttaaaacaaacagttacaaagctgttgaactttgcctgtgcaaggacaaacacaaaaacatcccaaggcccaccccccgccgacccccactgtacttgtcacacatatgtgagaatttccattctcagctaaaggcaagcattgaaagaatacacagaaagcctggaaaaggtttccaggggtgtcaatacgccctgtcaactgagaattaagaggatccggctggtcacttgcctggagaggatcctgcatgctgatagtgctgaggcacctgccagctaagatgaagtcttgctgtcacccaggctagagtgcagtggcaagatctcagctcactgcaacctccgcttcctgggttcaagcaattctcctgcctcagctttccaagtagctgtgattacagtagcctaccaccacgcctggctaatttttgtatttttagtagagatgggattttaccatgttgaccaggctggtctcaaactcctgacctcaagtgatctgcctgcctcagcctcccaaagtgctgggattacaagtgtgagccactgctcccagccataactttctttacatctcttttattttcctggttccttttatattgttttaaacatgacctttaaataagctttgaattagacaaaaactattcatctttttaaaaatgacacactttttaaaaagaatgttttcttacaaatatatttttattggaaaatacccatataatgaaatatctattacttaatttaatataactttagattctaaattatgagtttgtctacaagtattacattcacctaattattttaattgttttagatgatttatgaaaactgtgatagtcatcatttaaagttatggaaccatcattgcaaaattataacagagacgtgaaaaagatttgcctaactgactccatcttgcttttaacctccaaactctccttgttcattcttcttttctctcctaggaaattgttgtttaaggatcctaattctagttcagagatgcattctaaaggg

SEQ ID NO: 89288 - DNA, 615 bp, Homo sapiens
ggctggtacggtcggagattttggatcgcgcttcgcgtgtagaagcgtccgggtggcggaggccgcaggccgcaggagtgctggtggaggggcttccagaaagaccctgcggcagcgccccccctcggctctccccgcaggagagcgggcacctgcgcggcgccgggtgaaggcgagagcctcggcgagccctctgcagcggagccccctgcccatttggttttggaaccaccgggaggaactgggccattctaacacccgttgctaccatgctggccacccgcctctccagacccctgtcacggctcccaggaaaaaccctaagtgcctgtgatagagaaaatggagcaagagcaacactgggggtcatgggaatacagactgatgctctttggatggagtcattcacaagctttgggtgtaccgaccacactatcctgatcacttgagaccatccgtgcacaaggacttaaaatccagactcctctgtggcagtacaaaaggacagggggttaccttggcaggttttcctagtgaaccctcatttctgtctagtgaatttaatgttctttaagaacatattttaataattttttaaaagcttaatatgttgaa

SEQ ID NO: 89289 - DNA, 366 bp, Homo sapiens
aaagctcagatccacacagacagctgtctcgcctcccacttctcccctcgtgttttcaccccaaattatcaccgcatcgggcttgatctggtttttgagtcagttgcgtgttgcccattacactgtgccctgctgcttctcactcacttgtcctcccctgtcctgcctggcacagccaggttcccagggaagaccaggggtgccgatgctgatgcgtgggcctgagctggccttgcctattgactgagaaggctcctgggtggctcagaagtggttccagccaagcctctagagacatgccagacttctgcccgctgtgtcatagggcagtaacggcttagcaggtacctctgtctccctctgtag

SEQ ID NO: 89290 - DNA, 344 bp, Homo sapiens
ccatctccgacatgatctacatccgctgaagagtctcgctgtggcctctgtcagggatccctggtggaaggggaggggagggaggaacccatatagtcaactcttgattatccacgtgtggattatccaccatgccaggaagacccataactggttttaacactaactagagggaatgacttctttgcatagtgagtgacttgggccttcacaaacagggtgtggagtggcaggcagaggcctctaaatctcagggcaaacatggtgaatctatctctccggagataatttcatacagagattttaagaaaacatctttatattaaaaacagatctcatttgat

SEQ ID NO: 89291 - DNA, 450 bp, Homo sapiens
ttatcccaagacaagccattggttggggccccggcaaggatccaatacccggggccccgctccccgtactgcatcaccaagttcggggtagaggctttctcggactgcctgcgctatgagatgtaccccctgggcgtgaaggtcagcgtggtggagcccggcaacttcatcgctgccaccagcctttacagccctgagagcattcaggccatcgccaagaagatgtgggaggagctgcctgaggtcgtgcgcaaggactacggcaagaagtactttgatgaaaagatcgccaagatggagacctactgcagcagtggctccacagacacgtcccctgtcatcgatgctgtcacacacgccctgaccgccagtagtagtccatggggtggtagcgggtgtaggggggtcgacgcggccgcgaatttagtagtagtaggcggccgctctaga

SEQ ID NO: 89292 - DNA, 1621 bp, Homo sapiens
ggctggtacggtcggagattttggatcgcgcttcgcgtgtagaagcgtccgggtggcggaggccgcaggccgcaggagtgctggtggaggggcttccagaaagaccctgcggcagcgccccccctcggctctccccgcaggagagcgggcacctgcgcggcgccgggtgaaggcgagagcctcggcgagccctctgcagcggagccccctgcccatttggttttggaaccaccgggaggaactgggccattctaacacccgttgctaccatgctggccacccgcctctccagacccctgtcacggctcccaggaaaaaccctaagtgcctgtgatagagaaaatggagcaagacgcccactattgcttggttctacttcctttatcccgattggccgtcggacttatgccagtgcggcggagccggttggcagcaaagctgtcctggtcacaggctgtgactctggatttgggttctcattggccaagcatctgcattcaaaaggcttccttgtgtttgctggctgcttgatgaaggacaaaggccatgatggggtcaaggagctggacagcctaaacagtgaccgattgagaaccgtccagctcaatgtctgcagcagcgaagaggtggagaaagtggtggagattgtccgctcgagcctgaaggaccctgagaaaggcatgtggggcctcgttaacaatgccggcatctcaacgttcggggaggtggagttcaccagcctggagacctacaagcaggtggcagaagtgaacctttggggcacagtgcggatgacgaaatcctttctccccctcatccgaagggccaaaggccgcgtcgtcaatatcagcagcatgctgggccgcatggccaacccggcccgctccccgtactgcatcaccaagttcggggtagaggctttctcggactgcctgcgctatgagatgtaccccctgggcgtgaaggtcagcgtggtggagcccggcaacttcatcgctgccaccagcctttacagccctgagagcattcaggccatcgccaagaagatgtgggaggagctgcctgaggtcgtgcgcaaggactacggcaagaagtactttgatgaaaagatcgccaagatggagacctactgcagcagtggctccacagacacgtcccctgtcatcgatgctgtcacacacgccctgaccgccaccaccccctacacccgctaccaccccatggactactactggtggctgcgaatgcagatcatgacccacttgcctggagccatctccgacatgatctacatccgctgaagagtctcgctgtggcctctgtcagggatccctggtggaaggggaggggagggaggaacccatatagtcaactcttgattatccacgtgtggattatccaccatgccaggaagacccataactggttttaacactaactagagggaatgacttctttgcatagtgagtgacttgggccttcacaaacagggtgtggagtggcaggcagaggcctctaaatctcagggcaaacatggtgaatctatctctccggagataatttcatacagagattttaagaaaacatctttatattaaaaacagatctcatttgatcctta

SEQ ID NO: 89293 - DNA, 2100 bp, Homo sapiens
ggctggtacggtcggagattttggatcgcgcttcgcgtgtagaagcgtccgggtggcggaggccgcaggccgcaggagtgctggtggaggggcttccagaaagaccctgcggcagcgccccccctcggctctccccgcaggagagcgggcacctgcgcggcgccgggtgaaggcgagagcctcggcgagccctctgcagcggagccccctgcccatttggttttggccagtcagcctggaaatctgcctgtagtcagctgatgcagagtcaccctgcagttcctactttgaggggttgcagaagcacatatttcactatggagggccgcctgcaggcctcgcgctgacaggatcttttgtgacgctgcaaatgtcctgaaccaccgggaggaactgggccattctaacacccgttgctaccatgctggccacccgcctctccagacccctgtcacggctcccaggaaaaaccctaagtgcctgtgatagagaaaatggagcaagacgcccactattgcttggttctacttcctttatcccgattggccgtcggacttatgccagtgcggcggagccggttggcagcaaagctgtcctggtcacaggctgtgactctggatttgggttctcattggccaagcatctgcattcaaaaggcttccttgtgtttgctggctgcttgatgaaggacaaaggccatgatggggtcaaggagctggacagcctaaacagtgaccgattgagaaccgtccagctcaatgtctgcagcagcgaagaggtggagaaagtggtggagattgtccgctcgagcctgaaggaccctgagaaaggcatgtggggcctcgttaacaatgccggcatctcaacgttcggggaggtggagttcaccagcctggagacctacaagcaggtggcagaagtgaacctttggggcacagtgcggatgacgaaatcctttctccccctcatccgaagggccaaaggccgcgtcgtcaatatcagcagcatgctgggccgcatggccaacccggcccgctccccgtactgcatcaccaagttcggggtagaggctttctcggactgcctgcgctatgagatgtaccccctgggcgtgaaggtcagcgtggtggagcccggcaacttcatcgctgccaccagcctttacagccctgagagcattcaggccatcgccaagaagatgtgggaggagctgcctgaggtcgtgcgcaaggactacggcaagaagtactttgatgaaaagatcgccaagatggagacctactgcagcagtggctccacagacacgtcccctgtcatcgatgctgtcacacacgccctgaccgccaccaccccctacacccgctaccaccccatggactactactggtggctgcgaatgcagatcatgacccacttgcctggagccatctccgacatgatctacatccgctgaagagtctcgctgtggcctctgtcagggatccctggtggaaggggaggggagggaggaacccatatagtcaactcttgattatccacgtgtggattatccaccatgccaggaagacccataactggttttaacactaactagagggaatgacttctttgcatagtgagtgacttgggccttcacaaacagggtgtggagtggcaggcagaggcctctaaatctcagggcaaacatggtgaatctatctctccggagataatttcatacagagattttaagaaaacatctttatattaaaaacagatctcatttgatccttaagccagtctcatgaatgaaaaggacaggtttttttcttttgtaaatgaagcatttgcagcttaaagaggatgcatgaaataacccttttatcgcttataaatagtgccagttatgtgttcctgccacggctgtggaaatacttcacatttgcattccaggactgatattggatccatttgcccgagaatcttctgactaactctgtgtcctcatctgggcagcacacaccaagtgcccactggtacctctgcatgtccatggtgctgtgtgactggccagccagcagccagtgactcagagctggctgtatggagggggtgggaatg

SEQ ID NO: 89294 - DNA, 1647 bp, Homo sapiens
ggctggtacggtcggagattttggatcgcgcttcgcgtgtagaagcgtccgggtggcggaggccgcaggccgcaggagtgctggtggaggggcttccagaaagaccctgcggcagcgccccccctcggctctccccgcaggagagcgggcacctgcgcggcgccgggtgaaggcgagagcctcggcgagccctctgcagcggagccccctgcccatttggttttggccagtcagcctggaaatctgcctgtagtcagctgatgcagagtcaccctgcagttcctactttgaggggttgcagaagcacatatttcactatggagggccgcctgcaggcctcgcgctgacaggatcttttgtgacgctgcaaatgtcctgacgcccactattgcttggttctacttcctttatcccgattggccgtcggacttatgccagtgcggcggagccggttggcagcaaagctgtcctggtcacaggctgtgactctggatttgggttctcattggccaagcatctgcattcaaaaggcttccttgtgtttgctggctgcttgatgaaggacaaaggccatgatggggtcaaggagctggacagcctaaacagtgaccgattgagaaccgtccagctcaatgtctgcagcagcgaagaggtggagaaagtggtggagattgtccgctcgagcctgaaggaccctgagaaaggcatgtggggcctcgttaacaatgccggcatctcaacgttcggggaggtggagttcaccagcctggagacctacaagcaggtggcagaagtgaacctttggggcacagtgcggatgacgaaatcctttctccccctcatccgaagggccaaaggccgcgtcgtcaatatcagcagcatgctgggccgcatggccaacccggcccgctccccgtactgcatcaccaagttcggggtagaggctttctcggactgcctgcgctatgagatgtaccccctgggcgtgaaggtcagcgtggtggagcccggcaacttcatcgctgccaccagcctttacagccctgagagcattcaggccatcgccaagaagatgtgggaggagctgcctgaggtcgtgcgcaaggactacggcaagaagtactttgatgaaaagatcgccaagatggagacctactgcagcagtggctccacagacacgtcccctgtcatcgatgctgtcacacacgccctgaccgccaccaccccctacacccgctaccaccccatggactactactggtggctgcgaatgcagatcatgacccacttgcctggagccatctccgacatgatctacatccgctgaagagtctcgctgtggcctctgtcagggatccctggtggaaggggaggggagggaggaacccatatagtcaactcttgattatccacgtgtggattatccaccatgccaggaagacccataactggttttaacactaactagagggaatgacttctttgcatagtgagtgacttgggccttcacaaacagggtgtggagtggcaggcagaggcctctaaatctcagggcaaacatggtgaatctatctctccggagataatttcatacagagattttaagaaaacatctttatattaaaaacagatctcatttgatcctta

SEQ ID NO: 89295 - DNA, 1448 bp, Homo sapiens
ggctactcaggaggctgaggcaggagaatcgcttgaacccaggaggcggaggttgcagtgagctgagatcgtgtcactgcactccagcctgggcaacaagagtgaaactctgtctcaaaaacaaaacaaaacaaaacaaaaaacaaaatttgaatggcgtcaaatggtatacagaaaagacgcccactattgcttggttctacttcctttatcccgattggccgtcggacttatgccagtgcggcggagccggttggcagcaaagctgtcctggtcacaggctgtgactctggatttgggttctcattggccaagcatctgcattcaaaaggcttccttgtgtttgctggctgcttgatgaaggacaaaggccatgatggggtcaaggagctggacagcctaaacagtgaccgattgagaaccgtccagctcaatgtctgcagcagcgaagaggtggagaaagtggtggagattgtccgctcgagcctgaaggaccctgagaaaggcatgtggggcctcgttaacaatgccggcatctcaacgttcggggaggtggagttcaccagcctggagacctacaagcaggtggcagaagtgaacctttggggcacagtgcggatgacgaaatcctttctccccctcatccgaagggccaaaggccgcgtcgtcaatatcagcagcatgctgggccgcatggccaacccggcccgctccccgtactgcatcaccaagttcggggtagaggctttctcggactgcctgcgctatgagatgtaccccctgggcgtgaaggtcagcgtggtggagcccggcaacttcatcgctgccaccagcctttacagccctgagagcattcaggccatcgccaagaagatgtgggaggagctgcctgaggtcgtgcgcaaggactacggcaagaagtactttgatgaaaagatcgccaagatggagacctactgcagcagtggctccacagacacgtcccctgtcatcgatgctgtcacacacgccctgaccgccaccaccccctacacccgctaccaccccatggactactactggtggctgcgaatgcagatcatgacccacttgcctggagccatctccgacatgatctacatccgctgaagagtctcgctgtggcctctgtcagggatccctggtggaaggggaggggagggaggaacccatatagtcaactcttgattatccacgtgtggattatccaccatgccaggaagacccataactggttttaacactaactagagggaatgacttctttgcatagtgagtgacttgggccttcacaaacagggtgtggagtggcaggcagaggcctctaaatctcagggcaaacatggtgaatctatctctccggagataatttcatacagagattttaagaaaacatctttatattaaaaacagatctcatttgatcctta

SEQ ID NO: 89296 - DNA, 1274 bp, Homo sapiens
ggctggtacggtcggagattttggatcgcgcttcgcgtgtagaagcgtccgggtggcggaggccgcaggccgcaggagtgctggtggaggggcttccagaaagaccctgcggcagcgccccccctcggctctccccgcaggagagcgggcacctgcgcggcgccgggtgaaggcgagagcctcggcgagccctctgcagcggagccccctgcccatttggttttggaaccaccgggaggaactgggccattctaacacccgttgctaccatgctggccacccgcctctccagacccctgtcacggctcccaggaaaaaccctaagtgcctgtgatagagaaaatggagcaagacgcccactattgcttggttctacttcctttatcccgattggccgtcggacttatgccagtgcggcggagccggttggcagcaaagctgtcctggtcacaggctgtgactctggatttgggttctcattggccaagcatctgcattcaaaaggcttccttgtgtttgctggctgcttgatgaaggacaaaggccatgatggggtcaaggagctggacagcctaaacagtgaccgattgagaaccgtccagctcaatgtctgcagcagcgaagaggtggagaaagtggtggagattgtccgctcgagcctgaaggaccctgagaaaggcatgtggggcctcgttaacaatgccggcatctcaacgttcggggaggtggagttcaccagcctggagacctacaagcaggtggcagaagtgaacctttggggcacagtgcggatgacgaaatcctttctccccctcatccgaagggccaaaggccgcgtcgtcaatatcagcagcatgctgggccgcatggccaacccggcccgctccccgtactgcatcaccaagttcggggtagaggctttctcggactgcctgcgctatgagatgtaccccctgggcgtgaaggtcagcgtggtggagcccggcaacttcatcgctgccaccagcctttacagccctgagagcattcaggccatcgccaagaagatgtgggaggagctgcctgaggtcgtgcgcaaggactacggcaagaagtactttgatgaaaagatcgccaagatggagacctactgcagcagtggctccacagacacgtcccctgtcatcgatgctgtcacacacgccctgaccgccagtagtagtccatggggtggtagcgggtgtaggggggtcgacgcggccgcgaatttagtagtagtaggcggccgctctaga

SEQ ID NO: 89297 - DNA, 1448 bp, Homo sapiens
gcatgatccggctcattgcaacctctgcctcctgggttcaagagattttcctgcctcagcctcccgagtagctgggactacaggtgcccgccaccacacccggctaatctttgtattacaggatagagttcttggaagcctggcgtggagggagggagagcaggtagcacagttacagaaggatcttcgggatatggaaatgcggtatttgtggacactcattcatctaacacacatttgttgagctcctaatgtgtatagaactgaagggatggagtcatgggcagtggaaaagctgaaattgtgtaaaagagagagaaggatcagtggctatggtctcgaagatgacgtggaagtgtcagccatgacgggtggggagtggcctgctgctcctcctgggaagagaagaaggtgaagactcagggcgcgtctgcagggagacagtgggagctgtggggtcgtggatgacgctgatcctgtcattagcatctgagcgaggtcacaggcatgtggggcctcgttaacaatgccggcatctcaacgttcggggaggtggagttcaccagcctggagacctacaagcaggtggcagaagtgaacctttggggcacagtgcggatgacgaaatcctttctccccctcatccgaagggccaaaggccgcgtcgtcaatatcagcagcatgctgggccgcatggccaacccggcccgctccccgtactgcatcaccaagttcggggtagaggctttctcggactgcctgcgctatgagatgtaccccctgggcgtgaaggtcagcgtggtggagcccggcaacttcatcgctgccaccagcctttacagccctgagagcattcaggccatcgccaagaagatgtgggaggagctgcctgaggtcgtgcgcaaggactacggcaagaagtactttgatgaaaagatcgccaagatggagacctactgcagcagtggctccacagacacgtcccctgtcatcgatgctgtcacacacgccctgaccgccaccaccccctacacccgctaccaccccatggactactactggtggctgcgaatgcagatcatgacccacttgcctggagccatctccgacatgatctacatccgctgaagagtctcgctgtggcctctgtcagggatccctggtggaaggggaggggagggaggaacccatatagtcaactcttgattatccacgtgtggattatccaccatgccaggaagacccataactggttttaacactaactagagggaatgacttctttgcatagtgagtgacttgggccttcacaaacagggtgtggagtggcaggcagaggcctctaaatctcagggcaaacatggtgaatctatctctccggagataatttcatacagagattttaagaaaacatctttatattaaaaacagatctcatttgatcctta

SEQ ID NO: 89298 - DNA, 1229 bp, Homo sapiens
ggaggaggcggctcggcggccccccgacagccacgccgccgtgagccccgcccagcgtagccccagcgcgcgcttcgcgtgtagaagcgtccgggtggcggaggccgcaggccgcaggagtgctggtggaggggcttccagaaagaccctgcggcagcgccccccctcggctctccccgcaggagagcgggcacctgcgcggcgccgggtgaaggcgagagcctcggcgagccctctgcagcggagccccctgcccatttggttttggaaccaccgggaggaactgggccattctaacacccgttgctaccatgctggccacccgcctctccagacccctgtcacggctcccaggaaaaaccctaagtgcctgtgatagagaaaatggagcaagacgcccactattgcttggttctacttcctttatcccgattggccgtcggacttatgccagtgcggcggagccggttggcagcaaagctgtcctggtcacaggctgtgactctggatttgggttctcattggccaagcatctgcattcaaaaggcttccttgtgtttgctggctgcttgatgaaggacaaaggccatgatggggtcaaggagctggacagcctaaacagtgaccgattgagaaccgtccagctcaatgtctgcagcagcgaagaggtggagaaagtggtggagattgtccgctcgagcctgaaggaccctgagaaaggcatgtggggcctcgttaacaatgccggcatctcaacgttcggggaggtggagttcaccagcctggagagaggcctctaaatctcagggcaaacatggtgaatctatctctccggagataatttcatacagagattttaagaaaacatctttatattaaaaacagatctcatttgatccttaagccagtctcatgaatgaaaaggacaggtttttttcttttgtaaatgaagcatttgcagcttaaagaggatgcatgaaataacccttttatcgcttataaatagtgccagttatgtgttcctgccacggctgtggaaatacttcacatttgcattccaggactgatattggatccatttgcccgagaatcttctgactaactctgtgtcctcatctgggcagcacacaccaagtgcccactggtacctctgcatgtccatggtgctgtgtgactggccagccagcagccagtgactcagagctggctgtatggagggggtgggaatg

SEQ ID NO: 89299 - DNA, 886 bp, Homo sapiens
  misc_feature (542)..(542): n is a, c, g, or t
  misc_feature (585)..(585): n is a, c, g, or t
  misc_feature (612)..(612): n is a, c, g, or t
  misc_feature (698)..(698): n is a, c, g, or t
  misc_feature (731)..(731): n is a, c, g, or t
  misc_feature (733)..(733): n is a, c, g, or t
  misc_feature (794)..(794): n is a, c, g, or t
  misc_feature (798)..(798): n is a, c, g, or t
  misc_feature (815)..(815): n is a, c, g, or t
  misc_feature (883)..(883): n is a, c, g, or t
ggctggtacggtcggagattttggatcgcgcttcgcgtgtagaagcgtccgggtggcggaggccgcaggccgcaggagtgctggtggaggggcttccagaaagaccctgcggcagcgccccccctcggctctccccgcaggagagcgggcacctgcgcggcgccgggtgaaggcgagagcctcggcgagccctctgcagcggagccccctgcccatttggttttggaaccaccgggaggaactgggccattctaacacccgttgctaccatgctggccacccgcctctccagacccctgtcacggctcccaggaaaaaccctaagtgcctgtgatagagaaaatggagcaagacgcccactattgcttggttctacttcctttatcccgattggccgtcggacttatgccagtgcggcggagccggttggcagcaaagctgtcctggtcacaggctgtgactctggatttgggttctcattggccaagcatctgcattcaaaaggcttccttgtgtttgctggctgcttgatgaagacaaangcaatgatgggtcaagagctgacagctaacagtacgattagancgtcagctcatgtctgagcagcgaaangtgagaatgtgaatgtcgctcagctaagacctataagatgtgggctcgtacatgcgcattacgtcggagtgagtcacagctgaacncacagtgaaatacttggacagtcgatacgaacntntccctatcgagcaagcgcgtgtaaatacacatctggcgatgcaaccgcctcctatatacantggnagtttgatctcataatncctggtagtactgtgacgaatatctcacacttaactaacatagcatcaaaattgagatctagtatcanata

SEQ ID NO: 89300 - DNA, 600 bp, Homo sapiens
ggctggtacggtcggagattttggatcgcgcttcgcgtgtagaagcgtccgggtggcggaggccgcaggccgcaggagtgctggtggaggggcttccagaaagaccctgcggcagcgccccccctcggctctccccgcaggagagcgggcacctgcgcggcgccgggtgaaggcgagagcctcggcgagccctctgcagcggagccccctgcccatttggttttggaaccaccgggaggaactgggccattctaacacccgttgctaccatgctggccacccgcctctccagacccctgtcacggctcccaggaaaaaccctaagtgcctgtgatagagaaaatggagcaagaggtaagcaaccagaggtggtggtggccttgaggggacactttctgagcaggcagaggttttcacacatggacagtgtaggcggtgatgaggcctgattctcagagatgtctctcaatacctttgtctcccagcagaggaaactcagaggtgtcctgggaagacattttcccagggcacacagggcagaaaggaatatctttcataaccacttatttttttttctttttgatggagtctcactctgtt

SEQ ID NO: 89301 - DNA, 368 bp, Homo sapiens
taatggaaagaacccttgtcttcgcaacatctagattaagaaatggaatattacaaatagaaatatggccaccttcatgtttctctttgatctgattttcctcctttcagtctcagagttaatctaatcttaaattcagtctctcttaattatgtatatatatatagatagatatagatatatatactttttaacattttcatgggtctcaagtctatacatagtattgtttttcatttataaaacatcataaactgataacatactgtatgtattcctctgttcctctctttctggctggaccctgtgtgtgaagtttatggagatagcacattttttctgtgctgtgcattgttccatcatgtgaa

SEQ ID NO: 89302 - DNA, 319 bp, Homo sapiens
tactgaccgcggtccctcacctgctgactgattgacttataaatctgccccccacccacttgtctgtccattgaaggcaaattcgccatcgggaacacagtagtttctcaataactatctaatgcatggccacccttcccaggatttagaatatcaaagggacgtgttctttcctcccaaatcacctgcctgcgcttcccccagccgggtgccccagccttcacctcggtccggccaccacctcatcccgcttcttcgcggcttccaggcctcgggctggggatctcagcccctgcctgtaggtgcggcccagagggtg

SEQ ID NO: 89303 - DNA, 677 bp, Homo sapiens
ttccctcaagcatttatcctttgtgttataaacaatccattgacactcttagttattttaaaatgtacaattacgttattattgactatagtcaccctgttgtgctttcaaatagtaggtcttattcattcattctattttttttgtactcattaactatccccatctcccctccaaccccccactacccttcacagtctgtgatagccattcttctattctctattgacactgtttttaatgagccagaggcagtgaactttctcaagtgtgtaacaggaggctttcttagggacagttgctggtgcagttaaactgcctagttgaggtgtgccttgcctcgcacaatagattaatgcatccccaagttggataatatcgtcatgcatgaaagcagcctgctagtctaagggagtcctatagcaaaccatctttataaagtgaacagtgacacccaatttataaatctaaatttttgccattttcttaaaatgaaatatagtttcaaactggggtactaatgtctgaaaaggttttatgcctctacagttaatttaccctgagacagtaatttctagtaactctagtcatttctaaatagtctgagtcagttttcctagaatttaggacaggactcaaaaaaatacagttcaagctctttccccatgtttcaggga

SEQ ID NO: 89304 - DNA, 525 bp, Homo sapiens
gcttcctgaaagcactttgtaggtgtgtaaaacttttcgttaaatgctttaagctgtttgggttaaaaatatatgttcatgttataagaaaaccaagacactcctaattataatcaaatagtacttgttacatatcaatatgtgtgtgtgtgtgtgtgtgtgtgtgtgtatggcgttgtgcagatgtttaaaagtagttacatagactagttcttgcttttcagggtcccataatctaaaccagatgacttcagctttggataaatatatagaaggaaatttaaagagaattcaaaacaatagatgatgcagtgacactgtgaataaatgttatttatacagtttgtaagatttcatgctcattgttcatatgtcccaggtggagttcagaaaatattctcttcatttccacaaaggggaatagtgcctggagatggttttcttttaaaaagtccttttcataatgcagtgcccttccttccattgcccttcattccattgcttcccatgcttgtcaagagacta

SEQ ID NO: 89305 - DNA, 481 bp, Homo sapiens
gagaagacaaagactagggtgaccatgagaaggaggtgaagtggggtagaggaagattggaactcagcaggtcaaggatttgaggccaggaacatacatgggtttcagggaaagaaaatgggaatagggatggaaagagaagtctgtgaggtgaaccatctttagtgagtgaggaggttgatagcagatggcagcagtaaggaaggtaggaagttggtacaacttcatgaatgagtttcagagtagtaggagattttgcaagaaggagaagtggtttggaaggggccttaggtggggaggcaagcaaaaaatccagtcacctcctgacttgggtatgtggagtgtaaagtgtaggggagggggagcccttaggatatttctgttaaggaaggagttgatgttccaagaacacattaaagatacagaaacggttcctgatccaaagcaaacttccagcagttactgtgaaagggatggggag

SEQ ID NO: 89306 - DNA, 313 bp, Homo sapiens
atagatgttggaaagcaaagatccttttgtgagctcaagtaattggaatgcattctatgaacatttttttaaaaacaaaaaaaagaataacatcatgcgttcattttaatgggaataaagatggctgcctctacaacatatttaggttcccaaagtgaaaatacatttggttagatgattggcttttggcttgcacttttctggttgaggtttactggattatttaaaaatttagaacaaactgttttgaatgttatgtatgaatttaacacaattagatgagtagaatatagactcaaaaaactaacttatt

SEQ ID NO: 89307 - DNA, 389 bp, Homo sapiens
tcccagcattttgagacatcaaagcagaaagattgctcaagaccaggagttcaagaccagcctgggcaacatagcaagatcccttctcagtaaaaaaattagccagactagctggcattgtgggtaggcaccactgtgcccagctcctgttttataataaataagccagagctctatctccaaatggtgcaaatcatcaatgctattaaaacaagaatggaaaagcttcaggtggtaatggtgattttttcatcctccctaccccctcccatcccaatgtgtgtgtgtgtgtgtgtgtgtgtgtgtgtgtgtgtgtgtgtataattttttttttttttttaagacagcctcgctctgtcgcccaggctggagtacagtggctcgatctt

SEQ ID NO: 89308 - DNA, 226 bp, Homo sapiens
tcccagcattttgagacatcaaagcagaaagattgctcaagaccaggagttcaagaccagcctgggcaacatagcaagatcccttctcagtaaaaaaattagccagactagctggcattgtgggtaggcaccactgtgcccagctcctgttttataataaataagccagagctctatctccaaatggtgcaaatcatcaatgctattaaaacaagaatggaaaagc

SEQ ID NO: 89309 - DNA, 1443 bp, Homo sapiens
ccaaagtgctgggattacaggcatgagccaccacacccggcctgtcttccttttttcaatacatcagtcttacggcaaagacagccctcccaggattgcccaaagtccctcctgcatttacctctctacctcggttaataagtagagtggctcaccactggagggtgacatgctgctgcagaatcaccatgttatgcctgtggctcttctgaatatcttatcattttcctgtttaagagagttcccacacttcaagacaatattggtattttaacatagtagcattgattaatatatttgtctcccgatgaatcacccagacactttgatttggccactgcatatctctgaacaggaaagcctatacaggtcgagtgtgattggaggctgaggctcagccctagacacctattaatgcgtgaactagtcttcaagggcagacctggttataaagcttctagatcatcggagtttgaggtactccaagaaaatgagggtggtgttatttagaggaagctgaatgttaactctttgtaatataaattaccacatataagttgtatacacactctccatctaaattataaaattagctttttgtatatattttcacaaatcaaaggttacaggtaatgatgttcttctcaaacttcaaaagtgtgtgtgtgttttaatacagttcatttgaagggctcagagaatatctactcttcacagcgtcctatataaaatagtttctgtaatcagatcaacagtgataacttgttttattccagtgtaaaattaaacaagtgggaaaatatctccacagaaaccagaaagacacaattacatagtttgaaggaggcaattagaatccagcaaaccagtgggtttgttaaaagcctatttcttgactgtcagcctgttctcttgaaactacaatatatgttgctttaaggtatctttaaacaagtaactattttctcttagctggtagtggatgataattccattttagaaatacttctctacaactatcctctctcaactctgaggctcctagataaacaataattttatccatgtcaaaaataaactaagaaacaatccgaataaattataataaatacctttactagttgtaaaattttaatacctcaggaaataccacagtgttcccactaatgctattttttaattttttaatttagtttgtcataatttggtttcatcaactcctttgttttttccttctttttttttttttgagatgaggtctcactatcttgcccagactggtttcgaattgccctccagcaattctcccacctcagccttcagagtagctggcattgtgggtaggcaccactgtgcccagctcctgttttataataaataagccagagctctatctccaaatggtgcaaatcatcaatgctattaaaacaagaatggaaaagc

SEQ ID NO: 89310 - DNA, 1606 bp, Homo sapiens
ccaaagtgctgggattacaggcatgagccaccacacccggcctgtcttccttttttcaatacatcagtcttacggcaaagacagccctcccaggattgcccaaagtccctcctgcatttacctctctacctcggttaataagtagagtggctcaccactggagggtgacatgctgctgcagaatcaccatgttatgcctgtggctcttctgaatatcttatcattttcctgtttaagagagttcccacacttcaagacaatattggtattttaacatagtagcattgattaatatatttgtctcccgatgaatcacccagacactttgatttggccactgcatatctctgaacaggaaagcctatacaggtcgagtgtgattggaggctgaggctcagccctagacacctattaatgcgtgaactagtcttcaagggcagacctggttataaagcttctagatcatcggagtttgaggtactccaagaaaatgagggtggtgttatttagaggaagctgaatgttaactctttgtaatataaattaccacatataagttgtatacacactctccatctaaattataaaattagctttttgtatatattttcacaaatcaaaggttacaggtaatgatgttcttctcaaacttcaaaagtgtgtgtgtgttttaatacagttcatttgaagggctcagagaatatctactcttcacagcgtcctatataaaatagtttctgtaatcagatcaacagtgataacttgttttattccagtgtaaaattaaacaagtgggaaaatatctccacagaaaccagaaagacacaattacatagtttgaaggaggcaattagaatccagcaaaccagtgggtttgttaaaagcctatttcttgactgtcagcctgttctcttgaaactacaatatatgttgctttaaggtatctttaaacaagtaactattttctcttagctggtagtggatgataattccattttagaaatacttctctacaactatcctctctcaactctgaggctcctagataaacaataattttatccatgtcaaaaataaactaagaaacaatccgaataaattataataaatacctttactagttgtaaaattttaatacctcaggaaataccacagtgttcccactaatgctattttttaattttttaatttagtttgtcataatttggtttcatcaactcctttgttttttccttctttttttttttttgagatgaggtctcactatcttgcccagactggtttcgaattgccctccagcaattctcccacctcagccttcagagtagctggcattgtgggtaggcaccactgtgcccagctcctgttttataataaataagccagagctctatctccaaatggtgcaaatcatcaatgctattaaaacaagaatggaaaagcttcaggtggtaatggtgattttttcatcctccctaccccctcccatcccaatgtgtgtgtgtgtgtgtgtgtgtgtgtgtgtgtgtgtgtgtgtataattttttttttttttttaagacagcctcgctctgtcgcccaggctggagtacagtggctcgatctt

SEQ ID NO: 89311 - DNA, 1098 bp, Homo sapiens
ccaaagtgctgggattacaggcatgagccaccacacccggcctgtcttccttttttcaatacatcagtcttacggcaaagacagccctcccaggattgcccaaagtccctcctgcatttacctctctacctcggttaataagtagagtggctcaccactggagggtgacatgctgctgcagaatcaccatgttatgcctgtggctcttctgaatatcttatcattttcctgtttaagagagttcccacacttcaagacaatattggtattttaacatagtagcattgattaatatatttgtctcccgatgaatcacccagacactttgatttggccactgcatatctctgaacaggaaagcctatacaggtcgagtgtgattggaggctgaggctcagccctagacacctattaatgcgtgaactagtcttcaagggcagacctggttataaagcttctagatcatcggagtttgaggtactccaagaaaatgagggtggtgttatttagaggaagctgaatgttaactctttgtaatataaattaccacatataagttgtatacacactctccatctaaattataaaattagctttttgtatatattttcacaaatcaaaggttacaggtaatgatgttcttctcaaacttcaaaagtgtgtgtgtgttttaatacagttcatttgaagggctcagagaatatctactcttcacagcgtcctatataaaatagtttctgtaatcagatcaacagtgataacttgttttattccagtgtaaaattaaacaagtgggaaaatatctccacagaaaccagaaagacacaattacatagtttgaaggaggcaattagaatccagcaaaccagtgggtttgttaaaagcctatttcttgactgtcagcctgttctcttgaaactacaatatatgttgctttaaggtatctttaaacaagtaactattttctcttagctggtagtggatgataattccattttagaaatacttctctacaactatcctctctcaactctgaggctcctagataaacaataattttatccatgtcaaaaatctcgtgccgaattcctacagccc

SEQ ID NO: 89312 - DNA, 1301 bp, Homo sapiens
ccaaagtgctgggattacaggcatgagccaccacacccggcctgtcttccttttttcaatacatcagtcttacggcaaagacagccctcccaggattgcccaaagtccctcctgcatttacctctctacctcggttaataagtagagtggctcaccactggagggtgacatgctgctgcagaatcaccatgttatgcctgtggctcttctgaatatcttatcattttcctgtttaagagagttcccacacttcaagacaatattggtattttaacatagtagcattgattaatatatttgtctcccgatgaatcacccagacactttgatttggccactgcatatctctgaacaggaaagcctatacaggtcgagtgtgattggaggctgaggctcagccctagacacctattaatgcgtgaactagtcttcaagggcagacctggttataaagcttctagatcatcggagtttgaggtactccaagaaaatgagggtggtgttatttagaggaagctgaatgttaactctttgtaatataaattaccacatataagttgtatacacactctccatctaaattataaaatagtttctgtaatcagatcaacagtgataacttgttttattccagtgtaaaattaaacaagtgggaaaatatctccacagaaaccagaaagacacaattacatagtttgaaggaggcaattagaatccagcaaaccagtgggtttgttaaaagcctatttcttgactgtcagcctgttctcttgaaactacaatatatgttgctttaaggtatctttaaacaagtaactattttctcttagctggtagtggatgataattccattttagaaatacttctctacaactatcctctctcaactctgaggctcctagataaacaataattttatccatgtcaaaaataaactaagaaacaatccgaataaattataataaatacctttactagttgtaaaattttaatacctcaggaaataccacagtgttcccactaatgctattttttaattttttaatttagtttgtcataatttggtttcatcaactcctttgttttttccttctttttttttttttgagatgaggtctcactatcttgcccagactggtttcgaattgccctccagcaattctcccacctcagccttcagagtagctggcattgtgggtaggcaccactgtgcccagctcctgttttataataaataagccagagctctatctccaaatggtgcaaatcatcaatgctattaaaacaagaatggaaaagc

SEQ ID NO: 89313 - DNA, 1389 bp, Homo sapiens
ccaaagtgctgggattacaggcatgagccaccacacccggcctgtcttccttttttcaatacatcagtcttacggcaaagacagccctcccaggattgcccaaagtccctcctgcatttacctctctacctcggttaataagtagagtggctcaccactggagggtgacatgctgctgcagaatcaccatgttatgcctgtggctcttctgaatatcttatcattttcctgtttaagagagttcccacacttcaagacaatattggtattttaacatagtagcattgattaatatatttgtctcccgatgaatcacccagacactttgatttggccactgcatatctctgaacaggaaagcctatacaggtcgagtgtgattggaggctgaggctcagccctagacacctattaatgcgtgaactagtcttcaagggcagacctggttataaagcttctagatcatcggagtttgaggtactccaagaaaatgagggtggtgttatttagaggaagctgaatgttaactctttgtaatataaattaccacatataagttgtatacacactctccatctaaattataaaattagctttttgtatatattttcacaaatcaaaggttacaggtaatgatgttcttctcaaacttcaaaagtgtgtgtgtgttttaatacagttcatttgaagggctcagagaatatctactcttcacagcgtcctatataaaatagtttctgtaatcagatcaacagtgataacttgttttattccagtgtaaaattaaacaagtgggaaaatatctccacagaaaccagaaagacacaattacatagtttgaaggaggcaattagaatccagcaaaccagtgggtttgttaaaagcctatttcttgactgtcagcctgttctctcttagctggtagtggatgataattccattttagaaatacttctctacaactatcctctctcaactctgaggctcctagataaacaataattttatccatgtcaaaaataaactaagaaacaatccgaataaattataataaatacctttactagttgtaaaattttaatacctcaggaaataccacagtgttcccactaatgctattttttaattttttaatttagtttgtcataatttggtttcatcaactcctttgttttttccttctttttttttttttgagatgaggtctcactatcttgcccagactggtttcgaattgccctccagcaattctcccacctcagccttcagagtagctggcattgtgggtaggcaccactgtgcccagctcctgttttataataaataagccagagctctatctccaaatggtgcaaatcatcaatgctattaaaacaagaatggaaaagc

SEQ ID NO: 89314 - DNA, 4212 bp, Homo sapiens
  misc_feature (65)..(65): n is a, c, g, or t
  misc_feature (796)..(796): n is a, c, g, or t
  misc_feature (1033)..(1033): n is a, c, g, or t
agaatttagctttttcaggaactgccatactggcttttcttttgtttttttgttttgagacagantctcactttgttgcccaggctggagtgcagtggcactctctcaggtcactgcaacctctgcctccgcagttcaagtgattctcatgcctcagcctcccaagtagctggaattacaagtgtgcaccaccacacctgtttttgtatttttttttttttatgagacggagtttcgctctcgttgcccaggctgaagtgcagtggtacaatctaggctcaccacaacctccacctcccaggttcaagcgattctcctgcctcagcctccccagtagctgggattacaggcatgcgccaccacacccggctactgtttttgtatttttaatagagatggatttttgccatgttggccagggtggtgttgaactcatgacctctagtgatccacctacttccgcttcccaaagtgctgggattacagacgtgagccactgtgctcagccccatactgggttttgtatcagcatgtatattttccattcccaccagcagtgcagactgttgcaatttctccacatccttggcaacacttactattttttattatggcctttctaatatgtgtgaagtggtatctcattgcggttttgatatgcattcccctaatgaccaatgacatcgagcatccattcctgtgtttattgaccatttgtgtatcgatttttgggggaaatgtaagatctgtaattttttttttttttttactctgtcgcccatgctggaatgcagtnctgcaatctcggctcactgcaagccctgcctcccgagttcatgtcattctcccgcctcagcctcccaagtagctgggactacaggcgcctgccaccacacccggctaattttttgtatttttagtagagacggggtttcaccgtgttagccaggatggtcttgatctcctgacctcatgatccacccgccctgccctcccaaagtgatgggattacaggtgtgagccactgcacccncccttttttttttttttttttttgagacagagtctcactctcattgcccagcctggggtgcagtggtgtgatcacagctcactgcagccttgacctccccagggctcaagtgatcttcccacctcaatctcccaggtagctgggactataggcttagaccaccacacctggctagtttttttgtttgtttgtttttggtttttttttggtaggtccggggtcttgtcatgttgctcaggctggtctcaaactcctgtgttccagtgatcacctgcctctgggcctcccaaagtgttgggattacaggtgtgagccaccacgcccaaccagatctgtaattttttttttctttgagactgagtcttgctctgttgcccaggctggagtgcaatgccacgacctcggctcactgcaacctctgcctcctgggttcaagtgattctcccacctcagcctcctgagtaactggggttacaggcatgcaccaccacgcccagctaatttttgtatttttagtagagatggggttttaccatgttggccaggctggtctcaaactcctgacctcaggtgatccgcctgcctcggcctcccaaattgctgggattacaggagtgagccaccatgcctggcacagatctgtaattttttaactagaaaataaaatcattatcttgtgctacctctcaagtatactcttgtctttttcagaagccttgaagaaccaatgtactgatgtggggattaaagagggtccactttccccagcacaaacctcacaagtcactagtctttcctcatggacggggtatttactttttcaaccagtggcttcttcccacttggagcaaagagaagccctgtggatagaggaaaaaggaactcctcaagcctcctgttcagattggatgactgtactaagaaaccaagactcaacttacaagaaggtggctttgcaggaggaaccagccagtggtataaatatgataaagcttatcagagaagatgggggatggaagcagttagaggacagccatgaagacccccaggggcttttgagccaaaaggcatcccttcacgtagtggccgttcctcaggagaaggctactgcatggcatggatttggggaaaatggtaatctgagcccagcccttgttttatcacagggaagctctaaagggaaccacttgtgtggcagcgagttagatattacaagcttggcatccgattcagtcttaaaccaccatcagctgggatatgcagatcggagaccttgtgaaagtaatgaatgtggaaatgccatccgccagaacagtcactttattcaacacggggggaagatgtttgtgtatttggaaaatgggcagtcattgaaccacggtatggccctgactatccacaacaaaatcaacacggcagagaaaccctttgagtgccaccagtgtgggaaggtgttcaaccggaggcattctttgagcgaacatcaaagaattcacacgggggagaaaccctacgagtgtcaggagtgtgggcgagcctttacgcacagctccaccctcacgcgccatctgagaactcatactggagagaagccctacgggtgcggtgagtgcgggaaagccttcaacaggatctcatcgctgactcagcatcagaggattcacaccggggaaaagccctataaatgtgaagactgtgggaaatccttctgccagagctcttacctgatcttgcacaagaggacacacaccggagagaagccctacgaatgcagtgaatgtggaaaggccttcagtgaccgttcctctctcaaccagcacgagcgaactcacacgggcgagaacccctatgaatgtaagcagtgtgggagagccttcagccagaggtcttcccttgtgaggcacgagagaactcacactggagagaaaccctacaggtgtcaggaatgtgggaaagccttcagccagagctcatcccttgtcacacatcagaaaactcacagcagccagaaaacctataaaatcattgactgcgggaaagcgttctaccagaacagacatcttattggatattagcaattgcacgctgctttgtaagccactttttagtactctgacacatacatgtggttatcttttgccctgttgtgatggataatttgaaaagaagtgggtttatgtcaccttctcaccttcttataagaaagctctgagaatgggcatttttgtattttgttgttgttgttgagatggagtctgccacccaggctggagtccagtggcgtgatcatacctcactgcagcttcaacttcctgggctcaagtaatcctcccaccccagcctcccaggtagctagtactataggtgtgcaccaccacgcccagcaaatttttaaatttattatagagtgggaggcagggtgcggtggctcatgcctataatcctaacactttaggaggccgaggcgggtggatcatgaggtcaggagatcgagaccatcctggctaacacagtgaaaccctgtctctactaaaaatacaaaaaagtagccgggcgtggtggtgggcgcctgtagtcccaactactcaggaggctgaggcaggagaatggtgtgaacccgggaggtggagcttgcagtgagccaagatcgcaccactgcactccagcctgggagacagagcgagactccgtctcaaaaaaaaaaaaaaaattatagagttggggtcttgctacattgccaagactggtcttgaactcctggggtcaagcatcctcctgtcttggcctcccaaagtgttgggattagaagcatgagccgctgtgcccagcctgacggggccttttagtgggaggagttgccattacactacgtccagtaagctccagactttcggaaaagattggtggacgggaatgctgtcatggatgggatcttgccaagaaccatcacgtgttaatttagttgcttaaacaaaaggtgttctgtttcttaactacttctgtgtctttactttttatttcattgttcattgtttttattttaatattcttttctgggtttatatgagacgagttttcactctgttgctgaggctgaagtgcagtggcgtgatcatagctccctgtagtcagccttcatctcctggactcaagcaatcctcccacctcagcctctccgg

SEQ ID NO: 89315 - DNA, 2178 bp, Homo sapiens
  misc_feature (65)..(65): n is a, c, g, or t
  misc_feature (796)..(796): n is a, c, g, or t
  misc_feature (1033)..(1033): n is a, c, g, or t
agaatttagctttttcaggaactgccatactggcttttcttttgtttttttgttttgagacagantctcactttgttgcccaggctggagtgcagtggcactctctcaggtcactgcaacctctgcctccgcagttcaagtgattctcatgcctcagcctcccaagtagctggaattacaagtgtgcaccaccacacctgtttttgtatttttttttttttatgagacggagtttcgctctcgttgcccaggctgaagtgcagtggtacaatctaggctcaccacaacctccacctcccaggttcaagcgattctcctgcctcagcctccccagtagctgggattacaggcatgcgccaccacacccggctactgtttttgtatttttaatagagatggatttttgccatgttggccagggtggtgttgaactcatgacctctagtgatccacctacttccgcttcccaaagtgctgggattacagacgtgagccactgtgctcagccccatactgggttttgtatcagcatgtatattttccattcccaccagcagtgcagactgttgcaatttctccacatccttggcaacacttactattttttattatggcctttctaatatgtgtgaagtggtatctcattgcggttttgatatgcattcccctaatgaccaatgacatcgagcatccattcctgtgtttattgaccatttgtgtatcgatttttgggggaaatgtaagatctgtaattttttttttttttttactctgtcgcccatgctggaatgcagtnctgcaatctcggctcactgcaagccctgcctcccgagttcatgtcattctcccgcctcagcctcccaagtagctgggactacaggcgcctgccaccacacccggctaattttttgtatttttagtagagacggggtttcaccgtgttagccaggatggtcttgatctcctgacctcatgatccacccgccctgccctcccaaagtgatgggattacaggtgtgagccactgcacccncccttttttttttttttttttttgagacagagtctcactctcattgcccagcctggggtgcagtggtgtgatcacagctcactgcagccttgacctccccagggctcaagtgatcttcccacctcaatctcccaggtagctgggactataggcttagaccaccacacctggctagtttttttgtttgtttgtttttggtttttttttggtaggtccggggtcttgtcatgttgctcaggctggtctcaaactcctgtgttccagtgatcacctgcctctgggcctcccaaagtgttgggattacaggtgtgagccaccacgcccaaccagatctgtaattttttttttctttgagactgagtcttgctctgttgcccaggctggagtgcaatgccacgacctcggctcactgcaacctctgcctcctgggttcaagtgattctcccacctcagcctcctgagtaactggggttacaggcatgcaccaccacgcccagctaatttttgtatttttagtagagatggggttttaccatgttggccaggctggtctcaaactcctgacctcaggtgatccgcctgcctcggcctcccaaattgctgggattacaggagtgagccaccatgcctggcacagatctgtaattttttaactagaaaataaaatcattatcttgtgctacctctcaagtatactcttgtctttttcagaagccttgaagaaccaatgtactgatgtggggattaaagagggtccactttccccagcacaaacctcacaagtcactagtctttcctcatggacggggtatttactttttcaaccagtggcttcttcccacttggagcaaagagaagccctgtggatagaggaaaaaggaactcctcaagcctcctgttcagattggatgactgtactaagaaaccaagactcaacttacaagaaggtggctttgcaggaggaaccagccagtggtataaatatgataaagcttatcagagaagatgggggatggatcgcgatccatccctttccccttaagtttcataagggctatcgtagttttctggggtagaacatgtagcccatttcttgccacctcatgggctacaccttgacctaacgtctttacgtgggtacttgc

SEQ ID NO: 89316 - DNA, 2830 bp, Homo sapiens
gaggagccgagcggaggaggcgtcccagggacacgcaggggaggccggccggcctgcacggggcgctcccgcctcgggggccctgtctggcgcctcagcgcgcgccccgatggtcacctgcgcccacctgggccggcgcgcgcggctcccggcagctcagccctctgcctgcccaggaacctgcttttcccaagaggagagaatggctgctgggtacctgccccgctggtcccaggaattagtaacctttgaggacgtgtccatggacttctcccaggaggagtgggagttgctggagcctgctcagaagaacctgtacagagaggtgatgctggagaactacaggaacgtggtctccctggaagccttgaagaaccaatgtactgatgtggggattaaagagggtccactttccccagcacaaacctcacaagtcactagtctttcctcatggacggggtatttactttttcaaccagtggcttcttcccacttggagcaaagagaagccctgtggatagaggaaaaaggaactcctcaagcctcctgttcagattggatgactgtactaagaaaccaagactcaacttacaagaaggtggctttgcaggaggaaccagccagtggtataaatatgataaagcttatcagagaagatgggggatggaagcagttagaggacagccatgaagacccccaggggcttttgagccaaaaggcatcccttcacgtagtggccgttcctcaggagaaggctactgcatggcatggatttggggaaaatggtaatctgagcccagcccttgttttatcacagggaagctctaaagggaaccacttgtgtggcagcgagttagatattacaagcttggcatccgattcagtcttaaaccaccatcagctgggatatgcagatcggagaccttgtgaaagtaatgaatgtggaaatgccatccgccagaacagtcactttattcaacacggggggaagatgtttgtgtatttggaaaatgggcagtcattgaaccacggtatggccctgactatccacaacaaaatcaacacggcagagaaaccctttgagtgccaccagtgtgggaaggtgttcaaccggaggcattctttgagcgaacatcaaagaattcacacgggggagaaaccctacgagtgtcaggagtgtgggcgagcctttacgcacagctccaccctcacgcgccatctgagaactcatactggagagaagccctacgggtgcggtgagtgcgggaaagccttcaacaggatctcatcgctgactcagcatcagaggattcacaccggggaaaagccctataaatgtgaagactgtgggaaatccttctgccagagctcttacctgatcttgcacaagaggacacacaccggagagaagccctacgaatgcagtgaatgtggaaaggccttcagtgaccgttcctctctcaaccagcacgagcgaactcacacgggcgagaacccctatgaatgtaagcagtgtgggagagccttcagccagaggtcttcccttgtgaggcacgagagaactcacactggagagaaaccctacaggtgtcaggaatgtgggaaagccttcagccagagctcatcccttgtcacacatcagaaaactcacagcagccagaaaacctataaaatcattgactgcgggaaagcgttctaccagaacagacatcttattggatattagcaattgcacgctgctttgtaagccactttttagtactctgacacatacatgtggttatcttttgccctgttgtgatggataatttgaaaagaagtgggtttatgtcaccttctcaccttcttataagaaagctctgagaatgggcatttttgtattttgttgttgttgttgagatggagtctgccacccaggctggagtccagtggcgtgatcatacctcactgcagcttcaacttcctgggctcaagtaatcctcccaccccagcctcccaggtagctagtactataggtgtgcaccaccacgcccagcaaatttttaaatttattatagagtgggaggcagggtgcggtggctcatgcctataatcctaacactttaggaggccgaggcgggtggatcatgaggtcaggagatcgagaccatcctggctaacacagtgaaaccctgtctctactaaaaatacaaaaaagtagccgggcgtggtggtgggcgcctgtagtcccaactactcaggaggctgaggcaggagaatggtgtgaacccgggaggtggagcttgcagtgagccaagatcgcaccactgcactccagcctgggagacagagcgagactccgtctcaaaaaaaaaaaaaaaattatagagttggggtcttgctacattgccaagactggtcttgaactcctggggtcaagcatcctcctgtcttggcctcccaaagtgttgggattagaagcatgagccgctgtgcccagcctgacggggccttttagtgggaggagttgccattacactacgtccagtaagctccagactttcggaaaagattggtggacgggaatgctgtcatggatgggatcttgccaagaaccatcacgtgttaatttagttgcttaaacaaaaggtgttctgtttcttaactacttctgtgtctttactttttatttcattgttcattgtttttattttaatattcttttctgggtttatatgagacgagttttcactctgttgctgaggctgaagtgcagtggcgtgatcatagctccctgtagtcagccttcatctcctggactcaagcaatcctcccacctcagcctctccgg

SEQ ID NO: 89317 - DNA, 254 bp, Homo sapiens
cacacagccaggcagataaaggagaaagaaggtgatctgaggctagagggtcaaaatgagcaatgggacaaagatagataaaagtgccaagtgttcagggatgcagccttggataaaagattctagctaggcagcaaaaaagcctaaggaatttaggctgagatattaaggctttgtttacgaagtatagaggagccactaaccactacagcccagaaatatccccaaggaaaaccctttggtcattcagcccc

SEQ ID NO: 89318 - DNA, 289 bp, Homo sapiens
acaaaacaaaacaaaaaacaacaacaaactgctgtgaacatgggtgtgcaagtatctgtttgaaaccatgcttcagttctttggatatttacccagaagtggaattgctgggtcctatgattattctatttttaattttgggaggaactgtgctccacggcagctgcacccttttccattcccaccagcaatgcacacgggttccagcatctccacatcctcaccaacacttgtgattttctggctagccaatagtttttgaatggatgcacgcatggctggtggctcg

SEQ ID NO: 89319 - DNA, 345 bp, Homo sapiens
tatgataaaaactttgaaacgttttgacgggtagcaatagaacttctaaacttttccatttattttagtaaatttcacttcacagtgaggcacacacaaggctgagtgcacacgggacatgggtgttcaccagcccaccgcaccctgcgccggcccacagcccagaggcctccaccggggagggcggtgggaggtgattccccgcctgcagtaacagcaccctgtggagtcccagggcgtcctctccacctgtgcaacccggctttaaactcacttgtggagctgtgcgcagcggcggctcgctgcaggtggctgccgtggcctccgtgtcagtgctgagtgtcc

SEQ ID NO: 89320 - DNA, 364 bp, Homo sapiens
agaacatagctttagaagtggatgcatttggaactagaaatggcacagatgacccatcttataatggagccatcacagtgtgttgtaatgaaaagaattacagcttttcgttagcatgcaatgccaaaagattgaattgcttcccagttcttatggacattgttagtaatgggctacttggaatggttaaaccatcagtacatatccgaactgaaagaagtacatttttggaggtaaatatatataatcttacaattcctgactctcctctatcaggaatctcccagatcacccttttaagtgctggaatcttgtttttattgagtaaaccactgcataataaattaacatttggactcattct

SEQ ID NO: 89321 - DNA, 260 bp, Homo sapiens
aacactatttattaaacaccactacgtgttgtatactctatggcatagggtaattaggattccaagtttgcaccaaagaactctgacctacagaaagataagttacctgcccaaaatttgcaaatagtcaaataggaacttgaactcatatcatctgattctaaaatggcgtgttcatccaaccataaaatattgcctcaaaatatctaacttgagagttacgaagaggttggtgatatttcacatccattcttgagaca

SEQ ID NO: 89322 - DNA, 323 bp, Homo sapiens
tgcaatctgtttcctttgaagcggtgttgggcctgcttgccgcgggagtgacgctacttcttccagagaccaagggggtcgctttgccagagaccatgaaggacgccgagaaccttgggagaaaagcaaagcccaaagaaaacacgatttaccttaaggtccaaacctcagaaccctcgggcacctgagagagatgttttgcggcgatgtcgtgttggagggatgaagatggagttatcctctgcagaaattcctagacgccttcacttctctgtattcttcctcatacttgcctacccccaaattaatatcagtcctaaaga

SEQ ID NO: 89323 - DNA, 1851 bp, Homo sapiens
ctgatttcaaaccactccttttcaaagatctctgagggagacattgcacctggccactgcagcccagagcaggtctggccacggccatgagcatgctgagccatcatgcccaccgtggatgacattctggagcaggttggggagtctggctggttccagaagcaagccttcctcatcttatgcctgctgtcggctgcctttgcgcccatctgtgtgggcatcgtcttcctgggtttcacacctgaccaccactgccagagtcctggggtggctgagctgagccagcgctgtggctggagccctgcggaggagctgaactatacagtgccaggcctggggcccgcgggcgaggccttccttggccagtgcaggcgctatgaagtggactggaaccagagcgccctcagctgtgtagaccccctggctagcctggccaccaacaggagccacctgccgctgggtccctgccaggatggctgggtgtatgacacgcccggctcttccatcgtcactgagttcaacctggtgtgtgctgactcctggaagctggacctctttcagtcctgtttgaatgcgggcttcttgtttggctctctcggtgttggctactttgcagacaggtttggccgtaagctgtgtctcctgggaactgtgctggtcaacgcggtgtcgggcgtgctcatggccttctcgcccaactacatgtccatgctgctcttccgcctgctgcagggcctggtcagcaagggcaactggatggctggctacaccctaatcacagaatttgttggctcgggctccagaagaacggtggcgatcatgtaccagatggccttcacggtggggctggtggcgcttaccgggctggcctacgccctgcctcactggcgctggctgcagctggcagtctccctgcccaccttcctcttcctgctctactactggtgtgtgccggagtcccctcggtggctgttatcacaaaaaagaaacactgaagcaataaagataatggaccacatcgctcaaaagaatgggaagttgcctcctgctgatttaaagatgctttccctcgaagaggatgtcaccggcaccttcatcctgatgtacctgtggttcacggactctgtgctctatcaggggctcatcctgcacatgggcgccaccagcgggaacctctacctggatttcctttactccgctctggtcgaaatcccgggggccttcatagccctcatcaccattgaccgcgtgggccgcatctaccccatggccatgtcaaatttgttggcgggggcagcctgcctcgtcatgatttttatctcacctgacctgcactggttaaacatcataatcatgtgtgttggccgaatgggaatcaccattgcaatacaaatgatctgcctggtgaatgctgagctgtaccccacattcgtcaggaacctcggagtgatggtgtgttcctccctgtgtgacataggtgggataatcacccccttcatagtcttcaggctgagggaggtctggcaagccttgcccctcattttgtttgcggtgttgggcctgcttgccgcgggagtgacgctacttcttccagagaccaagggggtcgctttgccagagaccatgaaggacgccgagaaccttgggagaaaagcaaagcccaaagaaaacacgatttaccttaaggtccaaacctcagaaccctcgggcacctgagagagatgttttgcggcgatgtcgtgttggagggatgaagatggagttatcctctgcagaaattcctagacgccttcacttctctgtattcttcctcatacttgcctacccccaaattaatatcagtcctaaaga

SEQ ID NO: 89324 - DNA, 460 bp, Homo sapiens
ttctgcccctgcattggaaaagcagctatagacaatgcatgaaggaatggttgtgtctggataccagtaaaatgctatttatggatgttgaaatttgaatttcatgtaattttttaagtatcttgaaatattttcattttttccaactatataaaatgtaaaaaccatttgtagctcactagttgtacaaaaacaggctataagctcgaatggggccacaggctgtagtttgctatgcccttttcttctttgctgtttgccatccttactttctctttgtcttgacacttattcatttctgtgtacaactttgcaacagttccatcatcaacaaactgattgcttatttatttattttaactccaacttttaattttgttgttacagaaaagcaaagcccaaagaaaacacgatttaccttaaggtccaaacctcagaaccctcgggcacctgagagaga

SEQ ID NO: 89325 - DNA, 1905 bp, Homo sapiens
ctgatttcaaaccactccttttcaaagatctctgagggagacattgcacctggccactgcagcccagagcaggtctggccacggccatgagcatgctgagccatcatgcccaccgtggatgacattctggagcaggttggggagtctggctggttccagaagcaagccttcctcatcttatgcctgctgtcggctgcctttgcgcccatctgtgtgggcatcgtcttcctgggtttcacacctgaccaccactgccagagtcctggggtggctgagctgagccagcgctgtggctggagccctgcggaggagctgaactatacagtgccaggcctggggcccgcgggcgaggccttccttggccagtgcaggcgctatgaagtggactggaaccagagcgccctcagctgtgtagaccccctggctagcctggccaccaacaggagccacctgccgctgggtccctgccaggatggctgggtgtatgacacgcccggctcttccatcgtcactgagttcaacctggtgtgtgctgactcctggaagctggacctctttcagtcctgtttgaatgcgggcttcttgtttggctctctcggtgttggctactttgcagacaggtttggccgtaagctgtgtctcctgggaactgtgctggtcaacgcggtgtcgggcgtgctcatggccttctcgcccaactacatgtccatgctgctcttccgcctgctgcagggcctggtcagcaagggcaactggatggctggctacaccctaatcacagaatttgttggctcgggctccagaagaacggtggcgatcatgtaccagatggccttcacggtggggctggtggcgcttaccgggctggcctacgccctgcctcactggcgctggctgcagctggcagtctccctgcccaccttcctcttcctgctctactactggtgtgtgccggagtcccctcggtggctgttatcacaaaaaagaaacactgaagcaataaagataatggaccacatcgctcaaaagaatgggaagttgcctcctgctgatttaaagatgctttccctcgaagaggatgtcaccgaaaagctgagcccttcatttgcagacctgttccgcacgccgcgcctgaggaagcgcaccttcatcctgatgtacctgtggttcacggactctgtgctctatcaggggctcatcctgcacatgggcgccaccagcgggaacctctacctggatttcctttactccgctctggtcgaaatcccgggggccttcatagccctcatcaccattgaccgcgtgggccgcatctaccccatggccatgtcaaatttgttggcgggggcagcctgcctcgtcatgatttttatctcacctgacctgcactggttaaacatcataatcatgtgtgttggccgaatgggaatcaccattgcaatacaaatgatctgcctggtgaatgctgagctgtaccccacattcgtcaggaacctcggagtgatggtgtgttcctccctgtgtgacataggtgggataatcacccccttcatagtcttcaggctgagggaggtctggcaagccttgcccctcattttgtttgcggtgttgggcctgcttgccgcgggagtgacgctacttcttccagagaccaagggggtcgctttgccagagaccatgaaggacgccgagaaccttgggagaaaagcaaagcccaaagaaaacacgatttaccttaaggtccaaacctcagaaccctcgggcacctgagagagatgttttgcggcgatgtcgtgttggagggatgaagatggagttatcctctgcagaaattcctagacgccttcacttctctgtattcttcctcatacttgcctacccccaaattaatatcagtcctaaaga

SEQ ID NO: 89326 - DNA, 1751 bp, Homo sapiens
ctgatttcaaaccactccttttcaaagatctctgagggagacattgcacctggccactgcagcccagagcaggtctggccacggccatgagcatgctgagccatcatgcccaccgtggatgacattctggagcaggttggggagtctggctggttccagaagcaagccttcctcatcttatgcctgctgtcggctgcctttgcgcccatctgtgtgggcatcgtcttcctgggtttcacacctgaccaccactgccagagtcctggggtggctgagctgagccagcgctgtggctggagccctgcggaggagctgaactatacagtgccaggcctggggcccgcgggcgaggccttccttggccagtgcaggcgctatgaagtggactggaaccagagcgccctcagctgtgtagaccccctggctagcctggccaccaacaggagccacctgccgctgggtccctgccaggatggctgggtgtatgacacgcccggctcttccatcgtcactgagttcaacctggtgtgtgctgactcctggaagctggacctctttcagtcctgtttgaatgcgggcttcttgtttggctctctcggtgttggctactttgcagacaggtttggccgtaagctgtgtctcctgggaactgtgctggtcaacgcggtgtcgggcgtgctcatggccttctcgcccaactacatgtccatgctgctcttccgcctgctgcagggcctggtcagcaagggcaactggatggctggctacaccctaatcacagaatttgttggctcgggctccagaagaacggtggcgatcatgtaccagatggccttcacggtggggctggtggcgcttaccgggctggcctacgccctgcctcactggcgctggctgcagctggcagtctccctgcccaccttcctcttcctgctctactactggtgtgtgccggagtcccctcggtggctgttatcacaaaaaagaaacactgaagcaataaagataatggaccacatcgctcaaaagaatgggaagttgcctcctgctgatttaaagatgctttccctcgaagaggatgtcaccggcaccttcatcctgatgtacctgtggttcacggactctgtgctctatcaggggctcatcctgcacatgggcgccaccagcgggaacctctacctggatttcctttactccgctctggtcgaaatcccgggggccttcatagccctcatcaccattgaccgcgtgggccgcatctaccccatggccatgtcaaatttgttggcgggggcagcctgcctcgtcatgatttttatctcacctgacctgcactggttaaacatcataatcatgtgtgttggccgaatgggaatcaccattgcaatacaaatgatctgcctggtgaatgctgagctgtaccccacattcgtcaggaacctcggagtgatggtgtgttcctccctgtgtgacataggtgggataatcacccccttcatagtcttcaggctgagggaggtctggcaagccttgcccctcattttgtttgaaaagcaaagcccaaagaaaacacgatttaccttaaggtccaaacctcagaaccctcgggcacctgagagagatgttttgcggcgatgtcgtgttggagggatgaagatggagttatcctctgcagaaattcctagacgccttcacttctctgtattcttcctcatacttgcctacccccaaattaatatcagtcctaaaga

SEQ ID NO: 89327 - DNA, 377 bp, Homo sapiens
aaaccttaaaattagaagaaatttcctttattaaatatgaattttgctatattttagcatgtgttgggggttcccaagaccaccctcaggctcagtgattcgctagaagaactcacaggacccagaaaagctgttattcccttggtgttcaaggtttttattgtgggtcagtcacataggcatggagcacccatgtgagtgaccttagctgccgagtctccagccctcctttttcccttcccctccagaggtcaaactaatatggcgtagcccaaggccccagacaaagacaggtattcaccgtatatcatattgttagcataaactatctggcatgcccaaagccccaggtatactaagatactattgtcaggtgg

SEQ ID NO: 89328 - DNA, 332 bp, Homo sapiens
ctgcttacgcactgacatcattccttgggatctggatcaacacgaatttcaggaacttttaacctgaaatgactccttgggattatctaatttaaccttcccatttcacatgttagtaaactgagattcagagaagtagagttgtttatgctcatgagtgacttagtagcagagccaggataaaaacacagttctcctaatatgattattatgactgagagttattgttcactaattaggtaccaaggaagggtcttatgtcatggtcacaacccagtagagtcttctaaaaacagatttttccttatggcatttttatgtctcatacattt

SEQ ID NO: 89329 - DNA, 395 bp, Homo sapiens
ttggatgtctttatgcaatggcaagtttcagtatttctagctgtgtatcttctgtttatgtgctcctggacccgtgcattgtgtgtcttaatatgtgtttgccttggcgtgtttgtgaccttgtgtacctcagtgagggctcctaagtcagacagacttgggttccagctctggcacttgcagcgtaacctttaacttctcgaagtctcactttcttcatctataaactggggatagtgatactacttgcccctgaggtggtagatagatgtttgaaggatcaaatgaggtcacatgtgtgtggtgccccacacagtacctggcacatggtaagcatcaacaaatgtgagctgctacaaatgtcatgatgaggttgcttcgatctgtttgtggct

SEQ ID NO: 89330 - DNA, 974 bp, Homo sapiens
cccttccttggagcgcagagctgcagccgccgagccggacgtgtccgcgaagatggcgggccggagcatgcaagcggcaagatgtcctacagatgaattatctttaaccaattgtgcagttgtgaatgaaaaggatttccagtctggccagcatgtgattgtgaggacctctcccaatcacaggtacacatttacactgaagacacatccatcggtggttccagggagcattgcattcagtttacctcagagaaaatgggctgggctttctattgggcaagaaatagaagtctccttatatacatttgacaaagccaaacagtgtattggcacaatgaccatcgagattgatttcctgcagaaaaaaagcattgactccaacccttatgacaccgacaagatggcagcagaatttattcagcaattcaacaaccaggccttctcagtgggacaacagcttgtctttagcttcaatgaaaagctttttggcttactggtgaaggacattgaagccatggatcctagcatcctgaagggagagcctgcgacagggaaaaggcagaagattgaagtaggactggttgttggaaacagtcaagttgcatttgaaaaagcagaaaattcgtcacttaatcttattggcaaagctaaaaccaaggaaaatcgccaatcaattatcaatcctgactggaactttgaaaaaatgggaataggaggtctagacaaggaattttcagatattttccgacgagcatttgcttcccgagtatttcctccagagattgtggagcagatgggttgtaaacatgttaaaggcatcctgttatatggacccccaggttgtggtaagactctcttggctcgacagattggcaagatgttgaatgcaagagagcccaaagtggtcaatgggccagaaatccttaacaaatatgtgggagaatcagaggctaacattcgcaaactttttgctg

SEQ ID NO: 89331 - DNA, 631 bp, Homo sapiens
cccttccttggagcgcagagctgcagccgccgagccggacgtgtccgcgaagatggcgggccgggttgtaaacatgttaaaggcatcctgttatatggacccccaggttgtgcttggtgctaacagtggtttgcacatcatcatctttgatgaaattgatgccatctgcaagcagagagggagcatggctggtagcacgggagttcatgacactgttgtcaaccagttgctgtccaaaattgatggcatggagcagctaaacaacatcctagtcattggaatgaccaatagaccagatctgatagatgaggctcttcttagacctggaagactggaagttaaaatggagataggcttgccagatgagaaaggccgactacagattcttcacatccacacagcaagaatgagagggcatcagttactctctgctgatgtagacattaaagaactggccgtggagaccaagaatttcagtggtgctgaattggagggtctggtgcgagcagcccagtccactgctatgaatagacacataaaggccagtactaaagtggaagtggacatggagaaagcagaaagcctgcaagtgatgagaggagacttccttgcttctttggagaatgatatc

SEQ ID NO: 89332 - DNA, 608 bp, Homo sapiens
cccttccttggagcgcagagctgcagccgccgagccggacgtgtccgcgaagatggcgggccggagcatgcaagcggcaagatgtcctacagatgaattatctttaaccaattgtgcagttgtgaatgaaaaggatttccagtctggccagcatgtgattgtgaggacctctcccaatcacaggtacacatttacactgaagacacatccatcggtggttccagggagcattgcattcagtttacctcagagaaaatgggctgggctttctattgggcaagaaatagaagtctccttatatacatttgacaaagccaaacagtgtattggcacaatgaccatcgagattgatttcctgcagaaaaaaagcattgactccaacccttatgacaccgacaagatggcagctcgccccctgagttctcacgagctgctaactcaggggcgagctgccaagccaggatatagaaacctcaacttgccaatgatagcctgtccttcaaaagcagtcctctgagtcagggaacttcctgttagcacatctattcccatgatctcaccccatcctccaatgtaatacagtatccccatgtataacacgactaccc

SEQ ID NO: 89333 - DNA, 286 bp, Homo sapiens
  misc_feature (22)..(22): n is a, c, g, or t
tgactctagaggaccccgcagnttaagggctacccagaaactacatctgtgaaggctttcaatggtaaacacccccatggaaatctttctcttcctccataaagagaaagggaaacctcatgctgccaaggaaatcctattgtctttgcaattagctgctttctcatctgttactcattctggtaaaaactacttccaacatacatattgacaaacagactatttcacaatactctcagacctggcaaccactaacttcctcgtgccacacccttcctcacttccc

SEQ ID NO: 89334 - DNA, 267 bp, Homo sapiens
ataggggagtagctagagagtagaggtgaagaaagtttttatgttgttttggtttgtttgttttcaaagatgaggcaaatatgtaaatgacaacaggaaggagccagcctgagaaacattttaagagacaaagaataactaacagcgtcaaaatttcttttattatgaaaagaaattaacagctaattaagcatatcctatgtaccaggcaatgatttttttttttttttttttttttagagaaaaaaaattttttttttttcccca

SEQ ID NO: 89335 - DNA, 448 bp, Homo sapiens
agaccacgatcacgcagggctaggtcaaggggcaacaaagaactccacatttcaagagccccccaggggtccaaggggcctctccagctgagaaccgggaggcgaggctggcatcctaggcaccgaacacagcgtagcctgggaaggatgtgttaggtctggactctgaacactgtcacctatgccctggcctggccagaacacagagagccccggtgaggaaggggagcaggctttgtcgccagatggcctgcgtctcccctcccacgtgcaggggctactgcctcaagcacaatgctcggacaggccaggggtgcagcacagatagtctgttctcgttccctgcaataaatatttctgcgctaaatcttaaacacatcgaatgttagaagcagcattcacatctcccccagtgccctcctagcggcccaactgtgccttctacgag

SEQ ID NO: 89336 - DNA, 1035 bp, Homo sapiens
  misc_feature (566)..(566): n is a, c, g, or t
  misc_feature (1001)..(1001): n is a, c, g, or t
gcgggacggaagtgagcgggtcccgccccttccccttctcgtctccgttggagtcgtctctgccgcggcttcctcggctgccagctctccggcgagccggagtcctagtgccgtaccgtcagtccccggccgcgcggagccgggatgcactgttcctgctgtgggtcctcatcatggagaccaaacgggtggagattcccggcagcgtcctggacgatctctgcagccgatttattttgcatattcccagcgaggaaagagacaatgcaatccgagtgtgttttcagattgaacttgcccattggttttacttggatttctacatgcagaacacaccaggattacctcagtgtgggataagagactttgctaaagctgtcttcagtcattgtccgtttttgctgcctcaaggtgaagatgtggaaagagtttggatgaatggaaggaatataaaatgggagtaccaacatatggtgcaattattcttgatgagacacttgaaaatgtactactggttcaggggtacctagcaaaatcaggctggggatttccaaaaggaaaagtanataaagaagaagctcctcatgattgtgctgctagagaggtctttgaagaaactggttttgatatcaaagactatatttgtaaggatgattacatttgaacttcgaatcaatgaccagcttgctcgtttgtacatcattccaggaattccaaaagacacaaaatttaacccaaaaactagaagagaaattcggaacattgagtggttctctattgagaaattgccttgtcatagaaatgatatgacccccaaatccaaacttggtttggcacctaacaaattttttatggccattccctttatcagaccattaagggactggctttctcgaagatttggcgattcctcagacagtgacaatggattttcctcaactggtagcacgccggctaaacccactgtggaaaaattgagtcgaacaaattccgcccagtancagttatttctgacggttctctggtgacagtggg

SEQ ID NO: 89337 - DNA, 874 bp, Homo sapiens
gcgggacggaagtgagcgggtcccgccccttccccttctcgtctccgttggagtcgtctctgccgcggcttcctcggctgccagctctccggcgagccggagtcctagtgccgtaccgtcagtccccggccgcgcggagccgggatgcactgttcctgctgtgggtcctcatcatggagaccaaacgggtggagattcccggcagcgtcctggacgatctctgcaggatatgtgaggattacttcatgaaaacaaggaagtgaattaaggaggatgaaaacaaaaagacaagacacatgacctctgtgggataaaggcacagggaactataggatgcttgtgaaagggcagtgtagagttgacagatgtgtaccaggtgtagaggacagctgatccagactagaacagatcagaagactagaagtcttaaagatgaaactgatgaatctgaattgtggggaaaaaaaatccaaaatgaaactgatggatctgaaaagaaaattcacaatggagatgattatgtcagaatatccaaaaaggagccaggagggcataaggagttggatcctggtcacatacacatctagatggagtttcacctgctgaactgggccaaagtgtaaaactagctgcatttgacttgagttgtatatactgggcctgatcaaccgcctggagagataaccatacccaactatattgatcattgactagagacatcctgagctgacaaccagccatcatttatcatggactgtgctaaaaccttccagatacgtaaatttacagtagcccttaaaagctctgcctaaccttgcctgaatgcaacatgatttagctgcttgctagacttgtgtctcccaaattgcaatct

SEQ ID NO: 89338 - DNA, 381 bp, Homo sapiens
tccctggatctgccaacagcttctgcacaccctgcaccttgctcacactggttcctgtgcttctctggcccacttctttccttgaaatctggtgggctgcacaacctaactgttaagagcactgactctagaagaactagtttgcctatgctcaaatcctgtctcagccacttactagctgtataaacttgggcaggttccttaacctctctctgcctaagtttactcatctgggaaactaatcgcagttctgacctcacggagttactgatatgggctaaattagtttacacagaccactcagaacactgcctggcacaaaggcagggctgaattagtatcattaaggtccccacccctccttggagggtactttttcca

SEQ ID NO: 89339 - DNA, 415 bp, Homo sapiens
tgacaggcatttgggccagataattctctgatgtgaggggctgtcctgtatgttgcaggatgtccagcagcatccctggcttctactcattggatgctagtaacaccaacccaggtgcaaaaattgaaaatgtccccgtgcattagcacatgccccatgcgggagagggcagcaaaatggcctcatcaaagatgattatttattgctctaaaataacgggaatattcagtcagcatcccttcttctcagatgattctgtattgagttttctcaaagcaaagctcacttcctcttgagtcgcaccctgtgattcattgttgattacaagtggcaaagaaactatgcattcatttattcactcacaatacatgtattcagtgcctgctctgtgcctagctgtggtggtgagcaaaat

SEQ ID NO: 89340 - DNA, 439 bp, Homo sapiens
tgcccctctctgcctgctgagtgtttccctggccgacctgaccacctccagctctctggtcccctcagccttcatgctttcccaacagaaagaacactgtatagtaacctggtcccaacatgcaacttgccccattacatcgatgcagcttgaagatagtgctgctgtaacccaggcagatgtcactgcctgtccaccactctcagccctggttcctcccaggcctcaaggctgcacagaaaggcactgtgctggtttccaaaccaccagcctcacgggaaaaggacatgtgcagtcctggcctccctgcagttagcatgaccccggcctggttttggggcatccccagaggccccgcaccgggtcccatggctttgggtcccaccacagctctcagtcccctcacccctgggcctgttcccccaagcccctcccatca

SEQ ID NO: 89341 - DNA, 447 bp, Homo sapiens
ctcgtgcgttttatttctgggtatgcttttagccagagaagaagtagttcagtttatggtctcatttctcatataaattgtgaaaattctccacggcttcacatgctagttcagaagatattgatgccttgagaataaagcatctggttgtaactccagcagttttatatttaaagtatacctaatataattgtcaaccacattactttagaaaacataaacaaaagatagttacacatatttattttaaaaatggtgactgggtgcggtggctcacgcctgtaatcccagcacgttgggaggccgtgactggcagatcacgaggttaggagatcgagaccatcctgactaacaaggcgaaaccctgtctctactaaaaatacaaaaaaattagtcggacgtggtggcacgcatttctaataagttctcaggtgatgctgatgctgg

SEQ ID NO: 89342 - DNA, 372 bp, Homo sapiens
attatttcaggattgtagtttatctaaaacaatatataacaacatttttgagcctgtggagttttttttaatgctttcgtattttgaaatttctataaagaacattttaaaatgttagtacttcttataattatttatataatgtcatcatacatatttggatcatgaatatagggagaatataaacaaaaccgtaatccagtcatccaaagataccatttgtaagtttttaaatcttcatcttatattttatcatgacaaagctaggcttagagcctcttatgaggaacactgcctctttcaaagcccctgccaaagaaatatgtttagcttgccatgtttgttactatttttctaatctctcctctccac

SEQ ID NO: 89343 - DNA, 115 bp, Homo sapiens
catgccactggtatttcaacatgggaaacaactatattctaaggaaaaagaagcaatcatacaataaaaatgctaaatcctttccaagcaataaattacctctttattttccttt

SEQ ID NO: 89344 - DNA, 270 bp, Homo sapiens
aaaaatccataacttagtaggtgttagtgtttctaaaacacttgattgctcttggttccaaataggttttcagtggggaaaaaaatacccatttagagaatatttgatatggcatatatgctctctttctaggggaaaatatccttctgggattcttaggatacctgtttttttttttgactttcagttttataaatagagctgacctaggtttacgggtttctttcatttctaaaattctgctgttttactagaactactattatcttt

SEQ ID NO: 89345 - DNA, 375 bp, Homo sapiens
agcagaaaaaatacccatgtgagttgctagaacacagcaaatgcagtgaagtatggtatataagatgggattttcagagtgtactggacgaagataaaatagggacttggaaataaggtgactgcatttttatcatatgtagaaaggcagtaactgggaaggtttaattatgtgtgtggggaggctgaagttttcttaactgattcacatatttcttatcactaataaaagaaacattctcccatctgctacctcttaggttagatgcctacatttgcctccataaaaatatgaactttgctgggcgcagtggctcacgcctgtgatcccaacattttgggaggccaaggtgggtggattacctgaggtcaggag

SEQ ID NO: 89346 - DNA, 350 bp, Homo sapiens
tgtgggaaggaccaatataagtttatccactaagtataataggtgaatatgactagacctataaattttagaaatagcctctaaatgtttttagttatcaacaaaaaacaatttatctcttttaataattagcttgaatgccacattcagggcttgaaaaaaaattagatagcaattattgtctaagagaaaatgagaaacataaggaaatgcgttagattataggtcaattaagaataccctggctggttgtggtgcttcacgcctgtaaccctagcactttggaaggctgaggcagatggattactggagtccaagagtttgagaccagcatgggcgacatggtgaaa

SEQ ID NO: 89347 - DNA, 395 bp, Homo sapiens
tgatctagaggatcgccgttactggcatttgggccacccagctctctatagaatttaaagattcctttttcccccctccctgaatcccagccttatttcttccaatccacaacacacatcctcaactacattcagttcaggttcaggcttcctgctgtgcctcaaatgcgtgaggtgcaatcttcccctcccctcttttccgaggagggatctcccctctctaagttttactagttccgtcaagaccaagcttcagttccacctcttttataaagcggctgcttgactttggcagccaaatttctagtatagtatttttaaaatctgcgccacacaatttcacccaatttatattgtgtggcttatggtttcatgtaattcgtctcatcgagtgt

SEQ ID NO: 89348 - DNA, 142 bp, Homo sapiens
gatctgtacatacagtgttaagaatgtagatattaaaattgttatatttagctgttacataatattaagactcagagttaagtaatttcactgaaattgattgctttttgtgtcttggagtcaaaataaataactgaaatct

SEQ ID NO: 89349 - DNA, 368 bp, Homo sapiens
ttctgggattacaggcatgagccaccacacccagctgacacctttcatttgttaagtctctgttatgtgccagatactatgctaataagctagcgtggattatgtcatttaatatgtatagctatttgatgaggtatttttctccctatttttgagaaaagcttggagaagtagttttccttgaaatcagacagccagtaagctgcagaaccaaaattcaaactcaggtctctgattccaaggcctgtagtgtatatatcaatttattgttatgttaagccttacatatactcttccataacatataataccatacctctatgcagtttattttatattgcatatttcagcatgtaactcgacctttt

SEQ ID NO: 89350 - DNA, 391 bp, Homo sapiens
cccaaggtcacaggtgggcagtgcccaaggtcacaggggggctatggtttccccactcagtccccaggcaggccccacctgggcactcccaccaggtcccagcagctgcggggggcccagggcggtgtccttgggcccagaggcccaggctgtaaagaaaccgcctgtctgcagggccccctgggagaacctttgccccccaggccccctccagtctcccaggaggctccaaagtccatgaggccccacctggggatgaggccacggcaggggtgggaggggtgcaggagctgggaggcacctggtcagctgcagcccttcagacgctctctttggccacagaattcagggaaatccaagaaagaatccaagtgtctagcgtttggggact

SEQ ID NO: 89351 - DNA, 420 bp, Homo sapiens
ggaaggagagaaaatggagtagagagactggaaagaaaggcaaggaccaaatcatggcaggggaggagggggttatgctcctttcaaggtgtttagatttgatcttagaaaaggggaaccactggtaaatcaatagcatgtaacatgatcagaactgtgtattagaataagtctgtggagaaataactagacaggagaaagttcagtggtaaagataaaaacttactggaaaggctcagttgggactcgcctgaactacgtcagtggcagtagaataaaggggaaaaatgcagtgtgtgtcaacagctctatgagaattttgaaggagaagttatcaagcttggatccagtttgagtgaagaggaggatagtagtgccattatttctagaaaaaatgcaggagcaaccaatctaagaaag

SEQ ID NO: 89352 - DNA, 422 bp, Homo sapiens
gaaacacaggggaaggaaatttttagaggaaatgtggaggcttggaatgctccacatttatacaatgtttacacactcaacattgtataaaaccagtatgaaagacaggattagtctgaatttcatgaaacattctcttgggcccctcctgcccacaacttcttttaaaaggaaaaatgaagtgcccaatcctcacatttcttcccatgcaagtgaacccctgaagaatggatgctgaggttggggctgctctctgatcagcaaattctgagatactagaaaaaaagaaggaggaagaggaagagaagcatgaggaagaaaaagaaggataagaggaagaaaaagagggagaaggaagaagaaaggaggaggaggaagaaggaaaaggagaagaggaaggaggaggagaaagaggaggagga

SEQ ID NO: 89353 - DNA, 309 bp, Homo sapiens
gcatcttaccttttaagccatgacatttttgaaattatacattctaagtaggctggataacattttaaacaaaacacaattgaaaattcagttcatcggagtcactgcacatactcaattgctgatttttatattgcagtatttttggctctaaaatcatgatgaaataacaccaaaagcaaatgggccatattatgcacaaattgtttgctaaatctaaattgctaaattgaggcttttttccagctgtgtcagaacaaaaatatattcagctacaaatatataaaatcgagatattttgaaggcaag

SEQ ID NO: 89354 - DNA, 635 bp, Homo sapiens
gttagataagaaaagtttaccaagtatggtattttttcatctatatctaatgcccttctaagtcaagtcttactcatttagaaaaagcaaaaatgaacaacgaaggattaataggttggagtagatttggattagaaaaaggagtaagttggaggtaatacggtgaaggagtaggaagaaaaatatttttgagttggttattctagaaatctgtttctgaataagccattaatcttacatattttaaatgaaaaataagatggagataaaaatttattatagcaacaggcataaactaaatcacagaggtaaatactttgttaaagattattggtgggtaaaaggcatctatgtaggttgctaactgtttttaaaaaaaacccactattttctgaatgaaacttattttcaaataagttattaggcaaatgtgagatgccaaatataaacatgtatttatttgtttattttaactttttattttttgagacagggtcatgtcattccctgtcacccaggctgcagtgagcagtgatcatgccactgcactcatcgtaggcaacagagtgagaccctgtctcaaaaacaaaacaaaacaaaacaaaaaacaagagtgtaagatacataaaaaaaaa

SEQ ID NO: 89355 - DNA, 741 bp, Homo sapiens
gattttaaaaatattgtcaacatttgtaagatctggataacttggtgaactagtattttccaaataaccaattaattatgttagaaaataatgcacaaattaaaagatccattcaaaatttaaaatacaggctgggcacagtggctcacacctgtaatcccagcactttgggaggcagaggcaggaggatggcttcagttcaggagttcaagactagtctggataacatagcgagaccttgtctctacaaaaaattaaaaatcagctgggcatggtggtgcacatctgtggtcgcagctattcaggaggctgggaggtagaagggttgcttgaacctgggagttcgaggctgcagtgagcagtgatcatgccactgcactcatcgtaggcaacagagtgagaccctgtctcaaaaacaaaacaaaacaaaacaaaaaacaagagtgtaagatacataaaaaaaaaaaaaaattaacacaacagagtataaaaagtctattagtatggtttcaggttctgcgttaaaactaaccttgaagaaactaccactttctgagttttaatgtagtatcaaagaataatatccatgaaaggactatttacatatttttcccttttcaactatacatgcgtataagcctggattttcttcatatactttaaccaaaacaacatattgcaagagactgaatggagaagcaaatgtgagaatccagctgtcttctgttgagctagacatta

SEQ ID NO: 89356 - DNA, 445 bp, Homo sapiens
ggggtcttaccatgttgtccaagctggtcctgaactaccagactcaatgttcctccagcctcagcctcccaaaagtgctgggttcacaggtgtgagccactgtgtccggcctccagactttcatactctgaccaacaacaaacccagaacccagaatagcacaccaatcagtgtgacaacttccctgtgagaataaagcaacacaatgagttatgagctcattacccctacacaaccatgtaggtgttggaaaaaagctgcaggtctgattcatgtactgaatcacaagaaaggagaaaggaaatttacatacttcacagagaaccaacccagaactgtcaagacctggtgtttctccatagggctgtgccacaactcccagggttaagctgcagctgctctggattcccttccttcttgggtcaccatgagggccatcttctct

SEQ ID NO: 89357 - DNA, 402 bp, Homo sapiens
tttcagtaaccgtatcaaaaagtcatactcaaattctatactaaaatatcttctcaagatttacatacacattcatcagtccctcaaattcatctacaagtttttttaatccctggggtttagaagtggttagagtgtaccccatttttggagctgggtgctttgcccttgttggttctcctcacctttttgataatagtgttagcagcccattcattaacatctgttgaaccacctgaattagactttgtctctttttctgctgctaatatcatatttttaaaaagctcattagttattcctctaatttctcaattttattttttaaatattttattggagttttaattttgcagtggtatttcaatttacaaaataaatattttatttaaatgttcttta

SEQ ID NO: 89358 - DNA, 452 bp, Homo sapiens
ccttctttatccgtcacatggcctgccctctatctcttaaatcttaggtctgttgtgagactggggaaggagtgatgtgaacatgtgctcctgggcctggaaatgcccctctgccccgactccttctgtctcagcagtgcttgtcattaattctcccaacaaatacctgagcccttctctgtgcaggatgggtctcagtgctttgaatgtgctgtctcgtttaattctctcaaaagccctttattgacaatgctcttataatattttatacagaaagaatggaaagctaatccaatctttttctaatgtggttaatcaaatttatttatttttaattaatggtggcttagaaagctttctttcagcattactatcctttatgagattgtcataaatgtttactatttttcattgttcatggcaaggcggcaatagatcttattcagaattga

SEQ ID NO: 89359 - DNA, 391 bp, Homo sapiens
tgattatggtggctgaggagtcccatgatacgatcgtctgcaagtctgagaaccagggaaggcagtagcataagtcccgaagtctgaaagcctgagagccgggagcaccgatgtcaggggaaggagatgatgaacgtcccagcttaagaagcaagggcaaatttgcacttccactgcctttttattctatccaagcccttggcttattggctggtgcctgcccacattggtgagtgcagatcttcctgtcctctgattcaaattcagtccactgattcaaatgccagtctctttgggaaacaccttcccataaacaaggttttactgttttaaaggatctgatgcatagaccctttttctgggtatcttttttaagctagtcaagttgaca

SEQ ID NO: 89360 - DNA, 407 bp, Homo sapiens
attacccaggagacttccaccccttcttctgtgcttgagctgtcttatctgtattttacagcctgaactttcaggttacttgttgttagaagagaagtgattttttttaactgtgtgtggttagaaagggagctatttttgagctgctttttgttaaaaggaaagttttctgctggggactcactttaccctaaatgtctacctaaataatttctttttgcctcctataacactggtagtgtcttccagcatgctaccctccagttagctccttgggggccaacaccttcatgctgggtaggtacagtgattctatgtgcaccacaaactacctggcctagcctctgcccccaagaccttgtctcagtagacttttggccagagaagtatcccctggttcttagctg

SEQ ID NO: 89361 - DNA, 1000 bp, Homo sapiens
  misc_feature (59)..(59): n is a, c, g, or t
tgtctagaggatcctgtcgacggtaccaacaccatacaccacatacatgggaagacttngtcttttgtctgtgtccttaaacagagttcacaaggatctctgtgcccttggcagaagatagactctaaattggcaccaagggaagatacaatacaaggtttcaacattcctggctacagccctctttgcttagaaatgagatgcctgtttcctcctctgcgcttctgttggagctgtgttctcttgagtggggcctgtgtgacaatccgtcagaggcaggaaggcttacacaggagtgcagctacaggaagtgagcaaagcaagcaacattgcaaacaactgaaattgggtcctgctcagagaacttcccaacctctgggaacactgctgacctcttcatcaacccttgcatggctgagaacagtaagatctcccccgatgtggaggcagtgggtctaggttgagcaatgacagaagagaacagcttgaacgaatcaacatatctgtgcagctcttcgcagcagacagttgtggtggacataaagcggctactttttttttcttcttcttcctgagaataattttagggcccaaagacctcccgaagattctgatgacatacacatttaggttccactccagctggagaaatcagctcatccagatggaccgctgatccaactttggagatgttccagaaacataaacttttatctccagagaaacaatagggtctgctctccccccagatggttttcatagttagcttattgtcttccccagaggtgaaaagtcaccattcacaatttatttactttaattcaaaaggcacaaccttcatttattcttttactgagggatagttacggatcacatctttggggatagcctctgtgctaggctccatggtcatggttagacatactcctgccttcccaagctcaggctccaatttgaaaggaaagaaaagcacctctatctgttggtaccgtcgaatgcg

SEQ ID NO: 89362 - DNA, 1019 bp, Homo sapiens
  misc_feature (78)..(78): n is a, c, g, or t
tgtctagaggatcctgtcgacggtacaacaccagcaccgtacacccaacaccatacaccacatacatgggaagacttngtcttttgtctgtgtccttaaacagagttcacaaggatctctgtgcccttggcagaagatagactctaaattggcaccaagggaagatacaatacaaggtttcaacattcctggctacagccctctttgcttagaaatgagatgcctgtttcctcctctgcgcttctgttggagctgtgttctcttgagtggggcctgtgtgacaatccgtcagaggcaggaaggcttacacaggagtgcagctacaggaagtgagcaaagcaagcaacattgcaaacaactgaaattgggtcctgctcagagaacttcccaacctctgggaacactgctgacctcttcatcaacccttgcatggctgagaacagtaagatctcccccgatgtggaggcagtgggtctaggttgagcaatgacagaagagaacagcttgaacgaatcaacatatctgtgcagctcttcgcagcagacagttgtggtggacataaagcggctactttttttttcttcttcttcctgagaataattttagggcccaaagacctcccgaagattctgatgacatacacatttaggttccactccagctggagaaatcagctcatccagatggaccgctgatccaactttggagatgttccagaaacataaacttttatctccagagaaacaatagggtctgctctccccccagatggttttcatagttagcttattgtcttccccagaggtgaaaagtcaccattcacaatttatttactttaattcaaaaggcacaaccttcatttattcttttactgagggatagttacggatcacatctttggggatagcctctgtgctaggctccatggtcatggttagacatactcctgccttcccaagctcaggctccaatttgaaaggaaagaaaagcacctctatctgttggtaccgtcgaatgcg

SEQ ID NO: 89363 - DNA, 416 bp, Homo sapiens
gagcaaaaagtactttcagcagataacatgctgtaagtttctgtttacatttctatcactaagaatggacacttcttaaatctgccgtgttcatagttgtaaattttctaaagcatgggatggacttggctccttgttattgtatttttgaatattcctgtgcatgaaattcaatctcctcttttcatagcaggaaatactggttttaaactatttcctacttaaatcaaaagattatatttcaaatatgatgaacacatgtcttgtgaatgaattgatataccatcttgcatctattttacacccattttctggataacagatgagtcacagtggctcataacagggcctcttagtaagccgagatcgcgccactgcactccagtctgggcaacagagcgagactccatctcaga

SEQ ID NO: 89364 - DNA, 188 bp, Homo sapiens
gatctaatgcaggatgtcagacttgtttctatccaggaataaaaccagttatgccagaagtaactattattcacctttctcctactgaattaaaatactatcagttgtatattaaatgctcacatctatttctgttctccatattctagcaatccttgacacttttcaatagcttttattacttggaa

SEQ ID NO: 89365 - DNA, 816 bp, Homo sapiens
cagaagtagttattaaaatatataggacctcacataggtagatacagaacttaccattgaggctgatgggctgttgtgtgaatcacacaggaccttaaatgaggctcattattctcacacaccaaaatgactctgacagcctgaagcagttattgctagagcccaagctttccttggaggttttggagttaggttgattggaagtaaccagctaataccttttctagtggagaaaaagacattgctaccagcttgttcatcccatagaagtcttccactctgctccatttttagcagcaagcatttcatgtagcataaaccttggcagataagtgtgcctaaggtttatacagtctgtccgcttggatgtatacaaatttagatacatattttaacatgtgttctcatagatgactttataacaacacacattacctataggtgtctagactgtgtacatacaagtgtgtacagacaagcttcatacgtatatactgtaatccgttacaacaaataaattttaaatcatcgtttaacatgtatgtggtacttctacagtgtacattgttttcattatttattgtaacattgaaaaccacagtgcagggaaaacaaaagtatcccagcatcttcatcctgtacacttggaattaatttcatttgggcatatccaagataaactcaactttcaagaaatcttgtatattatttaatcatctgtgttaggatgacacctatgattgatgacttcggttgaatagctttattctggatttttcataactaaagctaaatccaaagacctgaaaaaggaca

SEQ ID NO: 89366 - DNA, 1036 bp, Homo sapiens
cagaagtagttattaaaatatataggacctcacataggtagatacagaacttaccattgaggctgatgggctgttgtgtgaatcacacaggaccttaaatgaggctcattattctcacacaccaaaatgactctgacagcctgaagcagttattgctagagcccaagctttccttggaggttttggagttaggttgattggaagtaaccagctaataccttttctagtggagaaaaagacattgctaccagcttgttcatcccatagaagtcttccactctgctccatttttagcagcaagcatttcatgtagcataaaccttggcagataagtgtgcctaaggtttatacagtctgtccgcttggatgtatacaaatttagatacatattttaacatgtgttctcatagatgactttataacaacacacattacctataggtgtctagactgtgtacatacaagtgtgtacagacaagcttcatacgtatatactgtaatccgttacaacaaataaattttaaatcatcgtttaacatgtatgtggtacttctacagtgtacattgttttcattatttattgtaacattgaaaaccacagtgcagggaaaacaaaagtatcccagcatcttcatcctgtacacttggaattaatttcatttgggcatatccaagataaactcaactttcaagaaatcttgtatattatttaatcatctgtgttaggatgacacctatgattgatgacttcggttgaatagctttattctggatttttcataactaaagctaaatccaaagacctgaaaaaggacaaaaagaaaaaaaaaaaaagaaaaaacaaagaaaaagaagaaaaaataataaagtcaagcgcaaactgatggggagacagtgggctctggtttccaggattgagacaatggtactgcggtcttggggagactgcgttagctagtggggagtggtgatttttttcatgcttgtcacatctaaatggtctttaacatgagaaagttttagaggttataatttc

SEQ ID NO: 89367 - DNA, 2061 bp, Homo sapiens
agaaattcatagatactcaaacctcacagagtcgttcctccaaagatgccgtgggtcagatatctgttcatgtggacatcactgccaccccaggaacgggagatcataaagtcactgtaaaagtgattgctattaatgacctaaactggcagaccacagcaatgttccgcccctttgtggaagtttgtatactgggacccaaccttggagacaagaagagaaaacaaggcacaaaaacaaaaagcaacacatggtcaccaaagtacaatgaaacatttcagttcattctcggaaaggaaaatcggccaggggcttatgaacttcatctctcagttaaggattactgctttgccagagaagatcgaattatcggaatgacagtcattcagctacagaacatagcagaaaagggaagctatggggcatggtatcctcttctgaaaaatatctctatggatgaaactggtttgactatccttagaatactctctcagaggaccagtgatgatgtggctaaagaatttgtaagacttaaatctgaaacaagatctactgaagagagtgcttgaaacaaacactgcaagctaaatacataactataattgtttgactactgcatgcatgtgcaaatacatgggaatgtttagttcactacatttcaatgtttgccagtactcatgtacgatgtctacaaggtatgtaaaaaacctgctgaacttttataccaattctggtctttgggaaatcagtgttccatgaagtgccaaaattatgatgtaaagtgaaatatcaagaacaccttttaacatgtttattttgtttctttacccatttcacattcattaaacataatttttaaaaactagtcttttgagtttgcccatcagttgtctttgttaaatgagattatattgcccatagatcagaaaacatttattactcaatttccattttatttacttacctcattatagatgtcttacaaatacccttttctaccataactagaaatgcagtcacttctagaaagcatttgtaattttatagtcgcagatattgtgatttttgcatacacattaaaatagaaaaggtgggaaatattttctgctgaccagtttccaacctttctgaaatatcactgtgaagaaatgctgttaaagcaaacttacataaagcaatgctagagtttgttaacaatgtttgatatatattgacaaaactttgttctctaaaactgccaagatcacatcacatttgtaaaaatggtaagttaatgcatttgtcatatagtgttatgtcttggctttaccatatttcattctttaaaaagtcattaatggtttagaaatgggatggaaagtttactgaaaatacctgtaagtaactatattgttaatatcttccctctgacagttatgactctataatcagttcaatgctttatttttaaaaatattcaatgattagtattgaatgcagcattactatatattgtactgatgccaaaagtcatgttttcatccacttagtgaaaaaatagtaaaattaagtcggaagaaattgcttaaaattttgtaatttgtatttataagccccaaatgcatcaaatgcagtaggagaacaatgtaatacagcttggtaccttaaaaatatagctaagttggtttttgaatataaaacagtttatgaatatgtgcattttctggtatggttatgatttgactttttagagtctatgccaaaatatatggctgtaaaacagtactttgtaattataacttatggtcataactgttagtggactacttacagaagcagaaacaagagcctgttatgattgtgctttgtgaacaagctgatctaatacgttaagtaaagtacagaagtgcttagtatcatgactgtcagaaccattctgcaactgagtatgaaatcacagaccagtgaggtgagctaattcatgttaaactgttaggccactgctttgttaatgactcctctaaatgcatagtgtgatgcgatcctctggcatatgctttaataaatggatgtatattgagc

SEQ ID NO: 89368 - DNA, 2228 bp, Homo sapiens
gtaagcagagatggacagtatattcaagaaatctgattaagataacacctaaagaagagaaggtccatccataggttggctgagttcttatttctgaaataatctctggaggaacttttaagaatcctgaaagattcaactattttaaactcttctggaaaagtatatgcatatactcctttgaaacccctatgattgtcgttcctccaaagatgccgtgggtcagatatctgttcatgtggacatcactgccaccccaggaacgggagatcataaagtcactgtaaaagtgattgctattaatgacctaaactggcagaccacagcaatgttccgcccctttgtggaagtttgtatactgggacccaaccttggagacaagaagagaaaacaaggcacaaaaacaaaaagcaacacatggtcaccaaagtacaatgaaacatttcagttcattctcggaaaggaaaatcggccaggggcttatgaacttcatctctcagttaaggattactgctttgccagagaagatcgaattatcggaatgacagtcattcagctacagaacatagcagaaaagggaagctatggggcatggtatcctcttctgaaaaatatctctatggatgaaactggtttgactatccttagaatactctctcagaggaccagtgatgatgtggctaaagaatttgtaagacttaaatctgaaacaagatctactgaagagagtgcttgaaacaaacactgcaagctaaatacataactataattgtttgactactgcatgcatgtgcaaatacatgggaatgtttagttcactacatttcaatgtttgccagtactcatgtacgatgtctacaaggtatgtaaaaaacctgctgaacttttataccaattctggtctttgggaaatcagtgttccatgaagtgccaaaattatgatgtaaagtgaaatatcaagaacaccttttaacatgtttattttgtttctttacccatttcacattcattaaacataatttttaaaaactagtcttttgagtttgcccatcagttgtctttgttaaatgagattatattgcccatagatcagaaaacatttattactcaatttccattttatttacttacctcattatagatgtcttacaaatacccttttctaccataactagaaatgcagtcacttctagaaagcatttgtaattttatagtcgcagatattgtgatttttgcatacacattaaaatagaaaaggtgggaaatattttctgctgaccagtttccaacctttctgaaatatcactgtgaagaaatgctgttaaagcaaacttacataaagcaatgctagagtttgttaacaatgtttgatatatattgacaaaactttgttctctaaaactgccaagatcacatcacatttgtaaaaatggtaagttaatgcatttgtcatatagtgttatgtcttggctttaccatatttcattctttaaaaagtcattaatggtttagaaatgggatggaaagtttactgaaaatacctgtaagtaactatattgttaatatcttccctctgacagttatgactctataatcagttcaatgctttatttttaaaaatattcaatgattagtattgaatgcagcattactatatattgtactgatgccaaaagtcatgttttcatccacttagtgaaaaaatagtaaaattaagtcggaagaaattgcttaaaattttgtaatttgtatttataagccccaaatgcatcaaatgcagtaggagaacaatgtaatacagcttggtaccttaaaaatatagctaagttggtttttgaatataaaacagtttatgaatatgtgcattttctggtatggttatgatttgactttttagagtctatgccaaaatatatggctgtaaaacagtactttgtaattataacttatggtcataactgttagtggactacttacagaagcagaaacaagagcctgttatgattgtgctttgtgaacaagctgatctaatacgttaagtaaagtacagaagtgcttagtatcatgactgtcagaaccattctgcaactgagtatgaaatcacagaccagtgaggtgagctaattcatgttaaactgttaggccactgctttgttaatgactcctctaaatgcatagtgtgatgcgatcctctggcatatgctttaataaatggatgtatattgagc

SEQ ID NO: 89369 - DNA, 1745 bp, Homo sapiens
aacacacgtgcgtgcacacacacacacacacatttattataaggaattggcatatgtgattatggcaactgggaagtccaagaatctgcaatgtggtctggcaggctcaagacccaagagagctgatggtgcagttccagtctcacagaagtctgctggagaatttcctctggcttggagaaggtggtcttttcattctactcaggtcttctattgattggataaagtgcacatacatcatggagggcaatcttctttactcagaggacatcagtgtcaatgttattcccatccagaaacaccttccaagttgacacataaaattaacaatacacttttcctcatctcacccaaatttaggttaagagttctggatacctgaattaatattgccattggaatgccacttttacttttggagaaaaattagaaataacattttataaaattaaaaaactgtaggctaggcacactggtttacacctataatcccagcacttttggaggccaaggcaggaggatcccttgagcccaggagttcaagtctagcctgggcaacataaggagatcctgtctctacaaaaaaaaaaaaacaaaaaaactgtagctaggcatggtggcatgtgcttgtagtctcagatactcagaaggctgaggtaggaggatcccttgagcccaggagttcaaggctgcagtgagctgtgattataccatggcactccagcatgggtgacagagcaagactttatctcaaaaagaaaaaaaaatactgtgtttctggtttgcaattatactgagtattccagatatgaagtgaccagctcatagcacttgcaacaagattattctcttctgtagtctggttgctatatttctaataatgtgactcaagatttcattcattttacctctggacttatcactctttgaactttacggtttatcactaggtctttttctctaaatgagctattgttaggccagttttcttcttcctcttgcaatcctgtttttcagtggttgatggcatttaacctaacgtggattttcacataacaattgctattttaaaatgttattagttacttaacccatatgatttatcttagaaccacagaacctcagagctaaaatgaacattttataataacaaaccgggtccaaaataaatgacttacatagatttataaggtaattaatgacagagctgagtcaaggattcatgtttcttgatgcctagtttagtagtctttgatgcaacagacatcaagtacatattatatctagaagtaatgtattaaagataatcttttggcttaaatcattttagaatgtgtaacatccttgtaatacaagtcattacccatttcaactagagaagaagatatatagaaatatcaaatgttaacaaggtaataggccattgcttttgtgtaattcaaaatttgataatgattttgttctttgccctagttattgataaaattcttaaagtgaacattgccctactgcctatttctaggtgctgttccctttaataagtatattttgaacatcatttgtttaaccctgttttaaccaattagaaatctatctacttgaattatgttcattctcttccctatgtattctttttgagtaacaaaatgagattattttaatatgactagaaaggaaatatatcttaatatgagagtgtacaaacttttgttgtcttaaataaagattgacatgtcaaatctgaa

SEQ ID NO: 89370 - DNA, 215 bp, Homo sapiens
ggctttgttgttccattcatagagcacaggcagagcatatttagtataattcttaagggctctaggattttcaaaatggtaaataaccatcggcttcaacttaaagtcaccagctgtattagcccctaacaagagagctgacttgtcctttgaagctttgaagccaggcattgatttctctccagttacgtttatttatttatttatttttcttt

SEQ ID NO: 89371 - DNA, 401 bp, Homo sapiens
ctctctgccatgctaaccaacgtagaagagaataagataaagcaatgaaaagcagagtggcactctgatatataagattctctaagaaatatagagtgaattttgcccaaaggccctcactgaactaattcctgaaccaaaagagtatttcttaatccaaaactttacagtattagacctacgaattctgatgatgcctgatcagatgctagttgttctcgacaatccatgcagttttccagtatgaaggaaagtaacaaatataccatggttattcttatttctttctgaaaaatatctaggatattttatagtgtcatgtggtaaaatattcatttgacaatcacaatgaagtataatcagaagtattagcaattttactttgtttatcctgttaatcc

SEQ ID NO: 89372 - DNA, 371 bp, Homo sapiens
ttctctttctccaccacagaaggggtgtctgagcaggatggaggcagcacgctgcagcgggccgctgtctccagagaagacagcgggacctatgtctgctgggcggagaacagagtgggccgcacgcaggcggtcagcttcgtccacgtgaaggaggctcctgtcctacaaggggaggctttctcctacctggtggaacctgtaggaggcagcattcagctagactgtgtggtgcgtggagacccagtgccggacatccactggatcaaagatggccttccactgcggggcagccacctccggcaccagctgcagaatggctcgctgaccatccgcaggactgaggcaaggcggggcctggcaccttgggt

SEQ ID NO: 89373 - DNA, 365 bp, Homo sapiens
gagaattggttggtttgcgtatgaaaggtgtgctccgggggaggttggtggggatagtgcgctctctagccagccctggaaggagtggtctctccaggattagcaaggccccaagatgtcaaagcatcataaaactcagaaaataaaaaacatgacttttttttagagcccaattctcactctgttcctcaggcaagagtgaagtggtgcagtgatagctcactgcagcctcgaacttctgggctcaagcgatcctcccacctcagcctcctatgtagctaggactacaggcaagcaccactatacccagctaattactttttaaaattttttgtagagacagggtctcgttatgttacccagac

SEQ ID NO: 89374 - DNA, 823 bp, Homo sapiens
gggctaagtactttgcctggattatttaatttaatcttcgcaatagccttagaaggtaagtgctgtttttattcccagttttctaggaaatggagccacagagagctgaaatgccttgcacaaggtcacatagctccaaggtgtgatgccaggaatcagacccagattgtgtgtctctgtgctctactggggactgatgtgctgggatgagtttaataggcagcatgacttcctattactgggacagaggattcctgacactcttcaagtcaaagctgagatgtgcccctcttttcagaatagttaaggatggcctaggaaatgagtacccagatgcttcttgggcaaaaatttgcttgccagtcctgtttgagtttgggaatcattgctgccactgggtccaggctgggtgggctggggaaccccactgagagtgaccacccctggcttcccctcaggtgtcttctgctgtgggccatcaccactgaccgccatccgcaaaggtgacatctttattgtctatgacaccagattcgtcttctcagaagtgaatggtgacaggctcatctggttggtgaagatggtgaatgggcaggaggagttacacgtaatttcaatggagaccacaagcatcgggaaaaacatcagcaccaaggcagtgggccaagacaggcggagagatatcacctatgagtacaagtatccagaaggtgctagcatcacagggctccttctgactcagcccctgagtcacccagaacatgaaaatagtcaagattgggggtggacctgggcaacatggtgaaaccccatccctaccaaa

SEQ ID NO: 89375 - DNA, 686 bp, Homo sapiens
gaccgactgtgtggaagcaccaggcatcagagatagagtcttccctggcattgcaggagagaatctgaagggatgatggatgcatcaaaaggtgagtgggtgaaatctccatggagccccacatgccccttcagccagctggccctaaactgctctcttgcctctgccgggtgcctggggccattgccctctcaccctgacttgtggccctggtgctgcttgctttctgtctcatccctttttagaaaacccacaaacttttcatttaggcataatttcagatttacaaaaagattgcaagaataaaaagaagaatttccatatatcctttatccagattccctaaattattactgcatttgctttatccttctcgatcagtggacagatagatgatatagacagatagatagacaaatatatattttttgaactcttgagagtaagttgcagatattacattattaaatatttggtgtgtatttcctaaagacaaggacattctcttacgtaaccaatacaattatgaagaccaggacatgaacaccatttcaatactgttatccaacccacagattttatgcagattcatcaactgtcccaataatgtcatttatagcagaagaaatcctgggttaggcttgattccgttgttgtgcctcttcggtcccctttgtctggaatag

SEQ ID NO: 89376 - DNA, 582 bp, Homo sapiens
  misc_feature (514)..(514): n is a, c, g, or t
  misc_feature (540)..(540): n is a, c, g, or t
  misc_feature (563)..(563): n is a, c, g, or t
gaccgactgtgtggaagcaccaggcatcagagatagagtcttccctggcattgcaggagagaatctgaagggatgatggatgcatcaaaagagctgcaagttctccacattgacttcttgaatcaggacaacgccgtttctcaccacacatgggagttccaaacgagcagtcctgtgttccggcgaggacaggtgtttcacctgcggctggtgctgaaccagcccctacaatcctaccaccaactgaaactggaattcagcacagggccgaatcctagcatcgccaaacacaccctggtggtgctcgacccgaggacgccctcagaccactacaactggcaggcaacccttcaaaatgagtctggcaaagaggtcacagtggctgtcaccagttcccccaatgccatcctgggcaagtaccaactaaacgtgaaaactggaaaccacatccttaagtctgaagaaaacatcctataccttctcttcaacccatggtgtaaagggggccattggnttttaatgccttattgaggccgggcnaaaaagggttcaatccttaaatncaacggggtttccatttcg

SEQ ID NO: 89377 - DNA, 227 bp, Homo sapiens
gaccgactgtgtggaagcaccaggcatcagagatagagtcttccctggcattgcaggagagaatctgaagggatgatggatgcatcaaaaggaggtcaggacatccaaatagggacctggaagatggtgatatgtgtgggataaaggagtatcactggtgcagtcgctagaaggctctctggcaacatttgctgaaattaaagatgcccatatcctgtgacacagca

SEQ ID NO: 89378 - DNA, 3127 bp, Homo sapiens
gaccgactgtgtggaagcaccaggcatcagagatagagtcttccctggcattgcaggagagaatctgaagggatgatggatgcatcaaaagagttgaggtctcactttgttgcccaggctgcgtgttgtggctattcacagctgcaatcatagctcactgcagcctcaaactcctgggctcaagtgattctcccacctcagtctcccgagtaaccgggattacagctgcaagttctccacattgacttcttgaatcaggacaacgccgtttctcaccacacatgggagttccaaacgagcagtcctgtgttccggcgaggacaggtgtttcacctgcggctggtgctgaaccagcccctacaatcctaccaccaactgaaactggaattcagcacagggccgaatcctagcatcgccaaacacaccctggtggtgctcgacccgaggacgccctcagaccactacaactggcaggcaacccttcaaaatgagtctggcaaagaggtcacagtggctgtcaccagttcccccaatgccatcctgggcaagtaccaactaaacgtgaaaactggaaaccacatccttaagtctgaagaaaacatcctataccttctcttcaacccatggtgtaaagaggacatggttttcatgcctgatgaggacgagcgcaaagagtacatcctcaatgacacgggctgccattacgtgggggctgccagaagtatcaaatgcaaaccctggaactttggtcagtttgagaaaaatgtcctggactgctgcatttccctgctgactgagagctccctcaagcccacagataggagggaccccgtgctggtgtgcagggccatgtgtgctatgatgagctttgagaaaggccagggcgtgctcattgggaattggactggggactacgaaggtggcacagccccatacaagtggacaggcagtgccccgatcctgcagcagtactacaacacgaagcaggctgtgtgctttggccagtgctgggtgtttgctgggatcctgactacagtgctgagagcgttgggcatcccagcacgcagtgtgacaggcttcgattcagctcacgacacagaaaggaacctcacggtggacacctatgtgaatgagaatggcgagaaaatcaccagtatgacccacgactctgtctggaatttccatgtgtggacggatgcctggatgaagcgaccggatctgcccaagggctacgacggctggcaggctgtggacgcaacgccgcaggagcgaagccagggtgtcttctgctgtgggccatcaccactgaccgccatccgcaaaggtgacatctttattgtctatgacaccagattcgtcttctcagaagtgaatggtgacaggctcatctggttggtgaagatggtgaatgggcaggaggagttacacgtaatttcaatggagaccacaagcatcgggaaaaacatcagcaccaaggcagtgggccaagacaggcggagagatatcacctatgagtacaagtatccagaaggctcctctgaggagaggcaggtcatggatcatgccttcctccttctcagttctgagagggagcacagacgacctgtaaaagagaactttcttcacatgtcggtacaatcagatgatgtgctgctgggaaactctgttaatttcaccgtgattcttaaaaggaagaccgctgccctacagaatgtcaacatcttgggctcctttgaactacagttgtacactggcaagaagatggcaaaactgtgtgacctcaataagacctcgcagatccaaggtcaagtatcagaagtgactctgaccttggactccaagacctacatcaacagcctggctatattagatgatgagccagttatcagaggtttcatcattgcggaaattgtggagtctaaggaaatcatggcctctgaagtattcacgtctttccagtaccctgagttctctatagagttgcctaacacaggcagaattggccagctacttgtctgcaattgtatcttcaagaataccctggccatccctttgactgacgtcaagttctctttggaaagcctgggcatctcctcactacagacctctgaccatgggacggtgcagcctggtgagaccatccaatcccaaataaaatgcaccccaataaaaactggacccaagaaatttatcgtcaagttaagttccaaacaagtgaaagagattaatgctcagaagattgttctcatcaccaagtagccttgtctgatgctgtggagccttagttgagatttcagcatttcctaccttgtgcttagctttcagattatggatgattaaatttgatgacttatatgagggcagattcaagagccagcaggtcaaaaaggccaacacaaccataagcagccagacccacaaggccaggtcctgtgctatcacagggtcacctcttttacagttagaaacaccagccgaggccacagaatcccatccctttcctgagtcatggcctcaaaaatcagggccaccattgtctcaattcaaatccatagatttcgaagccacagagtctctccctggagcagcagactatgggcagcccagtgctgccacctgctgacgacccttgagaagctgccatatcttcaggccatgggttcaccagccctgaaggcacctgtcaactggagtgctctctcagcactgggatgggcctgatagaagtgcattctcctcctattgcctccattctcctctctctatccctgaaatccaggaagtccctctcctggtgctccaagcagtttgaagcccaatctgcaaggacatttctcaagggccatgtggttttgcagacaaccctgtcctcaggcctgaactcaccatagagacccatgtcagcaaacggtgaccagcaaatcctcttcccttattctaaagctgccccttgggagactccagggagaaggcattgcttcctccctggtgtgaactctttctttggtattccatccactatcctggcaactcaaggctgcttctgttaactgaagcctgctccttcttgttctgccctccagagatttgctcaaatgatcaataagctttaaattaaactctactt

SEQ ID NO: 89379 - DNA, 2928 bp, Homo sapiens
gaccgactgtgtggaagcaccaggcatcagagatagagtcttccctggcattgcaggagagaatctgaagggatgatggatgcatcaaaagagctgcaagttctccacattgacttcttgaatcaggacaacgccgtttctcaccacacatgggagttccaaacgagcagtcctgtgttccggcgaggacaggtgtttcacctgcggctggtgctgaaccagcccctacaatcctaccaccaactgaaactggaattcagcacagcacagtggctgtcaccagttcccccaatgccatcctgggcaagtaccaactaaacgtgaaaactggaaaccacatccttaagtctgaagaaaacatcctataccttctcttcaacccatggtgtaaagaggacatggttttcatgcctgatgaggacgagcgcaaagagtacatcctcaatgacacgggctgccattacgtgggggctgccagaagtatcaaatgcaaaccctggaactttggtcagtttgagaaaaatgtcctggactgctgcatttccctgctgactgagagctccctcaagcccacagataggagggaccccgtgctggtgtgcagggccatgtgtgctatgatgagctttgagaaaggccagggcgtgctcattgggaattggactggggactacgaaggtggcacagccccatacaagtggacaggcagtgccccgatcctgcagcagtactacaacacgaagcaggctgtgtgctttggccagtgctgggtgtttgctgggatcctgactacagtgctgagagcgttgggcatcccagcacgcagtgtgacaggcttcgattcagctcacgacacagaaaggaacctcacggtggacacctatgtgaatgagaatggcgagaaaatcaccagtatgacccacgactctgtctggaatttccatgtgtggacggatgcctggatgaagcgaccggatctgcccaagggctacgacggctggcaggctgtggacgcaacgccgcaggagcgaagccagggtgtcttctgctgtgggccatcaccactgaccgccatccgcaaaggtgacatctttattgtctatgacaccagattcgtcttctcagaagtgaatggtgacaggctcatctggttggtgaagatggtgaatgggcaggaggagttacacgtaatttcaatggagaccacaagcatcgggaaaaacatcagcaccaaggcagtgggccaagacaggcggagagatatcacctatgagtacaagtatccagaaggctcctctgaggagaggcaggtcatggatcatgccttcctccttctcagttctgagagggagcacagacgacctgtaaaagagaactttcttcacatgtcggtacaatcagatgatgtgctgctgggaaactctgttaatttcaccgtgattcttaaaaggaagaccgctgccctacagaatgtcaacatcttgggctcctttgaactacagttgtacactggcaagaagatggcaaaactgtgtgacctcaataagacctcgcagatccaaggtcaagtatcagaagtgactctgaccttggactccaagacctacatcaacagcctggctatattagatgatgagccagttatcagaggtttcatcattgcggaaattgtggagtctaaggaaatcatggcctctgaagtattcacgtctttccagtaccctgagttctctatagagttgcctaacacaggcagaattggccagctacttgtctgcaattgtatcttcaagaataccctggccatccctttgactgacgtcaagttctctttggaaagcctgggcatctcctcactacagacctctgaccatgggacggtgcagcctggtgagaccatccaatcccaaataaaatgcaccccaataaaaactggacccaagaaatttatcgtcaagttaagttccaaacaagtgaaagagattaatgctcagaagattgttctcatcaccaagtagccttgtctgatgctgtggagccttagttgagatttcagcatttcctaccttgtgcttagctttcagattatggatgattaaatttgatgacttatatgagggcagattcaagagccagcaggtcaaaaaggccaacacaaccataagcagccagacccacaaggccaggtcctgtgctatcacagggtcacctcttttacagttagaaacaccagccgaggccacagaatcccatccctttcctgagtcatggcctcaaaaatcagggccaccattgtctcaattcaaatccatagatttcgaagccacagagtctctccctggagcagcagactatgggcagcccagtgctgccacctgctgacgacccttgagaagctgccatatcttcaggccatgggttcaccagccctgaaggcacctgtcaactggagtgctctctcagcactgggatgggcctgatagaagtgcattctcctcctattgcctccattctcctctctctatccctgaaatccaggaagtccctctcctggtgctccaagcagtttgaagcccaatctgcaaggacatttctcaagggccatgtggttttgcagacaaccctgtcctcaggcctgaactcaccatagagacccatgtcagcaaacggtgaccagcaaatcctcttcccttattctaaagctgccccttgggagactccagggagaaggcattgcttcctccctggtgtgaactctttctttggtattccatccactatcctggcaactcaaggctgcttctgttaactgaagcctgctccttcttgttctgccctccagagatttgctcaaatgatcaataagctttaaattaaactctactttcaggggacgaaccaacaaaacacacaaaacaacaaaaaaaa

SEQ ID NO: 89380 - DNA, 1097 bp, Homo sapiens
  misc_feature (22)..(22): n is a, c, g, or t
  misc_feature (27)..(27): n is a, c, g, or t
atgcagggaatttcggaacganggacntgacgtcaagttctctttggaaagcctgggcatctcctcactacagacctctgaccatgggacggtgcagcctggtgagaccatccaatcccaaataaaatgcaccccaataaaaactggacccaagaaatttatcgtcaagttaagttccaaacaagtgaaagagattaatgctcagaagattgttctcatcaccaagtagccttgtctgatgctgtggagccttagttgagatttcagcatttcctaccttgtgcttagctttcagattatggatgattaaatttgatgacttatatgagggcagattcaagagccagcaggtcaaaaaggccaacacaaccataagcagccagacccacaaggccaggtcctgtgctatcacagggtcacctcttttacagttagaaacaccagccgaggccacagaatcccatccctttcctgagtcatggcctcaaaaatcagggccaccattgtctcaattcaaatccatagatttcgaagccacagagtctctccctggagcagcagactatgggcagcccagtgctgccacctgctgacgacccttgagaagctgccatatcttcaggccatgggttcaccagccctgaaggcacctgtcaactggagtgctctctcagcactgggatgggcctgatagaagtgcattctcctcctattgcctccattctcctctctctatccctgaaatccaggaagtccctctcctggtgctccaagcagtttgaagcccaatctgcaaggacatttctcaagggccatgtggttttgcagacaaccctgtcctcaggcctgaactcaccatagagacccatgtcagcaaacggtgaccagcaaatcctcttcccttattctaaagctgccccttgggagactccagggagaaggcattgcttcctccctggtgtgaactctttctttggtattccatccactatcctggcaactcaaggctgcttctgttaactgaagcctgctccttcttgttctgccctccagagatttgctcaaatgatcaataagctttaaattaaactctactt

SEQ ID NO: 89381 - DNA, 1403 bp, Homo sapiens
gaccgactgtgtggaagcaccaggcatcagagatagagtcttccctggcattgcaggagagaatctgaagggatgatggatgcatcaaaagagctgcaagttctccacattgacttcttgaatcaggacaacgccgtttctcaccacacatgggagttccaaacgagcagtcctgtgttccggcgaggacaggtgtttcacctgcggctggtgctgaaccagcccctacaatcctaccaccaactgaaactggaattcagcacagcacagtggctgtcaccagttcccccaatgccatcctgggcaagtaccaactaaacgtgaaaactggaaaccacatccttaagtctgaagaaaacatcctataccttctcttcaacccatggtgtaaagaggacatggttttcatgcctgatgaggacgagcgcaaagagtacatcctcaatgacacgggctgccattacgtgggggctgccagaagtatcaaatgcaaaccctggaactttggtcagtttgagaaaaatgtcctggactgctgcatttccctgctgactgagagctccctcaagcccacagataggagggaccccgtgctggtgtgcagggccatgtgtgctatgatgagctttgagaaaggccagggcgtgctcattgggaattggactggggactacgaaggtggcacagccccatacaagtggacaggcagtgccccgatcctgcagcagtactacaacacgaagcaggctgtgtgctttggccagtgctgggtgtttgctgggatcctgactacagtgctgagagcgttgggcatcccagcacgcagtgtgacaggcttcgattcagctcacgacacagaaaggaacctcacggtggacacctatgtgaatgagaatggcgagaaaatcaccagtatgacccacgactctgtctggaatttccatgtgtggacggatgcctggatgaagcgaccggatctgcccaagggctacgacggctggcaggctgtggacgcaacgccgcaggagcgaagccagggtgtcttctgctgtgggccatcaccactgaccgccatccgcaaaggtgacatctttattgtctatgacaccagattcgtcttctcagaagtgaatggtgacaggctcatctggttggtgaagatggtgaatgggcaggaggagttacacgtaatttcaatggagaccacaagcatcgggaaaaacatcagcaccaaggcagtgggccaagacaggcggagagatatcacctatgagtacaagtatccagaaggtgctagcatcacagggctccttctgactcagcccctgagtcacccagaacatgaaaatagtcaagattgggggtggacctgggcaacatggtgaaaccccatccctaccaaa

SEQ ID NO: 89382 - DNA, 2995 bp, Homo sapiens
gaccgactgtgtggaagcaccaggcatcagagatagagtcttccctggcattgcaggagagaatctgaagggatgatggatgcatcaaaagagctgcaagttctccacattgacttcttgaatcaggacaacgccgtttctcaccacacatgggagttccaaacgagcagtcctgtgttccggcgaggacaggtgtttcacctgcggctggtgctgaaccagcccctacaatcctaccaccaactgaaactggaattcagcacagggccgaatcctagcatcgccaaacacaccctggtggtgctcgacccgaggacgccctcagaccactacaactggcaggcaacccttcaaaatgagtctggcaaagaggtcacagtggctgtcaccagttcccccaatgccatcctgggcaagtaccaactaaacgtgaaaactggaaaccacatccttaagtctgaagaaaacatcctataccttctcttcaacccatggtgtaaagaggacatggttttcatgcctgatgaggacgagcgcaaagagtacatcctcaatgacacgggctgccattacgtgggggctgccagaagtatcaaatgcaaaccctggaactttggtcagtttgagaaaaatgtcctggactgctgcatttccctgctgactgagagctccctcaagcccacagataggagggaccccgtgctggtgtgcagggccatgtgtgctatgatgagctttgagaaaggccagggcgtgctcattgggaattggactggggactacgaaggtggcacagccccatacaagtggacaggcagtgccccgatcctgcagcagtactacaacacgaagcaggctgtgtgctttggccagtgctgggtgtttgctgggatcctgactacagtgctgagagcgttgggcatcccagcacgcagtgtgacaggcttcgattcagctcacgacacagaaaggaacctcacggtggacacctatgtgaatgagaatggcgagaaaatcaccagtatgacccacgactctgtctggaatttccatgtgtggacggatgcctggatgaagcgaccggatctgcccaagggctacgacggctggcaggctgtggacgcaacgccgcaggagcgaagccagggtgtcttctgctgtgggccatcaccactgaccgccatccgcaaaggtgacatctttattgtctatgacaccagattcgtcttctcagaagtgaatggtgacaggctcatctggttggtgaagatggtgaatgggcaggaggagttacacgtaatttcaatggagaccacaagcatcgggaaaaacatcagcaccaaggcagtgggccaagacaggcggagagatatcacctatgagtacaagtatccagaaggctcctctgaggagaggcaggtcatggatcatgccttcctccttctcagttctgagagggagcacagacgacctgtaaaagagaactttcttcacatgtcggtacaatcagatgatgtgctgctgggaaactctgttaatttcaccgtgattcttaaaaggaagaccgctgccctacagaatgtcaacatcttgggctcctttgaactacagttgtacactggcaagaagatggcaaaactgtgtgacctcaataagacctcgcagatccaaggtcaagtatcagaagtgactctgaccttggactccaagacctacatcaacagcctggctatattagatgatgagccagttatcagaggtttcatcattgcggaaattgtggagtctaaggaaatcatggcctctgaagtattcacgtctttccagtaccctgagttctctatagagttgcctaacacaggcagaattggccagctacttgtctgcaattgtatcttcaagaataccctggccatccctttgactgacgtcaagttctctttggaaagcctgggcatctcctcactacagacctctgaccatgggacggtgcagcctggtgagaccatccaatcccaaataaaatgcaccccaataaaaactggacccaagaaatttatcgtcaagttaagttccaaacaagtgaaagagattaatgctcagaagattgttctcatcaccaagtagccttgtctgatgctgtggagccttagttgagatttcagcatttcctaccttgtgcttagctttcagattatggatgattaaatttgatgacttatatgagggcagattcaagagccagcaggtcaaaaaggccaacacaaccataagcagccagacccacaaggccaggtcctgtgctatcacagggtcacctcttttacagttagaaacaccagccgaggccacagaatcccatccctttcctgagtcatggcctcaaaaatcagggccaccattgtctcaattcaaatccatagatttcgaagccacagagtctctccctggagcagcagactatgggcagcccagtgctgccacctgctgacgacccttgagaagctgccatatcttcaggccatgggttcaccagccctgaaggcacctgtcaactggagtgctctctcagcactgggatgggcctgatagaagtgcattctcctcctattgcctccattctcctctctctatccctgaaatccaggaagtccctctcctggtgctccaagcagtttgaagcccaatctgcaaggacatttctcaagggccatgtggttttgcagacaaccctgtcctcaggcctgaactcaccatagagacccatgtcagcaaacggtgaccagcaaatcctcttcccttattctaaagctgccccttgggagactccagggagaaggcattgcttcctccctggtgtgaactctttctttggtattccatccactatcctggcaactcaaggctgcttctgttaactgaagcctgctccttcttgttctgccctccagagatttgctcaaatgatcaataagctttaaattaaactctactt

SEQ ID NO: 89383 - DNA, 2886 bp, Homo sapiens
gaccgactgtgtggaagcaccaggcatcagagatagagtcttccctggcattgcaggagagaatctgaagggatgatggatgcatcaaaagagctgcaagttctccacattgacttcttgaatcaggacaacgccgtttctcaccacacatgggagttccaaacgagcagtcctgtgttccggcgaggacaggtgtttcacctgcggctggtgctgaaccagcccctacaatcctaccaccaactgaaactggaattcagcacagcacagtggctgtcaccagttcccccaatgccatcctgggcaagtaccaactaaacgtgaaaactggaaaccacatccttaagtctgaagaaaacatcctataccttctcttcaacccatggtgtaaagaggacatggttttcatgcctgatgaggacgagcgcaaagagtacatcctcaatgacacgggctgccattacgtgggggctgccagaagtatcaaatgcaaaccctggaactttggtcagtttgagaaaaatgtcctggactgctgcatttccctgctgactgagagctccctcaagcccacagataggagggaccccgtgctggtgtgcagggccatgtgtgctatgatgagctttgagaaaggccagggcgtgctcattgggaattggactggggactacgaaggtggcacagccccatacaagtggacaggcagtgccccgatcctgcagcagtactacaacacgaagcaggctgtgtgctttggccagtgctgggtgtttgctgggatcctgactacagtgctgagagcgttgggcatcccagcacgcagtgtgacaggcttcgattcagctcacgacacagaaaggaacctcacggtggacacctatgtgaatgagaatggcgagaaaatcaccagtatgacccacgactctgtctggaatttccatgtgtggacggatgcctggatgaagcgaccggatctgcccaagggctacgacggctggcaggctgtggacgcaacgccgcaggagcgaagccagggtgtcttctgctgtgggccatcaccactgaccgccatccgcaaaggtgacatctttattgtctatgacaccagattcgtcttctcagaagtgaatggtgacaggctcatctggttggtgaagatggtgaatgggcaggaggagttacacgtaatttcaatggagaccacaagcatcgggaaaaacatcagcaccaaggcagtgggccaagacaggcggagagatatcacctatgagtacaagtatccagaaggctcctctgaggagaggcaggtcatggatcatgccttcctccttctcagttctgagagggagcacagacgacctgtaaaagagaactttcttcacatgtcggtacaatcagatgatgtgctgctgggaaactctgttaatttcaccgtgattcttaaaaggaagaccgctgccctacagaatgtcaacatcttgggctcctttgaactacagttgtacactggcaagaagatggcaaaactgtgtgacctcaataagacctcgcagatccaaggtcaagtatcagaagtgactctgaccttggactccaagacctacatcaacagcctggctatattagatgatgagccagttatcagaggtttcatcattgcggaaattgtggagtctaaggaaatcatggcctctgaagtattcacgtctttccagtaccctgagttctctatagagttgcctaacacaggcagaattggccagctacttgtctgcaattgtatcttcaagaataccctggccatccctttgactgacgtcaagttctctttggaaagcctgggcatctcctcactacagacctctgaccatgggacggtgcagcctggtgagaccatccaatcccaaataaaatgcaccccaataaaaactggacccaagaaatttatcgtcaagttaagttccaaacaagtgaaagagattaatgctcagaagattgttctcatcaccaagtagccttgtctgatgctgtggagccttagttgagatttcagcatttcctaccttgtgcttagctttcagattatggatgattaaatttgatgacttatatgagggcagattcaagagccagcaggtcaaaaaggccaacacaaccataagcagccagacccacaaggccaggtcctgtgctatcacagggtcacctcttttacagttagaaacaccagccgaggccacagaatcccatccctttcctgagtcatggcctcaaaaatcagggccaccattgtctcaattcaaatccatagatttcgaagccacagagtctctccctggagcagcagactatgggcagcccagtgctgccacctgctgacgacccttgagaagctgccatatcttcaggccatgggttcaccagccctgaaggcacctgtcaactggagtgctctctcagcactgggatgggcctgatagaagtgcattctcctcctattgcctccattctcctctctctatccctgaaatccaggaagtccctctcctggtgctccaagcagtttgaagcccaatctgcaaggacatttctcaagggccatgtggttttgcagacaaccctgtcctcaggcctgaactcaccatagagacccatgtcagcaaacggtgaccagcaaatcctcttcccttattctaaagctgccccttgggagactccagggagaaggcattgcttcctccctggtgtgaactctttctttggtattccatccactatcctggcaactcaaggctgcttctgttaactgaagcctgctccttcttgttctgccctccagagatttgctcaaatgatcaataagctttaaattaaactctactt

SEQ ID NO: 89384 - DNA, 2306 bp, Homo sapiens
gggctaagtactttgcctggattatttaatttaatcttcgcaatagccttagaaggtaagtgctgtttttattcccagttttctaggaaatggagccacagagagctgaaatgccttgcacaaggtcacatagctccaaggtgtgatgccaggaatcagacccagattgtgtgtctctgtgctctactggggactgatgtgctgggatgagtttaataggcagcatgacttcctattactgggacagaggattcctgacactcttcaagtcaaagctgagatgtgcccctcttttcagaatagttaaggatggcctaggaaatgagtacccagatgcttcttgggcaaaaatttgcttgccagtcctgtttgagtttgggaatcattgctgccactgggtccaggctgggtgggctggggaaccccactgagagtgaccacccctggcttcccctcaggtgtcttctgctgtgggccatcaccactgaccgccatccgcaaaggtgacatctttattgtctatgacaccagattcgtcttctcagaagtgaatggtgacaggctcatctggttggtgaagatggtgaatgggcaggaggagttacacgtaatttcaatggagaccacaagcatcgggaaaaacatcagcaccaaggcagtgggccaagacaggcggagagatatcacctatgagtacaagtatccagaaggctcctctgaggagaggcaggtcatggatcatgccttcctccttctcagttctgagagggagcacagacgacctgtaaaagagaactttcttcacatgtcggtacaatcagatgatgtgctgctgggaaactctgttaatttcaccgtgattcttaaaaggaagaccgctgccctacagaatgtcaacatcttgggctcctttgaactacagttgtacactggcaagaagatggcaaaactgtgtgacctcaataagacctcgcagatccaaggtcaagtatcagaagtgactctgaccttggactccaagacctacatcaacagcctggctatattagatgatgagccagttatcagaggtttcatcattgcggaaattgtggagtctaaggaaatcatggcctctgaagtattcacgtctttccagtaccctgagttctctatagagttgcctaacacaggcagaattggccagctacttgtctgcaattgtatcttcaagaataccctggccatccctttgactgacgtcaagttctctttggaaagcctgggcatctcctcactacagacctctgaccatgggacggtgcagcctggtgagaccatccaatcccaaataaaatgcaccccaataaaaactggacccaagaaatttatcgtcaagttaagttccaaacaagtgaaagagattaatgctcagaagattgttctcatcaccaagtagccttgtctgatgctgtggagccttagttgagatttcagcatttcctaccttgtgcttagctttcagattatggatgattaaatttgatgacttatatgagggcagattcaagagccagcaggtcaaaaaggccaacacaaccataagcagccagacccacaaggccaggtcctgtgctatcacagggtcacctcttttacagttagaaacaccagccgaggccacagaatcccatccctttcctgagtcatggcctcaaaaatcagggccaccattgtctcaattcaaatccatagatttcgaagccacagagtctctccctggagcagcagactatgggcagcccagtgctgccacctgctgacgacccttgagaagctgccatatcttcaggccatgggttcaccagccctgaaggcacctgtcaactggagtgctctctcagcactgggatgggcctgatagaagtgcattctcctcctattgcctccattctcctctctctatccctgaaatccaggaagtccctctcctggtgctccaagcagtttgaagcccaatctgcaaggacatttctcaagggccatgtggttttgcagacaaccctgtcctcaggcctgaactcaccatagagacccatgtcagcaaacggtgaccagcaaatcctcttcccttattctaaagctgccccttgggagactccagggagaaggcattgcttcctccctggtgtgaactctttctttggtattccatccactatcctggcaactcaaggctgcttctgttaactgaagcctgctccttcttgttctgccctccagagatttgctcaaatgatcaataagctttaaattaaactctactt

SEQ ID NO: 89385 - DNA, 3281 bp, Homo sapiens
gaccgactgtgtggaagcaccaggcatcagagatagagtcttccctggcattgcaggagagaatctgaagggatgatggatgcatcaaaagagctgcaagttctccacattgacttcttgaatcaggacaacgccgtttctcaccacacatgggagttccaaacgagcagtcctgtgttccggcgaggacaggtgtttcacctgcggctggtgctgaaccagcccctacaatcctaccaccaactgaaactggaattcagcacagcacagtggctgtcaccagttcccccaatgccatcctgggcaagtaccaactaaacgtgaaaactggaaaccacatccttaagtctgaagaaaacatcctataccttctcttcaacccatggtgtaaagaggacatggttttcatgcctgatgaggacgagcgcaaagagtacatcctcaatgacacgggctgccattacgtgggggctgccagaagtatcaaatgcaaaccctggaactttggtcagtttgagaaaaatgtcctggactgctgcatttccctgctgactgagagctccctcaagcccacagataggagggaccccgtgctggtgtgcagggccatgtgtgctatgatgagctttgagaaaggccagggcgtgctcattgggaattggactggggactacgaaggtggcacagccccatacaagtggacaggcagtgccccgatcctgcagcagtactacaacacgaagcaggctgtgtgctttggccagtgctgggtgtttgctgggatcctgactacagtgctgagagcgttgggcatcccagcacgcagtgtgacaggcttcgattcagctcacgacacagaaaggaacctcacggtggacacctatgtgaatgagaatggcgagaaaatcaccagtatgacccacgactctgtctggaatttccatgtgtggacggatgcctggatgaagcgaccggatctgcccaagggctacgacggctggcaggctgtggacgcaacgccgcaggagcgaagccagggtgtcttctgctgtgggccatcaccactgaccgccatccgcaaaggtgacatctttattgtctatgacaccagattcgtcttctcagaagtgaatggtgacaggctcatctggttggtgaagatggtgaatgggcaggaggagttacacgtaatttcaatggagaccacaagcatcgggaaaaacatcagcaccaaggcagtgggccaagacaggcggagagatatcacctatgagtacaagtatccagaaggctcctctgaggagaggcaggtcatggatcatgccttcctccttctcagttctgagagggagcacagacgacctgtaaaagagaactttcttcacatgtcggtacaatcagatgatgtgctgctgggaaactctgttaatttcaccgtgattcttaaaaggaagaccgctgccctacagaatgtcaacatcttgggctcctttgaactacagttgtacactggcaagaagatggcaaaactgtgtgacctcaataagacctcgcagatccaaggtcaagtatcagaagtgactctgaccttggactccaagacctacatcaacagcctggctatattagatgatgagccagttatcagaggtttcatcattgcggaaattgtggagtctaaggaaatcatggcctctgaagtattcacgtctttccagtaccctgagttctctatagagttgcctaacacaggcagaattggccagctacttgtctgcaattgtatcttcaagaataccctggccatccctttgactgacgtcaagttctctttggaaagcctgggcatctcctcactacagacctctgaccatgggacggtgcagcctggtgagaccatccaatcccaaataaaatgcaccccaataaaaactggacccaagaaatttatcgtcaagttaagttccaaacaagtgaaagagattaatgctcagaagattgttctcatcaccaagtagccttgtctgatgctgtggagccttagttgagatttcagcatttcctaccttgtgcttagctttcagattatggatgattaaatttgatgacttatatgagggcagattcaagagccagcaggtcaaaaaggccaacacaaccataagcagccagacccacaaggccaggtcctgtgctatcacagggtcacctcttttacagttagaaacaccagccgaggccacagaatcccatccctttcctgagtcatggcctcaaaaatcagggccaccattgtctcaattcaaatccatagatttcgaagccacagagtctctccctggagcagcagactatgggcagcccagtgctgccacctgctgacgacccttgagaagctgccatatcttcaggccatgggttcaccagccctgaaggcacctgtcaactggagtgctctctcagcactgggatgggcctgatagaagtgcattctcctcctattgcctccattctcctctctctatccctgaaatccaggaagtccctctcctggtgctccaagcagtttgaagcccaatctgcaaggacatttctcaagggccatgtggttttgcagacaaccctgtcctcaggcctgaactcaccatagagacccatgtcagcaaacggtgaccagcaaatcctcttcccttattctaaagctgccccttgggagactccagggagaaggcattgcttcctccctggtgtgaactctttctttggtattccatccactatcctggcaactcaaggctgcttctgttaactgaagcctgctccttcttgttctgccctccagagatttgctcaaatgatcaataagctttaaattaaactctacttcaagaaaactctgtggtccctgagtccttttttctttatgccaataagcttcttaaatgtgctggcggtttatgcagtcacttggggagccatggaatcctttgatctccccaggcaaggtgctctgaggagttggcttctttattgtctgttcagtacatccaacccctctctcaaaggctgtcaccccaactggatacacaccctggcaaaggcacgtagcttgaatgagggttattttgtgtctaattcacaggagagtcatgggtgggatacctgtcatcctctgcctttccagctgtccaagtgaaaaaaacctcaatcctggtcacccttgcccaagttgcccacatccctggcatacagtaggtgttcaataaatgtttattgaagga

SEQ ID NO: 89386 - DNA, 2884 bp, Homo sapiens
gaccgactgtgtggaagcaccaggcatcagagatagagtcttccctggcattgcaggagagaatctgaagggatgatggatgcatcaaaagagctgcaagttctccacattgacttcttgaatcaggacaacgccgtttctcaccacacatgggagttccaaacgagcagtcctgtgttccggcgaggacaggtgtttcacctgcggctggtgctgaaccagcccctacaatcctaccaccaactgaaactggaattcagcacagcacagtggctgtcaccagttcccccaatgccatcctgggcaagtaccaactaaacgtgaaaactggaaaccacatccttaagtctgaagaaaacatcctataccttctcttcaacccatggtgtaaagaggacatggttttcatgcctgatgaggacgagcgcaaagagtacatcctcaatgacacgggctgccattacgtgggggctgccagaagtatcaaatgcaaaccctggaactttggtcagtttgagaaaaatgtcctggactgctgcatttccctgctgactgagagctccctcaagcccacagataggagggaccccgtgctggtgtgcagggccatgtgtgctatgatgagctttgagaaaggccagggcgtgctcattgggaattggactggggactacgaaggtggcacagccccatacaagtggacaggcagtgccccgatcctgcagcagtactacaacacgaagcaggctgtgtgctttggccagtgctgggtgtttgctgggatcctgactacagtgctgagagcgttgggcatcccagcacgcagtgtgacaggcttcgattcagctcacgacacagaaaggaacctcacggtggacacctatgtgaatgagaatggcgagaaaatcaccagtatgacccacgactctgtctggaatttccatgtgtggacggatgcctggatgaagcgaccggatctgcccaagggctacgacggctggcaggctgtggacgcaacgccgcaggagcgaagccagggtgtcttctgctgtgggccatcaccactgaccgccatccgcaaaggtgacatctttattgtctatgacaccagattcgtcttctcagaagtgaatggtgacaggctcatctggttggtgaagatggtgaatgggcaggaggagttacacgtaatttcaatggagaccacaagcatcgggaaaaacatcagcaccaaggcagtgggccaagacaggcggagagatatcacctatgagtacaagtatccagaaggctcctctgaggagaggcaggtcatggatcatgccttcctccttctcagttctgagagggagcacagacgacctgtaaaagagaactttcttcacatgtcggtacaatcagatgatgtgctgctgggaaactctgttaatttcaccgtgattcttaaaaggaagaccgctgccctacagaatgtcaacatcttgggctcctttgaactacagttgtacactggcaagaagatggcaaaactgtgtgacctcaataagacctcgcagatccaaggtcaagtatcagaagtgactctgaccttggactccaagacctacatcaacagcctggctatattagatgatgagccagttatcagaggtttcatcattgcggaaattgtggagtctaaggaaatcatggcctctgaagtattcacgtctttccagtaccctgagttctctatagagttgcctaacacaggcagaattggccagctacttgtctgcaattgtatcttcaagaataccctggccatccctttgactgacgtcaagttctctttggaaagcctgggcatctcctcactacagacctctgaccatgggacggtgcagcctggtgagaccatccaatcccaaataaaatgcaccccaataaaaactggacccaagaaatttatcgtcaagttaagttccaaacaagtgaaagagattaatgctcagaagattgttctcatcaccaagtagccttgtctgatgctgtggagccttagttgagatttcagcatttcctaccttgtgcttagctttcagattatggatgattaaatttgatgacttatatgagggcagattcaagagccagcaggtcaaaaaggccaacacaaccataagcagccagacccacaaggccaggtcctgtgctatcacagggtcacctcttttacagttagaaacaccagccgaggccacagaatcccatccctttcctgagtcatggcctcaaaaatcagggccaccattgtctcaattcaaatccatagatttcgaagccacagaaaggcattgcttcctccctggtgtgaactctttctttggtattccatccactatcctggcaactcaaggctgcttctgttaactgaagcctgctccttcttgttctgccctccagagatttgctcaaatgatcaataagctttaaattaaactctacttcaagaaaactctgtggtccctgagtccttttttctttatgccaataagcttcttaaatgtgctggcggtttatgcagtcacttggggagccatggaatcctttgatctccccaggcaaggtgctctgaggagttggcttctttattgtctgttcagtacatccaacccctctctcaaaggctgtcaccccaactggatacacaccctggcaaaggcacgtagcttgaatgagggttattttgtgtctaattcacaggagagtcatgggtgggatacctgtcatcctctgcctttccagctgtccaagtgaaaaaaacctcaatcctggtcacccttgcccaagttgcccacatccctggcatacagtaggtgttcaataaatgtttattgaagga

SEQ ID NO: 89387 - DNA, 678 bp, Homo sapiens
gaccgactgtgtggaagcaccaggcatcagagatagagtcttccctggcattgcaggagagaatctgaagggatgatggatgcatcaaaagagctgcaagttctccacattgacttcttgaatcaggacaacgccgtttctcaccacacatgggagttccaaacgagcagtcctgtgttccggcgaggacaggtgtttcacctgcggctggtgctgaaccagcccctacaatcctaccaccaactgaaactggaattcagcacagggccgaatcctagcatcgccaaacacaccctggtggtgctcgacccgaggacgccctcagaccactacaactggcaggcaacccttcaaaatgagtctggcaaagaggtgagcacccactgggctggcgggtgggctggctggcttctggcggaatgctcctaatgtgagcagcccctatccccttcctcacctgtcagctggtaacatggtttaaagccatccacagcacagcatgatagaggggccatggctccaaatgtctgtttccccactcagcctcctccaagcacacagtatcgctgtggccaaacctcctacatgtcacccttcccctttccatttcaaagggaacaatgttcactggaggacatgagcggagagaagtacataaaaataacccatggttccacc

SEQ ID NO: 89388 - DNA, 129 bp, Homo sapiens
aaaatcttactcaaatgaaagcaaatccaaaaatgagaagaggagatagctaatcagataagaaggaaccagagagataatcctggaagaatgaaaacacagagtgttaaaacactaactgcccagcaa

SEQ ID NO: 89389 - DNA, 632 bp, Homo sapiens
gacagagtgagactcaggtctcaaaacagaaacagacatagaaaaaatctttgctgaatcgaacatgtgactaattgcataagacatttaaaacacaagatgtatgagaaataaaaaataacaaggtcacaaacctaatggctgaggaagcctatgatacaaatcaagaatttgaaaatggaaaacaaaaagatgataatgaatgtgatttatacactctgcaacatggaaaatctaagtggataatcctggaatcaacgagaaatataggactggggctcatggaaagcatctggcctagaaagagatctggaaatgaataaattgagatttggggacatatactaatttgtaccaaagtaacataacaaagcctaatcgccaaaaatatataaaataaaaggagacatgtaaaaaaaaaaaaaaaaaaaaaaaaaaaaaaaaaaaaaaaaaaaaaaaaaaaaaaaaaaaaaaaaaaaaaaaaaaaaaacaaaaaaaaaaaaaaaaaaagaaaaaaaaaaaaaaaaaaaaaggagggagggcgggagagcgatacattgccacacgacgacacaagtacatacgagaaacgacacgagaacgagacacccacggagcgcagcagaaaagcg

SEQ ID NO: 89390 - DNA, 402 bp, Homo sapiens
cccaccccttttgcaatctgatcacagtgagagccgacatgtgagccaaagtcctcgaggaggtttcctttataaataaaaaggccaagtcttgctaagaagaaagttttgcaatttttccttccctgtttttcctatgaaagccacatattaagaatgattggacagaagggtaaaaggtccaaaatgaattccatgagtgcctgtagcagcctttgggatcagaaaactaacccccatatctacttaagacttcggttgcatatttttttgttgttgatggggaacacattccttaactgaaacaaggaattggtttcctattctgaatgaagcccagtttgatttgggtttctgtcatctgcaagtgagagatgcggtgtttggcgatcctcagacgca

SEQ ID NO: 89391 - DNA, 253 bp, Homo sapiens
ctttaatttcctgagtgtgttacaaagtgcattgaattatatttgacatatggaggttctaaagccatgtcaggcttctattaacatatgataatagaaagcaataggaagtccagcaatctgtgagatcccatggcccttccacttcctccccatggctgtaggcacaccgcccatcttctgtgagcttcactttcaccactcctaaaatggggatgaaatatcagcctggactgttgttcagattgctatg

SEQ ID NO: 89392 - DNA, 554 bp, Homo sapiens
  misc_feature (13)..(14): n is a, c, g, or t
gatctgactgctnntcttcatgggagacttcaggttctgagttcctgaatgtatcctccgtctacaggagagagggggctctggtcctgacttggcttcctcctgtctttgctgatggaagctgggttttgatgagaaacttctcctggcatgctaaggtctactcacagcaaatgtaaagtcttagaggtcgaaggccttgataactgcctttcctgaccttgcactgtttctagtgagtttaatttaatacaaagcaaaacaagtttgatgatagcctctggctgactgctggaacccaccacgctcacggactgtgggtcccggcagaatgtggctccatggacagagggtctctgcttcataccccgctgcacccccagggccagagaggtgcttgcatggaggagctattcaatacgtttagttgaatgaacaagcaaatgaatgaacaaaatattgtttaaagtatccatgttacaccaaaaatataatgcaattttctgatgtcttaaatcaaattctccagtggcaataaacataacaaaaactca

SEQ ID NO: 89393 - DNA, 410 bp, Homo sapiens
aaaaacaattacagaaatttcttcaagttctaagaaaaatactgtctttccttttcccagtatgttctctatacccataggtatccttcaaatactgcctaagacattccctattgagaaggccccagccagctagctgttcccagtgctcctgcctccacgctcacggactgtgggtcccggcagaatgtggctccatggacagagggtctctgcttcataccccgctgcacccccagggccagagaggtgcttgcatggaggagctattcaatacgtttagttgaatgaacaagcaaatgaatgaacaaaatattgtttaaagtatccatgttacaccaaaaatataatgcaattttctgatgtcttaaatcaaattctccagtggcaataaacataacaaaaactca

SEQ ID NO: 89394 - DNA, 207 bp, Homo sapiens
tcaccaacagcccttaacacctgaccagaaagcattccatggcctcaaatctgatcagatgtgaggaaaatgggtgagatgtgctgcctacgttactcctgttctaaacacaaatccactctgcccgtggacccccatgccactgtccactcagcaaacacaaatccactctgcccatggcccccatgccactgcccactcagcaga

SEQ ID NO: 89395 - DNA, 362 bp, Homo sapiens
aatagagaaattgtctaaaaaaatacctggcctatattctttcatggcagtgtcatgaaagagaaaaaaggctgaagaactgttttgcattaaaggagatttagagatgtgagttgaaactaaatgccatgcaggatcctgggttgaatcctagactggaaattatacttaaaaaggacattatggagaaacttggcaattgaatatggactgtgaattatatcaggtgtttgaaaaattttaaaataaaagaagaaatacatattttagaatttgcaggcaatactgttgtctcatgcaacaactatccaattctgctgttgttcacactgctgccacaaataatgcagaaaagaaggggc

SEQ ID NO: 89396 - DNA, 2573 bp, Homo sapiens
  misc_feature (1)..(1): n is a, c, g, or t
  misc_feature (7)..(7): n is a, c, g, or t
  misc_feature (24)..(24): n is a, c, g, or t
  misc_feature (30)..(30): n is a, c, g, or t
  misc_feature (32)..(32): n is a, c, g, or t
  misc_feature (73)..(73): n is a, c, g, or t
  misc_feature (94)..(94): n is a, c, g, or t
  misc_feature (100)..(100): n is a, c, g, or t
  misc_feature (167)..(167): n is a, c, g, or t
  misc_feature (380)..(380): n is a, c, g, or t
  misc_feature (388)..(388): n is a, c, g, or t
  misc_feature (395)..(395): n is a, c, g, or t
  misc_feature (443)..(443): n is a, c, g, or t
  misc_feature (447)..(448): n is a, c, g, or t
  misc_feature (528)..(528): n is a, c, g, or t
  misc_feature (539)..(539): n is a, c, g, or t
  misc_feature (545)..(545): n is a, c, g, or t
  misc_feature (554)..(554): n is a, c, g, or t
  misc_feature (576)..(577): n is a, c, g, or t
  misc_feature (739)..(739): n is a, c, g, or t
ntaagtnaaataagtgccgagggntggagnangggctggttggagtgggggtctccatcatctccagcaaaangctgtgctgaagtctgagcanagggangggctcagagagaggggctgcccgacccttccatctaggagctgcccaggactccagaggagggganggaattgatttaggtcagtgaggggttgcgtggggctgggagggggttgaggttgggaggctgaaggaggagactcccttcaacctgggaggtggaggttgcagtgagcagagatcgtgccactgcacaatcctttctatctcccttcctgggctgtgagtttctcggggcagggaaacagatcactcatccatctgtcacgttgtgatgtanactagttncctgatntatatactagtactcagaaaaatgtctgatgaatgaataaaattcatncatnnaacattttcatcatagcattggctattaaccccttgaatccccgtggctcacttgctgggtcccatccctgacccactancctggtgccgngggganaccaatttntggaggaagctctgggtacccnntcttgccctaagcctgcctctgaacaggctgttcttgtttatgacccccgtcccagcagaatagtgattgctcatccctgcatgtgatttgagagggccagtctttcaggcctggaggaaactcaagccccaccagccgcttggcatcggaatgctcagctngtcccctcctggggctcatgtgaccaagatctagctataaatatcagaggggcctcagaccaagacagaattcgggcaccaggagaaggaagccaacaggatccgacccggtgttttgtgacaaaggcaagacccccaggtctacttagagcaaagttagtagaggaggcagctaggcgtggctctcattccttcccacagaatggattataagtcgagcctgatccaggatgggaatcccatggagaacttggagaagcagctgatctgccctatctgcctggagatgtttaccaagccagtggtcatcttgccgtgccagcacaacctgtgccggaagtgtgccaatgacatcttccaggctgcaaatccctactggaccagccggggcagctcagtgtccatgtctggaggccgtttccgctgccccacctgccgccacgaggtgatcatggatcgtcacggagtgtacggcctgcagaggaacctgctggtggagaacatcatcgacatctacaaacaggagtgctccagtcggccgctgcagaagggcagtcaccccatgtgcaaggagcacgaagatgagaaaatcaacatctactgtctcacgtgtgaggtgcccacctgctccatgtgcaaggtgtttgggatccacaaggcctgcgaggtggccccattgcagagtgtcttccagggacaaaagactgaactgaataactgtatctccatgctggtggcggggaatgaccgtgtgcagaccatcatcactcagctggaggattcccgtcgagtgaccaaggagaacagtcaccaggtaaaggaagagctgagccagaagtttgacacgttgtatgccatcctggatgagaagaaaagtgagttgctgcagcggatcacgcaggagcaggagaaaaagcttagcttcatcgaggccctcatccagcagtaccaggagcagctggacaagtccacaaagctggtggaaactgccatccagtccctggacgagcctgggggagccaccttcctcttgactgccaagcaactcatcaaaagcattgtggaagcttccaagggctgccagctggggaagacagagcagggctttgagaacatggacttctttactttggatttagagcacatagcagacgccctgagagccattgactttgggacagatgaggaagaggaagaattcattgaagaagaagatcaggaagaggaagagtccacagaagggaaggaagaaggacaccagtaaggagctggatgaatgagaggcccccagatgcagagagactggagagggtggggaggggcccagcggccttggtgacaggcccagggtgggaggggtcggggcccctggaggggcaatggggaggtgatgtcttctctctgctcagagagcagggactagggtaggaccctcaccgctgcgtccagcagacactgaaccagaattggaaacgtgcttgaaacaatcacacaggacacttttctacattggtgcaaaatggaatattttgtacatttttaaaatgtgatttttgtatatacttgtatatgtatgccaatttggtgctttttgtaaaggaacttttgtataataatgcctggtcattgggtgacctgcgattgtcagaaagaggggaaggaagccaggttgatacagctgcccacttcctttcctgagcaggaggatggggtagcactcacagggacgatgtgctgtatttcagtgtctatcccagacatacggggtggtaactgagtttgtgttatatgttgttttaataaatgcacaatgctctcttcctgttcttcaaag

SEQ ID NO: 89397 - DNA, 2002 bp, Homo sapiens
  misc_feature (1)..(1): n is a, c, g, or t
  misc_feature (7)..(7): n is a, c, g, or t
  misc_feature (24)..(24): n is a, c, g, or t
  misc_feature (30)..(30): n is a, c, g, or t
  misc_feature (32)..(32): n is a, c, g, or t
  misc_feature (73)..(73): n is a, c, g, or t
  misc_feature (94)..(94): n is a, c, g, or t
  misc_feature (100)..(100): n is a, c, g, or t
  misc_feature (167)..(167): n is a, c, g, or t
  misc_feature (380)..(380): n is a, c, g, or t
  misc_feature (388)..(388): n is a, c, g, or t
  misc_feature (395)..(395): n is a, c, g, or t
  misc_feature (443)..(443): n is a, c, g, or t
  misc_feature (447)..(448): n is a, c, g, or t
  misc_feature (528)..(528): n is a, c, g, or t
  misc_feature (539)..(539): n is a, c, g, or t
  misc_feature (545)..(545): n is a, c, g, or t
  misc_feature (554)..(554): n is a, c, g, or t
  misc_feature (576)..(577): n is a, c, g, or t
  misc_feature (739)..(739): n is a, c, g, or t
ntaagtnaaataagtgccgagggntggagnangggctggttggagtgggggtctccatcatctccagcaaaangctgtgctgaagtctgagcanagggangggctcagagagaggggctgcccgacccttccatctaggagctgcccaggactccagaggagggganggaattgatttaggtcagtgaggggttgcgtggggctgggagggggttgaggttgggaggctgaaggaggagactcccttcaacctgggaggtggaggttgcagtgagcagagatcgtgccactgcacaatcctttctatctcccttcctgggctgtgagtttctcggggcagggaaacagatcactcatccatctgtcacgttgtgatgtanactagttncctgatntatatactagtactcagaaaaatgtctgatgaatgaataaaattcatncatnnaacattttcatcatagcattggctattaaccccttgaatccccgtggctcacttgctgggtcccatccctgacccactancctggtgccgngggganaccaatttntggaggaagctctgggtacccnntcttgccctaagcctgcctctgaacaggctgttcttgtttatgacccccgtcccagcagaatagtgattgctcatccctgcatgtgatttgagagggccagtctttcaggcctggaggaaactcaagccccaccagccgcttggcatcggaatgctcagctngtcccctcctggggctcatgtgaccaagatctagctataaatatcagaggggcctcagaccaagacagaattcgggcaccaggagaaggaagccaacaggatccgacccggtgttttgtgacaaaggcaagacccccaggtctacttagagcaaagttagtagaggaggcagctaggcgtggctctcattccttcccacagaatggattataagtcgagcctgatccaggatgggaatcccatggagaacttggagaagcagctgatctgccctatctgcctggagatgtttaccaagccagtggtcatcttgccgtgccagcacaacctgtgccggaagtgtgccaatgacatcttccaggctgcaaatccctactggaccagccggggcagctcagtgtccatgtctggaggccgtttccgctgccccacctgccgccacgaggtgatcatggatcgtcacggagtgtacggcctgcagaggaacctgctggtggagaacatcatcgacatctacaaacaggagtgctccagtcggccgctgcagaagggcagtcaccccatgtgcaaggagcacgaagatgagaaaatcaacatctactgtctcacgtgtgaggtgcccacctgctccatgtgcaaggtgtttgggatccacaaggcctgcgaggtggccccattgcagagtgtcttccagggacaaaagactgaactgaataactgtatctccatgctggtggcggggaatgaccgtgtgcagaccatcatcactcagctggaggattcccgtcgagtgaccaaggagaacagtcaccaggtaaaggaagagctgagccagaagtttgacacgttgtatgccatcctggatgagaagaaaagtgagttgctgcagcggatcacgcaggagcaggagaaaaagcttagcttcatcgaggccctcatccagcagtaccaggagcagctggacaagtccacaaagctggtggaaactgccatccagtccctggacgagcctgggggagccaccttcctcttgactgccaagcaactcatcaaaagcattgtggaagcttccaagggctgccagctggggaagacagagcagggctttgagaacatggacttctttactttggatttagagcacatagcagacgccctgagagccattgactttgggacagctgaagatgatgaggatgacgatgtcgataccaagaagcagaagaccgacgaggatgactagacagcaaaaaaggaaaagtt

SEQ ID NO: 89398 - DNA, 1914 bp, Homo sapiens
  misc_feature (1)..(1): n is a, c, g, or t
  misc_feature (7)..(7): n is a, c, g, or t
  misc_feature (24)..(24): n is a, c, g, or t
  misc_feature (30)..(30): n is a, c, g, or t
  misc_feature (32)..(32): n is a, c, g, or t
  misc_feature (73)..(73): n is a, c, g, or t
  misc_feature (94)..(94): n is a, c, g, or t
  misc_feature (100)..(100): n is a, c, g, or t
  misc_feature (167)..(167): n is a, c, g, or t
  misc_feature (380)..(380): n is a, c, g, or t
  misc_feature (388)..(388): n is a, c, g, or t
  misc_feature (395)..(395): n is a, c, g, or t
  misc_feature (443)..(443): n is a, c, g, or t
  misc_feature (447)..(448): n is a, c, g, or t
  misc_feature (528)..(528): n is a, c, g, or t
  misc_feature (539)..(539): n is a, c, g, or t
  misc_feature (545)..(545): n is a, c, g, or t
  misc_feature (554)..(554): n is a, c, g, or t
  misc_feature (576)..(577): n is a, c, g, or t
  misc_feature (739)..(739): n is a, c, g, or t
ntaagtnaaataagtgccgagggntggagnangggctggttggagtgggggtctccatcatctccagcaaaangctgtgctgaagtctgagcanagggangggctcagagagaggggctgcccgacccttccatctaggagctgcccaggactccagaggagggganggaattgatttaggtcagtgaggggttgcgtggggctgggagggggttgaggttgggaggctgaaggaggagactcccttcaacctgggaggtggaggttgcagtgagcagagatcgtgccactgcacaatcctttctatctcccttcctgggctgtgagtttctcggggcagggaaacagatcactcatccatctgtcacgttgtgatgtanactagttncctgatntatatactagtactcagaaaaatgtctgatgaatgaataaaattcatncatnnaacattttcatcatagcattggctattaaccccttgaatccccgtggctcacttgctgggtcccatccctgacccactancctggtgccgngggganaccaatttntggaggaagctctgggtacccnntcttgccctaagcctgcctctgaacaggctgttcttgtttatgacccccgtcccagcagaatagtgattgctcatccctgcatgtgatttgagagggccagtctttcaggcctggaggaaactcaagccccaccagccgcttggcatcggaatgctcagctngtcccctcctggggctcatgtgaccaagatctagctataaatatcagaggggcctcagaccaagacagaattcgggcaccaggagaaggaagccaacaggatccgacccggtgttttgtgacaaaggcaagacccccaggtctacttagagcaaagttagtagaggaggcagctaggcgtggctctcattccttcccacagaatggattataagtcgagcctgatccaggatgggaatcccatggagaacttggagaagcagctgatctgccctatctgcctggagatgtttaccaagccagtggtcatcttgccgtgccagcacaacctgtgccggaagtgtgccaatgacatcttccaggctgcaaatccctactggaccagccggggcagctcagtgtccatgtctggaggccgtttccgctgccccacctgccgccacgaggtgatcatggatcgtcacggagtgtacggcctgcagaggaacctgctggtggagaacatcatcgacatctacaaacaggagtgctccagtcggccgctgcagaagggcagtcaccccatgtgcaaggagcacgaagatgagaaaatcaacatctactgtctcacgtgtgaggtgcccacctgctccatgtgcaaggtgtttgggatccacaaggcctgcgaggtggccccattgcagagcccagggtgggaggggtcggggcccctggaggggcaatggggaggtgatgtcttctctctgctcagagagcagggactagggtaggaccctcaccgctgcgtccagcagacactgaaccagaattggaaacgtgcttgaaacaatcacacaggacacttttctacattggtgcaaaatggaatattttgtacatttttaaaatgtgatttttgtatatacttgtatatgtatgccaatttggtgctttttgtaaaggaacttttgtataataatgcctggtcattgggtgacctgcgattgtcagaaagaggggaaggaagccaggttgatacagctgcccacttcctttcctgagcaggaggatggggtagcactcacagggacgatgtgctgtatttcagtgtctatcccagacatacggggtggtaactgagtttgtgttatatgttgttttaataaatgcacaatgctctcttcctgttcttcaaag

SEQ ID NO: 89399 - DNA, 379 bp, Homo sapiens
tccagaagagagcctgactgtttcacttttaaggaacaatgctgtataaatatggccactgatacgtcaaagtgacagcctaggacttggttctaggtgacttttacttcagcttggcaaacttcaactgtcctgcttgctccttctaaaactcattttctttttttgagacagagtctcactctgttgcccaggatggagtgcagtggcacaatcttggctcactgtaaacttcacctcctgggttcaagcaattctcatgcctcagcctcccaagtagccgggactacaagcgtaccaccatgcccaggatgtacagccctcccagcacggtgctcgcttccctaatgccattccacagtatttgttgcagagaagg

SEQ ID NO: 89400 - DNA, 485 bp, Homo sapiens
cacctgctctcacctagaaaggaaattcagaagctcctgctcatcaccatcacacagtccatgagtacaaatcacccatcataagaaaggagcttgctggagaaaaggcagcaaagccttggagaatacagcagaggcaaccagcccccaccaagccagcgagcgcggtgaggactcacactgactccacaatccttctgttggatcccagccaatcatttttctaattgagtgagaaaatctgataatattgttcccctgactgaagccttcgtttcttctcatcactctaaagatgaagtgcaaagtgcttatcatggtccccaaggccccggtgtcctgtcctctgcctatatccccagctgtgtccaagccactccctgctccctccttctctacactcaaactgtccagtcctcccttcttttcctgcatctcattagcaccttccttgtgcagggctttgtgtgtgctatgcccttagc

SEQ ID NO: 89401 - DNA, 410 bp, Homo sapiens
aaaaaaaaaattaagacaatgaacgtctgtctttcatgcctctgctctctcagaagaacgagggctgtggttgaaacctaggaatgctccctgttggaagcggtggatctcctgtgcagtctgcggggcagagcctcttctcaccttccctgcgtcttctcttttttgctgctccctcacttggtggccatcccgggactgcatggagcgggtgtcagtgctgccttcactgggtgggaagtcacttttattacctccaggccaggttttccaacccgcctttccctatcctccactcccttctcacatccaccatgtcttccgtttctgaattgccccagaggataggggaggggaggaaggtaagcgtagagtagggaagagtgctgggcaggcccaacgccagccac

SEQ ID NO: 89402 - DNA, 324 bp, Homo sapiens
atggtgtatgctatatccccagtgtacggatgtaaagacaaggaaagagattaaaaaatctgttcatgcaaacaaaaagaaatttaggaatgcaacccataagatctcactcctggtctgcagtgaccacaagtgacagcttcctaggagcacgaagggcactattagtgccttattcaaccttttgacatatgtcacttgcaagtatttcaaaagccatagagttttatagatctgtccagaagtctaaaggaaaacctgccaaagacattcctcagaagagaatgtcaaatgtgttaacatagtttgcttgacaaattagga

SEQ ID NO: 89403 - DNA, 244 bp, Homo sapiens
accgggaggtgctgttaacagcagcatggctctcaactgacagataacttggaaagataaaggtgactatattccctcttctaacacagcttgaaaatctcctcctagtacgcctaagccaacatgatttggcttatacacagatcctaagaggagctaatatttttccttgagtgtccagagaatggatgaataaatgagcttgttgtgagagaccacaacacttcctattgacttccagctg

SEQ ID NO: 89404 - DNA, 281 bp, Homo sapiens
tatgaacaaaagaaggctccctggagatggtctgaaatgtaggggcagaggaagatggcatcaggactggagggacttagaagagcttgtggctctagcttcaggacttccgatgattcctccttagagtatgatcacccttagaaaaagatggtacctcttgggcctctgcactttcttgcctccatgtttgtcctcttggactggccaaacccagtcttccaaggatggaagtggatccaggaaaaatgaaagttgacacaggcatggttcagaaacag

SEQ ID NO: 89405 - DNA, 563 bp, Homo sapiens
gtggagtgtgggttgtttaccctcctgatcacgtggttgactggatgctgtggctcactgctgttgcccagcctcacgaaagggtatagtgctgcatattactagcccagaaaaagatcagaagtcaaaatttgaagtatgacttttattgaacgtgattcacttttacaccataacaaagtctaaatattgtgttaataagccaaaccattataagttgaggactgtctacacaatggattgaagggagggcaagaaaagttagtaggagactattaggagagatgcttctcaaattttaatgttcctataaagcatctgggggtcttgttaaagtgcaaattctgatttagtacatcagatacgaagcctgagaatctgcctttctaacaagccctcagtgatgctggcgattcttgtcctgagatttcactctgagcaatgagtacctggatgaaactacactagtggtggtggagatggaaagggacagattcaagacagattagagaaacaaaagcaacagagcctattgaagaagaagatgagagccatggtgaaaa

SEQ ID NO: 89406 - DNA, 256 bp, Homo sapiens
acaagaacacatggacacagggaggggaacatgttaaaagcaaactgaagccagcttcaagggactcctgctggccaaactggggacaatttgagcatcaaaataaatgactgtaatggatctaaatacactgactaaaatcagcagcaatgagtccatactgacataactaagtatataggaaaactgattagaaacagtatatttacataatttcaaagctcttcccccacaagacatttattaattataatgg

SEQ ID NO: 89407 - DNA, 789 bp, Homo sapiens
attcccttgttgcacgtagaaggctgcagttggagacgggacaactaggttctgggaagccatggcagaaatcacgcagactctgattcccgccgagaaccagcctaaagaaccactcatggcaagacgggggcccaccggctggctggctcctcaccaaactctactccgcattgactgtgggctcttgttctagaggcacccgcatcctcaggatgaaatgtgagtacaagagcagagactgccggtgctggtgtgtgcagcctctgattcaacagaaatctggaagtgttcacagcttggcccggagaagatcgttttaaatctacagctttaaaatgtggttgaaaaggagcccaggttggattctgccagcaggtccgctggccgctgttacctccccactgtcaacgcctaggtctctgcctccagccctgtttcagcctgtccttgaggatttgcttcacctcatttactgagcttgccacagattcattacctggcatcagagctcccctctcactgagcctgcccagaagggtgccagtatactagccagatgccgctggagggactccacaataaagcctggctattaaagacttcaacagtctcataaagtcactttgccagctgtagagcacacaagtgcccacagatccaagcctccttccttccccaaagaaacaccttggataaagtcttggaatatcatccattagcacatggctccagccaacacatgaattcccttacaccagcacatggtctctctttcctgttcattca

SEQ ID NO: 89408 - DNA, 748 bp, Homo sapiens
attcccttgttgcacgtagaaggctgcagttggagacgggacaactaggttctgggaagccatggcagaaatcacgcagactctgattcccgccgagaaccagcctaaagaaccactcatggcaagacgggggcccaccggctggctggctcctcaccaaactctactccgcattgactgtgggctcttgttctagaggcacccgcatcctcaggatgaaatcctctgattcaacagaaatctggaagtgttcacagcttggcccggagaagatcgttttaaatctacagctttaaaatgtggttgaaaaggagcccaggttggattctgccagcaggtccgctggccgctgttacctccccactgtcaacgcctaggtctctgcctccagccctgtttcagcctgtccttgaggatttgcttcacctcatttactgagcttgccacagattcattacctggcatcagagctcccctctcactgagcctgcccagaagggtgccagtatactagccagatgccgctggagggactccacaataaagcctggctattaaagacttcaacagtctcataaagtcactttgccagctgtagagcacacaagtgcccacagatccaagcctccttccttccccaaagaaacaccttggataaagtcttggaatatcatccattagcacatggctccagccaacacatgaattcccttacaccagcacatggtctctctttcctgttcattca

SEQ ID NO: 89409 - DNA, 392 bp, Homo sapiens
gatggaatacatctcctggagcaagagctgaagttcaatgttggcctctgagaagtggcacgtggggtgcaagggagaaaatgagacagaggatgggtgaattcttgacattctgatgtcggtaggagctgcccccctccagtgtgttctttatcctgctactagagtgacttttctacaaagcaattttgattcactgacattcaatgcatttgaattaagtgattaccttttgccaggtacaagttatatttctgcttataaactacctgtgcagtttttttcatgactttccattgccttcaggatgagagaaaaaaagtcacttggagtatcctcagtgaaactctcttactttacttttatccgtatgatttccccagcatataggc

SEQ ID NO: 89410 - DNA, 585 bp, Homo sapiens
tgaactttgcacgtctgccgaaaaatccgaacctgttgactgggatttttaagaatccgtttctcccttttgtgtattccatattggccggccccaaggatgctcgcagaagccagcccccaaccccagcccttccgtatctttcccctccatcgcggctttgcgatgaaagattagcccgcgaacagaggcattgattacaaacatgtccttggcagtggactctgggcctggcattcttcaggtttctgtcaatccagaaacgcgactttcctggacccctgcggctcttcctcccccgcccacatccagccctccaaggccagtccagaggtgaagtttgaggccctccccccacccaccccacacgcacgcacgcacgctagaccgtttgctgcactaggaattcgagcttgggccccactcgcccaggtgtgaacagtggctgattagtgggcggtctagtctctaaaatgacccctccccagactggcccttctcgcatcgggacccgcgcttgcacgctgcaggagccgcaaacgtcagctgttctggaaaccgagagggtcccagagagaggagata

SEQ ID NO: 89411 - DNA, 471 bp, Homo sapiens
cttattgatatggttcaggtgtgtccccacccaaatctcatctttaattggagcttccataattcccacatgttgtgggagggacccggtgggagataattgaatcacggggtggcttttcccgtactgttctcatggtagtgaataagtctcacgagatctgattgctttataaggggtttctcctttcacttgcctctcattctttcttgcctgttgccatgtaagtcatgccttttgccttctgctgtgattgtgaggcctccccagccacctggaactgtgagctcattaagcctctttttctttataaattacgtagtctcaggtatgtctttatcagcagcataaaaatgaaataataagcttgtattatttgatatatcagctttaaatgatatcttttgactcccagttatttaccattcaatgttctctccctgtactgttgctatggtttcttcatactca

SEQ ID NO: 89412 - DNA, 508 bp, Homo sapiens
gtggaagctgctggaggctgggaggtgctgaccatcatgttcagcaggagccagttgctgaagaaggtgtggatactctaggagccatgcgtgtttgcagcagcctgcagaaagagtgtaccggaaccaggaaggaaaactgcttctttctgtaatgtctctacagtactctccactgatgaagcttagaatggtaccagctaacaaaagaaaaaatatgtaaaggtcccttctgtgtcttcacatagtgagtaatgaagggtgaatttcgagctgtgaggcagtaaacttattgcagttcctcaaacttagaaattgggttgaatcccaataccctaatttcctgttccacatcacatttcaactaatacttgccttttatcacagcaaccaccaacaacctagctttgcaaagaaatgacatcatcaaaaggaaaataacacaatatgttaaactgtgaattcgcttgaaatagtcattcatgcaagcatctgagaaatgttgtgt

SEQ ID NO: 89413 - DNA, 664 bp, Homo sapiens
atcttgttcattattttgtcatgttttgtatagggcacccttttacaaatatcactttataaacatttgttgctattttatagagatatgatcgattttgcaattggttgtttagtttccctcaacctgccaagttctttaattaattttaatattttatatatagattttgttggattttccaggaacacaaacatataacttaaaataataagttttatctatttgcttcatatgtatgaaatattagattttttcatctattcactactcctgtgcaataggattatacaacccagaacattgtcatatgacttgcttgtgcatccctttccacccgccagtagctgtgggagggctatactttctgcatcaatgacttgatcatttgaaatggaacatggtttgggtgatatcatgtgaatgaatatagtgtgtgccatgtttgaacaaaggatttaactgccatcttgtagattggtttagattcttttgcacctgtatgtcccctgtctgaggaagaacataactcgaatggggctggtgcttaacctggggctaagaataagaagacatgtgaagctaagcacagctgtgtagaactgcaatcaacccgcaaccttcatgtcatgtaagcaagaaataagtgttgctgaaattattg

SEQ ID NO: 89414 - DNA, 259 bp, Homo sapiens
tgatggacacgctgggacatgcctgcctcggggcagccccttcggccctgggcttccagaatccgctctgaggagcctcctaggaggggccaaggcacagacacccaggggggcctccccggggctcctgactccaggggtgccgggtagcttaaggggcggccctaaccccagcagccctcaagagacttaaggttgggctgcctggaaactcacaaatagtaaagagctgaaagccggacacggtgtgggagaatgg

SEQ ID NO: 89415 - DNA, 180 bp, Homo sapiens
gtcttccaggaaaaagtctttctcagtccacactctggagactggcattagggaacctgtaccgtgtgccaggcagtgtagaatgtatgacttggaatgacaggctcttgtggttgaagagacactctccacccatgctcctgcccagtgtgggagcctcatccacagccttacagcgtc

SEQ ID NO: 89416 - DNA, 255 bp, Homo sapiens
agagagctttgaaatgttctgggaaaaacgctgatcagatgtgcaaggtattatattcacggagagaaaaaccctcccaactctttataaaatggattaagctagtttctaaaggctgcaggtttgtgtgatcttaatcccactccttactcctgatccaccaccttcctcttttgtttccaggatgtgcaccttcctgggtgagggccgggacgccttccgggggagccctaccccttcccagctctcccctta

SEQ ID NO: 89417 - DNA, 292 bp, Homo sapiens
tggggttcaccttccctgcatcattatcaactgacactaaaactcaaaggtatttatgagataataaaaacagttctaaatagaacacatttacttagagcttcacagtatagctcttaatgactgtgtgtgaaattggagatatttgactatttttcacctattctattgaagatatagcacagattaaaatgaaaattcacaaataccccaaatttcaaaaggcagaaattgaagccataagaaataatccatcaaattagacaactggtccagaaataatcaagagatc

SEQ ID NO: 89418 - DNA, 252 bp, Homo sapiens
aaagatacaaactatcaaactcctgacaagaagaaataggtaaactcaatagccatttataattttttttttgagacggagtctcactctgtcacccaggctggagtgcagtggtgccatctcggctcactacaacctccgcctcctgggttcaagcaattctcctgcctcagcctcccgagtagctgggactacaggcacgtgccaccacacttggctaactttttggatttttagtggagatggggtttc

SEQ ID NO: 89419 - DNA, 280 bp, Homo sapiens
  misc_feature (192)..(192): n is a, c, g, or t
agaccgtcttgcctgctctgttgtcccttctgcttgtgtttgggaaaagtggaagatggggaaggaggatgccctaggtgagctccacagagaagataattagtttaattactctaagatctattgtaaatcactggggagggttttaggagaaatttttggtccttttgcagaggcaggacaagcagaggnaggacaagcagatgcaggacaatcagagtcagcgataatctgatgtaacaatagtcagacgcaagacaggcataggcaagacaagcca

SEQ ID NO: 89420 - DNA, 198 bp, Homo sapiens
ggagcgagactccatctcaaagaaaaaaaaaataaataaaatgaaataataataaaattgagcaagctgagactgaccagctgcctcagccaggctggcaaatccagggctgattggatgggacatttcttcctgtagatgtcatagtcctctggaaactgtaaaaaatcaaataagcgtgaggtgataatattatag

SEQ ID NO: 89421 - DNA, 413 bp, Homo sapiens
ttaaattttaattgcagaactgtaagaaaacaaaaatggtttttaatcctaccacccacagattaacacttgttgaaataatgtcattgtttttaaactttcaattttttagctcagtgagagcatttttaattaactctctttcaaactgaacctagctgcctgtcaatatttgctcctaacaatgccagttagtaaacggactgattgtttctttcatttttattatgagacatttcaaacatatatttaaaacaaaaccagatagaataacataaacgtatcctgcttcattaactatcaaaactcagggctaatcttcttcccgtctgtaaatgagctgctttttgcatatggtacaacaaaaagaatgaggggaggtttgagcctggggaacctgccgtggcagcctg

SEQ ID NO: 89422 - DNA, 410 bp, Homo sapiens
atgttaacctgtatctgcttcttaatacaaatgcttgtatgctaattttagataatattaagtaagtggataaaaatctgaatttcctccttaaaactgtgactcccaataatcatttgcaggtggctaaaagcatattgttgtagtcttatgtttaaaaattacaacaaatgagaataatttagggaatcatcacaaagctgaaaaatcttaaaccatttcaggaactcctttccacctctcaaaatagtcttcaatgacttcccaaaccttaaaaaatggtgactgtccttagcaaaataaggcacaatgtcttcaatgttctcataagcatccacttatcagcaaatacgataaaacttttaaaagtcacccattttttacatgaaattgagaaaattgatttaaat

SEQ ID NO: 89423 - DNA, 379 bp, Homo sapiens
ccgtcacccaggaaggacacctcgtactcattagcagttacctcacacacctcccctccccagccccgacaactgctaatctactttatagctctatgtatttgcctattctgcacatttcatataaatgaaccatacagtatgtggccttttgtagctgactaattttatttagcataatgtttctaatgtccatccgtgtcatagcatgtgtcagtacttcattcttttttgtggttgaataatattccattgtatagctgtcccgcattttgcttagccattcattggttgagagattttttatttaaaatttttgtctatatgttcaaaagttgacttatagttacttcactaggcatttctcctgtttagaata

SEQ ID NO: 89424 - DNA, 379 bp, Homo sapiens
gacttggctcatgccattgtggggctggcaagttcccacagtgcaggtttagctggcaggctggggacttagggaagttgtctttgagtctaaagaccatctgctgggaacattccctctggctcaaggaaggtcagtcttttccttaaggacttcaaatgatgggatgaggcccactcacatcatggaggatactctgctttgctgaaagtctcctgatgtaaattaatccatgaaaaaacacctgcacagaaacatatagaatagtgtttgaccagatgtctgggtactgtggcctagccaaatgaacacctaaaattaaccatcacacaacacaacatttaaaccacgtcctcatacaagtttccttcctctaggg

SEQ ID NO: 89425 - DNA, 137 bp, Homo sapiens
ctggaaatggagaagctgtgttttagcatctggcataaattcagttgcttttctaccatttcaatctgttagcgtatttcttagctatttgtacccattgacattttagataagagctaagagagagttttttccac

SEQ ID NO: 89426 - DNA, 256 bp, Homo sapiens
  misc_feature (4)..(4): n is a, c, g, or t
  misc_feature (6)..(6): n is a, c, g, or t
  misc_feature (10)..(12): n is a, c, g, or t
  misc_feature (17)..(17): n is a, c, g, or t
  misc_feature (21)..(21): n is a, c, g, or t
  misc_feature (24)..(24): n is a, c, g, or t
ggangnaggnnnggaangganganagaaggcatgagttttatattgaggggaagctggaattgaatcctaggtctgacactgactagtgtagggcctttgggaagtttctcaacactctaggtcatcaccttcttcaactacaacctgaaaacaatgatgtgagccttacagggtgcagactgctaaactttttctgttaatggagcccttagtgtctcagtaattgtttaacacacccctatgccaaaaaaaaaa

SEQ ID NO: 89427 - DNA, 355 bp, Homo sapiens
aaacacgttttcactggctataaaaaaggaagtctgagagatgtgctccagctagcctaaaaggaagcaaacacccagattgtgaactgcctatggaggatatgtagcaaggatccatgagtggcttctagatgctgacaggtgtccctgctgacagctagcaggaatgaccacaagaaaggaaattctgccaacagccaatgaacttagaagagaacaccaagcccaaatgacaaccacagccctagatgacccgttaatttcagtctgatgagatcctgagtgaagtatccagtcactctgcttctggacatctacagaagcagtgagacaataaatatgtatattttaagct

SEQ ID NO: 89428 - DNA, 334 bp, Homo sapiens
ggcaagaatagtcaatactaacattgaatgttaatggactaaactctccaatcaaaactgttatggaaagaactgttatggagcagttctccccattcccacccacatcatttttcatcaactctagatgagctaagggcccccaaatgccttaggctgagcatttcttggggtgaggtcccttcttgctcagagcctaaagacaagtagtgatattgtttctgcctgtccagtgtttcctaacaggccttcagtctccagagtggagaatctgcctttgtgtggggtattagtaagaaaatctaggagccacatccaatcctctctcaccctg

SEQ ID NO: 89429 - DNA, 348 bp, Homo sapiens
acattcaaaaggttaaaaaataaatatataattcctccctctatacttttctccttcctcagtgttccctatctcaataaatggcatcactgtctacccagttatccaaggcagaaaactcaggagttatcctttatcctctttcaccctccacctccattcattcactaattcttttcaatgcatgttcttactatttctctccatctttagtgtcattactctaatccgaggcactgtcatctctaccctgagctatagcaacaactcactcacctctttccatgaatttggtcttgccccataattcactctgtgtactacagcacactcatctttttaaaataa

SEQ ID NO: 89430 - DNA, 348 bp, Homo sapiens
aatttataatctgtgtattcagagcattgatgttatagttttgatacctaaatcaccgttttaaaaattcaaagagatatatgaatcctgagtctcggacagttattcctgagccaaaggatttctgtgcaatgctaatatgtataatagagaatcagtctttcactgtacagttttgtcatcatgtttcaataactgaatgaatattctgaattaataagcataacgtttgtataagctaaagactaatctaagctctgcattcattgatgggaaccttaagcaaatgtttcttttcatcagcttgttcaaaaggcataaacataattacagttctgaggcgataac

SEQ ID NO: 89431 - DNA, 224 bp, Homo sapiens
aacttttgcactttgtctaccctgaattccagttactatggcgtaccatgtcttaccttcctggcttgtcttaggattgtatttgggggcctgagttcataattaatatataaacttgtgattttagagataattttgaccggggctaagttttttaaggaaaagaagtgagctgcttggaagaataataagctggcaacagtgtaattgatgcatgggcatgg

SEQ ID NO: 89432 - DNA, 469 bp, Homo sapiens
gctgcacagaggtggaccaggtaaatgagttaagacctctgctgcgagaagctctgcaatgtcagaacactgagtaaaaacaggagctctcacagcttaatagagagagggggaagaaacaaacaccaggtcatccacaaaggaacaaggctgggatagacatcagacttttcctaagtcacactggatcctgaagacaaaggaacagggccttccaagttaatgtctcacacactccagctaaaatgagataaaaccaaggagctagagacatgactgaatagtaaagggccattgcatgacaagagtgaggcagagaccccgggaggtcactggagcacaggaccaagactcacgggggaaaattccaggaggaaagtgagttttgtgcaccagagagtaccatcaaaaggctgggtaaacttcaggacccagtaaagacacaccactcttctttgtttaaaagaaa

SEQ ID NO: 89433 - DNA, 1254 bp, Homo sapiens
cttggttttatattgtttttagatcagtgcttcaacatccaggctgacgtttagccattttggctgctgttctttaatcttcctctagcaggcatgcagtccaaggaatatcaaaattctggttgtattgggaaccaaggttactttcttgtttttggaaaaacaaaatttctacaattacagttcccaaagtcagttattcatgttttcatttaaagttttatccaatattctaggaattttcagcaatactgatattcactttattttttttctttttttaagacagagtcttgctctgtcacccaggctggagtgcagtggcgcgatcttggctcactgcaagctccgcctcctgggttcacgccattctcctgcctcagtctcccaagtacctgggatgacaggcgcctgccaccacgcccggctaatttttaattttttgtatttttagtagagacagggtttcaccatgttagccaggatggtctcgatctcctgacgtcgtgatcagtccgcctcgtcctcccaaagtgctgggattacaggtgtgagccactgcacccgaccgatactcacatttttaaactttttttttaattttattttggtagctaggttttatattgttcttaaatttattttactctattttatttttccatcacttctttgtcccagattcatgaaatttgctgatgtccattttatgtctacttttgaactcttctctttgtgtttgttttgttcttattacaaactccaagacatttcttagaattgtctacagatttcgtgtagctacttattggtagcttcttaatttcatacttgtccagaccattagacattattacatgctctgtcttgggcctatcattaacattagcttagggattctgatttcaaagacataaagaattggcaaaactcttcttacagaacttaaaacaagttttaaagttacatttctatacatctaatacataataccttcttagccattaatgtaattcctctggataaagataatatattcaaaaaatattgggaccaaaaaatgcacttgtttcttgctcatatatatatagatgtatattttttttaatttcttgtttgtttattttggttacattgaatacagatttgctgaacagttttgatgttatttttttaataaaatttgtattgttaaagtgccttggaaatttctaataaataacttcatataaaagctatcatataactatagga

SEQ ID NO: 89434 - DNA, 415 bp, Homo sapiens
cagctttgagctaatctcctcgggcaggtcaaataagggtgtgtaggcacaactcctctaagagcttattttagttactgtcttcttgaattgctttgctggtaggagggttaggcaacacctcttctagtcccctggctgtccttggctggagttagctgatggtagactagtggcagggttgtggatatcccaacaatgccacaaagtccctttctggttgtatctctccatggagccaacataaatgtaaatcagcagaaaagtgtgcagatgagaagatattgtccataaaatacacaccaatggatcatttcagctacaccagaagaaaggaaatgtgttttttctagaggataaaagagaaaagtagccatttaatgagggaataaactacctgaagggtatatacatt

SEQ ID NO: 89435 - DNA, 568 bp, Homo sapiens
ggtagagatggggtttcaccgtgttggccaggctggtctcaaacttctggcctcaagtgattctcctgcctcggcctcccaaagtgctgggattacaggcgtgagtcactgcacccggccaatttattttctccttttctcaacaccaagctcctgcaggaggctcctggctgattttcccatcttcttttccatactacagctagagctatctcagtttcatcaaaatgtcaagttatgacttacctgcttaaaatctccactggttccttcttgcctaaaggcagagtggaagcttagtcctgcaataaagaaccttcccaaattccccagatttgtgaagtaagtttcctactttacaggcttcacctctggcaagttgtgctgctcaacatcctttaaacctggtgttcttgtgcttgtgcccaaacccgtgctgtctcctctgactggagtcataataatagcagtaatagtagatactcatggaccactttccctgtgcctcacagtgtttctgtgcaatctgcatggcttagttcactgaatcctcctgccaactgtgtga

SEQ ID NO: 89436 - DNA, 2681 bp, Homo sapiens
  misc_feature (355)..(355): n is a, c, g, or t
ccacgcgtccgccggctgcacggtcgcaccggcagcggctcaggctccggctcctctcccgctgcagcagccgcgctgccggccccactgggctcggatccggccccggccccctcggcaccgcctgctctggccccggccccggccccgcggaccatgcgctgggcgcccccaggggaaacccgacccggccaagggcccgcaaagacgaggctcccgggccggggcccctcccggccgcccagctctcggccggcgccctgccccgcgtcccggagccgcgtgagcctgcggggccatggagcgcgcgccgcccgacgggccgctgaacgcttcgggggcgctggcgggcgangcggcggcggcgggcggggcgcgcggcttctcggcagcctggaccgcggtgctggccgcgctcatggcgctgctcatcgtggccacggtgctgggcaacgcgctggtcatgctcgccttcgtggccgactcgagcctccgcacccagaacaacttcttcctgctcaacctcgccatctccgacttcctcgtcggcgccttctgcatcccactgtatgtaccctacgtgctgacaggccgctggaccttcggccggggcctctgcaagctgtggctggtagtggactacctgctgtgcacctcctctgccttcaacatcgtgctcatcagctacgaccgcttcctgtcggtcacccgagcggtctcataccgggcccagcagggtgacacgcggcgggcagtgcggaagatgctgctggtgtgggtgctggccttcctgctgtacggaccagccatcctgagctgggagtacctgtccgggggcagctccatccccgagggccactgctatgccgagttcttctacaactggtacttcctcatcacggcttccaccctggagttctttacgcccttcctcagcgtcaccttctttaacctcagcatctacctgaacatccagaggcgcacccgcctccggctggatggggctcgagaggcagccggccccgagccccctcccgaggcccagccctcaccacccccaccgcctggctgctggggctgctggcagaaggggcacggggaggccatgccgctgcacaggtatggggtgggtgaggcggccgtaggcgctgaggccggggaggcgaccctcgggggtggcggtgggggcggctccgtggcttcacccacctccagctccggcagctcctcgaggggcactgagaggccgcgctcactcaagaggggctccaagccgtcggcgtcctcggcctcgctggagaagcgcatgaagatggtgtcccagagcttcacccagcgctttcggctgtctcgggacaggaaagtggccaagtcgctggccgtcatcgtgagcatctttgggctctgctgggccccatacacgctgctgatgatcatccgggccgcctgccatggccactgcgtccctgactactggtacgaaacctccttctggctcctgtgggccaactcggctgtcaaccctgtcctctaccctctgtgccaccacagcttccgccgggccttcaccaagctgctctgcccccagaagctcaaaatccagccccacagctccctggagcactgctggaagtgagtggcccaccagagcctccctcagccacgcctctctcagcccaggtctcctgggcatctggccctgctgccccctacccggctcgttcccccaggggtgagccccgccgtgtctgtggccctctcttaatgccacggcagccaccctgccatggaggcgccttcctgggttggccagagggcccctcactggctggactggaggctgggtggccggccctgccccccacattctggctccaccgggagggacagtctggaggtcccagacatgctgcccaccccctgctggtgcccacccttcgcagttactggttggtgttcttcccaaagcaagcacctgggtgtgctccaggcttcctgccctagcagtttgcctctgcacgtgcacacacctgcacacccctgcacacacctgcacaccgtccctctccccggacaagcccaggacactgcctttgctgccttctgtctcttgcataagcctcaggcctggccctttcacccctcttcccaccaactctctctgcccccaaaagtgtcaaggggccctaggaacctcgaagctgttctctgcttttccattctgggtgttttcagaaagatgaagaagaaaacatgtctgtgaacttgatgttcctgggatgtttaatcaagagagacaaaattgctgaggagctcagggctggattggcaggtgtgggctcccacgccctcctccctccgctaaggcttccggctgagctgtgccagctgcttctgcccaccccgcctctgggctcacaccagccctggtggccaagcctgccccggccactctgtttgctcacccaggacctctgggggttgttgggaggagggggcccggctgggcccgagggtcccaaggcgtgcaggggcggtccagaggaggtgcccgggcaggggccgcttcgccatgtgctgtgcacccgtgccacgcgctctgcatgctcctctgcctgtgcccgctgcgctgccctgcaaaccgtgaggtcacaataaagtgtatttttttattggtgctg

SEQ ID NO: 89437 - DNA, 2050 bp, Homo sapiens
  misc_feature (327)..(327): n is a, c, g, or t
agagatgtagggcgccccttttagctgcgcacagaacgaaagaactcgttttttctttaagtgagtgtgcttgggtgacgcttagggcgccctccgcagtgcgcgcaggaaagcgcactgaggctgcggaggcagagctgcatgctgggtgcgggaagaggtgggctccgtcgcggagtcgctgagtccgtgcccttttagttagttctgcagtctagtatggtccccatttgcccttccagtcccggagccgcgtgagcctgcggggccatggagcgcgcgccgcccgacgggccgctgaacgcttcgggggcgctggcgggcgangcggcggcggcgggcggggcgcgcggcttctcggcagcctggaccgcggtgctggccgcgctcatggcgctgctcatcgtggccacggtgctgggcaacgcgctggtcatgctcgccttcgtggccgactcgagcctccgcacccagaacaacttcttcctgctcaacctcgccatctccgacttcctcgtcggcgccttctgcatcccactgtatgtaccctacgtgctgacaggccgctggaccttcggccggggcctctgcaagctgtggctggtagtggactacctgctgtgcacctcctctgccttcaacatcgtgctcatcagctacgaccgcttcctgtcggtcacccgagcggtctcataccgggcccagcagggtgacacgcggcgggcagtgcggaagatgctgctggtgtgggtgctggccttcctgctgtacggaccagccatcctgagctgggagtacctgtccgggggcagctccatccccgagggccactgctatgccgagttcttctacaactggtacttcctcatcacggcttccaccctggagttctttacgcccttcctcagcgtcaccttctttaacctcagcatctacctgaacatccagaggcgcacccgcctccggctggatggggctcgagaggcagccggccccgagccccctcccgaggcccagccctcaccacccccaccgcctggctgctggggctgctggcagaaggggcacggggaggccatgccgctgcacaggtatggggtgggtgaggcggccgtaggcgctgaggccggggaggcgaccctcgggggtggcggtgggggcggctccgtggcttcacccacctccagctccggcagctcctcgaggggcactgagaggccgcgctcactcaagaggggctccaagccgtcggcgtcctcggcctcgctggagaagcgcatgaagatggtgtcccagagcttcacccagcgctttcggctgtctcgggacaggaaagtggccaagtcgctggccgtcatcgtgagcatctttgggctctgctgggccccatacacgctgctgatgatcatccgggccgcctgccatggccactgcgtccctgactactggtacgaaacctccttctggctcctgtgggccaactcggctgtcaaccctgtcctctaccctctgtgccaccacagcttccgccgggccttcaccaagctgctctgcccccagaagctcaaaatccagccccacagctccctggagcactgctggaaaaagatgaagaagaaaacatgtctgtgaacttgatgttcctgggatgtttaatcaagagagacaaaattgctgaggagctcagggctggattggcaggtgtgggctcccacgccctcctccctccgctaaggcttccggctgagctgtgccagctgcttctgcccaccccgcctctgggctcacaccagccctggtggccaagcctgccccggccactctgtttgctcacccaggacctctgggggttgttgggaggagggggcccggctgggcccgagggtcccaaggcgtgcaggggcggtccagaggaggtgcccgggcaggggccgcttcgccatgtgctgtgcacccgtgccacgcgctctgcatgctcctctgcctgtgcccgctgcgctgccctgcaaaccgtgaggtcacaataaagtgtatttttttattggtgctg

SEQ ID NO: 89438 - DNA, 2413 bp, Homo sapiens
  misc_feature (327)..(327): n is a, c, g, or t
agagatgtagggcgccccttttagctgcgcacagaacgaaagaactcgttttttctttaagtgagtgtgcttgggtgacgcttagggcgccctccgcagtgcgcgcaggaaagcgcactgaggctgcggaggcagagctgcatgctgggtgcgggaagaggtgggctccgtcgcggagtcgctgagtccgtgcccttttagttagttctgcagtctagtatggtccccatttgcccttccagtcccggagccgcgtgagcctgcggggccatggagcgcgcgccgcccgacgggccgctgaacgcttcgggggcgctggcgggcgangcggcggcggcgggcggggcgcgcggcttctcggcagcctggaccgcggtgctggccgcgctcatggcgctgctcatcgtggccacggtgctgggcaacgcgctggtcatgctcgccttcgtggccgactcgagcctccgcacccagaacaacttcttcctgctcaacctcgccatctccgacttcctcgtcggcgccttctgcatcccactgtatgtaccctacgtgctgacaggccgctggaccttcggccggggcctctgcaagctgtggctggtagtggactacctgctgtgcacctcctctgccttcaacatcgtgctcatcagctacgaccgcttcctgtcggtcacccgagcggtctcataccgggcccagcagggtgacacgcggcgggcagtgcggaagatgctgctggtgtgggtgctggccttcctgctgtacggaccagccatcctgagctgggagtacctgtccgggggcagctccatccccgagggccactgctatgccgagttcttctacaactggtacttcctcatcacggcttccaccctggagttctttacgcccttcctcagcgtcaccttctttaacctcagcatctacctgaacatccagaggcgcacccgcctccggctggatggggctcgagaggcagccggccccgagccccctcccgaggcccagccctcaccacccccaccgcctggctgctggggctgctggcagaaggggcacggggaggccatgccgctgcacaggaaagtggccaagtcgctggccgtcatcgtgagcatctttgggctctgctgggccccatacacgctgctgatgatcatccgggccgcctgccatggccactgcgtccctgactactggtacgaaacctccttctggctcctgtgggccaactcggctgtcaaccctgtcctctaccctctgtgccaccacagcttccgccgggccttcaccaagctgctctgcccccagaagctcaaaatccagccccacagctccctggagcactgctggaagtgagtggcccaccagagcctccctcagccacgcctctctcagcccaggtctcctgggcatctggccctgctgccccctacccggctcgttcccccaggggtgagccccgccgtgtctgtggccctctcttaatgccacggcagccaccctgccatggaggcgccttcctgggttggccagagggcccctcactggctggactggaggctgggtggccggccctgccccccacattctggctccaccgggagggacagtctggaggtcccagacatgctgcccaccccctgctggtgcccacccttcgcagttactggttggtgttcttcccaaagcaagcacctgggtgtgctccaggcttcctgccctagcagtttgcctctgcacgtgcacacacctgcacacccctgcacacacctgcacaccgtccctctccccggacaagcccaggacactgcctttgctgccttctgtctcttgcataagcctcaggcctggccctttcacccctcttcccaccaactctctctgcccccaaaagtgtcaaggggccctaggaacctcgaagctgttctctgcttttccattctgggtgttttcagaaagatgaagaagaaaacatgtctgtgaacttgatgttcctgggatgtttaatcaagagagacaaaattgctgaggagctcagggctggattggcaggtgtgggctcccacgccctcctccctccgctaaggcttccggctgagctgtgccagctgcttctgcccaccccgcctctgggctcacaccagccctggtggccaagcctgccccggccactctgtttgctcacccaggacctctgggggttgttgggaggagggggcccggctgggcccgagggtcccaaggcgtgcaggggcggtccagaggaggtgcccgggcaggggccgcttcgccatgtgctgtgcacccgtgccacgcgctctgcatgctcctctgcctgtgcccgctgcgctgccctgcaaaccgtgaggtcacaataaagtgtatttttttattggtgctg

SEQ ID NO: 89439 - DNA, 358 bp, Homo sapiens
ttgaagcattctttgaaattttctgtacatttgaaaagcaaaaatctggaaaaaaggaaatatacaactgaaagaagagttcattaaaaacagaaaataacaacataaaagaataattagaatcacttaagatgaattttaagaaggctttagtttactacttaagaagccaaaaataaattcagttctttaaagagttgatattgcctatcaatttttcatacagacctcctctcctagagttataaaatatttcttcctactgataataggtactgctctcagaacagccgaatcagtcagcttaattattcaattatggattcctttcatggagcatgtaacacctccctttatt

SEQ ID NO: 89440 - DNA, 413 bp, Homo sapiens
atggggtttcaccatgttgaccaggctgatcttgaactcctgacctcaagtgatccacctgccttggcctcccaaagtgctgggattacaggtgtgagccaccacatctgacctacttgaaaattcttaaatggtgccttatactttctggtaataaaagcactattttaatgttcggaactattttcattatttgctaaccttacaattaaaaaatccttttatatttatctttggatagatatgaggggacctcaaaaagtttgtggaaaaatggaattaaaagataaaaatacaaaatataaactttattctcaatataagctctatcgagttcaagaaaattttgtaagcaataatgctagccatttagtccactcctaaagaagtcctgtaaccatatcagtatgtgc

SEQ ID NO: 89441 - DNA, 426 bp, Homo sapiens
ccaggctggagtgcagtggcgcaatttcggctcactgtaacttctacctcccgggttgaagtgattctccttcctcaacctcctgagtagctggattacaagtgtgcgccaccaggcccagctactttttgtattttttttagtagagatggggtttcaccacgttggtcaggctggtctcgaactcctgacctcgtgatccgccagcctcggcctcccaaagtgccgggattacaggcgtgagccaggcgtgagccaccacaccccagccacctcctactatcttaacagagagttggctaactataaactccagtggggcacagtaaactgtgcctgctgtagtcagccagaaaaatattgctaaataagcaatttgtaaatcaaataaaatcacgaatgaaaaaaactcagaggttaattcat

SEQ ID NO: 89442 - DNA, 441 bp, Homo sapiens
gcttgaagagcagacacatttgtgcagctatcccctttgttttatgatgtaaatcttgtttttaggatgagtgcttatggggcattgttgaggggtattacaattgccatctgcacccaaatagcccagatactgaattgccttaagatgccttagactttcaccattttaatcatttatttcattaatgttatctacctaaacccttatttttatttatttatttatttatttatttatttatttatttatttatttattttgagacagggtctctgctgctcatgctggagtgcagtggtgcgatcatggctcactgcagctttgactccctgggctcaagcgatcctcccacctcagactcctgcatagctgggaccacaggcacgtgccaccatgcctggctaatttttgtattttttgtagagatgaggttttgcc

SEQ ID NO: 89443 - DNA, 231 bp, Homo sapiens
tcccagttccagttaagtccccagattaaaccaagggcttcacagaccaatcaccaagtattgcttgttgaaggaggtccaaaggagggctcagactagatgggaacagtctggaatcagaaataatctgaggctgggcgcagtggctcacgcctgtaatcctagcactttgcatggccaaggcaggaggatcgcttgagtccaggatttcgagaccagcctgggcaacat

SEQ ID NO: 89444 - DNA, 190 bp, Homo sapiens
cctctgacttccaacctctcctccatcctcctcactcccagcttgtgcccgttttccccttcactgagaaaaaagaagcttccgaagaacttccagagcctcccaccacaccctctgcctgccagcagctgatcccgttcctccagatgagctatctgtgttcccgactacagccagccgtgcctccgtg

SEQ ID NO: 89445 - DNA, 313 bp, Homo sapiens
ccgcctacttctgaaagacacaggtcactgtcagaaagcccaactgtgctgtggccttccctccagccgcccccgtggggcatgtggggtgacagtgtgagccgtcctctgatgtctggctgctagagaggcaaagaacagagacccgaggttccggccacctttctctatgaaagggccttccttgacgcttctccaccttcctgggattgttttcttctccagtccccgaatgggcaggcctgtatataagccttgtttctagaaccagacaaagctggatttgaaacctggcgagccattgaacagctat

SEQ ID NO: 89446 - DNA, 480 bp, Homo sapiens
tcaaataagcaggttggcagagtcttcactaagcagcatggtgatctacaccacttgtatttaatgaaacattcattcagtcatatcagataggagagtttaattttgggccaatatttgtttttttaaatgttgtgctagtaatatagtaaaaccatggcatattagaaaagtattcttttggaaagttaattatagtttctttgaatacaaaatgaccttcttcaaatgccttcattatagctgaaggtaaatgatatgtacatacgtgactgtttcttgttactcttgtaagagagagtattaacaaataggaaaaatgaaagaacttaaggcccaaggaaaagcaccatgcttatggtaatagggtgatgaatcacgtggctaggctgactccttctctgttgtcatcctagcctatcaatcatcatcctacatttctgaccccttcctacttaaatactgaattttgcatttgcc

SEQ ID NO: 89447 - DNA, 1065 bp, Homo sapiens
ttttttgagatgcagtctcactctgttgcccaggctggagtgcagtggtgagaccccggctcactgcaacctctgcctcccaggttcaagcaattctcctgcttcaccttccccagtagctgggattacaggtgcacaccaccaagcctgactaatttttgtattttagtagagacagggtttcaccgtgttgcccaggctagtttcgaactcctgagctcaggcaatccgcccgcctcagcctcccaaagtgctgggattacaggtgtgtgccaccgtgcctggcccaattctgcatttttaacaactcccaagtaatttagctggcctatggaccacactttgagtttagcaaggcaagcttttttatatacacgctaggacaagctcctccttgagaaaattgaaaattggaggggagtacatatcagcttttttatttgtaaaacatgatgatggagcagaaacaagtaatttgttgccttcaaaaaccagattgggagaggaaatgtcccatacctgcaggatcatggattttaaaattgagggggctgattctaagagcaaaataaagatagagagaagtaagtgtatgtgggaggagaaaggggtggtgaccgtatggagaaagagaatatgaatcagtgatgtaaaggaaaaagttccataaaaataattattaaaaacataaggcccatcatttagcaagtaatgacagttggatggaaagagagtaaggcttagggaagggaaaatgtgccagaacaggacctcacaacccaaaattactctaccaaatgagagatgtaccttaagcaaaagggaaagatgcctgggttctgtagaaagacttttcagcacagtgttaaaatcttttttttttttggagtcgaggttttgctcttgttgcccaggttggagtgcaatggcgcgatcttggctcactgcaacctccgcctcctgggttcaagcaattctcctgcctcagcctcccatgcaccaccatgcccagctaatttttgtattattaatagagatgtggtttcaccacgttagccaggctgg

SEQ ID NO: 89448 - DNA, 502 bp, Homo sapiens
gacacatgacaacacacactggagagaagccctataaatgtcagcactgtgggaaagccttcacttacccccaggcttttcaaagacatgagaagacgcacacgggagagaagccctatgaatgcaagcagtgtgggaaaacattcagttggtctgaaaccttgcgagtccacatgaggatccacactggggacaaactctataaatgtgaacactgtgggaaggcttttacctcttccagatcattccaaggtcatttgaggacgcacactggagagaaaccttatgagtgtaaacaatgtgggaaagccttcacttggtcctcaacgtttagagaacatgtgagaattcacacgcaagagcagctctataaatgtgaacaatgtgggaaggcttttacctcttccagatcattccgaggtcatttgaggacgcacactggagagaagccttatgagtgtaaacaatgtggaaaaaccttcacttggtcctcaacgtttag

SEQ ID NO: 89449 - DNA, 455 bp, Homo sapiens
  misc_feature (217)..(217): n is a, c, g, or t
gttttatgaagtagttagttttcaaagtacatcttttcatgatatatttcatacactgactttaaatttgtgtatactacaagaaaaactctccctcaaattttaggagaatgcataagtaattattaaaggctttctttcttactttactcaggaatgcaaatttatatcctttacttgtctggaggtgagtgaaactgaaaagcaggtggagggnctgaactgttacacaattccaagggccaccattaacactgtactctacatttgtattccaggaggcaccattcacacagaatataatatgaatactgccacctaaatctgtagaactcaaaagaactgtggagagaaaataaaacttaccataaacttctgtcagtgaacctagcagctaaaaaatatttcttctaaaaataaatacaagatagtcaaccataagtaagtagatttgg

SEQ ID NO: 89450 - DNA, 570 bp, Homo sapiens
gcagcattctttcctggttttaataaaggaagataactatacttcattgatcaattaatatgggtgaagccctttgcattacatttattgtactacaattatctttttccaatctcccctttcctgattttaagatccttgcagaaagggggagcacatttttgttgaaggaatgaataattagaagaatgattactctgaactagccacattcacttggattattcccttcctaaaacatgattataagtcaacaaaacagctggcccgagttaaaagtttcctagagcctttttttctgtacaattccagtaaactcacataggaggaacgcatgatgtcagcctcttcgttttccttttttttttaatttttattttactttaacttctgggatacatgtgcagaatgtgcaggtttgttacataggtatacatgcgtcatagtggtttgctccacctatcaatccattatctagagtttaggccccacatgtgttaggtatttctcctaatgctatacctcctgtagcccccaagcccccgataggcccgggtgtgtgatgttccc

SEQ ID NO: 89451 - DNA, 322 bp, Homo sapiens
tttccagcttcctcccattcatcacccccaaacaatttgaatgggcttaacacacattgagagtgattatttttatgcgttgaaatttaaagagatctcttggttccttagaaagttgaggtaatcacctttaagggcacaggaatgtaatcagtcattagcttgtaactgaccctcttgcagtgggtttgtatgtgtcatgttcccaagagaggctagtgtcctctagtaactctcagctctttgaaaataacaggggggccaggcatggtggctcacgcctgtaattccagcactttgggaggccgaggcgggtggagca

SEQ ID NO: 89452 - DNA, 374 bp, Homo sapiens
tgacatgacacttttaagctaggtgactttgagtgagttatttagtttaagtgtctctttctttgttttttaaaaaagatggtttccatatggttgtcataaggataaagataaataattggtataataaagcacataaagtgcacatgagttggaggtatcaagtaaacagtaaggctcactgtagcacatctggcccagcagcccacagatccagatgctgcacactcctgggtgctcacactgtttttcctggcacacaaaacagagtaagcatctctttgggttccttccaacattttactcatacaaaagatagtggacaagagagactactaagggtttcattagggtgcttaaatcatatatctcac

SEQ ID NO: 89453 - DNA, 336 bp, Homo sapiens
gtatttggagacgggacctttggaaatgctttgattaggaagaaggagctttcatgaacgggattagtgcccttataaaagaggacgcagagagctctctcacaccttccactgtctgaggacacagggagaaggccctgtctatgaaccaggaaatgatccccaaccaggacaccttgatcttggactgcccagatgctccagatctgtgagaagcaaatttctgtgctttataagctatccaatgtatggaattttggtacagcagccccaacagactaagatattaataaaataaagatataagatctctgttgaaatgcacaaataatatct

SEQ ID NO: 89454 - DNA, 632 bp, Homo sapiens
catgatacgaatcgagctcggaccggaaaggtagctgtactgagatactttggttttacatttgtttagctgagtatcaaattttgctgcctcttagctctcatgtcatatacacaatgtctctttaaacaagagaatgcaacagttatttttccttttgactattaaactgaataaccagagttatagcagggtagaagagaatgtagaacttctcaccttttactttcttagtgcctgtgaaagtgctaggtttcacagagttattttgttgaggtatgtcatagtgaaacaatggagaatgcaaatgcaaatacattaaaatttttagccagtaaaaccttgtttttaaactccaaaaagagaccatctctatcctgaataattgttgatatttcaagaaaatgattattgtctgaaatagtttttttattggagacctagtttattttacaagcatctatctctgcaacttttattctagttaaaagaaaaacttgaggccaggcgtggtggttcacacctgtaatgccagcactttgggaggctgggatgggtggatcgcttgaggtcaggagtttgagaccagcctggccaacatgtcaaacgccgcctctactaaaaatacaaaa

SEQ ID NO: 89455 - DNA, 505 bp, Homo sapiens
gccaagatcacaccgctgtactccaccctggatgacagagtgagaatctgtctcaaaaaaaaacaaaaaacctccaaactcacacaatcacgacgaactcatcacaccttctctgccaagaatatacagtcctctattattcgtctaaattctaatcatcctttagatctcaaaaataacttttcccagaaaacattcattgaaccttcaaatatgatagattgtattagtttctaactattcacctcctttccataagaggatttttacatctccacccactgccatgtggcttgtctacaaggtccctgaagaggaatgtacctcccctcttcattaacatcaagcttgaccccgtgactggtttcgaccaatagatgtgagcagatgtaatatatgtcacttcccggaagaggcttaaagtcatgatgtcttctagctctttctttgtgccactagcaaactagcaagcaagacatgtcacacacagggtctgcccctccag

SEQ ID NO: 89456 - DNA, 169 bp, Homo sapiens
acaaaacatgaaaacaaattccacatttccagctattcttgagaaattagagatctggccatgctgagcccttgttcctgcatagtaacgatttgctggagctgcatgatgaccaccccctttactgtccagtttatccaagatcctgcttcttgtcttattttgggcc

SEQ ID NO: 89457 - DNA, 259 bp, Homo sapiens
atgctccatttcatgtttcaattacctctgccatctccatgtcttccagactaatgaatatgtccagcatggaaacgattaattttgttagctactttatcctcatgggctttccctcaagcccagaaatgcagctcctctactttggtctcttctcattagcctatactctcaccctgatgggaaatgcatccattgtctgtgctgtgtggtgggaccagcaccttcacactcccatgtacaccctcttgggaaattt

SEQ ID NO: 89458 - DNA, 364 bp, Homo sapiens
tcaaaggacagtgactaaacctctgaagagggctggaagcagcaggtgcctcccagcagcccactttctgtggcctccataaagtggttcacaactgcctgtacttgatgtccactgttcactcacgcatgtcatgggatccaaataccacggtttctctcccttgcccctttctcttgttgtatcccctgctctcatttcacttctatcacttctgtcaatttctttttattttctccttattagttttcctcttatctttcttgcagaggtaccatttgtagttcctcagattccatttgttcattgctagtttatgcttcttttcctcaaaatcatctttttttctcgcttgtcaaataca

SEQ ID NO: 89459 - DNA, 892 bp, Homo sapiens
ctcaggcttctggaagaactggtcccaggaattggaaagccatcagcaatcctgagggtcctttctgtttatgtctttctttctgcaaagcttttactcatctttcttactaactggctttctctgccactctgtcggtagagggtggcctcccacagccctaaactatgcagccaagttctagccaaatggaaagcctgtctttccatctcaattctaaattctctaagacttgggctaggcttgggttagatgtctatccctggactagtcagctgtggccaggagcggagacatgctgcacatatctgtctgcctctgctcacctccgaaaagtaggtgggaagatagaaaaaggggtagggaggcagcagacagagagacagacagcagagagacattgtaaggctggcagacaccttataaatatctaatatggtgagtctccataaactactacccttaaactatatcataggatcacttctaggttattttgttaaaaaaagtcagtcctaggtgaaacttaaaaaatttaactttaaaaagacgatatcttttaaaatatgcatataatttgagactcttaaggtaacgggatattcactatagttagtaagtcttagctttgtgtgtatatatgatttttatgcatgacactctttaattgctgggaggttctagcagctctgtccagcagaaatacaagataagccacatttgtaatttaaggttttctagtagccacattgaaaaagtaaaatgaaaaaggtgaatttaattttaatgtattttatttaaccccagtttcccagatataatcgttatatgaatataaaattaatgaaatgttttacattcttttaaaaacctttgaaatatggtatgtatt

SEQ ID NO: 89460 - DNA, 823 bp, Homo sapiens
cggctcaccacaacctccacctcccaggttcaagcaattctgcctcagcctcccgagtagctgagattacagcatgcgccaccacgcccggctaattttgtgtttttagtagagtgagggtttctccatgttggtcaggttggtcttgaacttccgacctcagttgatctgcccgccttggcctcccaaagtactgggattacaggcataagccaccgcacctggcctggttgcccattctttatggtcgtttcttgatgatatgctaaccaaggagtggattaatcatgcctcccctttttggaccacatagggtctaaactgtcatggcacatttgtaaactgtcatggcactggtgggagtgtagcagtgaggacgaccagaggtcactctcgtcgccattttggttttggtgggttttggccagctcctttactgcaacctgttttatcagcaaggtctttaagacctgtattttgtgctgacctcctatctcatcctgtgacttagaatgccttaactgaccatctgggaatgcagcccaatagatttcaccctcattttgcccggctcctgtttaagatggagttgctctggttcacatgcctctaacaaatccttttagtttttcatgcttgtcacatgtttacttctaagggtataatcatgtggtttactatattattaccgattagattattttgaactacttcaattttatttattttacctcatttccattcacattttttgaaaagagcttttttatacaagagtgtaaatattttcacattgaataaatgaattgaaaacagtaaaaat

SEQ ID NO: 89461 - DNA, 1082 bp, Homo sapiens
gccgagaggccaggcctgtgcctcccaaaacctgctcctccgcaggcttccccggcccatctccagagcgccctcctctcaccactttacataaacgaatgtacccaagatcccccatcagttttccatgcagctgccagagtgccaccaaagcaaacctcatctcaagactctgtggccaggccctcacaacctcctgccaggctctcgctacctacccatcaacagcaagactcccaggccatctcaatccccccaaagagccctgttcctccagccccacggcttctgttcacctgccgtgctgtccccgcctctgcccacccactcatcctgcagatctggagcagcattccagggcctgcccatcacctcttcatgaccactgcctgccaggaggctaactacggtgccctcctccgggagctctgcctcacccagttccaggtagacatggaggccgtcggggagacgctgtggtgtgactggggcaggaccatcaggagctacagggagctggccgactgcacctggcacatggcggagaagctgggctgcttctggcccaatgcagaggtggacaggttcttcctggcagtgcatggccgctacttcaggagctgccccatctcaggcagggccgtgcgggacccgcccggcagcatcctctaccccttcatcgtggtccccatcacggtgaccctgctggtgacggcactggtggtctggcagagcaagcgcactgagggcattgtgtaggcggggcccaggctgcccgcgggtgcacccaggctgcagggtgaggccaggcaggcctgggtaggggcagcttctggagccttgggacagagcaggcccacaatgccccccttcttccagccaagaagagctcacaggagtccagagtagccgaggctctggtattaacctggaagcccccctggctggaggccaccgccaccctaggaagggggcagggacgtgaccttgacttacctctggaaagggtcccagcctagactgcttaccccatagccacatttgtggatgagtggtttgtgattaaaagggatgttcttgaa

SEQ ID NO: 89462 - DNA, 902 bp, Homo sapiens
gcggccgccgcctcccaccgctcccgcgcccgctcccgcccccggcgcgtctcctccgggcccgcgccgcggcgggctcagtcctcagcggggcgcgtggcgagcggactcgactcggcaccgctgtgcaccatggcccgggccctgtgccgcctcccgcggcgcggcctctggctgctcctggcccatcacctcttcatgaccactgcctgccaggaggctaactacggtgccctcctccgggagctctgcctcacccagttccaggtagacatggaggccgtcggggagacgctgtggtgtgactggggcaggaccatcaggagctacagggagctggccgactgcacctggcacatggcggagaagctgggctgcttctggcccaatgcagaggtggacaggttcttcctggcagtgcatggccgctacttcaggagctgccccatctcaggcagggccgtgcgggacccgcccggcagcatcctctaccccttcatcgtggtccccatcacggtgaccctgctggtgacggcactggtggtctggcagagcaagcgcactgagggcattgtgtaggcggggcccaggctgcccgcgggtgcacccaggctgcagggtgaggccaggcaggcctgggtaggggcagcttctggagccttgggacagagcaggcccacaatgccccccttcttccagccaagaagagctcacaggagtccagagtagccgaggctctggtattaacctggaagcccccctggctggaggccaccgccaccctaggaagggggcagggacgtgaccttgacttacctctggaaagggtcccagcctagactgcttaccccatagccacatttgtggatgagtggtttgtgattaaaagggatgttcttgaa

SEQ ID NO: 89463 - DNA, 1390 bp, Homo sapiens
  misc_feature (950)..(950): n is a, c, g, or t
gcggccgccgcctcccaccgctcccgcgcccgctcccgcccccggcgcgtctcctccgggcccgcgccgcggcgggctcagtcctcagcggggcgcgtggcgagcggactcgactcggcaccgctgtgcaccatggcccgggccctgtgccgcctcccgcggcgcggcctctggctgctcctggcccatcacctcttcatgaccactgcctgccaggaggctaactacggtgccctcctccgggagctctgcctcacccagttccaggtagacatggaggccgtcggggagacgctgtggtgtgactggggcaggaccatcaggagctacagggagctggccgactgcacctggcacatggcggagaagctgggctgcttctggcccaatgcagaggtggacaggttcttcctggcagtgcatggccgctacttcaggagctgccccatctcaggcagggccgtgcgggacccgcccggcagcatcctctaccccttcatcgtggtccccatcacggtgaccctgctggtgacggcactggtggtctggcagagcaagcgcactgagggcattgtgtaggcggggcccaggctgcccgcgggtgcacccaggctgcagggtgaggccaggcaggcctgggtaggggcagcttctggagccttgggacagagcaggcccacaatgccccccttcttccagccaagaagagctcacaggagtccagagtagccgaggctctggtattaacctggaagcccccctggctggaggccaccgccaccctaggaagggggcagggacgtgaccttgacttacctctggaaagggtcccagcctagactgcttaccccatagccacatttgtggatgagtggtttgtgattaaaagggatgttcttgaaaaaaaaaaaaaaaaaaaaaaaaaaaaaaaaaaaaaaaaaaaaaaacanaaagaaaaagaaaaaaaaaaaaaaaagcgacagaagacccaaccaacgacacacacacgggaccaccacaaaacgagcaacacaggagcgagacacaggaacagcaaaacacaaacaacacaaaagaacagcaaagaaaaacacaaagaagaaacaaagaacaacagaagagaagaaaaacgcacgaaaaaacacaaaaaaagacaaaaaaaaagacaccaagacgcgacgaagaaaacacagcacacgcggcagacctctgtgtcttctctacaaagaagagcaggaaaaaaagaagacagcaaaagcagaaagagaacacaagacacagacgaaggaggcacgcaggaaggagagcacaagcagccaacgccacacgcggcagaggagaacgaacaaaagaacagaaaggacacgaagacacgcaccgcgggcgggta

SEQ ID NO: 89464 - DNA, 963 bp, Homo sapiens
gcggccgccgcctcccaccgctcccgcgcccgctcccgcccccggcgcgtctcctccgggcccgcgccgcggcgggctcagtcctcagcggggcgcgtggcgagcggactcgactcggcaccgctgtgcaccatggcccgggccctgtgccgcctcccgcggcgcggcctctggctgctcctgggcaggatagcctgaggcacgcttgcttcactcccaggcagaatggccactgagaaatccggcccatcacctcttcatgaccactgcctgccaggaggctaactacggtgccctcctccgggagctctgcctcacccagttccaggtagacatggaggccgtcggggagacgctgtggtgtgactggggcaggaccatcaggagctacagggagctggccgactgcacctggcacatggcggagaagctgggctgcttctggcccaatgcagaggtggacaggttcttcctggcagtgcatggccgctacttcaggagctgccccatctcaggcagggccgtgcgggacccgcccggcagcatcctctaccccttcatcgtggtccccatcacggtgaccctgctggtgacggcactggtggtctggcagagcaagcgcactgagggcattgtgtaggcggggcccaggctgcccgcgggtgcacccaggctgcagggtgaggccaggcaggcctgggtaggggcagcttctggagccttgggacagagcaggcccacaatgccccccttcttccagccaagaagagctcacaggagtccagagtagccgaggctctggtattaacctggaagcccccctggctggaggccaccgccaccctaggaagggggcagggacgtgaccttgacttacctctggaaagggtcccagcctagactgcttaccccatagccacatttgtggatgagtggtttgtgattaaaagggatgttcttgaa

SEQ ID NO: 89465 - DNA, 680 bp, Homo sapiens
gcggccgccgcctcccaccgctcccgcgcccgctcccgcccccggcgcgtctcctccgggcccgcgccgcggcgggctcagtcctcagcggggcgcgtggcgagcggactcgactcggcaccgctgtgcaccatggcccgggccctgtgccgcctcccgcggcgcggcctctggctgctcctggcccatcacctcttcatgaccactgcctgccaggaggctaactacggtgccctcctccgggagctctgcctcacccagttccaggtagacatggaggccgtcggggagacgctgtggtgtgactggggcaggaccatcaggagctacagggagctggccgactgcacctggcacatggcggagaagctgggctgcttctggcccaatgcagaggtggacaggttcttcctggcagtgcatggcccttctggagccttgggacagagcaggcccacaatgccccccttcttccagccaagaagagctcacaggagtccagagtagccgaggctctggtattaacctggaagcccccctggctggaggccaccgccaccctaggaagggggcagggacgtgaccttgacttacctctggaaagggtcccagcctagactgcttaccccatagccacatttgtggatgagtggtttgtgattaaaagggatgttcttgaa

SEQ ID NO: 89466 - DNA, 746 bp, Homo sapiens
ggagagcgggcattctggaaagcgtgggcccatcacctcttcatgaccactgcctgccaggaggctaactacggtgccctcctccgggagctctgcctcacccagttccaggtagacatggaggccgtcggggagacgctgtggtgtgactggggcaggaccatcaggagctacagggagctggccgactgcacctggcacatggcggagaagctgggctgcttctggcccaatgcagaggtggacaggttcttcctggcagtgcatggccgctacttcaggagctgccccatctcaggcagggccgtgcgggacccgcccggcagcatcctctaccccttcatcgtggtccccatcacggtgaccctgctggtgacggcactggtggtctggcagagcaagcgcactgagggcattgtgtaggcggggcccaggctgcccgcgggtgcacccaggctgcagggtgaggccaggcaggcctgggtaggggcagcttctggagccttgggacagagcaggcccacaatgccccccttcttccagccaagaagagctcacaggagtccagagtagccgaggctctggtattaacctggaagcccccctggctggaggccaccgccaccctaggaagggggcagggacgtgaccttgacttacctctggaaagggtcccagcctagactgcttaccccatagccacatttgtggatgagtggtttgtgattaaaagggatgttcttgaa

SEQ ID NO: 89467 - DNA, 388 bp, Homo sapiens
gtggaggttgcagtgaaccgagattgcgctactgcattccagactggatgacagagtgagaccccgtttcaattaaaaaaaaaatctggaagtatgagtcctccaattgtgttgttctttttcaaattgtcttagctattggggatgtctcacaagtccacattaatttgaggattggcttttccatttctatgaataaagctattataattttgatagggattgtattgaatttgtagattgctttgaggagtattgtaatttgacaattttaagtctttcaacccatgaactggaatgccttgccatttatttaggtcttcttcagtttctttcagcaacgttttttagtttttgtataaatcttgcattttttggctaaatttat

SEQ ID NO: 89468 - DNA, 312 bp, Homo sapiens
tggaaaatctgttagatgggtttacagtttttatatgttcatgacaaattgacctttttattattataaaatcattgtcttagtccttagtaactttttttgcttttgaagtctattttgtttcacgttagtaaaaccatttaaagcctcttcttagaatggtatatcttttactgtcaacccatttttttatctttgaatacaaagtgtgtcccttctagactgcatatagcttgaacttgcttgtcacagtctgtgcccttttattggaatatttaacttatttatattttattttattttttgagatgg

SEQ ID NO: 89469 - DNA, 321 bp, Homo sapiens
tagatatgatggctggagctgcaatagctaacttgcaactatgaggaactataggactttggtcttaacattcctgagctcctgaatcaatactttaactaccttctatgagacttcttgtcacatgagaaaaattaagccccaaattaaacccctgccttttactgtaactctcaattgagcataattcctaaatgatttaatcaattctactctactctggcatgatttttaaggcattaaccataatttccttccaatctaaaaagaaactaatacttactgagtatctagtatacatcagatactgtgtatatagac

SEQ ID NO: 89470 - DNA, 378 bp, Homo sapiens
cattgccccactcctgttagcagcaaatataagacttgggctatgtgtctgaactggtcttgggtagtctccatttcacagactccagtctgaattaagcatcaacctgcttgatctttttccataagaagtagtaaccaacattgaattgcactatgtgcttcacatgtattcatctctcactgtaaacccacacatttggtatagaattatccttgtttacagacgagaaaacaggaatagagggaaaataaattgccttgagtgcatgcctctaaagctgatggagctaggattcaaatccaggccacaagggctactttggatcctccctctccatcatgcatataccacaccatccttcccatgcagctcatc

SEQ ID NO: 89471 - DNA, 396 bp, Homo sapiens
gcttttcttcatgcacttattcttactttgtcttctaggtacttaggtaagcttccttgcgagcaataaataaataagttgataacaacaatggttaacagtggacctttattaggccaggcattagccagggtcattgtgttactttcctatggccactgtaacaaatgaccacaaacttggtgaattaaaacaacataaatgcatcatcttatagttctgcaagtcaaaagtctgacatgagcctcacaggactaaaatccaggtgtggacagggctgctttctcctggaggctccaggggagaatccattttcttgccttcttgtgcttccagagactgcctgcattctttggcttgtggccacttcctctgtcttcaaagccagtactggca

SEQ ID NO: 89472 - DNA, 348 bp, Homo sapiens
tgattacctccttaacagagtacctgcctcctggtagttgcagctctttattctatgccatagactcagaagtcttccttatttgtaccatggttacttttatccttctcagaagtcacatagttcatattaaatacataaaatctaaatccgtcacctttcatcccccaccagtatgttttgctaccttgcctatttctcatttctacccttgcctattagaatccaaaggatttttaattgctcaggctggataccctaattagtttagtcttttatttcaacccaggttgttttcttcctatgagaagtagcttagattttcttgccttttaacttctactggtg

SEQ ID NO: 89473 - DNA, 596 bp, Homo sapiens
tggtggtggtggggtattttttggagaaacgagttctcaccatgctgcccaggcttgtctccaactcctgggcttatgccatcctcccgcctcagcctctcaaaaagtgctgagattacaggtgtgagacaccatacccagctatatattttatttctgtaagttctatttcatccattttcctttcaggtcttcctcatcattcctggtggtcttactgctcctgctcgctcaattttatgagtccatctttttcttatataatacatttatttcacatgtaactattttctcacaattctaatatttgaagtctgtattctgtatctgataattccaaaacctacagtctttgggaaacattcattgtttctgataattctcaaatatattgggttcactacttgaatgctatgatttcactgaattcatagttgcctgcttttaatctttgggaatcctacaggcttaagttagagatggtttcctagaaaaagtatctgtgcgtgcttctgatgagagctgtggggacaactaacaagagacccctttaccaccgtccgtaatcctgatattctcttggattctcctggaga

SEQ ID NO: 89474 - DNA, 503 bp, Homo sapiens
aacaaaatttcctgggaataaatgagccctactgttataaaagtttaaaaattattacagatgatatgccactaagagaggaggtagcctacagcactgactctcccctaaggaagacttcgttcttagaaggggaagaaggaaactgagaaccaagccaccaagcccagacccgaaatgagtcaaccagaggctcaaaggctgcggggtgggtcagcacgagacgtttgcaaagcagctgggcccaagacccttgattggcagaggcgttgctaaggcaaacagtgccgcttcctcccattggccagtcagttaagtgccacccggaaggtggagctccccagacagcaagggaggaagccccaccccctctccttaccgggaaaaggaagggggaggagtaacagcgcaggcatccctagcagcaggcaaatgcgctccctaactgcccaggcccccaacaccctgaaagggcagcggctggcttgtaaggtagtccccgg

SEQ ID NO: 89475 - DNA, 256 bp, Homo sapiens
agggtgactctcaggatcttcgccgactagcccgagcaggcctggtcttagcaagaactgtgctaagtcaattattagcacaatcttcccacccttgagacctgatcaaattcctcattccccacctttgatgtatgtgtccttgacctgtctgtagcaagcatcctgttaggtcagtttagcaagaagcccctatccttgacatgtcctcttggtaattttccacccactgatcccctgtcactctgcccatagg

SEQ ID NO: 89476 - DNA, 411 bp, Homo sapiens
atagcaaagatgcctctgctgtgtccttgttctctctgcaagctttttaccaggtgctggactggagacttgctgagtgctagaccacagtgatttggtcatagctggatgtgaagatggctggctgttctttcagaagggacctggctggagttcttattgctcaaagctccagcttgcagcactgggctagagctgatggaaggagagctgttactattctgttctacgtgaatgctacactgtgaaagaacagcatcatccgacttgggcaacaagatagtattcaagatgtcttagaaggcctaatcagaacttaccagctgtagcatagcactccctcaagtgcagatgctggacctctgcagcagaaattactcaagctgttcagtataatagaaatgaaaattc

SEQ ID NO: 89477 - DNA, 825 bp, Homo sapiens
gcgcgaagctgggcggcgccccgagggcggaggacaggtggccgcgcgaccgcagccaggtagcgaacggctcgggggctgcgcagcgcggtcccaaagctcagcccggccccgggcccagctcgctgccgcctgccacgggagcggccttccccttccccttccggctcagcccgctgccccagacgtgacccccgcggaaggtgttggcgatgcgcgctgcccgggagcgtgtgattaatggccccgaggtcgtgggcggcgcatgcaccagccccttcttggcctggtcagggtgtgagggtatccgggagcacagcgaggtcatggcagcgggggcctccgggagcgcggcggcggaggaggaggaggaagaggagaagtaggtgacgcgggccgaagaggcttgtcccctctggccccagggctggcgccgcggcgggtcccccgccccaagcaaagtttggggctacgggcgctgcgctcaggtccctccccgcgcagttccctcggcggggtctgtgccgccgccgctgccagggcaggacaaaggctcattaacacgtgatgggaccgcgcttcataaatgggactggagcgagagggagccagagacagcgcgagcggagggagcggcagggactgcgcgagcgggacgaggcgacgggcgcccgggctggcggagacgggcggccccacgccgggccaggcggggctcgcgggaggacccagtgaagagcctgggaaggggcgaggctcgccggcggtcggagcagcggggcgccagtcccggtcgctgtcgcgggcgggcgctggagaccggga

SEQ ID NO: 89478 - DNA, 382 bp, Homo sapiens
acacccctggtccagactttccacatttctggtgtgaactattgcaggaacccctatgtggttttcttgagtctagtgtcttgaactgctaatccacagcagagatattcccaaagagaaagatctgatcatgtcactgcccaaatgaaacaccttcattattttcccttaaatgacaatacaggacaaagtgtaatcatctcaacctgacattcacagtctaacttcccaatttttctcctgttactttaagttctagtcacatcaaacttcctactggtctgtggagattctacgtcacacttctatgctttttcacatactgcctaaaacgttgtttacctttttccacctggatctcctgcttgttgctctacaccgg

SEQ ID NO: 89479 - DNA, 657 bp, Homo sapiens
cagctctcttgctgtcactttcagtcctcaaaccgaggaaccagaggaagttttagagtatgaggaggggtcttacaatctagactcccgtgatgtgcaaacagggatgtccgcagataacctgcagccaaaagatacccatgaaaaacacctcatgagtcaaagaaattcaggtgaaactactgagacttcagatgggatgaatttcacaaaatatgtatctgtacctgaaaaggatcttgagaaaactgaagaatgtaactttctagagccagagaacgtgggtggagggccacctcacagagttccccgaagtcttgactttggggacgtccctatagacagtgatgtgcatgtcagcagcacacgttctgagataaccaaaaatcttgacgttaaggggtctgaaaatagccttccaggagccggttcgtctggaaattttgacagagatactatttctagtgagtatactcattcaagtgcatcaagtcctgagttaaatgactcttcagttgcactgtcctcctggggccagcaacccagttctgggtatcaagaagaaaaccaaggcaactggagtgaacagaatcaccaagaatctgaactaattaccactgatggccaagtagaaatagttaccaaagtgaaggattt

SEQ ID NO: 89480 - DNA, 519 bp, Homo sapiens
ccaaatagaggtagccttctgggccattaaatccttttgctttggattaatcccacagtgtatatcagatcactagaattcagatgaaaacactgctgtagtactcagtctcctcgccaaatgattccaaaatatataggttataaatacagaaaaaataactgaattcgatatttcttaagtgaaataatctgttccttgtgaatattctctgtaatagtctaatagtattttgtgctcctgggggctgagtgtgtttttagcaacaatgcattggttgtaaaatatgcatccctaactatctggacagacaagaaagagggctctagtaaaaagactgaagtttttttttttaaatgcagatcgtatgaatcacataaatggtggtgtctaaaaattatcaacaagctctgggtttgtttttatttctttacattataggtcctctttctcactccacatttttgatattactagatcagtaattcaagagacagccaagcaggtgttcacatctct

SEQ ID NO: 89481 - DNA, 217 bp, Homo sapiens
tatcagcaaaaacagaaattgaaaatctaaaaaaaaaataacctgtcatttacagtaacatcaaaagtatcaaatatccaggaataaatacaagaaaatgtacaaaagatctacatagaaaactatgaaacattattgagaaaaataatagaagacctaaataaattttctaatactgcgtctcatggactggaaacaataaagatgtcatatgtag

SEQ ID NO: 89482 - DNA, 574 bp, Homo sapiens
agttaatgggtgcagcaaaccaacatggcatacatatacataagtaacaaacctgcacgttgtgcacatgtaccctagaacttaaaaaagtacaattaaaaaaaaaatctattaccatacttgtatgtctatttctagactctctctcttccatggctctatgtacctactctttcacctatactacactgtattaattaccttagatttatattgtgtcttaaaactaggtaatgtgagtcctccaactttgtttctttttcaaaacagttttagctattctggtttaacctttccatataaattttagaatctggttgtctatatctacaatgaatctagctgagattttgactgggatcacattaaatttataggtcaatttgactgtatcgagtgttgtaatccatcaacacagtatacttcctcgtttattttggttgtcttggatttccttcagcagcattttgtaactttcaacatacagattctgcacatgttttgtttgatttatacctaggtagtttttttttccccctccttttggagctactataaatggaacttaaaaaaa

SEQ ID NO: 89483 - DNA, 264 bp, Homo sapiens
ctgagtgtgtgctacataccatgcgccagtgctagacactttcatgcatcatatgtaatgcttacaataacttccaaagttgatgtttttattttccttttacggaaaagtaaacaacttggagcaatcagggaattaattggtcttacagccactactcaagtccagacctctcagactccaaagctcatcctctttctattgcatcatgctgtgtcttgaactgcatacagtgttccataaacaatctggaaggcaggcacg

SEQ ID NO: 89484 - DNA, 458 bp, Homo sapiens
gcctttcctccaattcaacatgagatttgggtggggacacaaatctaaaccatatgttttctgatttttgaaaaaattttataatttttttctatgagtctgtcacatttcttttcaggtttgctcataggtgttttataattttagttgatattgtgaataagatctccctccctacccccattacatttgctaagtggtttttgatatgttactggaaagctgctggttttggagtgtttattagcatctttattcagccatgtgcctggaccattataaaatcttttttgattgagccttttttgtattctaggtagactatcagaaagttcataaatagtgatagtttcatgtttttatttctatttcctttctgttttagtaatacatttaaggattgcccattaaaaatattggacaaacagttatttccaggcaacatctttacctcattc

SEQ ID NO: 89485 - DNA, 409 bp, Homo sapiens
atgctcacaacaacccctcatatgacttacattaaaaagtttacaattattaattaggattggaagtttccaacagatttgtagtcaggagagactattcagggaacatgagtctagttttgatcacattgagtttgaagttcctgaacaaacacgtgtcactaaaggagtgaagataaacatgcttctagagtaaaaacaatcacaagtacaaacctctacaacatcttacacagggaaattcagccctaaagtctatcaaatgggcataaaggtaattttatatttgtataatcttaggttatagccaagaaaaagcaaacatcttgtgaagttgagatatagcatacaacaaactcagctcaattaaaccacagtttagctttatctaattcaaagttaggacgcc

SEQ ID NO: 89486 - DNA, 708 bp, Homo sapiens
aaacagtgatagtttgacttcttttcttcctatttggatgccatttatttttttctcttgactgactgctcttgccagaccttccaattctatgttggataggagtggtgagagagggcatccttttcttgtgccacttttcaagggaaatgcttcaagcttttgcccattcagtgtgatgctggctgtggttttgtcatatatagctcttactattttgaagtttgttccttcaatacctaatttattgagagtttttaagatggaatgacattgaattttatcaaaaagccttgtctgcatctattgagataatcatgtgtgatattttcctatttggctaatcattttatcattatacagtgtccctctttgcctttttttactgttgttgctttaaaatctgttttttctaatataagaatagctactcctactcacttttggtttccatttgcatggaatgtcttttcccacctctttcccttaagtttatgtgagtccttatgtattaggtgagtctcttaaagacagcagatacgtggttggcggattttcattcattctgctattctgtatcttttaagtggagcattcaggccatttacattcaatgttagtattgagatgtgaggtactgttctattcatcatgttagctgttgcctaaaaactttgttttttccattgtgctattgttttacagacc

SEQ ID NO: 89487 - DNA, 230 bp, Homo sapiens
tctgttaaaaaaaagtaaaaatgttacacataggaaataaatgtaaaaagctatactttgccaaaataaagtttcagctgaaggtaatgctagttataaattaaatacaattctattaagaacttgcaaaagtcaaaggaagacggaaaactccctcttttggcaattcaaaggcaaagacctgttcatttattcttaattttactttatacaatcattatcccccacag

SEQ ID NO: 89488 - DNA, 474 bp, Homo sapiens
agtctttaaaagcagtgagggaacaggggaacactgcctgaatcctgcccacaacctttggccagtggggatctggcagagagacctgttaacttttgaagaaattaacatctgcaaggataatcacataatgagcctttgaaagagtatgattcaaatatctaatgattaagagaagcctttggggagtggtgctctcgaataattttacaaaagttaattgtatgatttgtgttgtagaagtcaaatatgaaaaaattttgtagaaaaaattcttcccctcctcctcccaaaaaacccatcaatggactcattctttgtttatttcaagaatggtcacatattatattctaatcacatattgtaatctaatttttattaaagatagtcatatttccaaaataaagtttttccccagttttccttcttgtggtaaagtacatataacacaaaatttaccatcctaaccatttt

SEQ ID NO: 89489 - DNA, 276 bp, Homo sapiens
tgaggatatgggcttaaagatattgagctatgtgcccaagattgccacagctcatgagtgccaaagtcagaaatttcctaaattggatccttaatcaccagacatggtgcttaattaccatgctggacaggattctgttacttgaaaacctgtgtagctctcagaccactggctgtgcacagtaggcacttaaatatttaatttgaggtttatgattcttgctgattttcagagtattgcccttcagcctgggcaacagagtgagactccatctcc

SEQ ID NO: 89490 - DNA, 514 bp, Homo sapiens
gctgggagcaggtatccgtgactgtctggggctgggacatgttacagccccagacagcattgggaatgcaggggaggaggacacttggatatggaataggcagctagcagggtctgtctcaggcaggaaaccgaggctcagagaagtcaattcacttggccaaggtcagcctcgcctccctcaggagcccctgccctgaatgctccatgtgttacccccctgatgaccagtgatgtttcctgggtgcttcctgtgggctgagcctcaggcagggctcttgctgtggatcagacatcgcatagtcacagcgaccctgtgatgtgggagcactccccgtggtgtacactggccggtgctgagggctggaggatctcttggatacccggggtccgacccaccgttgatcacaggcctgtgggtaccacgctgtgcatctaggccgctctcccggccgtgaccctcagccgccctctgaggaggccgccgtggcattttatgcccaagaaactgggtc

SEQ ID NO: 89491 - DNA, 244 bp, Homo sapiens
agagcgagactccgtctcaaaaataaataaataaataaataaataaataaataaatctcttaaaggattgcctctgaaaccttttgcataatatgtaagtttcttcataatctcatctttgctcttctttctagttttgatatcttgctgctctcccacataaatgctgaagctcgtggaaattaaaatatggctattagaactccagagcatgtgctctgagtgacataggcttgtaaacatg

SEQ ID NO: 89492 - DNA, 433 bp, Homo sapiens
atatttcatcgtgtacacccaccactttctaccactccactccacagagatgggcacccagagtgcctccaactctctgacactgcaaataatgttgcagtgcacatcctcacacaagtctccttatatacttgtttgaaaatttggtggccaggcccggtggctcacgcctgtaatcccagcactttgggaggccaaggtaggtggatcacaaggtcaggaggatcgagaccatcctggctaacacagtgaaacaccgtctctactaaaattacaaaaaattagccgggcacagtggcagacgcctgtagtctcagctacttgagaggctgaggcaggagaatggtgtgaacctgggaggcggagcttgcagtgagccgagatcacgccactgcagtccagcccgggtgaaagagcgagactccatctcaaa

SEQ ID NO: 89493 - DNA, 670 bp, Homo sapiens
gtattcttcccaacacacaacccggctacctcaccttcctgcaacaaactctcagtggctccctcttaccacgaaaacgacctccggctcctctgcctcttctgtggtcttgtgcctgcccctctccagcctcctccctcccacaccaccttcccctcttagtctctaacgccatctgtttgtggctctctaaggctcaagggcgcccactgccagtgtgtatggagaagtcctgccaggctccctgtcacctaccttcacatggccacttaggggagctcctgctcgctgccacctatgtgggttgtctagatgcccaccgtgcgatgacagagccagtcaggaggaaatatcttaatccttgcattccccatccctagcactgtgctgggtacctggcaggcacttgataccgttggcagaaccagtaaatagtggtggctagagccaaccgtggcactggggacagaaaagtgaggccagatgagggcaccgctgacttcacccaccatagcccatttctatatttgctgaaaataaggattattttttgaaataaataattttgctagcccatgcatatttcccaacatgttcttgcatttgcattaggccaatatacattttttaattgagagaagtgagagaggagtgaaggggggaagtagct

SEQ ID NO: 89494 - DNA, 473 bp, Homo sapiens
tacagccactgtggaaaacggtatgatttctaaagcaaactgaaatagaattaccattcggtcctgctgtaggggtttagtcaggatggtggggaaaattataagccacaaaccttcttggaaggcctgaagggttttgcaaaagtctcaggataaggttatgtctgaaggcaacctaatccataccttgagtaaatagcttaaagtgggtacaaaggaaggtagagtagtttacctgactagtttgtttactcatgtggtcctaagactaacctttgatctaccacaggtgcttaattgctttctactcaggaagtccgggaagtctgcaatgtcaattaccctctagttgtgtttactcacaacctttgtcaattaatctttactgaataaatgcaagtcttgctgactgatcaaggccgtggctgtgactaagtggcctggacgctaggctggactggcaaagcagaaca

SEQ ID NO: 89495 - DNA, 167 bp, Homo sapiens
ttaaggcatttttaaaaatctggctttatacacatacgaagctgaaaatggaggagtattttaatagctttttcagaaaactgtggctattcttgtttgattctacacgaaactgcagtaagtaaacttttcttaatctgtcacattaaaatccatcagtcagctgg

SEQ ID NO: 89496 - DNA, 460 bp, Homo sapiens
aggtgggatggggccactcacacttggtgtggaggctgcagaggaaggggaggccatatggcctaggttttgaacttgggagtcaggctggttggttaccggggcctggcatagctgatatctgacaggacggcgtcaagttacattggcagagcctgtggggtctcaggttgaatcatcccaccagcaggcacttgtctgtgagtccagagttcagtggatagggcaggatcgagggccagtaaattcagctgataagcccccactctggtatgtcagccctcgaagacactggatcctgcatcccacagtcagcccacagttcccagtgagatcagagcagctaatgctgcggatgctgttctgagacttcccgggcagccgcggctgctcatcgtgtcgtgccacccctgtgagggcagttgcacccctgcagtggcacctgcagttctgacagggc

SEQ ID NO: 89497 - DNA, 327 bp, Homo sapiens
cctgacctacctgttggctccagagtctgtctaccccactgctcccccaactcctccctctccttatcccatacccagcatgaaatgataagacctctgcatttgcatgaagattgatctggtcatcttaaagaggcgcttctgggatactaacagaagtctgagcagagcagagagaggtagcaggaaagaagatttttatctcttatcagttcacatggaataagcacccagatcccagagaggctgagaaaagtaatctttcagctcatctggagacacccatattgctgcccacgccaccaccacccccagcatttagcccac

SEQ ID NO: 89498 - DNA, 318 bp, Homo sapiens
ggtgacgaggaagcccaaggctactgttccttctgtgaacaagaggcccaagaaagagaccaagaagaagcggtagaagaggaggcccgaggagccagacaggcagggagagggccttggggacagccctcctgggaatctatatcctgttccccctctccatcccaggttcagggtctgaggaggctgtgacaccctctgacctcagagatctagacagtcatgacagtccccaggctccagctgtgcagtccaccacttcctcttccttctgcttctgtgatggtttagagtcaaggggactgaaacacactgtga

SEQ ID NO: 89499 - DNA, 591 bp, Homo sapiens
tggaaagcaaatatatgagtggtaacaaagttaccaaagaaaaacgcatcctcaactagcagtgaagctgagtgaaataggagaactgatctaatttataatgcaaaatacctgtacaagtggggctaacagaatatagctaaagcaaggggaatttcttgaaaacctgcttatgaagttatcagatccccaggtccattcatcctctctagttagctggacaactgcccttccttcatcctgcaaaagtcagatagaactgctcaaaaaaaaagaaattcaaaactggaactgggtctataaagcttgatgtcacattcaggtttaaaaaatgaccaggcgcggtggctcaagcctgtaatcgcagcactttcggaggtcaaggcgggcagagcacaaggtcaagagttcaagaccagcctggccaacatagtgaaaccccatccctactaaacatacaaaaattagcccagcatggtgcgcctgtagtcccagctactcgggagcctgaggcaggagaatcacttgaacccaggagaggttgcagtgagctgaaatcatgccactgcactccagattgggtgacagagc

SEQ ID NO: 89500 - DNA, 334 bp, Homo sapiens
aatatctaacttaggaatgtggaaatttgagctgagaagaacaattctacatttgactattattaatattttctcacaaaatatattgaaggaaaaatgatgatgaaatgttatcttcagctttagtagaatatagagactaaactataaactaatttggtttctttattttgctacatattgctaaatattgcctctaaaatagatgtgttgttttagctttagacagtttaaaaaatgttattttttcccaatgaaataaaaacaaatgtaaccacacccatatatatttcatagtcctagaatagtattagtagttgtctttacttgtaaa

SEQ ID NO: 89501 - DNA, 314 bp, Homo sapiens
atgtaatatagccacacaatggaagattatttggccataaaaacaaatgaagaactgaaacatgctacaacatgaatgaacctcaaaaacattgtgctaaatgaaaagccagttccaaagggctttactatacaatgcctttaggaaacatcccaaatagacaaatctagacacagaaagtaaattaggggtagcctagggctgagtgttgggaggaaatggggagtgaataccaatgggtacggggtttctttgggcaagataaaaatgttctaaatttgattgtggtggtgatgcacacactgtgaatatac

SEQ ID NO: 89502 - DNA, 738 bp, Homo sapiens
cggaaactcccgcacagtggcggaggcccggcttctctgcttctccagatcccggctctgcgcctggggtttgcatcgcccaaccttggccgctgcagcagcagcactgctggctcaagaggccataaggatgaagcaagagaatcgctcgaacccaggagacggaggttgcagtgagccaagatcgtgccactgcattccagcctgggcgacagagtgagactccatctcaaaaaaaaaaaacaaaaaacaaacaaacaaaaaaccataaggagcccactggggttgggtgggaaggtgcaggctgcggtcagagccacgtttctgcaaggtggcccgcggtggtggccagacgctatcccagggccaggggctagtggggcaggggctcagaaatgagctgctcatgcccacactggatcacgatcacatcccacccacctcaggtcggcactgcctgttccttgaagttcagggtctacctccccacccagcgtggtgctgcctcagtttacctgtttttccatgcgaccgcccacctcgctgacattctcatcccttgtctttaccctaaccgcacctatctgtgtggctctctctcatttccaacattctggctccctgtctcaccctgccccagttttggtctccaactgatctggagttttcctgtctccccatctgagtctcttgctcttggcctcctcctccctgtctaattctatttcgatgtttttg

SEQ ID NO: 89503 - DNA, 255 bp, Homo sapiens
tcctttgcctattttctaattgggttatctttctaatgttgaaattgtaagagttctttatgtatcctggatactggatccttatcagatatacaattttctctcattctttctttttacatttttgataatgcccttagatgcacgaaagcgtattagcttttgtttatctgtgaatgtcttaacaactttttttttttgagacggagtcttgctctttcgcccaggctggagtgcagtggcacgatctcagct

SEQ ID NO: 89504 - DNA, 1646 bp, Homo sapiens
cagtataatattcttttctaagttttcctttcagatttactgttatgttggctttagtgtaagacaaggtcactgtgctgattgatttttatctaaaaaaattcatttttatatcgaagaaaaaatattttattcaaacattagatttgaaagagtaatagtttataaaataaggaagtaacatgtgaggctctcccctcctcccctcccccatcataaagatattttgaaatcccaaggtgccctcatacctcttgacattaatgacttcattttttagcttgaatttgttagcaaatattaatggcagaaaaccaaaaactaaatttatggtatcgagagcaccaccttctctttttgcccatattgcactttgatttcaaactatgcactgtgaagagatttttttccccaggtaggaagggatgttccctgttatcgttattttactgagctgtggaaactcatttttaccctttttaaagtcataaatatggacttaatagcccttaaccttcaagtccaagcagttccaatcaggctgacttaggatcatgctggaaggaagccaagtctcaagaactgtcagcaacagaaaatgagatatgatgctagagagcatttgtccttgactgtaagtacagaggcttaggggaagtgagacataagcttgtaggaataataaacgttctacaataaacgtttggctatcttaagccattgtatgggggggattaggaagtaggagggattgtcctacaacaggcccttatacttcaacagcccaaatatttggtttattcctttttatccataaagtctttattcttcaagtttgggtattatagattaccattgttagcctcccttaatgggaccatatgagccaggcttttaagacggactcattttgaattgagtttcaaactttgaaagtgcaaggatttaatttttaagttgaatcccatgaaaggtgtcatcatcactaggaataacaccctttgtaactacatatagaactgttacaatggtagcagaaaatcctattgatttcatctcacccatttcagataccttcagtgaaattaagggtagtgtgatgtcccatgtaataaaacaggcttagaacatcaattcctctgctgccatttatgtgcttttattcccccttcaaaaattttttattggatatatatatttttcagtattcagactctgaaatctgtcattacaatcaagtgcttgtcacagctgaaagatttctggtggcttaaagtttactagcagtaaatttatgatatggtacagttctttgtacagaaaggcaccattatgttagaataaatttccagaacttagtgggaagaatcaggttttaaccttgtgtgtctgttacttctgagtgcatttctataatataaatgttgatttgcgtcaacattataaaagagcacttctgtggctcatttaaaagaaaaaaaaggttaagtcttttaaattttggccttgtttccaaatcctgtcttccatgttgtttttctgcacttcctgaccactcttataaaaagctcacaaacctttgaagaaactggagtaggctgttatttcattaaggtttacaaattaaatgcttgatttttaatgta

SEQ ID NO: 89505 - DNA, 2133 bp, Homo sapiens
  misc_feature (1808)..(1808): n is a, c, g, or t
  misc_feature (1816)..(1816): n is a, c, g, or t
  misc_feature (1829)..(1829): n is a, c, g, or t
  misc_feature (1953)..(1953): n is a, c, g, or t
  misc_feature (1992)..(1992): n is a, c, g, or t
  misc_feature (2004)..(2004): n is a, c, g, or t
  misc_feature (2031)..(2031): n is a, c, g, or t
  misc_feature (2044)..(2044): n is a, c, g, or t
  misc_feature (2073)..(2073): n is a, c, g, or t
  misc_feature (2093)..(2093): n is a, c, g, or t
  misc_feature (2102)..(2102): n is a, c, g, or t
cagtataatattcttttctaagttttcctttcagatttactgttatgttggctttagtgtaagacaaggtcactgtgctgattgatttttatctaaaaaaattcatttttatatcgaagaaaaaatattttattcaaacattagatttgaaagagtaatagtttataaaataaggaagtaacatgtgaggctctcccctcctcccctcccccatcataaagatattttgaaatcccaaggtgccctcatacctcttgacattaatgacttcattttttagcttgaatttgttagcaaatattaatggcagaaaaccaaaaactaaatttatggtatcgagagcaccaccttctctttttgcccatattgcactttgatttcaaactatgcactgtgaagagatttttttccccaggtaggaagggatgttccctgttatcgttattttactgagctgtggaaactcatttttaccctttttaaagtcataaatatggacttaatagcccttaaccttcaagtccaagcagttccaatcaggctgacttaggatcatgctggaaggaagccaagtctcaagaactgtcagcaacagaaaatgagatatgatgctagagagcatttgtccttgactgtaagtacagaggcttaggggaagtgagacataagcttgtaggaataataaacgttctacaataaacgtttggctatcttaagccattgtatgggggggattaggaagtaggagggattgtcctacaacaggcccttatacttcaacagcccaaatatttggtttattcctttttatccataaagtctttattcttcaagtttgggtattatagattaccattgttagcctcccttaatgggaccatatgagccaggcttttaagacggactcattttgaattgagtttcaaactttgaaagtgcaaggatttaatttttaagttgaatcccatgaaaggtgtcatcatcactaggaataacaccctttgtaactacatatagaactgttacaatggtagcagaaaatcctattgatttcatctcacccatttcagataccttcagtgaaattaagggtagtgtgatgtcccatgtaataaaacaggcttagaacatcaattcctctgctgccatttatgtgcttttattcccccttcaaaaattttttattggatatatatatttttcagtattcagactctgaaatctgtcattacaatcaagtgcttgtcacagctgaaagatttctggtggcttaaagtttactagcagtaaatttatgatatggtacagttctttgtacagaaaggcaccattatgttagaataaatttccagaacttagtgggaagaatcaggttttaaccttgtgtgtctgttacttctgagtgcatttctataatataaatgttgatttgcgtcaacattataaaagagcacttctgtggctcatttaaaagaaaaaaaaggttaagtcttttaaattttggccttgtttccaaatcctgtcttccatgttgtttttctgcacttcctgaccactcttataaaaagctcacaaacctttgaagaaactggagtaggctgttatttcattaaggtttacaaattaaatgcttgatttttaatgtattctctactgttttgatttttggattttcttaattcaacatttgaagatgtgccttttgggtaatgttaatcacgaatgtagtaatatttcatgattgtaataatgttacatgatcatgggtgtggcattctctaacaaatgatgtgaaaggaaaggaaggntttcccanaaaaccccatggngcctggattgccaccaggccccaccttgcctttttgggaaaatgccaatggccaaagccaaaggggggcctcccttttaaaggggaaccttccaggacctttgggaatttccgggaaaacccanaaaatcccaggtgggggcccaggtgggggcccagggggnccaccatggcanaggggggcctaacaaggggccccgggnaaagggccaaagnccgggaaccaaaaaggaagccggccgggnaatggggggccaaccccggnaacccagcnccttggggcccaaggggggggcacctaaacc

SEQ ID NO: 89506 - DNA, 2788 bp, Homo sapiens
cagtataatattcttttctaagttttcctttcagatttactgttatgttggctttagtgtaagacaaggtcactgtgctgattgatttttatctaaaaaaattcatttttatatcgaagaaaaaatattttattcaaacattagatttgaaagagtaatagtttataaaataaggaagtaacatgtgaggctctcccctcctcccctcccccatcataaagatattttgaaatcccaaggtgccctcatacctcttgacattaatgacttcattttttagcttgaatttgttagcaaatattaatggcagaaaaccaaaaactaaatttatggtatcgagagcaccaccttctctttttgcccatattgcactttgatttcaaactatgcactgtgaagagatttttttccccaggtaggaagggatgttccctgttatcgttattttactgagctgtggaaactcatttttaccctttttaaagtcataaatatggacttaatagcccttaaccttcaagtccaagcagttccaatcaggctgacttaggatcatgctggaaggaagccaagtctcaagaactgtcagcaacagaaaatgagatatgatgctagagagcatttgtccttgactgtaagtacagaggcttaggggaagtgagacataagcttgtaggaataataaacgttctacaataaacgtttggctatcttaagccattgtatgggggggattaggaagtaggagggattgtcctacaacaggcccttatacttcaacagcccaaatatttggtttattcctttttatccataaagtctttattcttcaagtttgggtattatagattaccattgttagcctcccttaatgggaccatatgagccaggcttttaagacggactcattttgaattgagtttcaaactttgaaagtgcaaggatttaatttttaagttgaatcccatgaaaggtgtcatcatcactaggaataacaccctttgtaactacatatagaactgttacaatggtagcagaaaatcctattgatttcatctcacccatttcagataccttcagtgaaattaagggtagtgtgatgtcccatgtaataaaacaggcttagaacatcaattcctctgctgccatttatgtgcttttattcccccttcaaaaattttttattggatatatatatttttcagtattcagactctgaaatctgtcattacaatcaagtgcttgtcacagctgaaagatttctggtggcttaaagtttactagcagtaaatttatgatatggtacagttctttgtacagaaaggcaccattatgttagaataaatttccagaacttagtgggaagaatcaggttttaaccttgtgtgtctgttacttctgagtgcatttctataatataaatgttgatttgcgtcaacattataaaagagcacttctgtggctcatttaaaagaaaaaaaaggttaagtcttttaaattttggccttgtttccaaatcctgtcttccatgttgtttttctgcacttcctgaccactcttataaaaagctcacaaacctttgaagaaactggagtaggctgttatttcattaaggtttacaaattaaatgcttgatttttaatgtattctctactgttttgatttttggattttcttaattcaacatttgaagatgtgccttttgggtaatgttaatcacgaatgtagtaatatttcatgattgtaataatgttacatgatcatgggtgtggcattctctaacaaatgatgtgaaaggaaagtagttttcataaaactcatggctctgattgcacagtcccacttgcttttgatattgctatgtcaaagcaaagggcacttcttttaaggctactttcagaactttgtattttcgctaaactataaatgcagttgtgtccagttggaggccagggtaccacatgtcacaggcggccttacatgtgtgccgtgaaaaggttcaaagaccgttaacaaaaaagtaagtctggccgggcatggtggctcaagcctgtaatcccagcactttgggaggccgaggcgggcggatcacttgagaccaggagttcgagaccagcctggccaacatggtgtgagaccccgtctctactaaaaataaaaaaattagccgggtgcggtggcacacacctgtaatcccagctaccggggaggctgaggcaggagaatcgctagaacctgggaggcggaggttgcagtcagccaagatagcaccactgcactccaggctgggtgacagagcgagactccatgtcaaaaaaaaaagaatgtgggaactcaaattttcatttttaatgtaatccccaagattttctccaagaaataaattgttgttttgtattttgtaacttaaaagcagctattggtaaatttctgagatatagcaggagaccaaaacatgtttggaaagagaataaatatatgaagagagactggttgttttattttcaatgtattgaatatattagactactatttattttctgagtggatgtgattaaatattcagacgtttagtgtatgattaagagtgagatagagatttctttggagtaattaaatccatcctgtcttttacacaatggacaaatcaagttaaaaaaatttttagatagcttagcttgttttctggtgctgttgacctgcaagagaatatacttttgcatatacaggtgaaagttttgcaatttatgtatacaagaaattgtaggcattaaaaatattttattga

SEQ ID NO: 89507 - DNA, 3175 bp, Homo sapiens
cagtataatattcttttctaagttttcctttcagatttactgttatgttggctttagtgtaagacaaggtcactgtgctgattgatttttatctaaaaaaattcatttttatatcgaagaaaaaatattttattcaaacattagatttgaaagagtaatagtttataaaataaggaagtaacatgtgaggctctcccctcctcccctcccccatcataaagatattttgaaatcccaaggtgccctcatacctcttgacattaatgacttcattttttagcttgaatttgttagcaaatattaatggcagaaaaccaaaaactaaatttatggtatcgagagcaccaccttctctttttgcccatattgcactttgatttcaaactatgcactgtgaagagatttttttccccaggtaggaagggatgttccctgttatcgttattttactgagctgtggaaactcatttttaccctttttaaagtcataaatatggacttaatagcccttaaccttcaagtccaagcagttccaatcaggctgacttaggatcatgctggaaggaagccaagtctcaagaactgtcagcaacagaaaatgagatatgatgctagagagcatttgtccttgactgtaagtacagaggcttaggggaagtgagacataagcttgtaggaataataaacgttctacaataaacgtttggctatcttaagccattgtatgggggggattaggaagtaggagggattgtcctacaacaggcccttatacttcaacagcccaaatatttggtttattcctttttatccataaagtctttattcttcaagtttgggtattatagattaccattgttagcctcccttaatgggaccatatgagccaggcttttaagacggactcattttgaattgagtttcaaactttgaaagtgcaaggatttaatttttaagttgaatcccatgaaaggtgtcatcatcactaggaataacaccctttgtaactacatatagaactgttacaatggtagcagaaaatcctattgatttcatctcacccatttcagataccttcagtgaaattaagggtagtgtgatgtcccatgtaataaaacaggcttagaacatcaattcctctgctgccatttatgtgcttttattcccccttcaaaaattttttattggatatatatatttttcagtattcagactctgaaatctgtcattacaatcaagtgcttgtcacagctgaaagatttctggtggcttaaagtttactagcagtaaatttatgatatggtacagttctttgtacagaaaggcaccattatgttagaataaatttccagaacttagtgggaagaatcaggttttaaccttgtgtgtctgttacttctgagtgcatttctataatataaatgttgatttgcgtcaacattataaaagagcacttctgtggctcatttaaaagaaaaaaaaggttaagtcttttaaattttggccttgtttccaaatcctgtcttccatgttgtttttctgcacttcctgaccactcttataaaaagctcacaaacctttgaagaaactggagtaggctgttatttcattaaggtttacaaattaaatgcttgatttttaatgtattctctactgttttgatttttggattttcttaattcaacatttgaagatgtgccttttgggtaatgttaatcacgaatgtagtaatatttcatgattgtaataatgttacatgatcatgggtgtggcattctctaacaaatgatgtgaaaggaaagtagttttcataaaactcatggctctgattgcacagtcccacttgcttttgatattgctatgtcaaagcaaagggcacttcttttaaggctactttcagaactttgtattttcgctaaactataaatgcagttgtgtccagttggaggccagggtaccacatgtcacaggcggccttacatgtgtgccgtgaaaaggttcaaagaccgttaacaaaaaagtaagtctggccgggcatggtggctcaagcctgtaatcccagcactttgggaggccgaggcgggcggatcacttgagaccaggagttcgagaccagcctggccaacatggtgtgagaccccgtctctactaaaaataaaaaaattagccgggtgcggtggcacacacctgtaatcccagctaccggggaggctgaggcaggagaatcgctagaacctgggaggcggaggttgcagtcagccaagatagcaccactgcactccaggctgggtgacagagcgagactccatgtcaaaaaaaaaagaatgtgggaactcaaattttcatttttaatgtaatccccaagattttctccaagaaataaattgttgttttgtattttgtaacttaaaagcagctattggtaaatttctgagatatagcaggagaccaaaacatgtttggaaagagaataaatatatgaagagagactggttgttttattttcaatgtattgaatatattagactactatttattttctgagtggatgtgattaaatattcagacgtttagtgtatgattaagagtgagatagagatttctttggagtaattaaatccatcctgtcttttacacaatggacaaatcaagttaaaaaaatttttagatagcttagcttgttttctggtgctgttgacctgcaagagaatatacttttgcatatacaggtgaaagttttgcaatttatgtatacaagaaattgtaggcattaaaaatattttattgatatttttgctggtttgcatttattgattaaaactttgagatattctttatctcatcaccctgaacatttttccagctagaaacctcggtatactcatcacacttcagagatatggtttgcctattgcacacactcctctgcttattctcccttacacattcatgtctgctctaacatgatagagcttctctccccctaccagcttagagaactgttctgctctctgacccatgttgggagaactgttaggtggtcagagcaatggaatcttttagtggctcaagttttggaagtttactcaaatggagggaggacacagctgggtatatggttcctcttgtcaaaatgagcagggtcctatctcttatgataaaagcagcttgagat

SEQ ID NO: 89508 - DNA, 482 bp, Homo sapiens
aaaataaaataatctctgattgggaggctctccctgcctctctgcctccataatcctaaaccagctgcggtgttcccagatcacaaacatttaggcttgtgtccactgtaaaggttgcttcagaattttctacctggatgtctgtatatccagatatgaaatgactggacactgtaggtggtgataaattcttccaccctgattactcatgaagcagaaataattagtgcctacctaacctgtgaataactatttgaattctgctattttcaagggtaagtggaagaactagtaacccagtttataactaccagttggcccgatcacctttgcctcaaagacctgccccttgggatgctgtgataggtttagtttttgccaagtaccagtgctatttgatagtctcaccttgcctgctcttttgtataagtgtagcccatgctgtgcattgcacgcagtgggtacttaataaatactgaatg

SEQ ID NO: 89509 - DNA, 432 bp, Homo sapiens
gcgagttccagaattaatggggtgttgctgagtccacttctggcagagccactatagcatcattctcacagggtggaagagaatctggccgtcttcacagtgtatttagtgggcacgcagattaccctctcaccaaatgtgaggggctgcgctgtgccacccaacattcctgtgttcaagtcctgatccccagtacctcaaatgactatttggagagagggacttcactgagctaatcaagtgaaaatgaaatcactggagtagatcctaatccaatatgacatgttcttatgagaacaggagatcaggacataggcacatatagaggaaagacggtgtgaagacacagggagaggacggctgtctccaggccaaggagagaggcctggaatagcttcttccctcacagtcttcggatgaaccctgctgaca

SEQ ID NO: 89510 - DNA, 413 bp, Homo sapiens
ggtaattttaaatttttgcatagaaggtggtttggagaaaagaaatacatttgggtttaaatcctttctctgccactggctttgtcgtcttataatttctctaggccttttcttctttgtattaataatatgagttgcttagaacttagagtttcagggtcactgtaaacgttagaaataatatacctcactgtaatcccagcactttgggaggctgaggcgggtggatcacgaggtcaggagatcaagactatccaggctaacgtggtaaaaccctgtctataatttttgtatttttaatagagacagagttttgccatgttgcccaggctggtctcaaactcctgggctcaagtagtctactcactttggcctcacaaagtgctgggattacaagcatgagtcattacacc

SEQ ID NO: 89511 - DNA, 493 bp, Homo sapiens
aagacatcgaaagactgaaatatctgcactacatctatcacaggatgatcctcttataaactgacttaatgccatattgcctttatattttaaaaagactagtcatgaatgacgtagcagagatatgactttccaacccagtacaagaaatttaaatagataggaacatcttcaggtataagtggccagaatggtagggaactgaaacatgtgatatgagcaatggttaagggaaccgggattaacaggaaattcaggaggaaggaatgtaataactatcttcaagtatatgaatgacagtcatctaaaagataaattatgttgctttctgttactccaacaaatagaccatcagccagtgatgaaacctacaagaataaaatactcaagtcaatatgaaacactaactttgtagcagccttctgtgttcaaaggtaaaaaataggagggtaaaaaataatatggaagatagacctagattaaatctcagtta

SEQ ID NO: 89512 - DNA, 760 bp, Homo sapiens
tcgtattctatgaaagactgataaatgcattaaacaacaccgtaattgattgaaaaatgcttttatatgccccattctcaaagatatttatgttttagccaaatatttaacctcatgctatataaagaagtcactgtaaaatttatccacagaggagggaaaagagaggaatagtggaaaaagttttcccagccttcttaatgccttacagccgctagctgtatttacttcatgtttccttttttacatgaaaataatatgcattatttctttccttgttgatttgtaaaatatatttttattctctgcggctgtctttattttttaaaataattatttatgaaactgtcttattataaactctgagaggaaacatgttgttttattcaacgttgtttttaccttatacccaacttaccccttggccaattttaggtccttaattagtactgattaataactgttaattataataaaatcatactactctataacacatgtaatagtttttgccaatgttaaactaagagactataattgcattgttttgatcctaaatataaaaattatgtagattctgcacatttttcataaaacaacagtgataacatcaatttatttatttatttatttttgagatggagtttcgctcttgtcacccaggctcgagtgcaatggcaagatctcggctcaccgcaacctccacctcccaggttcaagcaattctcctgtctcagcctccctagaagctgggattaca

SEQ ID NO: 89513 - DNA, 447 bp, Homo sapiens
aaataatttatatcatcaatgtttaaggagaaaaacagttgtcccaagcctaggcatcttgatcaggttcttagctgccctcttggttcagaagccataccgtgaatgaaattcagtggaagagctgcagcccagtgtccaatcccaccacaagagttgatcaaagactccctggccaccaccctgcacaggatctaacattaaaataaaaagtaggaaggacactacaattcagacaagagagaaaatgtttctaagtatctgggttttaagcacaattccaatcctttgaagttagagttacgtttagccttttacccttggccaacttttttggtccaacaactgaaatgataataaaagaagatagtttaaaaagtttaacagacaaaaagtccaaataggtttcttggacttgaatctcgtcttgcaaaacagcatttggat

SEQ ID NO: 89514 - DNA, 696 bp, Homo sapiens
aagtaaatccaatttctgtgaaatcaggatacaataatagaacctagcagcctgccggacacttggaaggtgctccatgaatgtcagccatttatacgtaaggtacatccaaggtctcatcttgtatctctgagaggcccagaaatcctttctcaggccatgcgtgcaacctattttggggttcagaaaagagagttgtcttatttgtggcttttttgctttagtgccccaggtcactctgtgtctcttggcctttctcatcatcttcctctacttcactgatctcatttccatggtgcctcccacgaattcctttgcccactcttctttgccagcctcatagccagaggcactttatgcatcaagcactgctggttcctcttgctgttgttttcatgaagttgccctacacaaaaacatatgaattttgcagatgaatggtttcatcctgggcaatgctgataggttttcagtttccatctgccgccccatctgtagcttccaaaaccactacttctcccatcccagaaagaatgagcaaacttaggagtcttctcaaaggggcggtagtgcccaagtcaggcacttctaagaggcactgaaaacttgggggatacttaagggtccagccagcccgacgtagccactgtgagctgctctgtgatttgacgtcacctccctgtgtcccctgcacaa

SEQ ID NO: 89515 - DNA, 415 bp, Homo sapiens
tgtgaaatgttcccaacacaaaaagatataataaatgcacagtaagggatagcctaagtactctgacttaatcatcccacaatctgtacatgtatcaaaatatcattggcactccataaatatacccagatattaggtatcaaagaaattttttaacaaatgtcaactttagaaggtaatacatgatctgcaacaatatctgcatttaaaagtttattcatccatcttatagtttcatgtttgggttaaaattttagtaaaaccacctcccaaatgcagagaggtaatgacaaagcagagtattagggatgtgcaattccaagagcacctttcttattgtatcctggagcttttattttttttttggcggagtctcgctctgtcacccaggctgagtgcagtggggctatcttgg

SEQ ID NO: 89516 - DNA, 441 bp, Homo sapiens
tctacgagctatctaaatgcgaggttgccctcagtggtaggaccattctcagttgtgttggaacaactggatagccatatgcagaagactatctcacaccatggaggactttaagtaaagtaagtcaggaacagaaagacaaatactgtataacatcacttagtatgtagatgtaaaaaatagttgagctcataaaagtagagagtggaagaggggtttccaggagctggggtgtagggagagttgaggccgatattggtaaaaggacaccaacttcagaatgaaaagatgactatcttcaagagatctattgcagaatgtggcaattatagttaacaatgtattgtattcttgaaaattgggataagagcagttttcttttttttttgagatggagtctcgcactgttgcccaggctggagtgcagtggtgcagtcttgg

SEQ ID NO: 89517 - DNA, 487 bp, Homo sapiens
cagcctttaaagttctccaacatcatcccagagacagatcagcctcagctcaaatggtaaacgcaaacatttggttaactcttgtacctggtcacaagaatcatttgtagaattttgtttagtaaaggtatcaaagcaaatatatattacttataactgtaagtgtggaactaggtggacatacccctttggtaaaacgttagatacccattaactatcagatgatttcccaaagtaaattatttctctgttgtaaatcttggaaagccaccacctctacatatctggtgttataaaatcaagcccatgtcataagacacagcattcaattgtgctggaacagcagctgaaactaagcaatatctcttgcccacttaaaaagtatggtttttccatactactttttcattatgggttccaagtcatacatggaatttcatcaggcataatcaattctagattaaccactcattcaacatttattgtg

SEQ ID NO: 89518 - DNA, 428 bp, Homo sapiens
tagacaattatcaatgttcctccctctcaaatgatccttctcaacacaggttgtgcttgatgaatctttaagaacagaatcttagcaggattttgtcaaatgccttttcttcatctgttgagataatcatgtttttctcttttagtgtattagcatgatgaattccattgattgattttctaatgttaaaccaatcctacatttttcagatgaaccccacttggttatgacgtactatccttttatccctttaatatattgtatttgatactctaaaattttgtttagaatttttacatctatgttcataagggatactggtttgtagtttcctttgctgtaatatctttgtattttctgctctatttttggaaatgtttgagtaaaattgttatttattcattaaatgtttgggagaatttaccctg

SEQ ID NO: 89519 - DNA, 796 bp, Homo sapiens
ctcatgtttcccactggagcatgcacatattgttacttggaataccacttgcatttctttcattcttgtaagatttttcttcagcttcagtaacaaactttaactttaaataggagccaggaaggaatattgagaatttttaaaaaatgtgtaaatgtacttagaaaggatattttgccatgaaggtttggttggtaaaggatataatagatgccttttaagcgtaggaatgaaagtgtggagggccagagatagtggaaggtgtgtcgtgtttagagatctgagtttgaatcctcattttgccacttaatagtggcatgactttggcaaagtaaactttaagagtctatctttccttatttataaaatgagaagatccatttttactctatagtgctgatagtaagtgaatttagtgacagatagaaaacattcaatgaatgattgctgtttcaaaattgtcatatttactaaaaaaaagtaattcttaggataaaaaagtaaattttcttatcaaatgttcttttaatgtcaggtaggcatttcagtttcatgatgttcattgtagatattactggtagctgtatttccttggttcctgtatgtcagcgtggtagacaaagacaaaaatgagaaaaccttgaatgtgggagcacacgaatttatatagatgaaattgtacagtaccatgtacttcattaatatgcacttaatgaaagtttattaaaattgaatgagagttgaaggtattcaatatcattttatttcttgcagtatttaggttactgcagacaac

SEQ ID NO: 89520 - DNA, 323 bp, Homo sapiens
ggaaactaccagcaaactacagccagccaagagaaaatgagcaaactttagctacaggactgagagtaagaatcaaatgtttttaactccagatctaaaacaaacaaaaataaggctaggaataggaaaaataaaggtgcgaatgaggatgacagaatgttacatactatgacaatgtaggaaaacttgaactgccaaaaatacatgagagaaaggagagataatttggaagtagcataagtcttgaaagcttcctctgtaattgctcagaatctaaaggtatctttaagggtggcaagtcaagtagaaggataaatgtataa

SEQ ID NO: 89521 - DNA, 994 bp, Homo sapiens
  misc_feature (7)..(7): n is a, c, g, or t
  misc_feature (9)..(9): n is a, c, g, or t
  misc_feature (11)..(11): n is a, c, g, or t
ccaattngncnttggccgggggtttttatttcatgaaggaaaagaagatccagtgaagtagatttcaattatcatgaaactccttttaaatcatctaagtttaaaacagacatcttacatttttaaattaggcactctcattattaaaatttgactgcaaaagggaaaatagtattactagcacaaaagaatgaggaatacacatgacctattttctgtctccacaatttaatcttaagtatatctcattagtagggctcactgatttgtacagaaaaataagatactaagagctggcttcattcacataataagctatttcttctcattttgataaatgtataattaatattagaggaatttctgaccaaaagttttgttgttttaaaaaggctttcttttttgacagctacaaacatagtggcccttgtccttccttctcaagtttatcagggtcttaacccaaatctctactttaaatgtgaagttaaaacttaaaattaattaaaatgtaagatttaagcatgaaaaatgacaaaattctggtccacagctgtaagtcagcagggtatattggtaacagactaccaaatatttaaaagaaattaatttatctgtattatcttcgaatttgctttctccaaagagggcatgtaaaatgaaagcactatagtcaagaaccaatttatacagatcgaagaactgtttttattgtactatgcaattacaattcaatttctctaaacttgatcaatccattgtttagaaatatcaaaatacttttatttcacacagtttgtatattatttataaaaaattccaaataatgctcttagcaaaatttataagcagtacctgttttaagctactaatgacaaagttagaaaataagagtaatattcacatattctaaccatttcttactaaaagtattatttcaactgaaatatttacacatgtataaaagcataatattttaaattttttgtatcag

SEQ ID NO: 89522 - DNA, 255 bp, Homo sapiens
ccggtccgacgtacagggcgactccctactaggaaaagaggaagcaaaggaaaatcctgaggatattagaaaacctgaaccctaggctgctctcactcaggtttagggtttgagtttttactatctggatgacacctaggttctccacaaaataatgtaaaaagcattctcaggttgataacaatactggtgccccctaatatgagtgactaaaagccttctctaggaagacctattttcaacctaggttgcaca

SEQ ID NO: 89523 - DNA, 104 bp, Homo sapiens
gatctgttttcttcccttcttgtatcatccctttgggtttttcggtttgctttggtttttcattttgctttgtttttgctataaatcctgtttttatcttataa

SEQ ID NO: 89524 - DNA, 150 bp, Homo sapiens
tacttgccacctccaaagcattagctctgaaggcataaccttttctttttttttcttctgaaagagacagggtctctttgcattgctcaagctggagtgcagtagctattcacaggcatgatcatcaagcaccacagccccaaactcctg

SEQ ID NO: 89525 - DNA, 494 bp, Homo sapiens
aaaaaaaaaaaaaaaagaaaaaagaaaaagaaagtagaagaacacagaaaaaaaagaataatataatgactgcccacattcctaccatcagaattagtcattgtgaaacaatatatatatgtataggtttcctgtttttcttgtttaagaaatgaaagggataaaagtaaattcccctttactgcgtgcttccagttttcactccctccccagtctccactttgagtttggtgtgaacattttcctaatgtgttttggtttttgttttttggagacagagtctcgctctgtcacccaggctagagtgcagtggcccgatctcgactcactgcaacttccacctcccgggttcaagcgattcccctgcctttgcctcctgagtagctggaattacaggtgcggtgcccgccaccacacccggctaattttttgtattttagtgacggggtttcaccatgtcgcccaggctggtctcgaactcctgagctcaggca

SEQ ID NO: 89526 - DNA, 1132 bp, Homo sapiens
cccgcagcgccctcgcccagccccggctgcgtttccctgcccatgacccgctcgtggggacccccggcccggcccggaacttttctccccaacccccaaacccacgactcacttccacaccgtcttccccagcgtcccccgacccacttcatcctttccggccatccctcggaccttgacccccctgtccgcgccttcaaggctcccaactcaggcaccaggtccgcacctctcccgcgccccagagccggaaatttctccctcccagaccccgcgctgctcttctaacttctagatcttttctctcgcttctcagctgaatctctctgaccattcctctactggagcccccaatgaaagccgcaaacctatacccttgacgcccatacctgcctcagtttccccatccacacctggacgcaggccctgccgccctgagaccacagtccaaccccagaccatccctctggcctctgctgaatctcccagagtgtgtccatctggggatctaatcttcacccttcttgaagtctccgatctgtccctgatcccatccatgctcaggccttaggtctggccattcacacacacacacacccccacaccccactcccacacacagttcctactgtcttcagtccatggggatctcatcacccactcccagccccagctccagctgccctcacctctctagcagctctcacccctctgagtctacctaacctggagggggcttgaggggcacttcagggccctgccccctaatgtaacccctctctcaccccggcacaacctgggcttccacagtctggagctgccctacccccagattctctgagcactttcccccatccccagggccacagatccccttccttacttgttggggggaggtctggagcacctcgccaatgcccttcccccatccggctgggtccttccagttatttatttgtgtattcatttatttatctatttattattctatttaatctcttggcctcacccagggaccgtctggcttccccagctggactgggaggtcaggaagccaggcaaggagagggacagcacaggccacagagggctgcccccaccacacacacccccgcgtctcgggagaaaccca

SEQ ID NO: 89527 - DNA, 318 bp, Homo sapiens
actgtgcccggcagcaccttttctttatggacatagattttggtatttcctttaccaaagggaagataggtgggactacttctggttatatgcttcgctttaggcttgaagaacagttgctgtaaagattttattttgtgaaagacccaaggttgaaatgagtcggattcattggaatccattacttttccagggaataggattttaaatgaaaagctaagcatcctctctttcaatatctgccctcacagtgtgcctgagttgcatttacacttagagtgacagatgagactcgggtgtgtgtgtggttggaaggct

SEQ ID NO: 89528 - DNA, 409 bp, Homo sapiens
ctcttactcttattcatctcagtgctgcaaattttagccgatacaagaaggcaaaaagaagaaaaaagacatacagattagaaaataagaaataagactttccctatttgcagatggcataattgtctatgcaaaaaaaaaaaaaaacccatgaaatctcaaaaaaaaaccttcctagaattaataagtgagttcagtatggttgaagaatacacgataaacatacaaaaatcagttatatttctttatgttaacagtgaacacacggacactaaaataaaaatgcatatcatttgtaatcacttaaaaaagaataaaaagtttaaatctagcaaacattacagaatatgtatgcttagaatcataccatgctggtgaaagaaattaagatctaagtaagtgtaaaggc

SEQ ID NO: 89529 - DNA, 590 bp, Homo sapiens
cagaaaatttctccggatgacatcacaccggtcttctgaaattttcccattgcaaacaaaagcataaaaactaagcttataatcctcatttaaatttaaaactataaaaatttcctatataccaaacaccagggaaacatgttatgacagcttctatgtgagtggtcaagatcacgccctttgggaatttgggaagccaagagagagatgagtgaaatgcaaacaacaatctgcatggttcatgaccacaatgcctgtggctgaaatgttccaaaacacaccagcttaacacacagtcctgttatgtgtaagtggaaacaacactgaactcttgaaacagatccacgagtgggaatggtgacattccaatcaactgctctaatttcacccactgggaagccgcccgggtgagtaagcaagagtgtatcacgcctcttaagtttcttctcaaagcagcagagcagcggctgactcaaggtgtccctggaacctgcccacactcactggggacacaaaagggaacagggctggcacaagtgctttcagagacaccatgacccaacacccccaccagcaacattttagccatg

SEQ ID NO: 89530 - DNA, 277 bp, Homo sapiens
gagaggcgatgagatgagcccgggagaggggcagaaactgacatggtcagagatcatggtggccttgggggccactgggaggacttgggctttgactctgactctgaggacaggaggggccaccagagggtgttgagcagaggagggaggtgatcccacgtgggatttaacaggctccgtgttgagactagactgtagggcgggggtagagcccggagcctgtggcagcacttgcggtgagaggcaggggtggcttggccccgggaggcggtggaga

SEQ ID NO: 89531 - DNA, 162 bp, Homo sapiens
tgtccagtcctggtatctgcactctccgccttacgtttgctcctgctgaggagtgaaggtgactgtgacaggatgctttgttggcaccattgttgcttctgagtttgtccagttagttggatggccagtcactttgccctcatccttggtccatgttttctt

SEQ ID NO: 89532 - DNA, 486 bp, Homo sapiens
agaaggacctctctgttgtctcaggcagtggggtgttctgtggaatgcatgcctgatgccctgagtttccttcttagccttggagagagggacaaagctgctctcagatgtcataattactagcactgccccttatggaagtgggagatggaacctgtggtgaaatgcactgtggtctctgcaaggggagaggggactgcactagctccaagtcccgggcaagcaaaaacaatgtccacctccctatcatatccctgtcctgggattcctgactctctgttcagagagatattgtcgtttatttccatgctgcaccgtagttaatggctgtggaaaatgcttagccacagctatctgctgcaatggcctctgggcagaagttcttttgttagcccagaacagatagctctgcagctcacctattccctgttgcaggaactctgccgctccatgtagaaagggggaaggaccgtgccctctgttcaa

SEQ ID NO: 89533 - DNA, 2121 bp, Homo sapiens
ggcatctactgtgtgccaacatttgtgtgatactcctgggagtcaagatgtgatcctggccttgaagctattcttaaatgctttgactcttgagagctagtggtgttttagccacttactttttctgtacccattttttcttcactttgattttttcatttttctacctgtatgaactccaggtacttgttagcttttcgtttttaaaaatttgcatctttcctgatgtttctttagcttcatttgcaagaaacttgatgtttttctgatctaatcacttgctaagttaggccccactttccaattttctttctagctgattgtcgtcttctggagtcttccagctaatactgtgattccattcctgtctctaccatctctaacatacctggctgccatattcctttatattatatggaaataataatatgaggtatatctccattctggaattgagagtacatctttgatattctctcttcaaaaaacgtaaaatggtgatttttcctcattttatagtgagatatttagtcattataatttgttttctggtgtttattttttattgctaatgatgtgtttggcactaagatgttaaaagtgtatatgtatgatttttattgcaggcattataaactcctttggatttttatccaaaaatgaattcaggccgggtcagtggctcacgccggaatctcagcactttgggaggccgaggcaggcagatcacctgaggtcaggagtttgagaccagcctggccaacgtggtgaaaccctgtctctactacaaatacaaaagttagctggttgcggtggcgagtgcctgtaatcccaactactagggaggctgaggcaggaaaatcacttgaacccaggaggtggaggttgcagtgagctgagattgtgccattgcactccagcctgggagacggattgagaccctgtctcaaaaaaaaaaaaaaaaaaaagaattcagccaggcacagctgctcatctctgtaatgctggttgcttgggaggttgagatgggaaggtcctttgaagccaggagtttgagactagccttggcaacatagcaagaccctgtgtctactaaaaaaaaaaaaaaattttttttttgattagctgggtgtggtgggatgattgcttgagcccaggagtttgaggttaacagtgagctgtggttgtgccaccacactctaacctgggttgatagagtgagacccgtctgtttaaaaaaaaaaaaaaaaagaaaaaaattaatgtatataaattcaagaccattatcaaaaatcaaatgcaagtgagttggattatctaagctctaagcatgtaaaaaacttaagattacagcaggttacttactatatgcattgaactactgaattcaaatttcccagtttttcattttaagatttaatgattttctttactaataataacctatatgctatgatttgtaacttgcattttacaaagcaagttaaatgtggaacttgtgcgtttgtttaccttaggattaggctttactggcatcacagcatttttcagtaattactagatttcttagcatcttggatttcattgaaaaatgctcgttcagaagtaatgtatgaaaggacttgcagatacaatataaaaagtgagaaatcagggattgtgaaggtttttattcccaaaaaccttgctagttaaaataagacttgctgtaacatagcgtgtatagtttagagttagagattttatccattaggatttattaaaggaaataatgtctattgtaaatttaagataggttatgtgagagtataattaaaatatttttttgtgaaatgagttatttttatatagtctgtgatctgtctgaaaacatacaatcttgtttaaagtaaccaaaagcaaaaaccttaaggtacaatcgttagggtttgttttttggttttttttttctgggagacggattgagaccctgtctcaaaaaaaaaaaaaaaaaaagaattcagccaggcacagctgctcatctctgtaatgctggttgcttgggaggttgagatgggagggtcctttgaggccaggagtttgagactagccttggcaacgtggcaagaccctgtgtctact

SEQ ID NO: 89534 - DNA, 2332 bp, Homo sapiens
ggcatctactgtgtgccaacatttgtgtgatactcctgggagtcaagatgtgatcctggccttgaagctattcttaaatgctttgactcttgagagctagtggtgttttagccacttactttttctgtacccattttttcttcactttgattttttcatttttctacctgtatgaactccaggtacttgttagcttttcgtttttaaaaatttgcatctttcctgatgtttctttagcttcatttgcaagaaacttgatgtttttctgatctaatcacttgctaagttaggccccactttccaattttctttctagctgattgtcgtcttctggagtcttccagctaatactgtgattccattcctgtctctaccatctctaacatacctggctgccatattcctttatattatatggaaataataatatgaggtatatctccattctggaattgagagtacatctttgatattctctcttcaaaaaacgtaaaatggtgatttttcctcattttatagtgagatatttagtcattataatttgttttctggtgtttattttttattgctaatgatgtgtttggcactaagatgttaaaagtgtatatgtatgatttttattgcaggcattataaactcctttggatttttatccaaaaatgaattcaggccgggtcagtggctcacgccggaatctcagcactttgggaggccgaggcaggcagatcacctgaggtcaggagtttgagaccagcctggccaacgtggtgaaaccctgtctctactacaaatacaaaagttagctggttgcggtggcgagtgcctgtaatcccaactactagggaggctgaggcaggaaaatcacttgaacccaggaggtggaggttgcagtgagctgagattgtgccattgcactccagcctgggagacggattgagaccctgtctcaaaaaaaaaaaaaaaaaaaagaattcagccaggcacagctgctcatctctgtaatgctggttgcttgggaggttgagatgggaaggtcctttgaagccaggagtttgagactagccttggcaacatagcaagaccctgtgtctactaaaaaaaaaaaaaaattttttttttgattagctgggtgtggtgggatgattgcttgagcccaggagtttgaggttaacagtgagctgtggttgtgccaccacactctaacctgggttgatagagtgagacccgtctgtttaaaaaaaaaaaaaaaaagaaaaaaattaatgtatataaattcaagaccattatcaaaaatcaaatgcaagtgagttggattatctaagctctaagcatgtaaaaaacttaagattacagcaggttacttactatatgcattgaactactgaattcaaatttcccagtttttcattttaagatttaatgattttctttactaataataacctatatgctatgatttgtaacttgcattttacaaagcaagttaaatgtggaacttgtgcgtttgtttaccttaggattaggctttactggcatcacagcatttttcagtaattactagatttcttagcatcttggatttcattgaaaaatgctcgttcagaagtaatgtatgaaaggacttgcagatacaatataaaaagtgagaaatcagggattgtgaaggtttttattcccaaaaaccttgctagttaaaataagacttgctgtaacatagcgtgtatagtttagagttagagattttatccattaggatttattaaaggaaataatgtctattgtaaatttaagataggttatgtgagagtataattaaaatatttttttgtgaaatgagttatttttatatagtctgtgatctgtctgaaaacatacaatcttgtttaaagtaaccaaaagcaaaaaccttaaggtacaatcgttagggtttgttttttggttttttttttctgggagacagagttgcccaggctggagtgcagtggtgtgatcctggctcgctgtaacctctgccctcctgagttcaagcgatccttctgccttaatgtcccaagtagctgggattacaaacatacgccatcatgcccggctaatttttgtatttttagtagaaatagggtttcaccaagttggccaggctggtctcaatctcctgctctcaagtgatccacctgcctcggcctcccaaagtgctaggattacaggcgtgagtcaccgcgcctggcccatagtgaagtttttattttgtcatttagctatatctttggaaaaatttggaaatgtattttcatctccctaactttcaaataaaagttactattaacattttgaa

SEQ ID NO: 89535 - DNA, 286 bp, Homo sapiens
ggaaacccttttctcttggttctcattctctcttacctgccaccacataagatgtcctttttgccttccgctatcattgtgaggcctctccagtcacgtggaactgtgagtccattaaacctctttttctttataaattacccagtctcaggtatgtctttatcagcagcgtgaaaatggactaatacagcgttcaactggttggatgaggttcagccacattatggagggtaatttgccttactcaaagtctactgatttaaattttaatcacatctaaaaaata

SEQ ID NO: 89536 - DNA, 516 bp, Homo sapiens
tgttttccttgagaaaaggattttgacacattagtgatcagaaaatactgattactttttatccccagaactccacatctagaaatgtatgacaaagaaatacatcaaaataaaaatgcacgctctaagatgtgtataccagtgttattgcacaaaatttactacaacctacacccctaacaacagggtatggtttaagtaaattatggtatgtacatttgatggacgtcattaaaaacattaaccaaatttttcaaaggtgtggaaatatactttggatatcaagtaggtcgccaaactgtattaaacaaatgaggcaaaatataaacaaagaataatttcaaatccatgtgcaactgtatctgcagaggaaaaaaaagcctgaaaatagatgtattaaaagttattaaggctacctctaggaatttctatgtaaaggattattttcatttttaaagttttatgtattgtttcaaattttccatatttaatctgaaacatacagaaggagcctag

SEQ ID NO: 89537 - DNA, 634 bp, Homo sapiens
gacggtctttacaagcgactcgtgggcgtcaatactgggctgagtttgtggcgcgcttagtgatgggatggccctgtgcaggacgccgacacgaaaagatgaagagttcaatccgtgctgtctgaactcacagtgtagcaggcgagatagacgggaagatcggtagggtgggagatgccggaaaggcttcccgtgagactggataagaaatcaaaaatctggtgaaattgccggcaagagggagttaaggacattccaggcagaggcaaggctcccgctgaagtaacccagacgccagggatatctctgcccgctccactctgactctagtgctcaatgtgcctgccaggccttgctagggatgctgtgccagtgtgaagaggaaggtggtctccagctctcaccccatagaagctttctgcctcagtttccctaacctggaacaccacaatgactcctgaattgaaaaacactgcttacagcatctaggctaaaattggcagaatacctgggctccaagccagggagatttggagcgatggggaggtgcaagagcacagccagacagagccaaaagcaataatatcctgtttgttcctacactgccctccgcattaaaaaaacaacgacagct

SEQ ID NO: 89538 - DNA, 1254 bp, Homo sapiens
cctggccatcaggccccatttctgcccagcacagagactgctatgacccagtgatgacattgtgccctaagaacttccccacattctcttcaactcacagacgacctcagatgtagctgctctctcaggccttcaatgtacgtctccacccaaatgagtaatatttgcattacaaggaggaaaggagagagggaaccatcgggtacctgctgtaccaggcacattatatgctattgtccctgttttccagatgaagccagatactcctctatgaagttaaatgactggttcagtgttaacactgctagtgagcgacagagatggaatttgaacgcacacctgtctgactccacctcgtgttccttccacatggccagcaagctctgctgtcccacctcgcacttctgggaggtggctactccctctttccacccccttttctggatcttgacaagggattctaccctgccccagctgtcaaagcctgcagcagctgccaaaaaacctcaacacaggcatactttggacctacatcatgtgttgatgtcacagatgctgtaccaggcatttgactccttgatctaaagccaggattcctagccaacatggcgaaaccctgtctctactaaaaataacaaaaattagctgggcatggtgataggcacctgtaatcccagctacttgggaggctgaggcaggagaattacttgaacccaggaagcgaaggctgcagtgagcagagattgtgcctctgcactacagcctgggctatggagtaagactctgtctcaaaaaaaaaaaaaaaaaaaaaatagtgagggggatgcatgcccacacaaaggaatcctgatagaggaacaatggcttggtccgtttcccctcctgtgtagcactgtgataaaggaaagcctttcaggtatgtgcctcgatggagccagtgggtggaagaggaagggcaatgagaggtttgaggacaagctgctgataccctcatgtgtcatcacagtggtgccctttgggagcctgctttggtatactcgtccactcagggaagaggaagtctcttatccacagttttgtcttcaaaattgaaatttctttgggcagagcctaaaagagagttgcctcatttcgtgtaactgtagcatatgtagtgtagaggctccaatgtgtttttgaggcaatctgagagctctttctggaaatccctggcagatgacatctgcgtctgattttactttgtcttacaaccag

SEQ ID NO: 89539 - DNA, 928 bp, Homo sapiens
gacggtctttacaagcgactcgtgggcgtcaatactgggctgagtttgtggcgcgcttagtgatgggatggccctgtgcaggacgccgacacgaaaagatgaagagttcaatccgtgctgtctgaactcacagtgtagcaggcgagatagacgggaagatcggtagggtgggagatgccggaaaggcttcccgtgagactggataagaaatcaaaaatctggtgaaattgccggcaagagggagttaaggacattccaggcagaggcaagtccagattcctaagatgaggacacagcatcctgggccactgtcactaatacaaatttgcctctggagggactctacggaagataattcccctgaaatttggagagttgaattaagctaggactgattctggctggaatttgtggtggctacgtaccctagagggcctcaaggaaacccacggttcaagacagccctgacagattctggagtctagaacagaaatggatttgaacatgggcaaggccaaccacccagttcacggcctgtgtacagcaaagattacgttacagcctgagagctaagcctggaagctctttcatccatccgtttgtccatctatccatccatctgctcatccatccctccatctgctcaacaaacgttagagaatcaatccttgtgtcagatactggggctgccctcaaggagcttttatagagttcagggtacagccaggtgggggagacagatcactataaaaacctaccactataatccaaaggacaagagcaaaaatagtaaagaggagagaagacccaaatttgcctggtgggtcagagagggctttctagaagaggtaaaaaatcttcggggctatcacttcaccttgcctggtggataaagggaggactttccagatacagtggacagaatgtg

SEQ ID NO: 89540 - DNA, 494 bp, Homo sapiens
agtaaagctgggaagatgtttgtttgtaaggggtaatctgtgtctatcaaagcagatagtattggttttgcctagtttccaaacatggttttataagtcagtatatcttgtgaaaccattaggacaaaagtttggaacaaaaagaaatctcaggctcattgcaaagcttttttaacgttttcagttccctccatgttctgagcattatcataacgtactgaactgttctgttcagagaccactagggagaggagatgaggaaccagagcagccaggatgtttctccctgggataaaatctcaagcattcagacaccctcactgtgggctccacttctgtagctagaggggactggaaacagcaggagcatctcacagcttgtaggaagcacacatctttttcccaaatgtttctttttgcagttggtccttgctggctgatccagcttccccgtcagcatatggtgagcagttcggtgagaggaccacacttcc

SEQ ID NO: 89541 - DNA, 388 bp, Homo sapiens
tctgggaggtggctactccctctttccacccccttttctggatcttgacaagggattctaccctgccccagctgtcaaagcctgcagcagctgccaaaaaacctcaacacaggcatactttggacctacatcatgtgttgatgtcacagatgctgtaccaggcatttgactccttgatctaaagccaggattcctagccaacatggcgaaaccctgtctctactaaaaataacaaaaattagctgggcatggtgataggcacctgtaatcccagctacttgggaggctgaggcaggagaattacttgaacccaggaagcgaaggctgcagtgagcagagattgtgcctctgcactacagcctgggctatggagtaagactctgtctca

SEQ ID NO: 89542 - DNA, 1357 bp, Homo sapiens
gacggtctttacaagcgactcgtgggcgtcaatactgggctgagtttgtggcgcgcttagtgatgggatggccctgtgcaggacgccgacacgaaaagatgaagagttcaatccgtgctgtctgaactcacagtgtagcaggcgagatagacgggaagatcggtagggtgggagatgccggaaaggcttcccgtgagactggataagaaatcaaaaatctggtgaaattgccggcaagagggagttaaggacattccaggcagaggcaagttggtccttgctggctgatccagcttccccgtcagcatatggtgagcagttcggtgagaggaccacacttccaatactggcagatgaagccagatactcctctatgaagttaaatgactggttcagtgttaacactgctagtgagcgacagagatggaatttgaacgcacacctgtctgactccacctcgtgttccttccacatggccagcaagctctgctgtcccacctcgcacttctgggaggtggctactccctctttccacccccttttctggatcttgacaagggattctaccctgccccagctgtcaaagcctgcagcagctgccaaaaaacctcaacacaggcatactttggacctacatcatgtgttgatgtcacagatgctgtaccaggcatttgactccttgatctaaagccaggattcctagccaacatggcgaaaccctgtctctactaaaaataacaaaaattagctgggcatggtgataggcacctgtaatcccagctacttgggaggctgaggcaggagaattacttgaacccaggaagcgaaggctgcagtgagcagagattgtgcctctgcactacagcctgggctatggagtaagactctgtctcaaaaaaaaaaaaaaaaaaaaaatagtgagggggatgcatgcccacacaaaggaatcctgatagaggaacaatggcttggtccgtttcccctcctgtgtagcactgtgataaaggaaagcctttcaggtatgtgcctcgatggagccagtgggtggaagaggaagggcaatgagaggtttgaggacaagctgctgataccctcatgtgtcatcacagtggtgccctttgggagcctgctttggtatactcgtccactcagggaagaggaagtctcttatccacagttttgtcttcaaaattgaaatttctttgggcagagcctaaaagagagttgcctcatttcgtgtaactgtagcatatgtagtgtagaggctccaatgtgtttttgaggcaatctgagagctctttctggaaatccctggcagatgacatctgcgtctgattttactttgtcttacaaccag

SEQ ID NO: 89543 - DNA, 418 bp, Homo sapiens
gttgtgtagtaagggtaacttaataagaaagtgttaaaatgcaaaatagctctactattttatgttcccatcggctatctatgatagttccaggtgcttcacattctcaccatcatttggtattaccagtcatatcttcctgatagtgtctgttcaattcttttacccatttattttatactgttgtcttactttctcaacaattagctttctattccacacacaagtcctttattggatgtgtcttttgtaaatattttctcctaagtctgtggctcattttttcttcctttatttttttgagacggagtctcactgttgcccaggctggagttcactgccatgatctcggcccactacaacttctgcctcccaagttcaagtagttctcctgcctcagcctccccagtagctagga

SEQ ID NO: 89544 - DNA, 270 bp, Homo sapiens
agaagatacaaataaatagaaaaacattctaccttaatggattagaagacttaatattgttaagatgttactactacctaaagcaatcccagatttaatgcagtccctataatcatgaatccgataagcagtcatcatccaggatatatagagaactcctgaaattcaacaacagaacaaccaaacagccctattcaaaaatgtggaaagaacttgaacagacatttctccagggatgatacagaaatggctaggaagcacatggaaaga

SEQ ID NO: 89545 - DNA, 121 bp, Homo sapiens
agccggaagtcagagtgcatttggatgctcatgtgtgtgtccccaacttcagcccatcattttttctttctgttgccttcattcactccttcatttggttattcagccattcaccaaccag

SEQ ID NO: 89546 - DNA, 337 bp, Homo sapiens
gggctgtctagataaatgtggaaattattggcatgtagattgtaattaagccatgagaccagatgagggaggtattcagaaacaaagaaaaggtaaaatgattgagctctggactcccccaggattagggattagggatatgagaaggagccagaaaaggagcctaagaaaggagtggtcttaatgcaaagaggaaaatcagacaagttcaattccctgggagtcagtgaagaaaaagtttcaaggaagatggcatagtcaactgtggtcaactctatcaaaagctagaataagatgagaactatgggatttattgtcttttagtcacaaggtaatt

SEQ ID NO: 89547 - DNA, 458 bp, Homo sapiens
gaggcactggagggttttgatcagaggaggtacagggtctggactacattttcaccagttcatgctggctgttgcatggaggagatattctgagaagaagcagagagactactcaggaggttactgatgaactccagccaagagatggtggcaccgtggaccagcagaattgtgtaggagaaaaagaggcatcaaggacaacgtcaacaactgtggcctgagtaactggaaggagatgggaaggcagtgggagaagcaggttggggtagaatatcaagagttcatcccactgaaggcagttaagagacagtgggatatgcaagcctgaggttcaaagaaaaggcccaggctggagaaggtgtcagttttgagatggtttgaaggcatcaacaaaaaacagaccaggtttgaggactgagccctgaggctctctcacatttggaaaccagaggctgcta

SEQ ID NO: 89548 - DNA, 943 bp, Homo sapiens
aaaaagtatagattttgaatgagttagtatatctttgagaatataagcgataagagtacttaaaagttaaaaaagagaaagaaataccaaaataaagtgcctagctcagtattcccatcagaaaaggcctttgtgaaaccagaacacatccagaattggattagcacaataatgtttagtttcaacccatgtcatgccaagactacctgagacagctgggtgacactcatctgcagagagctagtatggttgagtggctagtgaaaacaatcccggtgctaccatttgctaactagaattatttagattttcttactctcagttttctcattcagaaagtagcagtgccagcctcatggttgttgtaagggttccttgtattcaacatgaagtacttagcagcatctggaatgtagtaaataataagtggtgctattatagatgctatagctaggaccaccaggtgggaactatcgagtaacagattgtgagtgtatgctaaatctttaaatacttctctcagtgatgtccaaaatgtcatgggttgccctgtaagtccggtttttcttatcactaaaggatgagtagctttaatctacttggcagtcacaacagatgacctagaatcacagatgattaggtatggaaggcacattggaagatacctaggatgacctgcttgcagaagaagaaacggtaacccaagattgtgggtcatttacccaaggcaacctggatggaagtggtgagccttggactagacccaggtctttcaacttaaaggccaatgttctttgctctgtattacatttccttccaaggaacttctaaaatcctgtttcctgatattctgtttttactctttagacacacatctgttcttttaaataaggtgtttttaaacaattcaacaagtgtttttaaaagaacagatgtgtgtcta

SEQ ID NO: 89549 - DNA, 406 bp, Homo sapiens
ctagaggatccccgttgtctgctctggaaaataaaattgacctagtcaacgtggaaaactgagtactatcaacactgttggcaggagatcataatggtgctctttttgtagtgataaactcttctcacaaaaacagatactctgaaagaggtagggtgagatggggtgaaggtgatacaagaataaaatcttataagattttgtttttgaaacaactgatggcaaatacaaagcttctactgaattcactcagaccatgcctaatttatgcatacagtattcacttttatgcagtatctttaaattttttttttttagagttgggggtctcgctatgttggccaggttggtcttgaactcctggccttgagcaatcctcccacctaggcctcccaaagtgctggga

SEQ ID NO: 89550 - DNA, 303 bp, Homo sapiens
  misc_feature (62)..(63): n is a, c, g, or t
  misc_feature (71)..(71): n is a, c, g, or t
  misc_feature (97)..(97): n is a, c, g, or t
  misc_feature (205)..(205): n is a, c, g, or t
  misc_feature (218)..(219): n is a, c, g, or t
  misc_feature (235)..(235): n is a, c, g, or t
  misc_feature (246)..(246): n is a, c, g, or t
  misc_feature (268)..(268): n is a, c, g, or t
  misc_feature (273)..(273): n is a, c, g, or t
gtgaagtacagtttagaggagaaacatctactatcagaatgtacttaaagagaccaatcttnncacctctntgtagtaaattggatgtttacattgncatgagggtatctctcttggaagaaagaaattattctttattctgaggtcagttatagacagtttcagctaaaaattatgaggaactgattggttatgtctaaaactntgagttgggtttnngatacttgacttgttntgtatattcgngactataattaatagcatctgnatggnaggtaagctatgttatccattgtgaataca

SEQ ID NO: 89551 - DNA, 276 bp, Homo sapiens
gcgtgacaccttagaggagggagggaaagtgaggctcggctgggccatctccatcagtgatcatcaccacagctcggaccggtgagccaagcatcctgcatgcactcatgttgcatcttcccagcaactatgaagtggggaccactgatatccacaaggagcctgagccagagtgcggaagtgatgtgccagcgccacccagccaggaaactacagagtcaaacccaagactcagacctacacccctgctcatagccacctgccacaccacccgcc

SEQ ID NO: 89552 - DNA, 5263 bp, Homo sapiens
tttgcttgatgtctcctgagcggcggcggcgccgggtcgagggctgagttgtccgcgaggccccgcgctcaagccgccttctcctgccggtcggtagaacggaccccttcctttattcctgtctcctctttctttttccctgtggctcagcccgttcgctggactgcaaaccgagctcccgtctgccttgcagatttccatgaggacaacttacaaggacctgtatggcctcattttagctgcttcagtgtgttggagctgttacttgctccttcatttcctgggcctggtgtgacagtggctactgagcgccatgaaggttgtcccagaaaagaatgctgtccggatactctgggggcgagaacggggtgctcgggccatgggagctcagcggcttctgcaggagctggtagaagataaaacccggtggatgaaatgggagggcaagagagtagaactgccggatagtccacgctctacctttttattggccttcagcccagacaggactctcttagcctccacccatgtgaaccataatatctatattacggaggtgaagactggcaagtgtgttcattccctgattggacaccgccgtactccatggtgtgtcacttttcatcccaccatctcaggccttattgcttctggctgcctagatggggaggttaggatttgggatttacacggtggcagtgaaagctggttcacagatagcaacaatgccattgcctccctggctttccaccctacggctcagctcctgctgattgccactgccaatgagatccacttctgggactggagtcgacgggaaccctttgctgtggtgaagacagctagtgagatggaacgggtccgtctggtgagatttgatccacttggacactacttactcacagcaattgttaacccctctaatcaacagggtgatgacgaaccagagatccccatagatggaacagaattatcccactaccgtcagcgtgccctcctgcaatcacagccagttcgccggacgcctctcctccacaatttcctgcacatgctgtcctcccgctcttctggcatccagaccgagcccttccatcccccggagcaggcctcgtcaacgcagcaggaccagggcctcctgaaccggccgtctgccttcagtacagtccagagcagcactgccggcaacacgctccgcaacctcagtctgggtcctacccgccgctctttgggagggcctctgtctagccacccttctaggtatcaccgagaaatagctcctgggttgacaggatctgagtggacccggacagtactcagtctgaactcccgctctgaggcggaatccatgcccccgcccagaaccagtgcctcttcggtgagtttgctgtctgtgctgagacagcaggaaggtggctctcaggcatctgtgtacacttcagccacagaagggaggggttttccggcatcagggttggcaactgagtcagatggagggaatggctccagccaaaacaactcgggcagcattcgccatgagcttcagtgtgacctgagacgcttctttctggagtatgaccggcttcaggagctggatcagagcctgagtggggaagctccccagacccaacaggcccaggaaatgctcaacaataacattgaatctgagaggccaggcccttcccaccagcccaccccacacagcagtgagaacaactccaacctgtcccgtggccacctgaatcgctgtcgtgcttgccacaatctcctgaccttcaacaacgataccctgcgctgggaaagaaccacacctaactactcctctggcgaggctagttcctcttggcaggtccccagctcctttgagagtgtgccatcaagtggcagccagttgccacctctcgagcggactgagggccaaacgcccagctccagcaggctggagttgagcagctctgctagtccgcaggaggagaggactgtgggggtggcctttaaccaggagacaggccactgggaaagaatttacacccagtccagcagatctggaactgtgtcacaggaggccttacatcaggatatgcctgaggagagctctgaggaggattcactcaggagacggagtcttgctctgtcacctaggctggagtacagcggcgctatcttggctcactgcaagctccgcctcccaggttcatgccattctcctgcctcagcttcccaagtagctgggactacgggagcccaccaccacgcccggctaatttttgcatttttagtagagatggagtttcaccatgttagccaggctggtctcgaactcctgacctcaggtgatctgcccacctcggcctcccaagtgctgggattacaggcgtgagccaccgcgcctggccgaggctgctggaatcttccctcatttcattatcccgttatgatggagcaggatccagagagcacccaatttacccagacccagcgagattatctcctgctgcatactacgcccagaggatgatccagtatctctcacggagagacagtattcgccagcgctccatgcgctaccaacagaaccgtctccgttcttccacctcctcctcttcctcagacaaccagggtccatcagtagagggaaccgacttggaatttgaggactttgaggacaatggtgacagatccaggcaccgagctccacgcaatgcccggatgtctgcaccttcgcttggacgctttgtcccaaggcgtttcttgctgcctgagtacttgccttatgctgggatttttcatgaacgtggacagcctggcttggctactcactcttctgttaacagggtcctggcaggggcagtgatcggtgatggacagtctgctgtggccagtaacattgccaatactacctaccggctccagtggtgggacttcactaagtttgacctccctgaaatcagtaatgcttccgtgaatgtgctggtgcagaactgcaagatctacaatgatgccagctgtgacatttctgcagatggccagctcctggcagctttcatccccagcagccagaggggctttcctgatgaaggcatcctggcagtgtactccctggccccccataacctgggcgaaatgctctacaccaagcgatttggtcccaatgccatttcggtgagcctgtccccaatgggcagatatgtaatggtgggcttggcctcacgaaggatcctgctgcacccctccacagagcacatggtggcccaggtcttcaggctgcaacaggcccatggtggagagacctccatgaggagagttttcaacgtcctttatcccatgcctgccgaccagcggagacatgtcagtatcaactctgcccgttggctgcctgagccagggcttggcttggcctatggtactaacaaaggagacctggtgatctgccgaccagaggccttaaactctggtgttgagtactactgggaccagctgaacgagacggtcttcactgtccattccaacagcaggagcagcgagcggcctggaaccagcagagccacatggaggacagacagagacatggggctgatgaatgccattgggcttcagccccggaaccctgccacctcagtgacatctcagggcacccagactctggcccttcagctgcagaatgccgaaacacagactgagagggaggtgccggagccagggacagccgcctcaggtcctggtgaaggtgagggttcagagtatggtgccagtggagaagatgcgctcagcaggatccagaggctgatggcggagggcggcatgacagccgtggtgcagcgggagcagagcaccaccatggcctccatgggcggcttcggcaacaacatcatcgtcagccaccgcattcaccgcagctctcagacgggcactgaacctggtgccgcccacacctcctcaccccagccctccacctctcggggactgctcccagaggccgggcaactggcagagcgaggcctaagcccccggacagcttcctgggaccagcctggtacccctgggcgggagccaacccagccaaccctgccctcttcctcccctgtccccattcctgtttcccttcccagcgctgagggaccaaccctccactgcgagttgaccaataacaaccaccttctggatggtggcagcagcaggggggacgctgcaggccctaggggagaaccacggaacaggtagagacaaacgttgcactggtgcctcccctcgaaccgccaagcagaaaccggacctcacagctgactgggaactggacatgtggaagagctgctggctgcatcagggaacaggaggaggaagagggtcagggtggagaggaagatcagtcagtgggcacaagacagtcaaatgggcaaggcctgcctcggggaactagaaccttccaggatctggagcccgggagagccacactgtgggcttaatgtgaatagaggaacaagtgggtatctctgccaggcaccccactttctcctagtaacatgggctcaggggactcagccctggacagagagcctccagagagtgaacagtcttccagatctgggccaatcatcctggacagaggcccgcgaggcagctttgccctgtccacctgttgggtgggcagagccaccaggaacccagacaccacctccaactctgagccttccagagcttcagcctctcttcgtcgtcttaccccactgaaaccaacagggatcgggccaggctcccagattcttgaggacagggacttcggcatttactaatgggggactactgtggggtaagggggcgcctgcttgcctgatacaggatggggtcaagggacagtgggcaggtcctcactcaggagtggggggtgtaggctggccagcccccagggcttgtccaccagtcttctccccgcaaggccctcagagcagcgcctgtgggtgtcagtattacctgagcctaggccaaagctagcccaaggctggggaaggggaggagactccaggtcagaatgtgaggtctcagtctgtgatttaaggtgttgcatgtggactcttaactgtacgtgtagtttctagtggagaaatcaaggctctgatcattttgtttttagtatgaaaatgtgatttcctttctgtttgtaactcatcatagaaacattgtggtgggaggagaggggatagtctacagctaatgagggaaacaccaaagatcacatcattaaaatgatgacatgcccctcaaaaaaaac

SEQ ID NO: 89553 - DNA, 1527 bp, Homo sapiens
gctttctcttttgggaaaataaaaaccaaatactttcaatggatcagcttccaatatccctggtattgatttgtcatttaatgctcggcagccaattctaccaagatataaaaaccatcatagacttttgtttctggcttgtgaagttcccagtggtccacttaaaagccaagtgttgccttaacttcggtttcagggccagtttgaagattatctcattgatttgaagataatccaaagggagaattcagaaaatatcccaaatcaagctctcaaaggttcatttattttgtggagttggttaagccgctcattaactgctctgtccagccagtgccctttggcttattattcttttgatgtactggaaactaaaacatgtgaagctcctttcctcttctcttgtaggaagcagtgaaatgtagtggaaagatctaggacttcaaagtccaatcttccttgaatcctgccttaaccacttactagttatgtgaccatggtatttacctctctggtctttcgtccgcttctctgtaaaatagtaataatacttcgtggcctagccagaagaattaaatgggataacatatcaataacctttgtattggaacctagcagatacttaataaatggcagttactactattgcatggactgttaacagtccataaagaaaacacccagactttgtattcaaatgacctaacataggattacgttttctaatattcttcaccattgacagtctgtaaaagaaggtactgtctttttcttgtgcatttttttttcttttacctgtcactgatttttccacatggaagacctaaacagatttcatttgaagataaccatttgccaaatgaaattggtgggggaatttttcttcctttaagacctcctcccacagcaggcgtctggataacaagtaaaatgataaataatggacaatggtgacagatccaggcaccgagctccacgcaatgcccggatgtctgcaccttcgcttggacgctttgtcccaaggcgtttcttgctgcctgagtacttgccttatgctgggatttttcatgaacgtggacagcctggcttggctactcactcttctgttaacagggtcctggcagtaatcatatgagataggtgcgattacctaattaacagtggaggaaactgaatcccagagggctaacttgcccagagtaatgcagctaagaagtagaagaatggagccagtagtctctaaaccaccttcccgatccgcctcctcgtagttgttttaaaggacaaaacattaaaatgtcattctttttcttaggactttataagagggagagagctcccagggaacttcagtgtttttcttgtttgttttaattattctatttaaatggttcctagacataggtttttatgatccagtggtgcttgctgaggaaaatcttattatgtaaccgcccttttcctgagccttcttgccctcctggatacagatgttttgctttttattaaacttacttgtgatcatgt

SEQ ID NO: 89554 - DNA, 456 bp, Homo sapiens
cggcacgagaaagcttagtttctttcatgttgggattggcaggtagcatcaatattctatgtcgtccaaagttgataagattgttacccttccacatgcttctgaattcagttctactctttgattttctaggactctcttagcctccacccatgtgaaccataatatctatattacggaggtgaagactggcaagtgtgttcattccctgattggacaccgccgtactccatggtgtgtcacttttcatcccaccatctcaggccttattgcttctggctgcctagatggggaggttaggatttgggatttacacgtgagtatttccttaagatacccttttcttttggtgttctaattttttttttttgagacggagtctcgctctgttgcagtgtgctgagattgtgccactgcactccagcctgggtgacagaatgaaaccccctgtcaaaa

SEQ ID NO: 89555 - DNA, 578 bp, Homo sapiens
gatcagattttttgtgtgttttgtgggtccagacagaaattttaccttatggaacagaattatcccactaccgtcagcgtgccctcctgcaatcacagccagttcgccggacgcctctcctccacaatttcctgcacatgctgtcctcccgctcttctggcatccaggctgtatcccgggaagtacctgccacagagaagggaggtgcactggcagagcggactcatgccagatgtagcaaacaagctgagagagggtgtggcatggcttgcattcagcactactgagccttttctctttgcctacttcctcattcccctttctccatgcattttcctgtctttcccatcattaaatgttgaaagcagaactagaagtgtcaaaggccaaccctttaccttccttctcctaaatgagcctttcttctgtttggttacaaaatgccctgaactctgagagcttgagcagtctcttaatcactgtgactctcaatctccttaccccaaattggagtcatacctaccgtcccccctccccggatacagggtacggagtcgaatcgaatcatggctagtgtc

SEQ ID NO: 89556 - DNA, 4653 bp, Homo sapiens
atagcttgtcactcatgtgcctctggctggttgacattttgcttcccctcactgcttccatgtcatggggagatgtcttttgtaagacaattggtttgtcagctgcactcattcagatatgctgctaattgggagtggaaaatttaataccatgtgattattttgaatctgaggccagttgtcagtgcttcaggggtagagagttgtttcctacctatgaacattgttttccttggatgattgtcagtggttagtttttcttgatttacttggaggttctacctaactgccttgctctaccccctgccccatgctggtccacgttgcagggtgatgacgaaccagagatccccatagatggaacagaattatcccactaccgtcagcgtgccctcctgcaatcacagccagttcgccggacgcctctcctccacaatttcctgcacatgctgtcctcccgctcttctggcatccaggtgggagagcaaagcacagtgcaagattctgctaccccctcacccccaccgcctccccctcagccctccacggagcgccccaggacttccgcttacatcaggctccgacagcgggtcagttaccccacagctgagtgctgccagcaccttgggatcctgtgcctttgcagccgctgctctggcactcgagttccttccctcttgccacaccaggacagtgtcccccctgcttctgccagagctactaccccttccttttcttttgtacagaccgagcccttccatcccccggagcaggcctcgtcaacgcagcaggaccagggcctcctgaaccggccgtctgccttcagtacagtccagagcagcactgccggcaacacgctccgcaacctcagtctgggtcctacccgccgctctttgggagggcctctgtctagccacccttctaggtatcaccgagaaatagctcctgggttgacaggatctgagtggacccggacagtactcagtctgaactcccgctctgaggcggaatccatgcccccgcccagaaccagtgcctcttcggtgagtttgctgtctgtgctgagacagcaggaaggtggctctcaggcatctgtgtacacttcagccacagaagggaggggttttccggcatcagggttggcaactgagtcagatggagggaatggctccagccaaaacaactcgggcagcattcgccatgagcttcagtgtgacctgagacgcttctttctggagtatgaccggcttcaggagctggatcagagcctgagtggggaagctccccagacccaacaggcccaggaaatgctcaacaataacattgaatctgagaggccaggcccttcccaccagcccaccccacacagcagtgagaacaactccaacctgtcccgtggccacctgaatcgctgtcgtgcttgccacaatctcctgaccttcaacaacgataccctgcgctgggaaagaaccacacctaactactcctctggcgaggctagttcctcttggcaggtccccagctcctttgagagtgtgccatcaagtggcagccagttgccacctctcgagcggactgagggccaaacgcccagctccagcaggctggagttgagcagctctgctagtccgcaggaggagaggactgtgggggtggcctttaaccaggagacaggccactgggaaagaatttacacccagtccagcagatctggaactgtgtcacaggaggccttacatcaggatatgcctgaggagagctctgaggaggattcactcaggaggaggctgctggaatcttccctcatttcattatcccgttatgatggagcaggatccagagagcacccaatttacccagacccagcgagattatctcctgctgcatactacgcccagaggatgatccagtatctctcacggagagacagtattcgccagcgctccatgcgctaccaacagaaccgtctccgttcttccacctcctcctcttcctcagacaaccagggtccatcagtagagggaaccgacttggaatttgaggactttgaggacaatggtgacagatccaggcaccgagctccacgcaatgcccggatgtctgcaccttcgcttggacgctttgtcccaaggcgtttcttgctgcctgagtacttgccttatgctgggatttttcatgaacgtggacagcctggcttggctactcactcttctgttaacagggtcctggcaggggcagtgatcggtgatggacagtctgctgtggccagtaacattgccaatactacctaccggctccagtggtgggacttcactaagtttgacctccctgaaatcagtaatgcttccgtgaatgtgctggtgcagaactgcaagatctacaatgatgccagctgtgacatttctgcagatggccagctcctggcagctttcatccccagcagccagaggggctttcctgatgaaggcatcctggcagtgtactccctggccccccataacctgggcgaaatgctctacaccaagcgatttggtcccaatgccatttcggtgagcctgtccccaatgggcagatatgtaatggtgggcttggcctcacgaaggatcctgctgcacccctccacagagcacatggtggcccaggtcttcaggctgcaacaggcccatggtggagagacctccatgaggagagttttcaacgtcctttatcccatgcctgccgaccagcggagacatgtcagtatcaactctgcccgttggctgcctgagccagggcttggcttggcctatggtactaacaaaggagacctggtgatctgccgaccagaggccttaaactctggtgttgagtactactgggaccagctgaacgagacggtcttcactgtccattccaacagcaggagcagcgagcggcctggaaccagcagagccacatggaggacagacagagacatggggctgatgaatgccattgggcttcagccccggaaccctgccacctcagtgacatctcagggcacccagactctggcccttcagctgcagaatgccgaaacacagactgagagggaggtgccggagccagggacagccgcctcaggtcctggtgaaggtgagggttcagagtatggtgccagtggagaagatgcgctcagcaggatccagaggctgatggcggagggcggcatgacagccgtggtgcagcgggagcagagcaccaccatggcctccatgggcggcttcggcaacaacatcatcgtcagccaccgcattcaccgcagctctcagacgggcactgaacctggtgccgcccacacctcctcaccccagccctccacctctcggggactgctcccagaggccgggcaactggcagagcgaggcctaagcccccggacagcttcctgggaccagcctggtacccctgggcgggagccaacccagccaaccctgccctcttcctcccctgtccccattcctgtttcccttcccagcgctgagggaccaaccctccactgcgagttgaccaataacaaccaccttctggatggtggcagcagcaggggggacgctgcaggccctaggggagaaccacggaacaggtagagacaaacgttgcactggtgcctcccctcgaaccgccaagcagaaaccggacctcacagctgactgggaactggacatgtggaagagctgctggctgcatcagggaacaggaggaggaagagggtcagggtggagaggaagatcagtcagtgggcacaagacagtcaaatgggcaaggcctgcctcggggaactagaaccttccaggatctggagcccgggagagccacactgtgggcttaatgtgaatagaggaacaagtgggtatctctgccaggcaccccactttctcctagtaacatgggctcaggggactcagccctggacagagagcctccagagagtgaacagtcttccagatctgggccaatcatcctggacagaggcccgcgaggcagctttgccctgtccacctgttgggtgggcagagccaccaggaacccagacaccacctccaactctgagccttccagagcttcagcctctcttcgtcgtcttaccccactgaaaccaacagggatcgggccaggctcccagattcttgaggacagggacttcggcatttactaatgggggactactgtggggtaagggggcgcctgcttgcctgatacaggatggggtcaagggacagtgggcaggtcctcactcaggagtggggggtgtaggctggccagcccccagggcttgtccaccagtcttctccccgcaaggccctcagagcagcgcctgtgggtgtcagtattacctgagcctaggccaaagctagcccaaggctggggaaggggaggagactccaggtcagaatgtgaggtctcagtctgtgatttaaggtgttgcatgtggactcttaactgtacgtgtagtttctagtggagaaatcaaggctctgatcattttgtttttagtatgaaaatgtgatttcctttctgtttgtaactcatcatagaaacattgtggtgggaggagaggggatagtctacagctaatgagggaaacaccaaagatcacatcattaaaatgatgacatgcccctcaaaaaaaac

SEQ ID NO: 89557 - DNA, 4204 bp, Homo sapiens
  misc_feature (4109)..(4109): n is a, c, g, or t
  misc_feature (4157)..(4157): n is a, c, g, or t
  misc_feature (4188)..(4188): n is a, c, g, or t
atagcttgtcactcatgtgcctctggctggttgacattttgcttcccctcactgcttccatgtcatggggagatgtcttttgtaagacaattggtttgtcagctgcactcattcagatatgctgctaattgggagtggaaaatttaataccatgtgattattttgaatctgaggccagttgtcagtgcttcaggggtagagagttgtttcctacctatgaacattgttttccttggatgattgtcagtggttagtttttcttgatttacttggaggttctacctaactgccttgctctaccccctgccccatgctggtccacgttgcagggtgatgacgaaccagagatccccatagatggaacagaattatcccactaccgtcagcgtgccctcctgcaatcacagccagttcgccggacgcctctcctccacaatttcctgcacatgctgtcctcccgctcttctggcatccaggtgggagagcaaagcacagtgcaagattctgctaccccctcacccccaccgcctccccctcagccctccacggagcgccccaggacttccgcttacatcaggctccgacagcgggtcagttaccccacagctgagtgctgccagcaccttgggatcctgtgcctttgcagccgctgctctggcactcgagttccttccctcttgccacaccaggacagtgtcccccctgcttctgccagagctactaccccttccttttcttttgtacagaccgagcccttccatcccccggagcaggcctcgtcaacgcagcaggaccagggcctcctgaaccggccgtctgccttcagtacagtccagagcagcactgccggcaacacgctccgcaacctcagtctgggtcctacccgccgctctttgggagggcctctgtctagccacccttctaggtatcaccgagaaatagctcctgggttgacaggatctgagtggacccggacagtactcagtctgaactcccgctctgaggcggaatccatgcccccgcccagaaccagtgcctcttcggtgagtttgctgtctgtgctgagacagcaggaaggtggctctcaggcatctgtgtacacttcagccacagaagggaggggttttccggcatcagggttggcaactgagtcagatggagggaatggctccagccaaaacaactcgggcagcattcgccatgagcttcagtgtgacctgagacgcttctttctggagtatgaccggcttcaggagctggatcagagcctgagtggggaagctccccagacccaacaggcccaggaaatgctcaacaataacattgaatctgagaggccaggcccttcccaccagcccaccccacacagcagtgagaacaactccaacctgtcccgtggccacctgaatcgctgtcgtgcttgccacaatctcctgaccttcaacaacgataccctgcgctgggaaagaaccacacctaactactcctctggcgaggctagttcctcttggcaggtccccagctcctttgagagtgtgccatcaagtggcagccagttgccacctctcgagcggactgagggccaaacgcccagctccagcaggctggagttgagcagctctgctagtccgcaggaggagaggactgtgggggtggcctttaaccaggagacaggccactgggaaagaatttacacccagtccagcagatctggaactgtgtcacaggaggccttacatcaggatatgcctgaggagagctctgaggaggattcactcaggagattatctcctgctgcatactacgcccagaggatgatccagtatctctcacggagagacagtattcgccagcgctccatgcgctaccaacagaaccgtctccgttcttccacctcctcctcttcctcagacaaccagggtccatcagtagagggaaccgacttggaatttgaggactttgaggacaatggtgacagatccaggcaccgagctccacgcaatgcccggatgtctgcaccttcgcttggacgctttgtcccaaggcgtttcttgctgcctgagtacttgccttatgctgggatttttcatgaacgtggacagcctggcttggctactcactcttctgttaacagggtcctggcaggggcagtgatcggtgatggacagtctgctgtggccagtaacattgccaatactacctaccggctccagtggtgggacttcactaagtttgacctccctgaaatcagtaatgcttccgtgaatgtgctggtgcagaactgcaagatctacaatgatgccagctgtgacatttctgcagatggccagctcctggcagctttcatccccagcagccagaggggctttcctgatgaaggcatcctggcagtgtactccctggccccccataacctgggcgaaatgctctacaccaagcgatttggtcccaatgccatttcggtgagcctgtccccaatgggcagatatgtaatggtgggcttggcctcacgaaggatcctgctgcacccctccacagagcacatggtggcccaggtcttcaggctgcaacaggcccatggtggagagacctccatgaggagagttttcaacgtcctttatcccatgcctgccgaccagcggagacatgtcagtatcaactctgcccgttggctgcctgagccagggcttggcttggcctatggtactaacaaaggagacctggtgatctgccgaccagaggccttaaactctggtgttgagtactactgggaccagctgaacgagacggtcttcactgtccattccaacagcaggagcagcgagcggcctggaaccagcagagccacatggaggacagacagagacatggggctgatgaatgccattgggcttcagccccggaaccctgccacctcagtgacatctcagggcacccagactctggcccttcagctgcagaatgccgaaacacagactgagagggaggtgccggagccagggacagccgcctcaggtcctggtgaaggtgagggttcagagtatggtgccagtggagaagatgcgctcagcaggatccagaggctgatggcggagggcggcatgacagccgtggtgcagcgggagcagagcaccaccatggcctccatgggcggcttcggcaacaacatcatcgtcagccaccgcattcaccgcagctctcagacgggcactgaacctggtgccgcccacacctcctcaccccagccctccacctctcggggactgctcccagaggccgggcaactggcagagcgaggcctaagcccccggacagcttcctgggaccagcctggtacccctgggcgggagccaacccagccaaccctgccctcttcctcccctgtccccattcctgtttcccttcccagcgctgagggaccaaccctccactgcgagttgaccaataacaaccaccttctggatggtggcagcagcaggggggacgctgcaggccctaggggagaaccacggaacaggtagagacaaacgttgcactggtgcctcccctcgaaccgccaagcagaaaccggacctcacagctgactgggaactggacatgtggaagagctgctggctgcatcagggaacaggaggaggaagagggtcagggtggagaggaagatcagtcagtgggcacaagacagtcaaatgggcaaggcctgcctcggggaactagaaccttccaggatctggagcccgggagagccacactgtgggcttaatgtgaatagaggaacaagtgggtatctctgccaggcaccccactttctcctagtaacatgggctcaggggactcagccctggacagagagcctccagagagtgaacagtcttccagatctgggccaatcatcctggacagaggcccgcgaggcagctttgccctgtccacctgttgggtgggcagagccaccaggaacccagacaccacctccaactctgagccttccagagcttcagcctctcttcgtcgtcttaccccactgaaaccaacagggatcgggccaggctcccagattcttgaggacacgaatgttcatgaacattcgtgtcccataaaaaaagggnatgcttgcatgtgtaatcttactaagagctaatagaaaggccaggccnaacctatggacacgaatgttcaggtaccganctcgaagtgtatctga

SEQ ID NO: 89558 - DNA, 3014 bp, Homo sapiens
atagcttgtcactcatgtgcctctggctggttgacattttgcttcccctcactgcttccatgtcatggggagatgtcttttgtaagacaattggtttgtcagctgcactcattcagatatgctgctaattgggagtggaaaatttaataccatgtgattattttgaatctgaggccagttgtcagtgcttcaggggtagagagttgtttcctacctatgaacattgttttccttggatgattgtcagtggttagtttttcttgatttacttggaggttctacctaactgccttgctctaccccctgccccatgctggtccacgttgcagggtgatgacgaaccagagatccccatagatggaacagaattatcccactaccgtcagcgtgccctcctgcaatcacagccagttcgccggacgcctctcctccacaatttcctgcacatgctgtcctcccgctcttctggcatccaggtgggagagcaaagcacagtgcaagattctgctaccccctcacccccaccgcctccccctcagccctccacggagcgccccaggacttccgcttacatcaggctccgacagcgggtcagttaccccacagctgagtgctgccagcaccttgggatcctgtgcctttgcagccgctgctctggcactcgagttccttccctcttgccacaccaggacagtgtcccccctgcttctgccagagctactaccccttccttttcttttgtacagaccgagcccttccatcccccggagcaggcctcgtcaacgcagcaggaccagggcctcctgaaccggccgtctgccttcagtacagtccagagcagcactgccggcaacacgctccgcaacctcagtctgggtcctacccgccgctctttgggagggcctctgtctagccacccttctaggtatcaccgagaaatagctcctgggttgacaggatctgagtggacccggacagtactcagtctgaactcccgctctgaggcggaatccatgcccccgcccagaaccagtgcctcttcggtgagtttgctgtctgtgctgagacagcaggaaggtggctctcaggcatctgtgtacacttcagccacagaagggaggggttttccggcatcagggttggcaactgagtcagatggagggaatggctccagccaaaacaactcgggcagcattcgccatgagcttcagtgtgacctgagacgcttctttctggagtatgaccggcttcaggagctggatcagagcctgagtggggaagctccccagacccaacaggcccaggaaatgctcaacaataacattgaatctgagaggccaggcccttcccaccagcccaccccacacagcagtgagaacaactccaacctgtcccgtggccacctgaatcgctgtcgtgcttgccacaatctcctgaccttcaacaacgataccctgcgctgggaaagaaccacacctaactactcctctggcgaggctagttcctcttggcaggtccccagctcctttgagagtgtgccatcaagtggcagccagttgccacctctcgagcggactgagggccaaacgcccagctccagcaggctggagttgagcagctctgctagtccgcaggaggagaggactgtgggggtggcctttaaccaggagacaggccactgggaaagaatttacacccagtccagcagatctggaactgtgtcacaggaggccttacatcaggatatgcctgaggagagctctgaggaggattcactcaggagattatctcctgctgcatactacgcccagaggatgatccagtatctctcacggagagacagtattcgccagcgctccatgcgctaccaacagaaccgtctccgttcttccacctcctcctcttcctcagacaaccagggtccatcagtagagggaaccgacttggaatttgaggactttgaggacaatggtgacagatccaggcaccgagctccacgcaatgcccggatgtctgcaccttcgcttggacgctttgtcccaaggcgtttcttgctgcctgagtacttgccttatgctgggatttttcatgaacgtggacagcctggcttggctactcactcttctgttaacagggtcctggcaggggcagtgatcggtgatggacagtctgctgtggccagtaacattgccaatactacctaccggctccagtggtgggacttcactaagtttgacctccctgaaatcagtaatgcttccgtgaatgtgctggtgcagaactgcaagatctacaatgatgccagctgtgacatttctgcagatggccagctcctggcagctttcatccccagcagccagaggggctttcctgatgaaggcatcctggcagtgtactccctggccccccataacctgggcgaaatgctctacaccaagcgatttggtcccaatgccatttcggtgagcctgtccccaatgggcagatatgtaatggtgggcttggcctcacgaaggatcctgctgcacccctccacagagcacatggtggcccaggtcttcaggctgcaacaggcccatggtggagagacctccatgaggagagttttcaacgtcctttatcccatgcctgccgaccagcggagacatgtcagtatcaactctgcccgttggctgcctgagccagggcttggcttggcctatggtactaacaaaggagacctggtgatctgccgaccagaggccttaaactctggtgttgagtactactgggaccagctgaacgagacggtcttcactgtccattccaacagcaggagcagcgagcggcctggaaccagcagagccacatggaggacagacagagacatggggctgatgaatgccattgggcttcagccccggaaccctgccacctcagtgacatctcagggcacccagactctggcccttcagctgcagaatgccgaaacacatcagagagagctgcaggtaagagctcgattctatagatga

SEQ ID NO: 89559 - DNA, 614 bp, Homo sapiens
cggcacgagaaagcttagtttctttcatgttgggattggcaggtagcatcaatattctatgtcgtccaaagttgataagattgttacccttccacatgcttctgaattcagttctactctttgattttctaggactctcttagcctccacccatgtgaaccataatatctatattacggaggtgaagactggcaagtgtgttcattccctgattggacaccgccgtactccatggtgtgtcacttttcatcccaccatctcaggccttattgcttctggctgcctagatggggaggttaggatttgggatttacacggtggcagtgaaagctggttcacagatagcaacaatgccattgcctccctggctttccaccctacggctcagctcctgctgattgccactgccaatgagatccacttctgggactggagtcgacgggaaccctttgctgtggtgaagacagctagtgagatggaacgggtccgtctggtgagatttgatccacttggacactacttactcacagcaattgttaacccctctaatcaacagcggtgatgcacgaaccagacgatccccatagatgagacgcatatccgagtcctctaag

SEQ ID NO: 89560 - DNA, 526 bp, Homo sapiens
agttgccacctctcgagcggactgagggccaaacgcccagctccagcaggctggagttgagcagctctgctagtccgcaggaggagaggactgtgggggtggcctttaaccaggagacaggccactgggaaagaatttacacccagtccagcagatctggaactgtgtcacaggaggccttacatcaggatatgcctgaggagagctctgaggaggattcactcaggaggtaagcagtcgctttcctatcttctgcatcccttgcttttctccttgtatcatttccttgagtcctatagatgttgtggctgtatctggagtgtctgggacccacgcatctgcttctgatctcgccattgcattttcttggaaaatcttgctctggtggcagagataggatagggcctagcagtatgagtcagttggctgcgctagctctatttcggctaagctcaaggttctggctttagccttgaaaggagagtgtagattaggttagagaggcatgaggagatggaaccattga

SEQ ID NO: 89561 - DNA, 5075 bp, Homo sapiens
tttgcttgatgtctcctgagcggcggcggcgccgggtcgagggctgagttgtccgcgaggccccgcgctcaagccgccttctcctgccggtcggtagaacggaccccttcctttattcctgtctcctctttctttttccctgtggctcagcccgttcgctggactgcaaaccgagctcccgtctgccttgcagatttccatgaggacaacttacaaggacctgtatggcctcattttagctgcttcagtgtgttggagctgttacttgctccttcatttcctgggcctggtgtgacagtggctactgagcgccatgaaggttgtcccagaaaagaatgctgtccggatactctgggggcgagaacggggtgctcgggccatgggagctcagcggcttctgcaggagctggtagaagataaaacccggtggatgaaatgggagggcaagagagtagaactgccggatagtccacgctctacctttttattggccttcagcccagacaggactctcttagcctccacccatgtgaaccataatatctatattacggaggtgaagactggcaagtgtgttcattccctgattggacaccgccgtactccatggtgtgtcacttttcatcccaccatctcaggccttattgcttctggctgcctagatggggaggttaggatttgggatttacacggtggcagtgaaagctggttcacagatagcaacaatgccattgcctccctggctttccaccctacggctcagctcctgctgattgccactgccaatgagatccacttctgggactggagtcgacgggaaccctttgctgtggtgaagacagctagtgagatggaacgggtccgtctggtgagatttgatccacttggacactacttactcacagcaattgttaacccctctaatcaacagggtgatgacgaaccagagatccccatagatggaacagaattatcccactaccgtcagcgtgccctcctgcaatcacagccagttcgccggacgcctctcctccacaatttcctgcacatgctgtcctcccgctcttctggcatccaggtgggagagcaaagcacagtgcaagattctgctaccccctcacccccaccgcctccccctcagccctccacggagcgccccaggacttccgcttacatcaggctccgacagcgggtcagttaccccacagctgagtgctgccagcaccttgggatcctgtgcctttgcagccgctgctctggcactcgagttccttccctcttgccacaccaggacagtgtcccccctgcttctgccagagctactaccccttccttttcttttgtacagaccgagcccttccatcccccggagcaggcctcgtcaacgcagcaggaccagggcctcctgaaccggccgtctgccttcagtacagtccagagcagcactgccggcaacacgctccgcaacctcagtctgggtcctacccgccgctctttgggagggcctctgtctagccacccttctaggtatcaccgagaaatagctcctgggttgacaggatctgagtggacccggacagtactcagtctgaactcccgctctgaggcggaatccatgcccccgcccagaaccagtgcctcttcggtgagtttgctgtctgtgctgagacagcaggaaggtggctctcaggcatctgtgtacacttcagccacagaagggaggggttttccggcatcagggttggcaactgagtcagatggagggaatggctccagccaaaacaactcgggcagcattcgccatgagcttcagtgtgacctgagacgcttctttctggagtatgaccggcttcaggagctggatcagagcctgagtggggaagctccccagacccaacaggcccaggaaatgctcaacaataacattgaatctgagaggccaggcccttcccaccagcccaccccacacagcagtgagaacaactccaacctgtcccgtggccacctgaatcgctgtcgtgcttgccacaatctcctgaccttcaacaacgataccctgcgctgggaaagaaccacacctaactactcctctggcgaggctagttcctcttggcaggtccccagctcctttgagagtgtgccatcaagtggcagccagttgccacctctcgagcggactgagggccaaacgcccagctccagcaggctggagttgagcagctctgctagtccgcaggaggagaggactgtgggggtggcctttaaccaggagacaggccactgggaaagaatttacacccagtccagcagatctggaactgtgtcacaggaggccttacatcaggatatgcctgaggagagctctgaggaggattcactcaggaggaggctgctggaatcttccctcatttcattatcccgttatgatggagcaggatccagagagcacccaatttacccagacccagcgagggacaatggtgacagatccaggcaccgagctccacgcaatgcccggatgtctgcaccttcgcttggacgctttgtcccaaggcgtttcttgctgcctgagtacttgccttatgctgggatttttcatgaacgtggacagcctggcttggctactcactcttctgttaacagggtcctggcaggggcagtgatcggtgatggacagtctgctgtggccagtaacattgccaatactacctaccggctccagtggtgggacttcactaagtttgacctccctgaaatcagtaatgcttccgtgaatgtgctggtgcagaactgcaagatctacaatgatgccagctgtgacatttctgcagatggccagctcctggcagctttcatccccagcagccagaggggctttcctgatgaaggcatcctggcagtgtactccctggccccccataacctgggcgaaatgctctacaccaagcgatttggtcccaatgccatttcggtgagcctgtccccaatgggcagatatgtaatggtgggcttggcctcacgaaggatcctgctgcacccctccacagagcacatggtggcccaggtcttcaggctgcaacaggcccatggtggagagacctccatgaggagagttttcaacgtcctttatcccatgcctgccgaccagcggagacatgtcagtatcaactctgcccgttggctgcctgagccagggcttggcttggcctatggtactaacaaaggagacctggtgatctgccgaccagaggccttaaactctggtgttgagtactactgggaccagctgaacgagacggtcttcactgtccattccaacagcaggagcagcgagcggcctggaaccagcagagccacatggaggacagacagagacatggggctgatgaatgccattgggcttcagccccggaaccctgccacctcagtgacatctcagggcacccagactctggcccttcagctgcagaatgccgaaacacagactgagagggaggtgccggagccagggacagccgcctcaggtcctggtgaaggtgagggttcagagtatggtgccagtggagaagatgcgctcagcaggatccagaggctgatggcggagggcggcatgacagccgtggtgcagcgggagcagagcaccaccatggcctccatgggcggcttcggcaacaacatcatcgtcagccaccgcattcaccgcagctctcagacgggcactgaacctggtgccgcccacacctcctcaccccagccctccacctctcggggactgctcccagaggccgggcaactggcagagcgaggcctaagcccccggacagcttcctgggaccagcctggtacccctgggcgggagccaacccagccaaccctgccctcttcctcccctgtccccattcctgtttcccttcccagcgctgagggaccaaccctccactgcgagttgaccaataacaaccaccttctggatggtggcagcagcaggggggacgctgcaggccctaggggagaaccacggaacaggtagagacaaacgttgcactggtgcctcccctcgaaccgccaagcagaaaccggacctcacagctgactgggaactggacatgtggaagagctgctggctgcatcagggaacaggaggaggaagagggtcagggtggagaggaagatcagtcagtgggcacaagacagtcaaatgggcaaggcctgcctcggggaactagaaccttccaggatctggagcccgggagagccacactgtgggcttaatgtgaatagaggaacaagtgggtatctctgccaggcaccccactttctcctagtaacatgggctcaggggactcagccctggacagagagcctccagagagtgaacagtcttccagatctgggccaatcatcctggacagaggcccgcgaggcagctttgccctgtccacctgttgggtgggcagagccaccaggaacccagacaccacctccaactctgagccttccagagcttcagcctctcttcgtcgtcttaccccactgaaaccaacagggatcgggccaggctcccagattcttgaggacagggacttcggcatttactaatgggggactactgtggggtaagggggcgcctgcttgcctgatacaggatggggtcaagggacagtgggcaggtcctcactcaggagtggggggtgtaggctggccagcccccagggcttgtccaccagtcttctccccgcaaggccctcagagcagcgcctgtgggtgtcagtattacctgagcctaggccaaagctagcccaaggctggggaaggggaggagactccaggtcagaatgtgaggtctcagtctgtgatttaaggtgttgcatgtggactcttaactgtacgtgtagtttctagtggagaaatcaaggctctgatcattttgtttttagtatgaaaatgtgatttcctttctgtttgtaactcatcatagaaacattgtggtgggaggagaggggatagtctacagctaatgagggaaacaccaaagatcacatcattaaaatgatgacatgcccctcaaaaaaaac

SEQ ID NO: 89562 - DNA, 4566 bp, Homo sapiens
atagcttgtcactcatgtgcctctggctggttgacattttgcttcccctcactgcttccatgtcatggggagatgtcttttgtaagacaattggtttgtcagctgcactcattcagatatgctgctaattgggagtggaaaatttaataccatgtgattattttgaatctgaggccagttgtcagtgcttcaggggtagagagttgtttcctacctatgaacattgttttccttggatgattgtcagtggttagtttttcttgatttacttggaggttctacctaactgccttgctctaccccctgccccatgctggtccacgttgcagggtgatgacgaaccagagatccccatagatggaacagaattatcccactaccgtcagcgtgccctcctgcaatcacagccagttcgccggacgcctctcctccacaatttcctgcacatgctgtcctcccgctcttctggcatccaggtgggagagcaaagcacagtgcaagattctgctaccccctcacccccaccgcctccccctcagccctccacggagcgccccaggacttccgcttacatcaggctccgacagcgggtcagttaccccacagctgagtgctgccagcaccttgggatcctgtgcctttgcagccgctgctctggcactcgagttccttccctcttgccacaccaggacagtgtcccccctgcttctgccagagctactaccccttccttttcttttgtacagaccgagcccttccatcccccggagcaggcctcgtcaacgcagcaggaccagggcctcctgaaccggccgtctgccttcagtacagtccagagcagcactgccggcaacacgctccgcaacctcagtctgggtcctacccgccgctctttgggagggcctctgtctagccacccttctaggtatcaccgagaaatagctcctgggttgacaggatctgagtggacccggacagtactcagtctgaactcccgctctgaggcggaatccatgcccccgcccagaaccagtgcctcttcggtgagtttgctgtctgtgctgagacagcaggaaggtggctctcaggcatctgtgtacacttcagccacagaagggaggggttttccggcatcagggttggcaactgagtcagatggagggaatggctccagccaaaacaactcgggcagcattcgccatgagcttcagtgtgacctgagacgcttctttctggagtatgaccggcttcaggagctggatcagagcctgagtggggaagctccccagacccaacaggcccaggaaatgctcaacaataacattgaatctgagaggccaggcccttcccaccagcccaccccacacagcagtgagaacaactccaacctgtcccgtggccacctgaatcgctgtcgtgcttgccacaatctcctgaccttcaacaacgataccctgcgctgggaaagaaccacacctaactactcctctggcgaggctagttcctcttggcaggtccccagctcctttgagagtgtgccatcaagtggcagccagttgccacctctcgagcggactgagggccaaacgcccagctccagcaggctggagttgagcagctctgctagtccgcaggaggagaggactgtgggggtggcctttaaccaggagacaggccactgggaaagaatttacacccagtccagcagatctggaactgtgtcacaggaggccttacatcaggatatgcctgaggagagctctgaggaggattcactcaggagattatctcctgctgcatactacgcccagaggatgatccagtatctctcacggagagacagtattcgccagcgctccatgcgctaccaacagaaccgtctccgttcttccacctcctcctcttcctcagacaaccagggtccatcagtagagggaaccgacttggaatttgaggactttgaggacaatggtgacagatccaggcaccgagctccacgcaatgcccggatgtctgcaccttcgcttggacgctttgtcccaaggcgtttcttgctgcctgagtacttgccttatgctgggatttttcatgaacgtggacagcctggcttggctactcactcttctgttaacagggtcctggcaggggcagtgatcggtgatggacagtctgctgtggccagtaacattgccaatactacctaccggctccagtggtgggacttcactaagtttgacctccctgaaatcagtaatgcttccgtgaatgtgctggtgcagaactgcaagatctacaatgatgccagctgtgacatttctgcagatggccagctcctggcagctttcatccccagcagccagaggggctttcctgatgaaggcatcctggcagtgtactccctggccccccataacctgggcgaaatgctctacaccaagcgatttggtcccaatgccatttcggtgagcctgtccccaatgggcagatatgtaatggtgggcttggcctcacgaaggatcctgctgcacccctccacagagcacatggtggcccaggtcttcaggctgcaacaggcccatggtggagagacctccatgaggagagttttcaacgtcctttatcccatgcctgccgaccagcggagacatgtcagtatcaactctgcccgttggctgcctgagccagggcttggcttggcctatggtactaacaaaggagacctggtgatctgccgaccagaggccttaaactctggtgttgagtactactgggaccagctgaacgagacggtcttcactgtccattccaacagcaggagcagcgagcggcctggaaccagcagagccacatggaggacagacagagacatggggctgatgaatgccattgggcttcagccccggaaccctgccacctcagtgacatctcagggcacccagactctggcccttcagctgcagaatgccgaaacacagactgagagggaggtgccggagccagggacagccgcctcaggtcctggtgaaggtgagggttcagagtatggtgccagtggagaagatgcgctcagcaggatccagaggctgatggcggagggcggcatgacagccgtggtgcagcgggagcagagcaccaccatggcctccatgggcggcttcggcaacaacatcatcgtcagccaccgcattcaccgcagctctcagacgggcactgaacctggtgccgcccacacctcctcaccccagccctccacctctcggggactgctcccagaggccgggcaactggcagagcgaggcctaagcccccggacagcttcctgggaccagcctggtacccctgggcgggagccaacccagccaaccctgccctcttcctcccctgtccccattcctgtttcccttcccagcgctgagggaccaaccctccactgcgagttgaccaataacaaccaccttctggatggtggcagcagcaggggggacgctgcaggccctaggggagaaccacggaacaggtagagacaaacgttgcactggtgcctcccctcgaaccgccaagcagaaaccggacctcacagctgactgggaactggacatgtggaagagctgctggctgcatcagggaacaggaggaggaagagggtcagggtggagaggaagatcagtcagtgggcacaagacagtcaaatgggcaaggcctgcctcggggaactagaaccttccaggatctggagcccgggagagccacactgtgggcttaatgtgaatagaggaacaagtgggtatctctgccaggcaccccactttctcctagtaacatgggctcaggggactcagccctggacagagagcctccagagagtgaacagtcttccagatctgggccaatcatcctggacagaggcccgcgaggcagctttgccctgtccacctgttgggtgggcagagccaccaggaacccagacaccacctccaactctgagccttccagagcttcagcctctcttcgtcgtcttaccccactgaaaccaacagggatcgggccaggctcccagattcttgaggacagggacttcggcatttactaatgggggactactgtggggtaagggggcgcctgcttgcctgatacaggatggggtcaagggacagtgggcaggtcctcactcaggagtggggggtgtaggctggccagcccccagggcttgtccaccagtcttctccccgcaaggccctcagagcagcgcctgtgggtgtcagtattacctgagcctaggccaaagctagcccaaggctggggaaggggaggagactccaggtcagaatgtgaggtctcagtctgtgatttaaggtgttgcatgtggactcttaactgtacgtgtagtttctagtggagaaatcaaggctctgatcattttgtttttagtatgaaaatgtgatttcctttctgtttgtaactcatcatagaaacattgtggtgggaggagaggggatagtctacagctaatgagggaaacaccaaagatcacatcattaaaatgatgacatgcccctcaaaaaaaac

SEQ ID NO: 89563 - DNA, 3919 bp, Homo sapiens
atagcttgtcactcatgtgcctctggctggttgacattttgcttcccctcactgcttccatgtcatggggagatgtcttttgtaagacaattggtttgtcagctgcactcattcagatatgctgctaattgggagtggaaaatttaataccatgtgattattttgaatctgaggccagttgtcagtgcttcaggggtagagagttgtttcctacctatgaacattgttttccttggatgattgtcagtggttagtttttcttgatttacttggaggttctacctaactgccttgctctaccccctgccccatgctggtccacgttgcagggtgatgacgaaccagagatccccatagatggaacagaattatcccactaccgtcagcgtgccctcctgcaatcacagccagttcgccggacgcctctcctccacaatttcctgcacatgctgtcctcccgctcttctggcatccaggtgggagagcaaagcacagtgcaagattctgctaccccctcacccccaccgcctccccctcagccctccacggagcgccccaggacttccgcttacatcaggctccgacagcgggtcagttaccccacagctgagtgctgccagcaccttgggatcctgtgcctttgcagccgctgctctggcactcgagttccttccctcttgccacaccaggacagtgtcccccctgcttctgccagagctactaccccttccttttcttttgtacagaccgagcccttccatcccccggagcaggcctcgtcaacgcagcaggaccagggcctcctgaaccggccgtctgccttcagtacagtccagagcagcactgccggcaacacgctccgcaacctcagtctgggtcctacccgccgctctttgggagggcctctgtctagccacccttctaggtatcaccgagaaatagctcctgggttgacaggatctgagtggacccggacagtactcagtctgaactcccgctctgaggcggaatccatgcccccgcccagaaccagtgcctcttcggtgagtttgctgtctgtgctgagacagcaggaaggtggctctcaggcatctgtgtacacttcagccacagaagggaggggttttccggcatcagggttggcaactgagtcagatggagggaatggctccagccaaaacaactcgggcagcattcgccatgagcttcagtgtgacctgagacgcttctttctggagtatgaccggcttcaggagctggatcagagcctgagtggggaagctccccagacccaacaggcccaggaaatgctcaacaataacattgaatctgagaggccaggcccttcccaccagcccaccccacacagcagtgagaacaactccaacctgtcccgtggccacctgaatcgctgtcgtgcttgccacaatctcctgaccttcaacaacgataccctgcgctgggaaagaaccacacctaactactcctctggcgaggctagttcctcttggcaggtccccagctcctttgagagtgtgccatcaagtggcagccagttgccacctctcgagcggactgagggccaaacgcccagctccagcaggctggagttgagcagctctgctagtccgcaggaggagaggactgtgggggtggcctttaaccaggagacaggccactgggaaagaatttacacccagtccagcagatctggaactgtgtcacaggaggccttacatcaggatatgcctgaggagagctctgaggaggattcactcaggagattatctcctgctgcatactacgcccagaggatgatccagtatctctcacggagagacagtattcgccagcgctccatgcgctaccaacagaaccgtctccgttcttccacctcctcctcttcctcagacaaccagggtccatcagtagagggaaccgacttggaatttgaggactttgaggacaatggtgacagatccaggcaccgagctccacgcaatgcccggatgtctgcaccttcgcttggacgctttgtcccaaggcgtttcttgctgcctgagtacttgccttatgctgggatttttcatgaacgtggacagcctggcttggctactcactcttctgttaacagggtcctggcaggggcagtgatcggtgatggacagtctgctgtggccagtaacattgccaatactacctaccggctccagtggtgggacttcactaagtttgacctccctgaaatcagtaatgcttccgtgaatgtgctggtgcagaactgcaagatctacaatgatgccagctgtgacatttctgcagatggccagctcctggcagctttcatccccagcagccagaggggctttcctgatgaaggcatcctggcagtgtactccctggccccccataacctgggcgaaatgctctacaccaagcgatttggtcccaatgccatttcggtgagcctgtccccaatgggcagatatgtaatggtgggcttggcctcacgaaggatcctgctgcacccctccacagagcacatggtggcccaggtcttcaggctgcaacaggcccatggtggagagacctccatgaggagagttttcaacgtcctttatcccatgcctgccgaccagcggagacatgtcagtatcaactctgcccgttggctgcctgagccagggcttggcttggcctatggtactaacaaaggagacctggtgatctgccgaccagaggccttaaactctggtgttgagtactactgggaccagctgaacgagacggtcttcactgtccattccaacagcaggagcagcgagcggcctggaaccagcagagccacatggaggacagacagagacatggggctgatgaatgccattgggcttcagccccggaaccctgccacctcagtgacatctcagggcacccagactctggcccttcagctgcagaatgccgaaacacagactgagagggaggtgccggagccagggacagccgcctcaggtcctggtgaaggtgagggttcagagtatggtgccagtggagaagatgcgctcagcaggatccagaggctgatggcggagggcggcatgacagccgtggtgcagcgggagcagagcaccaccatggcctccatgggcggcttcggcaacaacatcatcgtcagccaccgcattcaccgcagctctcagacgggcactgaacctggtgccgcccacacctcctcaccccagccctccacctctcggggactgctcccagaggccgggcaactggcagagcgaggcctaagcccccggacagcttcctgggaccagcctggtacccctgggcgggagccaacccagccaaccctgccctcttcctcccctgtccccattcctgtttcccttcccagcgctgagggaccaaccctccactgcgagttgaccaataacaaccaccttctggatggtggcagcagcaggggggacgctgcaggccctaggggagaaccacggaacaggtagagacaaacgttgcactggtgcctcccctcgaaccgccaagcagaaaccagtcttctccccgcaaggccctcagagcagcgcctgtgggtgtcagtattacctgagcctaggccaaagctagcccaaggctggggaaggggaggagactccaggtcagaatgtgaggtctcagtctgtgatttaaggtgttgcatgtggactcttaactgtacgtgtagtttctagtggagaaatcaaggctctgatcattttgtttttagtatgaaaatgtgatttcctttctgtttgtaactcatcatagaaacattgtggtgggaggagaggggatagtctacagctaatgagggaaacaccaaagatcacatcattaaaatgatgacatgcccctcaaaaaaaac

SEQ ID NO: 89564 - DNA, 2223 bp, Homo sapiens
atagcttgtcactcatgtgcctctggctggttgacattttgcttcccctcactgcttccatgtcatggggagatgtcttttgtaagacaattggtttgtcagctgcactcattcagatatgctgctaattgggagtggaaaatttaataccatgtgattattttgaatctgaggccagttgtcagtgcttcaggggtagagagttgtttcctacctatgaacattgttttccttggatgattgtcagtggttagtttttcttgatttacttggaggttctacctaactgccttgctctaccccctgccccatgctggtccacgttgcagggtgatgacgaaccagagatccccatagatggaacagaattatcccactaccgtcagcgtgccctcctgcaatcacagccagttcgccggacgcctctcctccacaatttcctgcacatgctgtcctcccgctcttctggcatccaggtgggagagcaaagcacagtgcaagattctgctaccccctcacccccaccgcctccccctcagccctccacggagcgccccaggacttccgcttacatcaggctccgacagcgggtcagttaccccacagctgagtgctgccagcaccttgggatcctgtgcctttgcagccgctgctctggcactcgagttccttccctcttgccacaccaggacagtgtcccccctgcttctgccagagctactaccccttccttttcttttgtacagaccgagcccttccatcccccggagcaggcctcgtcaacgcagcaggaccagggcctcctgaaccggccgtctgccttcagtacagtccagagcagcactgccggcaacacgctccgcaacctcagtctgggtcctacccgccgctctttgggagggcctctgtctagccacccttctaggtatcaccgagaaatagctcctgggttgacaggatctgagtggacccggacagtactcagtctgaactcccgctctgaggcggaatccatgcccccgcccagaaccagtgcctcttcggtgagtttgctgtctgtgctgagacagcaggaaggtggctctcaggcatctgtgtacacttcagccacagaagggaggggttttccggcatcagggttggcaactgagtcagatggagggaatggctccagccaaaacaactcgggcagcattcgccatgagcttcagtgtgacctgagacgcttctttctggagtatgaccggcttcaggagctggatcagagcctgagtggggaagctccccagacccaacaggcccaggaaatgctcaacaataacattgaatctgagaggccaggcccttcccaccagcccaccccacacagcagtgagaacaactccaacctgtcccgtggccacctgaatcgctgtcgtgcttgccacaatctcctgaccttcaacaacgataccctgcgctgggaaagaaccacacctaactactcctctggcgaggctagttcctcttggcaggtccccagctcctttgagagtgtgccatcaagtggcagccagttgccacctctcgagcggactgagggccaaacgcccagctccagcaggctggagttgagcagctctgctagtccgcaggaggagaggactgtgggggtggcctttaaccaggagacaggccactgggaaagaatttacacccagtccagcagatctggaactgtgtcacaggaggccttacatcaggatatgcctgaggagagctctgaggaggattcactcaggagattatctcctgctgcatactacgcccagaggatgatccagtatctctcacggagagacagtattcgccagcgctccatgcgctaccaacagaaccgtctccgttcttccacctcctcctcttcctcagacaaccagggtccatcagtagagggaaccgacttggaatttgaggactttgaggacaatggtgacagatccaggcaccgagctccacgcaatgcccggatgtctgcaccttcgcttggacgctttgtcccaaggcgtttcttgctgcctgagtacttgccttatgctgggatttttcatgaacgtggacagcctggcttggctactcactcttctgttaacagggtcctggcaggtaaggaaatgtttctttggcttttgaaaatgtgaagggccaaggagccagataaagcttctccctcctttacctatg

SEQ ID NO: 89565 - DNA, 1518 bp, Homo sapiens
tgcctaattgccctggccagaacttccaacactatgttgaataggagtggtgagagagggcatccctgtcttgtgccagttttcaaagggaatgcttccagtttttgcccattcagtaaacatggaaaaatagcaaattagagacagtgggtattaacaattgcatatatcacaataaatgtatgtttaatctcaggaatgcatggcagttctgtctttagaaaatgtattttttgtatttttatcaatttagagatgcccttttaaaaaaacatattacaaattggaatattcaaagggcagctgttttattttcttccttgctgaaacataaaataatgacgtgttttaaaatttatagaatctttgatttgatcaaatatggtaatgtaatttgccattctaacagatcaaaatcagaatcagtatgatcatctatcttgatttgcgagaagcatttgataatattcaaaatccatttatgaaaaaactcttggcagaggagaaacagcaaagaatttttaaaatataaagggtatgtacaaaactgtagtaaccatcttactgaaagatcaaacttgttccctttcagcttgggaataagacagagcttcctattaagaccaccacatctactcatctttaagctggtgattctcaccaacacatctaagcatgaaagaaataaaaattataagataaaaaggaaagaaaactctcagtacttaaagatgatataattacatagaaaatcaagaagattccatggataggcttcccaaaaaacaatatgtaacataccagcaacaaatggtaagaaaaacacgttgtttttttttttaaagtacattttcagtgacattaaataataaggattcaggaatacaacgaatataacaaaaatgtaagatatctagggatgcgtataacaaaaaaattataaagcttcatttaaaacatttttaaacaaaataagtagaaagtaataccatctttatggaacagagtcagtattataaatgtgtcagttttcttcaactggtccatagacaacacaattttaactaagattccaattgggatttctgtggaacttgatgagttagggccaaaagtaatcaagatattcatgaggaaggataacagaatggcaaaacttgctttaataatttgtgcagggatagacaaatactgtacaccagtctctcaatagggagatcaaaaccaaattcacacagacatgaaaagttgatttatgacagatgatgttgcagtccctggggaaagaatggaaatggtgctagaataattggtttctatatgtatttctatatatgtatatgccattacattaaagtcaatgcctatggagtttgggaggagtgatcaaaatgttctggaattagatgtgatgtttgcacaactctgtgaatgtactaagaaccactgaattgtatatttttaaagcatggtatgtgaataatacctcaataaagctgttataaaaaataaaattaa

SEQ ID NO: 89566 - DNA, 378 bp, Homo sapiens
ggaatcgagctcggtaccgaatctcgaaagtggtgcagggatagacaaatactgtacaccagtctctcaatagggagatcaaaaccaaattcacacagacatgaaaagttgatttatgacagatgatgttgcagtccctggggaaagaatggaaatggtgctagaataattggtttctatatgtatttctatatatgtatatgccattacattaaagtcaatgcctatggagtttgggaggagtgatcaaaatgttctggaattagatgtgatgtttgcacaactctgtgaatgtactaagaaccactgaattgtatatttttaaagcatggtatgtgaataatacctcaataaagctgttataaaaaataaaattaa

SEQ ID NO: 89567 - DNA, 260 bp, Homo sapiens
tagtgataggatcattggttgcctggggatgagggattggggaggactgggagggagggattatgaaggggcatgaggaaacttctggaggtaacgatatgtttatttattgattgtggtggtttcacggatgcatatgtcaaaacttatcaaatcatatatcttaaatatgtatagttattgtaagccaattgtaacttaataaatttgcacttttaaaaaatccaagccagacatggtggtctgcctgtagttacagc

SEQ ID NO: 89568 - DNA, 1236 bp, Homo sapiens
gtcggcgcggcgaaagcagagcggcgcgccggttccttggttcctgagggcgatggcgcggggtggctggcgccggctacgccgcctgttatccgcggggcagcttctattccagggccgcgcgctgctcgtcactaacacgctgggctgcggcgcgctcatggcggccggtgatggcgtgcgccagtcctgggagatccgcgcccggcccggccaggttttcgacccacggcgctccgcgagcatgtttgcggtgggctgcagcatgggtcccttcctgcactactggtacttgtcgctggaccgcctattccctgcgtctggcctccgaggcttcccaaatgtcctcaagaaggtcctcgtggatcagctggtagcctctccattgctgggcgtctggtacttcttgggccttggctgcctggagggtcagacagtgggtgagagctgccaggagctgcgggagaagttctgggaattctacaaggcagactggtgcgtgtggcctgctgcgcagttcgtgaacttcctcttcgtgcccccccaatttcgagtcacctacatcaacggcctgacgctgggctgggacacgtacctgtcctacttgaagtaccggagcccagttcctctgacacccccaggctgtgtggccctggacacccgagcagactgaactgtctgcttcctggaccagatgcaagactgtctcctggcggaccaccccctctgacagaaggggaatgggctcctgcagcaagctcgggtcttgagccacgtcccagcaccacttcagctccggagcattgggctgagccgccctttccaagctcacttctgggactgagtttcctcaaccggaaccactgccatccacctggctctgggccaagccaccaatccagagctccctcaggtcctgggactaaggcggggacatgactgatcccctcagagcaggctcaggcctggagtcggcccccaaaagtttcacatagggccaggcagcctctgtgtttctttccctggtcctgaactgtggaaatgccattaaactctctctataatgtaactgaaactgctggctgggcgcagtggctcccacctgtaatctcagcccttcccgaggctgaggtggaaggattgctcgaggccaggtgttcgagaccagcctgggcaacatagcaagaccctgtctctatttatattgaaaaataaaaataacaaaagaaaatgctg

SEQ ID NO: 89569 - DNA, 1365 bp, Homo sapiens
gtcggcgcggcgaaagcagagcggcgcgccggttccttggttcctgagggcgatggcgcggggtggctggcgccggctacgccgcctgttatccgcggggcagcttctattccagggccgcgcgctgctcgtcactaacacgctgggctgcggcgcgctcatggcggccggtgatggcgtgcgccagtcctgggagatccgcgcccggcccggccaggttttcgacccacggcgctccgcgagcatgtttgcggtgggctgcagcatgggtcccttcctgcactactggtacttgtcgctggaccgcctattccctgcgtctggcctccgaggcttcccaaatgtcctcaagaaggtcctcgtggatcagctggtagcctctccattgctgggcgtctggtacttcttgggccttggctgcctggagggtcagacagtgggtgagagctgccaggagctgcgggagaagttctgggaattctacaaggcagactggtgcgtgtggcctgctgcgcagttcgtgaacttcctcttcgtgcccccccaatttcgagtcacctacatcaacggcctgacgctgggctgggacacgtacctgtcctacttgaagtaccggagcccagttcctctgacacccccaggctgtgtggccctggacacccgagcagactgaactgtctgcttcctggaccagatgcaagactgtctcctggcggaccaccccctctgacagaaggggaatgggctcctgcagcaagctcgggtcttgagccacgtcccagcaccacttcagctccggagcattgggctgagccgccctttccaagctcacttctgggactgagtttcctcaaccggaacacacccatgaagatggatgatcatcccctagcccttctcagcaggaacctcatgcgacctgtgaccaagatgtcccatcctcagcacagggcccactctgccaaccagtctcaagcaccagcccctcaacactgccatccacctggctctgggccaagccaccaatccagagctccctcaggtcctgggactaaggcggggacatgactgatcccctcagagcaggctcaggcctggagtcggcccccaaaagtttcacatagggccaggcagcctctgtgtttctttccctggtcctgaactgtggaaatgccattaaactctctctataatgtaactgaaactgctggctgggcgcagtggctcccacctgtaatctcagcccttcccgaggctgaggtggaaggattgctcgaggccaggtgttcgagaccagcctgggcaacatagcaagaccctgtctctatttatattgaaaaataaaaataacaaaagaaaatgctg

SEQ ID NO: 89570 - DNA, 1156 bp, Homo sapiens
gtcggcgcggcgaaagcagagcggcgcgccggttccttggttcctgagggcgatggcgcggggtggctggcgccggctacgccgcctgttatccgcggggcagcttctattccagggccgcgcgctgctcgtcactaacacgctgggctgcggcgcgctcatggcggccggtgatggcgtgcgccagtcctgggagatccgcgcccggcccggccaggttttcgacccacggcgctccgcgagcatgtttgcggtgggctgcagcatgggtcccttcctgcactactggtacttgtcgctggaccgcctattccctgcgtctggcctccgaggcttcccaaatgtcctcaagaaggtcctcgtggatcagctggtagcctctccattgctgggcgtctggtacttcttgggccttggctgcctggagggtcagacagtgggtgagagctgccaggagctgcgggagaagttctgggaattctacaaggcagactggtgcgtgtggcctgctgcgcagttcgtgaacttcctcttcgtgcccccccaatttcgagtcacctacatcaacggcctgacgctgggctgggacacgtacctgtcctacttgaagtaccggagcccagttcctctgacacccccaggctgtgtggccctggacacccgagcagactgaactgtctgcttcctggaccagatgcaagactgtctcctggcggaccaccccctctgacagaaggggaatgggctcctgcagcaagctcgggtcttgagccacgtcccacactgccatccacctggctctgggccaagccaccaatccagagctccctcaggtcctgggactaaggcggggacatgactgatcccctcagagcaggctcaggcctggagtcggcccccaaaagtttcacatagggccaggcagcctctgtgtttctttccctggtcctgaactgtggaaatgccattaaactctctctataatgtaactgaaactgctggctgggcgcagtggctcccacctgtaatctcagcccttcccgaggctgaggtggaaggattgctcgaggccaggtgttcgagaccagcctgggcaacatagcaagaccctgtctctatttatattgaaaaataaaaataacaaaagaaaatgctg

SEQ ID NO: 89571 - DNA, 1288 bp, Homo sapiens
gtcggcgcggcgaaagcagagcggcgcgccggttccttggttcctgagggcgatggcgcggggtggctggcgccggctacgccgcctgttatccgcggggcagcttctattccagggccgcgcgctgctcgtcactaacacgctgggctgcggcgcgctcatggcggccggtgatggcgtgcgccagtcctgggagatccgcgcccggcccggccaggttttcgacccacggcgctccgcgagcatgtttgcggtgggctgcagcatgggtcccttcctgcactactggtacttgtcgctggaccgcctattccctgcgtctggcctccgaggcttcccaaatgtcctcaagaaggtcctcgtggatcagctggtagcctctccattgctgggcgtctggtacttcttgggcagactggtgcgtgtggcctgctgcgcagttcgtgaacttcctcttcgtgcccccccaatttcgagtcacctacatcaacggcctgacgctgggctgggacacgtacctgtcctacttgaagtaccggagcccagttcctctgacacccccaggctgtgtggccctggacacccgagcagactgaactgtctgcttcctggaccagatgcaagactgtctcctggcggaccaccccctctgacagaaggggaatgggctcctgcagcaagctcgggtcttgagccacgtcccagcaccacttcagctccggagcattgggctgagccgccctttccaagctcacttctgggactgagtttcctcaaccggaacacacccatgaagatggatgatcatcccctagcccttctcagcaggaacctcatgcgacctgtgaccaagatgtcccatcctcagcacagggcccactctgccaaccagtctcaagcaccagcccctcaacactgccatccacctggctctgggccaagccaccaatccagagctccctcaggtcctgggactaaggcggggacatgactgatcccctcagagcaggctcaggcctggagtcggcccccaaaagtttcacatagggccaggcagcctctgtgtttctttccctggtcctgaactgtggaaatgccattaaactctctctataatgtaactgaaactgctggctgggcgcagtggctcccacctgtaatctcagcccttcccgaggctgaggtggaaggattgctcgaggccaggtgttcgagaccagcctgggcaacatagcaagaccctgtctctatttatattgaaaaataaaaataacaaaagaaaatgctg

SEQ ID NO: 89572 - DNA, 685 bp, Homo sapiens
gtcggcgcggcgaaagcagagcggcgcgccggttccttggttcctgagggcgatggcgcggggtggctggcgccggctacgccgcctgttatccgcggggcagcttctattccagggccgcgcgctgctcgtcactaacacgctgggctgcggcgcgctcatggcggccggtgatggcgtgcgccagtcctgggagatccgcgcccggcccggccaggttttcgacccacggcgctccgctgtgaccaagatgtcccatcctcagcacagggcccactctgccaaccagtctcaagcaccagcccctcaacactgccatccacctggctctgggccaagccaccaatccagagctccctcaggtcctgggactaaggcggggacatgactgatcccctcagagcaggctcaggcctggagtcggcccccaaaagtttcacatagggccaggcagcctctgtgtttctttccctggtcctgaactgtggaaatgccattaaactctctctataatgtaactgaaactgctggctgggcgcagtggctcccacctgtaatctcagcccttcccgaggctgaggtggaaggattgctcgaggccaggtgttcgagaccagcctgggcaacatagcaagaccctgtctctatttatattgaaaaataaaaataacaaaagaaaatgctg

SEQ ID NO: 89573 - DNA, 1764 bp, Homo sapiens
gtcggcgcggcgaaagcagagcggcgcgccggttccttggttcctgagggcgatggcgcggggtggctggcgccggctacgccgcctgttatccgcggggcagcttctattccagggccgcgcgctgctcgtcactaacacgctgggctgcggcgcgctcatggcggccggtgatggcgtgcgccagtcctgggagatccgcgcccggcccggccaggttttcgacccacggcgctccgtccggtgaggacgccacgctgcttagtccttcaccccgggcgacctttgatcccgacacccgactgcgggccgtgacccctgacccgtggcctcagtcccccgcaggacccttgccctgaccgcgcctctccccgggtgtctgtctccccgcagctctgggtctccatcacctcccaacccccggaggtctctgcccactacccaggagcctctggagccgcgcctcctggtggggcttgtagtggaagaatgcacgggtgggctcttccggttttcccggtgaggctgaggctccgggatggcattgggcttacccaggccttagccagggagggagagagggaatggactgaggaacttgccggcccgacccagccccctgacttacactcttatagcgagcatgtttgcggtgggctgcagcatgggtcccttcctgcactactggtacttgtcgctggaccgcctattccctgcgtctggcctccgaggcttcccaaatgtcctcaagaaggtcctcgtggatcagctggtagcctctccattgctgggcgtctggtacttcttgggccttggctgcctggagggtcagacagtgggtgagagctgccaggagctgcgggagaagttctgggaattctacaaggcagactggtgcgtgtggcctgctgcgcagttcgtgaacttcctcttcgtgcccccccaatttcgagtcacctacatcaacggcctgacgctgggctgggacacgtacctgtcctacttgaagtaccggagcccagttcctctgacacccccaggctgtgtggccctggacacccgagcagactgaactgtctgcttcctggaccagatgcaagactgtctcctggcggaccaccccctctgacagaaggggaatgggctcctgcagcaagctcgggtcttgagccacgtcccagcaccacttcagctccggagcattgggctgagccgccctttccaagctcacttctgggactgagtttcctcaaccggaacacacccatgaagatggatgatcatcccctagcccttctcagcaggaacctcatgcgacctgtgaccaagatgtcccatcctcagcacagggcccactctgccaaccagtctcaagcaccagcccctcaacactgccatccacctggctctgggccaagccaccaatccagagctccctcaggtcctgggactaaggcggggacatgactgatcccctcagagcaggctcaggcctggagtcggcccccaaaagtttcacatagggccaggcagcctctgtgtttctttccctggtcctgaactgtggaaatgccattaaactctctctataatgtaactgaaactgctggctgggcgcagtggctcccacctgtaatctcagcccttcccgaggctgaggtggaaggattgctcgaggccaggtgttcgagaccagcctgggcaacatagcaagaccctgtctctatttatattgaaaaataaaaataacaaaagaaaatgctg

SEQ ID NO: 89574 - DNA, 465 bp, Homo sapiens
caggctggaaagccggcgcagggaggtcacctttgatgtagacatcgtcgtcggcgcgcatgaaccactcatacttgtccagaaatcagcatgagaagatgatcaaaattcatatattgaaacatgaaaaggctctgaatgggttggatgatgccctcccatattgcggtggccaatatgctttactcagtctacagattcaaatgctaatctcttctggaaacaaactcacagacacactcaaaaataatgtttaactagatatctggacatccggtgctcaaggttgaagaagaaataaagaagcacggaagtaataacatgggattatcagaaaacctgactgattgtgctgctgctggcaatggtgatgatggactaattccacaaagagcagaaaacctgaaaatcagcaatttcctaggacggagaatgaagagtatcataggtaagcctatggcaaca

SEQ ID NO: 89575 - DNA, 393 bp, Homo sapiens
tttaagagatggagtctcactctcgcctaggctgtagtgcagtggtgtgatcacagctcactgcagctctgaactcctgggctcaagcaatcttcccatctcagccctctgagtagctgggattacaggcgcaagccaccatacctggctccaagaaccatgatttttaaattgaggaagagagagtaaaagaaagtacaagagtaagttcagttactgtttttcaaatgtttggcattctaccaactttttgttataaatccaagagagagcactaacatacttcttccttcctcccaagtcaaacgtatatactacacccaacttggtaagttctgctctctctcttatggcaaagggaaacactgatatcatttcaaaaaatcattttgc

SEQ ID NO: 89576 - DNA, 291 bp, Homo sapiens
gattttcatcaggcaaatgaaagtaaccacagaaacaattcagtaatactactaagagagattaacttcccactggccttggaatagctaagtgcattgatttttgtgtagttgtgagtttttttctttcattgatattttacgtatttctggggtaaatgtattttttacatgcattgaatgtgtaatgatcaagtcagggtatttggggcctccatcaccttgagtgtttatcatttctatgtgtggtaacattccaagccctctcttctagctttggaatatatagtg

SEQ ID NO: 89577 - DNA, 446 bp, Homo sapiens
aattaactaagtatctgtgaaccatcaaataggctcagataaaataatgagccttcaacaagctggaatataataacattaggactttggagttcagtgggcagttagatgcactaatggcactgctgtgctgggaaaacatatattttatttggaatttttgtgtggaggtgattgcacattatatgaatagctgtgctaaatgcatgaaggttttctgccagcataggaggcgattaaggccccctctgccagataacagctcactggagggaagtaatggtggcaaagtaaaatctgaaaacagatgatttcccatttaatagtccattgactctcctcctacagccactgtggtgatggtgctgctctttattttcatttcacaaagaagcacaaggtattctgagattttttaggtcatacattttctttcaaaaagaaag

SEQ ID NO: 89578 - DNA, 356 bp, Homo sapiens
ggcacactcacgcaaaaataggaagcagtgagccaaactcactttgaaaacagatacaaaagttttaaataaattgcaaattgagggccgggcgcggtggctcacgcctgtaatcccagcactttgggaggccgaggcgggtggatcatgaggtcaggagatcgagaccatcctggctaacaaggtgaaaccccgtctctactaaaaatacaaaaaattagccgggcgcggtggcggcgctgtagtcccagatactcgggaggctgaggcaggagaatggcgtgaacccgggaagcggagcttgcagtgagccgagattgcgccactgcagtccgcagtccggcctgggcgacaga

SEQ ID NO: 89579 - DNA, 426 bp, Homo sapiens
aaaaatttaacatgtattcttcaaaaatcaaaatttatatctgtactttctcaatagaaaatgttttttaagttggattgctcaaccccaacttacatagtattatagtctagtatttcattatatcttacttattttgctttccagattagaaattgttattattgtttatatagtcaacgttagtccagaattatccacgtatttactatcatgttcactcacctccccttctggtatttttcagaccttccctgggataattttccttctactcttaagcacattctttaaaaatttccattaatggtaatgtcctagagataaacaggttatgagaacacatttttactttgttctgcttttcaaaatgctgttttgttgagtattggcttatattcttcatatttccacctcccgctgaga

SEQ ID NO: 89580 - DNA, 420 bp, Homo sapiens
tctaggccttggcatgagtatgtggtcgtgaaggcataagacaaaatatcttgtgtagctgtagcacaggtgctgtggtaagaggaaataggtttgggggcagtattaagggggctaataagcgcagaaaatagtatttgttgctgtcgttagttacttcactttgccttgcctatatgtattgtctgacagcagagccgaaactccagcatccttttgtctcctcctcctcctcctctttttcttattttctgacttataaagatgtatatcttcaataaataagcttgtgatgatatggaaagttaaataaataaaagttctagaaattggaaaactaaatggtgatttcattgtggtctttaaatataacaagtgttataggccacggtggctcacacctgtaatcccagcactttg

SEQ ID NO: 89581 - DNA, 1388 bp, Homo sapiens
cctgcttcagcctcccaagtagctgggattacaggcgcccaccaccgcacccggctaatttttgtatttttagtagggacgggatttctccgtgttggccaggctttttgaactcctgaccttaggtgatctgcctgccttggcctcccaaagtgctgggattacaggtatgagccactgtgcccatcctcatgtcaatttttaaagtgataaatcctgatattatacattgcaattagtgtagaataaacgcttggcttatagaactctctgttcttagtctaaagctgttcccaaaccaggtcatcctcacgaaacattcttgaccaagaaaaaagataaggtcattgagataggaagacagaggaaaagcctcttgctgttgtttcttcccaagaaaggagaagccctgccagggagaagtcagtagtattgctgactcactgtatcactgagtgtagggtgtggtagcaaggaggaggcaggggattcacgctgacaggtggctctggcctggctcttggggggccttctgaagaccagtctgcagtttgaggaagggccccaacaattcatttggagagcttggccaaatactttctcattaaatcagcacctaaacttgatgaacttaaagtttgtttattagagttgaaaacattaaaagatgactgatactaatgggagaaaaatactaaagacccaaaatttaaaattttccaaaatggacaagaattgatgggttaatttgctcataactgatatgagtttgcttttatgtgtgtgtggaaagcatttaatgtgtgatgctgttcatagtcctggctatttgatgtcattttcagttttacaacattttgaggatgacactttataaaatggtaaatctttctcagcgtttacaaacttggcttttgagaagggaaaaatcctctttgctatttctgtaagaagaataactgagatcagctattatataggtttgcatggatggtgtccacaatacaaatgtaaacttggacaggaataggataaataaattgctttcatcataaaggccaatcatccatttcttagtccaaggagattaaatataaataggacacccctgagatttccagtaaggtatttgaaaggattccactgggagggcagggaatatattttttctcagagcatccagtttgtacccagttttctatatggtttgtgaactgtagcttttaaaaaaaaattttgtagttttcttctaaccttattcattaagtagttccttgttttggcccttctactcttggccttagctaaaagcagtaaatgtgagtgaattttatgttgattatgtcacctggatctcctttccttcccttctttttctcattgaatgg

SEQ ID NO: 89582 - DNA, 209 bp, Homo sapiens
ccacgggactctccagcagtccaccccgggggaggaggacctgggcctgctgctgtgataatgtggctgtttgtcaagctgtgttgctgtctctggcccacggcccaggactcacaggcaggaatggctgttttcctcctgccgagttggtgtgtagtggagtttgtggatagtgtgctgtgtcgcactttgttttggaaaaatccagg

SEQ ID NO: 89583 - DNA, 557 bp, Homo sapiens
aggaaagtttcaaggattaaagggttaatgtttatgaacgattcaaattgtcttcagtgaaacacattagtcacaagaatccctgattgctgcactttaaaaaattctttaccttttccttgagcagattggtccagtccctctgctttctgttctgtctacattgtgtattatttattactatatagtatatgtatctgcataatgtctgaagtcattaatgcagtaacaggtcaagctctttagcattctttgacttttcccaaaatatagatatgacattctcctttatcttccttcttagatggcctaaatctgtctcttcatttacctcaaactcaaattagtatgccattttcatactgaaaattaaatatttttatggattttataaatattgcaacattttagatattgttttggaccatttgtgtatttatatataataaaatcatcaatttaatacttgtaagatcctaacatgtattgattgtaaaagtgaaatatgtaatagccacacttcactgttttaaaataaaagtgcaatttcaagttct

SEQ ID NO: 89584 - DNA, 626 bp, Homo sapiens
atttccttaatatataaaaagctcttacaaatcaataagaagaagatttaaaatgtagtagaaaaattatcagaggataccaacagtcccttaacaaaaaaggaaataggaaatatttaaaaatacgggacagtgctcagttttgcttataataagagaaatgtaagtgaaaactgcagtgaaaattttatctgaccaataggcaaagatccaagagtttcatctcaacactgacttggcaggaatgtaggatgatatgcactttagtacattgctgtgggaacgtaaactgataggatctctgtggagtgtgacttggcagtatctaccactgcttcaaatacataaccttaggctgggcgtggtgtcttacggctctaatcccagcgcttgggaggcagaggccgggggatcacttgagctcaggagtttgagaccagcctgggcaacatggtgaatccctgtctctacagaaaacacaaaaattagccgggtatggtggcatgagcctgtagtctcagctactcggaaggttgaggtgggaggatcacttgaatccggagggttgaggctgctgtgagccaagatcactctactgcacttcagcctgggcgacagagtgagac

SEQ ID NO: 89585 - DNA, 367 bp, Homo sapiens
aagggtgattatggtgcttaattattcactatattcataggatgtagcccccaaacacatgtcagtgacttcctctggtgctcagctgaagaagcagtgatctgtaatctgtttccatgtgggagaaaggaacggccatgttggatttgcccaaggatggtacatgcatttccctgcaggcttgtcgggggtgactttgaccacttgtggctccctttcatgcgtgactctctggtatctaatccacgagtgaggtgagactccatggtcctgcttccctttcctacttccccacctggtagacacctgctgtcttagtctgtctaggctgctgtaaaaaaagaaaacccacagactgaatagcttg

SEQ ID NO: 89586 - DNA, 259 bp, Homo sapiens
aaactgctgtcacctgtcacaaactctgctggtttagtcaatggaagacactcctcctgggaggtcagacagtagagggcagaaagaatccagcatacttctctcccttcctctctgccttggacagagacatcctagagtttcttccgctgacccctaggctctggtgacaccacctcctcctctttgtttttgttcgttttgttttgttttttgagacggagttttgctcttgttgcccaggttggagtacaatgtt

SEQ ID NO: 89587 - DNA, 927 bp, Homo sapiens
atcccaatggaactctctctgggtgtgggggttgagagaacctaaagcattcagctgcacagagcctctttccagcgatgggaaccagtctcaaagcctttacatctcttcccctgccctccatcactgctgagaaccctgccccaggctggcctgcctacatgacacaaatagcagtggactgtcactcatcagtatctgcagttctgtttaccaaagcctgcttgctagagacgtttcagggcctccttccctcaaagcgtccactgtacctccatctggatacaattagctggctccccacttcctggactgacggtaaccaccttttccaatgaccctgaagaaaacatgcaatctaagctgctttaagagtaacctacaactgaggacaaattttctatcaactcccagtacccctctctgccgtggctgatttgttactggttttcctttttttttttaatttgaaaatgtaagtaattatactaagaccagttcactctgagattgttttattctaatttgtcctaaggacctgcctgtacttagagcctgatagaaagcccaagttgatctactgggcagctctctgggcctggaaggaagagcacacaacaagacttcaacagtgagcctggctaggtccaggcagaccatgatttctgaaagcaacagtatagtccacatggaatcaggctgctgatgaacagcagcgagaggctgcctctgaatcatatctgcagggtcacctgcgcctggtggaggcccacagtcatccattaggccccagtatcctatgtgggagtatccacgtctagtctctacttctcactgcaggagaggtggcagatgaggaggtttcctactttaaagaaagtagaagttgtttcctttcttccctcctcacagccttgagggggaggt

SEQ ID NO: 89588 - DNA, 823 bp, Homo sapiens
gtgggagaaagagcgcaaacaccgagagaaagatgtctacctggcagccatgtcagagaatcaccagtatgtatgtcatgtcactcatcagtatctgcagttctgtttaccaaagcctgcttgctagagacgtttcagggcctccttccctcaaagcgtccactgtacctccatctggatacaattagctggctccccacttcctggactgacggtaaccaccttttccaatgaccctgaagaaaacatgcaatctaagctgctttaagagtaacctacaactgaggacaaattttctatcaactcccagtacccctctctgccgtggctgatttgttactggttttcctttttttttttaatttgaaaatgtaagtaattatactaagaccagttcactctgagattgttttattctaatttgtcctaaggacctgcctgtacttagagcctgatagaaagcccaagttgatctactgggcagctctctgggcctggaaggaagagcacacaacaagacttcaacagtgagcctggctaggtccaggcagaccatgatttctgaaagcaacagtatagtccacatggaatcaggctgctgatgaacagcagcgagaggctgcctctgaatcatatctgcagggtcacctgcgcctggtggaggcccacagtcatccattaggccccagtatcctatgtgggagtatccacgtctagtctctacttctcactgcaggagaggtggcagatgaggaggtttcctactttaaagaaagtagaagttgtttcctttcttccctcctcacagccttgagggggaggt

SEQ ID NO: 89589 - DNA, 136 bp, Homo sapiens
gtccacctgttgttatggaactcttcataccccttgagccacccacactgttttgtaccataagctccaatttttatgaatgatatataaatctcaaaaccctgatgttgaccacaaatgtcctgtgctcatcctg

SEQ ID NO: 89590 - DNA, 187 bp, Homo sapiens
taagagcaaaactccatctcaaaaaaaaagaaaaaagaaaagaaaaagaaaaagaccacaacagagagatagagagatgtggggattgaggcaaactgaagcatgcctacctaacaggacagctcctacacgctaagcagattgtacccacataggaatgcatatttggtgctgccaaatcttccat

SEQ ID NO: 89591 - DNA, 498 bp, Homo sapiens
atttgcctattttttaattatgttgcctttttgttgatgatttgtaagagctccttgtatattctggatattagttacctatcagatacatgctttccacatggtttctcccattttgtaggttgcctttttactttcttgatgaagtcctttgatacccaaaagttttgaattttgacaaagtccaagttacctatttttcttttgttctttttgcttttggtgtcgtatctaagattccattgtcaaatccaaggtcataaagatcgacccctgtgttttcttgtaagagatttatagttactgctcttacatacgttgtgagttaatatttgcatatatcaggtaggtgttcaatatcattcttatgcatgtggatatccatttgtcccagcattatttgttgaagagacaattttttcaatggggcttggatggtcatggcatccttttcaaaaatcaactggccataaatgtatgggttaatttccagcctct

SEQ ID NO: 89592 - DNA, 325 bp, Homo sapiens
ccaccttgcccggccccagtatattcttttttaaacccttagccttatatttgtaaaagtttaaaacagcatacttcatgtgccacattttaggaaactgtctgagatagtgattatatctccatattagaaataagtagaaaggcccagaaatttttaaatgacttgctgaaaatcacaaatctagcaaatgtcatacttcaaccaaaacgcaactccattatgtattttaaagcacctttctactaccactagccaaaaggactctcatcgggcactgggagaatcctacaggataaagctgcttggaaaagattactttggt

SEQ ID NO: 89593 - DNA, 270 bp, Homo sapiens
ttgggaggtagctatcgtgtaatggttaagatcatagactttgaagccagacttcttaagtttaagtcctggctatgctgtttcctacctgtgccatattgggcgagttacttgactgtctgcctcagttttctcatcagtataatggggataatagtatctgtttcatattgtggggattaaatgatttaatacatataaagctcttaaaacagtgcctggtgcacagaaagggctcagtaaatgttgcaatgactggtcagcttattt

SEQ ID NO: 89594 - DNA, 567 bp, Homo sapiens
tttgtagagacaggatctcgctacattgccaaagctggtcttaaactcctgggctcaagtgatcctcctgccttgacctgtaaaagtgctgggaggccatgtgcagtgtacatatgtaatatcagctatccaagtgagaggatagcttgagcccaagagttcgagatcaacctgggcaacacaggaagactccatctctacaattaaaaaattagctgggcacagtagtgcacgcctgtggacccagctactcaggagaggctgaggcaggaggatcgcctgagcccaagagtttaaggctatagtgagccatgatcacaacattgcactccagcctgggcaacagagcgagatgctgtctcaaaaaaaaaaaaaaaaaaagtgctgggattctgtgtgtgagctaccacacccaatctgtattttttttttaaaccaacaatttctctgtctcccattttgagcaaattcccatatttcctaccctatttttcaaagtggtattaatgtctcagatatcctaatgaaatttcagagacaatcatccttgtggttgcaaaaaaaaaa

SEQ ID NO: 89595 - DNA, 851 bp, Homo sapiens
catgcggcaagagcgagtcgcaggaacaagtggggaatcttggccgcggccccctcccccgccttataaaaaagaaattgacttttgtttggagtttgtgaaaagtggggctcggggcccagtcaatggggcgccccgcggcgcgggctgagtggagctagcgcgaaccgctcagccgcggccccaattaatccgccctttgtgcggcccgcccggccgcccccgccggcaccgcaccagcggcccattgtttggcctcgccgggccgcgggatttacccttttcaaacagccggttttgtccagggcagttcgagcggaagtttctcactgacaatttgccccaaatagatagatttgtcagaagcgacttcgggaaggaagcaaaaagccaccggcccgaaggttgggcccaaaacagggactctgcgtcccacccgcggccgcgccgcccccccgcgcccccggccctgcagtcccgaagccccgcgggggtccagaccactgcacctgctgagccagacactccgcggacctgacctccgttttacccatctgtaaaatggagcagctgggcgctggcaagccgtaagtccaagagctttggctccaccagcgtgtacgacgctcatttcctttctctctccccacaccctttccaaaaactgtaagccagaaaacctggccaggcctccgcgacggcgagaaacggtcttgaaggtcggtcggtcgccgtaatgcggtccggatcgtgcacgtgctgtttcgccactgccctccggctcctccttaacaaagatgtcaaccgtgctaaatcacaggtggtgcctttgtaagaccagctattgtccc

SEQ ID NO: 89596 - DNA, 309 bp, Homo sapiens
atcctgaatctgcatgtactttacagcaacacttcaaaatatatgaaataaaaactgatagagctgaaatgagaaatggagacactcacagttatgattgcatattttagcaagcctccctcaataacagaacaagtagagaaaattaaaaggatttacaatcgctaaacaaaataccatctaccaactgaaactaactgatatttataggatactccatgcaataatagcagaatacaaaatgttttcaagcgcacataaaacattcaccaagctaggtcatatcctgaataataaaacaaaccttaa

SEQ ID NO: 89597 - DNA, 414 bp, Homo sapiens
tccatgttcatcccaaacttcctccctcaggacctcccaacaatacacatttccaaagcctcctacaatagaggccaccaaactcccatgtacaccaaatacccatgtcctgacctcaaaaccctttcctaatgaactcaaatggccatgttcccctacacagtctccctcaagacagaattagtgtgcaggtgtcagccccttgtgatagacaagcagaggaagagcagcagtggatctaagaacaggtaaatgtccactacatgtcctaattgtgtgggcttggcctccaggatatcatcttcttcctgcacccttgactttcaaggaaggaacaaatatggagaataaaggggggagccataaggaggacgaggaagatcttagggacctagaaataaaaacagcaccttc

SEQ ID NO: 89598 - DNA, 1282 bp, Homo sapiens
cactttgctctgacccatagtatactctttgcccagtagtgtatggttgaattcatttttgcttctttgctaagaggtagttcgacaccttcttgcttctgagtttattcctatttcttcccagctcttcaaactttaagaaactgaagagggcagcaaagtaacctggccatcttttatcagggcagtcagaggcacctgactggctgagtggcagatagattaatggaggagctttgttgctgtattgcctagtttcatcctcttggactcttttcatatacttgaatagcctaattatctgaagccagaagtgagttgacagtgccagttagtggtggcagtaattatgactgaaggtatctgtgagcattaaagcattccattcagtgacatgaatgaaacttaccctagctctttaagataaaataggtgtaatatctcaataggtattctgtaagacgtaatagtagccctagagttgatggctgtgtttttttctacctctcagaattttaatgcatcttccttttagattaaaaaaaaaaggtaacttgggaagcttcaactctttgaccacagctatataagttattttttaaaacaaaatactttcaagtttatttactcactaaaaatataattatggtcaagacatttcttttcaataggttagtcattttcttgacgtctattttttttaacttgagcctgcataaaaagaattaaaccctgaagaagtattttatgtcatatctgctttcaccagattgggtatagttctgttttttgtttgttttttaaaccttaagtgttctcagtgttttcttttcacttaagacgtaggtgtcctagaggaaaatgctaattttaaactgattctaaaattgttattttaaaatagtaaaaataacttaaatacagattttggtacaactaggttctcccaagagtaaggtcttctaacatctaataagctcattgatttactactattaggtgaatgcatatactaaataagttccagctaagtcaggtactacttccaattcagtgttcttctttgaccatgcattaatgcattatcagtaaaatgtagtgatctcaagcagccagaagtcttcattgtcattagcacaggcatttggatgcttcaggcttattgaaatttatctttttatggagacctttaaagaacattctcatacaccacttattcttaatatcttttaaactttaaggattctctattgtctggaatgtggaaagtagacctgggaag

SEQ ID NO: 89599 - DNA, 1272 bp, Homo sapiens
  misc_feature (1013)..(1013): n is a, c, g, or t
  misc_feature (1261)..(1262): n is a, c, g, or t
gttgagttcttggcacagctgaagatcatggactacagcctgctggtgggcatccagacggaccgggcagagaggaggagatggagagcagacctgtgtgcgcgccccgctctgccacgttccctgaggacacactgctttgaccagcccccaccccatctcctctccgccagtccccggtgtccaccccagccccgctaccgatgaagctcaagccagggtccccatcacctgcttcacggccatccctgcacttgagctcaggggctcagggttgtgctgacacgcctgcctgtccacccctcaccgacacctctgcagtcctcctcagggcccaacaggacccccaggaccccgctcccattctgcccttgctcctgccaacctgtcttctctatgcccatgactttggaaccctctgccacaagtgccagcccccacatctgtagcccctgcaggaacaagccctaatctggactcattgcaatggctcagcttctcttccaacctgtccataaacctccaggcagagatcacaaaactaacagctctttctgcaaatctggactctctcctgcaccttcttcaccgtccaggcctccctgtcatccgtcctggggacctcagagatctcttcatttcacaggtgaagacttggctcagagagggcagagcccctgggtcacacagcccgtctccagtagggctggggaaaagaacccagggcgctcttgttggcagtgttttaatgactggggggagggagagaatggctaatgaggctctagggatcagcacagccagctgctggaggtcccagaggacgggtgactcagcaggaatgggggagtctgaggggttgacagagtgcccaattctcacctcctcctgcaccttccagagagacgggctgcagggagtgattgagtggatgaacatgactagagggacccagtcttctcctcagcagctgcttgaggacagtattagcggtcccctcaatcccccccccnacacatgcacacatgcactgacctgcaggggccagatcccggtggacccggacacagcttccaggggctgtcttgccatgtcccttcccagatctgcctggattcatgccaggccaccctccacaatttgctgagggaggccccagagtccagggcacccagagtgctaactagcccctgggggtacagggagaacagcatgctgtgtgggggatactactctctgcccatacctagggcctgtgcgnncacaggcagc

SEQ ID NO: 89600 - DNA, 329 bp, Homo sapiens
aacaaaaactgtagaaatcagtaaactgttgagttgtcaccaacggccaccttttctactatgtggagaaaaagaatctgagaatgaagaaagcaaaacgaaaaaagactcacaggccaggcgcggtggctcatgcctgtaatcctagcagtttgggaggccaaggtgggatgatcacttgaagtcaggagttcgagaccagcctggccaacatggtgaagctccatctctactaaaaatacaaaaattagctgggcatggtggcacacactggtaatcccagctactcaggaggttgaggcaggagaatcgcttgaacctgggaggtg

SEQ ID NO: 89601 - DNA, 618 bp, Homo sapiens
gttaaaaaagttaaaattcaattgacaaatattttgttgcaggaaaatatgacacatggtcagtaaaagctttcaagcataaaaacatattaagataaagtaacattttgtgagaggagtagaatataacttcaaggagaaaaagcaatgatgtaaactggccaagtgcagtggctcatgcctgtaatcctagcactttgaaaggctgaggcggaaggatctcttgagctcagaagttcgagagtctaggcaacacagggagacctttttttgcagttcagtagttttgtggggaacaggtggtgtttggttacatgaatgttttttttttttgagacacagtctcactctgtcacccaggctggagtgcagtggtgcaatcttagctcactgcaacctccgcctccccagtccaagtgattctcctgcctcagcctcccgagtaggtgggactacaggtgcgtgccaccacacccggctaattttttgtatttttagagatggggtttcaccgtgttagccaggatggtctcgatctcctggccttgtgatccacccgccttggcctcccaaagtgctgggattacaggcatgagccattgcgcccggccctacgtg

SEQ ID NO: 89602 - DNA, 504 bp, Homo sapiens
acctaatacagtggagggtttcttttacatgcagatgaaagcagtccttgtgatacagaaacaaagtattacagaccaaaaatatcagaataataattttggcatttgaacacatgttcctaatttcaaaaggtgatttttttcttgagttggtttagtttagagagtatttgctttcactgagctttcataagagttaatttgtttacaggcagagatgagataaatcatgtctttctttagcctgtttctttatctgtttctttttttctacatgaattgcacatacttctttaaggagtcttataattaaaacatgttaaatgagctcaaatctttttccataattaggaacttgaatcattgcctaatttgtaatttgataagtaatgtgtatttgttgaatttttctgctatcaatgtaagtcctggggtaattttctaaaacaaaataaaaatggttttggctctgttttcttaacatattaacagtagtctaggaaa

SEQ ID NO: 89603 - DNA, 499 bp, Homo sapiens
attcttgtcaagatgaaaagcattaattcacactgcaatcaggttgccttaacataaaaaaaaaaaaaaatccatgcagttaaatgtaaaaattgaaaaaaaaaaagacttgggaatccctgttcatctgtttctcagggctgtcactagcagcagcaccaacatctgtaaaaatagaaagtgaggatggtggacaattatttttgacaaagtccttccataccacctatcctcttgttcttacgcttcctttcttttcaatttcctcttttgccttttgcctccatatgttttggagtagctcctgcccaatgcaaattagatagatagatagatagatagatagatagatagatagatagatagatcgataactgtggaattttcataatattaaaaattatcaaaattttatttgcatgttttaattttgctttgctttatttttaccatatcatttatctaatacaataaaatgttcctttcaatcactgagcag

SEQ ID NO: 89604 - DNA, 885 bp, Homo sapiens
caccctcctttcccttgcgcttgctctccggtacctgttcctcacctgagctcaagggcagggagaggccgggcctctggcagtccacgaaggaagccgtctgccttcggttatgattttaggaacaagtccaacgagggtgttcaagcagttaatggttgtgctaactcttgtttctactgaagcgggttttgcaaagctgacatcccttaaagataacttgggctttcggaagcggcaaggaaatggcacctgtagttgccaggacaggtggtgtcctcggccaggactaagagccagctcatctttgtaacattcataatacgggaaactgaggaccaggtggctcggaaaagagatgagttccagcttttacctaacacagggttctctcgtcgtcccccaacccctccagctcggcttctttgtgtccagggttgtagatttttggatagaggtgtttctgattctagtgagtctgagaactggaaaagaccaaggaggggttgatgatttacaaggtccatagaaaaactttttgtgtggtcggaagttggccaagcagaggcccacagcctgatgctactgccccccacccccccaaagatctgaattccctaaagatcaagagggttcagctggccttgggagatgtttgctggagaatgacttcagttttctcctaaggcaatcagattgcaaccattagcattgtatcttatctgcaaatcagtttactccgaggttccccaaggatagttttattaggaccacaggactttactaaccactgaggtaacacgctgcttgtgcagcaattattttgaggtggaggtatttatgggacaagtttataattccatttattaaagggactaacctaaa

SEQ ID NO: 89605 - DNA, 431 bp, Homo sapiens
aattcttcgtagctcgtataagaggaaacatattatttgtttttttgtgactggcttatttcactcagcataaggtgctcagggttcatccgtggtgtagcatgtgtcagaattcgcttcctttttaaggctgagtaatgttccattgtatggagagaccacattcatccatcagcgggcacttgggttgtttccactttttggctactgtgactcacgttgctgtgactaagagtgtgtaaatatctccccaagtccctgcttcccattcctttggggatttacccaggagtgagactgctggatcccatggcaatcctgtgtgtaatttgggggaagctctgtgctgttagatactgatctttcccacctactatttctgccacaggcagcgcttgctccactcctgaagcaggcagggacgctgccca

SEQ ID NO: 89606 - DNA, 752 bp, Homo sapiens
  misc_feature (749)..(749): n is a, c, g, or t
  misc_feature (752)..(752): n is a, c, g, or t
actgcctgcagaaccccagcccgactttccctgcgcactgggatcctgctggaacctcagctgcaacatgagctccgcagccaggtcccgcctcacccgcgccacccgccaggagatgctgttcttggcgttgctgctcctgccagttgtggtcgccttcgccagagctgaagctgaagaagatggggacctgcagtgcctgtgtgtgaagaccacctcccaggtccgtcccaggcacatcaccagcctggaggtgatcaaggccggaccccactgccccactgcccaactcatagccacgctgaagaatgggaggaaaatttgcttggatctgcaagccctgctgtacaagaaaatcattaaggaacatttggagagttagctactagctgcctaagtgtgcactttcaatctaactgtgaaagaatcttctgatgtttgtattatccttcttatattatattaacaaaataaatcaagttgtggtatagtcaatctatttcttaataatactgcaaaaataatgctgacacatcacaatttcatattttaaaatttccagaattttaagcaaaaagcattatgaaggaaggcttggtttaataaagactgattttgttcagtgttatatgttagctgatacatatttgttcatttatgtgattgcagtactttatagctacatatttaccttgaatgttacaattagcttgccaataaatattagtagctcttaagcattactcganagn

SEQ ID NO: 89607 - DNA, 2732 bp, Homo sapiens
  misc_feature (749)..(749): n is a, c, g, or t
ctggctgtgctgttcatctcctagatgaatgggatggtctacattcatccatttggatttggccaaagacaccaacacccctttctccctctacataagctgcactgcatggttgctgctggatgtgttgtgttcctggcttccctctggatgctgacagaaacaaggctggaaggtctgggacatggagaacgacccctcgagacgaagagagtccatctctctcacacctgtggccaagggtctggagaacatgggggctgatttcttggaaagcctggaggaaggccagctccctaggagtgacttgagccccgcagagatcaggagcagctggagcgaggcggcgccgaagcccttctccagatggaggaacctgcagccagccctgagagccagaagcttctgcagggagcacatgcagctgtttcgatggatcggcacaggcctgctctgcactgggctctctgccttcctgctggtggcctgcctcctggatttccagagggccctggctctgtttgtcctcacctgtgtggtcctcaccttcctgggccaccgcctgctgaaacggcttctggggccaaagctgaggaggtttctcaagcctcagggccatccccgcctgctgctctggtttaagaggggtctagctcttgctgctttcctgggcctggtcctgtggctgtctctggacacctcccagcggcctgagcaactggtgtccttcgcaggaatctgcgtgttcntcgctctcctctttgcctgctcaaagcatcattgcgcagtgtcctggagggccgtgtcttggggacttggactgcagtttgtacttggactcctcgtcatcagaacagaaccaggattcattgcgttcgagtggctgggcgagcagatccggatcttcctgagctacacgaaggctggctccagcttcgtgtttggggaggcgctggtcaaggatgtctttgcctttcaggttctgcccatcattgtctttttcagctgtgtcatatccgttctctaccacgtgggcctcatgcagtgggtgatcctgaagattgcctggctgatgcaagtcaccatgggcaccacagccactgagaccctgagtgtggctggaaacatctttgtgagccagaccgaggctccattactgatccggccctacttggcagacatgacactctctgaagtccacgttgtcatgaccggaggttacgccaccattgctggcagcctgctgggtgcctacatctcctttgggatcgatgccacctcgttgattgcagcctctgtgatggctgccccttgtgccttggccctctccaagctggtctacccggaggtggaggagtccaagtttaggagggaggaaggagtgaaactgacctatggagatgctcagaacctcatagaagcagccagcactggggccgccatctccgtgaaggtggtcgccaacatcgctgccaacctgattgcgttcctggctgtgctggactttatcaatgctgccctctcctggctgggagacatggtggacatccaggggctcagcttccagctcatctgctcctacatcctgcggcctgtagccttcttgatgggtgtggcgtgggaggactgcccagtggtagctgagctgctggggatcaagctgtttctgaacgagtttgtggcctatcaagacctctccaagtacaagcaacgccgcctggcaggggccgaggagtgggtcggcaacaggaagcagtggatctccgtcagagctgaagtcctcacgacgtttgccctctgtggatttgccaatttcagctccattgggatcatgctgggaggcttgacctccatggtcccccaacggaagagcgacttctcccagatagtgctccgggcgctcttcacgggagcctgtgtgtccctggtgaacgcctgtatggcagggatcctctacatgcccaggggggctgaagttgactgcatgtccctcttgaacacgaccctcagcagcagtagctttgagatttaccagtgctgccgtgaggccttccagagcgtcaatccagagttcagcccagaggccctggacaactgctgtcggttttacaaccacacgatctgtgcacagtgaggacagaacatgcttgtgcttctgcgcttctgagggctgttctcccccgggaaccatctgtccccaccttccctttcccagagccctcttcagggaagccacaggacttagacccagctcaatcccacaattgggaaggggtcatggagtgagtgtgcagagagtgagtgaggacataaggaaggacatgtcccactccatcccccttcctgctcccccatttcctaactcccccagtgtgaattctcagggtcacttctgcctcctcccgtttcccctccacatccaaacagcaccctggtcctctctatcccccctctcctggggtccctcacatgccccttcccttctgttgtgggctgcacaccaaagcctcctcccctccccacttcctaggcactaggatctctctgtggcttcccctgctgggtggtgtcacctctttctctgctttcagagaaacccttcccgcctttcctcagagtgcttcccaaactgaggtcccatggcacactgtcctgggaggcgttcagagggttccatgatggactaggtttggaaccactgggttaaataaacttagagagggctgtttaga

SEQ ID NO: 89608 - DNA, 616 bp, Homo sapiens
ggctgtaccggctggagtgttgggatcaggaccatccctggagggggattcagcaggctcgatcggggtccaggtgctggtatttttcattagcctccaggggattctgatgtagccagcagcgtccttggacaacagtttgagatctgctgcttttcaaactggattccttggagcgctggaaatctcagcgatgtcacagggcaggagagggaggttgtggagggaaaattcagacttcccgcccagcccaccatttcaccaggcagctctaaatttatgtgttttataagccaaggttcacacaaaaaagaaaattcgctgggggaaaaaaacagtttctatggcttaaaaaaaagtctgaagaccaccagtctatttcaatactctattttgttgatgaagaagctggtgaccaaagatacccaaagactaagtcagggggatgcaggggtacaggggtgcctctcactttcccaaagtgagatccacataccacagcaaaatgatttgagccagcctgtggatgaacacatttaaaattttatttataaatacatttactgttacatttgacttctctttattaaatacatttgtgatttatttttgcaat

SEQ ID NO: 89609 - DNA, 388 bp, Homo sapiens
agaactgtttcgtcttaatgacttttgagttgattcccaggcatctttgacataaagtcatgtcacctgcaactaatgatgttatctccagccccaacatctgcgttccagtttctaactcatgtcttattgcacttctcagaacatctcgacaacattagataatagcagcgatggttgttgcccctcattttatttctagttccattagttatgttccagtaacgtgtttcttgctcttaggatattcaaaagtacacctgccgagtcccagccctgaggagtgttttcgtgcttcattgttaagtatcttggaggctctcagctggaaataaatgctcttcatttattaaagaagcatccttatatttttaagagtctttgaaaa

SEQ ID NO: 89610 - DNA, 1430 bp, Homo sapiens
ctggctgtgctgttcatctcctagatgaatgggatggtctacattcatccatttggatttggccaaagacaccaacacccctttctccctctacataagctgcactgcatggttgctgctggatgtgttgtgttcctggcttccctctggatgctgacagaaacaaggaaattctgctgaagtgacaaggcaagccagagccaaagcaggttggacccaccttgtccccacagagacgtgtgcttccctctctctctgagagcgacctgttaaccgcaaatacctggaaggtctgggacatggagaacgacccctcgagacgaagagagtccatctctctcacacctgtggccaagggtctggagaacatgggggctgatttcttggaaagcctggaggaaggccagctccctaggagtgacttgagccccgcagagatcaggagcagctggagcgaggcggcgccgaagcccttctccagatggaggaacctgcagccagccctgagagccagaagcttctgcagggagcacatgcagctgtttcgatggatcggcacaggcctgctctgcactgggctctctgccttcctgctggtggcctgcctcctggatttccagagggccctggctctgtttgtcctcacctgtgtggtcctcaccttcctgggccaccgcctgctgaaacggcttctggggccaaagctgaggaggtttctcaagcctcagggccatccccgcctgctgctctggtttaagagggatcccaggccatggagcaaggagggcccgaatcagtacctccctcagatcacctggacagtgtgagacaaaaagccgcagggaccatccctggagggggattcagcaggctcgatcggggtccaggtgctggtatttttcattagcctccaggggattctgatgtagccagcagcgtccttggacaacagtttgagatctgctgcttttcaaactggattccttggagcgctggaaatctcagcgatgtcacagggcaggagagggaggttgtggagggaaaattcagacttcccgcccagcccaccatttcaccaggcagctctaaatttatgtgttttataagccaaggttcacacaaaaaagaaaattcgctgggggaaaaaaacagtttctatggcttaaaaaaaagtctgaagaccaccagtctatttcaatactctattttgttgatgaagaagctggtgaccaaagatacccaaagactaagtcagggggatgcaggggtacaggggtgcctctcactttcccaaagtgagatccacataccacagcaaaatgatttgagccagcctgtggatgaacacatttaaaattttatttataaatacatttactgttacatttgacttctctttattaaatacatttgtgatttatttttgcaat

SEQ ID NO: 89611 - DNA, 449 bp, Homo sapiens
ctggctgtgctgttcatctcctagatgaatgggatggtctacattcatccatttggatttggccaaagacaccaacacccctttctccctctacataagctgcactgcatggttgctgctggatgtgttgtgttcctggcttccctctggatgctgacagaaacaagggtgagagaaaaggacagtaggagaggagggaaggcgggactgaagaaaggaggggaagggggtagcacagggcaaagtggaaaagcaggtagcgtcctttttttcttcactagggcttggtgaagaccccttcgaggacagctccaggcccatccctgtggtggccacccatggagacagtagtgctgctcagaggcatttagtttttgtttcttttctgtttttgaggtagagtctcaccactgtactccagcctgggcaacaagagtgaaatccgtctc

SEQ ID NO: 89612 - DNA, 599 bp, Homo sapiens
atcagtgggacagactacacatgtgcccttgctgccctgggccgcactccttggtcgccagcatttcttctgactgtccacctagaacctgcactctcactcttgcagatcgatgccacctcgttgattgcagcctctgtgatggctgccccttgtgccttggccctctccaagctggtctacccggaggtggaggagtccaagtttaggagggaggaaggagtgaaactgacctatgggtgagcacagcaggaggtcctgcagacagggtagtggtacaaggtggggggagcaaagcagagggtcccgttctctctgtccatcactgtcttccactagcctgggcccatctctccacttttcctgctctggtttgggcttcatttgctgtcttagtccattttctgttgcttataacagaaatcctgaaactgggtactttataaagaataagaatttatttcttacagttatggaggctgagaagtccaaggtcgaggggttgtatctggcgagagccttcttgctgctggggattctgcagagtcccaagttggcacagggcatcacatggcgaggggttgaggggtgccaggcag

SEQ ID NO: 89613 - DNA, 2847 bp, Homo sapiens
  misc_feature (864)..(864): n is a, c, g, or t
ctggctgtgctgttcatctcctagatgaatgggatggtctacattcatccatttggatttggccaaagacaccaacacccctttctccctctacataagctgcactgcatggttgctgctggatgtgttgtgttcctggcttccctctggatgctgacagaaacaaggaaattctgctgaagtgacaaggcaagccagagccaaagcaggttggacccaccttgtccccacagagacgtgtgcttccctctctctctgagagcgacctgttaaccgcaaatacctggaaggtctgggacatggagaacgacccctcgagacgaagagagtccatctctctcacacctgtggccaagggtctggagaacatgggggctgatttcttggaaagcctggaggaaggccagctccctaggagtgacttgagccccgcagagatcaggagcagctggagcgaggcggcgccgaagcccttctccagatggaggaacctgcagccagccctgagagccagaagcttctgcagggagcacatgcagctgtttcgatggatcggcacaggcctgctctgcactgggctctctgccttcctgctggtggcctgcctcctggatttccagagggccctggctctgtttgtcctcacctgtgtggtcctcaccttcctgggccaccgcctgctgaaacggcttctggggccaaagctgaggaggtttctcaagcctcagggccatccccgcctgctgctctggtttaagaggggtctagctcttgctgctttcctgggcctggtcctgtggctgtctctggacacctcccagcggcctgagcaactggtgtccttcgcaggaatctgcgtgttcntcgctctcctctttgcctgctcaaagcatcattgcgcagtgtcctggagggccgtgtcttggggacttggactgcagtttgtacttggactcctcgtcatcagaacagaaccaggattcattgcgttcgagtggctgggcgagcagatccggatcttcctgagctacacgaaggctggctccagcttcgtgtttggggaggcgctggtcaaggatgtctttgcctttcaggttctgcccatcattgtctttttcagctgtgtcatatccgttctctaccacgtgggcctcatgcagtgggtgatcctgaagattgcctggctgatgcaagtcaccatgggcaccacagccactgagaccctgagtgtggctggaaacatctttgtgagccagaccgaggctccattactgatccggccctacttggcagacatgacactctctgaagtccacgttgtcatgaccggaggttacgccaccattgctggcagcctgctgggtgcctacatctcctttgggatcgatgccacctcgttgattgcagcctctgtgatggctgccccttgtgccttggccctctccaagctggtctacccggaggtggaggagtccaagtttaggagggaggaaggagtgaaactgacctatggagatgctcagaacctcatagaagcagccagcactggggccgccatctccgtgaaggtggtcgccaacatcgctgccaacctgattgcgttcctggctgtgctggactttatcaatgctgccctctcctggctgggagacatggtggacatccaggggctcagcttccagctcatctgctcctacatcctgcggcctgtagccttcttgatgggtgtggcgtgggaggactgcccagtggtagctgagctgctggggatcaagctgtttctgaacgagtttgtggcctatcaagacctctccaagtacaagcaacgccgcctggcaggggccgaggagtgggtcggcaacaggaagcagtggatctccgtcagagctgaagtcctcacgacgtttgccctctgtggatttgccaatttcagctccattgggatcatgctgggaggcttgacctccatggtcccccaacggaagagcgacttctcccagatagtgctccgggcgctcttcacgggagcctgtgtgtccctggtgaacgcctgtatggcagggatcctctacatgcccaggggggctgaagttgactgcatgtccctcttgaacacgaccctcagcagcagtagctttgagatttaccagtgctgccgtgaggccttccagagcgtcaatccagagttcagcccagaggccctggacaactgctgtcggttttacaaccacacgatctgtgcacagtgaggacagaacatgcttgtgcttctgcgcttctgagggctgttctcccccgggaaccatctgtccccaccttccctttcccagagccctcttcagggaagccacaggacttagacccagctcaatcccacaattgggaaggggtcatggagtgagtgtgcagagagtgagtgaggacataaggaaggacatgtcccactccatcccccttcctgctcccccatttcctaactcccccagtgtgaattctcagggtcacttctgcctcctcccgtttcccctccacatccaaacagcaccctggtcctctctatcccccctctcctggggtccctcacatgccccttcccttctgttgtgggctgcacaccaaagcctcctcccctccccacttcctaggcactaggatctctctgtggcttcccctgctgggtggtgtcacctctttctctgctttcagagaaacccttcccgcctttcctcagagtgcttcccaaactgaggtcccatggcacactgtcctgggaggcgttcagagggttccatgatggactaggtttggaaccactgggttaaataaacttagagagggctgtttaga

SEQ ID NO: 89614 - DNA, 2118 bp, Homo sapiens
  misc_feature (864)..(864): n is a, c, g, or t
ctggctgtgctgttcatctcctagatgaatgggatggtctacattcatccatttggatttggccaaagacaccaacacccctttctccctctacataagctgcactgcatggttgctgctggatgtgttgtgttcctggcttccctctggatgctgacagaaacaaggaaattctgctgaagtgacaaggcaagccagagccaaagcaggttggacccaccttgtccccacagagacgtgtgcttccctctctctctgagagcgacctgttaaccgcaaatacctggaaggtctgggacatggagaacgacccctcgagacgaagagagtccatctctctcacacctgtggccaagggtctggagaacatgggggctgatttcttggaaagcctggaggaaggccagctccctaggagtgacttgagccccgcagagatcaggagcagctggagcgaggcggcgccgaagcccttctccagatggaggaacctgcagccagccctgagagccagaagcttctgcagggagcacatgcagctgtttcgatggatcggcacaggcctgctctgcactgggctctctgccttcctgctggtggcctgcctcctggatttccagagggccctggctctgtttgtcctcacctgtgtggtcctcaccttcctgggccaccgcctgctgaaacggcttctggggccaaagctgaggaggtttctcaagcctcagggccatccccgcctgctgctctggtttaagaggggtctagctcttgctgctttcctgggcctggtcctgtggctgtctctggacacctcccagcggcctgagcaactggtgtccttcgcaggaatctgcgtgttcntcgctctcctctttgcctgctcaaagcatcattgcgcagtgtcctggagggccgtgtcttggggacttggactgcagtttgtacttggactcctcgtcatcagaacagaaccaggattcattgcgttcgagtggctgggcgagcagatccggatcttcctgagctacacgaaggctggctccagcttcgtgtttggggaggcgctggtcaaggatgtctttgcctttcaggttctgcccatcattgtctttttcagctgtgtcatatccgttctctaccacgtgggcctcatgcagtgggtgatcctgaagattgcctggctgatgcaagtcaccatgggcaccacagccactgagaccctgagtgtggctggaaacatctttgtgagccagaccgaggctccattactgatccggccctacttggcagacatgacactctctgaagtccacgttgtcatgaccggaggttacgccaccattgctggcagcctgctgggtgcctacatctcctttgggatcgatgccacctcgttgattgcagcctctgtgatggctgccccttgtgccttggccctctccaagctggtctacccggaggtggaggagtccaagtttaggagggaggaaggagtgaaactgacctatggagatgctcagaacctcatagaagcagccagcactggggccgccatctccgtgaaggtggtcgccaacatcgctgccaacctgattgcgttcctggctgtgctggactttatcaatgctgccctctcctggctgggagacatggtggacatccaggggctcagcttccagctcatctgctcctacatcctgcggcctgtagccttcttgatgggtgtggcgtgggaggactgcccagtggtagctgagctgctggggatcaagctgtttctgaacgagtttgtggcctatcaagacctctccaagtacaagcaacgccgcctggcaggggccgaggagtgggtcggcaacaggaagcagtggatctccagacgaggtcttgctatgttgaccaggctggtcttgaactcctggccttaaatgatcctactgccttggcttcccaaagtgctgggattacaggatattcaaaagtacacctgccgagtcccagccctgaggagtgttttcgtgcttcattgttaagtatcttggaggctctcagctggaaataaatgctcttcatttattaaagaagcatccttatatttttaagagtctttgaaaa

SEQ ID NO: 89615 - DNA, 462 bp, Homo sapiens
ctaacatatatattgatgcttcaagtcattccagagtcctcaatcttgttaaagtccagaataagaattatgtacctgaaacaactagaggaggttttagggaaattaattgttgagttaatgctaaaatatgtagcacacaaagtaagtgctgaaggaggccaggtgggagagagatttacctttccattactgtgtatattgtggatggcatggggattgccccaggccctgaaggacttttcaactaggcaaactgggaggagatctctcagacagaaattcggcatgagacaaagtctgaaagtgagaaagacatttgggggtgcatgcaggtgcgtatgtgtcaggaaaggggagtgaggaaaataatgcatgtaaataaaataaggcatataaaacacttggcactatgcctgtcatacaggacattattaccctcatgcttatcgtcatcattat

SEQ ID NO: 89616 - DNA, 129 bp, Homo sapiens
ggtataattaattacgttagaatgagatcatcatgcagtagggtgggcttctagtccattattaccaaggtccttataaaaaggggaaatctgggccaggcacagtggctcaggcctgtaatctcagca

SEQ ID NO: 89617 - DNA, 170 bp, Homo sapiens
gatcagaggaatgttattttgttcagccttctggttggttcacagtagtgatagtattgtaaatgctcagagcaatcctacaagaagaaaactacatgagcccccacatgttccccccaacataccccatcacagcaactgaaaacaagagaaatgttagttttctgtgg

SEQ ID NO: 89618 - DNA, 443 bp, Homo sapiens
caaattagcacccaggaactctctacacttccggtgaaagtatacaatgttacaaccactttggagtacaagttaaaaatatttgataaagcagaagatgtatatatctaccctataacccaggaattcaggaattctacacctagatgtataacctaaagaaaccttcctacacatatacaaagaagtgcaaggatggtggttaaaactcttttaaaatagtaaacaattggaaagatctttaagtgtccaaaggagaatgaataaatttcgatatatatatacaatgaaatactattacaagttaaaatgaatcagagctaaatttatcaacatgggcagatttcaaaaacatactgctaaacaaaaagcaaattgtacaatgatatatacagtataataccatttatataaaatttaaaagcaggcaaatgggtatgtat

SEQ ID NO: 89619 - DNA, 382 bp, Homo sapiens
cccaaagtgctgggattataggcgtgagccactgcgcccagctgcttcatggtcttaaaaggctgtaatcaaggtatcagctggggcagcagtctgacatgagggtcggctggagctcatgtggttcttggcaacactcagtttcttgcaggctgtggaactaaggactcaggttcttgctggctgttggctgaagccacccccagttccttgccttcaggccttcccaacgtggctgcttgcttcctcaaagccagcaagggagcaagtccactagcacaatggctgttatcattgtacacaatatacagttgacctgtgaacaacacaactttggaattcacaagtccacttagatgtggattttttttcaattaaagtt

SEQ ID NO: 89620 - DNA, 530 bp, Homo sapiens
ctctgtctcccccggtggacctagcatgctgggcaaaagcagctatcgtttggcttgaggctcatctgttaaagaggaggctggtgtaaacctaagcatgggggcatgtggagatgagggagagggctggccgggctgtttggagtctgggcctgtctcagctctgccactagttggttgcatggctttgagtaaatctgctccatcagaataatgtgggcaagataaattctcaagttcttccaggtctaaaggtctgggatcctagggctgcgcgaacctgttcccacctcaaacctgttcattggtgtctctggagagagatggacacaaaagtcgtcacttggcccttttggaaacagttgagtcaaaaagtcttggcctcctgctcatttttaaccagggcctcacagaaaacagttcgcaatccaactggtacactggcatgaggttgtaaatcctatctgggaaagcaaaccagaaacttctaccctttggtgttcaaaaatacttcatttttcttaaaattg

SEQ ID NO: 89621 - DNA, 1779 bp, Homo sapiens
  misc_feature (312)..(312): n is a, c, g, or t
  misc_feature (1170)..(1170): n is a, c, g, or t
attcaaacccagattcctaggcctgattcccacagtttctgactcgtgaggtgtgcatggtgccccaaatttgtttttctaacaagttctcatgtgacgctgatgctgctggcctggtttggggaccatactttgagaaccattggttcagaacatgaggctgcagcgcgccaaggtttttgcattgttttctattaaggaatagcctataagaaataggtttctagctttttaattttgttaccagcctagactctatgattgacagggtgaccagctgtcccagtttgccctggggcacaggattattcntgctgaaaatgagaaagtcctgggcaacctgggatgaattggccaccttcactattgatccaacttcccaaatgctttgtctacattgctggtatctggctcggaggaagccctgtgggaaaggctgtgagtgtgttgccccaggttccacaggacacttagagtttgggggacacctgccgtcaacgcactgcaacaatctttagggatgttaattgttcctcaggaggcatacgtaggaatcacatccaccttaaacatgcccacttatggcatttgggctcacacagccaaacagctgccattgtctgaagtaacgcatgggctgttgggctcctacggtgtgacagacatacttctctgcatcatccatgtaccagcctgttttcttctcactgcagcccaatcagctaattatcatcatttccatctttcaaaaacaaatgcttaaagatgccattatttaccccagggtcacagatggtaaaagtgacagaaccacaggccaaacacttgttgttttaccatgtgactccaaggagcatgaaatctgaggctcttcatccatgagattttccagccactcacgtcccttcctctgttggagatgaagcctctccagagtggaaggcagtggacctagcttggatcaggatgcctggactttgctcctgcttcttccagataccggctctatgacttgtatcaggtcatcttttaacccctctgagcctcactttccgcatctgtgaaatggacatcataatgtctgccttaccttctgccttagcttgtcttgaggagaaatagaaatgatgtctatgaagctgtcagtaacgtgtgaaagcgctgtccctntgagcatatatgtgttaaaccttctgttattccaaaagagaggtttggcacatcaactcgaggaatatttacttaagtggaggagaaacaaagcaactaaagtagccaaaattagcagtgaacagaagaaaattctcaggaggaaaatggttcttcagctggttttgcaaggattagcaacatgtgtgtcccattccagagcagcaaatcacggcgtaggccctagccattttgctcagggaggactgcgctcttcgggaaaagttctgttgcaagtcacagattataggtgtgtggtagaaggccaagcctgagctgtcacttcctcagtgtcaaagggtctcattacatttcattacagtgattttctttttgctgaaacattaggaaccctggagcactgagccaagatcatggaacagaatcaccctctcctgcatgtttttgtttctgtctcctgcttttctgttctttttccactttctctatgtgtgagttgacttggctgcctgtagcttcatcgtcaaagctggtccacgtgggttcaacttggtgctctcactctcctccagcattgtttttgtcatcaaagctaaaattaaaaaaaaa

SEQ ID NO: 89622 - DNA, 382 bp, Homo sapiens
ggacccggtggcagctgcctgtggtcccagctacttgggaggctgtggtgggaggatcacttgagcccaggagactaaggctgcagtgagctgtgttcctgccattccactccagcctgggcaatagagtgagaccctgtctcgaaacaagcaaaagaactaaaactttggtgaaaaaaaaaattaaagatgatctaaataaatggtaagacattccacgttcatggattggaaagtataatattgttaagatggcagtactccacaaattggtctacggatgcaatgtaatccctttcaaatttacaatgtttttgttgaaattgacaaattgatcctaaaattaataataaattgcaaatggccccaaaatagccaaaac

SEQ ID NO: 89623 - DNA, 518 bp, Homo sapiens
ataaagaaaaatatagaacattcagtctcacccagtggaagtcatgattaacattctagtccattctgtttctagaaaatttttctgtaaatatattacatagagaaaataatgtcctagttttttcactttgcatcataacaagcattttccatgtaaattaaaactcttcatatacattgttttaatggctgcaaaatatgctgtgttgtggacatatgataatttacctaaccattttcccactgttggccaacaacagaatggttcaaattttacattatcttgtatatcacactgagcatttttaggctgaaaattttgctccattttggatcctatcctgaatttttcaaggaacttactttctagttcactatttgatatcaccagttcttggtacataccatgttctttctacacagaagagagaattgcatgtgatactcattctgcctggtttgctcttcctttccctgtctctttttgccaagttaacccactcttttctttcttaa

SEQ ID NO: 89624 - DNA, 433 bp, Homo sapiens
gggggaaagctggcagttacaggcctcacccagctcccacacaaaccaaatggccagtctcactccctctgtgtaccccccagcagccccaagtctgtttctaggtggagggcaagatgggtttgaaaacttgccccaggctatcctcctccccagcttcccccggtggctgcatctttcctaacagtagtacagtatcagagcccagaagctgcccttggtacttgggggctccacttttctcacatgtgtagattcagggaatcaccactgcatcaaggcacaggactgccactcaccacaaagagctccctcgtgctaccctttcagggtgcaccccctaccctgccctccctcaccccctcctgaacaaacccctgaaaaccacaaatttcattcctacaattttgttatttccagaaagttatataaa

SEQ ID NO: 89625 - DNA, 424 bp, Homo sapiens
ctcccaaagtgctaggattacaggcgtgagccactgcgcccggccatattttttgtgtagacagagattcgctatgttgcccaggctggtctcgaactcctgagttcaaacgaggctcctgcctcggcttcccaaagtgctgggattacaagcttatgctcgtttttattcccaataaatgaagagcgaaattgggtgtaaatcatcgatatatttatccttgtaatattctatgtgatgtagtaggtgaaacatatggatgggtgaagatgactctggcaaaaatgcagaattatatttttaatgcttttcattagctagcattttaatggtattttccttttgcctcttattttaaatcagtagttcatttaacatgttaattaaatgtcatataactaagaataaacaccattaaaaactg

SEQ ID NO: 89626 - DNA, 184 bp, Homo sapiens
ttgttgctgccacattttactttattatgattatggaaactaatttttccagaaggcaagagcagggagtagctctttcctttgaaatgtctggttaaatttctttgcacatctcctagcccaacatcaaatcaagtgctaaataatgtctttgcattttactattaaagtcctttacaatata

SEQ ID NO: 89627 - DNA, 282 bp, Homo sapiens
gctagctgagatactcaccctaaattttttttatttaaacctattcataactctcagatcagactcctattaattatatgttttattacaaatttcaggtaaggttggtttctgaattagaataataaatttgaaatttcagtactgaaaccttaataaaggggtcattactcaaaatttaacaagtaaagccatattaatttaaaataatttggaggacatccagtctttcatggtgacaaaatgaaatttatagagtactaatagatatatactgtagcc

SEQ ID NO: 89628 - DNA, 591 bp, Homo sapiens
actgggtttctgagagtaccaacataaggaggaaagagagtcctgtgatttcctcagaggaagaaaagagctatttcgtatgagttgagtgttcagacaatggtgcctaccctctggaaagaccaggctggaagggccgacagacaacagggctaactgtggctccactggtactgaaagtcggcgtcctctagctccatcccccacttcactccaccttgccatctgcgatgataacacaagcaggagggagcggccttgtctgcccatggctcactggcccggtgcaaacacagggcaggcttcttccctcctgtggaaagacaggcccagcacatgccaggcctttgttcccaacctcctccatgagaggccatctccagaggatggggctgcacaggggccctcctccaggacagcagggatgacagcctcgcggtttcctggctgctgcgtcctcggagtgacttggagctctagggttctcccctactcgacaaggggactatgtctccaccaaggagggaagacagtcctgggtgccaccccgtgggctatgaagaggagtggacagaaggactccgcaggttg

SEQ ID NO: 89629 - DNA, 252 bp, Homo sapiens
attgacagagaatttcaaaaggcaggtatcaggctgatattatctgaatgtgtaaataagtctcagcattactaaaagtaatgccttgttgtgtgatgcaataggaaaaggacagtgcctcatacgaactattcttctattaaaaatcaccctaacgttttcaagactttggatctaattaccaacttatggaaaatagtgagaatagtggaaaaagtcaaccactaccacaaaaaagtgagtgactagtac

SEQ ID NO: 89630 - DNA, 303 bp, Homo sapiens
tgcaacttcagagggcatggagagaagggattaacacagaactgaatttctgctgaagttagaggacatctaagaatgcactgagagaacagtctgcccttgaggcagtgcactccccgtcacttacattggtcaagagaagggacgtttgcatctggggtgagacccgaccaagtgcgctcccccaacgtccgggtctggtttctttaatgcctccaaaaatcttgtgacccagccaacagcttcattaaaaaagctgtttcttaggttacacaattgactcatttactaaatatgtttttg

SEQ ID NO: 89631 - DNA, 421 bp, Homo sapiens
tagaaaaagtaccaatatcccatgctccaatagataattgatagaagaaattctaataatcaataaacaaattatatttaacttcacagtacttaaataattgtaatttaaaatgtactaagattataacctatcaaaaaaaatggagattgttgttactgattaacaccagttgttggtggcacagtgaaatggccagtttcttgtattgctagtgggagtgtaaattggaaaaatctttctagagagcaattcagcaatatgaattgaatctcaaaagcatttatacctcttaatgctattatgctctcaggaatttatagcattgacatgatcagaggtgcatatgaaaatgtagatgcaagaaggtttatcaaagctttgtttgtaataaagaaaaattgggcctagcaaagtggct

SEQ ID NO: 89632 - DNA, 465 bp, Homo sapiens
agatctcaccagtgcagtacagcgtgggtgacagagcaagtaagtaaagaggaggtttggaattagatatttggtgtatgaatgaatgggctaaagtgcaaaagaacaggcagaataactgagctggtacagaggaaaaaaatcacacttaaaatctaaaagtatctgcttctcaatttgggctttcccacttagcagctttgacaccttagaaagaacacttaacttacctgagcttctattacttctaaaaagtgcataaagtgcaggctaagacatagtttttttggcaaaattcagtcagactacatcaagtaaactccctaagtctcctagtataattcatggcacaaaaactggggaaaaaacagggaggatatgtttataagttcagtttgggttttttgttgagtgaatgtctccagtcatagagatgcaagtgtagatacacagtaagagtagtat

SEQ ID NO: 89633 - DNA, 379 bp, Homo sapiens
cgggagagagtaggggctggaactggacagaggagggagacgtgtagaacactgcggcagtcccttcccaagaactccttcaacactgactgtttttaggatctgccttgcattgaaccctgtgctatgcactggggtgatagcgaccctaatttcagggaatctgtaggacacaaccaaaaataaaggggctggccaggcgcggtggctcacgcctgtaatcccagcattttgggaggccaaggcgggcagatcacttgaggtcaggagttagagaccagtccggccaacatggcaaaagcccgtgtctactaaaaatggaaaaattagccaggcatagtggtgggcacctgtagtcccagctacttgggaggctgag

SEQ ID NO: 89634 - DNA, 362 bp, Homo sapiens
tattgctattcaagccactaattatgtctatgaatgacaagtaccccaaagtgttctgtttgatattcttcactctttttagttggctaatcaatataaatgctgcgctcagcaaattctaagcaaatagggtgaagatttatagatttagaagttgattttcatacaaatttgtaaatatgcctactgaggcctatgaataattgacaaatctttgggtaaatatatctataaattccgatctccccacactttgaaagaatgtttctatagctttttgcaagtattgcaaagctgaatgatttgataggcataataccagagctggctgctggaattttcaagtatgtttaccagaagaa

SEQ ID NO: 89635 - DNA, 210 bp, Homo sapiens
tttaaagtattttttttacgttacatgctacttcaaaaccttcagcagacttcctagtgttacacactattaaaacaggtgagagaaaagttcaatattgactttttaatgtattttgtattttgggttttgttttttttttttttttttttttcggtacaccggggaattcccaataaactctcgggaaaacgagagaaaaaaaaaaaa

SEQ ID NO: 89636 - DNA, 188 bp, Homo sapiens
aaaccccatatgctcctatccaatcttacactgggaccattgcctcctgttcttgcctgcttcagccactcaacttctctttattccacaagcatctcaagctccctctcgccatggggcctttgcacttgtttcccctccctggaaggctcttgcccacagccccgtgcccagaaaacactactcac

SEQ ID NO: 89637 - DNA, 1332 bp, Homo sapiens
atttttgagctgtggctagacattctttagagccactggaaatattttgaaaactattctagttatagcagagctgctaatattaacgaatatatttgtgtcttcatggtttgtgactattaggccaaattttgtggtatatgttgtcagtctggatctggtgaggtctgttcaacatgaatctttgtgttatcttgaatttagtagtttcaaggtacttaaattcttaacagtttctaatttgtttcaatacatatgggacatggttgatttttttactgtattagaactcttggaagttcttagccttttcaggttatgaaatacctgaaagtaaaattttctaagatttaataagggaagatactattcaaatcattttcttaggatagcatctttacatacaatgagaggattgtacaagcattaatctcatattccaacatccagttacttgatgtgatccaagtaccctggtctttttgaagcagttaaaatctaattaattaactttgggagtcttcactattcaattgatcctcatcattgtcctatttgcatgactccattttttcctccactatatgagttttctttgtcagggggagaggagtgggaagagtcacagaatctcatattcacatcttaattaaattgtgtgaaattagtcttttgtggaaattctgtaggcagtatgattttgaaaagctaaccaatgataattagcattttagttaatactaaatgcataaaattataacccttgaaattaatttggtgctggcagttctggtttagtcatttttaccagtagttagtagtattaagacctgcagtatatgcactttttgagtagctgtcaaataattgtagttgagaaacaacttgtttattctcacaattcagattttctattcagttttgtctcaaatagtaagttattgtgaacaatttaataacggccctcctgttctagtttgcctaatattttagttaagatttagtgttttaacctatttttttaagtttattttttgtattagattttatttgaataagttatgtgggtttagtaattgacctatttattcattgcttcactaattcatccagattagttttaagtgtgtatatgtatttgctcaccagatcattttcttgggaccttgaactgtgaatgttttgtcctaaccatttaatattttctaggtacttgctgcaagttcttgaactattttaccagctttaactttggggctcttagtttcttttctccagattcttgttattttattttatccaaataaatatttaggtgttctaagaaaaaga

SEQ ID NO: 89638 - DNA, 313 bp, Homo sapiens
taacaagaataagtttgtcatgttggagtcacgtgacaaaatgcctctggaataatcaggaagaccttacaaatgtagctatttagaaatccaatttttttaggggagaggggtaccccagaacttaaaactatgttatgtttttagcagatgcctctctgggggttttctttaagatattaaaatgtctcttgagcatttttgttcattcttacttccaaattttgctacttctctagatctgtactgtaagttaccatatgattgtataaaaatgaacatttcagtcagttatgcagttgggcgtacgggg

SEQ ID NO: 89639 - DNA, 511 bp, Homo sapiens
tgcactgaatggtgtagtacttgcaggccaaaacctctggggcacggtatgctggtgtgccataggtggtcttcatcaggccgttgtagttgttgctgttcttgcaggcactgaccagattgaagtcagtgatgatgatcttggagtcagtgcctggatggtggtagagcagattgtgaggcttgaggtcttggtttgtgatgcccagtgcatgcagatactggatgccatctagcaccatctgcagcattcacatggcgtcatgctcagtgaaggaacccttggtgatgatgtggttgaacagctctatgctagcagggatcagttgtatcaacatgtatacatgctcctgcatcctaaacacctccaccggctggacaatgttggcatgacgcacctggtgcagcacgcacagctctgactcccacacctcctacccctcctggtacttgatctcaattatcttggtgtatgctgccaagtggctcagtgctccatgcataccacttgg

SEQ ID NO: 89640 - DNA, 213 bp, Homo sapiens
atgcctggctagagaccctgtctctaaaaaataaatatttttctttcttcaatgataaattaaccttagctgactgtaacatttttattttataaacttttcattttttaaacttttttcttctatttatttttctttatatctcagcttgtttaacttttcagctgttttgtaataacagcttaaaacaagcacattatacaattgtacaaa

SEQ ID NO: 89641 - DNA, 332 bp, Homo sapiens
agagatgacagtagaaggcacagccagctcgtaaatcagcagcattcagggctctggacagcctctctatcagcaaagcaattgatgcttctgccagggaggctgcaaagaagctgttcatcactacctcatttggagacttgacacccaaatggaggctctaacagccaagttcatagatctgagcaaagcgcagaggcgtcaaatctgtgtacaccagtctgctaagtcttcaagggccctgaggggcaggctcttctcagatgctgctctgactctctgaaggcctttacaaccaaaatgaaatgaaataacttaagtcctagctcagg

SEQ ID NO: 89642 - DNA, 275 bp, Homo sapiens
gtcatgcccacctgcctcagttcccctgccaggaccctccatcagcctcccactgcagcccacgctctgcccccccattcctcaggggtccttctacactcagccctcccatggctccccagcgccccccaggacaaactcctggcttccttccttgccttctttttttttttttttttttttattttttttttttttttatattttttataaaaacccctctaaaaaaggggggcgacactaaaagaaaatatgcacacccttatttaaaaaag

SEQ ID NO: 89643 - DNA, 718 bp, Homo sapiens
accgctgcggccattgtccgaccccggtgcggctgaggcccctttgggcagcccctccgcagatcagaattggagacaaccgagccttcggcgggggcgggaggagctgcccgaggctctgggtgggccggaggtcgcgaaatccggagccccccagaggcggtgattctgactcctgccccggagccgggccctggcgaggcaggaatggccccgaggcctccgaccgccgcgccccaggaatcagtgacattcaaagatgtgtctgtggacttcacccaggaagaatggtaccatgtcgaccctgctcagaggagcttatacagggatgtgatgctggagaactatagccacctggtttctcttggatatcaagtttccaagccagaggtgatcttcaaattggagcaaggagaagagccatggatatcagagggagaaatccaacgacctttctatccaggatttgtctgcctcctgccgctgtcgctaccatctgggagtaagggcgaaagaagacagaaacttccaagaaagaatcctgagtgatgtcagcaagaatggctaagtaaggacctccagaagttctctgccccgtacaagccatgcaaatactgacaaaactgtgagaatcagatttttcacaactctggaacatttattccagcaagcagcaaatgttccccttgcagcaagctaggaaacatttatttaaaaa

SEQ ID NO: 89644 - DNA, 929 bp, Homo sapiens
ttaccccgcgggttttgagcctgctctttaggtaaaaggtctttattttgcaaaactggaaataggcaatttgattgcatgactccttaagttgcaccttttttttccttcagagttcctgaggatcaaggactagtactgacttgtccttaggagggttctttgtccacttgcacaaacaaccaaatcttgtgtatttacccatgagcaggatatcaagtttccaagccagaggtgatcttcaaattggagcaaggagaagagccatggatatcagagggagaaatccaacgacctttctatccaggtaaatgagtgagagtcaggcattaggaatgaatgcagttaatggcacaacttagggagggggagataccctccagcagctggcttgcgatctcctagatctgcataggaggctgaagccatcgcctggccgacaccttgtaggtctctcttcaaaagggtgctcatgctcttgctggattatttttcctctggtggcctctgattcccttcattaattagagatcccttctcttactcattcagaattgaactcccatatttcttccctgaattgaactcccgtatctctttgttgtgttgatctcccccatcttttccttgtttagtcttgctgctttcactgtcagatgccccagacttgtaggaaacacccacaggccttccttgattctctctcccttgataacctgccttcagactatgtgccttgccaccatcttccttccatctcatgttcatgctgctttgactcattacctccctccacagttctgtagtatcctcatctcccagttcctcgcttgttaagtgctgcttagctttaggtctttagcttttcttgcttttctccctaagtgaccctgccttaaggaacctgccttctagcctcctttcttgat

SEQ ID NO: 89645 - DNA, 1031 bp, Homo sapiens
accgctgcggccattgtccgaccccggtgcggctgaggcccctttgggcagcccctccgcagatcagaattggagacaaccgagccttcggcgggggcgggaggagctgcccgaggctctgggtgggccggaggtcgcgaaatccggagccccccagaggcggtgattctgactcctgccccggagccgggccctggcgaggcaggaatggccccgaggcctccgaccgccgcgccccaggaatcagtgacattcaaagatgtgtctgtggacttcacccaggaagaatggtaccatgtcgaccctgctcagaggagcttatacagggatgtgatgctggagaactatagccacctggtttctcttggatatcaagtttccaagccagaggtgatcttcaaattggagcaaggagaagagccatggatatcagagggagaaatccaacgacctttctatccaggtaaatgagtgagagtcaggcattaggaatgaatgcagttaatggcacaacttagggagggggagataccctccagcagctggcttgcgatctcctagatctgcataggaggctgaagccatcgcctggccgacaccttgtaggtctctattcccttcattaattagagatcccttctcttactcattcagaattgaactcccatatttcttccctgaattgaactcccgtatctctttgttgtgttgatctcccccatcttttccttgtttagtcttgctgctttcactgtcagatgccccagacttgtaggaaacacccacaggccttccttgattctctctcccttgataacctgccttcagactatgtgccttgccaccatcttccttccatctcatgttcatgctgctttgactcattacctccctccacagttctgtagtatcctcatctcccagttcctcgcttgttaagtgctgcttagctttaggtctttagcttttcttgcttttctccctaagtgaccctgccttaaggaacctgccttctagcctcctttcttgat

SEQ ID NO: 89646 - DNA, 715 bp, Homo sapiens
accgctgcggccattgtccgaccccggtgcggctgaggcccctttgggcagcccctccgcagatcagaattggagacaaccgagccttcggcgggggcgggaggagctgcccgaggctctgggtgggccggaggtcgcgaaatccggagccccccagaggcggtgattctgactcctgccccggagccgggccctggcgaggcaggaatggccccgaggcctccgaccgccgcgccccaggaatcagtgacattcaaagatgtgtctgtggacttcacccaggaagaatggtaccatgtcgaccctgctcagaggagcttatacagggatgtgatgctggagaactatagccacctggtttctcttggatatcaagtttccaagccagaggtgatcttcaaattggagcaaggagaagagccatggatatcagagggagaaatccaacgacctttctatccagactggaagaccaggcctgaagtcaaatcatcacatttgcagcaggatgtatcagaagtatcccactgcacacatgatctcttacatgctacattagaagactcctgggatgttagcagccagttagacaggcaacaggaaaactggaagagacatctgggatcagaggcatccacccagaagaaaataattacaccacaagaaaattttgagcaaaataaatttggtgaaaattctagattgaacaccaatt

SEQ ID NO: 89647 - DNA, 813 bp, Homo sapiens
accgctgcggccattgtccgaccccggtgcggctgaggcccctttgggcagcccctccgcagatcagaattggagacaaccgagccttcggcgggggcgggaggagctgcccgaggctctgggtgggccggaggtcgcgaaatccggagccccccagaggcggtgattctgactcctgccccggagccgggccctggcgaggcaggaatggccccgaggcctccgaccgccgcgccccaggaatcagtgacattcaaagatgtgtctgtggacttcacccaggaagaatggtaccatgtcgaccctgctcagaggagcttatacagggatgtgatgctggagaactatagccacctggtttctcttgagttcctgaggatcaaggactagtactgacttgtccttaggagggttctttgtccacttgcacaaacaaccaaatcttgtgtatttacccatgagcaggatatcaagtttccaagccagaggtgatcttcaaattggagcaaggagaagagccatggatatcagagggagaaatccaacgacctttctatccagactggaagaccaggcctgaagtcaaatcatcacatttgcagcaggatgtatcagaagtatcccactgcacacatgatctcttacatgctacattagaagactcctgggatgttagcagccagttagacaggcaacaggaaaactggaagagacatctgggatcagaggcatccacccagaagaaaataattacaccacaagaaaattttgagcaaaataaatttggtgaaaattctagattgaacaccaatt

SEQ ID NO: 89648 - DNA, 396 bp, Homo sapiens
atgactgtaagtttcctgaggtgtccctagccctgcaaaactgtgagtcaattaaacctctttcctttgtaaattacctggtctcaggtatgtctttattaacagcataagaacgaactaatacaaagggtccccaggtaaatctaatgtgcagctaggcttatgagccactgctcgagagatgcaatgctccatcagtgtctctagctgttttatctctaagtaatagtttgaagaactggggaacctgccgtgcttgacaaaaattactctattgatgctctgaaaaaccaccatgtttttatttaacaaagagttttctgagacttcataaatgtaattcacagtggtgatcctctatgtttatgaatgcagaagctactaactagtaacttc

SEQ ID NO: 89649 - DNA, 2797 bp, Homo sapiens
gtcattggggtgcctcatattgccagacaagagctcagacctgaggagagtgactagcttctctgtgtcccaggtgcaggagtgcctgcagcagttcaaggtgacaagggcacagctacagcagatccaagccagcctcttgggttccatggagcaggcgctgaggggacaggccagccctgcccctgcggtccggatgctgcctacatacgtggggtccaccccacatggcactgctctttgactttgctgcccactgcctgtctgagttcctggatgcgcagcctgtgaacaaacagggtctgcagcttggcttcagcttctctttcccttgtcaccagacgggcttggacaggagcaccctcatttcctggaccaaaggttttaggtgcagtggtgtggaaggccaggatgtggtccagctgctgagagatgccattcggaggcagggggcctacaacatcgacgtggttgctgtggtgaacgacacagtgggcaccatgatgggctgtgagccgggggtcaggccgtgtgaggttgggctagttgtagacacgggcaccaacgcgtgttacatggaggaggcacggcatgtggcagtgctggacgaagaccggggccgcgtctgcgtcagcgtcgagtggggctccttaagcgatgatggggcgctgggaccagtgctgaccaccttcgaccataccctggaccatgagtccctgaatcctggtgctcagaggtttgagaagatgatcggaggcctgtacctgggtgagctggtgcggctggtgctggctcacttggcccggtgtggggtcctctttggtggctgcacctcccctgccctgctgagccaaggcagcatcctcctggaacacgtggctgagatggaggacccctctactggggcagcccgtgtccatgctatcctgcaggacttgggcctgagccctggggcttcggatgttgagcttgtgcagcacgtctgtgcggccgtgtgcacgcgggctgcccagctctgtgctgccgccctggccgctgttctctcctgcctccagcacagccgggagcaacaaacactccaggttgctgtggccaccggaggccgagtgtgtgagcggcaccccaggttctgcagcgtcctgcaggggacagtgatgctcctggccccggaatgcgatgtctccttaatcccctctgtggatggtggtggccggggagtggcgatggtgactgctgtggctgcccgtctggctgcccaccggcgcctgctggaggagaccctggccccattccggttgaaccatgatcaactggctgcggttcaggcacagatgcggaaggccatggccaaggggctccgaggggaggcctcctcccttcgcatgctgcccactttcgtccgggccacccctgacggcagcgagcgaggggatttcctggccctggacctcgggggcacgaacttccgtgtcctcctggtacgtgtgaccacaggcgtgcagatcaccagcgagatctactccattcccgagactgtggcccagggttctgggcagcagctctttgaccacatcgtggactgcatcgtggacttccagcagaagcagggcctgagcgggcagagcctcccactgggttttaccttctccttcccatgtaggcagcttggcctagaccagggcatcctcctgaactggaccaagggtttcaaggcatcagactgcgagggccaagatgtcgtgagtctgttgcgggaagccatcactcgcagacaggcagtggagctgaatgtggttgccattgtcaatgacacggtggggaccatgatgtcctgtggctatgaggacccccgttgcgagataggcctcattgtcggaaccggcaccaatgcctgctacatggaggagctccggaatgtggcgggcgtgcctggggactcaggccgcatgtgcatcaacatggagtggggcgcctttggggacgatggctctctggccatgctcagcacccgctttgatgcaagtgtggaccaggcgtccatcaaccccggcaagcagaggtttgaaaagatgatcagcggcatgtacctgggggagatcgtccgccacatccttttacatttaaccagccttggcgttctcttccggggccagcagatccagcgccttcagaccagggacatcttcaagaccaagttcctctctgagatcgaaagtgacagcctggccctgcggcaggtccgagccatcctagaggatctggggctacccctgacctcagatgacgccctgatggtgctagaggtgtgccaggctgtgtcccagagggctgcccagctctgtggggcgggtgtagctgccgtggtggagaagatccgggggaaccggggcctggaagagctggcagtgtctgtgggggtggatggaacgctctacaagctgcacccgcgcttctccagcctggtggcggccacagtgcgggagctggcccctcgctgtgtggtcacgttcctgcagtcagaggatgggtccggcaaaggtgcggccctggtcaccgctgttgcctgccgccttgcgcagttgactcgtgtctgaggaaacctccaggctgaggaggtctccgccgcagccttgctggagccgggtcggggtctgcctgtttcccagccaggcccagccacccaggactcctgggacatcccatgtgtgacccctctgcggccatttggccttgctccctggctttccctgagagaagtagcactcaggttagcaatatatatatataatttatttac

SEQ ID NO: 89650 - DNA, 3074 bp, Homo sapiens
gtcattggggtgcctcatattgccagacaagagctcagacctgaggagagtgactagcttctctgtgtcccaggtggccaccttccactgtggaagctcatggactccattgggtcttcagggttgcggcagggggaagaaaccctgagttgctctgaggagggcttgcccgggccctcagacagctcagagctggtgcaggagtgcctgcagcagttcaaggtgacaagggcacagctacagcagatccaagccagcctcttgggttccatggagcaggcgctgaggggacaggccagccctgcccctgcggtccggatgctgcctacatacgtggggtccaccccacatggcactgagcaaggagacttcgtggtgctggagctgggggccacaggggcctcactgcgtgttttgtgggtgactctaactggcattgaggggcatagggtggagcccagaagccaggagtttgtgatcccccaagaggtgatgctgggtgctggccagcagctctttgactttgctgcccactgcctgtctgagttcctggatgcgcagcctgtgaacaaacagggtctgcagcttggcttcagcttctctttcccttgtcaccagacgggcttggacaggagcaccctcatttcctggaccaaaggttttaggtgcagtggtgtggaaggccaggatgtggtccagctgctgagagatgccattcggaggcagggggcctacaacatcgacgtggttgctgtggtgaacgacacagtgggcaccatgatgggctgtgagccgggggtcaggccgtgtgaggttgggctagttgtagacacgggcaccaacgcgtgttacatggaggaggcacggcatgtggcagtgctggacgaagaccggggccgcgtctgcgtcagcgtcgagtggggctccttaagcgatgatggggcgctgggaccagtgctgaccaccttcgaccataccctggaccatgagtccctgaatcctggtgctcagaggtttgagaagatgatcggaggcctgtacctgggtgagctggtgcggctggtgctggctcacttggcccggtgtggggtcctctttggtggctgcacctcccctgccctgctgagccaaggcagcatcctcctggaacacgtggctgagatggaggacccctctactggggcagcccgtgtccatgctatcctgcaggacttgggcctgagccctggggcttcggatgttgagcttgtgcagcacgtctgtgcggccgtgtgcacgcgggctgcccagctctgtgctgccgccctggccgctgttctctcctgcctccagcacagccgggagcaacaaacactccaggttgctgtggccaccggaggccgagtgtgtgagcggcaccccaggttctgcagcgtcctgcaggggacagtgatgctcctggccccggaatgcgatgtctccttaatcccctctgtggatggtggtggccggggagtggcgatggtgactgctgtggctgcccgtctggctgcccaccggcgcctgctggaggagaccctggccccattccggttgaaccatgatcaactggctgcggttcaggcacagatgcggaaggccatggccaaggggctccgaggggaggcctcctcccttcgcatgctgcccactttcgtccgggccacccctgacggcagcgagcgaggggatttcctggccctggacctcgggggcacgaacttccgtgtcctcctggtacgtgtgaccacaggcgtgcagatcaccagcgagatctactccattcccgagactgtggcccagggttctgggcagcagctctttgaccacatcgtggactgcatcgtggacttccagcagaagcagggcctgagcgggcagagcctcccactgggttttaccttctccttcccatgtaggcagcttggcctagaccagggcatcctcctgaactggaccaagggtttcaaggcatcagactgcgagggccaagatgtcgtgagtctgttgcgggaagccatcactcgcagacaggcagtggagctgaatgtggttgccattgtcaatgacacggtggggaccatgatgtcctgtggctatgaggacccccgttgcgagataggcctcattgtcggaaccggcaccaatgcctgctacatggaggagctccggaatgtggcgggcgtgcctggggactcaggccgcatgtgcatcaacatggagtggggcgcctttggggacgatggctctctggccatgctcagcacccgctttgatgcaagtgtggaccaggcgtccatcaaccccggcaagcagaggtttgaaaagatgatcagcggcatgtacctgggggagatcgtccgccacatccttttacatttaaccagccttggcgttctcttccggggccagcagatccagcgccttcagaccagggacatcttcaagaccaagttcctctctgagatcgaaagtgacagcctggccctgcggcaggtccgagccatcctagaggatctggggctacccctgacctcagatgacgccctgatggtgctagaggtgtgccaggctgtgtcccagagggctgcccagctctgtggggcgggtgtagctgccgtggtggagaagatccgggggaaccggggcctggaagagctggcagtgtctgtgggggtggatggaacgctctacaagctgcacccgcgcttctccagcctggtggcggccacagtgcgggagctggcccctcgctgtgtggtcacgttcctgcagtcagaggatgggtccggcaaaggtgcggccctggtcaccgctgttgcctgccgccttgcgcagttgactcgtgtctgaggaaacctccaggctgaggaggtctccgccgcagccttgctggagccgggtcggggtctgcctgtttcccagccaggcccagccacccaggactcctgggacatcccatgtgtgacccctctgcggccatttggccttgctccctggctttccctgagagaagtagcactcaggttagcaatatatatatataatttatttac

SEQ ID NO: 89651 - DNA, 1839 bp, Homo sapiens
gtcattggggtgcctcatattgccagacaagagctcagacctgaggagagtgactagcttctctgtgtcccaggtggccaccttccactgtggaagctcatggactccattgggtcttcagggttgcggcagggggaagaaaccctgagttgctctgaggagggcttgcccgggccctcagacagctcagagctggtgcaggagtgcctgcagcagttcaaggtgacaagggcacagctacagcagatccaagccagcctcttgggttccatggagcaggcgctgaggggacaggccagccctgcccctgcggtccggatgctgcctacatacgtggggtccaccccacatggcactgactttgcaggccttaggaatttgggaagtgggcagagggctctggtcttgccagctgcatggctttctgtgacctgcttgccctccagagcaaggagacttcgtggtgctggagctgggggccacaggggcctcactgcgtgttttgtgggtgactctaactggcattgaggggcatagggtggagcccagaagccaggagtttgtgatcccccaagaggtgatgctgggtgctggccagcagctctttgaccacatcgtggactgcatcgtggacttccagcagaagcagggcctgagcgggcagagcctcccactgggttttaccttctccttcccatgtaggcagcttggcctagaccagggcatcctcctgaactggaccaagggtttcaaggcatcagactgcgagggccaagatgtcgtgagtctgttgcgggaagccatcactcgcagacaggcagtggagctgaatgtggttgccattgtcaatgacacggtggggaccatgatgtcctgtggctatgaggacccccgttgcgagataggcctcattgtcggaaccggcaccaatgcctgctacatggaggagctccggaatgtggcgggcgtgcctggggactcaggccgcatgtgcatcaacatggagtggggcgcctttggggacgatggctctctggccatgctcagcacccgctttgatgcaagtgtggaccaggcgtccatcaaccccggcaagcagaggtttgaaaagatgatcagcggcatgtacctgggggagatcgtccgccacatccttttacatttaaccagccttggcgttctcttccggggccagcagatccagcgccttcagaccagggacatcttcaagaccaagttcctctctgagatcgaaagtgacagcctggccctgcggcaggtccgagccatcctagaggatctggggctacccctgacctcagatgacgccctgatggtgctagaggtgtgccaggctgtgtcccagagggctgcccagctctgtggggcgggtgtagctgccgtggtggagaagatccgggggaaccggggcctggaagagctggcagtgtctgtgggggtggatggaacgctctacaagctgcacccgcgcttctccagcctggtggcggccacagtgcgggagctggcccctcgctgtgtggtcacgttcctgcagtcagaggatgggtccggcaaaggtgcggccctggtcaccgctgttgcctgccgccttgcgcagttgactcgtgtctgaggaaacctccaggctgaggaggtctccgccgcagccttgctggagccgggtcggggtctgcctgtttcccagccaggcccagccacccaggactcctgggacatcccatgtgtgacccctctgcggccatttggccttgctccctggctttccctgagagaagtagcactcaggttagcaatatatatatataatttatttac

SEQ ID NO: 89652 - DNA, 739 bp, Homo sapiens
tctggctgacatttaagccccatgcaagccggaatcttaaggctaagagagagttgtaaatggtcttgctaagtaagcattgaagaaatgcccaatacagagccagtctgaaaagatccggagagtatttttacccctttcgctccaggcatttaaggaaacctgtcaaatcactagttgctcactaaggtgaacagagacttgagtgacgacctatgacaaaggtcacaggtctttacaagaagagtttaataaagtcattaaacaaacaactacaacccacagtaagtagcaacaacaaaccctgaggaagggggagaatgcgatttcgagagttaccacattataatatacaaaatgtccagtttcaacaagaaattatgcatacatagaaacaataaattacagcccaatcacagaaagaaaaaaaaaagaaatagggagtatccttgaggaggcacggacattatatgtactactcaaagactttagatcaactgcctaaagtatagttaagtagctaaaaggatgatgtatgaactaacagaaaatttcaatagatacatagaaattgtttaaaagataccaaatagaagttctggaactgaaaagtacaagagctgagttgaaaaattgactagagggattcaaccagcaaacttgagcaggcagaagaaagaattagtgaacttgaagatataggtcaattgatattatctagtctgaggcagagaggaaa

SEQ ID NO: 89653 - DNA, 466 bp, Homo sapiens
gctatggaaagagggctggtgaaggaatcgttctggaagagaggtgggaggattgcttcagctagggaggcggaggctgcagggagccaagactgagccattgcacccagcctgggtgacagagcaagaccctgtctctaaaaatgaaagaaaaaaaaaagaaatagggagtatccttgaggaggcacggacattatatgtactactcaaagactttagatcaactgcctaaagtatagttaagtagctaaaaggatgatgtatgaactaacagaaaatttcaatagatacatagaaattgtttaaaagataccaaatagaagttctggaactgaaaagtacaagagctgagttgaaaaattgactagagggattcaaccagcaaacttgagcaggcagaagaaagaattagtgaacttgaagatataggtcaattgatattatctagtctgaggcagagaggaaa

SEQ ID NO: 89654 - DNA, 260 bp, Homo sapiens
gcacgagattagacattaaaaacaaactagccaaaataaatttggaaatttaaaaacagtgttccagataattcctcggattaaaaaaaacaagatgaaaagtaaaaacttcttcagcaaggaattatatagagagccacatggcacacctgtgggttgtaaccaaagcagttctcagaggacaatgtatacacttctaagcatttgctagaaaaatccttaaaaagagtgaactacattcaactgccgaatcggcacga

SEQ ID NO: 89655 - DNA, 427 bp, Homo sapiens
acttcaaaggactctttattattacctttggtaggtccagaagtcatttttgtacgtgtggtttttttctcttgcataatcctaaactgacttcgtatgacctttctgaaattcttcaggcaggtctagacactctcagcccctcttgctgactgtggtaagaaagcatccccaggtggacacgtcctgctcctctgtcccctgttcagtaagacacacccccagacctttgtataatgcagacaggtaccagctgtgtgaaatgagtgattaagtgttgattctttttttttttccttcaaaatgctgactccaaatccctatttttttccaggtctatgaggtaagagacccagttcctatccccttattttctctttccctttgccataccttccctatttccagagcaactcccttcccctaa

SEQ ID NO: 89656 - DNA, 470 bp, Homo sapiens
aaaccatctatgagagaagacggggacccagccccagggaaagatggaggtattacggttccagatgtcgctccccggccacgaggactgcgggaccatcctgatagtttacagcattccccatggcatccagatgaggggccttcttgagtcccccactcctggccattcctcttcccaccccgcccacgtcccagcagtctgcccctggatcaaggctgaggatgcccatgtggccaagctcaggcccccaggtcccctaaggccagggccatggagggctgggaatggggaggcagtgccggggcttagggtaagctcttagggctgtggcagcaaaaggctggccctccactcttccctgaaccaaggaagccttcctagaggaggagccatcttagctggacttgttctgggcagaagggcaggcagttcagtgggaggaaccctgcggaggggctggagaagcg

SEQ ID NO: 89657 - DNA, 313 bp, Homo sapiens
gccaggcgtggtggcgggcacctgtagtcccagctatttggggggctgaggcaggagaatggcgtgaacccgggaggcagaggttgcagtgagccaagatcgcgccactgcactccagcctggatgacagagcgagactctgtcttaaaaaaaaaaaaaaaagattaggtttggatggaacaacaattccaaacagtggcttaagcaagagagaagtttgtttctctctcacataaaaactctgccccagctgggtgcggtggctcatgcctataatcctagcactttgggaggcctagaggggcggatcacc

SEQ ID NO: 89658 - DNA, 356 bp, Homo sapiens
tactaatccatcttcataagcctcagccgtggctcctctggagggacagagccaacgtttccatctaagtaacgcgagggaggagggagagatgctgaagcaagattgtcacagcttaatgatacgaaatgctctcaccggggactctagaaacttggcttctgtgagtttcatctgctcacccctgccctgtgtgggctgagggagggactgaaaagctcccctcctaatgtgtcaatggctttgccaggaattgcatcggtggtgtgtcaggcgggctgttgtctggtttctgtgacagagaccctgagcaacactggtttagacaaggtagaattttctttcttcccacttga

SEQ ID NO: 89659 - DNA, 767 bp, Homo sapiens
tctgagatcttgctaaactcacttattagtgctggtagtttctttgttgattgtgagggtaactttgaaaacacaagatagtgagccataaaatggaagcagctagtctgagcctaacaacctgccttggactgtgttgcattttcttcgtgtcgtagtagtcattgggggttacaatcaaactgctcatctgtattgtgagtccctgtagggcaggttgtcccagctacttcctagtgaatcttttttaatgaacctcaggtttccatcatgacctgaacgaatgagccctatgctgcccaccattcatgcttactgagaagtcagagggagatgacaagggagacttctacatgttgtaggaggaagctgaccatagggtccctcctgttgaccgatgtttctccatgggtctctcatgcatctgcatatttttcaagcagaggcactgactgctttattcccaacagcctttccaggaatgtttatatagtgaacaaccttgaaagatagaggtagtatctccttctaaagcaaaggaaaggtttgtttacagccttggaagttagagataatgtctccttctgtagaaagcatacttaactcttcagtgtaaaagctttggtttcttgaagctaggattcttctcctataacacaacctgctgcatgtgcaggtgtcacctggccctctctgcattgtcctatgggaatcagttcaggaaacctatgcaaaaatgctaatactttggttattgctattgcttt

SEQ ID NO: 89660 - DNA, 155 bp, Homo sapiens
tcataaaaacatctgcccagccattagtaggagtagacacgtccttttgatcagcccgccctgttctgtctttctgggtgtactgttttgatgactttaaaagctcccataaaaactaaggcactagcagctggctcattcttctgatgtcctct

SEQ ID NO: 89661 - DNA, 410 bp, Homo sapiens
cggaagcccccagaccatcacggacgccgagcttcgggtaactctcacagtggaaggttcccacgccgaccctaatcccgcttgaagcagccctgagaaacatcgcccattctctgtccatatcaccccccaaaaatttttgccgccccaacacttcaacactattttgttttatttttcttattaatataagaaggcaggaatgtcaggcctctgagcccaagccaagccatcgcatcccctgtgacttgcacatataggcccagatggcctgaagtaactgaagaatcacaaaagaagtgaatatgccctgccccaccttaactgatgacattccaccacaaaagaagtgtaaatggccggtccttgccttaactgatgacattaccttgtgaaagtccttttcctgg

SEQ ID NO: 89662 - DNA, 685 bp, Homo sapiens
caggacacacaggccctgtcctgagccccggaggctggtcctaacacactgtggctcattcttggtggcatagcaacctaggtcttgggtgagactgcccaccaggcagtggccaggactgggctggttgtggagagtctggacacaccagcggtgtaagtccaccaggcagcccttttgcctctagtgtgggatttcttctttctttaatcacccttcctcacaaaggggcaggagcagctgccatggtagatttgactacctctgagtggattcaggaccctgacttttagctagatttctaaaagttttccaccttagccggcacggtggctcacacctgtaatcctagcacttagggaggctcaggtgggtggatcacttgaggtcgagagttggagaccagcctggccaacatggtgaaaccccgtctcgattaaaaatacaaaaattagccaggagtggtggcacttgcctgtagtagcagctacttgggaggctgagggaggaggatcacttgaacctgggaggtggaggttgcagtgagctgacgttgcatcactgcaccccagcctgggcgacagagggagactccgtctcaaaaaaaaaaaaaaaagttttcaacttacaacaaacattccttttctgaaaaaagctcccagttcctctccctggtctctaggcc

SEQ ID NO: 89663 - DNA, 257 bp, Homo sapiens
atgtggtaagaatgagagagagagagagagacagacatggatactattcctcaaaatgttttgtactggtcaatttgtaaaatccaaccttaccacagtcttcacatttttatatatgagatatatttcaaaatgtgttacttttatagtgaagtagaagacaagaaatgtcgtgtatagccacactatagtctggggttatttagtgcagggacaaacatccctaaatacagctttttgggcattagtagtatcac

SEQ ID NO: 89664 - DNA, 355 bp, Homo sapiens
taaaattagtttatgaaaacttgaagaggtgttttgttttctccatcaaattcagacaccaatacaaaactatattgcgcccattgtcagtgcttctattttaatctaggactggaagtatgtggcagaagaattaatgaaataaatatataaatccattgaaatagaaaaataagtaaaatgctgtttgtagatcatacaatcttatttttaaaaaaaccaaacacagtacttttacatttgctgaggtgtggtttacttccaactatattgtcaattttgtcaattttgtccattcaggacataggcatgggcaaggacttcatgactaaaacaccaaaagcaacaaaagcca

SEQ ID NO: 89665 - DNA, 431 bp, Homo sapiens
gctggaagatattttagaagtgctttggtttgtagtttgttcattggaatagggataagaaataggagatttttggtgttgaattatgtaatttatttcttagttgtttgtacttctgtgtatatatacacatttaatccaaccaagtaaatacatagcttacagagtttttgcttctggttacataaatgtgaacacaaggtgtctgcctacttatatcaactgaaatggttaatacatttttgtttacttaagcacacgtgggacaagagaacagggccaaagtacagtatttaaacaggccaagcgaagtaaattttttttaaatcaaggatttagacagcattttatacctagttcaagcttttcccccattggtattaaaatgtgttaagtgattagaaatcctgtacaggtttaaatttttaata

SEQ ID NO: 89666 - DNA, 634 bp, Homo sapiens
aaaaagggtcttcttcatccttcaaaacatcactttaaaaaaaaggagacacagttgtagcagtcaaagaactcttggttttgttggggatataaacatgcaaggataacaaaagatgcaataaatactggggaggagagaagcaggagggatttgctttgagcagggaattggtttttctattcaatttattttgcatagctaatacacattcatgataaaaaattgtaaaggtaaaaagacatattacagtagaaagtttatgtctttcccacccataatttcaagacatcaggtgtacctcaaggaagcaaccactattactaccttttggctatccttccagaaatattctaaacatatacaagcaaaaatatacctacctttatccatcatctcagtacctcttcattattaatagaaatcatagaatgctatatactttgccttttccagttggccatataaaagatgttttcatatttgaacacaaatatctaccttattttaaaaatagccactgagcactttcctaatgacagacattcagaatgtttctacctttgcttttatggacaattatgcaacaaataccttatatgtacatcactttacacatgttcaagatatataa

SEQ ID NO: 89667 - DNA, 290 bp, Homo sapiens
gcaaataaggatttgcattgacaggacatcttgtgcttttcaaatagtccgttccaccgagaggttccttgactttggccttcagtcctgacttaatttctttgcttatgggtaaaacaaggaattcctgtcacactgccaacatcaccccctttcttctcaccccaaggagagtgcagagaggaggcgagaccaagcctgcccagagttggagtcttgagacgtgagattctccagctggagccctataaattggactgacaaaagacagattagcaagagaaatgcaa

SEQ ID NO: 89668 - DNA, 467 bp, Homo sapiens
gcaagaagtgagagtctgatttttaacccatgactgatggtttattgcacaaaaatttgttggtgcaaatccagcagattctctgttatttgggactgaaggtcttagctggtcagagacaacaactactgctgttttgagccacacatagatgtttgtagaccctgcttcttatttcctacctgagaccttatgttgagaagcaaagatttatgttttaccaggcaggtgactgagaacctttttcttcaggtagtcgccatttgcttaggagggatattatgaagcttggcaaatttgcttgaatgaatctcatttgtaactttcaggtcaataagcattttatacatttgaagacctgcaacactccctttgtcatatcccataacttctaagtagggccctccctggagaagagtaaaccaaaggaaatctaatcctttaagtcttacataggatatatttgg

SEQ ID NO: 89669 - DNA, 543 bp, Homo sapiens
tgaggctggtcccatgtgtctctatccttgaattattgcatttaacccacgcagcaaccccgggggagggggccatcagcctcatgtccctggcaggagcccaaggtgctgagaggtggggcaatgtgctcaaggtcacacaacagcctggctccaggccccgtgtcgccctggtgtgcccgacagctgcctctgtctttgtcttgccccatcaccttcctcactgtgagctcctccagggcaagggcagggtcctgtttgtctttgcattccccagagcaactggcatagacctgcgctccgtgctaaggacacacactatcctgggggcccacagctcacaccatgcactggaggcaccactttcacaagacagttccccacaaatgcccaccacttgcaggaaggatgcctctcccacagccagcctgcaggggaaggtctccctcagcctccaggattcccatctccggtttctatgcgtgaatcacagtgacagcaatgcgccctcaccacttcccgttgtcctacattggcttggtc

SEQ ID NO: 89670 - DNA, 505 bp, Homo sapiens
aagttacttaattttcttaaactttatttcatcatctgtaaaatagggagaatgcctcatgggtattaaatgagttaatgcaaaaagagagcttagcataatgtctgacatgtaataagtcctcagtaaatgttagccattactaaaagtcaaaaataggaataaaaatgtcaagactaggtatgatcaggtaggacttaaggatgcttacaaaattaacatcttaagggacttcctggtcaagaagagcatctgagcttgactgcaacccaaacagggccagtgcagggaggagggatgtccaaggaggcttcaaccaaaggaaatagatgagggaagaggtctcaatcagagagtggaaatagggcctaagtagtttcagagctgcccataagtgtgggggccccttcagtctaggtcccccgaccacacacaacagtggtcctaaaattcttaaatgagcagcagtcaagggacaccaaaggatgcaaaaccatagcagcca

SEQ ID NO: 89671 - DNA, 932 bp, Homo sapiens
aaaatttacagcaacagcagtttaaaaagacaaatatgttcattatataatgttaaagggattagtctggcaggaaaataccgcaattctaaatatataagcacctaacactggagcacccaaatttataaaataatcactactagacctaagaaatgagatagacagcaacacaatagtagtgggggacttcagtactcccctgacagcactaaactggtcatcaagacagaaagtcaacaaactctagcctgcaacaaatgaacttaacagatatttatagaacattctacccaacaactgcagagtatacattctactcatcagcacatggaacattgtccaagatagaccatatgataggccacaaaacaagtctgagcaaatttaagaacattgaaattacatcaagtactctctcagactacagtggaataaaattgcaaatcaactcctaaaggcatccccaaaccatacaaatacatgcaaattaaataacttgctcctgaatgatcattgagtcaacaaggaaatcaagatggaaattaaaaaattatttaaactgagtgataatagtgacacagcctatcaaaaccactgagatacagcaaaaaatggtgctaaggggaaagttcatagcattaaatgcttacatcaaaaagtctgaaagagcacaaatagacaatctaaggtcacacttcatggaactagagaaaaaagaacaaaccaaactgaaacccggcagaagaaaagaaataacgaggatcagagcagaactaaatgaaattgaaacaaacaaaaacaatacagaaaataaataaaaagctgtttctttgaaaatgtgaatgaaattgatataccattagtgagattaaccaagaaaagaagagagaacatccaaataatcgtaattagaaatgaaatgggagata

SEQ ID NO: 89672 - DNA, 261 bp, Homo sapiens
taatgcatatacatatatgactctgtattgacaggttttttcctatcagcactttaagtatgacgtgttttactatgcatagttttttaaaagaagcctgctgacttccttatctttgttcctataggggtggtctatcttatttctcttaactgcctttaagattttctctttataattagctttcatcaatttgtcatgtgcatttggtgtgagcttatgtgtgtgtgtttgtgtttatcttgcttgaggttcatttcg

SEQ ID NO: 89673 - DNA, 220 bp, Homo sapiens
cttgaaaattaagaacaaagttgaaggaatcatatttcccaatttcaaaacgtaacgcaaaactttggtaatcaaagcagtgtgggctggctggacatggtagttcacgcctgtaatcccagaactttggaaggccaaggagtgaggatcactcgaacccaggagctcatgaccagcctgggtaacatagcgagacctcgtctctattaaacatgaaaaa

SEQ ID NO: 89674 - DNA, 941 bp, Homo sapiens
  misc_feature (27)..(27): n is a, c, g, or t
ccctctctctctctttctgtctttccntctctctctctttctgtctttccctctccttttctgtcacctttccccctagctggctcctttggacctacccctgtccttgctgacttgtgttgcattgtattccaaacgtgtttacaggttctcttaagcaatgttgtatttgcaggcttttctgaataccaaatctgctttttgtaaagcgtaaaaacatcacaaagtaggtcattccatcaccacccttgtctctctacacattttgcctttggggatctggttggggttttgggttttttgttgttgttgtttatttgttattttaaaggtaaattgcacttttaaaaaaataattggttgacttaatatatttgctttttttctcacctgcacttagaggaaatttgaacaagttggaaaaaaacaatttttgtttcaattctaagaaacacttgcagctctagtattcacttgagtcttcctgtttttcctgtaccgggtcatggtaatttttggttgttttggttgttttcttaaaaaacaagttaaaacctgacgatttctgcaggctgtgtaagcatgtttacctgttggcttgctttgtgtgtctgttaaatgaatgtcatatgtaaatgctaaaataaatcgacagtgtctcagaactgaataactgcagtgacttgatgctctaaaacagtgtaggatttaagaatagatggtttttaatcctggaaattgtgattgtgacccatgagtggaggaactttcagttctaaagctgataaagtgtgtagccagaagagtacttttttttttgtaaccactgtcttgatggcaaaataattatggtaaaaaacaagtctcgtgtttattattccttaagaactctgtgttatattaccatggaacgcctaataaagcaaaatgtggttgtttca

SEQ ID NO: 89675 - DNA, 5411 bp, Homo sapiens
ccgggatccggttttttttgtttttaaaagtgtaatttcctttttatttgcatctgtttatgactgaaaaaaatgactagttattatgaagacactactgttgaagatggatattttaacatggagtttcaacaaaattacttcttgagacagagctgatgtgttttttaaataacgtgattttaagcatatatttgaacaaaactaaaacatttagtattatgaatatgaaaaaagatcagtaaatcaatgtactcttctaggctgaattaaggtagactatttaaggtttcaaaaaagtttggctggggcagaataagttttacaaaacccatgccatccaaaattaagatgacatgtagcagcaagaagtattccaatgtctcataaccagttctcgcaagcaatgtgtattccttactttaaggaagtgtcaaacaaatagaaaaatctggaagaatttactaagtgtaataaattagaggtaaatcgtaataaaagaatttatgtctcacaaaaatattcacaagtgggagttttcttttaccaacttctcagagtccttctagccccctcttcacttctgaaagatgggatttaccaaaatctggtttacatttaacttttcagggacacatgacctgaaaagaaagatgtcagataatactgacattgcctcatgcactttctttgtatcagtccttcttctgtaagtaatcagaattgggtccaaatggcatagaatcaaacattatgtatcatgccaaataccacttcctgcccaacaaaatttcatctttctccagtaatgaagaggtggacattcttgttggactgtagcatctgtgccgcccgctccacaccaaccacggcagctaacctctgggcatcatatttggagtagagaacagtgcaggtccacgtggcctcttctcctctgttggtggctctcagcatattacagatttcactgtaaaagtgtggatatgtcggcagttcatagaaaatcaggttcctgatgcttttattgctgtagtttatttccacccccttccctcctgtttctctctctccttctctctctctctctctctctcttttttttccgccctagctggggctgtgttggaggagaggaagaaagagagacagaggattgcattcatccgttacgttcttgaaatttcctaatagcaagaccagcgaagcggttgcacccttttcaatcttgcaaaggaaaaaaacaaaacaaaacaaaaaaaacccaagtccccttcccggcagtttttgccttaaagctgccctcttgaaattaattttttcccaggagagagatgtcttatcaggggaagaaaaatattccacgcatcacgagcgatcgtcttctgatcaaaggaggtaaaattgttaatgatgaccagtcgttctatgcagacatatacatggaagatgggttgatcaagcaaataggagaaaatctgattgtgccaggaggagtgaagaccatcgaggcccactcccggatggtgatccccggaggaattgacgtccacactcgtttccagatgcctgatcagggaatgacgtctgctgatgatttcttccaaggaaccaaggcggccctggctgggggaaccactatgatcattgaccacgttgttcctgagcctgggacaagcctgctcgctgcctttgaccagtggagggaatgggccgacagcaagtcctgctgtgactactctctgcatgtggacatcagcgagtggcataagggcatccaggaggagatggaagcgcttgtgaaggatcacggggtaaattccttcctcgtgtacatggctttcaaagatcgcttccagctaacggattgccagatttatgaagtactgagtgtgatccgggatattggcgccatagcccaagtccacgcagaaaatggcgacatcattgcagaggagcagcagaggatcctggatctgggcatcacgggccccgagggacatgtgctgagccgacctgaggaggtcgaggccgaagccgtgaatcgtgccatcaccatcgccaaccagaccaactgcccgctgtatatcaccaaggtgatgagcaaaagctctgctgaggtcatcgcccaggcacggaagaagggaactgtggtgtatggcgagcccatcactgccagcttgggaacggacggctcccattactggagcaagaactgggccaaggctgctgcctttgtcacctccccacccttgagccctgatccaaccactccagactttctcaactccttgctgtcctgtggagacctccaggtcacgggcagtgcccattgcacgtttaacactgcccagaaggctgtaggaaaggacaacttcaccctgattccggagggcaccaatggcactgaggagcggatgtccgtcatctgggacaaggctgtggtcactgggaagatggatgagaaccagtttgtggctgtgaccagcaccaatgcagccaaagtcttcaacctttacccccggaaaggccgcattgctgtgggatccgatgccgacctggtcatctgggaccccgacagcgttaaaaccatctctgccaagacacacaacagctctctcgagtacaacatctttgaaggcatggagtgccgcggctccccactggtggtcatcagccaggggaagattgtcctggaggacggcaccctgcatgtcaccgaaggctctggacgctacattccccggaagcccttccctgattttgtttacaagcgtatcaaggcaaggagcaggctggctgagctgagaggggttcctcgtggcctgtatgacggacctgtgtgtgaagtgtctgtgacgcccaagacagtcactccagcctcctcggccaagacgtctcctgccaagcagcaggccccacctgtccggaacctgcaccagtctggattcagtttgtctggtgctcagattgatgacaacattccccgccgcaccacccagcgtatcgtggcgccccccggtggccgtgccaacatcaccagcctgggctagagctcctgggctgtgccgtccactggggactggggatgggacacctgaggacattctgagacttctttcttccttccttttttttttgtttttttttttaagagcctgtgatagttactgtggagcagccagttcatggggtcccccttggggccccacaccccgtctctcaccaagagttactgattttgctcatccacttccctacacatctatgggtatcacacccaagactacccaccaagctcatacagggaaccacacccaacacttagacatgcgaacaagcagcccccagcgagggtctccttcgccttcaacctcctagtgtctgttagcatcttccttttcatggggggagggaagataaagtgaattgcccagagctgcctttttcttttctttttaaaaattttaagaagttttctttgtggggctggggaggggccggggtcagggagagtcttttttttttttttttttaaatactaaattggaacatttaattccatattaatacaaggggtttgaactggacatcctaatgatgcaattacgtcatcacccagctgattccgggtggttggcaaactcatcgtgtctgtcctgagaggctccacaatgcccacccgcatcgccattctgtagtcttcagggtcagctgttgataaaggggcaggcttgcgttattggcctagattttgctgcagattaaatcctttgaggattctcttctcttttaccatttttctgcgtgctctcactctctctttctctctctagctttttaattcatgaatattttcgtgtctgtctctctctctctctgtgtttcctccagcccttgtctcggagacggtgttttcctcccttgccccattatcttttcacctcccaggtctaccatttcatggtggtcgttgggtccgcctaaaggatttgagcgtttgccattgcaagcatagtgctgtgtcatcctggtccatgtaggactggtgctaaccacctgccatcatgaggatgtgtgctagagtgtgggaccctggccaagtgcaggaatgggccatgccgtctcacccacagtatcacatgtggaaccgcagacagggcccagaagctttagaggtatgaggctgcagaaccggagagattttcctctgtgcagtgctctctggctaaagtcacggtcaaacctaaacaccgagcctcattaacccaagtgaaccaaccaaagtcaccagttcagaagtgctaagctaataggagtctgacccgagggcctgctgcttcctggttaagtatcttttgagattctagaacacatgggagctttttattttcggggaaaaaccgtatttttttcttgtccaattatttctaaagacacactacatagaaagaggccctataaactcaaaaagtcattgggaaacttaaagtctattctactttgcaagaggagaaatgtgttttatgaacgatagatcacatcagaactcctgtggggaggaaaccttataaattaaacacatggcccccttagagaccacaggcgatgtctgtctccatccttccctctccttttctgtcacctttccccctagctggctcctttggacctacccctgtccttgctgacttgtgttgcattgtattccaaacgtgtttacaggttctcttaagcaatgttgtatttgcaggcttttctgaataccaaatctgctttttgtaaagcgtaaaaacatcacaaagtaggtcattccatcaccacccttgtctctctacacattttgcctttggggatctggttggggttttgggttttttgttgttgttgtttatttgttattttaaaggtaaattgcacttttaaaaaaataattggttgacttaatatatttgctttttttctcacctgcacttagaggaaatttgaacaagttggaaaaaaacaatttttgtttcaattctaagaaacacttgcagctctagtattcacttgagtcttcctgtttttcctgtaccgggtcatggtaatttttggttgttttggttgttttcttaaaaaacaagttaaaacctgacgatttctgcagtgacttgatgctctaaaacagtgtaggatttaagaatagatggtttttaatcctggaaattgtgattgtgacccatgagtggaggaactttcagttctaaagctgataaagtgtgtagccagaagagtacttttttttttgtaaccactgtcttgatggcaaaataattatggtaaaaaacaagtctcgtgtttattattccttaagaactctgtgttatattaccatggaacgcctaataaagcaaaatgtggttgtttca

SEQ ID NO: 89676 - DNA, 5519 bp, Homo sapiens
ccgggatccggttttttttgtttttaaaagtgtaatttcctttttatttgcatctgtttatgactgaaaaaaatgactagttattatgaagacactactgttgaagatggatattttaacatggagtttcaacaaaattacttcttgagacagagctgatgtgttttttaaataacgtgattttaagcatatatttgaacaaaactaaaacatttagtattatgaatatgaaaaaagatcagtaaatcaatgtactcttctaggctgaattaaggtagactatttaaggtttcaaaaaagtttggctggggcagaataagttttacaaaacccatgccatccaaaattaagatgacatgtagcagcaagaagtattccaatgtctcataaccagttctcgcaagcaatgtgtattccttactttaaggaagtgtcaaacaaatagaaaaatctggaagaatttactaagtgtaataaattagaggtaaatcgtaataaaagaatttatgtctcacaaaaatattcacaagtgggagttttcttttaccaacttctcagagtccttctagccccctcttcacttctgaaagatgggatttaccaaaatctggtttacatttaacttttcagggacacatgacctgaaaagaaagatgtcagataatactgacattgcctcatgcactttctttgtatcagtccttcttctgtaagtaatcagaattgggtccaaatggcatagaatcaaacattatgtatcatgccaaataccacttcctgcccaacaaaatttcatctttctccagtaatgaagaggtggacattcttgttggactgtagcatctgtgccgcccgctccacaccaaccacggcagctaacctctgggcatcatatttggagtagagaacagtgcaggtccacgtggcctcttctcctctgttggtggctctcagcatattacagatttcactgtaaaagtgtggatatgtcggcagttcatagaaaatcaggttcctgatgcttttattgctgtagtttatttccacccccttccctcctgtttctctctctccttctctctctctctctctctctcttttttttccgccctagctggggctgtgttggaggagaggaagaaagagagacagaggattgcattcatccgttacgttcttgaaatttcctaatagcaagaccagcgaagcggttgcacccttttcaatcttgcaaaggaaaaaaacaaaacaaaacaaaaaaaacccaagtccccttcccggcagtttttgccttaaagctgccctcttgaaattaattttttcccaggagagagatgtcttatcaggggaagaaaaatattccacgcatcacgagcgatcgtcttctgatcaaaggaggtaaaattgttaatgatgaccagtcgttctatgcagacatatacatggaagatgggttgatcaagcaaataggagaaaatctgattgtgccaggaggagtgaagaccatcgaggcccactcccggatggtgatccccggaggaattgacgtccacactcgtttccagatgcctgatcagggaatgacgtctgctgatgatttcttccaaggaaccaaggcggccctggctgggggaaccactatgatcattgaccacgttgttcctgagcctgggacaagcctgctcgctgcctttgaccagtggagggaatgggccgacagcaagtcctgctgtgactactctctgcatgtggacatcagcgagtggcataagggcatccaggaggagatggaagcgcttgtgaaggatcacggggtaaattccttcctcgtgtacatggctttcaaagatcgcttccagctaacggattgccagatttatgaagtactgagtgtgatccgggatattggcgccatagcccaagtccacgcagaaaatggcgacatcattgcagaggagcagcagaggatcctggatctgggcatcacgggccccgagggacatgtgctgagccgacctgaggaggtcgaggccgaagccgtgaatcgtgccatcaccatcgccaaccagaccaactgcccgctgtatatcaccaaggtgatgagcaaaagctctgctgaggtcatcgcccaggcacggaagaagggaactgtggtgtatggcgagcccatcactgccagcttgggaacggacggctcccattactggagcaagaactgggccaaggctgctgcctttgtcacctccccacccttgagccctgatccaaccactccagactttctcaactccttgctgtcctgtggagacctccaggtcacgggcagtgcccattgcacgtttaacactgcccagaaggctgtaggaaaggacaacttcaccctgattccggagggcaccaatggcactgaggagcggatgtccgtcatctgggacaaggctgtggtcactgggaagatggatgagaaccagtttgtggctgtgaccagcaccaatgcagccaaagtcttcaacctttacccccggaaaggccgcattgctgtgggatccgatgccgacctggtcatctgggaccccgacagcgttaaaaccatctctgccaagacacacaacagctctctcgagtacaacatctttgaaggcatggagtgccgcggctccccactggtggtcatcagccaggggaagattgtcctggaggacggcaccctgcatgtcaccgaaggctctggacgctacattccccggaagcccttccctgattttgtttacaagcgtatcaaggcaaggagcaggctggctgagctgagaggggttcctcgtggcctgtatgacggacctgtgtgtgaagtgtctgtgacgcccaagacagtcactccagcctcctcggccaagacgtctcctgccaagcagcaggccccacctgtccggaacctgcaccagtctggattcagtttgtctggtgctcagattgatgacaacattccccgccgcaccacccagcgtatcgtggcgccccccggtggccgtgccaacatcaccagcctgggctagagctcctgggctgtgccgtccactggggactggggatgggacacctgaggacattctgagacttctttcttccttccttttttttttgtttttttttttaagagcctgtgatagttactgtggagcagccagttcatggggtcccccttggggccccacaccccgtctctcaccaagagttactgattttgctcatccacttccctacacatctatgggtatcacacccaagactacccaccaagctcatacagggaaccacacccaacacttagacatgcgaacaagcagcccccagcgagggtctccttcgccttcaacctcctagtgtctgttagcatcttccttttcatggggggagggaagataaagtgaattgcccagagctgcctttttcttttctttttaaaaattttaagaagttttctttgtggggctggggaggggccggggtcagggagagtcttttttttttttttttttaaatactaaattggaacatttaattccatattaatacaaggggtttgaactggacatcctaatgatgcaattacgtcatcacccagctgattccgggtggttggcaaactcatcgtgtctgtcctgagaggctccacaatgcccacccgcatcgccattctgtagtcttcagggtcagctgttgataaaggggcaggcttgcgttattggcctagattttgctgcagattaaatcctttgaggattctcttctcttttaccatttttctgcgtgctctcactctctctttctctctctagctttttaattcatgaatattttcgtgtctgtctctctctctctctgtgtttcctccagcccttgtctcggagacggtgttttcctcccttgccccattatcttttcacctcccaggtctaccatttcatggtggtcgttgggtccgcctaaaggatttgagcgtttgccattgcaagcatagtgctgtgtcatcctggtccatgtaggactggtgctaaccacctgccatcatgaggatgtgtgctagagtgtgggaccctggccaagtgcaggaatgggccatgccgtctcacccacagtatcacatgtggaaccgcagacagggcccagaagctttagaggtatgaggctgcagaaccggagagattttcctctgtgcagtgctctctggctaaagtcacggtcaaacctaaacaccgagcctcattaacccaagtgaaccaaccaaagtcaccagttcagaagtgctaagctaataggagtctgacccgagggcctgctgcttcctggttaagtatcttttgagattctagaacacatgggagctttttattttcggggaaaaaccgtatttttttcttgtccaattatttctaaagacacactacatagaaagaggccctataaactcaaaaagtcattgggaaacttaaagtctattctactttgcaagaggagaaatgtgttttatgaacgatagatcacatcagaactcctgtggggaggaaaccttataaattaaacacatggcccccttagagaccacaggcgatgtctgtctccatccttccctctccttttctgtcacctttccccctagctggctcctttggacctacccctgtccttgctgacttgtgttgcattgtattccaaacgtgtttacaggttctcttaagcaatgttgtatttgcaggcttttctgaataccaaatctgctttttgtaaagcgtaaaaacatcacaaagtaggtcattccatcaccacccttgtctctctacacattttgcctttggggatctggttggggttttgggttttttgttgttgttgtttatttgttattttaaaggtaaattgcacttttaaaaaaataattggttgacttaatatatttgctttttttctcacctgcacttagaggaaatttgaacaagttggaaaaaaacaatttttgtttcaattctaagaaacacttgcagctctagtattcacttgagtcttcctgtttttcctgtaccgggtcatggtaatttttggttgttttggttgttttcttaaaaaacaagttaaaacctgacgatttctgcaggctgtgtaagcatgtttacctgttggcttgctttgtgtgtctgttaaatgaatgtcatatgtaaatgctaaaataaatcgacagtgtctcagaactgaataactgcagtgacttgatgctctaaaacagtgtaggatttaagaatagatggtttttaatcctggaaattgtgattgtgacccatgagtggaggaactttcagttctaaagctgataaagtgtgtagccagaagagtacttttttttttgtaaccactgtcttgatggcaaaataattatggtaaaaaacaagtctcgtgtttattattccttaagaactctgtgttatattaccatggaacgcctaataaagcaaaatgtggttgtttca

SEQ ID NO: 89677 - DNA, 5884 bp, Homo sapiens
  misc_feature (5534)..(5534): n is a, c, g, or t
  misc_feature (5540)..(5540): n is a, c, g, or t
  misc_feature (5563)..(5568): n is a, c, g, or t
  misc_feature (5572)..(5573): n is a, c, g, or t
  misc_feature (5575)..(5575): n is a, c, g, or t
  misc_feature (5577)..(5577): n is a, c, g, or t
  misc_feature (5580)..(5581): n is a, c, g, or t
  misc_feature (5618)..(5618): n is a, c, g, or t
  misc_feature (5623)..(5624): n is a, c, g, or t
  misc_feature (5626)..(5626): n is a, c, g, or t
  misc_feature (5630)..(5630): n is a, c, g, or t
  misc_feature (5632)..(5632): n is a, c, g, or t
  misc_feature (5639)..(5639): n is a, c, g, or t
  misc_feature (5642)..(5642): n is a, c, g, or t
  misc_feature (5648)..(5649): n is a, c, g, or t
  misc_feature (5661)..(5661): n is a, c, g, or t
  misc_feature (5674)..(5675): n is a, c, g, or t
  misc_feature (5686)..(5686): n is a, c, g, or t
  misc_feature (5704)..(5705): n is a, c, g, or t
  misc_feature (5717)..(5717): n is a, c, g, or t
  misc_feature (5720)..(5721): n is a, c, g, or t
  misc_feature (5727)..(5728): n is a, c, g, or t
  misc_feature (5733)..(5735): n is a, c, g, or t
  misc_feature (5747)..(5748): n is a, c, g, or t
  misc_feature (5757)..(5759): n is a, c, g, or t
  misc_feature (5763)..(5763): n is a, c, g, or t
  misc_feature (5766)..(5766): n is a, c, g, or t
  misc_feature (5779)..(5779): n is a, c, g, or t
  misc_feature (5786)..(5786): n is a, c, g, or t
  misc_feature (5790)..(5790): n is a, c, g, or t
  misc_feature (5799)..(5799): n is a, c, g, or t
  misc_feature (5802)..(5802): n is a, c, g, or t
  misc_feature (5813)..(5813): n is a, c, g, or t
  misc_feature (5884)..(5884): n is a, c, g, or t
ccgggatccggttttttttgtttttaaaagtgtaatttcctttttatttgcatctgtttatgactgaaaaaaatgactagttattatgaagacactactgttgaagatggatattttaacatggagtttcaacaaaattacttcttgagacagagctgatgtgttttttaaataacgtgattttaagcatatatttgaacaaaactaaaacatttagtattatgaatatgaaaaaagatcagtaaatcaatgtactcttctaggctgaattaaggtagactatttaaggtttcaaaaaagtttggctggggcagaataagttttacaaaacccatgccatccaaaattaagatgacatgtagcagcaagaagtattccaatgtctcataaccagttctcgcaagcaatgtgtattccttactttaaggaagtgtcaaacaaatagaaaaatctggaagaatttactaagtgtaataaattagaggtaaatcgtaataaaagaatttatgtctcacaaaaatattcacaagtgggagttttcttttaccaacttctcagagtccttctagccccctcttcacttctgaaagatgggatttaccaaaatctggtttacatttaacttttcagggacacatgacctgaaaagaaagatgtcagataatactgacattgcctcatgcactttctttgtatcagtccttcttctgtaagtaatcagaattgggtccaaatggcatagaatcaaacattatgtatcatgccaaataccacttcctgcccaacaaaatttcatctttctccagtaatgaagaggtggacattcttgttggactgtagcatctgtgccgcccgctccacaccaaccacggcagctaacctctgggcatcatatttggagtagagaacagtgcaggtccacgtggcctcttctcctctgttggtggctctcagcatattacagatttcactgtaaaagtgtggatatgtcggcagttcatagaaaatcaggttcctgatgcttttattgctgtagtttatttccacccccttccctcctgtttctctctctccttctctctctctctctctctctcttttttttccgccctagctggggctgtgttggaggagaggaagaaagagagacagaggattgcattcatccgttacgttcttgaaatttcctaatagcaagaccagcgaagcggttgcacccttttcaatcttgcaaaggaaaaaaacaaaacaaaacaaaaaaaacccaagtccccttcccggcagtttttgccttaaagctgccctcttgaaattaattttttcccaggagagagatgtcttatcaggggaagaaaaatattccacgcatcacgagcgatcgtcttctgatcaaaggaggtaaaattgttaatgatgaccagtcgttctatgcagacatatacatggaagatgggttgatcaagcaaataggagaaaatctgattgtgccaggaggagtgaagaccatcgaggcccactcccggatggtgatccccggaggaattgacgtccacactcgtttccagatgcctgatcagggaatgacgtctgctgatgatttcttccaaggaaccaaggcggccctggctgggggaaccactatgatcattgaccacgttgttcctgagcctgggacaagcctgctcgctgcctttgaccagtggagggaatgggccgacagcaagtcctgctgtgactactctctgcatgtggacatcagcgagtggcataagggcatccaggaggagatggaagcgcttgtgaaggatcacggggtaaattccttcctcgtgtacatggctttcaaagatcgcttccagctaacggattgccagatttatgaagtactgagtgtgatccgggatattggcgccatagcccaagtccacgcagaaaatggcgacatcattgcagaggagcagcagaggatcctggatctgggcatcacgggccccgagggacatgtgctgagccgacctgaggaggtcgaggccgaagccgtgaatcgtgccatcaccatcgccaaccagaccaactgcccgctgtatatcaccaaggtgatgagcaaaagctctgctgaggtcatcgcccaggcacggaagaagggaactgtggtgtatggcgagcccatcactgccagcttgggaacggacggctcccattactggagcaagaactgggccaaggctgctgcctttgtcacctccccacccttgagccctgatccaaccactccagactttctcaactccttgctgtcctgtggagacctccaggtcacgggcagtgcccattgcacgtttaacactgcccagaaggctgtaggaaaggacaacttcaccctgattccggagggcaccaatggcactgaggagcggatgtccgtcatctgggacaaggctgtggtcactgggaagatggatgagaaccagtttgtggctgtgaccagcaccaatgcagccaaagtcttcaacctttacccccggaaaggccgcattgctgtgggatccgatgccgacctggtcatctgggaccccgacagcgttaaaaccatctctgccaagacacacaacagctctctcgagtacaacatctttgaaggcatggagtgccgcggctccccactggtggtcatcagccaggggaagattgtcctggaggacggcaccctgcatgtcaccgaaggctctggacgctacattccccggaagcccttccctgattttgtttacaagcgtatcaaggcaaggagcaggctggctgagctgagaggggttcctcgtggcctgtatgacggacctgtgtgtgaagtgtctgtgacgcccaagacagtcactccagcctcctcggccaagacgtctcctgccaagcagcaggccccacctgtccggaacctgcaccagtctggattcagtttgtctggtgctcagattgatgacaacattccccgccgcaccacccagcgtatcgtggcgccccccggtggccgtgccaacatcaccagcctgggctagagctcctgggctgtgccgtccactggggactggggatgggacacctgaggacattctgagacttctttcttccttccttttttttttgtttttttttttaagagcctgtgatagttactgtggagcagccagttcatggggtcccccttggggccccacaccccgtctctcaccaagagttactgattttgctcatccacttccctacacatctatgggtatcacacccaagactacccaccaagctcatacagggaaccacacccaacacttagacatgcgaacaagcagcccccagcgagggtctccttcgccttcaacctcctagtgtctgttagcatcttccttttcatggggggagggaagataaagtgaattgcccagagctgcctttttcttttctttttaaaaattttaagaagttttctttgtggggctggggaggggccggggtcagggagagtcttttttttttttttttttaaatactaaattggaacatttaattccatattaatacaaggggtttgaactggacatcctaatgatgcaattacgtcatcacccagctgattccgggtggttggcaaactcatcgtgtctgtcctgagaggctccacaatgcccacccgcatcgccattctgtagtcttcagggtcagctgttgataaaggggcaggcttgcgttattggcctagattttgctgcagattaaatcctttgaggattctcttctcttttaccatttttctgcgtgctctcactctctctttctctctctagctttttaattcatgaatattttcgtgtctgtctctctctctctctgtgtttcctccagcccttgtctcggagacggtgttttcctcccttgccccattatcttttcacctcccaggtctaccatttcatggtggtcgttgggtccgcctaaaggatttgagcgtttgccattgcaagcatagtgctgtgtcatcctggtccatgtaggactggtgctaaccacctgccatcatgaggatgtgtgctagagtgtgggaccctggccaagtgcaggaatgggccatgccgtctcacccacagtatcacatgtggaaccgcagacagggcccagaagctttagaggtatgaggctgcagaaccggagagattttcctctgtgcagtgctctctggctaaagtcacggtcaaacctaaacaccgagcctcattaacccaagtgaaccaaccaaagtcaccagttcagaagtgctaagctaataggagtctgacccgagggcctgctgcttcctggttaagtatcttttgagattctagaacacatgggagctttttattttcggggaaaaaccgtatttttttcttgtccaattatttctaaagacacactacatagaaagaggccctataaactcaaaaagtcattgggaaacttaaagtctattctactttgcaagaggagaaatgtgttttatgaacgatagatcacatcagaactcctgtggggaggaaaccttataaattaaacacatggcccccttagagaccacaggcgatgtctgtctccatccttccctctccttttctgtcacctttccccctagctggctcctttggacctacccctgtccttgctgacttgtgttgcattgtattccaaacgtgtttacaggttctcttaagcaatgttgtatttgcaggcttttctgaataccaaatctgctttttgtaaagcgtaaaaacatcacaaagtaggtcattccatcaccacccttgtctctctacacattttgcctttggggatctggttggggttttgggttttttgttgttgttgtttatttgttattttaaaggtaaattgcacttttaaaaaaataattggttgacttaatatatttgctttttttctcacctgcacttagaggaaatttgaacaagttggaaaaaaacaatttttgtttcaattctaagaaacacttgcagctctagtattcacttgagtcttcctgtttttcctgtaccgggtcatggtaatttttggttgttttggttgttttcttaaaaaacaagttaaaacctgacgatttctgcaggctgtgtaagcatgtttacctgttggcttgctttgtgtgtctgttaaatgaatgtcatatgtaaatgctaaaataaatcgacagtgtctcagaactgaataactgcagtgacttgatgctctaaaacagtgtaggatttaagaatagatggtttttaatcctggaaattgtgattgtgacccatgagtggaggaactttcagttctaaagctgataaagtgtgtagccagaagagtacttttttttttgtaaccactgtcttgatggcaaaataattatggtaaaaaacaagtctcgtgtttattattccttaagaactctgtgttatattaccatggaacgcctaataaagcaaaatgtggttgtttcaaaaaaaaaaaaaaantccccnggggggggggggggggggggggnnnnnnaaanntntnttnntttttttttttttttttttttttttatttttatatantaatnnanaaananttacaanatncaccanncccaccccccancaaaaaaaaaaannaccaaatttcnattcacccaaaaataaannataaaacccccnaannttttcnnttttnnntttttttttttnnatattaaannnttanttncatttcaaaaaanctttatnttantttaaaaantanccccccaaaanatttaaaaataaaaaaacacccataacctcaaaaactaaaaccaaccacaaaataaattaccaaaccaaan

SEQ ID NO: 89678 - DNA, 5257 bp, Homo sapiens
ccgggatccggttttttttgtttttaaaagtgtaatttcctttttatttgcatctgtttatgactgaaaaaaatgactagttattatgaagacactactgttgaagatggatattttaacatggagtttcaacaaaattacttcttgagacagagctgatgtgttttttaaataacgtgattttaagcatatatttgaacaaaactaaaacatttagtattatgaatatgaaaaaagatcagtaaatcaatgtactcttctaggctgaattaaggtagactatttaaggtttcaaaaaagtttggctggggcagaataagttttacaaaacccatgccatccaaaattaagatgacatgtagcagcaagaagtattccaatgtctcataaccagttctcgcaagcaatgtgtattccttactttaaggaagtgtcaaacaaatagaaaaatctggaagaatttactaagtgtaataaattagaggtaaatcgtaataaaagaatttatgtctcacaaaaatattcacaagtgggagttttcttttaccaacttctcagagtccttctagccccctcttcacttctgaaagatgggatttaccaaaatctggtttacatttaacttttcagggacacatgacctgaaaagaaagatgtcagataatactgacattgcctcatgcactttctttgtatcagtccttcttctgtaagtaatcagaattgggtccaaatggcatagaatcaaacattatgtatcatgccaaataccacttcctgcccaacaaaatttcatctttctccagtaatgaagaggtggacattcttgttggactgtagcatctgtgccgcccgctccacaccaaccacggcagctaacctctgggcatcatatttggagtagagaacagtgcaggtccacgtggcctcttctcctctgttggtggctctcagcatattacagatttcactgtaaaagtgtggatatgtcggcagttcatagaaaatcaggttcctgatgcttttattgctgtagtttatttccacccccttccctcctgtttctctctctccttctctctctctctctctctctcttttttttccgccctagctggggctgtgttggaggagaggaagaaagagagacagaggattgcattcatccgttacgttcttgaaatttcctaatagcaagaccagcgaagcggttgcacccttttcaatcttgcaaaggaaaaaaacaaaacaaaacaaaaaaaacccaagtccccttcccggcagtttttgccttaaagctgccctcttgaaattaattttttcccaggagagagatgtcttatcaggggaagaaaaatattccacgcatcacgagcgatcgtcttctgatcaaaggaggtaaaattgttaatgatgaccagtcgttctatgcagacatatacatggaagatgggttgatcaagcaaataggagaaaatctgattgtgccaggaggagtgaagaccatcgaggcccactcccggatggtgatccccggaggaattgacgtccacactcgtttccagatgcctgatcagggaatgacgtctgctgatgatttcttccaaggaaccaaggcggccctggctgggggaaccactatgatcattgaccacgttgttcctgagcctgggacaagcctgctcgctgcctttgaccagtggagggaatgggccgacagcaagtcctgctgtgactactctctgcatgtggacatcagcgagtggcataagggcatccaggaggagatggaagcgcttgtgaaggatcacggggtaaattccttcctcgtgtacatggctttcaaagatcgcttccagctaacggattgccagatttatgaagtactgagtgtgatccgggatattggcgccatagcccaagtccacgcagaaaatggcgacatcattgcagaggagcagcagaggatcctggatctgggcatcacgggccccgagggacatgtgctgagccgacctgaggaggtcgaggccgaagccgtgaatcgtgccatcaccatcgccaaccagaccaactgcccgctgtatatcaccaaggtgatgagcaaaagctctgctgaggtcatcgcccaggcacggaagaagggaactgtggtgtatggcgagcccatcactgccagcttgggaacggacggctcccattactggagcaagaactgggccaaggctgctgcctttgtcacctccccacccttgagccctgatccaaccactccagactttctcaactccttgctgtcctgtggagacctccaggtcacgggcagtgcccattgcacgtttaacactgcccagaaggctgtaggaaaggacaacttcaccctgattccggagggcaccaatggcactgaggagcggatgtccgtcatctgggacaaggctgtggtcactgggaagatggatgagaaccagtttgtggctgtgaccagcaccaatgcagccaaagtcttcaacctttacccccggaaaggccgcattgctgtgggatccgatgccgacctggtcatctgggaccccgacagcgttaaaaccatctctgccaagacacacaacagctctctcgagtacaacatctttgaaggcatggagtgccgcggctccccactggtggtcatcagccaggggaagattgtcctggaggacggcaccctgcatgtcaccgaaggctctggacgctacattccccggaagcccttccctgattttgtttacaagcgtatcaaggcaaggagcaggctggctgagctgagaggggttcctcgtggcctgtatgacggacctgtgtgtgaagtgtctgtgacgcccaagacagtcactccagcctcctcggccaagacgtctcctgccaagcagcaggccccacctgtccggaacctgcaccagtctggattcagtttgtctggtgctcagattgatgacaacattccccgccgcaccacccagcgtatcgtggcgccccccggtggccgtgccaacatcaccagcctgggctagagctcctgggctgtgccgtccactggggactggggatgggacacctgaggacattctgagacttctttcttccttccttttttttttgtttttttttttaagagcctgtgatagttactgtggagcagccagttcatggggtcccccttggggccccacaccccgtctctcaccaagagttactgattttgctcatccacttccctacacatctatgggtatcacacccaagactacccaccaagctcatacagggaaccacacccaacacttagacatgcgaacaagcagcccccagcgagggtctccttcgccttcaacctcctagtgtctgttagcatcttccttttcatggggggagggaagataaagtgaattgcccagagctgcctttttcttttctttttaaaaattttaagaagttttctttgtggggctggggaggggccggggtcagggagagtcttttttttttttttttttaaatactaaattggaacatttaattccatattaatacaaggggtttgaactggacatcctaatgatgcaattacgtcatcacccagctgattccgggtggttggcaaactcatcgtgtctgtcctgagaggctccacaatgcccacccgcatcgccattctgtagtcttcagggtcagctgttgataaaggggcaggcttgcgttattggcctagattttgctgcagattaaatcctttgaggattctcttctcttttaccatttttctgcgtgctctcactctctctttctctctctagctttttaattcatgaatattttcgtgtctgtctctctctctctctgtgtttcctccagcccttgtctcggagacggtgttttcctcccttgccccattatcttttcacctcccaggtctaccatttcatggtggtcgttgggtccgcctaaaggatttgagcgtttgccattgcaagcatagtgctgtgtcatcctggtccatgtaggactggtgctaaccacctgccatcatgaggatgtgtgctagagtgtgggaccctggccaagtgcaggaatgggccatgccgtctcacccacagtatcacatgtggaaccgcagacagggcccagaagctttagaggtatgaggctgcagaaccggagagattttcctctgtgcagtgctctctggctaaagtcacggtcaaacctaaacaccgagcctcattaacccaagtgaaccaaccaaagtcaccagttcagaagtgctaagctaataggagtctgacccgagggcctgctgcttcctggttaagtatcttttgagattctagaacacatgggagctttttattttcggggaaaaaccgtatttttttcttgtccaattatttctaaagacacactacatagaaagaggccctataaactcaaaaagtcattgggaaacttaaagtctattctactttgcaagaggagaaatgtgttttatgaacgatagatcacatcagaactcctgtggggaggaaaccttataaattaaacacatggcccccttagagaccacaggcgatgtctgtctccatccttccctctccttttctgtcacctttccccctagctggctcctttggacctacccctgtccttgctgacttgtgttgcattgtattccaaacgtgtttacaggttctcttaagcaatgttgtatttgcaggcttttctgaataccaaatctgctttttgtaaagcgtaaaaacatcacaaagtaggtcattccatcaccacccttgtctctctacacattttgcctttggggatctggttggggttttgggttttttgttgttgttgtttatttgttattttaaaggtaaattgcacttttaaaaaaataattggttgacttaatatatttgctttttttctcacctgcacttagaggaaatttgaacaagttggaaaaaaacaatttttgtttcaattctaagaaacacttgcagctctagtattcacttgagtcttcctgtttttcctgtaccgggtcatggtaatttttggttgttttggttgttttcttaaaaaacaagttaaaacctgacgatttctgcaggctgtgtaagcatgtttacctgttggcttgctttgtgtgtctgttaaatgaatgtcatatgtaaatgctaaaataaatcgacagtgtctcagaactgaataactgcag

SEQ ID NO: 89679 - DNA, 5404 bp, Homo sapiens
ccgggatccggttttttttgtttttaaaagtgtaatttcctttttatttgcatctgtttatgactgaaaaaaatgactagttattatgaagacactactgttgaagatggatattttaacatggagtttcaacaaaattacttcttgagacagagctgatgtgttttttaaataacgtgattttaagcatatatttgaacaaaactaaaacatttagtattatgaatatgaaaaaagatcagtaaatcaatgtactcttctaggctgaattaaggtagactatttaaggtttcaaaaaagtttggctggggcagaataagttttacaaaacccatgccatccaaaattaagatgacatgtagcagcaagaagtattccaatgtctcataaccagttctcgcaagcaatgtgtattccttactttaaggaagtgtcaaacaaatagaaaaatctggaagaatttactaagtgtaataaattagaggtaaatcgtaataaaagaatttatgtctcacaaaaatattcacaagtgggagttttcttttaccaacttctcagagtccttctagccccctcttcacttctgaaagatgggatttaccaaaatctggtttacatttaacttttcagggacacatgacctgaaaagaaagatgtcagataatactgacattgcctcatgcactttctttgtatcagtccttcttctgtaagtaatcagaattgggtccaaatggcatagaatcaaacattatgtatcatgccaaataccacttcctgcccaacaaaatttcatctttctccagtaatgaagaggtggacattcttgttggactgtagcatctgtgccgcccgctccacaccaaccacggcagctaacctctgggcatcatatttggagtagagaacagtgcaggtccacgtggcctcttctcctctgttggtggctctcagcatattacagatttcactgtaaaagtgtggatatgtcggcagttcatagaaaatcaggttcctgatgcttttattgctgtagtttatttccacccccttccctcctgtttctctctctccttctctctctctctctctctctcttttttttccgccctagctggggctgtgttggaggagaggaagaaagagagacagaggattgcattcatccgttacgttcttgaaatttcctaatagcaagaccagcgaagcggttgcacccttttcaatcttgcaaaggaaaaaaacaaaacaaaacaaaaaaaacccaagtccccttcccggcagtttttgccttaaagctgccctcttgaaattaattttttcccaggagagagatgtcttatcaggggaagaaaaatattccacgcatcacgagcgatcgtcttctgatcaaaggaggtaaaattgttaatgatgaccagtcgttctatgcagacatatacatggaagatgggttgatcaagcaaataggagaaaatctgattgtgccaggaggagtgaagaccatcgaggcccactcccggatggtgatccccggaggaattgacgtccacactcgtttccagatgcctgatcagggaatgacgtctgctgatgatttcttccaaggaaccaaggcggccctggctgggggaaccactatgatcattgaccacgttgttcctgagcctgggacaagcctgctcgctgcctttgaccagtggagggaatgggccgacagcaagtcctgctgtgactactctctgcatgtggacatcagcgagtggcataagggcatccaggaggagatggaagcgcttgtgaaggatcacggggtaaattccttcctcgtgtacatggctttcaaagatcgcttccagctaacggattgccagatttatgaagtactgagtgtgatccgggatattggcgccatagcccaagtccacgcagaaaatggcgacatcattgcagaggagcagcagaggatcctggatctgggcatcacgggccccgagggacatgtgctgagccgacctgaggaggtcgaggccgaagccgtgaatcgtgccatcaccatcgccaaccagaccaactgcccgctgtatatcaccaaggtgatgagcaaaagctctgctgaggtcatcgcccaggcacggaagaagggaactgtggtgtatggcgagcccatcactgccagcttgggaacggacggctcccattactggagcaagaactgggccaaggctgctgcctttgtcacctccccacccttgagccctgatccaaccactccagactttctcaactccttgctgtcctgtggagacctccaggtcacgggcagtgcccattgcacgtttaacactgcccagaaggctgtaggaaaggacaacttcaccctgattccggagggcaccaatggcactgaggagcggatgtccgtcatctgggacaaggctgtggtcactgggaagatggatgagaaccagtttgtggctgtgaccagcaccaatgcagccaaagtcttcaacctttacccccggaaaggccgcattgctgtgggatccgatgccgacctggtcatctgggaccccgacagcgttaaaaccatctctgccaagacacacaacagctctctcgagtacaacatctttgaaggcatggagtgccgcggctccccactggtggtcatcagccaggggaagattgtcctggaggacggcaccctgcatgtcaccgaaggctctggacgctacattccccggaagcccttccctgattttgtttacaagcgtatcaaggcaaggagcaggctggctgagctgagaggggttcctcgtggcctgtatgacggacctgtgtgtgaagtgtctgtgacgcccaagacagtcactccagcctcctcggccaagacgtctcctgccaagcagcaggccccacctgtccggaacctgcaccagtctggattcagtttgtctggtgctcagattgatgacaacattccccgccgcaccacccagcgtatcgtggcgccccccggtggccgtgccaacatcaccagcctgggctagagctcctgggctgtgccgtccactggggactggggatgggacacctgaggacattctgagacttctttcttccttccttttttttttgtttttttttttaagagcctgtgatagttactgtggagcagccagttcatggggtcccccttggggccccacaccccgtctctcaccaagagttactgattttgctcatccacttccctacacatctatgggtatcacacccaagactacccaccaagctcatacagggaaccacacccaacacttagacatgcgaacaagcagcccccagcgagggtctccttcgccttcaacctcctagtgtctgttagcatcttccttttcatggggggagggaagataaagtgaattgcccagagctgcctttttcttttctttttaaaaattttaagaagttttctttgtggggctggggaggggccggggtcagggagagtcttttttttttttttttttaaatactaaattggaacatttaattccatattaatacaaggggtttgaactggacatcctaatgatgcaattacgtcatcacccagctgattccgggtggttggcaaactcatcgtgtctgtcctgagaggctccacaatgcccacccgcatcgccattctgtagtcttcagggtcagctgttgataaaggggcaggcttgcgttattggcctagattttgctgcagattaaatcctttgaggattctcttctcttttaccatttttctgcgtgctctcactctctctttctctctctagctttttaattcatgaatattttcgtgtctgtctctctctctctctgtgtttcctccagcccttgtctcggagacggtgttttcctcccttgccccattatcttttcacctcccaggtctaccatttcatggtggtcgttgggtccgcctaaaggatttgagcgtttgccattgcaagcatagtgctgtgtcatcctggtccatgtaggactggtgctaaccacctgccatcatgaggatgtgtgctagagtgtgggaccctggccaagtgcaggaatgggccatgccgtctcacccacagtatcacatgtggaaccgcagacagggcccagaagctttagaggtatgaggctgcagaaccggagagattttcctctgtgcagtgctctctggctaaagtcacggtcaaacctaaacaccgagcctcattaacccaagtgaaccaaccaaagtcaccagttcagaagtgctaagctaataggagtctgacccgagggcctgctgcttcctggttaagtatcttttgagattctagaacacatgggagctttttattttcggggaaaaaccgtatttttttcttgtccaattatttctaaagacacactacatagaaagaggccctataaactcaaaaagtcattgggaaacttaaagtctattctactttgcaagaggagaaatgtgttttatgaacgatagatcacatcagaactcctgtggggaggaaaccttataaattaaacacatggcccccttagagaccacaggcgatgtctgtctccatccttccctctccttttctgtcacctttccccctagctggctcctttggacctacccctgtccttgctgacttgtgttgcattgtattccaaacgtgtttacaggttctcttaagcaatgttgtatttgcaggcttttctgaataccaaatctgctttttgtaaagcgtaaaaacatcacaaagtaggtcattccatcaccacccttgtctctctacacattttgcctttggggatctggttggggttttgggttttttgttgttgttgtttatttgttattttaaaggtaaattgcacttttaaaaaaataattggttgacttaatatatttgctttttttctcacctgcacttagaggaaatttgaacaagttggaaaaaaacaatttttgtttcaattctaagaaacacttgcagctctagtattcacttgagtcttcctgtttttcctgtaccgggtcatggtaatttttggttgttttggttgttttcttaaaaaacaagttaaaacctgacgatttctgcaggctgtgtaagcatgtttacctgttggcttgctttgtgtgtctgttaaatgaatgtcatatgtaaatgctaaaataaatcgacagtgtctcagaactgaataactgcagtgacttgatgctctaaaacagtgtaggatttaagaatagatggtttttaatcctggaaattgtgattgtgacccatgagtggaggaactttcagttctaaagctgataaagtgtgtagccagaagagatatcacagggggatcctct

SEQ ID NO: 89680 - DNA, 2981 bp, Homo sapiens
  misc_feature (30)..(30): n is a, c, g, or t
agacagatacgaatcgagctggtacccccnactagcccgacagcgttaaaaccatctctgccaagacacacaacagctctctcgagtacaacatctttgaaggcatggagtgccgcggctccccactggtggtcatcagccaggggaagattgtcctggaggacggcaccctgcatgtcaccgaaggctctggacgctacattccccggaagcccttccctgattttgtttacaagcgtatcaaggcaaggagcaggctggctgagctgagaggggttcctcgtggcctgtatgacggacctgtgtgtgaagtgtctgtgacgcccaagacagtcactccagcctcctcggccaagacgtctcctgccaagcagcaggccccacctgtccggaacctgcaccagtctggattcagtttgtctggtgctcagattgatgacaacattccccgccgcaccacccagcgtatcgtggcgccccccggtggccgtgccaacatcaccagcctgggctagagctcctgggctgtgccgtccactggggactggggatgggacacctgaggacattctgagacttctttcttccttccttttttttttgtttttttttttaagagcctgtgatagttactgtggagcagccagttcatggggtcccccttggggccccacaccccgtctctcaccaagagttactgattttgctcatccacttccctacacatctatgggtatcacacccaagactacccaccaagctcatacagggaaccacacccaacacttagacatgcgaacaagcagcccccagcgagggtctccttcgccttcaacctcctagtgtctgttagcatcttccttttcatggggggagggaagataaagtgaattgcccagagctgcctttttcttttctttttaaaaattttaagaagttttctttgtggggctggggaggggccggggtcagggagagtcttttttttttttttttttaaatactaaattggaacatttaattccatattaatacaaggggtttgaactggacatcctaatgatgcaattacgtcatcacccagctgattccgggtggttggcaaactcatcgtgtctgtcctgagaggctccacaatgcccacccgcatcgccattctgtagtcttcagggtcagctgttgataaaggggcaggcttgcgttattggcctagattttgctgcagattaaatcctttgaggattctcttctcttttaccatttttctgcgtgctctcactctctctttctctctctagctttttaattcatgaatattttcgtgtctgtctctctctctctctgtgtttcctccagcccttgtctcggagacggtgttttcctcccttgccccattatcttttcacctcccaggtctaccatttcatggtggtcgttgggtccgcctaaaggatttgagcgtttgccattgcaagcatagtgctgtgtcatcctggtccatgtaggactggtgctaaccacctgccatcatgaggatgtgtgctagagtgtgggaccctggccaagtgcaggaatgggccatgccgtctcacccacagtatcacatgtggaaccgcagacagggcccagaagctttagaggtatgaggctgcagaaccggagagattttcctctgtgcagtgctctctggctaaagtcacggtcaaacctaaacaccgagcctcattaacccaagtgaaccaaccaaagtcaccagttcagaagtgctaagctaataggagtctgacccgagggcctgctgcttcctggttaagtatcttttgagattctagaacacatgggagctttttattttcggggaaaaaccgtatttttttcttgtccaattatttctaaagacacactacatagaaagaggccctataaactcaaaaagtcattgggaaacttaaagtctattctactttgcaagaggagaaatgtgttttatgaacgatagatcacatcagaactcctgtggggaggaaaccttataaattaaacacatggcccccttagagaccacaggcgatgtctgtctccatccttccctctccttttctgtcacctttccccctagctggctcctttggacctacccctgtccttgctgacttgtgttgcattgtattccaaacgtgtttacaggttctcttaagcaatgttgtatttgcaggcttttctgaataccaaatctgctttttgtaaagcgtaaaaacatcacaaagtaggtcattccatcaccacccttgtctctctacacattttgcctttggggatctggttggggttttgggttttttgttgttgttgtttatttgttattttaaaggtaaattgcacttttaaaaaaataattggttgacttaatatatttgctttttttctcacctgcacttagaggaaatttgaacaagttggaaaaaaacaatttttgtttcaattctaagaaacacttgcagctctagtattcacttgagtcttcctgtttttcctgtaccgggtcatggtaatttttggttgttttggttgttttcttaaaaaacaagttaaaacctgacgatttctgcaggctgtgtaagcatgtttacctgttggcttgctttgtgtgtctgttaaatgaatgtcatatgtaaatgctaaaataaatcgacagtgtctcagaactgaataactgcagtgacttgatgctctaaaacagtgtaggatttaagaatagatggtttttaatcctggaaattgtgattgtgacccatgagtggaggaactttcagttctaaagctgataaagtgtgtagccagaagagtacttttttttttgtaaccactgtcttgatggcaaaataattatggtaaaaaacaagtctcgtgtttattattccttaagaactctgtgttatattaccatggaacgcctaataaagcaaaatgtggttgtttca

SEQ ID NO: 89681 - DNA, 5465 bp, Homo sapiens
ccgggatccggttttttttgtttttaaaagtgtaatttcctttttatttgcatctgtttatgactgaaaaaaatgactagttattatgaagacactactgttgaagatggatattttaacatggagtttcaacaaaattacttcttgagacagagctgatgtgttttttaaataacgtgattttaagcatatatttgaacaaaactaaaacatttagtattatgaatatgaaaaaagatcagtaaatcaatgtactcttctaggctgaattaaggtagactatttaaggtttcaaaaaagtttggctggggcagaataagttttacaaaacccatgccatccaaaattaagatgacatgtagcagcaagaagtattccaatgtctcataaccagttctcgcaagcaatgtgtattccttactttaaggaagtgtcaaacaaatagaaaaatctggaagaatttactaagtgtaataaattagaggtaaatcgtaataaaagaatttatgtctcacaaaaatattcacaagtgggagttttcttttaccaacttctcagagtccttctagccccctcttcacttctgaaagatgggatttaccaaaatctggtttacatttaacttttcagggacacatgacctgaaaagaaagatgtcagataatactgacattgcctcatgcactttctttgtatcagtccttcttctgtaagtaatcagaattgggtccaaatggcatagaatcaaacattatgtatcatgccaaataccacttcctgcccaacaaaatttcatctttctccagtaatgaagaggtggacattcttgttggactgtagcatctgtgccgcccgctccacaccaaccacggcagctaacctctgggcatcatatttggagtagagaacagtgcaggtccacgtggcctcttctcctctgttggtggctctcagcatattacagatttcactgtaaaagtgtggatatgtcggcagttcatagaaaatcaggttcctgatgcttttattgctgtagtttatttccacccccttccctcctgtttctctctctccttctctctctctctctctctctcttttttttccgccctagctggggctgtgttggaggagaggaagaaagagagacagaggattgcattcatccgttacgttcttgaaatttcctaatagcaagaccagcgaagcggttgcacccttttcaatcttgcaaaggaaaaaaacaaaacaaaacaaaaaaaacccaagtccccttcccggcagtttttgccttaaagctgccctcttgaaattaattttttcccaggagagagatgtcttatcaggggaagaaaaatattccacgcatcacgagcgatcgtcttctgatcaaaggaggtaaaattgttaatgatgaccagtcgttctatgcagacatatacatggaagatgggttgatcaagcaaataggagaaaatctgattgtgccaggaggagtgaagaccatcgaggcccactcccggatggtgatccccggaggaattgacgtccacactcgtttccagatgcctgatcagggaatgacgtctgctgatgatttcttccaaggaaccaaggcggccctggctgggggaaccactatgatcattgaccacgttgttcctgagcctgggacaagcctgctcgctgcctttgaccagtggagggaatgggccgacagcaagtcctgctgtgactactctctgcatgtggacatcagcgagtggcataagggcatccaggaggagatggaagcgcttgtgaaggatcacggggtaaattccttcctcgtgtacatggctttcaaagatcgcttccagctaacggattgccagatttatgaagtactgagtgtgatccgggatattggcgccatagcccaagtccacgcagaaaatggcgacatcattgcagaggagcagcagaggatcctggatctgggcatcacgggccccgagggacatgtgctgagccgacctgaggaggtcgaggccgaagccgtgaatcgtgccatcaccatcgccaaccagaccaactgcccgctgtatatcaccaaggtgatgagcaaaagctctgctgaggtcatcgcccaggcacggaagaagggaactgtggtgtatggcgagcccatcactgccagcttgggaacggacggctcccattactggagcaagaactgggccaaggctgctgcctttgtcacctccccacccttgagccctgatccaaccactccagactttctcaactccttgctgtcctgtggagacctccaggtcacgggcagtgcccattgcacgtttaacactgcccagaaggctgtaggaaaggacaacttcaccctgattccggagggcaccaatggcactgaggagcggatgtccgtcatctgggacaaggctgtggtcactgggaagatggatgagaaccagtttgtggctgtgaccagcaccaatgcagccaaagtcttcaacctttacccccggaaaggccgcattgctgtgggatccgatgccgacctggtcatctgggaccccgacagcgttaaaaccatctctgccaagacacacaacagctctctcgagtacaacatctttgaaggcatggagtgccgcggctccccactggtggtcatcagccaggggaagattgtcctggaggacggcaccctgcatgtcaccgaaggctctggacgctacattccccggaagcccttccctgattttgtttacaagcgtatcaaggcaaggagcaggctggctgagctgagaggggttcctcgtggcctgtatgacggacctgtgtgtgaagtgtctgtgacgcccaagacagtcactccagcctcctcggccaagacgtctcctgccaagcagcaggccccacctgtccggaacctgcaccagtctggattcagtttgtctggtgctcagattgatgacaacattccccgccgcaccacccagcgtatcgtggcgccccccggtggccgtgccaacatcaccagcctgggctagagctcctgggctgtgccgtccactggggactggggatgggacacctgaggacattctgagacttctttcttccttccttttttttttgtttttttttttaagagcctgtgatagttactgtggagcagccagttcatggggtcccccttggggccccacaccccgtctctcaccaagagttactgattttgctcatccacttccctacacatctatgggtatcacacccaagactacccaccaagctcatacagggaaccacacccaacacttagacatgcgaacaagcagcccccagcgagggtctccttcgccttcaacctcctagtgtctgttagcatcttccttttcatggggggagggaagataaagtgaattgcccagagctgcctttttcttttctttttaaaaattttaagaagttttctttgtggggctggggaggggccggggtcagggagagtcttttttttttttttttttaaatactaaattggaacatttaattccatattaatacaaggggtttgaactggacatcctaatgatgcaattacgtcatcacccagctgattccgggtggttggcaaactcatcgtgtctgtcctgagaggctccacaatgcccacccgcatcgccattctgtagtcttcagggtcagctgttgataaaggggcaggcttgcgttattggcctagattttgctgcagattaaatcctttgaggattctcttctcttttaccatttttctgcgtgctctcactctctctttctctctctagctttttaattcatgaatattttcgtgtctgtctctctctctctctgtgtttcctccagcccttgtctcggagacggtgttttcctcccttgccccattatcttttcacctcccaggtctaccatttcatggtggtcgttgggtccgcctaaaggatttgagcgtttgccattgcaagcatagtgctgtgtcatcctggtccatgtaggactggtgctaaccacctgccatcatgaggatgtgtgctagagtgtgggaccctggccaagtgcaggaatgggccatgccgtctcacccacagtatcacatgtggaaccgcagacagggcccagaagctttagaggtatgaggctgcagaaccggagagattttcctctgtgcagtgctctctggctaaagtcacggtcaaacctaaacaccgagcctcattaacccaagtgaaccaaccaaagtcaccagttcagaagtgctaagctaataggagtctgacccgagggcctgctgcttcctggttaagtatcttttgagattctagaacacatgggagctttttattttcggggaaaaaccgtatttttttcttgtccaattatttctaaagacacactacatagaaagaggccctataaactcatttatgaacgatagatcacatcagaactcctgtggggaggaaaccttataaattaaacacatggcccccttagagaccacaggcgatgtctgtctccatccttccctctccttttctgtcacctttccccctagctggctcctttggacctacccctgtccttgctgacttgtgttgcattgtattccaaacgtgtttacaggttctcttaagcaatgttgtatttgcaggcttttctgaataccaaatctgctttttgtaaagcgtaaaaacatcacaaagtaggtcattccatcaccacccttgtctctctacacattttgcctttggggatctggttggggttttgggttttttgttgttgttgtttatttgttattttaaaggtaaattgcacttttaaaaaaataattggttgacttaatatatttgctttttttctcacctgcacttagaggaaatttgaacaagttggaaaaaaacaatttttgtttcaattctaagaaacacttgcagctctagtattcacttgagtcttcctgtttttcctgtaccgggtcatggtaatttttggttgttttggttgttttcttaaaaaacaagttaaaacctgacgatttctgcaggctgtgtaagcatgtttacctgttggcttgctttgtgtgtctgttaaatgaatgtcatatgtaaatgctaaaataaatcgacagtgtctcagaactgaataactgcagtgacttgatgctctaaaacagtgtaggatttaagaatagatggtttttaatcctggaaattgtgattgtgacccatgagtggaggaactttcagttctaaagctgataaagtgtgtagccagaagagtacttttttttttgtaaccactgtcttgatggcaaaataattatggtaaaaaacaagtctcgtgtttattattccttaagaactctgtgttatattaccatggaacgcctaataaagcaaaatgtggttgtttca

SEQ ID NO: 89682 - DNA, 4722 bp, Homo sapiens
ccgggatccggttttttttgtttttaaaagtgtaatttcctttttatttgcatctgtttatgactgaaaaaaatgactagttattatgaagacactactgttgaagatggatattttaacatggagtttcaacaaaattacttcttgagacagagctgatgtgttttttaaataacgtgattttaagcatatatttgaacaaaactaaaacatttagtattatgaatatgaaaaaagatcagtaaatcaatgtactcttctaggctgaattaaggtagactatttaaggtttcaaaaaagtttggctggggcagaataagttttacaaaacccatgccatccaaaattaagatgacatgtagcagcaagaagtattccaatgtctcataaccagttctcgcaagcaatgtgtattccttactttaaggaagtgtcaaacaaatagaaaaatctggaagaatttactaagtgtaataaattagaggtaaatcgtaataaaagaatttatgtctcacaaaaatattcacaagtgggagttttcttttaccaacttctcagagtccttctagccccctcttcacttctgaaagatgggatttaccaaaatctggtttacatttaacttttcagggacacatgacctgaaaagaaagatgtcagataatactgacattgcctcatgcactttctttgtatcagtccttcttctgtaagtaatcagaattgggtccaaatggcatagaatcaaacattatgtatcatgccaaataccacttcctgcccaacaaaatttcatctttctccagtaatgaagaggtggacattcttgttggactgtagcatctgtgccgcccgctccacaccaaccacggcagctaacctctgggcatcatatttggagtagagaacagtgcaggtccacgtggcctcttctcctctgttggtggctctcagcatattacagatttcactgtaaaagtgtggatatgtcggcagttcatagaaaatcaggttcctgatgcttttattgctgtagtttatttccacccccttccctcctgtttctctctctccttctctctctctctctctctctcttttttttccgccctagctggggctgtgttggaggagaggaagaaagagagacagaggattgcattcatccgttacgttcttgaaatttcctaatagcaagaccagcgaagcggttgcacccttttcaatcttgcaaaggaaaaaaacaaaacaaaacaaaaaaaacccaagtccccttcccggcagtttttgccttaaagctgccctcttgaaattaattttttcccaggagagagatgtcttatcaggggaagaaaaatattccacgcatcacgagcgatcgtcttctgatcaaaggaggtaaaattgttaatgatgaccagtcgttctatgcagacatatacatggaagatgggttgatcaagcaaataggagaaaatctgattgtgccaggaggagtgaagaccatcgaggcccactcccggatggtgatccccggaggaattgacgtccacactcgtttccagatgcctgatcagggaatgacgtctgctgatgatttcttccaaggaaccaaggcggccctggctgggggaaccactatgatcattgaccacgttgttcctgagcctgggacaagcctgctcgctgcctttgaccagtggagggaatgggccgacagcaagtcctgctgtgactactctctgcatgtggacatcagcgagtggcataagggcatccaggaggagatggaagcgcttgtgaaggatcacggggtaaattccttcctcgtgtacatggctttcaaagatcgcttccagctaacggattgccagatttatgaagtactgagtgtgatccgggatattggcgccatagcccaagtccacgcagaaaatggcgacatcattgcagaggagcagcagaggatcctggatctgggcatcacgggccccgagggacatgtgctgagccgacctgaggaggtcgaggccgaagccgtgaatcgtgccatcaccatcgccaaccagaccaactgcccgctgtatatcaccaaggtgatgagcaaaagctctgctgaggtcatcgcccaggcacggaagaagggaactgtggtgtatggcgagcccatcactgccagcttgggaacggacggctcccattactggagcaagaactgggccaaggctgctgcctttgtcacctccccacccttgagccctgatccaaccactccagactttctcaactccttgctgtcctgtggagacctccaggtcacgggcagtgcccattgcacgtttaacactgcccagaaggctgtaggaaaggacaacttcaccctgattccggagggcaccaatggcactgaggagcggatgtccgtcatctgggacaaggctgtggtcactgggaagatggatgagaaccagtttgtggctgtgaccagcaccaatgcagccaaagtcttcaacctttacccccggaaaggccgcattgctgtgggatccgatgccgacctggtcatctgggaccccgacagcgttaaaaccatctctgccaagacacacaacagctctctcgagtacaacatctttgaaggcatggagtgccgcggctccccactggtggtcatcagccaggggaagattgtcctggaggacggcaccctgcatgtcaccgaaggctctggacgctacattccccggaagcccttccctgattttgtttacaagcgtatcaaggcaaggagcaggctggctgagctgagaggggttcctcgtggcctgtatgacggacctgtgtgtgaagtgtctgtgacgcccaagacagtcactccagcctcctcggccaagacgtctcctgccaagcagcaggccccacctgtccggaacctgcaccagtctggattcagtttgtctggtgctcagattgatgacaacattccccgccgcaccacccagcgtatcgtggcgccccccggtggccgtgccaacatcaccagcctgggctagagctcctgggctgtgccgtccactggggactggggatgggacacctgaggacattctgagacttctttcttccttccttttttttttgtttttttttttaagagcctgtgatagttactgtggagcagccagttcatggggtcccccttggggccccacaccccgtctctcaccaagagttactgattttgctcatccacttccctacacatctatgggtatcacacccaagactacccaccaagctcatacagggaaccacacccaacacttagacatgcgaacaagcagcccccagcgagggtctccttcgccttcaacctcctagtgtctgttagcatcttccttttcatggggggagggaagataaagtgaattgcccagagctgcctttttcttttctttttaaaaattttaagaagttttctttgtggggctggggaggggccggggtcagggagagtcttttttttttttttttttaaatactaaattggaacatttaattccatattaatacaaggggtttgaactggacatcctaatgatgcaattacgtcatcacccagctgattccgggtggttggcaaactcatcgtgtctgtcctgagaggctccacaatgcccacccgcatcgccattctgtagtcttcagggtcagctgttgataaaggggcaggcttgcgttattggcctagattttgctgcagattaaatcctttgaggattctcttctcttttaccatttttctgcgtgctctcactctctctttctctctctagctttttaattcatgaatattttcgtgtctgtctctctctctctctgtgtttcctccagcccttgtctcggagacggtgttttcctcccttgccccattatcttttcacctcccaggtctaccatttcatggtggtcgttgggtccgcctaaaggatttgagcgtttgccattgcaagcatagtgctgtgtcatcctggtccatgtaggactggtgctaaccacctgccatcatgaggatgtgtgctagagtgtgggaccctggccaagtgcaggaatgggccatgccgtctcacccacagtatcacatgtggaaccgcagacagggcccagaagctttagaggtatgaggctgcagaaccggagagattttcctctgtgcagtgctctctggctaaagtcacggtcaaacctaaacaccgagcctcattaacccaagtgaaccaaccaaagtcaccagttcagaagtgctaagctaataggagtctgacccgagggcctgctgcttcctggttaagtatcttttgagattctagaacacatgggagctttttattttcggggaaaaaccgtatttttttcttgtccaattatttctaaagacacactacatagaaagaggccctataaactcaaaaagtcattgggaaacttaaagtctattctactttgcaagaggagaaatgtgttttatgaacgatagatcacatcagaactcctgtggggaggaaaccttataaattaaacacatggcccccttagacctgagcaagccaggcctggcttgctcaggtctacttctcccaaaactgcctgcttccagggacctgagctgaagctgaatgcctcctgaggaaagatgccattggcgaagtctcacctaccctc

SEQ ID NO: 89683 - DNA, 3042 bp, Homo sapiens
ccgggatccggttttttttgtttttaaaagtgtaatttcctttttatttgcatctgtttatgactgaaaaaaatgactagttattatgaagacactactgttgaagatggatattttaacatggagtttcaacaaaattacttcttgagacagagctgatgtgttttttaaataacgtgattttaagcatatatttgaacaaaactaaaacatttagtattatgaatatgaaaaaagatcagtaaatcaatgtactcttctaggctgaattaaggtagactatttaaggtttcaaaaaagtttggctggggcagaataagttttacaaaacccatgccatccaaaattaagatgacatgtagcagcaagaagtattccaatgtctcataaccagttctcgcaagcaatgtgtattccttactttaaggaagtgtcaaacaaatagaaaaatctggaagaatttactaagtgtaataaattagaggtaaatcgtaataaaagaatttatgtctcacaaaaatattcacaagtgggagttttcttttaccaacttctcagagtccttctagccccctcttcacttctgaaagatgggatttaccaaaatctggtttacatttaacttttcagggacacatgacctgaaaagaaagatgtcagataatactgacattgcctcatgcactttctttgtatcagtccttcttctgtaagtaatcagaattgggtccaaatggcatagaatcaaacattatgtatcatgccaaataccacttcctgcccaacaaaatttcatctttctccagtaatgaagaggtggacattcttgttggactgtagcatctgtgccgcccgctccacaccaaccacggcagctaacctctgggcatcatatttggagtagagaacagtgcaggtccacgtggcctcttctcctctgttggtggctctcagcatattacagatttcactgtaaaagtgtggatatgtcggcagttcatagaaaatcaggttcctgatgcttttattgctgtagtttatttccacccccttccctcctgtttctctctctccttctctctctctctctctctctcttttttttccgccctagctggggctgtgttggaggagaggaagaaagagagacagaggattgcattcatccgttacgttcttgaaatttcctaatagcaagaccagcgaagcggttgcacccttttcaatcttgcaaaggaaaaaaacaaaacaaaacaaaaaaaacccaagtccccttcccggcagtttttgccttaaagctgccctcttgaaattaattttttcccaggagagagatgtcttatcaggggaagaaaaatattccacgcatcacgagcgatcgtcttctgatcaaaggaggtaaaattgttaatgatgaccagtcgttctatgcagacatatacatggaagatgggttgatcaagcaaataggagaaaatctgattgtgccaggaggagtgaagaccatcgaggcccactcccggatggtgatccccggaggaattgacgtcatcctggtccatgtaggactggtgctaaccacctgccatcatgaggatgtgtgctagagtgtgggaccctggccaagtgcaggaatgggccatgccgtctcacccacagtatcacatgtggaaccgcagacagggcccagaagctttagaggtatgaggctgcagaaccggagagattttcctctgtgcagtgctctctggctaaagtcacggtcaaacctaaacaccgagcctcattaacccaagtgaaccaaccaaagtcaccagttcagaagtgctaagctaataggagtctgacccgagggcctgctgcttcctggttaagtatcttttgagattctagaacacatgggagctttttattttcggggaaaaaccgtatttttttcttgtccaattatttctaaagacacactacatagaaagaggccctataaactcaaaaagtcattgggaaacttaaagtctattctactttgcaagaggagaaatgtgttttatgaacgatagatcacatcagaactcctgtggggaggaaaccttataaattaaacacatggcccccttagagaccacaggcgatgtctgtctccatccttccctctccttttctgtcacctttccccctagctggctcctttggacctacccctgtccttgctgacttgtgttgcattgtattccaaacgtgtttacaggttctcttaagcaatgttgtatttgcaggcttttctgaataccaaatctgctttttgtaaagcgtaaaaacatcacaaagtaggtcattccatcaccacccttgtctctctacacattttgcctttggggatctggttggggttttgggttttttgttgttgttgtttatttgttattttaaaggtaaattgcacttttaaaaaaataattggttgacttaatatatttgctttttttctcacctgcacttagaggaaatttgaacaagttggaaaaaaacaatttttgtttcaattctaagaaacacttgcagctctagtattcacttgagtcttcctgtttttcctgtaccgggtcatggtaatttttggttgttttggttgttttcttaaaaaacaagttaaaacctgacgatttctgcaggctgtgtaagcatgtttacctgttggcttgctttgtgtgtctgttaaatgaatgtcatatgtaaatgctaaaataaatcgacagtgtctcagaactgaataactgcagtgacttgatgctctaaaacagtgtaggatttaagaatagatggtttttaatcctggaaattgtgattgtgacccatgagtggaggaactttcagttctaaagctgataaagtgtgtagccagaagagtacttttttttttgtaaccactgtcttgatggcaaaataattatggtaaaaaacaagtctcgtgtttattattccttaagaactctgtgttatattaccatggaacgcctaataaagcaaaatgtggttgtttca

SEQ ID NO: 89684 - DNA, 1543 bp, Homo sapiens
  misc_feature (3)..(3): n is a, c, g, or t
gtngagacggcatggcccattcctgcacttggccagggtcccacactggtcatcctggtccatgtaggactggtgctaaccacctgccatcatgaggatgtgtgctagagtgtgggaccctggccaagtgcaggaatgggccatgccgtctcacccacagtatcacatgtggaaccgcagacagggcccagaagctttagaggtatgaggctgcagaaccggagagattttcctctgtgcagtgctctctggctaaagtcacggtcaaacctaaacaccgagcctcattaacccaagtgaaccaaccaaagtcaccagttcagaagtgctaagctaataggagtctgacccgagggcctgctgcttcctggttaagtatcttttgagattctagaacacatgggagctttttattttcggggaaaaaccgtatttttttcttgtccaattatttctaaagacacactacatagaaagaggccctataaactcaaaaagtcattgggaaacttaaagtctattctactttgcaagaggagaaatgtgttttatgaacgatagatcacatcagaactcctgtggggaggaaaccttataaattaaacacatggcccccttagagaccacaggcgatgtctgtctccatccttccctctccttttctgtcacctttccccctagctggctcctttggacctacccctgtccttgctgacttgtgttgcattgtattccaaacgtgtttacaggttctcttaagcaatgttgtatttgcaggcttttctgaataccaaatctgctttttgtaaagcgtaaaaacatcacaaagtaggtcattccatcaccacccttgtctctctacacattttgcctttggggatctggttggggttttgggttttttgttgttgttgtttatttgttattttaaaggtaaattgcacttttaaaaaaataattggttgacttaatatatttgctttttttctcacctgcacttagaggaaatttgaacaagttggaaaaaaacaatttttgtttcaattctaagaaacacttgcagctctagtattcacttgagtcttcctgtttttcctgtaccgggtcatggtaatttttggttgttttggttgttttcttaaaaaacaagttaaaacctgacgatttctgcaggctgtgtaagcatgtttacctgttggcttgctttgtgtgtctgttaaatgaatgtcatatgtaaatgctaaaataaatcgacagtgtctcagaactgaataactgcagtgacttgatgctctaaaacagtgtaggatttaagaatagatggtttttaatcctggaaattgtgattgtgacccatgagtggaggaactttcagttctaaagctgataaagtgtgtagccagaagagtacttttttttttgtaaccactgtcttgatggcaaaataattatggtaaaaaacaagtctcgtgtttattattccttaagaactctgtgttatattaccatggaacgcctaataaagcaaaatgtggttgtttca

SEQ ID NO: 89685 - DNA, 2452 bp, Homo sapiens
ccgggatccggttttttttgtttttaaaagtgtaatttcctttttatttgcatctgtttatgactgaaaaaaatgactagttattatgaagacactactgttgaagatggatattttaacatggagtttcaacaaaattacttcttgagacagagctgatgtgttttttaaataacgtgattttaagcatatatttgaacaaaactaaaacatttagtattatgaatatgaaaaaagatcagtaaatcaatgtactcttctaggctgaattaaggtagactatttaaggtttcaaaaaagtttggctggggcagaataagttttacaaaacccatgccatccaaaattaagatgacatgtagcagcaagaagtattccaatgtctcataaccagttctcgcaagcaatgtgtattccttactttaaggaagtgtcaaacaaatagaaaaatctggaagaatttactaagtgtaataaattagaggtaaatcgtaataaaagaatttatgtctcacaaaaatattcacaagtgggagttttcttttaccaacttctcagagtccttctagccccctcttcacttctgaaagatgggatttaccaaaatctggtttacatttaacttttcagggacacatgacctgaaaagaaagatgtcagataatactgacattgcctcatgcactttctttgtatcagtccttcttctgtaagtaatcagaattgggtccaaatggcatagaatcaaacattatgtatcatgccaaataccacttcctgcccaacaaaatttcatctttctccagtaatgaagaggtggacattcttgttggactgtagcatctgtgccgcccgctccacaccaaccacggcagctaacctctgggcatcatatttggagtagagaacagtgcaggtccacgtggcctcttctcctctgttggtggctctcagcatattacagatttcactgtaaaagtgtggatatgtcggcagttcatagaaaatcaggttcctgatgcttttattgctgtagtttatttccacccccttccctcctgtttcttctctctttctctctctagctttttaattcatgaatattttcgtgtctgtctctctctctctctgtgtttcctccagcccttgtctcggagacggtgttttcctcccttgccccattatcttttcacctcccaggtctaccatttcatggtggtcgttgggtccgcctaaaggatttgagcgtttgccattgcaagcatagtgctgtttcctggttaagtatcttttgagattctagaacacatgggagctttttattttcggggaaaaaccgtatttttttcttgtccaattatttctaaagacacactacatagaaagaggccctataaactcaaaaagtcattgggaaacttaaagtctattctactttgcaagaggagaaatgtgttttatgaacgatagatcacatcagaactcctgtggggaggaaaccttataaattaaacacatggcccccttagagaccacaggcgatgtctgtctccatccttccctctccttttctgtcacctttccccctagctggctcctttggacctacccctgtccttgctgacttgtgttgcattgtattccaaacgtgtttacaggttctcttaagcaatgttgtatttgcaggcttttctgaataccaaatctgctttttgtaaagcgtaaaaacatcacaaagtaggtcattccatcaccacccttgtctctctacacattttgcctttggggatctggttggggttttgggttttttgttgttgttgtttatttgttattttaaaggtaaattgcacttttaaaaaaataattggttgacttaatatatttgctttttttctcacctgcacttagaggaaatttgaacaagttggaaaaaaacaatttttgtttcaattctaagaaacacttgcagctctagtattcacttgagtcttcctgtttttcctgtaccgggtcatggtaatttttggttgttttggttgttttcttaaaaaacaagttaaaacctgacgatttctgcaggctgtgtaagcatgtttacctgttggcttgctttgtgtgtctgttaaatgaatgtcatatgtaaatgctaaaataaatcgacagtgtctcagaactgaataactgcagtgacttgatgctctaaaacagtgtaggatttaagaatagatggtttttaatcctggaaattgtgattgtgacccatgagtggaggaactttcagttctaaagctgataaagtgtgtagccagaagagtacttttttttttgtaaccactgtcttgatggcaaaataattatggtaaaaaacaagtctcgtgtttattattccttaagaactctgtgttatattaccatggaacgcctaataaagcaaaatgtggttgtttca

SEQ ID NO: 89686 - DNA, 1489 bp, Homo sapiens
ctctgtgtaatcttatcactgcccattgttggcttttggtgttcttcttcttcactatcagacctgtgaaacttttttctgtccatatgccggtctgaatggaaggagtcattccgcatttctgtatcctctcccgttattctcccgtgcgcggtcatcatcgtagacttctggcttcggttggtgtctggacgcatctccagtttcgtgagtcactgccagcccccttctgaggccccccattctcggagtcacgtgactcggggttgggttagctcctcattttccgaatcactgcctgggttccttgggggatcttcactttccgagtcattgattcggggtatgggagctttttattttcggggaaaaaccgtatttttttcttgtccaattatttctaaagacacactacatagaaagaggccctataaactcaaaaagtcattgggaaacttaaagtctattctactttgcaagaggagaaatgtgttttatgaacgatagatcacatcagaactcctgtggggaggaaaccttataaattaaacacatggcccccttagagaccacaggcgatgtctgtctccatccttccctctccttttctgtcacctttccccctagctggctcctttggacctacccctgtccttgctgacttgtgttgcattgtattccaaacgtgtttacaggttctcttaagcaatgttgtatttgcaggcttttctgaataccaaatctgctttttgtaaagcgtaaaaacatcacaaagtaggtcattccatcaccacccttgtctctctacacattttgcctttggggatctggttggggttttgggttttttgttgttgttgtttatttgttattttaaaggtaaattgcacttttaaaaaaataattggttgacttaatatatttgctttttttctcacctgcacttagaggaaatttgaacaagttggaaaaaaacaatttttgtttcaattctaagaaacacttgcagctctagtattcacttgagtcttcctgtttttcctgtaccgggtcatggtaatttttggttgttttggttgttttcttaaaaaacaagttaaaacctgacgatttctgcaggctgtgtaagcatgtttacctgttggcttgctttgtgtgtctgttaaatgaatgtcatatgtaaatgctaaaataaatcgacagtgtctcagaactgaataactgcagtgacttgatgctctaaaacagtgtaggatttaagaatagatggtttttaatcctggaaattgtgattgtgacccatgagtggaggaactttcagttctaaagctgataaagtgtgtagccagaagagtacttttttttttgtaaccactgtcttgatggcaaaataattatggtaaaaaacaagtctcgtgtttattattccttaagaactctgtgttatattaccatggaacgcctaataaagcaaaatgtggttgtttca

SEQ ID NO: 89687 - DNA, 985 bp, Homo sapiens
  misc_feature (20)..(21): n is a, c, g, or t
gctgtgatctagcggatctnnccgactagcccgacagcctgactctaacttactataagatgagaccacaggcgatgtctgtctccatccttccctctccttttctgtcacctttccccctagctggctcctttggacctacccctgtccttgctgacttgtgttgcattgtattccaaacgtgtttacaggttctcttaagcaatgttgtatttgcaggcttttctgaataccaaatctgctttttgtaaagcgtaaaaacatcacaaagtaggtcattccatcaccacccttgtctctctacacattttgcctttggggatctggttggggttttgggttttttgttgttgttgtttatttgttattttaaaggtaaattgcacttttaaaaaaataattggttgacttaatatatttgctttttttctcacctgcacttagaggaaatttgaacaagttggaaaaaaacaatttttgtttcaattctaagaaacacttgcagctctagtattcacttgagtcttcctgtttttcctgtaccgggtcatggtaatttttggttgttttggttgttttcttaaaaaacaagttaaaacctgacgatttctgcaggctgtgtaagcatgtttacctgttggcttgctttgtgtgtctgttaaatgaatgtcatatgtaaatgctaaaataaatcgacagtgtctcagaactgaataactgcagtgacttgatgctctaaaacagtgtaggatttaagaatagatggtttttaatcctggaaattgtgattgtgacccatgagtggaggaactttcagttctaaagctgataaagtgtgtagccagaagagtacttttttttttgtaaccactgtcttgatggcaaaataattatggtaaaaaacaagtctcgtgtttattattccttaagaactctgtgttatattaccatggaacgcctaataaagcaaaatgtggttgtttca

SEQ ID NO: 89688 - DNA, 3317 bp, Homo sapiens
ccgggatccggttttttttgtttttaaaagtgtaatttcctttttatttgcatctgtttatgactgaaaaaaatgactagttattatgaagacactactgttgaagatggatattttaacatggagtttcaacaaaattacttcttgagacagagctgatgtgttttttaaataacgtgattttaagcatatatttgaacaaaactaaaacatttagtattatgaatatgaaaaaagatcagtaaatcaatgtactcttctaggctgaattaaggtagactatttaaggtttcaaaaaagtttggctggggcagaataagttttacaaaacccatgccatccaaaattaagatgacatgtagcagcaagaagtattccaatgtctcataaccagttctcgcaagcaatgtgtattccttactttaaggaagtgtcaaacaaatagaaaaatctggaagaatttactaagtgtaataaattagaggtaaatcgtaataaaagaatttatgtctcacaaaaatattcacaagtgggagttttcttttaccaacttctcagagtccttctagccccctcttcacttctgaaagatgggatttaccaaaatctggtttacatttaacttttcagggacacatgacctgaaaagaaagatgtcagataatactgacattgcctcatgcactttctttgtatcagtccttcttctgtaagtaatcagaattgggtccaaatggcatagaatcaaacattatgtatcatgccaaataccacttcctgcccaacaaaatttcatctttctccagtaatgaagaggtggacattcttgttggactgtagcatctgtgccgcccgctccacaccaaccacggcagctaacctctgggcatcatatttggagtagagaacagtgcaggtccacgtggcctcttctcctctgttggtggctctcagcatattacagatttcactgtaaaagtgtggatatgtcggcagttcatagaaaatcaggttcctgatgcttttattgctgtagtttatttccacccccttccctcctgtttctctctctccttctctctctctctctctctctcttttttttccgccctagctggggctgtgttggaggagaggaagaaagagagacagaggattgcattcatccgttacgttcttgaaatttcctaatagcaagaccagcgaagcggttgcacccttttcaatcttgcaaaggaaaaaaacaaaacaaaacaaaaaaaacccaagtccccttcccggcagtttttgccttaaagctgccctcttgaaattaattttttcccaggagagagatgtcttatcaggggaagaaaaatattccacgcatcacgagcgatcgtcttctgatcaaaggaggtaaaattgttaatgatgaccagtcgttctatgcagacatatacatggaagatgggttgatcaagcaaataggagaaaatctgattgtgccaggaggagtgaagaccatcgaggcccactcccggatggtgatccccggaggaattgacgtccacactcgtttccagatgcctgatcagggaatgacgtctgctgatgatttcttccaaggaaccaaggcggccctggctgggggaaccactatgatcattgaccacgttgttcctgagcctgggacaagcctgctcgctgcctttgaccagtggagggaatgggccgacagcaagtcctgctgtgactactctctgcatgtggacatcagcgagtggcataagggcatccaggaggagatggaagcgcttgtgaaggatcacggggtaaattccttcctcgtgtacatggctttcaaagatcgcttccagctaacggattgccagatttatgaagtactgagtgtgatccgggatattggcgccatagcccaagtccacgcagaaaatggcgacatcattgcagaggagcagcagaggatcctggatctgggcatcacgggccccgagggacatgtgctgagccgacctgaggaggtcgaggccgaagccgtgaatcgtgccatcaccatcgccaaccagaccaactgcccgctgtatatcaccaaggtgatgagcaaaagctctgctgaggtcatcgcccaggcacggaagaagggaactgtggtgtatggcgagcccatcactgccagcttgggaacggacggctcccattactggagcaagaactgggccaaggctgctgcctttgtcacctccccacccttgagccctgatccaaccactccagactttctcaactccttgctgtcctgtggagacctccaggtcacgggcagtgcccattgcacgtttaacactgcccagaaggctgtaggaaaggacaacttcaccctgattccggagggcaccaatggcactgaggagcggatgtccgtcatctgggacaaggctgtggtcactgggaagatggatgagaaccagtttgtggctgtgaccagcaccaatgcagccaaagtcttcaacctttaccccggggcgatgtggagcgcgggccgcggcggggctgcctggccggtgctgttggggctgctgctggcgctgttagtgccgggcggtggtgccgccaagaccggtgcggagctcgtgacctgcgggtcggtgctgaagctgctcaatacgcaccaccgcgtgcggctgcactcgcacgacatcaaatacggatccggcagcggccagcaatcggtgaccggcgtagaggcgtcggacgacgccaatagctactggcggatccgcggcggctcggagggcgggtgcccgcgcgggtccccggtgcgctgcgggcaggcggtgaggctcacgcatgtgcttacgggcaagaacctgcacacgcaccacttcccgtcgccgctgtccaacaaccaggaggtgagtgcctttggggaagacggcgagggcgacgacctggacctatggacagtgcgctgctctggacagcactgggagcgtgaggctgctgtgcgcttccagcatgtgggcacctctgtgttcctgtcagtcacgggtgagcagtatggaagccccatccgtgggcagcatgaggtccacggcatgcccagtgccaacacgcacaatacgtggaaggccatggaaggcatcttcatcaagcctagtgtggagccctctgcaggtcacgatgaactctgagtgtgtggatggatgggtggatggagggtggcaggtggggcgtctgcagggccactcttggcagagactttgggtttgtaggggtcctcaagtgcctttgtgattaaagaatgttggtctatg

SEQ ID NO: 89689 - DNA, 2652 bp, Homo sapiens
ccgggatccggttttttttgtttttaaaagtgtaatttcctttttatttgcatctgtttatgactgaaaaaaatgactagttattatgaagacactactgttgaagatggatattttaacatggagtttcaacaaaattacttcttgagacagagctgatgtgttttttaaataacgtgattttaagcatatatttgaacaaaactaaaacatttagtattatgaatatgaaaaaagatcagtaaatcaatgtactcttctaggctgaattaaggtagactatttaaggtttcaaaaaagtttggctggggcagaataagttttacaaaacccatgccatccaaaattaagatgacatgtagcagcaagaagtattccaatgtctcataaccagttctcgcaagcaatgtgtattccttactttaaggaagtgtcaaacaaatagaaaaatctggaagaatttactaagtgtaataaattagaggtaaatcgtaataaaagaatttatgtctcacaaaaatattcacaagtgggagttttcttttaccaacttctcagagtccttctagccccctcttcacttctgaaagatgggatttaccaaaatctggtttacatttaacttttcagggacacatgacctgaaaagaaagatgtcagataatactgacattgcctcatgcactttctttgtatcagtccttcttctgtaagtaatcagaattgggtccaaatggcatagaatcaaacattatgtatcatgccaaataccacttcctgcccaacaaaatttcatctttctccagtaatgaagaggtggacattcttgttggactgtagcatctgtgccgcccgctccacaccaaccacggcagctaacctctgggcatcatatttggagtagagaacagtgcaggtccacgtggcctcttctcctctgttggtggctctcagcatattacagatttcactgtaaaagtgtggatatgtcggcagttcatagaaaatcaggttcctgatgcttttattgctgtagtttatttccacccccttccctcctgtttctctctctccttctctctctctctctctctctcttttttttccgccctagctggggctgtgttggaggagaggaagaaagagagacagaggattgcattcatccgttacgttcttgaaatttcctaatagcaagaccagcgaagcggttgcacccttttcaatcttgcaaaggaaaaaaacaaaacaaaacaaaaaaaacccaagtccccttcccggcagtttttgccttaaagctgccctcttgaaattaattttttcccaggagagagatgtcttatcaggggaagaaaaatattccacgcatcacgagcgatcgtcttctgatcaaaggaggtaaaattgttaatgatgaccagtcgttctatgcagacatatacatggaagatgggttgatcaagcaaataggagaaaatctgattgtgccaggaggagtgaagaccatcgaggcccactcccggatggtgatccccggaggaattgacgtccacactcgtttccagatgcctgatcagggaatgacgtctgctgatgatttcttccaaggaaccaaggcggccctggctgggggaaccactatgatcattgaccacgttgttcctgagcctgggacaagcctgctcgctgcctttgaccagtggagggaatgggccgacagcaagtcctgctgtgactactctctgcatgtggacatcagcgagtggcataagggcatccaggaggagatggaagcgcttgtgaaggatcacggggtaaattccttcctcgtgtacatggctttcaaagatcgcttccagctaacggattgccagatttatgaagtactgagtgtgatccgggatattggcgccatagcccaagtccacgcagaaaatggcgacatcattgcagaggagcagcagaggatcctggatctgggcatcacgggccccgagggacatgtgctgagccgacctgaggaggtcgaggccgaagccgtgaatcgtgccatcaccatcgccaaccagaccaactgcccgctgtatatcaccaaggtgatgagcaaaagctctgctgaggtcatcgcccaggcacggaagaagggaactgtggtgtatggcgagcccatcactgccagcttgggaacggacggctcccattactggagcaagaactgggccaaggctgctgcctttgtcacctccccacccttgagccctgatccaaccactccagactttctcaactccttgctgtcctgtggagacctccaggtcacgggcagtgcccattgcacgtttaacactgcccagaaggctgtaggaaaggacaacttcaccctgattccggagggcaccaatggcactgaggagcggatgtccgtcatctgggacaaggctgtggtcactgggaagatggatgagaaccagtttgtggctgtgaccagcaccaatgcagccaaagtcttcaacctttacccccggaaaggccgcattgctgtgggatccgatgccgacctggtcatctgggaccccgacagcgttaaaaccatctctgccaagacacacaacagcttttgatcacattttgaggctgcagggcgggttccca

SEQ ID NO: 89690 - DNA, 2003 bp, Homo sapiens
ccgggatccggttttttttgtttttaaaagtgtaatttcctttttatttgcatctgtttatgactgaaaaaaatgactagttattatgaagacactactgttgaagatggatattttaacatggagtttcaacaaaattacttcttgagacagagctgatgtgttttttaaataacgtgattttaagcatatatttgaacaaaactaaaacatttagtattatgaatatgaaaaaagatcagtaaatcaatgtactcttctaggctgaattaaggtagactatttaaggtttcaaaaaagtttggctggggcagaataagttttacaaaacccatgccatccaaaattaagatgacatgtagcagcaagaagtattccaatgtctcataaccagttctcgcaagcaatgtgtattccttactttaaggaagtgtcaaacaaatagaaaaatctggaagaatttactaagtgtaataaattagaggtaaatcgtaataaaagaatttatgtctcacaaaaatattcacaagtgggagttttcttttaccaacttctcagagtccttctagccccctcttcacttctgaaagatgggatttaccaaaatctggtttacatttaacttttcagggacacatgacctgaaaagaaagatgtcagataatactgacattgcctcatgcactttctttgtatcagtccttcttctgtaagtaatcagaattgggtccaaatggcatagaatcaaacattatgtatcatgccaaataccacttcctgcccaacaaaatttcatctttctccagtaatgaagaggtggacattcttgttggactgtagcatctgtgccgcccgctccacaccaaccacggcagctaacctctgggcatcatatttggagtagagaacagtgcaggtccacgtggcctcttctcctctgttggtggctctcagcatattacagatttcactgtaaaagtgtggatatgtcggcagttcatagaaaatcaggttcctgatgcttttattgctgtagtttatttccacccccttccctcctgtttctctctctccttctctctctctctctctctctcttttttttccgccctagctggggctgtgttggaggagaggaagaaagagagacagaggattgcattcatccgttacgttcttgaaatttcctaatagcaagaccagcgaagcggttgcacccttttcaatcttgcaaaggaaaaaaacaaaacaaaacaaaaaaaacccaagtccccttcccggcagtttttgccttaaagctgccctcttgaaattaattttttcccaggagagagatgtcttatcaggggaagaaaaatattccacgcatcacggcacaaacatacgaagcagggacgaagaaaaaaaaaaaaagagagacaaaaaaagaagagaagaaagaagaagaaaagaaaatagagaaaaaaagaaaaatacaaaaagagagacagaagagaaaaaaaaaaaaaaaaaaaaaaaaaaaaaaaaaaaaaaaaggaaaaaaaaaaaaaaaaaaaagtaccgggtcatggtaatttttggttgttttggttgttttcttaaaaaacaagttaaaacctgacgatttctgcaggctgtgtaagcatgtttacctgttggcttgctttgtgtgtctgttaaatgaatgtcatatgtaaatgctaaaataaatcgacagtgtctcagaactgaataactgcagtgacttgatgctctaaaacagtgtaggatttaagaatagatggtttttaatcctggaaattgtgattgtgacccatgagtggaggaactttcagttctaaagctgataaagtgtgtagccagaagagtacttttttttttgtaaccactgtcttgatggcaaaataattatggtaaaaaacaagtctcgtgtttattattccttaagaactctgtgttatattaccatggaacgcctaataaagcaaaatgtggttgtttca

SEQ ID NO: 89691 - DNA, 1888 bp, Homo sapiens
ccgggatccggttttttttgtttttaaaagtgtaatttcctttttatttgcatctgtttatgactgaaaaaaatgactagttattatgaagacactactgttgaagatggatattttaacatggagtttcaacaaaattacttcttgagacagagctgatgtgttttttaaataacgtgattttaagcatatatttgaacaaaactaaaacatttagtattatgaatatgaaaaaagatcagtaaatcaatgtactcttctaggctgaattaaggtagactatttaaggtttcaaaaaagtttggctggggcagaataagttttacaaaacccatgccatccaaaattaagatgacatgtagcagcaagaagtattccaatgtctcataaccagttctcgcaagcaatgtgtattccttactttaaggaagtgtcaaacaaatagaaaaatctggaagaatttactaagtgtaataaattagaggtaaatcgtaataaaagaatttatgtctcacaaaaatattcacaagtgggagttttcttttaccaacttctcagagtccttctagccccctcttcacttctgaaagatgggatttaccaaaatctggtttacatttaacttttcagggacacatgacctgaaaagaaagatgtcagataatactgacattgcctcatgcactttctttgtatcagtccttcttctgtaagtaatcagaattgggtccaaatggcatagaatcaaacattatgtatcatgccaaataccacttcctgcccaacaaaatttcatctttctccagtaatgaagaggtggacattcttgttggactgtagcatctgtgccgcccgctccacaccaaccacggcagctaacctctgggcatcatatttggagtagagaacagtgcaggtccacgtggcctcttctcctctgttggtggctctcagcatattacagatttcactgtaaaagtgtggatatgtcggcagttcatagaaaatcaggttcctgatgcttttattgctgtagtttatttccacccccttccctcctgtttctctctctccttctctctctctctctctctctcttttttttccgccctagctggggctgtgttggaggagaggaagaaagagagacagaggattgcattcatccgttacgttcttgaaatttcctaatagcaagaccagcgaagcggttgcacccttttcaatcttgcaaaggaaaaaaacaaaacaaaacaaaaaaaacccaagtccccttcccggcagtttttgccttaaagctgccctcttgaaattaattttttcccaggagagagatgtcttatcaggggaagaaaaatattccacgcatcacggcacaaacatacgaagcagggacgaagaaaaaaaaaaaaagagagacaaaaaaagaagagaagaaagaagaagaaaagaaaatagagaaaaaaagaaaaatacaaaaagagagacagaagagaaaaaaaaaaaaaaaaaaaaaaaaaaaaaaaaaaaaaaaaggaaaaaaaaaaaaaaaaaaaagtaccgggtcatggtaatttttggttgttttggttgttttcttaaaaaacaagttaaaacctgacgatttctgcaggctgtgtaagcatgtttacctgttggcttgctttgtgtgtctgttaaatgaatgtcatatgtaaatgctaaaataaatcgacagtgtctcagaactgaataactgcagtgacttgatgctctaaaacagtgtaggatttaagaatagatggtttttaatcctggaaattgtgattgtgacccatgagtggaggaactttcagttctaaagctgataaagtgtgtagccagaagagctcggccgcgaccacgctaa

SEQ ID NO: 89692 - DNA, 322 bp, Homo sapiens
ttcctaatagcaagaccagcgaagcggttgcacccttttcaatcttgcaaaggaaaaaaacaaaacaaaacaaaaaaaacccaagtccccttcccggcagtttttgccttaaagctgccctcttgaaattaattttttcccaggagagagatgtcttatcaggggaagaaaaatattccacgcatcacgcggtgagtttggtacttgggaaatctgcggtcggccagccaccttttgtagcacagaaggtctaaggaatttttaaaaaggaggggaaaggagagggaccgaactttttttttcctttctgttgctaacggag

SEQ ID NO: 89693 - DNA, 5460 bp, Homo sapiens
ccgggatccggttttttttgtttttaaaagtgtaatttcctttttatttgcatctgtttatgactgaaaaaaatgactagttattatgaagacactactgttgaagatggatattttaacatggagtttcaacaaaattacttcttgagacagagctgatgtgttttttaaataacgtgattttaagcatatatttgaacaaaactaaaacatttagtattatgaatatgaaaaaagatcagtaaatcaatgtactcttctaggctgaattaaggtagactatttaaggtttcaaaaaagtttggctggggcagaataagttttacaaaacccatgccatccaaaattaagatgacatgtagcagcaagaagtattccaatgtctcataaccagttctcgcaagcaatgtgtattccttactttaaggaagtgtcaaacaaatagaaaaatctggaagaatttactaagtgtaataaattagaggtaaatcgtaataaaagaatttatgtctcacaaaaatattcacaagtgggagttttcttttaccaacttctcagagtccttctagccccctcttcacttctgaaagatgggatttaccaaaatctggtttacatttaacttttcagggacacatgacctgaaaagaaagatgtcagataatactgacattgcctcatgcactttctttgtatcagtccttcttctgtaagtaatcagaattgggtccaaatggcatagaatcaaacattatgtatcatgccaaataccacttcctgcccaacaaaatttcatctttctccagtaatgaagaggtggacattcttgttggactgtagcatctgtgccgcccgctccacaccaaccacggcagctaacctctgggcatcatatttggagtagagaacagtgcaggtccacgtggcctcttctcctctgttggtggctctcagcatattacagatttcactgtaaaagtgtggatatgtcggcagttcatagaaaatcaggttcctgatgcttttattgctgtagtttatttccacccccttccctcctgtttctctctctccttctctctctctctctctctctcttttttttccgccctagctggggctgtgttggaggagaggaagaaagagagacagaggattgcattcatccgttacgttcttgaaatttcctaatagcaagaccagcgaagcggttgcacccttttcaatcttgcaaaggaaaaaaacaaaacaaaacaaaaaaaacccaagtccccttcccggcagtttttgccttaaagctgccctcttgaaattaattttttcccaggagagagatgtcttatcaggggaagaaaaatattccacgcatcacgagcgatcgtcttctgatcaaaggaggtaaaattgttaatgatgaccagtcgttctatgcagacatatacatggaagatgggttgatcaagcaaataggagaaaatctgattgtgccaggaggagtgaagaccatcgaggcccactcccggatggtgatccccggaggaattgacgtccacactcgtttccagatgcctgatcagggaatgacgtctgctgatgatttcttccaaggaaccaaggcggccctggctgggggaaccactatgatcattgaccacgttgttcctgagcctgggacaagcctgctcgctgcctttgaccagtggagggaatgggccgacagcaagtcctgctgtgactactctctgcatgtggacatcagcgagtggcataagggcatccaggaggagatggaagcgcttgtgaaggatcacggggtaaattccttcctcgtgtacatggctttcaaagatcgcttccagctaacggattgccagatttatgaagtactgagtgtgatccgggatattggcgccatagcccaagtccacgcagaaaatggcgacatcattgcagaggagcagcagaggatcctggatctgggcatcacgggccccgagggacatgtgctgagccgacctgaggaggtcgaggccgaagccgtgaatcgtgccatcaccatcgccaaccagaccaactgcccgctgtatatcaccaaggtgatgagcaaaagctctgctgaggtcatcgcccaggcacggaagaagggaactgtggtgtatggcgagcccatcactgccagcttgggaacggacggctcccattactggagcaagaactgggccaaggctgctgcctttgtcacctccccacccttgagccctgatccaaccactccagactttctcaactccttgctgtcctgtggagacctccaggtcacgggcagtgcccattgcacgtttaacactgcccagaaggctgtaggaaaggacaacttcaccctgattccggagggcaccaatggcactgaggagcggatgtccgtcatctgggacaaggctgtggtcactgggaagatggatgagaaccagtttgtggctgtgaccagcaccaatgcagccaaagtcttcaacctttacccccggaaaggccgcattgctgtgggatccgatgccgacctggtcatctgggaccccgacagcgttaaaaccatctctgccaagacacacaacagctctctcgagtacaacatctttgaaggcatggagtgccgcggctccccactggtggtcatcagccaggggaagattgtcctggaggacggcaccctgcatgtcaccgaaggctctggacgctacattccccggaagcccttccctgattttgtttacaagcgtatcaaggcaaggagcaggctggctgagctgagaggggttcctcgtggcctgtatgacggacctgtgtgtgaagtgtctgtgacgcccaagacagtcactccagcctcctcggccaagacgtctcctgccaagcagcaggccccacctgtccggaacctgcaccagtctggattcagtttgtctggtgctcagattgatgacaacattccccgccgcaccacccagcgtatcgtggcgccccccggtggccgtgccaacatcaccagcctgggctagagctcctgggctgtgccgtccactggggactggggatgggacacctgaggacattctgagacttctttcttccttccttttttttttgtttttttttttaagagcctgtgatagttactgtggagcagccagttcatggggtcccccttggggccccacaccccgtctctcaccaagagttactgattttgctcatccacttccctacacatctatgggtatcacacccaagactacccaccaagctcatacagggaaccacacccaacacttagacatgcgaacaagcagcccccagcgagggtctccttcgccttcaacctcctagtgtctgttagcatcttccttttcatggggggagggaagataaagtgaattgcccagagctgcctttttcttttctttttaaaaattttttttttttaaatactaaattggaacatttaattccatattaatacaaggggtttgaactggacatcctaatgatgcaattacgtcatcacccagctgattccgggtggttggcaaactcatcgtgtctgtcctgagaggctccacaatgcccacccgcatcgccattctgtagtcttcagggtcagctgttgataaaggggcaggcttgcgttattggcctagattttgctgcagattaaatcctttgaggattctcttctcttttaccatttttctgcgtgctctcactctctctttctctctctagctttttaattcatgaatattttcgtgtctgtctctctctctctctgtgtttcctccagcccttgtctcggagacggtgttttcctcccttgccccattatcttttcacctcccaggtctaccatttcatggtggtcgttgggtccgcctaaaggatttgagcgtttgccattgcaagcatagtgctgtgtcatcctggtccatgtaggactggtgctaaccacctgccatcatgaggatgtgtgctagagtgtgggaccctggccaagtgcaggaatgggccatgccgtctcacccacagtatcacatgtggaaccgcagacagggcccagaagctttagaggtatgaggctgcagaaccggagagattttcctctgtgcagtgctctctggctaaagtcacggtcaaacctaaacaccgagcctcattaacccaagtgaaccaaccaaagtcaccagttcagaagtgctaagctaataggagtctgacccgagggcctgctgcttcctggttaagtatcttttgagattctagaacacatgggagctttttattttcggggaaaaaccgtatttttttcttgtccaattatttctaaagacacactacatagaaagaggccctataaactcaaaaagtcattgggaaacttaaagtctattctactttgcaagaggagaaatgtgttttatgaacgatagatcacatcagaactcctgtggggaggaaaccttataaattaaacacatggcccccttagagaccacaggcgatgtctgtctccatccttccctctccttttctgtcacctttccccctagctggctcctttggacctacccctgtccttgctgacttgtgttgcattgtattccaaacgtgtttacaggttctcttaagcaatgttgtatttgcaggcttttctgaataccaaatctgctttttgtaaagcgtaaaaacatcacaaagtaggtcattccatcaccacccttgtctctctacacattttgcctttggggatctggttggggttttgggttttttgttgttgttgtttatttgttattttaaaggtaaattgcacttttaaaaaaataattggttgacttaatatatttgctttttttctcacctgcacttagaggaaatttgaacaagttggaaaaaaacaatttttgtttcaattctaagaaacacttgcagctctagtattcacttgagtcttcctgtttttcctgtaccgggtcatggtaatttttggttgttttggttgttttcttaaaaaacaagttaaaacctgacgatttctgcaggctgtgtaagcatgtttacctgttggcttgctttgtgtgtctgttaaatgaatgtcatatgtaaatgctaaaataaatcgacagtgtctcagaactgaataactgcagtgacttgatgctctaaaacagtgtaggatttaagaatagatggtttttaatcctggaaattgtgattgtgacccatgagtggaggaactttcagttctaaagctgataaagtgtgtagccagaagagtacttttttttttgtaaccactgtcttgatggcaaaataattatggtaaaaaacaagtctcgtgtttattattccttaagaactctgtgttatattaccatggaacgcctaataaagcaaaatgtggttgtttca

SEQ ID NO: 89694 - DNA, 5544 bp, Homo sapiens
ccgggatccggttttttttgtttttaaaagtgtaatttcctttttatttgcatctgtttatgactgaaaaaaatgactagttattatgaagacactactgttgaagatggatattttaacatggagtttcaacaaaattacttcttgagacagagctgatgtgttttttaaataacgtgattttaagcatatatttgaacaaaactaaaacatttagtattatgaatatgaaaaaagatcagtaaatcaatgtactcttctaggctgaattaaggtagactatttaaggtttcaaaaaagtttggctggggcagaataagttttacaaaacccatgccatccaaaattaagatgacatgtagcagcaagaagtattccaatgtctcataaccagttctcgcaagcaatgtgtattccttactttaaggaagtgtcaaacaaatagaaaaatctggaagaatttactaagtgtaataaattagaggtaaatcgtaataaaagaatttatgtctcacaaaaatattcacaagtgggagttttcttttaccaacttctcagagtccttctagccccctcttcacttctgaaagatgggatttaccaaaatctggtttacatttaacttttcagggacacatgacctgaaaagaaagatgtcagataatactgacattgcctcatgcactttctttgtatcagtccttcttctgtaagtaatcagaattgggtccaaatggcatagaatcaaacattatgtatcatgccaaataccacttcctgcccaacaaaatttcatctttctccagtaatgaagaggtggacattcttgttggactgtagcatctgtgccgcccgctccacaccaaccacggcagctaacctctgggcatcatatttggagtagagaacagtgcaggtccacgtggcctcttctcctctgttggtggctctcagcatattacagatttcactgtaaaagtgtggatatgtcggcagttcatagaaaatcaggttcctgatgcttttattgctgtagtttatttccacccccttccctcctgtttctctctctccttctctctctctctctctctctcttttttttccgccctagctggggctgtgttggaggagaggaagaaagagagacagaggattgcattcatccgttacgttcttgaaatttcctaatagcaagaccagcgaagcggttgcacccttttcaatcttgcaaaggaaaaaaacaaaacaaaacaaaaaaaacccaagtccccttcccggcagtttttgccttaaagctgccctcttgaaattaattttttcccaggagagagatgtcttatcaggggaagaaaaatattccacgcatcacgagcgatcgtcttctgatcaaaggaggtaaaattgttaatgatgaccagtcgttctatgcagacatatacatggaagatgggttgatcaagcaaataggagaaaatctgattgtgccaggaggagtgaagaccatcgaggcccactcccggatggtgatccccggaggaattgacgtccacactcgtttccagatgcctgatcagggaatgacgtctgctgatgatttcttccaaggaaccaaggcggccctggctgggggaaccactatgatcattgaccacgttgttcctgagcctgggacaagcctgctcgctgcctttgaccagtggagggaatgggccgacagcaagtcctgctgtgactactctctgcatgtggacatcagcgagtggcataagggcatccaggaggagatggaagcgcttgtgaaggatcacggggtaaattccttcctcgtgtacatggctttcaaagatcgcttccagctaacggattgccagatttatgaagtactgagtgtgatccgggatattggcgccatagcccaagtccacgcagaaaatggcgacatcattgcagaggagcagcagaggatcctggatctgggcatcacgggccccgagggacatgtgctgagccgacctgaggaggtcgaggccgaagccgtgaatcgtgccatcaccatcgccaaccagaccaactgcccgctgtatatcaccaaggtgatgagcaaaagctctgctgaggtcatcgcccaggcacggaagaagggaactgtggtgtatggcgagcccatcactgccagcttgggaacggacggctcccattactggagcaagaactgggccaaggctgctgcctttgtcacctccccacccttgagccctgatccaaccactccagactttctcaactccttgctgtcctgtggagacctccaggtcacgggcagtgcccattgcacgtttaacactgcccagaaggctgtaggaaaggacaacttcaccctgattccggagggcaccaatggcactgaggagcggatgtccgtcatctgggacaaggctgtggtcactgggaagatggatgagaaccagtttgtggctgtgaccagcaccaatgcagccaaagtcttcaacctttacccccggaaaggccgcattgctgtgggatccgatgccgacctggtcatctgggaccccgacagcgttaaaaccatctctgccaagacacacaacagctctctcgagtacaacatctttgaaggcatggagtgccgcggctccccactggtggtcatcagccaggggaagattgtcctggaggacggcaccctgcatgtcaccgaaggctctggacgctacattccccggaagcccttccctgattttgtttacaagcgtatcaaggcaaggagcaggctggctgagctgagaggggttcctcgtggcctgtatgacggacctgtgtgtgaagtgtctgtgacgcccaagacagtcactccagcctcctcggccaagacgtctcctgccaagcagcaggccccacctgtccggaacctgcaccagtctggattcagtttgtctggtgctcagattgatgacaacattccccgccgcaccacccagcgtatcgtggcgccccccggtggccgtgccaacatcaccagcctgggctagagctcctgggctgtgccgtccactggggactggggatgggacacctgaggacattctgagacttctttcttccttccttttttttttgtttttttttttaagagcctgtgatagttactgtggagcagccagttcatggggtcccccttggggccccacaccccgtctctcaccaagagttactgattttgctcatccacttccctacacatctatgggtatcacacccaagactacccaccaagctcatacagggaaccacacccaacacttagacatgcgaacaagcagcccccagcgagggtctccttcgccttcaacctcctagtgtctgttagcatcttccttttcatggggggagggaagataaagtgaattgcccagagctgcctttttcttttctttttaaaaattttaagaagttttctttgtggggctggggaggggccggggtcagggagagtcttttttttttttttttttaaatactaaattggaacatttaattccatattaatacaaggggtttgaactggacatcctaatgatgcaattacgtcatcacccagctgattccgggtggttggcaaactcatcgtgtctgtcctgagaggctccacaatgcccacccgcatcgccattctgtagtcttcagggtcagctgttgataaaggggcaggcttgcgttattggcctagattttgctgcagattaaatcctttgaggattctcttctcttttaccatttttctgcgtgctctcactctctctttctctctctagctttttaattcatgaatattttcgtgtctgtctctctctctctctgtgtttcctccagcccttgtctcggagacggtgttttcctcccttgccccattatcttttcacctcccaggtctaccatttcatggtggtcgttgggtccgcctaaaggatttgagcgtttgccattgcaagcatagtgctgtgtcatcctggtccatgtaggactggtgctaaccacctgccatcatgaggatgtgtgctagagtgtgggaccctggccaagtgcaggaatgggccatgccgtctcacccacagtatcacatgtggaaccgcagacagggcccagaagctttagaggtatgaggctgcagaaccggagagattttcctctgtgcagtgctctctggctaaagtcacggtcaaacctaaacaccgagcctcattaacccaagtgaaccaaccaaagtcaccagttcagaagtgctaagctaataggagtctgacccgagggcctgctgcttcctggttaagtatcttttgagattctagaacacatgggagctttttattttcggggaaaaaccgtatttttttcttgtccaattatttctaaagacacactacatagaaagaggccctataaactcaaaaagtcattgggaaacttaaagtctattctactttgcaagaggagaaatgtgttttatgaacgatagatcacatcagaactcctgtggggaggaaaccttataaattaaacacatggcccccttagagaccacaggcgatgtctgtctccatccttccctctccttttctgtcacctttccccctagctggctcctttggacctacccctgtccttgctgacttgtgttgcattgtattccaaacgtgtttacaggttctcttaagcaatgttgtatttgcaggcttttctgaataccaaatctgctttttgtaaagcgtaaaaacatcacaaagtaggtcattccatcaccacccttgtctctctacacattttgcctttggggatctggttggggttttgggttttttgttgttgttgtttatttgttattttaaaggtaaattgcacttttaaaaaaataattggttgacttaatatatttgctttttttctcacctgcacttagaggaaatttgaacaagttggaaaaaaacaatttttgtttcaattctaagaaacacttgcagctctagtattcacttgagtcttcctgtttttcctgtaccgggtcatggtaatttttggttgttttggttgttttcttaaaaaacaagttaaaacctgacgatttctgcaggctgtgtaagcatgtttacctgttggcttgctttgtgtgtctgttaaatgaatgtcatatgtaaatgctaaaataaatcgacagtgtctcagaactgaataactgcagtgacttgatgctctaaaacagtgtaggatttaagaatagatggtttttaatcctggaaattgtgattgtgacccatgagtggaggaactttcagttctaaagctgataaagtgtgtagccagaagagtacttttttttttgtaaccactgtcttgatggcaaaataattatggtaaaaaacaagtctcgtgtttattattccttaagaactctgtgttatattaccatggaacgcctaataaagcaaaatgtggttgtttcaaaaaaagtcgacgcggccggcaatt

SEQ ID NO: 89695 - DNA, 3856 bp, Homo sapiens
aatacggtgatgcttgtgacctgtgtctgttggggcttagttccttaagaatcctgattgaaacagtggcctgacacccagcagagatatgggtaatgtacacacaaggattcccaaatgaccaagaaggaaagctctgtaagggagtattaattgtttgcctccaggatcagtattcattcttggatcaaaccccagctccactgtacaccagccacgtgatgctgggtgcttcctcatcatctccacatgtccttttgccatctgcaaggggaggatagtaaccatgactcatctcacagggtgatgatgatgtgtacatgagatattgcaggtaaagatggagatgagaagcgtgaccagttattgtgactacaggatgaaggggctggtctaaccttgagcttgcgaggaaagcagagtaaagatgcctgctgaccctggacaagggttttctgctcagaattgtttgtccacttcaggaactgtggtgtatggcgagcccatcactgccagcttgggaacggacggctcccattactggagcaagaactgggccaaggctgctgcctttgtcacctccccacccttgagccctgatccaaccactccagactttctcaactccttgctgtcctgtggagacctccaggtcacgggcagtgcccattgcacgtttaacactgcccagaaggctgtaggaaaggacaacttcaccctgattccggagggcaccaatggcactgaggagcggatgtccgtcatctgggacaaggctgtggtcactgggaagatggatgagaaccagtttgtggctgtgaccagcaccaatgcagccaaagtcttcaacctttacccccggaaaggccgcattgctgtgggatccgatgccgacctggtcatctgggaccccgacagcgttaaaaccatctctgccaagacacacaacagctctctcgagtacaacatctttgaaggcatggagtgccgcggctccccactggtggtcatcagccaggggaagattgtcctggaggacggcaccctgcatgtcaccgaaggctctggacgctacattccccggaagcccttccctgattttgtttacaagcgtatcaaggcaaggagcaggctggctgagctgagaggggttcctcgtggcctgtatgacggacctgtgtgtgaagtgtctgtgacgcccaagacagtcactccagcctcctcggccaagacgtctcctgccaagcagcaggccccacctgtccggaacctgcaccagtctggattcagtttgtctggtgctcagattgatgacaacattccccgccgcaccacccagcgtatcgtggcgccccccggtggccgtgccaacatcaccagcctgggctagagctcctgggctgtgccgtccactggggactggggatgggacacctgaggacattctgagacttctttcttccttccttttttttttgtttttttttttaagagcctgtgatagttactgtggagcagccagttcatggggtcccccttggggccccacaccccgtctctcaccaagagttactgattttgctcatccacttccctacacatctatgggtatcacacccaagactacccaccaagctcatacagggaaccacacccaacacttagacatgcgaacaagcagcccccagcgagggtctccttcgccttcaacctcctagtgtctgttagcatcttccttttcatggggggagggaagataaagtgaattgcccagagctgcctttttcttttctttttaaaaattttaagaagttttctttgtggggctggggaggggccggggtcagggagagtcttttttttttttttttttaaatactaaattggaacatttaattccatattaatacaaggggtttgaactggacatcctaatgatgcaattacgtcatcacccagctgattccgggtggttggcaaactcatcgtgtctgtcctgagaggctccacaatgcccacccgcatcgccattctgtagtcttcagggtcagctgttgataaaggggcaggcttgcgttattggcctagattttgctgcagattaaatcctttgaggattctcttctcttttaccatttttctgcgtgctctcactctctctttctctctctagctttttaattcatgaatattttcgtgtctgtctctctctctctctgtgtttcctccagcccttgtctcggagacggtgttttcctcccttgccccattatcttttcacctcccaggtctaccatttcatggtggtcgttgggtccgcctaaaggatttgagcgtttgccattgcaagcatagtgctgtgtcatcctggtccatgtaggactggtgctaaccacctgccatcatgaggatgtgtgctagagtgtgggaccctggccaagtgcaggaatgggccatgccgtctcacccacagtatcacatgtggaaccgcagacagggcccagaagctttagaggtatgaggctgcagaaccggagagattttcctctgtgcagtgctctctggctaaagtcacggtcaaacctaaacaccgagcctcattaacccaagtgaaccaaccaaagtcaccagttcagaagtgctaagctaataggagtctgacccgagggcctgctgcttcctggttaagtatcttttgagattctagaacacatgggagctttttattttcggggaaaaaccgtatttttttcttgtccaattatttctaaagacacactacatagaaagaggccctataaactcaaaaagtcattgggaaacttaaagtctattctactttgcaagaggagaaatgtgttttatgaacgatagatcacatcagaactcctgtggggaggaaaccttataaattaaacacatggcccccttagagaccacaggcgatgtctgtctccatccttccctctccttttctgtcacctttccccctagctggctcctttggacctacccctgtccttgctgacttgtgttgcattgtattccaaacgtgtttacaggttctcttaagcaatgttgtatttgcaggcttttctgaataccaaatctgctttttgtaaagcgtaaaaacatcacaaagtaggtcattccatcaccacccttgtctctctacacattttgcctttggggatctggttggggttttgggttttttgttgttgttgtttatttgttattttaaaggtaaattgcacttttaaaaaaataattggttgacttaatatatttgctttttttctcacctgcacttagaggaaatttgaacaagttggaaaaaaacaatttttgtttcaattctaagaaacacttgcagctctagtattcacttgagtcttcctgtttttcctgtaccgggtcatggtaatttttggttgttttggttgttttcttaaaaaacaagttaaaacctgacgatttctgcaggctgtgtaagcatgtttacctgttggcttgctttgtgtgtctgttaaatgaatgtcatatgtaaatgctaaaataaatcgacagtgtctcagaactgaataactgcagtgacttgatgctctaaaacagtgtaggatttaagaatagatggtttttaatcctggaaattgtgattgtgacccatgagtggaggaactttcagttctaaagctgataaagtgtgtagccagaagagtacttttttttttgtaaccactgtcttgatggcaaaataattatggtaaaaaacaagtctcgtgtttattattccttaagaactctgtgttatattaccatggaacgcctaataaagcaaaatgtggttgtttca

SEQ ID NO: 89696 - DNA, 2945 bp, Homo sapiens
actagccgaagcgcatacgtatctgcagtacacagaatagctctctcgagtacaacatctttgaaggcatggagtgccgcggctccccactggtggtcatcagccaggggaagattgtcctggaggacggcaccctgcatgtcaccgaaggctctggacgctacattccccggaagcccttccctgattttgtttacaagcgtatcaaggcaaggagcaggctggctgagctgagaggggttcctcgtggcctgtatgacggacctgtgtgtgaagtgtctgtgacgcccaagacagtcactccagcctcctcggccaagacgtctcctgccaagcagcaggccccacctgtccggaacctgcaccagtctggattcagtttgtctggtgctcagattgatgacaacattccccgccgcaccacccagcgtatcgtggcgccccccggtggccgtgccaacatcaccagcctgggctagagctcctgggctgtgccgtccactggggactggggatgggacacctgaggacattctgagacttctttcttccttccttttttttttgtttttttttttaagagcctgtgatagttactgtggagcagccagttcatggggtcccccttggggccccacaccccgtctctcaccaagagttactgattttgctcatccacttccctacacatctatgggtatcacacccaagactacccaccaagctcatacagggaaccacacccaacacttagacatgcgaacaagcagcccccagcgagggtctccttcgccttcaacctcctagtgtctgttagcatcttccttttcatggggggagggaagataaagtgaattgcccagagctgcctttttcttttctttttaaaaattttaagaagttttctttgtggggctggggaggggccggggtcagggagagtcttttttttttttttttttaaatactaaattggaacatttaattccatattaatacaaggggtttgaactggacatcctaatgatgcaattacgtcatcacccagctgattccgggtggttggcaaactcatcgtgtctgtcctgagaggctccacaatgcccacccgcatcgccattctgtagtcttcagggtcagctgttgataaaggggcaggcttgcgttattggcctagattttgctgcagattaaatcctttgaggattctcttctcttttaccatttttctgcgtgctctcactctctctttctctctctagctttttaattcatgaatattttcgtgtctgtctctctctctctctgtgtttcctccagcccttgtctcggagacggtgttttcctcccttgccccattatcttttcacctcccaggtctaccatttcatggtggtcgttgggtccgcctaaaggatttgagcgtttgccattgcaagcatagtgctgtgtcatcctggtccatgtaggactggtgctaaccacctgccatcatgaggatgtgtgctagagtgtgggaccctggccaagtgcaggaatgggccatgccgtctcacccacagtatcacatgtggaaccgcagacagggcccagaagctttagaggtatgaggctgcagaaccggagagattttcctctgtgcagtgctctctggctaaagtcacggtcaaacctaaacaccgagcctcattaacccaagtgaaccaaccaaagtcaccagttcagaagtgctaagctaataggagtctgacccgagggcctgctgcttcctggttaagtatcttttgagattctagaacacatgggagctttttattttcggggaaaaaccgtatttttttcttgtccaattatttctaaagacacactacatagaaagaggccctataaactcaaaaagtcattgggaaacttaaagtctattctactttgcaagaggagaaatgtgttttatgaacgatagatcacatcagaactcctgtggggaggaaaccttataaattaaacacatggcccccttagagaccacaggcgatgtctgtctccatccttccctctccttttctgtcacctttccccctagctggctcctttggacctacccctgtccttgctgacttgtgttgcattgtattccaaacgtgtttacaggttctcttaagcaatgttgtatttgcaggcttttctgaataccaaatctgctttttgtaaagcgtaaaaacatcacaaagtaggtcattccatcaccacccttgtctctctacacattttgcctttggggatctggttggggttttgggttttttgttgttgttgtttatttgttattttaaaggtaaattgcacttttaaaaaaataattggttgacttaatatatttgctttttttctcacctgcacttagaggaaatttgaacaagttggaaaaaaacaatttttgtttcaattctaagaaacacttgcagctctagtattcacttgagtcttcctgtttttcctgtaccgggtcatggtaatttttggttgttttggttgttttcttaaaaaacaagttaaaacctgacgatttctgcaggctgtgtaagcatgtttacctgttggcttgctttgtgtgtctgttaaatgaatgtcatatgtaaatgctaaaataaatcgacagtgtctcagaactgaataactgcagtgacttgatgctctaaaacagtgtaggatttaagaatagatggtttttaatcctggaaattgtgattgtgacccatgagtggaggaactttcagttctaaagctgataaagtgtgtagccagaagagtacttttttttttgtaaccactgtcttgatggcaaaataattatggtaaaaaacaagtctcgtgtttattattccttaagaactctgtgttatattaccatggaacgcctaataaagcaaaatgtggttgtttca

SEQ ID NO: 89697 - DNA, 2810 bp, Homo sapiens
  misc_feature (20)..(21): n is a, c, g, or t
gctgtgatctagcggatctnnccgactagcccgacagcctgcccttccctgattttgtttacaagcgtatcaaggcaaggagcaggctggctgagctgagaggggttcctcgtggcctgtatgacggacctgtgtgtgaagtgtctgtgacgcccaagacagtcactccagcctcctcggccaagacgtctcctgccaagcagcaggccccacctgtccggaacctgcaccagtctggattcagtttgtctggtgctcagattgatgacaacattccccgccgcaccacccagcgtatcgtggcgccccccggtggccgtgccaacatcaccagcctgggctagagctcctgggctgtgccgtccactggggactggggatgggacacctgaggacattctgagacttctttcttccttccttttttttttgtttttttttttaagagcctgtgatagttactgtggagcagccagttcatggggtcccccttggggccccacaccccgtctctcaccaagagttactgattttgctcatccacttccctacacatctatgggtatcacacccaagactacccaccaagctcatacagggaaccacacccaacacttagacatgcgaacaagcagcccccagcgagggtctccttcgccttcaacctcctagtgtctgttagcatcttccttttcatggggggagggaagataaagtgaattgcccagagctgcctttttcttttctttttaaaaattttaagaagttttctttgtggggctggggaggggccggggtcagggagagtcttttttttttttttttttaaatactaaattggaacatttaattccatattaatacaaggggtttgaactggacatcctaatgatgcaattacgtcatcacccagctgattccgggtggttggcaaactcatcgtgtctgtcctgagaggctccacaatgcccacccgcatcgccattctgtagtcttcagggtcagctgttgataaaggggcaggcttgcgttattggcctagattttgctgcagattaaatcctttgaggattctcttctcttttaccatttttctgcgtgctctcactctctctttctctctctagctttttaattcatgaatattttcgtgtctgtctctctctctctctgtgtttcctccagcccttgtctcggagacggtgttttcctcccttgccccattatcttttcacctcccaggtctaccatttcatggtggtcgttgggtccgcctaaaggatttgagcgtttgccattgcaagcatagtgctgtgtcatcctggtccatgtaggactggtgctaaccacctgccatcatgaggatgtgtgctagagtgtgggaccctggccaagtgcaggaatgggccatgccgtctcacccacagtatcacatgtggaaccgcagacagggcccagaagctttagaggtatgaggctgcagaaccggagagattttcctctgtgcagtgctctctggctaaagtcacggtcaaacctaaacaccgagcctcattaacccaagtgaaccaaccaaagtcaccagttcagaagtgctaagctaataggagtctgacccgagggcctgctgcttcctggttaagtatcttttgagattctagaacacatgggagctttttattttcggggaaaaaccgtatttttttcttgtccaattatttctaaagacacactacatagaaagaggccctataaactcaaaaagtcattgggaaacttaaagtctattctactttgcaagaggagaaatgtgttttatgaacgatagatcacatcagaactcctgtggggaggaaaccttataaattaaacacatggcccccttagagaccacaggcgatgtctgtctccatccttccctctccttttctgtcacctttccccctagctggctcctttggacctacccctgtccttgctgacttgtgttgcattgtattccaaacgtgtttacaggttctcttaagcaatgttgtatttgcaggcttttctgaataccaaatctgctttttgtaaagcgtaaaaacatcacaaagtaggtcattccatcaccacccttgtctctctacacattttgcctttggggatctggttggggttttgggttttttgttgttgttgtttatttgttattttaaaggtaaattgcacttttaaaaaaataattggttgacttaatatatttgctttttttctcacctgcacttagaggaaatttgaacaagttggaaaaaaacaatttttgtttcaattctaagaaacacttgcagctctagtattcacttgagtcttcctgtttttcctgtaccgggtcatggtaatttttggttgttttggttgttttcttaaaaaacaagttaaaacctgacgatttctgcaggctgtgtaagcatgtttacctgttggcttgctttgtgtgtctgttaaatgaatgtcatatgtaaatgctaaaataaatcgacagtgtctcagaactgaataactgcagtgacttgatgctctaaaacagtgtaggatttaagaatagatggtttttaatcctggaaattgtgattgtgacccatgagtggaggaactttcagttctaaagctgataaagtgtgtagccagaagagtacttttttttttgtaaccactgtcttgatggcaaaataattatggtaaaaaacaagtctcgtgtttattattccttaagaactctgtgttatattaccatggaacgcctaataaagcaaaatgtggttgtttca

SEQ ID NO: 89698 - DNA, 781 bp, Homo sapiens
  misc_feature (32)..(32): n is a, c, g, or t
  misc_feature (55)..(55): n is a, c, g, or t
  misc_feature (67)..(67): n is a, c, g, or t
  misc_feature (101)..(101): n is a, c, g, or t
ttttttagcgcccactatacaaattctatgcncctcgcatgcaaaaatacggccncttggatcctanagagcggccgcctactactactatgctgcgagangacgacagaatgggggatctggttggggttttgggttttttgttgttgttgtttatttgttattttaaaggtaaattgcacttttaaaaaaataattggttgacttaatatatttgctttttttctcacctgcacttagaggaaatttgaacaagttggaaaaaaacaatttttgtttcaattctaagaaacacttgcagctctagtattcacttgagtcttcctgtttttcctgtaccgggtcatggtaatttttggttgttttggttgttttcttaaaaaacaagttaaaacctgacgatttctgcaggctgtgtaagcatgtttacctgttggcttgctttgtgtgtctgttaaatgaatgtcatatgtaaatgctaaaataaatcgacagtgtctcagaactgaataactgcagtgacttgatgctctaaaacagtgtaggatttaagaatagatggtttttaatcctggaaattgtgattgtgacccatgagtggaggaactttcagttctaaagctgataaagtgtgtagccagaagagtacttttttttttgtaaccactgtcttgatggcaaaataattatggtaaaaaacaagtctcgtgtttattattccttaagaactctgtgttatattaccatggaacgcctaataaagcaaaatgtggttgtttca

SEQ ID NO: 89699 - DNA, 1925 bp, Homo sapiens
ccgggatccggttttttttgtttttaaaagtgtaatttcctttttatttgcatctgtttatgactgaaaaaaatgactagttattatgaagacactactgttgaagatggatattttaacatggagtttcaacaaaattacttcttgagacagagctgatgtgttttttaaataacgtgattttaagcatatatttgaacaaaactaaaacatttagtattatgaatatgaaaaaagatcagtaaatcaatgtactcttctaggctgaattaaggtagactatttaaggtttcaaaaaagtttggctggggcagaataagttttacaaaacccatgccatccaaaattaagatgacatgtagcagcaagaagtattccaatgtctcataaccagttctcgcaagcaatgtgtattccttactttaaggaagtgtcaaacaaatagaaaaatctggaagaatttactaagtgtaataaattagaggtaaatcgtaataaaagaatttatgtctcacaaaaatattcacaagtgggagttttcttttaccaacttctcagagtccttctagccccctcttcacttctgaaagatgggatttaccaaaatctggtttacatttaacttttcagggacacatgacctgaaaagaaagatgtcagataatactgacattgcctcatgcactttctttgtatcagtccttcttctgtaagtaatcagaattgggtccaaatggcatagaatcaaacattatgtatcatgccaaataccacttcctgcccaacaaaatttcatctttctccagtaatgaagaggtggacattcttgttggactgtagcatctgtgccgcccgctccacaccaaccacggcagctaacctctgggcatcatatttggagtagagaacagtgcaggtccacgtggcctcttctcctctgttggtggctctcagcatattacagatttcactgtaaaagtgtggatatgtcggcagttcatagaaaatcaggttcctgatgcttttattgctgtagtttatttccacccccttccctcctgtttctctctctccttctctctctctctctctctctcttttttttccgccctagctggggctgtgttggaggagaggaagaaagagagacagaggattgcattcatccgttacgttcttgaaatttcctaatagcaagaccagcgaagcggttgcacccttttcaatcttgcaaaggaaaaaaacaaaacaaaacaaaaaaaacccaagtccccttcccggcagtttttgccttaaagctgccctcttgaaattaattttttcccaggagagagatgtcttatcaggggaagaaaaatattccacgcatcacgagcgatcgtcttctgatcaaaggaggtaaaattgttaatgatgaccagtcgttctatgcagacatatacatggaagatgggttgatcaagcaaataggagaaaatctgattgtgccaggaggagtgaagaccatcgaggcccactcccggatggtgatccccggaggaattgacgtccacactcgtttccagatgcctgatcagggaatgacgtctgctgatgatttcttccaaggaaccaaggcggccctggctgggggaaccactatgatcattgaccacgttgttcctgagcctgggacaagcctgctcgctgcctttgaccagtggagggaatgggccgacagcaagtcctgctgtgactactctctgcatgtggacatcagcgagtggcataagggcatccaggaggagatggaagcgcttgtgaaggatcacggggtaaattccttcctcgtgtacatggctttcaaagatcgcttccagctaacggattgccagatttatgaagcactgacaacgcctcactgacaacgacctcactgacaacgg

SEQ ID NO: 89700 - DNA, 396 bp, Homo sapiens
gatatttgtagattggatttattttaatggccctgcttactagcagaatgatgtgtgtgtgctggtggagtgggggccatggagtaataaacagctttagaaaatggctgggccgggtggggtggctcacacttgtaatcccagcactttgggaggccgaggcaggtggatcacctgaggtcaggagttcaagaccagcctggccaacatggcgaaaccccatctctactaaaaatacaaaaagttagccgggtgtggtggcgggtgcctgtaatcccagctacttgggaggctgaggcaggagaattgcttgaacctgggaggcagaggttgcagtgagccaagatcatgccagtgcactccagcctgggtgacagcgagactctgtctcaaaaa

SEQ ID NO: 89701 - DNA, 402 bp, Homo sapiens
cagcaagtaagtaagtggaacactcactatgccacacttgagttctgctagggttggaggggaatgaaggcaggagtgccagtctgaaagcatacactaagacaaaaataacatgatagtaaaatgatacttcctcattctactttaaatgtttttgccaaaagactatcatattagatggagtacaataggtgaagagaatgtgttaattgtacacacttttatatacctgtttaattatatgtatttttaaacaaaaagaatacatcaacacctctgattaaaatgaaagactgaaaacattttaaaatctcttcttttttacttccaaccctgtaaacattatgttagaggaacaaagaaaagtataaaaagccaacaaagacaaaaagaaaaatgaca

SEQ ID NO: 89702 - DNA, 803 bp, Homo sapiens
gaaaaggcaggagttttggggggcagggggcagcaataattctataacttccgggatgctgaggggcgttcatggggaggaccctggcctcctcctccccaaggcatcctcaccagtggtgtcaacaggaaaaatggcagcaaatacgctgcaggctgtggtctttctgcctttgaaagggtcagctgtacttaaagggactgtttcagctctgcctgggtgctgctctgggaccccctgctgccaacccaccactcccccaacaatcctctctttccatccatatcccccagtatggaccttccacaactcccagccataagctgaatgtttctctttaaaggatggagaaaacttctgtctgtctctggcaagaattgggggactgttgactgggattgtgggctgggcttggcttctaactgctgtgtgacccaagacagccacttctcctccctaaccttggttatgtcttggcagcacagtgagcaggtcggactaggcgaacagttttggattattgtgtttttagatgtggaattattttttgttatataaactcttatgtgtaaccccaatatagaaactagattaaaagggagtctctctggttgaaaggggagctgagtaccctctggaactggaggcacctctgaaaaaagcaaactgaaaaccagtgccctgggtcactgttactcctataagacagtttaaagtgagacctggaaaaacatttgctttaccttgaatagataggtttttatgttggtatataagaaataaaactaacctattaaacctga

SEQ ID NO: 89703 - DNA, 924 bp, Homo sapiens
gaaaaggcaggagttttggggggcagggggcagcaataattctataacttccgggatgctgaggggcgttcatggggaggaccctggcctcctcctccccaaggcatcctcaccagtggtgtcaacaggaaaaatggcagcaaatacgctgcaggctgtggtctttctgcctttgaaagggtcagctgtacttaaagggactgtttcagctctgcctgggtgctgctctgggaccccctgctgccaacccaccactcccccaacaatcctctctttccatccatatcccccagtatggaccttccacaactcccagccataagctgaatgtttctctttaaaggatggagaaaacttctgtctgtctctggcaagaattgggggactgttgactgggattgtgggctgggcttggcttctaactgctgtgtgacccaagacagccacttctcctccctaaccttggttatgtcttggcagcacagtgagcaggtcggactaggcgaacagttttggattattgtgtttttagatgtggaattattttttgttatataaactcttatgtgtaaccccaatatagaaactagattaaaagggagtctctctggttgaaaggggagctgagtaccctctggaactggaggcacctctgaaaaaagcaaactgaaaaccagtgccctgggtcactgttactcctataagacagtttaaagtgagacctggaaaaacatttgctttaccttgaatagataggtttttatgttggtatataagaaataaaactaacctattaaacctgaaaaaaaaaaaaaaaaaaaacctcgaggggggggcccgggtccccaattcgcccttatagggagtgcggattcacaattacggggccggggtttcaaaccttggggacgggaaaaacccggg

SEQ ID NO: 89704 - DNA, 367 bp, Homo sapiens
tagaggatccttactgcggagtgatgcttccccctctgtgaatgtggctttgggtatggctaatcaacaccctgcactctggccttcagaagcccagtgagagcagcccatgtgtgtctcacttgcctcaagctctctggcccctgtgctcccaaggtctccagcttggctccaggaaaaggcagggcctcatgtcaagtagtacttttcttaaggagcttagaggtctattgacatttgaagcagctccatccctaaaaatccacacactgaagcccttcttgggagggaggtgacagggttaatctaagggctgggggaggcggagaaaggccttgaaaccacacagtgaagccaaccagattaa

SEQ ID NO: 89705 - DNA, 636 bp, Homo sapiens
  misc_feature (634)..(634): n is a, c, g, or t
agccagaaagaaaaggaaatagaagcatttcatctactcctgtgcctgccagcatttctggagagaaagaaaggaacatgaaacaaatattttacattagctatgtttaccaatttgttttcaaaaaagaaagaaaagaaattatcttttactttaaacctttccaagaagacaaaacaaaattttctcacctgactaacccgtaagtctgccagtttcaaatgactttgaaataaaagccagtggaagaactgagtagctcagcttcccaaattacagatcctcggtgatggtatagattgccagtttagtggcagaatgacatcttttagtaaaggacaagaaaacgtcatcccacagagtcctgcacaaaatggactgttgacttgtaactaatgcaatagccaggattttactaactattcttcttggttacttttttttacagcaagacagggaaggagatgaaagtgatattaacaagaaggagatcttactataaacaaagatctgtaaagtaaaaaacaaactgtctaggctataagtgctataatatttgatataacgagagttgttaaatatggtctacataaaaaccatttattaagtacatagtataataccagaaaaaaanaa

SEQ ID NO: 89706 - DNA, 447 bp, Homo sapiens
aagagaacagagcgaattagtggcccagtcagtttccagggaataaactgtggtcaccagcaagctttcagagagaacttggtcatccgacaaggagcttccaatttggtttgagttgtggagaatttaacattgcccttgttccctagcaatcaggaagcagaggggaaagatcagttttaaatgtgtctcatctctattgtcaccttttgctgtctttggacctcctttgcgttgaggtccaaaaggaagttggaaaattatagtgaaatatcttcacatttgccctgttgaccttgcaacttaaaggaagtttaggcacaaaaactccagagacagtcccaactgaaaaagttcacaaagagcaaagactgggccaattctggatgcatgcctatgagttagccctctctgcaaggaaaatttattttttctaaataaaatttt

SEQ ID NO: 89707 - DNA, 523 bp, Homo sapiens
aggacttaaaactggtttgaaagcactgagctaccaggggatcttccttcgcccttcactgtgagaacctgctgaggtccctgaaaatacagtccgtgaaagtgcaggggccacctgagactgtgattcccaggagtttctcattcaagtccatactcagcctccaacaaaatttatcaaatttactgtgtaaaggttctgtctactttatggcttgagtaccttctgcttcagcttacagaaatgatgccatagaaaaacaagcacattcaagatatgggacatgctgtgtgtctaccattctagacttctccaaattgcagtgccataaatgaggatggggatattctaaattttgaaacaaggactaaagagacataaccaaatgcaacgggtaaaccttgactggatcttgaattaaaaagtcattttaaagacaactggtgaaattttaaatttaagtattagctgatactatggaattattgctaatgtacatgtggttatataggatagtgtcctt

SEQ ID NO: 89708 - DNA, 1530 bp, Homo sapiens
cgcctaggaagtggggccggcagagggggcggggaggagctgtcggggactgggaggagccgcaccgcggcgggtggacaaagcccgcggtcgggtgaggcgggacggagttggggccggtggggaggggcatgaggcgctcgcaggcacctcgagaagcaggccccgaccgctcgccgacgaagcctcgtccgggcctcctgggagcggggtggcaggtaccgtggcgcctcctcgcgttggtcttgctggttctcggcccccgaagcggagcgacggagacacagctgtggaagcatctggatccgctgcccaggtccccgagcttcccggaacccgaggccgcaggacactgaaggctgccattcccgagtaggtcacgctggacgccaccctaagctgggcccagaggctcccgtccaggagggctgcagtcggcgcagacaccgcgcgtgtggagacgggagacccatcctcctcggccgttccgagagtaggcgcggccggtcagattcgatgcagagccgaatgcgggagaaagggcaaaacgtacctcaaaccagacaaagccttgtgagcttcaggttctcaaataccccactcacccagaccccacatctccagtcagcccctcgcacccaaatcccattcggagcaaccgaactgcacgtgggactagttcttgggaatggatcaagccagtctcttcatctaacggagacagccctgggtggctctgtcacacagccactgtcttgtgcacaagttctgaacttggcctcagagaagccccagagtagaaagaagacaaaataagccccagttcttcgattctgggctgaagtgagattttcttgaatggcagccattgttttgcctcttaggtaagtgagtgcagtaaagaccggtaaggcccacgcagaagaaacactgaggaaagaagacacttccaaagtaacaaatgggaggaagcagccaacgcccgaggacaacatggcaagaaggagcctttggattccggactgggatggaaagagagttgattgaatcccggaatttggaaaccccagatacggagggcggacggtacaaccggagctgtcaggtggatttccaaggctttgcattggctgtacctgaaacttatggtggcctagactccccagtatccactcttccttatcttggtaaacaagcccagttctgagtcacatccctgctctgcctacttacaggggcatgtggtcccaatctaagcaacgtagcataattccaacctaaatcagcagaatcccattccctgccacagttattggctggcaatgagcgtaacatatttgggccaatgagaggagcaatttcctggtctttgttgggaaaagtttttctttcattttctgagagcgcttcagaggtaacccattctttctgcatgtcctcaaaaaaacgggtcccctggatggtgggtagccatcttccaaatacaagtctagccgggttaaaataaagaagacatcaagaaaacaaaca

SEQ ID NO: 89709 - DNA, 1222 bp, Homo sapiens
cgcctaggaagtggggccggcagagggggcggggaggagctgtcggggactgggaggagccgcaccgcggcgggtggacaaagcccgcggtcgggtgaggcgggacggagttggggccggtggggaggggcatgaggcgctcgcaggcacctcgagaagcaggccccgaccgctcgccgacgaagcctcgtccgggcctcctgggagcggggtggcaggtaccgtggcgcctcctcgcgttggtcttgctggttctcggcccccgaagcggagcgacggagacacagctgtggaagcatctggatccgctgcccaggtccccgagcttcccggaacccgaggccgcaggacactgaaggctgccattcccgagtaggtcacgctggacgccaccctaagctgggcccagaggctcccgtccaggagggctgcagtcggcgcagacaccgcgcgtgtggagacgggagacccatcctcctcggccgttccgagagtaggcgcggccggtcagattcgatgcagagccgaatgcgggagaaagggcaaaacgtacctcaaaccagacaaagccttgtgagcttcaggttctcaaataccccactcacccagaccccacatctccagtcagcccctcgcacccaaatcccattcggagcaaccgaactgcacgtgggactagttcttgggaatggatcaagccagtctcttcatctaacggagacagccctgggtggctctgtcacacagccactgtcttgtgcacaagttctgaacttggcctcagagaagccccagagtagaaagaagacaaaataagccccagttcttcgattctgggctgaagtgagattttcttgaatggcagccattgttttgcctcttaggtaagtgagtgcagtaaagaccggtaaggcccacgcagaagaaacactgaggaaagaagacacttccaaagtaacaaatgggaggaagcagccaacgcccgaggacaacatggcaagaaggagcctttggattccggactgggatggaaagagaggtagattcagctaccatatgccattactgtagttagtacagttgtctctatatccgtgggattggttcccagactctggattttctaagatgttcaagtctcttacataaaaatggtgtatttccccatatactttaaatcatatctagattacttataaaacctaatacaatgcaaatgcta

SEQ ID NO: 89710 - DNA, 639 bp, Homo sapiens
cgggtggatcatgaggtcaggagattaagaccatcctggcctgcatggcgaaaccctgtctctactgaagataaaagaatgacctgggcatggtggtgggcgcctgtagtcccagctgctcggggcgctgaggcaggagaatcgctcgggcccgggaggtggaggttgcagtgagccgagattgcacggcggacggtacaaccggagctgtcaggtggatttccaaggctttgcattggctgtacctgaaacttatggtggcctagactccccagtatccactcttccttatcttggtaaacaagcccagttctgagtcacatccctgctctgcctacttacaggggcatgtggtcccaatctaagcaacgtagcataattccaacctaaatcagcagaatcccattccctgccacagttattggctggcaatgagcgtaacatatttgggccaatgagaggagcaatttcctggtctttgttgggaaaagtttttctttcattttctgagagcgcttcagaggtaacccattctttctgcatgtcctcaaaaaaacgggtcccctggatggtgggtagccatcttccaaatacaagtctagccgggttaaaataaagaagacatcaagaaaacaaaca

SEQ ID NO: 89711 - DNA, 1276 bp, Homo sapiens
cgcctaggaagtggggccggcagagggggcggggaggagctgtcggggactgggaggagccgcaccgcggcgggtggacaaagcccgcggtcgggtgaggcgggacggagttggggccggtggggaggggcatgaggcgctcgcaggcacctcgagaagcaggccccgaccgctcgccgacgaagcctcgtccgggcctcctgggagcggggtggcaggtaccgtggcgcctcctcgcgttggtcttgctggttctcggcccccgaagcggagcgacggagacacagctgtggaagcatctggatccgctgcccaggtccccgagcttcccggaacccgaggccgcaggacactgaaggctgccattcccgagtaggtcacgctggacgccaccctaagctgggcccagaggctcccgtccaggagggctgcagtcggcgcagacaccgcgcgtgtggagacgggagacccatcctcctcggccgttccgagagtaggcgcggccggtcagattcgatgcagagccgaatgcgggagaaagggcaaaacgtacctcaaaccagacaaagccttgtgagcttcaggttctcaaataccccactcacccagaccccacatctccagtcagcccctcgcacccaaatcccattcggagcaaccgaactgcacgtgggactagttcttgggaatggatcaagccagtctcttcatctaacggagacagccctgggtggctctgtcacacagccactgtcttgtgcacaagttctgaacttggcctcagagaagccccagagtagaaagaagacaaaataagccccagttcttcgattctgggctgaagtgagattttcttgaatggcagccattgttttgcctcttaggtaagtgagtgcagtaaagaccggtaaggcccacgcagaagaaacactgaggaaagaagacacttccaaagtaacaaatgggaggaagcagccaacgcccgaggacaacatggcaagaaggagcctttggattccggactgggatggaaagagagttgattgaatcccggaatttggaaaccccagatacggagggcggacggtacaaccggagctgtcaggtggatttccaaggctttgcattggctgtacctgaaacttatggtggcctagactccccagtatccactcttccttatcttgaatcttgctctgtcacccaggctggagtgcaatggtgcaatctcaagctcactgcaacctctgtgcaggttcaagtggagaatctgaat

SEQ ID NO: 89712 - DNA, 289 bp, Homo sapiens
gcacacgtgtgtgtgtgtgtgtgtgtgtgtgtgtgtgtgtgtgtgtaaggtatcactctccactttcagtggctcccacagcacctagaataacatccaagctccttggcatgactttcttggcctgaaatggccctgccttgtccatctctcccacttcttggatggcttcacacactcctggactctatattccggccacctggcctcttttctgttcctcacatgccaatctctttcctgactcttggcctttgcaccagctcatccctttgcccagaaggttctt

SEQ ID NO: 89713 - DNA, 493 bp, Homo sapiens
taacgaatgaggcaatttattaacccagcatggtttgttctaatgcttcttgttggcaactgccacctgtccggcgattctgtccagatctctttgtccctgacgtgtcagtttgcggcccccatcttggtccttttccaccatttttagcccctccagggcttggaggacccggtgggccacattcttggagcctcggctaaagtggccaggcatgccgccacttctctgacatcccccatagatcttggtcatggagccaaccccagcgccaccccagaggtacaggtgccacgctgtggaagcagctcgcgtgtacaaccagttctcatcgtagggagcaagctctttgtgcttggccagcagcttgacggtgtccacccattcggggactttcagcttcccagactttctgaggaaggctgccagagctctgatgaactcctgctggttcacatcttttacagtaactccagcatcatgcggcccggcc

SEQ ID NO: 89714 - DNA, 546 bp, Homo sapiens
ttgtttttgtatttatcgtagagatggggtttcaccatgttagccaggatggtctcaatctcctgacctcgtgatctgcccgcctcggcctcccaaagtgctgggattacaggcatgagtcaccgcgccaagccaaatctttgtaattatacccattggggtgtttttccttaacctacctactagcttacaagcttttgaatagttgggatttactcatcttttgggagagggccttctgttgtccttaattccaggccttacataagcttggggctccataaataggtgtgaaattgagcaggtattttatagcatgtggacaattcatatctctgggggcttgttaatggtgaagggcctgttgccagggcctgtaaggggcagagagatgacaaagagttggtggggtggggtcgaaaatttatttggcaattactgaatatctagaaagtgcccagttggggctgcagcagttacaagcatagacctcttactaacctattgaccctgagcaagtggtcttcctgaggctcagtttcctca

SEQ ID NO: 89715 - DNA, 1753 bp, Homo sapiens
tgacgcgaatgacgctgcgccagtcaggccgcagccccgctgcttggcccgtcgggcccgccttggccggctcggcccgcccccggccctccctgcacggcctcccgtgcgcccctgtcagactgtggcggccggtcgcgcggtgcgctctccctccctgcccgcagcctggagaggcgcttcgtgctgcacacccccgcgttcctgccggcaccgcgcctgccctctgccgcgctccgccctgccgccgaccgcacgcccgccgcgggacatggcacacgcaccggcacgctgccccagcgcccggggctccggggacggcgagatgggcaagcccaggaacgtggcgctcatcaccggtatcacaggccaggatggttcctacctggctgagttcctgctggagaaaggctatgaggtccatggaattgtacggcggtccagttcatttaatacgggtcgaattgagcatctgtataagaatccccaggctcacattgaaggaaacatgaagttgcactatggcgatctcactgacagtacctgccttgtgaagatcattaatgaagtaaagcccacagagatctacaaccttggagcccagagccacgtcaaaatttcctttgacctcgctgagtacactgcggacgttgacggagttggcactctacgacttctagatgcagttaagacttgtggccttatcaactctgtgaagttctaccaagcctcaacaagtgaactttatgggaaagtgcaggaaataccccagaaggagaccacccctttctatccccggtcaccctatggggcagcaaaactctatgcctattggattgtggtgaacttccgtgaggcgtataatctctttgcagtgaacggcattctcttcaatcatgagagtcccagaagaggagctaatttcgttactcgaaaaattagccggtcagtagctaagatttaccttggacaactggaatgtttcagtttgggaaatctggatgccaaacgagattggggccatgccaaggactatgtggaggctatgtggttgatgttgcagaatgacgagccggaggacttcgttatagctactggggaggtccatagtgtccgggaatttgtcgagaaatcattcttgcacattggaaaaaccattgtgtgggaaggaaagaatgaaaatgaagtgggcagatgtaaagagaccggcaaagttcacgtgactgtggatctcaagtactaccggccaactgaagtggactttctgcagggcgactgcaccaaagcgaaacagaagctgaactggaagccccgggtcgctttcgatgagctggtgagggagatggtgcacgccgacgtggagctcatgaggacaaaccccaatgcctgagcagcgcctcggagcccggcccgccctccggctacaatccccgcagagtctccggtgcagacgcgctgcggggatggggagcggcgtgccaatctgcgggtcccctgcggcccctgctgccgctgcgctgtcccggccgcaagagcggggccgccccgccgaggtttgtagcagccgggatgtgaccctccagggtttgggtcgctttgcgtttgtcgaagcctcctctgaatggctttgtgaaatcaagatgttttaatcacattcactttacttgaaattatgttgttacacaacaaattgtggggccttcaaattgtttttctcttttcatattaaaaatggtctttctgtgaactagca

SEQ ID NO: 89716 - DNA, 1440 bp, Homo sapiens
tgtacacaggcagtttgttgggagcgttaccattgcctctggttcctcatgtgtaaaatggatggttcctacctggctgagttcctgctggagaaaggctatgaggtccatggaattgtacggcggtccagttcatttaatacgggtcgaattgagcatctgtataagaatccccaggctcacattgaaggaaacatgaagttgcactatggcgatctcactgacagtacctgccttgtgaagatcattaatgaagtaaagcccacagagatctacaaccttggagcccagagccacgtcaaaatttcctttgacctcgctgagtacactgcggacgttgacggagttggcactctacgacttctagatgcagttaagacttgtggccttatcaactctgtgaagttctaccaagcctcaacaagtgaactttatgggaaagtgcaggaaataccccagaaggagaccacccctttctatccccggtcaccctatggggcagcaaaactctatgcctattggattgtggtgaacttccgtgaggcgtataatctctttgcagtgaacggcattctcttcaatcatgagagtcccagaagaggagctaatttcgttactcgaaaaattagccggtcagtagctaagatttaccttggacaactggaatgtttcagtttgggaaatctggatgccaaacgagattggggccatgccaaggactatgtggaggctatgtggttgatgttgcagaatgacgagccggaggacttcgttatagctactggggaggtccatagtgtccgggaatttgtcgagaaatcattcttgcacattggaaaaaccattgtgtgggaaggaaagaatgaaaatgaagtgggcagatgtaaagagaccggcaaagttcacgtgactgtggatctcaagtactaccggccaactgaagtggactttctgcagggcgactgcaccaaagcgaaacagaagctgaactggaagccccgggtcgctttcgatgagctggtgagggagatggtgcacgccgacgtggagctcatgaggacaaaccccaatgcctgagcagcgcctcggagcccggcccgccctccggctacaatccccgcagagtctccggtgcagacgcgctgcggggatggggagcggcgtgccaatctgcgggtcccctgcggcccctgctgccgctgcgctgtcccggccgcaagagcggggccgccccgccgaggtttgtagcagccgggatgtgaccctccagggtttgggtcgctttgcgtttgtcgaagcctcctctgaatggctttgtgaaatcaagatgttttaatcacattcactttacttgaaattatgttgttacacaacaaattgtggggccttcaaattgtttttctcttttcatattaaaaatggtctttctgtgaactagca

SEQ ID NO: 89717 - DNA, 2344 bp, Homo sapiens
tgacgcgaatgacgctgcgccagtcaggccgcagccccgctgcttggcccgtcgggcccgccttggccggctcggcccgcccccggccctccctgcacggcctcccgtgcgcccctgtcagactgtggcggccggtcgcgcggtgcgctctccctccctgcccgcagcctggagaggcgcttcgtgctgcacacccccgcgttcctgccggcaccgcgcctgccctctgccgcgctccgccctgccgccgaccgcacgcccgccgcgggacatggcacacgcaccggcacgctgccccagcgcccggggctccggggacggcgagatgggcaagcccaggaacgtggcgctcatcaccggtatcacaggccaggatggttcctacctggctgagttcctgctggagaaaggctatgaggtccatggaattgtacggcggtccagttcatttaatacgggtcgaattgagcatctgtataagaatccccaggctcacattgaaggaaacatgaagttgcactatggcgatctcactgacagtacctgccttgtgaagatcattaatgaagtaaagcccacagagatctacaaccttggagcccagagccacgtcaaaatttcctttgacctcgctgagtacactgcggacgttgacggagttggcactctacgacttctagatgcagttaagacttgtggccttatcaactctgtgaagttctaccaagcctcaacaagtgaactttatgggaaagtgcaggaaataccccagaaggagaccacccctttctatccccggtcaccctatggggcagcaaaactctatgcctattggattgtggtgaacttccgtgaggcgtataatctctttgcagtgaacggcattctcttcaatcatgagagtcccagaagaggagctaatttcgttactcgaaaaattagccggtcagtagctaagatttaccttggacaactggaatgtttcagtttgggaaatctggatgccaaacgagattggggccatgccaaggactatgtggaggctatgtggttgatgttgcagaatgacgagccggaggacttcgttatagctactggggaggtccatagtgtccgggaatttgtcgagaaatcattcttgcacattggaaaaaccattgtgtgggaaggaaagaatgaaaatgaagtgggcagatgtaaagagaccggcaaagttcacgtgactgtggatctcaagtactaccggccaactgaagtggactttctgcagggcgactgcaccaaagcgaaacagaagctgaactggaagccccgggtcgctttcgatgagctggtgagggagatggtgcacgccgacgtggagctcatgaggacaaaccccaatgcctgagcagcgcctcggagcccggcccgccctccggctacaatccccgcagagtctccggtgcagacgcgctgcggggatggggagcggcgtgccaatctgcgggtcccctgcggcccctgctgccgctgcgctgtcccggccgcaagagcggggccgccccgccgaggtttgtagcagccgggatgtgaccctccagggtttgggtcgctttgcgtttgtcgaagcctcctctgaatggctttgtgaaatcaagatgttttaatcacattcactttacttgaaattatgttgttacacaacaaattgtggggccttcaaattgtttttctcttttcatattaaaaatggtctttctgtgaactagcattcacagggtcagtgtggatgttttctcccaagttatgaacacggctataggggtccccaaacaaccccacaatccaggccttggaatgagatcgctgtggtcaggccttgccctgttttgagaaagcccttggtgggaggactcctgcaaggctaaggggggcgggggtgctccggcgagcctcctccttagtctttgcctgggacatttctttccccctcctggtgacaagtcactctggaaacctagttcctgcagaagggaggaattcacaccctggctggtctctgctgactataattagaacccaagggctctcacccatctgaaaaagaagtcttgagaaatagaggggggtcagaagaagaaacttgaaggtaagcaaatactgttggaacattccatggcaaagccaccaagttacctagaggtctctgagcctgtgcctttccttgtggtctagaatcttttacacagtgcttatttgcagcctcttcttatgactactaggtcactttttaaatctcagtttaatgtattcattcagccatttatgttaagtgcctaatacatgccagacattgtgctat

SEQ ID NO: 89718 - DNA, 1236 bp, Homo sapiens
tcccagtgctctggctttgcttctctctagctccatccagcttatgaaggtgttgagactgctgagatgaaatcaggaaagcaactaggatcttatgagatttcctttgacctcgctgagtacactgcggacgttgacggagttggcactctacgacttctagatgcagttaagacttgtggccttatcaactctgtgaagttctaccaagcctcaacaagtgaactttatgggaaagtgcaggaaataccccagaaggagaccacccctttctatccccggtcaccctatggggcagcaaaactctatgcctattggattgtggtgaacttccgtgaggcgtataatctctttgcagtgaacggcattctcttcaatcatgagagtcccagaagaggagctaatttcgttactcgaaaaattagccggtcagtagctaagatttaccttggacaactggaatgtttcagtttgggaaatctggatgccaaacgagattggggccatgccaaggactatgtggaggctatgtggttgatgttgcagaatgacgagccggaggacttcgttatagctactggggaggtccatagtgtccgggaatttgtcgagaaatcattcttgcacattggaaaaaccattgtgtgggaaggaaagaatgaaaatgaagtgggcagatgtaaagagaccggcaaagttcacgtgactgtggatctcaagtactaccggccaactgaagtggactttctgcagggcgactgcaccaaagcgaaacagaagctgaactggaagccccgggtcgctttcgatgagctggtgagggagatggtgcacgccgacgtggagctcatgaggacaaaccccaatgcctgagcagcgcctcggagcccggcccgccctccggctacaatccccgcagagtctccggtgcagacgcgctgcggggatggggagcggcgtgccaatctgcgggtcccctgcggcccctgctgccgctgcgctgtcccggccgcaagagcggggccgccccgccgaggtttgtagcagccgggatgtgaccctccagggtttgggtcgctttgcgtttgtcgaagcctcctctgaatggctttgtgaaatcaagatgttttaatcacattcactttacttgaaattatgttgttacacaacaaattgtggggccttcaaattgtttttctcttttcatattaaaaatggtctttctgtgaactagca

SEQ ID NO: 89719 - DNA, 2275 bp, Homo sapiens
tgacgcgaatgacgctgcgccagtcaggccgcagccccgctgcttggcccgtcgggcccgccttggccggctcggcccgcccccggccctccctgcacggcctcccgtgcgcccctgtcagactgtggcggccggtcgcgcggtgcgctctccctccctgcccgcagcctggagaggcgcttcgtgctgcacacccccgcgttcctgccggcaccgcgcctgccctctgccgcgctccgccctgccgccgaccgcacgcccgccgcgggacatggcacacgcaccggcacgctgccccagcgcccggggctccggggacggcgagatgggcaagcccaggaacgtggcgctcatcaccggtatcacaggccaggatggttcctacctggctgagttcctgctggagaaaggctatgaggtccatggaattgtacggcggtccagttcatttaatacgggtcgaattgagcatctgtataagaatccccaggctcacattgaaggaaacatgaagttgcactatggcgatctcactgacagtacctgccttgtgaagatcattaatgaagtaaagcccacagagatctacaaccttggagcccagagccacgtcaaaatttcctttgacctcgctgagtacactgcggacgttgacggagttggcactctacgacttctagatgcagttaagacttgtggccttatcaactctgtgaagttctaccaagcctcaacaagtgaactttatgggaaagtgcaggaaataccccagaaggagaccacccctttctatccccggtcaccctatggggcagcaaaactctatgcctattggattgtggtgaacttccgtgaggcgtataatctctttgcagtgaacggcattctcttcaatcatgagagtcccagaagaggagctaatttcgttactcgaaaaattagccggtcagtagctaagatttaccttggacaactggaatgtttcagtttgggaaatctggatgccaaacgagattggggccatgccaaggactatgtggaggctatgtggttgatgttgcagaatgacgagccggaggacttcgttatagctactggggaggtccatagtgtccgggaatttgtcgagaaatcattcttgcacattggaaaaaccattgtgtgggaaggaaagaatgaaaatgaagtggactttctgcagggcgactgcaccaaagcgaaacagaagctgaactggaagccccgggtcgctttcgatgagctggtgagggagatggtgcacgccgacgtggagctcatgaggacaaaccccaatgcctgagcagcgcctcggagcccggcccgccctccggctacaatccccgcagagtctccggtgcagacgcgctgcggggatggggagcggcgtgccaatctgcgggtcccctgcggcccctgctgccgctgcgctgtcccggccgcaagagcggggccgccccgccgaggtttgtagcagccgggatgtgaccctccagggtttgggtcgctttgcgtttgtcgaagcctcctctgaatggctttgtgaaatcaagatgttttaatcacattcactttacttgaaattatgttgttacacaacaaattgtggggccttcaaattgtttttctcttttcatattaaaaatggtctttctgtgaactagcattcacagggtcagtgtggatgttttctcccaagttatgaacacggctataggggtccccaaacaaccccacaatccaggccttggaatgagatcgctgtggtcaggccttgccctgttttgagaaagcccttggtgggaggactcctgcaaggctaaggggggcgggggtgctccggcgagcctcctccttagtctttgcctgggacatttctttccccctcctggtgacaagtcactctggaaacctagttcctgcagaagggaggaattcacaccctggctggtctctgctgactataattagaacccaagggctctcacccatctgaaaaagaagtcttgagaaatagaggggggtcagaagaagaaacttgaaggtaagcaaatactgttggaacattccatggcaaagccaccaagttacctagaggtctctgagcctgtgcctttccttgtggtctagaatcttttacacagtgcttatttgcagcctcttcttatgactactaggtcactttttaaatctcagtttaatgtattcattcagccatttatgttaagtgcctaatacatgccagacattgtgctat

SEQ ID NO: 89720 - DNA, 1706 bp, Homo sapiens
tgacgcgaatgacgctgcgccagtcaggccgcagccccgctgcttggcccgtcgggcccgccttggccggctcggcccgcccccggccctccctgcacggcctcccgtgcgcccctgtcagactgtggcggccggtcgcgcggtgcgctctccctccctgcccgcagcctggagaggcgcttcgtgctgcacacccccgcgttcctgccggcaccgcgcctgccctctgccgcgctccgccctgccgccgaccgcacgcccgccgcgggacatggcacacgcaccggcacgctgccccagcgcccggggctccggggacggcgagatgggcaagcccaggaacgtggcgctcatcaccggtatcacaggccaggatggttcctacctggctgagttcctgctggagaaaggctatgaggtccatggaattgtacggcggtccagttcatttaatacgggtcgaattgagcatctgtataagaatccccaggctcacattgaaggaaacatgaagttgcactatggcgatctcactgacagtacctgccttgtgaagatcattaatgaagtaaagcccacagagatctacaaccttggagcccagagccacgtcaaaatttcctttgacctcgctgagtacactgcggacgttgacggagttggcactctacgacttctagatgcagttaagacttgtggccttatcaactctgtgaagttctaccaagcctcaacaagtgaactttatgggaaagtgcaggaaataccccagaaggagaccacccctttctatccccggtcaccctatggggcagcaaaactctatgcctattggattgtggtgaacttccgtgaggcgtataatctctttgcagtgaacggcattctcttcaatcatgagagtcccagaagaggagctaatttcgttactcgaaaaattagccggtcagtagctaagatttaccttggacaactggaatgtttcagtttgggaaatctggatgccaaacgagattggggccatgccaaggactatgtggaggctatgtggttgatgttgcagaatgacgagccggaggacttcgttatagctactggggaggtccatagtgtccgggaatttgtcgagaaatcattcttgcacattggaaaaaccattgtgtgggaaggaaagaatgaaaatgaagtgggcagatgtaaagagaccggcaaagttcacgtgactgtggatctcaagtactaccggccaactgaagtggtaaggactctctggccacccagtgcgtggccacgtttggctggctggctgggcaaatgcgctcatggaatgcctggtgccagcctttggagctgtcagttcagctccctggcatccttcagcgtgcatttccaaaatcagaacacagtgaattcaatttgagattatcattcttaccacaaacttcattgctctataaaggaaaacaagagttaaacccaccaaaagaaatcattgatttcagaaatggaatctcacatcacacgcagatctcctcatgttggtctcctattctaatggctggtccctgataacctacaggatgcctgacttaacaacgctgtcccagacctgcaggacatctaggtcctctccagctatgtctatgtctgtgtctgtgtactcatacacagtgcatacttgcacactataccataaatggtctccc

SEQ ID NO: 89721 - DNA, 1180 bp, Homo sapiens
tgacgcgaatgacgctgcgccagtcaggccgcagccccgctgcttggcccgtcgggcccgccttggccggctcggcccgcccccggccctccctgcacggcctcccgtgcgcccctgtcagactgtggcggccggtcgcgcggtgcgctctccctccctgcccgcagcctggagaggcgcttcgtgctgcacacccccgcgttcctgccggcaccgcgcctgccctctgccgcgctccgccctgccgccgaccgcacgcccgccgcgggacatggcacacgcaccggcacgctgccccagcgcccggggctccggggacggcgagatgggcaagcccaggaacgtggcgctcatcaccggtatcacaggccaggatggttcctacctggctgagttcctgctggagaaaggctatgaggtccatggaattgtacggcggtccagttcatttaatacgggtcgaattgagcatctgtataagaatccccaggctcacattgaaggaaacatgaagttgcactatggcgatctcactgacagtacctgccttgtgaagatcattaatgaagtaaagcccacagagatctacaaccttggagcccagagccacgtcaaaatttcctttgacctcgctgagtacactgcggacgttgacggagttggcactctacgacttctagatgcagttaagacttgtggccttatcaactctgtgaagttctaccaagcctcaacaagtgaactttatgggaaagtgcaggaaataccccagaaggagaccacccctttctatccccggtcaccctatggggcagcaaaactctatgcctattggattgtggtgaacttccgtgaggcgtataatctctttgcagtgaacggcattctcttcaatcatgagagtcccagaagaggagctaatttcgttactcgaaaaattagccggtcagtagctaagatttaccttggacaactggaatgtttcagtttgggaaatctggatgccaaacgagattggggccatgccaaggactatgtggagctagctccactgtgagtgtagtccacatctgggcacaacacttcccaaatgccaagctagcgctgctgcgagtgtagtccacatctgggcacaacaggcccacgtttgaattagcataaaataaaaatattttatata

SEQ ID NO: 89722 - DNA, 934 bp, Homo sapiens
tgacgcgaatgacgctgcgccagtcaggccgcagccccgctgcttggcccgtcgggcccgccttggccggctcggcccgcccccggccctccctgcacggcctcccgtgcgcccctgtcagactgtggcggccggtcgcgcggtgcgctctccctccctgcccgcagcctggagaggcgcttcgtgctgcacacccccgcgttcctgccggcaccgcgcctgccctctgccgcgctccgccctgccgccgaccgcacgcccgccgcgggacatggcacacgcaccggcacgctgccccagcgcccggggctccggggacggcgagatgggcaagcccaggaacgtggcgctcatcaccggtatcacaggccaggtgagtgcgggggcgggggcgcgccggccgaggcagcctgggcacgcgtgctctccctacgcgccgctactcgtgggctgcggtctctccaggaacagccctctcggcgtcccggaaggggtctgctgccgggaggtgggacggaaggtacggtgcagttagtgtgttgcgtgtggggtgtgcgggatacatcgagcgcctctggtctttctctgggggctgtgagcgtgtgtgccgcgcgggatgtcgcgctcacacccgggcaggaccgcccgctctcacctgcccctcaggtgaccgcagcgtctcttcctccaagcccatgtcgtgcttcgcagctcctagtgccggaaagggaaaagaaccggtgatcaatgaacttgcgggtgaggtcttcttgatgtgtctcggctcaaggggcgcttacctgctaacgtttgggaagcaagaaaaagggtgctttgctggtttcgtcccctatcaccggatttccagatagaaaagagaacatgaaagaaagtaatgctgtggagtcacctactaggacatgtttaggaaaaa

SEQ ID NO: 89723 - DNA, 1793 bp, Homo sapiens
tgacgcgaatgacgctgcgccagtcaggccgcagccccgctgcttggcccgtcgggcccgccttggccggctcggcccgcccccggccctccctgcacggcctcccgtgcgcccctgtcagactgtggcggccggtcgcgcggtgcgctctccctccctgcccgcagcctggagaggcgcttcgtgctgcacacccccgcgttcctgccggcaccgcgcctgccctctgccgcgctccgccctgccgccgaccgcacgcccgccgcgggacatggcacacgcaccggcacgctgccccagcgcccggggctccggggacggcgagatgggcaagcccaggaacgtggcgctcatcaccggtatcacaggccaggatggttcctacctggctgagttcctgctggagaaaggctatgagatggttcctacctggctgagttcctgctggagaaaggctagtccatggaattgtacggcggtccagttcatttaatacgggtcgaattgagcatctgtataagaatccccaggctcacattgaaggaaacatgaagttgcactatggcgatctcactgacagtacctgccttgtgaagatcattaatgaagtaaagcccacagagatctacaaccttggagcccagagccacgtcaaaatttcctttgacctcgctgagtacactgcggacgttgacggagttggcactctacgacttctagatgcagttaagacttgtggccttatcaactctgtgaagttctaccaagcctcaacaagtgaactttatgggaaagtgcaggaaataccccagaaggagaccacccctttctatccccggtcaccctatggggcagcaaaactctatgcctattggattgtggtgaacttccgtgaggcgtataatctctttgcagtgaacggcattctcttcaatcatgagagtcccagaagaggagctaatttcgttactcgaaaaattagccggtcagtagctaagatttaccttggacaactggaatgtttcagtttgggaaatctggatgccaaacgagattggggccatgccaaggactatgtggaggctatgtggttgatgttgcagaatgacgagccggaggacttcgttatagctactggggaggtccatagtgtccgggaatttgtcgagaaatcattcttgcacattggaaaaaccattgtgtgggaaggaaagaatgaaaatgaagtgggcagatgtaaagagaccggcaaagttcacgtgactgtggatctcaagtactaccggccaactgaagtggactttctgcagggcgactgcaccaaagcgaaacagaagctgaactggaagccccgggtcgctttcgatgagctggtgagggagatggtgcacgccgacgtggagctcatgaggacaaaccccaatgcctgagcagcgcctcggagcccggcccgccctccggctacaatccccgcagagtctccggtgcagacgcgctgcggggatggggagcggcgtgccaatctgcgggtcccctgcggcccctgctgccgctgcgctgtcccggccgcaagagcggggccgccccgccgaggtttgtagcagccgggatgtgaccctccagggtttgggtcgctttgcgtttgtcgaagcctcctctgaatggctttgtgaaatcaagatgttttaatcacattcactttacttgaaattatgttgttacacaacaaattgtggggccttcaaattgtttttctcttttcatattaaaaatggtctttctgtgaactagca

SEQ ID NO: 89724 - DNA, 1684 bp, Homo sapiens
tgacgcgaatgacgctgcgccagtcaggccgcagccccgctgcttggcccgtcgggcccgccttggccggctcggcccgcccccggccctccctgcacggcctcccgtgcgcccctgtcagactgtggcggccggtcgcgcggtgcgctctccctccctgcccgcagcctggagaggcgcttcgtgctgcacacccccgcgttcctgccggcaccgcgcctgccctctgccgcgctccgccctgccgccgaccgcacgcccgccgcgggacatggcacacgcaccggcacgctgccccagcgcccggggctccggggacggcgagatgggcaagcccaggaacgtggcgctcatcaccggtatcacaggccaggatggttcctacctggctgagttcctgctggagaaaggctatgaggtccatggaattgtacggcggtccagttcatttaatacgggtcgaattgagcatctgtataagaatccccaggctcacattgaaggaaacatgaagttgcactatggcgatctcactgacagtacctgccttgtgaagatcattaatgaagtaaagcccacagagatctacaaccttggagcccagagccacgtcaaaatttcctttgacctcgctgagtacactgcggacgttgacggagttggcactctacgacttctagatgcagttaagacttgtggccttatcaactctgtgaagttctaccaagcctcaacaagtgaactttatgggaaagtgcaggaaataccccagaaggagaccacccctttctatccccggtcaccctatggggcagcaaaactctatgcctattggattgtggtgaacttccgtgaggcgtataatctctttgcagtgaacggcattctcttcaatcatgagagtcccagaagaggagctaatttcgttactcgaaaaattagccggtcagtagctaagatttaccttggacaactggaatgtttcagtttgggaaatctggatgccaaacgagattggggccatgccaaggactatgtggaggctatgtggttgatgttgcagaatgacgagccggaggacttcgttatagctactggggaggtccatagtgtccgggaatttgtcgagaaatcattcttgcacattggaaaaaccattgtgtgggaaggaaagaatgaaaatgaagtggactttctgcagggcgactgcaccaaagcgaaacagaagctgaactggaagccccgggtcgctttcgatgagctggtgagggagatggtgcacgccgacgtggagctcatgaggacaaaccccaatgcctgagcagcgcctcggagcccggcccgccctccggctacaatccccgcagagtctccggtgcagacgcgctgcggggatggggagcggcgtgccaatctgcgggtcccctgcggcccctgctgccgctgcgctgtcccggccgcaagagcggggccgccccgccgaggtttgtagcagccgggatgtgaccctccagggtttgggtcgctttgcgtttgtcgaagcctcctctgaatggctttgtgaaatcaagatgttttaatcacattcactttacttgaaattatgttgttacacaacaaattgtggggccttcaaattgtttttctcttttcatattaaaaatggtctttctgtgaactagca

SEQ ID NO: 89725 - DNA, 2017 bp, Homo sapiens
tgacgcgaatgacgctgcgccagtcaggccgcagccccgctgcttggcccgtcgggcccgccttggccggctcggcccgcccccggccctccctgcacggcctcccgtgcgcccctgtcagactgtggcggccggtcgcgcggtgcgctctccctccctgcccgcagcctggagaggcgcttcgtgctgcacacccccgcgttcctgccggcaccgcgcctgccctctgccgcgctccgccctgccgccgaccgcacgcccgccgcgggacatggcacacgcaccggcacgctgccccagcgcccggggctccggggacggcgagatgggcaagcccaggaacgtggcgctcatcaccggtatcacaggccaggatggttcctacctggctgagttcctgctggagaaaggctatgaggtccatggaattgtacggcggtccagttcatttaatacgggtcgaattgagcatctgtataagaatccccaggctcacattgaaggaaacatgaagttgcactatggcgatctcactgacagtacctgccttgtgaagatcattaatgaagtaaagcccacagagatctacaaccttggagcccagagccacgtcaaaatttcctttgacctcgctgagtacactgcggacgttgacggagttggcactctacgacttctagatgcagttaagacttgtggccttatcaactctgtgaagttctaccaagcctcaacaagtgaactttatgggaaagtgcaggaaataccccagaaggagaccacccctttctatccccggtcaccctatggggcagcaaaactctatgcctattggattgtggtgaacttccgtgaggcgtataatctctttgcagtgaacggcattctcttcaatcatgagagtcccagaagaggagctaatttcgttactcgaaaaattagccggtcagtagctaagatttaccttggacaactggaatgtttcagtttgggaaatctggatgccaaacgagattggggccatgccaaggactatgtggaggctatgtggttgatgttgcagaatgacgagccggaggacttcgttatagctactggggaggtccatagtgtccgggaatttgtcgagaaatcattcttgcacattggaaaaaccattgtgtgggaaggaaagaatgaaaatgaagtgggcagatgtaaagagaccggcaaagttcacgtgactgtggatctcaagtactaccggccaactgaagtggagaccaattaattgttcaaaggtaatatatagagatctcaagagcatttactttggcacagtctctgcccctttgtggtctggctaacaataaagctaagatttgttttgtaatgacggttccagttggactggaattcctttgaagttcctgaagtttgctgttgtgagagctcaagatattatttgactgcaatgaaacactctctgtgtattatcaaaatatcgtatacactgaactgtaacaacttgcagtaatcagacttctccttcgaggtggcctgcgtgagtagagagcatccacagagagatgagcttctcccaacatccatttagtgttcagtcatcacgggccactcatggatctgaaccttcttacaaggtcgataccaacaggtatgaggagcagagagcagatcagcacggagcagcattagctggggcccccttgcctggcctggcagtgaagatagagcaccatgccagttgttcagcttctcagcgcttgcgtcagctgacctaaattatttaaggatgttgtcacctctaaataaatatagtcattgtcctggtctctatttatattttaaaactctttcccagcccaccccgatggcctaaaacaattcatatatttcagtagaagagggtgtcacagggctatttgcacaggtttggatccagtgccagcgttagccttcacacaagttacactcctctgagatgtaactgtctcctgtgtatgagtgccaaagtatt

SEQ ID NO: 89726 - DNA, 369 bp, Homo sapiens
gcttaacatgctgtgaacagacagtgtctggagaggatgacaggagtgggagaggaagatgccgctgcagagacttctagcaacgaactccgacactgacatccctgggcaaatcactgccacttgtttgaaaaacagcctcaagtggatgtcatgctgacgatgctgagatgacttgagccaaatgaaattgcatgtatgactgttcatttctcctcactccactcacggtaggtgccagagacagagggcctcaagccagggaaggaggatgtgacattgctttcctcttcgtagaggcgatgtcacccttgggcacttgctcctagagagctgcatgcagctggcaactgcaccagcacagcaata

SEQ ID NO: 89727 - DNA, 116 bp, Homo sapiens
cagcaacaacatgaacttctacacagcctgatctagcgatgagcccaaatcgattcagcaactccaaaggacttaggattgatgtcattggctatctaacccccaggaatatgagt

SEQ ID NO: 89728 - DNA, 393 bp, Homo sapiens
ggatgagatttgctttctccgttaaggtgatgcgtaaagctttctttggagggagagaaaaccctagagtttcctgaccttccttaacctgagctgcttggttccctagaagcagaaattgatcatattagaacccaaactcataccaactttgaccttcatgaagtactcaagtgtttctgctcttcttcctcatgtgatgtagaaagtattaaaagtgatgagtttaggccaggcactaactggttcacgcctgtaatctcagcactttcagaggccgaggtgggtgcatcacctgtggtcaggagttccagaccagcctgggcaacatggtgaaactctctctctactaaaaatacaaaaactagctgtgtgtggtggtctgtgcctgta

SEQ ID NO: 89729 - DNA, 855 bp, Homo sapiens
taaaataataataacatgccatataagttctgggcaacaggcagataatgcaaatcctcagaatcttataccactaaaaggttttttagtgaaagtttgtttttcagtccagttcaagaaaaacacaaagagagcacactgagttcccatgtcccctgcatcatttctcctgttattaacatcttacagcagtgtattatattcattaccattagtaatagtaatagtagctgaagtccatacattattcagatatccttagtttttatctgatgtcctttttgtattccaggattccacccacaataccacattgcatttggtcattgatttctattccaggtggtctggattcagtctttactggtagtatgcgtctgtgtgtaaaagtagttactctttctaagggtctctattgacgatgctagtaaagcattcatagcttcataccggcgtagtaatattaacctccatcccagagcttagctgtatagccactttatctaagcaaaacataggcaacacctagcgtggaaattaaaaaataaatagcccacagcagccacagcaagtgacagcacatagctgctaacattacttctctaattcatactttattaaagaagggaagactagggaaggggaggacttgaggatggaagccaaacaaacatccaggcttggatgttacatttgagatttctgtgagacatgagaatgcagatagttggaaccatgcatctcgctgcagaaagagggaggagccaggagactgggtaagagttcatcacccagagagtgagaacaggtgttggagcaaagaccagcagactgacctccaggtttggacattaa

SEQ ID NO: 89730 - DNA, 482 bp, Homo sapiens
tttggtaaggggtttttcccctaacaatcacagccgtgccctctgcaccttccatgaaaccctgaaaagactggaaagaatgcgtcacctccgtgacagcttcttcacccccgcctgttgctggtcttggtgcttgtctacagagatttagtgtcatggcaagaaattaggctttgggcctaaaagggtttgattcagatatggcctccccacatccttggtatgtgaacctaatatcacgaagaccctctcctgtgtggtggcttgggagtggaatctgggtttgaagcccagctctgccagtcactggcaatgtggccttggatcagttatctacaggtttttgaacctcagtttcctgatctataggattggggcaataatatctaacttattttggggatagtaagttacattataaaatgcctcatcttccacaatgcatgagaacaccagccaaatcatagcccctgtgtagaata

SEQ ID NO: 89731 - DNA, 244 bp, Homo sapiens
aaactttgcaattaacctttacagaaaccagaggaagccgctcatgacacccgggagctcacagaggctctgaagtttctattcaagaaaacaactccagatggggctgatctggaagacaagtaacatcttccttttcttggtgctcgcctgccgtgctctaggtgcttttagagatgctggtctgtgtgctagggaagcgatgaaccatactgttagtctattaaacataactcaacctggc

SEQ ID NO: 89732 - DNA, 951 bp, Homo sapiens
gcgaaaccctgtctctaccaaaaatacaaaaattagccaggcgtggtggcgggcacctgtaatctcagctactcgagaggctgaggcaggagaatctcttgaacctgggaggtggagattgcagtgagccgaggtcgtgccattgcactccagcctggacatcaaagtgagaatcaggccaaaaaaaaaaaaaaaaaaaaaaccttgacgtgtcaatgtttgtgtctggcctaggagaatgaggatgacagcttcacttgccttttgaagaagaaacattacaaaaccttaacctgaagtataaagtcaaaagatacggctctttctcacacttgcaagacttacaaatacagcctcaaacattatgacacaccaacaatatctagaaagtaagaactggtgtagcaatgatgcttcatattctagctgtagccacagagttgagggtagtttttgtaggtctaaaataataatctataaagatgtccaaagttaaattttcaacaatacaaatctagagaagtgacagcctacattacttcattattactcttcttttagtctttagtctttaatattttaaagtttactctataaatcagcattttgtaatcctttataaactcatccagatttaaatgctactttttcatgaagaaaggatgataactttatagacagtcagtgcaacacacacattttatctcatcaccgtcttaactgcccctcccatccactgtctcataaagccctcagctgaactaagataaataatacaatggaaattattttcagttccccttgcactgtcaaagtaaaacaagaaaactgaaaagctgcacccccagcaagaaagggaagtatgctgttgtatgcatcattactcaacaattaccctctaactaaacatcctgtttaagagtttaattcaaacaacagccagactgttaa

SEQ ID NO: 89733 - DNA, 455 bp, Homo sapiens
acgctaaggtgcaggacagtatggcagcagtgagctatgatcatgccaccacactccagcctgggtgacagatcaaaactctgtctctaactcaatcaatcgaaagctagaaatgattaagcttagtgaggaaagcacatcaaaagctgatatggggccgggcgtggtggcacatgtcctgttatcccagctacttgggaggctgaggcaggagaatcacttgaatcctggagggcggaggttgcagtgagccgagatcaagccactgcactccagcctgggtgacagactgagatcctgtgtgaaaaaaacaaagttttacatttaatttgatactcatgatcattcgatggggtgagtactattatttattcccgtttcacagataaggaaactgaggcttaggcaggttgggtggcatgcccagggccccgtacagtgggagctggagttca

SEQ ID NO: 89734 - DNA, 146 bp, Homo sapiens
tttaaaggagtgctgtttttcctttcttgcctaatctagccccctcctgagtccctgtgaacctctggtatcaactcagtttgggcccagtagaaaggagtggcctagaatagaaaaatctcctatccatcttttacaatttgtct

SEQ ID NO: 89735 - DNA, 318 bp, Homo sapiens
  misc_feature (127)..(127): n is a, c, g, or t
  misc_feature (178)..(178): n is a, c, g, or t
  misc_feature (267)..(268): n is a, c, g, or t
gagacagagtcttgctctgtcaccaggctggagtgcaatggtgcaatctcggctcactgcaacctccgcttcccgggttcaagtgattctcctgcctcagcctcccaagtagctgggactacaggcncacatcaccatgcccacctaatttatgtatttttagtagaaatgaggtttnaccatgttggccaggccaggcacagtagctcatgcctttaatccagcactttgggaggccaaggcgggcagatcacgaagtcaaaaaannctttaccacctgtacaaaaccctgtccaaagtaagaaataattaaatctt

SEQ ID NO: 89736 - DNA, 385 bp, Homo sapiens
attcaattttgttagataattttcaactattttccaaagtagttctaccaatatatactattatcatcaattgatgagaattctacttgctccacatcctcattaacacttgttaacgtcagaccttttaatatttgcaaatctgatgggtatatagtggtatttcatttggttttaattttctttaccctgattaccaaaaggttgtagctttttatttgtttgttttttagccacttggatatcctcctttgtgaagtgccttttcaataatttgtccaccttcctattgggtcacctgtcttttcttaacaatttaaaggtattttctatgtatctggatcttatttgtctttatgccctataaatatattttcccattctg

SEQ ID NO: 89737 - DNA, 306 bp, Homo sapiens
ggatgttgggtgtgctgagtgatagtgttacttgatgccgtacaggtggctgctctccctgccctcctggccccaacagcagcctggtagcacagggagggtcccaggccaggccccctcaggggcagtctgaggcagttcctgcagggactccgctccattttctcctggacctagtgcctgagagccaggccctggcctctggccttctcctcccaagtcccagccagggtcctctcaggctgggcacagtggggagggagggagtctgagtgtgcttttccctggggagttgaattcagcctc

SEQ ID NO: 89738 - DNA, 450 bp, Homo sapiens
ccgctgtctgcagtagatgcccttgcttctggcctcctgttactcttgtttctttctttatcttttcttgaaaagattctaaaatgtccccgcctgtcagtgcccggatctcccgcaggcctggtccaagtggaggggaattccgctgctgggaccttctgctcccggggctgtttcccgtcctgctctgcgctggcgcaggctgcgaggagctctgaagccagtgggggccgtgcccggcctccctgctccccacctttagggagaccccctctcagaacacatggtgctgtggaccacccctcagtcccctgggtagcatccagggactttctggggtctctcatttctgtcccagaaagcacgaccccgggattagagaagatcgccctccacgctccagagactttggaccacatgatgccaagtttatggacagacccctgagtc

SEQ ID NO: 89739 - DNA, 374 bp, Homo sapiens
atttctaactatcatttaccaggggcactatgccactttcatttcctttgcttcattctctttaatgattattaccatgttcaagttctctaaaaagtaatatatcctggtggtgtatttttaataatagtctgcagatatttccagtggtaacttttccaattttatattttattattctgtaatggaagtaaggccattagtgtttattataattttgtataatgctttaatgtatcttaaataatttcccccaagtaattttaattatttgagtgtatgtgaaattggctggaatgggaattgtatctaggcattcttagaactcataacagtgctagaagtagacataatttatgtttgcaaaaaaggaa

SEQ ID NO: 89740 - DNA, 164 bp, Homo sapiens
gattaagtgctctccgtttagcctggcattcatggatttttatagtcaggacccaactaattctccatagctcttctccgaacaatcacgtcagccacaccggtctacttgtcacctctgaacaggctttcctctgtttggtgaatgctattctggtgctgttc

SEQ ID NO: 89741 - DNA, 275 bp, Homo sapiens
ttcacatggaatccaggaaacactgtcgacagagaccaagaaaagctaaattccccaagtaaatggggaaggctgtggctatggattttgggagtttctatgtttaaacaaattacccaccccccaatctgtagatgcagtaaatcttaagcaaaatcccaacagggtttttaaaatgaacttgacaagcactgtcattttatatggaaggcagaggggcaggaacacatcaagtatcttggaaaagaacatggattgccaggcacagtggctca

SEQ ID NO: 89742 - DNA, 750 bp, Homo sapiens
aggcatgcaccaccacacccagctgattttgtatttttagtagagacgggttttctccatgttggtcaggctggtcttgaaatcctgacctcaggtgatctgcccacctcggcctcccagagtgctgggattacaagtgtgagccattgcacctggccccctggctaatttttaattttttatagagttggagtctcactgtgttgcctgggctggtctcaaactcctggttccaagtgatcctctcaccttggcctcccaaagtgctgggattacaggcacgagccacctcacccaaccttgaatagttttgtcatacaatttgaaattgggaagagtgaatcctccaactttgttctttttcagtattgttttggctcttctggatttcttgcatttctatgtgaattttaggatcagcttattgattctgcaaaaaaccagctgggatttttataggaattgtgttggttcttcacatcaatttgggtagtattaccaccttaacaatattaagttgtctgatacaaaaacatttaatgtttttccatttatttggtcttacttaatttctattaacaatgttttgtactttttagtgtacaaatcctcctattctttgttaaatttcttcctgtgtattattctttttgatgctattgtaagtagaattgtttcttttaattttatattcagattgtttatttctaatatatagaaatatacttgatttttgtatatcaattgtgt

SEQ ID NO: 89743 - DNA, 440 bp, Homo sapiens
gcctagttccggtggggggatatgtgtaggtctatttctggacttgatactttctttgtactcctaaggacgtactcatacgaggagaatatcagatccagaaatagacctgcacatatctagtcaagtggtttttgacagaggtgccaaggtaattcaatgggggaaaggaaagtctcctcaacaaatggtgctggatcacccaggttgccatatggacaaaaaggggcatcaacccttattcaagagctaactcaaaatggatcataagcctcaatgtaaaacctgaaactatacaacttctagaagaaaacaaaagagaaaattgttgcaatcttggggatagccaaaattttcttagacatggcaccaaaaggctgggcgcagtgggcttcacgcctgttaatcccagcactttcgggaggccgaggcgggcagat

SEQ ID NO: 89744 - DNA, 317 bp, Homo sapiens
agggtaaattgtgagactgtttgtatatattttttgtttatatgtttttgttgttgttatgttgttatttttatttataaaatgatagatctgtgggtaggttctgagaaatgaatagcttgtatttccttttttatgaaagaagaagaaaatgaagttcaagtggaaagtatctccagaaagtttaacattttcttattaaccaactcattgattggcatgtgaaacttgagatattttatatagcactttttaaatgaggatctagcttcacttatcatacaacacattaaatagcaggtcatgtcatataggga

SEQ ID NO: 89745 - DNA, 344 bp, Homo sapiens
aaacaccgcaatctagtaattaaaaaaaaattttgagtaaagtatgaaattttgttaaggggctgcatgtatagttttgatatgaatgaagctatgtttcagatggttaatttactttggttgtttggaatttccaatggttttttattttacagagtcctgccaaatttataacaactgtagggcagggtgtggatagggatatttttactgagtaaatactattacatgtactagaggtattctgttatgttaaaatatcccgttagagatacatgatgaaacacatatggatgaaatattatggagtatgagatattgcaaaataacatggaaagatgggg

SEQ ID NO: 89746 - DNA, 540 bp, Homo sapiens
aatagagcactgggttccattcccagggccatctagctggtggccatgtgtccgtcatttcacagggtggggttacatggtgtggcagggcaaagttttgggagtccatttggaaactatcagtctctcctaggcttattttctgttgtgtaaggaatgaatgtgttgtaaggattgaatgatgacatgacatgctttttaaaatttctagctcagtctctttaatgtaaaaatatgtaatcatccagctcatagttctgagggaaaccctatatcacatatattttacactgaaggaagacattaaaattccattctcttcacacagaaccaaccaaccaggatggctggcctgttggggaagcaggttctgccatctggttctcagcaggcatgtctggaagcaggagggagcgtctctcccatttgggtaccaaagcctctgtaacagtcaggaatgttctgctgtggcctttatcctaaacttggcttggccagtgtgtgtctggggcaggagcagaggccgggacacagctgagc

SEQ ID NO: 89747 - DNA, 541 bp, Homo sapiens
atagtttctccacaggcataagaggcaaagcattgtttcagaagtggactggcacctcacctgagatactcaagactggcaacatgggtctacattctttgttaccacagattcccttgtgtccggagagattccctagctctaatgacagattttttggggggtaatgaggctatgagaagattgaggatctaggtacttgcctttaactctacagcatacaaggtgtgtggctcttatctctaggacaccaatatttaatgttgcatatcatgtatctccagtacaagaagaaagtttatcagaatttagttaatgttggaaactttgtaatataaacaatgtaaacactacattgacaaaaatattttattaatacaaagaatatgcatatagtttgcttactacagaaattcttgtttttgatgtagacaacccaaaggagtttttatgtatatagattgtgaataaattgggaaaagaaatagagataagtagagattatttcacttcattaaacttttgaagtcctaaattagtt

SEQ ID NO: 89748 - DNA, 333 bp, Homo sapiens
gagagagagagagagagagagagagagagagagagagagagagagagagagcagattgctaagcaatcttcatatgcagtgtgctacttaatccttatcacaattcaattaggaccttcaatctgagttcttttccagacttcattcactgcagttgtaggaaaaattcttcccttcaccttgaaaatattaactcagtcacttcatcttatagaaagaatacagcattgtctaatgactagaaaggtcagggaaacagaacaattttcaaagagaaagaaggattcagacatcaaaatatttattcaatggtgagaaaaaaaaatttgctat

SEQ ID NO: 89749 - DNA, 438 bp, Homo sapiens
actgcagttaggttaaaaataaaacaatatgattaaaattagaaatgcaaaataggaaagatttgtactaaaataagctgtttgtactaaaataagccattgctctaaaatacaaataatatttaattctatattatgatactcaaaagaaatgaggccaaagcttttttcctgcagaatgtgggacttgaaataattaatgatagttgaaaatgttatttcaagaactaaggtattattataaaatttaattgagattagagcttgatggattaatttgatttatttctatggcactttgtaattgtataaattatgcattctcttttccatgttccttaaaataatagcatctttcagttaaaaatttggcctgacaattcagagatacggagtctaatccaagatccacccctgattatgtgcccctgaggaatc

SEQ ID NO: 89750 - DNA, 172 bp, Homo sapiens
tgttgcgacccctgagatgtcaactcctgcctttctgttgtgtttgcagaatcttggctgggaggtagagggggtgacagaggaggcagagagcccaggtagcctcagtcctggaacttggcactctctgattgtctcagcctccctgtctgaccacctgtctctcacaaag

SEQ ID NO: 89751 - DNA, 377 bp, Homo sapiens
gttaaaagttgaaacagaaaacatggaagtatgcttttaattgatcattgttatatatagagagtgaattaaaaaatttatgcatataaagttactaataattttttgagcacatatagtttcctacatacttacctatatctattctttaatccttgtaacagccccatgaactatctactattattatcatcattccatcttgcaggtgaggaagctgaggtctagagaagttcattaatttgactaaaggcacacagtcaataaatggtagagccaaggtttgaaccctggcattctggttttatgcttttaaccagctgcttattattggtatcttattgtgatgattttggaaaacactactaatttatttg

SEQ ID NO: 89752 - DNA, 256 bp, Homo sapiens
aaaagaaacaataaataattttaagagagaactagttgggtttcaggggagctaccactgaagccttaaaggtctgaaggtggtgtttgtaggtggagaaagagggcattccatgcagaacaggaagaggcagagtctcagaacagaaatatggattgtttagggaatggtaagtaattgtagctttgtataaaatgtatgtgtgaaggccagctttaaatgataatggtatgtaaatgtggttgggcaaagtgag

SEQ ID NO: 89753 - DNA, 396 bp, Homo sapiens
acctcccgggttcaagcaattctcctgcctcagcctcctgagtagctgggatcacaggtgcctgccaccatgcccggctaattttttatatttttagtagagatggggtttcaccatgttggccaggctggtctcaaactcctgacctcaggtgatctgcctgcctcggcctcccaaagtgctgggattacaggcgtgagccactgcacccggccacaagccagatatttgaaattcctattaaactggagagcaaaagccgtcataccatactttcatttgcatcctagcacagacacctaaacattcatattgtctttatccccagtgaattgcaaaggcctagggtttccccagaatttgggtttacagtacacactccctgagcgatattcc

SEQ ID NO: 89754 - DNA, 420 bp, Homo sapiens
ccttccttctccagcctgccccctgaaactctggccattaactccctcaatttgctgagctcactacagtggcacagagaagattgaggtggtccgggaccctaggttggggtccagttcccagctgggttcaattttttttagggtgaatggagggagagttggggactgaaaagccttcaaagacaatgttattacagcagtctccccttatccaaagtttccttttcctgagtttcagttagctatggtcaaccgcttggaaaatagttgaacacagtacaataagatattttgaggctgggagtggtggctcatgcctgtaataatcccgggactttgtgagaccaagtttgaaggatcacttgaacccaggagtttgagaccagcctgggcaacatagtaagacctcatctctac

SEQ ID NO: 89755 - DNA, 445 bp, Homo sapiens
aagcactgaggtatggaggtagaaccaggtaggggcagcacattagcagcccaggaaggaaaaaaattgaggagggagtggctcccattcttcattgattcagaggttaaaccacaagctagtgagaacatatattatttttgtaacaaaacagaggatgtacaaactttacatagcagattgtgtatgaaagaactcactcttccattcagagttgaagaaatatttatagggtgcttactctgtgccagacactgtgactattatctaggtaacattgcacacaagtgtgttcctaacttctgaagcggacatcattacactctccatgcccctgggtgccatccgaaaaccatgagttatgttatttcacatggcattaaggagcacatggcattccttttcatggaaatctaaatacgcacagatgtctgattgtgcttct

SEQ ID NO: 89756 - DNA, 266 bp, Homo sapiens
tggacagagaagtgaatttttaacacataatctctaaatactcgtaatgcaaaagtagaaatgtctgtaaagtaaatagactaaatttgaataatataacctcacataaaaatacacaatctggaatcaggatcagttgagaaaagctgtaaaattgctgtacataggtatggaattttaaaaaacagttattggtaccagtcaaaattattgctaaactaaaattatatgaaaaaaacataattagcattattataagcataaag

SEQ ID NO: 89757 - DNA, 411 bp, Homo sapiens
ctctatgagcctaacaagcctggctggcacatatcctgtgcatttaaactcatttttctttacctttccctctttctcacttctactgccccaagcaggaagggttgaccgcctccttttcaaacttcagatccagtcttcttactcctagaatcttctctgctcaacatgccatagtactcttacacttttctgaattcacagtggttattttgaaattaatctcacactgttttgtcatttcttctgtaataatttaggtttagtatagtcaagagtttgggttctgaagtcagatttttggcattaaattctggctccccctcatttctgatatttgaccaaattacttaatctgctaaccttcagctcctttgttggtgaaaagaagattgtggtgacagttacacc

SEQ ID NO: 89758 - DNA, 199 bp, Homo sapiens
agtttctctggcttcccctcacccacacctctcttctgtgtctcttctgcctccaaccagagttaaatctcttaagtgctcatgtgattacatggagcccactgcatgaatcacgatcgtctcctaaggtctgcaaccttaattacatctgcaaaatcccttatgtgatgtaacatattcagtttccagggcatcttgg

SEQ ID NO: 89759 - DNA, 214 bp, Homo sapiens
gctagaggatcccgtactgtggtgtaccgtcccaccagagtggcacagtgactagcctagagtcacatcacttttgacagcagatgaaggaccacattctagttttcttgtgcccaaatcctatgccctttcttccttagtggaagaggagctggctggaagcctttttgtcctcctttcaaacatactttcacactggggaaaaaaaatgaat

SEQ ID NO: 89760 - DNA, 382 bp, Homo sapiens
aaaagctttctacactaattggagatacagatgaaatgctggtggaacgtgttgctttttgcttcttatttttgcttttgactacttttggttctttatgtgtttctttatcccctcaaatttcttatttttatagttttaaatagatttgtaacagaatttaaatgcagaaaaagaaatattatttgttataataatatagtaagttaggcatgtatatgtattttatttctaaaaatttcttttattaaaatttgctttctctaatgcttttattgtcattttacacgaattattgttagatatttttcaatgattttttatagattttttataccagtgtaccatctccaaaggttcttattatgccttaaattgtaaa

SEQ ID NO: 89761 - DNA, 1474 bp, Homo sapiens
aatttccttagtgtgcaattgtatcttacaattatcttattaattttttatataccaaacctagaataatactgtatacatagttggtgtccaataattaattaattttttttcctgcaaatatggaggcagtagaaaaaagaaaaaaatacttttatttttcttaacacaggacagagaaacttggaaaaggaaagggcttaatggagaacttcctttttcctaactacactattgggagttttagagacagccaaatagagaaagttctctccagaggagctgatcctttcatcccaaagaatgcaacagaattgtttacattttggcattgagccttctagtcagttttttttcctgtaactaactatactacacatgtatatgatatattaatataaatgagaatatatgatttggcacctttcccaaagtactatccttcaagcatattttatgtttatttttttgacgttagttttaatagctgcacagtatttcattatgcataaaccatttttgtcttttttcttctcttaagacagtgtctctctctgttgctcaggctggagtgccgtaacgggatcatggctcactgcaacctctgcctccctggctaaagtgatcctcctgtctcagtctcttgagtagctgggactacaggtgcacaccaccacaccggagtaatttttgtattttctgtagagatggggtttaaccatgttacccaggctgtcttaaactcttgggctcaagtgatctgcctaccacggcctcccaaagtgctgggattataggcatgagctactgtgccgggcctgataaaacctatttttagtgaaactcttgctcttctacatatttccaatttttagccacaataaacaaaaatatgttaaaatagaatcaatagaataggattttgtatattattaaatatatgatgaaaatgaatggtggtaatctaggatgaggaccaaatttcaaacttggataagcagagctatgaggataatgaggccagtcttggtcctgctgggtttgagccacctgtggaatacttagttcatatagtatttggaagactaattactgcacttcttgttatagactgatttaccctcctccctgctgcatatgttgaagtccttgaaaatatgactgcatttagagttagggtcgttaaagatataaaatgaagttattgaggtgggtctgaatccaatctgactggtgtccttataagtaaagaagactggacacacacacagagaaaagataatgtgaagacacagggagaagacagttatcgacacaccatggagagagacctcagaagaaatcaaccttgcccacagggttaatcttaagagtcgtagcctccagaattgtgaaaaaataaatgtttaagccactcagtctgtggtactttgttatggcagccctagcaaacgaatacacatctcaaacattt

SEQ ID NO: 89762 - DNA, 418 bp, Homo sapiens
aaattgtagacaatgttagcaattgtctgcaattgaatgactgttagccatatttccataatatctggagatgagataccaggcccagctcatgctaaggaagatgtgataggaagaataagggcctcccaaagatgtctacattgtaatttccagaacctgtgaatatgttaccttatatggcaaaagagactttatagatgtgattaagttaaaggtcttgagatgggagagattatcctggattatccaaaggaactcaatgtaattacaagagtcttttgaagtgaaagaggaaggcaggagacttagagaatatgtgaccagtgaagcagaggctggagtgatgcaattgctgtctttgaagatagaagaaagcaggccaggagtcaaggaatgcatgcagcttctagaagct

SEQ ID NO: 89763 - DNA, 435 bp, Homo sapiens
aggctgccttctgtaaccttttagtcattgcaaacacatagtagatgcatgctgaatttgtgagcttggcaccacacatgacaggctttggttagggaattcagctgcaagcaaccaaaccctcagagccaaagccaggggtgctaggacctctggccctgcagtggccctgatatggcctttgtgtcctgcctcagaggcctttctatccccacagttactgggacaaaatgtcctatgctttcacccttatgtggctccagatgtaggatttaattttttagaaatctgcaatactgcagcagaaatgtagttatgagtcagggatgtgtatgtgtgtgtgtctgtgtgtgaaagccagtctctcagcaccagctaaaaatgtgaagcagcaagtctgtgctgggaattgaggacaccatatgcttgcatttc

SEQ ID NO: 89764 - DNA, 198 bp, Homo sapiens
accatttggcaccaaactgaacatatcatatttttcttctcaaatacttgcactttgttctgatttctgtatttccattaatagcattattaatctcattgtctaatataatcatatattcattgattcattaattcatttgaggtacattgatattcttctaagtgtcatacagtgtgctgcctctgaggatgtaat

SEQ ID NO: 89765 - DNA, 570 bp, Homo sapiens
acgacctggagagtttctttattattgaacttcactgactccctgaggatagactgatcctgccaaattcttgggtccccaataaaacagcattccatgaaataaaaagtaagaacagatggcaccaggaattccactgctgggtatatacctcaaagaattggaaacagggtctccaacagatatttgcacaaaccacgtttgcagcagcagtattacttacaataacccgaaggtggagagaaactgtgtccttccagaagcaaatggataagcagaatgtggtatatccaaacggtggaatattacgcagccataaaaaaggaagggtattcagatgcatgctgcgatgtgggctaaccttgaggacattaatgctaagtgaaataatccaatcctaaaaggtggagagaaactgtgtccctccacaggcagatggataagcaaaatgtggtgtatccaaatgatggaatattacacagccataaaaaaggaaggatattcagatgcatgctgcaatgtgggctaaccttgaggacattaatgctaagtgaaataaaccaatcccca

SEQ ID NO: 89766 - DNA, 699 bp, Homo sapiens
ctggaaaaaggttggtttcactgtggcttcaaagaaaggaggataatgagcttttcactagtaacttctcagcccttttttcattggctgcatgggagggcctgttcccagcgtgctctgggtatcaagagagctgccatggttgccgtgggctagaaattccagcaatcacaggccttcttgtttttacttctatgacaggagaggatttagtgcgtctttctaaaactgttggtgcagtcctgcagagaaaagtcacagttgtctaggtctgatgactgaaaacattccaggggccagccctttccagtttccacctctccactgctgttggccccgacagctagcatcagtttctggctgtatcaggtagctagcctctacaaggtgtgttctgtcaggaaaactactgacctgttggtttcctaggagaaggttgagtttagctacttaaatctgtggccaaagtataaaataaaataaaaaaattttaatgtagtatccatagagatttctcttcttgagtgtttttgttttgttttgtttttttgagacggagtctagctctgtcgccgaggctggagtgcagtggcgcaatctcagctcgctgcaacctctgcctcccgggttcgagcgattctcctgcctcagcctcccaagtagctgggattacaggtgctcgccactacacccagccaa

SEQ ID NO: 89767 - DNA, 273 bp, Homo sapiens
cttttagtataagtgtatcccaaagcatcttccatgtgccaggagtcagtctgggtttggataatccacttaatacacagactggtgccttccaaggaactggtcaaacacgaaggtcagagtcttttgtggcttgggagacacaaacaggctgcaaaatccacttcaaaatccacttccaggtcaggcacagtagctcatgcctgtaaccccccaacaatttgggaggctgaggcaggaggatcgcttgaggccaggagtttgagaccagcc

SEQ ID NO: 89768 - DNA, 321 bp, Homo sapiens
ctcgtgcgcccagaaattttatgctaatattacatagaaaacttgacagatgaaaaaagtgaaacacattactaattttattcattaaaacaggtatataaaagtcctctttaactacctaatgaatgtgtcatatcctaatatagggagtgtcatagtgttcacatctttgaatatataaattatctcaaacagttaaaaaattaaagccagaacagggtacaaaaataagaataaaaataagaaaactttctgttcacaggacgtaacagaatactttaaacactctcaagttataaataaaactttttcattattatt

SEQ ID NO: 89769 - DNA, 239 bp, Homo sapiens
catgctctctcctgcccaccatgtctgactaaattttgtatttttactagagacgggctttcactatgttggccaggctggcctccaactcctgatctcgtgatccgtccaccccgacctcccaaagtgctaggatcataggcataagccaccacacccggcctcttttttttctttttcttttttttatctggagactgagttttgcactcgttgcccaggctggagtgcaatggtgc

SEQ ID NO: 89770 - DNA, 399 bp, Homo sapiens
ctgactaggagacacaatctatacaacagcccactctgaaatctccttgtctctaaattgtcttaattacatctgctggcatttgacacccagtctctaacactataaacttctgatgaaaaaggatgtggtttattctattttagttactatagcagagccccaaaaggcataaagtcattcattaaacacagagatcaaattcacaaccttactctgtctaaccaagtgagctgtgtggttaggcagtacaagtggtatataactgatacacaacaggccaaagcagaccttgaacacctataaccatcagaacaaggaccaaacgataacagttccaacagatttacttgctgagaactatagaatctggtacatctctaatgaggagggaggcaa

SEQ ID NO: 89771 - DNA, 270 bp, Homo sapiens
ggtttttaaatttttaggcttatagtgaaatcttcaatatatgtttagattatttttgtatatgataaaagcaaggggttcaattcaattttctgcatataagtagccagttatcctagcactatttattgagtatagaggtttttccttattgcttgttcttgttgactttgtcaaggatcacatctgagctggagccatggcagaggaacataaattgtgaagatttcatggccatttatcatttccgaaataatacttttataattt

SEQ ID NO: 89772 - DNA, 492 bp, Homo sapiens
tgcctttgtttttgtaaagaccacgtcttgctatgttgcccaggctggtctcaaattcctgggctcctgcgtcacctcccaaaatactgggattgcagcattttgaaccaccgcactcagctgctttttttataaaaagtagagatggggtctctctctgtcacccaggctggaatgcagtggcaccatcctggctcactgcagcctcgacctcccaggctcatgcgatcctcccacctcagcctctcaagcagccgggactacaggtgtgcatcaccacaaccagccgattttttttttttttttgagacagggtcttgctgtgtcacccagggctggagtacagtgggcacaatcatcgctcactgcaacctcaacctcatgggctcaagtgattctcctgccttagcttcccaagtagctgggtctacaggtgtgtgccaacacacccggctagtttttgtattttttgtagagatggggtcttgacat

SEQ ID NO: 89773 - DNA, 406 bp, Homo sapiens
gtttgtacttttaactgatatttattcagcgatattgattaattacctaatatgtaccaggccccatgctgggctctgaaatatagtgatgagtggaaacaggcatgatcccagttctaatggagcttactttctaatgggcgagacagaaattattaatataatcaaccagagtatgcctttgaaggaaaggaacacagttctctgagataatctaacaaaggaaatgacctactctaggaagacagggagacttccttgaaaaggtgtaatgcaactgagatctgatgggaaatattttccgaccgtattttagatagaacagcatgtgcagagaccctgtggtagaaggtgctgcagaggcagagagaggagtcagaccatagagtcctatggtcacattctc

SEQ ID NO: 89774 - DNA, 366 bp, Homo sapiens
ttactggcatttggctagatgatgtgaaaagaaagtaagagtgggagagagggaattcttgtgtatctgtgctaccaagagagtgtgtagtttagtgtactgtattgtatctctgtgcttaatgaagttgcctgtggggctgctcaggagggcatgcgaggttctagctaccctctcacccttcttcgtttcaaccctgtagactcctttaaaaatctattttatttattgggctttctcatagcatttcctatgaacaatggattttgcaatttaaaaacttcagtatcacctgtctagtagaattatatatatttacatatatacataagtagagtgagaatcttacacacatagaaactgaga

SEQ ID NO: 89775 - DNA, 302 bp, Homo sapiens
ttcccttggcctcccaaagcactaggattctaggcgtcagccactgtgcttggcaagattttttcctatgcacttaaaagtagttataaaaattttaatttaaataccaaatgtctgctgggtaagaggtttggctttgcttagctctagactggaattctgttgtttgtgtcttctcattctgggaccggggctcaaggagcagcctctgtcagggctatgacagagtgtaggagagagagagagatggagagcagttgtaagtttctgctcaattgtggcacattatcacatcttctcat

SEQ ID NO: 89776 - DNA, 341 bp, Homo sapiens
tgccattctcctgcctcagcctcctgagtagctggggctacaggtgcccactgccacgcctggctaattttttgtgtgtttttagtagagacagggtttcaccatgtcagccaggatggtctcgatctcctgacctcgtgatccacccgccttggcctcccaaagtgctgggattacaggcgtgagccaccacacccagcacaactatatatatttcttaagtctgtaatagtctagtaagagaaaaatatgtatgcaaagaactctgtaattctatattcacatttatattcaatatttatcgatcagccactatgtgccaagcagtcttctaaatactg

SEQ ID NO: 89777 - DNA, 316 bp, Homo sapiens
gtacccaataaatatgtacaactattatgtatcaattttaaaaagatttaaaacatgatagaaaaaagatatgcctataaaggaagtgtgaacctacagagatgaaagaaaattgtttgtggtgtggttagtgcagttaggggaatttccagaagaattccatttcagtgaatgatgtcatttgggcattatgaaaaatagcctagttagagaaaaaaacagagtttttgttttgttttgttttgttttgtttttttgagacggggtctcactctgtcgcccaggctggagtacagtggtgctatcttggcttact

SEQ ID NO: 89778 - DNA, 212 bp, Homo sapiens
agaagccccactccttaatacctccacgttggggatgagagttcaacgtatggattttggagagacacaaactttcagaccacagcagatccctgccctaaggggtacatgtaccacacagacacacacacacttctgcctgtgcgaaggtagtcaataggaggagtaatgccagggccattccaagggctgctaaatatggggccacggat

SEQ ID NO: 89779 - DNA, 566 bp, Homo sapiens
cacgtggcttttatgagctgtaacactcaccgtgaagatctgcagcttcattcctgagcccagcgagaccacaaacccaccagaaggaagaaactccaaacacatctgaacatcagaaggggcagaccccagacgcgccaccttaagagctgtaacgctcaccgcgagggtccgcagcttcattcttgaaatcagtgagaccaagaacccaccaattccggacacaatattggcaccttgaaatcagccataaagggactacttataccatataaattggaagaccttagaagtccaggtgtttctcccagatatccagtcattaaacatttaccattgtatcactgactatatgtcaccaaaggaatcgagaagaggcaaagtttctctgattgacctagccccggaatttttttttcttggctttgtctttttttcttggcttttctcaataaactgaaactccttgatgtaaatttgggaaattatatgatacagtattatcagttattcacaagttattaatgtcttattataaagagaggcttctctttttaaatccaggt

SEQ ID NO: 89780 - DNA, 347 bp, Homo sapiens
cctgtgcacattggctacccccaatcttccccctaacacatacctgatttgagggtctgacccgtgctccttgcccaagggccaaggttcttgttatagctctgggcagaggtcatccaggaggagccctggaggtcctgagactgctccaggtctagacttgagagaaaggacaagccctctctctgcctcccagtgccttccctctcctgtatctccaaggccctgctccctgtccaatagtctgcccttccccagccaagtgaccccaggcccgaggccatgtctaagatgacctctccctcccaatggccctgggcagccattcctgtggggagcccctgatg

SEQ ID NO: 89781 - DNA, 2321 bp, Homo sapiens
gtaatttcaggagcacagtaagtgtagccccacccaaccccattagttcatttatttcttccacaactggggaggcagtgaaatgctgcagttaaacacttgggctccagaattggactgcacgactttactctccagcttaccacttgccagccgtgtgacacgggtgagttactcgacccctctaagcctctattttctcatttgtaaaatggagctgataatattgtcttccttacagagaatcaaatgagataatatgcttggcatatgattgcccttgaagaggtttcactttattgaaggagaaagacaaatatttttttgtaattactgtatagtgagtatggtaggtgctatgaaagaagttgttgaaattttaaacttagagtttcatgtctttttcagggtataacataagtggttaaaatagcaaggactttgaagtcagacctgagtttaaatccaaattccaccagctaaatgaccttgggcaagctgcttcactttcgctaagtctcagtttcttatgggaatagagtaggatgatgattttatatagctactaggacacagtgagccttcaataaattgtgaccgttactattattgttattcctattattagtcaagtttgatacctgggtgatgcatgtggtttgtaaatatttatattttgttttgacacagtgaaggaagacaagggaggaattggtgaaggaggttaggaaagaatttcgaggccactagaaacaactgcacatctcccagaaagagctctgcctgtgggcagatcatacttatttcttgataccttttttacctgcaagtcctcactggactcagtgggtagacaggaggctcaggactggatagaagaggctcctaagttagcaggtgcagagtgtgcagtgagtacccaggaacaaggtttgcctgctgaagaagggtactgtgccaagtctgggtgggggacagcagggagcacactttgtgtgtgtgtattcttgccttctctgctctgtagtaggcacctgtccccctgcagccagcccggtcctgcctttcattgcctgaaggaactgctactgccacctggcacactcagatccatgtcacgggccagggaagtccaagaattttgaagaatattagacacatttgtgattgtgatttagggtagaggtggccctcaggacatctggccccaagaagggtttattgaggttatgttcatccacctaatacaagggctccttggctagaaaatcactctgaaagaggttctgctaattataggaaaacttggtgaacgtcagagcataaacaagacactgccacaacatcttgtggttctcaatgccaggatacaatgagacatcccagagtccagccctgaaggggttttcgcatcctctgagactggaatcagaaggtgtgaatagaaatggaagcagtggcctgtttcatccccttctctcccctcccctgtcccatcttttttcctcagggctctgccgacccattctgctgtttccgtattcccttcacagcagctcccatcctctactccttcccttgtctacctctccttgaaggaggagcctttccaatacacccttccctgtgactccaaccttggtaaagtcaccaaccagctggactcctccagacagctatacacttgcagcccaaggctggggagtagaacatggctctgtggccaagctgcagctgggaagagactggcaatgaaagggactgatttgggctgggaacaaaacagcctcaaatcaagggcactggacacagcacagacaatggcatttgctaagctgccaggggctcttggcaagagccacatttctttccactttattaactcccttgaggagggataagccagggctaggatcctgagcaacacatgccctggagaaggcccgagataggatacccagagcctgtgcagccccaccctagagccttccagcctcccaggcttcctaaacccattttcccaaccagtgcccgtaggcaggactatgttccatctgagccatggctgtcatctccctagtcactcatccactaggttccctagaagtgcaggctgcaaatgtctatcccaaatcctccctaccatagcaaagtaggatctccccttggtgaacgtcagctagagctgccctggaccatgccacactggctgtaaagggctttttcctggtctggattacatagaccaggaaaaagctactgcactctagcctggatgacagaaggagaccctgtctcaaaataaaaaataaaaaataaaa

SEQ ID NO: 89782 - DNA, 571 bp, Homo sapiens
attcacatagatgttgacaagattcagttcctcgtgggttgttggactaacggtctcattttctcattatctattggccggagcctccctcagtgccttgccacatgcacctctccttagggcaaaccagagaatggcattagattccatcaagatgagcaaggaagagagcaagtgagggtggacaagacagaagccagagtctttttatagtcttatctcagaagtgacatctcatctcttgccatattctgttcattagaaaaatgcaagttactaggtccagcccatgctgaaggggagggaattatacatgcataccaagaggaggggattcactgggagccacctgagaagctgcccaccacagtcaagaaagtgttctcagaggatattgaggactatgttcagttgactctagtctatatgtctggctgcagaaaatttcctgaatgaatgtcttatggtagcctccatcctaattcaggcagagcctaacattagccagaatgaacatgccaacctccagcactgcctgagagaagctgtaattctgataaggagtcatcta

SEQ ID NO: 89783 - DNA, 478 bp, Homo sapiens
caggatcacatcttttgcataaatagccaagaagggcgatgagttcctcagagtcacagtttgctatttcagatggaatctatactaggggagccattctatagcctctgagaagtgctgagatatcaaaatggaaaaatcggtgcaaaataggccagaacaggccaaaaggcactgtatttgacagggaacaatgaatgactcgcatcactgaagcggggttgcttgctctgcccctttagagtggccacggggtctggctgagctccagggcagatggtggcagtgtttccagatgtcctgaccagacttacccatagtgcttgacccaatgcctttaaagttgtgggtacttagcaggcaattgcagatttagttgaaatgttactagattcataacacatactgttctcagagcatgatagaactagtaagcagataaaaaggattcaagattttactttctctaattgttagg

SEQ ID NO: 89784 - DNA, 347 bp, Homo sapiens
tgaaaagatgttcaacatcattatctatgagagaaatgcaaatcagcacaatgataaaaggcctagttcacactactaggatggctatgcacacaaagataatacaagtgttcactgacaaggatgtggagaaattagaactcacacactgctgaaaggaatgtaactgggacagctattttggaaaacaagtctagcagctcctcaaaaagttaaacgtgaactactatgtaatccagcaatatcactcttgggtatataaccaagaaaaatgaaaatatatgtccacacaaaaactcgcacacagatgttcatagcagcattgcttgtaataaccaaaaagtaga

SEQ ID NO: 89785 - DNA, 415 bp, Homo sapiens
tcctccttcagtcattgctctggggtgacagccccttagaagtccacatttctgtgaccttggcctagaatcttaaaatagccctgagaaagagggagggctgagcccagagccaaggccaacagtggggcctgggccaaggaaggggagggcagatgagcctgtccaaggaacaaaggcttcatctccctagtctggctgcccaatctgggtcctctgctcagtcacgtacattttattttttctagactcaggcaagtactcctggattccccaccctaccccctgcccagacagccaggggaggagggatctctcacaccagcttctaagtcatcctgcagctctctgtccattgcaggagcatccatggtgaaatatgtgcatttatgcagagtggtgatattgcgggggt

SEQ ID NO: 89786 - DNA, 421 bp, Homo sapiens
gcctgatagctccatctccatttgtactgttattccagtagcaccacagatatctggtgcttctctttcaaactctgcttatttcaggtcattctcccttctttgggttgttatcttctcctgtcccagcatggatttccagggacagctctgtgaagcagactttgctaatcagaccccactcaagacacgtttccctggaccagaccctggttggtggggcagctggctggtggggcagctgcagggtgtgaaacaggagcagctgggctccttaagtgtgcagagggagctgctctgagaatgaagctgatgaacagaaagaagcaagagggagggatgagaattgcctcatctctttctctaaggcctcccgctagcaggaaaatccacatgagccaataaattgttccttctgtct

SEQ ID NO: 89787 - DNA, 423 bp, Homo sapiens
ggtgaagatacagagaaattggaactctatactgctagtaggaaaattaaatggtacaaagttaacccttttttcctcctcacccccacatccagccacaatattacaaattttacctgcaaaatatttctttaatctgcatttgactctccaaactgaattagacctctcatcaggattagagtaagaacctcttaactggtctccttccctccaagggtgtctttctcaaatccattctccagatagctgctgccatgacctttcaaaacattctcctgctctacacgtttccaggctccccatgacctataggatgaaatcaagatccaacagaagtcccaaggccctccatggcgaagaggacttctcccatcatcctgactcctccttcgtgctggctcttctgtcaatgagattttg

SEQ ID NO: 89788 - DNA, 255 bp, Homo sapiens
ggtgatagggtcttgctctgtcacccaggctggagtgcagtggcatgatcacagctcactgcagcctcaaactcctgtgctccagtgatcctcccacaacagcctcctgaatagctgggaacacagacacatgccaccacacctagctaaatttttttttcatcagcagacaaagctataaaagaaatgaaacaaaaatagatcacttgaatccgcaccactgtctgtgttcataaagaaagtgacaactacact

SEQ ID NO: 89789 - DNA, 227 bp, Homo sapiens
aaaattatcattaaaaatatcatatataaaaatgggaaaatatttttaaggagaatacaaaatagcagcatgtaatcatagctagcaaaaatgatgtattgatttgtaaagatatgcaaagatagaagatatgtaagcataaacattttggttgaggacattacagaaattacaaatattcaaatactttagtgtcattgttttctcaataaatgttttaattaatc

SEQ ID NO: 89790 - DNA, 388 bp, Homo sapiens
taaacttttaaaatccagagtgggttaaaatgcttattttactcaaagactgtttacactgcactgttgaaacatcagattatcaagttcaagtctttaagggaacatctcttttgacatcttaaaatttaactcgaaaagagtttctttaagctgttaggtgtaaaaatattttaactttcttatttcaaattttaaaaactcatacatatcagttcatgtattcatttcattcagtaagtatgcaatgtgcatatactgtataccaggcattgtgctaagtgctgaggcttctaaggtgaacacaatttttggtctttagatagttgagattaagaaagttgtgcttttagtcactgttttctttgccgataactgagcacattgt

SEQ ID NO: 89791 - DNA, 406 bp, Homo sapiens
gtctaacatatagtctatcctcaaaagtgatgtaagtgctgaggagaagaatgcgtattctgtagctgttggatgaaatgttctgtaaatatctattaggtccatttggtctatagtgcaaacgaagtctgatgtttcttttttgattttctgtctggatgatctgtccaatgttgcaaatgtggtgtagaaggctccagctattattgcattggggtctctctctctctttagctctaataatatgtgctttatatgtctgggtgctcctgtgttgagtgcatatatttttataactgttattatcttcttgctaaattgacccctttatcattttacaataatattctttgtctttttaaaataggttttgtcctgaaatgtattttgtcttaaaaaaatatag

SEQ ID NO: 89792 - DNA, 442 bp, Homo sapiens
tttctcaaggcaatctgaagatgtcattctaagcaaagccttggtaaaatacccagtgtctccaattgtgtcctgctataagatagaacaaattctggttgaacctatgtaaataactatattgccatagattaagaataccgacagatagttttcaaatttcggagaaattaagtagagagaaaggaattatgttttaaattttgctcataaaaatttaccttaattgtttaagagtgtaaatatcttaaaagaagaaaaacaaaacaaaaataatcaaatgttttaaacaaagagtcataaaagattatttcaggccaggcacagtggctcacatctgtaatccaagcactttgagaggacgaggcaggtggatcacctgaggttgagagttccagaacagcctgaccaacgtggtgaaaccccatctctactaagaata

SEQ ID NO: 89793 - DNA, 249 bp, Homo sapiens
tcctcatcaacactgtaataccaactacagaggaattattttccattttccaacttttttgtgtttaaaagttttattttataacttacatcttctctttgtataaaaatcacaagcagcatttctcagattaattttaagaaatacattgtttaaaggtaaggtgctaaatttttggaaataggagtgaagacctatttcaatcatgtctctgtaataatggaatccagatttctgtaacaaggtagg

SEQ ID NO: 89794 - DNA, 364 bp, Homo sapiens
ctctatatcatggagctattaggtggcagagtctggattcaaacccagttctaccagagtagaaagtcatgatctttccatgactgctttcattgtttcatctagcatttcttcataagcctaaaattatctattggaaaattagctgattcctacaggctttcatcaaaggcttactttgcaccttttttttttttattattttaactacttaggcccccaatatttttggaattttataatcatgaaagataagctcaggaatttcagatgataaaatagttctaaaatagtttgtattacatgataaatgcaatagaatgctaatccttgttctagaaaatttcaagatgttcacttaaaa

SEQ ID NO: 89795 - DNA, 627 bp, Homo sapiens
gccacaaggacccaacaccggagcacccagatatataaagcaaatattcttagagtcaaagagagagatagtctccaatacaataatagctggatacttcaacaccccacttttggcaatgaaagaatattccaaatagaaaatcaacaaataaacgctgggattaatatgcactatactatggctgtattactatcagagaaagtatattaagatatttgataaagtatcacatttcataacgataaaaggaacaatttcttaggaagatataaagattctaaaataataacttcaggaactataaatcaaaaactgatggagctaagggggaaatcaaataggaagtaacatatactccaataaagtttgtttttcaagagaactatattagaaccatgattgcaaatattgtaataaaattttcctctgggagattgaacatagggtttatattattttcaaggtatttctaagaatttgtgtaaaaatcatggaatgtccatgacttcagactttgagaaaagtgtaatatataatccatgtgtggtgctttgctatttctgtgtgacctgctgtgaatttttgaggttagcatttgggaggtggtaatgttgggtacttcca

SEQ ID NO: 89796 - DNA, 441 bp, Homo sapiens
tgttgcccagatagtcatattgcttctttgcaatatcaattcacagaggctgtgagatgtggttcaaagagtggagtcgagagtctggatgctaatcctgcctttgctgcaagaacccttctgtttgttaccttgaggaaggcaaatgtctgtaggctttgcatatctcatttgtaaaatgaggaaaggtagctgtaaaattttctaacatccgaattatataaactttagacatagtataaaataggaaactaccaatgatttctaaagataatatagttctttcagaccacaaataatacataataacatgcaactaagaacaacttgtaaatgcaagaaaaaaacaaataattggaaatcagaatatttctgggaattcttcgtaataaagcaaatttcaagcacaataaagtaatatttatgcatatttacatattt

SEQ ID NO: 89797 - DNA, 193 bp, Homo sapiens
gatcctcatcttccccaaatactcgttcccaaaattgacgagcctgacaatgtgcatgccaggcaaggctcttggggttcccctaaaacacttcctcttttaagcctaccactcactcatcatgaatatagtccattgtcccagggtgtaaaaccctctatagtgttaaataaaagaatgattgggaacattg

SEQ ID NO: 89798 - DNA, 439 bp, Homo sapiens
tctttttcataccacagtgtacagcaaccttaggattctatgtttaaaaaatctgattttatgtcattatgagattgatttgtcaatcaaaataccatcattaaaggagagatattatttaacaatgaagttaaacatgaaaatcagctggctcttttatttaataaataatgaaatagcaatctatcaaaaatacctccataaataaaatatacatttagttatttctttatgtacatagtaagctcatttcaatgtttagtttcttttatctatcaatagtatatactaatgcaagtgctcacgtaaataaaaacaaaacccaaatacctttaaacatttgaatatttttaaaaagtatacagaatattcaatttaatatgtattttatcctactacagtaaattagagaagagatgaaatctattttgcttatttg

SEQ ID NO: 89799 - DNA, 419 bp, Homo sapiens
  misc_feature (13)..(13): n is a, c, g, or t
  misc_feature (23)..(23): n is a, c, g, or t
  misc_feature (48)..(48): n is a, c, g, or t
  misc_feature (82)..(82): n is a, c, g, or t
  misc_feature (85)..(85): n is a, c, g, or t
  misc_feature (88)..(88): n is a, c, g, or t
  misc_feature (115)..(115): n is a, c, g, or t
  misc_feature (153)..(153): n is a, c, g, or t
  misc_feature (160)..(160): n is a, c, g, or t
  misc_feature (265)..(265): n is a, c, g, or t
  misc_feature (314)..(314): n is a, c, g, or t
  misc_feature (330)..(330): n is a, c, g, or t
  misc_feature (332)..(332): n is a, c, g, or t
  misc_feature (341)..(341): n is a, c, g, or t
  misc_feature (344)..(344): n is a, c, g, or t
  misc_feature (356)..(356): n is a, c, g, or t
  misc_feature (379)..(380): n is a, c, g, or t
  misc_feature (405)..(405): n is a, c, g, or t
cggtgcgtgtggnagagccaggngccggtgtgtcttgtgggggtctgnagcccactggccggggtcttgaggtgggtggagngtncgnggtctcaatgtccccaaagaaggtctngaaaacccctttgcctctatgtttctagatgtcttctnatccagnacttgaattcctcccacttaaccccaccccatcgttctcactaacacctgctatgtgccaagccctgtgtcacgtgggaaggtctcatgggtgcaggaagccctntagttaaagcccaggttggcccaggtggaggcaagctggcatcactgcntgtcagcggattcaancncgactgacngtngtcgggcgggtntggggtccgatcgccgccagcgnnacccatttttatggagctagttgantgcgactaggtgag

SEQ ID NO: 89800 - DNA, 579 bp, Homo sapiens
tgttgtggtaaaaaatacgtaaagaaaaatttaccattttaaccatttttaggagaacagttctgtgacattaagttcattcacattgttgtgaaccatcagtgcatctatctccagaactttttcatcttcaccaaatgaaactctgtactctctaaacactagctccccattctcctttccctccagtccctggtaaacaccgttttgctttctatctttaagaatttgactattctaggaatcacaaataagtggaatcatataatatttctgtttttgcgactggcttatttcacttagcataacgttttcaaggttcatccatgttgtaacagttcacaatttccttccatttaagactgaatcataccccattgtatatgtatcaccgttttctaccccagcttttgaagtgtaattgacaagtaaaacttgcatatattcaaggtgtacagtgtggtgctttgatatgcatatccattgtgaaatgattatcacaattctgctaataacatcattatctcacatggtaactttttttttgtttggtgagaatactcaagatttcttaaattt

SEQ ID NO: 89801 - DNA, 173 bp, Homo sapiens
gtttacagagccctctctcattacatcatgtgtgcccgatgtctacagagccctctctcactccatcatgtatgcccgatgtttacagagccctctttcattacatcatgtgtgcctgatgtttacagagccctctctcattacatcgtgtgtgcctgatgtttacagagccc

SEQ ID NO: 89802 - DNA, 232 bp, Homo sapiens
ggcggggctgacaagaaagcacatctgaagtggttcgaatattcataggattgatggcatctacccctaggtaccaaagccagggaccatccctgtggaaccctggggctcgagggaacacagtttgagaaccctaaaggagaaagctctatggactgggaggcactgcttctgagcagctctcctgccccacactggccccagccatcttcatctcctgcctggaccactg

SEQ ID NO: 89803 - DNA, 434 bp, Homo sapiens
cccgttgatggctatgcacaggtgtgattgtggctcactgaagcccaaactcctgggctcatgatcctcccacttcagccttccgagtagctggtcctacagttgtattccactatacccagctaatttttaaaacttttttgtagagatagagtctccctatgttgcccaggctggcctccaactcctggactcaagcaatcctcctgcctcagcctcccaaaatgctgggattacaggtgtgaaccagcatgcccggccctttaatggtcttattcttaaaccccttattttcacattatttcctcaaaccaaagctctgagtttcttttcatgctcttttctcccccattcctgtctgcccaccttcagtacagtttcctccagggtatctttttgagcgtgtctttcagccattgcactccggccgggcc

SEQ ID NO: 89804 - DNA, 461 bp, Homo sapiens
gaaacttgaatctccatattgtaggggttatttctcttttgtgattatagttttcaaatttcgtattgagtgttgcttactgaattgagtttagaatcatcagttatcataagacttgtgtcattaataaaaatgcagtttgagtgcttcttaacactagtccaaacatttagacgtaagatcaccataaaaaaattcaataggaataataaatcagcatcagaggatatgagggatatgagggcctaagtgggaaatgtgtgtaccaacttaaaacaaagagcttgaaaatttaaaaattacttaaataatttatttcatttatgtgatgttagcaacatgatgataatctgaaatgaagacctcacattcatttatgggggccaaggtaaaaaaaaatcattcaaatcattacttagtgaagggaggaaaaataatatatttctagacagattcgtaac

SEQ ID NO: 89805 - DNA, 386 bp, Homo sapiens
gatgaggaaagtttggtcaacaggcacaaaattacaattatacaggagttctggtgttctgttgcacagcagggtgactagttaacagtaaggtatcacatattatgaaatagctggaagagaggcttttgaatgttctcaccacaaagaaataataaatgcatgtggtaatagatatgctagctaccctgatttgatctttatacaacatatgtgaattgaaatgtcaaactgtaccccataaacatgtacaattataatgtatcaattaaaaatatgaaaaaattataatttgtatagttaaaaaaaaacttcacagtaaattctttgttaaaaagtgcatctgcttttttggcggactatgtggagacagaggcttctcattc

SEQ ID NO: 89806 - DNA, 350 bp, Homo sapiens
gaagttttaaaccttccctcatcttcctgtctttttctgagccttccaaactctttcagcctctgcctgttacatagttccaaaatgacttccacattttcaggtatctttatagtaattccccaccccggtgccaattttctcttagattgctatacagaaatagctgagactgggtaatttataagaaaagaggtttaattggctcatggttctacaggctgtacaggaagcatagcagcatctgcttctggggaggcctcaggaaacttccaatcgtggcagaaggcaaaggggaagcaggcacatcacatggtgaaagcaggaacaaggtcagggggcagatgcta

SEQ ID NO: 89807 - DNA, 744 bp, Homo sapiens
agataatgtcctatatttatactctctgtgttaaaaggactctctgatgcttccagtctatgtttcagcttctttgggtaaggaagtactttcggtcttcttaccatacactttagtaattatcactttcaggttttaagattctttagattatatctctcttatatatatatatcttggtacaaaaggcatgttaatctgttgccatgaatgtgagtttgtctctccagcttctcacactgcattatatgtggtaaattacttttatgtagtaattctttgacatagtccatgacttgctatcacaagggtatttgagatttgatagttatatgagaaggtatatgaaattatacagaatttaaacatgcagatgaaaacattttaacaaatatttgagtgttttcttttgtgttaagcacaaaatatgaggaccacaagggagaataagacgtggtctttttagtcagcctacagttaagttggggagacaaaatatacaaaatataccttaagggataaatattgataaataatttcaaacagtagcatgacaaatgagaaaagacagttgctgtatcttaagatgtagagatcattgtcagggtggacgattggagacgttttgttgaggagaaggaattgaaactatgccttgaaagataaataggaatcgagtcagtaagaaagagaatgaattttataaacaagaggaacattataaaaagctaagtgtcaagacat

SEQ ID NO: 89808 - DNA, 261 bp, Homo sapiens
acccgcctcggcctcccaaggtgctgggattacaggagtgagccaccatgcccggccagtagcttgcttttcttttctctttgagatagtctcactctttcgtccagggtggagtgcagcggcgtgatcttggcttcctgcagcctctgcctcctgggttcaaatgattctcccacctcagctacccgagtagctgggattacaggcgtgcaccaccacacctggctaatttttgtatttttagtagagacagggttttgc

SEQ ID NO: 89809 - DNA, 287 bp, Homo sapiens
cttaaaagatatttaatattgtcaaaatttagagttttaacataatgccattttagtttcaatttatttcaaattgcagaacagttaatactagactcagcttggagctgtttttgtaaaagatctcaaagagactatgttttcagggctcaagaatagccatatttcctcttagtgtaggcctggtttcctctgactccccacctcccatgttgaagactttgtcagaatgtctgtccgctcactcatgtgcttccttattttcttttgtctttgtctggcagaag

SEQ ID NO: 89810 - DNA, 467 bp, Homo sapiens
agaaaaattgaaacctaccaaatgaatgattttatggttgctttttcttatggcagttaagatttgttttaagttagtgatttaaaataaatttaaagaaaaatactgagtaaatattagtacatagagtactcatataacaaatgtcaaaaattcatcatatttgtgaaaccctaatgtataggattaaaagcacatacatcttctaaatccagtgtacagatccttcacatcatcagccctgattgacttttcgacttcaccccctctagctgccatcaattgtgctgtaactcatgtcactaatcaacaggttcttccatgtgacttctcctaactcctttcagtctattcgttacacagcaccccaagggaggctggcaccccaagggaggctgttaaaaagtaagtcaaggctgggcgtggtggctcacgccttaatctcagcattttgggaggccaaggca

SEQ ID NO: 89811 - DNA, 541 bp, Homo sapiens
cccgctttggcctcacaaagtgctaggattacaggtatgagatacagtgccctaaaaacatgtttttatgaccatttcttttgctccaaattgcccacttcttctgctccaaattgcccacttcttcttctagatggagtgataggataaccctgtagttttgagacttcctgtaagatcaagcttctcaacagctccccagagtcgtttgtccctttcagtcaccaaccacaccctaaaaccagaaatgatgaccagataagtgaacaattgagttcggtagccctgtccccacttattctcctcctgctggatcatgtcccatcctgaagtacccaccagcagagaaaaaagaacaccctgagggaagggtagccttggatgagaagcagtcactttccagaaagacagtagctacttcctcttcttagaaaagtaggaaggtcttagaaaggggtgggtaccaggagacagagggttgcagtgagccaagatcatgccattgcactctagcctgggcaacaagagtgaaactctgtct

SEQ ID NO: 89812 - DNA, 864 bp, Homo sapiens
ctgggattacaggcgtgagccactgcacccggccaaacattggaaatttttaatgatggatttcagttcttctcacctctgggtatttgtaatatttggtaaatcaggagtcctgagagtcttagaattttcatgcattttaaatatatgtcttcaaagcacctaggaatatgtaaatagttacccaaatgtgagaacagaattgaactaaaagcttcgtttataattttttttttttttgagacagagtctcactctgttgcccaggctggagcgcagttgcgtgatttcagctcgctgcaacctgggactgcaggcgtgcttcaccatgccccgctaatttttgtttttttagtagagatggggtttcgccatgttggccaggctggtctcgaacttctgaccgcaggtgatccatccgcctcggcctcccaaagtgctgggattacaagcatgagccaccatgcccagccggttaataattcttaatcagtaaatcattattcaaagacatagttaatatcttcatgacttcttaaggatgctcaaaagctggtcttcagaatacctacatttctttatctacatattctgtcatttggagttatacaagtagtaatgacacaccaaaatgtaaataattattgttagcttttaagttggcttccaaattcaaaaaagaaaaaaatcctgaattctctaaaggaacatatgatagagtccatatgttaattcataggaagtgtttaaggtactatggtctattttggtctaatctttgttttactatgtaatatatatttatgatttacaagtttgttattcagtgggataataaatgaacacaaaatttatgttctcaac

SEQ ID NO: 89813 - DNA, 386 bp, Homo sapiens
tcaagtttgctgccaggacagagccctctgagcaagttatacacaagtaattctctcttgagagaaacatctatgaagaagaagaaaaggaaaaaagaagacaagaggaaaaatagaatgcaaaagagaaagaaagaggaggtgttacaagaaagaagacaaggaagatgaataaatagaggatggatgaagactatgtccaaccaactttccagaagaggtcctcttcacagtgacatctatcaagcctttgattaggaatgctaattacttcccagaagaggcccagtaccttttaaactatggaagaacagttctgccccttgccagacttgggaccatattctttctcattgtttccctcctctctatccacaacaaataaa

SEQ ID NO: 89814 - DNA, 1154 bp, Homo sapiens
  misc_feature (784)..(784): n is a, c, g, or t
  misc_feature (860)..(860): n is a, c, g, or t
  misc_feature (908)..(908): n is a, c, g, or t
agtctggtagttgtcgctggccgtgtgacggctcgctgttgccctgaaggcaggcgagccagctgcccaggaaaggtggaaagtggtagaagctgacccctgagccctggcaggtctttaagtgcgtttgtgcagccgatttcaaggctaagagagaaagactgcctctgatccctgaaggaagaaaaaaaaaaaaaaaacgggaaaaaaactcaacatgggaaaattgtccccagggaaaacaaagttgtggagaaggccccagtgcagaatgaagcccccgctttaggaggtggtgaataccaggagcctggaggaaatgttaaaggggtttgggctccacctgccccgggttttggagaggatgtgcccaataggcttgtcgataacattgatatgatagatggagatggagatgatatggaacggttcatggaggagatgagagagctaaggaggaaaattagggaacttcagttgaggtacagtctgcgcattcttataggggaccctcctcaccatgatcatcatgatgagttttgccttatgccttgaatcttgaggttaataatcataaaatccctgctttctaaattcgcatttttcctggtgtacctttaatgtgaaccttttggcattcttctgcaattttctgattggagattgcattttgacctagtctgtaagtttttctgtcagaagaggactttcatcaactttcatggaaagatgtttattgcatactgtaaagttaataaagcaatttaaaagcaaaaaaaaaaanattaaaaaaataaactggcgtcgtttacacgtcggactggaaaccctgcgtaccaactaatcgcttgagacatccnctttgcaagtggctataccataggccggacgatcgctttcaacattgncagctgatgcaattgaaatgtaccgtatatttgtaaatttcggtaattttgtaaatagtcattttaccaatagccgaatggaaatccttttaataagaatgacggattggttatgttttcccttgacacaacccctttaagacggcctcaactaaggcgataccgtttaggggagcccttcgaccatcctataaagtttgggtcgggccaaacctaattgacttaggagccctttacttgcggaaa

SEQ ID NO: 89815 - DNA, 1239 bp, Homo sapiens
  misc_feature (869)..(869): n is a, c, g, or t
  misc_feature (945)..(945): n is a, c, g, or t
  misc_feature (993)..(993): n is a, c, g, or t
caccctttccagatacacacccgtttagtgcgagaaatggagcggttggggagaggatctcccgagggggctggattgagaatgggtaccatttgagatctcctaggaggccggccatcgggcaatgtctgatggagtccagccggtggaggagactgaaaggaaacagcctgcttcctgcaggtccgcgggagggaggtctttaagtgcgtttgtgcagccgatttcaaggctaagagagaaagactgcctctgatccctgaaggaagaaaaaaaaaaaaaaaacgggaaaaaaactcaacatgggaaaattgtccccagggaaaacaaagttgtggagaaggccccagtgcagaatgaagcccccgctttaggaggtggtgaataccaggagcctggaggaaatgttaaaggggtttgggctccacctgccccgggttttggagaggatgtgcccaataggcttgtcgataacattgatatgatagatggagatggagatgatatggaacggttcatggaggagatgagagagctaaggaggaaaattagggaacttcagttgaggtacagtctgcgcattcttataggggaccctcctcaccatgatcatcatgatgagttttgccttatgccttgaatcttgaggttaataatcataaaatccctgctttctaaattcgcatttttcctggtgtacctttaatgtgaaccttttggcattcttctgcaattttctgattggagattgcattttgacctagtctgtaagtttttctgtcagaagaggactttcatcaactttcatggaaagatgtttattgcatactgtaaagttaataaagcaatttaaaagcaaaaaaaaaaanattaaaaaaataaactggcgtcgtttacacgtcggactggaaaccctgcgtaccaactaatcgcttgagacatccnctttgcaagtggctataccataggccggacgatcgctttcaacattgncagctgatgcaattgaaatgtaccgtatatttgtaaatttcggtaattttgtaaatagtcattttaccaatagccgaatggaaatccttttaataagaatgacggattggttatgttttcccttgacacaacccctttaagacggcctcaactaaggcgataccgtttaggggagcccttcgaccatcctataaagtttgggtcgggccaaacctaattgacttaggagccctttacttgcggaaa

SEQ ID NO: 89816 - DNA, 1205 bp, Homo sapiens
tagaaatctgttcaattaaaaatgcttagtttatacaaagatactacacaaaaatagaacaattagtctgaattaacgtatttacatattgcatatggaagataagttcatttatcttcctttctaagacatatttaatgtaggttacatacactccaactattactttgcttttgcatatgaaactagaaaacactgactttgtttttataagttattaaatgtgaaattgatctgcatcagcttatttataaaagtaatgttatttccaagaaaatgttactcttagcattgattttgtatgttagactttttacattgtttatctaatattatttatgacagtaattttaaaatatattattcataagttcaaggatcccatatagtataagaatataatttcacttgctttgaaagttgatttaattgactgactaaatgaaaatgcctacccactcatataacatacctcaggtctattttaccttacactgaatgttcttaatatgatttggtacctaaagtaattgaaaaaaatgcagtttcctttaatccttgactataagttatactatgttgcgtacatggcaaatcctgcaaatatagattaaaaattaaattagcccattgaaatcctttataattctgtcattttcccaaggaagaatagcattgtacatatgcaatctttattttattctttattgcttatcagagtgagtggatgaaaacatttgtaaggctgcaacataatattaaaatgtgaataaataaatgttctgataaaatagaaaagaaagtaaattacagtgatttccatcatattatcactcttgaattttatcatctataaaatgagagataaaaatatctcactgaattgttacttatatcaatttaaaatttgctagtggtttgaaaataataatgtactgactacatgtatgctgttattgtcagtgtttccttctataaactgttctttggaaaaattaagttatacataaaattcatattaaactttttacagaaagcatacatgataaacagtttatggtacttctcagaatcatttcataataagcaatttatttagcttaagttccaacttactgttcttattataaattgcaaagcaacctgtcttacattcttacattatcttaaaataaatatttctgcccttgaatcaaaaaacattg

SEQ ID NO: 89817 - DNA, 2297 bp, Homo sapiens
ctccaggagcggcatcaaacagccccgcggggaacgccgccgcacgcatgctcggacccgcccaggcacgaactctcctggaaaaatgctcccggcggctttcctgcttcctttagcgtgaaccgcgggtgctgtgcctcccgtgaaaataataaattcaccgtcacgcttgttgtgaacgcgggtggttcccgaaacttggaggcttcccgtaaacccagctccttcctcatctgggaggtgggtcccgcgcgggtccgccgcctcctccctggcccctccctctcgtgtctttcattttcctggggctccggggcgcggagaagctgcatcccagaggagcgcgtccaggagcggacccgggagtgtttcaagagccagtgacaaggaccaggggcccaagtcccaccagccatgcagacctgccccctggcattccctggccacgtttcccaggcccttgggaccctcctgtttttggctgcctccttgagtgctcagaatgaaggctgggacagccccatctgcacagagggggtagtctctgtgtcttggggcgagaacaccgtcatgtcctgcaacatctccaacgccttctcccatgtcaacatcaagctgcgtgcccacgggcaggagagcgccatcttcaatgaggtggctccaggctacttctcccgggacggctggcagctccaggttcagggaggcgtggcacagctggtgatcaaaggcgcccgggactcccatgctgggctgtacatgtggcacctcgtgggacaccagagaaataacagacaagtcacgctggaggtttcaggtgcagaaccccagtccgcccccgacactgggttctggcctgtgccagcggtggtcactgctgtcttcatcctcttggtcgctctggtcatgttcgcctggtacaggtgccgctgttcccagcaacgccgggagaagaagttcttcctcctagaaccccagatgaaggtcgcagccctcagagcgggagcccagcagggcctgagcagagcctccgctgaactgtggaccccagactccgagcccaccccaaggccgctggcactggtgttcaaaccctcaccacttggagccctggagctgctgtccccccaacccttgtttccatatgccgcagacccatagccgcctgcaaggcagagaggacacaggagagccagccctgagtgccgaccttgggtggcggggcctgggtctctcgtcccacccggagggcacagacaccggcttgcttggcaggctgggcctctgtgtcacccactcctgggtgcgtgcagacccttcccctccaccccccaggtcttccaagctctgcttcctcagtttccaaaatggaaccacctcacctccgcagcacccgacttaccaggacgcatgcccctccctctgccctcatcaaacccacagacccggactccctttctgccaccccaggctggtccggccccaggtgtggggtccgctctctccactcccagggctccgcgcccaagtgagggggcccctgccggagcctcagacacactccagttcagggctgtggggggccttggccacatacctgtcccttggctatgagcaggctttgggggcccttccgcggcagccccgggggccgaggtagggtcgggggcttagaggctgggatggctcctggccccaccgccagggggcagcgcaggccgggctgggaggcggcggcggcggctcgggctggggggtcaggtggacgccgccctccggggctggacgcgcatccctcagtccctcggccacccgggggtcgctccctcgtgcccaccgcacctgccgagcctctttggacccagatctgttcatgcttttgtcttcgtcactgcggcggggccctttgatgtcttcatctgtatggggtggaaaaatcaccgggaatcccccttcagttctttgaaaaagttccatgactcgaatatctgaaatgaagaaaacaaaccgactcacaaacctccaagtagctccaaatgcaatttttaaaatggaaaacaaaaatctgaaagaaacgtctttagtggctttaagccccaaaacgtccctaaggcgtcctcgagatgaagacgggggggagcccccagccaggtggagaccccgcaggacgcggcggcgcccggtgaccgaggcctcgcacagccggccgccctgagggtcgggccggagccagggtccaagaggggcgcgtttgtgtctcgggttaaaataaggttccgtccgcgtgctgggtcaga

SEQ ID NO: 89818 - DNA, 876 bp, Homo sapiens
acgagatatatgtgctgattgggtcgggtggatgtatacatagttcactgtgtcccttagaggccctgtctcctgccctggccctggccctggcacagcagccagccaatgccctgaggtccagccctgatccgtgtgtgcctctgtctggccctacaggctgggacagccccatctgcacagagggggtagtctctgtgtcttggggcgagaacaccgtcatgtcctgcaacatctccaacgccttctcccatgtcaacatcaagctgcgtgcccacgggcaggagagcgccatcttcaatgaggtggctccaggctacttctcccgggacggctggcagctccaggttcagggaggcgtggcacagctggtgatcaaaggcgcccgggactcccatgctgggctgtacatgtggcacctctgccgagcctctttggacccagatctgttcatgcttttgtcttcgtcactgcggcggggccctttgatgtcttcatctgtatggggtggaaaaatcaccgggaatcccccttcagttctttgaaaaagttccatgactcgaatatctgaaatgaagaaaacaaaccgactcacaaacctccaagtagctccaaatgcaatttttaaaatggaaaacaaaaatctgaaagaaacgtctttagtggctttaagccccaaaacgtccctaaggcgtcctcgagatgaagacgggggggagcccccagccaggtggagaccccgcaggacgcggcggcgcccggtgaccgaggcctcgcacagccggccgccctgagggtcgggccggagccagggtccaagaggggcgcgtttgtgtctcgggttaaaataaggttccgtccgcgtgctgggtcaga

SEQ ID NO: 89819 - DNA, 1514 bp, Homo sapiens
ctccaggagcggcatcaaacagccccgcggggaacgccgccgcacgcatgctcggacccgcccaggcacgaactctcctggaaaaatgctcccggcggctttcctgcttcctttagcgtgaaccgcgggtgctgtgcctcccgtgaaaataataaattcaccgtcacgcttgttgtgaacgcgggtggttcccgaaacttggaggcttcccgtaaacccagctccttcctcatctgggaggtgggtcccgcgcgggtccgccgcctcctccctggcccctccctctcgtgtctttcattttcctggggctccggggcgcggagaagctgcatcccagaggagcgcgtccaggagcggacccgggagtgtttcaagagccagtgacaaggaccaggggcccaagtcccaccagccatgcagacctgccccctggcattccctggccacgtttcccaggcccttgggaccctcctgtttttggctgcctccttgagtgctcagaatgaaggctgggacagccccatctgcacagagggggtagtctctgtgtcttggggcgagaacaccgtcatgtcctgcaacatctccaacgccttctcccatgtcaacatcaagctgcgtgcccacgggcaggagagcgccatcttcaatgaggtggctccaggctacttctcccgggacggctggcagctccaggttcagggaggcgtggcacagctggtgatcaaaggcgcccgggactcccatgctgggctgtacatgtggcacctcgtgggacaccagagaaataacagacaagtcacgctggaggtttcaggtgcagaaccccagtccgcccccgacactgggttctggcctgtgccagcggtggtcactgctgtcttcatcctcttggtcgctctggtcatgttcgcctggtacaggtgccgctgttcccagcaacgccgggagaagaagttcttcctcctagaaccccagatgaaggtcgcagccctcagagcgggagcccagcagggcctgagcagagcctccgctgaactgtggaccccagactccgagcccaccccaaggccgctggcactggtgttcaaaccctcaccacttggagccctggagctgctgtccccccaacccttgtttccatatgccgcagacccatagccgcctgcaaggcagagaggacacaggagagccagccctgagtgccgaccttgggtggcggggcctgggtctctcgtcccacccggagggcacagacaccggcttgcttggcaggctgggcctctgtgtcacccactcctgggtgcgtgcagacccttcccctccaccccccaggtcttccaagctctgcttcctcagtttccaaaatggaaccacctcacctccgcagcacccgacttaccaggacgcatgcccctccctctggccttattaaaaccaaagaaccggatccttttgcacccaggtgtcgccagtgtgggtcgtctctcatccagtcggccatgggggccgca

SEQ ID NO: 89820 - DNA, 1405 bp, Homo sapiens
ctccaggagcggcatcaaacagccccgcggggaacgccgccgcacgcatgctcggacccgcccaggcacgaactctcctggaaaaatgctcccggcggctttcctgcttcctttagcgtgaaccgcgggtgctgtgcctcccgtgaaaataataaattcaccgtcacgcttgttgtgaacgcgggtggttcccgaaacttggaggcttcccgtaaacccagctccttcctcatctgggaggtgggtcccgcgcgggtccgccgcctcctccctggcccctccctctcgtgtctttcattttcctggggctccggggcgcggagaagctgcatcccagaggagcgcgtccaggagcggacccgggagtgtttcaagagccagtgacaaggaccaggggcccaagtcccaccagccatgcagacctgccccctggcattccctggccacgtttcccaggcccttgggaccctcctgtttttggctgcctccttgagtgctcagaatgaaggctgggacagccccatctgcacagagggggtagtctctgtgtcttggggcgagaacaccgtcatgtcctgcaacatctccaacgccttctcccatgtcaacatcaagctgcgtgcccacgggcaggagagcgccatcttcaatgaggtggctccaggctacttctcccgggacggctggcagctccaggttcagggaggcgtggcacagctggtgatcaaaggcgcccgggactcccatgctgggctgtacatgtggcacctcgtgggacaccagagaaataacagacaagtcacgctggaggtttcaggtgcagaaccccagtccgcccccgacactgggttctggcctgtgccagcggtggtcactgctgtcttcatcctcttggtcgctctggtcatgttcgcctggtacaggtgccgctgttcccagcaacgccgggagtgccgagcctctttggacccagatctgttcatgcttttgtcttcgtcactgcggcggggccctttgatgtcttcatctgtatggggtggaaaaatcaccgggaatcccccttcagttctttgaaaaagttccatgactcgaatatctgaaatgaagaaaacaaaccgactcacaaacctccaagtagctccaaatgcaatttttaaaatggaaaacaaaaatctgaaagaaacgtctttagtggctttaagccccaaaacgtccctaaggcgtcctcgagatgaagacgggggggagcccccagccaggtggagaccccgcaggacgcggcggcgcccggtgaccgaggcctcgcacagccggccgccctgagggtcgggccggagccagggtccaagaggggcgcgtttgtgtctcgggttaaaataaggttccgtccgcgtgctgggtcaga

SEQ ID NO: 89821 - DNA, 1090 bp, Homo sapiens
aagcaggctggtactggcctgggtttatggatccaggagcggacccgggagtgtttcaagagccagtgacaaggaccaggggcccaagtcccaccagccatgcagacctgccccctggcattccctggccacgtttcccaggcccttgggaccctcctgtttttggctgcctccttgagtgctcagaatgaaggctgggacagccccatctgcacagagggggtagtctctgtgtcttggggcgagaacaccgtcatgtcctgcaacatctccaacgccttctcccatgtcaacatcaagctgcgtgcccacgggcaggagagcgccatcttcaatgaggtggctccaggctacttctcccgggacggctggcagctccaggttcagggaggcgtggcacagctggtgatcaaaggcgcccgggactcccatgctgggctgtacatgtggcacctcgtgggacaccagagaaataacagacaagtcacgctggaggtttcaggtgcagaaccccagtccgcccccgacactgggttctggcctgtgccagcggtggtcactgctgtcttcatcctcttggtcgctctggtcatgttcgcctggtacaggtgccgctgttcccagcaacgccgggagtgccgagcctctttggacccagatctgttcatgcttttgtcttcgtcactgcggcggggccctttgatgtcttcatctgtatggggtggaaaaatcaccgggaatcccccttcagttctttgaaaaagttccatgactcgaatatctgaaatgaagaaaacaaaccgactcacaaacctccaagtagctccaaatgcaatttttaaaatggaaaacaaaaatctgaaagaaacgtctttagtggctttaagccccaaaacgtccctaaggcgtcctcgagatgaagacgggggggagcccccagccaggtggagaccccgcaggacgcggcggcgcccggtgaccgaggcctcgcacagccggccgccctgagggtcgggccggagccagggtccaagaggggcgcgtttgtgtctcgggttaaaataaggttccgtccgcgtgctgggtcaga

SEQ ID NO: 89822 - DNA, 1982 bp, Homo sapiens
aagcaggctggtactggcctgggtttatggatccaggagcggacccgggagtgtttcaagagccagtgacaaggaccaggggcccaagtcccaccagccatgcagacctgccccctggcattccctggccacgtttcccaggcccttgggaccctcctgtttttggctgcctccttgagtgctcagaatgaaggctgggacagccccatctgcacagagggggtagtctctgtgtcttggggcgagaacaccgtcatgtcctgcaacatctccaacgccttctcccatgtcaacatcaagctgcgtgcccacgggcaggagagcgccatcttcaatgaggtggctccaggctacttctcccgggacggctggcagctccaggttcagggaggcgtggcacagctggtgatcaaaggcgcccgggactcccatgctgggctgtacatgtggcacctcgtgggacaccagagaaataacagacaagtcacgctggaggtttcaggtgcagaaccccagtccgcccccgacactgggttctggcctgtgccagcggtggtcactgctgtcttcatcctcttggtcgctctggtcatgttcgcctggtacaggtgccgctgttcccagcaacgccgggagaagaagttcttcctcctagaaccccagatgaaggtcgcagccctcagagcgggagcccagcagggcctgagcagagcctccgctgaactgtggaccccagactccgagcccaccccaaggccgctggcactggtgttcaaaccctcaccacttggagccctggagctgctgtccccccaacccttgtttccatatgccgcagacccatagccgcctgcaaggcagagaggacacaggagagccagccctgagtgccgaccttgggtggcggggcctgggtctctcgtcccacccggagggcacagacaccggcttgcttggcaggctgggcctctgtgtcacccactcctgggtgcgtgcagacccttcccctccaccccccaggtcttccaagctctgcttcctcagtttccaaaatggaaccacctcacctccgcagcacccgacttaccaggacgcatgcccctccctctgccctcatcaaacccacagacccggactccctttctgccaccccaggctggtccggccccaggtgtggggtccgctctctccactcccagggctccgcgcccaagtgagggggcccctgccggagcctcagacacactccagttcagggctgtggggggccttggccacatacctgtcccttggctatgagcaggctttgggggcccttccgcggcagccccgggggccgaggtagggtcgggggcttagaggctgggatggctcctggccccaccgccagggggcagcgcaggccgggctgggaggcggcggcggcggctcgggctggggggtcaggtggacgccgccctccggggctggacgcgcatccctcagtccctcggccacccgggggtcgctccctcgtgcccaccgcacctgccgagcctctttggacccagatctgttcatgcttttgtcttcgtcactgcggcggggccctttgatgtcttcatctgtatggggtggaaaaatcaccgggaatcccccttcagttctttgaaaaagttccatgactcgaatatctgaaatgaagaaaacaaaccgactcacaaacctccaagtagctccaaatgcaatttttaaaatggaaaacaaaaatctgaaagaaacgtctttagtggctttaagccccaaaacgtccctaaggcgtcctcgagatgaagacgggggggagcccccagccaggtggagaccccgcaggacgcggcggcgcccggtgaccgaggcctcgcacagccggccgccctgagggtcgggccggagccagggtccaagaggggcgcgtttgtgtctcgggttaaaataaggttccgtccgcgtgctgggtcaga

SEQ ID NO: 89823 - DNA, 275 bp, Homo sapiens
gccaccacacccaacagtaatttcttaaccagagggcctgggagtgggtggcaatcagaggagggggagacttgtgatttgaaaagacattctaagatttaaaagtgcttttaatattttttagtcatgatatttaatttgtttggaaatttcaaataacgttaaagaagaaacttgtttgtcaaaggagtcaaggggtgagagttgagaaactgtgatctacaaagttgatttaagccaaatcggactaaagggcagattaattccacattctg

SEQ ID NO: 89824 - DNA, 450 bp, Homo sapiens
agtgaaaccatggaaaacaaaattgtggctaagatcggggacgactgtatatgtattcagtgctatacattttattctaagcaccgcttcgactgcatctcacaaattctaagttgtgttttcatttcatttagttcaaaatatttttaaatttatcttgagtatttcttctttgttccatgcgttgtcttgtttacatctcccaggtattttgggatttgccagctctctttccattactgctttctagttgaattccattgtgattgcagagcagaccttgtattatttctagtaaatttattaagatgtgttttataactgtgtattgtaaactggggagtaaatgcccttcgtggggtctctaggatcattccaacactgccgtggaaatgaaactctgagaagcataaaggatttattatattcataggtcctcatagagggtgg

SEQ ID NO: 89825 - DNA, 471 bp, Homo sapiens
gggacgagggacatgtagctaataggaacatgaaaggagaaactagaaaaggattccacccctgtgatatgcacggaccggcccagccacccatgtggacgctctgtctctccgtgtctgcttctctttctctcttctctctcacacacatgcacgcacacatgcacacatgtccatgtgcacacacgtgtagccgcatccctcagctgccgcttgcagtctaaggatccccttagcaggcagccacctttctcctgggttggggagtggtgggactgaacccccaccccttgtgcccctgcacccgcctcctgggcactccatctactccagcctcctgcctgtgtctgccatgctttgttctctagttgtttccttgccacctaccagtctcctcagctacaaggaagtttcagagaaatcacttttcttcttcagaacctccacaccatcccacccatcagactttcc

SEQ ID NO: 89826 - DNA, 397 bp, Homo sapiens
ggaagccaccaggcacacttgcttactgacgtgctcgggggcggtgaggtcccagtctgtgctctgcacacagcaggaataccatagctatcgacaatgtgactgaaatatttctttggcaaatagaatactgtgtttgttaggctgatttctattttaaaatagaaaagaagaggtttcaagtgagtttttggttctggtgaatcttcattagttctacacagtctgtgggaagcacctcttcttccagggccaacaaaccagggaatacattcatctgtgtggggtgggctctatggctttcaggacctctgcaaaacaaagatggcaccctgcaatacaagcctgaaacttggcgagctgtaaagttcagccaggcaggaggtgtttgcaggca

SEQ ID NO: 89827 - DNA, 478 bp, Homo sapiens
gagagatacagagattaacattaaatgtatttaccctccaagaagcatatattctgtatgtttagggaagataaagaaaacaaactctgcctctttttatgggttcttgctctatgactatgtgtccttttatttcattgggagaagggtgagagtagaattggaaaaggtacaaatagcataatcccaaaatgagttaccacttgacaaattagcataaatctctttcttccctggatttggggctgacagttttacataaatttcataccgtatgttgagatttacttccttaagggtttttcctaggttctctttgacatacatagattgagttgtttacttttcttagctaaattagagacccgtatctttttggatttttcttaagtgttaaacagaaagtaaacaagttcatataacacaagaccaacaaggctaagactgcacacacacacacacacacacacacacacac

SEQ ID NO: 89828 - DNA, 427 bp, Homo sapiens
cctcccaaagtgctgggattacaggcgtgagccgccacacctggccaaaagtaaacttttctaactggatgcagtaaattccaaagtttatcattcaaacactcaaacaataatatttattatgaaacaggagtacaaaccattttactgtgtttatgaatgattctactcagacttatcttcgtaacacaattcataattttcagcattccagacttcagctttggaacagaactatgttctgaaatcttgacgtttgcttatctctgatctgttttcaccagtggctgattttatcctaggtaccctccacgtaatgtctcattccctagggccctggcatagctcagcgccacagcaatcagacaaggactctggagctctggagctgtatagcatctagggtgtacccaggtcattccagccg

SEQ ID NO: 89829 - DNA, 526 bp, Homo sapiens
ttttttgagatggaatctcgctatatcacccaggctggagtgcagtggtgcgatcttggctcactgcaacctccgccttctgggttcaagtgattctcctgcctcaccctcctgagtagctgggattacaggttattgaatagcatagttagagattagatattagacatttttccctttgaaatattttaagtgggataacaacaagggcatttaatgctccaagtggctattcccctcttcccctaggtcctctcctacccccctgccccctgccaactctcctttccatttatgtcactgaacatattcagatgactcaattgggtggttgattttgggccatcttcaatggtgctcacacacaagttaggaatatgaaatattttactgtgtattaggaaagagaatgctgccaaaatctactacaaaatctacagggtgtgagttccctgggagcagagttggatgatcttttttggctttctctccagaatctgagccaagtactactctttatgaaact

SEQ ID NO: 89830 - DNA, 255 bp, Homo sapiens
cgtgagccactatgcctggcctcctgtttaagctacctagtatgtgttattttcttagggcagcccaagccaactatatgactccaaaattctaccccccacaagaaataaaacccaacagaaagatacgtaaagacttgtactcaaattttcatagcattattatttaaaaaggagaagcaacccagatgtccatcagctggtgagtggataaataaaatgttgtatgcctgtacaattgaatattggttggca

SEQ ID NO: 89831 - DNA, 283 bp, Homo sapiens
gagctcacgagcctgtgcggggatgacaccatgcggctgctggagaagaacggcttgactttcccattcagtgcgtaccatcccagctccacctgagggcaggcgttgtagaccgcaggccagcataggggaggggctgggtttatagtgccctctggatttaagctcacccgaggatggatgagcacatggccctgggtcccacctccacccactcctcccgcttcatccctctcaagtaatggctcagctaataaaggcgcacatgactccaaaaaaaaaa

SEQ ID NO: 89832 - DNA, 407 bp, Homo sapiens
aacctcccagactcaggtgatcctcccacctcagcctcctgagtagctgggactacaggcctatattaccactcccagctaattttttgtattttttgtagagatggggttatgccatgttgcccaggctgtgtattattgtttaatgttgtattgttatttttttttaatattgtcgatctacagtggtttgaatccacagactcagaacttgtggatatggagggtcaagtcctctgtccagagccattgatggttccttactgcttgcaggacagaatccacaaactccaaatggcatccccatccttggccaacctttgcagcctcaccacccactcctcccgcttcatccctctcaagtaatggctcagctaataaaggcgcacatgactccaaaaaaaaaa

SEQ ID NO: 89833 - DNA, 224 bp, Homo sapiens
gctgcacccattaacttgtcatttacattaggtatttctcctaatgctatagtctggtattttttattttttagagacacgggtatcactatggtgcctaggctggtcttgaactccaggcttcaagcaatccttccgtcttaacctcttaccccaaaatgctgggattacaagtgtgagccaccatgcctgcctatatattgtattttctttttttttttttt

SEQ ID NO: 89834 - DNA, 324 bp, Homo sapiens
ttctgatggtggagaagaccatacatgtgtgtgtgtggcatcagaactattgactcctcctattgatgtttaagatattccattacacaaacctgggttcatactttttgttgatagatcttatgccaaaaatgtaggcaaaaaatgccaagcaggaaatgctatcacttctgaagatgaattcatacagatggaaattctttcagaatttatttttccagcttttttctttgtttgttcgtttgtgtttgtttgttttgagacagtctcgctctgtcaccaagttggagtgcagtggtgaaatcttggctgactgcaacctcc

SEQ ID NO: 89835 - DNA, 177 bp, Homo sapiens
tcttaccagtgagttttatacgttcacatattttcttgttgcatgttagcgtcctttcctttcagatgaggaaatccctttagcgtttcttgtaagacaagtctggtgctacatataaaatgtttggattctaccttacttgtcttggggtcttgacaggacatggcacattctgat

SEQ ID NO: 89836 - DNA, 783 bp, Homo sapiens
gcctccaaatgttttgctaccacataacatgatcttcatctttatagcttcaaaaatcatttttttaaatcacttgtcactcaccactaattgagcagtgggtacaaggaagctgattctggagactggaaagactcgcgtagtgaccaaacacctgcgatggcttaaaaggaagaccactaaacaaggccacaaattttagatttatgttacaacagcataccactttaagtataaacttctacattagttaaaggactgttacagaactggtccgctacagagtatagattttcctattggtaaggtataaaattaggccaaaggtcttttttcctggcccccttttcttcttgtttctcaatgagtagctgcaatagcttgttcagtgctggattagctacctcttggcttggaagagaagcgggagctgagttttggagctatgtggaggtcagagaagaatggatgtctggagagggaaaaagctcacagtggcagaggaggtgaaactggaggtagcctgggggagctcctggaatggcctgctgatttctggggtttggtgtgggtgagattgcacagaccaagttcgttcaaaagggccagagtggtatgaacaccatgaaaaccccgagacggttcatgaatctgaatacttgagtaagccacataagctttggtttctcagcttccaacatcccatttaaaatttgtgtatgtattttaggttcagtgaagaggaaacaaaaataattaatatttcatccttgctaaacaaat

SEQ ID NO: 89837 - DNA, 132 bp, Homo sapiens
ctgaatgcgagtaggaagttatccagaagcaaaactgccacattgaggtgatgcatggtacagactgcatgcgtgactgcgcctgacactgttctgcttcagtgaacaggtatattttagcattaaactggt

SEQ ID NO: 89838 - DNA, 548 bp, Homo sapiens
ttgtatctttggtagagacggattttgttatattgcctgggctggtctcaaactcctgaggtcaagcgatctgcccacctcggcctcccgaagtgctgggattacagctaccgcacccttcatcatctttttctgatatatgtgtatatatatgtatatatatatgtacacattcagcagtgggaactgactgttttttgtcactatagattccttgcttttctgcttgtttacagtagggaatttcttttctgttaacttttaaaattttgagttaggcagacccctccccggccattggtgacaaaatatgaataaactactgcaaattaaaaaaaaaaaaaaaaaaaacaaaaaaaaaaaaaaaaaaaagaaaaaaaaaaaaaaaaaaaaaaaagaaaaaaaacaacaacagaaaaaaaagatagaaaaacaacaaagcagacggcgaccaccaatgaagcatgacaggagagaccacacagaaatacagcggcgaccagccatacgagaaagagacaaacacagaaacaccaacacgagacagg

SEQ ID NO: 89839 - DNA, 442 bp, Homo sapiens
ttcattcaagacttccaaaactttcaaagagattaaaatagtaacactcaatacttcttgccagagtaaaggaatatgtatcacaaaaataacgatttcacatgaaaaacacctagagttgccatcccaggaaacagctaccttaagcacacctttgctcaaatacaagagttcatcctaaccgtaaagcataaaatgctctcatactctgccacagaatcagttcttccctcatatggcagctacaccggcaagaagcatgaatcttggtggcaatgaacagtcccagcattaagtgacatagctgaaaccagaaaattggcctgtattcgactggaaatccaagaggaccaaagaaacacaatgcatcaactttaatacagacaatatgttttgatcttgaggactaaataaatgtcaattatgtgcttacatctccatc

SEQ ID NO: 89840 - DNA, 324 bp, Homo sapiens
cctagaggatccccaaacaccgcaatctgtgtagacactaaggacaattttatttattgctacattataaagttgaaattatacattagaaagtatgtgttttattattaaaatctggttaaatgcaataaaatcacattcacttttagaaaggtataaatatctgtttggaaatgaatagtatttttaaaattggaataattgaggtttgtcttctatctgtgggcagtaattagagtttctgaactggctgaaatgatcaattatgtgtcatataccctttcaggaccttgtctattttttttctgagattgcggtgttata

SEQ ID NO: 89841 - DNA, 187 bp, Homo sapiens
ttacagaattcacttagataatttctagtctttcctctcctgcatgctgggctctgtaataagtttaggaggtcggctttctttaaattatccccaggttggaggattttgggtgttgggatgcccagggtggtggtccttcttagctttgtcttgcctaacatacttttagaattggtgtagagct

SEQ ID NO: 89842 - DNA, 402 bp, Homo sapiens
ctggagaggggcttgtacaaagtgatggaaggtgatgagaagccattgggttgtaagtctcaccggaaggtagaaccaacacagtagataagtggacagattttgtatatgtgaaagaaagaagtgtagaggctattcattaggtttgtcctgcaaactggaagaatggagtcctcactaattgaaatgaagacgactttgggaatgggagagtgggaggcaggtttgatggagaaaatgtcaggtggttttctgagatgtctattaaatattaaccagaggtgccaagccaaaggtacacatatgggcttggactatggtggagatttctgagctagaggtatacatttgggagtcatcagcacacagatgatgtctgaagctatggtagtgggtgcagtc

SEQ ID NO: 89843 - DNA, 346 bp, Homo sapiens
gggaggatatgcaaagattagatgcaaatattacagcattctgtagaagggacttgagcatttctggattttggtttcacagggagccctggaatgaatcccccacagatgcctagggacagctgtacatcctattacattttctcagaaaatgtgatggcagcttaaagctttaatccttctaaagtctgtgagaagtttgcttcttttagttcaagttgctgttaatgttgtttgtcatggcttcgctttttgtcctgtcttctaaattgtatccctcaattgatgacttgctctcttgccggtagcctctatgcactgtaaatttgccttctcaccacatcct

SEQ ID NO: 89844 - DNA, 491 bp, Homo sapiens
ctggcttcaagcgatccacctgccttggcctcccaaagtgctaggattacaggcatgagccaccacgcctggccataaatatgttaaaaggttgatatagaaacagatgaccgtggcatttagagttttggggtgttgagggagtcaggggtaactccagaaaggattgatatctgtgaattgtcctgaagggtaagaaggaatcagcaaaactcccaaattaaaaactttaccaaaaacatttcatcttagtgctaagtctactattttctacaaaatacatatttctaaatttttcatttactattttaaaattcttagcttccctcctcatccctgattaaaaaaaattttttttttgccctttggcttcttacatttttaatgaatgtgtttatgagtactttggactccactgaaaaaaattagaagaggccaagagagtaggatgaagggccttccagacagggggaatagactgaaaaaaaaaa

SEQ ID NO: 89845 - DNA, 472 bp, Homo sapiens
tatgagaatgaagacagcatttttccccttcattttcccttttccctatatttttctttcctggacttgttcataaccattatataatgcaatgcctggcacaaggtaggtgttcagtaagtactgaatggatagatggaaggagggatggatgtatattaagtgtcacttcagaccactgagtaatagctagtagctcagttttggggagggaatcatcttcagagtcttctttttcttaccttcctatttttcacttagcgcaatgtctgacccatccaaaacactcaaaaatagttgttgagtgaataagaaaatgagtgaaagagcagtcaaatcagtccaaaaaatttagatggttctgtttctgagataactctcaaatctttcctctcctttttacttctaatacactaccctggttgagaatctcaaggctattgcgtgctccttctaactagcctaacatttc

SEQ ID NO: 89846 - DNA, 361 bp, Homo sapiens
cttaatacaattttcctatctaaaaaaacataattttaaaataatctaataaccaatctatgttcagtttttgccagttgtctcaaaaatctctatagtttgtctaaatcaagatccagtaaaatagtccagtacgaactactgaaagtttgctcccttcataaaagcattgaaaaacctgccacatactatcaaaatcaactttcacagaactctggaaattagccaaaagcttgcggcaacccagaaaacttcaactgaaaaaaaaaaaagttgaattctagtagaaacagcaagctatgtggtattttaccttattaccagattttaaatcagctattttaaacatgttcaaagagcc

SEQ ID NO: 89847 - DNA, 414 bp, Homo sapiens
tgtgctcctgacatatagtgggtaaaggccaaggatgctgctaaatagcctgcaatgcacagggcacaacaaagaatgatcaagcccggaagtcaatagggccaagattgagaaaacctacatgtttgcatcatccttctgcagacctcagagatggtggcaaattcctgggattccccccacttcagttattgcagaaccactgcggtaatatttactaggttcacatatacaagaacttttatttacttaacatgtttgtgcaaattaactcaattttgaatgatttagccttcttactaatatctttgaaactgcagatttgatcttctaattatatttttcaatacacatcaaaattaaaatatgattattaatgttaaaaatgcttggctgggcatagtggctcacacc

SEQ ID NO: 89848 - DNA, 669 bp, Homo sapiens
tcaacggggtggttggccaggcagcattgttccaggtagaagccccctggccagggatgggtcctggaggatgcaggatcctaaactggcctgaggccacctcccaaccctttgaacaaatgaagaaaaagagcccctgagtgagaagaagaactgggatggatcacagggctcaggactcctggtccagtgctccctctacagcagcaccctcggggagtctgtgtgtttcaggtacagacaccaagagaccagagagttttcccctcgtggctctaccaccagaatatccagaatgagtaaacccatagaaacaaaaagcagattggtggctgccagactagggaaggacggaatggggagtaaatgcttaatgggtacagggtttccttttggagtgataatgtttgaaactagaagtggcagttgcacacatcatgaatatgtactaaatgccactgggttgttcacgtttttgtttttgtttttttttgagacggagtcttgctctgtcgccaggctggagggcagtggcgcgatcttggctcactgcaacctccaccgcctgggttcaagcgattctcctgcctcagcctcctgagtagctgggactacaggcgcgcgccacccacacccagctaattttttgtatttttagtggagacaggg

SEQ ID NO: 89849 - DNA, 336 bp, Homo sapiens
tcagaaaaaaaaggacttagttctctaaactatgtgcaaattaaaactgcagccttaaacttccttctctgaaaaatctatcggcaatatgattactaaatgcaaggattctgatttgttagttataggcttataaactgctactatattcccctgagagtcttttgcatgacaaaattcttaatacctacagacttgaaggtatggcacttaaaaaaaaaaaaaaagtttcccaggactgattacactttgaaaactgatgtgggttcacgacttccacaacaattttttcccataaactctgatacatctacttggtgccaaacaccgttaggc

SEQ ID NO: 89850 - DNA, 547 bp, Homo sapiens
acacacaacacacagacacaaaaagacacacaacacacaggaacatacaacacacacaggcacacacacaacacagacacataggcatatgaaaatacagagacacacacagacacacacacacaaacacaacacacaaagacatacacagacccactggcacatgtacacacataaggaaacacaaaatgcacagagacacacagatacataggcacacacagacacagacacatgaacacacacacaaacacactacacacacagacacagacacactggcatacagacacagagacacatagatacacagatacacaaagaacacacactcacacagacacacacaacacacaaagacccacccatactgacacactcacacaaacatacagacagcaaagggagacacactgacacacacagagacacacaaacacatgaacacacacagacataagacatatgacacacagatacactgacagagacaaacacatgaacacacacacaacatatgacacacacagacacacaaaggcagaca

SEQ ID NO: 89851 - DNA, 137 bp, Homo sapiens
agtgcagaggacttggaacagatagacagcagcttcctatagaacgcatgtggctttcttcaaggaaagccaatttccttcagacttgtgcagcaatgagaagaatgagacccaccttaaagacttccatctgtctt

SEQ ID NO: 89852 - DNA, 254 bp, Homo sapiens
taatatctttactcaaaataataacattttaacacctaaagattcttcaaaaatatgttaattctaagaataccatgttacggacaaaaatcttaaaatatagtcttcaaaaaaatactacattcaaaatctgtgaaatgttggtaaagcaattctcagaaagtaactttattgctgtaaatgattttgccgtcaaaaacaataaaaataagttactaaatattggtttagaactttcatatagaagtgaccga

SEQ ID NO: 89853 - DNA, 366 bp, Homo sapiens
ttcatatctctcccacatctgcccctgttggttgactttgcctccctatatgggtcccataaggccggcaagggagggtccacatctctcaatcctttgtccaccattggtgtttagaaccccctggaggaaaactggatcatagtgcaacatgaaaaaaaaagaactttaggccgggtgcagtggctcacgcctgtaatgccagcactttgggaggccgaggtgggcggatcacttgaggtcaggagttcgagaccagcctggccaacatggtgaaaccctgtctctactaaaaataaaaaaatgagctgagcgtggtggcatgcacctgtaatcccagctatttgggaggctgaggcaggagaa

SEQ ID NO: 89854 - DNA, 451 bp, Homo sapiens
cttttagcctacagttttctgttactaatattgcctctcttgcttcattttgcatgtctctgtgtgtgtgtctgtgtaggtgtgtatgtttgagtaatatatttggtaatacttttaactttgctttaatttttttatgtgtttctgttacaaaaactatgcaataggctgggcgtggtggctcaagcctgtaatcccagcactttgggaggctgaggtgggcagatcacctgaggtcaggagtttgagaccagcctggccaacatgatgaaacctcatctctactaaaaatataaaaattaggcaggcatggtggcaggcgcctgtaatcccagctactcaggaggctgaggcagaagaatcgcttgaacccgggaggcagaggttgcagtgagccgagatcgtgccattgcactccagcctggggaacaagagcgagacttcatctaaa

SEQ ID NO: 89855 - DNA, 1955 bp, Homo sapiens
aaaatgtacatttttgtattattttttcttattccaacctaatcggtggcttgtcccttcctgtgtttattgggctgttgggtgcctggatagagctggagaccatttaactgctgtatgaataatagataagcgtcttgaataacatctgaatttcctaggtatgtagaaacacccaccatgcacatatatgaacatacagaatatatgaatgttaaaatatggtgaaaacaatcttttgctaatagaagtgttaacctttatttttaaaaaaaatttggtgtgtatgtagaggtttatttgattgttagttgtgtccatgtataatatgtcatctacctttacagatgtgcagaaatttgttgtatttggtggatatattttacttaaaactatagggcagaagctttttatgtttgttgaagtgaaatggcataccaaacctgtgtggtagagtgggatttttagattgctgtgtgtacagtcaggttatatctttaaaatacctattcgttatatattaatatgtagacattgctgatacatatgtatgtaaaaatcagagtatttttattaatataggcattagcttcttgattcacttgtttgttgggaagcacttggagaaggatgttgaatactttgtcatttcatctctgtgacgtacagttgtcatgtcaaccctcctatctgcgggttttgcatctgcaagcacatgcagctggaaagtacagcattggcagaatctgaaacccgagtaaagagcacctcattttcataaccatgggttctgaagagctaagggagttgaggatgcaccgattttggtatgggggtacggtacaggtacaaatccccgatggatatcactagacaactgtacaatcctctttagctttttttttgttttatagacagtgtggacgtgcatatattgcaagcatcactttgttaaactatgcttaaccctgcaaatgattttaagagctctgtgtgggtggctttcttgggtttactattaaatatctgtgtttatcatagttgttctataacatttcaactttgtaaatatgtagtttgttgataaagaggatagagacatttttcttttgttgatagattgttctttcccctttgcttagtcttcattgtgttgctgggattgtaaaagacaaattacttgcacatatttaagcttatatattaaatgtatatatgctgtcatgttagagagggagagtggttccctcccccacattttgatttaaaagtaaaaattaatttttattaaattgtttgggtcagtttcatgtaagaataatctctacattgaatggtatatcttggccgggtgcggaggctcacgcctgtaatcccagcactttgggaggccgaaggggccagatcacgaggtcaggagttcgaaaccagcctggccaatatggtgaaaccccgtctctactaaaaatacaaaaactagccggccgtggtagtgcacatctgtaatcccagctactcggcagtctgaggcagaagaatagcttgaacccaggaggcagaagttgcagtgagccaagatcgcgccactgcactccagcctgggcgacagagtgagactccctctcaaaaaaaaaaaggtatatcttattttctttgatgtactgaggttcatgatgcaattcattcttaagcatatactatagaatctttaaattatatggttctgtgttcatttgtggcatgacagtaaccaagacaatttagtaaataatcagcaaatgaaatatttaattttgaacatctagtatttctagatgtatagagagtctcacgaagtagattttttaagtatcttgttgtaaatttgttagtactgttgtcttttgcaattaatgtggcaatgaaattgattattgatacacaggctcttggagctaaacaaaatttatcgtgtt

SEQ ID NO: 89856 - DNA, 436 bp, Homo sapiens
gacgaaaaatcagcaggtcttggcatatcctagatgaaattcacagcggggcagtacacgatgatggctgagtgcagaggctctggagctggggttatatttttattctaccacttagaccagtaacttgtctgttgtctgcctcacttttctcacctgtgaagtggtggcagtgatgaaaatgctgagagagctgtgagatcacacctgaacagcacttagcaatcaggcctgacactcagtgggttatttttatccctgaatttctaaacttataaactttaaatcttcatgattaaataaaggagcatggttttaaaaagacctgcttgtagtccagactatttctagggcttgccacgaagaaaacctggtggaagctcctgccggaaatctgttcagagtgtgtttccattttggacttcttcagacacca

SEQ ID NO: 89857 - DNA, 1224 bp, Homo sapiens
ggcacgagggtgagcttctgtcctaggggagctccgggggcctgtcccatcatttgccttcagccagaatgacatgtgcctggtgtttgtagcttttgccacctgggctgtgaggacgtcagatccgcataccccagacgcctggaaaacagccttgctggccaacgtcggcaccatctctgccatccgctacttccgccggcaggcggggcaagggcgccgcagccacagccccagccccagctcctaggagccaggcccgggccagggagatgcaggatgaggagacgaccacaggcgcccagggcaggacgaggtgccgccctcgcccgggccctctgacccctctcttctaccgcgtccaggaggggggcgtgtcctggtgctgctccctccgactcacctgaggatccagccagtgaccacggccactccccacgcctgggagggaggtgctaaagtctgggtgggtggagggcaggcaggtggctgggtaggagggtggccagattcacagatgagaacacagggcattcggttaatttcagacaggcaatagtggggaggtcattttactaagaagttgttgtttatctgaaatcaaatgcaaccgcaccctgcgtttcttctggggtgcagggggagctgagtggcaggacaggacttggacctcggaggggtctgagcagcaagacactccggctggagctctgggcagaggcaggggagaggacacagggtggcctcaaagaggggatgggcagcctcctcacaggtgggctgggctggcaagggctccaaggcccatcactcttgatcctcaaaggactgtggccaaggcctctgcgggctctggcctgagacagcgaaggctctgcctgcccctccccagtgcagcggcccctgcagggtgggggtctgtggcagagccgcgagcccctccccgggagccctgggtgcaggtgcagagggagaattcggtggcctcagatggagggctgggctcctggggttgtcccgggggctcctgtggggcagctggggacccacagccaagaggagtcagagatgaggtgggaaggtcggtgaggggcccgaggtggcagaggaagggggctgcctggctgggtgctgggtgggggtcctcaagactgtgggagaccctggctgctgagcagagaacacatggatgcagcaccaataaaattctatcttttctttttc

SEQ ID NO: 89858 - DNA, 114 bp, Homo sapiens
cagcaactggctagcctgcggaccccgggctcccaagagaactgctcctctctgacctctcgccaaactggtctgaaagtttctggggtcctgggagtggtgggaggtgctttt

SEQ ID NO: 89859 - DNA, 953 bp, Homo sapiens
aattaaatgagttagtatacacaaatgcctagagcagtgcctgcgtccagtttaatttggctttacaaatttaaacctgcaaggattatgtaattagacatacataaattttacacaaataaaaatcagagtgaatgtaatttgacatcagttgaataaaatgaagcaaaatatcataatctttggtttattactgtgtatttggtaatcctggaaattgatacaatttgcattttagtttaagtgcatgttatttaagtaacatttaagttttataagatcatggaattaaccattttttcgtatttttcaattagaaaaattttgtatttttacaattagaaaagtgtaattttttattagtatgcaacagatatgacacagctaggctaaatcaaattattacatatagtccaaaatttagatgattatactgaatattagtattcacttactgtactactgaagagtcaacatttcaaagctaatgatgaaaattatctactaagtgtgtgactttttccccaagaatgatttcatctgcttccaccaatttcagtattctagttgatagagtcaaaatcatagcatgcggaagcagcacaagatatcatgtgcaacatgtgttgtgccaagtcagtaaacagccatcgtaggagtggccagcgtggccttataccttactagaacccagagaaaaaagagcctgctttttaaagagaaaggcaaaattgcttctggcctccatttcccactctttgtttctcatgggaagaagcaagaattccagaatcgtgtgaaattttcatggttttatgaaatcattctctgagtcattaaaatgtatgctaagaaaaaaaatctaacttatgctttatgctcagatgcaattttaatagtctcaaactaagataaacaaatatcccagcacacttttttaattaaaaaaaaaa

SEQ ID NO: 89860 - DNA, 410 bp, Homo sapiens
taccatcttaactatctttaagtgtgcaattcaatcgtgttaagcacattttcaatacggacagcaattgccaccatccatctctagaactcttcatcttacccaacaggaactccatacccactaaacaccaactccccagctcttggcaaccaccattctttctgtctctatgactccggctacaccaggtatttcatacaagtgggatctcatgcagtatttgttcttttgtgactagtttatttcactcagcatgatgtcttcaaggttcattcatgttgtagcatgtgtcagaatttccttccttttcccccctgaataatattcctttgtgtgaatacatcccactttgttgatctgttcatccatcagtagacacctgggtcacttccatctttaggccttag

SEQ ID NO: 89861 - DNA, 484 bp, Homo sapiens
atacagaacacagatgcctgcccacacctactgtgtgctgtagggaagaaaacagctttcccttctacccatctgaaattcattggctggggccctgtaacaaaagacagattaacgagagaaaagcatatacatttgatatggtttggatctgtgttcccacccaaatctcattcagttgcaatccccagtgttggaggtggggtctggtaggaggtcattggatcacaggggtgtttctcaaggtttaataccactcccttggagctgttgggatagtgagttttgtgatctggttgtttaaaagagtatggtacctccacctctctccttgcttctgcaccaccatgtaagatgccttgcttcccatttgccttccgccatgagtaaaatctccctgaggtctccccagaagcagaagctgctatgcttcctgtacagcctgtggttttatgagccaattaaacctcttctctttataatt

SEQ ID NO: 89862 - DNA, 175 bp, Homo sapiens
cggagctaatgcacccggctcctctccatggctctccgcgggtgtagacccagacccctgcccgggctgtggagtccaagctgggttctgctggaacatcctagtctctagcttgttccccaagttagcagtcatttgtcttcttctttctttctttttttgagtcttgctctgt

SEQ ID NO: 89863 - DNA, 1739 bp, Homo sapiens
ggcggggccagggccagactggtctgggccccagtcgagggctgcaggtggtaggctgcgaccccttcctcccacagccccttcccgcccctcgccgggcatccgccgacaggagagatttacaaatagtgttttggcatcatggaacgtgtaggttgtactttaacgacaacttacgcccaccctagaccaacaccaaccaactttctaccagccatcagtaccatggcctcaagctacagggaccgctttccccactccaatttgacccatagcctgagccttccttggagacccagcacatactacaaagtcgcctccaattccccaagcgtggccccgtactgcaccagatcacagagggtgtccgagaataccatgcttccctttgtttccaacagaaccactttcttcacaagatacacaccggatgactggtacaggtccaatttaaccaactatcaagagtccaacacttcccgacataattcggagaaactaagagtggatacatctcgcctgattcaagacaaatatcaacaaacaagaaaaactcaggcagacacaacccaaaatctgggagaacgtgtcaatgacatagggttttggaaatctgaaatcattcatgagttggatgaaatgattggagagacaaatgcacttactgatgtgaagaaaagactggagcgggctttgatggagactgaagcccctcttcaggtagcccgagaatgtctatttcatcgagaaaagagaatgggaatcgacctagttcacgatgaagttgaagcacaactgctgacggaagttgatactattctgtgttgtcaagaaagaatgaagctacatttggataaggctattgcccaacttgcagccaacagagcgtcccagcatgagctggaaaaggacctgagtgacaaacagacggcttaccggatcgacgacaaatgccaccacctgcgcaacacatcagacggtgtcggctacttccgcggagtggagagggtcgatgcaactgtctcagtgcctgagtcctgggccaaatttacagatgacaatattctccgctcccagagtgaacgggcagcttccgctaagctaagagacgacattgaaaacctcttggttgtgactgccaatgagatgtggaatcaattcaacaaagtgaacttgtctttcaccaatcgcattgctgagactgcagatgctaagaataagattcagacgcacttagcaaagaccctgcaggagattttccagactgaaatgaccatagaatccatcaagaaggccatcaaggacaagactgccttcctgaaggtggctcagaccagactggatgagcgcacaagacggccgaacattgagttgtgccgagacatggctcagctacgccttgttaacgaggtacacgaggttgacgacaccatccagaccctgcagcagcgcctgagggatgcagaggacaccctgcagtcgctggtccacatcaaagccaccctcgagtatgacctggctgtcaaagccaattccctgtacatcgaccaggaaaaatgcatgagcatgcgcaagagctaccccaacaccctccggctggtcggcttctgctagggaccccaccgggtgtggttttgatacccctaagttaaggctgagccagagcactgtctcagcatttgaaccgaatgctaatatagtcacttattaaaggattatgctgatggaaatgtaccaac

SEQ ID NO: 89864 - DNA, 401 bp, Homo sapiens
  misc_feature (47)..(47): n is a, c, g, or t
tagccacgcgacaacgcagtcgtcgcagaaaatgtggaggatgatgngttgcacctccgccttgttaacgaggtacacgaggttgacgacaccatccagaccctgcagcagcgcctgagggatgcagaggacaccctgcagtcgctggtccacatcaaagccaccctcgagtatgacctggctgtcaaagccaattccctgtacatcgaccaggaaaaatgcatgagcatgcgcaagagctaccccaacaccctccggctggtcggcttctgctagggaccccaccgggtgtggttttgatacccctaagttaaggctgagccagagcactgtctcagcatttgaaccgaatgctaatatagtcacttattaaaggattatgctgatggaaatgtaccaac

SEQ ID NO: 89865 - DNA, 1773 bp, Homo sapiens
ggcggggccagggccagactggtctgggccccagtcgagggctgcaggtggtaggctgcgaccccttcctcccacagccccttcccgcccctcgccgggcatccgccgacaggtacataccaagaaattgaattgctgagtcacaggagagatttacaaatagtgttttggcatcatggaacgtgtaggttgtactttaacgacaacttacgcccaccctagaccaacaccaaccaactttctaccagccatcagtaccatggcctcaagctacagggaccgctttccccactccaatttgacccatagcctgagccttccttggagacccagcacatactacaaagtcgcctccaattccccaagcgtggccccgtactgcaccagatcacagagggtgtccgagaataccatgcttccctttgtttccaacagaaccactttcttcacaagatacacaccggatgactggtacaggtccaatttaaccaactatcaagagtccaacacttcccgacataattcggagaaactaagagtggatacatctcgcctgattcaagacaaatatcaacaaacaagaaaaactcaggcagacacaacccaaaatctgggagaacgtgtcaatgacatagggttttggaaatctgaaatcattcatgagttggatgaaatgattggagagacaaatgcacttactgatgtgaagaaaagactggagcgggctttgatggagactgaagcccctcttcaggtagcccgagaatgtctatttcatcgagaaaagagaatgggaatcgacctagttcacgatgaagttgaagcacaactgctgacggaagttgatactattctgtgttgtcaagaaagaatgaagctacatttggataaggctattgcccaacttgcagccaacagagcgtcccagcatgagctggaaaaggacctgagtgacaaacagacggcttaccggatcgacgacaaatgccaccacctgcgcaacacatcagacggtgtcggctacttccgcggagtggagagggtcgatgcaactgtctcagtgcctgagtcctgggccaaatttacagatgacaatattctccgctcccagagtgaacgggcagcttccgctaagctaagagacgacattgaaaacctcttggttgtgactgccaatgagatgtggaatcaattcaacaaagtgaacttgtctttcaccaatcgcattgctgagactgcagatgctaagaataagattcagacgcacttagcaaagaccctgcaggagattttccagactgaaatgaccatagaatccatcaagaaggccatcaaggacaagactgccttcctgaaggtggctcagaccagactggatgagcgcacaagacggccgaacattgagttgtgccgagacatggctcagctacgccttgttaacgaggtacacgaggttgacgacaccatccagaccctgcagcagcgcctgagggatgcagaggacaccctgcagtcgctggtccacatcaaagccaccctcgagtatgacctggctgtcaaagccaattccctgtacatcgaccaggaaaaatgcatgagcatgcgcaagagctaccccaacaccctccggctggtcggcttctgctagggaccccaccgggtgtggttttgatacccctaagttaaggctgagccagagcactgtctcagcatttgaaccgaatgctaatatagtcacttattaaaggattatgctgatggaaatgtaccaac

SEQ ID NO: 89866 - DNA, 1061 bp, Homo sapiens
ggcggggccagggccagactggtctgggccccagtcgagggctgcaggtggtaggctgcgaccccttcctcccacagccccttcccgcccctcgccgggcatccgccgacaggtacataccaagaaattgaattgctgagtcacaggagagatttacaaatagtgttttggcatcatggaacgtgtaggttgtactttaacgacaacttacgcccaccctagaccaacaccaaccaactttctaccagccatcagtaccatggcctcaagctacagggaccgctttccccactccaatttgacccatagcctgagccttccttggagacccagcacatactacaaagtcgcctccaattccccaagcgtggccccgtactgcaccagatcacagagggtgtccgagaataccatgcttccctttgtttccaacagaaccactttcttcacaagatacacaccggatgactggtacaggtccaatttaaccaactatcaagagtccaacacttcccgacataattcggagaaactaagagtggatacatctcgcctgattcaagacaaatatcaacaaacaagaaaaactcaggcagacacaacccaaaatctgggagaacgtgtcaatgacatagggttttggaaatctgaaatcattcatgagttggatgaaatgattggagagacaaatgcacttactgatgtgaagaaaagactggagcgggctttgatggagactgaagcccctcttcaggtagcccgagaatgtctatttcatcgagaaaagagaatgggaatcgacctagttcacgatgaagttgaagcacaactgctgacggtaaatgtgggggaaatgcatcagtcacaggcagcttagttgtaaatgtatgttgaatatgtagaagcaaaaaaggatgttacataaaatgacttataagtaaagcattatcgtatcagatgctgatagcatttagcaaagacatgtttttcttggttataacatatattcaatgagaatatgaaaatgcaaacgagtaaataaagatgaaaatcacttgaaa

SEQ ID NO: 89867 - DNA, 495 bp, Homo sapiens
tcactcaggctgcatgtttttcaaagtgggttccatagaacccctcttcatgcacagctcattatttaggataagcagctctccactccagagactacatgggcccctagacagccaactggaggcacctctctgctttagaagaacccagcaccttgttaacgaggtacacgaggttgacgacaccatccagaccctgcagcagcgcctgagggatgcagaggacaccctgcagtcgctggtccacatcaaagccaccctcgagtatgacctggctgtcaaagccaattccctgtacatcgaccaggaaaaatgcatgagcatgcgcaagagctaccccaacaccctccggctggtcggcttctgctagggaccccaccgggtgtggttttgatacccctaagttaaggctgagccagagcactgtctcagcatttgaaccgaatgctaatatagtcacttattaaaggattatgctgatggaaatgtaccaac

SEQ ID NO: 89868 - DNA, 1522 bp, Homo sapiens
ggcggggccagggccagactggtctgggccccagtcgagggctgcaggtggtaggctgcgaccccttcctcccacagccccttcccgcccctcgccgggcatccgccgacaggtacataccaagaaattgaattgctgagtcacaggagagatttacaaatagtgttttggcatcatggaacgtaaccactttcttcacaagatacacaccggatgactggtacaggtccaatttaaccaactatcaagagtccaacacttcccgacataattcggagaaactaagagtggatacatctcgcctgattcaagacaaatatcaacaaacaagaaaaactcaggcagacacaacccaaaatctgggagaacgtgtcaatgacatagggttttggaaatctgaaatcattcatgagttggatgaaatgattggagagacaaatgcacttactgatgtgaagaaaagactggagcgggctttgatggagactgaagcccctcttcaggtagcccgagaatgtctatttcatcgagaaaagagaatgggaatcgacctagttcacgatgaagttgaagcacaactgctgacggaagttgatactattctgtgttgtcaagaaagaatgaagctacatttggataaggctattgcccaacttgcagccaacagagcgtcccagcatgagctggaaaaggacctgagtgacaaacagacggcttaccggatcgacgacaaatgccaccacctgcgcaacacatcagacggtgtcggctacttccgcggagtggagagggtcgatgcaactgtctcagtgcctgagtcctgggccaaatttacagatgacaatattctccgctcccagagtgaacgggcagcttccgctaagctaagagacgacattgaaaacctcttggttgtgactgccaatgagatgtggaatcaattcaacaaagtgaacttgtctttcaccaatcgcattgctgagactgcagatgctaagaataagattcagacgcacttagcaaagaccctgcaggagattttccagactgaaatgaccatagaatccatcaagaaggccatcaaggacaagactgccttcctgaaggtggctcagaccagactggatgagcgcacaagacggccgaacattgagttgtgccgagacatggctcagctacgccttgttaacgaggtacacgaggttgacgacaccatccagaccctgcagcagcgcctgagggatgcagaggacaccctgcagtcgctggtccacatcaaagccaccctcgagtatgacctggctgtcaaagccaattccctgtacatcgaccaggaaaaatgcatgagcatgcgcaagagctaccccaacaccctccggctggtcggcttctgctagggaccccaccgggtgtggttttgatacccctaagttaaggctgagccagagcactgtctcagcatttgaaccgaatgctaatatagtcacttattaaaggattatgctgatggaaatgtaccaac

SEQ ID NO: 89869 - DNA, 322 bp, Homo sapiens
ccaggctggtctcaaactcctgacctcgtgatccacccgcctcggcctcccaaagtgctgggattacaggcgtgagccattgtgcatggcctcatctggactttttaaaactgtttgtaccctaatccatatctccagtccagatcttccccctgggcctcggcccctcacaccagataaaccagctatctccacttacatgtttctcacattcctagaacttggtatgccccaaactgtatcatcatcttcacccctgccccctttctagcagcccattccccttgtagagttcatgtctccacaaaaaccaccatttacc

SEQ ID NO: 89870 - DNA, 301 bp, Homo sapiens
ctcccgggttcaagcgattctcctgcctcggcctcccgagtagctgagattacaggcacctgccaccacgcctggctaattttttgtatttttagtagaaacggggtttcaccatgttagccaggctggtctcgaactcctgacctcaggagatctgcccacctcggtcgcccaaattgctgggattacaagcgtgagccaccgcgcccggacccgtggatttgttttaacaggtgtggtaaggcatgcacacgtgagaatgactgttgtgaaggaagaagttatagtcgtgggtccctgg

SEQ ID NO: 89871 - DNA, 3575 bp, Homo sapiens
  misc_feature (2505)..(2505): n is a, c, g, or t
  misc_feature (2809)..(2809): n is a, c, g, or t
  misc_feature (3075)..(3075): n is a, c, g, or t
gctgtcagcgctgagcacagcgcccagggagagggacagacagccggctgcatgggacagcggaacccagagtgagaggggaggtggcaggacagacagacagcaggggcggacgcagagacagacagcggggacagggaggccgacacggacatcgacagcccatagattcctaacccagggagccccggcccctctcgccgcttcccaccccagacggagcggggacaggctgccgagcatcctcccacccgccctccccgtcctgcctcctcggcccctgccagcttcccccgcttgagcacgcagggcgtccgaggacgcgctgggcctccgcacccgccctcatggaggccgtggagaccggggaacggcccaccttcggagcctgggactacggggtctttgccctcatgctcctggtgtccactggcatcgggctgtgggtcgggctggctcggggcgggcagcgcagcgctgaggacttcttcaccgggggccggcgcctggcggccctgcccgtgggcctgtcgctgtctgccagcttcatgtcggccgtgcaggtgctgggcgtgccgtcggaggcctatcgctatggcctcaagttcctctggatgtgcctgggccagcttctgaactcggtcctcaccgccctgctcttcatgcccgtcttctaccgcctgggcctcaccagcacctacgagtacctggagatgcgcttcagccgcgcagtgcggctctgcgggactttgcagtacattgtagccacgatgctgtacaccggcatcgtaatctacgcaccggccctcatcctgaaccaagtgaccgggctggacatctgggcgtcgctcctgtccaccggaattatctgcaccttctacacggctgtgggcggcatgaaggctgtggtctggactgatgtgttccaggtcgtggtgatgctaagtggcttctgggttgtcctggcacgcggtgtcatgcttgtgggcgggccccgccaggtgctcacgctggcccagaaccactcccggatcaacctcatggactttaaccctgacccgaggagccgctatacattctggacttttgtggtgggtggcacgttggtgtggctctccatgtatggcgtgaaccaggcgcaggtgcagcgctacgtggcttgccgcacagagaagcaggccaagctggccctgctcatcaaccaggtcggcctgttcctgatcgtgtccagcgctgcctgctgtggcatcgtcatgtttgtgttctacactgactgcgaccctctcctcctggggcgcatctctgccccagaccagtacatgcctctgctggtgctggacatcttcgaagatctgcctggagtccccgggcttttcctggcctgtgcttacagtggcaccctcagcacagcatccaccagcatcaatgctatggctgcagtcactgtagaagacctcatcaaacctcggctgcggagcctggcacccaggaaactcgtgattatctccaaggggctctcactcatctacggatcggcctgtctcaccgtggcagccctgtcctcactgctcggaggaggtgtccttcagggctccttcaccgtcatgggagtcatcagcggccccctgctgggagccttcatcttgggaatgttcctgccggcctgcaacacaccgggcgtcctcgcgggactaggcgcgggcttggcgctgtcgctgtgggtggccttgggcgccacgctgtacccacccagcgagcagaccatgagggtcctgccatcgtcggctgcccgctgcgtggctctctcagtcaacgcctctggcctcctggacccggctctcctccctgctaacgactccagcagggcccccagctcaggaatggacgccagccgacccgccttagctgacagcttctatgccatctcctatctctattacggtgccctgggcacgctgaccactgtgctgtgcggagccctcatcagctgcctgacaggccccaccaagcgcagcaccctggccccgggattgttgtggtgggacctcgcacggcagacagcatcagtggcccccaaggaagaagtggccatcctggatgacaacttggtcaagggtcctgaagaactccccactggaaacaagaagccccctggcttcctgcccaccaatgaggatcgtctgtttttcttggggcagaaggagctggagggggctggctcttggaccccctgtgttggacatgatggtggtcgagaccagcaggagacaaacctctgaggacagggccagccgcgggactgacaccctgggatggaacctcaggatgggccaaacccagacaacgggcccatggccttgggctctgattggctggattgccttgtatgcaaatgagttcaggactacaataccctaccctatggggaggccctgcctccgggaggtcattttttaaatccagccccttgcttcaaccgtccccagtattagacgctgcagcccngacggctccccccaaataaggctgggtttttctctctctcttttttttttttttttttttttgagacagggtcatgctctgtcacccaggctggagtgcagtggtgtgatctcggctcactgcaacctctgcctcccaggctcaagtgattctcctgcctcagcctcttgagtagctgggattgtaggtgcccaccaccatgcccagccaactttttgtatttttagtagagacagggtttcaccatgttggtcaggctggtctcgaactcctgacctcaagtgatccacctgcctcggcctcncaaagtgctgggttacaggcgtaagctaccatgcccagcctaccgtttttctcaatctataatagaaagccaccacgcccaggtaatttttgtaattttgtatttttgtagagacggggttttgccatgttggccaggctggtctcaaactcctgatctcaggtgatcctcctgccttggcctcccaaagggctgggattacaggggtgagccaccgcgccccacctctttcttattttcttcctgggattggggaggggatgatncagaccccacatggcctccaaccttggcccacacacctgccatggctcccatcatcctgagcatgctagcgtcccctcctcacctgacaatggaggctctcgaattgggttgtgtccccccaaaatttatgtctacccagaacctcagaacatgagcttacttggaaatagggtctttgcaggtgtaactggttaaattaaaagaggtattactggaggaggatggatgaatccagtgactggttcctcatatgaagtagagaagagatgcagagaaacacatggggaagatgccacgtgaagacagaggcagtggttggatcaatgcatctacgagtcggagaacccaaggattgccagcaacaaccagaaatcaggaggggggcatgagatgcattatttcttagagcctttagagggaacatggccctactgacaccttgatgtcagacttctggctgctagaactgtcagagaataaatttctgttgtttgatgcc

SEQ ID NO: 89872 - DNA, 260 bp, Homo sapiens
tgcattcctttcagtgatattgacatactcataattctccagcgttaaaaatcttggtttttatggtggggtttctccttttttgtttcctcattatgtaattgatttttcgttaattctgcctttataatataaaattcttattaatttaaacatagcttacattcttcccttaatgattccttatttattattatattaggtctaagtacttcagaccagagttaaggccttctctcaagaggataatcccctctact

SEQ ID NO: 89873 - DNA, 102 bp, Homo sapiens
taggcaagccttaggctttgagctatgcagagctgacttccatgtcaaacatctgagagcaggagccttgctctcatttcttcggtgcctcctcccagtctg

SEQ ID NO: 89874 - DNA, 772 bp, Homo sapiens
tcgacctcccaggctcaacccatcctcccacctcagcccccagagtagctgggactacaggcgcaagtcaccatgccaagataatttgtagagaaggggttttgccatgttgcccaggctggttttgaacttctgggctcaagcagtctgcctgccttggcatcccaaagtgttgggattacaggcatgagccatcgcacctggtcccattgtttccataatgtgccaaaattgtgtactactctaaaagcatatctgctatctttttaaatatttactgacgtgtccttaactatatgacaagcttgggtgggagcaaaaagctctgccagctgagcggacttaaattgaggaagagttcccttctctattaactcattttgggcagtaacaacataccctgcctgatattttccttctgagactttggcataggacccacgaacaaaaagtatcaactcaggattatccaatggagcatctcataaatcaacacaaggggctactagtttggatactacacctacacaattgtgatctttaccacagtcagtcagaggtaatggagtagcagggttaagtaggttttagatggagtagcattttagatggaggtcagaaggaggcaggagaaaatttcataagatcataagatgttagttttcttgctgaaaaatgctgagcttggttggaatttaatagactttccacagcatgtggaatttgcaaattaagttcattccctaaaaccagctcagatgaaacttgtagc

SEQ ID NO: 89875 - DNA, 230 bp, Homo sapiens
tattacattattccatctttttctgctgtgtattgtaagaactttggtttttaaggatttgccctctgctgcaaatatatagcttatcaaagaaggggagaaataatgttttggagtttaattgtaaatgctaatttctgtgaggagtcctttaggaggtttcactaaagttactaaaaccatgctgtcatgatattttgtagttataatgatcatgagcaataaacagt

SEQ ID NO: 89876 - DNA, 835 bp, Homo sapiens
ccagaaactagctgagcatctcacgcattccagacaggaaaacaatgtatgaacaatgggagaatttcaacaaagagacagaaaatgctaaaaagtaccaaacagaaatcatggagctgaagaatatgataactgcactgaaaaagtcactagatgaggggaacagtagactggatcaagcagaaaaaaggatcagtgaactcaaagaaaggtcattggaaattaatcataggagcaaacggaaaaaaagaaaaagagtaaagaaagtagaagggacttatgggacaccatcaatcagaccaatagatgcattaagggagtcccagaaagataagggaaagaatcattatattcaaagaaataacggttgaaaactcctcagatctgtggaagaaaatggacacccagattcaagaagcccaaaagatcccaaataagatgaactcaaagacatttacagcaagggacattaaaatcaagttgtcaaagacaaagaattagaaagcagcagggaaaagtgacttgtcacatttaaaagaatctccataagaaataagctaatttttcagaaatcttgcaaaccagagggaatgggatgacatactcaaagtgctgacatttttaaaactaccaagcaagaatactgtgcctgggaaagaactgtctttcagaaatgaagatgagcgacatactttccagacaaacaaaagctgacactgttcttcactatgaacttgccttgtaagaaataatgaagggagttatttcactggaaatgaaaggacaataaacagcaacatgatagcataagaaaacataaaactctttttattta

SEQ ID NO: 89877 - DNA, 444 bp, Homo sapiens
ttttctcctgatgatggactcagcattactattgcacaggcgaaaacaaagacagaatctaagcaacttccacctatcacacattaggccactgaactgagtatttcccattcctgactcaaagttaaccttttcaaaaattatgatatggtttatatttagaaactaatttaagatgaatccaatgttactttccttttatatcaagtaaaataatgaatttcaaagccacatacacacacatatgtgtgtctgtgtattttggcgtttctaaaaatgacattgacttaactagatcattgatataattaaatccgatatttccttgatgaccatgagaatcatcaaagaaaaataataaagtaccactaatctcaaaaattaatatagtaaaaagagtaaacagaataaatgaagaattaggacacccaggtaatagcacca

SEQ ID NO: 89878 - DNA, 240 bp, Homo sapiens
tccagcaaacattcagtaagcattcaatgaagtgctgggtattctgtgtggtacttcggtttcagagttgaagagacagtgcctttccttaaggaattcccagtctagtgggacaacagacaaggagatagatactatctgtctgtctattatttatgtgataaatgctgggctagatatattttcagagtgctgtagggccacagagaagggatgacgaatattatcttggggggagtc

SEQ ID NO: 89879 - DNA, 414 bp, Homo sapiens
gccctgtgctgctgggtttctggttgaggcaagggtgtgtcttgtggttcagtgatgtgtcacctctgtacctctcatcttcgggctccatctcaatactgagcaagatatagagtgtagacacatggaagacaatgagaaaattttctacagccctagacattcgacagctctctccctctctctctctctgtttcttgctccctgtctgtatctctctctctttctctctttgtctttatcgctctacctctgtctgtcctctgtctatattgctctatctctgtcttccctctctctgtctcttgctctgtctctatctttctgtctctcaccaggacctgtgctactggtcagtgtgccctgttttgccatggggacagacccaagggacctcctctgcatggttcttgc

SEQ ID NO: 89880 - DNA, 437 bp, Homo sapiens
tcgctgtcacatggtgctcttcccatgtgtccgtcttcacactgccatctcctgatacggacaccagtcataatgggcccaccctcctccaagatgacctcaccttgactgatcacatctgcaatgaccccagttccaaataagatcacattctgaggtaaaggtggttaggacttcaacgtatcctttttgcgggggacacgattcaacccctaacagtaacctatctttttttttaagagatggggtgttcttgaagtcctgggctcaagcaatcctcccttcttggtctcccaaagtgctgggattacaggcctgagctaccacacccagcctattgttgcctgttttaatgcagctgaggaaactgagtctcagaagggttatgctttgccccagagcacacagctaggaagggacagtctgagatttgaacc

SEQ ID NO: 89881 - DNA, 182 bp, Homo sapiens
tggatgctgtcagttcttcctcctcctgccatagcagaggagtgtgagtccccgccccactgatgttcacgcgacttactgtggcatggagcgggcctgaatcccagccctctgcctgaagcaaagcctcccagctgagcccagcctagtcagccgaaccctagccaagctgcagacgagag

SEQ ID NO: 89882 - DNA, 410 bp, Homo sapiens
gcttcaacctcctgggctcaagcgatcctctcacctcagcctcccaagtagatggaactacaggcacatgccactaacttttttcttattttttgtagaggcagggtcttaccatgtagcccaagctagtcttcctaatttctaaccagccaagctatgctcagtatgttcctttaaggaagtgatctgaagtttaagtaagttaagtttttcttgaaaacccatggaaattgggcactgtggctcacgcctgtaatctcagcactctgggaggcagaggcaggcgaatcacaaggtcaagagatcaagaccatcctagccaagatggtgaaatcccatctctactaaaaatacaaaactagctgggcatggtggcccacacttgtagtcccagctactcgggaggctga

SEQ ID NO: 89883 - DNA, 642 bp, Homo sapiens
gaagtcccacaattcccatgtgtcatgggaggaacctggtgggaggtgattaaattatggggcagatctttcccacgctgttttcctgatagtgaattaatcttatgagatctgatggttttaaacaagggagtttctctacacaagctctctctttgcctgctgccatccatgtaagagtgacttgctcctgcttgccttccaccgtgattgtgaggcttccccagccacatggaactgttaaatccattaaacctctttcttttgtaaattgcccactcttggatatgtgtttatcagtagcgtgaaaatggactaatacgtacacctacctaaatggaaaacgacaccaatgtcgaattttacctattctttgaaaaaaaaattttttcctttcagccatcaaacattttaaagtatttaaggggagaagagtttattatatttacccaggtatttatcatttcttttgatttctcttcatttttgaagtcccacctttccctctggtagtttctcttatgcctggagaacttcctttaacatttcttttagagcacgtctgctggctacagattttagtttagtttagttttcctgcatctgagaatgtctttatgaccttaattcctaaaagatatt

SEQ ID NO: 89884 - DNA, 211 bp, Homo sapiens
atcttgtgttttcattttcatttgttttgagaaatttctattttttaaaagaattttgttatttacccactgatcattcaggagcaatgtatttaatttcggtgtatttgtacagtttcttaagtgctcttcttactgatttctagtgttgtttcattgtggtcagaaaagacacttgatattaatttgactttttaaaatttgttgagat

SEQ ID NO: 89885 - DNA, 584 bp, Homo sapiens
gggccttggaggttcctacttattttaatcagttccatagcctgaccctggtccagtgagcatcagatttggagactgtgccatttatgaaacaggcaggtattggagagactccaaaaagcttgtctcatgtgtgcttccctgcaaaaacagccagttccagctagaaactttatcttcatgaaaggaaacctctaggcagagagaagttctatttgtttttacaactgtccccagttgtatttgaagatggcaaaatgttgggcttaaggcctgccctgggttcatggagctagctttcttaatgcctcaatcatacttttaatcagaaaaaatttagagcattaatcttcagtgcttgttcttgccatttccagccactcgacactttttcataaacaaagtgacagtttgattgaatgtggtttttaattaagctgccttcacttggaacaactttctgggggcatatgtaaggagcagaacttagaagcacaagctgagactgacttcgcaatagcttcatctccaggcagagtttgagaacaaaggaaaccaggcaagtggaattaaccaggcacctt

SEQ ID NO: 89886 - DNA, 386 bp, Homo sapiens
tatctagcaggatctcatccccggttctgggtacctggaaaagcatgggtaaagtctctctggctggagggtggcgagtcaggagaaggaagcagcacacgatgaggctaatgggacaggaggggccagactgtgcaagggataggaggcatgttggggattctgggctttatattgagccgctgctatttccagcagggagggctgtgatcaggtttgggttgtgtggagaatagcggaggaatacacagaggggaggcccagtttttcctgtgggagccttggaaggtgagaaaagagtggctggtcatttccaactctaagccctggtgttcctttcatactaccccaggagtgttcttttcttatcctttcttttccctccc

SEQ ID NO: 89887 - DNA, 381 bp, Homo sapiens
gctgatgccttcaccttggacttcccagcctccagaactgtgaggaatgaattcctattgtttacaagcctcccactttatggtatttggttatagcaacccaagcagacaaagacagccagagaactaaggacacttacatctggacatattgagtctgggctaaagatgggaagtcaggaatcaggtcagtctgacactgcccataggcctaatagtgatgtactcagaggttggaactaagccctcaaaggaaatgagtctgtcttgtttaagttagacaagtctgtcttgttcagtagtttatattccctactacaatgaagttagtatgcagtatagctaattctacttgagatatgtatgtcggtgtgagtaaat

SEQ ID NO: 89888 - DNA, 711 bp, Homo sapiens
atttactatcagaataattggtaattattctgtcactctaaaactcagtaattcctaaggatattgtgaaataccttgtgtagctagataagttactaaaatattataatcctatcagaagctgaatggggtgttattttctaaaagccatctatagaacacaagtaagaattcagtaacttctgaaagatcaaaaagctgctttattttagttctcaagtttggtataatgaaatatattaggaattcaattccagaatatttatggcaccacacataagacagaaatgacaaaaagacactgtagaaaaactggagcatctctccaaaaataccaaatttggggaggtaaatgattacaggattgataatgtccagaattcactgtagaggatgataaaagactgaatcaattttaattgtaatgtgtaaaaatgttaaactggcggggtgtggtggctcacgcctgtaatcccagcactttggaagcctgaggtgggcagattacttgaggtcaggagttcgagaccagctcatcggcgttcccgaagaagtcatccgcccgtccctcatctgcgtctggaaggaatcatcgcccgttcctcatctgcgtccggaaggaatcatccgcccgtccctcatctgcgtcccgaagaagtcatccgcccgtcctcatctgcgtccgaagaagtcatccgccgtcctcatctc

SEQ ID NO: 89889 - DNA, 275 bp, Homo sapiens
  misc_feature (1)..(1): n is a, c, g, or t
  misc_feature (120)..(121): n is a, c, g, or t
  misc_feature (124)..(125): n is a, c, g, or t
  misc_feature (129)..(129): n is a, c, g, or t
nggcaactcagattgcactgaatagcagagtatttagaaatgaagggagctgggtcctcaggatgtgtagcagcatacattgtggaaaggtgaaaaggttacatgtaaaaacaataaccnnaanncaanccttcccatagcttcagcaggctccaggtgccgcagccctgactcctcagggcccacccctgctgtgtccacacaaatgcccccaggaagctgacacttccccgcagcctgttcctgcagtccctgccttggttcttagctggctt

SEQ ID NO: 89890 - DNA, 435 bp, Homo sapiens
tgggagcatgtgggctgcagcctcaacaaagatcttctggtgttttctctcccttgctcgcaccccaagtatttttatgctgttgacatcagttaaaagtaagcaccgacggccgcctcactgtgagtcatggagaagcagcacagagcaggtcttggtggatgccggtgactggagagagtgtagagggtgaagggaagatggcgctaccattgcctgtgctgaggggaggcctgaggtctttatgcatttgtgtgtttactctcttgtggctttcttgtgagctccagggaaatcatgctggcttggtatccctcagcaactcagagctgaggtgtgttcagccacatcttccttccaagcatgttcctcccaggacttggttttgaattcatgtttcacgagctttgtgactgtaacttatagaactttcat

SEQ ID NO: 89891 - DNA, 465 bp, Homo sapiens
ctgagaacagtgcctggcacataataagtgctaggtaaatatgagctattattgccattattacttaactgaccttgtacagagcccagaagagcacttggtgattgtgctcaactaatcaattataacattgcccacttctggagaggaggagatcttgtactctctcccacccttgcctgattccagcccctcagatcaaacgtatccttcttactccttgtctagtgccatcttctcgagtcttttttctttttcttgtttccttcctttctccctcccttcacaacttttgtgaaagcatttcattccctcctttcctcattcttaaaaatcaatcttggctcaactgcagtgttctctccatggaaatcaggtcccaggaaggaattgtctccaaaagggtgtcccttgagcgtcctcagcctgggctgctggatcaggattggatgtgcatttgtgtct

SEQ ID NO: 89892 - DNA, 182 bp, Homo sapiens
acacaatgtatgattccataactataaagttcaaaaacaggcaaaactaatcgatggtgttagaagttaggttagagatgacctttggaagggatggtgagcaaaaggggttaatgttctgttcctcattcctctgataattatatgggtatgtttactttataaaaaattcaccaaaaaat

SEQ ID NO: 89893 - DNA, 584 bp, Homo sapiens
cgaacaaacaaaaaaaacaaaagtgagccaaccctggggaggagtctacgttcagctgcagggagccagggaattggggccgaggtgtctggcacagaaaagctttgggcctgtctcaggtaaatgaagttttgatatagattcaactcccctgccccccacaattgaactgtttttgggggccagcaattaggggctaatttgtgacagtgactttattttcttcctactaaagtactggtttattcggtggccttggtgattagatttaggcataatagttaaatgtaatagaagtttatgtaacaaacagtgattaataatgttgctgtccagattcccgttatagcgctaacctgatgttatgaactgagattaaatttgaatttgagtgcttacattattttgtaaaggtggttgtatattcacatatccacagtttttttctataaataacgtgaaaccgtgcttggtttctcttttccaaagtttgccttttccattacatgggcaagtcctgaacctaagccgagacactagtccatcatctccagcaatgaatgtcatccaccccagacttcagc

SEQ ID NO: 89894 - DNA, 274 bp, Homo sapiens
ctcgcatggctgcgacaaataactagaaacttggtggctttaaacgacacaacttattctgtacagttctataggttagatgtctggcacaggtctcactgggctaacatcaaggtgtcagcagggctgtattccttcctggaggctccaggggagaatccatttccttgccttttccagcttctagaggaagtcacattcccaggctcttggaccccctctccatcttcaaagccatcaccagtctgtctgcccaccctgacagataagctcc

SEQ ID NO: 89895 - DNA, 779 bp, Homo sapiens
  misc_feature (733)..(733): n is a, c, g, or t
gctaatttttgtgtttttagtagagatggggtttcaccatgttggccaggctggtctcgaattcctgacctcaggctatccgcccacctcggcctcccaaagtactgggattacaggtgtgagccacctccccgggcctagagaatgttaattgtcccactttcctatttgggtggagcatcaggccgtccatggaggagaatggtaggaaataagactgagagggtggggcctccaatatcaggccaagtatttggaatggggtcggaacatcagctctgactattgagatgagaagcaggaagaccccagaggacctcctcagattcagccaggcctgaggcagtggggcctgaggcagggtagagcagtaggaatggaaggaagagatgcataggacagggaagaatttggcagctttgtagtaactgtccctatttataaaataaaaatttttaaaaaggaaaaaaaaataagatgccagaagcatttatgagtctaaagcagaagaacttctagtgacctcagtgagaatgaccaactgttttaagtattcagggtttgcaagctattctctgctactagaggccatgtttcacagaacccagcagtggaaactgttgcatgtgaaaagcgaaggagtacgaggcatgggtgttgcatgtggaaaacaaaggaggatgaggcaaggatgacaggtttcaagcctgggatgacaaggagcatagggatnccagttcagggagctcacaggtctggtagttgttggttgtagggag

SEQ ID NO: 89896 - DNA, 890 bp, Homo sapiens
  misc_feature (113)..(113): n is a, c, g, or t
  misc_feature (844)..(844): n is a, c, g, or t
gtgaggggattttgttttttctttctgtgaggccagtgttgttttatgcccccatttgggtggctaatttcaaaaaaacttttttttttaccccttgggttttttttagtcantaaatgatcattatgctttttgtgcaaccaccaagtctaggatcatctactgagtctgtgaattgtagaatagagagaggtggttctcggcctcccaaagtactgggattacaggtgtgagccacctccccgggcctagagaatgttaattgtcccactttcctatttgggtggagcatcaggccgtccatggaggagaatggtaggaaataagactgagagggtggggcctccaatatcaggccaagtatttggaatggggtcggaacatcagctctgactattgagatgagaagcaggaagaccccagaggacctcctcagattcagccaggcctgaggcagtggggcctgaggcagggtagagcagtaggaatggaaggaagagatgcataggacagggaagaatttggcagctttgtagtaactgtccctatttataaaataaaaatttttaaaaaggaaaaaaaaataagatgccagaagcatttatgagtctaaagcagaagaacttctagtgacctcagtgagaatgaccaactgttttaagtattcagggtttgcaagctattctctgctactagaggccatgtttcacagaacccagcagtggaaactgttgcatgtgaaaagcgaaggagtacgaggcatgggtgttgcatgtggaaaacaaaggaggatgaggcaaggatgacaggtttcaagcctgggatgacaaggagcatagggatnccagttcagggagctcacaggtctggtagttgttggttgtagggag

SEQ ID NO: 89897 - DNA, 796 bp, Homo sapiens
tttatgttttgaaaaaagaagatgaagaagaagaaaaaaaaaagaacaaggaaagattaaacgttagcttgtaaagtttaaaggacctttccttttcctttacggatttgatcagtatgaagtcataaatcaaagaaaacagaattggatttgcattcccaggcgggatggatgctgccaggagatcacattgcaaatagtgaaaacagaggcattcggtctatgcctgagtcctgtgtataggatcaatcttcctttaattccgcagtctcctcaggcaatgtgacacgggatgcagtttgcagctttagtgcctttcttcgccttttaaattgccacgaatcacagatggctatttagtggccctacaatgctgcaacacatcagcttgcattttagtcttaattatttgtttcttggataatgggcagagttttctgtatttgtatcagctgttagtggtgaaatagggctctagttaaccttttatttatgaagtctaatttagtgttcccgtggctagttgcaagcattttacagtgatcacccagtttaatcttttgtatactttttagaaatgccaagagccttactaaactgaagcagatttatgatatagtgataatttaggtagatgttagtcttgaagctcttattttgtgtgcaactgattataaaaacaccttaaccaagtattattacacacatgatatctataactaggactttgataactgttatataaagtgtgtaaaatttgtatgaataaatttttgtaaacaatgcaaaaaaaaaa

SEQ ID NO: 89898 - DNA, 491 bp, Homo sapiens
tggtgttgtgtctaagaactcttcacctagcccaaagattttctcatatgttattttctaaaggttttatagttttatgctttatatttaaatctatgatccattttccacttaagagttcatttttgtacaaagtgtaaggtttagatcaagatttttttttttttttggtccgacttctggacgaggcggcggggtcggcggctatgctcggagcttcggaaggccggcctagggacgacaagaagaagaaggacgcgggaaattcggccaggaaagacaaagacccagtgaacaattcggggggcagggccaaaaagaagagggggtccacgggcaaggtccgggacaagctcaataactaagtctggtgggacaaggctacctatgataaattctgtagggaagtccccaattataaatttataacccaagttgtggtctcggagagacagggtagagccgagagacagggtagagccgagggggat

SEQ ID NO: 89899 - DNA, 419 bp, Homo sapiens
ccgggttcataccattctcctgcctcagcctcccgagtagctgggactacaggcgcccactaccacgcccggctaattttttgtatttttagtagagacggggtttcactgttttagccaggatggtctcgatctcctgacctcgtgatccgcccacctcggcctcccaaagtgctgggattacaggggtgagccaccgcgcccggcagattctgtgtttctatacagagctgatgattgcgcatgtacttaaaatgtgttcatagttcaagagttagaattagaatagagatactcactaatagagttgtgtttacctcttccatagatattaatacttgacatttgtgtgaaatatgaaatttgaacacctttctgccttaactatgaattgacatttttttgagtttccagttgtg

SEQ ID NO: 89900 - DNA, 337 bp, Homo sapiens
gttttttgtgtgtgaggagaatgtttttctagggattacaatatgatatttggcctcttacaacctacttcaagttaatgttgctttttttttcttggaaaaaatatagaaattttgcactagcatagctccattccctacccctctcgaccctcctgtactcctttgtcctttgtggtcacatatatttgtcataaattcaacaatacagtgttatatttgcttttgaaagtcttttaacaaaattagaagaaaagagaaaaaagtgtttacattcaatttacctactgtgttagtccattttctgctgttataacagactgggaaatttacaatg

SEQ ID NO: 89901 - DNA, 331 bp, Homo sapiens
aacacacactagggcctgtgcgggggtgggaagagcatcaggataaacagctaatgtatgcagggcttaatacctaggtgatgagttaataggtacagcaaaccaccatggcacacatttatgtaacacgcctgcacatcctgcatgtgtatccaggaacttaaaattaaattaaattctaaaaaaaatacaaaaattatctgggcgtggtggcaggtgcctgtaatcttgcctcctcaggaggctgaggcacaagaaccatttaaacctgggaggtggagactacagtgagctgagctcacaccactgcacttcaaccttaacaacagag

SEQ ID NO: 89902 - DNA, 297 bp, Homo sapiens
tgctgggattacaggtgtgagccactgcgcctggtctttttctagttctttatgtcaaattactgtgtcccttgaaataattccactctgtagttaagccactaactggatacttgatacacaggttctttttttttccattttgctttcaaattttacagattttttaaaatttaaattttgttttatactttaaaaaaatatttactaggttccaaaatcaagtctacaaaataaaggtatattcagggaggtctagctttcacctctgacccctctacctgcacgccacacatg

SEQ ID NO: 89903 - DNA, 432 bp, Homo sapiens
ccttggggccttcggttttaggcgggaaaggtcactggtaaggcagccccttgtttatggagcccggataccaatgacgtggtcacctccgagaagcacaattacccaacaggggcacgcccaaactcttttattggttacctcttaaacactccagaaatctgtccaagtccttgcagaatagcagaaaacaaaagtgctctcagcaggagggggaagccaggactcgatgatgagcaattagtgaatcaatgactctcagagacactgatttagaccagcagttcttattagcgaccgtcgaggaaaatgcagggacacacaaagcttccaggagagactaaagctttaaaaacatttttttaaaaatcaccacaaactgccttcagagcttccccctaaaacacttaaaatgtgtgctcagtctgagga

SEQ ID NO: 89904 - DNA, 423 bp, Homo sapiens
ttggaggtgctggaaccttttggagaagacctcggggatgtggtctctacttcatatatctgtcacagtgcaaagggcatagacagggtctatgtggccacaaggcatagagctggacccatggatggatattttaaaaaggcagattttcattcaatagaaggaagacattttctaacaattagaactatccaaagtggaacagactgcctagaaaggcatgaggtctctgtcactggagatatacaaatagaagctagacaatccctaggctgtcatattgtagaagggccccttccttgggggagggtgattggactaaattgctgttaaggctccttccaaccctaagattctaggatgctgtatattacaatgagaaaatagaaaaagaaagaatatggtgagagtgcaggggttggc

SEQ ID NO: 89905 - DNA, 452 bp, Homo sapiens
tatgattcccttgtgtttactagtaatatttagtataaaagtccatcctagggagggcctgccataccagagatgtattaatgaatccatcttacggaggacaaaactaaggctgagtggttcgtaatactgggatttgactcaaccttgtcacaacaccaaagccagtgctcttccctccaccatgctgcctcaggttacaagacacactaacaccatcgtgtagggagagatgagcttccagggctctgacatatattagacactgatgaagagattccaaagtgagctgaaactaaagatgacagcgttagggtttctagaactctcttcccacttctcaagctcgcccttaactgtatatcccatgatgttgtatttttactttaaaagaggcaattcaggccaggcacggtggctcatgcttgtaatcccagcactttgggaggccg

SEQ ID NO: 89906 - DNA, 273 bp, Homo sapiens
gcaagtttaatctgataatttatttgtggggaaaaagctagttttgatgagataaacttcagtcctttccttgtaaatacaaagaaactcaacaggaattttaaaggtagtaggccagaaaatgcaacagtaactcttataatccttttcaattaaacagacaaatcaagttgtagacaactgttaaaatattattcagccttaatatttatcagtctatatatcctgttgttcaattggcttttgattaaaaaaaacccaacacagtttata

SEQ ID NO: 89907 - DNA, 864 bp, Homo sapiens
ccctgcacaggcttcctccctcttcagctcagcttcattgctgcctctgcatccaccaggctggagtgcagtggtgtgacctcagctcactgcaacctccacctcctgggttcaagcgattctcctgcctcagcatcctgagtacaggcactacaggcacgtgagcaagagaagctgacagattcaaatgttcacaaacatttatgttctattttgatagatacataaactatgtttctcattcttatatactttatattagggcatgggattaaagtcaaaatagtggaaaattagtagaaataacatattttatatccaattaagtctccaaaatcccaacatgcactcttctgtatacgtttttcagtatgcttgactggaacggccaattctaagtagtcttggaagcaacatactgcagattaaataccttagtagcctatgttcttgaatgcggacataaaggagcaatgcttttcctatcttaaaaacagtttatatgaatgaaacttctgttctgtttaagatattatatgttgttgagtgtagttgtcaaagcaactagcacgattccaagtaatatagaaatcaccagcttgagttgggtctgccataacagcacctaaaacgtatccactaaattagtattaaatggacaagtaaaccaaactcagagggttgaaatgaagacttgtaatacccagtgaaaaaaaattattgaaactaccatctaaaattaattggaagcttaatattacctctaggaaagagtgtgggaaatgaggaaaggcaaaaggtaatgtgttcatgtttgttctgttccataatccaagaaatagataaacacaggcaaaaaaaaaa

SEQ ID NO: 89908 - DNA, 548 bp, Homo sapiens
ggaggaatgggctgagtgtcagagctggtttggtaggtaagggaggttggggaacatcgtgagcaaaggcaatgcctaagaagattatgtgtaaggggaagaatttcaatacttctagtgcatatagtttaggccagagaacaaaaagaaacagggccagaggtgtgcaaagccagatctaggtcacagccagccaagaatgccattctcagaaatgtggactctttcctaaatgttgtaagccaggaaacaatattagtgtcttcaaagtgctcttctaggggtagctgtgtaatggactagaggaagatataatagtagccccaaaaaaaaccaggtagtaggctaatactttaatccagaagatttgggaacacaaattagggccatgatggtagaaatggagagcaggtagatttgggtaggatcagtatgtcctggaatttgactgaatgtgggtgtgagaaagggctagcagcttcacatgactctcaggcttctgtgtgactaaatggagaacaatatcagaagggttacgtactagagaa

SEQ ID NO: 89909 - DNA, 921 bp, Homo sapiens
gggagactgtctctcccaaaaaattagctagatgtggtgacatgctcccagctactcaagaggcggaggtgggaaggatggcttgagcccaggatgtggaagttacggtgagctgcgactgcaccactatactccagcctggacaacagagccagaccctgtcttaaaaaaaagaaagaaagaaaaagacattattggggatccataggtttgaattagccaggcagatactagatacctgagaccatcaggagaatcacttctgattaggcagaataagaacgggcactggaattgccactccataggaataaattgtctaggaaatgaaccaaattgtgtgcttaatatcagtctactcctttgttagcttatttcataagctattagcataaatgtaggtcgttggcttttttttttctcaattcaactcaaaaattttgagatcattgtgagaaatatacacttgtaagaaataatacagagattccacccggttttcccaatgataacatcttgcaaaacaagggcaatatcacaaccaagccaagataggatagaaatgatataatcaagatacagaacatttctatcacaatgatcccatctgttgtcataagccatattcagtttcctcttgtgctcgtatagctatgcccaccttcataacctctggcaccagcggtctgttctccatctctaattttgccaaaattgattggattatactttcttttgggattggcttttcactcagcataatctctgggcattgatccagcttgttgcatcaatagttctgtttttagtactgagtgggatgtcagtatagatgtaccatagtaaacacctgtggaaggacgtcaggaatgtttcctgttattaggtatctaaataaagttgctgtaaacatttgtgtac

SEQ ID NO: 89910 - DNA, 515 bp, Homo sapiens
cttgtaccaattgaatggcagaactactatagtcaaaaataaattcctatcctatttttaattgatgggatataggcagcacaatttcccttcattgttgaagccaacaagttccgtaacagaactccagaggtaaatagctgggaaaactgttagttttaaggtcccactgttgctctgtgaatgactaatcagaggaagcccaaaaatcagccaactaatttcagtttatgtctttaattgtgatgtaagtgtgaagtttctacatatgggtaatccagggttgagttaggtagtttgcaaacatgacttttgctggaggaacttttaatcatgtcttattaatttctggtcccaataattaattttcttacagtcaaacccaatgcacttgaaaaataatataattaatactgtgtgaagaattttttgcatgttaaaaaaagcaaaccactagtttgcttagttctggcattcataaactactgtaccttctgttctattgacatgtttgg

SEQ ID NO: 89911 - DNA, 196 bp, Homo sapiens
gcactggtctcaaactcctgacctcaagtgatccacctgcctcggcttcccaaagtgctgggattacaggtgtgagccactgtgcccagcctgtatcaaaaaatttttaaacaaaactgcaaaaattattgtagccaacccagaaaaaaactctcctcaatattatctgttattatgtctaataaagaatattcac

SEQ ID NO: 89912 - DNA, 756 bp, Homo sapiens
tgtaaaatagaaaaaggaccttctgctgctcctcaggatggcgggacttaggggccatgtacatgacgatggcgctgccaaagaagagtcccactacgcagaggtgggaggagcaggtggagaaggcctttctgcggccctccccagactggatcctcaggatggccgccaggatgtgtgagtaggagaccagcaccaggcagagtggtcccaccaggatgaacatgcaggctgcaaagatgaccacctggttgagccaggtatcagcacaggccagcctgaggacagacaggatttcacagaagaagtggttgatttcacgaggcccacaaaagggcagtcttaggatgaggctcacatggaccatagccaggagggagccacatgtccaggaagtgatggccagagtgatgcagactttccaggtcatgatgatgaaatatcggagagggtggcagatggccacgtaccgatcgtaggacatcagcaccaacaggaggcattcagtatgtgcaaaactcaaaaagagaaaggtctatgtcatgcagccagcaaaggagatgggcttggctggatgcaggaggttcaccagcatctggggcactgtgttgcaggcataggcgatgttgacgacggccaggtgtgagaggaagaagtacatgggggtgtggagtctggagtccagtgagatgagccccaggatggtcccattccccagcagggtgaagacatagaacagggagaagagcccaaaga

SEQ ID NO: 89913 - DNA, 187 bp, Homo sapiens
gcaagtgatagggcatagaggatggaaattaaggacaagaagcccagtggtgtagcaccaatctatccaagtccagagatgaaacttgagggcagagacagaaatttaattgttagaaaagtatacaggttagtggttagaattaagctctggactcaaattgcctagtttcaaatcccaaatcctt

SEQ ID NO: 89914 - DNA, 652 bp, Homo sapiens
cacagatgctaggtggcaaagccagtcttatgactccaaaaccaggcatctgtctcaccattctaaccctgctacgtcacacaaatccaggagagagaatttacataaagcactgcatgcgctttggaagaaatgctgtacttaattaagtgaaggtaacctcccagagttagccagcctttcagagttgaagtcacagcttagggattcaaaatgagctactaaaaacactaatttagttattagagaactccgggttccactttcaggatccaccttggttggccagtggaaaaacacaagtattcttcattcaacaagtactgaaggacctattattggcaatgaacgtaacatgtgttctttccttggggactgcaggtgggcagaaggacctgttcagttttactttcaaagaaaagatccacatttgaggtttctttaagtgtaccatattttaagaaagaaaatgtactattttctccagagtgaggggctaaggtgtgaagaacagatataaaatattaaaatgtattcagatgcccttcacacagcaaggcttgtgatgccttcatggaagtgatcaaccctatcataaacattgttagatgtggtattaaagtataaactgatgacagtactattctccaca

SEQ ID NO: 89915 - DNA, 428 bp, Homo sapiens
tttttttggagggatggggtctcattctgtcacccaggctggactgtagtagtgcagtcatggatcactacagcctcatcctctggggcttaagtggtcttcctgcctcagccttccacatagttgggactacaggctcacaccaccatgcctagctaatttttttgtttttttaattttttgtggagacagggtctcactgtgttgttcaggctggtcgtgaacttctggcctcaagtgatcctcccacctttgcctgtccttttaatagctactggggcttgtacttttatttgtttgactgtttgaaagctgatgtgagaggttttgtgacttgggaatatcgaactttgctgtcttagaggatattgatgccatctgtcttcaggtaggataatgggtgtgttttagaagtgggtggttataaa

SEQ ID NO: 89916 - DNA, 415 bp, Homo sapiens
attaataaaccagtctggagcccaaaccttaccaggctgtcaaactgctggcagaaagctaaatgtaaggccaggttgaagaaggcagtcagattgcagggagttgagcaggtcattcgaccctcactattattgctccaagttgaacatactgacccttttgaaatgggcaaagtgggactttaagaatctagtgattgaaaagtcaaaggaaatctgataccatcttcttttgatattgcagcatttcctgtcacaactcctgatttagttttgtaatgctagaactattcctatttccttcttggaaaattccctccacgtcctagagtacttcctcaggtctaaatagctaatgtttacaaaggaaggattaagtaagacgaagatgacacagcagagttttccattaaga

SEQ ID NO: 89917 - DNA, 741 bp, Homo sapiens
tgttacttcctgaaatctataaaccaaaacttaaaagcacaatcaacaaatctagaaacgctaggaatttcctcacgttaaaaaaataaaagatccaagaagctcaaaaaataacaactttctgcactgccttcttttaaagacacgttgatctcaggacagaaaagccaaactcttccaatgacaattacaattgcaaaccaaaatacagagcatatattgctgtctaaaagtgagtagatcttggccaggcgcagtggctcttccctgtaatcccagcaagaggccaaggcgggtggatcacttcaggccaggagttcgagaccagactgaccaacacagcgaaactgcatctctattaaaaatacaaaaaattagctgagtgtggtggcaggcgcctgtaatcccaaagtgatggaattacaggcccgagccactgcgcccggccacaactattttaatagtgttgttttggtgttggttgattaaaggaatgggaacgaatgacttgaagccctctctgtttcactctttatacaaagtggagtccagattgggctagtggcctgtctagccaaatgtctgacttggacatacattactgtccaggagtttcttagctgaatgtgataaatgccttccgtgacatcatccttacaggaacctttttacatttattctttacttctgttgatgggttgacgtcgggggacctctagagtcactgcaggctgcaactgg

SEQ ID NO: 89918 - DNA, 3258 bp, Homo sapiens
  misc_feature (1110)..(1110): n is a, c, g, or t
  misc_feature (1112)..(1112): n is a, c, g, or t
gtgcagaacctttgcctcctggccagagggacccttctgcaggctgattccagcagtgcccgatggtgggacccacaccagaccaagccttcgcctcccagaggcctcctggccctcctgtcatggcctgtgagagccacacccctaggccccgtctcctagtctgcaggccgcaggaccagctgcccacggccccagggggcaagggctgtagatgagggtctcagaggtggtgggagcaccccccccacccacagttcctgggcatttctttagagctttaaaatggcacctggagaccaccaggcgcggcgatcagatcgggtggtgtggtgcctcctgggactgaccacttcttgctctccgaccaggcaggggcgagtggcctgggaggttcccggaccctcagggggcctgtgtctctgggcaccgcagctccgccccactccttcctccagaacattccccactcgggctagagaattgcgtctgctccaggaatgcatcctagcgtgtgtacgatcgcgcctgggtgtcctgttctcatgagcaagcggttttaaccagcagcataatttatactcatagacaggactgggggaagggctgttcctgaggctggggtgcagtgccttggaaagcacccctgaaacagtggaccttgtatttttagtgtcccctgcaaccatcctctgacttagagcaagaatttccgctgctgctacccccgagatgggcttcaccagatgttaataacgtgcttattttctctaagtgctattttggcaccagcgttagttgcaatttatattctgcagcatttgatgctgggaaaagaacccaccctaatggtccccaattggcagagctcggctgttaagcagcagaccatatgctgcctgctggaggagcgtggtcagcacttgtccccgtgcctgcgtgcgtgtgcctgcgtgcacgtgtgcctgcgggtacctgtgccctgtgtgtgcacatgtgcctgcatgcgtgtgcctgcgtgcacgtgtgcctgtgtgtacatgtgcctgcgtgtacctgtgccctgtgtgtgcacgtgtgccttcgtgtacctgtgccctgtgtgtgcangngtgtgtgagtcacgtcttccgtgtgtgtatgtgagggagagactgtggggttggagggagggaggaggggaaagggtatgtatccctttgttctttaaaagggagagccccaacctctctggctgccccctcctgcctgtgctcccagctcaccccacacctagctgctatttattctcctgacccccttcccggccctgcagccccgtgtcccgcagcctccgccccgcctcctgctccacgtcaccaggcaacactcggctccaccaggcttccgaaggtggcccagagcaggcacttgagcctgatgacccagagcaaagctgcctttctgggccttgagtactcctttctgctatggaaggcttttcttgttttcaacggcccgtccagcccaggggggctgggtgagggccgcttccttctgcagcagagggggcgggctctatccttgccatctgctgcccccagaggccctgccaggacatgggcctgagcggtttcttctccaagaggccctcctgggacctgtctgtgcacagggcgggaagacacttgctgcttcgacccaggacggcagccaggacgggctgagctcctcttgcgctgcaaacacacaagggttgcctgccagctcagcagcgccctccctcaaccacaccctgggtccggacccagagccacaggccgttggacccaggggaccggggctgggctcaggcgtgggcctggagggcttgtggaggggccagacctagagccgtagggctccaacagctgagggctgggcccctgccggccaatgaagctccagaccagtgctccggccttggcggtgccagcagtgctcctgcagggatggagggtgctggaggcctggatgcggggaccttgatcccccagcaggcagcgctgtggtcccagccactcaggaggctgaggcgggggaatggcatgaacctgggaggcggagcttgcagtgagctgagatcgcaccactgcattccagcctgggcgacagagtgagactccgtctcaaaaaaaaaaaaaacaaaagaagtttctagatctactgggcatgatgaacacaaaccccacagacactgaggaacccagtggtggcagtgactcgggctcctctgctctctaaagctcctttgagaaacatgggaggggccgggcgtggtggttcacgcctgtcatcccagcactttgggaggctggggcaggaggatcgcttgagcccaggagttcgagaccagcctgggcaacatagtgagactgtatcgctacataaaataaaaaaaaaagttagctgggcattgtacatgtgcctgtggtcccagctactcaggaggctgaggcaggaggattgcttgagcccaggagttggatgttgcagtgagccaagatcgcaccattgccctccactctgggccacggagcaataccctgtctcagaaaacaaacaacaaaaagcagaaacgctgaaggggtcggtttacgggaaaaccgcctgtcagaacacttggctactcctaccccagatcagtggacctgggaatgagggttggtcccgggaggcttttctccaagctgttgccaccagacccgccatgggaaccctggccacagaagcctcccggggagtgagccagagcctggaccgctgtgctgatgtgtctggggtggagggagggtggggagtgtgcaagggtgtgtgtgtgcccggggggtgttcatgggcaagcatgtgcgtgcctgtgtgtgtgcgtgcccctcccctgcagccgtcggtggtatctccctccagccccttcgccaccttctgagcattgtctgtccacgtgagactgcccagagacagcagagctccacgtggttttaaggggagacctttccctggacctgggggtctcgccgtatctcatgaccaggtgctaaatgacccgacatgcatcacctgcctttcgatgaccaacctccctgtccccgtcccgctgacctgcccccgtggcgtctcacggtgatgcctgctcctgacattggtgttcactgtagcaaactacattctggatgggaattttcatgtacatgtgtggcatgtggaaaatttcaaataaaatggacttgatttagaaagcca

SEQ ID NO: 89919 - DNA, 608 bp, Homo sapiens
gtgcagaacctttgcctcctggccagagggacccttctgcaggctgattccagcagtgcccgatggtgggacccacaccagaccaagccttcgcctcccagaggcctcctggccctcctgtcatggcctgtgagagccacacccctaggccccgtctcctagtctgcaggccgcaggaccagctgcccacggccccagggggcaagggctgtagatgagggtctcagaggtggtgggagcaccccccccacccacagttcctgggcatttctttagagctttaaaatggcacctggagaccaccaggcgcggcgatcagatcgggtggtgtggtgcctcctgggactgaccacttcttgctctccgaccaggcaggggcgagtggcctgggaggttcccggaccctcagggggcctgtgtctctgggcaccgcagctccgccccaactcaggggcgagctgcaactctcctcccgggaccctccgggttctctgtccgccaagaaggtccggactgaggagaagaaggcaccgcggagagtgaacggagaagggggcagcggcgggaacagcaggcagctgcagccgccggcagctcgcccctgagtt

SEQ ID NO: 89920 - DNA, 1518 bp, Homo sapiens
tggacgtgggcagagcgctgctgccagttcctggtagccttgaccacgacgctggggggtctttgtgatggtcatgggtctcatttgcacttgggggtgtgggattcaagttagaagtttctagatctggccgggcgcagtggctcacgcctgtaatcccagcactttgggaggctgaggcaggcggatcatgaggtcaggagatcgagaccgtcctggctaacacagtgaaaccccgtctctactaaaaatacaaaaaagtagtcgggtgtggtggcgggcgcctgtggtcccagccactcaggaggctgaggcgggggaatggcatgaacctgggaggcggagcttgcagtgagctgagatcgcaccactgcattccagcctgggcgacagagtgagactccgtctcaaaaaaaaaaaaaacaaaagaagtttctagatctactgggcatgatgaacacaaaccccacagacactgaggaacccagtggtggcagtgactcgggctcctctgctctctaaagctcctttgagaaacatgggaggggccgggcgtggtggttcacgcctgtcatcccagcactttgggaggctggggcaggaggatcgcttgagcccaggagttcgagaccagcctgggcaacatagtgagactgtatcgctacataaaataaaaaaaaaagttagctgggcattgtacatgtgcctgtggtcccagctactcaggaggctgaggcaggaggattgcttgagcccaggagttggatgttgcagtgagccaagatcgcaccattgccctccactctgggccacggagcaataccctgtctcagaaaacaaacaacaaaaagcagaaacgctgaaggggtcggtttacgggaaaaccgcctgtcagaacacttggctactcctaccccagatcagtggacctgggaatgagggttggtcccgggaggcttttctccaagctgttgccaccagacccgccatgggaaccctggccacagaagcctcccggggagtgagccagagcctggaccgctgtgctgatgtgtctggggtggagggagggtggggagtgtgcaagggtgtgtgtgtgcccggggggtgttcatgggcaagcatgtgcgtgcctgtgtgtgtgcgtgcccctcccctgcagccgtcggtggtatctccctccagccccttcgccaccttctgagcattgtctgtccacgtgagactgcccagagacagcagagctccacgtggttttaaggggagacctttccctggacctgggggtctcgccgtatctcatgaccaggtgctaaatgacccgacatgcatcacctgcctttcgatgaccaacctccctgtccccgtcccgctgacctgcccccgtggcgtctcacggtgatgcctgctcctgacattggtgttcactgtagcaaactacattctggatgggaattttcatgtacatgtgtggcatgtggaaaatttcaaataaaatggacttgatttagaaagcca

SEQ ID NO: 89921 - DNA, 1015 bp, Homo sapiens
gaaaggcgtccaggataagaagcgaaatttaatcttaagaattatctggccgggcgcagtggctcacgcctgtaatcccagcactttgggaggctgaggcaggcggatcatgaggtcaggagatcgagaccgtcctggctaacacagtgaaaccccgtctctactaaaaatacaaaaaagtagtcgggtgtggtggcgggcgcctgtggtcccagctactcaggaggctgaggcaggaggattgcttgagcccaggagttggatgttgcagtgagccaagatcgcaccattgccctccactctgggccacggagcaataccctgtctcagaaaacaaacaacaaaaagcagaaacgctgaaggggtcggtttacgggaaaaccgcctgtcagaacacttggctactcctaccccagatcagtggacctgggaatgagggttggtcccgggaggcttttctccaagctgttgccaccagacccgccatgggaaccctggccacagaagcctcccggggagtgagccagagcctggaccgctgtgctgatgtgtctggggtggagggagggtggggagtgtgcaagggtgtgtgtgtgcccggggggtgttcatgggcaagcatgtgcgtgcctgtgtgtgtgcgtgcccctcccctgcagccgtcggtggtatctccctccagccccttcgccaccttctgagcattgtctgtccacgtgagactgcccagagacagcagagctccacgtggttttaaggggagacctttccctggacctgggggtctcgccgtatctcatgaccaggtgctaaatgacccgacatgcatcacctgcctttcgatgaccaacctccctgtccccgtcccgctgacctgcccccgtggcgtctcacggtgatgcctgctcctgacattggtgttcactgtagcaaactacattctggatgggaattttcatgtacatgtgtggcatgtggaaaatttcaaataaaatggacttgatttagaaagcca

SEQ ID NO: 89922 - DNA, 3748 bp, Homo sapiens
  misc_feature (1110)..(1110): n is a, c, g, or t
  misc_feature (1112)..(1112): n is a, c, g, or t
gtgcagaacctttgcctcctggccagagggacccttctgcaggctgattccagcagtgcccgatggtgggacccacaccagaccaagccttcgcctcccagaggcctcctggccctcctgtcatggcctgtgagagccacacccctaggccccgtctcctagtctgcaggccgcaggaccagctgcccacggccccagggggcaagggctgtagatgagggtctcagaggtggtgggagcaccccccccacccacagttcctgggcatttctttagagctttaaaatggcacctggagaccaccaggcgcggcgatcagatcgggtggtgtggtgcctcctgggactgaccacttcttgctctccgaccaggcaggggcgagtggcctgggaggttcccggaccctcagggggcctgtgtctctgggcaccgcagctccgccccactccttcctccagaacattccccactcgggctagagaattgcgtctgctccaggaatgcatcctagcgtgtgtacgatcgcgcctgggtgtcctgttctcatgagcaagcggttttaaccagcagcataatttatactcatagacaggactgggggaagggctgttcctgaggctggggtgcagtgccttggaaagcacccctgaaacagtggaccttgtatttttagtgtcccctgcaaccatcctctgacttagagcaagaatttccgctgctgctacccccgagatgggcttcaccagatgttaataacgtgcttattttctctaagtgctattttggcaccagcgttagttgcaatttatattctgcagcatttgatgctgggaaaagaacccaccctaatggtccccaattggcagagctcggctgttaagcagcagaccatatgctgcctgctggaggagcgtggtcagcacttgtccccgtgcctgcgtgcgtgtgcctgcgtgcacgtgtgcctgcgggtacctgtgccctgtgtgtgcacatgtgcctgcatgcgtgtgcctgcgtgcacgtgtgcctgtgtgtacatgtgcctgcgtgtacctgtgccctgtgtgtgcacgtgtgccttcgtgtacctgtgccctgtgtgtgcangngtgtgtgagtcacgtcttccgtgtgtgtatgtgagggagagactgtggggttggagggagggaggaggggaaagggtatgtatccctttgttctttaaaagggagagccccaacctctctggctgccccctcctgcctgtgctcccagctcaccccacacctagctgctatttattctcctgacccccttcccggccctgcagccccgtgtcccgcagcctccgccccgcctcctgctccacgtcaccaggcaacactcggctccaccaggcttccgaaggtggcccagagcaggcacttgagcctgatgacccagagcaaagctgcctttctgggccttgagtactcctttctgctatggaaggcttttcttgttttcaacggcccgtccagcccaggggggctgggtgagggccgcttccttctgcagcagagggggcgggctctatccttgccatctgctgcccccagaggccctgccaggacatgggcctgagcggtttcttctccaagaggccctcctgggacctgtctgtgcacagggcgggaagacacttgctgcttcgacccaggacggcagccaggacgggctgagctcctcttgcgctgcaaacacacaagggttgcctgccagctcagcagcgccctccctcaaccacaccctgggtccggacccagagccacaggccgttggacccaggggaccggggctgggctcaggcgtgggcctggagggcttgtggaggggccagacctagagccgtagggctccaacagctgagggctgggcccctgccggccaatgaagctccagaccagtgctccggccttggcggtgccagcagtgctcctgcagggatggagggtgctggaggcctggatgcggggaccttgatcccccagcaggcagcgctgtggtcccagccactcaggaggctgaggcgggggaatggcatgaacctgggaggcggagcttgcagtgagctgagatcgcaccactgcattccagcctgggcgacagagtgagactccgtctcaaaaaaaaaaaaaacaaaagaagtttctagatctactgggcatgatgaacacaaaccccacagacactgaggaacccagtggtggcagtgactcgggctcctctgctctctaaagctcctttgagaaacatgggaggggccgggcgtggtggttcacgcctgtcatcccagcactttgggaggctggggcaggaggatcgcttgagcccaggagttcgagaccagcctgggcaacatagtgagactgtatcgctacataaaataaaaaaaaaagttagctgggcattgtacatgtgcctgtggtcccagctactcaggaggctgaggcaggaggattgcttgagcccaggagttggatgttgcagtgagccaagatcgcaccattgccctccactctgggccacggagcaataccctgtctcagaaaacaaacaacaaaaagcagaaacgctgaaggggtcggtttacgggaaaaccgcctgtcagaacacttggctactcctaccccagatcagtggacctgggaatgagggttggtcccgggaggcttttctccaagctgttgccaccagacccgccatgggaaccctggccacagaagcctcccggggagtgagccagagcctggaccgctgtgctgatgtgtctggggtggagggagggtggggagtgtgcaagggtgtgtgtgtgcccggggggtgttcatgggcaagcatgtgcgtgcctgtgtgtgtgcgtgcccctcccctgcagccgtcggtggtatctccctccagccccttcgccaccttctgagcattgtctgtccacgtgagactgcccagagacagcagagctccacgtggttttaaggggagacctttccctggacctgggggtctcgccgtatctcatgaccaggtgctaaatgacccgacatgcatcacctgcctttcgatgaccaacctccctgtccccgtcccgctgacctgcccccgtggcgtctcacggtgatgcctgctcctgacattggtgttcactgtagcaaactacattctggatgggaattttcatgtacatgtgtggcatgtggaaaatttcaaataaaatggacttgatttagaaagccaaaaaaaaaaaaaaaaaaaaaaaaaaaaaaaaaaaaaaaaaaaaaaaaaaaaaaaagggggggggggcaaaaatcccccggggggggccctcgcgagcacccccacgtgttttttgtgaacaagggggcgcgccccaaaatagggagcgcgcggatatatataccaccgcgaagcgcgaaggcgcggcccgccgggcgtaataaaaaacaacggccgctgagagcggcgagaacaaccgcgcctgccgcgagagaacagctgtgatgggcagagagcacccctaatctcgtgggggggggggcccacacatgttgcgcaacacacaactcatcacgacgagagatttataaaggcctaggggggaacattattaaaaattggagggtggtttatgcggtggcaaacacacgcgcgatttgtcttgagcgacataaaaatttgtgccacacggggttgatcttgagacaattttattgcggcggtgcgaata

SEQ ID NO: 89923 - DNA, 3117 bp, Homo sapiens
  misc_feature (1110)..(1110): n is a, c, g, or t
  misc_feature (1112)..(1112): n is a, c, g, or t
gtgcagaacctttgcctcctggccagagggacccttctgcaggctgattccagcagtgcccgatggtgggacccacaccagaccaagccttcgcctcccagaggcctcctggccctcctgtcatggcctgtgagagccacacccctaggccccgtctcctagtctgcaggccgcaggaccagctgcccacggccccagggggcaagggctgtagatgagggtctcagaggtggtgggagcaccccccccacccacagttcctgggcatttctttagagctttaaaatggcacctggagaccaccaggcgcggcgatcagatcgggtggtgtggtgcctcctgggactgaccacttcttgctctccgaccaggcaggggcgagtggcctgggaggttcccggaccctcagggggcctgtgtctctgggcaccgcagctccgccccactccttcctccagaacattccccactcgggctagagaattgcgtctgctccaggaatgcatcctagcgtgtgtacgatcgcgcctgggtgtcctgttctcatgagcaagcggttttaaccagcagcataatttatactcatagacaggactgggggaagggctgttcctgaggctggggtgcagtgccttggaaagcacccctgaaacagtggaccttgtatttttagtgtcccctgcaaccatcctctgacttagagcaagaatttccgctgctgctacccccgagatgggcttcaccagatgttaataacgtgcttattttctctaagtgctattttggcaccagcgttagttgcaatttatattctgcagcatttgatgctgggaaaagaacccaccctaatggtccccaattggcagagctcggctgttaagcagcagaccatatgctgcctgctggaggagcgtggtcagcacttgtccccgtgcctgcgtgcgtgtgcctgcgtgcacgtgtgcctgcgggtacctgtgccctgtgtgtgcacatgtgcctgcatgcgtgtgcctgcgtgcacgtgtgcctgtgtgtacatgtgcctgcgtgtacctgtgccctgtgtgtgcacgtgtgccttcgtgtacctgtgccctgtgtgtgcangngtgtgtgagtcacgtcttccgtgtgtgtatgtgagggagagactgtggggttggagggagggaggaggggaaagggtatgtatccctttgttctttaaaagggagagccccaacctctctggctgccccctcctgcctgtgctcccagctcaccccacacctagctgctatttattctcctgacccccttcccggccctgcagccccgtgtcccgcagcctccgccccgcctcctgctccacgtcaccaggcaacactcggctccaccaggcttccgaaggtggcccagagcaggcacttgagcctgatgacccagagcaaagctgcctttctgggccttgagtactcctttctgctatggaaggcttttcttgttttcaacggcccgtccagcccaggggggctgggtgagggccgcttccttctgcagcagagggggcgggctctatccttgccatctgctgcccccagaggccctgccaggacatgggcctgagcggtttcttctccaagaggccctcctgggacctgtctgtgcacagggcgggaagacacttgctgcttcgacccaggacggcagccaggacgggctgagctcctcttgcgctgcaaacacacaagggttgcctgccagctcagcagcgccctccctcaaccacaccctgggtccggacccagagccacaggccgttggacccaggggaccggggctgggctcaggcgtgggcctggagggcttgtggaggggccagacctagagccgtagggctccaacagctgagggctgggcccctgccggccaatgaagctccagaccagtgctccggccttggcggtgccagcagtgctcctgcagggatggagggtgctggaggcctggatgcggggaccttgatcccccagcaggcagcgctgtggtcccagccactcaggaggctgaggcgggggaatggcatgaacctgggaggcggagcttgcagtgagctgagatcgcaccactgcattccagcctgggcgacagagtgagactccgtctcaaaaaaaaaaaaaacaaaagaagtttctagatctactgggcatgatgaacacaaaccccacagacactgaggaacccagtggtggcagtgactcgggctcctctgctctctaaagctcctttgagaaacatgggaggggccgggcgtggtggttcacgcctgtcatcccagcactttgggaggctggggcaggaggatcgcttgagcccaggagttcgagaccagcctgggcaacatagtgagactgtatcgctacataaaataaaaaaaaaagttagctgggcattgtacatgtgcctgtggtcccagctactcaggaggctgaggcaggaggattgcttgagcccaggagttggatgttgcagtgagccaagatcgcaccattgccctccactctgggccacggagcaataccctgtctcagaaaacaaacaacaaaaagcagaaacgctgaaggggtcggtttacgggaaaaccgcctgtcagaacacttggctactcctaccccagatcagtggacctgggaatgagggttggtcccgggaggcttttctccaagctgttgccaccagacccgccatgggaaccctggccacagaagcctcccggggagtgagccagagcctggaccgctgtgctgatgtgtctggggtggagggagggtggggagtgtgcaagggtgtgtgtgtgcccggggggtgttcatgggcaagcatgtgcgtgcctgtgtgtgtgcgtgcccctcccctgcagccgtcggtggtatctccctccagccccttcgccaccttctgagcattgtctgtccacgtgagactgcccagagacagcagagctccacgtggttttaaggggagacctttccctggacctgggggtctcgccgtatctcatgaccaggtgctaaatgacccgaaaggcaggtgatgcatgtcgggtcgaccggccgccgaatttagtagtagtag

SEQ ID NO: 89924 - DNA, 470 bp, Homo sapiens
cttcagtcgctcttggcttcagtcgctcttgtgtgcaagggtgtgtgtgtgcccggggggtgttcatgggcaagcatgtgcgtgcctgtgtgtgtgcgtgcccctcccctgcagccgtcggtggtatctccctccagccccttcgccaccttctgagcattgtctgtccacgtgagactgcccagagacagcagagctccacgtggttttaaggggagacctttccctggacctgggggtctcgccgtatctcatgaccaggtgctaaatgacccgacatgcatcacctgcctttcgatgaccaacctccctgtccccgtcccgctgacctgcccccgtggcgtctcacggtgatgcctgctcctgacattggtgttcactgtagcaaactacattctggatgggaattttcatgtacatgtgtggcatgtggaaaatttcaaataaaatggacttgatttagaaagcca

SEQ ID NO: 89925 - DNA, 2233 bp, Homo sapiens
  misc_feature (1110)..(1110): n is a, c, g, or t
  misc_feature (1112)..(1112): n is a, c, g, or t
gtgcagaacctttgcctcctggccagagggacccttctgcaggctgattccagcagtgcccgatggtgggacccacaccagaccaagccttcgcctcccagaggcctcctggccctcctgtcatggcctgtgagagccacacccctaggccccgtctcctagtctgcaggccgcaggaccagctgcccacggccccagggggcaagggctgtagatgagggtctcagaggtggtgggagcaccccccccacccacagttcctgggcatttctttagagctttaaaatggcacctggagaccaccaggcgcggcgatcagatcgggtggtgtggtgcctcctgggactgaccacttcttgctctccgaccaggcaggggcgagtggcctgggaggttcccggaccctcagggggcctgtgtctctgggcaccgcagctccgccccactccttcctccagaacattccccactcgggctagagaattgcgtctgctccaggaatgcatcctagcgtgtgtacgatcgcgcctgggtgtcctgttctcatgagcaagcggttttaaccagcagcataatttatactcatagacaggactgggggaagggctgttcctgaggctggggtgcagtgccttggaaagcacccctgaaacagtggaccttgtatttttagtgtcccctgcaaccatcctctgacttagagcaagaatttccgctgctgctacccccgagatgggcttcaccagatgttaataacgtgcttattttctctaagtgctattttggcaccagcgttagttgcaatttatattctgcagcatttgatgctgggaaaagaacccaccctaatggtccccaattggcagagctcggctgttaagcagcagaccatatgctgcctgctggaggagcgtggtcagcacttgtccccgtgcctgcgtgcgtgtgcctgcgtgcacgtgtgcctgcgggtacctgtgccctgtgtgtgcacatgtgcctgcatgcgtgtgcctgcgtgcacgtgtgcctgtgtgtacatgtgcctgcgtgtacctgtgccctgtgtgtgcacgtgtgccttcgtgtacctgtgccctgtgtgtgcangngtgtgtgagtcacgtcttccgtgtgtgtatgtgagggagagactgtggggttggagggagggaggaggggaaagggtatgtatccctttgttctttaaaagggagagccccaacctctctggctgccccctcctgcctgtgctcccagctcaccccacacctagctgctatttattctcctgacccccttcccggccctgcagccccgtgtcccgcagcctccgccccgcctcctgctccacgtcaccaggcaacactcggctccaccaggcttccgaaggtggcccagagcaggcacttgagcctgatgacccagagcaaagctgcctttctgggccttgagtactcctttctgctatggaaggcttttcttgttttcaacggcccgtccagcccaggggggctgggtgagggccgcttccttctgcagcagagggggcgggctctatccttgccatctgctgcccccagaggccctgccaggacatgggcctgagcggtttcttctccaagaggccctcctgggacctgtctgtgcacagggcgggaagacacttgctgcttcgacccaggacggcagccaggacgggctgagctcctcttgcgctgcaaacacacaagggttgcctgccagctcagcagcgccctccctcaaccacaccctgggtccggacccagagccacaggccgttggacccaggggaccggggctgggctcaggcgtgggcctggagggcttgtggaggggccagacctagagccgtagggctccaacagctgagggctgggcccctgccggccaatgaagctccagaccagtgctccggccttggcggtgccagcagtgctcctgcagggatggagggtgctggaggcctggatgcggggaccttgatcccccagcaggcagcgctgtggcagcctcccacctcctcttcccctgttatctgctccttttaggatctgaaaattacagagccttttttttttttttgagagggagtcttgctttgtcccccaggctggagtgcagtggcacgatctcagctcactcactacaacctccacctcacaggttcaagcgattctcccacatcagcctcctgagtagctgggattac

SEQ ID NO: 89926 - DNA, 300 bp, Homo sapiens
tgcatcacctgcctttcgatgaccaacctccctgtccccgtcccgctgacctgcccccgtggcgtctcacggtgatgcctgctcctgacattggtgttcactgtagcaaactacattctggatgggaattttcatgtacatgtgtggcatgtggaaaatttcaaataaaatggacttgatttagaaagccaggcggctgtgtggtccttccagcacggatactttgacctcttgcctacaaccccttccttgggtccgaggctggtagctttgttcacttccgatggttgggggcgggtg

SEQ ID NO: 89927 - DNA, 523 bp, Homo sapiens
gatgcgatgattgttgaagcatgtatcaagatgaaaccttcttcagactaggtttctaaatgagcacattaagcagagccccgtgaagttgaacatgtagtatgagcaaaatataaaatttatttttaagccactgaaattttaggattgtttgttatggcagcataacctaaaccatcctgactcatataaaaattggctcctagatatgggttagtgtaataacaacaataagcataacaacaataaaactaaacaatcatttagagggcgataactaagaacactgctatcagaagctgaagggatggtgatctgtttggtaaacatatcacctgtgataatgtagaaggcagatcatgaacctgatgaactaaagaaaaggattgtaaaacagagagtgagtagtgtgtgttggtggctgttggatgcattctgaaagttactacaagctattcaaagatgaactcagaaaaatttggcctgtttgcaatcaggaatgaaatggaatagagaaaaccta

SEQ ID NO: 89928 - DNA, 279 bp, Homo sapiens
tctttagtttgatcaattttatcagtaatacattttaacatccaatattataattaaaagacctctcaacaattattgattgcttgtttctctaagtattaataatttcctcagttatgatttctataaaattgcatttgaaatcttgaattggtatttaattttgaacttctttaaagccaccataaatgttctttaatattatgctaaaaaaaaatcaatagacaaggtgttttaaatcatttgtccaaattttatattgaccatatgttacataag

SEQ ID NO: 89929 - DNA, 378 bp, Homo sapiens
taaaaaaatttcagtatcaaaatctattgtgaatatgctattaaaatttaaaacaaaagtatttttacctctgagtcacatactatgtaatagagttatagacaggttaatgactatttcaatctgtgtaaagtgtgcaatgatcatgcctaaaagtcacttcagaaaattagagaaacatgacaatgtagaagggacagcaaaaacactacacatttgaatataaagtagaattcataataaaatgcatctgaatacttgtataattactcaaaagcatactggaccctgttttttaccaaagcattataaaaaaaattaactgaaattgacagtgaattgttttaagtagcacttctaagatttcatttacatact

SEQ ID NO: 89930 - DNA, 386 bp, Homo sapiens
tttttggaaaatttttacagaacatggaaataatgcaaaaggaagactggacatcatttcaatgttatatactagaatattatttaattatcttaagagagtgtttgccattaggatccagagcctatgaaattacgtatttacctgcagattcttatccagtagagatgcaaatcatttctgtctactagaaaagacagtccccaaagttatagttttattgatctttaggacttttatcagttttatatgtaacctatcaaatattttctaacatttttcttcagtacctatacatactttgtttcccaaataccttttgaactgggtttactatcctgctggttcccttataaatgagtcaaataaatctttcacatatgctc

SEQ ID NO: 89931 - DNA, 769 bp, Homo sapiens
ggaggatacattggaagcatcattcaggaactcactcgttcttattttgcagttatagtttgttagacacatacagccttttttccagaagtgctgtcccaggactaggacagaccctggcgagttgtaactcggctgaacagcagccacactcagtgctgtgggcctgtcagccatggtccggccctgacatgactagtggctcttctgaccctactgcttggaactataattcgtgtgtcctcccttactaggaagttattgaacttctgatcccttttatcatttccttaaactgtttgcccatgtatagtaagagtatgcttggtaagctgactgcagtcctagcattggccttagccatgattagctctagcaaggcgaggctggcaggtttgatttccatgcctcaggctcaggcaggatccacatccccaggtgccctcttccaacagaagctatctgctagtggggctcctgcctttctagcctgctttccccgacggaagttgcaggcaaaggttgtcattggagacagccatggagacagccgcggggcagtcctgctttaccctgcacggtgtgaattgtggctcccatttgtcttggtcccgccagggtttggatttctgctttgagagtgtgttctggagagaaaggaagtgaatgctagacctcatctttctccccaaatcggcttctattaccagaaagctgaagcctcctgcaggtcttggggggaaaataacaggaagagctatggtctcaa

SEQ ID NO: 89932 - DNA, 313 bp, Homo sapiens
agcacacacatccttcacaattcctatccatgacagctctgggacgagccggctctggagccaggtgaccacccctgtgcctgaaggtgggagagcttcctcccaaagaattgcatgtgttaattcacataattgtgtcactgcagacactcactgaaaggttagctgtgatactgccactgccaccaccatcatatcatgatttcatcaccatcaccgccgctgccacctcatcaccaccatcactgttaccacccagcaccaccaccacgtgtgaactttctactctgcagcaggtgtgcggctcaagatt

SEQ ID NO: 89933 - DNA, 257 bp, Homo sapiens
ctagactccatctcaaaaaaaaaaaaaaagttgataacatcacatctatgcaataaattatttaaataagtacataattatattgagaaattaaagacataaagcaagctaaaacatttaaatcatttattattggtacagcagattttcaaatataggactaaagattcagattactggtcaggcgcagtggctcacacctgtaatcccagtgctttgggagactgaggcaggtggatcacttgaggtcaggagtt

SEQ ID NO: 89934 - DNA, 339 bp, Homo sapiens
tcaggaggtagagaccagcctgaccaacatggtgaaacctcgtctctactaaaaatacaaaaattagccgggcatggtggcgcatgcctgtaatcccagctacttgggaggctgaggcgggagaatcgcttgaacttgggaggcagaagttgcagtgagccgagatcacgccattgcattccagcctgggcagcaagagtgaaactccacctcaaaaataaataaatacatacatacatacatacatacataaattgtcaatttacaatataaaaaagaaaagattaataaaatcaatatacctctaccaaggctattcgaaacaaaaaggtacaactt

SEQ ID NO: 89935 - DNA, 542 bp, Homo sapiens
tgaggagtttcgctcttgttggctaggctggagtaaaatggtgcgatctcggctcactgcacctccgcctcccaggttcaagcgattttcctgcctcagcctcccgagtagctggggttacaggcatgcaccaccatgcctggctaattttctgtatttttagtagagacggggtttctccatgttggtcaggctggtcttgaactcctgacctcaggtgatctgcccgtctcggcctcccaaagtgctgggattaccggcatgagccactgcgcctggccgacaaaggctttgatatcagaatgaactgtcaagggaggtgctggagagggattaacctgtgctgcctgggaccctcagggtcttaggttggggagtgtgaataggagtttgcagatggagaataggaagggcattccaggcagagggaaacctgtgcagagaccaagaggtgtggaaggaaaagtggggttggggctgggtggtctggattatggcctggatgcaataaagtactgtgacagtagccacctatttgtttt

SEQ ID NO: 89936 - DNA, 1872 bp, Homo sapiens
cttctatttccgcacgctgttccagcagcacaacgaggccgtgaatgtctggacccacctgctggcggccctggtactgctgctgcggctggccctctttgtggagaccgtggacttctggggagacccacacgccctgcccctcttcatcattgtccttgcctctttcacctacctctccttcagtgccttggctcacctcctgcaggccaagtctgagttctggcattacagcttcttcttcctggactatgtgggggtggccgtgtaccagtttggcagtgccttggcacacttctactatgctatcgagcccgcctggcatgcccaggtgcaggctgtttttctgcccatggctgcctttctcgcctggctttcctgcattggctcctgctataacaagtacatccagaaaccaggcctgctgggccgcacatgccaggaggtgccctccgtcctggcctacgcactggacattagtcctgtggtgcatcgtatcttcgtgtcctccgaccccaccacggatgatccagctcttctctaccacaagtgccaggtggtcttctttctgctggctgctgccttcttctctaccttcatgcccgagcgctggttccctggcagctgccatgtcttcgggcagggccaccaacttttccacatcttcttggtgctgtgcacgctggctcagctggaggctgtggcactggactatgaggcccgacggcccatctatgagcctctgcacacgcactggcctcacaacttttctggcctcttcctgctcacggtgggcagcagcatcctcactgcattcctcctgagccagctggtacagcgcaaacttgatcagaagaccaagtgaagggggatggcatctggtagggagggaggtatagttgggggacaggggtctgggtttggctccaggtgggaacaaggcctggtaaagttgtttgtgtctggcccacagtgactctctgtgcacgactcaactgccaagggcatcactggccaattcttggatttagggattggctaggagttgctggggtccactcctgggcctgccccagctccttgcccagggagagggaaagagttaacggtgtgggccactccagcttgcccttccactgccactcactggggtgaggctgggggtcagcttggtgaggattggggcttctagattgtctaggcaggaggtgaaacttaggccagagtcagatttgagctgagccaggggaggccttggcaacctacttctactcagatttcattgctggatgcggaaggggtaggcccaaaatatatacaggatcttactgtcccttgaagcccagccacaagtgttggagctgcagagagaccccaaaggtagtagattgtgccagatacaaatgggtcccatccagtgcttcatactccttcagtcactatcccagacagtgagccccagatctcctagctctggcttctgtgtcccacacggcctgttcccagcttctctcctggttcccttgttacggattcatttatccattcagtgtttcctgggcctctgctcagaggcaggtcaccactgggccctgtggatcaatgcaagatgacaaaggctttgatatcagaatgaactgtcaagggaggtgctggagagggattaacctgtgctgcctgggaccctcagggtcttaggttggggagtgtgaataggagtttgcagatggagaataggaagggcattccaggcagagggaaacctgtgcagagaccaagaggtgtggaaggaaaagtggggttggggctgggtggtctggattatggcctggatgcaataaagtactgtgacagtagccacctatttgtttt

SEQ ID NO: 89937 - DNA, 711 bp, Homo sapiens
cttctatttccgcacgctgttccagcagcacaacgaggccgtgaatgtctggacccacctgctggcggccctggtactgctgctgcggctggccctctttgtggagaccgtggacttctggggagacccacacgccctgcccctcttcatcattgtccttgcctctttcacctacctctccttcagtgccttggctcacctcctgcaggccaagtctgagttctggcattacagcttcttcttcctggactaaaaaaaaaaaaaaaaaaaaaaaaaaaaaaaaggggggggcgcgccccaaaagattttccccccgggggggccccaagttatagccgggcgttaccccagctttttttgttaaacaagggtggtccccattataatgggggggcgcgatataattatataagccataggacacccgggccgcgccgcgtttttaacaaagcgttcggtgaagcgagggaaaaacgcgtggctagcgtgggggactctgtgggtgagggaaccctaacttgcgtgggggcggggcaccattatgggggaccaaatctaccctagtcagaagaattttaaggcctcaaggggtaaattattaaaacttttcaaggctggtattagtgggtggtcaaaacctagcgctgaaatagtgctggccggcctgaaaagttggggctaacgcgggtatgattgttgaaatttttatcg

SEQ ID NO: 89938 - DNA, 386 bp, Homo sapiens
taagcaacacttaacaaacaaatgtgtacaccagaaggtcatgttttcatttaccttgggaagtctgtctaaccagataactggttgtataaatagggcaaaactttttaatagggagagctagtacccagggagtcattttaagactactcattccctggactcagttgtatacttgctgaagtgacaattgtcttagtagacaatacatacactgaatagacagagaaggaccctaaatccttgctttagagtagtacaatggaatactgacaaattcttattcagaaacatactttctacgctcacacaaaacactatatttgtgtttgtgactgccatcagcatagaataatttccagggtttcagtctattgcatattagt

SEQ ID NO: 89939 - DNA, 951 bp, Homo sapiens
gttgcaaccataagttacaccatattttctcaaagaaacatggtagtaatcagaggccattgttcaaagtactgactttagtcagctgacctgcaatcaaacctcagtttaggcacttactagctgtgtgaccctgggcaaaatacttaacctctctgagcatcacatactcatctgtgatatgaggactgcaatacattcctgctttctttttttgacaaatatttattgagaatttctttacttgtggaatgtggtattatgtcctgtgtttaatggtctttatatgtatctcccagttcagtttcatataaattggcctcttgtttctgtaactaggattgcatttctgtcaaaagtcttggcttatacaaggacgctcaaaggccatccaatctgcaaatacaagacagagctgcctcaggaaatgcccgatgatttaattaaaatgtgaagagtagcccacagagagggcaggtgtggtgtaaccccaccctgcagggatgaggcgggcatcctccttctcggtgacttagcctggagtactaccttggagtagtttcagagacggttctcaggacaaaaagttgacccctgttttagggaggctgccttgtggccactgggcatgctgatggtttgccatctaacactttatgcctctcacttgtccccattttgagtccaggcaactgtgacccctggaattatggagagtctcttgggactgtcgttattatttttattcttactgaggtaaaattcacataacataaaattaagcatgttaaagtagacatttcatttagtacatttataatattgcacaatcacccactatctagttccaaaaatcatttttttgagtttctattttgatatgattttaacctaggaaaaaaattacaagaattgtacaaggaactctgcataaccttccaccagatatat

SEQ ID NO: 89940 - DNA, 147 bp, Homo sapiens
ctcccaaagtgctgggattacagacatgagccactgcacccggcctacagttttgatatacagatactgtttcttctttttgctgaacatgatatcaaactaagagctaatggtggctaccatcaattgatgtcttcctatgctatg

SEQ ID NO: 89941 - DNA, 259 bp, Homo sapiens
ctgaactcagccaatgcccacccacatagagagcatttagacaagccctagccaaagggaaacaccccaattcagtgattgaaacttgagttctggcgagccttaccacaggctaaagtgcttgagagccctcaataactcaaaacaccgtctaggccacaaagacttttagatgagttctagtgctgagttggactcagagacaatggacttgggggccatgccacctattaaaacatcagctggggtggttgagaga

SEQ ID NO: 89942 - DNA, 371 bp, Homo sapiens
atcatctttggtcaactcttggctggacccaatgatagtgtaggaattaacataatttttcctactaaaggtattggatttgttttgagagaccacagtttaatatcattgacatagaaagtttaaaaattgttagactaaaattttttagtgctgttgaagttgttttacagaaaaatatctatcctggtttacattgatagttttttttataagaactagatcaagagaaagggagagtagtgataaatgtccaggttttcgagttgaaaagtaacaatcagtgtattacaacagatagatttgatgtcaaattgcaaatgctgaaaacgttatatgtaattgactagccagagtaattatacaaggca

SEQ ID NO: 89943 - DNA, 257 bp, Homo sapiens
ttctgggagagggaatcaaatgtacaaaagcagaactggggtgaaatcctttggtacatccaaagaactgggctgatcagcatgactggagagtggtatatgtggcaggggcaccagctcttactttttttggatccctaaccaaggaatttgagcagtctgatcaaatttacatctagaaatgttatcttggcagccatgtggggatggactgtaaggaaatgagactacaggcagggagaccagctaggagacta

SEQ ID NO: 89944 - DNA, 275 bp, Homo sapiens
ccttccacctcggcctcccaaagccctgagattacagacacgagtccctatgtctggcttttttgagcatttcttaaatgcccaagtgaggaaaggaccaaatcagttttccagaaccactcgtgaatgactggatatgggggcttgcacaaagccggggccctgcattgccgagagcttttagccctgaatacttttctttgtattatgagatgtcactgtaggtttacagtctttggaagggcccaagaaagatttccccaaagatcttattt

SEQ ID NO: 89945 - DNA, 370 bp, Homo sapiens
acataagtaaaagaaaatgaaaccagtgggaaattatattccattatattaaaaatgttaaaatagcaaagctcttttatactttagttatgaagtatcttttctaagttttttttaattgcatcaattagattttgacatttagatatgtcagtgtttagaaattttaattctcaaaatactttggaaaagggtacagaaatttttccggtctatgttctgtaagatatcacttatcaactttgtagagaaatgattttctactttctcagggtcagtggtattgaatggccactagaaccgtactaaaataccatgttacaaattgggtattccttatctgaaatgattgagtccagaagtttttgga

SEQ ID NO: 89946 - DNA, 2024 bp, Homo sapiens
  misc_feature (889)..(889): n is a, c, g, or t
  misc_feature (1655)..(1655): n is a, c, g, or t
tagactgtgtaactgaaaggatcatctttcgggtcatcttttgtcccaagtgcttagtcatattgagctaatgtcaagatcttgtgttgtttagtatctttagagttcgaagcacaaaccccggagatttttgtattctttcagtgccttcgtgaggagtaggcaggtataaaatagaaaggtaggctcagaacaaaaaaaaagtatttggaatacagaattctgatacacatgactctgcctctctgggtgaataaagagaagagaaactggactcagttgtacagaccacctagtaactgaccatggtgtgatttttaaagcgaggaagcagatgccaggcagtgaagacttgcacaccgtcacactgttaactggtagagaggcagtgctgtatcttccgcttctcctaaacgttggtctagggttcatcctgccttatagcacatgtttagtatacatatccaaggaagtttttttggtcactgaggctgaaccttatggacagtactgctgatttagtgatctgaccttgaattaggggtttcacaagaatccaggtcctggtccatggaagaacagtgagcacttttgataattgaggtctagcttaacattctgtgaccaataatattttagttaacagagattctggttcttggatcgaggatattatgtttaacaggaaaaggctctgaaagatgtaatctctctttttttcaagttgcatagattgcacatgaggattttgcccacttagcaacttcattctacttttgcaggaatagaacccaagtcttctgactttcactgcattagcttattttttcctcatttttagttctttcaagaatcattaattccatgcttgaaaatgtctgaatggcantaatgaggataagttttttaatcttttgaattcttaatgtgaactaacaggaaaaaaatctcagagctaacaaattagagttggtaaagggccgatttataagtgtctcacaatttatgggtgtaaatcaaaatgttaactagtacagtcataagctgtttgtacaatccttaggctttaacttctttggaattggcaagctaggcatttgacatgtatttatataactgtacggttgtagttattaatgatcttgtcattattgttgataatgaaaaaagatcttcactataatttcttcgtataattcttataatgaaacaagtaaatactattaactagaaaaaatctagtctgcagttagcccacacacatccaaacttatctctgccagcagcaaaagaaagcttgaaaacctttgccaaaatcagaagtttcccatttagattacataagtttctgttgaattgaaatatatttagataacatttaaaccattgatcttttggtattaactctcagatgtttcataactttctgtctttttagtattcagggatattatgtaaagtttttcctgcactgaatctctgtgcttgagcctactgaaatgatccccctaagccatgctgcctgccttttgtgtttaatgtttttttacactgacttatctccttcgtgtgttcacctctcccccagaggaagacaacagaacagtataatttacagtttgtacaggttaaaaaaaaaaaaaaaggttgtaagntgggggggtgatattttgttttaaaatatttgggtaaggaaaattttgtctttaatattaattctgtaatccttgaccaggcatggtggctcaaacctgtaatcccagcactttgggagaccgaggcgggcggatcgcatgaggccaggagttcgagaccagcctggccaacatggtgaaaccccgtatctactagaaatacaaaaaattacccaggcgtggtggtgcatgcctgtagttcccgctactccagaggctgaggcagaattgcttgaacccggaaagtggaggttgcagttagctgagaccacaccactgcactccatccagcctgggcaacagagcaagactcagtctcaaaaaaaaaaa

SEQ ID NO: 89947 - DNA, 575 bp, Homo sapiens
tatacagtgtatgttaatcgagtggatggtttaaaaaaaaccttatagagaaaaagatgctatggacgtatggtgcaatggtaaaaaattggagacagcgggtgagtttgtagatgatgggactgaaactcacttcagtatcgggaaccatgactgttacataaaggctgtcagtagtgggaagcggaaagaagggattattcatactctcattgtggataatagagaaatcccagagattgcaagttaatgaattttcatcttaagaagtaaagatcaggactttttaattactgtggtaattaaatgtgttcagtatgtacttatcagtacatttagtctgcaatgttttaattttttaaaaagttacatgaaactaacattccaagggtcaggaaaaaaaccaattatgtatagtcataaaaattacaatttatgatgcaaataatgtaaaatgttttaaagacaaatggcaaataagatatggaccaaagtcactaatgttttacaacagtaacctttactataataaatacttttaaaaaaaaaaataaaaaggggctcgttggctctta

SEQ ID NO: 89948 - DNA, 310 bp, Homo sapiens
cgagatcccccatacagagtacagccctccttacagcctagaaaaaatgacagatctcgtagctgtttgggatgttgctttaagtgacggagtccacaagatcgaatttgaacatgggactacatcaggcaaacgagtagtatatgtagatggaaaggaagagataagaaaagagtggatgttcaaattagtgggcaaagaaacattctatgttggagctgcaaagacaaaagcgaccataaatatagacgctatcagtggttttgcttatgaatatactctgtatgggggatactggtagcgagctcga

SEQ ID NO: 89949 - DNA, 1169 bp, Homo sapiens
tctgctctgtaccggattgctgcgcacgtgtgcaaccccaaggttgggtccgtggcggcgggaggggtggcctcctgcgctggtcgccccaggggacctgagaggcgcgacaaacagtcggcgcgtttggtactcgcgcctgcagagctttcaacctccgcgccggctgcgcctgtttctcggccaggggagcaaggccacgcggcctacgcagccgagtcggaaccaaccggttgtttggtgaaacctaccccagagcctcccgcggcccacagagcacagccctccttacagcctagaaaaaatgacagatctcgtagctgtttgggatgttgctttaagtgacggagtccacaagatcgaatttgaacatgggactacatcaggcaaacgagtagtatatgtagatggaaaggaagagataagaaaagagtggatgttcaaattagtgggcaaagaaacattctatgttggagctgcaaagacaaaagcgaccataaatatagacgctatcagtggttttgcttatgaatatactctggaaattaatgggaaaagtctcaagaagtatatggaggacagatcaaaaaccaccaatacttgggtattacacatggatggtgagaactttagaattgttttggaaaaagatgctatggacgtatggtgcaatggtaaaaaattggagacagcgggtgagtttgtagatgatgggactgaaactcacttcagtatcgggaaccatgactgttacataaaggctgtcagtagtgggaagcggaaagaagggattattcatactctcattgtggataatagagaaatcccagagattgcaagttaatgaattttcatcttaagaagtaaagatcaggactttttaattactgtggtaattaaatgtgttcagtatgtacttatcagtacatttagtctgcaatgttttaattttttaaaaagttacatgaaactaacattccaagggtcaggaaaaaaaccaattatgtatagtcataaaaattacaatttatgatgcaaataatgtaaaatgttttaaagacaaatggcaaataagatatggaccaaagtcactaatgttttacaacagtaacctttactataataaatacttttaaaaaaaaaaataaaaaggggctcgttggctctta

SEQ ID NO: 89950 - DNA, 1607 bp, Homo sapiens
tctgctctgtaccggattgctgcgcacgtgtgcaaccccaaggttgggtccgtggcggcgggaggggtggcctcctgcgctggtcgccccaggggacctgagaggcgcgacaaacagtcggcgcgtttggtactcgcgcctgcagagctttcaacctccgcgccggctgcgcctgtttctcggccaggggagcaaggccacgcggcctacgcagccgagtcggaaccaaccggttgtttggtgaaacctaccccagagcctcccgcggcccacagagcacagtcagacagaatctccctctgtcacccaggctggagtgcagtggcatgatctcggctcactgcaacctccacctcccgggttcaagcgattcttgtgcctcagcctccggagtagctgggatttacagacgtgcgctaccatgcccggcaaatttttctatttttgcaaagacaggatttcaccgttttgtccaggctggtcttgaactattgacctcaagtgatccgaccgccttgacctcccaaagtgctgggattacggggtgtgagccatcgcgcctggccactttctccaaagttttaaaccaaagccttcttcggcagagctacgacccttcctctatggcccattctatcctatgctgcttccctttataaggacactcccactgttgtgctataatcatctcttggtatctccagactctgccactctgagccctccttacagcctagaaaaaatgacagatctcgtagctgtttgggatgttgctttaagtgacggagtccacaagatcgaatttgaacatgggactacatcaggcaaacgagtagtatatgtagatggaaaggaagagataagaaaagagtggatgttcaaattagtgggcaaagaaacattctatgttggagctgcaaagacaaaagcgaccataaatatagacgctatcagtggttttgcttatgaatatactctggaaattaatgggaaaagtctcaagaagtatatggaggacagatcaaaaaccaccaatacttgggtattacacatggatggtgagaactttagaattgttttggaaaaagatgctatggacgtatggtgcaatggtaaaaaattggagacagcgggtgagtttgtagatgatgggactgaaactcacttcagtatcgggaaccatgactgttacataaaggctgtcagtagtgggaagcggaaagaagggattattcatactctcattgtggataatagagaaatcccagagattgcaagttaatgaattttcatcttaagaagtaaagatcaggactttttaattactgtggtaattaaatgtgttcagtatgtacttatcagtacatttagtctgcaatgttttaattttttaaaaagttacatgaaactaacattccaagggtcaggaaaaaaaccaattatgtatagtcataaaaattacaatttatgatgcaaataatgtaaaatgttttaaagacaaatggcaaataagatatggaccaaagtcactaatgttttacaacagtaacctttactataataaatacttttaaaaaaaaaaataaaaaggggctcgttggctctta

SEQ ID NO: 89951 - DNA, 1004 bp, Homo sapiens
tctgctctgtaccggattgctgcgcacgtgtgcaaccccaaggttgggtccgtggcggcgggaggggtggcctcctgcgctggtcgccccaggggacctgagaggcgcgacaaacagtcggcgcgtttggtactcgcgcctgcagagctttcaacctccgcgccggctgcgcctgtttctcggccaggggagcaaggccacgcggcctacgcagccgagtcggaaccaaccggttgtttggtgaaacctaccccagagcctcccgcggcccacagagcacagacagactgtttttgccaaccatggcatctggagatgacagtcctatctttgaagatgatgaaagccctccttacagcctagaaaaaatgacagatctcgtagctgtttgggatgttgctttaagtgacggagtccacaagatcgaatttgaacatgggactacatcaggcaaacgagtagtatatgtagatggaaagaaaaagatgctatggacgtatggtgcaatggtaaaaaattggagacagcgggtgagtttgtagatgatgggactgaaactcacttcagtatcgggaaccatgactgttacataaaggctgtcagtagtgggaagcggaaagaagggattattcatactctcattgtggataatagagaaatcccagagattgcaagttaatgaattttcatcttaagaagtaaagatcaggactttttaattactgtggtaattaaatgtgttcagtatgtacttatcagtacatttagtctgcaatgttttaattttttaaaaagttacatgaaactaacattccaagggtcaggaaaaaaaccaattatgtatagtcataaaaattacaatttatgatgcaaataatgtaaaatgttttaaagacaaatggcaaataagatatggaccaaagtcactaatgttttacaacagtaacctttactataataaatacttttaaaaaaaaaaataaaaaggggctcgttggctctta

SEQ ID NO: 89952 - DNA, 572 bp, Homo sapiens
ggtgcgggccatcgtaattctgtcgtctacccacacgcgcccacctaaaaaagatgctatggacgtatggtgcaatggtaaaaaattggagacagcgggtgagtttgtagatgatgggactgaaactcacttcagtatcgggaaccatgactgttacataaaggctgtcagtagtgggaagcggaaagaagggattattcatactctcattgtggataatagagaaatcccagagattgcaagttaatgaattttcatcttaagaagtaaagatcaggactttttaattactgtggtaattaaatgtgttcagtatgtacttatcagtacatttagtctgcaatgttttaattttttaaaaagttacatgaaactaacattccaagggtcaggaaaaaaaccaattatgtatagtcataaaaattacaatttatgatgcaaataatgtaaaatgttttaaagacaaatggcaaataagatatggaccaaagtcactaatgttttacaacagtaacctttactataataaatacttttaaaaaaaaaaataaaaaggggctcgttggctctta

SEQ ID NO: 89953 - DNA, 618 bp, Homo sapiens
agctttagactttgtttttcaaagcttattgtttaactaatacattattttattgcactactagtacttttagatggtgtgaatgctctagacagagataaaagtttctgcaccactaattccttcttcttttgttgctccagggtgagtttgtagatgatgggactgaaactcacttcagtatcgggaaccatgactgttacataaaggctgtcagtagtgggaagcggaaagaagggattattcatactctcattgtggataatagagaaatcccagagattgcaagttaatgaattttcatcttaagaagtaaagatcaggactttttaattactgtggtaattaaatgtgttcagtatgtacttatcagtacatttagtctgcaatgttttaattttttaaaaagttacatgaaactaacattccaagggtcaggaaaaaaaccaattatgtatagtcataaaaattacaatttatgatgcaaataatgtaaaatgttttaaagacaaatggcaaataagatatggaccaaagtcactaatgttttacaacagtaacctttactataataaatacttttaaaaaaaaaaataaaaaggggctcgttggctctta

SEQ ID NO: 89954 - DNA, 284 bp, Homo sapiens
cctgggttggggctgaggaaggcctatgcgcggagggtgcggccttcggctaaggcagaggaccagggttgggtccgtggcggcgggaggggtggcctcctgcgctggtcgccccaggggacctgagaggcgcgacaaacagtcggcgcgtttggtactcgcgcctgcagagctttcaacctccgcgccggctgcgcctgtttctcggccaggggagcaaggccacgcggcctacgcagccgagtcggaaccaaccggttgtttggtgaaacctaccccagagc

SEQ ID NO: 89955 - DNA, 957 bp, Homo sapiens
ggccatctctgggcggcggcggcgggcggtgtctgcgcggtcggtgagacccgcgcgggtgagacgctggccctccttacagcctagaaaaaatgacagatctcgtagctgtttgggatgttgctttaagtgacggagtccacaagatcgaatttgaacatgggactacatcaggcaaacgagtagtatatgtagatggaaaggaagagataagaaaagagtggatgttcaaattagtgggcaaagaaacattctatgttggagctgcaaagacaaaagcgaccataaatatagacgctatcagtggttttgcttatgaatatactctggaaattaatgggaaaagtctcaagaagtatatggaggacagatcaaaaaccaccaatacttgggtattacacatggatggtgagaactttagaattgttttggaaaaagatgctatggacgtatggtgcaatggtaaaaaattggagacagcgggtgagtttgtagatgatgggactgaaactcacttcagtatcgggaaccatgactgttacataaaggctgtcagtagtgggaagcggaaagaagggattattcatactctcattgtggataatagagaaatcccagagattgcaagttaatgaattttcatcttaagaagtaaagatcaggactttttaattactgtggtaattaaatgtgttcagtatgtacttatcagtacatttagtctgcaatgttttaattttttaaaaagttacatgaaactaacattccaagggtcaggaaaaaaaccaattatgtatagtcataaaaattacaatttatgatgcaaataatgtaaaatgttttaaagacaaatggcaaataagatatggaccaaagtcactaatgttttacaacagtaacctttactataataaatacttttaaaaaaaaaaataaaaaggggctcgttggctctta

SEQ ID NO: 89956 - DNA, 927 bp, Homo sapiens
gagatccgccactctgcctcccaaaatgccgtgattacagccctccttacagcctagaaaaaatgacagatctcgtagctgtttgggatgttgctttaagtgacggagtccacaagatcgaatttgaacatgggactacatcaggcaaacgagtagtatatgtagatggaaaggaagagataagaaaagagtggatgttcaaattagtgggcaaagaaacattctatgttggagctgcaaagacaaaagcgaccataaatatagacgctatcagtggttttgcttatgaatatactctggaaattaatgggaaaagtctcaagaagtatatggaggacagatcaaaaaccaccaatacttgggtattacacatggatggtgagaactttagaattgttttggaaaaagatgctatggacgtatggtgcaatggtaaaaaattggagacagcgggtgagtttgtagatgatgggactgaaactcacttcagtatcgggaaccatgactgttacataaaggctgtcagtagtgggaagcggaaagaagggattattcatactctcattgtggataatagagaaatcccagagattgcaagttaatgaattttcatcttaagaagtaaagatcaggactttttaattactgtggtaattaaatgtgttcagtatgtacttatcagtacatttagtctgcaatgttttaattttttaaaaagttacatgaaactaacattccaagggtcaggaaaaaaaccaattatgtatagtcataaaaattacaatttatgatgcaaataatgtaaaatgttttaaagacaaatggcaaataagatatggaccaaagtcactaatgttttacaacagtaacctttactataataaatacttttaaaaaaaaaaataaaaaggggctcgttggctctta

SEQ ID NO: 89957 - DNA, 1021 bp, Homo sapiens
aatttcttaggtactgtcactttaatattttgacattttagaggttttaatctaatattttcatcttggaaggattaattggttatttaattagtattttggcctactataattgctttattttattcctttagccctccttacagcctagaaaaaatgacagatctcgtagctgtttgggatgttgctttaagtgacggagtccacaagatcgaatttgaacatgggactacatcaggcaaacgagtagtatatgtagatggaaaggaagagataagaaaagagtggatgttcaaattagtgggcaaagaaacattctatgttggagctgcaaagacaaaagcgaccataaatatagacgctatcagtggttttgcttatgaatatactctggaaattaatgggaaaagtctcaagaagtatatggaggacagatcaaaaaccaccaatacttgggtattacacatggatggtgagaactttagaattgttttggaaaaagatgctatggacgtatggtgcaatggtaaaaaattggagacagcgggtgagtttgtagatgatgggactgaaactcacttcagtatcgggaaccatgactgttacataaaggctgtcagtagtgggaagcggaaagaagggattattcatactctcattgtggataatagagaaatcccagagattgcaagttaatgaattttcatcttaagaagtaaagatcaggactttttaattactgtggtaattaaatgtgttcagtatgtacttatcagtacatttagtctgcaatgttttaattttttaaaaagttacatgaaactaacattccaagggtcaggaaaaaaaccaattatgtatagtcataaaaattacaatttatgatgcaaataatgtaaaatgttttaaagacaaatggcaaataagatatggaccaaagtcactaatgttttacaacagtaacctttactataataaatacttttaaaaaaaaaaataaaaaggggctcgttggctctta

SEQ ID NO: 89958 - DNA, 831 bp, Homo sapiens
tctgctctgtaccggattgctgcgcacgtgtgcaaccccaaggttgggtccgtggcggcgggaggggtggcctcctgcgctggtcgccccaggggacctgagaggcgcgacaaacagtcggcgcgtttggtactcgcgcctgcagagctttcaacctccgcgccggctgcgcctgtttctcggccaggggagcaaggccacgcggcctacgcagccgagtcggaaccaaccggttgtttggtgaaacctaccccagagcctcccgcggcccacagagcacagccctccttacagcctagaaaaaatgacagatctcgtagctgtttgggatgttgctttaagtgacggagtccacaagatcgaatttgaacatgggactacatcaggcaaacgagtagtatatgtagatggaaaggaagagataagaaaagagtggatgttcaaattagtgggcaaagaaacattctatgttggagctgcaaagacaaaagcgaccataaatatagacgctatcagtggttttgcttatgaatatactctggaaattaatgggaaaagtctcaagaagtatatggaggacagatcaaaaaccaccaatacttgggtattacacatggatggtgagaactttagaattgttttggaaaaagatgctatggacgtatggtgcaatggtaaaaaattggagacagcgggtgagtttgtagatgatgggactgaaactcacttcagtatcgggaaccatgactgttacataaaggctgtcagtagtgggaagcgggccagaagggcgtggccagaagaacgtggccagaaagaggtagcgagctt

SEQ ID NO: 89959 - DNA, 431 bp, Homo sapiens
gtgagaaattaaatttcaaaatgtaattattaaatgtatgcctgagtttcaaatgtttttctatatccagctaattaaaaatatttataacgtagtagtagttaaatgtcatgttcaccttattagaaagaatgccttcaaatcagtattatcatgattaccatttatttaacatcttcagtatgcagggcatttataaaatctgtagaaattaattttctctaaatgcaacaagctttatgaccagcactcactgtctataaaagatgacttgcttggcagaagaggaaacagtttcttcagaccttccagccacagtcagccctggtgacattgcatatcaggtaaacccccaatccctggccacatttgattggtccaagatggaatgtgacccaggctgagacaatcagactcagtctcttgataat

SEQ ID NO: 89960 - DNA, 526 bp, Homo sapiens
gtgagaaattaaatttcaaaatgtaattattaaatgtatgcctgagtttcaaatgtttttctatatccagctaattaaaaatatttataacgtagtagtagttaaatgtcatgttcaccttattagaaagaatgccttcaaatcagtattatcatgattaccatttatttaacatcttcagtatgcagggcatttataaaatctgtagaaattaattttctctaaatgcaacaagctttatgaccagcactcactgtctataaaagatgacttgcttggcagaagaggaaacagtttcttcagaccttccagccacagtcagccctggtgacattgcatatcagcttctaaagggcctcgcacattccttggcttgtgatgtcccttccccatcatcaaagacagcaacgaaacttcaggctaccatacctgcttcaactgtaggagaatcttagttctggagagttgaccctccaggcgaagcattaggctttgatacaatttgtctggtaccggctgtagatct

SEQ ID NO: 89961 - DNA, 161 bp, Homo sapiens
ttattttcatcctcataaattaagcagttttgtagcagaataattcagaagcagtaattgttagtttctatgcctagccaatatctaccctaatttcacaataatggttttaggattaaattttgtgagatttttccataatgctaaacatgtgtttattt

SEQ ID NO: 89962 - DNA, 1753 bp, Homo sapiens
  misc_feature (228)..(228): n is a, c, g, or t
  misc_feature (1749)..(1749): n is a, c, g, or t
  misc_feature (1751)..(1751): n is a, c, g, or t
caatttacattcgttttgggacctactgtaaaaaatactgtttatttatgtagctcctcacaattcctctggtcaaaataacaaaatatcccttgatgcatttattatcttgtggactgttttcttggagtctcctgattttcctcttcttatatgtttatccatttttactttaaatttatatttaaatgttgggcttcatctctctttatacatttcatgggtggnctcacttgttactattaatttacataggacctgcatgccaacaatctcaaatttacatctcagcccagacctcttttctgggatccagacttgtgtatccatacatctacttgatacctcctcttgtatgtcccagaaacatacaaacagaaatgttcaaacttggtgtgttgattcacccctgttctgtcagccaggtcttatttttttctattttttttttccaattgatagtatatggtgccaacattcacccagatagtcaaaccaataaatacacaagtaaagtaaaataaataactaaataaaactagaacatatcattgacttatttctcccatcatctgtatgcatatgcaatctattattaaatcctagtagtgctatcttgtaaaataattctccatatagccatctgttttcgtttgcttgcgctgccataacaaaatcctgggaggcttaaacaacagaaatctctttctcacacttctataggctgggaagttaaagatcaaggtgccagcatggtcagttcctcataagggtgttcttgctgacttgtagatgactatctttttggtgtgtccttacatcatggagagagcagtctggtatttctttctcttcttataaggatatcagtcctatcaaattaggaccccacctttctgacctcatttatcttcaattccctcctcacaggccatatgtgaggcagtaattgaaggcttcaatacatgaattttgtgggagccctctctctgtttccgcggccaccatccttgtcctaatcaccagcatctcttatctgtcaattcaacagactcttaattgtcttgctgctttcagtgttgctttctgcaatttgttttgtagtgagaaatcaaagtggtcttttaaaaatttaattacttaattttacttccctgcttaaatccttgaatggtttctcattgcactgtgaatgtaaacaaaatcctttagcagggcctctaagaccataccttattctccctctctgtcaaaaaacactggtgatactggccttctgccacattctagaataacataccacataccttttcacacaccaaattctcaaatctccttcccctgtacccggaatacaattctgtcagcacttcaccttggctacctctttgccatacttgtcatctcagctgaaacatcacttcatcagagaggtcttctccaattgctgaggggttgatggatgcagcaaaccaccatggcaggtgtatacctatgtaacaaacctacacattctgcacatgtatcccagacttaaagtataataacaaaaaaaaagaatctttaaaaaaataaaataaaaatagtaacaatagcagcagcagcagcagcagcagcaacagcagaaaatcaactggtcacctaaatcctataccataacatattgctagttcaagttcaatttaaacagacaaaaatatacaaactctgatttacaaaaaaatgaattttagggaataattttccacngnac

SEQ ID NO: 89963 - DNA, 338 bp, Homo sapiens
gttttaacagaaaaatataattcttttccttagcctcaatgactctgccctcttttgtctctaaatgctgagagttccttcatttcaatgttaaaacatttaatgttaagtgatttctaacctcatgtaaccaatctataaggaagtgggttcaggaacaatttaaatggcattctcaacaatgagcagcataataggaaacaggaagcaaagatgtcagatttctaagtgatgtttcatcttctcaagcatatgattcttggcagaacccaaccgatcttcagaaacgagaaaaaggtcaatctttctatgtgaaagcacttaactggaaaagaatt

SEQ ID NO: 89964 - DNA, 1234 bp, Homo sapiens
gaggaaagcccgagggttgtgggtcctgctatagccagggccaagctccaggaaatcgtggccattcaggggtagtttgcagcctcatttgtaacattattgtgttgtcctgtgcatttccaatgcattacataaagacatggtcgcttttaggagaaatgtctgaaaaactaagaagatgcagaaaggaactgactgcagccattgaccgggcctttgaaggagttagttattcccaggagtgcacaggccagcagaggctggaactgagcgccgcgccgctctccttctcgctgcccgtgcacaggctcctctgcagaagacatcctctggcagcctgctcttctgctgctccttttgctgctgtcccatgtgctcctgagaatgagaaccctgcctttgcaacaaaccatgccccggtaaatgcaaaaccacatgctctgtgccccgagagaaaacctctaaccagcaaggaaaatgtattgatgcattcctccattttggcacctgaaagagagtcttggagaactgcaggagagggggaaaactggagaaaagaaaatttaaggaaagatatggagagagatttgaaggctgactcaaacatgccactcaacaattctagccaagaggtcacaaaggatctgcttgatatgattgaccatacaagcatccgaactattgaagaattggctggaaaaatagaatttgaaaacgaattgaaccacatgtgtggtcattgccaagattcacccttcaaagaggaagcctgggccctgctcatggacaagagccctcagaaggccacagatgctgaccctggcagcctcaaacaggcttttgatgatcataatattgttgagactgttctggacttggaagaggactacaatgtgatgacgtcttttaaataccaaattgagtaaggacagttatctaagctttgattccttacagcaggaggctgcccttgagcctgagcagaagcagctacaatggccgtcaggggccacatttctcaaaaggttggcagaacctgaattaccagaccctttttaaatcccagttgtgtccctttttaagctgtgagaccagttttttgaattccattgctttgaaatgtttcctattactgatttttttttttaactttccttgacatcttgaatgtgtttttttgattgatgttcaatatacccagtacccatggtaggtgtgggtcatgggcctctgc

SEQ ID NO: 89965 - DNA, 927 bp, Homo sapiens
tggctgggcagcagtttattaccctaaagaccttgtttccttgtttttttttcacattgtgtcttgtcatccctgagagccaggacaaccatgtacatttctataccctcccacttatacctttcttggggactggcatatagttggaactcactaaatgcttgggcctgaaaggaaggtaccaaacccaccttaatttggcagtctggcagcctgcctgtcctggggcaggaatgcctgcttttacacaatccctgataaatgacaacccattcatggtttttaacttgcacctgaaatgtcttcagaaaccttccactggaattgtaaagctgaatgttcttatttttaagaccatacaagcatccgaactattgaagaattggctggaaaaatagaatttgaaaacgaattgaaccacatgtgtggtcattgccaagattcacccttcaaagaggaagcctgggccctgctcatggacaagagccctcagaaggccacagatgctgaccctggcagcctcaaacaggcttttgatgatcataatattgttgagactgttctggacttggaagaggactacaatgtgatgacgtcttttaaataccaaattgagtaaggacagttatctaagctttgattccttacagcaggaggctgcccttgagcctgagcagaagcagctacaatggccgtcaggggccacatttctcaaaaggttggcagaacctgaattaccagaccctttttaaatcccagttgtgtccctttttaagctgtgagaccagttttttgaattccattgctttgaaatgtttcctattactgatttttttttttaactttccttgacatcttgaatgtgtttttttgattgatgttcaatatacccagtacccatggtaggtgtgggtcatgggcctctgc

SEQ ID NO: 89966 - DNA, 916 bp, Homo sapiens
gaggaaagcccgagggttgtgggtcctgctatagccagggccaagctccaggaaatcgtggccattcaggggtagtttgcagcctcatttgtaacattattgtgttgtcctgtgcatttccaatgcattacataaagacatggtcgcttttaggagaaatgtctgaaaaactaagaagatgcagaaaggaactgactgcagccattgaccgggcctttgaaggagttagttattcccaggagtgcacaggccagcagaggctggaactgagcgccgcgccgctctccttctcgctgcccgtgcacaggctcctctgcagaagacatcctctggcagcctgctcttctgctgctccttttgctgctgtcccatgtgctcctgagaatgagaaccctgcctttgcaacaaaccatgccccggtaaatgcaaaaccacatgctctgtgccccgagagaaaacctctaaccagcaaggaaaatgtattgatgcattcctccattttggcacctgaaagagagtcttggagaactgcaggagagggggaaaactggagaaaagaaaatttaaggtgattctaattttgatggtttaacagctacaattaaggggattcttgtttctgaaaaagttgttgaagatcctagatttagttcatgacagtgctcttgcctcctcttggcagctctgtgactgcatttggggagttgacagacattcttcagaatctggcctaggaaacagttatattttgtgtatatgttccagttgaggggctagttgtcaatcgttgatgtcaaaaaccagtcatggaaaccactttgcagtacccaaaggggtagtggatgtaaaataaccgggttttaaaaataaccttattttttaagttgcagaaacaaaagtcttaattccatcttaa

SEQ ID NO: 89967 - DNA, 867 bp, Homo sapiens
atttccttcaccctgctataattttctggatcacatatgttgcctttaacattttccatattatttattttcccactgtatgtaaagcccaaggactttttttcactgctatatcccaagaacctaaaataaatctggcatgtggtaagcgtacaataaatatttgttgaattaatgaatggagaataatgaatgcatgatgaatggcttctctgggagaaataccttgaaggggggcaagagcagaaagaggaatatcagacgggacattcttcaagtcgagtgttgatagagtcttggactaggctagagccaacagaaatgaaaattagtcatttggtttgagatacatttttggaaggaggatgaacagaatatgcaggtggactggaatattgaagagaggggctgtggtaaatagcctccaaaatggccccaatggtccttgccttttggcatttgtgcctttttgtggtcccctcccacactgaacgatgcagatctgggtaatcagtatatattgcagaagtgattgtgtgtgacttccatggtgaggccataaatggcatggacacttctgccctgctctcttggacagcttattttgggagaggccagccgccatgtcatgaagacactcaagaagccctgtgaagaggaagcaaggcctgccaacaacagccagcaccaactttccagccaagggattgagccatctcacagtggatcctccagcccccaccaagccttcatatgaccaaaccaataccaacatgtaactgtgacctcatgtgagtccccaagccagaatacccatctcctgtctcagaaatgatgagaaataataaatatatgtgctcacacata

SEQ ID NO: 89968 - DNA, 623 bp, Homo sapiens
atggcactattgcagagaaaagttcaactgcctctaccctgacttaccattttatagaaggatgatgcccagaataacattatcttaaatactcccaagatttataagaaggccgaggatttctgcccagacacatgaaaataaggcagcgaaggaaaaaattaaagccagtactgctttttaaaacatgcggtttatatgtaagacttgcagaattaaaatcaacctcaacaaaattcaaggcagtcaaataatgttcttgaaaagtggttaccctctgagttacatttttaacattaacagacatggattttttgggaagtggatgctgtataacatttgtattctcagcattttctgtatttatttaagccagtttgttttccccagtgatcctatgtctttgagacctcgctcttgacaatggtggcttcaggagcaaggccccaaattgccaggcattgctattgtgttgaagccacgctgctgcttttccctcctcatatcctgagcatgctttattatttcttccatttataacctctagttctgctcccacaaaaccaaaattctctggggggtaaaaacttagctacaacattccctgaaatagcgattagatt

SEQ ID NO: 89969 - DNA, 336 bp, Homo sapiens
tgagccattattgtggattttaatggttcagtgattttaattgtggctttaactgcatttttctgatgattaataatattaagcatcgtttcctgtacttaatgaccgtttgtatattttcttttgagaagtgtctctgtaaatcatttgccctttttaatgaggttgtcatcctgttacttatttgtaaatgttttttacatattctagatttgtgtttcacaaccaaggaaatcttatccaccaaaggatatttgaaaatgtctagagacatttttggttgacacagttgagggaggcctgtacctgtctcccttcctcttttctccatctctc

SEQ ID NO: 89970 - DNA, 474 bp, Homo sapiens
gagaaagagggcagggtcgggcggtcgccagcgttcgccggcaggaaaggtgagggtacctgtgcagtcgggggaccccttgaaactttccggagttgcacgcagaggcaatccccgcggcccccaggcctgggttccggaacgccgaagcgacgccggtttgtggcttaacgtgcagctgatgatcagagtgagccctctcagatgctgctccgagcgcctgggaccaaggacacgtcgggattagaatgggccgacctcccctccccgctggggtgttgcatcggctcccagctgaagcctgacagcccttgggggagtcccccaggttgcctgagtagcgccccgttgtcgttcagtcccctccaactaggtgcagggacccagggaggcgcgcgaggaccgacccgtcaccgctcaaattacctcatcgcccagctccccgcccccttcccaaacctggaaggaaccttg

SEQ ID NO: 89971 - DNA, 321 bp, Homo sapiens
ctctttccctccctccctctctttctctcccagtttctttcccaactttttattttggaaaatttcaaacttgctggttgggagaattataaaacaaatttcaaacttgctggttgggagaattgtaaaacaaacactttatgtcctctgcctaaattcaccatttgttctacatttgcaacatttgctttattccctcttctaattatatatataaattatacatattatataaaattttgctgaaccatttaaaagtaccaaacatcttgacactttacctctaaatatttcaccacccgtcccctaagaataaggaca

SEQ ID NO: 89972 - DNA, 437 bp, Homo sapiens
aatttttgtatttttttgtagagacagtgttttgcaatgttgcccaggctggtctcgaactcctgggcttaatcgatccacctgccttggctcccagtgttgagattacaagcatgagccaccacacctgtcctgtctcatgggattgttagtggctttgtgtttccaaaccaaaaaaaaaaaaccacccagctaaattaaattcccctccacacagaacctggataaagttgtagaacagtggggcaatctcagctcattgcaaacttcacccaccaggttcaagcgattctcctgcctcagcctcccaaagttcagggattacaggcctgagccactacacctgggcccagaggctcttttctaagttttttttttttttgtcaatgtacaacatgctaaagagggaaatgggccccaataaatggttgatgttg

SEQ ID NO: 89973 - DNA, 648 bp, Homo sapiens
cagcctcccagagtgctgggattataggcgtgaggacaccatgcctggccatgacttctgatagggagtgctgatttaatggctttggaactaagcatctagcactctgtcttgggagctgcagagatctggtgtgcatacttggcagagatgctatgaatctgcctgcctttgaatggaccatatggatttagacaatggtcatcccaggagcaaccatgacagactgaagaccagagtctcttttttttttctctctttctttattttatttttgtattttttagaaatggggtctttctatgttgcccaggctggtctccaactcctgggctcaagtgatcctcccgccctcagcctcccaaagttcagggattacaggcctgagccactacacctgggcccagaggctcttttctaagttttttttttttttgtcaatgtacaacatgctaaagagggaaatgggccccaataaatggttgatgttggttgtctttccaccctagtaaatggggttttgagcccgagttaatttaatttagaaaaattaaataatgtgttgtttttttttttgctcctcagtgatgtggaacacatttatactctaacatttattatctcatttaatcttttttcttctttctt

SEQ ID NO: 89974 - DNA, 333 bp, Homo sapiens
caggttgttcttgctctcccttattttacatttatccttccttcccaactgcctgtccgatagatgtcgagtcccaacatcagatgtgaagatgagagctttatagagactgcttaaccagctcccacagttgtattaggacaaatccctgtagcaaatccctttgtgtgtgtgtgtgtgtgtgtgtgtgtgtgtatgtgtgtgtgtgtgcgcgcgcacgcgcgtgcacgcaccttagtggttctcctgtgattgaatcctgacttacacagtttgagatagaaaccttctgaagcaattagattaaatggtctataactgtgctgtccaaca

SEQ ID NO: 89975 - DNA, 333 bp, Homo sapiens
agaggatttttgtaatgcttcagtgctgaaagggctatatgggtcttttaataataataatcctgattatttttacatttttgttttttaatttcctccttcagatttctcttacagcctaagattggtaagaagaacactaatgtttcctgcaggagttgtctatgagatagcactaaagaaaaaaatgagaagaccaaaccggattttacaagcataaaataaacttgagacttagtttatcctctaaatcagtagttctcaaccaggagtgaatgtgcccttcagggggtatatgacatgtctggagatatttttgagaagccagagatg

SEQ ID NO: 89976 - DNA, 548 bp, Homo sapiens
attttgatcttttgaattatgattctcagggttttagactttaaggattctaatcttttgggatttcaatatttggaattttagagtttgagattgtgtgtttcaagattatggctcaaatccagtttaatctgctagcagacaatcccagagaggtaacaaataaaaagcaataatttctggcaacccagccaggctgcctttgtgtcattgtataaaacctgatgaatacaagatagtagacagtgatatgtcatacattaaattcaatgatgggccaggtgtggtggctcacgtttgtaatcccagcactttgggaggctgaggtggcagatctcttcagccaggagttcgagtcctgcctgagcaacttggcaaaacctcatttctacaaaagaatacaaacattaggctgggcacagtggtgcacacctgtaatcccagctactgaaaaggttgaggtgggaatattgcttgggcggtaaaggctgcagtgagccatgatggcaccgctacactccagcctgggcgacggagcaagaccctgt

SEQ ID NO: 89977 - DNA, 269 bp, Homo sapiens
ggcgcatgccaccacatctgggtaattttttgtatttttagtagagacggggtttcaccatgttggccacgctagtctcgaactcctgacctcgtaatccatccgccttggcctcccaaagtgctgggattacaggcatgagccaccgtgcccggcccaaagtcgttgagttttaagaataactatatattgagctatctgtttgcttatttttatagtaaacatatattttacatatagtaactctattacatacaacatatatattt

SEQ ID NO: 89978 - DNA, 370 bp, Homo sapiens
ccattcatttgtcttaagtgtatctttttctttatgtttaaagtgtcttgtagatagcatgtaattaggtcttcctttaccaattctgacaatccttgccttataattagagttcagtctgttaatgtaagagtaaatatcgatgtggcttgatttattgctaccattttattatttgccttttatttgtccttttggattttttccctgtttttcctttccttatcaatgaaatgtatttgagatttccattgtggtttatctaatgctttttaaagctattcttctttgaattattattttagtggttactctggtgtttgaaatatgcacccttggccaggtgcggtggctcacttctgtaatccca

SEQ ID NO: 89979 - DNA, 470 bp, Homo sapiens
ccggtccagatgaggcagagaacccaagtggatttggggagtagaaatcatacttttggctttcaataccacttatagtgaggctacttctccatggaaacaagtctctgaggcacaacctttatgaaaggaaggagcattcgttggtgagaagaacagtatcgctgacttcctgtgctcctctggccacaggtaactgttggtcacttcagatttggcttggggtctctcagtgaggagctgctgctgtgctgcttaatgcttacctgatggcaacttctggctctggaaccgctactctgccctgttcccagccacttcccaacctgattcaagcagggcccctccttcctcctgtctttatttatttatttattgagacagagtctcactctgtcgcccaggctggagtgcagtagcgcgatctcggctcactgcgagctctgcctcctgggttctctgcatcctct

SEQ ID NO: 89980 - DNA, 4451 bp, Homo sapiens
  misc_feature (4447)..(4451): n is a, c, g, or t
ggcggcatttcctggtgtctgagcctggcgcggaggctatgggcagccaggaggtgctgggccacgcggcccggctggcctcctccggtctcctcctgcaggtgttgtttcggttgatcacctttgtcttgaatgcatttattcttcgcttcctgtcaaaggaaatcgttggcgtagtaaatgtaagactaacgctgctttactcaaccaccctcttcctggccagagaggccttccgcagagcatgtctcagtgggggcacccagcgagactggagccagaccctcaacctgctgtggctaacagtccccctgggtgtgttttggtccttattcctgggctggatctggttgcagctgcttgaagtgcctgatcctaatgttgtccctcactatgcaactggagtggtgctgtttggtctctcggcagtggtggagcttctaggagagcccttttgggtcttggcacaagcacatatgtttgtgaagctcaaggtgattgcagagagcctgtcggtaattcttaagagcgttctgacagcttttctcgtgctgtggttgcctcactggggattgtacattttctctttggcccagcttttctataccacagttctggtgctctgctatgttatttatttcacaaagttactgggttccccagaatcaaccaagcttcaaactcttcctgtctccagaataacagatctgttacccaatattacaagaaatggagcgtttataaactggaaagaggctaaactgacttggagttttttcaaacagtctttcttgaaacagattttgacagaaggcgagcgatatgtgatgacatttttgaatgtattgaactttggtgatcagggtgtgtatgatatagtgaataatcttggctcccttgtggccagattaattttccagccaatagaggaaagtttttatatattttttgctaaggtgctggagaggggaaaggatgccacacttcagaagcaggaggacgttgctgtggctgctgcagtcttggagtccctgctcaagctggccctgctggccggcctgaccatcactgtttttggctttgcctattctcagctggctctggatatctacggagggaccatgcttagctcaggatccggtcctgttttgctgcgttcctactgtctctatgttctcctgcttgccatcaatggagtgacagagtgtttcacatttgctgccatgagcaaagaggaggtcgacaggtacaattttgtgatgctggccctgtcctcctcattcctggtgttatcctatctcttgacccgttggtgtggcagcgtgggcttcatcttggccaactgctttaacatgggcattcggatcacgcagagcctttgcttcatccaccgctactaccgaaggagcccccacaggcccctggctggcctgcacctatcgccagtcctgctcgggacatttgccctcagtggtggggttactgctgtttcggaggtattcctctgctgtgagcagggctggccagccagactggcacacattgctgtgggggccttctgtctgggagcaactctcgggacagcattcctcacagagaccaagctgatccatttcctcaggactcagttaggtgtgcccagacgcactgacaaaatgacatgacttcagggaagcctggacacccgaggcacctggaccagctatgggtagttctgtgggtggaacacattctgtgtaagagccccactgagggctctgcagcggagtgacagcaaccccagagatgaggcaccagagagtgccactgcatgagacacctgtgaccattcgaagtctgaaatgcggggggggagtttcatttttaagtgaagaccaaaagccctttaaaaataatagttttttatcattttatagtaatcagcattttctcttttactaatatactcattccttttgcgtatgattggcctttggagctacatgctccaacaaactgtatcttaattgttaactgttaataattatctggcccagaaaaagagatgcagtgattttacccttcacaggaatattgaacttcttctgtaaaagagagagagaaacctctctctttcatgcaccacatggaaacagagtgtggccctgaagttgtggctttctttgtgtcaaaactgtggtctgagtttttagagaaggaaaaatgctactcagtgagaaatccaagaaatgaaaccaggaaggttttcagatcacatttcccagagtgagttcgggagaatcttgcctgtcgtgatcacactgttccccgccgccccaggtcagcacatacttgacccagagtgggctctcaggatttgttgattgaagggtgggtgaaagctggctggagactcctggcctggccacctgcaagaggcggactttgaagaaaactgtgatccagttgagccactttgtccctgaggggaatgctgctttgcagctttctgtaacttctcacatgggaattgcactggtgacagataaggtttaacagatgtacttttttatcctcagaataagacaaggcaaactctatatggctagtattactgagtcaggtccctcccgttgacccattaattccagcattgatcaatacaaccaaattccagccccaggacaagagtggcaggcatgggggcctggtactccaggctacagtgtgagcccaggtgttctgcaccttgcagcctgcacactgcaggtgaaatcatgagcagtgttctggagtgtgaagtgtttttatttttttgttaatgtattaattccttttagatattaacccccctcagaactatatgcacaaactataacttggatgttaataatcctgtcactcagtgccccaaaccttctgtgtctacacctagagagagggccagtaagggcaactcctatcatgcattaaaatgcatgtatttaaatctgcttgcccagagccagtacccaggggctaaggattaagacctgtcagtacaccaagactggggcccagtcacctggcaggtttttatctactcagagggagaatgctttgcactaagtgggagaaaagcagctaaatgcaaggtgtcctgagcaattagaggacctccaaagcatggcctcagtcatgccttcatcgggcaaggtcaggccagctcagaaaaatggatggtcccatagggtcaagtggagcacacacggaaggcagtcctccttccctcccatgtcctttctctgtccctggcatccacagaaagggaccttcagtcctcatgagctgcttctctgcagctgctgatcaccctcccggaaccctgcacctatcccgtgcccacctgaccccagactcaagcatgatcctcattctacctgcctcggaatcacctggattgcaagtcagaacatggcttcccaggacccactccaggccttcagggtctgtgtctcccaggaggagggctctgagattggcttttctggcaagcccacgtggctttgatgccaccaaggttggcatgccccattgtcttccttcgtgacaggcccaggaccatcatgctcatgctcacagtgcctgttctctgctccaggaacagagctgctgctctacaagcagccttgtgactccggggtctctgggagcaggactccccaggcttgtgctctctcagcttgagagaggctctatgtctgaaggcagtgctcactctctcatccctcccctgctgttcgcccagtgctgctgtcagggccagctcctcttgaaagacagccagccgcaaaggcagcccagggcttcttccggtgtcctgcttccctgtatctagggagagttgtacatgtggctgcgtgttttcccaggactagccctgccgcctgggctgtcagcactttggcagcaggtcctctgtggttctctgcctctggtgcctccctaaagctcagctggacctgaccaggcctctggcatttcccctgctggaccccctagagccacagctgtgcctcagggagcttgcatacatgtgggccagcctgcctcactttacccaagtggatttggggagtagaaatcatacttttggctttcaataccacttatagtgaggctacttctccatggaaacaagtctctgaggcacaacctttatgaaaggaaggagcattcgttggtgagaagaacagtatcgctgacttcctgtgctcctctggccacaggtaactgttggtcacttcagatttggcttggggtctctcagtgaggagctgctgctgtgctgcttaatgcttacctgatggcaacttctggctctggaaccgctactctgccctgttcccagccacttcccaacctgattcaagcagggcccctccttccagcctgggcgacaaagcgagactccgtttccaaaaaaaannnnn

SEQ ID NO: 89981 - DNA, 4298 bp, Homo sapiens
  misc_feature (9)..(9): n is a, c, g, or t
  misc_feature (13)..(13): n is a, c, g, or t
  misc_feature (24)..(24): n is a, c, g, or t
  misc_feature (26)..(26): n is a, c, g, or t
  misc_feature (28)..(29): n is a, c, g, or t
  misc_feature (32)..(33): n is a, c, g, or t
  misc_feature (36)..(36): n is a, c, g, or t
  misc_feature (42)..(42): n is a, c, g, or t
  misc_feature (4294)..(4298): n is a, c, g, or t
gcagccagngagngcgctggtgcncntnnctnnttnttttgnttttctccggtcccctcctgcaggtgttgtttcggttgatcacctttgtcttgaatgcatttattcttcgcttcctgtcaaaggaaatcgttggcgtagtaaatgtaagagtccccctgggtgtgttttggtccttattcctgggctggatctggttgcagctgcttgaagtgcctgatcctaatgttgtccctcactatgcaactggagtggtgctgtttggtctctcggcagtggtggagcttctaggagagcccttttgggtcttggcacaagcacatatgtttgtgaagctcaaggtgattgcagagagcctgtcggtaattcttaagagcgttctgacagcttttctcgtgctgtggttgcctcactggggattgtacattttctctttggcccagcttttctataccacagttctggtgctctgctatgttatttatttcacaaagttactgggttccccagaatcaaccaagcttcaaactcttcctgtctccagaataacagatctgttacccaatattacaagaaatggagcgtttataaactggaaagaggctaaactgacttggagttttttcaaacagtctttcttgaaacagattttgacagaaggcgagcgatatgtgatgacatttttgaatgtattgaactttggtgatcagggtgtgtatgatatagtgaataatcttggctcccttgtggccagattaattttccagccaatagaggaaagtttttatatattttttgctaaggtgctggagaggggaaaggatgccacacttcagaagcaggaggacgttgctgtggctgctgcagtcttggagtccctgctcaagctggccctgctggccggcctgaccatcactgtttttggctttgcctattctcagctggctctggatatctacggagggaccatgcttagctcaggatccggtcctgttttgctgcgttcctactgtctctatgttctcctgcttgccatcaatggagtgacagagtgtttcacatttgctgccatgagcaaagaggaggtcgacaggtacaattttgtgatgctggccctgtcctcctcattcctggtgttatcctatctcttgacccgttggtgtggcagcgtgggcttcatcttggccaactgctttaacatgggcattcggatcacgcagagcctttgcttcatccaccgctactaccgaaggagcccccacaggcccctggctggcctgcacctatcgccagtcctgctcgggacatttgccctcagtggtggggttactgctgtttcggaggtattcctctgctgtgagcagggctggccagccagactggcacacattgctgtgggggccttctgtctgggagcaactctcgggacagcattcctcacagagaccaagctgatccatttcctcaggactcagttaggtgtgcccagacgcactgacaaaatgacatgacttcagggaagcctggacacccgaggcacctggaccagctatgggtagttctgtgggtggaacacattctgtgtaagagccccactgagggctctgcagcggagtgacagcaaccccagagatgaggcaccagagagtgccactgcatgagacacctgtgaccattcgaagtctgaaatgcggggggggagtttcatttttaagtgaagaccaaaagccctttaaaaataatagttttttatcattttatagtaatcagcattttctcttttactaatatactcattccttttgcgtatgattggcctttggagctacatgctccaacaaactgtatcttaattgttaactgttaataattatctggcccagaaaaagagatgcagtgattttacccttcacaggaatattgaacttcttctgtaaaagagagagagaaacctctctctttcatgcaccacatggaaacagagtgtggccctgaagttgtggctttctttgtgtcaaaactgtggtctgagtttttagagaaggaaaaatgctactcagtgagaaatccaagaaatgaaaccaggaaggttttcagatcacatttcccagagtgagttcgggagaatcttgcctgtcgtgatcacactgttccccgccgccccaggtcagcacatacttgacccagagtgggctctcaggatttgttgattgaagggtgggtgaaagctggctggagactcctggcctggccacctgcaagaggcggactttgaagaaaactgtgatccagttgagccactttgtccctgaggggaatgctgctttgcagctttctgtaacttctcacatgggaattgcactggtgacagataaggtttaacagatgtacttttttatcctcagaataagacaaggcaaactctatatggctagtattactgagtcaggtccctcccgttgacccattaattccagcattgatcaatacaaccaaattccagccccaggacaagagtggcaggcatgggggcctggtactccaggctacagtgtgagcccaggtgttctgcaccttgcagcctgcacactgcaggtgaaatcatgagcagtgttctggagtgtgaagtgtttttatttttttgttaatgtattaattccttttagatattaacccccctcagaactatatgcacaaactataacttggatgttaataatcctgtcactcagtgccccaaaccttctgtgtctacacctagagagagggccagtaagggcaactcctatcatgcattaaaatgcatgtatttaaatctgcttgcccagagccagtacccaggggctaaggattaagacctgtcagtacaccaagactggggcccagtcacctggcaggtttttatctactcagagggagaatgctttgcactaagtgggagaaaagcagctaaatgcaaggtgtcctgagcaattagaggacctccaaagcatggcctcagtcatgccttcatcgggcaaggtcaggccagctcagaaaaatggatggtcccatagggtcaagtggagcacacacggaaggcagtcctccttccctcccatgtcctttctctgtccctggcatccacagaaagggaccttcagtcctcatgagctgcttctctgcagctgctgatcaccctcccggaaccctgcacctatcccgtgcccacctgaccccagactcaagcatgatcctcattctacctgcctcggaatcacctggattgcaagtcagaacatggcttcccaggacccactccaggccttcagggtctgtgtctcccaggaggagggctctgagattggcttttctggcaagcccacgtggctttgatgccaccaaggttggcatgccccattgtcttccttcgtgacaggcccaggaccatcatgctcatgctcacagtgcctgttctctgctccaggaacagagctgctgctctacaagcagccttgtgactccggggtctctgggagcaggactccccaggcttgtgctctctcagcttgagagaggctctatgtctgaaggcagtgctcactctctcatccctcccctgctgttcgcccagtgctgctgtcagggccagctcctcttgaaagacagccagccgcaaaggcagcccagggcttcttccggtgtcctgcttccctgtatctagggagagttgtacatgtggctgcgtgttttcccaggactagccctgccgcctgggctgtcagcactttggcagcaggtcctctgtggttctctgcctctggtgcctccctaaagctcagctggacctgaccaggcctctggcatttcccctgctggaccccctagagccacagctgtgcctcagggagcttgcatacatgtgggccagcctgcctcactttacccaagtggatttggggagtagaaatcatacttttggctttcaataccacttatagtgaggctacttctccatggaaacaagtctctgaggcacaacctttatgaaaggaaggagcattcgttggtgagaagaacagtatcgctgacttcctgtgctcctctggccacaggtaactgttggtcacttcagatttggcttggggtctctcagtgaggagctgctgctgtgctgcttaatgcttacctgatggcaacttctggctctggaaccgctactctgccctgttcccagccacttcccaacctgattcaagcagggcccctccttccagcctgggcgacaaagcgagactccgtttccaaaaaaaannnnn

SEQ ID NO: 89982 - DNA, 3774 bp, Homo sapiens
  misc_feature (3770)..(3774): n is a, c, g, or t
atgaggccgtgggtttaatcggccgaggagattgttaccaatattacaagaaatggagcgtttataaactggaaagaggctaaactgacttggagttttttcaaacagtctttcttgaaacagattttgacagaaggcgagcgatatgtgatgacatttttgaatgtattgaactttggtgatcagggtgtgtatgatatagtgaataatcttggctcccttgtggccagattaattttccagccaatagaggaaagtttttatatattttttgctaaggtgctggagaggggaaaggatgccacacttcagaagcaggaggacgttgctgtggctgctgcagtcttggagtccctgctcaagctggccctgctggccggcctgaccatcactgtttttggctttgcctattctcagctggctctggatatctacggagggaccatgcttagctcaggatccggtcctgttttgctgcgttcctactgtctctatgttctcctgcttgccatcaatggagtgacagagtgtttcacatttgctgccatgagcaaagaggaggtcgacaggtacaattttgtgatgctggccctgtcctcctcattcctggtgttatcctatctcttgacccgttggtgtggcagcgtgggcttcatcttggccaactgctttaacatgggcattcggatcacgcagagcctttgcttcatccaccgctactaccgaaggagcccccacaggcccctggctggcctgcacctatcgccagtcctgctcgggacatttgccctcagtggtggggttactgctgtttcggaggtattcctctgctgtgagcagggctggccagccagactggcacacattgctgtgggggccttctgtctgggagcaactctcgggacagcattcctcacagagaccaagctgatccatttcctcaggactcagttaggtgtgcccagacgcactgacaaaatgacatgacttcagggaagcctggacacccgaggcacctggaccagctatgggtagttctgtgggtggaacacattctgtgtaagagccccactgagggctctgcagcggagtgacagcaaccccagagatgaggcaccagagagtgccactgcatgagacacctgtgaccattcgaagtctgaaatgcggggggggagtttcatttttaagtgaagaccaaaagccctttaaaaataatagttttttatcattttatagtaatcagcattttctcttttactaatatactcattccttttgcgtatgattggcctttggagctacatgctccaacaaactgtatcttaattgttaactgttaataattatctggcccagaaaaagagatgcagtgattttacccttcacaggaatattgaacttcttctgtaaaagagagagagaaacctctctctttcatgcaccacatggaaacagagtgtggccctgaagttgtggctttctttgtgtcaaaactgtggtctgagtttttagagaaggaaaaatgctactcagtgagaaatccaagaaatgaaaccaggaaggttttcagatcacatttcccagagtgagttcgggagaatcttgcctgtcgtgatcacactgttccccgccgccccaggtcagcacatacttgacccagagtgggctctcaggatttgttgattgaagggtgggtgaaagctggctggagactcctggcctggccacctgcaagaggcggactttgaagaaaactgtgatccagttgagccactttgtccctgaggggaatgctgctttgcagctttctgtaacttctcacatgggaattgcactggtgacagataaggtttaacagatgtacttttttatcctcagaataagacaaggcaaactctatatggctagtattactgagtcaggtccctcccgttgacccattaattccagcattgatcaatacaaccaaattccagccccaggacaagagtggcaggcatgggggcctggtactccaggctacagtgtgagcccaggtgttctgcaccttgcagcctgcacactgcaggtgaaatcatgagcagtgttctggagtgtgaagtgtttttatttttttgttaatgtattaattccttttagatattaacccccctcagaactatatgcacaaactataacttggatgttaataatcctgtcactcagtgccccaaaccttctgtgtctacacctagagagagggccagtaagggcaactcctatcatgcattaaaatgcatgtatttaaatctgcttgcccagagccagtacccaggggctaaggattaagacctgtcagtacaccaagactggggcccagtcacctggcaggtttttatctactcagagggagaatgctttgcactaagtgggagaaaagcagctaaatgcaaggtgtcctgagcaattagaggacctccaaagcatggcctcagtcatgccttcatcgggcaaggtcaggccagctcagaaaaatggatggtcccatagggtcaagtggagcacacacggaaggcagtcctccttccctcccatgtcctttctctgtccctggcatccacagaaagggaccttcagtcctcatgagctgcttctctgcagctgctgatcaccctcccggaaccctgcacctatcccgtgcccacctgaccccagactcaagcatgatcctcattctacctgcctcggaatcacctggattgcaagtcagaacatggcttcccaggacccactccaggccttcagggtctgtgtctcccaggaggagggctctgagattggcttttctggcaagcccacgtggctttgatgccaccaaggttggcatgccccattgtcttccttcgtgacaggcccaggaccatcatgctcatgctcacagtgcctgttctctgctccaggaacagagctgctgctctacaagcagccttgtgactccggggtctctgggagcaggactccccaggcttgtgctctctcagcttgagagaggctctatgtctgaaggcagtgctcactctctcatccctcccctgctgttcgcccagtgctgctgtcagggccagctcctcttgaaagacagccagccgcaaaggcagcccagggcttcttccggtgtcctgcttccctgtatctagggagagttgtacatgtggctgcgtgttttcccaggactagccctgccgcctgggctgtcagcactttggcagcaggtcctctgtggttctctgcctctggtgcctccctaaagctcagctggacctgaccaggcctctggcatttcccctgctggaccccctagagccacagctgtgcctcagggagcttgcatacatgtgggccagcctgcctcactttacccaagtggatttggggagtagaaatcatacttttggctttcaataccacttatagtgaggctacttctccatggaaacaagtctctgaggcacaacctttatgaaaggaaggagcattcgttggtgagaagaacagtatcgctgacttcctgtgctcctctggccacaggtaactgttggtcacttcagatttggcttggggtctctcagtgaggagctgctgctgtgctgcttaatgcttacctgatggcaacttctggctctggaaccgctactctgccctgttcccagccacttcccaacctgattcaagcagggcccctccttccagcctgggcgacaaagcgagactccgtttccaaaaaaaannnnn

SEQ ID NO: 89983 - DNA, 299 bp, Homo sapiens
cattaggaagaacagccacattgttctcatttcagctaagtaaacacttctaacgtcatttattcttacgtatttttcctctttttctataggtgttgtttcggttgatcacctttgtcttgaatgcatttattcttcgcttcctgtcaaaggaaatcgttggcgtagtaaatgtaaggtaggaggagatgcaccctggcactgtcagagttcaccttcctagccaggctttcttcaaactctgtacctgtttgtcatccttggattctagaagcatggacctttatcagaagcagaat

SEQ ID NO: 89984 - DNA, 475 bp, Homo sapiens
tactgtgtgggcccccaagggacagcagcaattctttaggggtctcagtatatgagtcttgggcaggcccttacagactttggctttgtgtttagtaatgtaaattcttctccagtgtttgtgagatgccttctgtgtgcttagcattggatgaggattcagtggagactatccaagttgggatttagagaccagattgcatttgcctctcatgtagcattgcattcttagacttgcaacgcctgtgatgtttttgttttgttttgttttctcttctaggcgtttataaactggaaagaggctaaactgacttggagttttttcaaacagtctttcttgaaacagattttgacagaaggtaagtagacggtcactctgaatcgtcgggagaccatagtagaaggggatttcataggactgccaattacctgggtccagaccacctgtccagagcctctggggcagaagaatttca

SEQ ID NO: 89985 - DNA, 384 bp, Homo sapiens
gaggaaggaggtatagactgaggaacaggcactgacaatggtttctttccccaggtattcctctgctgtgagcagggctggccagccagactggcacacattgctgtgggggccttctgtctgggagcaactctcgggacagcattcctcacagagaccaagctgatccatttcctcaggactcagttaggtgtgcccagacgcactgacaaaatgacatgacttcagggaagcctggacacccgaggcacctggaccagctatgggtagttctgtgggtggaacacattctgtgtaagagccccactgagggctctgcagcggagtgacagcaaccccagagatgaggcaccagagagtgccactgcatgagacacctgtgac

SEQ ID NO: 89986 - DNA, 854 bp, Homo sapiens
ggcggcatttcctggtgtctgagcctggcgcggaggctatgggcagccaggaggtgctgggccacgcggcccggctggcctcctccggtctcctcctgcaggtgttgtttcggttgatcacctttgtcttgaatgcatttattcttcgcttcctgtcaaaggaaatcgttggcgtagtaaatgtaagagtccccctgggtgtgttttggtccttattcctgggctggatctggttgcagctgcttgaagtgcctgatcctaatgttgtccctcactatgcaactggagtggtgctgtttggtctctcggcagtggtggagcttctaggagagcccttttgggtcttggcacaagcacatatgtttgtgaagctcaaggtgattgcagagagcctgtcggtaattcttaagagcgttctgacagcttttctcgtgctgtggttgcctcactggggattgtacattttctctttggcccagcttttctataccacagttctggtgctctgctatgttatttatttcacaaagttactgggttccccagaatcaaccaagcttcaaactcttcctgtctccagaataacagatctgttacccaatattacaagaaatggagcgtttataaactggaaagaggctaaactgacttggagttttttcaaacagtctttcttgaaacagattttgacagaaggggagcgatatgtggatgacctttttgaatgtcttggactttgggaccacggcggggttaaataacgaaaaacctgggccatggtggcgcaaataaaattccacgcaagaaggaaaggtaaatacgggaaagggcggagaggaagagccccttaagag

SEQ ID NO: 89987 - DNA, 4248 bp, Homo sapiens
  misc_feature (4244)..(4248): n is a, c, g, or t
ggcggcatttcctggtgtctgagcctggcgcggaggctatgggcagccaggaggtgctgggccacgcggcccggctggcctcctccggtctcctcctgcagagtccccctgggtgtgttttggtccttattcctgggctggatctggttgcagctgcttgaagtgcctgatcctaatgttgtccctcactatgcaactggagtggtgctgtttggtctctcggcagtggtggagcttctaggagagcccttttgggtcttggcacaagcacatatgtttgtgaagctcaaggtgattgcagagagcctgtcggtaattcttaagagcgttctgacagcttttctcgtgctgtggttgcctcactggggattgtacattttctctttggcccagcttttctataccacagttctggtgctctgctatgttatttatttcacaaagttactgggttccccagaatcaaccaagcttcaaactcttcctgtctccagaataacagatctgttacccaatattacaagaaatggagcgtttataaactggaaagaggctaaactgacttggagttttttcaaacagtctttcttgaaacagattttgacagaaggcgagcgatatgtgatgacatttttgaatgtattgaactttggtgatcagggtgtgtatgatatagtgaataatcttggctcccttgtggccagattaattttccagccaatagaggaaagtttttatatattttttgctaaggtgctggagaggggaaaggatgccacacttcagaagcaggaggacgttgctgtggctgctgcagtcttggagtccctgctcaagctggccctgctggccggcctgaccatcactgtttttggctttgcctattctcagctggctctggatatctacggagggaccatgcttagctcaggatccggtcctgttttgctgcgttcctactgtctctatgttctcctgcttgccatcaatggagtgacagagtgtttcacatttgctgccatgagcaaagaggaggtcgacaggtacaattttgtgatgctggccctgtcctcctcattcctggtgttatcctatctcttgacccgttggtgtggcagcgtgggcttcatcttggccaactgctttaacatgggcattcggatcacgcagagcctttgcttcatccaccgctactaccgaaggagcccccacaggcccctggctggcctgcacctatcgccagtcctgctcgggacatttgccctcagtggtggggttactgctgtttcggaggtattcctctgctgtgagcagggctggccagccagactggcacacattgctgtgggggccttctgtctgggagcaactctcgggacagcattcctcacagagaccaagctgatccatttcctcaggactcagttaggtgtgcccagacgcactgacaaaatgacatgacttcagggaagcctggacacccgaggcacctggaccagctatgggtagttctgtgggtggaacacattctgtgtaagagccccactgagggctctgcagcggagtgacagcaaccccagagatgaggcaccagagagtgccactgcatgagacacctgtgaccattcgaagtctgaaatgcggggggggagtttcatttttaagtgaagaccaaaagccctttaaaaataatagttttttatcattttatagtaatcagcattttctcttttactaatatactcattccttttgcgtatgattggcctttggagctacatgctccaacaaactgtatcttaattgttaactgttaataattatctggcccagaaaaagagatgcagtgattttacccttcacaggaatattgaacttcttctgtaaaagagagagagaaacctctctctttcatgcaccacatggaaacagagtgtggccctgaagttgtggctttctttgtgtcaaaactgtggtctgagtttttagagaaggaaaaatgctactcagtgagaaatccaagaaatgaaaccaggaaggttttcagatcacatttcccagagtgagttcgggagaatcttgcctgtcgtgatcacactgttccccgccgccccaggtcagcacatacttgacccagagtgggctctcaggatttgttgattgaagggtgggtgaaagctggctggagactcctggcctggccacctgcaagaggcggactttgaagaaaactgtgatccagttgagccactttgtccctgaggggaatgctgctttgcagctttctgtaacttctcacatgggaattgcactggtgacagataaggtttaacagatgtacttttttatcctcagaataagacaaggcaaactctatatggctagtattactgagtcaggtccctcccgttgacccattaattccagcattgatcaatacaaccaaattccagccccaggacaagagtggcaggcatgggggcctggtactccaggctacagtgtgagcccaggtgttctgcaccttgcagcctgcacactgcaggtgaaatcatgagcagtgttctggagtgtgaagtgtttttatttttttgttaatgtattaattccttttagatattaacccccctcagaactatatgcacaaactataacttggatgttaataatcctgtcactcagtgccccaaaccttctgtgtctacacctagagagagggccagtaagggcaactcctatcatgcattaaaatgcatgtatttaaatctgcttgcccagagccagtacccaggggctaaggattaagacctgtcagtacaccaagactggggcccagtcacctggcaggtttttatctactcagagggagaatgctttgcactaagtgggagaaaagcagctaaatgcaaggtgtcctgagcaattagaggacctccaaagcatggcctcagtcatgccttcatcgggcaaggtcaggccagctcagaaaaatggatggtcccatagggtcaagtggagcacacacggaaggcagtcctccttccctcccatgtcctttctctgtccctggcatccacagaaagggaccttcagtcctcatgagctgcttctctgcagctgctgatcaccctcccggaaccctgcacctatcccgtgcccacctgaccccagactcaagcatgatcctcattctacctgcctcggaatcacctggattgcaagtcagaacatggcttcccaggacccactccaggccttcagggtctgtgtctcccaggaggagggctctgagattggcttttctggcaagcccacgtggctttgatgccaccaaggttggcatgccccattgtcttccttcgtgacaggcccaggaccatcatgctcatgctcacagtgcctgttctctgctccaggaacagagctgctgctctacaagcagccttgtgactccggggtctctgggagcaggactccccaggcttgtgctctctcagcttgagagaggctctatgtctgaaggcagtgctcactctctcatccctcccctgctgttcgcccagtgctgctgtcagggccagctcctcttgaaagacagccagccgcaaaggcagcccagggcttcttccggtgtcctgcttccctgtatctagggagagttgtacatgtggctgcgtgttttcccaggactagccctgccgcctgggctgtcagcactttggcagcaggtcctctgtggttctctgcctctggtgcctccctaaagctcagctggacctgaccaggcctctggcatttcccctgctggaccccctagagccacagctgtgcctcagggagcttgcatacatgtgggccagcctgcctcactttacccaagtggatttggggagtagaaatcatacttttggctttcaataccacttatagtgaggctacttctccatggaaacaagtctctgaggcacaacctttatgaaaggaaggagcattcgttggtgagaagaacagtatcgctgacttcctgtgctcctctggccacaggtaactgttggtcacttcagatttggcttggggtctctcagtgaggagctgctgctgtgctgcttaatgcttacctgatggcaacttctggctctggaaccgctactctgccctgttcccagccacttcccaacctgattcaagcagggcccctccttccagcctgggcgacaaagcgagactccgtttccaaaaaaaannnnn

SEQ ID NO: 89988 - DNA, 3448 bp, Homo sapiens
  misc_feature (12)..(12): n is a, c, g, or t
  misc_feature (3444)..(3448): n is a, c, g, or t
ttaactgtccanagtgccacatgcctacgattgaaatgaaaactctattgttacctctgagttgtgtccacggaaaatgctatccagcagatcatttaggaaaaataattctatttttagcttttcatttctcagctgtcctgttttgctgcgttcctactgtctctatgttctcctgcttgccatcaatggagtgacagagtgtttcacatttgctgccatgagcaaagaggaggtcgacaggtacaattttgtgatgctggccctgtcctcctcattcctggtgttatcctatctcttgacccgttggtgtggcagcgtgggcttcatcttggccaactgctttaacatgggcattcggatcacgcagagcctttgcttcatccaccgctactaccgaaggagcccccacaggcccctggctggcctgcacctatcgccagtcctgctcgggacatttgccctcagtggtggggttactgctgtttcggaggtattcctctgctgtgagcagggctggccagccagactggcacacattgctgtgggggccttctgtctgggagcaactctcgggacagcattcctcacagagaccaagctgatccatttcctcaggactcagttaggtgtgcccagacgcactgacaaaatgacatgacttcagggaagcctggacacccgaggcacctggaccagctatgggtagttctgtgggtggaacacattctgtgtaagagccccactgagggctctgcagcggagtgacagcaaccccagagatgaggcaccagagagtgccactgcatgagacacctgtgaccattcgaagtctgaaatgcggggggggagtttcatttttaagtgaagaccaaaagccctttaaaaataatagttttttatcattttatagtaatcagcattttctcttttactaatatactcattccttttgcgtatgattggcctttggagctacatgctccaacaaactgtatcttaattgttaactgttaataattatctggcccagaaaaagagatgcagtgattttacccttcacaggaatattgaacttcttctgtaaaagagagagagaaacctctctctttcatgcaccacatggaaacagagtgtggccctgaagttgtggctttctttgtgtcaaaactgtggtctgagtttttagagaaggaaaaatgctactcagtgagaaatccaagaaatgaaaccaggaaggttttcagatcacatttcccagagtgagttcgggagaatcttgcctgtcgtgatcacactgttccccgccgccccaggtcagcacatacttgacccagagtgggctctcaggatttgttgattgaagggtgggtgaaagctggctggagactcctggcctggccacctgcaagaggcggactttgaagaaaactgtgatccagttgagccactttgtccctgaggggaatgctgctttgcagctttctgtaacttctcacatgggaattgcactggtgacagataaggtttaacagatgtacttttttatcctcagaataagacaaggcaaactctatatggctagtattactgagtcaggtccctcccgttgacccattaattccagcattgatcaatacaaccaaattccagccccaggacaagagtggcaggcatgggggcctggtactccaggctacagtgtgagcccaggtgttctgcaccttgcagcctgcacactgcaggtgaaatcatgagcagtgttctggagtgtgaagtgtttttatttttttgttaatgtattaattccttttagatattaacccccctcagaactatatgcacaaactataacttggatgttaataatcctgtcactcagtgccccaaaccttctgtgtctacacctagagagagggccagtaagggcaactcctatcatgcattaaaatgcatgtatttaaatctgcttgcccagagccagtacccaggggctaaggattaagacctgtcagtacaccaagactggggcccagtcacctggcaggtttttatctactcagagggagaatgctttgcactaagtgggagaaaagcagctaaatgcaaggtgtcctgagcaattagaggacctccaaagcatggcctcagtcatgccttcatcgggcaaggtcaggccagctcagaaaaatggatggtcccatagggtcaagtggagcacacacggaaggcagtcctccttccctcccatgtcctttctctgtccctggcatccacagaaagggaccttcagtcctcatgagctgcttctctgcagctgctgatcaccctcccggaaccctgcacctatcccgtgcccacctgaccccagactcaagcatgatcctcattctacctgcctcggaatcacctggattgcaagtcagaacatggcttcccaggacccactccaggccttcagggtctgtgtctcccaggaggagggctctgagattggcttttctggcaagcccacgtggctttgatgccaccaaggttggcatgccccattgtcttccttcgtgacaggcccaggaccatcatgctcatgctcacagtgcctgttctctgctccaggaacagagctgctgctctacaagcagccttgtgactccggggtctctgggagcaggactccccaggcttgtgctctctcagcttgagagaggctctatgtctgaaggcagtgctcactctctcatccctcccctgctgttcgcccagtgctgctgtcagggccagctcctcttgaaagacagccagccgcaaaggcagcccagggcttcttccggtgtcctgcttccctgtatctagggagagttgtacatgtggctgcgtgttttcccaggactagccctgccgcctgggctgtcagcactttggcagcaggtcctctgtggttctctgcctctggtgcctccctaaagctcagctggacctgaccaggcctctggcatttcccctgctggaccccctagagccacagctgtgcctcagggagcttgcatacatgtgggccagcctgcctcactttacccaagtggatttggggagtagaaatcatacttttggctttcaataccacttatagtgaggctacttctccatggaaacaagtctctgaggcacaacctttatgaaaggaaggagcattcgttggtgagaagaacagtatcgctgacttcctgtgctcctctggccacaggtaactgttggtcacttcagatttggcttggggtctctcagtgaggagctgctgctgtgctgcttaatgcttacctgatggcaacttctggctctggaaccgctactctgccctgttcccagccacttcccaacctgattcaagcagggcccctccttccagcctgggcgacaaagcgagactccgtttccaaaaaaaannnnn

SEQ ID NO: 89989 - DNA, 391 bp, Homo sapiens
tccttcgacctattttatttacagacagggtcttgctctttcatccagcctagagtacagtggatgatcataactaactgtagccttgaactcctgggttcaagagatcctcctgtctcactctcctgagtagctagaaccacaggtgtgtgccaccacgccaggctattaaaaaaaaacaaagacaaagacaaaaacaaaaacaaaacttttttgtagagacagggtctcactatgcagccaggctggtctcaaattcctggcctcaagtgagcctcccacctcatccttccaaagcactgggattacagaagtgaaccaccacgcctggcctactttttttttttttttgagatagtcttgctctattacccaggctggtgtgcagtcg

SEQ ID NO: 89990 - DNA, 414 bp, Homo sapiens
agcctgggcaacaagagtgaaactctgtctcaaaatatataaaagacaacaatactctccaaacggatcaaaaaactcaatgcaatccccatcaaaattccagctagtgtttttgcagaaattgacaacctgatcctaaaattcacaaggaaacacaaaggacccagattgtttgacccagggtcaaacagtcttttaaaaagaagaacaaattagaggattcatacttcctgatttcaaaacttcagggctacagtgatgaagacagcggggcactgtcagaaggacacgcagagaccggtgggttcactcagagtccggaaataaacccacacgcctgtgggcaactgatttcaacaaggatgtcagatcactcaatggggaaagaacagtcttttcaacaaggggtgcgga

SEQ ID NO: 89991 - DNA, 528 bp, Homo sapiens
gacccaaggcaatgtggagacagagagctgacagccctcctatcatccccatcagtgaagccaccttggtccatccagagcaggccatcaaccagctgagtcccactgagggacccccatcaatgccaggaaagcagaacgcccagccagctgagccctgcctaaacggctgactgcaaagttatgagatagaataaagaggttgtcatttatgccactgagcttggggcagttagttttgcaacaatagagaactgacacactaactgttctgcctaaagaagagccatggaccatatgtggtctctgagacactgtgactctgagtcatggagctccaaaatcaacaagggtcaggcccttctaatttaactctcactctggcttgataaaacccagatagatgaggctaagacaggggtgtaagactaaaaatcccaaattaattgacttaaaaatttcatttcatccccactgaaatgtactcctaaatgccccctaagggaaggaaaaatggaaaaaattaaa

SEQ ID NO: 89992 - DNA, 295 bp, Homo sapiens
tttgtgtccatactagagctctctgagcttttccggcaccagaagagcaccagaatgatgtgtttagggggcactgaagacatgaaaattctcttcctgtaacgtaatgaaaatttaactattgtataaatattttaagtacaggaagtgaagcagagctttggagaggtgtcctttctgagcaaaacctgcgtggaactggagatttaaattaaagtaacagaaaacaataaaaaaatttggatgattactccttcctttgattttcatctcacagaatgggaattcatataat

SEQ ID NO: 89993 - DNA, 437 bp, Homo sapiens
gtccgacgatcaggcgaccccaaaatgaccaaggggaaatacactttttaggaggatggggttgcagctttaccaaggaggatagaccgtaaaattactatcctggagatacttctttagggatttggagtaaaaataatatttttaagattcgtggacgttaaaagtaccctagcttgctttctatgttatgcctgtcgcctcaaaagaagctctcctgtggaacccccacctcacataggaaaactcagcagggaatgggctcagtgattcttacctattggaactagatgacacaggccaaggagcccggagcatttgtgaaactccagccagcaagttgcatcaaggttttagttagcagagcttggcattgtgcctttatcacatgtctggatgagatgtgtgctggtggtaaatgtgtcctactgggcccc

SEQ ID NO: 89994 - DNA, 2337 bp, Homo sapiens
agcggaagtgggcagagcggggaaggctgagtccacactgcaagtccagagagcagggaactaccttgagtattctactcaaacttatgtctcagagttccccaatttcccaagaagggagagatagaggccacaatccaggggccatctcttaaggtaccaataattttgcagcccagtaggagtcatgtacacggtataagacttggaggaaatgcagggacccttctgttttctcctgcaaagttgaaaaagctgcatgcagttggaagggatcttcagatggtgctggtgactttctgttccttttggagttgacatgcatgtggattggaggaaaaataatcaacatatattctcctttcgtactgtttaaatcacaggaagaagcggctttaagacaaagatcaaaccaaaatgacaactgctcacttttactgtcaatactgcacagcatcacttcttgggaagaaatatgtactaaaggatgacagtccatactgtgttacatgttatgatcgtgtattttctaactattgcgaggaatgcaaaaaaccaattgaatctgattctaaggatctttgttacaaagaccggcactggcatgaaggatgcttcaagtgcaccaaatgcaatcactctttggtggaaaagccttttgctgccaaggatgagcgcctgctgtgcacggagtgctattctaacgagtgctcctccaagtgcttccactgcaagaggaccatcatgcctggttcccgcaaaatggaatttaagggaaactactggcatgaaacctgtttgtgtgtgagaattgccgacaacctatagggacaaagcctttgatctccaaagagagtggcaattattgtgtgccatgttttgagaaggagtttgctcactactgcaacttttgtaagaaggtgataacttcaggtgggataacattttgtgaccagctatggcataaagagtgttttctgtgtagtggctgtaggaaagatctctgtgaagaacagttcatgtccagagacgactatccattctgcatggactgctacaaccatctttatgccaacaagtgtgtagcctgttccaaacccattagtggtctcacaggtgccaagtttatctgctttcaagacagccagtggcatagcgaatgctttaactgcgggaaatgctctgtctccttggtgggtaaaggcttcctgacccagaacaaggaaatcttctgccaaaaatgtggctccggaatggacactgacatctaggagacagtccttgcccacctaaaatccattttgccttcgttgtcactaaagccagaactcagttgcggtcttatttttgacttaagttttagaaaatattcatgtagtttagagtggaaaagtttttgcacacattttgatcgaactatattctaagcacacaaaaagcacagtagaacagaaatgaatatatgctaaatcacaaagacaactctccttgcaaaatactgcactctgctgttagaagcagaggaaaatatctcttcataatcaaatatatgacatatacctaggagctgtggatgtaattactgaagaatgaggtttttcatacctgaagagtaaaagaaaaactaagagatcaaactgagaggtatacatgaggctagtgtttgcattcctggttatatgtaatgtgataaattagctatgaatggtaaaagaacaaaactgatcagagtaaattcattagcaattatcacatttaagaattgttatcatttaaaaatcatcctttttttcacacatactgactgtagaattaaaaaacaaagctacaatttgccctcatacacactgcttccacagcttgctagttctgtgtttactcaatggaatatgagaactgaggacattatggctctcataatctgcataggtataaagaggatcatttctacctagggatagccaaagcatgggtttcaacacgttttgtattaaatatattttcaaagtccacagtgatttttctaaacgcttacagattccatgaaataaaagtctattctttcaagtggagctaaccaggataatctttgtccccaaaggcaaacctttaaaataaatagatcattaaatcttcacttgtggaaatgagttttagggaagggattgagtcttggaacatgactttcatccagatatctaacgacataatagaatgcataattagctctgtgcctcatgcattattgccttctaaaattacataaatgattaatgggcagacataaaagtgggctttaaagaaatctagaaataataaaaacagatgctgaaaaag

SEQ ID NO: 89995 - DNA, 2437 bp, Homo sapiens
agcggaagtgggcagagcggggaaggctgagtccacactgcaagtccagagagcagggaactaccttgagtattctactcaaacttatgtctcagagttccccaatttcccaagaagggagagatagaggccacaatccaggggccatctcttaaggtaccaataattttgcagcccagtaggagtcatgtacacggtataagacttggaggaaatgcagggacccttctgttttctcctgcaaagttgaaaaagctgcatgcagttggaagggatcttcagatggtgctggtgactttctgttccttttggagttgacatgcatgtggattggaggaaaaataatcaacatatattctcctttcgtactgtttaaatcacaggaagaagcggctttaagacaaaaggccaggcgcggtggctcacgcctgtaatcccagcacttcgggaggccgaggtgagcggatcttgaggtcaggagattgagaccatcctggccaacacggatcaaaccaaaatgacaactgctcacttttactgtcaatactgcacagcatcacttcttgggaagaaatatgtactaaaggatgacagtccatactgtgttacatgttatgatcgtgtattttctaactattgcgaggaatgcaaaaaaccaattgaatctgattctaaggatctttgttacaaagaccggcactggcatgaaggatgcttcaagtgcaccaaatgcaatcactctttggtggaaaagccttttgctgccaaggatgagcgcctgctgtgcacggagtgctattctaacgagtgctcctccaagtgcttccactgcaagaggaccatcatgcctggttcccgcaaaatggaatttaagggaaactactggcatgaaacctgtttgtgtgtgagaattgccgacaacctatagggacaaagcctttgatctccaaagagagtggcaattattgtgtgccatgttttgagaaggagtttgctcactactgcaacttttgtaagaaggtgataacttcaggtgggataacattttgtgaccagctatggcataaagagtgttttctgtgtagtggctgtaggaaagatctctgtgaagaacagttcatgtccagagacgactatccattctgcatggactgctacaaccatctttatgccaacaagtgtgtagcctgttccaaacccattagtggtctcacaggtgccaagtttatctgctttcaagacagccagtggcatagcgaatgctttaactgcgggaaatgctctgtctccttggtgggtaaaggcttcctgacccagaacaaggaaatcttctgccaaaaatgtggctccggaatggacactgacatctaggagacagtccttgcccacctaaaatccattttgccttcgttgtcactaaagccagaactcagttgcggtcttatttttgacttaagttttagaaaatattcatgtagtttagagtggaaaagtttttgcacacattttgatcgaactatattctaagcacacaaaaagcacagtagaacagaaatgaatatatgctaaatcacaaagacaactctccttgcaaaatactgcactctgctgttagaagcagaggaaaatatctcttcataatcaaatatatgacatatacctaggagctgtggatgtaattactgaagaatgaggtttttcatacctgaagagtaaaagaaaaactaagagatcaaactgagaggtatacatgaggctagtgtttgcattcctggttatatgtaatgtgataaattagctatgaatggtaaaagaacaaaactgatcagagtaaattcattagcaattatcacatttaagaattgttatcatttaaaaatcatcctttttttcacacatactgactgtagaattaaaaaacaaagctacaatttgccctcatacacactgcttccacagcttgctagttctgtgtttactcaatggaatatgagaactgaggacattatggctctcataatctgcataggtataaagaggatcatttctacctagggatagccaaagcatgggtttcaacacgttttgtattaaatatattttcaaagtccacagtgatttttctaaacgcttacagattccatgaaataaaagtctattctttcaagtggagctaaccaggataatctttgtccccaaaggcaaacctttaaaataaatagatcattaaatcttcacttgtggaaatgagttttagggaagggattgagtcttggaacatgactttcatccagatatctaacgacataatagaatgcataattagctctgtgcctcatgcattattgccttctaaaattacataaatgattaatgggcagacataaaagtgggctttaaagaaatctagaaataataaaaacagatgctgaaaaag

SEQ ID NO: 89996 - DNA, 2106 bp, Homo sapiens
agcggaagtgggcagagcggggaaggctgagtccacactgcaagtccagagagcagggaactaccttgagtattctactcaaacttatgtctcagagttccccaatttcccaagaagggagagatagaggccacaatccaggggccatctcttaaggtaccaataattttgcaggatcaaaccaaaatgacaactgctcacttttactgtcaatactgcacagcatcacttcttgggaagaaatatgtactaaaggatgacagtccatactgtgttacatgttatgatcgtgtattttctaactattgcgaggaatgcaaaaaaccaattgaatctgattctaaggatctttgttacaaagaccggcactggcatgaaggatgcttcaagtgcaccaaatgcaatcactctttggtggaaaagccttttgctgccaaggatgagcgcctgctgtgcacggagtgctattctaacgagtgctcctccaagtgcttccactgcaagaggaccatcatgcctggttcccgcaaaatggaatttaagggaaactactggcatgaaacctgtttgtgtgtgagaattgccgacaacctatagggacaaagcctttgatctccaaagagagtggcaattattgtgtgccatgttttgagaaggagtttgctcactactgcaacttttgtaagaaggtgataacttcaggtgggataacattttgtgaccagctatggcataaagagtgttttctgtgtagtggctgtaggaaagatctctgtgaagaacagttcatgtccagagacgactatccattctgcatggactgctacaaccatctttatgccaacaagtgtgtagcctgttccaaacccattagtggtctcacaggtgccaagtttatctgctttcaagacagccagtggcatagcgaatgctttaactgcgggaaatgctctgtctccttggtgggtaaaggcttcctgacccagaacaaggaaatcttctgccaaaaatgtggctccggaatggacactgacatctaggagacagtccttgcccacctaaaatccattttgccttcgttgtcactaaagccagaactcagttgcggtcttatttttgacttaagttttagaaaatattcatgtagtttagagtggaaaagtttttgcacacattttgatcgaactatattctaagcacacaaaaagcacagtagaacagaaatgaatatatgctaaatcacaaagacaactctccttgcaaaatactgcactctgctgttagaagcagaggaaaatatctcttcataatcaaatatatgacatatacctaggagctgtggatgtaattactgaagaatgaggtttttcatacctgaagagtaaaagaaaaactaagagatcaaactgagaggtatacatgaggctagtgtttgcattcctggttatatgtaatgtgataaattagctatgaatggtaaaagaacaaaactgatcagagtaaattcattagcaattatcacatttaagaattgttatcatttaaaaatcatcctttttttcacacatactgactgtagaattaaaaaacaaagctacaatttgccctcatacacactgcttccacagcttgctagttctgtgtttactcaatggaatatgagaactgaggacattatggctctcataatctgcataggtataaagaggatcatttctacctagggatagccaaagcatgggtttcaacacgttttgtattaaatatattttcaaagtccacagtgatttttctaaacgcttacagattccatgaaataaaagtctattctttcaagtggagctaaccaggataatctttgtccccaaaggcaaacctttaaaataaatagatcattaaatcttcacttgtggaaatgagttttagggaagggattgagtcttggaacatgactttcatccagatatctaacgacataatagaatgcataattagctctgtgcctcatgcattattgccttctaaaattacataaatgattaatgggcagacataaaagtgggctttaaagaaatctagaaataataaaaacagatgctgaaaaag

SEQ ID NO: 89997 - DNA, 1188 bp, Homo sapiens
agcggaagtgggcagagcggggaaggctgagtccacactgcaagtccagagagcagggaactaccttgagtattctactcaaacttatgtctcagagttccccaatttcccaagaagggagagatagaggccacaatccaggggccatctcttaaggtaccaataattttgcagcccagtaggagtcatgtacacggtataagacttggaggaaatgcagggacccttctgttttctcctgcaaagttgaaaaagctgcatgcagttggaagggatcttcagatggtgctggtgactttctgttccttttggagttgacatgcatgtggattggaggaaaaataatcaacatatattctcctttcgtactgtttaaatcacaggaagaagcggctttaagacaaagtgagttctttcccccaaatatttcctttgttttgttttgtggtattttgacttctctaatttttttttaaggatgagaaatttttataaactttccagtaactacttaagagaaaacttttgcttggcaaaagtgtatgccttttgaagtttcttagccattttagctaaaggttatcaaattttatatgctgagcttttcagatttctcattcttataacttgcatgtggaggtaacataggggccagataactccttggaattgcctcttgagtttttctaatggtcttaatgtggggtatagctttattgttgtaaaaagaggaagaagaggagggctcttgagattttatttggcttaatttatttgaatgaataacattatcactgagcatattttatgactagatttatatttcaagagcacattttgaagtcacttacaggttttaagtaaaaggagttaatgagattcctgctattttcaagaaaaatctgcctactttccagaagtgggcatacaaaaattcataatctttaattttctaaggttaaattaaaatatctgtgtttccagcccacagaaatatataatagactatatcaatctaaagtgctacttcttgaaacagaggtagtgttattcaggcaaaaagcatacatcccatatgtgttaatgctttctctctcactattttagtcatatcctctttggtacctatcattcatttgaaaaccaaatgcagctcctcagctgtcatttcagactttagaaaattgg

SEQ ID NO: 89998 - DNA, 2213 bp, Homo sapiens
atttgttactcatagttttaagtaaaaattgacaaatagtgctttttcagcccagtaggagtcatgtacacggtataagacttggaggaaatgcagggacccttctgttttctcctgcaaagttgaaaaagctgcatgcagttggaagggatcttcagatggtgctggtgactttctgttccttttggagttgacatgcatgtggattggaggaaaaataatcaacatatattctcctttcgtactgtttaaatcacaggaagaagcggctttaagacaaagatcaaaccaaaatgacaactgctcacttttactgtcaatactgcacagcatcacttcttgggaagaaatatgtactaaaggatgacagtccatactgtgttacatgttatgatcgtgtattttctaactattgcgaggaatgcaaaaaaccaattgaatctgattctaaggatctttgttacaaagaccggcactggcatgaaggatgcttcaagtgcaccaaatgcaatcactctttggtggaaaagccttttgctgccaaggatgagcgcctgctgtgcacggagtgctattctaacgagtgctcctccaagtgcttccactgcaagaggaccatcatgcctggttcccgcaaaatggaatttaagggaaactactggcatgaaacctgtttgtgtgtgagaattgccgacaacctatagggacaaagcctttgatctccaaagagagtggcaattattgtgtgccatgttttgagaaggagtttgctcactactgcaacttttgtaagaaggtgataacttcaggtgggataacattttgtgaccagctatggcataaagagtgttttctgtgtagtggctgtaggaaagatctctgtgaagaacagttcatgtccagagacgactatccattctgcatggactgctacaaccatctttatgccaacaagtgtgtagcctgttccaaacccattagtggtctcacaggtgccaagtttatctgctttcaagacagccagtggcatagcgaatgctttaactgcgggaaatgctctgtctccttggtgggtaaaggcttcctgacccagaacaaggaaatcttctgccaaaaatgtggctccggaatggacactgacatctaggagacagtccttgcccacctaaaatccattttgccttcgttgtcactaaagccagaactcagttgcggtcttatttttgacttaagttttagaaaatattcatgtagtttagagtggaaaagtttttgcacacattttgatcgaactatattctaagcacacaaaaagcacagtagaacagaaatgaatatatgctaaatcacaaagacaactctccttgcaaaatactgcactctgctgttagaagcagaggaaaatatctcttcataatcaaatatatgacatatacctaggagctgtggatgtaattactgaagaatgaggtttttcatacctgaagagtaaaagaaaaactaagagatcaaactgagaggtatacatgaggctagtgtttgcattcctggttatatgtaatgtgataaattagctatgaatggtaaaagaacaaaactgatcagagtaaattcattagcaattatcacatttaagaattgttatcatttaaaaatcatcctttttttcacacatactgactgtagaattaaaaaacaaagctacaatttgccctcatacacactgcttccacagcttgctagttctgtgtttactcaatggaatatgagaactgaggacattatggctctcataatctgcataggtataaagaggatcatttctacctagggatagccaaagcatgggtttcaacacgttttgtattaaatatattttcaaagtccacagtgatttttctaaacgcttacagattccatgaaataaaagtctattctttcaagtggagctaaccaggataatctttgtccccaaaggcaaacctttaaaataaatagatcattaaatcttcacttgtggaaatgagttttagggaagggattgagtcttggaacatgactttcatccagatatctaacgacataatagaatgcataattagctctgtgcctcatgcattattgccttctaaaattacataaatgattaatgggcagacataaaagtgggctttaaagaaatctagaaataataaaaacagatgctgaaaaag

SEQ ID NO: 89999 - DNA, 447 bp, Homo sapiens
ctgtaacaaatacggccaccggacaaaggaccttgtgtgtctttttaaaggaacaatttggagcttttctgagctgcgtgaccacgggcacatcacgtagctccttgaagccttagtttcctcttctgtaaaatgggcacagtcatgataaccttctaggttgctggggtcattcattaagttgatgtcagcagagcatttatcacagagctggcttattgaagctgccatcgtgatctgatgacatttagggtcctctgcttaaagccctccaagggctcccccctcactcgggtaaaatcaccagaaaggccatgcaggacacacccccgctcctgctggcattaggtctgccccctccaccccggtcttcatttcctatgactgctgtaatacatgactgcagacttagtgccttagaatgacacatatttattcttttaaggt

SEQ ID NO: 90000 - DNA, 338 bp, Homo sapiens
ttctcttgtgttctcatgttccatcctcatacagattccaggacccaggtcagttgatacccacatatcacagaagaggacactgagcctggagaaggaaggcggcttgtcccaggtcacatagctagagaccaaactagatggaaagtgccagtctttctctgacagcacatgacccaggagaggctctgccacatatcctgatgggctgccccatgggagctaccagggcagatctgagagttctcctgggctccccccacattacacagctgtttcccagggggcttcctcccagccctttgatgtgaatgtagccacattgccccctcacctga

SEQ ID NO: 90001 - DNA, 1421 bp, Homo sapiens
aagccgcggcggccgccacttcctttccgcctcgccggtagggctcgcccaccgagtgaagccggccgcggccaatcgcggcgcccgcctgctcccagtggcacggcctgggggccggcgtccgccggggctggggaagccgttccaagttccaagggtcgcgggtgtaactcatgcccctcccagcacgcgccggcgtctccccttggcccccggtctgggtgcgtttgccaccctctcctccttgttccctaagaagcgggggaggggaaggaggcgggcagcctgggcagggcgccagagccgtggtcgggcaccaggtgaaacgcccgggtcagtctgtgtaggccggacccttggcgctcggctgcggatgtgatcccggggactggcggccgaggtagctcagaagagcgaggtggctttcgctcgtttctgacccgctactgtctgaaacttggggacatattgcccgccccctccctcttcaacctcctccctccggttgctccttgtccttggttatggaaggaaaaaactcagttgttctaaatgaggaaaagtggtgctggcattcgtcttcagccaccggcctccttatggctgtgactcggtctgcttttgatgaatggccaggaggtatggaggatagttagatttcctgttgtggattttcaggcatcaccgagactcctgtcaagcctgcagtcatttactagttttcatatcgactgcaggttctctttgagcagttcagtttttggtgcttaagggcaggtgcacaacggggtctggggttagaccaggcggtggatagtcttgatgctaggcagatgcagttatccctaccaggcccagagggtgactctgtttaacttcaccacgcacgcagattcaggattctctgatttccccaactttcctttattcttcttttagtgggagaaggggcaaaagtagaaacctaaaaaatcctgggaaaaggagccttttctgaggaaacttcagcagatgaaatatttaagacttgaactgggatctctagggggaacgttggaacatctattgattgatgtgtcaaagtccggaatttcactgtaattagtgaacgattataacttgtaactttgtctgttatgtaagaaattacattttggtctcttagatccaagagttcttgtctgttacgatttgtaactgcttgttaaaattaaacatttacatatttcattctcagtgagttgtcatttttttgttagagaaagttccagttatttcagatttacttacctgtaaaaatgtcagcataatcaaaagtaaggatctgtagtcaaactggaagcaaattatggcaaacacatgcgtgccatgaagttctgacagccttatgaacaatggtcccacttttatcccactttctg

SEQ ID NO: 90002 - DNA, 612 bp, Homo sapiens
ggctggaggagtgtggcgtgggagcggcgtattgatctagaaaccaaaaccccggggcctgacaaaaacttagaggcctggaggcagaagaacaaaatcccacactccctctggaggctctgggggagggcccttccctgccccttcctgcgtctggcggccccgaatccctggtgtttcttgaccactcgcgacctcctccgctttcgtatgcccgcccccatccgggtgtctgtcctttctgtctcttacaaggacactctcactggacttgaggcccctcaaatccaggatggcctcgtccccatccttaccattatgagatcaacaaagacctgtttccgaatgagatcacctttgaagctccaggcaatatgaatttgagggggacaatattcagctactacggagggcagacgcactcacgggagatgagaaacgcgggtgggcagggggtcggtgaggcccaggcatactggctgagggcacgactaggcgggattccaggacacccagtgcctggaagtgaccgcagcccaggaccctctgccggctgcccacggagctgcagcggcctgccagggagtggccctgctggggccgcggccgcat

SEQ ID NO: 90003 - DNA, 149 bp, Homo sapiens
actgcactccagcctgggcaaaagggcgagactccatcttaaaaaaaaaaaaaagttgcttctctgaaaaattcaacataattcacaaaactttagctagaatgaccaagaaaaagagaaaaatgaccccacttaccaaaatttattag

SEQ ID NO: 90004 - DNA, 192 bp, Homo sapiens
ggagaaggagatgggggccctaggggataatggagagagaggtcgggtctcccaaccaaggaaactggaaaagagtgccaccctcgcccgcgtcgcctgtggcctcttccacggactgagagaagggatggaaccctagaggaaagaagggagtctgggtctcgcttccccggggagaagatcccttccctg

SEQ ID NO: 90005 - DNA, 1057 bp, Homo sapiens
taaatgcaccaatatattttcatctaaatattgcaggtttggctacagaccttgatgtgtgtataatgaaacttgaaaggtctcagaggaaggaacagtggtgtagtggacgcaggggacagctgttccctgttgggagacaattctgcatgggccctttgtatttctgcacatcttgcaagtagagacactaactgcatttgtgctggattagattttcaagtaaactgctttggaagatgatagtgtctccctctatagcatgagcaggtttgtttgctcttaaacatgataataacttctgctggggcaaaggtaaggccgacttaactgaccattataaaagattcatgttggggattcgtttttgtaacacaacccgtgtgtgtgtgtgggtatgtgtgtgtgtaagtgtgttcgtgcgtgcttgcaggtgtcatctgccccccttcttatttttctatgggaattgggaatctggtgcaaatgctgatactgtagctactgctattgctgtgagtaataaactaggctttgtctctaacccaagagtcttgtgtcttttgccagcattcatgaaactgtggtagactaatttgttaacctgcaaataggggaaaaatctcacatccttcgcaggtcttgacatgagtcaagtgacaaaccaaaaaatggggactttttagttgagaaagacaaagaccaaaggggtagaggataaggctgaagtatataaaatcaacaaaagtaaacttggttgtattcaccagtcttgaatatcaagtgaagggatgaatccctgatgtttgagagaggtaagtttatgtcaatagaaaggaatttcttcacatacaggatactaaccttatagaacttaccatctcaataaatggtgctggctgaaactacaaattattttataaaaggcctcactaaagtgatggatgacaaacctagaatgcccagttcaatacgtattggatgaccgagtgtttgccaagtgaccatctataagatgatctcattatctgtgtcagagaagaactactgggaaaaa

SEQ ID NO: 90006 - DNA, 427 bp, Homo sapiens
tccgggtccccaggctcaactatcagccgccttctcatcccaagggctgtcaccaccagaaatttaacatgctgttagtgcatgcaaaaaaaagcccagtaattgtagggctcatcagtacattgttaattgatcctcatttcctattattttacctcaaagccaacacatcattcaccatagtgacaccagagttgtttatcttctctgtgcaagtgtgtgctctttttagcaagctttttggatcctctgtttcagagggcctttcccatctgtttactattgtggactgtgctgctttttttgtttttaattacaggttatataaaatattgtcagcaggagggaggttattattaccttaaagaataagtggtagatgcggactggccactgtgagcccatcactaaaatgcacttccgtaca

SEQ ID NO: 90007 - DNA, 179 bp, Homo sapiens
gaagaagaccctgtctccaaacaaataataataaatcaagacctaaaggacaagaagacgtttgccatttgcagagctggagaaaagcatggtggcacaggaagtggcatgtgcaaaggtcctggggcagggaagaagtcagcattcttccctcattctcgtctttgcaaaggtcctgg

SEQ ID NO: 90008 - DNA, 148 bp, Homo sapiens
cttctctgacatcatctcctaccactttctccccgactcactctgctccacccaaagtggacttcttgatgttgcccaagccaggaatgctcccacctcggcatctctgcgctggctgctccctttgcctagactgtctgtgttcccc

SEQ ID NO: 90009 - DNA, 389 bp, Homo sapiens
ttttttgtagttttagtagagacggggtttcaccatgttggccaggctggtcttgaactcctgacctcaggtgatctgcccgccttggccttctaaagtgctgggattataggtttgagccaccgtgcccggcccttttaagtcttattgcagtggttattaaatacagttagtaaatacatttgtctttggtttcacatagtataaaaaatactaacagttttattcatcagtagttctgtgagcctcattaatattttgatttattttatcttatgtagtgtttactttttgttcatagatattgaagcaatgggaaataatttctaagtaactacatgtatcaggtaatttgaagacattgataatgaaagtggtatatgtgtacc

SEQ ID NO: 90010 - DNA, 279 bp, Homo sapiens
tctgaataaaatataagggtaagtcttcatgaccctggatatgtcaatgaattcttagatttgataacaaatgcatgaggaattttttttaaatagataaatagttcttcataaaaattaaaaacttttggccaggcatggtggctcacacctgtaatcccagcactttgggaggccgaggtgggcagattacctgaggtcaggaattcaagactagcctggccaacatggtgaaaccccatctctactaaaaatacaaaaattaggcaggtgtggtgg

SEQ ID NO: 90011 - DNA, 597 bp, Homo sapiens
tagagacagggtctcactatgttgcccagactagagtgcagtggctattcataggtgctatcccactactgatcagcaagggagttttgacctgctccatttctgacctgggtcacttcatccctccttaggcaacctggtggtcccccactcctgagaggttatcatattgatgctggtttggacacccaattggcatagcacactactgcccagaacccctgggttcaagccatcctcacacctcagcctcctgagtagttgggactacaggcatgaaccaccgtgcctagcgaatttcctccttttataaagacaccaatcatattggatcaaggtccactctactgacctcattttagcttgattagctctgtagagatcccatctctaaataaggtcacaatctgaggtgctggggattaggacttcaacatatgaatttgaggacagagataattcaatgcacaataatcagaaaatgtgcatatttatgagttcataattatacagaaatgcctactttatcacgtttaatagggggaaagggtgggtatcaatgtatgtatatggtaagacttctattttttctttttt

SEQ ID NO: 90012 - DNA, 246 bp, Homo sapiens
taaaatgatgctaagatttacatttattaacatggaaagatgccaaaaatattgctgcttaggaaaaaattaaaagcatggttccatgtgcataatataaaactgcatatagcatggcattggcggaaaataaatacccatgacatgtaacactctgggtatacacagcactggatggcctacttatagataaacgaatgctccaggcttatgttccacccctactctcattgtatctttcttctt

SEQ ID NO: 90013 - DNA, 390 bp, Homo sapiens
tggggccccaacaccctgcagtacctaaactgccctgatggttggttcacacagaccacatgatggtgagaggccctcacagcactgaatccagaaacaggagccagagaacctagggactgtcataccattttgaaaagaggcaccactctcgctgaacttcttttctctgccacctccctataaccttgatagtgagtgctagtgtcctggattctgatcagctgtaagcatcagcctccctataaccttgatagtaagtgctagtgtcctgggttctgatcagctgtaagcatcagcctccctataaccttgatagtaagtgctagtgtcctgggttctgatcagctgtaagcatcagccacaaaggactatgcccttgacaggctt

SEQ ID NO: 90014 - DNA, 3142 bp, Homo sapiens
  misc_feature (2057)..(2057): n is a, c, g, or t
agtttcactttcccttttgtaacgtcagctgaagggaaacaaacaaaaaggaaccagaggccacttgtatatataggtctcttcagcatttattggtggcagaagaggaagatttctgaagagtgcagctgcctgaaccgagccctgccgaacagctgagaattgcactgcaaccatgagtgagaacaataagaattccttggagagcagcctacggcaactaaaatgccatttcacctggaacttgatggagggagaaaactccttggatgattttgaagacaaagtattttaccggactgagtttcagaatcgtgaattcaaagccacaatgtgcaacctactggcctatctaaagcacctcaaagggcaaaacgaggcagccctggaatgcttacgtaaagctgaagagttaatccagcaagagcatgctgaccaggcagaaatcagaagtctggtcacctggggaaactatgcctgggtctactatcacatgggccgactctcagacgttcagatttatgtagacaaggtgaaacatgtctgtgagaagttttccagtccctatagaattgagagtccagagcttgactgtgaggaagggtggacacggttaaagtgtggaggaaaccaaaatgaaagagcgaaggtgtgctttgagaaggctctggaaaagaagccaaagaacccagaattcacctctggactggcaatagcaagctaccgtctggacaactggccaccatctcagaacgccattgaccctctgaggcaagccattcggctgaatcctgacaaccagtaccttaaagtcctcctggctctgaagcttcataagatgcgtgaagaaggtgaagaggaaggtgaaggagagaagttagttgaagaagccttggagaaagccccaggtgtaacagatgtacttcgcagtgcagccaagttttatcgaagaaaagatgagccagacaaagcgattgaactgcttaaaaaggctttagaatacataccaaacaatgcctacctgcattgccaaattgggtgctgctatagggcaaaagtcttccaagtaatgaatctaagagagaatggaatgtatgggaaaagaaagttactggaactaataggacacgctgtggctcatctgaagaaagctgatgaggccaatgataatctcttccgtgtctgttccattcttgccagcctccatgctctagcagatcagtatgaagaagcagagtattacttccaaaaggaattcagtaaagagcttactcctgtagcgaaacaactgctccatctgcggtatggcaactttcagctgtaccaaatgaagtgtgaagacaaggccatccaccactttatagagggtgtaaaaataaaccagaaatcaagggagaaagaaaagatgaaagacaaactgcaaaaaattgccaaaatgcgactttctaaaaatggagcagattctgaggctttgcatgtcttggcattccttcaggagctgaatgaaaaaatgcaacaagcagatgaagactctgagaggggtttggagtctggaagcctcatcccttcagcatcaagctggaatggggaatgaagaatagagatgtggtgcccactaggctactgctgaaagggagctgaaattcctccaccaagttggtattcaaaatatgtaatgactggtatggcaaaagattggactaagacactggccataccactggacagggttatgttaacacctgaattgctgggtcttgagagagcccaaggagttctgggagagggaccagattggggggtaggtccacgggcttggtgatagaattatttctcgattgacttcttgagtgcaatttgaactgtaacatttgcttagtcacctttagtggagtaatctactgggcttgtttctatatttatataaagcagccaaatccttcatgtaatattgaagtccatttttgcaatgttgttccatacttggagtcattttgcatcccatagaggttagtcctgcatagccagtaatgtgctaagttcatccaaaagctggnggaccaaagtctaaatagggctcagtatcccccatcgcttatctctgcctccttcctcctccttcccagtctatcatcaaccttgagtattctacacaatgtgaattcaagtgcctgattaattgaggtggcaacatagtttgagacgagggcagagaacaggaagatacatagctagaagcgacgggtacaaaaagcaatgtgtacaagaagactttcagcaagtatacagagagttcacctctactctgccctcctcatagtcataatgtagcaagtaaagaatgagaatggattctgtacaatacactagaaaccaacataatgtatttctttaaaacctgtgtgaaaaaataaatgttccaccagtagggataggggaaaagtaaccaaaagagagaaagagaaaggaatgctggtttatctttgtagattgtaatcgaatggagaaatttgcagtattttagccactattaggaatttttttttttttgtaaaatgaagactgaactctgttcaaatgctttcatgaacctggtttgagacggtaggaaagcaacaaaacgtgggaacctggtgactaagggcctggtgcaaggacttgggaaatgtcattgataatagatggtggggttttcccccctttagaaatgttggatattaagtgatataaacacttcttttaactccgaaaatcttctgagaaatcacaaaattcacggtatgcttggaacgattgagattttctaggtagatgctgaatagcctagacatcaaagttggtgtgaaccaaaatagagtcagctgacccagcatcagccacactctgggttggaaaatgtttgcctgttggaattaatttaagcttaagtatatatcaacattattttattgtgcaattaaaacaatacaaattcatggttttttaaagttaaaaattctaaccactgtaacaacagtttttgtgttattttctgtattaaacatcttgttgcacgcatttgaggtcatcagggtgcaaaatttgtattcctgaaaatgtcatatattttcattaataaataacctaaatatgataaaacata

SEQ ID NO: 90015 - DNA, 3095 bp, Homo sapiens
  misc_feature (2010)..(2010): n is a, c, g, or t
agtttcactttcccttttgtaacgtcagctgaagggaaacaaacaaaaaggaaccagaggccacttgtatatataggtctcttcagcatttattggtggcagaagaggaagatttctgaagagtgcagctgcctgaaccgagccctgccgaacagctgagaattgcactgcaaccatgagtgagaacaataagaattccttggagagcagcctacggcaactaaaatgccatttcacctggaacttgatggagggagaaaactccttggatgattttgaagacaaagtattttaccggactgagtttcagaatcgtgaattcaaagccacaatgtgcaacctactggcctatctaaagcacctcaaagggcaaaacgaggcagccctggaatgcttacgtaaagctgaagagttaatccagcaagagcatgctgaccaggcagaaatcagaagtctggtcacctggggaaactatgcctgggtctactatcacatgggccgactctcagacgttcagatttatgtagacaaggtgaaacatgtctgtgagaagttttccagtccctatagaattgagagtccagagcttgactgtgaggaagggtggacacggttaaagtgtggaggaaaccaaaatgaaagagcgaaggtgtgctttgagaaggctctggaaaagacgtctggacaactggccaccatctcagaacgccattgaccctctgaggcaagccattcggctgaatcctgacaaccagtaccttaaagtcctcctggctctgaagcttcataagatgcgtgaagaaggtgaagaggaaggtgaaggagagaagttagttgaagaagccttggagaaagccccaggtgtaacagatgtacttcgcagtgcagccaagttttatcgaagaaaagatgagccagacaaagcgattgaactgcttaaaaaggctttagaatacataccaaacaatgcctacctgcattgccaaattgggtgctgctatagggcaaaagtcttccaagtaatgaatctaagagagaatggaatgtatgggaaaagaaagttactggaactaataggacacgctgtggctcatctgaagaaagctgatgaggccaatgataatctcttccgtgtctgttccattcttgccagcctccatgctctagcagatcagtatgaagaagcagagtattacttccaaaaggaattcagtaaagagcttactcctgtagcgaaacaactgctccatctgcggtatggcaactttcagctgtaccaaatgaagtgtgaagacaaggccatccaccactttatagagggtgtaaaaataaaccagaaatcaagggagaaagaaaagatgaaagacaaactgcaaaaaattgccaaaatgcgactttctaaaaatggagcagattctgaggctttgcatgtcttggcattccttcaggagctgaatgaaaaaatgcaacaagcagatgaagactctgagaggggtttggagtctggaagcctcatcccttcagcatcaagctggaatggggaatgaagaatagagatgtggtgcccactaggctactgctgaaagggagctgaaattcctccaccaagttggtattcaaaatatgtaatgactggtatggcaaaagattggactaagacactggccataccactggacagggttatgttaacacctgaattgctgggtcttgagagagcccaaggagttctgggagagggaccagattggggggtaggtccacgggcttggtgatagaattatttctcgattgacttcttgagtgcaatttgaactgtaacatttgcttagtcacctttagtggagtaatctactgggcttgtttctatatttatataaagcagccaaatccttcatgtaatattgaagtccatttttgcaatgttgttccatacttggagtcattttgcatcccatagaggttagtcctgcatagccagtaatgtgctaagttcatccaaaagctggnggaccaaagtctaaatagggctcagtatcccccatcgcttatctctgcctccttcctcctccttcccagtctatcatcaaccttgagtattctacacaatgtgaattcaagtgcctgattaattgaggtggcaacatagtttgagacgagggcagagaacaggaagatacatagctagaagcgacgggtacaaaaagcaatgtgtacaagaagactttcagcaagtatacagagagttcacctctactctgccctcctcatagtcataatgtagcaagtaaagaatgagaatggattctgtacaatacactagaaaccaacataatgtatttctttaaaacctgtgtgaaaaaataaatgttccaccagtagggataggggaaaagtaaccaaaagagagaaagagaaaggaatgctggtttatctttgtagattgtaatcgaatggagaaatttgcagtattttagccactattaggaatttttttttttttgtaaaatgaagactgaactctgttcaaatgctttcatgaacctggtttgagacggtaggaaagcaacaaaacgtgggaacctggtgactaagggcctggtgcaaggacttgggaaatgtcattgataatagatggtggggttttcccccctttagaaatgttggatattaagtgatataaacacttcttttaactccgaaaatcttctgagaaatcacaaaattcacggtatgcttggaacgattgagattttctaggtagatgctgaatagcctagacatcaaagttggtgtgaaccaaaatagagtcagctgacccagcatcagccacactctgggttggaaaatgtttgcctgttggaattaatttaagcttaagtatatatcaacattattttattgtgcaattaaaacaatacaaattcatggttttttaaagttaaaaattctaaccactgtaacaacagtttttgtgttattttctgtattaaacatcttgttgcacgcatttgaggtcatcagggtgcaaaatttgtattcctgaaaatgtcatatattttcattaataaataacctaaatatgataaaacata

SEQ ID NO: 90016 - DNA, 3088 bp, Homo sapiens
  misc_feature (2003)..(2003): n is a, c, g, or t
agtttcactttcccttttgtaacgtcagctgaagggaaacaaacaaaaaggaaccagaggccacttgtatatataggtctcttcagcatttattggtggcagaagaggaagatttctgaagagtgcagctgcctgaaccgagccctgccgaacagctgagaattgcactgcaaccatgagtgagaacaataagaattccttggagagcagcctacggcaactaaaatgccatttcacctggaacttgatggagggagaaaactccttggatgattttgaagacaaagtattttaccggactgagtttcagaatcgtgaattcaaagccacaatgtgcaacctactggcctatctaaagcacctcaaagggcagcatgctgaccaggcagaaatcagaagtctggtcacctggggaaactatgcctgggtctactatcacatgggccgactctcagacgttcagatttatgtagacaaggtgaaacatgtctgtgagaagttttccagtccctatagaattgagagtccagagcttgactgtgaggaagggtggacacggttaaagtgtggaggaaaccaaaatgaaagagcgaaggtgtgctttgagaaggctctggaaaagaagccaaagaacccagaattcacctctggactggcaatagcaagctaccgtctggacaactggccaccatctcagaacgccattgaccctctgaggcaagccattcggctgaatcctgacaaccagtaccttaaagtcctcctggctctgaagcttcataagatgcgtgaagaaggtgaagaggaaggtgaaggagagaagttagttgaagaagccttggagaaagccccaggtgtaacagatgtacttcgcagtgcagccaagttttatcgaagaaaagatgagccagacaaagcgattgaactgcttaaaaaggctttagaatacataccaaacaatgcctacctgcattgccaaattgggtgctgctatagggcaaaagtcttccaagtaatgaatctaagagagaatggaatgtatgggaaaagaaagttactggaactaataggacacgctgtggctcatctgaagaaagctgatgaggccaatgataatctcttccgtgtctgttccattcttgccagcctccatgctctagcagatcagtatgaagaagcagagtattacttccaaaaggaattcagtaaagagcttactcctgtagcgaaacaactgctccatctgcggtatggcaactttcagctgtaccaaatgaagtgtgaagacaaggccatccaccactttatagagggtgtaaaaataaaccagaaatcaagggagaaagaaaagatgaaagacaaactgcaaaaaattgccaaaatgcgactttctaaaaatggagcagattctgaggctttgcatgtcttggcattccttcaggagctgaatgaaaaaatgcaacaagcagatgaagactctgagaggggtttggagtctggaagcctcatcccttcagcatcaagctggaatggggaatgaagaatagagatgtggtgcccactaggctactgctgaaagggagctgaaattcctccaccaagttggtattcaaaatatgtaatgactggtatggcaaaagattggactaagacactggccataccactggacagggttatgttaacacctgaattgctgggtcttgagagagcccaaggagttctgggagagggaccagattggggggtaggtccacgggcttggtgatagaattatttctcgattgacttcttgagtgcaatttgaactgtaacatttgcttagtcacctttagtggagtaatctactgggcttgtttctatatttatataaagcagccaaatccttcatgtaatattgaagtccatttttgcaatgttgttccatacttggagtcattttgcatcccatagaggttagtcctgcatagccagtaatgtgctaagttcatccaaaagctggnggaccaaagtctaaatagggctcagtatcccccatcgcttatctctgcctccttcctcctccttcccagtctatcatcaaccttgagtattctacacaatgtgaattcaagtgcctgattaattgaggtggcaacatagtttgagacgagggcagagaacaggaagatacatagctagaagcgacgggtacaaaaagcaatgtgtacaagaagactttcagcaagtatacagagagttcacctctactctgccctcctcatagtcataatgtagcaagtaaagaatgagaatggattctgtacaatacactagaaaccaacataatgtatttctttaaaacctgtgtgaaaaaataaatgttccaccagtagggataggggaaaagtaaccaaaagagagaaagagaaaggaatgctggtttatctttgtagattgtaatcgaatggagaaatttgcagtattttagccactattaggaatttttttttttttgtaaaatgaagactgaactctgttcaaatgctttcatgaacctggtttgagacggtaggaaagcaacaaaacgtgggaacctggtgactaagggcctggtgcaaggacttgggaaatgtcattgataatagatggtggggttttcccccctttagaaatgttggatattaagtgatataaacacttcttttaactccgaaaatcttctgagaaatcacaaaattcacggtatgcttggaacgattgagattttctaggtagatgctgaatagcctagacatcaaagttggtgtgaaccaaaatagagtcagctgacccagcatcagccacactctgggttggaaaatgtttgcctgttggaattaatttaagcttaagtatatatcaacattattttattgtgcaattaaaacaatacaaattcatggttttttaaagttaaaaattctaaccactgtaacaacagtttttgtgttattttctgtattaaacatcttgttgcacgcatttgaggtcatcagggtgcaaaatttgtattcctgaaaatgtcatatattttcattaataaataacctaaatatgataaaacata

SEQ ID NO: 90017 - DNA, 3506 bp, Homo sapiens
  misc_feature (2057)..(2057): n is a, c, g, or t
agtttcactttcccttttgtaacgtcagctgaagggaaacaaacaaaaaggaaccagaggccacttgtatatataggtctcttcagcatttattggtggcagaagaggaagatttctgaagagtgcagctgcctgaaccgagccctgccgaacagctgagaattgcactgcaaccatgagtgagaacaataagaattccttggagagcagcctacggcaactaaaatgccatttcacctggaacttgatggagggagaaaactccttggatgattttgaagacaaagtattttaccggactgagtttcagaatcgtgaattcaaagccacaatgtgcaacctactggcctatctaaagcacctcaaagggcaaaacgaggcagccctggaatgcttacgtaaagctgaagagttaatccagcaagagcatgctgaccaggcagaaatcagaagtctggtcacctggggaaactatgcctgggtctactatcacatgggccgactctcagacgttcagatttatgtagacaaggtgaaacatgtctgtgagaagttttccagtccctatagaattgagagtccagagcttgactgtgaggaagggtggacacggttaaagtgtggaggaaaccaaaatgaaagagcgaaggtgtgctttgagaaggctctggaaaagaagccaaagaacccagaattcacctctggactggcaatagcaagctaccgtctggacaactggccaccatctcagaacgccattgaccctctgaggcaagccattcggctgaatcctgacaaccagtaccttaaagtcctcctggctctgaagcttcataagatgcgtgaagaaggtgaagaggaaggtgaaggagagaagttagttgaagaagccttggagaaagccccaggtgtaacagatgtacttcgcagtgcagccaagttttatcgaagaaaagatgagccagacaaagcgattgaactgcttaaaaaggctttagaatacataccaaacaatgcctacctgcattgccaaattgggtgctgctatagggcaaaagtcttccaagtaatgaatctaagagagaatggaatgtatgggaaaagaaagttactggaactaataggacacgctgtggctcatctgaagaaagctgatgaggccaatgataatctcttccgtgtctgttccattcttgccagcctccatgctctagcagatcagtatgaagaagcagagtattacttccaaaaggaattcagtaaagagcttactcctgtagcgaaacaactgctccatctgcggtatggcaactttcagctgtaccaaatgaagtgtgaagacaaggccatccaccactttatagagggtgtaaaaataaaccagaaatcaagggagaaagaaaagatgaaagacaaactgcaaaaaattgccaaaatgcgactttctaaaaatggagcagattctgaggctttgcatgtcttggcattccttcaggagctgaatgaaaaaatgcaacaagcagatgaagactctgagaggggtttggagtctggaagcctcatcccttcagcatcaagctggaatggggaatgaagaatagagatgtggtgcccactaggctactgctgaaagggagctgaaattcctccaccaagttggtattcaaaatatgtaatgactggtatggcaaaagattggactaagacactggccataccactggacagggttatgttaacacctgaattgctgggtcttgagagagcccaaggagttctgggagagggaccagattggggggtaggtccacgggcttggtgatagaattatttctcgattgacttcttgagtgcaatttgaactgtaacatttgcttagtcacctttagtggagtaatctactgggcttgtttctatatttatataaagcagccaaatccttcatgtaatattgaagtccatttttgcaatgttgttccatacttggagtcattttgcatcccatagaggttagtcctgcatagccagtaatgtgctaagttcatccaaaagctggnggaccaaagtctaaatagggctcagtatcccccatcgcttatctctgcctccttcctcctccttcccagtctatcatcaaccttgagtattctacacaatgtgaattcaagtgcctgattaattgaggtggcaacatagtttgagacgagggcagagaacaggaagatacatagctagaagcgacgggtacaaaaagcaatgtgtacaagaagactttcagcaagtatacagagagttcacctctactctgccctcctcatagtcataatgtagcaagtaaagaatgagaatggattctgtacaatacactagaaaccaacataatgtatttctttaaaacctgtgtgaaaaaataaatgttccaccagtagggataggggaaaagtaaccaaaagagagaaagagaaaggaatgctggtttatctttgtagattgtaatcgaatggagaaatttgcagtattttagccactattaggaatttttttttttttgtaaaatgaagactgaactctgttcaaatgctttcatgaacctggtttgagacggtaggaaagcaacaaaacgtgggaacctggtgactaagggcctggtgcaaggacttgggaaatgtcattgataatagatggtggggttttcccccctttagaaatgttggatattaagtgatataaacacttcttttaactccgaaaatcttctgagaaatcacaaaattcacggtatgcttggaacgattgagattttctaggtagatgctgaatagcctagacatcaaagttggtgtgaaccaaaatagagtcagctgacccagcatcagccacactctgggttggaaaatgtttgcctgttggaattaatttaagcttaagtatatatcaacattattttattgtgcaattaaaacaatacaaattcatggttttttaaagttaaaaattctaaccactgtaacaacagtttttgtgttattttctgtattaaacatcttgttgcacgcatttgaggtcatcagggtgcaaaatttgtattcctgaaaatgtcatatattttcattaataaataacctaaatatgataaaacataaagcagtgttctggttcatctggaattttgctgtactttaaatctttcagactcagctactgataaatgaaacgttacacaggtgtgaaccaaatccaaataacctcgactggtctactatcataatcacctgaacagaacaaaactttttcctcagctttaagagtccagggcttcggataacagctgccatctgccacctgctaccattgacctacgtgaacacagacattctgtctccaccttgatggtgggtgggctgctccccttttctttgttaaattttgtgctttcatcacattttctctattctgacctctgttatgagaaataaaagtcactgattccattttaaaaaaaaaaa

SEQ ID NO: 90018 - DNA, 3093 bp, Homo sapiens
  misc_feature (2008)..(2008): n is a, c, g, or t
agtttcactttcccttttgtaacgtcagctgaagggaaacaaacaaaaaggaaccagaggccacttgtatatataggtctcttcagcatttattggtggcagaagaggaagatttctgaagagtgcagctgcctgaaccgagccctgccgaacagctgagaattgcactgcaaccatgagtgagaacaataagaattccttggagagcagcctacggcaactaaaatgccatttcacctggaacttgatggagggagaaaactccttggatgattttgaagacaaagtattttaccggactgagtttcagaatcgtgaattcaaagccacaatgtgcaacctactggcctatctaaagcacctcaaagggcaaaacgaggcagccctggaatgcttacgtaaagctgaagagttaatccagcaagagcatgctgaccaggcagaaatcagaagtctggtcacctggggaaactatgcctgggtctactatcacatgggccgactctcagacgttcagatttatgtagacaaggtgaaacatgtctgtgagaagttttccagtccctatagaattgagagtccagagcttgactgtgaggaagggtggacacggttaaagtgtggaggaagccaaagaacccagaattcacctctggactggcaatagcaagctaccgtctggacaactggccaccatctcagaacgccattgaccctctgaggcaagccattcggctgaatcctgacaaccagtaccttaaagtcctcctggctctgaagcttcataagatgcgtgaagaaggtgaagaggaaggtgaaggagagaagttagttgaagaagccttggagaaagccccaggtgtaacagatgtacttcgcagtgcagccaagttttatcgaagaaaagatgagccagacaaagcgattgaactgcttaaaaaggctttagaatacataccaaacaatgcctacctgcattgccaaattgggtgctgctatagggcaaaagtcttccaagtaatgaatctaagagagaatggaatgtatgggaaaagaaagttactggaactaataggacacgctgtggctcatctgaagaaagctgatgaggccaatgataatctcttccgtgtctgttccattcttgccagcctccatgctctagcagatcagtatgaagaagcagagtattacttccaaaaggaattcagtaaagagcttactcctgtagcgaaacaactgctccatctgcggtatggcaactttcagctgtaccaaatgaagtgtgaagacaaggccatccaccactttatagagggtgtaaaaataaaccagaaatcaagggagaaagaaaagatgaaagacaaactgcaaaaaattgccaaaatgcgactttctaaaaatggagcagattctgaggctttgcatgtcttggcattccttcaggagctgaatgaaaaaatgcaacaagcagatgaagactctgagaggggtttggagtctggaagcctcatcccttcagcatcaagctggaatggggaatgaagaatagagatgtggtgcccactaggctactgctgaaagggagctgaaattcctccaccaagttggtattcaaaatatgtaatgactggtatggcaaaagattggactaagacactggccataccactggacagggttatgttaacacctgaattgctgggtcttgagagagcccaaggagttctgggagagggaccagattggggggtaggtccacgggcttggtgatagaattatttctcgattgacttcttgagtgcaatttgaactgtaacatttgcttagtcacctttagtggagtaatctactgggcttgtttctatatttatataaagcagccaaatccttcatgtaatattgaagtccatttttgcaatgttgttccatacttggagtcattttgcatcccatagaggttagtcctgcatagccagtaatgtgctaagttcatccaaaagctggnggaccaaagtctaaatagggctcagtatcccccatcgcttatctctgcctccttcctcctccttcccagtctatcatcaaccttgagtattctacacaatgtgaattcaagtgcctgattaattgaggtggcaacatagtttgagacgagggcagagaacaggaagatacatagctagaagcgacgggtacaaaaagcaatgtgtacaagaagactttcagcaagtatacagagagttcacctctactctgccctcctcatagtcataatgtagcaagtaaagaatgagaatggattctgtacaatacactagaaaccaacataatgtatttctttaaaacctgtgtgaaaaaataaatgttccaccagtagggataggggaaaagtaaccaaaagagagaaagagaaaggaatgctggtttatctttgtagattgtaatcgaatggagaaatttgcagtattttagccactattaggaatttttttttttttgtaaaatgaagactgaactctgttcaaatgctttcatgaacctggtttgagacggtaggaaagcaacaaaacgtgggaacctggtgactaagggcctggtgcaaggacttgggaaatgtcattgataatagatggtggggttttcccccctttagaaatgttggatattaagtgatataaacacttcttttaactccgaaaatcttctgagaaatcacaaaattcacggtatgcttggaacgattgagattttctaggtagatgctgaatagcctagacatcaaagttggtgtgaaccaaaatagagtcagctgacccagcatcagccacactctgggttggaaaatgtttgcctgttggaattaatttaagcttaagtatatatcaacattattttattgtgcaattaaaacaatacaaattcatggttttttaaagttaaaaattctaaccactgtaacaacagtttttgtgttattttctgtattaaacatcttgttgcacgcatttgaggtcatcagggtgcaaaatttgtattcctgaaaatgtcatatattttcattaataaataacctaaatatgataaaacata

SEQ ID NO: 90019 - DNA, 850 bp, Homo sapiens
ggaggcctcacaatcatggcagaaggcaaaaggcacatgttacatggtggcagacaagagagaatgggagtcaagtgaaaggggaaacccctcatgaaatcatcatgtcgtgagatttactcactaccacaagaaccgtatggggagaaccacccccatgatttaattatctaccagtaggtcccttccacaacacgtgggaattatgggagctacaattcaaggtgaggtttgggtggggacacagccaaaccataacagcaaccaaataacctaaattccaaaaaggacaaccctccccacacaaccccctcaaaggcatagatcatatgcattgtttcacttttggcagaacacaagagaaagagacggctactgtaaaagtgagtaagaggaaaactcctagagttttaactaaaaggcctttaactgcaaggccaactatggcctaatttggaatgtctgggggcctcagacagaatgggagtttacactttcttgcaaacacttttccttggggctccacagagtactcccaattaagaggaggcaaaagcaggagactacagaaagccatctctgtggtgtagggatgaaggaagtgatgatctgcagctgcagagagagaatgatgcagagaggcctttgtgcctgggagacaggacaaaggccttcccatttactcagacccttctcctttaagcctcaaaccagtgggggaggggcagaaaaccttctgatttcatacgtttctgaagggagattagaagtcaaacccctgtgctgcttagaggaggaaccctcctgtccccaggatgcaggcagagactcattgatgccggggaaaggg

SEQ ID NO: 90020 - DNA, 138 bp, Homo sapiens
gggatggctgaaaaacaacctttagcttgagtttctagatatgacttctaaagccctatcagagaactgggctgctcaaagagctgcagctgctgccaccattaggaagcatcaccaccctgcacctctgccacagcc

SEQ ID NO: 90021 - DNA, 487 bp, Homo sapiens
tgtattaaatcgagctcggtaccgtctgagcagctggaaagggattaaaaagctgtttggaagctctgagcgtaaagactttgagctttgctttgggatgatcggcagaacataaccctcttccccttgccatgtcactgcttttaggaaagcctcgagactggtcaccttgcccagaggagtgtttttcagcctgcttaggaggaaaggtggctgggagctgggtagcgaaaggggcggctgcgggggcggcgtcagcattcacttaatctttgtctttttggtgcagtaccagtgccctccactgagctgaccaggccttattctagagatcctcttgttttactgtcttcaaacaactcaccttctctgagtatgaggagggaatctgggatctaactcattggaaaccagatttcaccctgtcctcctccttttaatgttcttctgtaactccagttcctccagttcccagcttgctccagta

SEQ ID NO: 90022 - DNA, 494 bp, Homo sapiens
  misc_feature (95)..(95): n is a, c, g, or t
  misc_feature (256)..(256): n is a, c, g, or t
  misc_feature (346)..(346): n is a, c, g, or t
  misc_feature (374)..(374): n is a, c, g, or t
  misc_feature (392)..(392): n is a, c, g, or t
  misc_feature (435)..(435): n is a, c, g, or t
  misc_feature (455)..(455): n is a, c, g, or t
agtagatatacattgcataggcagcaacagcaatattctggtggggctggatccctggctggcccttcagggggcttcttccctggcaaccttgntcttcgaagcctcggacctgattcaaggtttttacaggaaaggcagctgcagctgcagcagcaacgtatgcagctggcccagaaactgcagcagcagcagcagcagcaacagcagcagcagcaccttctaggacaggtggcaatccagcagcaacagcagnagggtcctggagtacagacaaaccaagttctgggtcccaagccccagggtcttatgcctcccagcagccaccaaggtctcctggtccagnaggtgtcccctcaacccaccccaggggncccagggtatgcttgggncctgccccaggttggcttgttgttgcagcagcagcaccctggngctttggggccccccagggncctcacaggacaggtgttttatgacccagtcccgggtgg

SEQ ID NO: 90023 - DNA, 605 bp, Homo sapiens
cagcctaggcagcatagtgagaccccatctctacaaaaaaaaattagctgggcgtggttcgcatgcctgtagtcccagctactcaggagtctgaagtggaagatcacttgagcctgagaagtctaggctacagtgtgccatgatcttgccactgcactccagcctgggcaatagagcgagaccctgtcataaaaaatacttttactaagcattttactcgatttttatttttcacctccacctcctaccacatgtattaagaaaatgggtgacatgttggtatattgcccactcaattgcctaaactttcttctgcttaatagtttcttttctggcaagaagtcttagagacatggcttatggacggcaattttcaaaatctgggtttcttatctgtgagatttaagcaaagccactgatagcttggtatgtgaacctcctaaagtattattaatgaatggttggtattaagatgagtagttggttccagacatctactagactgaattgaagtatatcttacatatgaagtatatcttaatgagaggttcatcagaattgtgagaaataaatttttaactatacatgccttatagattagaaac

SEQ ID NO: 90024 - DNA, 90 bp, Homo sapiens
gatctcaaagcaaatctgtattttaatctctcaggtgttcactagtattaccagtgactagtggaaataataaaaggaaatcttgttcat

SEQ ID NO: 90025 - DNA, 297 bp, Homo sapiens
ctgcatccacccccaatgatgaagacattttcaatgtaagcaaaagtcctggagatttccccacatcatatacatggggacataggaactaacatttgtcatatatttatattttcctttccaaagcagatcaaccccaagttaccttcccttagctctcgttttctgcctctctttgcaaatatcacttcattaaaaattgtgaacattctctttgccttcccttatgggcttcctgtttgaacaccacatccagggcaccctgggaactgaaccatctccttttctttttctttt

SEQ ID NO: 90026 - DNA, 436 bp, Homo sapiens
aataatttttcaattattaaaaaataaaatttcaaaaatgaaagattttgaatattaaacatatacctattattcctatagagatgatagatttagaatacataaagtgaaatatagtttccctttaggtagtaaataagtgtgtcttaaggtgattgcaataaaagtatagttatcatgatgtaaatatatcccaaaataataaattcataaatgatttttatggtgattagaaactgattttattcagtcagttccctttgtattctaggcaaagtgcctatttctacacatgggatcacattcattcctcaatcaactttgagggggaagatagaatattctccacatgaaaaataaagaaactgatggtagagtgacttgttccccattgattctccagggattaatgtgattaatgtgatacatggcaggt

SEQ ID NO: 90027 - DNA, 1241 bp, Homo sapiens
gaaaatacaggcagagattctgtgatgcagttttgaggcagaatagctttctttagggaaaccttagtctttgctcttaaggccttcaactgattgcatgaaactcatccacattatagagattaatctcctttgctcgaagtctatttaaatattagtcacatctaaaacatacttttacagcaacatctagactggtgtttgaccaaacaactgggcatcatagctgacacataaaattaaccatcacaaccatgttctaggcactgttcctcactgcctgagaagacaccgttatgtttattagggtttttgagttttatccacagcttttggttatctgcaaccatgtctcccaccattaacatagttcacactgagatgaggattccctatttaacacttggtcccaacttcttcacagtccatctggttttgtagagggaacataactggacattctggtcaggttaggtgaggtcaggccttcaggacgctattttcactgagttgctttataaggcacattatgcaaaattccatcagctcttctgttcactacattcactgttgaaattctaagagtgagactgctgtctcacaccaaagccagtgggtactatcttcagtaggcacgcagcatcatgtttgtatttgatccagctagatgacatgtaagagaaaactttattgtgggactctgtaaagtgtgacattcgtttgtgactcaatttgctcatgtatttgttcctgggagttcattacatagctaacttccagctgctttcaatttacatcataaaagaaatgcatcatattcttctcagtgtcctggtagtgcattttcctttagtttttcagtgaattctgttgtaagtaaaatggataagattgttcattattttggattattttgctgaagatgaccagctctgagatgtgaggagtaaataagaaagtaacagtagaatctggaatatcttttaaaaattaagacatcatttttaacagcagagtagccttaaatgacctgattccacagaggagccaggaaacagtatgaaactacaaatttattttgtagaaatatggaaaccttaatactattaagatgtaaatcttaatactattaagatgcaaatcttaatactattaagatgcaaatcttaatagtatttttataaagtgaaaacaatatgatcacttaattactcaagtggagctgaagaaaatttcagaga

SEQ ID NO: 90028 - DNA, 1218 bp, Homo sapiens
gaaaatacaggcagagattctgtgatgcagttttgaggcagaatagctttctttagggaaaccttagtctttgctcttaaggccttcaactgattgcatgaaactcatccacattatagagattaatctcctttgctcgaagtctatttaaatattagtcacatctaaaacatacttttacagcaacatctagactggtgtttgaccaaacaactgggcatcatagctgacacataaaattaaccatcacaaccatgttctaggcactgttcctcactgcctgagaagacaccgttatgtttattagggtttttgagttttatccacagcttttggttatctgcaaccatgtctcccaccattaacatagttcacactgagatgaggattccctatttaacacttggtcccaacttcttcacagtccatctggttttgtagagggaacataactggacattctggtcaggttaggtgaggtcaggccttcaggacgctattttcactgagttgctttataaggcacattatgcaaaattccatcagctcttctgttcactacattcactgttgaaattctaagagtgagactgctgtctcacaccaaagccagtgggtactatcttcagtaggcacgcagcatcatgtttgtatttgatccagctagatgacatgtaagagaaaactttattgtgggactctgtaaagtgtgacattcgtttgtgactcaatttgctcatgtatttgttcctgggagttcattacatagctaacttccagctgctttcaatttacatcataaaagaaatgcatcatattcttctcagtgtcctggtagtgcattttcctttagtttttcagtgaattctgttgtaagtaaaatggataagattgttcattattttggattattttgctgaagatgaccagctctgagatgtgaggagtaaataagaaagtaacagtagaatctggaatatcttttaaaaattaagacatcatttttaacagcagagtagccttaaatgacctgattccacagaggagccaggaaacagtatgaaactacaaatttattttgtagaaatatggaaaccttaatactattaagatgcaaatcttaatactattaagatgcaaatcttaatagtatttttataaagtgaaaacaatatgatcacttaattactcaagtggagctgaagaaaatttcagaga

SEQ ID NO: 90029 - DNA, 420 bp, Homo sapiens
gcatgatggtggatgcctgtaatcccagctacctgggaggatgaggcacaagaattccttgaactgaagaagtggagattgcaatgagccaagatcacgccactgcactccagcctaggtgacaaagtgagactccatctcaaaaaaaagaaagagagagagacagtgtttttctatgttgcccaggttcatctccaactcctggcctcaagtgatcctcccacctccacctcccagagagcaagaattacaggcatgggccacctcacccactctataagacatttcttaaaaagataaggcaaaaaaaaaaatatggcaaaatatggatagttgttaaagttgagtaatgggtgcttgcaagttttttacactctcttatgtatgcttggaaattttcaatatcaaaagttaattaaa

SEQ ID NO: 90030 - DNA, 160 bp, Homo sapiens
gatcgtaacaatgccaagaagacacaagaatatgagaaaggaattcctagaaaaaaggcaaaggtttcaatgactaagctaattttttctaagtctactgataacatactccctaccccatcctccattaataaaagaatggttgttgtattgtattatg

SEQ ID NO: 90031 - DNA, 531 bp, Homo sapiens
cactttttggctattatgaatattgctgctgtgaacatttgtgtaggtagtattttgtgtggaaatgttttcttttgggtatgtacctgggactggattgctgggttatatggcaattgggtttaaccggttttccaaagagaccataccgttttacattctcatcagcaatgtgttgagagtcccaatttctctctagcgccaccaaccttattattgcccatctttctgattacagccatcctagtgggtgtgaagtggtatctttttatggttttggtttgtagttcctactgcatatctttgtagtagtatttatgatgaaatgggaagtatgccttaataaagcatttttgctgcatatcaaaataagaattgtctttaaaaaaccacttttttccctcagttatgcagttctgtgagttgcaagctgaactagatgctattttcatcaaatactgtttttacttgaaagaatgataaactgtggtcttgagattaatgtacttaagtgacagatatttcctcaaa

SEQ ID NO: 90032 - DNA, 648 bp, Homo sapiens
  misc_feature (596)..(596): n is a, c, g, or t
gggaagtggtgatggacgtgagtggagacagagtgagtggaaggtgctggggcgatgggaaggcaggaactgtgcttcagagagttgagagcctgaggtactggttgtcagaggcgtttgaaccacagcaactccatcttgaataggggctgggtaaaatgaagctgagacctactgggcttgcattcccagacaattaaggcattctaagtcacaggatgagatacaaggttggcacaaaatacaggtcataaagaccttgctgataaaacaggttgcaataaagaagccagccaaaacccaccaaaccaagatggtgacaggtacgacctctgttcattctcactgctacactcccaccagctctgcctatggaatagtcattcttttattcctctactttcttaaaaaacttgctttcactttactctatggactcgccctgaattctttcttgtgcaagatccaagaaccctctcttgggtctggatcgggacctctttcctgtaacactgggaggccaatgtgtgtggatgacatggaattactcaaaatgatctaggttcatttgtttcgacataccttataaagcaagncacagggttgtctgaaggagcctaactggcggtgactgagaagggggctcct

SEQ ID NO: 90033 - DNA, 148 bp, Homo sapiens
tagtatatacagtatagatattttcccttcagacctaagtgacaaataaccggtgtcacattgtttgtatgttgtcattcctttgaaatggaaaaggaccactataggtgatcctgaggtcactagtgacttagatgaggttgattaa

SEQ ID NO: 90034 - DNA, 214 bp, Homo sapiens
ataggctgcaccatatagcctgtgtgcctgtgtggctattgcatctcggtttgtgtaagtataccctgtgatgttcacaaaaacacagaattgcttaacgatgcacttctcagaatgtatttccatccttaaatgaagcacgactgtatataataattagtcactataattttaaaacaatttgttcgttctttttaaaaaatcgtgtaaaaac

SEQ ID NO: 90035 - DNA, 412 bp, Homo sapiens
acaggtaaacagacaagcagagtgtagaatatagaatatacaatggaataaacaattatgaactaggtatacctgcaacgatataaatgaatctcagaataactattgagtaggggaagccagactgaaggaaagaacggatgttcctttttatggccgcttagcattccatggtgtataggtaccacattttcttcatccaatccactgctgatgggcatctaggttgattccatgtctttgctattgtaaacaacgctttgatgaacatatgggtgcacgtgcctttttgataaaatgacttacttgcctttgggtatatacctagtaatggattgctgggtcgaatagcagttctaagtgctttcagaaatctccaaactgccttccacagtggctgaactagttttta

SEQ ID NO: 90036 - DNA, 190 bp, Homo sapiens
  misc_feature (33)..(33): n is a, c, g, or t
  misc_feature (135)..(135): n is a, c, g, or t
tgagagagaccccgaagctccagcagtgttttntgagcccagctcgcacagtgcctggcctggtggcgaggctccctatccgccctgggcagccccttggcgccgggaggcggcggcgtgggccggcctgcagtntggagcgccccgatggaaatacactgtaagcacgacccgtttgcatccatgcata

SEQ ID NO: 90037 - DNA, 124 bp, Homo sapiens
tccatccatctacccatctaaccatcatctacccattcatccattaaccatcatacatctctctctccatccatccacctacccatccatctatctactcatccacccatccatttacccatcc

SEQ ID NO: 90038 - DNA, 244 bp, Homo sapiens
ccatcctctccctcaccacccctgaagatgcttgaatgactttaataaggctgagttgcagccctcacccctgttatccccactaccccagtcacctggcactttccttcagccagcgaggagaaagcgagtggatgaggtgagaagcagcacctgctgtggctcaggctcaggacttcttttttttttttgagacagagtctggctctgtcgcccaggctggagtgcagtggcgcaatctggc

SEQ ID NO: 90039 - DNA, 387 bp, Homo sapiens
aggaaagggcaatgactagactaagaaacagcattaaaataaatgctctttatcaagagcagttgaaaagccagtttcagtaaggtttgttgtaaactgctttctgatttttagaccaatgctatccaatatgatagtaagtatcctttctttttgctcttttaaatatggttactgaaaaactttaaattgtacatgtggctcacattcatgtttcagttaaagagcactgatgcagactatctagatcatgaaaatattgactaaatttggcattagagctcagtactcattctgctgttgtttttgttttttttttcccctgagatggagtcttgctgtgtcacccaggctgaagtgcagttgtgcaatctcagcccactgtat

SEQ ID NO: 90040 - DNA, 935 bp, Homo sapiens
ggtgggggcagagtgtcggactgaaagtcaggaggctggggagctgggtcctctgcttgctgatggaccatgggcaaatgtcctcctctctccaatcttggggtccttatttgtaaaatgagaggattggaccacagagcggtgaggatcatttcttttctgatttcctttgattgcacaaacactgagacacttttggtagggaattagatgtctctcagaatcttttgtctctgagaagatgcctagagaaaagggaattcaataggataaaagtcattctccagattcacatttattttcctaccactttctgcatgttgacagaacgggaggaacgactgggtgttgtcaaggattctgctcactcacccccaactctaacccaggtctgtgttctgagaagggaaaaggttaaggaggttaaggtcatctttttattcaagttttcacacacacacacacacacacacacacgcgcgcacacacacacacacacactcaagcctcttgctacattttcatccttctcattcttcatcctctcctgtctctatccctcacttctcacctctacttagtgcaatgtatcctctctttgcccgaggaccagatgatggaggcatgtttcctactgagaatgattctagaccttttcttcaatggactctggggttagttgaggacagtcaggctcacacttcccagttatcgaaggtgatgataaaaagcaaatagggcatttgggagggacctccccaaacaagtacagagatgaagtgaagacagccgggtgctcagggagcatcttataggtctcagtccttgactcgtaggttgaaagcttaaaagtacagctgttttaaggagtcagcctgagtgtcctgttgcaaagggagaggcagaatggggtcccccgcttttgttctatctcc

SEQ ID NO: 90041 - DNA, 580 bp, Homo sapiens
gcgccgccaagcgcgcgcacagaccctccaataaacacaaaggagggcctggggaatagaaacccaaatccacttgtaatcgtacaagagattcgggcgtaattacttgagcaatctagattaagattgatgatcctttaaagtggtgcttcagatcgactgcctctccctttccaaagaaaaaccttgtgcaaccgaggtggaccccgactcggctgggcagaggccgaggcccagagtccgcgagccccgggggctcatcgggggatcgagagcagtgaaatgaaagacagggctgtgcgtgggtctggcccgggcagtcccgacagggctgaaagctgacactgtcacagtttgctccttagccacccccttgtaatcgcgacagaagccagcccagccctctgtgttcccgcagcctcgggaacggcccggcattgtgcaggacggtcgcagattgggtgtgtgctgcgccagggaaagccaacttggccgcctctcccgagcccggcccggcgggggccgagggcggtgtcggcgcgagggctctccgcccggagggccgaggcctagcggccgc

SEQ ID NO: 90042 - DNA, 331 bp, Homo sapiens
gccaaggaaccacgggttccggggacagagaggggggaaggaaaatgcaccctacaaataggaagggaaagctgattggccaaggcgtgcgccccggcggccaatcgaaacgccgggctgccccctcccttagcaacgtggccccggcgttccaaaatagaacgctcccgggacgtcaggggcggggcggacgaaggggcgccgcgcgccgtgcgtgccccgcgtcagacggaggattccagcgcgtcagccgttacgcacgggtcccccgttacgtctccgcgcaggaggcggaggcagcgcggctgagggttcgaggcccctcttcccg

SEQ ID NO: 90043 - DNA, 330 bp, Homo sapiens
agaagcaacataaatatccaccaagagagatctggttaaataaatgatgatccacctctattttgaaataccatgcaatgctaaaaagaataaggtagttttatagtattaactgtccaagatatactattaagtgaaaagagttgcaaaaggctatgtatattagtatgaagccattagtataaagaagaggagaaaaaaatgtataactatatgcttgtaagcataggtgtactttgtggaagcatactcaagatatgcaacaacggttacttgtgataatgggaatgaacaacaggcagatttactttcatatctgatttactgtaa

SEQ ID NO: 90044 - DNA, 559 bp, Homo sapiens
tgtatttctgttctgaagttcccataccagatcccttaggccaaagttagtacagccaatatttgcctgtttctttggattgtgtgtccatgctggagaaaagccttgttactgtgcccagtgtggtaaacgaaattatatgtacgcagtgagaagaaaaatgaaataagaagcactgatgaatgtacccacgggtgtgaccttgggggccagtgtgtggtttttatgaaatgaacgcatgaatacgaggaccctaattattgctttcaacggacaaagtatggtgaatatatagagaacgttgctgtacaacactggctgtgtctcaaagcggctttagaagtaaatatagaaattctttggtacatggtattgcatagaaaagtcattaagaaaaaagcaagacaatttgttaagaccttgttaagtggagctgggggatgattaattttgtttgtttgtttttgttgttccctggtagagctcaacaaactacagaccacgggccaaatctgacccaccgctgcttttgtaaataaaactttattggaaaaaagcc

SEQ ID NO: 90045 - DNA, 346 bp, Homo sapiens
ctacactggggagtgggcgccatcatccctattctacagagggaaactgaggcagagaggcccactgtctgggatttgaactggggatgcctggctcctgtctgttttcttagccactccccacacaccccaggtcagaagagcagcagctggagctgagacccccaccaggctcatggcccttccctactcagttcctgaaactccaccctcaagccgagctcgggaggctgaggcggggaggatcgcttgaggccaggagttcaagatcagcctgggcaacagagcaagactctgtctgtaaaataattttttgaattatttttaggccggccgcagcctcgtg

SEQ ID NO: 90046 - DNA, 218 bp, Homo sapiens
ggatcactgtggctgcttgtgaagaataactaatagaggcaagggcagatgcagggagaccagatagaaggctattgcaataatccaggtgagagttgatggtagcttggaccaggatgggagttgtgaagctgctgcttcaggtgattgagttctgtggtgtgttacttactcctctctatttttctgtcatttagtttgtgccctgggagacagtt

SEQ ID NO: 90047 - DNA, 673 bp, Homo sapiens
aggtgaggaaataatttcagatctgctggcattccataaatcacaccgtgtaagtcaatttggtcactgactattgtttaagtgcttctctgcacaataaagcataaaattttttcagtatagttattgattccaacatagacaagaactctgaaaagcaccccttgtcatcattattctatgattgcaagtctcctttttaaaagatagcaaaaaaaaaatgttgctgttatagaattctttcttagatatagtcatccctctgtgtatgtgggggattggttccagaacccccacatataccaaaatctgagtttactcaagaaccaccaacccatatatacaaaaagtcagcccctccatatacatgggtttcaaatcccacgaatactgtattttctatttgtgtttagttgaaaaaaatccacatgtaagtggacctccacagcttaaagtggtattgttcaagggtcaactctgcctgttttaactatagtgaactttggtttgttatgacttgttatcatgaatttatcctatatatgaattcaaatgaatcaagctcttcctgtgactccccacccccatttgtcctatattaaataacacgggttccaatcttctttaaattttcatgatctggcttcataataaagctttatagttggttctt

SEQ ID NO: 90048 - DNA, 131 bp, Homo sapiens
aaccatccttttcttggggttgcgctactgtccaatgagcgcatagtgagggcagtactgctaacgcctgaacaacacacccgcatcaactagagcttttgctttattttggtgcaatttttggaaaaata

SEQ ID NO: 90049 - DNA, 253 bp, Homo sapiens
tgattccctgggtctgggatagagtctggtattctgcatttctgactagcctccaggtgatactgattctgctcatctagggacctcgctttgagtagcaagtgtttaggccacttactagcaggaactaagcacagtatcctacaacagcaaatgtctttccaacaagaaagacgagagcaaatgctgatgccacatctgcactgcctcagaaaataaagaagggatgaggagcccccgagtggcactctgt

SEQ ID NO: 90050 - DNA, 197 bp, Homo sapiens
tttttcatttctgtttttttttttacttccccacctgtttccaagtttttcatttctgaataaaatgaaaccagagatttctttagagcaaagaaaatggcctaaagtgagagatttctgacttagagattttaggtatgttgctaaagagaaagagctatgatgtgtaagggccaattctgttgctttctctgttt

SEQ ID NO: 90051 - DNA, 608 bp, Homo sapiens
ttggctgaaggaaagctggaaactatatattttaaatctacaagctaagaagatggtggaaaataaataaacaaacaaacaaacaaacaaatacatggccaggatcttgggaaggaagtgtggagaaaaaaacaaactatttttccctgctttcatgccacaacaatcaacacagatttctgtgactaagtgtggagtggggggtccctgcataccaaacatgaaatcaattctgcggtggacaccagctgggcattctccaaccctgttcacttccaacactaccttgcagatagagtcagatcacacagattgaggactcagtcccataagactgctgttttccccactctgctccctgcttccaatgctgaccataagccccagcttgttttacctgtgcttctgaccagctggctacaaactaaagttcctgtgaccccctccctgggtctgattaatttgcaacagtggctcacagaattcagggaaacagttatgtttatcactttatcataaaggctattacaaaggatacagataaagagatacatagcataaggcataaaggaaggggcatggcgcttccatgccctcccaggaccacc

SEQ ID NO: 90052 - DNA, 149 bp, Homo sapiens
ttcccagggaagggggtgcttaagacatgaagagtgagctggagccagggaagggcagggacagaaacaagggcctggaggacaggatggatggagagggctgcatggagacccccggcaggagggcagaggggctcaaggcacccggc

SEQ ID NO: 90053 - DNA, 295 bp, Homo sapiens
ctttccttctgtaactacctcaacacattcactgcacagaatagttccaccaattacaaatgttcagaataacggagggcctggtaatgatcaaattcagttctgtgaaaagacctcattttgggacagttgctgagccaggacttaaactgggctcaaacccagcacactaagaggacagcattttggggttttgccgaatggagggaaaagataccataatgcagttccaggtacttttagattctttcctctaagaccccactttctcattataaagtggaaataataatac

SEQ ID NO: 90054 - DNA, 1120 bp, Homo sapiens
tctgactcctttgaagagggcatcaagaagtgaaagaacaaagtccttttctgttcgggatctgggcccatcctgggagaggtttttggcagaaatggctgcagtggaaccctctgactgccagggtgaaatagtgctccagcaggctgcggtagactcgctgccagagtgggtcaggactggcccagaggacagggtcgtctcttgagagtcctcccagctccagggcctgattttaaagcagtaacacgaggatataggttatatacaggctcctggaaggcaggtgccgcagctcctgtgacaccccatatgcctgagcaagcttctccagcacaagagatgatgcaagtatgaatgggtacggggggagcttaaaacctgccaacactgagacttgatgccaggggccgtgcacccgctctgccacctgctaggtctgtgcaatggtcagagcagaggtgtgtgatgagttcagctcccaagcacatccacacttaggaagtgttctgtgtgtttttaaataatccttaccatgtaaagattgtattacatttgtatacaaaatttttttgcattttacttttgtaatatttggggttttatagatttttattttatggccaagtatacttttgtaaggaaatgttgaagtcttgagtatttttattcttttaaaaaactatagttagtgtcaactgtgagcactgataaatattattcatgtgtggttttccttctttttaatccagactttttaagaaactgttttggcatagagctttacttaaaatgctgcttcattttacacattgtgaatactgaagattctaaaaaataaagatgcatttaaaatctctgtgctgttccattgtagaaatggtaatgtgcattgctttgccaaagtggtaattaaatgtttaatggtttagaactcctagttcacaacagggcttctcgtcatcacttgcagcgtgtgagcttccaaataagccgccatttctttggaaaacgcacgcacttaggcatggcgatctcctgttccgttaggaaatacggttatgttgacattatggttactgtgcttgtggttttgcaataaacatgtattgaaagcact

SEQ ID NO: 90055 - DNA, 496 bp, Homo sapiens
aggaagagtcaacatttaaaacataatttgtgcttttcacaaactcctgaccctaggaacaactccagtctagtgccttggagatgggctggtgtagaaagacatggaaaatgcttctctaaagaggagagctttccagcacacagcagctacagcatgtttctcaaagtccaaatcaatggcttctctttgtacttacaagaaaatcctaattcttgcactgatcccatgggcctccaagggcccgtgggatcagactgctgcctgtctctctgacctcatcatatacggagccttccctcagtcatacctttccaccacactgaacttctttcagctcctccgacgctccaagcacatcccacttcggggcctttgcatctactgttctgccagatttttgcatgacccattttcactattcaggtttctactcaaatgtcaactcttaaagaggccactatgatccatcctattgaaaatagggcagatactc

SEQ ID NO: 90056 - DNA, 431 bp, Homo sapiens
gtgatgtgagccagtgacggcattaactttaggtaatacttctatggcctttgtaaaaatcccgcgttaaggatgtattagatcttgagttcttttccgcgctggaggcaccactagattaaccctttgccggtgtattgcgtgtggggcgcacggctctgggttgcaaatattccggagatgctttttgcagcagctattctgttcagttgttcgcaaagaggaataacgcttcctgggaaccgcggtgacacgcttctttaggactgcctgcctacagagtttttccccgtggaattgatgtaacgattgatttatttcttatattctatgaagactgggggacccgccctcgcttagaatgtttcccggaggagaatagaagagtgcaatgtgatgtttttcaaattgtgtctaacggagctccctaa

SEQ ID NO: 90057 - DNA, 154 bp, Homo sapiens
ggtcacattttggaggactgagctgagcaagtgctggtcacattttggaggactgagctgagcaagtgctggtcacattttggagactgagctgagcaagtgctggtcacattttggagacagctgagcaagtgctggtcacgtttcagaggac

SEQ ID NO: 90058 - DNA, 307 bp, Homo sapiens
acccccaaaaaagcactaaattcttatactccaaatatagacatagggtcttgctttagtgtccaggttgaatttgaactcctgggctcaggtgactctcctgcctcagtgttccaagtagctgggagtacaggtgtacgccaccatgcctagctacttcaaaatcttaattataaatagatacaggactttaagtcttgaaagtgcttcatggttatcttattatttcaaatattattacctgactttgaaaagtaatcagtttaatgtatgcagaactacaacaaggcttattagggtctcgctc

SEQ ID NO: 90059 - DNA, 352 bp, Homo sapiens
ctccttgaagaccagaaatctgatgcatgttgcctgaatcaccagtgaaaaacatacccttctaaatccttggaaagcaggatgttttcctgaaacaaatctggctatcatgtgagatggctcaaatttaacacacgctacacttcagcaggtggcctgatagggactttcatttgagaatgtgtaaaataacaggtttgtacttgaaatgagtctttaccaatttatgatctggggaaagcataatatcagtaaaatatatttccaaacagtaatgtttatcctctgacaatttattgaagggaagtaaagtggtaaagttttatctcaataaaatttatgccgtggcata

SEQ ID NO: 90060 - DNA, 436 bp, Homo sapiens
caatatcaaggcagattcagtgtctggtgagggcccacttcttagtttttacaggactgtcttactgctgtgtccttacatggcagaaggggctaggcagtctcttaggtcccttctttaagggcactaatcccattcattagggctccattctcatgacctagtcacttcccaaatttcccacctcctcatgccatcactttggggttagaatttcaacatatgaattttgaagggacacaaatgttcagatcatagcatatatatttaatcccacatctcctgtgactatgtaagacctatctcttcctaagagataataatcttgagggcagaagtcaggcttcttttgtttagcactgtagccccggaggtcaggcttgtgccttaaatgtagcagggacttagtaagtagctgtgattaaataagtgaatg

SEQ ID NO: 90061 - DNA, 484 bp, Homo sapiens
gctgggattacaggcatgtgccaccatgccagactcatttttgtatttatagtagagacagggttttgccatgttggccaggctggtcttgaactcctagcctcaagggatccgcctgcctcggcctcccaaagtgctgggattataggcgtgatcccagcctagcctggtatttctttatagtgacacaaggactaatacaaggtccttccttaggatagaaggagagtccttactgtggggataatatcagaataatgctagaacactttctgctgcaagggacagaaacccacctcaaaccagcttaagcaaaaaaggaaatttatcagctcattgattcagctagggtaggcagggttatgctgtggtaacaaacagccccatctcagcagcttagaacaacaaaggattgattccttgctcacgatacacgtctatcacaagtgaactgaaacttcagtccgtatctccttgctcaagg

SEQ ID NO: 90062 - DNA, 450 bp, Homo sapiens
tgagtgagtggtcgatcttgctcactacaacctccgctcccaggtcatgcaattctcctgcctcagcctcctgagtagctgggactaaagacatgaaccaccacacccggctgtaatgttttgtatttcttagatctttatcaagtaaatgcttttaattttctcattacccacactgaaactgtaatttgcatcagcagtcctttgtgcacaaccacagttctccttcacatcgtatttattctgtacccaaatgtttatggtagcaagaacattttatattattaaaacataaaaataaaaagactgggtttggtggctcatgtctaatcccagcactttgggaggccaaggagggtgaatcacttgaggtcacaagtttgagacaagcctggccaacatggtgaaaccctgtctctactaaaaatacaaaaattagctaggcgtggt

SEQ ID NO: 90063 - DNA, 537 bp, Homo sapiens
gcccagttcaaccaaaagcagcactaaaatgttcaggtctgattacaaaggaggagttcaacaaccctgcctgcttttactcactttgaaatcagctttgctcttcctgcctgcttgtattctctttatgacagggtataaaggacctaaaagagcaagaagaaccttgggtctcttttgagccatatagtttggtccaaatagttcttgtctgaggaatccaaagccaataaccagataataaatattacagaaagccttacgcttttttcagtgattgctcttgtaggtgaaatagagtacggagctgacagtgtcaagccccaaaccaaaacttgtgtaggctcctatcctaagaggcccaggccaccattaaattgaatattcatgttttatacattttatttatgcatatattgtgaaatatacatatcttatatttcacaataaaagttttaaagaatgttacttgcccaccctagtggccaggggataagaccattaccagaaggtggacatgaaagcttactgagcaga

SEQ ID NO: 90064 - DNA, 371 bp, Homo sapiens
aaatttcccccactctgttctttgtagtgaaaaaagcaacttctgagattttatttttctccttctccttccccagtgtatgcctgcctactcctaatatgtaggtcatattagaataggtgctctataaatgttagtttctggtaggaaaagattagtttttaatttactccaataatggtttgggtgaattttctcagatagaggtccaaagtaagagtcagtggtatatcaagagaaccctgactgtttattacagcactggggagtttgtaaagattctgggatgaagagtttcttatctcccagttgaggagaaaacaagaccataacgagagcctcagcagtgaagccagtgctggatgaaaaaa

SEQ ID NO: 90065 - DNA, 481 bp, Homo sapiens
gcactcgttgttccccttggtagacagcagggtgcagctgtgaagtcatttttcccagtgagtggtcaccaatgtgcttagcaaggagtttagcatttgtctggttgtccactagcagataatcatttgccccaacccaccatgttcagaaatctctttctgatgaaatctcaaagcagcttggtagagccaggcatttgtgaacttagattttttttttaaattgtggtaaaatatacataatgtaaaatttaccatcttaatcatttttattatttatttatttatttatttatttatttatttattgaaacggactctccttctgttgcccaggctggaatgcagtgacacggtcttggctcactgcaacctctgcctcccaggagaatcacttgagctccagaggctgaggttgcagtgagctgagatcacaccactgcactccaacctgggcgacaggatgagactctttcttgga

SEQ ID NO: 90066 - DNA, 451 bp, Homo sapiens
tagatactcagatctgtaggaaaatatgaagaacaacagaaactaaatatgtgggtaatataaaaagacaaaatgtagttttactttcctttaaatttctttaaaaggctgtaactatataaagcaaaaattataatactgtttggtagggtttatgacatatgttgatgcaatatgtatgacaatgagagcacaaaggatggaggtataagagcaactacactacagcaagcttcctagtgtataatcttccgtttaagtagacattaatatactaatggtgcacattgtaatacacagagtcacaactaaaaacagtgcaaggaagcataggccaaaacacaaaggagggattaaatcagactactaaaaaaatttgattaattcaaaagaaggtaaggaaagagaagtagaataaaatatagttaagacaaacagaaaacaagttggt

SEQ ID NO: 90067 - DNA, 529 bp, Homo sapiens
ctcctcctaacacgtgaaccacatcatgagatgtggggagaccccgacctggtccagtggctgaaggaacacttcattttatttttgttcactcttatctgttgactccattgactttcaaagctaactatttaaagatttatgtcaccagaaagcacatttcccttcttttcttctcctggcttatgaaagcaaattaccatcttttgcctttatgttctttgaaaatatctggtagactctgaaaaacactggagaattcccaggttgtaggtccatttgtctgtttataacccattatgacatgaccatgtcttcaccattcctcctagcgtaaaggcagtgattctttttggactcctggttgccattttctgggtgtggtaggactgaggacagggattagaggaaagctagagactgcctagttttctagaacttcctcataatctctgaaagggaaatagggaagtagagaagcagagtccacaacaaacacaaacctaccacctttggtgtcattctcaga

SEQ ID NO: 90068 - DNA, 363 bp, Homo sapiens
gattgtctgaaccatctgtttttatattctgtttaccctactgtcagcccattttggagttgttaaaatcctttgaaagtagttgggaatttttcacagtaagctgggaatctataccactctttaaaaactttgtgtttttagggtattcccatttaatcctccagagaataattactttttaatttaggtgcaatgtgttaaatattatataattaaaatgtttttctcccttcccaattacttattcttagaaatcaaagtttaaattgtctaaataggtacttggccatagtgtgataacactaataacagattcgtaatgatagaatgtaaatattaatttatatgtcccctctcatt

SEQ ID NO: 90069 - DNA, 167 bp, Homo sapiens
atattttattctatttatatgaaatgtctggaataggcaaatctaaagagatggagtgtagagtagtggttgcctagagttggtggaggggaagattgagatagggaatcatttaaaatcccattaaaatcctccactcaaacccttaccattgattacattacaac

SEQ ID NO: 90070 - DNA, 554 bp, Homo sapiens
  misc_feature (544)..(544): n is a, c, g, or t
gggcaccagagaggacagagaacagcaaaaagaggggagaggagctggagaaacagcagaggaggcagtgactttctgagaggtacctggaaacgccccccactctcccttcacatcctaagtcctttagaagagtggggagaggaaatcagaagagagcagaaggaaatgattgaaggtttctcctaaagttaaacagttttcttccttcattctgtaaagcgagtgtgaggaacggaaggaagcatttccacacttttttgttcctctccgcctttactgaccgtctagcatgggtctagtcttgagtcaggtcctgcgaggaatgaaagtatggacctagttgctgctttcaaagagctggcaacgttgttggaatgacaagaccacacaagggagaacaattagagaacaagaagaggtcaggacaaaggaaaaataattaagggcaggtgggacaaaattaacatatcaataagttacaaaaatacaatttagttttattaaaagggaaggttatcagaacggacgggtttgcaatggnttcgatgtta

SEQ ID NO: 90071 - DNA, 1456 bp, Homo sapiens
ggaattttcttagtagatagatgtttcaaaaacaaagaatcttatctcagttcctgtcatggctttcatgtgtaatcgaaaagtatattagaaaaagtactggattaaatttgcctttcttaaagtataccttttacaaaagtattgatttgcagttaaaaagaaggtggggatgcctctgctggtgcagtatcttgtgaagataaatagactcctgagtggtgaattctgatctctttcacgttcattcttaactttctattttagtaataatcatagttaccattgattataagtacccagcactgtgataaattgaattcacattacatttatgacactttctaattcaaaacacagtcacagtagagtttttatcaatctgtacactggtaagcgatggtaaaattatggccctgatagcttcacagactaatggaaaatttctgaaagtttacaagtacagaaaaacaaagaaaaaaaacccagtcttttataaggaatgtagatacagaccattgtacaatttaaaatatacataatgtcagtcttttctttgtatggcaaaaatgacatttgggaactgctcatggtgactcaacgcttgtaatgtaatcccagctactcggaggctgaggcgggagaattatttgagccccagattttgaggctgcagcgaactatgcaatccagcctaggccacagagcgggaccttgtctctaaaaataaaaaataaggtcaggtggaatagctcaagcctgtaattccaacaactgggaggtgaggtaggaggatttatcacttgaggctagtagttcagggtcagcctgtgcaatgtagtgagatctgatccctacaaaatcaaaatagtagctgagcttggtgtggtgcacactgtagtcccagctactcaggaggctggagaggatctcttgaactcaggttgaggctgcagtgagccatgatcatgccactggactctgtgctgagcaacagagtgagaccctgtctctaaataaataaataaacaaataaaaaaacagtaaaaaaaagttcagttcaatccttatctgtattaaacttcctttaacttgtgtggagttacatttaatattttcttatatgaagttcaaaggttataacaatttctgatccaatgaatatttactataaaatttttaatataaatgtgttgatggtgtaaaagcccataaaaaatgggaagtttatattgtcttgtgctttggtgtatgtatacacattaccttctggactctatcatacattttcataattactacattacatatataggattaagtttaatgtactctttttagtactaaagtcagaaatattttggtataagaatgatcaacttgttgggttctctaggtgcctaaattatttcatatttatacttaaaagctactgaattaaaatactttttaatac

SEQ ID NO: 90072 - DNA, 586 bp, Homo sapiens
cggtcgatctagagatcctttttctgccacgactcgaccaggaggtctgctggcttcacctctcactgggattacaggtgcgtgccaccatgccctgctaatttttgtatttttagtagagatggggcttcatcatgttggccaggctggtcttacagttttcgtttgataaaatgctttttgtttgtttgtttgtttcttgagttcagattcagtagcctggtataatgacaaactagaaatcacagtatgggaaaaatataggagatgatgctttgatttcaggaatattgtggattatcaaactaaaattagcagattctatttagcctcttagaatttcaaaaatttttagacattagtatacatccccaccttcacgatatcagaaataaagggtagtgaagatagcagagtgaaatatgagaattgtctccatttcagaaggtatttggctgaaatgagacatttcacaatttggtcttctggtctgctcatcactggaagtcccagcttcttcctggataagaagttgtacttggattatattattataaccacattgtaattattattgtggaaacac

SEQ ID NO: 90073 - DNA, 1792 bp, Homo sapiens
tatatctaaatgagccctgtatatctaaaactgatgagtgtttctaaatgttgatgtccatttacttgccttggtattaagataatgcaagtaaagtttagtaagtcatggataatgaaatgattatgtttctgaagaccatattatatttttaatttttagaggaatcatgccatcccccaaaaaatcaagaaatatttgaattttaaattataagttcattgttaaaagacatttttacaaatgtctgaaaatcttaaaatactttacatctacctttaagtagtagaatacagagctgtaaatttccatgccttttttcctgatattaagttttatagtaaaaaagcaactagtgattgcacaaagaatataaaaatccactctttttacaaaggtgtgaatttaaataacgttattgattggaatatgaaaatagaccaatcatttaagagctttttagcaaatgattcaattcttactctttttctcccaagattgaaaagcataatgtatttctctaaagtaggaatctagagagcccctgtgagtggacaaatgtcagtaacacttgaacacatgagaagataagtgttatgttgtgataatttaaagttaaatttgctttttgggtaggatccctaaatagatgggatttttaaatagatgatatatagatgacaattgcaattgtcattttaattattttccctacagtaaagaacctagctctgagcagtgaaattgtaatggcactttaaaggaagtaagccgttaactgttctctagtggagcgatctccaactgttttggcactagggacgggttttgtggaagaaaatttttccacgggactgggggtttagggggatggtttcaggatgattcaagtacattacatttatcattagattctcataaggagcatgcaacctagatctcttgcacgtgcggttcacagcaggattcgagctcctttgagaatctaatgccatggctgatctaacaggaaactgagctcaggcagtaatgcttggcaccgccccccaccttctatgcagcccggtcgtggcctggggactggggacccctgctctagtcagtaataaggtacttgtgccagaatataaatcaacacattgcttcctttatcaaagaagtcttgttatttaaaaaaagtcaactgagccagtatgattagtgatgtaattgattttcattctggcacaagcctctttcattctggacagctcacaaatagttaatggaccatgctttgaatagccttcctctaagcaacatttataaatactgatattttagaactgtttacatttcttctgtttatttttgaattttcagtttgatatcttgtccttattcattgttgtataaacaactgtactttaatttcaagtagtattaaaagtatttcacttcagtttggggggattattatcaatttataattttataaaagtattttaaagaataattgtaaattttccataaattacaacttcctgccatcttttattaaataataatcttgcttaaggcatatagacagacattattatgagtattccagtaaaaaaaatctacatcaacttgaccattctggctaaaaattaaaaagcacttttttatatctgtggttgtcatttgtttcaaagcatttctaaatttattgttcttaaaagtatgtctgcatgttctagcctttgacctaggtcatctatgaaccctctttgtgtctaataaacatatctgtaaaggcatataaatctga

SEQ ID NO: 90074 - DNA, 788 bp, Homo sapiens
tttctatagagatcgccctgccgagctagcggccgccgccagcttcgtattcatgcccgggttgtgaattggaaaacaccttgaccctgctctagtcagtaataaggtacttgtgccagaatataaatcaacacattgcttcctttatcaaagaagtcttgttatttaaaaaaagtcaactgagccagtatgattagtgatgtaattgattttcattctggcacaagcctctttcattctggacagctcacaaatagttaatggaccatgctttgaatagccttcctctaagcaacatttataaatactgatattttagaactgtttacatttcttctgtttatttttgaattttcagtttgatatcttgtccttattcattgttgtataaacaactgtactttaatttcaagtagtattaaaagtatttcacttcagtttggggggattattatcaatttataattttataaaagtattttaaagaataattgtaaattttccataaattacaacttcctgccatcttttattaaataataatcttgcttaaggcatatagacagacattattatgagtattccagtaaaaaaaatctacatcaacttgaccattctggctaaaaattaaaaagcacttttttatatctgtggttgtcatttgtttcaaagcatttctaaatttattgttcttaaaagtatgtctgcatgttctagcctttgacctaggtcatctatgaaccctctttgtgtctaataaacatatctgtaaaggcatataaatctga

SEQ ID NO: 90075 - DNA, 221 bp, Homo sapiens
tatacctgtgaggatgccagtgcttgggaggaaaggggtttgccagaggtcacttggccagagctgggagtccaacacctgcctatctgatatcacagcgtgtgctcttacccgctgcacagtgctgcccacctcctgctgcctgaggagccaggccctgaggaagccatgcttggctccctggagcagtggcacttccccttcccatggaccacatcctc

SEQ ID NO: 90076 - DNA, 416 bp, Homo sapiens
caaggactaaaagttaggactaaatccctcttcccctaccctcctcatcaggggcagtttggggtgctgagtaaaggagacgctttgggtcccgacagccttgcagcatctccaccttctgcagcaaacgcggcctcttcccatcagctgcaaacacaggcccagaggtcctgctgggaggaacgcaggcgcattgctctcagctttgcttttctggcctaacctaagcaaaattaaatggacagattttggggtagtaataagatcaacaggaagtctgaacagacaggacccagggccgtcctggccatctgggtagcaggagcttgtcaacagcctctcgggcctgccacgggagtgagagagtgcgctggatctgcttctcatatccttacatcatttcgctcaagattcac

SEQ ID NO: 90077 - DNA, 816 bp, Homo sapiens
tgttaccttccaaaagtgaaggcagagcaaaattaagcatgtttagccctggatttgagccaatccaacataaggaaattttgttttttttaagtagcattgcttttagaacctgtgaattttccttttgcatgaagatgagtgcagtactgtcttcaaaatgattgtagaatttcttggtagctttacaccgaaaaatgcgtgtaactaaataccagacatcttgaccattcagctagaaccctggcagcaacagagctatttaattgtacaaatgtgtgtaaggattatttttagtgtactaataaattaaaaacaaagctaccctgtcctcgttagtcattgctattcaatcattccagtcccaagttatttttgtgccacttggaatatgagtatttctattggtaactacaaactctatcctgtgtttgtaagaggagctgtgtaagatttttttcatttaaagggacaatttacttcattatttatctttcttttgttatagcgttgtaattcttctcagtttttctttgcacatttcaatatgcatggtttaaaaaccattaacttctctaccttttgtacagtaaggtttcattttcacactgtatagtttcattttattgttttgctttgtcagttatatacagtataaagttgctatgcacagagctttttgtaaagacagcttttttgtttactgtttttaatggtcttacttaaagaatatcttgtttgtaaaatgaatatgtctacttcagttttaaactttaaattatcctaacaaaaaaataaaatttttgtactgtaaaa

SEQ ID NO: 90078 - DNA, 418 bp, Homo sapiens
tataggcacccaccaccacactcggctaatttttgtatttttagtaaagatggggttttaccatgttggccaggctggtctcgaacttttaacctcaggtgatctgcccaccttggcctcccaaagtgctgggattacaagcgtgagccaccacacctggcgtattctgacattttcatgcactatctcttcacagtatctttgtaatagatactatcattatttatatttcatagatgaggagactgagagaacttggcaacttgcccaaggtcacacagctcactgggtaatcacaaatcctcacaaatttggtttttaggttttttgatttattttttgagacagagtgtcgctctgtcacccaggctggagtgcagtggcctgatctcagctcattggaacctctgcctcccca

SEQ ID NO: 90079 - DNA, 386 bp, Homo sapiens
cgagcttaagggttccggagagtcagggagctgcattcccatgcagataggagatgctgcccttgaagaagggcctgggagctgcatagaaaaggagcatcacccacctgtgtggggcaggggaatgggttgagttgtgtctcccaaaaagatagtttgaaatcctgacacctaggctggtcatggtggctcatgcctgtaatcccagcactttgggaggccgaggtgggcagatcacctgaggtcaggagtttgagagcagcctggccaacatggtgaaaccccattttctactaaaaatataaaaattagccaggcgtggtggcaggcgcctgtaatcccagctacttaggaggctgaggcagcagaattgcttgaacccaaga

SEQ ID NO: 90080 - DNA, 557 bp, Homo sapiens
ctttcttgaatgtattagtttcctagagctactgtaccaaattagtacaaacattagtggcttaaaacaatatattgtctcacatttctggaggccagaagtccaaaaccaagatgttggcagagccatactccttctgaagcctctatgggagaatcattccctgccttttccagtttctgatggttcctggcaatccttagcattgcatggcttcttgacacttgatactaatctctaactttgtcttcacatggtcttctttctccctcatgtttctgtttctgtatctaggtatcttaaatactcctctcctttctcttataagattaccagtcattgaattttggccccaccataaaaaaacaggatgatctcatttagacatccttaacttaaatacttctgtaaagaacctatttccaaataaggtcacatttacagataccgataccggggattaggacttagacaaatttgtgtgggggaacacaattcagcccactataatgaacatatattaggcttcagtttttaaaagatggctttaaaaaaca

SEQ ID NO: 90081 - DNA, 834 bp, Homo sapiens
ggctgtggctgtgatggtggtggtggcggcggcggtggtggtggctgcggtggctgttgctgctgcaagggatccaacatgactcctgactttctaccattgatgcttgagctctcataagacaccacaccttcattcagtgaggaagaaatgctttcactctgggaattcacagcatcccaatctgacgttgtacccgtgtgacactgtttgtgagccccaagtttcaacgagctcttgcaagtaaacggacattcgtcacatttgtagacagctgtctttccagataagtggatgttttctatgtgacgagagatgctacgtcgatgcatggtgaggaaaggacaaaaggggcactggaacctattcatgaatcttctaaatggaatccccttggtctccaataatttgttgccatctgagcccatcagctgctctgcagacaggcctgatgtctggtgatccatagcacttaaaccattctcactgtctatttcatttaactcttcatcagaactagagtcatttagcatgctgttagtttccaggtcagcagaagaattggtcatgtcagtcattccataacgggatctctctgtcaagttaactagaccagaattgtgaggtgacttcggcttcatctgagggtaagacatgggcgaaaacttggaagctgaagaattgggtctcatgatggagttgcccatggagcccctgaagttggagacggtagtattgggtatctcccggcttgcagcattcatggtcagataggtggagttggaagtggggctgggggcactcttgttcggcacatcaggtagattagttcct

SEQ ID NO: 90082 - DNA, 236 bp, Homo sapiens
taacactcagggaaaaaggaattatccatcgcagaaaactaaaactgagtttaaaggcacattactgacatgtttagagtcagccaatcagcaacagaattctgattgttctgtccccaccttcacccccacctcccctgtgggcttaagaaactcttacttatcctccaagactctgctcaggcatcacctctagaaagctctccttgcctccaccttccaagttgaattaggtg

SEQ ID NO: 90083 - DNA, 322 bp, Homo sapiens
tgagaattcaatttttaaaattcattctggcacatatttatttaagaattataaaaatattggctttcagcctgggtgcagtggttcatgcctgtaatcccagcactttgggaggccgagggaggtagactgcttgagctcaggagttctaggccagcctgtgcaacatggcgaaaccccatctctacaaaaaaatacaaaaaattagctgggcatggtggcacacacttgacgtcccagctactagggaggctgcagtgagctgaggtctcaatactgcacttcatgctgttttctataacagcctgggtgacagagaccc

SEQ ID NO: 90084 - DNA, 356 bp, Homo sapiens
ttgcgcttgcagggagaagtgtatagagcggagttctgtgcgctcgcagagaatgagtgttgttgcaatggctgcatgtgtccgtgctcaggaagatcatggtggtgtgccatccatgttgaacccagaattgcttcgtggatattcagacccctagactcagcatctctaaggaaggtggaaatattcagcctgctcggtggcaacaccatggaaagtttatttaccggctgtggtgggtggccaacccctggagaatgcccttctctggaggttgtaggagtcctttctaaccagctgttgccagatgagaaaaagaaagctgagcgagcttgtcccccgccccacgacaccac

SEQ ID NO: 90085 - DNA, 640 bp, Homo sapiens
ctcctacctttgtgtcaaatacgatactgatcctttcggcaactcaagggaaatggcctgcctagtgggagtgttctgcaagcctgtgagctcatgccactgcccgcgtagttactgcctcaaagccatctgctcaggttgctgagtgtcccgggagacggtgtctccactgatggagagagacaagaaagacagggaaggtagagaaacgcaaagaccagaaaggtgtatcgagagcggtgaagtctcctgttgccgccttcggccagcaggaggaaaggtgttatcaagagcagcgaagtctcctgttgtcgccttcggccagcaggaatggcagtgtttgtttggcacatggctgcatgtgtccgtgctcaggaagatcatggtggtgtgccatccatgttgaacccagaattgcttcgtggatattcagacccctagactcagcatctctaaggaaggtggaaatattcagcctgctcggtggcaacaccatggaaagtttatttaccggctgtggtgggtggccaacccctggagaatgcccttctctggaggttgtaggagtcctttctaaccagctgttgccagatgagaaaaagaaagctgagcgagcttgtcccccgccccacgacaccac

SEQ ID NO: 90086 - DNA, 367 bp, Homo sapiens
ggtaaaataatttttactaagacagttgtaggtaaagttattagcgaaagaagcaaaatccatcgcaagggaggccatgggaagcctgcaggagagaagcagaggcttgtgggtgattttatagaatggaacttgggctgattgatagtgccaaggcagcagagtgccaaggcagcagggagcttaacttgcattcctctgtcagccccggtgtttgataaattgaggcgtttgatggtgagcaggaagtctgtgaattaagtgcgttatctgggcaagaaggccatgtcttgggccataaagaaagttagacatgtacaggagttccagaccagcctggccaagatggcgaaaccccttctctact

SEQ ID NO: 90087 - DNA, 410 bp, Homo sapiens
agacagagttcacttaaaatgcatttaacaatttacagataactggaaagtaattcattcatcttagaaccctggtagggacattctattaaaatatttgtgtactagttaaagtcaaaatagaaatacagcctatcacacggtatttatactatgcattatgattaataaagccacctaaggtcgttactccatgatcatgggaagttgttagtcattaagagttcgggtttagcaacaaaaatcttgcgtttgaatctaaacacattacatgattttaagcatgttcatcattctgagattaaataaaaattaaggaaatatatgaaaaatgcttaataagtacccaaaaggtaatatggtgtagcaacttagaatgtagacttcagagccagtcagctaggattaaa

SEQ ID NO: 90088 - DNA, 308 bp, Homo sapiens
ccttacctcctgaagacctggattggagaggctagaacccagatgccagagtcagatccctgcagctcactctctgaatgaccttgggcaaattttttagtacttctgagccccaatcttctcactgtagagctaacctagtccaacaagttcatttttcaaaagatgacattaacgttgcatccccaaagccacacaacaagtaagtgcaaaagggagggcagtgaccaggccttctgccctcggcacgccaggcccttctgcgtcattatctcatctggtcctcactgccagcctccgggatgctg

SEQ ID NO: 90089 - DNA, 445 bp, Homo sapiens
gcttttgcttaagatgcctttgaatattcttttatgtggttttatataaatattagaattttgtttctacttctgtgaagaatgtcattggtattttgatgggattgcattaaatctgtaaattgatttggcagtatgaacattttaacaacattgattattttatttcatgcaatataaaataccttttcattttgtttcatcttctttaatttctttaatttatattttacagattcattatagaaatctttcccttatttagttgtttattcctacttatttgtaagtattgtaaagaaaattttttttcagaatgatttctattgggatatagaaatgctactaatttttgtatgttggttttctatcctgcattattacttaatttcaaatctctctttaaaatacattttataagaaagaaagaaataaaattcataga

SEQ ID NO: 90090 - DNA, 449 bp, Homo sapiens
gattcttcctcacttgaataatacttttcttccccagtattctccatattatcccagagtcagcccctctgtttttgtaaagatctacgtaacctcctctaagtttcccagttctcctcacctatcatatcatttggctcaacaaagggcaggaagctagattctaattgatattttgaggccgggagcagtggctcatgcctgtaatcacagcactttgggaggctgaggcgggcagatcactggaggtcaggagttcgagaccagcctggccagtatggtgaaacctcgtctctactaaaaatacaaaaattaggcaggcatggtggtgtgtgcctgtaatcccagctactcaggaggctgaggtaggagaattgcttgaacctggcaggaagaggttgcagtgagccgagattgctcaattgcaccccagcctgggtgacagagca

SEQ ID NO: 90091 - DNA, 244 bp, Homo sapiens
gccactgctcctgaccttatctaggtcttctttaatctctcttagaaatgttttgtggtttttagtggaggtcttacatatctttcagaagatttattgctagctatttatattttcttgctactgtaagttgtctttgttttctagttgtttgttgctagtatatagaaataaacttaactttgtatgttgacattttgtctagtggccttgctaaatttattaattctaatagcttgtagat

SEQ ID NO: 90092 - DNA, 115 bp, Homo sapiens
aagttcccctctgtattgagagaccataaatatcattttatggaaaagtcatgcttttctaaattcttcaataagtcaggatgtttagacactgactctgtggctaaatgggcaa

SEQ ID NO: 90093 - DNA, 369 bp, Homo sapiens
tccaatgtgtttggattcaaggaattaagggtctgtataaatacttatttttctgtgtgtgcattttcttgtgtttattttcattggttttgagtttgacttaatatacacatgtgcatttaaaaagatgatctttccaaaagctttgcttgggatctttgctaggaggatgagttaatggatggagagggctgcttgctttactgtttattttcccagacaaatccatggagacaggctgctaataggataggagaaaaacaacaaaaacaaatacagctttttggcctggaactgaattgtattatctgtactgtcagttagagcctttgctcacttacccagacgatctctacagggattaaagct

SEQ ID NO: 90094 - DNA, 430 bp, Homo sapiens
agaactttcgaattgagacccagtatttgtggctacctgtgtgtgtgcacacacacaactgaaacaatttcagcttagcctcactctccgtgttatattgtaatctatcctttttttccccctatttaatttaaaagaaaattgcttgtcaagagacccagcatattgatttcctattagggatcagcggtctagaagtacatcttgaacattcacagcttgtcctgaatttagctgtgggaatgtctaagggtactttgaccagtccatactacagagaccctttcttcatgatggtgtggtgtgcaggagggtgttcaggggtgacatgatgttctttttgtcaacttgggactttgatttcaccagagtaaagaggatcgtagaaatcttgctaagtcaaggaaattcttatttaccgccatagact

SEQ ID NO: 90095 - DNA, 2162 bp, Homo sapiens
ccgcggctccccgactcctttcccagaggtgagtgcccgaagccaggagcccggggcgcctaggtctgtgcgctgcggggaacccctaccgccagcctccccgccacccgcgcgcccccaagcccagcgggcgaggccccgggcgccccacagccggcgccgcgccatgctccaccttagcgagttttccgaacccgacgcgctcctcgtcaagtccactgaaggctgttgcgccgaacccagcgctgaattgccccggctgcctgccagggacgctcccgcggccaccggctaccctggagcaggcgacttcttgagctgggctttgaacagctgcggcgcaagtggggacttagccgactcctgcttcctggaggggcctgcgcccacaccccctcccggcctcagctacagcggtagcttcttcattcaggcagtgcccgaacacccgcacgacccggaggcactcttcaacctcatgtcgggcgtcttaggcctggcacccttccccggtccagaggcagcagcgtccagatccccgctggatgccccttttcctgcggggtccgatgccttgctgccgggtccgccggacctttactccccggatctgggcgctgcccctttcccagaggcgttctgggaggcctcgccttgcgcgggtgccccctcgcagtgcctgtatgagcctcagctctccccgcccgacgtcaagcccggcctccggcggcctcccgcctcgccagcgctggacgctgtctctgccttcaagggtccctacgcgccctgggagctgctttctgtgggggccccagggaactgtgggtcacagggagactaccaggccgccccggaggctcgttttcccgtaatagggaccaagattgaggacttgctgtccatcagctgccctgcggaactgccggccgtcccagccaacagactctatcccagcggggcctatgacgctttcccgctggccccgggtgacttaggggagggggctgagggcctccctgggctcctgacccctcctagtggggagggagggagtagcggcgacggcggagagtttctggccagtacgcagcctcagctttccccgctgggccttcgcagcgccgccgcggcggacttccctaaacctctggtggcggacatccctggaagcagtggcgtggctgcaccacccgtgccgccgccgccgcccacccctttcccccaggccaaggcgcgacgcaaggggcgccgcggcggcaaatgcagcacgcgctgcttctgcccgcggccgcacgccaaggccttcgcttgcccggtggagagttgtgtgcggagctttgcgcgctccgacgagctcaatcgccacctgcgcatccacacgggccacaaacccttccagtgccgcatctgcctccgcaacttcagccgcagcgaccacctcaccacgcacgtgcgcacccacaccggcgagaagccttttgcttgcgacgtgtgcggccgccgcttcgcgcgcagcgatgagaagaaacggcacagcaaggtgcacctcaagcagaaggcgcgcgccgaggagcggctcaagggcctcggcttttactcgctgggcctctccttcgcttctctctgagcaagagatgggtttatgggttggggcgccgccgttcggcgcgcacgagttccgggccgttcccctccccgctcttcttccaactcctcctcgcacgcccgagggccggcctccggtcccgcttccagtttccttgaagcgcccgccgcacacgccctattcagcaccagctccgcggacagttcccgcggtccaggcgctgtcacccttgtcagccgcgctttgggggaagtcttctgagaccacccagtgaataggcactaccctgggattcaagacagtcttttgtaactggcacacgccccacgccttcctctataacccccagagacaggctggggcagcgccaaggcggtctcgcgcgggactttgtacagcagtgtcttatccagcagccattggatgtaacgttttgctttgggttttttttccttttgttgttgttaatttttgtaaagcagacgctactctcaagcagttgacaaaactgtttatttttgcaattaaaattattgtgctaaaagcttactgaatc

SEQ ID NO: 90096 - DNA, 674 bp, Homo sapiens
cagcgctttggagaggcgaggagccgccgcccgaggccggtgcgggcgagcgagggcgccgcggctccccgactcctttcccagaggtgagtgcccgaagccaggagcccggggcgcctaggtctgtgcgctgcggggaacccctaccgccagcctccccgccacccgcgcgcccccaagcccagcgggcgaggccccgggcgccccacagccggcgccgcgccatgctccaccttagcgagttttccgaacccgacgcgctcctcgtcaagtccactgaaggctgttgcgccgaacccagcgctgaattgccccggctgcctgccagggacgctcccgcggccaccggctaccctggaggtaaggagggcgagcaggggtgctcagacgacgacggcgcagcgcgggggcgcaccatacctgagaaccaggagggactgggacattggagctatgagaataggggcgatgggaagcttaggagtcctggggtgcgcacccccattcccacccacactgggccgccagcgcctccgcaggaacctgtgcggttatcggagcgcccttttgcctgtgcacgtgtgttttgcgtgtgcatgtttctatgtgctccttgggacgtatgcgggcccctgctgaatcagaatgtgcaaaaggcactttgtgtatatccg

SEQ ID NO: 90097 - DNA, 184 bp, Homo sapiens
ggctgacactgactgtgggggcgaaagcgtgcttggtttgagttctaggactgggggacaggaggtggagtgagtgagtgtagatgataccttccagtgcccgaggcaggaagttgggtcaggagagaatgttttctagagggaaaattccaaacgtgtaggtacagccccacagtgtggccag

SEQ ID NO: 90098 - DNA, 136 bp, Homo sapiens
tatccttctaactgtagttaattcattcagttttgtgttgtagatgttcatccacacgtttccatgtagatctagtgcattgtaactgctctacagtatacagtatgggaggactccatgatttatacaatacctc

SEQ ID NO: 90099 - DNA, 881 bp, Homo sapiens
ttttttaaaaggaggtatctaaaatttaaaataattcaatcatttcccatcacttctgtaagttccaaggtctttaggacaacatcaggtttttttggtacccatttccctcagactttatggtgtgttaataatgaaatacaatactcaagatgcttgagtaggaatttcctctatgtgaaatggcttcatgtgtccttccctgctccttcatccgcctgacaaaattctgcctgtattttaaaatcttgttatcacaccacttccaacccatactgcacaacaaataagccactgtaattattattttcatagtttacctcctcatgagatactgaacttttggttttctttgcatctttggtatatgataataatttgagacataaataggtcagaaaagggtgtgaacaaaacttcgtatatggaaggaaaatttcatattaattaaaagcctactatgtacctaaccttgcactgtcactcacactcatttctcacaacgtgaagtaacaacaacaacaacataatggacaacacttatataacacttactagtgtttaggtatcaggatttagcataaacatttcacatatgttaaatcatttaatcctccacaaccttggagtatatatttctacccaatttagagaaaactgaggcacagtcattaaaatgaatgaaaactggtgtattttatttcctttaccactcaagttactttaagggtgctatatcactaagaaagaaacacagatagttttgccaagtaaaacataacccataaaaaattaaagggtttagaataaaagctgaaatttaaggtttcattgtatctactctccctcaacccaattaaaataaaaattcttttcagatc

SEQ ID NO: 90100 - DNA, 416 bp, Homo sapiens
gggacatgtcagtccttttcctcaagggtgctaggacccacctttctccccacacacctcagtttccaccaccctgctccccctgaggacccaccagtgccaggatggacacgaactggaccccccgcctgataaggggggcagggcaccttgaggagcaactgagagcagctggggccagcaggtcctaaggtcggggccagcaggtcctgaggtcaagcccagctctgtcccgtgccccagcatttctcatcatggggtggcatttcagggttgatctcacttggccctgtgcccgagggtgacctgtgtaatccctgtttacttggcaactctcaacctagagatgagagacttcacaaaaatccttacttggcccagagccctttgtcccaaggcgtcgtggtgctggggca

SEQ ID NO: 90101 - DNA, 2357 bp, Homo sapiens
gggaggcggagcgccgggacgccaagcacttcctgccgcgggcggcgcgccgcagctgcccaggccggaccgggccgggcgcccgcagatgagccccgctagggccgccccgcgctgagagcccagccccgccgctgcccgcccgccatgtctcagatgctgcacatcgagatccccaacttcgggaacacagtgctgggctgcctgaacgagcagcgcctgctgggcctctactgcgatgtgtccatcgtggtcaagggccaggccttcaaggcccaccgggcggtgctggccgccagcagcctctacttccgcgacctgttcagcggcaacagcaagagcgccttcgagctgcccggctccgtgccgcccgcctgcttccagcagatcctgtccttctgctacacgggcaggctcaccatgacggccagcgagcagctcgtggtcatgtacacggccggcttcctgcagatccagcacatcgtggagcgcggcaccgacctcatgttcaaggtgagctcgccccactgcgactcgcagaccgctgtgatcgaggacgccggctccgagccccagagcccctgcaaccagctgcagccggccgccgccgccgcggccccctacgtcgtgtccccctcggtgcccatcccgctgctgacccgagtaaagcatgaagccatggagctgccgccggccggcccaggcctggcccccaagcgcccgctggagacggggccccgggacggcgtggcggtggccgcgggggctgcggtggcggcgggcacagcccctctcaaactgccccgtgtctcctactacggggtgcccagcctggccaccctcatccccggcatccagcagatgccctacccccagggggagcggaccagtccaggcgccagcagcctgcccaccaccgacagccccacctcgtaccacaacgaggaggacgaggaggacgacgaggcctacgacaccatggtggaggagcagtacggccagatgtacatcaaggcctccggcagctatgcagtgcaagagaagcctgagccagtgccgctggagagccgctcctgcgtcctcatccgccgcgacctcgtggccctacctgccagcctcatcagccagatcggataccgctgccatcccaagctctactcggaaggggaccccggggagaagctggagctggtggcaggctctggggtctacatcacacgcggccagctgatgaactgccacctgtgtgcaggggtgaagcataaggtcttgctgcggaggctcctggccaccttctttgacaggaacacactggccaacagctgcgggactggcatccgctcgtccaccagcgaccccagccggaagccgctggacagccgggtcctgaacgctgtgaaattgtactgtcagaacttcgcccccagcttcaaggagagcgagatgaacgtgatcgccgcggacatgtgcaccaacgcccgccgcgttcgcaagcgctggctgcccaagatcaagtccatgctgccggagggcgtggagatgtaccgcacggtcatgggctccgccgccgccagcgtgcccctcgaccccgagttcccgcctgccgcggcacaggtgttcgagcaacgcatctacgccgagcggcggggcgacgccgccaccatcgtggctctgagaactgacgccgtgaatgttgacctgagtgccgccgccaaccccgccttcgacgccggcgaggaggtggacggggctggctcggtcatccaggaggtggccgcccccgagccgctgcccgccgatggccagagccccccacagccctttgagcagggcgggggcggccccagcaggccccagacgccggcggccgcggcccggaggccggagggcacctatgcagggaccttgtaagcggagctgggtggctgcgcgagggaccgagtactagagctgcttgcatgcgttactaatacaaacaaatgtgatcaagccacttacctactgaactgctactgttgcctgagaaaaatgtgatttttattctgcttgtatttaaaattgatgaaggaaacaaatgcattcattatactgtaaacaattaggccactggcagcctcctgcgaggaagttcccagggctcccttttgatattcacaaggtcagcctccaagtgtagcttccctcccccttcttggggagggtgggaggccgccaggcccctggtgcccagccctgccccttcctccctgcccttcctgctcctcctgcccggaagacgaagcaggggccggcggtggtctgtggcgagggggctgggctgtgcgtcactgacccttccttccttccccatggaacct

SEQ ID NO: 90102 - DNA, 1637 bp, Homo sapiens
gaaggtggcagttctgctacagcggccagtcctggggtgacaggaggccacgggtcccccagtacccgagacccaggctcaggagggacctcagtgtgaccggcaggggcctcttccttgctcacaagcccatcgaggggcctcctgccaccctggaacccagctctggccccgactcacggggcctctgaatggcccttccgggggccacgagggatgagccgtcctgtctctgccatgaacaagtctctctgcgggttctccgttaaagcccagttgtagcctggaccttgaagctcagctcctgcagaggtgcaagagaagcctgagccagtgccgctggagagccgctcctgcgtcctcatccgccgcgacctcgtggccctacctgccagcctcatcagccagatcggataccgctgccatcccaagctctactcggaaggggaccccggggagaagctggagctggtggcaggctctggggtctacatcacacgcggccagctgatgaactgccacctgtgtgcaggggtgaagcataaggtcttgctgcggaggctcctggccaccttctttgacaggaacacactggccaacagctgcgggactggcatccgctcgtccaccagcgaccccagccggaagccgctggacagccgggtcctgaacgctgtgaaattgtactgtcagaacttcgcccccagcttcaaggagagcgagatgaacgtgatcgccgcggacatgtgcaccaacgcccgccgcgttcgcaagcgctggctgcccaagatcaagtccatgctgccggagggcgtggagatgtaccgcacggtcatgggctccgccgccgccagcgtgcccctcgaccccgagttcccgcctgccgcggcacaggtgttcgagcaacgcatctacgccgagcggcggggcgacgccgccaccatcgtggctctgagaactgacgccgtgaatgttgacctgagtgccgccgccaaccccgccttcgacgccggcgaggaggtggacggggctggctcggtcatccaggaggtggccgcccccgagccgctgcccgccgatggccagagccccccacagccctttgagcagggcgggggcggccccagcaggccccagacgccggcggccgcggcccggaggccggagggcacctatgcagggaccttgtaagcggagctgggtggctgcgcgagggaccgagtactagagctgcttgcatgcgttactaatacaaacaaatgtgatcaagccacttacctactgaactgctactgttgcctgagaaaaatgtgatttttattctgcttgtatttaaaattgatgaaggaaacaaatgcattcattatactgtaaacaattaggccactggcagcctcctgcgaggaagttcccagggctcccttttgatattcacaaggtcagcctccaagtgtagcttccctcccccttcttggggagggtgggaggccgccaggcccctggtgcccagccctgccccttcctccctgcccttcctgctcctcctgcccggaagacgaagcaggggccggcggtggtctgtggcgagggggctgggctgtgcgtcactgacccttccttccttccccatggaacct

SEQ ID NO: 90103 - DNA, 727 bp, Homo sapiens
ctcacagctggcggacggccaaggctgctgggcctgaccaggccagagactgttccagaggaatggggtggggaggcctcccaggccgagcagtgagaaacgtgacctctggtcttctggctgaggccaggagagccccaggtggtcacatgggccccaggagcggccggggaggctcatccagggcatcatggttctgtggccttggggaggggcgggcctcccggcaggcaggtggctgagctcacgccgccccgtcctcacagtgtactgtcagaacttcgcccccagcttcaaggagagcgagatgaacgtgatcgccgcggacatgtgcaccaacgcccgccgcgttcgcaagcgctggctgcccaagatcaagtccatgctgccggagggcgtggagatgtaccgcacggtcatgggctccgccgccgccagcgtgcccctcgaccccgagttcccgcctgccgcggcacaggtgttcgagcaacgcatctacgccgagcggcggggcgacgccgccaccatcgtggctctgagaactgacgccgtgaatgttgacctgagtgccgccgccaaccccgccttcgacgccggcgaggaggtggacggggctggctcggtcatccaggaggtggccgcccccgagccgctgcccgccgatggccagagccccccacagccctttgagcagggcgggggcggccccagcaggccccagacgccg

SEQ ID NO: 90104 - DNA, 240 bp, Homo sapiens
tacacactcattttcatcttaaagactctacatttatattggtctatattggaaaaaacatagagatatggccaggacctgaaatctggtgcgcactgaagttgatcagggcagtgtgtgcttaatctgaacatcgacaccatcaggaagcagcaactccctgcatgattgacatttctctttttttttgaggtggaatctcactctgttgcccaggctggagtgcagtggcgtgatctc

SEQ ID NO: 90105 - DNA, 297 bp, Homo sapiens
atttatagacattatgcaacgttatattttgtcttctgtgtggattcttcagaaagtgaacttggcattttagatctaattcaagtatttgtggaaacattagacaaatgttttgaaaatgtctgtgagctggatttgattttccatgtagacaaggttcacaatattcttgcagaaatggtgatggggggaatggtattggagacaatatgaatgagattgttacacaaattgatgcacaaaataagctggaaaatggtccatcacatggccactctataacggatcgtctagagt

SEQ ID NO: 90106 - DNA, 576 bp, Homo sapiens
ctgggatcccaggaaacccctccaaagggacgcagcccaacaaaatgagtattgatcttaaaatccccctcccctaccaggacggctgtgctgtgctcgacctgagctttcaaaagttaagttatggaccaaatcccatagcgagcccctagtgactttctgtaggggtccccataggtgtatgggggtctctatagataatatatgtgctgtgtgtaattttaaatttctccaaccgtgctgtacaaatgtgtggatttgtaatcaggctattttgttgttgttgttgttgttcagagccattaatataatatttaaagttgagttcactggataagtttttcatcttgcccaaccatttctaactgccaaattgaattcaagaaaccgatgtgggttttgtttcctgtacaattatgagatataattctttttcccattgtaggtcttttacaaaacaagaaaataatttatttttttgttggtggataaagaagtcaagtatctgatactttttatttacaaagtgtgatggttttgtatagtaggttccaccctgagtattcctaaaagaaa

SEQ ID NO: 90107 - DNA, 372 bp, Homo sapiens
tccatactggaaggacaaggggaaacagtgttctggggtgaaaatggagaacgaagtcctccggggcagtttttggtgttcctcttttactgtttaggcctggtcagctctggtcccaaacttggacatcccagctcaaccaaacctcaccctgacactacctgcctgggtcctctccttacagtgcagttcagtcactgtgccattgatcaggtcagcccttggggtcttaccactccccggtgtggctactaaggtactgacttcctttagactattttttaaacaatgcacccctaattacacttgagatattttagaatcttggtagaatttgagcaccctacaatatagctcccagcctggcctgcc

SEQ ID NO: 90108 - DNA, 314 bp, Homo sapiens
agttgacttggtcatgcagctattaaatctcagaaccaggactagaacctaggttttctcattaacttttttactatgagaaagttgcagggaagaaaacaatatcatacattccctggtaaattgttaaggattcataattataaatgctttacctttccagaatggtggttataagggatgtttttgtttagcaggggacttccagagacaaaaatattgagcttttttaacatttaaaaaattaattacattttaatcttctagacgtaatttcaggtaccatgaacctgtgagggagacacttttaatta

SEQ ID NO: 90109 - DNA, 428 bp, Homo sapiens
aacacatccaattcctttggacaactcctctcaccttgctgcataactttattacattcttcactgatgtgctaggtcagtgtttcctgatagaatccactgtggtctgtggaacacatcatgatgggaatgcccattcttaacacctttctccacccactgcacactcatcctttaccagtaagatatctatctatatcatactttccagaagagaaaaaacattagtattactataggcacacagatctatatgttaaggttcaacttaaataccacttcttcctagctagacataatcttttcatcttctgaattcatgtaacactttatctgtatcattcctatttcatatagggctttaaaatacctttatcagagttatctatatacatttgatctctgacactacttggacaggtttttag

SEQ ID NO: 90110 - DNA, 279 bp, Homo sapiens
tcctgttactccatcagctgctttcaacgctaagaccctgctcacctccacagccaatcccaagccacagcccccttcagcagtaccatgggatcctgtggctaagagagcaccctggatcacgccccctcctgagttccagggccccaccctctgcgttggtgtggtgtgtgacctggtggctgggaaatacccaagttgcagctggatatgcttttttttccttctgagacagggtcttacgctgtccctcaggctggagtacagtagtatgactat

SEQ ID NO: 90111 - DNA, 412 bp, Homo sapiens
ccagtaatcagcgtaccgtctgagcagctgggaagggcctcagaatccctacagggacagctttaatgctctatgtttagtcaggcaagctcctttctttaataacaatgaaaccaagcttgcaaaatccctgaatggaaagggcctttttttcagggaacttgcagactatttaaatgagttaaagatgaaaaacaaatataaattcagctccttagtggtactagccacatttccagtgctcagtagtcacgtgtgcttagtggctgctgtactggatggtgcatttccaatatctagaccacttctgtcactgcagaaagttctggacagtgctgaactgcagaaggtcttctggctccacagagatttttctcagggtcttccatgatacctgaattccagatcttgg

SEQ ID NO: 90112 - DNA, 239 bp, Homo sapiens
tgatctttttcatttaacagcttagtccagtgccttgcctggactgccactagctgtcttttggtctagaagaagccatgagcaggttccaattgtattgcttctaaacacttgctgactgtcaaaaagaccccatccctttggggacataagccctagagttgagagcacccacaggattcacgcttccctgactctggggttccctttagggctttaccagatggaaaactagcacc

SEQ ID NO: 90113 - DNA, 459 bp, Homo sapiens
gagatccaagtgtatgttcagatttagttggaaagagtttagaaagtagctggattgcgtcactgcactccagcctgggcgacagagcaagactccgtctccaaaaaaaaagaaagtagctggaaagcggactttcagctccagagtagagtaaaaattttaaaaacaagaaaaaggaatatagtacactcaggaacatgtaacttctggtcttttaggaagctgcctcttttttctttttctttttgagacggagtcttgctctgtcacccaggctggagtacagtggcatgatctcagctcactgcagcctcagccccctgggatcaagcgattctcctgcctcagcctcccgagtagctgggattacaggcacacgccaccacgcctggataatttttgtatttttggtagagacggggtttcaccatgttggccaggctggtctcaaactcctga

SEQ ID NO: 90114 - DNA, 395 bp, Homo sapiens
atgaaccttgttccctaagggtaatttaattgctttactattagattggtgcaaaagtaattgtggcctttgccattactttccatggcaaaaaccgcaattacaaaagccgctactttcaatagcaaaaaccacaattacttttgcaccaacctagtatttagtatggatcctcacaaggtttttactctgggtactcaagcgtatgtatatccaggcatactttcagggtgttttatttgttggcagcaaccagtatttcatagtaagaaccataacttaactttcctgtgggtagattttggagttatttcatggagatttttactagtccagactctgcagtgcaggtgtcttttgtgcacttgaccaggtgttgttacaggattaatttt

SEQ ID NO: 90115 - DNA, 394 bp, Homo sapiens
atgggttagggttaaagttttgtgattctagctgttgacataacaaaccagtgtctgctagtccagatctgccaacacttatcaggactaattaccttgaacactaggtgatagctggtgtccttagagttgtgtaagaagccagcttccttttaggatgccagtttgcagcagatcagtattttaacaaccttcctgttaacctaaatatttaaaggtattactagattctggttacacattttgtcatgggtgatgatatatatttcctatggtatcatttagtaataatgtcaagttgtttcagtattaatgacactaaatttgatcacttatggtgataatagtcatatctctcttatagagatttgctttggagttagtaagtcctgtc

SEQ ID NO: 90116 - DNA, 861 bp, Homo sapiens
aaattgttaccaaattctttataggaaggagagtgcaaaattatgtaaatgatggtcaggtttactgtgttatattaagcaatttaaagtgataacaaaatgaaaggtagtgcagcaaaataatataactggtgagtagacctactttcagttccatagggtgtttgtggcagaacacagtgcagaacaggaggaatattacattttttttcaaatttagaataattatgtccatcaaatgtttcttactgaatatgtctatcaaatatgtttcttattgaatatttctatcaagtgaatccacaatttaaaagtcactttggttttatatatacacacatctgcagatataattttataagaacacacaaatataatcctgtcattcgtactggtttccatgacatagtatcttgttttctttcattgtggtacaatgcaaagtagccacagattcctcccatcccaagtagcgtctctttgtctactacttgactttgaacttggccacgtgactttctttggccaatggaaattagcaaagagaatcaataagaagcttgagaagtgtgcaaagcctgccttgaagcttaccctctcttgctgctctttgcaaacctgaagaatctcaaattgccctactcgggggtgaggagccaccacatggagcagtggtgagccagccttgctgaggccccttagaccaagtagcctgccaattgtcagaattgggagtgaggttttccaagacctctagccccagctgagccagcctagcccagaagagccataccagttattccagctgatttacagaattgtgagataaataaaatgatgatagttttaagcaacatgagt

SEQ ID NO: 90117 - DNA, 422 bp, Homo sapiens
cgctgaaaaggatttcggattgcttgcacaatgggtacattattgaatgcctctgtggaagggcatgataaagatgaaaaatagtgacggtggtaatgcctaaggtggagaaaggaggagcgtggataaacgcagctcggaggcctctgtgctgcagtgatatgcacattatttagcagcattccaatgatttgcttgtaatatggaccagagggcccagaaaaaaatgatttccacaggatgtcatgaatccaaacttcaattattggatccaatcagtggattaagtgcaccccctttcagaactgaaccttcaggttgtaaactaagtttatgaaaggacatccccaggtctcaccccacccttgttctggacctattaactttttttctgtttgtttgttttttgttttgagatggag

SEQ ID NO: 90118 - DNA, 340 bp, Homo sapiens
gaattgtgtagttaaaaatcttgtaacaaaactacaggcccaaatggcttcactaccaaaagccagagatcaggacaagaccaagcctttctcagtgccaggaggaatgcttgagcttcaactcccagttcccacctctgttatgcttccagggattcccaaatattttgcattctgtggtgttcacacctcaattctatctcacagtgctgacctgatcagttgaaaggtgctgttgcacgtaagagtgacctttgcatgttgggtgaaagggaagcctcagaaaggcagtaatttgagccagtggtagacattctttcccaactcaaccttgccaagg

SEQ ID NO: 90119 - DNA, 249 bp, Homo sapiens
cctttctgtctcttttccccctctttctttcttttctagctgcggcttcatgctcccatttatgaaataaagattaaattagcagggtagaggaccctaaagccacactgactaacattgctgttgacttaataatattttggccccagtgcaaaataaaatctttcttttcaaaaatcactatttcttatacaattgtatacttttttgaggatcttgtcatgagacttcatttggagatttttctat

SEQ ID NO: 90120 - DNA, 200 bp, Homo sapiens
agaggctgaggtgggaggattgcttgagcctgggaggttgaggctgcagtaagtggtgatcatgccactgcactccagcctgggcgacagagcaagactctatctatatatacaaaaaaaaagaatcctctggggcctgtaagagcagggcccaaggagatggctggagctgaggagaatagctatggttgtgccactgc

SEQ ID NO: 90121 - DNA, 498 bp, Homo sapiens
cactagtaagtggcagagctgagctgaaatttaaacttaagttggtattactccaaagttaccttaactactcatctgtggggcagttagactgagagtgaagttgacatcttatgagagttgaagtatctgaggaagataaacttgatgttctacagaagttgggggaggaagttctccaaatcagaatcaagtttttttctcaagcaatgattttaggacaataccaaatgtgtgatacccataccaaatgtgtgatacctatgtattgaatttatgacagagttaccaacgttctactttggacaattaactgaaaattttcagtctaaaaacataatgtggacatttataattatatatacatacatgattcatttgcttttcatcttttttctttactgaattatagctttagcaaatatctattgaatttttattatatgtcatgcatgatacctttaaggaaaaatatatatattccctttccttcccatt

SEQ ID NO: 90122 - DNA, 511 bp, Homo sapiens
aggcaaaacgattacccttgggtcagaaagaatccaaaacctgactcaactcactgatcatctgaatagctttgccactttgaatgcccacaaaaaccctgggagagagggatctggattctctctggacagggagaaaacagaggctgggagagggggagttgtttttccaagaacatgcagccgtctgagctccctgattatcccacaactcttccgggctctcagggacctgccagtccagggctctcaaacctcttagtgtcaaaacaccctgcagtccaagtctcttcaaagagtgtccatgagcctgggagacataatgagtccccgtctttaaaaaaaaaattttaaagtagcctggtgtggtggtgcatgcctgtggacccagctatcgaggaggctgaggtgggaggatcccttgagcccgggagttggaggctgtggtgagttgtgatcggccactgcactccagcctgggcgagagtgagaccctgtctcaaaaaaaaaa

SEQ ID NO: 90123 - DNA, 447 bp, Homo sapiens
agctatgggttacaatctgaagtgtaaagtctctatctccaagtgttgataatggagtaagcaaaggtaattattctgtttctaacaagtgtagatttggggtgggaggaagacctatacaagaaaatcgaagagatgagtcatgtttaaagaaagttggtttcttggcattctagaaaaataaagccttaagagcatgaaaacaagctaggttgaatgtctatcccagcccctgcctgctatgccaaccctcaacctccccctagtcttgtgcaaatagctggtccaggaaacccaatgcattcaaatatgagcggcaaaaaagcgatcatatgcacaccactgacagatcaattaaaaaagaattgagggaaaaaagaggacaatggcagagaaacagaaaagtcacagaaaaatgttgccattggagcatacgaaatttctggc

SEQ ID NO: 90124 - DNA, 484 bp, Homo sapiens
cttatgtaggcctaaaaacctctgaaatgtcatttcttggattctacaaaacatgagtttggatttttttgaatgaaaaaagttccatttagtgaacagcacatcacaaaggtttttcactgatgttgttattcactctgcctgtttgctgctcagccatgattaagttcgttgcatacagcttataacagagaggcagagggaaaagataaacaccaggcctgagagagagacttgctgagataattgagcaagggctggcagaaaggagagaagcaggaggtcattaaagaagaccatcgtctttggggtttgggaattggcacaaggcatataacccactgattctctgatgtgtgacaggtgagtagctcaggccaagtgactggcttcctcatccatctggtctgtggctgagctgggactacagccaagtttccacactctgtttaaatacctaagagaaagagatcaccctgcacgg

SEQ ID NO: 90125 - DNA, 463 bp, Homo sapiens
ccataactatttaaaatgtgagcagattatcagatttacttctaataaagttaatgtacctcaattatgttatttggtgaaataactctttctggccttgaaggtacaagttggtttttgttgtttttgcacttgcgtcagtatttctacaggactgacattctgaagtgaaatttcatgatataaaaaatgtgctactgaaattttttaaaatacacaatagctttccaaatggttctgtgcccatttttgtctctgccagttcatgaatgtgtatatcaattcccccatgcactctgcaatattatatattacgcatctttttaatcttattaatttctgctgagctgataggtgagaattatatctcatcattttaactgccctgcacttcttaaagtctcaggcccaagaaaaatgcaaagaaaagttcatgttcactcttcagttggcatttttgcct

SEQ ID NO: 90126 - DNA, 255 bp, Homo sapiens
tgccacatttattgtgactatactttttaaagagtcctttaaaaagcaggacaatacccatttccctgggggagaccacgaacatacagctacaggatgaatacagaaaatgacaatcctgattatgatgccaccgagttcttggagctgagaaagagatttctagaaacctagattttaaaagtgctttatctcaggcccttagatagaagcaaagatgatgaactctggaaaactcagacaagtggctcaagt

SEQ ID NO: 90127 - DNA, 464 bp, Homo sapiens
ttttggcttttcttccaccttagatctgatattcaaggcatattagtgactctaaggcagagtaattaagctgacaatctgtccatgtggtagaagcatgataaaaagctttaaaatgacttggtctagaaaacacaggtatggaaatgcttggcaatttccgtagcacaaagtaacctgatgtgtcacacggtgaagaagcaaaaagcaagctgagggatgataaactcacaccaaccagtctgaaagcaaaatctttctgcttccacaaaccgagtgaaaagaactgtctccaactttaatcactttagaggaagagggggcgtagctgctgtggatttttaagatactgataacaccactaaagttttagaagaccaatccctgttgaatagctagttaaagtttgagaacaaatgtcatgtttttattgcttataggaagaccacaactaattagcctaa

SEQ ID NO: 90128 - DNA, 267 bp, Homo sapiens
gtaacacctggaaaagtctaacattttagagagcatgaaagaaaggaggtcaagccaaggagagagacacaaacaagtttcaagaaaaaccagaagagtacattagccaaaggtacatgagaacgtatttcaaggagacaatgtcatatatttgtcaaatgcttctgaaaggtcaaagaggatgaagactaagaattgattattttatgattctatttagatttgggatgtaaattgattgaaactaaaattttttcatagattctt

SEQ ID NO: 90129 - DNA, 176 bp, Homo sapiens
aattgctgtgagtcagtgctattccctttgctgaaacacccctgatgtaagccagataatatgctgggtttgcaagatttaagaatggtaactagagaaagggaaaatattcctcctttaaacctagcaattctcccgttttcctcccttttgcaaaccctatacttttggctact

SEQ ID NO: 90130 - DNA, 1729 bp, Homo sapiens
gtctcgctctgttgcccaggctggagtacagtggcgcgatctcagctcactgcaagctccgcctcccaagttcactccattctcctgcctcagcctccggagtagctgggactgcaggcgcctgccaccacgcctggctaattttttgtatttttagtggagacggattttcaccgtgttagccaggatggtctcaatctcctgacctcgtgatccacccgccttggcctcccaaagtgctgggattacaggcgtgagccaccgtgcctggccgacatttttaaaaaagttttattttgcacggctctaaacctccatgttattttccagtggtgtagaaggtaccagctaaagtgaaccactatgtaatattaggccattctaaaggaaagatgttccatgtcatcagagatggtaaaataggcagggaaaaaaaaatctttggtaccaaagattacacttgtgtttctacacagcaaaccatttttctttcatgaaaataatatattattaacatgaatatattattttgctattaatgtgaaagttgtctctaaatattttttaattttcaaactcatactttattttcatttgaaatgtttttcacaccttttgcattacataataattttgtggaagcattttgccctttagaataaatattagattgatatagctgaaatgtgacttccagttctttgatattccccttgttattcaaatagaaatatggaaatgctttatatattactgttaaatttcttagtgcagaaataacattattaatagagtattgttttcaaaacagatgattaatttcaagaggtttaacagtgaaattgtgtcaatattttgcatttaaaatgaatttaattgaccgatattttctgtagttaaatttagtcacaatatcacatatgttcttcaagaaacacatgaaattattaataaagtaattaaaaaatttttaatgtataacagaattgaccaataggccagttttctggtaacttatgatagtagattgtttctttagaaactgggcagaagctctgcattctcacttgtactttgatttcttatttcttggtcaggcaatttgaggaaagaagaaatggcatggggaatatatatgttttgtttcttagggaaaacagtctgagaaatgaataaaaagcatgaagtacgtgtgtgtgtgtgtgtgtgtgttaccatggaaaaggatattcacagtagtacagttctcaatatttttaattagatgtcatatttttttaatatagtaaaaccttgggatatagaatattacatcttttgagaatgtatgtgtctctaagtaagtaaaatctaatgcgtataggagactgatagctaaaaatgaatggaacattaatgtacttttataattaaacctcttatctatcagaaattgtaagagaatagatacatgttttgaatgtaaagttgaaaagtctggtttactgaataaattgaaagtgatttataaaatctaaatttggactacttgcaaatgataagctattctagtagcctttagtttaaatccaacagaaatctagaagtcacaagcaaatatcttaaaggtaaaatccatctgggcactcatttaaagtatatcttaaaaaagcagcagcaaggtaccttgccatttttagcatattttcttcctttttcttttttcttttttttttttttttgagatgga

SEQ ID NO: 90131 - DNA, 1509 bp, Homo sapiens
gtctcgctctgttgcccaggctggagtacagtggcgcgatctcagctcactgcaagctccgcctcccaagttcactccattctcctgcctcagcctccggagtagctgggactgcaggcgcctgccaccacgcctggctaattttttgtatttttagtggagacggattttcaccgtgttagccaggatggtctcaatctcctgacctcgtgatccacccgccttggcctcccaaagtgctgggattacaggcgtgagccaccgtgcctggccgacatttttaaaaaagttttattttgcacggctctaaacctccatgttattttccagtggtgtagaaggtaccagctaaagtgaaccactatgtaatattaggccattctaaaggaaagatgttccatgtcatcagagatggtaaaataggcagggaaaaaaaaatctttggtaccaaagattacacttgtgtttctacacagcaaaccatttttctttcatgaaaataatatattattaacatgaatatattattttgctattaatgtgaaagttgtctctaaatattttttaattttcaaactcatactttattttcatttgaaatgtttttcacaccttttgcattacataataattttgtggaagcattttgccctttagaataaatattagattgatatagctgaaatgtgacttccagttctttgatattccccttgttattcaaatagaaatatggaaatgctttatatattactgttaaatttcttagtgcagaaataacattattaatagagtattgttttcaaaacagatgattaatttcaagaggtttaacagtgaaattgtgtcaatattttgcatttaaaatgaatttaattgaccgatattttctgtagttaaatttagtcacaatatcacatatgttcttcaagaaacacatgaaattattaataaagtaattaaaaaatttttaatgtataacagaattgaccaataggccagttttctggtaacttatgatagtagattgtttctttagaaactgggcagaagctctgcattctcacttgtactttgatttcttatttcttggtcaggcaatttgaggaaagaagaaatggcatggggaatatatatgttttgtttcttagggaaaacagtctgagaaatgaataaaaagcatgaagtaaaaaaaaaaaagaaaaaagaagaaaaaaaaaaatttggggggggatgtgggccctgtggaaaaagtttttaaaacaatttgttttgggggaggggggcccaggaaggtacggtaaccgatggtcaacgggtgatccaaaggaaaaacggggcaaaacagacgaggcacagcagaatctcgcacgcagtaagaagaagcccggggggaaaacggaggctttccgcaaacatctcaagaagggacatccgaagcacatacgggggacctacaaagaggatctcccacagaaaacccgctaacaaatagacacgcagttgggg

SEQ ID NO: 90132 - DNA, 430 bp, Homo sapiens
tgcacagtatccaaacagggaattgattttatcataagcactgatcgttggattattcagccaaataaaacattatttctttagatacatctgtgaactccccatattaccactgaaaggtcatgaatcttaatatgtttatgagtatggtctataaacagatttatgtttcatatttcattctctgcaggggaaaagttttgttctctttaaactgtttaatcataatgtagtaattgcacaaaaattcaaaatcagagtctgattttaaggtttctgtgaacctgagccattgggtttggtttttctgtttttgagcccgttaagtcactgcatttaattgtaaaatctcattttactagtcaagcacataattataacaaaaaaattgagtacataagtcatacagagccctggctccttttctcaa

SEQ ID NO: 90133 - DNA, 463 bp, Homo sapiens
actgcactccagcctggatgacagagggagactccatctcaaaaaaacaaaaacaaaaacaaaaacaaaatatctacaaacaatcagtggagtatacctattgggttgctatattttttattttatgttttcaattgtttttggggagcaggtgatttttttgttgtgtgggtatgttctttagcgatgatttctgatgttttagtgcacctgttccccgagcaggcatacgttgtacccactgcacccaaactcatagctcactgcaactcccaactcccaagcaatcccttgcctcagccttccaaagtgctgggatcgtaggcgtaagccaccatgcctggctccatgttttaccttttgaagaactgccagactgttttccaaagcagtgaagcacacatttttgcagtaaagcaagaaattttataaatgatatgccctttccacaagttccactttt

SEQ ID NO: 90134 - DNA, 231 bp, Homo sapiens
caaagagcatctattctaagtctggactgaaaaaattaatgtgaggacaattagaagagaaaggccagcggaatggagtaacccagcctgcctcatacaactgtcacgggagtccttcccaggtctcagaggggacctcagggctctcgcatgtgcatcacggcaccctcatgcacacacacgccttcagagaccgccagtgcggctttccacaaacataccaagcactta

SEQ ID NO: 90135 - DNA, 2254 bp, Homo sapiens
aggttttttggggtgttttgagaaagtggcatggaaacatgcagtagttaatgagtttctcttggtactgaacactattagaatatcattagtgatattttttctctttagagcatttttaatgcaactagcccctatattttaatgtaagagttactctgcaatctaagcaaagcacccaacaatggtaaatgttttttaaaaatgcagaactaagatttttgactctaaagagagaaaattacaagggtgttgccttatagcaaacccttgggacaatccttcatgtgagcaaagtgttgatcttaatattggttgtctgtggtgtgcttttttgtactgtaaaaatatgtggttcatgtctaactctgctgttttattgtggttgtggttcaagtttttaatgtttaaagttgatgctgttttcagaagagctttttactaatttatttgtcagtgttccctatttgttacttaaccatgatcctccagattttttggagtattcttttctaaccttaaccctgccaaaccttgatccattttgacatttgttatgcactatttttatatctctgtgagagatttttccaacagtcagctattttatggcacactttttttgactgatgacatctcctttgctatacctcaatttttggaatttagagaagaaatcagtagttttgcaatgttaattatttagatatttaatttcgcagatttttaaactttattttcataatttctgcttaatgtttaaaattgaagagccttttcatgtattaaataatgaacacaaattatataattaaaataattggagatgttgaaaatcattttcccttcttaaacagaaataaatatttggaatgaaggggaatgtactagaacaccctttttgccacgggtaaaaataacagaaatgtatggtttgttttaccttcatttctgtacaagtaaagcttattagtctaatgttttgttcctttcccacctcacccctacctcttttgttttgttttgtttttgccctttatgtactacattcttattttctaacttttaaacactgtattggaggtttttttttaatttacagatcatatttattttactatttttgtagaaaattattaattttgattgtatttttgtattttaaaagcttcttcacttgtgttccctaaatattcatattgctgcccaaaagtatgactgtggaggaaaaaaaaatactttaaaaatccacactttttgttaagaaggaaacatttagcatttatatatttgtgtatggaaaacacttgatattttatccctgttgcatctggctgcacagagcctctcctcaaagatgctacaaaacttgaatataacacattttggaaggctgactaacctcgattctgtgttgtgatgtgcaatactgtttctaatgtttgtataaaaaaaaacagtgtaaacctttttaatgcaaatttatttttttcattgcatattttgcagattttatccacagtgtcattttttactgtcagaaaagataccccttttgtcattgcaactattttttaaatccagaaatctttgtactgatgtaaatgattgtagttattttggatagtgttttgctaacaaaaggagagacttttttcatgcatatttctattttgtttttttgggttttattttattttaatagtagtaaaatacttggaataatttttcatattcttgtcattaatattattttgtatttttatgtggaaatatataattttatgacactaattgctaaagtttattttatgttgaattatttttggagctgaaatctttgtaatattaaagcaactagtttctaattcccagtttctgtatagaatcgcacaagtggtttatggagtgtttggattgtaattataaatggttctttgatatgcaaattaatattttcagttgattttattttatattcctaatggggtgttaaagccgttttttatttttttctaaataaaaagagaacccatgcttttatggacactaggtaaacaccttcagcttaaatttttcgttaaatattttagtttattttattgttatcttccaggtgtctaaatctccagtctgtctgttgtactggtaatttaactctgtaatggaatagtttgctgccaactatttatattaagtaatttttaaatatttgtaatattgttgactgactaataaactattaagttattgg

SEQ ID NO: 90136 - DNA, 2599 bp, Homo sapiens
aggttttttggggtgttttgagaaagtggcatggaaacatgcagtagttaatgagtttctcttggtactgaacactattagaatatcattagtgatattttttctctttagagcatttttaatgcaactagcccctatattttaatgtaagagttactctgcaatctaagcaaagcacccaacaatggtaaatgttttttaaaaatgcagaactaagatttttgactctaaagagagaaaattacaagggtgttgccttatagcaaacccttgggacaatccttcatgtgagcaaagtgttgatcttaatattggttgtctgtggtgtgcttttttgtactgtaaaaatatgtggttcatgtctaactctgctgttttattgtggttgtggttcaagtttttaatgtttaaagttgatgctgttttcagaagagctttttactaatttatttgtcagtgttccctatttgttacttaaccatgatcctccagattttttggagtattcttttctaaccttaaccctgccaaaccttgatccattttgacatttgttatgcactatttttatatctctgtgagagatttttccaacagtcagctattttatggcacactttttttgactgatgacatctcctttgctatacctcaatttttggaatttagagaagaaatcagtagttttgcaatgttaattatttagatatttaatttcgcagatttttaaactttattttcataatttctgcttaatgtttaaaattgaagagccttttcatgtattaaataatgaacacaaattatataattaaaataattggagatgttgaaaatcattttcccttcttaaacagaaataaatatttggaatgaaggggaatgtactagaacaccctttttgccacgggtaaaaataacagaaatgtatggtttgttttaccttcatttctgtacaagtaaagcttattagtctaatgttttgttcctttcccacctcacccctacctcttttgttttgttttgtttttgccctttatgtactacattcttattttctaacttttaaacactgtattggaggtttttttttaatttacagatcatatttattttactatttttgtagaaaattattaattttgattgtatttttgtattttaaaagcttcttcacttgtgttccctaaatattcatattgctgcccaaaagtatgactgtggaggaaaaaaaaatactttaaaaatccacactttttgttaagaaggaaacatttagcatttatatatttgtgtatggaaaacacttgatattttatccctgttgcatctggctgcacagagcctctcctcaaagatgctacaaaacttgaatataacacattttggaaggctgactaacctcgattctgtgttgtgatgtgcaatactgtttctaatgtttgtataaaaaaaaacagtgtaaacctttttaatgcaaatttatttttttcattgcatattttgcagattttatccacagtgtcattttttactgtcagaaaagataccccttttgtcattgcaactattttttaaatccagaaatctttgtactgatgtaaatgattgtagttattttggatagtgttttgctaacaaaaggagagacttttttcatgcatatttctattttgtttttttgggttttattttattttaatagtagtaaaatacttggaataatttttcatattcttgtcattaatattattttgtatttttatgtggaaatatataattttatgacactaattgctaaagtttattttatgttgaattatttttggagctgaaatctttgtaatattaaagcaactagtttctaattcccagtttctgtatagaatcgcacaagtggtttatggagtgtttggattgtaattataaatggttctttgatatgcaaattaatattttcagttgattttattttatattcctaatggggtgttaaagccgttttttatttttttctaaataaaaagagaacccatgcttttatggacactaggtaaacaccttcagcttaaatttttcgttaaatattttagtttattttattgttatcttccaggtgtctaaatctccagtctgtctgttgtactggtaatttaactctgtaatggaatagtttgctgccaactatttatattaagtaatttttaaatatttgtaatattgttgactgactaataaactattaagttattggaaaaaaaaaaaaaaaaaaaaaaaaacaaaaaaacaaaaaaaaaaggggggggccaaaaaaacccagggggggacaccattaatcagctcaccgattttttgttaaaccaggaccccattaggaggaaaagttaataaaaaagaacaggcgacgttcacaacgcgtgcacgaaaaacttcttctggcttcgacaagacacccttcttggtggtactttgtcgaccacccaagaattaagctggcaataaaattagattatgttaacaggacatgccggcatctccgttttaatcgcacataatacaagagaaagtctctaatgagatcactgtactacggccaaga

SEQ ID NO: 90137 - DNA, 2199 bp, Homo sapiens
aggttttttggggtgttttgagaaagtggcatggaaacatgcagtagttaatgagtttctcttggtactgaacactattagaatatcattagtgatattttttctctttagagcatttttaatgcaactagcccctatattttaatgtaagagttactctgcaatctaagcaaagcacccaacaatggtaaatgttttttaaaaatgcagaactaagatttttgactctaaagagagaaaattacaagggtgttgccttatagcaaacccttgggacaatccttcatgtgagcaaagtgttgatcttaatattggttgtctgtggtgtgcttttttgtactgtaaaaatatgtggttcatgtctaactctgctgttttattgtggttgtggttcaagtttttaatgtttaaagttgatgctgttttcagaagagctttttactaatttatttgtcagtgttccctatttgttacttaaccatgatcctccagattttttggagtattcttttctaaccttaaccctgccaaaccttgatccattttgacatttgttatgcactatttttatatctctgtgagagatttttccaacagtcagctattttatggcacactttttttgactgatgacatctcctttgctatacctcaatttttggaatttagagaagaaatcagtagttttgcaatgttaattatttagatatttaatttcgcagatttttaaactttattttcataatttctgcttaatgtttaaaattgaagagccttttcatgtattaaataatgaacacaaattatataattaaaataattggagatgttgaaaatcattttcccttcttaaacagaaataaatatttggaatgaaggggaatgtactagaacaccctttttgccacggcttattagtctaatgttttgttcctttcccacctcacccctacctcttttgttttgttttgtttttgccctttatgtactacattcttattttctaacttttaaacactgtattggaggtttttttttaatttacagatcatatttattttactatttttgtagaaaattattaattttgattgtatttttgtattttaaaagcttcttcacttgtgttccctaaatattcatattgctgcccaaaagtatgactgtggaggaaaaaaaaatactttaaaaatccacactttttgttaagaaggaaacatttagcatttatatatttgtgtatggaaaacacttgatattttatccctgttgcatctggctgcacagagcctctcctcaaagatgctacaaaacttgaatataacacattttggaaggctgactaacctcgattctgtgttgtgatgtgcaatactgtttctaatgtttgtataaaaaaaaacagtgtaaacctttttaatgcaaatttatttttttcattgcatattttgcagattttatccacagtgtcattttttactgtcagaaaagataccccttttgtcattgcaactattttttaaatccagaaatctttgtactgatgtaaatgattgtagttattttggatagtgttttgctaacaaaaggagagacttttttcatgcatatttctattttgtttttttgggttttattttattttaatagtagtaaaatacttggaataatttttcatattcttgtcattaatattattttgtatttttatgtggaaatatataattttatgacactaattgctaaagtttattttatgttgaattatttttggagctgaaatctttgtaatattaaagcaactagtttctaattcccagtttctgtatagaatcgcacaagtggtttatggagtgtttggattgtaattataaatggttctttgatatgcaaattaatattttcagttgattttattttatattcctaatggggtgttaaagccgttttttatttttttctaaataaaaagagaacccatgcttttatggacactaggtaaacaccttcagcttaaatttttcgttaaatattttagtttattttattgttatcttccaggtgtctaaatctccagtctgtctgttgtactggtaatttaactctgtaatggaatagtttgctgccaactatttatattaagtaatttttaaatatttgtaatattgttgactgactaataaactattaagttattgg

SEQ ID NO: 90138 - DNA, 298 bp, Homo sapiens
tagagtttaattctgagtctacatgtcgtgagtctattggaagaagcttttcttaggaggtgaaatttgggatggagttctcctctacactctagccctgtagccacaatctttggtttagatctttggcattttttgttggacatctttcatagtgtctacctcttcttcctgcctctaggcttcccgcggttgccagatgaaattccgaaaactcaaatcattcctgtagttaatattcttcagtgactccggaacaatcaaattcttgatccctccacatgggtcttaccatctg

SEQ ID NO: 90139 - DNA, 239 bp, Homo sapiens
ccaaaatatcatgctcttcagtcattacttaggaattttctaggggtggaggaggtcaaaccaagaacttttacatttgggagattgaaatctatttctaaaacttgattttggaggttcagctccattctggtggtcactctctgaaaatgcccagcactttttctgtagatggctgtcaagccacatctcttgcagcctggccacaggcaattggattttcagtgctcagtgcttcc

SEQ ID NO: 90140 - DNA, 228 bp, Homo sapiens
cctttaagcttttatgtcattccaaggctacattaagagctcagcttcttggcaactatttaaaaaattggacagcttcattggataacgttttctgtctgtttacctactcctggaagccttgaactgcttaatcagtttagatgatccattcttagaaatgttgaaacaccttgacatgtcttcccctagcaggcatggtgagcactggtctgcaatttggccaaa

SEQ ID NO: 90141 - DNA, 257 bp, Homo sapiens
ccacagtcctagaaacaactgttccaaggcaaggagttcacttcattggggaagccaaaagggtggaggtcccaaaaagttttttgccaatttagtttctcaaactgagaagttcaagagaggaggctgtctgggaggaggttgggaagtcagtccatacattcgaaacaatactataggtgcctacttttaaaacaaggaaaagaaggaaaactgagagtgacaaaaggaaatcagtatgaatgggatgtgctcgg

SEQ ID NO: 90142 - DNA, 317 bp, Homo sapiens
gtatcactacatgcattttcatcatcacccgttataccatggtaaggagggcttggctcatctattttcattaaaccatagtctttgtctgctggatgatatgttgacaggatgttcatttcatcacacttctggcattttttactcagctcctcgtggacagttctgcagggctgttccgacaacgccaccatagaggaagtcctggaggtcttgttcttcaggatccccttgatgggctggtgcgaggctgccattgcccagcacttgggctgtgggctcaaggtccgtgaagagaagggtcgggcgctagcaga

SEQ ID NO: 90143 - DNA, 213 bp, Homo sapiens
gggtgcccatttctggaggtgcccccccgaagaggctggttagatggggacccaaggggaggcctgaactgccacgtcctccggtattgtccccttcccctctactttctatttgcccatcttcctaattagagggaaaaaatctacactcacttcctctattcaacctttcacttaaaaaaaaaatgcaactcccacccccctggttcccag

SEQ ID NO: 90144 - DNA, 183 bp, Homo sapiens
atatgtataatctggagaaaaaggaaacagaatacatggaaacaccaccaaatgggaagtccaaaggctctagtcactcactagttatataatcccaaggcaaactactttacctgcacagcctcagtttcctcaactgtgaaatgagggatgtcaactagagtctttccagctctacacagc

SEQ ID NO: 90145 - DNA, 662 bp, Homo sapiens
gccttcctaaagaagtaactgcaacttttaaaacgtgatgattattggtttttataatacacaaagcattaattttttcttatcttattttctctttattatttctttccaacttttgtttggagacatttatgttagaagaaaaactataaagttttatcattgtagagaacagagagatcaaagacagctggactgtacctgtttgtgtaattatttctgatatttttaggaaaagaagtttaacagagtaactcagactgagactgttaaactctgttcatgataaactccatattacataatataggtgaacagattaattccctccatgtaactaagatactctatttacattatttatatactctcttagttttttatgcacttccaagttttagttggaaaaatgaaaaccaagctactacttaaaagttattaaaaacttcacataaaatatttcattttagctacaagttattcattgcataggattttataaatagtctgggtatttcataggaactgcatttcaaaagtgaattaaccaaacctaaaaaaagggttacttttaaaatgcattaaaataaagaagtttcatattcagttgataaggccattaaggtaggataatgcagttacatatacaaactaaaaaaaaa

SEQ ID NO: 90146 - DNA, 560 bp, Homo sapiens
caaagccaaaagccacatctagacaggctttagatcctgacagactatgggtctctacattggctggcgctgcccccattacctatgggactgtttccggattggggatgagtccagatgcttttgtggacacttgttgagagagcaccggatcatctcagacatatcggtgccctgcaaggtaagccagtgccgctgcttcatgttctgctttatcccatcacgcccagaggaggtgggtgagttctggctcaagagacgggccacctttgaccccaaggcctggagggcccaatgtcgctgcaaacacagccacgaagaacatgcagccactgggccccatccctgcaggcatcatggctgttgctgcggctgttttgagtctaatttcctctgtgcggcctgtgaccggcgctgggaggaacacgagactttctttgacacccagaagacccggcaacgaggaggaaggcctcgcgggacagacactgtcagcaactggcacaggcctttgtgagtctggcccagatcagcaataaaagaggagtcattggaaaaga

SEQ ID NO: 90147 - DNA, 342 bp, Homo sapiens
accggcgctgggaggaacacgagactttctttgacacccagaagacccggcaacgaggaggaaggcctcgcggtgaggcagaaacctgggacagggggccattccagggtctgtagtcagaaggccaggcaggaaggcactcccatcctcaaccatcccttccaggactagcgcgctccctcagcccacctccccaccacccacctacctgcatcccacatctgcactggttttcacccccaggagcagactatgtaccttttgcagagatggctgtgctccgagaagccatcctcagcaactctgacttctaggccctgcagatacaggggccctctggcc

SEQ ID NO: 90148 - DNA, 323 bp, Homo sapiens
gggaagtatcacgtgtatgcatagcatccacacacgtttttgaacacacttcactaatgtaaagtttggaagcattcaattccaccaaccctccataagcccctttttggaggggagcaagattctcatttggaaacaggattttagacttagtaacataagcctttcaagagacaagatccccttcaaaagtatagacctgtccccttcagttacaaaaccacgataacactacaaataaaaataatctgtattcggttgtatgtaaaacgttctgagttgttcacttggtagaaaggcacatagagacatagtcatcatat

SEQ ID NO: 90149 - DNA, 274 bp, Homo sapiens
gaggtagcggggttgcgggatttggaccgcggagccggattctgcccagagatgtgggcccttgaaagctggctggcacctggggcccagggctgagggtttggctttgccctcaaatcctggttgtgcgccctgcacactggcggacccttcaagtcactttacctctcccacctcaccttcctctcctgtaaagtggggttactatgcctgtcggaagttagaggcctggcagtttctctccgagtccagtttgcccctcagctcctcccgt

SEQ ID NO: 90150 - DNA, 423 bp, Homo sapiens
tgtgccacatggctctctgctcccctgtgtgatggtcagcctatgccacacacgtgcaggtgacttctggtgcccctctcggccctggtggagaccctcatttcctattgcccatggctgcctgctgattcccttctctgttctttggtcatgttgttctttgcatccagcgtcaaacacaccctcactctctgtctaaattccatatccatcctcccatactcagtacaaagaacttgtcgtatttctcttctgtctttacagagcaatctctccatcccctgaatcctcactggacttagtagaaaatccactgtggttataatgtatgctgccctggccctccagggacttagttcttttttttaagcattcccatagcatcctttaacaccacccccaccagcttttgaagttctaata

SEQ ID NO: 90151 - DNA, 362 bp, Homo sapiens
  misc_feature (174)..(174): n is a, c, g, or t
  misc_feature (299)..(299): n is a, c, g, or t
  misc_feature (329)..(329): n is a, c, g, or t
  misc_feature (331)..(331): n is a, c, g, or t
  misc_feature (338)..(338): n is a, c, g, or t
  misc_feature (359)..(359): n is a, c, g, or t
  misc_feature (362)..(362): n is a, c, g, or t
cacccctgaggaagagctttaatgtcactagggattcacccttatgacacaaacacctcctgcaagtggacccaacattgggatcaaatttcaatattagatttggagggaacagacatctaaaccatagcagaaggaaagaggcaagaaagtagctgcaaaagcatatgggcncgaagaaggagttgaaaacaaacatgtttaagattgtgagaaggtgctagctgacagagaaaagtcgcatatgcaaaaaacacaaagcactaatggaaagttcctgagaaggttgtgacaagggnggaattttgtgacttgaagcccagttaggngnattatgngagatggtgtgaggacagctnctn

SEQ ID NO: 90152 - DNA, 258 bp, Homo sapiens
caaatattttaaaaatctataatcatattaagttgggatttttttccaaaacaaagttagtaaagtatcaaattaaagtagatatcattgtgagacaaattttattatgtagaggcaaatttagacattgtaaagggaaaattttactatatatataaacttataaagatcaaaaggtttttatccacatattaagcaatttgagtctggaattaaatattgatttgtttttgttttagaaatttgaaaatccctgaa

SEQ ID NO: 90153 - DNA, 194 bp, Homo sapiens
tgttgctacttaaaactctcccacagttttctgtgtcacctaaaggaaaagctgaagcctgagggccctatatgagccaatctgccaccccaccaccttcaaccctctttccctctctgaccttccacccagccctcttccccagcccagccctcttccccagcccaggggaagcaacaccctcttccacccag

SEQ ID NO: 90154 - DNA, 484 bp, Homo sapiens
cgcccaccaccacgcccagcttaaatttttgtatttttagtagagatggggtttcaccaagttggccaggctggtctcaagctcctaacctcaggtgatctgcccaccttagcctcccaaagtgctgggattaaaggcatgagccaccacgcttagccaataacaaatattaatgtattccttttctatcatttgttctgctggtctgttaaatgcctatctctaagggtggtagtcacgcacaaacagaagaccacctgggtggaccttatggatctctcccttttttgtgctatgaactcctttggaaatctgtcaaatgccagggacatacttcccagaaaaatacatatatctggaaactttcctattgcgtttttgagggtttcccctggtgtccaatcatgctgaaggacatggcatgacttcaggaacaccaacaaagatccaaagctttaaaatgccctctcctgccaggtcagct

SEQ ID NO: 90155 - DNA, 165 bp, Homo sapiens
agccatgcacaagaacattcatggcagccgcatgaacaaatatctatcaacaggaggagggataaacaaactgtactacatcttatatcactgagcatttttatttttatttttttgagacgtagtttcgcttgtcgcccaggctgaagtgaatagtgtgatctc

SEQ ID NO: 90156 - DNA, 452 bp, Homo sapiens
ctcaatctcttgacctcgtgatccacccaccttggcctcccaaagtgctgggattacaggcctgagccaccgcgcccagcccaaactctcaattctacaagcaattttttgtgtccttattatgtgccaggcactggcaattttcaggcctgggagatcaaatgtgacccttgctcctgctctcagtgtgttcttcagccaagccctcccccaccaccactttcctgccttgtctcttgccaccaggcacctgggcatcctcttccaggaaactttggggatgaatgcccacttgccatgcagcccaactgctccgtgcctatcagatttctagctattatctgaattggttccttctgatgaactgtgaacttccttgggttacccaacaggggacttatggtccctgtcagttgaataaaagatgtattggctgtgtcacttatttgttc

SEQ ID NO: 90157 - DNA, 428 bp, Homo sapiens
aaaagacaagacagagactgagacaggaggagattgcttcagcctaggagtttgaatccagtctgggcaacatagtgaggccctatctctattgaaacaaaaaaaaagggggggggctaccctttttgggtcccctccctttgtatgggagctctgttttcactctattaaatcttgcaactctcttctggtccatgtttgttatggttcaagctgagcttttgctcaccgtctgctactgctgtttgctgctgtcacagacctgccgctgacttccatccctctggatctggcagggtgtccgctgtgctcctgacccagtgaggggcccattgctgctcccaattgggctaaaggcttgccattgttcctgcacggctaagtgcccgggttcgtcctaattgagctgaacactagtcactgggttc

SEQ ID NO: 90158 - DNA, 429 bp, Homo sapiens
gtaatacagtcctttgtctctgatccaggagtctcctatcttttgccagcgtccacaaaattgtgatagtataacttgttacattgcaaatagagtaaaatatcacaccttcacagttcttaagactactgttacaatgcctatagttccttgaaaaatacttcatcatagacagtgatatatgggtattatttaagggaaaccacaactcgagtgcatattccggactggatactcatgggtgctagtacaagtggttctgttattcatatcttgactaacactggaagctttactaattagcacagcaatgatcaaaatggacttttattggtagaattagatcttattaaatagcatgatgaatattaaaaatggactttcattggtgaaattaaaaatactcaagattgtggattggtagaatcc

SEQ ID NO: 90159 - DNA, 1640 bp, Homo sapiens
  misc_feature (1175)..(1175): n is a, c, g, or t
  misc_feature (1238)..(1238): n is a, c, g, or t
  misc_feature (1240)..(1240): n is a, c, g, or t
  misc_feature (1540)..(1540): n is a, c, g, or t
  misc_feature (1552)..(1552): n is a, c, g, or t
  misc_feature (1640)..(1640): n is a, c, g, or t
gccgcgacttcctgctgggccacgtggatgccgagagcctggtgaggcaccaccctgactgcaaggacctcctcatcgaggccctgaagttccacctgctgcctgagcagaggggcgtcctaggcaccagccgcacacgtccccggcgctgcgagggggccgggcctgtgctttttgctgtgggggcctctccaggagcctggggtgtggcccagcgagtgggatccactcacgagtcccgtctccacctgccctccccaggcggcgggagcctgtttgccatccacggagactgtgaggcctacgacacgcgcaccgaccgctggcacgtggtggcctccatgtccacgcgccgggcccgggtgggagtggctgcggtggggaaccggctctatgctgtgggcggctatgatgggacctcagacctggctaccgtggagtcctacgaccccgtgactaacacgtggcagccggaggtgtccatgggcacaaggcgaagctgcctgggtgtggccgccttgcatggactcctgtactcggccggcggctatgacggggcctcctgcctgaacagtgctgaacgctacgaccccctgaccggaacgtggacgtccgtcgctgccatgagcacccggaggcgctatgtgcgagtggccacgcttgatgggaacctgtatgctgtgggcggctacgacagctcctcacacctggccactgtggagaagtatgagccccaggtgaacgtgtggtcgcccgtggcgtccatgctgagccgacgcagctcagcgggcgtggccgtgctggagggtgccctgtacgtggcagggggcaacgacggcaccagctgcctcaactcggtagagagatacagtccaaaggctggagcctgggaaagcgtggcgcccatgaatatccgcaggagcacgcatgacctggtggccatggacggatggttgtacgccgtggggggtaacgacggtagctccagcctcaactccatcgagaagtacaacccgaggaccaacaagtgggtggccgcatcctgcatgttcacccggcgcagcagtgtgggtgtggcggtgctggagctgctcaatttcccgccgccatcctccccgacgctgtccgtgtcctccaccagcctctgacccacctaccaccagaggcctgcagcntcccacatgccttaaggggaccgtggcccccaccagggacgtcctgcgccatccgttcacgtntntgcatccattccttcatgtctttatttagttgtttatttatttagttatttatcttattgagaggtgaggagtgccacggctgcccgtttacacctttagcgtctggtcctcctgcgtgtcctcccctccactgcctgcatggggggcgcggggagtgaccaggcgggggcctcaccgccccagggccgttgcctgctcagaccttgcaggctgtggagcaagaggccctgggtctctccaagcagctgcagaccccagctcgaattttgcacatggcggggtcccgggaagggtggggngcaggtgtcctncctgtcgtcgtctgccgtgtgccatctttcctggatcttgtagcggggcacacgcgtgcactggccccccccccgcatacgatccccn

SEQ ID NO: 90160 - DNA, 1199 bp, Homo sapiens
  misc_feature (734)..(734): n is a, c, g, or t
  misc_feature (797)..(797): n is a, c, g, or t
  misc_feature (799)..(799): n is a, c, g, or t
  misc_feature (1099)..(1099): n is a, c, g, or t
  misc_feature (1111)..(1111): n is a, c, g, or t
  misc_feature (1199)..(1199): n is a, c, g, or t
cctggtaggactttgcggtctgagtttgactcctagggtaagatttcagccattccgctggggagggcaggtcctggggccgggacgcctttctgtctctgctgagctgtggctgcggtcctggtgcccacagtgctgaacgctacgaccccctgaccggaacgtggacgtccgtcgctgccatgagcacccggaggcgctatgtgcgagtggccacgcttgatgggaacctgtatgctgtgggcggctacgacagctcctcacacctggccactgtggagaagtatgagccccaggtgaacgtgtggtcgcccgtggcgtccatgctgagccgacgcagctcagcgggcgtggccgtgctggagggtgccctgtacgtggcagggggcaacgacggcaccagctgcctcaactcggtagagagatacagtccaaaggctggagcctgggaaagcgtggcgcccatgaatatccgcaggagcacgcatgacctggtggccatggacggatggttgtacgccgtggggggtaacgacggtagctccagcctcaactccatcgagaagtacaacccgaggaccaacaagtgggtggccgcatcctgcatgttcacccggcgcagcagtgtgggtgtggcggtgctggagctgctcaatttcccgccgccatcctccccgacgctgtccgtgtcctccaccagcctctgacccacctaccaccagaggcctgcagcntcccacatgccttaaggggaccgtggcccccaccagggacgtcctgcgccatccgttcacgtntntgcatccattccttcatgtctttatttagttgtttatttatttagttatttatcttattgagaggtgaggagtgccacggctgcccgtttacacctttagcgtctggtcctcctgcgtgtcctcccctccactgcctgcatggggggcgcggggagtgaccaggcgggggcctcaccgccccagggccgttgcctgctcagaccttgcaggctgtggagcaagaggccctgggtctctccaagcagctgcagaccccagctcgaattttgcacatggcggggtcccgggaagggtggggngcaggtgtcctncctgtcgtcgtctgccgtgtgccatctttcctggatcttgtagcggggcacacgcgtgcactggccccccccccgcatacgatccccn

SEQ ID NO: 90161 - DNA, 351 bp, Homo sapiens
agaccctgtctctaaaacaaaataaaattaaaagagattcctgggcctggtaagcacttgcttctggtagtggtagaggacagggagatggataaccagcagccccaacccacttattcagaaaatgagttctgtcccctcccaggtcaggggttcctccgtgtggccatgctgtctgtccggtacgacaggcaaagccacctacgttcacaaatacttatttttgttgttctcaaccaagccaggagaagcaacaggctggtgccaccaagagatttgagcttgcaggctcatggctccagacactgctgcagggccccagtcattgtcctgcacacaacctcccccagc

SEQ ID NO: 90162 - DNA, 996 bp, Homo sapiens
  misc_feature (760)..(760): n is a, c, g, or t
aagtcagtgctttctgagatctgcttttagtgaagtggatcaatgatgaaactagccaaatctgagcatcagaagtctttccagtctacctgatgcatgatctctacagttctgagaagcaaaactataaaacaatgtaaaacaataagggcatatgtctggtgtgtgtgtgtgtgtgtgtgtgtgtgtgtgtgtgtacgcacatgtgtttataaagataacagctgtaggaatgaatgagattgagggtgggggggtgcgtatgtatgtctatgaaagcctaatcatttctgggcaatgatgaaaaggttttactactgatctttgtaactatgatggtttctacacttgacctgagctcatagactgttcctggtggtggtgggcagggggtcacctacaggcaccgacatgaaaaaatgtccaaatgacccagccaaatggaaaagcacattgtaaaatagtatggggagctctgttaataaattatagtcggtctttctattaactagtcccttcagaaagcatttattgagcacatactctgtgtcagacccctggcttacagggcatagatctggagcaggaaattatggggcactgtccttttcatcttatctattccttgaacgttcagagtatcatgatgatgtcctgtgctggggctgacaggctccaaacaggcatgcgaggtgcctttggaaagccccagggcactgtggccagtgttcacattggccaagttatcatgtccatccgnaccaagctgcagaacaaggagcatgtgattgaggccctgcgcagggtcaaacttaaggtttctggtcgtcagatgatccacattgaaactgttcctatgattaaagagaccgttatgaggtcagatgagaataagttggccgaacagtaaagttgtgctggtcatgggcaacttccatgggccacaccctgctggtgccacttttgtaagtaccagggaagctgatccgggttgct

SEQ ID NO: 90163 - DNA, 480 bp, Homo sapiens
  misc_feature (371)..(371): n is a, c, g, or t
aagtcagtgctttctgagatctgcttttagtgaagtggatcaatgatgaaactagccaaatctgagcatcagaagtctttccagtctacctgatgcatgatctctacagttctgagaagcaaaactataaaacaatgtaaaacaataagggcatatgtctggtgtgtgtgtgtgtgtgtgtgtgtgtgtgtgtgtgtacgcacatgtgtttataaagataacagctgtaggaatgaatgagattgagggtgggggggtgcgtatgtatgtctatgaaagcctaatcatttctgggcaatgatgaaaaggttttactactgatctttgtaactatgatggtttctacacttgacctgagctcagtgccgtantctctgtaaacttccttaggctaaagggctaggggctgccaactatggctaaaacggccttttctccctcgccggtttttttttttttacgttaactatccccacctaa

SEQ ID NO: 90164 - DNA, 1103 bp, Homo sapiens
  misc_feature (203)..(203): n is a, c, g, or t
  misc_feature (867)..(867): n is a, c, g, or t
gagtgtgagagtgtggtatgtgtgtggtgtgcctatgtctggtgtatacacgtggtatatgtgtgatgtgtgtgtggatggggtttgtgcatgtgtgatgtgtatgggatgtgtatgggatgtgtatgtgtggtgtatacacgtggtatctgtgtgatgtgtgtatagatggggtttgtgtatgtgtggtgtgtatgtgcganatgtgtgtaatgtatgagcatgtgtggatgtgtgtgtagatggtttatgtgcatgtctggtgtatgtgtgtgtgtgtgtgtgtgtgtgtgtgtgtgtgtgtacgcacatgtgtttataaagataacagctgtaggaatgaatgagattgagggtgggggggtgcgtatgtatgtctatgaaagcctaatcatttctgggcaatgatgaaaaggttttactactgatctttgtaactatgatggtttctacacttgacctgagctcatagactgttcctggtggtggtgggcagggggtcacctacaggcaccgacatgaaaaaatgtccaaatgacccagccaaatggaaaagcacattgtaaaatagtatggggagctctgttaataaattatagtcggtctttctattaactagtcccttcagaaagcatttattgagcacatactctgtgtcagacccctggcttacagggcatagatctggagcaggaaattatggggcactgtccttttcatcttatctattccttgaacgttcagagtatcatgatgatgtcctgtgctggggctgacaggctccaaacaggcatgcgaggtgcctttggaaagccccagggcactgtggccagtgttcacattggccaagttatcatgtccatccgnaccaagctgcagaacaaggagcatgtgattgaggccctgcgcagggtcaaacttaaggtttctggtcgtcagatgatccacattgaaactgttcctatgattaaagagaccgttatgaggtcagatgagaataagttggccgaacagtaaagttgtgctggtcatgggcaacttccatgggccacaccctgctggtgccacttttgtaagtaccagggaagctgatccgggttgct

SEQ ID NO: 90165 - DNA, 487 bp, Homo sapiens
aatgtcccttctctcacgatgtttgctttcatcaattgattaattcacttgatatctctacagtaacattattctttctctttgcagtaaataaccattttgtggattcacactttgtgtaaatatcccattcctcaaactttcaatgtattcatttacttatttattttaccatgggtccatagtttcctgttttattcagtgtgacataatcctttactatcctaatttgttttgatgctcaaattgttccagatatgactagagggagcactcttactgcttttgtgtccttctgacatgttcccatcatgatcatgtttttagcaattccttactttttggcagaaaagatatttcaggttcatcttatactttccctgcctcagccccagaatcaggttatttcttcaatgagactgggttccttttagtgggcaatggtatttagaaaccaagatctgggcaccatgtgtgctcactgctc

SEQ ID NO: 90166 - DNA, 421 bp, Homo sapiens
aagcagagcatctgaaactcattctgtccctagagactgctggttgggtctggagatgtcacaagcactgacatgctgagcagaaggcccagcagggtctacaccagcagggggcgcagtggggatggagaccagtgtccatgattcagacatgtattcgggatgctctgtgtagccttggggattgggggagcacgctgaatctgtggaagttttatgtccttgtagcccagcacctccatccctgcctgctgactcagacctcaacatgtgtcccatggaaagcacgggccacgtatagaggctgccctgtgcaacccccaaggctcagctggattctcctttcccaggagagctcctctgcctgcaccaagtcagagcttgtttccacaggcaaacttggcggctatggcagaaggac

SEQ ID NO: 90167 - DNA, 363 bp, Homo sapiens
aatctgctcagcatttaacacatcctgttaggaggaagttccctgtagagctgtgcagtatcactccaggggctgataacccatagccaacctaggtgcctctccccattaatgctggaactgaagctgctaggatattcagagtgagcgtgggctgtggttggtataacatgctgccagattagcttatgggttcagaattacttccctgcaaatactttttttccttttgaaagcctgacatgattactttgaaattcacctgaatgttattagcagaaagaagtaactgattggacatgtaaatcctatgctttggtgtggttaagcgtcatttgatagattcagaagtacctcaggttt

SEQ ID NO: 90168 - DNA, 454 bp, Homo sapiens
gtgggatattactcagtaaatttttgcccagaccactgtcttggagattttccttaatgttttcttgtaataatttcatattttggggtcttaggtttaattaagtgtttaatccatcttgatttgattattgtatatggtgagagatagggtgtatctttcatccttgaaaagtatatctgcccttgttgggcctggtattctagcattgtcaattagatcccttttgttgataatgtttttcaagtgtttggtattataccttttctttatagttgatcaatcaattactaagggaggagtgttgacaactccaaatgcatatgtagatttgtctacttctccttttcactccgtcagtttttgcttcaagtattttaagtttctaaattaagtgcattcacatttaagatttttatgtcagccaggcgcagtggctcacacctgtaatccc

SEQ ID NO: 90169 - DNA, 214 bp, Homo sapiens
ctcactcaaggctcagtgtttaaagcgcaagttcttatgtctgagatcatgggttggagcccttgttctgtcacatagctaatataacaaattaatttaccttcctgggactcattgctttcctctgtaaaacgggaataataatgttatttatttagcagggttactatgaaagttaaatgaaataaggcatacttcctgccatgtattgcct

SEQ ID NO: 90170 - DNA, 588 bp, Homo sapiens
ccaaagctggagctcttatgaagtactttccccctccttctcccacctgtatcatgcaccagaaaccaccactgccaccacccgtgtctcctgcagaatcctagagaggtttcaaagtgatgagtctgtctctccatgttggtgaaccctgaaacagtctacagccaaaaaagcaggaaaagggaagacacaggaagccgtggccacctgcgaagaggagaagagtggactgagctcccagaacctgcgtgtgaggaagaagaagagcacctgggaagaagacatcggcatgaaactcagtcctgggccgaaggaggcacaaggttctacgtaggactccgagaatgatagctgctgaaaaacgggacaagttgtcctgggtgactccttcctgcaaatcacaaacatgcaaatcgaggctgggcgcagtggctcatcctgtaatcccagcactttgggagggcaaggaaggtggatcacttgaggtcaagagttcaagaccagcctggtgaacatggtgaaacccatctctactaaaaatacaccaattagccaggggtggtggcatgcacctataatctcagttac

SEQ ID NO: 90171 - DNA, 207 bp, Homo sapiens
tgttgggttcctgtgggcactttgctttccttttttggacatgatttggactgtttgccaagcctctatgaatcatcgcttcagcctctgactggtcccaggacaaggtcccaggccaaggtcctggaccaagctttcacttcagctcctgagtggtcccaggccaagctgagtaggctttctccaagaccagtcagcacattcctt

SEQ ID NO: 90172 - DNA, 389 bp, Homo sapiens
atctttgtaacacatcatgtgttatgcactttgcatggatcatctcatgttattctcacagcagtcctatggggggtggtactcttattatgcccattttactgatggaaacactgaagctcaaggaggataagtagctacccaaagtcacagagttaataaacaatacagtcagacttcagtcatgacgctctgaccctggaactatgcttttaacccctatactggtcaattaaactatgcagactgtaaacagggacaaaaccagtcgattaattagaacaattagtgatgaacaggtgactgaaaaatgttggaaggggtgttttgatagcatttagatgaagtgattggtctatatgaggatggccatttaggctgagacctga

SEQ ID NO: 90173 - DNA, 827 bp, Homo sapiens
ctagaagcaagtatataaagcagaatatatacgcattattctaaatgtatgctttgcagtaagaatcttgctattattgacagatctagtcatttagtactttgtaaactagctccactagttcctccctgtactttccttgaattactcactaatatatatgaatataaatatcattttttaaggattaaagaaattaatatatgtgaaatattgcacatgacagaaagaagtacacattaaagaactggtattatttaaaatgtttttattttataacttcattcagttacttttcttagcaaggtttaaataaaaatgacttgaatgcttttatccaccttgtatggcagtttcctgagaggactcgcattgtcttggtcacctctggctcaaaggccctgcctctgctcaagtagttaaattttctgaaataatttgtacaatgagatatcttctttcagaagaagtttggttctatattgtcttgaacatgccctgatgcagaactcaatattttttcaatgatcaaaaccaatgacaagataaacacacaaaaaaatacatttccagcctgagtacatagagtagactataacattagacagaactgttctttaatatcctttgatcccagccttccacatgacattcatggccctctatatagcattttgtaggcccccggcttctcatcaccaatcctgctgatttccgtgtttttcttttctttcattttccttactcctcctttccatatgactgtcagaaactccatttagttatttataactcccatattaagcctagctccacattctgctgtg

SEQ ID NO: 90174 - DNA, 542 bp, Homo sapiens
cccaatgggatgatagagctgggtcatgtggagagcctgagtccctgagaggatgatagagctgggtcatgtggagagcctgggtccctgagaggatgatagagctgggtcgtatggagagcctggatccccgatgggatgatagagctgggtcatgtggagagcctgggtccctgagaggatgatagaactgggtcgtgtggagagcctggatccctgacgggatgatagaactgggtcgtgtggagagcctgggtccccgatgggatgatagagccgggtcatgtggagagcatggatccccaatgggatgatagagctgggtcgtatggagagcctgggtccctgaacacaccatgccatatcacactgttggctaaactgttccctcagcctaagtcatcctccatgtgagtacaagattcatcactttgtcccagctgctctttctggactccactctcagttccctggcttcctacctgtcgatccaaatccattctttgctatgctggtactctgtcagtttctctctgcccttc

SEQ ID NO: 90175 - DNA, 1970 bp, Homo sapiens
tgacaaaaaagaaagacacctgttggggtggcctgccagacccaggagtggagggctctgtgagggcccgggaattcggactcaggacagggattctccatggctaggcccagaaacacagggtccaaccactctccagcagggagacctgggggtgaaggggtgagccctgcgcaggtctctgttccttggtcttcactgggcagtgtggagaggtgtggccaggaggagcccgcgtttgtccagaccagggtctactctggcaccagagtgaccacctctgacctctcctttcctcgtcctgggccgggaacgacaccaaatgagggacatggaaaggggtgagaagcataaatgtgcgtgtgtttctgcagaggagggggcatgggcccctgccgggctgcgcaggggagggtggggtgggacttttccagagagggagccaggcctggcccgggccccgggagctcacgtcacccccacccctcacttctccagggaactgccaaagccaaacccagctcgggatgggattatgtgtactgggtagacccgtggagaggggctgcgagaagagatctcggtggcagagagaagcagaggcagagagggcatgaagaggggtcggcatcagagaaggggcaggcagtgactatcaccccatttcttcttccctcagctggagtaacaagagtcaggcagagcctgaagacttgggtggaacatgggcccttctctggagatcctggcctcccccgttcagtcagggtggagttgctgaccttagtggccggcccagccaggggaaggagtggccatcggcaacccccaccccaaccccaatccctgaggcgcccgctctggctcagccactctgacccctccctcaaattccgaaccctaggtctcagggagggcagtggggctgagtgtctgcccccaggcacattcctacccttctcttggtcattttctgccccagagctggcccacctcagcaatgcgagggctccctggattcctctcccgggtgcctttcagatccaacagaaacagattttttttttcctggaaagcagaactaagagtgggatgaggagcaggggcgggaaggactcaaagtgagaagaagggggcaaagagagtcaggcttggtggctggggtggcttccaagcctcacttctccagtgttcaaagctgaacttcagatggacttcccggctcttcagaatgagaggcctgtggctggggcatgaggcagccccggctgcacctctccttcccgcttccccagctggtagagacgcacaggaaacaagccctcactgaaccaactccagatgctggcacccagagtgggtgttacattgccggcttcttctctagagattaaaccgtcaacccatttagcttatcccttggccaaaaagtgtatgagatgtgcctggatgttccctaaagagcttatctaagaagggaagagaaagccgggaggcaagtaggacagagagatgactggggaaggtcttgtgtctggaagacccaaggaaggggcttctggtgggtcctcagagagagtgtctggcgcatcctcagtggagccttcctcctctactttctaggcacctctgggagggcaggagtgggagcagatgacaaccattttagaaggagccctctggctgggtgcggtggctcacacctgtcatcccagcactttgggaggccaaggcaggagaagcgcttgaggcctggagttcaagaccagcctgtgcaacatgggtgaaaccctgtctctacaaaacaagaaaagtcagccgtgcgtggtgtcacccgcctgtagtcccagatactcaggaagctgaggcaggaggatcacttgagccagaggttaagtctgcagtgagctgtgattgtaccactgctctccagcctgagcaacagagccggaccctgtctcaccaaagga

SEQ ID NO: 90176 - DNA, 1956 bp, Homo sapiens
tgacaaaaaagaaagacacctgttggggtggcctgccagacccaggagtggagggctctgtgagggcccgggaattcggactcaggacagggattctccatggctaggcccagaaacacagggtccaaccactctccagcagggagacctgggggtgaaggggtgagccctgcgcaggtctctgttccttggtcttcactgggcagtgtggagaggtgtggccaggaggagcccgcgtttgtccagaccagggtctactctggcaccagagtgaccacctctgacctctcctttcctcgtcctgggccgggaacgacaccaaatgagggacatggaaaggggtgagaagcataaatgtgcgtgtgtttctgcagaggagggggcatgggcccctgccgggctgcgcaggggagggtggggtgggacttttccagagagggagccaggcctggcccgggccccgggagctcacgtcacccccacccctcacttctccagggaactgccaaagccaaacccagctcgggatgggattatgtgtactgggtagacccgtggagaggggctgcgagaagagatctcggtggcagagagaagcagaggcagagagggcatgaagaggggtcggcatcagagaaggggcaggcagtgactatcaccccatttcttcttccctcagctggagtaacaagagtcaggcagagcctgaagacttgggtggaacatgggcccttctctggagatcctggcctcccccgttcagtcagggtggagttgctgaccttagtggccggcccagccaggggaaggagtggccatcggcaacccccaccccaaccccaatccctgaggcgcccgctctggctcagccactctgacccctccctcaaattccgaaccctaggtctcagggagggcagtggggctgagtgtctgcccccaggcacattcctacccttctcttggtcattttctgccccagagctggcccacctcagcaatgcgagggctccctggattcctctcccgggtgcctttcagatccaacagaaacagattttttttttcctggaaagcagaactaagagtgggatgaggagcaggggcgggaaggactcaaagtgagaagaagggggcaaagagagtcaggcttggtggctggggtggcttccaagcctcacttctccagtgttcaaagctgaacttcagatggacttcccggctcttcagaatgagaggcctgtggctggggcatgaggcagccccggctgcacctctccttcccgcttccccagctggtagagacgcacaggaaacaagccctcactgaaccaactccagatgctggcacccagagtgggtgttacattgccggcttcttctctagagattaaaccgtcaacccatttagcttatcccttggccaaaaagtgtatgagatgtgcctggatgttccctaaagagcttatctaagaagggaagagaaagccgggaggcaagtaggacagagagatgactggggaaggtcttgtgtctggaagacccaaggaaggggcttctggtgggtcctcagagagagtgtctggcgcatcctcagtggagccttcctcctctactttctaggcacctctgggagggcaggagtgggagcagatgacaaccattttagaaggagccctctggctgggtgcggtggctcacacctgtcatcccagcactttgggaggccaaggcaggagaagcgcttgaggcctggagttcaagaccagcctgtgcaatttagctggatcccatctccaccaaaaaataccaaaattagctgggtgtggtggtgcacgcatgtagtcccacctactcaggaggctgaggaaggagagcctgtgagtttgaggctgcaatgagctttggtggcaccactgccctccagcctggatgacagagtgagatctccatctc

SEQ ID NO: 90177 - DNA, 1828 bp, Homo sapiens
tgacaaaaaagaaagacacctgttggggtggcctgccagacccaggagtggagggctctgtgagggcccgggaattcggactcaggacagggattctccatggctaggcccagaaacacagggtccaaccactctccagcagggagacctgggggtgaaggggtgagccctgcgcaggtctctgttccttggtcttcactgggcagtgtggagaggtgtggccaggaggagcccgcgtttgtccagaccagggtctactctggcaccagagtgaccacctctgacctctcctttcctcgtcctgggccgggaacgacaccaaatgagggacatggaaaggggtgagaagcataaatgtgcgtgtgtttctgcagaggagggggcatgggcccctgccgggctgcgcaggggagggtggggtgggacttttccagagagggagccaggcctggcccgggccccgggagctcacgtcacccccacccctcacttctccagggaactgccaaagccaaacccagctcgggatgggattatgtgtactgggtagacccgtggagaggggctgcgagaagagatctcggtggcagagagaagcagaggcagagagggcatgaagaggggtcggcatcagagaaggggcaggcagtgactatcaccccatttcttcttccctcagctggagtaacaagagtcaggcagagcctgaagacttgggtggaacatgggcccttctctggagatcctggcctcccccgttcagtcagggtggagttgctgaccttagtggccggcccagccaggggaaggagtggccatcggcaacccccaccccaaccccaatccctgaggcgcccgctctggctcagccactctgacccctccctcaaattccgaaccctaggtctcagggagggcagtggggctgagtgtctgcccccaggcacattcctacccttctcttggtcattttctgccccagagctggcccacctcagcaatgcgagggctccctggattcctctcccgggtgcctttcagatccaacagaaacagattttttttttcctggaaagcagaactaagagtgggatgaggagcaggggcgggaaggactcaaagtgagaagaagggggcaaagagagtcaggcttggtggctggggtggcttccaagcctcacttctccagtgttcaaagctgaacttcagatggacttcccggctcttcagaatgagaggcctgtggctggggcatgaggcagccccggctgcacctctccttcccgcttccccagctggtagagacgcacaggaaacaagccctcactgaaccaactccagatgctggcacccagagtgggtgttacattgccggcttcttctctagagattaaaccgtcaacccatttagcttatcccttggccaaaaagtgtatgagatgtgcctggatgttccctaaagagcttatctaagaagggaagagaaagccgggaggcacctctgggagggcaggagtgggagcagatgacaaccattttagaaggagccctctggctgggtgcggtggctcacacctgtcatcccagcactttgggaggccaaggcaggagaagcgcttgaggcctggagttcaagaccagcctgtgcaatttagctggatcccatctccaccaaaaaataccaaaattagctgggtgtggtggtgcacgcatgtagtcccacctactcaggaggctgaggaaggagagcctgtgagtttgaggctgcaatgagctttggtggcaccactgccctccagcctggatgacagagtgagatctccatctc

SEQ ID NO: 90178 - DNA, 431 bp, Homo sapiens
atgggaataaacaatggtgctagaacttctcagactgtgcaatattgagatgtttctctaaaggatctactcaaaattctgtcatagccttctttagaaggtaaaagttatttataacaatttgcgcaagtgaacacctatggcatctgagagatgtagacttggatctctgcaattactggatttgtcctccttgtcctccacactgcagaggagacctcaccatatactcctactgcaacaacacagaaccagtggttgcgcacctgctcagtttgtgttccgttttcactctctcctcatgatatcatcatttgcttatttcaaagctcaggctatggggttttagactttgtcacaagggaaatcagataatttttttgaaacttttttttttgagacaaagtcttgctctgttgcctggtgcagca

SEQ ID NO: 90179 - DNA, 609 bp, Homo sapiens
ccatttcaaaacgacaacagcagcaaaaacaaaagggtatagagtcatggctcacaagctactcggaagccaagtggagcagccgcacatcaggagcgggggcatggggcatggggcctgctactgcctggcaactcgtattttatctgcagccgcacttgctggtgtctttgtcctcctccagccacaggattctcctaacctagagccttgggagtctctctctgtggctcagagggactgcagggtgccttcttgtgggcatgggctcagattccaacagtaacacccatgcaagttgccagcccccttgtctgcagcctggcctccatctcccctgagggacaggagtggtgtggggctggagaggggcagtcccatacctggattcctcaccccttacagatacaggctcctgaagtcaggaaccaaataactgagtctgagatggaaattcccaggaaaatcttcaaggcaaatttacaagggatatccccccatcacccccatcgtgtgcagccctatcagagatgtccatgttatggaaagagtgacaggaatctgccctcctccccttcaccagtcagatcgtcacctgtctgactgttc

SEQ ID NO: 90180 - DNA, 783 bp, Homo sapiens
tcatcagaggtaagatttggaatcagacctttccaaaaggtcatctgaggtaaggctaagaccgcacttcctctgctgggggtgagctggcagacacaccaaacagtgccttggcagcagctcacagtgcaggaagcccaggtgatcactcttctgctgggcccaggctgcaccctgaggactcagtaactcactctcaacagaatattctgtgcaggctctccaggctctgggcgtcagggtgcaaggggcagcttgaactgtacggtccgtcctgcactcacccgatgcagaccttgactttgatgttgaaatgaacacacttgttttacccaagtctggtggaacaaatgcccaatcatgtgaccttaaagtgtactgcaaagctgtagctttaagtaattgctgttctgccactgcttactctgaaatctaccatcaaagaaagatagagaaaaggggctgagccttggaatatatggttataagcagatctttctttggtcagagaccagggtttgagccaaggctgtaaatgtgaacaatagctgtgcaaagccttttaacctgacttcttcattttgtaaattattatgcattaagtagcagcccaataatctgatttctagttttattttcaaagtaagtagcttcttttgggaaaaacctaagttaaactagtagttttgccataataactgctgatttatgtatttgctaaaggtacttttgtatctgctgtgtattatagcaataaaataatcattttgttagaaaaaaaaa

SEQ ID NO: 90181 - DNA, 293 bp, Homo sapiens
gtcagtgttagggttgctagatttagcatacacaaaaattataggctgccaagttaaattaagtttcagataagcaattagtttttttctcagtgtaagtatgttccacatgttgcatgtgacatacttatactaagtatgagatacacctaactcctcctcctatgggtagcagtgaattaagggatatagagatgcctaaaattacacactaacagaagtatcatgaaaaaatgaaggcagaggcatagggttcccatgacatactttgaggaattttgcgagtttaagtc

SEQ ID NO: 90182 - DNA, 334 bp, Homo sapiens
gtaaataagaaagtgaaataattcctataatgtaaggttgatagaagataatcatcagggtcagaattaagaggtcttgtggtttaggaagcataaaattatgtaacttattgtttatttcactcagaaaataaaagtattaatgaaaggaattagagatgaacagattgatacaaactgttctatggtttacagcttaaaaaataaaggtacatttaatgctatgcattttgagaataatgtcttttatgctttttctttttacatatatatctatttgtatttaaggacaaaatagattgacattactaattacttcactattaataattaa

SEQ ID NO: 90183 - DNA, 248 bp, Homo sapiens
cctacccgcctcctccattctcctccacacctttgcccaggactctacgctgctataaagacatcagcagcccccgtagctcacagggtgctgcttcgagccatgccagcccgctgctgatgtgacacagctagcaattactgagttcttcccacgggccagacactggttctatctacttagcacagagaggcctagtcacttgcctggggtcacatagctagaaagtagcagtccaaccttgaacc

SEQ ID NO: 90184 - DNA, 335 bp, Homo sapiens
gcacctgctggggtgaccaggtgcaccagtgtgatagggctggctctgctacaagttccccttgctaccctcccctgactgtgacctagtgacattcaaatgcaccaacggaatcccctcctgccttttcttatggctctaccctgacccccaaggaaagggtctcacccactctctgttccctgcctgcttgggggagccctagtctttggctctccgcccgtgtgacccccacctcctgttgttgtgtgcattgaatctgtctaggacagggtgtctgatcttttggcttccctgggccacacataaaacacagtaacgacagctgatcagct

SEQ ID NO: 90185 - DNA, 336 bp, Homo sapiens
attgttttactttctttttttcctcacagaacctaccccaaccaaatttcagcttccctacaccatcaccactaccaccatctaccaattttgagctatcttcactctccttttaagatacccagatgcatggttgatgctttctaaatattcacctgctgttagctcatctgttatgccatttttatataagccatccccttgccagcttttctggatgccttgaatattatttatgtctctggctttgtaaaataaaaatatacaattgaaaatgtttagaaagaccaggtgttatggccagcactttggaaggtcgaagaaggaagatcactt

SEQ ID NO: 90186 - DNA, 321 bp, Homo sapiens
ccagctttcaagaatttaaaggcttgtgttatgccagaaagtaaaactagaagcagtggtgttataataaggaacgtgatttgaatgtaacacaggaaaactgggaagagcctgagggatggaggcgcagtgtcacgttcattggcctaccagagaacttgttatgcaggagatgttcatgatgaataagtgaattcatatatatatatacacacacataaattagaattcatgcttttcatcaggaaaatatgctgccatactttcccgatgaagagtgaccatcttctcttggggatattatgaaagagattccacatt

SEQ ID NO: 90187 - DNA, 358 bp, Homo sapiens
acactctggttctaattctgttaataaaagaaatctgtatattttcatttttcaaacaactttaaaaaaataacccattaacattttgatctatatctgaatagtaggattgctggtaatattcctaatgtttttctgtacctacattattaacagtgaaattattacttttcaaaatgagcattaccaaaaaaatttttaaagacaatggtgtgtttttaaaaatatttctctattccctaaaattacctattagaggaccttgtcctcctagtagacgcttaataaatattcactgattgaatcattgtaccattgaatagggtaattaagtgtaaatagcctaagaacaaagtgt

SEQ ID NO: 90188 - DNA, 143 bp, Homo sapiens
ggtaatatcaataagattccccttggatgttctctgttacaaccagacactgaagtaaacttgctgttgaaatttaaccataatgctgcatttgtatggctgttttaactagaataaaatgttctgttgtgtagttaccaaat

SEQ ID NO: 90189 - DNA, 504 bp, Homo sapiens
  misc_feature (420)..(420): n is a, c, g, or t
  misc_feature (435)..(435): n is a, c, g, or t
  misc_feature (471)..(471): n is a, c, g, or t
ggaacgggcagaggccctggaccgccagcggaccaagaacatatccgctatcagttacatcaaccagcggaaccgggagtggaacattgtagagtctgagaaggcccttgtggtgaaagtcacaacatgaaaaaccaacagatggatccctttactcggcggcagtgcaagcctaccatcgtttctaattccagagacccagctgttcaagctgccatcttggcccagctgaatgcaaaatacggttctggagtgttaccagatgctccaaaggaaatgagcaagggtcaaggcaaagataaagatttgaattctaagtcagccagtggacctcttcagaagatctgtttcaaagttacacgattttggatgtggaagattggactttacaagtttccccagcttcagagttcaaagggntttagccattccacnttccaagggttcggcagcccaaggatgggggttccnaggagatttttggaatttgggagatttccaaaa

SEQ ID NO: 90190 - DNA, 244 bp, Homo sapiens
atgggttcccggctacttccctcctgtatttcttcctctcctcaagctccccaagcctgtcacaactctttcctcattctcagcaaacaacctgccaactaactgcctctgagattcccttgctcattctttcctttaaagattcagcagtccacacatcctaaaagtgacccagggcgggagtgacaagcacaaaacacagcccccaaagaatcgcccagccagccagtcaggcatagcggaa

SEQ ID NO: 90191 - DNA, 576 bp, Homo sapiens
tctaatgcacatatgagctccaatatgcacaggtatctatgtagaatcaggtactaagagtgcttcaacacaggacatgatggagagtacaaagaggtttcacttcaaatcacacactagaggaggagatacattttgattgtttgtaaaactattacatttttaagttggttctgatttcacattatggtttcaactgatgaaaggaaattatcttcttgcagattctgcttatcttttgtgatctgcaccgttctaacctacattctctgctcggtgtgttttggaacgctgttttgcacagcttcagcttgcttacttgctttgcattcctctttgaagtgaccacaaaatcctgcatcaagggtctctgccagcatcaacattttctcttctctgctctgtagtgatgatggacactttgcatgctggggctgaaggagggactgactcccttcggcaagcctgctatgtcctcttctcattcccctttcattctgccactgttctggtagtagcagtcctctttaatcctttaagattgaatggagctggtcattccaggacatagttcta

SEQ ID NO: 90192 - DNA, 280 bp, Homo sapiens
gatcgactttgagttgcttcgggtctagtagaaatccggttatttccaagcctgtgaaatgtgaagttcaagaaaattgaatccgtgtatagcaaaaccattttttctcacaattttttaaccaatgaacattgtgtgggaaattgattccatatgttttcaagtcatttatgcaacttgaataattaaaatattcattggtaagagctgcctgatgtctttaaagtcaggaaattgtcttatgccaaaagtagacaaactcaaacaccaaaaggtcaag

SEQ ID NO: 90193 - DNA, 452 bp, Homo sapiens
acctcagccgccactgccacttctctgacctcatctatttcttttgtcactttgctaaagtcacactggcctccttccttcacccagaacaccctcaaagcatgttctgtctcagagtctttgtccttgctgtctctcagtctcaaaacttcccccatatgcctacatagctgactccctcccttcaggtctctgtacaaatattcctgtactgtcagagacctgtgtcaaataacttctcatccccccactcattttctgcttcattgcctttcacagtacttatcaccatatactttgcttactggtccgtctccagtgctttgaagaatgcttggcaaatattagtcactcagtaaatatctgttggatgaaagaatgaatgaaaataataacagagctttggaattttttaaagggtaaaaaactatatgattaatttcagtttcaaa

SEQ ID NO: 90194 - DNA, 740 bp, Homo sapiens
ttgaatatcttttcacttctcaagaaaaaaatgtgctgatctaaagtggagtgggagaggttaaccttggaagtctgaaaaagagtcacctaggcaaactcttgttctcactaactccacattgtttagggaacagaaagctttagccaacaaatttcaatcagtttctctcttttctaccctactcactactatctcttttgcatttactcaatttctaagcatagatctcacttctttgaggttaccttttcacaacgaaaccgccaccaaaaaatttgtatattagtttctcctgctcttttcctatagcagcctgtacttcgtatcatagtaactatcatgctatattataatcatttgtctgtctcccctaatagatgtcaggctgttgaaagtgcttactgaatctcttttgctttatttctttgtgcctagtacacagtagtcatatttatttattaaatgactaaatgtcttgacacacaatgggtacattaggctacttgccttcataccattaggcatttaatccatttctacttctgattcagtgctcagcaaacaaacttctaattatgacttggcttcctaatcataattgattgacaaaaatgagaatgttttgatcattaaatcttctgatctgccataagacgttaatcaaccatgtgaactttgtatataaattgggaactggaaactttgaattaaacttttgcacattatcctcctgagct

SEQ ID NO: 90195 - DNA, 252 bp, Homo sapiens
gagccatgcacacacacggccgcatagtcacacacgcatatctacatgtcccccccacatatacacacacacatatacatggacccatgcacacacacagctggatattcacacacacttgcacatccactccatatacatagacacgcacagacacagctgcatgttcacacacgcggaagtgcacacggacacagacatgcatgcatatgcgcacaggtgtgtacagcctcagtggtgggggttggctgt

SEQ ID NO: 90196 - DNA, 1003 bp, Homo sapiens
  misc_feature (14)..(14): n is a, c, g, or t
  misc_feature (48)..(48): n is a, c, g, or t
ttgcagtaactgcngaattcctggttggctgatggaaagatggggcanctgttcactggtacgcagggttttagatgtatgtacctaaggatatgaggtatggcaatgaacagaaattcttttgggaatgagttttagggccattaaaggacatgacctgaagtttcctctgaggccagtccccacaactcaatataaatgtgtttcctgcatatagtcaaagttgccacttctttttcttcatatcatcgatctctgctcttaaagataatcttggttttgcctcaaactgtttgtcactacaaactttccccatgttcctaagtaaaacaggtaactgcctctcaactatatcaagtagactaaaatattgtgtctctaatatcagaaattcagctttaatatattgggtttaactctttgaaatttagagtctccttgaaatacacatgggggtgatttcctaaactttatttcttgtaaggatttatctcaggggtaacacacaaaccagcatcctgaacctctaagtatgaggacagtaagccttaagaatataaaataaactgttcttctctctgccggtggaagtgtgccctgtctattcctgaaattgcttgtttgagacgcatgagacgtgcagcacatgagacacgtgcagcagcctgtggaatattgtcagtgaagaatgtctttgcctgattagatataaagacaagttaaacacagcattagactatagatcaagcctgtgccagacacaaatgacctaatgcccagcacgggccacggaatctcctatcctcttgcttgaacagagcagcacacttctcccccaacactattagatgttctggcataattttgtagatatgtaggatttgacatggactattgttcaatgattcagaggaaatctcctttgttcagataagtacactgactactaaatggattaaaaaacacagtaataaaacccagttttccccttaaatccctagtt

SEQ ID NO: 90197 - DNA, 796 bp, Homo sapiens
tttctccctatggatgcggggtctgattctaggccagcttcgtacgcagctcagtgaccaaccacgggatggatgggatcactatcatcctaactgagtatctaggacaccattgagtttaaagactccaactcatcatcactgtaaaccatccaagtatcctgcaaaccctggcactttagcatctgaaagacacctgccagactgcctgtggcagtccctcatgcttgacttttggtgcctagggtcctgttctcctggttagagggaacttggtgtgctcacactgagggaaagtgaaggacgcggggcatcttcctgccctggccttcctgccttggtgcctgcgctccccaccatcctgcaaagaggaaccctgggagtgagtggaggtggcaggggtttggttcctgcctgctgccaggcggccttgcccagggggtgggtcccagacctgagagcaaagcgctgttctctgaagtgctttgtagctgactgcatcttgtgccttactcttttggttgattttcaaattttgtaaaagcaaatttgcatctattttctcttttacttggttatagttttaaatgtctctatgaaagggttttgaccttggatgatgtagtatatgcaataagatgctgtgattttatttcaggagcatcctgtctttgtcagtgtatagttcgtgtgtgttaaattcatgctcagacttgtaagaaacagttaaccaagccatgtgatcatagtagctcttttcagggaactactacttcaatatcattagaaagtctta

SEQ ID NO: 90198 - DNA, 273 bp, Homo sapiens
gttctacctggagtcctggggattggaccacccagcttgtcacagccactgctaacacaaatgtgtgccactggggagcctcagggttgtcccaccactgccgtggccatcatccatgctatgcatgctgcctaagagtgtgagattttgtccacactccagcctaccactgccactgctggcacctgagcaagccacgtggaaacccaagaattggcccacttggactcactaatgccaatgcactcatacactgcccaggggcccaaggat

SEQ ID NO: 90199 - DNA, 324 bp, Homo sapiens
gaccagctaagaggtctggaattatgcgggtgatgggtacaccttgaacatattgaaccagagtttggcagtttttcagagataattttgtccacagtggaaggaatggactagtggtgggaaaaattgatagcatggagagcacctagtaaactattgagtccaagagaattagaggagcccaaactaaggcaatagcaagaggagtggaaagggatggatttaaggaacaaaaacttttccataataaataatgcttaggatgaggactgttatgatgataatatcttgacatgccatgtttttaaagaattatatattatt

SEQ ID NO: 90200 - DNA, 352 bp, Homo sapiens
atcccaaccatttggaatactctaaaagcctcctgactaatctggagtcttgctgccctttaatttattcgttgcatgttagccttaatgatctttataaatgtcaatccgactgcgtcacacctttcagtggcgtccctatgggttaaaattcaaattccttaacatgaattacaaggacctgtaggatctggatcttgccaacctttccagcctgccaaattggccccgcacaataaactaaggttacttcaaaggtgccaagtgttttagccccttggaataggtacttttttactgtgactcctctggctagatgtccctcttaggttctccatagcattttgtgcat

SEQ ID NO: 90201 - DNA, 351 bp, Homo sapiens
ggcaggagatctttgatattattatcagctaaaatccagagaaggctgggaaattatagaattatttcctacatctaagggactcactggctgtgttcagagtgtcatacttatgtgccatggcgaaataaaaggaaatgatttgggaggtctgcctggaaaggcaaaacctatatgtctatgaagttgcttaggaactctcataagccactcccaacttatcaaatgcgaatttatatttgataaaaagataggaaattgttgaggggaaatactgaaagggtagtcacagttggatagtgttagactagaaagtgtcttagaaatggcataaaggaagaggagctggat

SEQ ID NO: 90202 - DNA, 526 bp, Homo sapiens
tcatctaacacccatgacaaatcacatttttaaactttcctattatatgggactttccaaaatttttatggctatttactattttgggcaaaaagacacactctttagtacctcagaaaatactctaattactttacgataagaaaacagttcactcaactacccaaagttgaaaataggtgacaatatctactctgaccgagaatttaggatttagagttttactagagtcaacttactatactgaggaaaactaattaacttaaataataataatagaactccactcaaattgaaaaatagtgaatacaaaagcaaaagtgtctaaaaattgccctgccttgaaaaatcagtgaaaacattattgatatattgattatattatttttgaatactttataaatttgatatttaaaaatttttatagatgaggtctcgctatgttgcccaggctaggtgtgaactaggctcaagagatcctcctgcttcagcctcctgagtagctgggactacaggcacatgccac

SEQ ID NO: 90203 - DNA, 361 bp, Homo sapiens
gatcttgttatgttgcccaagctggtcttgaattcatggcctcaactgatcctcccgccttggccttccaaagtgctgggattacaggtgtgagccactgtgctgggctttgtttacttagatgtttagtgtatttttgtttacctttatttaactcatcttagcactgtgtctggtactttctagataaatgtccggtaaaagaatgcataatataaataaaacataattttatatataatgggtatttcaacttcctgtttttcttcaagtgctgaaatctttttattgttctatttttttattagctccatgtattattcatggtttttgtctactgttggaatacagaattatattt

SEQ ID NO: 90204 - DNA, 136 bp, Homo sapiens
tacctatgggtaagtgcccagtttccacattgctaagattcaattagccagtaattgataaggattcactttgaccagttggtctgcctggtgcataagaataaaacatgagactagaggtgattaccaactatat

SEQ ID NO: 90205 - DNA, 324 bp, Homo sapiens
gcttcctcctcaccccacagaggtgagaaggtggctgcgacgctgttggcctgttcctcgtctgcttgcagccctctatggctcctgttccactcagggaaagcccaagtcctcactggctgccctcacagcgccctgtttccctccgcctgtgggcttttctgctgttcttccaacatgccaagctctgtcctgcctcagggcctttgcactagctgttcccccctcctgaaatgctgttcccctaggtacctgcatggctcttctgccacctgctcaggctgcccccgactctgaagtcacacgcccctcatgtcttcatgt

SEQ ID NO: 90206 - DNA, 355 bp, Homo sapiens
ttaatagttagactattttctgctatttgaaaactgaatgagattccagtatttttctacctactgaatgatttgatgacagaaatttgtattgttttaacctgttggctttcagtaacaatgctgcaataattatgtgaaagctaacatatgtgctgcattctgttttattgttctactttttcacttttatactcataccaaattgttttaattctgtagctttttgatgtgtttagaaatcagaaattgtaatgcctccaacattattccttgaagattattgagtactttattaactctttagattccatatacttttggatttgctgtttttattcaaaagtgcaatgag

SEQ ID NO: 90207 - DNA, 928 bp, Homo sapiens
tccagcttctccatccctttcctcccctcagtcgacatcctctcctctcctggagttagtcctgctgggggaccttgggcaagttccttcacctctttgagcttccgtatccttctctttaatgatctcgaatgtaacaaccccacctcatagcctcattatgagagctagatgaaatgaaacaataaccactgtttacctttcaggcacctggcagaagtgcacgctctggagctgagtggatgggtgcaaatcttggccatgctgctcctccacacccaagcggtttgggcctggactagttgcctgatgctccacacctccacatgctctcttgtcaggcagaaacagtaacagcaaccccccacgcctgttatgagagttaagtgagttgatatttctaaaacacatcagtgtggggcattaggctagcccctaatgccactcatgccaacaagtgctgtagaagagttagccattattcttaggtcagctaattatccaatcagcctgacaaaggaggtactgttattagccccattttataaacaggaaagatcagtaacttggccaagggcagaggggcaggccttgagcccagacggataagacattccagggggaggctcctcaccttcagttacactgactgctggatataagggggctccccacttggagcttaaaggtttgcaatagccaccttgaaattcttgaaaatcttaatcactttatgtttgagtttgtgttttgtaagtgaagttctgcttctgccacctccccctttccccaaatgtgcccaagactgaagagggtcagagtcaatcccataattgtgccatggggcagggctgtggaggtcttcaaggggctgtattcaccctacaagtattcctgtgcccaaaagagtatgacattaaatagcaga

SEQ ID NO: 90208 - DNA, 354 bp, Homo sapiens
agccctacttgctgcagaggggttaacagccactcaaaaagcatggagttggcctgagggcagccagaaccaggatgggttttaagcatataagtatgtggcttagacacatggggtgctgagtggagagcagatgggagagttgaagactaattaggaagtgtttgccttaatccaagcaagagacaatgaccacctggatgtggattttggcagtggagttagagatgggagtgacttcacagatatttaggactcggattattaggacttggtgggagactggatgtggggccaggggagaggttggagttgggtgcctgtgatggcctccactgcctggaactcaggccg

SEQ ID NO: 90209 - DNA, 541 bp, Homo sapiens
tttaagaatgttctctcatctgttcctaatttctaatgcctgtagtttttcttaaatggagtttaattttgtggatgttttttcagcatttcttgaaattatcatacggctttacttcctcaatttgttaatgcactgaatcatattaatagattgtaattgatgttctaatgttaggacattagaacactgctagatttggtttgctaatattttgtctcagaattttacttatttatgagtaaaattgtatttattttttatactgtgttttgtcaatttcttcctaagtttatatatctttttgctgagaattttttttgtgtcaaatttgttagcctttgtttataatattttaatctgtcttgtatatctagttatgctctttgaattctgattatctactcatttttctgtgatgttgctgagtatttgtcaattttattattccatttaaattaccaaatttgagaattgtctattgtatctttgtttttatacattcatttctgttctttattaaatcctttctgttactgtc

SEQ ID NO: 90210 - DNA, 1219 bp, Homo sapiens
gagacagtgtctcactctgtcacccaggctggagggcagtagtgcagtctcagctcattgcaacctctgcctcccaggtttaagcaattctcgtgcctcagcctcctgaatagctgggattacaggaacatgccaccactcctggctaatttttgtatttttttttaagtaaagacaaactttcaccatgttggccaggctggtcttgaactcctgacctcttacgagctaatcataccacttctaactagattttctattaatgtacaaggagggactccactactaaagtttgttttacttctctggttatttacacaaaacgctggcaatacattaaggctcactaatgtggacctaagtgagtttctgagaggctttgaatatgtatgtgcaaactgtcctattttctttatatgctctcttaaatatgtatgtctgtaaatatatatataacacacatatatatatattcctagacatctagtgtttgctgtcattagtgaccaagaaaaagtagttcttttgtgcacgcgtgaatacatcaaattagcaattaccatagaaatgtatttcattgaataaatagcttttgtttgtttgtttgtttgtttgtttcagggaaatttagaacaattattagatgttattgtgcctcttctcgtgttgatacgtgtatttgggtcaaaagtgcaaaaacttttttctacaatgtacagttattttgacttttcccaggggaagctagcaatagttttaaaagcacaaagtgatgtaaaatattttgacttttataataatgcgaagtagttttatttgcattaatcaataatgttcaggatctttttgtagtaagtatattttaaatggtgtaatttgtgtgtttatgatatgtattcaattatttaagttaagtatcagtgtatttttaaaaagtgttcccaggtgaacaaaagtttgcttttcttcaccattctgtacaggacaagcattattcagttcacatagtcagctctcactacacttcaacagaacggggcaagttcgtatttgaattctgttatatttatctaagggaagcaaaattaaccttttaataatagattatctttaatggttattaaaagaatgttattgaccaaaaagacatattttgagattaataaagatgtattagattatccaaaaaaagtggatgtgtgcaaatgtggtcctaatc

SEQ ID NO: 90211 - DNA, 877 bp, Homo sapiens
cacgcctttgcagtgcctttggcctctactgctgcaccctgtactcttcccttcgccctctgtgactcccctcaagcccctcctccgtgtcctaccttccctgggacagtgccttgcctaccttgttcctggctctcttcattggtgacctgtggttatgacaaaaaagttgaggatgtgggagtaggggagagaagagtggagggcggaaagcagaagaagaaagtgaaagaagctctagaggaaaccacagggcctgtggggaaggagggtcattgccgtggtaacccctggttgtgggggaagggtataggtcctggctatcccatagcctgaggccagccaagcccacccagagaaagagcccctcctctccaattgtcccctcctagcagctacacctctgcaatccatctgacatttattgagcacctactataagatgggcacttggctaggtgtggtggctccagcagggaagccttgtagagccagtccctgcctacaaggagtgctccttctggtaggggagatcgacctgtgaacacagacctcatgtctagttccctctcaaagctcttagtgatctgtatgggccaggagcaaatcccattaatattttcctgctctccctacgggcttcatccttgccttggcttcagctgttgttcctgcactctctgcttctcccagttcacctcctccacccctttcccaggatccactactgtgttggctcctggttccccaatcacatgctctgagcctggccctatgcctctctcttccaagtttccagttgtgtggaccttgaatttctcaaagcctcttcacttctcacctctgctacttctcatccctactaattctcttatca

SEQ ID NO: 90212 - DNA, 762 bp, Homo sapiens
atacattcctcctctaggttgtgattcatttgttcaacagataatgggagttctttacctcacggaacttacagtttagcaggagagataagatatgccgggtttaatacaatgtgaaatgtgataagtactctaaatagagctgtgtggatttagatcctggaggccattgagatcatgtccacaaggtgggttgagacagttggggtattctggtctgtgtattttatcatgaaaagcatcctgtataacacattattaaaatattttcttatatttgcataagaaacattggaaagatacagaagatactgtcaggatggggcaggacagaccagttcagggatggacttgataccgctcagtctatgcctctctactcccaccaaccccagttttttaatttttatttgggaaaactcgaaacctacaggaatactggaagaaggacagtaaacacccatatatcctttatctagattcactaatggttaatattgtagccacatttgctttatctctttctatttatatatactttttaaatcttttgagattaagttgcagacatcatgacatttcgtccctgtgtacttcagcttgtatttcccaggaacaaggacattctcctccataaccacaataacattaccacacccaggatgtttaacattgatataattctgttatctaatacatagtccgtattcgaatgacagttgtctttttagggtttaaattttgtaccatgattaataaaaa

SEQ ID NO: 90213 - DNA, 132 bp, Homo sapiens
tctaggagtgtcttttacatttctttatattgttagtaaatccttgtgaaaatctctatggataaatggggttattaccacctttattaaaattaccatagtaagcaagtttgtgttgaatttagccatatg

SEQ ID NO: 90214 - DNA, 388 bp, Homo sapiens
agctgacacgcttcaggcctttggttagcttcgctgactgtccctacagcgggagggcaggtggcaccgccaagagcctgcccacctcggaagctgactccttgtgccaccaggcaggcaggacggcctaggttgggggatcagggtggccaacaggctgtttcctgtcctgcaaccactggtaccaacctcccaggcttggtgggaagaagccagggctggaaggtgtcttggtaaccgctggaggctttggcacaggggacacgggctggggctggacctgggttccaaccctgtctccttcctgagcagctacaggctccagcgaatttcctgtgcctctcccatcccagagtcttccgaagacctctgggaggaaaagcaccct

SEQ ID NO: 90215 - DNA, 652 bp, Homo sapiens
tctcaaaaacaaacacacaaaaaattaaataagagttttgcagtctttgctgtcaaatttctttctcagtgacatagtgaaacggatccttatcaagtacacaggtaaaacaaaagacttcatgctaaggtctgaagcacaagcattaatgttaagtgctcatagctgctagtggcaactgtgagtgaaatgaagcaattttttttttttttgagacggagtttcactcttgtcacccaggctgagatcgtgctactacagtccagcctgggtgacagagcgagactctgtccccctcactagaaaaataaataaaataaaaataacaaaaatgtggaaagtagagaataatttattgaaatggttaatctatttttaaaaacagacaactgaaggcctgccccaatgtaaaaacttagtatgcataaaacaaaaactaaaaacaaaaatttcaaaacatctgaatgttgaaagaaaaaccattacaaacaaattcaaaagacaaaactggtaagttcacattaagtaggataaaacattaaaaaattttaagctataaagaattgttcatactctaacaaaaccagaaaagaaaaagaaaaaaatttccactaagaaccacaaagataaaagggcaaagacaagaaacaaa

SEQ ID NO: 90216 - DNA, 315 bp, Homo sapiens
ttttttttgtaagggactgctgataatgaattttgtttgttgtctctctacaatgtctttatctccctgttactcttgatatgtatttttgcttgctatagaattgttagcagcaacttttagcactttgaatgtattttttcatgtcatttcattttaaaagttggctgtcagtcttttgttatttttctctttggtttttatccatcttactgtgatgtggttgggtagcttttgttttaccctacagtttagaggaaaaatcgttgaaataatttgaggctaagggagatgatatcttccagactggattta

SEQ ID NO: 90217 - DNA, 366 bp, Homo sapiens
ggactctgcaatagtctgtatggtccatgaggcaaaggactgggtttacctggaaagcctccgctatgcccataactagcataatgtctgacatttaggcgatattcaagaaatatttgttgaatgaatgaaatacttgataaataacttcaacctttttaactgataaatttttaaatgattaattttaaaccaacataaccttctaaattaatattcctttccctcctcatcatcctctaaaaggacacatgaactctctattctgctggtttaagcagatgatctagacatcaacctagatgcatcatttaatttaatttaaggtaaaccagcaattccattttttgttgccgacaatgaatt

SEQ ID NO: 90218 - DNA, 497 bp, Homo sapiens
gagatgaagttttgctcttgttgcccagactggagtgcagtggtgtgacctctgctcattgcaacctccgcctcctgggttcaagcaattctcctacctcagcctcctgagtagctggaattacaggcacctgacaccacacctggctaattttttgtatttttagtagagatggggttttgccatgttggccatgttggtctcttaactcctgacctcaagtgagccacccgcttctgcctcccaaagtgctgggattacaggagtgagccaccgtgtcccactgtgagtgagtgagccacggcaaaagtctttaaagacagcatgtttcagaggctgtgacggtgccctgtgaacacgccaaatctcgcagtcccgggagctctgaggagcaggcccagctccttgccaggctgatggtactgaaactctgctctccaagacataacctgatggccgtgcaagatttcttaattgactgtggaccgtgagagtct

SEQ ID NO: 90219 - DNA, 403 bp, Homo sapiens
ttgggattacaggcacgcgccacaatgcacagctaacttctgtatctagacggggtttcaccatgttggccaggctggtcttgaactcctcacctcaggtgatccacctgcctcggcctcccaaagtgctgggattacagatgtgaggcaccgagcctggctttgcttttttttttttttttgagatagtgtcttgctttatcgcccaggctggagtgcagtggcaatctcagctcactgcgacctccgcctcccaggttcaagcaattcttctgcctcaggcttctgagtagctgggattacaggcgtgtgccactgtacccggctactttttgtatttttagtagagaccgggtttcaccatattggccaggctggtatcgaactcctgacctcacgtgat

SEQ ID NO: 90220 - DNA, 444 bp, Homo sapiens
cccctagggtcaaagcacaaagagaaataaacttcagcacctgaaaattctgtaataagagtctttgaaaatggaaaaaaaatctatgcttgaccattgttgtctaagagaagtttgctatcaatccctcctctaacgccctgaacagaatgttcttcaccagaaccctgtgtattcatcaccacacaggctgagaggcattccagcatttgtgcaacatcaagatttatgtgcaattatctttatggcaaatgttccacaagttatagctgttaaaagaaaataagatgcaaatgaacaagaagaagcagaggcgctgcctgcagcctgggaaaatttgggaagctagcctaatgagtgaatttgttttaaaaggaaagttggcaaaccttattccagttcattaaatttcaacaaacagcaaggattaaagtaagaatcaac

SEQ ID NO: 90221 - DNA, 491 bp, Homo sapiens
aatggattggtttttcttcggaatctttgaagcctttaaacagttccttgtgctgctttaaaattaggccaaagcatggtaagtcgtaacttaatctccattcttcttaccacgaaagggcagacatttcactagcgtggtagtgtgttattacctcctctcactgccaaaccattcagattgttcttcttcctggatggtggttaaaacctcagctgtgtcctcctgttgggctgttttcccaggtcctgttcctctttgcactctagccagttcttcacctcttgtctcagtagcccaggctctctgtgctgtgatccccattacctcctgctgccccccactcctatactctctgcatttatggatctccctgggctctccaggcttttgctcttattgcccgtctgctggagccattccccctctccagtggctaccaaggtaaagttcttccttctcacggcaatgagcacaaatagagccttttg

SEQ ID NO: 90222 - DNA, 331 bp, Homo sapiens
ccaagttgaggtcaatctccttctcctttctgctgtcttgttgagaacatccagaattttatgcattttctggcttcaaagagaagcacacctattaatattcactgctggttatcttgaaagttggaaaaccaagacttcccagctgcaggagacgacattagataaacataaacatgactttccacaggagggactgtcccaatgcagagcagatttactcgactttaagcatgctgatggtaaatgttctcccccaaggtcaagagcaatggtggtttattatttaattttattagtagacaaaaatgggcagttaaggactgtattt

SEQ ID NO: 90223 - DNA, 364 bp, Homo sapiens
cctcccaggttcatcccattctcctgcctcagcctcccgagtagcctggactacaggcacccgccgccacgcctggctaagttttttgtatttttagtagagtcagggtttcaccgtgttagccaggatggtctcgatctcctgacctcgtgatctgcctgccttggcctcccaaagtgctgggattacaggcgtgagccaccgcgcccggccgagagtgatttttcttagaacacaatgccaagacattgaaaacagtctcccttctcagtcccttctttaaaatgccctcatgtcaaaatttggatttgattcctactctgtttccttcctctataaccactcaagaggagtggggatctca

SEQ ID NO: 90224 - DNA, 242 bp, Homo sapiens
tgttgccatgtgaagaaggacatgtttgctactccttccaccatgattgtaagtttcccgagacctccccagccatgctgaactgtgagtcaataaagcctctttcctttataaattacagagtctcagttatgtctttatttgcaagatgagaatggactaatacactggtgataaatttgatggaactaaaattttattttgagcatgttacattttctcctttctgctcttgtcctcca

SEQ ID NO: 90225 - DNA, 332 bp, Homo sapiens
tgagtcctggggagtgatcataaacaaacatattcttgcttccatgcccttggttcctgggcccaaatattctatttactgaagacacagcatcatttaagggctactgatttaggcagattatggtgtcttaaggaatagcactccatctttgcagggtatcacctcccaattagcacctcagctgtcccttcataaagctgttctgtcatgcctacaactcctggatgtcttagtatataataagaccaggaggtccatggccatgtacccaccaccatgtctcctttttctataaagtgggtgaatggtttgaatcagatattatttag

SEQ ID NO: 90226 - DNA, 233 bp, Homo sapiens
gatatcctctagaggccacaaattcattcggtaaattgactcaagaccctccatagactctaagaatagttcataatttttttatttatttggcacacatgtgtttaacatctacagcttcctggtttagaaagaatctttttgtaaaaatagtatcctacataggacagggaaataacaggaatctgagattctggttgcaattcagagtatttctttttctttgctttttt

SEQ ID NO: 90227 - DNA, 232 bp, Homo sapiens
aagtgctatattcattgtattatagagaaggttggggagcacagaagaggatcaacccagctttagaaggattagagaaagcttccagaggggtggacatttgagctagcaagaaagcacaagggaaaaggcatttagacagaggagacaatttgtcctgacccagaagcattggggtatgctatgcatggatagacaaagaatttgtgcaaaaggggagcagcaaggcatg

SEQ ID NO: 90228 - DNA, 268 bp, Homo sapiens
tcataaattttgtgctcaagtctgactcagttaatatgcccagtttgctttcataaatgtgggggtagttaccagttacccttgtaatttatttattgtgtttcctcattagaacccttgggtgcaaaacagtgagataaaagcttcatattcaaacagatttgactggaaaaatcaaataatttgactattagaaaaccatatatggttagcattccatgtggaatggtcagaaagtgagagaatgagatgaccccagccattggtg

SEQ ID NO: 90229 - DNA, 2062 bp, Homo sapiens
tgaggatatagttttttctatttgaggtttaaatatctttccatcccaaagtctgagttattcaaggtctggctcattctgttgacaagacctacatacatgtggatccagtcaaacttgcatggctgaacaaactactaaagtaatataattaagtaattgctatatactcttgtggatgaggggtaggatggaaaggctcagattccttctggttgaattaaaatctctatcagcatgtggttagattgacattgctagaaagggagcctgaaactaaacatacattaaacgaagaaggtattttgtaattcccttggctgaagatccagtgtctaagctagaatctttgcagagcacagaatcctgtgtgttcgtgggatgtacctaccccactgcaaattgagcctaattgagcaaaccactccgatggtttcaccttcccctgtcatagtgatgcagtgaacaaagctatttcagtgagaatgaaagggaaatttggcaaggaatatcagcttgcactatttaagtcttggaatgtcattcaagatgttcttgttctgtttctagtgtaatgtttaagcccacagaatcagaccggaatatataacgtcatgttagaattaagataaatacacttgtcatacttaagaagccacatttcaataagatatgctaccactggctaaaagccacagattttttttttcctgtatccatacgatcaactgtcagttggccccagcaatggaaaagaacagaatagaggataatccaataaagtgaaatcatttgggacctcttatgtaattttatcttgtagtagagcttccatcttaatttgctttgcttacgctaatttcatgtgaatttatattctcgggcatcatgctagaatgtaaataaccctgttcccagaattaagagatccaggcaaccaagcagtctataccactagcctttggcaaatggcttaaatttcccggcctgtttgtccattcttgaatacagataagaacatatgctttcctactttataaactcttagcacgttccacattatgtgagctgagtgactcagagctgagctggattactggccaaagttagcctgggaagataaagagatgtttgaggtacctcacacaaaattaataagctgatgtggtcatagatatgtttccagttgaggccctcacatgaacccttaactgaattaaataaaactgggactagaaaatgttgacattttctgcacttccccaacaaaaaaaaaagaaaagaaaagaaaagaaaaaaataaataaaatgttgacatttctagaaatacagccaaacaaggctgtactgattctacaccaaagcacaacaccgcattgcttgggccactgacctgaaactgggaaggagttctcttctgaaaaattgatatttaaaatcattatgaggaaataggattccataaacattttcctgatgaacaaaaatggtcgtctctatgtttaaaacaccacacacacatataccaaaactgcatactcacttattcatgtgaaaatcactgcttctttgtaaaatattacgtaacatctaccatgatattctacagaaatgctgtacttgaggttatctggtttgctggagagatattaacttagcaaaaattacttttataaaattgaaaggaaaaagaccaatacatcaacttaaattgcaggagtttatgtagctgctttctctgtagtttaaaaagcaatgcataaatgcatactcactatccttggaacttaataccagctcatctatagagcaccttcttaaagacgatgtactgatgtaaggttttgtaaatttctaaactgttttaaacgggatattatcttttgcaataaacttacatattttttctaggttttaagactccattactagcttgggttgatttcagttataaaatgtatgcttaagaaggacacctcaatggtcctaagggcaagtatggctttcattataattgcttctatatatttctaagggaaataaataaagagcagattcagaa

SEQ ID NO: 90230 - DNA, 1159 bp, Homo sapiens
  misc_feature (14)..(14): n is a, c, g, or t
  misc_feature (26)..(26): n is a, c, g, or t
  misc_feature (39)..(39): n is a, c, g, or t
  misc_feature (60)..(60): n is a, c, g, or t
  misc_feature (64)..(64): n is a, c, g, or t
  misc_feature (78)..(78): n is a, c, g, or t
  misc_feature (87)..(87): n is a, c, g, or t
  misc_feature (108)..(109): n is a, c, g, or t
  misc_feature (111)..(111): n is a, c, g, or t
  misc_feature (131)..(131): n is a, c, g, or t
cagatgagagtttnacaaatgtattnccagtggtctgcngattttcctctacatacagcntttnaaaaacacattaancacagaccngtttccagactagactaatgnngnaattacaattcagtgcgagnatattttagactgcatttcattctattatgtgagctgagtgactcagagctgagctggattactggccaaagttagcctgggaagataaagagatgtttgaggtacctcacacaaaattaataagctgatgtggtcatagatatgtttccagttgaggccctcacatgaacccttaactgaattaaataaaactgggactagaaaatgttgacattttctgcacttccccaacaaaaaaaaaagaaaagaaaagaaaagaaaaaaataaataaaatgttgacatttctagaaatacagccaaacaaggctgtactgattctacaccaaagcacaacaccgcattgcttgggccactgacctgaaactgggaaggagttctcttctgaaaaattgatatttaaaatcattatgaggaaataggattccataaacattttcctgatgaacaaaaatggtcgtctctatgtttaaaacaccacacacacatataccaaaactgcatactcacttattcatgtgaaaatcactgcttctttgtaaaatattacgtaacatctaccatgatattctacagaaatgctgtacttgaggttatctggtttgctggagagatattaacttagcaaaaattacttttataaaattgaaaggaaaaagaccaatacatcaacttaaattgcaggagtttatgtagctgctttctctgtagtttaaaaagcaatgcataaatgcatactcactatccttggaacttaataccagctcatctatagagcaccttcttaaagacgatgtactgatgtaaggttttgtaaatttctaaactgttttaaacgggatattatcttttgcaataaacttacatattttttctaggttttaagactccattactagcttgggttgatttcagttataaaatgtatgcttaagaaggacacctcaatggtcctaagggcaagtatggctttcattataattgcttctatatatttctaagggaaataaataaagagcagattcagaa

SEQ ID NO: 90231 - DNA, 206 bp, Homo sapiens
ccaaatgaggcaacataactgctgaaatgagtactgagaattcttaatttacatatattaaaaatctgccccaaggccaggcacggtggctcaggcccataatcccagcattttcggaggctgaggcgggcaggtcacttgaggccaagagtttgagatcagcctggccaacatggtgaaattccacctctactaaaaatacaaaa

SEQ ID NO: 90232 - DNA, 261 bp, Homo sapiens
ttattttctaatgcacgttgatttctcaaatgtcttctttttatttgggaggaaagtggagcaaaatattggaataggattctctagtgaccattctcctataagaacatgggaaatggataattttttcctcccataggaaatggataatttgaacaattatccatgcattaaatacctttacaagagctaagaaaaccaggtgagtgatcacagtacctggttttaagataacgataagaaaagacacattgaagaagg

SEQ ID NO: 90233 - DNA, 677 bp, Homo sapiens
cacagttttgccaaggattttgctacttaccacaaggatggcatttacttcaatttccgataccttgttcctcatttccccctgagccttcaccagaattgcccttaatgctctgttttcaggagtctaggcttttgctagtctgctcctcccagttctttcaacctctatccattagccgcttcccattaaccaaagctgcttctacatttgcaggtattatagcaacagcctcactcttggtaccattttttctttcaatgtctttcctgctgacatagagaaatatcacagactgggcaatttataaagacaagaggtttatttggcttacagatctggagactgggaagtccaagatcaagggtccataactgatgagggcctcctgctgttatccaaggcagaaggaaggggaagcaagcacccaagacagagaaaacagctgatttcatcctttttatcagaagaccgttcccaagacataattcacccctccaataagggcattgatctctttctgagggcagatccctcatgacctagtcataactgtcccacctcccaataccattacactgacaaatttcaacatgagcttttgtggggacacgcaagcatagcacacgtgtctacactatgagtatttccactcttaaatctatatcaaaaaaaaa

SEQ ID NO: 90234 - DNA, 467 bp, Homo sapiens
cctcctgggttcaatccattctcctgcctcagcctcccaagtagctgggattacaggcacatgcctccataccgggctaatttttgtatttttagtagagatggggtttcgccatgtgggccaggctgttctcgaatgcctgacctcaggtgatccacccgccttggcctcccaaagtgctggaattacaggtgtgagccactgtgcccagctgagtaaatttcttgattgcacagaatgtacggtgatattggcggacttaaggacatcgaattgtttatcaggaataaagtattatgtgtgttttctgcggccctggataatgctgtagcattcagggtcgattgagtaaaaaaaatgtagagatggtttcctgtttgtttttgcttctagttttcattcatttgctatttattctcttctggctttgcttgtgtatgcatatatataaaaccattattattatt

SEQ ID NO: 90235 - DNA, 415 bp, Homo sapiens
tggagctgcgcttgtggtggagctggaccctgaaattacctggaccttttttttagagacagggtttctttctgcagtctcaaactcctagccttgattgatcctcctgccttggcctcccaaagtgctggaattacaggtgtgagccactgtgcccagctgagtaaatttcttgattgcacagaatgtacggtgatattggcggacttaaggacatcgaattgtttatcaggaataaagtattatgtgtgttttctgcggccctggataatgctgtagcattcagggtcgattgagtaaaaaaaatgtagagatggtttcctgtttgtttttgcttctagttttcattcatttgctatttattctcttctggctttgcttgtgtatgcatatatataaaaccattattattatt

SEQ ID NO: 90236 - DNA, 310 bp, Homo sapiens
gcccaccgtcgggtttttgctgtttccttcccgaataactctcccttgggctgggccttatcccagaaagcacagactggcacgcagcaagccaatgagaatgagccagtctgtgatgtcatgagttaccaggcacaagggactcctggagcgtcctaaaccatccttgctggttgctggagtaggcagggtgcagcctcatccttgcagttcccaatgggtctgttttagtccgttttgtgccgctttaacagaataccacagactgcgtaatatacaaacaaacaaacaaacaaacaaaaaacaccca

SEQ ID NO: 90237 - DNA, 452 bp, Homo sapiens
  misc_feature (394)..(394): n is a, c, g, or t
  misc_feature (397)..(397): n is a, c, g, or t
gctccgtccgtctatcttctgaatctacttttcaggtgtaaatttattttttcttctaaaagtatgtttttatcctctaatttccctatcttctctattcttttcttcgccttcccgtacttctgtcttcgtggtgaagataggaaaagagtccaggagccagtgcgatttggtgaaggaagctaggaagaaggaaggagcgctaacgatttggtggtgaagctaggaaaaaggattccaggaaggagcgagtgcaatttggtgatgaaggactttcgtaacggaagtaattcaagatcaagagtaattaccaacttaatgtttttgcattggactttgagttaagattattttttaaatcctgaggactagcattaattgacagctgacccanggntacacagaagtggattcagtgaatctaggaagacagcgcagacaggattccaggg

SEQ ID NO: 90238 - DNA, 1153 bp, Homo sapiens
  misc_feature (90)..(90): n is a, c, g, or t
  misc_feature (93)..(94): n is a, c, g, or t
  misc_feature (99)..(100): n is a, c, g, or t
  misc_feature (116)..(116): n is a, c, g, or t
  misc_feature (127)..(127): n is a, c, g, or t
  misc_feature (170)..(170): n is a, c, g, or t
tggctggtgcagaagtagaaggtaaagctgagaagatgagggtgttacgtagaccagaaccaagtttagaagaatacttcaagctagaanggnnagttnnttaaaaatcacatcanaaagctactanaaggactggtgtaatttaaaaaaaactaaggcagaaggctttnggaagagttagaagaatttggaaggccttaaatatagtagcttagtttgaaaaatgtgaaggactttcgtaacggaagtaattcaagatcaagagtaattaccaacttaatgtttttgcattggactttgagttaagattattttttaaatcctgaggactagcattaattgacagctgacccaggtgctacacagaagtggattcagtgaatctaggaagacagcagcagacaggattccaggaaccagtgtttgatgaagctaggactgaggagcaagcgagcaagcagcagttcgtggtgaagataggaaaagagtccaggagccagtgcgatttggtgaaggaagctaggaagaaggaaggagcgctaacgatttggtggtgaagctaggaaaaaggattccaggaaggagcgagtgcaatttggtgatgaaggtagcaggcggcttggcttggcaaccacacggaggaggcgagcaggcgttgtgcgtagaggatcctagaccagcatgccagtgtgccaaggccacagggaaagcgagtggttggtaaaaatccgtgaggtcggcaatatgttgtttttctggaacttacttatggtaaccttttatttattttctaatataatgggggagtttcgtactgaggtgtaaagggatttatatggggacgtaggccgatttccgggtgttgtaggtttctctttttcaggcttatactcatgaatcttgtctgaagcttttgagggcagactgccaagtcctggagaaatagtagatggcaagtttgtgggttatttttttaacacgaattggaggaaaaccaaatgaattggatagccaattggagacaatttcagcaaatctggtaagcagttggtatgttcagtgggggtaatgaagtattcagtttggtgaatagatgaccggttttaacttcctcaccctgaattcgttggtaaatgtagagttggatgtgtaa

SEQ ID NO: 90239 - DNA, 966 bp, Homo sapiens
  misc_feature (90)..(90): n is a, c, g, or t
  misc_feature (93)..(94): n is a, c, g, or t
  misc_feature (99)..(100): n is a, c, g, or t
  misc_feature (116)..(116): n is a, c, g, or t
  misc_feature (127)..(127): n is a, c, g, or t
  misc_feature (170)..(170): n is a, c, g, or t
tggctggtgcagaagtagaaggtaaagctgagaagatgagggtgttacgtagaccagaaccaagtttagaagaatacttcaagctagaanggnnagttnnttaaaaatcacatcanaaagctactanaaggactggtgtaatttaaaaaaaactaaggcagaaggctttnggaagagttagaagaatttggaaggccttaaatatagtagcttagtttgaaaaatgtgaaggactttcgtaacggaagtaattcaagatcaagagtaattaccaacttaatgtttttgcattggactttgagttaagattattttttaaatcctgaggactagcattaattgacagctgacccaggtgctacacagaagtggattcagtgaatctaggaagacagcagcagacaggattccaggaaccagtgtttgatgaagctaggactgaggagcaagcgagcaagcagcagttcgtggtgaagataggaaaagagtccaggagccagtgcgatttggtgaaggaagctaggaagaaggaaggagcgctaacgatttggtggtgaagctaggaaaaaggattccaggaaggagcgagtgcaatttggtgatgaaggtagcaggcggcttggcttggcaaccacacggaggaggcgagcaggcgttgtgcgtagaggatcctagaccagcatgccagtgtgccaaggccacagggaaagcgagtggttggtaaaaatccgtgaggtcggcaatatgttgtttttctggaacttacttatggtaaccttttatttattttctaatataatgggggagtttcgtactgaggtgtaaagggatttatatggggacgtaggccgatttccgggtgttgtaggtttctctttttcaggcttatactcatgaatcttgtctgaagcttttgagggcagccaagcccaggctcgcagtatcaataaagcagttctctgagaa

SEQ ID NO: 90240 - DNA, 1100 bp, Homo sapiens
  misc_feature (74)..(74): n is a, c, g, or t
  misc_feature (117)..(117): n is a, c, g, or t
tgatctagaggtatccccttatgtatctgacccacaggcaatcttgcttacgagtcacatatatagtctactanaaggactggtgtaatttaaaaaaaactaaggcagaaggctttnggaagagttagaagaatttggaaggccttaaatatagtagcttagtttgaaaaatgtgaaggactttcgtaacggaagtaattcaagatcaagagtaattaccaacttaatgtttttgcattggactttgagttaagattattttttaaatcctgaggactagcattaattgacagctgacccaggtgctacacagaagtggattcagtgaatctaggaagacagcagcagacaggattccaggaaccagtgtttgatgaagctaggactgaggagcaagcgagcaagcagcagttcgtggtgaagataggaaaagagtccaggagccagtgcgatttggtgaaggaagctaggaagaaggaaggagcgctaacgatttggtggtgaagctaggaaaaaggattccaggaaggagcgagtgcaatttggtgatgaaggtagcaggcggcttggcttggcaaccacacggaggaggcgagcaggcgttgtgcgtagaggatcctagaccagcatgccagtgtgccaaggccacagggaaagcgagtggttggtaaaaatccgtgaggtcggcaatatgttgtttttctggaacttacttatggtaaccttttatttattttctaatataatgggggagtttcgtactgaggtgtaaagggatttatatggggacgtaggccgatttccgggtgttgtaggtttctctttttcaggcttatactcatgaatcttgtctgaagcttttgagggcagactgccaagtcctggagaaatagtagatggcaagtttgtgggttatttttttaacacgaattggaggaaaaccaaatgaattggatagccaattggagacaatttcagcaaatctggtaagcagttggtatgttcagtgggggtaatgaagtattcagtttggtgaatagatgaccggttttaacttcctcaccctgaattcgttggtaaatgtagagttggatgtgtaa

SEQ ID NO: 90241 - DNA, 1070 bp, Homo sapiens
  misc_feature (44)..(44): n is a, c, g, or t
  misc_feature (87)..(87): n is a, c, g, or t
ggtgacctgaggatcccggcagaatcacactcaaaagctactanaaggactggtgtaatttaaaaaaaactaaggcagaaggctttnggaagagttagaagaatttggaaggccttaaatatagtagcttagtttgaaaaatgtgaaggactttcgtaacggaagtaattcaagatcaagagtaattaccaacttaatgtttttgcattggactttgagttaagattattttttaaatcctgaggactagcattaattgacagctgacccaggtgctacacagaagtggattcagtgaatctaggaagacagcagcagacaggattccaggaaccagtgtttgatgaagctaggactgaggagcaagcgagcaagcagcagttcgtggtgaagataggaaaagagtccaggagccagtgcgatttggtgaaggaagctaggaagaaggaaggagcgctaacgatttggtggtgaagctaggaaaaaggattccaggaaggagcgagtgcaatttggtgatgaaggtagcaggcggcttggcttggcaaccacacggaggaggcgagcaggcgttgtgcgtagaggatcctagaccagcatgccagtgtgccaaggccacagggaaagcgagtggttggtaaaaatccgtgaggtcggcaatatgttgtttttctggaacttacttatggtaaccttttatttattttctaatataatgggggagtttcgtactgaggtgtaaagggatttatatggggacgtaggccgatttccgggtgttgtaggtttctctttttcaggcttatactcatgaatcttgtctgaagcttttgagggcagactgccaagtcctggagaaatagtagatggcaagtttgtgggttatttttttaacacgaattggaggaaaaccaaatgaattggatagccaattggagacaatttcagcaaatctggtaagcagttggtatgttcagtgggggtaatgaagtattcagtttggtgaatagatgaccggttttaacttcctcaccctgaattcgttggtaaatgtagagttggatgtgtaa

SEQ ID NO: 90242 - DNA, 1159 bp, Homo sapiens
  misc_feature (133)..(133): n is a, c, g, or t
  misc_feature (176)..(176): n is a, c, g, or t
cagaagattagaacggtaacgcttgtccacgctgagaggtgtatactgtcctactcacaaccaggctttcgcaaggactacttgaagctagagatgggaacgtgggttaaacctcacgtcaacaagctactanaaggactggtgtaatttaaaaaaaactaaggcagaaggctttnggaagagttagaagaatttggaaggccttaaatatagtagcttagtttgaaaaatgtgaaggactttcgtaacggaagtaattcaagatcaagagtaattaccaacttaatgtttttgcattggactttgagttaagattattttttaaatcctgaggactagcattaattgacagctgacccaggtgctacacagaagtggattcagtgaatctaggaagacagcagcagacaggattccaggaaccagtgtttgatgaagctaggactgaggagcaagcgagcaagcagcagttcgtggtgaagataggaaaagagtccaggagccagtgcgatttggtgaaggaagctaggaagaaggaaggagcgctaacgatttggtggtgaagctaggaaaaaggattccaggaaggagcgagtgcaatttggtgatgaaggtagcaggcggcttggcttggcaaccacacggaggaggcgagcaggcgttgtgcgtagaggatcctagaccagcatgccagtgtgccaaggccacagggaaagcgagtggttggtaaaaatccgtgaggtcggcaatatgttgtttttctggaacttacttatggtaaccttttatttattttctaatataatgggggagtttcgtactgaggtgtaaagggatttatatggggacgtaggccgatttccgggtgttgtaggtttctctttttcaggcttatactcatgaatcttgtctgaagcttttgagggcagactgccaagtcctggagaaatagtagatggcaagtttgtgggttatttttttaacacgaattggaggaaaaccaaatgaattggatagccaattggagacaatttcagcaaatctggtaagcagttggtatgttcagtgggggtaatgaagtattcagtttggtgaatagatgaccggttttaacttcctcaccctgaattcgttggtaaatgtagagttggatgtgtaa

SEQ ID NO: 90243 - DNA, 994 bp, Homo sapiens
caacggatacggcagaatacactcaaagtcaatgtaaaaacattaagttggtaattactcttgatcttgaattactttcgtaacggaagtaattcaagatcaagagtaattaccaacttaatgtttttgcattggactttgagttaagattattttttaaatcctgaggactagcattaattgacagctgacccaggtgctacacagaagtggattcagtgaatctaggaagacagcagcagacaggattccaggaaccagtgtttgatgaagctaggactgaggagcaagcgagcaagcagcagttcgtggtgaagataggaaaagagtccaggagccagtgcgatttggtgaaggaagctaggaagaaggaaggagcgctaacgatttggtggtgaagctaggaaaaaggattccaggaaggagcgagtgcaatttggtgatgaaggtagcaggcggcttggcttggcaaccacacggaggaggcgagcaggcgttgtgcgtagaggatcctagaccagcatgccagtgtgccaaggccacagggaaagcgagtggttggtaaaaatccgtgaggtcggcaatatgttgtttttctggaacttacttatggtaaccttttatttattttctaatataatgggggagtttcgtactgaggtgtaaagggatttatatggggacgtaggccgatttccgggtgttgtaggtttctctttttcaggcttatactcatgaatcttgtctgaagcttttgagggcagactgccaagtcctggagaaatagtagatggcaagtttgtgggttatttttttaacacgaattggaggaaaaccaaatgaattggatagccaattggagacaatttcagcaaatctggtaagcagttggtatgttcagtgggggtaatgaagtattcagtttggtgaatagatgaccggttttaacttcctcaccctgaattcgttggtaaatgtagagttggatgtgtaa

SEQ ID NO: 90244 - DNA, 705 bp, Homo sapiens
  misc_feature (74)..(74): n is a, c, g, or t
  misc_feature (117)..(117): n is a, c, g, or t
  misc_feature (647)..(647): n is a, c, g, or t
  misc_feature (650)..(650): n is a, c, g, or t
tgatctagaggtatccccttatgtatctgacccacaggcaatcttgcttacgagtcacatatatagtctactanaaggactggtgtaatttaaaaaaaactaaggcagaaggctttnggaagagttagaagaatttggaaggccttaaatatagtagcttagtttgaaaaatgtgaaggactttcgtaacggaagtaattcaagatcaagagtaattaccaacttaatgtttttgcattggactttgagttaagattattttttaaatcctgaggactagcattaattgacagctgacccaggtgctacacagaagtggattcagtgaatctaggaagacagcagcagacaggattccaggaaccagtgtttgatgaagctaggactgaggagcaagcgagcaagcagcagttcgtggtgaagataggaaaagagtccaggagccagtgcgagaaggcttttggaagagttagaagaatttggaaggccttaaatatagtagcttagtttgaaaaatgtgaaggactttcgtaacggaagtaattcaagatcaagagtaattaccaacttaatgtttttgcattggactttgagttaagattattttttaaatcctgaggactagcattaattgacagctgacccanggntacacagaagtggattcagtgaatctaggaagacagcgcagacaggattccaggg

SEQ ID NO: 90245 - DNA, 813 bp, Homo sapiens
attagaatgcattgtgaaacgactggagtatgattaaaagttgtgttccccaatgcttggagtagtgattgttgaaggaaaaaatccagctgagtgataaaggcttagtgttgaggaaatttctgcagttttaagtagtcgtatttgtgattgaagctgagtacattttgctggtgtatttttaggtaaaatgctttttgttcatttctggtggtgaagctaggaaaaaggattccaggaaggagcgagtgcaatttggtgatgaaggtagcaggcggcttggcttggcaaccacacggaggaggcgagcaggcgttgtgcgtagaggatcctagaccagcatgccagtgtgccaaggccacagggaaagcgagtggttggtaaaaatccgtgaggtcggcaatatgttgtttttctggaacttacttatggtaaccttttatttattttctaatataatgggggagtttcgtactgaggtgtaaagggatttatatggggacgtaggccgatttccgggtgttgtaggtttctctttttcaggcttatactcatgaatcttgtctgaagcttttgagggcagactgccaagtcctggagaaatagtagatggcaagtttgtgggttatttttttaacacgaattggaggaaaaccaaatgaattggatagccaattggagacaatttcagcaaatctggtaagcagttggtatgttcagtgggggtaatgaagtattcagtttggtgaatagatgaccggttttaacttcctcaccctgaattcgttggtaaatgtagagttggatgtgtaa

SEQ ID NO: 90246 - DNA, 645 bp, Homo sapiens
  misc_feature (133)..(133): n is a, c, g, or t
  misc_feature (176)..(176): n is a, c, g, or t
cagaagattagaacggtaacgcttgtccacgctgagaggtgtatactgtcctactcacaaccaggctttcgcaaggactacttgaagctagagatgggaacgtgggttaaacctcacgtcaacaagctactanaaggactggtgtaatttaaaaaaaactaaggcagaaggctttnggaagagttagaagaatttggaaggccttaaatatagtagcttagtttgaaaaatgtgaaggactttcgtaacggaagtaattcaagatcaagagtaattaccaacttaatgtttttgcattggactttgagttaagattattttttaaatcctgaggactagcattaattgacagctgacccaggtgctacacagaagtggattcagtgaatctaggaagacagcagcagacaggattccaggaaccagtgtttgatgaagctaggactgaggagcaagcgagcaagcagcagttcgattcttactactgatgagaacattatctgcatatgccaaaaaattttaagcaaatgaaagctaccaatttaaagttacggaatctaccattttaaagttaattgcttgtcaagctataaccacaaaaataatgaattgatgagaaatacaatgaagaggcaatgtccatct

SEQ ID NO: 90247 - DNA, 243 bp, Homo sapiens
tcagttcattgctgttgagcagtgggttctcaaactttattgtgcattgcaatgacctggagcacatggtaaaacacgaaatcccatgtctcacccccaaagtttctgattcagcagctctagagtggagcctaaaaatctgcatttctggccaggtgaggttgctcagccctgtaatcccaggactttgggaggctgagtggggaggattgcttgaggccaggagttagagaccagcctggg

SEQ ID NO: 90248 - DNA, 430 bp, Homo sapiens
ggcgaaaattattttcagttataggatacttttttccttctgaaaagtaataagcttaaagtttttgtttctgtaagatgtaatgatagtaactattattttgggcatattaaccaacagaacaattatgtagtatgtatatcactttctcattagatctctaacttgaccttctagtacctttatgtgtgaggataaatttgttagatccttttattctcaatcttggataatgatgcaaaatggaattttgttttgtttgttggtagattcacatactaaaactttgcaggtaaagttgcttgcctcatgttagaatttaattagaaaactgaggctgcctttttttttttttttttttttttttaaaaagggggtctggttgcgtcgcccgggccgttttttttctttggtacaaagggggttcaac

SEQ ID NO: 90249 - DNA, 377 bp, Homo sapiens
ttatgtaccagacgttttggaaatgttcaactgaatgagatttggaagtatacatatttttctatgatatatgcactcaagttaaaaatgtctttgtacaggagattcgaaaaatatgagcctctagtctagagacttaggaagagtgatggtgtaactgctgacctacaagcatcacacagaggcatcatcactttggcattggtttataaactcaccgacaagataatcttttcctcctccaaactcccatggcacctctagcataaagtgcactgcacttcaacactgttgttcatctgtcacatccattacactgtgagctccttgacatcagggtaggcaacctattcatcttttagaacccagcagagctg

SEQ ID NO: 90250 - DNA, 342 bp, Homo sapiens
atgcctgacttcagctgatccaccggccttggcctcccgaaatgctgggattgcaggcatgagttgccgtgcccagccacaaattttcttttaccttggaaaacatatatgcaaatatacttgtcaactatccgacaaaggtcttcagtatgtatgtatggattcattgaactttgtttctttttacataatgaatattttatgatttttagctttggttttttgaaatgaaccaataaattgaagagacacaagaagtaatatgtgtgtaaataccagcacgcttagcccctcaaataaacctcttacaggtgtctgactcctaaatccaatttgatattt

SEQ ID NO: 90251 - DNA, 480 bp, Homo sapiens
cctagccccatttatttcagaggatgtcctttccccaatgtgtgctcttagcatgttcatcaatcagctggctgtaaatacatggatttctgggttctctattctgtaccactgtcctatgtgtctgtttttatgtgtgtaccatgctgttttggttactattggttaatattctttgggatattttgaggagaattgacattattactattttaaatgttcaacaggaaaagcatcagggtttgggctgttctttgatggactaattcttattactgattcaattttgtgactcattattgctgtactcaggtgttctattccattatgatttggtcttggtaggctgtatgacctttgaccttcctgtgcctggatatttatatttttcttgaggtttggaaatgctttgtagtataatttgaagtcaggtagtgtgatgcctccagctttgttctttttcccaatgttgctttggct

SEQ ID NO: 90252 - DNA, 442 bp, Homo sapiens
aaaatagctcaatgtttgcatggaagctacgcatgttctcctgtatactttaagtcatgtctagattacttaccatatctcatgcaatgtaaatgctgtgcaaataattgttattttgtattgtttagggaataatgacaaggaaaaacgtctgtacatgttcagtacagacccaaccacccatttttttcccgaaatatttttgttccgaggttggttgaatccacagatgtagaaccacggataggaaggctgactgtacttatttctttgtgatttgcttctttctaaaagtgaagtgctaaaaaggttccacttgactgagcctcagcggatcgtggcactgttgcacgtgtgtctaaatggtgtttggtacctttgttttccttaacctgatgaacaaggacactgactctcatggctgatggggagctaaagttat

SEQ ID NO: 90253 - DNA, 594 bp, Homo sapiens
ttttctttttcagttgttgcaaagctgccctgccctcttcacatcttctccctctgtgtatttattgaagagaaccgcttggtttcaggaagctgggcgcgggatatccgaagtgtggaggaaacagacaagtcagggtacagaggtgggggttgggcaggggcgcagggctgaccccctcacccggtctaagcacagggtcgcagttccagtttacaaacctaaaacaagaaaaccaaaaccagggaacaaaacaacaaaacaaaacaaaatccgtaaaagtacagcattagggaaaaacaaacaaacccaggccccaaacccagttccaactcctctgtcggcttctctctttcaacacccttgttttgtctagtgagtttttagtgcaccttcgttctccgaaatctgcggagagcccgcgcgcctgtgtatcaattttggctttggccgcttcgtccagtaggtgggaaagtaatttgtaaatttgatttgtctgatgtgaagatcacaaattacttgttgaaatgtaaggcagtccccctcctcctctttatctacattacttcccgaaaataaatgcaaattaatgaa

SEQ ID NO: 90254 - DNA, 490 bp, Homo sapiens
aaaggggctcgaccccaatcttgctatcagcaactcccgagacctggggagaggcttccgaggggatagggaaactgtctccggggtgggccagtcctgggtctggatgctggggttccctggcacgctggggcagggtggggacctgggctctgccccacgtgtccctggtttacttggtttactttacctctgtgggtcttaattgtctcctctgtaaaacggtgattgtaattcccatttggaagaattgtcatgaggacctgtaaatgggggctggggagagaggacgtcctggaagtctgagggaagtgggacgcggcagcagggccaggagagaaattcttctcccccttcctcctcttcctcctcccagaggctccgccaggcagaggcacgtggtcctggcacccccttgtggccggtcctcagggcttccccaggaggtgctggacatggcataggctcctccaagaccccctcagtggtg

SEQ ID NO: 90255 - DNA, 903 bp, Homo sapiens
ctccttccaacgtcttcctaatacggctcattcctcgcttctcatctctgcaccttagtatcttttttctttttatttatttttaagacagggtctcactgtattgcctcagctggtcgctaactcctgggctcaagtaatcctcctgccttggcctcccaaagtgctgggattacaggcatgagccatggtgcctggcctgctcaatgtcttgagggtattgttccatcatcttccagtatctgatgctgctgctgagaagtctgatgctaattccattctcatttccttgtatttaagaagacttttctctctggaagctctcaacaatttcatctttgtttctggagtttttgttggtggtggtgttgttttgatttttgagataggtctcactctgtggcccgggctggagtgcaatggtgccatcatggctcactgcagccttgacctcctgggcccaaccaatcttcccacctcagcctcttgagtagctgggaccacagatgcatgccaccatgcccagctaatttatttttagtttttgtagagaccatgtcttcatatgttggccaggctggtctcgaactcctggactcaagtgaccctccaacctcggtctcccaaagtgctgggattacaggcatgagccactgcttgttttcagagttttgagattcatcaagatatgtctgagtggggtattttctccattcccactattcagcattaggtggtcttttaaatctacaaggttgtgctttttttcagctcaggaaaaatttccccacatgcctgcacacataccttacatctttgactttgtgtttgggaactggagaattgtcttctacttaaccttccagataacctgcttggcctttcattcagaatattctaatg

SEQ ID NO: 90256 - DNA, 3340 bp, Homo sapiens
ctctaaagctttagagcccaaatggcaggcatctcatatgtggcatctttctttctccttctgactaagctcagcattggccagagagaagtaacagttcagaaaggaccactgtttagagctgaaggttacccagtcagcattggctgcaatgtaactggccaccagggaccttctgagcagcatttccagtggtctgtttacctgccgacaaacccgacccaggaagtccagatcattagcaccaaggatgctgccttctcttacgcagtatatacgcagcgggtgcgaggcggagacgtctacgtggagagggtccagggcaactcagtcttgttgcacatctcaaaactccagatgaaggatgctggcgagtatgagtgtcacacaccaaacactgatgagaattactatggaagttacagagcaaagactaatctaattgttattccagataccctctctgccaccatgagttctcagactctcggtaaggaggaaggtgagccattagccctcacctgtgaggcatccaaagccacagcccaacatactcacctctctgtcacctggtacctaacacaggatggaggaggaagccaagccactgagattatttctctctccaaagattttatattggtccctgggcccttgtatacagagcggtttgcagccagtgacgtacagctcaacaaactgggacccactacattcaggctgtccatagagaggctccagtcctcagatcagggtcagctgttctgtgaggcaacggaatggattcaggatccagatgaaacttggatgttcatcaccaaaaagcagaccgatcaaaccactctgaggatccagccagcagtgaaagattttcaagtcaacattacagctgacagcttgtttgctgaagggaaacccttagaactggtttgcctggttgtaagcagtggccgtgacccacagcttcaaggcatttggttcttcaatgggactgaaattgctcacattgatgctggtggagtcctgggcctgaagaatgactacaaagagagagcaagtcaaggagagctccagctttcaaagttaggccccaaggctttctctctcaagatcttctctctgggcccagaggatgaaggcgcctacagatgtgtggtagcagaggtcatgaaaacacgcacaggttcctggcaggtgcttcagagaaagcagtcaccagacagccacgtgcacctgaggaagccagcagcaagaagtgtggtcgtgtctaccaagaacaagcagcaagttgtgtgggaaggagagacactcgcctttctctgtaaggctggtggagctgaaagtcccctgtctgtgagctggtggcacatcccacgggaccagacacagcccgagtttgtggctggcatggggcaggatggcattgtgcagctgggtgcctcctatggggtacccagttaccatggcaacacaaggctggagaaaatggactgggccaccttccagctggagatcaccttcactgccatcacagacagtggcacatatgagtgcagagtatctgagaagtctcggaaccaggccagagatctgagctggactcagaagatttcagttactgtaaagtctctggagtcaagtttacaagttagtctgatgagccgtcagccgcaagtgatgttaaccaacacctttgacctgtcctgtgtcgtgagggccggttactctgacctcaaggtgccactcactgtgacgtggcagttccagccagctagctctcacatcttccaccagcttattcgaatcacccacaatggcactattgaatgggggaatttcctatcccggttccaaaagaagacgaaagtgtcgcagtctttatttcgttcacaactcctagtccatgatgccactgaggaagagacaggagtgtatcagtgtgaagtagaagtttatgacagaaattccctatacaacaaccgccccccgagggcttctgccatctctcacccactgaggatagccgtcactttaccagagagcaagctaaaagtgaattcaaggagtcaagggcaagagctctccatcaactccaacactgatatagaatgtagcatcttgtcccggtccaatggaaaccttcagttagccattatttggtatttttctcctgtttccactaatgcctcttggctaaagatcctggagatggaccaaaccaatgttataaaaactggggatgagtttcacaccccacagagaaaacaaaaatttcatactgagaaggtttcccaagacttatttcagctgcacattctgaatgtggaagacagcgatcggggcaaatatcactgtgctgtggaggaatggctcctgtctacaaatggcacttggcacaagcttggagaaaagaagtcaggactaacagaattgaaactcaagcccacaggaagtaaggtacgtgtctccaaagtgtactggaccgaaaatgtgactgagcacagagaagtggccatccgctgcagcctggagagtgtaggcagctcagccactctgtactctgtgatgtggtactggaacagagaaaactctggaagtaaattgctggtgcacttgcaacatgatggcttgctggagtatggggaagaggggctcaggaggcacctgcactgttaccgttcatcctctacagactttgtcctgaagcttcatcaggtggagatggaggatgcaggaatgtactggtgtagggtggcagagtggcagctccatggacacccaagcaagtggattaatcaagcatccgatgagtcacagcggatggtgctcacggtgctgccttcagagcccacgcttccttccaggatctgctcctcggcccctttactctatttcctgttcatctgtcccttcgtcctgctcctccttctgctcatctccctcctctgcttatactggaaggccaggaagttgtcaacactgcgttccaacacacggaaagaaaaagctctctgggtggacttgaaagaggctggaggtgtgaccacaaataggagggaagacgaggaggaagatgaaggcaactgaatcccaagaggcacctgcagccaggaaggaaagccccgtgtggaatgtggtgacctagtcacctggaaccagctcctgacagaccccggcaacttctagatgaacccaagtgaactttcctcattaccatcctgaagtcactaccccagggggagctatagcttcatgaccgtaacatgtgacctgtgtgctggcaggacgactcactgcggctgcgccactgggacccctcccctacatgcaccaatgcacg

SEQ ID NO: 90257 - DNA, 967 bp, Homo sapiens
taaaggacagcttctcttccactcaatattgccattgttcccaagaaacatgtttaaaaaaaaaattataagacatggactagtcctcattagcatgtttgcatagcaaccagtcaagagcatttactctatttcctgttcatctgtcccttcgtcctgctcctccttctgctcatctccctcctctgcttatactggaaggccaggaagttgtcaacactgcgttccaacacacggaaagaaaaagctctctgggtggacttgaaagaggctggaggtgtgaccacaaataggagggaagacgaggaggaagatgaaggcaactgaatcccaagaggcacctgcagccaggaaggaaaggtgggggctttttaattgggctaaccagggtgtgaatgaatcctggttctgtcctcaactatgtctgcggccttgggcaagttacctaggaatcagagggagcattcactgagtgcttattggttctacgcactgttaggtgttcctttgtgtcttacctcatccacctctcgcatccccccttggaacaagatagcatcattaccctacatctcttgaaggttcaggtccctgggctgcaaggagataagaggctccctcacacagcctctggagggctaaatgagatcctacagcaatgccctggtggggcttctctctccctcttatgtcacttgtcacacctgctctaggtaatcattttcctccagatgagaggtgtaggaaaggacctgatgccagcaaggaaaaaggaattggtaacatgctctttgtttacctaaaatctgtccccacaacaagaatgtaacttccttcgaggcagaaattcaattttcttctcccagcccacctacaaaggcccactcaagagcaagttctgtgtaaaggtgcttaactaatacaggttctttgacaaaatgataaaacatttgtaacctgaaaaaaa

SEQ ID NO: 90258 - DNA, 752 bp, Homo sapiens
gtatcttttgcccatgtggttgcagtcaatccaatttaattcagatcagcaaaagttactgagcacatgtgctaggcactgtaggggatatagaaacaaatggcactatcagacatactcaagtaactatagtgaacaaaggagacgagtaaaagggaattaaagaggcctaaacaaagggctgagtgagaacgggatggaagagaagaactgtgcctgcagcaagagcccacgcttccttccaggatctgctcctcggcccctttactctatttcctgttcatctgtcccttcgtcctgctcctccttctgctcatctccctcctctgcttatactggaaggccaggaagttgtcaacactgcgttccaacacacggaaagaaaaagctctctgggtggacttgaaagaggctggaggtgtgaccacaaataggagggaagacgaggaggaagatgaaggcaactgaatcccaagaggcacctgcagccaggaaggaaagcttcctgccttgctgcctgtttcttcccaagccccgtgtggaatgtggtgacctagtcacctggaaccagctcctgacagaccccggcaacttctagatgaacccaagtgaactttcctcattaccatcctgaagtcactaccccagggggagctatagcttcatgaccgtaacatgtgacctgtgtgctggcaggacgactcactgcggctgcgccactgggacccctcccctacatgcaccaatgcacg

SEQ ID NO: 90259 - DNA, 643 bp, Homo sapiens
agtgtaaaatatttaatatatatatttaattcagtatacaatattttattttttaatttaaaaagcatacattactatatgtgtcatacatttgtgcatacatcttgcttactaagagtgcattcagaaaaccatgtgtactgtcctttctgggtgatttaaggaagagtcatgagcgttttttactctaaggattttgttttttttgggtttacctaccgctatagaattgaactcccacataaaatgtgatccctgtgacatccttacagagggtgtcatctctctctggtactgaaaggacagaggctgtgggctctctaaatacctgccttgcttttgtttcccagtgaaagattttcaagtcaacattacagctgacagcttgtttgctgaagggaaacccttagaactggtttgcctggttgtaagcagtggccgtgacccacagcttcaaggcatttggttcttcaatgggactgaaattgctcacattgatgctggtggagtcctgggcctgaagaatgactacaaagagagagcaagtcaaggagagctccagctttcaaagttaggccccaaggctttctctctcaagatcttctctctgggcccagaggatgaaggcgcctacagatgtgtg

SEQ ID NO: 90260 - DNA, 3727 bp, Homo sapiens
ctctaaagctttagagcccaaatggcaggcatctcatatgtggcatctttctttctccttctgactaagctcagcattggccagagagaagtaacagttcagaaaggaccactgtttagagctgaaggttacccagtcagcattggctgcaatgtaactggccaccagggaccttctgagcagcatttccagtggtctgtttacctgccgacaaacccgacccaggaagtccagatcattagcaccaaggatgctgccttctcttacgcagtatatacgcagcgggtgcgaggcggagacgtctacgtggagagggtccagggcaactcagtcttgttgcacatctcaaaactccagatgaaggatgctggcgagtatgagtgtcacacaccaaacactgatgagaattactatggaagttacagagcaaagactaatctaattgttattccagataccctctctgccaccatgagttctcagactctcggtaaggaggaaggtgagccattagccctcacctgtgaggcatccaaagccacagcccaacatactcacctctctgtcacctggtacctaacacaggatggaggaggaagccaagccactgagattatttctctctccaaagattttatattggtccctgggcccttgtatacagagcggtttgcagccagtgacgtacagctcaacaaactgggacccactacattcaggctgtccatagagaggctccagtcctcagatcagggtcagctgttctgtgaggcaacggaatggattcaggatccagatgaaacttggatgttcatcaccaaaaagcagaccgatcaaaccactctgaggatccagccagcagtgaaagattttcaagtcaacattacagctgacagcttgtttgctgaagggaaacccttagaactggtttgcctggttgtaagcagtggccgtgacccacagcttcaaggcatttggttcttcaatgggactgaaattgctcacattgatgctggtggagtcctgggcctgaagaatgactacaaagagagagcaagtcaaggagagctccagctttcaaagttaggccccaaggctttctctctcaagatcttctctctgggcccagaggatgaaggcgcctacagatgtgtggtagcagaggtcatgaaaacacgcacaggttcctggcaggtgcttcagagaaagcagtcaccagacagccacgtgcacctgaggaagccagcagcaagaagtgtggtcgtgtctaccaagaacaagcagcaagttgtgtgggaaggagagacactcgcctttctctgtaaggctggtggagctgaaagtcccctgtctgtgagctggtggcacatcccacgggaccagacacagcccgagtttgtggctggcatggggcaggatggcattgtgcagctgggtgcctcctatggggtacccagttaccatggcaacacaaggctggagaaaatggactgggccaccttccagctggagatcaccttcactgccatcacagacagtggcacatatgagtgcagagtatctgagaagtctcggaaccaggccagagatctgagctggactcagaagatttcagttactgtaaagtctctggagtcaagtttacaagttagtctgatgagccgtcagccgcaagtgatgttaaccaacacctttgacctgtcctgtgtcgtgagggccggttactctgacctcaaggtgccactcactgtgacgtggcagttccagccagctagctctcacatcttccaccagcttattcgaatcacccacaatggcactattgaatgggggaatttcctatcccggttccaaaagaagacgaaagtgtcgcagtctttatttcgttcacaactcctagtccatgatgccactgaggaagagacaggagtgtatcagtgtgaagtagaagtttatgacagaaattccctatacaacaaccgccccccgagggcttctgccatctctcacccactgaggatagccgtcactttaccagagagcaagctaaaagtgaattcaaggagtcaagggcaagagctctccatcaactccaacactgatatagaatgtagcatcttgtcccggtccaatggaaaccttcagttagccattatttggtatttttctcctgtttccactaatgcctcttggctaaagatcctggagatggaccaaaccaatgttataaaaactggggatgagtttcacaccccacagagaaaacaaaaatttcatactgagaaggtttcccaagacttatttcagctgcacattctgaatgtggaagacagcgatcggggcaaatatcactgtgctgtggaggaatggctcctgtctacaaatggcacttggcacaagcttggagaaaagaagtcaggactaacagaattgaaactcaagcccacaggaagtaaggtacgtgtctccaaagtgtactggaccgaaaatgtgactgagcacagagaagtggccatccgctgcagcctggagagtgtaggcagctcagccactctgtactctgtgatgtggtactggaacagagaaaactctggaagtaaattgctggtgcacttgcaacatgatggcttgctggagtatggggaagaggggctcaggaggcacctgcactgttaccgttcatcctctacagactttgtcctgaagcttcatcaggtggagatggaggatgcaggaatgtactggtgtagggtggcagagtggcagctccatggacacccaagcaagtggattaatcaagcatccgatgagtcacagcggatggtgctcacggtgctgccttcagagcccacgcttccttccaggatctgctcctcggcccctttactctatttcctgttcatctgtcccttcgtcctgctcctccttctgctcatctccctcctctgcttatactggaaggccaggaagttgtcaacactgcgttccaacacacggaaagaaaaagctctctgggtggacttgaaagaggctggaggtgtgaccacaaataggagggaagacgaggaggaagatgaaggcaactgaatcccaagaggcacctgcagccaggaaggaaaggtgggggctttttaattgggctaaccagggtgtgaatgaatcctggttctgtcctcaactatgtctgcggccttgggcaagttacctaggaatcagagggagcattcactgagtgcttattggttctacgcactgttaggtgttcctttgtgtcttacctcatccacctctcgcatccccccttggaacaagatagcatcattaccctacatctcttgaaggttcaggtccctgggctgcaaggagataagaggctccctcacacagcctctggagggctaaatgagatcctacagcaatgccctggtggggcttctctctccctcttatgtcacttgtcacacctgctctaggtaatcattttcctccagatgagaggtgtaggaaaggacctgatgccagcaaggaaaaaggaattggtaacatgctctttgtttacctaaaatctgtccccacaacaagaatgtaacttccttcgaggcagaaattcaattttcttctcccagcccacctacaaaggcccactcaagagcaagttctgtgtaaaggtgcttaactaatacaggttctttgacaaaatgataaaacatttgtaacctgaaaaaaa

SEQ ID NO: 90261 - DNA, 756 bp, Homo sapiens
ctggtttaactgaatagtcctagtttatttttatttctcaatacaattattaatagtgcagactctccccctacaaaaacatgttccactttgaataatgaattacacattaccttacctgattggctattatctcctttatggaacattagctaagctttggctgtaaagtggacaaaattagaattagtgctgcgattttcctgtaagagtacaggaaaggtggtcaaactggttaaatcaccctgccttttcctttacagaaaaatcacaaacctggcaatataaacaaaatgaggatggcttttaacaatggaagaaccatccctgttcccctgtcttcgttagaatttgctatttgtaggccaggcgcagtagttcccacctgtaatcccagcatttcggaaggccgaggcgggcagatcacaaggtcaggagttcaagaccagcctggcgaatatggtgaaacccggcctctactaaaaatacaaaaattagccagacatggtgctgcatgcctgtagtcccagctactcaggaggctgaggtgggagtatcgcttgaacctgggaggcggaggttgcagtgaactgagattgcactactgcagtccagcctgggtgacagagcaagactctgtctcaaaaaaaaaattgctattcatgcagcttgtcaggaccatttcagaataatgagaactctcttgccagcccctagggattttaaatgtcatgaatagttatgagaaaaagtctc

SEQ ID NO: 90262 - DNA, 301 bp, Homo sapiens
ggggaaagctaattggcaataatccttgcgggaaggtcagactcctctcttacagatctagggaaggcctggggtaaaatgatggctctttggaaaatgccaagctccttcagattccataccctctcgggccctctagcataggcaacgaacttgttcctggcttcacgctttctcattgaatcaaagctctcaagcatggcctggatttgtaaacacatgctggctgccagcagtggcaagttagcctcctgacccacttctctcctgctttcactctggtgtatgaagggggatgagg

SEQ ID NO: 90263 - DNA, 696 bp, Homo sapiens
caaaacaattcaaaatgttgctttattgccccacaaacaagcattttcaaacaatgttatagcatatgtatactgtcaatatcttaaaaattaatgtatttataaatatatcggaaaaatatggttatgcaataatgtacttttaagaaatggtatatcagaccaagattacctgatgatgcatcagaaggcttgatagcttttatatttagtaacagaaaaattgtttcattttatcatttatttttcgtcaaagtttttataagcatatatgaattaagtattcattagttcattgatatgaccattgaccatttttaaaagtctaaattgtaatatgttaactcctgatggcttgctgtcaataaattatttttttcctatgatcagtttactttgggaaacactgccatagtcaaagggatatctccaacccaaagttcaaactaaatacttccattgtgtaagatgccacattttgaagcacagagaaatatctggcagctttgtagtttgaagccaattcaaacgggtgctatgtttcagttgcactgatgtgttactatttttttaggtgaaagaaggcaacaggtagattcccctgcctgacacaatgataaccgcacttttcacattttcgtgtttattctaaacaagattactgagagtcatataaagctttacctttacccaaag

SEQ ID NO: 90264 - DNA, 1072 bp, Homo sapiens
ccactttaatcttcctggtgagcatgtcagcaacacccaaacatcactaacatggattattgcatgtatatttacacataagataagaagtgtttattctcataatagtctttgtcatcattcttgaggttaagttcaattctgctttatgtggcttgttggattgtcccagtccttgtatttaacaacatttgcagaaaatagtaccacattaaatcaattatagattatcccttatccaaaatgcttaagaccagaatgtttgagatttaagaaatttttcaggttttggaatgtctgcatatatataatgagatatcttggggatgggacccaagtctaaacacaaaattcatttatgtttcataaatgaaacttaatgcacatagcctgaaggaaattttatttttcccttagggatgttgaatcaactgttgtgtgccagcatgttgacaatgacctgtcacatgaagtcgggtgtggaattttccacttgtgcgttcatggcggtgctcagaaagtttgggattttgaagcattttatatttcagattttcacattagaaatactcaagctgtccttgctcacagtggccaaaaaaaaagagaaaagaaaagaaatactcaaccagtagtccagtagtagttatcactagaaatgaatgaaaatctattgcagtattattgagtttttcctaattattccagtgcagataaaaagaaaagaataaaaaggaagagaataaaaacagagaggcaactctgatattttagtaaattctatttatagaaggtcttgagtatttcttctgcttcctcccttactttaaggatgaacattgttaagacaactgcttcatttctctatactgtttttctaagtttctggaagtggttgactactgcagggccagaatgggccagagaaatgacttgacacttgaaggccacttccttcccttttgagttcccaatgaagctgtcacatacaaggctcttggcttcagagttgctctcctgagtttttgattctcacccctactctctaacacatcaaataggaaagaaagaa

SEQ ID NO: 90265 - DNA, 464 bp, Homo sapiens
attggacccagaagttccgggtacagagtctgggtgagctcactttgcctctgcagcagctgcaaacatatgacaagtgcttcggtctcacctggtttctaggtaacctcaggagacaggtgtttacctcattccccgagcagcaaaagtcacacaatggcagggcctggttctcacgcatctcatcacacatcctgtccacgctgcctccttggagcctaggctggggagccgccttagggatgtacccacctatgcttctggcattgggctcaaggtctgaggtggggttttactttgttctgtaacctgcaaagttgataggagaccccattgctctgttgggtgggtttagcgtggccccaaactgggcctctgctgcctggtcactgagtatctccctgtggtgccccctcactaccttctgcactaacatcaccacgtctcgtctgagccaaattctg

SEQ ID NO: 90266 - DNA, 552 bp, Homo sapiens
cttgagccagaagttcaagaccagcctggccaacatgatgaaaccccttctctacgaaaaatacaaaaattagctgggtgtggtggtgtgcgcctgtaatcctagcctcttgggaggctgaggcacgagaatcgcttgaacccaggaggtgaaggttgaagggagccaagatcacaccactgtactccagcctgggtgacagagcaagactctatctcagacaaaacaaaacaaaacaaaaagcactgccagtattcattttgaggttacaaataaatttcagtgaggaggcaaatttacaaatatggaatcatgagtaataaggattgactgcatatttcttggcactgactgtatgccaagcactgcactaggcattcaccctggccctgtctgaacttagttaatagtcacgttcacctgccttttttgtttgtttgtttttgtatttttagtagagacggggtttctcaccattttggccacgctgatctccaactcctgacctcaggcaatccacccacttcggcctcccaaagtgctgggattata

SEQ ID NO: 90267 - DNA, 326 bp, Homo sapiens
cctgccccgggtgcgtctcttcactcccactaaggaggaaacggctcagagaggggaagtgtttggccaaggtcacccagcgagtaagtgggaaccgagattccaaaccccgtcccagagatgccaaggcctcctgagagacagagaagcagacagcaactgagaggcagagagatggtgacagacacaaagagacaaaagagagagacagagacggaacagagcacaactttatctcaggcctgagaccagagtttgtgctgagagtcctcggcatgacgactcataccctggggcaggacacgaagcggggcagggggcgatgc

SEQ ID NO: 90268 - DNA, 717 bp, Homo sapiens
gagaaggaagagaacaggttggagttgggatggaagaatgatttctctgaatgtaccttagaatctaattttggctttggaaacattcatgttttacatgttgaaaaaataaaattaaatcaaaagaaaaattgacagcagatacatttcacacaagtgtttttcttacttagtacccttttattctgaggaaagaatttgaggcagcttaaatcagagcacagatatatactgtatgcactttgataaattttgatttttctataactgctagagaataaaaccatttggagagactcttgccagggcaactgtgtaatctggtggcactgtgtattggtaactactaactcactccttcctctgaaaagtgacctaaaaaacaagagtaagttttgggatagattctgcttctgcccctcagaaatgacaccaccacgagctgactttcaggattcttgaagtaatgtagtttatacaggtaagcatttgatgatttgctgcttatatttggctcataatgatgcaacataaaaggtgagcatatatgtaattcatcctggctctgcaaaccgcaggtctggcaaggcttaataaggagagtggaatgaagagctgcaactaagactaaactaaaactactttttttttttttttccctctttcttcaacttctgattgttttgtttaaatgaccagaataagatagaatgcctg

SEQ ID NO: 90269 - DNA, 172 bp, Homo sapiens
aaaaacaaaacaaaacaaaacaaaacaaaacaaaaaaaggctactctggctgctctgtgggggttggattattgggaagaaagttagcaagtacctgcagtgaccaagcaagagatgacggcttggactgagccattggtcatgatgatggagttggttaggaggtaagatc

SEQ ID NO: 90270 - DNA, 400 bp, Homo sapiens
cagcctcccatgtagctgggagtataggcatatgccaccaaacccagctgatttttgtatattttgtagacaccgaggtcttattttgttgcccaggctgatattgaactcctgagtttaagcaatctgcctgcctcagcctcccaatgttactggcatgagccaccgtgctgggccatgagttgacttctaagtgagagtttgttattctcacaaatcttattgtctatagaataaagttcagaccccctactagaccctgaggcagaaagcttaataagacagtattgctgccctagttaccactctctgtcacctcgggattgcagatgtgtaaacatcattttcatataaatgtggtggcccacagtgatatatacagaatgatagtattacatat

SEQ ID NO: 90271 - DNA, 306 bp, Homo sapiens
cccccaagcttccagatgagaactgtctggttgacacaccgagtccagccttgtgacaccctaaacagagaaccagccacaccctgctgttctgatctacaggaccatgagccagtacatgggtattgttttagccggctaaacttgtggtattagttagggagcaacagaaagctaatacaggccaggcgcagtggctcacacctgtaatcccagcactttgggaggccgaggcgggtagatcacctaaggtcaggagttcgagaccagcactcctgtgttttgtattttcgtaaaaatacaaaa

SEQ ID NO: 90272 - DNA, 2985 bp, Homo sapiens
  misc_feature (1126)..(1126): n is a, c, g, or t
  misc_feature (1150)..(1150): n is a, c, g, or t
ctttattctgaaaaaagttaacatttcttgagatctcattgaaaatattttcctagttagaaatttatgatgtattcatatttgtcttaaagtgcttaaatattacctacagttgcaaattccatttattctttagcacagtagatgctactgatgcctttacttcattatcagaacagagcacaggagagaagaattacaactctctgacttagtaggcaccattagactgcttaataatagctggagattctgatacataattttaaaggcttaatgtaaatgttattcaaccaaatatattttacaagctattttctttgaacatgtatacattttagttgtagaagtcagttgtctcttaaacaaagtatcttcataggaaaaatcattattttgtgaactctgaaatgaatgaaaattttaaatacaatatcagggtagcctgtaaatgatactggaaataaactgacccaaacacacttaaccagcctgttttccgtttagctgtttccatactttttttttctcttttaaaacttggcaagttgcattttgaatcttcataaattatggtagcttaaaaaatatataaaatatggaatggtgtaaagctaatgttctggaagaatcattgcttttgaaatggcaaatcaacaattctaaaattagggtaaatatctagggtagatatgtagatgtggaattgctgtgtcaaaggataggtgaatgtttaactatataagaaactgtcaaaatttttcaaaagtggttgcgctattttatcctccttttcagtttcttaatggtggtttttggatggacagctttttctcttttttttttttttgagatggagtctggctctgtcacccaggctggagggcagtggcgcgatctcggttcactgcaagctccacctcccaggttcacgccattctcctgccttagcttcccaagtagctgggactacaggcacctgccaccacgcccagctaattttttgtgtttttagtagtgacagggtttcaccatgttagccaggatggtcagaagcttttaatgtttataaagctttgtttattttttttcttttatggttactgccttatctctttgatctaanagatctttgcttaccccaaagtcnggaaaatattctacattgtcttttagaggcatcatagttttagtttttacattaaatctgtcattaatctcaaattaatttttggcatggtgtgagtttggttccaagatttccttttttttttttttttaacatcttgatagccatttgtgccagcgccactggtgtttcctttttccattaatccagttttgtatcttcataaaaagtcaattaactttctatgtattggtctatttctggactctgttctatcgattttctgtttttcttttggcatatttatcttgattgttataatttcatgaagtcttgagatcaggtagtgtgtgtcctccaactttgtacttactattagtttattgatttcttcagtgaagcctgttggattttctcggagaattgtattgagtccagagcatttgggggagaatcaacatcttaatattgggcctcaatatttcataattttcaatgtagcagtcttgcatgcgtgtttaaaaatttattcttaagtattttataattttacactactatcagtagaacttttgaacttgattttccagttgtttgttgtcagtatgtagatatacaattgatttttgtatagtgactttgtagtctgataagtctgtttcacttattacttctagtggtttgtttatatagaaaactaagaaatttgcaattatgtttcctgtgactatcgttttacttctttctttctaatccttatgtcttgtcttgctttttattggtttattatactgtccaggacttccatagtgttgaacagaagtcacgagaatgggcataattgcattgtttccaagcttaggcagaaagctttcagtagtccaccatatggtatgatgtctgtatgatctgcagagaaaacctttatcaaaatgaggacattccttttaaactttgtttcttggcagtttttatcataacgatgtttaatgctgtcaaatgtctctttctgtatctgttgagatgattatacaaatttcttcattctgccaatgaattacattggtttcattttcaacttttaaactaactttacatccctgagataaaccccacttggttgtggtgtgttgtcctttgggatattgctagatttgatttctaggtgtttttttttcttttcttttttttttttttttaagatttctatattggtgttgatgggagatattggactttgtatccttttcttgtaatgtctttatttgattttggtgtcaaggttttattgggtgtcataaaattagatgggaagtgctgtctccttccctgtttttggaaatagctgtgtaagatcggtatgatttcttctttacatgtttgataggatttaccagtgaaatcatctgaacctagagggttttatttggtttggttttagttttttgtgggagaattaagattttttaagagatattttcagatttttctgttgtcagttttggtaatttgtgtcttttaggaaaatttcatttcatccaagttgttggatttattggcataaaatttttcagaatattcctttaatatccttttactgtctgtagaatctaatctgtattgcagtctcttcatattggtaatttgtgttttttctgttttttcctggatcagtcagtctagctggaggtttatcaattctttataagatcacttattttagatcattaatgatcttttagtacaggggtattcaatcttttagcttccctgggccacaatggaaggagaagaattgttttgggccacacatagaatacactaacgataagctgatgagtcaaaaaaaaaaaaaa

SEQ ID NO: 90273 - DNA, 438 bp, Homo sapiens
gatttcactatgttggccaggctggtctcgaaccctccacctcaagtgatctgccctcctcagcctcccaaagtgcgggagtcaccgtgcccagccagactgttttgttgataagtcctttagtatgtaactctactaggtaagggcatttaaaaaaaattaataccaaaaccatcatcacacctacaaccaattaactctttaatggcatcagatgtccagtttttgttcccatattcctgactgtaaatgttttttaaagtttgaatcagcatccagcaaggtccacacattttgttgtcttttcagtgtctttttctgattgttgaatttttctttctttctttttttttttttttttcctttttgagacagggtcttgctctgtcaccagactggagtccagtggtgcaatcatagctcactgcagtctgaact

SEQ ID NO: 90274 - DNA, 567 bp, Homo sapiens
acgtgtttgaaactgaagtgccaagtacgctgcggtgagtggagaaagatggatctctaaagcatggtgtcttccttcctgccggcaggctccgtggacattcgtggctgcagaagggtcttggctttgcaggggtggacggagagcggccaaggagcggccaggaggctcgagcaggtcctggtctttcccggacaggccgtgcgggagtcaccgtgcccagccagactgttttgttgataagtcctttagtatgtaactctactaggtaagggcatttaaaaaaaattaataccaaaaccatcatcacacctacaaccaattaactctttaatggcatcagatgtccagtttttgttcccatattcctgactgtaaatgttttttaaagtttgaatcagcatccagcaaggtccacacattttgttgtcttttcagtgtctttttctgattgttgaatttttctttctttctttttttttttttttttcctttttgagacagggtcttgctctgtcaccagactggagtccagtggtgcaatcatagctcactgcagtctgaact

SEQ ID NO: 90275 - DNA, 366 bp, Homo sapiens
agtcaaaaatgcactttcaacttccaatatttcaattaattatggctttatcgaaacaaaacctcatcctaagtctaggagcatctgtacaaaacggggagaccatgctcccccaaggaaggacaaaggtttgtagctctctgctcagggcagaaggtgtggcaagtcaggcttttggtccagcctccagccaaggcagaggacagagctaccactcccctgacatgcctaactctggattcttatgtgggccaaagggaacataaaataagttctccttaacttagagagggctaactaatagctggtgtctttctcttgaactacaagccaatctctttttaagaatgttatgaacctagaggg

SEQ ID NO: 90276 - DNA, 343 bp, Homo sapiens
ctgctcaggtaggagggaggcagaggggctccctggcagcgggcgtaatagtcattcactggggaagctggtaacactagacattctaggccttacccacgtgaataagctgtttagtaagaaagaacagaattgtttcttattaggtttgctggaattgctgcatactggctcacataaaggagccactttcccactggaaagaaagatagtagggatcaaaagaaaaggtggtggtctatgaaaataaggggggaaatgggaaagcaggagtaatttcaggttttaaatttatattatttctccaggggtatgtgtagggtaagggggtcagaaggaatgg

SEQ ID NO: 90277 - DNA, 540 bp, Homo sapiens
gctcatcacacacatatacccggtcttgtgcgtctgccagctcggctgtgtctggggcaggctgtccctgagcttagcatgcagtgagttctcacatgtgcatgtgtggtgtgctcccgtttccagcttatgtgagtagataggccctaatgtgaaatggatacagtagggccacactgtctttttgatggcacatttaaacagtttggctctgcacttacagactcatctgctgctctgcgtctggcagcttacagtttaacaatgaagagcaggccaggcctctaatcccagcactttgggaggccaaggtgggcagatcacgaggtcaggagatcgaaaccatcctggccggcacagtgaaaccccatctctactaaaaatacaaaaattagctggacctggtggtgcgtgcctttaatcccagctactcgggaggctgaggcaggagaattgcttgaaccagggagtcggaggttgcagtgagccgagatctcgccactgcactgcagcctgatggcagagtgagactctgtctta

SEQ ID NO: 90278 - DNA, 366 bp, Homo sapiens
ggattatcgggagctatttctcttttccggacttccttatcttctaattattttgtctagggcctgtaataatttctcagtgattttgagtacctttgaaaacagaataagggatggagtttagttaagtctatttaatctttgcagaggaaaaaatgcttatgatttgtaaattaaataggaaaaacaaggccgggtgcagtggctcgctcctggagggctgaggccagagaattgcttgagcctaggacggggaggttgcagtgagccgagattgtgccactgcactccagcctggacgacacagtgagaacttgtctcaaaaaaaaggaaaaacaaaaatggttgggagggttatagatacat

SEQ ID NO: 90279 - DNA, 333 bp, Homo sapiens
aaccagtgcaaagtagagcagcaaaatcagcctccttgttaggaacactcagcttctaaccatgtggcccacgatgctgtacctcccagaacctagaccactgtctggcactgggtagacactcaagaagtatttgtttaatatacatgaatgatattttgaaagtgtaagttcatttttgttttacctttttgtagtagcagttagtgattgttgttgccaatagtcaggaggaactttgggatttcatatctgacgtgactctgcaggctgggctattggctacctgtagcaaagtctactaattgtctcccagtatccattctatggatc

SEQ ID NO: 90280 - DNA, 1157 bp, Homo sapiens
tctcagccccctgagtagctgggactacaggtgcccgccaccacacctgactaatttttgtatgttttgtagagacagggtttcaccatgttggccaggtgcccattattatttgatctggaattaactgagctactgcaggaattgcttgattcactgatgactggtgttgagccagtacacacccacacccaaggactgtgactgtcttctgaggtccatcctcagaaattcctgtctcttcacctagtgtgtaataaggcctgcgcgtgttatatggaactgtaaaaaatgcgccaaccatctgtccttcctctttatctgattacttatcattgttctctaagttgcaagttaatagactgatcataaattaatgcatgctggagacttgctgtttcctactagcagcatataaaagttatttttaaagttgttttaaatctgtgagtaaaaataaattgctttgctgcaagaaacaccaaacatggaaaagctaacggttcaaagttaataatttatcttatggacatcactagtggcatagttgctttaaacagtgagaggatttaatagatatttgatttgcaagtgggatgaagggtggtctaacctttgtcctgtgtttaccttccatgagatcctagaggttgtacagcacagtagtggcatgtgacacacttgagagtgcctgttctgtttggaaacctggaaactatgaagggaagtggccttcgagcttaacacataagacttgggaggccaaaccttttattctctttaaatattcactttaggataagcatttttttaggtgttaggaacagggaaaactgtgtggttaggaaggaagaaagaagaaagttaactgttgtacattccctaggtaatgtttttaagcattgttattcactttcaaaacacattttatttatttggacttaatattttgatcttattttttcaatttcttttaatttaacagacaggatgagtttttttatagttgtattacttagaaattatactaaaaatggccgagtgtggtggctcacacctgtaatcccagcactttgggaggccaaggcaggtggatcacttggatcacttgaggttgggagttcaagaccagcctggccaacatagcaaaaccccgt

SEQ ID NO: 90281 - DNA, 291 bp, Homo sapiens
gcagttttggggaactatttcaagacctggtcacgtttatcttttttttttaaaagcaccattactgccccctctccctactcctcctggttctttactatcccaaggttgatttctcatatctttcatcagacttctgaatgttcctaacactgtaatcaccctattcagttctttccttcatcttttacttttggctgcctatctttggtaattgataactttatacatcgtatctttttacagcaaaagttctttttagctttataagcctagaaggcagggaactgt

SEQ ID NO: 90282 - DNA, 1008 bp, Homo sapiens
tgagtcaattttccagacatctttaattagcaatatgtttaagtagttacaagcctttccttcttttcttgtgacagtttgggttgaatttctatcgtttgcagcctgtcactgtaaggcacaaacatgatcacgcaagatgcgatagtagatttaagccagttgtttttaagtttgtgtttaaggagaaactaacaatgaaaacggcctcgttgacggaggaaaagttggaatgcagcctctggtgctgtttgagcgatccctctccccggggcctggccgcgcgctgctgtgttctggaagggctcattgtacagtcaaggcggcaggaatcctcttcatctttctcaccaatatgttttgtggactctgacgagccaaatctgacatcagttctggaacatctagaagatactaagaacaaccattcagtgaagagagaagccaagctattttctcttttcctcatgaacattatatttagaaattaaatgttaagagataatatgatataatgttaagagataatatgatataaaagcatgattaatgactataatcttagaggaattaaagtctgggtattttaagtccttcaaatcttatttactacctggtttctctttattatttcccacatgtataaccttagtttagattaggaattcaagatctccttttcctgaatgctaaccattaagccaagcaagcattttgggtagagatgactagccaaggtgggaggtagaaaaaagaccaaggtggaactgaagggagagatgggtagagtcacaccagaactagtgcgagggaattgccttttctttcaagggtctgtaagtctgcagtaaaagtcaaaggtatttaaatagaaagttttgtttttgtttttagtatataaagaagtataactttccatgttgcaaaaattttaaaaacctttattataaaactcataagcaaccataagcttataaaactcataagcaatcaatagtaaaatataga

SEQ ID NO: 90283 - DNA, 588 bp, Homo sapiens
tgagtcaattttccagacatctttaattagcaatatgtttaagtagttacaagcctttccttcttttcttgtgacagtttgggttgaatttctatcgtttgcagcctgtcactgtaaggcacaaacatgatcacgcaagatgcgatagtagatttaagccagttgtttttaagtttgtgtttaaggagaaactaacaatgaaaacggcctcgttgacggaggaaaagttggaatgcagcctctggtgctgtttgagcgatccctctccccggggcctggccgcgcgctgctgtgttctggaagggctcattgtacagtcaaggcggcaggaatcctcttcatctttctcaccaatatgttttgtggactctgacgagccaaatctgacatcagttctggaacatctagaagatactaagaacaaccattcagtgaagagagaagccaagctattttctcttttcctcatgaacattatatttagaaattaaatgttaagagataatatgatataatgttaagagataatatgatataaaagcatgattaatgactataatcttagaggaattaaagtctgggtatttt

SEQ ID NO: 90284 - DNA, 868 bp, Homo sapiens
ggcccctcttggccgccgtcgccacgcaccgagtttgtgtttaaggagaaactaacaatgaaaacggcctcgttgacggaggaaaagttggaatgcagcctctggtgctgtttgagcgatccctctccccggggcctggccgcgcgctgctgtgttctggaagggctcattgtacagtcaaggcggcaggaatcctcttcatctttctcaccaatatgttttgtggactctgacgagccaaatctgacatcagttctggaacatctagaagatactaagaacaaccattcagtgaagagagaagccaagctattttctcttttcctcatgaacattatatttagaaattaaatgttaagagataatatgatataatgttaagagataatatgatataaaagcatgattaatgactataatcttagaggaattaaagtctgggtattttaagtccttcaaatcttatttactacctggtttctctttattatttcccacatgtataaccttagtttagattaggaattcaagatctccttttcctgaatgctaaccattaagccaagcaagcattttgggtagagatgactagccaaggtgggaggtagaaaaaagaccaaggtggaactgaagggagagatgggtagagtcacaccagaactagtgcgagggaattgccttttctttcaagggtctgtaagtctgcagtaaaagtcaaaggtatttaaatagaaagttttgtttttgtttttagtatataaagaagtataactttccatgttgcaaaaattttaaaaacctttattataaaactcataagcaaccataagcttataaaactcataagcaatcaatagtaaaatataga

SEQ ID NO: 90285 - DNA, 1032 bp, Homo sapiens
  misc_feature (190)..(190): n is a, c, g, or t
  misc_feature (193)..(193): n is a, c, g, or t
  misc_feature (201)..(201): n is a, c, g, or t
  misc_feature (213)..(213): n is a, c, g, or t
tcgttcgttagcgcgcggtcgatgctcccaggcccactaggggtggcccaaggcggctggctgcggccgtctacctcccggtatgtcgttcgatcttcagctgtgcgttaccacgccgccgtgagtcacggcatggagtcaggatagcacaatccaccagttcccgctgatcacgctgagcgtgcggaanggnaaggccgngcccccgccgcncaccggaggtcacgtccaccatccccaccgcgcaccccaccccacccccgccatgcaacgggattgaagggtcctgccggtgggaccctgtccggcccagtgccactgccccccgaggctgctagacgtaggtgttaggcatgtcccacccacccgccgcctcccacggcacctcggggacaccagagctgccgacttggagactcctggtctgtgaagagccggtggtgcccgtgcccgcaggaactgggctgggcctcgtgcgcccgtggggtctgcgcttggtctttctgtgcttggatttgcatatttattgcattgctggtagagacccccaggcctgtccaccctgccaagactcctcaggcagcgtgtgggtcccgcactctgcccccatttccccgatgtcccctgcgggcgcgggcagccacccaagcctgctggctgcggccccctctcggccaggcattggctcagcccgctgagtggggggtcgtgggccagtccccgaggagctgggcccctgcacaggcacacagggcccggccacacccagcggccccccgcacagccacccgtggggtgctgcccttatgcccggcgccgggcaccaactccatgtttggtgtttgtctgtgtttgtttttcaagaaatgattcaaattgctgcttggattttgaaatttactgtaactgtcagtgtacacgtctggaccccgtttcatttttacaccaatttggtaaaaatgctgctctcagcctcccacaattaaaccgcatgtgatctccaaaaaaaaaaaaagaaaaagaaaagaaaag

SEQ ID NO: 90286 - DNA, 268 bp, Homo sapiens
tgtgagagggccatgttagggactgaaggtcactggtgtggctggcatgtgctgtgtgcacacatggttgtgagtgtgtgtgcatgcatgtgtatctacgtgtgtgtttgagcatgtggtgggtacaagggtgtgggtgtgaacatatggtgtgtgcaaacatggagggcgtgtgtatgcacccctgtgtgctaatgtatgtgtatgtgagtgtgagagcatgttgtgtgggtgtgtgcatgcacccctgtgtatgtgcctgtgtagg

SEQ ID NO: 90287 - DNA, 213 bp, Homo sapiens
ggctctgtactggcagaagcaggtatgctagctgggaactattgctatgaaaggtgttgtgtagacattacttcacccagagatatgtgcagtcttagtgcctccccagtaatgatggtgaaacccaagctcatacaagtccttacaaaaggctctttttagaagctgacaaatcctagagaaggtgttatgctcctgcctcaaaaaatgatc

SEQ ID NO: 90288 - DNA, 336 bp, Homo sapiens
ggcttcctaaagtgctgggattacagacatgagctactttcccaggctacaaaaaacaaccatttttaactgagcacttactatgtctgaggcactgtactagtgcaccccatccattactgtgtttaaacatcacaacagtggtgtttaaagagaatggggcccagagaggttaagtgacttgcctaaggtcacacagcaaagaagtcgaattggtattcaaacctaggttagaacagcatttgtctttttttaatgagaaattttaaacattcagacaaatggagagagcagtacaacgaaactacaagtaccgattaccagaatagcataatg

SEQ ID NO: 90289 - DNA, 481 bp, Homo sapiens
gtatcccacttgtatctgcattttttccctttcggatgtcttttgtttatattcaattaagttgtgtaaggtgaattcgatgctttgtttggttttacctaagtacttggtttgatttattcatctggctggtggtatgttttcctgggagttcctattcactgatcctaagtctcaaacgtctattataactgctaactaacagccccatcttgccacccgtggcaataaacaaagaacaggcacagtccagggagggcctaacaagtccctgtggtccttttcaccaacagagatgagccagatatagaagggagcaaaataaaaaataattcttaagagtaagaaagtgaacaagggagataatgaagaaggaaaatgaaagagagggaagaaaaaaggacgataacaaggaaacctgtgaactgttcactgttgtccacaggtttccttgttaccattctgatgttggagcggccgc

SEQ ID NO: 90290 - DNA, 1565 bp, Homo sapiens
cctgagcataaaaatttgggtaggactgtgagcgagagagaatagaaaagggtacaaacaaactattgaggcaatggatatgtttattatcatgactttggtgattgtttttatatattttacactttaacaatgtgcaactgaatgtcactaatacctcaataaagctgttagaaaagaaaaattccaaataaaatctggatttctcaatcctcttttataacctctggcaaagctgtgttgattccatcattagcctctcctcatgtcttacgtgggtcaactctgattttatagtatcaaaaactggaagcaatgttgttggaaattcagaatctcggggaagaagaactggagacaaggaaggttatgtccacctgagtcaccaggaattatgtttaggtttaaaaaaaaaaagacttatctcagaagtatagaatctcccttcattcagtcatgaggctcctacctgtgcagtagtggtttgaattaacaggctttatgtctgtgtctgtcttccactactatagcaaaacaccacagattgcgtaatttataaagtagtttgtttcatacagttctggaggctgggaagtccaagggtatggcactggtatctgcttggcatctggtgagggccttgttactctgtcataatatgacagaagggcaagtgagcatgaaagacagagacagctgattttataaaaacgtcactctcgggttaacaaacccactcttatgataaaggcattgattcctttataagggcagagccatcatgacctaatcacctcttaaaggtcccatttctccacactgttaaaatggcaattaaaattcaacatacgttttataacgccagagacacaagaatccataacacctttggattacttgctctgacaatgactttgcctacaggagatacacacgtctgtaggtcctcagagtttctgtataccctcatctcacatagccatagttactgaaacattcatggatgtctctttacaaggcgctcatccattccactctagtttgctggtgtctcatacttcatattaatacaatcactgtttctgtacagactatggttcccaaactgcttgctatggtttgaccatctcctccaaaagtcacattgaagcttaatctacagtgtggtagtactgagaggtgcgacctttaagaggtgattgaatcatgagggctctatcctcaggaatgaattaatcaatttatgggttgatagactaatgggttatcctgggagaactggtggttttataagaagagaaagggccaggggccgtggctcttgcctgtaatcccagcactttggggggccaaggcgggcagatcacctgaggtcaggagttcgagaccagcctgatcaacatgggagaaaccctgctctactaaaaataaaaacttagcggggtgtggtggcacatgcctgtaatcccagctactcaagaggctgagacagaagaattgcttgaacccgggaggcagaggttgcggtgagccaacccaggaagcggaggtgcagtgagccaaga

SEQ ID NO: 90291 - DNA, 503 bp, Homo sapiens
tcaagaatgaaacacattgccctgctagtagtttggtcaacacagcattcaaaaattcagttcagcaaacatttgaaattaatgcaatatttgttcacttcattagcaaatgtacaagtccttgcgagtacaagatcttgtgctaggtgttgagggttcagtattgataaaacactgtctactcttactggaattacaattttaggcaagcaccccaaattatgccataatgaaatcaatggataggaaggcggtgggagggctttaggaacacagttcagaaggagctattaatttttccgggtagaaccaggagtgttttaagaagagctgaaatttgcacaaggtctttggtaaaattttgccaggtgtggtggcatgcaactgtaatcccagctactcgggagtctgaggcaagagaatcacttgaacctgggaggcagaggttgcaatgagccaagatcacaccactgcactccagcctggagacagagccagactcc

SEQ ID NO: 90292 - DNA, 502 bp, Homo sapiens
ctctcatcctgattctttgtgaccaaaaatatggtttagcaagatgactagctacagagaaaacctcacctatgcatgcgagagcagacccaggacgtcagcttttctgcactactcaagtaaacaagacatagagaaatatttgaggacagcaggccagtgtggataccaatgggtgcatctcaaagctgtagctacaagagaaaattgaatgatctccacatcatcccaacgcacacttttgggtcaggattttccccaaacgctttctccactgcaccaccctgactcacagtaagaacttcttttgacaccgtggtctaaaagactgaggctgtgaccatgagaaaattacttaatctctctcagcagatttcctcataagcaaaatgagcatgtaatacctacctcttagggatgttatgaaaagaaaatcaatctaagcgcctataacaaggcctagcacagggtaaatgctcagtaaatattggcaattactgca

SEQ ID NO: 90293 - DNA, 211 bp, Homo sapiens
tgacacagagcatgtattccatgcttcagaacaatttgacaataaaggaggagacataatctaaacacctgcctatgcatcagttaaggcagtgagagcagatacatctgtcatgtgtgctcagagaggagagcctccaccttagaggatcagagaaagcttccaggcagaggaaaggaacaatttaaggaggtttttgacagtgaataga

SEQ ID NO: 90294 - DNA, 815 bp, Homo sapiens
gtcccttttagctggagatggcaaaactctgaccatgtgtctgcccaaagagacatattacagagccatgccacgttgttctcccaccagaaaggccgtatggctgaattagagcgtgtggggattagaaatgcgctgctttcttgaaatggccaccagccttgtactaaacatgtttgaccggggccatctgtctgcccgtcaaaagtgtggtccagtttccatcagataagtctggaagaggacggtttttgttgttgttttgttttttgcatccagcttgttaaaagatatgaagaacgagaaagttttagctcagcaagaaatgtaacaatttaaagtttttattctgtcatgattctaaaagcctctagaattgtcatctgccttttcacctaattatacgcatatatacatactctttatatatatacactttgtatatattatgcatattatgtaaatatatacatatgtacacatatataatattcatataattatacacgtatacacatactatatagtatatgcgagtatatattatagcatgtattcagcatggtataatataaaggtctctaaagacaggcagacctatgaaaacatagctcttatcacctattactgagtgacctggggtactatgcttaacttctctaaaacttaaattatcatgtccagtccactggaaaataatagggcaaaatgatataatagtgacaaaacacataagcattcagtacaactagctcaataactacttattttaaaataaagtccctctggctctagaggatggaataaggaataca

SEQ ID NO: 90295 - DNA, 470 bp, Homo sapiens
gaaagcagtgcctggacaatcggatctcctaatgcctctgttaccccatccccaacatgtagaatcaaggtcaaacttaaggaattttggctagatcagccaggcgcagtgacttacgcctgtaatgccagcactttgggaggccgaggcaggaggaattgcttgagctcagaagtttgaaaccaacctgggcaacatggcaaaactccatctctacaaaaagtacaaaaattagtcaggtatagtggcatgaacctgtattcccagctactcaggaggctgagacaggaggatcgcttgaccctgggaggtcgagggtccagtgggccgtgctcacaccactgtactccagcctgggggacaaagtgagaccctgtcaaaaaaaaaaaaaaaaaaaggctggggggattttggttagctcaatttaattctctctggctctaccagagattgtagcccatctgctgggg

SEQ ID NO: 90296 - DNA, 352 bp, Homo sapiens
taagggtactcaaaaacgagattttgatgaaaaacaagaagcagctgacagcttcagtgagaattccaagctaaacataggccacgtgtttaccagaggtgaaccaacgaaagagacaactaataataggccccccttgtgtcagaacaaacctccagtactgacctcagaagctgttcctgtaggaaggcttgtatggcaaattgtggttacgtgtggttaattttagctctgagcatggtagtggctacccatcacccgtgccagcagctttgtatgtgttcctgaagcagcttgctgaagccaggataggcattaaggaccctgtcctgcaaatattggggaactgtgc

SEQ ID NO: 90297 - DNA, 195 bp, Homo sapiens
gttccaggtaatccaaaccatgcaaaaatgtagaagatcaagtaaagtcagtatctgatagaggctcaagcaggataacttttaatcctgccatgaagaaaagcttaactttaaaaacttggcaccagccagttctcccctcagggagcctgtggctttgggcttgaggaggttttataaaagcaagcaggactc

SEQ ID NO: 90298 - DNA, 1309 bp, Homo sapiens
ggaaaataattactattagagtatcatcataggtaatctggcaactaagcacatttgttctgaattaacagacttaactcagactcttatgtacataacctacagttacttttacataacagcagagttgaatagatgaaacacagattatgtggcccataaagtctaatattttatttaatagttaaattttaaaaaattcaattaaatattttattttatggagaatttaagatatcattcagaagtgcaggatgaagatttaatttgctaatagtttaatttgctaataaataaaaattaaaatattttaaaattaaatatttaatatagaaggtttgacatcattcagaagtgtgagataaggatttaattaaatcattaatgcttgaattggatgatgtagacaatatgttattttgtagaaagggaagagccctgtaccactattgattaaggataatgtaatcaacaatataaaatagaatattctaagatacaatgttttgaataatgtttatttctcatattaaaatgtattatttattcaacattgattcataaaatgggatgtattagattattgatttttaacttaaaaatgcatcatctttttctctatatcattcaaagcagaagtattttgaactttaagtgcgtttttagtaattttagtaataataaaatcatcatcttgtacctaagcagaattttactaccttaatgactacaaaaattactacaaatccttagattggtgatgtgctgatagtaactgaagaataaaaccacatagaggaaaaattaattttccatttagtcaaatggatgaatctattaagaagaatattaaaagtaatgcacaggcttgaaggccagtgaagacaatgttgagaattgaaaaacacaggataaggcaggggacggtggctcatgcctgtaacccagcactttgggaagcctcactgagaaacactttgttccgattaccttgtttctaaaaatattaaatatgaagtatatcagtctaaggatcctattaactgtccaatatagcaaaaaaaaaaaaaaatttaaaggcaagtagtatcctccctacttgcgggctgatcacttgagaccaagggaaaaacctcctgtctactaaaaatacaaaaaattagccaggcatggtggcatatgcctataatcccagctacttgggaggctgaggcacaagaatgatttgaacccaggaagtggaggttgcagtgagccaggatcgctctgctgcactccagcctgggcaacagagtgagaccctgtctaa

SEQ ID NO: 90299 - DNA, 157 bp, Homo sapiens
cttagactcatagagggagacaagacatgcaacagcaacgtgtgtacatatactaatgatatctgtggttttgtgctgggaggaggaaacagcagggaatcataggaagctggtccaaggggctccaatgaagaagtctcaagccaggttgctcaga

SEQ ID NO: 90300 - DNA, 333 bp, Homo sapiens
attatactcaacaatctactaaaattacttttcttcctattcccacagtcttggacttggtgtgtttggacataaaagtgctccagaaaaactaattcctctagaaacatagtttgattattatcagttagaagctgagagtgcaccctgacaattttattctactaaattggcatgcttctgaatcattatactgggcaagatgcttgatacccataacctagagtaaattagattatggctgcatgatatagcatgtaggactatgtctgggacctggagaatcacttgggtgtagctcagtgttcccatttcaataatagtaattaataa

SEQ ID NO: 90301 - DNA, 532 bp, Homo sapiens
tctgcaggaggagaaaacgcgagtgtcccagcaccacctggaccagcaactgaacagcgaggctcagcggagcaacagcctagtcgcccagctgcaggccatggtagctgagcgggaggccaaagtgcgacagctggagatggagatcggacaactcaatgtgcacgtgagtagggcactggcagcgcccaaacccattttcaagccgggcaagtccatccagctccttccacttctttccacttgccttagctcaggccagacttcatccttcctggctccactttggccacctgcttctatctggctccccaacccattctgcacacaaacctgattgtgtccttgctctacttaaaatctgttcatggcttactgtcaccctcgacctcacctggttctcaaggacccaggcaccttccagtttaccctctcccatccccagctgtggccttatcctcaggattcaagatggtggcagtagctccagcagcaggatgagagaaggaaagccacacttcattcagcttct

SEQ ID NO: 90302 - DNA, 425 bp, Homo sapiens
cttggtcatttatactgctgaaaaggtagctttcatatctttatgctcagctgcttgcaaggttcacaactttaggattggttctgcatgtgtaaagctatgcctgataaggcaaaagaggggtataaatgaatctcacctgaaattggagtcttgtacagtgaatgggtttacctggagttgtgttcatattgtgaacccagcttgttttaatggaggtttccattagtcttcctgcctgtgttctcagggtattataagaagcatgaagatgtgtgtgagctttctcttccttaatcacttgaaattgatcactgtctttgaataccggacccgtaaaaatacccttttaagaagtccttattttttcatttctttaattctctgccagaagtgagtggaatattgggtgtctgttttctaga

SEQ ID NO: 90303 - DNA, 410 bp, Homo sapiens
cccgggacgctagagcaggcggttcctgggctgctccggtagtttcgcgtgcgcgggtttctgcagatctagggcgagcttgcacgttacatcaccgatgcatctcttcttgcttgcttaatttgccaccacttaggcctttcttgcagaattcgccatatactccttaagggccgcggaatcggagcgaccttggtgactggcaaactctcggcagatgtgcgtgcactggtttgatgcagacgtggttgtaggcgatttaatttttcccagctttgcagcgactgttggcttcccagaacggatctccccagcctcgactggaagctgagggacaaaaattcataaaagcaattactctttcccggcgaggcttctagaagagcaagaagagcgatatgattacacct

SEQ ID NO: 90304 - DNA, 812 bp, Homo sapiens
ggctccttgaccctaaaaggtagctggcaggggcaagatgggggccagctacctaatggatgaaagccacaagtgaatacagttcttgtcaccagggttgccctgccctcactcggcagggagttctgacaccccagggcccgtgagctacctgcttgagcccctgtttctggggcaccttcgaggaggcgttgtggagggcatcgccccctgtttattcacaacaccctcaggggcaaacaggcctgggacccgctgacaccattttgggtagctggatgcacccgacagcagtggggtccacacactgagctccagctggcactgcccactcaagggctgagtggaggggcccctccggccagctctgctccaccagccctgcaagctgatgcagggcgggggaagggctgggtgttgcactattgctgcgctgccttaaggcatctgtcctctggtggtgcacccgtgcacacaggtacagtgcatctgggcacagcttttggatccacacctctgcacaagtgtgaatacctctgcacatatgggcgtatctgtgtgtgctcgtgtatatggggtggggaacatgagacttcctgtgaccagtccaccctggctcccagctgtctgtatcctcctgccccgccctggcgagtgcctaccctggcagaacccagggaggagtggaggctgcctctgcctgggcctccacacagcatcctgtacatacgccacctgggctgggggtggggaggcagggccaggagcatcgattaaagatcacatcctggggcttccagggagctcacacc

SEQ ID NO: 90305 - DNA, 398 bp, Homo sapiens
cccgcagcttaagggctacccaatatgggaggtggttttgtggacagtagcatgacttactagatagtatatgggtagatgtctaaaatggcagtctttgaccctaaggccttactgtatccgaagaatctgagtcagaacatgtcttagaataaaaagcaaagtagttaaagcacccataaacatgtgtggccttcacaacttgctaaagggtgcattcattgatttattcattcaggaaacatcgaatgtctgctatgtaacatgaattgtgtgtgaccatgaggaccataaaaaacaggtgattgagcaagagggtgcaacgtggggaggtagtgttactttggattagctgttgtggaaagtttgtctttggagcgacatttcagctgagacag

SEQ ID NO: 90306 - DNA, 286 bp, Homo sapiens
atctctccactgcactccagcctgggcgacagtgagaccctgtctctaaataaataaataaaagagaaaagctggctcgcaggagagacctaagggcacctagacagcactggccaggagagcagaggcgagtgcagcgtatatggaacaaaagcacccctgtggagtggacagaagcacagacctagggcttaggagaggaatgaaacaaaaattcctgtttcttcaggagctgaagatagagaaagtatctgtacagtgcatgtgcgtgtgtgtgttagtgata

SEQ ID NO: 90307 - DNA, 355 bp, Homo sapiens
gtgtaagccaccatgcccaaccctttctcaaagatttttaacccttagatatacctcagcataaattttctacattgtctggcatttagctacagaaacagtcattatataaattagcatctatattcagaatctgctatctcattgatatcttttgcagcatttttccccagctacccattgcatttagctgtcttgatctcatttcagacttgtacaatttatcctttgtctttcatgaaatggcattgatatttctgaggagtacaagctaatttttctgtagaatgttcctcaacatttttctgataattctgctagttcctcataattaaattttcattatacatttttg

SEQ ID NO: 90308 - DNA, 416 bp, Homo sapiens
ggaaacttgttgagttaaatttgctttttcctaattgtgcatctcgacttttcccatcaatcttatttctagagtctcttcacaaccggtgtctccctgcctccctgtctcatgatgttaccgagctattcagaaaagaaagtgcagggctgggcgcggtggttcacgcctgtaatcccagcactttgggaggcctaggcgagcagatcatctgaggtcgggagttcgagaccagcctgaccaacatggagaaaccccgtctctcctaaaaacacaaaattagccgggcgtggtggcttttgcctgtaatcccagctattcgggaggctgaggcaagagaatcgcttgaaccctggaggcggaggctgcggtgagccgaggttgcggcattgcactccagcctgggtgacaagagc

SEQ ID NO: 90309 - DNA, 995 bp, Homo sapiens
taataacagtcctgtctttggaattatttagtgtgttctctcatttctcaggaagtcaggatgttagtgccgaagcacttctctgacttggtccgacattgaagtaccttcccctgcattacagaagaacggccccccagggggtctgtttgatgaacacatgtattattgcagtgagatactctagaaatagcttcatgtccttgcaaaattgccagcacaagtaaggacctggaaattgttgctatgcatgtatgtcagaagatttcttaaccaattctgtactgaataaaataaaatttattttcaagttttgtagggacctggggcaatatgtcagatagagttgaatattttcaaggcatttttagttcatggggcacatagttggcttaagatatctatgtgtatcaggactgaaggtaaagtgcccgaacctgctaatgaaagaggtgtctgtgtggcctggattcctgaggttcagccacaatgtgtcttgcagaattattttattttgctagtttttaatttctcaaacagttcagctgcctgtcccgtggtaccgtgagacttctaattcaagatgaccagtatttgcagacagagccactgcctttgctgccacattttgcttggttattgtgtgagaacaccatttttctctttttaaatgaattgtgtttctctttttaaattgagcatctgactgggcgcggtggctcacgcctgtaatcccagcactttgggaggccacggtgagtggatcacctgaggtcaggaatttgagaccatcctggccaacatggtgaaactcctgtctctacttaaaaaaaaaaaaatgcaaaaactagctgggcatggtggtgcacatctgtaatcccagccacttgggaggctgagggcaggagaatggcttgaacctgggatgcggaggtcatagtgagccaagactgtgtcattgcactccagcctgagcaacagagagagactgcctc

SEQ ID NO: 90310 - DNA, 2908 bp, Homo sapiens
gcgtttactggcaaaccgcatttgtaaatgtgctggctgagccaccacctcctctcctcgcaatacgtggagcgccacttcagccgggaggggacaacccagcacagcaccggggctggagaccactgctactaccaggggaagctccgggggaacccgcactccttcgccgccctctccacctgccaggggctgcatggggtcttctctgatgggaacttgacttacatcgtggagccccaagaggtggctggaccttggggagcccctcagggaccccttccccacctcatttaccggacccctctcctcccagatcccctcggatgcagggaaccaggctgcctgtttgctgtgcctgcccagtcggctcctccaaaccggccgaggctgagaaggaaaaggcaggtccgccggggccaccctacagtgcacagtgaaaccaagtatgtggagctaattgtgatcaacgaccaccagctgttcgagcagatgcgacagtcggtggtcctcaccagcaactttgccaagtccgtggtgaacctggccgatgtgatatacaaggagcagctcaacactcgcatcgtcctggttgccatggaaacatgggcagatggggacaagatccaggtgcaggatgacctcctggagaccctggcccggctcatggtctaccgacgggagggtctgcctgagcccagtgatgccacccacctcttctcgggcaggaccttccagagcacgagcagcggggcagcctacgtggggggcatatgctccctgtcccatggcgggggtgtgaacgagtacggcaacatgggggcgatggccgtgacccttgcccagacgctgggacagaacctgggcatgatgtggaacaaacaccggagctcggcaggggactgcaagtgtccagacatctggctgggctgcatcatggaggacactgggttctacctgccccgcaagttctctcgctgcagcatcgacgagtacaaccagtttctgcaggagggtggtggcagctgcctcttcaacaagcccctcaagctcctggaccccccagagtgcgggaacggcttcgtggaggcaggggaggagtgcgactgcggctcggtgcaggagtgcagccgcgcaggtggcaactgctgcaagaaatgcaccctgactcacgacgccatgtgcagcgacgggctctgctgtcgccgctgcaagtacgaaccacggggtgtgtcctgccgagaggccgtgaacgagtgcgacatcgcggagacctgcaccggggactctagccagtgcccgcctaacctgcacaagctggacggttactactgtgaccatgagcagggccgctgctacggaggtcgctgcaaaacccgggaccggcagtgccaggttctttggggccatgcggctgctgatcgcttctgctacgagaagctgaatgtggaggggacggagcgtgggagctgtgggcgcaagggatccggctgggtccagtgcagtaagcagccccaacagggacgtgctgtgtggcttcctcctctgtgtcaacatctctggagctcctcggctaggggacctggtgggagacatcagtagtgtcaccttctaccaccagggcaaggagctggactgcaggggaggccacgtgcagctggcggacggctctgacctgagctatgtggaggatggcacagcctgcgggcctaacatgttgtgcctggaccatcgctgcctgccagcttctgccttcaacttcagcacctgccccggcagtggggagcgccggatttgctcccaccacggggtctgcagcaatgaagggaagtgcatctgtcagccagactggacaggcaaagactgcagtatccataaccccctgcccacgtccccacccacgggggagacggagagatataaaggtcccagcggcaccaacatcatcattggctccatcgctggggctgtcctggttgcagccatcgtcctgggcggcacgggctggggatttaaaaacattcgccgaggaaggtccggaggggcctaagtgccaccctcctccctccaagcctggcacccaccgtctcggccctgaaccacgaggctgcccccatccagccacggagggaggcaccatgcaaatgtcttccaggtccaaacccttcaactcctggctccgcaggggtttgggtgggggctgtggccctgcccttggcaccaccagggtggaccaggcctggagggcacttcctccacagtcccccacccacctcctgcggctcagccttgcacacccactgccccgtgtgaatgtagcttccacctcatggattgccacagctcaactcgggggcacctggagggatgcccccaggcagccaccagtggacctagcctggatggcccctccttgcaaccaggcagctgagaccagggtcttatctctctgggacctagggggacggggctgacatctacattttttaaaactgaatcttaatcgatgaatgtaaactcgggggtgctggggccagggcagatgtggggatgttttgacatttacaggaggccccggagaaactgaggtatggccatgccctagaccctccccaaggatgaccacacccgaagtcctgtcactgagcacagtcaggggctgggcatcccagcttgcccccgcttagccccgctgagcttggaggaagtatgagtgctgattcaaaccaaagctgcctgtgccatgcccaaggcctaggttatgggtacggcaaccacatgtcccagatcgtctccaattcgaaaacaaccgtcctgctgtccctgtcaggacacatggattttggcagggcgggggggggttctagaaaatataggttcctataataaaatggcaccttcccccttt

SEQ ID NO: 90311 - DNA, 2890 bp, Homo sapiens
gcgtttactggcaaaccgcatttgtaaatgtgctggctgagccaccacctcctctcctcgcaatacgtggagcgccacttcagccgggaggggacaacccagcacagcaccggggctggagaccactgctactaccaggggaagctccgggggaacccgcactccttcgccgccctctccacctgccaggggctgcatggggtcttctctgatgggaacttgacttacatcgtggagccccaagaggtggctggaccttggggagcccctcagggaccccttccccacctcatttaccggacccctctcctcccagatcccctcggatgcagggaaccaggctgcctgtttgctgtgcctgcccagtcggctcctccaaaccggccgaggctgagaaggaaaaggcaggtccgccggggccaccctacagtgcacagtgaaaccaagtatgtggagctaattgtgatcaacgaccaccagctgttcgagcagatgcgacagtcggtggtcctcaccagcaactttgccaagtccgtggtgaacctggccgatgtgatatacaaggagcagctcaacactcgcatcgtcctggttgccatggaaacatgggcagatggggacaagatccaggtgcaggatgacctcctggagaccctggcccggctcatggtctaccgacgggagggtctgcctgagcccagtgatgccacccacctcttctcgggcaggaccttccagagcacgagcagcggggcagcctacgtggggggcatatgctccctgtcccatggcgggggtgtgaacgagtacggcaacatgggggcgatggccgtgacccttgcccagacgctgggacagaacctgggcatgatgtggaacaaacaccggagctcggcaggggactgcaagtgtccagacatctggctgggctgcatcatggaggacactgggttctacctgccccgcaagttctctcgctgcagcatcgacgagtacaaccagtttctgcaggagggtggtggcagctgcctcttcaacaagcccctcaagctcctggaccccccagagtgcgggaacggcttcgtggaggcaggggaggagtgcgactgcggctcggtgcaggagtgcagccgcgcaggtggcaactgctgcaagaaatgcaccctgactcacgacgccatgtgcagcgacgggctctgctgtcgccgctgcaagtacgaaccacggggtgtgtcctgccgagaggccgtgaacgagtgcgacatcgcggagacctgcaccggggactctagccagtgcccgcctaacctgcacaagctggacggttactactgtgaccatgagcagggccgctgctacggaggtcgctgcaaaacccgggaccggcagtgccaggttctttggggccatgcggctgctgatcgcttctgctacgagaagctgaatgtggaggggacggagcgtgggagctgtgggcgcaagggatccggctgggtccagtgcagtaagcagccccaacagggacgtgctgtgtggcttcctcctctgtgtcaacatctctggagctcctcggctaggggacctggtgggagacatcagtagtgtcaccttctaccaccagggcaaggagctggactgcaggggaggccacgtgcagctggcggacggctctgacctgagctatgtggaggatggcacagcctgcgggcctaacatgttgtgcctggaccatcgctgcctgccagcttctgccttcaacttcagcacctgccccggcagtggggagcgccggatttgctcccaccacggggtctgcagcaatgaagggaagtgcatctgtcagccagactggacaggcaaagactgcagtatccataaccccctgcccacgtccccacccacgggggagacggagagatataaaggtcccagcggcaccaacatcatcattggctccatcgctggggctgtcctggttgcagccatcgtcctgggcggcacgggctggggatttaagtccggaggggcctaagtgccaccctcctccctccaagcctggcacccaccgtctcggccctgaaccacgaggctgcccccatccagccacggagggaggcaccatgcaaatgtcttccaggtccaaacccttcaactcctggctccgcaggggtttgggtgggggctgtggccctgcccttggcaccaccagggtggaccaggcctggagggcacttcctccacagtcccccacccacctcctgcggctcagccttgcacacccactgccccgtgtgaatgtagcttccacctcatggattgccacagctcaactcgggggcacctggagggatgcccccaggcagccaccagtggacctagcctggatggcccctccttgcaaccaggcagctgagaccagggtcttatctctctgggacctagggggacggggctgacatctacattttttaaaactgaatcttaatcgatgaatgtaaactcgggggtgctggggccagggcagatgtggggatgttttgacatttacaggaggccccggagaaactgaggtatggccatgccctagaccctccccaaggatgaccacacccgaagtcctgtcactgagcacagtcaggggctgggcatcccagcttgcccccgcttagccccgctgagcttggaggaagtatgagtgctgattcaaaccaaagctgcctgtgccatgcccaaggcctaggttatgggtacggcaaccacatgtcccagatcgtctccaattcgaaaacaaccgtcctgctgtccctgtcaggacacatggattttggcagggcgggggggggttctagaaaatataggttcctataataaaatggcaccttcccccttt

SEQ ID NO: 90312 - DNA, 3178 bp, Homo sapiens
atgaggctgctgcggcgctgggcgttcgcggctctgctgctgtcgctgctccccacgcccggtcttgggacccaaggtcctgctggagctctgcgatgggggggcttaccccagctgggaggcccaggagcccctgaggtcacggaacccagccgtctggttagggagagctccgggggagaggtccgaaagcagcagctggacacaagggtccgccaggagccaccagggggcccgcctgtccatctggcccaggtgagtttcgtcatcccagccttcaactcaaacttcaccctggacctggagctgaaccaccacctcctctcctcgcaatacgtggagcgccacttcagccgggaggggacaacccagcacagcaccggggctggagaccactgctactaccaggggaagctccgggggaacccgcactccttcgccgccctctccacctgccaggggctgcatggggtcttctctgatgggaacttgacttacatcgtggagccccaagaggtggctggaccttggggagcccctcagggaccccttccccacctcatttaccggacccctctcctcccagatcccctcggatgcagggaaccaggctgcctgtttgctgtgcctgcccagtcggctcctccaaaccggccgaggctgagaaggaaaaggcaggtccgccggggccaccctacagtgcacagtgaaaccaagtatgtggagctaattgtgatcaacgaccaccagctgttcgagcagatgcgacagtcggtggtcctcaccagcaactttgccaagtccgtggtgaacctggccgatgtgatatacaaggagcagctcaacactcgcatcgtcctggttgccatggaaacatgggcagatggggacaagatccaggtgcaggatgacctcctggagaccctggcccggctcatggtctaccgacgggagggtctgcctgagcccagtgatgccacccacctcttctcgggcaggaccttccagagcacgagcagcggggcagcctacgtggggggcatatgctccctgtcccatggcgggggtgtgaacgagtacggcaacatgggggcgatggccgtgacccttgcccagacgctgggacagaacctgggcatgatgtggaacaaacaccggagctcggcaggggactgcaagtgtccagacatctggctgggctgcatcatggaggacactgggttctacctgccccgcaagttctctcgctgcagcatcgacgagtacaaccagtttctgcaggagggtggtggcagctgcctcttcaacaagcccctcaagctcctggaccccccagagtgcgggaacggcttcgtggaggcaggggaggagtgcgactgcggctcggtgcaggagtgcagccgcgcaggtggcaactgctgcaagaaatgcaccctgactcacgacgccatgtgcagcgacgggctctgctgtcgccgctgcaagtacgaaccacggggtgtgtcctgccgagaggccgtgaacgagtgcgacatcgcggagacctgcaccggggactctagccagtgcccgcctaacctgcacaagctggacggttactactgtgaccatgagcagggccgctgctacggaggtcgctgcaaaacccgggaccggcagtgccaggttctttggggccatgcggctgctgatcgcttctgctacgagaagctgaatgtggaggggacggagcgtgggagctgtgggcgcaagggatccggctgggtccagtgcagtaagcagccccaacagggacgtgctgtgtggcttcctcctctgtgtcaacatctctggagctcctcggctaggggacctggtgggagacatcagtagtgtcaccttctaccaccagggcaaggagctggactgcaggggaggccacgtgcagctggcggacggctctgacctgagctatgtggaggatggcacagcctgcgggcctaacatgttgtgcctggaccatcgctgcctgccagcttctgccttcaacttcagcacctgccccggcagtggggagcgccggatttgctcccaccacggggtctgcagcaatgaagggaagtgcatctgtcagccagactggacaggcaaagactgcagtatccataaccccctgcccacgtccccacccacgggggagacggagagatataaaggtcccagcggcaccaacatcatcattggctccatcgctggggctgtcctggttgcagccatcgtcctgggcggcacgggctggggatttaaaaacattcgccgaggaaggtccggaggggcctaagtgccaccctcctccctccaagcctggcacccaccgtctcggccctgaaccacgaggctgcccccatccagccacggagggaggcaccatgcaaatgtcttccaggtccaaacccttcaactcctggctccgcaggggtttgggtgggggctgtggccctgcccttggcaccaccagggtggaccaggcctggagggcacttcctccacagtcccccacccacctcctgcggctcagccttgcacacccactgccccgtgtgaatgtagcttccacctcatggattgccacagctcaactcgggggcacctggagggatgcccccaggcagccaccagtggacctagcctggatggcccctccttgcaaccaggcagctgagaccagggtcttatctctctgggacctagggggacggggctgacatctacattttttaaaactgaatcttaatcgatgaatgtaaactcgggggtgctggggccagggcagatgtggggatgttttgacatttacaggaggccccggagaaactgaggtatggccatgccctagaccctccccaaggatgaccacacccgaagtcctgtcactgagcacagtcaggggctgggcatcccagcttgcccccgcttagccccgctgagcttggaggaagtatgagtgctgattcaaaccaaagctgcctgtgccatgcccaaggcctaggttatgggtacggcaaccacatgtcccagatcgtctccaattcgaaaacaaccgtcctgctgtccctgtcaggacacatggattttggcagggcgggggggggttctagaaaatataggttcctataataaaatggcaccttcccccttt

SEQ ID NO: 90313 - DNA, 932 bp, Homo sapiens
aattcggcatgaggtggcagccaaagcccctccctgagagaagcaaaaggtcagatgtctccttttcctctccccttccaccatcctccctccaagcctggcacccaccgtctcggccctgaaccacgaggctgcccccatccagccacggagggaggcaccatgcaaatgtcttccaggtccaaacccttcaactcctggctccgcaggggtttgggtgggggctgtggccctgcccttggcaccaccagggtggaccaggcctggagggcacttcctccacagtcccccacccacctcctgcggctcagccttgcacacccactgccccgtgtgaatgtagcttccacctcatggattgccacagctcaactcgggggcacctggagggatgcccccaggcagccaccagtggacctagcctggatggcccctccttgcaaccaggcagctgagaccagggtcttatctctctgggacctagggggacggggctgacatctacattttttaaaactgaatcttaatcgatgaatgtaaactcgggggtgctggggccagggcagatgtggggatgttttgacatttacaggaggccccggagaaactgaggtatggccatgccctagaccctccccaaggatgaccacacccgaagtcctgtcactgagcacagtcaggggctgggcatcccagcttgcccccgcttagccccgctgagcttggaggaagtatgagtgctgattcaaaccaaagctgcctgtgccatgcccaaggcctaggttatgggtacggcaaccacatgtcccagatcgtctccaattcgaaaacaaccgtcctgctgtccctgtcaggacacatggattttggcagggcgggggggggttctagaaaatataggttcctataataaaatggcaccttcccccttt

SEQ ID NO: 90314 - DNA, 682 bp, Homo sapiens
gaaggcgccatcctgcctgccacaggaagggccttggactgagaggaccggagctgactggggattattcaaagccaaaagccaacagagcccccatggagaagtggaggatgctcagatactgctatggagccctgagaagtgaaatgggtccaagcccttgcccaggatagagcgctccaagcgcatcctccggggacccttttaatcagtgaattgttcacctctcactgtttcttcccagcagagctaagagacttctagagcctcttgtggatggtcagcgatagccctggtatgaccaggaggtggcgatttctgttctaggtccctcagcaaagactaagcaggacaagcctggctactgtgttaggaggagctgtagggaaagggaaggacaagatgggccaccacatgcctgtgtccactgctggccacacccagagtgctaggggtttgtggcagtgactggggccacctagagcagttctagggttcgtagtcattctctctgagtcatggaaaactgcccaggaggcgagtcccacctaagagagtatgtgtagcactggcacggcctgctgccttgcaaatgaccacatttcatgaaagaaagccagggccacagacaggaaccaaaggaaatcagtcacttaggggaagataatgaatccacaaagtg

SEQ ID NO: 90315 - DNA, 339 bp, Homo sapiens
aaggcgccatcctgcctgccacaggaagggccttggactgagaggaccggagctgactgggggtaagtgcggctctcccccggagcctgccgacccccctgagtgatcaggccgatctttggggtggccgctgaccgagaaatgacgggaggctgctgactccgacgttgaaaaaaaaaccacccaacgcctgagcaacaggaggtgtagaacacaccataactttgtcttccatgattattctgtttcctcagaaagcttgaggaaaactggagactttctttagagagagtaacagatggtttccgtttaaagaaaaataacaaaatggcttaagga

SEQ ID NO: 90316 - DNA, 413 bp, Homo sapiens
tttcaccgtgttagccaggatggtcttgatctcctgaccctgtgatccgcccgccttggcctcccaaagtgctgggattacaggcatgagccactgcacccggctgaagcatgggatttttaggcaatgaaactattctgtatgatcctgtaatggtggaaacataacagtataaaaaactcatggaactgtacaacaccaagagtgaaccctaatgtcaactatagacttcagttaattttaatgtatcaatattgtctcatgattgtaacaaatataccacatgaatgtaagatactaataataggggcaactgtcagtgggcgataaagagggtatgtggaactctctgtaagatcttcaaaatttttggaaaaacctaaaattgctctaataaattaagtctgttaatg

SEQ ID NO: 90317 - DNA, 522 bp, Homo sapiens
cgggcaaagaacttgagtggccgtctctccaaagaagatgcacagatggccagtgagcacatgaagagatgcctggcgccatgagtcattagggaagtgcaagtcaaaaccacacacgcgttgggatggctgttaattaaaaaaaaaaaaaagtcaccgtgttggcaaggatgtcgagaaattgaaacctttgtgcgttgtaaaatggtccagcctctttggaaagcatggcagttcgtcagcgagttaaacatagaattatacccccaagattgataagcataaaacccaaaagaatcgaaagtaggagctcagatacaacaatgtccacagcagcatcattcacaagagtgaaaggccggaagcagcccaagcattcatcagcagatgagtggaaaataaaattttcatacaagggaatattattcggccttaaaaaggggttggcagggctcggtggctcacgcctgtaatcctagcactttgggaggccaaggcggacagatcatgaggtcaggagtt

SEQ ID NO: 90318 - DNA, 144 bp, Homo sapiens
tacaatattgctcgagtctttgatttccttttaatcttctgccaaacgttctatccattatcaaaaatgggatattgaagtctccaattatgccagattttgcttctcctagaagcagaaggcatggcaccccacatagggcca

SEQ ID NO: 90319 - DNA, 436 bp, Homo sapiens
gtagactttaagcaagtaccggcttgtattcatctgtttgtcttcaggacctaaccaatgcttggcacagaatcagtaccaagtgaagatttgaaagaaaggaaaagagaagtgcctttaggcactttaaatagttgaagatagcagtactatcccctcaatggctaaacatcttccttcacctggtttcaagttcccttcactcttctctggctgttctgctaatagtcaaggcccctgtgacaagagatttaaatcagtgaagtagccttgtgaaagaggatggtctgttgggagacagaagacctggttttatttaagcccgttttcatgatttcctgtcattcacctcttcaagcctaagttgccgtttttatagaacagagatattggtccttctctcacagggtttctcagggaataaactgagataata

SEQ ID NO: 90320 - DNA, 362 bp, Homo sapiens
tcaccacccactgtacagtgaatgaggccatcttagatcattcagccccaagtaagtcaccaaactgtagccacatgagactgcaggtgagatgagcagaagaaccccctagctgagtccaccttaaaactgccaatccagagaatcataagcaaataaatggttgtctcatgccactaagtttcggggtagtttgttacacagaaagagatgacagaaacacccctataacactcataccacttcttctcccaggtatcttgccactagcacctctttttgggcactttgggggccctcactcctctgcaggtgctcttacattcttggcttgtatcaggggtcaagacctgcttccaaat

SEQ ID NO: 90321 - DNA, 353 bp, Homo sapiens
  misc_feature (262)..(262): n is a, c, g, or t
  misc_feature (351)..(351): n is a, c, g, or t
aagaaagccttttaaaaccccgtgcatttgaagtgtttcttatttataggctttagtatctgcagtgtgacagagacagcatgagagcatcatacctgtgaaaaaggtcttaagatttaagtaagttcaaatgtatctttaatttttagcaggatgctgtcttcacaccctcctaacactccacccctcattgatagcttcctaatattatgttgctgctctgcgaccagcccagtagtcccatttccttccacaccaaaangtgttaaatcaagtatgcaaatggggtccttacactggggtttatgttgtcttgccctttttttagcacaaaaaaattgtacttttttntt

SEQ ID NO: 90322 - DNA, 2589 bp, Homo sapiens
  misc_feature (15)..(16): n is a, c, g, or t
  misc_feature (87)..(87): n is a, c, g, or t
  misc_feature (396)..(396): n is a, c, g, or t
aaggagcaggaaagnnttaaaactgcaggcttctggattatccacccttacagtgatttcaggttttactgggatttaataatgctnataatgatggttggaaatctagtcatcataccagttggaatcacattctttacagagcaaacaacaacaccatggattattttcaatgtggcatcagatacagttttcctattggacctgatcatgaattttaggactgggactgtcaatgaagacagttctgaaatcatcctggaccccaaagtgatcaagatgaattatttaaaaagctggtttgtggttgacttcatctcatccatcccagtggattatatctttcttattgtagaaaaaggaatggattctgaagtttacaagacagccagggcncttcgcattgtgaggtttacaaaaattctcagtctcttgcgtttattacgactttcaaggttaattagatacatacatcaatgggaagagatattccacatgacatatgatctcgccagtgcagtggtgagaatttttaatctcatcggcatgatgctgctcctgtgccactgggatggttgtcttcagttcttagtaccactactgcaggacttcccaccagattgctgggtgtctttaaatgaaatggttaatgattcttggggaaagcagtattcatacgcactcttcaaagctatgagtcacatgctgtgcattgggtatggagcccaagccccagtcagcatgtctgacctctggattaccatgctgagcatgatcgtcggggccacctgctatgccatgtttgtcggccatgccaccgctttaatccagtctctggattcttcgaggcggcagtatcaagagaagtataagcaagtggaacaatacatgtcattccataagttaccagctgatatgcgtcagaagatacatgattactatgaacacagataccaaggcaaaatctttgatgaggaaaatattctcaatgaactcaatgatcctctgagagaggagatagtcaacttcaactgtcggaaactggtggctacaatgcctttatttgctaatgcggatcctaattttgtgactgccatgctgagcaagttgagatttgaggtgtttcaacctggagattatatcatacgagaaggagccgtgggtaaaaaaatgtatttcattcaacacggtgttgctggtgtcattacaaaatccagtaaagaaatgaagctgacagatggctcttactttggagagatttgcctgctgaccaaaggacgtcgtactgccagtgttcgagctgatacatattgtcgtctttactcactttccgtggacaatttcaacgaggtcctggaggaatatccaatgatgaggagagcctttgagacagttgccattgaccgactagatcgaataggaaagaaaaattcaattcttctgcaaaagttccagaaggatctgaacactggtgttttcaacaatcaggagaacgaaatcctcaagcagattgtgaaacatgacagggagatggtgcaggcaatcgctcccatcaattatcctcaaatgacaaccctgaattccacatcgtctactacgaccccgacctcccgcatgaggacacaatctccaccggtgtacacagcgaccagcctgtctcacagcaacctgcactcccccagtcccagcacacagaccccccagccatcagccatcctgtcaccctgctcctacaccaccgcggtctgcagccctcctgtacagagccctctggccgctcgaactttccactatgcctcccccaccgcctcccagctgtcactcatgcaacagcagccgcagcagcaggtacagcagtcccagccgccgcagactcagccacagcagccgtccccgcagccacagacacctggcagctccacgccgaaaaatgaagtgcacaagagcacgcaggcgcttcacaacaccaacctgacccgggaagtcaggccactctccgcctcgcagccctcgctgccccatgaggtgtccactctgatttccagacctcatcccactgtgggcgagtccctggcctccatccctcaacccgtgacggcggtccccggaacgggccttcaggcagggggcaggagcactgtcccgcagcgcgtcaccctcttccgacagatgtcgtcgggagccatccccccgaaccgaggagtccctccagcaccccctccaccagcagctgctcttccaagagaatcttcctcagtcttaaacacagacccagacgcagaaaagccacgatttgcttcaaatttatgatccctgctgattgtcaaagcagaaagaaatactctcataaactgagactatactcagatcttattttattctatctcctgatagatccctctagcctactatgaagagatattttagacagctgtggcctacacgtgaaatgtaaaaatatatatacatatactataaaatatatatctaaattcccaagagagggtcaaaagacctgtttagcattcagtgttatatgtcttcctttctttaaatcattaaaggatttaaaatgtcgttgtaagatta

SEQ ID NO: 90323 - DNA, 382 bp, Homo sapiens
atctccatgtgtttcaaaagtaggaagaacagtaggagcatagtagctggggaagattgatgagagatgctgttggagaagtgggctgagcagaaagcatgtgttatgtagggatttgaaggccaggttgaggaattcagatttaaactgtgaagggaaagtactcaagagcattgtttcaaaattcaagtagtcagggttggatttttcttacgtttctcctacagaaggagaaaacagcatagataatttgtaaatcaaataaatatgttcctatgtaattaggaactatttctgtatacatatgaccctataactgatttctttcctttttttacataattctgcagttaaggaagacagttttttagaattataaaag

SEQ ID NO: 90324 - DNA, 2431 bp, Homo sapiens
tgttttaatgagaatgggcgattcatttaaaaaagctttgtttagaatatgcttggggccgtaagctcagaatgagggcagggaccattttggattctgagagtcgatgccatttggtccaggagtgtgtctacagtcccctgcattccagctagtttcttggggattgaaacttatgtgaagggcatttcacctgttcagttgggccaaaggtcaaaacgtagcaatacttggggaaagaccacataaagtcacactgcaagtgctttccctctttccccctacacacagggcacgtgctttttcttggattgcagacaatttttacagtttttttctgactttattgtgaaagtttgtttcaagcatttcttgatatcatgttatgtactatttttatgatttagtcaacatgcatacaaagaaatgttttttatgaagtgctcacttccattttactttgcattgaaatcaaattgggctgaacacttcaatggaatacattttgtggacaatgtcactttagaatctttcatctcagtgaaggattacacattctcaatacttccataattgcaggttgtgttcatttttttatatagtttttgtaatccaaagaatattttgctagatttgcacagatctccaattgaatttgcaatgaagaaataactcaaaaggaatatgaatagcatttaaataagtatacagctgtaagtaaccctgtcaccatggatgatccttttctctaggaatgtatttggattagagatgacaactacattttcgcatttttatgttgaagtcttttttaaaaaggctgtttacttttcagtagttaagaatacttgtttttctttttcttttttttttttttttaccttttattttttcgttaagcctctattgtttgtagaacactcttagaaacttggaaataaaatgtctttcccaactagtggagtcctttttcatttggagcacattgccttaaaagaagtcttaatttaaacggtccttccttattctaaagtaatcactgttttataccatctatgcagctaaaagaaggaacatgcttctgttcttttcctcaagtaatggttattgtttctagtcatcattcattcattgattcattcattaattcatcaaaatcttattttataaaccctgttccacttactggaggattcagaatgaatcttactaccttttctgacatcttttgataattcagccctgtaccaaagtatccaccttgttgtcttataatcacctatttacctatttgccctcctagaaaatgcaagaagatattttctctccttccaaattgaaggaagaacataaaagatataacaggaaggagatggtgagatatagagtgtgagcggagattaggccagctgtggcaattctggacagatcttgggtttagctaagttatttcttttaggcctgggtttctgggggtgacagggaagataaaagagtagtttatttgcacctcttggagaattgcttaaaaatatagagatcatggctctgtatgtcaggtggaaccaggtcaggagtatttgaaactgctcctgggtcattgtgacatatccttcacatctttttgagaaactttataagacaatgggggtgaatgggggctgggcagttggagtctctgagcaggagcaggggcaaaatttatttggcaggcagtgtggaggacagattaggagcatataaacccagaggtgtgccccaggagggcttttgcaaaggtcaaaatgagatagaatgagggcctgaaataattcagtaatttggagatggagaagaggaaagacttctctgctcttgcactgccatcagcctggtctgggccatggtcatctctgacccggaagactgaccccacctcttggctcaccctctgcctcccaacctcctcttcacaaagaagccagagggatacttttaacacacaacccagatcacatgacttcgtaacttaaacctcttcactggcttcccaaagacttaaaatgaattctgatgcctttattttattgctttacatgaacagggccctgcgaacctctccagtgtcattccactccatcctcctttcagtgcacgatgctccagccacactggccatctttcggttcctgatacaaaaaaaaacacgttccttttccatggaaagcaggtcacccttgttattttgtatcgatgacaactctttaaacttattttgctttttggctttatgtatgtgtgtgggtgggtgggactgactgccccactagaatgtaagctccatgagggcagggaatcttgctttcttgtttaccattgtatactcagttctttacacagtgcctgaaacataacaggtacacaataaatatctattgaatgaaaaaaaata

SEQ ID NO: 90325 - DNA, 954 bp, Homo sapiens
tgttttaatgagaatgggcgattcatttaaaaaagctttgtttagaatatgcttggggccgtaagctcagaatgagggcagggaccattttggattctgagagtcgatgccatttggtccaggagtgtgtctacagtcccctgcattccagctagtttcttggggattgaaacttatgtgaagggcatttcacctgttcagttgggccaaaggtcaaaacgtagcaatacttggggaaagaccacataaagtcacactgcaagtgctttccctctttccccctacacacagggcacgtgctttttcttggattgcagacaatttttacagtttttttctgactttattgtgaaagtttgtttcaagcatttcttgatatcatgttatgtactatttttatgatttagtcaacatgcatacaaagaaatgttttttatgaagtgctcacttccattttactttgcattgaaatcaaattgggctgaacacttcaatggaatacattttgtggacaatgtcactttagaatctttcatctcagtgaaggattacacattctcaatacttccataattgcaggttgtgttcatttttttatatagtttttgtaatccaaagaatattttgctagatttgcacagatctccaattgaatttgcaatgaagaaataactcaaaaggaatatgaatagcatttaaataagtatacagctgtaagtaaccctgtcaccatggatgatccttttctctaggaatgtatttggattagagatgacaactacattttcgcatttttatgttgaagtcttttttaaaaaggctgtttacttttcagtagttaagaatacttgtttttctttttcttttttttttttttttaccttttattttttcgttaagcctctattgtttgtagaacactcttagaaacttggaaataaaatgtctttccca

SEQ ID NO: 90326 - DNA, 1484 bp, Homo sapiens
tggtataaaacagtgattactttagaataaggaaggaccgtttaaattaagacttcttttaaggcaatgtgctcccaatgaaaaagtaatcactgttttataccatctatgcagctaaaagaaggaacatgcttctgttcttttcctcaagtaatggttattgtttctagtcatcattcattcattgattcattcattaattcatcaaaatcttattttataaaccctgttccacttactggaggattcagaatgaatcttactaccttttctgacatcttttgataattcagccctgtaccaaagtatccaccttgttgtcttataatcacctatttacctatttgccctcctagaaaatgcaagaagatattttctctccttccaaattgaaggaagaacataaaagatataacaggaaggagatggtgagatatagagtgtgagcggagattaggccagctgtggcaattctggacagatcttgggtttagctaagttatttcttttaggcctgggtttctgggggtgacagggaagataaaagagtagtttatttgcacctcttggagaattgcttaaaaatatagagatcatggctctgtatgtcaggtggaaccaggtcaggagtatttgaaactgctcctgggtcattgtgacatatccttcacatctttttgagaaactttataagacaatgggggtgaatgggggctgggcagttggagtctctgagcaggagcaggggcaaaatttatttggcaggcagtgtggaggacagattaggagcatataaacccagaggtgtgccccaggagggcttttgcaaaggtcaaaatgagatagaatgagggcctgaaataattcagtaatttggagatggagaagaggaaagacttctctgctcttgcactgccatcagcctggtctgggccatggtcatctctgacccggaagactgaccccacctcttggctcaccctctgcctcccaacctcctcttcacaaagaagccagagggatacttttaacacacaacccagatcacatgacttcgtaacttaaacctcttcactggcttcccaaagacttaaaatgaattctgatgcctttattttattgctttacatgaacagggccctgcgaacctctccagtgtcattccactccatcctcctttcagtgcacgatgctccagccacactggccatctttcggttcctgatacaaaaaaaaacacgttccttttccatggaaagcaggtcacccttgttattttgtatcgatgacaactctttaaacttattttgctttttggctttatgtatgtgtgtgggtgggtgggactgactgccccactagaatgtaagctccatgagggcagggaatcttgctttcttgtttaccattgtatactcagttctttacacagtgcctgaaacataacaggtacacaataaatatctattgaatgaaaaaaaata

SEQ ID NO: 90327 - DNA, 505 bp, Homo sapiens
aagctataaaacagatggatcaaggcaaaacaagaatcccaaagataacctttccatcttttactataactatttaacaggtagggatctgggaatatctttagagatattttccacaaagctgggtgttatctacagactgtcatattggtgggccttgtagaagagcaccatctactggcaaaactctacttttatttcagattcatcctttaaacttactaggtatgggattgaaatacaaaccaagtacagtcatgcgccgcttaatgatagtgctatgttcggagaaatgcattgttaagcagttttgtcatcacacaaatatagagtgtacttatgcaaacctagatggtatagcctactacacatgtaggctatgtggtttagccagcccattgctcccaggctacaaacctgtatagcatgttactgtagtgaatactgtagataattgtaacacagtggtaagtgttgatatatttaaacatacttaagcatggaa

SEQ ID NO: 90328 - DNA, 191 bp, Homo sapiens
  misc_feature (8)..(8): n is a, c, g, or t
ctctaganatccccctcataatgtgcgcccacagcctcacctctcctccttgtcccttgagggtgggcaaggaaacagacagtgaccccagcccctctggccagtgcaagaggctgcagggcctgacattctcatcatggaaagaagacttttttttttttttttttttttttaggagacacagtctccct

SEQ ID NO: 90329 - DNA, 178 bp, Homo sapiens
aggcacttgcagcatcactaatggcacgttgtatgggtcccatggtgttactgaagatttacagtactgcaccaaacatgatgaaaaaacacaagaactgacagagatcccttttttttttttttttttttttttttttttttttttttttttttttttttttttttttttttttttt

SEQ ID NO: 90330 - DNA, 160 bp, Homo sapiens
ggcaaagctgcccctcacagagtgtttctatcgtttctcttcctcctccacctggtgaacccctacacatactccatggtccagttcaaatgctaccacgtgtataatgccctctcctacccacagagtcggggtaacttatcattccctcacctcactc

SEQ ID NO: 90331 - DNA, 507 bp, Homo sapiens
tgagacggagtttgctttgttgccaggctggagtgcagtggcgtgatctgggttcactgcaatctctgcctcccaggttcaagcgattctcctgcctcagcctcctgagtagcttgaattacaggtgcatgccaccacacccagctgatttttgtatttttagtagagacggggtttcaccatgttgaccaggatggtctcgatctcctgacctcgtgatccgcccacctcagcctcccaaagtgctgggattataggtgtgaaccaccgtggctggcctcaccagctattttttcatggttctacgactttgtggttgtccaacctgggcaagtaaacctctttgagtctcagtttcctcaaacataagagccatctttagagaattgttcgagctttaagaaagtaatattaagaaaagtgcctggggcataataaggactcaaggaaagttagctattctattgccattcttcaagcttgctgtcattcactgtcattattact

SEQ ID NO: 90332 - DNA, 310 bp, Homo sapiens
tcccactaggacccacctcccaacactactgtgttggggatcaaggcttcaggagtttggttgggaacatcccacatcccagctatagtgaggctgcactgagctgagcaggaaagcctcaaaggcctggtctgtcatgaggaccttgtaaactcagctctccacagtcccagtgaggtgcagaaagagaccccagcctagcaacgtcaccaggtacctgtcaacttccttcatatatggaacctgcaggcttctcaggaagctcatggagtgggcagctgtccagtcaggggtgggaggagcccaggta

SEQ ID NO: 90333 - DNA, 156 bp, Homo sapiens
aagcccccgtcctgagtctgacacatggagagggctaggccatcatgaatgtcctttaaacagaaacattccccatatccccttttcccacattggttgacatgccgtagcgcaataatctcacaaacttgattatcccagaattaagctatgcag

SEQ ID NO: 90334 - DNA, 417 bp, Homo sapiens
gaaactttgagagtagctatttagacttcataatgtaagcatcataaacactactcctcattgatgctgaaaaccattactaaatttttgagttcttattacattcacttttgtatattttcttatttaatttttgtaacaatcagataagcaaagagaagcacagagacttagccacaatcccagtgagtggtatcagagcccggtacatttaaattcaatgatttcttgttgaactacttccattctttttggttactccaaatagccaggactagcccctgtataagattatctatcagaggttgttaagcctgataccttgttatgctgaggtcttttccccttgagaagaggacttaacaatggattggccacaggtgacaagggaaacaattcagcaaatgtaaatcacca

SEQ ID NO: 90335 - DNA, 494 bp, Homo sapiens
gtgagttgctaaaagcagccttcattagggcttcttgatgccctggcaagatgtcactctgaacagatagaatatcagcacccttcagaattcaccttccaagaggaaatttaggcaacttgagaggcatcgctcactgaataactcacaccctcttctgaaaatgtagcctttgagcttatctcagtaaaagataatgcctctacaatttaggtaacagagtgttgatgttcactcaaacccgttcttctgttggaccactacaagagattaagtaaattgatcaaggttacgtgacagaatttgaacccaggtctgtaggtcttgacttcaacccatgatcagttaggttgatcctgttagtggggagacttccctctaaggccagctgtctgttttatagaagcagatttgtgaaatgcatcagtgcatgtattagtcctttttcacactgctataaagacctcctgagactggataatttataaaggaag

SEQ ID NO: 90336 - DNA, 520 bp, Homo sapiens
ctaaagataaattttaatctggaataacggaaacttatatataacttcacataaatttatgcatacatgtacatatactttttaaaggcacaatgatggaaaacattaaatatagccataaaaattaagaagaatatagatctaggataaaacagggcaacaagccaataaaagcaagtagatggtccaaatatagaacctacattataaaatataacaatttataatttactaataatgttggggcaattaacaatgaggaagaataaatttaattctcttttcatacaatatgcccaagtaaattcaataatcactaaagcatatttttaaaactccagaataaaacactaatgtttacagagggttagattttgtagggttggaagaaaatagaaggattgaaatatataaaaattgaaacattttcaaaaaataaagaaaataccaaagagggaaaatcatttgcagccaagatgacaacaaagaattaatatctttattatgcaaagagatggtt

SEQ ID NO: 90337 - DNA, 599 bp, Homo sapiens
gaggcaggatctcattaggttgacaaggctggacctgaactcctgggctcaagtgatcctcctacctcagcctcccatatagctgagattatagatgtggatcaccatgcctgactagttttctttctttagtagtcaataaggaatacagacttagtagtagtgcctattaattataatttgaggttcataaaacagcctatatcccttatcagcaagtgataacactcaggtaaaatgttaaatatctttatataatccccactagaatgtaaacttcataaaggtagggtctttgtttactgctgcattcccagtacttataacagtgagttattagataataggtaatttataaatatttattgagttaatcttccagccatccctgaattcagcattgtattcacgactctttggaatcaacaaggtttcctagtttagcggagaaacaataatagaataatcttggctattttaaagatttggaatattaaattggaaggagggcaatgattatgtaaatgtatgtattaagggactaatgagaggtgatatatatatctcaacagtagaaagtaaaaatggtgactaaaaaa

SEQ ID NO: 90338 - DNA, 486 bp, Homo sapiens
aggtggagaactgacataatattcgtattggaagatcattttgtatatcagctatctattgctgtgtaacaaaccaccccaagcttaatggtataaagttacaatgatgcttattagtcttctcacaacactggaggctgacgagactcacgtaggcagtactgcctttgtatgtcttatgtggttgccttcaaacagtatgcagttagaatagtctcaatggtttccttgctcaaatatctcctggttaatatgggctgttagctagggcctcagctggggctatctggtggaacacccacacatcacctccatacgtggcctgggctttctcacaaaatggtgaatgggttctaagtgcatccatcccaggaaggacagccaagtggaaacagtgtcatcttttatgacctaactttggtagatcatgtgcaacacttccactgtattccaattatagaagcaggggactaagttcatattcaa

SEQ ID NO: 90339 - DNA, 451 bp, Homo sapiens
ataagaaaaagaatagatcaaagaaaatcttgatttcagattctttgggatatcaactcatcactgctgttttctagaacccacaatctttaaactttaacacaattggggaatctctaaacaaaagatggcatgagccactgcgcccagccccccacccctttttaaaaactcctattctctgtagaaatttggtatggattagcttttttttatttttgaaacagggtcttgttctgttgccaaggttggagtgcagtgtcacaatcatggcccactgcagccttgatctcccagactcgagcaatcctcccacctcagccttccaagtagccggcactacaggcgggtgccttcacaccctgctaagttttttgattttttgagagataaagaaagtctcactgtgttgcccaggctggtctcaaactcctgagctcaagtgttcctc

SEQ ID NO: 90340 - DNA, 515 bp, Homo sapiens
acacacacacacactcacggccttgactccacagccttcactcctgactggacctcctctgaacagaggcttcctgtgctatggaatgcgattcctgctggctgaggagaagtggctttcaggccgctgggcaggggcgcctcttacttcactgagtgtggctgccaccacttcagcagcttctcctcctctcctgctaccccgaacacctcaaccccagcctgagtcccgctgcctctatttcctgttacctcagagggctcagctgccaaccaagacgcctgcgggtggcctcagctcctgagtgctggacaccctgtgacttaaaccccctaatacctcagcaccaaacatgcacggagcgctttggctgtccagggaaagcagggcagaagccggggagcacagattttggagccacacagggtcaaatactcagtctgccccgtcctagctgagtcactgaaagcaagttgcccaacctgtctgaacctcagtgtgctcgtctgcaaaat

SEQ ID NO: 90341 - DNA, 1152 bp, Homo sapiens
ctgacatggcaccctgggggtcatgccttagggaaagctgcttccactcgcccctgttttagctcatccagcctggtcaacaagagtaaaacttcatctcaaaaaacaaaacaaaacaaaaacaacaacaaaaaacaaaagaaaaacaaacaaaaccaaaaccaaaacagctgtattgaagctgcagtgttgcagctctgtgactgccctgcagagcagggctaccccataggcagcgagcagcagctcagggcagttctgcagtcagatttatacccacttttaattacatgtagattaaggagctgcatatacaaagatttctagggaaggagtagtaacttctgggtcctggggtctttgccacggaacagggcagtatgccagggtgttgccacggccatggtaaaaaaaaaaaaaaaaacaatcccaagggtacagaagagcttatgaataaaagtagttttctcctctacccctctcattccttccgtgccatggttttaattgaccctgtttttaattcttctggtagttttctctatttccaagtaatctgtttaaatcagtttctagattttaccccatgtcaatgacaaatgaggatttgatgctctgatcctttctcatgcctgatacccctccctgtctccccattttggatagttacatttgggggtcatctcggtgatttttgtaactttacgcaggacacttagagctctctagaatcccactgactttagtgggtcttgatgtagggtgggcaagccccgacactggagcttagcctgagagggttcttggcctcccccaggaaagatttcaaaggcaagcgccagtggtagggtagaagaaaacagctgtggtcgggcacggtggctcacgcctataatcccagcactttgggaggccgaggcgggtggatcacctgaggtcaggagttccagaccagcctggccaacatggtgaaacctcatctctactaaaaatacaaaaaaactagctgggcgtggtggcgggcgcctataatcccagctacttgggaggctgaggcaggagaattgattgaacctgggaggcggaggttgcagtgagccaagatcacgtcattgcactccagcctggtcaacaagagtaaaacttcatctc

SEQ ID NO: 90342 - DNA, 2907 bp, Homo sapiens
gctagtagagcccgggtgtttaatcggccatggatgccgctctgctcctgaacgtggaaggggtcaagaaaaccattctgcacgggggcacgggcgagctcccaaacttcatcaccggatcccgagtgatctttcatttccgcaccatgaaatgtgatgaggagcggacagtcattgacgacagtcggcaggtgggccagcccatgcacatcatcatcggaaacatgttcaagctcgaggtctgggagatcctgcttacctccatgcgggtgcacgaggtggccgagttctggtgcgacaccatccacacgggggtctaccccatcctgtcccggagcctgaggcagatggcccagggcaaggaccccacagagtggcacgtgcacacgtgcgggctggccaacatgttcgcctaccacacgctgggctacgaggacctggacgagctgcagaaggagcctcagcctctggtctttgtgatcgagctgctgcaggttgatgccccgagtgattaccagagggagacctggaacctgagcaatcatgagaagatgaaggcggtgcccgtcctccacggagagggaaatcggctcttcaagctgggccgctacgaggaggcctcttccaagtaccaggaggccatcatctgcctaaggaacctgcagaccaaggagaagccgtgggaggtgcagtggctgaagctggagaagatgatcaatactctgatcctcaactactgccagtgcctgctgaagaaggaggagtactatgaggtgctggagcacaccagtgatattctccggcaccacccaggcatcgtgaaggcctactacgtgcgtgcccgggctcacgcagaggtgtggaatgaggccgaggccaaggcggacctccagaaagtgctggagctggagccgtccatgcagaaggcggtgcgcagggagctgaggctgctggagaaccgcatggcggagaagcaggaggaggagcggctgcgctgccggaacatgctgagccagggtgccacgcagcctcccgcagagccacccacagagccacccgcacagtcatccacagagccacctgcagagccacccacagcaccatctgcagagctgtccgcagggccccctgcagagccagccacagagccacccccgtccccagggcactcgctgcagcactgagccccctgaggcccacagccacccaggcagggagcaagtggcctggtcacttctggttcgattgaccaggatcgtggtgtcactttttaaaatttaaaattaatttttgaaatcaaagtcagacacacccatggtaaaaaaaaaaaaaaaaacaatcccaagggtacagaagagcttatgaataaaagtagttttctcctctacccctctcattccttccgtgccatggttttaattgaccctgtttttaattcttctggtagttttctctatttccaagtaatctgtttaaatcagtttctagattttaccccatgtcaatgacaaatgaggatttgatgctctgatcctttctcatgcctgatacccctccctgtctccccattttggatagttacatttgggggtcatctcggtgatttttgtaactttacgcaggacacttagagctctctagaatcccactgactttagtgggtcttgatgtagggtgggcaagccccgacactggagcttagcctgagagggttcttggcctcccccaggaaagatttcaaaggcaagcgccagtggtagggtagaagaaaacagctgtggtcgggcacggtggctcacgcctataatcccagcactttgggaggccgaggcgggtggatcacctgaggtcaggagttccagaccagcctggccaacatggtgaaacctcatctctactaaaaatacaaaaaaactagctgggcgtggtggcgggcgcctataatcccagctacttgggaggctgaggcaggagaattgattgaacctgggaggcggaggttgcagtgagccaagatcacgtcattgcactccagcctggtcaacaagagtaaaacttcatctcaaaaaacaaaacaaaacaaaaacaacaacaaaaaacaaaagaaaaacaaacaaaaccaaaaccaaaacagctgtattgaagctgcagtgttgcagctctgtgactgccctgcagagcagggctaccccataggcagcgagcagcagctcagggcagttctgcagtcagatttatacccacttttaattacatgtagattaaggagctgcatatacaaagatttctagggaaggagtagtaacttctgggtcctggggtctttgccacggaacagggcagtatgccagggtgttgccacggcaatggtaaactgacatggcaccctgggggtcatgccttagggaaagccgcttccactcgcccctgttttagctcatcttcaagttagtctggtgtccaagctccaccgcctgcctcagtctggtgacctccttctgtgtctgatgagcatggcagcgttgggaccttccccttccaactctctccctcctcttcgtcctccctaaaggacgggtacgaggaggggctatcacgccagcgacatcctctagcaccacccaggtgtgtggggtggggcaggggggcgacgaagtatccagcccagggccacgtagtcaactgccaagggcttcctgggcttctcttctgccccagagcttgtctccacccagcaggggttcccccagcgctaactgtatccctaaagttctgatgtactttacttttccatcttccttgttgttaacatctaccttctgctctgtaagcaaaactaaatcttctgtgctttgtccataggttgattctacaatctgaaaatcaataaacagcatttgcatgatt

SEQ ID NO: 90343 - DNA, 1093 bp, Homo sapiens
aaaaaagcggccgctgaattctagaaaaaaaagcggccgctgaattctagaaagaatttcatcaaaattaacatacacaattttcactcataatttaaaatattttgatgaaattctttgctttcacctagaattcagcggccgctgaattctagggacacctccctttctcctgcagccatggatgccgctctgctcctgaacgtggaaggggtcaagaaaaccattctgcacgggggcacgggcgagctcccaaacttcatcaccggatcccgagtgatctttcatttccgcaccatgaaatgtgatgaggagcggacagtcattgacgacagtcggcaggtgggccagcccatgcacatcatcatcggaaacatgttcaagctcgaggtctgggagatcctgcttacctccatgcgggtgcacgaggtggccgagttctggtgcgacaccatccacacgggggtctaccccatcctgtcccggagcctgaggcagatggcccagggcaaggaccccacagagtggcacgtgcacacgtgcgggctggccaacatgttcgcctaccacacgctgggctacgaggacctggacgagctgcagaaggagcctcagcctctggtctttgtgatcgagctgctgcaggttgatgccccgagtgattaccagagggagacctggaacctgagcaatcatgagaagatgaaggcggtgcccgtcctccacggagagggaaatcggctcttcaagctgggccgctacgaggaggcctcttccaagtaccaggaggccatcatctgcctaaggaacctgcagaccaaggagaagccgtgggaggtgcagtggctgaagctggagaagatgatcaatactctgatcctcaactactgccagtgcctgctgaagaaggaggagtactatgaggtgctggagcacaccagtgatattctccggcaccacccaggtgcgcggggctgcaggggcggacagtgagggggcgcccagcccagggccacggagacacctgccatagccttcctggacttttctttccaccccaccagggcaccaaaccttgtctccacccagccgg

SEQ ID NO: 90344 - DNA, 2869 bp, Homo sapiens
aaaaaagcggccgctgaattctagaaaaaaaagcggccgctgaattctagaaagaatttcatcaaaattaacatacacaattttcactcataatttaaaatattttgatgaaattctttgctttcacctagaattcagcggccgctgaattctagggacacctccctttctcctgcagccatggatgccgctctgctcctgaacgtggaaggggtcaagaaaaccattctgcacgggggcacgggcgagctcccaaacttcatcaccggatcccgagtgatctttcatttccgcaccatgaaatgtgatgaggagcggacagtcattgacgacagtcggcaggtgggccagcccatgcacatcatcatcggaaacatgttcaagctcgaggtctgggagatcctgcttacctccatgcgggtgcacgaggtggccgagttctggtgcgacaccatcgttgatgccccgagtgattaccagagggagacctggaacctgagcaatcatgagaagatgaaggcggtgcccgtcctccacggagagggaaatcggctcttcaagctgggccgctacgaggaggcctcttccaagtaccaggaggccatcatctgcctaaggaacctgcagaccaaggagaagccgtgggaggtgcagtggctgaagctggagaagatgatcaatactctgatcctcaactactgccagtgcctgctgaagaaggaggagtactatgaggtgctggagcacaccagtgatattctccggcaccacccaggcatcgtgaaggcctactacgtgcgtgcccgggctcacgcagaggtgtggaatgaggccgaggccaaggcggacctccagaaagtgctggagctggagccgtccatgcagaaggcggtgcgcagggagctgaggctgctggagaaccgcatggcggagaagcaggaggaggagcggctgcgctgccggaacatgctgagccagggtgccacgcagcctcccgcagagccacccacagagccacccgcacagtcatccacagagccacctgcagagccacccacagcaccatctgcagagctgtccgcagggccccctgcagagccagccacagagccacccccgtccccagggcactcgctgcagcactgagccccctgaggcccacagccacccaggcagggagcaagtggcctggtcacttctggttcgattgaccaggatcgtggtgtcactttttaaaatttaaaattaatttttgaaatcaaagtcagacacacccatggtaaaaaaaaaaaaaaaaacaatcccaagggtacagaagagcttatgaataaaagtagttttctcctctacccctctcattccttccgtgccatggttttaattgaccctgtttttaattcttctggtagttttctctatttccaagtaatctgtttaaatcagtttctagattttaccccatgtcaatgacaaatgaggatttgatgctctgatcctttctcatgcctgatacccctccctgtctccccattttggatagttacatttgggggtcatctcggtgatttttgtaactttacgcaggacacttagagctctctagaatcccactgactttagtgggtcttgatgtagggtgggcaagccccgacactggagcttagcctgagagggttcttggcctcccccaggaaagatttcaaaggcaagcgccagtggtagggtagaagaaaacagctgtggtcgggcacggtggctcacgcctataatcccagcactttgggaggccgaggcgggtggatcacctgaggtcaggagttccagaccagcctggccaacatggtgaaacctcatctctactaaaaatacaaaaaaactagctgggcgtggtggcgggcgcctataatcccagctacttgggaggctgaggcaggagaattgattgaacctgggaggcggaggttgcagtgagccaagatcacgtcattgcactccagcctggtcaacaagagtaaaacttcatctcaaaaaacaaaacaaaacaaaaacaacaacaaaaaacaaaagaaaaacaaacaaaaccaaaaccaaaacagctgtattgaagctgcagtgttgcagctctgtgactgccctgcagagcagggctaccccataggcagcgagcagcagctcagggcagttctgcagtcagatttatacccacttttaattacatgtagattaaggagctgcatatacaaagatttctagggaaggagtagtaacttctgggtcctggggtctttgccacggaacagggcagtatgccagggtgttgccacggcaatggtaaactgacatggcaccctgggggtcatgccttagggaaagccgcttccactcgcccctgttttagctcatcttcaagttagtctggtgtccaagctccaccgcctgcctcagtctggtgacctccttctgtgtctgatgagcatggcagcgttgggaccttccccttccaactctctccctcctcttcgtcctccctaaaggacgggtacgaggaggggctatcacgccagcgacatcctctagcaccacccaggtgtgtggggtggggcaggggggcgacgaagtatccagcccagggccacgtagtcaactgccaagggcttcctgggcttctcttctgccccagagcttgtctccacccagcaggggttcccccagcgctaactgtatccctaaagttctgatgtactttacttttccatcttccttgttgttaacatctaccttctgctctgtaagcaaaactaaatcttctgtgctttgtccataggttgattctacaatctgaaaatcaataaacagcatttgcatgatt

SEQ ID NO: 90345 - DNA, 1995 bp, Homo sapiens
ctgacatggcaccctgggggtcatgccttagggaaagctgcttccactcgcccctgttttagctcatccagcctggtcaacaagagtaaaacttcatctcaaaaaacaaaacaaaacaaaaacaacaacaaaaaacaaaagaaaaacaaacaaaaccaaaaccaaaacagctgtattgaagctgcagtgttgcagctctgtgactgccctgcagagcagggctaccccataggcagcgagcagcagctcagggcagttctgcagtcagatttatacccacttttaattacatgtagattaaggagctgcatatacaaagatttctagggaaggagtagtaacttctgggtcctggggtctttgccacggaacagggcagtatgccagggtgttgccacggccatggtaaaaaaaaaaaaaaaaacaatcccaagggtacagaagagcttatgaataaaagtagttttctcctctacccctctcattccttccgtgccatggttttaattgaccctgtttttaattcttctggtagttttctctatttccaagtaatctgtttaaatcagtttctagattttaccccatgtcaatgacaaatgaggatttgatgctctgatcctttctcatgcctgatacccctccctgtctccccattttggatagttacatttgggggtcatctcggtgatttttgtaactttacgcaggacacttagagctctctagaatcccactgactttagtgggtcttgatgtagggtgggcaagccccgacactggagcttagcctgagagggttcttggcctcccccaggaaagatttcaaaggcaagcgccagtggtagggtagaagaaaacagctgtggtcgggcacggtggctcacgcctataatcccagcactttgggaggccgaggcgggtggatcacctgaggtcaggagttccagaccagcctggccaacatggtgaaacctcatctctactaaaaatacaaaaaaactagctgggcgtggtggcgggcgcctataatcccagctacttgggaggctgaggcaggagaattgattgaacctgggaggcggaggttgcagtgagccaagatcacgtcattgcactccagcctggtcaacaagagtaaaacttcatctcaaaaaacaaaacaaaacaaaaacaacaacaaaaaacaaaagaaaaacaaacaaaaccaaaaccaaaacagctgtattgaagctgcagtgttgcagctctgtgactgccctgcagagcagggctaccccataggcagcgagcagcagctcagggcagttctgcagtcagatttatacccacttttaattacatgtagattaaggagctgcatatacaaagatttctagggaaggagtagtaacttctgggtcctggggtctttgccacggaacagggcagtatgccagggtgttgccacggcaatggtaaactgacatggcaccctgggggtcatgccttagggaaagccgcttccactcgcccctgttttagctcatcttcaagttagtctggtgtccaagctccaccgcctgcctcagtctggtgacctccttctgtgtctgatgagcatggcagcgttgggaccttccccttccaactctctccctcctcttcgtcctccctaaaggacgggtacgaggaggggctatcacgccagcgacatcctctagcaccacccaggtgtgtggggtggggcaggggggcgacgaagtatccagcccagggccacgtagtcaactgccaagggcttcctgggcttctcttctgccccagagcttgtctccacccagcaggggttcccccagcgctaactgtatccctaaagttctgatgtactttacttttccatcttccttgttgttaacatctaccttctgctctgtaagcaaaactaaatcttctgtgctttgtccataggttgattctacaatctgaaaatcaataaacagcatttgcatgatt

SEQ ID NO: 90346 - DNA, 3058 bp, Homo sapiens
aaaaaagcggccgctgaattctagaaaaaaaagcggccgctgaattctagaaagaatttcatcaaaattaacatacacaattttcactcataatttaaaatattttgatgaaattctttgctttcacctagaattcagcggccgctgaattctagggacacctccctttctcctgcagccatggatgccgctctgctcctgaacgtggaaggggtcaagaaaaccattctgcacgggggcacgggcgagctcccaaacttcatcaccggatcccgagtgatctttcatttccgcaccatgaaatgtgatgaggagcggacagtcattgacgacagtcggcaggtgggccagcccatgcacatcatcatcggaaacatgttcaagctcgaggtctgggagatcctgcttacctccatgcgggtgcacgaggtggccgagttctggtgcgacaccatccacacgggggtctaccccatcctgtcccggagcctgaggcagatggcccagggcaaggaccccacagagtggcacgtgcacacgtgcgggctggccaacatgttcgcctaccacacgctgggctacgaggacctggacgagctgcagaaggagcctcagcctctggtctttgtgatcgagctgctgcaggttgatgccccgagtgattaccagagggagacctggaacctgagcaatcatgagaagatgaaggcggtgcccgtcctccacggagagggaaatcggctcttcaagctgggccgctacgaggaggcctcttccaagtaccaggaggccatcatctgcctaaggaacctgcagaccaaggagaagccgtgggaggtgcagtggctgaagctggagaagatgatcaatactctgatcctcaactactgccagtgcctgctgaagaaggaggagtactatgaggtgctggagcacaccagtgatattctccggcaccacccaggcatcgtgaaggcctactacgtgcgtgcccgggctcacgcagaggtgtggaatgaggccgaggccaaggcggacctccagaaagtgctggagctggagccgtccatgcagaaggcggtgcgcagggagctgaggctgctggagaaccgcatggcggagaagcaggaggaggagcggctgcgctgccggaacatgctgagccagggtgccacgcagcctcccgcagagccacccacagagccacccgcacagtcatccacagagccacctgcagagccacccacagcaccatctgcagagctgtccgcagggccccctgcagagccagccacagagccacccccgtccccagggcactcgctgcagcactgagccccctgaggcccacagccacccaggcagggagcaagtggcctggtcacttctggttcgattgaccaggatcgtggtgtcactttttaaaatttaaaattaatttttgaaatcaaagtcagacacacccatggtaaaaaaaaaaaaaaaaacaatcccaagggtacagaagagcttatgaataaaagtagttttctcctctacccctctcattccttccgtgccatggttttaattgaccctgtttttaattcttctggtagttttctctatttccaagtaatctgtttaaatcagtttctagattttaccccatgtcaatgacaaatgaggatttgatgctctgatcctttctcatgcctgatacccctccctgtctccccattttggatagttacatttgggggtcatctcggtgatttttgtaactttacgcaggacacttagagctctctagaatcccactgactttagtgggtcttgatgtagggtgggcaagccccgacactggagcttagcctgagagggttcttggcctcccccaggaaagatttcaaaggcaagcgccagtggtagggtagaagaaaacagctgtggtcgggcacggtggctcacgcctataatcccagcactttgggaggccgaggcgggtggatcacctgaggtcaggagttccagaccagcctggccaacatggtgaaacctcatctctactaaaaatacaaaaaaactagctgggcgtggtggcgggcgcctataatcccagctacttgggaggctgaggcaggagaattgattgaacctgggaggcggaggttgcagtgagccaagatcacgtcattgcactccagcctggtcaacaagagtaaaacttcatctcaaaaaacaaaacaaaacaaaaacaacaacaaaaaacaaaagaaaaacaaacaaaaccaaaaccaaaacagctgtattgaagctgcagtgttgcagctctgtgactgccctgcagagcagggctaccccataggcagcgagcagcagctcagggcagttctgcagtcagatttatacccacttttaattacatgtagattaaggagctgcatatacaaagatttctagggaaggagtagtaacttctgggtcctggggtctttgccacggaacagggcagtatgccagggtgttgccacggcaatggtaaactgacatggcaccctgggggtcatgccttagggaaagccgcttccactcgcccctgttttagctcatcttcaagttagtctggtgtccaagctccaccgcctgcctcagtctggtgacctccttctgtgtctgatgagcatggcagcgttgggaccttccccttccaactctctccctcctcttcgtcctccctaaaggacgggtacgaggaggggctatcacgccagcgacatcctctagcaccacccaggtgtgtggggtggggcaggggggcgacgaagtatccagcccagggccacgtagtcaactgccaagggcttcctgggcttctcttctgccccagagcttgtctccacccagcaggggttcccccagcgctaactgtatccctaaagttctgatgtactttacttttccatcttccttgttgttaacatctaccttctgctctgtaagcaaaactaaatcttctgtgctttgtccataggttgattctacaatctgaaaatcaataaacagcatttgcatgatt

SEQ ID NO: 90347 - DNA, 2923 bp, Homo sapiens
aacggctaggtacgaggctgggtgtgtaatcggccgagggcagccatggatgccgctctgctcctgaacgtggaaggggtcaagaaaaccattctgcacgggggcacgggcgagctcccaaacttcatcaccggatcccgagtgatctttcatttccgcaccatgaaatgtgatgaggagcggacagtcattgacgacagtcggcaggtgggccagcccatgcacatcatcatcggaaacatgttcaagctcgaggtctgggagatcctgcttacctccatgcgggtgcacgaggtggccgagttctggtgcgacaccatccacacgggggtctaccccatcctgtcccggagcctgaggcagatggcccagggcaaggaccccacagagtggcacgtgcacacgtgcgggctggccaacatgttcgcctaccacacgctgggctacgaggacctggacgagctgcagaaggagcctcagcctctggtctttgtgatcgagctgctgcaggttgatgccccgagtgattaccagagggagacctggaacctgagcaatcatgagaagatgaaggcggtgcccgtcctccacggagagggaaatcggctcttcaagctgggccgctacgaggaggcctcttccaagtaccaggaggccatcatctgcctaaggaacctgcagaccaaggagaagccgtgggaggtgcagtggctgaagctggagaagatgatcaatactctgatcctcaactactgccagtgcctgctgaagaaggaggagtactatgaggtgctggagcacaccagtgatattctccggcaccacccaggcatcgtgaaggcctactacgtgcgtgcccgggctcacgcagaggtgtggaatgaggccgaggccaaggcggacctccagaaagtgctggagctggagccgtccatgcagaaggcggtgcgcagggagctgaggctgctggagaaccgcatggcggagaagcaggaggaggagcggctgcgctgccggaacatgctgagccagggtgccacgcagcctcccgcagagccacccacagagccacccgcacagtcatccacagagccacctgcagagccacccacagcaccatctgcagagctgtccgcagggccccctgcagagccagccacagagccacccccgtccccagggcactcgctgcagcactgagccccctgaggcccacagccacccaggcagggagcaagtggcctggtcacttctggttcgattgaccaggatcgtggtgtcactttttaaaatttaaaattaatttttgaaatcaaagtcagacacacccatggtaaaaaaaaaaaaaaaaacaatcccaagggtacagaagagcttatgaataaaagtagttttctcctctacccctctcattccttccgtgccatggttttaattgaccctgtttttaattcttctggtagttttctctatttccaagtaatctgtttaaatcagtttctagattttaccccatgtcaatgacaaatgaggatttgatgctctgatcctttctcatgcctgatacccctccctgtctccccattttggatagttacatttgggggtcatctcggtgatttttgtaactttacgcaggacacttagagctctctagaatcccactgactttagtgggtcttgatgtagggtgggcaagccccgacactggagcttagcctgagagggttcttggcctcccccaggaaagatttcaaaggcaagcgccagtggtagggtagaagaaaacagctgtggtcgggcacggtggctcacgcctataatcccagcactttgggaggccgaggcgggtggatcacctgaggtcaggagttccagaccagcctggccaacatggtgaaacctcatctctactaaaaatacaaaaaaactagctgggcgtggtggcgggcgcctataatcccagctacttgggaggctgaggcaggagaattgattgaacctgggaggcggaggttgcagtgagccaagatcacgtcattgcactccagcctggtcaacaagagtaaaacttcatctcaaaaaacaaaacaaaacaaaaacaacaacaaaaaacaaaagaaaaacaaacaaaaccaaaaccaaaacagctgtattgaagctgcagtgttgcagctctgtgactgccctgcagagcagggctaccccataggcagcgagcagcagctcagggcagttctgcagtcagatttatacccacttttaattacatgtagattaaggagctgcatatacaaagatttctagggaaggagtagtaacttctgggtcctggggtctttgccacggaacagggcagtatgccagggtgttgccacggcaatggtaaactgacatggcaccctgggggtcatgccttagggaaagccgcttccactcgcccctgttttagctcatcttcaagttagtctggtgtccaagctccaccgcctgcctcagtctggtgacctccttctgtgtctgatgagcatggcagcgttgggaccttccccttccaactctctccctcctcttcgtcctccctaaaggacgggtacgaggaggggctatcacgccagcgacatcctctagcaccacccaggtgtgtggggtggggcaggggggcgacgaagtatccagcccagggccacgtagtcaactgccaagggcttcctgggcttctcttctgccccagagcttgtctccacccagcaggggttcccccagcgctaactgtatccctaaagttctgatgtactttacttttccatcttccttgttgttaacatctaccttctgctctgtaagcaaaactaaatcttctgtgctttgtccataggttgattctacaatctgaaaatcaataaacagcatttgcatgatt

SEQ ID NO: 90348 - DNA, 3034 bp, Homo sapiens
aaaaaagcggccgctgaattctagaaaaaaaagcggccgctgaattctagaaagaatttcatcaaaattaacatacacaattttcactcataatttaaaatattttgatgaaattctttgctttcacctagaattcagcggccgctgaattctagggacacctccctttctcctgcagccatggatgccgctctgctcctgaacgtggaaggggtcaagaaaaccattctgcacgggggcacgggcgagctcccaaacttcatcaccggatcccgaaaatgtgatgaggagcggacagtcattgacgacagtcggcaggtgggccagcccatgcacatcatcatcggaaacatgttcaagctcgaggtctgggagatcctgcttacctccatgcgggtgcacgaggtggccgagttctggtgcgacaccatccacacgggggtctaccccatcctgtcccggagcctgaggcagatggcccagggcaaggaccccacagagtggcacgtgcacacgtgcgggctggccaacatgttcgcctaccacacgctgggctacgaggacctggacgagctgcagaaggagcctcagcctctggtctttgtgatcgagctgctgcaggttgatgccccgagtgattaccagagggagacctggaacctgagcaatcatgagaagatgaaggcggtgcccgtcctccacggagagggaaatcggctcttcaagctgggccgctacgaggaggcctcttccaagtaccaggaggccatcatctgcctaaggaacctgcagaccaaggagaagccgtgggaggtgcagtggctgaagctggagaagatgatcaatactctgatcctcaactactgccagtgcctgctgaagaaggaggagtactatgaggtgctggagcacaccagtgatattctccggcaccacccaggcatcgtgaaggcctactacgtgcgtgcccgggctcacgcagaggtgtggaatgaggccgaggccaaggcggacctccagaaagtgctggagctggagccgtccatgcagaaggcggtgcgcagggagctgaggctgctggagaaccgcatggcggagaagcaggaggaggagcggctgcgctgccggaacatgctgagccagggtgccacgcagcctcccgcagagccacccacagagccacccgcacagtcatccacagagccacctgcagagccacccacagcaccatctgcagagctgtccgcagggccccctgcagagccagccacagagccacccccgtccccagggcactcgctgcagcactgagccccctgaggcccacagccacccaggcagggagcaagtggcctggtcacttctggttcgattgaccaggatcgtggtgtcactttttaaaatttaaaattaatttttgaaatcaaagtcagacacacccatggtaaaaaaaaaaaaaaaaacaatcccaagggtacagaagagcttatgaataaaagtagttttctcctctacccctctcattccttccgtgccatggttttaattgaccctgtttttaattcttctggtagttttctctatttccaagtaatctgtttaaatcagtttctagattttaccccatgtcaatgacaaatgaggatttgatgctctgatcctttctcatgcctgatacccctccctgtctccccattttggatagttacatttgggggtcatctcggtgatttttgtaactttacgcaggacacttagagctctctagaatcccactgactttagtgggtcttgatgtagggtgggcaagccccgacactggagcttagcctgagagggttcttggcctcccccaggaaagatttcaaaggcaagcgccagtggtagggtagaagaaaacagctgtggtcgggcacggtggctcacgcctataatcccagcactttgggaggccgaggcgggtggatcacctgaggtcaggagttccagaccagcctggccaacatggtgaaacctcatctctactaaaaatacaaaaaaactagctgggcgtggtggcgggcgcctataatcccagctacttgggaggctgaggcaggagaattgattgaacctgggaggcggaggttgcagtgagccaagatcacgtcattgcactccagcctggtcaacaagagtaaaacttcatctcaaaaaacaaaacaaaacaaaaacaacaacaaaaaacaaaagaaaaacaaacaaaaccaaaaccaaaacagctgtattgaagctgcagtgttgcagctctgtgactgccctgcagagcagggctaccccataggcagcgagcagcagctcagggcagttctgcagtcagatttatacccacttttaattacatgtagattaaggagctgcatatacaaagatttctagggaaggagtagtaacttctgggtcctggggtctttgccacggaacagggcagtatgccagggtgttgccacggcaatggtaaactgacatggcaccctgggggtcatgccttagggaaagccgcttccactcgcccctgttttagctcatcttcaagttagtctggtgtccaagctccaccgcctgcctcagtctggtgacctccttctgtgtctgatgagcatggcagcgttgggaccttccccttccaactctctccctcctcttcgtcctccctaaaggacgggtacgaggaggggctatcacgccagcgacatcctctagcaccacccaggtgtgtggggtggggcaggggggcgacgaagtatccagcccagggccacgtagtcaactgccaagggcttcctgggcttctcttctgccccagagcttgtctccacccagcaggggttcccccagcgctaactgtatccctaaagttctgatgtactttacttttccatcttccttgttgttaacatctaccttctgctctgtaagcaaaactaaatcttctgtgctttgtccataggttgattctacaatctgaaaatcaataaacagcatttgcatgatt

SEQ ID NO: 90349 - DNA, 2170 bp, Homo sapiens
aggtagtgacagggccgtgaccggttgttatttcagtcacgggctgggcttaccagtgattactgggccgccaccagcatcgtgaaggcctactacgtgcgtgcccgggctcacgcagaggtgtggaatgaggccgaggccaaggcggacctccagaaagtgctggagctggagccgtccatgcagaaggcggtgcgcagggagctgaggctgctggagaaccgcatggcggagaagcaggaggaggagcggctgcgctgccggaacatgctgagccagggtgccacgcagcctcccgcagagccacccacagagccacccgcacagtcatccacagagccacctgcagagccacccacagcaccatctgcagagctgtccgcagggccccctgcagagccagccacagagccacccccgtccccagggcactcgctgcagcactgagccccctgaggcccacagccacccaggcagggagcaagtggcctggtcacttctggttcgattgaccaggatcgtggtgtcactttttaaaatttaaaattaatttttgaaatcaaagtcagacacacccatggtaaaaaaaaaaaaaaaaacaatcccaagggtacagaagagcttatgaataaaagtagttttctcctctacccctctcattccttccgtgccatggttttaattgaccctgtttttaattcttctggtagttttctctatttccaagtaatctgtttaaatcagtttctagattttaccccatgtcaatgacaaatgaggatttgatgctctgatcctttctcatgcctgatacccctccctgtctccccattttggatagttacatttgggggtcatctcggtgatttttgtaactttacgcaggacacttagagctctctagaatcccactgactttagtgggtcttgatgtagggtgggcaagccccgacactggagcttagcctgagagggttcttggcctcccccaggaaagatttcaaaggcaagcgccagtggtagggtagaagaaaacagctgtggtcgggcacggtggctcacgcctataatcccagcactttgggaggccgaggcgggtggatcacctgaggtcaggagttccagaccagcctggccaacatggtgaaacctcatctctactaaaaatacaaaaaaactagctgggcgtggtggcgggcgcctataatcccagctacttgggaggctgaggcaggagaattgattgaacctgggaggcggaggttgcagtgagccaagatcacgtcattgcactccagcctggtcaacaagagtaaaacttcatctcaaaaaacaaaacaaaacaaaaacaacaacaaaaaacaaaagaaaaacaaacaaaaccaaaaccaaaacagctgtattgaagctgcagtgttgcagctctgtgactgccctgcagagcagggctaccccataggcagcgagcagcagctcagggcagttctgcagtcagatttatacccacttttaattacatgtagattaaggagctgcatatacaaagatttctagggaaggagtagtaacttctgggtcctggggtctttgccacggaacagggcagtatgccagggtgttgccacggcaatggtaaactgacatggcaccctgggggtcatgccttagggaaagccgcttccactcgcccctgttttagctcatcttcaagttagtctggtgtccaagctccaccgcctgcctcagtctggtgacctccttctgtgtctgatgagcatggcagcgttgggaccttccccttccaactctctccctcctcttcgtcctccctaaaggacgggtacgaggaggggctatcacgccagcgacatcctctagcaccacccaggtgtgtggggtggggcaggggggcgacgaagtatccagcccagggccacgtagtcaactgccaagggcttcctgggcttctcttctgccccagagcttgtctccacccagcaggggttcccccagcgctaactgtatccctaaagttctgatgtactttacttttccatcttccttgttgttaacatctaccttctgctctgtaagcaaaactaaatcttctgtgctttgtccataggttgattctacaatctgaaaatcaataaacagcatttgcatgatt

SEQ ID NO: 90350 - DNA, 982 bp, Homo sapiens
aaaaaagcggccgctgaattctagaaaaaaaagcggccgctgaattctagaaagaatttcatcaaaattaacatacacaattttcactcataatttaaaatattttgatgaaattctttgctttcacctagaattcagcggccgctgaattctagggacacctccctttctcctgcagccatggatgccgctctgctcctgaacgtggaaggggtcaagaaaaccattctgcacgggggcacgggcgagctcccaaacttcatcaccggatcccgagtgatctttcatttccgcaccatgaaatgtgatgaggagcggacagtcattgacgacagtcggcaggtgggccagcccatgcacatcatcatcggaaacatgttcaagctcgaggtctgggagatcctgcttacctccatgcgggtgcacgaggtggccgagttctggtgcgacaccatcgttgatgccccgagtgattaccagagggagacctggaacctgagcaatcatgagaagatgaaggcggtgcccgtcctccacggagagggaaatcggctcttcaagctgggccgctacgaggaggcctcttccaagtaccaggaggccatcatctgcctaaggaacctgcagaccaaggagaagccgtgggaggtgcagtggctgaagctggagaagatgatcaatactctgatcctcaactactgccagtgcctgctgaagaaggaggagtactatgaggtgctggagcacaccagtgatattctccggcaccacccaggtgcgcggggctgcaggggcggacagtgagggggcgcccagcccagggccacggagacacctgccatagccttcctggacttttctttccaccccacaggtaccaacttgttcaccagcggttcccgagtggtactgatgtggtgtggtggcggcttggcggggcctttttattggtggcctccgggcccctgttccggggcggcta

SEQ ID NO: 90351 - DNA, 644 bp, Homo sapiens
  misc_feature (18)..(18): n is a, c, g, or t
tcaagccatgggcctctngcgaaggcgccggcgtgcccacggctaagaaacttcctctttctgctcccgggaacgaaggctgtagcagagaaggccttcaagtttcgagacccagttccagccgcagctgagcactggtgaccttgaattaagtctaatgttgggattggaagacgcttcagacatccgctgccgccctgggcaagcgaccagctcaaggttaccccacagggacgtgctctggtcccacggtccagtgctcttttgtcggttagttttgtcatttgtaaaataggaacagtagatagtggtaggaaagtggttgtgaaaacttaatagaaagctaagcgccttggtcgggcgcagtggcatgtcacccctgcaattctatcactttgggaggctgaggcgggcggatcgtttgagcccaggaattcgaaaccagtctgggcaatatgaaaccccatctctgcaaataaagtacaaaaaattaagagtggtggcgcgcttctgtggtcccagctactctggaggctgaggtgggagggtcaccagagccccggacatcgaggctgcagtgagccactatgagcgcgccactgcaccccatcctggcgacagagcgagacgcagtctcgaacaaa

SEQ ID NO: 90352 - DNA, 266 bp, Homo sapiens
agggagaaggattgggaacattgtttagggaagagacttttttactgaacttactttatactgtcaagattttataccagacacatatatttttctttttttgaggcaaggtcttcctctgtcacccaggctggagtgtggtggtgtgatcactgctcactgcagcctccacctccagggttcaagcgatcctcttgccttagcctccggagtggcatttgtcactatacccagcttttttttttttttttttaatttttttgtag

SEQ ID NO: 90353 - DNA, 1662 bp, Homo sapiens
cctttactaacatttattttgattttaaggtaatttttatattataggttacttgctgactttttttcttctctgttcttttctgaagttgcattcttgtgttgggtgggacacagttaagtgtgacatgaatttccttgccccaagttcttgatttgcccatgaaatgaagacttgtgcctcatcagatgtcttttaaattttttactctgcacattttattttaattatctctgaaggcattttctggttctgtaataagttcttacctcttgcctatagagactttggaagtgataaaaattgatctaaaactgttaaagaaaaaaatagtattttaaacctgttaagttattgtttaatcctagccttgtaattgatgtgcacagttgtagatggtggttgatttgctttattttgtattctcaatgccatataccatgtgtaagctatgtttttagcccggtctcatgtctcaattctgaaaatgtggaagatgtttattgtagtattcctataaaaattcattatcatttaattcttagaaaagtaactctagagttgttaaaagtctaaatggcctttttctgtgtttatctttaccagttcaaaatagaaatgctacttttaactattacaatttaatggtgtatttgatataaattggatgtttacgatttgagtaaagtacctgctttcgtagaatattttagctgaaaataattggaaggtatacctcccagtgttaaactctcctataaacattttcttcttacaaattggtatttctgaaccactatctcttattcctgtgtttgagtagatacaattaagtttcatactaaaataaattttcttcacatcattactaaagcattcagttatttcaaaaatatagtacattactatactgatgaataatggaagaagtttgtctgttgattcaacatattcaagagtaggatagtttttctcctgaataaaactacaaaatcaatagtggatttacttacttgacctcaaagagataagacattttgtctatgaaatagtttatagttttttgtttgtttgttaaacaaaaatgaagggaaataaaccaataaagcagaaggcatggattgaggaagcaatctgggaaaggttgtgaaaagaattgccagagtcttggtcaaggggaatcctagcaagccaccctgcagaggtcgcaggaggatggaagaactcttgggaggaagctctctaactggagggctatcatttacaaagccatgatactataaacactgagtattgagttaacaaaaaattgtaagactagtgtgttgagaagttagagtatggaaaaaaggggaaaagggacagtttgggatgaggtagggaggcagatttattcatggaagcttttctatacagcaagaattatgagccatacctttcagatagttctgtgggttggcagccctcatcacctggcacctttggcactgccttgatagctgcctctcacccaagttagagaaagaggattgaagacaggaagaaagcaagcttatgtgcttgatactttatcctaactaggtatattcttatttccgccctttttacttgaggcacagatacaccatcatctgcactttctgtgcctaacttatcttaaca

SEQ ID NO: 90354 - DNA, 930 bp, Homo sapiens
ggaaccctcacccagaatgaaatgatatttaagcggctgcacctgggcaccgtgtcctatggcgccgacacgatggatgagatccagagccatgtcagggactcctactcacagatgcagtctcaagcgggtggaaacaatactggttcaactccactaagaaaagcccaatcttcagctcccaaagttaggaaaagtgtcagtagtcgaatccatgaagccgtgaaagccatcgtgctgtgtcacaacgtgacccccgtgtatgagtctcgggccggcgttactgaggagactgagttcgcagaggctgaccaagacttcagtgatgagaatcgcacctaccaggcttccagcccggatgaggtcagtcaaagcacaaaaccgtgggagcttgtccgttccatttggactccagagtcatgaggattcattctttctgggatggggaatatagaggagcagtttatcgtagctttaatgtatgttttagctgtatgtggaaaactgcccaacctattccagcatgtagcctctgacgtagcctgggccttgcacatgcaaatgtgcggccgccacatctcggcacatcccagaacacccagggctggtcacagggaacagcatgagaaataccagcgaggtttactgattccgtaaagtaatttgtgtcaaagctgcattttataaaactgttgaagtttgggactgtccttatggctatggattccgtgtccaaattgaatcatctggtttccatattaaatttccacatattttgccagattttcaatacagggcatttatttcaaaagaaaattggaatgtaaataatttccaaaacctacagaaatggtaagatcttaaacatggtaaattagttatttctaactttacatcactctttgatttttagatcgggaaaattcatta

SEQ ID NO: 90355 - DNA, 796 bp, Homo sapiens
ggaaccctcacccagaatgaaatgatatttaagcggctgcacctgggcaccgtgtcctatggcgccgacacgatggatgagatccagagccatgtcagggactcctactcacagatgcagtctcaagcgggtggaaacaatactggttcaactccactaagaaaagcccaatcttcagctcccaaagttaggaaaagtgtcagtagtcgaatccatgaagccgtgaaagccatcgtgctgtgtcacaacgtgacccccgtgtatgagtctcgggccggcgttactgaggagactgagttcgcagaggctgaccaagacttcagtgatgagaatcgcacctaccaggcttccagcccggatgaggtcgctctggtgcagtggacagagagtgtgggcctcacgctggtcagcagggacctcacctccatgcagctgaagacccccagtggccaggtcctcagcttctgcattctgcagctgtttcccttcacctccgagagcaagcggatgggcgtcatcgtcagggatgaatccacggcagaaatcacattctacatgaagggcgctgacgtggccatgtctcctatcgtgcagtataatgactggctggaagaggagaggtcactattccaattcctaaacaggagacgggaagagacacagctgttggatgcataaagaagggtgctagacccacgcctctcctccagcccttcctgccatccctgcagcctccagtccaacgtcaaatacaatcaactggatgaattaaaaagaaattgcaaataataaaaga

SEQ ID NO: 90356 - DNA, 444 bp, Homo sapiens
acctgggcaccgtgtcctatggcgccgacacgatggatgagatccagagccatgtcagggactcctactcacaggtaagtgggttcctcctgcacggggtctgcttccacacacatcccgcgccatgagtccagctgagcctcgtgtgttcccatctgtaaattagcacgcttcttggtggtcttaacatcctgctacttcagtcgtctgttcgaatatacgaatcaggaaatcgtctttgatgagcatttgtacatgagtgaaatcgtagaaggcatagtgtgctgaagtcatttattcatatcacattttactagtgagttatttgtaaaaaattattcagtaaacattgtagttgaagaatgttcagtaggatactacatcaatatgttttctaacagttctgtttttctctataataaaatgttctcatatttttaaagg

SEQ ID NO: 90357 - DNA, 770 bp, Homo sapiens
ggaaccctcacccagaatgaaatgatatttaagcggctgcacctgggcaccgtgtcctatggcgccgacacgatggatgagatccagagccatgtcagggactcctactcacagatgcagtctcaagcgggtggaaacaatactggttcaactccactaagaaaagcccaatcttcagctcccaaagttaggaaaagtgtcagtagtcgaatccatgaagccgtgaaagccatcgtgctgtgtcacaacgtgacccccgtgtatgagtctcgggccggcgttactgaggagactgagttcgcagaggctgaccaagacttcagtgatgagaatcgcacctaccaggcttccagcccggatgaggtcgctctggtgcagtggacagagagtgtgggcctcacgctggtcagcagggacctcacctccatgcagctgaagacccccagtggccaggtcctcagcttctgcattctgcagctgtttcccttcacctccgagagcaagcggatgggcgtcatcgtcagggatgaatccacggcagaaatcacattctacatgaagggcgctgacgtggccatgtctcctatcgtgcagtataatgactggctggaagaggaggagacgggaagagacacagctgttggatgcataaagaagggtgctagacccacgcctctcctccagcccttcctgccatccctgcagcctccagtccaacgtcaaatacaatcaactggatgaattaaaaagaaattgcaaataataaaaga

SEQ ID NO: 90358 - DNA, 1061 bp, Homo sapiens
ggcgtatcggcgcaggcgcactctgccggcaacgccgaggcgcttctgcatctgtgggccgagcattcttcaggtcatctgaaccttctgagaaaacatggtcaacgtcttgaaaggagtgcttatagaatgtgatcctgccatgaagcagtttctgctgtacttggatgagtccaatgccctggggaagaagttcatcattcaagacattgatgacactcacgtctttgtaatagcagaattggttaatgtcctccaggagcgagtgggtgaattaatggaccaaaatgctttttcccttacccagaaatgaaaatactcaatatggaccatttaggaattataagcagcaactgtgaaagacttgccactcaatatcttaggtgactgattagacatagagggttgttttaggagcatgccacgggaaagactgagggatcatgatcatttgttcagaaaaaaagcccctgaactgattttgttaccatagaatttaaaaaaaaaaaagctttaacagttggctgtaatttggcttttattatcctttattaaaatacaaatgtcaatgcttttcctgcctttttaataccatgtcagtgtaacataggtatttattttgctcatccctgtgatctgtgcatttttgctgcgtggatgtgattgtttggtttcagttagaaacgtcatagatttgctgtttgaatatgccaaggtggggacttagacattatgtacgtctcacaaatcctacctgcataccagtcagctctattgaggaagacaatgtaaaactaatgtaaactacagtttgcatttccctgaaaacagaatattgtttttaagagggttagaaacaaccagtgggaaaggcacatgctgctttgtttagtttttccttgttcaaactttgttggtcacattttcccatctgtattcttttttattaagaaaacagcttagggaggctgaggtgggaggattgcttgagcccaggagtccgaggttgctacaaaaacaccattgcactctagcctggacaacagagagaccctgcctca

SEQ ID NO: 90359 - DNA, 607 bp, Homo sapiens
  misc_feature (569)..(569): n is a, c, g, or t
  misc_feature (571)..(571): n is a, c, g, or t
  misc_feature (578)..(578): n is a, c, g, or t
  misc_feature (580)..(581): n is a, c, g, or t
ggcgtatcggcgcaggcgcactctgccggcaacgccgaggcgcttctgcatctgtgggccgagcattcttcaggtcatctgaaccttctgagaaaacatggtcaacgtcttgaaaggagtgcttatagaatgtgatcctgccatgaagcagtttctgctgtacttggatgagtccaatgccctggggaagaagttcatcattcaagacattgatgacactcacgtctttgtaatagcagaattggttaatgtcctccaggagcgagtgggtgaattaatggaccaaaatgctttttcccttacccagaaatgaaaatactcaatatggaccatttaggaattataagcagcaactgtgaaagacttgccactcaatatcttaggtgactgattagacatagagggttgttttaggagcatgccacgggaaagactgagggatcatgatcatttgttcagaaaaaaagcccctgaactgattttgttaccatagaatttaaaaaaaaaaaagctttaacagttggctgtaatttggcttttattatcctttattaaaatacaaatgtccnanaaaaaanannaaaaaaaaaaaaaaaaaacaacacaa

SEQ ID NO: 90360 - DNA, 661 bp, Homo sapiens
  misc_feature (661)..(661): n is a, c, g, or t
cgtcgactacggctgttagaagacgacagaaggggaacgccgaggcgcttctgcatctgtgggccgagcattcttcaggtcatctgaaccttctgagaaaacatggtcaacgtcttgaaaggagtgcttatagaatgtgatcctgccatgaagcagtttctgctgtacttggatgagtccaatgccctggggaagaagttcatcattcaagacattgatgacactcacgtctttgtaatagcagaattggttaatgtcctccaggagcgagtgggtgaattaatggaccaaaatgctttttcccttacccagaaatgaaaatactcaatatggaccatttaggaattataagcagcaactgtgaaagacttgccactcaatatcttaggtgactgattagacatagagggttgttttaggagcatgccacgggaaagactgagggatcatgatcatttgttcagaaaaaaagcccctgaactgattttgttaccatagaatttaaaaaaaaaaaagctttaacagttggctgtaatttggcttttattatcctttattaaaatacaaatgtccatcaaaaatatactttaccaaaatataccgtgtaacttgagggggggccctgtacccaaatttgcctaatgggagtcgatttacaatn

SEQ ID NO: 90361 - DNA, 671 bp, Homo sapiens
ggcgtatcggcgcaggcgcactctgccggcaacgccgaggcgcttctgcatctgtgggccgagcattcttcaggtcatctgaaccttctgagaaaacatggtcaacgtcttgaaaggagtgcttatagaatgtgatcctgccatgaagcagtttctgctgtacttggatgagtccaatgccctggggaagaagttcatcattcaagacattgatgacactcacgtctttgtaatagcagaattggttaatgtcctccaggagcgagtgggtgaattaatggaccaaaatgctttttcccttacccagaaatgaaaatactcaatatggaccatttaggaattataagcagcaactgtgaaagacttgccactcaatatcttaggtgactgattagacatagagggttgttttaggagcatgccacgggaaagactgagggatcatgatcatttgttcagaaaaaaagcccctgaactgattttgttaccatagaatttcaatcctcccccaccaactcgaccccctgcccgcaaccacctcggcctatagtcggtccgctcacaactcaactgcccgcccttctacaacgtccccacctgcccgttcgccccatttcctacaggcccgctaccctcgcctttccaatcgtttctatcctgcacgctcctcg

SEQ ID NO: 90362 - DNA, 1066 bp, Homo sapiens
cgtcgactacggctgttagaagacgacagaaggggaacgccgaggcgcttctgcatctgtgggccgagcattcttcaggtcatctgaaccttctgagaaaacatggtcaacgtcttgaaaggagtgcttatagaatgtgatcctgccatgaagcagtttctgctgtacttggatgagtccaatgccctggggaagaagttcatcattcaagacattgatgacactcacgtctttgtaatagcagaattggttaatgtcctccaggagcgagtgggtgaattaatggaccaaaatgctttttcccttacccagaaatgaaaatactcaatatggaccatttaggaattataagcagcaactgtgaaagacttgccactcaatatcttaggtgactgattagacatagagggttgttttaggagcatgccacgggaaagactgagggatcatgatcatttgttcagaaaaaaagcccctgaactgattttgttaccatagaatttaaaaaaaaaaaagctttaacagttggctgtaatttggcttttattatcctttattaaaatacaaatgtcaatgcttttcctgcctttttaataccatgtcagtgtaacataggtatttattttgctcatccctgtgatctgtgcatttttgctgcgtggatgtgattgtttggtttcagttagaaacgtcatagatttgctgtttgaatatgccaaggtggggacttagacattatgtacgtctcacaaatcctacctgcataccagtcagctctattgaggaagacaatgtaaaactaatgtaaactacagtttgcatttccctgaaaacagaatattgtttttaagagggttagaaacaaccagtgggaaaggcacatgctgctttgtttagtttttccttgttcaaactttgttggtcacattttcccatctgtattcttttttattaagaaaacagcttagggaggctgaggtgggaggattgcttgagcccaggagtccgaggttgctacaaaaacaccattgcactctagcctggacaacagagagaccctgcctca

SEQ ID NO: 90363 - DNA, 1394 bp, Homo sapiens
acgctggttttgcatcttcaggagacgctcgtagccctcgcgcttctcctcggccaattcgcggaagaagtggctcacgccttccagagccacatcatcgcggtcgaaatagaagcccagagagaggtaggtgtaggaggcctgcaggtacaaattgaccaggctgttgacggctgcctccacgtcggtggaataattctgacgaatctgggagctcatggttggttggcaagaaggagcctaccacaaaaccgtgctggcaggtcccaaaagcaggagatggccgagaagatggtcccggaggttgcaagcggagaggaaatcggagggcggtcggaggctggaagagagtccccggatctgttccgtccaaacactgttgaagcaagagacagacattcttcaggtcatctgaaccttctgagaaaacatggtcaacgtcttgaaaggagtgcttatagaatgtgatcctgccatgaagcagtttctgctgtacttggatgagtccaatgccctggggaagaagttcatcattcaagacattgatgacactcacgtctttgtaatagcagaattggttaatgtcctccaggagcgagtgggtgaattaatggaccaaaatgctttttcccttacccagaaatgaaaatactcaatatggaccatttaggaattataagcagcaactgtgaaagacttgccactcaatatcttaggtgactgattagacatagagggttgttttaggagcatgccacgggaaagactgagggatcatgatcatttgttcagaaaaaaagcccctgaactgattttgttaccatagaatttaaaaaaaaaaaagctttaacagttggctgtaatttggcttttattatcctttattaaaatacaaatgtcaatgcttttcctgcctttttaataccatgtcagtgtaacataggtatttattttgctcatccctgtgatctgtgcatttttgctgcgtggatgtgattgtttggtttcagttagaaacgtcatagatttgctgtttgaatatgccaaggtggggacttagacattatgtacgtctcacaaatcctacctgcataccagtcagctctattgaggaagacaatgtaaaactaatgtaaactacagtttgcatttccctgaaaacagaatattgtttttaagagggttagaaacaaccagtgggaaaggcacatgctgctttgtttagtttttccttgttcaaactttgttggtcacattttcccatctgtattcttttttattaagaaaacagcttagggaggctgaggtgggaggattgcttgagcccaggagtccgaggttgctacaaaaacaccattgcactctagcctggacaacagagagaccctgcctca

SEQ ID NO: 90364 - DNA, 1048 bp, Homo sapiens
acgagtttggccagacccctccggggtggggcagagaggagggggagttacattcttcaggtcatctgaaccttctgagaaaacatggtcaacgtcttgaaaggagtgcttatagaatgtgatcctgccatgaagcagtttctgctgtacttggatgagtccaatgccctggggaagaagttcatcattcaagacattgatgacactcacgtctttgtaatagcagaattggttaatgtcctccaggagcgagtgggtgaattaatggaccaaaatgctttttcccttacccagaaatgaaaatactcaatatggaccatttaggaattataagcagcaactgtgaaagacttgccactcaatatcttaggtgactgattagacatagagggttgttttaggagcatgccacgggaaagactgagggatcatgatcatttgttcagaaaaaaagcccctgaactgattttgttaccatagaatttaaaaaaaaaaaagctttaacagttggctgtaatttggcttttattatcctttattaaaatacaaatgtcaatgcttttcctgcctttttaataccatgtcagtgtaacataggtatttattttgctcatccctgtgatctgtgcatttttgctgcgtggatgtgattgtttggtttcagttagaaacgtcatagatttgctgtttgaatatgccaaggtggggacttagacattatgtacgtctcacaaatcctacctgcataccagtcagctctattgaggaagacaatgtaaaactaatgtaaactacagtttgcatttccctgaaaacagaatattgtttttaagagggttagaaacaaccagtgggaaaggcacatgctgctttgtttagtttttccttgttcaaactttgttggtcacattttcccatctgtattcttttttattaagaaaacagcttagggaggctgaggtgggaggattgcttgagcccaggagtccgaggttgctacaaaaacaccattgcactctagcctggacaacagagagaccctgcctca

SEQ ID NO: 90365 - DNA, 643 bp, Homo sapiens
  misc_feature (605)..(605): n is a, c, g, or t
  misc_feature (607)..(607): n is a, c, g, or t
  misc_feature (614)..(614): n is a, c, g, or t
  misc_feature (616)..(617): n is a, c, g, or t
ggcgtatcggcgcaggcgcactctgccggcaacgccgaggcgcttctgcatctgtgggccgagcattcttcaggtcatctgaaccttctgagaaaacatggtcaacgtcttgaaaggagtgcttatagaatgtgatcctgccatgaagcagtttctgctgtacttggatgagtccaatgccctggggaagaagttcatcattcaagacattgatgacactcacgtctttgtaatagcagaattggttaatgtcctccaggagcgagtgggtgaattaatggaccaaaatgctttttcccttacccagaaatgaaaatactcaatatggaccatttaggaattataagcagcaactgtgaaagacttgccactcaatatcttaggtgactgattagacatagagggttgttttaggagcatgccacgggaaagactgagggatcatgatcatttgttcagaaaaaaagcccctgaactgattttgttaccatagaatttaaaaaaaaaaaagctttaacagttggctgtaatttggcttttattatcctttattaaaatacaaatgtcaaaaaaaaaaaaaaaaaaaaaaaaaaaaaaaaaaaacnanaaaaaanannaaaaaaaaaaaaaaaaaacaacacaa

SEQ ID NO: 90366 - DNA, 981 bp, Homo sapiens
tctagttgcgtaatacttccttcattggtgaacactaaaaaataaccttcagtgatcctgccatgaagcagtttctgctgtacttggatgagtccaatgccctggggaagaagttcatcattcaagacattgatgacactcacgtctttgtaatagcagaattggttaatgtcctccaggagcgagtgggtgaattaatggaccaaaatgctttttcccttacccagaaatgaaaatactcaatatggaccatttaggaattataagcagcaactgtgaaagacttgccactcaatatcttaggtgactgattagacatagagggttgttttaggagcatgccacgggaaagactgagggatcatgatcatttgttcagaaaaaaagcccctgaactgattttgttaccatagaatttaaaaaaaaaaaagctttaacagttggctgtaatttggcttttattatcctttattaaaatacaaatgtcaatgcttttcctgcctttttaataccatgtcagtgtaacataggtatttattttgctcatccctgtgatctgtgcatttttgctgcgtggatgtgattgtttggtttcagttagaaacgtcatagatttgctgtttgaatatgccaaggtggggacttagacattatgtacgtctcacaaatcctacctgcataccagtcagctctattgaggaagacaatgtaaaactaatgtaaactacagtttgcatttccctgaaaacagaatattgtttttaagagggttagaaacaaccagtgggaaaggcacatgctgctttgtttagtttttccttgttcaaactttgttggtcacattttcccatctgtattcttttttattaagaaaacagcttagggaggctgaggtgggaggattgcttgagcccaggagtccgaggttgctacaaaaacaccattgcactctagcctggacaacagagagaccctgcctca

SEQ ID NO: 90367 - DNA, 216 bp, Homo sapiens
atgtctacacagtgctccagacaaaggccacgtggtgcaagtggctggggacacttcttaggacacttcttagggatcctagtagagtggctggtatggtggtctgcagctatatggcctggtccttcccacccagagactgcctcctcgtgtaactgagtgctctgatgtggactgcacccacctctgcgtctcatctgcacaccccttcccaaa

SEQ ID NO: 90368 - DNA, 227 bp, Homo sapiens
gaaaattcaacagataaaaacaatgtaattcattttttatggtgtaattttcaaacgttcattataaagttatattattctataaattctcattttgctttcttcaataaaatatttgatgtatacaaatatacaaagtatatatgtaaattataaaagcataatgtaatataaactacatgtacctcgtacccaacttaaaaaattaaacattatctttcactttt

SEQ ID NO: 90369 - DNA, 166 bp, Homo sapiens
acatttgtttaaaatttaattaacttccattatttgaatggcagaaaaagaggcctataccctgacgcatcagtaggaagtacacaccacgtttcatttgcctttgcatatcaatttacatgatgaaagctctgtcctctatattgagctcactacacactagatc

SEQ ID NO: 90370 - DNA, 666 bp, Homo sapiens
caggagaatggcatgaacccgggaggcggagattgcagtgagccgagatcgcgccactgtactccagcctgcgtgacagagcgagactccgtctcagaaaaaaaaaaaaagaacataatatgtgtattgtgtctcatgtacactgttgaagaggtagcagcccatgattgatgaaatagtccagtgatcttatgagatacaagtttgttttcatgttctctctctgacattgtctatgcttagttattgtgttcatgcttattccttcatggtccaagttggctgtcccacctccaggcatcaaaccacattccaaacagcaaccaggaggaaatagtaagctgataggtcatggggaattaggttggaagccattgctttttaatttacagaagtccattctccccaggcacttctttctaagtctcattgatcagaactcaaccacgtggccaccatcagcagaaacatctctctgtagcaccgtgaaacacatgagaacataactggggatgaccgttgttacttgaactattttgaaagatctgacataaaggtcatcgccttgtgcacttcaatgggtgttactgcaaaactcccagggctaggcatggcgacatacacccgaaatctcagctatctgggaggctgaggtgggaggattgc

SEQ ID NO: 90371 - DNA, 582 bp, Homo sapiens
ttttcttcttttctttgccgttctctctgcctcccttatcccccaacccttctctgtgtctttcttctcaggaacaaagaacttgaggaaatccgtgactgtccaaaatcatctgtgttgggaagagttggggagggagaactgggaagcttaaattaaaactcataaaaccaggcagtccaaggagggtagtgttgaaatggttttccctcccctttgattttgtagtaggtttcctgctatacttttgctgatttcttctctggtgcctttctatttttgtttctctccccagtctaactactttttatttcttctgttcttctgtttgaagctctctaagtagctgccttcacctctatggttttaagtttgtgtctgcccagcctcttcctttaactgtgacttggtgtcatcttgttgtgatgggaatgttgccatgggtgcagtgtggtggtgtgttttggttgttgggtggcatgtaagcttggatattttcatagttccagctctttttcttttctaaaaccgtggcatgtgcttctctgataacagccctctactgcagcagtgtactcctca

SEQ ID NO: 90372 - DNA, 258 bp, Homo sapiens
ataaggttagaaaccaccgagctaggatttagacaggaggtgatgacagcaaggacatcagtttcaggaaaaaatattttacccagcatatacactgactatccattgtcatttcctattccttttcattcctctatttactctgacctgcatgttgtcatgcttcctgcttccagctaattattatccttcaaacacactcccctccttggatggttcctattcactatattcctctcagaccccaaatcctattat

SEQ ID NO: 90373 - DNA, 811 bp, Homo sapiens
tgtgtagcaaagctgtggggatgccttcccctgtttctccaaagctgtcaccaggcaattcaggaaattattcatctggggccagtagtgcttctgcaagtggttcttcagtgaccattccacagaagatccaccagatggcagccagctatgttcaggtcacatccaacttcctctatgccaccgaaatttgggaccaagctgaacagctttccaaagagcaaaaagaattctttgctgaactggataaagtaatgggccctctcatctttaatgcaagcatcatgacagatctagttcgttatacccggcagggactgcactggcttcgccaggatgccaagttgatatcttgaactgaacacattctcgttgcctctgattttctccacaacactgtgtcacatcacgaaggaaaactgccataacataccacctagtcgacactaagaatgaggaatagttttctcctcgttggttcatgtgttgttgtttttgataatccaaagcgatcatgtcagttggccctttaatatttccaatgtgaaagattatttaaatgcttttaaatctgcagcacattgataagatggtttccgtgagctatgataagattgaaattccagttgcaattcataactaatgaattgaaattttatttattttaatttttttaagttcccagattggggctagtttaagacttagttatttctgcctataaatttactctgttgaatatttagcataaatttaatgtagacatttttatttatataccttgggagctttattacctaatatctttttg

SEQ ID NO: 90374 - DNA, 402 bp, Homo sapiens
aagggtgggactctgatggagcagctggaacacttgattgagaagcaggagataggggttcaagttttggatttgccaccaattagagatgtgactttgggtaactcactgggtctttcttggtcacaatttggaaaatgagaacatcaaactagtctccaaagtcttaagcattttaggtttgcctctggttaaaggaatgctctgtggacagttggatttgaccagttatcaaggtaagattatatctttgggaaccaaagtaaacagttccagatttttcagccagtcttcatcagggtgttatttgtacatcctaacaaatcacagagccgtggagaccttatgatgaataaccataagcctcctggctcttcccttttcttgccatcccagtcctac

SEQ ID NO: 90375 - DNA, 191 bp, Homo sapiens
ggggttccaggtaggggggatggcctagcaaagacatagaggtcagatgcacatccgacattctagaaccctttcaaaggaggctgggccaccaaatgtttatgagtgtatatagctgctggggtttagagaaggccacatttcttggaatcaccttaggagcccagagtctgctcagagagctttccagg

SEQ ID NO: 90376 - DNA, 286 bp, Homo sapiens
aattgaggtcaaaaaattatatttatttatacatagttttttccaaaagttctattctgtgtttaaagggataacatactgcatttttctagttgcaaatgattggttaagtgttcatgtattaatttttctgagagccatcattagctattaaccaatgtgctagacatttttaatgtcattgactatgattactgtactctttgattgctgaaagtgtaaattgataaaactttttatctcagttggacattttttccttttaaactgaaactacaaatacagt

SEQ ID NO: 90377 - DNA, 810 bp, Homo sapiens
ctggaatgtaaggtcctccatgagtccagtgcatatgttttgatttccttctttgtctcctatagcactggtgacagatattgctagctatttgctgtggtagatgatgtgaattactgtacatgcaactcccagtgtcacactctaagacactctataattctgctggtgtatagacagacgtactaatacatttgaacttggaattgaacattatgaaactttggtttaggacactgagtttttttggtagatggaggtgtggtctctttgtctgtagcagtactggcaaagtatcgataatcaagttcatctaactttacaatcttcatttgcctcatctgccagtaatacctgcttcatggaattattacaaaatgtaaataaaataacacagaatttagcaaaagactttccatgtagaaaatatttaataaatgttagataaaaacattatcagtaatgtctattttctctctgtctctgtatattaccaagcaaaggctctagcttaggagagagaattaaagcatctatttgagatatatgtttgagtggatataatgacttatttttgtatttaagacaaaaatgagttgaaagtaaagattttatttatgaaaaaaatccatagaacacctttatgaaaaagaattcaaggatacttttgccatactgaactactggcaagaaaaagatataaaacataaaaaaagatattaaaaaccttataattaacatatatccatgagagtggaaaaaaatcagtattttacatttatatgtaaaatattgcatatatatgtatat

SEQ ID NO: 90378 - DNA, 346 bp, Homo sapiens
ctttgtgggtcagatggtctctgttgcaactgctcgactcagccacagaggcaggagaggctgctgtggacgatttctcaatgagtgggcatggtgggtgccaataaaactttatttacaaaaacacactgtcgctgggcatggtggctcaagcctgtaatcccagcactttgggaggccgaggcaggcggatcatctgaggccaggagttcgagaccagcctgaccaacatggtgaaaccccgtgtctactaaaaatacaaaaaaattagccgggcgcggtggcgggcgtctgtaatcccagctactcgagaggctgaggcaggagaatcgcttgaatccgggag

SEQ ID NO: 90379 - DNA, 792 bp, Homo sapiens
tttcacacccagaaatatcctggtttagaccgtaaatgatatgatcgccctagcttgactccactggtcatcctttaagattaatgttagctactgtttattgagactcttctaagagtcagacactcttctcagctttttgttgcgttgcttcatttaatccccaaaataagactgctaggtgtgtatgcataatctcttcattttcagatgaggcaacagagatgcagaaaggtttgaattattcagtcacacaggtagcaagtggttgatttggtgtgtcgatttgaacctgactattggaatctgtgttcttaagccctccatggggctgcctcactcctcgtttttgagtattgcacccttgacctcatggggccccacttccctgacagtggccctggaatctgttctcagaccacatactggtagaaagttccagccgtgagccaggagtccagccctttatgacaccaatgagaagacgagccgggaagtcactacgtcgttttccagagccagcaacagcaggcctcactgacgtgcgtgtctcctgacttcccgtccggtcccctgccaccactccctaccctgatgttgacaagtgcagcttgttttaaaactgggcgctgcattttacatggaaaagattttattttgaaatctagggtggagtaaaactccagccagtgaagacttgccatgtgctgtgcagagaatccaaacaggccccttcccaacccaaacagccaggagaaactgagtgcagggagtttatttacacatttgttt

SEQ ID NO: 90380 - DNA, 419 bp, Homo sapiens
gattttccacaaactattatttcaaacctagggaagcccaccataatgagaagagcggggccaacacccatgtcactgtggagaagtacagaatatgcaatggaagagttgtttatctgatataagcggtaattggaaactgaaaaattcctgctctggaaaaaagatattctgctcttctgaatctaacagaggaagagacaaacagaaaccatcaattattgtttcaggtatacccagagtaccatctgtaccataaactacaactcaactgttgaaaatcataacttccatcaaaattctaacagctgtgtttcccagtgtcttttatttttttaaagcaggcaagcatcgattttttaaaatttaaaaataacactctttaatattccacactttttcccatttattaactttaa

SEQ ID NO: 90381 - DNA, 227 bp, Homo sapiens
  misc_feature (1)..(2): n is a, c, g, or t
  misc_feature (131)..(131): n is a, c, g, or t
nnaggctgaggcaggagatcctctgaatccaggaggcagaggttgcagtaagccgagatcacgccactgcactccagcctgggcgacagagagagactccatctgtaaataaataaataaagacagcaccngtgcagacagcaagtatgaatgtttatcaaaaatagatttcaattgtactatatgtggaatgaaattttacatattattcagtatatatccattag

SEQ ID NO: 90382 - DNA, 219 bp, Homo sapiens
tctggggctcaagcgattctcgtgcctcagcctcccgagtagctgggattacaagtgtgtgccaccaggcctggctaatttttgtatttttagtagagacagggtttcaccatgttggccatgttttgttttctttttcacagtgttgcaggatctttgtgtacttaagtgtttttagaagatgaagttctagaagtggaattgctagtgcccaagagt

SEQ ID NO: 90383 - DNA, 248 bp, Homo sapiens
tctcgaactcctgacctcaagtgattcgcccgcctcagcctcccacagtgctgggattacaggcatgagccactgcgcccggccaaaaatttaccattggaaccatgtttaagcgcacagttcggtggcattaaacgcatttacgttgttacgcaaccatctccagcactttgtcctcttcccaaactgaaactctgactccatgaaacactcactccctagcccctgacacctctgcatcctacttt

SEQ ID NO: 90384 - DNA, 624 bp, Homo sapiens
caccagctcagcaccgccgtgcgcccagccagccatggggaagatcaccctctacgaggaccggggcttccagggccgccactacgaatgcagcagcgaccaccccaacctgcagccctacttgagccgctgcaactcggcgcgcgtggacagcggctgctggatgctctatgagcagcccaactactcgggcctccagtacttcctgcgccgcggcgactatgccgaccaccagcagtggatgggcctcagcgactcggtccgctcctgccgcctcatcccccactctggctctcacaggatcagactctatgagagggaggactacagaggccagatgatagagttcactgaggactgctcctgtcttcaggaccgcttccgcttcaatgaaatccactccctcaacgtgctggagggctcctgggtcctctacgagctgtccaactaccgaggacggcagtacctgctgatgccaggggactataggcgctaccaggactggggggccacgaatgccagagtgggctctctgaggagagtcatagatttctcctgaaatatgtcctcctttgttgtttcttaatttggaaactaataaaatattttctgtgtgttcctggc

SEQ ID NO: 90385 - DNA, 307 bp, Homo sapiens
cattttccttatgttgagaagacctcagtagaattcatggaggatgtcgaatgcaggaatggggataatatagcaacaagctagtccatgcaggaacatttaaagagttaaaaagacatttgtaaagtaggcagcagctcagaagtaacctcttacagatatcaagaggtgataggagaaagattagctatttaagcaaataattaggacacaattaaggccaatttggcctcttgctgagggtaaattaaactctaacagaaacaggctaattaccctcaggaaagagggctaaaggatcctttac

SEQ ID NO: 90386 - DNA, 326 bp, Homo sapiens
gtggttgtaatatcattatttggcattgaaattcaggaagaggaaatactcagtaaatgctttctgactaataaataaggtcataaacgggtttgcttttttgatataattctatgattaatatttatgatataatctttaagaatatcaaattaatgtaagattttagattttcagttaaattgtgtatttagttaagtacaaatgaaatatattaattactattgtgtatgctatgctatggagggttttagaattatttagacaactttttccttcagaaaccaaatattctaaatttctatattgatgcacacatgaaataa

SEQ ID NO: 90387 - DNA, 214 bp, Homo sapiens
tttttttttttagaccgtttcagacctgaaaaaactaaagaaccagagctttactatttgtagaaggccttaaaaggagatagaatggaaaaaattgtaaaataagtattgcaacatgtaattaacaatattgttatctgtaccaacgataaaaccgtggtacggaatgctactgggagttaaattgctgtttaatagcacaaaacctttaaat

SEQ ID NO: 90388 - DNA, 459 bp, Homo sapiens
tttgtcttacctttcctgatgtctgtattcctcataactgatactacctaaggaagcctctgctatttgaaacccagtatatcctgagcctgacagaacttatcctgtctcatgcactcacttccaaagactctcaaattgaggtgagcactcccagccagccttcaattcagtacctctgtcttctgacacatacaacctaccatcattgaaccagaaagaaacagaaaatctaaacagaccaataatgagtaacaagatcaaaatagtagtaaaaaatctcccatcaaagaaaagctcaggacctgatggattcactactgaattctgctaaacatttaaagaactaataccaagtctactcaaactatttcaaaaaactgaaggggggaatacttccaaattcatctatgaggctagcattaccctgataacaaaaccagacaaggtagagccgag

SEQ ID NO: 90389 - DNA, 521 bp, Homo sapiens
tgggggacattgcagcacattgtgggaagctgaagggtggaacttcattatgaacacaagttgtcttaatatgtagataaagtcttttaggtaatctcttggaactgccctcagaagaataaaagcctgtctgggtgtggttatgacttttagtcttttctttggtgactaatctttcctggttatttgatgagattcctggggaaggagttttaagacaattgcatttctaggccaggcacagtggctcacgcctgtaatcccagcactttgggaggccaagggaggcagatcatgaggtcaggagttccagactagcctggccaacatggtgaaaccccgtctctactaaaaatacaaaaattagctgggcgtggtggcacacggctgtaatcccagctactcaggaggctgcggcaggagactcacatgaacccgggaggcggaggttgcagtgagctgagactgtgccactgcaccactcctacctgggcaacaggagcgaaactccgtctcaaaaa

SEQ ID NO: 90390 - DNA, 241 bp, Homo sapiens
  misc_feature (38)..(38): n is a, c, g, or t
cacaaaagtgggttatcctggcagcacagtgtacctcntagttgttctctgatgtgtaaaacttggtgtaacacatctgagtgtgtgtgttggtgttttattccagtagttaaaatagacataagacaaattcatataaaatgtttgtagactgcaatgtcttctgaagaatgctgtcagaaaatcattattctaggtccccaggtttacatccctctgtgagacgctcttgtaccagttg

SEQ ID NO: 90391 - DNA, 260 bp, Homo sapiens
ccagggtacatcgtttctcgggatccaaacctacctgccaaacagactatcctctccccactgtcaccccaaatcaacacacagacagaaacacctgacccttttgaaaagcatagaaagcaggacacacactgggatcctgaacaaatgcccagctccatgtagggtggcctgatttgggttcaaaggcgagaaagcacacggggtttccttgctcccccactagatttaagtagggttttaaagcactcttctctggc

SEQ ID NO: 90392 - DNA, 1106 bp, Homo sapiens
ccgccaagcatattgctaggcacagaacaggtgtgcaacaaaagttatttctcaggctttccctcctctgagcgccgtcctccagagggtccggagtgtagctgggggttggagcagcagcctcctaggcgatgggacagagcccacagggtccggtatgccacggtttcttcgtcagaccctgggaatccaacgtcgcaaaataaacacggccgcgccgctaatcgccagttcggaggaaacaaaacagcgctgcgctgggggatctgggcaaaatcagccctccctcctcccgctccttcgccgcggccctcccctcctcgcgctgctctcgttcgcttggctcagctcagctcagctcagcgcagctccgcggccgccaagccgaggcgggcacggtctccgagtcgcggacgccagctccgagctccctctctccgccgcgcctcctccaggtcgcgccttcgtcgggaccacttcgggcaggagtcgcgtggcgaaggcctgcggccgcggcacaaagttgggggccgcgaagatgaggctgtccccggcgcccctgaagctgagccggactccggcactgctggccctggcgctgcccctggccgcggcgctggccttctccgacgagaccctggacaaagtgcccaagtcagagggctactgcagccgtatcctgcgcgcccagggcacgcggcgcgagggctacaccgagttcagcctccgcgtggagggcgaccccgacttctacaagccgggaaccagctaccgcgtaacactttcagctgctcctccctcctacttcagaggattcacattaattgccctcagagagaacagagagggtgataaggaagaagaccatgctgggaccttccaggaaatctggggctccatgtggcagatctccccagtgaccctccagcgcaggtgcttcaagacaggaagtctaagcagccaccgtttcggtgtatatgctcattatcctaattatgcagcagcaacagcgcctaagagtatcttttcaaatttcaactgaagtcacatgaagacccagatactaacatatggtgataaatgttataaggaaaaataaaggtaat

SEQ ID NO: 90393 - DNA, 1110 bp, Homo sapiens
ccgccaagcatattgctaggcacagaacaggtgtgcaacaaaagttatttctcaggctttccctcctctgagcgccgtcctccagagggtccggagtgtagctgggggttggagcagcagcctcctaggcgatgggacagagcccacagggtccggtatgccacggtttcttcgtcagaccctgggaatccaacgtcgcaaaataaacacggccgcgccgctaatcgccagttcggaggaaacaaaacagcgctgcgctgggggatctgggcaaaatcagccctccctcctcccgctccttcgccgcggccctcccctcctcgcgctgctctcgttcgcttggctcagctcagctcagctcagcgcagctccgcggccgccaagccgaggcgggcacggtctccgagtcgcggacgccagctccgagctccctctctccgccgcgcctcctccaggtcgcgccttcgtcgggaccacttcgggcaggagtcgcgtggcgaaggcctgcggccgcggcacaaagttgggggccgcgaagatgaggctgtccccggcgcccctgaagctgagccggactccggcactgctggccctggcgctgcccctggccgcggcgctggccttctccgacgagaccctggacaaagtgcccaagtcagagggctactgcagccgtatcctgcgcgcccagggcacgcggcgcgagggctacaccgagttcagcctccgcgtggagggcgaccccgacttctacaagccgggaaccagctaccgcgtaacactttcagctgctcctccctcctacttcagaggattcacattaattgccctcagagagaacagagagggtgataaggaagaagaccatgctgggaccttccagatcatagacgaagaagaaactcagtttatgagcaattgccctgttgcagtcactgaaagcactccacggaggaggacccggatccaggtgttttggatagcaccaccagcgggaacaggctgcgtgattctgaaggccagcatcgtacaaaaacgcattatttattttcaagatgagggctctctgaccaagaaactttgtgaacaaggtaagaccctgtgggtggg

SEQ ID NO: 90394 - DNA, 402 bp, Homo sapiens
agttgggggccgcgaagatgaggctgtccccggcgcccctgaagctgagccggactccggcactgctggccctggcgctgcccctggccgcggcgctggccttctccgacgagaccctggacaaagtgcccaagtcagagggctactgcagccgtatcctgcgcgcccagggcacgcggcgcgagggctacaccgagttcagcctccgcgtggagggcgaccccgacttctacaagccgggaaccagctaccgcggtaagtggccgcccggcgtggcattaggagagcgggacccggtccccggagggcgccgacctcgcggtgccggaggagggcgcgcggtctccgggcgcgtggcgcgggtgcagcccggcaagggcccttctgtcctggctgccctcg

SEQ ID NO: 90395 - DNA, 364 bp, Homo sapiens
tgctagtacaaatgtctcagagaactttcccttccagcacatgcaggtcttccttaatatttctgtgggttgtagtatagtattccagtgtattgatgcatgataatttatttaactgctccccattgataaacatttaggttgtttctagcttttattttttctattagaaacttgtgtctacattgtatggaaaactgtggcaaacatccgttggctgactccattaactctctacctttccgcacacattccacaaataaatctctgaccttttccctatcttggctctcttaaggcaagcttgggttcatatgtggtcctataccacatgagatattctgatctatagctgcattcagcc

SEQ ID NO: 90396 - DNA, 461 bp, Homo sapiens
gatcgcttgagaccaggctggccaacatggcaaaaaccccgtctttacaaaaaatacaaaaatgagttggttgcagtggcgtgcatctgtagtcccagctactaggggggctgaggtgggagaatcgtttcagcacggaaggttgaggctgcagtgagccatgattgtggcactgcgttccaacctaggcaacagagtgagactctgtctcaaataaatagttaaataaaaataaaaaaatatatattaaaatatatatatgtatattttaatagcgagggtttaaaccaaaagttttggttttagctttagttaaccagaaatgttccttgaaatccctgaaaaatgttactgtttcttattactgttttgacctcatcttttaccactattttttcaaccactctgccccattatagtggttttatatagcttttaatataccaaactgtcaggcgggt

SEQ ID NO: 90397 - DNA, 442 bp, Homo sapiens
gagttttgacatttttttcacagtaagctgaccaatttccttgaactttatctgttggaatttcttgaagctttatgacttccttcatttgaattcatttcttctagtcttctaggggctctacccatctggcatcactttttaaatttaaaatttatccactgggcgcagtggctcacgcctgtaatcccagcactttgggaggccgaggcaggaggatcacctgaggtcaggagtttgagaccagcctggtcaacatggtgaaaccccatgtctactacaaatacaaaaagtagctgggcctggtggtgcatgcctgtaatcccagctactcaggaggctagggcaggaggatcgcttgagcctgggaggcagaggttgtagtgagctgagatcgtgccattgcactccagcctgggcaacaagaacgaaactccgtcta

SEQ ID NO: 90398 - DNA, 370 bp, Homo sapiens
atttcatttaaacttttattaacaaagtattcattcaggtatcacttggtttggccaaattctgtactatttgttttgtagacagtgatttgaagtctaggatgatattatttccagaggtatttacagttgttaaaattatttcactagactgtttttaaagttttaaaattggattgatttgttttaaagttgtcttcttaaagtagtattttggagaattattgtggaattatcatttgtttttaatgcatttttttctacttagtatttttattgtatatatttagagtgtaaaatatgatgttttgatatgcatagtgaaatgcttagtacaatgcattttctttatttaaatagtgagttaatt

SEQ ID NO: 90399 - DNA, 494 bp, Homo sapiens
acagcaggacttttaggttttacctaggttcacacatcccatttaaatcaatttgtttttccccatattagaatagctcactgcaactaatgctggccccacggttgcctacacagtcggctttccctggtgcactggacaccaacagaaattaagaatctcaactgcatacaggagatgtgctttttaacagccaggtagttgtgtgtgtggccttcacaatttcagagcctttctgccatccgaaccagcaagcaatctgattcagcaccacggacagtgccatgctcacctccccctccaagaactctccaaaaccccaacgcttagattacatcataaacctctccaataattcctgaataaaatggtactccccaccacccaagcatctcaaaacattcaaaataccaagaaacaggtattaccactcagacgtttaagacattaaagatcaatttcagtcttgatagtctcttaatacacttaattaa

SEQ ID NO: 90400 - DNA, 448 bp, Homo sapiens
atcagtatatgcgaatttagtgcatgataaaagtaatatatcagcggacaaaagagaaattcttcaaatcatgagttataggcaaccaattaactatttggaagaaacctcaaatgaatcaaaattttaaatataggaactataaagatagctgagaggaattatttttaagcaaactaccaaagacagaaacaatcataaaaggaaaacaaaagatttcaacatacacagctttaaaacatccatatgacaaaatacttcattaataaatgggacatttggggatttagttttaatttgaatttttgaaaatatataacaaaggggccttataaatctatattaaagaggccacccatggtggctcacacctgtaatcccagcactttgacaggccgaggtgggcggattgcctgagctcaggagatcgagaccagcttgagcaaca

SEQ ID NO: 90401 - DNA, 287 bp, Homo sapiens
ctaggaggtagggagagaatttactaagtaaggagagaaaggaaaaagaacaaacatggaatatgatcaagcaaataacttccaacagaaacaagaagatatgttttaaaatatatttcccctgcccaatagtaaaacttatttcaggcacaatgcattactgaggtgaaattaaagttacataaaattgaaaacatcacactggaaaacatttcatgggtctcaactgaaggtggcatagtccaggaaggcatttggacatgtatgggttgttttctggttgcccc

SEQ ID NO: 90402 - DNA, 480 bp, Homo sapiens
  misc_feature (2)..(2): n is a, c, g, or t
  misc_feature (235)..(235): n is a, c, g, or t
  misc_feature (343)..(343): n is a, c, g, or t
  misc_feature (347)..(347): n is a, c, g, or t
  misc_feature (354)..(354): n is a, c, g, or t
  misc_feature (364)..(364): n is a, c, g, or t
  misc_feature (373)..(373): n is a, c, g, or t
  misc_feature (375)..(375): n is a, c, g, or t
  misc_feature (425)..(425): n is a, c, g, or t
  misc_feature (428)..(428): n is a, c, g, or t
  misc_feature (441)..(441): n is a, c, g, or t
  misc_feature (452)..(452): n is a, c, g, or t
  misc_feature (470)..(470): n is a, c, g, or t
tncgttagacattgaagctataacaaaataaggcccaggtatcgctcctgaagagtagcattctatttgggaaaaaagccttgaaagcaaatcattaacagcgatttcccattttgctatatgtttgtgttggtttttcttgaatcttttacattgaaaacacattcacctattccttcagttataaaaaaattaaaaatcaaacaaactcttaaaggattccgtgggctttaanagatgtgtctgaaggatggaaagaaaagtattaagtcagcagcagagaaaaagcaattaattcgggggggtgggaggagcagtcccacaaaagcttcaaagaataaangacntttaggntggttcttgnaagacagcngnacaaattttgccaagtatagtatgctaagcttcaaggccagtgtcaaagnagncaaataattgggncctaaaggttntaagattcagtaagttanattgttatgg

SEQ ID NO: 90403 - DNA, 489 bp, Homo sapiens
agatgaatttttaattgtcagcaacaatctaattagtcctgaccagagcctgttctttctttcagcctatttgcttttgccttcagggttagtagctggcaactaatatccactagaactgaatcacccgaattatcatagggctgagctaatatcctgctgtagatgctatcataggcagaaagaaaattgaaaggcaagttctaccatggcctggctgtaagcagccactgttaggtccagactccatgctttaaagttagcctcaagattcctggaaatttttacttaggctaaactagggaccccccaaaaggtgtcccagttatttttagtatccctttgttgcaagatagtataggatatggggcaaaactagatctcatgctttcagtagttaataaccttaacagttgtcatttatttaaggcctgtgctgaatgctttatatagtttttctcatttattccccaaaacaattattgtaaa

SEQ ID NO: 90404 - DNA, 392 bp, Homo sapiens
gttgaagttccccagccagttaaagggcacaccgtgggggcagcatatctccatgggtctatctctagcaaacagaatcccagaaacttgagcacctgatatagcagaaggaaataaagattatagtaagtatattcatgagagagaattttttttgcctccagatgtttggggtttggatatgtagggtaaatataaatgtctaatgaaagtaattactattatatttgatttgatatttaatttattatactgaaatactaaattaaatacaaaaaaactcctacatactaactatatgtttctcccactgattcccctcctgcctccttcactgattttgaatgtgtgctcaatttgctagtatgagatttacctctgccttatcagtg

SEQ ID NO: 90405 - DNA, 441 bp, Homo sapiens
tcctgcctcagcctctcgagtagctaggactgccggtgaccaccaccatgcccagctaattttgtaaaaagcttttttagaaatggggttctcaccatgttgcccaggctggtctcgaacttcttgcctcaagcgaacctcctggctcagcctctatcaggtttcataattttactttagccttcgcaatggaatttaaattgtgccagccatcttttatctgtcagacccaggggatttttattgtcattttgaaccagatctatttttgcttaattctatgggaaccacacatagtttgtacatttgccagaaatttgttttccagtgaatattactcaattctaagtaagtacattccgcattttcatactgggacatagtaggggtgagttcaattaggaacatccatttttaaattatatgatgtagcctgaactt

SEQ ID NO: 90406 - DNA, 491 bp, Homo sapiens
tatactagcttagtattattgggagaatgtaatgattttctgtatttcaaaagtgtaaaatacaaagtgggccatggcatgagataaaccagtgaatatgttctgggaacaggtcatagaagggcgtgtatgctgtcctaaggagcttaaacttcaacttcagttcatgggagccaatgacaagatctgagcaggggaaggttgtggctagaggggcattttagacagacaagatcctctgtggattacacctaggctaagcaacgggttaaagttgttgtcttaagacgatggtccaggtaaaagataataaagttttaaattaggatgttagtaggaatgaggaagagggatggatttcagaaatagtaaggaaatgtattagcaggacttgattagtgattgacttggggaaggaggggaagatagagttcaggatgactccgagactgtctggtgtcggtggctaatgactgaagctattaatagag

SEQ ID NO: 90407 - DNA, 302 bp, Homo sapiens
tattagagacggggtttctctgtgttggtcagaatggtctcgaactcccaacctcaagtgatccgcccacctcggcctcccaaagtgctgggattataggagtgaaccaccttgcctggcctggtgtaatagtatttgaagaaggagtgtagcagtttcaagaagcacattgttagtcctagagaaaccatcaaaacaatggcaaggagtatagctaataatggtggaagtaatacagaactctaaaaaaacagtcaattcaagaaaaggcaagaaaaaaaaagaagaaacaaagactagat

SEQ ID NO: 90408 - DNA, 450 bp, Homo sapiens
taggatgggaatggaaaacagtgctggagactggggaagtggctatttcctgtgtctcactggggaattgcaagatcaaagaatgttgttacttttatgtgatgaaaaaatagggcaagaaagatatacctgaatcatcagactgcttaaaatttgggaggaaaaaattctattttactactaaccataaatcacttttgctagatagtactttaaagattctgaattaaatgtatctttaaaaacaacaatataatattactaaaaaatgcagacatacttaaacttgctagaataaattctgtgaggtcttcgtttggtattttcataggatttcttactgttaagttattggaaaatgaaaatataaagtgctttcagaagttatagtattttccaattcattgaattactttgcttgtgaaaatatattaaacatatttaaatgag

SEQ ID NO: 90409 - DNA, 197 bp, Homo sapiens
ggcctcctttcctgagagtctccttgctgccctggcctccatcaaggtatgccaacatggacctactggggcaggaggctggtaatggggtgtctcttgtggtgctacattaggggtcacattgcagctccccatctgttgatcattccctggccttggtctctgtgttccttgctgcaaagccagagctgaggaca

SEQ ID NO: 90410 - DNA, 295 bp, Homo sapiens
taagacttcctgttagtaaaagctacctcatgaaaagtattgatgttatttgccaacatttagactagcttttgttaccgtttcagttattcaatttagtcagcacatgtttgagtgtcttactgcaggtgaataatccatgatttctgccccagagtagttcataagactggtaggatacatagatttgtaaataaataattataattctgggcagtaagtgctgctatagaagtctctataaagcaatgtgcaaacacaagaaaaggagccgttaattccttatagggaaagg

SEQ ID NO: 90411 - DNA, 274 bp, Homo sapiens
attgcccctacatctgtaacccaggccacactactgctcaggttgaacccagggtcattccagctgctcgtacccgttctccgtgagccgggacattcctgtgccacaggcattaccttggcagtgcctctctttaggaggcagcacttgaattccccatgtgccttttcatggattatcgccttaattcccaccatagcccagtgaagtaggttcacatgtccccattttatagatgagaacacatgctcagagaggtaaggcaactcaccca

SEQ ID NO: 90412 - DNA, 132 bp, Homo sapiens
tgagcacatgctgttgggaaaacaacgccaatagatttactcaactcagggttcccacaaaccttccatttgtaaaacatgccatatctgcaaagcacagtaaaatgaggtatgtcgatactttagccctta

SEQ ID NO: 90413 - DNA, 444 bp, Homo sapiens
atttactcttggaaaaccataaactaagacatatgtcataaaaacaatgtatagatttcatgggaaatctatcgagtttagattatatagcacaggtgttaggggctatggaaagtctgcaggggttaattaggaatcctaatttctctatctccagagtcagctctaactacctcaaagaataaaacttatttttcagttagagctataaaatgggaggcaaattttgtctttaaataggtaccatatacatggctgtgtcaaagaatgtactgtatgtaatggtgactagaaaagctgaatgatgtatgacctttaagaaattaaaaataaatgtagaaaatcaggcacgtttatgttccaaaatatttgtgtattttaagataaagctaggtctaaagctgttaggaaatgtttagtgcttaagctttattcttacccagc

SEQ ID NO: 90414 - DNA, 449 bp, Homo sapiens
aatctgcagccgcacacctccaaaaaggtacctcttataaaaagtaagtctgaaacaccatagcatgacagccacaaagcacagcctgtgttcaaaatgcaaagcaggaaagctgctggtgccttcactgtcaaagcgggaagaggtccagatttcttctgccccttttttccttcactatgccccaaaaaggtgaaaattaagggagagaatcttagcatgcaaaccctgcaccaccttctggggattgtcactgatggtgtgtttctgttcggtgggaagagttctttccaaggtgcagatgcccataggcagccatttacgttctcagcctttgaatcctaaacctttcactcacaaggtgagggagagtgacttcaggaagaagaaaattcagagttgtgccacccggaccactgtcaatggaattgcagcctattacatgtcag

SEQ ID NO: 90415 - DNA, 349 bp, Homo sapiens
agtagtagagcactgaatgctcaactgaacctaagcagaaatgtgcatggacataacaaaatacaattcgcccctacatacagaaaaggcaacatggtacagagcatgaaagaggtaggtcactcttctatgcattgtctcagaactgggttcctcttcccagatcccttgcttcctataccccagccacacttgtccaaattcatccctactccagagctttggcacaatttgtcccctctgtctgaaatgttctttccccgtatcttagtaagacgggtcccttctggccattcagatttctgcttaaatgtcatcttatcaatcacatcaatgatcacgcatccga

SEQ ID NO: 90416 - DNA, 350 bp, Homo sapiens
taatcccagcactttgggaggctgaggtgggaagttcttgagctcaggagttcaagacccgcctgggcaacatagggagaccccgtctccacaaaaaatataaaaaattagctgggcatggtggctcacatttgtagtcccagctacttggtaggctgaggtggaaggatcacttgaacccagaaggcggaagttgcagtgagccatgattgtcgccactgcactgcagcctgggtgacagagcgagactgtcccaaataataataataataatgtctggaataatccactttgcatttgtgtagctttttcagtgtttttaggtttatcatctcatcttgtattcagca

SEQ ID NO: 90417 - DNA, 865 bp, Homo sapiens
tgttccctgctggtgcaggatattatgagagttccagaaggaagcagggcataaactgcctggggctgagcagacgcacctgtggtctctatcaccccctggagttctgacctctaagtgaaaagaaaaggaggcagaggtggagaccagacccaacagctccttccaaacaatggttctgcctgtctccttgggctccccaatttcccaggaagcctttcctgcgtgggggggcaactaccctcaggtctctgctctgtggttaactattttcctccattcatccatcatttagtcacttatttaataatcattggtccctactacgtgccgagcatttgctagattctaaagatacagagaaaaccccactactgtcagagcaaacaataagaccaatgtacacaaataatttacagtaatgttcctgtatataaagtgccaaaaagaaaacctgtgtgtgccacaggtttagcctggggcatggaaaaggatatgattacttgtcctctggaagccctcagaacaagggggtctgatttctcccaaagagacaaggtgtcaatggatcttcccagcagagagaagcgcacgcacaagaaccctggatggagaaggagcaatggaaacagaagtgagagaactgattgaaagagaggcattgttatagctgggtagcaggcaatcgacatgagctcatctgagcgtaggaataatcgtgctaccatttctatgaggttgttgagaatattaaatgagttatctaacccttagcacagtacgtagcacaaggtaatcacaatgttaaccactactactcattaaagcattgcatgagaataaaaaattagttacatagatggat

SEQ ID NO: 90418 - DNA, 480 bp, Homo sapiens
tggtgtctccttcatagggtgtttgtaaataaatgaaataatgagtatgaaagctattacccaatgcctggcacacagtgaatgtttgataactggaaagaacactaatttttagattgaatggatcccatttagaaaaacaaaatattttagagttgcattttttaatgaaaagaaaaaagtgggggccgggcacggtggctcacgcctgtaatcccagcactttgggaaactgaggcgggcggatcacctgaggtcgggagtttgagaccagcctgaccaacatggagaaactctgtctcgactaaaaacacaaaattagccaggtgtggtggtgcatgcctgtaatcactgctactcgggaggctgaggcaggagaatcgcttgaacccaggaggcggaagttgcagtgagccgagatcgtgccattgcactccagcctgggcaacaagagcaacacgctgtctcaaaaaaaaaaaa

SEQ ID NO: 90419 - DNA, 586 bp, Homo sapiens
ttcagctagccaaaaatggtattttcatttgctgaaattctaaacaaaataattaaagttaaagcacagatgatgatgctaccttatttttctacatgtgggaaagcttgattgatagtaatgattagcgcctgcatctcacaatcactgagaaatgaatgcagcactgagctctgtttgccctctaagcttgtccccagaaaaaacaagatataccctaaatagtaagttataatatttttattagggaacattattagagtttttttttaatatatctcgtagccatgtcatattaatcttttttcttttttcctttttttcatttttctcttttctcttctcttctcttctcttttctctttctcactctgtcacccaagctggagtgcagtggcatgaccatggctcactgcagccttgacctcccagactcaagcaatcctcccactccagcctcccaactgcttgggaggctgaggcaggagaatggcgtaaacccgggaggcagagcttgcagtgagatgagatcgcgccagtacactccagcctgggtgacagagcaagactctgtctcaaaaaaaaa

SEQ ID NO: 90420 - DNA, 450 bp, Homo sapiens
taaaatacaaaaacaatatgctgcgtcgacgggaaaggcagattcttctcctgtctttttttaaatgattgcttgatttggtttccttaatatcaatatttcccaaagcagtagaccactttgtaacattaatcttcccctaaatattttttctatgctcgctgggtacggtggctcgcgcctataatcccagcactttgggaggccgagacgggcggatcacaaggtcaggagattgagaccatcctggctaacacggtgaaaccccgtctctactaaaaatacagaaaaattagctggacgtggtggcgggcgcctgtagtcccagctgcttgggaggctgaggcaggagaatggcgtaaacccgggaggcagagcttgcagtgagatgagatcgcgccagtacactccagcctgggtgacagagcaagactctgtctcaaaaaaaaa

SEQ ID NO: 90421 - DNA, 667 bp, Homo sapiens
tgatgggcagtatgccatattatacccaaagttcttttaaaaaatatttccatcaaccatttttatttaaaataaacatttgagggaagttaccaaggcagcttttttcctcaaaagtaacctgttcctctttggaatagcacattttaggggcatggttaatacctgagatttttactcagtaaatcctgatggttactgtgtgtaaaatatctttaagtaggattgaaggcctctgtggggaaataaaatattaccaaagtctataaaaataaattttacatgttctcttttatgacagagagcagcactggttctgttatttttaaaatgaataattgatttcttgataggtgtttaatatttcttccctcactgctgattcttagatagaaaccattctttatatttgatagactgttttcagaaaacccttatcaacaagtgtacaatacttatctaaaactatacatttagaatggagcagtttaatactagatctcagaagttttgaaaaatagcaaagaagactggatttggaaagcatggtctacaattggttgttaaattctgaagctatgaagaataaatgtttcaactttggattatgaaaccccatttatgattttttaaatacacttgaaataaaaatgattaaactaaattt

SEQ ID NO: 90422 - DNA, 175 bp, Homo sapiens
gggaagctgttgtcttaaatggaaaaaccaagaaaccagaaatgataggcccaggttctagctctccatcagtcaaacatgaactttactctcgccttctgcagaagatgagtcagtattcctacttcaggagttgtaaaaattaagcacatctcaagcctggtaataagtttct

SEQ ID NO: 90423 - DNA, 178 bp, Homo sapiens
aaatgttcccatagcagaagaatcagccccacagtgcaggggtgtgttagtggggaacgggctctgggctcctgtgggaaccagggaccccctatcttggtaccggtcattggatgtatccccagctcatgcctgtgtctgtcttggcccgtgtggtcaccctgtgttcatctctctc

SEQ ID NO: 90424 - DNA, 324 bp, Homo sapiens
ctcacatctataatcctagcactttgagagactgaggcaggtggatcacttcagtccaggagtttcagaccagcgtggacaacacagtgaagccccatctcattaaaaaaaaaaaaaagatatattaagaaacttttgaaagtataaatcatctaaatcatcatgtataaatgtaagagatatgaaataagctctgtgaaaatataatggctgatggcgtccctgtgtgaaagatagaaatggacattttatgtaatttccatacacaccaaacaaaacaaaagatctttagaatttccaagcatgagtgaggttttacattga

SEQ ID NO: 90425 - DNA, 424 bp, Homo sapiens
gttcagggaggtagtgacacagatgatgctgaagtctgattctggatgtattgcgaaagggaaagcccccaggatgagctgatcatcaaaagtgaggaatgggagaaagaagcaatcaccgcggatgattctgaggattttaccccttccacctctcaattcctgaagacccatcccttccttttaaaatccaactctggccgggcatgctggctcacgcctgtaatcccagcactttggaaggccaagacgggcagatcacgaggtcaagagatcgagaccatcctggccaatgtggtgaaaccccatctttaccaaaaatacaaaaattagccgggcgcggtggtgcacacctgtagtcccagctactcaggaggctggggcaggagaatcactagaagctgggaggcagaggttgcagtag

SEQ ID NO: 90426 - DNA, 653 bp, Homo sapiens
  misc_feature (1)..(1): n is a, c, g, or t
  misc_feature (25)..(25): n is a, c, g, or t
  misc_feature (377)..(377): n is a, c, g, or t
  misc_feature (438)..(438): n is a, c, g, or t
  misc_feature (459)..(459): n is a, c, g, or t
  misc_feature (641)..(641): n is a, c, g, or t
naatccccacaactgtccaacagantctatttcatactgattctacaggtaagaaaaataaaatttaggaggttaggtagttgataaatggaggagttggtaatttgatctaaattggtctggattcaaagcccattcttcctttatatcaaagtttatcccatcaccatatagaaatggaaattctcttctaattcttaaataggttatagttaccatgggagtattctcccccttgctctgactcaagccacatgctgaagatgatgtgttacgaataaggctgagaccaggagactgggcttctgggctcagctctgtttctaactagcaagtttgcacactgtctctgtggtctcccctttgtccctgtggcnttttcggcttttcttgtttgggctttttggctcctttttattagtatctactgtatgctcngcacttgataggttatctctngtacttaaactaggatacagattgtctccaatttagaagtgaaaaagctgaggcctggagatttcaagcaacatgcctaatacctctcagtccacaaaatggcaaagctgagatttcgcctgaagtgtgtctgactctaaagctcatgttcttgccatcttaccagctgcctcatcctcatntatagcctcatg

SEQ ID NO: 90427 - DNA, 421 bp, Homo sapiens
gaaggccaggcacccacgaggcggcctcgggttcccacctgtgtcacacagcccgggaaccacgtgcaaagcgatcccaagcggtcgctgaccctctctggtcatgagttgagggccatacagatccagtttcattcggaacagcacatggaccctctgtttctccctctgggagcacacagggagatggacacttgcaccctgcccttcacactctgcagccatgaggccaggaagcacttgaagggtgctctgtcatctgaacagaaaccccacactctttggtttttccatttctctccacagtagcttccacatcagcacagcccttccccaccccctcacccccacactccccaccccctcccagattctaagatctgaagcagaacatttctctggttattatcttcaaagctcc

SEQ ID NO: 90428 - DNA, 585 bp, Homo sapiens
taagattgtgctatagaaactacatggtcacctccatttctaaattgttagaatgctgtcaacctgtaaacatcatggcattaagagagcatttgcctaactgtgaaagggttgtatggaaaaataataatatattgcatcaatagttagaaagttttaacttttagaaaatgattttatgaaattagcctgtgtaacttcataaatagatgagttaatgaaattctaaacatgtgaatgtttgctaaaaataaaaatattttatcccctttccactttaggaaaaaatatattaaatataaaaacaaactcacatgtatcaatatttttttaaatcattaaccatccttctttcataggtttaaaatctttattgaagggatcactgtaatgttttacacacaacgtttggctgatagtaactggcaattggatttagaatcccaattcaagcacaaatccctggatgtcacaggggaaccttgatccttgatctaaggcaaataagttcttctccaagttttataaaagaggatcacttatagccaaccatgacgttataactctcatggcatggtgcttagt

SEQ ID NO: 90429 - DNA, 151 bp, Homo sapiens
atggaggagaatttgtcatctaagtttcaattactattatttaaatttaaaatttttgaacaactagtacattcatatggtccaaaatttcaaccatataaaaacataaaatatttattgccagtattgttctattgttcttttttttttc

SEQ ID NO: 90430 - DNA, 299 bp, Homo sapiens
gggttttgccacgttggccaggctggtctcgaactcctgactttaggtgattcacccacttcagcctcccagagtgccgggattacagtcgtgcgccagtgcacccagccttgaatccttctgatagaggaatattttccaaattaagtaaaaagagctttactggaggtactagttcttctcaaatttcagtttgcataagaactgccttaaaagaatgattagaagtgaagcttggaagaatgctgactgctggactttatttcccaaatggataaggtggggaccgggaatctagg

SEQ ID NO: 90431 - DNA, 496 bp, Homo sapiens
ggtggtggaagggtggggtgtagtgggagtggggagtcgcctgctgcagaggcacagcctcatggacaacctgtgttagggcagtgcacctgtggctttgcaggttttagcccccgcggctgctctcagggactgggctgctgttgagtgcctgtagcttttccacagtgggggtgcaagctgttggtgggtctatgaatctggctctgcctctgcagcaggcttctgcctggaaacagtgggaggtggaggtgggggttgcgggggcagatccttcaccagtggttaagcaccatcttcttgatgctgaccttgtgatactgagttctcatgagatctggttgtataacagggtgggcacctctttcctctctcagtcttgcttctactgctgccacatgaagcatttccttgccccttggccttctggtatgattgggaggcttcctgagtcctcccggaagcagaagccactatgcttcctttacagcctgca

SEQ ID NO: 90432 - DNA, 731 bp, Homo sapiens
aaatattcctactagtttacagcttcagtgcttcccccagtgagcagatctcagctgcgattctccacatttctggattttgccctataacctcagtttcactgatgggccaagaaaagtctccaattttcagtttgtttagtttttttgttattgtaaggacaggagtgatgacttcaaagatctttacaagccagagttaaaactggaaattcaaccacagctttccttattcactaagactgcttctcctaggccacagaatcaagaggcttggttttctttcttttttttttcctggtttttatttttattttttatttttttgagatgaagcctcactctgttacccaggctctgttacccagaagtccagtggctcaatcttggctcactgcaacctccacctcctgggcatcaagcgattctactgcctcagcctccagagtagctgggagtacaggtgtgcaccaccatacctggctaatttttgtacttttagtagagacatggtttcaccatgttggccagactggtctggaactcctgacctcaggtgatccacccacctcagactcccaaagtgctgggattacaggcatgagccaccgcgcccggctactggttttcaaatgtggctcacatcacggcataccctgccacgcatttaacctgaaaactcccctttcagtaattaaatacatttgcttcacgggtcattatgatgtgat

SEQ ID NO: 90433 - DNA, 496 bp, Homo sapiens
aaaacaaaaaacgggtcctttgaaaagataaataaaactgataaaccatcagcaagattaaccaagaaaagaagacagaaaatccaaataacctcactgagaaatgaaagaggagacactacaactgacaccactgaaatacaaaagatcattcaaggctgctatgaacatctttatgtaaataaactagaaaacttagaagagatgaatatattcatggaaaaatacagctctcctaggttaaatcaggacaaattagataccctgagcagaccaacaacaagcagtgagattgaaatagtaattgaaaaattaccaacaaaaataaaatacaggactagacagattcacagcagaattctaccagacattctaagaagaattggtaccaatccctttgacactaattcacaagacagagaaagaaggaatcctccctaattcattctatgaagccagcatcatgctaataccaaaaccaggaaagaacataacc

SEQ ID NO: 90434 - DNA, 326 bp, Homo sapiens
tgtccatactttagcacatacaaggagaatcttgggagaaattaagggtgtgacccaggaactttctcattttgaatcctcttcctctgccctcctttgattcagttttcaagtgagtgctttgagcctcagagtgtggaagttttcaatcaccccctgaacattaagcctgtatatataaatttgcagagatgaagtaaaataatcaatataaagtgcttatcacataactacacttccaaaagtgttagttttactgttattatgatcatcaccatttcgatttcagtctgccctctccttttaacataacaccatatacagca

SEQ ID NO: 90435 - DNA, 216 bp, Homo sapiens
gccagcctgggtggtggggccactatgcttcctctggtgattctctctaagagaaagagcaagcatgacctttcatcacatcttctcttggatgcattcaagatacagccaccagcagagccccaggtactttggcaggaggtgaaaaatgtcttacaacttccggaaacggcagtccagatcagatcactgtgtgactggctaaccgtgtagtgg

SEQ ID NO: 90436 - DNA, 450 bp, Homo sapiens
gtcaggtcttctctgactcctaggacattcctctctctgtctttgggggttgaattccttgttagaactccatcttgttaaaggggcctcgcacctgcccttgccttctgcagcagccctccttaatcctctccaaacttccatctccagaccaccggattctcctcatgagtgccctgggtggacattggtgaaaggtcactgccttcaggacacaccataggtacagtcaccgaggtaacccagttcaaagaagagcaggatgttcagtatttacaaagggatctagcaattggtccaaaccagtcagtgctggcatgcaccgttcatcgtgccatcagtggcaagatggagatctggcaatgcatggctcacagtaagatacacgccctgtgccattccaccctatcattagaaaaggagtcttctttttctttctttctttctttt

SEQ ID NO: 90437 - DNA, 429 bp, Homo sapiens
tgtactttatacctgaacaaattgacaagaagtgggaattacggtcaggccattttacaaactggggcaactgagttcagagagtttgggccactgtcctgaggccaggcagctggaaggtggcagaactcccggatccctgcttccaaccaccgcgctgtgtctccaggacacgtcctgtctcactgggttttctgctcctttccaaatctgaggaccccaaaagaaaaggcctgttttataataacggcttcttttcgaagaggtgtgtgaataatgggggaaacacgactccaaagtactttttctctccagcctgggcaacatggcaaaacaccatctctagaaaaaatacaaaaatcctccaggtgtagtggcacatgcctgtggtcccggctactcgggaggctgacgtgggaggatctcttg

SEQ ID NO: 90438 - DNA, 337 bp, Homo sapiens
tgtagagatggggtctcactatttagcccaggctggtctcaaactgctggcctcaagtgatgctgccaccttggcctcccaaactgctgggattgtgggcataagctcctgcatccagctggttttgtttgtttttttactgcactcaatttcccccagttacgtgcctagcgtaattatcctgaacaattgagaggagagtcagataagataacctttatgcagcatccccctgtagttcgtgattcatctatatggtttaatttgatttttttttttttttaatgagagtctttccaagaagtattgccaaagaataaatctcatcagttggcag

SEQ ID NO: 90439 - DNA, 420 bp, Homo sapiens
cccacacccaccccaaggctgcccagcgctggggatgcactgctccgtttaatccatgcatttaatcccaggatttaaacctagggcttgtgtagttgtcctgctcctagcctttgtccttccggctgttctcctagggtagcccctcctcaattaaagaacattcactgcaagccttctggcaggtcagaagaggagaagccaaagaaacaacgctagtccccatacacccatcacccaacagctcagcactgctagcataacacatttctggtctttgaccaagtatccatgaagcaaacatgggaccttagggaaaggcctcaggcaggctggcccatgagaaacccaaggcagggactactcttggtcaaacagccagccctatgcgtgtgacatgcattactctttttttttttt

SEQ ID NO: 90440 - DNA, 303 bp, Homo sapiens
  misc_feature (179)..(179): n is a, c, g, or t
  misc_feature (203)..(203): n is a, c, g, or t
  misc_feature (253)..(253): n is a, c, g, or t
ttaggggttcaataatgtcagctttttacaagctactctgattctaagggggaaaatgccttccccagcatcattttagcaaagtagaatgtgtgtgtgttgttgttgttgttgttgttgttgtttttgagacacggtctcactctgttgcaatcagtcttagttagcacgtggctttntaagtttaagcagataaggaaatnatgggggaagatgaagaagtctgttaccgagaaaaaaagttactacaganggggaaagggaaagaagtcttgctgggaagcctcttttagcattataaat

SEQ ID NO: 90441 - DNA, 267 bp, Homo sapiens
actggcacaggagcccctgggaactaatgctaactggtcattgtatcctgatgcttttcacagggcctggcagagagcaaactttcacaaggctgcctatgagtacataacttcagagggtgttactcacactggagttgtacagtgtacaacctgggcagctgtatgctgatggcctgaatgcccagtaaatgactggtggaattattcttgatatctcccttccaattcccacacccacttgactctagtctcaaaaatacagta

SEQ ID NO: 90442 - DNA, 401 bp, Homo sapiens
catttgctgtaatctccttgtgatcttttagtttcttgtgcttttaaaaataacaatataatggtctatatgtttatcagtttttacaataatttgtctaaacttcgcttataccagtgtgcatgaagaaccaagtgcagtctgaattagcacaatgcaaatagaaaaccgaccttttattttcctcacaaaattaatataaaccttatgtaaaagaatttttaagtgcttgtaaattaataacaaaatcatacataatgtcagtggaggagaaaagttaaggattttatatcgcagtaaaatgcatttctaaatttacttagtattgttataaaacatattcttgaatattgtatcagagtttatcaccactactgaagtcaaaataaagatgaatctct

SEQ ID NO: 90443 - DNA, 412 bp, Homo sapiens
aactttcttgtaaaactatgataattttgactgatactgtattaatttattttccttccttccttccttccttccttccttccttccttccttccttcttttccttcttttccttcgagatggagtcttgctctgtcacccacactggagtgcagcagcctgatcttggctcaccacaacctctgcctcccgggtccaagccattctcctgcctacccagtagctaggattacaggcacccagtaccacgcctggctaattttttatttttagtagagatggggttttaccatgttggccaggctggtcttgaacttctgacctcaagtgatccacctgcctccgcctcccaaagtgtttgggattacaggcttgagccaccatgcctggcctacactgtgttaattttctt

SEQ ID NO: 90444 - DNA, 321 bp, Homo sapiens
tcagatatacccagaaggactgaatgagaaagtgggaacttgctatatggcagtatttcaagaaatggcttatctgggtaaactaacagtaaaatactcgtgtctattatcaaatcaaatctaatgagtgaactcttagtggggtttggaactgcctgagaatattcctatagaaactgggtcatcttgccttctgtgccactagaacctactgtctctccaatagctgcttctctctaattcttcaccatagttttgtttctgtggacttttgaggttctctcctcctttgcttttgacttaagttctccactcctgact

SEQ ID NO: 90445 - DNA, 310 bp, Homo sapiens
tggtacaggtgcaatccttgccccacttcctgggccgagtctggggctagaggagggatgtctgagaccagacagttatctcgggcagagaggaggctccctaaccctcctcactgagcactactgcctgtccccttcccactctaagctgggtctcactgaacccctcaaagacagtgttccatgcttcacacagaaaaaactgaggctcagagaggtcaagtggtagcctgtaacaacttcaccttgaaggagatgaagtttacctaccctggagtaggggcaactggcaggcgacccctgcctgagc

SEQ ID NO: 90446 - DNA, 1262 bp, Homo sapiens
gaagagaaaatcagtgacattccaattcctgaaagagctccaaaacatgtattatttcaacgctttgcaaagattttcattggctgtcttgcagcggttactagtggtatgatgtatgctctctacttatcagcataccatgaacggaaattctggttttccaacaggcaggagcttgaacgggaaatcacgtttcagggtgacagtgccatttattactcctattataaagatatgttaaaggcaccttcatttgaaagaggtgtttacgaactgacacacaataacaaaactgtatctctgaagactataaatgcagtgcagcaaatgtctctgtatccggaacttattgctagcattttatatcaagccactggtagcaatgagattattgagccagtgtatttctatattggcattgtttttggattgcaaggaatatatgttactgctttatttgttacaagttggcttatgagtggaacatggctagcaggaatgcttactgttgcgtggttcgttattaacagggcagcatgcaacttggcagctggtctcccttacagtgaatgatccaagagagtatgagagagtgtgccacaatggaagccaggtatctgttataacctcatcttagaaatgatataacatcactctgccatattttgtcagttgcacagacccctggtacagtgtgggaggtgacaacacaggatattaataccaggaggcaggaatcattgggaccgtcttggaggctggctaccacattcaattaactttgctattaatttcatgtaatccctatatctgtcttcatatttgaagaggaaaagatactttctcatgtaaacataatggttttaaagaataagactctcttatgctacttaaacaaaagaataagactctctttagagatcttagtgagaattgtaagaaataaaataaacagaagtctgactgccttatttgatgtcactgatgtatgttgtattgctggagtagaagttaaatagaaaaattgacctggtatattctactcaaatgtatcttttgacaattgaaatgttcttaatagctaagttttaaaaaatgcgtttgtttgctttttgtttatattttattggtatgtatcttgtactgcaaaatacattttaatgccatgaaagaatatgctgtctctttattcatcagctttatagcttttatttatatatgacttcttagaaaagtataaaaagatattaaagtcattccat

SEQ ID NO: 90447 - DNA, 1137 bp, Homo sapiens
gaagagaaaatcagtgacattccaattcctgaaagagctccaaaacgagcttgaacgggaaatcacgtttcagggtgacagtgccatttattactcctattataaagatatgttaaaggcaccttcatttgaaagaggtgtttacgaactgacacacaataacaaaactgtatctctgaagactataaatgcagtgcagcaaatgtctctgtatccggaacttattgctagcattttatatcaagccactggtagcaatgagattattgagccagtgtatttctatattggcattgtttttggattgcaaggaatatatgttactgctttatttgttacaagttggcttatgagtggaacatggctagcaggaatgcttactgttgcgtggttcgttattaacagggcagcatgcaacttggcagctggtctcccttacagtgaatgatccaagagagtatgagagagtgtgccacaatggaagccaggtatctgttataacctcatcttagaaatgatataacatcactctgccatattttgtcagttgcacagacccctggtacagtgtgggaggtgacaacacaggatattaataccaggaggcaggaatcattgggaccgtcttggaggctggctaccacattcaattaactttgctattaatttcatgtaatccctatatctgtcttcatatttgaagaggaaaagatactttctcatgtaaacataatggttttaaagaataagactctcttatgctacttaaacaaaagaataagactctctttagagatcttagtgagaattgtaagaaataaaataaacagaagtctgactgccttatttgatgtcactgatgtatgttgtattgctggagtagaagttaaatagaaaaattgacctggtatattctactcaaatgtatcttttgacaattgaaatgttcttaatagctaagttttaaaaaatgcgtttgtttgctttttgtttatattttattggtatgtatcttgtactgcaaaatacattttaatgccatgaaagaatatgctgtctctttattcatcagctttatagcttttatttatatatgacttcttagaaaagtataaaaagatattaaagtcattccat

SEQ ID NO: 90448 - DNA, 326 bp, Homo sapiens
tgctgcataacaaatcacccgaaatttaacagcttaaaacaacaaacatctcacatatttctgtgggtcaggaatcccaagaggtttagattggtggttctagctcagggtctctcatgaggtttcagttatgatgttggcttgtactgtgtcgtctgaaggcctggctgggctgaagcatctgcttccaagctcactcatgtggccatttcccagaggcccagtaccttactggcttttggccagggaggccttaatttcttacatatgggcctctccatagggcagcatgcaacttggcagctggtctcccttacagtgaatga

SEQ ID NO: 90449 - DNA, 1120 bp, Homo sapiens
gaagagaaaatcagtgacattccaattcctgaaagagctccaaaacatgtattatttcaacgctttgcaaagattttcattggctgtcttgcagcggttactagtggtatgatgtatgctctctacttatcagcataccatgaacggaaattctggttttccaacaggcaggagcttgaacgggaaatcacgtttcagggtgacagtgccatttattactcctattataaagatatgttaaaggcaccttcatttgaaagaggtgtttacgaactgacacacaataacaaaactgtatctctgaagactataaatgcagtgcagcaaatgtctctgtatccggaacttattgctagcattttatatcaagccactggtagcaatgagattattgagccagtgtatttctatattggcattgtttttggattgcaaggaatatatgttactgctttatttgttacaagttggcttatgagtggaacatggctagcaggaatgcttactgttgcgtggttcgttattaacagttgcacagacccctggtacagtgtgggaggtgacaacacaggatattaataccaggaggcaggaatcattgggaccgtcttggaggctggctaccacattcaattaactttgctattaatttcatgtaatccctatatctgtcttcatatttgaagaggaaaagatactttctcatgtaaacataatggttttaaagaataagactctcttatgctacttaaacaaaagaataagactctctttagagatcttagtgagaattgtaagaaataaaataaacagaagtctgactgccttatttgatgtcactgatgtatgttgtattgctggagtagaagttaaatagaaaaattgacctggtatattctactcaaatgtatcttttgacaattgaaatgttcttaatagctaagttttaaaaaatgcgtttgtttgctttttgtttatattttattggtatgtatcttgtactgcaaaatacattttaatgccatgaaagaatatgctgtctctttattcatcagctttatagcttttatttatatatgacttcttagaaaagtataaaaagatattaaagtcattccat

SEQ ID NO: 90450 - DNA, 252 bp, Homo sapiens
cagaggcaccaaggaggccaaaggcaccaaggaggactgactgctcttccagatgacagtgtcatatgatgaacgaagctgaagccaaacagcagaggcctgaattatataggcgtatcggccagggtctgatcaggcgacagaaatcactccagttatttaatttttttttttttttttttgagacggagtctcactctgttgcccaggctggtctcgaactgctaatctcaggtgatctgcctgccgcgt

SEQ ID NO: 90451 - DNA, 751 bp, Homo sapiens
tgagatggagtctcgctctgtcgtccaggctggagtgcagtggcgccatcttggctcactgcaagctccgcctcctgggctcacgccattctcctgccttaacctcccaagtagctgggactacaggcgaccactgccacgcctggctaattttttgtatttttagtagagatggggtttcaccgtgtcagccaggatggtgtcgatctcctgacttcgtgatccgcccgccttggcctcccaaagtgctgggattacaggcgtgagccaccgtgccctgccaatatgctggctcttaagcacaggagagttgagttgaaatctgttgttttctaccacattcttcaaaaacacatcaaataagtttttaaaataattcaaaagtaatcatgactttgagaagaccaatgcatgacttgctagaaaatatacgagaggttctaacttcgagtttgctctcgtgctcttgttcctcaaagaaatccagcactcccaatgcaatatgaagtatggatcagagaggctgcttagaggactgactgctcttccagatgacagtgtcatatgatgaacgaagctgaagccaaacagcagaggcctgaattatataggcgtatcggccagggtctgatcaggcgacagaaatcactccagttatttaatttttttttttttttttttgagacggagtctcactctgttgcccaggctggtctcgaactgctaatctcaggtgatctgcctgccgcgt

SEQ ID NO: 90452 - DNA, 513 bp, Homo sapiens
gggggaggcgggggcagccacctggcccggacagctgcaggtccggacggccgtcaacaaagtggtgtagtcactacaggtgctcgctgccacacccagctaattttttgtattttttagtagagatggagtttcaccgtgttgcccaggctggtgtcgaactcctgagctcaggcgatccgcccgcctcagcttcccaaagtgttgggattataggcgtgagccactgcacctggcacaggtatatgtatgtattttttacaaaattggatgaagtataatttatttgttaaatattttcacttatgccatgatatcttatttaatctttaatttgtctatgaaaatacctgctctgctagggggcttctagttgaaaactcattaatttaaaaaattaattttgaattcagccacctattcttttttctaattgtttcttgtagcttttgctttgattggaataactttattctaggaataaagttttgtcatctgcaaacatgaaacatg

SEQ ID NO: 90453 - DNA, 198 bp, Homo sapiens
agtgggccgtggactctcaccgtctccccaccactgccctcctgggtcgtcttgactgcccccagctctggcaagtgcctcctgcaggatcccagcctcccctgcagggatcctttgctcattcgcccctcccccgactgatctctgctgtatattcaggactcacaggaaaccacattatttaaactcatcataatt

SEQ ID NO: 90454 - DNA, 391 bp, Homo sapiens
cagtccccaaagccccttgtaaatattcatgaactcaaccataacttaatatacttgagagaattatctttcactaccatcatatgactgaatttaaatttatctaatgtgtttaactttttacaggttaaaaaatttacagatagtttttataagaatggtttggtttatatactcttttcatttctaagttttaatcagttatctactttttagtttactgtttctcttctgttcaatattttaaaacttattcaggaatatgaaaagatatgacagttttattttgacttctgcattttgattgggtccttcagtgaaaaatacagtagcagaatttctaatgataaatatttaatgtaaatactgcaaataaaatataatttcttgt

SEQ ID NO: 90455 - DNA, 947 bp, Homo sapiens
ggtctcgatctgtcacccaggctggagtacagtgatgtaatcactgctcactgcagcctcaaactcctgggctcaagcatctcactctgtcacccaggccggagtgcagtggcacgatcatagctcactgcagcctcaaactcctggactcaagcagtcttcctgccttagcctcccaaagtgatgggattacaggtgtgagccactatgcccagcctacactttattttttaattaacagcactgataaccatattcactgatttgtgaagcctctcactaggattcttagagactaagcgccatcaatgaccaatataaagaattcttaaaatatctcatgctaccttaaaaagaaatttgtctctaaactcacattgctgaacaacagctgttttctatcggttgcacaagcaatgacaatgtaaaaagtgctaagagtagtttgggtttgtgtgtaaaatggaattaggtcctaggctgaataattataaacatattttaacaaatgaatgtctaggtgagatatcctaaagttgtgctggacatatgagacatctagtatgcctggcccctgactacaaagtgccagctacactttcccattaatatggcaaccaaaaactttctttcactttttcaaagggtccactagagggcagtactaaccccagtgagaaccctggcattctcatttagcttccagaactcccttgggaacaggaaacacattcttttaatctcagaatccctaatgttgaacagagtgcctaacgtgtacagtaggtgttcagtagtcatgatggaccaaggctatgatagagggtgccatggaggcacaaaggagggtgagatcaatctaacaagggaaccgaagggagagggaaatcttcacaggtgatgtaagaaagttgccttaatagaggatttggggctaggtgagctgg

SEQ ID NO: 90456 - DNA, 919 bp, Homo sapiens
gtgaaatatgtctttaaatagaaatacgtgcctacatttatatatatatattcctgtatattttaagtgtaatctttgagaaatcaaatttattatgtatatcacagtgtctgtaggcaaatgatgagcaatacatggcttataaaaaatatgctacattaggaattccttcatgtaattgattagaaaattagaggcctagaaagtttcaaatttagccaagccatcattgttggacttcatgccctaatatagtcaactggttatttatgaaagagagaagatgaagttagacaggttattaattaactgaatagcatgtaaaactttctcaggactatatccaaaaataaaatgaaaaagaatgctgtgtaagtattcattatggtctattcattaaaaggaaaactattctaggtgtttcaaatgagaaggggcaggtagttaatacagtaaattagtcataagagtttgaaaggctagaacagcaaaaggtagataagagtgaatttgggaatcaaaagtaatattggtgagcccctgagtctgcacccaattttgtgctattagtcttgcagttagccatggattcaacagggatgttgcctccattgaggctagaaatgctctaaaggatatagctcttcttaggctatctgcccttggaaagaatcactttagcccagctaatatggccacttccaggaactatcatactgctagaaacagaagcagaaaatttcttttttttttttcttttaatcaaccttcttagttccttcagtgcctcctactgccaaaatttaaaagaagtcagttacgaagaaatcagggaaaatatagttcactggaaaacggtttcgtctattttaaaattcggatatgaggctggactcagcagctcgtgcctgtaatccca

SEQ ID NO: 90457 - DNA, 446 bp, Homo sapiens
ataagtgccaaaatccaaactgaacacatctaaaaaaattctaattaaggagcgtccactgctgctttctcaaaaattccttctgtgctattaaatattttctctttccaatggatatttaccatttctactcacagtagtttttctaccaagtattcagaaaaacctccagttgtcacttacccagtgtttaccaaaaatcaggcagaagagcgtggtggaagttggaagaccttagtgtaacccgcgtctataaaaactgggcgtccaggccgggcacggtggctcacgcctgtattcccagcacgttgggagtccaaggcaggaggatcacttgagtccaggagttcaagaccagcccggacaacatagaaaaaccctgtctgtacaagaaatttaaaaattagctgggtgtggttgtatgtgtgcgtcatcctagctacttg

SEQ ID NO: 90458 - DNA, 287 bp, Homo sapiens
atctcttcacatttcgatgtatcatggcatgttagattttaatgttggcgagtgaggcttcttgaatcaaaaattacactggataaagtcaaacagacaaggaagactgtattcaaggccgctgcaataggggaaggaggccagaactaagtgtgaactcaactcctctgaaacaaaaggcagaagggtttttaagggccaggatgagctagtggaaaaatactgaaagatattatgtggggcagttaatcgggtgtgttgggcacacattatggaggggtaccgag

SEQ ID NO: 90459 - DNA, 523 bp, Homo sapiens
cttccccggggcaaaacagtctctcaagtttaggaactgtcaggagtgaatgtgagatgcgtggaaatctgtccatgttgagccctagaagggggcacactgggccagccaagaagggaagcctttaatcaggaaaatctgactggcataaggtcatgggattgtcttgaaaggtcttctttgattcctttcctatgggctaacagggcgggggacactgagcttcatttggagataagggaaggcaggaaaggagatttaaagtcaaataaaaaggggccaatgggacaacaccaaacttaaccacaggagagaggaggaaggaaaggggaaagaaacacgcaaggtccaagtgtccgtcaggtaccaggatcactgaatcacctcctcaaatttcacacaaccactgtgagcagatatcagtatcttctttctacaggtgcagaagcgaggtcaagagtggttcaatgacctcccttagatcaccctgctgataaagtagaccagcagggacttgaagctt

SEQ ID NO: 90460 - DNA, 729 bp, Homo sapiens
aagaccagtcaaggggctgtgtattgtcagattggggtgtgactgtgccggaaatttatcttgtaaattagcaggatcctgtttttgccatactgaaagtttcctgacctattggttctactgagctgatactggccgttgtctcaagggagactgagtattataacatggaagaaaattcccaggtctacaagcagaattgctccgaacccaagataaatcaggtcataggaaagcaagcatctcaaataaaagtgaaaacgtgttaaacacacatatataaagtttccctttatgactaagacaagagaaaggcaggtagcatccattcaactctgtgctggattctgccctaggcctttctgactgactcttccaagctgcttggggttgattccaagcttctggcaagtttctctggagcattttatttttccttgggtgtgtgaatggaagtgttttgtatttaacatcactatattgtttcccatcagatgttctaatgttaataaatccacatccactgcatcccatcccctcttcccagcagattttatatgttacgtagattaggcatctggtttctgagagaatattaaatacttggacatactttgatcctgtgtatttcctgctgtaattttccctctgctcagaactcagactcttgagtttctgattcaacacattgttaatacacattaaagactcaagcatctaaacagacta

SEQ ID NO: 90461 - DNA, 730 bp, Homo sapiens
ctatcgattcggctggaccccacacctagtcttgcagaatggatgattcacctcattttagagtacaagcagcaggatcctgtttttgccatactgaaagtttcctgacctattggttctactgagctgatactggccgttgtctcaagggagactgagtattataacatggaagaaaattcccaggtctacaagcagaattgctccgaacccaagataaatcaggtcataggaaagcaagcatctcaaataaaagtgaaaacgtgttaaacacacatatataaagtttccctttatgactaagacaagagaaaggcaggtagcatccattcaactctgtgctggattctgccctaggcctttctgactgactcttccaagctgcttggggttgattccaagcttctggcaagtttctctggagcattttatttttccttgggtgtgtgaatggaagtgttttgtatttaacatcactatattgtttcccatcagatgttctaatgttaataaatccacatccactgcatcccatcccctcttcccagcagattttatatgttacgtagattaggcatctggtttctgagagaatattaaatacttggacatactttgatcctgtgtatttcctgctgtaattttccctctgctcagaactcagactcttgagtttctgattcaacacattgttaatacacattaaagactcaagcatctaaacagacta

SEQ ID NO: 90462 - DNA, 611 bp, Homo sapiens
ctatcgattcggctggaccccacacctagtcttgcagaatggatgattcacctcattttagagtacaagcagcaggatcctgtttttgccatactgaaagtttcctgacctattggttctactgagctgatactggccgttgtctcaagggagactgagtattataacatggaagaaaattcccaggtctacaagcagaattgctccgaacccaagataaatcaggtcataggaaagcaagcatctcaaataaaagtgaaaacgtgttaaacacacatatataaagtttccctttatgactaagacaagagaaaggcaggtagcatccattcaactctgtgctggattctgccctaggcctttctgactgactcttccttcagctgccagcaaatagtctaaggccaatctattctgatagatggcatttctcatttgggtttcctgctgggctaaaagagttaaagctctgccagtttcactagtgattatttctaagatggcctgtaaccgtatgatccagttgagcatgtagatgggggtgtggtatccctatgagtcgtcttgtgcccatgtggcaggcctatagtactgtatgatcctttcggggc

SEQ ID NO: 90463 - DNA, 588 bp, Homo sapiens
ggaaaagacatgctatgtgtagggcttggtactatctgtggttttaggcattcactcgggagtcttggatgccctgcaggtaaggggggattcctgtatattaataaaagtattggttgggttttatttatcactcttcatgtatatgatctcatggatacaaacaggtgaccttgccaattggtgctttttgtgtgtttaagaaaagaacagtagtaaccttgctccctggataccaataaaaaatctattatttttttaaaagaattttggacctctagttaaaagatcattgtttcccaactgcatgactctatcttgaaacatttacttattgttctttattaaacatatttttaattatcctatgttttaaataatttcttccaagattgcttcctttcaagagaacttttaaacattcagttaaataagaaccctttaaatttctgttaattgtttcaaatgttacataatttgtatggacccattgacagttgtaaactttcagaatattgcgtgtgaatttcaaaaaaatttgtaaaatattcgcatacattgaaattcattaaactatgttttctcata

SEQ ID NO: 90464 - DNA, 1046 bp, Homo sapiens
tcggcggaaagttctccattcacccgcggctgggcactattcgcacccggaagcccctggatcacgagacgcagcccgtggttgtgctcacggtgcaggcgcagctcggcagcgccccagcctgcagcagcaccgaggtcaacataacagtcatggatgtcaatgacaaccacccagcgttcctcaggacctcggatgagattagaatatcccagaccacgccccctggcacagccttgtacctcgcacgtgcggaagacagagacagtgggcggaacggactcatccggtactccatcgccagcccgcagccaggcgtctttgccatcgacagagccctgggggtgctgttcctcaacggcagcctgggcgcgggcgagcagcgggagctcacgctgactctcagggccgaggaccaaggcgtgcatcctcaggcagccctgctggtgctgacagtcgttatcgagaaacgcgaacacagcccatcctggactttcgaacatttggtctatcaagtggaagtcagtgagtctctctcaccgatgacacaaatgctgcaaacacaggcgcacccacttggcccccagcgtgcagcctcgcctcttaggtactcgctggaacccagcgtagactctgctatgtttggaatccgcccttacacgggctggatttatttgcggcgacagtttgactatgaatccacccaaacatataattttagagtgtttgcttggatccccgaggacggattcttgcaaaatgtgagcactacagtcattgttcgcgtctgggatgagaatgacaattcccccaccttcttgcatgatgtgttgtttttgaaagtcgaagagagccctgttccccaaggggtaataggcaaaattacagctattgacatggactctggaaagaatggacagctattatatttccttttgtctgatggaaaattcttcaagatgaatcctaatacaggtagcacttcatagtttccacctattcctttaaaatgagggttcagtactatcacactcgtctttaagtaa

SEQ ID NO: 90465 - DNA, 477 bp, Homo sapiens
atcacatatgttatacttttaatgggaacaggcaagtcagataatgttagataaattctgtagcactgaggacaccatgttaggtgccatccattgacttccatgatgggaaggatgcattccttaccttggggacacaggccctttatgaaaatcagcctcactgttaggttgacttaatttagttcctataatttctttaatgattgtatccatttttctgccatcttcttggttcagtgctgaaaccccagaaaattagtacatagtctgttgccatgtcactttgtgagccaagtgaaaaaggacaaaacaagcggttctgtttttaaatatctaggagaaatcaacaagcttcaggcatatactgaatctgtgtgtttacgcctatgcttattccagaaactaaaataatttctgaaattcctttcaaaaagccaagttaaatgacacgactttctcactgtattctaaaga

SEQ ID NO: 90466 - DNA, 330 bp, Homo sapiens
tttcattccagaactcttgagcatcttcctcagcaataaccagcagccttcagcagggagaacatcatcttaaattgctgcccatttctttgcacagtacacaaaatatgtacattcagttgtcattcttagttcacattcttttttttttttttttaaaggggaaagcccgggcttttgggccagggggggggggcagggggggaacttggggctcagggaaccctttgccccgggggtcaagcaattctccggtgcttaggcctccagggagcggggattacggggatggaccacacaacaccaggcctaggaaggaaattcaaaggc

SEQ ID NO: 90467 - DNA, 347 bp, Homo sapiens
cccttacagagtttcactctgttgcccaggctggattgcagtggcacgatctcggctcactgcaaggatccgcctcccgggttcacgccattctcctgccttagcctcccgagtagctgggactacaggcggccgccatcacacccggctaagtttttgtatttttagtagagacggggtttcactgtgttagccaggatggtctcgatcgcctgacctcgtgatccacccacctcggccatgaataagaatttgagaaattctggttattttattactacgtggtgtagcgagccagttaaggatttaaatctgaaagtgtagcacagtcgtgcttatgttgagga

SEQ ID NO: 90468 - DNA, 428 bp, Homo sapiens
aacatttttttatggctataatcataaaggcttcttggcagatttatttttggttttgtgagatataacatttgctatgttagtttttttattaaagaaaagcataaaaatatatctaaaagtactaatctaaaaatcattcaggacggcaacagaaaaaaaatattttaaaggcagagatggttaataaccacctgtatgaaacctaattgttgcttttgcagatatcgctataaagcatgcttacccctaacctttttattctaactcggtgcttaatctaggctgcctattttattataaagtgcactgtaaaagtatacactttcaaaactttaaacatgaaacttatgtgatattattgaacacctttcactgttacatacttatctgtgcagatatatttattaccaagtgagtggtccttt

SEQ ID NO: 90469 - DNA, 167 bp, Homo sapiens
actctcaggtgatccacccacctcggcctcccaaagtgttgggattacaggcgtgagccaccgcgcccagcctatattttaattattattatctaaaaaaattcatcctcactacttgagatctgtttgtgtgtgtgactcaacgggcgtttcgtttctctcccaaa

SEQ ID NO: 90470 - DNA, 470 bp, Homo sapiens
tgtatgtaaggaattcaatattgattcacttattaattctcacagtgaataaacatccaacacagtgaatcagtattcatagtttgatgtttacccttagaaaaatttccaaagatttttaaatgtgttccttcctccatcttcaaatgattatgcttatttcactgcaatgaggattgacaaagcttctcacattgccattctggaagtggtaacaatgtaacatacttttgcaaattttataaaactatacaaccatgtgaaacacatggctagggaaccttccaagggctcctaagggtcatgtccaagagaagggccctgaaacttaagcttcattagagtcacgataagatagcttctaagtcactgagggtatgaatgcaaaattgcaaatactgaatgtttcctccagataataaggattaaaagatcaagaggcagataaagagagctacctaggaagttgt

SEQ ID NO: 90471 - DNA, 322 bp, Homo sapiens
tttctgccaagctctcttgagtgatactccctttactgtcatcgttagattgcattgatctgacagcagcatagataagataggcttttttggattataaacaattctagcagtttactctaattctgtccttttctcctacctgatcaccctgtgttccaccatcctatgaaaacactgctgtagggtccacacttttccttagtgagatccaggtgaatagcttacctttctgagctgttttctgcatccataaaatgaaagtaatataatcacgtgccttccttggtttagtgaggatgttgtgaaattcagtagatgt

SEQ ID NO: 90472 - DNA, 214 bp, Homo sapiens
tgcactccagcctgggtgacagagcaaaactctgtctcaaaaaaaaaccccactctaccaaaataacacatcacaacagattaaatacagaagcagttatgagcatccagctatcgtctatattaaaccagatattaaagagattttcaaaatgaaaaacaaatgtcacccttctcattaaacttttatcttagtaaatgccgtaatttttcat

SEQ ID NO: 90473 - DNA, 392 bp, Homo sapiens
actcccagtcccattagactagatgcctgtagaaggcagggtcttggcacaatatcaatgtattcaatttcttttatttttttgagacagacttgccctgtcccccaagctggatcctggcctcaaatgatcctcctgcctcagcctccctagtacctgggactatagatgagcaccaccatgtccagggctaatttttgtattttaatagagatggggtttcaccatgttggccagactggtcttgaattcttgattcacctgtgtcagcttcccaaagtgctgagattacaggcatgagtcacctgcctggccagggtcttgctctttatccaacttgccactctgtgacttttcattggggcacttagccccttcactttcaaggttaa

SEQ ID NO: 90474 - DNA, 1864 bp, Homo sapiens
  misc_feature (1)..(3): n is a, c, g, or t
  misc_feature (130)..(130): n is a, c, g, or t
nnnttgctggattaggaatgaggcgccaaaggaagcacagccaggaaaatggccccacagcctagatcagcatctgtgggaaaggaaaaagggttcccatggggacagcccccataggagttttctgganccagtaacactgaaaaataagtgtgtggctacagatgagcacgcccaccccttgcaactccctgtttacaagttgtccgaggcattggagtgcttatggtcaatgggctctagggaagtaggaaactccatcatgatacaaatgtctagtaattttaaagtttctttccctttttttctgtgctggaaatgttcacagatttgattcccgccccaagaattacaacaatgtattcatacagtcagttggaatccaaaggcaattaattctattttgcaaaatatgatggtcttcctaaaaaacaagtactgagttctcatttcaaaagttaccaagaactgaattctttaaactagcaaaccgaagtaacatgaccatttttgccttagtgggaggtttcaaatgtgcagctcatggcatttacctgccgaccatcttttgccaagtttagaattcttatgcgtttcaagttctatatagaaagtaattttacttttgatttttctcttgttaaaaaaaaactcctttattctaagaacaatgtctcaaagtctcatttttactttaaaggtataagagacttctaaagagacttacgggatataaaagtaattcctggaaatgatatttgatgaggagaatgtaagagaatgaaaaacacattgatgttttcatttttaaaaaatacaactagcatgagaaatcaagaaaatatgtttaccaaaatgcattgcaattttcccaaacctgagtcttcaaataacaaacatgaacttataggtactgtgaactagaagaattggttatatccagatttctgggagataaattaaaacatatttttgtggcataaataagctgattcagaagttacatttcttaactttaggtagaggagaatatttgtatccttttgttgctatgcaactgtttaatgatgaagcttcaaaccacaattttgtatatcatatgacaatcaattgttttccaagaatatttattattttaagtacacaatttcagtgaatcttgagtttttctaggagtcccttaaagggaaattagcattccatgagccagtaaaatacctactctggtaaaacattattatggttaaaaagtaaattcaagttagttttttataaagaactataacatttattttaaacattttataataactgaaaacattaaagtgagcaaatgaaatttcaaaaccacttgtaataatgtattttataatcgcactgtgatactatataacacagtctcttttgtattaaaatagtatttttttcacaagctgaaaaatatcttttcctttgttgacaatgttttgtaagatgactttattttcagatctttttctccttttttgcacaaaactatgcttatggtttgtgtcacagaagtgaaaatatatctttgcatttttatatctggtctgtttttcttgtttcctttgtttttaacttgatatagattttcttcaaatatataatggcaattttcagatatctcaccttaccatatctttccttattttcactgcatgcatttaatcactgtattacttaatgtttgatttgttattatgggcatttcaaataggcaagcattgaattgtaatgacaaaaaggctattttatattaaggatatatgcatttgtatttcacacaccagagatgatattaaacactgattattttatgctgctgtttattaaaaatgtt

SEQ ID NO: 90475 - DNA, 5104 bp, Homo sapiens
  misc_feature (380)..(380): n is a, c, g, or t
  misc_feature (678)..(678): n is a, c, g, or t
  misc_feature (820)..(820): n is a, c, g, or t
  misc_feature (856)..(856): n is a, c, g, or t
  misc_feature (1343)..(1343): n is a, c, g, or t
  misc_feature (1430)..(1430): n is a, c, g, or t
  misc_feature (1698)..(1698): n is a, c, g, or t
  misc_feature (1781)..(1781): n is a, c, g, or t
  misc_feature (1879)..(1879): n is a, c, g, or t
  misc_feature (1932)..(1932): n is a, c, g, or t
  misc_feature (2010)..(2010): n is a, c, g, or t
  misc_feature (2410)..(2410): n is a, c, g, or t
  misc_feature (2624)..(2624): n is a, c, g, or t
  misc_feature (2921)..(2921): n is a, c, g, or t
  misc_feature (3657)..(3657): n is a, c, g, or t
  misc_feature (4136)..(4136): n is a, c, g, or t
  misc_feature (4934)..(4934): n is a, c, g, or t
gaaatgggtggcagatgttgtactgttctgatgtactgcagagtgctatagtaggtcagaggatgaagcactgtggaccagtgtggtcagggaagcttcctgcagagtcagggagtgagctggaccttaatgttcatttcggttccgtaaacatttgagagctcgctctaggctagactctgttgggctttggctctacagtggtgaaaaaggcactgttcctgcccagatggatcgtctatcgtgtgtcagagggtggatattgtttgcatggatataatgttgtctttgctgatgacaattgccatatatattcctgtaatttgtgtgtgtgtgctatgtccattatttagtgtagccctcataacatctctctacanctttgtattaatatccttgctgtacagttggggaacctgaggttctgagatgttaatgaaattgtctgaggttgcagagccagatgatggcagatctgagatttgaatttgtgtctgtgtgtttttctatctataagacactgcttcaaaaaggtgaagggaagaggcacccttaaacagagttatgaatgactgtggtatgtgtgtgttttggacatggaagagtttggtgaagtgttggagagtagtggaaagcaaagcgggatcgacaggtgggaccagacatacatagtcatgnttataaacaatagtaataaatgtttgtggcatgaaagaagacagtgcttttggtttgggccgtattccaagaccataagaagactctcatattcaaatagaattgtcaaaaaatcaaatgtgagtgtaaaaattaccattcnattcagtgcattttttcaccaatgtggataactganagttgacagcactggctatgcttaatcaattatggaaataatagtcttaaagaagtaacagacatcagtcaccatgatactatgataatgtacacatgagcctaactcttaattgtagccagttattgtaaactgaagggatttgaggaacagcttttctttttttttttttttcagacagagtcttactctgtctcccaggctggagtgcagtggttgaatctcggctcactgcaagctctgcctcttgggttcatgccattctcctgccttagcctcccgagtagctgggactacaggcacctatcaccacgcctggctaattttttgtatttttagtagagacgggatttcaccgtgttagccaggatggtctcaatctcctgacctcgtgatccgcccgcctcggcctcccaaagtactggggttcaggcgtgagccaccgcgcccagccgaggaacagctcttcttttaaatgtcttagganttcttattttgaataaggaacctttctagcaaagaggcagaaatgaaacttttgttttatatttaggtcagaatttcatttcacctnaactggctatctatttttataccaaagctcagtagtgtgagttaattttttatcactgtaatagttatacatattggtaaatgctaagaatgaaaaatagcaatgttctaactcctgtctccccccctccccccacctgttgtcctggccacttaacaaaggctcatactattatttttttgatgaatcaattttaggattttgtctattgacttcattcccatctcgttaggctgagatttagcactcttctctttctttcatagtnactcaacccagctttgccctatcatctaatcattccagtattactgtatcacaaatattggttattattcagtgtttacactntttaaactatgtcactgttattcccagatgagccaagtagggtactatgattgtattccttcattatttaactcttttctcctcatgataaaaatttnccccccagtggtttagtttatctattgcaaaaccttcctacatcttcagcatnatttcatacattcaaaccaattagatggtttatcagttcatttttttgttttgttttgtttttgtttttttcctgaanacctccatctgagagtcctttgtcatccttctgctctctggattggttgctcagtgggcctgctgcccaggtgatttcctgaacttccttttaatcatcatcttgggaattctctttgccccctatttattccacgtgtcgtttatggaatcttgtatttttttggttaaactcctttttgttggaacataatctccagtatcttcctaagaaagtatttgtaagtcataaagtataagacttttaatctctgtaaatgtcttaattgctttcacacttgatagtttggctgggtacagatttctaggtagttttcttcagaattttgtcttcacatttccagagtttttagaagcatagtagttaagagctcaggccccggagctagactcagtttacnttctagctccatcacttagtaatgccatgactttaaatatattatctaatttatctttatagttgtcccttgactatcatggtttgaactttgtggatccacttatatgtggaattttttcaatcaaatacggatcaaaaatacagtatttctgggatgcaaaatccatgtttatatggagaggattatacacaaaatcaacgtttgtatgctnaagttcttgtgggctgactgcgggatttgagtatgtgagaatttgggtatacgtgcacagtcctgcaaccatcccccttgtgtaccagactgtactatgattttctcatttgtgaaatggatttataaataatactttcctcatatgggatttgttgtaaggattcagtggttactatagccatttagaaaagtggctggcacatgatgagggctttttaaaattgactattattactctaggtcctttatatgtgacctaaaaaacattcaaaagtttatgcatgtgttctttttnctaggtattctgaaatttcataatggtctgctttagtaacttttttcacattaacaaggtagagacccatttggtggaaacgatgctcttcagttccagggctttttggttgttgttgctttaagaattactacccacctgcatcctggattttctctgttttctctaacctactagtcagatgtttaacctcttagaataacttcctgacttttaaagttttacatgtttgactttctgagagatttccttactttattttttaagcttttctaatcaaaattatttcagagccatgatggttttcatttctaacatcttgttctaatctactggctgctccagttcttattttatgggcactatattttctcatacttctgtgaggatacaaattatggttttaaacaattttttttttgtccatgcattagatctgctttttttgaggttttttaaagaggtgtgtgtgagtgtgtataggggtggttctgtgtgaatctccccaccaccacccagattttttataattgaggtcttctttaaatgtctaatgatccttgactatttattcaaatgtaagagtagtgcaccatgaatctctttggcatcttttgtgtgtgtatatgtagggggtgtttagctggtgagctttattgtattatataatgacctgggggagaaccagctgttttcttgggactgccaaaggtcagcatccaagcagctttctccntagtggtccagtttctttcagtaagaaacttccagtcacacacctgtgaatatactcctgttgccagcattctcagagctggtgtgtgtgtgtgtgtgtgtgtgtgtgtgtgtgctgggaaagaggtagacctagttatatgaaagttggaggagcaggaggagggaggaggaggagctaatattgagtatttattttgtaccagacaccatcctaagtgctatagctcactcagtcctcacatcagctctgcagctttgcacctgttattgtcatcttttttttttagatgaggaaagtgaggtacagagacgttaagcagcttgcccaaagtaaggcatctctgctaattgacagagctgaaattgaactcaggaaccttctagattctatgtatttggcttttcacaacatcattcttgttttcaatccttgtcactatctctgctgtgcctgagattcccaaaacgagttgtggntaacccagagaataacccttcagtgcctgatgttggtggagagaagaattgcctagttacatctcatatggctcagcaggggagaggagtgccctcatggttgctaaatgtgggaatggaatgtgaggcaggaggcaggtgagaggttagtacaggtgggaggtgtccccgctgtgtggggaggagggacttttgccactagttctgttacaggtttgggattctaggacactggacactaatgtgcctaatctgtaaggcattctagactgcatcttgtgcagttcattcatcttcccgcctcgcaagccagcagagcctgacttggggcctcagctctgcatggagctacctattgggccttcaacagcgagggttttagtcagaaacacagaaatgaatccttagtgcactgggcagtgggtatcgtattttactaggaggtttttgtctagaagttggtcatttctctgggatatggtataggatgggtgggaagggtgccacaaggaaaaacatgagaatttgtactgtgcaacagtttggtgtttccagttgggtccacccacaaccttgactccaaacttccaaaacaaacacacctgtgcattttgcccaagattctattgctgggtgtttttattgtaccttctggcaacctacatttggtttctcttcctcattgttgctgttttagggaattcttactgacatgtgttgttttttccacttggcctagttagatttggtctactaaaatacagaggagattgtctctatcttagggacttttctttntcctcctagtcaagctcacttccagcctttctttttcctccctgtatataatccctgtgacaacgtttaaggcaaaaccgagatttgtatgttttagctctgttctttctttgctgattaaatttttagagtttaaggaagagttcattaatcagaaccttaacattaaa

SEQ ID NO: 90476 - DNA, 501 bp, Homo sapiens
catcgatgccactcggaggtgcaaagcaacatccacatctcactcctcccggggcttttggcggtattccggcagcgctttctccgccacggtctccataaatttagggttcttccgggagaccgtggcatcgataaacaccggggtttatctatccacctgggaaatctctcaatcagcatttatttcaataatcacatacagagctctggcacttttttccacaaatgcttccaaagcagtttgtaaattttatatagctggggagttactgtggcaggaatagaaggaaatagatatttatcagcttcctaatgagaactggagactcagtgtacttttgttgagaagaacagggatccaagaatgtgtatttaattcagaatgtgtgtgtatttaaatgacatagtatttcattaaaatgtttttcatatttcctcctaatcatccattcaaattctacataactttcaaggcccaccctctagaatcagcttctag

SEQ ID NO: 90477 - DNA, 273 bp, Homo sapiens
catgcatgcactttgcaaagggatattcctaggaaggaagcatctggcatcccggaaaccagcattcattcactgtcagaggaaccagttgttttgccttagtccttccaacataagccctatgatacttcactaaagggactcctgcatgtgatgctgcgtttcctaggaaagaaaaatagtcaggagaccttctgatgcaattgactggagatggaaagccttatgtaactaacctgcacaatgtgcacatgtacactaaaacttagagta

SEQ ID NO: 90478 - DNA, 350 bp, Homo sapiens
tctgtaaggcatgctaggctacttagggagtttggacttgatttcagagcaatacagtgccagcgaagagtataaatatgattagattgacatttaattaaaataactctggcttgctaattggaaatgcgattggaaaatgaaaaaactggagttgaaagggaacagctagacaatcattcaggtgctagtgctttgaactaagatagtgaaatggagatatctggacttcattggatttaatgattaattggatatggggaatgagggagtggaggaatcaagagcaacactgatgaattatttcacgaaagtattgttttgacagagttatctatggcatcctggtg

SEQ ID NO: 90479 - DNA, 475 bp, Homo sapiens
cattcttctgttagacatcagccagatgggtttgggtggagagaaggtagccaaagatctacaaaaaagcaaatagtatgtgacacatttcctacaaaatatgcttatctatagccagtccacattctgaatttagatgggaaggtgaattgcagccaagcctccctccaacagtttgggggaagatttctcttagggaattaatgaggaattatattaattagggtaaaaattaagctgtcgtaacaaagacactcccaaaatgcagcggcataatgaagacagacagtttatttctcattaatgtgataggtctgaggtgagagtacatgttgattgggtggcactattctgaataattaatcagagacaatgatttctttatggtgagccccactatctcactgggtattatctttgtctctgtagttgtagttgatgctgggtcataggcatgtccatgttccagctaata

SEQ ID NO: 90480 - DNA, 253 bp, Homo sapiens
gaatgtgtaggttaacatttttcagcaaatttgggagcttttcagctattatttcttggacattttttctgcttggaactttttttctgcttctttctctctcacatctcctctggtactctcattaaggatgtcccaagcttctattcatttttcttaattatttttccctctctgtttttcaggttgtataatctctattgacataacttcaagtctgctggttctttcttctgactgttccaatttactg

SEQ ID NO: 90481 - DNA, 686 bp, Homo sapiens
catggtgggaagcatgaaatcatggtggctctggagtcagggggttgtgtgagtgacctagctttatcctctgtgagccacagtttctgcatctgtgcaatgtgtgatgatgacagtgccctcctcatagaactgtcatgaggactaaatgagatcaacagatatagaacagctggcacaagcaggaacacaataatatgggccctttcctttctctttcccctcttcacatgataggaaaaagatgtcatcactcctttaaaatatctctcttgcaagtttttgagagagaatgaaaatgggagcctcaaatagctaagcttatcctctttatagctcctggaagtaaatcttatcaagcttgggatttggagtcagacaaacatagcttcagatccaagctccaccaattacaagctatgtgatcttaaacacatcagttaatctcttctaatctgtcttctcaagagctaaatcatatctaagaatatggttgtttagaaagttaaatgggtggtgtatgtaaagtgtctaggacagtatcttatacacagtcagaactcaataagtggtcactcttttaagaactgtcttgggtgtggcacagggagtgcacagaaaaatggagagcagagtgtccacagacatcactattatttttcataatcatcagcaatccttggttc

SEQ ID NO: 90482 - DNA, 262 bp, Homo sapiens
tgatagcattttttgatagtagccatcctaatgggtgtgaggtgctgccatcatttctttttgaaatcaagtgtccagtgcatgtggtctgaaaacttaataggattctaaagtgtccacatcacacctgaaatgtttgcataggtctgtactgtcaggcaaacgtgtgcactcacacatcactctcacctctgtctgtgcccggagcatgattccagttggttcttggtgtcgaggttgtcagtgatggtgatctggtgcc

SEQ ID NO: 90483 - DNA, 366 bp, Homo sapiens
cagttagtgaggctgtggtgttcactagggacatgctctgtcactcagtagcattttgtgagagataccatgagggtcttatttactcagaagtcaaaacattggagtctccagaaaatatttaaaaatcatacaaaattttcagcatgtcttaagtaacaacccagtggcatatctgcttgtgctataagttttatctataataatataattagctcataatttgtgttaaggtagaagtgctaaaattactaccttaaataaaaatttcaacttaatcaaacatatgttgagcatttgcagaagggaaatggagatattaaagtaactaggcaaagtttctaccccaagagctgtatatcagtg

SEQ ID NO: 90484 - DNA, 288 bp, Homo sapiens
tctcacaagcattatgtgtttgagaaagaagctacattcagaaacctgtgattccattcattctggaaaggaaaaaatgaaagtaacagaaaagtcatgattgttagaggcaaaaggtagtggtacatgattgcctacaaatggacaggacaaatttttgagtgttaaaatactgtgtatcttaattgtagattatatatttttcaaaattcgtagatttgtaccacgaaaaaagggtgaattttactctaaagtatacttcaataaacctgattttcaaaaggaagg

SEQ ID NO: 90485 - DNA, 1248 bp, Homo sapiens
cgcccacgagccaggacatgtgctaataatgccctaagccggttataaagacgtggaaattgaggggagaaaaaaaaagggaaaaaaagggtctgtccttcctgggattcctagccgaggccagtctgctgccgtgtgcgtgtgcgtcagggctctccgggcggcaatgggggcttgagagccgggtccccagcgccgggaagggagcgcggtggccgccaccgccaccgccccggagtccggcgccgaagctgcgggcgggcgggcgggcaccagctcggtcaggggctgcttggcgcggcactgtgcggtgcagcggcggcgcggcgcggtgcgggcttttcccaggcgccccggggtcgggtggccaacggcgcggccgcgggcgctgagcgcgaccggttcgcggtagcggtggcggcggcgtgcgtgccaggggctgggggctccgccgcctctcttgcggctcaccgagctccgcgcttccctctctccagggcaggcggcttctcagagcacaacagctccagctggcagcatcacttcccgccaatttatccaacttctgccaaggctctgaaatgccaacaacgtcgaggcctgcacttgatgtcaagggtggcacctcacctgcgaaggaggatgccaaccaagagatgagctccgtggcctactccaaccttgcggtgaaagatcgcaaagcagtggccattctgcactaccctggggtagcctcaaatggaaccaaggccagtggggctcccactagttcctcgggatctccaataggctctcctacaaccacccctcccactaaacccccatccttcaacctgcaccccgcccctcacttgctggctagtatgcagctgcagaaacttaatagccagtatcaggggatggctgctgccactccaggccaacccggggaggcaggacccctgcaaaactgggactttggggcccaggcgggaggggcagaatcactctctccttctgctggtgcccagagccctgctatcatcgattcggacccagtggatgaggaagtgctgatgtcgctggtggtggaactggggttggaccgagccaatgagcttccggagctgtggctggggcagaatgagtttgacttcactgcggactttccatctagctgctaatgccaagtgtccctaaagatggaggaataaagccaccaattctgttgtaaataaaaataaagttacttacaaagagacgggccaa

SEQ ID NO: 90486 - DNA, 814 bp, Homo sapiens
gcttcgcagagcaccggacttggagtcagagagacctggctgcgaatcccggctccgccactttctagcgctgtgaccttggcacaacagctccagctggcagcatcacttcccgccaatttatccaacttctgccaaggctctgaaatgccaacaacgtcgaggcctgcacttgatgtcaagggtggcacctcacctgcgaaggaggatgccaaccaagagatgagctccgtggcctactccaaccttgcggtgaaagatcgcaaagcagtggccattctgcactaccctggggtagcctcaaatggaaccaaggccagtggggctcccactagttcctcgggatctccaataggctctcctacaaccacccctcccactaaacccccatccttcaacctgcaccccgcccctcacttgctggctagtatgcagctgcagaaacttaatagccagtatcaggggatggctgctgccactccaggccaacccggggaggcaggacccctgcaaaactgggactttggggcccaggcgggaggggcagaatcactctctccttctgctggtgcccagagccctgctatcatcgattcggacccagtggatgaggaagtgctgatgtcgctggtggtggaactggggttggaccgagccaatgagcttccggagctgtggctggggcagaatgagtttgacttcactgcggactttccatctagctgctaatgccaagtgtccctaaagatggaggaataaagccaccaattctgttgtaaataaaaataaagttacttacaaagagacgggccaa

SEQ ID NO: 90487 - DNA, 934 bp, Homo sapiens
  misc_feature (919)..(919): n is a, c, g, or t
  misc_feature (925)..(925): n is a, c, g, or t
cgccagccgctgctataaaaatgtgcccggcggcaaagctgcagaaggggcaccgctgagctgccgagaggaagctcgctctgcccggctgccctcttgtagtccgccggcgaggggcagttctcggtgaggaggaagagagcagcggacggcacagcacccgcgcgggccctcccacaacagctccagctggcagcatcacttcccgccaatttatccaacttctgccaaggctctgaaatgccaacaacgtcgaggcctgcacttgatgtcaagggtggcacctcacctgcgaaggaggatgccaaccaagagatgagctccgtggcctactccaaccttgcggtgaaagatcgcaaagcagtggccattctgcactaccctggggtagcctcaaatggaaccaaggccagtggggctcccactagttcctcgggatctccaataggctctcctacaaccacccctcccactaaacccccatccttcaacctgcaccccgcccctcacttgctggctagtatgcagctgcagaaacttaatagccagtatcaggggatggctgctgccactccaggccaacccggggaggcaggacccctgcaaaactgggactttggggcccaggcgggaggggcagaatcactctctccttctgctggtgcccagagccctgctatcatcgattcggacccagtggatgaggaagtgctgatgtcgctggtggtggaactggggttggaccgagccaatgagcttccggagctgtggctggggcagaatgagtttgacttcactgcggactttccatctagctgctaatgccaagtgtccctaaagatggaggaataaagccaccaattctgttgtaaataaaaataaagttacttacaaagagacgggccaaaaaaaaaaaaanaattcntccaggcct

SEQ ID NO: 90488 - DNA, 1369 bp, Homo sapiens
cgcccacgagccaggacatgtgctaataatgccctaagccggttataaagacgtggaaattgaggggagaaaaaaaaagggaaaaaaagggtctgtccttcctgggattcctagccgaggccagtctgctgccgtgtgcgtgtgcgtcagggctctccgggcggcaatgggggcttgagagccgggtccccagcgccgggaagggagcgcggtggccgccaccgccaccgccccggagtccggcgccgaagctgcgggcgggcgggcgggcaccagctcggtcaggggctgcttggcgcggcactgtgcggtgcagcggcggcgcggcgcggtgcgggcttttcccaggcgccccggggtcgggtggccaacggcgcggccgcgggcgctgagcgcgaccggttcgcggtagcggtggcggcggcgtgcgtgccaggggctgggggctccgccgcctctcttgcggctcaccgagctccgcgcttccctctctccagggcaggcggcttctcagagttttcaggtggcgaaactgactggtctggttagagcgcgtccaagccaagccgcagtgctgtttggatttttaaatttctccttctgagtgagaaaatagcaatcgagatggaaccatccgcacaacagctccagctggcagcatcacttcccgccaatttatccaacttctgccaaggctctgaaatgccaacaacgtcgaggcctgcacttgatgtcaagggtggcacctcacctgcgaaggaggatgccaaccaagagatgagctccgtggcctactccaaccttgcggtgaaagatcgcaaagcagtggccattctgcactaccctggggtagcctcaaatggaaccaaggccagtggggctcccactagttcctcgggatctccaataggctctcctacaaccacccctcccactaaacccccatccttcaacctgcaccccgcccctcacttgctggctagtatgcagctgcagaaacttaatagccagtatcaggggatggctgctgccactccaggccaacccggggaggcaggacccctgcaaaactgggactttggggcccaggcgggaggggcagaatcactctctccttctgctggtgcccagagccctgctatcatcgattcggacccagtggatgaggaagtgctgatgtcgctggtggtggaactggggttggaccgagccaatgagcttccggagctgtggctggggcagaatgagtttgacttcactgcggactttccatctagctgctaatgccaagtgtccctaaagatggaggaataaagccaccaattctgttgtaaataaaaataaagttacttacaaagagacgggccaa

SEQ ID NO: 90489 - DNA, 993 bp, Homo sapiens
gggaacggacgctcagggccccggtggcctgggtgcacgcgcccgccgtgcaagggatgctcccggccgcccccggttccgcggctccatctgggatgcggcgaggagggcagccgagctgtccgcaaacaacgggccttttttcaggtggcgaaactgactggtctggttagagcgcgtccaagccaagccgcagtgctgtttggatttttaaatttctccttctgagtgagaaaatagcaatcgagatggaaccatccgcacaacagctccagctggcagcatcacttcccgccaatttatccaacttctgccaaggctctgaaatgccaacaacgtcgaggcctgcacttgatgtcaagggtggcacctcacctgcgaaggaggatgccaaccaagagatgagctccgtggcctactccaaccttgcggtgaaagatcgcaaagcagtggccattctgcactaccctggggtagcctcaaatggaaccaaggccagtggggctcccactagttcctcgggatctccaataggctctcctacaaccacccctcccactaaacccccatccttcaacctgcaccccgcccctcacttgctggctagtatgcagctgcagaaacttaatagccagtatcaggggatggctgctgccactccaggccaacccggggaggcaggacccctgcaaaactgggactttggggcccaggcgggaggggcagaatcactctctccttctgctggtgcccagagccctgctatcatcgattcggacccagtggatgaggaagtgctgatgtcgctggtggtggaactggggttggaccgagccaatgagcttccggagctgtggctggggcagaatgagtttgacttcactgcggactttccatctagctgctaatgccaagtgtccctaaagatggaggaataaagccaccaattctgttgtaaataaaaataaagttacttacaaagagacgggccaa

SEQ ID NO: 90490 - DNA, 1028 bp, Homo sapiens
cgccagccgctgctataaaaatgtgcccggcggcaaagctgcagaaggggcaccgctgagctgccgagaggaagctcgctctgcccggctgccctcttgtagtccgccggcgaggggcagttctcggtgaggaggaagagagcagcggacggcacagcacccgcgcgggccctccttttcaggtggcgaaactgactggtctggttagagcgcgtccaagccaagccgcagtgctgtttggatttttaaatttctccttctgagtgagaaaatagcaatcgagatggaaccatccgcacaacagctccagctggcagcatcacttcccgccaatttatccaacttctgccaaggctctgaaatgccaacaacgtcgaggcctgcacttgatgtcaagggtggcacctcacctgcgaaggaggatgccaaccaagagatgagctccgtggcctactccaaccttgcggtgaaagatcgcaaagcagtggccattctgcactaccctggggtagcctcaaatggaaccaaggccagtggggctcccactagttcctcgggatctccaataggctctcctacaaccacccctcccactaaacccccatccttcaacctgcaccccgcccctcacttgctggctagtatgcagctgcagaaacttaatagccagtatcaggggatggctgctgccactccaggccaacccggggaggcaggacccctgcaaaactgggactttggggcccaggcgggaggggcagaatcactctctccttctgctggtgcccagagccctgctatcatcgattcggacccagtggatgaggaagtgctgatgtcgctggtggtggaactggggttggaccgagccaatgagcttccggagctgtggctggggcagaatgagtttgacttcactgcggactttccatctagctgctaatgccaagtgtccctaaagatggaggaataaagccaccaattctgttgtaaataaaaataaagttacttacaaagagacgggccaa

SEQ ID NO: 90491 - DNA, 1416 bp, Homo sapiens
cgcccacgagccaggacatgtgctaataatgccctaagccggttataaagacgtggaaattgaggggagaaaaaaaaagggaaaaaaagggtctgtccttcctgggattcctagccgaggccagtctgctgccgtgtgcgtgtgcgtcagggctctccgggcggcaatgggggcttgagagccgggtccccagcgccgggaagggagcgcggtggccgccaccgccaccgccccggagtccggcgccgaagctgcgggcgggcgggcgggcaccagctcggtcaggggctgcttggcgcggcactgtgcggtgcagcggcggcgcggcgcggtgcgggcttttcccaggcgccccggggtcgggtggccaacggcgcggccgcgggcgctgagcgcgaccggttcgcggtagcggtggcggcggcgtgcgtgccaggggctgggggctccgccgcctctcttgcggctcaccgagctccgcgcttccctctctccagggcaggcggcttctcagagtaagcaatgcaaagatgatacagagaggtagtaagtggccactttctagaagtgtctgagcagattcttaatgaccgctgcggagtggagagtgtcacggagaattctagcctccttggaaagattagagactctttttaaggtcctcaagattctttggaccaagagcacaacagctccagctggcagcatcacttcccgccaatttatccaacttctgccaaggctctgaaatgccaacaacgtcgaggcctgcacttgatgtcaagggtggcacctcacctgcgaaggaggatgccaaccaagagatgagctccgtggcctactccaaccttgcggtgaaagatcgcaaagcagtggccattctgcactaccctggggtagcctcaaatggaaccaaggccagtggggctcccactagttcctcgggatctccaataggctctcctacaaccacccctcccactaaacccccatccttcaacctgcaccccgcccctcacttgctggctagtatgcagctgcagaaacttaatagccagtatcaggggatggctgctgccactccaggccaacccggggaggcaggacccctgcaaaactgggactttggggcccaggcgggaggggcagaatcactctctccttctgctggtgcccagagccctgctatcatcgattcggacccagtggatgaggaagtgctgatgtcgctggtggtggaactggggttggaccgagccaatgagcttccggagctgtggctggggcagaatgagtttgacttcactgcggactttccatctagctgctaatgccaagtgtccctaaagatggaggaataaagccaccaattctgttgtaaataaaaataaagttacttacaaagagacgggccaa

SEQ ID NO: 90492 - DNA, 1275 bp, Homo sapiens
  misc_feature (1260)..(1260): n is a, c, g, or t
  misc_feature (1266)..(1266): n is a, c, g, or t
cgcccacgagccaggacatgtgctaataatgccctaagccggttataaagacgtggaaattgaggggagaaaaaaaaagggaaaaaaagggtctgtccttcctgggattcctagccgaggccagtctgctgccgtgtgcgtgtgcgtcagggctctccgggcggcaatgggggcttgagagccgggtccccagcgccgggaagggagcgcggtggccgccaccgccaccgccccggagtccggcgccgaagctgcgggcgggcgggcgggcaccagctcggtcaggggctgcttggcgcggcactgtgcggtgcagcggcggcgcggcgcggtgcgggcttttcccaggcgccccggggtcgggtggccaacggcgcggccgcgggcgctgagcgcgaccggttcgcggtagcggtggcggcggcgtgcgtgccaggggctgggggctccgccgcctctcttgcggctcaccgagctccgcgcttccctctctccagggcaggcggcttctcagagcacaacagctccagctggcagcatcacttcccgccaatttatccaacttctgccaaggctctgaaatgccaacaacgtcgaggcctgcacttgatgtcaagggtggcacctcacctgcgaaggaggatgccaaccaagagatgagctccgtggcctactccaaccttgcggtgaaagatcgcaaagcagtggccattctgcactaccctggggtagcctcaaatggaaccaaggccagtggggctcccactagttcctcgggatctccaataggctctcctacaaccacccctcccactaaacccccatccttcaacctgcaccccgcccctcacttgctggctagtatgcagctgcagaaacttaatagccagtatcaggggatggctgctgccactccaggccaacccggggaggcaggacccctgcaaaactgggactttggggcccaggcgggaggggcagaatcactctctccttctgctggtgcccagagccctgctatcatcgattcggacccagtggatgaggaagtgctgatgtcgctggtggtggaactggggttggaccgagccaatgagcttccggagctgtggctggggcagaatgagtttgacttcactgcggactttccatctagctgctaatgccaagtgtccctaaagatggaggaataaagccaccaattctgttgtaaataaaaataaagttacttacaaagagacgggccaaaaaaaaaaaaanaattcntccaggcct

SEQ ID NO: 90493 - DNA, 1108 bp, Homo sapiens
cgcccacgagccaggacatgtgctaataatgccctaagccggttataaagacgtggaaattgaggggagaaaaaaaaagggaaaaaaagggtctgtccttcctgggattcctagccgaggccagtctgctgccgtgtgcgtgtgcgtcagggctctccgggcggcaatgggggcttgagagccgggtccccagcgccgggaagggagcgcggtggccgccaccgccaccgccccggagtccggcgccgaagctgcgggcgggcgggcgggcaccagctcggtcaggggctgcttggcgcggcactgtgcggtgcagcggcggcgcggcgcggtgcgggcttttcccaggcgccccggggtcgggtggccaacggcgcggccgcgggcgctgagcgcgaccggttcgcggtagcggtggcggcggcgtgcgtgccaggggctgggggctccgccgcctctcttgcggctcaccgagctccgcgcttccctctctccagggcaggcggcttctcagagttttcaggtggcgaaactgactggtctggttagagcgcgtccaagccaagccgcagtgctgtttggatttttaaatttctccttctgagtgagaaaatagcaatcgagatggaaccatccgcacaacagctccagctggcagcatcacttcccgccaatttatccaacttctgccaaggctctgaaatgccaacaacgtcgaggcctgcacttgatgtcaagggtggcacctcacctgcgaaggaggatgccaaccaagagatgagctccgtggcctactccaaccttgcggtgaaagatcgcaaagcagtggccattctgcactaccctggggtagcctcaaatggaaccaagagccctgctatcatcgattcggacccagtggatgaggaagtgctgatgtcgctggtggtggaactggggttggaccgagccaatgagcttccggagctgtggctggggcagaatgagtttgacttcactgcggactttccatctagctgctaatgccaagtgtccctaaagatggaggaataaagccaccaattctgttgtaaataaaaataaagttacttacaaagagacgggccaa

SEQ ID NO: 90494 - DNA, 1082 bp, Homo sapiens
cgcccacgagccaggacatgtgctaataatgccctaagccggttataaagacgtggaaattgaggggagaaaaaaaaagggaaaaaaagggtctgtccttcctgggattcctagccgaggccagtctgctgccgtgtgcgtgtgcgtcagggctctccgggcggcaatgggggcttgagagccgggtccccagcgccgggaagggagcgcggtggccgccaccgccaccgccccggagtccggcgccgaagctgcgggcgggcgggcgggcaccagctcggtcaggggctgcttggcgcggcactgtgcggtgcagcggcggcgcggcgcggtgcgggcttttcccaggcgccccggggtcgggtggccaacggcgcggccgcgggcgctgagcgcgaccggttcgcggtagcggtggcggcggcgtgcgtgccaggggctgggggctccgccgcctctcttgcggctcaccgagctccgcgcttccctctctccagggcaggcggcttctcagagttttcaggtggcgaaactgactggtctggttagagcgcgtccaagccaagccgcagtgctgtttggatttttaaatttctccttctgagtgagaaaatagcaatcgagatggaaccatccgcacaacagctccagctggcagcatcacttcccgccaatttatccaacttctgccaaggctctgaaatgccaacaacgtcgaggcctgcacttgatgtcaagggtggcacctcacctgcgaaggaggatgccaaccaagagatgagctccgtggcctactccaaccttgcggtgaaagatcgcaaagcagtggccattctgcactaccagccctgctatcatcgattcggacccagtggatgaggaagtgctgatgtcgctggtggtggaactggggttggaccgagccaatgagcttccggagctgtggctggggcagaatgagtttgacttcactgcggactttccatctagctgctaatgccaagtgtccctaaagatggaggaataaagccaccaattctgttgtaaataaaaataaagttacttacaaagagacgggccaa

SEQ ID NO: 90495 - DNA, 907 bp, Homo sapiens
cgccagccgctgctataaaaatgtgcccggcggcaaagctgcagaaggggcaccgctgagctgccgagaggaagctcgctctgcccggctgccctcttgtagtccgccggcgaggggcagttctcggtgaggaggaagagagcagcggacggcacagcacccgcgcgggccctcccacaacagctccagctggcagcatcacttcccgccaatttatccaacttctgccaaggctctgaaatgccaacaacgtcgaggcctgcacttgatgtcaagggtggcacctcacctgcgaaggaggatgccaaccaagagatgagctccgtggcctactccaaccttgcggtgaaagatcgcaaagcagtggccattctgcactaccctggggtagcctcaaatggaaccaaggccagtggggctcccactagttcctcgggatctccaataggctctcctacaaccacccctcccactaaacccccatccttcaacctgcaccccgcccctcacttgctggctagtatgcagctgcagaaacttaatagccagtatcaggggatggctgctgccactccaggccaacccggggaggcaggacccctgcaaaactgggactttggggcccaggcgggaggggcagaatcactctctccttctgctggtgcccagagccctgctatcatcgattcggacccagtggatgaggaagtgctgatgtcgctggtggtggaactggggttggaccgagccaatgagcttccggagctgtggctggggcagaatgagtttgacttcactgcggactttccatctagctgctaatgccaagtgtccctaaagatggaggaataaagccaccaattctgttgtaaataaaaataaagttacttacaaagagacgggccaa

SEQ ID NO: 90496 - DNA, 935 bp, Homo sapiens
gcttcgcagagcaccggacttggagtcagagagacctggctgcgaatcccggctccgccactttctagcgctgtgaccttggttttcaggtggcgaaactgactggtctggttagagcgcgtccaagccaagccgcagtgctgtttggatttttaaatttctccttctgagtgagaaaatagcaatcgagatggaaccatccgcacaacagctccagctggcagcatcacttcccgccaatttatccaacttctgccaaggctctgaaatgccaacaacgtcgaggcctgcacttgatgtcaagggtggcacctcacctgcgaaggaggatgccaaccaagagatgagctccgtggcctactccaaccttgcggtgaaagatcgcaaagcagtggccattctgcactaccctggggtagcctcaaatggaaccaaggccagtggggctcccactagttcctcgggatctccaataggctctcctacaaccacccctcccactaaacccccatccttcaacctgcaccccgcccctcacttgctggctagtatgcagctgcagaaacttaatagccagtatcaggggatggctgctgccactccaggccaacccggggaggcaggacccctgcaaaactgggactttggggcccaggcgggaggggcagaatcactctctccttctgctggtgcccagagccctgctatcatcgattcggacccagtggatgaggaagtgctgatgtcgctggtggtggaactggggttggaccgagccaatgagcttccggagctgtggctggggcagaatgagtttgacttcactgcggactttccatctagctgctaatgccaagtgtccctaaagatggaggaataaagccaccaattctgttgtaaataaaaataaagttacttacaaagagacgggccaa

SEQ ID NO: 90497 - DNA, 811 bp, Homo sapiens
cgccagccgctgctataaaaatgtgcccggcggcaaagctgcagaaggggcaccgctgagctgccgagaggaagctcgctctgcccggctgccctcttgtagtccgccggcgaggggcagttctcggtgaggaggaagagagcagcggacggcacagcacccgcgcgggccctcccacaacagctccagctggcagcatcacttcccgccaatttatccaacttctgccaaggctctgaaatgccaacaacgtcgaggcctgcacttgatgtcaagggtggcacctcacctgcgaaggaggatgccaaccaagagatgagctccgtggcctactccaaccttgcggtgaaagatcgcaaagcagtggccattctgcactaccccccatccttcaacctgcaccccgcccctcacttgctggctagtatgcagctgcagaaacttaatagccagtatcaggggatggctgctgccactccaggccaacccggggaggcaggacccctgcaaaactgggactttggggcccaggcgggaggggcagaatcactctctccttctgctggtgcccagagccctgctatcatcgattcggacccagtggatgaggaagtgctgatgtcgctggtggtggaactggggttggaccgagccaatgagcttccggagctgtggctggggcagaatgagtttgacttcactgcggactttccatctagctgctaatgccaagtgtccctaaagatggaggaataaagccaccaattctgttgtaaataaaaataaagttacttacaaagagacgggccaa

SEQ ID NO: 90498 - DNA, 398 bp, Homo sapiens
atgttgctcaagctggtctcaaacttgtgagcccaagcaatttgcccaccttggccttccgaagtactgagactacagacgtgagtcactgcgcccagcccattttcagatgaatttagtccctctcttcctttatcagaataatgttctttgtcattatgctcctcagaagtgtatttcttagaggatttgttgtaggattcctgtcttcttgcctcatcatgaaataggcttattattttcctacctgagtctgcaatgtcttcagttcagcctctttgcccatcagcatgcgctttgtgttttcgtccttcgttttctttcttgttttctttctcttgaccttgattgtgatcttgaataatattttgagtaagaaaaacagatgcatctgacag

SEQ ID NO: 90499 - DNA, 506 bp, Homo sapiens
aacacatttgggatagctggaaattcagcctgtttattctctctacccccttaaagcatggaatggctgatctcctatcacaacccactttttgagaagaaaggatcatacacctgtctgatttggttacctcaaatccagtcctattgcccagtattaccttttgttcatatgtccttgtttggctctttcctagaactgccttccctgggactaaattgtagtgggttttagtttaagataccacattaaattttttaaaacacttttaatatttgtgggtacatagtaggtgtatatcctttacctcttttataagggatcaggtaaataatacatagagaaagtaaggaaggagaaaacaaaggtgagagaagagaatagatggatctcaatgcttcatgattaagaataacttttagtacttcttttcagcttacaaagtgctgtgtatattaccttttgtgaagctcacatttccttgaaataaatggggtggtgtctta

SEQ ID NO: 90500 - DNA, 605 bp, Homo sapiens
cagagcaaacatgcacttctatggaaagctcccataaactttaatgctgtttcttactgcaatccaatacttttaaatcagatgccctcaaatagcagttttccctatataaactagaagtacaataaattttagtatgtggttttttagacatgtgaatacattttgctggtgtgtgtgacattttagaatggtttagtccttctaactaatttgttgagaatgatgcaaatattttaaagaaaaattgtaattaacattggccagaatgagataatagtgataattttgagaatccagaaaaggcttcatcacttcacactcagatcatttgccaatccaaaatgtactctattctttctggtactcttaataagttcttcagtttgattggatggcataacaagcaaactgtcttacgaatgttttttgccctcaagaagctattctaaatgaattagtcttccacaaattaatgaattcatattttaagatacatttgcaaaatgtcctatcattccaatgctaatctgcaacctagttaagaaatgttagcctaacaggaaaaaaattctaatgcgaatgaatgtcatgtttgcacagga

SEQ ID NO: 90501 - DNA, 876 bp, Homo sapiens
catctgtaaagtattgattctcaccttgacaaggtggaggtcatgcgtgtattctcccaggcagaggtctttatcagtacttagccgtcagaatgatctgtaaggtgagtacagccactgatatcttcaactgctcagtaccatctccaaggtcatggccagggcatggtgggtttggatctggaccatctggatctcacacggttcagcccaaatgatttctgtggtgtctgtaatcgtggtgtcttgtgaggactgatgaccccagacgtgcagggccacccttatcccttcccctccccttctcctgtcttctcagcacccccagggttacatggcggtcaggctgagaggcaggggtgacaggatggggtgggagagctccagaagggtcggagacctcactctggtaactgtcattctctagggtctgggaattggtcttggaggtgctgactcatcagaattggagatgcccaggctctctgatgacagatggctctggaggagcacaggaggggtgcacccatcagatgttgatgtctctttccagccgcccttcttcaagggggtactgccaggagcctctggctgaggcacctgcgtcctggtttcaaggcatccagggggtcacttgatgatctgggctgttgcctgctgagcgtgggattcgagattagaggaggtggctctagtctctgagtgtcagcgtcttcctcctggatggagctgactgcacactgccctggtttgctcttggaatctggggcgagtgtgagggtgtgtgtgtgcatgtgtgcccaggtgtttgagcatgtggatgggtgcacgtgtggggtatgtgcatgaggctagtggcgctggtgtgtgtgtgca

SEQ ID NO: 90502 - DNA, 1069 bp, Homo sapiens
  misc_feature (731)..(731): n is a, c, g, or t
  misc_feature (989)..(989): n is a, c, g, or t
  misc_feature (1011)..(1011): n is a, c, g, or t
  misc_feature (1013)..(1013): n is a, c, g, or t
  misc_feature (1015)..(1019): n is a, c, g, or t
  misc_feature (1023)..(1023): n is a, c, g, or t
  misc_feature (1030)..(1031): n is a, c, g, or t
ttccctaatctgactgcctcatcttacattcagcctccttccagagtcactctccgcctgctgtctcgtttgtggcagtggaaatagctaagtaatactgtagatatctggacagccatagacggtgtatatagtatataatatgcactaagtccatcattttctttgtcccttctaacaagcctgtgaggcatttaaggcagagttactgtctccatactgcacgagtaggctccaagaggtgacttgcccaaggcctcacagctgctgtgactggtggagcaggtctttgggcctgcagctggccccactgttgctcaggggcaggtccaggtgctctttccaagtgcagcacaagctctagacctgaaactcttggattttccttcctggtgggttttgtttttttgtttctttttaacaccacgtcctctcgtttccttacatcatggttcatgcttttatcaagagatctgatgctgaggaagtggattttgcaggttggctctgctccaccatcggccttaaccagcccagcacaccaacccatgctgctggcgtctaagtgtttgggaagcaacaaagagcgagtcccctgcccggtggtttgccatgtcgcttttgggcctccttcccatgcctgtctctgttcagatgtgcatttcaccagcctggctttccccctcctttaggaatctgattcttcttcctcttcctcctcctcctcttcngtcacatgactctttgtgctcagctccagggttgtttggttgattgatgcttcattgtctacatgcaccaacatatcatgtgactgttcaggtacagtgtgagaagacagcatctcatcccctcttctagaactgatcattgattggagggctaattcttcaaccttgaggcggttcagctggtcgtgcagggctgccttcaaccgcagcagcgtctcctcctccttgcgcagttcctgaagccggctcagcatgttncctggtcacatagccctcggcngntnnnnncccngcctcgnngatgacgccatcgccgccgactcccggaaaccccgctc

SEQ ID NO: 90503 - DNA, 737 bp, Homo sapiens
ttccctaatctgactgcctcatcttacattcagcctccttccagagtcactctccgcctgctgtctcgtttgtggcagtggaaatagctaagtaatactgtagatatctggacagccatagacggtgtatatagtatataatatgcactaagtccatcattttctttgtcccttctaacaagcctgtgaggcatttaaggcagagttactgtctccatactgcacgagtaggctccaagaggtgacttgcccaaggcctcacagctgctgtgactggtggagcaggtctttgggcctgcagctggccccactgttgctcaggggcaggtccaggtgctctttccaagtgcagcacaagctctagacctgaaactcttggattttccttcctggtgggttttgtttttttgtttctttttaacaccacgtcctctcgtttccttacatcatggttcatgcttttatcaagagatctgatgctgaggaagtggattttgcaggttggctctgctccaccatcggccttaaccagcccagcacaccaacccatgctgctggcgtctaagtgtttgggaagcaacaaagagcgagtcccctgcccggtggtttgccatgtcgcttttgggcctccttcccatgcctgtctctgttcagatgtgcatttcaccgtgtgggagctttctgcacaacataggacagtctgtctcctttgcgacattaagcaatggtttcccgct

SEQ ID NO: 90504 - DNA, 1395 bp, Homo sapiens
caagatcatgcacagagatgtcaagccctccaacatcctagtcaactcccgtggggagatcaagctctgtgactttggggtcagcgggcagctcatcgactccatggccaactccttcgtgggcacaaggtcctacatgtcgccagaaagactccaggggactcattactctgtgcagtcagacatctggagcatgggactgtctctggtagagatggcggttgggaggtatcccatccctcctccagatgccaaggagctggagctgatgtttgggtgccaggtggaaggagatgcggctgagaccccacccaggccaaggacccccgggaggccccttagctcatacggaatggacagccgacctcccatggcaatttttgagttgttggattacatagtcaacgagcctcctccaaaactgcccagtggagtgttcagtctggaatttcaagattttgtgaataaatgcttaataaaaaaccccgcagagagagcagatttgaagcaactcatggttcatgcttttatcaagagatctgatgctgaggaagtggattttgcaggttggctctgctccaccatcggccttaaccagcccagcacaccaacccatgctgctggcgtctaagtgtttgggaagcaacaaagagcgagtcccctgcccggtggtttgccatgtcgcttttgggcctccttcccatgcctgtctctgttcagatgtgcatttcacctgtgacaaaggatgaagaacacagcatgtgccaagattctactcttgtcatttttaatattactgtctttattcttattactattattgttcccctaagtggattggctttgtgcttggggctatttgtgtgtatgctgatgatctcttacaattgcactgctgttcctgctccatgactggctgtctgcctgtattttcgggattctttgacatttggtggtactttattcttgctgggcatactttctctctaggagggagccttgtgagatccttcacaggcagtgcatgtgaagcatgctttgctgctatgaaaatgagcatcagagagtgtacatcatgttattttattattattatttgcttttcatgtagaactcagcagttgacatccaaatctagccagagcccttcactgccatgatagctggggcttcaccagtctgtctactgtggtgatctgtagacttctggttgtatttctatatttattttcagtatactgtgtgggatacttagtggtatgtctctttaagttttgataatgtttcttaaatggaaattattttgaatgtcacaaattgatcaaggcattaaaatgtcagatttatctttccccatatccaagtaccaatgctgctataaacgacacgtacagt

SEQ ID NO: 90505 - DNA, 982 bp, Homo sapiens
gtagaggatccgaggtgtggtaggagagagcagatttgaagcaactcatggttcatgcttttatcaagagatctgatgctgaggaagtggattttgcaggttggctctgctccaccatcggccttaaccagcccagcacaccaacccatgctgctggcgtctaagtgtttgggaagcaacaaagagcgagtcccctgcccggtggtttgccatgtcgcttttgggcctccttcccatgcctgtctctgttcagatgtgcatttcacctgtgacaaaggatgaagaacacagcatgtgccaagattctactcttgtcatttttaatattactgtctttattcttattactattattgttcccctaagtggattggctttgtgcttggggctatttgtgtgtatgctgatgatcaaaacctgtgccaggctgaattacagtgaaattttggtgaatgtgggtagtcattcttacaattgcactgctgttcctgctccatgactggctgtctgcctgtattttcgggattctttgacatttggtggtactttattcttgctgggcatactttctctctaggagggagccttgtgagatccttcacaggcagtgcatgtgaagcatgctttgctgctatgaaaatgagcatcagagagtgtacatcatgttattttattattattatttgcttttcatgtagaactcagcagttgacatccaaatctagccagagcccttcactgccatgatagctggggcttcaccagtctgtctactgtggtgatctgtagacttctggttgtatttctatatttattttcagtatactgtgtgggatacttagtggtatgtctctttaagttttgataatgtttcttaaatggaaattattttgaatgtcacaaattgatcaaggcattaaaatgtcagatttatctttccccatatccaagtaccaatgctgctataaacgacacgtacagt

SEQ ID NO: 90506 - DNA, 1085 bp, Homo sapiens
  misc_feature (914)..(914): n is a, c, g, or t
  misc_feature (1084)..(1084): n is a, c, g, or t
caagatcatgcacagagatgtcaagccctccaacatcctagtcaactcccgtggggagatcaagctctgtgactttggggtcagcgggcagctcatcgactccatggccaactccttcgtgggcacaaggtcctacatgtcgccagaaagactccaggggactcattactctgtgcagtcagacatctggagcatgggactgtctctggtagagatggcggttgggaggtatcccatccctcctccagatgccaaggagctggagctgatgtttgggtgccaggtggaaggagatgcggctgagaccccacccaggccaaggacccccgggaggccccttagctcatacggaatggacagccgacctcccatggcaatttttgagttgttggattacatagtcaacgagcctcctccaaaactgcccagtggagtgttcagtctggaatttcaagattttgtgaataaatgcttaataaaaaaccccgcagagagagcagatttgaagcaactcatggttcatgcttttatcaagagatctgatgctgaggaagtggattttgcaggttggctctgctccaccatcggccttaaccagcccagcacaccaacccatgctgctggcgtctaagtgtttgggaagcaacaaagagcgagtcccctgcccggtggtttgccatgtcgcttttgggcctccttcccatgcctgtctctgttcagatgtgcatttcacctgtgacaaaggatgaagaacacagcatgtgccaagattctactcttgtcatttttaatattactgtctttattcttattactattattgttcccctaagtggattggctttgtgcttggggctatttgtgtgtatgctgatgatcaaaacctgtgccaggctgaattacagtgaaatttngggaagtgggagtttaactgcggggccggccagaggggtgcagtttaggaactgaatggcggactatagggaattcaggggagtgacaccggcggtagtgtataagcaagcctattctttcgtacaagctagcacgagtgtatgtttttttgtgtgtagtaaatatattna

SEQ ID NO: 90507 - DNA, 1449 bp, Homo sapiens
caagatcatgcacagagatgtcaagccctccaacatcctagtcaactcccgtggggagatcaagctctgtgactttggggtcagcgggcagctcatcgactccatggccaactccttcgtgggcacaaggtcctacatgtcgccagaaagactccaggggactcattactctgtgcagtcagacatctggagcatgggactgtctctggtagagatggcggttgggaggtatcccatccctcctccagatgccaaggagctggagctgatgtttgggtgccaggtggaaggagatgcggctgagaccccacccaggccaaggacccccgggaggccccttagctcatacggaatggacagccgacctcccatggcaatttttgagttgttggattacatagtcaacgagcctcctccaaaactgcccagtggagtgttcagtctggaatttcaagattttgtgaataaatgcttaataaaaaaccccgcagagagagcagatttgaagcaactcatggttcatgcttttatcaagagatctgatgctgaggaagtggattttgcaggttggctctgctccaccatcggccttaaccagcccagcacaccaacccatgctgctggcgtctaagtgtttgggaagcaacaaagagcgagtcccctgcccggtggtttgccatgtcgcttttgggcctccttcccatgcctgtctctgttcagatgtgcatttcacctgtgacaaaggatgaagaacacagcatgtgccaagattctactcttgtcatttttaatattactgtctttattcttattactattattgttcccctaagtggattggctttgtgcttggggctatttgtgtgtatgctgatgatcaaaacctgtgccaggctgaattacagtgaaattttggtgaatgtgggtagtcattcttacaattgcactgctgttcctgctccatgactggctgtctgcctgtattttcgggattctttgacatttggtggtactttattcttgctgggcatactttctctctaggagggagccttgtgagatccttcacaggcagtgcatgtgaagcatgctttgctgctatgaaaatgagcatcagagagtgtacatcatgttattttattattattatttgcttttcatgtagaactcagcagttgacatccaaatctagccagagcccttcactgccatgatagctggggcttcaccagtctgtctactgtggtgatctgtagacttctggttgtatttctatatttattttcagtatactgtgtgggatacttagtggtatgtctctttaagttttgataatgtttcttaaatggaaattattttgaatgtcacaaattgatcaaggcattaaaatgtcagatttatctttccccatatccaagtaccaatgctgctataaacgacacgtacagt

SEQ ID NO: 90508 - DNA, 1395 bp, Homo sapiens
caagatcatgcacagagatgtcaagccctccaacatcctagtcaactcccgtggggagatcaagctctgtgactttggggtcagcgggcagctcatcgactccatggccaactccttcgtgggcacaaggtcctacatgtcgccagaaagactccaggggactcattactctgtgcagtcagacatctggagcatgggactgtctctggtagagatggcggttgggaggtatcccatccctcctccagatgccaaggagctggagctgatgtttgggtgccaggtggaaggagatgcggctgagaccccacccaggccaaggacccccgggaggccccttagctcatacggaatggacagccgacctcccatggcaatttttgagttgttggattacatagtcaacgagcctcctccaaaactgcccagtggagtgttcagtctggaatttcaagattttgtgaataaatgcttaataaaaaaccccgcagagagagcagatttgaagcaactcatggttcatgcttttatcaagagatctgatgctgaggaagtggattttgcaggttggctctgctccaccatcggccttaaccagcccagcacaccaacccatgctgctggcgtctaagtgtttgggaagcaacaaagagcgagtcccctgcccggtggtttgccatgtcgcttttgggcctccttcccatgcctgtctctgttcagatgtgcatttcacctgtgacaaaggatgaagaacacagcatgtgccaagattctactcttgtcatttttaatattactgtctttattcttattactattattgttcccctaagtggattggctttgtgcttggggctatttgtgtgtatgctgatgatcaaaacctgtgccaggctgaattacagtgaaattttggtgaatgtgggtagtcattcttacaattgcactgctgttcctgctccatgactggctgtctgcctgtattttcgggattctttgacatttggtggtactttattcttgctgggcatactttctctctaggagggagccttgtgagatccttcacaggcagtgcatgtgaagcatgctttgctgctttttcatgtagaactcagcagttgacatccaaatctagccagagcccttcactgccatgatagctggggcttcaccagtctgtctactgtggtgatctgtagacttctggttgtatttctatatttattttcagtatactgtgtgggatacttagtggtatgtctctttaagttttgataatgtttcttaaatggaaattattttgaatgtcacaaattgatcaaggcattaaaatgtcagatttatctttccccatatccaagtaccaatgctgctataaacgacacgtacagt

SEQ ID NO: 90509 - DNA, 1375 bp, Homo sapiens
tagcatagtagagccgcgtgttaatcggccgaggccactccttcgtgggcacaaggtcctacatgtcgccagaaagactccaggggactcattactctgtgcagtcagacatctggagcatgggactgtctctggtagagatggcggttgggaggtatcccatccctcctccagatgccaaggagctggagctgatgtttgggtgccaggtggaaggagatgcggctgagaccccacccaggccaaggacccccgggaggccccttagctcatacggaatggacagccgacctcccatggcaatttttgagttgttggattacatagtcaacgagcctcctccaaaactgcccagtggagtgttcagtctggaatttcaagattttgtgaataaatgcttaataaaaaaccccgcagagagagcagatttgaagcaactcatggttcatgcttttatcaagagatctgatgctgaggaagtggattttgcaggttggctctgctccaccatcggccttaaccagcccagcacaccaacccatgctgctggcgtctaagtgtttgggaagcaacaaagagcgagtcccctgcccggtggtttgccatgtcgcttttgggcctccttcccatgcctgtctctgttcagatgtgcatttcacctgtgacaaaggatgaagaacacagcatgtgccaagattctactcttgtcatttttaatattactgtctttattcttattactattattgttcccctaagtggattggctttgtgcttggggctatttgtgtgtatgctgatgatcaaaacctgtgccaggctgaattacagtgaaattttggtgaatgtgggtagtcattcttacaattgcactgctgttcctgctccatgactggctgtctgcctgtattttcgggattctttgacatttggtggtactttattcttgctgggcatactttctctctaggagggagccttgtgagatccttcacaggcagtgcatgtgaagcatgctttgctgctatgaaaatgagcatcagagagtgtacatcatgttattttattattattatttgcttttcatgtagaactcagcagttgacatccaaatctagccagagcccttcactgccatgatagctggggcttcaccagtctgtctactgtggtgatctgtagacttctggttgtatttctatatttattttcagtatactgtgtgggatacttagtggtatgtctctttaagttttgataatgtttcttaaatggaaattattttgaatgtcacaaattgatcaaggcattaaaatgtcagatttatctttccccatatccaagtaccaatgctgctataaacgacacgtacagt

SEQ ID NO: 90510 - DNA, 1356 bp, Homo sapiens
caagatcatgcacagagatgtcaagccctccaacatcctagtcaactcccgtggggagatcaagctctgtgactttggggtcagcgggcagctcatcgactccatggccaactccttcgtgggcacaaggtcctacatgtcgccagaaagactccaggggactcattactctgtgcagtcagacatctggagcatgggactgtctctggtagagatggcggttgggaggtatcccatccctcctccagatgccaaggagctggagctgatgtttgggtgccaggtggaaggagatgcggctgagaccccacccaggccaaggacccccgggaggccccttagctcatacggaatggacagccgacctcccatggcaatttttgagttgttggattacatagtcaacgagcctcctccaaaactgcccagtggagtgttcagtctggaatttcaagattttgtgaataaatgcttaataaaaaaccccgcagagagagcagatttgaagcaactcatggttcatgcttttatcaagagatctgatgctgaggaagtggattttgcaggttggctctgctccaccatcggccttaaccagcccagcacaccaaccctgtctctgttcagatgtgcatttcacctgtgacaaaggatgaagaacacagcatgtgccaagattctactcttgtcatttttaatattactgtctttattcttattactattattgttcccctaagtggattggctttgtgcttggggctatttgtgtgtatgctgatgatcaaaacctgtgccaggctgaattacagtgaaattttggtgaatgtgggtagtcattcttacaattgcactgctgttcctgctccatgactggctgtctgcctgtattttcgggattctttgacatttggtggtactttattcttgctgggcatactttctctctaggagggagccttgtgagatccttcacaggcagtgcatgtgaagcatgctttgctgctatgaaaatgagcatcagagagtgtacatcatgttattttattattattatttgcttttcatgtagaactcagcagttgacatccaaatctagccagagcccttcactgccatgatagctggggcttcaccagtctgtctactgtggtgatctgtagacttctggttgtatttctatatttattttcagtatactgtgtgggatacttagtggtatgtctctttaagttttgataatgtttcttaaatggaaattattttgaatgtcacaaattgatcaaggcattaaaatgtcagatttatctttccccatatccaagtaccaatgctgctataaacgacacgtacagt

SEQ ID NO: 90511 - DNA, 472 bp, Homo sapiens
tctcacattgtttaaatattcattctgttagctttattttaaaagttgtttttaattaggacaggtgcagtggctcatgcttataatcctagtggtttgggaggccaagaatgagaccagcctgggcaatagaggaagacctcatctctacgaaaaattttaaaaaacattagttgggcacgatggtgcgctcctgcagtcctagctacttgggaaactgaggtgggaggattacctgagcccaggagttcaagtctgcagtgagctatgactgcacaactgtactccaacctaggcaacagagcaagaccctgtctcaaaaaaaaaaaaaaaaagacacttgtaaaggtgactatttagtctttaatttcaacaaactgaatttaaatatatcagttactctcagtttagccatcagagattcagactctgttatagctgacccccacagaccacaaaggaaataattttt

SEQ ID NO: 90512 - DNA, 165 bp, Homo sapiens
gaccctcctcaccatcctcataggggtttgaaataatcccacttcacagatggagcatgaggcacattaggtaaatagcaatgtctaagttcactcagcagacggcaaagacggcactcaatactggacaagagcccagatcacccgattccaagcctggtgctg

SEQ ID NO: 90513 - DNA, 447 bp, Homo sapiens
agctgtcagtaataggagtaaatcattcagtcctcatcttgaatgtaaaatatcacctgaatttcaatcaagttgtgagtgcaaagaatttgccagtcatctaatccaagagaggctgtgattagcaagagtcttccaaagcaacttgagagattaggcatgggtaagtcctaaatgatcactcaactgaagccacgtggatttccttggaacatgaaaattcaaataagttacacagcaggctgtggagccataattatcaattcaagaattgataagaacattcaaagtttgagtaagtgtgcatctcattgttttcttgggcccacaaataactctgaaaatatgggttgctgtagaattctctaggctcaggttcaccttgctccgatgacacttcttaacattagacacaggggaagggatgcaatgagtatcacatggaat

SEQ ID NO: 90514 - DNA, 196 bp, Homo sapiens
ttttcttttgtggacactggtgagttccctaatataactttgacttggttatattttcacaatcggtggggattattacagattatcatccttcctctgcatttgaaaaaggagggaggcttcaagtcaggttagttgaccttcctttgttggtcttattatccataacataataaataaattgatgaggatgggc

SEQ ID NO: 90515 - DNA, 395 bp, Homo sapiens
ccattgcctcctggggctctagtcccaagagggtccatttgatatgagtggagggcccgagggtcaaggatcacagcccagctctcccctggtcagtgtccaggctggccccttaaatcaggaacatgacactggcaggcactgatctagcctgtgtcctcagccacagtgattcctggtaccatctgtgcatggccgtctgccctacggatgctgggttgtgaagacccaggcccacctgccattcccattctgaatgccccagagcgcctcctgtcaaggaggtggcctctgggactttactcctcaagcagcaagccaacttccttgtttccgccctcgtcttttcttttaaaagggcatctctttccttttattacaaaagtaataaatgc

SEQ ID NO: 90516 - DNA, 593 bp, Homo sapiens
agcacagtctgactccattccccaggactccacagaaccatctggtactgctagtgctgggtgaacagtgagagcagagtccacaaaacactagcagtaccagatggttctgtggagtcctggggaatggagagagcacagtctgactccctgccaagtagccaggagttgacttgcccatggtccgctggctttcccaccacttcctacaggatgggatctaagagactcaagagctgggtttctttcagcactctgtactgtcccaaatagcaaacaaatcactttgtagccagatttctgaatggaaatgagaaattgaattctccatggacttttaggtttatgggggagttttagctgtgtttcttggttttatttcagccaaacatgtctgcttttgattttttttttaaagtataagtggtctatatatatgttcaccttttaaatgtaaatgtttaaaaagtaagcatttatgtgtttccataactgacatctgatgcagacctcattctctccccctcttctaccctcctcttttcccccttttcatactcttgtattggttctaataaatggttgctttcaaa

SEQ ID NO: 90517 - DNA, 1037 bp, Homo sapiens
  misc_feature (920)..(921): n is a, c, g, or t
  misc_feature (942)..(942): n is a, c, g, or t
  misc_feature (944)..(944): n is a, c, g, or t
  misc_feature (946)..(946): n is a, c, g, or t
  misc_feature (951)..(951): n is a, c, g, or t
taggctagtaacgaggcgggggtcaggggtgttgttgtgaggcattgtaaatcaaagttaatagaatacttcagggtcctctgtggaggatgtcttgagccagagtttaagcctgacacacaggctttggtcctcactgagctgtctccaagactggaactacttagtgactcggcaaattttctgccccccacccctcatcaaagctgctagttcagatgttgacagtgttttcatgaatgttggaatcttactagtccagacttacttaggatgttgttggggaaggcacttgggattttctgtgtcttgcattcacagagggaggccatttcagattcaagagcattggattagggaatcgtgaggcagggatgctactgcgtatttctctctgcaggttggggattaaagttcctttccccatgggtttgaagcagactcagactgtctcaggatcaaagcaaccctcaatggttttgatttatgtcattgcttaccactccccaaccaatcccaggacagctgggtcactgtacccctttgtggtatctgtacctgggcctctccttcctcatagggaccagctgattgaataaatgtgaccaccttatttccaccccccacccccaaaagctacattggaattatttttcctagaaatgtgtataacactcagaattgggcattgatccttaaagcttcatcccattcaccgtattcaacatctgtcatctcttagtgtctgcagtctgaacctaaccttgaccttttttccctctggtttgagaaaactttggacactatttctacttggccaggtgtgggctcaagagccttactctttccatctcagtttaggggcgcagccagctcctcttcccaataggtctttgttcctctctggctaattggatccnnaaagcaagctggctgggcacncngncgggnggggctggtccggccgaagccaaggttggccggagagaagctcgaaggggcggggccccgggaaagggggccgaatcgagaaaatg

SEQ ID NO: 90518 - DNA, 444 bp, Homo sapiens
tttttgagatggaaacttgctcttttgcccaggctggagtgcagtggcgtgatcttggctcactgcaacctccgcctcccgggttcaagcagttctctgcctcagcctcctgagcagctgggattataggcgcctgccaccatgcccggctaatttttgtatttttagtagagacagggttcaccatcttggccgtgctggtcttgaactcctgaccttgtgatccgcctgcctcggccactcaaagtgctgggattgcaggcgtgagccagcacccggccacagtatctttattacagctcactgcagcctcaatctcctgaggcaggagaattgcttgaagccagaagtttgagaccagcctgggcaatgtagtgagaccccctgtctctaaaaaatataaataaaaataaaggcatgttcctgaaagactgtcaccttgga

SEQ ID NO: 90519 - DNA, 217 bp, Homo sapiens
ggtctatatatatgttcactttttaaacatttacatttaaaaggtgaacatatatatgaccacttatacttttaaatgtaaatgtttaaaaagtaagcatttatgtgtttccataactgacatctgatgcagacctcattctctccccctcttctaccctcctcttttcccccttttcatactcttgtattggttctaataaatggttgctttcaaa

SEQ ID NO: 90520 - DNA, 3237 bp, Homo sapiens
tttttgagatggaaacttgctcttttgcccaggctggagtgcagtggcgtgatcttggctcactgcaacctccgcctcccgggttcaagcagttctctgcctcagcctcctgagcagctgggattataggcgcctgccaccatgcccggctaatttttgtatttttagtagagacagggttcaccatcttggccgtgctggtcttgaactcctgaccttgtgatccgcctgcctcggccactcaaagtgctgggattgcaggcgtgagccagcacccggccacagtatctttattacagctcactgcagcctcaatctcctgggctcaaatgatcctcctgcctcagcctcccaagcagctgggactacaggcgcacaccacggtgtctggctaattttattatttaaaaaatgttttgtagagacagtctccctgtgttgcccaggctggtctccaactcgtgagctcaagtgatccacgtgcctcagcctcccaaagtgctgggattacaagcataagccaccgcacccggcccctagtgaacattttactgtatgtgttgataaatcatcttttgagtttctgttgtatgtggggacttcctacactggctgctgtgaagaggtatggaagaaaggagaggctttctgcctagaaattctttgagaacacctgaaaagacagtttaatcatgtcacaacactcttaaggctcaagtcagtgttctggtttccggtagctttaggattggattctaaacgagggctggtggtgagtttggtgtttgtctcgtgtcaccctcacccctcacctcctcagtttaggataagagacataatgatttctaccagaatccaaagtaaatccaaagggggagaaaagacataactgttttttcttctaccttttttttgttaaagagttacatctctcacaggaggaaagaattcaagagtctatatgattagttacagagaatattttcatcccctctccctgaatagaaaagcaggggtcaccatttgtatccttacccttgaggtgtttttgaagatgctgtaactcttgaagttgagctgaggcagaaaggttggaaaaatgcagccctctgggtattgtggggagggatgtgatgtagtaagagggtgttttgtggtgctaggattcccacgccaccaacttgcagctttataagagcgctaccaagaaccaccactggggaaaaggttcttattcattgtttctgttggaatgtgatcttgctttctggattttaggaattcaggttactcagtataaaactctgagaaatcagtgtgacttagtccttcacctcctaagataaagtgaatatttctttacaaaataattcatgtccttaatgttaaagatgtaattttattttcaaaacatctataacatgactttcagaagcagttcatttttccaagattcctcacattatactagataaataataggccctcagttaatacccttcagttattgaattaatctagtttgtggaatgaggtgtatcctgccaacttccctctgctcccaagtacactctgagaggtaaaatgctctgggaaatggaacaagaatcgagtggatgctgactctgtgtgcccacctcctcaactgattgataatggttgaccttgggcaagtcacttctttcaatgcctcagttccccatctgtcaaatggggttaataatactgacctacctcacaggggtgttgttgtgaggcattgtaaatcaaagttaatagaatacttcagggtcctctgtggaggatgtcttgagccagagtttaagcctgacacacaggctttggtcctcactgagctgtctccaagactggaactacttagtgactcggcaaattttctgccccccacccctcatcaaagctgctagttcagatgttgacagtgttttcatgaatgttggaatcttactagtccagacttacttaggatgttgttggggaaggcacttgggattttctgtgtcttgcattcacagagggaggccatttcagattcaagagcattggattagggaatcgtgaggcagggatgctactgcgtatttctctctgcaggttggggattaaagttcctttccccatgggtttgaagcagactcagactgtctcaggatcaaagcaaccctcaatggttttgatttatgtcattgcttaccactccccaaccaatcccaggacagctgggtcactgtacccctttgtggtatctgtacctgggcctctccttcctcatagggaccagctgattgaataaatgtgaccaccttatttccaccccccacccccaaaagctacattggaattatttttcctagaaatgtgtataacactcagaattgggcattgatccttaaagcttcatcccattcaccgtattcaacatctgtcatctcttagtgtctgcagtctgaacctaaccttgaccttttttccctctggtttgagaaaactttggacactatttctacttggccaggtgtgggctcaagagccttactctttccatctcagtttaggggcgcagccagctcctcttcccaatagggctctttctgctttccctctccttggccctagatttgtaatccatgaaaaagcacaaggtcctggctccttgcggtcacattctggttctctgtgttttgtggactctgctctcactgttcacccagcactagcagtaccagatggttctgtggagtcctggggaatggagagagcacagtctgactccctgccaagtagccaggagttgacttgcccatggtccgctggctttcccaccacttcctacaggatgggatctaagagactcaagagctgggtttctttcagcactctgtactgtcccaaatagcaaacaaatcactttgtagccagatttctgaatggaaatgagaaattgaattctccatggacttttaggtttatgggggagttttagctgtgtttcttggttttatttcagccaaacatgtctgcttttgattttttttttaaagtataagtggtctatatatatgttcaccttttaaatgtaaatgtttaaaaagtaagcatttatgtgtttccataactgacatctgatgcagacctcattctctccccctcttctaccctcctcttttcccccttttcatactcttgtattggttctaataaatggttgctttcaaa

SEQ ID NO: 90521 - DNA, 2681 bp, Homo sapiens
gactctgaggatccccaactctgccacccacagcatgtggggacttcctacactggctgctgtgaagaggtatggaagaaaggagaggctttctgcctagaaattctttgagaacacctgaaaagacagtttaatcatgtcacaacactcttaaggctcaagtcagtgttctggtttccggtagctttaggattggattctaaacgagggctggtggtgagtttggtgtttgtctcgtgtcaccctcacccctcacctcctcagtttaggataagagacataatgatttctaccagaatccaaagtaaatccaaagggggagaaaagacataactgttttttcttctaccttttttttgttaaagagttacatctctcacaggaggaaagaattcaagagtctatatgattagttacagagaatattttcatcccctctccctgaatagaaaagcaggggtcaccatttgtatccttacccttgaggtgtttttgaagatgctgtaactcttgaagttgagctgaggcagaaaggttggaaaaatgcagccctctgggtattgtggggagggatgtgatgtagtaagagggtgttttgtggtgctaggattcccacgccaccaacttgcagctttataagagcgctaccaagaaccaccactggggaaaaggttcttattcattgtttctgttggaatgtgatcttgctttctggattttaggaattcaggttactcagtataaaactctgagaaatcagtgtgacttagtccttcacctcctaagataaagtgaatatttctttacaaaataattcatgtccttaatgttaaagatgtaattttattttcaaaacatctataacatgactttcagaagcagttcatttttccaagattcctcacattatactagataaataataggccctcagttaatacccttcagttattgaattaatctagtttgtggaatgaggtgtatcctgccaacttccctctgctcccaagtacactctgagaggtaaaatgctctgggaaatggaacaagaatcgagtggatgctgactctgtgtgcccacctcctcaactgattgataatggttgaccttgggcaagtcacttctttcaatgcctcagttccccatctgtcaaatggggttaataatactgacctacctcacaggggtgttgttgtgaggcattgtaaatcaaagttaatagaatacttcagggtcctctgtggaggatgtcttgagccagagtttaagcctgacacacaggctttggtcctcactgagctgtctccaagactggaactacttagtgactcggcaaattttctgccccccacccctcatcaaagctgctagttcagatgttgacagtgttttcatgaatgttggaatcttactagtccagacttacttaggatgttgttggggaaggcacttgggattttctgtgtcttgcattcacagagggaggccatttcagattcaagagcattggattagggaatcgtgaggcagggatgctactgcgtatttctctctgcaggttggggattaaagttcctttccccatgggtttgaagcagactcagactgtctcaggatcaaagcaaccctcaatggttttgatttatgtcattgcttaccactccccaaccaatcccaggacagctgggtcactgtacccctttgtggtatctgtacctgggcctctccttcctcatagggaccagctgattgaataaatgtgaccaccttatttccaccccccacccccaaaagctacattggaattatttttcctagaaatgtgtataacactcagaattgggcattgatccttaaagcttcatcccattcaccgtattcaacatctgtcatctcttagtgtctgcagtctgaacctaaccttgaccttttttccctctggtttgagaaaactttggacactatttctacttggccaggtgtgggctcaagagccttactctttccatctcagtttaggggcgcagccagctcctcttcccaatagggctctttctgctttccctctccttggccctagatttgtaatccatgaaaaagcacaaggtcctggctccttgcggtcacattctggttctctgtgttttgtggactctgctctcactgttcacccagcactagcagtaccagatggttctgtggagtcctggggaatggagagagcacagtctgactccctgccaagtagccaggagttgacttgcccatggtccgctggctttcccaccacttcctacaggatgggatctaagagactcaagagctgggtttctttcagcactctgtactgtcccaaatagcaaacaaatcactttgtagccagatttctgaatggaaatgagaaattgaattctccatggacttttaggtttatgggggagttttagctgtgtttcttggttttatttcagccaaacatgtctgcttttgattttttttttaaagtataagtggtctatatatatgttcaccttttaaatgtaaatgtttaaaaagtaagcatttatgtgtttccataactgacatctgatgcagacctcattctctccccctcttctaccctcctcttttcccccttttcatactcttgtattggttctaataaatggttgctttcaaa

SEQ ID NO: 90522 - DNA, 3194 bp, Homo sapiens
tttttgagatggaaacttgctcttttgcccaggctggagtgcagtggcgtgatcttggctcactgcaacctccgcctcccgggttcaagcagttctctgcctcagcctcctgagcagctgggattataggcgcctgccaccatgcccggctaatttttgtatttttagtagagacagggttcaccatcttggccgtgctggtcttgaactcctgaccttgtgatccgcctgcctcggccactcaaagtgctgggattgcaggcgtgagccagcacccggccacagtatctttattacagctcactgcagcctcaatctcctgggctcaaatgatcctcctgcctcagcctcccaagcagctgggactacaggcgcacaccacggtgtctggctaattttattatttaaaaaatgttttgtagagacagtctccctgtgttgcccaggctggtctccaactcgtgagctcaagtgatccacgtgcctcagcctcccaaagtgctgggattacaagcataagccaccgcacccggcccctagtgaacattttactgtatgtgttgataaatcatcttttgagtttctgttgtatgtggggacttcctacactggctgctgtgaagaggtatggaagaaaggagaggctttctgcctagaaattctttgagaacacctgaaaagacagtttaatcatgtcacaacactcttaaggctcaagtcagtgttctggtttccggtagctttaggattggattctaaacgagggctggtggtgagtttggtgtttgtctcgtgtcaccctcacccctcacctcctcagtttaggataagagacataatgatttctaccagaatccaaagtaaatcttttgttaaagagttacatctctcacaggaggaaagaattcaagagtctatatgattagttacagagaatattttcatcccctctccctgaatagaaaagcaggggtcaccatttgtatccttacccttgaggtgtttttgaagatgctgtaactcttgaagttgagctgaggcagaaaggttggaaaaatgcagccctctgggtattgtggggagggatgtgatgtagtaagagggtgttttgtggtgctaggattcccacgccaccaacttgcagctttataagagcgctaccaagaaccaccactggggaaaaggttcttattcattgtttctgttggaatgtgatcttgctttctggattttaggaattcaggttactcagtataaaactctgagaaatcagtgtgacttagtccttcacctcctaagataaagtgaatatttctttacaaaataattcatgtccttaatgttaaagatgtaattttattttcaaaacatctataacatgactttcagaagcagttcatttttccaagattcctcacattatactagataaataataggccctcagttaatacccttcagttattgaattaatctagtttgtggaatgaggtgtatcctgccaacttccctctgctcccaagtacactctgagaggtaaaatgctctgggaaatggaacaagaatcgagtggatgctgactctgtgtgcccacctcctcaactgattgataatggttgaccttgggcaagtcacttctttcaatgcctcagttccccatctgtcaaatggggttaataatactgacctacctcacaggggtgttgttgtgaggcattgtaaatcaaagttaatagaatacttcagggtcctctgtggaggatgtcttgagccagagtttaagcctgacacacaggctttggtcctcactgagctgtctccaagactggaactacttagtgactcggcaaattttctgccccccacccctcatcaaagctgctagttcagatgttgacagtgttttcatgaatgttggaatcttactagtccagacttacttaggatgttgttggggaaggcacttgggattttctgtgtcttgcattcacagagggaggccatttcagattcaagagcattggattagggaatcgtgaggcagggatgctactgcgtatttctctctgcaggttggggattaaagttcctttccccatgggtttgaagcagactcagactgtctcaggatcaaagcaaccctcaatggttttgatttatgtcattgcttaccactccccaaccaatcccaggacagctgggtcactgtacccctttgtggtatctgtacctgggcctctccttcctcatagggaccagctgattgaataaatgtgaccaccttatttccaccccccacccccaaaagctacattggaattatttttcctagaaatgtgtataacactcagaattgggcattgatccttaaagcttcatcccattcaccgtattcaacatctgtcatctcttagtgtctgcagtctgaacctaaccttgaccttttttccctctggtttgagaaaactttggacactatttctacttggccaggtgtgggctcaagagccttactctttccatctcagtttaggggcgcagccagctcctcttcccaatagggctctttctgctttccctctccttggccctagatttgtaatccatgaaaaagcacaaggtcctggctccttgcggtcacattctggttctctgtgttttgtggactctgctctcactgttcacccagcactagcagtaccagatggttctgtggagtcctggggaatggagagagcacagtctgactccctgccaagtagccaggagttgacttgcccatggtccgctggctttcccaccacttcctacaggatgggatctaagagactcaagagctgggtttctttcagcactctgtactgtcccaaatagcaaacaaatcactttgtagccagatttctgaatggaaatgagaaattgaattctccatggacttttaggtttatgggggagttttagctgtgtttcttggttttatttcagccaaacatgtctgcttttgattttttttttaaagtataagtggtctatatatatgttcaccttttaaatgtaaatgtttaaaaagtaagcatttatgtgtttccataactgacatctgatgcagacctcattctctccccctcttctaccctcctcttttcccccttttcatactcttgtattggttctaataaatggttgctttcaaa

SEQ ID NO: 90523 - DNA, 2298 bp, Homo sapiens
tgaggtcgatctgagaggatcccctactttcacacgggaatattttcatcccctctccctgaatagaaaagcaggggtcaccatttgtatccttacccttgaggtgtttttgaagatgctgtaactcttgaagttgagctgaggcagaaaggttggaaaaatgcagccctctgggtattgtggggagggatgtgatgtagtaagagggtgttttgtggtgctaggattcccacgccaccaacttgcagctttataagagcgctaccaagaaccaccactggggaaaaggttcttattcattgtttctgttggaatgtgatcttgctttctggattttaggaattcaggttactcagtataaaactctgagaaatcagtgtgacttagtccttcacctcctaagataaagtgaatatttctttacaaaataattcatgtccttaatgttaaagatgtaattttattttcaaaacatctataacatgactttcagaagcagttcatttttccaagattcctcacattatactagataaataataggccctcagttaatacccttcagttattgaattaatctagtttgtggaatgaggtgtatcctgccaacttccctctgctcccaagtacactctgagaggtaaaatgctctgggaaatggaacaagaatcgagtggatgctgactctgtgtgcccacctcctcaactgattgataatggttgaccttgggcaagtcacttctttcaatgcctcagttccccatctgtcaaatggggttaataatactgacctacctcacaggggtgttgttgtgaggcattgtaaatcaaagttaatagaatacttcagggtcctctgtggaggatgtcttgagccagagtttaagcctgacacacaggctttggtcctcactgagctgtctccaagactggaactacttagtgactcggcaaattttctgccccccacccctcatcaaagctgctagttcagatgttgacagtgttttcatgaatgttggaatcttactagtccagacttacttaggatgttgttggggaaggcacttgggattttctgtgtcttgcattcacagagggaggccatttcagattcaagagcattggattagggaatcgtgaggcagggatgctactgcgtatttctctctgcaggttggggattaaagttcctttccccatgggtttgaagcagactcagactgtctcaggatcaaagcaaccctcaatggttttgatttatgtcattgcttaccactccccaaccaatcccaggacagctgggtcactgtacccctttgtggtatctgtacctgggcctctccttcctcatagggaccagctgattgaataaatgtgaccaccttatttccaccccccacccccaaaagctacattggaattatttttcctagaaatgtgtataacactcagaattgggcattgatccttaaagcttcatcccattcaccgtattcaacatctgtcatctcttagtgtctgcagtctgaacctaaccttgaccttttttccctctggtttgagaaaactttggacactatttctacttggccaggtgtgggctcaagagccttactctttccatctcagtttaggggcgcagccagctcctcttcccaatagggctctttctgctttccctctccttggccctagatttgtaatccatgaaaaagcacaaggtcctggctccttgcggtcacattctggttctctgtgttttgtggactctgctctcactgttcacccagcactagcagtaccagatggttctgtggagtcctggggaatggagagagcacagtctgactccctgccaagtagccaggagttgacttgcccatggtccgctggctttcccaccacttcctacaggatgggatctaagagactcaagagctgggtttctttcagcactctgtactgtcccaaatagcaaacaaatcactttgtagccagatttctgaatggaaatgagaaattgaattctccatggacttttaggtttatgggggagttttagctgtgtttcttggttttatttcagccaaacatgtctgcttttgattttttttttaaagtataagtggtctatatatatgttcaccttttaaatgtaaatgtttaaaaagtaagcatttatgtgtttccataactgacatctgatgcagacctcattctctccccctcttctaccctcctcttttcccccttttcatactcttgtattggttctaataaatggttgctttcaaa

SEQ ID NO: 90524 - DNA, 1969 bp, Homo sapiens
  misc_feature (14)..(14): n is a, c, g, or t
  misc_feature (17)..(17): n is a, c, g, or t
  misc_feature (24)..(24): n is a, c, g, or t
tccggtcggtacgnccnggagtantggatatgtcgaccaggacgtcggtgtgacttagtccttcacctcctaagataaagtgaatatttctttacaaaataattcatgtccttaatgttaaagatgtaattttattttcaaaacatctataacatgactttcagaagcagttcatttttccaagattcctcacattatactagataaataataggccctcagttaatacccttcagttattgaattaatctagtttgtggaatgaggtgtatcctgccaacttccctctgctcccaagtacactctgagaggtaaaatgctctgggaaatggaacaagaatcgagtggatgctgactctgtgtgcccacctcctcaactgattgataatggttgaccttgggcaagtcacttctttcaatgcctcagttccccatctgtcaaatggggttaataatactgacctacctcacaggggtgttgttgtgaggcattgtaaatcaaagttaatagaatacttcagggtcctctgtggaggatgtcttgagccagagtttaagcctgacacacaggctttggtcctcactgagctgtctccaagactggaactacttagtgactcggcaaattttctgccccccacccctcatcaaagctgctagttcagatgttgacagtgttttcatgaatgttggaatcttactagtccagacttacttaggatgttgttggggaaggcacttgggattttctgtgtcttgcattcacagagggaggccatttcagattcaagagcattggattagggaatcgtgaggcagggatgctactgcgtatttctctctgcaggttggggattaaagttcctttccccatgggtttgaagcagactcagactgtctcaggatcaaagcaaccctcaatggttttgatttatgtcattgcttaccactccccaaccaatcccaggacagctgggtcactgtacccctttgtggtatctgtacctgggcctctccttcctcatagggaccagctgattgaataaatgtgaccaccttatttccaccccccacccccaaaagctacattggaattatttttcctagaaatgtgtataacactcagaattgggcattgatccttaaagcttcatcccattcaccgtattcaacatctgtcatctcttagtgtctgcagtctgaacctaaccttgaccttttttccctctggtttgagaaaactttggacactatttctacttggccaggtgtgggctcaagagccttactctttccatctcagtttaggggcgcagccagctcctcttcccaatagggctctttctgctttccctctccttggccctagatttgtaatccatgaaaaagcacaaggtcctggctccttgcggtcacattctggttctctgtgttttgtggactctgctctcactgttcacccagcactagcagtaccagatggttctgtggagtcctggggaatggagagagcacagtctgactccctgccaagtagccaggagttgacttgcccatggtccgctggctttcccaccacttcctacaggatgggatctaagagactcaagagctgggtttctttcagcactctgtactgtcccaaatagcaaacaaatcactttgtagccagatttctgaatggaaatgagaaattgaattctccatggacttttaggtttatgggggagttttagctgtgtttcttggttttatttcagccaaacatgtctgcttttgattttttttttaaagtataagtggtctatatatatgttcaccttttaaatgtaaatgtttaaaaagtaagcatttatgtgtttccataactgacatctgatgcagacctcattctctccccctcttctaccctcctcttttcccccttttcatactcttgtattggttctaataaatggttgctttcaaa

SEQ ID NO: 90525 - DNA, 3641 bp, Homo sapiens
tttttgagatggaaacttgctcttttgcccaggctggagtgcagtggcgtgatcttggctcactgcaacctccgcctcccgggttcaagcagttctctgcctcagcctcctgagcagctgggattataggcgcctgccaccatgcccggctaatttttgtatttttagtagagacagggttcaccatcttggccgtgctggtcttgaactcctgaccttgtgatccgcctgcctcggccactcaaagtgctgggattgcaggcgtgagccagcacccggccacagtatctttattacagctcactgcagcctcaatctcctgggctcaaatgatcctcctgcctcagcctcccaagcagctgggactacaggcgcacaccacggtgtctggctaattttattatttaaaaaatgttttgtagagacagtctccctgtgttgcccaggctggtctccaactcgtgagctcaagtgatccacgtgcctcagcctcccaaagtgctgggattacaagcataagccaccgcacccggcccctagtgaacattttactgtatgtgttgataaatcatcttttgagtttctgttgtatgtggggacttcctacactggctgctgtgaagaggtatggaagaaaggagaggctttctgcctagaaattctttgagaacacctgaaaagacagtttaatcatgtcacaacactcttaaggctcaagtcagtgttctggtttccggtagctttaggattggattctaaacgagggctggtggtgagtttggtgtttgtctcgtgtcaccctcacccctcacctcctcagtttaggataagagacataatgatttctaccagaatccaaagtaaatccaaagggggagaaaagacataactgttttttcttctaccttttttttgttaaagagttacatctctcacaggaggaaagaattcaagagtctatatgattagttacagagaatattttcatcccctctccctgaatagaaaagcaggggtcaccatttgtatccttacccttgaggtgtttttgaagatgctgtaactcttgaagttgagctgaggcagaaaggttggaaaaatgcagccctctgggtattgtggggagggatgtgatgtagtaagagggtgttttgtggtgctaggattcccacgccaccaacttgcagctttataagagcgctaccaagaaccaccactggggaaaaggttcttattcattgtttctgttggaatgtgatcttgctttctggattttaggaattcaggttactcagtataaaactctgagaaatcagtgtgacttagtccttcacctcctaagataaagtgaatatttctttacaaaataattcatgtccttaatgttaaagatgtaattttattttcaaaacatctataacatgactttcagaagcagttcatttttccaagattcctcacattatactagataaataataggccctcagttaatacccttcagttattgaattaatctagtttgtggaatgaggtgtatcctgccaacttccctctgctcccaagtacactctgagaggtaaaatgctctgggaaatggaacaagaatcgagtggatgctgactctgtgtgcccacctcctcaactgattgataatggttgaccttgggcaagtcacttctttcaatgcctcagttccccatctgtcaaatggggttaataatactgacctacctcacaggggtgttgttgtgaggcattgtaaatcaaagttaatagaatacttcagggtcctctgtggaggatgtcttgagccagagtttaagcctgacacacaggctttggtcctcactgagctgtctccaagactggaactacttagtgactcggcaaattttctgccccccacccctcatcaaagctgctagttcagatgttgacagtgttttcatgaatgttggaatcttactagtccagacttacttaggatgttgttggggaaggcacttgggattttctgtgtcttgcattcacagagggaggccatttcagattcaagagcattggattagggaatcgtgaggcagggatgctactgcgtatttctctctgcaggttggggattaaagttcctttccccatgggtttgaagcagactcagactgtctcaggatcaaagcaaccctcaatggttttgatttatgtcattgcttaccactccccaaccaatcccaggacagctgggtcactgtacccctttgtggtatctgtacctgggcctctccttcctcatagggaccagctgattgaataaatgtgaccaccttatttccaccccccacccccaaaagctacattggaattatttttcctagaaatgtgtataacactcagaattgggcattgatccttaaagcttcatcccattcaccgtattcaacatctgtcatctcttagtgtctgcagtctgaacctaaccttgaccttttttccctctggtttgagaaaactttggacactatttctacttggccaggtgtgggctcaagagccttactctttccatctcagtttaggggcgcagccagctcctcttcccaatagggctctttctgctttccctctccttggccctagatttgtaatccatgaaaaagcacaaggtcctggctccttgcggtcacattctggttctctgtgttttgtggactctgctctcactgttcacccagcactagcagtaccagatggttctgtggagtcctggggaatggagagagcacagtctgactccctgccaagtagccaggagttgacttgcccatggtccgctggctttcccaccacttcctacaggatgggatctaagagactcaagagctgggtttctttcagcactctgtactgtcccaaatagcaaacaaatcactttgtagccagatttctgaatggaaatgagaaattgaattctccatggacttttaggtttatgggggagttttagctgtgtttcttggttttatttcagccaaacatgtctgcttttgattttttttttaaagtataagtggtctatatatatgttcaccttttaaatgtaaatgtttaaaaagtaagcatttatgtgtttccataactgacatctgatgcagacctcattctctccccctcttctaccctcctcttttcccccttttcatactcttgtattggttctaataaatggttgctttcaaaaaaaaaaaaaaaaaactcgcggcacgagggcaggtcacttaagcccaagagttccagaccagcctggccaagatggtgaaaactggtctttactaaaaatgtaaaaactacccgggcatggtgtcgcatgcctgtaatcccagctactcgggaggctgaggcttgaggatcgcttgaacctgggaggcagaggttgcagtgagccaagatcgcgccactgcactccagcctgagcaacagagtgagactctgtccaaaaaaaaatatatttaaaaaaaacttgtaggggggccccggaccaaattctccctttgggggagccttttacatatcactgggccgcgtttttaaaacgtcttgacttggatggctaaatactaatagggcctcccctatcgcctttt

SEQ ID NO: 90526 - DNA, 3275 bp, Homo sapiens
  misc_feature (3243)..(3246): n is a, c, g, or t
  misc_feature (3248)..(3249): n is a, c, g, or t
  misc_feature (3258)..(3258): n is a, c, g, or t
tttttgagatggaaacttgctcttttgcccaggctggagtgcagtggcgtgatcttggctcactgcaacctccgcctcccgggttcaagcagttctctgcctcagcctcctgagcagctgggattataggcgcctgccaccatgcccggctaatttttgtatttttagtagagacagggttcaccatcttggccgtgctggtcttgaactcctgaccttgtgatccgcctgcctcggccactcaaagtgctgggattgcaggcgtgagccagcacccggccacagtatctttattacagctcactgcagcctcaatctcctgggctcaaatgatcctcctgcctcagcctcccaagcagctgggactacaggcgcacaccacggtgtctggctaattttattatttaaaaaatgttttgtagagacagtctccctgtgttgcccaggctggtctccaactcgtgagctcaagtgatccacgtgcctcagcctcccaaagtgctgggattacaagcataagccaccgcacccggcccctagtgaacattttactgtatgtgttgataaatcatcttttgagtttctgttgtatgtggggacttcctacactggctgctgtgaagaggtatggaagaaaggagaggctttctgcctagaaattctttgagaacacctgaaaagacagtttaatcatgtcacaacactcttaaggctcaagtcagtgttctggtttccggtagctttaggattggattctaaacgagggctggtggtgagtttggtgtttgtctcgtgtcaccctcacccctcacctcctcagtttaggataagagacataatgatttctaccagaatccaaagtaaatccaaagggggagaaaagacataactgttttttcttctaccttttttttgttaaagagttacatctctcacaggaggaaagaattcaagagtctatatgattagttacagagaatattttcatcccctctccctgaatagaaaagcaggggtcaccatttgtatccttacccttgaggtgtttttgaagatgctgtaactcttgaagttgagctgaggcagaaaggttggaaaaatgcagccctctgggtattgtggggagggatgtgatgtagtaagagggtgttttgtggtgctaggattcccacgccaccaacttgcagctttataagagcgctaccaagaaccaccactggggaaaaggttcttattcattgtttctgttggaatgtgatcttgctttctggattttaggaattcaggttactcagtataaaactctgagaaatcagtgtgacttagtccttcacctcctaagataaagtgaatatttctttacaaaataattcatgtccttaatgttaaagatgtaattttattttcaaaacatctataacatgactttcagaagcagttcatttttccaagattcctcacattatactagataaataataggccctcagttaatacccttcagttattgaattaatctagtttgtggaatgaggtgtatcctgccaacttccctctgctcccaagtacactctgagaggtaaaatgctctgggaaatggaacaagaatcgagtggatgctgactctgtgtgcccacctcctcaactgattgataatggttgaccttgggcaagtcacttctttcaatgcctcagttccccatctgtcaaatggggttaataatactgacctacctcacaggggtgttgttgtgaggcattgtaaatcaaagttaatagaatacttcagggtcctctgtggaggatgtcttgagccagagtttaagcctgacacacaggctttggtcctcactgagctgtctccaagactggaactacttagtgactcggcaaattttctgccccccacccctcatcaaagctgctagttcagatgttgacagtgttttcatgaatgttggaatcttactagtccagacttacttaggatgttgttggggaaggcacttgggattttctgtgtcttgcattcacagagggaggccatttcagattcaagagcattggattagggaatcgtgaggcagggatgctactgcgtatttctctctgcaggttggggattaaagttcctttccccatgggtttgaagcagactcagactgtctcaggatcaaagcaaccctcaatggttttgatttatgtcattgcttaccactccccaaccaatcccaggacagctgggtcactgtacccctttgtggtatctgtacctgggcctctccttcctcatagggaccagctgattgaataaatgtgaccaccttatttccaccccccacccccaaaagctacattggaattatttttcctagaaatgtgtataacactcagaattgggcattgatccttaaagcttcatcccattcaccgtattcaacatctgtcatctcttagtgtctgcagtctgaacctaaccttgaccttttttccctctggtttgagaaaactttggacactatttctacttggccaggtgtgggctcaagagccttactctttccatctcagtttaggggcgcagccagctcctcttcccaatagggctctttctgctttccctctccttggccctagatttgtaatccatgaaaaagcacaaggtcctggctccttgcggtcacattctggttctctgtgttttgtggactctgctctcactgttcacccagcactagcagtaccagatggttctgtggagtcctggggaatggagagagcacagtctgactccctgccaagtagccaggagttgacttgcccatggtccgctggctttcccaccacttcctacaggatgggatctaagagactcaagagctgggtttctttcagcactctgtactgtcccaaatagcaaacaaatcactttgtagccagatttctgaatggaaatgagaaattgaattctccatggacttttaggtttatgggggagttttagctgtgtttcttggttttatttcagccaaacatgtctgcttttgattttttttttaaagtataagtggtctatatatatgttcaccttttaaatgtaaatgtttaaaaagtaagcatttatgtgtttccataactgacatctgatgcagacctcattctctccccctcttctaccctcctcttttcccccttttcatactcttgtattggttctaataaatggttgctttcaaaaaaaannnngnnaaactcctntgccgaattggcacgag

SEQ ID NO: 90527 - DNA, 2317 bp, Homo sapiens
tttttgagatggaaacttgctcttttgcccaggctggagtgcagtggcgtgatcttggctcactgcaacctccgcctcccgggttcaagcagttctctgcctcagcctcctgagcagctgggattataggcgcctgccaccatgcccggctaatttttgtatttttagtagagacagggttcaccatcttggccgtgctggtcttgaactcctgaccttgtgatccgcctgcctcggccactcaaagtgctgggattgcaggcgtgagccagcacccggccacagtatctttattacagctcactgcagcctcaatctcctgggctcaaatgatcctcctgcctcagcctcccaagcagctgggactacaggcgcacaccacggtgtctggctaattttattatttaaaaaatgttttgtagagacagtctccctgtgttgcccaggctggtctccaactcgtgagctcaagtgatccacgtgcctcagcctcccaaagtgctgggattacaagcataagccaccgcacccggcccctagtgaacattttactgtatgtgttgataaatcatcttttgagtttctgttgtatgtggggacttcctacactggctgctgtgaagaggtatggaagaaaggagaggctttctgcctagaaattctttgagaacacctgaaaagacagtttaatcatgtcacaacactcttaaggctcaagtcagtgttctggtttccggtagctttaggattggattctaaacgagggctggtggtgagtttggtgtttgtctcgtgtcaccctcacccctcacctcctcagtttaggataagagacataatgatttctaccagaatccaaagtaaatccaaagggggagaaaagacataactgttttttcttctaccttttttttgttaaagagttacatctctcacaggaggaaagaattcaagagtctatatgattagttacagagaatattttcatcccctctccctgaatagaaaagcaggggtcaccatttgtatccttacccttgaggtgtttttgaagatgctgtaactcttgaagttgagctgaggcagaaaggttggaaaaatgcagccctctgggtattgtggggagggatgtgatgtagtaagagggtgttttgtggtgctaggattcccacgccaccaacttgcagctttataagagcgctaccaagaatcctttccccatgggtttgaagcagactcagactgtctcaggatcaaagcaaccctcaatggttttgatttatgtcattgcttaccactccccaaccaatcccaggacagctgggtcactgtacccctttgtggtatctgtacctgggcctctccttcctcatagggaccagctgattgaataaatgtgaccaccttatttccaccccccacccccaaaagctacattggaattatttttcctagaaatgtgtataacactcagaattgggcattgatccttaaagcttcatcccattcaccgtattcaacatctgtcatctcttagtgtctgcagtctgaacctaaccttgaccttttttccctctggtttgagaaaactttggacactatttctacttggccaggtgtgggctcaagagccttactctttccatctcagtttaggggcgcagccagctcctcttcccaatagggctctttctgctttccctctccttggccctagatttgtaatccatgaaaaagcacaaggtcctggctccttgcggtcacattctggttctctgtgttttgtggactctgctctcactgttcacccagcactagcagtaccagatggttctgtggagtcctggggaatggagagagcacagtctgactccctgccaagtagccaggagttgacttgcccatggtccgctggctttcccaccacttcctacaggatgggatctaagagactcaagagctgggtttctttcagcactctgtactgtcccaaatagcaaacaaatcactttgtagccagatttctgaatggaaatgagaaattgaattctccatggacttttaggtttatgggggagttttagctgtgtttcttggttttatttcagccaaacatgtctgcttttgattttttttttaaagtataagtggtctatatatatgttcaccttttaaatgtaaatgtttaaaaagtaagcatttatgtgtttccataactgacatctgatgcagacctcattctctccccctcttctaccctcctcttttcccccttttcatactcttgtattggttctaataaatggttgctttcaaa

SEQ ID NO: 90528 - DNA, 1342 bp, Homo sapiens
acggctagtacgaggcgggtgttaatcggccgaggcagatgttgacagtgttttcatgaatgttggaatcttactagtccagacttacttaggatgttgttggggaaggcacttgggattttctgtgtcttgcattcacagagggaggccatttcagattcaagagcattggattagggaatcgtgaggcagggatgctactgcgtatttctctctgcaggttggggattaaagttcctttccccatgggtttgaagcagactcagactgtctcaggatcaaagcaaccctcaatggttttgatttatgtcattgcttaccactccccaaccaatcccaggacagctgggtcactgtacccctttgtggtatctgtacctgggcctctccttcctcatagggaccagctgattgaataaatgtgaccaccttatttccaccccccacccccaaaagctacattggaattatttttcctagaaatgtgtataacactcagaattgggcattgatccttaaagcttcatcccattcaccgtattcaacatctgtcatctcttagtgtctgcagtctgaacctaaccttgaccttttttccctctggtttgagaaaactttggacactatttctacttggccaggtgtgggctcaagagccttactctttccatctcagtttaggggcgcagccagctcctcttcccaatagggctctttctgctttccctctccttggccctagatttgtaatccatgaaaaagcacaaggtcctggctccttgcggtcacattctggttctctgtgttttgtggactctgctctcactgttcacccagcactagcagtaccagatggttctgtggagtcctggggaatggagagagcacagtctgactccctgccaagtagccaggagttgacttgcccatggtccgctggctttcccaccacttcctacaggatgggatctaagagactcaagagctgggtttctttcagcactctgtactgtcccaaatagcaaacaaatcactttgtagccagatttctgaatggaaatgagaaattgaattctccatggacttttaggtttatgggggagttttagctgtgtttcttggttttatttcagccaaacatgtctgcttttgattttttttttaaagtataagtggtctatatatatgttcaccttttaaatgtaaatgtttaaaaagtaagcatttatgtgtttccataactgacatctgatgcagacctcattctctccccctcttctaccctcctcttttcccccttttcatactcttgtattggttctaataaatggttgctttcaaa

SEQ ID NO: 90529 - DNA, 1214 bp, Homo sapiens
ctggtggatggggaatggagaggccctaggtacgagagcattggattagggaatcgtgaggcagggatgctactgcgtatttctctctgcaggttggggattaaagttcctttccccatgggtttgaagcagactcagactgtctcaggatcaaagcaaccctcaatggttttgatttatgtcattgcttaccactccccaaccaatcccaggacagctgggtcactgtacccctttgtggtatctgtacctgggcctctccttcctcatagggaccagctgattgaataaatgtgaccaccttatttccaccccccacccccaaaagctacattggaattatttttcctagaaatgtgtataacactcagaattgggcattgatccttaaagcttcatcccattcaccgtattcaacatctgtcatctcttagtgtctgcagtctgaacctaaccttgaccttttttccctctggtttgagaaaactttggacactatttctacttggccaggtgtgggctcaagagccttactctttccatctcagtttaggggcgcagccagctcctcttcccaatagggctctttctgctttccctctccttggccctagatttgtaatccatgaaaaagcacaaggtcctggctccttgcggtcacattctggttctctgtgttttgtggactctgctctcactgttcacccagcactagcagtaccagatggttctgtggagtcctggggaatggagagagcacagtctgactccctgccaagtagccaggagttgacttgcccatggtccgctggctttcccaccacttcctacaggatgggatctaagagactcaagagctgggtttctttcagcactctgtactgtcccaaatagcaaacaaatcactttgtagccagatttctgaatggaaatgagaaattgaattctccatggacttttaggtttatgggggagttttagctgtgtttcttggttttatttcagccaaacatgtctgcttttgattttttttttaaagtataagtggtctatatatatgttcaccttttaaatgtaaatgtttaaaaagtaagcatttatgtgtttccataactgacatctgatgcagacctcattctctccccctcttctaccctcctcttttcccccttttcatactcttgtattggttctaataaatggttgctttcaaa

SEQ ID NO: 90530 - DNA, 2752 bp, Homo sapiens
  misc_feature (2635)..(2636): n is a, c, g, or t
  misc_feature (2657)..(2657): n is a, c, g, or t
  misc_feature (2659)..(2659): n is a, c, g, or t
  misc_feature (2661)..(2661): n is a, c, g, or t
  misc_feature (2666)..(2666): n is a, c, g, or t
tttttgagatggaaacttgctcttttgcccaggctggagtgcagtggcgtgatcttggctcactgcaacctccgcctcccgggttcaagcagttctctgcctcagcctcctgagcagctgggattataggcgcctgccaccatgcccggctaatttttgtatttttagtagagacagggttcaccatcttggccgtgctggtcttgaactcctgaccttgtgatccgcctgcctcggccactcaaagtgctgggattgcaggcgtgagccagcacccggccacagtatctttattacagctcactgcagcctcaatctcctgggctcaaatgatcctcctgcctcagcctcccaagcagctgggactacaggcgcacaccacggtgtctggctaattttattatttaaaaaatgttttgtagagacagtctccctgtgttgcccaggctggtctccaactcgtgagctcaagtgatccacgtgcctcagcctcccaaagtgctgggattacaagcataagccaccgcacccggcccctagtgaacattttactgtatgtgttgataaatcatcttttgagtttctgttgtatgtggggacttcctacactggctgctgtgaagaggtatggaagaaaggagaggctttctgcctagaaattctttgagaacacctgaaaagacagtttaatcatgtcacaacactcttaaggctcaagtcagtgttctggtttccggtagctttaggattggattctaaacgagggctggtggtgagtttggtgtttgtctcgtgtcaccctcacccctcacctcctcagtttaggataagagacataatgatttctaccagaatccaaagtaaatccaaagggggagaaaagacataactgttttttcttctaccttttttttgttaaagagttacatctctcacaggaggaaagaattcaagagtctatatgattagttacagagaatattttcatcccctctccctgaatagaaaagcaggggtcaccatttgtatccttacccttgaggtgtttttgaagatgctgtaactcttgaagttgagctgaggcagaaaggttggaaaaatgcagccctctgggtattgtggggagggatgtgatgtagtaagagggtgttttgtggtgctaggattcccacgccaccaacttgcagctttataagagcgctaccaagaaccaccactggggaaaaggttcttattcattgtttctgttggaatgtgatcttgctttctggattttaggaattcaggttactcagtataaaactctgagaaatcagtgtgacttagtccttcacctcctaagataaagtgaatatttctttacaaaataattcatgtccttaatgttaaagatgtaattttattttcaaaacatctataacatgactttcagaagcagttcatttttccaagattcctcacattatactagataaataataggccctcagttaatacccttcagttattgaattaatctagtttgtggaatgaggtgtatcctgccaacttccctctgctcccaagtacactctgagaggtaaaatgctctgggaaatggaacaagaatcgagtggatgctgactctgtgtgcccacctcctcaactgattgataatggttgaccttgggcaagtcacttctttcaatgcctcagttccccatctgtcaaatggggttaataatactgacctacctcacaggggtgttgttgtgaggcattgtaaatcaaagttaatagaatacttcagggtcctctgtggaggatgtcttgagccagagtttaagcctgacacacaggctttggtcctcactgagctgtctccaagactggaactacttagtgactcggcaaattttctgccccccacccctcatcaaagctgctagttcagatgttgacagtgttttcatgaatgttggaatcttactagtccagacttacttaggatgttgttggggaaggcacttgggattttctgtgtcttgcattcacagagggaggccatttcagattcaagagcattggattagggaatcgtgaggcagggatgctactgcgtatttctctctgcaggttggggattaaagttcctttccccatgggtttgaagcagactcagactgtctcaggatcaaagcaaccctcaatggttttgatttatgtcattgcttaccactccccaaccaatcccaggacagctgggtcactgtacccctttgtggtatctgtacctgggcctctccttcctcatagggaccagctgattgaataaatgtgaccaccttatttccaccccccacccccaaaagctacattggaattatttttcctagaaatgtgtataacactcagaattgggcattgatccttaaagcttcatcccattcaccgtattcaacatctgtcatctcttagtgtctgcagtctgaacctaaccttgaccttttttccctctggtttgagaaaactttggacactatttctacttggccaggtgtgggctcaagagccttactctttccatctcagtttaggggcgcagccagctcctcttcccaataggtctttgttcctctctggctaattggatccnnaaagcaagctggctgggcacncngncgggnggggctggtccggccgaagccaaggttggccggagagaagctcgaaggggcggggccccgggaaagggggccgaatcgagaaaatg

SEQ ID NO: 90531 - DNA, 2407 bp, Homo sapiens
tttttgagatggaaacttgctcttttgcccaggctggagtgcagtggcgtgatcttggctcactgcaacctccgcctcccgggttcaagcagttctctgcctcagcctcctgagcagctgggattataggcgcctgccaccatgcccggctaatttttgtatttttagtagagacagggttcaccatcttggccgtgctggtcttgaactcctgaccttgtgatccgcctgcctcggccactcaaagtgctgggattgcaggcgtgagccagcacccggccacagtatctttattacagctcactgcagcctcaatctcctgggctcaaatgatcctcctgcctcagcctcccaagcagctgggactacaggcgcacaccacggtgtctggctaattttattatttaaaaaatgttttgtagagacagtctccctgtgttgcccaggctggtctccaactcgtgagctcaagtgatccacgtgcctcagcctcccaaagtgctgggattacaagcataagccaccgcacccggcccctagtgaacattttactgtatgtgttgataaatcatcttttgagtttctgttgtatgtggggacttcctacactggctgctgtgaagaggtatggaagaaaggagaggctttctgcctagaaattctttgagaacacctgaaaagacagtttaatcatgtcacaacactcttaaggctcaagtcagtgttctggtttccggtagctttaggattggattctaaacgagggctggtggtgagtttggtgtttgtctcgtgtcaccctcacccctcacctcctcagtttaggataagagacataatgatttctaccagaatccaaagtaaatccaaagggggagaaaagacataactgttttttcttctaccttttttttgttaaagagttacatctctcacaggaggaaagaattcaagagtctatatgattagttacagagaatattttcatcccctctccctgaatagaaaagcaggggtcaccatttgtatccttacccttgaggtgtttttgaagatgctgtaactcttgaagttgagctgaggcagaaaggttggaaaaatgcagccctctgggtattgtggggagggatgtgatgtagtaagagggtgttttgtggtgctaggattcccacgccaccaacttgcagctttataagagcgctaccaagaaccaccactggggaaaaggttcttattcattgtttctgttggaatgtgatcttgctttctggattttaggaattcaggttactcagtataaaactctgagaaatcagtgtgacttagtccttcacctcctaagataaagtgaatatttctttacaaaataattcatgtccttaatgttaaagatgtaattttattttcaaaacatctataacatgactttcagaagcagttcatttttccaagattcctcacattatactagataaataataggccctcagttaatacccttcagttattgaattaatctagtttgtggaatgaggtgtatcctgccaacttccctctgctcccaagtacactctgagaggtaaaatgctctgggaaatggaacaagaatcgagtggatgctgactctgtgtgcccacctcctcaactgattgataatggttgaccttgggcaagtcacttctttcaatgcctcagttccccatctgtcaaatggggttaataatactgacctacctcacaggggtgttgttgtgaggcattgtaaatcaaagttaatagaatacttcagggtcctctgtggaggatgtcttgagccagagtttaagcctgacacacaggctttggtcctcactgagctgtctccaagactggaactacttagtgactcggcaaattttctgccccccacccctcatcaaagctgctagttcagatgttgacagtgttttcatgaatgttggaatcttactagtccagacttacttaggatgttgttggggaaggcacttgggattttctgtgtcttgcattcacagagggaggccatttcagattcaagagcattggattagggaatcgtgaggcagggatgctactgcgtatttctctctgcaggttggggattaaagttcctttccccatgggtttgaagcagactcagactgtctcaggatcaaagcaaccctcaatggttttgatttatgtcattgcttaccactccccaaccaatcccaggacagctgggtcactgtacccctttgtggtatctgtacctgggcctctccttcctcatagggaccagctgattgaataaatgtgaccaccttatttccaccccccaccacagcgcatctgcgtagctgccgaactcacgcggcctactcgttcaccgcgtccttctcttgca

SEQ ID NO: 90532 - DNA, 2463 bp, Homo sapiens
tttttgagatggaaacttgctcttttgcccaggctggagtgcagtggcgtgatcttggctcactgcaacctccgcctcccgggttcaagcagttctctgcctcagcctcctgagcagctgggattataggcgcctgccaccatgcccggctaatttttgtatttttagtagagacagggttcaccatcttggccgtgctggtcttgaactcctgaccttgtgatccgcctgcctcggccactcaaagtgctgggattgcaggcgtgagccagcacccggccacagtatctttattacagctcactgcagcctcaatctcctgggctcaaatgatcctcctgcctcagcctcccaagcagctgggactacaggcgcacaccacggtgtctggctaattttattatttaaaaaatgttttgtagagacagtctccctgtgttgcccaggctggtctccaactcgtgagctcaagtgatccacgtgcctcagcctcccaaagtgctgggattacaagcataagccaccgcacccggcccctagtgaacattttactgtatgtgttgataaatcatcttttgagtttctgttgtatgtggggacttcctacactggctgctgtgaagaggtatggaagaaaggagaggctttctgcctagaaattctttgagaacacctgaaaagacagtttaatcatgtcacaacactcttaaggctcaagtcagtgttctggtttccggtagctttaggattggattctaaacgagggctggtggtgagtttggtgtttgtctcgtgtcaccctcacccctcacctcctcagtttaggataagagacataatgatttctaccagaatccaaagtaaatccaaagggggagaaaagacataactgttttttcttctaccttttttttgttaaagagttacatctctcacaggaggaaagaattcaagagtctatatgattagttacagagaatattttcatcccctctccctgaatagaaaagcaggggtcaccatttgtatccttacccttgaggtgtttttgaagatgctgtaactcttgaagttgagctgaggcagaaaggttggaaaaatgcagccctctgggtattgtggggagggatgtgatgtagtaagagggtgttttgtggtgctaggattcccacgccaccaacttgcagctttataagagcgctaccaagaaccaccactggggaaaaggttcttattcattgtttctgttggaatgtgatcttgctttctggattttaggaattcaggttactcagtataaaactctgagaaatcagtgtgacttagtccttcacctcctaagataaagtgaatatttctttacaaaataattcatgtccttaatgttaaagatgtaattttattttcaaaacatctataacatgactttcagaagcagttcatttttccaagattcctcacattatactagataaataataggccctcagttaatacccttcagttattgaattaatctagtttgtggaatgaggtgtatcctgccaacttccctctgctcccaagtacactctgagaggtaaaatgctctgggaaatggaacaagaatcgagtggatgctgactctgtgtgcccacctcctcaactgattgataatggttgaccttgggcaagtcacttctttcaatgcctcagttccccatctgtcaaatggggttaataatactgacctacctcacaggggtgttgttgtgaggcattgtaaatcaaagttaatagaatacttcagggtcctctgtggaggatgtcttgagccagagtttaagcctgacacacaggctttggtcctcactgagctgtctccaagactggaactacttagtgactcggcaaattttctgccccccacccctcatcaaagctgctagttcagatgttgacagtgttttcatgaatgttggaatcttactagtccagacttacttaggatgttgttggggaaggcacttgggattttctgtgtcttgcattcacagagggaggccatttcagattcaagagcattggattagggaatcgtgaggcagggatgctactgcgtatttctctctgcaggttggggattaaagttcctttccccatgggtttgaagcagactcagactgtctcaggatcaaagcaaccctcaatggttttgatttatgtcattgcttaccactccccaaccaatcccaggacagctgggtcactgtacccctttgtggtatctgtacctgggcctctccttcctcatagggaccccagtgtgataatgtgcacttttcaccccacccaaagtaattgatatttctagacagtgtacactcaaatggtgagctaagcgcaacatacgtacatgcacttagtgggcgacacgcttccgggaaagacatatacgggggaagaactccaggggggcccagg

SEQ ID NO: 90533 - DNA, 2387 bp, Homo sapiens
tttttgagatggaaacttgctcttttgcccaggctggagtgcagtggcgtgatcttggctcactgcaacctccgcctcccgggttcaagcagttctctgcctcagcctcctgagcagctgggattataggcgcctgccaccatgcccggctaatttttgtatttttagtagagacagggttcaccatcttggccgtgctggtcttgaactcctgaccttgtgatccgcctgcctcggccactcaaagtgctgggattgcaggcgtgagccagcacccggccacagtatctttattacagctcactgcagcctcaatctcctgggctcaaatgatcctcctgcctcagcctcccaagcagctgggactacaggcgcacaccacggtgtctggctaattttattatttaaaaaatgttttgtagagacagtctccctgtgttgcccaggctggtctccaactcgtgagctcaagtgatccacgtgcctcagcctcccaaagtgctgggattacaagcataagccaccgcacccggcccctagtgaacattttactgtatgtgttgataaatcatcttttgagtttctgttgtatgtggggacttcctacactggctgctgtgaagaggtatggaagaaaggagaggctttctgcctagaaattctttgagaacacctgaaaagacagtttaatcatgtcacaacactcttaaggctcaagtcagtgttctggtttccggtagctttaggattggattctaaacgagggctggtggtgagtttggtgtttgtctcgtgtcaccctcacccctcacctcctcagtttaggataagagacataatgatttctaccagaatccaaagtaaatccaaagggggagaaaagacataactgttttttcttctaccttttttttgttaaagagttacatctctcacaggaggaaagaattcaagagtctatatgattagttacagagaatattttcatcccctctccctgaatagaaaagcaggggtcaccatttgtatccttacccttgaggtgtttttgaagatgctgtaactcttgaagttgagctgaggcagaaaggttggaaaaatgcagccctctgggtattgtggggagggatgtgatgtagtaagagggtgttttgtggtgctaggattcccacgccaccaacttgcagctttataagagcgctaccaagaaccaccactggggaaaaggttcttattcattgtttctgttggaatgtgatcttgctttctggattttaggaattcaggttactcagtataaaactctgagaaatcagtgtgacttagtccttcacctcctaagataaagtgaatatttctttacaaaataattcatgtccttaatgttaaagatgtaattttattttcaaaacatctataacatgactttcagaagcagttcatttttccaagattcctcacattatactagataaataataggccctcagttaatacccttcagttattgaattaatctagtttgtggaatgaggtgtatcctgccaacttccctctgctcccaagtacactctgagaggtaaaatgctctgggaaatggaacaagaatcgagtggatgctgactctgtgtgcccacctcctcaactgattgataatggttgaccttgggcaagtcacttctttcaatgcctcagttccccatctgtcaaatggggttaataatactgacctacctcacaggggtgttgttgtgaggcattgtaaatcaaagttaatagaatacttcagggtcctctgtggaggatgtcttgagccagagtttaagcctgacacacaggctttggtcctcactgagctgtctccaagactggaactacttagtgactcggcaaattttctgccccccacccctcatcaaagctgctagttcagatgttgacagtgttttcatgaatgttggaatcttactagtccagacttacttaggatgttgttggggaaggcacttgggattttctgtgtcttgcattcacagagggaggccatttcagattcaagagcattggattagggaatcgtgaggcagggatgctactgcgtatttctctctgcaggttggggattaaagttcctttccccatgggtttgaagcagactcagactgtctcaggatcaaagcaaccctcaatggttttgatttatgtcattgcttaccactccccaaccaatcccaggacagctgggtcactgtacccctttgtggtatctgtacctgggcctctccttcctcatagggaccttgtaactggagctgttgtaactggagctgttgtaactggagctgttgtaactggagctgttgtaactggagctgttgtaactggag

SEQ ID NO: 90534 - DNA, 2224 bp, Homo sapiens
tttttgagatggaaacttgctcttttgcccaggctggagtgcagtggcgtgatcttggctcactgcaacctccgcctcccgggttcaagcagttctctgcctcagcctcctgagcagctgggattataggcgcctgccaccatgcccggctaatttttgtatttttagtagagacagggttcaccatcttggccgtgctggtcttgaactcctgaccttgtgatccgcctgcctcggccactcaaagtgctgggattgcaggcgtgagccagcacccggccacagtatctttattacagctcactgcagcctcaatctcctgggctcaaatgatcctcctgcctcagcctcccaagcagctgggactacaggcgcacaccacggtgtctggctaattttattatttaaaaaatgttttgtagagacagtctccctgtgttgcccaggctggtctccaactcgtgagctcaagtgatccacgtgcctcagcctcccaaagtgctgggattacaagcataagccaccgcacccggcccctagtgaacattttactgtatgtgttgataaatcatcttttgagtttctgttgtatgtggggacttcctacactggctgctgtgaagaggtatggaagaaaggagaggctttctgcctagaaattctttgagaacacctgaaaagacagtttaatcatgtcacaacactcttaaggctcaagtcagtgttctggtttccggtagctttaggattggattctaaacgagggctggtggtgagtttggtgtttgtctcgtgtcaccctcacccctcacctcctcagtttaggataagagacataatgatttctaccagaatccaaagtaaatccaaagggggagaaaagacataactgttttttcttctaccttttttttgttaaagagttacatctctcacaggaggaaagaattcaagagtctatatgattagttacagagaatattttcatcccctctccctgaatagaaaagcaggggtcaccatttgtatccttacccttgaggtgtttttgaagatgctgtaactcttgaagttgagctgaggcagaaaggttggaaaaatgcagccctctgggtattgtggggagggatgtgatgtagtaagagggtgttttgtggtgctaggattcccacgccaccaacttgcagctttataagagcgctaccaagaaccaccactggggaaaaggttcttattcattgtttctgttggaatgtgatcttgctttctggattttaggaattcaggttactcagtataaaactctgagaaatcagtgtgacttagtccttcacctcctaagataaagtgaatatttctttacaaaataattcatgtccttaatgttaaagatgtaattttattttcaaaacatctataacatgactttcagaagcagttcatttttccaagattcctcacattatactagataaataataggccctcagttaatacccttcagttattgaattaatctagtttgtggaatgaggtgtatcctgccaacttccctctgctcccaagtacactctgagaggtaaaatgctctgggaaatggaacaagaatcgagtggatgctgactctgtgtgcccacctcctcaactgattgataatggttgaccttgggcaagtcacttctttcaatgcctcagttccccatctgtcaaatggggttaataatactgacctacctcacaggggtgttgttgtgaggcattgtaaatcaaagttaatagaatacttcagggtcctctgtggaggatgtcttgagccagagtttaagcctgacacacaggctttggtcctcactgagctgtctccaagactggaactacttagtgactcggcaaattttctgccccccacccctcatcaaagctgctagttcagatgttgacagtgttttcatgaatgttggaatcttactagtccagacttacttaggatgttgttggggaaggcacttgggattttctgtgtcttgcattcacagagggaggccatttcagattcaagagcattggattagggaatcgtgaggcagggatgctactgcgtatttctctctgcaggttggggattaaagtaggggcagagcttgacctccatctaggtttcttttatctggagaaaaagaaacttttgaactatgtcatgcttcgccctgaaagggcaagctaa

SEQ ID NO: 90535 - DNA, 1178 bp, Homo sapiens
tttttgagatggaaacttgctcttttgcccaggctggagtgcagtggcgtgatcttggctcactgcaacctccgcctcccgggttcaagcagttctctgcctcagcctcctgagcagctgggattataggcgcctgccaccatgcccggctaatttttgtatttttagtagagacagggttcaccatcttggccgtgctggtcttgaactcctgaccttgtgatccgcctgcctcggccactcaaagtgctgggattgcaggcgtgagccagcacccggccacagtatctttattacagctcactgcagcctcaatctcctgggctcaaatgatcctcctgcctcagcctcccaagcagctgggactacaggcgcacaccacggtgtctggctaattttattatttaaaaaatgttttgtagagacagtctccctgtgttgcccaggctggtctccaactcgtgagctcaagtgatccacgtgcctcagcctcccaaagtgctgggattacaagcataagccaccgcacccggcccctagtgaacattttactgtatgtgttgataaatcatcttttgagtttctgttgtatgtggggacttcctacactggctgctgtgaagaggtatggaagaaaggagaggctttctgcctagaaattctttgagaacacctgaaaagacagtttaatcatgtcacaacactcttaaggctcaagtcagtgttctggtttccggtagctttaggattggattctaaacgagggctggtggtgagtttggtgtttgtctcgtgtcaccctcacccctcacctcctcagtttaggataagagacataatgatttctaccagaatccaaagtaaatccaaagggggagaaaagacataactgttttttcttctaccttttttttgttaaagagttacatctctcacaggaggaaagaattcaagagtctatatgattagttacagagaatattttcatcccctctccctgaatagaaaagcaggggtcaccatttgtatccttacccttgaggtgtttttgaagatgctgtaactcttgaagttgagctgaggcagaaaggttggaaaaatgcagccctctgggtattgtggggagggatgtgatgtagtaagagagtctcctcgaactggtaccgagctcgatcgta

SEQ ID NO: 90536 - DNA, 457 bp, Homo sapiens
gttcagctcgcccagacggaacaggtcagaaggctccaggggagacctcttcagggagatgaaattgctagaacacctgaagtccctacatgtcttaagaagagatttagatgaaagaattgagagttttattagcaacacgtatatagaaaacaaagaaaatgaaatatcaagcttggtttcacttcaaagaaaacacaaagctgtgtcacaaaggaaaagtacgtacaatttaacagtaagggaagggcacatgtggactctgtgctatttttgccactttttcatgtgtctaaaaccatttcaaaagaaaaagcaatcacagtgtatgtggtagacagtctctaaaatggtctccaataacccccacctcctgaaattcacactcttgcattgctcctccccttgagaacatgtggaacctgtgacatgcttctaatcaatggaatatgacaaa

SEQ ID NO: 90537 - DNA, 837 bp, Homo sapiens
taaaattggaagccagagaaaatgtgaaatgagtgtgtacacaaattatcatagaagagggtcaaattgttgcccaaaggcttgtaaactaaggtgcagtttcagagataatctgcttaataaatgtctcaaaggatttttattttcacaaatcctggcccatctcagttgttctaatgtaatgaactattagagaggtttgcagtggtaaaggggactgggtgtgtaggataaacatctgttccagactgactgcttctaggaatgtgacttctgattcactttactttcaaaacttcaagagtaatctctaaagttgtgtatcttttacaatgaaatgtgaacagttcaaatgtattattttctcagtgggaatggattcaggggatttcagttcaatatattctccatcagtgttttgtcacaaggaaactagaactgagaaccaattcacaacaaaaaggtaatccaaatcaagaaataaaatgtaccagttaccttttcaactttgatttactggtcagtcgaaaaagcttttaaaaaataggacagtaaggcctagtgcggtggctcacgcctgtaatcccagcactttgggaggccaaggcgagtggaccacttgaggtcaggagttcgagaccagcctggccaacatggtgaaacctcgtctctactaaaaatacaaaaattagcctggcactttggcgcgtggctgtaatcccagctacttggggggctgaggcacgataattgcttgaactcagaggcagaggttgcagggagctgagattggcaccactgtactccatcctgggtgacacagcgagactctgtcta

SEQ ID NO: 90538 - DNA, 171 bp, Homo sapiens
caacacttatacactgatggtggagactcatgaagactgaaggtctactggaagaagtaatactggtattgtcttgaagatcagaaaagagaaaaggacagggacaatagggagacatttctacctgtaggaaacagtgtgggccaaagtgaggaaatcttaccagagtct

SEQ ID NO: 90539 - DNA, 236 bp, Homo sapiens
gggtggccgccctccagggtgtacagtcacccagctgtggttgggggctgcttcctgtgccatgccatctgctagcctacccacccgtggagggctcctgcatgctgccagccttgggttgtcccctggcctggcaggggacctctatgacattttgagcatgatcagaaaaaggaacttgtggattttcttttagggttagctggtgagcagatgatgccagctagcaagccacc

SEQ ID NO: 90540 - DNA, 234 bp, Homo sapiens
atttagcccaaacaataaaagtacggtgtgagcacttttttggttaataggttatattactataggagaacttacaaggaataatagcccttttctgaaactgcgtagcgaagtcagcagaaagtgagatacagaataaatttgaaaagatgaactttcaagaagcaacagacccacaacctgaaaagtttgaataaaagaaattagatgccattgaggtaattaaatattaat

SEQ ID NO: 90541 - DNA, 434 bp, Homo sapiens
agagggtgtgtgcgtgggaacagctctgggctctgagctccgccgctcctgcctggtgctggtcccgcacccacaggatgagaccccgggcttctttgccctcatgagaggctggaggcagctctcagccccccaggctcctttccctgcaaactagagggtgaccatccctgttctgcacactggcaagcaggtcccccgaggccgtgcgtacttcggtgtccccttaaacccccatcctctgatatcctcggaagcccagctgttcaccaaaactcgcctccccagcggggactacaccctcagaggagggccccgggcatcatcctcctgccctcagcccagcctgcatcccgagtgctttcccataccacagccaccgtcagcgaccttcaaacccctcgacagctgattggcggattggagatgccacc

SEQ ID NO: 90542 - DNA, 241 bp, Homo sapiens
gacagggtttcaccgtgttggtcaggctcatctcgtgatccactcctggtctcaggtgatccgcccacctcggactgccaaagtgctgggattacaggcatgagccaatgcgcccagcccagacaatgttaagagggttttataatcagagaagtaggcccagaaaaatggggacttcccgtctcctaccttgtcctactcgtaaaactagggcgtcacttcaagagtagagggcaacgat

SEQ ID NO: 90543 - DNA, 291 bp, Homo sapiens
ttggacttgatcaattatttcaaagtcaaaacaatgactaataaattaactgatcaattttaaaagttttatgtttcaaagagcaacatcaagaaagtgaaaagacaaaccacagaatggaagaaaatttttcttatatatctgatagggtacttttgtatagaatatatcaagaatgcatgcaacttaacaataaaaagacagtggcccaatttaaaaatgggcaaagggtctgaatagagatttctacaaagaagattaactaatggacaatagacactgaaaaagata

SEQ ID NO: 90544 - DNA, 1962 bp, Homo sapiens
gcagatttgctctccctcccgcttcctccctcccatcttcccacccgggctgtgcccaggccacagagcagctgcaggccttgggagaggacccacacagcctcctgtaggtggcaacagtgccacctgtttgactcatagggctgaaccgaggactgaaaaagggaggaggcagaccactcggagaggagctgggaagcagtgcagagaggagagcggagcggagctgccgctgagcaaagattcctcttccgccgctggggacactggatggactggtccctggcattcctgctggtcatctctctactggtcacatatgcatccttgctattggtcctggccctgctcctgcggctttgtagacagcccctgcatctgcacagcctccacaaggtgctgctgctcctcattatgctgcttgtggcggctggccttgtgggactggacatccaatggcagcaggagtggcatagcttgcgtgtgtcactgcaggccacagccccattccttcatattggagcagccgctggaattgccctcctggcctggcctgtggctgataccttctaccgtatccaccgaagaggtcccaagattctgctactgctcctattttttggagttgtcctggtcatctacttggcccccctatgcatctcctcaccctgcatcatggaacccagagacttaccacccaagcctgggctggtgggacaccgaggggcccccatgctggctcccgagaacaccctgatgtccttgcggaagacagctgaatgcggagctactgtgtttgagactgatgtgatggtcagctccgatggggtccccttcctcatgcatgatgagcacctcagcaggaccacgaatgtagcctctgtattcccaacccgaatcacagcccacagcagtgacttctcctggactgaactgaagagactcaatgctggatcctggttcctagagaggcgacccttctggggggccaaaccgctggcaggccctgatcagaaagaggctgagagtcagacggtaccagcattagaagagctattggaggaagctgcagccctcaacctttccatcatgttcgacttgcgccgacccccacagaaccacacatactatgacacttttgtgatccagacattggagactgtgctgaatgcaagggtgccccaagccatggtcttttggctaccagatgaagatcgggctaatgtccaacgacgggcacctggaatgcgccagatatatggacgtcagggaggcaacagaacggagaggccccagtttcttaacctcccctatcaagatctgccactattggatatcaaggcattgcataaggataatgtctcggtgaacctatttgtagtgaacaagccctggctcttctctctgctttggtgtgcaggggtggattcggtcaccaccaacgactgccagctgctgcagcagatgcgttaccctatctggcttattacccctcaaacctacctaatcatatgggtcattaccaattgtgtttccaccatgctgcttttgtggaccttcctcctccaaaggagatttgttaagaagagagggaaaactggcttagaaacagcagtgctgctgacaaggatcaacaatttcatgatggagtgaatgccctgccctgcttccccacccaagccagtctacattgcccaaacagcaagggttggagagtggcttaagtggaatgcttcaggggtggtgggttgcaagtggggggagctttgccaacaggaggttttgaaccatgagggccctctgcccaggtgatgggcattccctaagctgctatggaatctgctccctttggggttttgacctgagatgtttgggaagagagtgagtaatgagaagtttctcctcaaatgaaactagaacagaggaagtaaaagggagattgctcggataatgtctcagact

SEQ ID NO: 90545 - DNA, 2180 bp, Homo sapiens
gcagatttgctctccctcccgcttcctccctcccatcttcccacccgggctgtgcccaggccacagagcagctgcaggccttgggagaggacccacacagcctcctgtaggtggcaacagtgccacctgtttgactcatagggctgaaccgaggactgaaaaagggaggaggcagaccactcggagaggagctgggaagcagtgcagagaggagagcggagcggagctgccgctgagcaaaggccttcaccatggccgagtcccccggctgctgctccgtctgggcccgctgcctccactgcctgtatagctgccactggaggaaatgccccagagagaggatgcaaaccagcaagtgcgactgtatctggtttggcctgctcttcctcaccttcctcctttccctgagctggctgtacatcgggctcgtccttctcaatgacctgcacaacttcaatgaattcctcttccgccgctggggacactggatggactggtccctggcattcctgctggtcatctctctactggtcacatatgcatccttgctattggtcctggccctgctcctgcggctttgtagacagcccctgcatctgcacagcctccacaaggtgctgctgctcctcattatgctgcttgtggcggctggccttgtgggactggacatccaatggcagcaggagtggcatagcttgcgtgtgtcactgcaggccacagccccattccttcatattggagcagccgctggaattgccctcctggcctggcctgtggctgataccttctaccgtatccaccgaagaggtcccaagattctgctactgctcctattttttggagttgtcctggtcatctacttggcccccctatgcatctcctcaccctgcatcatggaacccagagacttaccacccaagcctgggctggtgggacaccgaggggcccccatgctggctcccgagaacaccctgatgtccttgcggaagacagctgaatgcggagctactgtgtttgagactgatgtgatggtcagctccgatggggtccccttcctcatgcatgatgagcacctcagcaggaccacgaatgtagcctctgtattcccaacccgaatcacagcccacagcagtgacttctcctggactgaactgaagagactcaatgctggatcctggttcctagagaggcgacccttctggggggccaaaccgctggcaggccctgatcagaaagaggctgagagtcagacggtaccagcattagaagagctattggaggaagctgcagccctcaacctttccatcatgttcgacttgcgccgacccccacagaaccacacatactatgacacttttgtgatccagacattggagactgtgctgaatgcaagggtgccccaagccatggtcttttggctaccagatgaagatcgggctaatgtccaacgacgggcacctggaatgcgccagatatatggacgtcagggaggcaacagaacggagaggccccagtttcttaacctcccctatcaagatctgccactattggatatcaaggcattgcataaggataatgtctcggtgaacctatttgtagtgaacaagccctggctcttctctctgctttggtgtgcaggggtggattcggtcaccaccaacgactgccagctgctgcagcagatgcgttaccctatctggcttattacccctcaaacctacctaatcatatgggtcattaccaattgtgtttccaccatgctgcttttgtggaccttcctcctccaaaggagatttgttaagaagagagggaaaactggcttagaaacagcagtgctgctgacaaggatcaacaatttcatgatggagtgaatgccctgccctgcttccccacccaagccagtctacattgcccaaacagcaagggttggagagtggcttaagtggaatgcttcaggggtggtgggttgcaagtggggggagctttgccaacaggaggttttgaaccatgagggccctctgcccaggtgatgggcattccctaagctgctatggaatctgctccctttggggttttgacctgagatgtttgggaagagagtgagtaatgagaagtttctcctcaaatgaaactagaacagaggaagtaaaagggagattgctcggataatgtctcagact

SEQ ID NO: 90546 - DNA, 532 bp, Homo sapiens
cacgaatgtagcctctgtattcccaacccgaatcacagcccacagcagtgacttctcctggactgaactgaagagactcaatgctggatcctggttcctagaggtgaggacagcctctgcaaagaggcagccatctgcagggacactcagagagggcagagttcattctgttgataagcatttgctcagccctgtgctaggcaataagaacatagtctgtgctctcaagtcacttccacctagtagagagcctaggcagcagacgattcaggaaacccagagcaataaaaacattttcctgcctgggagagaatcaggagtggattcatacaggagaggatgaaagtcttcttctaagatgcacaaagcagggaacaggaactccttcagagggaagaggacacgtaaagcccagaagtctgaaaaagggtgtttccaggaataaaatgtggctgaatgtaactgagagagacaattcatgggagtggtagggagcagaggcttggccttgaagagctccgaatgcctggcc

SEQ ID NO: 90547 - DNA, 1477 bp, Homo sapiens
ccaccacgccctgcccatttatgttcattttttttagagaattctcctcctcccatttatgaagctagatttttttttaatttcaccaaaatttgttgacgtcccttgatttgctgatagggacaataattaaatattttccacttgtttttataaaaactgtaatggtgatttgtttaacagatgttgacttagcaccttctctctttttttttttttttttttgagttggagtcttgctctgtcacccagctggagtgcagtggcacgatttcggctcactgcaacctccgcctcccaggttcaggcgcttctcctgcctcagcctcccaaatagttgggattacaggtgcatgccgccacgcctagctaatgttttttgtatcttagtagagatggtgtttcaccttgttgcccatgccgctcttgaactccttggcctcccaaagtgttaggattacaggcgtgagccactgtgcctggccccaatttagcaccttactgggtgctgaggctgtgagccatagtagaatgcatgtgatccagggccttgctgaattcatggtctaatagggagcctgacacgcaggcacagagcggagggcagtggctgtggctcccagggacaccaccctgtccagagttcagtggcagcttctcattaaaaaaagctttgagacctgaattggagtctgtctggcaggcaggtggggatggaggggaggagtgtatcctaggctgatgagatggtgtgtttttcatccggcaaccaactggtctccttcactgtctccagcaccccgcacaatactgtgtgccaggtgctcagtaattatttatcaagcgcataagagcacagcacatccagggacggaagttccaaagggctaggagagtggttagacctggaagccaaaaggtttacagtctggataaagagcttttaccttgaggccgggcacagtggcttatgcctgtggtcccaccactttgggaggccagggcgggcggatcacttgaggtcaggagtttgagaccagcctggccagcatggtgaaaccttgtctctactaaacatataaaaattaggcttggtggcgcacacctgtattctcagctactcattaggctgaggcacaaggatcgcttgaatctgggaggcggaggttgcagtgacccaagatcaccctagcctgggtgacagtgtgagactccaaaaaaaaagaaaaaaatgaacttttacctcgagagctccaggaagccctgaaagagttttaaggagattgatctgatggggatcattacttggtagttgagcgtagagtgctcaggggagggaggggactctagtcagttggcaaagctgctgtagaagaggaaaggggtctggaccaggttgacgattgataagacctggtgaccgaagggaaggcgagagtggcgagaaagatgtaaatgaccacaggtttccgtctgc

SEQ ID NO: 90548 - DNA, 1424 bp, Homo sapiens
ccaccacgccctgcccatttatgttcattttttttagagaattctcctcctcccatttatgaagctagatttttttttaatttcaccaaaatttgttgacgtcccttgatttgctgatagggacaataattaaatattttccacttgtttttataaaaactgtaatggtgatttgtttaacagatgttgacttagcaccttctctctttttttttttttttttttgagttggagtcttgctctgtcacccagctggagtgcagtggcacgatttcggctcactgcaacctccgcctcccaggttcaggcgcttctcctgcctcagcctcccaaatagttgggattacaggtgcatgccgccacgcctagctaatgttttttgtatcttagtagagatggtgtttcaccttgttgcccatgccgctcttgaactccttggcctcccaaagtgttaggattacaggcgtgagccactgtgcctggccccaatttagcaccttactgggtgctgaggctgtgagccatagtagaatgcatgtgatccagggccttgctgaattcatggtctaatagggagcctgacacgcaggcacagagcggagggcagtggctgtggctcccagggacaccaccctgtccagagttcagtggcagcttctcattaaaaaaagctttgagacctgaattggagtctgtctggcaggcaggtggggatggaggggaggagtgtatcctaggctgatgagatggtgtgtttttcatccggcaaccaactggtctccttcactgtctccagcaccccgcacaatactgtgtgccaggtgctcagtaattatttatcaagcgcataagagcacagcacatccagggacggaagttccaaagggctaggagagtggttagacctggaagccaaaaggtttacagtctggataaagagcttttaccttgaggccgggcacagtggcttatgcctgtggtcccaccactttgggaggccagggcgggcggatcacttgaggtcaggagtttgagaccagcctggccagcatggtgaaaccttgtctctactaaacatatagcacaaggatcgcttgaatctgggaggcggaggttgcagtgacccaagatcaccctagcctgggtgacagtgtgagactccaaaaaaaaagaaaaaaatgaacttttacctcgagagctccaggaagccctgaaagagttttaaggagattgatctgatggggatcattacttggtagttgagcgtagagtgctcaggggagggaggggactctagtcagttggcaaagctgctgtagaagaggaaaggggtctggaccaggttgacgattgataagacctggtgaccgaagggaaggcgagagtggcgagaaagatgtaaatgaccacaggtttccgtctgc

SEQ ID NO: 90549 - DNA, 3136 bp, Homo sapiens
acccctcctcttcctcctcagcctactcaacgtgaagatgatgaggacgaagacctttaggatgatccacttccacttaatgaatagcctcctcgctggggaggcagagtcctcgcgtggtctcctgcctcgagcacagcctgtgcccaggggagccgggcttgcagacaacagcagtggtgtccatgggctctggagaccatcagttcaacctcgcagagatcctgtcacagaactacagtgttaggggggagtgcgaggaggcctcgaggtgcccagacaagcccaaggaggagctggagaaggacttcatctcccagagcaacgacatgccctttgatgagctgcttgcgctctatggctacgaggcgtcagaccccatttcagaccgggagagtgagggtggtgacgtggccccgaacctcccagacatgaccctggacaaagaacaaatagcgaaggatttgctttcaggggaagaagaggaagagacgcaatcatctgctgacgacctcaccccgtccgtgacctcccacgaggcctccgacctcttccctaaccggagtggatctcgtttcctggctgatgaagacagagagcctggctcttctgcctcctccgacaccgaggaggactctcttcctgccaacaaatgtaagaaggagatcatggtgggacctcagttccaagctgacctcagcaacctgcacttgaaccggcactgtgagaagatctacgagaacgaagaccagctgctctgggaccccagcgtcctccctgagagggaggtggaggagttcctgtacagggcggtgaagcggcgttggcacgagatggccgggcctcagctcccagagggagaagccgtgaaagacagtgagcaggcgctgtacgagttggtgaaatgcaacttcaatgtggaggaggccctgcgaaggctgcggttcaacgtgaaggtgatccgagatgggctctgtgcttggagtgaagaggagtgcaggaactttgagcacggcttccgtgtgcatggaaagaactttcacctgatccaggccaacaaggtgcgcacacggtcagtgggcgagtgtgtcgagtactactacctgtggaagaagtcggagcgctacgactacttcgcccagcagacgcggctgggccggaggaagtacgtcccgtccggaaccacggacgcagaccaggacctggatggcagcgaccccgatggccccggccgtccgcgcccggagcaagacaccctgactgggatgcgcacagatccactgagcgtggatggcacggccggtggtctcgatgagcccggagtggcctctgatggactcccgtcctcggagccagggccgtgttccttccagcagctggatgagtcccccgctgtacccctgtcccatcggcccccagccctggccgacccagcctcataccagccagctgtcactgctccggagccagacgccagcccaaggctggccgtggacttcgccctgcccaaggagctgcccctcatctccagccatgtggacctcagcggggatccggaggagactgtggccccagcacaggtggctttgtcggtcaccgagtttggactcatcggcattggggacgtgaaccccttcctggccgcccaccccacgtgcccggcccccgggctacactcggagcccctgtcacactgtaacgtgatgacctgctgactcctggccgcgggcggcgtatgcggcccagactggacttagcgctgccgctgggcccgcctctgtcagtcttcctgaccccttccccaccccccgggccttggggtagcacctccttctgcttcagaacacgtcaggactggggtgaggtggctgggccgtgagcccttgcccctgtccacacagaatggacccacggccccacccagcgccgtcagcgcccggcactgccacccgggtccgggccgctgcctgcacgtgggatccgtcgggcagccggggacagaagagaccccgccgttgggacgcagggcagagccggccacctagtcccttccagccagcagaggcgagggaaggcgtcactgccccggcggggagacgggcaggacgccctgccccgcaccagcagcctccgccggggcgccctcagctccctgcttggctctgtctctccacacccggcagggccgcgggctgccccagccctgggggtcgtgggcagctgctactcagtgccaaccccgtggggcacagagccatatacctcgctgtccggcccccaccccagcctcgccttcccaccccatcgtctccacttcaggaaaagccgcactttacacccccacctgcctcttccccctccatccctgctccccgatcctgagcggttggggtggggtccctcagcaaccccaggcgtgggtttgaggagacaggtgatttacatcccctttgctgtcctcccccggtaccaaggcagggagcctccggaggagccggccctgctggccacgcaggggccagactccagcctgtttccccagccctgcaggtcttccttctgtgggaagcttcctagcaagatggcttggagtcctggtccccctcctccctggccctctcgttcgtttctgtttctgtttacacgttggagtggggtcctccgtgggcggcggcgcgccctgccccgggtgtcgtccggcctcttgtgctcgagcccctttccgagttggactcgaccatccctcaccccaccaaggaccacactgtgaagtgataactgccttgaacccccctttgctgttttatttattaaacttgatttgaagcccggggtgccttgtggtggatcgggtgggggctggggcggcaggtgtcctcgtcatctcacttgggggcctgcatgtctcttggagggtccaggataagtcgtgagcaacacgggcgagggggtgcaccgggggcatgacgtggtgggctacgtattgttcacgtcagtaagggaattgtggccacgatgacgggatgtgaggagggcccacgtctgggtagaggtggtcggggcagcctcctagaagtgatatttaagctgaaacatgaaggagaatgggcctcctttgctgaaagtttgccgagag

SEQ ID NO: 90550 - DNA, 3115 bp, Homo sapiens
acccctcctcttcctcctcagcctactcaacgtgaagatgatgaggacgaagacctttaggatgatccacttccacttaatgaatagcctcctcgctggggaggcagagtcctcgcgtggtctcctgcctcgagcacagcctgtgcccaggggagccgggcttgcagacaacagcagtggtgtccatgggctctggagaccatcagttcaacctcgcagagatcctgtcacagaactacagtgttaggggggagtgcgaggaggcctcgaggtgcccagacaagcccaaggaggagctggagaaggacttcatctcccagagcaacgacatgccctttgatgagctgcttgcgctctatggctacgaggcgtcagaccccatttcagaccgggagagtgagggtggtgacgtggccccgaacctcccagacatgaccctggacaaagaacaaatagcgaaggatttgctttcaggggaagaagaggaagagacgcaatcatctgctgacgacctcaccccgtccgtgacctcccacgaggcctccgacctcttccctaaccggagtggatctcgtttcctggctgatgaagacagagagcctggctcttctgcctcctccgacaccgaggaggactctcttcctgccaacaaatgtaagaaggagatcatggtgggacctcagttccaagctgacctcagcaacctgcacttgaaccggcactgtgagaagatctacgagaacgaagaccagctgctctgggaccccagcgtcctccctgagagggaggtggaggagttcctgtacagggcggtgaagcggcgttggcacgagatggccgggcctcagctcccagagggagaagccgtgaaagacagtgagcaggcgctgtacgagttggtgaaatgcaacttcaatgtggaggaggccctgcgaaggctgcggttcaacgtgaaggtgatccgagatgggctctgtgcttggagtgaagaggagtgcaggaactttgagcacggcttccgtgtgcatggaaagaactttcacctgatccaggccaacaaggtgcgcacacggtcagtgggcgagtgtgtcgagtactactacctgtggaagaagtcggagcgctacgactacttcgcccagcagacgcggctgggccggaggaaggacgcagaccaggacctggatggcagcgaccccgatggccccggccgtccgcgcccggagcaagacaccctgactgggatgcgcacagatccactgagcgtggatggcacggccggtggtctcgatgagcccggagtggcctctgatggactcccgtcctcggagccagggccgtgttccttccagcagctggatgagtcccccgctgtacccctgtcccatcggcccccagccctggccgacccagcctcataccagccagctgtcactgctccggagccagacgccagcccaaggctggccgtggacttcgccctgcccaaggagctgcccctcatctccagccatgtggacctcagcggggatccggaggagactgtggccccagcacaggtggctttgtcggtcaccgagtttggactcatcggcattggggacgtgaaccccttcctggccgcccaccccacgtgcccggcccccgggctacactcggagcccctgtcacactgtaacgtgatgacctgctgactcctggccgcgggcggcgtatgcggcccagactggacttagcgctgccgctgggcccgcctctgtcagtcttcctgaccccttccccaccccccgggccttggggtagcacctccttctgcttcagaacacgtcaggactggggtgaggtggctgggccgtgagcccttgcccctgtccacacagaatggacccacggccccacccagcgccgtcagcgcccggcactgccacccgggtccgggccgctgcctgcacgtgggatccgtcgggcagccggggacagaagagaccccgccgttgggacgcagggcagagccggccacctagtcccttccagccagcagaggcgagggaaggcgtcactgccccggcggggagacgggcaggacgccctgccccgcaccagcagcctccgccggggcgccctcagctccctgcttggctctgtctctccacacccggcagggccgcgggctgccccagccctgggggtcgtgggcagctgctactcagtgccaaccccgtggggcacagagccatatacctcgctgtccggcccccaccccagcctcgccttcccaccccatcgtctccacttcaggaaaagccgcactttacacccccacctgcctcttccccctccatccctgctccccgatcctgagcggttggggtggggtccctcagcaaccccaggcgtgggtttgaggagacaggtgatttacatcccctttgctgtcctcccccggtaccaaggcagggagcctccggaggagccggccctgctggccacgcaggggccagactccagcctgtttccccagccctgcaggtcttccttctgtgggaagcttcctagcaagatggcttggagtcctggtccccctcctccctggccctctcgttcgtttctgtttctgtttacacgttggagtggggtcctccgtgggcggcggcgcgccctgccccgggtgtcgtccggcctcttgtgctcgagcccctttccgagttggactcgaccatccctcaccccaccaaggaccacactgtgaagtgataactgccttgaacccccctttgctgttttatttattaaacttgatttgaagcccggggtgccttgtggtggatcgggtgggggctggggcggcaggtgtcctcgtcatctcacttgggggcctgcatgtctcttggagggtccaggataagtcgtgagcaacacgggcgagggggtgcaccgggggcatgacgtggtgggctacgtattgttcacgtcagtaagggaattgtggccacgatgacgggatgtgaggagggcccacgtctgggtagaggtggtcggggcagcctcctagaagtgatatttaagctgaaacatgaaggagaatgggcctcctttgctgaaagtttgccgagag

SEQ ID NO: 90551 - DNA, 3253 bp, Homo sapiens
acccctcctcttcctcctcagcctactcaacgtgaagatgatgaggacgaagacctttaggatgatccacttccacttaatgaatagcctcctcgctggggaggcagagtcctcgcgtggtctcctgcctcgagcacagcctgtgcccaggggagccgggcttgcagacaacagcagtggtgtccatgggctctggagaccatcagttcaacctcgcagagatcctgtcacagaactacagtgttaggggggagtgcgaggaggcctcgaggtgcccagacaagcccaaggaggagctggagaaggacttcatctcccagtagagacggggtttcatcatgttcgccaggatggtctcaatctcctgacctcgtgatccgcccgcctcggccttccaaagtgctgggattacaggcgtgagccaccgtgcctggcctagcaacgacatgccctttgatgagctgcttgcgctctatggctacgaggcgtcagaccccatttcagaccgggagagtgagggtggtgacgtggccccgaacctcccagacatgaccctggacaaagaacaaatagcgaaggatttgctttcaggggaagaagaggaagagacgcaatcatctgctgacgacctcaccccgtccgtgacctcccacgaggcctccgacctcttccctaaccggagtggatctcgtttcctggctgatgaagacagagagcctggctcttctgcctcctccgacaccgaggaggactctcttcctgccaacaaatgtaagaaggagatcatggtgggacctcagttccaagctgacctcagcaacctgcacttgaaccggcactgtgagaagatctacgagaacgaagaccagctgctctgggaccccagcgtcctccctgagagggaggtggaggagttcctgtacagggcggtgaagcggcgttggcacgagatggccgggcctcagctcccagagggagaagccgtgaaagacagtgagcaggcgctgtacgagttggtgaaatgcaacttcaatgtggaggaggccctgcgaaggctgcggttcaacgtgaaggtgatccgagatgggctctgtgcttggagtgaagaggagtgcaggaactttgagcacggcttccgtgtgcatggaaagaactttcacctgatccaggccaacaaggtgcgcacacggtcagtgggcgagtgtgtcgagtactactacctgtggaagaagtcggagcgctacgactacttcgcccagcagacgcggctgggccggaggaagtacgtcccgtccggaaccacggacgcagaccaggacctggatggcagcgaccccgatggccccggccgtccgcgcccggagcaagacaccctgactgggatgcgcacagatccactgagcgtggatggcacggccggtggtctcgatgagcccggagtggcctctgatggactcccgtcctcggagccagggccgtgttccttccagcagctggatgagtcccccgctgtacccctgtcccatcggcccccagccctggccgacccagcctcataccagccagctgtcactgctccggagccagacgccagcccaaggctggccgtggacttcgccctgcccaaggagctgcccctcatctccagccatgtggacctcagcggggatccggaggagactgtggccccagcacaggtggctttgtcggtcaccgagtttggactcatcggcattggggacgtgaaccccttcctggccgcccaccccacgtgcccggcccccgggctacactcggagcccctgtcacactgtaacgtgatgacctgctgactcctggccgcgggcggcgtatgcggcccagactggacttagcgctgccgctgggcccgcctctgtcagtcttcctgaccccttccccaccccccgggccttggggtagcacctccttctgcttcagaacacgtcaggactggggtgaggtggctgggccgtgagcccttgcccctgtccacacagaatggacccacggccccacccagcgccgtcagcgcccggcactgccacccgggtccgggccgctgcctgcacgtgggatccgtcgggcagccggggacagaagagaccccgccgttgggacgcagggcagagccggccacctagtcccttccagccagcagaggcgagggaaggcgtcactgccccggcggggagacgggcaggacgccctgccccgcaccagcagcctccgccggggcgccctcagctccctgcttggctctgtctctccacacccggcagggccgcgggctgccccagccctgggggtcgtgggcagctgctactcagtgccaaccccgtggggcacagagccatatacctcgctgtccggcccccaccccagcctcgccttcccaccccatcgtctccacttcaggaaaagccgcactttacacccccacctgcctcttccccctccatccctgctccccgatcctgagcggttggggtggggtccctcagcaaccccaggcgtgggtttgaggagacaggtgatttacatcccctttgctgtcctcccccggtaccaaggcagggagcctccggaggagccggccctgctggccacgcaggggccagactccagcctgtttccccagccctgcaggtcttccttctgtgggaagcttcctagcaagatggcttggagtcctggtccccctcctccctggccctctcgttcgtttctgtttctgtttacacgttggagtggggtcctccgtgggcggcggcgcgccctgccccgggtgtcgtccggcctcttgtgctcgagcccctttccgagttggactcgaccatccctcaccccaccaaggaccacactgtgaagtgataactgccttgaacccccctttgctgttttatttattaaacttgatttgaagcccggggtgccttgtggtggatcgggtgggggctggggcggcaggtgtcctcgtcatctcacttgggggcctgcatgtctcttggagggtccaggataagtcgtgagcaacacgggcgagggggtgcaccgggggcatgacgtggtgggctacgtattgttcacgtcagtaagggaattgtggccacgatgacgggatgtgaggagggcccacgtctgggtagaggtggtcggggcagcctcctagaagtgatatttaagctgaaacatgaaggagaatgggcctcctttgctgaaagtttgccgagag

SEQ ID NO: 90552 - DNA, 1011 bp, Homo sapiens
acccctcctcttcctcctcagcctactcaacgtgaagatgatgaggacgaagacctttaggatgatccacttccacttaatgaatagcctcctcgctggggaggcagagtcctcgcgtggtctcctgcctcgagcacagcctgtgcccaggggagccgggcttgcagacaacagcagtggtgtccatgggctctggagaccatcagttcaacctcgcagagatcctgtcacagaactacagtgttaggggggagtgcgaggaggcctcgaggtgcccagacaagcccaaggaggagctggagaaggacttcatctcccagagcaacgacatgccctttgatgagctgcttgcgctctatggctacgaggcgtcagaccccatttcagaccgggagagtgagggtggtgacgtggccccgaacctcccagacatgaccctggacaaagaacaaatagcgaaggatttgctttcaggggaagaagaggaagagacgcaatcatctgctgacgacctcaccccgtccgtgacctcccacgaggcctccgacctcttccctaaccggagtggatctcgtttcctggctgatgaagacagagagcctggctcttctgcctcctccgacaccgaggaggactctcttcctgccaacaaatgtaagaaggagatcatggtgggacctcagttccaagctgacctcagcaacctgcacttgaaccggcactgtgagaagatctacgagaacgaagaccagctgctctgggaccccagcgtcctccctgagagggaggtggaggagttcctgtacagggcggtgaagcggcgttggcacgagatggccgggcctcagctcccagagggagaagccctgccccgggtgtcgtccggcctcttgtgctcgagcccctttccgagttggactcgaccatccctcaccccaccaaggaccacactgtgaagtgataactgccttgaacccccctttgctgttttatttattaaacttgatttga

SEQ ID NO: 90553 - DNA, 330 bp, Homo sapiens
gaacaaatagcgaaggatttgctttcaggggaagaagaggaagagacgcaatcatctgctgacgacctcaccccgtccgtgacctcccacgaggcctccgacctcttccctaaccggagtggatgtaggtgactctgtccccatactccaccgcagccaggccccctgccaggcagtcgtgatgcttgatgaagggtccttgggctgatgcaggccaagaactcatcacagatgagggcgtctgcctggcgggaagcgtcagtagccctgggggtgctttgttctcctccacgctggccagtgagcctggactctcagagcgatttggtt

SEQ ID NO: 90554 - DNA, 2825 bp, Homo sapiens
acccctcctcttcctcctcagcctactcaacgtgaagatgatgaggacgaagacctttaggatgatccacttccacttaatgaatagcctcctcgctggggaggcagagtcctcgcgtggtctcctgcctcgagcacagcctgtgcccaggggagccgggcttgcagacaacagcagtggtgtccatgggctctggagaccatcagttcaacctcgcagagatcctgtcacagaactacagtgttaggggggagtgcgaggaggcctcgaggtgcccagacaagcccaaggaggagctggagaaggacttcatctcccagagcaacgacatgccctttgatgagctgcttgcgctctatggctacgaggcgtcagaccccatttcagaccgggagagtgagggtggtgacgtggccccgaacctcccagacatgaccctggacaaagaacaaatagcgaaggatttgctttcaggggaagaagaggaagagacgcaatcatctgctgacgacctcaccccgtccgtgacctcccacgaggcctccgacctcttccctaaccggagtggatctcgtttcctggctgatgaagacagagagcctggctcttctgcctcctccgacaccgaggaggactctcttcctgccaacaaatgtaagaaggagatcatggtgggacctcagttccaagctgacctcagcaacctgcacttgaaccggcactgtgagaagatctacgagaacgaagaccagctgctctgggaccccagcgtcctccctgagagggaggtggaggagttcctgtacagggcggtgaagcggcgttggcacgagatggccgggcctcagctcccagagggagaagccgtgaaagacagtgagcaggcgctgtacgagttggtgaaatgcaacttcaatgtggaggaggccctgcgaaggctgcggttcaacgtgaaggtgatccgagatgggctctgtgcttggagtgaagaggagtgcaggaactttgagcacggcttccgtgtgcatggaaagaactttcacctgatccaggccaacaaggtgcgcacacggtcagtgggcgagtgtgtcgagtactactacctgtggaagaagtcggagcgctacgactacttcgcccagcagacgcggctgggccggaggaagtacgtcccgtccggaaccacggacgcagaccaggacctggatggcagcgaccccgatggccccggccgtccgcgcccggagcaagacaccctgactgggatgcgcacagatccactgagcgtggatggcacggccggtggtctcgatgagcccggagtggcctctgatggactcccgtcctcggagccagggccgtgttccttccagcagctggatgagtcccccgctgtacccctgtcccatcggcccccagccctggccgacccagcctcataccagccagctgtcactgctccggagccagacgccagcccaaggctggccgtggacttcgccctgcccaaggagctgcccctcatctccagccatgtggacctcagcggggatccggaggagactgtggccccagcacaggtggctttgtcggtcaccgagtttggactcatcggcattggggacgtgaaccccttcctggccgcccaccccacgtgcccggcccccgggctacactcggagcccctgtcacactgtaacgtgatgacctgctgactcctggccgcgggcggcgtatgcggcccagactggacttagcgctgccgctgggcccgcctctgtcagtcttcctgaccccttccccaccccccgggccttggggtagcacctccttctgcttcagaacacgtcaggactggggtgaggtggctgggccgtgagcccttgcccctgtccacacagaatggacccacggccccacccagcgccgtcagcgcccggcactgccacccgggtccgggccgctgcctgcacgtgggatccgtcgggcagccggggacagaagagaccccgccgttgggacgcagggcagagccggccacctagtcccttccagccagcagaggcgagggaaggcgtcactgccccggcggggagacgggcaggacgccctgccccgcaccagcagcctccgccggggcgccctcagctccctgcttggctctgtctctccacacccggcagggccgcgggctgccccagccctgggggtcgtgggcagctgctactcagtgccaaccccgtggggcacagagccatatacctcgctgtccggcccccaccccagcctcgccttcccaccccatcgtctccacttcaggaaaagccgcactttacacccccacctgcctcttccccctccatccctgctccccgatcctgagcggttggggtggggtccctcagcaaccccaggcgtgggtttgaggagacaggtgatttacatcccctttgctgtcctcccccggtaccaaggcagggagcctccggaggagccggccctgctggccacgcaggggccagactccagcctgtttccccagccctgcaggtcttccttctgtgggaagcttcctagcaagatggcttggagtcctggtccccctcctccctggccctctcgttcgtttctgtttctgtttacacgttggagtggggtcctccgtgggcggcggcgcgccctgccccgggtgtcgtccggcctcttgtgctcgagcccctttccgagttggactcgaccatccctcaccccaccaaggaccacactgtgaagtgataactgccttgaacccccctttgctgttttatttattaaacttgatttga

SEQ ID NO: 90555 - DNA, 1204 bp, Homo sapiens
acccctcctcttcctcctcagcctactcaacgtgaagatgatgaggacgaagacctttaggatgatccacttccacttaatgaatagcctcctcgctggggaggcagagtcctcgcgtggtctcctgcctcgagcacagcctgtgcccaggggagccgggcttgcagacaacagcagtggtgtccatgggctctggagaccatcagttcaacctcgcagagatcctgtcacagaactacagtgttaggggggagtgcgaggaggcctcgaggtgcccagacaagcccaaggaggagctggagaaggacttcatctcccagtagagacggggtttcatcatgttcgccaggatggtctcaatctcctgacctcgtgatccgcccgcctcggccttccaaagtgctgggattacaggcgtgagccaccgtgcctggcctagcaacgacatgccctttgatgagctgcttgcgctctatggctacgaggcgtcagaccccatttcagaccgggagagtgagggtggtgacgtggccccgaacctcccagacatgaccctggacaaagaacaaatagcgaaggatttgctttcaggggaagaagaggaagagacgcaatcatctgctgacgacctcaccccgtccgtgacctcccacgaggcctccgacctcttccctaaccggagtggatctcgtttcctggctgatgaagacagagagcctggctcttctgcctcctccgacaccgaggaggactctcttcctgccaacaaatgtaagaaggagatcatggtgggacctcagttccaagctgacctcagcaacctgcacttgaaccggcactgtgagaagacaaggcagggagcctccggaggagccggccctgctggccacgcaggggccagactccagcctgtttccccagccctgcaggtcttccttctgtgggaagcttcctagcaagatggcttggagtcctggtccccctcctccctggccctctcgttcgtttctgtttctgtttacacgttggagtggggtcctccgtgggcggcggcgcgccctgccccgggtgtcgtccggcctcttgtgctcgagcccctttccgagttggactcgaccatccctcaccccaccaaggaccacactgtgaagtgataactgccttgaacccccctttgctgttttatttattaaacttgatttga

SEQ ID NO: 90556 - DNA, 788 bp, Homo sapiens
gcgctcgtgccgaattcggcacgaggcgctccttggcggtgcctggagcccgggcgcaccccaccgctcccgggacctgttgggggctggcccgaaccgtcgtcgaagggagccgctcggccacccccgacgttcctcgccccgcccgacgttccctcaagtggccgaaccagccggacgagccaaactcgccgggcctcccggcggcagcaggtggccccgtccttccagggagggccctgcgccccgcggcgctccggagccctctcggccgcccccgccaggcgggatggaggcggatggggacggagaggagctggcccggctgcgctcagtcttcgccgcctgcgacgcgaaccgctcggggcgcctggagcgcgaggagttccgggcactgtgcacggagctgcgggtgcggccggccgacgccgaggcagtattccagcggctggacgccgaccgtgacggcgccatcaccttccaggagttcgcgcgtggcttcctcgggtccctccgcggggggcggcgccgggactggggtcctctggatcccgcgcccgccgtgtctgaggcggggccggagacacacgacagcgaggaggacgaaggcgacgaggacgcggcggcggcgctggccacctcgtgcggcccggcgagtcccggccgggcttggcaggatttccaggcgcgacttggggacgaagccaagttcattcccagagaagagcagttagtaacttgtacaaaacatcaaccttttgagcaaataatagccaataacttttaaa

SEQ ID NO: 90557 - DNA, 961 bp, Homo sapiens
gcgctcgtgccgaattcggcacgaggcgctccttggcggtgcctggagcccgggcgcaccccaccgctcccgggacctgttgggggctggcccgaaccgtcgtcgaagggagccgctcggccacccccgacgttcctcgccccgcccgacgttccctcaagtggccgaaccagccggacgagccaaactcgccgggcctcccggcggcagcaggtggccccgtccttccagggagggccctgcgccccgcggcgctccggagccctctcggccgcccccgccaggcgggatggaggcggatggggacggagaggagctggcccggctgcgctcagtcttcgccgcctgcgacgcgaaccgctcggggcgcctggagcgcgaggagttccgggcactgtgcacggagctgcgggtgcggccggccgacgccgaggcagtattccagcggctggacgccgaccgtgacggcgccatcaccttccaggagttcgcgcgtggcttcctcgggtccctccgcggggggcggcgccgggactggggtcctctggatcccgcgcccgccgtgtctgaggcggggccggagacacacgacagcgaggaggacgaaggcgacgaggacgcggcggcggcgctggccacctcgtgcggcccggcgagtcccggccgggcttggcaggatttccaggcgcgacttggggacgaagccaagttcattcccagatttggctacacaatttcaaaacctgcatttgtgttcgtgaggcatctcataacactgtgtgcattgtcatgggctaaaaaggaagcagagaaacactttggacaatcgaggagggaggagccaagatggccgaataggaacagctccggtctacagctcccagcgtgagcgacgcagaagacgggtgatttctgcatttccatctgaggtaccgggttcatctcactacggagtgcgaga

SEQ ID NO: 90558 - DNA, 1023 bp, Homo sapiens
aggcgcctgccaccacgcctggctaatttttgcatttttggtagagacggggtttcaccttgttgatcaggctgatctccaactcctgacctcaggtcatccacccacctccgccaccgtgcccggccgaaatttgtgattttataactaagaatttttagttaagaacattatcagtaaagacaacgtaatcccaccctggagagtttattgggagcccaggaatattcatttttaatacacacacacacacacacacacacacacacactgatcagagtaacgggagtttctctcaggagtcatactccatgagcctggacccagtggttctttatgtggaaacaaatttcacctataggtaacctggtaactgctattttcttctgtgtgctctgtcaacaaaggtatcagtggcttgcaggagatgcctttaatactcagagcattctatctccccctatctggtttagaaggaaggccttcattagttaccttttgagaagttactagaactctctattagagacttaccctcctgacctgataaaaagggatacccatgtctctattaacagctttatctctttctacagttttgggtatttgataaggttaaggcaaaattttagttatgcttaaggaggagttcttttttcacaattacagagaaaattttggtttgttgaagattgcagaaacagcaatggtaatgtaagacagttttggcctttaatttttttcttgaaactctacagtatactacaatagtgaaggaaactattatcatgagagatccttctgaataggatgtctttctgagttccactattcagttacaaaactccttaatgcttaaaattcattatgaaaattagatttattttaaatactttcaagtgtatacatttttatttcataatttttattgtcttttaactaaagcatttagttcatttatatttactgtgtaccttttatatttaataaatatatttacttattaaaagattaccactgata

SEQ ID NO: 90559 - DNA, 1005 bp, Homo sapiens
ggtaccctggatatagtgaggagttctgctgaaagattgcacagtctgaagaggctggaacaaaaatgaccaggagagagacacagcctgtctccagagaaattgttcctgtggtttcccaaagacaaaaaagtgatggttttaaacaatgggaaaaatgggaatgaaaacaggtacttggggaaactgaatggatcctatcaaacaatacagggtcacaagcacgcacacacacacacacacacacacacactgatcagagtaacgggagtttctctcaggagtcatactccatgagcctggacccagtggttctttatgtggaaacaaatttcacctataggtaacctggtaactgctattttcttctgtgtgctctgtcaacaaaggtatcagtggcttgcaggagatgcctttaatactcagagcattctatctccccctatctggtttagaaggaaggccttcattagttaccttttgagaagttactagaactctctattagagacttaccctcctgacctgataaaaagggatacccatgtctctattaacagctttatctctttctacagttttgggtatttgataaggttaaggcaaaattttagttatgcttaaggaggagttcttttttcacaattacagagaaaattttggtttgttgaagattgcagaaacagcaatggtaatgtaagacagttttggcctttaatttttttcttgaaactctacagtatactacaatagtgaaggaaactattatcatgagagatccttctgaataggatgtctttctgagttccactattcagttacaaaactccttaatgcttaaaattcattatgaaaattagatttattttaaatactttcaagtgtatacatttttatttcataatttttattgtcttttaactaaagcatttagttcatttatatttactgtgtaccttttatatttaataaatatatttacttattaaaagattaccactgata

SEQ ID NO: 90560 - DNA, 322 bp, Homo sapiens
aaaaaaacaaacaaacaaaaaaaataaaaacaaacaacaaaaacctgacccattccacagggcttccctccgtctgcaattggaatgcacccctgggcattgttttgccatggcttagggaaacccctccacatggtgaattaatgcaagacggactagataagagcagttaggaactcaatgttttcacatagatggcaatcttttgcttaaagcctaagacccacagtgacttaacaacaagaaaagagggataaaaggttatcaacgccgcccacatgtgcagtgtgttttggaaaacttgatcctattgtgtacaaac

SEQ ID NO: 90561 - DNA, 363 bp, Homo sapiens
ctttcggcattttaaaaatggcaagtcttacagactccataaccactaccactgctaccaccacaaccacagagagagccagatctgaaaatacaggaactgatctgaaaatataggaactgaaaattcagtcagtcaaatttggagttgatttgggcagaggataggagatgaacaggctgaggatgtttctccagccaagacaagagtgcagcattttttttagttgaaattaaaaagaaaatgcagagtgtactttgtcccactcatttaccctaacgatcttcagcgtgtctctgtttctaaggaagtggagggcccaagtctctgattcatttccggaatgccacatagcacccttgg

SEQ ID NO: 90562 - DNA, 459 bp, Homo sapiens
tttaacacttggccaaggtcacacagctggtaagtggcagagatgaaccctgtgtgatcccaaagtccatgtccttatctttttaaaattgaggcgtgacttacatgcaatgaaacgcatagatctaaagtgttaaggttaagcatttttataaatgtgtgcaccctagtaatccacattctatcaagatacagaacatttccatcccttcagaaaattcccttttacttttcccagtccatcccactacttaccccaaaaagcaataacttctggtttccatcatgatagattagttttgcctgttttctaaaatgtcatgtatatatggtcatacaatatgtgctctttcgtgcttgtttcagcatgatgtttgagactcatctatgtgttgctggtgttagtagttcatttctttttattgttgaggagtattcctttgaccgtaccatagtttat

SEQ ID NO: 90563 - DNA, 132 bp, Homo sapiens
tgtcactcaagttggagtgcagtgatccgatcatggctcactccagtcccgacctcctgggtctaagtaatcttcttgtctcagcctccctgaatagctaggactacaggaacacacccaccattaccctgg

SEQ ID NO: 90564 - DNA, 296 bp, Homo sapiens
ggctggacctatagttgcttttctgagggttctcttcaatctccagttaaactcccctcagtctcttttttcaaaggcatcactatggttttgagtgttttctaggacctttagaaataataggacccagacagttgtaaccatataaactgacataagtacgaatctactttaatgcatattaaccgacatcacaaggaccactcttttccctcttttctctagtgtctcttaaaaatctgttatactaaagctcttttttcctgatccatggtttagttccatatttgaaatca

SEQ ID NO: 90565 - DNA, 413 bp, Homo sapiens
gttggatgtgatacagtatgaagcctggctaattttgtcatctaaaggtattatgtgtaaggaataaacacatttccatttattaagaattcaagatgcttggttaagtttattcatttttttatttttatttttttactttttagaggtgaggtctctctgtgttgcccaggcaggtcttgaactcctggcctcaaatgatcctcacaccttggcctcccaaagtactgggataacaggcattagccactggtgcctagcctttttgtcttagttgattttgttatagtatttaagaatttcaacagggagttgaaataagtagattttgggttaacttaccagtttctagataaataattgatacatgtagtcaaaccctgtgaccttaaaacttttctactatatttaaa

SEQ ID NO: 90566 - DNA, 264 bp, Homo sapiens
ccctccctcctgatgaagaactgagagaaatataacaaaggctaatgtattccttgaatgagtaaatgttagcattttcaaagatgtaaacttggatctcaggtctgtcactagctttgtgactttaggcaagctactatcttctctgcctcagttttcttgtcttaaaaatgggacaatagtagttcctgttttcatagaggtgttataagtgaaatatgatactgttagcacagtgcctgggatataagcccataatcagcg

SEQ ID NO: 90567 - DNA, 271 bp, Homo sapiens
tccctctctctacccatcagtgcacctcattttccgatatatttcagtgtaaattgcaggtatccgtatactttgtccctaacatgaagcacagacattcattttccccaaagcaattagacttcccccactgaattcactaacaatttcagaactacatctgtggggcggggaccacttgcaaaccataagatcataagggtagggccctgatcctattcaatgggtgcacttataagagaaggaagagagacctgggctctttccacca

SEQ ID NO: 90568 - DNA, 673 bp, Homo sapiens
cctcccgggttcaagcgattctcctgccccagcctcccgagtagctgggattacaggcgcgtaccaccacaccaggctaatttttgtatttttagtagagacagggtttccccatattggccaggccggtctcgaactcctgacctcaggtgatctacccacctcagcctcccaatgtgctgggattacaggcatgagccattacgcctggccgcctcagcgttcttgaaagcttcctgggcttccttgagggtcggagagggccactgagtaatgtgtgccaggagtccccccggggagcacacatttcagattctgcttgtgagagtcagtggcgggcttctagaaggttcctaaggcagatctcttttggttaatgatgggctatgttttagtgagacctgctaaggccatagttccggaggcttctaggtggtagaagcaagggagggaggagttggaagagaactttccaaacttgagtgtgctgcgcatcacgtggggattgcctcggaggttctgagcaggggctggggcagggtgagatgctgcattttgaacacttttgcacatgatgcgatgcctctggattgtagaccatactttgagtgcagtgggccaggagatcatccaacctgaccctctccccttcattcattcaggagccaggctg

SEQ ID NO: 90569 - DNA, 441 bp, Homo sapiens
aaatgatgatgctccagataatctctttagaaaggtacaactatttctcgagtttaaacaaaatgttaactcgtacagtaaaaatatcaggacatcagagtatacctgaatgaatgtattggaagtacttaccaggtataaaattctatgcttcgggcatggtggcttaagcaagcatggatggaatcttagcactttggaaggccgaggcaggcagatcacctgagatcaggagttgagaccatcctggccaacatagtgaaaccccatctctactaaaaatacaaaaattagccagacatggtggctcatgcctgtaatcccagctactcaggaggttgaggcaagagaatcatttgcacccaggatgcagaggttgcagtgagacaaggtctcgccaccgcactacagcctgagcagcagaaccagactctatctcaa

SEQ ID NO: 90570 - DNA, 182 bp, Homo sapiens
gtagtggggttggtgggcaggttatatgtttaagaagcattggtataagaacaggtggttatggccaggcacggtggctcatgcctgtaatcccagcactttgggaggccaaggcaggtggatcatctgaggtcaggagttcaagacaagcctggcccacatggcaaaaccctgtctctact

SEQ ID NO: 90571 - DNA, 440 bp, Homo sapiens
agagtgagaccctgtctaaataaaaataaaattgggagatacctttaagatagctctaaagtgaaaatcatagaattctctctaatggaagggtttatataatagttatctttcattcagtgattaagtcaggctttgtacttttcatctactactatttaatccttttaacaactcaatgatataggtagtaatattattcttcaccatttcacaagggaggcatagaaagattaatttatctaacttcacacagccattaagtggcaggaccaccagtatttgaaccggtcagtctggcctggagcacatgatcctgacctgtgcactgtatggctggagcctaatctggtagcccctttcgcgatacctagctggcacagctaaaccattttcttctctgccatccacattcacatcattccacttaccaggtgaca

SEQ ID NO: 90572 - DNA, 859 bp, Homo sapiens
gaaaaactgttccccaaaaattaacacaccaaactggcccatgattaaataggacaatttcaagtttaagggtataaaagcaatagaacaaagttaataagtatctcccatacctaccccatgtacagcctcctgaaagacaccaaaaataagaaatggaggaagtcttcgttataacaagcaatttcaggacaagagttatgcctcataaatcaaatgtgtaatggaccaagaaatatggctatagatcttacctctataggctaagaatatgaagacccaaatgcaaatagttaatactaaaatgtcaagcttattaactgttaaacacaaaatgtactaccttaatttgcttaaattagcaaaacatgaggtgaaaatgaaaatggaaaacttcacacagttactggtgtcctctggaacctctccagaaagcaatgatgaagtgtgtaaaaaataatcccaagaatataaacagaaaacatacaggtatgttcatggtttacttatatccagcaagaacctaggtaaaattacagtgaatcctcaaactaacaaaaattatttttccaagattattaaagtggtgaaacactcagatgaccatgttgtgtgatgaaaggcctacaaggtaatacataaaagggctcccaatatctttgaaaataaacatgtggctggagccagctgctcatgcctgtaatcccagcacttcaggaggccaaggcaggaggatcacttgagcccaaggggtttgagaccagcctgggcaacatagcgagaccccatctccacaaaaaaatttaattagccaagcatgatgccatacacctgtactctcagctacgcaggaggatga

SEQ ID NO: 90573 - DNA, 332 bp, Homo sapiens
tagcaagacttcatctcaaaaaaaaattatcacaataatcattttcacataagtatacctataggagaaaacctagaacatatatatagcaggcttgtccaacctgtggccctacacaaatctgtaaactttcttaaaacaatatgagatttttttgtgatttttttcttttagctcatcagctattgctagcattagtgtattttatgtgtggcccaaggcgattcttcttcttccaatgtggcgcatgtaggccaaaagattggacatcgttgatatacacgttaacaggtgccatccttggatggcaggattatagagattgctacatg

SEQ ID NO: 90574 - DNA, 739 bp, Homo sapiens
  misc_feature (136)..(136): n is a, c, g, or t
  misc_feature (150)..(150): n is a, c, g, or t
  misc_feature (170)..(170): n is a, c, g, or t
cctcgcaagggtccgttacataggtatacatgtgccatggtggtttgctgaacccatcaacccgtcatcttcaaagataaggccttcagtatatcaagttcagtggttcaaagaaacatcctcaagaaactaaganacaacacaagattntttctgatgaaatgcttaantataaggaaaatgatggaagacacagaagagcagcagaattgggtagaagactactacagatgccagatcgccacttctgaaagaaaggcttacgacaactggctctgtgtttaagcctcgcagagggagatgcaagagaagaaggctgcctacaagcagcacagataggaaatgattgaaaaacagagagtgctggagagacacattagtcaggagccagctagtggacaaccaggcatagagaatcatccccaaagaggtcaatatggctttgggaaggcccctttttcaggatgccctacttgctctactgcatggctggctcttcaggaccatttgtgggctgccagacacctcctctgcctgggtggcctctgggaacacgaccactgcctccatgcacaccacttggacaagctgaaatttgaagaggcccctgagctgtgacagccatgctgtggctcctacataacttggaaaagtatccaatacattttacgctgcctgcccagtgctgcctcatctgtctctaatcttctgtagtgtttcccctaataaaggtttgcag

SEQ ID NO: 90575 - DNA, 124 bp, Homo sapiens
tctcccacctcagcctcctgagtagctgggactacaggggcacaccaccatgcccagctaattttttaaaacattttttatagaaatggggtactgttctgtcaccaaggctcatcttgaactc

SEQ ID NO: 90576 - DNA, 296 bp, Homo sapiens
tccttaagcaaatgaattttcttgtcactacttctgcctgtccgctgctgtgttcccagttagcgagtttcaggattctggcatcatctttgagtccttccttaaatccagtggcctgaaccttcctaaattcttgaatactgtcatttcctatgcctgccctatttaggacctgactgcctcactcctggtcttttgacccctagtctctccccattctctccccaaatgctgactgaatacccaccacatgccaccctggtccatcctgtatatactgacatgcggagcagagc

SEQ ID NO: 90577 - DNA, 487 bp, Homo sapiens
ggtattatgttcgtctttgtagcaagtcctattgcctttctttaatttttgatcctgttgatcagtcttcctgtaatgccattttggcccctgcaattccccatagtacatgttttcttaagctctaaatctgtttccttgctgccttcacttgaccctcttatttttcctgtttgcttagcgatctctttaatctcaaaatgtctatatcagtgagaattcataccctatctgcccctgattatatgattgattttattgtttctatattatgtcaaattgtttctgcagtaaaataattggagatgccttctgtctggacacattaattcctctggttaatgcatacatatacatacagaaactatcatttacctttttgtgttttgaaacttgtggtataacttagcacactgcatcttgtccttttcacttaatacattatcctgcagctcagaaaacagctgaagttcactctttttttagt

SEQ ID NO: 90578 - DNA, 236 bp, Homo sapiens
  misc_feature (1)..(1): n is a, c, g, or t
  misc_feature (3)..(3): n is a, c, g, or t
  misc_feature (5)..(5): n is a, c, g, or t
  misc_feature (7)..(7): n is a, c, g, or t
  misc_feature (9)..(12): n is a, c, g, or t
  misc_feature (54)..(54): n is a, c, g, or t
  misc_feature (81)..(81): n is a, c, g, or t
  misc_feature (96)..(96): n is a, c, g, or t
  misc_feature (144)..(144): n is a, c, g, or t
  misc_feature (165)..(166): n is a, c, g, or t
  misc_feature (187)..(187): n is a, c, g, or t
  misc_feature (191)..(191): n is a, c, g, or t
  misc_feature (213)..(214): n is a, c, g, or t
ncnangngnnnngttaaagtgtttaaatctctcttgaacaaacacagccacagncatgctattctatctatattttcactnaaaagatacaccagnagacctattttaggaggtcatattgagccaaaaaatgaactgagcaantgacatttccaaactcttttnntgctcaaaaataatatgttcncctntgatattaaatgcagatatcanntctggattagctatttactgag

SEQ ID NO: 90579 - DNA, 199 bp, Homo sapiens
aacttgcttattctctgacccaatgacaaaggaaaatgaaagcattaaattcagaaccctagccaaaacaattagggtgaagaaaatggaaactttcaaattcactagtatccagcttaacattgttgcaatatcattaatagtacaagccatacaaatttatgtataagtaatccatttggactatacatttgaaatt

SEQ ID NO: 90580 - DNA, 403 bp, Homo sapiens
agaggaaatgcagccaaatgcttataattgcagttgtgggactcacacagactcacagccacctttgagtcctggctctgcccttggtggccggggacctttggacagggctaacccacaggatggacctgctgatcccagtagaccacaaagtggagctaaagtgtacaacctaagagcacaggggacctgcattcgacccaagaaagagattgtagttttccaacagagttctcgggggaggccagactccaaatagctgttcagacccagacaaatttgtggactaatagggagagaggaaaccactccacagaaaagatcaatgttttcaccatccaagtctctctgcaatggaaaaagcagctctgtgtgcaatagagctcccccatccttcaagaat

SEQ ID NO: 90581 - DNA, 373 bp, Homo sapiens
gggaagcccttgaaatagtcagaaagactgcccattaattggtctgcccaaacatgtgaattgtttgcattaaatcaagccttaaggcacttgcagaacaagaagagactatttacactgattccaagtacgccttcggggtagctcacacctttggaaaaatttggactgaatgaggtcttattaacaaaggccaagacctggtccacaaagaattaatcactcaggtattagataacttccagttaccagaagaaatagctattgtccatgttccaagacatcagaaaggtatcgcttttgaaggccaagggaataaccttgcatatcaaatagccaaacaaactgccacttcctctgaaatgcctgtttt

SEQ ID NO: 90582 - DNA, 234 bp, Homo sapiens
gggtctccctacatctggctgtcctcttttcagtcacattgactagagaaatgatgcccctggtcacaacagagtcctctgagaacacctgtcactcaaaaccctacaatattttgtccctttattcttacatcctatattcttattttatcaataagatttcaactgaaggagagaaggggctctatcacagggaataagatatatatgcatatacacacacacagtatataa

SEQ ID NO: 90583 - DNA, 302 bp, Homo sapiens
ctagaactgggttatcctttttaggggtatcagtctggtccatcaaaatcatcattggagtggagtttatgatattaaatataacatatatatgtgtatctatctatatctatctatctatgtatctaatctgtctacccatccagagaactgacagatttctaactgatttctgatttcccatgtagttgggactcagatattctttggggaaagaactagagaatttcagaggcagattattgaagatgcagttgaaattccagaaaataagcagatcttttgcgtgaaatgctgagtag

SEQ ID NO: 90584 - DNA, 114 bp, Homo sapiens
tttgtgttacttacgtaaattttccattaggttagactcctaagaataaactcaatggagcaaagggtatgaacatttaaacttttggaagatgagttgtcttcactgtccagg

SEQ ID NO: 90585 - DNA, 388 bp, Homo sapiens
tgactgtggaacacaccttagtttctcagaccagggtggatggctgccaccttgccccaccctagaagctgtgggcacacacctggtcttccctgcttctttgcacggaacactgccagggtggaaggtgaccgtggaatgggagcctttccttgccactctgacggaccctgcctggtgtggagggcggtggcaggcacagccctaggacaaggaggctgaggaggctggggcactaggtgggaggaattaagccactgagaagtcctcccttccagggaggtagtgggaagtaggactgtgctccaagcccgggcacagcctccatgtcccatcaggcttcgccacaaaacacacattcaaagataagatgataagaatttcaagc

SEQ ID NO: 90586 - DNA, 176 bp, Homo sapiens
tgagacggagtctcactctgttgcccaggctggagtgcagtggcatgatcttggctcactgcaagcgtgtgagacaaatttttaatttaaaaagtaggatgtggttatgagtatatagaataaaggaaaataatcacagaataattcaaaggatctttcaatcaagatgctttctg

SEQ ID NO: 90587 - DNA, 692 bp, Homo sapiens
catctcacagatgctgagggcgagaatggcagcagccatacactgcctgagtttagagaggactgctgggggtgcatgtgcaggtgccacgttaccacctagaacacactgtctcatgctgtgagccagggctttttaggcacacaatgatgcagttcctgctgaaattctgaaggcagaggctacacctgagcagctcctaccggctcagtggcatttagcccatgggacgcggggggacactgctttccaaagttgagggtctgcctcctctatgcagaaacaacaggaagggataaggagtggggcttgagtgaagacagaagcagcaattctgttgagatacatatgagtgcagggtggatgctggtgtcagccatagagggccccaatggctggtgctggttagtcatgtatgcaggtccttctttttcctcctacctgttgctaatcccttggctttgccattgggtagcatttgatagggactaaagggaggtgagtggtgtccatcacgtgcacacatcataatgaagagagggagattaaaaagtcgagtttcataaggcaggcttgcttctgacttttctcagagggcagcaccccttccttttgataattctgaagataagcagaacagactaggtttcacagtccacttatctactaagttaggccttcgcaatgaaaag

SEQ ID NO: 90588 - DNA, 1529 bp, Homo sapiens
agccaaggctggcgggtcacctgaggtcaggagttcaagaccagcctggccaacatggtgaaaccccatctctactaaaaatacaaaagttatcctggtgtggtggcactcacatgtagtctcagctacttgggaggctgaggcaggagaatcacttgaacctgggaggcggaggttgcagtgagccaagatggcaccactgcactctagcctgggtgacagagtgagactcagtctcaaaaaaaaataaaaataaaaaacagcaaccaaaaaaaatgcaaataaaacttctctgaggaaagtgtgaaaacttgagccatcaagtggcaaaacctggtacaagaacgcttttgaaaagctaccttcggtgaagccttgatcctgggaaatggcttcgaaaaacttgagaacatagtttaaatattctgttactcaagaatagtgaaagaaatatatttcctattgtgggaaattatttctgagtagtttcggtagagcataaaaatgtattattaggggatcaaaataacgttttatgtcatttagatacaaagacttggcatgcttctgaaataatttataaatggacatatctgcgtgtcctcttgtggtgttgtgatacatactggttttcatccaccacggttcctggctcataacacccataaccccattaccgtgttttgttataatatagggtacgttaggtctcagaaaataatctctgatcttctcctgctctccttacacgtgtcccaaggcaagattctgatctttacccagctttctgattgtaggtcttgagatcctctctagagagagggtgttggccctataccccggggaagggaagtaaggtttcctatatgaagcttttataaaaacccaggagggccaggcgcggtgggctcacgcctgtaatcccagcattttgggaggctgggggcgagcaaatcacaagtttaggagtttgagaccagcctggccatcgtggtgaaaccccatctctactaaaaatacaaaaaaaattagctgggtttagtggtgggggcctataatcccagctactcaggaggctgaggctggagaattgctcaaacccgggaggcagaggttacagtgaggcgagattgcaccactgcactccagcctgggggacagagtgagattctgtctttaaaaaaaaaaaaaaaaaacgcaggaggactgggttcagagagcttccagatagttgaacacacctggagggtggcgcccccagagagggtatggaagcccagtgcccttacgcatttctttatctgtactttttataataaaccggtaaacataagtgtttccccaagttttgtgagatgctccagcaaattaatagaactcaaggagggggtcttgggaaccccagcttgaagtgtcagtcagaagttctggaggcccagacttacagttggagtctgaagaaggagagagcagttttggggactgagcccccatcttgtggaatatgacactgtatccaggtagacagt

SEQ ID NO: 90589 - DNA, 275 bp, Homo sapiens
tgcctcagcctcccgagtagctgggactacaggcgcatgccaccacacccagctaatttttgtatttttagtagagacggggtttcactatgttggccaggatggtcttgatctcttgacctcatgatccgcccgccttaacctcctcaagtgctgggattacaggtgtgagccaccacacccggcctcaatgtattcatttttaaagaggttcttagacattaatatttcatccagttctcagctggtcttgtaaaccaacagcggttatattt

SEQ ID NO: 90590 - DNA, 337 bp, Homo sapiens
tctctggaatgggattttcagtatgtgtgaggctcgctgcccaataggttgacagtatatactcatttgtaaatgggaagtttgtatttacctgataagttttcaatgagaatattagccaaaacattcctggtattttatggtaatagttggatgtgctgggcttctgtattctgaggccaaattgtacctgagaatatgccaggatgggaccatcttcaagaaagacaatagtgcaagaaaccaaccattgctctctctatgtgttttttaaagtaaaatattttatctacttttcattttggcccttcggatcagtttcaggtttagaccttct

SEQ ID NO: 90591 - DNA, 1027 bp, Homo sapiens
agatgttttgggctattttatgagaatatttactcataccacttggtataggttgttccaggctgtaaaattcaatgctgggtctgtgaatttatctgtttggcataatgcttctcttcacagtagctactcagtgtgtaaccaactaaataaaacagctataaattctttatgcaacatgtggtctgaaaaagtttgaggctttcctcatttgtgtcagattttccctgtcctgtattcagaaattgagtccataatctcagctcataaggtgcttgataattctaatataacaactaaaactgtcaaatgaagtctcttattctgagaaataataagtctttgtgactgtcataaaacaggaaacaatttttgtttgtttttagagacatagtctccctgtgttgcccaggcttgtcttgaacttctgggctcaatggatcctcccttcctcctaagtagctgggattgcaggtgcatgcctgagaaataataattcttgccgctaatttagtccttctgtatgttattttaagtaagtatttagtctgttcctttagtaattcttctataagtcatggaagacagctactgttggtaactgctggaatgatgtgcagactgagaatatgaaaacagaaactctgacactgaaagtgattggtcacataggcaaatgttgatttattttccaaaaaggaacctggaagagtgaggagttattttctagagttaacctgaagcagtggccgagtgccatgcacacgtgtaatctcagcactttgggaggccaaggcaagaggatcacttgaggccaggaatcgagaccaggctggccaacatggcaaaaccccatctctactaaaaatacaaaaattatctgggcatggtggcacgtgcctgtaatcccagctagggaggctgaggcacaagaatcacttgaacccgggaggcagaggttgcagtgagccgagattgtgccactgtgctccagcctaggtgacacagcaagactctctctcaaaaa

SEQ ID NO: 90592 - DNA, 310 bp, Homo sapiens
cccactgtctgcaccctcagattttagtttgatggaaccccatggtgtcagcctctggaggcttcttgtcagtactagaaactaatacttggtgaatatccttttctgcttccattaccttgtatgaaactggttccatttatacactgagattagaagcattcataagtgatgcggcaccacaaacacagaagatcaaactactcacagtgtggagaaccatgtcttttataagtgtgatgtgcctaaaaccatcatcaactaaaaaccctggtacttacctatctaagacaccacatacaagtttaaa

SEQ ID NO: 90593 - DNA, 436 bp, Homo sapiens
gctgcaagtgtcagcatgccacaactttagcctgtgtctcctgccttccattacagcagactgcttgctcttctctagactgccgtggcagggaactatggggaggcgaaagaaacacaccactggaactcatagggagctgaaatggtaacaccagtgtgtcacttacaaatggtgataatgaggccaggcacagtggcttgcacctgtaatcccagcactttgggaggctaaggtgaggggattgtttgaacctgagagcttgagaccagcctgagcaacatagtgagaccctgtctccacaaaagataaaaaagccaggcatggtgttgcatacctgtggtctcagctactcaggaggctgagttgggaggattgcttgagtccaagaggttgagattgcagtaatctgtgatggtgccactgcactccagcc

SEQ ID NO: 90594 - DNA, 346 bp, Homo sapiens
aaaccatgaacaactgacctgatccagagcagatggggtttggggagtcatgctaatttaatgctgattacttgagagatgtacagtttacacattatttgaatcagaacttcataaaatatacctcaattaaaactactagaaaatattcatttgggtatggtggttcagaaagcactttgagtacttggaatacttcattatcaagtatcaactgaacataaatgatcactgaagcttacctttatcattgcagaaagagcagtcaatgaggctgagtctgtgctgcttctatgttgagacctgcctgccaaaatctacagagacccctccctgacctgttctc

SEQ ID NO: 90595 - DNA, 429 bp, Homo sapiens
ggtggccaggctggtcttgaactcctgacctcaagtgatctatctgcctcagctcccaaagtgctgagattacaggtgtgagccaccacacccgacctcaaagcatttctcatatattggccttactagtctacaaacacaccaagctccatcctgtgctggaattttatacctgctcttccctctgcctgattatacctctgccccaaacctgtgtatggcttatcccttcattttacccaggtagtagtttagatgtcccttcctcatggatccttctatacaaagtgccttgcccctttccaccaactgtcactataatttcaccttggtttaacggcctaactgcatgcatcattatctgaaatgatctcatgtattacttttctttggcacacaccctccctcctgaaatacacaggataacag

SEQ ID NO: 90596 - DNA, 372 bp, Homo sapiens
gcttacttggcagtaacaaactgcaagagaagtaccttgcccagcctatttattctttaaaattagatttatagtgtgagtccaactatttttctaactatacagtaaaaagactaaaaaaaataagcaaaatgttaattgtatgtatctctgaatagtgggatcacttaacattaaggattttaattttcttctattttctccattttccaaattttctacaatgattaaacactacttttaaaataaaaaacacagtttttaaaaattataggccaggcacggtggctcacacctgtaatcctagcactttgggaggccgaggcgggtggatcacctgaggtcaggagttcaagaccagcttggccacga

SEQ ID NO: 90597 - DNA, 279 bp, Homo sapiens
agtaccaacaatcctcaccggctcacatgcacacttaactcgcttccaaactctcacctccaccagggacacaggagacagccctcacaccacactcagcccctcactcacgcatacatcccaacaagtcacggagcgggaggacgccttttcacatagattcctcgcaggcacgcacatttcacacacaggcccacatcattgcctacatgcttaccagcttgttttttttttttttttttttttttttttttttttttttggggggataatatttta

SEQ ID NO: 90598 - DNA, 749 bp, Homo sapiens
gtgtgaagtaagcaatctattttcacttgctattaacagcaaacgtacaactttatctcttatttgacttcattatttggctttcaaattaacaacatgaaaactatacagaaattagtctgtgccctataagacagagatttagataatttgttcaaaacatgagatgatattcagatattctctcaaaggcaggactccaacaccgcaggtggaaaaccaacaaaaggaagaaaacagaaaggaggaaagggaagatgaaagaccgacttcaagaactaaagcagagaacaaaggaaattgaactctctagagacagtcatgtatcaactacagaaacagaggaacaaggggtgtttctacagcaagctgttatttatgaaagagagcctgtagctgagagacacctacatgaaatccaaaaactacaggaaagtattaacaatttggcagataatgttcaaaaatttgggcagcaacagaaaagtctggtggcttcaatgagaaggtttagtctacttaagagagagtctaccattacaaaggagataaaaattcaggcagaatacatcaacagaagtttgaatgatttagttaaagaagttaaaaagtcagaggttgaaaatggtccatcttcagtggtcacaaggatacttaaatctcagcatgctgcaatgttccgccattttcagcaaatcatgtttatatacaatgacacaatagcagcaaagcaagagaagtgcaagaca

SEQ ID NO: 90599 - DNA, 500 bp, Homo sapiens
tactgggccgacatcgcaccactgacgcacacgcatcccaggagccgggaaaacaaccagatggtgaagacccggacagaatgtggacaaggctgcaccatttagtaaaatgaaaaagttaaggcaaaggacaccttgaaagctatttattgctggaaagctagttctcagaatgctgaatgataacacacacaatgttaacaatctacttagaaagcagcagaaagattaggagaaaagcccagggatttaagaatattccttggttcttctcacaaaagccatccagaggacctagttttaactccacacccacgcttcctagttcctctacccctcaatttgaatttgtgtgacagccactgaaacaatccagaatgacctccagcttcaccctcactgttctcagaggtgtgaggattaaaggattagtgtgctcataactcacctagcacagtaactatcaagaaagaggcatcctctcaagtttagctcccagc

SEQ ID NO: 90600 - DNA, 357 bp, Homo sapiens
aagtctaagataaaaaacaactgcttgaacaaattactgctttcaccaaaagtatgaggaactaaacatgtaccttcccccatttctgtattctttctttcttacttggaaaggaacaaacttcagctgccattcctactccaagtaaaacaataaggaagagagaaggcctacgatatacaactaaataaaagacaaaaataaaccggatttatctggcagagcgggtctgtttgctatggtctaaagctagactcccatgccagccaccagccctgtgaattgatggcttccatccgtgaccttcctttcacaggtcgtgctaagccctcacactttcctcaccttggccatctg

SEQ ID NO: 90601 - DNA, 153 bp, Homo sapiens
gcagtgaaggtgaggggggtcttatcctgagattgagttagttgatttttattctgaaagaacgtattactttttatggtagcctacattatgtttcccctcttgtaggtatgttttctgagtcttgaattgtttttcttttttttttcaaaa

SEQ ID NO: 90602 - DNA, 303 bp, Homo sapiens
gggattttataaataattgcatactgataaattaggtaatttggatgaaataaacaaattgttttaaaaatacaatttacaaagctgacaaaggagaactagaaataagtagctttattggtgaattggaaatattccaatcctacacagtctactggaaagtagaaagcataagcatttcccaatttcttatataaggcctgattccaaaacttgacaaggacatagcaagaatagaaaattatagaccaagttttctcctaaacacagatggaaaaactctttaaatatttagcaaatcaa

SEQ ID NO: 90603 - DNA, 694 bp, Homo sapiens
ccttccacattgactgctgaattgttttatttagaaaaatcacagttttttagttcattaagtctttctcctctaattcagtatttttaagtgttcttcccatttttcagtaagcacagtcatctgcctcctacaacagcagctctaaaactgagcaccacctgtccttagtgagtcttctaggtcttcctccctagatgagtaattcttttcctttttacatcagggactctgctcaatatgcaggccaaagagttaggcagtggtttgctggtaaatgcttaacaaacaactggggtgtgggggaaggagaaaagccgcagggtacaaccaatttccttacagtaaatactttcttcatggctgattacaaactaccaacttcaaagaggatggcttataaagatgtgcacacatggctctcacaagtgcagcccagctcccatggagagagtccccggagaggtattccaatagtctaaatgctacctcatccttaaagcctttctttattccctcaaatggaactgggtttccggtgttttgttgttgttgttgttttgttttgtttctcttctgtcaagatactttgcttacatctttaccaggcacttactttatcctgtcctgtagtatagtgggtactttacattattatttctctcatgatgtcagctcactaagagcaggtaaa

SEQ ID NO: 90604 - DNA, 796 bp, Homo sapiens
cctcctttgcatttcagaaagcggaaggggcaggcctagaagctgaaagaaaagctcgataatggggaaacagtgttttttccttcaattaatgattaatttctcagctggtggggccagcagtctctgaccgtcacgtgacagctatgcgccccatgacgcctctccagggaggcagagtgggtggcactgaggtggagctcaccttcctgaaattcagccccctcagtttggaggaaggaggtaaactgtttcctgtccagccagaagtttgcggagggccttccccaggccaggcaatgctgcctgcgactctgtccctgacagcgttggatgcaccgtatctcttctgatattaagtctggaagtgatttactatccgagtcctcccacagttcgagccttttgatgtactttgtgtgcatgtgtttctgtcacatacgtgccacagtggaacagattttgttttgacactattttggttcatgatgttatactttgactattttacaataatagccaatgtaaacaaacatctttgggattctcaaattattacttatgattcttggacattgcagctcttcgatactgacgcattcctagctttttccaaggacaccgtatgttaacatccgtgccagcctcattatccccacagccaggctctgggttgggcggtaatgagcattgtgcggtttcactttacactttgcaaagttgattaaggcagtgccttctcccatgatcatttttgtaccctgatgtagtaaaatggctaaatatggtgaaagtt

SEQ ID NO: 90605 - DNA, 1959 bp, Homo sapiens
ctagacagacgcggcgtgaagaagtgatgtattagaggtgggcctccggtgaacgggcttcgtaaaaaacatttcgggtgggtgaaaaggatggtgcgtcccctcagattgttgtgtgagccagcccgcctgaaattgatagagggatgccgcttctaccgacaagcaagtttgtcctcacatggatggggacagtagatgtgtcccagccgcacgtcacgaacgtgtttctgttgaagaaccagcgcggccccacaatcaagagggggtgatataatggcggcgcgttattatgggggcaccacgttgtgtcacagaagaaaactctgtaacccctcttaactcttggcccccccgcggggaaactttttaatgcgcccccccctttttttgtttttttttttttttttttgtttttttgttttgtattgttacatgaaggcacagagaggtgaaataagggagattaggcagagggggagattgagcagctatgcaatgccaaaaaaggcctctgccagcccatgggtaactctggagttggactggtccttcagagttgtcctgagttgggggctgggacacaggcctttatactattccatttatgtggatgtgtcattgaatgtgaactgtcccttggaggaggcatgattttgagtgaggcaatttcctcgggtaaggcagtccccaaagaaagctgacagctgagggctgtctactggcagcacttcccacagctgaaggaagaagtcactaatgaccaaaggaaaatctggaggcgcatcacagggctcacaacatcttcatcacaactttatgaggataacacttttatttttcctattttgcagatgagaaaactgaggcacagagaggtgaaataaggcccccagaatgctcttctccaagacttagaaaaatcaaatgctatccatccctcaagatacatccctccagcccctccttgaagtctcctgcagctagaagtagaagtagcatctatccccatctggactccttagcactttgctgtacctgccttagtccccatctctttacacacacacacacacacacacacacacacacagagtattataatactattacctattatattacattatattattgtagttctacaggaactacaaggaattctactgtgaattccttaagggtgggatacattttacaatcatcactgtttctctcattagttgtggaatcaaaaaaatgagtgcacgatgaaaaattattcaaacacatacatgctttcattccaattgaaaatgtaaaaatattactgttaaaacaatattaaaggacatgtaatacaattcaaaaaaaaaaaaaaaaaaaaaaaaaaaaaaaaaaaaaaaaaaaaaaaaaaaaaaaaaaaaaaaaaaaaaaaaaagagagaggggggcggcgcgcgccaccaaactcccccccgcgcggggcgcccccccccccggcggcgccccccgctttttgagaaaaaagggggcgccccaaaagggggcgcaaaataaaaaaacaaagcggggggcggtaaaaaaaaaaaaagaggggggaaaaacaacgaacgaggaaaaatagagaaaaacacaccaaaggggggaggaaacacaaagggagaaaactccccacaaagaaaataaaacacaaaagaaacaaacaaaaacgacagaagacaagagcgaaacacaaccgaaatcaccggagcagacaaacacaggccgccaaaagaggacacagccaaagaaatataacgggggggacaaggacaggaaagaagcggagtcaggcaacggggagcagaaggccggcatgccaggcccggcagaaagagagaaagagcgagaagcggcagcgaccaacgcggcggggggagggagcagaggcaccaggacggacgccgggcacagagaaatagccagcacaagaaacaca

SEQ ID NO: 90606 - DNA, 277 bp, Homo sapiens
attatattacattatattattgtagttctacaggaactacaaggaattctactgtgaattccttaagggtgggatacattttacaatcatcactgtttctctcattagttgtggaatcaaaaaaatgagtgcacgatgaaaaattattcaaacacatacatgctttcattccaattgaaaatgtaaaaatattactgttaaaacaatattaaaggacatgtaatacaattcaaatattcctaccatgcacgattgttttcacttctttgtgcctctt

SEQ ID NO: 90607 - DNA, 1249 bp, Homo sapiens
gagacggagtctggctatatcgccaggctggaatgcaatggcgcgatctctcctcactgcaacctccgcctcccgggttcaagcgattctcctgcctcagcacctcgagtagctgggactacaggcgcgcgccaccacgcccagatgagaaaactgaggcacagagaggtgaaataaggcccccagaatgctcttctccaagacttagaaaaatcaaatgctatccatccctcaagatacatccctccagcccctccttgaagtctcctgcagctagaagtagaagtagcatctatccccatctggactccttagcactttgctgtacctgccttagtccccatctctttacacacacacacacacacacacacacacacacagagtattataatactattacctattatattacattatattattgtagttctacaggaactacaaggaattctactgtgaattccttaagggtgggatacattttacaatcatcactgtttctctcattagttgtggaatcaaaaaaatgagtgcacgatgaaaaattattcaaacacatacatgctttcattccaattgaaaatgtaaaaatattactgttaaaacaatattaaaggacatgtaatacaattcaaaaaaaaaaaaaaaaaaaaaaaaaaaaaaaaaaaaaaaaaaaaaaaaaaaaaaaaaaaaaaaaaaaaaaaaaagagagaggggggcggcgcgcgccaccaaactcccccccgcgcggggcgcccccccccccggcggcgccccccgctttttgagaaaaaagggggcgccccaaaagggggcgcaaaataaaaaaacaaagcggggggcggtaaaaaaaaaaaaagaggggggaaaaacaacgaacgaggaaaaatagagaaaaacacaccaaaggggggaggaaacacaaagggagaaaactccccacaaagaaaataaaacacaaaagaaacaaacaaaaacgacagaagacaagagcgaaacacaaccgaaatcaccggagcagacaaacacaggccgccaaaagaggacacagccaaagaaatataacgggggggacaaggacaggaaagaagcggagtcaggcaacggggagcagaaggccggcatgccaggcccggcagaaagagagaaagagcgagaagcggcagcgaccaacgcggcggggggagggagcagaggcaccaggacggacgccgggcacagagaaatagccagcacaagaaacaca

SEQ ID NO: 90608 - DNA, 702 bp, Homo sapiens
ccgtagagctatacacgtggtattactgtgaacagcgcgcagtccgggattctaatcacgtgtctaccttgccttccccagatcacataaatctaacagatctctacgcacataccaactgtcagacactatggtactgctccacttgtaaattatgttgcatcttcatgattagtctacagtgtaaggacagctgtagcatagaggtctgatatctgccactatgaaacagttcctcacacttgttttattatccatccatgtgctgatcatagtagtccttctaccataggagctgaatggtcatagctgtaaacagaagtgaagtctccgcgcgcgtcttagaccagaatcgcaggctggatccggctcggtgatctctagaggagggtctcacgcgtgtaatgccgatctaccaggcgatcgtgacggtacgtgaaagatctgctcgtctgtcatatctgagcctaccctaccgatgcagccccctgaagttttaacagaatattaattgccctttcacttcccattccacacagctgggtgggattgctaccagccacactgttgagaagttacacattttagcccagcctagaaaggtttcctgtggtgggtgaaatgacaacatgcacaaaggtcaaactccagatgtgggaatctgaccttttctcctcttggggaaaacattgcctcattata

SEQ ID NO: 90609 - DNA, 344 bp, Homo sapiens
gtgctttgtaaaaattacatttgaataaaaggataagataaaagaataaaaccagagtctacggaaagcaagcgagggaagccccttgctaatcatgtgatcacactgctgaaagactaagtacagggtgatcaccaggccagggacaaggtaggaaggagaatttaaacaaacgaaaaaacaacaaaaaacacatttaatgcttgtttctctttccttcctacctactacacctcacttaagtgaacactcaatgaatgttcatatttatacaacaaatatttaatgtgagcttaatacttaaaaagtgcttcctgaggcccaagccctgggatgcagtgatg

SEQ ID NO: 90610 - DNA, 465 bp, Homo sapiens
gaagcaatatttgtcacattagtgggcttctctgacccacttatggggtgtctcaaaagggagctaattttgagaaggggctcaaggcagaggagatgctccatttggttcaggctgcaatgccatctgttttgtcatccatgactccgtggatctaacggtgctcaaagtgtcaatggcagattggagaggtgtacattacctgtgacaagccctgttaggagaatcacagtgtcagttataagggtttgggaacacatacatgccttatttgtcaaataactatttttcttttgagagaaagagatggcttgctcctgggctgtggaagagactgaatgtctcatcaagaaggcagattaccatggagtctgagctgcccgtcttgagctgcatgttattttgatccatcaagccaccaagtcaggttccccaaaacacccagctctactggaggctctcagc

SEQ ID NO: 90611 - DNA, 662 bp, Homo sapiens
  misc_feature (281)..(281): n is a, c, g, or t
  misc_feature (467)..(467): n is a, c, g, or t
  misc_feature (660)..(662): n is a, c, g, or t
gggacagcacaaatgttgaagtttggggaaacattttgtacaactttgttcactgaatcacagtcactgcttgtgctgttgataatcaaaactaggctgcacagagtgacgtagtcacatatttggcttgggtgtacagatgtttcccttcaagcatcttggatgtcttgctccttatcagaattttatctcccccaaattcattgtttgtgaattaactgtaaagttctgggagcgatttccttttcaacagtttgcctttctagaaaaaaacttttggngtttaaatagcacttaaccctctatcattttactctctctgaagtggtctctgtggagaacatgttgggtcttctctgttcaatatctctctctctctttcttggcaaagcctggatgcgagaagttggtccaatctttcctgtccagggttgcttgttaatacagcatctggagcaaaggaaagnctattagcaccttgtcacttggagtttcttaagcattgttccatttatgtgttctttctgcagagatttaatgaaagtggcatctgtctttacacctgacatatgcaggttgtccgcagaactgaacaagtggtgtcagcaacacgatatgcaggaaggcttcatgctcacgtcgttttttctgtgttctctnnn

SEQ ID NO: 90612 - DNA, 375 bp, Homo sapiens
ggattacaggcgtgagccactgcacctggtttcaacaacagcattgatgggtgaagtagcagaaagatgaaggcagctgatgcactctcggggcattttccctctgtttgatggaagctggttaattgagtgcagaggatttaaaacctatctggcccaggcctggcacggtggctcactcctgtaatctcagcactttaggaggctgaggcgggcagatcacttgaggccaggagttcaagaccagcctccccaacatggcgaaaccctgtctctattaaaaatacaaaaattagctgggcatggtggcacatgcctgtagtcccagctactcaggaggctgaggcaggggaatcgcttgaacccgggaggtgg

SEQ ID NO: 90613 - DNA, 355 bp, Homo sapiens
acttcacatcatctggccctactcttcaactcaaccttcttccctacatggaatctttattccaataatgtctgtttccttctctcgaacacaccatccaattccattctttgctctttgttgaaattctactcaaccttggagtcctcacaagctgtcatttcttcacaaagtgtccctcactacccttaaacccaccctctctttcttttggttggctagagagattcacattcaattagggtccccttgtgtgtttctctaattgtttcaggtctcccaggtgactttctttgggttggggggtgtcattatatacttgcacagcacctagaaccacgctaagccagttttg

SEQ ID NO: 90614 - DNA, 509 bp, Homo sapiens
atttcttacatttcagacaaaaccctgttagtattttatgtacattaaacattcaatttaatttggaaataatagcttcacaacattgaattgtctcatccaggaacgtggtaaatctctgtttattcccacattcctttatgtatctcattaatgtttgtagctctttctcccattgtgttttctagtctggttgttattggtatataggaaaagtttatttttgtgtatattatcttgtatttagctgaactctcttatgaattctaacaatttctcagcttcttctcttgagtttttaaagtaaacaaccatattgtttgcaaataacttatagcttagttgttcctgggccaagttcagacattaggctatcataaggtaaactcaaatcctattggcacaatataataatacattgtaattttgttcctaaagactcatctcacactgtaaaaatgccaaaattgatcatgaaaataaatgaaaagaaaatccaaatatattat

SEQ ID NO: 90615 - DNA, 409 bp, Homo sapiens
agctttggagaagagattaaattctaggtccccaggaatatcctgataatcaagcttaccagcagagataagagaaaaaggtcctctcctgggcacaatgcttccagtgggagggggcagaagctctgtggctaggagggggcagaagctctgtggctaggagtgagaaatcctgggcagaagatgaggacttctatttccaacctgggtagccctgggtactcaaatcaggctttgtggtttagggagaaggaggagggaatggagactggggttcttccaggctctgccctcatccatcacaggtttctggatggacttgtccataaaatgaagagtaggacaggaggatctagggcacaatctgtatcttacatttcatgattctagatttcccaggatggcagta

SEQ ID NO: 90616 - DNA, 837 bp, Homo sapiens
gcagtttgtgcaaccagaggagcgcaggcagggttccctgctggggcccgggctgcccagccatgctttgggcactctggccaaggtggctggcagacaagatgctgcccctcctgggggcagtgctgcttcagaagagagagaagaggggccctctgtggaggcactggcggtgtccaaagccgactgctatgtgcaactgtggctgcccacggcgtccccaagccctgcccagactaggatagtggccaactgcagtgaccccgagtggaatgagaccttccactaccagatccatggtgctgtgaagaacgtcctggagctcaccctctatgacaaggacatcctgggcagcgaccagctctctctgctcctgtttgacctgagaagcctcaagtgtggccaacctcacaaacacaccttcccactcaaccaccaggattcacaagagctgcaggtggaatttgttctggagaagagccaggtgcctgcatctgaagtcatcaccaacggggttctggtggctcacccctgtctgagaatccagggcacgctccggggagatgggacagcccacgggaagagtacggctctaggcagctccagctggcagtgcctggagcctacgagaagccacagctcttgcccctgcagcctcccacagagccaggctcccacccacctttaccttccacgtgaacccagtgctgagctccaggctacacgtggagctgatggagctgctggcagctgtgcagagtggccccagcgcagagttggaggctcagaccagcaagctgggcgaggggggcatcctgctctcctctctgcccctag

SEQ ID NO: 90617 - DNA, 908 bp, Homo sapiens
gcagtttgtgcaaccagaggagcgcaggcagggttccctgctggggcccgggctgcccagccatgctttgggcactctggccaaggtggctggcagacaagatgctgcccctcctgggggcagtgctgcttcagaagagagagaagaggggccctctgtggaggcactggcggcgggaaacctacccatactatgacctccaggtgaaggtgctgagggccacaaacatccggggcacagaccttgtccaaagccgactgctatgtgcaactgtggctgcccacggcgtccccaagccctgcccagactaggatagtggccaactgcagtgaccccgagtggaatgagaccttccactaccagatccatggtgctgtgaagaacgtcctggagctcaccctctatgacaaggacatcctgggcagcgaccagctctctctgctcctgtttgacctgagaagcctcaagtgtggccaacctcacaaacacaccttcccactcaaccaccaggattcacaagagctgcaggtggaatttgttctggagaagagccaggtgcctgcatctgaagtcatcaccaacggggttctggtggctcacccctgtctgagaatccagggcacgctccggggagatgggacagcccacgggaagagtacggctctaggcagctccagctggcagtgcctggagcctacgagaagccacagctcttgcccctgcagcctcccacagagccaggctcccacccacctttaccttccacgtgaacccagtgctgagctccaggctacacgtggagctgatggagctgctggcagctgtgcagagtggccccagcgcagagttggaggctcagaccagcaagctgggcgaggggggcatcctgctctcctctctgcccctag

SEQ ID NO: 90618 - DNA, 508 bp, Homo sapiens
gcagtttgtgcaaccagaggagcgcaggcagggttccctgctggggcccgggctgcccagccatgctttgggcactctggccaaggtggctggcagacaagatgctgcccctcctgggggcagtgctgcttcagaagagagagaagaggggccctctgtggaggcactggcgggtaacgtacctgagattacctgggaaacccggactgggggagtcctgggagctgcagtgccctgtgaagactgagaccagccccagccctgggttttgagttggggtgggacctgtttattctagatgacctggcagagcttaaattagaccttggctcttaaaaatagctccctccgattaggaaatggagggttagttcacttgacacttgtctggggtgggttggctttcaccaaggatgcgcgagcctggctgtagagtccacggagctggtggggttgtgaggggagagtttccctcccagtaggcagcatgctgatgttatctctccta

SEQ ID NO: 90619 - DNA, 567 bp, Homo sapiens
atgttgcccaggccaacctttaactcctggtctcaggtgatcctccccagttgtacctctcagactgattataggtgtgagccgccacacctgacctataattttattttagatttacatgagaagtgatgctgttttaaagtgtaatgctctgaattaaaggaattctctatggtaatatatttatacataacaaagcactaacaattacagaaggccttgatgcctgttctattattcgttttatgtttctgtgagtaattgatgctttgatgtattttggccatagaggcactattgtaatgcatgtagactgactttcactggacagaggtttgctgagctggttctgttcatgtgctatggctggagacatgaggcagaggacacagaggccctgccctgatggcactcacactgtaaacttgaggcaatgaggacgcacagttaggagctgaagttgtaccacagaacacataaagggagagttagacacaagacgagggggctccaggtgagccagtgagagccgtggggccttctgtccctccagccagcagacgctga

SEQ ID NO: 90620 - DNA, 303 bp, Homo sapiens
actttgtaattaagagggtattttaagtgtaatatagtatacgaggtgaaaggagaaacagagggagatgataacgaacagaagatgctcatttagaagggaggtccctaccatagttaccagaactttgagtgtacatctgccattagcagtcattaaatgatcagtggcattaaattgtcaggaaagttggggcataaaagtgagggtcaggacctgaaaagctggaacttcattctctaacaggaatcttgccatttatccccaaagaaagaaaacacacttcagagctaaactagacag

SEQ ID NO: 90621 - DNA, 864 bp, Homo sapiens
ggaatgctgggtttaagtcgtattaatttcctgggcttttttgagtatagtttaggaactttcagctcctcacttttcctacaactaaggcaaagaaaagaagattatgtctatctcacagtttaaagggataagtcttatgattataaattcactctaggctgggcgtggtggctcacgcctataatcccagcactttgggaggccgaggcaggtggataacccaaggtcaggagtttgagaccagcctgaccaacatgacgaaactctgtctctactaaaaacacaaaaattaccctggcatggtggtgcgtgcctgtaattccaactacttgggaggctgaggcaggagaattgcttgaacctggggggcagaggttgcagtgagctcagatcatgccacttcactccagcctgggagaaagagaaaaactctgtataaaaaaaaaaaaaaaattcattccatatgtgagcatgcttaagctctctggaagaaccatctgaaatgtagtaaaacaattaatgagaaaagaacaggattgaaattagctgtaggatagctcagaggaaagaagactcactaattcagaatgtacgagtactagctaaagtaagcagagaagaacacacttcatcttcttagaccactgagtctttttactggtcccttacccctaccctgaatagttacattaacctctctcactggaataatttcactaagaaaacagaagctattttaacaaagccacaaatttgcttagatttacatgtagatttctccatatcttcctcaaacaacaaaaaagctcagtgctggaagaatgcttcaagatcttggaattcttttatcctatgcatgtg

SEQ ID NO: 90622 - DNA, 395 bp, Homo sapiens
ctgggcaaaaataaaaataaataaataagtaactcgctttaaacataacatttagttaactctttaagagcttcatgatggcatttggctttaagagcttcatgatggcatttggctaagggccacctcaaattctgatccaaagagaggtgtcacagaagatgagaaatctgaactgtaggaattcttatctttttaagcagaggtatcatcagcaaatcatgcataaaaatatcagagtactagtctatttgtaaataatttaagctcatccaacatccaacataaagaaaagctgcacagacaagaatgcagccttctcaaatgagacagcagtggtttggcttcaagtgacaaggataatttacatcagtttacaaattaactatcagtat

SEQ ID NO: 90623 - DNA, 175 bp, Homo sapiens
gaatagaaagaaagaaacttattgatgtcagtggccagtccattaagtggggaatccaaaatgaagtgatgatgaaaaacccaattaagtggctgagcgagcagaagccaggaaatctccaaatatagattcaggtccagaaataggcttcagttttaaggtaccagaagcccag

SEQ ID NO: 90624 - DNA, 447 bp, Homo sapiens
cagaaataagggtcaggactcaaagcagtggacataatcaggacagaacaggccgaagtgcagacacaaaacagatcaataaaacccaacagctcagcaaaggtgaggcagctgtgtctccctctggctgccttttctcccctcctctctcaccagaagccaacgcgtacacgctgagtggagaggccgcgaggacaagacagtgggacatgcgtgtgctggggaagtcgagaagcaggacaggaggcaggtctgagagatctggtttgtgtcttgtgccctggttctctctgcattccttctctgtctctttttcccttcctcatgccttttccttagctgatttccctaggacagaattattttctttttcggactgaatggtaaagaagtatttgtttcctaagtcttcatttcaaaagcaacaggatagaactctctaagaca

SEQ ID NO: 90625 - DNA, 700 bp, Homo sapiens
tccagcactgggactatgaaatttgagatttaacatttattcattagtcagatttaaaggaatttaccttaagtcatagtttatattgtttttggaggacctgagtaaggattctattaaaaatgattaattttgtcattatttgaaatattgataggattttaatatgttccttttttgaaaatactaaaattataaattaacttacacttaatagcaaatagttcgtaagtatgtcgtaatcaacttattgactaaaaattttgtaaaagatgccatttatttaaagtggcctatcgtatagttactataatgctagtgctctctacattttcattgtaatcttactgaagaagtaaaaattaatcattattgttctccccactctaatattaattcagaaatcataattgtacacatagggtacaacgtaatgtttatatatatgtgtgtaatgtagtatgattaaatcatactaattaacatactatcgccttactttgcttacttatattttgtggtgaggcatttgaaatttactcttaattgtttgaaatacattattattattgctattgttatctctgtcttctctttgcaaataaataatcattatttactatggccaccctgttgtgcaaagatttcaaaaactattctcctatgtgaaatttgttcccttttctttttcaaaaaaaaa

SEQ ID NO: 90626 - DNA, 434 bp, Homo sapiens
atgaagtgtgcaatcagtgatgggtaaaacattacccttgccatcaaagagcttatggctagtcagacatgtaaacaattaaaacacggtgtggtaagtgctgctgtagaagtatgtgtacgttgttaatggaagcacaggggaggcgacctaagtcagttcagaggaattaggaaaggcttcacaggccaggcatggtggctcacccctgtaatcccagcactttgggaggccaaggcggatggatcactaggtcaggagttcgaaaccagcctggtcaagatggtgaaacctcatctctactaaaaatacaaaaattagccgggcgtggtggtgcatgtctgtaatcccagctactcgggaggctgaggcaggagactcgcctgaacccgggaggctgaggttgcagtgagctcagatcctgccagtgcact

SEQ ID NO: 90627 - DNA, 648 bp, Homo sapiens
gtccagttgacttcccttcctactacctcaggttcctcatttacaaaatgggataataacaagatcactctcaaagggttgtaaggatttgctgagattgtatttctagtccagcgccatctctcactaagtagcagctcttatgtattataattgttcttcaatattctccatctggcccagagactgcctgactgtgggctgtgacatgacagccctgagctcccccacacatttgctcccatcctcagtgtcccatctgtggaatggtagtcataggacttttgtgccaggattgtttggatggttccaggagataattcatgtttagtgctttgcacaaggcccggcacacagtaagtgcttattaaatgattaaatgtatcttgctgttttttttttaataggccctttttgcttctgtttgtacctacatggcagagtgagcacaaagttagtgtttttttatcttccccctccctcccaaattttacttaccaaagattaaattatggaacacactatagtagaaaggcctaagaagaaatgggtctgacctgccatcagcagtcccctgctcacacacccctccccacagagccagtatgttcactccagtgctttaattattgtcctggtgctgccagc

SEQ ID NO: 90628 - DNA, 200 bp, Homo sapiens
taaacaatttatgccttccagacttatttgaaaggtcatctttatcatatactgtactcctgtttgtatttggaaccatttccagtcttcttccatcctaacactttgtttattcatataatagcaccccgctaatttatttacaatgaacttaaatatattttaatatctggcaaatctatcatcattatattatgttt

SEQ ID NO: 90629 - DNA, 352 bp, Homo sapiens
taaatgctactcattttagctgaaagctcaagttattgtagaaaggcaacacttttgtaatattgatattttaacctctttttcattttaccactcaaaaattgctaataattgaaatggaatgttctttgtaagtttattttatatttgggagctaaaataaacaacagcatttgcttaaaggttttgaactatggcatattaatggtacagatatggtttatctattgcagaattgagtcatatgcaataagaaacagcataaaatccataaataagattttatgagggaaaaaatcagtgttacatatacatttttccccgtttctggcaaatataatctttcattcat

SEQ ID NO: 90630 - DNA, 576 bp, Homo sapiens
agtgatttcccaacatggcagccagtaatcagaaacatgctgctgcttttgaaaaggtagcttgttttttttcttggaacatactgatcttctgagttatatttttcttagagcaaagccaaggcatgtgatgccacctccccatgcctgccatgcatctgtgcacactactcatcgcttctgcacttccaggtggggcctcagaccttccaagtttagggttgcaggacagctgacttgccaaacctgccatagctcatggaggtgacctagaaacgttccgcgttggggctggggacagcccgaggtgtggggttgccaatggacgcacagccaactggggctcgacttgtgacgatgcaagcacaccaccatgcctccttgccaggccggtccctctcatgctctctgagccatatggccaccaaatccatccctgaacacttactgatccaaagaagaccctgacagtcttctccagaaaagtaggggggagtgtgaaagtaacttggggtaccactcctgggttcagttcctgcctctggtttagcggccatgtcacgatggatgagtcac

SEQ ID NO: 90631 - DNA, 128 bp, Homo sapiens
ttattctcttttagtttcctctttcttacttatctaatatcatccactctttaaaacattgaagaatggctttcactccaatattactatcttcttccatcagtcttaaaataatgaccatctaattg

SEQ ID NO: 90632 - DNA, 376 bp, Homo sapiens
gtccgacaactgcaccactggacaactgcacccacagaaactttaagataacaaatgtttgttgtgttacgctaccacattttgttatgcagcactatataaccaaaacgggaaatgcatggtgagtttaacagcaagcagacaacaggaaagtcacagtttcacagcagaaggagtaacctgcatacacggatgagattttctctattgttaagacaaaagagaaatcagatggaagacctgagacacactggcttcatgcaatcagacttttggtcaaaaatcaccaagggaaaaagagaggggaaagtgtagatgaacgttgactgaacagttcaatactgcactccctccagagagtccatagtgggggctc

SEQ ID NO: 90633 - DNA, 491 bp, Homo sapiens
cggccgggcatggcgtgctctcgcgtcacgcgactctgcatcccgggttcaaatatcctcctgcctcagcttcctgtgtagctgggaccacaggcatgtgccaccacacctggctaactttaattttttgtagagtcaggggtctcactatgttaggctggtcttgaactcctgggctcaagtgatccttatgcatcagcctcccaaagtgctgggattacaggtgtgagccaccacacttggccttctttcttttctttccaatccatttgttttttatttcttttccttgctttattgcactggctaagatttccagtgctgaataggagtgatgacagtgggcatccttgtctttctcccaacctcagagggaaaagtatcaatgcatttgtagatattctttatcagattagcttcctttctagcagcttgtgtctttgtattgtttttcatgagcaagtgttgaactttttcactgagttttccaa

SEQ ID NO: 90634 - DNA, 424 bp, Homo sapiens
ctaccagcaggaaccaccatgcaagttaggtgctgaggtcactcaatgagaaacacaggcaaagtccctagcaagctctgaccccttgcaaaggccagcctcaggcccatccatcccccagagccagggaccctgccccagtagaaacccctaagccggagacccatcattagaggccatgactgccaccagcttgggctactcggtctcattatgtccctgggtatgggtggcagccacttccctgtgcccccagcagagtgtggcaccagaactgcccggctccgtgggtgcatctcattatctgaatgtctgccatcagctgtgctgaagcaaagcggcactgggaactcactctgtacttttgcctaatgttctaatttgcccctgcagaaggggaataacccttttctggaggctgctc

SEQ ID NO: 90635 - DNA, 1755 bp, Homo sapiens
ggtatatgatactgccctgatacattaaaaaatgctcaataaatatctgttgagcatctgttcttaaaagactaaagtcagagtattagacaggtaggaaaataattctgaaaatggtatcatctatctagcatggtccccaaagtttagcatgcatggaaatcacctgacagaaggttacacagcacagactgctggcctcccttcccacattttttgatgcagtagatccagggaggggactgacaatttccatttctaataagctcccaggtgatgttgctgctgctggttgtgaaatgctaattgctttttttctttcttcttcttttttttttttttttttgaggttgttgttctctagcttttcctgctagaaaatactgattccttatcaggaacttatcctctgctatctactattttgtataaaatatcaagggaacaaaaggctgtttgataagaacaaacgttttcaaattgttttacttacgtttatttaaaagaaagcatttttctcaatctattttattattacagtgaagatgaaacattgagcatagctagcaaatgcttctttaaagcttgatttagatattcaggttcctaacatttgtttttttggtttttttttgagatggagtcttgctctgttgcccaggctggagtgcagtggcgtgatctcggctcactgcaagctccgcctcccgggttcacgccattctcctgcctcagcctcccaagtagctgggactacaggcgcccgccaccacgcccagctaattttttgtatcttttagtagacacagggtttcaccgtgttagccaggatggtctcgatctcctgatctcgtgatctgcccacctcggcctcccaaagtgctaggattacaggtgtgagccactgtgccgggccatcaggttcctaacatttggcaaagtaatgtgatagtgacagatcccaaaagataaaaacatgggcaacatgtcatactatgcacacggaaaaccaaaatcaagccaaaataggacacaacttcattcactaggtccctgaagacctccagctttctgtttgcatccttatcacaaaacctaggatagttacaataaaaaagataacaagtgttggtgaggatatggagaagctgggaccctcatacaatgctgctgagactgtaaaatggtgtagccattttgggaaaacagtctgacagctcctcaaaagattaagcatagttaccacatgacccagaattctattcctgaataatatccaaaggaactgtccacacaaaaactcatagataaatgttcacagcagcattatttgttatagcaaaaaagtggaagcaacccaaatgtctatcaaccaatgaatgaataaacaaaatgtggcatatccatgcaatggaatttacccagcaataaaagtacatgaagtactgatacatgctacaacatacatgaaccttaaaaatgctatgttcagtgaaagaagccagtcatacaatatgtggtcacgaaaccatattgtataattccatttatatgaaatgttcaaaacagacaactccataaagaatagggtggttagtggttgctctgagtcgtggggaatggggggattggaggatcatagctaaaggatacagggtttctttctggagtaatgtaaatgttctaaaattaattgtgatgactgcataaatctgaatatactaaaaatcattaaactgtacactttaaatgggc

SEQ ID NO: 90636 - DNA, 781 bp, Homo sapiens
ggtatatgatactgccctgatacattaaaaaatgctcaataaatatctgttgagcatctgttcttaaaagactaaagtcagagtattagacaggtaggaaaataattctgaaaatggtatcatctatctagcatggtccccaaagtttagcatgcatggaaatcacctgacagaaggttacacagcacagactgctggcctcccttcccacattttttgatgcagtagatccagggaggggactgacaatttccatttctaataagctcccaggtgatgttgctgctgctggttgtgaaatgctaattgctttttttctttcttcttcttttttttttttttttttgaggttgttgttctctagcttttcctgctagaaaatactgattccttatcaggaacttatcctctgctatctactattttgtataaaatatcaagggaacaaaaggctgtttgataagaacaaacgttttcaaattgttttacttacgtttatttaaaagaaagcatttttctcaatctattttattattacagtgaagatgaaacattgagcatagctagcaaatgcttctttaaagcttgatttagatattcaggttcctaacatttgtttttttggtttttttttgagatggagtcttgctctgttgcccaggctggaagtaagactttgtctcaaaaaagagtaataaccggactatgattcttctaccaattatatgaatttaacagaataagtaggattttatttaatactatcaaacattattgtaag

SEQ ID NO: 90637 - DNA, 343 bp, Homo sapiens
gctacatggcagaccctctgctaactgttttacattactcaccttatctgttagtcctcataacaatgctgccaggcagatcttatttatttacaggaacttgaggctcagattgcttcaaaggaggaggagctggaaggggcgaggttttcctatgaagccaattctattagactccaagcaaatgtgtattccagtcccttagttgccacaccctataaaagtaaaggatttctgaaaggtgaggatcactagagtgttttttccatactttctcatatagctggggtggcacaagcataatctgccacattttccctaattctaagttttccatggtttt

SEQ ID NO: 90638 - DNA, 446 bp, Homo sapiens
tcacctactgttagcatcagcctcatccccattcttctcctctctcctgttcctcctccctctcggaggagatgcagaaacttctctccttgccccaggaattcacccaccatttctgttgcctcgaactcccttgggggtcttactctcgcgcaagcaatttatcaaagtgtttcctgcaaagataattccctcccttagaagaattctccaaacgaaattttctccatctcattacacacacagcctatgtttgctgaactgatattgttactgacaaatactctgcaatgaacttttaattatctcattttgccctgtgacaatcctggaagttcggattctagcattcacctcattcattcaatagttaacaggcagctatctgagctagggtttagggttatggagctgactgtgacccaacagacagtcttttcagaaca

SEQ ID NO: 90639 - DNA, 2286 bp, Homo sapiens
gggaattcggccattatggccgggattgttaagctattggaaatgagtctgatagtacattggcttgtgtatcaaagggtacttggtacttagtttgcatttactatcatgattttgtgaatctcttgcatttactttgaatgtcaagtcagattggtctgttttataggccgctttttccttctgatgtgtagggttttttccccctttttttttttaattaaattttgaaaattcaggttactgtaggtgttcatttaaatttttaatagttgtcattcagtgctatttggtacatatttactgttagggcaggattcccaggtttactgtgtttttttttttttttttttaaagaaagctaaatattacattatgtaaatacttcttttcaccaacttctgtagtttcaccattgcatggtgtcatttcaggttatttaacagttatatccctctatgccaataattagaagtgtacactaaacatgaagtttggcatatgttgcaaaatgtcattttatcttttctaaaggctttaagaagaatatactagaatctatatattgatgttaattttgattcagaaaaaaaatacaacccagtatctaaaaagtgttaactagtccaagatagtaatgcatatgccaaagaaatattacacctaatctcatgtttagaatttaaaatagaattggtcagctacttattcttaccaccctacttccagtattttagctctgtcattattaaattcagatcttcctgattattttttctgttgaaagttaaactactgctttcaagtaatttaaagttatcctaccttttattcatgggtagttttgcaaaattaacatggtagccattgtttgaatttaatcgggcatcataacttttcatttattgaggaactaatcattattactataaagcatacaaattagccagtcagcacactttggtcttctttacctaagggttaaacatcagaacatcaaatttaattatttgcatagaaatgtgtgggctctttatataagttgactatcactaacaggtaatatttttctgtttgaagttgttacttttgtttacagcaaagtttgatgtagtgtgcagtagtgagctctagactgatctttttctaaatcagaaagtgattaaagtatgcacaaccaaaggcaggtttttctttttcatttattcagcaactatttattaagcatcaactctgtgccaggcacgttactagctgctacatactgtctgaacatgacatacggttaagtaactttacaattattatcaaatacttcaatgtagatatttcttaagttgaaatagcattaactaggataatgctttcatgttattttattgtcttgtgatagaaattcaacttgtaccatctaaaactaggttgctataaaaataggaggatgaagtcaataaagtttatgccagtttaaaaactggaaggaaaaggtaagagctctccattataaaatagttgcattcggttaatttttacacattagtgcattgcgtatatcaactggccctcaatgaagcatttaagtgcttggaattttactaaactgacttttttgcaactttgggagatttttgaggggagtgttgaaaattgccaaacactcacctcttactcaaaacttcaaataaaatacacattttcaagagggagcaccttttatatttgataagttttcattataaaccttataataccagtcacaaagaggttgtctgtctatggtttagcaaacatttgcttttctttttggaagtgtgattgcaattgcagaacagaaagtgagaaaacactgccagcggtgattgctacttgaggtagttttttacaactaccatttcccctccatgaaattatgtgaaatttattttatctttgggaaaagttgagaagatagtaaaagaattaggaatttaaaattacagggaaaaatatgtaagtgaaaagcaataaatattttgttcactttgctatcaagatgttcactatcagatatttattatatggcagcaatttatatttttaatcattgcccattaatagacgcagtaaaatatttttgaatcagacatttggggtttgtatgtgcattaaaattgtcttttgtactgtaagttactgttaatttgaatattttattgaactgtctccctgtgcctttataatataaagttgtttctacaacttttaatgatcttaataaagaatactttaagaatcaaaaaaaacaga

SEQ ID NO: 90640 - DNA, 1448 bp, Homo sapiens
gggaattcggccattatggccgggattgttaagctattggaaatgagtctgatagtacattggcttgtgtatcaaagggtacttggtacttagtttgcatttactatcatgattttgtgaatctcttgcatttactttgaatgtcaagtcagattggtctgttttataggccgctttttccttctgatgtgtagggttttttccccctttttttttttaattaaattttgaaaattcaggttactgtaggtgttcatttaaatttttaatagttgtcattcagtgctatttggtacatatttactgttagggcaggattcccaggtttactgtgtttttttttttttttttttaaagaaagctaaatattacattatgtaaatacttcttttcaccaacttctgtagtttcaccattgcatggtgtcatttcaggttatttaacagttatatccctctatgccaataattagaagtgtacactaaacatgaagtttggcatatgttgcaaaatgtcattttatcttttctaaaggctttaagaagaatatactagaatctatatattgatgttaattttgattcagaaaaaaaatacaacccagtatctaaaaagtgttaactagtccaagatagtaatgcatatgccaaagaaatattacacctaatctcatgtttagaatttaaaatagaattggtcagctacttattcttaccaccctacttccagtattttagctctgtcattattaaattcagatcttcctgattattttttctgttgaaagttaaactactgctttcaagtaatttaaagttatcctaccttttattcatgggtagttttgcaaaattaacatggtagccattgtttgaatttaatcgggcatcataacttttcatttattgaggaactaatcattattactataaagcatacaaattagccagtcagcacactttggtcttctttacctaagggttaaacatcagaacatcaaatttaattatttgcatagaaatgtgtgggctctttatataagttgactatcactaacaggtaatatttttctgtttgaagttgttacttttgtttacagcaaagtttgatgtagtgtgcagtagtgagctctagactgatctttttctaaatcagaaagtgattaaagtatgcacaaccaaaggcaggtttttctttttcatttattcagcaactatttattaagcatcaactctgtgccaggcacgttactagctgctacatactgtctgaacatgacatacggttaagtaactttacaattattatcaaatacttcaatgtagatatttcttaagttgaaatagcattaactaggataatgctttcatgttattttattgtcttgtgatagaaattcaacttgtaccatctaaccgtgttgaagtgtaaagttccgttgaagccgt

SEQ ID NO: 90641 - DNA, 351 bp, Homo sapiens
atccctgctctgccacctctccttggtccatttgttctcaagcaaatgacattggaaccaagaaaggaatgtgctctgtttgtcaattgtcaggcaggggacacatcttccctttcttccctcaaagagggactggttcagcctcaaaccctctgaagggcaagatcaggggaagcaggaatgctggagcttcctcagccctctccccagccgtgtgagtcacgggtgcaccaggctccctcctgctgtccctccactgggacactgccccctccagttcgctgttcatactcacaggcagctcgggcatttgtggggcttccccaacccccagactacgtcagacccctg

SEQ ID NO: 90642 - DNA, 502 bp, Homo sapiens
catttctccatgttggtcacactggtttcaaactcctgacctcaggtgatctgcccgcctcggcctcccaaagtgctgggattacaggtgtgagccactgcgcccagccttactgaataattttatgtcactgtccttttttaaaaaaaacggacctgttggttttgaagagtaaaggaggagctctgttcatttttaacatggagtatttaagatagaagagtttctttcagttttatgtatctcttttatttattttttatgggtagagttgtcccttagtatttatgggagattggttccagaacccttgtggttaccaaaaatccatggatgctcaagtccttgatataaaaatggcaagtatttgcaaataatctatgtacatcctcccatgtgctttaaatcatctctagtttactcacaatacctcatacaatgtaagtgctctgtaaatacttgttatactctattttccatttgtatttttattgtattggtt

SEQ ID NO: 90643 - DNA, 446 bp, Homo sapiens
ccagctcattgacaaatgagaacatggtggttcagagtgggaagttaattttcctagagacacatagctggcaagagggagcctcactgggttcggcactagatcctgtcccggacacgccttgctcatgattctgctctacgcatcttgtgtcccggtttcagcgtcctaatgacggtaatgtggaggtgtcattaggccagctcaacacttgctttccttatgaggctcatttcctgcccgggaacaccctgagactttcggaggttggaaaataaatcctcacgggatcttttttttccttaccatttattgtttcgtgaaggtttcctcccttaacacatttgtattaaagatgtttttacattagagctcgcaaaaatacttgaattgcttggtgacaagaaactaaggcatggaacaattcttattaactttgcctttta

SEQ ID NO: 90644 - DNA, 888 bp, Homo sapiens
tatttctaatattttgctactttaagcaattctgtaatggttatccttgcatgtaccttttacaaatctttaactagatttttaaatcctattgcatctgtaatcccagctactcgggtggctggggcaggagttttgcttgaaatctggaggcggaggctgcagtgagccaagatctcaccactacattccagcctgggcaacagagcgagattttgtctctaaattaattaattaattaaatgtgcaactagtcatattgctcctggctccagtgatttttttaaatcatttagaataaagtccagtcctcagtgtggtctacagggcctccatatgacctagaccctggctttctacagcctcactcttgctcactgcactgagctacactggccggcctccttgctgttctttcaaaacaggcttgtgtctactcccagagtcttctcacttgctctttcttccttctggaatgttcccccacctccccgatttgcacgagtagcttctttacattgttcagatctctgctcaaactaaggtcattcctgatcaccctatccaaaataggaaactttcttccctgtctctgtactctgctttactctttttttttttaacatttaaaaagttgagataaaatttatatgccataaaatttacccttctaaagcttacaattcagtggtttttaatatactcagagttatgcatccatcattcctaattccagaatgttttcataaccccagaaagaaacctcatatccattaataatcactcctcatccccctacccctagaatccactaatgtacttcctgtctctacagatgtacctattttgaacatttcatataaatggaataatacaacatgtagcctt

SEQ ID NO: 90645 - DNA, 438 bp, Homo sapiens
gagatggagtctcgctctgtcacccaggctgcagtgcagtggcaggatctcggctcactgaactccagtgttgggagtttacaagaaacgaaggctcagggaaggctgaacgttaccatgctagatttaactattggcatgaatattttggtctttccttcttcctgagtatccaggaaagtatattttccagccccttgcagttaagcagggccatgtggttagcccagccaatgaaatgtgggtggaagtgatgggtgccacttcctggctgaagcaggaagagactttctgtaattatccagtctctttctctttcttgccctgatggtggtagacgaggctgtgttgaggtcctggaaccataagttccaagtggttcctcgcattgctacgtggccacacctgtagcagatttgcatgacgccaaaggaactt

SEQ ID NO: 90646 - DNA, 494 bp, Homo sapiens
atgtaattaatctataaaggacatttaaaaccagtaagaaaaatgctaatattccagtggaaaaaagagacaataataccttcaaaaaatttacatgagcaacataaatggaccaaaaaaattataaattataaatcaaagtaataaaaattaaagccatgagtttatttttaacccacaaaatatcaacaattaattaaacaaccatttttattgctagcaagggtgtggagtgatataaagcactcgtttgatgctgctggggcataattagcagagcctttctggagggcacttggtaatctgtaccaagagctttagaaatgctcattcatttttacctgttgattctacttccagaaattggtatcagaatccatgatgtaaacaaagagttatgtacaagaataatcatatctactagcacaaacttagaaaaaaaccttgtatctattaacagaggtttgcttaataaattatatcaattatgaaca

SEQ ID NO: 90647 - DNA, 302 bp, Homo sapiens
cctgtctctaccaaaaaaattgaaagaattaaaaaaaaaaaaaaaaaagaactcttaaaattcaataataaaggcagaggcgggcagatcacctgacccactccccttgtttaagggaaacttttgctattaattttatgcttgatttaagcctattagtttcagattgttgcctgacaattgagttccctgtttgtttttccaaattactggctagttcattttatgtgaactttttttagaaataaaagcactgtcaagttagaattcatttatcagtttgtcacacgaaactggctcca

SEQ ID NO: 90648 - DNA, 626 bp, Homo sapiens
gatgagtcggtcctgatgctttatgggcctcattctaattcagaaagcttgtataaagaactaagactcttctgtttaataaaatagcaacaatctaatatctagattggtagtcctgcggtgccactagtgggagatgagagaattatgacgacgaggaaccgccgaggatcctctacaatagtccagctggcgtcctgccttcttgctgctggccgtcgtacaacgtcgtcatgactgggggtctttttaataatagcaattctgactggtataagatgatatctcattgtggttttgacttgcatttctctcatggttagtgatgttgagcattttttcatgtgcctgttggccatttgtatgtcttcttttgaaaaatgtctcatgtcttttgctcactttttaatgggattatttgtggggtttttttgtttgatttccttgtaaattctggatgttcgttccttgtcaggtgaatagtttgcaaatattttcttccattctgcaggttgtctcttcactctgttatttcttttgctgtacagaagctttttagtttaattaagtcccatttctctatttttgtttctgtgcttttgaggtctttgtcataaatgctttgc

SEQ ID NO: 90649 - DNA, 157 bp, Homo sapiens
aaaatcactacctctaacaaaaatagtattaatttatctttaaaattctttagttgaaaaagcttctattggcttataattattacccagaatcattcctagggcttaaacggtgttttcttcttaaagcctcgtgaaagcaatttcttagttctct

SEQ ID NO: 90650 - DNA, 275 bp, Homo sapiens
agaattctcactttaaaatgtttaaacaatagtgcttagttaagctccaacactctgctagtttcttggggttgccataacaaattactacaaactcgtgatttaaaacaaacaccattctctcacaattctggagactagaagtctgaagttaaggtgacaggagggcctcagtctctctgaaggatttagggaaggatccttcctttccctcttccagcatctggtggccccaggggctccttgattggtggtagcataactctgatctcttt

SEQ ID NO: 90651 - DNA, 472 bp, Homo sapiens
ccctccgccccctcgcggcgagatgcctcgttccccgggcttctcccgccctccgccgatctcctccctctgttgaaagctgcccgggaaagtggtggcgggagcgggcccaggcccgaatgtggcgtgggctcaggtgtctggtgtcgggcgccggaggaggttcgcgctggggtttggtgattcggaggcctggggtgcagacgcggcgtggctgtgaggcccgggcgggcgtgcgggtgtgagggccggactcacactgggccgccgcggggctgtttccatcggtcactggattttctcctcttccggttcgggcctcagggtgccgacatgacggccagggtcagagccccctcgcgccgctgttggagactttggaagacccttctgcctcccatggagggcagactgacgcttacctgactctgaccagtcgtatgactggagaagaaggaaaagaagtaattac

SEQ ID NO: 90652 - DNA, 331 bp, Homo sapiens
taacctccttctacgcctaacaacttttacagtgagtaaattctgtacaatctgaattccttgattgtgaaaaaatgtccccagggccacccattgggaggcctcccatacacttactaatccaacacagcttagaggccttgacagctccagcggtgctgcttagacaccccccttatgaatatgcaaagacaatctttcacttacaaaagaaactgatatagccattatggcctgtggttaatcaaacctccattcacttccctctgctttgagaaccgtcatcaagaaaatgtgttgctaagcaaacttagcagtaaggacctggttc

SEQ ID NO: 90653 - DNA, 702 bp, Homo sapiens
atttgtttcccttttccctgaacctccaataggaaaaatgatagtaaaaaatcagttgtggagacctaatcttaatacttagagtttaaattccaatccatacaccaggggcaaagagcaaagaagttgtgtctgtcacttaaaaaaacaaaacaaaaaactgattgagatgatccctgtagtgcttttaaagtgacaaatattttaccattttctctcatttttatcacacatgccgatgcggtagtattcctcgtctcttagagcttctggtagccccaagtgttcctttgcttgtggcaccataattcagtctctccctccatcttccacgtggccaccttccgtgtgtgtttctgtcttcatgtgacattttcctcttacaaagacaccagtcagcggaggggggagggatagcatttggagatatacctaatgttaaataacgagttactgggtacagcacaccaacatggcacatgtatgcgtatgtaactaacctgcacattgtgcacatgtaccctaaaacttaaagtataataaaatggttaagatggtaaattgtatgctatatgtatttaccacagttaaaaaattggagaaaaaatccttggaatatagtagatgcaggttcaaatcctgccttcagcatttattagctgaactgatgctaataaagttacttaatctgaaaaaaattta

SEQ ID NO: 90654 - DNA, 581 bp, Homo sapiens
actactccggaggctgaggcaggagaatggcgtgaacctgggaggcggaggttgcagtgagctgagagcatgccactgcactccagcctgggggacagagcaagactccgtctcaaaaaaaaaagaaaagaaaaagaaataacttacataacccttaggaactcttacttcaggctttaaaaggcaaggagcaaatagttttaggagactgataacgatgtcacctaaatttgagatactaaaaagagattagtgctctcaactatgtgaaatctatttctcctactgtctcaaatataatcctaggaatgtgcttataaacaaagcatttctgggccaggatagcaatgcttcacatcatattgtgctgcagtttccatcatgcttaaacgacagagacatgaacgataaataaaggtataaaaatattacaacctaccacctcaaaaacaaaaaaatcacattatttatggagttcagagcttggagattcaagtattggttacagttttattttgaaaagaatcctacaatttatgtggtttttatttctcatgtttatattaaaagaaaagctaata

SEQ ID NO: 90655 - DNA, 208 bp, Homo sapiens
gcgggagaccccgtatcctccagctgcttccggtggcccttcctcaggtcatgtcccgcagtcccctgcctctgaaccgcgctctcgcgagtttccgtagccttcgcgtccttcctccccagctctgattcgcctttatgtggagattcccctaggccttggtacatccccagaattgaccatcgttcctcatcgttacctagagtat

SEQ ID NO: 90656 - DNA, 311 bp, Homo sapiens
aaaaaaatttttaatttaaatttaaaaaagagacctcctgtaatccacaacccctcgtcctgggccccagcccccaacacacacacacacacacacacacacacactatgctgttctgtcctacttttttctcaaacatcccatgctcccttgtccccaggccttttggtgctgttccctctgcttggaacttgttcccttccccctccctctccttatctaggtaagtcctactcattcttcagattaaatttcattcatttcttccatgggaaaacttccatgagtcactcctaccctgcttcaggcca

SEQ ID NO: 90657 - DNA, 107 bp, Homo sapiens
ccatgctttccacaggagtctcaaagagctgtgtgatccaagaaaggctgagaaccacctgctgccatggactctgacaaaacatggaatgggccgacattatggag

SEQ ID NO: 90658 - DNA, 485 bp, Homo sapiens
tgccacgtcttggccaggcacagaacgtggctttgggattcaagtggttctgagtgagaatacggcgttgccatttacaccatggaggccagagtagggcagctttataatgctggctccctcgggtttccatttcctcatctataaaatgggaataaagagtgcctacttcttaggattatggtttagatctcatggattggtggatgtgactattcagctcacttagctctctgagcctcgcaggcccatgatcaattactaggaaagtaccttccagtacctgcctcgaagaacttttgtaagagccatgaggacagagactacgttttgcctttcaccacgacctggcatggtgcctggcatgaattaatcaccctgcaaatgtcggtctactggtcttttctgtttgtgtgagactgataagaagagtgggtgggtgggtggatctggcctaagaggggaagagtggggaaggtaggtgg

SEQ ID NO: 90659 - DNA, 329 bp, Homo sapiens
agctgagccttaaaggtctgggtaggagacagggggcgaggcaaacaaaggcacattcctagaaccttgcgaagtgtggttcatggacgagcagcacctgcttcacccgggagcttgctcaaaatacagattctcagtcccacccagacccactggatcagaatctgcattcgaacaactgggaggtttgggtgcagatgaaagtctgaggagctcaggacagatgatctctgctatctctgagaaatgcctttgtggcaaaggaaggaaggaagaagagataacctccccatgtgtttgggccaatgacaaggtcatatagatgtgcc

SEQ ID NO: 90660 - DNA, 364 bp, Homo sapiens
aagatccttcgtttgccctcccaactcattctgggcctttccccacctttgacctgtgaggctggtcaatatgggctgcaatcgagggctcccttgctgtctggcatctggttaggtttaaccagggggagcactagcaggaactagagggaaggagaatggagaggttagcatatgtgttctcccggctccctccttgcaaggtcacccaggttggctctgtctctctactaaaagtcacagcttcattcaggtgtcctctccacactgttctttctgtttccatgttctagtgactgctccctcccctagcttgccctcctttcccctatagggtactgtgccatcccttgtggttttgcta

SEQ ID NO: 90661 - DNA, 838 bp, Homo sapiens
gatattcttcaaagtgactgacttatctggggaaggaacattggacttagtgatgcagtagaatgttgaagtgctacatttaaaacatggcatttcaaaccagtgaggaaaagatggactgttatttaaatgatgataggacaactgctgagtcatgtggaaaaacaaagtgctaaatgctttcccgaccttattctttatgcaaaaccagatgggcatatggttcacagacggagatgtaaaaagaaagaatgaaaagaaggaaacattttaaaaagtaggaaaaaatgtaggtttcttatttaaaacaattgtggaatgaaaaggtttttaaagcatgatgttaaatcaagatgcaatagtggaaaaaaactgataaataacaaattagaacattatttttaatttaatagacataaatatatacacacatatatacatataagttaaagagcactttacataatataaaaagagtatttatggccaggcgcaatcgctcacgcctgtaatgccagcactgtgggaggccgaggcaggcagatcatctgaggtcaggagtttgaggccagcctgaccagtatggtgaaaccccatctctactaaaaaaattgcaaattaaggccaggtgcagtggctcacacctgtaatcccagcactttgggaggccgaggcaggtggatcacaagctcaggagattgagatcatcctggctaacacggtgaaaccctgtctatactaaaaaaatacaaaaacaaaattagccaggtgtagtggcaggcacctgtagtcccagctattcaggaggctgaggccggagaatgacgtgaacctggga

SEQ ID NO: 90662 - DNA, 412 bp, Homo sapiens
agataaaggaaaaccacgggtggatatgcataagaaaaacaaacagagcccaggagaagcctttggtctcagtgggatcctggctcatggaaccctctggaagctcaagtttgcagagggccctttgccagcctgtctggggccttgtagccactggttagtcttggaatccctttgcactcctataattactatacagatccttcctgacttacactggggctacatgctgataaacccctcatgaattgaaaatatcataagtcaaaaatgcatttaatgcgtcaaatctactgagcaccatagcttagtctagcctaccctaaacatgatcagacctcttaaattagtctacacttgggcaaaataaatcaaagactgttttataataaattgttgactatctcataga

SEQ ID NO: 90663 - DNA, 376 bp, Homo sapiens
tcaagggcaccagagtgaatgaacttaaggaatagtcaacaactatctttaggaatctccatgtcaaagatacctgggcagggaaatatattgtgacatgggatgggaatttgaccacttctcctgggatattaaagggaagtgccacaatgaagcaggagcacttgggacatctggatattaattccaaggagggaccttcgtggtttctctaaaaggccatcttatccagctgctgcttggatatttgtaatcatccttttgtcttgtcggatgggactatttactagaaaattcttccagtgaaagataaatttgggctcttgacctgccttttcctagctacctctttgtattctcttccgttctgcacttt

SEQ ID NO: 90664 - DNA, 229 bp, Homo sapiens
taactatgaattaaattagattatgtcaaatcatcatttaataacaagctaattttcacattactgagcaatgttaagaaatggttaagaaagtgaggtgcacatctggtagtgattctggctttttagacctttctcagtgaaaaggacggatatattatcttccctcaaatcgccatgctctctcatacagcacacaaccaatccctaacggtaatcagaagttaca

SEQ ID NO: 90665 - DNA, 695 bp, Homo sapiens
caatgagccgagatcgcgccactgcactccagcctgggcgacagagcgagactctgtctcaaaaaaaagaagaagaatttcttggccaggcacagtggctcacatctgtaatcctactaatactttgggaggctgtggcgggtggatcgcttgggaccagcctggccaacatggtgaaaccctgtctctactaaaaatacaaaaatgagggtgtggcacacaacagtaatttcagcctctcaggaggcttaggcacaagaatctcttgaacttgggaggcagaggttgcagtgagctgagatcgcgcctctgcactcgagcctgggcaacaaagcaagactctgtttcaaaaaaaaaaaaaaaaagtttgtgaattagaaataattttgaactttcagaatttttcagccaggtgcagtggcttacgcctgtaatgccatcacgttgggaggccaaggtgggcagatcacttgaggtcaggagttcaagacctgcccggccaacatgacgaaaccccatctctactaaaaatacaaaagctagccaggagaggtggcgtgtgcctgtaatcccagctacttgggtggctaaggcaggagaatcgcttgagcctgggagacggaggttacaatgagttgagattgcgccactgcactccagcctgggcaacagagcgagactccatcttaatttaa

SEQ ID NO: 90666 - DNA, 557 bp, Homo sapiens
agattttcatcatgcattccattggtgtgaaaacgaaagtaagctgctgcttggttccagttgtgctgaaatttctgctaaaaatagcacaagggggaaaaaagaacttgatgattacatgtctttttttgtttttttttttttgtatttcagcttttgttttgttttgttttgttgttgttgttgttgttgttgttgttttggtcagtgtagccacagctagaaaggagtaatttcaaaaatgttttagatatatgcttggcacatggttctttaacatttataaaagtagattgtgcataatgacagattttaaatactgtaagcattattagatgatataattgttcttttgctgtaaatttaaatatgtatacatttttgtagagttaaaatatgccaatttagttttcctttggtatatattgcctttttggaaaataaatggttaacatttcaaatagataaacaacgtcactattttatgcttaacctccatgtttgtggattatttaaataaatgattaagtgcctatgaatatctccttgcaccaaga

SEQ ID NO: 90667 - DNA, 484 bp, Homo sapiens
gacagcatccctaaccagatactgaacctgttggcaccttgatcttaaacttctcagcctctggaattgtcagaaaaaaatttctgtctttcaggaattacccagtatcaagcatattcttacagcagcacaaactaagacagggaggcttttgctatctctcctctgaattgtcacaattatcttcgaaatggtctttctactttcactttcatggctttccaataattctcaatacaaatgcatgattacataaacatttgctcaagaacctgtataaaaagactggtggatagtgactagatcctcaggatatgcagggctcaagagaaatgaaatatcttggggatatggttacttaagacgtgatactgtcacagtgaatttcacagaagatggtgctgccctaactgaggttcaatccatgtataagccagaccaatctgaagacaaataaagtatttcacagccacaaaaaaaattg

SEQ ID NO: 90668 - DNA, 429 bp, Homo sapiens
  misc_feature (426)..(426): n is a, c, g, or t
  misc_feature (429)..(429): n is a, c, g, or t
aagatacaaaatattcactatcaaaatgtcctcactgacaaaaatgttctcaaatatttctgtctcaaagttgcattgttcagtaaggaagcaaagtaggtgagacatatacaccaacaacatccctaataaaaaacttagctcatccctataagcccggaagcaaataaatcacccttacatacgttaattactttccaatttcaaattctcaactgtgaaataaagggctgttttatttggctgctgccagctcaaaatgacacattgcaccatgtgtggcatttgggccctgtttggcagtgatgactgcctttctgttcagtgtctgagtgctacgaagattgtacacagaggtccaatcttccggagaggtccaatcttccggagaggtccaatcttccggagaggtccaatcttccggangan

SEQ ID NO: 90669 - DNA, 1294 bp, Homo sapiens
gaattcggctcgagatgaaagatcctcagtctcttgtggatttagaatcctgcagcagcccaccatctaagagcaagagccaaagatgtttgtcttgctctatgttacaagttttgccatttgtgccagtggacaaccccggggtaatcagttgaaaggagagaactactcccccaggtatatctgcagcattcctggcttgcctggacctccagggccccctggagcaaatggttcccctgggccccatggtcgcatcggccttccaggaagagatggtagagacggcaggaaaggagagaaaggtgaaaagggaactgcaggtttgagaggtaagactggaccgctaggtcttgccggtgagaaaggggaccaaggagagactgggaagaaaggacccataggaccagagggagagaaaggagaagtaggtccaattggtcctcctggaccaaagggagacagaggagaacaaggggacccggggctgcctggagtttgcagatgtggaagcatcgtgctcaaatccgccttttctgttggcatcacaaccagctacccagaagaaagactacctattatatttaacaaggtcctcttcaacgagggagagcactacaaccctgccacagggaagttcatctgtgctttcccagggatctattacttttcttatgatatcacattggctaataagcatctggcaatcggactggtacacaatgggcaataccggataaagaccttcgacgccaacacaggaaaccatgatgtggcttcggggtccacagtcatctatctgcagccagaagatgaagtctggctggagattttcttcacagaccagaatggcctcttctcagacccaggttgggcagacagcttattctccgggtttctcttatacgttgacacagattacctagattccatatcagaagatgatgaattgtgatcaggaccaagatccctgtggtaaacactctgattgaatctggggttccagaaggtggaacaagcaggaatgggatccaaagagactcccactcagattctaaagcatttaaagacaattatagcagaatttatcaaaacaagatgaaacacagaaaagttgaaaccacaacaaaatgaattctattaaagaatagccccagatataaattctcttgaaagcaatgttcataaatatttaagcaaattaaagacaatgttaacaaattttctattaaatgccctgagtgataaaaccagttggcaataatattgccttattaaatcttcaaaaaatata

SEQ ID NO: 90670 - DNA, 1443 bp, Homo sapiens
aacttcgtacaacagcatgagctccaagcttcaaacgcattctcatgctcagacgagcactttatttttcatcaagttattttttgcattgttttggagtagcttcgaataataaacacatatttctgctttaaatttttaatagttaactacattcatgggacaaccaaagcaagaaagcctcatgttttgggggaaagtttgatatcagcaatgtccagacaagagccaaagatgtttgtcttgctctatgttacaagttttgccatttgtgccagtggacaaccccggggtaatcagttgaaaggagagaactactcccccaggtatatctgcagcattcctggcttgcctggacctccagggccccctggagcaaatggttcccctgggccccatggtcgcatcggccttccaggaagagatggtagagacggcaggaaaggagagaaaggtgaaaagggaactgcaggtttgagaggtaagactggaccgctaggtcttgccggtgagaaaggggaccaaggagagactgggaagaaaggacccataggaccagagggagagaaaggagaagtaggtccaattggtcctcctggaccaaagggagacagaggagaacaaggggacccggggctgcctggagtttgcagatgtggaagcatcgtgctcaaatccgccttttctgttggcatcacaaccagctacccagaagaaagactacctattatatttaacaaggtcctcttcaacgagggagagcactacaaccctgccacagggaagttcatctgtgctttcccagggatctattacttttcttatgatatcacattggctaataagcatctggcaatcggactggtacacaatgggcaataccggataaagaccttcgacgccaacacaggaaaccatgatgtggcttcggggtccacagtcatctatctgcagccagaagatgaagtctggctggagattttcttcacagaccagaatggcctcttctcagacccaggttgggcagacagcttattctccgggtttctcttatacgttgacacagattacctagattccatatcagaagatgatgaattgtgatcaggaccaagatccctgtggtaaacactctgattgaatctggggttccagaaggtggaacaagcaggaatgggatccaaagagactcccactcagattctaaagcatttaaagacaattatagcagaatttatcaaaacaagatgaaacacagaaaagttgaaaccacaacaaaatgaattctattaaagaatagccccagatataaattctcttgaaagcaatgttcataaatatttaagcaaattaaagacaatgttaacaaattttctattaaatgccctgagtgataaaaccagttggcaataatattgccttattaaatcttcaaaaaatata

SEQ ID NO: 90671 - DNA, 164 bp, Homo sapiens
tttatctcctcccaactcaatagtactctcaatatcctacaattctgaggtgcagattcctttttgagctctctcttgatgttaccagaacatatggaattatagtgttgtcaggtgttttcttgttaagataattcattgatatatcttcaaaggagtttttt

SEQ ID NO: 90672 - DNA, 114 bp, Homo sapiens
aataagaaacattttaatacaagaaaggccatcaatttctcttttaacaaactactctcaactctcaacaaactcccaacaaccaactctcccacagtacccagtaacaccttt

SEQ ID NO: 90673 - DNA, 373 bp, Homo sapiens
gtaaaatcattttattctatttgagatacaatgttaaatatgtttgtttctatgagttagctcccattgatgaattctgatgagttcctggatacagtagagtaattcttctggaaacaacaagtttggcatgaggagaagagtctaaggggaatgtaagagagttgaatggaatgttttggtccctgaggggttatgagttcctaaaaatactagggctaaaatatgctataaaaagctctagagggcagggtgctatacccacacctgcataaaatgggatttgcccattctaaccaaaggttattaccatcatcactggaattattctctaaaactacatttcttttcttttactagatagaatacagct

SEQ ID NO: 90674 - DNA, 667 bp, Homo sapiens
ctggaggaaaggtatctcttgacacaggtgatcttgtctaggctcagaaatggaggtaacatgagaaagcagtgattaagtagctactgacgaggttcacattaaatgatgaatgaactggccaggagttaagaagaaagtgtttaagagtgtttggctcagggtaagaatacattttactgctaatcaaccactaacttgagcccttgtgaccttgagcctcaggttgcaaaatgttatctgtaaaacaaattgttatacatgtgtaagttgctgctattgatatgcttttatttaaggccaaattttgtttaggagggtgatgggagaagggttaggacccttgcttaattagctcagctgcattcctctaatgctgaatttcccaacctagacacctttgacattttaggccgaacattttgttgtcggtggctgtcctgggcattgtaggatgtttagcagcatccttgactttcattcactagatgtttttaggaccctcttcagttgtgacatacaaaaatgtctctgacatagccaaatgtcttctagggggcaccagcctgccccagctctgcattttgagaaccactgctttgataaaagagctgagagataactctatctacgtctagagtttcccatggagttatcataagactta

SEQ ID NO: 90675 - DNA, 360 bp, Homo sapiens
ctttcccaggcttactctcccaataaatgtgctagagctctgaaaaaaaaaaaaaaaaaaaagctcggctttaggtatacatattaatgtctctctctctccttacagcctgtacactcgctaagggtaagtgttcatctttgtgttctcaaagctgctttagaagagcaccaggatcatagcaatggcatgatgcatccctgttgagacaatgaatgagtaataatttgtaatatattttaccaccccaaaaatgctctaaaacagaactaaagataggcattcctattgcttagctgatagaggaggggaaaaaatctaagacatgcaccatctcttcaaaatatacacagtttcaag

SEQ ID NO: 90676 - DNA, 312 bp, Homo sapiens
ttgcactccagcccgggcgacagtgcgagactctgtccaaaaaaaaaaaaaaaaaaaaaattcctcttcggtggctttccaaatctatggaaagcgtactgcttcctgttaattcctattcctctccaaaaatgcttgtaatatttttaatagtatggttgtgtatatccattttagcactggtgcaatcttaattaaggttgtagaaaaagtatagaatttgtggaacgttgtgtaactttgagaatccttatgactgcattttaaagaattaacaacaaggaataactagtaattttttcagctatagag

SEQ ID NO: 90677 - DNA, 4152 bp, Homo sapiens
  misc_feature (647)..(647): n is a, c, g, or t
  misc_feature (654)..(656): n is a, c, g, or t
  misc_feature (661)..(661): n is a, c, g, or t
  misc_feature (666)..(666): n is a, c, g, or t
  misc_feature (673)..(673): n is a, c, g, or t
  misc_feature (677)..(677): n is a, c, g, or t
  misc_feature (684)..(684): n is a, c, g, or t
  misc_feature (686)..(687): n is a, c, g, or t
  misc_feature (696)..(696): n is a, c, g, or t
  misc_feature (699)..(699): n is a, c, g, or t
  misc_feature (703)..(703): n is a, c, g, or t
  misc_feature (709)..(711): n is a, c, g, or t
  misc_feature (714)..(714): n is a, c, g, or t
  misc_feature (718)..(719): n is a, c, g, or t
  misc_feature (1638)..(1638): n is a, c, g, or t
  misc_feature (1736)..(1736): n is a, c, g, or t
  misc_feature (2112)..(2112): n is a, c, g, or t
  misc_feature (3535)..(3535): n is a, c, g, or t
gacatgctagtgctcggcccacccttctgtttttgtagccaaggcttgattggattttctgtatgtataatgggctgtttcaaaatggtcttgcctcattgtttcttcatatcttattgaaaccaacccactgttgatctcaatctgtgtaaggagaatgcggagtatggcattcgcaggactgaatccctagattttaagtttggaaggagatccaaccgggcagatgaattgaccggtggtgaatattctgtagcattttcctccctggagaggaatgccgccaccgctgggaaccgtggactggcatgtgagccagtggctgtgaaaggcgctgtgccctgtgtcctccgtgtactttagagcaggagcgtcacacatggtggagccgggtgatatcccgggcaggctcccgaaagctcctggtggcccatcaggggctggtttttccacctttttttttttttttttttcctcgagacaaggtctcactctgtcacccaggcaggagtgcagtggcatgatcttgactcactgcaacctttgcctcctgggttcaagcaattctcgttccttagcctcccgagtagctggcattacaggcactcgtcaccatgcccggctcgttttttttttttgtatttttngtagagnnngggtntcacnatgttgnccangctggtntnnaactcctgnccncaantgatcnnnccncctnngcctcccaaagtgctgggattacaggtgtgagccaccacgctggccctcctcagcttttttttttttttaaataaccattattattccatattttttctatgaaatcatttataaacataaaatatcttaagtctgtaattcagtttatgatacatattcagttatgatacattctttgcatttcactgtttcatgtttcagccaaatcccatccccccaacctttttttttttttttttgagccagggactctctgtcgcccagactgtagtacagtggcatgatctcggctcaccgcagcctcttcctattaaagtactgggattataggtgtgagccaccgtgtctggcccctatccctctattaagtgcctttcagcaattctgtttttagaggaaaattcctttttgcttctgcttgctccttttaccacccctgcccatgaaagggggagttacctgtccagagcaagtatagctttggccgtgatcttcaaggactattgcattggtgctgactgctggggccccttggcccccaggttcccaccagtggagcaaacacgaagggtgcagcctagtcggaagtgttcccaaggacaacatcagtgtgcagacttccaggggaggggcatatgaaactgagccaacagaggccaagatgagaaccctcctgtgacatggtcccacccattaggccattcccttggtcagctggatggcaaatactagtagtgtatgctatggagcagacatttattaagtccctgctgtgtgtcaaggattgagctaggactctgcaggaaatgcatgtgtagttcagtcctggaagctgcccagcttccgcctcctggaagcatccttttctccccagctgctctcgcctgcacatcttacattctctggctggtccttctnggtgtgttcagccactttgagctgtgcctgcctgatctgcacactttgcaaatgtgtagactcagaaagagaaacagcccaaacagtggccagaaacngttcttggaggctctaggttgacaaaagggtcctttaatagctccaggttgacccctcccctagacacctgtgctccccctgagccacaccgtgacttcggaagttcaactgtcatccagtttggtcggctctttcacaaaataatttcactgattctgtcaggcattttcattactttgatttaaagtttttgtgtcaacctctggtactttagaatctccagatgttgaaaaacaaaatcccattggtaatgtttgttttcctttacacttatgaaaaaagcaacttttattctcgcctaaaatttattgtcgagagcacgtcttttaaagtaaaaaaatgtttgcagcatgtcatacggctctgaaatactangtaggtcgcagcttgttttgaggcataagtgacaaatatacttgtgagagatgttattcttaccctattaaagaaattagaacatggcttttgtgtctctgatactgattttatatcttcgcaaccgaatttgtgaatcccagctagagtaaaagacacacgtgatgcatgaagaaagtgaaatggttctgtttggtatttatctcatcttgatctttggcttggaagaactgataatgaaactctctttgggaggacagagagctctggggcattcatctcccaactaggtctccgaatttggtgcagttcttgaaggcaggtgggtttacacagtggtgagaagtgggaagtatgaagggtgtgatcttcgccctctttttgtatgcccgttaacaaaactcaattgttaggcgttgagtagggctattgatttctagccaacggaaacacttactgtgtaatttccaggagagagacattttcaggtgatgtggactcattccctgcagttcagaaggtaatgagcaatagtgatcaatcctgaggttatccggggtgatttcagcttgtccattgcattgattgataaatggcatgctctgaggctgattgagtgatgaccagcagcatcaaagaaaaccctcagtttgcatggcgggtattagaagtggctgccttgatgcctcctgtcatcgtttgagtggtaaagagacattctttgtatgtttataactcttgatttggggtcatggttatcatctgtactaactgcacaggtcatcccgctcccatccctttttcattctttagaatcccccacagcggtccacgccccttgccaacttccttccactatcctggttctgttgttactcctgccgactgcagtgctgttccgtgagcttcttgaatgacatcgtacagtatctccgacgcacagtacgtaccagttacagttgtcttgacaggatctcctgtgatcttttgtcccttttcagtttagctcttggtggctccataggctctcaagcatcctggacagttctctgtgggctggcgtcctgggtcagattccagggccggatgtgagctgtgccttgaccatttgaagagctcaccgaaggaggtgggaatggacggtgcaggaaagtaactcaggcacccgaggctgctgagcccagagaagaagcacctgtccttggagtattgttccaggaaatggggaggcaaccggttccagagggcagaactgggttgggagacaaggaagcacagttcttgtaaatcaagaaaatttgtaaagccacataagctgtccaccagtgagagagagcatgtacatgctgtgagctgcagtcaggccgcctggccacaaggcatgttgtggcatgctgtgggagtcggcgttgaagcatcccanagacctcttgtgcttaaacaaagctgagttattcagcacactcctagatgtggggtctgattgttggtcaaactgaaggactcgagaaaatgaggactaagtggggggatgagagacatgtgagtgggtgttgggccagtagaatgacaaaaggagcaggcccaggctctttggaagacagacctttgcccttcagggggactgggggagtgtttcctggcaggtgtggacattcgtcctcatggatgtcttctttataataacctgtggaggacggcccagcgcatcatgccactgaccttcactgatgcttctgtacttaagaagtaatgtcccttggctgggcgcggtggctcatgcttgtaatcccagcactttgggagctggaggtgggcgaatcacctgaggtcaggagttcaagaccagcctgggcaacatggcgaaaccccgtctctactaaaaatacaaaaattaaccgggcatggtggcaggctataatcccaggtactcgggaggctgaggcgggagactcgcttgaacccaggagttggaagttgcagggagctgagatcacaccactgcactctagcctgggtgacagaacgagactctgtctc

SEQ ID NO: 90678 - DNA, 374 bp, Homo sapiens
atggatttacaaacactggtaagatggatgttgatcatctcaggcaggctggccacagatcctgttatatttggctcttaaagccttttgcttcctctggctgcaagtggaaggagtggatggggttcctcatgcccatgttgctgtaacttggcttccacattttacagtgaaaccaactacaggaaagtagcaaccacagcctgagtatttcctgtttaaagatttggtgtttacaaaaaaaaaaaaggtattaggttgtcatttttttctaaatctaaaattattctaaaattaaaagtttactttaaaaaatgcaatgttagctgggcgcagtgactcacacctgtaatcccagcactttgggaggccaa

SEQ ID NO: 90679 - DNA, 443 bp, Homo sapiens
ctaatcccagctgcttaggaggataaggcaggagaatcgcttgaacttgggaggcagaggttgcagtgagccaagatcgcaccattgcactccatcctgggtgacaagagcaaaactccgtctccaaaaaaaaacagaaattgggatttcaacctggcctgactccagaggaaatgctttcctcctgtaccttatggccatctcgagtaggaaatagactgtgtctttgatatgtgaggtgcaggtttgttggatttggggggcattggttgtgaagattgggggcaaggtagaaaggaagtgttgactttcacatcagctgttcatcttgaggttctgggggcctagccaggccaagctggcgagggcagagcaggaagctcagggcagcagcaggggtgagtggggcagagtctgagaagcaaatgtgagggtcagaatga

SEQ ID NO: 90680 - DNA, 163 bp, Homo sapiens
ggtagtagaagtaactgaataacagccatcactttggttgagcttaagttgtgcataggtgctcttccagacacctcatgtgtattattaactttataatcctcaccaccaaatgaggtaggtactattattatccatattttaaagatgagaaagcagaagt

SEQ ID NO: 90681 - DNA, 773 bp, Homo sapiens
gactggaaaggaaaatgggagaacttttgggggtgatggaaatgttctgtgtcatggttagtgggaatgtatacgtttgtcaaaattcatcaaattgtgtcactgtaaagaatgcattttattgcaaaccaaatgagaaaagcaaagtcgattgagaacttgctgtagcaagggagtcagccaccatcccttatgttttagcagaggttcaaaggcatgcagaggagtgggaaagctttacagtggacaaaaggaaaggtttcacaggtatgcctgattggaagctgttggcatggggaagctggaagctaactacaagttggcatcctatggtcttggttaaaggagcatatttggctttctctggatgggcataagctagaagtgaggacaaaaagtagggaagctgtcaagttttaatcaagtcctggccattttgagctgattgtcatagaagttattatttagcttcctggattgctaccagagatagcagtctgacttcctacaagtctggttgatagcaggtttggctttcaggctgagagtacacttatggtaaataagtggttggtttactgggctagttgttgtaggtaatgggtcagaattctgtttttatgtatattctggccatttaccatttgtattttcagtctctcaaaaataaattttagagacatgggagccagcttgaaggatctcccagggggcaaatttagggcaattttagcgtcaaaaagaaaatgaatacaattgattgcaaatactga

SEQ ID NO: 90682 - DNA, 410 bp, Homo sapiens
tattctaagagagtgggaagctactgaaaaacaactgggttacagatggggaataaatgcaatgatcagatttacatttcagaaacattactccagctatactgtggaccatactttggagagaacaaatcttcatttggccatactgaatggagaatagttaggagaatgactaagttagaaattatgatggcctgacttaggttatggcaatcaatgaagatggaaaaaaaaatgacatacagttgattctcattattcccaggttccatatttgcaaattcacctactcattaacatttatttgtaaagcaaaattaatgcttcctatttcacagtcatttggatgagtgtcgagtggtgaaaattttgagtaatccaacacatacattcccagctgtggtggcaca

SEQ ID NO: 90683 - DNA, 2845 bp, Homo sapiens
aggggacgcagcgaaaccggggcccgcgccaggccagccgggacggacgccgatgcccggggctgcgacggctgcagagcgagctgccctcggaggccggcgtggggaagatggcccagtccaccgccacctcccctgatgggggcaccacgtttgagcacctctggagctctctggaaccagacagcacctacttcgaccttccccagtcaagccgggggaataatgaggtggtgggcggaacggattccagcatggacgtcttccacctggagggcatgactacatctgtcatggcccagttcaatctgctgagcagcaccatggaccagatgagcagccgcgcggcctcggccagcccctacaccccagagcacgccgccagcgtgcccacccactcgccctacgcacaacccagctccaccttcgacaccatgtcgccggcgcctgtcatcccctccaacaccgactaccccggaccccaccactttgaggtcactttccagcagtccagcacggccaagtcagccacctggacgtactccccgctcttgaagaaactctactgccagatcgccaagacatgccccatccagatcaaggtgtccaccccgccacccccaggcactgccatccgggccatgcctgtttacaagaaagcggagcacgtgaccgacgtcgtgaaacgctgccccaaccacgagctcgggagggacttcaacgaaggacagtctgctccagccagccacctcatccgcgtggaaggcaataatctctcgcagtatgtggatgaccctgtcaccggcaggcagagcgtcgtggtgccctatgagccaccacaggtggggacggaattcaccaccatcctgtacaacttcatgtgtaacagcagctgtgtagggggcatgaaccggcggcccatcctcatcatcatcaccctggagatgcgggatgggcaggtgctgggccgccggtcctttgagggccgcatctgcgcctgtcctggccgcgaccgaaaagctgatgaggaccactaccgggagcagcaggccctgaacgagagctccgccaagaacggggccgccagcaagcgtgccttcaagcagagcccccctgccgtccccgcccttggtgccggtgtgaagaagcggcggcatggagacgaggacacgtactaccttcaggtgcgaggccgggagaactttgagatcctgatgaagctgaaagagagcctggagctgatggagttggtgccgcagccactggtggactcctatcggcagcagcagcagctcctacagaggccgagtcacctacagcccccgtcctacgggccggtcctctcgcccatgaacaaggtgcacgggggcatgaacaagctgccctccgtcaaccagctggtgggccagcctcccccgcacagttcggcagctacacccaacctggggcccgtgggccccgggatgctcaacaaccatggccacgcagtgccagccaacggcgagatgagcagcagccacagcgcccagtccatggtctcggggtcccactgcactccgccacccccctaccacgccgaccccagcctcgtcagttttttaacaggattggggtgtccaaactgcatcgagtatttcacctcccaagggttacagagcatttaccacctgcagaacctgaccattgaggacctgggggccctgaagatccccgagcagtaccgcatgaccatctggcggggcctgcaggacctgaagcagggccacgactacagcaccgcgcagcagctgctccgctctagcaacgcggccaccatctccatcggcggctcaggggaactgcagcgccagcgggtcatggaggccgtgcacttccgcgtgcgccacaccatcaccatccccaaccgcggcggcccaggcggcggccctgacgagtgggcggacttcggcttcgacctgcccgactgcaaggcccgcaagcagcccatcaaggaggagttcacggaggccgagatccactgagggcctcgcctggctgcagcctgcgccaccgcccagagacccaagctgcctcccctctccttcctgtgtgtccaaaactgcctcaggaggcaggaccttcgggctgtgcccggggaaaggcaaggtccggcccatccccaggcacctcacaggccccaggaaaggcccagccaccgaagccgcctgtggacagcctgagtcacctgcagaaccttctggagctgccctagtgctgggcttgtggggcgggggctggcccactctcagccctgccactgccccggcgtgctccatggcaggcgtgggtggggaccgcagcgtcggctccgacttccaggcttcatcctagagactgtcatctcccaaccaggcgaggtccttccaaaggaaaggatcctctttgctgatggactgccaaaaagtattttgcgacatcttttggttctggatagtagtgagcagccaagtgactgtgtctgaaacaccagtgtattttcagggaatgtccctaactgcgtcttgcccgcgccgggggctggggactctctctgctggacttgggactggcctctgcccccagcacgctgtattctgcaggaccgcctccttcctgcccctaacaacaaccacagtgttgctgaaattggagaaaactggggagggcgcaaccccccccaggcgcggggaagcatgtggtaccgcctcagccagtgcccctcagcctggccacagtcgcctctcctcggggacccctcagcagaaagggacagcctgtccttagaggactggaaattgtcaatatttgataaaatgatacccttttc

SEQ ID NO: 90684 - DNA, 1914 bp, Homo sapiens
aggggacgcagcgaaaccggggcccgcgccaggccagccgggacggacgccgatgcccggggctgcgacggctgcagagcgagctgccctcggaggccggcgtggggaagatggcccagtccaccgccacctcccctgatgggggcaccacgtttgagcacctctggagctctctggaaccagacagcacctacttcgaccttccccagtcaagccgggggaataatgaggtggtgggcggaacggattccagcatggacgtcttccacctggagggcatgactacatctgtcatggcccagttcaatctgctgagcagcaccatggaccagatgagcagccgcgcggcctcggccagcccctacaccccagagcacgccgccagcgtgcccacccactcgccctacgcacaacccagctccaccttcgacaccatgtcgccggcgcctgtcatcccctccaacaccgactaccccggaccccaccactttgaggtcactttccagcagtccagcacggccaagtcagccacctggacgtactccccgctcttgaagaaactctactgccagatcgccaagacatgccccatccagatcaaggtgtccaccccgccacccccaggcactgccatccgggccatgcctgtttacaagaaagcggagcacgtgaccgacgtcgtgaaacgctgccccaaccacgagctcgggagggacttcaacgaaggacagtctgctccagccagccacctcatccgcgtggaaggcaataatctctcgcagtatgtggatgaccctgtcaccggcaggcagagcgtcgtggtgccctatgagccaccacaggtggggacggaattcaccaccatcctgtacaacttcatgtgtaacagcagctgtgtagggggcatgaaccggcggcccatcctcatcatcatcaccctggagatgcgggatgggcaggtgctgggccgccggtcctttgagggccgcatctgcgcctgtcctggccgcgaccgaaaagctgatgaggaccactaccgggagcagcaggccctgaacgagagctccgccaagaacggggccgccagcaagcgtgccttcaagcagagcccccctgccgtccccgcccttggtgccggtgtgaagaagcggcggcatggagacgaggacacgtactaccttcaggtgcgaggccgggagaactttgagatcctgatgaagctgaaagagagcctggagctgatggagttggtgccgcagccactggtggactcctatcggcagcagcagcagctcctacagaggccgagtcacctacagcccccgtcctacgggccggtcctctcgcccactctcagccctgccactgccccggcgtgctccatggcaggcgtgggtggggaccgcagcgtcggctccgacttccaggcttcatcctagagactgtcatctcccaaccaggcgaggtccttccaaaggaaaggatcctctttgctgatggactgccaaaaagtattttgcgacatcttttggttctggatagtagtgagcagccaagtgactgtgtctgaaacaccagtgtattttcagggaatgtccctaactgcgtcttgcccgcgccgggggctggggactctctctgctggacttgggactggcctctgcccccagcacgctgtattctgcaggaccgcctccttcctgcccctaacaacaaccacagtgttgctgaaattggagaaaactggggagggcgcaaccccccccaggcgcggggaagcatgtggtaccgcctcagccagtgcccctcagcctggccacagtcgcctctcctcggggacccctcagcagaaagggacagcctgtccttagaggactggaaattgtcaatatttgataaaatgatacccttttc

SEQ ID NO: 90685 - DNA, 307 bp, Homo sapiens
aagttatctgcatagaaaactcaaagaattgacatacaaactgataaaactgagaactcagcagttttgctgagaacaagctcaagtatacaaaaatcaattgtatacattagctaaaaaaattagcaagtagttctaaaaagatactatatgcactagcaataaaaacttaaaggtgtctaggaataaacttttatggagaaatgtatgaaactttattaaaatacataaaagaagaggaaaaaatctagagaaaggaagggctgggtgatagctcctgttcattagtgaaaagaatcaatattat

SEQ ID NO: 90686 - DNA, 459 bp, Homo sapiens
gagagtagaatattttcttgtccatcatttctcttctatttagggctcttgttggggagaataagtatacggagctctagggtctgatgaacataatacattttttgtgcttgggtctcacataagcttcattgaagcctctgatatgttttctcaaggtgatagtatatattagggtttagcactaacatacatttattcaacaaatatttgagtgtccaccaaatgcaaggttctgcgctcagcatggggtaagcaaaaccagatacagtacttgccctcatgtagtacagggtccagtgggggaggcaagatatagtccaaagatcacatcaataggctgggcgcagtggctcacgcctgcaatcccagcactttgggaggctgaggcaggcagattacctgaggtcaggagttcaagaccagcctgaccaacatggaaaaaccccatctgtacta

SEQ ID NO: 90687 - DNA, 2981 bp, Homo sapiens
ctttatttcctttagggtttaatgaagaaattcattcgatgttctacacgtgtaactgtgggaactattaaaaaatttctaagtttaaaactaaaacttccaagttcttatgagttggatgtgctgtgcaatggtgaaattatggggaaggatcatactatggaattcatctacatgacaagatggcgactaagaggcgaatttcggtgtctgaactgctcagcttcgcaagtctgctctcaggatggccctttgtatcagtcataccctatggtactgcagtatcgaccaagaattgatttcggttagaccaaggggcccagacctcactgagatgaatcctgcactatttgtttactcgtcaacagattgcacagttaacggtgtgtggactagaggaacacaaccagattttcagcatgcaaataaggccattgtctatctctaaattgtcagttgcattcatgttgtttctattaggagcaaaccaagtgccattctgctactgaaccatctgcataaggtatttgtgttgtctcaaagtgtgcaagtcatggtaaaaatcagttagctgtgccgccatgattcacccttctgaatattttgcttgcctgttccaagattgttctaatgtttaattacactagtaaaatggctcaatttttgtggtgttgcagttttcacatacttactcttttattcttgtttaaatagcgtactctacaagaaactaataattatatcttgaaattattttgtatggaaatatatttagaaaagtggtttttgagccactgtcttgttcttgataagctttttgtgtgaaaaaaagttcattcttgagtgtgcaagtccttttgccaagaattccaattattctgtaacattagagcacaatataattgtagacattctaagcatctgtccgtgtagtctaccaattgcacaaggaaggcatgttagccctccagattgaaaatgtatgtgacctcttgaactgaagttagattcccaaccattcaaaatgttggcagctgatcacatttacttctgataaaagtaatgtgtaagtaaggttaatcttctttcataatgccttatgacaagcaggtgctgcttcatgaaacgtcattgtatagcccatttcatgtatcattacattgttgctgttatttaatgagtgcattatttctctttttaagttggccttaggtatatgtcattgtggcatgcagagggttatgacgattttaaatattaggatttttagagcacataacattagctattttatggatttcaaaagtctcaaaacagttgtagattaaaactgttagttacctttcacatttccaaactatgtgcataaaatagaataaatgcagtatagaactatgctaaccaaaattaataggttaagggtattttattttaaatcctgtagtaattggggaaatgagaagattattattttatacatgagttcattaagatcagaaatacaaaatgtcctgtattttgcagttttgttaagtcttccattcgttttaggattagtctgcaagtcaaagaaagtcttgttaccttaaattatatgaaaactgtcattttaaatcttttaatatttacagttttcaaaaaccttacttggaaattgctttgaaacaaacaagctaacctttgaaacttaggaaaaaatcttgaaagttaggaaaaatatttgagaaatatgacgagcacaatctgtgtgttacacacatttagtttttatactgcatatgtggtaaatgtgtcacattttccagtaaaatgtatcagaaatcaatgccttctgaatttcaaaatgattcttagaaataagatattgtacaactctagcaaacatacaaagtacagctaaatcttaatatatttcactatgtaaaaggctgaaacttcataattatctgttccttctatctttttttgagtcaaaaagtctattaaatttttctgttgttgttccaactttggtgaaaaaggttatggcaatactttaactttgttttgttacattgttttgttcttggaatggctcacaagcagaatttaaaaggcagattttcattaactataaatggctgaaaaaactgaatttactatctagctacagaaattatttttctatggtgtgaaactgttcccagacatccctaagaacttttacaaattattataaatttgtcacacctaggtcagcgattaaaatagtgttttgcaaatggaattttaattaactcaaaatgaattaagagtgcattttaaaaatcacaagtgagactttgatgttttggccccccagccaaaacttaatggtcataaatgaattttatctacaaaatctctttaaatttggctggttgccttgtcatatgtaatttcactattttccaaggaaatatataggaagcaattatgaaactgagaatagttttatatagaattcttttatttactgataatgcattaacatttttattgaaatgcaatggaatatgtgccaaaacacgtgaaaagcttacataaagaaaggcatcagttgtcgtttggagaaaggtacacatttttttgatggtcctaagtgatatggtattactactagaatcacagatttcttcaactgacttattttggtatattcaactacagctttctaaggataggactactttcatgtctagtaatacactgtattccccgttaattatcccttaagtcagattgtagaatttgcaagaaactaggtatagaaaaaatgtacaggcaacttttgtggttagctttataaatttagggtgcttataaaatgataaaatgaattctttaaataacctataggaatcatctgaatctgtaacatcagagactaaaactaaaagttttctttaatctgttgtttcttaagcaataaactgaaagacctttacttccataaaaaaaat

SEQ ID NO: 90688 - DNA, 2873 bp, Homo sapiens
ctttatttcctttagggtttaatgaagaaattcattcgatgttctacacgtgtaactgtgggaactattaaaaaatttctaagtttaaaactaaaacttccaagttcttatgagttggatgtgctgtgcaatggtgaaattatggggaaggatcatactatggaattcatctacatgacaagatggcgactaagaggcgaaaccaaggggcccagacctcactgagatgaatcctgcactatttgtttactcgtcaacagattgcacagttaacggtgtgtggactagaggaacacaaccagattttcagcatgcaaataaggccattgtctatctctaaattgtcagttgcattcatgttgtttctattaggagcaaaccaagtgccattctgctactgaaccatctgcataaggtatttgtgttgtctcaaagtgtgcaagtcatggtaaaaatcagttagctgtgccgccatgattcacccttctgaatattttgcttgcctgttccaagattgttctaatgtttaattacactagtaaaatggctcaatttttgtggtgttgcagttttcacatacttactcttttattcttgtttaaatagcgtactctacaagaaactaataattatatcttgaaattattttgtatggaaatatatttagaaaagtggtttttgagccactgtcttgttcttgataagctttttgtgtgaaaaaaagttcattcttgagtgtgcaagtccttttgccaagaattccaattattctgtaacattagagcacaatataattgtagacattctaagcatctgtccgtgtagtctaccaattgcacaaggaaggcatgttagccctccagattgaaaatgtatgtgacctcttgaactgaagttagattcccaaccattcaaaatgttggcagctgatcacatttacttctgataaaagtaatgtgtaagtaaggttaatcttctttcataatgccttatgacaagcaggtgctgcttcatgaaacgtcattgtatagcccatttcatgtatcattacattgttgctgttatttaatgagtgcattatttctctttttaagttggccttaggtatatgtcattgtggcatgcagagggttatgacgattttaaatattaggatttttagagcacataacattagctattttatggatttcaaaagtctcaaaacagttgtagattaaaactgttagttacctttcacatttccaaactatgtgcataaaatagaataaatgcagtatagaactatgctaaccaaaattaataggttaagggtattttattttaaatcctgtagtaattggggaaatgagaagattattattttatacatgagttcattaagatcagaaatacaaaatgtcctgtattttgcagttttgttaagtcttccattcgttttaggattagtctgcaagtcaaagaaagtcttgttaccttaaattatatgaaaactgtcattttaaatcttttaatatttacagttttcaaaaaccttacttggaaattgctttgaaacaaacaagctaacctttgaaacttaggaaaaaatcttgaaagttaggaaaaatatttgagaaatatgacgagcacaatctgtgtgttacacacatttagtttttatactgcatatgtggtaaatgtgtcacattttccagtaaaatgtatcagaaatcaatgccttctgaatttcaaaatgattcttagaaataagatattgtacaactctagcaaacatacaaagtacagctaaatcttaatatatttcactatgtaaaaggctgaaacttcataattatctgttccttctatctttttttgagtcaaaaagtctattaaatttttctgttgttgttccaactttggtgaaaaaggttatggcaatactttaactttgttttgttacattgttttgttcttggaatggctcacaagcagaatttaaaaggcagattttcattaactataaatggctgaaaaaactgaatttactatctagctacagaaattatttttctatggtgtgaaactgttcccagacatccctaagaacttttacaaattattataaatttgtcacacctaggtcagcgattaaaatagtgttttgcaaatggaattttaattaactcaaaatgaattaagagtgcattttaaaaatcacaagtgagactttgatgttttggccccccagccaaaacttaatggtcataaatgaattttatctacaaaatctctttaaatttggctggttgccttgtcatatgtaatttcactattttccaaggaaatatataggaagcaattatgaaactgagaatagttttatatagaattcttttatttactgataatgcattaacatttttattgaaatgcaatggaatatgtgccaaaacacgtgaaaagcttacataaagaaaggcatcagttgtcgtttggagaaaggtacacatttttttgatggtcctaagtgatatggtattactactagaatcacagatttcttcaactgacttattttggtatattcaactacagctttctaaggataggactactttcatgtctagtaatacactgtattccccgttaattatcccttaagtcagattgtagaatttgcaagaaactaggtatagaaaaaatgtacaggcaacttttgtggttagctttataaatttagggtgcttataaaatgataaaatgaattctttaaataacctataggaatcatctgaatctgtaacatcagagactaaaactaaaagttttctttaatctgttgtttcttaagcaataaactgaaagacctttacttccataaaaaaaat

SEQ ID NO: 90689 - DNA, 393 bp, Homo sapiens
ggcctggagatttgcattctcacaaccacattgagttcaaacctttcctgcattttttccagatttactacatcttgaatgaaaatgagaaacacttttcttggtgcagaaatagatccttggctcaaaaagttaagtccaatgtcgaggagatgatctgtgccatctgaaaggacgcgcccagctcctgagagagctgcaatattcctatttgaatgaggaaattgcctccttattcaaattccacttcccctttgcacgttctctcagaacatgaatcctttaaggtaagatgttcatttaaaatgcacacatttggtcgggcgcagtggctcacacctgttatttcagcactttgggaggcctaggcaggcggatcacctgaggtctgga

SEQ ID NO: 90690 - DNA, 496 bp, Homo sapiens
aaattgaccacggctggggctggaaagtaggaaaaatgcttaaggccaggagttaaaagactagcctgggagaccctgtctgtgtgcgcgtgcacacacacacacatacatgcaaattctggaatgggtggtgaggaatttttaaaagaaaatttaattttaccaaagaagttacacaggtggcaaataaaaacattaaaaaatgctcaatatcaggaagttttagggaaatgcaatgaaaaccacagtgagataccactattcatacattcaaagagctaaaataaaaaagattagccacatgaagcactggcagggatgtaaaggaactgggactctcatacacccttggtgggactacaataggaaacatccatttagatcaaatttggcatttcttaaaatgttaaacattcacctacattgtaactaagacattacagtttgagttattaacacgaggaaaataaaacacatatccatataaagaaatgaa

SEQ ID NO: 90691 - DNA, 309 bp, Homo sapiens
agtttgaaggggatcccttctctacagaatttgggatattctctattgttgctaaacgtccagcacatactaatcaactctgattagaaaatttaaatgccccattttcttcttctctgggatacttcaccatacatacatatagacaaacttatatataaatgtgtatttgtgtgtgtgtatatatatataaatacccatacatgcatataatgtttgttctaaaggttctctgtagtttttccctgttttctccttctgcccactgtttcctatcttatcaccatcactgaattgccaggcagacat

SEQ ID NO: 90692 - DNA, 324 bp, Homo sapiens
ccatgcttagaagggccctgttcttggtttaatgctctactattgccttcttaatcatatttgaacaaggagttctgcttttccttttgccctttaaattagatagccagtcctggtgctaactaaccacttttctaggtattatccctttagttttcactgaaaccctgagataagttatattgccctagttttcacagttcaggaaatggaagctcacagaggtcaggtaacttgtccaagctcccatagttcttatatttacatgctggtggagccagcatgtgaatataagaagtctgaccctagagccttattcttaat

SEQ ID NO: 90693 - DNA, 652 bp, Homo sapiens
tcagtgatggtgctgtgaattctttgtaagtgaagtgtcccctcagcatgccagggttctgttaaatcagttaatgctgttccctgcttctctggttcattgattgtagtttggggatatagatatttcttttatttaagatggagtttatttttgtttcttatcctccttattgcttgggagaaatgtcacaaatttgttgtaagatttaaaattagactctttgagtactataaatttttcatcaaacatatgcagaaaaagaatagaaatgaaaataaatgggctggatgtggtagctcacacctgtaatcccagcacttttgggaggcctactcaggcagattgcttgaggctaggagtttcagaccagccagggcatttctacaaaaaatacaaaaaaaaattagctgggtatgatgatgtgcacctgttgtcccagctcctcaggaggctgaggcagaaggatcacctgagctggggagatcaagtctgcagtgagctggcctgggcggcagagcaagaccatgtctcagaaaaaaaaaattgggcttcattttctactatttcaggccaagtgtctttcaatagggagatctgctttatcttccttcccagttatttattctgtcagtggttcccaggttttttt

SEQ ID NO: 90694 - DNA, 943 bp, Homo sapiens
ctcttgacttgggctattctccttacagtttcttgcaaggttttcctaaaatgcacatctgatcatgtcacatcctcttttaaaatctgttaagtctctctgctgcctttaggataaaatgtaaaatcttttgcctggaatgtgaggctgtccctggcttagtgctagctgagacctctagcctgggaggccctcttgcaatctgaacccatccatttcacacttctgcctgcaagtcccttcatacctctccccatccacactggctcagaggctaccattgagacagccagatgggagggggtccccggaaaaactccaaccagcctgcccactagggtagagccttgggaagtttgtgctgtttgcagagggggcggggtggtggtgggggagccaggccccctcctcttcctgtgtgaaacctggaattcgaactatgaggcaggaagctctctagcaggggactctggccttgcagggagtccctgtttcccccttttcttcctttcacccagcaaaaccctgtcttactcattcaaattgtctgcgagcctgaattttcattgccgtgggacaaaggaccccatctttagctgaactaaggaaaagtcctgcaacaccatctttccctagctgctctgacagtcagcttctatagctgcattatgagttttcctaccctcagactgaactctatgaagaaatgggctgtgtctttttttctatacagacccagggcctagcccactgccatatttaataaacaaatgtatcgaccatttgtgtcaacaaatatttttattttttactttgatgagtgaatctcctggccttgtgtgaatttcatcttacagtgaagattattactaggagttctaatctctttcaaggtctacatatccattgcacatcaattttcttcttgaaagctcccagattt

SEQ ID NO: 90695 - DNA, 4161 bp, Homo sapiens
caggaatatcttgttttctttaatccatcagggggttgtcgcacttattaagtcccacagctgcagtttagcacggaggggctgtcacgtcaccaggcctccctgaaagtcctccgctccagctctgcgattggcgctggggtaacaggaggggaagcgggtgcttttcatcgagcctgcaagaggggggcccaggcatcgaggctggggagtcgtgggtagagccccgattccagccaagacgccacaggacataagtaagcgtggagggcaaaatgactacccaagcgcaattctgtaaggccgaagggacgttcttccaacctcttaaatttcccgggtgccacgcccctcaattgacggccctggattccaaggtgtcgcgccggaagtgacctcacggtggtggcgtggagacgtgggggcgcttccggcagcggcggcggtggtgaaggccgatgctgtgggggtgggcgtggagagaattcttctgtgggtcctctggtgttgagtggtcggcttggtgtggtgtgcggaggagctccaggcccgtcggcgcggagtggtctcacgtgtgaaacatggctacagattggctgggaagtattgtgtccatcaattgtggagatagcttgggtgtctatcagggaagagtgtcagctgtggatcaggtcagccagaccatttctctcacccggcctttccataatggagtgaagtgtcttgttccagaagtcaccttcagggcaggtgacattacggagttaaaaattctggagataccaggacctggagacaaccaacattttggagaccttcatcaaacagaattaggcccctctggtgctggctgccaagtgggcatcaatcagaatggcacaggcaagtttgtcaagaagccagcctcttccagcagtgcccctcagaatatccctaagaggacagatgtgaagagccaggatgttgccgtttccccgcagcagcaacagtgctcaaagagctatgtcgacaggcacatggaatccttgagtcagtccaaaagtttccgtcgtcggcacaactcctggtcatctagtagcaggcacccaaatcaggcaactcccaagaaaagtggtttaaagaatggccagatgaagaataaagatgacgagtgcttcggggatgatattgaggagatcccagacacagattttgattttgaagggaacctggctctttttgacaaggcagctgtgtttgaggagattgatacctatgaaaggagaagtggtacccgttcccggggcatcccaaatgaaaggcccactcggtaccgccatgatgagaacatcttggagtccgagcccattgtctatcgacggatcatagtgccccacaacgtgagcaaggagttctgcacggactctggcctggttgtcccaagtatttcctatgagctgcataaaaagctgttgtccgtggctgagaagcatgggctgacccttgagcggagactggagatgacaggtgtgtgtgccagtcagatggcactgaccctcctcggaggacctaacaggttgaatcccaaaaatgttcaccagaggcctacagtggctctactgtgtggacctcatgtgaagggggctcagggtatcagctgtggaaggcacctagccaaccatgatgtccaggtcatccttttcctgcccaattttgtcaagatgttggaatctatcaccaatgagctgtcgctcttcagcaagacccaaggccaacaagtgtctagcctcaaagatctgcccactagccctgtggacctggtcatcaactgcctggattgccctgagaacgtcttcctgcgcgatcaaccctggtacaaggcagctgtggcctgggccaaccagaaccgggcaccagtactcagcatagaccctcctgtgcatgaagtcgaacagggcattgatgccaaatggtcactggcactgggcctgcctctgccactgggggagcacgcaggccgtatctatttgtgcgacattggcattccccagcaggtcttccaggaggtgggcatcaactaccactcgccctttggctgcaagtttgttatcccactgcactctgcttagagggttcctgcgcaggcaggactctgctgtcccctgctgctcctgataacaaacgccttaaggatatgaagcttcatggaccttgttaaagttttttctcttttgggtttgtttcttctgtgagagaacagaacttacttaaaactgacctgtcacttgctcttagccagggaagtctttcccactgggttccgggctgggtggcaggctgagcgtgcagcaactccaggcatctctaccctcagccccctgcacggccaggtgggcctttgtttacagccgtaggcagctctcaagactgtgtttcaggtttacagccactgggcctgggcacacacattgaagagtgggccaggtcctgtctgggggcctgtacctgctctatttcagagcttgtggctttgtgtctcccctgctttccccacgcagacagcccttcctctgtagaaccagctgcacggcagctgtccaccagagggcagacctgcactctccattcatgtccagggctgtgacagaccaggccttcccctagccccacaagttgatttggggggttttgacccttactcctgagctgatccaagttttatgctgatttttccaaggatctctccctccttttccctccatcactcagaggtagggaagggggcggcattaggatggtgttactgtattgggattttatgttgttctgtcgtcttcagcacaggtagtataaggttatattactgtagaaccacagtgcccatcttgccagcagtgcccgcccccaccctcaaagctgagcaggttgagcctttgcctagtctggggccagacccctcagatggggatatccctgggggagcctggtgctgaaccagaagaggcttcctggtgcttctgtcctaggccaccactcctccagccctttgcccgcacatacatgccccacctactctttcatcccctctgcccttcccctgaaacggtcctttgcagctgtcatcccagagcaggcagatgggctcccgtgcttgagctccaccccagctcttacatcatctgggctttgaaccttttacatttgtccagtctagatgagtaggcttggggccagcaccctgtctcaaagatggcaaaatgaggctagttctggatgagctagctggtgtgggttccaaccataggaacacactgatgctcaaatcctaaggtgccaagctctaggccctggaggctggtagaacaggatctatgcctggaatcctggcagggattcctgtcaaggacttgtgtttaagcctgcttcagggcttcaggctgcttctgctctgtgtctgcccaggctggctgagcgggtggatgggtggacagaagggctcaccaaggattgtggacatagggtaggccctggtaccacgggtttcaggctgttatcacttcccttgtaggaacatagccagaagcagatgagccagggtagagggctggcccctcctctcatcttcccttcagtcttaaattgtctccagcgatgggaagaggccagggactgtaacccttgtgctgtgtattctctgagcctctgctcactctcagggccaagcagctcccaagccggggccctctcttggccaaaatctgaggagcagtctaggttacaggctttttggtaggtaggttctggctgcctgttaatgcagttaggccccctgattaggtacagtgagaaacaagctagaacaaccctggcccagaagactgtccactccagcaagatccagggatgatagccttgcagggccactgggagtttgtgcccaagcttctccctcttctctccccagggggcactgggactggtccctgccctcatccttagcctgggccttccccagaggtattaaagagaagtatgattcctctgtcttcagttcttttcaggggcatcctgcccatagtacccagttcccaaggggcccccagtcacgtggtgaagcctagcactcatgcagctcttagggaaccaaaaaccagcactgaaataaagctgaatgactgactg

SEQ ID NO: 90696 - DNA, 4332 bp, Homo sapiens
caggaatatcttgttttctttaatccatcagggggttgtcgcacttattaagtcccacagctgcagtttagcacggaggggctgtcacgtcaccaggcctccctgaaagtcctccgctccagctctgcgattggcgctggggtaacaggaggggaagcgggtgcttttcatcgagcctgcaagaggggggcccaggcatcgaggctggggagtcgtgggtagagccccgattccagccaagacgccacaggacataagtaagcgtggagggcaaaatgactacccaagcgcaattctgtaaggccgaagggacgttcttccaacctcttaaatttcccgggtgccacgcccctcaattgacggccctggattccaaggtgtcgcgccggaagtgacctcacggtggtggcgtggagacgtgggggcgcttccggcagcggcggcggtggtgaaggccgatgctgtgggggtgggcgtggagagaattcttctgtgggtcctctggtgttgagtggtcggcttggtgtggtgtgcggaggagctccaggcccgtcggcgcggagggtcttgctgtgttgcccagcctggtcttgaattcctggactcaagtgatgctcctgccttggcttcccaaactcctggaattacaactcaatgaatgacggtttttgttgctccacatcctcgtcagcatttggtgttgtcagtgttttggatttcggccattctgacagtggtctcacgtgtgaaacatggctacagattggctgggaagtattgtgtccatcaattgtggagatagcttgggtgtctatcagggaagagtgtcagctgtggatcaggtcagccagaccatttctctcacccggcctttccataatggagtgaagtgtcttgttccagaagtcaccttcagggcaggtgacattacggagttaaaaattctggagataccaggacctggagacaaccaacattttggagaccttcatcaaacagaattaggcccctctggtgctggctgccaagtgggcatcaatcagaatggcacaggcaagtttgtcaagaagccagcctcttccagcagtgcccctcagaatatccctaagaggacagatgtgaagagccaggatgttgccgtttccccgcagcagcaacagtgctcaaagagctatgtcgacaggcacatggaatccttgagtcagtccaaaagtttccgtcgtcggcacaactcctggtcatctagtagcaggcacccaaatcaggcaactcccaagaaaagtggtttaaagaatggccagatgaagaataaagatgacgagtgcttcggggatgatattgaggagatcccagacacagattttgattttgaagggaacctggctctttttgacaaggcagctgtgtttgaggagattgatacctatgaaaggagaagtggtacccgttcccggggcatcccaaatgaaaggcccactcggtaccgccatgatgagaacatcttggagtccgagcccattgtctatcgacggatcatagtgccccacaacgtgagcaaggagttctgcacggactctggcctggttgtcccaagtatttcctatgagctgcataaaaagctgttgtccgtggctgagaagcatgggctgacccttgagcggagactggagatgacaggtgtgtgtgccagtcagatggcactgaccctcctcggaggacctaacaggttgaatcccaaaaatgttcaccagaggcctacagtggctctactgtgtggacctcatgtgaagggggctcagggtatcagctgtggaaggcacctagccaaccatgatgtccaggtcatccttttcctgcccaattttgtcaagatgttggaatctatcaccaatgagctgtcgctcttcagcaagacccaaggccaacaagtgtctagcctcaaagatctgcccactagccctgtggacctggtcatcaactgcctggattgccctgagaacgtcttcctgcgcgatcaaccctggtacaaggcagctgtggcctgggccaaccagaaccgggcaccagtactcagcatagaccctcctgtgcatgaagtcgaacagggcattgatgccaaatggtcactggcactgggcctgcctctgccactgggggagcacgcaggccgtatctatttgtgcgacattggcattccccagcaggtcttccaggaggtgggcatcaactaccactcgccctttggctgcaagtttgttatcccactgcactctgcttagagggttcctgcgcaggcaggactctgctgtcccctgctgctcctgataacaaacgccttaaggatatgaagcttcatggaccttgttaaagttttttctcttttgggtttgtttcttctgtgagagaacagaacttacttaaaactgacctgtcacttgctcttagccagggaagtctttcccactgggttccgggctgggtggcaggctgagcgtgcagcaactccaggcatctctaccctcagccccctgcacggccaggtgggcctttgtttacagccgtaggcagctctcaagactgtgtttcaggtttacagccactgggcctgggcacacacattgaagagtgggccaggtcctgtctgggggcctgtacctgctctatttcagagcttgtggctttgtgtctcccctgctttccccacgcagacagcccttcctctgtagaaccagctgcacggcagctgtccaccagagggcagacctgcactctccattcatgtccagggctgtgacagaccaggccttcccctagccccacaagttgatttggggggttttgacccttactcctgagctgatccaagttttatgctgatttttccaaggatctctccctccttttccctccatcactcagaggtagggaagggggcggcattaggatggtgttactgtattgggattttatgttgttctgtcgtcttcagcacaggtagtataaggttatattactgtagaaccacagtgcccatcttgccagcagtgcccgcccccaccctcaaagctgagcaggttgagcctttgcctagtctggggccagacccctcagatggggatatccctgggggagcctggtgctgaaccagaagaggcttcctggtgcttctgtcctaggccaccactcctccagccctttgcccgcacatacatgccccacctactctttcatcccctctgcccttcccctgaaacggtcctttgcagctgtcatcccagagcaggcagatgggctcccgtgcttgagctccaccccagctcttacatcatctgggctttgaaccttttacatttgtccagtctagatgagtaggcttggggccagcaccctgtctcaaagatggcaaaatgaggctagttctggatgagctagctggtgtgggttccaaccataggaacacactgatgctcaaatcctaaggtgccaagctctaggccctggaggctggtagaacaggatctatgcctggaatcctggcagggattcctgtcaaggacttgtgtttaagcctgcttcagggcttcaggctgcttctgctctgtgtctgcccaggctggctgagcgggtggatgggtggacagaagggctcaccaaggattgtggacatagggtaggccctggtaccacgggtttcaggctgttatcacttcccttgtaggaacatagccagaagcagatgagccagggtagagggctggcccctcctctcatcttcccttcagtcttaaattgtctccagcgatgggaagaggccagggactgtaacccttgtgctgtgtattctctgagcctctgctcactctcagggccaagcagctcccaagccggggccctctcttggccaaaatctgaggagcagtctaggttacaggctttttggtaggtaggttctggctgcctgttaatgcagttaggccccctgattaggtacagtgagaaacaagctagaacaaccctggcccagaagactgtccactccagcaagatccagggatgatagccttgcagggccactgggagtttgtgcccaagcttctccctcttctctccccagggggcactgggactggtccctgccctcatccttagcctgggccttccccagaggtattaaagagaagtatgattcctctgtcttcagttcttttcaggggcatcctgcccatagtacccagttcccaaggggcccccagtcacgtggtgaagcctagcactcatgcagctcttagggaaccaaaaaccagcactgaaataaagctgaatgactgactg

SEQ ID NO: 90697 - DNA, 3554 bp, Homo sapiens
  misc_feature (5)..(5): n is a, c, g, or t
ccggnctgctcaggtctccaaaatcttgggtgtctatcagggaagagtgtcagctgtggatcaggtcagccagaccatttctctcacccggcctttccataatggagtgaagtgtcttgttccagaagtcaccttcagggcaggtgacattacggagttaaaaattctggagataccaggacctggagacaaccaacattttggagaccttcatcaaacagaattaggcccctctggtgctggctgccaagtgggcatcaatcagaatggcacaggcaagtttgtcaagaagccagcctcttccagcagtgcccctcagaatatccctaagaggacagatgtgaagagccaggatgttgccgtttccccgcagcagcaacagtgctcaaagagctatgtcgacaggcacatggaatccttgagtcagtccaaaagtttccgtcgtcggcacaactcctggtcatctagtagcaggcacccaaatcaggcaactcccaagaaaagtggtttaaagaatggccagatgaagaataaagatgacgagtgcttcggggatgatattgaggagatcccagacacagattttgattttgaagggaacctggctctttttgacaaggcagctgtgtttgaggagattgatacctatgaaaggagaagtggtacccgttcccggggcatcccaaatgaaaggcccactcggtaccgccatgatgagaacatcttggagtccgagcccattgtctatcgacggatcatagtgccccacaacgtgagcaaggagttctgcacggactctggcctggttgtcccaagtatttcctatgagctgcataaaaagctgttgtccgtggctgagaagcatgggctgacccttgagcggagactggagatgacaggtgtgtgtgccagtcagatggcactgaccctcctcggaggacctaacaggttgaatcccaaaaatgttcaccagaggcctacagtggctctactgtgtggacctcatgtgaagggggctcagggtatcagctgtggaaggcacctagccaaccatgatgtccaggtcatccttttcctgcccaattttgtcaagatgttggaatctatcaccaatgagctgtcgctcttcagcaagacccaaggccaacaagtgtctagcctcaaagatctgcccactagccctgtggacctggtcatcaactgcctggattgccctgagaacgtcttcctgcgcgatcaaccctggtacaaggcagctgtggcctgggccaaccagaaccgggcaccagtactcagcatagaccctcctgtgcatgaagtcgaacagggcattgatgccaaatggtcactggcactgggcctgcctctgccactgggggagcacgcaggccgtatctatttgtgcgacattggcattccccagcaggtcttccaggaggtgggcatcaactaccactcgccctttggctgcaagtttgttatcccactgcactctgcttagagggttcctgcgcaggcaggactctgctgtcccctgctgctcctgataacaaacgccttaaggatatgaagcttcatggaccttgttaaagttttttctcttttgggtttgtttcttctgtgagagaacagaacttacttaaaactgacctgtcacttgctcttagccagggaagtctttcccactgggttccgggctgggtggcaggctgagcgtgcagcaactccaggcatctctaccctcagccccctgcacggccaggtgggcctttgtttacagccgtaggcagctctcaagactgtgtttcaggtttacagccactgggcctgggcacacacattgaagagtgggccaggtcctgtctgggggcctgtacctgctctatttcagagcttgtggctttgtgtctcccctgctttccccacgcagacagcccttcctctgtagaaccagctgcacggcagctgtccaccagagggcagacctgcactctccattcatgtccagggctgtgacagaccaggccttcccctagccccacaagttgatttggggggttttgacccttactcctgagctgatccaagttttatgctgatttttccaaggatctctccctccttttccctccatcactcagaggtagggaagggggcggcattaggatggtgttactgtattgggattttatgttgttctgtcgtcttcagcacaggtagtataaggttatattactgtagaaccacagtgcccatcttgccagcagtgcccgcccccaccctcaaagctgagcaggttgagcctttgcctagtctggggccagacccctcagatggggatatccctgggggagcctggtgctgaaccagaagaggcttcctggtgcttctgtcctaggccaccactcctccagccctttgcccgcacatacatgccccacctactctttcatcccctctgcccttcccctgaaacggtcctttgcagctgtcatcccagagcaggcagatgggctcccgtgcttgagctccaccccagctcttacatcatctgggctttgaaccttttacatttgtccagtctagatgagtaggcttggggccagcaccctgtctcaaagatggcaaaatgaggctagttctggatgagctagctggtgtgggttccaaccataggaacacactgatgctcaaatcctaaggtgccaagctctaggccctggaggctggtagaacaggatctatgcctggaatcctggcagggattcctgtcaaggacttgtgtttaagcctgcttcagggcttcaggctgcttctgctctgtgtctgcccaggctggctgagcgggtggatgggtggacagaagggctcaccaaggattgtggacatagggtaggccctggtaccacgggtttcaggctgttatcacttcccttgtaggaacatagccagaagcagatgagccagggtagagggctggcccctcctctcatcttcccttcagtcttaaattgtctccagcgatgggaagaggccagggactgtaacccttgtgctgtgtattctctgagcctctgctcactctcagggccaagcagctcccaagccggggccctctcttggccaaaatctgaggagcagtctaggttacaggctttttggtaggtaggttctggctgcctgttaatgcagttaggccccctgattaggtacagtgagaaacaagctagaacaaccctggcccagaagactgtccactccagcaagatccagggatgatagccttgcagggccactgggagtttgtgcccaagcttctccctcttctctccccagggggcactgggactggtccctgccctcatccttagcctgggccttccccagaggtattaaagagaagtatgattcctctgtcttcagttcttttcaggggcatcctgcccatagtacccagttcccaaggggcccccagtcacgtggtgaagcctagcactcatgcagctcttagggaaccaaaaaccagcactgaaataaagctgaatgactgactg

SEQ ID NO: 90698 - DNA, 3826 bp, Homo sapiens
caggaatatcttgttttctttaatccatcagggggttgtcgcacttattaagtcccacagctgcagtttagcacggaggggctgtcacgtcaccaggcctccctgaaagtcctccgctccagctctgcgattggcgctggggtaacaggaggggaagcgggtgcttttcatcgagcctgcaagaggggggcccaggcatcgaggctggggagtcgtgggtagagccccgattccagccaagacgccacaggacataagtaagcgtggagggcaaaatgactacccaagcgcaattctgtaaggccgaagggacgttcttccaacctcttaaatttcccgggtgccacgcccctcaattgacggccctggattccaaggtgtcgcgccggaagtgacctcacggtggtggcgtggagacgtgggggcgcttccggcagcggcggcggtggtgaaggccgatgctgtgggggtgggcgtggagagaattcttctgtgggtcctctggtgttgagtggtcggcttggtgtggtgtgcggaggagctccaggcccgtcggcgcggagtggtctcacgtgtgaaacatggctacagattggctgggaagtattgtgtccatcaattgtggagatagcttgggtgtctatcagggaagagtgtcagctgtggatcaggtcagccagaccatttctctcacccggcctttccataatggagtgaagtgtcttgttccagaagtcaccttcagggcaggtgacattacggagttaaaaattctggagataccaggacctggagacaaccaacattttggagaccttcatcaaacagaattaggcccctctggtgctggctgccaagtgggcatcaatcagaatggcacaggcaagtttgtcaagaagccagcctcttccagcagtgcccctcagaatatccctaagaggacagatgtgaagagccaggatgttgccgtttccccgcagcagcaacagtgctcaaagagctatgtcgacaggcacatggaatccttgagtcagtccaaaagtttccgtcgtcggcacaactcctgactctggcctggttgtcccaagtatttcctatgagctgcataaaaagctgttgtccgtggctgagaagcatgggctgacccttgagcggagactggagatgacaggtgtgtgtgccagtcagatggcactgaccctcctcggaggacctaacaggttgaatcccaaaaatgttcaccagaggcctacagtggctctactgtgtggacctcatgtgaagggggctcagggtatcagctgtggaaggcacctagccaaccatgatgtccaggtcatccttttcctgcccaattttgtcaagatgttggaatctatcaccaatgagctgtcgctcttcagcaagacccaaggccaacaagtgtctagcctcaaagatctgcccactagccctgtggacctggtcatcaactgcctggattgccctgagaacgtcttcctgcgcgatcaaccctggtacaaggcagctgtggcctgggccaaccagaaccgggcaccagtactcagcatagaccctcctgtgcatgaagtcgaacagggcattgatgccaaatggtcactggcactgggcctgcctctgccactgggggagcacgcaggccgtatctatttgtgcgacattggcattccccagcaggtcttccaggaggtgggcatcaactaccactcgccctttggctgcaagtttgttatcccactgcactctgcttagagggttcctgcgcaggcaggactctgctgtcccctgctgctcctgataacaaacgccttaaggatatgaagcttcatggaccttgttaaagttttttctcttttgggtttgtttcttctgtgagagaacagaacttacttaaaactgacctgtcacttgctcttagccagggaagtctttcccactgggttccgggctgggtggcaggctgagcgtgcagcaactccaggcatctctaccctcagccccctgcacggccaggtgggcctttgtttacagccgtaggcagctctcaagactgtgtttcaggtttacagccactgggcctgggcacacacattgaagagtgggccaggtcctgtctgggggcctgtacctgctctatttcagagcttgtggctttgtgtctcccctgctttccccacgcagacagcccttcctctgtagaaccagctgcacggcagctgtccaccagagggcagacctgcactctccattcatgtccagggctgtgacagaccaggccttcccctagccccacaagttgatttggggggttttgacccttactcctgagctgatccaagttttatgctgatttttccaaggatctctccctccttttccctccatcactcagaggtagggaagggggcggcattaggatggtgttactgtattgggattttatgttgttctgtcgtcttcagcacaggtagtataaggttatattactgtagaaccacagtgcccatcttgccagcagtgcccgcccccaccctcaaagctgagcaggttgagcctttgcctagtctggggccagacccctcagatggggatatccctgggggagcctggtgctgaaccagaagaggcttcctggtgcttctgtcctaggccaccactcctccagccctttgcccgcacatacatgccccacctactctttcatcccctctgcccttcccctgaaacggtcctttgcagctgtcatcccagagcaggcagatgggctcccgtgcttgagctccaccccagctcttacatcatctgggctttgaaccttttacatttgtccagtctagatgagtaggcttggggccagcaccctgtctcaaagatggcaaaatgaggctagttctggatgagctagctggtgtgggttccaaccataggaacacactgatgctcaaatcctaaggtgccaagctctaggccctggaggctggtagaacaggatctatgcctggaatcctggcagggattcctgtcaaggacttgtgtttaagcctgcttcagggcttcaggctgcttctgctctgtgtctgcccaggctggctgagcgggtggatgggtggacagaagggctcaccaaggattgtggacatagggtaggccctggtaccacgggtttcaggctgttatcacttcccttgtaggaacatagccagaagcagatgagccagggtagagggctggcccctcctctcatcttcccttcagtcttaaattgtctccagcgatgggaagaggccagggactgtaacccttgtgctgtgtattctctgagcctctgctcactctcagggccaagcagctcccaagccggggccctctcttggccaaaatctgaggagcagtctaggttacaggctttttggtaggtaggttctggctgcctgttaatgcagttaggccccctgattaggtacagtgagaaacaagctagaacaaccctggcccagaagactgtccactccagcaagatccagggatgatagccttgcagggccactgggagtttgtgcccaagcttctccctcttctctccccagggggcactgggactggtccctgccctcatccttagcctgggccttccccagaggtattaaagagaagtatgattcctctgtcttcagttcttttcaggggcatcctgcccatagtacccagttcccaaggggcccccagtcacgtggtgaagcctagcactcatgcagctcttagggaaccaaaaaccagcactgaaataaagctgaatgactgactg

SEQ ID NO: 90699 - DNA, 4250 bp, Homo sapiens
caggaatatcttgttttctttaatccatcagggggttgtcgcacttattaagtcccacagctgcagtttagcacggaggggctgtcacgtcaccaggcctccctgaaagtcctccgctccagctctgcgattggcgctggggtaacaggaggggaagcgggtgcttttcatcgagcctgcaagaggggggcccaggcatcgaggctggggagtcgtgggtagagccccgattccagccaagacgccacaggacataagtaagcgtggagggcaaaatgactacccaagcgcaattctgtaaggccgaagggacgttcttccaacctcttaaatttcccgggtgccacgcccctcaattgacggccctggattccaaggtgtcgcgccggaagtgacctcacggtggtggcgtggagacgtgggggcgcttccggcagcggcggcggtggtgaaggccgatgctgtgggggtgggcgtggagagaattcttctgtgggtcctctggtgttgagtggtcggcttggtgtggtgtgcggaggagctccaggcccgtcggcgcggagggtcttgctgtgttgcccagcctggtcttgaattcctggactcaagtgatgctcctgccttggcttcccaaactcctggaattacaacttggtctcacgtgtgaaacatggctacagattggctgggaagtattgtgtccatcaattgtggagatagcttgggtgtctatcagggaagagtgtcagctgtggatcaggtcagccagaccatttctctcacccggcctttccataatggagtgaagtgtcttgttccagaagtcaccttcagggcaggtgacattacggagttaaaaattctggagataccaggacctggagacaaccaacattttggagaccttcatcaaacagaattaggcccctctggtgctggctgccaagtgggcatcaatcagaatggcacaggcaagtttgtcaagaagccagcctcttccagcagtgcccctcagaatatccctaagaggacagatgtgaagagccaggatgttgccgtttccccgcagcagcaacagtgctcaaagagctatgtcgacaggcacatggaatccttgagtcagtccaaaagtttccgtcgtcggcacaactcctggtcatctagtagcaggcacccaaatcaggcaactcccaagaaaagtggtttaaagaatggccagatgaagaataaagatgacgagtgcttcggggatgatattgaggagatcccagacacagattttgattttgaagggaacctggctctttttgacaaggcagctgtgtttgaggagattgatacctatgaaaggagaagtggtacccgttcccggggcatcccaaatgaaaggcccactcggtaccgccatgatgagaacatcttggagtccgagcccattgtctatcgacggatcatagtgccccacaacgtgagcaaggagttctgcacggactctggcctggttgtcccaagtatttcctatgagctgcataaaaagctgttgtccgtggctgagaagcatgggctgacccttgagcggagactggagatgacaggtgtgtgtgccagtcagatggcactgaccctcctcggaggacctaacaggttgaatcccaaaaatgttcaccagaggcctacagtggctctactgtgtggacctcatgtgaagggggctcagggtatcagctgtggaaggcacctagccaaccatgatgtccaggtcatccttttcctgcccaattttgtcaagatgttggaatctatcaccaatgagctgtcgctcttcagcaagacccaaggccaacaagtgtctagcctcaaagatctgcccactagccctgtggacctggtcatcaactgcctggattgccctgagaacgtcttcctgcgcgatcaaccctggtacaaggcagctgtggcctgggccaaccagaaccgggcaccagtactcagcatagaccctcctgtgcatgaagtcgaacagggcattgatgccaaatggtcactggcactgggcctgcctctgccactgggggagcacgcaggccgtatctatttgtgcgacattggcattccccagcaggtcttccaggaggtgggcatcaactaccactcgccctttggctgcaagtttgttatcccactgcactctgcttagagggttcctgcgcaggcaggactctgctgtcccctgctgctcctgataacaaacgccttaaggatatgaagcttcatggaccttgttaaagttttttctcttttgggtttgtttcttctgtgagagaacagaacttacttaaaactgacctgtcacttgctcttagccagggaagtctttcccactgggttccgggctgggtggcaggctgagcgtgcagcaactccaggcatctctaccctcagccccctgcacggccaggtgggcctttgtttacagccgtaggcagctctcaagactgtgtttcaggtttacagccactgggcctgggcacacacattgaagagtgggccaggtcctgtctgggggcctgtacctgctctatttcagagcttgtggctttgtgtctcccctgctttccccacgcagacagcccttcctctgtagaaccagctgcacggcagctgtccaccagagggcagacctgcactctccattcatgtccagggctgtgacagaccaggccttcccctagccccacaagttgatttggggggttttgacccttactcctgagctgatccaagttttatgctgatttttccaaggatctctccctccttttccctccatcactcagaggtagggaagggggcggcattaggatggtgttactgtattgggattttatgttgttctgtcgtcttcagcacaggtagtataaggttatattactgtagaaccacagtgcccatcttgccagcagtgcccgcccccaccctcaaagctgagcaggttgagcctttgcctagtctggggccagacccctcagatggggatatccctgggggagcctggtgctgaaccagaagaggcttcctggtgcttctgtcctaggccaccactcctccagccctttgcccgcacatacatgccccacctactctttcatcccctctgcccttcccctgaaacggtcctttgcagctgtcatcccagagcaggcagatgggctcccgtgcttgagctccaccccagctcttacatcatctgggctttgaaccttttacatttgtccagtctagatgagtaggcttggggccagcaccctgtctcaaagatggcaaaatgaggctagttctggatgagctagctggtgtgggttccaaccataggaacacactgatgctcaaatcctaaggtgccaagctctaggccctggaggctggtagaacaggatctatgcctggaatcctggcagggattcctgtcaaggacttgtgtttaagcctgcttcagggcttcaggctgcttctgctctgtgtctgcccaggctggctgagcgggtggatgggtggacagaagggctcaccaaggattgtggacatagggtaggccctggtaccacgggtttcaggctgttatcacttcccttgtaggaacatagccagaagcagatgagccagggtagagggctggcccctcctctcatcttcccttcagtcttaaattgtctccagcgatgggaagaggccagggactgtaacccttgtgctgtgtattctctgagcctctgctcactctcagggccaagcagctcccaagccggggccctctcttggccaaaatctgaggagcagtctaggttacaggctttttggtaggtaggttctggctgcctgttaatgcagttaggccccctgattaggtacagtgagaaacaagctagaacaaccctggcccagaagactgtccactccagcaagatccagggatgatagccttgcagggccactgggagtttgtgcccaagcttctccctcttctctccccagggggcactgggactggtccctgccctcatccttagcctgggccttccccagaggtattaaagagaagtatgattcctctgtcttcagttcttttcaggggcatcctgcccatagtacccagttcccaaggggcccccagtcacgtggtgaagcctagcactcatgcagctcttagggaaccaaaaaccagcactgaaataaagctgaatgactgactg

SEQ ID NO: 90700 - DNA, 4465 bp, Homo sapiens
caggaatatcttgttttctttaatccatcagggggttgtcgcacttattaagtcccacagctgcagtttagcacggaggggctgtcacgtcaccaggcctccctgaaagtcctccgctccagctctgcgattggcgctggggtaacaggaggggaagcgggtgcttttcatcgagcctgcaagaggggggcccaggcatcgaggctggggagtcgtgggtagagccccgattccagccaagacgccacaggacataagtaagcgtggagggcaaaatgactacccaagcgcaattctgtaaggccgaagggacgttcttccaacctcttaaatttcccgggtgccacgcccctcaattgacggccctggattccaaggtgtcgcgccggaagtgacctcacggtggtggcgtggagacgtgggggcgcttccggcagcggcggcggtggtgaaggccgatgctgtgggggtgggcgtggagagaattcttctgtgggtcctctggtgttgagtggtcggcttggtgtggtgtgcggaggagctccaggcccgtcggcgcggaggctttcaggtataggctgggtcactagtcttaaaacatttcttcttgagaatgtctaaaagactgtggaatctgttagatcttatatacttttaagttggcacctgaaacttttcatcctagatttacatagtggtcttgctgtgttgcccagcctggtcttgaattcctggactcaagtgatgctcctgccttggcttcccaaactcctggaattacaactcaatgaatgacggtttttgttgctccacatcctcgtcagcatttggtgttgtcagtgttttggatttcggccattctgacagtggtctcacgtgtgaaacatggctacagattggctgggaagtattgtgtccatcaattgtggagatagcttgggtgtctatcagggaagagtgtcagctgtggatcaggtcagccagaccatttctctcacccggcctttccataatggagtgaagtgtcttgttccagaagtcaccttcagggcaggtgacattacggagttaaaaattctggagataccaggacctggagacaaccaacattttggagaccttcatcaaacagaattaggcccctctggtgctggctgccaagtgggcatcaatcagaatggcacaggcaagtttgtcaagaagccagcctcttccagcagtgcccctcagaatatccctaagaggacagatgtgaagagccaggatgttgccgtttccccgcagcagcaacagtgctcaaagagctatgtcgacaggcacatggaatccttgagtcagtccaaaagtttccgtcgtcggcacaactcctggtcatctagtagcaggcacccaaatcaggcaactcccaagaaaagtggtttaaagaatggccagatgaagaataaagatgacgagtgcttcggggatgatattgaggagatcccagacacagattttgattttgaagggaacctggctctttttgacaaggcagctgtgtttgaggagattgatacctatgaaaggagaagtggtacccgttcccggggcatcccaaatgaaaggcccactcggtaccgccatgatgagaacatcttggagtccgagcccattgtctatcgacggatcatagtgccccacaacgtgagcaaggagttctgcacggactctggcctggttgtcccaagtatttcctatgagctgcataaaaagctgttgtccgtggctgagaagcatgggctgacccttgagcggagactggagatgacaggtgtgtgtgccagtcagatggcactgaccctcctcggaggacctaacaggttgaatcccaaaaatgttcaccagaggcctacagtggctctactgtgtggacctcatgtgaagggggctcagggtatcagctgtggaaggcacctagccaaccatgatgtccaggtcatccttttcctgcccaattttgtcaagatgttggaatctatcaccaatgagctgtcgctcttcagcaagacccaaggccaacaagtgtctagcctcaaagatctgcccactagccctgtggacctggtcatcaactgcctggattgccctgagaacgtcttcctgcgcgatcaaccctggtacaaggcagctgtggcctgggccaaccagaaccgggcaccagtactcagcatagaccctcctgtgcatgaagtcgaacagggcattgatgccaaatggtcactggcactgggcctgcctctgccactgggggagcacgcaggccgtatctatttgtgcgacattggcattccccagcaggtcttccaggaggtgggcatcaactaccactcgccctttggctgcaagtttgttatcccactgcactctgcttagagggttcctgcgcaggcaggactctgctgtcccctgctgctcctgataacaaacgccttaaggatatgaagcttcatggaccttgttaaagttttttctcttttgggtttgtttcttctgtgagagaacagaacttacttaaaactgacctgtcacttgctcttagccagggaagtctttcccactgggttccgggctgggtggcaggctgagcgtgcagcaactccaggcatctctaccctcagccccctgcacggccaggtgggcctttgtttacagccgtaggcagctctcaagactgtgtttcaggtttacagccactgggcctgggcacacacattgaagagtgggccaggtcctgtctgggggcctgtacctgctctatttcagagcttgtggctttgtgtctcccctgctttccccacgcagacagcccttcctctgtagaaccagctgcacggcagctgtccaccagagggcagacctgcactctccattcatgtccagggctgtgacagaccaggccttcccctagccccacaagttgatttggggggttttgacccttactcctgagctgatccaagttttatgctgatttttccaaggatctctccctccttttccctccatcactcagaggtagggaagggggcggcattaggatggtgttactgtattgggattttatgttgttctgtcgtcttcagcacaggtagtataaggttatattactgtagaaccacagtgcccatcttgccagcagtgcccgcccccaccctcaaagctgagcaggttgagcctttgcctagtctggggccagacccctcagatggggatatccctgggggagcctggtgctgaaccagaagaggcttcctggtgcttctgtcctaggccaccactcctccagccctttgcccgcacatacatgccccacctactctttcatcccctctgcccttcccctgaaacggtcctttgcagctgtcatcccagagcaggcagatgggctcccgtgcttgagctccaccccagctcttacatcatctgggctttgaaccttttacatttgtccagtctagatgagtaggcttggggccagcaccctgtctcaaagatggcaaaatgaggctagttctggatgagctagctggtgtgggttccaaccataggaacacactgatgctcaaatcctaaggtgccaagctctaggccctggaggctggtagaacaggatctatgcctggaatcctggcagggattcctgtcaaggacttgtgtttaagcctgcttcagggcttcaggctgcttctgctctgtgtctgcccaggctggctgagcgggtggatgggtggacagaagggctcaccaaggattgtggacatagggtaggccctggtaccacgggtttcaggctgttatcacttcccttgtaggaacatagccagaagcagatgagccagggtagagggctggcccctcctctcatcttcccttcagtcttaaattgtctccagcgatgggaagaggccagggactgtaacccttgtgctgtgtattctctgagcctctgctcactctcagggccaagcagctcccaagccggggccctctcttggccaaaatctgaggagcagtctaggttacaggctttttggtaggtaggttctggctgcctgttaatgcagttaggccccctgattaggtacagtgagaaacaagctagaacaaccctggcccagaagactgtccactccagcaagatccagggatgatagccttgcagggccactgggagtttgtgcccaagcttctccctcttctctccccagggggcactgggactggtccctgccctcatccttagcctgggccttccccagaggtattaaagagaagtatgattcctctgtcttcagttcttttcaggggcatcctgcccatagtacccagttcccaaggggcccccagtcacgtggtgaagcctagcactcatgcagctcttagggaaccaaaaaccagcactgaaataaagctgaatgactgactg

SEQ ID NO: 90701 - DNA, 3658 bp, Homo sapiens
caggaatatcttgttttctttaatccatcagggggttgtcgcacttattaagtcccacagctgcagtttagcacggaggggctgtcacgtcaccaggcctccctgaaagtcctccgctccagctctgcgattggcgctggggtaacaggaggggaagcgggtgcttttcatcgagcctgcaagaggggggcccaggcatcgaggctggggagtcgtgggtagagccccgattccagccaagacgccacaggacataagtaagcgtggagggcaaaatgactacccaagcgcaattctgtaaggccgaagggacgttcttccaacctcttaaatttcccgggtgccacgcccctcaattgacggccctggattccaaggtgtcgcgccggaagtgacctcacggtggtggcgtggagacgtgggggcgcttccggcagcggcggcggtggtgaaggccgatgctgtgggggtgggcgtggagagaattcttctgtgggtcctctggtgttgagtggtcggcttggtgtggtgtgcggaggagctccaggcccgtcggcgcggaggtcatctagtagcaggcacccaaatcaggcaactcccaagaaaagtggtttaaagaatggccagatgaagaataaagatgacgagtgcttcggggatgatattgaggagatcccagacacagattttgattttgaagggaacctggctctttttgacaaggcagctgtgtttgaggagattgatacctatgaaaggagaagtggtacccgttcccggggcatcccaaatgaaaggcccactcggtaccgccatgatgagaacatcttggagtccgagcccattgtctatcgacggatcatagtgccccacaacgtgagcaaggagttctgcacggactctggcctggttgtcccaagtatttcctatgagctgcataaaaagctgttgtccgtggctgagaagcatgggctgacccttgagcggagactggagatgacaggtgtgtgtgccagtcagatggcactgaccctcctcggaggacctaacaggttgaatcccaaaaatgttcaccagaggcctacagtggctctactgtgtggacctcatgtgaagggggctcagggtatcagctgtggaaggcacctagccaaccatgatgtccaggtcatccttttcctgcccaattttgtcaagatgttggaatctatcaccaatgagctgtcgctcttcagcaagacccaaggccaacaagtgtctagcctcaaagatctgcccactagccctgtggacctggtcatcaactgcctggattgccctgagaacgtcttcctgcgcgatcaaccctggtacaaggcagctgtggcctgggccaaccagaaccgggcaccagtactcagcatagaccctcctgtgcatgaagtcgaacagggcattgatgccaaatggtcactggcactgggcctgcctctgccactgggggagcacgcaggccgtatctatttgtgcgacattggcattccccagcaggtcttccaggaggtgggcatcaactaccactcgccctttggctgcaagtttgttatcccactgcactctgcttagagggttcctgcgcaggcaggactctgctgtcccctgctgctcctgataacaaacgccttaaggatatgaagcttcatggaccttgttaaagttttttctcttttgggtttgtttcttctgtgagagaacagaacttacttaaaactgacctgtcacttgctcttagccagggaagtctttcccactgggttccgggctgggtggcaggctgagcgtgcagcaactccaggcatctctaccctcagccccctgcacggccaggtgggcctttgtttacagccgtaggcagctctcaagactgtgtttcaggtttacagccactgggcctgggcacacacattgaagagtgggccaggtcctgtctgggggcctgtacctgctctatttcagagcttgtggctttgtgtctcccctgctttccccacgcagacagcccttcctctgtagaaccagctgcacggcagctgtccaccagagggcagacctgcactctccattcatgtccagggctgtgacagaccaggccttcccctagccccacaagttgatttggggggttttgacccttactcctgagctgatccaagttttatgctgatttttccaaggatctctccctccttttccctccatcactcagaggtagggaagggggcggcattaggatggtgttactgtattgggattttatgttgttctgtcgtcttcagcacaggtagtataaggttatattactgtagaaccacagtgcccatcttgccagcagtgcccgcccccaccctcaaagctgagcaggttgagcctttgcctagtctggggccagacccctcagatggggatatccctgggggagcctggtgctgaaccagaagaggcttcctggtgcttctgtcctaggccaccactcctccagccctttgcccgcacatacatgccccacctactctttcatcccctctgcccttcccctgaaacggtcctttgcagctgtcatcccagagcaggcagatgggctcccgtgcttgagctccaccccagctcttacatcatctgggctttgaaccttttacatttgtccagtctagatgagtaggcttggggccagcaccctgtctcaaagatggcaaaatgaggctagttctggatgagctagctggtgtgggttccaaccataggaacacactgatgctcaaatcctaaggtgccaagctctaggccctggaggctggtagaacaggatctatgcctggaatcctggcagggattcctgtcaaggacttgtgtttaagcctgcttcagggcttcaggctgcttctgctctgtgtctgcccaggctggctgagcgggtggatgggtggacagaagggctcaccaaggattgtggacatagggtaggccctggtaccacgggtttcaggctgttatcacttcccttgtaggaacatagccagaagcagatgagccagggtagagggctggcccctcctctcatcttcccttcagtcttaaattgtctccagcgatgggaagaggccagggactgtaacccttgtgctgtgtattctctgagcctctgctcactctcagggccaagcagctcccaagccggggccctctcttggccaaaatctgaggagcagtctaggttacaggctttttggtaggtaggttctggctgcctgttaatgcagttaggccccctgattaggtacagtgagaaacaagctagaacaaccctggcccagaagactgtccactccagcaagatccagggatgatagccttgcagggccactgggagtttgtgcccaagcttctccctcttctctccccagggggcactgggactggtccctgccctcatccttagcctgggccttccccagaggtattaaagagaagtatgattcctctgtcttcagttcttttcaggggcatcctgcccatagtacccagttcccaaggggcccccagtcacgtggtgaagcctagcactcatgcagctcttagggaaccaaaaaccagcactgaaataaagctgaatgactgactg

SEQ ID NO: 90702 - DNA, 222 bp, Homo sapiens
tcaaggacctttggctgtttaaggacacattcaaatgcctaaccatagcgttcagtgttctcaacactgggccttagtttaaattttggttccagcttctggcccgtttgccctgtggtcccctgtgtattttagccgcatctctctgtgaagctcccagtgtgctttgcacagctccttgtctttgctcatgctgtgcccttacctggaatgcctttttcc

SEQ ID NO: 90703 - DNA, 192 bp, Homo sapiens
ttaaacagcaacccacccttattagatatcccacttccaaagtcatctcccctcccttccccagatgtttcaccatgtcccttgtctcagctgttagcagtagggagtggtggggggccatgcgcgtaggggagtcatgtgactcaggctaggccaatcgcactatttccctgagaagttaaactatgtcat

SEQ ID NO: 90704 - DNA, 369 bp, Homo sapiens
aagttcctgcccaacagtagtcccggctaccgaggaggctgaggcagcggtaggatcccttgagcatgggagctagtctgcagcctaggcaacatagtaagagcaggttaatattttaacctggccgggtgtggtggctcacacctgtaatcccagcactttgggaggccgagacgggcggatcacctgaggtcgggagttcaagagcagcctgacaaacatggagaaaccccatctctactaaaaatacaaaattagccaggcgtggtggcacatgcttgtaatcctagctgcttgggaagctgaggcaggagaattgcttgaacccgggaggcggaggttgcagtaagccgagatcacgccattgca

SEQ ID NO: 90705 - DNA, 440 bp, Homo sapiens
caggaaaaccctccttgcagggagctcatcttccgcctttcaaaacttcagggcgctcctcaggcatcgcacagggtaacggcttggacagcagcagcactggctgttcacaagcatcttgtggtttttcagagccctgtcctgccgcttggggcagcacttcctcccgccgggccctctcccttcctctctccagacgcctagtcctcacatgggcaccttccctttcctcaccctccagggtcgcccaaatcccatagcccttatcacgtgctgtggatgccaacacgcagccaagccactgtttctggggagcaaccaggggatcgggcagcccaggtaaaggctgcggtcccagagctgtgggaagggaggggacaggacaagaaggaaaggaaggaaaagcgtgcggaacctgcagtgcaattgttgggggaagc

SEQ ID NO: 90706 - DNA, 298 bp, Homo sapiens
tgataagcctagaagtattttcttttaagctatattgaacaaaaatgtttaaactgcataaaagtgcttgaatttatagtgtccatccaaacattgagaaatatgagccatacacatgtgtatgggggtcatgggctgttccttgtttatttttaccccgttcagacaaaaaaggtatttgacaattttgcccaagtggtttcttgccctctctagtgtttcttttgaaggacatcaggagataaacgtatttgttactggctcttcattagtgcaagttaatgctgtctcacatttg

SEQ ID NO: 90707 - DNA, 277 bp, Homo sapiens
tcccattgaatcagcatgatttttggcatttattaaatatattcaaggcataaaacatgatgttttgatgtacatatacatagtagcacgattactacactcaggctctcgtatatccattatctcacgtaattacctctttttttttcttttgtggtaagagcatttaaaatctactctctgcaaatttccagtacatcacatttcagaaatttaaaaaaaatcacatccatttctctaaaatatccaagagagattgttatattgttataaataa

SEQ ID NO: 90708 - DNA, 325 bp, Homo sapiens
ttttaagaaatatgcttcatttttataatgaaagtggataatctttagaatttgttgtaattagctttcatttattgtaaatgaatatggatgacatatcatatgataattcattttagaagttcagtcactctgtgagtaatctaagcccatccttgggctgttcaccaagtggtttacactctggaaaaagcatcagtttggttttaaacaaaggagatactatacagcaaaaagctcagagccttattttaaggcaaggaagtttaatccccttttcctaactaatcattgaatctagttgccttagaaataatatgcctta

SEQ ID NO: 90709 - DNA, 657 bp, Homo sapiens
  misc_feature (1)..(7): n is a, c, g, or t
  misc_feature (9)..(9): n is a, c, g, or t
nnnnnnntntatgtagagagatatagtatagcttttattttttttttgaaccaacccaacatttccactggcaactgtcaacatagcttatgacatgagcactgtttcttttttaattatttttttcttaaaaaatgtgtttaaaattaacaggtgttttttaatttcttcccccccccccttagaaaatgtatttatgtcaatgcagaaagcctaaagatccgtgggcagtttcgtgatgacatcttatgtctgtttatttgtgtgtttgtgtgcgtgttttaaagccaggtccttcccacattcgttgagaaaaggtctgtagggcacggagatctctttctccaaaaacccaggctccaagggattatgacaactaagattcctcttactggagcaagaactaccccataggctggaaaaatagcttcatgaagtttaagaacaagcaggaacatgggagaaatgaggaattccagttcctatcttgtaaaaatgctttcatatgtgacctgagggaccaggagaggtgaagggagcccctggttctcttataaaatctctaagtttttacaccacttcaagaaatatagtcagccctctttgtatagagcattaggaagcaagagcgtggtgaagctgacatttctcaggcac

SEQ ID NO: 90710 - DNA, 701 bp, Homo sapiens
gggccccttttgtgttgttcttgccaacgcagcagccatcctgctatatagactggctgtgcagccgcaggccccatcacactgaactcgcatcatccgtgtcaaccagccatggggaagatcaccttctatgaggacagggccttccagggccgcagctacgaaaccaccactgactgccccaacctgcagccgtatttcagccgctgcaactccatccgggtggagagcggctgctggatgctctatgagcgtcccaactaccaaggtcaacaatacttgctgcggcgaggggagtaccccgactaccagcaatggatgggcctcagcgactccatccgctcctgttgtctcatcccccaaacagtctcccacaggctgcggctgtacgagagggaagaccacaaaggcctcatgatggagctgagtgaagactgccccagcatccaggaccgcttccacctcagcgagatccgttccctccacgtgctggagggctgctgggtcctctacgagctgcccaactaccgggggcggcaatacctgctgaggccccaagagtacaggcggtgccaggactggggggccatggatgctaaggcaggctctttgcggagagtggtggatttgtattaaaatagcttaacactaccaatttcccattttggaacctaataaatatttagtctgcattgctggca

SEQ ID NO: 90711 - DNA, 647 bp, Homo sapiens
ccaccacaaccagcatcgtcaagtagcatacataaacgccgcgcgaccataattcccccctttactatcaccttctatgaggacagggccttccagggccgcagctacgaaaccaccactgactgccccaacctgcagccgtatttcagccgctgcaactccatccgggtggagagcggctgctggatgctctatgagcgtcccaactaccaaggtcaacaatacttgctgcggcgaggggagtaccccgactaccagcaatggatgggcctcagcgactccatccgctcctgttgtctcatcccccaaacagtctcccacaggctgcggctgtacgagagggaagaccacaaaggcctcatgatggagctgagtgaagactgccccagcatccaggaccgcttccacctcagcgagatccgttccctccacgtgctggagggctgctgggtcctctacgagctgcccaactaccgggggcggcaatacctgctgaggccccaagagtacaggcggtgccaggactggggggccatggatgctaaggcaggctctttgcggagagtggtggatttgtattaaaatagcttaacactaccaatttcccattttggaacctaataaatatttagtctgcattgctggca

SEQ ID NO: 90712 - DNA, 162 bp, Homo sapiens
tgaacacttaggttgcttttgactttttacaattaaaaatgaattattctgcgcttcagtgaataatcctgatcatacatccttgttcacatgtccctagaagggaaacactggggctcaaagcatgcacatttaaaaatctgttttggccaggcatggtgg

SEQ ID NO: 90713 - DNA, 417 bp, Homo sapiens
tcaaggggaccagactaccggacaagtaaatgctctcccttggccaggctctgccatctagcttgggttctttttgcctcctctttgacaatacagaaaatctcaccataccagatagcgcttctcaggcaatgtcttcaggaaagggaaagggagttcacagcaccacacagtgggcaaccccactattcccagagccatacctccagacagctccaggtttccctcaccaggctgatcggagagggcaccaatttcaatcattgccaaatgctaacatctaaatgttttggaaccaagtctatcatttttgtccagcattagagaagacgggggcataatggaaagggttgtgatctagaaagtggaggattgtggaatagtttctggttcatgctgtcctcatttataaaatga

SEQ ID NO: 90714 - DNA, 449 bp, Homo sapiens
cttaattgcagtgagacatggaaatgtcacttgtttatagctctattctctttcccccttattgtaatacatattacatctatatatgttacaaacccatcatactttgttataattattactttatataattttatgtctcttaagcttagagaagacagtagacagatattatttacaatgtttattatattaaccttcttagttactgtttctggttctcttctttattcctgtgaattcaagttaccatctggtgtcattttcttggtccattgcagttttgctcccactcaccttcttggtgttgctggcaaatatattacatttctatatattatgggcctagtgatacaattatatacatattgttttattacagttgcatttttaaatcagttaagaaaggagaaggaatatacatttaaactgtcttttttaactacata

SEQ ID NO: 90715 - DNA, 346 bp, Homo sapiens
cttcatctctgtgtgccaagtagtgtttccctaaatagatttattacaatgcttctattcgcctgttgttggacatttgggatgtttcaagtttttggcaataaataaaggtaccatgaatatttgtgtaaatatctttatatggatacatgctttcatttatcttcagtaaatacctaggagtggaatgactaggtagtttatgaagtgtatatttaattcctaaagaaactaccaaagtgttcaaatcttttgatcatttttataactgatttgtactgtattaacaagttgagttctttatatactctgaatgaagttgattctcatatatatataatgaaca

SEQ ID NO: 90716 - DNA, 291 bp, Homo sapiens
gcagctttcattttacacataaaaaccacggaccttccaaatagagacaatccatgcagaggaggaatgagacagacaagaggctagagcagaagacgcaggttatgggctcagcagtacactggtcaagtgggagaatgggatctctaaggatgtgggtgcagttttatgccaggaattaccattttaattccattatctgcccaaatcatctgttgtcttataaataacagaaatctgtttttcacagttctggtggccaaagtctgagatcagagtgccagcacgctt

SEQ ID NO: 90717 - DNA, 366 bp, Homo sapiens
gactcatactgtgtatattgttttataaactgttttttaattcaataacatatcttgaatttccaagtctaccagacttttctacagaatcaatttaaataattatggtctatcataaatatattactcttctcctatagctggacatttaggttgtttccaatgtttacccttataaacaatgccactatgagcaaccttataggtaaatctttctacaaatttttgacattttcctggagatagatttctgggccatagaaattgaggttgatttggggtggggggagttggtaagatttacctgtaaaggttgatttggggggtggggagttggtaagatttacctgtaatgcattaacttcc

SEQ ID NO: 90718 - DNA, 391 bp, Homo sapiens
gagccacattcttcccaaggcaacagggccagcttgcgtattagagtctggttaaggccttgcttgactccccttattcctacctcctggctcttcaggccacatggagagagatggccatcagtctcccttctctttagggactcattttgtgaaggaaagccatttcccacatagtttatggcaaagacaggacaggactagtcttagccacagtcacagaaaagagaaaatgtctttgttactttcttagctagcaaaacccatttcccagcctcttgatgtactcaaagcctaacctactctttttttttttttttttttttttttttttttttttttttatattccctcgagaggtaacccggttggatttgggacttgcggcctc

SEQ ID NO: 90719 - DNA, 360 bp, Homo sapiens
  misc_feature (66)..(66): n is a, c, g, or t
actctgcaccactggctgggaacaaatacatgctaacaaattcacacacaaaatcctgaatcatanggaaaattctagttagcctggaacacaggaagatatgcctttataccaacacgacctataaataactgacccaaagtgaatgtaccacaaagtaaaaggttttaattaattataaaaaccaaaagcaaaaaaagttgtttcaaaacagaccaacgtctttcatatcaacaaatattaagccaggaaattgacattgcttcaatccacggagcctattcagagttcatcagttttatatgaattcctttgagtgggttttatatttctgtgcaattttatcgcctgtagctttgt

SEQ ID NO: 90720 - DNA, 3253 bp, Homo sapiens
  misc_feature (1247)..(1247): n is a, c, g, or t
ggcgtggcctacatctccgctgtcctttccatctccttcgcccaccccttggccttcctcacgctcctgcccacctccatcagccagttcttctccggagctgtcctgggttctgaaatgttcgtcatcctcatgctctacctctggttcgccatcggcctggcctgcgccggcttctgctgccaccagctgctgttgatcctccgcgggcagaccctgccaccaggtgcggaagggggtggcagtgagggcccggaccctggcgcaagaacttacaagaggtcttcggaaagaggtggctgctgggcctgctggtccccatgttcaatgtcggaagtgagagctccaagcagcaggataagtagtagacactcccgtcagtttatctctctgtctctgtcttgactcctcctgagcataaaaccatggcagccttgtctccacccatgactcactacaaccttgtgctggtaaggtcctagcatcttcccctcaccttccacccatgagaacagcgtgagctggtggatcatgacaaggaggaaaaatgtccccccaggcatttctaggctcctcacgagccagccaggtggctgctagctgttaggctgcctctgctttctttccgtccccttgggatccctgctttccccctcttcctggctcatccattctccaccgtgtctcattcatcactgctgtctgctagagcccttcctctcagcccccatgttgggagaggggagtggattcttgctgctggtatgagactccctgggacctagaggctggcaaatgtttaaaatcaccacgtgtaagaggcagccaagtcagctctgccaactgctaggggagttgggaaagagtgggtgtgtgtccgcatcccctctgtaggaaaaagaacttagtagcttgctgctccctcaccaccccccaccaggttcaagaccctttttctgggagacagcaatcaatggcctgctttttccaaatgttattccctgtccgccctgccccatctggccggcccagcccagtccaggacctggctggatgcttcctgtccctggaactcttccagcctttctacttgatctccagcccccaggtctttgccagatgatgggaaggcaaggaagaagggacagggaaagataattactgataaatgaaggggatattcgactgtataaccatatggaagtgtgtgtgtgtgtgtgtgtgtgtgtgtgtgtgtgtgtgtgtgngagagagagagagagagagagagagatgggtggtggtgagaagtgttgttagaaacatataggaataatgcctaggggaaagggagaagtgagagggacaattgggttcatttatgccctatacaaagggcattccagcagctgaaactcttcaatgtttgaatggctgcctgtgaaggtagtgagtgccccatcactggaggtattccagcagagtctaggcagtcgtctgccaggcatgctgtggaagggatttctgtacagggtcattctaggtgagcttacacattccttccaaccccaaggttctgatgtcctggttgtgattgctggacccagaggcaagatctgcagagatgcctgtgagatatttgctttcctagaggggagtgtgggcatgggaggggtctgaaaatcaggacccaacccagccactgaagagagagtctctgcagagacagggctacctgggtggttgaggggactgacatttgaggacagggagatggagcagtgtcattgtcagtggcagggcatggggggcagtggtgagctaaggctgaggagtggagatgaccagaatataagggtgcaattcccagaccatccctgcgcatctgactgactccggtggaggcactgctgtgtgttttctgaaacctagaggaccagacccctggggcatataagggagtagggacaacacaagtgccccctcctgactgggtcccaaagccaatatgacatccatgcaggcagcagtgctgaatccatgccctgcaatgtccaaccgccaactgcagtgacccgctgatagctgcgcaacagcctgggttcttgagcagagattgggaggactttactgtggttctgccttcacaccccctagagagctaatgtagtattggctccacctgctcacatttctccctcccatactcattccttcactcatccatcctacgtatatttattgagtgccaactacgttcccagcctcttccaggcactggcaatgcagtgatgaacaggatgacaagattcatgccatcaggggcaccttgtcactgccgtctgtgcactgattcacactccctgcaaaatggtcactctgccatcttggtggttggtggggcaggtcatttggaaataaagaatgtgatagagatggctgaagaggggaagcctaggctgcctcaatggaggagtcgctgggggcattttcacccacaattctggccatacttaagcaatgggagggagagggaggaggggaagatctgggcaattttggccttgactctttcctggctccagagctcaagcttagaagccagccctgctatttccagcctcctgaaggctcagcacggtgaggcctgacatcctggggaagggcaacagggagacctacaggatgttggctgcttgcagactggtcaatgggggatgacggtggggaggttgccagatgtgagacttgagtagcatttgtacacatggccctgtattgtccttgaagaacatcaataaaatatatggttttaaattgaaaaacaaacaccaacaaaaaaaaaaaaaaaaaaagggggggggggtaaaaaatttcccgggggggcccattatgccgccgtccccaggcttttctttgttacaagaggtggcccctattaggaggaaggcggatattaaattaaagcataggggacaggggccgggactggttataacacagcggtcgggcagactggggggaacaaccgtggctaccgcttgcgggagactccttcggggagaaagggaaccccttaccttctctggtgcggggcggaccacttactgttgggacaacactctctctacaaagaaaattttaagacggctctacagggacacacttttacaacatacttacagggtggttataggggtgtttaacccacagcgggaatttcgttgcggcatagaaaatttgggatcacaggattgttttgaacatttttccg

SEQ ID NO: 90721 - DNA, 1107 bp, Homo sapiens
ggcgtggcctacatctccgctgtcctttccatctccttcgcccaccccttggccttcctcacgctcctgcccacctccatcagccagttcttctccggagctgtcctgggttctgaaatgttcgtcatcctcatgctctacctctggttcgccatcggcctggcctgcgccggcttctgctgccaccagctgctgttgatcctccgcgggcagaccctgccaccaggtgcggaagggggtggcagtgagggcccggaccctggcgcaagaacttacaagaggtcttcggaaagaggtggctgctgggcctgctggtccccatgttcaatgtcggaagtgagagctccaagcagcaggataagtagtagacactcccgtcagtttatctctctgtctctgtcttgactcctcctgagcataaaaccatggcagccttgtctccacccatgactcactacaaccttgtgctggtaaggtcctagcatcttcccctcaccttccacccatgagaacagcgtgagctggtggatcatgacaaggaggaaaaatgtccccccaggcatttctaggctcctcacgagccagccaggtggctgctagctgttaggctgcctctgctttctttccgtccccttgggatccctgctttccccctcttcctggctcatccattctccaccgtgtctcattcatcactgctgtctgctagagcccttcctctcagcccccatgttgggagaggggagtggattcttgctgctggtatgagactccctgggacctagaggctggcaaatgtttaaaatcaccacgtgtaagaggcagccaagtcagctctgccaactgctaggggagttgggaaagagtgggtgtgtgtccgcatcccctctgtaggaaaaagaacttagtagcttgctgctccctcaccaccccccaccaggttcaagaccctttttctgggagacctacaggatgttggctgcttgcagactggtcaatgggggatgacggtggggaggttgccagatgtgagacttgagtagcatttgtacacatggccctgtattgtccttgaagaacatcaataaaatatatggttttaaattg

SEQ ID NO: 90722 - DNA, 1231 bp, Homo sapiens
ggcgtggcctacatctccgctgtcctttccatctccttcgcccaccccttggccttcctcacgctcctgcccacctccatcagccagttcttctccggagctgtcctgggttctgaaatgttcgtcatcctcatgctctacctctggttcgccatcggcctggcctgcgccggcttctgctgccaccagctgctgttgatcctccgcgggcagaccctgccaccaggtgcggaagggggtggcagtgagggcccggaccctggcgcaagaacttacaagaggtcttcggaaagaggtggctgctgggcctgctggtccccatgttcaatgtcggaagtgagagctccaagcagcaggataagtagtagacactcccgtcagtttatctctctgtctctgtcttgactcctcctgagcataaaaccatggcagccttgtctccacccatgactcactacaaccttgtgctggtaaggtcctagcatcttcccctcaccttccacccatgagaacagcgtgagctggtggatcatgacaaggaggaaaaatgtccccccaggcatttctaggctcctcacgagccagccaggtggctgctagctgttaggctgcctctgctttctttccgtccccttgggatccctgctttccccctcttcctggctcatccattctccaccgtgtctcattcatcactgctgtctgctagagcccttcctctcagcccccatgttgggagaggggagtggattcttgctgctggtatgagactccctgggacctagaggctggcaaatgtttaaaatcaccacgtgtaagaggcagccaagtcagctctgccaactgctaggggagttgggaaagagtgggtgtgtgtccgcatcccctctgtaggaaaaagaacttagtagcttgctgctccctcaccaccccccaccaggttcaagaccctttttctgggagacagcaatcaatggcctgctttttccaaatgttattccctgtccgccctgccccatctggccggcccacctcctgaaggctcagcacggtgaggcctgacatcctggggaagggcaacagggagacctacaggatgttggctgcttgcagactggtcaatgggggatgacggtggggaggttgccagatgtgagacttgagtagcatttgtacacatggccctgtattgtccttgaagaacatcaataaaatatatggttttaaattg

SEQ ID NO: 90723 - DNA, 2799 bp, Homo sapiens
  misc_feature (1247)..(1247): n is a, c, g, or t
ggcgtggcctacatctccgctgtcctttccatctccttcgcccaccccttggccttcctcacgctcctgcccacctccatcagccagttcttctccggagctgtcctgggttctgaaatgttcgtcatcctcatgctctacctctggttcgccatcggcctggcctgcgccggcttctgctgccaccagctgctgttgatcctccgcgggcagaccctgccaccaggtgcggaagggggtggcagtgagggcccggaccctggcgcaagaacttacaagaggtcttcggaaagaggtggctgctgggcctgctggtccccatgttcaatgtcggaagtgagagctccaagcagcaggataagtagtagacactcccgtcagtttatctctctgtctctgtcttgactcctcctgagcataaaaccatggcagccttgtctccacccatgactcactacaaccttgtgctggtaaggtcctagcatcttcccctcaccttccacccatgagaacagcgtgagctggtggatcatgacaaggaggaaaaatgtccccccaggcatttctaggctcctcacgagccagccaggtggctgctagctgttaggctgcctctgctttctttccgtccccttgggatccctgctttccccctcttcctggctcatccattctccaccgtgtctcattcatcactgctgtctgctagagcccttcctctcagcccccatgttgggagaggggagtggattcttgctgctggtatgagactccctgggacctagaggctggcaaatgtttaaaatcaccacgtgtaagaggcagccaagtcagctctgccaactgctaggggagttgggaaagagtgggtgtgtgtccgcatcccctctgtaggaaaaagaacttagtagcttgctgctccctcaccaccccccaccaggttcaagaccctttttctgggagacagcaatcaatggcctgctttttccaaatgttattccctgtccgccctgccccatctggccggcccagcccagtccaggacctggctggatgcttcctgtccctggaactcttccagcctttctacttgatctccagcccccaggtctttgccagatgatgggaaggcaaggaagaagggacagggaaagataattactgataaatgaaggggatattcgactgtataaccatatggaagtgtgtgtgtgtgtgtgtgtgtgtgtgtgtgtgtgtgtgtgtgngagagagagagagagagagagagagatgggtggtggtgagaagtgttgttagaaacatataggaataatgcctaggggaaagggagaagtgagagggacaattgggttcatttatgccctatacaaagggcattccagcagctgaaactcttcaatgtttgaatggctgcctgtgaaggtagtgagtgccccatcactggaggtattccagcagagtctaggcagtcgtctgccaggcatgctgtggaagggatttctgtacagggtcattctaggtgagcttacacattccttccaaccccaaggttctgatgtcctggttgtgattgctggacccagaggcaagatctgcagagatgcctgtgagatatttgctttcctagaggggagtgtgggcatgggaggggtctgaaaatcaggacccaacccagccactgaagagagagtctctgcagagacagggctacctgggtggttgaggggactgacatttgaggacagggagatggagcagtgtcattgtcagtggcagggcatggggggcagtggtgagctaaggctgaggagtggagatgaccagaatataagggtgcaattcccagaccatccctgcgcatctgactgactccggtggaggcactgctgtgtgttttctgaaacctagaggaccagacccctggggcatataagggagtagggacaacacaagtgccccctcctgactgggtcccaaagccaatatgacatccatgcaggcagcagtgctgaatccatgccctgcaatgtccaaccgccaactgcagtgacccgctgatagctgcgcaacagcctgggttcttgagcagagattgggaggactttactgtggttctgccttcacaccccctagagagctaatgtagtattggctccacctgctcacatttctccctcccatactcattccttcactcatccatcctacgtatatttattgagtgccaactacgttcccagcctcttccaggcactggcaatgcagtgatgaacaggatgacaagattcatgccatcaggggcaccttgtcactgccgtctgtgcactgattcacactccctgcaaaatggtcactctgccatcttggtggttggtggggcaggtcatttggaaataaagaatgtgatagagatggctgaagaggggaagcctaggctgcctcaatggaggagtcgctgggggcattttcacccacaattctggccatacttaagcaatgggagggagagggaggaggggaagatctgggcaattttggccttgactctttcctggctccagagctcaagcttagaagccagccctgctatttccagcctcctgaaggctcagcacggtgaggcctgacatcctggggaagggcaacagggagacctacaggatgttggctgcttgcagactggtcaatgggggatgacggtggggaggttgccagatgtgagacttgagtagcatttgtacacatggccctgtattgtccttgaagaacatcaataaaatatatggttttaaattg

SEQ ID NO: 90724 - DNA, 582 bp, Homo sapiens
gttgttatgaagaattaataataagatatgtaaaaccagcagcaccaatagtgcctgacaaaatataactgctcaataaataacagtgaattattataacaacagctaatggtattctattggaacacatggtctgtttcttttccaattctgagtgatctcaacagcctcacggcacattgaaaataaaagtcaacttcctcaccttccccataggccatggactttcccatctctacccacttgtgcagtttctcctctttcctctctcctcctcagttactaaagcaatcttccttcaaacacttctattttccattacatcacttcattcaggttggtgatcagctgcaacttcctcagaaagaccactgctgcttccagtgaccctggctttgtcttgctttgtattagattactcagctccctggtattattgttgtctttatcgcttattagaatgtaacccttaatgggcaagaaattgtcagtcttgttcatttatcatcgtataaaaaatgtttctagcacacagaaagtgaccaataaatatttctggaattaatgtagtaatgaatccaa

SEQ ID NO: 90725 - DNA, 447 bp, Homo sapiens
gatccgtgctgatatcagtctttccaactcagtctgaggtaaacaaaccctgcactggttgatgcaacagttatggccttccctaggacagttgccaggaaagataatgttgattcttctcagaagccatcccgaacacctctgtttttttctaaaccgggctagaatgctgtggtgggctcctagaggtgaggtagagagtgtgacacatcaggtagtgtgccacacacacacacacacacacacacacaaacacacatacacaaataaactgttcaagttatctcatttatatgaacatcaatctggagaacaggcatggggatggatattaattgtatgagattatggtgtaaggaacatagagttgtatcaggctgaatttactgattaggaccatcaaggtagtgactttgtgtttaatatggcagcttggcgagttaaaaa

SEQ ID NO: 90726 - DNA, 263 bp, Homo sapiens
  misc_feature (152)..(152): n is a, c, g, or t
aaaccatcctctttgttaaggacacatgcaaacattatttttaagatgtattaattccattaatattttatttatttttttgaggctgagttttgctatgttgtccaggctagagggcactggagtgcagtggcgcgatctcggctcactgncaagtccgcctcccaacaccctcggtctgacaaaactctttatacagctgttctataagacaggttctaggaaatccacaaaagcctgggcaacagagcgagacaccatct

SEQ ID NO: 90727 - DNA, 591 bp, Homo sapiens
gtggaaaggagaagaggagaagagattatcttcctgcattcagcttctatcaatttccttctagcaatagtgagcagactggatcagcggtttctgggagttccctcacctccagggtgggcctaatacccttttgtggtcctagaatcatggggtctccatgcaaccttctccaagattccagcccctcctttccagtctcgggctccatgaatactacattttctcttttcttctcccagccccagagttgctatgtactaatctctgggttactctactgtctctgctttgctttctcagctctcccttatgcagccactttcctatcttaaaatctctcactgaaatatgtgaaatggttttgttttcctggctagtacaccgaataaatatctttaatgtatttatattagaccttcaaaccttttgggaaaatgacattgaaaaaggatgaagtgagttttttctttttgataattcattaagaaatattctttaaatagttttggatcaaatttcaagagcattttaagaaacagaatcctcaccattgaaaaccaaacgattgtgattgtttaatgctgattt

SEQ ID NO: 90728 - DNA, 281 bp, Homo sapiens
  misc_feature (177)..(177): n is a, c, g, or t
  misc_feature (186)..(186): n is a, c, g, or t
  misc_feature (247)..(247): n is a, c, g, or t
  misc_feature (252)..(253): n is a, c, g, or t
  misc_feature (271)..(271): n is a, c, g, or t
acactattctttgccagtttattatttaataggtcttacatgtttctttcttactagcttagttctgcaaggaattaagtagcctttctctactttaagttgaaatagaaaactactccttactattttctgtatattagtctttacaaacttaaaaataatgtactcttgtaagcngcacggggngacgcagactttcctctctgcgagcttctacttctaagtctgaatccagtcagaaataagnttttnngggtaacaataaataggnccagactctg

SEQ ID NO: 90729 - DNA, 441 bp, Homo sapiens
tagaaagaacatcttactacattgcctaggccggtctcaaactcctgggctcaagcagtccttccatctcagcctcccaaactgttgggattacaggcatgaactaccatgccctgctgcttaaagttctttatatgaaaagtagagataatgggctgggcgcagtggctcatgcctgtaatcccagcactctgggaggccgaggcgggtggatcacgaggtcaggggtttgagaccagcctgaccaacatggcgaaatcccatgtctactaaaaatacaaaattagccaggcgtagtggcaggcacctgtaatcccagctactcaggaggctgaggcaagagaatcgcttgaacccaggaagcggaggttgcagtgagctgagatcactccattgcactgcagcttgggcaacaagagtgaaactttgtttcaaaaaaat

SEQ ID NO: 90730 - DNA, 689 bp, Homo sapiens
ctcaaaagtaaatatttgtggaagatacatgaaaaggaatttaatgacagaaaagtaatttttttaatttcctctctcattgcctcaatttggtatgattgttttccaaattttgggatgtctgtacaccataacttgtaaggtatgttgtcttctttacctagttttccatctctttgtttactgaattcagacctcagagaaaagtggaaaaacataatcattaaatctagcaagaagaatcattttttccattttgtttctttttaaacacaaattcttctagtggaagtaaataaggtatagtaaacattttgactgcaggttttaaaataaaatggtcagacgtagagtaactataatgtcaaaacttatgacacttataatttttacttttacctacattttaatggttcagatcttcaaatatcattgatttaaaaactaaaaggtgagtaaatttttaataaagcagacaaactaagataaacatggatgagttgcttaagagaattcactatatttttaagatctaaataagcaatatatgcttcaaaataggaatatatagagttatgatttgattccatttgggctaaattttttaacttaaagcaaaattacatagacactaattttggagtagcaaataatatagaaaaaaatgcctgcaaatgttcttttatttt

SEQ ID NO: 90731 - DNA, 563 bp, Homo sapiens
ggagacacagggagtgagaggtgggcaggagggcagacacgccaggcacgtgagggcacgcttagtgagggctggggggctggagacggtgccgaggaaccaccctgaggcccagcgctttggctccactgccctttcccgcctccgtatttctctacatttgaacagtttaaaggataaagggaaagactcaggaaatggcaaccttgccctggctctggccccaaccttgagagaatcatttccacccctaggcccttagcttctcgctgcagtccctttactttgcaatggcttataccacacacgcaggcttttgcagctgtctctgaccttctctataatactctctcatccctcttcctaccctcacccaacacacacacacacacacacacacacacagacacacacagtccatttaaaacatgtacttggatggattcagaagagaacagaagaaaattgggcctcaggatggcacaccctgcaaaggacagagacagaaggagataatgggccagagccacgccaaccctgagacctcaggccagccctcggcc

SEQ ID NO: 90732 - DNA, 928 bp, Homo sapiens
ctttcagatttttaaaaaactgctcataacacttccattgctactgctcatctccttttcacttggtaattagtcaatgctcccgtgaacatcaccagattgttaatggttggcccatgtgtctgactcatctgctcacaaagtcatctggcccatggggaattacttccatagttctatttcatgccattccacttctctgagcctcagattttcatcagtaaaatggaaagaggttttcttaattcaagatgggcttcagggatccatgggtacctgaaattgtacacagcattttgtgtgtcaggagcacatatgcatttcgtgggagaggatctatagatttttttttatcacattctccaaagggggtccatgagtcacacacaaaaagacaaaaaccactggactaaatgatctctaacgtccctcccagctctaacattctgtaagtcaaaggtcctaagacacacgacattttcttattcccttgagagggagttaaagatcaactatttctatgcctgttattcagtgacaatgaagagataaaaatctgacaaacccctagacaccatgcaacaccaactgaaaaggttagagctaaatcttttttgtctcatgaggtaatattttcctctcactggaaatgatccaacagaagtggaattatcatctctccacaatcgtatataaggaattttttaaattatgtgaagatgcctataatcacagcactttaggaggccaaggcaagaggatcgcttgagcccaggagtttgagaccagcccagcagttcaagacatagtgagaccacgtctctacaaaaaaattttaaaactagccagtgtgtagtggcttatacctgtagtcccagctactagggaggtgggaagatcacttgagccagggaggttaaggctgcag

SEQ ID NO: 90733 - DNA, 172 bp, Homo sapiens
caattatacgatatgattaattttcaagaactctttcttattctctgattattcatttttatcacagtcagttcttgctttatgagcatgataaatatgctcttgaatctccagctgaacatactgctttgaatttttatgttcttctgtctcctgggctccctgttttctc

SEQ ID NO: 90734 - DNA, 657 bp, Homo sapiens
cagagcaagcattttggagtggcctgcctgatctgttcatgaccaccatcctggtaattgtttctgctctgggccactgaacttattctttgtataaattatgaattactattaagcttaatgaagaaatgtttaactgttgggaatatacttttagtaatattaacatgaaaaggagaattggacattttcaatcaaattttcatttctctgagtgtttttgctttactctgatttttagtctggcatttaatcacatgagcggtttaccttagaatatattgctaattcatcttactactcgtaaatggagttgggaggctgttggctgagttgtcatctcatgtgtctttgaatttaattttaattttacatttcaatgttgtgacattgtataagtataaataaataaaaggccttctatttgtaaaaatcattttttgctttattttatattttattttaattcatcaccagttcatttaatgttaaagataatcttgcccagtaatgcacttggtttgtttttgaataacagatcagagaaaaaccttctgaatatttcaataattttacacaataaggttatttttggtgaagataaatagtaactataaaaataggtacagaagatacatagtttgttgtgataaatgc

SEQ ID NO: 90735 - DNA, 354 bp, Homo sapiens
cagagcaagcattttggagtggcctgcctgatctgttcatgaccaccatcctggtaattgtttctgctctgggccactgaacttattctttgtataaattatgaattactattaagcttaatgaagaaatgtttaactgttgggaatatacttttagtaatattaacatgaaaaggagaattggacattttcaatcaaattttcatttctctgagtgtttttgctttactctgatttttacaaatagaaggccttttatttatttatacttatacaatgtcacaacattgaaatgtaaaattaaaattaaattcaaagacacatgagatgacaactcagccaacagcctcccaa

SEQ ID NO: 90736 - DNA, 766 bp, Homo sapiens
gtgagctgagatcgtgccgctgcactccagcctgggcaacagagcaagactccatctcaaaataaataaataaatattttttttttttaaaaaagatcctgtggtttaaatgttgagcatgatggaaatttgaaatgtttttaacccaggtttgcttatctttttttgaaagcattacctgatttcatctgagattttctactatgcacactatttggagttcttggaaatgatgtaataacaatagtcactcctatctcctcctccacataagtccaagataccttcagctgagatgagattaagctgttgttctaacatgtggagttagctgtagcaccataaatgcaagagaattcttaatttaaattaatataaatcaacatattctttcatttgtttatgatagactataaagtactgtcttatcaggagataaggcaggctagcagttgacttggtaatatttagagatgtagtaaccaaagcaaaatgtaatattcccctgcttagaaattgctttactgggccaggcaggtggatcacattagcccaggagtttgagaccagcctggccaacatggtgaagtcccatctctactgaaaatacaaaaatgagccaggcatggtggcgcacatctgtaatcccagctacttgggaggctgaggcacgagaatctcttgaatccaggaggtggaggttgcagtaggccaagattgcaccactgcactccagcctgggcgacagaatgactctgtctcaaaa

SEQ ID NO: 90737 - DNA, 222 bp, Homo sapiens
gcaaacctgccatctcaaaacatgtgtattttaatgagacaacaaagatcaagggaactttagtccttacaatgtaatgatcaaaaaagtgaaatagataatcaacataacattgcttgtagaccatgcaaacaatcttattgcatttgtatatttgtaatgaactgttttataataacaaaatgtaaaatgtgtattttatttgtccttttattgttttcc

SEQ ID NO: 90738 - DNA, 423 bp, Homo sapiens
agctagcattaccatttttttctggaccctttcgatacattcctgtaggccatataatgtcggtaggtaaagaacttcctcattttgcattgtatttcattgtatgactgcaccatactttttcccccctactgctgatggacatttacctttcaatcctttgctgttgcaaacaatgctgcataaccttgtagcaattgtcttttcatagatctgtagagtaaattcctagaagtagaactgctggggttaaggggtttgcctgtttgtgtaattttgatagatgttgccagaataccctctggagaggtatatcagcttttatactcctaccagcaaagcatgacccaagtgaagaatgggtaggagatgggtgaagttgaggctgggtcaggtttatgagtgtgagggggactgaaagta

SEQ ID NO: 90739 - DNA, 182 bp, Homo sapiens
tttgtgtggaaagcccactcacacaccgctttccagaagtaccactttatccacacccccacatgtagagaaacctggcttgctattcccagacaacatgcagtttttccaaggactgctagtcaaaggcaaggtgaaaatcactgtcattaaatatttttaaaatacttgaaactgagaaa

SEQ ID NO: 90740 - DNA, 489 bp, Homo sapiens
cagtccagcctccctgattccacctgtttctgctactcccacaaaaaattttaagagagaaaaaacaattaaatgtttagctacactccattttctttttctttgagttattgctgtaacagtccaacaaatcattgatttcttttgaaaaaccaacgaggtaatgacaatttctgctctggaatagcttccttgttaaaagagaaaggtgttgcccctctgaatttcctattttgtcataaatttgagctgcattttactcatctttaaaataaaaataaaggtcaagtacactggcttacatctgtaatcccagcagtttaggaggctaacatgggaagatcgcttgagcccaacatttggaaaccagcctgggcaatatagtgagaccccctctctacaataaaatacaaaaattagccagttgaagttgttcacgcctgtagtcccagctacttgggaggctgaggagggagaatcacctgagcc

SEQ ID NO: 90741 - DNA, 579 bp, Homo sapiens
cagccatgtttgtagtgtggccctggccccccttggtcatatctgattggaccgtggatggacacctgactcgagctggccaatcagaacccgcaggaattgggcctcggcacgtggccgaagtgaggacatgtaacacaggcactcaccgctgggatgctgtggacctggggcacagagcaggtgtagaaggaaaggagagggaagagatgggaagagagggtcatggtattggcgtccatatttctgtactggtgcttcatgaaagctggtggcatctcttggcctggtttccctgacacctgatatcataacgaattcaggactccagctcagtgagagagtttctgctccttgcaaccaaaagcatcttcactgggaagacttgagtgccgcttgctctgtgctttgccctggttctgaactcagaacctgacctcagggatcgcttcgccactccgctgcctgtgtccatgagggtttctcgcaaaagaagttttacctttaaaacttattttcctctgattattaatgtccgtggtaataataaatgactcaatattagctttgtgccaaaca

SEQ ID NO: 90742 - DNA, 594 bp, Homo sapiens
gccaaaagatgcaatcattgctaagaggtattgtttaatactgggaaagtcacatcaaaagctttctcaaaaaatatatattttaagtcctccttccattcttcactttcctgtcttggggagacagaatacttcaaagtagtctgtttttaaaaggtgacttctttcaggttttgggaaagagtgttatgtgttgtaattaagtaattgttccctaagatagtccttaagtacaaggacatctcactagacttcattgtcttgtgaaaggagcggtatttcaggaattaactactcatttaataaagcaaaaaggctggatgtgatagctcacacctgcaatcctagcactttgggaggctgaggcagttcgatcacttgagcccaggagactagcctgggtgatatggcaaaatcctgtctctacaaaaaaatacaaaaattagctgggcatggtggcacacacctctaaccccaactagttgggtgtctgaggtaggtggattgcttgagcctaggaggtcaaggctataatgagtcatgattgcaccactgcactccagcctgggtggcagagagagagatcctgcctca

SEQ ID NO: 90743 - DNA, 581 bp, Homo sapiens
tccagtgggaatgtctttccttgcctgtcccaccattatattttggaagcacataatttgttttatttcactggttcacaactggacaaaaatttgcctcagaatgaattgtatcttgagtctcatccatatctgatttagataatatttagatgagatgtgaactttagacttctaagttgatattagaacaagttaatacttttggggtaattgaaatgaatgcattttacatttgagaaggacatgcctttttgggggatggggcagaatgaaatggtctaaatatatccccttaaaattcatatgttcaaaccctaacctccaaggtgatggcattaagaaatgaagcctttgtgaggtgatgagctgatgagggcaaatccttcatgaatgagattagtgtccttattaaagagtctgaaactcctcaccaattaaagctgccatatgaagttacagtgaaaagacaactatctatgaaacagaaactgagtccttactagacactgaatttgagggtgccttgatcttggattttcaagcatccaaactgtgagaaataaatttctgctgtctat

SEQ ID NO: 90744 - DNA, 643 bp, Homo sapiens
tgggaggaggtgggggccgccccgcgagaagaagagcgggaagaggcggacagcgaggccaagatttcagctgcgggacggtcaggggagacctccaggcgcagggaaggacgtggccctggaggaatttcacaagcacccgcccgtgcagtgggccttccaggagaccagtgtggagagcgccgtggacacgcccttcccagctggaatatttgtgaggctggaatttaagctgcagcagacaagctgccggaagagggactggaagaaacccgagtgcaaagtcaggcccaatgggaggaaacggaaatgcctggcctgcatcaaactgggctctgaggacaaagttctgggccggttggtccactgccccatagagacccaagttctgcgggaggctgaggagcaccaggagacccagtgcctcagggtgcagcgggctggtgaggacccccacagcttctacttccctggacagttcgccttctccaaggccctgccccgcagctaagccagcactgagctgcgtggtgcctccaggaccgctgcgggtggtaaccagtggaagaccccagcccccagggagaggaacccgttctatccccagccatgataataaagctgctctcccagctgcctctca

SEQ ID NO: 90745 - DNA, 763 bp, Homo sapiens
  misc_feature (57)..(57): n is a, c, g, or t
gtggtgcgcttcgcccggtggtgcgcttcgcccggtggtgcgcttctccaggcgcanggaaggacggccagggtgacacggaagcatgcgacggctgctgatccctctggccctgtggctgggtgcggtgggcgtgggcgtcgccgagctcacggaagcccagcgccggggcctgcaggtggccctggaggaatttcacaagcacccgcccgtgcagtgggccttccaggagaccagtgtggagagcgccgtggacacgcccttcccagctggaatatttgtgaggctggaatttaagctgcagcagacaagctgccggaagagggactggaagaaacccgagtgcaaagtcaggcccaatgggaggaaacggaaatgcctggcctgcatcaaactgggctctgaggacaaagttctgggccggttggtccactgccccatagagacccaagttctgcgggaggctgaggagcaccaggagacccagtgcctcagggtgcagcgggctggtgaggacccccacagcttctacttccctggacagttcgccttctccaaggccctgccccgcagctaagccagcactgagctgcgtggtgcctccaggaccgctgcgggtggtaaccagtggaagaccccagcccccagggagaggaacccgttctatccccagccatgataataaagctgctctcccagctgcctctcaaaaaaaaaaataacccatccaactaacaccctcctttcccgtcttctctctttt

SEQ ID NO: 90746 - DNA, 1709 bp, Homo sapiens
tgggaggaggtgggggccgccccgcgagaagaagagcgggaagaggcggacagcgaggccaagatttcagctgcgggacggtcaggggagacctccaggcgcagggaaggacggacgtgaggaggggaagcgggctggggcggcagccgggcggaggggcagctgcgcaggcggaatgaggaacgcctttgctctaaggcgaccaccctggcagctcttcactgaggggcctcggtttccacatctgtcgctctccggtcccaagaccaccaggaccgacggggctctccgggagggtcagcccctccggtggccccagtcatgcatcaggggacggatcagaagggctaggaagaggggtcgtggggaaggccccagaaaaaagaggaaggagggaagattttgcctgaagcgggaaagccaagggctgggcggcgcgagacccccattcctagcgactggggctggctggtggcccgcggcagcccccgcgccgggaggattaggcctcccgccgctcccacccgtccggaccctcccacgtgtttaggtcctcccaaaagtattcggcctccggcccctgccccttcccccggctggcctggacctcggggacgtggggggaaccccgtgggagcagggggattctggacggggagggagtagcggttggggagaaggctgagcggggaaacggagagaggggctccggggacggcagggaggagagtgggtcgtgccggagacccagggagagacacaatgggcaagattaggggtgtagggtgggagtgcgaactgactgattcctagcgtgggcagggaactttgctaaaactgcaggccccagggaacagcgcgggcagggtgggagggaacggagagggccaggcggaccctaaggtcaatttggagaaagggccatttccaggctccttcacctgtgcccagcgttctacaggcctggaccccgcccccgctccccaccctccccccagagcagggcgcgggaggaggcggctcgggctggctcggagagctgaggggcgcacacccgcttcgcagggccagggtgacacggaagcatgcgacggctgctgatccctctggccctgtggctgggtgcggtgggcgtgggcgtcgccgagctcacggaagcccagcgccggggcctgcaggtggccctggaggaatttcacaagcacccgcccgtgcagtgggccttccaggagaccagtgtggagagcgccgtggacacgcccttcccagctggaatatttgtgaggctggaatttaagctgcagcagacaagctgccggaagagggactggaagaaacccgagtgcaaagtcaggcccaatgggaggaaacggaaatgcctggcctgcatcaaactgggctctgaggacaaagttctgggccggttggtccactgccccatagagacccaagttctgcgggaggctgaggagcaccaggagacccagtgcctcagggtgcagcgggctggtgaggacccccacagcttctacttccctggacagttcgccttctccaaggccctgccccgcagctaagccagcactgagctgcgtggtgcctccaggaccgctgcgggtggtaaccagtggaagaccccagcccccagggagaggaacccgttctatccccagccatgataataaagctgctctcccagctgcctctca

SEQ ID NO: 90747 - DNA, 697 bp, Homo sapiens
cccccgcgctgcaggaatacggcacgaggagacctccaggcgcacggaaggacggccagggtgacacggaagcatgcgacggctgctgatccctctggccctgtggctgggtgcggtgggcgtgggcgtcgccgagctcacggaagcccagcgccggggcctgcaggtggccctggaggaatttcacaagcacccgcccgtgcagtgggccttccaggagaccagtgtggagagcgccgtggacacgcccttcccagctggaatatttgtgaggctggaatttaagctgcagcagacaagctgccggaagagggactggaagaaacccgagtgcaaagtcaggcccaatgggaggaaacggaaatgcctggcctgcatcaaactgggctctgaggacaaagttctgggccggttggtccactgccccatagagacccaagttctgcgggaggctgaggagcaccaggagacccagtgcctcagggtgcagcgggctggtgaggacccccacagcttctacttccctggacagttcgccttctccaaggccctgccccgcagctaagccagcactgagctgcgtggtgcctccaggaccgctgcgggtggtaaccagtggaagaccccagcccccagggagaggaacccgttctatccccagccatgataataaagctgctctcccagctgcctctca

SEQ ID NO: 90748 - DNA, 1940 bp, Homo sapiens
tgggaggaggtgggggccgccccgcgagaagaagagcgggaagaggcggacagcgaggccaagatttcagctgcgggacggtcaggggagacctccaggcgcagggaaggacggacgtgaggaggggaagcgggctggggcggcagccgggcggaggggcagctgcgcaggcggaatgaggaacgcctttgctctaaggcgaccaccctggcagctcttcactgaggggcctcggtttccacatctgtcgctctccggtcccaagaccaccaggaccgacggggctctccgggagggtcagcccctccggtggccccagtcatgcatcaggggacggatcagaagggctaggaagaggggtcgtggggaaggccccagaaaaaagaggaaggagggaagattttgcctgaagcgggaaagccaagggctgggcggcgcgagacccccattcctagcgactggggctggctggtggcccgcggcagcccccgcgccgggaggattaggcctcccgccgctcccacccgtccggaccctcccacgtgtttaggtcctcccaaaagtattcggcctccggcccctgccccttcccccggctggcctggacctcggggacgtggggggaaccccgtgggagcagggggattctggacggggagggagtagcggttggggagaaggctgagcggggaaacggagagaggggctccggggacggcagggaggagagtgggtcgtgccggagacccagggagagacacaatgggcaagattaggggtgtagggtgggagtgcgaactgactgattcctagcgtgggcagggaactttgctaaaactgcaggccccagggaacagcgcgggcagggtgggagggaacggagagggccaggcggaccctaaggtcaatttggagaaagggccatttccaggctccttcacctgtgcccagcgttctacaggcctggaccccgcccccgctccccaccctccccccagagcagggcgcgggaggaggcggctcgggctggctcggagagctgaggggcgcacacccgcttcgcagggccagggtgacacggaagcatgcgacggctgctgatccctctggccctgtggctgggtgcggtgggcgtgggcgtcgccgagctcacggaagcccagcgccggggcctgcaggtggccctggaggaatttcacaagcacccgcccgtgcagtgggccttccaggagaccagtgtggagagcgccgtggacacggtgagtagcatggcccgggcaggagcggggagggtcgtaccccaggagaccagcgcattcccacgaagggggacagaagtgcttgggctctgagccccagccctttggagaaaaggccactgtccagcctgctggaatgtgactgcgtgagggaggtgcggatcacaccagggcttgctctgcaccctcagctggctaccggccatcctctgcctgcctgtctgtccgcagcccttcccagctggaatatttgtgaggctggaatttaagctgcagcagacaagctgccggaagagggactggaagaaacccgagtgcaaagtcaggcccaatgggaggaaacggaaatgcctggcctgcatcaaactgggctctgaggacaaagttctgggccggttggtccactgccccatagagacccaagttctgcgggaggctgaggagcaccaggagacccagtgcctcagggtgcagcgggctggtgaggacccccacagcttctacttccctggacagttcgccttctccaaggccctgccccgcagctaagccagcactgagctgcgtggtgcctccaggaccgctgcgggtggtaaccagtggaagaccccagcccccagggagaggaacccgttctatccccagccatgataataaagctgctctcccagctgcctctca

SEQ ID NO: 90749 - DNA, 810 bp, Homo sapiens
tgggaggaggtgggggccgccccgcgagaagaagagcgggaagaggcggacagcgaggccaagatttcagctgcgggacggtcaggggagacctccaggcgcagggaaggacggccagggtgacacggaagcatgcgacggctgctgatccctctggccctgtggctgggtgcggtgggcgtgggcgtcgccgagctcacggaagcccagcgccggggcctgcaggtggccctggaggaatttcacaagcacccgcccgtgcagtgggccttccaggagaccagtgtggagagcgccgtggacacgcccttcccagctggaatatttgtgaggctggaatttaagctgcagcagacaagctgccggaagagggactggaagaaacccgagtgcaaagtcaggcccaatgggaggaaacggaaatgcctggcctgcatcaaactgggctctgaggacaaagttctgggccggttggtccactgccccatagagacccaagttctgcgggaggctgaggagcaccaggagacccagtgcctcagggtgcagcgggctggtgaggacccccacagcttctacttccctggacagttcgccttctccaaggccctgccccgcagctaagccagcactgagctgcgtggtgcctccaggaccgctgcgggtggtaaccagtggaagaccccagcccccagggagaggaacccgttctatccccagccatgataataaagctgctctcccagctgcctctcaaaaaaaaaaataacccatccaactaacaccctcctttcccgtcttctctctttt

SEQ ID NO: 90750 - DNA, 637 bp, Homo sapiens
cgtgtttatgcatgtgccacacaacccatctgggaaggactcctgcctgcacacacatgaaagttccatagtttgaaaactgcatgggtctgacttctgacattctagggtggctgtgcctgaaacctgctggcctgcatgacctcttgctcctgggctcgagggcctagttggggatctggtcccatgatgggcagccctggctcccaccctcatgatgcccaggcctccctcacccttttcctctgctcaccccatgctccccgctcccccacagaggaaacggaaatgcctggcctgcatcaaactgggctctgaggacaaagttctgggccggttggtccactgccccatagagacccaagttctgcgggtaagaaggggcaagggtgcacaggtggtgacagggctgggaagatggatggaagctgagcctatgggctggtctcgaggctaaagcttggccaagcaggagggagggcagtgggggctagaaagcgctgtgcctgtttggacattctccaagggatgtggaggggatgtggaggatgctggcagccctccactggcactgcccacccctcctacactgcctgaacagttttgggcactggcaggaggctgaggagcaccagga

SEQ ID NO: 90751 - DNA, 756 bp, Homo sapiens
tgggaggaggtgggggccgccccgcgagaagaagagcgggaagaggcggacagcgaggccaagatttcagctgcgggacggtcaggggagacctccaggcgcagggaaggacggccagggtgacacggaagcatgcgacggctgctgatccctctggccctgtggctgggtgcggtgggcgtgggcgtcgccgagctcacggaagcccagcgccggggcctgcaggtggccctggaggaatttcacaagcacccgcccgtgcagtgggccttccaggagaccagtgtggagagcgccgtggacacgcccttcccagctggaatatttgtgaggctggaatttaagctgcagcagacaagctgccggaagagggactggaagaaacccgagtgcaaagtcaggcccaatgggaggaaacggaaatgcctggcctgcatcaaactgggctctgaggacaaagttctgggccggttggtccactgccccatagagacccaagttctgcgggaggctgaggagcaccaggagacccagtgcctcagggtgcagcgggctggtgaggacccccacagcttctacttccctggacagttcgccttctccaaggccctgccccgcagctaagccagcactgagctgcgtggtgcctccaggaccgctgcgggtggtaaccagtggaagaccccagcccccagggagaggaacccgttctatccccagccatgataataaagctgctctcccagctgcctctca

SEQ ID NO: 90752 - DNA, 815 bp, Homo sapiens
tgggaggaggtgggggccgccccgcgagaagaagagcgggaagaggcggacagcgaggccaagatttcagctgcgggacggtcaggggagacctccaggcgcagggaaggacggccagggtgacacggaagcatgcgacggctgctgatccctctggccctgtggctgggtgcggtgggcgtgggcgtcgccgagctcacggaagcccagcgccggggcctgcaggtggccctggaggaatttcacaagcacccgcccgtgcagtgggccttccaggagaccagtgtggagagcgccgtggacacgcccttcccagctggaatatttgtgaggctggaatttaagctgcagcagacaagctgccggaagagggactggaagaaacccgagtgcaaagtcaggcccaatgggaggaaacggaaatgcctggcctgcatcaaactgggctctgaggacaaagttctgggccggttggtccactgccccatagagacccaagttctgcgggaggctgaggagcaccaggagacccagtgcctcagggtgcagcgggctggtgaggacccccacagcttctacttccctggacagttcgccttctccaaggccctgccccgcagctaagccagcactgagctgcgtggtgcctccaggaccgctgcgggtggtaaccagtggaagaccccagcccccagggagaggaacccgttctatccccagccatgataataaagctgctctcccagctgcctctcaaaaaaaaataaataaataaataattaatatatcctcgctcctattcaattaaaaaaaaa

SEQ ID NO: 90753 - DNA, 259 bp, Homo sapiens
cctctgctcaccccatgctccccgctcccccacagaggaaacggaaatgcctggcctgcatcaaactgggctctgaggacaaagttctgggccggttggtccactgccccatagagacccaagttctgcgggaggctgaggagcaccaggagacccagtgcacttgggccacccgctggcccaatgcagcggctggagtagtccttgtagtgagaatacagctgtgtctaggacatgttcagccccacctcccttatgc

SEQ ID NO: 90754 - DNA, 709 bp, Homo sapiens
  misc_feature (57)..(57): n is a, c, g, or t
gtggtgcgcttcgcccggtggtgcgcttcgcccggtggtgcgcttctccaggcgcanggaaggacggccagggtgacacggaagcatgcgacggctgctgatccctctggccctgtggctgggtgcggtgggcgtgggcgtcgccgagctcacggaagcccagcgccggggcctgcaggtggccctggaggaatttcacaagcacccgcccgtgcagtgggccttccaggagaccagtgtggagagcgccgtggacacgcccttcccagctggaatatttgtgaggctggaatttaagctgcagcagacaagctgccggaagagggactggaagaaacccgagtgcaaagtcaggcccaatgggaggaaacggaaatgcctggcctgcatcaaactgggctctgaggacaaagttctgggccggttggtccactgccccatagagacccaagttctgcgggaggctgaggagcaccaggagacccagtgcctcagggtgcagcgggctggtgaggacccccacagcttctacttccctggacagttcgccttctccaaggccctgccccgcagctaagccagcactgagctgcgtggtgcctccaggaccgctgcgggtggtaaccagtggaagaccccagcccccagggagaggaacccgttctatccccagccatgataataaagctgctctcccagctgcctctca

SEQ ID NO: 90755 - DNA, 1886 bp, Homo sapiens
tgggaggaggtgggggccgccccgcgagaagaagagcgggaagaggcggacagcgaggccaagatttcagctgcgggacggtcaggggagacctccaggcgcagggaaggacggacgtgaggaggggaagcgggctggggcggcagccgggcggaggggcagctgcgcaggcggaatgaggaacgcctttgctctaaggcgaccaccctggcagctcttcactgaggggcctcggtttccacatctgtcgctctccggtcccaagaccaccaggaccgacggggctctccgggagggtcagcccctccggtggccccagtcatgcatcaggggacggatcagaagggctaggaagaggggtcgtggggaaggccccagaaaaaagaggaaggagggaagattttgcctgaagcgggaaagccaagggctgggcggcgcgagacccccattcctagcgactggggctggctggtggcccgcggcagcccccgcgccgggaggattaggcctcccgccgctcccacccgtccggaccctcccacgtgtttaggtcctcccaaaagtattcggcctccggcccctgccccttcccccggctggcctggacctcggggacgtggggggaaccccgtgggagcagggggattctggacggggagggagtagcggttggggagaaggctgagcggggaaacggagagaggggctccggggacggcagggaggagagtgggtcgtgccggagacccagggagagacacaatgggcaagattaggggtgtagggtgggagtgcgaactgactgattcctagcgtgggcagggaactttgctaaaactgcaggccccagggaacagcgcgggcagggtgggagggaacggagagggccaggcggaccctaaggtcaatttggagaaagggccatttccaggctccttcacctgtgcccagcgttctacaggcctggaccccgcccccgctccccaccctccccccagagcagggcgcgggaggaggcggctcgggctggctcggagagctgaggggcgcacacccgcttcgcagggccagggtgacacggaagcatgcgacggctgctgatccctctggccctgtggctgggtgcggtgggcgtgggcgtcgccgagctcacggaagcccagcgccggggcctgcaggtggccctggaggaatttcacaagcacccgcccgtgcagtgggccttccaggagaccagtgtggagagcgccgtggacacggtgagtagcatggcccgggcaggagcggggagggtcgtaccccaggagaccagcgcattcccacgaagggggacagaagtgcttgggctctgagccccagccctttggagaaaccagggcttgctctgcaccctcagctggctaccggccatcctctgcctgcctgtctgtccgcagcccttcccagctggaatatttgtgaggctggaatttaagctgcagcagacaagctgccggaagagggactggaagaaacccgagtgcaaagtcaggcccaatgggaggaaacggaaatgcctggcctgcatcaaactgggctctgaggacaaagttctgggccggttggtccactgccccatagagacccaagttctgcgggaggctgaggagcaccaggagacccagtgcctcagggtgcagcgggctggtgaggacccccacagcttctacttccctggacagttcgccttctccaaggccctgccccgcagctaagccagcactgagctgcgtggtgcctccaggaccgctgcgggtggtaaccagtggaagaccccagcccccagggagaggaacccgttctatccccagccatgataataaagctgctctcccagctgcctctca

SEQ ID NO: 90756 - DNA, 268 bp, Homo sapiens
gttgaatttgtgtgcgcgcctttagccttgcttggtggatgagttggattttagtgcattttcaatcaatgtgcgtgtacacttaagcacaaggagaggtggctttgtgctgtcatcgaggattagatgtgtgatgagacccacccagctctgccctgtgccctaattctgctgctttgcctgttgaaaccttgcctgtctcgtcaccccaaattctctaaacttagcagtacttaacctttattaaaaacagcagaatcactcatga

SEQ ID NO: 90757 - DNA, 180 bp, Homo sapiens
atacctacaagtatatttggaggaaaggaagagaggaatagcaacaaggtataggcaagcaaaatcttcatctatcatagcagtaagatgacaggttttttacaatcccatattcttgggatttttacagtcccaagaatctcttcaatcccaatgtttctattgtctctgtgttggatc

SEQ ID NO: 90758 - DNA, 372 bp, Homo sapiens
tgggtaatcatctaatgctggagtcacttttgtctccacacggtctcagagaaaacccccaagtttccttagggaatctgttaagatgtttgtcacagcattgcttgtgctagtaaggcattggaggcaaactaactacccatccctgaaggaatgggaaagttaaaaggtaatagatgctcattatggagtattagacagcagttagaagccatagattacatgtaaatgcaggaacatggatggcttttggaaacatactgccaaatgaatagcaagataagaatgagattcacaccccaatgtcatataataacatgttaaaaatacatgccggaccaggcacagtggctcatgcctgtaatcccagca

SEQ ID NO: 90759 - DNA, 459 bp, Homo sapiens
ttatttggagctcatcatacacacaaaaggtgttttgtttggttgggaacgcagtgataggaaacttcattctcagagtactcataatgtaatcaggaagcaaagcctaaggaaagcaagtcactcgaggcctggactcaaatgctgacactgcgtctgttcttcctctttctcattttctctctagtctctaaaaatcttaagtcctagtccctgaagttgatcacaggtgttggaattatgaaaacaaccttcaaagaacattatgtgtgattagcttgatgctctgagaggtgttggcctccacaaagacaactctgaaaatccaaataaatctctgactgggagactgaactgtggaaaggagtctcaccacacctggagcctgctggttttccttgttcaattcaaattgctaccccactccacctcgacctgcttataccacacatgccaccc

SEQ ID NO: 90760 - DNA, 627 bp, Homo sapiens
tccaggtatccttcataagagagtcagcatggaagaaaggttaagtgggaactgttcatgcttttccttcatttgtagttccctattaaattaggcaaaccaaaaagaacattcggaaatgcttaatgctgattagactgtgatgaaaccagctcactcatacatatcacgggggactgggtcaacccatgccactgttctagacacaaaatttgaccatgtgtatcaagaatcttgaaaatatccatattcaagcctggtcatctcacttatgggaaaagaacccataaaaaagaaaaagtacaatttatggcaccatgtttcttagcacatgagacaacactatgcgtgcaccttattttatgtactatgaagaaaaaaagcaaaaccatgtgctgccatttactgtgataaaaagtaacacaggctgaaaccgatcaattgtcaggcccagccagatttcagagacattaaaatgtgagaaaacgtggtcttagaattggattaaaaaccatccaaaatggtttaaaaacatgcaaaatgcaataatgagatcatttgactccttggtaagtttcctggcctctgaacaggtgcgaatctgacgcatatagtggtaaaaaaaaa

SEQ ID NO: 90761 - DNA, 269 bp, Homo sapiens
tgtttccaaaacagcactccatttttcctcaatgaataaatggacatctagaagtaaaaattccagttcactgagaatgtgccgttcttctgcggatgacttttaggttttaaagagatctctggctgggcgcagtggctcacgcctgtaatcctggcacttggggaggctgaggcgggtggatcacctgaggttgggagttcgagaccagcatgtccaacgtggagaaaccccatctctactaaaaacacaaaattagctgggcgtgg

SEQ ID NO: 90762 - DNA, 571 bp, Homo sapiens
tggtagagatgcactctcgctatgttgcccaggctggtcttgaactcctgggctcaattgatcttcccaccttgacctccaaagtgctgggattacaggtgtgagccaccatgcctagcctcagggaattcttataagaactctatgaagtaggcatcaccatcttctctgtatccatggaaagagaggcctagagatgtatgctaacttgcccaagctcacatagcccagggtagcatagctgggatctggctgcaggcctgcttagctctgcatactcaccttcttcccagcttggggcagtgcagtgggtagcagttagccccccggtgcttgccagagaggtgccctacagggtaagagggcactgccctaagggtgcctggcgctgagaggttgggtgagaatacccagcagcttggagacaaaatgcaagggcacctccctcttctgagaagaggtcttggcttccacacccctctataccctgtatgtgtcagacatccagtggggaccagcccctgctaggccctggagatacaaaggcatccaggaggacatgcacgaggac

SEQ ID NO: 90763 - DNA, 807 bp, Homo sapiens
gagggcacaaagtgcaaaatagacatgtgaagagttaatagcttcaactattaattgaattgtatgtttgatggaagcagatgactaatagtggtcattgataatcaagtcatacaaagcagggcccttaaggccagaagctaacaaaaaaactaggtgaccaaaaagaatgagttttcctgaacatttactctggaaacccatagcatccttgctgtgcttctgaggctactgctgttagaaagctttagaaagctttttgccatggcactggtgagcttgtaaggggctaatagcattttcatagtcaccgaagattttttttaaaaccttaccagatatttagaaattacatttagaactcatattttaaattccatagaaatttaataaataagtgcatgaattattttcaattcagtatatatttttccacatttattttacttaaatcttaaaagaatagcagggcattttaagccattttctcagcaaacagtgttattgatctttctgaatatgtttcttatttaccgagatcatattttttaaagattatttttaaaagtataactatgttttagaacaaagtataatgtgtactggtcaatgaaatacaaggctgcttattttctataagaaaatgaattacattatttgattgattaaatgcagcagaaatgtaattacattatatataattaagtgcctatgaaataatattataagataagaagattgtgcaatgaaatatgacaatccttaatggaattaaggtgaaatgcattatcttgagattaagagatt

SEQ ID NO: 90764 - DNA, 193 bp, Homo sapiens
aaaaaataaaaaaagtacacattttgtgttgtccttttttgtttaataattcactttgctgagtccactttatcttttgaacctgatttagcccacagtttgagctgtggagtggtgacctggcctcttggtgagttccgggtccccgtgggactgtgtgctttgcccttccgggttctgcggaaggaactcg

SEQ ID NO: 90765 - DNA, 264 bp, Homo sapiens
tctttttggcatagtaccttttgctgtttctgaattcaaaatttaaataagtaaaaaatcaattatcactttatgttatgttctttttttctccaccgttgttttctttcctaatgtatcaagattagctgggtgtggtagtgtgtgcctctgtagtctcagctacttgggaggctgagtgctgtagtgcacaataattgcacttaggattaaccactgcactccagcctgggcgacataccaaaccctgtttctcttaaaaaa

SEQ ID NO: 90766 - DNA, 241 bp, Homo sapiens
ataggtaaggatttagctccatcatcgagacttcgacctttttgcaacttgacactttactatcttttgtgatgtaggtctcttaccatttttttttccctttctactccaattattccttctagtctctgttgttggtcctttttttaaaatattatttgtaattaaaggttctttttaagttgacattttcaaccaatgtgctctcgctttattttctttatattcattgtttttaaat

SEQ ID NO: 90767 - DNA, 344 bp, Homo sapiens
  misc_feature (81)..(81): n is a, c, g, or t
  misc_feature (93)..(93): n is a, c, g, or t
  misc_feature (95)..(95): n is a, c, g, or t
  misc_feature (100)..(100): n is a, c, g, or t
  misc_feature (104)..(105): n is a, c, g, or t
cgggtgactgtagacccagctatagggtgggaagatcctttgaacctgggaggcggaggttgcagtgagcggagatcacgnccactgcattcncnagccntcgnnggtgacagtgagactctgtctcaaaaaaataaataaattgcagctccgtgtattcaagacactgctggttgaaagaaaaaaaagcaatacattccagctccacctttttctaaccatgtagttttgggtaaattacttaatatgtagatcctcattgataacatgggaataatagtactcagtttgctgggttgtgaggattgaaaataatacttgtaaagtgacagagtctgatatgt

SEQ ID NO: 90768 - DNA, 135 bp, Homo sapiens
tgctgggattagaggcgtgagccacgatgccaggcctaactctgtctttttcatagactctgtaacaaacccattttgttattaagaggacaaactcacccactgtaatcccagctactcaggaggctgaggcag

SEQ ID NO: 90769 - DNA, 404 bp, Homo sapiens
tttgagttggacactggggctccaggtgactcataaagcgacatagtgcagttcttccgagaatgtgggacatggctagccattaagggcactctgatgcgtggcagctttggggaaataaatagcagtttgggaaactattctttgtttaggagagactttctcccacggataacgtgtaggatcttattttagactgactgttaagtctctgaagttgccccttttcatggttgtgtatctgactcagcatgggttgttcatctgactcagcatgggttgttccaggagaacgcgggaccaaatttaacagggcagaggatacaggcttgaagcactggctttgccaatagaagactttctaaggaatgactttgtctcattcaacatttaaattttcactc

SEQ ID NO: 90770 - DNA, 810 bp, Homo sapiens
atcagaattcctcatacctcccttgctggatgaactaaaatatttcccaaagtagcagcaaatatggctgtaaaaatgtccatgcaaaatgcagatgcccttcttgttgctgtgatcttctgaaagaaatgggatcacggcctcctctgggctctgtttgttagccctggaggggagggggcaaacaccacagacatcttgctagcttctcccaagagccaggaacatgtcagctctcagcaactcaactcttccttttcagatacatctggtctcagggccaggcatcacacgaataaaaataaagtacagtagagtaaaattttggctaataatgactgttccctactcagagttggtagggtgaggatacaaaaagccatagaaaagtattgatactctataataaattacaaacatatcatttaatgttatttttaaaaatggagaatgaaagcagtgaacttagcttaacagtgaaattaatgtgcttatcttgacttttggaaggaaaatttgaaaggaatggttaagctgccacccagtataaaatggtcagccataagaggggctgaatgtagacccagacagaccacctagccttctttcccatatcaccccctttttagtggtgaaaacaaaacaccaggctaccaagaaactgcccttcctgtttaatgtgcttgtgactttatgatccaagagtcacatatccaggaagaggtacccaaaaatctagtgctgcagacactgtttagcagaataaactccatgtttccaaaataaagcagcatcttaagtcagcctaag

SEQ ID NO: 90771 - DNA, 868 bp, Homo sapiens
tgatggtattgagaaaatttctggcaaggattttgctggagggtaggagagtaagtggtatttatcaagaaagtagtcctaggagagagaggcactcagctgtgtcccagagtggagtcatgttgtaatgaaaaggagtcgcatagccaggcaggttgtgcacgcctgtgatcccagctactagggagactgaggcaggcagatctcttaagcctatgagtttgagactgcagtgagctatgattgcaccactgcactctccagcgtgggtgacagagacccggactctaaaaaaaataagaagaaaaagaaaaggagtcgcttcctttgtattgagttataggtataagggtgggaatgtctgagatttccatcaaacagtagaatgctgatttttcattttgctggtataggcgtagacatatcagtgaatcaggataagaacattgcatatcctaggtaacaatgggttatttgatgaatggaatttggacaagtgtctggcattttagaaacaaataataaaacaaagtagaatttcttctttactctttacacaaggctaaattcaggtagttcaaagatttacatgaaaatatgattatcctagaagaaaacatgggtaaagccttttttattatcctgaattgaggaagcccttctaggcatattcaaatctcataaaaggaaaaggttaataaatctgatgacataaaaatagaacatttctgttttgaaaaaatactttaaagtgaagacaaatgataaacttatatttgcaattcatatgtagacaaaaacggcttgtttccttactatgcaaagaactctgatgtggttgttttgtggatgatttgcaccctgtgat

SEQ ID NO: 90772 - DNA, 734 bp, Homo sapiens
cttattgtcaccagttgtttataagaatgcccctttctccatacttggaaaactgaatggcattagcctgtagcctttttcagtcggaagcttgaaaaactggatctgttcttgaagttacttttgattagaagcaggtttaagtgccttttcatattactgactgacttaccgaatgcagcttttaatgtgatcaactattacctcgcttaattttatgtcctttgtccatctgtatcagttaaggttagtttcggctgcatataacaaagacaaaaaccaatgtgttacaatcgatagaattgcctttctctgtcttgcctagttcagaagtaggcagccagggctgggatgccattccatggtgtctttaagaaactaggttcccatctttctgttgtacctgcctggcttttcttgcaaaatgtgtgtgcctcccagctaagccatctccttttgacagccttaccagacgtctatccaatattcctgtctaattccattggctggaatgtggtcatatggccaccccttttgcaagcaagactgaaatgtagtcttgactgggatgcattgctgtcctgataaaatcaaagttctgttgttaagaagaagtgagaatggacattgaggtagataactagctgtgtcccaggtggacatccaaattttttcagtgtgcaattatgtgtataaactaatttgccttaaactttactttttctattacttgg

SEQ ID NO: 90773 - DNA, 305 bp, Homo sapiens
ttctctaggattatctgtacttcccctctgtcctcttttactacgggagatcgagctagctataacccaccttctttcatgagaaccacactaaattgcaaaaattatcccagtgctggaggagggcagcaggttgagattatgttggcaggaagaatgttggcattgattggcacgcaggggacgagagctgctttgtgctttaaaggtaactgagtatgagctaaaaagaaggaaaggagaggccgagagtaggaagaagaaagaaagctgacttggctggaggggtggagtgaagctgagga

SEQ ID NO: 90774 - DNA, 339 bp, Homo sapiens
tagagggtcctcagcctgctactcagctagctgcccagcacccctccccgtgtgatgtcccattggtctgctggcttctgtctagcacctttgctttccacactccaccctgtgcactcagcagtccttgttgcccctctaggacattacccagagcagatgcattggccccagctaatgggctcccttataaggggcttccacttctgactcctgcatggaccttgggcaagtcacttaacttttctgagactcttattcttttcccacgagatagagaggagaatagtacctattgaacaggaccaaacaggcacatggaaggggtttgaaagcaag

SEQ ID NO: 90775 - DNA, 448 bp, Homo sapiens
gcaccttgactatcttggatgacactcagtatccggtaattgaaggactggagacatttgtggttttcctcagctcagcacaaggagccgaactgaccaaacccttccaggcagtcattgcaattaatgacacattccaagatgtgcccagcatgcagtttgccaaggatttgctcctagtgaaggagaaggagggtgtcctgcatgtccctatcactcggagcggagacctgagctatgagtcatcagtgaggtgctatactcagagccattccgctcaggtcatggaggactttgaggagagacaaaatgcagactcttcacggattacatttctcaaaggggacaaagtgaagaactgtacggtctatatccacgatgactccatgtttgagccagaggaacagttcagggtctacctcggccttcctcttggaaaccactggag

SEQ ID NO: 90776 - DNA, 1116 bp, Homo sapiens
gtcattatttgacctgaccaatggttaactggaaggcttaacttgcaatgctatatttgtttcatctgagttagagcttgcccaatgagataagctttttcccagaacttcacacttactcaaaaaagacattgaaaacgctattttaaatatgttcaaagaaccaaagtaaacaacgtctcaccaaatagagaaaatcaataatgagatagaaattacgaagaaaagccaaaaaggaatgaacagattctcagagacctgtgggacactgtcagatgtaccaacataggcatgatgaaagtctcatgtcaaccataattttcacccatagccatacatgcccaagagaattgaaaacatgtaatacttgaatgtgaatgttcatagtggcataatagctaaaaaaaaagaacccagatatccatcatctgatgatgagtgaacagtgtggtttatgcatacagtggactggattcaggcataaaaaggaatgaagtattgatacagactacaacgtgaatggatgagccttaagaatatcatgctaacaaagaagctaaacacacaatatggttccacttacatgcaatgtccaaaataagtaaatccatagagactgaaaatacatcagtgattgctaggagctgggagagggaagaatagtgagtgcatgctaatgagtctgacatttacttttagaaagatgaatgtattctggaattggatagcgctgattatacgaccttgtgaatatacaggatccactgaactgcactttaaaagggtgaatattgtgtgaatcatatctcaatttaaaaagatatatataaagttccctgggtgaatactggtttccctcctcccttcagtatatgtgaaatgtagtgaaatttatatggttctgacagtattttattttaatgatttttcctccatccttggtagttttttttttttcctttatgtatatgaaacggcaacactgttcgtgaagtcagagctacacaaaatactataatcggaggagtggcaactctcccctttcccattgtttgttctttccaccccattcccgcccgccccctgtaaacaataaatctcattaatccctggtaa

SEQ ID NO: 90777 - DNA, 687 bp, Homo sapiens
tctgatatacagagttgtaacatgttatttaaaatgtccaattttcaccaaaaaattatgagacatgcacaaaaacaagcaagaatggtccatgcactgatggggaaaaaagcaatagaaattccctgaggaagcccagacttcacacttactcaaaaaagacattgaaaacgctattttaaatatgttcaaagaaccaaagtaaacaacgtctcaccaaatagagaaaatcaataatgagatagaaattacgaagaaaagccaaaaaggaatgaacagattctcagagacctgtgggacactgtcagatgtaccaacataggcatgatgaaagtctcatgtcaaccataattttcacccatagccatacatgcccaagagaattgaaaacatgtaatacttgaatgtgaatgttcatagtggcataatagctaaaaaaaaagaacccagatatccatcatctgatgatgagtgaacagtgtggtttatgcatacagtggactggattcaggcataaaaaggaatgaagtattgatacagactacaacgtgaatggatgagccttaagaatatcatgctaacaaagaagctaaacacacaatatggttccacttacatgcaatgtccaaaataagtaaatccatagagactgaaaatacatcagtgattgctaggagctgggagagg

SEQ ID NO: 90778 - DNA, 439 bp, Homo sapiens
caactgtcagtccattaggattatttgaggtaggcgtctaattcatttttgttaaggtaactgaatctgaaatatttaatttgtgcagaatctgtagattcctacaaacaaatcagtccagtgctttccctgctttctgtgtctcttactagagatctcatttatagctcacctagaagacggtagagaatatatgacatatataatatcaatttggctgtaggagagactgtgagtggaatggataggaacataagtatgccagttggcataagtccttcatggcacagaaacatgaggaaaaattctaaactatgttgatagaggaagagattgagtccaccataaattaagactaggattttaacaaaaaaaatatttctgggctgtcagcaaagtcatttacatttttagtttttattagcagcataatttaaag

SEQ ID NO: 90779 - DNA, 977 bp, Homo sapiens
gacctgctgctgactatttgttggtagttttgtcttttacacatttgctgttagatttagttattttgaaatgttgaacttgaaatgtaatgaaaaggacacatcagaatttatcatcagggaagatatcttttatgttgagcagctgctatctgatcttgacagactgtcctcttagaggactgttgaagtccattctagtcattttgtaacttcataactgcagaaagaaatgatgcaaggactgtttagtggactgagatggctgagcaggttcttggcctgaattatccagaggagataggtggatctagcttcagaggaagtctacaccccattcccttctgcttacaatgtacccatgatatgtgtttagcacagtaatactgtaacaggacatcacatggaaaaatcaaagcagctggctcactgtatttaactgaaaagaatgcctacagattggatatttaatagggaaaattaaggcactttaataacaaacttcattatgtgaaacttgttgaatattaacatacaatataccttgtatattaatgccatagtttttagaaacactaattaaacaacaaatttaaggggtgctggcatatcccagtgacaccttcagttttattgctgcttagtattttctagtaaattagttttaattattggtagtctgttgggcaccatttgggaaagaaataaattggtctcagtgtagcagacttgtagccaaaaactttgaataaaaaataagtataataaagaatattatttcatttttaaaggaattgtattattttgaagtgctgtgtggttgatatggtttggttgtgtctctacccaaatctcttattgaattgtagttcccataatccccacatgggagggacccagtgggaggtgactgaatcatgggggcagttttccccatgctattctcatgatagtgattgagttctcacgagatttga

SEQ ID NO: 90780 - DNA, 406 bp, Homo sapiens
ccgttctgggatgtgtgtaattgtagtaggtcattacccagaattatatgccatgtgtgacagtctgcagagataggatgttgcaacactgtcaccacatggctcacagagtagaaagtcattcttcaatttttatgataccttaatttctattttaaaaagcctttaaaaatcagcatttggatttttatgttattacatcccagaaaaatgatcttctagtgaatataagtacagagtagtagtatcatctggattgtaatgtttcctttaggtgactgaaatgacctacccctttctcattgcttttgaaattgaaaacacttttgacattgtttttgggacacaggttctaaaaaaaggcaggtagatggatcacttgagtatatcaaggaatacctgcatc

SEQ ID NO: 90781 - DNA, 647 bp, Homo sapiens
ctgcgctgcactaccaacagcaaaagaagtgaatgggacagctctgaagtatttgaaagcaacagcaggatggctgtgagaacctgcctcacatgtagctgaccccttcctcacccctgccaacagtggtggcatatatcacaaatggcagtcaggtctctgcactggcggatccaactgtgatcgaaagttttccaaaaataagttgtgtctgtattgaacatgaacagactttcttcttgtcattattctctaacaatactgcataacaattatttgcatacatttgcattgcattaagtattctaagtaatctagagacgatttaaagtatacgggaggatgtgtgtaggttgtatgcaaatactacaccattttctatcagagacttgagcatctgtggattttggtatccaaggggctttctggaaccaatccctcaaggataccaagggatgaatgtaattgtacaggatatcgcattgttggaattttatacttctttgtggaataaacctatagcacttaatagatagtacagactcattccattgtgcctgggttaaagagcccaatgtatgctggatttagtaagatttgggccctcccaaccctcacgaccttctgtgaccccttagaggatgact

SEQ ID NO: 90782 - DNA, 255 bp, Homo sapiens
ggagttctccggagaaaccgcttccggcgctcctgacacactgagatagaaagtttcacagaaatagggcaagggatagggcgagggctccagggcaggcgtcctagggcacctggcgcaggggcggaccggaaaccccaggcaaacgcagagtcggagatggcattccaggcggaagatcaagcaaaggcagagagggaggacggcaccgagcggctccctctgaccaggactgaggatgatgcgacctgatac

SEQ ID NO: 90783 - DNA, 448 bp, Homo sapiens
gtagacggtcgtgactgcaattgtccaggttcttgacattttgaacaaagaattgaacaaaaggcccagcaaagcaaagaaagaatgaagcaacgaaagaacgaaagcagggatttattgaaaacgaaagtacactccacagtgtaggagctaccagggcagaggctcaaggacctggatacagaatctgcctgggttcaaataccctctagaggtttgtttccctttggccacttcatgctcacctcatgtaaatgaagtggtagcccgcaatcagtctgattggttgtagacaaccattcagaggctggagtgaaattacaaagttgcaaaggaagactggacccgcaatcggtctgatttgttgctaactcccaattttccaactgcctggcagaaaatgtcaaggggagtagcctctgatcctcttgttacttcggggtggaaa

SEQ ID NO: 90784 - DNA, 658 bp, Homo sapiens
ctagaaataccatttgacccagcaatcccattactgggtatatataaaacggagtaaactttcatttaaggaaggatgaagttaaataagcaaaggtacccagagaccccactaagtgatagatactagctgaatgctttatttaacaagcctactattctattgctaacctgcttgagtatgatgcattgctactatttctaaactaccaatttatttcccctgtgttttgaggactcaatctcaaagatgctgactgaaaaataaagtttttgaacaatttcatgaaggttgggttgtcgagatcatgagttctgtctctaatgacaactctgtgggaaatggataaactctgataaactctatcgcactgcacacaaatgtgaggctggaaggcagtacgtaatttatgaggccttttgttgtaaaaatgagagttggcaggattccgagtaaatatcttttttcctaagggtggaagataggacttggagagatcaatgtgttggttgacagcatttgagaatgtttgatttgagcttcagcatcataggtggggaacatgtggctttatagatctgctgtttcttcccctgcccagtggtgcattccttgtctttactgaagtatgtttttaaaattcatttttaatggtggt

SEQ ID NO: 90785 - DNA, 433 bp, Homo sapiens
gcatttttcccccgtttggttaccccaaatattgtggacttctgcttgtttatttttctactactttgatatagattgaatcagccaaatgatggagaaggaacaaagcaggagaagaggttaaaacattgttaagaaaaatattctaataaaatcccactccaattttttatagtactctttttaggcatcaaaattaatgtctactccattgtttcacttctctctaaactatgtccaaataatagaattaagtgaattgattgaggtgttattagaccctttcttgcttagtcttagattagtacatgcctagatattttatagtgagacaatatatttgatttcaaatatcagtgtatttaattttttaaaaattaattacttctttacatcagttggatattctgaattatcatgagtatatccctga

SEQ ID NO: 90786 - DNA, 506 bp, Homo sapiens
ctgagggatgtttcactctgacagttcattgagctgaatatttatgatggcttgtggccttttccatatagatgttatatttcagtaaaaaaagttaacagaaatataatttttaaaaagtattacattaagtgatgttttgaagtcatgaatatactcaggcagggtgcatgcaaaaaaccaactgttctagtgtgatgcaaaggaaacttgtgacttaggataaagtttccaaggactgcatcatctgtgaattcaaactgtgctgtgtcctctcccaagcccttcgcttaaactgaagagaaggacatctgttctgggaaaacatgtaagatggctgaaaaagtgatcctaatgatgagaaagacactgcttgtgttgagtatgcataaaattgcttcataatttatgagaatggaaaagacaatatttatcagttatatatttttatatgatatatgaatttaaatatatgtccaataaagtccattaactcatagaagtac

SEQ ID NO: 90787 - DNA, 388 bp, Homo sapiens
ccataagatcatacaaatatcctgaaacactcatctatctcaaaacacccatcgtttagaaatagaaatgaaacttaaggtgatacacccatctatctgatcacatttaaagatgagaaagatgcattgtaacaccacaatttcctaccagtgcccattacaaagaacaggttaactgcaggtggactgaccaagcagttcctctggatctgtggtctaaatgaaaccaaatgggtacttcaagactgctcaggaatgcaggaggaaaacaaagccagaggactagcaactggctggctaccaccataggcatagacaccagaggttgtgcaatgtcaaaggcatatttcaaaatatcaaagtacctctctcagggaaataaaagatg

SEQ ID NO: 90788 - DNA, 159 bp, Homo sapiens
agattatgacacatgtttattgggcgcctgttatggaccagccctgtgctaggacctggggtgcagcggttaataaggtacacattgctgctgccctgagagttggcttggtggtgaagagagcccttggctggtggttagaaagccagcttttggatc

SEQ ID NO: 90789 - DNA, 384 bp, Homo sapiens
tgctgtaccctcattatctgcctaaacaattttttctcaactcctatatcaatattaatatgtacattggaatcaatcatttgactcaaaataattatacaattatagtttaaaatagaaagtaaatacgatgatacccaataattcatatattcaagcagtgatatgacatttttacagtaaagctatttgactttctctagtatatgtaagtacaaatgggtattctgagatcttgtgcatattctactctagaaggtttcctacagtatttattccaacatacatttatatcaacagttacttctttttttacatgttaatgattggtgatgtcacattttaatatttacaaattgaatggctataaaatgttataacatt

SEQ ID NO: 90790 - DNA, 208 bp, Homo sapiens
tatattaaaagtagatgttgtaaacggacatattttccaaatatctttttgttaaaatccacatgaaacattgtctttgggcaatggaatggccaaaccacctttttggacaggacacgttgtatttgtgttctggtctagggaagagcagaaaggagcaaatgcccatgggctccctgtggtgaggccggattaaccagtgtctcac

SEQ ID NO: 90791 - DNA, 385 bp, Homo sapiens
tcatctgtgatggggaaagattgtagcatccaaccaaagagctataaagaagacagtgttgtacagtttatgtcttggtcttaattctaaacttcccttccaatatgtgcttatggatgttttaactcatttttcgtttgtttgtttccactttgtcatctgttcccattctttaatattactttcatttccagctaaattgttaaactccagttacatggagaatattaccatgggaaaacatcatttaatttatattctatctagttctggcaatagcagtaatacataatgtaacttctcagtgattctcatgtcataatttaactagctttgacttttactgggagtaagcaccctactctggaaaatccatttcataatt

SEQ ID NO: 90792 - DNA, 534 bp, Homo sapiens
taattggcatgtaatagacatttgatcaatagttggtatatgaaggaatagagtcctcagatgtataactcccctgaaagtgaacacaaaattgcatgtaggtgcacaatgcatttttctgagcagagagggctttttatttatttatttgtttttaaattgtaagaggaatttatgatgaaaaaagtccaagaaccctgcactagtctatgctgccctagggctatctggaataattaattttcaaatattgaggcacttaagagacaaagaactaccttgtttccttggacagtagaatgaaatgggtagaaacaaggaaggctttcttgatgaagatgtttgctgaataaaaatacttcacattttatgtgaattgataatcatttgcatttgcctgttccaaatgcacaagttacaaagtgaaagctagttttcttcactccagctcttctcagtgtggccttagtcctttgtaaatgtggtttctctctccagtactgctgagctattagagttttctaccgcatctta

SEQ ID NO: 90793 - DNA, 385 bp, Homo sapiens
ggagagaacaaaccctcttactggccttgggcccatccctctttctcccacactgctacttttgagttatctcattttgctcccaatagtcagccttgacttttctgggcttacctgggcatcagggacccatgttgcacattcagttgtcccgattatgtctgccttagagcgtctcctagggcagccagtctggaacagtcagtcacctagggtcctggagctcctgcagtctgccactcgctccttctgcctgataacaaatactattccttttatccttgcaactcgacccagaaagaggtggctgtcaatgtccaaggcccctggaaacgaagactggaaatgtgaaaccactgggcacaggggaatgggtgggtctgag

SEQ ID NO: 90794 - DNA, 764 bp, Homo sapiens
tgctgcagggggtgcatggaagaaaactggcctgctttcgaggacatcatcagagcccagagttcaacagatcatgaacacttcgagacaaatgaagacaggtgcaatctccttgaagaaataaaatctaagtaccaacatcccttctgagtcaagaatctcctctcttaaaaatgtaaagctattgatcagggagggaagtgtattaagcagagcatttttgatcaatggctgtatacttcctcctccctaactcccaaactccagacacaactgcagtaactcctgagattcttatggagcaggagagcagataaatggaggagatgaagcatgaggactgaatatggaaatttgggtgctatatgtttaatattgactgatataaatcaacatgcatatatcaatgtgtcacactttccagtttctaggcaaagatctttggtgctgatcactccaccctctgtataccagataattgtggccccctctctctctaagcaaagatggtagggattgtgaggtgagggtgggcttggtagaatgattgcagaattttaaaatatatatatctctctctctatttgtttccataatgtaatcattactctacatgctgttttggaactttttcacttaatataacatgacactttctacttgatatactatagatcataaaataattcattctctctatatttttgatgacttactgagttgctttgctgagcattcaggacacaataatgaaaaaatgagta

SEQ ID NO: 90795 - DNA, 1703 bp, Homo sapiens
gtgagggtgtgactgagtgcatgagagtgtgactgcctgtgagtgaatgtgtgactgcatgtgcgagtgactgcctgggaggatgtgattgtgcatgagtgtgcatgtgggtgtgactgcatgtgagggtgtgactgttgtgcgtgtgaaggcttgattgtgagtgtgcctgggaggatgtgagtgtgagggtgtgactccctgtgacatgagtgtgcatgcatgtgagtgtgaggaggagtgtgtaggtgtgagtgtctaggcaggtgtgtctgcagtgtgtgcagcatgtgcgtaagtgcatgtgaatgtgcgtgtgttgcatgtgagcatgtgcacgcctgtgcgcgtgagcattgtgtgcgtgatgggagccgtgggtgctgtgtggacagcccctctgcccctcccatgggctcccacgcccagcatccacctgagagaggagggagctgccttcccattctgcagagtctgtgtgctgaggccccgcagaagcaagtggaggagctgggatgtgaacctgggaccccggcgtagggggctgcttggctgtggaccctgcccctcaggaaagcccagggtccacctccagaggactcgttctggggcgggggcggaggcggggggcctccccacccggggctcgatgaggggctgtccgtttcttggctcgagtgctgccaagtgctccctgctgctgcgcccaccttcccggggagaggcgagcccctggctccctgagttcatgacccaccctgtccaccatcagcagctggcttgtgtctctgggtggctgggcaccagcctcctggaggccacgtgcctgggtccacatggagggtcctggtgggggcatcatcctgggtcccgggagtgaggctggcaggtgcccatcgggggtgtcaagtccagggggatcgaggctctggaagctcaagggggctctggccttggggaccagctgagtttccagctggcagccaggtcctcgagggaaggggtttggacagaatccgaggccccctaagctgatggggtcccctgtctccccttccagccctgacccactggacatggggactctttccagtccggagagctccttgtctgtgtccccagcagaaggtggggtggctcctgcctcaccctctgcccagccctgatccaggccacagccatctagggccctgaaggaggggcaggaggcaggggtggcttctggaacctgaggcttggccccggttgggtctgttcttgggggctgcactgctggatcccaggagcaggtgtggaacagccccatggccagggtgatggaaatcctcggctgcatgcagacatagacccaccctggactgggctgtctccggagcctagacacatcgccctgggaaggggcagctgggcctgcagtgtgctgggcaggggctggcggccctggtcgtgggctctccagggtccctcaggggattgggcctctccccaggcaggaaggtgggaagtgcaggcatgacccggggttcctgaggctggtccaccaagttgcttctgagacgccttcgcttctgtcctggctggctgttaatgatatccctgttctaattccactctggctaaactgaaagtaaagatccttaagcttacatgtgtctattcctcaaaatcaaaataaaaacaaaagcacccgagtctccaacagg

SEQ ID NO: 90796 - DNA, 1645 bp, Homo sapiens
gtgagggtgtgactgagtgcatgagagtgtgactgcctgtgagtgaatgtgtgactgcatgtgcgagtgactgcctgggaggatgtgattgtgcatgagtgtgcatgtgggtgtgactgcatgtgagggtgtgactgttgtgcgtgtgaaggcttgattgtgagtgtgcctgggaggatgtgagtgtgagggtgtgactccctgtgacatgagtgtgcatgcatgtgagtgtgaggaggagtgtgtaggtgtgagtgtctaggcaggtgtgtctgcagtgtgtgcagcatgtgcgtaagtgcatgtgaatgtgcgtgtgttgcatgtgagcatgtgcacgcctgtgcgcgtgagcattgtgtgcgtgatgggagccgtgggtgctgtgtggacagcccctctgcccctcccatgggctcccacgcccagcatccacctgagagaggagggagctgccttcccattctgcagagtctgtgtgctgaggccccgcagaagcaagtggaggagctgggatgtgaacctgggaccccggcgtagggggctgcttggctgtggaccctgcccctcaggaaagcccagggtccacctccagaggactcgttctggggcgggggcggaggcggggggcctccccacccggggctcgatgaggggctgtccgtttcttggctcgagtgctgccaagtgctccctgctgctgcgcccaccttcccggggagaggcgagcccctggctccctgagttcatgacccaccctgtccaccatcagcagctggcttgtgtctctgggtggctgggcaccagcctcctggaggccacgtgcctgggtccacatggagggtcctggtgggggcatcatcctgggtcccgggagtgaggctggcaggtgcccatcgggggtgtcaagtccagggggatcgaggctctggaagctcaagggggctctggccttggggaccagctgagtttccagctggcagccaggtcctcgagggaaggggtttggacagaatccgaggccccctaagctgatggggtcccctgtctccccttccagccctgacccactggacatggggactctttccagtccggagagctccttgtctgtgtccccagcagaaggtggggtggctcctgcctcaccctctgcccagccctgatccaggccacagccatctagggccctgaaggaggggcaggaggcaggggtggcttctggaacctgaggcttggccccggttgggtctgttcttgggggctgcactgctggatcccaggagcaggtgtggaacagccccatggccagggtgatggaaatcctcggctgcatgcagacatagacccaccctggactgggctgtctccggagcctagacacatcgccctgggaaggggcagctgggcctgcagtgtgctgggcaggggctggcggccctggtcgtgggctctccagggtccctcaggggattgggcctctccccaggcaggaaggtgggaagtgcaggcatgacccggggttcctgaggctggtccaccaagttgcttctgagacgccttcgcttctgtcctggctggctgttaatgatatccctgttctaattccactctggctaaactgaaagtaaagatccttaagctt

SEQ ID NO: 90797 - DNA, 254 bp, Homo sapiens
  misc_feature (17)..(17): n is a, c, g, or t
gagagagagagagaganagagagagaggagagagagagagagagagagagaggtcgtgggctctccagggtccctcaggggattgggcctctccccaggcaggaaggtgggaagtgcaggcatgacccggggttcctgaggctggtccaccaagttgcttctgagacgccttcgcttctgtcctggctggctgttaatgatatccctgttctaattccactctggctaaactgaaagtaaagatccttaagctt

SEQ ID NO: 90798 - DNA, 311 bp, Homo sapiens
ggtaggaggatcgcttgagctcaggaggtcaaggctgcaggaagctatgattgcaccactgcactccagcctgggcaacagagcatgactctgtctccaaaacaaaagaataagataatgataacctttacaggttccagagattgggacctgataaatttgaagtcattattcagcctctggcagagggtgagagaggcacatcagagttccttcaggacatctctaatggcacacatttatggataccttcatgcttgacaaaagtagtgaccagtctctgggggcagacacatttttgaggattctgt

SEQ ID NO: 90799 - DNA, 289 bp, Homo sapiens
  misc_feature (7)..(7): n is a, c, g, or t
  misc_feature (215)..(215): n is a, c, g, or t
gagcttngcctgttctttgcctatgtactcctttgtgtgtggcttcttttgcttctctttgtggagagattttttaataatagatttgtttccttgaatagatagagaactattgagattatttacttcttcttaaattagttttggtctgtcatgtttttcataagggatttgttcctttctattaaaatgatagttttttgacttacagatgngtttataccctcgagttataattcaacgcctgtaagatctttacattctcttttcatttgattttgataatttg

SEQ ID NO: 90800 - DNA, 187 bp, Homo sapiens
acctgccttggcctcccaaagtgctgggatcacccacccatgccagtgtcttaaaacatcaaatcatcaccctcaaggtgtcagtggacaattcctgtataattatgtaaagatccgggaaagtgtttaggaaaggataaaattgttttaccactctaaatgcatgctaaatgcttgggctgaaaaa

SEQ ID NO: 90801 - DNA, 1006 bp, Homo sapiens
tggcataataggcacacccaaaaatgtgtgaggtgaaccatgggaatttatatattaatgtaatagagaagtaccaagttgagggtatagaattttattttatgttatttttttcgagacaaggtctggcccaggttggagtgcagtggtgcgatcttggctcactgcaactgttgcctcttgggctcaagccatccttccgtctcagcctcccaagtagatgggactacaggtgtacaccaccacgcccagctaatttttgatattttgtaaagacgggtttcaccatgttgcccaggctggtctcgaatttgtgagctcaagtgatctgcctgcctcggcctcccaaagtgctgggattacaagcgtgagccaccacgtccagctagggttttttttttttttttgtaaggttagtaaactttttcagtaaatccaccaccacccctcccagctttttattaggtaaactttcaaacatatagaaaaatggaaagtacatttgtcatttgtatacccactatatagattcagtagttgttgttttatttatctgtctgtatatgtggatgtgtgggtgtggatacacatatacacacatacacatatttaattgctgaaccattttaaattgcagacatactttgcccctcagtacttaacatatttaaattacagacattatgatactttgcctctcagtacttaacatatttatctcctaaaaaatgagaatattctgccatataaccaccatattatttacgtttgagaacatttccaaggccgagtgtagtagctaatgcctgtaatcccagcactttgggaggctgaggtgggcggaacacttgagctcatgagttgaagatcagcctgggtaacatagcaaaaccttgtctctacaaaaaatataaaaattagcgtggtgtggtggtgtgtgcctatagtcccagctacttggggggccgaggcaggaggatcgcaccagcctaggaagtcaaggctg

SEQ ID NO: 90802 - DNA, 532 bp, Homo sapiens
cagaagttgatattctgtctattggatcctgcttctcccctggggtcttcttggttccctgaagcccctcttccggagtccctgccctctatcggctctgcctcctgcttcttttctgtattgccatgatttttgctaaggataaaggacaacttcattggcttctttgggaaacttgcaatctccccaaacaggcccctctgagatttctcctttccatttgcttctgctcccccttcctccttttgccaccttcgatattttctccagtttccttgattcctttgatacgtccccattcaggccactctggccttccatccaacctgccagaactttttccacttcagcacttcagtcacttaaacattagggctccctgccctaaagggactcaaaatcctgcaaaaacaaccacctaaggataaaaagagaaaaaatgaaactgtttggaaactgggcaaatgaatactcttttaaaagtctttttctgggggccaggtgtggtggctcacgcctgtaatcccagcac

SEQ ID NO: 90803 - DNA, 502 bp, Homo sapiens
cagaagttgatattctgtctattggatcctgcttctcccctggggtcttcttggttccctgaagcccctcttccggagtccctgccctctatcggctctgcctcctgcttcttttctgtattgccatgatttttgctaaggataaaggacaacttcattggcttctttgggaaacttgcaatctccccaaacaggcccctctgagatttctccttttgccaccttcgatattttctccagtttccttgattcctttgatacgtccccattcaggccactctggccttccatccaacctgccagaactttttccacttcagcacttcagtcacttaaacattagggctccctgccctaaagggactcaaaatcctgcaaaaacaaccacctaaggataaaaagagaaaaaatgaaactgtttggaaactgggcaaatgaatactcttttaaaagtctttttctgggggccaggtgtggtggctcacgcctgtaatcccagcac

SEQ ID NO: 90804 - DNA, 479 bp, Homo sapiens
gattacaggtgcccgccaccatgccaggctaatttttttatttttagtagagatggggtttcaccatgttggcctggctggtctcaaactcctgaccttgtgatctgcccgtctcagcctcgcaaagtactgggattacaggcatgagccactacgtccagcctggatattgtttttattagcatcaatttatgtgattatatatgtcttccttagtttgttaatatggtagattatattgattaattttgaaatgttgaaccagccttgcatacctggataaatcatattggtcatgatgtataatttttcaatacattgttggattcaatttggcaccattttcttgagcatttttatacctatgttcatgggcaatattggtctgtagttttcctttcttgcagtgtctttatctggttttgatattaggataatgctggtcttatagtataagttagaagtgttccctctgctgc

SEQ ID NO: 90805 - DNA, 422 bp, Homo sapiens
agaaatagccacaaaaacagagtgatttggtctttgattttaaacttttaaaatccacgttttagaatttctgactcttccacttgcaagctagatgatgtcggcaagatacttaagttttctttgccttggttttctcctctgtaaaatgagaatactgcgttccatagactctaagccattattaagtcttattaattgtaagactcaccattaattcacataacgctaaggaaaaaatgcccattacaatggtgtcttaaattgagaaatgctaaaatataaaataatgtgcatcttagaatcgatgaaatttgctaatacttgccttagaagtttgtcatagggattaaatgggaagcatctagaatagcatctagcacacagtaagtgctcaataaatgactattcttgcagtaaag

SEQ ID NO: 90806 - DNA, 344 bp, Homo sapiens
gctttgcctgtatctcttcagtgatgagtaaatcccatgaggaatgatttagaatgccactgtacaaatggcagggttctgggaggacttagttcagccctgtgttccttagcagaactttgagtagatttggtaagaaggtgaagagctttcctgtatatttcagcagaagttgtgttgaatcacagtttgctacaaggttttgtgatggtggacattgtgacccttccaaggtctcttattcatcattgtttctattctcctgaggcaggcaaagaagcctgaaatgtagaaattgccttagatatgactctgttcattcttaatactgcaagtgctcttat

SEQ ID NO: 90807 - DNA, 501 bp, Homo sapiens
gattaatacacactggcaatttaaaagtaatccctcactaaccctggggaatccacactgatttataattttaaataattaaaaccccacatttatattttactacaaatacatccagctacttcagtgtgcttatggtacattcttttagccacttgcagttacattgggagaaggaatattttaccccaagattctccatgaaaatgttggatctggaacctctgatgccaccaaattcaagcaactgtaaaaatgttttctttttaaaaaaatgattctaataattcatttcctagtatacactggtcatgtaatttactgaaagaacataagctgttacagacattcagatgaagtcaggttagtagtggaacacaagataatgggaaacctgaaagaacaaaaaagatcacagtcttgacaactgcggtgaaacacttataaccttacatatatgcaaaaaggggattatgaaagacaatgtctagggctgcaagg

SEQ ID NO: 90808 - DNA, 579 bp, Homo sapiens
aataattatctgtggttcggggctctgttctcttggcccacagctccatccttggagtcattcttcctttttcaggaagagcagcctgtgtttgtagatgagccatttcatcagccaatttcctgcctgtagaattttggggagtctgacaacctttcgttttgttctttctttctcccattcagtccaagctggcagtatttctcctggtatgacattctcaaaagtcatgtgggactcccatgtatgtctctaggatttgctccattagacaagggactcctctgcaaatctttcctggaaaatcccctctctgtcctggcttctgctgaaatgtctaaggggatccatgagccacatgtctaatctcctgaaagagccctccatacaaatgaatactttgcattttgcatctttctgaggtacaagaaaaaaggttgtccagccacacctttagttttctctccatagcatacttttctgacagtgaatctcctaattttagaatcttctgcaatctggataggctgaaaatcatccaaattgccaagtcctggttcccttttccttaacaattct

SEQ ID NO: 90809 - DNA, 302 bp, Homo sapiens
aagtaggccttaatacctaatcacttgcattcggtggctagatttgagtggataagaacacctaccaaagtacaacttccaatttttatttcagaaggaaaccatccttgagagatgagaaaataacttactttaagctttattcatttttgtatttggctgccataaaatatcttttactaagtagctttagggttttttttttaatctaatcctgattaaattaaaagaaaaacctgggtaagttaattgtaagctttcccataaaagagagaagcacaaaatgccatgggaatatatcc

SEQ ID NO: 90810 - DNA, 391 bp, Homo sapiens
aggaagaatggaaaaagactaaaagactgaagatgggtagctatagttttaggttttaaagagcataaagactaaaattttcctatctccaacttctaagcctaacaacaattgatcaaatgaaagacaatattattaaatatatactttgtaagcatttacaaaaaaaggaattagtatgaccaagtgaaattagcatgtgtttactgataaaaagttttaccagtctagcattattccccacccttgttttttggtttggtttaatttaattttttttaaatgtttgttaattgtaaaaaaaaattaagaaaacaaagaaaaaaattctaactacaccgttaacatattagtatgcgtatgtgtgttgttgttgttgctgagaccgcta

SEQ ID NO: 90811 - DNA, 201 bp, Homo sapiens
tgacataggatttgattacaatataacaaagtcttttcaagccccctaagaaagggttctatctaaaatatcttaaaatatgtctgttactttaggttatttctgcttgcattaagaaaacaaatattgtttctatgtgaaggaaaatatacaatttaaaaaattaagttaatttgttgcatagatagtttgtgttcatgg

SEQ ID NO: 90812 - DNA, 295 bp, Homo sapiens
tgggaggtaggtggaacctgcagtgagccgagatcgggccactatacacctgcctaggtgatacagaccctgtcttaataaaaagagtttgccctgtggccctcaaggattcacatagggtccactttcgttaacctttgatacctagacatttttggaagtgcttctttcttattcgtttattttttcatttgttagcattgttactgaccctccaattttaacaacattttcttgtttctattggatagttactaaataagaaaagcaaccctcagaattaaacccagtgctg

SEQ ID NO: 90813 - DNA, 421 bp, Homo sapiens
aatcaacgtgactgggagaaagacggtgccattcacaaaagtatggaaaacctagggagattggtagattgtaggtggagaagacttaatcatttttaaatattgcattatagaatgtatagctataaagagcatcatgataatgcccaatccctttgtttcatgtagaagaaaatccagtgggagtaagtaacttgcctgtaatcactcagtaagttagtgaaatagccagttctggaaatctgatgccctattttccctaaacagtgtttcattcataagatgggctgtcttatgatgagtttatagaagtagaataattgtgtggtgctgtgcagtgatcagttggaaatacagatgtggcacttttgtaaaagatcggggacaatgatttgggaggcatctaaatgaaaataacatt

SEQ ID NO: 90814 - DNA, 248 bp, Homo sapiens
aaacattgatttagtaagtttacataaccatactttaaaattttttattgaaaattaatcagattttaatggacacatgaaagttgcatatatttatcatgtgcaatgtaatgttttcaaatgtgtgtacactgcgatggctaaattgagctaatgaacgtatgcattgccacacatacttataatttttttgcgtggtgagaacactccaaatctactctcttagcaatttttaagaatatgataca

SEQ ID NO: 90815 - DNA, 203 bp, Homo sapiens
acgttttggtcaatgatggaccacgtatacaacaattgccccataagattgtaatagaattgaaaaattcccatcatctagtgatgttgtagccatattactcacgtttatggtgatgcttgtgtaaacaaactgtcctaaaaagtacagcacatataattatgtattgtacataataataataaatgattactttactggct

SEQ ID NO: 90816 - DNA, 626 bp, Homo sapiens
cttaatactgtttatttgtgctccttcctttgtcttttcatcaagcttgccaggtttgcctattttatttgactttgtaacagccagcagtaggttttagtgactccttctgtttctttgttttccgttttactgacatttgctctcaactttctactttcttctttctcatttttttagattattgttactttctctaacttcttaaattgggtatagttaaccctttaattttcagttttctttttttaatttaatctcaatatttaaaaattacatcaaccactttattacatcccataaactttgataggtaggtaatagttttattcattcttagctatcttctaatttccattatgaggatttttttggtttccaaatgtgtgaggttttttgttttagttattattttgatgttgatttctcatttaattgcattatggtgagaatataatctgtgtaatgtttatgatttggtatttgtgaatatttcatataggatctagtacacaattactttgtaaatactttaaatgtaatggaaaagaatgtatattctctaaatattaaatgcaaggtatatatgtccattcagaaataaacttgttattttttatattatt

SEQ ID NO: 90817 - DNA, 1262 bp, Homo sapiens
aagagttctaatcaccatttgaaaccagagagtgaataagattaacttttttagaactctgaaaaataaaggctttacagcaatctgaggaggttttactcaagaaaaagaaataaatctcataagaatatcacctttgacctcagctggtaatatgcctgtcaggtggctcaaatttttttgtcacactgcgcatgtttgtgaagtgatcacagaagtgctctgattattgatttgggggttttacaaataaattttagcaagtaggctaatacacaaatacagaatctgcaaatagtgaggcccaactatatattcagagaactaaaggaaacatgcttaaagaattaaaggaggccaggtgaggtgcctcacacctgtaatcccagcactttgggaggccgaggtgggaggagctcttgagaccagcctgagcaacatctacatgtgcaacatgtagagaccctgtgtctacaaaaaaatttttcaaattagctgggtgtggtagtgtgcacctgtagtcccagctattcatgagactgaggtgggaggatcacttgagcctgggaggtcaaggctgcagtgaactatgatcatgccactgcactcccacctggacaagagtgagcctgtctcaaaaaaaaaaaaaaaaaaaaactaaagtatgagaacaatgtctcagtaaatagagaatatcagtaaaaagacaaattataaaaaaccaaaatgaaattctgaagtcaaaaagtgcagcaactcaagttaattcactagagaaggtcagcatcaaatttgaattaccagaagaaagaatcagcaaacttgtccagtctgagaaatgatagagcccaaaatgcatgaaatagcagaatcaaagaggcaaatggacaattcaaacatgagagttggagactttaacacccactctgaataatgggtagaacaactaggcaacaaagaaatggaagacttaaacaatactgtaaaccaactggactgagcagacatctatagactactccacccaacagcagctaaatatacattcttctcaaatgcacatggtctattctccaggatagaccatgtgttagcaagtaaaacaaacctaaataaattttaaaggattgaaatacataaagtatgttctctaactacagtaaaataaaattagaaaccaatagcagaaggaaatttgggaaattcacaaataagtgaaatttaacctaccttcccaaataaccaatggattaaagaaaaaa

SEQ ID NO: 90818 - DNA, 468 bp, Homo sapiens
agaacaaaaaagtgttattagaatctataacagcataatttcttgactttaattcttcagtactgttctaacacaaagctagtttcacaaagtttggagatttttattacatgtgaagacagggtaagactttataacttcaggactgacaaggatttggggcaagacagagtactgggaaacaagcttaaagttgagagagctcattatagaaacaatgcattagttttgaagttgagaatagagacaatcctagataattctggcttaaaaccactttacctaaagtatacaaatattagtttcaactacttggttcattacctcaaatatccactttactcaactatgtaataatcacaaatgattgacctgtaaccaataggatttctggagaaggtaacttccattcctttgtggactccggctggaaaagtcccttgggttaataaagttagattccatact

SEQ ID NO: 90819 - DNA, 155 bp, Homo sapiens
taattagtggctaaatgactcatgagcagtgtggtaaggtgacgaagaaatcaaaagtctgagttagagactcaactctgctattggccttgagaagtcattttcccactgttggcctctgcatattgtggccacctatattacacctatctgag

SEQ ID NO: 90820 - DNA, 547 bp, Homo sapiens
ttactgtaactgctgaagttccttgtcattcgcagtgccttgattcatactgtggtcaataggtggcaggtttagtaagaaatcagcaggagggtctgctttcatgaaacttaaacttcaccgcctgggttttcttttctctagggcacctttttcccccggtttgctgttcgttgcagctcactcagctgcattctggaaggagcatcattcctgtttttgctaatagctgtttcaaaacctcttagaccagtgttctaaaacctctgattatttttcactactgcaagaacataggagagctcatgcctctgtcctcactacgtgtactgtaaagcactacaagtctatttttcaggaacttgtttaagagctaaataggagctttaaaacacactagttctcatatctataatatttaaatgtttaaatatttaatatgtgaaagtagcataaaattatacttcctatttaaattagttttagagaaaattatttttaatgttttatttaaaaacagattatttctgttgtaggaaagaatgga

SEQ ID NO: 90821 - DNA, 255 bp, Homo sapiens
acatcaataatttttcagacaaacctgtcataaagtcatattgtcatgtttctttcattattaccatgaaatcttgcttcttttaatagatttttttcctctatatttatactctttctgcttagctgccacagtaaaatgattattgtttttgggtagttttgtagctttctcttttttctctcacatccactattttgttctcttccttacccctacctaccctctcccaatgtgtctaaatggctcagaggg

SEQ ID NO: 90822 - DNA, 435 bp, Homo sapiens
gacttttactaattatcaggtaaaatcttagaattctatatcaatagtaaattgactagtttttttaaagtggtattttcattttcaatttaaaaacagaaatgagtctttgggaattataccaactgtgaatttaagtgcatgattatcatttttctcgctcaactccacccttgactctgcccattaatatactgtccatctttcttgaagcccaagtgaaattctaagacatcatcttcagcctttccaaatgacattcaccactcagcaccccaaagcctgtttaactctaatgtagcattttgtacagcacacttaattgtgctctggcacacgccttctttcaacccagtaaggacctaagcatagcatctacctctaacccacatttgttcaaaaacacagccaatcttgtgtccatgcattcctctg

SEQ ID NO: 90823 - DNA, 3613 bp, Homo sapiens
  misc_feature (610)..(610): n is a, c, g, or t
  misc_feature (961)..(961): n is a, c, g, or t
  misc_feature (1901)..(1901): n is a, c, g, or t
  misc_feature (2355)..(2355): n is a, c, g, or t
attagggataggaagagattttcacatggcagactttagaattcttcactttagccagtaaagtatctccttttgatcttagtattctgtgtattttaacttttctgagttgtgcatgtttataagaaaaatcagcacaaagggtttaagttaaagcctttttactgaaatttgaaagaaacagaagaaaatatcaaagttctttgtattttgagaggattaaatatgatttacaaaagttacatggagggctctctaaaacattaaattaattattttttgttgaaaagtcttactttaggcatcattttattcctcagcaactagctgtgaagcctttactgtgctgtatgccagtcactctgctagattgtggagattaccagtgttcccgtcttctccgagcttagagttggatggggaataaagacaggtaaacagatagctacaatattgtactgtgaatgcttatgctggaggaagtacagggaactattggagcacctaagaggagcacctaccttgaatttaggggttagcagaggcatcctgaaaaaagtcaaagctaagccacaatctataagcagtttaggaattagcagaacgtgcntggtgaggagatgccaaaggcaagaagagaagagtattccaaacaggagggattccaaagagagaagagtatcccaaacaacatttgcacaaacctgatggggagagagaatgtggggtggggatggatgatgagactgaagaagaaagccaggtctagataatcagtggccttgtacaccatgttaaagagtgtagacttgattctgttgtaaacaggaaagcagcacaattcatatgaatattttagaagactcccactggaatatggagaataaagttggagatgactaatcctggaagcagggagaacatttttgaggaagttgcactattttggtgaaaatgatgntcataaacatgaagaattgtaggtgatcatgacctctctctaattttccagaagggttttggaagatataacataggaacattgacaggactgacgaaaggagatgaaatacaccatataaattgtcaaacacaaggccagatgtctaattattttgcttatgtgttgaaattacaaatttttcatcaggaaaccaaaaactacaaaacttagttttcccaagtcccagaattctatctgtccaaacaatctgtaccactccacctatatccctacctttgcatgtctgtccaacctcaaagtccaggtctatacacacgggtaagactagagcagttcaagtttcagaaaatgagaaagaggaactgagttgtgctgaacccatacaaaataaacacattctttgtatagattcttggaacctcgagaggaattcacctaactcataggtatttgatggtatgaatccatggctgggctcggcttttaaaaagccttatctgggattccttctatggaaccaagttccatcaaagcccatttaaaagcctacattaaaaacaaaattcttgctgcattgtatacaaataatgatgtcatgatcaaataatcagatgccattatcaagtggaattacaaaatggtatacccactccaaaaaaaaaaaaaaagctaaattctcagtagaacattgtgacttcatgagccctccacagccttggagctgaggagggagcactggtgagcagtaggttgaagagaaaacttggcgcttaataatctatccatgttttttcatctaaaagagccttctttttggattaccttattcaatttccatcaaggaaattgttagttccactaaccagacagcagctgggaaggcagaagcttactgtatgtacatggtagctgtgggaaggaggtttctttctccagntcctcactggccatacaccagtcccttgttagttatgcctggtcatagacccccgttgctatcatctcatatttaagtctttggcttgtgaatttatctattctttcagcttcagcactgcagagtgctgggactttgctaacttccatttcttgctggcttagcacattcctcataggcccagctcttttctcatctggccctgctgtggagtcaccttgccccttcaggagagccatggcttaccactgcctgctaagcctccactcagctgccaccacactaaatccaagcttctctaagatgttgcagactttacaggcaagcataaaaggcttgatcttcctggacttccctttacttgtctgaatctcacctccttcaactttcagtctcagaatgtaggcatttgtcctctttgccctacatcttccttcttctgaatcatgaaagnctctcacttcctcttgctatgtgctggaggcttctgtcaggttttagaatgagttctcatctagtcctagtagcttttgatgcttaagtccaccttttaaggatacctttgagatttagaccatgtttttcgcttgagaaagccctaatctccagacttgcctttctgtggatttcaaagaccaactgaggaagtcaaaagctgaatgttgactttctttgaacatttccgctataacaattccaattctcctcagagcaatatgcctgcctccaactgaccaggagaaaggtccagtgccaaagagaaaaacacaaagattaattatttcagttgagcacatactttcaaagtggtttgggtattcatatgaggttttctgtcaagagggtgagactcttcatctatccatgtgtgcctgacagttctcctggcactggctggtaacagatgcaaaactgtaaaaattaagtgatcatgtattttaacgatatcatcacatacttattttctatgtaatgttttaaatttcccctaacatactttgactgttttgcacatggtagatattcacatttttttgtgttgaagttgatgcaatcttcaaagttatctaccccgttgcttattagtaaaactagtgttaatacttggcaagagatgcagggaatctttctcatgactcacgccctatttagttattaatgctactaccctattttgagtaagtagtaggtccctaagtacattgtccagagttatacttttaaagatatttagccccatatacttcttgaatctaaagtcatacaccttgctcctcatttctgagtgggaaagacatttgagagtatgttgacaattgttctgaaggtttttgccaagaaggtgaaactgtcctttcatctgtgtatgcctggggctgggtccctggcagtgatggggtgacaatgcaaagctgtaaaaactaggtgctagtgggcacctaatatcatcatcatatacttattttcaagctaatatgcaaaatcccatctctgtttttaaactaagtgtagatttcagagaaaatattttgtggttcacataagaaaacagtctactcagcttgacaagtgttttatgttaaattggctggtggtttgaaatgaatcatcttcacataatgttttctttaaaaatattgtgaatttaactctaattcttgttattctgtgtgataataaagaataaactaatttctatatctctctttatt

SEQ ID NO: 90824 - DNA, 404 bp, Homo sapiens
  misc_feature (352)..(352): n is a, c, g, or t
ttttttagacggagtctcgctttgtcccccagggtggagtgcagtggcgtgatctcagctcactgcatcctccgcctcccaggttcaagtgattctcctgcctcagcctcctgagtagctgggactacaggtgtgtagcaccacgtgcagctaatttttgtatttttagtagagacagggtttcaccatgttggccaggatggtctcaatctcttgacctcgtgatctgcccgcctcggcctcccaaagtgaaaagcatatttaaggacttgttcagctcccagggatgatgcccctccaaaagttcaggactgttttcatcaaacactttcctggtgggttaaactcatcncccttccagggatggggggctatgaaaaaggaagctgaaatgccaattgcta

SEQ ID NO: 90825 - DNA, 392 bp, Homo sapiens
gtacttctaagaaaagttgtatttatagtctctttttgcatataaaggtagcagaaccttaggactttgtttaggcccatttcttcttcctgtcccatcccctaggcatctcattcagtgccttaatttcctgctgtcaataagccagcaattctatctttattccagaatgttaatcttagttacagattcatattcaactgtcttctcaaattgaaatctcatggatcataatgaaccagtgatttccactgctacctcaaaactaaagaaaaaaaaaaaaaattcggcacggggtttttttttatggggcttaaagtaaagagccatcctttgcaagtcatccatgttgttacttggcattttatcttggctcaaattgttgaggatgg

SEQ ID NO: 90826 - DNA, 3991 bp, Homo sapiens
gcgtccggcgggagcccgcggcgagcgtagcgcaagtccgctccctaggcatcgctgcgctggcagcgattcgctgtctcttgtgagtcaggggacaacgcttcggggcaactgtgagtgcgcgtgtgggggacctcgattctcttcagatctcgaggattcggtccggggacgtctcctgatcccctactaaagcgcctgctaactttgaaaaggagcactgtgtcctgcaaagtttgacacataaaggataggaaaagagaggagagaaaagcaactgagttgaaggagaaggagctgatgcgggcctcctgatcaattaagaggagagttaaaccgccgagatcccggcgggaccaaggaggtgcggggcaagaaggaacggaagcggtgcgatccacagggctgggttttcttgcaccttgggtcacgcctccttggcgagaaagcgcctcgcatttgattgcttccagttattgcagaacttcctgtcctggtggagaagcgggtctcgcttgggttccgctaatttctgtcctgaggcgtgagactgagttcatagggtcctgggtccccgaaccaggaagggttgagggaacacaatctgcaagcccccgcgacccaagtgaggggccccgtgttggggtcctccctccctttgcattcccacccctccgggctttgcgtcttcctggggaccccctcgccgggagatggccgcgttgatgcggagcaaggattcgtcctgctgcctgctcctactggccgcggtgctgatggtggagagctcacagatcggcagttcgcgggccaaactcaactccatcaagtcctctctgggcggggagacgcctggtcaggccgccaatcgatctgcgggcatgtaccaaggactggcattcggcggcagtaagaagggcaaaaacctggggcaggcctacccttgtagcagtgataaggagtgtgaagttgggaggtattgccacagtccccaccaaggatcatcggcctgcatggtgtgtcggagaaaaaagaagcgctgccaccgagatggcatgtgctgccccagtacccgctgcaataatggcatctgtatcccagttactgaaagcatcttaacccctcacatcccggctctggatggtactcggcacagagatcgaaaccacggtcattactcaaaccatgacttgggatggcagaatctaggaagaccacacactaagatgtcacatataaaaggtagggatatctgtagttctggggtttttttaaaataaagaaatagaagaaaaatatagataattaattccattggttttagaaaaaattacaaggaagtttctttaatcctagctagtcattaaacttgttatttaggtggcaaataatggaaacagaccataatagatttatgtgataagaggcagagccaattggtatcaaccaagacttttcattataaatggtaacaacatagaagatagtataagtaaaaatattttatgtgcttctgattgcaaaatagaattttttttttctgaagtgtcagggtaacatctattggtcatcatctctgcagggcatgaaggagacccctgcctacgatcatcagactgcattgaagggttttgctgtgctcgtcatttctggaccaaaatctgcaaaccagtgctccatcagggggaagtctgtaccaaacaacgcaagaagggttctcatgggctggaaattttccagcgttgcgactgtgcgaagggcctgtcttgcaaagtatggaaagatgccacctactcctccaaagccagactccatgtgtgtcagaaaatttgatcaccattgaggaacatcatcaattgcagactgtgaagttgtgtatttaatgcattatagcatggtggaaaataaggttcagatgcagaagaatggctaaaataagaaacgtgataagaatatagatgatcacaaaaagggagaaagaaaacatgaactgaatagattagaatgggtgacaaatgcagtgcagccagtgtttccattatgcaacttgtctatgtaaataatgtacacatttgtggaaaatgctattattaagagaacaagcacacagtggaaattactgatgagtagcatgtgactttccaagagtttaggttgtgctggaggagaggtttccttcagattgctgattgcttatacaaataacctacatgccagatttctattcaacgttagagtttaacaaaatactcctagaataacttgttatacaataggttctaaaaataaaattgctaaacaagaaatgaaaacatggagcattgttaatttacaacagaaaattaccttttgatttgtaacactacttctgctgttcaatcaagagtcttggtagataagaaaaaaatcagtcaatatttccaaataattgcaaaataatggccagttgtttaggaaggcctttaggaagacaaataaataacaaacaaacagccacaaatacttttttttcaaaattttagttttacctgtaattaataagaactgatacaagacaaaaacagttccttcagattctacggaatgacagtatatctctctttatcctatgtgattcctgctctgaatgcattatattttccaaagtatacccataaattgtgactagtaaaatacttacacagagcagaattttcacagatggcaaaaaaatttaaagatgtccaatatatgtgggaaaagagctaacagagagatcattatttcttaaagattggccataacctgtattttgatagaattagattggtaaatacatgtattcatacatactctgtggtaatagagacttgagctggatctgtactgcactggagtaagcaagaaaattgggaaaactttttcgtttgttcaggttttggcaacacatagatcatatgtctgaggcacaagttggctgttcatctttgaaaccaggggatgcacagtctaaatgaatatctgcatgggatttgctatcataatatttcctatgcagatgaattcagtgtgaggtcctgtgtccgtcctatcctcaaattatttattttatagtgctgagatcctcaaataatctcaatttcggaggtttcacaaaatggactcctgaagtagacagagtagtgaggtttcattgccctctataagcttctgactagccaatggcatcatccaattttcttcccaaacctctgcagcatctgctttattgccaaagggctagtttcggttttctgccagccattgcggttaaaaaatataagtaggataacttgtaaaacctgcatattgctaatctatagacaccacagtttctaaattctttgaaaccactttactactttttttaaacttaactcagttctaaatactttgtctggagcacaaaacaataaaaggttatcttatagtcgtgactttaaacttttgtagaccacaattcactttttagttttcttttacttaaatcccatctgcagtctcaaatttaagttctcccagtagagattgagtttgagcctgtatatctattaaaaatttcaacttcccacatatatttactaagatgattaagacttacattttctgcacaggtctgcaaaaacaaaaattataaactagtccatccaagaaccaaagtttgtataaacaggttgctataagcttggtgaaatgaaaatggaacatttcaatcaaacatttcctatataacaattattatatttacaatttggtttctgcaatatttttcttatgtccacccttttaaaaattattatttgaagtaatttatttacaggaaatgttaatgagatgtattttcttatagagatatttcttacagaaagctttgtagcagaatatatttgcagctattgactttgtaatttaggaaaaatgtataataagataaaatctattaaatttttctcctctaaaaaaaaaagtcaaa

SEQ ID NO: 90827 - DNA, 3651 bp, Homo sapiens
gcgtccggcgggagcccgcggcgagcgtagcgcaagtccgctccctaggcatcgctgcgctggcagcgattcgctgtctcttgtgagtcaggggacaacgcttcggggcaactgtgagtgcgcgtgtgggggacctcgattctcttcagatctcgaggattcggtccggggacgtctcctgatcccctactaaagcgcctgctaactttgaaaaggagcactgtgtcctgcaaagtttgacacataaaggataggaaaagagaggagagaaaagcaactgagttgaaggagaaggagctgatgcgggcctcctgatcaattaagaggagagttaaaccgccgagatcccggcgggaccaaggaggtgcggggcaagaaggaacggaagcggtgcgatccacagggctgggttttcttgcaccttgggtcacgcctccttggcgagaaagcgcctcgcatttgattgcttccagttattgcagaacttcctgtcctggtggagaagcgggtctcgcttgggttccgctaatttctgtcctgaggcgtgagactgagttcatagggtcctgggtccccgaaccaggaagggttgagggaacacaatctgcaagcccccgcgacccaagtgaggggccccgtgttggggtcctccctccctttgcattcccacccctccgggctttgcgtcttcctggggaccccctcgccgggagatggccgcgttgatgcggagcaaggattcgtcctgctgcctgctcctactggccgcggtgctgatggtggagagctcacagatcggcagttcgcgggccaaactcaactccatcaagtcctctctgggcggggagacgcctggtcaggccgccaatcgatctgcgggcatgtaccaaggactggcattcggcggcagtaagaagggcaaaaacctggggcaggcctacccttgtagcagtgataaggagtgtgaagttgggaggtattgccacagtccccaccaaggatcatcggcctgcatggtgtgtcggagaaaaaagaagcgctgccaccgagatggcatgtgctgccccagtacccgctgcaataatggcatctgtatcccagttactgaaagcatcttaacccctcacatcccggctctggatggtactcggcacagagatcgaaaccacggtcattactcaaaccatgacttgggatggcagaatctaggaagaccacacactaagatgtcacatataaaagggcatgaaggagacccctgcctacgatcatcagactgcattgaagggttttgctgtgctcgtcatttctggaccaaaatctgcaaaccagtgctccatcagggggaagtctgtaccaaacaacgcaagaagggttctcatgggctggaaattttccagcgttgcgactgtgcgaagggcctgtcttgcaaagtatggaaagatgccacctactcctccaaagccagactccatgtgtgtcagaaaatttgatcaccattgaggaacatcatcaattgcagactgtgaagttgtgtatttaatgcattatagcatggtggaaaataaggttcagatgcagaagaatggctaaaataagaaacgtgataagaatatagatgatcacaaaaagggagaaagaaaacatgaactgaatagattagaatgggtgacaaatgcagtgcagccagtgtttccattatgcaacttgtctatgtaaataatgtacacatttgtggaaaatgctattattaagagaacaagcacacagtggaaattactgatgagtagcatgtgactttccaagagtttaggttgtgctggaggagaggtttccttcagattgctgattgcttatacaaataacctacatgccagatttctattcaacgttagagtttaacaaaatactcctagaataacttgttatacaataggttctaaaaataaaattgctaaacaagaaatgaaaacatggagcattgttaatttacaacagaaaattaccttttgatttgtaacactacttctgctgttcaatcaagagtcttggtagataagaaaaaaatcagtcaatatttccaaataattgcaaaataatggccagttgtttaggaaggcctttaggaagacaaataaataacaaacaaacagccacaaatacttttttttcaaaattttagttttacctgtaattaataagaactgatacaagacaaaaacagttccttcagattctacggaatgacagtatatctctctttatcctatgtgattcctgctctgaatgcattatattttccaaagtatacccataaattgtgactagtaaaatacttacacagagcagaattttcacagatggcaaaaaaatttaaagatgtccaatatatgtgggaaaagagctaacagagagatcattatttcttaaagattggccataacctgtattttgatagaattagattggtaaatacatgtattcatacatactctgtggtaatagagacttgagctggatctgtactgcactggagtaagcaagaaaattgggaaaactttttcgtttgttcaggttttggcaacacatagatcatatgtctgaggcacaagttggctgttcatctttgaaaccaggggatgcacagtctaaatgaatatctgcatgggatttgctatcataatatttcctatgcagatgaattcagtgtgaggtcctgtgtccgtcctatcctcaaattatttattttatagtgctgagatcctcaaataatctcaatttcggaggtttcacaaaatggactcctgaagtagacagagtagtgaggtttcattgccctctataagcttctgactagccaatggcatcatccaattttcttcccaaacctctgcagcatctgctttattgccaaagggctagtttcggttttctgccagccattgcggttaaaaaatataagtaggataacttgtaaaacctgcatattgctaatctatagacaccacagtttctaaattctttgaaaccactttactactttttttaaacttaactcagttctaaatactttgtctggagcacaaaacaataaaaggttatcttatagtcgtgactttaaacttttgtagaccacaattcactttttagttttcttttacttaaatcccatctgcagtctcaaatttaagttctcccagtagagattgagtttgagcctgtatatctattaaaaatttcaacttcccacatatatttactaagatgattaagacttacattttctgcacaggtctgcaaaaacaaaaattataaactagtccatccaagaaccaaagtttgtataaacaggttgctataagcttggtgaaatgaaaatggaacatttcaatcaaacatttcctatataacaattattatatttacaatttggtttctgcaatatttttcttatgtccacccttttaaaaattattatttgaagtaatttatttacaggaaatgttaatgagatgtattttcttatagagatatttcttacagaaagctttgtagcagaatatatttgcagctattgactttgtaatttaggaaaaatgtataataagataaaatctattaaatttttctcctctaaaaaaaaaagtcaaa

SEQ ID NO: 90828 - DNA, 254 bp, Homo sapiens
ggctgggagacaggacaggcagcttaaggatgtgggctgtagaaggaggtgcagggagggggagcaagcatgacactctgggctccagcctgggcaactgggtgggaggttatggaacatgggaggcgggtcatttctggggctggagcagggaaagaagagataatgctaggtttatgctcccattgcaggagaagccccctcccttgcagacttgggtcccacctaaccatccagccatctgtccagcatag

SEQ ID NO: 90829 - DNA, 401 bp, Homo sapiens
ggaacctgggcattaaaactaaaatggcagagtggatggtagactagaagtgttttggcaaagatactgtgggaggtgatccagagagagggaagccgaaggaagagtacgcacatagagaaaatgttcagtaaccctgttgggttggggatgtgtttcagaaatgcctcctggtgggagtaggtaaggatgcagttgataatccagaagctaggtgatgcacacaccagtgatttgaaaattgccaaagcatctcagacctttaaatcactctctttgcctataggcccagactggagtcctgggagctagagagaataatgtctacaggaaaacaaaacacatttaaaagtcgcttattgaaaccaagggaaaaggagaaattgaaatgtgtttcaatg

SEQ ID NO: 90830 - DNA, 354 bp, Homo sapiens
  misc_feature (270)..(270): n is a, c, g, or t
  misc_feature (296)..(296): n is a, c, g, or t
  misc_feature (329)..(329): n is a, c, g, or t
  misc_feature (333)..(333): n is a, c, g, or t
  misc_feature (337)..(337): n is a, c, g, or t
  misc_feature (345)..(345): n is a, c, g, or t
  misc_feature (350)..(350): n is a, c, g, or t
  misc_feature (353)..(353): n is a, c, g, or t
ggcgctccacggccctgctctgggctcgcctgagtgctgggctctgcagacgcagggatgggccaggcgagcccctcaccacggaggtagcaggtccagaggaagcagcagaggcttcctggaggaggatttgtacccctaggaggactatgtcttcctcatctttgtcttcagaggataaatacaaggcctgacacataacaagcatgagcacggagtctccctctgtttcccagtctggagtgcagtggtgtgacctcgtctcactgncagcctccaccccccaggttcaagcnattctcctgcttcagcctcccaagtagctgggnctanaggnacctcctnatttnttna

SEQ ID NO: 90831 - DNA, 545 bp, Homo sapiens
tctgttaacaattcatatcttagatatgagacagggagatatagtaacttgaccttgacagtctgagcccttaactgctacaaacagctgctcctgacagaagagaaggctaagaacaaattcaagggaggtggtcagtgaagacctttttaagagaaaagatgacaaagggcactatatcctcagcgatttgccctgtgacttctaaactccagcagtagttgttgacttcacaagcctttgctgctgaagactctcgccccttcagaaagaggagcaaccttctcgtattacgtctcaggcatgctgaaggtgctctgaagatggcgtggttggtcagtgctttgggcataacccacctgtctaccttttggacattttgcctgataagtatggtgcatcttgtgtattttgatttataagtgttgctggttgttgactacataccgagcacccttctggttcttggagtatcaacatttcagcccacagactctcttgagttcaggcgattctcaacatcatgatagacaattttataaccg

SEQ ID NO: 90832 - DNA, 374 bp, Homo sapiens
gaaatgtcctgggtgcatagcatcaccactgtgtcatctacttgtgcctgcacccatgcaaacacacagggacacaaagctggaaaagggctggttttgagaaggagtaagcctgggcagttgaaacccaggttcggtgtactctagggcacttacttctaggtgactgtccttgccactgctggcgtaccaaggtctcccagtcatatgcccatgcactgtatacattttggcatttattctcatgaataaagtgtcattagaggccagacactgctggctaacgcctgtaatcgcagcactttgggacgtcaaggtgggaggactgcttgagcccaggagttagagaccagtctggacaacacagtgagacc

SEQ ID NO: 90833 - DNA, 225 bp, Homo sapiens
atatttttaaatgaaattcatcattttaatataaattacaattaattagaaataatgaaaattccaatattttacaatacttaaactaggtttggaaactaaaattgccattttaaacattacaaaaggataaccaaaaataaaatacatactcatttatttacatttacatttatttactctattttgagaatgcattctttcattgtgtttatgtttatactt

SEQ ID NO: 90834 - DNA, 578 bp, Homo sapiens
gctgggactcggccccacctaggctgggaaacgaagataggcaacgtgaccatggggccccggcagaagggaagtgtctggggcagaagcaggacaaagacttgctctcttggtcatcaataatatgttcataatagatgggggtcttgtgagggtgaaatcaaatcacacacagagccctcagtacagggtctggcactgtgtgagtgaacattcagcgttggctgttcttacaaagactcaggtggcagatatgttaggatgcaaaaacactgtcaagaagatgctggcaaggaagtggagaagtaggacctcccaccctgctggtggaagagaaattagtacgagccaccttggaaacagtttggcattaactagatgagctgaacatgcacgtaccttacaacccagcagttcttcccaggcacaatacctcagaagcacacaagcaatatgcacagcggcattgtttgtaaaagtcaaaaacggcaaacagcccgtttgtgctcaagagtagaataaattgtggattatagagtgtagtgctatacagcagtaaaaattaataactgctacat

SEQ ID NO: 90835 - DNA, 494 bp, Homo sapiens
caggtgtgagccaccgtgcctggccatagagcagtctcttccttttcctgttgggtctctgctcaaatgtcatgtcagagaggcagacctctggggcggtctatctgagggaatgcacccatctcccttcctctgaccagttagttaccttgcttattctttcaaagctcttaccaccaagcggccatctcgatacctgaaggacggacgacgcctccgggaaggccttggtcgcccaacagcccattgtgacccttctcatgtctggtcacacgacgaactgatttgtcctcagcacctctccgtccaccttcatgtacacagttgggcaccagcttcacaaagtattggaacatcatggctggcttggggcgcagtgacattggtgtggtccagggggttcagaatgcctggatagtcctccccaaatgcacaggtgcttggctgtagtgggtcatgttgatgtagacaagggcatagctctgcaagtcatg

SEQ ID NO: 90836 - DNA, 306 bp, Homo sapiens
aaaaaaaaaaaagccaaaactctatgaaaaaagtacacattttaatatagcattgggttaaattttcagagggaaaaatatgtcacaataaaggctaagttaaaaaaaaaaaggctaagttccaacaagcataagaaaaaaataaccaaatttcagaggtgcatggaacaaatactggggaaagatgattggaataagaaatacactgagctcaggggaatcgcttgaatccgggaggcagaggttgcagtgagctgagagcgcgtcgctgcactccagcctggcgacacaacgagactccgtctt

SEQ ID NO: 90837 - DNA, 297 bp, Homo sapiens
cttctccacagtaatgagttcatgtagatttggttcttaaaaaaggtctgggaccttccctctctctctctttttccctctcttgccatgtgacatgcttacttccccttcatcttccactgtaattgaaagcctcctgaggccctcaagtgaaggagccactggtgctatgcttcttgtgcagcctgcataactgcaagccaaataagccacttttctttataaattacctggtttcaggtattcccttatagcaatgcaaaatgaactaatacactagaatacagttaaaatagg

SEQ ID NO: 90838 - DNA, 671 bp, Homo sapiens
acgaaccgatggttgagggattgtcacgggaggaacatgacacccgaagagcctctaggtgcccttggagtgccacacatgcccagaccttctcacacccacacaaataggctctgccgtgcactcctacacacacacacacacacacacacacgcttgttcacactcagaacccaggacagccacagccaccgcttaggggaagccactgcagatgcccctggaatgggcacagcacagccagggcgctcttccaggcaggcgaggataacttgagagtttcctagggcaccagggacagagctcagaggcccccgaggtgtgtgtaggaggcggaggcccgcagagcacagagcaggagaagggcttgggccctggaggagaaagccattctggacaccaggggacctggacggagggtccccacagcccgtgccccacgccgcctggaggccagaggggtcagtggccctgctgtcccggctccatcttggttctagccgccacctgcatgaacacagtggcccggcttaacgcactaacccagcctctccctgtgtcccacagggagtagcaagacccaccccacactgccttcaccatctacaccagtgacgccgctgtgtgtcttagcatggaaataaataaacctgaatgtacgtgctcgcctc

SEQ ID NO: 90839 - DNA, 1298 bp, Homo sapiens
caaaaattatgttatactgcagtgtattgtacatgttaatttttaaaagtttgaactattatataatacaggtctcttgacttctcatggaaaaattattttttctattatggtgtgaaatattgtgtgaatatctaggcaaaacataacaatttggctcaattttcttctttagaggattcgtgctgtttttgttcataaagggtagtgaaatcattgaactatattttagaatgaaaatttttgattttattaaaatgattttttcaaggcagaaagtaaaaggaatgattgatagcggagtgcatatagagctagagcatatcatccttgaactctgcaaatcctttcttccattttaatatagcaagaacaattttgtctttactacatcttaaagaattagaacttgggttggtgtaagtgacttacttccagggaatcatgccctatttctaccagcaggtcatacccaaatgtcacactatctattgttaaccatgaatgatattcagatctattacttttcgtgaaaagtggaacatgttacttccaaccatggcctgtcaccgtgagtgtgatcagctttctccaaaaccacatgggtcgcaggagctaaggggtggtacccaaatgttaggaacagtgttaggaaagggcaagggaaaagaagtgactggatgtcttatgagaaaccggtaaatgactaaaaaaaaaagcaaatgactaaaaacatgactaaaaaattatatatatatataatatatatattatatatgtgtgtatatatatacacataatatctgcaaattctaatttatatatgtgtgtgtatatacacacacacacatgcacatacacacatacgtccagacatctccctcataaaataaccatcagtttctatgaaaaccttaagtggaagccaatttcccatagtaaataatttaggagaaaattataatgcttaaaatgttgctcaaacccctgacctattactaaactataattggaacagtaaaatgcatatatgtaactatcatatcatgatttaaaattgcttaaaccattgctgcttaatactaatcaaacttaacggctgctaacaaaagttgtgaattattacacggcctctttgtaacgtgctgcatgttttttaaaacatctctgtgtttctgtttgttccactgctggtatttggaatgtaatttaacagttctcacacatggtttggttataaattctgtattgccttttagggatataaatatacatttttttctatgtaaaaattagct

SEQ ID NO: 90840 - DNA, 552 bp, Homo sapiens
aatttagcgccgaataatgaacatacgaaattttgatgaagcaatatcgacgaagtgataacacacaacagattttaacgtggggggttttccacacacacacatgcacatacacacatacgtccagacatctccctcataaaataaccatcagtttctatgaaaaccttaagtggaagccaatttcccatagtaaataatttaggagaaaattataatgcttaaaatgttgctcaaacccctgacctattactaaactataattggaacagtaaaatgcatatatgtaactatcatatcatgatttaaaattgcttaaaccattgctgcttaatactaatcaaacttaacggctgctaacaaaagttgtgaattattacacggcctctttgtaacgtgctgcatgttttttaaaacatctctgtgtttctgtttgttccactgctggtatttggaatgtaatttaacagttctcacacatggtttggttataaattctgtattgccttttagggatataaatatacatttttttctatgtaaaaattagct

SEQ ID NO: 90841 - DNA, 397 bp, Homo sapiens
tgtacatgtgcctcatagcaaaattactaactgtatgaatcaaaaccttagagatcactacagagacatagacaaatccacaatgatatgttaacacacctttgcagtaatggatagaaaaataagatcaaaaactcagtaaggatatcaatcatctgaaaaatattaccaatatgacctatctgacatttataggatagtaccctcaacaactgcagaatacacattccttttaagagctcataggatgttcacaaaaatagatcatatgctgtgccataaaattaatctcaacagactttgaaagattgaaaatatacagaatacattctctcaacaaaatacaattaaattgaaaaccaataaaaataaaacatttagaaaatacctgaatatc

SEQ ID NO: 90842 - DNA, 178 bp, Homo sapiens
aaaaagatgatttctggggtgagagaggatggcaatgggcaatgaacaggcggagtctcgagctctctgtatggccctccaccctccccgtgcccaccctgcgtctgagggctgagctgcagttcagtgcagcagaaccagcaaatcactcctggttggttgagccattgcactccgg

SEQ ID NO: 90843 - DNA, 343 bp, Homo sapiens
tccacccctacaagttaaaggctcagtcccacaatacttccctacttcagatgtcagctgtaaatggggtgcccaggtgatccacatttctgcccaggtgactacaaatttgggggttcccatggccccttcccctcagtttctataatttgctagaatgcctcacagaactcagcaaagccctgaagcactgattattctcattttattataaaagataacagctcaggcctggcacggtggctcacacctatagtctcagtaacttgggaggttgaggtgggagtattagagcaggtagttagacgtgagcagggcagaagagggtccttccaccaccagg

SEQ ID NO: 90844 - DNA, 485 bp, Homo sapiens
aaattgttttttaatctttttttgtgtgtatgacaaagagatactctaaatgttaatactaggttttaaattaagcaatggaaaatatttagaagtataagcacatacattatacatttgaataaaaaattaagtgtaaacatatcttggttaatagtatcttgttattaaatcatccaaaaagaaaaatctgacagaatagactccttcttttatttaagttgcttttaaaacttttgttaactctgtaagaatgtttatttttatcttaggagtgggttatttttaaaatttttgagtatggaagccaaaaggcattttgccataggttttttaggtcagcctgtaaaaaaacctttaaaactataatgtatctgagacgtagtgatatttaaactactctgtataatagtggacttcaagtttgaaattgggatgtttctgcagtgaaactgcagattgctgctccttctgcttctccctac

SEQ ID NO: 90845 - DNA, 435 bp, Homo sapiens
ctcccaaccgcctttgtaggccccgaactttctccagccaagctctgagggcccacctcctgcctcctggtggcctgtacagttctagcactggttggagaacagcctctgcaggccccgcccttgcctcccaggggcctctccaggcccagctcttgcccccacggcggcctcccggggccaagtccctgcctgcctcccagcagcccgcgtgagggaggaacaggatcgcactcgggctgctgggaggtaggcagggacttgggcctgggaggtcgcggtggggcgagagctgggcctggagactcccctgggaggcaacagcggggtctgcagacgcccttctccagccggagctgggactgttcagtcactgggagaagggatgtgggtctgaagagcttggttgcagaaacttcggggtctacaaacgca

SEQ ID NO: 90846 - DNA, 831 bp, Homo sapiens
aataataagtatcctagtccgttcatttcataatgaacttcaacactgaaaaccttaaatgttgccattttctaggggagagtatattaagacatcagcagaaaagtactgctttcagccctggttggaggtgaatggtttctgtgcttgttaataaaaacgttaagagcttgggatgatagttttgaacatcagtgtttcaaagaaagtatgtttggatatcagtgtattttttaaatcactgttttagccacaaaactttagattttgttcatgtattgggaagcttatgagtttaagaaccgaaattagttttcttgggtaatttaaaaggtattaacaaggaacttgcctacaggagtgaactgtaggtaataaggatgtgaataagtacaaatattctttcatgttctcttccctcaaagaagggttaaatgacacacaaagctgaagtagggattgctctgcctaaattatgcagctgcctccaaggtttccaatagagcattgatgtagcctggcagggagattgtaagaaggcaagaacaactgttctggttagaactaatgagggggaaattagggtatggattgatttgtatttaattgtttaatgtatttttcggaagtaatttttttccctaattctacttggaattgcatgttattattaaatattaagcattgagaatggggcctgaatttaccactttattcagggatcgtgttccctgtttttagggccacttcttctccagtgagcccttcagtttgattggtgtggtgtggacaatttagatcaggcatatagtgggggaattataaagaggc

SEQ ID NO: 90847 - DNA, 603 bp, Homo sapiens
aataataagtatcctagtccgttcatttcataatgaacttcaacactgaaaaccttaaatgttgccattttctaggggagagtatattaagacatcagcagaaaagtactgctttcagccctggttggaggtgaatggtttctgtgcttgttaataaaaacgttaagagcttgggatgatagttttgaacatcagtgtttcaaagaaagtatgtttggatatcagtgtattttttaaatcactgttttagccacaaaactttagattttgttcatgtattgggaagcttatgagtttaagaaccgaaattagttttcttgggtaatttaaaaggtattaacaaggaacttgcctacaggagtgaactgtaggtaataaggatgtgaataagtacaaatattctttcatgttctcttccctcaaagaagggttaaatgacacacaaagctgaagtagggattgctctgcctaaattatgcagctgcctccaaggtttccaatagagcattgatgtagcctggcagggagattgtaagaaggcaagaacaactgttctggttaggatacagtagggagagtgtatcctctagagtcagccaacga

SEQ ID NO: 90848 - DNA, 509 bp, Homo sapiens
ggcggcgcggagggatctccgcgggagccgttggggctgttggcctcgggctgaggtgcaaggaccaggactagggcgagggcagcggtccaagaaatagaaaacaatgactgggagagcccgagccagagccagaggaagggcccgcggtcaggagacagcgcagctggtgggctccactgccagtcagcaacctggttatattcagcctaggcctcagccgccaccagcagagggggaattatttggccgtggacggcagagaggaacagcaggaggaacagccaagtcacaaggtgaagagaaagtaaaaggaagtcttaacaactctgttcaacatatacagcaaattttattgaattaaaacttggtacaaaaatttgtgctgaaactgtttaagaaacatttccttataatgttgccacaacacacaaatcaattgtggaaaatacttaaatataatttcttaaacattctatgtatcagtcttcattaataaatgacttaaa

SEQ ID NO: 90849 - DNA, 404 bp, Homo sapiens
gtccatctgcctgctggtcatctgcaccaagtggctcacaggcctaccacgtcacttcttccccaaactcatctgcccataaagtgcctaaaccaagttcaaaattggctggctctgggcaacacggaatcctgtttctctgtttatatggtctaggaaatgacataaagagcctactacatcaaaacacctgtgcagtgaaggacacagcagagtgatgagtacctgtggaatgggagaaaatgtctgcaagtcatctatctgctaaggggttaatatccagaacatataaagaacatcaaaaaacccaattaaagacatttctccaaaaatgagattcaggtggccagcaggcacatgaaaagatgccagtcaccacgaatctccagggaaatgcagttcaa

SEQ ID NO: 90850 - DNA, 2545 bp, Homo sapiens
ggcggcgcggagggatctccgcgggagccgttggggctgttggcctcgggctgaggtgcaaggaccaggactagggcgagggcagcggtccaagaaatagaaaacaatgactgggagagcccgagccagagccagaggaagggcccgcggtcaggagacagcgcagctggtgggctccactgccagtcagcaacctggttatattcagcctaggcctcagccgccaccagcagagggggaattatttggccgtggacggcagagaggaacagcaggaggaacagccaagtcacaaggactccagatatctgctggatttcaggagttatcgttagcagagagaggaggtcgtcgtagagattttcatgatcttggtgtgaatacaaggcagaacctagaccatgttaaagaatcaaaaacaggttcttcaggcattatagtaaggttaagcactaaccatttccggctgacatcccgtccccagtgggccttatatcagtatcacattgactataacccactgatggaagccagaagactccgttcagctcttctttttcaacacgaagatctaattggaaagtgtcatgcttttgatggaacgatattatttttacctaaaagactacagcaaaaggttactgaagtttttagtaagacccggaatggagaggatgtgaggataacgatcactttaacaaatgaacttccacctacatcaccaacttgtttgcagttctataatattattttcaggaggcttttgaaaatcatgaatttgcaacaaattggacgaaattattataacccaaatgacccaattgatattccaagtcacaggttggtgatttggcctggcttcactacttccatccttcagtatgaaaacagcatcatgctctgcactgacgttagccataaagtccttcgaagtgagactgttttggatttcatgttcaacttttatcatcagacagaagaacataaatttcaagaacaagtttccaaagaactaataggtttagttgttcttaccaagtataacaataagacatacagagtggatgatattgactgggaccagaatcccaagagcacctttaagaaagccgacggctctgaagtcagcttcttagaatactacaggaagcaatacaaccaagagatcaccgacttgaagcagcctgtcttggtcagccagcccaagagaaggcggggccctggggggacactgccagggcctgccatgctcattcctgagctctgctatcttacaggtctaactgataaaatgcgtaatgattttaacgtgatgaaagacttagccgttcatacaagactaactccagagcaaaggcagcgtgaagtgggacgactcattgattacattcataaaaacgataatgttcaaagggagcttcgagactggggtttgagctttgattccaacttactgtccttctcaggaagaattttgcaaacagaaaagattcaccaaggtggaaaaacatttgattacaatccacaatttgcagattggtccaaagaaacaagaggtgcaccattaattagtgttaagccactagataactggctgttgatctatacgcgaagaaattatgaagcagccaattcattgatacaaaatctatttaaagttacaccagccatgggcatgcaaatgagaaaagcaataatgattgaagtggatgacagaactgaagcctacttaagagtcttacagcaaaaggtcacagcagacacccagatagttgtctgtctgttgtcaagtaatcggaaggacaaatacgatgctattaaaaaatacctgtgtacagattgccctaccccaagtcagtgtgtggtggcccgaaccttaggcaaacagcaaactgtcatggccattgctacaaagattgccctacagatgaactgcaagatgggaggagagctctggagggtggacatccccctgaagctcgtgatgatcgttggcatcgattgttaccatgacatgacagctgggcggaggtcaatcgcaggatttgttgccagcatcaatgaagggatgacccgctggttctcacgctgcatatttcaggatagaggacaggagctggtagatgggctcaaagtctgcctgcaagcggctctgagggcttggaatagctgcaatgagtacatgcccagccggatcatcgtgtaccgcgatggcgtaggagacggccagctgaaaacactggtgaactacgaagtgccacagtttttggattgtctaaaatccattggtagaggttacaaccctagactaacggtaattgtggtgaagaaaagagtgaacaccagattttttgctcagtctggaggaagacttcagaatccacttcctggaacagttattgatgtagaggttaccagaccagaatgaagcttcaaatgaaacacttgtcctgccgacccctggcacggaaccccacaaatcattagcaggagcgcccaggtagctgagattgctggagaagaaggaacaaaaagggaatccttc

SEQ ID NO: 90851 - DNA, 478 bp, Homo sapiens
caggttacagatttaaaccctctaaaccagcaacttctgtagttgtaattgcatcatgacagactgtggaaaatacatgaagacctttaggtagttatcagacttacaatacagaaaaataatttcccagtcagcaaacatatgctcctgcactcttgcaccacagtccagttggcttgatctcttgattcaaggtgcacatctcttgaaagggtgcatctgcaattgcccaggacagtgacaaggcctttatgaatgaagttataactaggaaaccattctctcgttaggctggcagatacctaaaacatgttgataggattgttttatgccttgtcttctacacctcagtatcctttggattacacataatagcactatgggagttaatattgtcatcctttatttcgtgctttatgttgctcaagtacacaatttttttttaaggactccagatatctgctggatttcaggagtt

SEQ ID NO: 90852 - DNA, 522 bp, Homo sapiens
gttataatacacttagccactctttttctcagagccatttaaaaaaaatccagttaaaacattttatggttttcaatgttgccttattaagcaagcagtatgtgattgggcataattgtcctttaaggatttaaagtttgggttttccacctctctggcttcaggttactgaagtttttagtaagacccggaatggagaggatgtgaggataacgatcactttaacaaatgaacttccacctacatcaccaacttgtttgcagttctataatattattttcaggaggtatgtgttttatttcaacattttattaagaaaacagcaaagttgaaataattgtacattgaacatctgcattcagttctcctagattttcagcattggttgggattattgagtttctctgtattgcagtaacttaaggtgtggtttactgatagaaaattcatctatttgctttaagcaagtatcctgcctttacttccctaattctgttgacttcaaatactgtctgagcttgt

SEQ ID NO: 90853 - DNA, 3433 bp, Homo sapiens
ggcggcgcggagggatctccgcgggagccgttggggctgttggcctcgggctgaggtgcaaggaccaggactagggcgagggcagcggtccaagaaatagaaaacaatgactgggagagcccgagccagagccagaggaagggcccgcggtcaggagacagcgcagctggtgggctccactgccagtcagcaacctggttatattcagcctaggcctcagccgccaccagcagagggggaattatttggccgtggacggcagagaggaacagcaggaggaacagccaagtcacaaggactccagatatctgctggatttcaggagttatcgttagcagagagaggaggtcgtcgtagagattttcatgatcttggtgtgaatacaaggcagaacctagaccatgttaaagaatcaaaaacaggttcttcaggcattatagtaaggttaagcactaaccatttccggctgacatcccgtccccagtgggccttatatcagtatcacattgactataacccactgatggaagccagaagactccgttcagctcttctttttcaacacgaagatctaattggaaagtgtcatgcttttgatggaacgatattatttttacctaaaagactacagcaaaaggttactgaagtttttagtaagacccggaatggagaggatgtgaggataacgatcactttaacaaatgaacttccacctacatcaccaacttgtttgcagttctataatattattttcaggaggcttttgaaaatcatgaatttgcaacaaattggacgaaattattataacccaaatgacccaattgatattccaagtcacaggttggtgatttggcctggcttcactacttccatccttcagtatgaaaacagcatcatgctctgcactgacgttagccataaagtccttcgaagtgagactgttttggatttcatgttcaacttttatcatcagacagaagaacataaatttcaagaacaagtttccaaagaactaataggtttagttgttcttaccaagtataacaataagacatacagagtggatgatattgactgggaccagaatcccaagagcacctttaagaaagccgacggctctgaagtcagcttcttagaatactacaggaagcaatacaaccaagagatcaccgacttgaagcagcctgtcttggtcagccagcccaagagaaggcggggccctggggggacactgccagggcctgccatgctcattcctgagctctgctatcttacaggtctaactgataaaatgcgtaatgattttaacgtgatgaaagacttagccgttcatacaagactaactccagagcaaaggcagcgtgaagtgggacgactcattgattacattcataaaaacgataatgttcaaagggagcttcgagactggggtttgagctttgattccaacttactgtccttctcaggaagaattttgcaaacagaaaagattcaccaaggtggaaaaacatttgattacaatccacaatttgcagattggtccaaagaaacaagaggtgcaccattaattagtgttaagccactagataactggctgttgatctatacgcgaagaaattatgaagcagccaattcattgatacaaaatctatttaaagttacaccagccatgggcatgcaaatgagaaaagcaataatgattgaagtggatgacagaactgaagcctacttaagagtcttacagcaaaaggtcacagcagacacccagatagttgtctgtctgttgtcaagtaatcggaaggacaaatacgatgctattaaaaaatacctgtgtacagattgccctaccccaagtcagtgtgtggtggcccgaaccttaggcaaacagcaaactgtcatggccattgctacaaagattgccctacagatgaactgcaagatgggaggagagctctggagggtggacatccccctgaagctcgtgatgatcgttggcatcgattgttaccatgacatgacagctgggcggaggtcaatcgcaggatttgttgccagcatcaatgaagggatgacccgctggttctcacgctgcatatttcaggatagaggacaggagctggtagatgggctcaaagtctgcctgcaagcggctctgagggcttggaatagctgcaatgagtacatgcccagccggatcatcgtgtaccgcgatggcgtaggagacggccagctgaaaacactggtgaactacgaagtgccacagtttttggattgtctaaaatccattggtagaggttacaaccctagactaacggtaattgtggtgaagaaaagagtgaacaccagattttttgctcagtctggaggaagacttcagaatccacttcctggaacagttattgatgtagaggttaccagaccagaatggtatgacttttttatcgtgagccaggctgtgagaagtggtagtgtttctcccacacattacaatgtcatctatgacaacagcggcctgaagccagaccacatacagcgcttgacctacaagctgtgccacatctattacaactggccaggtgtcattcgtgttcctgctccttgccagtacgcccacaagctggcttttcttgttggccagagtattcacagagagccaaatctgtcactgtcaaaccgcctttactacctctaacctgcagaagacgatgcagccgcttttctttttgaaatgactttgggatttttttaagcttttatttactttttttttaactgttatctttctggatgaaacttgggaaggggattaggagatctagcattttatttctagcattgctattcaccggcttccttattttatatgtaaaaattaagattttatattttatcttcttgtttctcatagatattttgtgagcatttttttgtttattttgaagaaatgtggataagatacttggtagtataaaacagactctctgagagtatttgaaatgtgtttggagatttacttaaacgtactttcaggagtgagcaagtcctacttataaacctatattaactttatttttgagatacctgttttgaatttaaaggagataagaggcgtaaagtaggatgctcactacaaccataggtggggtttcagctcatatcttaaagataaaaggtactattatataacctatacacaagatacaggagaaaatatgcttgatttttatttggcaggggggctaggttgtatgggagtaaaaaaaacattgaaaatttttaaattgtccaaagaaacattttaagactctttaacaaaaaaggccatgagtaaatctctatattaacattactatttattttgttttggaactgggacatgattctatttgttataaaataaaattgatgtgattgtcaccttaaaaaaataact

SEQ ID NO: 90854 - DNA, 2823 bp, Homo sapiens
ggcggcgcggagggatctccgcgggagccgttggggctgttggcctcgggctgaggtgcaaggaccaggactagggcgagggcagcggtccaagaaatagaaaacaatgactgggagagcccgagccagagccagaggaagggcccgcggtcaggagacagcgcagctggtgggctccactgccagtcagcaacctggttatattcagcctaggcctcagccgccaccagcagagggggaattatttggccgtggacggcagagaggaacagcaggaggaacagccaagtcacaaggactccagatatctgctggatttcaggagttatcgttagcagagagaggaggtcgtcgtagagattttcatgatcttggtgtgaatacaaggcagaacctagaccatgttaaagaatcaaaaacaggttcttcaggcattatagtaaggttaagcactaaccatttccggctgacatcccgtccccagtgggccttatatcagtatcacattgactataacccactgatggaagccagaagactccgttcagctcttctttttcaacacgaagatctaattggaaagtgtcatgcttttgatggaacgatattatttttacctaaaagactacagcaaaaggttactgaagtttttagtaagacccggaatggagaggatgtgaggataacgatcactttaacaaatgaacttccacctacatcaccaacttgtttgcagttctataatattattttcaggaggcttttgaaaatcatgaatttgcaacaaattggacgaaattattataacccaaatgacccaattgatattccaagtcacaggttggtgatttggcctggcttcactacttccatccttcagtatgaaaacagcatcatgctctgcactgacgttagccataaagtccttcgaagtgagactgttttggatttcatgttcaacttttatcatcagacagaagaacataaatttcaagaacaagtttccaaagaactaataggtttagttgttcttaccaagtataacaataagacatacagagtggatgatattgactgggaccagaatcccaagagcacctttaagaaagccgacggctctgaagtcagcttcttagaatactacaggaagcaatacaaccaagagatcaccgacttgaagcagcctgtcttggtcagccagcccaagagaaggcggggccctggggggacactgccagggcctgccatgctcattcctgagctctgctatcttacaggtctaactgataaaatgcgtaatgattttaacgtgatgaaagacttagccgttcatacaagactaactccagagcaaaggcagcgtgaagtgggacgactcattgattacattcataaaaacgataatgttcaaagggagcttcgagactggggtttgagctttgattccaacttactgtccttctcaggaagaattttgcaaacagaaaagattcaccaaggtggaaaaacatttgattacaatccacaatttgcagattggtccaaagaaacaagaggtgcaccattaattagtgttaagccactagataactggctgttgatctatacgcgaagaaattatgaagcagccaattcattgatacaaaatctatttaaagttacaccagccatgggcatgcaaatgagaaaagcaataatgattgaagtggatgacagaactgaagcctacttaagagtcttacagcaaaaggtcacagcagacacccagatagttgtctgtctgttgtcaagtaatcggaaggacaaatacgatgctattaaaaaatacctgtgtacagattgccctaccccaagtcagtgtgtggtggcccgaaccttaggcaaacagcaaactgtcatggccattgctacaaagattgccctacagatgaactgcaagatgggaggagagctctggagggtggacatccccctgaagctcgtgatgatcgttggcatcgattgttaccatgacatgacagctgggcggaggtcaatcgcaggatttgttgccagcatcaatgaagggatgacccgctggttctcacgctgcatatttcaggatagaggacaggagctggtagatgggctcaaagtctgcctgcaagcggctctgagggcttggaatagctgcaatgagtacatgcccagccggatcatcgtgtaccgcgatggcgtaggagacggccagctgaaaacactggtgaactacgaagtgccacagtttttggattgtctaaaatccattggtagaggttacaaccctagactaacggtaattgtggtgaagaaaagagtgaacaccagattttttgctcagtctggaggaagacttcagaatccacttcctggaacagttattgatgtagaggttaccagaccagaatggtatgacttttttatcgtgagccaggctgtgagaagtggtagtgtttctcccacacattacaatgtcatctatgacaacagcggcctgaagccagaccacatacagcgcttgacctacaagctgtgccacatctattacaactggccagaaatgacataaagagcctactacatcaaaacacctgtgcagtgaaggacacagcagagtgatgagtacctgtggaatgggagaaaatgtctgcaagtcatctatctgctaaggggttaatatccagaacatataaagaacatcaaaaaacccaattaaagacatttctccaaaaatgagattcaggtggccagcaggcacatgaaaagatgccagtcaccacgaatctccagggaaatgcagttcaa

SEQ ID NO: 90855 - DNA, 197 bp, Homo sapiens
taaatgcagttacttactatagttacttatgtgccaaacataagtcttctaagtatcaagaatgacctcgcttgaatcacaattcaaatatagatagaattgttggtgttccatagcctgctgatatcagaaccctggacaatgggtttaatcaagcaacagtttgtgggtggatgggtccttctgtcaacatacca

SEQ ID NO: 90856 - DNA, 261 bp, Homo sapiens
gccacacatggagaactaagcatttggtccaacaggcagagtcaaggcttgagacatatgaccctacgggttgaaacatccacggagtattctaggcagctcctaaccatttgaggagccccaactaaggtcccagatattgcagaacattatgaaccatccaatttgtaccttatccaaatctctgacctaaaaaaattatgagctgcttgttttagttactgagtttgaggtcatttttacacagcaatagataactga

SEQ ID NO: 90857 - DNA, 494 bp, Homo sapiens
gccaacaattccttccttcaaggagctcacctggtgaggaaatagatgcaaaaacaactgattatagcatacagtgaaccctgataaaagtgtgggcccccaaaaaggagaggggctcaatgcttcctaagagagtagaggcagcttcacaaagaagataacactaaaactgaatctggaaaaacaatagcaattatccatattagtaaagagagaaagaggattccagtgaagagaaaagggtacccacagtcatggaggtcaggagaagcaggaaagggtgtacagggaagtaattcaggaaaatctacctcagaaggaacacgggaatgcacaacaaataatgtagcctgagagacaaggccggacctggtttgcaacaactgtttttgccaaaagaggtttgacatgatagagccatcgaagacgtggtgatgaggtgatcttcagaagatgagagatgaggtggatatcaaaatgagagagcaactgag

SEQ ID NO: 90858 - DNA, 462 bp, Homo sapiens
agatgttttttccttccctgactgattttctatcagcagcagttctcaaccctcatgtttgattccaaatcctatagcttgtcaagatataaaaatgaatttaaatatggtaggggaactgctgttttaataagccatcagttcgtttattttgtaaatttaagagtttttaaaaataaagatttcaaaggaggacatcatcatacttggctgctcttccagtgatgtcctcagagtcccgggtcaatctctgagtgtctcatgggtcgggatgcacctctgctctaggcagctgcagggcagtttacagagtgagcaacatccaccgggcggtggcagactggctccgtgtctgagctcacatcatgctgcacacctcactcacctgctggatcgtggaaccccagatgggcttcaagggacccacggtgggcaggaggcaaaggttcccagtgccaccca

SEQ ID NO: 90859 - DNA, 822 bp, Homo sapiens
ccagaagatacactgtcagatgtgtaaagcaaggtaaggtgcgcagagtgagccttctgctcactttgtataaatgtaaaggataaagctggtaaatacatgcgcctttaacttttttcttcaaaacctaagcatgaaacacaaactgctacaggaaggcttgacaagaggggagtttttgctttttgtttataataacttctgtatttcttagcacattcagtatgtgttcttcttttcactagtgtcaacagagatacgaacatttaaatttttttaaaaagctttaggatagaaaagaggtgtagctgggcaatttcctttgacatgcggtttgtctgaaatagagcagccccttgtttatgatttccagatatgtgagtctgtttttttatgtacaggttttaccttggctcaatttactgtctagttacattttaacagctttctactctgctttttctctcaatataaaagtaatcgaaagaagactaatcatttttgaaatgctttcagttttacacagttctgtgcgtgaaagcctggtgtccccaccagccaactgtgggaatccaggacatagagcaggaatagctgctgcttatttactgctctaattacctcttcggttccatttgcggtcgctagttccttccatcaagcaaagtgaaaattgtcaaaacggctgtttttccctcctggaaaacagaaaaaagaatatggcaagatgttaactgtggcatgacagtccgggattctggacacgacctacataatcttccttgtatctctttgtgacttggtttcctcatctgtaaaatg

SEQ ID NO: 90860 - DNA, 413 bp, Homo sapiens
gtacttctgagtcctgtaattaccaaaaagatagtcaatgtgggggaaggggaaactaactaactattaagaccagaggttataatataaagaaattgttccaccttgtagattggtgtcatcagattcctgagaaatctttactaaaatgaattgtaaaaataactacctgaagaacagtatcttctattttaaatgctactgaatgaaagagcatgtttttgttgatgaagaactcacacctcgctattaaacatttgctgatgaatatatgtgatccaaactcagaggaggctattcctgagggaatgcccagcctggtcttattgtggacatgtgtgagatgaacactggtgtgagagatggtcactctccaccagaactgtcctcatgcgtgctgcattgcagagaag

SEQ ID NO: 90861 - DNA, 703 bp, Homo sapiens
attgaggggcccgggctgtgaagtgtgagccacgtcggtcccaccatccccaggccgaccagcacagctcccaagtcaattctaactgactgttcagacaatgccacgtgcgtccatgtgtgctggtttatcaacccccaaaaagcctctgccgcttggttccaggacagctcctgtgatggccccatgacaccaggctgagagcggggactcccatgtgaagtggcctggacggagcgcacagctttgcaggccggctggagctcccagctactggagaaagaggatgtggagctgaggaggactgagctttgggtgtttcctgttgtggaacctgtggcggccagggctgtcagagtctgtgtgtgcttgtgcagtgaggctgggcaccaggggtctcctgtgccacgccatgtggcctgctggcgtctctcacgctgtgtcttggcacagggagctccccatgatctcagggcaggtgcagtgagaggtgcatcccccccaccccggggggtcgggtgggtgagctgcacgtgccggtagcattgctccccagggcctggccaggaggctgaccctgcacttggggctcggtggtgattctcgctcctcctctgccgagacacggaaagtccaggtgggctggggctgagcagcacctgtggggacctgtccgctcttgccgtgacagctcttctacccc

SEQ ID NO: 90862 - DNA, 1049 bp, Homo sapiens
agcatcagacacttgggcctcgggcatcaggagccagccacagggatgtctggggaaatggcgttccatgagatgcaagcacacaagaatgcacttggcacatctggggaacagcaggcagctgatatcactgggcccaccccgcaccagggaggatggaagcaggtgaggagctagaccacactgaggcggtggtcgggactcagagtttgctcagtgagccgttcactatgtgcaggggcagttccccgtctgaatttaggtgacgacactcaggtccagccttgccagtctcagcctccggtctccgttccccctctgcagaggccactttgtctgctgcacgtgatcatgaggggttgtgaagtgcttgccccatcagtagccatgtgtgcatgtgtaaataccatcctctgtgtgccctggaggctgtctttcagatagcatgtacaggtggcagcatagggcctgtccctactgagagtgcagggaactcagcaccgtcaactcctcgaccctgcaggtcagattatccttgtagaggccccctggatggcaccaagatcggccctggcaagcaggtgaccctgacttcagagcccttgcctgagggcctggcctggcagctctgctgttagaagcaggaggtgtgcagggggtggggagcagcccagcctctgtgatcttctccatggcaggatctcccagcaggtagagcagagccggagccaggtgcaggccattggagagaaggtctccttggcccaggccaagattgagaagatcaagggcagcaagaaggccatcaaggtgttctccagtgccaagtaccctgctccagagcgcctgcaggaatatggctccatcttcaccgacgcccaggaccctggcctgcagagacgcccccgccacaggatccagagcaagcagcgccccctggacgagcgggccctgcaagtctgctggctgcgcacataacttagcctgtcacacaccaggaggactggatactggggaggagccggggccaccaagggttctgtccccca

SEQ ID NO: 90863 - DNA, 725 bp, Homo sapiens
  misc_feature (448)..(448): n is a, c, g, or t
  misc_feature (477)..(477): n is a, c, g, or t
agtctagctgcagaggccagaggaagtcattgctgtcctgtccctcccgaaggttttctggaccagtctcccagtgaggtgcctggtctgagagggccttgaccatgccccttgggaatctttcagatccccggtcttggatgtgctgactgacacacccagacctatggggcttcagccttacgtagactcactctgttccagtgaagctggacccactctgacttgcagggcaacatcagctctagccactgcatcctgacctggagcatcggtcctgccttggagtcgaggaccacacttctcagctatgacctatggccttcgagaggcaggaagaggccagaaaggggcccccctttgggggggggcggcaaaggggaaaaaaacccccccccccttttttttctctgggcggacaaatttggggggcgggggggccccaacnaaaggggcccgagctgtagctgatatgangccccaggactgtgctggcaccccacagggagccttggagccctgcgtccaggaggccactgcactgctcacttgtggcccagcgcatccttggaaatctgtggccctggaggaggaacaggagggccctgggaccaggctcccggggaacctgagctcagaggatgtgctgccagcagggtgtacggagtggagggtacagacgcttgcctatctgccacaggaggactgggcccccacgtccctga

SEQ ID NO: 90864 - DNA, 734 bp, Homo sapiens
agtctagctgcagaggccagaggaagtcattgctgtcctgtccctcccgaaggttttctggaccagtctcccagtgaggtgcctggtctgagagggccttgaccatgccccttgggaatctttcagatccccggtcttggatgtgctgactgacacacccagacctatggggcttcagccttacgtagactcactctgttccagtgaagctggacccactctgacttgcagggcaacatcagctctagccactgcatcctgacctggagcatcggtcctgccttggagtcgaggaccacacttctcagctatgacctatggccttcgagaggcaggaagaggcctgggaggtaacgctttggctggcttcccctgggggcctccctcctgggagcagcagtccagggcaggctccccactctaaataaggagaggtcaacttggggtgaagaggaggggaggagctagagccagacgtgtgtgtgcacatgctgacatgcacatgtgtgtgcctcgtgtgtgtatgtgagtagggtgagtgctcctgtgtttatgtgtgtgcacatgtaagtgtgcccgtgtttgtgtttgtacatgagtgtgtgcctcgtggttgtatacgtgagtgcacttgggcatgcctacaggtatgagtgtgtgtgtgagtgtgtgtgcaggggtggcagaagtactgtgggatgggacagaaataagaaaagatggaaaaaaaaaaa

SEQ ID NO: 90865 - DNA, 770 bp, Homo sapiens
agtctagctgcagaggccagaggaagtcattgctgtcctgtccctcccgaaggttttctggaccagtctcccagtgaggtgcctggtctgagagggccttgaccatgccccttgggaatctttcagatccccggtcttggatgtgctgactgacacacccagacctatggggcttcagccttacgtagactcactctgttccagtgaagctggacccactctgacttgcagggcaacatcagctctagccactgcatcctgacctggagcatcggtcctgccttggagtcgaggaccacacttctcagctatgacctatggccttcgagaggcaggaagaggccggtgaagagaatcttctaccagaacgtgccctctccagcgatgttcttccagcccctctacagtgtacacaatgggaacttccagcaggtagagcagagccggagccaggtgcaggccattggagagaaggtctccttggcccaggccaagattgagaagatcaagggcagcaagaaggccatcaaggtgttctccagtgccaagtaccctgctccagagcgcctgcaggaatatggctccatcttcaccgacgcccaggaccctggcctgcagagacgcccccgccacaggatccagagcaagcagcgccccctggacgagcgggccctgcaagtctgctggctgcgcacataacttagcctgtcacacaccaggaggactggatactggggaggagccggggccaccaagggttctgtccccca

SEQ ID NO: 90866 - DNA, 310 bp, Homo sapiens
caacacccttgttgctgtgtccatctttctcctgctgactggcccgacctacctcctgttcaagctgtcgcccagggtgaagagaatcttctaccagaacgtgccctctccagcgatgttcttccagcccctctacagtgtacacaatgggaacttccagctttctgcacccaccatgtgcctcacctcctccttctgcgaaggtgtctgtcctgtggccatggggaagggtctgtggtgtgtgtgctgcccttggggctctcactgcctctgggctcctgctctgcctggtcccctggtctccccggat

SEQ ID NO: 90867 - DNA, 661 bp, Homo sapiens
attcaaatccaagtgtctggttttaaatgaccagcttattaacattgtgtatagagaaagtaaaggagttggtgtagtatttctcacataaatactgcgtgtgaatattgcgatacctttgggttgctgagaggctttttggcataattcctgtttctcagaaaagtttcagatggctgagtttggtgggtaaatgaatttgaaatagaacccagcactgtccctgacacatagcagaggcctaataaatatttatgattcaatctattcattaatgatttacttgctggtgaggggttatgctgtcataccttttaaaaggtagactagaagcatgatggaaaatgcatgggctagatttggaattacagggacctatgttcaaatctcggcttttgtgcttactagctctgtgcccatgggtaggtaggttaaatatttctgtgcctcagtttcctcacctgcagaatgggaatgatgaatatctctatagtttatgtgaggatttaataagttaacacatacagtgcacttagaatagtccctgtaggtagtaagtactagataaaagctattattttttattgtaagcactcaaacaaataagaattattagtaattgttactgcatgctactagggttgtgtcaatgatgctaaat

SEQ ID NO: 90868 - DNA, 542 bp, Homo sapiens
agccaataagccacaaactgatgataagtgtcagacccggagtgcctgctagtctagcacgccacccccgctagcccggccttccagctctagatggatgtatgcctttccacaccacaagcgaaagtgctgggccagggaatgtggtttccctctctgtatccccagggccttgcccagaggctgacacataatgtgtggtcaatagacattgaatgaataaatgagtgtggtaagaaaaaatacagtgtggcatgggaagacttccaatttcagagccgcgcagttcccttgcaaagtgggaaatggctccacagcacagccctggggctgctgacgtccaggccaggaaccataagaggtgagtggcacagggtgggtgtggctgctcagctcaggttggcctgggcagcacaaggcctgacagcctccagtgcccacccatcttgcacatggtgaccataccaattctcttagcctgctccctacctctgtcattcttatcctccaccatctgacctgacctatacccaaatctcagg

SEQ ID NO: 90869 - DNA, 257 bp, Homo sapiens
cagtacagtttttcttcaagggctccttcataaatatatgcttgtaattaagatccaagttcaaatggagggttgtcccttggaggacaaagccagagcttgcattctgggttattttatcagtgaaaatgtgcaagtcctatgagctcctgagtccgacactggatcatcattcaagggcctgcccttgggttcttcgctgcatcctggccgatttttgctcctatcttgacttcctggcccagtcctttggtggc

SEQ ID NO: 90870 - DNA, 451 bp, Homo sapiens
tgatgaaatggccacttcacttctatgtgttttgaaacatgtatgtaaatgtaaacatgttaaatatgtgaaataaaatttttcctcctcagtaagttgaaagaaatttccatttaacgaatgattttttaaaaaaaacctgattctaaagatatatatggtgattgtcaggccagtcacaatggtgcacgcctgtaatcccagcactttgggaggccaaagtgggaagatggcttgaggtcaggagtttgagaccagcctggacaacacagcaagacccatctctacaaaaaagtactttaaaaattagccaggcatagtggcacttgcctgtaatcacagctactcaggtggctgagatgcgagggagaatcatttcagttcgaggctgcagtgagctgtgatcgcaccacttcactccagcctgggcaacaagcaagactctgtctct

SEQ ID NO: 90871 - DNA, 413 bp, Homo sapiens
gcctaatacaagggccagttaccagactctgaaccacttactcttaacaaacagcctagagcctgcccacccaaaatacagcactcacacctccctccaccgtcagctatgggaatgatggaaagggaagtagggtgggccaggaaggaatcaaaggaccaactttccaggccttgggaaacagatgaaaaggatgcaggtcatctcaggagggttgagagtagaacaccaggtccctgtgattaaagggtcgaaaacctagcagtgcacaaaaatcaaaacatcttggttattttcctgtctcccactactgacatttttgtctcttacatcattttatccaggggtacaatgggggcgtgggggcagggtggggatctgacttatgggaaactgtgagggtgagtggaatc

SEQ ID NO: 90872 - DNA, 504 bp, Homo sapiens
atatgtgtgcattaaatatcaggcaaataaccaaatagctactactaaaacatgtgactagagcaaatcacttaattgccagttgctctgaattcaaacgtatctctgaaaacacttatcccattgtatgaagattatgaaatagcaaaataaaattgtcatcaagactgttgaaaaagtgattatttaatacaccaatctctacatcataaggagaaagttggagcaaagaaaaaaaaactgtagcctcatgaagatatacattcagtaaccattataaagatacggccaattttctctctagagtcgatcagacagacatttccctacaatttaggtcaataacttaagttttttagtttctactaccttttgataaagatcagctctaatataaagataaatatgaagaagtatgtcaagcagtgtgattaggtttcaatagctggccttcaaaactaaaaattcatctcacatttaaaaaactttcttggccaggtgtgg

SEQ ID NO: 90873 - DNA, 479 bp, Homo sapiens
ggaatcaggaagagggcagtagagggagtgagacatggttagattctggaaatattttgaaaggatcagctgtgggatgagagagagggcaggttccaacatgatttggtttttggcctccgcgtcctggacaagctgccactgcctgagatggagaaggtaggagaggaagcttggggtaagattaggagttcagatttgaacgtggggagttcgaggtgcctcttttctcccagagctgggacacagcaggatgcagacacctggagttctaggactggtgagggcatttgggaattgtcagaatacagctggggtttaaagccaggcaagtggatgagaaaagtaagggaagggaaacgaaggggaaggggctaaggtgaacttggcagtgtgaggtgtgaggtccttggtggcatggagcagacagctcggcttggagattcatacaccttacctgctgtggggtcatgaggagt

SEQ ID NO: 90874 - DNA, 1641 bp, Homo sapiens
caaaacttgaggaagagttagaatggtaataaaatattaaatagaccttatacttaaaataaggtttcactatataatttgtcacaattcaatctaatcagctaaagttaaatgtagttagaattagccacaggagaatgtaaagcatgctttgacgaagctatcggtaacacatattgaatgtctttgagactcttagattgtactatttgcttaatagattaatgaaatttatcagatacaacctgtatttccaaaaacaagctagaaggaacctgaggaatgtggtttacatttgagatccaccttactgtgttttctactttcagaaaagattctgtagttttggtttttggcatctttcttatactcagttttttctgccttaattcccatttaccagcagttaactcatgtttattgtgctttcatgcattgtgatatggaatgtgtttagtaatttactccttataaatatggtaaagtacagtggtatggttattctatgcattaagttaatgacattaataagcttggttatgaggggttggagccatacatgtaatttaagagaacagttaaaagtgtaacatagttttagcttggtgtctaaataatgggcagctgataaaacagcttggaccatattgttttaaagagagcctacaagcacagaaactagttatagatctaatgtggaattgctgaactcagaactaggccatggaagtctgaaaagcaaatatggctgtttcaaactcatttttttggcagcttttttatttttaacactttattgaggtataaattgacttgaacacacaggtaaaacatacagtttacagtgttttgacctacaactaagtgaacataatctattattcccccgaatttcttggttccttttaagtccctgtcactaattctccacccccctctcattttattttggtataaaatgtaattaatgagcaaaattcttaaggtaatgacttaaaatagcatttcaaaaactatttgcttgattttagtataaggattagaatatttctgcagataatttctattgaaattgttaatctaaaatcagcttgacttaatcagatttatattaacagaattcagtatgttaaaggatctggttcccccaaaatactttgtccttttttgctagtgtttatgtatactgttagaatgtggttatataaaccttttaaatttaggaatctgttaaataacttgttttaacaccccatccgtcgtcatccctaatctgatactggagtctaaatacatgctccataatcatgcaaactaagttgaatctagatgatgagggtagactgggtgcggtagctcatacctgtaatcccaggactttgggaggccaaggtcagcagatcacctgaggtcaggagttagagaccagcctgggccaacgtggtgaaaccctgtctctacttaaaaaaaaaaaaaatacaaaaattagccgggcgtgggggcatacacctgtaattccagctactcataggatattgaggcaggagaatcgcttgaacccaggagtcggaggttgcagtgagttgagatcgtgccattgtgctccagcctgggcaacagagtgagactacgtctcaaaat

SEQ ID NO: 90875 - DNA, 482 bp, Homo sapiens
cttgatactcacagctcttcaaagacaaagatggtgacttatgtgtccttgtactatgatacttagctggcatattagttaaagcaaaaataccaaatatcatgagtcttaattaactttactattatatgttatcatatacactcttggtttatacgctagtacactttttcattttcttaatacttatacctgctagggatccttcacatttgtttaatacagtccatttaaatcacaggtcctatagcaccttctgtatgctaggtatcgtgttaggtactaggaatgtaaaaatgagtaaggttcatccttgctgacaaggggctcacaatggaggagaaaagacagataaacagatacctgccacaatttctactcagtacaaagtgtgatagatgctatgatactaggaagcccagggtgctttgggttagcatatgcatgacggtcatacataatagtataacttgcctagttgc

SEQ ID NO: 90876 - DNA, 1255 bp, Homo sapiens
aaaaaactttaaacagattgaaataaaacagaaaagtaaatgtttttaaaaacttccttaaataacttattgctatgatatcttgtttaacattgtgatattgtacagaaccagagtttgtctgtagtatcatctagctgtagagtaccctgcttggccaaatgaatcactttcatttgtccagtgcaactgaaaatttctcaaaaaaaaaaaaaaaaaaaaaaaaccacctacccagtaggttaatgcatactaaaggtatgaatgcttaagtattttcttcagtttatagtgatatttctgtgtgaatgcccctgtctttttgtttacaaaatggagaatacaaatttgaaacctagtgaaagatggcaactatcaaagtgttatcttagttttaaagaagcttgggattatgttaatatttagggaagttttatttggattccttgaattagttaccttttgaggcttatggattcttaaagcaataaagcaatattccttttaaaatcattgtttttcttctgtttattaatcattgatttaatctgtgtttttctgttggattagagaaaagatttacctgagaatcttgcaatctctatatcattagctatattataggtagagcttctttgctttatctgtaatctctcctgaacacgttgctttttcaggaatgaaaaaaaaaagaagctgcagaaaggggtacaaattaaattttcatgaaagaaaatcctaatcagcagtgacagtgtaagagaaagatgattgccacttggtcattgtggagaggcacttagatttggtgtcagtgcttctgttaatgatgactaatgtctttcttggagcaagtgcatgctcaaacatactgctacagcatatagagggagaggcctcagtaataggcatcagtaagcaaaagcattagttgtcttaaaacaaagactttttaatacagtcaatttgacactctgtattattagaaaaatacaaacataattctaaggcatttaaccacaaattttgaactattttatgttcagtactaagaggtaatattttttaattaaaaggtaatgaaaccaaggaatgttaataagatatgctctctgttttgtcacttacaggaatgggcacctacattgcactgcacagaatcacatgtgctgagaaagttttaaaaagaagccaacttacaacagatttttttcataccctagtgatgtattctgaacaaatgctttatagttac

SEQ ID NO: 90877 - DNA, 253 bp, Homo sapiens
agactatcaaactaggtgaagaagtgagatccaattttatgctgtccacatgtttttcaggggcaggaataaaagaaatacttaagaatacagaatatgggaaaaatatggtttcccataatttaaaatatttaaaaataggaagtttgtaattattactgttgaatattcagttaaagtcaatgattcttttgaccagtatacctactcccaatttttctgggcaaatcccaactatacacctctgtctaga

SEQ ID NO: 90878 - DNA, 384 bp, Homo sapiens
tggagtgcgaggggccagtgtcctctccccggggggagactccagacacaaacgcggggcctgaggcgctgggaggcccctgtgcgagccggatggcggccagagaggacgtgtcagctcctcgtgggactgaagagcgcgaccaggcagagggtgggcggggagcctagggtcctacacaccaagcacagcgacgatcgtggcggggaggggtctgcacacctactgggggtggtgcgagtgagcctttctaggaggcagctagcagataaaggtgtggagcccaggggatgcttcctgcaccaggcgacaggtttggtggcattggcgcacggttggcgtggaagccaagtttctagagggagccgacaagaagctgagtgt

SEQ ID NO: 90879 - DNA, 663 bp, Homo sapiens
gtgttagccaccaggcctggcctgagaaggtgtttttttttttttttggtcttgttttcccttacccctttctttgaagaaagggtgtcaaaagacattacctgcctctaaagccagatatcaccagcagacttcttaaagtggacataatcctagagctttcattctgtttagaagttcatgttcatcttagccatttggaacttcttcattctctatcttttctccacggtggctgggcttgtctgcaaatcattgtgtcaaaatcaaactattttcaaaacagccctttgcttctgagcccctcccctaagtcctctgtgggggtccatgattctgcagaggtatgggacagaatcttcagattttaccccttgagtctcttcctagtcatatcctggttccctcattctaatattgacaaaggatgactcattaagtgcaactggttatgtaactttcaaatactttcattgtgtatgtcaggatctgaggaacaaaatgatgtcatttaatcggaatctaaatgtgacacaaacaacgtgccagcaatacctgcttgtgaaataatgttctgagcccacagtgttcctgggtatgtgagtttatatcaagtgaaaaggctgcttaattgacattaaagttttggaatgtaaagcttca

SEQ ID NO: 90880 - DNA, 683 bp, Homo sapiens
gtgttagccaccaggcctggcctgagaaggtgtttttttttttttttggtcttgttttcccttacccctttctttgaagaaagggtgtcaaaagacattacctgcctctaaagccagatatcaccagcagacttcttaaagtggacataatcctagagctttcattctgtttagaagttcatgttcatcttagccatttggaacttcttcattctctatcttttctccacggtggctgggcttgtctgcaaatcattgtgtcaaaatcaaactattttcaaaacagccctttgcttctgagcccctcccctaagtcctctgtgggggtccatgattctgcagaggtatgggacagaatcttcagattttaccccttgagtctcttcctagtcatatcctggttccctcattctaatattgacaaaggatgactcattaagtgcaactggttatgtaactttcaaatactttcattgtgtatgtcaggatctgaggaacaaaatgatgtcatttaatcggaatctaaatgtgacacaaacaacgtgccagcaatacctgcttgtgaaataatgttctgagcccacagtgttcctgggtatgtgagtttatatcaagtgaaaagggcgtgcgttgatttgaacaatctagcagcttgttgggaatgtgaataggcataagaaagg

SEQ ID NO: 90881 - DNA, 320 bp, Homo sapiens
tgggaaatattacaccaaatagaaaccaatgcatcatggctatttatattaggtgaggtagcttaaaaattcatttatagagatttctatattcatatttttctttctgcaatgtcattttggtctttatttttggacacatagcatgttttaataaatcagttttacatgtgtaactttttataacatcaaaataaacaaaatatacttttcataaattcctcatcactgtgaatttactttcaaataaatgtaagtagcaggtggaacaatgtgtttctatatacgaaccagtgcaacactgacagtcacaattaagg

SEQ ID NO: 90882 - DNA, 171 bp, Homo sapiens
gcttctaaattggaatcttaccaaactgagttagatgaaaaataaagctctttgattctttatgttctttagtgttgcaggacacacagaagtttttttggcttcttttgcttattatctactttgtgcttattatctactttgtctccctggtgattaagtaaacccatg

SEQ ID NO: 90883 - DNA, 348 bp, Homo sapiens
gggtacatgtacaggtttgttatataggtaacttgcatgtcacgggagtttggtgtacatactgtaatatacaaacggcaaataaacacatgaaaagatgctcaacatcatgtcattaaagcaataaattaaaactacaatgaattgccactacacacccattaaaatggctaaaatccaaaagactgacaataataaatgctggcaaggatgcagaatagcaaactctcaatcattgttggtgggaatgcaaaatgatacagccactctggaagacagtgtggcagtttcttataaaactaagtataaaacttaaccatatagccagcaatcatatttctaagtatt

SEQ ID NO: 90884 - DNA, 247 bp, Homo sapiens
ttcctctcctcccacctccaaggctgagcagggagttcacaccactgtgtactccatgagtcagaccattatctgcagcaacagagagtttcttccagtaaacaaggatcaaatatataaccatcacattgtccaaaactggctcttacctgctgtggtgtcctctgttcctgttgtcttcatagtttttatctttttaaattcctttactgtcatgtcatagggtttgggggaggaatagagatag

SEQ ID NO: 90885 - DNA, 449 bp, Homo sapiens
cagcttaccggtgttatcgatgccaccatcttgtggtagatggtggcaccaccctgaatagggtaaaaaacatgcaattgtacatcttcagtgtgccagttgtctggtacgggaatagtgtcttaaagttgttaataaaaatatagggaaaatggacacgacaccctaatgcaagccccggccctgaactcggcctgggaggaggaaagacatgccgcaaagctcacagctgggtcagggacagccttgagtgtggctgagaagcgaggaactgcctggatgtgacatttgccgacttggatagccgggccatgatgcgtaggagaatatctgctcatagaaatatctgggccgtatttggtgggaaagggccatggtgtatatcacttatcctcagatggtttagcaaaaactctgtgtgtgtttgtaaagattgggaggtgggcagt

SEQ ID NO: 90886 - DNA, 491 bp, Homo sapiens
ctgtggtcctcaaatatgtcattatcataggagataaaagcagtggaaatgtctcattccaagagactaagggtagtgagtatagggtaaagggcacggggagatggaatatcctaaaatcatcttgtggtagatggtggcaccaccctgaatagggtaaaaaacatgcaattgtacatcttcagtgtgccagttgtctggtacgggaatagtgtcttaaagttgttaataaaaatatagggaaaatggacacgacaccctaatgcaagccccggccctgaactcggcctgggaggaggaaagacatgccgcaaagctcacagctgggtcagggacagccttgagtgtggctgagaagcgaggaactgcctggatgtgacatttgccgacttggatagccgggccatgatgcgtaggagaatatctgctcatagaaatatctgggccgtatttggtgggaaagggccatggtgtatatcacttatcctcag

SEQ ID NO: 90887 - DNA, 542 bp, Homo sapiens
cttccttttatctcccatcagccgaaactaactctgctgtgtcacgctgtgttaggctgtgttggctgtgagtaagagaagtctcacccaactagctgaagcgaggtgggttggaggggggatgccttgtggaagtgacaactctaggcacgtaactggctcagactctgctgggcccagatatacagatgtcatcaagagtctttctcttccttttgagcccagctctccctttgtggcccagcaacttccttccccgatgatggccaagccttgaggatgtgaaactgcccagtgccccaatctggagtccaccatcctgggtctagctggggacatccttgaatcagcctctgggaatcactgaaccaacatgagtcacttgctactgtgagatctcaaaacacatggatcaggacagagggcagggctgtttccccaaggaaatccaaatgctttacaggaaggggagtggatgctggcccggcccaggcgaggatgaggagtaactgagctgcagaccattgtttagccctccttcc

SEQ ID NO: 90888 - DNA, 968 bp, Homo sapiens
aaactgacggtgctgtagaacaggatgtgcgagaatgctgtttggcaaacaaagagcgctctctggcccccagaggttctggcttttgagcccagactaaagaaagccaggctggagaccgtatatcaaactttgcaagcccgtttatataccttgctggtgcctcagggggcagaaatgctggttggggatctttgtgttttgttttgaaagagtgatgtttggaagcagaagcactcaaaaatatatcctgacctctggcacttagaacctccaccagagcttggcacttaactgttctgtttctcgtgatatgttctaattatctgtttccagccagattgtaaggtcaacaatggtagtttatttacgagtaagtcttagttttctcatctgtaggaatggggataaaaatgcaggtttgctatgagtgttaggggttcagggtttagttttgggcctaactgctcctgtctacctgtctacccttccagggcctctcaggacacaccttactcccaaagcacaatatccaaatggcaaagaggttgtccctttcttaatgagctccacaagcacctgaccaccaccccctcccattcgaggcctccctgtcccctcccgctgaacctaaaccgctctgaggagcagctctccagccatcagtcctgcttggatgaggatgctgattttgtgtctagggaaacaagtctgccccgtttgccttccacatggaggctgagagtacaagagaaagttgggggaaatagcaagcaaagttcagagggcagtggtccattttttcttatcagccacaacaaaaaataaataaaagaaggaggaggccgtgtctttgaggcacagtaagcctgcccactgaatgtccctgagagtaactagttatagactctctaaggagatagacggagagagaggaagacggccccgtgatgaaaaccctgctggga

SEQ ID NO: 90889 - DNA, 164 bp, Homo sapiens
tcaaggagtggggtaatagactcatgtcttaatgcgaggagctgtaccctattgaggccatttttgccatctactacaacaagtgatttgctcatgccctccccacttggataatgggcaactcacaaaaatcttggtttcctgactaacagaacaaacctgga

SEQ ID NO: 90890 - DNA, 438 bp, Homo sapiens
atttgcccaaggtcacatactagaggtagcaaaaccagctctaaatattctcaatccaaaataaccacctcttctgctattccatatagccttagcctttgagaaaggcagtagtacttttccccattattacatatgaaaatggaaaaatcagagtgacttccccatgtagtttctttcccataaattacagggatggatagatagatatggatatatacatatattgcatatatacacttaaacatattaaatatataaagtcttaagtttcatttcatatatacagaaaatggaacctgcaaaggaaaatattatttgaaatggaggtgattgtgaacaacatccatatgtacttatcaaacttaatccactgactaatataatttaaggggaacaaagctttcttttggataaaatggtacacagacatagaag

SEQ ID NO: 90891 - DNA, 425 bp, Homo sapiens
ccattattggccccactgtcagagtgatgcagacgatcagaagaggaagaggaggagggatgggtcaggtagagctaatgacaagagagtgttctccagggtgattctgaatccttctccctgtgctacaaggaccaagttaggggcaactctcagcaatcttttcttttttcttgtggatagaatgccatcaatttgcaagttactttaaaaaatggaagaattgtgcctactgatgagaggccaatgctggcagtgacagcgggatctgagaaggcaataccgtttaggaagtctgccacatggcttacagggtagaggtagagagctttgggtttcaacagcaccacgaataactttttaatctggctcctttctcccctgtgccagagcactctctgctctgcacagggccatcagctcac

SEQ ID NO: 90892 - DNA, 577 bp, Homo sapiens
cataaagcacaaggctgtgcatgactagagtcccacctaggtgtctggcataatcagacctcagcaaatgcctttggggccttcccacagctctgacctcgatccactggggctataccctgccctgagaaaaatgagtaaataaagttataccatccactacctcatacaccatataagaaaattaactcaaaatggatcaaaggcctaaatgtaagagttaaaactataaaattcttggaaacttagtaaacgtgacaatgggatatgcagtggtttcttaaatatgatatcaaaagcacaagcaggtctggcatggtggctcaggcctataatctcagcattttgggaggtggaggatcacttgaggctgggagtttgaaaccagcctgggcaacatagcaagaccctgtgtctacaaaaaatttaaaaaaaattagcctgtagccctagctatgcaggaggtggaggtgggagaattgcttgaacccaggagtttgaggttacagcgagctgtgatagcaccactgcactccagcctgggccacagagcaagatcgtacctcttaaaaaaaaa

SEQ ID NO: 90893 - DNA, 392 bp, Homo sapiens
ctggcttacatctagggtagggtttcacaacatttgtcctcttgatattttggaggatagtctttgaataatcctacccgtacattgtaggatgtataacagcatctctggtctccactcactacatcactgtaacactcttctaattatggcaatcaacgatgcctccagacaaatgccccctggggggcaaaatctccatggttgaaatacaccatggagattttgaactcacctagggtaaaatgtaccagctaacttctaacaccagaaatactccaagccaccacaaacctaaatctagatgcacacttctacaaaggatattaaagaggttcatctcgcacctgtccaccacctggtatcttcttcagtgccccaggaatggcctt

SEQ ID NO: 90894 - DNA, 318 bp, Homo sapiens
gtctttcattttttacacattgtcaatatttgaaaataggatcactgttggtttagactcagtgctcatctgcatgatcagcctgtgtcatttcttgcgttaggccttacctcctttcagtgtgttgattttctaggttttatcttttctcatttagaggccaattattcttttttctttttgtttcaagcagttttatatcaccacctgttctttccatttcagaagttcattttctgatataaagctaaatagttttgctgacataagttcttttcatcttctacagcaggttcagtgttttgctcataaagagaa

SEQ ID NO: 90895 - DNA, 525 bp, Homo sapiens
taaatataattgattacagtctatatgaaatgaataattaccttcttcaccagccatcattttgtatttgcatttgcctttgaatacatttgcatgtgtgaggtttgtctaatatgcattccagtggttaaagaacaggaaataatcctgaaatcaaagcttggagacgggttatttgcccttgagttccaggactcctgtgtgtttggaattgttttacataaatccatgtcttaatgagtacaagattgagtttttttgcatatgcttttatttcacttttctcaaccatagcttatgcttaaaccacaatttctaagtcaaaatctttgaaaagctttgggttaatcttctcaagccactgatttatttaaaccaactacagagaggatgtagagatgaatcaaatgaaagggcaacaaacactttacagagtttaaataaactaagtgagagggaaaggttttaatgttgaaatacttaaataatgacatttacctagtaatctgccttgcaaaaaaataa

SEQ ID NO: 90896 - DNA, 1093 bp, Homo sapiens
  misc_feature (1061)..(1061): n is a, c, g, or t
ccctaaagaaagctgtgagaggacagagatgggtgaggaacgagtggcctctgcaacctgagatggccacattgcaaactctttcttgctgcggaacttcttctatttgctaaggaactgccattacactggtgtttacacagcaattccgaaaggaaatggcatcaaggcaaaatcttgatgccatggaaggcccttggaatgatccaattcagtggttttacaaacccaccacaaatgcggtgcctcggcagacatttgaaacctctcatctaacccgacttaagtgttccttgccttcctcagggattcctctaatttgtgaagtcactttgaaagaatgcgtgcgtgtggcaggagggagcgtgtggtgacttggtcactgccactctggttccaagttctgttttcaggagggggacaggtcagattttcctccagacataggtcacttccccagggtcggagatgaacttaaaggctaagaaacccagatttaaggtcaaaaccaggagctggaagaggaggaaaagagagtggaaggggttaagaagcagctgggcaagagcagaagatgctccagcagggacagaagcacgacctggccctcctttccatttagagcacattccatctggagaggtcaaccgaaatattaatcatgtggacaggagaaaaggatgtgaaaaaaccatttctcttatctcactttgaaatgtgaaagtgcatgttgtacaattgtcctcatggcttgtaacacatcatttaatgaattgatcacagtggaatgtaaagatgaagcagcatttattttgtatgttatattgcatataatttttagagttgacatttataaccatggaagctgttattttacatatcatcttcaaaccatatcagccttaaacacatttaaatttaataagcaagtagattagatttgcttttaagctaggcatatcattacagtgcgtgtttccgtcagaagggcatgctcacgattaaatactgtcttcagttgttttaaagaaacaaaaattttaaagaagggggttagagcnaaagctgaaataattgagtatgaagccctaag

SEQ ID NO: 90897 - DNA, 368 bp, Homo sapiens
atcttaaaaatatatgcaaatcaaaatatattcatgttcattttaatattaagggaatttccatttccaaagcatcaccgcccatcacagtagttccacggatcccagcttgagaactattaaatgaaaaaccaaaaaatgcaaatagcaggatagaaaagttgtaggtacattaaaatggttacacctaccaccaccactggggaatcctgtaagatgttaatggctgggaatgggggctcacgcctgcaatcccagaactttctggggccgaggcaggcagatctcttgaaccctgtctctacaaaaaatagaaaaattaggcggacatggtggccagtgcctacagtcccagctacaaagtgggc

SEQ ID NO: 90898 - DNA, 305 bp, Homo sapiens
cgaggatctgtgggcagaggagtacgctcaacaagactgtgttaagaaatcttactccaaggccttcacgctgacatctctgccctctttgtgacacccaagacgactggggcccgggtggagttaagcgagcagcaactgcagttgtggccgagtgatgctaaccaggatgggtgggatggatgttcacacctggcttttcttagctgcggtcagacctcaccaatctagtagagcctataattcttaccaaggacctgagcagcctagctcctgcatttctcatctctgcctccaattcactt

SEQ ID NO: 90899 - DNA, 329 bp, Homo sapiens
aatgacatgatacgaatcgagctggtacccctggagcccaaagtgctgggattataggcgtgagccaccacacccagcccatctgaggtttttctaatgtagagaatataccatagtgttttaaataacctaccctcttacatttgactgcactcccttcttcaacacacagattgggggcaggagctgctttttcaatgagaagaatgaacagacctagtgggcgttgcctttagacccaggtaagaggaatcccagccttgggacattactttcaagggccaagcccataggccatccttctagaacattctttgggtagctagggc

SEQ ID NO: 90900 - DNA, 470 bp, Homo sapiens
cactcctggttttgttttgttttttgttttgttttacttcagagacagacattttcactgtatacttgcgacttgcaccacaattcaagtctgagattacctaactgatgatgtttattaacacttcagtagaattcttcgcagcagtgaacagtagtgacaggtcattatgtttttcttgctgttttaaatcttcatcttacaatgagttattttgaaattccaaaacatttccctgtattccagaaattgaaaatggttgttcactaaaaagcctcttcttttcctgcttataaatttgccaattttgccattttaaatcacctttcttacgtttctctgaattgtatattatttgtcaatttcacagtttctataatctattgtttgctgaattgttacagtcttttgtttttaatagactagcactattcctaattattaaatctgatttacaaagcattgaatga

SEQ ID NO: 90901 - DNA, 437 bp, Homo sapiens
gaaaaactagaagaacatgcgagactttttttggtactgaaaaaagaatggaatatcaaaacataaaggtaaaggaagcaaatatagaagaaatatttaattgttgccttttaataaatttgcttagatcccaccaatattggatacccaataaaaagttttgtatgaaacaatgaatggcctaaaaccttcagtccagttaactgtgctcagtggatacttactgtcttttgttgaggtgaaccccaaccaaaccatgaggtattgaaacagacaaaagttttttccctaaagaaagcatttaattcaagtattactcatggagtgtctgtggtaccctagaccctagtttaggtgctatcggtcagtgtttctcacaatgtgatgcgaagactaccaccattagaattactaggggatttttgtgttagaaatgt

SEQ ID NO: 90902 - DNA, 281 bp, Homo sapiens
gttttaactaaaagtctgactgccaactgtcttcaccacgcaagaggaatttggcaaatccaccctctctagttcatattatgaaagcaatatgaaatcaccaaatcctattataataatgaatatgcttttcatattataagtgctctgtagagatttttccatcccacctcttggttgtgaatctgcaaatctattaatcttccaaatacagtgatgacatgtttcacaggcgccgagaaggtatattatgggccaaggcaaagttgtagcatatgaca

SEQ ID NO: 90903 - DNA, 841 bp, Homo sapiens
gtctgttgagagggaaccatttccaagatgtatggggaagaatttcctgagctgatgtgagagtgtcattccacagggccatcagacaggagccgagcccctctgccggcagggaaacggtctcttatggaaactgggaatcatatgaagaagaatcctaacctcaaagggtcgtggtgagaatcaaataagaggatgtgcttagcacacaggtgtccaagcagcgagagctccagcatcctgaccccacagcctttgtggttaaccactgctcactgctttccacttgctaggatgccccagaatatttgaatcagagcctccaaatggaaaacggacagtggaagacttctgtacaagtccccagaaaccaggctgaggaagagggagaatccgaagctgacttcagggttttgagcttggctcactggggtgatgaagttgccagtaacaacatggaaatagcaagaagcaggttcaaggggatgtattatcttcatcctggaacgttggattaccgagatgcaagtgggctatctgggtggattttctggcaggtgttggacttccagaaaatgattcttcaaagctacacgaggactaagagtgtgggaaataattgatcccatctgggcaaattcaagtgttttcctgggtgaagacttctgggggcagagagcaaactagaaaacagaaaacagaagtgggtactcatgggtttgtggtcacggcattcagttttcttgcctgcagagtgggtgccttgctttgttcttcccaagctgttgttgaggctgcattaggtcaggaatgggaaattgccctgtagattgtgccctga

SEQ ID NO: 90904 - DNA, 595 bp, Homo sapiens
aaaagcaggggagagcagtaagcatattgatggtgagcttaggtgaaggccagaatattcaactctttatatggtgatggtttgatggacggggtgcttgatgctggttggggagacacataggccaagaggtcagtaaagagattagacaggaataaattgtcccctgcagggaatggaagaaagaagggagcctcagtgctgatttctgctctctctctttcctatgctcttcttctaggagccacactcaaggggtcatttatccagacctgaagctcaaagtctctctccttacacaaccagcgccaacagggccaagctactggctaagaacagacaaactttcctgcttcagaccacaaagctgacccgtcttgccagacgcatgtgcagggacctattacagccaaggagggccgcccgacggccttatgctcctatcaatgccaatgccatcaaagcagagtgctccattcgacttcctaaggccgccaagactccattgaagattcaccctctggtgcggctgcccctggcaactatcgtcaaagatctggtggcccagacaccccctctaccccctctagagcca

SEQ ID NO: 90905 - DNA, 543 bp, Homo sapiens
  misc_feature (18)..(18): n is a, c, g, or t
agttcgacggagactctncaacatcttttctcaccggggttttccaatctctctcctatagggggaaatgcagtgtgaccctcttgaatgagacagatatcttgagccagtacctggaaaaggaggtgagaaagagatgttgagagaagagcgaggggaatgggtattgcccgcaaaagagagggggaaaggagcacaatgatgaggtacagggttgccagactgccggtcatggaaactcagatacacctccctccctgccgcctatgtggattgctgccttgcttaccttgtctctccccaattccaggactgctttttttactcactggtgtttgaccccgtgcagaagacacttctcgctgatcagggcgagattagagttggttgcaaataccaagctgagatcccagatcgcctagtagagggtaagcaacaggacaagactgtacggctaccaggttgtctaattccaaggggcactttaacattatagtctctgtgaatggcgtcacctggggttgtgcagtgcactgtctgcag

SEQ ID NO: 90906 - DNA, 241 bp, Homo sapiens
tggcatgccagagtttgggaaacacagtctcctccgggtagctggataatacaaagaaaattcgtttttttcagggaccattgtttgatcaagtttcagtataagcgaagcaccccctctgccttttgtacgccagttctcagaaataaagatcttttgtccgtttttttaacctcggattctgtaattggttcttatagtaacaaataaaaagctgttttcttcagcttcacctggctca

SEQ ID NO: 90907 - DNA, 2869 bp, Homo sapiens
agtgggccttgttctccggatcggccgaaggtgttccggaaggaggcgaaccctgaggcgggcccggcaagccttccctgcggccggcagagcccaacgactagtgggactccgcgggggcgggggtagctggagcctggctctggcctggcaggagccgagctcgttccggaagaagccgagcggacgggggccagcctcagcgtcccgggagtgaggcgatagctgcggcggcgacagcgcgggccgggatgaaccgcgacggctgaggcagcggaggtgccggctgcgcgggccccagtgagactccctcgaagcggcagcccaccgttcggggctttgcctcgagccgagccctgcccccgcgagcctcccggacccctttgtgcggccggaggcggcggcgggaacggccatggcggccaacatgtaccgggtgggagattacgtctattttgagaactcttccagcaatccttacctggttagacggattgaggagctcaacaagactgcaaatggaaatgtggaggcaaaggttgtctgtcttttccggcgcagggacatttctagtagcctcaacagcctggctgatagtaatgccagggagtttgaagaggaatcaaagcagccaggggtgtctgagcagcagcgccatcaactgaagcaccgggaactttttctttctcggcaatttgaatcattaccagccacccacatacgggggaaatgcagtgtgaccctcttgaatgagacagatatcttgagccagtacctggaaaaggaggactgctttttttactcactggtgtttgaccccgtgcagaagacacttctcgctgatcagggcgagattagagttggttgcaaataccaagctgagatcccagatcgcctagtagagggagaatctgataatcggaaccagcagaagatggagatgaaggtctgggacccagacaaccctctcacagaccggcagatcgaccagtttcttgtggtggcccgagctgtgggaacctttgcaagagccctagattgtagcagctccattcggcagccaagcttgcacatgagtgcagctgctgcctcccgagatatcactctgtttcacgccatggataccttgcaaaggaacggctacgacctggctaaggccatgtcgaccctggtaccccagggaggcccggtgctgtgtcgggatgagatggaggaatggtcagcctcagaggccatgctatttgaggaggccctagagaagtatgggaaggacttcaatgatattcgccaggattttctaccctggaagtcacttgccagcatagtccagttttattacatgtggaaaaccacagaccggtatattcagcagaaaaggttgaaagctgctgaagcagacagcaaactgaaacaggtctacattcccacctacactaagccaaaccctaaccagatcatttctgtgggttcaaaacctggcatgaatggggctggatttcagaagggcctgacttgtgagagttgccacaccacacagtctgctcagtggtatgcctggggcccacctaacatgcagtgccgcctctgtgcttcctgttggatctactggaagaagtatgggggactgaagaccccaactcagcttgagggggccactcggggcaccacggagccacactcaaggggtcatttatccagacctgaagctcaaagtctctctccttacacaaccagcgccaacagggccaagctactggctaagaacagacaaactttcctgcttcagaccacaaagctgacccgtcttgccagacgcatgtgcagggacctattacagccaaggagggccgcccgacggccttatgctcctatcaatgccaatgccatcaaagcagagtgctccattcgacttcctaaggccgccaagactccattgaagattcaccctctggtgcggctgcccctggcaactatcgtcaaagatctggtggcccaggcacccctgaaaccaaaaacacctcggggtaccaagacaccgatcaacagaaaccagctgtcccagaaccggggactggggggcattatggtgaaacgggcctatgagactatggcaggggcaggggttcctttctctgccaatggaaggcctctggcttcagggattcgttcaagctcacagccagcagccaagcgtcagaaactaaacccagctgatgcccccaatcctgtggtgtttgtggccacaaaggataccagggccctacggaaggctctgacccatctggaaatgcggcgagctgctcgccgacccaacttgcccctgaaggtgaagccaacgctgattgcagtgcggccccctgtccctctacctgcaccctcacatcctgccagcaccaatgagcctattgtcctggaggactgagcacctgtggggaagggaggtgggctgagaggtagagggtggatgcccagggcacccaaacctcccttccctttcgtgtcgaagggagtgaggagtgaattaaggaagagagcaagtgagtgtgtgtccctggaggggttgggcgccctctggtgttaccacctcgagacttgtctcatgcctccatgcttgccgatggaggacagactgcaggaacttggcccatgtgggaacctagcctgttttggggggtaggacccacagatgtcttggacagttttggggggagggttttttaattttttaaaaattttgcctccccctctgccttttgtacgccagttctcagaaataaagatcttttgtccgtttttttaacctcggattctgtaattggttcttatagtaacaaataaaaagctgttttcttcagcttcacctggctca

SEQ ID NO: 90908 - DNA, 2858 bp, Homo sapiens
agtgggccttgttctccggatcggccgaaggtgttccggaaggaggcgaaccctgaggcgggcccggcaagccttccctgcggccggcagagcccaacgactagtgggactccgcgggggcgggggtagctggagcctggctctggcctggcaggagccgagctcgttccggaagaagccgagcggacgggggccagcctcagcgtcccgggagtgaggcgatagctgcggcggcgacagcgcgggccgggatgaaccgcgacggctgaggcagcggaggtgccggctgcgcgggccccagtgagactccctcgaagcggcagcccaccgttcggggctttgcctcgagccgagccctgcccccgcgagcctcccggacccctttgtgcggccggaggcggcggcgggaacggccatggcggccaacatgtaccgggtgggagattacgtctattttgagaactcttccagcaatccttacctggttagacggattgaggagctcaacaagactgcaaatggaaatgtggaggcaaaggttgtctgtcttttccggcgcagggacatttctagtagcctcaacagcctggctgatagtaatgccagggagtttgaagaggaatcaaagcagccaggggtgtctgagcagcagcgccatcaactgaagcaccgggaactttttctttctcggcaatttgaatcattaccagccacccacatacgggggaaatgcagtgtgaccctcttgaatgagacagatatcttgagccagtacctggaaaaggaggactgctttttttactcactggtgtttgaccccgtgcagaagacacttctcgctgatcagggcgagattagagttggttgcaaataccaagctgagatcccagatcgcctagtagagggagaatctgataatcggaaccagcagaagatggagatgaaggtctgggacccagacaaccctctcacagaccggcagatcgaccagtttcttgtggtggcccgagctgtgggaacctttgcaagagccctagattgtagcagctccattcggcagccaagcttgcacatgagtgcagctgctgcctcccgagatatcactctgtttcacgccatggataccttgcaaaggaacggctacgacctggctaaggccatgtcgaccctggtaccccagggaggcccggtgctgtgtcgggatgagatggaggaatggtcagcctcagaggccatgctatttgaggaggccctagagaagtatgggaaggacttcaatgatattcgccaggattttctaccctggaagtcacttgccagcatagtccagttttattacatgtggaaaaccacagaccggtatattcagcagaaaaggttgaaagctgctgaagcagacagcaaactgaaacaggtctacattcccacctacactaagccaaaccctaaccagatcatttctgtgggttcaaaacctggcatgaatggggctggatttcagaagggcctgacttgtgagagttgccacaccacacagtctgctcagtggtatgcctggggcccacctaacatgcagtgccgcctctgtgcttcctgttggatctactggaagaagtatgggggactgaagaccccaactcagcttgagggggccactcggggcaccacggagccacactcaaggggtcatttatccagacctgaagctcaaagtctctctccttacacaaccagcgccaacagggccaagctactggctaagaacagacaaactttcctgcttcagaccacaaagctgacccgtcttgccagacgcatgtgcagggacctattacagccaaggagggccgcccgacggccttatgctcctatcaatgccaatgccatcaaagcagagtgctccattcgacttcctaaggccgccaagactccattgaagattcaccctctggtgcggctgcccctggcaactatcgtcaaagatctggtggcccaggcacccctgaaaccaaaaacacctcggggtaccaagacaccgatcaacagaaaccagctgtcccagaaccggggactggggggcattatggtgaaacgggcctatgagactatggcaggggcaggggttcctttctctgccaatggaaggcctctggcttcagggattcgttcaagctcacagccagcagccaagcgtcagaaactaaacccagctgatgcccccaatcctgtggtgtttgtggccacaaaggataccagggccctacggaaggctctgacccatctggaaatgcggcgagctgctcgccgacccaacttgcccctgaaggtgaagccaacgctgattgcagtgcggccccctgtccctctacctgcaccctcacatcctgccagcaccaatgagcctattgtcctggaggactgagcacctgtggggaagggaggtgggctgagaggtagagggtggatgcccagggcacccaaacctcccttccctttcgtgtcgaagggagtgaggagtgaattaaggaagagagcaagtgagtgtgtgtccctggaggggttgggcgccctctggtgttaccacctcgagacttgtctcatgcctccatgcttgccgatggaggacagactgcaggaacttggcccatgtgggaacctagcctgttttggggggtaggacccacagatgtcttggacagttttggggggagggttttttaattttttaaaaattttgcctccctttgtgaaaggggatggggaggggaagagtaaacagataacaggtggtggtacctggttgggggaggggggcgtgcactgccatcaccactgatcccattgtcctgcaggactga

SEQ ID NO: 90909 - DNA, 3273 bp, Homo sapiens
agtgggccttgttctccggatcggccgaaggtgttccggaaggaggcgaaccctgaggcgggcccggcaagccttccctgcggccggcagagcccaacgactagtgggactccgcgggggcgggggtagctggagcctggctctggcctggcaggagccgagctcgttccggaagaagccgagcggacgggggccagcctcagcgtcccgggagtgaggcgatagctgcggcggcgacagcgcgggccgggatgaaccgcgacggctgaggcagcggaggtgccggctgcgcgggccccagtgagactccctcgaagcggcagcccaccgttcggggctttgcctcgagccgagccctgcccccgcgagcctcccggacccctttgtgcggccggaggcggcggcgggaacggccatggcggccaacatgtaccgggtgggagattacgtctattttgagaactcttccagcaatccttacctggttagacggattgaggagctcaacaagactgcaaatggaaatgtggaggcaaaggttgtctgtcttttccggcgcagggacatttctagtagcctcaacagcctggctgatagtaatgccagggagtttgaagaggaatcaaagcagccaggggtgtctgagcagcagcgccatcaactgaagcaccgggaactttttctttctcggcaatttgaatcattaccagccacccacatacgggggaaatgcagtgtgaccctcttgaatgagacagatatcttgagccagtacctggaaaaggaggtgagaaagagatgttgagagaagagcgaggggaatgggtattgcccgcaaaagagagggggaaaggagcacaatgatgaggtacagggttgccagactgccggtcatggaaactcagatacacctccctccctgccgcctatgtggattgctgccttgcttaccttgtctctccccaattccaggactgctttttttactcactggtgtttgaccccgtgcagaagacacttctcgctgatcagggcgagattagagttggttgcaaataccaagctgagatcccagatcgcctagtagagggagaatctgataatcggaaccagcagaagatggagatgaaggtctgggacccagacaaccctctcacagaccggcagatcgaccagtttcttgtggtggcccgagctgtgggaacctttgcaagagccctagattgtagcagctccattcggcagccaagcttgcacatgagtgcagctgctgcctcccgagatatcactctgtttcacgccatggataccttgcaaaggaacggctacgacctggctaaggccatgtcgaccctggtaccccagggaggcccggtgctgtgtcgggatgagatggaggaatggtcagcctcagaggccatgctatttgaggaggccctagagaagtatgggaaggacttcaatgatattcgccaggattttctaccctggaagtcacttgccagcatagtccagttttattacatgtggaaaaccacagaccggtatattcagcagaaaaggttgaaagctgctgaagcagacagcaaactgaaacaggtctacattcccacctacactaagccaaaccctaaccagatcatttctgtgggttcaaaacctggcatgaatggggctggatttcagaagggcctgacttgtgagagttgccacaccacacagtctgctcagtggtatgcctggggcccacctaacatgcagtgccgcctctgtgcttcctgttggatctactggaagaagtatgggggactgaagaccccaactcagcttgagggggccactcggggcaccacggagccacactcaaggggtcatttatccagacctgaagctcaaagtctctctccttacacaaccagcgccaacagggccaagctactggctaagaacagacaaactttcctgcttcagaccacaaagctgacccgtcttgccagacgcatgtgcagggacctattacagccaaggagggccgcccgacggccttatgctcctatcaatgccaatgccatcaaagcagagtgctccattcgacttcctaaggccgccaagactccattgaagattcaccctctggtgcggctgcccctggcaactatcgtcaaagatctggtggcccaggcacccctgaaaccaaaaacacctcggggtaccaagacaccgatcaacagaaaccagctgtcccagaaccggggactggggggcattatggtgaaacgggcctatgagactatggcaggggcaggggttcctttctctgccaatggaaggcctctggcttcagggattcgttcaagctcacagccagcagccaagcgtcagaaactaaacccagctgatgcccccaatcctgtggtgtttgtggccacaaaggataccagggccctacggaaggctctgacccatctggaaatgcggcgagctgctcgccgacccaacttgcccctgaaggtgaagccaacgctgattgcagtgcggccccctgtccctctacctgcaccctcacatcctgccagcaccaatgagcctattgtcctggaggactgagcacctgtggggaagggaggtgggctgagaggtagagggtggatgcccagggcacccaaacctcccttccctttcgtgtcgaagggagtgaggagtgaattaaggaagagagcaagtgagtgtgtgtccctggaggggttgggcgccctctggtgttaccacctcgagacttgtctcatgcctccatgcttgccgatggaggacagactgcaggaacttggcccatgtgggaacctagcctgttttggggggtaggacccacagatgtcttggacagttttggggggagggttttttaattttttaaaaattttgcctccctttgtgaaaggggatggggaggggaagagtaaacagataacaggtggtggtacctggttgggggaggggggcgtgcactgccatgtctttttttttttttttttcctaattgggggtttctctttctgtccggtgtccggactttcctaattggagtttgaggcccctaagctggcatcaaccccaggccacgctcgctctttccttccctcccctccccctctgccttttgtacgccagttctcagaaataaagatcttttgtccgtttttttaacctcggattctgtaattggttcttatagtaacaaataaaaagctgttttcttcagcttcacctggctca

SEQ ID NO: 90910 - DNA, 3312 bp, Homo sapiens
agtgggccttgttctccggatcggccgaaggtgttccggaaggaggcgaaccctgaggcgggcccggcaagccttccctgcggccggcagagcccaacgactagtgggactccgcgggggcgggggtagctggagcctggctctggcctggcaggagccgagctcgttccggaagaagccgagcggacgggggccagcctcagcgtcccgggagtgaggcgatagctgcggcggcgacagcgcgggccgggatgaaccgcgacggctgaggcagcggaggtgccggctgcgcgggccccagtgagactccctcgaagcggcagcccaccgttcggggctttgcctcgagccgagccctgcccccgcgagcctcccggacccctttgtgcggccggaggcggcggcgggaacggccatggcggccaacatgtaccgggtgggagattacgtctattttgagaactcttccagcaatccttacctggttagacggattgaggagctcaacaagactgcaaatggaaatgtggaggcaaaggttgtctgtcttttccggcgcagggacatttctagtagcctcaacagcctggctgatagtaatgccagggagtttgaagaggaatcaaagcagccaggggtgtctgagcagcagcgccatcaactgaagcaccgggaactttttctttctcggcaatttgaatcattaccagccacccacatacgggggaaatgcagtgtgaccctcttgaatgagacagatatcttgagccagtacctggaaaaggaggactgctttttttactcactggtgtttgaccccgtgcagaagacacttctcgctgatcagggcgagattagagttggttgcaaataccaagctgagatcccagatcgcctagtagagggagaatctgataatcggaaccagcagaagatggagatgaaggtctgggacccagacaaccctctcacagaccggcagatcgaccagtttcttgtggtggcccgagctgtgggaacctttgcaagagccctagattgtagcagctccattcggcagccaagcttgcacatgagtgcagctgctgcctcccgagatatcactctgtttcacgccatggataccttgcaaaggaacggctacgacctggctaaggccatgtcgaccctggtaccccagggaggcccggtgctgtgtcgggatgagatggaggaatggtcagcctcagaggccatgctatttgaggaggccctagagaagtatgggaaggacttcaatgatattcgccaggattttgtaagtggatggcactaggaggagaagtgggagagatgacaggtgagggaaccaggacctggggccagatgccagctcattcttcctccctctgccccccttagctaccctggaagtcacttgccagcatagtccagttttattacatgtggaaaaccacagaccggtatattcagcaggtattatctgggctggggagggtggaccataggctacctgctgacctctgcctttgaagttgatgacattctccctgctatgaggctctgatccttctctttctttttaccttcttacagaaaaggttgaaagctgctgaagcagacagcaaactgaaacaggtctacattcccacctacactaagccaaaccctaaccagatcatttctgtgggttcaaaacctggcatgaatggggctggatttcagaagggcctgacttgtgagagttgccacaccacacagtctgctcagtggtatgcctggggcccacctaacatgcagtgccgcctctgtgcttcctgttggatctactggaagaagtatgggggactgaagaccccaactcagcttgagggggccactcggggcaccacggagccacactcaaggggtcatttatccagacctgaagctcaaagtctctctccttacacaaccagcgccaacagggccaagctactggctaagaacagacaaactttcctgcttcagaccacaaagctgacccgtcttgccagacgcatgtgcagggacctattacagccaaggagggccgcccgacggccttatgctcctatcaatgccaatgccatcaaagcagagtgctccattcgacttcctaaggccgccaagactccattgaagattcaccctctggtgcggctgcccctggcaactatcgtcaaagatctggtggcccaggcacccctgaaaccaaaaacacctcggggtaccaagacaccgatcaacagaaaccagctgtcccagaaccggggactggggggcattatggtgaaacgggcctatgagactatggcaggggcaggggttcctttctctgccaatggaaggcctctggcttcagggattcgttcaagctcacagccagcagccaagcgtcagaaactaaacccagctgatgcccccaatcctgtggtgtttgtggccacaaaggataccagggccctacggaaggctctgacccatctggaaatgcggcgagctgctcgccgacccaacttgcccctgaaggtgaagccaacgctgattgcagtgcggccccctgtccctctacctgcaccctcacatcctgccagcaccaatgagcctattgtcctggaggactgagcacctgtggggaagggaggtgggctgagaggtagagggtggatgcccagggcacccaaacctcccttccctttcgtgtcgaagggagtgaggagtgaattaaggaagagagcaagtgagtgtgtgtccctggaggggttgggcgccctctggtgttaccacctcgagacttgtctcatgcctccatgcttgccgatggaggacagactgcaggaacttggcccatgtgggaacctagcctgttttggggggtaggacccacagatgtcttggacagttttggggggagggttttttaattttttaaaaattttgcctccctttgtgaaaggggatggggaggggaagagtaaacagataacaggtggtggtacctggttgggggaggggggcgtgcactgccatgtctttttttttttttttttcctaattgggggtttctctttctgtccggtgtccggactttcctaattggagtttgaggcccctaagctggcatcaaccccaggccacgctcgctctttccttccctcccctccccctctgccttttgtacgccagttctcagaaataaagatcttttgtccgtttttttaacctcggattctgtaattggttcttatagtaacaaataaaaagctgttttcttcagcttcacctggctca

SEQ ID NO: 90911 - DNA, 2708 bp, Homo sapiens
  misc_feature (13)..(13): n is a, c, g, or t
  misc_feature (20)..(20): n is a, c, g, or t
  misc_feature (31)..(31): n is a, c, g, or t
  misc_feature (35)..(35): n is a, c, g, or t
cacttgctgcctncaggttnaatgggggggngggncttttcctcccccttggtggggtgggagattacgtctattttgagaactcttccagcaatccttacctggttagacggattgaggagctcaacaagactgcaaatggaaatgtggaggcaaaggttgtctgtcttttccggcgcagggacatttctagtagcctcaacagcctggctgatagtaatgccagggagtttgaagaggaatcaaagcagccaggggtgtctgagcagcagcgccatcaactgaagcaccgggaactttttctttctcggcaatttgaatcattaccagccacccacatacgggggaaatgcagtgtgaccctcttgaatgagacagatatcttgagccagtacctggaaaaggaggactgctttttttactcactggtgtttgaccccgtgcagaagacacttctcgctgatcagggcgagattagagttggttgcaaataccaagctgagatcccagatcgcctagtagagggagaatctgataatcggaaccagcagaagatggagatgaaggtctgggacccagacaaccctctcacagaccggcagatcgaccagtttcttgtggtggcccgagctgtgggaacctttgcaagagccctagattgtagcagctccattcggcagccaagcttgcacatgagtgcagctgctgcctcccgagatatcactctgtttcacgccatggataccttgcaaaggaacggctacgacctggctaaggccatgtcgaccctggtaccccagggaggcccggtgctgtgtcgggatgagatggaggaatggtcagcctcagaggccatgctatttgaggaggccctagagaagtatgggaaggacttcaatgatattcgccaggattttctaccctggaagtcacttgccagcatagtccagttttattacatgtggaaaaccacagaccggtatattcagcagaaaaggttgaaagctgctgaagcagacagcaaactgaaacaggtctacattcccacctacactaagccaaaccctaaccagatcatttctgtgggttcaaaacctggcatgaatggggctggatttcagaagggcctgacttgtgagagttgccacaccacacagtctgctcagtggtatgcctggggcccacctaacatgcagtgccgcctctgtgcttcctgttggatctactggaagaagtatgggggactgaagaccccaactcagcttgagggggccactcggggcaccacggagccacactcaaggggtcatttatccagacctgaagctcaaagtctctctccttacacaaccagcgccaacagggccaagctactggctaagaacagacaaactttcctgcttcagaccacaaagctgacccgtcttgccagacgcatgtgcagggacctattacagccaaggagggccgcccgacggccttatgctcctatcaatgccaatgccatcaaagcagagtgctccattcgacttcctaaggccgccaagactccattgaagattcaccctctggtgcggctgcccctggcaactatcgtcaaagatctggtggcccaggcacccctgaaaccaaaaacacctcggggtaccaagacaccgatcaacagaaaccagctgtcccagaaccggggactggggggcattatggtgaaacgggcctatgagactatggcaggggcaggggttcctttctctgccaatggaaggcctctggcttcagggattcgttcaagctcacagccagcagccaagcgtcagaaactaaacccagctgatgcccccaatcctgtggtgtttgtggccacaaaggataccagggccctacggaaggctctgacccatctggaaatgcggcgagctgctcgccgacccaacttgcccctgaaggtgaagccaacgctgattgcagtgcggccccctgtccctctacctgcaccctcacatcctgccagcaccaatgagcctattgtcctggaggactgagcacctgtggggaagggaggtgggctgagaggtagagggtggatgcccagggcacccaaacctcccttccctttcgtgtcgaagggagtgaggagtgaattaaggaagagagcaagtgagtgtgtgtccctggaggggttgggcgccctctggtgttaccacctcgagacttgtctcatgcctccatgcttgccgatggaggacagactgcaggaacttggcccatgtgggaacctagcctgttttggggggtaggacccacagatgtcttggacagttttggggggagggttttttaattttttaaaaattttgcctccctttgtgaaaggggatggggaggggaagagtaaacagataacaggtggtggtacctggttgggggaggggggcgtgcactgccatgtctttttttttttttttttcctaattgggggtttctctttctgtccggtgtccggactttcctaattggagtttgaggcccctaagctggcatcaaccccaggccacgctcgctctttccttccctcccctccccctctgccttttgtacgccagttctcagaaataaagatcttttgtccgtttttttaacctcggattctgtaattggttcttatagtaacaaataaaaagctgttttcttcagcttcacctggctca

SEQ ID NO: 90912 - DNA, 2321 bp, Homo sapiens
agtgggccttgttctccggatcggccgaaggtgttccggaaggaggcgaaccctgaggcgggcccggcaagccttccctgcggccggcagagcccaacgactagtgggactccgcgggggcgggggtagctggagcctggctctggcctggcaggagccgagctcgttccggaagaagccgagcggacgggggccagcctcagcgtcccgggagtgaggcgatagctgcggcggcgacagcgcgggccgggatgaaccgcgacggctgaggcagcggaggtgccggctgcgcgggccccagtgagactccctcgaagcggcagcccaccgttcggggctttgcctcgagccgagccctgcccccgcgagcctcccggacccctttgtgcggccggaggcggcggcgggaacggccatggcggccaacatgtaccgggtgggagattacgtctattttgagaactcttccagcaatccttacctggttagacggattgaggagctcaacaagactgcaaatggaaatgtggaggcaaaggttgtctgtcttttccggcgcagggacatttctagtagcctcaacagcctggctgatagtaatgccagggagtttgaagaggaatcaaagcagccaggggtgtctgagcagcagcgccatcaactgaagcaccgggaactttttctttctcggcaatttgaatcattaccagccacccacatacgggggaaatgcagtgtgaccctcttgaatgagacagatatcttgagccagtacctggaaaaggaggactgctttttttactcactggtgtttgaccccgtgcagaagacacttctcgctgatcagggcgagattagagttggttgcaaataccaagctgagatcccagatcgcctagtagagggagaatctgataatcggaaccagcagaagatggagatgaaggtctgggacccagacaaccctctcacagaccggcagatcgaccagtttcttgtggtggcccgagctgtgggaacctttgcaagagccctagattgtagcagctccattcggcagccaagcttgcacatgagtgcagctgctgcctcccgagatatcactctgtttcacgccatggataccttgcaaaggaacggctacgacctggctaaggccatgtcgaccctggtaccccagggaggcccggtgctgtgtcgggatgagatggaggaatggtcagcctcagaggccatgctatttgaggaggccctagagaagtatgggaaggacttcaatgatattcgccaggattttctaccctggaagtcacttgccagcatagtccagttttattacatgtggaaaaccacagaccggtatattcagcagaaaaggttgaaagctgctgaagcagacagcaaactgaaacaggtctacattcccacctacactaagccaaaccctaaccagatcatttctgtgggttcaaaacctggcatgaatggggctggatttcagaagggcctgacttgtgagagttgccacaccacacagtctgctcagtggtatgcctggggcccacctaacatgcagtgccgcctctgtgcttcctgttggatctactggaagaagtatgggggactgaagaccccaactcagcttgagggggccactcggggcaccacggagccacactcaaggggtcatttatccagacctgaagctcaaagtctctctccttacacaaccagcgccaacagggccaagctactggctaagaacagacaaactttcctgcttcagaccacaaagctgacccgtcttgccagacgcatgtgcagggacctattacagccaaggagggccgcccgacggccttatgctcctatcaatgccaatgccatcaaagcagagtgctccattcgacttcctaaggccgccaagactccattgaagattcaccctctggtgcggctgcccctggcaactatcgtcaaagatctggtggcccaggcacccctgaaaccaaaaacacctcggggtaccaagacaccgatcaacagaaaccagctgtcccagaaccggggactggggggcattatggtgaaacgggcctatgagactatggcaggggcaggggttcctttctctgccaatggaaggcctctggcttcagggattcgttcaagctcacagccagcagccaagcgtcagaaactaaacccagctgatgcccccaatcctgtggtgtttgtggccacaaaggatatttgaaccacaaggaaaagagctatgaccaatcatgaaaatagtcggcgagtctgctcctgacaaccgt

SEQ ID NO: 90913 - DNA, 1660 bp, Homo sapiens
aaaagcaggggagagcagtaagcatattgatggtgagcttaggtgaaggccagaatattcaactctttatatggtgatggtttgatggacggggtgcttgatgctggttggggagacacataggccaagaggtcagtaaagagattagacaggaataaattgtcccctgcagggaatggaagaaagaagggagcctcagtgctgatttctgctctctctctttcctatgctcttcttctaggagccacactcaaggggtcatttatccagacctgaagctcaaagtctctctccttacacaaccagcgccaacagggccaagctactggctaagaacagacaaactttcctgcttcagaccacaaagctgacccgtcttgccagacgcatgtgcagggacctattacagccaaggagggccgcccgacggccttatgctcctatcaatgccaatgccatcaaagcagagtgctccattcgacttcctaaggccgccaagactccattgaagattcaccctctggtgcggctgcccctggcaactatcgtcaaagatctggtggcccaggcacccctgaaaccaaaaacacctcggggtaccaagacaccgatcaacagaaaccagctgtcccagaaccggggactggggggcattatggtgaaacgggcctatgagactatggcaggggcaggggttcctttctctgccaatggaaggcctctggcttcagggattcgttcaagctcacagccagcagccaagcgtcagaaactaaacccagctgatgcccccaatcctgtggtgtttgtggccacaaaggataccagggccctacggaaggctctgacccatctggaaatgcggcgagctgctcgccgacccaacttgcccctgaaggtgaagccaacgctgattgcagtgcggccccctgtccctctacctgcaccctcacatcctgccagcaccaatgagcctattgtcctggaggactgagcacctgtggggaagggaggtgggctgagaggtagagggtggatgcccagggcacccaaacctcccttccctttcgtgtcgaagggagtgaggagtgaattaaggaagagagcaagtgagtgtgtgtccctggaggggttgggcgccctctggtgttaccacctcgagacttgtctcatgcctccatgcttgccgatggaggacagactgcaggaacttggcccatgtgggaacctagcctgttttggggggtaggacccacagatgtcttggacagttttggggggagggttttttaattttttaaaaattttgcctccctttgtgaaaggggatggggaggggaagagtaaacagataacaggtggtggtacctggttgggggaggggggcgtgcactgccatgtctttttttttttttttttcctaattgggggtttctctttctgtccggtgtccggactttcctaattggagtttgaggcccctaagctggcatcaaccccaggccacgctcgctctttccttccctcccctccccctctgccttttgtacgccagttctcagaaataaagatcttttgtccgtttttttaacctcggattctgtaattggttcttatagtaacaaataaaaagctgttttcttcagcttcacctggctca

SEQ ID NO: 90914 - DNA, 2130 bp, Homo sapiens
agtgggccttgttctccggatcggccgaaggtgttccggaaggaggcgaaccctgaggcgggcccggcaagccttccctgcggccggcagagcccaacgactagtgggactccgcgggggcgggggtagctggagcctggctctggcctggcaggagccgagctcgttccggaagaagccgagcggacgggggccagcctcagcgtcccgggagtgaggcgatagctgcggcggcgacagcgcgggccgggatgaaccgcgacggctgaggcagcggaggtgccggctgcgcgggccccagtgagactccctcgaagcggcagcccaccgttcggggctttgcctcgagccgagccctgcccccgcgagcctcccggacccctttgtgcggccggaggcggcggcgggaacggccatggcggccaacatgtaccgggtgggagattacgtctattttgagaactcttccagcaatccttacctggttagacggattgaggagctcaacaagactgcaaatggaaatgtggaggcaaaggttgtctgtcttttccggcgcagggacatttctagtagcctcaacagcctggctgatagtaatgccagggagtttgaagaggaatcaaagcagccaggggtgtctgagcagcagcgccatcaactgaagcaccgggaactttttctttctcggcaatttgaatcattaccagccacccacatacgggggaaatgcagtgtgaccctcttgaatgagacagatatcttgagccagtacctggaaaaggaggactgctttttttactcactggtgtttgaccccgtgcagaagacacttctcgctgatcagggcgagattagagttggttgcaaataccaagctgagatcccagatcgcctagtagagggagaatctgataatcggaaccagcagaagatggagatgaaggtctgggacccagacaaccctctcacagaccggcagatcgaccagtttcttgtggtggcccgagctgtgggaacctttgcaagagccctagattgtagcagctccattcggcagccaagcttgcacatgagtgcagctgctgcctcccgagatatcactctgtttcacgccatggataccttgcaaaggaacggctacgacctggctaaggccatgtcgaccctggtaccccagggaggcccggtgctgtgtcgggatgagatggaggaatggtcagcctcagaggccatgctatttgaggaggccctagagaagtatgggaaggacttcaatgatattcgccaggattttctaccctggaagtcacttgccagcatagtccagttttattacatgtggaaaaccacagaccggtatattcagcagaaaaggttgaaagctgctgaagcagacagcaaactgaaacaggtctacattcccacctacactaagccaaaccctaaccagatcatttctgtgggttcaaaacctggcatgaatggggctggatttcagaagggcctgacttgtgagagttgccacaccacacagtctgctcagtggtatgcctggggcccacctaacatgcagtgccgcctctgtgcttcctgttggatctactggaagaagtatgggggactgaagaccccaactcagcttgagggggccactcggggcaccacggagccacactcaaggggtcatttatccagacctgaagctcaaagtctctctccttacacaaccagcgccaacagggccaagctactggctaagaacagacaaactttcctgcttcagaccacaaagctgacccgtcttgccagacgcatgtgcagggacctattacagccaaggagggccgcccgacggccttatgctcctatcaatgccaatgccatcaaagcagagtgctccattcgacttcctaaggccgccaagactccattgaagattcaccctctggtgcggctgcccctggcaagacgggtcagctttgtggtctgaagcagaaaagtttgtctgttcttagccagtagcttggccctgttggcgctggttgtgtaaggagagagactttgagcttcaggtctggataactgaccccttgagttgtggccccgtggtcccacctctgggtaaca

SEQ ID NO: 90915 - DNA, 1082 bp, Homo sapiens
tacaatcgagctcgtacccctggctctgaacttaggacagaaaccagctgtcccagaaccggggactggggggcattatggtgaaacgggcctatgagactatggcaggggcaggggttcctttctctgccaatggaaggcctctggcttcagggattcgttcaagctcacagccagcagccaagcgtcagaaactaaacccagctgatgcccccaatcctgtggtgtttgtggccacaaaggataccagggccctacggaaggctctgacccatctggaaatgcggcgagctgctcgccgacccaacttgcccctgaaggtgaagccaacgctgattgcagtgcggccccctgtccctctacctgcaccctcacatcctgccagcaccaatgagcctattgtcctggaggactgagcacctgtggggaagggaggtgggctgagaggtagagggtggatgcccagggcacccaaacctcccttccctttcgtgtcgaagggagtgaggagtgaattaaggaagagagcaagtgagtgtgtgtccctggaggggttgggcgccctctggtgttaccacctcgagacttgtctcatgcctccatgcttgccgatggaggacagactgcaggaacttggcccatgtgggaacctagcctgttttggggggtaggacccacagatgtcttggacagttttggggggagggttttttaattttttaaaaattttgcctccctttgtgaaaggggatggggaggggaagagtaaacagataacaggtggtggtacctggttgggggaggggggcgtgcactgccatgtctttttttttttttttttcctaattgggggtttctctttctgtccggtgtccggactttcctaattggagtttgaggcccctaagctggcatcaaccccaggccacgctcgctctttccttccctcccctccccctctgccttttgtacgccagttctcagaaataaagatcttttgtccgtttttttaacctcggattctgtaattggttcttatagtaacaaataaaaagctgttttcttcagcttcacctggctca

SEQ ID NO: 90916 - DNA, 506 bp, Homo sapiens
tcatattcgttcattcattcattggatgtattcaggaaaggctattgagaggttagcaggaactttactattctgtctcttgggggcaaaggaaagggatttggaagtctatccttgaatgtaagtctttactcatattttcttgggctttttaatttaggtccctctgaaacttactgttatttgtctctttgtgcatttctgttcccagatgatcaatttccactgctacgttgttttgtttttgtttttttcctccccttagactgcaaatggaaatgtggaggcaaaggttgtctgtcttttccggcgcagggacatttctagtagcctcaacagcctggctgatagtaatgccagtgagtatcttcctccctttctttttctcctacccatgatctgaggcctgggcatgtccctgcaggtatttcccctggtagcatgcccaaggcagaggtgtgagtttgggggtgggaaatgcctggcctgaggagggaggcctgttt

SEQ ID NO: 90917 - DNA, 3088 bp, Homo sapiens
agtgggccttgttctccggatcggccgaaggtgttccggaaggaggcgaaccctgaggcgggcccggcaagccttccctgcggccggcagagcccaacgactagtgggactccgcgggggcgggggtagctggagcctggctctggcctggcaggagccgagctcgttccggaagaagccgagcggacgggggccagcctcagcgtcccgggagtgaggcgatagctgcggcggcgacagcgcgggccgggatgaaccgcgacggctgaggcagcggaggtgccggctgcgcgggccccagtgagactccctcgaagcggcagcccaccgttcggggctttgcctcgagccgagccctgcccccgcgagcctcccggacccctttgtgcggccggaggcggcggcgggaacggccatggcggccaacatgtaccgggtgggagattacgtctattttgagaactcttccagcaatccttacctggttagacggattgaggagctcaacaagactgcaaatggaaatgtggaggcaaaggttgtctgtcttttccggcgcagggacatttctagtagcctcaacagcctggctgatagtaatgccagggagtttgaagaggaatcaaagcagccaggggtgtctgagcagcagcgccatcaactgaagcaccgggaactttttctttctcggcaatttgaatcattaccagccacccacatacgggggaaatgcagtgtgaccctcttgaatgagacagatatcttgagccagtacctggaaaaggaggactgctttttttactcactggtgtttgaccccgtgcagaagacacttctcgctgatcagggcgagattagagttggttgcaaataccaagctgagatcccagatcgcctagtagagggagaatctgataatcggaaccagcagaagatggagatgaaggtctgggacccagacaaccctctcacagaccggcagatcgaccagtttcttgtggtggcccgagctgtgggaacctttgcaagagccctagattgtagcagctccattcggcagccaagcttgcacatgagtgcagctgctgcctcccgagatatcactctgtttcacgccatggataccttgcaaaggaacggctacgacctggctaaggccatgtcgaccctggtaccccagggaggcccggtgctgtgtcgggatgagatggaggaatggtcagcctcagaggccatgctatttgaggaggccctagagaagtatgggaaggacttcaatgatattcgccaggattttctaccctggaagtcacttgccagcatagtccagttttattacatgtggaaaaccacagaccggtatattcagcagaaaaggttgaaagctgctgaagcagacagcaaactgaaacaggtctacattcccacctacactaagccaaaccctaaccagatcatttctgtgggttcaaaacctggcatgaatggggctggatttcagaagggcctgacttgtgagagttgccacaccacacagtctgctcagtggtatgcctggggcccacctaacatgcagtgccgcctctgtgcttcctgttggatctactggaagaagtatgggggactgaagaccccaactcagcttgagggggccactcggggcaccacggagccacactcaaggggtcatttatccagacctgaagctcaaagtctctctccttacacaaccagcgccaacagggccaagctactggctaagaacagacaaactttcctgcttcagaccacaaagctgacccgtcttgccagacgcatgtgcagggacctattacagccaaggagggccgcccgacggccttatgctcctatcaatgccaatgccatcaaagcagagtgctccattcgacttcctaaggccgccaagactccattgaagattcaccctctggtgcggctgcccctggcaactatcgtcaaagatctggtggcccaggcacccctgaaaccaaaaacacctcggggtaccaagacaccgatcaacagaaaccagctgtcccagaaccggggactggggggcattatggtgaaacgggcctatgagactatggcaggggcaggggttcctttctctgccaatggaaggcctctggcttcagggattcgttcaagctcacagccagcagccaagcgtcagaaactaaacccagctgatgcccccaatcctgtggtgtttgtggccacaaaggataccagggccctacggaaggctctgacccatctggaaatgcggcgagctgctcgccgacccaacttgcccctgaaggtgaagccaacgctgattgcagtgcggccccctgtccctctacctgcaccctcacatcctgccagcaccaatgagcctattgtcctggaggactgagcacctgtggggaagggaggtgggctgagaggtagagggtggatgcccagggcacccaaacctcccttccctttcgtgtcgaagggagtgaggagtgaattaaggaagagagcaagtgagtgtgtgtccctggaggggttgggcgccctctggtgttaccacctcgagacttgtctcatgcctccatgcttgccgatggaggacagactgcaggaacttggcccatgtgggaacctagcctgttttggggggtaggacccacagatgtcttggacagttttggggggagggttttttaattttttaaaaattttgcctccctttgtgaaaggggatggggaggggaagagtaaacagataacaggtggtggtacctggttgggggaggggggcgtgcactgccatgtctttttttttttttttttcctaattgggggtttctctttctgtccggtgtccggactttcctaattggagtttgaggcccctaagctggcatcaaccccaggccacgctcgctctttccttccctcccctccccctctgccttttgtacgccagttctcagaaataaagatcttttgtccgtttttttaacctcggattctgtaattggttcttatagtaacaaataaaaagctgttttcttcagcttcacctggctca

SEQ ID NO: 90918 - DNA, 965 bp, Homo sapiens
gcgggacggggcgaggcggagcgaggctggaggcgcgggagggcagcgagaggttcgcgggtgcagcgcacaggagaccatgtccgggggcagcagctgcagccagaccccaagccgggccatccccgccactcgccgggtggtgctcggcgacggcgtgcagctcccgcccggggactacagcacgacccccggcggcacgctcttcagcaccaccccgggaggtaccaggatcatctatgaccggaaattcctgatggagtgtcggaactcacctgtgaccaaaacacccccaagggatctgcccaccattccgggggtcaccagcccttccagtgatgagccccccatggaagccagccagagccacctgcgcaatagcccagaagataagcgggcgggcggtgaagagtcacagtttgagatggacatttaaagcaccagccatcgtgtggagcactaccaaggggcccctcagggccttcctgggaggagtcccaccagccaggccttatgaaagtgatcatactgggcaggcgttggcgtggggtcggacaccccagccctttctccctcactcagggcacctgccccctcctcttcgtgaacaccagcagatacctccttgtgcctccactgatgcaggagctgccaccccaaggggagtgacccctgccagcacaccctgcagccaagggccaggaagtggacaagaacgaacccttccttccgaatgatcagcagttccagcccctcgctgctgggggcgcaaccaccccttccttaggttgatgtgcttgggaaagctccctccccctccttccccaagagaggaaataaaagccaccttcgccctagggcaagaaaaaaaaaaaactccggggttagtggggcggaaaaaggttgaaggcatggcaacggtctcgcccttttgcacgggaatgcggccaagggggtaatgactt

SEQ ID NO: 90919 - DNA, 914 bp, Homo sapiens
  misc_feature (875)..(875): n is a, c, g, or t
  misc_feature (878)..(878): n is a, c, g, or t
gcgggacggggcgaggcggagcgaggctggaggcgcgggagggcagcgagaggttcgcgggtgcagcgcacaggagaccatgtccgggggcagcagctgcagccagaccccaagccgggccatccccgccactcgccgggtggtgctcggcgacggcgtgcagctcccgcccggggactacagcacgacccccggcggcacgctcttcagcaccaccccgggaggtaccaggatcatctatgaccggaaattcctgatggagtgtcggaactcacctgtgaccaaaacacccccaagggatctgcccaccattccgggggtcaccagcccttccagtgatgagccccccatggaagccagccagagccacctgcgcaatagcccagaagataagcgggcgggcggtgaagagtcacagtttgagatggacatttaaagcaccagccatcgtgtggagcactaccaaggggcccctcagggccttcctgggaggagtcccaccagccaggccttatgaaagtgatcatactgggcaggcgttggcgtggggtcggacaccccagccctttctccctcactcagggcacctgccccctcctcttcgtgaacaccagcagatacctccttgtgcctccactgatgcaggagctgccaccccaaggggagtgacccctgccagcacaccctgcagccaagggccaggaagtggacaagaacgaacccttccttccgaatgatcagcagttccagcccctcgctgctgggggcgcaaccaccccttccttaggttgatgtgcttgggaaagctccctccccctccttccccaagagaggaaataaaagccaccttcgccctagggcaagaaaacaaaaanaanaaaaaacaacgcgggccttttcgcggcgggaaaccg

SEQ ID NO: 90920 - DNA, 349 bp, Homo sapiens
gcgggacggggcgaggcggagcgaggctggaggcgcgggagggcagcgagaggttcgcgggtgcagcgcacaggagacctcctcttcgtgaacaccagcagatacctccttgtgcctccactgatgcaggagctgccaccccaaggggagtgacccctgccagcacaccctgcagccaagggccaggaagtggacaagaacgaacccttccttccgaatgatcagcagttccagcccctcgctgctgggggcgcaaccaccccttccttaggttgatgtgcttgggaaagctccctccccctccttccccaagagaggaaataaaagccaccttcgccctagggcaaga

SEQ ID NO: 90921 - DNA, 848 bp, Homo sapiens
tgctcgtaaccgggttttgggcgaggctggtgcgattcgccgagggtcttgcacatgagaccatgtccgggggcagcagctgcagccagaccccaagccgggccatccccgccactcgccgggtggtgctcggcgacggcgtgcagctcccgcccggggactacagcacgacccccggcggcacgctcttcagcaccaccccgggaggtaccaggatcatctatgaccggaaattcctgatggagtgtcggaactcacctgtgaccaaaacacccccaagggatctgcccaccattccgggggtcaccagcccttccagtgatgagccccccatggaagccagccagagccacctgcgcaatagcccagaagataagcgggcgggcggtgaagagtcacagtttgagatggacatttaaagcaccagccatcgtgtggagcactaccaaggggcccctcagggccttcctgggaggagtcccaccagccaggccttatgaaagtgatcatactgggcaggcgttggcgtggggtcggacaccccagccctttctccctcactcagggcacctgccccctcctcttcgtgaacaccagcagatacctccttgtgcctccactgatgcaggagctgccaccccaaggggagtgacccctgccagcacaccctgcagccaagggccaggaagtggacaagaacgaacccttccttccgaatgatcagcagttccagcccctcgctgctgggggcgcaaccaccccttccttaggttgatgtgcttgggaaagctccctccccctccttccccaagagaggaaataaaagccaccttcgccctagggcaaga

SEQ ID NO: 90922 - DNA, 797 bp, Homo sapiens
gcgggacggggcgaggcggagcgaggctggaggcgcgggagggcagcgagaggttcgcgggtgcagcgcacaggagaccatgtccgggggcagcagctgcagccagaccccaagccgggccatccccgccactcgccgggtggtgctcggcgacggcgtgcagctcccgcccggggactacagcacgacccccggcggcacgctcttcagcaccaccccgggaggtaccaggatcatctatgaccggaaattcctgatggagtgtcggaactcacctgtgaccaaaacacccccaagggatctgcccaccattccgggggtcaccagcccttccagtgatgagccccccatggaagccagccagagccacctgcgcaatagcccagaagataagcgggcgggcggtgaagagtcacagtttgagatggacatttaaagcaccagccatcgtgtggagcactaccaaggggcccctcagggccttcctgggaggagtcccaccagccaggccttatgaaagtgatcatactgggcaggcgttggcgtggggtcggacaccccagccctttctccctcactcagggcacctgccccctcctcttcgtgaacaccagcagatacctccttgtgcctccactgatgcaggagctgccaccccaaggggagtgacccctgccagcacaccctcgctgctgggggcgcaaccaccccttccttaggttgatgtgcttgggaaagctccctccccctccttccccaagagaggaaataaaagccaccttcgccctagggcaaga

SEQ ID NO: 90923 - DNA, 865 bp, Homo sapiens
gcgggacggggcgaggcggagcgaggctggaggcgcgggagggcagcgagaggttcgcgggtgcagcgcacaggagaccatgtccgggggcagcagctgcagccagaccccaagccgggccatccccgccactcgccgggtggtgctcggcgacggcgtgcagctcccgcccggggactacagcacgacccccggcggcacgctcttcagcaccaccccgggaggtaccaggatcatctatgaccggaaattcctgatggagtgtcggaactcacctgtgaccaaaacacccccaagggatctgcccaccattccgggggtcaccagcccttccagtgatgagccccccatggaagccagccagagccacctgcgcaatagcccagaagataagcgggcgggcggtgaagagtcacagtttgagatggacatttaaagcaccagccatcgtgtggagcactaccaaggggcccctcagggccttcctgggaggagtcccaccagccaggccttatgaaagtgatcatactgggcaggcgttggcgtggggtcggacaccccagccctttctccctcactcagggcacctgccccctcctcttcgtgaacaccagcagatacctccttgtgcctccactgatgcaggagctgccaccccaaggggagtgacccctgccagcacaccctgcagccaagggccaggaagtggacaagaacgaacccttccttccgaatgatcagcagttccagcccctcgctgctgggggcgcaaccaccccttccttaggttgatgtgcttgggaaagctccctccccctccttccccaagagaggaaataaaagccaccttcgccctagggcaaga

SEQ ID NO: 90924 - DNA, 903 bp, Homo sapiens
gcgggacggggcgaggcggagcgaggctggaggcgcgggagggcagcgagaggttcgcgggtgcagcgcacaggagaccatgtccgggggcagcagctgcagccagaccccaagccgggccatccccgccactcgccgggtggtgctcggcgacggcgtgcagctcccgcccggggactacagcacgacccccggcggcacgctcttcagcaccaccccgggaggtaccaggatcatctatgaccggaaattcctgatggagtgtcggaactcacctgtgaccaaaacacccccaagggatctgcccaccattccgggggtcaccagcccttccagtgatgagccccccatggaagccagccagagccacctgcgcaatagcccagaagataagcgggcgggcggtgaagagtcacagtttgagatggacatttaaagcaccagccatcgtgtggagcactaccaaggggcccctcagggccttcctgggaggagtcccaccagccaggccttatgaaagtgatcatactgggcaggcgttggcgtggggtcggacaccccagccctttctccctcactcagggcacctgccccctcctcttcgtgaacaccagcagatacctccttgtgcctccactgatgcaggagctgccaccccaaggggagtgacccctgccagcacaccctgcagccaagggccaggaagtggacaagaacgaacccttccttccgaatgatcagcagttccagcccctcgctgctgggggcgcaaccaccccttccttaggttgatgtgcttgggaaagctccctccccctccttccccaagagaggaaataaaagccaccttcgccctagggcaagaaaaaacaacacactcaacaccaacaaacacaaccgggg

SEQ ID NO: 90925 - DNA, 1276 bp, Homo sapiens
gcgggacggggcgaggcggagcgaggctggaggcgcgggagggcagcgagaggttcgcgggtgcagcgcacaggagaccatgtccgggggcagcagctgcagccagaccccaagccgggccatccccgccactcgccgggtggtgctcggcgacggcgtgcagctcccgcccggggactacagcacgacccccggcggcacgctcttcagcaccaccccgggaggtaccaggatcatctatgaccggaaattcctgatggagtgtcggaactcacctgtgaccaaaacacccccaagggatctgcccaccattccgggggtcaccagcccttccagtgatgagccccccatggaagccagccagagccacctgcgcaatagcccagaagataagcgggcgggcggtgaagagtcacagtttgagatggacatttaaagcaccagccatcgtgtggagcactaccaaggggcccctcagggccttcctgggaggagtcccaccagccaggccttatgaaagtgatcatactgggcaggcgttggcgtggggtcggacaccccagccctttctccctcactcagggcacctgccccctcctcttcgtgaacaccagcagatacctccttgtgcctccactgatgcaggagctgccaccccaaggggagtgacccctgccagcacaccctgcagccaagggccaggaagtggacaagaacgaacccttccttccgaatgatcagcagttccagcccctcgctgctgggggcgcaaccaccccttccttaggttgatgtgcttgggaaagctccctccccctccttccccaagagaggaaataaaagccaccttcgccctagggcaagaaaaaaaaaaacacacaaaaaacaaaaaaaaaaatacaaaatcaatatacacaaatacgaaaataacatctaaaataattacacaaaacacaaaacaaaaataaaataaaataaaccacagatatctataatataaaaattaacacagaaaataagaagagagaagaacaagatagagaaagagatagagaacaagggaagaaagtaaaaaggaggagaaaggaggagagagaagcagggggtaagaaaaaaaagacaataagagaaaacaatagaagaaggctacgaagtagagaaagaataagaagaccctcgaatataaagaatcgcgggaaaaaaaacaggagaaaagcaataagaatgaaaagaattaatagaagaagaaaaaaaaggaggataaaaaaaagaatac

SEQ ID NO: 90926 - DNA, 594 bp, Homo sapiens
gagtatctgtctgagtaactctgtctgggagtagactgtcctgggagtagactctgcccttccagtgatgagccccccatggaagccagccagagccacctgcgcaatagcccagaagataagcgggcgggcggtgaagagtcacagtttgagatggacatttaaagcaccagccatcgtgtggagcactaccaaggggcccctcagggccttcctgggaggagtcccaccagccaggccttatgaaagtgatcatactgggcaggcgttggcgtggggtcggacaccccagccctttctccctcactcagggcacctgccccctcctcttcgtgaacaccagcagatacctccttgtgcctccactgatgcaggagctgccaccccaaggggagtgacccctgccagcacaccctgcagccaagggccaggaagtggacaagaacgaacccttccttccgaatgatcagcagttccagcccctcgctgctgggggcgcaaccaccccttccttaggttgatgtgcttgggaaagctccctccccctccttccccaagagaggaaataaaagccaccttcgccctagggcaaga

SEQ ID NO: 90927 - DNA, 713 bp, Homo sapiens
gcgggacggggcgaggcggagcgaggctggaggcgcgggagggcagcgagaggttcgcgggtgcagcgcacaggagaccatgtccgggggcagcagctgcagccagaccccaagccgggccatccccgccactcgccgggtggtgctcggcgacggcgtgcagctcccgcccggggactacagcacgacccccggcggcacgctcttcagcaccaccccgggaggtaccaggatcatctatgaccggaaattcctgatggagtgtcggaactcacctgtgaccaaaacacccccaagggatctgcccaccattccgggggtcaccagcccttccagtgatgagccccccatggaagccagccagagccacctgcgcaatagcccagaagataagcgggcgggcggtgaagagtcacagtttgagatggacatttaaagcaccagccatcgtgtggagcactaccaaggggcccctcagggccttcctgggaggagtcccaccagccaggccttatgaaagtgatcatactgggcaggcgttggcgtggggtcggacaccccagccctttctccctcactcagggcacctgccccctcctcttcgtgaacaccagcagatacctccttgtgcctccactgatgcaggagctgccactccctccccctccttccccaagagaggaaataaaagccaccttcgccctagggcaaga

SEQ ID NO: 90928 - DNA, 1186 bp, Homo sapiens
  misc_feature (13)..(14): n is a, c, g, or t
agacacttttaanncacagtaaaagcaaaagcaacagctcaagcagcctccttggagaaaacctgaaaattcaacttgttcaagagaaggtcttgtacgtgcctaagttctagagcctcctgacgtgagcatggctgagagtgaggaccgctccctgaggatcgttctggtagggaaaactggaagtgggaaaagtgcaacagcgaacaccatccttggagaggaaatctttgattctagaattgctgcccaagctgttaccaagaactgtcaggctctttgacaccaaggagagcctggacaccacctgcaaggaaatcagccgctgcatcatctcctcctgcccagggccccatgctattgtcctagttctgctgctgggccgctacacagaggaggagcagaaaaccgttgcattgatcaaggctgtctttgggaagtcagccatgaagcacatggtcatcttgttcactcgcaaagaagagttggagggccagagcttccatgacttcatagcagatgcggatgtgggcctaaaaagcatcgtcaaggagtgcgggaaccgctgctgtgcctttagcaacagcaagaaaaccagtaaggcagagaaggaaagtcaagtgcaggagttggtggagctgatagagaaaatggtgcagtgcaacgaaggggcttacttttctgatgacatatacaaggacacagaggaaaggctgaaacaacgggaagaggttttgaggaaaatctacactgaccaattaaatgaagaaattaaactagtagaagaggataagcataaatcagaggaagaaaaggagaaagaaattaaattactaaaattaaaatatgatgaaaaaataaaaaatataagggaagaagctgagagaaatatatttaaagatgtttttaataggatttggaagatgctttcagaaatatggcataggtttttgtcgaaatgtaagttttattcttcctaatttactgtgatttgttaatggatgaattgtattttgcaaagatagttagagaaatacctccttccccttagctttattaaggtatcattgataaataaaaataaaatatgtttaatgtatataatgtgatttttaaatatatatatatatatacacacattgtgaaataatgaaataaaggtaattaacacatctaaaaaaactcg

SEQ ID NO: 90929 - DNA, 1239 bp, Homo sapiens
  misc_feature (13)..(14): n is a, c, g, or t
agacacttttaanncacagtaaaagcaaaagcaacagctcaagcagcctccttggagaaaacctgaaaattcaacttgttcaagagaaggtcttgtacgtgcctaagttctagagcctcctgacgtgagcatggctgagagtgaggaccgctccctgaggatcgttctggtagggaaaactggaagtgggaaaagtgcaacagcgaacaccatccttggagaggaaatctttgattctagaattgctgcccaagctgttaccaagaactgtcaaaaagcatcccgggaatggcaggggagagaccttcttgttgtggacactccagggctctttgacaccaaggagagcctggacaccacctgcaaggaaatcagccgctgcatcatctcctcctgcccagggccccatgctattgtcctagttctgctgctgggccgctacacagaggaggagcagaaaaccgttgcattgatcaaggctgtctttgggaagtcagccatgaagcacatggtcatcttgttcactcgcaaagaagagttggagggccagagcttccatgacttcatagcagatgcggatgtgggcctaaaaagcatcgtcaaggagtgcgggaaccgctgctgtgcctttagcaacagcaagaaaaccagtaaggcagagaaggaaagtcaagtgcaggagttggtggagctgatagagaaaatggtgcagtgcaacgaaggggcttacttttctgatgacatatacaaggacacagaggaaaggctgaaacaacgggaagaggttttgaggaaaatctacactgaccaattaaatgaagaaattaaactagtagaagaggataagcataaatcagaggaagaaaaggagaaagaaattaaattactaaaattaaaatatgatgaaaaaataaaaaatataagggaagaagctgagagaaatatatttaaagatgtttttaataggatttggaagatgctttcagaaatatggcataggtttttgtcgaaatgtaagttttattcttcctaatttactgtgatttgttaatggatgaattgtattttgcaaagatagttagagaaatacctccttccccttagctttattaaggtatcattgataaataaaaataaaatatgtttaatgtatataatgtgatttttaaatatatatatatatatacacacattgtgaaataatgaaataaaggtaattaacacatctaaaaaaactcg

SEQ ID NO: 90930 - DNA, 934 bp, Homo sapiens
ctgacctcaagatccacccgccttggcctcccaaagtgctgggattacaggcatgagccactgcacccggctagactaaaatttttaatggtaatttgtcctcagcaataatagataccttaaataataatgttttaaattttgcgtaagctgtgggaaatcatggagtcttgataatgttttgtttttaaagttttacttatttttaagtaggcagtacattcacatagttcaaaattcaaaaatactaaagactatatatacagtgataatcctgtacccctgccgcccagtaccctgtcccacaggcaaccaattttatcactgaaatcccccccttttaaattacttagttgccttaggtgacaaatccataaatgattatttcggagttctctcagttaacactttatgggttcttggcaaagttctcacaatgttctgtagaaccttgaaatatttttaattacttgggatgggtttaagtattgcttgggataaaggcacttgcaaccccctctaattgtaacattgtgtaggcttaaggacccttattgctgcagacttcatctagccaagatgatgtgagtaagattgatctttttgcttcagctgatggctatcattttttaaaatagcttcagtgttctaattataaaagtatgtcatgcttatttcaaagatcggaaaatacatagaagcataaagaagaaaataaggattagctgtaatcctactgcccagagataaccatagttgtcattttgatgaatatccttccagaccttttcgcgtgcacacacacacacaccacacactttttaaaacagaaaatggaatcatataagtatgtactattttcaagcttatttttcctacttaatatttcatgtcagtatatttagatgtacatcagcatttttaggagttgaag

SEQ ID NO: 90931 - DNA, 2541 bp, Homo sapiens
cttgtatcttcccccgtttcctgggacattggtggtgtagcccattccacagactttcgctccctagcagcgggtcggagatcgaaggaacgggccaattgcggctgaaacgtctttggaaggaggaagggggtgagggagcatccctttgagtttcgcctcttctcgaggcggtggtgggaagggagacatacttaatactgccctcttaatccaacggaccttacatcgtgtagactgccgggagggcggcgggaaaagggcaagacgggagttggggaagggaaggagccaggaagccgcgcgggagggcgcgcgcgcgcgcccctttttcagcagtgtggcggggtcgcacgcacgcccgcctcggcggctgggcgcgatttgcgacagtggggggggcggtggaggtggcggcggcagcggcaactttgcggcaagctcgggccgggcttgcttgacggcggtgtggcggaggccccgccccaggcggcaggaacctggagggaggcggaggaatatgtccgagagggaagtgtcgactgcgccggcgggaacagacatgcctgcggccaagaagcagaagctgagcagtgacgagaacagcaatccagacctctctggagacgagaatgatgacgctgtcagtatagaaagtggtacaaacactgaacgccctgatacacctacaaacacgccaaatgcacctggaaggaaaagttggggaaagggaaaatggaagtcaaagaaatgcaaatattctttcaaatgtgtaaatagtctcaaggaagatcataaccaaccattgtttggagttcagtttaactggcacagtaaagaaggagatccattagtgtttgcaactgtaggaagcaacagagttaccttgtatgaatgtcattcacaaggagaaatccggttgttgcaatcttacgtggatgctgatgctgatgaaaacttttacacttgtgcatggacctatgatagcaatacgagccatcctctgctggctgtagctggatctagaggcataattaggataataaatcctataacaatgcagtgtataaagcactatgttggccatggaaatgctatcaatgagctgaaattccatccaagagatccaaatcttctcctgtcagtaagtaaagatcatgctttacgattatggaatatccagacggacactctggtggcaatatttggaggcgtagaagggcacagagatgaagttctaagtgctgattatgatcttttgggtgaaaaaataatgtcctgtggtatggatcattctcttaaactttggaggatcaattcaaagagaatgatgaatgcaattaaggaatcttatgattataatccaaataaaactaacaggccatttatttctcagaaaatccattttcctgatttttctaccagagacatacataggaattatgttgattgtgtgcgatggttaggcgatttgatactttctaagtcttgtgaaaatgccattgtgtgctggaaacctggcaagatggaagatgatatagataaaattaaacccagtgaatctaatgtgactattcttgggcgatttgattacagccagtgtgacatttggtacatgaggttttctatggatttctggcaaaagatgcttgcattgggcaatcaagttggcaaactttatgtttgggatttagaagtagaagatcctcataaagccaagtaagtatttagaaatttctgttcaaaatttcaggctttttctccacacttgtatgccaatgtagagaagatcatttatatttgcagtgccatccttaagtcatttttaacatttactgttttcagagttaaagttattcttttttattccaataatttttgtttttcctaagtaccttggtgacaagtcatttcttgtttttatacaaattatgtagtgcttgttgaacttaaaatatatctaaattttataaaatttgagactgagctcttagtgaagtatattctggttttaagtgcttttcgtatgacttggaacatctgcttattttctaatccgctgttttagggtagacactgacaacgttatgtgtggtctttaacctgttgtcatgttttttccctagatgtacaacactgactcatcataaatgtggtgctgctattcgacaaaccagttttagcagggatagcagcattcttatagctgtttgtgatgatgccagtatttggcgctgggatcgacttcgataaaatacttttgcctaatcaaaattagagtgtgtttgttgtctgtgtaaaatagaattaatgtatcttgctagtaagggcacgtagagcatttagagttgtctttcagcattcaatcaggctgagctgaatgtagtgatgtttacattgtttacattctttgtactgtcttcctgctcagactctactgcttttaataaaaatttatttttgtaaagctgtgtgtttagttactttcattgtggtgaaaaaaagttaaaagtaataaaattatgccttatctttttataa

SEQ ID NO: 90932 - DNA, 855 bp, Homo sapiens
cttgtatcttcccccgtttcctgggacattggtggtgtagcccattccacagactttcgctccctagcagcgggtcggagatcgaaggaacgggccaattgcggctgaaacgtctttggaaggaggaagggggtgagggagcatccctttgagtttcgcctcttctcgaggcggtggtgggaagggagacatacttaatactgccctcttaatccaacggaccttacatcgtgtagactgccgggagggcggcgggaaaagggcaagacgggagttggggaagggaaggagccaggaagccgcgcgggagggcgcgcgcgcgcgcccctttttcagcagtgtggcggggtcgcacgcacgcccgcctcggcggctgggcgcgatttgcgacagtggggggggcggtggaggtggcggcggcagcggcaactttgcggcaagctcgggccgggcttgcttgacggcggtgtggcggaggccccgccccaggcggcaggaacctggagggaggcggaggaatatgtccgagagggaagtgtcgactgcgccggcgggaacagacatgcctgcggccaagaagcagaagctgagcagtgacgagaacagcaatccagacctctctggagacgagaatgatgacgctgtcagtatagaaagtggtacaaacactgaacgccctgatacacctacaaacacgccaaatgcacctggaaggaaaagttggggaaagggagaagatcataaccaaccattgtttggagttcagtttaactggcacagtaaagaaggagatccattagtgtttgcaactgtaggaagcaacagagtgagtgttaaggggtctatttagtattt

SEQ ID NO: 90933 - DNA, 824 bp, Homo sapiens
aaatttatttggctcctgtttctggagactgggaagtccaagaacatggtgccggcatctggtgagagccttcatgctgaatcgtctcagcaaaagggcaggagagggtgtgagggagcaagagattgaatttatagcctcaggcccttttataatcagtattaatccatttgtgaggatggagcccccatgacctaaatacctcccattaggccccagctcacaccactattgcattggggattgagtttctagcacatgcttttgggggggcctattcaaactatagcacttacctagctaattctacatctgatgtaaacattttaagttgctatgtaatatggattccatttttaggctttactgtgcataacttacatctagactttagtagtttttctttcacaagatgttgaaagttcacagtaaataaaaaacattcgcctaatttttgtatgtttatactagatcatgctttacgattatggaatatccagacggacactctggtggcaatatttggaggcgtagaagggcacagagatgaagttctaagtgctgattatgatcttttgggtgaaaaaataatgtcctgtggtatggatcattctcttaaactttggaggatcaattcaaagagaatgatgaatgcaattaaggaatcttatgattataatccaaataaaactaacaggccatttatttctcagaaaatccattttcctgatttttctaccagagacatacataggaattatgttgattgtgtgcgatggttaggcgatttgatactttctaaggtctggtaactgcagttaagc

SEQ ID NO: 90934 - DNA, 2134 bp, Homo sapiens
cttgtatcttcccccgtttcctgggacattggtggtgtagcccattccacagactttcgctccctagcagcgggtcggagatcgaaggaacgggccaattgcggctgaaacgtctttggaaggaggaagggggtgagggagcatccctttgagtttcgcctcttctcgaggcggtggtgggaagggagacatacttaatactgccctcttaatccaacggaccttacatcgtgtagactgccgggagggcggcgggaaaagggcaagacgggagttggggaagggaaggagccaggaagccgcgcgggagggcgcgcgcgcgcgcccctttttcagcagtgtggcggggtcgcacgcacgcccgcctcggcggctgggcgcgatttgcgacagtggggggggcggtggaggtggcggcggcagcggcaactttgcggcaagctcgggccgggcttgcttgacggcggtgtggcggaggccccgccccaggcggcaggaacctggagggaggcggaggaatatgtccgagagggaagtgtcgactgcgccggcgggaacagacatgcctgcggccaagaagcagaagctgagcagtgacgagaacagcaatccagacctctctggagacgagaatgatgacgctgtcagtatagaaagtggtacaaacactgaacgccctgatacacctacaaacacgccaaatgcacctggaaggaaaagttggggaaagggaaaatggaagtcaaagaaatgcaaatattctttcaaatgtgtaaatagtctcaaggaagatcataaccaaccattgtttggagttcagtttaactggcacagtaaagaaggagatccattagtgtttgcaactgtaggaagcaacagagttaccttgtatgaatgtcattcacaaggagaaatccggttgttgcaatcttacgtggatgctgatgctgatgaaaacttttacacttgtgcatggacctatgatagcaatacgagccatcctctgctggctgtagctggatctagaggcataattaggataataaatcctataacaatgcagtgtataaagcactatgttggccatggaaatgctatcaatgagctgaaattccatccaagagatccaaatcttctcctgtcagtaagtaaagatcatgctttacgattatggaatatccagacggacactctggtggcaatatttggaggcgtagaagggcacagagatgaagttctaagtgctgattatgatcttttgggtgaaaaaataatgtcctgtggtatggatcattctcttaaactttggaggatcaattcaaagagaatgatgaatgcaattaaggaatcttatgattataatccaaataaaactaacaggccatttatttctcagaaaatccattttcctgatttttctaccagagacatacataggaattatgttgattgtgtgcgatggttaggcgatttgatactttctaagtcttgtgaaaatgccattgtgtgctggaaacctggcaagatggaagatgatatagataaaattaaacccagtgaatctaatgtgactattcttgggcgatttgattacagccagtgtgacatttggtacatgaggttttctatggatttctggcaaaagatgcttgcattgggcaatcaagttggcaaactttatgtttgggatttagaagtagaagatcctcataaagccaaatgtacaacactgactcatcataaatgtggtgctgctattcgacaaaccagttttagcagggatagcagcattcttatagctgtttgtgatgatgccagtatttggcgctgggatcgacttcgataaaatacttttgcctaatcaaaattagagtgtgtttgttgtctgtgtaaaatagaattaatgtatcttgctagtaagggcacgtagagcatttagagttgtctttcagcattcaatcaggctgagctgaatgtagtgatgtttacattgtttacattctttgtactgtcttcctgctcagactctactgcttttaataaaaatttatttttgtaaagctgtgtgtttagttactttcattgtggtgaaaaaaagttaaaagtaataaaattatgccttatctttttataa

SEQ ID NO: 90935 - DNA, 2208 bp, Homo sapiens
cttgtatcttcccccgtttcctgggacattggtggtgtagcccattccacagactttcgctccctagcagcgggtcggagatcgaaggaacgggccaattgcggctgaaacgtctttggaaggaggaagggggtgagggagcatccctttgagtttcgcctcttctcgaggcggtggtgggaagggagacatacttaatactgccctcttaatccaacggaccttacatcgtgtagactgccgggagggcggcgggaaaagggcaagacgggagttggggaagggaaggagccaggaagccgcgcgggagggcgcgcgcgcgcgcccctttttcagcagtgtggcggggtcgcacgcacgcccgcctcggcggctgggcgcgatttgcgacagtggggggggcggtggaggtggcggcggcagcggcaactttgcggcaagctcgggccgggcttgcttgacggcggtgtggcggaggccccgccccaggcggcaggaacctggagggaggcggaggaatatgtccgagagggaagtgtcgactgcgccggcgggaacagacatgcctgcggccaagaagcagaagctgagcagtgacgagaacagcaatccagacctctctggagacgagaatgatgacgctgtcagtatagaaagtggtacaaacactgaacgccctgatacacctacaaacacgccaaatgcacctggaaggaaaagttggggaaagggaaaatggaagtcaaagaaatgcaaatattctttcaaatgtgtaaatagtctcaaggaagatcataaccaaccattgtttggagttcagtttaactggcacagtaaagaaggagatccattagtgtttgcaactgtaggaagcaacagagttaccttgtatgaatgtcattcacaaggagaaatccggttgttgcaatcttacgtggatgctgatgctgatgaaaacttttacacttgtgcatggacctatgatagcaatacgagccatcctctgctggctgtagctggatctagaggcataattaggataataaatcctataacaatgcagtgtataaagcactatgttggccatggaaatgctatcaatgagctgaaattccatccaagagatccaaatcttctcctgtcagtaagtaaagatcatgctttacgattatggaatatccagacggacactctggtggcaatatttggaggcgtagaagggcacagagatgaagttctaagtgctgattatgatcttttgggtgaaaaaataatgtcctgtggtatggatcattctcttaaactttggaggatcaattcaaagagaatgatgaatgcaattaaggaatcttatgattataatccaaataaaactaacaggccatttatttctcagaaaatccattttcctgatttttctaccagagacatacataggaattatgttgattgtgtgcgatggttaggcgatttgatactttctaagtcttgtgaaaatgccattgtgtgctggaaacctggcaagatggaagatgatatagataaaattaaacccagtgaatctaatgtgactattcttgggcgatttgattacagccagtgtgacatttggtacatgaggttttctatggatttctggcaaaagatgcttgcattgggcaatcaagttggcaaactttatgtttgggatttagaagtagaagatcctcataaagccaaatgtacaacactgactcatcataaatgtggtgctgctattcgacaaaccagttttagcagggatagcagcattcttatagctgtttgtgatgatgccagtatttggcgctgggatcgacttcgataaaatacttttgcctaatcaaaattagagtgtgtttgttgtctgtgtaaaatagaattaatgtatcttgctagtaagggcacgtagagcatttagagttgtctttcagcattcaatcaggctgagctgaatgtagtgatgtttacattgtttacattctttgtactgtcttcctgctcagactctactgcttttaataaaattcatgtggggggtggtggcgttggggtggggggtgggtgggtgggggggggggggtcgtgggggtgggtgttgggcggggtgcggtggttggtgtgggggggtgtggtgtggggggggggtgtgggggggtggggggaggggtggggtgggtgggggggtga

SEQ ID NO: 90936 - DNA, 1542 bp, Homo sapiens
atctagaggatccgtatgatctgtgctctctggagagagaatgatgacgctgtcagtatagaaagtggtacaaacactgaacgccctgatacacctacaaacacgccaaatgcacctggaaggaaaagttggggaaagggaaaatggaagtcaaagaaatgcaaatattctttcaaatgtgtaaatagtctcaaggaagatcataaccaaccattgtttggagttcagtttaactggcacagtaaagaaggagatccattagtgtttgcaactgtaggaagcaacagagttaccttgtatgaatgtcattcacaaggagaaatccggttgttgcaatcttacgtggatgctgatgctgatgaaaacttttacacttgtgcatggacctatgatagcaatacgagccatcctctgctggctgtagctggatctagaggcataattaggataataaatcctataacaatgcagtgtataaagcactatgttggccatggaaatgctatcaatgagctgaaattccatccaagagatccaaatcttctcctgtcagtaagtaaagatcatgctttacgattatggaatatccagacggacactctggtggcaatatttggaggcgtagaagggcacagagatgaagttctaagtgctgattatgatcttttgggtgaaaaaataatgtcctgtggtatggatcattctcttaaactttggaggatcaattcaaagagaatgatgaatgcaattaaggaatcttatgattataatccaaataaaactaacaggccatttatttctcagaaaatccattttcctgatttttctaccagagacatacataggaattatgttgattgtgtgcgatggttaggcgatttgatactttctaagtcttgtgaaaatgccattgtgtgctggaaacctggcaagatggaagatgatatagataaaattaaacccagtgaatctaatgtgactattcttgggcgatttgattacagccagtgtgacatttggtacatgaggttttctatggatttctggcaaaagatgcttgcattgggcaatcaagttggcaaactttatgtttgggatttagaagtagaagatcctcataaagccaaatgtacaacactgactcatcataaatgtggtgctgctattcgacaaaccagttttagcagggatagcagcattcttatagctgtttgtgatgatgccagtatttggcgctgggatcgacttcgataaaatacttttgcctaatcaaaattagagtgtgtttgttgtctgtgtaaaatagaattaatgtatcttgctagtaagggcacgtagagcatttagagttgtctttcagcattcaatcaggctgagctgaatgtagtgatgtttacattgtttacattctttgtactgtcttcctgctcagactctactgcttttaataaaaatttatttttgtaaagctgtgtgtttagttactttcattgtggtgaaaaaaagttaaaagtaataaaattatgccttatctttttataa

SEQ ID NO: 90937 - DNA, 1209 bp, Homo sapiens
  misc_feature (19)..(20): n is a, c, g, or t
  misc_feature (26)..(27): n is a, c, g, or t
tagggaatttggcctcgannacgcannttcaggcacgagcgagaaaaagtaagtaccatgctaacaatgtaaatttgtaaggcccttcataaatttgcacaatgccttcttacttgctcaagacacttgtgatgtattaattgctcttattcatatttacgaatcaggagtataagacccaaagaaatagccaagagcacagaggctggaactgagctttttctgaaacaagaaagctgtctgaggattcctccaatgctttagaacctggtaattttattaatttgatgtttttaaaaatatgtttatacagatgcttgcattgggcaatcaagttggcaaactttatgtttgggatttagaagtagaagatcctcataaagccaagtaagtatttagaaatttctgttcaaaatttcaggctttttctccacacttgtatgccaatgtagagaagatcatttatatttgcagtgccatccttaagtcatttttaacatttactgttttcagagttaaagttattcttttttattccaataatttttgtttttcctaagtaccttggtgacaagtcatttcttgtttttatacaaattatgtagtgcttgttgaacttaaaatatatctaaattttataaaatttgagactgagctcttagtgaagtatattctggttttaagtgcttttcgtatgacttggaacatctgcttattttctaatccgctgttttagggtagacactgacaacgttatgtgtggtctttaacctgttgtcatgttttttccctagatgtacaacactgactcatcataaatgtggtgctgctattcgacaaaccagttttagcagggatagcagcattcttatagctgtttgtgatgatgccagtatttggcgctgggatcgacttcgataaaatacttttgcctaatcaaaattagagtgtgtttgttgtctgtgtaaaatagaattaatgtatcttgctagtaagggcacgtagagcatttagagttgtctttcagcattcaatcaggctgagctgaatgtagtgatgtttacattgtttacattctttgtactgtcttcctgctcagactctactgcttttaataaaaatttatttttgtaaagctgtgtgtttagttactttcattgtggtgaaaaaaagttaaaagtaataaaattatgccttatctttttataa

SEQ ID NO: 90938 - DNA, 733 bp, Homo sapiens
tattttccagagtggccgtgccattttacattcccaccagcaatgtatgagagatccagtgtctccgaatcttcgccagcatttgtcttgtgaaaatgccattgtgtgctggaaacctggcaagatggaagatgatatagataaaattaaacccagtgaatctaatgtgactattcttgggcgatttgattacagccagtgtgacatttggtacatgaggttttctatggatttctggcaaaagatgcttgcattgggcaatcaagttggcaaactttatgtttgggatttagaagtagaagatcctcataaagccaaatgtacaacactgactcatcataaatgtggtgctgctattcgacaaaccagttttagcagggatagcagcattcttatagctgtttgtgatgatgccagtatttggcgctgggatcgacttcgataaaatacttttgcctaatcaaaattagagtgtgtttgttgtctgtgtaaaatagaattaatgtatcttgctagtaagggcacgtagagcatttagagttgtctttcagcattcaatcaggctgagctgaatgtagtgatgtttacattgtttacattctttgtactgtcttcctgctcagactctactgcttttaataaaaatttatttttgtaaagctgtgtgtttagttactttcattgtggtgaaaaaaagttaaaagtaataaaattatgccttatctttttataa

SEQ ID NO: 90939 - DNA, 503 bp, Homo sapiens
  misc_feature (19)..(19): n is a, c, g, or t
cttgaaccaccgatcgacnccatcgacaggacgcgcgccattgtgttgatacccgccaattcggccattatggccggggtcacagagattatgcccaatttctcttgtgaaaatgccattgtgtgctggaaacctggcaagatggaagatgatatagataaaattaaacccagtgaatctaatgtgactattcttgggcgatttgattacagccagtgtgacatttggtacatgaggttttctatggatttctggcaaaaggtatcaacatacttttacattttgaaatgatctgacttatgaaagaccattgtaattctagctttttctgttgtgtccatgttctttttcctttacaaatctaccctgatgttttgtattgattactttgccctttgatgtcattcatcaaatactttggtgttattcattctacttttgtggctctgcatatgatctgcagtgcttactttaaattaagttggcagttaggtatcaatggt

SEQ ID NO: 90940 - DNA, 1894 bp, Homo sapiens
cttgtatcttcccccgtttcctgggacattggtggtgtagcccattccacagactttcgctccctagcagcgggtcggagatcgaaggaacgggccaattgcggctgaaacgtctttggaaggaggaagggggtgagggagcatccctttgagtttcgcctcttctcgaggcggtggtgggaagggagacatacttaatactgccctcttaatccaacggaccttacatcgtgtagactgccgggagggcggcgggaaaagggcaagacgggagttggggaagggaaggagccaggaagccgcgcgggagggcgcgcgcgcgcgcccctttttcagcagtgtggcggggtcgcacgcacgcccgcctcggcggctgggcgcgatttgcgacagtggggggggcggtggaggtggcggcggcagcggcaactttgcggcaagctcgggccgggcttgcttgacggcggtgtggcggaggccccgccccaggcggcaggaacctggagggaggcggaggaatatgtccgagagggaagtgtcgactgcgccggcgggaacagacatgcctgcggccaagaagcagaagctgagcagtgacgagaacagcaatccagacctctctggagacgagaatgatgacgctgtcagtatagaaagtggtacaaacactgaacgccctgatacacctacaaacacgccaaatgcacctggaaggaaaagttggggaaagggaaaatggaagtcaaagaaatgcaaatattctttcaaatgtgtaaatagtctcaaggaagatcataaccaaccattgtttggagttcagtttaactggcacagtaaagaaggagatccattagtgtttgcaactgtaggaagcaacagagttaccttgtatgaatgtcattcacaaggagaaatccggttgttgcaatcttacgtggatgctgatgctgatgaaaacttttacacttgtgcatggacctatgatagcaatacgagccatcctctgctggctgtagctggatctagaggcataattaggataataaatcctataacaatgcagtgtataaagcactatgttggccatggaaatgctatcaatgagctgaaattccatccaagagatccaaatcttctcctgtcagtaagtaaagatcatgctttacgattatggaatatccagacggacactctggtggcaatatttggaggcgtagaagggcacagagatgaagttctaagtgcttcttgtgaaaatgccattgtgtgctggaaacctggcaagatggaagatgatatagataaaattaaacccagtgaatctaatgtgactattcttgggcgatttgattacagccagtgtgacatttggtacatgaggttttctatggatttctggcaaaagatgcttgcattgggcaatcaagttggcaaactttatgtttgggatttagaagtagaagatcctcataaagccaaatgtacaacactgactcatcataaatgtggtgctgctattcgacaaaccagttttagcagggatagcagcattcttatagctgtttgtgatgatgccagtatttggcgctgggatcgacttcgataaaatacttttgcctaatcaaaattagagtgtgtttgttgtctgtgtaaaatagaattaatgtatcttgctagtaagggcacgtagagcatttagagttgtctttcagcattcaatcaggctgagctgaatgtagtgatgtttacattgtttacattctttgtactgtcttcctgctcagactctactgcttttaataaaaatttatttttgtaaagctgtgtgtttagttactttcattgtggtgaaaaaaagttaaaagtaataaaattatgccttatctttttataa

SEQ ID NO: 90941 - DNA, 820 bp, Homo sapiens
tttgccgaatgcttaccaaacgccagatactgtgcgtgttgtatcatttaatcttccccatctctgtgagggtagacgttatctccactttgcagatcagaaaagtgggactcagagaaatgagaccctttcccaagcagctcagacaggaaggtgttgtgggcaggtcttcccaggtcttacccagcagtactcactagcgctccgtctgttctgagcccctccttcctggtcctatgaaggtctctctcctctcagtagcaggccccacattcagctcacttgctctgtctcctgccatctgcttcacagctcaagacccctgggccccctgcttagcttaaccctggtctgtccctttctgacttggcccgtgagatgtctatgttctctttccctccatccagggaaggagcaaaagccccttgccatccctgtgtgacagcaatgaggtgaacccaggggccgaagcccacccagggagttgatggtaagactcaccttcgttttccttcccctcctcagaagtgtggctccttcctctgcattcactgggtgatgctggggtctgtaggctgagaggagcaggagatccagtggcaaggaagacgaaaacacagagcaggccaggcacgtatttttggattagttttagagaacaagttctaagctgtgctttttatgttgcctttagaaaatgttaaaatactttctaggctgggtgcagtggcttgcgcctgaggcagacgggtcacttaagcccaggagtttgagaccatcctgagtaacatatggggagaccctgtctctacaaaaagta

SEQ ID NO: 90942 - DNA, 388 bp, Homo sapiens
agctcgcagttttagaagtcagaagagccataatttccccccttgtatctgcccccggaggagtttacccgtctgccccggggaagggaaaaaagggagacaccttgttgagccaccctactgtgtacctggcactttaaaacccctgagccctcatcaagatgggattaatatcctcagtttaatcaatggggaaactgaagccttagacaagacaagtaattctctccagttagtggccactccaatatctgagcctcaaatttttttttatagtagagaacatgtaggcattaaatatttgactacatagaaagagacagagatgagaaagagagaaagtgaaagagatacatacacggtgaaaaaataaatagacaaaaataaa

SEQ ID NO: 90943 - DNA, 141 bp, Homo sapiens
ccagaggcaacagattaaacatatttattaaaattttttgaaattctagttccaacgaactgcataataatatatacaccgtgtatcctgtttccgtgagatgcacgtaaagctaggataaataaaaataattttttgatc

SEQ ID NO: 90944 - DNA, 386 bp, Homo sapiens
aaaatatgtaaattcactttcagtatcttttacccaaagaatcattctatacttctgcacaaggtgagaataaaaaaggttactttataaaatgactgtaaaaatagtgagtacaaatattcttttggtcgttatgatgctgtaacattctctgctggtttcaacaatattccttttttttagtcttcctgtttgtctttggacttccaaacagtgagtttaaatatcatagcaacagtgaaccaggttttgtactatttgatttattttttaatctatcttatttgccgtataaaattattaatcttcatcttttaacttacatatcttttctccagcctagcattatatattgagaggaaatccactaaaagtagatcacaaaa

SEQ ID NO: 90945 - DNA, 482 bp, Homo sapiens
  misc_feature (431)..(431): n is a, c, g, or t
  misc_feature (450)..(450): n is a, c, g, or t
  misc_feature (475)..(475): n is a, c, g, or t
  misc_feature (477)..(478): n is a, c, g, or t
  misc_feature (482)..(482): n is a, c, g, or t
aatacatttgacattgtcatttttccaactaatttgaattagaaataataattgaccttatgaattatgtgcatgggatggtttataggggtttgaaagaggcagacacttgctacaggttttaaaaatcatcagggttaagtataagaagcattatatctgggaagtacagggaaaggcaattgcattatttttcttaatttgcttttctaggtaagcaatatgtacttattaagattttatttaaacaattgaaatggggagctgcagaagaacattattgtttctttctattcttccttgatgccctcccctcccctccccttcccttcccttccctttccttcccttcacttcccttcccttcccttcccttcccttcgcttccctccccttccgacagaacatcactctgttgcccaggctgagantcgtgccactgcactatancctgggcaacagagcaagactccananngatn

SEQ ID NO: 90946 - DNA, 357 bp, Homo sapiens
ggtagatatcagaggagccagaaggagccctgatttccttgcaaaagttagacttcagcttgcatttgctgcttctggtaacggggaaaatgacagggagcgacccggggttttatgtctggcaataatgtttgatctatgccattgtcgatgagaactgcgatttaatccataaggatatagagcctcgtgatgaaaggggaataacgacaaatcctgattaacaatcgctgcgacactaaagcaggttaccatagtaacggggctgaaattatacaacaaactgggatgccataccaggcaaattactccgtgaagggacccttttctgaaagcatttggctttctgtgttctct

SEQ ID NO: 90947 - DNA, 323 bp, Homo sapiens
agggtttgtggagatgcaccgtgtatcacatatgtctgtgcaaaaccattcgtgttaggatcctaaaactatcatcagtggaaacactggcagttttagtgagctggtcacatttcatgaatgcaagatgttagacttctatagcagggtgtgtgtcatctagagcaagttattgactgtacaggtatttgagctccaccagaattccctagaggaaagaaagtgtgttcctcattgaacataatggaaatagtaagacgttcaggcagtctggtctgcagcattcgaatgtttcttgcatctcaaacttcttaagactgtga

SEQ ID NO: 90948 - DNA, 1150 bp, Homo sapiens
ctcacttatcattctgggtaatgaccaggcctagataaagacctcatataagtggaattatgtagtatttgtctttctgtgactggcttattttacttagcataatgtcttcaaggttcatccatgttgtcaccatatttccttcttctctgaggccaaatagtattccatttatgtatttactacattttctttattcattcatctgtcaatggatatttaggttgtttccacatcttggctgttgtgatatctattaattgttaagctggtctctgtattgaaatctccttgcctatatttctccatagtttaacatcctgcaaggaccagagcagattttgtctgttgttttttggttttggttgttgttattgttagagacagtgtctcattctgttgtccaggctgtagtgcagtggtgcagtcatggctcactgctcactgtaacctcaaatgcctggactcaagtgatccctcatctcagcctccggagtagctgagactgcaggcacacactatcacacttggcgaatttttctgtttttttgtaacagcctgttgcccaggctgatctcaaactcctgggctgaagcaatctgcccacctcggcctcctgaagtgctgggtttacaggcgtgagcccccgcatctagcttgcacctcatttattaagggttcgttatgagccaggcactctttaaggtctttggactatatagttactgaaataagacacagtcccagtactccaagaacttagtctgtttgaggacatggaaattttaattcattgctcttacagagtgagtatggaaattgaagtgtatcccaaactttctggtagcatataggaaagggatgatttctcagtttgatgtaaacctcattcaagtgccacttcttacatgcaggctatcctggtcactacccagtctgatttgtgtttttatactctcctttactcagttctctttcttttccagcccccaaatcatcagcatttcctatgactcaacacttagcttttcattcattcttctagatccttttctttaggaaatggatttaatttcaagggttcagctgaaactttcaaatttgtagtagctccaacaaaacattttattgtgaagtaatacacatacaa

SEQ ID NO: 90949 - DNA, 310 bp, Homo sapiens
tgtttccctttgtctgccaggacactgagatttggagagtctcttcaccctctgaaaacaagaggatgtgtagcatagtgagcaacagctgtgtgccggggactcagcattaagtagcatgggattactcatgacttcgcactcatggcagcctcacagagtctcactctgtggtccaggctgaagtacagtggcatgatcccaggtcactgcaacccccacctcccgggttcaagtgatcctcctgcctcagcctcccgagtagctggtattacaggcgtgtgccacaaagcctggctaagttttgtat

SEQ ID NO: 90950 - DNA, 802 bp, Homo sapiens
tgtttccctttgtctgccaggacactgagatttggagagtctcttcaccctctgaaaacaagaggatgtgtagcatagtgagcaacagctgtgtgccggggactcagcattaagtagcatgggattactcatgacttcgcactcatggcagcctcacaggtaactttgtcaatttctttttttccttttatattaaaaaaacaaaatggctgggttcagtggctcatgcctgtgatctcagcactttgggaggcaggggagggaggatggcttgagctcaagagttccagaccagcctgggcaacacagtgagactctgcctctacaaaaataattaattaattaattaattaattaataaaataaatgaatcaattaaaagaattaagaaaaacaaaacaaaactttttgaataagtaaagcatttacaagacacaaaatccaaaaggtatacaaagttttccaatgaagactgccaaccctcatgtccccagacccctgtttctcctccctgggacacagttgttgcaggtttcttgctccttcttcctgaaagagtctgtgcattattgaaaagaagatgtgtgtccatgagtacatctacagacgagtgttgagcacctgttgtgcacagtggtgggggcagtgtgatgggagtacacagggcagggagacacgggtctgggctcccctgaagtttgcagccgtattaagggctcggccttacagtgcgtggggcctcggcttcagaggaagggctgatcttggggctggctgctgcttgacttggagtacctgcctc

SEQ ID NO: 90951 - DNA, 458 bp, Homo sapiens
gaaaaacacagaggctaatgctcatttatatgataattctatagtggaatgtagggtggatttctttttcatttggtgccatttatttagaagatacaaaataaatgatttttagatgcatcctcagagtactgataaaagatcaatacttcttaaattaatgttcttactgcattatgcaaaaatttgttttaaaatcctcaggattttatgatcacaccttcatgtactgatgcttaatgggaaaatattaaattttccctattaaatactacattccaaattctaaattcttgcagctttgccaagttcaaataagtatagtaaatttaactttggaatttcctgacttttgcattgctgaaattttagattttgcccaacattaagggagtctttcaatttaaattccctttatttaaaatgtttagggcaattgtgaaaagtgaggaaattgg

SEQ ID NO: 90952 - DNA, 379 bp, Homo sapiens
gtttttgctaattttatacattggtttttagaagtctcttatactgaataaatttacattttacatagtctatattactcacattatttttaaagatttattttttacattaactgtttagtaaacagaataggtgtggaataaattctgtagtgtttctacttcgattacataaagaaacatgataacttttaccttctattacccatctgtttttacaacattcaaattgtaactatatattcagatattatttcagggcattaataggaaaaaaacaaaattgtccgacccaaacagaatctctcttctgttaaattaggggatccatagctatgctctttcttacagtaataaaatggtgaaaatattctaaact

SEQ ID NO: 90953 - DNA, 180 bp, Homo sapiens
gagtgagaatatgaccctgtctcaaaaaatgaaaaagaaaaaaagaagacacggggattgggtctaggtaatttagtgtatgtagactcatttaagtatttgccagagtatgagtactttgtttctttgtttttcatggtctgaaaccctgttaagcttttttttttttttttttttttt

SEQ ID NO: 90954 - DNA, 940 bp, Homo sapiens
tgcccttaattatataccaaagtaagaaaaataattcagataagaaagtcttaaagacttctatctctttaagtgcctcatactataatctctattttatttctaggcttccatgtgtcaaactaccttgcctacacaaacgaaccataataataaatatcacagaacacataaaatctttagagtttacagattgatacatattcataattttatttgataatttctttagttctatgtaaaagacaggaatacttctgctttttctattatacagttggagacactaacaaagagaagagccaagggtttgctcagagtatctgtaagcgttagatattctgagtgtgactatcagccagagctgttcacataaacatggtaatctaagctctgaacttctttggaagtaaattattgtctgtgacagaaagaaagagcagcatatttctttttatttaattatgaggttctggagggtttctgtgaattcaagagatgggaaagtcattatttttatttcattctctttcatgtctccactacagatgttgccatatgtttttcttttgtttgttatgtttttatggtttgcctctcaaatttacagacaccatctacagttggggttagaaaaaatgctcaaatctcagctgggcgcggtggctcacacctgtaatcccagcactttgggaggccgaggcaggaggatcacctgaggtcgggagttcgagactagcctgaccaacatggaaaaaccctgtctttactaaaaatacaaaaaattaactgggcgtggtgttgcatgcctgtaatcccagctactcgggaggctgaagcaggagaatcacttgcacctgggaggcagaggttgcggtgagccaaggtcacgacattgcactccaccagcctggccaacaagagcaaaattctgtctcaa

SEQ ID NO: 90955 - DNA, 247 bp, Homo sapiens
cagccacagggcatgtcttgaagggacagccaagtatagggacaaagcaggagcccaggaccaaagcaggtgtccagatggaattagatgtctgctatggaatgcatgttggagattaggtgaagccctaccaccaaataccatcatattgggaattagggctttaacatagaaatttacagtgggggacacaaacattcatccaataacagtaattattgatattattggatttatatctatcatt

SEQ ID NO: 90956 - DNA, 344 bp, Homo sapiens
acaaggggataggagggtatattgtcatatgatctagcgtctctctgagcttttacaattctaagcatctaaaagcattacataaattgaaacaaaatcataaagcatatacttgttaaatctctagatgagacaaaactgaaagagtaacagtaaagagtgaaaacgaattcagactatataggaataggctaaaatcactattatgaaattaaacaggaagaaacaaagacctgaatttagatttaacaaaaaaactacacaaatacagaacagagcagacttggtttgacaatgattcatttgaaaacgagctaggttttttagcatatgctcccagggcc

SEQ ID NO: 90957 - DNA, 712 bp, Homo sapiens
ttctaaagcaccaacacagaggtgatcaaaatactctaagaagcactgggaaacattgaggggatggttcaaacatcagagctaaggcctaatttcccaacagtcattatttctgtggtattttgcatattagagacgtataggttcctcacctaatccttgttttttcattttatttttaatacatatgaaagtcataataacaaaaaaaattcatacatcagcagctcagctagaaataaaagtctcaatctactggaagcccctgtgaacttgtatcaaattcctttctctcttcatagaggaaataatgactcccaaaatgtggtaatgaacaaatatctctaattgtttaaaatttagtatatgtgcaagtctccacagacacaatcatgatcatatatttttagaagttaaaaacgtgtctatcatcagggcgtggtggttcatgcctgtaatcccagcactttgggaggcctaagtgggtggatcacctgaggtcaggcgttcaagaccagcctggccgacatggtgaaaccctgtctctactaaaaatacaaaagttagccaggcgtggtggagggtgcctgtaatccgagctactcaggaggctgaggcaggagaattgcttgaacccgggaggcggaggttgcggtgagccaagaccacgccactgcactccagcctggacaacagagcaaaaactccgact

SEQ ID NO: 90958 - DNA, 108 bp, Homo sapiens
agtttattattcctttatcccagtataattttgcatagtcatcactctctttgttatgggtatctatacttaaagaataaatatatatgagttatctacacatgagct

SEQ ID NO: 90959 - DNA, 159 bp, Homo sapiens
gatggatataatggatgaaaaggtggatataatggatagatgtatgcatggatagatggatggatgtttaaaaggagatgaaaaaggcactagttgtctgcatcgttcccatctggttcaatatccctttccattaaatttattttttatttttatttt

SEQ ID NO: 90960 - DNA, 471 bp, Homo sapiens
taaggtgactctagcaggatgctttaaggcgagccgggtggtggggaaagagaacagaaaggaagggccagatggcccaagcactgagtaacagccacccacgtccacaactgccaacacgcagagggagaagctgagagcctggaactggtgacgaaagcggggaccccactcccggagcttcatagccacactggcaatgcaaactggattagaaactcattccaccactaaggaaggctggcaccaataaaaccacaccaccagggtgatgtgcgagatttgagaccagccgtaagaaacaagaggaactggggccagagtctgaagactgcccagtaaaacagatacattgaaaagctgatgaaaactcaggggagaaagccacaggcaggagccttccagaaccagcatctatttctctcacacctgctaatcacaggcacaggacacacttcaccaggatgtttg

SEQ ID NO: 90961 - DNA, 458 bp, Homo sapiens
ccagtccctgaaggtcccctgacctcccaattttgatggacagtaagaagaggttcccaggccgactgccacaggttctgactcggcctgggttagggtaagtctccgggctgctgtcctcaaaagccccatcaggaggctgtgtcaggccaggcgcaccgtggtgacagcagcatggactgagggttctggccgcgggagaggcaggacggggggaggtcaggtccaggaggagggcactggccggcacatggtggggctggagagaccctggccgggttggtgggaatggcccaggaggagctccggctcctgtggctggagtgagggtgtgggctgtggtgggagagggggtgaaggtggagagaacaggggcccagaggtctgtgctgtaggaagggtatggacttcctagtgaggactttctggtggggggctctcagagaagaggaggccgg

SEQ ID NO: 90962 - DNA, 553 bp, Homo sapiens
agtggacaaatctgcagagtacagatgtctgcattaggagtgcagtgtgataccattttttttctttcttcactcaaatctgtggagttgtcccccacatttactctgcattctctgttaaaatattttgtggaaatatattctgggggaacactggtaactgcacatctttccacaagtgtcttttatagtataaaccaaaacatggatgccatgactttgtcttttagaagggagtttcttggcatccttgcttagaactcacccttgaaaagatgttaacgctaatctttaaatttcaacaaggtgtgtagtttgactctaaaaggggaatgaagtagctcagaatgcttaaatctttagagagcaacccaaagtcaaaggcattataagctgtggttcagctaatttacaaggaggataattgcagaaaaattatcatataagtttactggaaataaccactaaattctttaacttactgtgagtatagcctaagatacctgctttagttatttactgctatttgacaaactgctgcaaaacagtggct

SEQ ID NO: 90963 - DNA, 373 bp, Homo sapiens
gctttcttattctttggcgcggaggccttccgttgggtcccactgcctgctgtcttatctccttctaatgaatatgatcatgatttttctgtatttagacaactccacgatgaggaggatgatggcggcagctaacatttatgtatgtatgtatgtatgtatgtatttagagacagattctctgtcacccaggtgcagtggtgcaatcttggctcactgcaacctccccctcctggattcaagtgattctcatgcctcagctacttgggaggctgaggtgagaggatgacctgagcccaggaggttgaggctgcagtgagccatggtgacaccgctgcaatccagcctgggtgacagtgatatcctgtcttaa

SEQ ID NO: 90964 - DNA, 1007 bp, Homo sapiens
gctttcttattctttggcgcggaggccttccgttgggtcccactgcctgctgtcttatctccttctaatgaatatgatcatgatttttctgtatttagacaactccacgatgaggaggatgatggcggcagctaacatttatgtatgtatgtatgtatgtatgtatttagagacagattctctgtcacccaggtgcagtggtgcaatcttggctcactgcaacctccccctcctggattcaagtgattctcatgcctcagctccccgagtagctgggactacagatgcacaccaccacacccagctaatttttgtatttttagtagagacgagattttaccatgttgtccaggctggtccggaattcctgacctcaagtgatctgcccaccccggccttccaaagtgctgagattacaggcgcctgcctccacacccagccagcagctaacatttattaagtgctcactatactcctgccaagcactattataatttgtcttctaacaggctttttataagggaagtgctactattatacccattacatagatggtaaaactgaggcacagagaggctatgtaagtttcccaaagtcatgtactaattgatgaagacccagggtttgagctctgcaggaatggccgactccttgtggtttgagcctgggctccctctccatctgtcttttctccctgagccctcctgactgcagccatgccagactttttaatgttcggaaccccagctccagcctatcactggagctctgcctgtgatctttccacctcatgcctcccggttctatgtgtgccttcagactccatctggcagtggtatctggatggaccagtgcatagaaatcacatgagacactcaataaatgtagactcctagtgattctgactagcaggtctggggtggggccaggtacccagatttgcacgggaagtcagggaccactgctgctgactgcttttttcctgggtgcttggcacactctgtcac

SEQ ID NO: 90965 - DNA, 439 bp, Homo sapiens
gaggaccaacatatgagggtagagagagcctttctctttcagggcaacatttttccctggccacctgggcctctcaatgaagatagtgtgttcagggacttgtagagtgtagtttagtaggaccatagcatagaatgggtaagtgacagtagcaagagctgtgagatgtgacttttgttttgggatagacatccttcaggataattgagagtgttattggtggaaaattagaactcttactttgttaagcattttaaaataccagcgataaaaactgtaatcacaatttgttttgagtttaagcccaggatgtagactgggtatttttaatgtcatcaagggaatagggcagagggttattcccaggcacataactgtgaaaacaaatgataacgtgggccgagtgtgggggctcacgcctgtaatcccaacacttggg

SEQ ID NO: 90966 - DNA, 163 bp, Homo sapiens
tcttaatcttacctctgttccactcaagatacctggagttcacttcaattccttggtctcctgtttcttccacacgctgtcagccaggcaagtcatcctttgtggtatctcttgcatccttcgagatgtctcttgcgtctatttcatctttttatatccagta

SEQ ID NO: 90967 - DNA, 267 bp, Homo sapiens
ttaatcaggctgctgcaaatgcttggccaaaagcaataagggcatgactgagagactgtgggagtttaatataaaaaatttaataaacaaaaaagtgggggaaggagaaagggtctaccttttaatagggccctaattacccaactcataggatcagcccaaatgagatgggagtttatttcgggggtttttttaattattattttatatatatatataaattgccgctatgtgttttctttcctctgagcaattatgcagcaagta

SEQ ID NO: 90968 - DNA, 1233 bp, Homo sapiens
gagcctcccaaaggaacatgacttgctaacaggccagggttgattttagcctagtgagactcattttggacttttgacatccagaactttaaaatacatctgtgtgtctgccattatttgttacagcaacaacacgaagccagtaccgtcacatgccagtaaatacaggagctgagatgagaaccctggtgcagagctcactcactccacccttactctgttttctctgcagctcctctgctctactgaggtgcagcaggtgatatgatatggtgattccctcttggctttgcctgtgatactgctttaaatgtaatgtttttccctgcctaatgtctgccttcctaatttttcaaggcctaggggaagttctatggattaataactcttgactatctagcatgacgtccggcacactggacgtcctgtgattttcatcaccccagcttctttcttggagctgctgttgcactaatagacaataggccatgtcttccgcttagcagcctgtcttggtttctagttttccctgggctttagtggtatcttcctaacaataagcatagatagacaggggccaatgagtcctgaagtcattttattttatttaatgtttatttatttatttgacagggtctcactctgttgcccaagctagagtgcagtggcacagtcacggctcattgcagcttcaaactcccgaggctcaggtgatcttcctgcaggctcacgccatcacacccagttaatttttgtagagatgaggttttgccatgttgcctaggctgctcttgaattcctgggctcaagcagtccacccaccttggcctcccaaagtgctgggattacaggcatgagccactgcgcctggctctagtcattttaatagcaagtatcctggtataatcatgtcccagcggccttttctcactggccttcaggtttcaggttccccatctgttaaataagggagctttgccctagttatctgtaagggacacttcatcttgaaaatgcaaatggccttggcctatttttgtaggcctgggagctaaggatgttttttacatttttaaagcattgtttggaggggaaaaagagaacatgtgacagagacctcatctagctgactcctgtgttagaccttaagaacagcctgaaatggggtggaggaggtttctcagtggatatatttagtttgcagagtccttccttcccctgagggctaccaaa

SEQ ID NO: 90969 - DNA, 424 bp, Homo sapiens
ctttgcattccgatattcattccttggcctcccctttattaaaaacaaccctctcccttagatcttgcatttgccactaggtattgttgtgtcatttcccttccctttaacccataatccttgtcagagccaaataatctgctttctctatcttttgtggcttcattctctagaacctccgtaccctaccattatctttttttctaactttgtcatcttgctgaattagtttttgccaaggttacaaataacctaatggccaaattcactgacagtatctcaatcccaatctcatttgaatgctccctgatgggtgcagtggcttatacctgtaattccagcactttgggaggccaaggcagcagtatcacttgaggctaggatttcaaaactggctagtcaacatagtgagacctcgtcttta

SEQ ID NO: 90970 - DNA, 657 bp, Homo sapiens
aaggaaacaaaactgtaagtttcccttacatatgaaacccaactaaacaatatttagatcaaatacactgacctgcctcctatgtagatcagctagcctctgaggggcaaaaccacactgcttggttatggagactgcaagaccttccagggcctgcagctcaggagaagtaggggccctgggcagctgtgtttatttgcagagccaccaaactcactaccccatatcataatcttccaaaccagcctgagcataactagcttccttacatctttactaagaaaaggaaaggcttctttcttagttttttgttatcagggaggaatggtttaggtggcaaataatgaaaaaaaccaaagtagatactagtttaaacacacagggaacttttttttattgcttaatgaaaaactggagacagcccagggctggtgcagccagtgtggtatcaacataccaggcaccttttgccttcctgtgttgctatccttagcccattggtttcctaccttatggccacaagatagctgctgcagctccagatctaccagctaccttcaaggcagcagaaaaggagaaaaaaatggagtctgacccttttaaaaatgtgaataaaatatttcccaggacctctcaccactatacttcaaaagactt

SEQ ID NO: 90971 - DNA, 332 bp, Homo sapiens
tgtttaatccttaaaatggctctctggtatacatggtgatatctatacattacagataaggaaactgaggctcagggttagtacagtgtcatataattaataagtagagtcagaacttgaaactaacactgccttccaagtgcttagttgttttgccatactggcactaattagtaatcagcgaggttgtgaacatgttctccctattcttctgctccccacccccacccttcacatgagctgcttttccttgtcagctgactggccctcaggtgttctggggctaagagaagctccagtacagataaggcctgttggccttctgccttctc

SEQ ID NO: 90972 - DNA, 358 bp, Homo sapiens
gtctcaaaaaaaaaaagaaaaaaaaaaaaggctttatgggactatattggtgaactctagagcatccagtgaggggctgtgggatgagtgaaagctaatttctaagaatcacgaggtgtgctctgaggacaaagaggaaaccttagggaagtggcaccaagtgaaaccagaaaggagactgggatcatattgtggttgaccttaaatattaccttagtgttgaggagtcacctgtgtaactgaggagagaggaggaggtgtgcatgactccagcaggttggaaaaagccagtgcctctgccagacaggaatgtggaacgggtggaaagtggtgtgatcttagatgtgtagagtgtgat

SEQ ID NO: 90973 - DNA, 2425 bp, Homo sapiens
gctggttactgcatttctccatgtggcagacagagcaaagccacaacgctttctctgctggattaaagacggcccacagaccagaacttccactatactacttaaaattacataggtggcttgtcaaattcaattgattagtattgtaaaaggaaaaagaagttccttcttacagcttggattcaacggtccaaaacaaaaatgcagctgccattaaagtcacagatgaacaaacttctacactgatttttaaaatcaagaataagggcagcaagtttctggattcactgaatcaacagacacaaaaagctggcaatatagcaactatgaagagaaaagctactaataaaattaacccaacgcatagaagacttttttttctcttctaaaaacaactaagtaaagacttaaatttaaacacatcattttacaacctcatttcaaaatgaagacttttacctggaccctaggtgtgctattcttcctactagtggacactggacattgcagaggtggacaattcaaaattaaaaaaataaaccagagaagataccctcgtgccacagatggtaaagaggaagcaaagaaatgtgcatacacattcctggtacctgaacaaagaataacagggccaatctgtgtcaacaccaaggggcaagatgcaagtaccattaaagacatgatcaccaggatggaccttgaaaacctgaaggatgtgctctccaggcagaagcgggagatagatgttctgcaactggtggtggatgtagatggaaacattgtgaatgaggtaaagctgctgagaaaggaaagccgtaacatgaactctcgtgttactcaactctatatgcaattattacatgagattatccgtaagagggataattcacttgaactttcccaactggaaaacaaaatcctcaatgtcaccacagaaatgttgaagatggcaacaagatacagggaactagaggtgaaatacgcttccttgactgatcttgtcaataaccaatctgtgatgatcactttgttggaagaacagtgcttgaggatattttcccgacaagacacccatgtgtctcccccacttgtccaggtggtgccacaacatattcctaacagccaacagtatactcctggtctgctgggaggtaacgagattcagagggatccaggttatcccagagatttaatgccaccacctgatctggcaacttctcccaccaaaagccctttcaagataccaccggtaactttcatcaatgaaggaccattcaaagactgtcagcaagcaaaagaagctgggcattcggtcagtgggatttatatgattaaacctgaaaacagcaatggaccaatgcagttatggtgtgaaaacagtttggaccctgggggttggactgttattcagaaaagaacagacggctctgtcaacttcttcagaaattgggaaaattataagaaagggtttggaaacattgacggagaatactggcttggactggaaaatatctatatgcttagcaatcaagataattacaagttattgattgaattagaagactggagtgataaaaaagtctatgcagaatacagcagctttcgtctggaacctgaaagtgaattctatagactgcgcctgggaacttaccagggaaatgcaggggattctatgatgtggcataatggtaaacaattcaccacactggacagagataaagatatgtatgcaggaaactgcgcccactttcataaaggaggctggtggtacaatgcctgtgcacattctaacctaaatggagtatggtacagaggaggccattacagaagcaagcaccaagatggaattttctgggccgaatacagaggcgggtcatactccttaagagcagttcagatgatgatcaagcctattgactgaagagagacactcgccaatttaaatgacacagaactttgtacttttcagctcttaaaaatgtaaatgttacatgtatattacttggcacaatttatttctacacataaagtttttaaaatgaattttaccgtaactataaaagggaacctataaatgtagtttcatctgtcgtcaattactgcagaaaattatgtgtatccacaacctagttattttaaaaattatgttgactaaatacaaagtttgttttctaaaatgtaaatatttgccacaatgtaaagcaaatcttagctatattttaaatcataaataacatgttcaagatacttaacaatttatttaaaatctaagattgctctaacgtctagtgaaaaaaatatttttaaaatttcagccaaataatgcattttatttataaaaatacagacagaaaattagggagaaacctctagttttgccaatagaaaatgcttcttccattgaataaaagttatttcaaattga

SEQ ID NO: 90974 - DNA, 2552 bp, Homo sapiens
gctggttactgcatttctccatgtggcagacagagcaaagccacaacgctttctctgctggattaaagacggcccacagaccagaacttccactatactacttaaaattacataggtggcttgtcaaattcaattgattagtattgtaaaaggaaaaagaagttccttcttacagcttggattcaacggtccaaaacaaaaatgcagctgccattaaagtcacagatgaacaaacttctacactgatttttaaaatcaagaataagggcagcaagtttctggattcactgaatcaacagacacaaaaagctggcaatatagcaactatgaagagaaaagctactaataaaattaacccaacgcatagaagacttttttttctcttctaaaaacaactaagtaaagacttaaatttaaacacatcattttacaacctcatttcaaaatgaagacttttacctggaccctaggtgtgctattcttcctactagtggacactggacattgcagaggtggacaattcaaaattaaaaaaataaaccagagaagataccctcgtgccacagatggtaaagaggaagcaaagaaatgtgcatacacattcctggtacctgaacaaagaataacagggccaatctgtgtcaacaccaaggggcaagatgcaagtaccattaaagacatgatcaccaggatggaccttgaaaacctgaaggatgtgctctccaggcagaagcgggagatagatgttctgcaactggtggtggatgtagatggaaacattgtgaatgaggtaaagctgctgagaaaggaaagccgtaacatgaactctcgtgttactcaactctatatgcaattattacatgagattatccgtaagagggataattcacttgaactttcccaactggaaaacaaaatcctcaatgtcaccacagaaatgttgaagatggcaacaagatacagggaactagaggtgaaatacgcttccttgactgatcttgtcaataaccaatctgtgatgatcactttgttggaagaacagtgcttgaggatattttcccgacaagacacccatgtgtctcccccacttgtccaggtggtgccacaacatattcctaacagccaacagtatactcctggtctgctgggaggtaacgagattcagagggatccaggttatcccagagatttaatgccaccacctgatctggcaacttctcccaccaaaagccctttcaagataccaccggtaactttcatcaatgaaggaccattcaaagactgtcagcaagcaaaagaagctgggcattcggtcagtgggatttatatgattaaacctgaaaacagcaatggaccaatgcagttatggtgtgaaaacagtttggaccctgggggttggactgttattcagaaaagaacagacggctctgtcaacttcttcagaaattgggaaaattataagaaagggtttggaaacattgacggagaatactggcttggactggaaaatatctatatgcttagcaatcaagataattacaagttattgattgaattagaagactggagtgataaaaaagtctatgcagaatacagcagctttcgtctggaacctgaaagtgaattctatagactgcgcctgggaacttaccagggaaatgcaggggattctatgatgtggcataatggtaaacaattcaccacactggacagagataaagatatgtatgcaggaaactgcgcccactttcataaaggaggctggtggtacaatgcctgtgcacattctaacctaaatggagtatggtacagaggaggccattacagaagcaagcaccaagatggaattttctgggccgaatacagaggcgggtcatactccttaagagcagttcagatgatgatcaagcctattgactgaagagagacactcgccaatttaaatgacacagaactttgtacttttcagctcttaaaaatgtaaatgttacatgtatattacttggcacaatttatttctacacataaagtttttaaaatgaattttaccgtaactataaaagggaacctataaatgtagtttcatctgtcgtcaattactgcagaaaattatgtgtatccacaacctagttattttaaaaattatgttgactaaatacaaagtttgttttctaaaatgtaaatatttgccacaatgtaaagcaaatcttagctatattttaaatcataaataacatgttcaagatacttaacaatttatttaaaatctaagattgctctaacgtctagtgaaaaaaatatttttaaaatttcagccaaataatgcattttatttataaaaatacagacagaaaattagggagaaacctctagttttgccaatagaaaatgcttcttccattgaataaaagttatttcaaattgaatttgtgcctttcacacgtaatgattaaatctgaattcttaataatatatcctatgctgattttcccaaaacatgacccatagtattaaatacatatcatttttaaaaataaaaaaaaacccaaaaa

SEQ ID NO: 90975 - DNA, 730 bp, Homo sapiens
ggtcttgttttaattagaattattaagaggaaattaaggaaactgcgcccactttcataaaggaggctggtggtacaatgcctgtgcacattctaacctaaatggagtatggtacagaggaggccattacagaagcaagcaccaagatggaattttctgggccgaatacagaggcgggtcatactccttaagagcagttcagatgatgatcaagcctattgactgaagagagacactcgccaatttaaatgacacagaactttgtacttttcagctcttaaaaatgtaaatgttacatgtatattacttggcacaatttatttctacacataaagtttttaaaatgaattttaccgtaactataaaagggaacctataaatgtagtttcatctgtcgtcaattactgcagaaaattatgtgtatccacaacctagttattttaaaaattatgttgactaaatacaaagtttgttttctaaaatgtaaatatttgccacaatgtaaagcaaatcttagctatattttaaatcataaataacatgttcaagatacttaacaatttatttaaaatctaagattgctctaacgtctagtgaaaaaaatatttttaaaatttcagccaaataatgcattttatttataaaaatacagacagaaaattagggagaaacctctagttttgccaatagaaaatgcttcttccattgaataaaagttatttcaaattga

SEQ ID NO: 90976 - DNA, 685 bp, Homo sapiens
gaaacctgcctctcttcagtcaataggcttgatcatcatctgaactgctctaaaggagtatgactcgccaatttaaatgacacagaactttgtacttttcagctcttaaaaatgtaaatgttacatgtatattacttggcacaatttatttctacacataaagtttttaaaatgaattttaccgtaactataaaagggaacctataaatgtagtttcatctgtcgtcaattactgcagaaaattatgtgtatccacaacctagttattttaaaaattatgttgactaaatacaaagtttgttttctaaaatgtaaatatttgccacaatgtaaagcaaatcttagctatattttaaatcataaataacatgttcaagatacttaacaatttatttaaaatctaagattgctctaacgtctagtgaaaaaaatatttttaaaatttcagccaaataatgcattttatttataaaaatacagacagaaaattagggagaaacctctagttttgccaatagaaaatgcttcttccattgaataaaagttatttcaaattgaatttgtgcctttcacacgtaatgattaaatctgaattcttaataatatatcctatgctgattttcccaaaacatgacccatagtattaaatacatatcatttttaaaaataaaaaaaaacccaaaaa

SEQ ID NO: 90977 - DNA, 1282 bp, Homo sapiens
aacaccttcttgtgcctctggttcgcatttatccgtcccaccaattgaaaaaccaatcatgtttggtttctttgcaaatcaaaattctttaagaaatgatacctcttctcccctgacaaatgaaggaccattcaaagactgtcagcaagcaaaagaagctgggcattcggtcagtgggatttatatgattaaacctgaaaacagcaatggaccaatgcagttatggtgtgaaaacagtttggaccctgggggttggactgttattcagaaaagaacagacggctctgtcaacttcttcagaaattgggaaaattataagaaagggtttggaaacattgacggagaatactggcttggactggaaaatatctatatgcttagcaatcaagataattacaagttattgattgaattagaagactggagtgataaaaaagtctatgcagaatacagcagctttcgtctggaacctgaaagtgaattctatagactgcgcctgggaacttaccagggaaatgcaggggattctatgatgtggcataatggtaaacaattcaccacactggacagagataaagatatgtatgcaggaaactgcgcccactttcataaaggaggctggtggtacaatgcctgtgcacattctaacctaaatggagtatggtacagaggaggccattacagaagcaagcaccaagatggaattttctgggccgaatacagaggcgggtcatactccttaagagcagttcagatgatgatcaagcctattgactgaagagagacactcgccaatttaaatgacacagaactttgtacttttcagctcttaaaaatgtaaatgttacatgtatattacttggcacaatttatttctacacataaagtttttaaaatgaattttaccgtaactataaaagggaacctataaatgtagtttcatctgtcgtcaattactgcagaaaattatgtgtatccacaacctagttattttaaaaattatgttgactaaatacaaagtttgttttctaaaatgtaaatatttgccacaatgtaaagcaaatcttagctatattttaaatcataaataacatgttcaagatacttaacaatttatttaaaatctaagattgctctaacgtctagtgaaaaaaatatttttaaaatttcagccaaataatgcattttatttataaaaatacagacagaaaattagggagaaacctctagttttgccaatagaaaatgcttcttccattgaataaaagttatttcaaattga

SEQ ID NO: 90978 - DNA, 1404 bp, Homo sapiens
gctggttactgcatttctccatgtggcagacagagcaaagccacaacgctttctctgctggattaaagacggcccacagaccagaacttccactatactacttaaaattacataggtggcttgtcaaattcaattgattagtattgtaaaaggaaaaagaagttccttcttacagcttggattcaacggtccaaaacaaaaatgcagctgccattaaagtcacagatgaacaaacttctacactgatttttaaaatcaagaataagggcagcaagtttctggattcactgaatcaacagacacaaaaagctggcaatatagcaactatgaagagaaaagctactaataaaattaacccaacgcatagaagacttttttttctcttctaaaaacaactaagtaaagacttaaatttaaacacatcattttacaacctcatttcaaaatgaagacttttacctggaccctaggtgtgctattcttcctactagtggacactggacattgcagaggtggacaattcaaaattaaaaaaataaaccagagaagataccctcgtgccacagatggtaaagaggaagcaaagaaatgtgcatacacattcctggtacctgaacaaagaataacagggccaatctgtgtcaacaccaaggggcaagatgcaagtaccattaaagacatgatcaccaggatggaccttgaaaacctgaaggatgtgctctccaggcagaagcgggagatagatgttctgcaactggtggtggatgtagatggaaacattgtgaatgaggtaaagctgctgagaaaggaaagccgtaacatgaactctcgtgttactcaactctatatgcaattattacatgagattatccgtaagagggataattcacttgaactttcccaactggaaaacaaaatcctcaatgtcaccacagaaatgttgaagatggcaacaagatacagggaactagaggtgaaatacgcttccttgactgatcttgtcaataaccaatctgtgatgatcactttgttggaagaacagtgcttgaggatattttcccgacaagacacccatgtgtctcccccacttgtccaggtggtgccacaacatattcctaacagccaacagtatactcctggtctgctgggaggtaacgagattcagagggatccaggttatcccagagatttaatgccaccacctgatctggcaacttctcccaccaaaagccctttcaagataccaccggtaactttcatcaatgaaggtgagttacctcttactgtaaaaagtgggagtatgaggtttatatttttatgccttatgaaacaatgctcataataaatgcttattcattttgcgatgttatatatgtacattaaaatttctattgttttttatta

SEQ ID NO: 90979 - DNA, 275 bp, Homo sapiens
gctgtcacattggaaggctataaagttagtgcaattatcctgtcattacctaaaaaaaggataggcaaactgcagactgtgggccaaatacccacaaactgctcctgtaaataaaattattggaacacatctaaactcactcatttaagtattgtctacagctgctttcttgtgacagcagtgttgattagttgtgcgagaatccatatgatccacaaagcctaaaatatttatcatctaaatatatacagaaaaagtttaccaatccctggcct

SEQ ID NO: 90980 - DNA, 405 bp, Homo sapiens
tcttcattcagcatagtaggccccaaatttgaaatgagaaagtacaacttttcctgttacttttccagttagaggcttctcttactagagactgcagtcaggtacttggattctgaaatggagttaatgtgacaactgctttggaatctcagtgctttggtactggatttaaagtaacttacagttgaaactgatttccaactgcaagaggtgacacaaaccctgacttttttggaaaatgttttaaatataaaacctgaagtgaaaaaggcttctaaggtaaaaaagattttaaaatatggtaagtgctttaaattagtaagtcggttttttaggtgggtgattcaactgctttctagttagtctggtcattttttattccagagatttcttaatatgtctact

SEQ ID NO: 90981 - DNA, 546 bp, Homo sapiens
ggtgtgatggtgcctgcctgtaatcctagctacttgggaggccgaggcaggaggattgcttgagctggggaggttgagtcttcaatgaactgtgattgtgctactgtactccagcctggtgaccgaaatgagtctctgtctcaaaaaagagtatacttggccaggcgcagtggctcacacctgtaatcccaacactctggggggccgaggcaggaggactgcttgagcccagaagttcaagaccagcctgcgcaacatggtaaaaccctgtctctacaaaaaaattaaaaagccaggtgtggtgttgtgtgcctgcagtccccgctacttgggagactgaggtgggagactcacccaaagcctggagattaaggctgcggtgagccaagatcacgctactgcactctagccggggcatcggcagtatccttatgactttttgtaatcccttcttttgctccttactaccctctctgtatccctaggaaaccattgtttcctttctgttgcttaagattagtttttattttctagaattttataaaa

SEQ ID NO: 90982 - DNA, 355 bp, Homo sapiens
tgagtcagggtctcactctgtcgcacaggctggagtgcagctgagcaagactctgtgtctctcaaataataataataatgatgttcgtaagacttgaactaatatcacagtcaattttttaaaatccagacttcgctaaaacctagactgagaatttatgcatcaatggtacaaataaatgaagttttaataatccaaagcaactcatattttccaaattatattaaaaacaataatggatgtttaagtatttcacatcacttacatctaaccaatgagccaaataaaataatgttttctacttaaactttgactttaaactattaaagggctgggcacagtggctcatgcctgt

SEQ ID NO: 90983 - DNA, 507 bp, Homo sapiens
agagtgtggggtggagctggggggtgccagacctggtcacggttaggggcctcttcccagcctcctcccggtttcccatctcacccgttcaggaccaaggcttttgacactcagctaacgtgggcaacttctcagagaactggggggagaggcatgcaggttaatcacaaagagatgcactctgtcctaacaaggtcatctgcacacccacgcatttaaccacaggacaaaggcactatgtgaaatgaaaaaaaaaaaaaaagatgacctggcactgcagcacaggaggcaggcgtccagaagcttgctcacaccctgcttagcccctgacttcagtctcccaggcctcagagaactagaaagaagccctatggtcagtctgccagcagaggagggttgctttctgagtccagccaccaccttggccatccctggggcctgaggactgccaggggaggaatggagagaggccaagggcagcctggaagttgacagagaggaatgcag

SEQ ID NO: 90984 - DNA, 305 bp, Homo sapiens
acaggcatgtaggctaatttttgtattagtagagacagggggtttcaccatgtaggccaggctgggctcgaactcctgagctcaggtgatccaccagccttggcctcccaaagtgttgggattgcaggtgtgagccaccgcgcctagccgagtgacagttttaaatacagatgtctcacaccaaagctaatatactcttcactctaaaatgattagggttatgttaaggggatgaaaaaaatgctgctcagtgctattaggaaggagcttatgtaagatgctatggactatttaaaattaattta

SEQ ID NO: 90985 - DNA, 441 bp, Homo sapiens
  misc_feature (19)..(19): n is a, c, g, or t
ttttttttgaaggtcgganagcatctttattgtggggagggagagcatcaggaaaaatagctaatgcatgccgggcttaatacctaagtgatgggttgataggtgcagcaaaccaccatggtacacgtttacctatgtaacaaacctgcacatcctgcacatgtactctggaacttaaataaatttttttttaaaaaaagaaatgcagatggataggagaatgattggttctgcctgaaagatgaggtaagtcttctcaaaaaagttaatatttcatcaaggctatgtcttttcgtgagttttattatacaatattcataacaatcctgtgaaatagatcttattcccatttttataatgaagatatcttaatttctgacaagcaacttgtccaaagttaatacatccatgaaatgcctagaatggctgtgcgatgctgaa

SEQ ID NO: 90986 - DNA, 528 bp, Homo sapiens
cagtagactaagtaggtaagaaaaaattatggtagagaaacttatgaaaaatccatctattaattttctttcctgtgaattagaaaaataccattgttcttttccagccaaaagaatatctccctctaggagccattaaatattttgaaaaggagtgacatggtgtggaatgtgttttaggagtcaggtggtagtgacatgtaggattagaggactggcaatgagtcagtaatgtggtgcagtggtccagatgtggtgaggatctgaaccttagtagcagcagcagtgaaaatagaatgaaaggaaatagagatccacaccaggccctctgtttctaaataggaaatagttaccaattattaaccagctttcatattgttaggatattacgggtctcaatggtcggttatctctggtctcaagtcctttcactctatttttagggaaaatgtgtttaaacccctattttaaggaaatgatagtttatagattatttataaattatagttaatttagaaaatagaaaaa

SEQ ID NO: 90987 - DNA, 268 bp, Homo sapiens
gccacggggatctgtggcccaggcccgtgcccccgggaggttaggaaaggaccgtctctcctgtctgagaccatgcccaaagcaggtttttgcttgggccaattttctactttagtcatggggcatttcagggttaaaatgccaccatctcatttaacccactccagaccttcattttctcacacgaaggtgatctgtgcaaggaagaggagattgcgcggatcgcccggaggctggacaagatggtgaccaagaagagcgcttcggg

SEQ ID NO: 90988 - DNA, 395 bp, Homo sapiens
atagttatttcccacatcccaaactggggcacaaatgatttgttttaatttaggaattgtgtgggaaatcttacaaaaggctcatgcagaagatgatataagctttttatctccagccagagtctctcccctgaactccagattcacatatccagctgcacctatatttggatgtctaatagatgtctcagacttcaaaagtttgaacccctgatctccgcctttgactctgcctcccttgtctgctttcttggcagtctttccatcttggttaatggcatccccataattccaggtgcgtggggacaaaatctctccttctttcagatctccttctctcctctcagtgcaccccgttggcttttcctccaagctatgcatgttcatgatccagc

SEQ ID NO: 90989 - DNA, 496 bp, Homo sapiens
tcccctcaaagagcttacagtcaaactgggaagaagatcagtagcaatcagatctacaatgagagtggagggtaattggtatagatatttactatgcaattttattcaacaaacatttattaaactctcactacacgcagggcagtatgttaggtgctggggatacaacaatgagttagacatagtccctgccctcagggatgtcacagtctagtgggagtggggggcatgagtcatagaaacagccaatataaacccattattcctgcctgaccctcccatgccaatccaaggaaaaagatatggtgaggccctctcagataggcagcagcttagagaagctcagccatctacaattagggacaacatccacctcaggtctggacacagaggatactccatagtagccttaatcccatattgatcccaacctcaaagtaatttccccagattttgccctaacagggtgtctgttcctagatcctttagggtgtga

SEQ ID NO: 90990 - DNA, 862 bp, Homo sapiens
gatctcatgatgattcagaccacagtctgggttaaagatgtcttgacctctgaggctagcataacatatatgagaatacaacttgcctatttccagaaaatctgtatatttttatagaataactttatttacaatttctatcatccaattactcactaggcattatttgtagtactttttttctctttgaaatctcataggatagtcacacttataaacattcccaatattcggattctagaagaaatgcaattcattaaaattttcctggcactgagagttaatctttagcagattgcatgaaaatactgaattcctggtaaggagatattttgttttaaaaataatgtgttttgatacgaatcagtgtattaactgataactaaaaagtactcttttttctatatatacatatttttttgaactcatattcacaatcaacatattcaatcagtgagttaagtctcattcctagctaccaaaattcctgggccacttttaaacactaaacatttcatttatcctctaagctaaaatggtgctgagttatttaaatctgaatgtaaaatgcattaaatcttagcttgtggtatataaacatttaattaatataaaactgcttgctataaactaagtaacatgtcatttggtgttaggtttttagtgaagttttagcttctcccaaatttttcaggaatgttatttgtaagacgtgtaacttttttgaagaactcttattttaaatgctcagacattggctttatgttcctctttgcattctcatattcttttattatacatctatactatgattgcaagattatataaaaatgccttgaataaatgatttcaagtgtcaata

SEQ ID NO: 90991 - DNA, 128 bp, Homo sapiens
gatcctcctgtcttagcctcctgaatagttgggatcataggtgtgtgtgaccatgtccggctaattttttaatcatgtttttgtagagataaggtcttgctatgttgcccaggctggtctttaactcc

SEQ ID NO: 90992 - DNA, 200 bp, Homo sapiens
agccctcatgatccggctgtgtttctctgagggggatgatggtccacgtatttcccccacatccccctaagacccagaacttttctgttcttcaaccccagcatactaagttgcatttctgggccacttttccattaccaattcctggctcataccccacctttcttcatccttggacatctggatctgcactacctctg

SEQ ID NO: 90993 - DNA, 602 bp, Homo sapiens
gtcttgaactcttgacctcaagtgatccattcaccttggcctcccaaagtgctggaattacaggtgtgagccaccgcacctggcctgtgtatttaccttgtatgctactacattgctgatttcatttattagttttttttttttaattcttttttaaaaaagaaaaaacagacacagtctcgctctcttgctctgtcgcccaggctggagtgcagtggcacaatcttggctcactgcaacctctgcctccagggttcaagtgattctcgtgcctcagcctcccaagtagctgggaccacaggtgcccaccaccatgcctggctaatttttgtatttttttgtagagatggggttttgccaggttttgccatgttggtgaggctggtctcgaactcctgacctcaagtgatctgcacacgtctgactcccaaagtgctgggattataggcacaagccaccatgcctggcctcatttattagttctaacgtgtgtgtgtgcacacacgctctttaggcatttctacttataagatcctatctgcaaatagagataattttacttctttcttaaaaaaaattcactggccgtcgttttccgtcgg

SEQ ID NO: 90994 - DNA, 544 bp, Homo sapiens
gtcttgaactcttgacctcaagtgatccattcaccttggcctcccaaagtgctggaattacaggtgtgagccaccgcacctggcctgtgtatttaccttgtatgctactacattgctgatttcatttattagttttttttttttaattcttttttaaaaacacaatcttggctcactgcaacctctgcctccagggttcaagtgattctcgtgcctcagcctcccaagtagctgggaccacaggtgcccaccaccatgcctggctaatttttgtatttttttgtagagatggggttttgccaggttttgccatgttggtgaggctggtctcgaactcctgacctcaagtgatctgcacacgtctgactcccaaagtgctgggattataggcacaagccaccatgcctggcctcatttattagttctaacgtgtgtgtgtgcacacacgctctttaggcatttctacttataagatcctatctgcaaatagagataattttacttctttcttaaaaaaaattcactggccgtcgttttccgtcgg

SEQ ID NO: 90995 - DNA, 488 bp, Homo sapiens
gggattataggcacaagccaccatgcctggcctcatttattagttctaacgtgtgtgtgtgcacacacgctctttaggcatttctacttataagatcctatctgcaaatagagataattttacttctttcttttcaattttgatgccttttatttccttttcttgcctaagtgtgccggttagaacttctagcactgtgttgcatagaagtaatgaatgcagacatccttgtcttgttcctaattttagaggaaaagctttcagttttcaccattgagtgtgttgtggctttttcatatatgaattttattatgttgaggtagttttctctattcttagtttgctgaatgtttttaatcatgaaagcgtgttgaattttgtcagtgctttttctccgttaactgaaaaaatcatacatttttggaaatggaaatgcagccacatataatggccagcctgggctctcctggtgcccacttgccccagcc

SEQ ID NO: 90996 - DNA, 613 bp, Homo sapiens
gggacagggtggagcggggaggcctgtgcaaagtgggaaagagctgccggtggcctgagccagggtgctggggctgcgggtggggaaaggaggccccagcacttcagacaaagaccaccccttcacccactggaccccaagccgcaaaagctggggaggtaggaagggtcactgtgagggcccagggcccctctcttcccatctcccttgtcctggtggccttcagtgtctcttccagttccaggagctgctgggaagctggccttcattgttggtgacagggcaaccatgggactaggaggtggcccatacacatggctggctggtcctgaggccacccaccttgttccaggacatgggcccgggcccggtgtgggggtagacgcagagggcagagggtagcccttggtactgtgggtccctcaaagaggagagtggggtgcagaaatgcctcagcatggctcatgcacacagcattctcccgtggggcagggttccctcatgcaacaggcctccctgtggccagcctctctgcctgtctctcgctgcgtccccccaaccccttgtgttctattggttcattgttaataaatatcaaatgaggtcacgctcc

SEQ ID NO: 90997 - DNA, 680 bp, Homo sapiens
cagagtaaaaatgtatgttaaattaagcttttttagaatttagcacattgcatgttgaagatgattaaactgtattctgcacttaattttagtaataatactgtagaataatgcaaataagtaattatgtgaatgtcattaggtaataatattttcaacctaagagaaagaagatacaagtgtgaaataaagaagtcaaattaccctaaattgttttttttgagacaaagtcttgctctgtcgcccaggctggagtgcagtagcacagtcttggctcactgcaacctctgcctcccgagttcaagcaattctcctgcctcagcctcccgagtagctgggattacaggcatgtaccagcacacttagctaattttttgtatttttagtagagacagggtttcaccatgttggccaggctggtctcgaactcctgatctcaggtgatccacctgcctcagccttccaaagtactgggattacaggcgtgagccacccacttgacctgaaaccctgatagtctttactttgaattgcaaatatcaatagaaacttgggacagagttttttgttttgttttgttttgtttaaagaaaaaaaaaatcctaactctggacactttaaacaggcctagaagcaatcacaatccagtagcaattaatgtccatccctgagtgtggtct

SEQ ID NO: 90998 - DNA, 181 bp, Homo sapiens
cttcttcccactctctcctccccactctcctactctgcacccaggaggggcatttgaaaatgcttatctgcccatgtcacacctctgctttcagtccagtgccttccaatggccaatgtggtctggctctgacaacttctccaaacacattctccatctccctgaccacaccagttgctca

SEQ ID NO: 90999 - DNA, 376 bp, Homo sapiens
gctgtgctgagaggccccagcccctggggttctctcatagaaacaactggaaagaaaggaaatgccttgggcagcagcagcagcagctgtcttctgattctgctttccgccctgccttccttaccaagagaaagtacagacacggacggcttgagtcacttaggcacttaggagttgtttttcacacgtgtggtgttttcgtcaccattactattgtgggaaagaagacaactcaggcatcgtttcgtattcactcatctgtgtgggtgacatgtgggttttggctcatttctgcatatttgtgtgcaaaggagagttttttagtaaacagtcccattacttagctgttcttgtaactctgaaaacccaactgaac

SEQ ID NO: 91000 - DNA, 262 bp, Homo sapiens
tatttcatcttgatttccaatgattgtttttaagtctttatgtaaaattaatagaaggaggtaatttacaggtcctgttaatgaatttgaatgcaaaatactgtgtgtattattgttaattgactttaataatagtgtcatacattatttaaattgaatttatattttatttcatatatgtgtatgtttgggggacatttttaataacttacatttgagtgaaaatgcaaaaatatttcttccaataaaaatgttgccagtt

SEQ ID NO: 91001 - DNA, 240 bp, Homo sapiens
gacagattataaaacacaaaggcccctctaaggcccttcggatgtgttccagcaatatgcagcagccccccacccccttttttatttcccctgtgacagggtctctctctgttgcccagtctagagtgcagtggcacaatcttgtctcacttcaggcttgacttcccgggcttaagctatcctcccatctcagcctctcgagtagctgggatcataggtatgtgccaccatgcctggcta

SEQ ID NO: 91002 - DNA, 389 bp, Homo sapiens
gagatgaatgcgttccctaggtggttcttgtgtgtataaaagaaaatttattaaggaaacccagagacctgagttgtagttgtgaatttgataatatcaaatactacagaaatagaagttttagtccttactcctgtttccagattcctttgttcttaagtctgcttcttctcctaggttttctttaactgtttcagtaatttcttaagcaagaggttggcaaagggcacaggtttggggaagcagtggtttccaaagattctgtagcatagagtatgagaaaacagaattgtagtgtgagcaggtgtcttaaatcatgtagcaactcacattgcttgcataagacttgggtaccagtgcaactcttgatatccttgattagagtgttg

SEQ ID NO: 91003 - DNA, 444 bp, Homo sapiens
cccaggcgaggacagcgtctggggctgcgagggctgtgtgcccgggaggaggagcggcgggggcgggctcggggacggggaatcccgttggatggcggtgtgggccggtgggcgggagccccagcgcccaaagggcgcgggagggcggtggcacctgcgggggcctttagcgaggtggactctggggacctggagctgtgcttggggagggctagagaccggggctgatcttgcgatggctttcggggatgttgaggaggggtagcagtaaaaacaaggccgggactagggtgaggtgagtaaggctcccaaggcacaaagtgtaaaggagcactgactcagggtcgcgcaagtgcagtgagcgcctcctcacgtgcgtcctgggtgcctcggtcgcctcaccccaggcctggccctgagcaagaatctccttcactccagact

SEQ ID NO: 91004 - DNA, 164 bp, Homo sapiens
cctgctattttgttttattggaacaaaagcagttaagacaatgaatttacttctaagtatagctttggttaaattgtagacactgatatgtaatgctgtctttctcattgttttagaaacctgctatttaaaaatctttttaatttattttgtgagacaagatc

SEQ ID NO: 91005 - DNA, 234 bp, Homo sapiens
taataaatggcattaaaataaccccattttaaaatattgaggtataatttacatacattaaaatgcatcataggtgttccatttgacaaaatagatcacattttctttactcctgaaaatttccttgtgctcctttccagtcagttctcctcttcccagtagccactttgtggtataatcccaggttcccaggttaatgaaattatttctaactgtgtttttaatacattcaca

SEQ ID NO: 91006 - DNA, 684 bp, Homo sapiens
caagccaccattgtctcttgtctggacaactacgagagcctcatatcttcccctgtccctgtccactttattccctgcaggccaagtgggggaggacagtcttcatctgggtgctgagcagggcttggagaggatgagggtatgggaggcggagtgttaaagtgcatgtatgggccaggtgcagtggctcacacctgtaatcccagcactttgggagactgaggtgggtggatcacctaaggtcaggagtttgagaccagcctggccaacatggtgaaaccctgtctccattaaaaatacaaaattaggctcttgctacttccttcttcccgctgccgggaacacaagcaaaacgttgagggctgcagcagccatctttgaccatgaagtaaccttaagaaaggaagccattctccctctctccttctcgcgtcatagctagctccagagaagagaaaaggagggagaggagggagggagaggagaagaggagaagaggcgagggaacgagagagggaagaggggggcgggaaggagggagaagagaagagaaaagaaaagaaaagagaaagaaaagagacagaaagaaagagaagacgagagaagaaccagaagcagaaagaaacagagaaaaacagaagaaggagaaaagaaaagagagaaaaagcaagagagaagagagac

SEQ ID NO: 91007 - DNA, 358 bp, Homo sapiens
taataccagcttctcaggaggctgaggcaggaaaatcgcttaaaactgggtggcagaggttgcagtgatcgtgccactgcactccagcctgggagacagagcaagactccgtcttgcaggaaaaacaaaacaaaacaaaacaaaaaaactgaaaacaatcccaaatgccctagcctatagaagacagattaaagaaactatagtttctgccaacgctggaatactatgcagctataaaacaaaacaagagcaagaaaaaaataaggaaaaactgtgtaatatgttatcaaatgtataaaaaagagaaaataaaagaatttttttttgtatatgcatagtctatttttggaagcataaa

SEQ ID NO: 91008 - DNA, 294 bp, Homo sapiens
tgcaatctccctagggcatccaactgctgatcccgcagtcttctcacgggttcccttgccccccagcacccctgcaatcaccctaccctaaggtttcctcctgctgaccatgcgatgttcttagccgttccttctgaaatcgctgcagtctgcttagatgttccctctgccacacgctcagggctgtcagatgttccttccaccagacactccatctcgtcggatgatctgccacgcgttcaatcctgtcaggtgtccctctcagtcacacgtgtggagcggggcccgagaggg

SEQ ID NO: 91009 - DNA, 532 bp, Homo sapiens
acaccaggcttgagtcagttttggccacatcccgccaaagctctccttccctgcgtggtttgaagggcctctagggttggggaacttgctgagacccacaggccaggtatatattcctcaagctgcttgcagggaggctcagagacagtaggaatgcctttcctgctcctggcctatcagtgcatattggccaggggaatttaatagaaccagagcaaatggaattgtattttaaactcactgggcagattccccaaagtgcttacatgtgtgggtgtaggggtggatttgaattccagctccaccactttttacctcaaagacttgcacgagctacctttctgcaccgccttctcatcagccctaaataaagaaactaacatgaagccctgcccaaggagagtctgagctcagactcgcctaaccctgcccccacctgatggtttgtctctacctgccctggtagctgaagaaaaaagacataatcttttggaagttctgtggtcctgtccattgcctaagaaacccgagt

SEQ ID NO: 91010 - DNA, 489 bp, Homo sapiens
agtcaaaagacacttatattttggactgaatgaaagtgaaaatacaacatatcaaaatctgtgggaggctgctaacacatcatttagtgggaaatttatagcactaaatgcctatattagaaaataataaaggtctgctgggtgcagtggctcttgcctgtaatcccaacactttgggaggccaaagtgttgagtccaggaattagcaatcagcctggccaacacagagcataaagcatacaaaaaatgctttaaaaattagctgggcatggtgacatgcgcctgtagtctcagctactcaggaggctgagatgggaggatcgctttagcccaggaggttgaggctacagtgagctgtactccagtttgggtaacagagcaagaacctgtctcaaaagaaaaaagaagaaaagaaaataatcacatcttaaatcagtgagtccaactttccttttacaaaactagaataagaagagatattaaatttaa

SEQ ID NO: 91011 - DNA, 394 bp, Homo sapiens
gtgggtggggactctgcccggccgcccggagggtggtcccgcggcaggtggccggcccagggactctgctgccatccccgcccggtggccgccctgacctagggcgcctggctctccgcttgtccctagaacccgggacgcgccgcctgcacctctcgtctgggtccccaagattgctttgaggaagtctcccctaggtgggcttccttgtgacccagtgtggcctggaaaggccgggttcctcaagccctccacatggtttggaatgagaggaagttcttccgcctttagcaagacaccgtattctcagggtgttcctttctgcgtagtagaaaacttcccaggcatgggcaggtcagagtcattctaaaacctgcgcgtacacagagcggca

SEQ ID NO: 91012 - DNA, 847 bp, Homo sapiens
tatacacactacttgggttaacagttctgagacaataaaagaaagacacaatcactgtgttcagttcagttgcttcaaatgtaaaaaaaaaaaggctgtataaaagtgaatatcaggttagtagtctgaaatattgcctattgatctaatcaaaagagaacattcaaaatgaatgtagtccaggtttatgtaatatttagaacaagtcaaatgcttagtacttttgtggtaaaagttttatgattcttgaatactaatggcagaaaagtcaaggactgcaatgataaagtcgaaataaaacgtgaaaccaagtggaattgctagaatttgagtcattaggaatgaaggaaaatcagagcagaaagaacagtgtaatgatttaataggaatctttgcttcctatgtcagtccaagatttatgtgaacaagagtttttgagaactcatgatggaaaggagaaaaaggtgaaaaaggattttaagccttagctcgttgattttagatttgagatttgttaaacttctcacagtgagtaataaaaaattccataaaaagaatatctgttggccaggcgcggtggctcacgcctataatcccagcactttgggaggccgaggcaggcggatcacaagatcaggagatcgagaccatcctggctaacagggtgaaacccgcctctactaaaaatacaaaaaaaattagccgggcgtggtggcaggcgcctgtagtcccagctactgggaggctgaggcaggagaatggcgtgaacgtgggaggcagagcttgcagtgagccgagattgtgccactgcaatccagcctgggcgacggagtgagagtctgtctca

SEQ ID NO: 91013 - DNA, 890 bp, Homo sapiens
cctcctagccctcttacccctcttagccctctttacatatttgtgttcttggccccattaaaactagtcagtagtcctttggcaaagatatagtcaacaagagaactgggtatgagtccaggcattactcctgttcatagttgtggatgcatgtgtctgagccagactgtctcaactggagtctcttgggttatagcagtaaacccgtgtattccatgaaaccactgggcccatcatcaaaaggtttccacttgtggtgccacagttgcttattactgagtttgggttccaagatgactggcaacttctgaaataatctcattgaaggaaagagtttcattttttttttaaaagagtttgctggaggaaaagaagcatgttaaatgtttttaagcagctaaaagtcctagatggaagcatatcaggatgtgtcggtgcttggctcttagtgaatgcactaaaattcttattgataaatgttgaataaacacacacaaaaaagtatcagagaaagagaaaaaccctacaatggcaatagaggtgtgtgacagttattgctatcaattttacataatatctcatttaaaaacaacctaattatgcattgcctgtgaaaataaaaggataaaataagattttgtacatactgtaagaatacagttgtgctgtatttttatggattcatcaaggagtaaaatgttctgctttagtaaattatataggtaactgaagtgttattcctttaaagagcaaaataatttatcaccatgtttggtggaaaatttctaagtatttattacatgcctaggggttagccaacaagatataccaagcatgaaaacctgtaaaacttaataaaatgctaaaatatgaacatcacactatggaga

SEQ ID NO: 91014 - DNA, 713 bp, Homo sapiens
aatcgctaggagagcgcggtaatcggccgagactatttatttaactttgcatctgctgccacaaaaaagataactgaatcagttgctgaaacagcacaaacaataaagaaatccgtagaagaaggaaaaatagatggcatcattgacaagacaattataggagattttcagaaggaacagaaaaaatttgttgaagagcaacatacaaagaagtcagaagcagctgtgcccccatgggttgacactaacgatgaagaaacaattcaacaacaaattttggccttatcagctgacaagaggaatttccttcgtgaccctccggctggcgtgcaatttaatttcgactttgatcagatgtaccccgtggccctggtcatgctccaggaggatgagctgctaagcaagatgagatttgccctcgttcctaaacttgtgaaggaagaagtgttctggaggaactacttttaccgcgtctccctgattaagcagtcagcccagctcacggccctggctgcccaacagcaggccgcagggaaggaggagaagagcaatggcagagagcaagatttgccgctggcagaggcggcacggcccaaaagccccccgtgggtacccattccccgctaaaactccggaggggggggaaaatctcaagacccgggtgtccggtgtcggaagagctcaagggctggcccaacagagaaactcgggac

SEQ ID NO: 91015 - DNA, 2255 bp, Homo sapiens
tgcggtgttcctccgacttccggacatctccctgggagtcgcgcagagtggagtcaaaggcaaccagtgctcgctgcggtctctggggatcgggaccgcggcggcggcccgcgagcgggatgttccggggcttgagcagttggttgggcttgcagcagccggtggcaggcggtgggcagcccaatggagatgctccacccgagcagccgtccgagacggtggctgagtctgcggaggaggagctgcagcaagcgggagaccaggagctcctccaccaggccaaagacttcggcaactatttatttaactttgcatctgctgccacaaaaaagataactgaatcagttgctgaaacagcacaaacaataaagaaatccgtagaagaaggaaaaatagatggcatcattgacaagacaattataggagattttcagaaggaacagaaaaaatttgttgaagagcaacatacaaagaagtcagaagcagctgtgcccccatgggttgacactaacgatgaagaaacaattcaacaacaaattttggccttatcagctgacaagaggaatttccttcgtgaccctccggctggcgtgcaatttaatttcgactttgatcagatgtaccccgtggccctggtcatgctccaggaggatgagctgctaagcaagatgagatttgccctcgttcctaaacttgtgaaggaagaagtgttctggaggaactacttttaccgcgtctccctgattaagcagtcagcccagctcacggccctggctgcccaacagcaggccgcagggaaggaggagaagagcaatggcagagagcaagatttgccgctggcagaggcagtacggcccaaaacgccacccgttgtaatcaaatctcagcttaaaactcaagaggatgaggaagaaatttctactagcccaggtgtttctgagtttgtcagtgatgccttcgatgcctgtaacctaaatcaggaagatctaaggaaagaaatggagcaactagtgcttgacaaaaagcaagaggagacagccgtactggaagaggattctgcagattgggaaaaagaactgcagcaggaacttcaagaatatgaagtggtgacagaatctgaaaaacgagatgaaaactgggataaggaaatagagaaaatgcttcaagaggaaaattagctgttcctgaaatagaagaataatccttaacagtctgcaaactgacattaaattctagatgttgacaattactgaatcagaaggcatgaaagagtataattttatgaaattcaaaattattcttttttcaagttgaaacttgcctcttctactttaaaaaagtatatagaacagttacttctaataatcagaaagagatgttttatagaacatttctttaatataaagttagagatgtcttcataggcagtatggctatctttgccacagaaacataagtaaaattttagagttctgttttccatgaggtcaaaaatataatttattcctcagtcatggttttctaaatatctgtactccacattccattttaattgatatgagggtgttaaagtacctacttaatgggttgattactatcaaaatgaccaaattataccaaagaacttaagaggaagcactttcagaactattcacttgccaggtattttctaaaattccacctgaaagccaaaagataaaataaataagttgattttaatgatataagcatcacacaattttacattaagaaatactgtgcaggccatgcgtggtggctcaggcctgtaatcccagcactttgggaggccgaggtgggcagatcaccggaggtcaggagttcgagaccagccttgccaacatagtgaaaccctgtctctactaaaaatacaaaaattagccgggcatggtggcaggcacctgtaatcccagctactagggaggcttttgaacccaggaggcagaggttgcagcgagctgagatcgcgccactgcactccagcctgggtgatagagtgagattcagtctcaaaaaaaaaaaaaaaaaaaaaagctgtgcgaaaatatttgtttttctctggggccttttctttcttttctttttaaactataccagaaattttacatcacagtttttatacaaagtgggaccttccatactttttgtattacaataaccttcagaagcccattccccttaaagtctgttgttcttgttttaatcatcaccacatataaatgttttagctttgtctt

SEQ ID NO: 91016 - DNA, 2337 bp, Homo sapiens
tgcggtgttcctccgacttccggacatctccctgggagtcgcgcagagtggagtcaaaggcaaccagtgctcgctgcggtctctggggatcgggaccgcggcggcggcccgcgagcgggatgttccggggcttgagcagttggttgggcttgcagcagccggtggcaggcggtgggcagcccaatggagatgctccacccgagcagccgtccgagacggtggctgagtctgcggaggaggagctgcagcaagcgggagaccaggagctcctccaccaggccaaagacttcggcaactatttatttaactttgcatctgctgccacaaaaaagataactgaatcagttgctgaaacagcacaaacaataaagaaatccgtagaagaaggaaaaatagatggcatcattgacaagacaattataggagattttcagaaggaacagaaaaaatttgttgaagagcaacatacaaagaagtcagaagcagctgtgcccccatgggttgacactaacgatgaagaaacaattcaacaacaaattttggccttatcagctgacaagaggaatttccttcgtgaccctccggctggcgtgcaatttaatttcgactttgatcagatgtaccccgtggccctggtcatgctccaggaggatgagctgctaagcaagatgagatttgccctcgttcctaaacttgtgaaggaagaagtgttctggaggaactacttttaccgcgtctccctgattaagcagtcagcccagctcacggccctggctgcccaacagcaggccgcagggaaggaggagaagagcaatggcagagagcaagatttgccgctggcagaggcagtacggcccaaaacgccacccgttgtaatcaaatctcagcttaaaactcaagaggatgaggaagaaatttctactagcccaggtgtttctgagtttgtcagtgatgccttcgatgcctgtaacctaaatcaggaagatctaaggaaagaaatggagcaactagtgcttgacaaaaagcaagaggagacagccgtactggaagaggattctgcagattgggaaaaagaactgcagcaggaacttcaagaatatgaagtggtgacagaatctgaaaaacgagatgaaaactgggataaggaaatagagaaaatgcttcaagaggaaaattagctgttcctgaaatagaagaataatccttaacagtctgcaaactgacattaaattctagatgttgacaattactgaatcagaaggcatgaaagagtataattttatgaaattcaaaattattcttttttcaagttgaaacttgcctcttctactttaaaaaagtatatagaacagttacttctaataatcagaaagagatgttttatagaacatttctttaatataaagttagagatgtcttcataggcagtatggctatctttgccacagaaacataagtaaaattttagagttctgttttccatgaggtcaaaaatataatttattcctcagtcatggttttctaaatatctgtactccacattccattttaattgatatgagggtgttaaagtacctacttaatgggttgattactatcaaaatgaccaaattataccaaagaacttaagaggaagcactttcagaactattcacttgccaggtattttctaaaattccacctgaaagccaaaagataaaataaataagttgattttaatgatataagcatcacagtttttatacaaagtgggaccttccatactttttgtattacaataacctttcagtctcaaaaaaaacaacaaaaaaaaaccgcttggtggcaaaacattttgtggttttcctcggggggccttcctttcctttctcttttaaaatttatcccaagaatttttcacttccaccggttttttttcccacagggtgagacactccggttctccaaaaattgatttgatctgaatttgactgctttgattgaacgaaccgaccaggtggcttcacttgtccggaaaacttcttagctattggctccccaaaaccttttcatggttttaaaagacgcttataacttaagggggatacaactcacgtgtcttttcagcaacattccttttgtgttgtgggcccataaacagagcgagatcctgtggaagtatgtcaccagacaactggtttgatcaggtacccggcatattggcttctttttgcccacgtccatggctcggttacggaaccgtttcgagactggccacaagtgcctggcccgttcagtgtccacgcgcgaccattgggcgtttaaggcaaccgcaccgacgtcgtggttatagaaccg

SEQ ID NO: 91017 - DNA, 3408 bp, Homo sapiens
gctagtacgaggcctgggttaatcggccgaggattggttgggcttgcagcagccggtggcaggcggtgggcagcccaatggagatgctccacccgagcagccgtccgagacggtggctgagtctgcggaggaggagctgcagcaagcgggagaccaggagctcctccaccaggccaaagacttcggcaactatttatttaactttgcatctgctgccacaaaaaagataactgaatcagttgctgaaacagcacaaacaataaagaaatccgtagaagaaggaaaaatagatggcatcattgacaagacaattataggagattttcagaaggaacagaaaaaatttgttgaagagcaacatacaaagaagtcagaagcagctgtgcccccatgggttgacactaacgatgaagaaacaattcaacaacaaattttggccttatcagctgacaagaggaatttccttcgtgaccctccggctggcgtgcaatttaatttcgactttgatcagatgtaccccgtggccctggtcatgctccaggaggatgagctgctaagcaagatgagatttgccctcgttcctaaacttgtgaaggaagaagtgttctggaggaactacttttaccgcgtctccctgattaagcagtcagcccagctcacggccctggctgcccaacagcaggccgcagggaaggaggagaagagcaatggcagagagcaagatttgccgctggcagaggcagtacggcccaaaacgccacccgttgtaatcaaatctcagcttaaaactcaagaggatgaggaagaaatttctactagcccaggtgtttctgagtttgtcagtgatgccttcgatgcctgtaacctaaatcaggaagatctaaggaaagaaatggagcaactagtgcttgacaaaaagcaagaggagacagccgtactggaagaggattctgcagattgggaaaaagaactgcagcaggaacttcaagaatatgaagtggtgacagaatctgaaaaacgagatgaaaactgggataaggaaatagagaaaatgcttcaagaggaaaattagctgttcctgaaatagaagaataatccttaacagtctgcaaactgacattaaattctagatgttgacaattactgaatcagaaggcatgaaagagtataattttatgaaattcaaaattattcttttttcaagttgaaacttgcctcttctactttaaaaaagtatatagaacagttacttctaataatcagaaagagatgttttatagaacatttctttaatataaagttagagatgtcttcataggcagtatggctatctttgccacagaaacataagtaaaattttagagttctgttttccatgaggtcaaaaatataatttattcctcagtcatggttttctaaatatctgtactccacattccattttaattgatatgagggtgttaaagtacctacttaatgggttgattactatcaaaatgaccaaattataccaaagaacttaagaggaagcactttcagaactattcacttgccaggtattttctaaaattccacctgaaagccaaaagataaaataaataagttgattttaatgatataagcatcacacaattttacattaagaaatactgtgcaggccatgcgtggtggctcaggcctgtaatcccagcactttgggaggccgaggtgggcagatcaccggaggtcaggagttcgagaccagccttgccaacatagtgaaaccctgtctctactaaaaatacaaaaattagccgggcatggtggcaggcacctgtaatcccagctactagggaggcttttgaacccaggaggcagaggttgcagcgagctgagatcgcgccactgcactccagcctgggtgatagagtgagattcagtctcaaaaaaaaaaaaaaaaaaaaaagctgtgcgaaaatatttgtttttctctggggccttttctttcttttctttttaaactataccagaaattttacatcacagtttttatacaaagtgggaccttccatactttttgtattacaataaccttcagaagcccattccccttaaagtctgttgttcttgttttaatcatcaccacatataaatgttttagctttgtcttaaactgtgagtcttcataaaattgtgttcctccgagttcaccttctaggactttattgattaatccttctctttctgctataccagcagacacatattcatagaatatgattatttttaaagaacaaggtgaggaggctgaggcaggagaattgcttgaacctgggagatggaggttgcagtgagctgagatcacgccactgcactccagcctgggtgacagagtgagagactccgtctcaaaaatgaatgaatgaatgaatgaatgaatgaacgaacgaacaaggtggtttaatgtcagaaaacttcctaagcatttgctccccaaacctttcatgtttttcaagaagcctttattacataaaggggaatagaattaaaatgtttctttataagaaaaatatacatatttgtgttcttggccccattaaaactagtcagtagtcctttggcaaagatatagtcaacaagagaactgggtatgagtccaggcattactcctgttcatagttgtggatgcatgtgtctgagccagactgtctcaactggagtctcttgggttatagcagtaaacccgtgtattccatgaaaccactgggcccatcatcaaaaggtttccacttgtggtgccacagttgcttattactgagtttgggttccaagatgactggcaacttctgaaataatctcattgaaggaaagagtttcattttttttttaaaagagtttgctggaggaaaagaagcatgttaaatgtttttaagcagctaaaagtcctagatggaagcatatcaggatgtgtcggtgcttggctcttagtgaatgcactaaaattcttattgataaatgttgaataaacacacacaaaaaagtatcagagaaagagaaaaaccctacaatggcaatagaggtgtgtgacagttattgctatcaattttacataatatctcatttaaaaacaacctaattatgcattgcctgtgaaaataaaaggataaaataagattttgtacatactgtaagaatacagttgtgctgtatttttatggattcatcaaggagtaaaatgttctgctttagtaaattatataggtaactgaagtgttattcctttaaagagcaaaataatttatcaccatgtttggtggaaaatttctaagtatttattacatgcctaggggttagccaacaagatataccaagcatgaaaacctgtaaaacttaataaaatgctaaaatatgaacatcacactatggaga

SEQ ID NO: 91018 - DNA, 1752 bp, Homo sapiens
tgcggtgttcctccgacttccggacatctccctgggagtcgcgcagagtggagtcaaaggcaaccagtgctcgctgcggtctctggggatcgggaccgcggcggcggcccgcgagcgggatgttccggggcttgagcagttggttgggcttgcagcagccggtggcaggcggtgggcagcccaatggagatgctccacccgagcagccgtccgagacggtggctgagtctgcggaggaggagctgcagcaagcgggagaccaggagctcctccaccaggccaaagacttcggcaactatttatttaactttgcatctgctgccacaaaaaagataactgaatcagttgctgaaacagcacaaacaataaagaaatccgtagaagaaggaaaaatagatggcatcattgacaagacaattataggagattttcagaaggaacagaaaaaatttgttgaagagcaacatacaaagaagtcagaagcagctgtgcccccatgggttgacactaacgatgaagaaacaattcaacaacaaattttggccttatcagctgacaagaggaatttccttcgtgaccctccggctggcgtgcaatttaatttcgactttgatcagatgtaccccgtggccctggtcatgctccaggaggatgagctgctaagcaagatgagatttgccctcgttcctaaacttgtgaaggaagaagtgttctggaggaactacttttaccgcgtctccctgattaagcagtcagcccagctcacggccctggctgcccaacagcaggccgcagggaaggaggagaagagcaatggcagagagcaagatttgccgctggcagaggcagtacggcccaaaacgccacccgttgtaatcaaatctcagcttaaaactcaagaggatgaggaagaaatttctactagcccaggtgtttctgagtttgtcagtgatgccttcgatgcctgtaacctaaatcaggaagatctaaggaaagaaatggagcaactagtgcttgacaaaaagcaagaggagacagccgtactggaagaggattctgcagattgggaaaaagaactgcagcaggaacttcaagaatatgaagtggtgacagaatctgaaaaacgagatgaaaactgggataaggaaatagagaaaatgcttcaagaggaaaattagctgttcctgaaatagaagaataatccttaacagtctgcaaactgacattaaattctagatgttgacaattaaaaaaaaaaaaaaaaaaaaaaaaaaagaagaaagaaaaaaagagaaaaaagaaaaaaagagaaaaaaaaaaaaagagagaggaaaaaaaacaatgaaacctgaaacagagaacgaaaaaagagaacaggaggtcggcgacacagaacataaacaagcgaagaggcagacaagaacaaaaacaaagcagaaagaagaggaaacacacaaacaacacaaaaaggagaagacgacgcgggaggggggagagagaaaaggaagaggagagggggggggagagaacgacaggagagaagagaagaagagagaacgaagaaaaaagcattgtgaagtggggggcataagaaaaagacgaagaggtgcaatcctacaagggtataatatgtttaggcgggcggatgaggtatagataaagtagtgagagtcagtaatcgtgttgtgatagcgtaggggcttggaggatcatggagggggagcgaaggtgctgaaggggaggtgcgacgaa

SEQ ID NO: 91019 - DNA, 2787 bp, Homo sapiens
ccttaagaagaaactgaaacgtatgatttgagaatacttggccctggctgcccaacagcaggccgcagggaaggaggagaagagcaatggcagagagcaagatttgccgctggcagaggcagtacggcccaaaacgccacccgttgtaatcaaatctcagcttaaaactcaagaggatgaggaagaaatttctactagcccaggtgtttctgagtttgtcagtgatgccttcgatgcctgtaacctaaatcaggaagatctaaggaaagaaatggagcaactagtgcttgacaaaaagcaagaggagacagccgtactggaagaggattctgcagattgggaaaaagaactgcagcaggaacttcaagaatatgaagtggtgacagaatctgaaaaacgagatgaaaactgggataaggaaatagagaaaatgcttcaagaggaaaattagctgttcctgaaatagaagaataatccttaacagtctgcaaactgacattaaattctagatgttgacaattactgaatcagaaggcatgaaagagtataattttatgaaattcaaaattattcttttttcaagttgaaacttgcctcttctactttaaaaaagtatatagaacagttacttctaataatcagaaagagatgttttatagaacatttctttaatataaagttagagatgtcttcataggcagtatggctatctttgccacagaaacataagtaaaattttagagttctgttttccatgaggtcaaaaatataatttattcctcagtcatggttttctaaatatctgtactccacattccattttaattgatatgagggtgttaaagtacctacttaatgggttgattactatcaaaatgaccaaattataccaaagaacttaagaggaagcactttcagaactattcacttgccaggtattttctaaaattccacctgaaagccaaaagataaaataaataagttgattttaatgatataagcatcacacaattttacattaagaaatactgtgcaggccatgcgtggtggctcaggcctgtaatcccagcactttgggaggccgaggtgggcagatcaccggaggtcaggagttcgagaccagccttgccaacatagtgaaaccctgtctctactaaaaatacaaaaattagccgggcatggtggcaggcacctgtaatcccagctactagggaggcttttgaacccaggaggcagaggttgcagcgagctgagatcgcgccactgcactccagcctgggtgatagagtgagattcagtctcaaaaaaaaaaaaaaaaaaaaaagctgtgcgaaaatatttgtttttctctggggccttttctttcttttctttttaaactataccagaaattttacatcacagtttttatacaaagtgggaccttccatactttttgtattacaataaccttcagaagcccattccccttaaagtctgttgttcttgttttaatcatcaccacatataaatgttttagctttgtcttaaactgtgagtcttcataaaattgtgttcctccgagttcaccttctaggactttattgattaatccttctctttctgctataccagcagacacatattcatagaatatgattatttttaaagaacaaggtgaggaggctgaggcaggagaattgcttgaacctgggagatggaggttgcagtgagctgagatcacgccactgcactccagcctgggtgacagagtgagagactccgtctcaaaaatgaatgaatgaatgaatgaatgaatgaacgaacgaacaaggtggtttaatgtcagaaaacttcctaagcatttgctccccaaacctttcatgtttttcaagaagcctttattacataaaggggaatagaattaaaatgtttctttataagaaaaatatacatatttgtgttcttggccccattaaaactagtcagtagtcctttggcaaagatatagtcaacaagagaactgggtatgagtccaggcattactcctgttcatagttgtggatgcatgtgtctgagccagactgtctcaactggagtctcttgggttatagcagtaaacccgtgtattccatgaaaccactgggcccatcatcaaaaggtttccacttgtggtgccacagttgcttattactgagtttgggttccaagatgactggcaacttctgaaataatctcattgaaggaaagagtttcattttttttttaaaagagtttgctggaggaaaagaagcatgttaaatgtttttaagcagctaaaagtcctagatggaagcatatcaggatgtgtcggtgcttggctcttagtgaatgcactaaaattcttattgataaatgttgaataaacacacacaaaaaagtatcagagaaagagaaaaaccctacaatggcaatagaggtgtgtgacagttattgctatcaattttacataatatctcatttaaaaacaacctaattatgcattgcctgtgaaaataaaaggataaaataagattttgtacatactgtaagaatacagttgtgctgtatttttatggattcatcaaggagtaaaatgttctgctttagtaaattatataggtaactgaagtgttattcctttaaagagcaaaataatttatcaccatgtttggtggaaaatttctaagtatttattacatgcctaggggttagccaacaagatataccaagcatgaaaacctgtaaaacttaataaaatgctaaaatatgaacatcacactatggaga

SEQ ID NO: 91020 - DNA, 2760 bp, Homo sapiens
tgcggtgttcctccgacttccggacatctccctgggagtcgcgcagagtggagtcaaaggcaaccagtgctcgctgcggtctctggggatcgggaccgcggcggcggcccgcgagcgggatgttccggggcttgagcagttggttgggcttgcagcagccggtggcaggcggtgggcagcccaatggagatgctccacccgagcagccgtccgagacggtggctgagtctgcggaggaggagctgcagcaagcgggagaccaggagctcctccaccaggccaaagacttcggcaactatttatttaactttgcatctgctgccacaaaaaagataactgaatcagttgctgaaacagcacaaacaataaagaaatccgtagaagaaggaaaaatagatggcatcattgacaagacaattataggagattttcagaaggaacagaaaaaatttgttgaagagcaaactgacattaaattctagatgttgacaattactgaatcagaaggcatgaaagagtataattttatgaaattcaaaattattcttttttcaagttgaaacttgcctcttctactttaaaaaagtatatagaacagttacttctaataatcagaaagagatgttttatagaacatttctttaatataaagttagagatgtcttcataggcagtatggctatctttgccacagaaacataagtaaaattttagagttctgttttccatgaggtcaaaaatataatttattcctcagtcatggttttctaaatatctgtactccacattccattttaattgatatgagggtgttaaagtacctacttaatgggttgattactatcaaaatgaccaaattataccaaagaacttaagaggaagcactttcagaactattcacttgccaggtattttctaaaattccacctgaaagccaaaagataaaataaataagttgattttaatgatataagcatcacacaattttacattaagaaatactgtgcaggccatgcgtggtggctcaggcctgtaatcccagcactttgggaggccgaggtgggcagatcaccggaggtcaggagttcgagaccagccttgccaacatagtgaaaccctgtctctactaaaaatacaaaaattagccgggcatggtggcaggcacctgtaatcccagctactagggaggcttttgaacccaggaggcagaggttgcagcgagctgagatcgcgccactgcactccagcctgggtgatagagtgagattcagtctcaaaaaaaaaaaaaaaaaaaaaagctgtgcgaaaatatttgtttttctctggggccttttctttcttttctttttaaactataccagaaattttacatcacagtttttatacaaagtgggaccttccatactttttgtattacaataaccttcagaagcccattccccttaaagtctgttgttcttgttttaatcatcaccacatataaatgttttagctttgtcttaaactgtgagtcttcataaaattgtgttcctccgagttcaccttctaggactttattgattaatccttctctttctgctataccagcagacacatattcatagaatatgattatttttaaagaacaaggtgaggaggctgaggcaggagaattgcttgaacctgggagatggaggttgcagtgagctgagatcacgccactgcactccagcctgggtgacagagtgagagactccgtctcaaaaatgaatgaatgaatgaatgaatgaatgaacgaacgaacaaggtggtttaatgtcagaaaacttcctaagcatttgctccccaaacctttcatgtttttcaagaagcctttattacataaaggggaatagaattaaaatgtttctttataagaaaaatatacatatttgtgttcttggccccattaaaactagtcagtagtcctttggcaaagatatagtcaacaagagaactgggtatgagtccaggcattactcctgttcatagttgtggatgcatgtgtctgagccagactgtctcaactggagtctcttgggttatagcagtaaacccgtgtattccatgaaaccactgggcccatcatcaaaaggtttccacttgtggtgccacagttgcttattactgagtttgggttccaagatgactggcaacttctgaaataatctcattgaaggaaagagtttcattttttttttaaaagagtttgctggaggaaaagaagcatgttaaatgtttttaagcagctaaaagtcctagatggaagcatatcaggatgtgtcggtgcttggctcttagtgaatgcactaaaattcttattgataaatgttgaataaacacacacaaaaaagtatcagagaaagagaaaaaccctacaatggcaatagaggtgtgtgacagttattgctatcaattttacataatatctcatttaaaaacaacctaattatgcattgcctgtgaaaataaaaggataaaataagattttgtacatactgtaagaatacagttgtgctgtatttttatggattcatcaaggagtaaaatgttctgctttagtaaattatataggtaactgaagtgttattcctttaaagagcaaaataatttatcaccatgtttggtggaaaatttctaagtatttattacatgcctaggggttagccaacaagatataccaagcatgaaaacctgtaaaacttaataaaatgctaaaatatgaacatcacactatggaga

SEQ ID NO: 91021 - DNA, 2182 bp, Homo sapiens
cccacgcgtccgcggacgcgtgggtcgacccacgcgtccggagatgttttatagaacatttctttaatataaagttagagatgtcttcataggcagtatggctatctttgccacagaaacataagtaaaattttagagttctgttttccatgaggtcaaaaatataatttattcctcagtcatggttttctaaatatctgtactccacattccattttaattgatatgagggtgttaaagtacctacttaatgggttgattactatcaaaatgaccaaattataccaaagaacttaagaggaagcactttcagaactattcacttgccaggtattttctaaaattccacctgaaagccaaaagataaaataaataagttgattttaatgatataagcatcacacaattttacattaagaaatactgtgcaggccatgcgtggtggctcaggcctgtaatcccagcactttgggaggccgaggtgggcagatcaccggaggtcaggagttcgagaccagccttgccaacatagtgaaaccctgtctctactaaaaatacaaaaattagccgggcatggtggcaggcacctgtaatcccagctactagggaggcttttgaacccaggaggcagaggttgcagcgagctgagatcgcgccactgcactccagcctgggtgatagagtgagattcagtctcaaaaaaaaaaaaaaaaaaaaaagctgtgcgaaaatatttgtttttctctggggccttttctttcttttctttttaaactataccagaaattttacatcacagtttttatacaaagtgggaccttccatactttttgtattacaataaccttcagaagcccattccccttaaagtctgttgttcttgttttaatcatcaccacatataaatgttttagctttgtcttaaactgtgagtcttcataaaattgtgttcctccgagttcaccttctaggactttattgattaatccttctctttctgctataccagcagacacatattcatagaatatgattatttttaaagaacaaggtgaggaggctgaggcaggagaattgcttgaacctgggagatggaggttgcagtgagctgagatcacgccactgcactccagcctgggtgacagagtgagagactccgtctcaaaaatgaatgaatgaatgaatgaatgaatgaacgaacgaacaaggtggtttaatgtcagaaaacttcctaagcatttgctccccaaacctttcatgtttttcaagaagcctttattacataaaggggaatagaattaaaatgtttctttataagaaaaatatacatatttgtgttcttggccccattaaaactagtcagtagtcctttggcaaagatatagtcaacaagagaactgggtatgagtccaggcattactcctgttcatagttgtggatgcatgtgtctgagccagactgtctcaactggagtctcttgggttatagcagtaaacccgtgtattccatgaaaccactgggcccatcatcaaaaggtttccacttgtggtgccacagttgcttattactgagtttgggttccaagatgactggcaacttctgaaataatctcattgaaggaaagagtttcattttttttttaaaagagtttgctggaggaaaagaagcatgttaaatgtttttaagcagctaaaagtcctagatggaagcatatcaggatgtgtcggtgcttggctcttagtgaatgcactaaaattcttattgataaatgttgaataaacacacacaaaaaagtatcagagaaagagaaaaaccctacaatggcaatagaggtgtgtgacagttattgctatcaattttacataatatctcatttaaaaacaacctaattatgcattgcctgtgaaaataaaaggataaaataagattttgtacatactgtaagaatacagttgtgctgtatttttatggattcatcaaggagtaaaatgttctgctttagtaaattatataggtaactgaagtgttattcctttaaagagcaaaataatttatcaccatgtttggtggaaaatttctaagtatttattacatgcctaggggttagccaacaagatataccaagcatgaaaacctgtaaaacttaataaaatgctaaaatatgaacatcacactatggaga

SEQ ID NO: 91022 - DNA, 2037 bp, Homo sapiens
gcggccgcctactactactactaattcgcggccgcgtcgactttctaaatatctgtactccacattccattttaattgatatgagggtgttaaagtacctacttaatgggttgattactatcaaaatgaccaaattataccaaagaacttaagaggaagcactttcagaactattcacttgccaggtattttctaaaattccacctgaaagccaaaagataaaataaataagttgattttaatgatataagcatcacacaattttacattaagaaatactgtgcaggccatgcgtggtggctcaggcctgtaatcccagcactttgggaggccgaggtgggcagatcaccggaggtcaggagttcgagaccagccttgccaacatagtgaaaccctgtctctactaaaaatacaaaaattagccgggcatggtggcaggcacctgtaatcccagctactagggaggcttttgaacccaggaggcagaggttgcagcgagctgagatcgcgccactgcactccagcctgggtgatagagtgagattcagtctcaaaaaaaaaaaaaaaaaaaaaagctgtgcgaaaatatttgtttttctctggggccttttctttcttttctttttaaactataccagaaattttacatcacagtttttatacaaagtgggaccttccatactttttgtattacaataaccttcagaagcccattccccttaaagtctgttgttcttgttttaatcatcaccacatataaatgttttagctttgtcttaaactgtgagtcttcataaaattgtgttcctccgagttcaccttctaggactttattgattaatccttctctttctgctataccagcagacacatattcatagaatatgattatttttaaagaacaaggtgaggaggctgaggcaggagaattgcttgaacctgggagatggaggttgcagtgagctgagatcacgccactgcactccagcctgggtgacagagtgagagactccgtctcaaaaatgaatgaatgaatgaatgaatgaatgaacgaacgaacaaggtggtttaatgtcagaaaacttcctaagcatttgctccccaaacctttcatgtttttcaagaagcctttattacataaaggggaatagaattaaaatgtttctttataagaaaaatatacatatttgtgttcttggccccattaaaactagtcagtagtcctttggcaaagatatagtcaacaagagaactgggtatgagtccaggcattactcctgttcatagttgtggatgcatgtgtctgagccagactgtctcaactggagtctcttgggttatagcagtaaacccgtgtattccatgaaaccactgggcccatcatcaaaaggtttccacttgtggtgccacagttgcttattactgagtttgggttccaagatgactggcaacttctgaaataatctcattgaaggaaagagtttcattttttttttaaaagagtttgctggaggaaaagaagcatgttaaatgtttttaagcagctaaaagtcctagatggaagcatatcaggatgtgtcggtgcttggctcttagtgaatgcactaaaattcttattgataaatgttgaataaacacacacaaaaaagtatcagagaaagagaaaaaccctacaatggcaatagaggtgtgtgacagttattgctatcaattttacataatatctcatttaaaaacaacctaattatgcattgcctgtgaaaataaaaggataaaataagattttgtacatactgtaagaatacagttgtgctgtatttttatggattcatcaaggagtaaaatgttctgctttagtaaattatataggtaactgaagtgttattcctttaaagagcaaaataatttatcaccatgtttggtggaaaatttctaagtatttattacatgcctaggggttagccaacaagatataccaagcatgaaaacctgtaaaacttaataaaatgctaaaatatgaacatcacactatggaga

SEQ ID NO: 91023 - DNA, 771 bp, Homo sapiens
tgcggtgttcctccgacttccggacatctccctgggagtcgcgcagagtggagtcaaaggcaaccagtgctcgctgcggtctctggggatcgggaccgcggcggcggcccgcgagcgggatgttccggggcttgagcagttggttgggcttgcagcagccggtggcaggcggtgggcagcccaatggagatgctccacccgagcagccgtccgagacggtggctgagtctgcggaggaggagctgcagcaagcgggagaccaggagctcctccaccaggccaaagacttcggcaactatttatttaactttgcatctgctgccacaaaaaagataactgaatcagttgctgaaacagcacaaacaataaagaaatccgtagaagaaggaaaaatagatggcatcattgacaagacaattataggagattttcagaaggaacagaaaaaatttgttgaagagcaacatacaaagaagtcaggtatggtataggtttgtcttaattaacctgccaggttttattgagcacctgttatgtgctagataccacactgagggtctgagaacacaaaaatgcatatgcaatggccccatcctttgggtagcacaaagactagtgagggagacaaacccataaacttccatgatttaaaggaagggactagattgtttctgggtgagggctgccagtgctggccccactggggagctggctgtgaaaggggcaagtaagctttcagttctgactttctcttttcttttcccccaccga

SEQ ID NO: 91024 - DNA, 3514 bp, Homo sapiens
tgcggtgttcctccgacttccggacatctccctgggagtcgcgcagagtggagtcaaaggcaaccagtgctcgctgcggtctctggggatcgggaccgcggcggcggcccgcgagcgggatgttccggggcttgagcagttggttgggcttgcagcagccggtggcaggcggtgggcagcccaatggagatgctccacccgagcagccgtccgagacggtggctgagtctgcggaggaggagctgcagcaagcgggagaccaggagctcctccaccaggccaaagacttcggcaactatttatttaactttgcatctgctgccacaaaaaagataactgaatcagttgctgaaacagcacaaacaataaagaaatccgtagaagaaggaaaaatagatggcatcattgacaagacaattataggagattttcagaaggaacagaaaaaatttgttgaagagcaacatacaaagaagtcagaagcagctgtgcccccatgggttgacactaacgatgaagaaacaattcaacaacaaattttggccttatcagctgacaagaggaatttccttcgtgaccctccggctggcgtgcaatttaatttcgactttgatcagatgtaccccgtggccctggtcatgctccaggaggatgagctgctaagcaagatgagatttgccctcgttcctaaacttgtgaaggaagaagtgttctggaggaactacttttaccgcgtctccctgattaagcagtcagcccagctcacggccctggctgcccaacagcaggccgcagggaaggaggagaagagcaatggcagagagcaagatttgccgctggcagaggcagtacggcccaaaacgccacccgttgtaatcaaatctcagcttaaaactcaagaggatgaggaagaaatttctactagcccaggtgtttctgagtttgtcagtgatgccttcgatgcctgtaacctaaatcaggaagatctaaggaaagaaatggagcaactagtgcttgacaaaaagcaagaggagacagccgtactggaagaggattctgcagattgggaaaaagaactgcagcaggaacttcaagaatatgaagtggtgacagaatctgaaaaacgagatgaaaactgggataaggaaatagagaaaatgcttcaagaggaaaattagctgttcctgaaatagaagaataatccttaacagtctgcaaactgacattaaattctagatgttgacaattactgaatcagaaggcatgaaagagtataattttatgaaattcaaaattattcttttttcaagttgaaacttgcctcttctactttaaaaaagtatatagaacagttacttctaataatcagaaagagatgttttatagaacatttctttaatataaagttagagatgtcttcataggcagtatggctatctttgccacagaaacataagtaaaattttagagttctgttttccatgaggtcaaaaatataatttattcctcagtcatggttttctaaatatctgtactccacattccattttaattgatatgagggtgttaaagtacctacttaatgggttgattactatcaaaatgaccaaattataccaaagaacttaagaggaagcactttcagaactattcacttgccaggtattttctaaaattccacctgaaagccaaaagataaaataaataagttgattttaatgatataagcatcacacaattttacattaagaaatactgtgcaggccatgcgtggtggctcaggcctgtaatcccagcactttgggaggccgaggtgggcagatcaccggaggtcaggagttcgagaccagccttgccaacatagtgaaaccctgtctctactaaaaatacaaaaattagccgggcatggtggcaggcacctgtaatcccagctactagggaggcttttgaacccaggaggcagaggttgcagcgagctgagatcgcgccactgcactccagcctgggtgatagagtgagattcagtctcaaaaaaaaaaaaaaaaaaaaaagctgtgcgaaaatatttgtttttctctggggccttttctttcttttctttttaaactataccagaaattttacatcacagtttttatacaaagtgggaccttccatactttttgtattacaataaccttcagaagcccattccccttaaagtctgttgttcttgttttaatcatcaccacatataaatgttttagctttgtcttaaactgtgagtcttcataaaattgtgttcctccgagttcaccttctaggactttattgattaatccttctctttctgctataccagcagacacatattcatagaatatgattatttttaaagaacaaggtgaggaggctgaggcaggagaattgcttgaacctgggagatggaggttgcagtgagctgagatcacgccactgcactccagcctgggtgacagagtgagagactccgtctcaaaaatgaatgaatgaatgaatgaatgaatgaacgaacgaacaaggtggtttaatgtcagaaaacttcctaagcatttgctccccaaacctttcatgtttttcaagaagcctttattacataaaggggaatagaattaaaatgtttctttataagaaaaatatacatatttgtgttcttggccccattaaaactagtcagtagtcctttggcaaagatatagtcaacaagagaactgggtatgagtccaggcattactcctgttcatagttgtggatgcatgtgtctgagccagactgtctcaactggagtctcttgggttatagcagtaaacccgtgtattccatgaaaccactgggcccatcatcaaaaggtttccacttgtggtgccacagttgcttattactgagtttgggttccaagatgactggcaacttctgaaataatctcattgaaggaaagagtttcattttttttttaaaagagtttgctggaggaaaagaagcatgttaaatgtttttaagcagctaaaagtcctagatggaagcatatcaggatgtgtcggtgcttggctcttagtgaatgcactaaaattcttattgataaatgttgaataaacacacacaaaaaagtatcagagaaagagaaaaaccctacaatggcaatagaggtgtgtgacagttattgctatcaattttacataatatctcatttaaaaacaacctaattatgcattgcctgtgaaaataaaaggataaaataagattttgtacatactgtaagaatacagttgtgctgtatttttatggattcatcaaggagtaaaatgttctgctttagtaaattatataggtaactgaagtgttattcctttaaagagcaaaataatttatcaccatgtttggtggaaaatttctaagtatttattacatgcctaggggttagccaacaagatataccaagcatgaaaacctgtaaaacttaataaaatgctaaaatatgaacatcacactatggaga

SEQ ID NO: 91025 - DNA, 3035 bp, Homo sapiens
tgcggtgttcctccgacttccggacatctccctgggagtcgcgcagagtggagtcaaaggcaaccagtgctcgctgcggtctctggggatcgggaccgcggcggcggcccgcgagcgggatgttccggggcttgagcagttggttgggcttgcagcagccggtggcaggcggtgggcagcccaatggagatgctccacccgagcagccgtccgagacggtggctgagtctgcggaggaggagctgcagcaagcgggagaccaggagctcctccaccaggccaaagacttcggcaactatttatttaactttgcatctgctgccacaaaaaagataactgaatcagttgctgaaacagcacaaacaataaagaaatccgtagaagaaggaaaaatagatggcatcattgacaagacaattataggagattttcagaaggaacagaaaaaatttgttgaagagcaacatacaaagaagtcagaagcagctgtgcccccatgggttgacactaacgatgaagaaacaattcaacaacaaattttggccttatcagctgacaagaggaatttccttcgtgaccctccggctggcgtgcaatttaatttcgactttgatcagatgtaccccgtggccctggtcatgctccaggaggatgagctgctaagcaagatgagatttgccctcgttcctaaacttgtgaaggaagaagtgttctggaggaactacttttaccgcgtctccctgattaagcagtcagcccagctcacggccctggctgcccaacagcaggccgcagggaaggaggagaagagcaatggcagagagcaagatttgccgctggcagaggcagtacggcccaaaacgccacccgttgtaatcaaatctcagcttaaaactcaagaggatgaggaagaaatttctactagcccaggtgtttctgagtttgtcagtgatgccttcgatgcctgtaacctaaatcaggaagatctaaggaaagaaatggagcaactagtgcttgacaaaaagcaagaggagacagccgtactggaagaggattctgcagattgggaaaaagaactgcagcaggaacttcaagaatatgaagtggtgacagaatctgaaaaacgagatgaaaactgggataaggaaatagagaaaatgcttcaagaggaaaattagctgttcctgaaatagaagaataatccttaacagtctgcaaactgacattaaattctagatgttgacaattactgaatcagaaggcatgaaagagtataattttatgaaattcaaaattattcttttttcaagttgaaacttgcctcttctactttaaaaaagtatatagaacagttacttctaataatcagaaagagatgttttatagaacatttctttaatataaagttagagatgtcttcataggcagtatggctatctttgccacagaaacataagtaaaattttagagttctgttttccatgaggtcaaaaatataatttattcctcagtcatggttttctaaatatctgtactccacattccattttaattgatatgagggtgttaaagtacctacttaatgggttgattactatcaaaatgaccaaattataccaaagaacttaagaggaagcactttcagaactattcacttgccaggtattttctaaaattccacctgaaagccaaaagataaaataaataagttgattttaatgatataagcatcacacaattttacattaagaaatactgtgcaggccatgcgtggtggctcaggcctgtaatcccagcactttgggaggccgaggtgggcagatcaccggaggtcaggagttcgagaccagccttgccaacatagtgaaaccctgtctctactaaaaatacaaaaattagccgggcatggtggcaggcacctgtaatcccagctactagggaggcttttgaacccaggaggcagaggttgcagcgagctgagatcgcgccactgcactccagcctgggtgatagagtgagattcagtctcaaaaaaaaaaaaaaaaaaaaaagctgtgcgaaaatatttgtttttctctggggccttttctttcttttctttttaaactataccagaaattttacatcacagtttttatacaaagtgggaccttccatactttttgtattacaataaccttcagaagcccattccccttaaagtctgttgttcttgttttaatcatcaccacatataaatgttttagctttgtcttaaactgtgagtcttcataaaattgtgttcctccgagttcaccttctaggactttattgattaatccttctctttctgctataccagcagacacatattcatagaatatgattatttttaaagaacaaggtgaggaggctgaggcaggagaattgcttgaacctgggagatggaggttgcagtgagctgagatcacgccactgcactccagcctgggtgacagagtgagagactccgtctcaaaaatgaatgaatgaatgaatgaatgaatgaacgaacgaacaaggtggtttaatgtcagaaaacttcctaagcatttgctccccaaacctttcatgtttttcaagaagcctttattacataaaggggaatagaattaaaatgtttctttataagaaaaataaaaaaaaaaaaaaaaaaaaaaaaaatggggggggggccggggcccgcggaaaaagcttttctaagaacaattcgggggggggggggggccccaggagaggtaaggggaaccgggggccaaagggggtcccaaagggaaaccggggccaggaacaaggggggggattctctcccaccaaataaaaaaacgcgccgggggggaaccgcgagaggggttcgggaacaacctccaagaggggaggcggaagggccaatacagggggactcatatccaacgggggtcccaaaggaggaaggcccggaaatctaaaattaacgcccgggagggggggaggaaaacaacgacacaaaaaaaagagaaacaaacacaaaagaagac

SEQ ID NO: 91026 - DNA, 3486 bp, Homo sapiens
  misc_feature (20)..(20): n is a, c, g, or t
tctagtcgaggccggtggtntggagtcaaaggcaaccagtgctcgctgcggtctctggggatcgggaccgcggcggcggcccgcgagcgggatgttccggggcttgagcagttggttgggcttgcagcagccggtggcaggcggtgggcagcccaatggagatgctccacccgagcagccgtccgagacggtggctgagtctgcggaggaggagctgcagcaagcgggagaccaggagctcctccaccaggccaaagacttcggcaactatttatttaactttgcatctgctgccacaaaaaagataactgaatcagttgctgaaacagcacaaacaataaagaaatccgtagaagaaggaaaaatagatggcatcattgacaagacaattataggagattttcagaaggaacagaaaaaatttgttgaagagcaacatacaaagaagtcagaagcagctgtgcccccatgggttgacactaacgatgaagaaacaattcaacaacaaattttggccttatcagctgacaagaggaatttccttcgtgaccctccggctggcgtgcaatttaatttcgactttgatcagatgtaccccgtggccctggtcatgctccaggaggatgagctgctaagcaagatgagatttgccctcgttcctaaacttgtgaaggaagaagtgttctggaggaactacttttaccgcgtctccctgattaagcagtcagcccagctcacggccctggctgcccaacagcaggccgcagggaaggaggagaagagcaatggcagagagcaagatttgccgctggcagaggcagtacggcccaaaacgccacccgttgtaatcaaatctcagcttaaaactcaagaggatgaggaagaaatttctactagcccaggtgtttctgagtttgtcagtgatgccttcgatgcctgtaacctaaatcaggaagatctaaggaaagaaatggagcaactagtgcttgacaaaaagcaagaggagacagccgtactggaagaggattctgcagattgggaaaaagaactgcagcaggaacttcaagaatatgaagtggtgacagaatctgaaaaacgagatgaaaactgggataaggaaatagagaaaatgcttcaagaggaaaattagctgttcctgaaatagaagaataatccttaacagtctgcaaactgacattaaattctagatgttgacaattactgaatcagaaggcatgaaagagtataattttatgaaattcaaaattattcttttttcaagttgaaacttgcctcttctactttaaaaaagtatatagaacagttacttctaataatcagaaagagatgttttatagaacatttctttaatataaagttagagatgtcttcataggcagtatggctatctttgccacagaaacataagtaaaattttagagttctgttttccatgaggtcaaaaatataatttattcctcagtcatggttttctaaatatctgtactccacattccattttaattgatatgagggtgttaaagtacctacttaatgggttgattactatcaaaatgaccaaattataccaaagaacttaagaggaagcactttcagaactattcacttgccaggtattttctaaaattccacctgaaagccaaaagataaaataaataagttgattttaatgatataagcatcacacaattttacattaagaaatactgtgcaggccatgcgtggtggctcaggcctgtaatcccagcactttgggaggccgaggtgggcagatcaccggaggtcaggagttcgagaccagccttgccaacatagtgaaaccctgtctctactaaaaatacaaaaattagccgggcatggtggcaggcacctgtaatcccagctactagggaggcttttgaacccaggaggcagaggttgcagcgagctgagatcgcgccactgcactccagcctgggtgatagagtgagattcagtctcaaaaaaaaaaaaaaaaaaaaaagctgtgcgaaaatatttgtttttctctggggccttttctttcttttctttttaaactataccagaaattttacatcacagtttttatacaaagtgggaccttccatactttttgtattacaataaccttcagaagcccattccccttaaagtctgttgttcttgttttaatcatcaccacatataaatgttttagctttgtcttaaactgtgagtcttcataaaattgtgttcctccgagttcaccttctaggactttattgattaatccttctctttctgctataccagcagacacatattcatagaatatgattatttttaaagaacaaggtgaggaggctgaggcaggagaattgcttgaacctgggagatggaggttgcagtgagctgagatcacgccactgcactccagcctgggtgacagagtgagagactccgtctcaaaaatgaatgaatgaatgaatgaatgaatgaacgaacgaacaaggtggtttaatgtcagaaaacttcctaagcatttgctccccaaacctttcatgtttttcaagaagcctttattacataaaggggaatagaattaaaatgtttctttataagaaaaatatacatatttgtgttcttggccccattaaaactagtcagtagtcctttggcaaagatatagtcaacaagagaactgggtatgagtccaggcattactcctgttcatagttgtggatgcatgtgtctgagccagactgtctcaactggagtctcttgggttatagcagtaaacccgtgtattccatgaaaccactgggcccatcatcaaaaggtttccacttgtggtgccacagttgcttattactgagtttgggttccaagatgactggcaacttctgaaataatctcattgaaggaaagagtttcattttttttttaaaagagtttgctggaggaaaagaagcatgttaaatgtttttaagcagctaaaagtcctagatggaagcatatcaggatgtgtcggtgcttggctcttagtgaatgcactaaaattcttattgataaatgttgaataaacacacacaaaaaagtatcagagaaagagaaaaaccctacaatggcaatagaggtgtgtgacagttattgctatcaattttacataatatctcatttaaaaacaacctaattatgcattgcctgtgaaaataaaaggataaaataagattttgtacatactgtaagaatacagttgtgctgtatttttatggattcatcaaggagtaaaatgttctgctttagtaaattatataggtaactgaagtgttattcctttaaagagcaaaataatttatcaccatgtttggtggaaaatttctaagtatttattacatgcctaggggttagccaacaagatataccaagcatgaaaacctgtaaaacttaataaaatgctaaaatatgaacatcacactatggaga

SEQ ID NO: 91027 - DNA, 3448 bp, Homo sapiens
  misc_feature (20)..(20): n is a, c, g, or t
tctagtcgaggccggtggtntggagtcaaaggcaaccagtgctcgctgcggtctctggggatcgggaccgcggcggcggcccgcgagcgggatgttccggggcttgagcagttggttgggcttgcagcagccggtggcaggcggtgggcagcccaatggagatgctccacccgagcagccgtccgagacggtggctgagtctgcggaggaggagctgcagcaagcgggagaccaggagctcctccaccaggccaaagacttcggcaataactgaatcagttgctgaaacagcacaaacaataaagaaatccgtagaagaaggaaaaatagatggcatcattgacaagacaattataggagattttcagaaggaacagaaaaaatttgttgaagagcaacatacaaagaagtcagaagcagctgtgcccccatgggttgacactaacgatgaagaaacaattcaacaacaaattttggccttatcagctgacaagaggaatttccttcgtgaccctccggctggcgtgcaatttaatttcgactttgatcagatgtaccccgtggccctggtcatgctccaggaggatgagctgctaagcaagatgagatttgccctcgttcctaaacttgtgaaggaagaagtgttctggaggaactacttttaccgcgtctccctgattaagcagtcagcccagctcacggccctggctgcccaacagcaggccgcagggaaggaggagaagagcaatggcagagagcaagatttgccgctggcagaggcagtacggcccaaaacgccacccgttgtaatcaaatctcagcttaaaactcaagaggatgaggaagaaatttctactagcccaggtgtttctgagtttgtcagtgatgccttcgatgcctgtaacctaaatcaggaagatctaaggaaagaaatggagcaactagtgcttgacaaaaagcaagaggagacagccgtactggaagaggattctgcagattgggaaaaagaactgcagcaggaacttcaagaatatgaagtggtgacagaatctgaaaaacgagatgaaaactgggataaggaaatagagaaaatgcttcaagaggaaaattagctgttcctgaaatagaagaataatccttaacagtctgcaaactgacattaaattctagatgttgacaattactgaatcagaaggcatgaaagagtataattttatgaaattcaaaattattcttttttcaagttgaaacttgcctcttctactttaaaaaagtatatagaacagttacttctaataatcagaaagagatgttttatagaacatttctttaatataaagttagagatgtcttcataggcagtatggctatctttgccacagaaacataagtaaaattttagagttctgttttccatgaggtcaaaaatataatttattcctcagtcatggttttctaaatatctgtactccacattccattttaattgatatgagggtgttaaagtacctacttaatgggttgattactatcaaaatgaccaaattataccaaagaacttaagaggaagcactttcagaactattcacttgccaggtattttctaaaattccacctgaaagccaaaagataaaataaataagttgattttaatgatataagcatcacacaattttacattaagaaatactgtgcaggccatgcgtggtggctcaggcctgtaatcccagcactttgggaggccgaggtgggcagatcaccggaggtcaggagttcgagaccagccttgccaacatagtgaaaccctgtctctactaaaaatacaaaaattagccgggcatggtggcaggcacctgtaatcccagctactagggaggcttttgaacccaggaggcagaggttgcagcgagctgagatcgcgccactgcactccagcctgggtgatagagtgagattcagtctcaaaaaaaaaaaaaaaaaaaaaagctgtgcgaaaatatttgtttttctctggggccttttctttcttttctttttaaactataccagaaattttacatcacagtttttatacaaagtgggaccttccatactttttgtattacaataaccttcagaagcccattccccttaaagtctgttgttcttgttttaatcatcaccacatataaatgttttagctttgtcttaaactgtgagtcttcataaaattgtgttcctccgagttcaccttctaggactttattgattaatccttctctttctgctataccagcagacacatattcatagaatatgattatttttaaagaacaaggtgaggaggctgaggcaggagaattgcttgaacctgggagatggaggttgcagtgagctgagatcacgccactgcactccagcctgggtgacagagtgagagactccgtctcaaaaatgaatgaatgaatgaatgaatgaatgaacgaacgaacaaggtggtttaatgtcagaaaacttcctaagcatttgctccccaaacctttcatgtttttcaagaagcctttattacataaaggggaatagaattaaaatgtttctttataagaaaaatatacatatttgtgttcttggccccattaaaactagtcagtagtcctttggcaaagatatagtcaacaagagaactgggtatgagtccaggcattactcctgttcatagttgtggatgcatgtgtctgagccagactgtctcaactggagtctcttgggttatagcagtaaacccgtgtattccatgaaaccactgggcccatcatcaaaaggtttccacttgtggtgccacagttgcttattactgagtttgggttccaagatgactggcaacttctgaaataatctcattgaaggaaagagtttcattttttttttaaaagagtttgctggaggaaaagaagcatgttaaatgtttttaagcagctaaaagtcctagatggaagcatatcaggatgtgtcggtgcttggctcttagtgaatgcactaaaattcttattgataaatgttgaataaacacacacaaaaaagtatcagagaaagagaaaaaccctacaatggcaatagaggtgtgtgacagttattgctatcaattttacataatatctcatttaaaaacaacctaattatgcattgcctgtgaaaataaaaggataaaataagattttgtacatactgtaagaatacagttgtgctgtatttttatggattcatcaaggagtaaaatgttctgctttagtaaattatataggtaactgaagtgttattcctttaaagagcaaaataatttatcaccatgtttggtggaaaatttctaagtatttattacatgcctaggggttagccaacaagatataccaagcatgaaaacctgtaaaacttaataaaatgctaaaatatgaacatcacactatggaga

SEQ ID NO: 91028 - DNA, 2717 bp, Homo sapiens
agaggatacaaggatacgtagatcagagagcagattgccgctggagaggcagtacggcccaaaacgccacccgttgtaatcaaatctcagcttaaaactcaagaggatgaggaagaaatttctactagcccaggtgtttctgagtttgtcagtgatgccttcgatgcctgtaacctaaatcaggaagatctaaggaaagaaatggagcaactagtgcttgacaaaaagcaagaggagacagccgtactggaagaggattctgcagattgggaaaaagaactgcagcaggaacttcaagaatatgaagtggtgacagaatctgaaaaacgagatgaaaactgggataaggaaatagagaaaatgcttcaagaggaaaattagctgttcctgaaatagaagaataatccttaacagtctgcaaactgacattaaattctagatgttgacaattactgaatcagaaggcatgaaagagtataattttatgaaattcaaaattattcttttttcaagttgaaacttgcctcttctactttaaaaaagtatatagaacagttacttctaataatcagaaagagatgttttatagaacatttctttaatataaagttagagatgtcttcataggcagtatggctatctttgccacagaaacataagtaaaattttagagttctgttttccatgaggtcaaaaatataatttattcctcagtcatggttttctaaatatctgtactccacattccattttaattgatatgagggtgttaaagtacctacttaatgggttgattactatcaaaatgaccaaattataccaaagaacttaagaggaagcactttcagaactattcacttgccaggtattttctaaaattccacctgaaagccaaaagataaaataaataagttgattttaatgatataagcatcacacaattttacattaagaaatactgtgcaggccatgcgtggtggctcaggcctgtaatcccagcactttgggaggccgaggtgggcagatcaccggaggtcaggagttcgagaccagccttgccaacatagtgaaaccctgtctctactaaaaatacaaaaattagccgggcatggtggcaggcacctgtaatcccagctactagggaggcttttgaacccaggaggcagaggttgcagcgagctgagatcgcgccactgcactccagcctgggtgatagagtgagattcagtctcaaaaaaaaaaaaaaaaaaaaaagctgtgcgaaaatatttgtttttctctggggccttttctttcttttctttttaaactataccagaaattttacatcacagtttttatacaaagtgggaccttccatactttttgtattacaataaccttcagaagcccattccccttaaagtctgttgttcttgttttaatcatcaccacatataaatgttttagctttgtcttaaactgtgagtcttcataaaattgtgttcctccgagttcaccttctaggactttattgattaatccttctctttctgctataccagcagacacatattcatagaatatgattatttttaaagaacaaggtgaggaggctgaggcaggagaattgcttgaacctgggagatggaggttgcagtgagctgagatcacgccactgcactccagcctgggtgacagagtgagagactccgtctcaaaaatgaatgaatgaatgaatgaatgaatgaacgaacgaacaaggtggtttaatgtcagaaaacttcctaagcatttgctccccaaacctttcatgtttttcaagaagcctttattacataaaggggaatagaattaaaatgtttctttataagaaaaatatacatatttgtgttcttggccccattaaaactagtcagtagtcctttggcaaagatatagtcaacaagagaactgggtatgagtccaggcattactcctgttcatagttgtggatgcatgtgtctgagccagactgtctcaactggagtctcttgggttatagcagtaaacccgtgtattccatgaaaccactgggcccatcatcaaaaggtttccacttgtggtgccacagttgcttattactgagtttgggttccaagatgactggcaacttctgaaataatctcattgaaggaaagagtttcattttttttttaaaagagtttgctggaggaaaagaagcatgttaaatgtttttaagcagctaaaagtcctagatggaagcatatcaggatgtgtcggtgcttggctcttagtgaatgcactaaaattcttattgataaatgttgaataaacacacacaaaaaagtatcagagaaagagaaaaaccctacaatggcaatagaggtgtgtgacagttattgctatcaattttacataatatctcatttaaaaacaacctaattatgcattgcctgtgaaaataaaaggataaaataagattttgtacatactgtaagaatacagttgtgctgtatttttatggattcatcaaggagtaaaatgttctgctttagtaaattatataggtaactgaagtgttattcctttaaagagcaaaataatttatcaccatgtttggtggaaaatttctaagtatttattacatgcctaggggttagccaacaagatataccaagcatgaaaacctgtaaaacttaataaaatgctaaaatatgaacatcacactatggaga

SEQ ID NO: 91029 - DNA, 872 bp, Homo sapiens
tgcggtgttcctccgacttccggacatctccctgggagtcgcgcagagtggagtcaaaggcaaccagtgctcgctgcggtctctggggatcgggaccgcggcggcggcccgcgagcgggatgttccggggcttgagcagttggttgggcttgcagcagccggtggcaggcggtgggcagcccaatggagatgctccacccgagcagccgtccgagacggtggctgagtctgcggaggaggagctgcagcaagcgggagaccaggagctcctccaccaggccaaagacttcggcaactatttatttaactttgcatctgctgccacaaaaaagataactgaatcagttgctgaaacagcacaaacaataaagaaatccgtagaagaaggaaaaatagatggcatcattgacaagacaattataggagattttcagaaggaacagaaaaaatttgttgaagagcaacatacaaagaagtcagaagcagctgtgcccccatgggttgacactaacgatgaagaaacaattcaacaacaaattttggccttatcagctgacaagaggaatttccttcgtgaccctccggctggcgtgcaatttaatttcgactttgatcagatgtaccccgtggccctggtcatgctccaggaggatgagctgctaagcaagatgagatttgccctcgttcctaaacttgtgaaggaagaagtgttctggaggaactacttttaccgcgtctccctgattaagcagtcagcccagctcacggccctggctgcccaacagcaggccgcagggaaggaggagaagagcaatggcagagagcaagatttgccgctggcaggtatattctgggtagaagacagcactcta

SEQ ID NO: 91030 - DNA, 1809 bp, Homo sapiens
tttttttgacacagggtctcactctgtcgcccaggctagagtgcagtggcacaatgaaggcacactgcagctttgacctcctgggctcaggtgattctcccatctcagccttcccagtaagtgggactacaggtgcccaccaccaagactggctaattttttgtatagacagggtttcaccatattgcccttacactcctggactcaatctgcccacattggcttcccaaagtgctgggattatagacatgagccaccacacccagcctgtatggctgttgtgaataatatgctgttatgaacacgggcacactaaacaccattcaacttaaaaaaataatcaaagccttaagaactgaccaaaatggcttaggtgaaaataaaataccaaactctgctctaagaaaaggaaagaacattcactgaattataccttcagcaataagcacgtaatggaacttgtttcatttaaaatgcatcacaatcctgtaaattgataatcatcataccgcaattttatagatgagcaaggtattaggcggacctttttcaaaaggtcatacagctagtgacaaatatttccaaatttttcataacatttctttttttgagacggagtcttgctctgtggcccaggctggagtgcagtggtgcaatctcggctcactgcaagccttgcctcccaggttcacgccattctcctgtctcagcctccctagtagctgggactacaggcacccaccaccatgcccggataatgtttttgtattttcagtagagacggggtttcactgtgttagccaggatggtctcaatctcctgaccttgtgatcctcccgccttggactcccaaagtgctgggattacagacatgagccactgtgccaggcctaacatttctgttttaaatagcttaattaactacacatgttttatattcttgcctctgaaaggcagctttttttgttgggttggtttattatgcatcagacacttgattcgctgaggaattctgtttttcagtaattcatccaccacaaatatcacgtagcattttgactccacagacctaagagtcttaagtcttaaaaggattgtaaaatctaagtttttctgagctatctgagagtaagaggcttttttctattgaaaataggttgcatttcaaactttatccgtaagagctcacaacactttctccaacatgcatgcccatgtgctcacttaaacagaactctgagtgagacagtaaatacctcatatgcccttgaaaattttaccttggcatagaaaaaccttgttaagaacctaaaaataatttcactttgaaagtctttagggttagacaaatgttaaacttcaattggcagtacaagggcagcactcaagccagtaagagttttgttgggccaaattatgttgaaaaagatcaaatattttaaaaacaggagatttcacataaaaatctgggattccagcttcttctgaataaatgaggtacactaattatgcagagtggcaaatggctggagttgagtgggaggtgtttctagcccaacagataggcatggaagctccagctcagccccctccactccattttcttacacaagggaagccactatggtatagcatctaacttaaggcatattatatgtattcttaagacagaggaaaaggctgaatatttgatattgtcaaaagaaatgagagtctaactttctgtggcaaggaccttcttgcagtagtaacatagtctggaacacctccaacataaattatgaaaagaaagctcttggctcagaagag

SEQ ID NO: 91031 - DNA, 1840 bp, Homo sapiens
tttttttgacacagggtctcactctgtcgcccaggctagagtgcagtggcacaatgaaggcacactgcagctttgacctcctgggctcaggtgattctcccatctcagccttcccagtaagtgggactacaggtgcccaccaccaagactggctaattttttgtatagacagggtttcaccatattgcccttacactcctggactcaatctgcccacattggcttcccaaagtgctgggattatagacatgagccaccacacccagcctgtatggctgttgtgaataatatgctgttatgaacacgggcacactaaacaccattcaacttaaaaaaataatcaaagccttaagaactgaccaaaatggcttaggtgaaaataaaataccaaactctgctctaagaaaaggaaagaacattcactgaattataccttcagcaataagcacgtaatggaacttgtttcatttaaaatgcatcacaatcctgtaaattgataatcatcataccgcaattttatagatgagcaaggtattaggcggacctttttcaaaaggtcatacagctagtgacaaatatttccaaatttttcataacatttctttttttgagacggagtcttgctctgtggcccaggctggagtgcagtggtgcaatctcggctcactgcaagccttgcctcccaggttcacgccattctcctgtctcagcctccctagtagctgggactacaggcacccaccaccatgcccggataatgtttttgtattttcagtagagacggggtttcactgtgttagccaggatggtctcaatctcctgaccttgtgatcctcccgccttggactcccaaagtgctgggattacagacatgagccactgtgccaggcctaacatttctgttttaaatagcttaattaactacacatgttttatattcttgcctctgaaaggcagctttttttgttgggttggtttattatgcatcagacacttgattcgctgaggaattctgtttttcagtaattcatccaccacaaatatcacgtagcattttgactccacagacctaagagtcttaagtcttaaaaggattgtaaaatctaagtttttctgagctatctgagagtaagaggcttttttctattgaaaataggttgcatttcaaactttatccgtaagagctcacaacactttctccaacatgcatgcccatgtgctcacttaaacagaactctgagtgagacagtaaatacctcatatgcccttgaaaattttaccttggcatagaaaaaccttgttaagaacctaaaaataatttcactttgaaagtctttagggttagacaaatgttaaacttcaattggcagtacaagggcagcactcaagccagtaagagttttgttgggccaaattatgttgaaaaagatcaaatattttaaaaacaggagatttcacataaaaatctgggattccagcttcttctgaataaatgaggtacactaattatgcagagtggcaaatggctggagttgagtgggaggtgtttctagcccaacagataggcatggaagctccagctcagccccctccactccattttcttacacaagggaagccactatggtatagcatctaacttaaggcatattatatgtattcttaagacagaggaaaaggctgaatatttgatattgtcaaaagaaatgagagtctaactttctgtggcaaggaccttcttgcagtagtaacatagtctggaacacctccaacataaattatgaaaagaaagctcttggctcagaagagaaaaagcaaaaaagaatactcattaattcta

SEQ ID NO: 91032 - DNA, 243 bp, Homo sapiens
atgctgccgtggacctgggtgtggatgatgctgctgtggaactgggtgtggatgctgctgtggacaggggtgtggatgctgctgctgtggacgggggtgtgggcgatgctgctgtggacctggatgtggatgatgctgccgtggacttgggtgtggatgctgctgtggacaggggtgtggatgatgctgccgtggacctgggtgtggatgctgctgtggacaggggtgtggatgctgctgtgg

SEQ ID NO: 91033 - DNA, 349 bp, Homo sapiens
aatagattctgtgggattttctaggtaggcaattatgttgtttgcaaatagggacagttttatttcttccttcctaatctggatatcttttatttatttttcttttcttattgctccttttcttttttaaatttttttattttattatgattatactttaagttttagggtacatgtgcacaacgtgcaggtttgttacataggtatacatgtgatgttgaataggaatggtgagcatggtcattgccttattcccagcattacagggaaagcgttcagtctcttatcattaaaatatggtgccagctgtggtgattttacagatgccctttatcgggttgagaaaatt

SEQ ID NO: 91034 - DNA, 239 bp, Homo sapiens
tgctatattttgtattggacataaatattaattgttctcatgaacatcagcctatagggaggcctatagcctcccgatctaaccccctaccaggtgtagccagtatatctaaatggagctctcacctgcctgtctggtacctttggttcctcaaggtgttgagagcctcatccagaattacagttgccagaatcagcagactgaggagcagatagagttggaggggccagcctacttaa

SEQ ID NO: 91035 - DNA, 465 bp, Homo sapiens
aaaaaaaaaaaaaaaattctttttctggtgtttgaaggtgtagctgtgatgtttccccttttcttagtggcatttattaacttgtagaaaatctggaatacaccaaaactatagttaagaaaattaacactttgtttctccgtctttcccatcaaagcattgtggatggttcctttcagtcttttttctttttgtgtatgtaggtttacacagggaatgcacaagattggaattattcgcctatacaatgtttatatatttttccactcagcttgagcatttgccagtatcatcaattattccaaagtgtgatttttaaaagaaaaatggactcaatattccaacatatgggtatactaaattgatttattcaactttttcaccattaaataatcacagaaccagtgtttgatatcttgttgctggtggataatagtaaaaataaaatcctaatatttgtgtcat

SEQ ID NO: 91036 - DNA, 368 bp, Homo sapiens
acaggagccccggcaataccagaaaaatgaagcaaatgaggagtcataaatatcactggagaccgggcctgtgccaggactgtcagagtacggaacagtgccaagaacttctctactttaaaataacttttggctgcacgcggtggctcatgcctgtatcccagcactttgggaagcagaggtgggtggatcatttgagctcaggagttcaagtgatcctcccaccttggcctcttaaagtgttgggattacaggcatgagccaccacacctggcctctagtgtgtttactgtgtcttctcagtttctaagtgttcttccaaaatgtgaattcttttgtgtgtcacttcttttttttatttttttttt

SEQ ID NO: 91037 - DNA, 355 bp, Homo sapiens
tgactgtaggtttgcacttgttgaccaacctctcttcatctctcctatctcttccccacccagtggtaaccactattctactttctacttctatgagataaacgtttttagattccacatataaatgagatgcctggcttatttcacttaatataatgacctctgggttcatccatgttcactgcaaatgatagaatttcattcttttctatggctgaatagtattccattgtgtatatatgacatattttatttatccattcatacactaataaacacttaggttgattccatatcttggctattgtaactagtgctgcaataaacataggagggcaggtatctcttcaacaac

SEQ ID NO: 91038 - DNA, 523 bp, Homo sapiens
tctgccttcctctccccgctgcttccatcctgccctccccaggaatctcctggtttctgtggctccgaccctcctcctcagaaagctcaagctcattccaggctcttctgtcatgtcaggcatgtttgttgctgaaactgggcatgggttagacttgtgtacacaagcagtttgtggcagacctgctatgtgcttcagggcattggcccagctgctggggggcaaatggaatcagctacattatccttagtcttgctctcaagaaaatcctgccttttggggcagaggaggtgggcagatggttggacaactggctgcccaccaaggcagaacgccattgggcctcaacagagcagtgagcagagtgccagcaggtttgacctctccctggagaggcttgtcagctgagcaccgtgagagagcaggatttgggtaggcagagaaccagagaagggaattccaggctgagggaatggctggagcaaacgcttcgaggtgggaggatgccttttctgttgggggc

SEQ ID NO: 91039 - DNA, 326 bp, Homo sapiens
ctttatttagtgctggggctttggaagcaaatgtacctgagtttgaatctcagggataaccttttgactgtggccctgggtaagttactcactgtctctgaaacttcaagttcctcataaataacctaagatggacaatcataactctctcttggattgaggtaggagaatatggtggaggcagggaaccgaaggccatttcactccaacttcctagaactaaattaaaaggaaaaccctaattttccatgcctaagtaacaaaaggaccaaaggttactccgtttgcaaactcccaccttttctgcatggcagatgggaagttgg

SEQ ID NO: 91040 - DNA, 425 bp, Homo sapiens
taattcgtcatggataggatggtcttttcaacaaatgatgctgaaaaatttgggtatccacatagaaaaaagaaacttgaatccctacctcacactatacacaaaaattagagatgaatcacaatgctcaatgtaaaagctaaactataaagctttaataaagaaaacagaatatcttcatgccttagcataggcaaaagtttcttaggacacagaaacaacaaccacaaataaaaaaataataaatcagacttcgtaaaaattttaaaattttacttccccaaaaaactagctgcaagtcaacaagtacaacaaacctagtaaaaatcagtaaaagagatgaataggtagttcgcaaatgaagagtatgtgaatgatcaatcaatgtcttcagcatcgtcagataacagggaaatgcaaatgag

SEQ ID NO: 91041 - DNA, 343 bp, Homo sapiens
ccaaaaagtgaatactgcctccaccacctattagctttgtgaacttgggagatttacaacctctgaacctcagtttctagaactgtagaagatttattagagtaagtccttctgtacagacctgtttcaaggattaagagaccaatgcggggcatttagtacggtggctagcattgaataattgttcagtaagtactagctctcattctttccaagttgttcctcagtcatctaaatcattcacatattaagtgagaatccacaggcatcagagctacagaagccaatagggacaaaactcctgttcttaatggagattacaaggctacatgtagaaagcttt

SEQ ID NO: 91042 - DNA, 358 bp, Homo sapiens
ttttttggttgaagataatacagtggcttctttttacattttagtaaaacttttttgggtggaggggagtgttatttaattattaaatgtattctgatggaccatgtccttttaaatatgttgaggtagtggagcttataaggcagttactatgtttaactctcctaaaaatagaattccaaaaaggtttttgcttggagttcagattcacactaagctattatttcaaataagtggttgtttacgccacttcatttctttcactacatgtaacagcattaataacaaatatagtatcacagatttacttatgtttagcctaaattgtgcagtcatttaattgatgagatggtgagaa

SEQ ID NO: 91043 - DNA, 443 bp, Homo sapiens
aacagaacaaaatagagagcccagaaataaactcatgtgtatatggccaaatattctttgacaagagcaccaaaaatgcaaaatggggaaagaatagtctcttcaataaatggttctgggtaaactggatatccaaatgcaaaagaatgaacttggatctttatcttataccatacacaaaaattaaaatatattaaagtcttaaatgtgagacctgaaaccataaaacttctagtagaagaagttgggaaatggctccttgacattggtcctgacaatgatttttttggatgtgaccccaaaagacaggtaacaaaagcaactatatcaaactaaaaacttctgtgcagcaaaggaaacaatcaacaaaatgaaaaggtaacctatagaatggaataaatattttcaagcccatatatctaataagggattaatatccaaaa

SEQ ID NO: 91044 - DNA, 676 bp, Homo sapiens
aaaaaaaaagagttctgtttggttttatggaaagaatattactttttaacaagaaaatgtctttcttttcatgagccattttcttactgcatttaatcatattattaagataaagtgcaatttgttatgtggacaaatgtatatccctttacaattatatttgtttctattgcatacatttttctggaagaagtcttattttcacatgcaaaatttgtgaatggtgcctcagagcctcagaagacagaaagttaacagctggttcagtctagaatgtgtttctttgattctcttttttctttattttaggaacttagcttagtttttccaaaatgattgaaaggtctccgttgattttctctgctgttatttgtgtctgtatttgatataactttatatcatacatctgaaaactatcacataaactctacttggcaaatagttcttcacttccatcgatgtggatttctgtgtctttcaaacagcggtgtagttttataaagtatctatctttaattggtatttctaagttagaaaaagggggaaaaaagccagctcaataaatattaatataactggtgactaaccaattacaaaaagaaaaactagcgaaatacttcattttagaaatgtaaaagtgagtaacgacccagttgtccaacctgattaaaaaaac

SEQ ID NO: 91045 - DNA, 494 bp, Homo sapiens
accatggtggccttaacttccttaagacttagtttcttcaactgtcaatcacacttataatgacaatagtgatattattaattgtagcaataacaactgtaaacacattgtatggttagcaggtgctgtgggctgcatcaagttcttttgtttttatgatttcattaaaatctgagtttttttcctacctcgtgcagatgtttttaaggatataaatagaaagaaaaagtgattataaggatactgtgtgtaccagaattttaaaaaattgtaaggtatatagaaatatagaatttttattgaataaataactccctttaaaagaagatactctgatttttagaaagtgaaagattttgattataacaggaggttaattttttttccttttcaaaacttgtacttaatttaagaagtaatgtaaaattttattatgccaaaacagaggcacacacttatggaactgcttaccataaaagtgataacaaaatgtc

SEQ ID NO: 91046 - DNA, 471 bp, Homo sapiens
  misc_feature (20)..(22): n is a, c, g, or t
agtctcactctatcacccannnggctggagtgcagtggcctgatctcggacactgcaagctccgcctcctgggttcatgccattctcctgcctcagcctcccaagtagctgggactacaggcgcccgccatcacgcccagctaattttttgtattttgtttagtagagacggggtttcaccatgttagccaggatggtctcgatctcctgacctcatgatccgcccgccctggcctcccaaagtgctgagattacaggcgtgagccaccgtgcccagccaagaattcttgtataagtcttttcttcgtgagggacttcacaggggactccaagataaccactcctgttcttctccccagcccttgcctgcccctgctgatattttaaactggaaaatacttctgatttgaatattctccctgtgcaaattttcttccctggcatactttctgctagatttcaagagggaac

SEQ ID NO: 91047 - DNA, 190 bp, Homo sapiens
  misc_feature (1)..(3): n is a, c, g, or t
  misc_feature (8)..(8): n is a, c, g, or t
  misc_feature (188)..(188): n is a, c, g, or t
nnncttcncatccccctctgagccaggagcctcctgaccctgtgatgcctgacacaggggacagtcagctttgttgatgccagctgtgctgagttcccatccagagaggtgaggcatggcccagcctggagcctggagccgtggctaagcatttctccagaccactcctggttttcttaacagtttgntt

SEQ ID NO: 91048 - DNA, 304 bp, Homo sapiens
acttctgtgcagttgggagggctttttgtagaagctttatttgacaatgatttttctgttgcttaggtcatttgaggggaaaaacattattttaaagtttaacgttatttctaattgtcttaggaactatcaacatacatggaaatagaaattatctgtgtattgatttgtgtgtaatacacttatgctgagtttttcctgagtttttgatccatagatagataggaatctggtgggagttggaaatatgggcaaaaaatggtgggagggccaggtgcggtggctcacgcctgtaatcccagca

SEQ ID NO: 91049 - DNA, 404 bp, Homo sapiens
ttggagacggagtctggctctattacctaggctggagtgcagtgggacaatctcggctcactgtaacctctgtctcttcagcctcctgagttgctggaactacagctgtatgccatcatgctcggctaatttttgtatttttttgtagagatggggttttgccatgttgcccgggcctgtcttgaactcctagagcttaagtgatccacccccctcaggctcccgaagtgctgggattacaggcatgattataggcctgagccaccacaccccgcctactatagcagttttttaaaaaaagcattatgttaaaactgattataccagatggacattaaatatccatctcagaaataccaaaatttgatacataagcctgggcaacaagagtgaaatccgtctca

SEQ ID NO: 91050 - DNA, 670 bp, Homo sapiens
ctgttaccatggagacagacatgttgtgggcttaggctttaccagcgaacacctcagcacaaaaagctgaattgattgccctcactcaggctctccaatggggtaagaataaacgtattaacatttacactgacagcaggtatgcctttgctactgtacatgtacatggagccatctaccaggagtgcaggctactcacctcagcaggaaagactcaaaaacaaagaagaaattctagccctgcttgaagccgtatggctccctcagcaggtggctgtaatccactgcaaaggacatcaaaaagaaaacacggccattgcccgtggtaaccagagagctgattcagcagctcaggacacagcatgactttcaggcacacctctaaacttgctacccgcagtttcttttccacagccagatctgcctgacaatcccacatactcaacagaagaagaaaaactggcttcagatgttggagcaaataaaaatcaggaaggttggtggattcttcctgactctagagtcttcatatccagaactcttaggaaaagtttaatcagccacctacattctaccacccatttaggaggagcaaaactagcccagctcctctggagcctttttaagatcccccatcttcaaagcctaacagatcaaacagctttccaga

SEQ ID NO: 91051 - DNA, 205 bp, Homo sapiens
gcttgtctcccactgctctccagacccatcactttgtacatgtgttttaaacacatccctacatttaaaccttctgctcatactgcccccactatctagactccctcctccctgccctagtcaatgtttactaaaatccccttcatccctcatctccccattcaagtactttctcaaataattcacccccctccttttttttttg

SEQ ID NO: 91052 - DNA, 345 bp, Homo sapiens
  misc_feature (30)..(30): n is a, c, g, or t
  misc_feature (294)..(294): n is a, c, g, or t
  misc_feature (314)..(314): n is a, c, g, or t
ctgaggattccaggcactcacacttctgancaactagctacaaattcatatgttctcatcaactcctcagcctcccgaagtgctgggattacaggcatgagccactgtgcctggccactaattatttatttttatgttacattaacagatgtttataatcatttctatgcttttatcttttaaattttagagaaaaattaataatgttttctgcatgattattaaaatgctaaggaattctgtttttgtgtagagcagaggaggtcccagataccaagtggcgcctcccagganaggctgggagaagaggtggnctggagtaccccgagatcccagcagcgcaca

SEQ ID NO: 91053 - DNA, 127 bp, Homo sapiens
gatcgactgagctcaaatttcagttggggccctattagtctgcctttccaaaaagggcgttgggactttaatttaaaacttaaccagttgaaaaataaaggtggcgtggaaatgctttttgatttgc

SEQ ID NO: 91054 - DNA, 223 bp, Homo sapiens
ctttcttaaaggttttatcaattatactttctccagccgtgtagaagaatgcatgttttcccacccctttacctattctatgtgtttgtcataaaacattttttaatcttttcaaatctgatgttttaaaaatggtatcatatatttgcatttctcttaatgtaaatgagattgcacatcttttcacatgcctaatagccagttgtattttcttttctatatt

SEQ ID NO: 91055 - DNA, 234 bp, Homo sapiens
gctgtatcactagcactcagaacactgtctggcacatggtaaatacttaaatatttgcttaataaatgaacaacattcccaagttaaaaggtaaacatgaaagctcatacaataaaaagcaacacatttcttgcctaaatgctcaacttcaataacaatttttttttctttggagacaagagacttgctctgtcgccctggctggagtgcagtagcatgatcccagctcactgc

SEQ ID NO: 91056 - DNA, 314 bp, Homo sapiens
tggaagagaaaagcaggaaagtcaaggaaatgtaacaacaaagcagcatcagaaagagacaacattccaggccttaaaggtggaaggagtctgtgagccaaggaatgtgggcagcccccacaagctagaaagggcaagaactgattttgtctttgaatctccagaaggaaatgcagccctgctgacaccttgattttagtccagggacaccggcgtcagacttctgaactgtaagataaatacgtttgtattgttttaagccactaaatttgtggtaatttgttgtagcagcaataattaatagacactgagct

SEQ ID NO: 91057 - DNA, 464 bp, Homo sapiens
aggatataagagtgggtagagtcaaggatatcaaactaaggaattacagaggcaatgttcaactctggtaaatcttaaccaaaggtaagacacttgcaactttctagtcatctctttttctccagcccaatgtcattgccctggctcaagcagtagtatcttttcaacatttatgcagttgccttttaactggcctcctttgccattactcaggcctcattttctgtcttctacaacctggctaaccattcttttcctttaaaaatgtaaatctgacagccgggtgcagtggctcacacctgtaatcccagcactttgggaggccaaggcgggtggatcacttgcggtcaggagttcgaggccagcctgaccaacatggtgaaaccccgtctctactaaaaatacaaaaattagccgggagtggtggtgcgtgcctgtaatcccagctactcaggaggctgagg

SEQ ID NO: 91058 - DNA, 471 bp, Homo sapiens
cagaaatgaaataaagatacagtaatgaaaattattaaaacccaaaatagttctttaaaaaaccgacaagcctctggcaaaatcaatgataaaaagaatggctttgaggcgccacacactgcacccatctaaaacagcaaacttaatccataaatgcatgtgtctgctccaccgactggccattcccccatctctctttggccttcctactccctgagacacaacaatcttgagttgaggccagttgataacccccacaatggcttcagagtgttcaagtaaaatgaagagttgcatttctctcactttagatcaaaaactagcaatgattaagccaaatgaggaaggcatgttgaaagctgagataggccaaaagctaggcctcttgtgctaaacagttagccaagttgtgaatgctaaggaaaagttcttggaggaaattaaaagcgctgctccagtgaatgcacaaat

SEQ ID NO: 91059 - DNA, 296 bp, Homo sapiens
cacagtatgtactaatctgtagaaaattatagcatactatagcctgtttttattttacataacccagcaaatgtgaatttgtgatttaaaaaactgagtgggtgtgtctgtaaaatccaaatatctgttcatacccaaacacacttaatcttaatgtttggagaagggcaataatgaaaaagtaaaaaaggattatgtgaatttagagatgggttgaaatgagtaaaattcaagtttgtttaatttttaatgtgtatttatagttagatttccaaatggttgcaacacttaatatt

SEQ ID NO: 91060 - DNA, 288 bp, Homo sapiens
tgagggtaatggaccagggagaagttaagagtaaactgcctgggaagctcaggtggtctctctacatgagcagtgaaagggattattccagggggaagggataggccctcagtgctctcaatgcctcagcaatgttttgggcccatcctcatccccaattctcctacaaacacacataccacccccagagaacccctggctcccctgcaccataaagcgaccccccttcacctgcgaccactcacagaagccgccctccctaccccaggtgaaagtggcccctcggcc

SEQ ID NO: 91061 - DNA, 1171 bp, Homo sapiens
ttctactttaacagtttcacagtctttgccagttctaagtaccttgtagctgtattgctcgtttgctttggagaccacagtttctaacagactttcaacagaggactgtcttattccactcttcggcgaagctttacgttcatgtaaacagcatgacgtgaggccgtggatgcaggcattaaggtatactgtgtaccagaatcagttgttggagaaaattaaagttaagtggttttccttttttttttttttgtaagagaaaattaaaggtggttttttttttttaattttgctttattgaggtttatattacacattctaagtgtatggtttgatgagttctaacatgtcttcacttgtgtgaccaccaatacgatcgagatacagaacagcgtcttaccccagaaggttcccttgagatcatctcctcatttgcccctgtcagcagttactgatttgctttctgtcactatggattagacttgtctttactaaagtttcatgtacgtgaaatcataacaacatgttctcttgtgtttggcttctcttgctcagcatgatatttttacggttcacccatattgcatgtatcaggaatataatcctttttattattgagtagtgttctattgtatgtatataccacagtttatttctcccttcatcctttgctagattttggggttttttcacattgcgctattcagtataaacctgctctcaacattcatgtgcaagtctttgagtggacatatatttgcgtttctcttgagtgaatgcaccttgttgggtcacgtggcttaacttaaaaaaattttaatcactgtggtgcatatgtagtgattattagtgattatctcataattttattttcttgatgactaatgatgttgagtgtatttcatttgtattttagtttgcaaatgtttgttcaaattcttcacccgtttttaatgaagatgtacgacttatttttgtgttctgaacagaagttctttgtcacataaaatgtgctatgaatgttgagttttaaatactccaaatgaatggctagagaattactatttgtagaaatatttatatgtcaaagggatgctaacaatttactttattgctctaaaatagaaaagttgccagaatgctgtggagttttagtggaaaacatgatagc

SEQ ID NO: 91062 - DNA, 1536 bp, Homo sapiens
tgaatactgtatcccaaagtatgttagttgtttgtttggaaatcagcattctccccgatgctctattatgggatccaaaattcttgaacataagtttaccctgtactgtgtccaaacactgttctagttctagcctgattatgggtcccaagaataaaaggatgagtaggtgtacagagctcttgacctacaattttttaagagtgttttggtaccttcccattgtcttctctataactcagtcctaacatactctgcactcgagttaccagccatccacactgacatcagatttcaaccagaaccatcactgagtgacagcagtacttctcagaggtatttgcagcttgatgcaaagtagtctctaatgagtaggcattcaggtggttcttcccagcaggtggagaagaaagggaggagatgaagaacactgagaggggagtggcaccttcccaggctgcccagctcagtctcttgccctgttcctgtgactcagctgcccactcccccaactttgtttccctccctcccagtctctgaaagtgtcaggtgtttctctcctcacagtctcttttgcagcaacagtaagacaaaattcaaggcagccttttaaagttacgaacagttattagcatgtatttacagacctaagcagaatgagagtttatacattgtttttagttgcctgtatttatagccaaaagtatattaccttaaagttgagatctttctcttcttttcctaaattttggtaaagtgtgcttcatgaaacaaacatctggaaaactccaagtataagagaccctggactgatgatggcccagccaagtatatggagggacagagttctctctgtcattaatgaggacatcggttttcacaattgaacctcatgcactgtccacagcatctcacctagctcctgtatctcctgatctgcttttaaaaatagttagttaggctgcctttttacaccaccttctctctctccccttgtggtaattttccagccttccccatagatataaaactagaacacctttatgatttggggtctatgtaatgactgaccgataagaacccaggcagatgctaacatacttaacagctcgcattaaaatactttaaatcaggaaaaaaaaacacaaaaacaacagggggaaccaaatacataaaaaatttaccttggaagggagccaacgagaacacagaaccccagagttttattgtaacaagggcaccccaaagcagaggtcgacatatacgaccaggcacctgaccggcatatacaaagacgtgcaagggaaaaccggcaacctgggcacctcggaaggacctacctcgcggctgggacaatagacacactccaccgcgaataacgcacggcaacaaacattcagtcattaggtaaacacagaccatactcgctgaaactgctcagcaatgcaacacattaccaacacgaacagagcacagacaacagaaacggaaccgacaaacgagataacataacaagacacagaagcaagacgacac

SEQ ID NO: 91063 - DNA, 1718 bp, Homo sapiens
tcatatgacacctagtgagcttttaaaatttaccaggaaatttgcagcggttggaaaatttagaaagatttatggtgtagaaaatacttttgagatctttgtatgaaaggagtagaatcaatggggggaaacactgctggtttcatttttgtaatcaccagtggagcgtctgatcatcctggttattatgtgataggtggctcacattgatttgtgattttgaaacaaataaaaaaaatttacaaaagaatatataagagcaggcaagaaatttaaattaccgagagatgggggaaaaaatctgttcttcctaaagaaatcccttcagatagagctcatggtgtttagtgatgtacttgcagtattgtttgaagaattgttttgtcttaaggaaaaaagacgttgcacatgatttgtactgcagcaaatcagcaaaagtgatctgagttggatatatttgaaggtattttgaaagttacgttcaaggctaacacctgagctttgtgtaatgtaaataagaccttgtgtttatgaacctttcagctaatttaattttttttcccttacatgccaagtgatgttcaggttttgaatgtttttgtatcagttttttcctttgtaaatggcattaacattgttacttgaggtcttgcttaatcacttttgttgtcctgaggacttgaatttacagtgcatcagatttgttgcaaattttgtctgtagatagtctagcttcagctgtttatggtgatgctacattttcgtttataaatatgtttgtggtataaaaaaatgagtataaccataggttttgaacaaatttccttacatttttcatacaaaaatcataaatatctgtatgctattgaaatttaactttgtatgatgcttaaaaaccactatttggggaaataataaaataagtctttaccatgtatgaaagaaattttaaaaaatacaaaatattttctgattagcatctagcttataataaattttcaaaaaagctgaaggcaaaaatgccttcatcaggatgcactgagaactatatagttacgtcctgctttttgtataaactgagatgctcacatgcttccccttagaacaggcaatgtgctatgcataacatagttgtacattatctttgcggttgctttgagttttattttttattatttaaaattgtagttataaaatttttcagtatagtacagtacatatactgtgaggcgcgtgctaaagtgaataagcgagttttcatgctgacccactcaatgctattcagaaatcaattggcttagcactttctcatatccttaggtgcatttagattgccagagttaaccttctgcgtttaaaaaaagaaaaacactaaaaaataaaatacatgtatatacttaaaaaaaaataataaggtttccctcaagggaaaacagcagctacatgcttctttcctatactactgtagcaaaccaaggcattgatgagagggcatgcaaattgtgcttcactttacagtgttttatcagagcacttaataaaatgtaaggctggtatttatttgaagttgtacagtatgacttaattcacatctgttggaatagaaaatatattctgttgagtatttaagaggctgtacatgttttcttttgtgtttggattctttgtactttttcatgttcagtacatcaataaacaaagttgaagggaaaaaaaag

SEQ ID NO: 91064 - DNA, 617 bp, Homo sapiens
atttacatataattttactgatacccatgcagcacaaaggtactaactttaaatattaaataacacctttatgtgtcagtaattcatttgcattaaatcttattgaaaaggctttcaatatattttccccacaaatgtcatcccaagaaaaaagtatttttaacatctcccaaatataatagttacaggaaatctacctctgtgagagtgacacctctcagaatgaactgtgtgacacaagaaaatgaatgtaggtctatccaaaaaaaaccccaagaaacaaaaacaatattattagccctttatgcttaagtgatggactcagggaacagttgatgttgtgatcattttattatctgattcttgttactttgaattaaaccaatattttgatgatataaatcatttccaccagcatatatttaatttccataataactttaaaattttctaatttcactcaactatgagggaatagaatgtggtggccacaggtttggcttttgttaaaatgtttgatatcttcgatgttgatctctgtctgcaatgtagatgtctaaacactaggatttaatatttaaggctaagctttaaaaataaagtacctttttaaaaag

SEQ ID NO: 91065 - DNA, 221 bp, Homo sapiens
tagatggatgcggctcaacaagaatttagacaaaaataatgaactataatgtgttgccatgacttagtctctaatgagcttataaataaatccatatttcagcacacatatagttttgttcagtacctctaaaggtggtaaatcaagaattcttatgctacagagaaaacagattctgctattacctaagaaatcaactggaaggcttttttttttttttt

SEQ ID NO: 91066 - DNA, 177 bp, Homo sapiens
aaaaaagaatgttttatcaactttattaaggtttaaagagtaattgacaaaaattaaatatatttatggtgtactgtgtgatgtttatatatatacactacacattgcgaaatacataaagctatttaacatatctatcactttacatatttttttgagatgagaaaatttaagatc

SEQ ID NO: 91067 - DNA, 370 bp, Homo sapiens
attggaagccccagaattgattgggtcagaaattgaaaatgatactatcagtgacccaggtttgaatgtctctctccacagcattgacttcactaatggatgtgacctggttggcagcagtagcttgcacaacatgcttgtttgcagtgagtagtagagagaaggttttgctttcccagaaactctgaaaaaggtcatcaaacctaaatttccttagccttcttcttccatgagcaaatcactagcagatgattgctagcaaggtgttactattacaatgaacccctaagtgtcagagaaagagttagtttggggaaatatcctctccaccacaatcttagtcattgaagtcaatttaacaatatattga

SEQ ID NO: 91068 - DNA, 203 bp, Homo sapiens
aggtcaatcttcctgacacattttgctggttcttcctcatgatccaaacattagaggaccccagggcgtagttcttagacctctattcttctctatctctactcacttctttttttgttgttgaggtgggtggtgcagtgtttattcagtgatcttcctactttctttctttttttttgagacagagtttcactctgtcactc

SEQ ID NO: 91069 - DNA, 461 bp, Homo sapiens
aaaaatctcaaataaacaacttaatattgtacttcaaggagctaggaaaacaaaaacaaactaaacccaaacttaaggaggaagaaaaataataaagattagagtggcaataaataaaattgaaactagaaaaacaatttttaaaatcaacaaaactaaaaattgttttttcgaaaagaaacacaatcaacaaaccttttagctaggctgagaaataaagagagaaaactcaaataaataaaatcataaataaaaagtagacattacaattgacacaatagaaatacaaaggatcatatgagactattatgaacattatatatcaacaaatgagataacttacaagaaatagatatattttgatgcatacaaactaccaagactgaattatgaaaaagtaaaaaaccttaacacaccaataacaagtaaagctattaaatcagtaatcaaaactctcccat

SEQ ID NO: 91070 - DNA, 440 bp, Homo sapiens
atgggaaagggggaggagtccggagctggaaaaccacagctaaagcaaaccctttttactaccatccacttcaaccaccttttatcagagctgtcactaaggggcaaagtacaattttctcgctcctagtgagaggattaagcagcagcaattcagacaagaggaaaggggagactagaggagaggcagagacagggtcaagaccatgcaaggttaggggtcacaaatgggtagctcttcacacccaataggccctattttgtatggcctgcaggtttttttttttttttttaagttggagtattgctctgtcaccaggctggagtgcaatggcgacatctcagctcactgcaacctccgacgccctggttcaagggattctcctgcctcagcctcccgagtagctgggattacaagcacaagccaccacgctcagctaa

SEQ ID NO: 91071 - DNA, 168 bp, Homo sapiens
aacattctctgccatactcctcttgtcaatttctgctcacgtctcattggtcagaattacttaacatcatgggatctaaaccactaacagctagggaatgagaccaccaggactggtttaggtcagggttctcaacctcagcaccattgacattttggactggatggt

SEQ ID NO: 91072 - DNA, 854 bp, Homo sapiens
actggatttctgaaccctatcattttggataaagggtactcaacctatggaagattaaaaaggaaggagactacataaagcatgaactgagttctggtttccaaaattatacccaggtgttggcattcaaccagtgtcatgcatactcattcagtgcatatttattaagtacttaacaaatatcacgaacagtgctctccaaatttaacctttgatctaaaggttctccctctgaagaaacttagtgaaatacagtgttattccaaaacaggagatgaaatgaagaaaaaaactcttatattcctcttaaaatttaaaaagggaacatgatggggaaataaagagtaaaacagtttgtcatacataaatatatcaaccatcacttgttttgtttaaatacttctccttaattgctcaatatggtcacacagccattataaatatttatcataatttccaccaagttttctgtgaaaaatagtaccatgaaaaattagtatatttaagctctaagcaaaaaaaaaaaaaaaaaaaattgaaacacttaaattcaataaacactgttaaaaattactttaatttggctgggagtggtggctcatgcctgtaatcccagcactttgggaggccaaggcgggtggatcatttgatggcaggagttccagaccggcctggccaatgtggtgaaaccccacctcaactaaaaatacaaaaattagctgggcatggtggtacatgcctgtaatcccagctattcaggaggctgaggcaggagaatcacttgaacccaggaggcagaggttgttgtgagccaagattgtgccagtgcactccagcctgggcaacaagagtga

SEQ ID NO: 91073 - DNA, 836 bp, Homo sapiens
actggatttctgaaccctatcattttggataaagggtactcaacctatggaagattaaaaaggaaggagactacataaagcatgaactgagttctggtttccaaaattatacccaggtgttggcattcaaccagtgtcatgcatactcattcagtgcatatttattaagtacttaacaaatatcacgaacagtgctctccaaatttaacctttgatctaaaggttctccctctgaagaaacttagtgaaatacagtgttattccaaaacaggagatgaaatgaagaaaaaaactcttatattcctcttaaaatttaaaaagggaacatgatggggaaataaagagtaaaacagtttgtcatacataaatatatcaaccatcacttgttttgtttaaatacttctccttaattgctcaatatggtcacacagccattataaatatttatcataatttccaccaagttttctgtgaaaaatagtaccatgaaaaattagtatatttaagctctaagcaaaaaaaaaaaaaaaaaaaattgaaacacttaaattcaataaacactgttaaaaattactttaatttggctgggagtggtggctcatgcctgtaatcccagcaaccaactacagaactagaatgtaaccaataatgttgaagcagctttatggtcctcccatctgtatcctcctgtcttggaaaatgtatatactttttcttcttcaaatttgggattataataaatacatctttgaatcctggactttcattatattataaccattcacccaagaaacatgttttcatactttctgtcagaaactacaaaaacctcagtg

SEQ ID NO: 91074 - DNA, 290 bp, Homo sapiens
acttgtatatacatgtaacttacaggttagttttgaagtataataataaaagaaattcctacgaacccaccaaccaactacagaactagaatgtaaccaataatgttgaagcagctttatggtcctcccatctgtatcctcctgtcttggaaaatgtatatactttttcttcttcaaatttgggattataataaatacatctttgaatcctggactttcattatattataaccattcacccaagaaacatgttttcatactttctgtcagaaactacaaaaacctcagtg

SEQ ID NO: 91075 - DNA, 334 bp, Homo sapiens
gagaagggtctatattaccttcatgtagtaggactgacatgagggtgctagatcaggtccaacaatgattagacagaataatagggtaatagtaggcatttgtttggtattgccatattccaagtactgagcaaagtgcttgctctatattatctcatgtaatcccaataataaccctttgggaaatggcatttgtattcaggcatgatgtgattctagcagagggggattaagtagggaattggtgcaaaggtataagtaggattgaaggtgcaaaaagcagagagtggtgtaactcaagagatctagctgcttttactgcctctggactgaa

SEQ ID NO: 91076 - DNA, 447 bp, Homo sapiens
atgagtatgtgtttgaggtgggggaggaagttgaagcaataagttgggccaatttcctaaagtcccttctgcccctgagattctctgcttctgtggttcaaacagaggaaatctggacatttgtccagccactatttttgtaatggaggtgggacagccagggttcctggagtgtgctgtggaatcggcatttacacttctcttccatctctagtctcatttctgtaatcttcatacagtattacagtattttgttttctaaaataccagattggcagtaagtgacaaaactagcatctcattggtcagggcttgtgggggaggaagggagaagaaagtggatttcaatgtattaacattttattggctgagaggatgtttctgaaccaattgagtaccttccccattgactgttgctggggccaagccaaaatcattggcaccacg

SEQ ID NO: 91077 - DNA, 427 bp, Homo sapiens
ttgtacattaattagaggtaaagcagagtttcaaacctacgcctgtctgacacatcttttctattacaccacactgcctccccagccatataaacttcctaggagatttgaggattcagtttaagagaatattaaaatgttctatcacatttcaagtgatagaatagtaggacttggtgattaaaaatgggagctagaagagatggaggaatgcaaggcttccactttggtcaactgagtaatatcagaactcttatgtaaaatgtataaggtaagagcaggattgagggggaagatcctgaattcaattgggaacgtgctgaaattgaatttcctgggaggtcatcaggagagctatctagtgaccattaggatacatgtaacaagagctcaagaaaaggaagagacatgaaatttcagatttcag

SEQ ID NO: 91078 - DNA, 419 bp, Homo sapiens
ctaatttccaaatattaccacttggatgtcccacaggctcttcaaaaccagcatatccaaaataaacacatcatcttcctcccaagctgttccttctcttttaacagcaccactgtagcatcctataagctaaaaaccttgaattctcctttagctcttccttttccctcatctaccttatacaactgcctatttggtgtctctgtttgcatgtcccaacagcttggccattacttcattcattcaacagatatttattgagccctactttgtgcctggcactttgctaggtgttccgtacacagcagtagacaaaactcacagcagttcagttttattcctaagagagtgatgagtatcatgatggggtcagttattgggtgatatggaaactcacataagaggtctattacctacac

SEQ ID NO: 91079 - DNA, 479 bp, Homo sapiens
tagctctgcacaataaagaagaatctggcccaaagggttagtgtggtggggctgagtacacacactgcactcatacatattcattgagcatgagtgtcaatgaataataatgtggacacatcagttttattgagttgtcaagtgtgtcgggtattgttctatgtgcctcacatgtattaattgtttgaggtgtcatcacaatcctatgaggttggtagttgctcctattatcctgtaatacagatggggaaatcagaggcccagagactctgagctccttgcccattgtgacacaggtgctgggtgttggagttgggatttgaacccaagtgcctcggactcactccatcactgtctcatgaagaacaaatggctcattctctttcttgtccctatatttgtgccattactcattagctcacacaaatgtttgctaagtgcctgttgggttctaggtgttggggatgcagcttcgaaca

SEQ ID NO: 91080 - DNA, 545 bp, Homo sapiens
tgagtgggcagagctgacccggtgcgggtgggagtcagggcgcccggaaaacccggctctgggtagcagaccccgcccgggctggctcggcgccgggccttcgggcttccactcagtctttgaccctcggtcctcgctcagcggcccggcaggccgcacaactgtaaccgctgccccggccgccgcccgctccttctcgggccggcgggcacagagcgcagcgcggcggggccggcggcatggctgtgtcctggaggagctggctcgccaacgaaggggttaaacacctctgcctgttcatctggctctccatgaatgtcctgcttttctggaaaaccttcttgctgtataaccaagggccagagtatcactacctccaccagatgttgggggaactgtcttgaaacctatacatttcagatgggcacccagagagtaagacctcacctcgcccctcaagttgcttacaatataatggaaaaaccaacaaataaataattataattcaataaacaagaaaaggtttcttctaataaacacatgag

SEQ ID NO: 91081 - DNA, 2239 bp, Homo sapiens
tgagtgggcagagctgacccggtgcgggtgggagtcagggcgcccggaaaacccggctctgggtagcagaccccgcccgggctggctcggcgccgggccttcgggcttccactcagtctttgaccctcggtcctcgctcagcggcccggcaggccgcacaactgtaaccgctgccccggccgccgcccgctccttctcgggccggcgggcacagagcgcagcgcggcggggccggcggcatggctgtgtcctggaggagctggctcgccaacgaaggggttaaacacctctgcctgttcatctggctctccatgaatgtcctgcttttctggaaaaccttcttgctgtataaccaagggccagagtatcactacctccaccagatgttggggctaggattgtgtctaagcagagcctcagcatctgttcttaacctcaactgcagccttatccttttacccatgtgccgaacactcttggcttacctccgaggatcacagaaggttccaagcaggagaaccaggagattgttggataaaagcagaacattccatattacctgtggtgttactatctgtattttctcaggcgtgcatgtggctgcccatctggtgaatgccctcaacttctcagtgaattacagtgaagactttgttgaactgaatgcagcaagataccgagatgaggatcctagaaaacttctcttcacaactgttcctggcctgacaggggtctgcatggtggtggtgctattcctcatgatcacagcctctacatatgcaataagagtttctaactatgatatcttctggtatactcataacctcttctttgtcttctacatgctgctgacgttgcatgtttcaggagggctgctgaagtatcaaactaatttagatacccaccctcccggctgcatcagtcttaaccgaaccagctctcagaatatttccttaccagagtatttctcagaacattttcatgaacctttccctgaaggattttcaaaaccggcagagtttacccagcacaaatttgtgaagatttgtatggaagagcccagattccaagctaattttccacagacttggctttggatttctggacctttgtgcctgtactgtgccgaaagactttacaggtatatccggagcaataagccagtcaccatcatttcggtcataagtcatccctcagatgtcatggaaatccgaatggtcaaagaaaattttaaagcaagacctggtcagtatattactctacattgtcccagtgtatctgcattagaaaatcatccatttaccctcacaatgtgtccaactgaaaccaaagcaacatttggggttcatcttaaaatagtaggagactggacagaacgatttcgagatttactactgcctccatctagtcaagactccgaaattctgcccttcattcaatctagaaattatcccaagctgtatattgatggtccttttggaagtccatttgaggaatcactgaactatgaggtcagcctctgcgtggctggaggcattggagtaactccatttgcatcaatactcaacaccctgttggatgactggaaaccatacaagcttagaagactatactttatttgggtatgcagagatatccagtccttccgttggtttgcagatttactctgtatgttgcataacaagttttggcaagagaacagacctgactatgtcaacatccagctgtacctcagtcaaacagatgggatacagaagataattggagaaaaatatcatgcactgaattcaagactgtttataggacgtcctcggtggaaacttttgtttgatgaaatagcaaaatataacagaggaaaaacagttggtgttttctgttgtggacccaattcactatccaagactcttcataaactgagtaaccagaacaactcatatgggacaagatttgaatacaataaagagtctttcagctgaaaacttttgccatgaagcaggactctaaagaaggaatgagtgcaatttctaagactttgaaactcagcggaatcaatcagctgtgttatgccaaagaatagtaaggttttcttatttatgattatttaaaatggaaatgtgagaatgtggcaagatgaccgtcacattacatgtttaatctggaaaccaaagagaccctgaagaatatttgatgtgatgattcacttttcagttctcaaattaaaagaaaactgttagatgca

SEQ ID NO: 91082 - DNA, 430 bp, Homo sapiens
cagtgtatctgcattagaaaatcatccatttaccctcacaatggtaagaaacatatctcttgctttttcacatttgtagggtgctatgcatatttttctttttttgtgtcctgtctcattctaaaaggtattcaaggctatcatagtactcttgatgtttaagtaagctatctttttacaaggaaaatagttatctgctcaagaactgtgtaactacactttattattttttgacaccttgcaattcaggaagtaatgaattaaaacgtattaaagcttgttgattcaaaatataggccaagcacagtgactcaggcctgtaatcccagcacttttggaggtcaaggtaggaagaccacttgagccccggatttcaagatcagcctgagaaacataaggagacactgtttctacagtaaataaaaaaaaa

SEQ ID NO: 91083 - DNA, 2402 bp, Homo sapiens
tgagtgggcagagctgacccggtgcgggtgggagtcagggcgcccggaaaacccggctctgggtagcagaccccgcccgggctggctcggcgccgggccttcgggcttccactcagtctttgaccctcggtcctcgctcagcggcccggcaggccgcacaactgtaaccgctgccccggccgccgcccgctccttctcgggccggcgggcacagagcgcagcgcggcggggccggcggcatggctgtgtcctggaggagctggctcgccaacgaaggggttaaacacctctgcctgttcatctggctctccatgaatgtcctgcttttctggaaaaccttcttgctgtataaccaagggccagagtatcactacctccaccagatgttggggctaggattgtgtctaagcagagcctcagcatctgttcttaacctcaactgcagccttatccttttacccatgtgccgaacactcttggcttacctccgaggatcacagaaggttccaagcaggagaaccaggagattgttggataaaagcagaacattccatattacctgtggtgttactatctgtattttctcaggcgtgcatgtggctgcccatctggtgaatgccctcaacttctcagtgaattacagtgaagactttgttgaactgaatgcagcaagataccgagatgaggatcctagaaaacttctcttcacaactgttcctggcctgacaggggtctgcatggtggtggtgctattcctcatgatcacagcctctacatatgcaataagagtttctaactatgatatcttctggtatactcataacctcttctttgtcttctacatgctgctgacgttgcatgtttcaggagggctgctgaagtatcaaactaatttagatacccaccctcccggctgcatcagtcttaaccgaaccagctctcagaatatttccttaccagagtatttctcagaacattttcatgaacctttccctgaaggattttcaaaaccggcagagtttacccagcacaaatttgtgaagatttgtatggaagagcccagattccaagctaattttccacagacttggctttggatttctggacctttgtgcctgtactgtgccgaaagactttacaggtatatccggagcaataagccagtcaccatcatttcggtcataagtcatccctcagatgtcatggaaatccgaatggtcaaagaaaattttaaagcaagacctggtcagtatattactctacattgtcccagtgtatctgcattagaaaatcatccatttaccctcacaatgtgtccaactgaaaccaaagcaacatttggggttcatcttaaaatagtaggagactggacagaacgatttcgagatttactactgcctccatctagtcaagactccgaaattctgcccttcattcaatctagaaattatcccaagctgtatattgatggtccttttggaagtccatttgaggaatcactgaactatgaggtcagcctctgcgtggctggaggcattggagtaactccatttgcatcaatactcaacaccctgttggatgactggaaaccatacaagcttagaagactatactttatttgggtatgcagagatatccagtccttccgttggtttgcagatttactctgtatgttgcataacaagttttggcaagagaacagacctgactatgtcaacatccagctgtacctcagtcaaacagatgggatacagaagataattggagaaaaatatcatgcactgaattcaagactgtttataggacgtcctcggtggaaacttttgtttgatgaaatagcaaaatataacagaggaaaaacagttggtgttttctgttgtggacccaattcactatccaagactcttcataaactgagtaaccagaacaactcatatgggacaagatttgaatacaataaagagtctttcagctgaaaacttttgccatgaagcaggactctaaagaaggaatgagtgcaatttctaagactttgaaactcagcggaatcaatcagctgtgttatgccaaagaatagtaaggttttcttatttatgattatttaaaatggaaatgtgagaatgtggcaagatgaccgtcacattacatgtttaatctggaaaccaaagagaccctgaagaatatttgatgtgatgattcacttttcagttctcaaattaaaagaaaactgttagatgcacactgttgattttcatggtggattcaagaactccctagtgaggagctgaacttgctcaatctaaggctgattgtcgtgttcctctttaaattgtttttggttgaacaaatgcaagattgaacaaaattaaaaattcattgaagctgaaattccattttctgtg

SEQ ID NO: 91084 - DNA, 1443 bp, Homo sapiens
ttcatgaactttccctgaggatttcaaaccggcagagttaccagcacaaatcttcacaatatgtgctggtaaactctgccggttgaagattgtatggaagagcccagatccaagctaattccacagacttggctttggatttctggacctttgtgcctgtactgtgccgaaagactttacaggtatatccggagcaataagccagtcaccatcatttcggtcataagtcatccctcagatgtcatggaaatccgaatggtcaaagaaaattttaaagcaagacctggtcagtatattactctacattgtcccagtgtatctgcattagaaaatcatccatttaccctcacaatgtgtccaactgaaaccaaagcaacatttggggttcatcttaaaatagtaggagactggacagaacgatttcgagatttactactgcctccatctagtcaagactccgaaattctgcccttcattcaatctagaaattatcccaagctgtatattgatggtccttttggaagtccatttgaggaatcactgaactatgaggtcagcctctgcgtggctggaggcattggagtaactccatttgcatcaatactcaacaccctgttggatgactggaaaccatacaagcttagaagactatactttatttgggtatgcagagatatccagtccttccgttggtttgcagatttactctgtatgttgcataacaagttttggcaagagaacagacctgactatgtcaacatccagctgtacctcagtcaaacagatgggatacagaagataattggagaaaaatatcatgcactgaattcaagactgtttataggacgtcctcggtggaaacttttgtttgatgaaatagcaaaatataacagaggaaaaacagttggtgttttctgttgtggacccaattcactatccaagactcttcataaactgagtaaccagaacaactcatatgggacaagatttgaatacaataaagagtctttcagctgaaaacttttgccatgaagcaggactctaaagaaggaatgagtgcaatttctaagactttgaaactcagcggaatcaatcagctgtgttatgccaaagaatagtaaggttttcttatttatgattatttaaaatggaaatgtgagaatgtggcaagatgaccgtcacattacatgtttaatctggaaaccaaagagaccctgaagaatatttgatgtgatgattcacttttcagttctcaaattaaaagaaaactgttagatgcacactgttgattttcatggtggattcaagaactccctagtgaggagctgaacttgctcaatctaaggctgattgtcgtgttcctctttaaattgtttttggttgaacaaatgcaagattgaacaaaattaaaaattcattgaagctgaaattccattttctgtg

SEQ ID NO: 91085 - DNA, 132 bp, Homo sapiens
gtttatgtatcctttcagaaaaatatataatgatacacaagtttgtgtgtatgtatgagtgtatacagtttatacaaatcaagccgtgtgatacacactgtccaccttttattaaatatatacttggattta

SEQ ID NO: 91086 - DNA, 1923 bp, Homo sapiens
ggagcaactcgctgaagccgagggcagaactggcggaagtgacattatcaacgcgcgccaggggttcagtgaggtcgggcaggttcgctgtggcgggcgcctgggccgccggctgtttaacttcgcttccgctggcccatagtgatctttgcagtgacccacagcatcactgtttcttggcgtgtgaagataacccaaggaattgaggaagttgctgagaagagtgtgctggagatgctctaggaaaaaattgaatagtgagacgagttccagcgcaagggtttctggtttgccaagaagaaagtgaacatcatggatcagaacaacagcctgccaccttacgctcagggcttggcctcccctcagggtgccatgactcccggaatccctatctttagtccaatgatgccttatggcactggactgaccccacagcctattcagaacaccaatagtctgtctattttggaagagcaacaaaggcagcagcagcaacaacaacagcagcagcagcagcagcagcagcagcaacagcaacagcagcagcagcagcagcagcagcagcagcagcagcagcagcagcagcagcaacaggcagtggcagctgcagccgttcagcagtcaacgtcccagcaggcaacacagggaacctcaggccaggcaccacagctcttccactcacagactctcacaactgcacccttgccgggcaccactccactgtatccctcccccatgactcccatgacccccatcactcctgccacgccagcttcggagagttctgggattgtaccgcagctgcaaaatattgtatccacagtgaatcttggttgtaaacttgacctaaagaccattgcacttcgtgcccgaaacgccgaatataatcccaagcggtttgctgcggtaatcatgaggataagagagccacgaaccacggcactgattttcagttctgggaaaatggtgtgcacaggagccaagagtgaagaacagtccagactggcagcaagaaaatatgctagagttgtacagaagttgggttttccagctaagttcttggacttcaagattcagaacatggtggggagctgtgatgtgaagtttcctataaggttagaaggccttgtgctcacccaccaacaatttagtagttatgagccagagttatttcctggtttaatctacagaatgatcaaacccagaattgttctccttatttttgtttctggaaaagttgtattaacaggtgctaaagtcagagcagaaatttatgaagcatttgaaaacatctaccctattctaaagggattcaggaagacgacgtaatggctctcatgtacccttgcctcccccacccccttctttttttttttttaaacaaatcagtttgttttggtacctttaaatggtggtgttgtgagaagatggatgttgagttgcagggtgtggcaccaggtgatgcccttctgtaagtgcccaccgcgggatgccgggaaggggcattatttgtgcactgagaacaccgcgcagcgtgactgtgagttgctcataccgtgctgctatctgggcagcgctgcccatttatttatatgtagattttaaacactgctgttgacaagttggtttgagggagaaaactttaagtgttaaagccacctctataattgattggactttttaattttaatgtttttccccatgaaccacagtttttatatttctaccagaaaagtaaaaatcttttttaaaagtgttgtttttctaatttataactcctaggggttatttctgtgccagacacattccacctctccagtattgcaggacagaatatatgtgttaatgaaaatgaatggctgtacatatttttttctttcttcagagtactctgtacaataaatgcagtttataaaagtgtta

SEQ ID NO: 91087 - DNA, 1009 bp, Homo sapiens
  misc_feature (857)..(857): n is a, c, g, or t
  misc_feature (867)..(867): n is a, c, g, or t
  misc_feature (874)..(874): n is a, c, g, or t
  misc_feature (935)..(935): n is a, c, g, or t
  misc_feature (942)..(942): n is a, c, g, or t
  misc_feature (978)..(978): n is a, c, g, or t
  misc_feature (1000)..(1000): n is a, c, g, or t
  misc_feature (1005)..(1005): n is a, c, g, or t
ggagcaactcgctgaagccgagggcagaactggcggaagtgacattatcaacgcgcgccaggggttcagtgaggtcgggcaggttcgctgtggcgggcgcctgggccgccggctgtttaacttcgcttccgctggcccatagtgatctttgcagtgacccacagcatcactgtttcttggcgtgtgaagataacccaaggaattgaggaagttgctgagaagagtgtgctggagatgctctaggaaaaaattgaatagtgagacgagttccagcgcaagggtttctggtttgccaagaagaaagtgaacatcatggatcagaacaacagcctgccaccttacgctcagggcttggcctcccctcagggtgccatgactcccggaatccctatctttagtccaatgatgccttatggcactggactgaccccacagcctattcagaacaccaatagtctgtctattttggaagagcaacaaaggcagcagcagcaacaacaacagcagcagcagcagcagcagcagcagcaacagcaacagcagcagcagcagcagcagcagcagcagcagcagcagcagcagcagcagcaacaggcagtggcagctgcagccgttcagcagtcaacgtcccagcaggcaacacagggaacctcaggccaggcaccacagctcttccactcacagactctcacaactgcacccttgccgggcaccactccactgtatccctcccccatgactcccatgacccccatcactcctgccacgccagcttcggagagttctgggattgtaccgcagctgcaaatattgtttccacagttgaatcttgggttgttaaactttgaacctaaaanaacattggcnccttccntgccccaaaaacccccaaattttaatccccaagccggtttggcttgccggttttcctgaangaataanaaaaaacccccaaacccccgggccttgaatttttcnatttcctggggaaaaaatgttnttgcnccag

SEQ ID NO: 91088 - DNA, 599 bp, Homo sapiens
gttgtgagaagatggatgttgagttgcagggtgtggcaccatttaaaggtaccaaaacaaactgatttgttttggtacctttaaatggtggtgttgtgagaagatggatgttgagttgcagggtgtggcaccaggtgatgcccttctgtaagtgcccaccgcgggatgccgggaaggggcattatttgtgcactgagaacaccgcgcagcgtgactgtgagttgctcataccgtgctgctatctgggcagcgctgcccatttatttatatgtagattttaaacactgctgttgacaagttggtttgagggagaaaactttaagtgttaaagccacctctataattgattggactttttaattttaatgtttttccccatgaaccacagtttttatatttctaccagaaaagtaaaaatcttttttaaaagtgttgtttttctaatttataactcctaggggttatttctgtgccagacacattccacctctccagtattgcaggacagaatatatgtgttaatgaaaatgaatggctgtacatatttttttctttcttcagagtactctgtacaataaatgcagtttataaaagtgtta

SEQ ID NO: 91089 - DNA, 646 bp, Homo sapiens
gtctaaataagtattttagctggctctgagtatgaataactcacttttttcctttccctagtgaagaacagtccagactggcagcaagaaaatatgctagagttgtacagaagttgggttttccagctaagttcttggacttcaagattcagaacatggtggggagctgtgatgtgaagtttcctataaggttagaaggccttgtgctcacccaccaacaatttagtaggtaagtctgaaatgtattatgattgttattggcaacagttcatttataatctaaacattgttcagaataaaacacatgcaaaatattcagtatatgagaacagttgacatggttatagttgtatgtattcttgcattgtcttcctgatgttctcagtcatatttatcaccctcaccagcctctgcttcccttatcactttgcggtacccataactcccctttactggaatgaatttgattctacttctgtatgttttatcgttttattgctgaatacacttggaatgcatgaattgaccctaacctcttgtatcaattttttttcccagtttggatcttctcttttagtcaacattgtgtcagatctaccagcaagtgtgaagttgagcgataggaacaactttctaattatcttcc

SEQ ID NO: 91090 - DNA, 436 bp, Homo sapiens
ctgaacgcctttaagtcagaatcccgcccaggcggaacgatacgaagatggatgtgagttgctcataccgtgctgctatctgggcagcgctgcccatttatttatatgtagattttaaacactgctgttgacaagttggtttgagggagaaaactttaagtgttaaagccacctctataattgattggactttttaattttaatgtttttccccatgaaccacagtttttatatttctaccagaaaagtaaaaatcttttttaaaagtgttgtttttctaatttataactcctaggggttatttctgtgccagacacattccacctctccagtattgcaggacagaatatatgtgttaatgaaaatgaatggctgtacatatttttttctttcttcagagtactctgtacaataaatgcagtttataaaagtgtta

SEQ ID NO: 91091 - DNA, 2223 bp, Homo sapiens
ggagcaactcgctgaagccgagggcagaactggcggaagtgacattatcaacgcgcgccaggggttcagtgaggtcgggcaggttcgctgtggcgggcgcctgggccgccggctgtttaacttcgcttccgctggcccatagtgatctttgcagtgacccacagcatcactgtttcttggcgtgtgaagataacccaaggaattgaggaagttgctgagaagagtgtgctggagatgctctaggaaaaaattgaatagtgagacgagttccagcgcaagggtttctggtttgccaagaagaaagtgaacatcatggatcagaacaacagcctgccaccttacgctcagggcttggcctcccctcagggtgccatgactcccggaatccctatctttagtccaatgatgccttatggcactggactgaccccacagcctattcagaacaccaatagtctgtctattttggaagagcaacaaaggcagcagcagcaacaacaacagcagcagcagcagcagcagcagcagcaacagcaacagcagcagcagcagcagcagcagcagcagcagcagcagcagcagcagcagcaacaggcagtggcagctgcagccgttcagcagtcaacgtcccagcaggcaacacagggaacctcaggccaggcaccacagctcttccactcacagactctcacaactgcacccttgccgggcaccactccactgtatccctcccccatgactcccatgacccccatcactcctgccacgccagcttcggagagttctgggattgtaccgcagctgcaaaatattgtatccacagtgaatcttggttgtaaacttgacctaaagaccattgcacttcgtgcccgaaacgccgaatataatcccaagcggtttgctgcggtaatcatgaggataagagagccacgaaccacggcactgattttcagttctgggaaaatggtgtgcacaggagccaagagtgaagaacagtccagactggcagcaagaaaatatgctagagttgtacagaagttgggttttccagctaagttcttggacttcaagattcagaacatggtggggagctgtgatgtgaagtttcctataaggttagaaggccttgtgctcacccaccaacaatttagtagttatgagccagagttatttcctggtttaatctacagaatgatcaaacccagaattgttctccttatttttgtttctggaaaagttgtattaacaggtgctaaagtcagagcagaaatttatgaagcatttgaaaacatctaccctattctaaagggattcaggaagacgacgtaatggctctcatgtacccttgcctcccccacccccttctttttttttttttaaacaaatcagtttgttttggtacctttaaatggtggtgttgtgagaagatggatgttgagttgcagggtgtggcaccaggtgatgcccttctgtaagtgcccaccgcgggatgccgggaaggggcattatttgtgcactgagaacaccgcgcagcgtgactgtgagttgctcataccgtgctgctatctgggcagcgctgcccatttatttatatgtagattttaaacactgctgttgacaagttggtttgagggagaaaactttaagtgttaaagccacctctataattgattggactttttaattttaatgtttttccccatgaaccacagtttttatatttctaccagaaaagtaaaaatcttttttaaaagtgttgtttttctaatttataactcctaggggttatttctgtgccagacacattccacctctccagtattgcaggacagaatatatgtgttaatgaaaatgaatggctgtacatatttttttctttcttcagagtactctgtacaataaatgcagtttataaaagtgttaaaaaaaaaaaaaaaaaaaaaaaaaaaaaaaatttttggggccgccggggcccgcgaaaaaagcttttctaagacaccatcgcccgttgtgggcccgcggggggcccccagatgggtaatcgtcgaacagctggtcccagagcggtgtctccagaaggaagacccggggaccagcgacacacgggccggggggttcttcccaccccaattaaaaaacgcccggggaggaaacacgagagcggttcctgctgcaaccaactcccagaatgagactgcgaagggcccacagcgggaacccaca

SEQ ID NO: 91092 - DNA, 1832 bp, Homo sapiens
ggagcaactcgctgaagccgagggcagaactggcggaagtgacattatcaacgcgcgccaggggttcagtgaggtcgggcaggttcgctgtggcgggcgcctgggccgccggctgtttaacttcgcttccgctggcccatagtgatctttgcagtgacccacagcatcactgtttcttggcgtgtgaagataacccaaggaattgaggaagttgctgagaagagtgtgctggagatgctctaggaaaaaattgaatagtgagacgagttccagcgcaagggtttctggtttgccaagaagaaagtgaacatcatggatcagaacaacagcctgccaccttacgctcagggcttggcctcccctcagggtgccatgactcccggaatccctatctttagtccaatgatgccttatggcactggactgaccccacagcctattcagaacaccaatagtctgtctattttggaagagcaacaaagcagcagcagcagcagcaacaggcagtggcagctgcagccgttcagcagtcaacgtcccagcaggcaacacagggaacctcaggccaggcaccacagctcttccactcacagactctcacaactgcacccttgccgggcaccactccactgtatccctcccccatgactcccatgacccccatcactcctgccacgccagcttcggagagttctgggattgtaccgcagctgcaaaatattgtatccacagtgaatcttggttgtaaacttgacctaaagaccattgcacttcgtgcccgaaacgccgaatataatcccaagcggtttgctgcggtaatcatgaggataagagagccacgaaccacggcactgattttcagttctgggaaaatggtgtgcacaggagccaagagtgaagaacagtccagactggcagcaagaaaatatgctagagttgtacagaagttgggttttccagctaagttcttggacttcaagattcagaacatggtggggagctgtgatgtgaagtttcctataaggttagaaggccttgtgctcacccaccaacaatttagtagttatgagccagagttatttcctggtttaatctacagaatgatcaaacccagaattgttctccttatttttgtttctggaaaagttgtattaacaggtgctaaagtcagagcagaaatttatgaagcatttgaaaacatctaccctattctaaagggattcaggaagacgacgtaatggctctcatgtacccttgcctcccccacccccttctttttttttttttaaacaaatcagtttgttttggtacctttaaatggtggtgttgtgagaagatggatgttgagttgcagggtgtggcaccaggtgatgcccttctgtaagtgcccaccgcgggatgccgggaaggggcattatttgtgcactgagaacaccgcgcagcgtgactgtgagttgctcataccgtgctgctatctgggcagcgctgcccatttatttatatgtagattttaaacactgctgttgacaagttggtttgagggagaaaactttaagtgttaaagccacctctataattgattggactttttaattttaatgtttttccccatgaaccacagtttttatatttctaccagaaaagtaaaaatcttttttaaaagtgttgtttttctaatttataactcctaggggttatttctgtgccagacacattccacctctccagtattgcaggacagaatatatgtgttaatgaaaatgaatggctgtacatatttttttctttcttcagagtactctgtacaataaatgcagtttataaaagtgtta

SEQ ID NO: 91093 - DNA, 1385 bp, Homo sapiens
  misc_feature (1013)..(1014): n is a, c, g, or t
ggagcaactcgctgaagccgagggcagaactggcggaagtgacattatcaacgcgcgccaggggttcagtgaggtcgggcaggttcgctgtggcgggcgcctgggccgccggctgtttaacttcgcttccgctggcccatagtgatctttgcagtgacccacagcatcactgtttcttggcgtgtgaagataacccaaggaattgaggaagttgctgagaagagtgtgctggagatgctctaggaaaaaattgaatagtgagacgagttccagcgcaagggtttctggtttgccaagaagaaagtgaacatcatggatcagaacaacagcctgccaccttacgctcagggcttggcctcccctcagggtgccatgactcccggaatccctatctttagtccaatgatgccttatggcactggactgaccccacagcctattcagaacaccaatagtctgtctattttggaagagcaacaaaggcagcagcagcaacaacaacagcagcagcagcagcagcagcagcagcaacagcaacagcagcagcagcagcagcagcagcagcagcagcagcagcagcagcagcagcaacaggcagtggcagctgcagccgttcagcagtcaacgtcccagcaggcaacacagggaacctcaggccaggcaccacagctcttccactcacagactctcacaactgcacccttgccgggcaccactccactgtatccctcccccatgactcccatgacccccatcactcctgccacgccagcttcggagagttctgggattgtaccgcagctgcaaaatattgtatccacagtgaatcttggttgtaaacttgacctaaagaccattgcacttcgtgcccgaaacgccgaatataatcccaagcggtttgctgcggtaatcatgaggataagagagccacgaaccacggcactgattttcagttctgggaaaatggtgtgcacaggagccaagagtgaagaacagtcagactgtgcgagcannagaacacatatgcgtaagagatattgtacatgaaaggtttggggttttttcccaggctttaaggttcctttgtgggacgtttcgaaaaggatttccaggaaaattattggggttgggggggaaggcttgggttggaacttggttggaaacggcttttttcccgttaagtttaacaggggcgtctaagggaaaaaggggggcgcctttttggggttgggcccttcctaaagcgccacctaaagccccaaaaatcccattctttttaaaggggtttcaagtgggttttacaaggggtttccccttggggaagaatcctgggggtcacattttttggggggtggggcttatcgggggttataccctttttccgg

SEQ ID NO: 91094 - DNA, 1633 bp, Homo sapiens
ggagcaactcgctgaagccgagggcagaactggcggaagtgacattatcaacgcgcgccaggggttcagtgaggtcgggcaggttcgctgtggcgggcgcctgggccgccggctgtttaacttcgcttccgctggcccatagtgatctttgcagtgacccacagcatcactgtttcttggcgtgtgaagataacccaaggaattgaggaagttgctgagaagagtgtgctggagatgctctaggaaaaaattgaatagtgagacgagttccagcgcaagggtttctggtttgccaagaagaaagtgaacatcatggatcagaacaacagcctgccaccttacgctcagggcttggcctcccctcagggtgccatgactcccggaatccctatctttagtccaatgatgccttatggcactggactgaccccacagcctattcagaacaccaatagtctgtctattttggaagagcaacaaaggcagcagcagcaacaacaacagcagcagcagcagcagcagcagcagcaacagcaacagcagcagcagcagcagcagcagcagcagcagcagcagcagcagcagcagcaacaggcagtggcagctgcagccgttcagcagtcaacgtcccagcaggcaacacagggaacctcaggccaggcaccacagctcttccactcacagactctcacaactgcacccttgccgggcaccactccactgtatccctcccccatgactcccatgacccccatcactcctgccacgccagcttcggagagttctgggattgtaccgcagctgcaaaatattgtatccacagtgaatcttggttgtaaacttgacctaaagaccattgcacttcgtgcccgaaacgccgaatataatcccaagcggtttgctgcggtaatcatgaggataagagagccacgaaccacggcactgattttcagttctgggaaaatggtgtgcacaggagccaagaggtagccgtaagaaattcattcttctggtctatgggttatgaatgaaaaggtgatatctcattgtttttaggttattaggttagcactttaacatgttattattgctttcttataaaaaccattttaatatgattctattaattatttttatttatttatttattatttgattctattaatgttagatagcagtgatttcattttcttaaaaattagatatgggcaggcgtggtgtctcaccaaggcgggcaaatcactcgaactcttgacctcaggtgagctatccgccttggcctcccaaagtgcttgggattagaggcgtgagccaccatgcctggcccacattctgcttttcttatgtaagctctgaactgctaagtcgtagtttattcaacaaatgacataggaatgtctattcatgatgagtcttggtataaaagaggatagaattagtgaatacattgttcaataataaatctcatcaacattttctgatcaaaatgaagtttgttagttttcctctcagtagaaatgcatgggctaaaatacagaaatagtgatgactgatgatggtgataattcacatccataaaatctagggctacaataatttggcggattgaaaggtcattttggcaggcctacag

SEQ ID NO: 91095 - DNA, 480 bp, Homo sapiens
cagaacaacagcctgccaccttacgctcagggcttggcctcccctcaggtaatatagcaggagggagagaatagggagggcggaaatctgaactgcaagagatggtatcaaaaggcaaggaagggcatttaatgatctgtttttgaaaatggtttaatatgttttttaagccttattttgttgagaagttctattaggctttgaataggcacaatggtgtttatttgggaagtctggaagctaagttatatatttatgaaacacctaatcttttgataaacacttatgagaatgttccaaatgactatatagggtctttgattttgaaaatcaccctcaccaaattattttctagttttatttttccccttttacatttcaagctctcaaccacccatctactttaaaaatttttcagcctgggtgcagtggctcacgcctgtaatcccagcactttgggaggccaaggtgggcggatca

SEQ ID NO: 91096 - DNA, 346 bp, Homo sapiens
cgctgcccatttatttatatgtagattttaaacactgctgttgacaagttggtttgagggagaaaactttaagtgttaaagccacctctataattgattggactttttaattttaatgtttttccccatgaaccacagtttttatatttctaccagaaaagtaaaaatcttttttaaaagtgttgtttttctaatttataactcctaggggttatttctgtgccagacacattccacctctccagtattgcaggacagaatatatgtgttaatgaaaatgaatggctgtacatatttttttctttcttcagagtactctgtacaataaatgcagtttataaaagtg

SEQ ID NO: 91097 - DNA, 494 bp, Homo sapiens
gttttataaacaaaaataagattgtgacaagggattccactattaatgttttcatgcctgtgccttaatctgactgggtatggtgagaattgtgcttgcagctttaaggtaagaattttaccatcttaatatgttaagaagtgccatttcagtctctcatctctactccaacttgtcttcttaggtgctaaagtcagagcagaaatttatgaagcatttgaaaacatctaccctattctaaagggattcaggaagacgacgtaatggctctcatgtacccttgcctcccccacccccttctttttttttttttaaacaaatcagtttgttttggtacctttaaatggtggtgttgtgagaagatggatgttgagttgcagggtgtggcaccaggtgatgcccttctgtaagtgcccaccgcgggatgccgggaaggggcattatttgtgcactgagaacaccgcgcagcgtgactgtgagttgctcataccgtg

SEQ ID NO: 91098 - DNA, 1866 bp, Homo sapiens
cgccgttccggcctgtaacggccactcggccgccactcccgcctggtgccctactctgctgtgtttcgcaggcagcttcccatcgtacgattgtggggctcaggcagcatcactgtttcttggcgtgtgaagataacccaaggaattgaggaagttgctgagaagagtgtgctggagatgctctaggaaaaaattgaatagtgagacgagttccagcgcaagggtttctggtttgccaagaagaaagtgaacatcatggatcagaacaacagcctgccaccttacgctcagggcttggcctcccctcagggtgccatgactcccggaatccctatctttagtccaatgatgccttatggcactggactgaccccacagcctattcagaacaccaatagtctgtctattttggaagagcaacaaaggcagcagcagcaacaacaacagcagcagcagcagcagcagcagcagcaacagcaacagcagcagcagcagcagcagcagcagcagcagcagcagcagcagcagcagcaacaggcagtggcagctgcagccgttcagcagtcaacgtcccagcaggcaacacagggaacctcaggccaggcaccacagctcttccactcacagactctcacaactgcacccttgccgggcaccactccactgtatccctcccccatgactcccatgacccccatcactcctgccacgccagcttcggagagttctgggattgtaccgcagctgcaaaatattgtatccacagtgaatcttggttgtaaacttgacctaaagaccattgcacttcgtgcccgaaacgccgaatataatcccaagcggtttgctgcggtaatcatgaggataagagagccacgaaccacggcactgattttcagttctgggaaaatggtgtgcacaggagccaagagtgaagaacagtccagactggcagcaagaaaatatgctagagttgtacagaagttgggttttccagctaagttcttggacttcaagattcagaacatggtggggagctgtgatgtgaagtttcctataaggttagaaggccttgtgctcacccaccaacaatttagtagttatgagccagagttatttcctggtttaatctacagaatgatcaaacccagaattgttctccttatttttgtttctggaaaagttgtattaacaggtgctaaagtcagagcagaaatttatgaagcatttgaaaacatctaccctattctaaagggattcaggaagacgacgtaatggctctcatgtacccttgcctcccccacccccttctttttttttttttaaacaaatcagtttgttttggtacctttaaatggtggtgttgtgagaagatggatgttgagttgcagggtgtggcaccaggtgatgcccttctgtaagtgcccaccgcgggatgccgggaaggggcattatttgtgcactgagaacaccgcgcagcgtgactgtgagttgctcataccgtgctgctatctgggcagcgctgcccatttatttatatgtagattttaaacactgctgttgacaagttggtttgagggagaaaactttaagtgttaaagccacctctataattgattggactttttaattttaatgtttttccccatgaaccacagtttttatatttctaccagaaaagtaaaaatcttttttaaaagtgttgtttttctaatttataactcctaggggttatttctgtgccagacacattccacctctccagtattgcaggacagaatatatgtgttaatgaaaatgaatggctgtacatatttttttctttcttcagagtactctgtacaataaatgcagtttataaaagtgtta

SEQ ID NO: 91099 - DNA, 1459 bp, Homo sapiens
ggagcaactcgctgaagccgagggcagaactggcggaagtgacattatcaacgcgcgccaggggttcagtgaggtcgggcaggttcgctgtggcgggcgcctgggccgccggctgtttaacttcgcttccgctggcccatagtgatctttgcagtgacccacagcatcactgtttcttggcgtgtgaagataacccaaggaattgaggaagttgctgagaagagtgtgctggagatgctctaggaaaaaattgaatagtgagacgagttccagcgcaagggtttctggtttgccaagaagaaagtgaacatcatggatcagaacaacagcctgccaccttacgctcagggcttggcctcccctcagggtgccatgactcccggaatccctatctttagtccaatgatgccttatggcactggactgaccccacagcctattcagaacaccaatagtctgtctattttggaagagcaacaaaggcagcagcagcaacaacaacagcagcagcagcagcagcagcagcagcaacagcaacagcagcagcagcagcagcagcagcagcagcagcagcagcagcagcagcagcaacaggcagtggcagctgcagccgttcagcagtcaacgtcccagcaggcaacacagggaacctcaggccaggcaccacagctcttccactcacagactctcacaactgcacccttgccgggcaccactccactgtatccctcccccatgactcccatgacccccatcactcctgccacgccagcttcggagagttctgggattgtaccgcagctgcaaaatattgtatccacagtgaatcttggttgtaaacttgacctaaagaccattgcacttcgtgcccgaaacgccgaatataatcccaagcggtttgctgcggtaatcatgaggataagagagccacgaaccacggcactgattttcagttctgggaaaatggtgtgcacaggagccaagagtgaagaacagtccagactggcagcaagaaaatatgctagagttgtacagaagttgggttttccagctaagttcttggacttcaagattcagaacatggtggggagctgtgatgtgaagtttcctataaggttagaaggccttgtgctcacccaccaacaatttagtagttatgagccagagttatttcctggtttaatctacagaatgatcaaacccagaattgttctccttatttggtctggaaaggtgtcttaccggtgtaagtcgagcgcaattttgagctttgaacatttcctatttaagggtacggcagagacgatgggtctggtcctgttcccacccctttttttttttacacccctgtgggggcccagggggtgcccaacacttgtgggggcacgagctctctattccgggacagggatttgcaacacccgtgttacgcgcggcgccaaaaaagagggggagactg

SEQ ID NO: 91100 - DNA, 1571 bp, Homo sapiens
ggagcaactcgctgaagccgagggcagaactggcggaagtgacattatcaacgcgcgccaggggttcagtgaggtcgggcaggttcgctgtggcgggcgcctgggccgccggctgtttaacttcgcttccgctggcccatagtgatctttgcagtgacccacagcatcactgtttcttggcgtgtgaagataacccaaggaattgaggaagttgctgagaagagtgtgctggagatgctctaggaaaaaattgaatagtgagacgagttccagcgcaagggtttctggtttgccaagaagaaagtgaacatcatggatcagaacaacagcctgccaccttacgctcagggcttggcctcccctcagggtgccatgactcccggaatccctatctttagtccaatgatgccttatggcactggactgaccccacagcctattcagaacaccaatagtctgtctattttggaagagcaacaaaggcagcagcagcaacaacaacagcagcagcagcagcagcagcagcagcaacagcaacagcagcagcagcagcagcagcagcagcagcagcagcagcagcagcagcagcaacaggcagtggcagctgcagccgttcagcagtcaacgtcccagcaggcaacacagggaacctcaggccaggcaccacagctcttccactcacagactctcacaactgcacccttgccgggcaccactccactgtatccctcccccatgactcccatgacccccatcactcctgccacgccagcttcggagagttctgggattgtaccgcagctgcaaaatattgtatccacagtgaatcttggttgtaaacttgacctaaagaccattgcacttcgtgcccgaaacgccgaatataatcccaagcggtttgctgcggtaatcatgaggataagagagccacgaaccacggcactgattttcagttctgggaaaatggtgtgcacaggagccaagagtgaagaacagtccagactggcagcaagaaaatatgctagagttgtacagaagttgggttttccagctaagttcttggacttcaagattcagaacatggtggggagctgtgatgtgaagtttcctataaggttagaaggccttgtgctcacccaccaacaatttagtaggtaagtctgaaatgtattatgattgttattggcaacagttcatttataatctaaacattgttcagaataaaacacatgcaaaatattcagtatatgagaacagttgacatggttatagttgtatgtattcttgcattgtcttcctgatgttctcagtcatatttatcaccctcaccagcctctgcttcccttatcactttgcggtacccataactcccctttactggaatgaatttgattctacttctgtatgttttatcgttttattgctgaatacacttggaatgcatgaattgaccctaacctcttgtatcaattttttttcccagtttggatcttctcttttagtcaacattgtgtcagatctaccagcaagtgtgaagttgagcgataggaacaactttctaattatcttcc

SEQ ID NO: 91101 - DNA, 144 bp, Homo sapiens
agtgagagctgggaaatgacagcatagagcagagatgtgggtacatgaatgagacagagaccttcctacgtgtgccctttactctcccaactttgtcctgtaagtaccgatgccacagcagccccagctggaggccagttacca

SEQ ID NO: 91102 - DNA, 373 bp, Homo sapiens
gttggtgtctgttttgggagccaaagaaatggaggctcagaggtaaaaagcctgttgtcaagtcccagtgctagtcactgacgacagaactaggacttaaaaccagttctcagttattcagacctgaccatggtggatgctgtggatacagagtttgaaaaacaaaagcacctgccctcttggagcctcagggaaagcctcagaatcccagcttctcacaggcgtgtccaggctagcagaatcctgtcacctacgagagaccacaccaaccttggaagtttatgagaatgtgcttaaactgtctctcacttcactccgattgttacatctattttttttctttattgaaatgccatcacattttaaatacatt

SEQ ID NO: 91103 - DNA, 292 bp, Homo sapiens
ctcatcacagactgcagctgctgtccatgtggcctccaactggagagactattttgttgaacaaagagatcagcctgctctgggtatctctgtcagtctaggtctccccacaacatgaggggcagtcattaccatggttactatagagcttctagagcagtagctattaaccagggctgcagattagaattttctgtgaagcttcacaaatggctaggcctctccctagagattccaatttactgggtctggaagggcttgtgctcttctccaacctccttaagatctttga

SEQ ID NO: 91104 - DNA, 475 bp, Homo sapiens
atattgcaggacattttcttagttcagctaaagatggggtccttatcacagggccacaaaaaattaggctcacagacaatttgaagggtaaggcaggtttttattgggtgaaagagaaaaaaaagggaaatggggatcctccgcaaagccagagtgcctgctggtgagcttcctgcctcgaagtttgaatcccaggtaccaccgaggaagaggagggaccaggctcctccccactgcaaatggcacaaacttccgtggcatcaccccagtttgcattcttctcagtgcacaagctagttggagtttccctggggacccctttccacctggctgtctcaatgtcttagtgaaattttagaatactaaaaataaagatcttaaaaacaatcataggtatgaaataaaaattaggtatgtaacaaagtttccacgagtagcaattggaatccaactgaatatctttaaagctctaggg

SEQ ID NO: 91105 - DNA, 367 bp, Homo sapiens
tgaatagtggggtgggctggatcagctcagtggtcccttccatctggataatttcatggttgtataactttgtcaactagagaagcagagttctggtgctcctttggataatatatgcctctcgctttaactgccttcaatgtggtccttctttcaattctgctctccttctttggtgccattgcacagctaaaagggctgttttgaattggaactaagcgaacaaagttctttctggctgtgtctttggcctcctgcaaagcctcaggcatctaagatgtcaggagctggctgccctgctctctatcccagagctggaggaccaggactgggcaaagacattgctcccagtctccttgcagcatca

SEQ ID NO: 91106 - DNA, 379 bp, Homo sapiens
attcagaacccttgtttttttcctaccagggaggggcaccccatcaggctgagcagcttccctggaaaccctctgtacgtgctcatcccagtgcctggtatcatgccttggtgaagccccttatacagttagtagtggcgtcaagagcaggtttgggtaagggagggggacactgaggtttgcaggtacttcctctggcacccactgggatgatttctctagaatccatgtcatgcactatcaccaaaacttaagatctggtgtacagtgggtaaattctaatgatgccccacccctctccgctctggaatctcatggaagataatctagatctgtggtcagaagagggctcagggctcaactctgtcccttccaagtc

SEQ ID NO: 91107 - DNA, 475 bp, Homo sapiens
gaatctggataaattccctttcacttctcccctgggcgtgtgtgtaccagggtgactcacagatctgacttggacctttttttgtgctttctgcattcctggcagcctgggcctgggatttgctctgccaccctgggtgacatgaagctctcagctctggcggctaaaaggctacactgttgtggggctgggacaccctgactcttctccccagtcattgttttctgtttctgtgtcatctcccccagctcggctcctcctgtgtcactgctggtcttccaagatggtggaagacactgtggtttgtctctttgcagtctcgctctgtcgccaaggctgtagtgcagtggcatgatcttggctctgcagcctctgcctcccaggagaatctcttgaccctgggaggcggaggttgcagtgagcagagatcacaccactgcgctccaacctgggtgacagaatgagactctgtctc

SEQ ID NO: 91108 - DNA, 665 bp, Homo sapiens
  misc_feature (404)..(404): n is a, c, g, or t
  misc_feature (630)..(630): n is a, c, g, or t
ctcaggaacctatctgcacttatattagtcacttgttataaaaactgttgttaagactgaggctctaaaggtttctggtgatttgtcttcagtgacacgtgcatttttgagctgtggcatttaggtctcctgactcatattgagttgcccaatattaaaaacataactcaaaaggtccaaaggaacttcctttacatacatccacattcattcccacatcccctaatacacatgcattcatacaccaaaaatattttctactcacttgaaggaaataattactatggtgggaaacaaagtccattattcttcaattagaaaacaaaacaaaacaaaacaaaaacaaacttagaatagtttgaatgaggtaaatacattggcaaattaattcacactaatgtgtnaatgactaccacttgagtattttctaataatgggatttgccaaaaggatcctggggccgtttagtggagaaaagttttaccaacaagtcactgaagatgctgaaaagcaaacatccccacattgcactgtacaacaaatgaactcccaccaggggtctcagaatgcagcctgctgttttcaggacctctgagccacatttccttgggccacatctatacttgcctngtactggcagagaactacaagagaacctattgaca

SEQ ID NO: 91109 - DNA, 1379 bp, Homo sapiens
atttgttttattagcatctccaattcccctgagataaattactcatgcataaagtggtttttgagagcacttaaagttcatttcagtattaatttacagcatatttaatcagtggggactgttaccacctccacaacagaaatcatgccctcgagttaccccactgcgcccagtttagaggactagtagatgctaacatactagggaatggtcattgccacagttaaaaatcggcagttaagtaaatgtcaggagtcaaaagagagagagttgtgccatctttgattttatagacaagattctgcagttcttccaactgtatgaacaaacgtttgcctaatagttgaaacaataaattaaaattttaggtaaatgacgaagggaatgtggtgaatgtcactgtccagagccataaatcagacaaaaccatacatagcatgctgaaaaacttttgtaatggaacacccaacaaatgacacctaacctgtctgtgatccaacaagtccgataacatgctgctgtatttgtattctctgggaatctcagtattaataatttcatttcccacaaattctagcattcatgtaaggaaaaacatggctaatcaatatcttaaaggggcaatctttcagagcagtggttttcaaagtgtggccggacagcattggcagcatcttaatctcctgggactttgttaaaaatgcaaattctcagccccaccctagtcctactgaattgggaaactggcgtgggacccagcagtctttgttttaacatgttctccaagtgattctgatgcctgttcaaacttgggaaacacttttagagcacttgaggaacctaaaagatgactggttcagcattttgtgtggtagataagaaagaaattatcacaaaaaatcagaaatgaacagtgagagaaaaataggaccccagacagtttataccttccatttgctgttttaaaagtgtgagcctgccaagtcaacaagtatgcctttagcgcacatgtaaatagcctgcacttcctaaatctcgtgtggcctcccatggttacattcttcaaaggttaactgagttgagaggaagattcagcatttaaaagagaagggttgaaaaagattgtgtgtgtgtgtgtgtgtgtttaattggcccagggttacttaaataaatcataaccattttgccacattctgtaactgtttagctaaggtcaaattaagtttaccctatggattttgtttcatcttttgtttcgtgtatatactgtttgcctttttcataaaaatcttggatttgttatatattgttcctgttatttttgacatctttgctattgtaaataaattactattttgttttaagttaaaaaaaaggag

SEQ ID NO: 91110 - DNA, 291 bp, Homo sapiens
atggtgcacacctgtagtcccagctactcaggaggctgaggtaggaggatcacttgaacctgggaggtcaaggctgcagtgagctatcatcctgctgccctgcactccagcctgggtgacaaacgagaccctggctcaaaaacaaaaaaaaagattaaaaatagcacccttttacaatgttttgtgaaggtaaactagctgactgttgttcttaagaatagctcatatggaaaatttctaagttggaaacatcttcagaactacacctctacccaaccccaccccctcaaa

SEQ ID NO: 91111 - DNA, 98 bp, Homo sapiens
tagttttctgtttacaaaagacaagatccataacatcacccaacaaccagggtccaagtaaacttcttaccataataactatcttaaacgtcaaattc

SEQ ID NO: 91112 - DNA, 389 bp, Homo sapiens
gaaacccttgctcataacaggaattgatgagttgatagaaatgtttatgagtaccttattctggtgttactgattttttccatactactctataacaaagtttttcctggtaaagtctataaagtttatttgtgctttaatacctgaaagaccttgagaactgactcagaataaaatagagcaagaagaaaagccttttcagataaaatcacaaaggaaccttaatgtccatatggatgggttcccaaggcattagcactcaggcttatatagcaaatagaaaaaaatattttccattcacctggtttctattgaataaataactcctccattatgtcagatcaacttaggaatggactaactaatagatttgttatttcatcaaataa

SEQ ID NO: 91113 - DNA, 288 bp, Homo sapiens
acacaatttacatatcctgaaattcacaaattataactgtgtaattcaataatgtttggtaaatttataaagttctatagccatcactacaatccagttttagaacatttccattactccaaaaaaagttgttttgtgccagttcacaaataatccccaatcccacccctagcttgaggtaaccactgatctgctgtctttagagatttgccttttctggtcattttatatgcatagaattatataagatacagtcttctgcatctggcttccttcacttagcacagg

SEQ ID NO: 91114 - DNA, 492 bp, Homo sapiens
tttctagagacattctttctgaatttcaatatcttataaattaaatccctctcttattttttctgttaacaacttacttttttccttcatagcacttatctatgtaataatttttatcccacctggtaaatgccaatggggtagtgatatggttaggctttgtgtccccactcaaatttcatcttgaattgtaatccccataatcgccatgtgccaaggaagagacttagtgggaggtgattggatcatgaaaacagtgccccccatactgttctcatgatagtgagtgaatttgcatgagatctgatggttttataaaagtgtctgacagttcctttttcacacacttgcttgctctgaaatacctgccgccacataagacatgtctcttcctctaccgccatgattgtaaactcccagaggccttcgcagccatgtggaaatgtggaactgtgagtcagttagacttcttttctccgttttttttttttt

SEQ ID NO: 91115 - DNA, 379 bp, Homo sapiens
tttcaccatgttggccaggctggtctcgaactcctgatctcaggtgatccacctgcctcagccttccaaagtactgggattacaggcgtgagccacccacttgacctgaaaccctgatagtctttactttgaattgcaaatatcaatagaaacttgggacagagttttttgttttgttttgttttgtttaaagaaaaaaaaaatcctaactctggacactttaaacaggcctagaagcaatcacaatccagtagcaattaatgtccatccctgagtgtggtctctaaatattaggactcaggagagatggcggattgtaacactgaagcagaaacgatcaagacaagcctggaatactttgtaatgcctgaaagcaata

SEQ ID NO: 91116 - DNA, 242 bp, Homo sapiens
aggctgcaggcaggagggaccacccacggtgaggaatcaggaggcacagagcctacctgaggggaggctgagcaccaggcaccccggtgtgggaagatggggtgaagctacaccacccaagcagtgggaccccacagacgggaacaggccagggggcaggacccacccaaaccacccagagtctgagctagagagactggctttgatgctgcctcccctcccctctcctccttcgcctccac

SEQ ID NO: 91117 - DNA, 183 bp, Homo sapiens
aagtggggagctccaggtcactgtccaccaactccgtgctgggcaccgcaccagaagctgcacattcaccttctcgcttggatctcagaagcttcattatctccagggctcctgggcacctagcgggggctaatgaagctgggttgagcaggttctgtacacctgcacaggtatcttttctcc

SEQ ID NO: 91118 - DNA, 643 bp, Homo sapiens
aaggaattcaagctccaaagagagcagggagaacacagactggagccagggagaagcgaagaagggctgggaactggcatgagcactccaggcactctgttgggcaattatggtatctcatttattctcacaaccccacgagacaggggctgttatccctgttttacaaatgaaagagcggctcagtttatcaagctggtcagtgatgaggcaaagatgaaaatccaggtctaggcaaccccaaagcccttgctgggtcatgagccccgagacaatgtgctgtgtcacagcactgtcatttagccacccaggaggagcggaaatgtctctcctgagggtccaaatcaacacggtcaaggctaacagggatcaatgcaaagtcctgattgtcaggaagtcatctgcacaagtgcagaatggagtcctggcgaatggacagcagaccatcatgatattgtcatcatgcgactgtcactgccgctctctttccactttgcagtttataaagttccttcacggctgggcacggtggctcacgcctgtaatcccagcactttgggaggccgaggagggcggatcacaaggtcaggagttcaagaccagtctggccaagatggtgaaacccagtctccactaaaaatgc

SEQ ID NO: 91119 - DNA, 291 bp, Homo sapiens
aagagctcttgagtcaaccttaaggagtggatgcaaaaagtgagattggtttgtgatgtgaaagaaagggatatggaaggttcaggagatctcatattgaggggacttgccaggctacctttgtctttaagtaagtgttgggtgagactaccatcaaagatcgttactgcctttactgcatgaatataccacttgtgtttacattgtttatgctggtgcgtgtgtgtttgcatccgcacgtgcgtgcagcatgcttgtagttcaattcacgtgtccagcaagccatatact

SEQ ID NO: 91120 - DNA, 395 bp, Homo sapiens
ctaccatgtcaaaacataggatatttccattatcccaaaaagttccctcctgcccctctgcagtcaaacacttccctcccccagctcctggcaactgctgatctgaactgtagacctgaaaatgtcattcagaacccatttcatctggacccttctctctgtgtcaacattgctgtgagcggtgtctgtgggatttttctggacgttctctgccatgcccctgctccttccttcctgccttctggaaggcacccctgccaggagtcggctgcattaaagtgggtgtttcaggggtgtcttcctttactctcttctcactgatttccagctatccctgtgtctcttgtttaatgagtgccttcacccatatccttaaacccaccagggcgaccttc

SEQ ID NO: 91121 - DNA, 442 bp, Homo sapiens
gggttcacgccattctcctgcctcagcctcccgagtagctgggactacaggcgcccatcaccacgcccggctaatttttttttatatttagtagagacagggtttcaccgtgttagccaggatggtctcgatctcctgacctcgtgatccacccgcctcagcctcccacagtgctgggattacaggcatgagccactgcgccgggccaaataagtgaatgttttaaaaaacagcatcagagatctgtgggacaatatcaaacaggcaaacaagcacataattgaagtcccagaaatagaggacagaatgggcaaaagaatatttgaagagataataattggacattttctaaaaatgaagaaatacatcaacccacaaattcaaaaagctcagcaaatcccaaacagtataaatattgaaataggttgggtgcagtggctca

SEQ ID NO: 91122 - DNA, 453 bp, Homo sapiens
tagtagagactgggttttgccgtgttggccaggctggtctcgaaatactgacctcaggtgatccacttgccttgtcctcccaaagtgctgggattacaggtgtgagccactgcgcccagccctaagcctccagtttttgacctcagcatggtgaggaagtagtagaagtatgtattttgggtgaagaggagagtaaaagcatgctcccatttatatgctaacgctgtgctttttaaaaatgtggttacttcaacttttgtaatcttttcattgaaaacatttggttattctgctaacctttgactattctctttaaaaatgtcctacattcattccatattttaaagttttctaataaacctgagttcccacttgttttttttccttccagcttttattttaggttcaggggttacatgcacagatttgttaacatgggcacattgcgtgtcg

SEQ ID NO: 91123 - DNA, 871 bp, Homo sapiens
ggtgaaataagatgttcccagacaaataaaaggaaaactcaatagtagtgacttgcattataagaaataaaaaggtaatttttcagtcaaaaagcaagtgacaccagacagtgattcaaatccacgtgaaaaaaaaataggaagcaccagtaatggcaatcatgtgagtactttaaaaagacaattgcatgcttcttttcctttcttctcttaactgacttataaagcaactgcataaaacaatctgtatattattattttattgggaatgaaacaaagctatgtaaggaatgataccaggtaatatcttgaatccacaggcatgaatgacgacagccagaaatggtatctaagaaggctaatatcacgaactctctgcatatatatgtgtccttctctcagctttttaaaaaggcaaggtcatataaagatgataatgtattggtttgtaacatatatagacataatatgaataacaatagcacaaaactgggatggaaagctatataatagtaaaatttctatatttcactgcaactaatccgtacaaatatgaagtaaattctggtaagttacaatgtatattgtaatccctagaacaatcactaagaaagttacttttaaaaataaactttttttcaacatttattttagaatcggggtacatgtggaggtttattacaaaggtatattgtgtgatgctaaggtttggactacaagtgaatttgtcacccaggtagtcagcatagtactcaataggtagtcctttataaccttcaccccttctccctcccttctcttgtattctgcagcatctgttcccatttttataaccatatgtaccccagtgttgagctcccacttatgagaa

SEQ ID NO: 91124 - DNA, 269 bp, Homo sapiens
gtgttgttatccatacatggaatggggaggttaggaatcttgaggtctttggctgcatgattcctgagccatgatttctaatcttgtggctaatttgttggctttacaaagacaatctggtccccaagcaaggaaggctttgtttcagggaggggctatcatttttgtttcaaaattaaactatcaactcaattcttctcaaagttagtttactctacaccctggagaataaagaaggcctggagctgctgaagactgctattgggaaa

SEQ ID NO: 91125 - DNA, 257 bp, Homo sapiens
cagagtagctcaaaaatttgtatggaaattttttccatcatcctctctttccaacaatgcaagcctgagcagcttgtctctggtggatggcagaagttcaataaccacaaccttatccaactactaatgtgtacagaagagcaggtcattaagagggttggctactaaaataacccctttcttccagtagcctacattactataatgattccttaatagcaaaccatttattaagaaatgacacaaagactacattc

SEQ ID NO: 91126 - DNA, 690 bp, Homo sapiens
aattaaaaataaaagaaaatcaagtaacttgctccaagttcacactgctggagagtgagggtgttaggattcaagcccacagggcctcattcaagcaacacatgtaatcaacatgtatgaatcacgtgatgtttcccaggcactgtggtcccacaaaatcataagtgtcttcacagtctttccatgttgctattactatctaaattgtcttcaagatggtaagtcccctccccactgtaacgcaaccatgtgacagcttgcgtttgaaatcaggtctgcatgacctccaactccatactccaaggccaaagttcttgatctggagagttttctagagatgagaagcaaagggaatgtggaacattttttaaaaatctgctgcagttcttcatcatcttgggtcaggaggcagcagggtagtggtggtggggacatgatgatctcacttgcaagttctgtttaaaatccttatccagttctgtttcagtgtgttttcatactccagggtaggtgaaattctagaaagtccaagatctttccaaaaacagttcggatctggaccatgcttatgagggacccatgattactaaataaaggtaacccattagcatgggttaatccagcagtattttgccctggttgtgcagctagctagttgtgtcacagggcagtctcgaccaggcctccagc

SEQ ID NO: 91127 - DNA, 482 bp, Homo sapiens
ttccataggaacttgtttatatcagttagcctatagtaatactggttttgttatgcattgtcttgcttaaagtctcagtttctaagagcctgtcaacaacattaagaacttactatatatcagtaatcgctttgaacagcaacgataaatgcaccaattaaaagacagagattgtcagagtggatgaaaaaaacaagacccaaccataggatgtctacaagaaatctactttaaatataagacatataaattaaaagtaaatgggtggagaaaaatataccctgttaacactaatcaaaagaaagcagaagtagctatattaatttcaaacacaattgacttcaaaaaggaaagttatcagtgataaaggcattacataatgataaaggagttaattgtccaagaaggtgtaataatccttaacacatgtgcacctaacaagagcatcaaactaggtgagacaaaactgatagagctgcaag

SEQ ID NO: 91128 - DNA, 371 bp, Homo sapiens
ccgatggtgatctgtgggtgtcatgtgtgtgcacacagatgaccctgtacactgacttgcatgcgtgcaccagcgagtgtggattacttgcctgttctgggggtgtacatgtgtgtatttcatcatttaggcttgccaaggcagagggcagggattgcttaatcagaaactccactagaacttaaggagtggcctgtggtgctgatgcctgcatggcctcagcccctgatttccccaacttaggcaagtgtgaggctgggaccaccagttgggattactgaggaagggatgttcaaggtgctctgagattattgcctggcacacaggactgttaaatgcttgcacgtactttcaagtcttaagtagtttgg

SEQ ID NO: 91129 - DNA, 419 bp, Homo sapiens
cataggtgccagacaaatattatctaccattgttatacttatcactattattcttacttgaagaactatgtagaaaataattattgaaatccatgcaacaacatttagcatacttattaaatgcaaactgtgtgaagcattgttcaagattctggagtctatattttaggtaagaagctagacaataaagaaataaataataaatgggaaatttttatatacttgtaagtactcttgaaaattaaatagggaaatatgaaagagagcagctagggaatgaaagaagggaataaagatttttcattttttgtaacactagatggtatgcttaagtaagatcataactaagaagtgaatgataaaaaggagtcaggcttacaaagatttcagggaagaggatttcagacaagggaacatag

SEQ ID NO: 91130 - DNA, 123 bp, Homo sapiens
gagattgtgccactggactccagcctgggcgacagagagagacttcgtctccaaaaaaagaaagtccaaatacatgcaaataaaacttggcataacagtcttgcccaagccattgcactccgg

SEQ ID NO: 91131 - DNA, 311 bp, Homo sapiens
actttcatatgaaatagagaaacaatttaggcaacatttggcctaaatcctttggatgaatgtctgaattccttaaaattagcaattagttcaaacagttctgctttcagtatcagtatattttaaatctacattttttctggcctcaatggtccaaataactttacacctgccatgcaattacctcccatttgtagaaactttaccactggcaaagcactcccatgtacattgtctctgagtccatataatcagaagtgggcatggaccagtcacacattggttcctgaacaccagcttgtgaacagatc

SEQ ID NO: 91132 - DNA, 428 bp, Homo sapiens
agaaactccttagtcctctgaaacccggtacagtttgtcactctagctgcagactcgcaaggtgtccagagagcactgccatctcctagatcatcattaaaacaatatgtattaagttcttcttgagccaggcacatttctcagcaccgggggggacctacgcaccagagataagaaaaaaggagagtaaaattgtgctgaatgttattgcagagcactgaagagagaactagaccatgaacggaggacagaaatgatggagagtggggaggagcggcctcatggagaaagcaccacttgcccaacgatctggaggagacgagtgaatgaatcatgccagtatagacagggtgggtgggggttccaggtagatgaaaacacaatgcagttggcaagaggctgtacagaaaatattccaaataggttct

SEQ ID NO: 91133 - DNA, 845 bp, Homo sapiens
ccttaggaagagttaatggttatagaggctacagaaagcatttttattgtatcatcttttgtaattataaccacagcacttatcactagggcctcagccagatcatacaaatagctatgttgcaaatatactagagtagtggcatatgagtcagtatttattcttgaaaactgaaaagcctagtttcattaacctactattaaactgatgtgtacactgctgtggtgaggaggtggcacagttgccttttctcctccatttcttttaatttttttgtttgtttgttttagaagatgaagtctcactctgttgcccaggctgagtgcagtggcacttcatatagctcactatatatagctcactgtagtgagctatatagtcccaaatagctgggactacaggcacacgccaccatgccttgctgatcttttaattttttgtagagatggggtcttgctttattgtccaggttggtgtgaaactcctggctttaagcgatcctcctgccttggcctcctgaagtgctgggattacaggcatgaatcatttcgcctggcctcttttcctccatttctaacactgcttctgctaagttgtgttttctctaatatatacattgaccgtgacctctgtataatatggaaacagtaacaaaagcaccaaaataatccaaataagtaaagggtgaatgcattgttacttgtgcttttcaacagggacaagattaacagcttgtattcattttataaaatactactttaaaaagaaattgaaactagtgttaggaagaaaaagactacattgccttttaatacatggccaaaaacaccttccatcacagtctt

SEQ ID NO: 91134 - DNA, 465 bp, Homo sapiens
aagaaataaaactgtctttgtctgcaaatgacataactgccaatgtggaaaatctgaaataatcaacaaaaaattatccttgaattaaataattatagcaaggttgaaggataaaaggcaaatacacaaaagtcaattagtttcctttataccagccatgaaaaagtgaattctgaaatttaaaatgtgttaccttacattaacacccacccaagatgaaatacttagtataaatctaacaatatagttataaaatctatatgagttaaactttgatgaaagatatccaaaaagaactaaataattggatagatattccatggttatgtacaggaagactcaatagtgacagatttcagttcttcccagcttgatgtatagattcaacacaatctcagtcaaaatcctgcgagttattttgtgggtacagacaaactaattctgaagtttatatagagaggcaaa

SEQ ID NO: 91135 - DNA, 473 bp, Homo sapiens
gacaaagcacatcacagagctacacttaactctgaagagacagggaagttcatcctaccatgtacccagaatgtggagaactggaatatttgatgaacaatactaatgaccaccaaaagccttgtcctttgctaatcattaaaaaaaaattgcccaccaattctaacgacatcttggaacaattaagtccaggcttggcttaacattctgtcctggaggaaaacccttccatctaaaacccctcttgcccacatcctgaagccagctcgccctgaatcatgggaccctggagacgaggagaacagaggagagcaaggtcagggagatggctggtggattccaccggtgaccatgggcagagctctgaattctgaattgtattagcccacagagtaactatgcatctgtgttgtggggtagtggaaaggccatctgactcctgtgtgaccttggacaagtcatctggaaagatc

SEQ ID NO: 91136 - DNA, 344 bp, Homo sapiens
aaatcagaaagaaaataggaacattattactgattctgtgaaaataaaaaagattataagagaattctatgagcaatatatgccaacaaattagacaacctagataaaattcctagataaaaacctagataaaaaaacctagaaacacaaaacttaccaagactgtatcacagagagttagacaatcaaaaaacacttatggttattaaggaaattgaatcagtaatccaaatctctcaacaaagaaatgtccttgacttgatggcttcactggtgagttctaccaaacatttaaagaactaataccaatccttctcaaactcttccagaaaattgaagaggag

SEQ ID NO: 91137 - DNA, 413 bp, Homo sapiens
catacacacagatctatgaaccgagacttgcacacactgcctctgctgtccactgacctggttgtttagcccagggatctagggccaccaacatgcacatgtgatggaggctactagaacctgtcctagagaaggacgggactcatcgcgcctttccttaaggggcggggcagggggtgcagagaatgtggcttaaggaccatcacattttagaaatgtttcagaattatagagcggtatttgtgtcactttttgggtggggtgtgaatgtaaagtggtcctctacaggtgtcttccagaaagcattgaggctgttcatgtgaacctttgtgcttttgctgctaaactagaagcatagttttggattggtttattgttttgtcttctatgaatagaaaaaaataatcaaaact

SEQ ID NO: 91138 - DNA, 320 bp, Homo sapiens
gtaagtgggcccacgtcacacactggccccagtgatcgtagtgttgtaggaagcgctgccatatttgattgaatttagccattctggaatgacgtgttcatgaagtcggctcttgcattaccgtggcctttattattgctaatgcattctgacattacaggtgtagccttggctctcccagaaagggcaaggctgctcttaccaaacgaaagagcagaatttatgaaactgttacacagtgaggccagtgttcacctttagttactaagcagagtaagggaaataaatgcttttatagaaaagatagccagtgacagcag

SEQ ID NO: 91139 - DNA, 248 bp, Homo sapiens
gaacattccatcctgtttttattagtatattcttgaaatatagtttgaaattataaagtatgatgtccctctgctttgtttttttttctcataattaatttggctattcgaagtttattgtagttttttgtaaattttaaaatcgtagttttcattactataagaaaaaaatgccactggaattttgataggtcgtttgctgaatctatagattactttggagaatatggtactttaacagtatttat

SEQ ID NO: 91140 - DNA, 292 bp, Homo sapiens
tagagaggggtgggcttaaacagatgtttgggtctggaagctaaaatcagcttttggtgtaggagtcctttctttctttctttctttctttctttctttctttctttctttctttctttctttctttctttcttccttccttccttccttccttccttccttcctttctttctttctctctctcccttccttccttccctccctctctctctcgttcgttctttctttctattttttttttagacagggtctcgctctgttgcccaggctggagtgcagtggcacaatcttg

SEQ ID NO: 91141 - DNA, 471 bp, Homo sapiens
ataaaaccttcccatacataagtcagcaagatcattcagttttttcttgtgaactttaaaaaatggtaaaggcagtgtatagaggaaaggcatcttggcattcaaattcatgagcccccttcagcaatacttatggcactcagtttaggaatcaattactagctgtattatagagatatcaagaatttaatcacttctccctgagtattgcttatttaagcagcccacccacttacctatctttgtaggagtatacttctgttataaggtactgtgtaagcacagaagtaaataacaatggtgaataaagaaatacaaaaattagctgggcatggtagcatgcgcctatagtcccagctactcgggaggctaaggcaggagaattgcttcaacccgggaggcagaggttacagtgagcagagatcatgccactgcaccccagcctggtcaacagagcaagactctgtctca

SEQ ID NO: 91142 - DNA, 454 bp, Homo sapiens
ataaaaccttcccatacataagtcagcaagatcattcagttttttcttgtgaactttaaaaaatggtaaaggcagtgtatagaggaaaggcatcttggcattcaaattcatgagcccccttcagcaatacttatggcactcagtttaggaatcaattactagctgtattatagagatatcaagaatttaatcacttctccctgagtattgcttatttaagcagcccacccacttacctatctttgtaggagtatacttctgttataaggtactgtgtaagcacagaagtaaataacaatggtgaataaagaaatatatgttgggttattttaatttaattgaaagcagatgtcaaatgatacccgtcaatacttattaaaataagacagttaaacccctgtgaacctcagcaactcaaaatttgcagttcagtcatagtatacatggatttcat

SEQ ID NO: 91143 - DNA, 344 bp, Homo sapiens
  misc_feature (85)..(85): n is a, c, g, or t
tatccccggctctgggtaatgaaataatctgtacaacaaaccctgtgacacaagtttactacataacaaactgcacatatacccnccaacttaaaataaacgttttttaaaaaagaaaatcctgcttcaaactaaccgaatttaagaattgttggctgggtacggtggctcacgcctgtaatcccagcactttgggaggccgagatgggcagatcacttaaggtcaggagttcgagaccagcctgcccaacatggtgaaacactgtctctactaaagatacaaaaaattagccgagggtggtggcgtacgcctgtaatcccagctactcgggaggctgaggcag

SEQ ID NO: 91144 - DNA, 317 bp, Homo sapiens
ggcagggggagaaaagagacttttacttgttttcccccagcagtcccggaataagcaaaccatggccaccggccctttgtgctcagaggctcaaggcagcaaggggctgaatggggcacatgggccggggctcgggggtcaggctcaggtgtggctctgctgggacggcagcatcgcattccgccgggctgcgcggccagtgggccaggagcccgatccacagctagactctggcagctggcaagcagggcgtctcctgggccagcacgccgtctgaagtgttgccttcttgggccaggctggttttcaggggctgg

SEQ ID NO: 91145 - DNA, 475 bp, Homo sapiens
aaagaccttgctgataaaacaggctatggtaaagaagctggccaaagcccacaaaaaccaagatggtgatgaaagtgacctcccattgtcctcattgctcattaggcactaattataatatattagcatgctaaaaggcactcccaccagcgccatgactatttataaatgccatggcaacatcaggaagttaccatatatggtctaaaaaagggaggaaccctcagttcagggaattgcccaccccttccctggaaaactcatgaataatccatcccttgtttagcatatggtcaagaaataactgtaagtatattcagtcaagcagcccaggctgctgttctgcctatggagtagccattctttattcctttactttctcaataaacttactttcactttatggactcgccccaaattctttcttgtgtaaggtccaatgaactttctcatgggatctggattgggacccctt

SEQ ID NO: 91146 - DNA, 122 bp, Homo sapiens
tggcaggctgaggctgtgcgtttccatggagttcctgttttgacctgatggaaaatctctgtgggccaccatgtgcctggccagggcagcggaggggccggagatttgcctggatctgtggc

SEQ ID NO: 91147 - DNA, 476 bp, Homo sapiens
gctctagaggtccacctcataatgggagcccaaagacatacacttggctaaaacatcgaagagtagcgaagaaaggggccgtgaatgaccttctagaggtgaaacttgagctgatatgtagagaactaagcctgtaaatctgccttatcccccactttctctgctcccaatccttcctaaactgagaaaccctggcctaatgcaaccttagctgtcttcttctctgtaggttgctctgatccacttgcaaaacgtttcctaatccttttaagatgacctacccaccaggtcttgccttcttcccttttatgatctttaacaatattgactaaatggaaatattgcattatttattatttctgtcaggatttagatgatgtgccgcttttccccttatggtaagaaagaaatctccctacctccactaaatgcttaaccttctagattgaagattcgtgattgtgactcttcctgag

SEQ ID NO: 91148 - DNA, 441 bp, Homo sapiens
ggctgagacagtgcgggaacatttagggttaactgtaattcactgccaagaaaaaacaatctgtccagggagagcccaggtcatgaaaaagatggaaaggaaggcccacggaagtggaagacaggatgccaactctggcagagtctggccctcaaaacagtgcgtaaatttcctttcttttcttttcttgtttttctttttttgagacagagtctcgctctgccatctaggctgaagtgcagtagcgcgatctcggctcactgtaacctctgcctcctaggttcaagtgattcttgtgccttagcctcccaagtagctgggactacaggcccgtgccaccacacccagctaatttttgtatgttttagtagggatggagtttcaccatgttagccaggctacgtgatccgcccacttcaccttcccaagatgctgggatta

SEQ ID NO: 91149 - DNA, 296 bp, Homo sapiens
attcaatttggggcaattacttgtaggtgttctttaaagcaaagatgatgccagaatgtaattgaattttgaaatagcagtatccaaatcagttaaaaagctacttcgtcatgcatgcaaggctgatctcaatctgttgtcattagaggaaggtggtgaccctttcttcccacagcaagttgggtttttgttgcctcatatactgcaagcagtcagctactttttttgagtgttttcaatatggaaacaaataatagaatttagttctggtagaagtcacttatttgttatctttt

SEQ ID NO: 91150 - DNA, 443 bp, Homo sapiens
tgtcacactacctatatttcaaatactcggtagcctctggttgctagtgcctgcggtattggatggcacagacttggggattcgtccaagtagcagagctgggatctgaagctaacaaagttggttccagaatccaggatctaactaataactatcctggctgggcgtggtggctcacacctgtaatcccagcactttgggaggccaaggtgagcagatcacctgaggtcaggagttcaagaccagcctggccaacatggcaaaaccccgtctctactaaaaatgcaaagattagccggctgtggtcgtgggtacctgtagtcccagctacttgagaggctgaggcaggagaatcgcttgaacccgggaggcagaggttgccaagagctgcgatcgcgccactgcactccagtcagggtgacagagcgagactctgtctcgaa

SEQ ID NO: 91151 - DNA, 258 bp, Homo sapiens
agatcctgggcacagaagaacgaggctttgtttcttcccaagcacgactctttactgttctctccgtactcagaacacagtaatcagggatggaggagctaagctagtgaaagtgtttttcgtgaacatgtggaacctataacatactgtggtcaaagggctgtaccatggtctgtctccgaagggagtgggaggtccccaagattacacaccgtctgtagcctcgcctgagctatatgtatttctctacttgccctt

SEQ ID NO: 91152 - DNA, 572 bp, Homo sapiens
actagagaccagcaggtttggaagtttcaaattagtcttaaaaatatctttaagtctaactgggaagactagaatgtggctatgatgtatgacttggagaaataaaaacagtataggttagaaaatgactattttatttccttcaaggttcagtagtagttgtctgttacatgtgtggaggttaatgatgaggatctagtagttctcattatctattgctgtttaatgagccttcccaaaagtttgtgcctcaaaacaacataattttattatatcacagcattttgtggctcagggatttgagcagggctcagctgggagattcttctgccccacatggtgttgactggatcactcagcggtgtttagctagcagctagtccgatctggaggatccaagacatcttcatccatatgcctggtgccttgatgcagagggctggaaggtagggctcaggggtcctctccctctgatgtagtttcaggccctttccagatgacctctccagcagggtgtttgtacttcttacacggctgcttagagctccaagtataggtggagccacttacca

SEQ ID NO: 91153 - DNA, 435 bp, Homo sapiens
aatgagaccatgtatctttaaaaaaaatcttctgcagaataaagctcaaagtcttcatttgatctacaatatctttcatgtcgtgctcccagcctgtctctccaagttcaccttatatcccttgcctttaatttcaacaaggccattgctaatcgctgaaattgtttgtattcattctctaaacatacattggttcttattaagtgccaggtttgagctattcactgagatacagagaggaacaagacatagtctctgccctccatgagcagagtctaatagagcaaatgcacacatgcagcccagacctcccttggattatcctgctgtataaaagtgagatgcatttggtgcagattcccattccacatggtattagttttctattgctgcataacaaattgcctctaacttagtggcttacaacatacaatt

SEQ ID NO: 91154 - DNA, 285 bp, Homo sapiens
atagagtgagactctgtctcaagaagaagaaaaagaaaaaaaactcactttaaactctgctagaccattgcccttgtatgtgaaattttatctggatagaagaagatgaggaaaaaaattttcttgtcttttagtggaggagaatgacatgtaaaacaagtattctttaaaaattccaaatatgatatgagaactaccccataaagttgtgaaggtcacattggtgaaaggaaaactaagtgctgtgtaaattacaaagttgtctaagtatccacctggtcctta

SEQ ID NO: 91155 - DNA, 222 bp, Homo sapiens
gggaagctgaggcaggagaatcacttaaggccaagagttcaagaccaatgtgggcaacataataggacccccgtctctacaatacatttttttacaaattagctgggcattgtggcacacatgtagtcctagcaacttgcgaggctgagacaggaggattgcttgagcccaggagttcaagaaccaagtgtataatataatattagtgttaaatggatgact

SEQ ID NO: 91156 - DNA, 303 bp, Homo sapiens
tctgcctgccagccgcgtccgctcttggcgtctgcctccggggggtgctgccttcccatccttatcccctcccttcgtccagagccggctggaaaatgcctcttgcccccttttagaatggagggatcattgtgtgtctccatgggtggagtggctcggtgaggcaatggcagggggctaaatatgggcttgtcttggcgagggcgcctcaccgcagttggagatgggggccccctgcccgcaggccaccccctgctggtcttccccagcctcgtggcccagatagatcaacttcagccctga

SEQ ID NO: 91157 - DNA, 275 bp, Homo sapiens
aatctactgcagtattttctgtcctgtcctatcctactctattctttccaaatactagttgagaccccctgtacagattgcatgactcctccttggattcgtcaacaccacagttaaacgctctgctcatatagccttcacaatggcctgtgaggcacgtcttgttcctggaccactgtggggataaggagtggagtgacttgcctaaagcctcccagctagtacaaggcacagccagccagcctttctacttccatctcaagcaaagtttgatg

SEQ ID NO: 91158 - DNA, 549 bp, Homo sapiens
gttaaagtgattggtgcttccacctttggcagagtaatctggggacgcgatgggtgagatctatctgccagggcaggctgagaactctttttcaggggaaaattgcagttgtgctccctcaccttccctcagccctcctctgttaggtaggaacatactaggttttgtcatttccacaaaagggtgaaaagcctgtaatctgtggtagatagatcttagagcatgcatatccccctcccactttattttcttttactctttttcttttatttatttattttttagagacagggtcttgctctgttggccaggatggagtgcaggggcgcaatcatagctcactacagcctcgaactcctgggcttaaaagatcctcccaccccagcttccccagcagttgggactacagttatgcctggctaattttttttttttttaactttcttttttcccccccgagatggagtcttgctctgtcgcccaggctagagtgccatggcgcgatcttggcttactgcaacctcctcccccttggttcagcgattctcg

SEQ ID NO: 91159 - DNA, 274 bp, Homo sapiens
gtgaagagtagacttagcttggggaaggatgaagcaagaaacttttctgatttcttataagtgtgtttatattcctgtaaaaactatgtacatgtattattttgataaaaaagaaattataaagttaaaatagtataaagataattaagcaaggtcaggcagagtagctttaaagtaaataaattacaaaaataatgctgctacaaatattggaacaactgcttgaaaagtgggtggtgaataaacaaatgctacttttggtggaatgttattt

SEQ ID NO: 91160 - DNA, 510 bp, Homo sapiens
gcaatgacagtagagctatattgaatggatttaggatttccaagtgccaagctgaaaggaaaagctgtccaaatggagggaacagcatttgcaaaggcccagagagatagtgaaacataagtgacattgagcctgattcccctttatcagaaactaaagtttgtgaaacggtgtggggaatgagataggaaaggtaagtggggcaggatcagtggaggacagtgcagttctagtatctagcaaggacgtaaccgtgatggaggcctctgatctcaaccacttgagcaaagtagcagcaatcatgcctttgtactgcagtttcttttaataaaagtaggatgcacttgtagtctggattctcaaggcacataggcctattgacaaaacacaggatccatgaggcctgaatcttgatctaaagtccaccactcagttttggactagtccctgctgcctcccctgccaaagcatttgcaatctaactctctgtagtcacacacactgtgtagt

SEQ ID NO: 91161 - DNA, 617 bp, Homo sapiens
ccagcctgggtaatccttagggcttttctcaggaatgcaagggtgatttgatgttagaaagctattattgtgacttactgtgtaatgctcatctccatagagggagaaaaggcatttgataaaattcattgctttttttaattaagtaaacaccctgtatttatggggtatatgtgatatttggtacgtgcattaaagttcattgctttttctccttgggaggttgaggtgggaggattgcttgagcccaggagtgttgaggttgcagtgagctgtgattgtgccacagctttccagcttaggtgacagagtgagactctgtctcataaaaagaaaagaaaggccgagtgtggcagctcacacctgtcatcccagcactttgggagggtgaggcaggaggattgcttgagcccatgagtttgagaccagcctgggcaacatgaaaccctgtctctaaaaaaaaaaaaattttttttaattagccagatgtgatggcatgtgcctgtagtctcaactactcaggaggttgaggcaagaggattgctcgagtccagaagtttaaggctgtggtgaaccatgatcatgccattgcactctagtctgggccacagagtgag

SEQ ID NO: 91162 - DNA, 352 bp, Homo sapiens
tcccccgactctaaaggtgcttcgtgcttagtgtagaaactgcagaagaggcacaaaagaagcccaattcagtgcagtcgtgggtggcgccatttgcgaatctctagttaggagcgggctctgctggtctccgtcgtatgcacatctgtgtctgtatgagaagcacggctgtgattgttctgtaaatctggcttcttggtctgcattttgcattttttctttttaaggaatgttgtcatgagcgcttccttaggacactatttttaatgtttaacttttcagtagctccaataatatctcatcaaatatttcataactttttaactattcaccctctgtggacatttaagtg

SEQ ID NO: 91163 - DNA, 3871 bp, Homo sapiens
atcgcattacgtgaacaaatagctgaggggcggccgggccagaacggcttgtgtaactttgcaaacgtgccagaaagtttaaaatctctcctccttccttcactccagacactgcccgctctccgggactgccgcgccgctccccgttgccttccaggactgagaaaggggaaagggaagggtgccacgtccgagcagccgccttgactggggaagggtctgaatcccacccttggcattgcttggtggagactgagatacccgtgctccgctcgcctccttggttgaagatttctccttccctcacgtgatttgagccccgtttttattttctgtgagccacgtcctcctcgagcggggtcaatctggcaaaaggagtgatgcgcttcgcctggaccgtgctcctgctcgggcctttgcagctctgcgcgctagtgcactgcgcccctcccgccgccggccaacagcagcccccgcgcgagccgccggcggctccgggcgcctggcgccagcagatccaatgggagaacaacgggcaggtgttcagcttgctgagcctgggctcacagtaccagcctcagcgccgccgggacccgggcgccgccgtccctggtgcagccaacgcctccgcccagcagccccgcactccgatcctgctgatccgcgacaaccgcaccgccgcggcgcgaacgcggacggccggctcatctggagtcaccgctggccgccccaggcccaccgcccgtcactggttccaagctggctactcgacatctagagcccgcgaagctggcgcctcgcgcgcggagaaccagacagcgccgggagaagttcctgcgctcagtaacctgcggccgcccagccgcgtggacggcatggtgggcgacgacccttacaacccctacaagtactctgacgacaacccttattacaactactacgatacttatgaaaggcccagacctgggggcaggtaccggcccggatacggcactggctacttccagtacggtctcccagacctggtggccgacccctactacatccaggcgtccacgtacgtgcagaagatgtccatgtacaacctgagatgcgcggcggaggaaaactgtctggccagtacagcatacagggcagatgtcagagattatgatcacagggtgctgctcagatttccccaaagagtgaaaaaccaagggacatcagatttcttacccagccgaccaagatattcctgggaatggcacagttgtcatcaacattaccacagtatggatgagtttagccactatgacctgcttgatgccaacacccagaggagagtggctgaaggccacaaagcaagtttctgtcttgaagacacatcctgtgactatggctaccacaggcgatttgcatgtactgcacacacacagggattgagtcctggctgttatgatacctatggtgcagacatagactgccagtggattgatattacagatgtaaaacctggaaactatatcctaaaggtcagtgtaaaccccagctacctggttcctgaatctgactataccaacaatgttgtgcgctgtgacattcgctacacaggacatcatgcgtatgcctcaggctgcacaatttcaccgtattagaaggcaaagcaaaactcccaatggataaatcagtgcctggtgttctgaagtgggaaaaaatagactaacttcagtaggatttatgtattttgaaaaagagaacagaaaacaacaaaagaatttttgtttggactgttttcaataacaaagcacataactggattttgaacgcttaagtcatcattacttgggaaatttttaatgtttattatttacatcactttgtgaattaacacagtgtttcaattctgtaattacatatttgactctttcaaagaaatccaaatttctcatgttccttttgaaattgtagtgcaaaatggtcagtattatctaaatgaatgagccaaaatgactttgaactgaaacttttctaaagtgctggaactttagtgaaacataataataatgggtttatatatgtcatagcatagatgaatttagaaacaatgctcctactgtttaaatacatatggacacatctggtgctgagaaagaaacaaacacattaccattggtgtcaagaaatattactatatagcagagaaatggcaatacatgtactcagatagttacatccctatataaaaagtatgtttacatttaaaaaattagtagataacttcctttctttcaagtgcacaatttcattttgacttgagtcaacttttgttttggaacaaattaagtaagggagctgcccaatcctgtctgatatttcttgaggctgccctctatcattttatctttcccatgggcagagatgttgtaagtgggattcttaatatcaccattcttgggactggtatacataaggcagccgtgaaactggaaagtcattttgatgactgatgtgatacatccagaggtaaaatgcatttaaacatattaaagtatttgccaaagatacaattttcttgctgacataaaaatcacacaaacaagtcccccccaaaccacaactgtctctcaaatagcttaaaaaaattgaaaaacattttaggatttttcaagttttctagattttaaaaagatgttcagctattagaggaatgttaaaaattttatattatctagaacacaggaacatcatcctgggttattcaggaatcagtcacacatgtgtgtgtgtctgagatatagtctaaattagcaaagcacatagtattacatacttgaggggttggtgaacaaaggaaaaatatactttctgcaaaaccaaggactgtgctgcgtaatgagacagctgtgatttcatttgaaactgtgaaaccatgtgccataatagaattttgagaattttgcttttacctaaattcaagaaaatgaaattacacttttaagttagtggtgcttaagcataatttttcctatattaaccagtattaaaatctcaagtaagattttccagtgccagaacatgttaggtggaattttaaaagtgcctcggcatcctgtattacatgtcatagaattgtaaagtcaacatcaattactagtaatcattctgcactcactgggtgcatagcatggttagaggggctagagatggacagtcatcaactggcggatatagcggtacatatgatccttagccaccagggcacaagcttaccagtagacaatacagacagagcttttgttgagctgtaactgagctatggaatagcttctttgatgtacctctttgccttaaattgctttttagttctaagattgtagaatgatcctttcaaattgtaatcttttctaacagagatattttaatatacttgctttcttaaaaaacaaaaaaactactgtcagtattaatactgagccagactggcatctacagatttcagatctatcattttattgattcttaagcttgtattaaaaactaggcaatatcatcatggatacataggagaagacacatttacaatcattcattgggccttttatctgtctatccatccatcatcatttgaaggcctaatatatgccaagtactcacatggtatgcattgagacataaaaaagactgtctataacctcaataagtattaaaaatcccattattacccataaggttcatcttatttcatttttagggaataaaattacatgtctatgaaatttcaattttaagcactattgtttttcatgaccataatttatttttaaaaataaattaaaggttaattatatgcatgtatgtatttctaataattaaaaatgtgttcaatccctga

SEQ ID NO: 91164 - DNA, 4192 bp, Homo sapiens
atcgcattacgtgaacaaatagctgaggggcggccgggccagaacggcttgtgtaactttgcaaacgtgccagaaagtttaaaatctctcctccttccttcactccagacactgcccgctctccgggactgccgcgccgctccccgttgccttccaggactgagaaaggggaaagggaagggtgccacgtccgagcagccgccttgactggggaagggtctgaatcccacccttggcattgcttggtggagactgagatacccgtgctccgctcgcctccttggttgaagatttctccttccctcacgtgatttgagccccgtttttattttctgtgagccacgtcctcctcgagcggggtcaatctggcaaaaggagtgatgcgcttcgcctggaccgtgctcctgctcgggcctttgcagctctgcgcgctagtgcactgcgcccctcccgccgccggccaacagcagcccccgcgcgagccgccggcggctccgggcgcctggcgccagcagatccaatgggagaacaacgggcaggtgttcagcttgctgagcctgggctcacagtaccagcctcagcgccgccgggacccgggcgccgccgtccctggtgcagccaacgcctccgcccagcagccccgcactccgatcctgctgatccgcgacaaccgcaccgccgcggcgcgaacgcggacggccggctcatctggagtcaccgctggccgccccaggcccaccgcccgtcactggttccaagctggctactcgacatctagagcccgcgaagctggcgcctcgcgcgcggagaaccagacagcgccgggagaagttcctgcgctcagtaacctgcggccgcccagccgcgtggacggcatggtgggcgacgacccttacaacccctacaagtactctgacgacaacccttattacaactactacgatacttatgaaaggcccagacctgggggcaggtaccggcccggatacggcactggctacttccagtacggtctcccagacctggtggccgacccctactacatccaggcgtccacgtacgtgcagaagatgtccatgtacaacctgagatgcgcggcggaggaaaactgtctggccagtacagcatacagggcagatgtcagagattatgatcacagggtgctgctcagatttccccaaagagtgaaaaaccaagggacatcagatttcttacccagccgaccaagatattcctgggaatggcacagttgtcatcaacattaccacagtatggatgagtttagccactatgacctgcttgatgccaacacccagaggagagtggctgaaggccacaaagcaagtttctgtcttgaagacacatcctgtgactatggctaccacaggcgatttgcatgtactgcacacacacagggattgagtcctggctgttatgatacctatggtgcagacatagactgccagtggattgatattacagatgtaaaacctggaaactatatcctaaaggtcagtgtaaaccccagctacctggttcctgaatctgactataccaacaatgttgtgcgctgtgacattcgctacacaggacatcatgcgtatgcctcaggctgcacaatttcaccgtattagaaggcaaagcaaaactcccaatggataaatcagtgcctggtgttctgaagtgggaaaaaatagactaacttcagtaggatttatgtattttgaaaaagagaacagaaaacaacaaaagaatttttgtttggactgttttcaataacaaagcacataactggattttgaacgcttaagtcatcattacttgggaaatttttaatgtttattatttacatcactttgtgaattaacacagtgtttcaattctgtaattacatatttgactctttcaaagaaatccaaatttctcatgttccttttgaaattgtagtgcaaaatggtcagtattatctaaatgaatgagccaaaatgactttgaactgaaacttttctaaagtgctggaactttagtgaaacataataataatgggtttatatatgtcatagcatagatgaatttagaaacaatgctcctactgtttaaatacatatggacacatctggtgctgagaaagaaacaaacacattaccattggtgtcaagaaatattactatatagcagagaaatggcaatacatgtactcagatagttacatccctatataaaaagtatgtttacatttaaaaaattagtagataacttcctttctttcaagtgcacaatttcattttgacttgagtcaacttttgttttggaacaaattaagtaagggagctgcccaatcctgtctgatatttcttgaggctgccctctatcattttatctttcccatgggcagagatgttgtaagtgggattcttaatatcaccattcttgggactggtatacataaggcagccgtgaaactggaaagtcattttgatgactgatgtgatacatccagaggtaaaatgcatttaaacatattaaagtatttgccaaagatacaattttcttgctgacataaaaatcacacaaacaagtcccccccaaaccacaactgtctctcaaatagcttaaaaaaattgaaaaacattttaggatttttcaagttttctagattttaaaaagatgttcagctattagaggaatgttaaaaattttatattatctagaacacaggaacatcatcctgggttattcaggaatcagtcacacatgtgtgtgtgtctgagatatagtctaaattagcaaagcacatagtattacatacttgaggggttggtgaacaaaggaaaaatatactttctgcaaaaccaaggactgtgctgcgtaatgagacagctgtgatttcatttgaaactgtgaaaccatgtgccataatagaattttgagaattttgcttttacctaaattcaagaaaatgaaattacacttttaagttagtggtgcttaagcataatttttcctatattaaccagtattaaaatctcaagtaagattttccagtgccagaacatgttaggtggaattttaaaagtgcctcggcatcctgtattacatgtcatagaattgtaaagtcaacatcaattactagtaatcattctgcactcactgggtgcatagcatggttagaggggctagagatggacagtcatcaactggcggatatagcggtacatatgatccttagccaccagggcacaagcttaccagtagacaatacagacagagcttttgttgagctgtaactgagctatggaatagcttctttgatgtacctctttgccttaaattgctttttagttctaagattgtagaatgatcctttcaaattgtaatcttttctaacagagatattttaatatacttgctttcttaaaaaacaaaaaaactactgtcagtattaatactgagccagactggcatctacagatttcagatctatcattttattgattcttaagcttgtattaaaaactaggcaatatcatcatggatacataggagaagacacatttacaatcattcattgggccttttatctgtctatccatccatcatcatttgaaggcctaatatatgccaagtactcacatggtatgcattgagacataaaaaagactgtctataacctcaataagtattaaaaatcccattattacccataaggttcatcttatttcatttttagggaataaaattacatgtctatgaaatttcaattttaagcactattgtttttcatgaccataatttatttttaaaaataaattaaaggttaattatatgcatgtatgtatttctaataattaaaaatgtgttcaatccctgaaatgtctgccttttaaatataacacctactatttggttaattttgacgatttttttttttcaattaggaagctaaaaatactactttattccttatatgaacattcatccccctcctggcacctctaaacacacccaaataactcacaagtactgatttaacactctgtattactgaacttctttgaactattttgaactttgaatctcttctctgaataactgccgaaactcaaagataataattagttgatgaaggttatcaattaataaaataacacagaccagtcttaccaaactctaaatacattttaaaaaatag

SEQ ID NO: 91165 - DNA, 3818 bp, Homo sapiens
atcgcattacgtgaacaaatagctgaggggcggccgggccagaacggcttgtgtaactttgcaaacgtgccagaaagtttaaaatctctcctccttccttcactccagacactgcccgctctccgggactgccgcgccgctccccgttgccttccaggactgagaaaggggaaagggaagggtgccacgtccgagcagccgccttgactggggaagggtctgaatcccacccttggcattgcttggtggagactgagatacccgtgctccgctcgcctccttggttgaagatttctccttccctcacgtgatttgagccccgtttttattttctgtgagccacgtcctcctcgagcggggtcaatctggcaaaaggagtgatgcgcttcgcctggaccgtgctcctgctcgggcctttgcagctctgcgcgctagtgcactgcgcccctcccgccgccggccaacagcagcccccgcgcgagccgccggcggctccgggcgcctggcgccagcagatccaatgggagaacaacgggcaggtgttcagcttgctgagcctgggctcacagtaccagcctcagcgccgccgggacccgggcgccgccgtccctggtgcagccaacgcctccgcccagcagccccgcactccgatcctgctgatccgcgacaaccgcaccgccgcggcgcgaacgcggacggccggctcatctggagtcaccgctggccgccccaggcccaccgcccgtcactggttccaagctggctactcgacatctagagcccgcgaagctggcgcctcgcgcgcggagaaccagacagcgccgggagaagttcctgcgctcagtaacctgcggccgcccagccgcgtggacggcatggtgggcgacgacccttacaacccctacaagtactctgacgacaacccttattacaactactacgatacttatgaaaggcccagacctgggggcaggtaccggcccggatacggcactggctacttccagtacggtctcccagacctggtggccgacccctactacatccaggcgtccacgtacgtgcagaagatgtccatgtacaacctgagatgcgcggcggaggaaaactgtctggccagtacagcatacagggcagatgtcagagattatgatcacagggtgctgctcagatttccccaaagagtgaaaaaccaagggacatcaacattaccacagtatggatgagtttagccactatgacctgcttgatgccaacacccagaggagagtggctgaaggccacaaagcaagtttctgtcttgaagacacatcctgtgactatggctaccacaggcgatttgcatgtactgcacacacacagggattgagtcctggctgttatgatacctatggtgcagacatagactgccagtggattgatattacagatgtaaaacctggaaactatatcctaaaggtcagtgtaaaccccagctacctggttcctgaatctgactataccaacaatgttgtgcgctgtgacattcgctacacaggacatcatgcgtatgcctcaggctgcacaatttcaccgtattagaaggcaaagcaaaactcccaatggataaatcagtgcctggtgttctgaagtgggaaaaaatagactaacttcagtaggatttatgtattttgaaaaagagaacagaaaacaacaaaagaatttttgtttggactgttttcaataacaaagcacataactggattttgaacgcttaagtcatcattacttgggaaatttttaatgtttattatttacatcactttgtgaattaacacagtgtttcaattctgtaattacatatttgactctttcaaagaaatccaaatttctcatgttccttttgaaattgtagtgcaaaatggtcagtattatctaaatgaatgagccaaaatgactttgaactgaaacttttctaaagtgctggaactttagtgaaacataataataatgggtttatatatgtcatagcatagatgaatttagaaacaatgctcctactgtttaaatacatatggacacatctggtgctgagaaagaaacaaacacattaccattggtgtcaagaaatattactatatagcagagaaatggcaatacatgtactcagatagttacatccctatataaaaagtatgtttacatttaaaaaattagtagataacttcctttctttcaagtgcacaatttcattttgacttgagtcaacttttgttttggaacaaattaagtaagggagctgcccaatcctgtctgatatttcttgaggctgccctctatcattttatctttcccatgggcagagatgttgtaagtgggattcttaatatcaccattcttgggactggtatacataaggcagccgtgaaactggaaagtcattttgatgactgatgtgatacatccagaggtaaaatgcatttaaacatattaaagtatttgccaaagatacaattttcttgctgacataaaaatcacacaaacaagtcccccccaaaccacaactgtctctcaaatagcttaaaaaaattgaaaaacattttaggatttttcaagttttctagattttaaaaagatgttcagctattagaggaatgttaaaaattttatattatctagaacacaggaacatcatcctgggttattcaggaatcagtcacacatgtgtgtgtgtctgagatatagtctaaattagcaaagcacatagtattacatacttgaggggttggtgaacaaaggaaaaatatactttctgcaaaaccaaggactgtgctgcgtaatgagacagctgtgatttcatttgaaactgtgaaaccatgtgccataatagaattttgagaattttgcttttacctaaattcaagaaaatgaaattacacttttaagttagtggtgcttaagcataatttttcctatattaaccagtattaaaatctcaagtaagattttccagtgccagaacatgttaggtggaattttaaaagtgcctcggcatcctgtattacatgtcatagaattgtaaagtcaacatcaattactagtaatcattctgcactcactgggtgcatagcatggttagaggggctagagatggacagtcatcaactggcggatatagcggtacatatgatccttagccaccagggcacaagcttaccagtagacaatacagacagagcttttgttgagctgtaactgagctatggaatagcttctttgatgtacctctttgccttaaattgctttttagttctaagattgtagaatgatcctttcaaattgtaatcttttctaacagagatattttaatatacttgctttcttaaaaaacaaaaaaactactgtcagtattaatactgagccagactggcatctacagatttcagatctatcattttattgattcttaagcttgtattaaaaactaggcaatatcatcatggatacataggagaagacacatttacaatcattcattgggccttttatctgtctatccatccatcatcatttgaaggcctaatatatgccaagtactcacatggtatgcattgagacataaaaaagactgtctataacctcaataagtattaaaaatcccattattacccataaggttcatcttatttcatttttagggaataaaattacatgtctatgaaatttcaattttaagcactattgtttttcatgaccataatttatttttaaaaataaattaaaggttaattatatgcatgtatgtatttctaataattaaaaatgtgttcaatccctga

SEQ ID NO: 91166 - DNA, 1568 bp, Homo sapiens
atcgcattacgtgaacaaatagctgaggggcggccgggccagaacggcttgtgtaactttgcaaacgtgccagaaagtttaaaatctctcctccttccttcactccagacactgcccgctctccgggactgccgcgccgctccccgttgccttccaggactgagaaaggggaaagggaagggtgccacgtccgagcagccgccttgactggggaagggtctgaatcccacccttggcattgcttggtggagactgagatacccgtgctccgctcgcctccttggttgaagatttctccttccctcacgtgatttgagccccgtttttattttctgtgagccacgtcctcctcgagcggggtcaatctggcaaaaggagtgatgcgcttcgcctggaccgtgctcctgctcgggcctttgcagctctgcgcgctagtgcactgcgcccctcccgccgccggccaacagcagcccccgcgcgagccgccggcggctccgggcgcctggcgccagcagatccaatgggagaacaacgggcaggtgttcagcttgctgagcctgggctcacagtaccagcctcagcgccgccgggacccgggcgccgccgtccctggtgcagccaacgcctccgcccagcagccccgcactccgatcctgctgatccgcgacaaccgcaccgccgcggcgcgaacgcggacggccggctcatctggagtcaccgctggccgccccaggcccaccgcccgtcactggttccaagctggctactcgacatctagagcccgcgaagctggcgcctcgcgcgcggagaaccagacagcgccgggagaagttcctgcgctcagtaacctgcggccgcccagccgcgtggacggcatggtgggcgacgacccttacaacccctacaagtactctgacgacaacccttattacaactactacgatacttatgaaaggcccagacctgggggcaggtaccggcccggatacggcactggctacttccagtacggtctcccagacctggtggccgacccctactacatccaggcgtccacgtacgtgcagaagatgtccatgtacaacctgagatgcgcggcggaggaaaactgtctggccagtacagcatacagggcagatgtcagagattatgatcacagggtgctgctcagatttccccaaagagtgaaaaaccaagggacatcagatttcttacccagccgaccaagatattcctgggaatggcacagttgtcatcaacattaccacagtatggatgagtttagccactatgacctgcttgatgccaacacccagaggagagtggctgaaggccacaaagcaagtttctgtcttgaagacacatcctgtgactatggctaccacaggcgatttgcatgtactgcacacacacagggattgagtcctggctgttatgatacctatggtgcagacatagactgccagtggattgatattacagatgtaaaacctggaaactatatcctaaaggtcagtgtaaaccccagctacctataaaaatgccttgaataaatgatttcaagtgtc

SEQ ID NO: 91167 - DNA, 3811 bp, Homo sapiens
atcgcattacgtgaacaaatagctgaggggcggccgggccagaacggcttgtgtaactttgcaaacgtgccagaaagtttaaaatctctcctccttccttcactccagacactgcccgctctccgggactgccgcgccgctccccgttgccttccaggactgagaaaggggaaagggaagggtgccacgtccgagcagccgccttgactggggaagggtctgaatcccacccttggcattgcttggtggagactgagatacccgtgctccgctcgcctccttggttgaagatttctccttccctcacgtgatttgagccccgtttttattttctgtgagccacgtcctcctcgagcggggtcaatctggcaaaaggagtgatgcgcttcgcctggaccgtgctcctgctcgggcctttgcagctctgcgcgctagtgcactgcgcccctcccgccgccggccaacagcagcccccgcgcgagccgccggcggctccgggcgcctggcgccagcagatccaatgggagaacaacgggcaggtgttcagcttgctgagcctgggctcacagtaccagcctcagcgccgccgggacccgggcgccgccgacaaccgcaccgccgcggcgcgaacgcggacggccggctcatctggagtcaccgctggccgccccaggcccaccgcccgtcactggttccaagctggctactcgacatctagagcccgcgaagctggcgcctcgcgcgcggagaaccagacagcgccgggagaagttcctgcgctcagtaacctgcggccgcccagccgcgtggacggcatggtgggcgacgacccttacaacccctacaagtactctgacgacaacccttattacaactactacgatacttatgaaaggcccagacctgggggcaggtaccggcccggatacggcactggctacttccagtacggtctcccagacctggtggccgacccctactacatccaggcgtccacgtacgtgcagaagatgtccatgtacaacctgagatgcgcggcggaggaaaactgtctggccagtacagcatacagggcagatgtcagagattatgatcacagggtgctgctcagatttccccaaagagtgaaaaaccaagggacatcagatttcttacccagccgaccaagatattcctgggaatggcacagttgtcatcaacattaccacagtatggatgagtttagccactatgacctgcttgatgccaacacccagaggagagtggctgaaggccacaaagcaagtttctgtcttgaagacacatcctgtgactatggctaccacaggcgatttgcatgtactgcacacacacagggattgagtcctggctgttatgatacctatggtgcagacatagactgccagtggattgatattacagatgtaaaacctggaaactatatcctaaaggtcagtgtaaaccccagctacctggttcctgaatctgactataccaacaatgttgtgcgctgtgacattcgctacacaggacatcatgcgtatgcctcaggctgcacaatttcaccgtattagaaggcaaagcaaaactcccaatggataaatcagtgcctggtgttctgaagtgggaaaaaatagactaacttcagtaggatttatgtattttgaaaaagagaacagaaaacaacaaaagaatttttgtttggactgttttcaataacaaagcacataactggattttgaacgcttaagtcatcattacttgggaaatttttaatgtttattatttacatcactttgtgaattaacacagtgtttcaattctgtaattacatatttgactctttcaaagaaatccaaatttctcatgttccttttgaaattgtagtgcaaaatggtcagtattatctaaatgaatgagccaaaatgactttgaactgaaacttttctaaagtgctggaactttagtgaaacataataataatgggtttatatatgtcatagcatagatgaatttagaaacaatgctcctactgtttaaatacatatggacacatctggtgctgagaaagaaacaaacacattaccattggtgtcaagaaatattactatatagcagagaaatggcaatacatgtactcagatagttacatccctatataaaaagtatgtttacatttaaaaaattagtagataacttcctttctttcaagtgcacaatttcattttgacttgagtcaacttttgttttggaacaaattaagtaagggagctgcccaatcctgtctgatatttcttgaggctgccctctatcattttatctttcccatgggcagagatgttgtaagtgggattcttaatatcaccattcttgggactggtatacataaggcagccgtgaaactggaaagtcattttgatgactgatgtgatacatccagaggtaaaatgcatttaaacatattaaagtatttgccaaagatacaattttcttgctgacataaaaatcacacaaacaagtcccccccaaaccacaactgtctctcaaatagcttaaaaaaattgaaaaacattttaggatttttcaagttttctagattttaaaaagatgttcagctattagaggaatgttaaaaattttatattatctagaacacaggaacatcatcctgggttattcaggaatcagtcacacatgtgtgtgtgtctgagatatagtctaaattagcaaagcacatagtattacatacttgaggggttggtgaacaaaggaaaaatatactttctgcaaaaccaaggactgtgctgcgtaatgagacagctgtgatttcatttgaaactgtgaaaccatgtgccataatagaattttgagaattttgcttttacctaaattcaagaaaatgaaattacacttttaagttagtggtgcttaagcataatttttcctatattaaccagtattaaaatctcaagtaagattttccagtgccagaacatgttaggtggaattttaaaagtgcctcggcatcctgtattacatgtcatagaattgtaaagtcaacatcaattactagtaatcattctgcactcactgggtgcatagcatggttagaggggctagagatggacagtcatcaactggcggatatagcggtacatatgatccttagccaccagggcacaagcttaccagtagacaatacagacagagcttttgttgagctgtaactgagctatggaatagcttctttgatgtacctctttgccttaaattgctttttagttctaagattgtagaatgatcctttcaaattgtaatcttttctaacagagatattttaatatacttgctttcttaaaaaacaaaaaaactactgtcagtattaatactgagccagactggcatctacagatttcagatctatcattttattgattcttaagcttgtattaaaaactaggcaatatcatcatggatacataggagaagacacatttacaatcattcattgggccttttatctgtctatccatccatcatcatttgaaggcctaatatatgccaagtactcacatggtatgcattgagacataaaaaagactgtctataacctcaataagtattaaaaatcccattattacccataaggttcatcttatttcatttttagggaataaaattacatgtctatgaaatttcaattttaagcactattgtttttcatgaccataatttatttttaaaaataaattaaaggttaattatatgcatgtatgtatttctaataattaaaaatgtgttcaatccctga

SEQ ID NO: 91168 - DNA, 470 bp, Homo sapiens
taatgcttattatgtttttactgttaagatctgtggatttccataggtgttattcattcacttattcaccaaatattcattgagctctgactactccaagacggttctaggagctttggattcagcaatgaacaaaaagaaacaaaatgccttagactcttggaactgatagtctagttgggaaaggaggattgtcactactatataatggatgttttatttgtagttttgtctttagttaatattccatgaatataataatttttcttttttcaaaatcacagtacagcatacagggcagatgtcagagattatgatcacagggtgctgctcagatttccccaaagagtgaaaaaccaagggacatcagatttcttacccagccgaccaagatattcctgggaatggcacagttgtcatcagtaagtaaatgggcctcctgggtacttttgggttgcttttcatttctc

SEQ ID NO: 91169 - DNA, 3715 bp, Homo sapiens
  misc_feature (3636)..(3638): n is a, c, g, or t
  misc_feature (3643)..(3643): n is a, c, g, or t
  misc_feature (3645)..(3645): n is a, c, g, or t
  misc_feature (3650)..(3651): n is a, c, g, or t
  misc_feature (3661)..(3663): n is a, c, g, or t
  misc_feature (3667)..(3667): n is a, c, g, or t
  misc_feature (3670)..(3670): n is a, c, g, or t
  misc_feature (3682)..(3682): n is a, c, g, or t
atcgcattacgtgaacaaatagctgaggggcggccgggccagaacggcttgtgtaactttgcaaacgtgccagaaagtttaaaatctctcctccttccttcactccagacactgcccgctctccgggactgccgcgccgctccccgttgccttccaggactgagaaaggggaaagggaagggtgccacgtccgagcagccgccttgactggggaagggtctgaatcccacccttggcattgcttggtggagactgagatacccgtgctccgctcgcctccttggttgaagatttctccttccctcacgtgatttgagccccgtttttattttctgtgagccacgtcctcctcgagcggggtcaatctggcaaaaggagtgatgcgcttcgcctggaccgtgctcctgctcgggcctttgcagctctgcgcgctagtgcactgcgcccctcccgccgccggccaacagcagcccccgcgcgagccgccggcggctccgggcgcctggcgccagcagatccaatgggagaacaacgggcaggtgttcagcttgctgagcctgggctcacagtaccagcctcagcgccgccgggacccgggcgccgccgtccctggtgcagccaacgcctccgcccagcagccccgcactccgatcctgctgatccgcgacaaccgcaccgccgcggcgcgaacgcggacggccggctcatctggagtcaccgctggccgccccaggcccaccgcccgtcactggttccaagctggctactcgacatctagagcccgcgaagctggcgcctcgcgcgcggagaaccagacagcgccgggagaagttcctgcgctcagtaacctgcggccgcccagccgcgtggacggcatggtgggcgacgacccttacaacccctacaagtactctgacgacaacccttattacaactactacgatacttatgaaaggcccagacctgggggcaggtaccggcccggatacggcactggctacttccagtacggtctcccagacctggtggccgacccctactacatccaggcgtccacgtacgtgcagaagatgtccatgtacaacctgagatgcgcggcggaggaaaactgtctggccagtacagcatacagggcagatgtcagagattatgatcacagggtgctgctcagatttccccaaagagtgaaaaaccaagggacatcagatttcttacccagccgaccaagatattcctgggaatggcacagttgtcatcaacattaccacagtatggatgagtttagccactatgacctgcttgatgccaacacccagaggagagtggctgaaggccacaaagcaagtttctgtcttgaagacacatcctgtgactatggctaccacaggcgatttgcatgtactgcacacacacagggattgagtcctggctgttatgatacctatggtgcagacatagactgccagtggattgatattacagatgtaaaacctggaaactatatcctaaaggtcagtgtaaaccccagctacctggttcctgaatctgactataccaacaatgttgtgcgctgtgacattcgctacacaggacatcatgcgtatgcctcaggctgcacaatttcaccgtattagaaggcaaagcaaaactcccaatggataaatcagtgcctggtgttctgaagtgggaaaaaatagactaacttcagtaggatttatgtattttgaaaaagagaacagaaaacaacaaaagaatttttgtttggactgttttcaataacaaagcacataactggattttgaacgcttaagtcatcattacttgggaaatttttaatgtttattatttacatcactttgtgaattaacacagtgtttcaattctgtaattacatatttgactctttcaaagaaatccaaatttctcatgttccttttgaaattgtagtgcaaaatggtcagtattatctaaatgaatgagccaaaatgactttgaactgaaacttttctaaagtgctggaactttagtgaaacataataataatgggtttatatatgtcatagcatagatgaatttagaaacaatgctcctactgtttaaatacatatggacacatctggtgctgagaaagaaacaaacacattaccattggtgtcaagaaatattactatatagcagagaaatggcaatacatgtactcagatagttacatccctatataaaaagtatgtttacatttaaaaaattagtagataacttcctttctttcaagtgcacaatttcattttgacttgagtcaacttttgttttggaacaaattaagtaagggagctgcccaatcctgtctgatatttcttgaggctgccctctatcattttatctttcccatgggcagagatgttgtaagtgggattcttaatatcaccattcttgggactggtatacataaggcagccgtgaaactggaaagtcattttgatgactgatgtgatacatccagaggtaaaatgcatttaaacatattaaagtatttgccaaagatacaattttcttgctgacataaaaatcacacaaacaagtcccccccaaaccacaactgtctctcaaatagcttaaaaaaattgaaaaacattttaggatttttcaagttttctagattttaaaaagatgttcagctattagaggaatgttaaaaattttatattatctagaacacaggaacatcatcctgggttattcaggaatcagtcacacatgtgtgtgtgtctgagatatagtctaaattagcaaagcacatagtattacatacttgaggggttggtgaacaaaggaaaaatatactttctgcaaaaccaaggactgtgctgcgtaatgagacagctgtgatttcatttgaaactgtgaaaccatgtgccataatagaattttgagaattttgcttttacctaaattcaagaaaatgaaattacacttttaagttagtggtgcttaagcataatttttcctatattaaccagtattaaaatctcaagtaagattttccagtgccagaacatgttaggtggaattttaaaagtgcctcggcatcctgtattacatgtcatagaattgtaaagtcaacatcaattactagtaatcattctgcactcactgggtgcatagcatggttagaggggctagagatggacagtcatcaactggcggatatagcggtacatatgatccttagccaccagggcacaagcttaccagtagacaatacagacagagcttttgttgagctgtaactgagctatggaatagcttctttgatgtacctctttgccttaaattgctttttagttctaagattgtagaatgatcctttcaaattgtaatcttttctaacagagatattttaatatacttgctttcttaaaaaacaaaaaaactactgtcagtattaatactgagccagactggcatctacagatttcagatctatcattttattgattcttaagcttgtattaaaaactaggcaatatcatcatggatacataggagaagacacatttacaatcattcattgggccttttatctgtctatccatccatcatcatttgaaggcctaatatatgccaagtactccggtnnnttggntnaaagnngtgttcccannntaanccntttcccaggggntttttggaaaaagtgttaaagcggcgccattaa

SEQ ID NO: 91170 - DNA, 3818 bp, Homo sapiens
atcgcattacgtgaacaaatagctgaggggcggccgggccagaacggcttgtgtaactttgcaaacgtgccagaaagtttaaaatctctcctccttccttcactccagacactgcccgctctccgggactgccgcgccgctccccgttgccttccaggactgagaaaggggaaagggaagggtgccacgtccgagcagccgccttgactggggaagggtctgaatcccacccttggcattgcttggtggagactgagatacccgtgctccgctcgcctccttggttgaagatttctccttccctcacgtgatttgagccccgtttttattttctgtgagccacgtcctcctcgagcggggtcaatctggcaaaaggagtgatgcgcttcgcctggaccgtgctcctgctcgggcctttgcagctctgcgcgctagtgcactgcgcccctcccgccgccggccaacagcagcccccgcgcgagccgccggcggctccgggcgcctggcgccagcagatccaatgggagaacaacgggcaggtgttcagcttgctgagcctgggctcacagtaccagcctcagcgccgccgggacccgggcgccgccgtccctggtgcagccaacgcctccgcccagcagccccgcactccgatcctgctgatccgcgacaaccgcaccgccgcggcgcgaacgcggacggccggctcatctggagtcaccgctggccgccccaggcccaccgcccgtcactggttccaagctggctactcgacatctagagcccgcgaagctggcgcctcgcgcgcggagaaccagacagcgccgggagaagttcctgcgctcagtaacctgcggccgcccagccgcgtggacggcatggtgggcgacgacccttacaacccctacaagtactctgacgacaacccttattacaactactacgatacttatgaaaggcccagacctgggggcaggtaccggcccggatacggcactggctacttccagtacggtctcccagacctggtggccgacccctactacatccaggcgtccacgtacgtgcagaagatgtccatgtacaacctgagatgcgcggcggaggaaaactgtctggccagtacagcatacagggcagatgtcagagattatgatcacagggtgctgctcagatttccccaaagagtgaaaaaccaagggacatcagatttcttacccagccgaccaagatattcctgggaatggcacagttgtcatcaacattaccacagtatggatgagtttagccactatgacctgcttgatgccaacacccagaggagagtggctgaaggccacaaagcaagtttctgtcttgaagacacatcctgtgactatggctaccacaggcgatttgcatgtactgcacacacacagggattgagtcctggctgttatgatacctatggtgcagacatagactgccagtggattgatattacagatgtatgaatctgactataccaacaatgttgtgcgctgtgacattcgctacacaggacatcatgcgtatgcctcaggctgcacaatttcaccgtattagaaggcaaagcaaaactcccaatggataaatcagtgcctggtgttctgaagtgggaaaaaatagactaacttcagtaggatttatgtattttgaaaaagagaacagaaaacaacaaaagaatttttgtttggactgttttcaataacaaagcacataactggattttgaacgcttaagtcatcattacttgggaaatttttaatgtttattatttacatcactttgtgaattaacacagtgtttcaattctgtaattacatatttgactctttcaaagaaatccaaatttctcatgttccttttgaaattgtagtgcaaaatggtcagtattatctaaatgaatgagccaaaatgactttgaactgaaacttttctaaagtgctggaactttagtgaaacataataataatgggtttatatatgtcatagcatagatgaatttagaaacaatgctcctactgtttaaatacatatggacacatctggtgctgagaaagaaacaaacacattaccattggtgtcaagaaatattactatatagcagagaaatggcaatacatgtactcagatagttacatccctatataaaaagtatgtttacatttaaaaaattagtagataacttcctttctttcaagtgcacaatttcattttgacttgagtcaacttttgttttggaacaaattaagtaagggagctgcccaatcctgtctgatatttcttgaggctgccctctatcattttatctttcccatgggcagagatgttgtaagtgggattcttaatatcaccattcttgggactggtatacataaggcagccgtgaaactggaaagtcattttgatgactgatgtgatacatccagaggtaaaatgcatttaaacatattaaagtatttgccaaagatacaattttcttgctgacataaaaatcacacaaacaagtcccccccaaaccacaactgtctctcaaatagcttaaaaaaattgaaaaacattttaggatttttcaagttttctagattttaaaaagatgttcagctattagaggaatgttaaaaattttatattatctagaacacaggaacatcatcctgggttattcaggaatcagtcacacatgtgtgtgtgtctgagatatagtctaaattagcaaagcacatagtattacatacttgaggggttggtgaacaaaggaaaaatatactttctgcaaaaccaaggactgtgctgcgtaatgagacagctgtgatttcatttgaaactgtgaaaccatgtgccataatagaattttgagaattttgcttttacctaaattcaagaaaatgaaattacacttttaagttagtggtgcttaagcataatttttcctatattaaccagtattaaaatctcaagtaagattttccagtgccagaacatgttaggtggaattttaaaagtgcctcggcatcctgtattacatgtcatagaattgtaaagtcaacatcaattactagtaatcattctgcactcactgggtgcatagcatggttagaggggctagagatggacagtcatcaactggcggatatagcggtacatatgatccttagccaccagggcacaagcttaccagtagacaatacagacagagcttttgttgagctgtaactgagctatggaatagcttctttgatgtacctctttgccttaaattgctttttagttctaagattgtagaatgatcctttcaaattgtaatcttttctaacagagatattttaatatacttgctttcttaaaaaacaaaaaaactactgtcagtattaatactgagccagactggcatctacagatttcagatctatcattttattgattcttaagcttgtattaaaaactaggcaatatcatcatggatacataggagaagacacatttacaatcattcattgggccttttatctgtctatccatccatcatcatttgaaggcctaatatatgccaagtactcacatggtatgcattgagacataaaaaagactgtctataacctcaataagtattaaaaatcccattattacccataaggttcatcttatttcatttttagggaataaaattacatgtctatgaaatttcaattttaagcactattgtttttcatgaccataatttatttttaaaaataaattaaaggttaattatatgcatgtatgtatttctaataattaaaaatgtgttcaatccctga

SEQ ID NO: 91171 - DNA, 2983 bp, Homo sapiens
tccgctccactctgcagtcccggtgggcgaagggtgaggagtaagggacctagaggggtagggagttggagcggggggcgccgggttgtttcactgctgcgcccgtcgcctgctgacgtttaggtctcccagacctggtggccgacccctactacatccaggcgtccacgtacgtgcagaagatgtccatgtacaacctgagatgcgcggcggaggaaaactgtctggccagtacagcatacagggcagatgtcagagattatgatcacagggtgctgctcagatttccccaaagagtgaaaaaccaagggacatcagatttcttacccagccgaccaagatattcctgggaatggcacagttgtcatcaacattaccacagtatggatgagtttagccactatgacctgcttgatgccaacacccagaggagagtggctgaaggccacaaagcaagtttctgtcttgaagacacatcctgtgactatggctaccacaggcgatttgcatgtactgcacacacacagggattgagtcctggctgttatgatacctatggtgcagacatagactgccagtggattgatattacagatgtaaaacctggaaactatatcctaaaggtcagtgtaaaccccagctacctggttcctgaatctgactataccaacaatgttgtgcgctgtgacattcgctacacaggacatcatgcgtatgcctcaggctgcacaatttcaccgtattagaaggcaaagcaaaactcccaatggataaatcagtgcctggtgttctgaagtgggaaaaaatagactaacttcagtaggatttatgtattttgaaaaagagaacagaaaacaacaaaagaatttttgtttggactgttttcaataacaaagcacataactggattttgaacgcttaagtcatcattacttgggaaatttttaatgtttattatttacatcactttgtgaattaacacagtgtttcaattctgtaattacatatttgactctttcaaagaaatccaaatttctcatgttccttttgaaattgtagtgcaaaatggtcagtattatctaaatgaatgagccaaaatgactttgaactgaaacttttctaaagtgctggaactttagtgaaacataataataatgggtttatatatgtcatagcatagatgaatttagaaacaatgctcctactgtttaaatacatatggacacatctggtgctgagaaagaaacaaacacattaccattggtgtcaagaaatattactatatagcagagaaatggcaatacatgtactcagatagttacatccctatataaaaagtatgtttacatttaaaaaattagtagataacttcctttctttcaagtgcacaatttcattttgacttgagtcaacttttgttttggaacaaattaagtaagggagctgcccaatcctgtctgatatttcttgaggctgccctctatcattttatctttcccatgggcagagatgttgtaagtgggattcttaatatcaccattcttgggactggtatacataaggcagccgtgaaactggaaagtcattttgatgactgatgtgatacatccagaggtaaaatgcatttaaacatattaaagtatttgccaaagatacaattttcttgctgacataaaaatcacacaaacaagtcccccccaaaccacaactgtctctcaaatagcttaaaaaaattgaaaaacattttaggatttttcaagttttctagattttaaaaagatgttcagctattagaggaatgttaaaaattttatattatctagaacacaggaacatcatcctgggttattcaggaatcagtcacacatgtgtgtgtgtctgagatatagtctaaattagcaaagcacatagtattacatacttgaggggttggtgaacaaaggaaaaatatactttctgcaaaaccaaggactgtgctgcgtaatgagacagctgtgatttcatttgaaactgtgaaaccatgtgccataatagaattttgagaattttgcttttacctaaattcaagaaaatgaaattacacttttaagttagtggtgcttaagcataatttttcctatattaaccagtattaaaatctcaagtaagattttccagtgccagaacatgttaggtggaattttaaaagtgcctcggcatcctgtattacatgtcatagaattgtaaagtcaacatcaattactagtaatcattctgcactcactgggtgcatagcatggttagaggggctagagatggacagtcatcaactggcggatatagcggtacatatgatccttagccaccagggcacaagcttaccagtagacaatacagacagagcttttgttgagctgtaactgagctatggaatagcttctttgatgtacctctttgccttaaattgctttttagttctaagattgtagaatgatcctttcaaattgtaatcttttctaacagagatattttaatatacttgctttcttaaaaaacaaaaaaactactgtcagtattaatactgagccagactggcatctacagatttcagatctatcattttattgattcttaagcttgtattaaaaactaggcaatatcatcatggatacataggagaagacacatttacaatcattcattgggccttttatctgtctatccatccatcatcatttgaaggcctaatatatgccaagtactcacatggtatgcattgagacataaaaaagactgtctataacctcaataagtattaaaaatcccattattacccataaggttcatcttatttcatttttagggaataaaattacatgtctatgaaatttcaattttaagcactattgtttttcatgaccataatttatttttaaaaataaattaaaggttaattatatgcatgtatgtatttctaataattaaaaatgtgttcaatccctga

SEQ ID NO: 91172 - DNA, 425 bp, Homo sapiens
atatctgcatgatacctgtctcatcatacctttggcgagtctcgtggcttcactaaataccctccaggaagacttggatctaagttcctttgcccagtgaattctttatccctgctcactgcccggcttcttgcagctactgagatttatccacactgctgtccatacaccaggaccccatccctctacctgcaagtctcaaagcaccataacacattgctgttatgtgtaacaaactcttactgaaggttaggggatgatgatgaggggctgcatcaataaataaataaataaataaataaataaaaaagatgggaaacaactaaatcaaataacagaaggcactggccaaaggccctcagctgtctctaccacagtgacggtcttgctggtgacattcccaactttctcacaaagccatcatt

SEQ ID NO: 91173 - DNA, 913 bp, Homo sapiens
agaatggtcaggctctactgaaaatgtgaagatgatcagcaggctgcttcttgtcctttgcgtctactttcaaaactgcccactcagagagaactttcctgtcctgctgacccacaggggtcccagatgttgtccttaccaagccctgttttattttcagctgggctcttaacaccacttaatgcctttttgtgtattgatttgcttagtgtatagcctcattagatcttaagctttttgtgtttgggtttgttttgttttgttttgttttgttttgttttgtttttgagaccctgtctctaaaaaagaaaataaataattaaaaacatatatgataggcgtgagccaccgcgcccggccagtactgctctttacttcattttatagaggaaactggaaacgagaaagttatataacctgcccaaagtcaggcagctagaaaaccacaggcagggtttatacccaaagggtctggcttcagaatccatgctcttaaccaccagctccaccaccctatgtcctttgatgcccagatgtcccagcttttcctcctttgggaaggcttttctgaatacctctccccactgtggtccctccctgactatatacatcctctccatatgtaccatataattttttgattttccactatgtccagctgtaacttcatggaagctgtctggagcttcatgtgagaaggaatggtcacttgcccttggcatgaaaagcccccagcttgccctggtcgctctaatatagctgttgcagagccagagtaaatatctgtggaacaaatcattggaaacagatgacaccaggatttgggggctgttagtcaatggcctgttatcttctttgaaaatagccttgaacaaaaacaattccaactgtaaaatcatcccacttgtctact

SEQ ID NO: 91174 - DNA, 512 bp, Homo sapiens
  misc_feature (39)..(39): n is a, c, g, or t
  misc_feature (506)..(506): n is a, c, g, or t
  misc_feature (509)..(509): n is a, c, g, or t
  misc_feature (511)..(511): n is a, c, g, or t
cacataggaatttggcctcgggcaagattcggcacaggnttttttctggggcaggaagtaagtgcccatcaggacaaaaggccttatctaccactttcttgtcatgctttcttttcaatcttttccttttgatttctttccccctgttctcttttgacactgaacatttttcctttttttattatcatgatccctttatgatatcaaactgaacaagataaatattataatcactaaatctcccatacctaaaaggacatctgatacagatgagggattcttttatcatgtagtgctttgaactatctcaaatataggcacccagaccaaacagaatagaagcccacaacaaaacagaaatgtatgcaaagaagctcacatgtggttgctggaatatttacagcagctaacagattaacctgtcatacagcaacttgacaactccagggttggcaaatgctgatatgcaaatatgctttaaatgtatctacaaattctaaccaaanaanana

SEQ ID NO: 91175 - DNA, 896 bp, Homo sapiens
ggctctcaaagagtggtatacagaatccgatatggtgcttgttaaaatgcaggttcctaggccctgactatagagattatagagaagctgcttcatgagggctgggcacagtaaaatacattttgacaagttccccagttaatcctaatgctgcggtcccagcatctgggcatagggagctcacttagtggcaacagggtggagtggctaaaagccagagttttgaggcatctagccagtttgtaagtatttaatgagtaccatcaatttgccaggtacctggattcaagttctatctgtattattaaataactgtgtaactttgaactagagtgactgaacctctctcagcttcagttatctataaaataaatcagcctaataatagtatcctcctgaaatagacacaaagcattagcatagtacctggcacacagtaagcaccacatacatgttatcgctacccattttaattattattagctgtcacttttgagttctaacacaaaaaataatttgggccaggaaaagaagatctaccaagcctgaggccaacaggaattctcgatcatttaaaaatcttggccaggtgtagtggcttatgcctgtaatcacagcactctggctgaggccagagtatcacttgagcccaagagtttgagaccagactgggcaacatggcgagaccctatctctataaaattttttgttaaattagccaggtgtgctggtacacacctgtagtctcagctactcaggaggctgaggcaggaggatcgcttgagcccaggaggtcgagctgcagtgagctacatttgtaccactgtgctccaacttgggcaacagagcaagatgctatctcagagaggagagtcagagaaagagagacagaaagg

SEQ ID NO: 91176 - DNA, 848 bp, Homo sapiens
gcggccgcctcctcccactctgcgttctcgcgctcactgtgccctgcccgggctcgcaccttgcccgtgcccttcactcgctcttccgcgtgatttccccgccgtctttctctaccaactgggaatgctaaaacgggactgatggacgtgtccgaactctgcatcccggaccccctcggctaccacaaccagctgctgaacaggatgtcctcggacgacaggcacctgggctccagctgcggctccttcatcaagactgagccgtccagcccgtcctcgggcatcgatgccctcagccaccacagccccagtggctcgtccgacgccagcggcggctttggcctggccctgggcacccacgccaacggtctggactcgccacccatgtttgcaggcgccgggctgggaggcaccccatgccgcaagagctacgaggactgtgccagcggcatcatggaggactcggccatcaagtgcgagtacatgctcaacgccatccccaagcgcctgtgcctcgtgtgcggggacattgcctctggctaccacttacggcgtggcctcctgcgaggcttgcaaggccttcttcaagaggactatccaagggaacattgagtacagctgcccggccaccaacgagtgcgagatcaccaaacggaggcgcaagtcctgccaggcctgccgcttcatgaaatgcctcaaagtggggatgctgaaggaaggtgtgcgccttgatcgagtgcgtggaggccgtcagaaatacaagcgacggctggactcagagagcagcccatacctgagcttacaaatttctccacctgctaaaaagccatgtgagtgtcagggcagtc

SEQ ID NO: 91177 - DNA, 576 bp, Homo sapiens
gcggccgcctcctcccactctgcgttctcgcgctcactgtgccctgcccgggctcgcaccttgcccgtgcccttcactcgctcttccgcgtgatttccccgccgtctttctctaccaactgggaatgctaaaacgggactgatggacgtgtccgaactctgcatcccggaccccctcggctaccacaaccagtaggtgccctgcttctcggtctgtctgtccttctgcccgtctggcagtctctgtcctggggatcgcagttccttttctgcacattcttgtgtaaaagtggaagggacttcgggggggcacttgggggacgaaggaggggaaaagccgcacacttctgggtttctttctagggcataaaccctcctctaactttttcccgcacccccttttacaaatccacactttcaggcaagagtggcgctttctcatgcactttctccctttctctctcctctctgatcttgctccggggtgagaaaatatttgagtttttgtggaatggagcaagaagggaggcagaagcccagaacaggtgcagggatgtggttgcaaggatgtcctgtc

SEQ ID NO: 91178 - DNA, 3033 bp, Homo sapiens
  misc_feature (1090)..(1090): n is a, c, g, or t
gcggccgcctcctcccactctgcgttctcgcgctcactgtgccctgcccgggctcgcaccttgcccgtgcccttcactcgctcttccgcgtgatttccccgccgtctttctctaccaactgggaatgctaaaacgggactgatggacgtgtccgaactctgcatcccggaccccctcggctaccacaaccagctgctgaacaggatgtcctcggacgacaggcacctgggctccagctgcggctccttcatcaagactgagccgtccagcccgtcctcgggcatcgatgccctcagccaccacagccccagtggctcgtccgacgccagcggcggctttggcctggccctgggcacccacgccaacggtctggactcgccacccatgtttgcaggcgccgggctgggaggcaccccatgccgcaagagctacgaggactgtgccagcggcatcatggaggactcggccatcaagtgcgagtacatgctcaacgccatccccaagcgcctgtgcctcgtgtgcggggacattgcctctggctaccacttacggcgtggcctcctgcgaggcttgcaaggccttcttcaagaggactatccaagggaacattgagtacagctgcccggccaccaacgagtgcgagatcaccaaacggaggcgcaagtcctgccaggcctgccgcttcatgaaatgcctcaaagtggggatgctgaaggaaggtgtgcgccttgatcgagtgcgtggaggccgtcagaaatacaagcgacggctggactcagagagcagcccatacctgagcttacaaatttctccacctgctaaaaagccattgaccaagattgtctcatacctactggtggctgagccggacaagctctatgccatgcctccccctggtatgcctgagggggacatcaaggccctgaccactctctgtgacctggcagaccgagagcttgtggtcatcattggctgggccaagcacatcccaggcttctcaagcctctccctgggggaccagatgagcctgctgcagagtgcctggatggaaatcctcatcctgggcatcgtgtaccgctcgctgccctangacgacaagctggtgtacgctgaggactacatcatggatgaggagcactcccgcctcgcggggctgctggagctctaccgggccatcctgcagctggtacgcaggtacaagaagctcaaggtggagaaggaggagtttgtgacgctcaaggccctggccctcgccaactccgattccatgtacatcgaggatctagaggctgtccagaagctgcaggacctgctgcacgaggcactgcaggactacgagctgagccagcgccatgaggagccctggaggacgggcaagctgctgctgacactgccgctgctgcggcagacggccgccaaggccgtgcagcacttctatagcgtcaaactgcagggcaaagtgcccatgcacaaactcttcctggagatgctggaggccaaggcctgggccagggctgactcccttcaggagtggaggccactggagcaagtgccctctcccctccaccgagccaccaagaggcagcatgtgcatttcctaactcccttgccccctcccccatctgtggcctgggtgggcactgctcaggctggataccacctggaggttttccttccgcagagggcaggttggccaagagcagcttagaggatctcccaaggatgaaagaatgtcaagccatgatggaaaatgccccttccaatcagctgccttcacaagcagggatcagagcaactccccggggatccccaatccacgcccttctagtccaacccccctcaatgagagaggcaggcagatctcacccagcactaggacaccaggaggccagggaaagcatctctggctcaccatgtaacatctggcttggagcaagtgggtgttctgcacaccaggcagctgcacctcactggatctagtgttgctgcgagtgacctcacttcagagcccctctagcagagtggggcggaagtcctgatggttggtgtccatgaggtggaagctgcttttatacttaaaactcagatcacaacaggaaatgtgtcagtaacaatggaactccatccaatgggaaagttcctggtactgaaggggtccattggacactcagaaaagaagttcaggggccaacttcttagctggaatcctggccagatgaggaccctctccggggaagggagaggactgacttagtggaaggtggtgaagtgaggagagtttaggggaaccttcccccagtggaacagatctcaagtttaccctaaacctgccatttctggaaaatctgtaaagaggaaacagcctgtctcagctgtactctcatgatacaggtcatttgaaatgaaccaagaaataaaacatgaaaatccaaccatggagaaggtggtatggctgggttttgtttggtccccttgtccttatacgttctaaagtttccagactggctttgtcactttgtgaactcgtcatgtgtgaaaaccaatctttgcatatagggaacttcctcgggccacactttaagaaccaagtaagaggctctcaagactccagcagagtcgggaggccatggcagcgccttagaggagctggaacctgcacccacctgtgtcggtggggggggcctcctttccccatagactctgccctccctctgtgcagatggaagtggcaggggagggtgaccagcttgtgacaagaagactgaagggtccagagtccatgctcacggaacagcaccaaagaaaagcactatgtggaaagattgttttattttctaataatgataatatggctggaatggcttcttaagatgtatatattttttaaaatggcagttccccattgcagcatcacctacttgtatgtctttctgcctctgtatatgttctcccagaaacccccatgtaaatcaaatgccctaggatgcttccatcctggtcccatgtatctggaatctaataaataaggaaagg

SEQ ID NO: 91179 - DNA, 450 bp, Homo sapiens
agaggctctcaagactccagcagagtcgggaggccatggcagcgccttagaggagctggaacctgcacccacctgtgtcggtggggggggcctcctttccccatagactctgccctccctctgtgcagatggaagtggcaggggagggtgaccagcttgtgacaagaagactgaagggtccagagtccatgctcacggaacagcaccaaagaaaagcactatgtggaaagattgttttattttctaataatgataatatggctggaatggcttcttaagatgtatatattttttaaaatggcagttccccattgcagcatcacctacttgtatgtctttctgcctctgtatatgttctcccagaaacccccatgtaaatcaaatgccctaggatgcttccatcctggtcccatgtatctggaatctaataaataaggaaaggaactattg

SEQ ID NO: 91180 - DNA, 481 bp, Homo sapiens
gttggccaagagcagcttagaggatctcccaaggatgaaagaatgtcaagccatgatggaaaatgccccttccaatcagctgccttcacaagcagggatcagagcaactccccggggatccccaatccacgcccttctagtccaacccccctcaatgagagaggcaggcagatctcacccagcactaggacaccaggaggccaggtaactttctgcagcttttccatagaagccctggtcccacctccttggctctaccccaggaacctcccggcctgggcttctgggctgggacgtgctgaggtcatcccagacaggagggagggctggctgaaatccacaaactgcagagcagctctctgatggtgtcccacacagaaaatgttaaggatttcaagagccctcccagaccagtgatgtgtccctccggctccccttgcctgtggggaatcgggtctgagtcacttgatgagtaggcact

SEQ ID NO: 91181 - DNA, 3777 bp, Homo sapiens
  misc_feature (1834)..(1834): n is a, c, g, or t
gaatatgatgaccctaatgcaacaatatctaacatactatccgagcttcggtcatttggaagaactgcagattttcctccttcaaaattaaagtcaggttatggagaacatgtatgctatgttcttgattgcttcgctgaagaagcattgaaatatattggtttcacctggaaaaggccaatatacccagtagaagaattagaagaagaaagcgttgcagaagatgatgcagaattaacattaaataaagtggatgaagaatttgtggaagaagagacagataatgaagaaaactttattgatctcaacgttttaaaggcccagacatatcacttggatatgaacgagactgccaaacaagaagatattttggaatccacaacagatgctgcagaatggagcctagaagtggaacgtgtactaccgcaactgaaagtcacgattaggactgacaataaggattggagaatccatgttgaccaaatgcaccagcacagaagtggaattgaatctgctctaaaggagaccaagggatttttggacaaactccataatgaaattactaggactttggaaaagatcagcagccgagaaaagtacatcaacaatcagccgggagcccatggagcactgtcctcagagatgcgcaggttaggctcactgtctaggccaggcccaccttagtcactgtggactggcaatggaagctcttcctggacacacctgccctagccctcaccctggggtggaagagaaatgagcttggcttgcaactcagaccattccacggaggcatcctccccttcctgggctggtgaataaaagtttcctgaggtcaaggacttccttttccctgccaaaatggtgtccagaactttgaggccagaggtgatccagtgatttgggagctgcaggtcacacaggctgctcagagggctgctgaacaggatgtcctcggacgacaggcacctgggctccagctgcggctccttcatcaagactgagccgtccagcccgtcctcgggcatcgatgccctcagccaccacagccccagtggctcgtccgacgccagcggcggctttggcctggccctgggcacccacgccaacggtctggactcgccacccatgtttgcaggcgccgggctgggaggcaccccatgccgcaagagctacgaggactgtgccagcggcatcatggaggactcggccatcaagtgcgagtacatgctcaacgccatccccaagcgcctgtgcctcgtgtgcggggacattgcctctggctaccacttacggcgtggcctcctgcgaggcttgcaaggccttcttcaagaggactatccaagggaacattgagtacagctgcccggccaccaacgagtgcgagatcaccaaacggaggcgcaagtcctgccaggcctgccgcttcatgaaatgcctcaaagtggggatgctgaaggaaggtgtgcgccttgatcgagtgcgtggaggccgtcagaaatacaagcgacggctggactcagagagcagcccatacctgagcttacaaatttctccacctgctaaaaagccattgaccaagattgtctcatacctactggtggctgagccggacaagctctatgccatgcctccccctggtatgcctgagggggacatcaaggccctgaccactctctgtgacctggcagaccgagagcttgtggtcatcattggctgggccaagcacatcccaggcttctcaagcctctccctgggggaccagatgagcctgctgcagagtgcctggatggaaatcctcatcctgggcatcgtgtaccgctcgctgccctangacgacaagctggtgtacgctgaggactacatcatggatgaggagcactcccgcctcgcggggctgctggagctctaccgggccatcctgcagctggtacgcaggtacaagaagctcaaggtggagaaggaggagtttgtgacgctcaaggccctggccctcgccaactccgattccatgtacatcgaggatctagaggctgtccagaagctgcaggacctgctgcacgaggcactgcaggactacgagctgagccagcgccatgaggagccctggaggacgggcaagctgctgctgacactgccgctgctgcggcagacggccgccaaggccgtgcagcacttctatagcgtcaaactgcagggcaaagtgcccatgcacaaactcttcctggagatgctggaggccaaggcctgggccagggctgactcccttcaggagtggaggccactggagcaagtgccctctcccctccaccgagccaccaagaggcagcatgtgcatttcctaactcccttgccccctcccccatctgtggcctgggtgggcactgctcaggctggataccacctggaggttttccttccgcagagggcaggttggccaagagcagcttagaggatctcccaaggatgaaagaatgtcaagccatgatggaaaatgccccttccaatcagctgccttcacaagcagggatcagagcaactccccggggatccccaatccacgcccttctagtccaacccccctcaatgagagaggcaggcagatctcacccagcactaggacaccaggaggccagggaaagcatctctggctcaccatgtaacatctggcttggagcaagtgggtgttctgcacaccaggcagctgcacctcactggatctagtgttgctgcgagtgacctcacttcagagcccctctagcagagtggggcggaagtcctgatggttggtgtccatgaggtggaagctgcttttatacttaaaactcagatcacaacaggaaatgtgtcagtaacaatggaactccatccaatgggaaagttcctggtactgaaggggtccattggacactcagaaaagaagttcaggggccaacttcttagctggaatcctggccagatgaggaccctctccggggaagggagaggactgacttagtggaaggtggtgaagtgaggagagtttaggggaaccttcccccagtggaacagatctcaagtttaccctaaacctgccatttctggaaaatctgtaaagaggaaacagcctgtctcagctgtactctcatgatacaggtcatttgaaatgaaccaagaaataaaacatgaaaatccaaccatggagaaggtggtatggctgggttttgtttggtccccttgtccttatacgttctaaagtttccagactggctttgtcactttgtgaactcgtcatgtgtgaaaaccaatctttgcatatagggaacttcctcgggccacactttaagaaccaagtaagaggctctcaagactccagcagagtcgggaggccatggcagcgccttagaggagctggaacctgcacccacctgtgtcggtggggggggcctcctttccccatagactctgccctccctctgtgcagatggaagtggcaggggagggtgaccagcttgtgacaagaagactgaagggtccagagtccatgctcacggaacagcaccaaagaaaagcactatgtggaaagattgttttattttctaataatgataatatggctggaatggcttcttaagatgtatatattttttaaaatggcagttccccattgcagcatcacctacttgtatgtctttctgcctctgtatatgttctcccagaaacccccatgtaaatcaaatgccctaggatgcttccatcctggtcccatgtatctggaatctaataaataaggaaagg

SEQ ID NO: 91182 - DNA, 939 bp, Homo sapiens
gcggccgcctcctcccactctgcgttctcgcgctcactgtgccctgcccgggctcgcaccttgcccgtgcccttcactcgctcttccgcgtgatttccccgccgtctttctctaccaactgggaatgctaaaacgggactgatggacgtgtccgaactctgcatcccggaccccctcggctaccacaaccagctgctgaacaggatgtcctcggacgacaggcacctgggctccagctgcggctccttcatcaagactgagccgtccagcccgtcctcgggcatcgatgccctcagccaccacagccccagtggctcgtccgacgccagcggcggctttggcctggccctgggcacccacgccaacggtctggactcgccacccatgtttgcaggcgccgggctgggaggcaccccatgccgcaagagctacgaggactgtgccagcggcatcatggaggactcggccatcaagtgcgagtacatgctcaacgccatccccaagcgcctgtgcctcgtgtgcggggacattgcctctggctaccacttacggcgtggcctcctgcgaggcttgcaaggccttcttcaagaggactatccaagggaacattgagtacagctgcccggccaccaacgagtgcgagatcaccaaacggaggcgcaagtcctgccaggcctgccgcttcatgaaatgcctcaaagtggggatgctgaaggaagagctgtgctgtctaatatggcaaccaccagccacacgtggctcccgagtgctggtccaaacagaggtgtgctgagtgtacaacacatgcctgctttagaggacttaataggaccataaaaggcagtgtaaagtctggtggtgatccttttaaaaatgtgattgcatgcagaaaggctaatcttctggacatgttaaataaaacatattgtgaaattagca

SEQ ID NO: 91183 - DNA, 360 bp, Homo sapiens
cagacttcatccttctctactttcggggttctggtctgcctccaggctccaggtcctgcttgggcccttgcgtactcacctgtagtctgagaagagacagagtccaaggagcacaagctttggagccaagtagacttggacaagtttcttatcctttcccaacttccattttcttttttgctcataaaatgcaggcagaaacacctggggctatttggggaattaatgtatagaaagtatctaaaacatacaagatgcttatactaattattatgtgcttgctgaaagacatttgccaaaatataactgtttagatcacacttcaattctagtcatccagaattgaatcccaattttggg

SEQ ID NO: 91184 - DNA, 345 bp, Homo sapiens
cagtgaggacgggccagcacatagtaggctccgttctgcgatcctacgtctctagcccacttcacctcctttcatggaagtggggtgggctagagacgtagggatgcagaacggagctggtcaaaagtagatgtttctgccacatctgcaaagtgagcaaaagtagtgagcttcccgtcaaaggaggtatgggagcagaggctgaatttgcacttggtggaggagggttacctctactcataaaactgacaattactgcacacttactaggcacctggctcagggctaagacgcctgcctttattatctggtgcctcagcactgagccattgatggcggtgtcag

SEQ ID NO: 91185 - DNA, 243 bp, Homo sapiens
tgtctggcatccaggggtacacaaagtattgattctagctaaagggacttactaaatactgtttgacaggaggcccacaggtgtctatgtgggctgcagtggaactaagaggtctttttgttcagctgttaaaaaattagtgtttgtagcttcagaggggccccagagaacctttcctgacccatttagaggccatctgtgtggctaggatggctttgctgtcacagaagggacagtccacac

SEQ ID NO: 91186 - DNA, 465 bp, Homo sapiens
attgacagccagacatggtaaatgaaaaagaattgcaaagacaatttgtagctctgaatcatattatcataacccaaagaggatttttttttttaattcatgtgatttgatgtgatttgtccataccctgaggtagtttgcccagaccctatctggggctgagctggagggaaattgggcttcagtgtttgtgatgaccagtctatttctggttctcctctcagtgaggtcacaaaagaaagcttgtggtgtgtaccagggtccctcattggtcctgattattaatatttatggacccctcagcctcctagcactgctggcaactctactcagtttctcagcttcccagcctcttatttgccctgagtggaagtaaggtaccaaatgtgacatttacctcttctgtttgtctctggtatcttcactcttaattttgtgctgccttagtagctctctgatgcactt

SEQ ID NO: 91187 - DNA, 354 bp, Homo sapiens
tagctcctgtaacattgcatacaaattatttatattaatagttttaggacttgggtgaaattcttgaactatgaataattttaggaacttatttctataaatcatattgcatcaacaaaaatgcttggtatgtagaaggatgttactgaatgagagacaaataattactgaaataaatgttatttctaacaatttctattcaaaatttaagatatttgtattcaagtggtatggctcaggggagatgaaaatgcaaattagtgaaaaatgatctctcatttttgcatgtttacatactcgacttcgcttctttagtcattaccatgaatggaaaattgtggctgatgctgaaga

SEQ ID NO: 91188 - DNA, 1041 bp, Homo sapiens
gctggaggccagttctacgtcatgatgacgccccaggatgtgcttcagacaggaacacagaggacgatcgccccccggacacacccttactctccaaaaattgatggaaccagaacaccccgagatgagaggagaagagcccagcacaacgaagtggagcggaggcggagggacaagatcaacaactggatcgtccagctttcgaaaatcattccagactgtaacgcagacaacagcaagacgggagcgagtaaaggagggatcctgtccaaggcctgcgattacatccgggagttgcgccagaccaaccagcgcatgcaggagaccttcaaagagggccgagcggctgcagatggacaacgagctcctgaggcagcagatcgaggagctgaagaatgagaacgccctgcttcgagcccagctgcagcagcacaacctggagatggtgggcgagggcacccggcagtgacgcccgccaccaccacgcagccgccgccgcccacgccggcctctgctgcccccttccccagcccttagcacagagagggacacatgcccctcccccagctgcgtttttttatagtagatttttaacaaaaaacggggagaaataatgcatttctgtggatacagtgcccaccgccctcctccacttggaaacggtatcctccctgcccatccgtctgtctgtcgcccttctcccggccctcactaagccccggcacttctagtggtctcacctggaggcaagagggaggggacagaggccctgccacgtcccgctgcctcctgctctctggaggtactgagacagggtgctgatgggaaggaggggagcctttggggggccacccggggcctggacctatgcagggaggccacgtcccaccccacctcttgtttctgggtccctgctcccctttgggggtgtgtgtgtgtgttttaattttctttatggaaaaattgacaaaaaaaaaatagagagagaggtatttaactgcaataaactggccccatgtggcccccgccttgacgcggccg

SEQ ID NO: 91189 - DNA, 994 bp, Homo sapiens
tcatgtgtttgaggtttgaaaatcctttgtcccaagcctttctaaccacagctcagttgctgagcagaagagtaggttaccatcaagtacaaaacatgtagcacggaaacatcactgtggatccagcttttaacttcccagaactctttatcagttgctcccacgttgaaaatttggattgagtggtgctcgtcttccaaaacaaacttgggaaactgagccagagcacgcctctgggagagctcaatgtaggaaaaagggcattgagctttgcagtttgcaaagcttgttccaggaagtgctgagctgcaaagctgtgaagaaatgatacttgaaacagaggatagaaatgtgcctcatttggaataaagcctgtctctaaaactggtattttccttttaaaattgccttgggaaaataggaaattaattttcactttgctccttattttacagactgtagacttttaattctaaagagttgtggagcatgtcttacatttaagggcatgcttaagaccctggcaggggcaagctttcatgactaacttcactgattctttgaagagtagggatgtgttctgatttcagctgtcattagaatggtgaagatgggccagtactttgggaggccaaggtgagtggatcacttgaggacaggagtttgagaacagcctggccaacatggcaaaaccccatctctactaaaaaaacaaaaattagccagattacccataatcccagctactcaggaagttgagttcacttgaactcatgaggcggaggctgcagtgagctgagatcacgccgctgcactccagcctgggcaacaaagcaagactttgcctcaaaaagaagggtgaagatgaagaagggaaatccttggaacatcatctagttgtttcgttgcaggcttttttcctgcagccataggcacgattttttctgttgccaagtatgggagacataggccctgaggatgcccctggacatca

SEQ ID NO: 91190 - DNA, 451 bp, Homo sapiens
gtaaaagagagcacattatcaaaactggctgtacttaacaaataccaacaaaaagtcattacacttctggcaacaaataatgtttgatttaaaaagacaagaatttccccttttgctcttattttttaaatatgctatgtccttaagtgagaaatgcacttcaaaaattttcttattctgaagtctagccagaaagtttgaacttgtgttgcctttggctagactaggtgaaattaaggggcttaagagggcactgttgtgtggccctgtggtagataatagccctccaagcatgaggatgggagatctaccattcaccagtatttccaaagttatattcttaaaaaggctagatttctaatttccgtagaatctaggtatgttcttttcaactcagcatctgataagaaagtttgggcaagtaggtgcgaaaaatttactctagatacca

SEQ ID NO: 91191 - DNA, 389 bp, Homo sapiens
gcaccagcctcagccctgggtatgatctctctgtaataatattgatgacaatgttggtgttagcttccatggctgagcactgagccagcattcattgtctccttactgcaacatgtgggctccatactactagctccctgctactggctccattttaaacatgaagaaatggaggctgagagaggtgaagtgacttgcccaaagtcacatagtcggtaaacggttacaatttaaacccaagtcttttgcccctgtggtctgtgcccataatcagattctgtatacctctgaactcctccaccttccttggggcctggagtcttgggactgacacaggttcaaacctgggttgtttctggtcacatccatccttcagattcctgcagttg

SEQ ID NO: 91192 - DNA, 380 bp, Homo sapiens
gaagattctctgggccagagggaaaggaggatagacagaggaggagaaagagactcaaatgctgagagtgtttctgaccccactctctctagaaccaggcgagggcttgtgcccatgatcttgtgacaacagaacctaagctcttaagtaggctttgagattcaggacaagtgggcttggtgcctcttcctggatgtagcctggggaggtggcaaggcttctggctctcctccactccaggcctgtttggtggcaggaaggcaggaaaggccccagtcctcagattggagaggagattctccgagagattagcatctcctggagaaggatgagcggagacctgggcagtcttggaaaggccttgtggttaaacctggaag

SEQ ID NO: 91193 - DNA, 304 bp, Homo sapiens
taaaattcctcaacaaaacatcaaattttatggtaaataaagcattctttactgcagaagacaatgcagacatcttactgcctgactcatcagtaaatgcgtatcttttatatacatgttgaaacaatagaatttatgtcttagaagacgtctatacagctaaggtatgcaccaaagctaatttgtatgtccatgagttggacaaccaggacaacgggttttaataactacagaaaaagaaagagaagggcaatggtcaccaaaaagcacaatggtgactaatgagttatgactaacagtgttt

SEQ ID NO: 91194 - DNA, 410 bp, Homo sapiens
catcttctctgtcttcactcggtgaggatggactttaggatgcctcacttctcttcctgagattcttgcttccttcttccttaagggccactgatgagcaatcagtgagtttcaggaagaaggcattcaggctgatttcagacagcctaaggtcagtgtgcaagttagtatgtacctgtgtcttattattgaactggtgaatgaatgaatgactaggtcattatgaatttgtagatcagggttttgaagagtttggcaccggatttgaaagccaatgttctcttagtacctaccgctttcttttcctcaccttcctggatttcctgctcttaaggttttttgtttttgtttttctctccaaataaatggtatttattaaataaaaattcattttctcatttatcaaccag

SEQ ID NO: 91195 - DNA, 335 bp, Homo sapiens
cctttggccattgattttattaaatgtgctcttcataaactcttggtcagcagatacggtgcagaaactagatttctgaacttagatttatctgagaattctaagtcactttcaatttaagtcaatgtaatcgaatttctgacttcccatttcacaaatgacaatcttatcgtaaataactgtgtacattttatataagaatatatgttatatggttcatataaataaagcatgatctattatatgtcttgttgcacaaatggcatttcaaatcatcaggaaaaatcatatttaaaaaatgctcaaaaactaccaagaaatactgccagaaaatt

SEQ ID NO: 91196 - DNA, 437 bp, Homo sapiens
atgtgtgtataaatgcatagaaaaaaatctggaaagatataaacagatatttatagtggtctagggcaggggatggaattgtagatatttgctttttgttttatgtatatgtttcccataatgaaatgtattgtttatataattaaaaaatatacgaaactttgcttgggggacaacaaagcacctcatttgttaatttgggaaaatcttttattacaatctctgtaaggagttggttgctctctcttctgtactccctgattacataatgctcttctgagcacttttatttaatagcagaatggttgatatcattatttagttaaggtttcctctattatcgaacatctgagttcccagtacactagtctccccttatctgtgggttttgcttccaaggtttcagttatgatcaaccaagatctgaaaatattaaa

SEQ ID NO: 91197 - DNA, 928 bp, Homo sapiens
taaaagataatgcacatcaataccaagcagaatgcttggtacctatttaagtcttaaatattagaagcagatgctagagatgtactgtcatcagatgtctgctcattgactgagtttgagagtgagacactatccgttaggacaagtgtcaggctcctttaagagccatacttaagtggcatttgagatgacaaatgagaggataaaggtgacatcacttttcatcaaatgtttgagccactgtgatatttttattttcttacaggaatttagttgaaaggtctacattttaagtgcaagatctcttactactgagcattttttaagtacacaagtgattcaactaatgggcagatctctcaaggaaattccagatgtctgatatctagagggaatttcagaaagctctctaatcacattcttcttatctaaataaatggaaaacttcatgtagaaagaattgtagtgatgtaacaaccatgtcctctgctgacctttgatgggaaaagatagcaagctcttgcctgagtatcagagtctggctgtttcctcttgaaaaatctcatgttttggagaactgactgggtgacatgtcctttgtcccctgtgctttgtcatgtgattgcaatcctgagcctcacacagacacagaataattatgaaaggggacactgatatgaaaagatgtatagtacagagtcaagccacatagtacgcctctccacagtcagcacaaccaaaagatcagaataagcatgtgctacactgaacataatattattagtatgtgtattattagtgtatggattgctctaagatgctatattgccctgctttagagtgaaaaaaaaaacactcaactattttttcctttgtttatttaaaaataattaccccaaaaacatctggagaaacgtcatcttctcca

SEQ ID NO: 91198 - DNA, 525 bp, Homo sapiens
tggtacatggatatggcaaaaaccaggagagccatatgggaatgattgaagtttgggcagcgctgcaggtatccaagagagagaggtggctcctcaggagaaaactaagacactaaggaaatcaaagcacatctggaggactgtgaaggaagaagagaaagatttgatatcaggttaggtattcacaccagagaaggatagtaactaaaggaaaatctcaccttgaatgtgtgcttgtttgactgtgtgacattgtgaaaagcaacttagcaaaagttctctttgtctttgcaatgatgactggttaaaaagtgaaaatcccagtcaattaactggctattttgtttacataaaggcaactcatcactttttttttttggggtggccttactttaaggcggacctagaagcccggacagggaagtttaacataaagcttggaccttgagaagcagggtggcatctggtcgtgagcaggtccagggcggtgctcaatcctcagccggctgattttggctctctggt

SEQ ID NO: 91199 - DNA, 262 bp, Homo sapiens
caaatatatatttcttcttatatcatagtatcataccccctcttgtaaatttttcattttagttattgaacttttcaattctggaatttctatttggttctttttttataatttctctctcttcattgatattctctatttggtaagatgttggtctcatactctcctttaactctcttgacatgtttcttttagttttttgaaatagctggcttaaaatctttgtccagtaagtccaacaccttggcttcttcatgaacag

SEQ ID NO: 91200 - DNA, 211 bp, Homo sapiens
tgactatacagaagaaaactatcagagttaggttagagagttgggtttggggtcaggttgtagcatgtgttatattatgggttaaattgtgtcctccccaaaattaatatgttgaagtcttaactccctgtacctcagaatgtgacctcatggggaaataaggtcattgcaatataattaggtaaaataaggtcatactagaagagggtag

SEQ ID NO: 91201 - DNA, 292 bp, Homo sapiens
agaatcttcactgtgaatttactgaaatgtccttggtagttttgtgttccccaagaaatggcttttctctctttgcataatttctcaggtccgcatgctccctattcatattttgtgtgggttccacaaagatgaccaaggataggaaaatccagcttcttcttgtaactattagcagtagctacccatttatggagcgcctactatgttctgggtattatgtaagtgctttacatatctttagtccttacaacgaacttgtgagataattctcatcagtcccatattacag

SEQ ID NO: 91202 - DNA, 335 bp, Homo sapiens
tttgcagttaaaggaaactgaggctcagagagaggttagatacagaacaggtcagtggtggagcctggattcgggactgggtctggacagtggagagtttatggtggtccacccccaacggtctggaatgaggggtgcataatcagggctctgctacagtgaggtgcaggcacagtcaaaggcaatgggagaactggaggctgcacctggcctgaggagctgcccagccttagcttagacagtctggagctgctggggactgagagcgatcagggaacctgagggagaggcctgggtgggcaggaggcgaggggcatctctccagcagcctccca

SEQ ID NO: 91203 - DNA, 362 bp, Homo sapiens
gacggttacatggtctacactgaactgtcctgcataagagccatgtgccacatgtggctactgaacccttgcaatgtgaatagttggaattaaggtgtgttgtaaaggaaaaacatgcattggattttgaaggacctgtacaaaaagaaagaatgtaaaatatctcattaatatttttatactgggccaggcacggtggcgcatgcctgtaatctcaacactttgggaggcggaggtgagcaaatggcttgagctcaggcatttgagaccagcctgggtaacatggtgaaatcccatcttaaaataaaaaataataataatgaaaatatgtatatatttttatactgattatgtgttgaaat

SEQ ID NO: 91204 - DNA, 1028 bp, Homo sapiens
gttcttagacctttttgatcctgacttccatttaggatcccctgggtttaacagaaagaatgaagaagaaagagcatttataaaatataatttgcagaaaagcaaaaggaaaacaaaagatatcactagtctttattttttaattgactggttggggtggaaatcagtttgcaagaggttaagcactactaacaacaaaaaaggcaaacatcattgtcatactcatgctaatactagctggtcagttcttttatttttattcatgtttggtggccattttgtggtacccattcctatgggaagattttgcatccctaccttactgaactccagccatattatttgctttgaccaatgaaatgtgagcataagtgatagatgttgcttgagatctttgtgttgtttgttattacgtcataatctaacctatcctgactgataggcagctaacatttattgaatgtttactaggtggtagtctctgtgagcatcactttaaatgaattatctcacttaggcctcccaagagccaagctagtcaataaccaatagtgtgacaagtgtaaaaattttaattaataagcgtaaactatttacttgtgaactttggcaattatagaaaagagtaaaataagaaaccagaagcaaagcagagtcaaaggtttcaaaatctgatctgggtttttacttaatagaaacaatttcaaataatctctggtttttttaagcttatgccattttcttgctgattagtgatcaacagaattttatccttattggtcaccatttcttttcttttatatgtaggaaatgcagttgtgtttaggatatcctaattacacttactttcatttttccaggcttaacataatcctcacttagggaaatgtgacattctcatgttctattatgtgctgatgaaacaggcacctctgcaatatacccatataactaaccctcaacaaagagaataaatgatcatattgggagagtagtctggtgaaaaatatgggcctccttttgataac

SEQ ID NO: 91205 - DNA, 466 bp, Homo sapiens
ctcagctgccctcttctccttgcctggctccatccatttgtctccaagcctatcatcccattgtgcccagattctccccaatcctcacagccctgcacccctgcctcagcttccccttcatttcagcccattccctctgttcattcagcagaagttggctgagtgcccgctctgtgccaggcgcgttctcagtggtgaacgtcactccccacccttgtaggactgagatcccagcagggaaaacagctgcgaagaacaagaggcaggaagtatggacagagcagtgaggtgggtggccagaaaaggctctctaaggaggtgacacctggcagagaactgaatggagtgagggagagcctgtggttatttaggggaggagctttgcaggcacagagaaaatgtccagaagctgtgggaacgagccctggcttgttccagcaacaagaagaaaggcagcgtggccaag

SEQ ID NO: 91206 - DNA, 808 bp, Homo sapiens
gcaatcctgaaccttcttaacctgaactttttcctcctaaagcaatgaccactttaaaacagacagtgttagcttttgattgctattgtaagaaattacaaatttagtggcttaaaataacacaaatttgttctcttaccattctagagatctgaagttggaatggatctcaatgggctaacatcactgtgttgtcagggctgttatttcaggagactctcggggagaacctgtctccttctccccttttccagcttctccaactgcccacatccatggctcagggcccatttccccatcttcaaaggcagttccatcagattaagtcctcactgtgcccctcatctggttctccctcttccgtctgcctcttcctctataaagatcctgtgattacattggaaccccagggaaatccagaaaatcaccccgtttccggggcagatgatgagcaacctcaactccatctgtagccttcactcccttttccatataacccagtggggggttccagggattcacaccggcatcctctgggattggcgggagtgggtgggggtggcaggtgattattctttgcaaaacacatgccatataatttatgtatatatcatttttataccacaaagatgggggaagaagcagagcaatattggagcagagattttgcatcctgttaaaattaagttggttttaatatgatctaggttgtggtaaattaagatattaattggaatcccctgaaatgactaacaaaataacttttttaaataaaaaatgaaaaagagacaataaaggaagtaaaatg

SEQ ID NO: 91207 - DNA, 183 bp, Homo sapiens
gcctcgggcaagagggcgggctgccacccggggtgcagtggcagcgccaaagggtgttaggaaggggtgtgatgtggtaagtttgtatttgtaaaaacctttcttttaaggatctgcggaagaggggctgttttgtgttaagagtaattcagggtagaaccttgaaagggaaaggggagaata

SEQ ID NO: 91208 - DNA, 1377 bp, Homo sapiens
gaagaagtaaccaactctgacacctgactgtaattattccatttcctctcaacatccattattttcaggctctgagactcaagagggatgtgaaatactgggagatacttagaagggagtcaccacactaataaaatagttgttagacttatgagaaaggtgagagaactcaggttggagtagaatgagaattagaacactcttcaggttcctgatggtttttatgtgaaagacagtgagcagctggttattaccactgaggcaataaagagatactgtgggctttagcagaaacaccagtatatatatttagtttttaaaataaggttttaaaaggaatgttttatttaattgcctacacagaatgaataaagtgatatttatagtaggactctgggtttgtttaggagcacatgcttgcacatgtgtggcttaggaaaaaccactgggaccactagtctaaaatattcataagtaaagatgcaaacattctgaataaagtagaaggcagttgcattgatttttttatttgtttatttgtgttttttgttgttgttttgcaaggatgtgttcttggagatttttataatctagaattcacctatttcaagatttctctccagcccccatagtaataaatctgaagtaggagggatgaggtctccaaacacataaatctacagccattttagcttgggggcatgttatagttacaaagatcttatagccatatcaatagaactttttctgctttttttctgttaccctcctttgctcatttgactttttttaaaatttagaaacattcccagtttgctgctgtttttcatttacttggcattgtctctaataaaacctagagtgtactctcttctaaataaagaggtcctacattgtggaggttgttcattcttcttcctagcattttagctcatctaacccaacctattttacagttatgggttaagggtcacctcaaaactaatgtcacacttcatgaagaattggatgacatagaataaaatataaaaaatgtaaacaatgtgagtgtgcttaacaccactgaactgtacacttaaaaatggtgaaagtgatgaatgttgtatgtattttatcataattaaaaataaatttttaaaaagagaaaaaatacttaaataaataaggagtgcgaacataaccatgactagttatcaccatctgatagtgcttcctttgcatgtaaatcatgcttttgttttggggacattcataaagaatagggattaactgaagtggcactgccatgtaacaatagcataattccagtttgttctacttaccaggcttgccctccatgaaaatatacaattgtagataatcttttttaattggaga

SEQ ID NO: 91209 - DNA, 460 bp, Homo sapiens
agcggccgctcgcgatcctaaattttaaaaaaagtcaaatgagcaaaggagggtcacctcaaaactaatgtcacacttcatgaagaattggatgacatagaataaaatataaaaaatgtaaacaatgtgagtgtgcttaacaccactgaactgtacacttaaaaatggtgaaagtgatgaatgttgtatgtattttatcataattaaaaataaatttttaaaaagagaaaaaatacttaaataaataaggagtgcgaacataaccatgactagttatcaccatctgatagtgcttcctttgcatgtaaatcatgcttttgttttggggacattcataaagaatagggattaactgaagtggcactgccatgtaacaatagcataattccagtttgttctacttaccaggcttgccctccatgaaaatatacaattgtagataatcttttttaattggaga

SEQ ID NO: 91210 - DNA, 719 bp, Homo sapiens
gcacaggcccgatgtctacttgctgccaccagcccgggagcagctgaacctgcgggaagtcggccaccatcacgtgcctggtgacgggcttctctcccgcggacgtcttcgtgcagtggatgcagagggggcagcccttgtccccggagaagtatgtgaccagcgccccaatgcctgagccccaggccccaggccggtacttcgcccacagcatcctgaccgtgtccgaagaggaatggaacacgggggagacctacacctgcgtggtggcccatgaggccctgcccaacagggtcaccgagaggaccgtggacaagtccaccgagggggaggtgagcgccgacgaggagggctttgagaacctgtgggccaccgcctccaccttcatcgtcctcttcctcctgagcctcttctacagtaccaccgtcaccttgttcaaggtgaaatgatcccaacagaagaacatcggagaccagagagaggaactcaaaggggcgcagcctccgggtctggggtcctggcctgcgtggcctgttggcacgtgtttctcttccccgcccggcctccagttgtgtgctctcacacaggcttccttctcgaccggcaggggctggctggcttgcaggccacgaggtgggctctaccccacactgctttgctgtgtatacgcttgttgccctgaaataaatatgcacattttatccatgaaaaaaaaatct

SEQ ID NO: 91211 - DNA, 494 bp, Homo sapiens
ttcctcctgagcctcttctacagtaccaccgtcaccttgttcaaggtagcacggctgtggcacagggaggagggcgcagggcgaatgtggggcccagggagcagcctgggctggacgtctagcccggaggcccccacaccaccccactgggtcatctctgccccggctcccttcccgaccacagggaaagcatttcacactgtctctgttgcctgtaggtgaaatgatcccaacagaagaacatcggagaccagagagaggaactcaaaggggcgcagcctccgggtctggggtcctggcctgcgtggcctgttggcacgtgtttctcttccccgcccggcctccagttgtgtgctctcacacaggcttccttctcgaccggcaggggctggctggcttgcaggccacgaggtgggctctaccccacactgctttgctgtgtatacgcttgttgccctgaaataaatatgcacattttatccatgaaaaaaaaa

SEQ ID NO: 91212 - DNA, 515 bp, Homo sapiens
gcacaggcccgatgtctacttgctgccaccagcccgggagcagctgaacctgcgggaagtcggccaccatcacgtgcctggtgacgggcttctctcccgcggacgtcttcgtgcagtggatgcagagggggcagcccttgtccccggagaagtatgtgaccagcgccccaatgcctgagccccaggccccaggccggtacttcgcccacagcatcctgaccgtgtccgaagaggaatggaacacgggggagacctacacctgcgtggtggcccatgaggccctgcccaacagggtcaccgagaggaccgtggacaagtccaccggtaaacccaccctgtacaacgtgtccctggtcatgtccgacacagctggcacctgctactgaccctgctggcctgcccacaggctcggggcggctggccgctctgtgtgtgcatgcaaactaaccgtgtcaacggggtgagatgttgcatcttataaaattagaaataaaaagatccattcaaaagatact

SEQ ID NO: 91213 - DNA, 203 bp, Homo sapiens
tacttggcattagatctagtattaaccaaactcttcttgaagagtacaggtccttctataagagttattaggaagataatttatttggcacctagataccaggcattaaggtagttcctttaataacatgtcatgtaattaagtctacacagcagccttatagggttgggtactactgttttacagattagcaaagaaggtca

SEQ ID NO: 91214 - DNA, 209 bp, Homo sapiens
tcaaaacctatggaagggagaggaaagaaacaagattgggcagaagaagccaagctgcaatgcaagctgagagacggcctcaaccacagcaagggctattttgaaactaaaattgtccatcagagttgtctcagattaggccataatggctggacctttatacgaccactgcaatcagtcattagatgtgggccatcctgggaggggtg

SEQ ID NO: 91215 - DNA, 360 bp, Homo sapiens
cattgagtgtgcacacttaaaattttactaggttagctgggcatggtagctcgactctagtcccagctactcgggaggatgagacagaaggatctcttgagctcaagagttgaggctgcagtgagctatggttgtgtcactgtactccagcttaggcaatagagcaagacccctatctcttgaaaaaaagcattttacaagggattaccaagttgcattgtttttgaaagctctgcagattctactaaccctgatggtatatgaaattgctcagttcccaacatttttttctgttctggttattatctgtcattaatttttgttaatccagtaagtaaaaataaagtttcattttcaaaa

SEQ ID NO: 91216 - DNA, 307 bp, Homo sapiens
ggcttaggcattttaatttttttaaggttgcctgagtaaatctgaaaataataaattattacagttttgctcaaataaagaacacaaatagaacaaaaaatacataactggctagattacatgaaagcctttttccaaaacagaggtttagaggccagggcaaataggcaggaaaaataaataaagggcatccaaattggaaaagaagaagttaaattagctttcttagcagatgacattatcttacacctagaaaaacctaaagactccctcaaaaaacctgtagaactgataaatgaattcagta

SEQ ID NO: 91217 - DNA, 437 bp, Homo sapiens
ggctggtccccgggtgtggccccacatccatgtcataaatgatgaaacagaaattccatgtcttgcccaaggctgcctggcaacaaacctggggaccaaaacccccaaatgccaaaaccccaggcactgggagccacccaaggctccggacacacctgccaggccacccccaggacagcaggggtgacaggccaagttcccactgccaccgtctggcgtgcgtctcttctgtgctcagcagagaggaaagtggaactgaggctagagagggcgggctggaggagcctggagaggctggctggggagcctggatttccccaccatgctgctccaggactcctgcaaaagcccagccttccctgggatggctttcattcacatgggtgggaggagccgggggagaaatcctgggactcaggggtgcccgggttgccgct

SEQ ID NO: 91218 - DNA, 360 bp, Homo sapiens
aataaataagaatctccaggctgaaatggattcttccccaggatactgaaaactctaccattaatttgaggaaccgcagttgggaaacttcgagaactgataaggtgagagaagctcttacaggggcaaaaagatgataccttttcctcatccaccgcaagggttgtggtcagtactactgttagcaaaagacaggttagcaagaaagaaaatatcacagatttgtttaacaaagttatatatgacgtgggagctttcagaaatgaagactcaaagacccaaggaaaactttctatgcttacatttgatggagaatcatggccatgtagtaatgtgattgcacaaaaagggaatgatcta

SEQ ID NO: 91219 - DNA, 610 bp, Homo sapiens
aaatatgaacatttttgtaaacttcagatgctttcgggcagcgtcctaaactgatgatgacaccttgatacttttaagttgctaaggagtctcaaagattatgaccttgctctgccagctgagagcagtgtggccttaaataatattccttagctgagaaataccactagctctctgcagtacctcaggatggaaggagacaacatgcacaaaagtgcttggtcaactgtcaagcgttacaccaatgaaagatgttcaaatgcacctcaaatttctcaacattttccaaagccaaccaaaacccttagcttctttgtaatagagacgatgaattactaggtaagaaatgagcacccagagatagaagttcaaataatgttttgaagaatgcaaggtcatgccagagaaaacaaactatattcctcaaactaaaatcaatgctacaagatgttgggtcatcactgcttttataagcccattagaaatgtaattagacttgcaaggcactgatactcccctccaaggttgtctaaagaagtaagcaactccagccattagtaagcactattttaaaagtacctgctggtagttgcacagttaccttaaaaaa

SEQ ID NO: 91220 - DNA, 394 bp, Homo sapiens
ccaagaaaaaaatgaagaaacacaaaaataaaagtgaagcaaagaagagaaagatagagttcctgcgtccaggatataaggccaagagacaaaaaagccatagcctgaaagatttagcaatggtggagtaatgtctccctgtgctgatacaagcatgaactttctggaatattctgctagtctgaaattacagtaggttgtctggggtaggggggaggcgtttttttttttttttgagacaaggtctcactctgtcacccaaggtggagtgcagtgacgacatcacagctcactgcagcctcaacctgggttcaagtgatcctctcacctcagcctcccaagtagttgtgcctcctaggcacacaacactatgcccggcaaattttttgtattt

SEQ ID NO: 91221 - DNA, 328 bp, Homo sapiens
ccaccccacggagtgaaactcctgggaccagcggaggcgtcaggacccaagtacagagaagggggaattttatgtagtaaatgaggacccaaagcctctcagccgctatagtggtgacgttccccagtgtggggctccctgagatggaagacgcagccacttaacataaccctcccgtcgccaaccctcctggggaatcaggctcaggatccatgggtgtgagagctgccgagatgaggctcagtctgtcacaagcccgcctttgccaagccccaggtcatcacagagccccagcacccactatctccgggggacacctgccctggcc

SEQ ID NO: 91222 - DNA, 491 bp, Homo sapiens
ctgagctaatttttgtatttttagcagagacaaggttttgccatgttggccaggctggtctcgaactcctggcctcacgtgattctcctgcctcaacctcccaagtagctgggaatgtaggtgtgcaccaccacgcccagctaacttttgtatttttaggtgagatggggttttgccacgttggccaggctggtctcgaactcccgacctcaagtgatctgcttgccctgacctctcaaagtgctgggattataggcgtgagccactgcacccagcttgaggttttttttttttctctttgtgcctatttgttactcagttttcctaaaatgagtacatacttcttttataggtaggaaaattaaaaagatccaaaagggaccaggtacagtgtctcacgcgtgtaagtccaacactttgagagggtgagatggggcatctattgagcccagtagtttgagaccagccttggaaacataggaagaccccat

SEQ ID NO: 91223 - DNA, 410 bp, Homo sapiens
tctccagagagtgccaggaaaagtcctgcccagtcaaaagtcttctcttgcagctgggtgttgagggtgattgcccctctctctccttgtaagattatgtttgacagcagtgaaaaccaacagtttaacagcagtaatctcttggcaggacagattgatatgagccttgtcccaaaacaaagtaatcctttcagggaagtgtatttcaagttgagctcacgttcccaagatgctgagattcttatgtagctgacaccggagctgaggctgagccccagccagggatatccaacgattgccagtaacaccacggaactgagtgaagattcaggggctgagtgtgttcctgagtgcttcaaaccgggggacctggaaaccagaggactcctggggaaaggctgtcaactcca

SEQ ID NO: 91224 - DNA, 256 bp, Homo sapiens
gaactgtcaccctctattccatgatgaaatgctctaaatagactgcatccaaaaataacattagtcttttgggtgtcacatcacactaaaaatgtgcagtcttttcctgtttttagtctcatatctccagatgtctccccattatttctgggatatgtcctcatccgttcaaagattgttaagagagtatgatttttcaatgttcctcataagcattactaagttgtcctcttaagttttaattcccctctcctcc

SEQ ID NO: 91225 - DNA, 486 bp, Homo sapiens
tactgttaaggtgctttcatcagagaataagaatagccccaaagccaaatgaaagtgagattccctctgattgttttctggagtctttcttggctagcacccaagcatcccaaatccccgttcagtcctctgcccttttgcattgcgccgtcttcccacttagccctatgtatctccttcatcctgagcgatagtcgtgtctgatgccctttgaagaacaggaaagccgcaagcatttttcgccatggggtctaggaaggaagtaaccacgatcacatttctgtgaagcacttgtccaagttcctagaagctgcatctcctagaagcttcgttgatgacaccacccggttaccctccagctctctaagcatgatgtagggtgtggcgggagagggagagcagggtctgtaattcagaaatgagctccgtccttaagtgaatgaatgcctagatgttctgcgaggacactctgagtatctgagtttg

SEQ ID NO: 91226 - DNA, 352 bp, Homo sapiens
tcgggaggctgaggcaggagaatcactggaacccgggaagaggaggttggagtgagccaagatagtgccactgcactccagcccagtcaacagagccagactccgcctcaaaaataaataaataaataaataaataaataaatgtatgtcctattgggtgaattcactactgtatcttcccgtacacatgaattaagacaaccaggttttgctccactgaattagaataaaaatggtatacaatcataaacattctagttggagaaatgtgctgaatctgaagaaattaagagactctaatttacagcacacatttgaaaagtaacatttattggaatgctgtcaactttca

SEQ ID NO: 91227 - DNA, 1331 bp, Homo sapiens
ccaaagtctgcccagataaaaatctctttatctggattaataagaatgaggcagctgctgttcaccaattttgccaatcaagctgtttggaactagttctgtgtggtgactcatgtgagaagtgaagcagtggtgggctatacagactccagctgctcttgatttggaagcacatgcattttggactgattgaactccagcatacctgcatcattgagggggagacctcaagagggagatagtggacttccttcttaatgctacttgtgggcttttgggtaattggaaagagaggaaactatgtttctgaatgagactgttgaagaggtcataaagattacaagtgatgtgaagagagaaggcacaacaggaggacttgacccagtctagggtcaggaagcctccccatgaaaagtagatttaagccgagatctgaaagataagtagtagttaactaggtaaagggcaggaaaagagacctccaggtagagagtggcacatgagctggccgtgaagtgggaagaatcattgagcatttgaggaaagcgacaatttgcagaaaggcagggtgattctcatgaagctggagccatgttgtaaaggactatcaaggctatgttgatggtgttgaactttaatctcaggattaataatgttaaatagaagcgtggcatgatcaaactaatttgttaagtagactttttgttgatgtataatacatgtagagaaaagagcatacatcaaatgtgcagcttgattttcaccaagtgaacatcccatgtaaccagtacccggatcaagggcggaagccccagagccccagaatgccctcttctagtcattatctctcctcaggatgatcagtatcttgacttccaacatcacaaattgattttgcctaattttgaactttatacatatgaaattattaaagtgtatttctttgtgtttgatttacttcactcaatatgtttgtgagatttgattcagccatgttgctgcacatggttgtacctccttctactttctaccacatagaattctagtgcaccccctctattgttatgggcacttgagtgtaccatttaatgctattaaagtaagggccaggagtggtggctcatggctgggcttggtggctcacgcctgtaatcccagcactttgggaggccaaggcaggtggatcacttaaggtcaggagtttgaggacagcctgaacaacaaacacagtgaaaccctgtctctactaaaaatagaaaaaaatttagctgggtgtgatggtgtgtggtggtagtcctagctactcatgaggctgaggcaggagaatcgct

SEQ ID NO: 91228 - DNA, 494 bp, Homo sapiens
aaaggctaaccaaccctgggtacctgttttacatcattttagattctctcagcttgcctcttatgctagccctgctgcagctaccagttctgtatgagctctgactagcttcaggcaggtacaactcgacagtactgcatctcagccctgtaccacacacctctcatctcccacctggggacttttttgttaatatcaggaaattctttcatcacccaggcacaggaaacctggaaggtcagtagaattaaatccctgactcatgggagccaagaactgatggatagatgttttacctttcctccttcctaaagcaagggtcctgagatgcaagtcatctgaattctcaggtggtctcaggggtttcagcaaccatttgtttctagcagcagcaaactctccctctctccctgcttcacttccccatcctaccttctgctcctgggatcatactccccaacaagaattctcacatgggctctgctttctggaga

SEQ ID NO: 91229 - DNA, 276 bp, Homo sapiens
aaaaaatgaaagtgaagccctttacaaaacaagaattgattttgagcaggatcaatacatgtttgcatataaaaattacaccaactttggaaaagacaatgaaagtgctgaaatctggaaatcactaatggaaaatgaacacttgataataaaaggcacaaaatggaggcttaaataaagtggtgtaaagttgtttctgaaaatattcattatgattcaatgaaactaagagaactggctccaagcatgtatacattctgtttggacctagattgc

SEQ ID NO: 91230 - DNA, 379 bp, Homo sapiens
tgagcaaccgcgcccggcctgcctttttttaaaaaataaaatttgtatttttttggggtactgctccttgtggagcagggctaccttataggcagtgtgtccagagtaggcttgacattgtatttagcaaaaattgactgggttgttttcactttggcatttgacttgactggttctgctgttctggaattattttagtaacattaatgatttcctagcttattttcataatttagaagctagttctttaatatttttgaagtcttggcatccaggaattatgctgaaattgggtatccctgttttataggagagtgttgatttctgaggggtatggttccctttttaagagagaatctcttatatgtgctgatacagg

SEQ ID NO: 91231 - DNA, 212 bp, Homo sapiens
cctggggacaaaatagtcagcaaattctcaaggggagaaaataaagtacttcccttctgttaaaaaaaagtcaagagacaaatctttcctcccccattctcactaatagttattgaaggggaaaaaaaaaccccacaactttttaaactaaagataaaaacaaatgaaaatgaataagatccaaagaatgtcttttgttactctgccttatg

SEQ ID NO: 91232 - DNA, 482 bp, Homo sapiens
agatgatatgctgagagctgggagtacagaatgttgtcccccattccctgctcccgaggaacttagtctgatgggatagacagataagtaaaataataaataataatagcaatgatagcttctgtttattgactacctactatgtttcaatcgcaatataatatctatttctattaattcaactacttcatgaaatgtaagtgttgtccctatttttcaaatgaggaaaccaaggctctaagaagttaagtaatttgtccaagattgcatagctaatagaaaacccaggatttgatccccaatctgcctaacaccaaagtcttccttaacccattcttcagatgattacaaatacagtgtttggcagagggcagtggctcacacctgtaatcccagcactttgggggctgaggcaggagggtcacttgagccgaggagtttaagaccagcctacacaacatagtgagaccttgtctctaccc

SEQ ID NO: 91233 - DNA, 342 bp, Homo sapiens
gcaacctctgcctgctcgggctcaagccatcctctcacctcagcctcctaagtagctgggactacaggcacataacaccacgccctactatttttgtatttttggtagagacagggtttcaccttgtttgcccaggctcacactggttttaaactcagatgaatggggtaggtaagtggcaaaaatggtaacctgcaagctcttcttatacatatgattcctcaatagttgcatttatcttagaaatacttcaataaatcatgatttgagtctttcaccgatacaggtatattctgtatgctgtaaggtaggctaactgctgtaacaaacatttccaaacct

SEQ ID NO: 91234 - DNA, 416 bp, Homo sapiens
tattctgaggttagtgagtaaaccagcctggacagaaggaaagtttcctttaggagattcaagagagaagaggtagctgagtagtaacctgagtaggtggagatcagattatggagtctttagtgttagtatggaaacttaatctttctctaaagttctatctggattctttctacttcctagccattgattaggactcagttcaacagttagctcctccaggaagcaggctttacctaggatagatgttctcttattgtctatattatacatcatttacagattgcctgtaatgtattcccatgtattgccaagctaagcactgtatcttgtccccttgtaaaaaggaagagatgaaatggttattatccccatttcagaaatgaggaaaccttgacttctgcattatacaactc

SEQ ID NO: 91235 - DNA, 980 bp, Homo sapiens
ttgcctttccctctgcagtcaacattatgacctggggactccagcatccttcaagcaagccatttccgaagaaggtgaaaagaagccaggatgattggcacctcctcctcctcctcctcttcttcctcttcccttgcccagccccctcctgtgcgtgtgtttcagacaacacaggagccagcacaggagtggaaaatcctgcagcgcaactcagctcagcccacagaagccttgggaatggcctcagtttgtgcaataagaagattttttttttctttttaaatcttcattatattttctttgattgtctgtgagaaagtacccaggtccgcctggaattactctacagtagaaataactgaacacaaacaaactgatggaaaaaaagagttaactattttatttatttcaatatttaaaaggaaaaaagtgctgacatggcacagtatttttgtttaaagtacctcctacttcaaaagttaagcgcaattttgtgaagacatgaaatcataagagtacttaatgtaaaataaaagactgcatattaactctaaagaaaaatgccccacattttaaataagaaaataaagatcaactctgctctctcaggctttttaaaaagccattcatgtatgtgctttaggtatttttatttctgcgagttggatgtggtaagtgaggagtgctcagtttttttttcctccttcaaaagtctattgaaagtgttggtgatgttaaatgattgtgtgttaagatttgactgaaataacttagccacaaatcagcagtttcccccaccctcattgccccctcaccccaggcaagccccttttatctgaatgtcagaagcagcctgcctcctagttatcatgtctgatgaggtctagctcaggaaggaattccatctattgatggaatatatcccctcaagttcaatagattcgaacacagagagctttgtttaaaataatgcagcaaaa

SEQ ID NO: 91236 - DNA, 1012 bp, Homo sapiens
  misc_feature (936)..(936): n is a, c, g, or t
  misc_feature (946)..(946): n is a, c, g, or t
  misc_feature (951)..(951): n is a, c, g, or t
  misc_feature (954)..(954): n is a, c, g, or t
  misc_feature (956)..(956): n is a, c, g, or t
  misc_feature (958)..(958): n is a, c, g, or t
  misc_feature (966)..(966): n is a, c, g, or t
  misc_feature (968)..(968): n is a, c, g, or t
  misc_feature (971)..(971): n is a, c, g, or t
  misc_feature (975)..(975): n is a, c, g, or t
  misc_feature (979)..(979): n is a, c, g, or t
  misc_feature (985)..(985): n is a, c, g, or t
atcctccccgccccctcggcgctccgctccctggcgtgactcggcactgagagtcccgggagaagactcggcggtcgccacctcttctgtccaggcctcggccttcctgagcatctctccttcctctcccagatcgtcttctccttcagtttcaaagccagtggcgtcgcggccaccctgccgggctctctgtgaggatggtgggggtgaagcccgtcgggagcgacccggatttccagccagagctgagcggcgcgggctccagactcgccgtggtcaagttcaccatgagagggtgtgggccatgtttgaggattgccccagcattcagttctatgagtaataaatatccacaggctgttttcttggaagtcgatgtacatcagtgtcagggaacagctgccaccaacaatatatcagcaacacctacattttgttttttcgaaacaaagtgagaattgatcaatatcaaggagcagatgctgtgggattagaagaaaaaatcaagcagcacttagaaaatgaccctggaagcaatgaggacacagatattccaaaaggctatatggatttaatgccttttattaacaaagctggttgtgaatgtcttaatgaaagtgatgagcatggatttgacaactgtttacgaaaagacacaaccttcttggaatctgactgtgatgaacagctgcttattactgtggcattcaatcaacctgttaagctttattccatgaaatttcaagggccagataatggtcaggggcctaaatatgtaaaaatttttatcaaactaccccgatctatggattttgaagaggcagaaagaagtgaaccaactcaaggtctggaactgacagaggatgatattaaagaagatggattgggtcaattcggttatgttaaggtttcagaatggttaccgggtactatatntggtcagccnaacanggngnanaggaaacnanganttcnattnacttanggggctcgccgccgggccacattgatc

SEQ ID NO: 91237 - DNA, 290 bp, Homo sapiens
cgaggttaactgatcatctcattataaactgaaaggacttcaggacggggtagtgtgagactctggctctgcaggaggctgaggccccaggagacatgaagttgatttaggtgcattctgtgtttatatgagagggagtgggctctgcagaggatgggttaagggaactagttgaaggctggggtggccaaagtaagcaactcagatatgtgagggtgtgtggtgcgttcacatctgatttatttacgattgccaaggcacagcagggggcactgctaagagaatttgca

SEQ ID NO: 91238 - DNA, 707 bp, Homo sapiens
gcacctcatccacccgcacagggattactgggctgctgtcctggagggacagacctggaccagctatattgtttcacttattttactggaagccctaaaagttgtatgggagcaagtggggtggggtatggggtgtttatcttgttatttgaaagagccctgtaagattgaacagtctgcactctctgtcctttcctggaagcagagggccccggccaggccccagggactgggcgcttgttttcttagagcacagcgtacttgaggcttggggccaggtggagccgtgctggcctgcagggaggctggccctgctttccctaccaggaaacagagatgacaaggctttgagccctggaattcctccctgcctccgcccttctctcctgctcactgagggcgcgtcctgtgccctgtcatcccaggcccatgtgactccaattggcgtatctgtattccaattccaatgctgaccgtttctccagggctggctgttttccatctgatgggctgggtaattctcaggataccaggtccctgggcagcaagccacgctgttcccatctcccttcccagaaagatgcaaaagtacaaagtcacccactcccccaggcccgggctgctgaccaagtgccagctctcagaacagaattccatgtctcagttcctgttccagctcctcggccgcccctaacacccagcagacg

SEQ ID NO: 91239 - DNA, 831 bp, Homo sapiens
cttgaactctggcactgtacagtgaatgtgtctgtagttgtgttagtttgcattaagcatgtataacattcaagtatgtcatccaaataagaggcatatacattgaattgtttttaatcctctgacaagttgactcttcgacccccacccccacccaagacattttaatagtaaatagagagagagagaagagttaatgaacatgaggtagtgttccactggcaggatgacttttcaatagctcaaatcaatttcagtgcctttatcacttgaattattaacttaatttgactcttaatgtgtatatgttcttagattagaataatgcaacttcgagtatgctttaatatttcaatattcaagttacaaatgtataaggcagttagaaataatacagtcacatgtcacttaatgatagggaaacattctgagaaatgcattgtaaggtgactttattgtgtgaacatcatggagtgcacttatacaaacctagatgggacacctatgacccacccaggccagatggtacagcctgttgctcctgggccacacacctgtacagcatgtgactgcactgaataccgcaggcaattgtaacacagtggtgagtatttgtgtttacaaacataggaaaggtacagtaaaactatggtattacaatgttatgggaccaccgtcatgtaagtggtatgtctttgacagaaacatggttacgtggttcatgactgtatattcactggaagatagtcaagactaaagacacattagagcaaattgacccctttaacatgtgattattgtccaattaaagacagttgatttaagtaaaaa

SEQ ID NO: 91240 - DNA, 194 bp, Homo sapiens
cactgtccgacagtccccagtgagatgaacccggtacctcagttggaaatgcagaaatcatccgtcttctgcgtcgctcatgctgggagctgtggactggagctgttcttattcggccatcttggaaccgcccctacctccagggctattttcatacatcatacacaagtctttacccgtgagtctagactagt

SEQ ID NO: 91241 - DNA, 608 bp, Homo sapiens
gcaccagtcggtgagggaccctgggaccctctggccttttagggttcagctcctttcacattctgtcattctgcttcagaccccacccctgtgcccacaccctgcccttttgtcgctataagctctgcagattctgagacccatccactgaccacagcttccctccttccccttcccttcctgcctccgccaatcctgttcctctgttcttctcctcacagacccccaagccctcaagcccaccctaatctccccactttctcctaggcttcatgtttgttttcctatcccctgcacactcaaaattaggcctaagggcttgatcattggattgaggaggtccagtttttcttttggccacctccctgcatccacctccctgctactcaggatcaatccaatggtctactttctatgcacttaaaattagatctatagttagaagagaagaattcgagtggttctagtataaagaaaagacaaatatttaaggtgatggatattccaagtatactgatttgatctttaccaattatatgaatgtattagattattgcattaccttgaaactgtacatctactatgcatcaataaaaaagaaaggaagg

SEQ ID NO: 91242 - DNA, 319 bp, Homo sapiens
ttttgcggctctctcttctcacgcgatccccccgcggggccgcgctgcctggggctctagctgacctggggctctagctgacctgggtccaagttgggaatcgcaaactctgtggtgcccattagagaatttcacaaactgctgcgaaaccacagtaaagcccccgcgacccaccccgagacgggctttaaaaacactttaaaaatgagaaacgcattacagcttcggctcacaccagactcatttcatgggaaacagtcccgggaagggcgtttggaccccgagtaaaagaagtgggaaaacacacaaaccactcaga

SEQ ID NO: 91243 - DNA, 444 bp, Homo sapiens
tctgctagttactcagtctcttttgaagcctcaataacccatatgtaagattaaggcccttaaaaggtaaaattctacaattctaatcaactatctctttctacaaaacagaagttgtatgtgtctctcatgatttgccaaccactttatctcttgcttttcatagcatcctacccaacagtgtatactccatccacactgaagtacatcgtggctcccagaattcaacacgctctttggcctcaattcctttacacatgctattttctccacctgagcccacctttactcaccactgacatagaggactcaagtcaggtctcctctaatttccccctccctttcctgcaaacactcaagtctgagttaggcactacaaacaacatggctgaaactatagtttttcagggacctatgaggaagaaaaagactggtttcaaaatc

SEQ ID NO: 91244 - DNA, 1082 bp, Homo sapiens
gtaagtttgtaggactggtacctgaaatatactaggcttaccttactgacattttgaaatataagatagctttccaaggcttgcttttgcctcctgattcaggactctaccattggcatcatcaggaagaatttctaatagtattattgatcagagtcttctggaagtttctgcaggttacacatcaacttacttttccctgacaaaataattctgcatctagaaacacaaacaagtagtcaaagaagttatattggaactaagagatgaattaccaaaggaaaactgaaatcaagaaacatttgatgaaattcaggcaatgtcttcaggtgccagaggacacagaaatgtcccgagaaccattcacatgatcttaaagaaacttctgctggttgtcttgtacctttgaagcaggtgtgattgagatggataccttaatttttttaaagtaaaaattgttcattctcttatgtactttagcatactggtattcttatcaaaatatgaaacagcatcaagtttaatattaattataaaacacatggtatatttatatttctgctctttattttctaaagttaactcagttaactctccatataggtatttggacatgggctgtaaccactttttagaacaaatactgtgaagattgttttattacatgacattttatgatgtgagattaacacctttgtattagtaaacatcctagattgttcacttcaatatagatttttaaaatgtatagttatacttgtgcaggatactagaaaatgaaaatgactgttcacacatgctttattattcagtaattttacaagaaaatattactgtttgaaagaaaatcatgcatgcctaaaactgattctgttccagttttataagttagtatactaattttaagacattgtgtatatttccttcacttaatttctattttctactgcatttctaccaatataaaaaacaaagaattcagttggtttctttctagagggaaaatttgttgtgagtatagtactgggcatcacatgctgcttccctttgtggctttgaataaacccttattttcttgtcca

SEQ ID NO: 91245 - DNA, 438 bp, Homo sapiens
gtaatctgaaaagactttagtaaagggtctagttacaaaggtgtgaaaacctcaagtgtaggtacgctacctgtaagctagtgagtggacactgttggcatcccatgccagaagggtggagggaagagatcagcttccaggacccagacacaaagagagctgagtgaagagggctacctgactaggctgtgaccttcagctaacagaacctgaccaagatcactttgcagctacaacactgggggaattcctacttcaaactgaatctcttcactttctctgatactatcctgagactccccattggaaggctcattcacaaagtccatttaggtcagcccccaggggcacagagccagacctacaagagaggagtgtgcaaatcttctcttcccccactggatcgagagagagagagagagagagagagagagagag

SEQ ID NO: 91246 - DNA, 581 bp, Homo sapiens
gagagaatatgaatacaaattggagaagactaaggaatcatgaggctaaatgcaatgtggaatccctgaactgaaaaggaacatgtgacaaaactcatgaaatgttaagtctgtagtttaattaatagtagtgaatcagtgttttgataattgaagcttagttttgataattatactgtaggtatgtaaaatgttaacattagaggaagctgggtgaagggtatggggaattctgaatttactgttgcaactcttctataaatctaaaagtatttcaaaattaaaagtttaaaaaagtcaaaatgaagccacgtggcatggcataaatgttttgtttataatagcaagcagaatgtctgaggaacatagccatagttttaggtattaacctgcatatcacaattagagaagacattaaactagaaagatgtttgctttctagcagggctaggctggatctgagtctggtagagagagagacgaatgcccaagtgattgttttcataatgttttccaaaagtcagatgatgatgtggagtcttattattttgtgttgttgcaagacttctgtgtttgtacag

SEQ ID NO: 91247 - DNA, 352 bp, Homo sapiens
gctcactccattctccacctctcaggctcaagtgaccctcccacctcagcctgccaagtagctaggaccacaggcctgcaccaccacgcccggcaaatttttgtattttttgtagagatgaggtttcactatgttgcccaggttggtctcgaattcctgggcttaagcaatatgcccacctcagcctctcaaagtgctaggattacaggcatgagccaccacactgacttgaaaacattatttttgacagctacatgttattacattgcatagttgtgcaatagtgtaaccatggacctgatattcaccttggtttttaaaataattttaattttattattactactatttt

SEQ ID NO: 91248 - DNA, 353 bp, Homo sapiens
gtaagcctacacactcagtaacccatacagaattaatcctcacatttagatgaagtagcaagagtttaaaattctctactcacagccttgctgttttttttcaatttaacaaagtaagcctactttcgtatcactagaatgtgattacagttaaaaggatccttttaataaaataattaaatttatttgaatctacaatatcagttttttcttgtaattcctttttctttctttctttctttcttattttattgttttcttcgtgtagttttacctcctctaatatatattcttgtgctataagaaaacaaagaagtttgtaaccagtattctaaaattaagtctcaaccaaa

SEQ ID NO: 91249 - DNA, 232 bp, Homo sapiens
ctgggatctgcccgaggcttaaggcatctacccatatgagacaggtttgcactgaagtgcttctgataacacttgaaatgaaccactggtcttcagtccatttgaaccccttggggtatcttcctagatttgctattactttttttaacgagcaaatcctgtaaaattagaagactgtctatacagcaggtggcacttgatagtccatcgagtaccgagtctcgaatccgta

SEQ ID NO: 91250 - DNA, 335 bp, Homo sapiens
ctatctccccaaatctacgtttcaccatttgtactgttatttttttagcccaagccacctttatgtcactcctggaacataataactgctttctcactcatctcctacattttcacctcttataatacagtccaccttgtaccgagcaacaagagttatctttctgaaatgcatattagatcatgtcacatctctacttgaagctctctaaagatttctcactaaaagcgaagtctaaaatttccacccagacctataaggcccttaatgatcttacctctctacctacctctccgatcttacctatcttcaccctcggttctattttctatatc

SEQ ID NO: 91251 - DNA, 542 bp, Homo sapiens
tagtttttagactctctctgagcttcagggtatctgtaaacatttgaagataatttaatgaatgctgtagttaatattttgccatcttcaaaatagcttcattgttatatccaataaatgtttctttaaatttatgttaatgccttttatctttggcatagattggatttttatttaaaactttatttaaagaaagagattctactactatgggaaaaaaatatttacttagaaaaatatagtggtggccagtcctggtggctcacacctataatcccagcactttgggaggccgaggcgggcggatcacttaaggtttgagaccaggttggccaaaatggtgaaaccctgtttctactaaaaatacaaacattagctgggcatggtggtgcacacctgtaatcctagctactcaggaggctgaggcacaagaattgcttgaacctgggaggaggaggttgcaagtgagccaagatcacaccacactgcactccagcctgggtgacagagcaagactctgtctcaaaggaaaaaaaataaag

SEQ ID NO: 91252 - DNA, 264 bp, Homo sapiens
acccccctgcgacagagtgtgctttcaagtgaggtcacaaataatacttttttataagttttggaaaagaatagaatggaagtttaatgataatcaaaatagactgattcatgcattaatttaaaatgtatttctaggctgggcgcaatggctcacacattctgtatcacccagatacagaatggaaaagagtacaaattcatatgtaatcccaaccctttgggaggccaaggcaggtggatcacttgaggtcaggagtttgtg

SEQ ID NO: 91253 - DNA, 1115 bp, Homo sapiens
aaagaaggcagctgggcagctgataggaacaacattcagctccgaggctgaaagggaaacatcagccgcccggggggagttaaaatgagtgacaacactactctgcctgctccagcttcaaaccagggtcctaccaccccacgcaaaggccctcccaagttcaagcagaggcagactcgccaattcaagagtaaacctccaaagaaaggtgtgaaaggatttggagatgacattccaggaatggaggggctaggaacagatatcacagtgatttgtccatgggaggcattcagccacctggaattgcatgagctcgctcagtttgggattatctgaagtgccagaggttctgccactctcaatgacatctgctgtaattttggttgcttttgccctgttgatctgccggagtcttgaaattcagctgattggaagtggtttctttgactttcaaggtcattccctatcagttactactaagagttctcttactgtcagaatctctcttgcagtacagctcaaaatagtggatgcatttcaaacttgaccaccttttcctaccagctagttagaagtcatcaatatttctctacattttgtttatctgtaagtcctttaaatctatttttgctaggcattcattatgattaatagtagacttttaagacaacatttatgtcactccccacctcctcatatttaataaaggagatatttaccttgaatgttggtgaagttgtattaaatgctacgtagaaatatctgatgctgtgttctgagaaccaattaaacaaagaaggcacagtcatacaggaaataagtgcagtgcttacaaaacagcatagcattaagatttgaattctgtaagtttgtaaattgtataatttccgggtctaaatttttttttttttttttttgcgacggagtctcactctgtcgcccaggctggagtgcagtggcacgatctcggctcactgcaagctccgcctcccgggttcatgccattctcctgcctcagcctcccgagtaactgggactacaggcgcctgccaccatgcctggctaattttttgtatatttagtagagatggggtttcaccatgttggccaggatg

SEQ ID NO: 91254 - DNA, 939 bp, Homo sapiens
aaaaaaaaaaaaaaaaaaaaaagacatgagagactattaagaccatactgaacaccagtctactcagaaggatgtaggacagaagtcagagcttgctggcaggacagtggctgggcagtggcagtgggcatccttgcagcagcagtcatcatagccctcagtaagctatcctttcctcaggtaacagctcaggcaccaggagatgagatctgcactggtgagatcagagcttaaagtccccttgccccataggaaccactgtcttttgtagtactctgtatacctacttctatgatccctgcaagggataggtagtgggttgaacagtgccccccaaaaaggtatgtctaaatcctaatcccaggtatccatgaatgtgaccttacttggaaataggatctttgcagatgttaactatggatctcaagatgagatcaccctggatttagactgggctctaaatcctatgattggtgcccttataagagaaaggagaaggagatttgagacaaagacacacagagaagaaggctatgtgaagacaggcagagattggagtgatgtggccacaagccaaggaaaatggagaattgttggctcccctagaggccgaagagggtatggcatggcttctccctcaggaccatcctgctattataacaccttgatttttaatttctggcctccagaactgagagataataaatatgttgttttaagttactagatttctggtaatttgttatggtagctctaggggattaatataggctataacagttatcactgcactctgggaagcacgaagtattggcatcgtcatcaggtatttacagatttttcattgtttctctcagtccagacacagtttaccaattgggtcagtttttattataaccagcgttgcctaataactggtgacaaaccacttatctgttt

SEQ ID NO: 91255 - DNA, 445 bp, Homo sapiens
gatggctgcttctgactcggagacttaaaaaagaaaatgatacagagtttgtaagtttttaactttcagctcaggtcatgacaagatagctacaaaattttaaaaatagcctttttaaaagtttcttacttgtaaccataggtacaactctgccaagaattgggtccaaaatttaattttgcagattgtagaattatggtgaaagttgaataaacatactttctaagtttcctttgttttggaaggagtgaggccctaagatatggaatgaggatacctgggtgaacagctccttctcccatgactgagaaggctagcctccacttctgtgaaagctcttagcttaaactcttaatagtttactattggctaaatgaaaactctcaaaagagtccacatttcatgaggatgagatgcctgaaccttcctagcataatgcagaaga

SEQ ID NO: 91256 - DNA, 245 bp, Homo sapiens
acaagatgagatcatgtggacacaggctcacagtgcctgcacggtgtgagcactcattgatggcttgctttggttcaggaatgcttggcagagctgtgcctccagccccactgctctcctgcctcccaacacccagaggtgttgagggtgaactcctctgcacccaatcctctgtgcatgtgcctgaggaggatggactgtcccctgacaatggatggatgccacctcatggctgatcactgctg

SEQ ID NO: 91257 - DNA, 401 bp, Homo sapiens
tagagacggggtttcaccatgttggccaggctggtctcaaactcctgacctcaggtgatccgcctgcctcagcttcccaaagcattgtcttttattttttatttttattttttcaacatctaagtatttattaaggtgagtttttacaaacaagcatctatcccagtgtgcggggtgaggatgggagaggagagtggggcagcaggaagatgaggattctcatcttttgataataaagctccaggttcatcccattgtggatttcatagtcccccagagacacatggtccttaaaaattgtgtaccacttcttcaggacaatcttgttccaacgggtgccagtttaggctgcaatcagcttcttaaggtccccgatggtatcatccgtgttgcatttaacg

SEQ ID NO: 91258 - DNA, 884 bp, Homo sapiens
aattttggacttgttgctgctgcattcccaaggcccctccaggaggtagaatgatgcagaacacgtgatctggagccaatcagagacccaacatttaacctcccagcccctcagttttcttgccttgaaatggggatcatcatatctaatgggttgttcatgctgacttaatgaaagttgtgattaggtatatgctgcttgttagactcaattgtagggggtagggagtgctgttgactggactcacagcaaagcccttggtggggttaagaagttagtcttgtatgcaggaattctctattcaaagagaatctagaatgacttcccttgggattcttctgccccaaattttcaaatacactctgctaatgaaggaaaaggaataaattttgttactagagtaaacttggtttaggcacaaagagaagaaagaattgacaatttttttgaccttttctatgtgacaaacattttaccgggtgcttttaggtgacatctcattgaatcctcatcatgttatgaagcatataatatgtcttcctaattcataggtcaggaaaccaaggttgacatggccaggaaacttgttcaaagtttcttggtaagtggtagaactggaattggaagccaagttggtctgagttccaaatccaccaccctacaaccatttggttcccattgcaataacctgaaactgatttgccatctttaagaagtgtttctaggtcatagtggatgaggagtgaagaagtcaattcattattcactccttgagtcccactttagactttgcatttccggtaagccttcctactccagtcaggtttatagtcttctccttctggcttgcatagcatactgtagttcctttatcatagttctga

SEQ ID NO: 91259 - DNA, 537 bp, Homo sapiens
gccttaattaaacattttcttccctctgtcctccgtggctccgcctcccagctgcattcatccaccaagtctctatcggtctgtgtcctctcctatccttctggtgagtgctctatagaatgagggaatcagcacttcctgccccccagggagtaccaacacaccacaggtggcaaaatgaaatgtgttttaaagaaggcaacaagagcagaaaaggagctgctaattttgtctggggagatcgagaaaagcctgatggaggagatggcattgggtgagttcagtaagatcagcaagatttgtgaggcagcgaaggtggcatctgacacagagtgaacagcctgtagaaagatgagctgataggccgggcatggtggctcacacctgtaatcccaacatttgggaggcagaggcgggcagatcacctgagctcaggagttcgagaccagcctaatcaacatggtgaaaccctgtctctactcaaaatacaaaaaatgagctgggtgtggcggtgggcacctgtagtcccagctacca

SEQ ID NO: 91260 - DNA, 259 bp, Homo sapiens
ttgtgagtaaggagaaagaaacaaacctatatgtgcctgtgtgagagtgtgtgtgtgtgtgtgtgtgtacgcacaggtacatgcacactctttgcagggtgtactcatttgccaggactgctgtaacaaactcccatacacgaagggctgaaatcaatagaaagaaactgaactctcacatttctgggtttttttgtttgtttgtttgttttgttttgttttgttttgaggcaagctcttgctctgtcactcaggctgg

SEQ ID NO: 91261 - DNA, 591 bp, Homo sapiens
gtcaaaggtgggcagatggaagtagagagaaaccagacatacagtcatttatgtcgagaattacataggttttcagtctgggaaggaaaaggcatcttcgacttttggcatgcaaataccaatggaaagacaacttcccttcataggaggggaaattcaagagggagctgagggaggagaggaggaaactgacctctaccaagcaccactgctgggacccacgctggccctgacattgtcatcatttgtccttgctccaacactgagctctaccataggattaactccacactacagaagaggaatctaactgaggtcgttgatgagtttaagcataactgcttcaagtttagaaaaagcaggttaagagatgcaggaactgtaggacacctgaggggtattctgtaattttcgaggaggtttccttcatgaccctcatcctcttcataagaccacctaccgcccattgctgtcagtccaaagatccagagatcttgctctaagtatgaactcttctcttgcctcccacactagcacctttacgtctactgtctgtcttggagaccccatcaagcttcacctcaaggtact

SEQ ID NO: 91262 - DNA, 2621 bp, Homo sapiens
aacatacattattttttcattttactttgtgctaccacggtttccatttgcttatggctgttggttgtgaggtctagtgctttcttaaaatatactactgctttgcacattgtgggcctgggagctccgggtgccaaataaagattaggactaacacaccttcagtgtttgagtgatgtgggttcccggtgagcacctacatgctgcttacctagtacaggctgtgcagccaagacagccctgtgtggcccagaagaccaaacatttcatgtgaacctttccccttcagggtgataaagatcaggtcgcttgtccccagtccttgttacctccatgttattgattcacttcccagttgccatattcgaggtaagcctccatagctttatctttgctttcatgtcaacaatgcatgtctgcatccttggactggcttcaagggtttctggcaaaaaatttgcagtctgttaatagacttgggcacaaataggacctaaccaagtgtgaagggaataatgaattcagactgaggcatttgggagagactgttggggaagttcatccagtgcagggccttgtcttgttgggtggctcagatatattaatatgacccttatccaaattaacaatgttacgcatttgcccctaaactccaggtgcatcattgagaagggaaggaatttgctttgctttggaggcacattatttcctcagggttctcatttggattgccttggaggttggtgtgatgccacaatgtgcagagaggctgaggacagggagggcaggtgggcttcactttccagccagctctgatttctggggagtggtagtctattcagggggctccgaggccctgtttgggtggattgggaagagtgtgcagttccttagtgatgtctatcataggcacagtggggaactagcaacattcatgctaggtatttgccagccttgacataataaaacagatgtcactgactcctgcctctttgtccagcagtggtcagcactgcttggtcaggctgcagggcatagatgggttgcatcctgagtgagaaaatgcatttccagatatgtttttgtctcttcttgctggcaggactagggttagtgtttatcatttgacttaaactcattcccccaagttcttactctattttcatgtatcggcagttactatttaagttgctgccctcgcagactacagtgagggcaacgagcacagactagagcaaagcttccccacccacagactgattatgcagtgtcactgggagcccctaacactggagacgctgacttaggaagtgtagcgtggggtcaccgggcaggacttttaaaaaatgttcccagatggctctgatcactgtcaggtttgggagctagggatggaaataagtcagtcttatgtatttctcttttttggggctgcagcttttggctgatgcagtttgtatatcagtttctcaaaaatcctcttttatgtgccctgcacagttgtatgtacacaggggagggcctggcagggagccttagctaaatgctgtatgtcatagatcatctggttcttgtggggtgtgtgtgtcagaatcacatgggaaacaccttcagagggtaggggcctgggctcagcgtggggagtctgaggcagcaggtgcagagtgggaggagctgggcactgcacttgtgctttggctgagctcccgctgactctgaggggagcttggtgacattcttcatggtccacaggaccttgctcagaaagaactatgttctcatttaggagagctttgaggcagttgggaagcattgttggtaaggatgttgaggcttgagaatgtaatgcttttttctttactatggcccacactcagcaaataattgcctctgggataaatccccgacccatgcccaccccgatcagggaaacatagtggggagttcagaaacggactcttcagtaggcggtgcctgagtctcctcagatgacctggtgcattgggctaagctgctaaatgcatagcctgaagtggatttgagttggttcctctgcatggtttgaaggctccctcgccacctttcagcacttctgatgagtccctatttttattgtaaaagtatgacaacaatattaagatgaaaaaatgacctcttttatgtttttattttctacatgtcattccagtctttggttctgtgaatacacatctttacatggttataatcacggcccctccagttaattggcttgcccacagttttactgtgaagtagagctgagatttgaagtcggctgggccctctacatacatgtttccttccctttgtgggattgagtagaaggtgcaatatttaggtatgaccacagggtggtgccaaaaatcaacacatagctgcccccacctccattggactgaaaaccaaaccaaaaacctaagcctgtaatctgggaatttggatgaggatatagggagatggctcaggagtctagaagacctggcaagtatggtgtggatggggacagaatttacttcatggtctggtgtaacctgaatctgtagacttgatgcctgttgatataattggtttttaataaatttttgatcctaaaggttttt

SEQ ID NO: 91263 - DNA, 483 bp, Homo sapiens
gagatggggaacctgatcttttaaaagcgggttcccatatgtgaattaatctcaattaaacaaacaaaaaactttgacgttctctcccatgcacttaattaaccgcacataacttagttctgttcctttattttcaaggtaggagaagccaggatggggagatccctaatagatatgactaaatacacttaataaggaactttgtaatcaagtcatgagaaaatgggcctttttgacataagagtggacaagcatcgtgagtggcgtgggggggcttgagcggctcctccctctctcctctgggggtgcccaccggggcccaaagcttctgggaacccggcggagagctctgctcctgagccaggaattgccaggcaccacacaactgctatccgcggggcctgtccggtttccccaagtgcttctgcttcattcgctaatccatacagcgtagctcagaatgatcgcttgccttgggtcccg

SEQ ID NO: 91264 - DNA, 351 bp, Homo sapiens
gagatggggaacctgatcttttaaaagcgggttcccatatgtgaattaatctcaattaaacaaacaaaaaactttgacgttctcataattagtgtgaagctaagactgtaattccaatcttttgatttctccaaataatttctaataaacataatattacttgattcttaagggaagagtaagtaggttttcaggagtatgccaactttttaatggaattatgttataacatgtaaattctaccaatgtatctgttttctgtaactgaactaatttctgtctcctcctctactgtatggtgagagcttgctcgccataactaggtcgctgtggtgcctcccccccatcttc

SEQ ID NO: 91265 - DNA, 300 bp, Homo sapiens
catattcggaaatatggattgataaatggatattttgactgagctgcagtatagcttctcctgtagcctcttgttaaaaacagccccgggtgttggggacagcagtagctggaagcagcaaagtgacacttaagtgccaaggcagatcagcagtttctgacagtgagagttcaaggccatgtggtggggaaggaggagtatatgtggcagagtccacataagtggtataggccttggagtcagggcctgaattctaagctcaactctccgtcaagttgccgtatgaatgtgggtaactcc

SEQ ID NO: 91266 - DNA, 146 bp, Homo sapiens
aggtgaatttggattgttagagaaaagtttcacaaatttcattcctggaacaccaagctcataagacattcattgaaaaaaagtgggccaggcgcggtggctcacgcctgtaatcccagcacatgaggccaaagcgggcagatcac

SEQ ID NO: 91267 - DNA, 4118 bp, Homo sapiens
accggatgtgttttcttccaggctaagtccatcttccggcttgggcagacgctgccgtggaatccttgactctagttttctgagtcgattgtgatcatggctgctgagtctgatgttctgcatttccagtttgaacagcaaggagatgtggtcttgcagaaaatgaatcttttgagacagcagaatttattttgtgatgtatcaatttacattaatgacactgagttccaggggcacaaggtgattttggctgcttgctccacttttatgagagatcagtttttactcacacagtcaaaacatgtcagaatcaccatcttacagagtgcagaagttggcagaaaattgttactgtcttgctatactggagcacttgaagttaaaaggaaagagcttttgaaatacttgactgctgccagttaccttcagatggttcacattgtggaaaagtgcacagaagctttgtcaaagtatctggaaattgatctttctatgaaaaacaacaaccaacacactgacctgtgtcagtcttctgatcctgatgttaagaatgaagatgaaaattctgataaagactgtgagataattgaaatttcagaagatagtcctgtaaacatagatttccatgttaaagaagaggaaagcaatgctttgcagtctacagtagagagtctgacatcagagagaaaggaaatgaagtcaccagagctgtctacagtagacataggttttaaagacaatgaaatttgtatccttcatgtagaatccatcagtacagctggtgtcgaaaatgggcagttttcacagccttgtacctcttcaaaagcaagcatgtatttctctgaaacacagcattcattgatcaattctacagttgagagcagagtggctgaagttcctgggaatcaagatcagggcttattttgtgagaatactgaaggaagttatggtacagtgagtgagattcagaatctggaggaaggttattcactgaggcaccagtgccccaggtgtcctcgaggctttcttcatgttgaaaactatctgcgccaccttaaaatgcataaactattcttatgcttacagtgcggaaaaacatttacacagaagaaaaatctcaaccgacacatccgaggacacatgggcatacggccctttcagtgtactgtgtgcttgaagacatttactgccaaaagcacacttcaggaccacttgaacatacacagtggggatcggccatacaaatgccactgttgtgatatggatttcaagcacaagtctgctctcaaaaagcacttaacctctgtccatggcagaagcagtggtgaaaaactatctaggcctgatctcaaaaggcaaagtctactataattataatcacagacttgttatataaagtttgtattattctattacgcaagtctttctgtagagatgcagcatttgtaatatttcatccccccaatctttgtttcttatattttgtcggcttacacataatcattctttctgaacttctaacagttccaaagttatgggaggcacagtaaagctgatgggattctgtctcatctcataccttacatataagtctcagtagtatccctagagaaatagtgttcctctcttatatattcttgattctagtgacaaaggatccagcagtatttgcagattccgatttggagtctctaggtaattgatttaagtataaaatccaatcatataaaaactttaatgaattaggataacaagaagagaaaataaaggtaaaaacactattacctgtttctagtcactttagaacagatggcactaaaaaaatttttttttaactttttaccagctgttcttggattccaaactaaacaccaagatacttttcattttaaaatgtataaagtaacaattcagattcacttgggaatagcagaatttttttatacagggttaataatccttaaaatacttttatttccatgccttattagtatacatacttaagaaatggttcattgggcccgagtttcttgattttatttaatacaatcggatttaataattttgtggccagtaaaattataccattggcatgaagctgtgaaaaatgagaaattctacctttaccagggatatctgttctactgttttaaaagttcctctctattttattttttatttaacatgaagtaaaattgaaatttcttcttggtgtatagttctgtgaattttaacagaaagatttgtgcaccactactgcagtcggtacagaacagttccttcactcccaatagctctcttatgctgtccctttgtagtcagctccttctagctctaatcctggcaacagttctccgtcactattattttgccttttctggactgtcatataaacagaatcttatagtacgttccctcttgaaatgctttttcacccagcataatgactttgaggttcatccatgtcattttaaattttgaattggcaatatatattctagctgttactagatgagcaatttaaaaaggtgtagctattagtgttgtattttttcatttacattaatgtaatttccattcactatgtgttgataaaaatcttaaccatccctagagttttatatttccaaaaatatgccaaaaggaaaactatgactgtatgattattttagcgagagtcatatttgagatggtgttctgagccatagttctctaacatctccgtctacatataacacaaaacttttataaattattttaacaaagattaaaatatactgcagggcaaataatattctctaaaacacaggaactgcttttcgtaaagaagactgactagatgcatctttctttgaagctgttctagtcctcctctagttaacttagctttatgtagaatttctactgtatttaatttctattgaagcccttctgtattttaaaatgtaatatactttgtaccatttataaaaattgtgtgatgaatgaatcacatgttcgttgttataagtgttaacctttttttgacaattttgtgggaaagacattctccactgaattttaactttccttgagactttcaagaatgcaggtctcgtttgatgaaaaaaccgacttcataacccaatgttactagttagcgacattgtgctgaatttctccttgaactttttaactttatatgtaaaataactttgatcttggtcatttgaaagatcatttccaggtctaaaattccatgattttgtatttaattcttcctgagaacagaagaggggaaagcaagagaggacggttttgtgtctttatgaactttgttacttaagtactccattggagacataatttttctaattagtggatctttttccactggaaagtgtgatagctcattgctaatttttcattcatagttcattgcttccatttgacctaagattggccatttgttggtgtgaaaatattttcttttcagaaatagtttactagtgattgaagtacttttcttatttttgcttcctattataaaatggcgtggggggaagggggaaggatggagatgggaggagagggtaaaagaatagtactctgattttttaagaattagtatctactatcttggatatttgaaaaaaaattggttgaaactatgtttaagttttatgtgtgccttgtaagattgttgtaaaattttttgtgagcactttgagatttttgctgggggaggggtgttttgtgaaagtgatggttattatttatattatttattcctgttcagtagcacggaatgatctccaaacattcctaggagagtgtctgtttgcatgatatgtctaaaaattttcaggaaaatggaatctttttttaaagttcaggtatgacaaagtatagaatttattcatttaacatattcacatttagtttatgtttctgatatgacagaaaaatgaaaagtgtttgagttcagcctcttcatttactccatttacatataaaagatcttgaaaaggtagttgttacttcgttgtcagagaaaaacacttgccctttttcctgggatgtaactatcttacatgtttacataagaaataataaactggaggtgggaatggagaaaa

SEQ ID NO: 91268 - DNA, 2573 bp, Homo sapiens
  misc_feature (2560)..(2560): n is a, c, g, or t
accggatgtgttttcttccaggctaagtccatcttccggcttgggcagacgctgccgtggaatccttgactctagttttctgagtcgattgtgatcatggctgctgagtctgatgttctgcatttccagtttgaacagcaaggagatgtggtcttgcagaaaatgaatcttttgagacagcagaatttattttgtgatgtatcaatttacattaatgacactgagttccaggggcacaaggtgattttggctgcttgctccacttttatgagagatcagtttttactcacacagtcaaaacatgtcagaatcaccatcttacagagtgcagaagttggcagaaaattgttactgtcttgctatactggagcacttgaagttaaaaggaaagagcttttgaaatacttgactgctgccagttaccttcagatggttcacattgtggaaaagtgcacagaagctttgtcaaagtatctggaaattgatctttctatgaaaaacaacaaccaacacactgacctgtgtcagtcttctgatcctgatgttaagaatgaagatgaaaattctgataaagactgtgagataattgaaatttcagaagatagtcctgtaaacatagatttccatgttaaagaagaggaaagcaatgctttgcagtctacagtagagagtctgacatcagagagaaaggaaatgaagtcaccagagctgtctacagtagacataggttttaaagacaatgaaatttgtatccttcatgtagaatccatcagtacagctggtgtcgaaaatgggcagttttcacagccttgtacctcttcaaaagcaagcatgtatttctctgaaacacagcattcattgatcaattctacagttgagagcagagtggctgaagttcctgggaatcaagatcagggcttattttgtgagaatactgaaggaagttatggtacagtgagtgagattcagaatctggaggaaggttattcactgaggcaccagtgccccaggtgtcctcgaggctttcttcatgttgaaaactatctgcgccaccttaaaatgcataaactattcttatgcttacagtgcggaaaaacatttacacagaagaaaaatctcaaccgacacatccgaggacacatgggcatacggccctttcagtgtactgtgtgcttgaagacatttactgccaaaagcacacttcaggaccacttgaacatacacagtggggatcggccatacaaatgccactgttgtgatatggatttcaagcacaagtctgctctcaaaaagcacttaacctctgtccatggcagaagcagtggtgaaaaactatctaggcctgatctcaaaaggcaaagtctactataattataatcacagacttgttatataaagtttgtattattctattacgcaagtctttctgtagagatgcagcatttgtaatatttcatccccccaatctttgtttcttatattttgtcggcttacacataatcattctttctgaacttctaacagttccaaagttatgggaggcacagtaaagctgatgggattctgtctcatctcataccttacatataagtctcagtagtatccctagagaaatagtgttcctctcttatatattcttgattctagtgacaaaggatccagcagtatttgcagattccgatttggagtctctaggtaattgatttaagtataaaatccaatcatataaaaactttaatgaattaggataacaagaagagaaaataaaggtaaaaacactattacctgtttctagtcactttagaacagatggcactaaaaaaatttttttttaactttttaccagctgttcttggattccaaactaaacaccaagatacttttcattttaaaatgtataaagtaacaattcagattcacttgggaatagcagaatttttttatacagggttaataatccttaaaatacttttatttccatgccttattagtatacatacttaagaaatggttcattgggcccgagtttcttgattttatttaatacaatcggatttaataattttgtggccagtaaaattataccattggcatgaagctgtgaaaaatgagaaattctacctttaccagggatatctgttctactgttttaaaagttcctctctattttattttttatttaacatgaagtaaaattgaaatttcttcttggtgtatagttctgtgaattttaacagaaagatttgtgcaccactactgcagtcggtacagaacagttccttcactcccaatagctctcttatgctgtccctttgtagtcagctccttctagctctaatcctggcaacagttctccgtcactattattttgccttttctggactgtcatataaacagaatcttatagtacgttccctcttgaaatgctttttcacccagcataatgactttgaggttcatccatgtcattttaaattttgaattggcaatatatattctagctgttactagatgagcaatttaaaaaggtgtagctattagtgttgtatttttcagagcngaactgggggccg

SEQ ID NO: 91269 - DNA, 272 bp, Homo sapiens
gtgtgagctgccctctcagcctgtaacattccttctacctccctatcttccatccacttttcgggaccaatggcctctggtctcttttttcttccaaaggtttagcagagttttgtctcccaaatgctgcaggcctagaaaggaagctgtgaatgaattttatcaccatctgtgacaagtgatcagagcacatggactatggtcattttagtggcactttgctaaagtaacatgcttccaatgaggagcagcattctacttttgggtgcagg

SEQ ID NO: 91270 - DNA, 242 bp, Homo sapiens
gcctcgtccccctgaactccatcacctgctttttcctccaactcccaccttggcctgcatcaacactcctcaagtgctaaagtcaatttcatcacttctccaagctccagttccagatgccaccacctcagccctggcccaatcactcaccctgggtttcattccccattaggactctaactccatgcctaggagaaacccccttccctggaaagttccaagagatcttctgccccaggtca

SEQ ID NO: 91271 - DNA, 312 bp, Homo sapiens
actgttgctcactgtctctcttactggactgcctccccctggactatgagctacactccaagcctctgtaccaccatgcccctgcacctggaatgcggctggctcacaggagccatgaattaaacacctgctgagagagcaaatgaatatttgtacctagaggaaatcctcctaaggcatgctgccatcctgcttcagacctgcactgaaccccagtgctggcccagctggacatgagcaggaacgtcaggcctgttatatcccatgtgacattaagtcactaaacctgagcctgcttcttcaccagtgatg

SEQ ID NO: 91272 - DNA, 373 bp, Homo sapiens
gattctaaaaagattcttttgggagccttcctactcaatccccaccatctccaggcaaccactgatctgcttcccaccattagagattagactagttttagataatagattaggtcattacacttttgaggagaaattctttttttgctgctgaccagcattcactacatcaataaaaataaatgctaagctttgggtttgtttttatataagaaatgacaaaaatgcccatttgtaagaattgtttcttccacttcccaccttaaagtaatgcaacgtttcagggcaaaattgccttcttcatgagtgggtttgcagtactgattgtatctttcacaatatctgttgaaaataaattcctccttttaaaatt

SEQ ID NO: 91273 - DNA, 337 bp, Homo sapiens
ggaaaaaatataattcaagtccaacgtattactagctgtcaccttccccaacaatcaaataagcattgttattgtcaaacacatttacttgtatagttcagtgttatatgtaatggacttaggtataattcctgtgctattcccttttgatgccaaacacccttttgtaagctgttttgtttgaaatccaaatttatatgtcttaaagtaaatggcagcattgggctttcttaatgtaatgactcttctgccatcctatttctagagttaggcagaaaattctgtaaatctatcttatttccagtctgtttgtgactatggtgggcaataaatctga

SEQ ID NO: 91274 - DNA, 285 bp, Homo sapiens
tggacatctcaccaggtccttcatgtgcaggacagtcttatgaccatgcactcctgtcccgtaggtaccctagttgggatcacagatgctccagggactgtccctgctgcccactcttcacctatttctgtgaagggttaccctcaagaaccactaagtttcttgttagtggtggattggacaaagctttttaaaaaacattttgaaaaacctgtggttttattacttattactctggaaatttggtcaatgcaacacgcttacacttgaaaatatatacatgcc

SEQ ID NO: 91275 - DNA, 220 bp, Homo sapiens
gtttagttcacagttgattgtgatgggcacaaggttggatgcaagcaggaaggtaaatgggtgtaaaagctgcctccttggcccctcaccactaccgggggaagctgcactgcctgagccactcagccccatgcccttctctttgctggaagtgcccataggaaatagagagagggtctttggctgcacctctatgtcaggattaccaggtcagtcttgg

SEQ ID NO: 91276 - DNA, 238 bp, Homo sapiens
aactcctgacctcaggtgatccacccacctcctcctcccaaactgctgggattacaggcatgagcccctgcgcccttgccaatcttctttatttaaaacatcttttttgtatatgttgcatatagaagtgtttttgtgtatgttgtatatattttgtatatagaagcattttttgtatctagaaggcttttcttttcctttttttttttttgtgaaatagaggatcttactctcttac

SEQ ID NO: 91277 - DNA, 191 bp, Homo sapiens
cactgacagcacaactctcagtctgtgacccagggtgtgaagaaagatccaactctccagggaggcagctggcaacagccagacaggattccccaagcaagtcagttcgggtaaagcacagccctagtggggaagcatggcgtgaagcaggtaaatcaagacaaaaatccattcgaatgacttgcactaac

SEQ ID NO: 91278 - DNA, 309 bp, Homo sapiens
tatcgcgccactgcactcctgcctgggcaacacagcgagactctatcttaaaaaaaaaagaatatatcaacgtaatgttattttgtccttgcttaagtttgatgctatgataataattttcctagtcctacatattctttaaataattttgttttctttataaaagttatttgtgggcttcagatgggagacgaatctctatctaataatccataaatataacaggacctaattcaatccatgtaggattcaacgtgtaattggcatagtgcctggctctggtgttgcagctcccaaactgtgcagaga

SEQ ID NO: 91279 - DNA, 484 bp, Homo sapiens
tccactgtcctcttcagatctactgtgaaatttaaattcatgaaagctgggttctgagcctaaaagcaaacaccagggccctcttagaagttcctccatccagcttggccgaagtctggagctgccagccgctgcttccttcttcagagggcaaaataaagcattttttccttaggacactaccagtctcctctgtttccatcactgactccagcaaaagagaggtttagctagggattataaactcaaattcccataggggccaagaagctgaccaggtataagacatatgagcatggtggatactgtggctaacagagaacactctctaaaatcatttttaaaaattttctaaaccaatgtgccagataagcaaatgtctccacagacctgattcagtctgagggccatcagctacacccctcagcttaaaaattcgctactgaccctgaaaacagggggattcagggtccccagcgtgacc

SEQ ID NO: 91280 - DNA, 560 bp, Homo sapiens
tggtgcagtatgaaggaccaattggagacgccagagaatataagtaggtaaacctgttcaggagctgaaatcaaagactcttgaataatttaatgtaatctggaggtgatgaggaactaatgaagtggagaagtgagaatggaaagacaagagctgcccaagatatggtcaaagtttctaggccaggtaaatggggacatggttctagggaacacgttacaaatatcatatttgggggaaaagctgtatcttatcttcttgagtgtttgaggtattgtgggaaatccagaagcaggtgtccagcaggcagccaaaaactccgatcttatgagagaggctggtgagaagctatcagaaagctatactaagttagcatgtctctttgaaaggacaactcatagtaagcttagtcagatgcttgatttgtgtctgcaatgtatattaatatttcacagataggttgtggatgactgagagagagcatgcatcttgcccatgctgttggatacaaggacaaattctcatgtggttgggatacctggtctagatgtcttgccata

SEQ ID NO: 91281 - DNA, 419 bp, Homo sapiens
ctgtaagagctgggcaagtaggcacacacactggtaggtgggtacatgctgggcatatgaggtggagaaactctccgtgattgctgacggacaccactagcccattctacacccttttgagatagaaagaggccaccccctcctccagacagacacagccttcatacagcttggccaggaagccacagtctagatttcactgcctcactggggcaattttgtatagagtacaacgtacccatcatccagagaagccctgatcactggactaactttgtgcacagaaaacaggcttgattcccatctactgtggtagatcttccgcttctaactcgggtcaaatttggttcaattcacccctaagatagggacggcacacaagtttcatccccaacatcattttggattacttggaagag

SEQ ID NO: 91282 - DNA, 496 bp, Homo sapiens
tcgacggtaccaacaggaaaatgctgaaaggaaccaaattggatgaactcataagcttcagaatatctaagcaaaagtagaattcctgcctttagggaagagtaactttcttttggaaaagcatcagaaatggcaaaagtcacacattatccgaaatatgaacctcacttacaaaatcctcgcaggcattctgaatgtcagctattgcaaaatggcaaagcaaactggtctttgaatgtgttggaaaacaagtttctctggttctgaagtcactagagctttaaccaagacaatcagccggtgactaagacaacaatctacagtctgctggatagatctgctgtcaccttctaagaaggacattatagaattctgaggggtcccaagtactaccaatctaatctaattttataggcttagcaagatagtactgggccagtggctcacatctgtaatcccagcactttgggaggctgagacgagcaaattgcttgag

SEQ ID NO: 91283 - DNA, 297 bp, Homo sapiens
aaaatatcacaaggcaaatggaggcagggcgagatcataggaccacaggactggggcaaaattaaaattgctaatgaagttttgggcacgcattgtcattgataacatcttatcaggagacagggtttgagagcagacaaccagtctgaccaaaatttattaggcgggaatttcttcgtcctaataagcctgggagcgctacaggagaccggggcttatttcgttccttacacaactgtaaaagacagccgttcctaaagtggccattttagagacctccccttgggaacgcattct

SEQ ID NO: 91284 - DNA, 442 bp, Homo sapiens
ttattggcaattatgtgttaaaccctgtgccagctatgttaagaaaaacatagaatgatgggttaccacaccccaatttttattaaaagtttacatctatacatttaaaaattcacgtacatgcttagtagtaatagtatgcatgagaaaaattcatattgttattaacatttgagatatttccaagaatttgtttaattttttttctttttgtttgtattatgaaatcacacagcctcctttgagctccttgaagggatttttgtcctctgggatgccctttaccagtggatcctcgccagatcgttcttcaacgtaatctcttacttcttcacaacatttggaaaccttaaggggaaggaaaaagggatgactcatttggtttaaaacagaatactccagatgccaggaatttatttattacaataaattttcaggttgt

SEQ ID NO: 91285 - DNA, 244 bp, Homo sapiens
atttcttcataatttttaaatccctttcatacaaattacaatcccatgaggctaatagggaaaacattattgtttccgttttacagataagaaaagggagcccaactgtagtttagagcagcgagtcagaacaagagctcaggtcttacttgagattcagggctgccttcaaagtttattcccaaatggtctatgctattgagggtcctgggtttttggggttttgtcactctagggactacca

SEQ ID NO: 91286 - DNA, 158 bp, Homo sapiens
gtgattctcccacctcagtctccccagttgctaggactacagaattgtcccactatggctaattttattttttggcggggggtgggggcggtagacaagctcctgctatgttgttgtgggctgatcttgaactcctggtttcaagcaatcctcctgcc

SEQ ID NO: 91287 - DNA, 486 bp, Homo sapiens
gcactttggaggcatctactagaaacaaagtaccctgtgacatgctggaagggatctccggacagtaaaacatacaaggaacagacccagggcaaactgtacttattcatgatgggccctgaagtgtgaaggggtttattcaaaagaagtaggtaggtggcattccaggtaaaggggacattgtgggcaaagacatggggatgaaacgtgtgctgtgtcaactcagggttaaatggattaagggcagtgcaagatgtgctttgttaaacagatgcttgaaggcagcatgctccttaagagtcatcaccactccctaatctcaagtacccagggacacaaacactgccgaaggccacagggacctctgcctaggaaaacagagacctttgttcacgtgtttatctgctgaccttctctccactattatcctgtgaccctgccacatccccctctctgagaaacacccaagaatgatcaataaatact

SEQ ID NO: 91288 - DNA, 252 bp, Homo sapiens
gtgtgtacaacatgaaatttattgtctcacattaactggaagttcaaaggtagagacatgtgacttagcagctgagtgacatcatcaggtacatgttgccctgtctgtactgtgctgtcctctttgtcacctttattccaaggctggctcccctaactgtcgtcatgatttactgtagagtctgaacttagaattggtaactaatccaaggaagcttcctttcttgttccttaactgtagcccagggagatc

SEQ ID NO: 91289 - DNA, 1585 bp, Homo sapiens
  misc_feature (880)..(880): n is a, c, g, or t
gttttttttttaaacgtttccaaggagtgggaaggttttaatgagcatcccagaggaccaggggatacaaactccaaatccagcctttatatcatcattatttcaagcaacaggaggaggctcagccttgcttagctcattcccagatgaagaggcagctggagggaagtccctgaaatccctctctacccagcagaggggctaagggaaagtggagacggtctctctgctgctgctgctgctgctgctgctgctgctgctgctaccactgccaccaagagcagggagacttcaagcgccaagctgacctttggaggtcaggacggacccagaatcaggcaggaatttggcaggcccgcggcggcgtaggacggaggcgtcgctagggtcttgttctcttggccaggctggagtgctgtgggaaaatctgggctcactgcagcctcaacctccgggactcaagtgatcatcctgcctcagccacccagagtagctgagaatacaggcgtgcgccaccaggctcgggcagcttcgaaccagtgcaatgacgatgccagtcaacggggcccacaaggatgctgacctgtggtcctcacatgacaagatgctggcacaacccctcaaagacagtgatgttgaggtttacaacatcattaagaaggagagtaaccggcagagggttggattggagctgattgcctcggagaatttcgccagccgagcagttttggaggccctaggctcttgcttaaataacaaatactctgaggggtacccgggccagagatactatggcgggactgagtttattgatgaactggagaccctctgtcagaagcgagccctgcaggcctataagctggacccacagtgctggggngtcaacgtccagccctactcaggctcccctgcaaactttgctgtgtacactgccctggtggaaccccatgggcgcatcatgggcctggaccttccggatgggggccacctgacccatgggttcatgacagacaagaagaaaatctctgccacgtccatcttctttgaatctatgccctacaaggtgaacccagatactggctacatcaactatgaccagctggaggagaacgcacgcctcttccacccgaagctgatcatcgcaggaaccagctgctactcccgaaacctggaatatgcccggctacggaagattgcagatgagaacggggcgtatctcatggcggacatggctcacatcagcgggctggtggcggctggcgtggtgccctccccatttgaacactgccatgtggtgaccaccaccactcacaagaccctgcgaggctgccgagctggcatgatcttctacaggaaaggagtgaaaagtgtggatcccaagactggcaaagagattctgtacaacctggagtctcttatcaattctgctgtgttccctggcctgcagggaggtccccacaaccacgccattgctggggttgctgtggcactgaagcaagctatgactctggaatttaaagtttatcaacaccaggtggtggccaactgcagggctctgtctgaggccctgacggagctgggctac

SEQ ID NO: 91290 - DNA, 411 bp, Homo sapiens
gaccagcagcatcagtggcatctgggagccgtgaggagcacactctgtcagaccccaccccagacctgctgaaatagaaactctcgggatggggctagcaacctgtgtttgatcagtcactcctccaggtgattctgacgaactcaaaagtatgagaattggccggacactcatgcctgtaatcccagcactttgggaggcagaggcaggtggaccatctgaggtcaggaattcgagaccagcctggccaacatggacaaaccccatctctactaaaaatacaaaaattggctgggcctggtggtacacgcctgtaatcccagctactcgggaagctgaggcaggagaatcgcttgaacccaggaggcaggggttgcagtgagttcagattgcaccactgcactccagcct

SEQ ID NO: 91291 - DNA, 1820 bp, Homo sapiens
ctgtgctagtatctcatgctaaaatggtgaaattattttttctcatattcttatgtgaaccaaattaagggttactcgtgtctattttttctcaaaatggaaatgttttttattataaaatccatgctctttgaaaaattcagcctgtattgaagtacataaaatacaaaaatgaaagtcattttgactcccactccccagagataatcaccatgtacagttaattccttgtttaaaacgagagaaggcaacatttgatcacagctgtgtgtgcctcactctgcctggggatggcctgtggtgattcatggactcatgttctctgttcacattactcaggttggtaagaattgccaggtagaggaaaggggagtgttttgcattgggctgatttaaaattatttgattaactgggctgctattttaggtttgtccttattaaatacttactgtatcatggtgggctatttttcatactttgttcatgttaatgttgttgcccagcctctgatggattgatttacagcagccaaacacatgaaaactgggtatacttgccatgaagaccactgccaatatatccctgtgctgatatgggatggggttcctcttgatcagcaccaaagattgcatgctgaacatatggaaaggaaattggacgaaagaagggtcaatgaccgctgttttcagatgtggcatggaagagactgatactggggaggaagcggcagggtctcactccttagccatgtgtatttaagaagaatgaactgtgaagaagttgatgatgatctaaaaacagagccccaaaatagtacatagaaagttaattacaacattggttatttgagagtgttggggacgtgggtggtttttatactactctgtctttgaatttaaaatagttttcaaaataaaatttgaagattaaagaattaaccagattttcttttgtctatatgagatgcatgcagtcgtttttagagatgagttccatccccactttgaatctgaagtattagaagaggcatgctctggtggacagtggggagttagcagatggaaggggatttagggaagggactggacattcttcctgcaagatggagcagtaagagaatgatgagagcttttagattcatgaaaaaggtgactctaggaggcttagaatgttccaaaggggcacttcagctaatagtcatattcagaagagtgttgtctggtttacacaaactgaaacttagggctttgaatcaagagtctcagcttctacttacaagataagcagttttggggaagtcagccactgaacctgtttcttcatttgcaaaatgaggataataaaatacctatctcagggtggttgtgagatcagttgtataatgtatgggaaaatgctttaaattttaattttaattttaatttccaaccactatataaaagttgccatgattgaaataaacaaaaaattgataagcaaaataaaacttacctgtttaaacatttattcattcaaaaatcccgagctcaagcaatcctcctgcctcggtctcccaaagtgttaggattacaggcgtgagccactgcactcggcctccttcaagtatttttaaattaatgtctttttttctgttcaaatttagtgtacatgttccccccaagagttgtaatgaaactaaaactgtcttttgcttttgatgcctttgttcaatatgaaaagcctgaataaatggctggatgtcttcatcttcaaatttaaaaaatgattcaagtatatattattgagttttattagaatggaaagctcttaatttcttgat

SEQ ID NO: 91292 - DNA, 447 bp, Homo sapiens
aatttataattaggaaggagtgggtatacttgccatgaagaccactgccaatatatccctgtgctgatatgggatggggttcctcttgatcagcaccaaagattgcatgctgaacatatggaaaggaaattggacgaaagaagggtcaatgaccgctgttttcagatgtggcatggaagagactgatactggggaggaagcggcagggtctcactccttagccatgtgtatttaagaagaatgaactgtgaagaagttgatgatgatctaaaaacagagccccaaaatagtacatagaaagttaattacaacattggttatttgagagtgttggggacgtgggtggtttttatactactctgtctttgaatttaaaatagttttcaaaataaaatttgaagattaaagaattaaccagattttcttttgtctatatgagatgcatgc

SEQ ID NO: 91293 - DNA, 408 bp, Homo sapiens
gacccctagacagatacagagagaacttcagagacaagtccaggctctaccatgtctaatctgtgactttgggcaagttgcacattctcatagtctctgatcttcattcttttaaactgtattagtattcccaaacccaggggtttttgaataatgaatgaaaatatttgatattaagctctacaaatgtaagtgacgtccatcattgtgatggcacctggaggccaactgagtcactgggagccttccttccctgtgagagtcctgggagtccaagtagcttttcgcacagctgtccaccttacatagacatggcctgtgctctcactcccagctttgtgcctggtattgttctgtctgcagctcctccctcccacatttctggtatttgagtattcccaagcagcc

SEQ ID NO: 91294 - DNA, 359 bp, Homo sapiens
ccaccccctccaagctggggagtaggaatttgcagtggtggtgctgggtgtactctgggggcaccaggggtctggaaagggcccagaagttgggtgagaaatgcataggggggacctaatttgttggggttttaaaatatatattttctaaagtttgggactcctataacaatttttaaaacctgtgtcttaaagctacatacacaaaagcagcggtcctctggctctctccccacgtctctaggcctgctctctaatgtgagctcctaggtatttaattcatcatcacctgaaatgtgcttttaccccctcccttaattcactgtatagcccctaatgactccttgctgatagctgag

SEQ ID NO: 91295 - DNA, 433 bp, Homo sapiens
attattttggtgacttctagagttgtgttggttgcaaatctctgttacaaccctgacccccaaactgtgtccctaggattggcttccttttactagaggtccctgtcccctgaagcacaacccttaatctcttaatatagtggcttctgagtcactcctgtgtttggcccccagggaaccctcagggcagctctgctgtccttttcttatttgccaggctttgcttctggcctgaattaattactgacttatgagggttaatggaaaccaggcagcctttttgagtctcacccaaagaagcatctgtttctcatctttaccatgtagggagggccgggggtagtgaagcaccctctagccatcttgcctctgccccatagctcccagtaagtggttcagggacaaagtgtgtgatctgatcatgtcaaccaag

SEQ ID NO: 91296 - DNA, 6006 bp, Homo sapiens
tggagttgactcttctgctcgcactgctgctgcagcacaaacgtgacttccaacattttttatttatctttcccttttcttttccaagatgtaactacggatcagacactaaggaccttcacgtttcgctgatgtagtttttggaggaaaaaggggggggagtgaagggcgtcggtttttttttgtgtgtgtgtgtatgtgtttcgggggaaattttccattatgagtgttttactaaagtgaatttttttttgtttgcttcgttcgtctttggctctttttttttccttcccaatttcggatttatttcaaggcgaatctggctttgggggaagaggaagaaaagtcggattacaagatcaaccaccaccaacaacaataaaaaccaccaggatatttttttgcaaatttctgacggctttaaattcatgaagcaattgtccccttttgcaatcagcatttggatctcagaatgagcaaggaaagacccaagaggaatatcattcagaagaaatacgatgacagtgatgggattccgtggtcagaagaacgggtggtacgtaaagtcctttatttgtctctgaaggagttcaagaattcccagaagaggcagcatgcggaaggcattgctgggagcctgaaaactgtgaatgggctccttggtaatgaccagtctaagggattaggaccagcatcagaacagtcagagaatgaaaaggacgatgcatcccaagtgtcctccactagcaacgatgttagttcttcagattttgaagaagggccgtcgaggaaaaggcccaggctgcaagcacaaaggaagtttgctcagtctcagccgaatagtcccagcacaactccagtaaagatagtggagccattgctaccccctccagctactcagatatcagacctctctaaaaggaagcctaagacagaagattttcttacctttctctgccttcgaggttctcctgcgctgcccaacagcatggtgtattttggaagctctcaggatgaggaggaagtcgaggaggaagatgatgagacagaagacgtcaaaacagccaccaacaatgcttcatcttcatgccagtcgacccccaggaaaggaaaaacccacaaacatgttcacaacgggcatgttttcaatggttccagcaggtcaacacgggagaaggaacctgttcaaaaacacaaaagcaaagaggccactcccgcaaaggagaagcacagcgatcaccgggctgacagccgccgggagcaggcttcagctaaccaccccgcagcggccccctccacgggttcctcggccaaggggcttgctgccacccatcaccacccccctctgcatcggtcggctcaggacttacggaaacaggtttctaaggtaaacggagtcactcgaatgtcatctctgggtgcaggtgtaaccagtgccaaaaagatgcgcgaggtcagaccttcaccatccaaaactgtgaagtacactgccacggtgacgaagggggctgtcacatacaccaaagccaagagagaactggtcaaggacaccaaacccaatcaccacaagcccagttccgctgtcaaccacacaatctcagggaaaactgaaagtagcaatgcaaaaacccgcaaacaggtgctatccctcgggggggcgtccaagtccactgggcccgccgtcaatggcctcaaggtcagtggcaggttgaacccaaagtcatgcactaaggaggtgggggggcggcagctgcgggagggcctgcagctgcgggaggggctgcggaactccaagaggagactggaagaggcacaccaggcggagaagccgcagtcgccccccaagaagatgaaaggggcggctggccccgccgaaggccctggcaagaaggccccggccgagagaggtctgctgaacggacacgtgaagaaggaagtgccggagcgcagtctggagaggaatcggccgaagcgggccacggccgggaagagcacgccaggcagacaagcacatggcaaggcggacagcgcctcctgtgaaaatcgttctacctcgcaaccggagtccgtgcacaagccgcaggactcgggcaaggccgagaagggcggcggcaaggccgggtgggcggccatggacgagatccccgtcctcaggccctccgccaaggagttccacgatccgctcatctacatcgagtcggtccgcgctcaggtggagaagttcgggatgtgcagggtgatcccccctccggactggcggcccgagtgcaagctcaacgatgagatgcggtttgtcacgcagattcagcacatccacaagctgggccggcgctggggccccaacgtgcagcggctggcctgcatcaagaagcacctcaaatctcagggcatcaccatggacgagctcccgctcatagggggctgtgagctcgacctggcctgctttttccggctgattaatgagatgggcggcatgcagcaagtgactgacctcaaaaaatggaacaaactagcagacatgctgcgcatccccagaactgcccaggaccggctggccaagctgcaggaggcctactgccagtacctactctcctacgactccctgtccccagaggagcaccggcggctggagaaggaggtgctgatggagaaggagatcctggagaagcgcaaggggccgctggaaggccacacagagaacgaccaccacaagttccaccctctgccccgcttcgagcccaagaatgggctcatccacggcgtggcccccaggaacggcttccgcagcaagctcaaggaggtgggccaggcccagttgaagactggccggcggcgactcttcgctcaggaaaaagaagtggtcaaggaagaggaggaggacaaaggcgtcctcaatgacttccacaagtgcatctataagggaaggtctgtttctctaacaactttttatcgaacagcgaggaatatcatgagcatgtgtttcagcaaggagcctgccccagccgaaatcgagcaagagtactggaggctagtggaagagaaggactgccacgtggcagtgcactgcggcaaggtggacaccaacactcacggcagtggattcccagtaggaaaatcagaacccttttcgaggcatggatggaacctcaccgtcctccccaataacacagggtccatcctgcgtcacctcggtgctgtgcctggagtgactattccctggctaaatattggcatggtcttttctacctcatgctggtctcgagaccaaaatcaccttccatacattgactacttacacactggtgctgactgcatttggtattgcattcctgctgaggaggagaacaagctggaagatgtggtccacaccctgctgcaagccaatggcaccccagggctgcagatgctggaaagcaacgtcatgatctccccggaggtgctgtgcaaagaggggatcaaggtgcacaggaccgtgcagcagagtggccagtttgtcgtctgcttcccgggatcctttgtgtccaaagtgtgctgtgggtacagcgtgtctgaaaccgtgcactttgctaccacccagtggacaagtatgggctttgagaccgccaaggaaatgaagcgtcgccatatagctaagccattctccatggagaagttactctaccagattgcacaagcagaagcaaaaaaagaaaacggtcccactctcagtaccatctcagccctcctggatgagctcagggatacagagctacggcagcgcaggcagctgttcgaggctggcctccactcctccgcacgctatggcagccacgatggcagcagcacggtggcggacgggaagaaaaagcctcgaaagtggctgcagttggagacgtcagagaggaggtgtcagatctgccagcacctgtgctacctgtccatggtggtacaagagaacgaaaacgtcgtgttctgtctggagtgtgctctgcgccacgtggagaaacagaagtcctgccgagggctgaagttgatgtaccgctacgatgaggaacagattatcagtctggtcaatcagatctgcggcaaagtgtctggtaaaaacggcagcattgagaactgtctcagtaaacccacaccaaaaagaggtccccgcaagagagcgacagtggacgtgcccccctcccgtctgtcagcctccagttcatccaaaagtgcttcgagctcatcatgaagatgccaacgcccgtggtcgatttatatatatttttttgtaattattatattctagtttggagtacttgctgtaggattcaagctgtctttgcactagctctaaagaagattttcttctggttttagagaactaattttgttttagcattaaactgttgaacttttttttgtacttagaaaacctagatactgcagtcagattttggaaactgccgtatagtcactgttttaaaaaccccggaggggctgtattaatttgtattgccccatggctgacaaaagcctttttttttggttttgatttttttttttttgtaactgttggggggaaaaaggctttttaacccatttttgaagagggtgaagtttggagaacaaatttaaaaaccatcagtcatgtgagcagattttttagaagggataggagacacacgcgcacacacacacacacacacgaaacttgaaatggctttgctttggctgtcgtcttctgccgtgtgccagatgagcttgtgatctgggaagccggggcacccccgttttgtttctctgggcggttgtggcagctgaaggcggacgttgtttcctaaccataggtggaacgaggagacgggagcgagtgggctctccaccagcacatcactatgcatctgttccaggaaagaagaaaagcgagcgaggaagacggaaaagactgcctgccttggaggggtcacatgagggagacctgtgcctgatttcattaggaaatccattctgttattttttggtgctgttggctactttatcaaaaaacccttcaatagcatccttaagatttaaaaaaaaaaaaaaaaaaaaaaggaaaaaaaagtgatggaagccgtaagtgcttctttgtcatcgacgtgcaatctttctaacattccatctccatctcaccgcttcttgtttgacaccttcacaagtcagcattaatctttcttttaaaacttgtttcatttatgatcatgtagagagccactaggaggcctgcagttatttttgaatgtgaaaatgcatttgcgttcatcttgtctattttttctcttcatgttgtaacaaaaaggaaaaaagaaaaaaaaatcccatcccttttgtacatatgcctgtaaattgttttaaatacttgagcctttttctcggtggggggtggggaggggggtgagaagacaagatgaagaaaagccttacatttcagtttcttcatcggttggattggatgcttacagggtttttcttgtaacatttataagtgctgcttacatcactgaacaacaacaaaaaaataataatggagtagctgttgcccttctccggttgtgtgtacagtatgtgtggaataaaaaagggaaactgttttcacaagctgttctttgtttcataattggattcatcaatcccgtagctacccatattgcactgagcttgccagtggtgactgccaggaacgtcctatgatccactttgttggttgttgttgcagaagactgaactgttttggaatatttaacaattacagaaacagtcaagtgttttccaatgtggttgtccggtttctatggccttgctgtgtactttccctctttttgacagtaaacttctgcctatggcttacagtttgacatttaatttattagcgctgctctgcacccctcccttgggagggagacttcatgtggtttattgcgagttttttgtttacttttcaggtttgtactacaaggtttaataataaaaacaaagttttttggacatttgtctgtcttgtgg

SEQ ID NO: 91297 - DNA, 845 bp, Homo sapiens
tggagttgactcttctgctcgcactgctgctgcagcacaaacgtgacttccaacattttttatttatctttcccttttcttttccaagatgtaactacggatcagacactaaggaccttcacgtttcgctgatgtagtttttggaggaaaaaggggggggagtgaagggcgtcggtttttttttgtgtgtgtgtgtatgtgtttcgggggaaattttccattatgagtgttttactaaagtgaatttttttttgtttgcttcgttcgtctttggctctttttttttccttcccaatttcggatttatttcaaggcgaatctggctttgggggaagaggaagaaaagtcggattacaagatcaaccaccaccaacaacaataaaaaccaccaggatatttttttgcaaatttctgacggctttaaattcatgaagcaattgtccccttttgcaatcagcatttggatctcagaatgagcaaggaaagacccaagaggaatatcattcagaagaaatacgtaagtgctcctaacaacacatcctttgacttgcagttttaagcaatggctgtgaatgtcaagtttatagataattctgcctctgaagggttttaaacacagcgtccgataaggctgtttcttttttttctgaaagagggcttttcaagcaaagtggtgtctgcctagtttggttgaaaaaacagactggtgtagagatacctcaagtgaataaattgacctcgaatgacacaaccataatctacttttagatgaaaggcaagggattttggtggagcttgaggtggggggtggctgcggtaatgtaactaaactgcattctcaagcg

SEQ ID NO: 91298 - DNA, 5817 bp, Homo sapiens
tggagttgactcttctgctcgcactgctgctgcagcacaaacgtgacttccaacattttttatttatctttcccttttcttttccaagatgtaactacggatcagacactaaggaccttcacgtttcgctgatgtagtttttggaggaaaaaggggggggagtgaagggcgtcggtttttttttgtgtgtgtgtgtatgtgtttcgggggaaattttccattatgagtgttttactaaagtgaatttttttttgtttgcttcgttcgtctttggctctttttttttccttcccaatttcggatttatttcaaggcgaatctggctttgggggaagaggaagaaaagtcggattacaagatcaaccaccaccaacaacaataaaaaccaccaggatatttttttgcaaatttctgacggctttaaattcatgaagcaattgtccccttttgcaatcagcatttggatctcagaatgagcaaggaaagacccaagaggaatatcattcagaagaaatacgatgacagtgatgggattccgtggtcagaagaacgggtggtacgtaaagtcctttatttgtctctgaaggagttcaagaattcccagaagaggcagcatgcggaaggcattgctgggagcctgaaaactgtgaatgggctccttggtaatgaccagtctaagggattaggaccagcatcagaacagtcagagaatgaaaaggacgatgcatcccaagtgtcctccactagcaacgatgttagttcttcagattttgaagaagggccgtcgaggaaaaggcccaggctgcaagcacaaaggaagtttgctcagtctcagccgaatagtcccagcacaactccagtaaagatagtggagccattgctaccccctccagctactcagatatcagacctctctaaaaggaagcctaagacagaagattttcttacctttctctgccttcgaggttctcctgcgctgcccaacagcatggtgtattttggaagctctcaggatgaggaggaagtcgaggaggaagatgatgagacagaagacgtcaaaacagccaccaacaatgcttcatcttcatgccagtcgacccccaggaaaggaaaaacccacaaacatgttcacaacgggcatgttttcaatggttccagcaggtcaacacgggagaaggaacctgttcaaaaacacaaaagcaaagaggccactcccgcaaaggagaagcacagcgatcaccgggctgacagccgccgggagcaggcttcagctaaccaccccgcagcggccccctccacgggttcctcggccaaggggcttgctgccacccatcaccacccccctctgcatcggtcggctcaggacttacggaaacaggtttctaaggtaaacggagtcactcgaatgtcatctctgggtgcaggtgtaaccagtgccaaaaagatgcgcgaggtcagaccttcaccatccaaaactgtgaagtacactgccacggtgacgaagggggctgtcacatacaccaaagccaagagagaactggtcaaggacaccaaacccaatcaccacaagcccagttccgctgtcaaccacacaatctcagggaaaactgaaagtagcaatgcaaaaacccgcaaacaggtgctatccctcgggggggcgtccaagtccactgggcccgccgtcaatggcctcaaggtcagtggcaggttgaacccaaagtcatgcactaaggaggtgggggggcggcagctgcgggagggcctgcagctgcgggaggggctgcggaactccaagaggagactggaagaggcacaccaggcggagaagccgcagtcgccccccaagaagatgaaaggggcggctggccccgccgaaggccctggcaagaaggccccggccgagagaggtctgctgaacggacacgtgaagaaggaagtgccggagcgcagtctggagaggaatcggccgaagcgggccacggccgggaagagcacgccaggcagacaagcacatggcaaggcggacagcgcctcctgtgaaaatcgttctacctcgcaaccggagtccgtgcacaagccgcaggactcgggcaaggccgagaagggcggcggcaaggccgggtgggcggccatggacgagatccccgtcctcaggccctccgccaaggagttccacgatccgctcatctacatcgagtcggtccgcgctcaggtggagaagttcgggatgtgcagggtgatcccccctccggactggcggcccgagtgcaagctcaacgatgagatgcggtttgtcacgcagattcagcacatccacaagctgggccggcgctggggccccaacgtgcagcggctggcctgcatcaagaagcacctcaaatctcagggcatcaccatggacgagctcccgctcatagggggctgtgagctcgacctggcctgctttttccggctgattaatgagatgggcggcatgcagcaagtgactgacctcaaaaaatggaacaaactagcagacatgctgcgcatccccagaactgcccaggaccggctggccaagctgcaggaggcctactgccagtacctactctcctacgactccctgtccccagaggagcaccggcggctggagaaggaggtgctgatggagaaggagatcctggagaagcgcaaggggccgctggaaggccacacagagaacgaccaccacaagttccaccctctgccccgcttcgagcccaagaatgggctcatccacggcgtggcccccaggaacggcttccgcagcaagctcaaggaggtgggccaggcccagttgaagactggccggcggcgactcttcgctcaggaaaaagaagtggtcaaggaagaggaggaggacaaaggcgtcctcaatgacttccacaagtgcatctataagggaaggtctgtttctctaacaactttttatcgaacagcgaggaatatcatgagcatgtgtttcagcaaggagcctgccccagccgaaatcgagcaagagtactggaggctagtggaagagaaggactgccacgtggcagtgcactgcggcaaggtggacaccaacactcacggcagtggattcccagtaggaaaatcagaacccttttcgaggcatggatggaacctcaccgtcctccccaataacacagggtccatcctgcgtcacctcggtgctgtgcctggagtgactattccctggctaaatattggcatggtcttttctacctcatgctggtctcgagaccaaaatcaccttccatacattgactacttacacactggtgctgactgcatttggtattgcattcctgctgaggaggagaacaagctggaagatgtggtccacaccctgctgcaagccaatggcaccccagggctgcagatgctggaaagcaacgtcatgatctccccggaggtgctgtgcaaagaggggatcaaggtgcacaggaccgtgcagcagagtggccagtttgtcgtctgcttcccgggatcctttgtgtccaaagtgtgctgtgggtacagcgtgtctgaaaccgtgcactttgctaccacccagtggacaagtatgggctttgagaccgccaaggaaatgaagcgtcgccatatagctaagccattctccatggagaagttactctaccagattgcacaagcagaagcaaaaaaagaaaacggtcccactctcagtaccatctcagccctcctggatgagctcagggatacagagctacggcagcgcaggcagctgttcgaggctggcctccactcctccgcacgctatggcagccacgatggcagcagcacggtggcggacgggaagaaaaagcctcgaaagtggctgcagttggagacgtcagagaggaggtgtcagatctgccagcacctgtgctacctgtccatggtggtacaagagaacgaaaacgtcgtgttctgtctggagtgtgctctgcgccacgtggagaaacagaagtcctgccgagggctgaagttgatgtaccgctacgatgaggaacagattatcagtctggtcaatcagatctgcggcaaagtgtctggtaaaaacggcagcattgagaactgtctcagtaaacccacaccaaaaagaggtccccgcaagagagcgacagtggacgtgcccccctcccgtctgtcagcctccagttcatccaaaagtgcttcgagctcatcatgaagatgccaacgcccgtggtcgatttatatatatttttttgtaattattatattctagtttggagtacttgctgtaggattcaagctgtctttgcactagctctaaagaagattttcttctggttttagagaactaattttgttttagcattaaactgttgaacttttttttgtacttagaaaacctagatactgcagtcagattttggaaactgccgtatagtcactgttttaaaaaccccggaggggctgtattaatttgtattgccccatggctgacaaaagcctttttttttggttttgatttttttttttttgtaactgttggggggaaaaaggctttttaacccatttttgaagagggtgaagtttggagaacaaatttaaaaaccatcagtcatgtgagcagattttttagaagggataggagacacacgcgcacacacacacacacacacgaaacttgaaatggctttgctttggctgtcgtcttctgccgtgtgccagatgagcttgtgatctgggaagccggggcacccccgttttgtttctctgggcggttgtggcagctgaaggcggacgttgtttcctaaccataggtggaacgaggagacgggagcgagtgggctctccaccagcacatcactatgcatctgttccaggaaagaagaaaagcgagcgaggaagacggaaaagactgcctgccttggaggggtcacatgagggagacctgtgcctgatttcattaggaaatccattctgttattttttggtgctgttggctactttatcaaaaaacccttcaatagcatccttaagatttaaaaaaaaaaaaaaaaaaaaaaggaaaaaaaagtgatggaagccgtaagtgcttctttgtcatcgacgtgcaatctttctaacattccatctccatctcaccgcttcttgtttgacaccttcacaagtcagcattaatttgagcctttttctcggtggggggtggggaggggggtgagaagacaagatgaagaaaagccttacatttcagtttcttcatcggttggattggatgcttacagggtttttcttgtaacatttataagtgctgcttacatcactgaacaacaacaaaaaaataataatggagtagctgttgcccttctccggttgtgtgtacagtatgtgtggaataaaaaagggaaactgttttcacaagctgttctttgtttcataattggattcatcaatcccgtagctacccatattgcactgagcttgccagtggtgactgccaggaacgtcctatgatccactttgttggttgttgttgcagaagactgaactgttttggaatatttaacaattacagaaacagtcaagtgttttccaatgtggttgtccggtttctatggccttgctgtgtactttccctctttttgacagtaaacttctgcctatggcttacagtttgacatttaatttattagcgctgctctgcacccctcccttgggagggagacttcatgtggtttattgcgagttttttgtttacttttcaggtttgtactacaaggtttaataataaaaacaaagttttttggacatttgtctgtcttgtgg

SEQ ID NO: 91299 - DNA, 6137 bp, Homo sapiens
tggagttgactcttctgctcgcactgctgctgcagcacaaacgtgacttccaacattttttatttatctttcccttttcttttccaagatgtaactacggatcagacactaaggaccttcacgtttcgctgatgtagtttttggaggaaaaaggggggggagtgaagggcgtcggtttttttttgtgtgtgtgtgtatgtgtttcgggggaaattttccattatgagtgttttactaaagtgaatttttttttgtttgcttcgttcgtctttggctctttttttttccttcccaatttcggatttatttcaaggcgaatctggctttgggggaagaggaagaaaagtcggattacaagatcaaccaccaccaacaacaataaaaaccaccaggatatttttttgcaaatttctgacggctttaaattcatgaagcaattgtccccttttgcaatcagcatttggatctcagaatgagcaaggaaagacccaagaggaatatcattcagaagaaatacgatgacagtgatgggattccgtggtcagaagaacgggtggtacgtaaagtcctttatttgtctctgaaggagttcaagaattcccagaagaggcagcatgcggaaggcattgctgggagcctgaaaactgtgaatgggctccttggtaatgaccagtctaagggattaggaccagcatcagaacagtcagagaatgaaaaggacgatgcatcccaagtgtcctccactagcaacgatgttagttcttcagattttgaagaagggccgtcgaggaaaaggcccaggctgcaagcacaaaggaagtttgctcagtctcagccgaatagtcccagcacaactccagtaaagatagtggagccattgctaccccctccagctactcagatatcagacctctctaaaaggaagcctaagacagaagattttcttacctttctctgccttcgaggttctcctgcgctgcccaacagcatggtgtattttggaagctctcaggatgaggaggaagtcgaggaggaagatgatgagacagaagacgtcaaaacagccaccaacaatgcttcatcttcatgccagtcgacccccaggaaaggaaaaacccacaaacatgttcacaacgggcatgttttcaatggttccagcaggtcaacacgggagaaggaacctgttcaaaaacacaaaagcaaagaggccactcccgcaaaggagaagcacagcgatcaccgggctgacagccgccgggagcaggcttcagctaaccaccccgcagcggccccctccacgggttcctcggccaaggggcttgctgccacccatcaccacccccctctgcatcggtcggctcaggacttacggaaacaggtttctaaggtaaacggagtcactcgaatgtcatctctgggtgcaggtgtaaccagtgccaaaaagatgcgcgaggtcagaccttcaccatccaaaactgtgaagtacactgccacggtgacgaagggggctgtcacatacaccaaagccaagagagaactggtcaaggacaccaaacccaatcaccacaagcccagttccgctgtcaaccacacaatctcagggaaaactgaaagtagcaatgcaaaaacccgcaaacaggtgctatccctcgggggggcgtccaagtccactgggcccgccgtcaatggcctcaaggtcagtggcaggttgaacccaaagtcatgcactaaggaggtgggggggcggcagctgcgggagggcctgcagctgcgggaggggctgcggaactccaagaggagactggaagaggcacaccaggcggagaagccgcagtcgccccccaagaagatgaaaggggcggctggccccgccgaaggccctggcaagaaggccccggccgagagaggtctgctgaacggacacgtgaagaaggaagtgccggagcgcagtctggagaggaatcggccgaagcgggccacggccgggaagagcacgccaggcagacaagcacatggcaaggcggacagcgcctcctgtgaaaatcgttctacctcgcaaccggagtccgtgcacaagccgcaggactcgggcaaggccgagaagggcggcggcaaggccgggtgggcggccatggacgagatccccgtcctcaggccctccgccaaggagttccacgatccgctcatctacatcgagtcggtccgcgctcaggtggagaagttcgggatgtgcagggtgatcccccctccggactggcggcccgagtgcaagctcaacgatgagatgcggtttgtcacgcagattcagcacatccacaagctgggccggcgctggggccccaacgtgcagcggctggcctgcatcaagaagcacctcaaatctcagggcatcaccatggacgagctcccgctcatagggggctgtgagctcgacctggcctgctttttccggctgattaatgagatgggcggcatgcagcaagtgactgacctcaaaaaatggaacaaactagcagacatgctgcgcatccccagaactgcccaggaccggctggccaagctgcaggaggcctactgccagtacctactctcctacgactccctgtccccagaggagcaccggcggctggagaaggaggtgctgatggagaaggagatcctggagaagcgcaaggggccgctggaaggccacacagagaacgaccaccacaagttccaccctctgccccgcttcgagcccaagaatgggctcatccacggcgtggcccccaggaacggcttccgcagcaagctcaaggaggtgggccaggcccagttgaagactggccggcggcgactcttcgctcaggaaaaagaagtggtcaaggaagaggaggaggacaaaggcgtcctcaatgacttccacaagtgcatctataagggaaggtctgtttctctaacaactttttatcgaacagcgaggaatatcatgagcatgtgtttcagcaaggagcctgccccagccgaaatcgagtgcccagctgagtccgtgtgaacttccagctgctgacgtcggtgggctctcagcagcgcttggtcgtggaaagggaaagaaaccaaacccggactgctggttcagggcagctgccggccggggaacaggagcaagagtactggaggctagtggaagagaaggactgccacgtggcagtgcactgcggcaaggtggacaccaacactcacggcagtggattcccagtaggaaaatcagaacccttttcgaggcatggatggaacctcaccgtcctccccaataacacagggtccatcctgcgtcacctcggtgctgtgcctggagtgactattccctggctaaatattggcatggtcttttctacctcatgctggtctcgagaccaaaatcaccttccatacattgactacttacacactggtgctgactgcatttggtattgcattcctgctgaggaggagaacaagctggaagatgtggtccacaccctgctgcaagccaatggcaccccagggctgcagatgctggaaagcaacgtcatgatctccccggaggtgctgtgcaaagaggggatcaaggtgcacaggaccgtgcagcagagtggccagtttgtcgtctgcttcccgggatcctttgtgtccaaagtgtgctgtgggtacagcgtgtctgaaaccgtgcactttgctaccacccagtggacaagtatgggctttgagaccgccaaggaaatgaagcgtcgccatatagctaagccattctccatggagaagttactctaccagattgcacaagcagaagcaaaaaaagaaaacggtcccactctcagtaccatctcagccctcctggatgagctcagggatacagagctacggcagcgcaggcagctgttcgaggctggcctccactcctccgcacgctatggcagccacgatggcagcagcacggtggcggacgggaagaaaaagcctcgaaagtggctgcagttggagacgtcagagaggaggtgtcagatctgccagcacctgtgctacctgtccatggtggtacaagagaacgaaaacgtcgtgttctgtctggagtgtgctctgcgccacgtggagaaacagaagtcctgccgagggctgaagttgatgtaccgctacgatgaggaacagattatcagtctggtcaatcagatctgcggcaaagtgtctggtaaaaacggcagcattgagaactgtctcagtaaacccacaccaaaaagaggtccccgcaagagagcgacagtggacgtgcccccctcccgtctgtcagcctccagttcatccaaaagtgcttcgagctcatcatgaagatgccaacgcccgtggtcgatttatatatatttttttgtaattattatattctagtttggagtacttgctgtaggattcaagctgtctttgcactagctctaaagaagattttcttctggttttagagaactaattttgttttagcattaaactgttgaacttttttttgtacttagaaaacctagatactgcagtcagattttggaaactgccgtatagtcactgttttaaaaaccccggaggggctgtattaatttgtattgccccatggctgacaaaagcctttttttttggttttgatttttttttttttgtaactgttggggggaaaaaggctttttaacccatttttgaagagggtgaagtttggagaacaaatttaaaaaccatcagtcatgtgagcagattttttagaagggataggagacacacgcgcacacacacacacacacacgaaacttgaaatggctttgctttggctgtcgtcttctgccgtgtgccagatgagcttgtgatctgggaagccggggcacccccgttttgtttctctgggcggttgtggcagctgaaggcggacgttgtttcctaaccataggtggaacgaggagacgggagcgagtgggctctccaccagcacatcactatgcatctgttccaggaaagaagaaaagcgagcgaggaagacggaaaagactgcctgccttggaggggtcacatgagggagacctgtgcctgatttcattaggaaatccattctgttattttttggtgctgttggctactttatcaaaaaacccttcaatagcatccttaagatttaaaaaaaaaaaaaaaaaaaaaaggaaaaaaaagtgatggaagccgtaagtgcttctttgtcatcgacgtgcaatctttctaacattccatctccatctcaccgcttcttgtttgacaccttcacaagtcagcattaatctttcttttaaaacttgtttcatttatgatcatgtagagagccactaggaggcctgcagttatttttgaatgtgaaaatgcatttgcgttcatcttgtctattttttctcttcatgttgtaacaaaaaggaaaaaagaaaaaaaaatcccatcccttttgtacatatgcctgtaaattgttttaaatacttgagcctttttctcggtggggggtggggaggggggtgagaagacaagatgaagaaaagccttacatttcagtttcttcatcggttggattggatgcttacagggtttttcttgtaacatttataagtgctgcttacatcactgaacaacaacaaaaaaataataatggagtagctgttgcccttctccggttgtgtgtacagtatgtgtggaataaaaaagggaaactgttttcacaagctgttctttgtttcataattggattcatcaatcccgtagctacccatattgcactgagcttgccagtggtgactgccaggaacgtcctatgatccactttgttggttgttgttgcagaagactgaactgttttggaatatttaacaattacagaaacagtcaagtgttttccaatgtggttgtccggtttctatggccttgctgtgtactttccctctttttgacagtaaacttctgcctatggcttacagtttgacatttaatttattagcgctgctctgcacccctcccttgggagggagacttcatgtggtttattgcgagttttttgtttacttttcaggtttgtactacaaggtttaataataaaaacaaagttttttggacatttgtctgtcttgtgg

SEQ ID NO: 91300 - DNA, 5552 bp, Homo sapiens
cacgaggcgagaaccgcagcccgactcccattccggactcgttgaggtggagagcagcgtggggatgacagtgatgggattccgtggtcagaagaacgggtggtacgtaaagtcctttatttgtctctgaaggagttcaagaattcccagaagaggcagcatgcggaaggcattgctgggagcctgaaaactgtgaatgggctccttggtaatgaccagtctaagggattaggaccagcatcagaacagtcagagaatgaaaaggacgatgcatcccaagtgtcctccactagcaacgatgttagttcttcagattttgaagaagggccgtcgaggaaaaggcccaggctgcaagcacaaaggaagtttgctcagtctcagccgaatagtcccagcacaactccagtaaagatagtggagccattgctaccccctccagctactcagatatcagacctctctaaaaggaagcctaagacagaagattttcttacctttctctgccttcgaggttctcctgcgctgcccaacagcatggtgtattttggaagctctcaggatgaggaggaagtcgaggaggaagatgatgagacagaagacgtcaaaacagccaccaacaatgcttcatcttcatgccagtcgacccccaggaaaggaaaaacccacaaacatgttcacaacgggcatgttttcaatggttccagcaggtcaacacgggagaaggaacctgttcaaaaacacaaaagcaaagaggccactcccgcaaaggagaagcacagcgatcaccgggctgacagccgccgggagcaggcttcagctaaccaccccgcagcggccccctccacgggttcctcggccaaggggcttgctgccacccatcaccacccccctctgcatcggtcggctcaggacttacggaaacaggtttctaaggtaaacggagtcactcgaatgtcatctctgggtgcaggtgtaaccagtgccaaaaagatgcgcgaggtcagaccttcaccatccaaaactgtgaagtacactgccacggtgacgaagggggctgtcacatacaccaaagccaagagagaactggtcaaggacaccaaacccaatcaccacaagcccagttccgctgtcaaccacacaatctcagggaaaactgaaagtagcaatgcaaaaacccgcaaacaggtgctatccctcgggggggcgtccaagtccactgggcccgccgtcaatggcctcaaggtcagtggcaggttgaacccaaagtcatgcactaaggaggtgggggggcggcagctgcgggagggcctgcagctgcgggaggggctgcggaactccaagaggagactggaagaggcacaccaggcggagaagccgcagtcgccccccaagaagatgaaaggggcggctggccccgccgaaggccctggcaagaaggccccggccgagagaggtctgctgaacggacacgtgaagaaggaagtgccggagcgcagtctggagaggaatcggccgaagcgggccacggccgggaagagcacgccaggcagacaagcacatggcaaggcggacagcgcctcctgtgaaaatcgttctacctcgcaaccggagtccgtgcacaagccgcaggactcgggcaaggccgagaagggcggcggcaaggccgggtgggcggccatggacgagatccccgtcctcaggccctccgccaaggagttccacgatccgctcatctacatcgagtcggtccgcgctcaggtggagaagttcgggatgtgcagggtgatcccccctccggactggcggcccgagtgcaagctcaacgatgagatgcggtttgtcacgcagattcagcacatccacaagctgggccggcgctggggccccaacgtgcagcggctggcctgcatcaagaagcacctcaaatctcagggcatcaccatggacgagctcccgctcatagggggctgtgagctcgacctggcctgctttttccggctgattaatgagatgggcggcatgcagcaagtgactgacctcaaaaaatggaacaaactagcagacatgctgcgcatccccagaactgcccaggaccggctggccaagctgcaggaggcctactgccagtacctactctcctacgactccctgtccccagaggagcaccggcggctggagaaggaggtgctgatggagaaggagatcctggagaagcgcaaggggccgctggaaggccacacagagaacgaccaccacaagttccaccctctgccccgcttcgagcccaagaatgggctcatccacggcgtggcccccaggaacggcttccgcagcaagctcaaggaggtgggccaggcccagttgaagactggccggcggcgactcttcgctcaggaaaaagaagtggtcaaggaagaggaggaggacaaaggcgtcctcaatgacttccacaagtgcatctataagggaaggtctgtttctctaacaactttttatcgaacagcgaggaatatcatgagcatgtgtttcagcaaggagcctgccccagccgaaatcgagcaagagtactggaggctagtggaagagaaggactgccacgtggcagtgcactgcggcaaggtggacaccaacactcacggcagtggattcccagtaggaaaatcagaacccttttcgaggcatggatggaacctcaccgtcctccccaataacacagggtccatcctgcgtcacctcggtgctgtgcctggagtgactattccctggctaaatattggcatggtcttttctacctcatgctggtctcgagaccaaaatcaccttccatacattgactacttacacactggtgctgactgcatttggtattgcattcctgctgaggaggagaacaagctggaagatgtggtccacaccctgctgcaagccaatggcaccccagggctgcagatgctggaaagcaacgtcatgatctccccggaggtgctgtgcaaagaggggatcaaggtgcacaggaccgtgcagcagagtggccagtttgtcgtctgcttcccgggatcctttgtgtccaaagtgtgctgtgggtacagcgtgtctgaaaccgtgcactttgctaccacccagtggacaagtatgggctttgagaccgccaaggaaatgaagcgtcgccatatagctaagccattctccatggagaagttactctaccagattgcacaagcagaagcaaaaaaagaaaacggtcccactctcagtaccatctcagccctcctggatgagctcagggatacagagctacggcagcgcaggcagctgttcgaggctggcctccactcctccgcacgctatggcagccacgatggcagcagcacggtggcggacgggaagaaaaagcctcgaaagtggctgcagttggagacgtcagagaggaggtgtcagatctgccagcacctgtgctacctgtccatggtggtacaagagaacgaaaacgtcgtgttctgtctggagtgtgctctgcgccacgtggagaaacagaagtcctgccgagggctgaagttgatgtaccgctacgatgaggaacagattatcagtctggtcaatcagatctgcggcaaagtgtctggtaaaaacggcagcattgagaactgtctcagtaaacccacaccaaaaagaggtccccgcaagagagcgacagtggacgtgcccccctcccgtctgtcagcctccagttcatccaaaagtgcttcgagctcatcatgaagatgccaacgcccgtggtcgatttatatatatttttttgtaattattatattctagtttggagtacttgctgtaggattcaagctgtctttgcactagctctaaagaagattttcttctggttttagagaactaattttgttttagcattaaactgttgaacttttttttgtacttagaaaacctagatactgcagtcagattttggaaactgccgtatagtcactgttttaaaaaccccggaggggctgtattaatttgtattgccccatggctgacaaaagcctttttttttggttttgatttttttttttttgtaactgttggggggaaaaaggctttttaacccatttttgaagagggtgaagtttggagaacaaatttaaaaaccatcagtcatgtgagcagattttttagaagggataggagacacacgcgcacacacacacacacacacgaaacttgaaatggctttgctttggctgtcgtcttctgccgtgtgccagatgagcttgtgatctgggaagccggggcacccccgttttgtttctctgggcggttgtggcagctgaaggcggacgttgtttcctaaccataggtggaacgaggagacgggagcgagtgggctctccaccagcacatcactatgcatctgttccaggaaagaagaaaagcgagcgaggaagacggaaaagactgcctgccttggaggggtcacatgagggagacctgtgcctgatttcattaggaaatccattctgttattttttggtgctgttggctactttatcaaaaaacccttcaatagcatccttaagatttaaaaaaaaaaaaaaaaaaaaaaggaaaaaaaagtgatggaagccgtaagtgcttctttgtcatcgacgtgcaatctttctaacattccatctccatctcaccgcttcttgtttgacaccttcacaagtcagcattaatctttcttttaaaacttgtttcatttatgatcatgtagagagccactaggaggcctgcagttatttttgaatgtgaaaatgcatttgcgttcatcttgtctattttttctcttcatgttgtaacaaaaaggaaaaaagaaaaaaaaatcccatcccttttgtacatatgcctgtaaattgttttaaatacttgagcctttttctcggtggggggtggggaggggggtgagaagacaagatgaagaaaagccttacatttcagtttcttcatcggttggattggatgcttacagggtttttcttgtaacatttataagtgctgcttacatcactgaacaacaacaaaaaaataataatggagtagctgttgcccttctccggttgtgtgtacagtatgtgtggaataaaaaagggaaactgttttcacaagctgttctttgtttcataattggattcatcaatcccgtagctacccatattgcactgagcttgccagtggtgactgccaggaacgtcctatgatccactttgttggttgttgttgcagaagactgaactgttttggaatatttaacaattacagaaacagtcaagtgttttccaatgtggttgtccggtttctatggccttgctgtgtactttccctctttttgacagtaaacttctgcctatggcttacagtttgacatttaatttattagcgctgctctgcacccctcccttgggagggagacttcatgtggtttattgcgagttttttgtttacttttcaggtttgtactacaaggtttaataataaaaacaaagttttttggacatttgtctgtcttgtgg

SEQ ID NO: 91301 - DNA, 5573 bp, Homo sapiens
attcgatctgcctttctgcacaatacaaaagcaaagtccttaacacaagccacagatggcactctgattcggcttgcaaaaaaggatgacagtgatgggattccgtggtcagaagaacgggtggtacgtaaagtcctttatttgtctctgaaggagttcaagaattcccagaagaggcagcatgcggaaggcattgctgggagcctgaaaactgtgaatgggctccttggtaatgaccagtctaagggattaggaccagcatcagaacagtcagagaatgaaaaggacgatgcatcccaagtgtcctccactagcaacgatgttagttcttcagattttgaagaagggccgtcgaggaaaaggcccaggctgcaagcacaaaggaagtttgctcagtctcagccgaatagtcccagcacaactccagtaaagatagtggagccattgctaccccctccagctactcagatatcagacctctctaaaaggaagcctaagacagaagattttcttacctttctctgccttcgaggttctcctgcgctgcccaacagcatggtgtattttggaagctctcaggatgaggaggaagtcgaggaggaagatgatgagacagaagacgtcaaaacagccaccaacaatgcttcatcttcatgccagtcgacccccaggaaaggaaaaacccacaaacatgttcacaacgggcatgttttcaatggttccagcaggtcaacacgggagaaggaacctgttcaaaaacacaaaagcaaagaggccactcccgcaaaggagaagcacagcgatcaccgggctgacagccgccgggagcaggcttcagctaaccaccccgcagcggccccctccacgggttcctcggccaaggggcttgctgccacccatcaccacccccctctgcatcggtcggctcaggacttacggaaacaggtttctaaggtaaacggagtcactcgaatgtcatctctgggtgcaggtgtaaccagtgccaaaaagatgcgcgaggtcagaccttcaccatccaaaactgtgaagtacactgccacggtgacgaagggggctgtcacatacaccaaagccaagagagaactggtcaaggacaccaaacccaatcaccacaagcccagttccgctgtcaaccacacaatctcagggaaaactgaaagtagcaatgcaaaaacccgcaaacaggtgctatccctcgggggggcgtccaagtccactgggcccgccgtcaatggcctcaaggtcagtggcaggttgaacccaaagtcatgcactaaggaggtgggggggcggcagctgcgggagggcctgcagctgcgggaggggctgcggaactccaagaggagactggaagaggcacaccaggcggagaagccgcagtcgccccccaagaagatgaaaggggcggctggccccgccgaaggccctggcaagaaggccccggccgagagaggtctgctgaacggacacgtgaagaaggaagtgccggagcgcagtctggagaggaatcggccgaagcgggccacggccgggaagagcacgccaggcagacaagcacatggcaaggcggacagcgcctcctgtgaaaatcgttctacctcgcaaccggagtccgtgcacaagccgcaggactcgggcaaggccgagaagggcggcggcaaggccgggtgggcggccatggacgagatccccgtcctcaggccctccgccaaggagttccacgatccgctcatctacatcgagtcggtccgcgctcaggtggagaagttcgggatgtgcagggtgatcccccctccggactggcggcccgagtgcaagctcaacgatgagatgcggtttgtcacgcagattcagcacatccacaagctgggccggcgctggggccccaacgtgcagcggctggcctgcatcaagaagcacctcaaatctcagggcatcaccatggacgagctcccgctcatagggggctgtgagctcgacctggcctgctttttccggctgattaatgagatgggcggcatgcagcaagtgactgacctcaaaaaatggaacaaactagcagacatgctgcgcatccccagaactgcccaggaccggctggccaagctgcaggaggcctactgccagtacctactctcctacgactccctgtccccagaggagcaccggcggctggagaaggaggtgctgatggagaaggagatcctggagaagcgcaaggggccgctggaaggccacacagagaacgaccaccacaagttccaccctctgccccgcttcgagcccaagaatgggctcatccacggcgtggcccccaggaacggcttccgcagcaagctcaaggaggtgggccaggcccagttgaagactggccggcggcgactcttcgctcaggaaaaagaagtggtcaaggaagaggaggaggacaaaggcgtcctcaatgacttccacaagtgcatctataagggaaggtctgtttctctaacaactttttatcgaacagcgaggaatatcatgagcatgtgtttcagcaaggagcctgccccagccgaaatcgagcaagagtactggaggctagtggaagagaaggactgccacgtggcagtgcactgcggcaaggtggacaccaacactcacggcagtggattcccagtaggaaaatcagaacccttttcgaggcatggatggaacctcaccgtcctccccaataacacagggtccatcctgcgtcacctcggtgctgtgcctggagtgactattccctggctaaatattggcatggtcttttctacctcatgctggtctcgagaccaaaatcaccttccatacattgactacttacacactggtgctgactgcatttggtattgcattcctgctgaggaggagaacaagctggaagatgtggtccacaccctgctgcaagccaatggcaccccagggctgcagatgctggaaagcaacgtcatgatctccccggaggtgctgtgcaaagaggggatcaaggtgcacaggaccgtgcagcagagtggccagtttgtcgtctgcttcccgggatcctttgtgtccaaagtgtgctgtgggtacagcgtgtctgaaaccgtgcactttgctaccacccagtggacaagtatgggctttgagaccgccaaggaaatgaagcgtcgccatatagctaagccattctccatggagaagttactctaccagattgcacaagcagaagcaaaaaaagaaaacggtcccactctcagtaccatctcagccctcctggatgagctcagggatacagagctacggcagcgcaggcagctgttcgaggctggcctccactcctccgcacgctatggcagccacgatggcagcagcacggtggcggacgggaagaaaaagcctcgaaagtggctgcagttggagacgtcagagaggaggtgtcagatctgccagcacctgtgctacctgtccatggtggtacaagagaacgaaaacgtcgtgttctgtctggagtgtgctctgcgccacgtggagaaacagaagtcctgccgagggctgaagttgatgtaccgctacgatgaggaacagattatcagtctggtcaatcagatctgcggcaaagtgtctggtaaaaacggcagcattgagaactgtctcagtaaacccacaccaaaaagaggtccccgcaagagagcgacagtggacgtgcccccctcccgtctgtcagcctccagttcatccaaaagtgcttcgagctcatcatgaagatgccaacgcccgtggtcgatttatatatatttttttgtaattattatattctagtttggagtacttgctgtaggattcaagctgtctttgcactagctctaaagaagattttcttctggttttagagaactaattttgttttagcattaaactgttgaacttttttttgtacttagaaaacctagatactgcagtcagattttggaaactgccgtatagtcactgttttaaaaaccccggaggggctgtattaatttgtattgccccatggctgacaaaagcctttttttttggttttgatttttttttttttgtaactgttggggggaaaaaggctttttaacccatttttgaagagggtgaagtttggagaacaaatttaaaaaccatcagtcatgtgagcagattttttagaagggataggagacacacgcgcacacacacacacacacacgaaacttgaaatggctttgctttggctgtcgtcttctgccgtgtgccagatgagcttgtgatctgggaagccggggcacccccgttttgtttctctgggcggttgtggcagctgaaggcggacgttgtttcctaaccataggtggaacgaggagacgggagcgagtgggctctccaccagcacatcactatgcatctgttccaggaaagaagaaaagcgagcgaggaagacggaaaagactgcctgccttggaggggtcacatgagggagacctgtgcctgatttcattaggaaatccattctgttattttttggtgctgttggctactttatcaaaaaacccttcaatagcatccttaagatttaaaaaaaaaaaaaaaaaaaaaaggaaaaaaaagtgatggaagccgtaagtgcttctttgtcatcgacgtgcaatctttctaacattccatctccatctcaccgcttcttgtttgacaccttcacaagtcagcattaatctttcttttaaaacttgtttcatttatgatcatgtagagagccactaggaggcctgcagttatttttgaatgtgaaaatgcatttgcgttcatcttgtctattttttctcttcatgttgtaacaaaaaggaaaaaagaaaaaaaaatcccatcccttttgtacatatgcctgtaaattgttttaaatacttgagcctttttctcggtggggggtggggaggggggtgagaagacaagatgaagaaaagccttacatttcagtttcttcatcggttggattggatgcttacagggtttttcttgtaacatttataagtgctgcttacatcactgaacaacaacaaaaaaataataatggagtagctgttgcccttctccggttgtgtgtacagtatgtgtggaataaaaaagggaaactgttttcacaagctgttctttgtttcataattggattcatcaatcccgtagctacccatattgcactgagcttgccagtggtgactgccaggaacgtcctatgatccactttgttggttgttgttgcagaagactgaactgttttggaatatttaacaattacagaaacagtcaagtgttttccaatgtggttgtccggtttctatggccttgctgtgtactttccctctttttgacagtaaacttctgcctatggcttacagtttgacatttaatttattagcgctgctctgcacccctcccttgggagggagacttcatgtggtttattgcgagttttttgtttacttttcaggtttgtactacaaggtttaataataaaaacaaagttttttggacatttgtctgtcttgtgg

SEQ ID NO: 91302 - DNA, 3434 bp, Homo sapiens
gaggctggctgtacaaacggagcgctgctgatcgacgaacagagatcctgtacaacactcaaggggtcgttgtaaagccagactcgtagaacgacttaccaccacgttccaccctctgctcaggctattgagcccaataaatggtctcactcctacggacgtttgctccccacggaacaggcgttcctgcaagccatcgcatctacggacgcgtagtagcctagagtccgatattaaaagactaggtgggccgtcgtactacacaactctcggagactaggaagtggtcctggcagtaggggcacagacgtacatcggcttcatcatgtcttccattgtactctataaggaaggtctgtttctctaacaactttttatcgaacagcgaggaatatcatgagcatgtgtttcagcaaggagcctgccccagccgaaatcgagcaagagtactggaggctagtggaagagaaggactgccacgtggcagtgcactgcggcaaggtggacaccaacactcacggcagtggattcccagtaggaaaatcagaacccttttcgaggcatggatggaacctcaccgtcctccccaataacacagggtccatcctgcgtcacctcggtgctgtgcctggagtgactattccctggctaaatattggcatggtcttttctacctcatgctggtctcgagaccaaaatcaccttccatacattgactacttacacactggtgctgactgcatttggtattgcattcctgctgaggaggagaacaagctggaagatgtggtccacaccctgctgcaagccaatggcaccccagggctgcagatgctggaaagcaacgtcatgatctccccggaggtgctgtgcaaagaggggatcaaggtgcacaggaccgtgcagcagagtggccagtttgtcgtctgcttcccgggatcctttgtgtccaaagtgtgctgtgggtacagcgtgtctgaaaccgtgcactttgctaccacccagtggacaagtatgggctttgagaccgccaaggaaatgaagcgtcgccatatagctaagccattctccatggagaagttactctaccagattgcacaagcagaagcaaaaaaagaaaacggtcccactctcagtaccatctcagccctcctggatgagctcagggatacagagctacggcagcgcaggcagctgttcgaggctggcctccactcctccgcacgctatggcagccacgatggcagcagcacggtggcggacgggaagaaaaagcctcgaaagtggctgcagttggagacgtcagagaggaggtgtcagatctgccagcacctgtgctacctgtccatggtggtacaagagaacgaaaacgtcgtgttctgtctggagtgtgctctgcgccacgtggagaaacagaagtcctgccgagggctgaagttgatgtaccgctacgatgaggaacagattatcagtctggtcaatcagatctgcggcaaagtgtctggtaaaaacggcagcattgagaactgtctcagtaaacccacaccaaaaagaggtccccgcaagagagcgacagtggacgtgcccccctcccgtctgtcagcctccagttcatccaaaagtgcttcgagctcatcatgaagatgccaacgcccgtggtcgatttatatatatttttttgtaattattatattctagtttggagtacttgctgtaggattcaagctgtctttgcactagctctaaagaagattttcttctggttttagagaactaattttgttttagcattaaactgttgaacttttttttgtacttagaaaacctagatactgcagtcagattttggaaactgccgtatagtcactgttttaaaaaccccggaggggctgtattaatttgtattgccccatggctgacaaaagcctttttttttggttttgatttttttttttttgtaactgttggggggaaaaaggctttttaacccatttttgaagagggtgaagtttggagaacaaatttaaaaaccatcagtcatgtgagcagattttttagaagggataggagacacacgcgcacacacacacacacacacgaaacttgaaatggctttgctttggctgtcgtcttctgccgtgtgccagatgagcttgtgatctgggaagccggggcacccccgttttgtttctctgggcggttgtggcagctgaaggcggacgttgtttcctaaccataggtggaacgaggagacgggagcgagtgggctctccaccagcacatcactatgcatctgttccaggaaagaagaaaagcgagcgaggaagacggaaaagactgcctgccttggaggggtcacatgagggagacctgtgcctgatttcattaggaaatccattctgttattttttggtgctgttggctactttatcaaaaaacccttcaatagcatccttaagatttaaaaaaaaaaaaaaaaaaaaaaggaaaaaaaagtgatggaagccgtaagtgcttctttgtcatcgacgtgcaatctttctaacattccatctccatctcaccgcttcttgtttgacaccttcacaagtcagcattaatctttcttttaaaacttgtttcatttatgatcatgtagagagccactaggaggcctgcagttatttttgaatgtgaaaatgcatttgcgttcatcttgtctattttttctcttcatgttgtaacaaaaaggaaaaaagaaaaaaaaatcccatcccttttgtacatatgcctgtaaattgttttaaatacttgagcctttttctcggtggggggtggggaggggggtgagaagacaagatgaagaaaagccttacatttcagtttcttcatcggttggattggatgcttacagggtttttcttgtaacatttataagtgctgcttacatcactgaacaacaacaaaaaaataataatggagtagctgttgcccttctccggttgtgtgtacagtatgtgtggaataaaaaagggaaactgttttcacaagctgttctttgtttcataattggattcatcaatcccgtagctacccatattgcactgagcttgccagtggtgactgccaggaacgtcctatgatccactttgttggttgttgttgcagaagactgaactgttttggaatatttaacaattacagaaacagtcaagtgttttccaatgtggttgtccggtttctatggccttgctgtgtactttccctctttttgacagtaaacttctgcctatggcttacagtttgacatttaatttattagcgctgctctgcacccctcccttgggagggagacttcatgtggtttattgcgagttttttgtttacttttcaggtttgtactacaaggtttaataataaaaacaaagttttttggacatttgtctgtcttgtgg

SEQ ID NO: 91303 - DNA, 3026 bp, Homo sapiens
gctgctttgagctgagttctgaccagcttctctggcctctgctgaccctgccggtcccgcctgtccatcttagagaagagatggacgggggactcctttgtaagcccagcctgtgggcctgtggcctacttggctctggagatgagcccggcagcctcctggttgtgtaaccttgtcctgtttccagccctggcattgccacgtggggacagaggggcctgtgtggtcatcatgtcctcagctgtgcatgaacctgtcatcactcttggaccagtgcagtttagaagctccttcttgtgttatgaatgacgtctttttattttccacataaaacaatcttatctccttgagagcaggcctcttagggtgcgcatacgtcacctgaagactgcaggtgtccctgcgcacagggaggggtgcctcagcctggccctgtctccccagatctccccggaggtgctgtgcaaagaggggatcaaggtgcacaggaccgtgcagcagagtggccagtttgtcgtctgcttcccgggatcctttgtgtccaaagtgtgctgtgggtacagcgtgtctgaaaccgtgcactttgctaccacccagtggacaagtatgggctttgagaccgccaaggaaatgaagcgtcgccatatagctaagccattctccatggagaagttactctaccagattgcacaagcagaagcaaaaaaagaaaacggtcccactctcagtaccatctcagccctcctggatgagctcagggatacagagctacggcagcgcaggcagctgttcgaggctggcctccactcctccgcacgctatggcagccacgatggcagcagcacggtggcggacgggaagaaaaagcctcgaaagtggctgcagttggagacgtcagagaggaggtgtcagatctgccagcacctgtgctacctgtccatggtggtacaagagaacgaaaacgtcgtgttctgtctggagtgtgctctgcgccacgtggagaaacagaagtcctgccgagggctgaagttgatgtaccgctacgatgaggaacagattatcagtctggtcaatcagatctgcggcaaagtgtctggtaaaaacggcagcattgagaactgtctcagtaaacccacaccaaaaagaggtccccgcaagagagcgacagtggacgtgcccccctcccgtctgtcagcctccagttcatccaaaagtgcttcgagctcatcatgaagatgccaacgcccgtggtcgatttatatatatttttttgtaattattatattctagtttggagtacttgctgtaggattcaagctgtctttgcactagctctaaagaagattttcttctggttttagagaactaattttgttttagcattaaactgttgaacttttttttgtacttagaaaacctagatactgcagtcagattttggaaactgccgtatagtcactgttttaaaaaccccggaggggctgtattaatttgtattgccccatggctgacaaaagcctttttttttggttttgatttttttttttttgtaactgttggggggaaaaaggctttttaacccatttttgaagagggtgaagtttggagaacaaatttaaaaaccatcagtcatgtgagcagattttttagaagggataggagacacacgcgcacacacacacacacacacgaaacttgaaatggctttgctttggctgtcgtcttctgccgtgtgccagatgagcttgtgatctgggaagccggggcacccccgttttgtttctctgggcggttgtggcagctgaaggcggacgttgtttcctaaccataggtggaacgaggagacgggagcgagtgggctctccaccagcacatcactatgcatctgttccaggaaagaagaaaagcgagcgaggaagacggaaaagactgcctgccttggaggggtcacatgagggagacctgtgcctgatttcattaggaaatccattctgttattttttggtgctgttggctactttatcaaaaaacccttcaatagcatccttaagatttaaaaaaaaaaaaaaaaaaaaaaggaaaaaaaagtgatggaagccgtaagtgcttctttgtcatcgacgtgcaatctttctaacattccatctccatctcaccgcttcttgtttgacaccttcacaagtcagcattaatctttcttttaaaacttgtttcatttatgatcatgtagagagccactaggaggcctgcagttatttttgaatgtgaaaatgcatttgcgttcatcttgtctattttttctcttcatgttgtaacaaaaaggaaaaaagaaaaaaaaatcccatcccttttgtacatatgcctgtaaattgttttaaatacttgagcctttttctcggtggggggtggggaggggggtgagaagacaagatgaagaaaagccttacatttcagtttcttcatcggttggattggatgcttacagggtttttcttgtaacatttataagtgctgcttacatcactgaacaacaacaaaaaaataataatggagtagctgttgcccttctccggttgtgtgtacagtatgtgtggaataaaaaagggaaactgttttcacaagctgttctttgtttcataattggattcatcaatcccgtagctacccatattgcactgagcttgccagtggtgactgccaggaacgtcctatgatccactttgttggttgttgttgcagaagactgaactgttttggaatatttaacaattacagaaacagtcaagtgttttccaatgtggttgtccggtttctatggccttgctgtgtactttccctctttttgacagtaaacttctgcctatggcttacagtttgacatttaatttattagcgctgctctgcacccctcccttgggagggagacttcatgtggtttattgcgagttttttgtttacttttcaggtttgtactacaaggtttaataataaaaacaaagttttttggacatttgtctgtcttgtgg

SEQ ID NO: 91304 - DNA, 1344 bp, Homo sapiens
aaaaaaaaaaaaaaaaagcatatacaatagacaaacataattcatacagtgtgacaaatgagcttgtgatctgggaagccggggcacccccgttttgtttctctgggcggttgtggcagctgaaggcggacgttgtttcctaaccataggtggaacgaggagacgggagcgagtgggctctccaccagcacatcactatgcatctgttccaggaaagaagaaaagcgagcgaggaagacggaaaagactgcctgccttggaggggtcacatgagggagacctgtgcctgatttcattaggaaatccattctgttattttttggtgctgttggctactttatcaaaaaacccttcaatagcatccttaagatttaaaaaaaaaaaaaaaaaaaaaaggaaaaaaaagtgatggaagccgtaagtgcttctttgtcatcgacgtgcaatctttctaacattccatctccatctcaccgcttcttgtttgacaccttcacaagtcagcattaatctttcttttaaaacttgtttcatttatgatcatgtagagagccactaggaggcctgcagttatttttgaatgtgaaaatgcatttgcgttcatcttgtctattttttctcttcatgttgtaacaaaaaggaaaaaagaaaaaaaaatcccatcccttttgtacatatgcctgtaaattgttttaaatacttgagcctttttctcggtggggggtggggaggggggtgagaagacaagatgaagaaaagccttacatttcagtttcttcatcggttggattggatgcttacagggtttttcttgtaacatttataagtgctgcttacatcactgaacaacaacaaaaaaataataatggagtagctgttgcccttctccggttgtgtgtacagtatgtgtggaataaaaaagggaaactgttttcacaagctgttctttgtttcataattggattcatcaatcccgtagctacccatattgcactgagcttgccagtggtgactgccaggaacgtcctatgatccactttgttggttgttgttgcagaagactgaactgttttggaatatttaacaattacagaaacagtcaagtgttttccaatgtggttgtccggtttctatggccttgctgtgtactttccctctttttgacagtaaacttctgcctatggcttacagtttgacatttaatttattagcgctgctctgcacccctcccttgggagggagacttcatgtggtttattgcgagttttttgtttacttttcaggtttgtactacaaggtttaataataaaaacaaagttttttggacatttgtctgtcttgtgg

SEQ ID NO: 91305 - DNA, 3843 bp, Homo sapiens
tggagttgactcttctgctcgcactgctgctgcagcacaaacgtgacttccaacattttttatttatctttcccttttcttttccaagatgtaactacggatcagacactaaggaccttcacgtttcgctgatgtagtttttggaggaaaaaggggggggagtgaagggcgtcggtttttttttgtgtgtgtgtgtatgtgtttcgggggaaattttccattatgagtgttttactaaagtgaatttttttttgtttgcttcgttcgtctttggctctttttttttccttcccaatttcggatttatttcaaggcgaatctggctttgggggaagaggaagaaaagtcggattacaagatcaaccaccaccaacaacaataaaaaccaccaggatatttttttgcaaatttctgacggctttaaattcatgaagcaattgtccccttttgcaatcagcatttggatctcagaatgagcaaggaaagacccaagaggaatatcattcagaagaaatacgatgacagtgatgggattccgtggtcagaagaacgggtggtacgtaaagtcctttatttgtctctgaaggagttcaagaattcccagaagaggcagcatgcggaaggcattgctgggagcctgaaaactgtgaatgggctccttggtaatgaccagtctaagggattaggaccagcatcagaacagtcagagaatgaaaaggacgatgcatcccaagtgtcctccactagcaacgatgttagttcttcagattttgaagaagggccgtcgaggaaaaggcccaggctgcaagcacaaaggaagtttgctcagtctcagccgaatagtcccagcacaactccagtaaagatagtggagccattgctaccccctccagctactcagatatcagacctctctaaaaggaagcctaagacagaagattttcttacctttctctgccttcgaggttctcctgcgctgcccaacagcatggtgtattttggaagctctcaggatgaggaggaagtcgaggaggaagatgatgagacagaagacgtcaaaacagccaccaacaatgcttcatcttcatgccagtcgacccccaggaaaggaaaaacccacaaacatgttcacaacgggcatgttttcaatggttccagcaggtcaacacgggagaaggaacctgttcaaaaacacaaaagcaaagaggccactcccgcaaaggagaagcacagcgatcaccgggctgacagccgccgggagcaggcttcagctaaccaccccgcagcggccccctccacgggttcctcggccaaggggcttgctgccacccatcaccacccccctctgcatcggtcggctcaggacttacggaaacaggtttctaaggtaaacggagtcactcgaatgtcatctctgggtgcaggtgtaaccagtgccaaaaagatgcgcgaggtcagaccttcaccatccaaaactgtgaagtacactgccacggtgacgaagggggctgtcacatacaccaaagccaagagagaactggtcaaggacaccaaacccaatcaccacaagcccagttccgctgtcaaccacacaatctcagggaaaactgaaagtagcaatgcaaaaacccgcaaacaggtgctatccctcgggggggcgtccaagtccactgggcccgccgtcaatggcctcaaggtcagtggcaggttgaacccaaagtcatgcactaaggaggtgggggggcggcagctgcgggagggcctgcagctgcgggaggggctgcggaactccaagaggagactggaagaggcacaccaggcggagaagccgcagtcgccccccaagaagatgaaaggggcggctggccccgccgaaggccctggcaagaaggccccggccgagagaggtctgctgaacggacacgtgaagaaggaagtgccggagcgcagtctggagaggaatcggccgaagcgggccacggccgggaagagcacgccaggcagacaagcacatggcaaggcggacagcgcctcctgtgaaaatcgttctacctcgcaaccggagtccgtgcacaagccgcaggactcgggcaaggccgagaagggcggcggcaaggccgggtgggcggccatggacgagatccccgtcctcaggccctccgccaaggagttccacgatccgctcatctacatcgagtcggtccgcgctcaggtggagaagttcgggatgtgcagggtgatcccccctccggactggcggcccgagtgcaagctcaacgatgagatgcggtttgtcacgcagattcagcacatccacaagctgggccggcgctggggccccaacgtgcagcggctggcctgcatcaagaagcacctcaaatctcagggcatcaccatggacgagctcccgctcatagggggctgtgagctcgacctggcctgctttttccggctgattaatgagatgggcggcatgcagcaagtgactgacctcaaaaaatggaacaaactagcagacatgctgcgcatccccagaactgcccaggaccggctggccaagctgcaggaggcctactgccagtacctactctcctacgactccctgtccccagaggagcaccggcggctggagaaggaggtgctgatggagaaggagatcctggagaagcgcaaggggccgctggaaggccacacagagaacgaccaccacaagttccaccctctgccccgcttcgagcccaagaatgggctcatccacggcgtggcccccaggaacggcttccgcagcaagctcaaggaggtgggccaggcccagttgaagactggccggcggcgactcttcgctcaggaaaaagaagtggtcaaggaagaggaggaggacaaaggcgtcctcaatgacttccacaagtgcatctataagggaaggtctgtttctctaacaactttttatcgaacagcgaggaatatcatgagcatgtgtttcagcaaggagcctgccccagccgaaatcgagtgcccagctgagtccgtgtgaacttccagctgctgacgtcggtgggctctcagcagcgcttggtcgtggaaagggaaagaaaccaaacccggactgctggttcagggcagctgccggccggggaacaggagcaagagtactggaggctagtggaagagaaggactgccacgtggcagtgcactgcggcaaggtggacaccaacactcacggcagtggattcccagtaggaaaatcagaacccttttcgaggcatggatggaacctcaccgtcctccccaataacacagggtccatcctgcgtcacctcggtgctgtgcctggagtgactattccctggctaaatattggcatggtcttttctacctcatgctggtctcgagaccaaaatcaccttccatacattgactacttacacactggtgctgactgcatttggtattgcattcctgctgaggaggagaacaagctggaagatgtggtccacaccctgctgcaagccaatggcaccccagggctgcagatgctggaaagcaacgtcatggtgcgtccactcagccaccgcctccagcaggagctgtaggacctcctaggcacttgaacatggtttcccatgaacccgcctttcaaaggcaatgaggacacagcaaaacaaatccccagggtgcaaagggaaaggtcctctgacacaaaagccaaactgaccttccatcagattgcacagggcgctggggttttgcacggcctttgcatctgttttggggcttgtttgtgttgtgggctgctgtgggccctgggatttcttgtgcccgccgctcctaccttctgggca

SEQ ID NO: 91306 - DNA, 352 bp, Homo sapiens
gctgagggattctgcctccagcacaagctgctttttcagcagagccttggaggggccttccgcgcttctgctgtgcgtccgctcagggcctctgggcggcagcctctgttcctggcagaacaatttggccctcatggggttgatccttggtggagtcttcccactcctcttggcactgcgggttcttagagaatatatttcttccttctctgcctgtcattaactcagaatacaaggtggcccacagccgcagggacgccaaggggcagcggcccatgacaggtgtctggcctcatttgcagtagggttcagctttgcttctgaagctttactgttttttgttttgtttcag

SEQ ID NO: 91307 - DNA, 249 bp, Homo sapiens
cctccggactggcggcccgagtgcaagctcaacgatgagatgcggtttgtcacgcagattcagcacatccacaagctgggccggcgctggggccccaacgtgcagcggctggcctgcatcaagaagcacctcaaatctcagggcatcaccatggacgagctcccgctcataggtaggtctgggcggggggtcagggggtggtgcctgccctcctgcccccagatccctgcagttccctcacagtcttca

SEQ ID NO: 91308 - DNA, 370 bp, Homo sapiens
tgatgtgatgtatttaagtgtttgtccccttttctcacctgtagggctccttggtaatgaccagtctaagggattaggaccagcatcagaacagtcagagaatgaaaaggacgatgcatcccaagtgtcctccactagcaacgatgttagttcttcagattttgaagaagggccgtcgaggaaaaggttagtacccaaggctgaaaatattggtaccttcaaccagggactgcaaactcaggtgccagttttcaccacatgataacgtgagcccattcacccaatctcttgattttcatagaggagccagaatcatgaggtttcgtatcaaatgccctgctttctaagtattgtctaataattataatta

SEQ ID NO: 91309 - DNA, 538 bp, Homo sapiens
  misc_feature (337)..(337): n is a, c, g, or t
  misc_feature (344)..(344): n is a, c, g, or t
  misc_feature (406)..(407): n is a, c, g, or t
  misc_feature (410)..(410): n is a, c, g, or t
  misc_feature (426)..(426): n is a, c, g, or t
  misc_feature (439)..(439): n is a, c, g, or t
  misc_feature (441)..(441): n is a, c, g, or t
  misc_feature (443)..(443): n is a, c, g, or t
  misc_feature (457)..(457): n is a, c, g, or t
  misc_feature (468)..(468): n is a, c, g, or t
  misc_feature (474)..(474): n is a, c, g, or t
  misc_feature (478)..(478): n is a, c, g, or t
  misc_feature (481)..(481): n is a, c, g, or t
  misc_feature (495)..(495): n is a, c, g, or t
  misc_feature (505)..(505): n is a, c, g, or t
  misc_feature (520)..(520): n is a, c, g, or t
ccagtgattctcaaactttagcacatatcagaattatctaaaagtcttattacatgtcaggttgctggtgacccagagtttctgattcaataggtctgggatggatacagaaaatttgcatttctaacgagttcccaagtactgtgatgaagctggttcaatgatcacactttgagaaccactggcctagaccatgttttccattctcaaaaagttccattaagttgtttttcttggcttcccacccttagaaacaggtagaagcttcaaattatactttttttttttttggtagagatgagatctcaccatgtaagccagattggtctcaatctcntgattcngtgatccgcccgcctcggcctcccaaagtgctggaatcacaggcttgacccaccgcccccgnnaantcttcaagtttgcctnaggaagtctagantngnagagaagctctcanaccagaaaagnaatagntcanggnaggagattattgcnattcaggcancagaggacagaccanaaaaggaacttgtaaatt

SEQ ID NO: 91310 - DNA, 505 bp, Homo sapiens
ccagtgattctcaaactttagcacatatcagaattatctaaaagtcttattacatgtcaggttgctggtgacccagagtttctgattcaataggtctgggatggatacagaaaatttgcatttctaacgagttcccaagtactgtgatgaagctggttcaatgatcacactttgagaaccactggcctagaccatgttttccattctcaaaaagttccattaagttgtttttcttggcttcccacccttagaaacaggtagaagcttcaaattatactttttttttttttggtagagatgagatctcaccatattgcccaggctggtcttgaactcctagcctcaagcaatccttcagccttggcctcccgaagggctgagattacaggcgtcagccactgtgccacgccctcaaattatacttgttacagagcttttctggatcaaattacataggcaaaaaagaatttattatgctgactatttggtaacaaagaaaaggaaa

SEQ ID NO: 91311 - DNA, 443 bp, Homo sapiens
gaaatggaattaatttatgatgaatgtgtgttcttttagtctttatatttcttcacaagaactcttgcatataataggtactctatagatatttgttgaataaatgaatgaattgtattttcccataaagatgaaatgcattttttatttgaaaagaaaatataaccagcaaatgctacccttattatcctatttttctctagatttgagggcttattcattatgaccacagcttatcaactttgagatgatgaataagtgaacttgtcttaatttgggtatttttatttatgtaagaaaaaaacataaagtatagaaaatgcagaattgtacctgaggattataccttctgataacgcaaacaaatttaggtaaaatgtagatttaaaaatgtgagtattactggtgtcagggaaccccttttgttcagcttttctgttcac

SEQ ID NO: 91312 - DNA, 398 bp, Homo sapiens
cgatctcggctcactgtaacttccacctcccaggttcaagccattctcctgcctcagcttccaaattagctgggattacaggcacctgccaccacgcccggctaatttttgtatttttagtagagacagggtttcaccatgccggccaggtttcaccacgcccggccctatgttttcatttctattggataaatatttaacagtgaaatcatgggtttacatgaaacgtgtatgtctttttcatgtgtgtttaatttttaaagaaactgtccatctgttttccaaagtgattgcactgttttacatcccaccagctgtggcttagatttccagttgctccacattctccagacagtgaatactttcacatttcagacattctagcatatatagttatt

SEQ ID NO: 91313 - DNA, 1915 bp, Homo sapiens
tgcacttttacttgggcaccttgtgaccgcgaatcaattaaatgtaaaagtattggctgggcgcggtggctcacgcctgtaaatcccagcactgtgggatgccgaggcgggtggatcacgaggtcaagagatcaagaccatcctggctaaaacggttctggaggacacgtgccggcggcaggacttcaacccctgtgaatatgatctgaagtttcagaggagcgtgctcgacctttctctccagtggagatttgccaacctgcccaacaatgccaagctggagatggtgcccgcttcccggagccgtgaggggcctgagaacatggttcgcatcgctttgcagctggacgatggctcgaggttgcaggactctttctgttcaggccagaccctctgggagcttctcagccattttccacagatcagggagtgcctgcagcaccccggcggggccaccccagtctgcgtgtacacgagggatgaggtgacgggtgaagctgccctgcggggcacgacgctgcagtcgctgggcctgaccgggggcagcgccaccatcaggtttgtcatgaagtgctacgaccccgtgggcaagaccccaggaagcctgggctcgtcagcgtcggctggccaggcagccgccagcgctccacttcccttggaatctggggagctcagccgcggcgacttgagccgtccggaggacgcggacacctcagggccctgctgcgagcacactcaggagaagcagagcacaagggcacccgcagctgccccctttgttcctttctcgggtgggggacagagactggggggccctcctgggccacgaggcctctgacatcatcttcagctaagttgccgaagtccctctccagccctggaggcccctccaagccaaagaagtccaagtcgggccaggatccccagcaggagcaggagcaggagcgggagcgggatccccagcaggagcaggagcgggagcggcccgtggaccgggagcccgtggaccgggagccggtggtgtgccaccccgacctggaggagcggctgcaggcctggccagcggagctgcctgatgagttctttgagctgacggtggacgacgtgagaagacgcttggcccagctcaagagtgagcggaagcgcctggaagaagcccccttggtgaccaaggccttcagggaggcgcagataaaggagaagctggagcgctacccaagacggagtctctctctgtcgcccaggctggagtcagtggtgccatctcagctcactgcaagctccgcctcccgggttcaagtggttctcctgcctcagcctcccaagtagctgggatttcaggtggctctgagggtcctgttccccgaccgctacgtcctacagggcttcttccgccccagcgagacagtgggggacttgcgagacttcgtgaggagccacctggggaaccccgagctgtcattttacctgttcatcacccctccaaaaacagtcctggacgaccacacgcagaccctctttcaggcgaacctcttcccggccgctctggtgcacttgggagccgaggagccggcaggtgtctacctggagcctggcctgctggagcatgccatctccccatctgcggccgacgtgctggtggccaggtacatgtccagggccgccgggtccccttccccattgccagcccctgaccctgcacctaagtctgagccagctgctgaggagggggcgctggtcccccctgagcccatcccagggacggcccagcccgtgaagaggagcctgggcaaggtgcccaagtggctgaagctgccggccagcaagaggtgagagctgccagcctgaggtgcccactccgccagccacaggaccacctcctctgccagcaggaataaagacttgtgcatccctc

SEQ ID NO: 91314 - DNA, 779 bp, Homo sapiens
  misc_feature (766)..(766): n is a, c, g, or t
  misc_feature (771)..(771): n is a, c, g, or t
cccctggccgcgtggctgcgcgtcctggctgttgccgataaagttgtttgacgccggcccggcggcgggtcacgtgagcggaaaatggcggccccggcaggcggcggaggctccgcggtgtcggtgctggccccgaacggccggcgccacacggtgaaggtgacgccgagcaccgtgctgcttcaggttctggaggacacgtgccggcggcaggacttcaacccctgtgaatatgatctgaagtttcagaggagcgtgctcgacctttctctccagtggagatttgccaacctgcccaacaatgccaagctggagatggtgcccgcttcccggagccgtgaggggcctgagaacatggttcgcatcgctttgcagctggacgatggctcgaggttgcaggactctttctgttcaggccagaccctctgggagcttctcagccattttccacagatcagggagtgcctgcagcaccccggcggggccaccccagtctgcgtgtacacgagggatgaggtaggcggcctgctcttgctcacccagtccccgctcactttcagcccactttccaactggaaaatctgctgtcccgcctccaggcagtggcgggagactcgggctcttgaaagcacgacgtgtttcatggaaaaagagggagtggccggccctcggagcccgggctgccccgaaacctccctcggcgccctgtttgttttttcagcttctctcaaagcccaagagtcacaaaagtggtttcatttaatanatatntgctttgc

SEQ ID NO: 91315 - DNA, 1510 bp, Homo sapiens
cccctggccgcgtggctgcgcgtcctggctgttgccgataaagttgtttgacgccggcccggcggcgggtcacgtgagcggaaaatggcggccccggcaggcggcggaggctccgcggtgtcggtgctggccccgaacggccggcgccacacggtgaaggtgacgccgagcaccgtgctgcttcaggttctggaggacacgtgccggcggcaggacttcaacccctgtgaatatgatctgaagtttcagaggagcgtgctcgacctttctctccagtggagatttgccaacctgcccaacaatgccaagctggagatggtgcccgcttcccggagccgtgaggggcctgagaacatggttcgcatcgctttgcagctggacgatggctcgaggttgcaggactctttctgttcaggccagaccctctgggagcttctcagccattttccacagatcagggagtgcctgcagcaccccggcggggccaccccagtctgcgtgtacacgagggatgaggtgacgggtgaagctgccctgcggggcacgacgctgcagtcgctgggcctgaccgggggcagcgccaccatcagccctggaggcccctccaagccaaagaagtccaagtcgggccaggatccccagcaggagcaggagcaggagcgggagcgggatccccagcaggagcaggagcgggagcggcccgtggaccgggagcccgtggaccgggagccggtggtgtgccaccccgacctggaggagcggctgcaggcctggccagcggagctgcctgatgagttctttgagctgacggtggacgacgtgagaagacgcttggcccagctcaagagtgagcggaagcgcctggaagaagcccccttggtgaccaaggccttcagggaggcgcagataaaggagaagctggagcgctacccaaaggtggctctgagggtcctgttccccgaccgctacgtcctacagggcttcttccgccccagcgagacagtgggggacttgcgagacttcgtgaggagccacctggggaaccccgagctgtcattttacctgttcatcacccctccaaaaacagtcctggacgaccacacgcagaccctctttcaggcgaacctcttcccggccgctctggtgcacttgggagccgaggagccggcaggtgtctacctggagcctggcctgctggagcatgccatctccccatctgcggccgacgtgctggtggccaggtacatgtccagggccgccgggtccccttccccattgccagcccctgaccctgcacctaagtctgagccagctgctgaggagggggcgctggtcccccctgagcccatcccagggacggcccagcccgtgaagaggagcctgggcaaggtgcccaagtggctgaagctgccggccagcaagaggtgagagctgccagcctgaggtgcccactccgccagccacaggaccacctcctctgccagcaggaataaagacttgtgcatccctc

SEQ ID NO: 91316 - DNA, 1270 bp, Homo sapiens
cccctggccgcgtggctgcgcgtcctggctgttgccgataaagttgtttgacgccggcccggcggcgggtcacgtgagcggaaaatggcggccccggcaggcggcggaggctccgcggtgtcggtgctggccccgaacggccggcgccacacggtgaaggtgacgccgagcaccgtgctgcttcaggttctggaggacacgtgccggcggcaggacttcaacccctgtgaatatgatctgaagtttcagaggagcgtgctcgacctttctctccagtggagatttgccaacctgcccaacaatgccaagctggagatggtgcccgcttcccggagccgtgaggggcctgagaacatggttcgcatcgctttgcagctggacgatggctcgaggttgcaggactctttctgttcaggccagaccctctgggagcttctcagccattttccacagatcaggcccgtggaccgggagcccgtggaccgggagccggtggtgtgccaccccgacctggaggagcggctgcaggcctggccagcggagctgcctgatgagttctttgagctgacggtggacgacgtgagaagacgcttggcccagctcaagagtgagcggaagcgcctggaagaagcccccttggtgaccaaggccttcagggaggcgcagataaaggagaagctggagcgctacccaaaggtggctctgagggtcctgttccccgaccgctacgtcctacagggcttcttccgccccagcgagacagtgggggacttgcgagacttcgtgaggagccacctggggaaccccgagctgtcattttacctgttcatcacccctccaaaaacagtcctggacgaccacacgcagaccctctttcaggcgaacctcttcccggccgctctggtgcacttgggagccgaggagccggcaggtgtctacctggagcctggcctgctggagcatgccatctccccatctgcggccgacgtgctggtggccaggtacatgtccagggccgccgggtccccttccccattgccagcccctgaccctgcacctaagtctgagccagctgctgaggagggggcgctggtcccccctgagcccatcccagggacggcccagcccgtgaagaggagcctgggcaaggtgcccaagtggctgaagctgccggccagcaagaggtgagagctgccagcctgaggtgcccactccgccagccacaggaccacctcctctgccagcaggaataaagacttgtgcatccctc

SEQ ID NO: 91317 - DNA, 1889 bp, Homo sapiens
cccctggccgcgtggctgcgcgtcctggctgttgccgataaagttgtttgacgccggcccggcggcgggtcacgtgagcggaaaatggcggccccggcaggcggcggaggctccgcggtgtcggtgctggccccgaacggccggcgccacacggtgaaggtgacgccgagcaccgtgctgcttcaggttctggaggacacgtgccggcggcaggacttcaacccctgtgaatatgatctgaaatgcccctgggctgtctgaactctcttcactagtttctccgacagcagcttgcatttccaaagtttcagaggagcgtgctcgacctttctctccagtggagatttgccaacctgcccaacaatgccaagctggagatggtgcccgcttcccggagccgtgaggggcctgagaacatggttcgcatcgctttgcagctggacgatggctcgaggttgcaggactctttctgttcaggccagaccctctgggagcttctcagccattttccacagatcagggagtgcctgcagcaccccggcggggccaccccagtctgcgtgtacacgagggatgaggtgacgggtgaagctgccctgcggggcacgacgctgcagtcgctgggcctgaccgggggcagcgccaccatcaggtttgtcatgaagtgctacgaccccgtgggcaagaccccaggaagcctgggctcgtcagcgtcggctggccaggcagccgccagcgctccacttcccttggaatctggggagctcagccgcggcgacttgagccgtccggaggacgcggacacctcagggccctgctgcgagcacactcaggagaagcagagcacaagggcacccgcagctgccccctttgttcctttctcgggtgggggacagagactggggggccctcctgggccacgaggcctctgacatcatcttcagctaagttgccgaagtccctctccagccctggaggcccctccaagccaaagaagtccaagtcgggccaggatccccagcaggagcaggagcaggagcgggagcgggatccccagcaggagcaggagcgggagcggcccgtggaccgggagcccgtggaccgggagccggtggtgtgccaccccgacctggaggagcggctgcaggcctggccagcggagctgcctgatgagttctttgagctgacggtggacgacgtgagaagacgcttggcccagctcaagagtgagcggaagcgcctggaagaagcccccttggtgaccaaggccttcagggaggcgcagataaaggagaagctggagcgctacccaaaggtggctctgagggtcctgttccccgaccgctacgtcctacagggcttcttccgccccagcgagacagtgggggacttgcgagacttcgtgaggagccacctggggaaccccgagctgtcattttacctgttcatcacccctccaaaaacagtcctggacgaccacacgcagaccctctttcaggcgaacctcttcccggccgctctggtgcacttgggagccgaggagccggcaggtgtctacctggagcctggcctgctggagcatgccatctccccatctgcggccgacgtgctggtggccaggtacatgtccagggccgccgggtccccttccccattgccagcccctgaccctgcacctaagtctgagccagctgctgaggagggggcgctggtcccccctgagcccatcccagggacggcccagcccgtgaagaggagcctgggcaaggtgcccaagtggctgaagctgccggccagcaagaggtgagagctgccagcctgaggtgcccactccgccagccacaggaccacctcctctgccagcaggaataaagacttgtgcatccctc

SEQ ID NO: 91318 - DNA, 1814 bp, Homo sapiens
gctgcgagtcaggagggcagctccttctggaagcctggagctggtgaggccaggtgctttccctgctgcggtggctggcgatgggagtgtttcctgaggctgccaccaagcccctcctcagcatgggttggtgcgggaagtccttgagtgcctgtgggtcggcaggagctccggttctggaggacacgtgccggcggcaggacttcaacccctgtgaatatgatctgaagtttcagaggagcgtgctcgacctttctctccagtggagatttgccaacctgcccaacaatgccaagctggagatggtgcccgcttcccggagccgtgaggggcctgagaacatggttcgcatcgctttgcagctggacgatggctcgaggttgcaggactctttctgttcaggccagaccctctgggagcttctcagccattttccacagatcagggagtgcctgcagcaccccggcggggccaccccagtctgcgtgtacacgagggatgaggtgacgggtgaagctgccctgcggggcacgacgctgcagtcgctgggcctgaccgggggcagcgccaccatcaggtttgtcatgaagtgctacgaccccgtgggcaagaccccaggaagcctgggctcgtcagcgtcggctggccaggcagccgccagcgctccacttcccttggaatctggggagctcagccgcggcgacttgagccgtccggaggacgcggacacctcagggccctgctgcgagcacactcaggagaagcagagcacaagggcacccgcagctgccccctttgttcctttctcgggtgggggacagagactggggggccctcctgggccacgaggcctctgacatcatcttcagctaagttgccgaagtccctctccagccctggaggcccctccaagccaaagaagtccaagtcgggccaggatccccagcaggagcaggagcaggagcgggagcgggatccccagcaggagcaggagcgggagcggcccgtggaccgggagcccgtggaccgggagccggtggtgtgccaccccgacctggaggagcggctgcaggcctggccagcggagctgcctgatgagttctttgagctgacggtggacgacgtgagaagacgcttggcccagctcaagagtgagcggaagcgcctggaagaagcccccttggtgaccaaggccttcagggaggcgcagataaaggagaagctggagcgctacccaaaggtggctctgagggtcctgttccccgaccgctacgtcctacagggcttcttccgccccagcgagacagtgggggacttgcgagacttcgtgaggagccacctggggaaccccgagctgtcattttacctgttcatcacccctccaaaaacagtcctggacgaccacacgcagaccctctttcaggcgaacctcttcccggccgctctggtgcacttgggagccgaggagccggcaggtgtctacctggagcctggcctgctggagcatgccatctccccatctgcggccgacgtgctggtggccaggtacatgtccagggccgccgggtccccttccccattgccagcccctgaccctgcacctaagtctgagccagctgctgaggagggggcgctggtcccccctgagcccatcccagggacggcccagcccgtgaagaggagcctgggcaaggtgcccaagtggctgaagctgccggccagcaagaggtgagagctgccagcctgaggtgcccactccgccagccacaggaccacctcctctgccagcaggaataaagacttgtgcatccctc

SEQ ID NO: 91319 - DNA, 1827 bp, Homo sapiens
cccctggccgcgtggctgcgcgtcctggctgttgccgataaagttgtttgacgccggcccggcggcgggtcacgtgagcggaaaatggcggccccggcaggcggcggaggctccgcggtgtcggtgctggccccgaacggccggcgccacacggtgaaggtgacgccgagcaccgtgctgcttcaggttctggaggacacgtgccggcggcaggacttcaacccctgtgaatatgatctgaagtttcagaggagcgtgctcgacctttctctccagtggagatttgccaacctgcccaacaatgccaagctggagatggtgcccgcttcccggagccgtgaggggcctgagaacatggttcgcatcgctttgcagctggacgatggctcgaggttgcaggactctttctgttcaggccagaccctctgggagcttctcagccattttccacagatcagggagtgcctgcagcaccccggcggggccaccccagtctgcgtgtacacgagggatgaggtgacgggtgaagctgccctgcggggcacgacgctgcagtcgctgggcctgaccgggggcagcgccaccatcaggtttgtcatgaagtgctacgaccccgtgggcaagaccccaggaagcctgggctcgtcagcgtcggctggccaggcagccgccagcgctccacttcccttggaatctggggagctcagccgcggcgacttgagccgtccggaggacgcggacacctcagggccctgctgcgagcacactcaggagaagcagagcacaagggcacccgcagctgccccctttgttcctttctcgggtgggggacagagactggggggccctcctgggccacgaggcctctgacatcatcttcagctaagttgccgaagtccctctccagccctggaggcccctccaagccaaagaagtccaagtcgggccaggatccccagcaggagcaggagcaggagcgggagcgggatccccagcaggagcaggagcgggagcggcccgtggaccgggagcccgtggaccgggagccggtggtgtgccaccccgacctggaggagcggctgcaggcctggccagcggagctgcctgatgagttctttgagctgacggtggacgacgtgagaagacgcttggcccagctcaagagtgagcggaagcgcctggaagaagcccccttggtgaccaaggccttcagggaggcgcagataaaggagaagctggagcgctacccaaaggtggctctgagggtcctgttccccgaccgctacgtcctacagggcttcttccgccccagcgagacagtgggggacttgcgagacttcgtgaggagccacctggggaaccccgagctgtcattttacctgttcatcacccctccaaaaacagtcctggacgaccacacgcagaccctctttcaggcgaacctcttcccggccgctctggtgcacttgggagccgaggagccggcaggtgtctacctggagcctggcctgctggagcatgccatctccccatctgcggccgacgtgctggtggccaggtacatgtccagggccgccgggtccccttccccattgccagcccctgaccctgcacctaagtctgagccagctgctgaggagggggcgctggtcccccctgagcccatcccagggacggcccagcccgtgaagaggagcctgggcaaggtgcccaagtggctgaagctgccggccagcaagaggtgagagctgccagcctgaggtgcccactccgccagccacaggaccacctcctctgccagcaggaataaagacttgtgcatccctc

SEQ ID NO: 91320 - DNA, 704 bp, Homo sapiens
  misc_feature (691)..(691): n is a, c, g, or t
  misc_feature (696)..(696): n is a, c, g, or t
cccctggccgcgtggctgcgcgtcctggctgttgccgataaagttgtttgacgccggcccggcggcgggtcacgtgagcggaaaatggcggccccggcaggcggcggaggctccgcggtgtcggtgctggccccgaacggccggcgccacacggtgaaggtgacgccgagcaccgtgctgcttcaggttctggaggacacgtgccggcggcaggacttcaacccctgtgaatatgatctgaagtttcagaggagcgtgctcgacctttctctccagtggagatttgccaacctgcccaacaatgccaagctggagatggtgcccgcttcccggagccgtgaggggcctgagaacatggttcgcatcgctttgcagctggacgatggctcgaggttgcaggactctttctgttcaggccagaccctctgggagcttctcagccattttccacagatcagggagtgcctgcagcaccccggcggggccaccccagtctgcgtgtacacgagggatgaggtctccaggcagtggcgggagactcgggctcttgaaagcacgacgtgtttcatggaaaaagagggagtggccggccctcggagcccgggctgccccgaaacctccctcggcgccctgtttgttttttcagcttctctcaaagcccaagagtcacaaaagtggtttcatttaatanatatntgctttgc

SEQ ID NO: 91321 - DNA, 1771 bp, Homo sapiens
cccctggccgcgtggctgcgcgtcctggctgttgccgataaagttgtttgacgccggcccggcggcgggtcacgtgagcggaaaatggcggccccggcaggcggcggaggctccgcggtgtcggtgctggccccgaacggccggcgccacacggtgaaggtgacgccgagcaccgtgctgcttcaggtttcagaggagcgtgctcgacctttctctccagtggagatttgccaacctgcccaacaatgccaagctggagatggtgcccgcttcccggagccgtgaggggcctgagaacatggttcgcatcgctttgcagctggacgatggctcgaggttgcaggactctttctgttcaggccagaccctctgggagcttctcagccattttccacagatcagggagtgcctgcagcaccccggcggggccaccccagtctgcgtgtacacgagggatgaggtgacgggtgaagctgccctgcggggcacgacgctgcagtcgctgggcctgaccgggggcagcgccaccatcaggtttgtcatgaagtgctacgaccccgtgggcaagaccccaggaagcctgggctcgtcagcgtcggctggccaggcagccgccagcgctccacttcccttggaatctggggagctcagccgcggcgacttgagccgtccggaggacgcggacacctcagggccctgctgcgagcacactcaggagaagcagagcacaagggcacccgcagctgccccctttgttcctttctcgggtgggggacagagactggggggccctcctgggccacgaggcctctgacatcatcttcagctaagttgccgaagtccctctccagccctggaggcccctccaagccaaagaagtccaagtcgggccaggatccccagcaggagcaggagcaggagcgggagcgggatccccagcaggagcaggagcgggagcggcccgtggaccgggagcccgtggaccgggagccggtggtgtgccaccccgacctggaggagcggctgcaggcctggccagcggagctgcctgatgagttctttgagctgacggtggacgacgtgagaagacgcttggcccagctcaagagtgagcggaagcgcctggaagaagcccccttggtgaccaaggccttcagggaggcgcagataaaggagaagctggagcgctacccaaaggtggctctgagggtcctgttccccgaccgctacgtcctacagggcttcttccgccccagcgagacagtgggggacttgcgagacttcgtgaggagccacctggggaaccccgagctgtcattttacctgttcatcacccctccaaaaacagtcctggacgaccacacgcagaccctctttcaggcgaacctcttcccggccgctctggtgcacttgggagccgaggagccggcaggtgtctacctggagcctggcctgctggagcatgccatctccccatctgcggccgacgtgctggtggccaggtacatgtccagggccgccgggtccccttccccattgccagcccctgaccctgcacctaagtctgagccagctgctgaggagggggcgctggtcccccctgagcccatcccagggacggcccagcccgtgaagaggagcctgggcaaggtgcccaagtggctgaagctgccggccagcaagaggtgagagctgccagcctgaggtgcccactccgccagccacaggaccacctcctctgccagcaggaataaagacttgtgcatccctc

SEQ ID NO: 91322 - DNA, 1676 bp, Homo sapiens
ggggcggggcggtggcgagccttcccaggggtgaggttctggaggacacgtgccggcggcaggacttcaacccctgtgaatatgatctgaagtttcagaggagcgtgctcgacctttctctccagtggagatttgccaacctgcccaacaatgccaagctggagatggtgcccgcttcccggagccgtgaggggcctgagaacatggttcgcatcgctttgcagctggacgatggctcgaggttgcaggactctttctgttcaggccagaccctctgggagcttctcagccattttccacagatcagggagtgcctgcagcaccccggcggggccaccccagtctgcgtgtacacgagggatgaggtgacgggtgaagctgccctgcggggcacgacgctgcagtcgctgggcctgaccgggggcagcgccaccatcaggtttgtcatgaagtgctacgaccccgtgggcaagaccccaggaagcctgggctcgtcagcgtcggctggccaggcagccgccagcgctccacttcccttggaatctggggagctcagccgcggcgacttgagccgtccggaggacgcggacacctcagggccctgctgcgagcacactcaggagaagcagagcacaagggcacccgcagctgccccctttgttcctttctcgggtgggggacagagactggggggccctcctgggccacgaggcctctgacatcatcttcagctaagttgccgaagtccctctccagccctggaggcccctccaagccaaagaagtccaagtcgggccaggatccccagcaggagcaggagcaggagcgggagcgggatccccagcaggagcaggagcgggagcggcccgtggaccgggagcccgtggaccgggagccggtggtgtgccaccccgacctggaggagcggctgcaggcctggccagcggagctgcctgatgagttctttgagctgacggtggacgacgtgagaagacgcttggcccagctcaagagtgagcggaagcgcctggaagaagcccccttggtgaccaaggccttcagggaggcgcagataaaggagaagctggagcgctacccaaaggtggctctgagggtcctgttccccgaccgctacgtcctacagggcttcttccgccccagcgagacagtgggggacttgcgagacttcgtgaggagccacctggggaaccccgagctgtcattttacctgttcatcacccctccaaaaacagtcctggacgaccacacgcagaccctctttcaggcgaacctcttcccggccgctctggtgcacttgggagccgaggagccggcaggtgtctacctggagcctggcctgctggagcatgccatctccccatctgcggccgacgtgctggtggccaggtacatgtccagggccgccgggtccccttccccattgccagcccctgaccctgcacctaagtctgagccagctgctgaggagggggcgctggtcccccctgagcccatcccagggacggcccagcccgtgaagaggagcctgggcaaggtgcccaagtggctgaagctgccggccagcaagaggtgagagctgccagcctgaggtgcccactccgccagccacaggaccacctcctctgccagcaggaataaagacttgtgcatccctc

SEQ ID NO: 91323 - DNA, 762 bp, Homo sapiens
tttttttaagctagtttaagaatacagtaaaatcttctgattgtgtttgtgaacactggtaggtttgttacaatgttaaaatattttacttctgtagaaagaaaaccaaatatatcacgatgactggatatttaagcttttaccagaacatttggaattgtccaatgccctctgttttttcttagagccttcatggtgctgattcacagtgaaccttcactacttagtcccagataactgattatcagtggttgaaatcaacgtggagatgtctcagaaaacctgttttatagaaacttctagaaagttgcaaaccaaaaaaacatgaatgtcatcatgtcatctcatttttctgtttttgaaaaattatgaagttttcagtaattgtgactttttaaacatgtaaaagtatggaagtacatccagtaaacaatgccatgtacattccccctcaatttcccaaccccatccccatttgctgtccagagtgtgaccacagttaacggttaatgtgcatcttttatgtacttaacatgtctgtaaatatgtcttttatctttttcccctcttttaaattttaacttgacgttaaagtttagaacttccatgttagtatgtgcagctgtaacacattctttttttagtagccacatagtgtttcaatgtatggatgttccaaaatacattacccatttcctgctgtaacattttaactttttagaattcaactatgtgtacttttgtaattaaaaatgtgaattt

SEQ ID NO: 91324 - DNA, 562 bp, Homo sapiens
atctattattattattttccatcatgtgaatctttgtcttaacagagaggcttcgtctatttatatttgttgttacaattgatttctttcatcattctgttatttcagtgtttctcttgaaaaataggttcttgttattcaatgatttagttttcactttatgtatcgttttctttattttgtccttcatattttgcaagctatatagcctctgttaaattccattaatggatatctttaagcactctttgacatgtaattttctaatgtctcagtaaataaagaatttgtcaacataaaatgtgtgtgtaggccaggtgcggtggctcatgcctgtaatcccagaactttgggaggccaaggtgggtggatcacctgaggtcaggattttgaaaccagcctgaccaacatggcgaaaccccgtctctactaaaagaatacaacacttagccggacgtgggggcgcgcacctgtggtcccagctacttgggagtctgaggtgggagaatcgcttgaacctgggaggtggaggttgcagtgagccgacatcgcactattgcac

SEQ ID NO: 91325 - DNA, 525 bp, Homo sapiens
gtgagccaccgtgcccaggtgagcatctgatttttatctagaaaaactggcgaagacaaaaggaggcaaagagaagaaaccaacattgatgaagcagaagggtcttatttcagatcttggctcttgtaagctgttcaatttcaggttatgtagagaactctctaggactcgatttgcttatggtaaaatgggaatctggataggatgtcaaattagcattaattaaaggagacgctataggtaaagctctcagcactcggcgagcacccaacatgtgatggctgacttctacatggtcatccaacatttcccataagccaggctctgagctaagtgctctacaaatatctcacagagcccccactacaatgacacaggcagcattagccctgctgcacagaggagaatgcaccgagaactgaatgaagtaccctttctgaggtcagtcagccaaggctgggtctctgtgacatgaaactccctttcttatctttttctcaatttccccacattgtactattaagc

SEQ ID NO: 91326 - DNA, 267 bp, Homo sapiens
acaccatactccataaatatgtacaattatgtgtcaactaaaagtaaaactttttaaaatgtttaaaaaactgtgcatagtaggaaatgaataaatatatattcttataggctcatgttgtaaaaagtgatggaagaataaacctttaaattttaataaaggttacctatgaggaaggaaggaacgaagggaatggaatggaaagggaaagaagctggacttttctgaatataccttgttttctgtgttggactttggaaccaataa

SEQ ID NO: 91327 - DNA, 366 bp, Homo sapiens
ataaaaaaaaaaaaaaaaaaaggaaaaaaaaaagccgggcgtggtggcgggtgcctgtagtcccagctacttgggaggctgaggcaagagaatggcttgaacccgggaggcagagcttgcagtgagccgagatcgtgccactgcactccaggttgggcgacagagcgagactccgtctcaaaaaaaaaaaaaaaagtacctgccctaccaatctcaacctcatggagttgcaagggtgtgatgagattatgagcaactgctttgtgaaaagaagtggagcttggtgggtgctccctagggtagttgaaaagcactggtgtcatagtccaggttcccccagaggttgacttgaaatggattcgagtc

SEQ ID NO: 91328 - DNA, 487 bp, Homo sapiens
agtggggaagagagtgaacatgcaatgggaagaagactgcaggaggagcaaccacccaactgtgacagcatcaccgcatctcatcagtgggagaaaagttaagcagcagtttcattccaaaggagaggaaagaacccctaatgatttcattgtactcattggggtacaaggtattacagaagccttcagaagctgccagtagatcctttctttctgaaacattcagggccttttggaggtaatcgatagcttaaatagaggattacaaagacaggttggaatttgagaacatatagagatacaaagagaggtaaccgtaactaagtcaggatcaggccaggcgtggtgacttacgtctgtaatcccagcgctctgggaggctgaggcgggcagatcacgaggtcaagaaatcaagatcatcctggccaacatggcgaaatcctgtctctactaaaaatactaaaattagctgtgagtggtggcacat

SEQ ID NO: 91329 - DNA, 168 bp, Homo sapiens
atccaagtgctccccacctcaggatatttactgttattgccaacactctgtgtacctgaaagtgccccaaagtgccatgatggaaaggagggaaagaagagaggggacggagcaagactgagagatgcaatctcacaattttctggtcataatggccattgaaatgac

SEQ ID NO: 91330 - DNA, 308 bp, Homo sapiens
gttccacaattattccatatcttgatagttgtaattaaaatcatgtatatttttacataataacaatatggaataattctatattgttgacactaacatgacaaaccacatggataacttctaaggaaagccaaatacagataagagacatttacatccttaggtagattaacacctttgaaacctcacaatctgaaatactaaaactatactctcttatttttcgccatgggatatcatgagcttctttttccttacgtatgtctaatatgagggtgttttggttaaatcaaagccttttacataaa

SEQ ID NO: 91331 - DNA, 494 bp, Homo sapiens
ttagatgttaggtagaaagtagggatcaacagtttaacaacttatgtttagatgtaactattcaaatgtataagaacaagtgtctcccctctaaaaatatttttaaaatctcacacaagactctaaaccaaaaaccattgtaaaaaatcctttggaaatggatcattgtagccattgagatgacaggtcaaggtgagcattctgaacatataacaaaatataagataggtgataaatattcaaagcatgaaggaggtataatatgaagagtaaagtcctcccctcatctccccaagcctcagtgctaagaacttatcatgtgtaatttctggttttgattcttctgacaattatctcacaaactctggaccagtgctgtaaaatagaactttctatgatgatagaaacatctaaatctgtgctgtctaatatgataggcatgagctacatgttgctataaatttaaattttaattaataaaaatgtaatacaat

SEQ ID NO: 91332 - DNA, 361 bp, Homo sapiens
aacctggatggctgcctgcagggtggacccaagaacagctttacggatatgaaaagtacagcagccaaatttagcaactagaaacagctagacgtcagagaagtggacaaggcaaaatactgcctgtccttaatgcctggaaatatttgttgaaatcttaaaagattagaaaagggattctgtttttaaccagggtacaatttttaaactaggcaatagtagcaactaaatgatatagctacacatcaggtatttgtacaaaatgttcttttgttttcgtgtgtgaaaagtgttttggtaatgtatttttctattcaatataggggtagctatattcactagcatattccattacttccag

SEQ ID NO: 91333 - DNA, 601 bp, Homo sapiens
atgtggcaaagcttttaaccattcctcaaaccttattaaacataagctaattcatactggagacaaaccctacaaatgtgaagcatgtggcaaagcttttaggcggtcttcacatcttagtagacataagataattcatattggaattcatactgaagagactgtacaaaagtgaagaatgtggcaaaggcctttactgctcctattcccttactaaagaatgtggcaaagcttttcaccagtactttacccttaatacacataagataattaatgctggagagaaaccctacaaatgtgaagaatgtggcaaagatttctattgattctcataccttactaaatataagataattcatattggagagaaattctacagatgtgaagaatgtggcaaaggctttaattagttctcatcccttactaaacataagagaattcataccatagagaaatcctacaaatatgaagaatgtgacaaagcttttaaccacttctcaaccctgcctacacgtaagataattcatactggaaggaaaccctacaaatatgaggaatgtctcaaagctttttactgattcttataccttactaaacataa

SEQ ID NO: 91334 - DNA, 357 bp, Homo sapiens
attaattgagacttttttaaaacagtagaataagaaacaaatgtgagatgaaactatgaattttgaggcatcaggtaaaaatggatcaagacattgagagctataacctccaaacatgaaagtttgtttgaaaatatctacaagtgcttacattgtttaataatcatacactttgcttgcctcaacaagaagttcaaaagtactattaaacaaatagaatttaactccagtttacagaattcatctataatacctctattagttcctttaaacaaaatttatctactttgtgaatgcaaagataactatggattattttgatagatcaaaacagaatgtccttcaaagtgttccctg

SEQ ID NO: 91335 - DNA, 460 bp, Homo sapiens
ggattgtttaaggccaggagtttgagaccagcctgggcaacacagtgagaccctctctctacaaaaaaaaaaaaaaagaaaaaattgaaaaaaccaaattagccaggcatggtgatccatgcctgtggtgctagctagtagggaagctggggtgtgagggtcacttgagcccaggagtttaaggttacagcgagctatgattgcaccattgcatttcagcttgagtgacaaagtgaaaccctgtctcaaaaaaaaaaaattactatatggcccagtacttccacttctacatgacagaatatgtctcaaatgcaaaaatgcagggacaggccaaagtgcaactcctgaaagacacatgacgtagcagcaaccatgtgggaggacataaagagaagcaaagagatttccaatggtgcagagagttagagactccatgaaatgaatcatcaacaagtactca

SEQ ID NO: 91336 - DNA, 474 bp, Homo sapiens
atacacaaaacattatgggtatttttgttcatttgattataaaatgccaaagttgttttataaatgctacttcaagcctggaaactttgaggaagtcctgaacattaagcatataaatggcccagctctagaatacatgtaagttgaaaagctaacctgaagtgggaagcgcagtatatacctaagacttactctgcactgaaagtttgctttgtcactagaagtaaaacaagactgtggtaggatagtaagatcagtaacacctcagttaatcaggtatcttggaggaagtgaagaaagaccctaattcaagggacagttaattggccttttattccaagaatgggccttagtggcagtatcttaaaagcccacaagatggagatgtttcctaatgaaaggcctttaatttctttatagagctgagttagtgtcacatcccagtccccacccatgacccttccccagttaaaa

SEQ ID NO: 91337 - DNA, 823 bp, Homo sapiens
tgagcaccttcccttttttcagccaactgctcgctcgctcacctccctccttggcacgatgagcacctgcagccaccagttcacctcctccagatccatgaagggctcctgcagcatcgggggcagcatcgggggcggctccagccgcatctcctctgtcctggccggagggtcctgccatgcccccagcacctacgggggggcctgtgtgtctccttctctcgcttctcctttgggggagcctgcgggctggggggcggctatggcggtggcttcggcagcagcagcagctttgctagtggctttgggggaggatatggtggtggccttggtgctggcttcggtggtggcttgggtgctggcttgggtggtggctttgctggtggtgatgggcttctggtgggcagtgagaaggtgaccatgcagcacctcggtgaccgcctggcctcctacctagacaaggtgcgtgctctggaggaggccaacgccgacctggaagtgaagatccgtgactggtaccagaggcagcggcccagtgagatcaaagactatagtccctacttcaagaccatcgaggacctgaggcacaagatcattgcggccaccattgagaatgcgcagcccattttgcagattgacaatgccaggctggcagctgatgacttcaggaccaattaggagcacgagctggccctgcggctgactgtggaggctggcgtcaatggcctgtgccgggtgttggacgagctgaccctggccaggactgacctggagatgcagatagaaggcctgaaggaggagctggcctacctgaggaagaacc

SEQ ID NO: 91338 - DNA, 512 bp, Homo sapiens
caatcagacaggaagaataagttctggtgttccattacacagtaaggtgagtacagcaaataacaatgtgatagacatttcaagatagctagaagagaagattttgaatattaccacaacaaataaatgataaatgcttagtgatggatataattaccctcatttgatccttatacaatgcatatatgcactgaaacatcacactgtattctttgtctttctacaagtattataggtcaactaaaaacaaaaaatttaaaaagaatgtaggctaggtgtggtggctcacacacataatcccagcactttgggaggccaaggcaggaggactgctcgagcctaggagtgtgaccagttcaggcaacatggcaaaaccccatctctactcaaaaaacacacacaaaaaaacttagccaggtgtggtgacacacacctgtagtcccagctactcccagctactcaggagggtgaggggggagcatcacttgagcccagtcaacaaaaaaaaaaaa

SEQ ID NO: 91339 - DNA, 377 bp, Homo sapiens
tcacaatataaaatgacaagaataatgagatcttccacatctttttatatttttccactatatttgtgttaaagcttaggtattattttcattctttcatgctaaaagcacattagcattttctagaatgtaagtggttttgctagaaaaatgatattaatatgattatccagattgttattttggagggaaaaaggaaataagttctgcaaacactgttgggtttcttttttttaatgatagaggcataagatgaatagtatccatcttcatagaaagaaagaaacgtagagccaagtattgaaattttttaatggcatatttctttgtggaggtgaaaactgtttctttgcatttaatatgcacatctgccttgt

SEQ ID NO: 91340 - DNA, 2887 bp, Homo sapiens
  misc_feature (1530)..(1530): n is a, c, g, or t
  misc_feature (1586)..(1586): n is a, c, g, or t
  misc_feature (1630)..(1630): n is a, c, g, or t
  misc_feature (1707)..(1707): n is a, c, g, or t
  misc_feature (1738)..(1738): n is a, c, g, or t
  misc_feature (2052)..(2052): n is a, c, g, or t
gaggaacagtctcaagcccaatttctagaccagcacttgtcggtgggatgtgtgaagttattcaggaaagacactgggacaaacatctcattgggtgccagtgtccctgactctttagtgggcttgaagtggggctgagtgcctgcctcaggctgcatggagctgaggggaggcttggaataaagtctcagttgggcatttgatttcacagactcagactcagtcctgggggaaaaattactaacaaacaaatacactaacaacaacaacaacaaaaaacccctaaggctatcacaaactcagaccaaacccagagcctgtcctccttccccttccttcctttgacctgtactctttccactgcttctaaaaggtacatgtgtggagagggggttgttcccattccccctcattctttctttagcagctgattcccacgagcccacattccagggaagatggatctgccctccttcatatctcgctgcccatttttgcaggtgttggggctactgcagggcctgctgcttactagaaaggttggagggctctgtgggtcctggcaggctgcaggtttctctctggagacattccagagctttagaacaaacatgcagacagtcttacagctgcagttgcctgagccttaagggccttgctactcaaagtgtggtcctcggaccgccagcatcagcatcacctgggagcttgttagagaaaacaaatctcagacctcaccgaccccacggaatcactatctgcattttaacgacatctccaggtgattcatctgcacacaagttcaaccacaggctgaccatttagagaagctggacttgagtgggattttgcagtttttccttttgatggcctcctcccctttgcttcccctcctacccttctgactccttgtagcttattttagaacatgtcgggatcctgcttctcttgtcaacaaaaggctgttgttaaaatctttcagccggcagcagcaatgtttaattcatggactagaaaattaattttattttcatgaatagagctgaggaaaaatagcaaggagactctgtgcatggcccttgggaatccagcttgtctatttaacagatgaactggcaacagtggggaggcctgaggggagggctgccttctacaaacttgtgtagcaaattgtattaggatgcttttggctgcaggtatcacaaaattcagcttcaaatggcttaaaagaaaaggaaaatttctaatttcactgataaaaaatcttgagatagggtacttttaggatgacccagaaatgccatcaaatagcaggtttgttttctgccatggtggcttgttgcattcagttttcctcatggttacaaggtggccgccagagttccgggcagcacatggagtcaatgtcctatggaaggagaaagaggctgcccctccctgaagtttcattttatcagagacaaaatctttcctggttacctcacagctgatcctcacagctggtgtcctcttaaatctcacttgtggccnggtaatggctcatgcctgtaaccccaccactttgggagactgaggtgggtggatcncttgaggccaggagttccagaccagcctggccaacataacgaanccccttctctactaaaaatacaaaaattagctgggagtgatcgtgaacacttgtaatcccagttactcgggaggctnaagcacgagaattgcttgaacccaggaggcngaggttgcagtgagccgagatcatgccgctgcactccagcctgggtgacggagcgagactgtcataaaaaagattttaaaaaaagtctcacatgtaggattgtgtcatgcgtcccttggtaaaccagtcattgggaaggggatggattactatgggtggctcagcctgatcagggttggacactttcttcatctgttgaggatactataacagagtaccacaaactgggtgacttttaaatggaagaggaagaaatttatttctgagttctggaggctgggaagtccatgaacaatgcatcggtagattggcgnctggtaaggacccacttccttattcatatatggtgccttctttctgtgtcttcacatggcaaaaggggtgaagggtctcttctctctccagccttttaaaaagtattgattgattgattgattgtctgacagggtcttgttctgtctcctaggctggagtacagtggtgcactcacagcttactctaaccacgaactcctgaactcaagggatccttctaccccagcctcccaagtagctaggactacagaggcatgctaccatacctggttaattttttacgttattatttttgtagagaatgagggtctttttatgttgtccaggctggtctcaaactcctagcctcaaatgatccttccacttcagcctcccaaagtgttgggcttacaggcatgagtcactgagtctagcccaccagccttttcttagtgccttagagggcactaatcccattcctgatggttccatcctcatgacctaattacctccccaaagccccacctcctaataccaacaccttgaaggtaaggatttcaacataggaattttggagggaagacaaacattcagaccacagcagccactgagtcacatgaggcaagggcaaaagagccaaatgaaacagaggctctggctcgaaggaagcggagggcgtggctgctgagacagccaacacctcttccaaggccttccttggtgttgcctccattccctggaaaggtctggctcctgtgttttacatttcagtgtgctcttcccagtagagcggtaggttactctgggcacagggaatttttaaacacccttgtgggagggttcctggaactgaatt

SEQ ID NO: 91341 - DNA, 567 bp, Homo sapiens
gttttttttattagtccatctagccagaggtttgtgactcttttggattgtttcaaagaaccaacttttggtttcattgattttgttgttgttgttgttgttgttgtgttctctgttttatctttgctctaatctttattatttccttgcttctgatggctttgggtttagtttgtttttctctttctagtttcttaaattgtaaagtttcgtttttaatttcagatcattctcgtttttttaatgtaagcatttatagctataaatttctccatgttggccaggctggtctcgagctcctgacctcagatgatccacccacctcagcctcccaaagtgctgggattacaggcgtgagccaccgcgcccagccgctacacctttcttaaatgactctaagactgtttacttacagtcctcagtttttagtaactttagaattactcatttatacacatgcactgttcattcatttatacaaccacacataatgaaaacttattttttccacagataatgtatttctaggacctggacattagctgaactcttgatataaaaaaaaaa

SEQ ID NO: 91342 - DNA, 406 bp, Homo sapiens
atatgaaatgtttaaagtaacttaaaacttttaggtccaagggtctcaaactgtagggaagattcactgaggtgggacttagaagcgcacattcctaaccaggcctccagaggcagaggagcctcctagggatcccgctgagatgcgaattctgactcagcagatgtggggcgtggcctgagagtctgcatttgtaaccagctcccacatgatgtggatgatcctgatccagaaccacactgtgaggatttttaactgccccaaaaactccttataaaaacgaggctgaccaggcgacgtggctcacacctgtaatcctagcactttgggaggctgaggcaggaggattgcttgatcccagggctttgagactagccctgtcaacataggaagacctcgtctctac

SEQ ID NO: 91343 - DNA, 978 bp, Homo sapiens
ggtgtatttaaaatcccttagctagacataaaggttctccaaggccccaccagactcaggagcccagctggcttcacctagtggatcttcacagaggcagtaggtggagctgcctgccagtgccgtgcgcccgcactcctcagtccttgggtggtcgatgggactgggcgctgtggagcagggggcggcgctcgtcggggaggctctggctgcacaggagcccacggaggggcagggggaggttcaggcatggcgggctgcaggtcccgagccctgcccgccagaaggcagctaaggcctggcgagaaattgagcacagcggctgctggcccaactgctaagcccctcactgccctagggccggcggggtccgccgctgctccgagtgcggggcccacggagcccacagccacctggaacgcgcgctggcccacaagcaacgcgcgcagcccgggttcccacccacgcctctccttccacacctccgcgcaagctgagggagccggctctggccttggccagcccagaaagaggtcccacagtgcagcggcggggtgaagggctcctcaagagccgccaaagtgggagcccaggcagaggaggcgcagagagcaagtgagggctgtgagggctgccagtatgctgtcacctctcactacactccagcctgggtgacagagtgagacccggcgacaaaaaagagggagagaaaattgaaagactttcctaaagtcacgagttatcaaatgccagttagcccggtctaacatgacactgaatcaactatgtgcttcctgctcaggagtcagaacgatattatcaagtgttaatgcttctaaatgcaaagagggagcaaggtgtttcttctctttagtctgtgaccagcagctgctcactataacctctcttccactgcatgtccaaggattactgcatagaggaggattcccatcttcccagcccctaaatttaaaaata

SEQ ID NO: 91344 - DNA, 525 bp, Homo sapiens
tgctgaggataattttcagagcagaatgaaatgaatggctaccacagaaattcaaatcactcttctagttctgggccatgtgtcacttaacatgaaaaagaagaataagtcttagcaaaataatagtgagtaaaaaagtagtaagggaaataattgttcacttaatgttaagtgaaaaaaaatcagaccccagggatggataaaatcatgattcccccctttttttatgtcatagaaaatacggccgggtgcggtggctcacgcctgtaatcccagcactttgggaggccgaggtgggtggatcaccagttcaggagatcgagaccatcctggctaacatggtgaaaccccgtctctactaaaattacaaaaaattagccaggcgtggtggtgcatgcctgtagtcccagctactcgggaggctgaggcaggagaatggtgtgaacccgggagacggaggttgcagtgagccgagattgcgccactgcactccagcctgggcaacagagtgagactctgtctcaa

SEQ ID NO: 91345 - DNA, 199 bp, Homo sapiens
ttagtggttcctttagggtttatagtatataactttaatttatcacagcccacttcaagcgtaagataagaacttcatgtacttctattcccccactcgagtctgttccctattattgtcatgttttacttctacacatgttaaaccttataatacattgtgggtttttgtttgtttttgatacttttaaagtgatata

SEQ ID NO: 91346 - DNA, 1007 bp, Homo sapiens
ttttcccatagtgtatcagttgttatgccacaataacaacaataataatgttcttaatgtccaaagtgctttgtcatttagagtcctttaacatctgttataccatgtgatgcccttgaacaccccattgggctattgtctgtgtattctgctctctttagcagatgatctgtaatttggtcattgttctgttatattccagattgctctacttgctaatatttgtatagaatagaatttatgtaaactagtaaccagttgatctctgtgccaaatacattatatcaggattacacaaaaagtatcacaaaggatggtcttggccatatgctagggcccctgtgaaaataagtagttttgagaagtttttctatatacgtatatatacacgtgtggttctatttaggtggggaaaaaatgaaaaagcagggacaacaggaggaaatgaaggcagagaaatatagtttcctttcctaggattgagacaattctatttttcatatactcgttgctcattaaatagtaaagggttgatttgctgcaagagtagctgagaattcaaaaacatccttgcagaatgattcaaaagacaaaagccaggctcaacttatagaatgttttggaaactggaagtaatgatacatttcacttcagaagcacttgtaggtctttactagtgctaagtattatggtgagctatcattaaagtgtgccatcttggataaaggccttttgcctactctcttctgcaattttgacacctcaatattcacacccataaacattactaagccccagttctatcgttggaaggagttgttattcttttgttgttcccttatgcaatttttaattctatgaatgttaagtttttttgagctaatgatagatagaaatgcccactcaaagaaaaataaacagagacaaatgttaaaattgccatacagactgtttttccccctgttgtttcactttaaaataaaaagaaatccttgattaatccagaa

SEQ ID NO: 91347 - DNA, 225 bp, Homo sapiens
ctgggaggcggaggctgcagtgagccgagatcacaccactgcactccagcctgggtgacagagtgagaccctgtctcaaaaaaaaatttttttttagcaaaccagtaatagaaaggatttacttcagtctgataaagggcatctacaaaaaatctgtagttatgtcatacttaatagtaaaggagaaatgcctcctccctaaagtttggaacagtacaataaggc

SEQ ID NO: 91348 - DNA, 255 bp, Homo sapiens
ggctttccacacaccttggctctatgatcgtgtatcactgcaaccaccacttccatcttcgtattgcctgagtctgacgtttcttcttcccacttataaggacgcttgtgattgattccatcgtgcccacctggatgatacacgctcctctgcccatctcacaatccttactcccaaggcccctttggctatgtaaagtaatatactcctagattcagggatttgaatgtggacatctttttttttttttggaaa

SEQ ID NO: 91349 - DNA, 236 bp, Homo sapiens
atccactttcctgggtccaaagggagatttcatcaaactttagagatggagcagaggaagagggaagtttttatttattagcagttatttattaagcccccaccacgggcctgtactgggtactgcaaactgagtggtgaatggtcagatgtagcacttgcctgcatggaatttacagacccagactgaaggattaaaatgaaaacaggggtagcagagattggagcaccctccag

SEQ ID NO: 91350 - DNA, 120 bp, Homo sapiens
ggtaagaacaaggttttatttaaaatgttgacttctcttaatacaagaaggtgttaagttttaaattctataatctgtttcttttgaaattcctagattgatatctcagaatttcagatc

SEQ ID NO: 91351 - DNA, 435 bp, Homo sapiens
aaaaacctacaaaacttgagtgttagctgtgtatgtaactaaagtttgttacttaaagtacagtgtagtgtcatagatacaaaataagcaagataggccattaatagttccaaatttcttgagaatagggattgtgcatgttttatctttccatggaataaaaagtaagtattgtttttaaaataataccaccattaaatgtgttgttaataacattggggttttgccattaagagtaattgagagtaatggcaaaaaccgcaattacttttgtacccaatgtattaatgattatcttcttccttcttgatttagtattattgtgaaggggtagcatggaaaagaagtagcaataagcaaaaaaaggaaattcacctaaacatttctgtgtacctaggtaaccctaacttaaaaataccttttccatacaaatgt

SEQ ID NO: 91352 - DNA, 292 bp, Homo sapiens
ggcaatcaatatctattctctatcactatagatcagatttgttttttctaaaattttatagaaacagaatcatacagaatgtactcattgtgcttggcttctttttatcaacataatgttttttgagctcatttatattgtatcagcatttcccttcttattgctgagtagtattgatatatggatacactacaatatgtttttccactcatctgttgatggacatttgggttgtttccagtttgggctattatgaataaagtacctaaggcagctgtaacaaattactgca

SEQ ID NO: 91353 - DNA, 362 bp, Homo sapiens
aagattgtgccactgcactccagcctgggtaacagccagaccctgactcaaaaaaaaccaaaccaaaaccaaaatggtaatggtagtagtatctataaccaagacttgtagaaaattgggtaactttgctaagtgtctggcatatagtagatgcttaaatggtagctgtagttaatcgtaaatgatttacccctttctatgctaacattttggctcttaaaattatttgaaaccaactatctgatgctgaccagttgccatctaatgaaaatgacagtttgagaggttggcctcaagccaaccaaatcagagagataagaagattaatgctcttccttccctagtatttttctatacccagg

SEQ ID NO: 91354 - DNA, 1169 bp, Homo sapiens
aaaaaattagccaggcgtggtgatgcgcgcttgtaatcccagctactcaggaggccgaggcaagagaattgctggaacctggaggcagaggttgccgtgagctgagatcacactactgcactgcagcctagacaatagaatgagtcttcgtctccaagaaaatactagccagtattataaaggaataaataaagctgtcattgtttgcagaagtctatgtagaaaactcaagagaatgtacagaaaatcttttagaattaatagagttcaccaggatataaaattaacatacaagtgcagcatcaaagaggaaatgtaatgttaaaaaagataccattgataatagaaaccaaaatgtcaggtactgcggaatcaatattacgaaatatgcatgtaactttagagaaaaataactgatattttagcagacctcaataaagatgtatttatatataggaagattcaagcttctgaagttgtcaattctccctttaataatctataaattcagtataattctaataaaacttccaacaggaatttatttgccctttgtaagtggatgctgctgtggccacatttgaagagaggcttggcctgaggatttgctctaccagataggaagttatcttatttaaaatagcagtatttggccaggtgtggtggcttacgcctgtaatcccagcactttgggaggtcaaggcaggcggatcaccggaggtcaggagctccagactagcctggccaacatgatgaaaccttatctctactaaaaatatagaaattagttgggcatggtggcaggcgcctgtaatcccagctactcgggaggctgaggctggagaattgcttgaacctgataggcggaggttgcagtgagctgggattgtgccattgtactccagcctgggtgacagaacaagattctgtctcataaaaaataaaatagcagtattcacgcagggcagtgatatggcccaagacggggcccagaacaggctctcgagcatgtggacatggatgggaaagcgctgcaggccagttgcgtgggaggtctgcactggacgtggtgctgggaccactgtgatttatgaacttggccagcatgggagaggagctttgtcaccatgggagagggaaggatttcttaaataagccaaactaataac

SEQ ID NO: 91355 - DNA, 364 bp, Homo sapiens
taagaattcaataaagtacctgtcacaatgctaatatataagcagcagcagctctcctatatacaaattacaagtagaaaatgtaatgacatgcatatgtgtgtgtatatatatacgagatgtatgaaatgatgattgccaagctattaataattattcatgtacagtggtgaggtttcaagtgatttttactttctttctttatacctttatgtattgttccaaaaaaatgtttacaatggacatgtattttatgtaactttttaaaaagttacttctattgtaagaaaaaaataaattgcagtagaagaacccagttataactgcaagataaatatataacaattagaaataaatttaacaa

SEQ ID NO: 91356 - DNA, 470 bp, Homo sapiens
tgctgatgatgcagaagattaagaagaggagcagtgccattgatttggacacgcgaaaaatttgcagcagatcttggggcatctatagcctctgcaagttgcaagtgttaaagataatcaacctcagctaacatcctttgattgaaaaaagcttctgtgtcatataagggaaaatatgctaatgaacactaaggtttttttagggattcaaagaaaaagaactagcttcctaaaacaatgcttctaactaaatatctgcaaatatgaagacatacccttcaacacaaacatcttcagccctcaagctgaacagatgctgacattagtattagcctcctgcaaagagtcaacatcttcaatcagaacctgggtcttccaacatagatgaaggtcttgatgtcctgtcaagattcaagttagcctgaggtctcactgtttatctatgatgccacacatctagtcacctctac

SEQ ID NO: 91357 - DNA, 505 bp, Homo sapiens
aaaaagtcagcaatgaacattgtgatctgagtgaggataggagctcggggagtgcctccaagcccttgtactgcctttcccatctgtttttcactttctcccattcccccaagtacttagtagagttttccattaagctccactgaactgagccattctcagcaaaataactccacaggttatttattgcggttcaaataagttccaaatcaaattctgtgtcattgaatatcatttttaaattccttcaagtcagattggtatattacattgagtttgtcatatttaaccaacaaactaaagctaaacattttccaaaggaaaaaaacaaatgctgaaatacaccacttggattttatttaatattatttaaaataacattaaactagaacatgtggacataaattctataactaaacttactgatttatgtatcatagaaaagtaataaaacaactctcttctaaataaaggcttatttacacaatgttaaatggtcagaaat

SEQ ID NO: 91358 - DNA, 399 bp, Homo sapiens
cggagagagaacccagggtcttgctctgtaagtgtcacgagagaccctttggatccttcataattcctgtgaccagacctctgcctccccagtacctgtcccctccacccctgaagaatctgctgtctcgggaaactccagaatggagctgggccagtgggagctggatgagatgacctggctcctccctgagtcacacccaatccttgagcaatcaggtcccaattccacagacagttcttatggtccatcccatgcttttgagagagttatggaaatcctcctctttctgctatgtgggttggggtctactttgttcttaaagagccctccatattcttttttatccaaaagttattacatagtttaggcccctcctgctgcagaaaaggactgtct

SEQ ID NO: 91359 - DNA, 835 bp, Homo sapiens
cctaaaatcagattgagactcatcagtgctaagttagagagatgggattatatagtctgtaagtgcccttcaaatcttgagagctcctgtattttgtgtttttacagagtattttgtttaatccctatttcaaccctataaggtagatactatccttgagttttcaaatgaaaaaaaaaacaaaaactgagattctacgatattcagtaatttccccaaaatcccacagcaaatgacagagctaggatgggaacccaggagtcagaaatcggaacttgtgttcctaatcacttaagctatatcacaaatgagagaggtggatgattctatgactgtagggctctaaaatgatgtgaaggaatgaaatgtcttcacatagacaagaaatgtctatgtcctaattcccagatcctgtgaacattactttatatggtgaacaacgtgattcagttaaagatcttgagataaggaacttatcctgtattacctgggtaggacctgcatcaatcacatgtattttttaaaagagggacgtttgacacagacagaagacacatagaagagaaggtgatatgaagacagaggcagagattggagtgatgcagccgcaagcaacggaatactggcagcaaccagaatctggaagaggcaaggaatggattctcctgctggagcctccggaggaagtacagccctgctggcaccttgatttgggacttccgtcctccagaaaagagagaatacatttctgtagtttcaagccaccaagtttgtggtaaagttttttacagcatccacaggaaactaataccagtggtaaagtgtactttacctc

SEQ ID NO: 91360 - DNA, 569 bp, Homo sapiens
ttggcaggatggccgggagcagggaagcacagaacatgtggggagactaacagcagcccagggttgctggagtttgaggagcgaggggtggtaggagggagagatcatggatgtgaggtcaggaagggggttgtggacagatgctgaagcactgtgaaaatgggtcttctctactttgcagacagagaggagccactgaatatttttcagcagctgagatgtgtgatcagataatgtttgtaagagataaatttttccctggtgatacgtacagagaacactcctagaatatctgctgctgatttctaagcagcagctttcactcatggcagttttttgagatgggttgttcaggcttcaccttcattaagtaataccacggaatgccttggtcccaagtgactgctgaaactggcccagttttcatgagtcacaattgtgtacatcagcaagtcctgcagctgaactgaaagcacccggtagggctttcagtggtgagacggagctagagtgaatctccctcactgccttcccataacccagcccgtactggctggaggaaatccaac

SEQ ID NO: 91361 - DNA, 274 bp, Homo sapiens
cagggaaagcaccatataatggattagtcaagaacgagatgaattggatggagcgtggaaaattatgggagctggtcagggttagcaataacacgctcagcagagtggggatggaggtaaacatggaaggatgcatgggatttgtataggcagaaagcaagagagcgggcacacctgatcaggtgagaggctcaaacaaaagcaggagaaccaaaaataaggaagaattagagcaccaaagaaatcagtttggttggaacaaaggatttaagaa

SEQ ID NO: 91362 - DNA, 430 bp, Homo sapiens
atatatatatatatatatacacacaaacacacacacacacacacacacacacgcacacatatgataatcagtcagtcggtaaccaaatgctagagagtgaccattaacctaagcctgtttttataatgaaaaaatgtgttaactttaaaatatgccaacctccttgtgtcttttaaacaagtcagagtgaaaatacattgtcccctaaggtgtggggagaggaagctttataataaaattagtgattctgcagaaacttgtgcactggatatcttgacaatatgaatataaaactccctaaattaaaaatagggttaatagaaattatcagtatttaaatagggaaaaatgattttatgtttattttatttaggttttatttctttggtcatcttaatgcaaaatgaataaagcatagaatctgggtttg

SEQ ID NO: 91363 - DNA, 156 bp, Homo sapiens
ttctgcaaatctagctgacaggtttttctacgactttctaattaagtctgtaagtgttgacatctttcttacatatgcgataaagagaaaggaggcaggcagccctgaaaatgaaaaaagaagtcagttttaaaaatgtggaatctacaggcagca

SEQ ID NO: 91364 - DNA, 812 bp, Homo sapiens
caggctcgggctggcatgcctcagccctgcccttctacctttgcagatgctgtttctccccggagcgactccctgccacctgcaccaaccccactgccaccctgcctatgccaccccacagcctggttctgcctgtgccttgcacccaccaggagctagctcgaggccctgggaggtgggtgctgctcacagcttgttcccagtgcccagttcacaacatgggcctcaaaatacaggctatgaatcagggctacacctctactggcaacctcagcataagactgggactcagacttcaggtctgcacagcactgtccactggatgcttccctggtggccccggggctctgcagatgctcagtttccaatgcacccgatccctgccccagcctcctccctgggccctgggcaccagcaccagcttgtcagaggtggcctccccacggcccgagccatcttctgacctgggcacatcccctccagccttcagaaaataccaaggtgctctgcttcttgctgagggcatggatcattcatcatcatgagtctgaagtccaaactccccagagtggctcacagggaaatattaaaatccactccaaggtcttaaggacaaattcaaactgcccgctctgtccgcgggtggaagcctccacactcctcaccaagatcctggacaaagtccaaaccccagttgggacccacaggctcgcatggggtccaacctcttctccagcctcgtcctttaccgcctcccacctctctcttttaccatcaatgggctatttttgtatttgtttaattggggtaaa

SEQ ID NO: 91365 - DNA, 212 bp, Homo sapiens
gttgggtttttttaaggcagtattaatttcattttctgttgtcaatattcaccataaaatggctttaaaatttgatggtttcattgatttggtttcattgatttttgcctaatgagtagtctactggctgtggttgatctgtgattgaatcttcatacactgcgcagtcgctttgtgtactgtatactagttgtccatactgttgaatatac

SEQ ID NO: 91366 - DNA, 367 bp, Homo sapiens
ccagcatttacccagctcttgtccctgctgccagcctgcaaggctccatctttgcttgaactgggtcaatgcacatccctctgtcctggtccccagctctttgtcccgtagtctgttccccaacagtgaccagaggaacttgtggatgcttgaactgggtcatgcacatcccccgtctgctcaggtcctcacagcagccacaggcagggcttgatcagctcccatcacttccctgccctcacctcctcctcccgttcccctccatcactccactccagccacaccggcctcttccctcaaacacacaaggcacggtcccaccttggggcctttgccctggctgtgtcctctgtctggtgcacccttc

SEQ ID NO: 91367 - DNA, 236 bp, Homo sapiens
catttctgttacattgagacttcagtcaccaacatctggtggcagagatacaggtgtatgaaacatttctatttacccaaatatgccagttcccaaataggatgactgcatttagtgttaaactggcttttctcattagatactctaattgaggaatatttagcttcttgaatagaaaccatccaaatgatgttttttttttgatatgtctgtaactataaaaatcagcaaataag

SEQ ID NO: 91368 - DNA, 362 bp, Homo sapiens
tgagcacctgctgttggaaaatggcaccaacagacttgctcaaagcgggttccagaaaccttccatttgttctgtaaaaatgtagtatctgtgaagcacaatcaaacagggtgtacctacgaacagagccatacagtatggagcctcccatgactggcttctttcccaacacaacctaccgtatggagtcggctgtgactggcttctttcccatagcatggtctcaagtttcatgcctagtgtagcatgcatcagtacttcacctactgtatggatatactatgctttaaaaatccattcattaggccaggtgcggtggctcacgcctacaatcccagcactctgggaggcaggtggattac

SEQ ID NO: 91369 - DNA, 237 bp, Homo sapiens
tctctgctaagattcagatattgtttatgaaatctcaggtgtttagagtggtaaaagaagcccatttgttcttttcaaaaaaggacataccagcctcaggttgaaaagtaaggcaaatatttttttgagttccttagcaactgttgaggtgatttctagataattttgaagaagtctgtgatgattggtaactactgagaattgctgccagctttgtgttaagaggtcaagtaccat

SEQ ID NO: 91370 - DNA, 488 bp, Homo sapiens
ccagaacctcaagaaggtatcttctgggtaactgaagtggataaccaaccgatcaggaagttccaagggccttccaagccccttctggaatgaagaatgcggagactcgatttccacctagaaacagagtcccacccctccctccttctcctcctggccccgggggtgcccagtgaagggcccaacagctcctagggcaccctgaccttcccccaggaagtgggagagaccagcggtaggaattgcaaatgacgttcattaagcaggatgctaataccatgaattacaaatgaaacccagatgaagaggaccctggcagccttacctctgttagatattaattgggcgacactttgttttaatggtacgttaattaatgcggaatttcgacggaagtcctcgtgacactcacattaatacaaacgaattcattactgtcggtgttattacaagaaatgacaaataaatctgtaacagtgggacccttc

SEQ ID NO: 91371 - DNA, 1292 bp, Homo sapiens
tggaatgattttttaaaacataaaataaatagaaagtcatattatgttcttaaataggaagcctcaatatcataacaatgtcaatcaattcttcccaacttgatccaaagactcaatgcaataccattcaaaatcccagtatcattttttgcggaaatcaataaactgactgtaaaaccaatatggaaaggcattattataagtcttttggggacctgccatactttatactaagaattattataaagcaaccacaatcaggacaaataatcaagtggattactggcactagaggagagagccgaactgagagtctagaaactgagcctgtgcatatactgacacttaatattcaccccaagcaagcactggagatcacaggagaaaaaatgcacctactcaataaataggctggaacaatcagttatctgttatcatatggcaaaaaaataaaagtggatccttacaaaaaaagtctttccatgtggattagagacttcaatgtaaaagtgaaaagcaaacaacttttagaaaatagagaattatcttaatgataggacacaaaaaaattttaaaacataaatcatagaagactgataaattcagctgcagtaagatcaagaatttcaatcaccgaagttttttttaatccaatcataaattggaaaagatatttgcaacacaaatctagaattagatctaggctaggcactgtggctcaaatctacaatctcaacactttgggaggctgaggtgggtagatcactggagctcacgaattcaagaccagcctggggaacatggcaaaaccccatctccacaaaaaatacaaaaattagccaggcacagtggcgcgtacctgtagtcccagctactcaagaggctgaggtgggaggatagcttgagcctagcaaaggttgcaatgagccaagattgcaccattgcactttagcctgggtgacagagccagaccctgtctcaaaaaacaagagaattagatctaaaaccataaaaaattgctatgaatcaatcaggaaaaattaaacaatccaaacagaaaaatgggcaaaaagtatatacagacacttcacagaataagaaacacaaatacatttcacagaataaataacacaaatgctctatgaatatccgaaaagaaactaaacctcattggtagtcaaggaaatacagattcaaattacaatgaaacaacatttcttacccaccagatacataatttttttttctttttttttagacgaagtgtcgctcttgttgcccaggctggagtg

SEQ ID NO: 91372 - DNA, 422 bp, Homo sapiens
tattaaggcaggctctaatttaaaattgccacaagctttctatgcacaaaataccagaagtcctaaagacataaatatgtttgactatatacaagagtaatattttatgtatcgaaacgctatacccatgttaaatgacaagtggcaaatgaaaaatatttgctacatgtgacagatcaatatccttaaaatataaagaaacctaaccaaaaataaaaataagaataaaataacactgtcaaagaaaatgaacaggcaattgaaaatataaatgaagaatatgtgaaaacattctaattcattagaattatagttcaaattaagataaaatctatctaccattcatacctatcaaattggtagagatgaaaatattaataaatgccaatgagtatcgtggaataagtgaaaaaatagagttc

SEQ ID NO: 91373 - DNA, 571 bp, Homo sapiens
gtcctgggtcctgagcttggagatcgctgaacgtgcctgcaggtgaccgtggcctctcctgaccagcagtgaaatgggccaaatgatgcttgcttgccctgggcactgcagaatcaatctctgagaacagctgagaagagtaacttctgctgtccctattcaggaagcctagttgtgttgattggggtcaccccagggttgctcaccagctccatggggtcagcgttgggaatggaaatgactcccttctggtggagacagagctttcagggaagcctgctaaaccagcacaagcaagtgcagccccttggccatcagggtgccgttgcaggacagggctgagctacaggttcaccttcctcacctgagtagcagctcttcctcctgcaggcctaggagagcaaattctgggaataccaaaaatgatgacctccccacccccaacatcttggggaccactttccctctcactatcccttcagccacagtgatgtcgcttacgtttcctgaacagaccttttttgtttgacttcaggaacgtcatgcaggctgttctttctgcctggaattg

SEQ ID NO: 91374 - DNA, 449 bp, Homo sapiens
agggagaatatgggatagaacaatttttttttaagaaataagtgctaaaaatttcccatattgggcaaaaacataactcacagaatgaaggtcagtaaactccaagtagaataaatgcaaagaaaatcaaatctagacatataatagtcgcactactaaagtccaaagataggccaggcgcagtggctcacacctgtgattctagcactttgggaggccaaggcaggtggatcacctgaggtcaggagtttgggaccagcctggccaacatggtgaaatgctgtctctactaaaaatacaaaaattagccaagttatggtggcaggcacctgtaatcgcagctactcaggaggctgaggcaggagaatcgcttcaacccagagggtggatgttgcagtgagccaatatcgtggcacttgagcctgggcaaaagagcaaaactctatctc

SEQ ID NO: 91375 - DNA, 462 bp, Homo sapiens
tttttttgagatggcgtttcactctgtcacacaggctggagtgcagtggagagatctcagcctccacctcccatgttgcctagtcctgggagtgggaatggggattcatatcaaaggagcaagagagaattgggggtagtgggtgggggaggagtgatggaaaaggcctaaatttgaatctgtacacttgtaatgggtgagtcatatggtatgtagattacactttaataaaggaggaaaaggtagaagaaggggcagagaagcaaacagggaggctgttgccccattccagatgacagacaacactgtcttgaccagggtggcagtgggaaggtgatgagaacggttagacagaatatattctggagggcatgctcaacaggatttatttatggattggatatggcacatgggagaagagaggatgacttaatttacttccagccttaacatctgtgtgaa

SEQ ID NO: 91376 - DNA, 414 bp, Homo sapiens
ctggagtctgcaggcagtgaggggtggggccaggggagggagtccagcagtttgcccgtaggcctggtggggagcaggtagagggaggcagtgggcagtgtattgtgggaagaggcctgcgtgcagccaccgccctctcttgctccttcccctccccctcttgctcttcatgctgcccctgcccagtgctatggtaaccagggctggctgcccagttccctcttggggtccaccccaacagggcctgcttttgaggacccacagatctcaattcctggttgggagccatggtaaccagggaatggataactagagaatgcggccccatggaccatggtttaggggcagggtctgtgcggaaaggagctggtcctcaccagctcccctggtccctcccaccctttccaccccact

SEQ ID NO: 91377 - DNA, 258 bp, Homo sapiens
ctctcgggttcaagtccttcctccacatttctgtccactcagcagcattcctgagggaagagtgggcaggcagggctatggtgaaggcatgaactggaactggagggcttcttttgcagaccctttgtggtactggaaagaaattcctcaaggacctataggctcattagtgccatgctaaactgacccagctgactctgaatttcagtagtattgttccagaaaaaaattccagccaggcatggtgacttacatctg

SEQ ID NO: 91378 - DNA, 457 bp, Homo sapiens
gtgggaatgtggtgtttcaaactcctgggagtatgagcttcttcctccacaacaccctcatcctgacttggagatgaggtctccatagcatttctacacaagaggttgaatttcccctcttgtttcattttagtttttgtctcctgagatttaaaaacatttttaagtaccacatttctatgtattcattagaatgcctggaaattttgtttcctgatagatttctctctgattatgttgtagctaaagcagcagggaaggtggggaacgaccttttctgcagggcagcagggagcattggacatgtcagctgaaagtgtgagggaaagaaccttggccttggagatggggagccctgggcaccggctctgcctctgtgactcacaatcacattcggccagcatactttacctccctgcttctcagcttctacatgttcaaaaaaaagaaaagaaaa

SEQ ID NO: 91379 - DNA, 275 bp, Homo sapiens
tccaagtgtgatctatgggccatagaattgcctaggttttattaaaatgcagattctcaggactcattatagcctttttgaatccaaatccttaagtgattatttttactgagtgaatggatgcatggaccagtattctctccaatttatagatacccagagtcctagcttgagacagttatctgtcctccgcttttatactctgaaacttcctggggctaagaagagaactgaaatccccaaacaccctgcctcaaatctcacaggtttccgtt

SEQ ID NO: 91380 - DNA, 216 bp, Homo sapiens
attaggtacagggactgttttaaggttttttgattaaataagacatataatatatctttgtaaaggatatatcagtgggagtatttaaatatcattattattactattacatgacacaaattggagaaatgggtcatgtttatcttttgaaaaatgtttgcagtagaatcatttaaaatgatccttttaacttccagaggacgtggcttttgcatt

SEQ ID NO: 91381 - DNA, 239 bp, Homo sapiens
acttcaccctttcaggcctggatgtcttcatctggataaattctaaccgttgttgaaaagccatgtggtaaatatttttgaaacctaaagccttctctacgcaataacactaagttttcatggtaaatgacacagtttcaatattctccctttcacattatggtcagtagtttgcattcgttgcttgaagaggcgaaatgaatagtctacagacactgggaaccaagtacagctcaatc

SEQ ID NO: 91382 - DNA, 1035 bp, Homo sapiens
gtggctaaccaggctgacaactgagatgaggattcactgtactcatttggtcacaagctgctggggcgggttttattttattttatttttatatttaagaaatgaaaatacgggtatttttaaagattctccaaaaagtccagaagccttgacagctggcatcaatcagcccaagacccccaggggattcatgggaaatgtcgtattttagagtcctacagaatatttctggcctcaaggaactggatgaagagactggacaaagtccccaggatgggcatcccccaagtcactacagcatctggagcccctaggagatactcagggaagcaaatccttgtttgggctggcaagcaaatccgacacgacgaggtccacaaactgtttctgcatcccagggctctgacgaaggcgttaagaaacagatgctgttcccgcgtaggctcccaggggccccagggaggtccaggtggactgcctctctcattcccaggagctgtcctgggactttgggatttcttctcagctttctccacctttcagtttctcagttgtttcagaaacatagcaatgacataaaaactgctatggagagaaagctaacatggtcccatgccttccaggcagccctgctgaaggatctaagttggccctgttcctgcaaatcatcaacgtgcctggactcgccagctaaaagcctgggccttccccagccttttttctggggcacctattcctctgccagtcctgctcccctcaccttccttgggcccgtcagagtcttttgtggtgctgtgcttctcagaggcaggatccaagcagatcagcccagcctagcccagctcaggcaggccatggccgctcaagggaaagactgccccagaagagcaagctggagaggctgggcaggggctgatggggctgggtacactggggaatgttagcaagactgggaaggaggccacattcctgtctgcagcagcccccagcgatggtcttcagcaataaaagttgtgtgacctgaaaaaaaaaaaa

SEQ ID NO: 91383 - DNA, 2101 bp, Homo sapiens
gaagggcaggggcttgcggatagaagggggtcaaaggaacggtgattatcacctgtgaggggaaagggggtgctgtcctccctccttcccttttcctcagcctgcaccccctgcaatcccccacctttcggggtctccccctccttgttgctaaggcccggaccgtcatcccagcaacagcctcagtcatgtgaccggcaatggcggcgctgacgagaggctttcttgggggcctcagagctggggaagaaaggaggaagtcctggtcagctgagtggaaatagaaggatttctgctgccatcatcttccatgggctttccaggtcacacgacctacaagtagggagcagggaaagaagagtgagcctgcatgccaattctaagctcttcaggatcaaatgtcgttcgtcctgtccagaatggcagcctgtggaggcacctgcaagaacaaagtgactgtgtccaagcccgtgtgggacttcctgagcaaagagaccccagcccggctggcccggcttcgggaggagcaccgtgtgtccatcctcatagatggcgagacttctgacatctatgttctccagctttccccacagggtcctcccccggcccctccaaatgggctctacctagcccggaaggctctcaaggggctgctaaaagaggcagagaaagagctgaagaaagctcagaggcagggggagctgatgggctgcctggctctggggggtggaggggagcaccctgagatgcaccgcgcaggcccaccccctctccgagcagccccacttctgcccccaggagctcgggggctcccccctcctcctccccccctgcccccacctcttcctcctcgccttcgggaggaggcagaagagcaggagagcacctgccccatctgtctgggggagatccagaatgccaagacattggagaagtgccggcattcattctgcgagggctgcatcacccgggctctgcaggtgaaaaaggcctgccccatgtgcggccgcttctatgggcagctggtgggcaaccagccccagaatgggcggatgctggtctctaaggacgccaccctcctactgcccagctatgagaagtacggcaccattgtcatccagtacgtcttcccgcccggtgtccagggggctgaacacccaaacccaggagttcggtatcctggcaccacacgggtggcctacctcccggactgccctgagggcaacaaggtgctgaccctgttccgcaaggcgtttgaccagcgtctcaccttcactatcggcacgtccatgaccacagggagaccgaatgtcatcacctggaacgacatccaccacaagaccagctgcacagggggaccccagctgtttgggtacccagaccccacctacctgacccgggtgcaagaggagctgagagcgaagggtatcacagatgactgaaggacatcgcctttgccaaggcccctgctgtctgcctctactaggacccagcagaagcctctttctcctctctgccccctgccccccacaccacacctgtaggggacctgtctgactgggaagggagttccgagagggagggggcaatcccttcccccatcccccactggccaagtgtttcaatgcagtgtgagccactcccttctggcagaggccgacctccaaggctctgttctcccctccccgtgtacatatactcccggtttccctgcccctccattgcccttggctttttctggtatgtgctgtgctccacgaccaagccgagaaaggacctagggtggggaagggagggtctcttgattcctaaccgcccccacatactgctccaccgctgaacttcgggtgccggggaggagaaattgggctgatgtgagctccccgtcacccgccatggagccggctgtgtgtgttcatcagatacagttctcccttaaccttgtcctttctctcctgtgtctcagtctccgtcagtctgtctttctccgctcttctctgacccctgtgaggaacctccttaccctgttctggaatcgctgccagactgtagcttttaatttaataaaaataaagtaaaatatgcaactctttatgccaca

SEQ ID NO: 91384 - DNA, 2439 bp, Homo sapiens
ggttccgggtcgggtcttggaggaggccgtggggggagggcgggagctgcttcagtggatgcccccagggacccttgcccatccgggctgtgcctccctctggcctctgtctggagggagagactggttccttgtccggcctgggttgccacagaggaatcacagacccaccctaaactggggccccgcctcccttttctgtgccagcaggacttggacctaggacacctaggtcctgggtcccccgtgatggggagagaagtgttgcatcgcggatagactgtatgggctgagactctagggttccattttcacttatgaatctcgaggtgcatctggccttgggggacgatgatggaggcatgaagggacagctgctccttcttggatcagtcaataaatggaggtcacactaatggcccttctttctgtttgagctgcatttggaagtgttgtggagacagccccgtagcccaatgcgaccagactcagggaaaacatcaggcccctccagctgagcccttgtgtgagccccgcccctccctaaatgccagacttgggagctgacagacagcactgcctgtgctgggtttaaaagtcctggtcagctgagtggaaatagaaggatttctgctgccatcatcttccatgggctttccaggtcacacgacctacaagtagggagcagggaaagaagagtgagcctgcatgccaattctaagctcttcaggatcaaatgtcgttcgtcctgtccagaatggcagcctgtggaggcacctgcaagaacaaagtgactgtgtccaagcccgtgtgggacttcctgagcaaagagaccccagcccggctggcccggcttcgggaggagcaccgtgtgtccatcctcatagatggcgagacttctgacatctatgttctccagctttccccacagggtcctcccccggcccctccaaatgggctctacctagcccggaaggctctcaaggggctgctaaaagaggcagagaaagagctgaagaaagctcagaggcagggggagctgatgggctgcctggctctggggggtggaggggagcaccctgagatgcaccgcgcaggcccaccccctctccgagcagccccacttctgcccccaggagctcgggggctcccccctcctcctccccccctgcccccacctcttcctcctcgccttcgggaggaggcagaagagcaggagagcacctgccccatctgtctgggggagatccagaatgccaagacattggagaagtgccggcattcattctgcgagggctgcatcacccgggctctgcaggtgaaaaaggcctgccccatgtgcggccgcttctatgggcagctggtgggcaaccagccccagaatgggcggatgctggtctctaaggacgccaccctcctactgcccagctatgagaagtacggcaccattgtcatccagtacgtcttcccgcccggtgtccagggggctgaacacccaaacccaggagttcggtatcctggcaccacacgggtggcctacctcccggactgccctgagggcaacaaggtgctgaccctgttccgcaaggcgtttgaccagcgtctcaccttcactatcggcacgtccatgaccacagggagaccgaatgtcatcacctggaacgacatccaccacaagaccagctgcacagggggaccccagctgtttgggtacccagaccccacctacctgacccgggtgcaagaggagctgagagcgaagggtatcacagatgactgaaggacatcgcctttgccaaggcccctgctgtctgcctctactaggacccagcagaagcctctttctcctctctgccccctgccccccacaccacacctgtaggggacctgtctgactgggaagggagttccgagagggagggggcaatcccttcccccatcccccactggccaagtgtttcaatgcagtgtgagccactcccttctggcagaggccgacctccaaggctctgttctcccctccccgtgtacatatactcccggtttccctgcccctccattgcccttggctttttctggtatgtgctgtgctccacgaccaagccgagaaaggacctagggtggggaagggagggtctcttgattcctaaccgcccccacatactgctccaccgctgaacttcgggtgccggggaggagaaattgggctgatgtgagctccccgtcacccgccatggagccggctgtgtgtgttcatcagatacagttctcccttaaccttgtcctttctctcctgtgtctcagtctccgtcagtctgtctttctccgctcttctctgacccctgtgaggaacctccttaccctgttctggaatcgctgccagactgtagcttttaatttaataaaaataaagtaaaatatgcaactctttatgccaca

SEQ ID NO: 91385 - DNA, 1840 bp, Homo sapiens
ccatggaagatgatggcagcagaaatccttctatttccactcagctgaccaggactttccaggtcacacgacctacaagtagggagcagggaaagaagagtgagcctgcatgccaattctaagctcttcaggatcaaatgtcgttcgtcctgtccagaatggcagcctgtggaggcacctgcaagaacaaagtgactgtgtccaagcccgtgtgggacttcctgagcaaagagaccccagcccggctggcccggcttcgggaggagcaccgtgtgtccatcctcatagatggcgagacttctgacatctatgttctccagctttccccacagggtcctcccccggcccctccaaatgggctctacctagcccggaaggctctcaaggggctgctaaaagaggcagagaaagagctgaagaaagctcagaggcagggggagctgatgggctgcctggctctggggggtggaggggagcaccctgagatgcaccgcgcaggcccaccccctctccgagcagccccacttctgcccccaggagctcgggggctcccccctcctcctccccccctgcccccacctcttcctcctcgccttcgggaggaggcagaagagcaggagagcacctgccccatctgtctgggggagatccagaatgccaagacattggagaagtgccggcattcattctgcgagggctgcatcacccgggctctgcaggtgaaaaaggcctgccccatgtgcggccgcttctatgggcagctggtgggcaaccagccccagaatgggcggatgctggtctctaaggacgccaccctcctactgcccagctatgagaagtacggcaccattgtcatccagtacgtcttcccgcccggtgtccagggggctgaacacccaaacccaggagttcggtatcctggcaccacacgggtggcctacctcccggactgccctgagggcaacaaggtgctgaccctgttccgcaaggcgtttgaccagcgtctcaccttcactatcggcacgtccatgaccacagggagaccgaatgtcatcacctggaacgacatccaccacaagaccagctgcacagggggaccccagctgtttgggtacccagaccccacctacctgacccgggtgcaagaggagctgagagcgaagggtatcacagatgactgaaggacatcgcctttgccaaggcccctgctgtctgcctctactaggacccagcagaagcctctttctcctctctgccccctgccccccacaccacacctgtaggggacctgtctgactgggaagggagttccgagagggagggggcaatcccttcccccatcccccactggccaagtgtttcaatgcagtgtgagccactcccttctggcagaggccgacctccaaggctctgttctcccctccccgtgtacatatactcccggtttccctgcccctccattgcccttggctttttctggtatgtgctgtgctccacgaccaagccgagaaaggacctagggtggggaagggagggtctcttgattcctaaccgcccccacatactgctccaccgctgaacttcgggtgccggggaggagaaattgggctgatgtgagctccccgtcacccgccatggagccggctgtgtgtgttcatcagatacagttctcccttaaccttgtcctttctctcctgtgtctcagtctccgtcagtctgtctttctccgctcttctctgacccctgtgaggaacctccttaccctgttctggaatcgctgccagactgtagcttttaatttaataaaaataaagtaaaatatgcaactctttatgccaca

SEQ ID NO: 91386 - DNA, 2202 bp, Homo sapiens
gaagggcaggggcttgcggatagaagggggtcaaaggaacggtgattatcacctgtgaggggaaagggggtgctgtcctccctccttcccttttcctcagcctgcaccccctgcaatcccccacctttcggggtctccccctccttgttgctaaggcccggaccgtcatcccagcaacagcctcagtcatgtgaccggcaatggcggcgctgacgagagctgcatttggaagtgttgtggagacagccccgtagcccaatgcgaccagactcagggaaaacatcaggcccctccagctgagcccttgtgtgagccccgcccctccctaaatgccagacttgggagctgacagacagcactgcctgtgctgggtttaaaagtcctggtcagctgagtggaaatagaaggatttctgctgccatcatcttccatgggctttccaggtcacacgacctacaagtagggagcagggaaagaagagtgagcctgcatgccaattctaagctcttcaggatcaaaaatggcagcctgtggaggcacctgcaagaacaaagtgactgtgtccaagcccgtgtgggacttcctgagcaaagagaccccagcccggctggcccggcttcgggaggagcaccgtgtgtccatcctcatagatggcgagacttctgacatctatgttctccagctttccccacagggtcctcccccggcccctccaaatgggctctacctagcccggaaggctctcaaggggctgctaaaagaggcagagaaagagctgaagaaagctcagaggcagggggagctgatgggctgcctggctctggggggtggaggggagcaccctgagatgcaccgcgcaggcccaccccctctccgagcagccccacttctgcccccaggagctcgggggctcccccctcctcctccccccctgcccccacctcttcctcctcgccttcgggaggaggcagaagagcaggagagcacctgccccatctgtctgggggagatccagaatgccaagacattggagaagtgccggcattcattctgcgagggctgcatcacccgggctctgcaggtgaaaaaggcctgccccatgtgcggccgcttctatgggcagctggtgggcaaccagccccagaatgggcggatgctggtctctaaggacgccaccctcctactgcccagctatgagaagtacggcaccattgtcatccagtacgtcttcccgcccggtgtccagggggctgaacacccaaacccaggagttcggtatcctggcaccacacgggtggcctacctcccggactgccctgagggcaacaaggtgctgaccctgttccgcaaggcgtttgaccagcgtctcaccttcactatcggcacgtccatgaccacagggagaccgaatgtcatcacctggaacgacatccaccacaagaccagctgcacagggggaccccagctgtttgggtacccagaccccacctacctgacccgggtgcaagaggagctgagagcgaagggtatcacagatgactgaaggacatcgcctttgccaaggcccctgctgtctgcctctactaggacccagcagaagcctctttctcctctctgccccctgccccccacaccacacctgtaggggacctgtctgactgggaagggagttccgagagggagggggcaatcccttcccccatcccccactggccaagtgtttcaatgcagtgtgagccactcccttctggcagaggccgacctccaaggctctgttctcccctccccgtgtacatatactcccggtttccctgcccctccattgcccttggctttttctggtatgtgctgtgctccacgaccaagccgagaaaggacctagggtggggaagggagggtctcttgattcctaaccgcccccacatactgctccaccgctgaacttcgggtgccggggaggagaaattgggctgatgtgagctccccgtcacccgccatggagccggctgtgtgtgttcatcagatacagttctcccttaaccttgtcctttctctcctgtgtctcagtctccgtcagtctgtctttctccgctcttctctgacccctgtgaggaacctccttaccctgttctggaatcgctgccagactgtagcttttaatttaataaaaataaagtaaaatatgcaactctttatgccaca

SEQ ID NO: 91387 - DNA, 1393 bp, Homo sapiens
gaagggcaggggcttgcggatagaagggggtcaaaggaacggtgattatcacctgtgaggggaaagggggtgctgtcctccctccttcccttttcctcagcctgcaccccctgcaatcccccacctttcggggtctccccctccttgttgctaaggcccggaccgtcatcccagcaacagcctcagtcatgtgaccggcaatggcggcgctgacgagaggctttcttgggggcctcagagctggggaagaaaggaggaagtcctggtcagctgagtggaaatagaaggatttctgctgccatcatcttccatgggctttccaggtcacacgacctacaagtagggagcagggaaagaagagtgagcctgcatgccaattctaagctcttcaggatcaaatgtcgttcgtcctgtccagaatggcagcctgtggaggcacctgcaagaacaaagtgactgtgtccaagcccgtgtgggacttcctgagcaaagagaccccagcccggctggcccggcttcgggaggagcaccgtgtgtccatcctcatagatggcgagacttctgacatctatgttctccagctttccccacagggtcctcccccggcccctccaaatgggctctacctagcccggaaggctctcaaggggctgctaaaagaggcagagaaagagctgaagaaagctcagaggcagggggagctgatgggctgcctggctctggggggtggaggggagcaccctgagatgcaccgcgcaggcccaccccctctccgagcagccccacttctgcccccaggagctcgggggctcccccctcctcctccccccctgcccccacctcttcctcctcgccttcgggaggaggcagaagagcaggagagcacctgccccatctgtctgggggagatccagaatgccaagacattggagaagtgccggcattcattctgcgagggctgcatcacccgggctctgcaggtgaaaaaggcctgccccatgtgcggccgcttctatgggcagctggtgggcaaccagccccagaatgggcggatgctggtctctaaggacgccaccctcctactgcccagctatgagaagtacggcaccattgtcatccagtacgtcttcccgcccggtgtccagggggctgaacacccaaacccaggagttcggtatcctggcaccacacgggtggcctacctcccggactgccctgagggcaacaaggtgctgaccctgttccgcaaggcgtttgaccagcgtctcaccttcactatcggcacgtccatgacccctgtgaggaacctccttaccctgttctggaatcgctgccagactgtagcttttaatttaataaaaataaagtaaaatatgcaactctttatgccaca

SEQ ID NO: 91388 - DNA, 437 bp, Homo sapiens
gatcagtcaataaatggaggtcacactaatggcccttctttctgtttgagctgcatttggaagtgttgtggagacagccccgtagcccaatgcgaccagactcagggaaaacatcaggcccctccagctgagcccttgtgtgagccccgcccctccctaaatgccagacttgggagctgacagacagcactgcctgtgctgggtttaaaaggtgacaatgagaactttgttattgcaggggctgctgccactttgttcacatccttaacagacttcagcagaagggactgagttagctctcaaggaaggctccctggcaataggggctgaattatttggcaatgtggagcaggcgaggagttggggagcataggaaatattccggtccatgtgatctgagggaggtggcaagaagacctccacctgtgtgggcgttt

SEQ ID NO: 91389 - DNA, 2221 bp, Homo sapiens
gaagggcaggggcttgcggatagaagggggtcaaaggaacggtgattatcacctgtgaggggaaagggggtgctgtcctccctccttcccttttcctcagcctgcaccccctgcaatcccccacctttcggggtctccccctccttgttgctaaggcccggaccgtcatcccagcaacagcctcagtcatgtgaccggcaatggcggcgctgacgagagctgcatttggaagtgttgtggagacagccccgtagcccaatgcgaccagactcagggaaaacatcaggcccctccagctgagcccttgtgtgagccccgcccctccctaaatgccagacttgggagctgacagacagcactgcctgtgctgggtttaaaagtcctggtcagctgagtggaaatagaaggatttctgctgccatcatcttccatgggctttccaggtcacacgacctacaagtagggagcagggaaagaagagtgagcctgcatgccaattctaagctcttcaggatcaaatgtcgttcgtcctgtccagaatggcagcctgtggaggcacctgcaagaacaaagtgactgtgtccaagcccgtgtgggacttcctgagcaaagagaccccagcccggctggcccggcttcgggaggagcaccgtgtgtccatcctcatagatggcgagacttctgacatctatgttctccagctttccccacagggtcctcccccggcccctccaaatgggctctacctagcccggaaggctctcaaggggctgctaaaagaggcagagaaagagctgaagaaagctcagaggcagggggagctgatgggctgcctggctctggggggtggaggggagcaccctgagatgcaccgcgcaggcccaccccctctccgagcagccccacttctgcccccaggagctcgggggctcccccctcctcctccccccctgcccccacctcttcctcctcgccttcgggaggaggcagaagagcaggagagcacctgccccatctgtctgggggagatccagaatgccaagacattggagaagtgccggcattcattctgcgagggctgcatcacccgggctctgcaggtgaaaaaggcctgccccatgtgcggccgcttctatgggcagctggtgggcaaccagccccagaatgggcggatgctggtctctaaggacgccaccctcctactgcccagctatgagaagtacggcaccattgtcatccagtacgtcttcccgcccggtgtccagggggctgaacacccaaacccaggagttcggtatcctggcaccacacgggtggcctacctcccggactgccctgagggcaacaaggtgctgaccctgttccgcaaggcgtttgaccagcgtctcaccttcactatcggcacgtccatgaccacagggagaccgaatgtcatcacctggaacgacatccaccacaagaccagctgcacagggggaccccagctgtttgggtacccagaccccacctacctgacccgggtgcaagaggagctgagagcgaagggtatcacagatgactgaaggacatcgcctttgccaaggcccctgctgtctgcctctactaggacccagcagaagcctctttctcctctctgccccctgccccccacaccacacctgtaggggacctgtctgactgggaagggagttccgagagggagggggcaatcccttcccccatcccccactggccaagtgtttcaatgcagtgtgagccactcccttctggcagaggccgacctccaaggctctgttctcccctccccgtgtacatatactcccggtttccctgcccctccattgcccttggctttttctggtatgtgctgtgctccacgaccaagccgagaaaggacctagggtggggaagggagggtctcttgattcctaaccgcccccacatactgctccaccgctgaacttcgggtgccggggaggagaaattgggctgatgtgagctccccgtcacccgccatggagccggctgtgtgtgttcatcagatacagttctcccttaaccttgtcctttctctcctgtgtctcagtctccgtcagtctgtctttctccgctcttctctgacccctgtgaggaacctccttaccctgttctggaatcgctgccagactgtagcttttaatttaataaaaataaagtaaaatatgcaactctttatgccaca

SEQ ID NO: 91390 - DNA, 2261 bp, Homo sapiens
gaagggcaggggcttgcggatagaagggggtcaaaggaacggtgattatcacctgtgaggggaaagggggtgctgtcctccctccttcccttttcctcagcctgcaccccctgcaatcccccacctttcggggtctccccctccttgttgctaaggcccggaccgtcatcccagcaacagcctcagtcatgtgaccggcaatggcggcgctgacgagaggctttcttgggggcctcagagctggggaagaaaggaggaaggttagcatgttgaagttccttcttgagcaacttggggagaagctgataatgggaatttgcagagaagagaggagatggaaggggagtttttatttctgggttggctgaggggaatggtaacatttgccatcataactttttacccttcccccactcccagtcctggtcagctgagtggaaatagaaggatttctgctgccatcatcttccatgggctttccaggtcacacgacctacaagtagggagcagggaaagaagagtgagcctgcatgccaattctaagctcttcaggatcaaatgtcgttcgtcctgtccagaatggcagcctgtggaggcacctgcaagaacaaagtgactgtgtccaagcccgtgtgggacttcctgagcaaagagaccccagcccggctggcccggcttcgggaggagcaccgtgtgtccatcctcatagatggcgagacttctgacatctatgttctccagctttccccacagggtcctcccccggcccctccaaatgggctctacctagcccggaaggctctcaaggggctgctaaaagaggcagagaaagagctgaagaaagctcagaggcagggggagctgatgggctgcctggctctggggggtggaggggagcaccctgagatgcaccgcgcaggcccaccccctctccgagcagccccacttctgcccccaggagctcgggggctcccccctcctcctccccccctgcccccacctcttcctcctcgccttcgggaggaggcagaagagcaggagagcacctgccccatctgtctgggggagatccagaatgccaagacattggagaagtgccggcattcattctgcgagggctgcatcacccgggctctgcaggtgaaaaaggcctgccccatgtgcggccgcttctatgggcagctggtgggcaaccagccccagaatgggcggatgctggtctctaaggacgccaccctcctactgcccagctatgagaagtacggcaccattgtcatccagtacgtcttcccgcccggtgtccagggggctgaacacccaaacccaggagttcggtatcctggcaccacacgggtggcctacctcccggactgccctgagggcaacaaggtgctgaccctgttccgcaaggcgtttgaccagcgtctcaccttcactatcggcacgtccatgaccacagggagaccgaatgtcatcacctggaacgacatccaccacaagaccagctgcacagggggaccccagctgtttgggtacccagaccccacctacctgacccgggtgcaagaggagctgagagcgaagggtatcacagatgactgaaggacatcgcctttgccaaggcccctgctgtctgcctctactaggacccagcagaagcctctttctcctctctgccccctgccccccacaccacacctgtaggggacctgtctgactgggaagggagttccgagagggagggggcaatcccttcccccatcccccactggccaagtgtttcaatgcagtgtgagccactcccttctggcagaggccgacctccaaggctctgttctcccctccccgtgtacatatactcccggtttccctgcccctccattgcccttggctttttctggtatgtgctgtgctccacgaccaagccgagaaaggacctagggtggggaagggagggtctcttgattcctaaccgcccccacatactgctccaccgctgaacttcgggtgccggggaggagaaattgggctgatgtgagctccccgtcacccgccatggagccggctgtgtgtgttcatcagatacagttctcccttaaccttgtcctttctctcctgtgtctcagtctccgtcagtctgtctttctccgctcttctctgacccctgtgaggaacctccttaccctgttctggaatcgctgccagactgtagcttttaatttaataaaaataaagtaaaatatgcaactctttatgccaca

SEQ ID NO: 91391 - DNA, 1641 bp, Homo sapiens
gaagggcaggggcttgcggatagaagggggtcaaaggaacggtgattatcacctgtgaggggaaagggggtgctgtcctccctccttcccttttcctcagcctgcaccccctgcaatcccccacctttcggggtctccccctccttgttgctaaggcccggaccgtcatcccagcaacagcctcagtcatgtgaccggcaatggcggcgctgacgagaggctttcttgggggcctcagagctggggaagaaaggaggaagtcctggtcagctgagtggaaatagaaggatttctgctgccatcatcttccatgggctttccaggtcacacgacctacaagtagggagcagggaaagaagagtgagcctgcatgccaattctaagctcttcaggatcaaatgtcgttcgtcctgtccagaatggcagcctgtggaggcacctgcaagaacaaagtgactgtgtccaagcccgtgtgggacttcctgagcaaagagaccccagcccggctggcccggcttcgggaggagcaccgtgtgtccatcctcatagatggcgagacttctgacatctatgttctccagctttccccacagggtcctcccccggcccctccaaatgggctctacctagcccggaaggctctcaaggggctgctaaaagaggcagagaaagagctgaagaaagctcagaggcagggggagctgatgggctgcctggctctggggggtggaggggagcaccctgagatgcaccgcgcaggcccaccccctctccgagcagccccacttctgcccccaggagctcgggggctcccccctcctcctccccccctgcccccacctcttcctcctcgccttcgggaggaggcagaagagcaggagagcacctgccccatctgtctgggggagatccagaatgccaagacattggagaagtgccggcattcattctgcgagggctgcatcacccgggctctgcaggtgaaaaaggcctgccccatgtgcggccgcttctatgggcagctggtgggcaaccagccccagaatgggcggatgctggtctctaaggacgccaccctcctactgcccagctatgagaagtacggcaccattgtcatccagtacgtcttcccgcccggtgtccagggggtaagaagaccatggcctgcccttaccctttggctttccccaagctctgacctaggaaaaccgggtgagggtgagtgtgcttgttagatgtgagacagtcttgctgtcttccactgtgccctcctactcagtgccctggacctaggaggtccccgtgaggcccagcctttccatccctgtgatcccaaggcacacgtgaaaatcagatatgagctaggaaaaaaaaaagcaaatcagatatgagaggaaggaattgcatattatttccttgatgaacacaaatactgtgctgacatcttggcagaggtaaattctgtggaggtggtggcttaggggaagggaggcacaataggaagggatctgaccaacccaacagagccaggagcatcactctgtaaaaacaggagtagtcaaggcctataggtgtcttcctgctggacaaagagtaatgtgcaattctggctgcagaggggtgaagaagctgcacagaaga

SEQ ID NO: 91392 - DNA, 871 bp, Homo sapiens
ctttgagagagtttacaagatgacgatccatctgatcaaaaaaagagaaatgtcctcaacattgttaatcagcagaaaagtaaaaattaaaacctagtgaggtccactacacatccagagaaagtgttatacttaaaaaacgacattaacaaatgttgtcaaggagctctcatatgcagctgatgaaagtataaagtcggtgcaaccactttgaaactatttgtcaatatttaccaataataaacacatgcagatctatgactcacaattctactctcatgtgtatactaacataaatgtaaatttaaactcaacaaagacatgaataagaatgttcatagaagaataaggcaatattgcctcacaccagaaatatcgtaggtatccaatcacagtaaaggtgtaaggtcaaagaactcttgaaactcaacagtaaaagaaaaaaatccaattaggaaacgaacagaaggcatgaatagagacattccaccaaagaggatatacagatggcaaataagcacatgataatatgttcaacatcagtagccactagtgacatgcaaatttaaactacaataagatgtcataacatatctgtcataatggataaaatttgtttatgatatcatcaaatactgacaagaattcagaaaaactggaatcaaacattgctgttgggaatgtaaactgttacagccactcttgaaaatagtaggcaatttcttataaaataaaacatacaaccactgtaaacccagcatttgtgttcttgggcatttatgccatagaataaaagcttatgctcacacaaaaaccaatacataaatattcataacacttacgtgtaataacccaaaactgtaaacaaact

SEQ ID NO: 91393 - DNA, 461 bp, Homo sapiens
agcaaactgccttagcagctctctgatgccagcaaatacgattcttatggaatttaatctagattttctagttgttcttaatgggagtgttagtctcctactccatggtagccagatgcaaaattccatcttttatacttttcaacaagttgtcaacagttggtcacccatctacccatcatccatatcagacatttgctgagcaactcctatgtgttaggtataatgcttagtgttaaggggtgatgagaaaaagagtaaaagtcttctacacttgaagtggtcagtctgatggaagagtcggacagacaaacagatattccgaaggtaggataggtaaaatgctatgagatgtaggagaaggagagtataactttgtagaataagtgagcatttcaaaaagtaggcaatatttaagctacagctcactggataaataggaagttgccacggataaaagg

SEQ ID NO: 91394 - DNA, 186 bp, Homo sapiens
ctggtgctgctgcaggagggggtcgagctgggggtgtgcggacacctccctttgccaatgactcccacacagttgatgagaaatccattgggtcctgcctcgttttgttccccgggactgcagctgttgctccttacttaactccagcattccctcctcatgcagtcccaccctctcccactctac

SEQ ID NO: 91395 - DNA, 271 bp, Homo sapiens
agtgaacacatttgtaagacatttaggggcagcactgatcaatgtgggtagacagggttgagttagggataactcccatatttctggcttggaaaattagggaaataatgggattctttgataagatgtcttatctgtcttatacgttttaacttaaattctgccttctttgcaaaattgcctgtgccatttctttatgaactgaatctgaattttttttttttgagacggagtcttgctttgtcgcccaggctggagcgcagtggcgtga

SEQ ID NO: 91396 - DNA, 315 bp, Homo sapiens
ccaatttccaggaagccatgagtgactaaagcccattaggctcaagagtttgttcacaatcacatacatcaattcagtcaacatttattaacatttattacttattgtgtgtcaggcccacaaattcaaaaaaaagtgcattatctaatagacatataaatagacacacaaaaagccaattatcttgcaataggaaaagtgagagacaggcgttaggaacacataagaaagggtaatgcccctccctggggagagaggataaatggcagatctgggaagcctgcccagaggaggtaacgtttgagctgggtcttg

SEQ ID NO: 91397 - DNA, 1515 bp, Homo sapiens
tagttcctcttttaataccatgaagctttcaagttcatagctcataaaatgttatgtagctttgaattttttaatgtaaatgaaaatcagattcattttcgttattaataaaaatttcaatagtattcacatttagataagagatgcacagaattttggtctacttttaaattaatattacagttcttaaagtaccctaggtgatgcctgttctttgaaacagcagagattttattttaaaaatacgtttttgtgtttattacctaaaggagctattctgaaatttttatgtagaaaaatcttcttctgctccatccacagaagattttttatccatagatatttttgccatctcctttctcctctttcctttgttgtagatgatatgaaaagactgcttttttcaaaaatgtgtttttaaattggtgaattttgccatgcctaaagtgatctctgagatatcctccttttgggtataaacatttctgttaaatgttgtaaagagctttctataatagacacagtagactgtatttaatttttttctcccttcttggtagatctctttggttaaaagaaaatgcgtcacttgcctcctattatagaagcttgtatgagcagccaggggtgcactctgcagggaaggcttggccattgccagtgagccttgctccactgtagctgccttagctcttcctcttttccagatgagcaggtgctgacagccaaaaaaatagaaaataagtggggagaattcaaatatggggaaaatattgtggaaaaaatagatgcttaatttttcttcttaatattatgtagaaagtaaatatctttgggtaaaatacatgaattgtagccactctagaaaacagatgtttaaaatctggcaaataatcttctgctaagttattacaggtccatgatttcatactggccagcatttgtaagttaatccaaatgaaattgtatctccttatttgaatttactgtacatttgataaagacaagagaattaatgtgatgctattgattgtcatatcatcacttctggccttttctgatagcagttcacagcaaaacaatttgtcaaaaaatagtgttttgttttgttttgttttctttacctgagctttgacctgcgtagcaatatgttgatttttaaggtatgttttgtaaattaaaaaaatgctattataaaataatgactttgaagagatggtaatatttctattgaacatattaatggaccactgctatcatgtagtttttaatttagaaggctcaattttagtttttattagaaagaatattgtttagtatcaaatgactattaaaagtatatagtgcaataaaaagaaagacgtgaaggaatgtggaaacattaaaacaaaatcgaacctccttaagtagtagttatatcagatgtaattaaaagatgggatgtaatttgactatcaaatacttgaaccaatgcttttatttgtaatatatatatgtgtatatatgtttttgatt

SEQ ID NO: 91398 - DNA, 424 bp, Homo sapiens
gaagtaaggtcttacccaacgttctgaccccaaaggggcaggactttctcccccactgctggtgtgaaacaggaagtgtcaacccttcaacaaagatacccttggggccacagcaggtgagaaaaggtgccacttcctccaggtggaggcaacccagctgtcagggctggtggcagagtgggatcagggatagacctcagaccccgagcagcatctcagaggccactatggacacagctgcttaagttgacgtggtagtactgccggcgtgtctctatttgttggtatattcacatctctagtatgatttcacacacacagacacccttaaataggcacacacttaagctgggcagagtggggacagaatacaaaatttagagtcctatttactttgcaaataactttttccccagggtatgag

SEQ ID NO: 91399 - DNA, 621 bp, Homo sapiens
ggatcatttctatagtgtgttactagagaagtttctctgaacgtgtagagcaccgaaaaccacgaggaagagaggtagcgttttctcctgagcgtgaagccggctttttggcgttgcttggctgcaactgccgtcagccattgatgatcgttcttctctccgtattggggagtgagagggagagaacgcggtctgagtggtttttccttcttgatggctcaatgacagagactagctcgtaaactccggggcgtttccgggctgttcgctcctgcttggcaatgtcgcgagaaaggttttcgcctcctgtttcagcggtgacggctcttgggttttctcggggtggctttttaattttagtcttggcgcgaggcgggggatgctgtgtggcacctcctattgtctctttttgcgttttctcccattctcgctccctcttttgtcgccgtttcccgcccgccactcccacccccagacggggtctccgggtctcttgttctgtctgccggccccggctggagtgcagtggcgcgatctcggctcctagcaacaactgcctcccgggctcaagcgagtctcccgcctaagccctcccgagtagccggggcttaaaggcgcaca

SEQ ID NO: 91400 - DNA, 250 bp, Homo sapiens
ggatcatttctatagtgtgttactagagaagtttctctgaacgtgtagagcaccgaaaaccacgaggaagagaggtagcgttttctcctgagcgtgaagccggctttttggcgttgcttggctgcaactgccgtcagccattgatgatcgttcttctctccgtattggggagtgagagggagagaacgcggtctgagtggaaaagaaaaacgaaagaaaaaagaaacaacggaaaaaaaaaagaatgaaa

SEQ ID NO: 91401 - DNA, 240 bp, Homo sapiens
taaattcgcggccgcgtcgacgtagcgttttctcctgagcgtgaagccggctttttggcgttgcttggctgcaactgccgtcagccattgatgatcgttcttctctccgtattggggagtgagagggagagaacgcggtctgagtggttttcggtgctctacacgttcagagaaacttctctagtaacacactatagaaatgatccctgaaagtatagtcttctggccgcttcgcacacc

SEQ ID NO: 91402 - DNA, 584 bp, Homo sapiens
ttttttttggagatggaatctcactctgtcgcccaggctggagtgcagacagaacaagagacccggagaccccgtctgggggtgggagtggcgggcgggaaacggcgacaaaagagggagcgagaatgggagaaaacgcaaaaagagacaataggaggtgccacacagcatcccccgcctcgcgccaagactaaaattaaaaagccaccccgagaaaacccaagagccgtcaccgctgaaacaggaggcgaaaacctttctcgcgacattgccaagcaggagcgaacagcccggaaacgccccggagtttacgagctagtctctgtcattgagccatcaagaaggaaaaaccactcagaccgcgttctctccctctcactccccaatacggagagaagaacgatcatcaatggctgacggcagttgcagccaagcaacgccagaaagccggcttcacgctcaggagaaaacgctacctctcttcctcgtggttttcggtgctctacacgttcagagaaacttctctagtaacacactatagaaatgatccctgaaagtatagtcttctggccgcttcgcacacc

SEQ ID NO: 91403 - DNA, 568 bp, Homo sapiens
taaattcgcggccgcgtcgacgtagcgttttctcctgagcgtgaagccggctttttggcgttgcttggctgcaactgccgtcagccattgatgatcgttcttctctccgtattggggagtgagagggagagaacgcggtctgagtggtttttccttcttgatggctcaatgacagagactagctcgtaaactccggggcgtttccgggctgttcgctcctgcttggcaatgtcgcgagaaaggttttcgcctcctgtttcagcggtgacggctcttgggttttctcggggtggctttttaattttagtcttggcgcgaggcgggggatgctgtgtggcacctcctattgtctctttttgcgttttctcccattctcgctccctcttttgtcgccgtttcccgcccgccactcccacccccagacggggtctccgggtctcttgttctgtctgccggccccggctggagtgcagtggcgcgatctcggctcctagcaacaactgcctcccgggctcaagcgagtctcccgcctaagccctcccgagtagccggggcttaaaggcgcaca

SEQ ID NO: 91404 - DNA, 293 bp, Homo sapiens
ggatcatttctatagtgtgttactagagaagtttctctgaacgtgtagagcaccgaaaaccacgaggaagagaggtagcgttttctcctgagcgtgaagccggctttttggcgttgcttggctgcaactgccgtcagccattgatgatcgttcttctctccgtattggggagtgagagggagagaacgcggtctgagtggttttcggtgctctacacgttcagagaaacttctctagtaacacactatagaaatgatccctgaaagtatagtcttctggccgcttcgcacacc

SEQ ID NO: 91405 - DNA, 359 bp, Homo sapiens
ggatcatttctatagtgtgttactagagaagtttctctgaacgtgtagagcaccgaaaaccacgaggaagagaggtagcgttttctcctgagcgtgaagccggctttttggcgttgcttggctgcaactgccgtcagccattgatgatcgttcttctctccgtattggggagtgagagggagagaacgcggtctgagtggttttcggtgctctacacgttcagagaaacttctctagtaacacttttttttttttttcaccatgcaggggtgacttttatttgaaggcagaaaacaccctatttgggggttcactcataatctgcaacagtttgtttgtttgtttttaaaagtcgacgc

SEQ ID NO: 91406 - DNA, 887 bp, Homo sapiens
tgagatggagtcttgctctgtcacctaggcacgatctcagctcactgcaacctccacctcccaggatcaagcagttctcctgcttcagtctcacaaatagctggggttacaggtgtgcactaccacgtatggctaaattttttccttttagtagagacatggttttgccatgttggccatgctgacaccccgtttctgccaaaaaaaaaaaaaaaaaaagcctggagtggcgtgtgcgcctttaagccccggctactcgggagggcttaggcgggagactcgcttgagcccgggaggcagatgttgctaggagccgagatcgcgccactgcactccagccggggccggcagacagaacaagagacccggagaccccgtctgggggtgggagtggcgggcgggaaacggcgacaaaagagggagcgagaatgggagaaaacgcaaaaagagacaataggaggtgccacacagcatcccccgcctcgcgccaagactaaaattaaaaagccaccccgagaaaacccaagagccgtcaccgctgaaacaggaggcgaaaacctttctcgcgacattgccaagcaggagcgaacagcccggaaacgccccggagtttacgagctagtctctgtcattgagccatcaagaaggaaaaaccactcagaccgcgttctctccctctcactccccaatacggagagaagaacgatcatcaatggctgacggcagttgcagccaagcaacgccagaaagccggcttcacgctcaggagaaaacgctacctctcttcctcgtggttttcggtgctctacacgttcagagaaacttctctagtaacacactatagaaatgatccctgaaagtatagtcttctggccgcttcgcacacc

SEQ ID NO: 91407 - DNA, 217 bp, Homo sapiens
tgtcctatgatgacttcagtacccccaacaaaataggtgtccttgctgtctctcagaacttgcctttcccactgtacagaaagccctttatcatgtcttctctctgttgtcctggagactcctttttaccatctcatgcttcaaaattcagctcctctgtgaatcctttgactttctcttgatgacacacacacaccttctctctgaaattattcat

SEQ ID NO: 91408 - DNA, 414 bp, Homo sapiens
ttcgagactgcactgggcaacatggtgaaaccctatctctattaaaatacaaaaaattagctaggtgtggtggggtgcacctgtagtcccagctactcaggaggctgaggccagagaattgcttgaacccaggaggctgaggttgcagtgacctgagatcgcaacactgcacttcagcttgggttacactgtgagagactgtctcaaaaaaacaaaaacaaaaacaaaacttctatagtaacaattttaaagactttatcaatacctagtctatattatgttattttaaaataatttaagggacattaatcttaagtgatgtatcaactacatatgaatatagctataatcatattacaatgtttatatgatatacaatacctatctgcgtgtgtacatgtatatacatatgtg

SEQ ID NO: 91409 - DNA, 352 bp, Homo sapiens
gggccctaatctgctaggattagtgttcttataagaagaaacacaaagagatttctccctctcttcatgtacacacactgaggaaagcctgtgtgaggacacattgaaaaggcagctacctgcaaggcaggaggagagctcttatcagaaaccaaatcagctggcaccttaatcacaggattctatcctccaggaatgtgagaaaataaatttttcctgttaaagccacccagtctgtggtatgttgttacagaagccccagtaggctaatacactgccttggaatttgcctatgtgatttcccactttccagagcctcctcttccacctctctcctttctctgcttctgta

SEQ ID NO: 91410 - DNA, 460 bp, Homo sapiens
ccctcatcaaggacccactagcctcatgcgtgtcctctgtcatggctctgagcacaccattcatgtatcgagttccctggagactgtgacaccggcacgccagggtcagtggcttttctagacagagtttggaggcggtaggtgctcagagagtgtttactgagagtcagtgaatgcccagaggtagcaaaaaccaccacccaattgtgcttgtttatggtgcacctgctgtgtgcccggctccgcgcaccacacgattccatttgacctcagcaatcctgtgaggcaggtcagtgattatccccattcctcagatgaggagccgaggcccagagaggttagtggctggctcaagggtgcagagctcggctggggcctggggccatctgaccccagcacccgagctcttatcttcatgatctcaccagcatagaatgaggctagtgggatgaggctagtg

SEQ ID NO: 91411 - DNA, 485 bp, Homo sapiens
gatgtgatttatgctatgccaataaggtgcatgtgtgactttaccagaggacacacagggcacccatcttctcagagagcgttgtagggatgacgtggtcctggagcctacccctgtaacagcaatttcctgaatgtgcaggaaaagaaaaaagctcccacgggacccccagttccatggtgtggtgctgggcgtcacctgaccctcagcctctcaagtaccatttaataaacccacacaccagtgagaatgaattctactatctacatactaaggactctgcccaatacagatttaaataggggttttcaaaatgcacctaagacatgtgacttgtatgaacattatttccttagaaaataaaaggtaatcttggcaacttataaaacagtaagaaaataactagccacaaaaccattgccaattataactaattaaggattaatgacaccacacgcaaatttggggtaagaaaaattaacaaa

SEQ ID NO: 91412 - DNA, 1516 bp, Homo sapiens
  misc_feature (51)..(54): n is a, c, g, or t
  misc_feature (172)..(173): n is a, c, g, or t
  misc_feature (279)..(279): n is a, c, g, or t
  misc_feature (282)..(282): n is a, c, g, or t
  misc_feature (286)..(289): n is a, c, g, or t
  misc_feature (291)..(294): n is a, c, g, or t
cgagggatcgcaggatgagcgatcggggcccgggcagccggcagcggacgnnnnccccgagcccaccggcccgcgccccgcgccccccacggccccgcggtcccggtcccggccgcatcacccacgtcccccgagccccacgggccatgcccggccggccctaagcgcgggnnggggggcgtccccttgcgcccgggccccgcgctggcgccccccgggccgccgcccggcgcgggggccatggcgttcaccttcgccgcgttctgctacatgctcacnctngtcnnnncnnnnccctcatcttctttgtcatctggcacatcatagcctttgatgagctgcggaccgacttcaagaaccccatcgaccagggaaccctgcgcgggcacgcgagcgtttaaaaaacatcgaacgcatctgctgcctcctgaggaagctggtggtcccagaatactccatccacggcctcttctgtctgatgtttctgtgtgcagcagagtgggtgaccctgggcctcaacatccccctcctcttctaccacctctggaggtacttccaccgtcctgcagatggctctgaggtcatgtatgatgcggtctccatcatgaatgctgacattctcaactactgccagaaggagtcctggtgcaaacttgccttctacctgctctccttcttctattacctgtacaggtgaggccttgcccacagcagtcagaactcagggaagggatgtcccagcatcacgcttccaatcccaagttcctgccttttgcccttgaggactgagggcagcccagggtgtgaccaggtgggcatctgggtggctgtgtgtgtgcagggctaggctcactggctcatcttcctacagtatggtttatacgttggtgagtttctaagggggaagccggccagggagcgagcccagaacggaccggacgcctgtgcacccccagccctgccccttggccgcagaggcctcagccctggggagggagggggcactggtgcccccagcctctccaagccccaaactgctgctgcggggaaccccccccaccccgccttcagagccctcccccttggactagagcggctgggcagagctctaaacaggggcaggggctcctctgccagcctgtgggcatggcagtcattcctggaaggggcaggacctccggccttgtccatttcgggggaaacttgggccctgccaaggggcagagcttgaccctggaaattctgggccatccccctccacccccaccctgaggctccccctgcaggtgggggggtacccgcaccgggaatgagcaggctcagcaggggggcagccccacccctagtctgccctcccctctcccccaggctctttctccagccctgtctccatctgccccaacctcagcccaccttgtctcttggacctattttctatgtcgcctggaggagtccggcaccccctccccggccatttgtgacaaaatatgaataaactactgcaaataaaaaaaac

SEQ ID NO: 91413 - DNA, 1338 bp, Homo sapiens
  misc_feature (51)..(54): n is a, c, g, or t
  misc_feature (172)..(173): n is a, c, g, or t
  misc_feature (279)..(279): n is a, c, g, or t
  misc_feature (282)..(282): n is a, c, g, or t
  misc_feature (286)..(289): n is a, c, g, or t
  misc_feature (291)..(294): n is a, c, g, or t
cgagggatcgcaggatgagcgatcggggcccgggcagccggcagcggacgnnnnccccgagcccaccggcccgcgccccgcgccccccacggccccgcggtcccggtcccggccgcatcacccacgtcccccgagccccacgggccatgcccggccggccctaagcgcgggnnggggggcgtccccttgcgcccgggccccgcgctggcgccccccgggccgccgcccggcgcgggggccatggcgttcaccttcgccgcgttctgctacatgctcacnctngtcnnnncnnnnccctcatcttctttgtcatctggcacatcatagcctttgatgagctgcggaccgacttcaagaaccccatcgaccagggaaccctgcgcgggcacgcgagcgtttaaaaaacatcgaacgcatctgctgcctcctgaggaagctggtggtcccagaatactccatccacggcctcttctgtctgatgtttctgtgtgcagcagagtgggtgaccctgggcctcaacatccccctcctcttctaccacctctggaggtacttccaccgtcctgcagatggctctgaggtcatgtatgatgcggtctccatcatgaatgctgacattctcaactactgccagaaggagtcctggtgcaaacttgccttctacctgctctccttcttctattacctgtacagtatggtttatacgttggtgagtttctaagggggaagccggccagggagcgagcccagaacggaccggacgcctgtgcacccccagccctgccccttggccgcagaggcctcagccctggggagggagggggcactggtgcccccagcctctccaagccccaaactgctgctgcggggaaccccccccaccccgccttcagagccctcccccttggactagagcggctgggcagagctctaaacaggggcaggggctcctctgccagcctgtgggcatggcagtcattcctggaaggggcaggacctccggccttgtccatttcgggggaaacttgggccctgccaaggggcagagcttgaccctggaaattctgggccatccccctccacccccaccctgaggctccccctgcaggtgggggggtacccgcaccgggaatgagcaggctcagcaggggggcagccccacccctagtctgccctcccctctcccccaggctctttctccagccctgtctccatctgccccaacctcagcccaccttgtctcttggacctattttctatgtcgcctggaggagtccggcaccccctccccggccatttgtgacaaaatatgaataaactactgcaaataaaaaaaac

SEQ ID NO: 91414 - DNA, 960 bp, Homo sapiens
  misc_feature (51)..(54): n is a, c, g, or t
  misc_feature (172)..(173): n is a, c, g, or t
  misc_feature (279)..(279): n is a, c, g, or t
  misc_feature (282)..(282): n is a, c, g, or t
  misc_feature (286)..(289): n is a, c, g, or t
  misc_feature (291)..(294): n is a, c, g, or t
cgagggatcgcaggatgagcgatcggggcccgggcagccggcagcggacgnnnnccccgagcccaccggcccgcgccccgcgccccccacggccccgcggtcccggtcccggccgcatcacccacgtcccccgagccccacgggccatgcccggccggccctaagcgcgggnnggggggcgtccccttgcgcccgggccccgcgctggcgccccccgggccgccgcccggcgcgggggccatggcgttcaccttcgccgcgttctgctacatgctcacnctngtcnnnncnnnnccctcatcttctttgtcatctggcacatcatagcctttgatgagctgcggaccgacttcaagaaccccatcgaccagggaaccctgcgcgggcacgcgagcgtttaaaaaacatcgaacgcatctgctgcctcctgaggaagctggtggtcccagaatactccatccacggcctcttctgtctgatgtttctgtgtgcagcagagtgggtgaccctgggcctcaacatccccctcctcttctaccacctctggaggtacttccaccgtcctgcagatggctctgaggtcatgtatgatgcggtctccatcatgaatgctgacattctcaactactgccagaaggagtcctggtgcaaacttgccttctacctgctctccttcttctattacctgtacaggtgaggccttgcccacagcagtcagaactcagggaagggatgtcccagcatcacgcttccaatcccaagttcctgccttttgcccttgaggactgagggcagcccagggtgtgaccaggtgggcatctgggtggctgtctccatctgccccaacctcagcccaccttgtctcttggacctattttctatgtcgcctggaggagtccggcaccccctccccggccatttgtgacaaaatatgaataaactactgcaaataaaaaaaac

SEQ ID NO: 91415 - DNA, 1090 bp, Homo sapiens
cgcggctgcttcccggccgtgccgacagtgccgcagagatcgctctggcgccccccatggcggcacatgtggagcggtgggagctgctccagtacctgcttctccgccaccccatcgcggccttttccttcccccaacagcgcgagcgtttaaaaaacatcgaacgcatctgctgcctcctgaggaagctggtggtcccagaatactccatccacggcctcttctgtctgatgtttctgtgtgcagcagagtgggtgaccctgggcctcaacatccccctcctcttctaccacctctggaggtacttccaccgtcctgcagatggctctgaggtcatgtatgatgcggtctccatcatgaatgctgacattctcaactactgccagaaggagtcctggtgcaaacttgccttctacctgctctccttcttctattacctgtacagtatggtttatacgttggtgagtttctaagggggaagccggccagggagcgagcccagaacggaccggacgcctgtgcacccccagccctgccccttggccgcagaggcctcagccctggggagggagggggcactggtgcccccagcctctccaagccccaaactgctgctgcggggaaccccccccaccccgccttcagagccctcccccttggactagagcggctgggcagagctctaaacaggggcaggggctcctctgccagcctgtgggcatggcagtcattcctggaaggggcaggacctccggccttgtccatttcgggggaaacttgggccctgccaaggggcagagcttgaccctggaaattctgggccatccccctccacccccaccctgaggctccccctgcaggtgggggggtacccgcaccgggaatgagcaggctcagcaggggggcagccccacccctagtctgccctcccctctcccccaggctctttctccagccctgtctccatctgccccaacctcagcccaccttgtctcttggacctattttctatgtcgcctggaggagtccggcaccccctccccggccatttgtgacaaaatatgaataaactactgcaaataaaaaaaac

SEQ ID NO: 91416 - DNA, 893 bp, Homo sapiens
  misc_feature (51)..(54): n is a, c, g, or t
  misc_feature (172)..(173): n is a, c, g, or t
  misc_feature (279)..(279): n is a, c, g, or t
  misc_feature (282)..(282): n is a, c, g, or t
  misc_feature (286)..(289): n is a, c, g, or t
  misc_feature (291)..(294): n is a, c, g, or t
cgagggatcgcaggatgagcgatcggggcccgggcagccggcagcggacgnnnnccccgagcccaccggcccgcgccccgcgccccccacggccccgcggtcccggtcccggccgcatcacccacgtcccccgagccccacgggccatgcccggccggccctaagcgcgggnnggggggcgtccccttgcgcccgggccccgcgctggcgccccccgggccgccgcccggcgcgggggccatggcgttcaccttcgccgcgttctgctacatgctcacnctngtcnnnncnnnnccctcatcttctttgtcatctggcacatcatagcctttgatgagctgcggaccgacttcaagaaccccatcgaccagggaaccctgcgcgggcacgcgagcgtttaaaaaacatcgaacgcatctgctgcctcctgaggaagctggtggtcccagaatactccatccacggcctcttctgtctgatgtttctgtgtgcagcagagtgggtgaccctgggcctcaacatccccctcctcttctaccacctctggaggtacttccaccgtcctgcagatggctctgaggtcatgtatgatgcggtctccatcatgaatgctgacattctcaactactgccagaaggagtcctggtgcaaacttgccttctacctgctctccttcttctattacctgtacagtatggtttatacgttggtgagtttctaagggggaagccggccagggagcgagcccagaacggaccggacgcctgtgcacccccagccctcagcccaccttgtctcttggacctattttctatgtcgcctggaggagtccggcaccccctccccggccatttgtgacaaaatatgaataaactactgcaaataaaaaaaac

SEQ ID NO: 91417 - DNA, 241 bp, Homo sapiens
gccttggggagacccaggaggggaagactccaggccccaggtccatctacaggaggacctccagagagacactcacccccttcaggaatgtcccagttggaaggtttcaacccagccattgagttggctcagacaggagtccaccttagaggctggcagaagagtcggggttggcagacagaagacctagaccccagccctgccttccttcagacctcagtttccccatctgtacaatggg

SEQ ID NO: 91418 - DNA, 166 bp, Homo sapiens
  misc_feature (148)..(148): n is a, c, g, or t
  misc_feature (157)..(157): n is a, c, g, or t
caacaaataaagtctgaaatagaggtagtcaatcctttatagaatagttttcagaaaataaagatttactacttttaagaacatctaggagccactgtgcccagccaaaagagaaatttctacatgaacaacggcaacttcagtgtcntacagcggnccaacccag

SEQ ID NO: 91419 - DNA, 425 bp, Homo sapiens
ctttaagtaactttgaagaatgttggcccccagggagtgtcaggaaccattgagagcaagagtgtgattctttgccatttttaatagcagtcagttggcctctgccctttaggagttgtttagattggcaactgtggtgcgttggctcagtgcctaggaagactttggaatcttccactaaaatggagttaaccagactttaaaaggctgagactccatagagctacctggtggtagtggaaataaaaccctgggagctgggctttgtttttcttgatcatccactttacctgtatcagcttctgaacacactgtttgatatattagtttcaggacatctagggaccgcagtgctggactagaaaggaacacttgagcaccactggtcattatcaatggaaaaagattgtatcctgagagaatag

SEQ ID NO: 91420 - DNA, 140 bp, Homo sapiens
taggctcttcatagactcatataactctaaaattaaaatgaaagaaaaatcaaatatcaggattagatgggccttaaaagctatttagatcaacgactgactcaattcctgttttttttttggttttttttttttttttt

SEQ ID NO: 91421 - DNA, 425 bp, Homo sapiens
tgaagaagcattgctttgaaggtttgtagtcctagcataatgtagtaactatatcagggatctgttgcttcttgctattcatgtctttctctttcacatttgaccaaaaaatgagcaatttctcgcattgttggcactgataatgctacggtaggagtgggctctgatattaggaatttggggagcacatgaccattctgaaatggcctatgaaagtggtaggaggactttgggtatcagtgcatatatgcacatcatctgccaggggaaggcaccaaagaagaaatatactgatgaggctgggcacagtggctcatgcctgtaatcccagcactttaggagacgaaggcgggcggatcatttgaggtcaggagtttgagaccagcctgaccaacacggtgaaacgctgtctctactaaaaatac

SEQ ID NO: 91422 - DNA, 553 bp, Homo sapiens
agtaatattaaagaaactatggaagaattatttttgagtcgcagagacaagcctttctaataatgaccaaaaaaatccagaataaaagatcaagttataaataaaaatataaaagatcaaatgtgactttaaaaatggctagagatgagaaaacacaaaccaaatcaaaaagataaaaagataaactgatttaaaaggttttatttcatatcacaaagggtaatttccttaaaagataaagataggacctatagttcagtaaagatacagacaaataaccaaatacacatataaaagcaaagggctcaaacaaatatttcagagagagcaaaatactaaggttcaacaagagaaatgcaaactaataaaacgagatatcacgttcacacagcaggttggtaatgacaaaaagttttgataaaagtcttgcagatggctgggtgcggtggctcacgcctgtaatcccagcactttgggaggccaaggtgggcggatcatgaggtcaggagattgagaccatcctggctaacacagtgaaaccctgtctctactt

SEQ ID NO: 91423 - DNA, 211 bp, Homo sapiens
gggtttcaagccagactggccctctactatacctccaccctctcccaatacatatagccactagacaggagtcctttgtcagataagtggtctttgagcttccgaatatctctaagggagtatgttctcctatcctttgggcccccagctatgcaattttctttatagtagatcttcataagatgaagttgaaaccttcccttgtaattcc

SEQ ID NO: 91424 - DNA, 762 bp, Homo sapiens
ttatacagttttccttggaattttaaagaatgaaataatttctctttatgtcagcaaatgcctattctgaacattcagaatgactgttctgaacagtaatgtttaactcttaaaaaacatggtatttataaatgagaatataataaatcagtattagaagtcattttttaccccatgctctaattcaggagaaaataggagatacttataggttaacttggtgtctgattaccagtgcctgatataatttctccaattccctttttaaaaatctattaaaatatcgttaatttaaaaaatccctttaaaatgaagatatgaaaagctctatgctaaagaatagggaaattttccactaagtcgatcattgattgtattgtggcttttccttaaacccaaagattacccaaagattactgtagaagtgacactacgaaaaatcaaattaatgatagggagagtatacattagatgctcttccagaatgtacagcaaaagaacagagatgaagattgatagatgagagaaaatgatacctatgaaagaaaaaaatagagatttaactggtgactaatagatgtctgcaaaggagacaacagaagtggaacaaaagcatggatcaaatgtctcattgtggaagactttccagggttgaaaatgacctgaagaataaaagagctcactgtattctaaagaacattatgaaaacgtgtctgtacctagacatattttgctggttttcttttgattttaaggatcctg

SEQ ID NO: 91425 - DNA, 456 bp, Homo sapiens
ccccatgtgttatgggagagaccaggtggaggtaattgaatcacggggtggtttctcccgtgctcttcttgtaatactgaatgagttttcatgagatctgatggctttataagtgtttggtagttcctcctgtgttcattctccctcctgctgtcttgttgaagaggtgctttgcttcccctttgccttccaccatgcttgcaagtttcctgaggcctccccagccatgcagaactgtgagtcaattaaacctctttcctttctaaattacccagtctcagacagttctttatagcagtgtaagaatgaactagtaaagtgccctaacacattttggtctttctgtgtttctagaatgttgacttttttcaatcataaggctctttgccctatagtcacaagatagctgctacatgttcagccgtcacatctatattccaggcaagaaaaaataat

SEQ ID NO: 91426 - DNA, 244 bp, Homo sapiens
tgctgccctgcctaacccatgtgcgactctgtccagtaatagcagtggccaatctggggtccaggagtctgcctttgggtggccacagtgctccaccaccccactgcccagacacctgtctgccctggggtctcctgggctcagggccacttgtcctttgtcctggctgtccgctcccaccctcctctgctccctcccatcctgactcagttcccctatcctccttcccacttccctcccccct

SEQ ID NO: 91427 - DNA, 275 bp, Homo sapiens
ggaatttaaaataacaggagatgatttttttaaattggaaaaaacagagtgatgttttactcaaatgctttctaagtacactgatgattatagtatctctttattaagtataatttaataatagatattgatttactttgtaaattatgaagtaagatttgatgctaaatattgttttattattagagttcaggatagcaaaattgagactcaggacaaatttgggcggataatagattttaagatggtctgaactacttaaggattgagataaa

SEQ ID NO: 91428 - DNA, 428 bp, Homo sapiens
aggaggatcacccacactggcaggcgggcatttccactgattcccaaacacacttgccttgttgaattctgactttccaaacagccgcactgggtcttccagagaaggtggcaggctttgctgtgttagcttggggaagccaggcttgagctgtgctcagtcattgtatccatgctccccttcaccataccctcctggcaacgatatgaggtgtggattgtgtgatagaagaatccagactccacgaagccaaggacagtcacttctccctggcagctctcatggtgtcggcaggagtgggcgcctcaccttgggtactgaagagagtaccgataatcccgtggatggaacaggagggagtgtaattcaatccctacacattgtatatgctgttggcaatttcatttaaactcacagcagaaaacaac

SEQ ID NO: 91429 - DNA, 927 bp, Homo sapiens
agaaggcagcaggggaaggaaaaggagcaggggataggggaactttaggagcagagtagtgttgataactggcatctggaacctacagtttccagttcagagcagtacaccatactcagtgtatacttacactccaagacatttcctgggcagtgatctagaaatgatatttttaaaaggagctgtgtttcagtgttagactgtagttatccaagcagtatcagatagtgtgcagtttttgtagtaaaaggtaaaaatctgaataataaagtttattaataacagttttagttaatacttgactgacattgagacccttgatgcaaaaaggtaagtagaagagaaggctgtaaacacaagaccatcataccctgtggggaatttacaatctaaatataacaaacatatagagtgagataggagaaaagaaatgggatgataatgatattgctgtactaaagtctatttaggaaatggaaatatatagcaagaggagtcagctacttgggcattgatcaaagaaaaataaacatatagaaggaaagaaaggtcgttttagtttataacattttccttccgattctaggtgattatatagctagtttactcttccacccccaagattctggggtattttggctaatgttatttgcaatgtccataaactcagaagaagttagtattaacggggatatgaaagaacctccagttactatgcaagaaattttaaatttccatcatgttaaattgtacaactgtttatcattcactctgctgtaagtctatgtgaaaccaaatccgtggatttaccaatggccattttatcacctccaaactatcttttatttttttgaattgtatctctctccttattccattttcttctgtttgattaaaatcctgcatgttctcctgcatcatatgtca

SEQ ID NO: 91430 - DNA, 1732 bp, Homo sapiens
  misc_feature (1511)..(1511): n is a, c, g, or t
taaattatttgaaagcataacttcacaatttgaaggcttgaatcttatgcctgctagtcatgaagttaaaaacatagctttgaaaaattaaagtaagtgctggaaatttgaagagaagttactggctcgtagtagattttacagatccctcttggaaatcaggtaaaaaatgggaggtataggtaatcagaatgtcataattaagcttgatttaatagataacgcaagattatatgtaataaacagaggatatatgttcttttcaaatacccgtctattttaaaattggttatgagaccacacatacatacacacacgtgctaaaaaccaaaaacatgcaaaactcaagaagttaacaaaagtagggaattgtacagcctacattccattctctggcaaccaggcagtaagactataaattaaaaaagaaagctccccaaaatgtagctatgcagaaatttaatatcactcttctaaaaagtctttaaaaaggaaacatataaattacttagcaacaagtcacactgaaagcaatacattatcaaaaatcagaatataaccaaagcaatatttgattgaaatattcaaagcataattaaaattgtttgtataataactctttaagaaatgtgtttgttataagacaaccaaatagaaatgaaccaagcattaatcttaaaacactagaggaggctgggcacggtggcgcacgcctgtcatcccagcactttgggaggccgaggcgggcagatcacgaggtcaggagatcgagaccatcctggctaacacggtgaaaccgtatctgtactaaaaatacaaaaaattagccgggcgaggtggtgggcgcctgtagtcccagctactccggaggctgaggcaggagaatggcgtgaaccggggaggcagagcttgcagtgaaccaagattgcaccactgtactccagcctgggtgacagagcgagactccatctcaaaaaaaaaaagagttagtgtaactttgaaactaaaattggataaggccaacataaaagagagagaactaaagatgaacattactcaagtttataaatttaaaaatcttaaaatgttaggaagtcaaattcaacaggatctttaaaaacagtttattcttagaacacaaggatgatttaaaatccaaccgattatattaataaattaaagagaaagccagtgtgattgatcatcttgaaaagttgaaaagcatttaataagatttaacctgcatttttaacattcttacatcccttctagccgtcaaactctgatcgacttacacttaagactgtgtctttggtagcctaccctattccacttttattacaaaggcagctcttaagacataaatccatctcttcaggctcgaactgcaaaacacacgtcgagaggtgacaatgttgggactgtcaaaaagaacttaaagagtgggataaccagccgggcgcggtggctcactcctgtaatcccagcactttgggaggctgaggcgggtngatcacaacatcagaagatcgagaccagcccggccaacatggtgaaaccccatctctactaaaaatacaaaaattagctggatgtggtggcacgcacccgtagtcccagctactcaggaggctgggacagaaaaattgcttgaacccaggaggtggaggttgcagtgagctgagattgtgccactgtactccagcctggcaacagagcaagactccatctc

SEQ ID NO: 91431 - DNA, 270 bp, Homo sapiens
ggtatgagtatgtgactgtgtatgaagtctgatgaagctttcgatgaacttggttaggtttcttggatgagcagttcaaactagctcatcccagggtagtagacaacactgtgatgtgcatgggaagtctcacatccaacccacacccaataactatgtggggtataaaggccttgccatgtgaaaggttattctagctccagggcttccagtgggttggctgagtctgttgtttgactcctcactcttccgactcctgcctcctttctc

SEQ ID NO: 91432 - DNA, 436 bp, Homo sapiens
tctattgatacttttatgtttaccactgtattactaaatataataatttatattaaaggcagtggctgttgaactattttaatgttgtcattttacttgtgagataaactttatactttatcccacttagttagcacctaccagaagacaccaaaatggtttatttcaaaattactttttaaaaattattacttatgagtttttcttttatggaatttttgaaagatgatcagagctttccagtctttttagcagagatttgcccccagggcaaattgttttaccagcatctaaccaatatgggttttatcagagtttaaccaaagtaggagaatggaaatacccaatttagacccctcctgctttcttgtctcacctaaggaggggttgacctgagaagcaccgaagatcgcagccaagaggcacagaccactaa

SEQ ID NO: 91433 - DNA, 578 bp, Homo sapiens
tcagcctcccaagtagctgggactacaggtgcacactaccacgcctggctaatttttgtatgcttagtagagacggggtttcgccatattggccaggctggtctcaaagtcgtgacctcaggtgatccacccgcttcaccctcccaaagtgctgggattagaggcatgagctactgcgcccggcctttccctgcttcttttaaatggaatattttagtgttccattttatctccgcttttagcctggtagcgctacctctttattgctctagagtttccattctctgtctttgactaggactttggctttgaatctgagtgagatgggagccatgggagggctttgagctggggagtgacccgacctgacattcctgtcttcttatgtcaataagaaaaataaaacaaaatagtagtaaagtgtcggggtggcgaaaatttttgggggtgatatggagagataatgggcgatgtttctcagggctgcttcgagtgggattaggggcggcttgggaacctacagtgggagagattcaactgaagaaagattctgcggtaagggctgatactgtggggtt

SEQ ID NO: 91434 - DNA, 870 bp, Homo sapiens
ccccatgcccagctaatttttgtgtttttagtagagatggagtttcaccatactggccaggctggtctcgaactccagacctcgtgatctgcccgccttggcctcccaaagtgctgcgtgagccaccgcacccagccgacaaacctttattaccaggtgatatcaaatattattagagctgactgtggtagtgacagtttttcatataaatgaaattgcatcctcccaaaggaatcctgagtatgtatgcactttaaaagaacccagaatcatctaaatattgtcacatggctcttgcaagtgatgataatagtgatgcttataataatgaggattagctgcactcatcagcctgtagaaagtaaaaagtttccttttcgaaatttcctttcttgttaaagaataaatcataagtgttagaaataatagtttcttttaaagactaacttccttcaagcctcctctgctctgtgctaatgactcttcattaagccctatcctatgtagctgttagatataagggaataagtatattctatgtccttgtactttaaccaagatatttgtgctggacatgctcacaggcacgttccagcttgcagcctatgccccttccttatttggaaatattattacttttctaagtctttttgcaagcaacttcttcttttcctttgttctctattgcctttccctatataggaaagttttaagttattagccagtcgggtttaatttaaattgtgaggtccagctccagccaatggagacaggacacaagctgcataagggataaaaactgcttccctcctttgttcgggtgtgctgtcaccattgtttcatctgtgaggagcaccctttctgcagaaa

SEQ ID NO: 91435 - DNA, 901 bp, Homo sapiens
cagtaactgggaagaaaacagtagtccaaagtagaggggccaaactttgaggaggaggctttggagtctggaagtgaggaaagagtgggaagggcattttatgctctgacagctacaagagcagagtcagagatatttgtaactcccagttaggagatttgaataacagaagtactcttgataccaggtgatatcaaatattattagagctgactgtggtagtgacagtttttcatataaatgaaattgcatcctcccaaaggaatcctgagtatgtatgcactttaaaagaacccagaatcatctaaatattgtcacatggctcttgcaagtgatgataatagtgatgcttataataatgaggattagctgcactcatcagcctgtagaaagtaaaaagtttccttttcgaaatttcctttcttgttaaagaataaatcataagtgttagaaataatagtttcttttaaagactaacttccttcaagcctcctctgctctgtgctaatgactcttcattaagccctatcctatgtagctgttagatataagggaataagtatattctatgtccttgtactttaaccaagatatttgtgctggacatgctcacaggcacgttccagcttgcagcctatgccccttccttatttggaaatattattacttttctaagtctttttgcaagcaacttcttcttttcctttgttctctattgcctttccctatataggaaagttttaagttattagccagtcgggtttaatttaaattgtgaggtccagctccagccaatggagacaggacacaagctgcataagggataaaaactgcttccctcctttgttcgggtgtgctgtcaccattgtttcatctgtgaggagcaccctttctgcagaaa

SEQ ID NO: 91436 - DNA, 423 bp, Homo sapiens
ccacctcacctttctctgcctcatcatgtcagaaaaagtacccctccttttgtcacaaggcaaacctgagataaaagatttagatggcctgtaattccagcactaagggaggccaatgcatgcagattatttgagtctaaaaaagaagcctaagcaacttagggaaactgcatctctcaaacaaatacaaaccattagcctagcatggtggtgtggtggcacatgcctatagtcccagctactcagggtggggagcactgaggtgggaggatcacctaagctggaaggttgtggctgcagtgagccgtgatcacgtcactgcactccagccagggtaacagatatttttaaaaggatcttctctgttaaaaataatcaaataaacaggtggccatgaggctagtggctgcagtgcactcaatt

SEQ ID NO: 91437 - DNA, 298 bp, Homo sapiens
aagaccgcgggtgcacctctctgggaaaggaaccccttaggtacaggcagtcatttttaattttcttagaataatagaactgaaagaactctttgccccttcccacagaagattttactttatttcctgattctagctccccttggtgaggaaaaaccataagagagcctggacaacttccatgtagtactgacattcactcttttttatcaattgttacaaaagactgcaaattccctgtggtagctttttgtaaataaatgagatactgtttataaatcttaccaattagtaaatg

SEQ ID NO: 91438 - DNA, 543 bp, Homo sapiens
tagtagaaatggggtttcaccatgttggccaggctggtctcaaactcctgacctcaagtgatctgcccgtcttggcctcctaaagtgctgggattataggcgtgagtcaccacaacctcaagtgatctgcccgcctcggcctcctaaagtgctgggattacaggcgtgagccactgcacctggccagcaaaatgaagttttaaaaaatgatccaactatatgcttttactagagactaacttaagatccaaagatgcaaataggttgaaaatcaaagaatagaaaaatatattctgggactgggcacagtggctcatacctgtaatctcagcactttgtcttttgttttttttgagacagagtctcgctctgttgcccaggctggagtgaagtggctcactgcaacctctgtctctggggttcgagtcattctcctgccccagcctcccgagtagctgggactgcaggtgggtaccaccacaccccagctaatttttttgtattttaagtagagatggggtttcaccatgttggccaggctag

SEQ ID NO: 91439 - DNA, 810 bp, Homo sapiens
acgcagggataacccgcggccgcgcctgcccgctcgcacccctctcccgcgcccggttctccctcgcagcacctcgaagtgcgcccctcgccctcctgctcgcgccccgccgccatggctgcctcccccgcgcggcctgctgtcctggccctgaccgggctggcgctgctcctgctcctgtgctggggcccaggtggcataagtggaaataaactcaagctgatgcttcaaaaacgagaagcacctgttccaactaagactaaagtggccgttgatgagaataaagccaaagaattccttggcagcctgaagcgccagaagcggcagctgtgggaccggactcggcccgaggtgcagcagtggtaccagcagtttctctacatgggctttgacgaagcgaaatttgaagatgacatcacctattggcttaacagagatcgaaatggacatgaatactatggcgattactaccaacgtcactatgatgaagactctgcaattggtccccggagcccctacggctttaggcatggagccagcgtcaactacgatgactactaaccatgacttgccacacgctgtacaagaagcaaatagcgattctcttcatgtatctcctaatgccttacactacttggtttctgatttgctctatttcagcagatcttttctacctactttgtgtgatcaaaaaagaagagttaaaacaacacatgtaaatgccttttgatatttcatgggaatgcctctcatttaaaaatagaaataaagcattttgttaaaaagaaaagtcttagaattcatttgggt

SEQ ID NO: 91440 - DNA, 855 bp, Homo sapiens
accgtatgaggacacagcaagaaggtgccatctaggaagcaggaagcagggcctgaccagacaccaaatctgctggggccttagtcttgaatttccagcctccataactgtgcaaaatccatttctgttgcttataagctacccagcttatgggattttgtttagcagcccaaatggactaagacactcaatgttagaagacttctttctccttcctgctggagaaattcaactgcattgcatggagagctaattatatggagagacagtggcataagtggaaataaactcaagctgatgcttcaaaaacgagaagcacctgttccaactaagactaaagtggccgttgatgagaataaagccaaagaattccttggcagcctgaagcgccagaagcggcagctgtgggaccggactcggcccgaggtgcagcagtggtaccagcagtttctctacatgggctttgacgaagcgaaatttgaagatgacatcacctattggcttaacagagatcgaaatggacatgaatactatggcgattactaccaacgtcactatgatgaagactctgcaattggtccccggagcccctacggctttaggcatggagccagcgtcaactacgatgactactaaccatgacttgccacacgctgtacaagaagcaaatagcgattctcttcatgtatctcctaatgccttacactacttggtttctgatttgctctatttcagcagatcttttctacctactttgtgtgatcaaaaaagaagagttaaaacaacacatgtaaatgccttttgatatttcatgggaatgcctctcatttaaaaatagaaataaagcattttgtt

SEQ ID NO: 91441 - DNA, 780 bp, Homo sapiens
acgcagggataacccgcggccgcgcctgcccgctcgcacccctctcccgcgcccggttctccctcgcagcacctcgaagtgcgcccctcgccctcctgctcgcgccccgccgccatggctgcctcccccgcgcggcctgctgtcctggccctgaccgggctggcgctgctcctgctcctgtgctggggcccaggtggcataagtggaaataaactcaagctgatgcttcaaaaacgagaagcacctgttccaactaagactaaagtggccgttgatgagaataaagccaaagaattccttggcagcctgaagcgccagaagcggcagctgtgggaccggactcggcccgaggtgcagcagtggtaccagcagtttctctacatgggctttgacgaagcgaaatttgaagatgacatcacctattggcttaacagagatcgaaatggacatgaatactatggcgattactaccaacgtcactatgatgaagactctgcaattggtccccggagcccctacggctttaggcatggagccagcgtcaactacgatgactactaaccatgacttgccacacgctgtacaagaagcaaatagcgattctcttcatgtatctcctaatgccttacactacttggtttctgatttgctctatttcagcagatcttttctacctactttgtgtgatcaaaaaagaagagttaaaacaacacatgtaaatgccttttgatatttcatgggaatgcctctcatttaaaaatagaaataaagcattttgtt

SEQ ID NO: 91442 - DNA, 803 bp, Homo sapiens
accgtatgaggacacagcaagaaggtgccatctaggaagcaggaagcagggcctgaccagacaccaaatctgctggggccttagtcttgaatttccagcctccataactgtgcaaaatccatttctgttgcttataagctacccagcttatgggattttgtttagcagcccaaatggactaagacagtggcataagtggaaataaactcaagctgatgcttcaaaaacgagaagcacctgttccaactaagactaaagtggccgttgatgagaataaagccaaagaattccttggcagcctgaagcgccagaagcggcagctgtgggaccggactcggcccgaggtgcagcagtggtaccagcagtttctctacatgggctttgacgaagcgaaatttgaagatgacatcacctattggcttaacagagatcgaaatggacatgaatactatggcgattactaccaacgtcactatgatgaagactctgcaattggtccccggagcccctacggctttaggcatggagccagcgtcaactacgatgactactaaccatgacttgccacacgctgtacaagaagcaaatagcgattctcttcatgtatctcctaatgccttacactacttggtttctgatttgctctatttcagcagatcttttctacctactttgtgtgatcaaaaaagaagagttaaaacaacacatgtaaatgccttttgatatttcatgggaatgcctctcatttaaaaatagaaataaagcattttgttaaaaagaaaagtcttagaattcatttgggt

SEQ ID NO: 91443 - DNA, 215 bp, Homo sapiens
acgattcagttaataaagggatggttccagttgagggccaaatgagtgccctagaaaatcaaatgcaattggtattacaaagcccagggaaaaaaccaaacaacatattatttttaaaaagtgataaatcgtgaagcaaagatgagagatttttatgagtaattatgtggcacaagtataaaaactcagcaatttatgtggaaaaataaacagcc

SEQ ID NO: 91444 - DNA, 630 bp, Homo sapiens
agtgcaatggcacagtctcagctcactgcaacccccacttcccaggttcaagcaattctcctgcctcagcctcccaagtagctgggactacagatgtgcgccacgacacacagctaatttttatatttttagtagagacaggatttcatcatgttggctaggctactctcaaactcctgacctcaaatgatcgactcaccttgctttcccaaagtgctgaaattacaggtatgagccactgcatctggcctcttccttctttctttccttcctgtcttcctttagttaaaatgattttctctggggatgtgatttagtttcttgctttttattttttgtgtattcattgcatgttttttggtttgaggttattatgaggtttgtagatactcttacaacccattattttgcctgataacaacttaacactgtctgtgtaaacaaataaacagcaaaaagaaaactgataaaaactctgttttaacttcatcccccccgcctactttttcactttctatttttttgtgtacttgctattaccagtgagttttgtaccttcaaattatttcttattgctcattaacatcctttcctttctgactgaagttctccctttagcttttcttatag

SEQ ID NO: 91445 - DNA, 299 bp, Homo sapiens
gactagagatcccatccgggtctggtattggataaggcgtgtgccaccacgtctggctaatttttctgtattattagtagagacggctggtctctactaatagttcaagacggctggtcttgaactcctgacctcaaatgatccacctgcctcagcccccccaaagtgctgggattacaggcgtgagcccctgcacccagcccctctggttctactgagacctcagatctttcatttatggaacaagggggttggattagattgttcgctctcagccctcacttcatgttagactcact

SEQ ID NO: 91446 - DNA, 294 bp, Homo sapiens
aatgccactgcagttagcccgtatagatcacttcatgaaagtggtttcaataaaatgctgaaggcagaacactgagtctagcagtttacgaaaagcaaagagtgagtggtgagaaagtagaagttgggattattggttttttccttccaagagatttggaagataagatcgcagaaggtcacatccaagaatggttttaatatttcaaacacagagcactttcctggggttcatgtataacctttttaagatttgcctggggaaaaacagtacatctaagaactgaggcttagg

SEQ ID NO: 91447 - DNA, 197 bp, Homo sapiens
tacatagctgagatctgaaagaagaagcccatattttatttaatgttaatttttaaaaatttctctccagctgtattgaggtaccactgacaaataaaaattggtgtgtatttaaggagtacaatttgatgctttgctgtatgtatacattgtgaaacaatcattgtatcaaggtaattaacattttcatcacctcg

SEQ ID NO: 91448 - DNA, 945 bp, Homo sapiens
agacatcaaagtccacttctgagagagaaatagagtggctgatgtttacaaaacagataagtagccagaaaagcaggcgataaggaggagtttcccaagattagaaagagactttttaaagtaaagggtaacggtgcaggagagtgttttggttccaaaatagtgaggactctgctcttttaacaccagctgcaccaggaaggcagcaattacctttacggaatgcaatatgtatgtcaagggagaatgaaattcaaatggaatttcatatgaaatatgatgtgtccagggaaatcagcccagaagcctgaaagtacctagccacacccacgatgctcaattccatgcatgactctggagcagcagaaagctgctgggacaatgggggtactagtgcaatatgccccctcagcaataacccctgaggacacgtgagagattactgaaaaggccccaggattgtggcatgactgaagtgagaggggagccctcaagtctaagaatactgaatttcccagcagtccatcagagtaattcagagtcaaaaataatgttgacacacagaaataaatgaaggccatatttcttggataactggcatttagaatgagacacgtgtcctctagttatcattattactatttgcactagcatttgtgctaggctctgaatacacaacagtgagcaagacatacagccgttgccccctgggagtctatagtttaataaagaaaacagacatttgaaaagcaatatgagtaagtggtgataagtatcacgatgcaggggatatgagacaaaaatgaatttaaggaaacagaaccaagctgaggggccagagaagacctcttagagggagtgaggagaaagctgagaccagaggtatgacactgagacagaggcaggtagggaaggacacaggggaggggttccaggctgggtgag

SEQ ID NO: 91449 - DNA, 335 bp, Homo sapiens
agtgcaaaatttccttccttctccatgcctgtggaagaaggaaacctatttcctaaaacttgatgatccctaggaggccctaaatgcacacctgggaagctgttcaccaggctctagataaaattcgttccatccaacagttccagaccactgcaataaagcaagtcatgaattttctggtgcatatacaagttatgtttatgtgatactgtactaagtgtacaatagcattatgtctaaaaaacaatgtacattaaggaatgctttattgcttaaaacatgctaacaatcagctgtgagtcataatctttgctggtgtatggtttgcctcaata

SEQ ID NO: 91450 - DNA, 361 bp, Homo sapiens
gattacaggcgcctgccaccacgctcagctaatttttgtagagacagcgtttcaccatgttggccaggctggtctcgaactcctgacctcaagtgatctacccgcctgggcctcccaaagtgctgggattacaggtgtgacccactgtgccaagcctgacccttgtccttgtcagtacctgtgactgcattgttttcatattctcagtttcaggcatcctgttctctagccagtacctcctatttttctagctcacgcctactagtactccaactccagcaatccctcaatcccactgggactgaacattttcactccctttcacttcccccatgctcctatgtccctcctttaatcagct

SEQ ID NO: 91451 - DNA, 511 bp, Homo sapiens
gaagacacctgtgagctaaacagattgctccctccccttcttgagtttagagcctctccactcattctcttgatttccctaaaatatcaggagaacacgttgaaaacaaatcacaaaaaaattggtatctcttcctgttctatcttctgtcattcctttccatcagttaacaactgaggctttggaatcaggctcaggttcttcattagtaaattgcagataataactacacaagactgttaatatgataagtaagataatgcgtgtaaacagtgcagtacctgtgaaaatattaagcattcagtatctgataggtattattaaactgtgctcatttttatcattacagtttcctccttgtacttatcttaaattgtatatggatttgtgggcatggttaagaacagggaaccctttctggtaccttacccatttctcttctatccccttccccctaaacacacatacacaatttgtggtacaatttcaagacactagcttggcaatgctc

SEQ ID NO: 91452 - DNA, 141 bp, Homo sapiens
gatttggcttgagtccctgggtagatggcaatggtttttattgggatgggggtggctgggaataggttgagggtaagagtggggaagtcaagagtcagtttggacctggttaagtttgagatgtcttttagtcatctaagt

SEQ ID NO: 91453 - DNA, 258 bp, Homo sapiens
agatggccattccctgaggcccagggtctcagcaagctagaaagaggaaagcaatctgattaaaggaacctacattaaactctgttgatggcagccctccaacctgcccgttagtgctgttcatgtgaagaagcagggaaaaaatccttttagtccattgaatcacatgttaaattagttctagaaacttggagaatgagagggagaagtatgtgaggtcttcttcctaccacttgcttgaacttaactccaagcacc

SEQ ID NO: 91454 - DNA, 295 bp, Homo sapiens
tctgcctctaacttctctgctgtgagactttgagaaaatcgctttatatcttttaaacctagttttcttatttggaaaattagaaggatgagctattttattgctttgtaaactagtcttgtgagatgcctacatgagagtaacctagagaagatgtatgaaatacaaatttctgggttcacctcttgaaattcgtattcaataattttgggatgagatctggaaaccaacagtttaaaaagttccttatatctgtcaataggggatgatgagttaaagacgtaaatatatactt

SEQ ID NO: 91455 - DNA, 512 bp, Homo sapiens
gtgggaggtgcttgggggattagaagcaaagctaaatgcctctaccttggagcaaattggagaggtagagtaatactttttttcattcatattcagcatttagcacactttattgaacacttataatgagctgggcatttaggggaaataaagatgcaggaaggcattgccccattcctgcgcctactctttatgaaagggcgccctataggagtctctcttcattctcatcacggcctctgtctgtcttctgggcctcaaccctgttttggcctactggatttgctaaccacgctggggccctgttgtcagtcatttcagcattgcttttcctatgaccttagtagcccttgtctgcttgatctcacgccgtttgaattttgctagctgccaccttcaaccacttccctctgttttttattttcacttttactcctaggttcctgaaagtactaaattgaccttaagaatgaatgcttgttttaaacgatggtgaggctggattctaggtg

SEQ ID NO: 91456 - DNA, 525 bp, Homo sapiens
tctaccttgaaactgcatcaagaaatcagtatagagggaagctgagcatgcccagctgttaatatattctccctaatattccactaagccactcactgtgtcctcatttcttttacatagactatggattgtgtgggttgatataaatgctaacaatcaaataattaggctttttctttcatgttgataactccagatttacgtatttgggcagtatattaaagctaggaaagtttttaaatgttaagtcttgtccatttataacatggttcagaaataatgaattgagagtttctgatatgaaataatcagtcaaatttgctaatgtgtctataaaaatatggttaaaatgagtataatgattttagatacaggggaacatttctgtgatactgtcctgataattaaaatcctaacattacttaacagctttatgatgtgacagcagatgcctagagtaggtagttttattattttgcctcgtacctttagcctatgtgaatgtatgtggtgatcaattaaatt

SEQ ID NO: 91457 - DNA, 627 bp, Homo sapiens
gtgttagataaaggaactttgtaaatgttttatcttaaaagtttacccagagttggctgggattacaggtgtgagccaccgtgcctggctattttctttcttactctaggtttctaaaatcatgcatttgttttatgacaatgctttcctgttattcctgtgtccagacatttggcttttgaaattgctatttctctctcattaagagactttactgccttatataaagatggagggcttaagattttagattgaatttctgctttgctgtaattttctaccttgtttatgtttttaagttttttctttttttaacatttaacattattggtaatagaatgtacaggtgtgtgccagtagtctcagctgtttgggaggctgaggtggagaggtcaagattaggtggagagatccctttgcccaggagttgtgggttgtagtgcactatgctgcttggatgtccacactaagtttggcatgaatatggtgacctctcaggatgccagatagcttaaggagaggtgaaccagaacaggtcagaaacagcaagtcacaacccccatgctggtctgtttgtgggatcatgctagtgaattaccactgcacctcgtctcttcaaaaaaaaaa

SEQ ID NO: 91458 - DNA, 251 bp, Homo sapiens
ccagaatgaaagcattttattattttataactgtcagatcaccagccttctctatttgaatctaaatgtatgcatgtaggtgtgtatgcatgtgatctctacaccccttgactcctgaaacagatgtcatattatttttattattgtcatattatttgcatcatctcttctttttccttttccatccccaatagaggtcattattaaaaccaaataaatgaaccaatactaataaagttaacacgtacttc

SEQ ID NO: 91459 - DNA, 133 bp, Homo sapiens
tctccagggacaagtgatctgtggtaacaatagtctttctaccttcagagttccctcccatcagaaagcaattacacatccttttgagtgtgtttaaattggaagaaactttgctcccctggccctattttcg

SEQ ID NO: 91460 - DNA, 383 bp, Homo sapiens
aggaattgtgggagttaaaaatctaagatgagatttgggtggggacacagccaaactgtatcagccctcttctagtttgcagacagccaacttctctttgtatccttacatagtggaaagagaggtagctagcttttgggcttcttataagggcactaatctcattcatgagggctctacccttaggacccagttacctcctacaggccccacctctaaataacatcacattgggattagagtttcaatatatacatttttaaaggacacacatattaagtccattgcagcaaatttttttttacagttttttctttctttctttgtttttttttggagacagtctccctctgtcgtccaggctagagtgcagtggtgagatc

SEQ ID NO: 91461 - DNA, 388 bp, Homo sapiens
gaaaaaaaaagacaaccagtttagccagtaagttatgtagctttcatatcaaagtaagattcagcaatgacatacgtatttcttatattttttgagtgcagcattctaggcagtgtggttattaaaataggttcagtaatgacacatctgtatttattaatacatttttttggtgtgttattttgtagatactgtgccagtatacagaaatcagtaagacttgatccctcccattttgtagtttagtagggatacaggcttgcaagtaaatacatacaatagtgtagtgcagggtttcccaaccgtggtagtattgacattttgggtaggataattcattgttggggggatctgtgctatgcattatagcatattttgcagcatcact

SEQ ID NO: 91462 - DNA, 288 bp, Homo sapiens
gagaaaaaaaaaaaaaaaaaaaaatgcaactatgatttgctagaggtattccctctaatttctataagagggtctggaacttgctctgcttttagcacagatctttgagctggtgacatcatcaatgctgcttcctccacattcatttcttaactctcctaacttttaagtcatcttagcttcttatctccctagactaaggagcaaacttaacttactttctggccttattgatatgaatgtggttggtatttgagcatctatcatgcagtcattctggaagatacc

SEQ ID NO: 91463 - DNA, 412 bp, Homo sapiens
ggctaattttttgtacttttaatagagacgggggtttcaccatgttggccaggctggtctcgaactcctgacctcgtgatcctcccgcctcggcctcccaaagtgctgggatgacaggcgtgagccaccgtacccagcctcggtgaaaacctcagaggcaggcagcatattccctgccgagccggtaggtggcgcagtcagataagcattaactaaatcacagctccctctccccatcagaatctttatctagagggtaaccccaaacctgagaatttggtcaggtccgcacacacacaggcatcatcattcttcagcgccatcatgaagggctcttctccccctgttaaaggaaactatcacatagtcttccgaaacagccagtcaaaaactttgtgatgcaggaaagaac

SEQ ID NO: 91464 - DNA, 283 bp, Homo sapiens
tctcagtcaagtttcagtagaaaaccaggcgtgagggtcccaatgagaattcagaaacataactcactttcaattttcacttgactttgctattctcatcttgccacaggcaattagtctctctccagaaccctgagggcaaatctgtccttcctgacattaggatggtgggagggagctacagagtgtacccctccacacattcacccgtggggcttgacatcaggagagtacatccagtatgttcagagaagggcgtccagttctgctccccatcattctt

SEQ ID NO: 91465 - DNA, 2697 bp, Homo sapiens
acggctttctttgaggccaggactgggtgatggtgtcgctacccccgccgcagtctgacgtcacgctgccgggccccaccagactggagggcgagcgccaaggggacctcatgcaggcaccgggcctcccaggctcccctgccccacagagtaagcatgccggcttcagctgctcgtcatttgtgtccgacggccctccagagaggacaccctcactgcccccacacagcccccgcattgcgtcaccagggcccgagcaagtccagggccactgcccagccggccccggccctgggcccttcaggctctcaccctcagacaagtatcctggctttggctttgaggaggccgcagcaagcagccctgggcgattcctcaagggcagccacgcgcccttccacccgtacaagcggcctttccatgaggacgtcttcccagaggccgagaccaccctggccctcaaaggacactcctttaagaccccagggccgctggaggccttcgaggagatcccagtggacgtggcggaggccgaggccttcctgcctggcttctcagcagaggcctggtgtaacgggctcccctaccccagccaggagcatggcccccaagtcctgggttcagaggtcaaagtcaagcccccagttctggagagtggtgctgggatgttctgctaccagcctcccttgcagcatatgtactgctcctcccagccccccttccaccagtactcgccaggtggtggcagctaccccataccctacctgggctcctcacactatcagtaccagcgaatggcaccccaggccagcaccgatgggcaccagcctctcttcccaaaacccatctattcctacagcatcctcatcttcatggtccttaagaacagtaaaactgggagccttcccgtcagcgagatctacaattttatgacggagcactttccttacttcaagacagcacccgatggctggaagaattctgtccggcacaacctatccctcaacaagtgcttcgagaaggtggagaacaaatcaggaagttcctcccgcaagggctgcctgtgggccctcaatccggccaagatcgacaagatgcaagaggagctgcaaaaatggaagaggaaagatcccattgctgtgcgcaaaagcatggccaagccagaagagctggacagcctcattggagacaagagagaaaagctgggctccccactcctgggctgtccgccccctgggctgtccggctcaggccccatccggcccctggcacccccagctggcctctccccaccactgcactcactccacccagctccaggccccattcctggcaagaaccccctgcaggacctacttatggggcacacaccctcctgctatgggcagacatacttgcacctctcaccaggcctggcccctcctggacccccgcagccattgttcccacagccggacgggcaccttgagctgcgggcccagccaggcaccccccaggactcgcctctgcctgcccacaccccacccagccacagtgccaagctactggccgagccttccccagccaggactatgcacgacaccctgctgccagatggagaccttggcactgacctggatgccatcaatccctcactcactgacttcgacttccagggaaacctgtgggaacagttgaaggatgatagcttggccctcgaccccctggtactggtgacctcatccccgacatcatcttcgatgccaccaccccagccaccacctcactgcttcccccctgggccctgtctgacagagacaggcagtggggcaggtgacttggcagccccgggcagtggtggctccggggcactgggtgacctgcacctcaccaccctctactctgcctttatggagctggagcccacgccccccacggcccctgcaggcccctctgtgtacctcagccccagctccaagcccgtggccctggcatgagctgtgcccagcttcgtcagctccagcgtttgcctggtctggaagtcctggccggccgcccacatcgggctcaccttaaaggtcaaggaaggaaaatactacctgtcccctatgccactaagccaacgtgtgtgtcagctggtagctgggggcgcagaggacatcacctggggtgctgcctctcacacatttctgccacgtggtggggcagctcctcacccagggcccccaaagagcaagcgtctgggcaagaggaaaatgccctgtccctagctcacactcatccacacttaagccctcgtgcacacacacaaattattcagatgtacacccacccacatatcttacagccagaggaaccagcactccatcactgagagcccgacttcgtttctggggcaactgagagctgagcgctttgcttaccaaaagctcagggccctgtgccaggccaaagatccccccagacccccattctgacatccacatgctctgcagtcctggccccctcgtcattttctttcccagaagcgccctgtatttattcccccatcttcatcccaacagcccagcaagaaggaggagacagagagctcctccctgggttgtctgtggacccccccaggagctgctaattggcagcacccactcagccattctctacccatccttagtacatgctctgtccagctttccccagggtgacatacagaaggggcaa

SEQ ID NO: 91466 - DNA, 416 bp, Homo sapiens
gatgtggttgtttaacaaatagatgggagtgtgtttcttcgatggcttcttgtccgtggcagttctggggtcccccccaccgccatttttttgctcccttgtctgcttccataagactaatcagtctgcaggaaacagaaagcaggctgtagtgcctcgtcccccaggagtcctcaccccatgggcagattagagggaagcagcagacagagccccgccccgggctcccgtcggctcctggccatcctgggcttatgtggcctttgtctccaccctcacagcctccagatggcttctgtgcctcccagcaggaaggaagacaaggacagagtgcaaagggcagaggccagctgccttgaccttatgaagctcaccctggcatgtgttcccagggccttgcccagttcactctccct

SEQ ID NO: 91467 - DNA, 369 bp, Homo sapiens
caatctttccttttgttatgttgtcatggtaacaatagggctcaggctaaagcagcccttatagttcagtgtaaatcatatttaacatttgagaagtttccccttttgactcatgctttgactgagacgttgaaagatccgcatggtgtgctgagacaatatggtcaataacgatcttgatcctaaaatctagatatactaaaatttaaaaggtgtttgtctaggagtggatggcttgccgggtttttgtatctcttcctcttcaccctgaccttcctatgaatacagaaaatattctacacttctttttttttttttgagacagagtcttgctctgtcgcccaggccggagtgcagtggcacgatctc

SEQ ID NO: 91468 - DNA, 295 bp, Homo sapiens
cactgcactccagcctgggtgacagaacaagaccctgtctcaaaaacaacaaaaaaagaatttggggctcctgcctcatataactagttagtggcaaagttgagatagactctgaaatcctgggattgactctacaagaatctatatttgtgttttttactatatcctactgtctaatttacggtctttaagcactaaactcctttttaacctgttaatcttgcctatcaagttgcattttgagaaaaatgaaccatgtatttgtgtttctccataactcctaatactcacatct

SEQ ID NO: 91469 - DNA, 415 bp, Homo sapiens
actgtgccaggcaagagatcatgacaaagctgttgagaccagcagagcatttctctctgctggtccctgatctggggcccctcagctgccctgcacaacgaaggatgggggcagtggggggaattcctgagactttcttgggcttggctaaagtcctagaggctccaggaggcagggggctcctatacacttccaccaacctgtgaagaactgcagcagaaaactgcactgtgggggagaagggaagggtggcgaggaaagtatgaaagatgtgaggaaaggtgcgagggcttttggggaaacagtgtagagggaggggtcttcatacctagaacatcactttatatgatgttttcaaataatccttcaaaaataatcaaataatcctttcaaataaacctttatctgatgtttt

SEQ ID NO: 91470 - DNA, 300 bp, Homo sapiens
ctaatatctttttaggactaattatgtgtcaggcactatatattaagtgccttaacctcaaactctcttaatattctcaacaacctaatgaagtaggtcctattattaaactcattccacagacaagaaaactgaggcacagggagaggaagtaacttgcccaagatcacactgctagcaagtaaggggactttgttccagagtctgtgtgccactgtacccaactctcttacctttccacttgtaccttaatcactgagtaccaaacctcctggtgaaacttcagggcttcaaagtccc

SEQ ID NO: 91471 - DNA, 202 bp, Homo sapiens
ggaaggatgtatcatcatctctttaacaggtgaagaaaccaaggctcagagagttaagctgctaacgctcctgatttagctagtgggtagctgagctaacatctcagttctgtcaacatccagcccaggttctccactaaactgcctgtgatgggagcacgggcccagcttagacagccttctatgcctactgaaccctgcc

SEQ ID NO: 91472 - DNA, 223 bp, Homo sapiens
cttgtgtttaatatggggctgatttgctacaggggtttttcaatgtctgctccactctcagatttaggtttgagaaagaaataaaagggcagttcctaatattcggaaactggcctgacactcacaggtagacgatattattctcttgttagatatccacgatatcacagaatgccacctcggataagtttattctgagaccaagataaaaatgagacaaaga

SEQ ID NO: 91473 - DNA, 415 bp, Homo sapiens
ccatgtgaaacaacagtcctctctctagcaggactgggtttctttccatgcagaggttttgtgctgtgaggtttgttgttaatggtgtctgtacggttcctttgtctttcttgtacataatgaaaattgacctaaggtaacacatcttttctttgtctctgttactaagtcatgaataaattagtcttgctttctactctgaggcccagatcaatattctactggaatgttgattgttttagtgaatggaaatgaactggcagaatgccattcagaatacttgagcacaggctaatgaaacatttgcatgggtggatgaaaaggccccctgatagaaattaagagtaacatttgcatagtttcctgctatttacaagcacttgcacatatgtttaattctcacaaccactccatg

SEQ ID NO: 91474 - DNA, 889 bp, Homo sapiens
ccctgaaagtcatgcgggatgaaccctcagctgtaatatcctccttgactgcaggactggcagtcgtgtggctctagaggaacctgtggcaggacaggttaagtaaggcacataggggagggggtagcttctgatgtgcttctttgctttctagtacatttctctcattttgtgtgttttattgtgaactaaaatataaacttagacttgaaaatgtgacaagtaaaaatggttgattagtcttggatgctaattgtcaattaatattcattgcatttgtttatagtagcctccaccctcccatccacggttttacttttcaaggtttcagttaaccatggtccaccgaggtctcaaaataagtgagtaaagtacaataagatattttaagagagagagagaccacattcatataacttttattactgtatattgttatcattgttcacttttattattagttattattaatcacttactatgcctaatttacacattaaactttatcataggtgtgtgtgtataggaaaaaatatagtgtgctctgtgctatgttagttagttctatgatagctcagtactatctgtggttttaggtatccactgggacttggaatatatcccccatggatgaggggaaactactgtaccgtgttggggattttttatttatttattttttttttgtgacagagttttgctcttgtcatgcaggctggagtgcaatggggtgattctcctgtctcagcctcctaagtagctgggattacaggtgcccaccaccatgcccagctaatttttgtatgtttagtagagacggggtttcaccatgttggccaggctggtctcaaactcctgacctcaggtgatccacctgcctcgacctccc

SEQ ID NO: 91475 - DNA, 312 bp, Homo sapiens
ccaaaatccaaaaacaaagaatgtgcccttatttggatgcataaagcttctttgaagtttaaactcttctaaacgttctttatagaggggactgtttctttcttttttttttttttttagataataatacatgcatttattttttatttatttatttttttaattttactttttctttttttttattatactttaagttttagggtacatgtgcacaatgtgcaggttagttacgtatgtatacatgtgccatgttggtgtgccgcacccatcaactcgtcatttaacattaggtatatctcctaatgctat

SEQ ID NO: 91476 - DNA, 109 bp, Homo sapiens
gctatctccaggtaggtggtgtcagaactgaactgaactgtagtcctacagttggtgtctaatggggaactgcttggtgtgtggagaaaaaacccacacatctggtgtc

SEQ ID NO: 91477 - DNA, 460 bp, Homo sapiens
ttagttaaactaagaatataaattatcccatgtagaacaaaatggcaaatgtttatatcaatgtgaataagaaaaagaacaatatataataagcttaaaaattattaagtattgctggatgtaatttaatacacacaaaactaaaacactattaaaaatcattttatactcaatctcaatttgtaataggtaaaaatagtatgttcaacaatgctataataagccccaataagattagattctttggtttaatttcttcatgttgtggaagatgtaacctaggggacgttatatttgactgatggaccttcttttctacttaggagctgatacacatttttttctacttagttgacatctgatatgagttagacacattgcaatcaattatatttgtgcctcaaaatagcctttgaaattatgttgcaatgtgaacactggttaaatacaataatagtat

SEQ ID NO: 91478 - DNA, 933 bp, Homo sapiens
gtcggggctgagaccagccctgtgtcaaggtcagttaccaggacggtctccggaggccgggattcgcggagggtccaccagcaggaagaaaccccaggaggaagaaacctcatgacagatcgccggggaggcagcgcgggatcccaacctcaggcgtgcgcggacggtgtgcggatccatgaggaatctccacactgtcttccacaatggtcgaactaattttcattcccaccaacagtgattcaaggtcagccaaagaggagcaaagagtcatccacctcaatcatgttcaggaaatgatcaggtcaagatgtggagtgagccagcttttctctttcgtgccacattttctgacccagcatttcaagctacccaaggtgcgaaaaagaaagaaggccaaagggaagaaggtggtgctgacccttgcggtcttgaaaaagcaggagaccatgaaagtggtgaatcttccatttgagaaatttggcactggacaggacattttggcattggacagaacatccagcccaaaagggacctcacttgctttgtcaaatggccccattatactaggttgcagcagcagagagccatcctctataagcagctagaagtgccttctgtgattagtcagttcaccagggccttggaccaccaaacagctgctcaatggggtaagctggctggcaagtacagaccagagacaaagcaagagaagcagcagagactgttggcctgggctgagaagaaagcaaaggagacatccccactgagagatcacctgtccttttaatgggggttaacgctgtcaccaccttatcggagaaaaagaaggatcagctggtgatgactgcacaggacagagatcccattgagttggttgtcttcctgcctgccctgtgttgtaaactgggggttccttactgcattatctaa

SEQ ID NO: 91479 - DNA, 621 bp, Homo sapiens
tcaccatgttggccatgctggtctcaaactcctgacctcaggtgatccgcccgcctcggcctcccaaagtgctgggattacaagcgtgagccactgtgcccggctacataagcatttttaagctcagtaagccccaaactaagctcaccttcccttcccaaacctgattgtgtattttctacctttttgaacacctttttgaacctggtggggctgcctgttaaatacttctggaaaaacttaagtcaaagggtacttttgtgaaagtacctccttccccactttcctcctgttttctattactatagttctatcatggtacctacaaacattttattgtactttatctgttctccccagtagactaaaagcatctcgatactttgtccttggggaagcaagcaaatcaatgaaccaatgaatgaatgcatcttgagggttttccattgccatcctgcacagtgcctagcataaacagttgagaggtgactgagggtacctccaactaaacacatttaaaatggaactcaccagtttcctccaaattgctttcctccaaactttctgctttaaaatgacttgctgtgcacagttgatagcgtcaccatcttttcagttcac

SEQ ID NO: 91480 - DNA, 2582 bp, Homo sapiens
cgcgctggaaatatgaagagacgctgcagctgcggtggcggtggcggccactgcagctcagagcggcgcacgcggcggccggggcgggacgcggggccgggcgcggagaagtcggggcgggcggcagagaggccgggacgcggaccgggccggggcgcccacagccgcccgacggcgcccagagagcgcgcgccccgcagccccgcgcctagcccgccgggcatggggcgcgcggcagccgcctgaagccccggcctggcccggccgcacccggccggaggcggagggcagagcgcgcgcccagttgcccgggcaccaaatcggagcgcggcgtgcgggagggcccagagcaggactggaaatgtcctggccgcgccgcctcctgctcagatacctgttcccggccctcctgcttcacgggctgggagagggttctgccctccttcatccagacagcaggtctcatcctaggtccttagagaaaagtgcctggagggcttttaaggagtcacagtgccatcacatgctcaaacatctccacaatggtgcaaggatcacagtgcagatgccacctacaatcgagggccactgggtctccacaggctgtgaagtaaggtcaggcccagagttcatcacaaggtcctacagattctaccacaataacaccttcaaggcctaccaattttattatggcagcaaccggtgcacaaatcccacttatactctcatcatccggggcaagatccgcctccgccaggcctcctggatcatccgagggggcacggaagccgactaccagctgcacaacgtccaggtgatctgccacacagaggcggtggccgagaagctcggccagcaggtgaaccgcacatgcccgggcttcctcgcagacgggggtccctgggtgcaggacgtggcctatgacctctggcgagaggagaacggctgtgagtgcaccaaggccgtgaactttgccatgcatgaacttcagctcatccgggtggagaagcagtaccttcaccacaacctcgaccacctggtcgaggagctcttccttggtgacattcacactgatgccacccagaggatgttctaccggccctccagttaccagccccctctgcagaatgccaagaaccacgaccatgcctgcatcgcctgtcggatcatctatcggtcagacgagcaccaccctcccatcctgcccccaaaggcagacctgaccatcggcctgcacggggagtgggtgagccagcgctgtgaggtgcgccccgaagtcctcttcctcacccgccacttcatcttccatgacaacaacaacacctgggagggccactactaccactactcagacccggtgtgcaagcaccccaccttctccatctacgcccggggccgctacagccgcggcgtcctctcgtccagggtcatgggaggcaccgagttcgtgttcaaagtgaatcacatgaaggtcacccccatggatgcggccacagcctcactgctcaacgtcttcaacgggaatgagtgcggggccgagggctcctggcaggtgggcatccagcaggatgtgacccacaccaatggctgcgtggccctgggcatcaaactacctcacacggagtacgagatcttcaaaatggaacaggatgcccgggggcgctatctgctgttcaacggtcagaggcccagcgacgggtccagcccagacaggccagagaagagagccacgtcctaccagatgcccttggtccagtgtgcctcctcttcgccgagggcagaggacctcgcagaagacagtggaagcagcctgtatggccgggcccctgggaggcacacctggtccctgctgctggctgcacttgcctgccttgtccctctgctgcattggaacatccgcagatagaagttttagaaagttctatttttccaaaccaggattccttactattgacagatttgctttaccaaaagaaaagacatttattcttttgatgcacttgaatgccagagaactgtccttctttttctcctctccctccctcccagcccctgagtcatgaacagcaaggagtgtttgaagtttctgctttgaactccgtccagcctgatccctggcctgagcaacttcacaacagtaattgcactttaagacagcctagagttctggacgagcgtgtttggtagcagggatgaaagctagggcctcttatttttttctcttaattattattatatttctgagttaaacttagaagaaacaactatcaagctacaacttttcctgccattttcctgtggttgcagcctgtcttcctttgaaattgttttactctctgagttttatatgctggaatccaatgcagagttggtttgggactgtgatcaagacaccttttattaataaagaagagacacaggtgtagatatgtatatacaaaaagatgtacggtctggccaaaccaccttcccagcctttatgcaaaaaaaggggagaatcaaagctttcatttcagaaatgttgcgtggaaaagtatctgtaattaaagtttcgaagtaatttaacctaaaaaaaaaaaatt

SEQ ID NO: 91481 - DNA, 2394 bp, Homo sapiens
cgcgctggaaatatgaagagacgctgcagctgcggtggcggtggcggccactgcagctcagagcggcctggcccggccgcacccggccggaggcggagggcagagcgcgcgcccagttgcccgggcaccaaatcggagcgcggcgtgcgggagggcccagagcaggactggaaatgtcctggccgcgccgcctcctgctcagatacctgttcccggccctcctgcttcacgggctgggagagggttctgccctccttcatccagacagcaggtctcatcctaggtccttagagaaaagtgcctggagggcttttaaggagtcacagtgccatcacatgctcaaacatctccacaatggtgcaaggatcacagtgcagatgccacctacaatcgagggccactgggtctccacaggctgtgaagtaaggtcaggcccagagttcatcacaaggtcctacagattctaccacaataacaccttcaaggcctaccaattttattatggcagcaaccggtgcacaaatcccacttatactctcatcatccggggcaagatccgcctccgccaggcctcctggatcatccgagggggcacggaagccgactaccagctgcacaacgtccaggtgatctgccacacagaggcggtggccgagaagctcggccagcaggtgaaccgcacatgcccgggcttcctcgcagacgggggtccctgggtgcaggacgtggcctatgacctctggcgagaggagaacggctgtgagtgcaccaaggccgtgaactttgccatgcatgaacttcagctcatccgggtggagaagcagtaccttcaccacaacctcgaccacctggtcgaggagctcttccttggtgacattcacactgatgccacccagaggatgttctaccggccctccagttaccagccccctctgcagaatgccaagaaccacgaccatgcctgcatcgcctgtcggatcatctatcggtcagacgagcaccaccctcccatcctgcccccaaaggcagacctgaccatcggcctgcacggggagtgggtgagccagcgctgtgaggtgcgccccgaagtcctcttcctcacccgccacttcatcttccatgacaacaacaacacctgggagggccactactaccactactcagacccggtgtgcaagcaccccaccttctccatctacgcccggggccgctacagccgcggcgtcctctcgtccagggtcatgggaggcaccgagttcgtgttcaaagtgaatcacatgaaggtcacccccatggatgcggccacagcctcactgctcaacgtcttcaacgggaatgagtgcggggccgagggctcctggcaggtgggcatccagcaggatgtgacccacaccaatggctgcgtggccctgggcatcaaactacctcacacggagtacgagatcttcaaaatggaacaggatgcccgggggcgctatctgctgttcaacggtcagaggcccagcgacgggtccagcccagacaggccagagaagagagccacgtcctaccagatgcccttggtccagtgtgcctcctcttcgccgagggcagaggacctcgcagaagacagtggaagcagcctgtatggccgggcccctgggaggcacacctggtccctgctgctggctgcacttgcctgccttgtccctctgctgcattggaacatccgcagatagaagttttagaaagttctatttttccaaaccaggattccttactattgacagatttgctttaccaaaagaaaagacatttattcttttgatgcacttgaatgccagagaactgtccttctttttctcctctccctccctcccagcccctgagtcatgaacagcaaggagtgtttgaagtttctgctttgaactccgtccagcctgatccctggcctgagcaacttcacaacagtaattgcactttaagacagcctagagttctggacgagcgtgtttggtagcagggatgaaagctagggcctcttatttttttctcttaattattattatatttctgagttaaacttagaagaaacaactatcaagctacaacttttcctgccattttcctgtggttgcagcctgtcttcctttgaaattgttttactctctgagttttatatgctggaatccaatgcagagttggtttgggactgtgatcaagacaccttttattaataaagaagagacacaggtgtagatatgtatatacaaaaagatgtacggtctggccaaaccaccttcccagcctttatgcaaaaaaaggggagaatcaaagctttcatttcagaaatgttgcgtggaaaagtatctgtaattaaagtttcgaagtaatttaacctaaaaaaaaaaaatt

SEQ ID NO: 91482 - DNA, 2319 bp, Homo sapiens
gctctaccagttccagctgttcaccttgcctgcgggccaggacctcgcccagcccttgttcatccagtcagccaactagccctccgacgggcagtgccccccaggtgacctggtgactgatgggcctgagctggcaaggccaaggacacccaacacaattttggccatacagccccaggcaatgggcacagccttcctccccagaggacccggccgacctcagcgcctcttgcaggctaggacactggtgcacaagttgtcgagattcgaatctccacaatggtgcaaggatcacagtgcagatgccacctacaatcgagggccactgggtctccacaggctgtgaagtaaggtcaggcccagagttcatcacaaggtcctacagattctaccacaataacaccttcaaggcctaccaattttattatggcagcaaccggtgcacaaatcccacttatactctcatcatccggggcaagatccgcctccgccaggcctcctggatcatccgagggggcacggaagccgactaccagctgcacaacgtccaggtgatctgccacacagaggcggtggccgagaagctcggccagcaggtgaaccgcacatgcccgggcttcctcgcagacgggggtccctgggtgcaggacgtggcctatgacctctggcgagaggagaacggctgtgagtgcaccaaggccgtgaactttgccatgcatgaacttcagctcatccgggtggagaagcagtaccttcaccacaacctcgaccacctggtcgaggagctcttccttggtgacattcacactgatgccacccagaggatgttctaccggccctccagttaccagccccctctgcagaatgccaagaaccacgaccatgcctgcatcgcctgtcggatcatctatcggtcagacgagcaccaccctcccatcctgcccccaaaggcagacctgaccatcggcctgcacggggagtgggtgagccagcgctgtgaggtgcgccccgaagtcctcttcctcacccgccacttcatcttccatgacaacaacaacacctgggagggccactactaccactactcagacccggtgtgcaagcaccccaccttctccatctacgcccggggccgctacagccgcggcgtcctctcgtccagggtcatgggaggcaccgagttcgtgttcaaagtgaatcacatgaaggtcacccccatggatgcggccacagcctcactgctcaacgtcttcaacgggaatgagtgcggggccgagggctcctggcaggtgggcatccagcaggatgtgacccacaccaatggctgcgtggccctgggcatcaaactacctcacacggagtacgagatcttcaaaatggaacaggatgcccgggggcgctatctgctgttcaacggtcagaggcccagcgacgggtccagcccagacaggccagagaagagagccacgtcctaccagatgcccttggtccagtgtgcctcctcttcgccgagggcagaggacctcgcagaagacagtggaagcagcctgtatggccgggcccctgggaggcacacctggtccctgctgctggctgcacttgcctgccttgtccctctgctgcattggaacatccgcagatagaagttttagaaagttctatttttccaaaccaggattccttactattgacagatttgctttaccaaaagaaaagacatttattcttttgatgcacttgaatgccagagaactgtccttctttttctcctctccctccctcccagcccctgagtcatgaacagcaaggagtgtttgaagtttctgctttgaactccgtccagcctgatccctggcctgagcaacttcacaacagtaattgcactttaagacagcctagagttctggacgagcgtgtttggtagcagggatgaaagctagggcctcttatttttttctcttaattattattatatttctgagttaaacttagaagaaacaactatcaagctacaacttttcctgccattttcctgtggttgcagcctgtcttcctttgaaattgttttactctctgagttttatatgctggaatccaatgcagagttggtttgggactgtgatcaagacaccttttattaataaagaagagacacaggtgtagatatgtatatacaaaaagatgtacggtctggccaaaccaccttcccagcctttatgcaaaaaaaggggagaatcaaagctttcatttcagaaatgttgcgtggaaaagtatctgtaattaaagtttcgaagtaatttaacctaaaaaaaaaaaatt

SEQ ID NO: 91483 - DNA, 1866 bp, Homo sapiens
cgcgctggaaatatgaagagacgctgcagctgcggtggcggtggcggccactgcagctcagagcggcgcacgcggcggccggggcgggacgcggggccgggcgcggagaagtcggggcgggcggcagagaggccgggacgcggaccgggccggggcgcccacagccgcccgacggcgcccagagagcgcgcgccccgcagccccgcgcctagcccgccgggcatggggcgcgcggcagccgcctgaagccccggcctggcccggccgcacccggccggaggcggagggcagagcgcgcgcccagttgcccgggcaccaaatcggagcgcggcgtgcgggagggcccagagcaggactggaaatgtcctggccgcgccgcctcctgctcagatacctgttcccggccctcctgcttcacgaaccacgaccatgcctgcatcgcctgtcggatcatctatcggtcagacgagcaccaccctcccatcctgcccccaaaggcagacctgaccatcggcctgcacggggagtgggtgagccagcgctgtgaggtgcgccccgaagtcctcttcctcacccgccacttcatcttccatgacaacaacaacacctgggagggccactactaccactactcagacccggtgtgcaagcaccccaccttctccatctacgcccggggccgctacagccgcggcgtcctctcgtccagggtcatgggaggcaccgagttcgtgttcaaagtgaatcacatgaaggtcacccccatggatgcggccacagcctcactgctcaacgtcttcaacgggaatgagtgcggggccgagggctcctggcaggtgggcatccagcaggatgtgacccacaccaatggctgcgtggccctgggcatcaaactacctcacacggagtacgagatcttcaaaatggaacaggatgcccgggggcgctatctgctgttcaacggtcagaggcccagcgacgggtccagcccagacaggccagagaagagagccacgtcctaccagatgcccttggtccagtgtgcctcctcttcgccgagggcagaggacctcgcagaagacagtggaagcagcctgtatggccgggcccctgggaggcacacctggtccctgctgctggctgcacttgcctgccttgtccctctgctgcattggaacatccgcagatagaagttttagaaagttctatttttccaaaccaggattccttactattgacagatttgctttaccaaaagaaaagacatttattcttttgatgcacttgaatgccagagaactgtccttctttttctcctctccctccctcccagcccctgagtcatgaacagcaaggagtgtttgaagtttctgctttgaactccgtccagcctgatccctggcctgagcaacttcacaacagtaattgcactttaagacagcctagagttctggacgagcgtgtttggtagcagggatgaaagctagggcctcttatttttttctcttaattattattatatttctgagttaaacttagaagaaacaactatcaagctacaacttttcctgccattttcctgtggttgcagcctgtcttcctttgaaattgttttactctctgagttttatatgctggaatccaatgcagagttggtttgggactgtgatcaagacaccttttattaataaagaagagacacaggtgtagatatgtatatacaaaaagatgtacggtctggccaaaccaccttcccagcctttatgcaaaaaaaggggagaatcaaagctttcatttcagaaatgttgcgtggaaaagtatctgtaattaaagtttcgaagtaatttaacctaaaaaaaaaaaatt

SEQ ID NO: 91484 - DNA, 2454 bp, Homo sapiens
cgcgctggaaatatgaagagacgctgcagctgcggtggcggtggcggccactgcagctcagagcggcgcacgcggcggccggggcgggacgcggggccgggcgcggagaagtcggggcgggcggcagagaggccgggacgcggaccgggccggggcgcccacagccgcccgacggcgcccagagagcgcgcgccccgcagccccgcgcctagcccgccgggcatggggcgcgcggcagccgcctgaagccccggcctggcccggccgcacccggccggaggcggagggcagagcgcgcgcccagttgcccgggcaccaaatcggagcgcggcgtgcgggagggcccagagcaggactggaaatgtcctggccgcgccgcctcctgctcagatacctgttcccggccctcctgcttcacgggctgggagagggttctgccctccttcatccagacagcaggtctcatcctaggtccttagagaaaagtgcctggagggcttttaaggagtcacagtgccatcacatgctcaaacatctccacaatggtgcaaggatcacagtgcagatgccacctacaatcgagggccactgggtctccacaggctgtgaagtaaggtcaggcccagagttcatcacaaggtcctacagattctaccacaataacaccttcaaggcctaccaattttattatggcagcaaccggtgcacaaatcccacttatactctcatcatccggggcaagatccgcctccgccaggcctcctggatcatccgagggggcacggaagccgactaccagctgcacaacgtccaggtgatctgccacacagaggcggtggccgagaagctcggccagcaggtgaaccgcacatgcccgggcttcctcgcagacgggggtccctgggtgcaggacgtggcctatgacctctggcgagaggagaacggctgtgagtgcaccaaggccgtgaactttgccatgcatgaacttcagctcatccgggtggagaagcagtaccttcaccacaacctcgaccacctggtcgaggagctcttccttggtgacattcacactgatgccacccagaggatgttctaccggccctccagttaccagccccctctgcagaatgccaagaaccacgaccatgcctgcatcgcctgtcggatcatctatcggtcagacgagcaccaccctcccatcctgcccccaaaggcagacctgaccatcggcctgcacggggagtgggtgagccagcgctgtgaggtgcgccccgaagtcctcttcctcacccgccacttcatcttccatgacaacaacaacacctgggagggccactactaccactactcagacccggtgtgcaagcaccccaccttctccatctacgcccggggccgctacagccgcggcgtcctctcgtccagggtcatgggaggcaccgagttcgtgttcaaagtgaatcacatgaaggtcacccccatggatgcggccacagcctcactgctcaacgtcttcaacgggaatgagtgcggggccgagggctcctggcaggtgggcatccagcaggatgtgacccacaccaatggctgcgtggccctgggcatcaaactacctcacacggagtacgagatcttcaaaatggaacaggatgcccgggggcgctatctgctgttcaacggtcagaggcccagcgacgggtccagcccagacaggccagagaagagagccacgtcctaccagatgcccttggtccagtgtgcctcctcttcgccgagggcagaggacctcgcagaagacagtggaagcagcctgtatggccgggcccctgggaggcacacctggtccctgctgctggctgcacttgcctgccttgtccctctgctgcattggaacatccgcagatagaagttttagaaagttctatttttccaaaccaggattccttactattgacagatttgctttaccaaaagaaaagacatttattcttttgatgcacttgaatgccagagaactgtccttctttttctcctctccctccctcccagcccctgagtcatgaacagcaaggagtgtttgaagtttctgctttgaactccgtccagcctgatccctggcctgagcaacttcacaacagtaattgcactttaagacagcctagagttctggacgagcgtgtttggtagcagggatgaaagctagggcctcttatttttttctcttaattattattatatttctgagttaaacttagaagaaacaactatcaagctacaacttttcctgccattttcctgtggttgcagcctgtcttcctttgaaattgttttactctctgagttttatatgctggaatccaatgcagagttggtttgggactgtgatcaagacaccttttattaataaagaagagactcaagtggtgtggactcaggtgtgtggggatcctctag

SEQ ID NO: 91485 - DNA, 2428 bp, Homo sapiens
cgcgctggaaatatgaagagacgctgcagctgcggtggcggtggcggccactgcagctcagagcggcgcacgcggcggccggggcgggacgcggggccgggcgcggagaagtcggggcgggcggcagagaggccgggacgcggaccgggccggggcgcccacagccgcccgacggcgcccagagagcgcgcgccccgcagccccgcgcctagcccgccgggcatggggcgcgcggcagccgcctgaagccccggcctggcccggccgcacccggccggaggcggagggcagagcgcgcgcccagttgcccgggcaccaaatcggagcgcggcgtgcgggagggcccagagcaggactggaaatgtcctggccgcgccgcctcctgctcagatacctgttcccggccctcctgcttcacgggctgggagagggttctgccctccttcatccagacagcaggtctcatcctaggtccttagagaaaagtgcctggagggcttttaaggagtcacagtgccatcacatgctcaaacatctccacaatggtgcaaggatcacagtgcagatgccacctacaatcgagggccactgggtctccacaggctgtgaagtaaggtcaggcccagagttcatcacaaggtcctacagattctaccacaataacaccttcaaggcctaccaattttattatggcagcaaccggtgcacaaatcccacttatactctcatcatccggggcaagatccgcctccgccaggcctcctggatcatccgagggggcacggaagccgactaccagctgcacaacgtccaggtgatctgccacacagaggcggtggccgagaagctcggccagcaggtgaaccgcacatgcccgggcttcctcgcagacgggggtccctgggtgcaggacgtggcctatgacctctggcgagaggagaacggctgtgagtgcaccaaggccgtgaactttgccatgcatgaacttcagctcatccgggtggagaagcagtaccttcaccacaacctcgaccacctggtcgaggagctcttccttggtgacattcacactgatgccacccagaggatgttctaccggccctccagttaccagccccctctgcagaatgccaagaaccacgaccatgcctgcatcgcctgtcggatcatctatcggtcagacgagcaccaccctcccatcctgcccccaaaggcagacctgaccatcggcctgcacggggagtgggtgagccagcgctgtgaggtgcgccccgaagtcctcttcctcacccgccacttcatcttccatgacaacaacaacacctgggagggccactactaccactactcagacccggtgtgcaagcaccccaccttctccatctacgcccggggccgctacagccgcggcgtcctctcgtccagggtcatgggaggcaccgagttcgtgttcaaagtgaatcacatgaaggtcacccccatggatgcggccacagcctcactgctcaacgtcttcaacgggaatgagtgcggggccgagggctcctggcaggtgggcatccagcaggatgtgacccacaccaatggctgcgtggccctgggcatcaaactacctcacacggagtacgagatcttcaaaatggaacaggatgcccgggggcgctatctgctgttcaacggtcagaggcccagcgacgggtccagcccagacaggccagagaagagagccacgtcctaccagatgcccttggtccagtgtgcctcctcttcgccgagggcagaggacctcgcagaagacagtggaagcagcctgtatggccgggcccctgggaggcacacctggtccctgctgctggctgcacttgcctgccttgtccctctgctgcattggaacatccgcagatagaagttttagaaagttctatttttccaaaccaggattccttactattgacagatttgctttaccaaaagaaaagacatttattcttttgatgcacttgaatgccagagaactgtccttctttttctcctctccctccctcccagcccctgagtcatgaacagcaaggagtgtttgaagtttctgctttgaactccgtccagcctgatccctggcctgagcaacttcacaacagtaattgcactttaagacagcctagagttctggacgagcgtgtttggtagcagggatgaaagctagggcctcttatttttttctcttaattattattatatttctgagttaaacttagaagagacacaggtgtagatatgtatatacaaaaagatgtacggtctggccaaaccaccttcccagcctttatgcaaaaaaaggggagaatcaaagctttcatttcagaaatgttgcgtggaaaagtatctgtaattaaagtttcgaagtaatttaacctaaaaaaaaaaaatt

SEQ ID NO: 91486 - DNA, 343 bp, Homo sapiens
ggtgatctgccacacagaggcggtggccgagaagctcggccagcaggtgaaccgcacatgcccgggcttcctcgcagacgggggtccctgggtgcaggacgtggcctatgacctctggcgagaggagaacggctgtgagtgcaccaaggccgtgaactttgccatgcatgaacttcagctcatccgggtggagaagcagtaccttcaccacaacctcgaccacctggtcgaggagctcttccttggtgacattcacactgatgccacccagaggatgttctaccggccctccagttaccagccccctctgcagaatgccaaggtacctcagagctctgtgttc

SEQ ID NO: 91487 - DNA, 2418 bp, Homo sapiens
cgcgctggaaatatgaagagacgctgcagctgcggtggcggtggcggccactgcagctcagagcggcgcacgcggcggccggggcgggacgcggggccgggcgcggagaagtcggggcgggcggcagagaggccgggacgcggaccgggcaccaaatcggagcgcggcgtgcgggagggcccagagcaggactggaaatgtcctggccgcgccgcctcctgctcagatacctgttcccggccctcctgcttcacgggctgggagagggttctgccctccttcatccagacagcaggtctcatcctaggtccttagagaaaagtgcctggagggcttttaaggagtcacagtgccatcacatgctcaaacatctccacaatggtgcaaggatcacagtgcagatgccacctacaatcgagggccactgggtctccacaggctgtgaagtaaggtcaggcccagagttcatcacaaggtcctacagattctaccacaataacaccttcaaggcctaccaattttattatggcagcaaccggtgcacaaatcccacttatactctcatcatccggggcaagatccgcctccgccaggcctcctggatcatccgagggggcacggaagccgactaccagctgcacaacgtccaggtgatctgccacacagaggcggtggccgagaagctcggccagcaggtgaaccgcacatgcccgggcttcctcgcagacgggggtccctgggtgcaggacgtggcctatgacctctggcgagaggagaacggctgtgagtgcaccaaggccgtgaactttgccatgcatgaacttcagctcatccgggtggagaagcagtaccttcaccacaacctcgaccacctggtcgaggagctcttccttggtgacattcacactgatgccacccagaggatgttctaccggccctccagttaccagccccctctgcagaatgccaagaaccacgaccatgcctgcatcgcctgtcggatcatctatcggtcagacgagcaccaccctcccatcctgcccccaaaggcagacctgaccatcggcctgcacggggagtgggtgagccagcgctgtgaggtgcgccccgaagtcctcttcctcacccgccacttcatcttccatgacaacaacaacacctgggagggccactactaccactactcagacccggtgtgcaagcaccccaccttctccatctacgcccggggccgctacagccgcggcgtcctctcgtccagggtcatgggaggcaccgagttcgtgttcaaagtgaatcacatgaaggtcacccccatggatgcggccacagcctcactgctcaacgtcttcaacgggaatgagtgcggggccgagggctcctggcaggtgggcatccagcaggatgtgacccacaccaatggctgcgtggccctgggcatcaaactacctcacacggagtacgagatcttcaaaatggaacaggatgcccgggggcgctatctgctgttcaacggtcagaggcccagcgacgggtccagcccagacaggccagagaagagagccacgtcctaccagatgcccttggtccagtgtgcctcctcttcgccgagggcagaggacctcgcagaagacagtggaagcagcctgtatggccgggcccctgggaggcacacctggtccctgctgctggctgcacttgcctgccttgtccctctgctgcattggaacatccgcagatagaagttttagaaagttctatttttccaaaccaggattccttactattgacagatttgctttaccaaaagaaaagacatttattcttttgatgcacttgaatgccagagaactgtccttctttttctcctctccctccctcccagcccctgagtcatgaacagcaaggagtgtttgaagtttctgctttgaactccgtccagcctgatccctggcctgagcaacttcacaacagtaattgcactttaagacagcctagagttctggacgagcgtgtttggtagcagggatgaaagctagggcctcttatttttttctcttaattattattatatttctgagttaaacttagaagaaacaactatcaagctacaacttttcctgccattttcctgtggttgcagcctgtcttcctttgaaattgttttactctctgagttttatatgctggaatccaatgcagagttggtttgggactgtgatcaagacaccttttattaataaagaagagacacaggtgtagatatgtatatacaaaaagatgtacggtctggccaaaccaccttcccagcctttatgcaaaaaaaggggagaatcaaagctttcatttcagaaatgttgcgtggaaaagtatctgtaattaaagtttcgaagtaatttaacctaaaaaaaaaaaatt

SEQ ID NO: 91488 - DNA, 1908 bp, Homo sapiens
tggcatcgtcagacctcagactagctgccgttgcgcttcccacttatactctcatcatccggggcaagatccgcctccgccaggcctcctggatcatccgagggggcacggaagccgactaccagctgcacaacgtccaggtgatctgccacacagaggcggtggccgagaagctcggccagcaggtgaaccgcacatgcccgggcttcctcgcagacgggggtccctgggtgcaggacgtggcctatgacctctggcgagaggagaacggctgtgagtgcaccaaggccgtgaactttgccatgcatgaacttcagctcatccgggtggagaagcagtaccttcaccacaacctcgaccacctggtcgaggagctcttccttggtgacattcacactgatgccacccagaggatgttctaccggccctccagttaccagccccctctgcagaatgccaagaaccacgaccatgcctgcatcgcctgtcggatcatctatcggtcagacgagcaccaccctcccatcctgcccccaaaggcagacctgaccatcggcctgcacggggagtgggtgagccagcgctgtgaggtgcgccccgaagtcctcttcctcacccgccacttcatcttccatgacaacaacaacacctgggagggccactactaccactactcagacccggtgtgcaagcaccccaccttctccatctacgcccggggccgctacagccgcggcgtcctctcgtccagggtcatgggaggcaccgagttcgtgttcaaagtgaatcacatgaaggtcacccccatggatgcggccacagcctcactgctcaacgtcttcaacgggaatgagtgcggggccgagggctcctggcaggtgggcatccagcaggatgtgacccacaccaatggctgcgtggccctgggcatcaaactacctcacacggagtacgagatcttcaaaatggaacaggatgcccgggggcgctatctgctgttcaacggtcagaggcccagcgacgggtccagcccagacaggccagagaagagagccacgtcctaccagatgcccttggtccagtgtgcctcctcttcgccgagggcagaggacctcgcagaagacagtggaagcagcctgtatggccgggcccctgggaggcacacctggtccctgctgctggctgcacttgcctgccttgtccctctgctgcattggaacatccgcagatagaagttttagaaagttctatttttccaaaccaggattccttactattgacagatttgctttaccaaaagaaaagacatttattcttttgatgcacttgaatgccagagaactgtccttctttttctcctctccctccctcccagcccctgagtcatgaacagcaaggagtgtttgaagtttctgctttgaactccgtccagcctgatccctggcctgagcaacttcacaacagtaattgcactttaagacagcctagagttctggacgagcgtgtttggtagcagggatgaaagctagggcctcttatttttttctcttaattattattatatttctgagttaaacttagaagaaacaactatcaagctacaacttttcctgccattttcctgtggttgcagcctgtcttcctttgaaattgttttactctctgagttttatatgctggaatccaatgcagagttggtttgggactgtgatcaagacaccttttattaataaagaagagacacaggtgtagatatgtatatacaaaaagatgtacggtctggccaaaccaccttcccagcctttatgcaaaaaaaggggagaatcaaagctttcatttcagaaatgttgcgtggaaaagtatctgtaattaaagtttcgaagtaatttaacctaaaaaaaaaaaatt

SEQ ID NO: 91489 - DNA, 1713 bp, Homo sapiens
attcgacctcggtaccctctgtggggccttcccagcaacagtcagcccttaagctgacgtttcccattctccgccctgctccatccccatctcacctatgatctatcttactatttagttcaatgtctttctccccacagagagagcctcgacgctctctctgtgggctggtcgaggagctcttccttggtgacattcacactgatgccacccagaggatgttctaccggccctccagttaccagccccctctgcagaatgccaagaaccacgaccatgcctgcatcgcctgtcggatcatctatcggtcagacgagcaccaccctcccatcctgcccccaaaggcagacctgaccatcggcctgcacggggagtgggtgagccagcgctgtgaggtgcgccccgaagtcctcttcctcacccgccacttcatcttccatgacaacaacaacacctgggagggccactactaccactactcagacccggtgtgcaagcaccccaccttctccatctacgcccggggccgctacagccgcggcgtcctctcgtccagggtcatgggaggcaccgagttcgtgttcaaagtgaatcacatgaaggtcacccccatggatgcggccacagcctcactgctcaacgtcttcaacgggaatgagtgcggggccgagggctcctggcaggtgggcatccagcaggatgtgacccacaccaatggctgcgtggccctgggcatcaaactacctcacacggagtacgagatcttcaaaatggaacaggatgcccgggggcgctatctgctgttcaacggtcagaggcccagcgacgggtccagcccagacaggccagagaagagagccacgtcctaccagatgcccttggtccagtgtgcctcctcttcgccgagggcagaggacctcgcagaagacagtggaagcagcctgtatggccgggcccctgggaggcacacctggtccctgctgctggctgcacttgcctgccttgtccctctgctgcattggaacatccgcagatagaagttttagaaagttctatttttccaaaccaggattccttactattgacagatttgctttaccaaaagaaaagacatttattcttttgatgcacttgaatgccagagaactgtccttctttttctcctctccctccctcccagcccctgagtcatgaacagcaaggagtgtttgaagtttctgctttgaactccgtccagcctgatccctggcctgagcaacttcacaacagtaattgcactttaagacagcctagagttctggacgagcgtgtttggtagcagggatgaaagctagggcctcttatttttttctcttaattattattatatttctgagttaaacttagaagaaacaactatcaagctacaacttttcctgccattttcctgtggttgcagcctgtcttcctttgaaattgttttactctctgagttttatatgctggaatccaatgcagagttggtttgggactgtgatcaagacaccttttattaataaagaagagacacaggtgtagatatgtatatacaaaaagatgtacggtctggccaaaccaccttcccagcctttatgcaaaaaaaggggagaatcaaagctttcatttcagaaatgttgcgtggaaaagtatctgtaattaaagtttcgaagtaatttaacctaaaaaaaaaaaatt

SEQ ID NO: 91490 - DNA, 1962 bp, Homo sapiens
cgcgctggaaatatgaagagacgctgcagctgcggtggcggtggcggccactgcagctcagagcggcgcacgcggcggccggggcgggacgcggggccgggcgcggagaagtcggggcgggcggcagagaggccgggacgcggaccgggccggggcgcccacagccgcccgacggcgcccagagagcgcgcgccccgcagccccgcgcctagcccgccgggcatggggcgcgcggcagccgcctgaagccccggcctggcccggccgcacccggccggaggcggagggcagagcgcgcgcccagttgcccgggcaccaaatcggagcgcggcgtgcgggagggcccagagcaggactggaaatgtcctggccgcgccgcctcctgctcagatacctgttcccggccctcctgcttcacgggctgggagagggttctgccctccttcatccagacagcaggtctcatcctaggtccttagagaaaagtgcctggagggcttttaaggagtcacagtgccatcacatgctcaaacatctccacaatggtgcaaggatcacagtgcagatgccacctacaatcgagggccactgggtctccacaggctgtgaagtaaggtcaggcccagagttcatcacaaggtcctacagattctaccacaataacaccttcaaggcctaccaattttattatggcagcaaccggtgcacaaatccactactaccactactcagacccggtgtgcaagcaccccaccttctccatctacgcccggggccgctacagccgcggcgtcctctcgtccagggtcatgggaggcaccgagttcgtgttcaaagtgaatcacatgaaggtcacccccatggatgcggccacagcctcactgctcaacgtcttcaacgggaatgagtgcggggccgagggctcctggcaggtgggcatccagcaggatgtgacccacaccaatggctgcgtggccctgggcatcaaactacctcacacggagtacgagatcttcaaaatggaacaggatgcccgggggcgctatctgctgttcaacggtcagaggcccagcgacgggtccagcccagacaggccagagaagagagccacgtcctaccagatgcccttggtccagtgtgcctcctcttcgccgagggcagaggacctcgcagaagacagtggaagcagcctgtatggccgggcccctgggaggcacacctggtccctgctgctggctgcacttgcctgccttgtccctctgctgcattggaacatccgcagatagaagttttagaaagttctatttttccaaaccaggattccttactattgacagatttgctttaccaaaagaaaagacatttattcttttgatgcacttgaatgccagagaactgtccttctttttctcctctccctccctcccagcccctgagtcatgaacagcaaggagtgtttgaagtttctgctttgaactccgtccagcctgatccctggcctgagcaacttcacaacagtaattgcactttaagacagcctagagttctggacgagcgtgtttggtagcagggatgaaagctagggcctcttatttttttctcttaattattattatatttctgagttaaacttagaagaaacaactatcaagctacaacttttcctgccattttcctgtggttgcagcctgtcttcctttgaaattgttttactctctgagttttatatgctggaatccaatgcagagttggtttgggactgtgatcaagacaccttttattaataaagaagagacacaggtgtagatatgtatatacaaaaagatgtacggtctggccaaaccaccttcccagcctttatgcaaaaaaaggggagaatcaaagctttcatttcagaaatgttgcgtggaaaagtatctgtaattaaagtttcgaagtaatttaacctaaaaaaaaaaaatt

SEQ ID NO: 91491 - DNA, 1101 bp, Homo sapiens
cgcgctggaaatatgaagagacgctgcagctgcggtggcggtggcggccactgcagctcagagcggcgcacgcggcggccggggcgggacgcggggccgggcgcggagaagtcggggcgggcggcagagaggccgggacgcggaccgggccggggcgcccacagccgcccgacggcgcccagagagcgcgcgccccgcagccccgcgcctagcccgccgggcatggggcgcgcggcagccgcctgaagccccggcctggcccggccgcacccggccggaggcggagggcagagcgcgcgcccagttgcccgggcaccaaatcggagcgcggcgtgcgggagggcccagagcaggactggaaatgtcctggccgcgccgcctcctgctcagatacctgttcccggccctcctgcttcacgggctgggagagggttctgccctccttcatccagacagcaggtctcatcctaggtccttagagaaaagtgcctggagggcttttaaggagtcacagtgccatcacatgctcaaacatctccacaatggtgcaaggatcacagtgcagatgccacctacaatcgagggccactgggtctccacaggctgtgaagtaaggtcaggcccagagttcatcacaaggtcctacagattctaccacaataacaccttcaaggcctaccaattttattatggcagcaaccggtgcacaaatcccacttatactctcatcatccggggcaagatccgcctccgccaggcctcctggatcatccgagggggcacggaagccgactaccagctgcacaacgtccaggtgatctgccacacagaggcggtggccgagaagctcggccagcaggtgaaccgcacatgcccgggcttcctcgcagacgggggtccctgggtgcaggacgtggcctatgacctctggcgagaggagaacggctgtgagtgcaccaaggccgtgaactttgccatgcatgaacttcagctgcttttcttgcctaagatttctttcctgatcactatgcattttaaagataaacaattttaaagtttttcagatgctttagagaggatttttttccatgaactgcattt

SEQ ID NO: 91492 - DNA, 243 bp, Homo sapiens
cttaattaaatggtaaaacgctacctgttttagtctcttctgtacataatttacacttttattcagaaaggcaaagcaattactgatgccatatgatcctgttcagtaaattctactctaaatgtggtaaaagacaaatgattaagtaatagcctgttgtttttccttctagtaaacatatatttattttatgcctattgtatattaaatgccacttaaaaattaaaataaactcctaaactt

SEQ ID NO: 91493 - DNA, 460 bp, Homo sapiens
ataagaccctggatccagagctaaagaccacaggagtcgttggatacacaaactgaaagagactacagtgaaatagtaaaaccttcaaagttgttatagtaaatgaagactttaaaccatctgtgatgtgaaaaataaattaatgaagtataaagagatctaacaccgtaagataaacatttgaaagaagatggtaaatgcctaatggctacatagataatacagtaagatgtactattattagtattaattatttgttaaatagaagtatcctcaacattatacagaacagtcaataacagagcacctagactaaggccactcgatctgacttggttgaaaaacaattcaaacatgaaagaagccaaagtgattatattctagacatgtgagcttcatagagttcattgcaattaagggactataagctgatgccatagtacagtgaatagaaatagag

SEQ ID NO: 91494 - DNA, 773 bp, Homo sapiens
aaaatgggtttggtgaccgtctgttccagcacagttccagtttatctctattgtcacagcatgattattaacttcatcccattgcagtctcagaatggatctatagtcctggacataagagcaacctgatatgagaggtcacaggacagacttaaggccttacgaaggaaaagacttttgaactgacccataaaaggaacaggggcagagagggaaagtcatttctctgtctgttgcccagctcttcgtgaaggggagctagaagaagctacattttcctttagttttcagcagagcagaaaaaaattccaaacaagactatattaatgttctattgccactgtaacaatttaccacaaaattactggtataaagcaatataaatttatacacttaaattctggaggtcaaaagtctaaaatgggtccatgggactgcacatcatctagaagctctaggggagaatctgtttctttgccttttcctctttctagaggctgttcacattccctggctcataagcccttccactgtcttcaaaacccaaagcctatcctcttccctccaatctctgcatctgtccttacattttctctatatgtgttctgactcctgcctctttcctataaggacccttttgattacactgagctcatctgggtaatccggaataacctctgtaatttaagaggcttaatttaatcacacgtgtaaaatccctttcaccctataaagtaacatgtccacagctttcaggaattagaacatggaca

SEQ ID NO: 91495 - DNA, 404 bp, Homo sapiens
aaccacaggggtactgcccagtgtaaatgagttccctatgagagggacccctggtaatggataggatgcttaggcattagactgtctgctgggataaagacgtatcccgtaaaagatacgctgtaaacacccatgaccacctctcctgcatccccatcaggcagagctagaatttatattcactctcttgagacagacctcaagaccatgttagaagaaagtacaacactcatcatcctagaattatgattattccaattcagttcatccaaggtccctttaaaaatgcattggttaaagagtcagttaatattcttttttttggcatggtggcatgttggatgttgattttagtactaaaaataaataaataattacctaagtgtgtaaaataaacaaaaggc

SEQ ID NO: 91496 - DNA, 492 bp, Homo sapiens
ataaggcacccttcttcactggaagctgatgccctaattttcttctgagtacctgtgatcacagcccatcctcccggcagccactgccagctgaagggcgaagtctgcggagaccttggagaggctggcggctgcgtgctcagggcgtctcgggccgactaggcaagcatggtggagtcacaccagggttttcttctcagaagtggaatctcaaagtgcatcttggccagagcatgtgtgtcgcccacagtttcaagtgtttatgactcacatggtggagaagcctgtgccgcgtgctctgcctggctacgcggtgctggctgcatggcttcgggcctgtgtgcacgcagggcggcctggccaagccctctggtgagacggggctgccggagtgggccaggaaaggagagcccggcttcttagggccctgcttctcgccagccccttcagccgctcgttcattcagctgtcgcctgctgatcgctgcccaga

SEQ ID NO: 91497 - DNA, 156 bp, Homo sapiens
agattcacaaaaccaagctgctccaaatgtagtcatacaatttctagtcagagttaagtatcagtcttaaaattaattaaaattaaataaaaattccaattagtgacactagccacatttcaagtgttcagtagttacctggagctagcagttatt

SEQ ID NO: 91498 - DNA, 601 bp, Homo sapiens
ctttttttaaaaaaataactttttatttctagcctcaaccatttacactttgcttgagaaagaataataaagtggaattgttattccagtgatgttgtgcaaatgtgagaaatagtacttcccccaaaaaaacaaacctcgaaaccccacaaactcaagtgtacttaagtacttaacgttcaagtactttttaactataaccaacttttccaccacactgttgtgaatatttgttgctagctgttatgggtataagtgatcaagggaagaactgatgcattacctaatgcttgactaaatatagccagcccttaagtaggtagagtatttggttgtgggttttgttgtttaagtctgtggagtccctctttggtttctttaacttttgcagtcattagggcagagtatatttatttacatttctccaagcaaagtcttgctctgttgcccaggctggagtacggtggcgcgatctcggctcactacaacctctgcctcccaggctgaggcaggagaatcgcttgaacccaggaggcagagtttgccatgagcctctcaccgttgcactccagcctgggtgacagagtaagactctgtctca

SEQ ID NO: 91499 - DNA, 283 bp, Homo sapiens
taatgaaaagcatattgccgtatgtaacataatggaatatttatcatcaatgtgtttttgtggctcttcagagccatttaatattaaccatataccattttggtaaatagttcaattctcaaagttcatatcactataccaaaagtggtattttaaaggaatcaaaatgtataaatctaaagtgtgagaccacattatggctcagtctagacaggcacgccaaatattactgtttatttgtgctaatgtgtttgtcatgctgatttcctcacttcttttttat

SEQ ID NO: 91500 - DNA, 649 bp, Homo sapiens
cttctcaagatcctcaaagttgctgacgaggtgccgagacctcggctaatgctgccaagaaacactccacatgcctttgactgtgcttgttggcagatagaacaggagcgactgaaatacggctatctgagaaaggttaagattgactgaacctccatcacattgagaacactagttgcaagagaatcttgaagatgtagattgtagctttccatattctgcaattcttcaaggaccattaaaaggagattggtatggtgttgagcaccaagccactatactcaccaaataacacagaaacgttggttagttatgaaactctcttagttacctgatgcagcctcgactttaggaattcttactattcattaccacatacaagctattagcctttctctttcctgaaaacatacagttttgaggctgctactctcaggtgacactgcctgctacctttccttgtaataatttacaaatgccccagattggcctgtcgtggggtggggggagggataccattaggagatacacctaatgtaaatgatgagttaatgggtgcagcacaccaacatggcacatgtatacatatgcaacaaacttgcacgttgtgcacatgtaccctagaacttaaagtataataaaacaaaca

SEQ ID NO: 91501 - DNA, 879 bp, Homo sapiens
taagtaacttttttctccatgctaaactttccacgtcttctatctaaaaggtccccaaaggcaccactatttggtgtgaagattttgagcagcacttagattgctgattttctgggaggttgcatgcctgtaagttgctgctgactctccttttaacccactgaactcccccaagagcctccacgccaaagtttcaccgttttctaaaaacatcttaagtccctgtagaattacgggtgtggaactggtgggttgcaaattcctataagtactggaggtttgaataagttgctaagaaacaagacaacaaggagaaagaaaacacagaaggttacacctgcaagagaaaaaaaaaatattagaaaccaagtacctggaataaagattccatttttggagcagctattctgcagatacttagcacagctctttcaaagcaagcacagcttcactttcccccaagcccagtgttgcaacacagatacatcacttcatccctttggtttgaggtagacttcttagggcaaaaggcgttttctccacatgcagaaagtcccttgctctgagcacatacgtacacacatgctctttctttgtatacatgctgactacacgggcaggatgcaaatcctggctgcagaaaggaggcaggtcaaatcagaaccccatccttaagccctccatgtgcccacaccatatctacagaagctcagggactggaaaagacagcaaaaggcataaaagtaagggcctgtcaattacattctgtgattagcatcgtggcaattggtcattcaggcctgaagcatgaagggggccaaagctggcatccctcacacagaagaatcacgtttcattggattttccaaaaaaaaaaaa

SEQ ID NO: 91502 - DNA, 451 bp, Homo sapiens
ctcagcctcctgagtagctgggattacaggcgtgcaccaccacgcccggctaatttctgtgtttttagtagatatgggatttcaccatattggccaggctggtctcgaactcctgaccttaggtgatccacccacctcggtcttccaaagtactgggattacaggcatgagccaccgcgcccagccctatagttattatttctattgcttttaccttgtgaagactaaatatttagcttctaatatacatgtcctagaaaacactatgcattttggttaaattccttgttactgtatgttataaaatagacagggaattgggtgaaatagattaaaatcacacaaacctggggagtcaagtttctcttgggcaggcttagaaaacacagaattggaaataccccagtgacatggagatcagaattctacctagggccctctccctgtccca

SEQ ID NO: 91503 - DNA, 593 bp, Homo sapiens
gataccaacttttcagagtgctgagaggatttgatggcataatttgtgtaagatgcctagccccgtgcctgcatgatctatactttggctgacagtccgtgccttcaggcagcctcacaagaatatctgagaacagacagtattgcgttgcatccaggatttggtatggacaacttatcctgctccctggtgccaacacaatatttcacaacagacaataaaactaaaggacacagcaggccaggaaagatacaggactatcaccacagcctattatcgtggagccatgggctttattttaatgtatgacattacaaatgaagaatccttcaatgcagtacaagattgacagaatttacaatttaaaagaaaacagaggaagaaaagtagaaaaaaagctggcatgacacaaaacaaaacacagaagcttgtgggaaccatgataacttactgatttttctggctgcaagattgtatgaaacaaaaaatagcaatatataacacttccagtttccccccgaagcaggcatgaccaagctcgttgtggtccagattgtctaaccagttatgctttaaaaaaaaaaaacattctt

SEQ ID NO: 91504 - DNA, 1066 bp, Homo sapiens
gcggccgctccaacatgttaccattctgatgttggagccggttagcgaaccccaagagtgcagagtgtggagcgtggagcgccgggactgtgcacgcttgaccggaagcccagaccagtgcggtcctagccagagagaaaggacatttgccaacaatgagacacgaagcgcccatgcagatggcctctgcccaagatgccaggtacggccagaaagactcctctgatcagaactttgactacatgttcaaattactcatcatcggcaatagcagtgtggggaaaacatcttttctattccgttatgcagatgactcctttacatctgcattcgtcagcacagttgggatcgatttcaaagtaaaaactgtattcaaaaatgaaaagagaatcaagcttcagatttgggacacagcaggccaggaaagatacaggactatcaccacagcctattatcgtggagccatgggctttattttaatgtatgacattacaaatgaagaatccttcaatgcagtacaagattggtcaactcaaatcaaaacatactcttgggacaatgcccaagttattctggttgggaacaagtgtgacatggaagacgagcgggtcatctcaactgagcgaggtcaacatttaggagaacagcttgggtttgagttttttgaaacaagtgccaaggacaacattaatgtcaagcagacatttgagcgccttgtggatatcatctgcgacaaaatgtcagagagtttggagactgatcctgccatcactgctgcaaagcagaacacgagactcaaggaaactcctcctccaccgcagcccaactgtgcctgctagtgtccccgtgcacacaggcagctccagggggctctggttgccaacaaacagcatttgtaaatggtctattagccttcatttatactgcctaacaattatttgaaggaataaattgatgtcaatggctcgtacgcattcaattcttgggagctttcctgtttaatatgtggcaaatatgtgatcttaaatttataaggactatccatctataaacatctggtacctgc

SEQ ID NO: 91505 - DNA, 1432 bp, Homo sapiens
gcggccgctccaacatgttaccattctgatgttggagccggttagcgaaccccaagagtgcagagtgtggagcgtggagcgccgggactgtgcacgcttgaccggaagcccagaccagtgcggtcctagccagagagaaaggacatttgccaacaatgagacacgaagcgcccatgcagatggcctctgcccaagatgccaggtacggccagaaagactcctctgatcagaactttgactacatgttcaaattactcatcatcggcaatagcagtgtggggaaaacatcttttctattccgttatgcagatgactcctttacatctgcattcgtcagcacagttgggatcgatttcaaagtaaaaactgtattcaaaaatgaaaagagaatcaagcttcagatttgggacacagcaggccaggaaagatacaggactatcaccacagcctattatcgtggagccatgggctttattttaatgtatgacattacaaatgaagaatccttcaatgcagtacaagattggtcaactcaaatcaaaacatactcttgggacaatgcccaagttattctggttgggaacaagtgtgacatggaagacgagcgggtcatctcaactgagcgaggtcaacatttaggagaacagcttgggtttgagttttttgaaacaagtgccaaggacaacattaatgtcaagcagacatttgagcgccttgtggatatcatctgcgacaaaatgtcagagagtttggagactgatcctgccatcactgctgcaaagcagaacacgagactcaaggaaactcctcctccaccgcagcccaactgtgcctgctagtgtccccgtgcacacaggcagctccagggggctctggttgccaacaaacagcatttgtaaatggtctattagccttcatttatactgcctaacaattatttgaaggaataaattgatgtcaatggctcgtacgcattcaattcttgggagctttcctgtttaatatgtggcaaatatgtgatcttaaatttataaggactatccatctataaacatctggtacctgcatgtgacttgttatttatttgtctgctaggctctttttgtttcaaatttgttctcagactacttctgggacatcagactataatctcactacaactggcttttgtcccattgattcaaattatgctattcacttgtaggaatgatgaccaaggaattgcttgtgtgtgtgtgtgtgtgtgtgtgcacgcatgcccgcatgcgtgcagaggaagaagtcacaagacttcatttgctttactcttagttgaaaatcaaatggaagtttttctcatgattagggacgctgtcacgagtctggtcagtttactgttgggaactgtgtctttatttcactgttattaataaactgagatcattggcctata

SEQ ID NO: 91506 - DNA, 3920 bp, Homo sapiens
ctggaagcctcggagtgtcctcctgtcatcttgggtggtgcaggggcgcagatggccctgcagcagggtgctggcagggtggggtcataggagccatccttcagctttgcctggggtctctggtggagggcagttccgtcaacaaaagccagggtgggatcaggccaacttggtgtgggttggaggactcaggccttggcgatggcctccgtctccctgctccctcccctgggtctcagcccttccttctctgggtcatcctcccttgcctttgctctcccagagaactcccatccctgactcctccgagttctggaaatgcttcttgagactgatttatggctcagatagatggtggcgtggagcggggggagggagagatgggaggtgcggggaagggaggtggaagctcctgtgtcacctgggctggggcctcccgcccagtcctcgcaggccaaagggtgacccatttcttttttccagtcaccaggagctcggatggtcactctgaggtgtgaatagatatgtttttccttcagtccacactgaattcaactcaaaccagcaaaggcctttgggctggggattctgtggttgcagaggtctagagggggtggacttttgcagccagtgcctccgcctcaccgtcttggtgaagaaatcagcgagtttgttcacagccgttggtgtcttcccagcccctggggacagaggacagcagggggatggagctgacaccctggagtatttggacccaggccagcacaaacacacccccctgtcccccactctaaagggagagtcctaggactccttagaggaggcttcactgcggagatccctgagcagaagggggcggggtagcttctcccggtgacggtgacgcaggtctggctggccttgggcaaccaacacacctctcccactccaagatgcctccaggtggctgaggccaacgcccacacccaggccagtcgtgtgcttgtacagcaggctgtgcctggggacctagatgtgccatgggagggaggagggtacccactgacaggcctctgcctccctcctcaagccctctgttctccctgcccccactctggacactgcttagtccccagccaggcagggcccctgggtttccacttgcagcccccggactgccccagagccgggaagcaccagtgccaacagctctggacttgttggacccacaggcacagagctctgagtggtgcccaggagacccaggaaccttccctagtgccaaatgcctgcagggaccggtgcctggggagcctctggcagccggactgcaggagccaccccatcagcccaagtccacctctgttttgttcacctcggtcatgttttggaccttgcaccaggtgctgggacgtggcagaggacaggccctgggaaccaacagtgtcctaccatggacagccagggccagctaagctaagccatcccgcccaacacagaagacatggcagttatttctcagcagcaccacgctgggtgaggccagttgttccgcttactctgctccgaactgtaaccccaggctcagaagcagccggcaaaagggggatgctggccacgccccacctctaaggccatcaccctggaggtggaagtcactgggctggagggctctccatgtcccccagcagccgccctcagaacacagtggccagagcaccaggctgggtccaggcctccaatccaggccttccctgtccctagaactggggctggaggagtgggtgctcagcccttcctgccctccatccccagcctgcctttctcttcctttggatgctccatcctccttggtttcttgcactgctctcaatcctcccaccctagcctgggggtggtccttggtcctcaggggtatccggggagaaattctctccctgtgcatgacacctgtcatccatgtcgtaaccagcggctccatcttgtggggtggtgactgagggtgacaaatgagatttggctccgtcgtggatgtggatgtgggaggaatgttgcgagtgacacgtgtgggtttctaatccacagtggtcctgcgtgtgccctgaggggccatggtaacctctccgatggctcggatttagcaggccaagcagaaactgatttctacgaagagcgtctttgccaaactcatgaaaattgtgcctgccactttcatgcctatgggccagttttgtgacctgcgccgctgaccatcctaagaaccaggtcttggccttccctctgagcactgatagaggtccccaaggctctctggcctgaggagggtgtggggtctgcccagccccaagcagagagcacagtctgggcccctgaccaacagctttggcattctgggttccatggggaccctagagctcaggcacaagaacaacaccatacctgctgccaggacgcagctgtctcccaggccctccccacagcccagctcccactggcaggaactggacacatccctgccctccatggtctgcactggtcttctctgagtattcttaggagcagaggcagccccaagttccaacttgcaagccctgtaactaagctgtctataaaccccagcagggaaggccaagggatggtctcacccatgcccttccctttggccaacatgagtcctgcagtggggagcttagcccctgctcccacctaacactctacagttagcacccaggggttgattcaggaagttcttcctttttctagcctgcatccttcctggccaccccctttatttctcagtctgacctggtgcactcttggcaagtgagtccattgcagtcccaggtggatatttaatgagcactcggactgtttcctccaagtcagctagtggcctgccctcctccttttcaagaagtctggggcacagagcctcctctggctgcctcttctcttctctgagcctctgggagccttcaggcaaaacctggcagttctcaggaacccagacctgaggctccagctccgcggccaccagagattcagtgtgcagtgccgaaggcagtcacccccaggcagttcctgctgtcaggccgcaagcctagagcgcaggatcccagcagcccagggaacagggccggcgtgtgagctgctgccgtggggtctgtggtagggctccccatctcccacccctcagcaagaagagtcctgacccctgaccccaccctgcccagagaggagctggggcctccagacagaccccactgcagccagatgaaggcccctgtcaaagaaggggcaggctgggggaaaagcagaaagaatggcccccagtccaaactcctggatcccctccatgagagaggggctccccctggaacagaagctctcatccccaggcccagtgcacaagaccaccagcagagacccaccgcccttcctggcagagcaccacttcctggcagtgcagctccgaggcaccactactgtcctccccttccctccccacccctcccctccctttccctcctctcccctcccctccacacctgccctgttactcccacagctctgggcagccaggccctcccctcctgcctcctggtcttctctactccgctggttctgacccatcccctggctctgcccgccgtcccccaccctgcccctgctgagtatcttcttcctccccacgcacccccctcccccatctaggcgaggtgggctcgggcgtcccaggccctccttagaaaagccgtctctctcgagtgcagtggtcccacctcccaaccccatcactgctgcccacccccatattaactgtaattttgtaagaagagtgacttgttggtttaataaatctctagttattgtaataatttattggctgccataatgtatttattagtcgcctaccgttaataaaaagtgcccgctttcct

SEQ ID NO: 91507 - DNA, 1058 bp, Homo sapiens
ctggaagcctcggagtgtcctcctgtcatcttgggtggtgcaggggcgcagatggccctgcagcagggtgctggcagggtggggtcataggagccatccttcagctttgcctggggtctctggtggagggcagttccgtcaacaaaagccagggtgggatcaggccaacttggtgtgggttggaggactcaggccttggcgatggcctccgtctccctgctccctcccctgggtctcagcccttccttctctgggtcatcctcccttgcctttgctctcccagagaactcccatccctgactcctccgagttctggaaatgcttcttgagactgatttatggctcagatagatggtggcgtggagcggggggagggagagatgggaggtgcggggaagggaggtggaagctcctgtgtcacctgggctggggcctcccgcccagtcctcgcaggccaaagggtgacccatttcttttttccagtcaccaggagctcggatggtcactctgaggtgtgaatagatatgtttttccttcagtccacactgaattcaactcaaaccagcaaaggcctttgggctggggattctgtggttgcagaggtctagagggggtggacttttgcagccagtgcctccgcctcaccgtcttggtgaagaaatcagcgagtttgttcacagccgttggtgtcttcccagcccctggggacagaggacagcagggggatggagctgacaccctggagtatttggacccaggccagcacaaacacacccccctgtcccccactctaaagggagagtcctaggactccttagaggaggcttcactgcggagatccctgagcagaagggggcggggtagcttctcccggtgacggtgacgcaggtctggctggccttgggcaaccaacacacctctcccaccccatattaactgtaattttgtaagaagagtgacttgttggtttaataaatctctagttattgtaataatttattggctgccataatgtatttattagtcgcctaccgttaataaaaagtgcccgctttcct

SEQ ID NO: 91508 - DNA, 249 bp, Homo sapiens
ctcagttgaaccagcaagaggctgagcctaactctccctttcgaatgggcaggagttcatgatatttaataaacagaggccttgctctgtaagagacagggtaccaggcagagagcaagtcagcatcgcaggagtcaaacgaggcagacagcgggggcagggagcttgcctctgaaggagacccaggctgccagagtagcagggagtctgggccagtcctcttttgggaagcgcttcctcggcttctgc

SEQ ID NO: 91509 - DNA, 510 bp, Homo sapiens
aagccaattgctttatctgttttgcttatcagagtcatattgaattctctaggcatcagcatgcaataaacttgttttcaaaggcactctgttaggtggcatacagccctgattaaaaacagcactgaacttagacatgtttcatttttttctctaacctagtaccttttttacagattgcatattaacagcttatttttgcatttacctctgtaaaccctcaatcaaaatttatttaaaatattgggagcttttagtttaaagtgatacctactggcccctcaaaacatccagcattaaaaaactaagactggcagtgaaataattatcaaaattataggaagaattttcatttagccagaactgaattgaaaaatccatttggtggccaggtgcaatggctcacacctataatcccagcactttgagagaccaaggtggacagatcacttgagtccaggagtttgagacaagcctaggcaacatagggagactctgtctctacaaaaa

SEQ ID NO: 91510 - DNA, 407 bp, Homo sapiens
atgagcttcttatatatgatctttatatggctttgtattgtttttgagcaagaaatttaaaaggcaatgctattattattattgaaataaaaaacaaactaaaggtaaaaagccacaggaaaagtaatggaagcagttcttcaattttcttgggaatgtaagaataaaatttcattttagatttcctttttgtgagtaataacctaatttttggtttttagattctgtagagaatacttctgtttgaaaaatatttattcagaaaaaaacttctgttggcttctttctttgttaacagtaccgtgttaattaataggtcttcaaagttatacaaccaatgcctcacacttaagctcctagaagtcactagggaccagacctataaacagaataaatgcaaagtgaaa

SEQ ID NO: 91511 - DNA, 724 bp, Homo sapiens
gctgccttcccgcctcgctgcctacccggccccaggtggcctgcctgtcccctctcccccagcagcctgccactgagcaggagattctcctcttgtctgctggggaagggtcttggtaggaagttcaggcctccccagtctgcccactctgccatgccagggtcatagacctcacagcccctccctggccggacagggaaccaagctcagctcagagctgggatgtccactgcttccacagacaactcccagggccctcggtctggcttttacaacaatcacatcgtctagatttgccaatactcacttcatcttgcagatggagggtggcactgagcgcctgcattgggctttgtccactcactgtcatctgccttccagggagccctacccggtgggcatctgtatgcccatttcacaggacagagtcgtccaatccctcccagaacaggggcccggaacaacagcccccatctaacttatcccagcaagcatttatcatcacctctgtgtgctgggacttgggaaggtgccaggagacagcagagaaggaggcgagacgtctggactctgctctgccagccaccactgctcagaacccttcaccaggctcgggctggcatgcctcagccctgcccttctacctttgcagatgctgtttctccccggagcgactccctgccacctgcaccaaccccactgccaccctgcctatgccacccca

SEQ ID NO: 91512 - DNA, 659 bp, Homo sapiens
aagaatggacagccatatggtttggatctgtgtccccacccaaatctcattatcagtcttaacccccaatgttggaggtggggcctggtgcccaggcgattggatcacaggggcagttttctcatgaataggtatcaccgtccctcttggcactgtcctcaggatagtgagtgattctcgcgagatctggtggttgaaaaccacgtagcacctccccactcactcttgctcctgctctcccttttcctttcaccatgattgtaagtttcctgaggcctccccagaagctgagcagatgccagcactatgcttcctgtacagccagccaaaatgtgagccaattaaaccacttttctttataaattacccagtctcaggtatttctttatagcaatgcaagaacagcctaatacagacagatacccttttaatcagtccatctacctaagtgcacatcagtagcagaatagctttgtggatacacagtactgataagtgaaatggtatgcagcagttggacaggaataagtagcactaaatgcgtagtcgtggacagatctccaggacactaggtgacaaagcaagttgctggataatacatgcactatgatcctatttctgtaaaaactaaataaaactttggtcagttaaaaaaaaaa

SEQ ID NO: 91513 - DNA, 373 bp, Homo sapiens
gcaacctccgcctcccaagttcaagcagttcttgtccctcagcctcccaagtagctgcgattacaggtgtgtgccatcacacccagcaaattttttttgtacttttagtagagatgggggttttgccatgttggccaggctgttctcaaactcctggcctcaagtgatcttcccgcctcggcctcccaaagtgctgggattacagacatgagccaccatgcctggcctctgaaggtcatactcttaaaagcttagacgaagagtcttagaacatctacggtaataataagaataaccattaatgtttattatgccccgcactgttctgtgtgtatttcatatgtaatctaatttaatctttaccactactttt

SEQ ID NO: 91514 - DNA, 448 bp, Homo sapiens
gaactatctgtggggaaagaagcccagagcggagagcctgacaacttggggcactttgactctgcagtactttgctaatgaggctgaggtactaagctgtgctagagctagcaagatgggctccccaacctggcaagagtggggaccctaaaataactcctgctatttgcaaagacaccaaagggctataatttaagagtaagggtgaactgggaataaactacccacctccccccaccacacacactcacaactttcagctcagcttcaaatatctgggtggcctgtaaaatcttcagtgctaattgttaattaagatttttccagactgctagagtccctagctcctggcagaagcaaatgaaaaaatgatctctttgctaccgctttctaggaattgcaatggggaatactttttggatgcccctgagtgagctttgaatggctt

SEQ ID NO: 91515 - DNA, 139 bp, Homo sapiens
gtgacctgttttaccactttctcagtcgccaggtccttagcaccccaaaattgttatttcccagtggaaagtttgtcttgtacaatgcttgctatatggttggaactaagtaaatgctttttgaatcatgaactaactc

SEQ ID NO: 91516 - DNA, 406 bp, Homo sapiens
ctgagatgcctcagagcaggagtgagtagcttaggctgtgttcatcctggctctggaggacagggaaggggatgctatccagtcataaagtgcccaataaacacaagtactcatctgggggcatatgaggaaatgccacaaagggataactaatcccaagcactggaaggactggcagtgcctacctaaatgattcactgagggaaagtatgttgtgtgtggagaataaggttgtcaggttttatttcatcattggcgaaattggagagaaatatctcctcatataagagagcattttggctgactgactgctaatggggtgactgacacattcaccccattcctcactgtggttccaatcaccctcacactaaacccatattgtaacctttgatgtacttggggt

SEQ ID NO: 91517 - DNA, 320 bp, Homo sapiens
ggatcccctgatattctttatagctggattgttcaaaccagaatcttactcaatactgctcattaaatctggttgttacgcctttttaaatctagaaccatctctttttttttttttttcaaatgacattgatttaacttgttcagggcttgttcctttatgccctgtgtatctattaacattggaagctagttctaaagtaggttcaagaatagcatcttccactggagtacttcataggtgctgctgtgtactttgttatcttacatcaggaggcacagtaactggctctgccatcagataaggaaagattgatacct

SEQ ID NO: 91518 - DNA, 424 bp, Homo sapiens
gaacatgctcataccttgtacagtaaagggaagcctcctccccatgtgaaaccctggcttggaatgaaggcacagcgtggggtaccgaccaaggctgggggagggcaccaagatagttcagcatctcagcaaacaaaatttgttttgtgtcaagctgcaagaatttgaaaatcaaccaagcacattttaaaaacctgttgttttctggatgttggggtttgggagagctgctcttcaataggtaaaaagcagttgttattactgaaagccacatatttgcataacaaccaaagtgtttgagagcacctgagaaaacctccccagggtccttgaaacacttcctctgctggcaccacaggtttcacccagcagaccttttcttcccaaatagtgcaaagccagatttcagctctcttctcattct

SEQ ID NO: 91519 - DNA, 212 bp, Homo sapiens
cattaagaatagtgttgaaaacatcaatttaagacacaagctaattatgtgtccctgatttctagaagagacatcccgaaccacatgttgatagttaataaagacgtgtaaactttttccctaagagattattggtaaattaatataaatttaagacacaggatagagtctggagatgacagagtatgcaaggaagttacataaacacaaag

SEQ ID NO: 91520 - DNA, 462 bp, Homo sapiens
taactgctattctgacatctaacaccaaagattagtttttacctgtttttgaatttcatataaatataatcttccagtatgtactctttttttcgtttcatacaatatttactcttgtaagcaaatcaaagtgacttttttttttttaacgaaagaaggttaggttactggattttcaattaaatcaaatctttagatttgtatattagtgaaataattcagtaaaataatcatatccatagctatccaaatctttctggataatccattctgttttctagatattagcacaatcttaggctcataaacagagctccacatcatttcattcctttttgtcatgtgatttaggttttattttattcgtatttaacctttaagttcaggagtatgtgtgcaggttggttatataggtaaacttatgtaatgggagtttgttgtacagattatttcatcacccag

SEQ ID NO: 91521 - DNA, 437 bp, Homo sapiens
ccggaagatggacctcttgagaactaacctccttattcaaaaggagaatagaatggtatcaaaacttcagccctaggacttaggaaaagtggtttcacatagagtaacaggttttcaataaacagctgttaaatcattatggattgtaagagttcagacctctcataagaaaattaagaaatttaactgcaacaataactctgtatgcagtagatgggccttgcaaaagtattaacacaaaacaagcattctaatagttgttaactgaacaaagagagaagcaaatgaaagatacataaagataatctagggaaccacgacagacatgtcttggggaaaatttggatgacacaaggaagactgcatgaaacatacagaaacactaaaaataatgttaggcagtcaaggacaggaaacatcaagcctcataccactaa

SEQ ID NO: 91522 - DNA, 364 bp, Homo sapiens
cttggcttcttaataaagaaaagacaactgatttgcctttaaatgaatgctttgtcctagccacactgggcaataattcagatcttatctaacagaatctgtcaatggtctgttttcagacttgcacaggtatttctcatttccgacaaagtagaactgatacctgtaatatttttcaagttatagttgtttaagtgtaaaaccataaagcaaaatgcatttggcaacaaaatgataccctgtacattcatgtataagagccaataatgttatgattacttgttatctactttatagttttattagcaaataaatattgggtcttttacttcagctacaaatttattatagaattatcatggat

SEQ ID NO: 91523 - DNA, 382 bp, Homo sapiens
gaaatttggtacagaaaattacagatagtacagattgagttcctagttgattataagtgaagctgtgatgtctaagaaaaatcaagaataattgtgattattaatatttcttgagcacttactatgccatgttactaaactaagactattttttgaatgatctatttaaatccatattgcagaaagcctaaaaggaagagatttaagtaatttgctcaaagttacttagcttttaagtggtagaaatggcatttgaattattgatccagagcctgagtgcctaactcaactacatgggtttcctagtggccagtattttccaaacttaaatcattcacaatttctgcttcgtcccaaaccatctgcctgttacttaatattt

SEQ ID NO: 91524 - DNA, 1174 bp, Homo sapiens
ccgttggacaaggacaataaataaaaaggcatgtagattgcaaaggaagaaataaaataacaccattcacatatgacgtaatcttttatatagaacattctaaggaatccactgaaaaactatttgagaactaataaatgagttcagtgaggttgcaggatacaagattaatataaaaaacaattgtattctatacactaacaatgaacaatctgaaaatgaaattaagaaaaccctatatactgaaaactttaaaacataattgaaagaaacaacacctacattaatgacaaatagtctcatgttcatggattgaaagacagtattatttacatggttgtacttcccaaattaatagagagattcagcacattctttataaaaatcccggctttttttgtagaaattgacaaggtgatcctaaaattcatatggaaatgcaagggatggagcatagccaaaataatcttggaaaatcttggaaaagtacaaagttggaggactcacacttccaaacttattaccaacctacaattatcatgactgtgtggttctagtttaaggatagacacatagatcaatggagtagaattgagagtacagaagtaaactcactatggttaactaattttcaacagtgatgccaagacaatggtgaaagaatagtctttttgacaaatggtgctaggacaactagataccacatgcaaaagaatgaagttggacccctacctcaaaaaaaatatataaattaattaaaatgtatcaaaaacttaacaacaaaactataaaacttttaggagaaaacatacatataaatctttgtataatcttatattaggtttttaagacttaacaccaaaatcacaatgaaaaaagaaaaaataggctgggctcagtggctcacgcctgtaatcccagcactttgggaggccaagacaggcagatcgcttggtcccatgagttcgagaccagcctgggcaacatggcgaaacctcatctctacaaaaaatacaaaaattatccaggcgtggtggcgcacgcctgtagtcccagctactcgggaggctgaggtgggaggacggcttgagcctaggaggcggaggttacagtgagctgagatcgtgccactgcactccagcctgggcaacagccagaccttgtctcaaaaaaa

SEQ ID NO: 91525 - DNA, 491 bp, Homo sapiens
caggtccagacagccaaggatttgtcatacccaggggcaggaaagctgtgactgggatacaacaggccaggcatggtggctcacgcctataatcctagtattttgggaggccaagtcaggcggatcacttgaggccaggggttcgagaccagctggccaacatggtgaaaccctgtctctactaaaaatacaaaaattaggctgggcacagtggcttaggcctgtaatcccagcactttgggaggctgaggcgggtggatcacctgaggtcaggagttcaagaccagcctggccaacatggtgaaaccccatctctactaaaaaaaaaatacaaaaattagctgggcatggtggtgtgtgcctgtagtctcagctactcgggaggctgagacaggagaatttgcttgaacccaggaggtggaagttgcagtgagccaagattgcaccactgcactccagcctgggtgacagagtgagactctgtcaaaaaa

SEQ ID NO: 91526 - DNA, 417 bp, Homo sapiens
ctaatgagtactaggcttaatacctgagtgacaaaataatctgtacggcaaacctctatgacacaagtttagctatataacaaacctacacatgtacccctgaacttaaaaatacaaaaattaggctgggcacagtggcttaggcctgtaatcccagcactttgggaggctgaggcgggtggatctcctgacctcaaatgatctacctgcttcagcctcccaatgtgctgggattacaggcatcaggcaccgtgcccagtcattagagcacatcttaattcagactgcctgcctatcaatgactcaaaagcagatgtaggtaatggctacattaccaaattggacagtgtggttctagatagtaacaacaaatagattgtatgcacgggggagttttgttaagtgggaaggtataat

SEQ ID NO: 91527 - DNA, 394 bp, Homo sapiens
tatatatttcctacccacgtcctggtagggcctgcagatgacactccagtagcaataagcacatgtagcacccagatgtggtttctaaatagcaacaaccactaaaggaactagtctcctcaggagacaagttgactccagaatggggatgatgttcatcaaagccttacaaagaactggcattattcccagacatcccattactgggtatatgcccgaaggattataaatcatgctgctataaagacacacacacacgtatgtttactgaggcactattcacaatagcaaagacttggaaccaacccaaatgcccaacaatgatagactggattaagaaaatgtggcacatatacaccatggaatactatgcagccataaaaaaggatgagtt

SEQ ID NO: 91528 - DNA, 233 bp, Homo sapiens
aaccattggaataatttctctgaaatatacatagaaggtagataattttataatctgttcacatgtattttctccaagaaccacatttccctcagccaaactcaaagccaattagagtaagggaaatgaaactttatgaggactaatttgatatttaatcatctaaatgccttctcttctgtttctcctgcctttattcctttatcccacccagacttaaggagcatgaggta

SEQ ID NO: 91529 - DNA, 326 bp, Homo sapiens
ggaatttgaggctgcaatgagctatgattgtgccattgcactgtagcctatgtgacagagtaagaccctgtctcagaaaaaaataaaatcctatttctggcagcatttctttgtttttaacttcttagccaatctataaaatactctgtacactgtaaagcacaaaaaacatgttatgaaaaggtcgctcctgacacttgaagccctagaagaagattagggtaataagcaattggtgaaccctgcagcgtttcaccctcttgggctacttaaatgacaagctccttgtcctataatcatagtgtgatcgtccttgcctagtataa

SEQ ID NO: 91530 - DNA, 461 bp, Homo sapiens
attgctcattcattcattcaacaagtgttctctgaatacctactctatactaaccaggatgtacaaaaggaaaaccaaaagcgcaaaaatcctcgatctcgtggaatttacattctaggaatctacagacaaataaataaaaaagtcctgttagatgacaatacatgttattaaaaaaaagacaagaagtgtgtgtgtgtgtgtgtgtgtgtgtgtgtgtgtgtgtgtgtgtgtgtgtgtgtgttggacagggcatcattctagacttttcttcctcctcccttccctttgatctgattagcaattgctttaccacctacctccttagtatttcaccttttcttactcatattcttcaaactcatggtgctactttaatttacacagacacaagaggtttctttctctacccctactaccccaattcattcgcctcactttggccagagaaacctattgaa

SEQ ID NO: 91531 - DNA, 460 bp, Homo sapiens
tcttccacagcgcttattataatccaacacaatgtatagtgcattcatcccacttattgtcctagaatgttagttccaggaggacagacaattttgtattttaacaacttcttatccacagtgccaagagatgtgcccagcacatatttggtactcagtaaatatttattggataaacaaatgaatttatcaagctacataatagcagaaagaacatccataaactggcaagctggcttgcaaaaagtctttcaaaccaattactaaataattaaaatttagggcaaaaactaacactaaaataacaggattggaaaaattaagccataatttcttgctcttatcacggcaggaagaagtgggggaagcactaatgctggatcagagaagccagaggttatagatggcagttacattaacaatgcccagtaatctagcctgttttgattgtttttgtaat

SEQ ID NO: 91532 - DNA, 536 bp, Homo sapiens
aaagcaaatatgcttaaatggcaccaaagtcagctcttagggtcaccaccagtatgttcagaactctctcccttgtcccccatcactctccccaccccttctgctaaatcagatgttaacatcctcatctgcaggccccagggacagacactcaagtggttattgctaaggatgtggcacaccaagctcaatgctattaggacatagtttcagctatttggggtttacacagcattctttgccaacttcattgaaaacatgttttcatgagaattcatctcattctacctactgctggctaaatttatctccacagagtttaacaacatggaatgattaattagggaccaagctatttcctgagtgctttgcacataactgtgattctgtgactctgtgattcactctcgttgcttcagccatctgtccctgaacaaaatgcatttatttatgttttctgtgatttgttgttctcctctttcaaagacataaacatgattgatttggaaaagcaaaattgttttttcctctcttta

SEQ ID NO: 91533 - DNA, 229 bp, Homo sapiens
aattagcataaacatacttaaaaggcaagtgatagagctaaaatatttgaaacataccaggttctatgaagatctttagcaaatggtaagaaaggcaaacaatctaatgcaaaaatgagacacacaagaaaagtacaagttgttaaaaaaccattggaaatattatttagtttttaaaaaatagtatatacaggtttatttgatttttctttcatcactgtaaactagg

SEQ ID NO: 91534 - DNA, 175 bp, Homo sapiens
aattcaaatttgtgacatcacatcccacgttaaagtcttcactgactttaaggtgaaatctgtactccttaaacaaggtccttagcagtctgcccttgtctctttctcttgtctcatctctaatacttaaacccctggcattttttcagtgttgtttttcttctgtgtatgttat

SEQ ID NO: 91535 - DNA, 195 bp, Homo sapiens
tgtcaaacagttatgatccttcatatgagaacttgtctatttaaaggttgttactaaattatccccaagagttaccttctgtaaactgtcattgcaaagcctttttcccttggtcctcttggatggtttctgttttccatgggccttctccagagttatcagaagttgtcattctcaggtagacatatacactat

SEQ ID NO: 91536 - DNA, 309 bp, Homo sapiens
ctttggaaggaaatcactatgcacagcccacactaaaggaatggggagttgtagtgtactttcttgggagtggtctacatgattaattgaaattcttctgcaaaggacagttgtccctttcgctttattagttcgatcatttatgtttatcagtgtggacacatgaatattttatactttgggttacaatttaatactgctttattttgttgctcaaattatcccagctttgaccattgggaactctttccgttatctcctgttcccgcctttgacatacccccatcaatgtgggttttgtgttttgtt

SEQ ID NO: 91537 - DNA, 264 bp, Homo sapiens
ggtgtgacggctcaggactgcatttcccagaggctgcagctatccggccaatgtagcctgaaactacatttctcagcggccactggaacgacctcaatctctgcctcctcgccagttcattgtggtcgttgacccggcagcgagctttggagttcatcgagggagaagtcagcgcccagctccgaggttggagcagccccgccgggcaacttgaatttctgcaaacgaacacagcaccgggagctctgcagacctgtgtcggcg

SEQ ID NO: 91538 - DNA, 212 bp, Homo sapiens
atagaattcaattttaaaacgatctccccactcctcagaaaagaaagaaaaacatcaataatgcaaaaaggtatcatctaagaactaagttcttagaaaagaacctactagtaatataaaaataacttctctcacgtggcacatgtgcttttacatgacctcacctatttatttatgtgatgcaatgaagttctgagacatgggtgtaggtc

SEQ ID NO: 91539 - DNA, 1656 bp, Homo sapiens
gcggccgcccgccgccgcgctcctcctcctcctcctccagcgcccggcggcccgctgcctcctccgcccgacgccccgcgtcccccgccgcgccgccgccgccaccctctgcgccccgcgccgccccccggtcccgcccgccatgcccggcccggccgcgggcagcagggcccgggtctacgccgaggtgaacagtctgaggagccgcgagtactgggactacgaggctcacgtcccgagctggggtaatcaagatgattaccaactggttcgaaaacttggtcggggaaaatatagtgaagtatttgaggccattaatatcaccaacaatgagagagtggttgtaaaaatcctgaagccagtgaagaaaaagaagataaaacgagaggttaagattctggagaaccttcgtggtggaacaaatatcattaagctgattgacactgtaaaggaccccgtgtcaaagacaccagctttggtatttgaatatatcaataatacagattttaagcaactctaccagatcctgacagactttgatatccggttttatatgtatgaactacttaaagctctggattactgccacagcaagggaatcatgcacagggatgtgaaacctcacaatgtcatgatagatcaccaacagaaaaagctgcgactgatagattggggtctggcagaattctatcatcctgctcaggagtacaatgttcgtgtagcctcaaggtacttcaagggaccagagctcctcgtggactatcagatgtatgattatagcttggacatgtggagtttgggctgtatgttagcaagcatgatctttcgaagggaaccattcttccatggacaggacaactatgaccagcttgttcgcattgccaaggttctgggtacagaagaactgtatgggtatctgaagaagtatcacatagacctagatccacacttcaacgatatcctgggacaacattcacggaaacgctgggaaaactttatccatagtgagaacagacaccttgtcagccctgaggccctagatcttctggacaaacttctgcgatacgaccatcaacagagactgactgccaaagaggccatggagcacccatacttctaccctgtggtgaaggagcagtcccagccttgtgcagacaatgctgtgctttccagtggtctcacggcagcacgatgaagactggaaagcgacgggtctgttgcggttctcccacttttccataagcagaacaagaaccaaatcaaacgtcttaacgcgtatagagagatcacgttccgtgagcagacacaaaacggtggcaggtttggcgagcacgaactagaccaagcgaagggcagcccaccaccgtatatcaaacctcacttccgaatgtaaaaggctcacttgcctttggcttcctgttgacttcttcccgacccagaaagcatggggaatgtgaagggtatgcagaatgttgttggttactgttgctccccgagcccctcaactcgtcccgtggccgcctgtttttccagcaaaccacgctaactagctgaccacagactccacagtggggggacgggcgcagtatgtggcatggcggcagttacatattattattttaaaagtatatattattgaataaaaggttttaaaag

SEQ ID NO: 91540 - DNA, 1463 bp, Homo sapiens
aggcttggttaacccccagtcctggcatttatgtgtgtgtcttccttttacagtaatcaagatgattaccaactggttcgaaaacttggtcggggaaaatatagtgaagtatttgaggccattaatatcaccaacaatgagagagtggttgtaaaaatcctgaagccagtgaagaaaaagaagataaaacgagaggttaagattctggagaaccttcgtggtggaacaaatatcattaagctgattgacactgtaaaggaccccgtgtcaaagacaccagctttggtatttgaatatatcaataatacagattttaagcaactctaccagatcctgacagactttgatatccggttttatatgtatgaactacttaaagctctggattactgccacagcaagggaatcatgcacagggatgtgaaacctcacaatgtcatgatagatcaccaacagaaaaagctgcgactgatagattggggtctggcagaattctatcatcctgctcaggagtacaatgttcgtgtagcctcaaggtacttcaagggaccagagctcctcgtggactatcagatgtatgattatagcttggacatgtggagtttgggctgtatgttagcaagcatgatctttcgaagggaaccattcttccatggacaggacaactatgaccagcttgttcgcattgccaaggttctgggtacagaagaactgtatgggtatctgaagaagtatcacatagacctagatccacacttcaacgatatcctgggacaacattcacggaaacgctgggaaaactttatccatagtgagaacagacaccttgtcagccctgaggccctagatcttctggacaaacttctgcgatacgaccatcaacagagactgactgccaaagaggccatggagcacccatacttctaccctgtggtgaaggagcagtcccagccttgtgcagacaatgctgtgctttccagtggtctcacggcagcacgatgaagactggaaagcgacgggtctgttgcggttctcccacttttccataagcagaacaagaaccaaatcaaacgtcttaacgcgtatagagagatcacgttccgtgagcagacacaaaacggtggcaggtttggcgagcacgaactagaccaagcgaagggcagcccaccaccgtatatcaaacctcacttccgaatgtaaaaggctcacttgcctttggcttcctgttgacttcttcccgacccagaaagcatggggaatgtgaagggtatgcagaatgttgttggttactgttgctccccgagcccctcaactcgtcccgtggccgcctgtttttccagcaaaccacgctaactagctgaccacagactccacagtggggggacgggcgcagtatgtggcatggcggcagttacatattattattttaaaagtatatattattgaataaaaggttttaaaag

SEQ ID NO: 91541 - DNA, 1390 bp, Homo sapiens
ttttaggtggacaggaagtagaatttattggtgaagtatttgaggccattaatatcaccaacaatgagagagtggttgtaaaaatcctgaagccagtgaagaaaaagaagataaaacgagaggttaagattctggagaaccttcgtggtggaacaaatatcattaagctgattgacactgtaaaggaccccgtgtcaaagacaccagctttggtatttgaatatatcaataatacagattttaagcaactctaccagatcctgacagactttgatatccggttttatatgtatgaactacttaaagctctggattactgccacagcaagggaatcatgcacagggatgtgaaacctcacaatgtcatgatagatcaccaacagaaaaagctgcgactgatagattggggtctggcagaattctatcatcctgctcaggagtacaatgttcgtgtagcctcaaggtacttcaagggaccagagctcctcgtggactatcagatgtatgattatagcttggacatgtggagtttgggctgtatgttagcaagcatgatctttcgaagggaaccattcttccatggacaggacaactatgaccagcttgttcgcattgccaaggttctgggtacagaagaactgtatgggtatctgaagaagtatcacatagacctagatccacacttcaacgatatcctgggacaacattcacggaaacgctgggaaaactttatccatagtgagaacagacaccttgtcagccctgaggccctagatcttctggacaaacttctgcgatacgaccatcaacagagactgactgccaaagaggccatggagcacccatacttctaccctgtggtgaaggagcagtcccagccttgtgcagacaatgctgtgctttccagtggtctcacggcagcacgatgaagactggaaagcgacgggtctgttgcggttctcccacttttccataagcagaacaagaaccaaatcaaacgtcttaacgcgtatagagagatcacgttccgtgagcagacacaaaacggtggcaggtttggcgagcacgaactagaccaagcgaagggcagcccaccaccgtatatcaaacctcacttccgaatgtaaaaggctcacttgcctttggcttcctgttgacttcttcccgacccagaaagcatggggaatgtgaagggtatgcagaatgttgttggttactgttgctccccgagcccctcaactcgtcccgtggccgcctgtttttccagcaaaccacgctaactagctgaccacagactccacagtggggggacgggcgcagtatgtggcatggcggcagttacatattattattttaaaagtatatattattgaataaaaggttttaaaag

SEQ ID NO: 91542 - DNA, 1677 bp, Homo sapiens
tgtcacccaggctggagtgcagtggcgcaatctcagctcactgcaacctccacctccctggttcaagcgattctcctgcctcctccgcccgacgccccgcgtcccccgccgcgccgccgccgccaccctctgcgccccgcgccgccccccggtcccgcccgccatgcccggcccggccgcgggcagcagggcccgggtctacgccgaggtgaacagtctgaggagccgcgagtactgggactacgaggctcacgtcccgagctggggtaatcaagatgattaccaactggttcgaaaacttggtcggggaaaatatagtgaagtatttgaggccattaatatcaccaacaatgagagagtggttgtaaaaatcctgaagccagtgaagaaaaagaagataaaacgagaggttaagattctggagaaccttcgtggtggaacaaatatcattaagctgattgacactgtaaaggaccccgtgtcaaagacaccagctttggtatttgaatatatcaataatacagattttaagcaactctaccagatcctgacagactttgatatccggttttatatgtatgaactacttaaagctctggattactgccacagcaagggaatcatgcacagggatgtgaaacctcacaatgtcatgatagatcaccaacagaaaaagctgcgactgatagattggggtctggcagaattctatcatcctgctcaggagtacaatgttcgtgtagcctcaaggtacttcaagggaccagagctcctcgtggactatcagatgtatgattatagcttggacatgtggagtttgggctgtatgttagcaagcatgatctttcgaagggaaccattcttccatggacaggacaactatgaccagcttgttcgcattgccaaggttctgggtacagaagaactgtatgggtatctgaagaagtatcacatagacctagatccacacttcaacgatatcctgggacaacattcacggaaacgctgggaaaactttatccatagtgagaacagacaccttgtcagccctgaggccctagatcttctggacaaacttctgcgatacgaccatcaacagagactgactgccaaagaggccatggagcacccatacttctaccctgtggtgaaggagcagtcccagccttgtgcagacaatgctgtgctttccagtggtctcacggcagcacgatgaagactggaaagcgacgggtctgttgcggttctcccacttttccataagcagaacaagaaccaaatcaaacgtcttaacgcgtatagagagatcacgttccgtgagcagacacaaaacggtggcaggtttggcgagcacgaactagaccaagcgaagggcagcccaccaccgtatatcaaacctcacttccgaatgtaaaaggctcacttgcctttggcttcctgttgacttcttcccgacccagaaagcatggggaatgtgaagggtatgcagaatgttgttggttactgttgctccccgagcccctcaactcgtcccgtggccgcctgtttttccagcaaaccacgctaactagctgaccacagactccacagtggggggacgggcgcagtatgtggcatggcggcagttacatattattattttaaaagtatatattattgaataaaaggttttaaaag

SEQ ID NO: 91543 - DNA, 1569 bp, Homo sapiens
aaacataggtaggtagaggctggtttgaatccggccgaggccggtcccgcccgccatgcccggcccggccgcgggcagcagggcccgggtctacgccgaggtgaacagtctgaggagccgcgagtactgggactacgaggctcacgtcccgagctggggtaatcaagatgattaccaactggttcgaaaacttggtcggggaaaatatagtgaagtatttgaggccattaatatcaccaacaatgagagagtggttgtaaaaatcctgaagccagtgaagaaaaagaagataaaacgagaggttaagattctggagaaccttcgtggtggaacaaatatcattaagctgattgacactgtaaaggaccccgtgtcaaagacaccagctttggtatttgaatatatcaataatacagattttaagcaactctaccagatcctgacagactttgatatccggttttatatgtatgaactacttaaagctctggattactgccacagcaagggaatcatgcacagggatgtgaaacctcacaatgtcatgatagatcaccaacagaaaaagctgcgactgatagattggggtctggcagaattctatcatcctgctcaggagtacaatgttcgtgtagcctcaaggtacttcaagggaccagagctcctcgtggactatcagatgtatgattatagcttggacatgtggagtttgggctgtatgttagcaagcatgatctttcgaagggaaccattcttccatggacaggacaactatgaccagcttgttcgcattgccaaggttctgggtacagaagaactgtatgggtatctgaagaagtatcacatagacctagatccacacttcaacgatatcctgggacaacattcacggaaacgctgggaaaactttatccatagtgagaacagacaccttgtcagccctgaggccctagatcttctggacaaacttctgcgatacgaccatcaacagagactgactgccaaagaggccatggagcacccatacttctaccctgtggtgaaggagcagtcccagccttgtgcagacaatgctgtgctttccagtggtctcacggcagcacgatgaagactggaaagcgacgggtctgttgcggttctcccacttttccataagcagaacaagaaccaaatcaaacgtcttaacgcgtatagagagatcacgttccgtgagcagacacaaaacggtggcaggtttggcgagcacgaactagaccaagcgaagggcagcccaccaccgtatatcaaacctcacttccgaatgtaaaaggctcacttgcctttggcttcctgttgacttcttcccgacccagaaagcatggggaatgtgaagggtatgcagaatgttgttggttactgttgctccccgagcccctcaactcgtcccgtggccgcctgtttttccagcaaaccacgctaactagctgaccacagactccacagtggggggacgggcgcagtatgtggcatggcggcagttacatattattattttaaaagtatatattattgaataaaaggttttaaaag

SEQ ID NO: 91544 - DNA, 779 bp, Homo sapiens
aggacttatctctcactttattccctgttgctcgagcctctaacttagacttaattgccaaactagtctctgtctggtctccacacactcctccccactcacaccaagttcatgtctgacacactcgtttttcctagtcctgattcctatctcaccccactctgagatctttcagaccttggaattcagaattcagatacaaaaccaagcatctcagactagatccctgaatatcctgacagtgaccattcacagattagacctttacctatttcaaacaataagacctccttcataccatgttctgtgggccttgcagagacgtgtgcctggcattcatcctagacctttcctgaaaccaacagctcaattgttctgggcattcccttactgctaggacctgcctagacctcctgtcaagtgtagtctctgggaagcagtcatctgccattctttaaatggcaagttctgacaagaatggtcctaggccctacagaaaacacagatctgtacaggacatgattcacaccttccagaagcttatgctccagagaggaagctaagataactacaacaagactcaataagtactaacggcttaaagaagcagaagaaagaggtttatttgtatttttttgtatagtacttgagcagggccttaaaggataaagattattttaatgcactgagattgaacagtgacatatggaaaatggacatttaaagtggtgagaaaagcatagagtggagaagccagaaagggtacaaaattttccaaa

SEQ ID NO: 91545 - DNA, 322 bp, Homo sapiens
tctcggctcactgcaacctctgcctcatgggttcaagcgattctcctgcctcagcctcttgagtagctgggactacaggtgcctgccaccacacctagctgattttggtctcgatttcctgaccttgtgatctgcccacctctgcctcccaaagtgctgggattacaggcatgagccaccgcgcccagccaatttactttttttctgtgggctgttttcattttccgatagtgtcatttgaagcacaaaaattaattttggcaaaatttatgtttttttctttgtttatttggtgtcatatctaagaaatcattgcctaatc

SEQ ID NO: 91546 - DNA, 486 bp, Homo sapiens
ccccaagcctttcccagtctgtcttccttgtttctcagtaacttctctgcctctcctccattgtacttcatgtctttttctagatttcttttggtaaaaagcaaaacacactttttgagggcctacttttcccagggaacagctttacagagccctgagcaattttgtttgggatgtttggttagctcaaggtgtgcaatggcatgaaggagccagggagcagtcttccatttgaaaatgccgctctctcaaagttgagacagttgctttacttatctgaacagagaaccaaagagctgagtcacagagatgtgtggttaaggatgttaagtcgtaggaatgctagttaagtgtttatcaggtgttttttttttttaaataaagtggggaggagggtcaatcctttatgtaatttaattcaactagctaacagtcgtgctttatttcttagaatcattttaaaaataggtgcaagggagataatgc

SEQ ID NO: 91547 - DNA, 541 bp, Homo sapiens
caccctgggctctggacacagccagatcttcagccagggcaggccctttatcttatagcccagtggtgcctctctcctcacctaggaaacaaagccaacaggatctgcaccacctctgcctcccggacattggaaggactaaataagatcagagacctcattcctagatggaacgaggaatggtagcgaccacgatcctcccctcccaggatctgcgccacaagggaagatcagaaccttcagctgccagaagcactgcggcggaaatgtaggtccccatccaggctgatctgagcttggctttctggagcacgcaaacctcgatgcactgaactgctgccggacctcaccttgccaggcccactgtgctcacactcacacatcgctccatccactggaggctgcagaggcaagatccaccaagaagatggtcttcctgtccaggatgcccttccctgagagaagtgtatttaatcttaaattcagatgtttgtttgtctacccacttaaaacaccctgttgaataaaaattactcaagga

SEQ ID NO: 91548 - DNA, 438 bp, Homo sapiens
taattccactgacgatccagtgggtctttgtggcgtctgccttttctctttggtggcctaaatattttcttgttgtctttaatgtttttcagttttatcacactgtgcttaggatacaatttacatatttaatctttctcaattggaaatacacttccaattcgaagagcagctttcagctcattcgtctctcccatcatgatgccgttaacctccatcctccctgggcagcttcttattttatttaacccaatttatcatttgttcttcttcagattcgtctgctcttgtttcaagatttctatccttttcaaaaaataatttatttttacttttatgaacttatcctatttatttctttggatatctagcatgatttcgggacctctcatgctgttataggaatttattttaataacagaatgaacatgtgttcta

SEQ ID NO: 91549 - DNA, 146 bp, Homo sapiens
aacaacataaaccagttgacgatggctcttaccatctcctggatcaacgatctcaacagtggcgactgtggggaattccaaggcagccagcacgggctctgagagtaccacctgaaaggtttcagactgctcatgctccccatcac

SEQ ID NO: 91550 - DNA, 501 bp, Homo sapiens
gcacgaggggtgtccagaacaggtctgcatatcacagatgagctcacctggctcactacacgattaggtgagatgcagcaacaagttttagtgcaggtttggaacctgggatccgaaacacacacagaagaactatggagcttaaatggtacctgtagggttttctaggccagtcattccaagtacaaccccatcacttccaacaaaagggaaaaacagtaacagcagcatttgagtgagttctccctaaagtcaaatatattccattgaaagaactgctcctcataggccgggtgcggtggcttacacctgaaatcccagcactttgggaggccgaggtgggtcgatcacttgaggtcgggagttcaaggccagcctggccaacatagtgaaaccccgtctctgctaaaaatacaaaaaattagccgggcatggtaccacgcatctgtaatcccagctactcgggaggctgaggcaggagaatcatgtcaacccgggagg

SEQ ID NO: 91551 - DNA, 588 bp, Homo sapiens
gggtgtcccagggcaggggcaaaaaggtggagggagaccccaaatgtgagccaagtgaacaaactagtcacatgagaaagctggtctgctagaaaagttttgatcttgtcatagccacaactgccagtgccgtgtttcgacaagaaaagcttgcaagagcctcattttgtgacactaatagaagcgagttctcaggtgataacttatttgtcctttcactgatagctttcttggaagagccagggaagggaagaccgagagagagcagccgtctagctctgaccagcagaagatttcattatgtctgtggcaatttctttctttttggcttttttctgggggaaggggggacagagtctccctctgtctcccaggctggagtgcagtggggcgatctcagttccctggaaacttcgcctctcaggttcaagcgattctcctgcctcagcctcccgagtagctaagattacaggtgcccgccaccaagcctggttaatttttgtagtagagatggggtttcaacatgttgaccaggctggtctcgaactcctgacctcaggtgatccacccacctcagcctcccaaagt

SEQ ID NO: 91552 - DNA, 927 bp, Homo sapiens
  misc_feature (5)..(5): n is a, c, g, or t
  misc_feature (70)..(70): n is a, c, g, or t
  misc_feature (122)..(122): n is a, c, g, or t
  misc_feature (144)..(144): n is a, c, g, or t
  misc_feature (156)..(156): n is a, c, g, or t
  misc_feature (170)..(170): n is a, c, g, or t
  misc_feature (185)..(185): n is a, c, g, or t
  misc_feature (188)..(188): n is a, c, g, or t
  misc_feature (200)..(201): n is a, c, g, or t
  misc_feature (210)..(210): n is a, c, g, or t
  misc_feature (212)..(213): n is a, c, g, or t
  misc_feature (220)..(220): n is a, c, g, or t
  misc_feature (226)..(226): n is a, c, g, or t
  misc_feature (273)..(273): n is a, c, g, or t
  misc_feature (284)..(284): n is a, c, g, or t
  misc_feature (286)..(286): n is a, c, g, or t
  misc_feature (302)..(302): n is a, c, g, or t
  misc_feature (324)..(324): n is a, c, g, or t
  misc_feature (326)..(326): n is a, c, g, or t
tcttnactaagacccatccgcagtgtaccccgcccgccagtccctccgcctgaccccaagggcaagtccntgaaggatgagatgttctgcagaagctgcccgtggcaccacggccacactgnacttccggacctggggcccagntcagctgggtgncggtcttcctaacngggtacgcgggcccnttntcatctacctgnnaaaaaaatncnnagtgccnttcatntatggccacaaatatgacttaacgtccagtcggcaaacagtggtgcncctcgcctgcntntgtcactcattccacnacatcaagcgcctgatgaagangntcttcgtgcaccgcttctccacatggcactatgcctttgcgcaacatcttcaagaactgcacctactactggggcttcgccgcgtggatggcctattacatcaatcaccctctctacactccccctacctacggagctcagcaggtgaaactggcgctcgccatctttgtgatctgccagctcggcaacttctccatccacatggccctgcgggacctgcggcccgctgggtccaagacgcggaagatcccataccccaccaagaaccccttcacgtggctcttcctgctggtgtcctgccccaactacacctacgaggtggggtcctggatcggtttcgccatcatgacgcagtgtctcccagtggccctgttctccctggtgggcttcacccagatgaccatctgggccaagggcaagcaccgcagctacctgaaggagttccgggactacccgcccctgcgcatgcccatcatccccttcctgctctgagcgctcacccctgctgaggctcagcccctcaacccggtggcattctgggggaggagtggggcccacagctctccagcacccggaataaagcccgcctgccccagtcgga

SEQ ID NO: 91553 - DNA, 280 bp, Homo sapiens
ccattcatattgcgcgtgagcatcatgacgcagtgtctcccagtggccctgttctccctggtgggcttcacccagatgaccatctgggccaagggcaagcaccgcagctacctgaaggagttccgggactacccgcccctgcgcatgcccatcatccccttcctgctctgagcgctcacccctgctgaggctcagcccctcaacccggtggcattctgggggaggagtggggcccacagctctccagcacccggaataaagcccgcctgccccagtcgga

SEQ ID NO: 91554 - DNA, 717 bp, Homo sapiens
ggaataattccggctagaaatccaacgtgcggtgaagtacgttgagttcttaggcttcatatcagggaacaactgacctttgggagctgaagtgggagatggacatcaaagaaagtgggtcagtaaagttccacgttaaaagctgattcaggcccgggtgcgggggctcactcctgtaatcccagcactttgggaggccgaggtgggtggatcacctgaggtcaggagttcaagaccagcctggccaacatggagaaaccccgtctctcctaaaaatacaaaaattagccgggcgtggtggcacaggcctgtaatcccagctactcgggaggctgaggcaggagaattgcttgaacccgggaggcggatgttgcagtgagcagagatcatgccactgccctccagcctgggcgacagagcgagactccgtctcaacaacaacaacaaaaagctggctcggtatcttttgtgtgtttgtactcttaggttttaaccagtctccacctacatcaacctcactcctcatggtaaagtactactattgttctaaattaactcctgagagtattttggtgttgctctaatagaagaaaggggctttaaacaaaggtgatttttccagggtcagagagcagaaagtacctgccatttgggagcaggagctgcctgaggaatggaacctaacaacataggaacggcataacggttcctaaaaaa

SEQ ID NO: 91555 - DNA, 481 bp, Homo sapiens
ggaataattccggctagaaatccaacgtgcggtgaagtacgttgagttcttaggcttcatatcagggaacaactgacctttgggagctgaagtgggagatggacatcaaagaaagtgggtcagtaaagttccacgttaaaagctgattcaggcccgggtgcgggggctcactcctgtaatcccagcactttgggaggccgaggtgggtggatcacctgaggtcaggagttcaagaccagcctggccaacatggagaaaccccgtctctcctaaaaatacaaaaattagccgggcgtggtggcacaggcctgtaatcccagctactcgggaggctgaggcaggagaattgcttgaacccgggaggcggatgttgcagtgagcagagatcatgccactgccctccagcctgggcgacagagcgagactccgtctcaaaaaaaaagaaagaaaattggaacctaagttcagagccagggggtac

SEQ ID NO: 91556 - DNA, 635 bp, Homo sapiens
caggcatacgtattttttgtttgtttgtttttggtgaagctcccaggtgattctaatgtgcaggcaagtttgagaaccactgcactgtaccattatcacaccaaagataattatggtctaatatgaaggccatattaaaatttccacaattttcccccagataccttttacatggttttgtttccaaattacaatgtatttggttgctatatctccataagtacagatgccagcggctcctgcactttgccaggcatccgttgagtgtgttgtatatgtttgagcaatatttttgcctgtacagcttttcttgagcacaaatgttgtatcagcatggatttggaaaagagatcaatagagaactgcaactttctaatccataatgcatttaagttcagatatgtgctcagagatgtaagggggaattttatttcatgttttgtgtaaatattgatcggagacccaaaagggcctaccttacagacctctggggttcaatggggcatggtgtgaaataacacacacttgaagtttgcaccttccccaggctgagctggtataacttgtgtgcatgtaatcatctctctgttatctgacaacaacaaggacaattctactttggtagaaatgtaagg

SEQ ID NO: 91557 - DNA, 2258 bp, Homo sapiens
agcggacattgtagcaaaatggcgactgtcattcacaaccccctgaaagcgctcggggaccagttctacaaggaagccattgagcactgccggagttacaactcacggctgtgtgcagagcgcagcgtgcgtcttcccttcctggactcacagactggggtggcccagaacaactgctacatctggatggagaagaggcaccgaggcccaggccttgccccgggccagctgtatacataccctgcccgctgctggcgcaagaagagacgattgcacccacctgaagatccaaaactgcggctgctggagataaaacctgaagtggagcttcccctgaagaaggatgggttcacctcagagagcaccacgctggaagccttgctccgtggcgagggggttgagaagaaggtggatgccagggaggaggaaagcatccaggaaatacagagggttttggaaaatgatgaaaatgtagaagaagggaatgaagaagaggatttggaagaggatattcccaagcgaaagaacaggactagaggacgggctcgcggctctgcagggggcaggaggaggcacgacgccgcctctcaggaagaccacgacaaaccttacgtctgtgacatctgtggcaagcgctacaagaaccgaccggggctcagctaccactatgctcacactcacctggccagcgaggagggggatgaagctcaagaccaggagactcggtccccacccaaccacagaaatgagaaccacaggccccagaaaggaccggatggaacagtcattcccaataactactgtgacttctgcttggggggctccaacatgaacaagaagagtgggcggcctgaagagctggtgtcctgcgcagactgtggacgctctgctcatttgggaggagaaggcaggaaggagaaggaggcagcggccgcagcacgtaccacggaggacttattcggttccacgtcagaaagtgacacgtcaactttccacggctttgatgaggacgatttggaagagcctcgctcctgtcgaggacgccgcagtggccggggttcgcccacagcagataaaaagggcagttgctaaacccacggaacagactctctgggcaattagccatccccctctgactttggtcattgtgctggttctgatatatattttttttaatgaaaggcaactttagattttccctctatccttgctttttttcccttcacctcccacgtgtccctccatccctccccccacccctctgttttgggtatgtacaacagaagcacaaactactgaaacaaaacaaaacagcagaatgagcgttcttccgagagatggcatcgtgatgcgctatttattttccatagaaataggaagttagacggattgtctcttttctgaggggagggggtctttttgacaggagcagagttgatgtcctcaattttcatatttattggcaaaaggaagagaagaggaactttgggttggaaacaaagaaccaataacattaaaacattattatttatatattctagctgttattagaatcagactttttttgcgagagagagagagagagagagagaagggaaatcaaagaaatcgaagcaatatcctgtttagaggcaagccgcccggtggggagaatttcctcaatgggagacggttgcactattctgtgccccacggagtttgcggctccccgcggcagacccctccctcattctcctccctgacctttccatcttcctctctgcttgcgagaaaatgtcagtagttccagagaagtcggggtgcctatgcctggcctccctccacacctgggccctgaccagccgcctcctgggctcctcctcctccgtcagtagagctgctgttttgttattgctggtttttcctcactttcctcctggcaaagaacgacttccaaatgcagggatggaatataagcagaacgtcatgggctcagcagtgactccaccacccgaggccgaggccgtgcttctggaagatagaaggagacatcatcgtgtgtttcccctccccttgcccctgttaagaaacgtatcaatacccattggatgatcaaggctaccgtatttcttctatttttttttatagtgcctgccaggcactttgttttatgtttccaatagcacttcctgaaataaaccaaagcaacactgctcaaggcccctggggcgatggagaaggccacccacctcactgacagtcccaagaatgaccggctg

SEQ ID NO: 91558 - DNA, 1883 bp, Homo sapiens
ttagaagcgggtaaaataaaaatgaaatagatggaggcttaaccaccttgaatgggttatctgacagtaatacctttgtacagctgactgtcaaagtgaaggacaaacattgttcaaagaaacaccaacagaaaacaccaaagaaatcccaaccaggcttaaaaaccaccaatgaaaatcattgtctggggcagggttgagtgagcgtgcaagcgcctgtgtgtatgcacaacagaagaaagatcatggttgaatcttttgctgtcggaagctgtggacatatgtactatggtagagatgatgccttttcggggagtgggggaagcctcttccctggaaatgtttgctttgtcccaaatccccgtcaccaggtgatgcaccgggttaatccctttggtgtgcaaatggttttatatcttgctattaagaatagcattgtaataatgtaatgagaatattaataatgctgtctgttgcttaacccatgtgctgatatattcatcatacatgtcagctcatttgggaggagaaggcaggaaggagaaggaggcagcggccgcagcacgtaccacggaggacttattcggttccacgtcagaaagtgacacgtcaactttccacggctttgatgaggacgatttggaagagcctcgctcctgtcgaggacgccgcagtggccggggttcgcccacagcagataaaaagggcagttgctaaacccacggaacagactctctgggcaattagccatccccctctgactttggtcattgtgctggttctgatatatattttttttaatgaaaggcaactttagattttccctctatccttgctttttttcccttcacctcccacgtgtccctccatccctccccccacccctctgttttgggtatgtacaacagaagcacaaactactgaaacaaaacaaaacagcagaatgagcgttcttccgagagatggcatcgtgatgcgctatttattttccatagaaataggaagttagacggattgtctcttttctgaggggagggggtctttttgacaggagcagagttgatgtcctcaattttcatatttattggcaaaaggaagagaagaggaactttgggttggaaacaaagaaccaataacattaaaacattattatttatatattctagctgttattagaatcagactttttttgcgagagagagagagagagagagagaagggaaatcaaagaaatcgaagcaatatcctgtttagaggcaagccgcccggtggggagaatttcctcaatgggagacggttgcactattctgtgccccacggagtttgcggctccccgcggcagacccctccctcattctcctccctgacctttccatcttcctctctgcttgcgagaaaatgtcagtagttccagagaagtcggggtgcctatgcctggcctccctccacacctgggccctgaccagccgcctcctgggctcctcctcctccgtcagtagagctgctgttttgttattgctggtttttcctcactttcctcctggcaaagaacgacttccaaatgcagggatggaatataagcagaacgtcatgggctcagcagtgactccaccacccgaggccgaggccgtgcttctggaagatagaaggagacatcatcgtgtgtttcccctccccttgcccctgttaagaaacgtatcaatacccattggatgatcaaggctaccgtatttcttctatttttttttatagtgcctgccaggcactttgttttatgtttccaatagcacttcctgaaataaaccaaagcaacactgctcaaggcccctggggcgatggagaaggccacccacctcactgacagtcccaagaatgaccggctg

SEQ ID NO: 91559 - DNA, 1823 bp, Homo sapiens
tgaagatggaaatcaatgacttagaaaccaattaaacaatccaaatagcaactgataaatggattaaccctctataatgaaattcctctagcttttgtcttccgccttccccaggtaggttttctattcctggaggcaaagcagaggcatggaggaagtggaggccagagggaatcacattaaagtgggtgaatccgtttatcacttactgtctggatggtatttctgctcacatctctgcttcctttttcagatttgtaccgtatgggaccctgattaacgttagccagtgaataatgaaaggcagcagcagacactgggtctgcccagaaaggaccggatggaacagtcattcccaataactactgtgacttctgcttggggggctccaacatgaacaagaagagtgggcggcctgaagagctggtgtcctgcgcagactgtggacgctctgctcatttgggaggagaaggcaggaaggagaaggaggcagcggccgcagcacgtaccacggaggacttattcggttccacgtcagaaagtgacacgtcaactttccacggctttgatgaggacgatttggaagagcctcgctcctgtcgaggacgccgcagtggccggggttcgcccacagcagataaaaagggcagttgctaaacccacggaacagactctctgggcaattagccatccccctctgactttggtcattgtgctggttctgatatatattttttttaatgaaaggcaactttagattttccctctatccttgctttttttcccttcacctcccacgtgtccctccatccctccccccacccctctgttttgggtatgtacaacagaagcacaaactactgaaacaaaacaaaacagcagaatgagcgttcttccgagagatggcatcgtgatgcgctatttattttccatagaaataggaagttagacggattgtctcttttctgaggggagggggtctttttgacaggagcagagttgatgtcctcaattttcatatttattggcaaaaggaagagaagaggaactttgggttggaaacaaagaaccaataacattaaaacattattatttatatattctagctgttattagaatcagactttttttgcgagagagagagagagagagagagaagggaaatcaaagaaatcgaagcaatatcctgtttagaggcaagccgcccggtggggagaatttcctcaatgggagacggttgcactattctgtgccccacggagtttgcggctccccgcggcagacccctccctcattctcctccctgacctttccatcttcctctctgcttgcgagaaaatgtcagtagttccagagaagtcggggtgcctatgcctggcctccctccacacctgggccctgaccagccgcctcctgggctcctcctcctccgtcagtagagctgctgttttgttattgctggtttttcctcactttcctcctggcaaagaacgacttccaaatgcagggatggaatataagcagaacgtcatgggctcagcagtgactccaccacccgaggccgaggccgtgcttctggaagatagaaggagacatcatcgtgtgtttcccctccccttgcccctgttaagaaacgtatcaatacccattggatgatcaaggctaccgtatttcttctatttttttttatagtgcctgccaggcactttgttttatgtttccaatagcacttcctgaaataaaccaaagcaacactgctcaaggcccctggggcgatggagaaggccacccacctcactgacagtcccaagaatgaccggctg

SEQ ID NO: 91560 - DNA, 3883 bp, Homo sapiens
agtcttctccagtcctgctcctccagctctcagcctctgcacagccaccagggttgcaaagggagccttgtgcttggaaagctactggctccgcgacctctctccttctcttcccttcgttcacctatgcttcttttcatgaaagatatttggcaatagttgggtacttcaaaagtctcaattctgctatcaaagggatgcaaagcttttatggctagaatggggtttgtggtttatacggacttggtttgcccttccatgtctactccccactgagaccctgattctgctcgctgccctctcccttccctgcactgtttttcctcccttccctctgccgtgatagatgctaaggagtggggtggaggtgggaagtgggaagcaacagtggcgtataggaaaaagaaaatataccccgtgcacattttcaacatgtagttgaagaagcctaaattaggtactagaaaaaaaaaaaggacagaaacactgcctgatatgtgagcaagagcatgaaaatatagaatgattatctcagagcagaggaggtggggagcaggtggctggagagaggcggggtaggtaggcagggcgtccctggctcaccaatgcgtctggtccacatggcatttgggaaagcagatgggtcatgcttttgcaatgaatggtcagatgcttagggggcatttgtgctcctctggccaggaaagggaacagagtccatccaagctgccccccactcatctgccatggttgtccaccctgggggtttttcctctgaaggaaaatgaacccatcttttgcctgccatgaatcattgcagggcaggctgttactggctaaattaaaacccttggcagggcatcgactgtgtgcgaggcaatgctctaggtcctgtaggggctggaaaataaaccgcatgctggcctagccttcaagttgcttttcagccatgaaactaagctctgccaagcaatcgtgattgtaggtcaagtatcgcgccatcacggaaggtgtaagtatatgtaggtttctctgttgaggatgcgtgttcctcagtagaagacaagcaggtggaggcatccagtgatttctaccctgtggaggctgaggggtcgggggaagaaaacagatgacctcagcctagttgctttaatctgcttttccaagcactggatgcccttggatgacagcatcctcagcattaaaactggtgaactgatgaagtcacctggcctggagtgtgttgggcagccagtgtccccagagctgcttgtgggtttctggggtggaaggcagggaggtgcaactggcagggcctgatcagaggcagaaaatgacccccacagtggtcttttccctgctagagaaagcagagagcgggactgggggggtgggggcttcaagtacagattgggcacactccaccagaccccagcaaggtcagctgccccacgcctgtatctggcactgctggtgtgtgcagggatgaaacccagcatcagagaggttttcagcaaaccttccatgctcacctttggccaggtgcttgtcagatcctagcttcgtgctggcttagactctcagttgtttgtgttgacagcattaggaataaaccgtttgtttcatctttccttttctccacacgtgtcacagccagatttcagctttgagttattccctgaagaagccacaccaaccttgctttcaagcaaaatgcctgggcttgggggaaggtgtgtatctgtccatgtgtggatgtcggctcagagctatagcttctctgtggggggtggcccaagggaaggctcctctggggccctggatggcacatgactcccagtgaggagaattcaggtgatctctgtggaggtagtcagggacacaaggcttggctgtgagtctggttttaaagtgcgtgacagcctgaaaagcatgcaggggtttggtccactcacctacttgaaagcctgtgggcaacgttcttttgagccaagacttctctgaatggccctgctggtggaaggggtgaggcaaaggcctctgacttggaccctttccacaccagactggcagcacttcccccaggcagccagtggtgggccctgagccctcaggtccccagctccttgagggatgaacctgggagcccaagagccagtggctgagctctgagaaggctccatctcccacctgcccttgagcgcgctctcaggctgagaacacggtctcatcaggcgccttcctggcctgatgctgtgctgtctacgtcacacggtcgattcacaaaagccagaactagacctcaaccaggtcatctccccgttgccaagtgggttcagggtgagggcaatttgtaagctcaatttctctgacagccaagacatggagcatctctgctaagaagccaaaagaaattggttttcttcttctcattgctgaagcccctctgtgtctcttctcagggacaggctggtccagtggctttggtgagggcgcctccatttgtgaacgctgggattcctctgggtgggctttggcaggtggctcctatggtaggaaggatgaccaggtccctgggaatgagctgcctacctgctgctccacgaggaagctcaggcctgcacaggctccaccaggccttggatgccctctagttgagtcagagaccctggaaacacactgagatctccaattgctgcctccattgatgtctctagacctgcagatacgaagcaaacctgggattgcttcttccaggtatgggcaccagagagggaggccactgcaacattttatccccatcattccaaaatgcttgcttgtctcttttacctcacactcacaactccttctgagactctcagtcataaaggaatgaccaagagagtgggtctccagtgagagaaatgcctatgaaagagggtttccctttttgctcttttgaacaccctccccactgatccttgggacccaacgccgcattgcctcttgcagatgaggttttgccttgggctgcttgggtacttcagaccaggactgagtctgacacagctttcatgaggttacagaaaagggctacagatttgggaagctgtgtgtaatggtcttgagacaatatctccatttggcccaccctggcttctctaaaaagcaacgacagcaacagacaaacaaaaagctcccacctcccaccccgttagctgtcctcctccttcactgtgatgtggttgcggtctctgtaggtgtgtgtgccacccttgtcctctgtcctctggggatgtgcccttcccacgtgtgtcaggttcccactctttcgtggttcctaacgtgaagtgctgtgatgtttctgccctgcctaaggaacgtatcaagctctctcagtgtttcagtgttggagattgaggctgtgccacatcttctgccatcctaaggggacatgatggttctgtgattcccagagagctggcagattgtgacaatctccaggagaacctacagattggaagcagcccacacctgatgtggactcctgacccgggactcactcttcattcagaagactggtggcccacgtgccaggaccaccccacctctcttgctgccttttctcctgtcctgatggggttctgggagggagacctgtcgctgatgagatgaagaatgtggggatcgagcagccttcttctttgggacccctcgatatcccatggaatgctcgcacgttctcaaagactgagtcacaagcccctaccccttccttgctgtggttagtatcttgttctgtgattggttagcaatgttgactacccacgtagtgaatcttttgtctgcaatttagagaatgtgtaaacaaataaaaggctttaaaactcaaggaaactct

SEQ ID NO: 91561 - DNA, 1409 bp, Homo sapiens
agcggacattgtagcaaaatggcgactgtcattcacaaccccctgaaagcgctcggggaccagttctacaaggaagccattgagcactgccggagttacaactcacggctgtgtgcagagcgcagcgtgcgtcttcccttcctggactcacagactggggtggcccagaacaactgctacatctggatggagaagaggcaccgaggcccaggccttgccccgggccagctgtatacataccctgcccgctgctggcgcaagaagagacgattgcacccacctgaagatccaaaactgcggctgctggagataaaacctgaagtggagcttcccctgaagaaggatgggttcacctcagagagcaccacgctggaagccttgctccgtggcgagggggttgagaagaaggtggatgccagggaggaggaaagcatccaggaaatacagagggttttggaaaatgatgaaaatgtagaagaagggaatgaagaagaggatttggaagaggatattcccaagcgaaagaacaggactagaggacgggctcgcggctctgcagggggcaggaggaggcacgacgccgcctctcaggaagaccacgacaaaccttacgtctgtgacatctgtggcaagcgctacaagaaccgaccggggctcagctaccactatgctcacactcacctggccagcgaggagggggatgaagctcaagaccaggagactcggtccccacccaaccacagaaatgagaaccacaggccccagaaaggaccggatggaacagtcattcccaataactactgtgacttctgcttggggggctccaacatgaacaagaagagtgggcggcctgaagagctggtgtcctgcgcagactgtggacgctctggtgagtgtggccccttcccacaccgggtgcccgtagaccaggaatgctcctcttgcattcctcttccatcttgtggtgctggagactggagagggaagcgatggtggcaatgctttcgagtggagaggagttttcagctcattctgatatttttcttctttgggtctcaagaaccaaaagttatgccctaggatccgggggaaagggcaaagagaagttttgggtttgtgtctggcctttccatgaggtgcatatttctttgtgcgtgtttttacggaccacagcgaggtagagtggaaaaacctggagagaaggcaacgtgctttcttgtagtggatgatgcacatgtaacagaaagatgagtttgttctgtggaagtgcctagggcaaacccgaagagtgtggtgtggtgtggaaacatgagtattcggagagcaaccacatcttgaattgtgggagtcagagatccccgggctcctggctagctgcataaacaccaccgccattggccactaatctc

SEQ ID NO: 91562 - DNA, 4138 bp, Homo sapiens
agcggacattgtagcaaaatggcgactgtcattcacaaccccctgaaagcgctcggggaccagttctacaaggaagccattgagcactgccggagttacaactcacggctgtgtgcagagcgcagcgtgcgtcttcccttcctggactcacagactggggtggcccagaacaactgctacatctggatggagaagaggcaccgaggcccaggccttgccccgggccagctgtatacataccctgcccgctgctggcgcaagaagagacgattgcacccacctgaagatccaaaactgcggctgctggagataaaacctgaagtggagcttcccctgaagaaggatgggttcacctcagagagcaccacgctggaagccttgctccgtggcgagggggttgagaagaaggtggatgccagggaggaggaaagcatccaggaaatacagagggttttggaaaatgatgaaaatgtagaagaagggaatgaagaagaggatttggaagaggatattcccaagcgaaagaacaggactagaggacgggctcgctgccctctcccttccctgcactgtttttcctcccttccctctgccgtgatagatgctaaggagtggggtggaggtgggaagtgggaagcaacagtggcgtataggaaaaagaaaatataccccgtgcacattttcaacatgtagttgaagaagcctaaattaggtactagaaaaaaaaaaaggacagaaacactgcctgatatgtgagcaagagcatgaaaatatagaatgattatctcagagcagaggaggtggggagcaggtggctggagagaggcggggtaggtaggcagggcgtccctggctcaccaatgcgtctggtccacatggcatttgggaaagcagatgggtcatgcttttgcaatgaatggtcagatgcttagggggcatttgtgctcctctggccaggaaagggaacagagtccatccaagctgccccccactcatctgccatggttgtccaccctgggggtttttcctctgaaggaaaatgaacccatcttttgcctgccatgaatcattgcagggcaggctgttactggctaaattaaaacccttggcagggcatcgactgtgtgcgaggcaatgctctaggtcctgtaggggctggaaaataaaccgcatgctggcctagccttcaagttgcttttcagccatgaaactaagctctgccaagcaatcgtgattgtaggtcaagtatcgcgccatcacggaaggtgtaagtatatgtaggtttctctgttgaggatgcgtgttcctcagtagaagacaagcaggtggaggcatccagtgatttctaccctgtggaggctgaggggtcgggggaagaaaacagatgacctcagcctagttgctttaatctgcttttccaagcactggatgcccttggatgacagcatcctcagcattaaaactggtgaactgatgaagtcacctggcctggagtgtgttgggcagccagtgtccccagagctgcttgtgggtttctggggtggaaggcagggaggtgcaactggcagggcctgatcagaggcagaaaatgacccccacagtggtcttttccctgctagagaaagcagagagcgggactgggggggtgggggcttcaagtacagattgggcacactccaccagaccccagcaaggtcagctgccccacgcctgtatctggcactgctggtgtgtgcagggatgaaacccagcatcagagaggttttcagcaaaccttccatgctcacctttggccaggtgcttgtcagatcctagcttcgtgctggcttagactctcagttgtttgtgttgacagcattaggaataaaccgtttgtttcatctttccttttctccacacgtgtcacagccagatttcagctttgagttattccctgaagaagccacaccaaccttgctttcaagcaaaatgcctgggcttgggggaaggtgtgtatctgtccatgtgtggatgtcggctcagagctatagcttctctgtggggggtggcccaagggaaggctcctctggggccctggatggcacatgactcccagtgaggagaattcaggtgatctctgtggaggtagtcagggacacaaggcttggctgtgagtctggttttaaagtgcgtgacagcctgaaaagcatgcaggggtttggtccactcacctacttgaaagcctgtgggcaacgttcttttgagccaagacttctctgaatggccctgctggtggaaggggtgaggcaaaggcctctgacttggaccctttccacaccagactggcagcacttcccccaggcagccagtggtgggccctgagccctcaggtccccagctccttgagggatgaacctgggagcccaagagccagtggctgagctctgagaaggctccatctcccacctgcccttgagcgcgctctcaggctgagaacacggtctcatcaggcgccttcctggcctgatgctgtgctgtctacgtcacacggtcgattcacaaaagccagaactagacctcaaccaggtcatctccccgttgccaagtgggttcagggtgagggcaatttgtaagctcaatttctctgacagccaagacatggagcatctctgctaagaagccaaaagaaattggttttcttcttctcattgctgaagcccctctgtgtctcttctcagggacaggctggtccagtggctttggtgagggcgcctccatttgtgaacgctgggattcctctgggtgggctttggcaggtggctcctatggtaggaaggatgaccaggtccctgggaatgagctgcctacctgctgctccacgaggaagctcaggcctgcacaggctccaccaggccttggatgccctctagttgagtcagagaccctggaaacacactgagatctccaattgctgcctccattgatgtctctagacctgcagatacgaagcaaacctgggattgcttcttccaggtatgggcaccagagagggaggccactgcaacattttatccccatcattccaaaatgcttgcttgtctcttttacctcacactcacaactccttctgagactctcagtcataaaggaatgaccaagagagtgggtctccagtgagagaaatgcctatgaaagagggtttccctttttgctcttttgaacaccctccccactgatccttgggacccaacgccgcattgcctcttgcagatgaggttttgccttgggctgcttgggtacttcagaccaggactgagtctgacacagctttcatgaggttacagaaaagggctacagatttgggaagctgtgtgtaatggtcttgagacaatatctccatttggcccaccctggcttctctaaaaagcaacgacagcaacagacaaacaaaaagctcccacctcccaccccgttagctgtcctcctccttcactgtgatgtggttgcggtctctgtaggtgtgtgtgccacccttgtcctctgtcctctggggatgtgcccttcccacgtgtgtcaggttcccactctttcgtggttcctaacgtgaagtgctgtgatgtttctgccctgcctaaggaacgtatcaagctctctcagtgtttcagtgttggagattgaggctgtgccacatcttctgccatcctaaggggacatgatggttctgtgattcccagagagctggcagattgtgacaatctccaggagaacctacagattggaagcagcccacacctgatgtggactcctgacccgggactcactcttcattcagaagactggtggcccacgtgccaggaccaccccacctctcttgctgccttttctcctgtcctgatggggttctgggagggagacctgtcgctgatgagatgaagaatgtggggatcgagcagccttcttctttgggacccctcgatatcccatggaatgctcgcacgttctcaaagactgagtcacaagcccctaccccttccttgctgtggttagtatcttgttctgtgattggttagcaatgttgactacccacgtagtgaatcttttgtctgcaatttagagaatgtgtaaacaaataaaaggctttaaaactcaaggaaactct

SEQ ID NO: 91563 - DNA, 397 bp, Homo sapiens
aaatggggaagaggaggagctgcccaaggaaagaggacaggaagggagagagagaagcagacagacagatggactgggcctaaagacagcatgagctcctgggagagggacttgtggtagaggccaggggagactgcctggggtcacctggtggttggtttgtccatgatggaaaattttgtctcaaatgaggctgtcattaggatgcacatggatgtccctctgacataagttccaagaaaattaaccaataggaactgaatgataagacatgaaacagattcctaattaagttacctgactccagactgactgcagctgcaggttctgaaatgggtttgcatgggaggctacaggcagtatggaatgggggaaaataacggggtttttggtcaat

SEQ ID NO: 91564 - DNA, 661 bp, Homo sapiens
tgaagggagaagctggggctcagggaggttaaggaaatggctagcttagagtcatgctagaccttggtctagatgagcctttaaactagatgtccttgctctctagagtatggtttgaaaattttaaacaggttgtgtttaaaaataatctcatgatagcctgctaaccttatatttttgaggaagtttgaatcagttctgtagactggcagaggggaaagacacatgaaacccggaaggagcatttactgagaacctcatgggaaccgcatatgttatggagacatggagacgtgaccgtctgctactgtcgtctggaggtgacctagtgactttatgaccaaatcaggtcataaagaggaaagaaaaacattgacgatcctacatcctaggctccttcccgacttctgacatcgctgttcagcccacactcacagtagttttgttttccttgagtatttaaagatgacaatgcatccgaagacaatctgtaaacggtaaggtaatatataaatctgacctgttcatagcacaataaacacagcaagcaaataaactccattaaatgtaattttaatttattcagtggaaaacaacaaagttgattcaaaagtcaaagacctaagagaagataaatccaaactctataaaaccttgattg

SEQ ID NO: 91565 - DNA, 421 bp, Homo sapiens
catccctggcctccattccccctcctcgtagttgcaataaccaaaaatatctccagatattgccaagtgctccctaggggataaaattgccactgacctgggagaaactgaactgcttgctcattcaccttcccaagtgctggggaaggacgctgactgcctagcttttggctcaaatgtggctgaataactagagcacgcttgcactcacaaggtgaccccttcataagcttgtggtttaaggagttgttgctctttaccactgctatagggctttccctaaaccctctaagtcagtactgtccaacacaactttctgcaagaagatatccatcatgtgctgtccaaaacagcagccactagccatatggggctattaagcacctgaaatacagctcctattatcgaagaactgcatttt

SEQ ID NO: 91566 - DNA, 368 bp, Homo sapiens
gaaacaagggaattctaatatctgctgtgttaatactaatatctgctctattgctataggaccaattgctgcgacagaaacccaaaataagagtagcagagcaaggcaaaaatttatttcctctattcctgaaacaagagcttgagaaacccatgcccctgatatggaagctctagtgttaggaactcattgttctgccagtgccatagccagtgacgtagccgagtctgtctggggtaggtggcccatcatcacattctgctggatctgctggatccacattccagctgacagaagggaaaaaaggggagtgaaacaaggacttctatcttttatgggcatactcagcattgtgttagagctggctt

SEQ ID NO: 91567 - DNA, 285 bp, Homo sapiens
ttactctgaggttctcgcggcaagacccaaatggacagtgatttggctgccagctggtgttaaaaacaagccaactccaagaaagttatggattacctctaagtgagaaaaaggaagcattagaacaacaaagaaaagaacaaaagactcaagttctccagcccccaaaattattccatctttatgaaggcaacactgatctccacgagcacaatcatccaaacggagatgggaacccctgttctaactctctcagaggcctgaagttagttttctagcactctc

SEQ ID NO: 91568 - DNA, 478 bp, Homo sapiens
tagctaggaccacaggtgcatgccaccacacccagcagaaagcggtttcttgagatggaatctactattggtaaagatgctgtgaacattgttgaaatgacaacaagggacttagaatataacataatcttaatttataaaacagtagcacagtttgaaaggactgactccaattttgaaataagttcctctgtgggttaaatactatcaaacatcatcgcatactacagaaaaatctttgggtaagggagggtcaataaatgcagcaaacttcattgtttaagaaattgccacagctactccaaccttgagcagccgccagatgagtcagcagccatcaatactgaggcaagaccatagctgggtgcagtggttcacacccctaatcccaactactcaggaggctaaggcaggaggactgcttgaggccaagaattcaaggccagcttgagggcaacataatgagattccatccctt

SEQ ID NO: 91569 - DNA, 872 bp, Homo sapiens
tggggcacactcacactgatggtgatgggcagctatgcacaggaaatttggatgccactttgtttgcaaggcctgggacttcagtgttcacgttcggaggcctttgggaacaaacctttggggtacaggtcatgcagcagcatgcatcctggcatgcgcattgtctgtgtcatgagggacacaagccatcaagccagtcggcacatgtgcagagggtgcctctgctagtgggagtcctttgagcatgtggcgtccatattaggagggccacagggtggtggtgactgggccagggttttgtggtatcctaaggactgtgttatgggcatatggcgtggacagagcaccctccaatgccctcacacccacactgctgaccaccgtgtcgcaattgtatccagcaggcaacgctcccttttgcagtgtccatcccatgtcccctttttagtatgttcctctaattaggtcctgaggcttctgtctctggagagtggctgtaaattctagctctgtcccgaccaagaggagaggtgttctggtgtgttgggtgggttaggtacagaaaaggcaacacaacaaaacacatcaagtagcagaagcattttattccttacagatccgcgagaagagggttgcccttgaggtcctgacagcaactcaggagacagccgggtgctaaccagtgggtggggaatgagacagagaggacctgtgggactgtgcctttgttacggtccatgggccttatccctcaggctttcccagcgtggttgtggattaggtagacctgagcagtggggagaactgatttacatgactgatgttggccagtaggtttcattatggtcagcagctgtggggtgtgttgggtt

SEQ ID NO: 91570 - DNA, 448 bp, Homo sapiens
ggccaggctgggctcgaactcctgaactcaggtggtctgcccacctcagcctcgcaaagtgctgggattacaggcatgagccatcacacccagcttttttttaatgccattttcacacaagaatgtctttgatgaagtagcaaaaattgtcagttttattgaattccaaccctgagtacggatctctttaatattctgtgtaacaaaatagaaatgctcataaagtacttctgcggcaaaccaaagtatagcacctgactcaaggaaaagcaaggaaaagcacatgtgggatcccttgaatggcaagtgaaactagccactagtttcatttttacatgaaacaatggctgtgttgggtgctgaggctggaaggtagacaggggcttggggttggagagcctcgtgggctgcgtttgtgcttgggggccttgagcgcagcccacctttg

SEQ ID NO: 91571 - DNA, 410 bp, Homo sapiens
ctccttgtactgatgacattccaaagaagattctcccgttatctttgagttctcacttttccaactctcagctcattcctatttttattgttatacctgtcaccaaaatccacatggtggaaaagaatgatcctccatttttggcaaggaggtttaaaggatcttcctccatgattgctttcatcacagttgacccaaagctatagaacaatacttttaaacccccaccaattctttcagatgatgaccaggagccatgtgtcttactgaacagaaacctctaccattcatccttccctgaatccaacctccagactaaggtctgggcatgtacctccttcttctgggtgtctccatctgttgaatgtccttgctcaacatgctggtaagaaggaaatgaacttttgttg

SEQ ID NO: 91572 - DNA, 443 bp, Homo sapiens
ctttgcgactggttcagggctctttgggggagccgaggctgccgaggttacccgggtttctttccccttttaggtttccctggcgagtcgtctggggtgggcaggcctctgagaaggtgggattcacggcctcatttctagtttcttgggtcctggagttcctttgcttgtgctaactcgtgcagtgtgcgggccggcctgtttcacttgaggccgaggaactctcaagaacaaaagctacttgcttttcctccttgggcccctccctctccccgtgctcctccgccgtcctcctctaaaactacctgggaggggggagccttccccgtcggctctggaaagactcctgaggaagtcgggccctccttactgtcttgtcttataaaagtctgcaaatcttttcaagttttcttaaaacaagtgcactttcagctccattcctg

SEQ ID NO: 91573 - DNA, 448 bp, Homo sapiens
gagcgatcaaatggaggaaggtgtacaagggggagtcgtgcctagacgtggggatgcatgctacactgcgggtgaaccttgaaaccatgatgctgagtgaaagaagccagacacacaaggccacatagtgtacgattccactttcatgaaatgcccagaacaggcaaacccatggagacagaaagcagattggtggttgccagaggctggaaggaggggacctggggagaacctactccatgttgatggggtctccttttagagtgatgaaaatgttttggaattagatagaggtgatggtcgcacagcactgggaatgtcctaaatgtcagagctgcctactttatagtggttaattttatgtaatgtgaatttcttctccatttgaaaaatgtgggaactaaaaaaatggagtagtccccccttaatcttgggggatatattctaa

SEQ ID NO: 91574 - DNA, 349 bp, Homo sapiens
agctgggttcgaggagaaaggccgagaggactccagcctgggaatcctcctccttgaccccgggtagatgtacagggtagagatacgtgggccaggttaaagccagaaagctggggtgcccggagcgtctcgtcaggtcccagacttgctccctctgggcagtttcctgggacttgcttcctcaccccagggtcagctcagctaagccccagagaccagctcttataaagagggatttcacaggaaatttggaatgtctggcttctcctaatgagggctgctcacacattgcgggtgggaatgtcagatgtgcagtgcagccactgtggaaaacagtcactaggttaaa

SEQ ID NO: 91575 - DNA, 409 bp, Homo sapiens
tgaggtggaagaattgcttgggccgtggttcaaggctgcagtgagctgtgattacaccactgtacgccagcctggggaacagagtgagatcctgtctcaaaaaaaaataaatgaataaataaaaataaaaaacaaaaaagccaggcatagtggccgacgcctataatcccagcacactgcggggggctaaggctggtggattgcttgaggctacgagttcgaaacaagcctgggcaacatggcaaaaccccatctctacaaaaaatacaaaagtttgccgagcatggtggaatgcgcctatagtctcagcgccgggggaggtggaggtgggaggattgcttgagcctgagcctgcgggtcgaggtctcagtgagcggagatcgtgccactgtactatagcctgggcaac

SEQ ID NO: 91576 - DNA, 222 bp, Homo sapiens
taatccactggcttccagtggatttttttagtgtcaagaaaataattttgattggttcatctttaaggaatgtgttaagaataaagcatgtctacctgtcttcagtataccagctaactatagtaggaagaaatatagtagtctacttagatcaactataattctttaatgcagaaaaagtttaaagtatttaccttatttttagcccccatccccttaagt

SEQ ID NO: 91577 - DNA, 356 bp, Homo sapiens
agactgccattcaggaatggctagcactcaacctttctcagggagatctcaggaagtaaggcataaagagagatggtgggagatttatgtggatgggatcggggcccagggaagctaaacagaatccctcaaggccttttccacactgtagaaaattgtgctggcatttggacaagtcaccctgcttaatatcaaacatctttgccttaagcattattttttcaaaggaaataacgtgttaatacttcccaaccagtgtataatgtttctgtttgttattagctcgtactatttaagttcagttgttaagtttgaaaatactagaacattaaaaatctgcagaatgagaaattatt

SEQ ID NO: 91578 - DNA, 315 bp, Homo sapiens
ggacagtaaagtccttcctggggtggatgctctcggcaatatttagtacttttctgccttttagttcctgtgcacagcccctaagtcaacttagcattttctgcatctccacttggcattagctaaaaccttccatgtcaagattcagctagtggccaagagatgcagtgccaggaacccttaaacagttgcacagcatctcagctcatctttactgcaccctggatttgcctacattcttcaagatcccatttgaatttcttagtgactaaaccattgtgcattctagaatgcatatatgcatattttgcctgt

SEQ ID NO: 91579 - DNA, 428 bp, Homo sapiens
  misc_feature (405)..(405): n is a, c, g, or t
  misc_feature (407)..(407): n is a, c, g, or t
acccgaccaccgcccagctgagcccccgcggctccactgcgcagaaggtgcactggaggccctgcccgttgcccgccccgcggggtgccgagaagtcaacctgaataaacgccttgtaaaaagaacttcctaatggaaaaaatatcttatgatttccattctcaacgctcttcagaggactaaaagataaaggccatgatggattcattcaacaagtcctaatcctgcgccctggtgtgtgccagaccctgctccccgcgaggggatccacgagcgaccctcaccagggcctgtcatggggtggggggagtggggagggatagcattaggagatatacctaatgtaaatgatgagttaatgggtgcagcacaccaacatggcacatgtatacatatgtagcaaancnctgacgttgtgcacatgtacc

SEQ ID NO: 91580 - DNA, 365 bp, Homo sapiens
tcaggggtaagttttcttccttggagactcttgtcttgaaaaagtgatactagatcaccatttggcaagataattacaaaaggcagatagagtaattattttacatagctgttatagggtgactaagatctcagggaatgactgtgttctgtaatccacttgccccactcaataccccaagttttatacaagccaaagatgcttggagcagaatctgctacctgaggctccagggccttggctaaggggaaactaatacttaactttttaagtggtcattgatgacatcccactcctttctgagatgggtatgatttgaaaggcaggtgtattcatggagagcagggcttgggacctttgctgca

SEQ ID NO: 91581 - DNA, 363 bp, Homo sapiens
tctatttagagacaggccctcactatgttgaactcaagcgatcttcccacctcagcctctcgagtacctgggactactggtgtgtgccaccgagcccagctcatgacccattttcaattctcatcttccaaaagaaaaagatttctggactcacgaatctgtagcaagatccaggactcaggagagaggacatgtggagctccatgacggtcagtgccaagtctctagtcctctggaatgaactcaattttaatggagcatgaagatttacctacatattagaggcattctacaaccttggatgaaaaaaagaaaaacacattctctgcttcaattccataataaatttggatttttcagtcg

SEQ ID NO: 91582 - DNA, 594 bp, Homo sapiens
ttcatttaaaccaacatagcctagttatttttagttagagatgaatttgctttgatgtgattttttttctttttctgcaatgaagctatgtccaaagaatgtacttttcttttctgtcccctgggttgaagcaattcttgtgcctcagcctcccaagtagctgggactacaggcacacgccaccatgcccaactgattttttgtatgtttagtagagacggggtttcgccatgttggccaggctggtcttgaactcctggcctcaagtaatccacctgcctcagcctcccaacatgctgaaattacaggtgtgaacaaccacgcctggccagaaagtacttttcgagaagtttcatatagattcttttcctgttgcttagaaatagatggcagttattcagagaaccagagaaactaaagtgtgtacatttcccagtcaaaaaaaaatacgataaaaatattgactatgagcagatatattgtctggattgtctgttaattatccgtgttcacatgcagtgagtaatatttggcacatttttttctacattccttattttcatccagagtataattaatgtcttaatataccag

SEQ ID NO: 91583 - DNA, 145 bp, Homo sapiens
tcactttttgattcatcagaaccggggtttagcaaacacagtcagcaggccacatctggcccaccaccagattttataaagtaattgggatacagacaatctcatttatgtattatctgtggttgcttttctttaataaatttca

SEQ ID NO: 91584 - DNA, 182 bp, Homo sapiens
gcagtgtggaggtggcccagggacacggggtgcctactgtgttttgcctgaactgtgttttaagaggctgcataaccaagcagttgctgtgcacgtacagcttggcatctgagtctcccaccccccggcaccccatgtttgttacctgcctggtgcctgtaggcatttgagtttgtagcccc

SEQ ID NO: 91585 - DNA, 110 bp, Homo sapiens
caaagcactgcagtaaaagaaggcaaataaatgtttcattaaaaaattgcttgctttcactctaatgccttacagagctgggagctgtttttgatatgcatatgccgatc

SEQ ID NO: 91586 - DNA, 631 bp, Homo sapiens
tgcaacctccacctcctggcctcagcgtcccgagtaattgggattgcaggtgtgggccaccacgcccggctaatttttgtatttttagtcgacagggttttgccatattggccaggctggtcttgaactcctgacctcaagtgatcggtccgcctcagtctcccaaagtgctgaggttacaggcgtgagccactgcgcccggctggcatttcctaccttactccatagtaaaatagtaagtgttggcttctcagaattgccagcagtccatgtgttatatgtgtatgtaattgctatttgcttttcttcccaaaacatacagaattagagtgaatagtataataaattgaactccccatgtacccatgcccaatttagcaatattagcacatagtcaatattatttcctctgtatcccttccattattttgaagcaattctgttattgtcaaccttaaagcggtcattgtatatctgtaaaatacaaggactttaaaaaaaaaaacatagccgaccgggcatgggtgggtcacctgtaaatctcaacattgggaggccaaggcagggcagatccacttgagggccagggagttcgagaccagcctggccaacatggtgaaaccctgtctct

SEQ ID NO: 91587 - DNA, 602 bp, Homo sapiens
cttttttctttagatttctctctcttgaacatcttttttcaataatgcctttgccatctcttgtcttataccttaaggcccaatccttgaccctctgttttttatcctatactcattattctgaaagagctaatttattcacaggaatcattagctctaatctcatgtgagttaaatcttcagactcaacttttaaaaacaatctcatctgtccctctaaaaattagcttcctttagaacctcttctccttggcaatatattagtgatactattgttatcttcacactaaagattcaaaactttagtttttgttttaggaaagttttttatttttacatttctttcatccttcataattacccagtcatcatgaactttgtagttatctatttcttcattaagaatccttgaggcctaggtgggcggatcatgaggtcaggagttcgagaccagcctggccaacagtgaaatcccatctctactaaaaatacaaaaattagccgggtgtggtagtgggcgcctgttgtcccagctattcaggaggctgagatggaagaatcgcttgaacccgggaggcagaggttgcagtgagctgagatca

SEQ ID NO: 91588 - DNA, 219 bp, Homo sapiens
gttggatacaaaaggctgcagaaaaagcacatattgaatgacctagagtgctctcctaggtttccagtaacccattttgaatctcactttgcctttccctttctcttaccttacctacatttgatgaagctggaattaggtacaatatatggaaataatttttctaattaaagtatttataaataataaagccctcacatttggaattatgattatgac

SEQ ID NO: 91589 - DNA, 324 bp, Homo sapiens
ggtgtctgccctataaaggagggaaattagtggcaggtggtgggaatattccaggcagctggggcaaagtgcttggccctcatttctgaaacctaatgctttagctttccttttccaacgtcaaacgaaagtgccaaagacagggctttgaggatgcctacactttgcacttgggaagaggagttaccacaacaatggtgagagaagactaatatggagaaaattgcagcagtctccagggctctagaaaacacaggaggaacctcccaaaggcctcataacatgcttcctgcatgggaagaggcaagaatagaagggaagaga

SEQ ID NO: 91590 - DNA, 166 bp, Homo sapiens
ccttccctaacatccacaccctttgctcttccccaccgcaggacccagctctcattcctttgcagcgtttatcaaactgtgcaagtactgtgttcatctgctgacttgttcctgtgttgaaacatgggccccatgagggagggactgggcctgacacatttgccac

SEQ ID NO: 91591 - DNA, 246 bp, Homo sapiens
cgtataagtattaaatgctagaattctagcatttaatttctaggagaaatgtgattcatagttcaggacataagaccaagtagtactactgtttcataaactacactcttacatttccagttaacccattttcttctcagcccctgactttacctattcattcagaaagtctggctcccacctgctaaaccagagtgcctcatgcttattttggtctgttttggatatctttcttatcctggaggt

SEQ ID NO: 91592 - DNA, 564 bp, Homo sapiens
caagggaggctccacacaagaaggagaggagaactggttattggtgagaactagtactgtctaccacacaaatctagatctcttttgtgagccccagatctgtgcatccaactgctctctcaacatctttacctaaatgttccacaggcaccccaaacccaatgtgtccaaaattaaactcattattttttcccaatcctataaccccttattttatattatcaacattagttgatggatacaacgcaggaaacctagttattgccacatcccctctctctcttactttcctctcacacctaataaatgactagactcatcacctatctgctctacctcttccccatggccattgccgctattcagatcatcctagtttctcacttggaactctgcaacaccaaaggattcttcacccactgtctggcacctcaccagtcccccctacactctgttgcctaaacccaaatgtgcttgtgttagtcctcttcagcagtctttccattgcctatacgggtaaaatatgtttagggcccgccattacctggttttatctatcctctc

SEQ ID NO: 91593 - DNA, 509 bp, Homo sapiens
tgagccagtgtgtgtatagctttagagaggctggagaagtcttaccagctgcttctgggtgcagtttcactgataggtcaggtggtggccacaaagccattttctgcttttaggaccatctccagatgggcacctcagtgatgactgtaaatacttgtttcttctcccattctccccacaagtaatcctccctggttatctacacatattgctctttggaggctgataaaatagtgttccaggctttagacaaagaacacaactgacttcattctgactgcctcccttatgtaccatgaaagtaagagagagagagagagagagagcagcagagcttacagtctgtctataggtattttttctgtatcagaaagggagagatgtcatctttaagataggagttagggctaggcatgatgagaggccaaggcaggaagatcacttgaggccaggagtttgagatcagcctggtcaacatagcaacacttccgtctctacttaaaaaaaca

SEQ ID NO: 91594 - DNA, 335 bp, Homo sapiens
ccccagacctgctgggtcagagactctggggggcttggagagctgcgttttgtgagtcctccaggtgattctgagtcacactcaggtctgagatccaccagctgcagctgcgtgtggccgtcctgccgatcaactaccactatttatagcaagcattctgtgatccttcactcctgaaatgaaacccaagtgtacctgtaacacccacctacgcaggaactccaagtcagtacgatgccccaaccgcagtgaaatggagaaacgcacacctacgcaggaattccccccaagtcagtacgatgccccaacctcaatgaaacggagaaacgcacacc

SEQ ID NO: 91595 - DNA, 358 bp, Homo sapiens
  misc_feature (357)..(357): n is a, c, g, or t
ctagagatttttaaaattatagacaaataaatgttcaactttacgttaataatttgaaagcctagaggaaatggagaaagtgtccataaaaatattaaccctattgactccaggagaagtagaaaacctgaaaaagacctaagacccagctgatttagcagccacacttgtgtgattatgtgtttgtgtttgcttttattaacgcgtgttttgtggttaaatattagtttgaaataattttttaggctcaaaattttaaacaaggctgttttctttttgtttttgttttttgagatgggatcacttgaacccaggaggcagaggtttcagtgagccaagattgtgactgcattccanc

SEQ ID NO: 91596 - DNA, 213 bp, Homo sapiens
ggggctggggaagaggaagtggtgaggggacggcgggcacgcaggctttgccctaactcaaggagacagcattcgctactgaatgccccgctgcgttcaagtcccggagcgtgtttgttttgaaattgacaattgtcagatgcatgctgcttctagtctctcagagaagggggatttataaagctttgctgcctacgccgtggggtaggggtt

SEQ ID NO: 91597 - DNA, 776 bp, Homo sapiens
tgagatggagtcactctgtcgccgaggctggagggcagtggcgtgatctcggctcactgcaacctccgcctcccaaattcatgcaattctccctgcctcaacctcccaagtagccgggattacaggcgcccgccaccgtgcccggctaagttttgtattatttagcccggcccatatccaaatttaaagaaacaaaatttgttttaaaaattcctaccaaaaatataggcaactcaaaaaaaatatgggtggctgggcatggcggcccaacgcctgtaatctcagcactttgggaggctgaggcgggtggatcctttgaacccaggagtttgagactagcctgggtaacatggtgaaactccatctgtacaaaaaaagttagctgggcatggcggcccacacctgtagtcccagctacttgggaggctgaggtggaagtatcgcttgagcccaggaggtcaagactgcggtgagtcaagctcacaccactgcactccgcaaatgggtaaaagccttttcacaaaagatatacaaataaataatcatctgaaaggtgctcaacatcattatcaggtaaatgaaaattaaagccacaagaagatcactacacacctgatctgaatggctaaaaataaattgacaataccatcatgggatgaacatggagcaaatggaacttggacgcactgccagtagtaacatgattcaagcattttgaaaaattatttggtggtttctaataaatctaaatatatatacttgccctatgacccagc

SEQ ID NO: 91598 - DNA, 754 bp, Homo sapiens
aacccggaagcggatcgcgtggagtgaaggtcctaccacggcgcgtgagtttcgctctgccttggattaagtctgcacttcccaggtccccggcgcttctgcccctgggacgtgggatccccacggacctggaaattctcgcctgtcttcccttcacccagagcaaattgagacgtcccgaggaagaccaaggcagcctattgggccttccaggcaatcacatgggaatcagccacacgtccttcctcctcacctcagaacatctcagaataacttggtgaaatgtctcccactgtgagcctcagtgagcccacctgtaacatagaggcctcgcccctgagctctacaatcctgtgtccagttgtctcctcagctgtctcctgggtcatcaaacaggcatccccaccttcaggtgtccacgagtggctttctaaacccccaaacacatttccttgcagtctgcacatctcagatgagggtgactacgtacttccggaaacggccgaacttgacagcatgtattttaaatttgtgaaataaattactttatttgtacacacaaaaacaaaaaaaaaaatgggaggaactcatagggggggggcggaaaaaacaaggtcaatggaattggccccaagggtccataagcgcggttccgggacccggttttctggtccaagggggaaaattgcgcggccccctataggggccgaataaattccgtaagccgggtaacctgcttagattgtcgcaaagc

SEQ ID NO: 91599 - DNA, 606 bp, Homo sapiens
aacccggaagcggatcgcgtggagtgaaggtcctaccacggcgcgtgagtttcgctctgccttggattaagtctgcacttcccaggtccccggcgcttctgcccctgggacgtgggatccccacggacctggaaattctcgcctgtcttcccttcacccagagcaaattgagacgtcccgcctcgcccctgagctctacaatcctgtgtccagttgtctcctcagctgtctcctgggtcatcaaacaggcatccccaccttcaggtgtccacgagtggctttctaaacccccaaacacatttccttgcagtctgcacatctcagatgagggtgactacgtacttccggaaacggccgaacttgacagcatgtattttaaatttgtgaaataaattactttatttgtacacacaaaaacaaaaaaaaaaatgggaggaactcatagggggggggcggaaaaaacaaggtcaatggaattggccccaagggtccataagcgcggttccgggacccggttttctggtccaagggggaaaattgcgcggccccctataggggccgaataaattccgtaagccgggtaacctgcttagattgtcgcaaagc

SEQ ID NO: 91600 - DNA, 751 bp, Homo sapiens
aacccggaagcggatcgcgtggagtgaaggtcctaccacggcgcgtgagtttcgctctgccttggattaagtctgcacttcccaggtccccggcgcttctgcccctgggacgtgggatccccacggacctggaaattctcgcctgtcttcccttcacccagagcaaattgagacgtcccggtaagagtctggaagttgcttgcttttgggtttgaagtcgctcggaggctggtcccgtccccggtctttctgctatagggcaatgtatacacttcctatcgcgtatttttcctgctcaaaacatttttctgactattcccgccccgtgctttttaaagtcctcacccgcgaggtggattccagccctgggcgcctcccagcctcgccccagttggcacctggagcgcggcgccccgccccagccccggggaggctgcgtcctctgcctggtcctgggatcctgcaggtcccacctttgtcttagggtgccgtcgcccaccacgtccctcctggtgccgggccctgctgctccccaagtcttcgcttcccctgagccagggttggggtgggtcgcaggggcttgtcctatgataccaggtgttctttcctgtccagctccaccccctggaaaatgcgcttctacgggatgcaggcgtcttactccaaacccgcctgtgattactccaaacccgcctgggccaaagggatcaggagatagagagagggactgagagagcagtagaaaaccaga

SEQ ID NO: 91601 - DNA, 358 bp, Homo sapiens
aacccggaagcggatcgcgtggagtgaaggtcctaccacggcgcgtgagtttcgctctgccttggattaagtctgcacttcccaggtccccggcgcttctgcccctgggacgtgggatccccacggacctggaaattctcgcctgtcttcccttcacccagagcaaattgagacgtcccggagaagaccaaggcagctattggccttcagcaatcacatgggatcagccaacgtcttctctactagacattagatacttgtgaatgctccatgtgagctagtagccccttaataagggggatagccgaagtattagtaaatccctaatgctaaaataagttttcttttttgggggggt

SEQ ID NO: 91602 - DNA, 358 bp, Homo sapiens
taaatttcaaatatccattctgctatgtacttctccacttcaaaatctttctatgttttcttaaagttttttgaaaaaattacttatattctcaagtagaaactggttcaaatgtatacccttgctttagagtcttgatacctttattctgacccttaaacctaatgacaaaaaaatcccttctttatctaaaattccttcctactaacacagctttattttttttaaatagagtagtttatctaaaattccttcctactaacacagctttattattttttatatagagtttctacaaatacatgatttaacattgtcatgcaccacatgacatttcaatgacaaatcacatgtatga

SEQ ID NO: 91603 - DNA, 2123 bp, Homo sapiens
tccagttgtcctgagagtgatgactggctccaccttgatgtggctcacataaattcagaaagtatgatagcagtgtaggtggttagcagcacctcataaggtccttcctagcaaggttaaatactgcagagctaatagattggagtgacttctgacctagtcacatcttaaaggaaaacttttcagtttttactttaaaaggatgctaatgactagccaatgctctaggaagacattgagaccagccaacttcttgccttgataactactgaagagacattgggtggctggattttgaaagcagacttctggttataggtgatgcaacttgaaaaacaatcctgaaacatgaaacaagaataataatatttaaatgtaacttaatcattatacctctttatccatcaaagtgaattcattccattccctttcatctgtgctcatactttgcatcagatattgggtaaaccaaagtgtgtaggaagaaataaatgttttcatagtcattactctttacaatgggagtgctaaaattcaagcacatctttttcagaagctttgttaaatcaagtggagtatcccagatagttttcaccttccttctgattccatgttgcttgactctgaatttcagagcacctcctgttattccaaatgtgcctttcctctgggcctggaatgccccaagtgaattttgtcttggaaaatttgatgagccactagatatgagcctcttctctttcataggaagcccccgaataaacgccaccgggcaaggtgttacaatattttatgttgatagacttggctactatccttacatagattcaatcacaggagtaactgtgaatggaggaatcccccagaagatttccttacaagaccatctggacaaagctaagaaagacattacattttatatgccagtagacaatttgggaatggctgttattgactgggaagaatggagacccacttgggcaagaaactggaaacctaaagatgtttacaagaataggtctattgaattggttcagcaacaaaatgtacaacttagtctcacagaggccactgagaaagcaaaacaagaatttgaaaaggcagggaaggatttcctggtagagactataaaattgggaaaattacttcggccaaatcacttgtggggttattatctttttccggattgttacaaccatcactataagaaacccggttacaatggaagttgcttcaatgtagaaataaaaagaaatgatgatctcagctggttgtggaatgaaagcactgctctttacccatccatttatttgaacactcagcagtctcctgtagctgctacactctatgtgcgcaatcgagttcgggaagccatcagagtttccaaaatacctgatgcaaaaagtccacttccggtttttgcatatacccgcatagtttttactgatcaagttttgaaattcctttctcaagatgaacttgtgtatacatttggcgaaactgttgctctgggtgcttctggaattgtaatatggggaaccctcagtataatgcgaagtatgaaatcttgcttgctcctagacaattacatggagactatactgaatccttacataatcaacgtcacactagcagccaaaatgtgtagccaagtgctttgccaggagcaaggagtgtgtataaggaaaaactggaattcaagtgactatcttcacctcaacccagataattttgctattcaacttgagaaaggtggaaagttcacagtacgtggaaaaccgacacttgaagacctggagcaattttctgaaaaattttattgcagctgttatagcaccttgagttgtaaggagaaagctgatgtaaaagacactgatgctgttgatgtgtgtattgctgatggtgtctgtatagatgcttttctaaaacctcccatggagacagaagaacctcaaattttctacaatgcttcaccctccacactatctgccacaatgttcattgttagtattttgtttcttatcatttcttctgtagcgagtttgtaattgcgcaggttagctgaaatgaacaatatgtccatcttaaagtgtgctttttcgactaattaaatctttgaaaag

SEQ ID NO: 91604 - DNA, 2809 bp, Homo sapiens
  misc_feature (1975)..(1975): n is a, c, g, or t
  misc_feature (2764)..(2764): n is a, c, g, or t
tccagttgtcctgagagtgatgactggctccaccttgatgtggctcacataaattcagaaagtatgatagcagtgtaggtggttagcagcacctcataaggtccttcctagcaagggatgctaatgactagccaatgctctaggaagacattgagaccagccaacttcttgccttgataactactgaagagacattgggtggctggattttgaaagcagacttctggttataggtgatgcaacttgaaaaacaatcctgaaacatgaaacaagaataataatatttaaatgtaacttaatcattatacctctttatccatcaaagtgaattcattccattccctttcatctgtgctcatactttgcatcagatattgggtaaaccaaagtgtgtaggaagaaataaatgttttcatagtcattactctttacaatgggagtgctaaaattcaagcacatctttttcagaagctttgttaaatcaagtggagtatcccagatagttttcaccttccttctgattccatgttgcttgactctgaatttcagagcacctcctgttattccaaatgtgcctttcctctgggcctggaatgccccaagtgaattttgtcttggaaaatttgatgagccactagatatgagcctcttctctttcataggaagcccccgaataaacgccaccgggcaaggtgttacaatattttatgttgatagacttggctactatccttacatagattcaatcacaggagtaactgtgaatggaggaatcccccagaagatttccttacaagaccatctggacaaagctaagaaagacattacattttatatgccagtagacaatttgggaatggctgttattgactgggaagaatggagacccacttgggcaagaaactggaaacctaaagatgtttacaagaataggtctattgaattggttcagcaacaaaatgtacaacttagtctcacagaggccactgagaaagcaaaacaagaatttgaaaaggcagggaaggatttcctggtagagactataaaattgggaaaattacttcggccaaatcacttgtggggttattatctttttccggattgttacaaccatcactataagaaacccggttacaatggaagttgcttcaatgtagaaataaaaagaaatgatgatctcagctggttgtggaatgaaagcactgctctttacccatccatttatttgaacactcagcagtctcctgtagctgctacactctatgtgcgcaatcgagttcgggaagccatcagagtttccaaaatacctgatgcaaaaagtccacttccggtttttgcatatacccgcatagtttttactgatcaagttttgaaattcctttctcaagatgaacttgtgtatacatttggcgaaactgttgctctgggtgcttctggaattgtaatatggggaaccctcagtataatgcgaagtatgaaatcttgcttgctcctagacaattacatggagactatactgaatccttacataatcaacgtcacactagcagccaaaatgtgtagccaagtgctttgccaggagcaaggagtgtgtataaggaaaaactggaattcaagtgactatcttcacctcaacccagataattttgctattcaacttgagaaaggtggaaagttcacagtacgtggaaaaccgacacttgaagacctggagcaattttctgaaaaattttattgcagctgttatagcaccttgagttgtaaggagaaagctgatgtaaaagacactgatgctgttgatgtgtgtattgctgatggtgtctgtatagatgcttttctaaaacctcccatggagacagaagaacctcaaattttctacaatgcttcaccctccacactatctgccacaatgttcattgatctttgtgacctgtatcttgtgccaacctcctatctcatcctgtgactaagaatncttaacctcctgggagggcagctcaggaggtgtcagcctcattttacccagccctattcaagatggagtcactctggttccaatgcttctgacagcagtagagataacacagtattcttgcaagagaacagagctcctgatcacctgtgtgcgtcctttgagtggatggcagctgcatctctgcattacagctagttagaatgatgagtccttgctatgcctcaagcactgtttcgagtgtttgatgtctattatctcacttcatcctcaccaggaccccatccgagccttaatttcagttgacagtaactattggatccccaggaatatgtttgcatatttggggagaaaatactattggaggggaacagaaatgctactaagggtctcactgtgtcacccaggctggagtccatcaaagctcactgcagccttaaccttctgtgctcaagggatcctcccacttaagcctcctgagtagctggaactacaggcatatgccaccgagcctggctaatctttgatttttttgtacagattgtgtctccttatgttgctcaggctggactcaaacttctggtctcaagcgatctttccatcttagcttcccaaattgttggaattatggacatgagccagtgtgcttggcctgatttttttttttttttaatgagaaaaacgttccttaagaaaagtttcattgtaagacgaggacttgctatgttgccagtttggtcttgaactcggtctcaagtgattctcctgccttgggttcccaaagcgttgggncggcagatgtcagccaccgcgcctgccttattcttataaactcaa

SEQ ID NO: 91605 - DNA, 948 bp, Homo sapiens
  misc_feature (903)..(903): n is a, c, g, or t
atcagaaatgctgtagcataataaagggagcagatgaatgactgaagccctacagctccactaaagattagagtaaaatctgcacttcaaaagatcctgtattcttgcaagagaacagagctcctgatcacctgtgtgcgtcctttgagtggatggcagctgcatctctgcattacagctagttagaatgatgagtccttgctatgcctcaagcactgtttcgagtgtttgatgtctattatctcacttcatcctcaccaggaccccatccgaggatttgcgacttgagtagcattgacggtggtgatggggagcctggcaagacagcagatgtctacagcaagaggagggaatgggaagctgctctgatggcgtaatcatcaaggttgctgataaaatggccttaatttcagttgacagtaactattggatccccaggaatatgtttgcatatttggggagaaaatactattggaggggaacagaaatgctactaagggtctcactgtgtcacccaggctggagtccatcaaagctcactgcagccttaaccttctgtgctcaagggatcctcccacttaagcctcctgagtagctggaactacaggcatatgccaccgagcctggctaatctttgatttttttgtacagattgtgtctccttatgttgctcaggctggactcaaacttctggtctcaagcgatctttccatcttagcttcccaaattgttggaattatggacatgagccagtgtgcttggcctgatttttttttttttttaatgagaaaaacgttccttaagaaaagtttcattgtaagacgaggacttgctatgttgccagtttggtcttgaactcggtctcaagtgattctcctgccttgggttcccaaagcgttgggncggcagatgtcagccaccgcgcctgccttattcttataaactcaa

SEQ ID NO: 91606 - DNA, 796 bp, Homo sapiens
  misc_feature (751)..(751): n is a, c, g, or t
gactagctggtctaagatgtaatcatgttagcaagaggacaggattactgacattaaaaggccaaaagacagagaggtgaggatcttggttgtattagttacggggctgttataaccactaggatttgcgacttgagtagcattgacggtggtgatggggagcctggcaagacagcagatgtctacagcaagaggagggaatgggaagctgctctgatggcgtaatcatcaaggttgctgataaaatggccttaatttcagttgacagtaactattggatccccaggaatatgtttgcatatttggggagaaaatactattggaggggaacagaaatgctactaagggtctcactgtgtcacccaggctggagtccatcaaagctcactgcagccttaaccttctgtgctcaagggatcctcccacttaagcctcctgagtagctggaactacaggcatatgccaccgagcctggctaatctttgatttttttgtacagattgtgtctccttatgttgctcaggctggactcaaacttctggtctcaagcgatctttccatcttagcttcccaaattgttggaattatggacatgagccagtgtgcttggcctgatttttttttttttttaatgagaaaaacgttccttaagaaaagtttcattgtaagacgaggacttgctatgttgccagtttggtcttgaactcggtctcaagtgattctcctgccttgggttcccaaagcgttgggncggcagatgtcagccaccgcgcctgccttattcttataaactcaa

SEQ ID NO: 91607 - DNA, 2038 bp, Homo sapiens
tccagttgtcctgagagtgatgactggctccaccttgatgtggctcacataaattcagaaagtatgatagcagtgtaggtggttagcagcacctcataaggtccttcctagcaagggatgctaatgactagccaatgctctaggaagacattgagaccagccaacttcttgccttgataactactgaagagacattgggtggctggattttgaaagcagacttctggttataggtgatgcaacttgaaaaacaatcctgaaacatgaaacaagaataataatatttaaatgtaacttaatcattatacctctttatccatcaaagtgaattcattccattccctttcatctgtgctcatactttgcatcagatattgggtaaaccaaagtgtgtaggaagaaataaatgttttcatagtcattactctttacaatgggagtgctaaaattcaagcacatctttttcagaagctttgttaaatcaagtggagtatcccagatagttttcaccttccttctgattccatgttgcttgactctgaatttcagagcacctcctgttattccaaatgtgcctttcctctgggcctggaatgccccaagtgaattttgtcttggaaaatttgatgagccactagatatgagcctcttctctttcataggaagcccccgaataaacgccaccgggcaaggtgttacaatattttatgttgatagacttggctactatccttacatagattcaatcacaggagtaactgtgaatggaggaatcccccagaagatttccttacaagaccatctggacaaagctaagaaagacattacattttatatgccagtagacaatttgggaatggctgttattgactgggaagaatggagacccacttgggcaagaaactggaaacctaaagatgtttacaagaataggtctattgaattggttcagcaacaaaatgtacaacttagtctcacagaggccactgagaaagcaaaacaagaatttgaaaaggcagggaaggatttcctggtagagactataaaattgggaaaattacttcggccaaatcacttgtggggttattatctttttccggattgttacaaccatcactataagaaacccggttacaatggaagttgcttcaatgtagaaataaaaagaaatgatgatctcagctggttgtggaatgaaagcactgctctttacccatccatttatttgaacactcagcagtctcctgtagctgctacactctatgtgcgcaatcgagttcgggaagccatcagagtttccaaaatacctgatgcaaaaagtccacttccggtttttgcatatacccgcatagtttttactgatcaagttttgaaattcctttctcaagatgaacttgtgtatacatttggcgaaactgttgctctgggtgcttctggaattgtaatatggggaaccctcagtataatgcgaagtatgaaatcttgcttgctcctagacaattacatggagactatactgaatccttacataatcaacgtcacactagcagccaaaatgtgtagccaagtgctttgccaggagcaaggagtgtgtataaggaaaaactggaattcaagtgactatcttcacctcaacccagataattttgctattcaacttgagaaaggtggaaagttcacagtacgtggaaaaccgacacttgaagacctggagcaattttctgaaaaattttattgcagctgttatagcaccttgagttgtaaggagaaagctgatgtaaaagacactgatgctgttgatgtgtgtattgctgatggtgtctgtatagatgcttttctaaaacctcccatggagacagaagaacctcaaattttctacaatgcttcaccctccacactatctgccacaatgttcattgttagtattttgtttcttatcatttcttctgtagcgagtttgtaattgcgcaggttagctgaaatgaacaatatgtccatcttaaagtgtgctttttcgactaattaaatctttgaaaag

SEQ ID NO: 91608 - DNA, 494 bp, Homo sapiens
tttttttcctttgcccaggctggagtgcagtggcacaatctcggctcactgcaacgtctgcctcccgggttcaagtgattctcctgcctcagcctcctgagtagctgggattatagacgcacgccaccatgcctagctaatttttgtatttttagtagagacggggtttcaccatgttgatcaggctggtctcgaactcctgacctcgtgatctgcccaccttggcctcccaaagtgctgggattacaggcgtgagccactgcacctggcccaggacgtagacatctttagtggggtattgttctgcccaccacagatactattgcttctggtgttaaataacattttatttgagtagataagaaatatgaccctgtatcttcccaaaagacaaatggagatcattagtaaacaactcagtcacttcatctggcttccctcactatttcttgtcacctgttgtccagctgcttcagctacggaccatagattgg

SEQ ID NO: 91609 - DNA, 1199 bp, Homo sapiens
gtcgggaaggcggcgggctatccggtcctcggctgcggcgggcaccatggtcggtggcgaggcggctgccgcagtggaggagctggtttcgggggtgcggcaggcggccgacttcgcggagcagttccgctcctactcagagagcgagaagcaatggaaggcccgcatggaattcatcctgcgccacctgcccgactaccgcgacccgcccgacggcagtggccgcctggaccagctgctctccctctccatggtctgggccaaccatctcttcctaggctgcagttacaataaagaccttttagacaaggtgatggaaatggccgatgggattgaagtggaagacctgccacaatttactaccagaagtgaattaatgaaaaagcatcaaagctaagccagaagatttatcacattttcatcatcagctacaggattagaaaggaggctgggatgaatgtgacatagaccacagcagctctcttaagactcctggtattaccaacataaagaggcaggtggaatgagaaggactctgtctagattggcttttttaacattctcattttcccaggagttatcactgtaaaagtatgcatggatatttatgtatttataaatcatgcactctaagatgagttcatcaacattgtaaaagccctcttttctgttttcaggtttttttttttcttatcgacaaggtctcactctgtcgcccaggcagaagcacaaaggtgcagtattggctcattgcagcctcgaactcctgggctcatattttcagggttttttgttttttgttttgtttttttgagacagagtcttgctctgttgcccaggcagtagtgcagtggcgcgatatattttcagtttttaaacgtcagaatttttgtttaaaatgcctttttgggctgggcacagtggcttatgcccataataatcccagcactttgggaggccgaggtgagcagatcacctgaggttaggagtttgagaccagcctggccaacacgatgaaaccccgtctctactaaaaatacaaacaaaattagctgggcatggtggcggacatctgtaatcccagctactcaggaggctgaagcagaagaactgcttgaacctgggaggtggaggttgcagtgagccaagatcgcaccattgcactccatcctgggcgacaaaaatgaaacaccgtctca

SEQ ID NO: 91610 - DNA, 719 bp, Homo sapiens
gtcgggaaggcggcgggctatccggtcctcggctgcggcgggcaccatggtcggtggcgaggcggctgccgcagtggaggagctggtttcgggggtgcggcaggcggccgacttcgcggagcagttccgctcctactcagagagcgagaagcaatggaaggcccgcatggaattcatcctgcgccacctgcccgactaccgcgacccgcccgacggcagtggccgcctggaccagctgctctccctctccatggtctgggccaaccatctcttcctaggctgcagttacaataaagaccttttagacaaggtgatggaaatggccgatgggattgaagtggaagacctgccacaatttactaccagaagtgaattaatgaaaaagcatcaaagctaagccagaagatttatcacattttcatcatcagctacaggattagaaaggaggctgggatgaatgtgacatagaccacagcagctctcttaagactcctggtattaccaacataaagaggcaggtggaatgagaaggactctgtctagattggcttttttaacattctcattttcccaggagttatcactgtaaaagtatgcatggatatttatgtatttataaatcatgcactctaagatgagttcatcaacattgtaaaagccctcttttctgttttcaggtttttttttttcttatcgacaaaaaatgaaacaccgtctca

SEQ ID NO: 91611 - DNA, 1359 bp, Homo sapiens
gtcgggaaggcggcgggctatccggtcctcggctgcggcgggcaccatggtcggtggcgaggcggctgccgcagtggaggagctggtttcgggggtgcggcaggcggccgacttcgcggagcagttccgctcctactcagagagcgagaagcaatggaaggcccgcatggaattcatcctgcgccacctgcccgactaccgcgacccgcccgacggcagtggccgcctggaccagctgctctccctctccatggtctgggccaaccatctcttcctaggctgcaggtgcggacccctgccggccggctgatcctgtcccctatcttccgaccctcaaggcctctcccagggctcacccctgacccgaacctctgccccagactgaacccgggcccaacctccatccgcattggtcggcccgaagactgattcccaccctggaggccccttggaaagatccttatctttgagcctcagttttctcttctggtaaaagggtggttatgatggctgtaataattaaagggtgaagagctaaatacatggcgggttcaaaggttgctattgttatttgtattactattattattagctcaaaccatcacctttgcagtatgcattcgaagtccgttagcccctgtcacctacatggcaaacgtgcagagagagaaacggagatccccattttacagatgaaaaagcttagggagagaagtgatatacctggggccatgcagcttctggcaggattgatggattttaatcactaatgagaggatgtaatctgtatcctatggctttttctcctcactccacagcccacggggtcctaagtaggaaccagcttcacctctctgctttccctcttatgaaaatggccgatgcctttttgtgaaggtctcaaagcccacttcatcctggctgcagcaccaaaaggacaaaggcccgcttttgaagtgcctgataaggcattcctttcacccctccatgaggaaggtggcaaatcttgagactccctattagagagcttcgattttcctgaaattgtgttaggaaaatagggtgacttggtttgatcttggtttctatacctattatggctgcctgactctggtcatttggcccctgcaggcctaagccacttggttttgcttcacatattggggtttattagaacagtacgtagggaagcaatgccagaggcacccgtcccttttccctgccttctaggtgctcctgggaaatcctggttttccatggttaggcaaatgtcagagaattggggaaataaataatgtttttgttagactaacattccatgtatttaaaaaataaaaatattttggtcctcatcctgta

SEQ ID NO: 91612 - DNA, 464 bp, Homo sapiens
tactactactactaaattcgcggccgcgtcgacaagagtcttgctctgttgcccaggcagtagtgcagtggcgcgatatattttcagtttttaaacgtcagaatttttgtttaaaatgcctttttgggctgggcacagtggcttatgcccataataatcccagcactttgggaggccgaggtgagcagatcacctgaggttaggagtttgagaccagcctggccaacacgatgaaaccccgtctctactaaaaatacaaacaaaattagctgggcatggtggcggacatctgtaatcccagctactcaggaggctgaagcagaagaactgcttgaacctgggaggtggaggttgcagtgagccaagatcgcaccattgcactccatcctgggcgacaaaaatgaaacaccgtctcaaaaaaaataaaaataataaaataaaatgcctttttgttgttgatgtaa

SEQ ID NO: 91613 - DNA, 1247 bp, Homo sapiens
gtcgggaaggcggcgggctatccggtcctcggctgcggcgggcaccatggtcggtggcgaggcggctgccgcagtggaggagctggtttcgggggtgcggcaggcggccgacttcgcggagcagttccgctcctactcagagagcgagaagcaatggaaggcccgcatggaattcatcctgcgccacctgcccgactaccgcgacccgcccgacggcagtggccgcctggaccagctgctctccctctccatggtctgggccaaccatctcttcctaggctgcagttacaataaagaccttttagacaaggtgatggaaatggccgatgggattgaagtggaagacctgccacaatttactaccagaagtgaattaatgaaaaagcatcaaagctaagccagaagatttatcacattttcatcatcagctacaggattagaaaggaggctgggatgaatgtgacatagaccacagcagctctcttaagactcctggtattaccaacataaagaggcaggtggaatgagaaggactctgtctagattggcttttttaacattctcattttcccaggagttatcactgtaaaagtatgcatggatatttatgtatttataaatcatgcactctaagatgagttcatcaacattgtaaaagccctcttttctgttttcaggtttttttttttcttatcgacaaggtctcactctgtcgcccaggcagaagcacaaaggtgcagtattggctcattgcagcctcgaactcctgggctcatattttcagggttttttgttttttgttttgtttttttgagacagagtcttgctctgttgcccaggcagtagtgcagtggcgcgatatattttcagtttttaaacgtcagaatttttgtttaaaatgcctttttgggctgggcacagtggcttatgcccataataatcccagcactttgggaggccgaggtgagcagatcacctgaggttaggagtttgagaccagcctggccaacacgatgaaaccccgtctctactaaaaatacaaacaaaattagctgggcatggtggcggacatctgtaatcccagctactcaggaggctgaagcagaagaactgcttgaacctgggaggtggaggttgcagtgagccaagatcgcaccattgcactccatcctgggcgacaaaaatgaaacaccgtctcaaaaaaaataaaaataataaaataaaatgcctttttgttgttgatgtaa

SEQ ID NO: 91614 - DNA, 767 bp, Homo sapiens
gtcgggaaggcggcgggctatccggtcctcggctgcggcgggcaccatggtcggtggcgaggcggctgccgcagtggaggagctggtttcgggggtgcggcaggcggccgacttcgcggagcagttccgctcctactcagagagcgagaagcaatggaaggcccgcatggaattcatcctgcgccacctgcccgactaccgcgacccgcccgacggcagtggccgcctggaccagctgctctccctctccatggtctgggccaaccatctcttcctaggctgcagttacaataaagaccttttagacaaggtgatggaaatggccgatgggattgaagtggaagacctgccacaatttactaccagaagtgaattaatgaaaaagcatcaaagctaagccagaagatttatcacattttcatcatcagctacaggattagaaaggaggctgggatgaatgtgacatagaccacagcagctctcttaagactcctggtattaccaacataaagaggcaggtggaatgagaaggactctgtctagattggcttttttaacattctcattttcccaggagttatcactgtaaaagtatgcatggatatttatgtatttataaatcatgcactctaagatgagttcatcaacattgtaaaagccctcttttctgttttcaggtttttttttttcttatcgacaaaaaatgaaacaccgtctcaaaaaaaataaaaataataaaataaaatgcctttttgttgttgatgtaa

SEQ ID NO: 91615 - DNA, 826 bp, Homo sapiens
gtcgggaaggcggcgggctatccggtcctcggctgcggcgggcaccatggtcggtggcgaggcggctgccgcagtggaggagctggtttcgggggtgcggcaggcggccgacttcgcggagcagttccgctcctactcagagagcgagaagcaatggaaggcccgcatggaattcatcctgcgccacctgcccgactaccgcgacccgcccgacggcagtggccgcctggaccagctgctctccctctccatggtctgggccaaccatctcttcctaggctgcagcccacggggtcctaagtaggaaccagcttcacctctctgctttccctcttatgaaaatggccgatgcctttttgtgaaggtctcaaagcccacttcatcctggctgcagcaccaaaaggacaaaggcccgcttttgaagtgcctgataaggcattcctttcacccctccatgaggaaggtggcaaatcttgagactccctattagagagcttcgattttcctgaaattgtgttaggaaaatagggtgacttggtttgatcttggtttctatacctattatggctgcctgactctggtcatttggcccctgcaggcctaagccacttggttttgcttcacatattggggtttattagaacagtacgtagggaagcaatgccagaggcacccgtcccttttccctgccttctaggtgctcctgggaaatcctggttttccatggttaggcaaatgtcagagaattggggaaataaataatgtttttgttagactaacattccatgtatttaaaaaataaaaatattttggtcctcatcctgta

SEQ ID NO: 91616 - DNA, 1080 bp, Homo sapiens
gtcgggaaggcggcgggctatccggtcctcggctgcggcgggcaccatggtcggtggcgaggcggctgccgcagtggaggagctggtttcgggggtgcggcaggcggccgacttcgcggagcagttccgctcctactcagagagcgagaagcaatggaaggcccgcatggaattcatcctgcgccacctgcccgactaccgcgacccgcccgacggcagtggccgcctggaccagctgctctccctctccatggtctgggccaaccatctcttcctaggctgcagttacaataaagaccttttagacaaggtgatggaaatggccgatgggattgaagtggaagacctgccacaatttactaccagaagtgaattaatgaaaaagcatcaaagctaagccagaagatttatcacattttcatcatcagctacaggattagaaaggaggctgggatgaatgtgacatagaccacagcagctctcttaagactcctggtattaccaacataaagaggcaggtggaatgagaaggactctgtctagattggcttttttaacattctcattttcccaggagttatcactgtaaaagtatgcatggatatttatgtatttataaatcatgcactctaagatgagttcatcaacattgtaaaagccctcttttctgttttcaggtttttttttttcttatcgacagagtcttgctctgttgcccaggcagtagtgcagtggcgcgatatattttcagtttttaaacgtcagaatttttgtttaaaatgcctttttgggctgggcacagtggcttatgcccataataatcccagcactttgggaggccgaggtgagcagatcacctgaggttaggagtttgagaccagcctggccaacacgatgaaaccccgtctctactaaaaatacaaacaaaattagctgggcatggtggcggacatctgtaatcccagctactcaggaggctgaagcagaagaactgcttgaacctgggaggtggaggttgcagtgagccaagatcgcaccattgcactccatcctgggcgacaaaaatgaaacaccgtctca

SEQ ID NO: 91617 - DNA, 135 bp, Homo sapiens
caccattattcttcctgccacattgcactggggactcctgagccccatgcctaccgggaatggaacaggctggaatggccttaataggctgtggataggactcagatgagatgaaccaagaacttcctgaccgtg

SEQ ID NO: 91618 - DNA, 873 bp, Homo sapiens
attcctgcagaatccctgggcccgctcgccaagtgaatgcgactgtccccctcagccgcccccattcctgccttggccagaccctccaatgccccgagagacccccagaatacgaggttctcctccgcaggaatgagcctcaccctctcatctctcctgttcctttttctcgttgccaaatctctgtctcgtgcccttcaggtcaaggaaatatatccccatccagctctgggccccttaccaggccttcccctcaccacctgcaaagactgaccactaaacctctacaagcgctggatctttgaaaaaggctcccagcccagccctatcaccacttatcaccccaccccatcaccgctgccccacgagatgcatgacccccagcaaggacctctccaggcagctgagctgcccagacgggaagcttcctagagctcgcgtggccatcaggcccctcctgccctgtcttggacccacgctgcctgggaccgaacccttctgtagccaccaaaaccagatcccgtagcccgcaataaaggggcccgggtttctaagccacttgtatttccccattcccccagactctcccagctagagttctgtagaacccggaagcagctcctgcatccccaagactttagatccaagtccctgtccaaaccctcaacctcactgagcttctcagtcatctcagccctctgattagagtcccagcctgccctatgtaatcttatcgccttccctcctgggaagactgccggggacccaagtagaagactggggcctaagggccaggcgcggtggctcatgcctgtaatcccagcactttgggaggccaaggcgggtggatcacttgaggtcaagagttcaaga

SEQ ID NO: 91619 - DNA, 461 bp, Homo sapiens
ccaacacatgtggggcagacggctttttgctgctaagatgtggtttaactagcattgccaaggtgtggagaaaagcgttctgccagcacagttggtagtagcaccctgagctctctgtcttctaggtagcgggggacaggcctgggtgactggcatgaacccagcttctctgttgcaacccccagctggaatctccagtcaccatggatgggagaactgacaggcagggagaaagcatgtcaagactgtgaggaaaggctgtcccctcaaccccaacctgaggtcaccaaagtctccctcctaaagtaaacagaattttccattttgtagggagaattgtgcactactagttgacatcacttgaaccaggatttcctgctagtgagtaggatttggcatccctacttagggagctcgggacaggccagctggggcccaacgggggctggtgctgggtctgt

SEQ ID NO: 91620 - DNA, 747 bp, Homo sapiens
tttgagtagacttttaacgtcacactgctttttttttcttcctttttttcgagacagagtctcactctgtcacccaggctggagtgcagtggtgcaatcttggctcttgggtcactgcaccctccaccttctgggttcaagcaattttcatgcctcagcctcctaagtagctagaattacaggcacatgccaccatgcccacctggctaattttttttttaatagagatgggttttgtcatgttggccaggctgggcttgaactcctgacttcaagtgatctgcccccttggcctcttaaagtgctgggattataggtgtgagccactgcgcccagccacattacttcattcttcaaccttgaaagtcacttgatttattttccttatttattgctacagtttaaataggggcttcattggctccagttgctgcgtttcctaatactaaacaatctgttgggttttaggataccttaacttcatttatttatttatgaatgaatgaatgagatggagtctcgctctagcccaggctggagtgcaatggcacgatcttggctcactacaatctccacctcccgggttcaggagattctccctgtctcagcctcctgagtagctgggattacaggtgcccgccaccatgcccaactgatttttgtatttttagtagagacggggtttcaccatgttggccaggctgttctgcaactcctgacctcaggtgatctgccctcctcggcctc

SEQ ID NO: 91621 - DNA, 502 bp, Homo sapiens
tttgagaccaggttgctgggcagacttggtgtctggcaagggccttcttccgggtttacagacagctgtcttcccacgcatcttcacatggcccagggagaggcagggagagcgtggtgagtgcgtgtgcactctggggtctcttatgaggatgctcgtcccatcatgagggccccacctcaggaccatttcacctcatcacctctgaaggccctgcgtcctcacgccatcccgctggggtcagggcttcagcatcgggtttcgagggacacaaacattcagtccacagcagggttctcgccatcttctgatgtgcctcaaagggtgtgccagtcagaggaccgtgggatgaatcctaacgtaacacccgcgccccggggccgggcatgatggctcacacctgtagtcagaggaccatgggatcccaacgtcacaccagcgccccggggccgggcatgatggctcacacctgtagtcagaggaccgtgggatgaatctttat

SEQ ID NO: 91622 - DNA, 413 bp, Homo sapiens
aacctgaggacgagctgaggaggctgagaggtgataagcgctttgtggtctgatagtaggggtgtgtaacttgttgcctggccccacatttgagccccaagttctgatacagaaactactcctgggaggctgtgtgtttctccttccacacccccagcttggcagtgtttctgggggcctagctgcccctcttggtgccctcgctaccttctccactgcctgccttgcacctgaggtaccttggcctgcctgtggatgcttggtggggacctcaggccaacctactttggctgccttccctgccccattccttgttaaaaaaagaaacagatttcaacaccagcctccgtctgtccccatctgaaaccgttggcaggaaagcagcactgcccgcgtctctttgctccatctca

SEQ ID NO: 91623 - DNA, 896 bp, Homo sapiens
tgatagcatgaaccccgaaaacctgaggcaggtctcagttaacttagaatgtttattttgcccaggttgaggaccggtgcccgtgacacagcctcaggaggtcctgacgagatgtgcccaaggtggtcagaacacactgtagatttatacactctagggagacatgagacatcaatcaacatacgtaagatgaacattggtttggttaagatgagcattggttttgtccagaaaggcaagacaactccaagcaaaggtaggaagactggaagcagggagggggcttccgggtcacgggtagataagagacaaatggtggcattcttttgagtttctgattagcctcttcaaaggaaacaatcagatctgcatttctctcagtgagcagaggggtgactttgaatagaacgggaggcacgttggtgctaagcagttcccagctagacttttccctttagcttagggattttggagccccaggattttcctgcttgtgatttaaacacagggctccttttggggctccacccaggctgctggccacagagacccaggaaaaccctccacagcctgaggcgaagtaggcaggtggggggcagggacaggagcagggacagtggcagcctgagccccggtgaggcagggtgtgcggtgaccttaactgcaggcagcagggcctgaaaccaggggcagaagcatgtggttccccaggaggattccagactgccagccatggggtccttgaggcagggaggatggcatttaattttgtaaactccatggcacctggttcagcgcaagacacacaggagtgtggaaagaaccgtcttgccgaagattcgctctgcccacccctcccttagtgctggagacaatgccgtgtgtggggaggccca

SEQ ID NO: 91624 - DNA, 508 bp, Homo sapiens
tcttaagcttactttttcttagaaattgttttcaagctttctattatgaaaatttcacatataaccagagtagacacaatggtagagataatgaactctcacccagtttcatgaattactaattcatagatagtcctgtttcacttatgtcccgcttcttccttactcttgccccagttattttgaagcaaatttcaaatgtcacctttcatttttaaatatttcagtatgtatctctcaaataatttaagatcgtaacttaaagagaaaaaagcattatatcttggtttctcttaaaagtagtgtggggctgggcacagtggctcatgtctgttatcgcagcactttgggaggctgaggcagctggatcacctgaggccaggagttggagaccagcctgaccaacatggcaaaaccccgtctctacaaaaatagtagccaggcgttatggcacgcacctgtagtcccagctactcaggaggctgaggcaggagaatcgcctgaaccc

SEQ ID NO: 91625 - DNA, 441 bp, Homo sapiens
aaaatcctgtatccctttgtggtaaaaaaaaccctcaacaaattaggcacagaaggaacatacctcaaaataataaaagccatatatgacaaactcacagccaccatcatactgaagagagaaaagctgaaagcattccccctcagaactggaacaaggccgggcacagtggctcatgcttgtaatcccagagctttgggaggccagttcaggaagatcacttgagtccaggagttccagaccagcttgggcaatatagtgggactctttctctcaaaaaattaaaaaatttgctgggcatgatgatacatgcttatagtcctagttactcaggaatttgaggtgggagttcaggagttcaaggttacagtgagttatgatcatgccagtgtactccagcctggacaatacagtgaaaccctctctctaaaaaaaagaaaa

SEQ ID NO: 91626 - DNA, 360 bp, Homo sapiens
cccatgcataaaacccttcagtagctcctaattgcctacaaaactacagaataaatataatactgaggaggtgagggagggaaattatagaccaatattactcatacatgtgttaaagtataagtaaaatactacttataggattcggcagtacaacaatgaaaaaaaaattcaagatactttcagaacatacattctcattgagagtgatactgctctcaaggggtaaaactggttcttaggagaaaaaaaaaatctcagatattacaatagtttctggccatagtacttaaacagatatatggtatatctgtggtattaaattttcatgggggtgggggataattaggaactaaaatg

SEQ ID NO: 91627 - DNA, 224 bp, Homo sapiens
aaaaagaaaaaaaaatttttatcaggcaacacttcattctataaaacagaataagtgttccagtcacagaagtattttttgttacaagtatttttgtgtaagattgcaatggcctttgtgcaagattgtggtttttgcagtcttttgtaatagtttttgttatcaggtatttatgcttgagaactccctcttcatggccttccttggctgtcaggtttttttgt

SEQ ID NO: 91628 - DNA, 301 bp, Homo sapiens
cactcacagtgaaatggtcacatcatgatctagttttcatcctgattgaaaaaaaaaatctttgtgaagaaccctacaaatgtttttggtaaaagagattcacaataaaagaagaagaaaaataaaaatagagcgatgaagaggtattttttcaaaacatgagagccgaagtcggagataatgtcgtacatgagacagtgaatgtaggagagtgcccccctctaagtgcattattcccctttcatttagaatacagaaaagagtcagaggaagacaaaagaaaaggaaagaaccaaacttc

SEQ ID NO: 91629 - DNA, 370 bp, Homo sapiens
attgcatgttaaaattgctcttttaaattgccttctgcttctgggtaacccattgtggaactgctttatgattaactgacattttagcagcatctctctcatagggaaggtcaatagttcagagtgtccagaacataatacatttatgcagttgggaaaactactctctactcttatattgaagttcaatgctcttggcaattttcagtgaaacagttagatctatgaagcagtgaaaaggagagtgtcttattttaaaagtaagcatttactaaaaatgcattttttttcttgtcccaaatccaaaatggaaggaaaaacaaaacaaaataatactcaggcatataccagaaaccacaaagtgagaagt

SEQ ID NO: 91630 - DNA, 234 bp, Homo sapiens
ttgtaaagagcataatttctcccagtgaatggcagaggtatgtttagtgcaaatcaagtgaacatatatgtataggtctgtttctgggctttttgtcctttcattatgacgtgtctatacttaagtccagaccacagttttaattattatggctttatagtgagtcttgaaaacttgggtataagtcctccaactttgtacttccttgtttaaaaactatcttggctctcctag

SEQ ID NO: 91631 - DNA, 428 bp, Homo sapiens
caaaaaacagccagatctggtggcacacacctgtaatcccagctactcaggtggctgaggcagggaaatcacttgaacctggaggcagaggttacagtgaaccttgactgcaccagtggactccagtgttggcaacagagtgagattctgtaaaacaaaacaaaaaagaaaaaaaaacccaaaatctggcttttcatccttgagactacatttcaagctttttgctattgagtagaaaggaacttcatggtgtagttccatacatttctgagctataagaaaaaggtatagtgatgatgtgttaagtgccatgcttcagatctgaaggttgtgtaataattttcatgactgcgcttgtacagacgatttcaccattggctgcagttctgattttaagttcatttgctcgttttcatgttgaagttgac

SEQ ID NO: 91632 - DNA, 474 bp, Homo sapiens
cttccactaaaaggaaacctgctgtcattttaatcagccagtattatatctgatcactgtagttcttctgattaagatatgcagtaactatttaaaaaaaaaaaagctgtttcagtttcagaagttttttaaaacctgccaccgaagtgacattggaactccttctttggtttcatcaagattcctaactcatttcagaacctgttttatttttctttttttcctttgagaaaactgactagcacactttatgaaggtaccgacgttcacatcctagggctgctgtagcacaaactgggtggctttcaacaacgggaatgtattctcatagcttagtgctgggagctgcaagcctgatgtcacagtgttggcgtggccgccccctctgaaggctgcaggggaaaatctgccccgtgccttttcctttgggtgtgttgctggcggtctctggcactggtcatctgtaaccacatc

SEQ ID NO: 91633 - DNA, 383 bp, Homo sapiens
aggcagaaagaaaagagaacaggagacttggagtgggcagcagtagagcggaacccagcaggcccgcctttttggattcctctgggggctctggggatgtgtgttgtgggagtggagagtggtgacgagcagaggacggacagctgctgaaagcgatcattcctctccttgtggggcatcctgggaagaacatgggtgatctctgcagtcaggcagcgcagtcctcgtggggccttatggggcggctctgggtgtctgcattctaatccctggcaacaaatggggctgcaaggctgggctcctggtagatgctcaggaagggttgttccactcctcaccccctcctgagctgctttctagcctcgcagccccgtctttggatc

SEQ ID NO: 91634 - DNA, 425 bp, Homo sapiens
agcgtttctattcactctttgctctcccactggaggcaaaaagctacacaggctagagagtgaccaggcaagagagtcacctgatcaccatttgaagcgtttggctaccagaggtctgtctaagggaggctgttggtttgttcttcaaggttttcatttttttgatctagagcaggagtcagcaaaccgccattgccaggccaaatccagaccactgcctgtttttgtaaacaaaacttcatggggtagagctgtgcctgtttgctcctgtctgtggctgcttttgtggtatctcatcagagtcaacgcagtcgtgacagaggccatatggcttgtaaagcccaaaaggtctactgtcttagccaggcacactagctcacgcctgtaaccccagcactttgggaggctgaggcgggtggatcacc

SEQ ID NO: 91635 - DNA, 422 bp, Homo sapiens
caagttcatcacctagactaggtaatgtttcatctgattacctaaaatttcaatttacctaaatattactctgaaagttttgcactgaataaaacaagattattgttttaaaaagtattgatgagttattaaaagtgatagaaagtgggaagaaagctgatacagtcatatggcaatgaatgccattaaaggtttgttttttttttaaagttaaatatttattttgtgatacaggtttttaaacatatgaaattgatttgcaatcaagacaaattttgttcttaaaaagatcataggctgggcgcagtggctcacgcctgtaatcccagcactttggaaggccgaggcaggtggatcacaaggtcatgagatcgagaccatcctggctaacatggtgaaaccccatctctactaaaaataca

SEQ ID NO: 91636 - DNA, 458 bp, Homo sapiens
gctgtcttagttcattttgcattgctgtaagggaatacctgaggctgagtcatttataaagaaaagaggtttatttggctcataattctgcaggctgaacaagaagcatggcaccagcatctgcttctagtgaggacctcaggaagcttccaaccatggcagaggtgaatggggagcaggtatgtctcatggtgagagaaggaggaagagaaaaaagaacattcatattttgcaggaactatgagtgagaactggctcaatcccttgagaatggcaccatgacatttatgagtgatctgtccccatgattccaccaggtcctacctccaacactggggatcaaattttaacctgacacttggaggggccaaatatccaaactattattctttccctggccccccaaatgtcatatccttctcacattgcaaaatataatcatcccttcccaataattt

SEQ ID NO: 91637 - DNA, 500 bp, Homo sapiens
atgtgagtaatatatatatattagagacagggttttactctgtcgatgatggagtgcagtggtgtgattacagctcactgcaatctccaactcctgggctcaagttatcctcctatctcagccttccaagtagctgggactacagatgtatgccacggtgcccagctaattattcttcatttaattttttgtagcaatggagtcttgctatgtttccctggctgtcctcaaactcctagtatcaagcagtcctcctgccttggccacacgtgtgtgtgtgtgtgtgtgtgtgtgtgtatatatatatatatatatatatatatatatgttgcctatatactcccttcctccagtaccccaaaatatataagttctgaagacagaaatcttgtcactctactggcagggcttggaatagtgcccggcaaatacggatgctcaatatgcatcttatggataattttttaaggtgcaatcattattgtttcaaatatttttag

SEQ ID NO: 91638 - DNA, 1076 bp, Homo sapiens
aggctgccttctagtaccaaatgttataatcagataattgacctggtgtttgtggtgatctgatattatcaggaaaagcattactctgcctttttaaactcttaaattgatacaactgctggaagaagggaggacagatccaagagatctaatttgtatataatgggagttccagagtgaaatacaagagaaaagccagatttaatagaagtaaatttcctgagctgaataaagccttatatttgcaggttgaaagtgttcactaaattctaggcaggattgatgagaaaaggcatacacctaaacatactctgacagaattcctgaatctcaaagttaaagagaaaaatatataagattccagacagaaagaagttatttgcaatgggaaaagaattggactggtatcagacagtggaatcatatctatacctgttaagagaaaaggaaagtaaccaagaagtctctttccagccaagcatcattcacctgccagagtgaaagggatgcagaaaggattccaagaatctatcatctgcatatccccatctgaagaaactgaaaagaggactgtaactaaataacaaattaatgagaatagagacttcaagaaatgagaaggtaaagtagaaagggaagatgatgagtgaacaataagccttgtaatatacatgggtatgtatcttaatgtacttggatgatgatgaaatgactgaaaatgtgtactatatgtgttaaataaagactcttaagataaatgagactcatctaactagagcctgggagtaaaagttacaatttttctcagcaaaacctaagaggtggtattggaggaaagggaggaagaagtaaaaacattctaaaagttttatcttattgggtggagggaaagcatcaaggaatagagtaacttggtggggaaatagtatattcttacataatagtaataaaatatgtgtttgatgatgtgtattaaaaaaacataaccactagtggagtgggaaagcatagtgtcattttgaaattataagaggaaacaaaggaataaattgtaacttgatcataccagtatatat

SEQ ID NO: 91639 - DNA, 782 bp, Homo sapiens
ggtgcctggcagaaagattgaaacgtagtaggctcttggtatgggaatgcttatttccctgcttctctccctcagttagggttattatcgtataaaattattttagattactcatataattgtgagtaacctaaattatatgagtatcatgtgggcataatgtcctccatgttcatccatgttgttgcaaacggtaggatcctctcctctacccccctttttttaggctgggtaatattccaattcatgtatacaccacattttcattgtcatttgccatttagattgcttccatgtcttgtcttttgtaaataatgttacagtgaacatgggagtacagatatttgttaagagggtaaatcttaggttgtgttcttaccacatcctccaaaatcataataaataaagaagatagaatggggggattggagaaatgtcggtcaaaagaaacaaattttcagttaggagaaataagctcaagagatctattgtacattatggtgactgtagttaataacaatgtattgtatatttgaaaattgctaagagagtagattttaagtgttcttatcagaaaaacctaagtgtgtgaagtaatgcttatgttaattaacttgatttaaccattccacagtgtacacgtattccaaacgtcacattgagtcagggccagtggcacaggcctatagtcacagctacttgggaggttgagttaggaagatccctggagcctaggagttctagtccagcttgggcaacatagtgagaccccatctctattt

SEQ ID NO: 91640 - DNA, 246 bp, Homo sapiens
  misc_feature (6)..(10): n is a, c, g, or t
  misc_feature (69)..(69): n is a, c, g, or t
  misc_feature (241)..(246): n is a, c, g, or t
ccttcnnnnnaatattacatgttttattatcctgtccccagagggtggtttatccagaaaccaagaaanaaaatcaatcagaataaactcaaaaaaaacggcacgagtgataattggcctttaatatttgtatctctaattttattttctctctgttactgtaaaataatagctataatgtataacaattttcttcagaagaattctatgctattattaaaataaaatatttactgtgtannnnnn

SEQ ID NO: 91641 - DNA, 3056 bp, Homo sapiens
  misc_feature (979)..(979): n is a, c, g, or t
  misc_feature (1331)..(1331): n is a, c, g, or t
  misc_feature (3051)..(3056): n is a, c, g, or t
aggccggcaggctaggcgtggacccaactggcgaggctgctggggttgcagcgggacagttggggcggccccgcaggcccaggtgaacaaaaattgtttgctggcccccaggatactaactagacctttggcctgactcacaggacactaaggctccttttctgaagaagccttttaccagtctcatttaggggatgggaacaacatgtcttcacctagggactttagagcagagcctgtaaacgattatgagggaaatgactctgaagcagaagacttgaatttcagggagactttgccttcatcaagtcaggaaaacacacctagatcaaaggtttttgaaaataaagttaattcagagaaggtaaaactttctcttcggaatttcccacataatgattatgaggatgtttttgaagagccttcagaaagtggcagtgatcccagcatgtggacagccagaggccccttcagaagagacaggtggagcagtgaggatgaggaggctgcagggccatcacaggctctctcccctctactttctgatacgcgcaaaattgtttctgaaggagaactagatcagttggctcagattcggccattaatattcaattttcatgagcagacagccatcaaggattgtttgaaaatccttgaggaaaaaacagcagcgtatgatatcatgcaggaatttatggctttagaacttaagaatctgcctggtgagttcaactctgggaatcaaccaagcaacagagaaaaaaacagataccgagatattcttccatatgattcaacacgcgttcctcttggaaaaagcaaggactacatcaatgctagttatattagaatagtcaattgtggagaagagtatttttatatcgctactcaaggaccactgctgagcaccatagatgacttttggcaaatggtgttggaaaataattcaaatgttattgccatgataaccagagagatngaaggtggaattatcaaatgctaccattactggcccatttctctgaagaagccattggaattgaaacacttccgtgtattcctggagaactaccagatacttcaatatttcatcattcgaatgtttcaagttgtggagaagtccacgggaactagtcactctgtaaaacagttgcagttcaccaagtggccagaccatggcactcctgcctcagcagatagcttcataaaatatattcgttatgcaaggaagagccaccttacaggacccatggttgttcactgcagtgccggcataggccggacaggggtgttcctatgtgtggatgtcgtgttctgtgccatcgtaaagnactgttcattcaacatcatggatatagtggcccaaatgagagaacaacgttctggcatggttcaaacgaaggagcagtatcacttttgttacgatattgtgcttgaagttcttcggaaacttctgactttggattaagaaagacttctgttgcctctcacttgaaattaccaagtgggtttgcacctcctcataaagaacatgtttgcactgtgctgaagggctttgctatgcatacaatctgctttcttggtttatcagtttattttctttctaaaagctccctgaagggcaatatcatttggcttggggtgatcagtgtttacttattgatcttgctagacaatatcaaaataacttcccacattttccagtgaaacagatgttacataaaacgattgcagcttggctatttggttgaagggattacagagcccaataaaggatttaaaatatattcattaagattttatttggaaaggtggctggagagagctgaggatttccaggactttgtaagttcttattctgggagaacataaggccaataatcatgacctcttccaggcatttttaagacagatgtctattcatgttctttagctagagcctgtactttttgctggcatttgaataacccagtttaaaaagagtccagttagggtggactaactttggacacaaattggcttccatttcctacattttcatactgctgccttcctacagctgctagaccaagacctgttggtctgggaagcatttcatggatagggagagctcctctcggtgaacagtccaaaactaaaatagatgtttatatagaaagcccaagaggagacttttgccatgcctgagttctttcctatcccaccctaacacttaacatattacttagtctgctttgttaaaagcaagtattacctttaacttgcctcttactctttgccctttagctaactaataaagtttgatataggcattattatataattctgagtcattcatggtatctctcatgtttgatgtatttttcaaactaagatctatgatagtttttttttccagagttccattaaatcatttatttcctttactttctcacctctgttgaaacatttagaaactggatttgggaacccaattttggaaaaccagattcatagtcatgaaaatggaaacttccatattctgtttttgaaaagatgtggccattattacagtaattttattataggactttgcctcgtacaattaatagtgatattttggacaaggagttctggtgacaagctatacctaattataagctataaaacaatagatatgagtgtttgtacagtttaactcaatggagatcagaatattctatgtattgagaaaatgtttaatatcaatctataaatcttgaatttctaagaggcttattttgttcttttggctgaatgagtatatttgaattggttgaataattaataattctcattgtaaaaataattatatgccaaaaatatatttgatgttaaatcaaatagatgattctgtttacattgttcatatgaataataatctgtgttaatttcattttgataattggcctttaatatttgtatctctaattttattttctctctgttactgtaaaataatagctataatgtataacaattttcttcagaagaattctatgctattattaaaataaaatatttactgtgtannnnnn

SEQ ID NO: 91642 - DNA, 2253 bp, Homo sapiens
  misc_feature (2248)..(2253): n is a, c, g, or t
aggccggcaggctaggcgtggacccaactggcgaggctgctggggttgcagcgggacagttggggcggccccgcaggcccaggtttttgaaaataaagttaattcagagaaggtaaaactttctcttcggaatttcccacataatgattatgaggatgtttttgaagagccttcagaaagtggcagtgatcccagcatgtggacagccagaggccccttcagaagagacaggtggagcagtgaggatgaggaggctgcagggccatcacaggctctctcccctctactttctgatacgcgcaaaattgtttctgaaggagaactagatcagttggctcagattcggccattaatattcaattttcatgagcagacagccatcaaggattgtttgaaaatccttgaggaaaaaacagcagcgtatgatatcatgcaggaatttatggctttagaacttaagaatctgcctggtgagttcaactctgggaatcaaccaagcaacagagaaaaaaacagataccgagatattcttccatttcaacatcatggatatagtggcccaaatgagagaacaacgttctggcatggttcaaacgaaggagcagtatcacttttgttacgatattgtgcttgaagttcttcggaaacttctgactttggattaagaaagacttctgttgcctctcacttgaaattaccaagtgggtttgcacctcctcataaagaacatgtttgcactgtgctgaagggctttgctatgcatacaatctgctttcttggtttatcagtttattttctttctaaaagctccctgaagggcaatatcatttggcttggggtgatcagtgtttacttattgatcttgctagacaatatcaaaataacttcccacattttccagtgaaacagatgttacataaaacgattgcagcttggctatttggttgaagggattacagagcccaataaaggatttaaaatatattcattaagattttatttggaaaggtggctggagagagctgaggatttccaggactttgtaagttcttattctgggagaacataaggccaataatcatgacctcttccaggcatttttaagacagatgtctattcatgttctttagctagagcctgtactttttgctggcatttgaataacccagtttaaaaagagtccagttagggtggactaactttggacacaaattggcttccatttcctacattttcatactgctgccttcctacagctgctagaccaagacctgttggtctgggaagcatttcatggatagggagagctcctctcggtgaacagtccaaaactaaaatagatgtttatatagaaagcccaagaggagacttttgccatgcctgagttctttcctatcccaccctaacacttaacatattacttagtctgctttgttaaaagcaagtattacctttaacttgcctcttactctttgccctttagctaactaataaagtttgatataggcattattatataattctgagtcattcatggtatctctcatgtttgatgtatttttcaaactaagatctatgatagtttttttttccagagttccattaaatcatttatttcctttactttctcacctctgttgaaacatttagaaactggatttgggaacccaattttggaaaaccagattcatagtcatgaaaatggaaacttccatattctgtttttgaaaagatgtggccattattacagtaattttattataggactttgcctcgtacaattaatagtgatattttggacaaggagttctggtgacaagctatacctaattataagctataaaacaatagatatgagtgtttgtacagtttaactcaatggagatcagaatattctatgtattgagaaaatgtttaatatcaatctataaatcttgaatttctaagaggcttattttgttcttttggctgaatgagtatatttgaattggttgaataattaataattctcattgtaaaaataattatatgccaaaaatatatttgatgttaaatcaaatagatgattctgtttacattgttcatatgaataataatctgtgttaatttcattttgataattggcctttaatatttgtatctctaattttattttctctctgttactgtaaaataatagctataatgtataacaattttcttcagaagaattctatgctattattaaaataaaatatttactgtgtannnnnn

SEQ ID NO: 91643 - DNA, 617 bp, Homo sapiens
aggccggcaggctaggcgtggacccaactggcgaggctgctggggttgcagcgggacagttggggcggccccgcaggcccaggtgaacaaaaattgtttgctggcccccaggatactaactagacctttggcctgactcacaggacactaaggctccttttctgaagaagccttttaccagtctcatttaggggatgggaacaacatgtcttcacctagggactttagagcagagcctggtttttgaaaataaagttaattcagagaaggtaaaactttctcttcggaatttcccacataatgattatgaggatgtttttgaagagccttcagaaagtggcagtgatcccagcatgtggacagccagaggccccttcagaagagacaggtggagcagtgaggatgaggaggctgcagggccatcacaggctctctcccctctactttctggtatgacatcatcctatttgtagtagcaagttgaggctctattttagagatatgcacaaagatatttctaatacaaatgaaagaaagagctagggaaaacttcaaaaatgggaaaatatggttttctaggattttcttttaaaaataaaaaaatgcaattaaaaaaa

SEQ ID NO: 91644 - DNA, 2804 bp, Homo sapiens
  misc_feature (727)..(727): n is a, c, g, or t
  misc_feature (1079)..(1079): n is a, c, g, or t
  misc_feature (2799)..(2804): n is a, c, g, or t
aggccggcaggctaggcgtggacccaactggcgaggctgctggggttgcagcgggacagttggggcggccccgcaggcccaggtttttgaaaataaagttaattcagagaaggtaaaactttctcttcggaatttcccacataatgattatgaggatgtttttgaagagccttcagaaagtggcagtgatcccagcatgtggacagccagaggccccttcagaagagacaggtggagcagtgaggatgaggaggctgcagggccatcacaggctctctcccctctactttctgatacgcgcaaaattgtttctgaaggagaactagatcagttggctcagattcggccattaatattcaattttcatgagcagacagccatcaaggattgtttgaaaatccttgaggaaaaaacagcagcgtatgatatcatgcaggaatttatggctttagaacttaagaatctgcctggtgagttcaactctgggaatcaaccaagcaacagagaaaaaaacagataccgagatattcttccatatgattcaacacgcgttcctcttggaaaaagcaaggactacatcaatgctagttatattagaatagtcaattgtggagaagagtatttttatatcgctactcaaggaccactgctgagcaccatagatgacttttggcaaatggtgttggaaaataattcaaatgttattgccatgataaccagagagatngaaggtggaattatcaaatgctaccattactggcccatttctctgaagaagccattggaattgaaacacttccgtgtattcctggagaactaccagatacttcaatatttcatcattcgaatgtttcaagttgtggagaagtccacgggaactagtcactctgtaaaacagttgcagttcaccaagtggccagaccatggcactcctgcctcagcagatagcttcataaaatatattcgttatgcaaggaagagccaccttacaggacccatggttgttcactgcagtgccggcataggccggacaggggtgttcctatgtgtggatgtcgtgttctgtgccatcgtaaagnactgttcattcaacatcatggatatagtggcccaaatgagagaacaacgttctggcatggttcaaacgaaggagcagtatcacttttgttacgatattgtgcttgaagttcttcggaaacttctgactttggattaagaaagacttctgttgcctctcacttgaaattaccaagtgggtttgcacctcctcataaagaacatgtttgcactgtgctgaagggctttgctatgcatacaatctgctttcttggtttatcagtttattttctttctaaaagctccctgaagggcaatatcatttggcttggggtgatcagtgtttacttattgatcttgctagacaatatcaaaataacttcccacattttccagtgaaacagatgttacataaaacgattgcagcttggctatttggttgaagggattacagagcccaataaaggatttaaaatatattcattaagattttatttggaaaggtggctggagagagctgaggatttccaggactttgtaagttcttattctgggagaacataaggccaataatcatgacctcttccaggcatttttaagacagatgtctattcatgttctttagctagagcctgtactttttgctggcatttgaataacccagtttaaaaagagtccagttagggtggactaactttggacacaaattggcttccatttcctacattttcatactgctgccttcctacagctgctagaccaagacctgttggtctgggaagcatttcatggatagggagagctcctctcggtgaacagtccaaaactaaaatagatgtttatatagaaagcccaagaggagacttttgccatgcctgagttctttcctatcccaccctaacacttaacatattacttagtctgctttgttaaaagcaagtattacctttaacttgcctcttactctttgccctttagctaactaataaagtttgatataggcattattatataattctgagtcattcatggtatctctcatgtttgatgtatttttcaaactaagatctatgatagtttttttttccagagttccattaaatcatttatttcctttactttctcacctctgttgaaacatttagaaactggatttgggaacccaattttggaaaaccagattcatagtcatgaaaatggaaacttccatattctgtttttgaaaagatgtggccattattacagtaattttattataggactttgcctcgtacaattaatagtgatattttggacaaggagttctggtgacaagctatacctaattataagctataaaacaatagatatgagtgtttgtacagtttaactcaatggagatcagaatattctatgtattgagaaaatgtttaatatcaatctataaatcttgaatttctaagaggcttattttgttcttttggctgaatgagtatatttgaattggttgaataattaataattctcattgtaaaaataattatatgccaaaaatatatttgatgttaaatcaaatagatgattctgtttacattgttcatatgaataataatctgtgttaatttcattttgataattggcctttaatatttgtatctctaattttattttctctctgttactgtaaaataatagctataatgtataacaattttcttcagaagaattctatgctattattaaaataaaatatttactgtgtannnnnn

SEQ ID NO: 91645 - DNA, 1612 bp, Homo sapiens
cctggtacggtccgaattctttggatcgagcccgccgcggccatggacgcgcccgcccggctgctggccccgctcctgctcctctgcgcgcagcagctccgcggcaccagagcgatgaatgacatcggcgactacgtgggctccaacctggagatctcctggctccccaacctggacgggctgatagccggctacgcccgcaacttccggcctggcatcggaggcccccccgtgaatgtggcccttgccctggaggtggccagcatcgaccacatctcagaggccaacatggagtacaccatgacggtgttcctgcaccagagctggcgggacagcaggctctcctacaaccacaccaacgagaccctgggcctggacagccgcttcgtggacaagctgtggctgcccgacaccttcatcgtgaacgccaagtcggcctggttccacgacgtgacggtggagaacaagctcatccggctgcagcccgacggcgtgatcctgtacagcatccgaatcacctccactgtggcctgcgacatggacctggccaaataccccatggacgagcaggagtgcatgctggacctggagagctacggttactcatcggaggacatcgtctactactggtcggagagccaggagcacatccacgggctggacaagctgcagctggcgcagttcaccatcaccagctaccgcttcaccacggagctgatgaacttcaagtccgctggccagttcccacggctcagcctgcacttccacctgcggaggaaccgcggcgtgtacatcatccaatcctacatgccctccgtcctgctggtcgccatgtcctgggtctccttctggatcagccaggcggcggtgcccgccagggtgtctctaggcatcaccacggtgctgacgatgaccacgctcatggtcagtgcccgctcctccctgccacgggcatcagccatcaaggcactggacgtctacttctggatctgctatgtcttcgtgtttgccgccctggtggagtacgcctttgctcatttcaacgccgactacaggaagaagcagaaggccaaggtcaaggtctccaggccgagggcagagatggacgtgaggaacgccattgtcctcttctccctctctgctgccggcgtcacgcaggagctggccatctcccgccggcagcgccgcgtcccggggaacctgatgggctcctacaggtcggtgggggtggagacaggggagacgaagaaggagggggcagcccgctcaggaggccaggggggcatccgtgcccggctcaggcccatcgacgcagacaccattgacatttacgcccgcgctgtgttccctgcggcgtttgcggccgtcaatgtcatctactgggcggcatacgccatgtgagcacaaggactcaggccaccctcgcttgtcctggcgcccggcggcagctgccagaaacttcctgggagaaagagccctcgggctgctttccctctgcgtgttcgaagtgggatgacagtcggcacggaaaacaagaggaagctcggctcctgagctctgacccagctcaaccgaaaagccagctggggctctccggcaagaagccgagacg

SEQ ID NO: 91646 - DNA, 1658 bp, Homo sapiens
agcgggcttagctcccgcccgcctgtgccgcctgtgcggccgccgggagccaagtttgcgcggaccccgtcccgagcccgccgcggccatggacgcgcccgcccggctgctggccccgctcctgctcctctgcgcgcagcagctccgcggcaccagagcgatgaatgacatcggcgactacgtgggctccaacctggagatctcctggctccccaacctggacgggctgatagccggctacgcccgcaacttccggcctggcatcggaggcccccccgtgaatgtggcccttgccctggaggtggccagcatcgaccacatctcagaggccaacatggagtacaccatgacggtgttcctgcaccagagctggcgggacagcaggctctcctacaaccacaccaacgagaccctgggcctggacagccgcttcgtggacaagctgtggctgcccgacaccttcatcgtgaacgccaagtcggcctggttccacgacgtgacggtggagaacaagctcatccggctgcagcccgacggcgtgatcctgtacagcatccgaatcacctccactgtggcctgcgacatggacctggccaaataccccatggacgagcaggagtgcatgctggacctggagagctacggttactcatcggaggacatcgtctactactggtcggagagccaggagcacatccacgggctggacaagctgcagctggcgcagttcaccatcaccagctaccgcttcaccacggagctgatgaacttcaagtccgctggccagttcccacggctcagcctgcacttccacctgcggaggaaccgcggcgtgtacatcatccaatcctacatgccctccgtcctgctggtcgccatgtcctgggtctccttctggatcagccaggcggcggtgcccgccagggtgtctctaggcatcaccacggtgctgacgatgaccacgctcatggtcagtgcccgctcctccctgccacgggcatcagccatcaaggcactggacgtctacttctggatctgctatgtcttcgtgtttgccgccctggtggagtacgcctttgctcatttcaacgccgactacaggaagaagcagaaggccaaggtcaaggtctccaggccgagggcagagatggacgtgaggaacgccattgtcctcttctccctctctgctgccggcgtcacgcaggagctggccatctcccgccggcagcgccgcgtcccggggaacctgatgggctcctacaggtcggtgggggtggagacaggggagacgaagaaggagggggcagcccgctcaggaggccaggggggcatccgtgcccggctcaggcccatcgacgcagacaccattgacatttacgcccgcgctgtgttccctgcggcgtttgcggccgtcaatgtcatctactgggcggcatacgccatgtgagcacaaggactcaggccaccctcgcttgtcctggcgcccggcggcagctgccagaaacttcctgggagaaagagccctcgggctgctttccctctgcgtgttcgaagtgggatgacagtcggcacggaaaacaagaggaagctcggctcctgagctctgacccagctcaaccgaaaagccagctggggctctccggcaagaagccgagacg

SEQ ID NO: 91647 - DNA, 996 bp, Homo sapiens
tttatagatgcagaaaaatcatttgacaaaattctacacccattgatgataaagaactctgaccaaactagaaatagaaggaaagttcttcagccaaataaagagctaccacaggaacatacaaggaaagctgagagaatccacagaccctctgaaggaactggatcgccactgcaggctccctgagatgctgaaaaactcaccattcacaatagcaaagacatggagacaacctaaatgaccatcaatagtagactggaataaagagaatgtagtatatatacaccacggaatactatgcagccattaagaagaaccagattcatgtctgtctcaggcagtggtgagacaagatggtggatccccacaccattatccatcagaccctgtgctccatagggaaagggcatatgtgactcagaggaatgtgtaggacaattgccaagcgcaagacacatggaggatcctcatacagtggctgggtgaagtgacttttgttctctactgcaagtagtgatgtctcagtgaaggtctatcaatgagaagaaagtgccaactgaaaacttttagaaaatacccagtttactcaaggaaaataacatgcattgaaggtgattgctcaatagagagaagttgaaacagcagactaattgcctgtttgtgacacccatgtaatcaacttggtgaaagttacattgatacagacacaagcgaaaaatttgatggccaataggggacatgatccattttccagtgcctataggttgaggttgatctgaaagataggactatttgtgatccagaatcaaaagagtcaagaaaagtctgagaatttcatccttggagcagaaagtgaaagtgttctggagccaaaagtagtaacaaagatggagggcaagagatcattggattaaatcatattggcagaccaaatttcagaagaatcaacacaccagagacaagaagaacttgaagttaaagcaaagttcccttata

SEQ ID NO: 91648 - DNA, 712 bp, Homo sapiens
ctgctgtggaacttgtctctgtctctttttctgatttgtccctcagtcgaattatttcttctgaggaggcaaggactgaagttgctacagacccctaaggacaggccatcggtaacactgggtaaatcagatctcttccacgggtctatcaatgagaagaaagtgccaactgaaaacttttagaaaatacccagtttactcaaggaaaataacatgcattgaaggtgattgctcaatagagagaagttgaaacagcagactaattgcctgtttgtgacacccatgtaatcaacttgccatttgtactcatcagttcaggctgtgttttcccactgagacatcatttacagtgctctaaacatattttcacaacattcacctgacaacatcagctgagagaaaaattttcagactgccgagaaacatcaggaggccatgaattcttaatcaacacaccaaattatgaaaatggcctataggttgaggttgatctgaaagataggactatttgtgatccagaatcaaaagagtcaagaaaagtctgagaatttcatccttggagcagaaagtgaaagtgttctggagccaaaagtagtaacaaagatggagggcaagagatcattggattaaatcatattggcagaccaaatttcagaagaatcaacacaccagagacaagaagaacttgaagttaaagcaaagttcccttata

SEQ ID NO: 91649 - DNA, 1095 bp, Homo sapiens
ggaaacaaaaaaggaaaaatgtagcacagtaaaatactataagtcatttaaataaaaatacactcaactccgtctcaaaaaaaaaaaaaaaaccggaataccagattgttgtccttttgttttcttgttacacatttgagcccagattttgacttaatgtgtattatttatttttatgttatctcctttctgcttagttgactttctagctgagtggtgcacagtgcatggaagattccacttagccggaccaggaagcttggtctcatctgtggtgcacaccaacagcaaacattgatgtaattctctacaacttaatctttggcacatagaggatttgggggtctccatgttcagggcacaatggctttaataagtgctggaaaatcactgaagctaaaccaagagcaccagatcctctttacctaaatacccagtctttaacatgagctagtccctgtaccatagtattgtttcagctgtagttggttgtcatgttaataagacagctgcacgtctaccttcttttcttttgatttccattgtcttggtaagttattgttagggttatttttaatgtgccttccagccagaaaaatcagctgtctaaagaagcattgcaattgtaatggggactcttacctcttagaatgcaagattttccctcctccctccctcttctccatctctttccctcatgatttgagaactgtaataatcctccactggtggcattacctacctagaaaacctgctgattcttagcatggaactttgcttcagtttgcaggacaaagtctgcttccttccggtcttcatttactttttatacaagggatgcagtcagctctccatgtataagatacctagatgatggatacatatttcataaatgaaatttatgtcattaatgaatatccccttgcccacaaccagctcaggctttcaaaattcgagaatggtcatgccacacagcattctaatctagatggattaattctgttgttcaaaacattctcatacctgcctttatattgaaaacaaattctagatacaactggggttattctggaaaagcacattctcacctttttt

SEQ ID NO: 91650 - DNA, 1149 bp, Homo sapiens
ggaaacaaaaaaggaaaaatgtagcacagtaaaatactataagtcatttaaataaaaatacactcaactccgtctcaaaaaaaaaaaaaaaaccggaataccagattgttgtccttttgttttcttgttacacatttgagcccagattttgacttaatgtgtattatttatttttatgaaaattgtggacacataaccaagataaagaagtcaggtattccatagccattccttatctcctttctgcttagttgactttctagctgagtggtgcacagtgcatggaagattccacttagccggaccaggaagcttggtctcatctgtggtgcacaccaacagcaaacattgatgtaattctctacaacttaatctttggcacatagaggatttgggggtctccatgttcagggcacaatggctttaataagtgctggaaaatcactgaagctaaaccaagagcaccagatcctctttacctaaatacccagtctttaacatgagctagtccctgtaccatagtattgtttcagctgtagttggttgtcatgttaataagacagctgcacgtctaccttcttttcttttgatttccattgtcttggtaagttattgttagggttatttttaatgtgccttccagccagaaaaatcagctgtctaaagaagcattgcaattgtaatggggactcttacctcttagaatgcaagattttccctcctccctccctcttctccatctctttccctcatgatttgagaactgtaataatcctccactggtggcattacctacctagaaaacctgctgattcttagcatggaactttgcttcagtttgcaggacaaagtctgcttccttccggtcttcatttactttttatacaagggatgcagtcagctctccatgtataagatacctagatgatggatacatatttcataaatgaaatttatgtcattaatgaatatccccttgcccacaaccagctcaggctttcaaaattcgagaatggtcatgccacacagcattctaatctagatggattaattctgttgttcaaaacattctcatacctgcctttatattgaaaacaaattctagatacaactggggttattctggaaaagcacattctcacctttttt

SEQ ID NO: 91651 - DNA, 1096 bp, Homo sapiens
cacccttcctggagctgtccaggtgccagggtccaactcctccctcaaggaatcctgtcacacgatgtgacatgcaactgtgttgccccagctcggagcaaaggcggacatggacataccggcaggagagtcctccacagggggtccgttactctgaagaacgtaatgccaatcagcttttatctcctttctgcttagttgactttctagctgagtggtgcacagtgcatggaagattccacttagccggaccaggaagcttggtctcatctgtggtgcacaccaacagcaaacattgatgtaattctctacaacttaatctttggcacatagaggatttgggggtctccatgttcagggcacaatggctttaataagtgctggaaaatcactgaagctaaaccaagagcaccagatcctctttacctaaatacccagtctttaacatgagctagtccctgtaccatagtattgtttcagctgtagttggttgtcatgttaataagacagctgcacgtctaccttcttttcttttgatttccattgtcttggtaagttattgttagggttatttttaatgtgccttccagccagaaaaatcagctgtctaaagaagcattgcaattgtaatggggactcttacctcttagaatgcaagattttccctcctccctccctcttctccatctctttccctcatgatttgagaactgtaataatcctccactggtggcattacctacctagaaaacctgctgattcttagcatggaactttgcttcagtttgcaggacaaagtctgcttccttccggtcttcatttactttttatacaagggatgcagtcagctctccatgtataagatacctagatgatggatacatatttcataaatgaaatttatgtcattaatgaatatccccttgcccacaaccagctcaggctttcaaaattcgagaatggtcatgccacacagcattctaatctagatggattaattctgttgttcaaaacattctcatacctgcctttatattgaaaacaaattctagatacaactggggttattctggaaaagcacattctcacctttttt

SEQ ID NO: 91652 - DNA, 180 bp, Homo sapiens
tggcatcctgaagattaacatcaggatgggcagcttgaaaaatggcttataggtggcattttagtttccttagcaactcaattttcctagatcatatctaaataaaaataattatgctttctgcagtagaacaaggtcattctgacctcctcaactctcttttagctggaaattaggcaa

SEQ ID NO: 91653 - DNA, 461 bp, Homo sapiens
atcacaggacaacgtaagttacacagtacaagttattctggattccaataacctagggttttcagggaaatccttccaaaaagtatagtttttttcctgcattcttaaaatgagcttaatatcattctgcctgttcttgctatgtcaggctgccattgatccactggtgagaatgcaggctcaggtgtccacggagccaggaagtgggcttcaatgcccttctttctgaggaggattcccaggctacattttcttgccactcacctcctcctctccaaggagaaagaggtggcacatgacctactggaacatgtgggctatctacctttttgggatataacatcaaaggccagggccctgaattttcatgctgataacagtcttctcaaccattatcttctgcctgatttgtcagcagcattccacctttattttggatttgttttattcagaagtctgta

SEQ ID NO: 91654 - DNA, 302 bp, Homo sapiens
tacttgacaggggagaagaggttgacattaggccatgtcattcaaacccgttctgcaaacaggaaaacaggaagtagaaacgccgcacacagatagttaaaccttgggattcagactctgatggctctgatgatatggtgatttgtgtgctggggatgaaagaggagcagaagactgagcttacatctcttcagacgaaatgcaattttctctattctttccctgttactattgttacgaccaagcattttcattgatccattatcatcttcatcttgagatcacaaaggaagttaattgcc

SEQ ID NO: 91655 - DNA, 394 bp, Homo sapiens
ttttctttagaaaaggttgaaaaatagagttctgccttataaattcatgttatttgctagttcagtaaattactatttttttctatttctaggcattttatcttttcatcctcacaaatgtattctaaattcatcatttaaatatctttctgattgtaatcttgctgaataccagttttgttttccttatattgctttagtctctcttgggctcctttcaacctacttggctattccccctttttgaatgacctcattctttctgaatcccacacatcttctgttgattactaaggtctgtgcttaggattcacagtttcctcttctctctcacacgaatacaatctatgttccttttcacaatgaaatatttgctacagttccataacttatt

SEQ ID NO: 91656 - DNA, 212 bp, Homo sapiens
ctcagctccacaggggagactgaacctgtgtcttttcagaaatcaaccaagtcaccccagcaaagaggatgcaaaggagaggtaaagccatgtcttcctcgagggtgggacccggcaggtccgagtattccttccagatgctggcaatcaggactccagctcagcgtgcagtgtttgggaacattgcccctgctgaggtacttcctgcccct

SEQ ID NO: 91657 - DNA, 190 bp, Homo sapiens
agagcaaaactctgtctcaaaaataaaaaataaaataaaataaataaaaactcaagaggttcacctgtagacatgcctctagcaggttcccaggcacctgtctctctccatctcttgcctctgctttgctctgttatgttggcattttaggcagatcttcccccattcggcagcagttatggccatcagc

SEQ ID NO: 91658 - DNA, 339 bp, Homo sapiens
ccatatttagaatgcaagaaaatgcatacgtttattaaagtgataaaaatcactttggccatatttattcattctcttatgtctttcgtaagaagacataaaagacacctctttccctgggtaacatagcacatcccagataactgtgattttttttttttgtatcatcaaaggaaactgaagagaaaaaccaaaagaaacaaagccaatatgactgttatgtgtcattgtacagtttcttgagtttgttgcagagtgaaaattacttgggaaaaattccaaagtaagctttcgtgttgccccaattcatataaaccaataaaagattttctttcctag

SEQ ID NO: 91659 - DNA, 357 bp, Homo sapiens
gtgtggcagctcacacctgtaatcccagcactttgggaggccgaggtggtcagatcatgaggtcaggaaatccagaccatcctggccaacatggtaaaaccccatctctactaacaatacaaaaattagctgggcgtggtggcacatgcctgtagtctcagctgctggagaggctgaggcaggagaatcgcttgaacccaggaggcggaggttgcagtgagctgaggtcgcacaactgcactccagcctggcgaaagagtgagactgcgtctcaaaaaaataaaatttgagctcagatttacatgttataactcattctggagtcagaatttcacatcttgtgaaggcagagcagat

SEQ ID NO: 91660 - DNA, 163 bp, Homo sapiens
aatcagctcaagtatcacctcttccaggaagcccctcctgattgctcctgtacacatgcacaacagagtgcgtcagacgcgattctgctcttatcctgagacttctgggctttcatgccactggtaacaactgcttgtgtctgggtctgtctcccctatgagc

SEQ ID NO: 91661 - DNA, 353 bp, Homo sapiens
gagatggagtctcgctcttgttgcccaggctggaatgcaatggcactatcttggctcaccacaacctccacctcccaggttcaagggattctcctgcctcagcctcccgaatagctgggattacaggcatgcaccaccacacccggctaattttgtatttttagtagagacagtttctccgtattggtcaggctggtctcgaactcctgacctcaggtgattcacccgcctcggcttcccaaagtgctgggattacagaggtaagccactgcacccagccgtattactcttttaagaaattacagactttggatattccactttaccttcttggaaatgtccctcctgggccc

SEQ ID NO: 91662 - DNA, 523 bp, Homo sapiens
acgttggtgttcatgaacaatctgagcactccatgtggaaagaagcagatacagctgtaggacccatgagagtaagcagaccttgcagacctgaacctggatgtgtaagagcgccttcgtattttatctttgaaacacccatagagaaagggggctgaacaagggtcaatgagcagccctggagcccagattaagctctccataccacttcccatggaaggaaaccaagactccctggagacagacacgtggctgatttcaggcctagggtagaagaagtacaaaatggcacagaacatgctggcttgtcataccatatcaaaatgaagcaattgaggaccgcgagaactgcatcacaaggctcaggggccaacacaaagatggaacgacgtggacatcggtgaagaacgaatagagtaagtcatgcattcaatagggtggccacacacgccacaccacacacacctaggcgcacacactgacatgcgtgcgcacacacacatcactcacatccacacacacc

SEQ ID NO: 91663 - DNA, 142 bp, Homo sapiens
tggtttgtgcttttggaagaactaggaggtgggacgcttctgtgccgtgtcaccgatggatggaaacaggaggaatcctgtctgtgttcaagcagacccactccgctgaggacttgggaacaggctgcagaatgacacgcgc

SEQ ID NO: 91664 - DNA, 300 bp, Homo sapiens
gtttcaccatgttggtcagggtggtttcgaactcctgacctcttgatcagcctgcctcggcctcccaaagtgctaggattacaggcatgagccaccatgcctggcctaagcctatgtttttaaaagccatagaaagagactaagagtgaaaatcattgtgaaaagagcttgaatatctcttgtgactccacctctccttaaatatttataagatgtatttgctagattgatgtgcatgttcagttctaaacctttgaagtaatgcagaaaccaaatactgtgttggttaatggtaatgca

SEQ ID NO: 91665 - DNA, 307 bp, Homo sapiens
tcccaagcccaagcgattacacggcctcagcctcccaagtagctgggaccataggtgcgcaccaccatgactggctaatttttgtatttttagtagagaagtagtttccccatgttggccagactggtcttgatcttctgacctcaagtgatccacccacctcaacctcccaaagtgctgggactacaggtgtgagccaccacacccagccaccttcttcactttcaatctgccaccatctaacactctgcacctctcaccctgtgattttgtttactatgtgcctccctcactgggctcttagctc

SEQ ID NO: 91666 - DNA, 397 bp, Homo sapiens
ggagagagaatgtgtgagcggcaactttgaggccttgggatgtgcagaaggggtcgagtgcaaatgtttggggacctgcttcaaaccttgtcctgtgagcagcttgtttacacaactaaccatacattcttccagccagccccagaatcctgagaatataatcaaaagcatatccctaagatgcaaccagattcatccagtgatttaattttaagcactgcttcgccattttattccataatgtacttagaagcacttacaatgtctgaaattaatcaacagtgtccccaccggttcctcgtttctttcccacccacgtatattattagcaggttatatctccacctttcaagattcacggttatgtctacgacgaatggtatttgccttgactttc

SEQ ID NO: 91667 - DNA, 1609 bp, Homo sapiens
cggccggagccggagcggatcctggagccggagcggagcggagcggagcggagccggggcggagcgggccgagcgggccgagccagcagccgagctgggggcgcgggcgggcggcatgtaccgggcccgggcggcgcgggcggggccggagcccggcagcccggggcgctttgggatcctcagcaccgggcagctccgggacctgcttcaggatgagcccaagctggaccggatcgtgcggctcagcaggaagttccagggcctgcagctggagcgtgaggcctgcctggcctccaactacgcgctggccaaggagaacctggccctgcggccccgcctggagatgggccgggctgccctggccatcaaataccaggagcttcgtgaggtggccgagaactgcgcggacaagctgcagcgactggaggaaagcatgcatcgctggagtccccactgcgcgctgggctggctgcaggctgagctagaagaggcggagcaggaggcagaggagcagatggagcagctgctgctcggggagcaaagcctggaggccttcctgcctgccttccagcgtggccgcgccctggcccacctgaggcggacgcaggcagagaagctgcaggagctgctgcggcgtcgggagcgttctgcccagccggcccccacctcggctgctgatccccccaaatccttcccggctgcagctgtcctgcccactggggccgcccgggggccaccagcagtgccccggagcctgccccccttggactcccgcccagtgcccccactgaagggctcccccgggtgccccctcggcccggcccccctgctgagccctcggccctcgcagccagagcccccccaccggtaggatccacggtgcggccccccagttggggggcctagacaaacttgatgcgtggctcctcctcctcccccactgcctgggtggggggaggggcaggcccctccccctggcctcaggcaggccctggccctggaggctgagctggggaggagggtcccctggaagaggcccgagagggggctgggggtgggtgggcagggctttatgcctctggcgctgaagacaccctgccttttttgtttccgtgccccggggcctctagggtgatggaccagccccgttaaagaacttgactcaactacaggggcctgggaagatgcctgggtcccctaggggccttgccaaggggacctgtcgcaccccaccactccactgggctcgcacaacgccaaggccgccaggagtgttttacatcatgtcctgagcctacctttcccccaaattctggggcccacagcctaggagccaggtgatcaggcctcggctgtggggccagggacaccatggccctggggctactacgtgtccacacatgctccagaccctggggcaaggtaggccaggggcttctgacctgtgcaggtgagagtgggccatacccaggaaagaccattctgtatttttctgtccctgtctccttagaatggaagctttttgagggcaggtccttgtctttgtacgttctgtccccagccccgcctcttaggggccgtcaataaatgtgatgatgaggatgaaaat

SEQ ID NO: 91668 - DNA, 357 bp, Homo sapiens
aaaaaaaaaaagaaggaaaagaaaatattaatgttctattgtagaacccttaaaaggaccttaaagatgaaccaattcaacttcactcatttactacataaatgcctttttcaaattcttcatgtgacagaaaaatgagttgagctaacaaaatgaaggcagaattgttaatctgataacagtagtatgaataattcaacagaagctaggaatttttgtactgatacattgactcatttacaaagctagaaggaacttttctgctgtttgtaaaatttttgtttagagaaaacccaccaagcaatagagtgaacatttagtaccttaatcttagatgatgaattcgttaaagaattt

SEQ ID NO: 91669 - DNA, 318 bp, Homo sapiens
cagaggtgagggcagcacacccgcagcagctgtccaggcctgagccaatgcaaccctgggcgggaaggccagctcaccgtgagcaggtagaagccagccagccacccaggcagggaccttggttctccccacacactcccaggagcagggaacaggggtggagtggcctttcccagagctggagttggctgcagcagctttcgaatcagacctgccaaggtgatgggcgtctgagtttcacatctgggccccccgtgaccccactgagtcctgacagctaaggatgggccacctccacagctccgtcactcgtacttg

SEQ ID NO: 91670 - DNA, 1101 bp, Homo sapiens
gtaaatgtagataaacctaaactccaccctgtactgagccttaggctagggactcatgtgtaaagatgacttttctccccagatatcttgtcattgacaggccttcctagtctggtagtcctacatttgggtgttctcctgagagtgagaaaaaacccaaggtcatgacaagattcctggcaggtgacagacttcattatgattctgactctagactgaccccatcaagatagtcgtttccgtcagtgaacagatgctgaaggccttgccattacaaaggagacaactgagttccctgggtcataaggagtccagaaattagtgtgagaaggtccttctggaagtgaactcaaaattcatgtccagctgtcatcgttaaacccttaggcaggtgagtataacccattctaacctcttggagaagggagtgtgatcaatgtgaatcacaatagtattgctcatctgagacattcctcttatatccaagcagctatctcccatgagtgaacatcccagtggtttcagaaaatcatgtcctgaacagattctagccagccccacaccaccctggccaactgcaaccgctgctgctctagcagtctgggtcaattcctacaggcttgggagcccaccccagggaggcttttatctcctgcagcctcatccccagcaccctcaaggtagactactcctcagcctgaatcatgaatgaaacctgaacatctgccaacttcattatctagcccagtatctcttccctcacagagaagaagaaaatgaaatacaaagttgatccatttgttggctttctctggccggagaaacctctcgggttgttgctgtgagctttgatgaagttgtgataaccagggccatttgcacataggtttttttaaaaaacatgaaaagttcccttctcctttatttagcagtgtttccgggctgaaagacgccctcctccccctctgcgcttacccaggacgttaattaattgcactgtcatttaaaatattatgttgttaattactcgtttgtgtcttcccacccgtgtcacagcctggagtttttattcaattaaatctctgtctcttgcccaaatct

SEQ ID NO: 91671 - DNA, 892 bp, Homo sapiens
tctctctctctctctctctctctctctctctctctctctctcagatgctgaaggccttgccattacaaaggagacaactgagttccctgggtcataaggagtccagaaattagtgtgagaaggtccttctggaagtgaactcaaaattcatgtccagctgtcatcgttaaacccttaggcaggtgagtataacccattctaacctcttggagaagggagtgtgatcaatgtgaatcacaatagtattgctcatctgagacattcctcttatatccaagcagctatctcccatgagtgaacatcccagtggtttcagaaaatcatgtcctgaacagattctagccagccccacaccaccctggccaactgcaaccgctgctgctctagcagtctgggtcaattcctacaggcttgggagcccaccccagggaggcttttatctcctgcagcctcatccccagcaccctcaaggtagactactcctcagcctgaatcatgaatgaaacctgaacatctgccaacttcattatctagcccagtatctcttccctcacagagaagaagaaaatgaaatacaaagttgatccatttgttggctttctctggccggagaaacctctcgggttgttgctgtgagctttgatgaagttgtgataaccagggccatttgcacataggtttttttaaaaaacatgaaaagttcccttctcctttatttagcagtgtttccgggctgaaagacgccctcctccccctctgcgcttacccaggacgttaattaattgcactgtcatttaaaatattatgttgttaattactcgtttgtgtcttcccacccgtgtcacagcctggagtttttattcaattaaatctctgtctcttgcccaaatct

SEQ ID NO: 91672 - DNA, 195 bp, Homo sapiens
agcttgatgctgtaggtgatctagaggatcccagcgagccgcacagtaggaggtgagcagtgggccggtgagctactgtgtgagctccaccccctgccagagcattactgtgaactccgccacctgtcagagcattactgtgtgagctccgccccctgccagagcattactctgtgaacaccacctgtcagagca

SEQ ID NO: 91673 - DNA, 457 bp, Homo sapiens
aattttaaaagattttccagcaaattctgatcctctcacctaaatgaaaatcagtacctttgcaaatccacttgaccaaaagtagaaactcccattgttccagttatcgaggactttatatctgcattgagtacaacaatgttctggtaagtgactagtgcttgggaatatttttcctttccttttcccactgtgaagataaatgaaggagcactatatagtgttagaattctctgctttgtaaagattctgtgtcctaaaagatggaatggatgataagtgaacaaaaggagaaaatgaagtgtcagaatgtaaatggacacaatgataaactttagaggtttaaaccagataggttcaagagtgcaaactagagtgattttccgagtacatccttagcccgacttaacctgaaagaaaatacatacaaaattgggaacctgaggtctcttacttt

SEQ ID NO: 91674 - DNA, 322 bp, Homo sapiens
tgttttctaatgatttttaatttttcagaggaaaataatttcaagaaataaaacttaattcccctgagtccttattgaattaaatattgaaaaacaatgaatgaatgatgcattcttattaatggactgtaagaaactgatataatggacttcattctacaattcggtttcttattgtcttacacatgctcctcgaacttaaacattttaggaccttaacaccatttccctagtacaattactaaaagaaagctttggataatataatatcagggaagatagtacaacatagtgaagatgacataggaagatgtgaggagca

SEQ ID NO: 91675 - DNA, 300 bp, Homo sapiens
ggtgacattttttggttcttaaaatggctactgtgttttccgcacggtgagactgcttatggagacataatgagaagtccagttgaacatactggagctgcacgctttgcacagagcgccttatggaagggcagctttagctatctagcacacagctgtgtgcctagccgcggcctggaaatcagagttgcctctaaggattgttagtaagaaaggaacagggcaggccttcctaaattggacctagttaatgagttaattttgagctttaaaatagaaatcgagttagtcacctcccaa

SEQ ID NO: 91676 - DNA, 696 bp, Homo sapiens
atttaattatccactgttaggtcagatttttaatgtataatttttattttagatatttttttcctagaacaagcatataggtgtttctataaatgaccgtgagaaattcttttatttctttaattttgtggtggtatttttataaagtgactgctttgtgctagggataatctatcttgaaatgactgcttttactggatgtaatctgtcattttaatttcctgttaacagatggtggttgcattagaaaaggctttgggttttattcatatcagaagctaagagcctatcattttatttcacctaacttttattagaagatatacatatatatatatatattctatgtgaaaatatacctaagtagaagatatttgtaagcttaggtaatagtttaactgttgtatttgcagctccattaaatgtcagaatcatgtgtccttgcagaaaagatagttatttgttctacttgggttatgttcctgatagtaatgtgagcgcagctggtagaggatggcattcctgtgagtctcagaaaatcctttgtctcgtgcagctctaatgctcaagggacacacttcactttccccttaccgagatagtcgaccgccaatcgtactggaggttatgaagtgtaatacacagttccatgcctttatcagtctgtataattgatgcattcagagctttaaagca

SEQ ID NO: 91677 - DNA, 954 bp, Homo sapiens
gatttccaaccattttgttcaaaactctcaaggccttggcaacgtgctctcccggattgcagagatctacatcttgtcccagcccttcatggtgaggatcatggccacagagcctcccataatcaatctacaaccaggcaatttcaccctggacatccctgcctccatcatgatgctcacccaacccaagaactccacagttgaaaccatcgtttccatggacttcgttgctagtaccagtgttggcctggttattttgggacaaagactggtctgctccttgtctctgaacagattccgccttgctttgccagagtccaatcgcagcaacattgaggtcttgaggtttgaaaatattctatcgtccattcttcactttggagtcctcccactggccaatgcaaaattgcagcaaggatttcctctgtccaatccacacaaattcttattcgtcaattcagatattgaagttcttgagggtttccttttgatttccaccgacctgaagtatgaaacatcctcaaagcagcagccaagtttccacgtatgggaaggtctgaacctgataagcagacagtggagggggaagtcagccccttgattgccggtttgcaattcaccccaggaagtaaatggtccttaatcctacaactactgtaaacccagaagggaaagacagtacacactggaattgtaaagcccttgtgaattgcttaggcagaaagttttctttcttaagccttcaggaacccagaataaggcagactctgttaaagggataaatagaggtgtctgaatgtgagtgtatgcatgctgcgtgtgtctgtgtttatgtttgtttgtttgtttggggcaagaaagattctaggacaagagctaggcatgtacttctgaccaggtgggtaagcaactctaagtctgtatttgtattggtcattctcagtggaaatccct

SEQ ID NO: 91678 - DNA, 167 bp, Homo sapiens
ggcctctccgagccctgcatattcccgattgctccaggagtgactgtcttctaacctcaagggctgaacagacaaaagtcatgacaagctgctcaaccaggaccctttagtgctagggctatgggcaggcccagattcgatactgcattttccatcgttagtcaagc

SEQ ID NO: 91679 - DNA, 794 bp, Homo sapiens
aggccgccaccgccaccgccaccgccaccactgccagaatcgcctctcgggggtcgccgggtgtctcccactcccccggcctcgggacggggcccgcagtccgcagcctctcccgtggaaaccgggcctcccgtccctgtgcgtcgcgagcgggctccggacagcgccagatgcgagcgcgccgggaagggctgcgaagactcgctcttcgggagctcgaatggcttcttaggaccccgcagggcgggtttccaggcctgccacggcctccagtgtgggcgtgacgagcgctcctccctggagttcagccctcggcttgggactgcccgctgggttgctcggaggccccggagcatcggaaagggcggctggaggctcccggagcgggctcagcctgggagcccagcgactacgctctgaaatcccgggctccattccatattttttggcgtttttagaagatggtcacggcccactttcgcttttcagaggaccggaaagccttaacagggagttttgaggaatcactaagaggcattgaagcttccgggattgggagtaagctgccatggaaagaaactcaggctggactactgcatgatgagagatcacatcaaagagaacagtccagccagcccaacttgagacaccagacatgtgatggagccatcttggattcctcaccccagccaacaccatgtggagcagaggcaaaccctctccatggagttctgcctgaattgcagacttgtgaataataataaatggccattttaagccgttaagatttagag

SEQ ID NO: 91680 - DNA, 446 bp, Homo sapiens
atgtgggtgggtcatcaccaacagttcctccctttcctatctgcatatgctggtcctcccatgaagaagtagaatttatttttcatgccgtaaatcttgactggtcttctaacttgtttatttcttggtctgggccttaagaggcattgaagcttccgggattgggagtaagctgccatggaaagaaactcaggctggactactgcatgatgagagatcacatcaaagagaacagtccagccagcccaacttgagacaccagacatgtgatggagccatcttggattcctcaccccagccaacaccatgtggagcagaggcaaaccctctccatggagttctgcctgaattgcagacttgtgaataataataaatggccattttaagccgttaagatttagagtggtttattatacactcataggccatgtaaatatcatctcact

SEQ ID NO: 91681 - DNA, 866 bp, Homo sapiens
tgttaaattttctggttctgaacattgcactgtatatataagtgagtgtttctgttcttaggaaatacctactatggtatatagtacagtatttaggggaaagggacattaggcctgcaatttattctcttttttatatttttattttctttttttatcatgtaatcttgctccttctaatgcaatttactctcaaatggttcagaaaacaataacctgtatgtatgtgtgtgtacatatatatgtgtgtatatatataggtatatataatggaattacatatatataattagatatatattagatctatatatagagatatgtaaatgaaatttcattatgttaacaattggtggatatggaagagtatgagggctctttaaaccattcttgtaacttttctataagtttgagattatttcaaattacgaatttaaagcagttcagtggtaggaagtgattttcatcttcacttggtggtctgttatgtgcctgcattgcagatatgattttgattcataagcatagctttgcttttctcagaaatcttttcctgctgagtcctcccttccctgccatcaagtacagaagagagcactcagaggtgctcaaaaaataaaagagcatgtgttgtttaaaataaaagactgctacaaatgtctacctgctgcttcagaaatgttccacctgctgccccagattcagcatctggcagcccacgtggttaaagaatgtcagcagctgtaatcccagctactcaggaggctgaggcaggagactcgcttgaacctgggaggcggaggttgcagtgacctgagatcgcaccactgcactcctgggtgacggagcaagactccatctcaaaa

SEQ ID NO: 91682 - DNA, 729 bp, Homo sapiens
tgttaaattttctggttctgaacattgcactgtatatataagtgagtgtttctgttcttaggaaatacctactatggtatatagtacagtatttaggggaaagggacattaggcctgcaatttattctcttttttatatttttattttctttttttatcatgtaatcttgctccttctaatgcaatttactctcaaatggttcagaaaacaattggtggatatggaagagtatgagggctctttaaaccattcttgtaacttttctataagtttgagattatttcaaattacgaatttaaagcagttcagtggtaggaagtgattttcatcttcacttggtggtctgttatgtgcctgcattgcagatatgattttgattcataagcatagctttgcttttctcagaaatcttttcctgctgagtcctcccttccctgccatcaagtacagaagagagcactcagaggtgctcaaaaaataaaagagcatgtgttgtttaaaataaaagactgctacaaatgtctacctgctgcttcagaaatgttccacctgctgccccagattcagcatctggcagcccacgtggttaaagaatgtcagcagctgtaatcccagctactcaggaggctgaggcaggagactcgcttgaacctgggaggcggaggttgcagtgacctgagatcgcaccactgcactcctgggtgacggagcaagactccatctcaaaa

SEQ ID NO: 91683 - DNA, 293 bp, Homo sapiens
  misc_feature (101)..(101): n is a, c, g, or t
atgttttagtcaaatacaactttactttccaccataattttacaatgaaatgttagtatatttaaacttaagagcttgggctcagcttcagtaggcctgtnatggcattgtttaactcccccacagcctgggcaacaagagcgaaactccgtctcaaagggaacaacaacaacaaaaaagataaaataccagcacatgaataacagacctgcaaggtaaagagtgagaagcaaagaaaggaaggagacacagctagcactttcagaaaaagaagtgagtaaatataattattg

SEQ ID NO: 91684 - DNA, 275 bp, Homo sapiens
gccatgcaagcatgtgggcctttttgccacatctgatttttcccttcccctcccctcccctcttccttcccttccttcctttcttcctccctctctccctccctccctccagtggcaccatcacagctcactgcagccttgacctcctcagggcccaggtgatcctcctacttcaggctcctgagtagctgggattacaggcacatgccaccatatccggctagttttcatatttgtttgtagaaatggagtttcgccatgttacccaggctggt

SEQ ID NO: 91685 - DNA, 437 bp, Homo sapiens
ccactgcacagcgtaattttaaatatgcaaacctgatgaatttaatcagaataaaaatcacattaacatacagacccaccaagagaataatcttaaaatgtagaattgtagatattaactttccaggtagttagagaattcagtgaatatttcccatttacttccactccaagtaactgcagtttttactacatttcaaaaataaggtttgatgagagaagaaaaaaactttttaaagcaagaggacctaggcatagtggctcacaccagtaatcctagcattttgggaggctgagacgggcggagtgcttgagcccaggagttcgagaccagcctgggcaacatggtgaaatcctgtctctacaaaaaatacaaaaaggatccaggcatagggttgctcgcttgtagtcccagctaaacccgggaggctgacatgg

SEQ ID NO: 91686 - DNA, 381 bp, Homo sapiens
tgctcaggttgccacagcttgggtcactggtccaaactacccaacattttgcccaaggcagattcagttggcaccactgctggctctgattcttcatcctgttcagaatatgcatagccaattctccagcgtgggtccgggtcaccccctcccatcctgcaccctgctgaacctcacatgttttcctgagacccccgcatggggatggcacttcctatctagctgacatagttattattatctagtttcttgactgagatttcttcccccaaaacacttccaaaagttaactttgtttttccttgcacagtgaaatttgtttaaccaagtttcagccactgagaataattttatgcttgaaagctttgacagttccaaaat

SEQ ID NO: 91687 - DNA, 421 bp, Homo sapiens
acaatgagcctacaactcaaagagttcgtcttactttgagtatgagatataaaagtgcggtaaaaaatcaacagatgagagagcaactggagaagatttgaataaaatcactccttttccatgtgggtcaacacagtaccaaataagaactgggcctttgatagaaaatgtaagggacaccctcatagtgacttctttcctagcagtctgcctctgtttgcggtgttgtctggggtcattgttgaaagttattgacatatttctgcctctttgtgagttatctgtgaagctacgccacagtactctgttgttggctattctgcatgctcccagtgctcaggtgaattccttggaagatactgagcaaaaacctagagcttatatgaccataatatctagaccattagcatgaactggtaaa

SEQ ID NO: 91688 - DNA, 314 bp, Homo sapiens
gtaaatgagactctaactttccattttgagagtctgtgtttcctatgtgactatcctccaacttcgtgttcaaataaactccacacttcatcatattttggattctaagtatttaagcttgaaaattgcaaagacacattatcatgtttatgcgctgtcatacatgttggaaggatgtctcttgtctggaattttgtgtttattttttagttaaaagggtttcttcatgtttcctgttaagaggctctaattggccaggcatggtggctcactcctgtaatcccagcaactttaggaggctgaggcaggtggat

SEQ ID NO: 91689 - DNA, 183 bp, Homo sapiens
caaggacggctcattctccgggcacgtgggacccactggagttgcacccatgtgcaccccgggaagttgctgcctgcctttcgcaggcatctggctggcctctcacacttctgagctgttccccctaaacctaagcgcgtaggtcaggcttcggccgcagctgccttctcatgattctcagtg

SEQ ID NO: 91690 - DNA, 425 bp, Homo sapiens
acttggagcccctgaccttggagccctttgttgtgcacgaagtctccatgacattgccctccagttttcactggtggggatgttatcttacacacatacgccaagagcttaaactgtcaacagagtctagttgatccactgaatccagtgatcttactaggataaccatttacctcttcttgtgccatcaaggaagttggccacaaaatactgttcagaggggataaaaagtcactttgccaaacatagggttcacatggtcccaccttggttaaaagtattttaaaaagcagctctgtgtgtatttgtggtgtgtgtgtgtgtgtgtgtgtgtgtgtgtgtgtgtgtgcttacacacagaaacaaactttaccccagggtgtgaggccgggagagtatgcacatccactcttgactacctatac

SEQ ID NO: 91691 - DNA, 176 bp, Homo sapiens
gactctgtctctaaaaagatttttttataaaaactaaacaaggcactatattgtatttatgctgataaagtaaacggactaaaattctgtttaacaaaagaagatgctgattaccctaacataaaacaaataattcaaaaaactatagacattttaaagaaaattctttttttttt

SEQ ID NO: 91692 - DNA, 270 bp, Homo sapiens
ggcagcagagccctagggtgatagcaaaagaaagaggccaggaagtgagacacagaggagaaagacttcagactgtggcatcagagccacagcacccagctgaatttgtttctttattaaatcattgaacagctgtaaacaaataacaggaactcaggtgccaggcacggtagctcacacctgaaatccagcactttgggaggccgaggcaggtggatcatgaggtcaggagattgagaccatcctggctaacacggtgaaaccctgtct

SEQ ID NO: 91693 - DNA, 154 bp, Homo sapiens
caggagctcctctgtgcccgtcatcaccccctttatatcacacatattcgctctcattctgggctacctggtccctgtcagaagggaatgtttgagttgatgctctggtacaaccacagatgtggttttcagactctcttgcttttttgtgagc

SEQ ID NO: 91694 - DNA, 483 bp, Homo sapiens
ggtgaggaggagcagggagtaaatggaaggtgaagaaggaattgtctttctgcaagtaggaatggaagggaagggttgatgcttctaagggaacagcatgagcaatggtagggacacgatgagcctagccctactatgtattacagagcacacaaaatgagttagaccttggcaggggaaataaactatgtacagacagggaaggggaggaaaaggatgacagaagatgcagagaaattgggaaaggcttcgtagaagagataagtatttgagatagagcttaagagaaagttaaactttccaggagagatggtagtgggagagtccaagctaaaagaagaatctgataaaggatagaggtacaaaagtgaagaacatgcctggggaaccacaaaggcctcttttcctttctatttttagctgagtgcatgatggagaaagtagagaaattggagcccaattgtagagggccctgactaccat

SEQ ID NO: 91695 - DNA, 396 bp, Homo sapiens
agagtagattatagatgagtcagtagaggctgagtaccaatgaaaaatattcagcccaccatcaccatctcagttttacagatgagaaaactgaggctcagggagatgatggtagcttgtcctctgtggcacacatgggattggaatcccagcctgtacatctgaaaaaggtggagatagtgatagccctcatttaaataaactgtacttcagcccttactcagcattctccttgggaacaccaagagttggttcaatttggacaatacttaaaaccaaagcaacaccactgggaaatactttaaagtgcatttgtgtgtattgtgtgttgaggcgacataggtggcagggatgattagaatttagcatatattattcgtagatagagttttatag

SEQ ID NO: 91696 - DNA, 457 bp, Homo sapiens
gcaatggtgactcatgcctgtaatcccagcactttgaaaggccaaggctagaggatcgcttgagcccaggggtcaccccattttggatccctggctggtgcctgacacagaagagaggggctcatgagtcagtggctgttatatgtattgtgtatcagtgtgtgtaagtgtgtggcagccgagtgtccctgtttgtcaaatgttgggctattcttttttgtcttttgtttgttgtttttttctgttgttttgttttgtttttagacggattcttgctcttgttgcccaggctagagtgcagtggcatgatctcggcccactgcaaccccgcctcctgggttcaagcgattcttctgcttcagcctcctgagtagctgggattacaggcgcccatcaccatgctcgactaatttttgcatttttagtagagatggggcttcaccatcttggcccggct

SEQ ID NO: 91697 - DNA, 397 bp, Homo sapiens
aattgcttgaacctgggaggcagaggttgcagtgagcttggtgatcatgccactgcactacagcctgggcaacagagcaagactccatctcaaaaaaaaaaaaaaaaaagaaatatataactgcaatgtttagaaagggatatccaataatgcagattgaagataattgcaactttgtactggagtcagaggggaagaaataactttgatatgacatcaaaaactgtctgctaatggaatgtgtgaaggtgaaatcattttcccttagacccttgccattatcacgtgctttaaaaaacaggagatgctctttttaaagcaactgcatttttaaaatacatgcttagtaattaaatataaatttgctgatgcatataatgcattcaaagttggtaag

SEQ ID NO: 91698 - DNA, 299 bp, Homo sapiens
tggaagaaatttctaagcagcaaagaaatgaactgaaactggaacttatatttaaaagggaagcaaagcataaaagtttggaaaatttgcagcctggtcatgtggtaaaaaagaaaaggccattttcagaggaggaattcaagctggctgcataaatttgcataactaagagaaaagcaagtgctgatagccaagacaatgaaaaaaaaaatgccttgaaagcatttcagagacttgcttggcagctccttccatcacaggcctggaggcctaggagggaagaatcatttcctgagcca

SEQ ID NO: 91699 - DNA, 284 bp, Homo sapiens
gtggtgacaaccccctttgcgctgcctggggggaggccgctgcccagttctgtgatgggcggtgacaatttcagattctcttaatctggccgatgctttcggggaggtgaggtcctgtccctgcgtgtggcctcctcagtcttcccttctgtcccggtgtgcagggagcggctcctgtcgccagctcaacaggaccctaggcttgatggtcagaactcctgggactgccctgtgagccccctctaaggtcccagcattcaccctccactgctctggaagtgctg

SEQ ID NO: 91700 - DNA, 635 bp, Homo sapiens
  misc_feature (624)..(625): n is a, c, g, or t
tggaaaaagcacaggacttaaggatggaagtctagagtcatccaggtgatattgctttagtcaatcacttatctggacctcatctgtaatgccctctctagttctccagccccgacagtttaggaatccttatgaatcttcctttacataggatgtattctcaggttaggtatttggtaaaagtctccccttctctctacaaagtcatagaattctcatgagtaggttctttgccttattcaactttaaattccaagagccacagagccaagcacatggtaagcactcaaggtgtttgctgttgctgttgctttgttgtcacggacagtggtgatggtggtagtaatggtgtaaaagttcccctgaggtggtgacttccatgtgggttttattgcagatatgtaacttgctttagttatgcctgactgaggaaaattcagagatgagtgttttgggccagatcttcagaaggcagcctcccatttaacaggcacttatttatcatgctaacactatgtggtttgccataccaacattgaggatcatcttgctcaaggtaagtctgatgaagcctttttgaaaaataacaaaagaggaaaaaaaaaatccctcctggaaaataannaaaaccctgg

SEQ ID NO: 91701 - DNA, 184 bp, Homo sapiens
tgtaaatgcctaatagaagaaaaaggcaaccatactgattctttggatcaggcacaaatgaacacagcaacaccatgccttttctaggaaaaatagtgaattactttgacagcaacagggtattatgaagagagaccacaaagtacatagaacgtgctcaactcttattttacagactagcaca

SEQ ID NO: 91702 - DNA, 394 bp, Homo sapiens
cgagaccatcccagccaacttggcaaaacctttgtctctactaaaagtacaaaagttagctgcgcatagtggcacacgcctgtaatcatgcctggcccccagactacatttctgattttgttgacagttcataatgtggagaaattaattgtctggtgacatctgaaccacttaaaaagagtaaatggtgatacattatgggatgatcacacagttgtggtgaagcacaaatgaacagatttctagccttgttagttcagttctgcatctaaagtgaagaacctgcctttgtggtttctttagactcttcttgatgatacacagtacagcttggaggcctttaagcagaatagagcagagcagggaggcacaggttgttcagaagctttactag
